United States Patent Application Publication US 2005/0255487 A1 - sequence listing, part 42

SEQ ID NO: 1146752 - RNA, 19 nt, Homo sapiens
  misc_RNA (1)...(19): siRNA sense strand
ggugaaauggcuccagcaa

SEQ ID NO: 1146753 - RNA, 19 nt, Homo sapiens
  misc_RNA (1)...(19): siRNA sense strand
caaacaauuccuacugcau

SEQ ID NO: 1146754 - RNA, 19 nt, Homo sapiens
  misc_RNA (1)...(19): siRNA sense strand
uaucacagcaaaaccuuua

SEQ ID NO: 1146755 - RNA, 19 nt, Homo sapiens
  misc_RNA (1)...(19): siRNA sense strand
aacgaagggugaagagaca

SEQ ID NO: 1146756 - RNA, 19 nt, Homo sapiens
  misc_RNA (1)...(19): siRNA sense strand
gcaucagacccaacuacau

SEQ ID NO: 1146757 - RNA, 19 nt, Homo sapiens
  misc_RNA (1)...(19): siRNA sense strand
guacaaugccaaaauagga

SEQ ID NO: 1146758 - RNA, 19 nt, Homo sapiens
  misc_RNA (1)...(19): siRNA sense strand
gcaggcccuuuacuucaac

SEQ ID NO: 1146759 - RNA, 19 nt, Homo sapiens
  misc_RNA (1)...(19): siRNA sense strand
ccgcaggcccuuuacuuca

SEQ ID NO: 1146760 - RNA, 19 nt, Homo sapiens
  misc_RNA (1)...(19): siRNA sense strand
cgacgugaacggcaaugau

SEQ ID NO: 1146761 - RNA, 19 nt, Homo sapiens
  misc_RNA (1)...(19): siRNA sense strand
caccgagaauggcuacaag

SEQ ID NO: 1146762 - RNA, 19 nt, Homo sapiens
  misc_RNA (1)...(19): siRNA sense strand
cgugaacggcaaugauuau

SEQ ID NO: 1146763 - RNA, 19 nt, Homo sapiens
  misc_RNA (1)...(19): siRNA sense strand
gugacccgcaggcccuuua

SEQ ID NO: 1146764 - RNA, 19 nt, Homo sapiens
  misc_RNA (1)...(19): siRNA sense strand
ccuuggcucuagaagcaaa

SEQ ID NO: 1146765 - RNA, 19 nt, Homo sapiens
  misc_RNA (1)...(19): siRNA sense strand
gcaacaggaagugaaacga

SEQ ID NO: 1146766 - RNA, 19 nt, Homo sapiens
  misc_RNA (1)...(19): siRNA sense strand
ugcgauggcuacaccaaca

SEQ ID NO: 1146767 - RNA, 19 nt, Homo sapiens
  misc_RNA (1)...(19): siRNA sense strand
ccaccgagaauggcuacaa

SEQ ID NO: 1146768 - RNA, 19 nt, Homo sapiens
  misc_RNA (1)...(19): siRNA sense strand
ccaacuacaucgacauuua

SEQ ID NO: 1146769 - RNA, 19 nt, Homo sapiens
  misc_RNA (1)...(19): siRNA sense strand
uuggaaaccuggaagauua

SEQ ID NO: 1146770 - RNA, 19 nt, Homo sapiens
  misc_RNA (1)...(19): siRNA sense strand
ugaaauggcuccagcaaca

SEQ ID NO: 1146771 - RNA, 19 nt, Homo sapiens
  misc_RNA (1)...(19): siRNA sense strand
ggacggcgaugucacagau

SEQ ID NO: 1146772 - RNA, 19 nt, Homo sapiens
  misc_RNA (1)...(19): siRNA sense strand
gaagcaaacagccaguuaa

SEQ ID NO: 1146773 - RNA, 19 nt, Homo sapiens
  misc_RNA (1)...(19): siRNA sense strand
gaacggcaaugauuaugac

SEQ ID NO: 1146774 - RNA, 19 nt, Homo sapiens
  misc_RNA (1)...(19): siRNA sense strand
gcgagcgacuggaaaguga

SEQ ID NO: 1146775 - RNA, 19 nt, Homo sapiens
  misc_RNA (1)...(19): siRNA sense strand
ccucacaccuuccucagaa

SEQ ID NO: 1146776 - RNA, 19 nt, Homo sapiens
  misc_RNA (1)...(19): siRNA sense strand
gauaugaugccagcaauga

SEQ ID NO: 1146777 - RNA, 19 nt, Homo sapiens
  misc_RNA (1)...(19): siRNA sense strand
ugacccaucuccacgauau

SEQ ID NO: 1146778 - RNA, 19 nt, Homo sapiens
  misc_RNA (1)...(19): siRNA sense strand
caacaggaagugaaacgaa

SEQ ID NO: 1146779 - RNA, 19 nt, Homo sapiens
  misc_RNA (1)...(19): siRNA sense strand
gaaagcgagcgacuggaaa

SEQ ID NO: 1146780 - RNA, 19 nt, Homo sapiens
  misc_RNA (1)...(19): siRNA sense strand
gcaaacagccaguuaaccu

SEQ ID NO: 1146781 - RNA, 19 nt, Homo sapiens
  misc_RNA (1)...(19): siRNA sense strand
agagacaggugcgaaguga

SEQ ID NO: 1146782 - RNA, 19 nt, Homo sapiens
  misc_RNA (1)...(19): siRNA sense strand
gacgugaacggcaaugauu

SEQ ID NO: 1146783 - RNA, 19 nt, Homo sapiens
  misc_RNA (1)...(19): siRNA sense strand
gaugauggcauagagagaa

SEQ ID NO: 1146784 - RNA, 19 nt, Homo sapiens
  misc_RNA (1)...(19): siRNA sense strand
cagauguggucgaggcaaa

SEQ ID NO: 1146785 - RNA, 19 nt, Homo sapiens
  misc_RNA (1)...(19): siRNA sense strand
agaagcaaacagccaguua

SEQ ID NO: 1146786 - RNA, 19 nt, Homo sapiens
  misc_RNA (1)...(19): siRNA sense strand
caaagucgcugggcaucag

SEQ ID NO: 1146787 - RNA, 19 nt, Homo sapiens
  misc_RNA (1)...(19): siRNA sense strand
gaaacgaagggugaagaga

SEQ ID NO: 1146788 - RNA, 19 nt, Homo sapiens
  misc_RNA (1)...(19): siRNA sense strand
caucagacccaacuacauc

SEQ ID NO: 1146789 - RNA, 19 nt, Homo sapiens
  misc_RNA (1)...(19): siRNA sense strand
ugaaagcgagcgacuggaa

SEQ ID NO: 1146790 - RNA, 19 nt, Homo sapiens
  misc_RNA (1)...(19): siRNA sense strand
gaagagacaggugcgaagu

SEQ ID NO: 1146791 - RNA, 19 nt, Homo sapiens
  misc_RNA (1)...(19): siRNA sense strand
caucaucgccuuggcucua

SEQ ID NO: 1146792 - RNA, 19 nt, Homo sapiens
  misc_RNA (1)...(19): siRNA sense strand
ccuggaagauuacuaccau

SEQ ID NO: 1146793 - RNA, 19 nt, Homo sapiens
  misc_RNA (1)...(19): siRNA sense strand
uuucgaguauggcauuaaa

SEQ ID NO: 1146794 - RNA, 19 nt, Homo sapiens
  misc_RNA (1)...(19): siRNA sense strand
uaugaugccagcaaugaaa

SEQ ID NO: 1146795 - RNA, 19 nt, Homo sapiens
  misc_RNA (1)...(19): siRNA sense strand
gaaaccuggaagauuacua

SEQ ID NO: 1146796 - RNA, 19 nt, Homo sapiens
  misc_RNA (1)...(19): siRNA sense strand
cgccuuggcucuagaagca

SEQ ID NO: 1146797 - RNA, 19 nt, Homo sapiens
  misc_RNA (1)...(19): siRNA sense strand
gcaguggggccuuuuauga

SEQ ID NO: 1146798 - RNA, 19 nt, Homo sapiens
  misc_RNA (1)...(19): siRNA sense strand
uggaagauuacuaccauuu

SEQ ID NO: 1146799 - RNA, 19 nt, Homo sapiens
  misc_RNA (1)...(19): siRNA sense strand
cagcaaacaauuccuacug

SEQ ID NO: 1146800 - RNA, 19 nt, Homo sapiens
  misc_RNA (1)...(19): siRNA sense strand
cagcagcgccaccgagaau

SEQ ID NO: 1146801 - RNA, 19 nt, Homo sapiens
  misc_RNA (1)...(19): siRNA sense strand
ugaacggcaaugauuauga

SEQ ID NO: 1146802 - RNA, 19 nt, Homo sapiens
  misc_RNA (1)...(19): siRNA sense strand
caacuacaucgacauuuac

SEQ ID NO: 1146803 - RNA, 19 nt, Homo sapiens
  misc_RNA (1)...(19): siRNA sense strand
aaacacggcacucguugug

SEQ ID NO: 1146804 - RNA, 19 nt, Homo sapiens
  misc_RNA (1)...(19): siRNA sense strand
ggaagauuacuaccauuuu

SEQ ID NO: 1146805 - RNA, 19 nt, Homo sapiens
  misc_RNA (1)...(19): siRNA sense strand
caacuugggccagauugga

SEQ ID NO: 1146806 - RNA, 19 nt, Homo sapiens
  misc_RNA (1)...(19): siRNA sense strand
gaucugcgucagcgcugua

SEQ ID NO: 1146807 - RNA, 19 nt, Homo sapiens
  misc_RNA (1)...(19): siRNA sense strand
cgcaggcccuuuacuucaa

SEQ ID NO: 1146808 - RNA, 19 nt, Homo sapiens
  misc_RNA (1)...(19): siRNA sense strand
ccaacagcaucuacaccau

SEQ ID NO: 1146809 - RNA, 19 nt, Homo sapiens
  misc_RNA (1)...(19): siRNA sense strand
cuacaucgacauuuacagu

SEQ ID NO: 1146810 - RNA, 19 nt, Homo sapiens
  misc_RNA (1)...(19): siRNA sense strand
ccagcaacaggaagugaaa

SEQ ID NO: 1146811 - RNA, 19 nt, Homo sapiens
  misc_RNA (1)...(19): siRNA sense strand
gcuuucgaguauggcauua

SEQ ID NO: 1146812 - RNA, 19 nt, Homo sapiens
  misc_RNA (1)...(19): siRNA sense strand
aauaaacacggcacucguu

SEQ ID NO: 1146813 - RNA, 19 nt, Homo sapiens
  misc_RNA (1)...(19): siRNA sense strand
caaugauuaugacccaucu

SEQ ID NO: 1146814 - RNA, 19 nt, Homo sapiens
  misc_RNA (1)...(19): siRNA sense strand
caacaugugguaccugcau

SEQ ID NO: 1146815 - RNA, 19 nt, Homo sapiens
  misc_RNA (1)...(19): siRNA sense strand
gcaaagucgcugggcauca

SEQ ID NO: 1146816 - RNA, 19 nt, Homo sapiens
  misc_RNA (1)...(19): siRNA sense strand
ggugaaauggcuccagcaa

SEQ ID NO: 1146817 - RNA, 19 nt, Homo sapiens
  misc_RNA (1)...(19): siRNA sense strand
caaacaauuccuacugcau

SEQ ID NO: 1146818 - RNA, 19 nt, Homo sapiens
  misc_RNA (1)...(19): siRNA sense strand
uaucacagcaaaaccuuua

SEQ ID NO: 1146819 - RNA, 19 nt, Homo sapiens
  misc_RNA (1)...(19): siRNA sense strand
aacgaagggugaagagaca

SEQ ID NO: 1146820 - RNA, 19 nt, Homo sapiens
  misc_RNA (1)...(19): siRNA sense strand
gcaucagacccaacuacau

SEQ ID NO: 1146821 - RNA, 19 nt, Homo sapiens
  misc_RNA (1)...(19): siRNA sense strand
guacaaugccaaaauagga

SEQ ID NO: 1146822 - RNA, 19 nt, Homo sapiens
  misc_RNA (1)...(19): siRNA sense strand
gcaggcccuuuacuucaac

SEQ ID NO: 1146823 - RNA, 19 nt, Homo sapiens
  misc_RNA (1)...(19): siRNA sense strand
ccgcaggcccuuuacuuca

SEQ ID NO: 1146824 - RNA, 19 nt, Homo sapiens
  misc_RNA (1)...(19): siRNA sense strand
cgacgugaacggcaaugau

SEQ ID NO: 1146825 - RNA, 19 nt, Homo sapiens
  misc_RNA (1)...(19): siRNA sense strand
caccgagaauggcuacaag

SEQ ID NO: 1146826 - RNA, 19 nt, Homo sapiens
  misc_RNA (1)...(19): siRNA sense strand
cgugaacggcaaugauuau

SEQ ID NO: 1146827 - RNA, 19 nt, Homo sapiens
  misc_RNA (1)...(19): siRNA sense strand
gugacccgcaggcccuuua

SEQ ID NO: 1146828 - RNA, 19 nt, Homo sapiens
  misc_RNA (1)...(19): siRNA sense strand
ccuuggcucuagaagcaaa

SEQ ID NO: 1146829 - RNA, 19 nt, Homo sapiens
  misc_RNA (1)...(19): siRNA sense strand
gcaacaggaagugaaacga

SEQ ID NO: 1146830 - RNA, 19 nt, Homo sapiens
  misc_RNA (1)...(19): siRNA sense strand
ugcgauggcuacaccaaca

SEQ ID NO: 1146831 - RNA, 19 nt, Homo sapiens
  misc_RNA (1)...(19): siRNA sense strand
ccaccgagaauggcuacaa

SEQ ID NO: 1146832 - RNA, 19 nt, Homo sapiens
  misc_RNA (1)...(19): siRNA sense strand
ccaacuacaucgacauuua

SEQ ID NO: 1146833 - RNA, 19 nt, Homo sapiens
  misc_RNA (1)...(19): siRNA sense strand
uuggaaaccuggaagauua

SEQ ID NO: 1146834 - RNA, 19 nt, Homo sapiens
  misc_RNA (1)...(19): siRNA sense strand
ugaaauggcuccagcaaca

SEQ ID NO: 1146835 - RNA, 19 nt, Homo sapiens
  misc_RNA (1)...(19): siRNA sense strand
ggacggcgaugucacagau

SEQ ID NO: 1146836 - RNA, 19 nt, Homo sapiens
  misc_RNA (1)...(19): siRNA sense strand
gaagcaaacagccaguuaa

SEQ ID NO: 1146837 - RNA, 19 nt, Homo sapiens
  misc_RNA (1)...(19): siRNA sense strand
gaacggcaaugauuaugac

SEQ ID NO: 1146838 - RNA, 19 nt, Homo sapiens
  misc_RNA (1)...(19): siRNA sense strand
gcgagcgacuggaaaguga

SEQ ID NO: 1146839 - RNA, 19 nt, Homo sapiens
  misc_RNA (1)...(19): siRNA sense strand
ccucacaccuuccucagaa

SEQ ID NO: 1146840 - RNA, 19 nt, Homo sapiens
  misc_RNA (1)...(19): siRNA sense strand
gauaugaugccagcaauga

SEQ ID NO: 1146841 - RNA, 19 nt, Homo sapiens
  misc_RNA (1)...(19): siRNA sense strand
ugacccaucuccacgauau

SEQ ID NO: 1146842 - RNA, 19 nt, Homo sapiens
  misc_RNA (1)...(19): siRNA sense strand
caacaggaagugaaacgaa

SEQ ID NO: 1146843 - RNA, 19 nt, Homo sapiens
  misc_RNA (1)...(19): siRNA sense strand
gaaagcgagcgacuggaaa

SEQ ID NO: 1146844 - RNA, 19 nt, Homo sapiens
  misc_RNA (1)...(19): siRNA sense strand
gcaaacagccaguuaaccu

SEQ ID NO: 1146845 - RNA, 19 nt, Homo sapiens
  misc_RNA (1)...(19): siRNA sense strand
agagacaggugcgaaguga

SEQ ID NO: 1146846 - RNA, 19 nt, Homo sapiens
  misc_RNA (1)...(19): siRNA sense strand
gacgugaacggcaaugauu

SEQ ID NO: 1146847 - RNA, 19 nt, Homo sapiens
  misc_RNA (1)...(19): siRNA sense strand
gaugauggcauagagagaa

SEQ ID NO: 1146848 - RNA, 19 nt, Homo sapiens
  misc_RNA (1)...(19): siRNA sense strand
cagauguggucgaggcaaa

SEQ ID NO: 1146849 - RNA, 19 nt, Homo sapiens
  misc_RNA (1)...(19): siRNA sense strand
agaagcaaacagccaguua

SEQ ID NO: 1146850 - RNA, 19 nt, Homo sapiens
  misc_RNA (1)...(19): siRNA sense strand
caaagucgcugggcaucag

SEQ ID NO: 1146851 - RNA, 19 nt, Homo sapiens
  misc_RNA (1)...(19): siRNA sense strand
gaaacgaagggugaagaga

SEQ ID NO: 1146852 - RNA, 19 nt, Homo sapiens
  misc_RNA (1)...(19): siRNA sense strand
caucagacccaacuacauc

SEQ ID NO: 1146853 - RNA, 19 nt, Homo sapiens
  misc_RNA (1)...(19): siRNA sense strand
ugaaagcgagcgacuggaa

SEQ ID NO: 1146854 - RNA, 19 nt, Homo sapiens
  misc_RNA (1)...(19): siRNA sense strand
gaagagacaggugcgaagu

SEQ ID NO: 1146855 - RNA, 19 nt, Homo sapiens
  misc_RNA (1)...(19): siRNA sense strand
caucaucgccuuggcucua

SEQ ID NO: 1146856 - RNA, 19 nt, Homo sapiens
  misc_RNA (1)...(19): siRNA sense strand
ccuggaagauuacuaccau

SEQ ID NO: 1146857 - RNA, 19 nt, Homo sapiens
  misc_RNA (1)...(19): siRNA sense strand
uuucgaguauggcauuaaa

SEQ ID NO: 1146858 - RNA, 19 nt, Homo sapiens
  misc_RNA (1)...(19): siRNA sense strand
uaugaugccagcaaugaaa

SEQ ID NO: 1146859 - RNA, 19 nt, Homo sapiens
  misc_RNA (1)...(19): siRNA sense strand
gaaaccuggaagauuacua

SEQ ID NO: 1146860 - RNA, 19 nt, Homo sapiens
  misc_RNA (1)...(19): siRNA sense strand
cgccuuggcucuagaagca

SEQ ID NO: 1146861 - RNA, 19 nt, Homo sapiens
  misc_RNA (1)...(19): siRNA sense strand
gcaguggggccuuuuauga

SEQ ID NO: 1146862 - RNA, 19 nt, Homo sapiens
  misc_RNA (1)...(19): siRNA sense strand
uggaagauuacuaccauuu

SEQ ID NO: 1146863 - RNA, 19 nt, Homo sapiens
  misc_RNA (1)...(19): siRNA sense strand
cagcaaacaauuccuacug

SEQ ID NO: 1146864 - RNA, 19 nt, Homo sapiens
  misc_RNA (1)...(19): siRNA sense strand
cagcagcgccaccgagaau

SEQ ID NO: 1146865 - RNA, 19 nt, Homo sapiens
  misc_RNA (1)...(19): siRNA sense strand
ugaacggcaaugauuauga

SEQ ID NO: 1146866 - RNA, 19 nt, Homo sapiens
  misc_RNA (1)...(19): siRNA sense strand
caacuacaucgacauuuac

SEQ ID NO: 1146867 - RNA, 19 nt, Homo sapiens
  misc_RNA (1)...(19): siRNA sense strand
aaacacggcacucguugug

SEQ ID NO: 1146868 - RNA, 19 nt, Homo sapiens
  misc_RNA (1)...(19): siRNA sense strand
ggaagauuacuaccauuuu

SEQ ID NO: 1146869 - RNA, 19 nt, Homo sapiens
  misc_RNA (1)...(19): siRNA sense strand
caacuugggccagauugga

SEQ ID NO: 1146870 - RNA, 19 nt, Homo sapiens
  misc_RNA (1)...(19): siRNA sense strand
gaucugcgucagcgcugua

SEQ ID NO: 1146871 - RNA, 19 nt, Homo sapiens
  misc_RNA (1)...(19): siRNA sense strand
cgcaggcccuuuacuucaa

SEQ ID NO: 1146872 - RNA, 19 nt, Homo sapiens
  misc_RNA (1)...(19): siRNA sense strand
ccaacagcaucuacaccau

SEQ ID NO: 1146873 - RNA, 19 nt, Homo sapiens
  misc_RNA (1)...(19): siRNA sense strand
cuacaucgacauuuacagu

SEQ ID NO: 1146874 - RNA, 19 nt, Homo sapiens
  misc_RNA (1)...(19): siRNA sense strand
ccagcaacaggaagugaaa

SEQ ID NO: 1146875 - RNA, 19 nt, Homo sapiens
  misc_RNA (1)...(19): siRNA sense strand
gcuuucgaguauggcauua

SEQ ID NO: 1146876 - RNA, 19 nt, Homo sapiens
  misc_RNA (1)...(19): siRNA sense strand
aauaaacacggcacucguu

SEQ ID NO: 1146877 - RNA, 19 nt, Homo sapiens
  misc_RNA (1)...(19): siRNA sense strand
caaugauuaugacccaucu

SEQ ID NO: 1146878 - RNA, 19 nt, Homo sapiens
  misc_RNA (1)...(19): siRNA sense strand
caacaugugguaccugcau

SEQ ID NO: 1146879 - RNA, 19 nt, Homo sapiens
  misc_RNA (1)...(19): siRNA sense strand
gcaaagucgcugggcauca

SEQ ID NO: 1146880 - RNA, 19 nt, Homo sapiens
  misc_RNA (1)...(19): siRNA sense strand
ggugaaauggcuccagcaa

SEQ ID NO: 1146881 - RNA, 19 nt, Homo sapiens
  misc_RNA (1)...(19): siRNA sense strand
caaacaauuccuacugcau

SEQ ID NO: 1146882 - RNA, 19 nt, Homo sapiens
  misc_RNA (1)...(19): siRNA sense strand
uaucacagcaaaaccuuua

SEQ ID NO: 1146883 - RNA, 19 nt, Homo sapiens
  misc_RNA (1)...(19): siRNA sense strand
aacgaagggugaagagaca

SEQ ID NO: 1146884 - RNA, 19 nt, Homo sapiens
  misc_RNA (1)...(19): siRNA sense strand
gcaucagacccaacuacau

SEQ ID NO: 1146885 - RNA, 19 nt, Homo sapiens
  misc_RNA (1)...(19): siRNA sense strand
guacaaugccaaaauagga

SEQ ID NO: 1146886 - RNA, 19 nt, Homo sapiens
  misc_RNA (1)...(19): siRNA sense strand
gcaggcccuuuacuucaac

SEQ ID NO: 1146887 - RNA, 19 nt, Homo sapiens
  misc_RNA (1)...(19): siRNA sense strand
ccgcaggcccuuuacuuca

SEQ ID NO: 1146888 - RNA, 19 nt, Homo sapiens
  misc_RNA (1)...(19): siRNA sense strand
cgacgugaacggcaaugau

SEQ ID NO: 1146889 - RNA, 19 nt, Homo sapiens
  misc_RNA (1)...(19): siRNA sense strand
caccgagaauggcuacaag

SEQ ID NO: 1146890 - RNA, 19 nt, Homo sapiens
  misc_RNA (1)...(19): siRNA sense strand
cgugaacggcaaugauuau

SEQ ID NO: 1146891 - RNA, 19 nt, Homo sapiens
  misc_RNA (1)...(19): siRNA sense strand
gugacccgcaggcccuuua

SEQ ID NO: 1146892 - RNA, 19 nt, Homo sapiens
  misc_RNA (1)...(19): siRNA sense strand
ccuuggcucuagaagcaaa

SEQ ID NO: 1146893 - RNA, 19 nt, Homo sapiens
  misc_RNA (1)...(19): siRNA sense strand
gcaacaggaagugaaacga

SEQ ID NO: 1146894 - RNA, 19 nt, Homo sapiens
  misc_RNA (1)...(19): siRNA sense strand
ugcgauggcuacaccaaca

SEQ ID NO: 1146895 - RNA, 19 nt, Homo sapiens
  misc_RNA (1)...(19): siRNA sense strand
ccaccgagaauggcuacaa

SEQ ID NO: 1146896 - RNA, 19 nt, Homo sapiens
  misc_RNA (1)...(19): siRNA sense strand
ccaacuacaucgacauuua

SEQ ID NO: 1146897 - RNA, 19 nt, Homo sapiens
  misc_RNA (1)...(19): siRNA sense strand
uuggaaaccuggaagauua

SEQ ID NO: 1146898 - RNA, 19 nt, Homo sapiens
  misc_RNA (1)...(19): siRNA sense strand
ugaaauggcuccagcaaca

SEQ ID NO: 1146899 - RNA, 19 nt, Homo sapiens
  misc_RNA (1)...(19): siRNA sense strand
ggacggcgaugucacagau

SEQ ID NO: 1146900 - RNA, 19 nt, Homo sapiens
  misc_RNA (1)...(19): siRNA sense strand
gaagcaaacagccaguuaa

SEQ ID NO: 1146901 - RNA, 19 nt, Homo sapiens
  misc_RNA (1)...(19): siRNA sense strand
gaacggcaaugauuaugac

SEQ ID NO: 1146902 - RNA, 19 nt, Homo sapiens
  misc_RNA (1)...(19): siRNA sense strand
gcgagcgacuggaaaguga

SEQ ID NO: 1146903 - RNA, 19 nt, Homo sapiens
  misc_RNA (1)...(19): siRNA sense strand
ccucacaccuuccucagaa

SEQ ID NO: 1146904 - RNA, 19 nt, Homo sapiens
  misc_RNA (1)...(19): siRNA sense strand
gauaugaugccagcaauga

SEQ ID NO: 1146905 - RNA, 19 nt, Homo sapiens
  misc_RNA (1)...(19): siRNA sense strand
ugacccaucuccacgauau

SEQ ID NO: 1146906 - RNA, 19 nt, Homo sapiens
  misc_RNA (1)...(19): siRNA sense strand
caacaggaagugaaacgaa

SEQ ID NO: 1146907 - RNA, 19 nt, Homo sapiens
  misc_RNA (1)...(19): siRNA sense strand
gaaagcgagcgacuggaaa

SEQ ID NO: 1146908 - RNA, 19 nt, Homo sapiens
  misc_RNA (1)...(19): siRNA sense strand
gcaaacagccaguuaaccu

SEQ ID NO: 1146909 - RNA, 19 nt, Homo sapiens
  misc_RNA (1)...(19): siRNA sense strand
agagacaggugcgaaguga

SEQ ID NO: 1146910 - RNA, 19 nt, Homo sapiens
  misc_RNA (1)...(19): siRNA sense strand
gacgugaacggcaaugauu

SEQ ID NO: 1146911 - RNA, 19 nt, Homo sapiens
  misc_RNA (1)...(19): siRNA sense strand
gaugauggcauagagagaa

SEQ ID NO: 1146912 - RNA, 19 nt, Homo sapiens
  misc_RNA (1)...(19): siRNA sense strand
cagauguggucgaggcaaa

SEQ ID NO: 1146913 - RNA, 19 nt, Homo sapiens
  misc_RNA (1)...(19): siRNA sense strand
agaagcaaacagccaguua

SEQ ID NO: 1146914 - RNA, 19 nt, Homo sapiens
  misc_RNA (1)...(19): siRNA sense strand
caaagucgcugggcaucag

SEQ ID NO: 1146915 - RNA, 19 nt, Homo sapiens
  misc_RNA (1)...(19): siRNA sense strand
gaaacgaagggugaagaga

SEQ ID NO: 1146916 - RNA, 19 nt, Homo sapiens
  misc_RNA (1)...(19): siRNA sense strand
caucagacccaacuacauc

SEQ ID NO: 1146917 - RNA, 19 nt, Homo sapiens
  misc_RNA (1)...(19): siRNA sense strand
ugaaagcgagcgacuggaa

SEQ ID NO: 1146918 - RNA, 19 nt, Homo sapiens
  misc_RNA (1)...(19): siRNA sense strand
gaagagacaggugcgaagu

SEQ ID NO: 1146919 - RNA, 19 nt, Homo sapiens
  misc_RNA (1)...(19): siRNA sense strand
caucaucgccuuggcucua

SEQ ID NO: 1146920 - RNA, 19 nt, Homo sapiens
  misc_RNA (1)...(19): siRNA sense strand
ccuggaagauuacuaccau

SEQ ID NO: 1146921 - RNA, 19 nt, Homo sapiens
  misc_RNA (1)...(19): siRNA sense strand
uuucgaguauggcauuaaa

SEQ ID NO: 1146922 - RNA, 19 nt, Homo sapiens
  misc_RNA (1)...(19): siRNA sense strand
uaugaugccagcaaugaaa

SEQ ID NO: 1146923 - RNA, 19 nt, Homo sapiens
  misc_RNA (1)...(19): siRNA sense strand
gaaaccuggaagauuacua

SEQ ID NO: 1146924 - RNA, 19 nt, Homo sapiens
  misc_RNA (1)...(19): siRNA sense strand
cgccuuggcucuagaagca

SEQ ID NO: 1146925 - RNA, 19 nt, Homo sapiens
  misc_RNA (1)...(19): siRNA sense strand
gcaguggggccuuuuauga

SEQ ID NO: 1146926 - RNA, 19 nt, Homo sapiens
  misc_RNA (1)...(19): siRNA sense strand
uggaagauuacuaccauuu

SEQ ID NO: 1146927 - RNA, 19 nt, Homo sapiens
  misc_RNA (1)...(19): siRNA sense strand
cagcaaacaauuccuacug

SEQ ID NO: 1146928 - RNA, 19 nt, Homo sapiens
  misc_RNA (1)...(19): siRNA sense strand
cagcagcgccaccgagaau

SEQ ID NO: 1146929 - RNA, 19 nt, Homo sapiens
  misc_RNA (1)...(19): siRNA sense strand
ugaacggcaaugauuauga

SEQ ID NO: 1146930 - RNA, 19 nt, Homo sapiens
  misc_RNA (1)...(19): siRNA sense strand
caacuacaucgacauuuac

SEQ ID NO: 1146931 - RNA, 19 nt, Homo sapiens
  misc_RNA (1)...(19): siRNA sense strand
aaacacggcacucguugug

SEQ ID NO: 1146932 - RNA, 19 nt, Homo sapiens
  misc_RNA (1)...(19): siRNA sense strand
ggaagauuacuaccauuuu

SEQ ID NO: 1146933 - RNA, 19 nt, Homo sapiens
  misc_RNA (1)...(19): siRNA sense strand
caacuugggccagauugga

SEQ ID NO: 1146934 - RNA, 19 nt, Homo sapiens
  misc_RNA (1)...(19): siRNA sense strand
gaucugcgucagcgcugua

SEQ ID NO: 1146935 - RNA, 19 nt, Homo sapiens
  misc_RNA (1)...(19): siRNA sense strand
cgcaggcccuuuacuucaa

SEQ ID NO: 1146936 - RNA, 19 nt, Homo sapiens
  misc_RNA (1)...(19): siRNA sense strand
ccaacagcaucuacaccau

SEQ ID NO: 1146937 - RNA, 19 nt, Homo sapiens
  misc_RNA (1)...(19): siRNA sense strand
cuacaucgacauuuacagu

SEQ ID NO: 1146938 - RNA, 19 nt, Homo sapiens
  misc_RNA (1)...(19): siRNA sense strand
ccagcaacaggaagugaaa

SEQ ID NO: 1146939 - RNA, 19 nt, Homo sapiens
  misc_RNA (1)...(19): siRNA sense strand
gcuuucgaguauggcauua

SEQ ID NO: 1146940 - RNA, 19 nt, Homo sapiens
  misc_RNA (1)...(19): siRNA sense strand
aauaaacacggcacucguu

SEQ ID NO: 1146941 - RNA, 19 nt, Homo sapiens
  misc_RNA (1)...(19): siRNA sense strand
caaugauuaugacccaucu

SEQ ID NO: 1146942 - RNA, 19 nt, Homo sapiens
  misc_RNA (1)...(19): siRNA sense strand
caacaugugguaccugcau

SEQ ID NO: 1146943 - RNA, 19 nt, Homo sapiens
  misc_RNA (1)...(19): siRNA sense strand
gcaaagucgcugggcauca

SEQ ID NO: 1146944 - RNA, 19 nt, Homo sapiens
  misc_RNA (1)...(19): siRNA sense strand
ggugaaauggcuccagcaa

SEQ ID NO: 1146945 - RNA, 19 nt, Homo sapiens
  misc_RNA (1)...(19): siRNA sense strand
caaacaauuccuacugcau

SEQ ID NO: 1146946 - RNA, 19 nt, Homo sapiens
  misc_RNA (1)...(19): siRNA sense strand
uaucacagcaaaaccuuua

SEQ ID NO: 1146947 - RNA, 19 nt, Homo sapiens
  misc_RNA (1)...(19): siRNA sense strand
aacgaagggugaagagaca

SEQ ID NO: 1146948 - RNA, 19 nt, Homo sapiens
  misc_RNA (1)...(19): siRNA sense strand
gcaucagacccaacuacau

SEQ ID NO: 1146949 - RNA, 19 nt, Homo sapiens
  misc_RNA (1)...(19): siRNA sense strand
guacaaugccaaaauagga

SEQ ID NO: 1146950 - RNA, 19 nt, Homo sapiens
  misc_RNA (1)...(19): siRNA sense strand
gcaggcccuuuacuucaac

SEQ ID NO: 1146951 - RNA, 19 nt, Homo sapiens
  misc_RNA (1)...(19): siRNA sense strand
ccgcaggcccuuuacuuca

SEQ ID NO: 1146952 - RNA, 19 nt, Homo sapiens
  misc_RNA (1)...(19): siRNA sense strand
cgacgugaacggcaaugau

SEQ ID NO: 1146953 - RNA, 19 nt, Homo sapiens
  misc_RNA (1)...(19): siRNA sense strand
caccgagaauggcuacaag

SEQ ID NO: 1146954 - RNA, 19 nt, Homo sapiens
  misc_RNA (1)...(19): siRNA sense strand
cgugaacggcaaugauuau

SEQ ID NO: 1146955 - RNA, 19 nt, Homo sapiens
  misc_RNA (1)...(19): siRNA sense strand
gugacccgcaggcccuuua

SEQ ID NO: 1146956 - RNA, 19 nt, Homo sapiens
  misc_RNA (1)...(19): siRNA sense strand
ccuuggcucuagaagcaaa

SEQ ID NO: 1146957 - RNA, 19 nt, Homo sapiens
  misc_RNA (1)...(19): siRNA sense strand
gcaacaggaagugaaacga

SEQ ID NO: 1146958 - RNA, 19 nt, Homo sapiens
  misc_RNA (1)...(19): siRNA sense strand
ugcgauggcuacaccaaca

SEQ ID NO: 1146959 - RNA, 19 nt, Homo sapiens
  misc_RNA (1)...(19): siRNA sense strand
ccaccgagaauggcuacaa

SEQ ID NO: 1146960 - RNA, 19 nt, Homo sapiens
  misc_RNA (1)...(19): siRNA sense strand
ccaacuacaucgacauuua

SEQ ID NO: 1146961 - RNA, 19 nt, Homo sapiens
  misc_RNA (1)...(19): siRNA sense strand
uuggaaaccuggaagauua

SEQ ID NO: 1146962 - RNA, 19 nt, Homo sapiens
  misc_RNA (1)...(19): siRNA sense strand
ugaaauggcuccagcaaca

SEQ ID NO: 1146963 - RNA, 19 nt, Homo sapiens
  misc_RNA (1)...(19): siRNA sense strand
ggacggcgaugucacagau

SEQ ID NO: 1146964 - RNA, 19 nt, Homo sapiens
  misc_RNA (1)...(19): siRNA sense strand
gaagcaaacagccaguuaa

SEQ ID NO: 1146965 - RNA, 19 nt, Homo sapiens
  misc_RNA (1)...(19): siRNA sense strand
gaacggcaaugauuaugac

SEQ ID NO: 1146966 - RNA, 19 nt, Homo sapiens
  misc_RNA (1)...(19): siRNA sense strand
gcgagcgacuggaaaguga

SEQ ID NO: 1146967 - RNA, 19 nt, Homo sapiens
  misc_RNA (1)...(19): siRNA sense strand
ccucacaccuuccucagaa

SEQ ID NO: 1146968 - RNA, 19 nt, Homo sapiens
  misc_RNA (1)...(19): siRNA sense strand
gauaugaugccagcaauga

SEQ ID NO: 1146969 - RNA, 19 nt, Homo sapiens
  misc_RNA (1)...(19): siRNA sense strand
ugacccaucuccacgauau

SEQ ID NO: 1146970 - RNA, 19 nt, Homo sapiens
  misc_RNA (1)...(19): siRNA sense strand
caacaggaagugaaacgaa

SEQ ID NO: 1146971 - RNA, 19 nt, Homo sapiens
  misc_RNA (1)...(19): siRNA sense strand
gaaagcgagcgacuggaaa

SEQ ID NO: 1146972 - RNA, 19 nt, Homo sapiens
  misc_RNA (1)...(19): siRNA sense strand
gcaaacagccaguuaaccu

SEQ ID NO: 1146973 - RNA, 19 nt, Homo sapiens
  misc_RNA (1)...(19): siRNA sense strand
agagacaggugcgaaguga

SEQ ID NO: 1146974 - RNA, 19 nt, Homo sapiens
  misc_RNA (1)...(19): siRNA sense strand
gacgugaacggcaaugauu

SEQ ID NO: 1146975 - RNA, 19 nt, Homo sapiens
  misc_RNA (1)...(19): siRNA sense strand
gaugauggcauagagagaa

SEQ ID NO: 1146976 - RNA, 19 nt, Homo sapiens
  misc_RNA (1)...(19): siRNA sense strand
cagauguggucgaggcaaa

SEQ ID NO: 1146977 - RNA, 19 nt, Homo sapiens
  misc_RNA (1)...(19): siRNA sense strand
agaagcaaacagccaguua

SEQ ID NO: 1146978 - RNA, 19 nt, Homo sapiens
  misc_RNA (1)...(19): siRNA sense strand
caaagucgcugggcaucag

SEQ ID NO: 1146979 - RNA, 19 nt, Homo sapiens
  misc_RNA (1)...(19): siRNA sense strand
gaaacgaagggugaagaga

SEQ ID NO: 1146980 - RNA, 19 nt, Homo sapiens
  misc_RNA (1)...(19): siRNA sense strand
caucagacccaacuacauc

SEQ ID NO: 1146981 - RNA, 19 nt, Homo sapiens
  misc_RNA (1)...(19): siRNA sense strand
ugaaagcgagcgacuggaa

SEQ ID NO: 1146982 - RNA, 19 nt, Homo sapiens
  misc_RNA (1)...(19): siRNA sense strand
gaagagacaggugcgaagu

SEQ ID NO: 1146983 - RNA, 19 nt, Homo sapiens
  misc_RNA (1)...(19): siRNA sense strand
caucaucgccuuggcucua

SEQ ID NO: 1146984 - RNA, 19 nt, Homo sapiens
  misc_RNA (1)...(19): siRNA sense strand
ccuggaagauuacuaccau

SEQ ID NO: 1146985 - RNA, 19 nt, Homo sapiens
  misc_RNA (1)...(19): siRNA sense strand
uuucgaguauggcauuaaa

SEQ ID NO: 1146986 - RNA, 19 nt, Homo sapiens
  misc_RNA (1)...(19): siRNA sense strand
uaugaugccagcaaugaaa

SEQ ID NO: 1146987 - RNA, 19 nt, Homo sapiens
  misc_RNA (1)...(19): siRNA sense strand
gaaaccuggaagauuacua

SEQ ID NO: 1146988 - RNA, 19 nt, Homo sapiens
  misc_RNA (1)...(19): siRNA sense strand
cgccuuggcucuagaagca

SEQ ID NO: 1146989 - RNA, 19 nt, Homo sapiens
  misc_RNA (1)...(19): siRNA sense strand
gcaguggggccuuuuauga

SEQ ID NO: 1146990 - RNA, 19 nt, Homo sapiens
  misc_RNA (1)...(19): siRNA sense strand
uggaagauuacuaccauuu

SEQ ID NO: 1146991 - RNA, 19 nt, Homo sapiens
  misc_RNA (1)...(19): siRNA sense strand
cagcaaacaauuccuacug

SEQ ID NO: 1146992 - RNA, 19 nt, Homo sapiens
  misc_RNA (1)...(19): siRNA sense strand
cagcagcgccaccgagaau

SEQ ID NO: 1146993 - RNA, 19 nt, Homo sapiens
  misc_RNA (1)...(19): siRNA sense strand
ugaacggcaaugauuauga

SEQ ID NO: 1146994 - RNA, 19 nt, Homo sapiens
  misc_RNA (1)...(19): siRNA sense strand
caacuacaucgacauuuac

SEQ ID NO: 1146995 - RNA, 19 nt, Homo sapiens
  misc_RNA (1)...(19): siRNA sense strand
aaacacggcacucguugug

SEQ ID NO: 1146996 - RNA, 19 nt, Homo sapiens
  misc_RNA (1)...(19): siRNA sense strand
ggaagauuacuaccauuuu

SEQ ID NO: 1146997 - RNA, 19 nt, Homo sapiens
  misc_RNA (1)...(19): siRNA sense strand
caacuugggccagauugga

SEQ ID NO: 1146998 - RNA, 19 nt, Homo sapiens
  misc_RNA (1)...(19): siRNA sense strand
gaucugcgucagcgcugua

SEQ ID NO: 1146999 - RNA, 19 nt, Homo sapiens
  misc_RNA (1)...(19): siRNA sense strand
cgcaggcccuuuacuucaa

SEQ ID NO: 1147000 - RNA, 19 nt, Homo sapiens
  misc_RNA (1)...(19): siRNA sense strand
ccaacagcaucuacaccau

SEQ ID NO: 1147001 - RNA, 19 nt, Homo sapiens
  misc_RNA (1)...(19): siRNA sense strand
cuacaucgacauuuacagu

SEQ ID NO: 1147002 - RNA, 19 nt, Homo sapiens
  misc_RNA (1)...(19): siRNA sense strand
ccagcaacaggaagugaaa

SEQ ID NO: 1147003 - RNA, 19 nt, Homo sapiens
  misc_RNA (1)...(19): siRNA sense strand
gcuuucgaguauggcauua

SEQ ID NO: 1147004 - RNA, 19 nt, Homo sapiens
  misc_RNA (1)...(19): siRNA sense strand
aauaaacacggcacucguu

SEQ ID NO: 1147005 - RNA, 19 nt, Homo sapiens
  misc_RNA (1)...(19): siRNA sense strand
caaugauuaugacccaucu

SEQ ID NO: 1147006 - RNA, 19 nt, Homo sapiens
  misc_RNA (1)...(19): siRNA sense strand
caacaugugguaccugcau

SEQ ID NO: 1147007 - RNA, 19 nt, Homo sapiens
  misc_RNA (1)...(19): siRNA sense strand
gcaaagucgcugggcauca

SEQ ID NO: 1147008 - RNA, 19 nt, Homo sapiens
  misc_RNA (1)...(19): siRNA sense strand
ggugaaauggcuccagcaa

SEQ ID NO: 1147009 - RNA, 19 nt, Homo sapiens
  misc_RNA (1)...(19): siRNA sense strand
caaacaauuccuacugcau

SEQ ID NO: 1147010 - RNA, 19 nt, Homo sapiens
  misc_RNA (1)...(19): siRNA sense strand
uaucacagcaaaaccuuua

SEQ ID NO: 1147011 - RNA, 19 nt, Homo sapiens
  misc_RNA (1)...(19): siRNA sense strand
aacgaagggugaagagaca

SEQ ID NO: 1147012 - RNA, 19 nt, Homo sapiens
  misc_RNA (1)...(19): siRNA sense strand
gcaucagacccaacuacau

SEQ ID NO: 1147013 - RNA, 19 nt, Homo sapiens
  misc_RNA (1)...(19): siRNA sense strand
guacaaugccaaaauagga

SEQ ID NO: 1147014 - RNA, 19 nt, Homo sapiens
  misc_RNA (1)...(19): siRNA sense strand
gcaggcccuuuacuucaac

SEQ ID NO: 1147015 - RNA, 19 nt, Homo sapiens
  misc_RNA (1)...(19): siRNA sense strand
ccgcaggcccuuuacuuca

SEQ ID NO: 1147016 - RNA, 19 nt, Homo sapiens
  misc_RNA (1)...(19): siRNA sense strand
cgacgugaacggcaaugau

SEQ ID NO: 1147017 - RNA, 19 nt, Homo sapiens
  misc_RNA (1)...(19): siRNA sense strand
caccgagaauggcuacaag

SEQ ID NO: 1147018 - RNA, 19 nt, Homo sapiens
  misc_RNA (1)...(19): siRNA sense strand
cgugaacggcaaugauuau

SEQ ID NO: 1147019 - RNA, 19 nt, Homo sapiens
  misc_RNA (1)...(19): siRNA sense strand
gugacccgcaggcccuuua

SEQ ID NO: 1147020 - RNA, 19 nt, Homo sapiens
  misc_RNA (1)...(19): siRNA sense strand
ccuuggcucuagaagcaaa

SEQ ID NO: 1147021 - RNA, 19 nt, Homo sapiens
  misc_RNA (1)...(19): siRNA sense strand
gcaacaggaagugaaacga

SEQ ID NO: 1147022 - RNA, 19 nt, Homo sapiens
  misc_RNA (1)...(19): siRNA sense strand
ugcgauggcuacaccaaca

SEQ ID NO: 1147023 - RNA, 19 nt, Homo sapiens
  misc_RNA (1)...(19): siRNA sense strand
ccaccgagaauggcuacaa

SEQ ID NO: 1147024 - RNA, 19 nt, Homo sapiens
  misc_RNA (1)...(19): siRNA sense strand
ccaacuacaucgacauuua

SEQ ID NO: 1147025 - RNA, 19 nt, Homo sapiens
  misc_RNA (1)...(19): siRNA sense strand
uuggaaaccuggaagauua

SEQ ID NO: 1147026 - RNA, 19 nt, Homo sapiens
  misc_RNA (1)...(19): siRNA sense strand
ugaaauggcuccagcaaca

SEQ ID NO: 1147027 - RNA, 19 nt, Homo sapiens
  misc_RNA (1)...(19): siRNA sense strand
ggacggcgaugucacagau

SEQ ID NO: 1147028 - RNA, 19 nt, Homo sapiens
  misc_RNA (1)...(19): siRNA sense strand
gaagcaaacagccaguuaa

SEQ ID NO: 1147029 - RNA, 19 nt, Homo sapiens
  misc_RNA (1)...(19): siRNA sense strand
gaacggcaaugauuaugac

SEQ ID NO: 1147030 - RNA, 19 nt, Homo sapiens
  misc_RNA (1)...(19): siRNA sense strand
gcgagcgacuggaaaguga

SEQ ID NO: 1147031 - RNA, 19 nt, Homo sapiens
  misc_RNA (1)...(19): siRNA sense strand
ccucacaccuuccucagaa

SEQ ID NO: 1147032 - RNA, 19 nt, Homo sapiens
  misc_RNA (1)...(19): siRNA sense strand
gauaugaugccagcaauga

SEQ ID NO: 1147033 - RNA, 19 nt, Homo sapiens
  misc_RNA (1)...(19): siRNA sense strand
ugacccaucuccacgauau

SEQ ID NO: 1147034 - RNA, 19 nt, Homo sapiens
  misc_RNA (1)...(19): siRNA sense strand
caacaggaagugaaacgaa

SEQ ID NO: 1147035 - RNA, 19 nt, Homo sapiens
  misc_RNA (1)...(19): siRNA sense strand
gaaagcgagcgacuggaaa

SEQ ID NO: 1147036 - RNA, 19 nt, Homo sapiens
  misc_RNA (1)...(19): siRNA sense strand
gcaaacagccaguuaaccu

SEQ ID NO: 1147037 - RNA, 19 nt, Homo sapiens
  misc_RNA (1)...(19): siRNA sense strand
agagacaggugcgaaguga

SEQ ID NO: 1147038 - RNA, 19 nt, Homo sapiens
  misc_RNA (1)...(19): siRNA sense strand
gacgugaacggcaaugauu

SEQ ID NO: 1147039 - RNA, 19 nt, Homo sapiens
  misc_RNA (1)...(19): siRNA sense strand
gaugauggcauagagagaa

SEQ ID NO: 1147040 - RNA, 19 nt, Homo sapiens
  misc_RNA (1)...(19): siRNA sense strand
cagauguggucgaggcaaa

SEQ ID NO: 1147041 - RNA, 19 nt, Homo sapiens
  misc_RNA (1)...(19): siRNA sense strand
agaagcaaacagccaguua

SEQ ID NO: 1147042 - RNA, 19 nt, Homo sapiens
  misc_RNA (1)...(19): siRNA sense strand
caaagucgcugggcaucag

SEQ ID NO: 1147043 - RNA, 19 nt, Homo sapiens
  misc_RNA (1)...(19): siRNA sense strand
gaaacgaagggugaagaga

SEQ ID NO: 1147044 - RNA, 19 nt, Homo sapiens
  misc_RNA (1)...(19): siRNA sense strand
caucagacccaacuacauc

SEQ ID NO: 1147045 - RNA, 19 nt, Homo sapiens
  misc_RNA (1)...(19): siRNA sense strand
ugaaagcgagcgacuggaa

SEQ ID NO: 1147046 - RNA, 19 nt, Homo sapiens
  misc_RNA (1)...(19): siRNA sense strand
gaagagacaggugcgaagu

SEQ ID NO: 1147047 - RNA, 19 nt, Homo sapiens
  misc_RNA (1)...(19): siRNA sense strand
caucaucgccuuggcucua

SEQ ID NO: 1147048 - RNA, 19 nt, Homo sapiens
  misc_RNA (1)...(19): siRNA sense strand
ccuggaagauuacuaccau

SEQ ID NO: 1147049 - RNA, 19 nt, Homo sapiens
  misc_RNA (1)...(19): siRNA sense strand
uuucgaguauggcauuaaa

SEQ ID NO: 1147050 - RNA, 19 nt, Homo sapiens
  misc_RNA (1)...(19): siRNA sense strand
uaugaugccagcaaugaaa

SEQ ID NO: 1147051 - RNA, 19 nt, Homo sapiens
  misc_RNA (1)...(19): siRNA sense strand
gaaaccuggaagauuacua

SEQ ID NO: 1147052 - RNA, 19 nt, Homo sapiens
  misc_RNA (1)...(19): siRNA sense strand
cgccuuggcucuagaagca

SEQ ID NO: 1147053 - RNA, 19 nt, Homo sapiens
  misc_RNA (1)...(19): siRNA sense strand
gcaguggggccuuuuauga

SEQ ID NO: 1147054 - RNA, 19 nt, Homo sapiens
  misc_RNA (1)...(19): siRNA sense strand
uggaagauuacuaccauuu

SEQ ID NO: 1147055 - RNA, 19 nt, Homo sapiens
  misc_RNA (1)...(19): siRNA sense strand
cagcaaacaauuccuacug

SEQ ID NO: 1147056 - RNA, 19 nt, Homo sapiens
  misc_RNA (1)...(19): siRNA sense strand
cagcagcgccaccgagaau

SEQ ID NO: 1147057 - RNA, 19 nt, Homo sapiens
  misc_RNA (1)...(19): siRNA sense strand
ugaacggcaaugauuauga

SEQ ID NO: 1147058 - RNA, 19 nt, Homo sapiens
  misc_RNA (1)...(19): siRNA sense strand
caacuacaucgacauuuac

SEQ ID NO: 1147059 - RNA, 19 nt, Homo sapiens
  misc_RNA (1)...(19): siRNA sense strand
aaacacggcacucguugug

SEQ ID NO: 1147060 - RNA, 19 nt, Homo sapiens
  misc_RNA (1)...(19): siRNA sense strand
ggaagauuacuaccauuuu

SEQ ID NO: 1147061 - RNA, 19 nt, Homo sapiens
  misc_RNA (1)...(19): siRNA sense strand
caacuugggccagauugga

SEQ ID NO: 1147062 - RNA, 19 nt, Homo sapiens
  misc_RNA (1)...(19): siRNA sense strand
gaucugcgucagcgcugua

SEQ ID NO: 1147063 - RNA, 19 nt, Homo sapiens
  misc_RNA (1)...(19): siRNA sense strand
cgcaggcccuuuacuucaa

SEQ ID NO: 1147064 - RNA, 19 nt, Homo sapiens
  misc_RNA (1)...(19): siRNA sense strand
ccaacagcaucuacaccau

SEQ ID NO: 1147065 - RNA, 19 nt, Homo sapiens
  misc_RNA (1)...(19): siRNA sense strand
cuacaucgacauuuacagu

SEQ ID NO: 1147066 - RNA, 19 nt, Homo sapiens
  misc_RNA (1)...(19): siRNA sense strand
ccagcaacaggaagugaaa

SEQ ID NO: 1147067 - RNA, 19 nt, Homo sapiens
  misc_RNA (1)...(19): siRNA sense strand
gcuuucgaguauggcauua

SEQ ID NO: 1147068 - RNA, 19 nt, Homo sapiens
  misc_RNA (1)...(19): siRNA sense strand
aauaaacacggcacucguu

SEQ ID NO: 1147069 - RNA, 19 nt, Homo sapiens
  misc_RNA (1)...(19): siRNA sense strand
caaugauuaugacccaucu

SEQ ID NO: 1147070 - RNA, 19 nt, Homo sapiens
  misc_RNA (1)...(19): siRNA sense strand
caacaugugguaccugcau

SEQ ID NO: 1147071 - RNA, 19 nt, Homo sapiens
  misc_RNA (1)...(19): siRNA sense strand
gcaaagucgcugggcauca

SEQ ID NO: 1147072 - RNA, 19 nt, Homo sapiens
  misc_RNA (1)...(19): siRNA sense strand
ggugaaauggcuccagcaa

SEQ ID NO: 1147073 - RNA, 19 nt, Homo sapiens
  misc_RNA (1)...(19): siRNA sense strand
caaacaauuccuacugcau

SEQ ID NO: 1147074 - RNA, 19 nt, Homo sapiens
  misc_RNA (1)...(19): siRNA sense strand
uaucacagcaaaaccuuua

SEQ ID NO: 1147075 - RNA, 19 nt, Homo sapiens
  misc_RNA (1)...(19): siRNA sense strand
aacgaagggugaagagaca

SEQ ID NO: 1147076 - RNA, 19 nt, Homo sapiens
  misc_RNA (1)...(19): siRNA sense strand
gcaucagacccaacuacau

SEQ ID NO: 1147077 - RNA, 19 nt, Homo sapiens
  misc_RNA (1)...(19): siRNA sense strand
guacaaugccaaaauagga

SEQ ID NO: 1147078 - RNA, 19 nt, Homo sapiens
  misc_RNA (1)...(19): siRNA sense strand
gcaggcccuuuacuucaac

SEQ ID NO: 1147079 - RNA, 19 nt, Homo sapiens
  misc_RNA (1)...(19): siRNA sense strand
ccgcaggcccuuuacuuca

SEQ ID NO: 1147080 - RNA, 19 nt, Homo sapiens
  misc_RNA (1)...(19): siRNA sense strand
cgacgugaacggcaaugau

SEQ ID NO: 1147081 - RNA, 19 nt, Homo sapiens
  misc_RNA (1)...(19): siRNA sense strand
caccgagaauggcuacaag

SEQ ID NO: 1147082 - RNA, 19 nt, Homo sapiens
  misc_RNA (1)...(19): siRNA sense strand
cgugaacggcaaugauuau

SEQ ID NO: 1147083 - RNA, 19 nt, Homo sapiens
  misc_RNA (1)...(19): siRNA sense strand
gugacccgcaggcccuuua

SEQ ID NO: 1147084 - RNA, 19 nt, Homo sapiens
  misc_RNA (1)...(19): siRNA sense strand
ccuuggcucuagaagcaaa

SEQ ID NO: 1147085 - RNA, 19 nt, Homo sapiens
  misc_RNA (1)...(19): siRNA sense strand
gcaacaggaagugaaacga

SEQ ID NO: 1147086 - RNA, 19 nt, Homo sapiens
  misc_RNA (1)...(19): siRNA sense strand
ugcgauggcuacaccaaca

SEQ ID NO: 1147087 - RNA, 19 nt, Homo sapiens
  misc_RNA (1)...(19): siRNA sense strand
ccaccgagaauggcuacaa

SEQ ID NO: 1147088 - RNA, 19 nt, Homo sapiens
  misc_RNA (1)...(19): siRNA sense strand
ccaacuacaucgacauuua

SEQ ID NO: 1147089 - RNA, 19 nt, Homo sapiens
  misc_RNA (1)...(19): siRNA sense strand
uuggaaaccuggaagauua

SEQ ID NO: 1147090 - RNA, 19 nt, Homo sapiens
  misc_RNA (1)...(19): siRNA sense strand
ugaaauggcuccagcaaca

SEQ ID NO: 1147091 - RNA, 19 nt, Homo sapiens
  misc_RNA (1)...(19): siRNA sense strand
ggacggcgaugucacagau

SEQ ID NO: 1147092 - RNA, 19 nt, Homo sapiens
  misc_RNA (1)...(19): siRNA sense strand
gaagcaaacagccaguuaa

SEQ ID NO: 1147093 - RNA, 19 nt, Homo sapiens
  misc_RNA (1)...(19): siRNA sense strand
gaacggcaaugauuaugac

SEQ ID NO: 1147094 - RNA, 19 nt, Homo sapiens
  misc_RNA (1)...(19): siRNA sense strand
gcgagcgacuggaaaguga

SEQ ID NO: 1147095 - RNA, 19 nt, Homo sapiens
  misc_RNA (1)...(19): siRNA sense strand
ccucacaccuuccucagaa

SEQ ID NO: 1147096 - RNA, 19 nt, Homo sapiens
  misc_RNA (1)...(19): siRNA sense strand
gauaugaugccagcaauga

SEQ ID NO: 1147097 - RNA, 19 nt, Homo sapiens
  misc_RNA (1)...(19): siRNA sense strand
ugacccaucuccacgauau

SEQ ID NO: 1147098 - RNA, 19 nt, Homo sapiens
  misc_RNA (1)...(19): siRNA sense strand
caacaggaagugaaacgaa

SEQ ID NO: 1147099 - RNA, 19 nt, Homo sapiens
  misc_RNA (1)...(19): siRNA sense strand
gaaagcgagcgacuggaaa

SEQ ID NO: 1147100 - RNA, 19 nt, Homo sapiens
  misc_RNA (1)...(19): siRNA sense strand
gcaaacagccaguuaaccu

SEQ ID NO: 1147101 - RNA, 19 nt, Homo sapiens
  misc_RNA (1)...(19): siRNA sense strand
agagacaggugcgaaguga

SEQ ID NO: 1147102 - RNA, 19 nt, Homo sapiens
  misc_RNA (1)...(19): siRNA sense strand
gacgugaacggcaaugauu

SEQ ID NO: 1147103 - RNA, 19 nt, Homo sapiens
  misc_RNA (1)...(19): siRNA sense strand
gaugauggcauagagagaa

SEQ ID NO: 1147104 - RNA, 19 nt, Homo sapiens
  misc_RNA (1)...(19): siRNA sense strand
cagauguggucgaggcaaa

SEQ ID NO: 1147105 - RNA, 19 nt, Homo sapiens
  misc_RNA (1)...(19): siRNA sense strand
agaagcaaacagccaguua

SEQ ID NO: 1147106 - RNA, 19 nt, Homo sapiens
  misc_RNA (1)...(19): siRNA sense strand
caaagucgcugggcaucag

SEQ ID NO: 1147107 - RNA, 19 nt, Homo sapiens
  misc_RNA (1)...(19): siRNA sense strand
gaaacgaagggugaagaga

SEQ ID NO: 1147108 - RNA, 19 nt, Homo sapiens
  misc_RNA (1)...(19): siRNA sense strand
caucagacccaacuacauc

SEQ ID NO: 1147109 - RNA, 19 nt, Homo sapiens
  misc_RNA (1)...(19): siRNA sense strand
ugaaagcgagcgacuggaa

SEQ ID NO: 1147110 - RNA, 19 nt, Homo sapiens
  misc_RNA (1)...(19): siRNA sense strand
gaagagacaggugcgaagu

SEQ ID NO: 1147111 - RNA, 19 nt, Homo sapiens
  misc_RNA (1)...(19): siRNA sense strand
caucaucgccuuggcucua

SEQ ID NO: 1147112 - RNA, 19 nt, Homo sapiens
  misc_RNA (1)...(19): siRNA sense strand
ccuggaagauuacuaccau

SEQ ID NO: 1147113 - RNA, 19 nt, Homo sapiens
  misc_RNA (1)...(19): siRNA sense strand
uuucgaguauggcauuaaa

SEQ ID NO: 1147114 - RNA, 19 nt, Homo sapiens
  misc_RNA (1)...(19): siRNA sense strand
uaugaugccagcaaugaaa

SEQ ID NO: 1147115 - RNA, 19 nt, Homo sapiens
  misc_RNA (1)...(19): siRNA sense strand
gaaaccuggaagauuacua

SEQ ID NO: 1147116 - RNA, 19 nt, Homo sapiens
  misc_RNA (1)...(19): siRNA sense strand
cgccuuggcucuagaagca

SEQ ID NO: 1147117 - RNA, 19 nt, Homo sapiens
  misc_RNA (1)...(19): siRNA sense strand
gcaguggggccuuuuauga

SEQ ID NO: 1147118 - RNA, 19 nt, Homo sapiens
  misc_RNA (1)...(19): siRNA sense strand
uggaagauuacuaccauuu

SEQ ID NO: 1147119 - RNA, 19 nt, Homo sapiens
  misc_RNA (1)...(19): siRNA sense strand
cagcaaacaauuccuacug

SEQ ID NO: 1147120 - RNA, 19 nt, Homo sapiens
  misc_RNA (1)...(19): siRNA sense strand
cagcagcgccaccgagaau

SEQ ID NO: 1147121 - RNA, 19 nt, Homo sapiens
  misc_RNA (1)...(19): siRNA sense strand
ugaacggcaaugauuauga

SEQ ID NO: 1147122 - RNA, 19 nt, Homo sapiens
  misc_RNA (1)...(19): siRNA sense strand
caacuacaucgacauuuac

SEQ ID NO: 1147123 - RNA, 19 nt, Homo sapiens
  misc_RNA (1)...(19): siRNA sense strand
aaacacggcacucguugug

SEQ ID NO: 1147124 - RNA, 19 nt, Homo sapiens
  misc_RNA (1)...(19): siRNA sense strand
ggaagauuacuaccauuuu

SEQ ID NO: 1147125 - RNA, 19 nt, Homo sapiens
  misc_RNA (1)...(19): siRNA sense strand
caacuugggccagauugga

SEQ ID NO: 1147126 - RNA, 19 nt, Homo sapiens
  misc_RNA (1)...(19): siRNA sense strand
gaucugcgucagcgcugua

SEQ ID NO: 1147127 - RNA, 19 nt, Homo sapiens
  misc_RNA (1)...(19): siRNA sense strand
cgcaggcccuuuacuucaa

SEQ ID NO: 1147128 - RNA, 19 nt, Homo sapiens
  misc_RNA (1)...(19): siRNA sense strand
ccaacagcaucuacaccau

SEQ ID NO: 1147129 - RNA, 19 nt, Homo sapiens
  misc_RNA (1)...(19): siRNA sense strand
cuacaucgacauuuacagu

SEQ ID NO: 1147130 - RNA, 19 nt, Homo sapiens
  misc_RNA (1)...(19): siRNA sense strand
ccagcaacaggaagugaaa

SEQ ID NO: 1147131 - RNA, 19 nt, Homo sapiens
  misc_RNA (1)...(19): siRNA sense strand
gcuuucgaguauggcauua

SEQ ID NO: 1147132 - RNA, 19 nt, Homo sapiens
  misc_RNA (1)...(19): siRNA sense strand
aauaaacacggcacucguu

SEQ ID NO: 1147133 - RNA, 19 nt, Homo sapiens
  misc_RNA (1)...(19): siRNA sense strand
caaugauuaugacccaucu

SEQ ID NO: 1147134 - RNA, 19 nt, Homo sapiens
  misc_RNA (1)...(19): siRNA sense strand
caacaugugguaccugcau

SEQ ID NO: 1147135 - RNA, 19 nt, Homo sapiens
  misc_RNA (1)...(19): siRNA sense strand
gcaaagucgcugggcauca

SEQ ID NO: 1147136 - RNA, 19 nt, Homo sapiens
  misc_RNA (1)...(19): siRNA sense strand
ggugaaauggcuccagcaa

SEQ ID NO: 1147137 - RNA, 19 nt, Homo sapiens
  misc_RNA (1)...(19): siRNA sense strand
caaacaauuccuacugcau

SEQ ID NO: 1147138 - RNA, 19 nt, Homo sapiens
  misc_RNA (1)...(19): siRNA sense strand
uaucacagcaaaaccuuua

SEQ ID NO: 1147139 - RNA, 19 nt, Homo sapiens
  misc_RNA (1)...(19): siRNA sense strand
aacgaagggugaagagaca

SEQ ID NO: 1147140 - RNA, 19 nt, Homo sapiens
  misc_RNA (1)...(19): siRNA sense strand
gcaucagacccaacuacau

SEQ ID NO: 1147141 - RNA, 19 nt, Homo sapiens
  misc_RNA (1)...(19): siRNA sense strand
guacaaugccaaaauagga

SEQ ID NO: 1147142 - RNA, 19 nt, Homo sapiens
  misc_RNA (1)...(19): siRNA sense strand
gcaggcccuuuacuucaac

SEQ ID NO: 1147143 - RNA, 19 nt, Homo sapiens
  misc_RNA (1)...(19): siRNA sense strand
ccgcaggcccuuuacuuca

SEQ ID NO: 1147144 - RNA, 19 nt, Homo sapiens
  misc_RNA (1)...(19): siRNA sense strand
cgacgugaacggcaaugau

SEQ ID NO: 1147145 - RNA, 19 nt, Homo sapiens
  misc_RNA (1)...(19): siRNA sense strand
caccgagaauggcuacaag

SEQ ID NO: 1147146 - RNA, 19 nt, Homo sapiens
  misc_RNA (1)...(19): siRNA sense strand
cgugaacggcaaugauuau

SEQ ID NO: 1147147 - RNA, 19 nt, Homo sapiens
  misc_RNA (1)...(19): siRNA sense strand
gugacccgcaggcccuuua

SEQ ID NO: 1147148 - RNA, 19 nt, Homo sapiens
  misc_RNA (1)...(19): siRNA sense strand
ccuuggcucuagaagcaaa

SEQ ID NO: 1147149 - RNA, 19 nt, Homo sapiens
  misc_RNA (1)...(19): siRNA sense strand
gcaacaggaagugaaacga

SEQ ID NO: 1147150 - RNA, 19 nt, Homo sapiens
  misc_RNA (1)...(19): siRNA sense strand
ugcgauggcuacaccaaca

SEQ ID NO: 1147151 - RNA, 19 nt, Homo sapiens
  misc_RNA (1)...(19): siRNA sense strand
ccaccgagaauggcuacaa

SEQ ID NO: 1147152 - RNA, 19 nt, Homo sapiens
  misc_RNA (1)...(19): siRNA sense strand
ccaacuacaucgacauuua

SEQ ID NO: 1147153 - RNA, 19 nt, Homo sapiens
  misc_RNA (1)...(19): siRNA sense strand
uuggaaaccuggaagauua

SEQ ID NO: 1147154 - RNA, 19 nt, Homo sapiens
  misc_RNA (1)...(19): siRNA sense strand
ugaaauggcuccagcaaca

SEQ ID NO: 1147155 - RNA, 19 nt, Homo sapiens
  misc_RNA (1)...(19): siRNA sense strand
ggacggcgaugucacagau

SEQ ID NO: 1147156 - RNA, 19 nt, Homo sapiens
  misc_RNA (1)...(19): siRNA sense strand
gaagcaaacagccaguuaa

SEQ ID NO: 1147157 - RNA, 19 nt, Homo sapiens
  misc_RNA (1)...(19): siRNA sense strand
gaacggcaaugauuaugac

SEQ ID NO: 1147158 - RNA, 19 nt, Homo sapiens
  misc_RNA (1)...(19): siRNA sense strand
gcgagcgacuggaaaguga

SEQ ID NO: 1147159 - RNA, 19 nt, Homo sapiens
  misc_RNA (1)...(19): siRNA sense strand
ccucacaccuuccucagaa

SEQ ID NO: 1147160 - RNA, 19 nt, Homo sapiens
  misc_RNA (1)...(19): siRNA sense strand
gauaugaugccagcaauga

SEQ ID NO: 1147161 - RNA, 19 nt, Homo sapiens
  misc_RNA (1)...(19): siRNA sense strand
ugacccaucuccacgauau

SEQ ID NO: 1147162 - RNA, 19 nt, Homo sapiens
  misc_RNA (1)...(19): siRNA sense strand
caacaggaagugaaacgaa

SEQ ID NO: 1147163 - RNA, 19 nt, Homo sapiens
  misc_RNA (1)...(19): siRNA sense strand
gaaagcgagcgacuggaaa

SEQ ID NO: 1147164 - RNA, 19 nt, Homo sapiens
  misc_RNA (1)...(19): siRNA sense strand
gcaaacagccaguuaaccu

SEQ ID NO: 1147165 - RNA, 19 nt, Homo sapiens
  misc_RNA (1)...(19): siRNA sense strand
agagacaggugcgaaguga

SEQ ID NO: 1147166 - RNA, 19 nt, Homo sapiens
  misc_RNA (1)...(19): siRNA sense strand
gacgugaacggcaaugauu

SEQ ID NO: 1147167 - RNA, 19 nt, Homo sapiens
  misc_RNA (1)...(19): siRNA sense strand
gaugauggcauagagagaa

SEQ ID NO: 1147168 - RNA, 19 nt, Homo sapiens
  misc_RNA (1)...(19): siRNA sense strand
cagauguggucgaggcaaa

SEQ ID NO: 1147169 - RNA, 19 nt, Homo sapiens
  misc_RNA (1)...(19): siRNA sense strand
agaagcaaacagccaguua

SEQ ID NO: 1147170 - RNA, 19 nt, Homo sapiens
  misc_RNA (1)...(19): siRNA sense strand
caaagucgcugggcaucag

SEQ ID NO: 1147171 - RNA, 19 nt, Homo sapiens
  misc_RNA (1)...(19): siRNA sense strand
gaaacgaagggugaagaga

SEQ ID NO: 1147172 - RNA, 19 nt, Homo sapiens
  misc_RNA (1)...(19): siRNA sense strand
caucagacccaacuacauc

SEQ ID NO: 1147173 - RNA, 19 nt, Homo sapiens
  misc_RNA (1)...(19): siRNA sense strand
ugaaagcgagcgacuggaa

SEQ ID NO: 1147174 - RNA, 19 nt, Homo sapiens
  misc_RNA (1)...(19): siRNA sense strand
gaagagacaggugcgaagu

SEQ ID NO: 1147175 - RNA, 19 nt, Homo sapiens
  misc_RNA (1)...(19): siRNA sense strand
caucaucgccuuggcucua

SEQ ID NO: 1147176 - RNA, 19 nt, Homo sapiens
  misc_RNA (1)...(19): siRNA sense strand
ccuggaagauuacuaccau

SEQ ID NO: 1147177 - RNA, 19 nt, Homo sapiens
  misc_RNA (1)...(19): siRNA sense strand
uuucgaguauggcauuaaa

SEQ ID NO: 1147178 - RNA, 19 nt, Homo sapiens
  misc_RNA (1)...(19): siRNA sense strand
uaugaugccagcaaugaaa

SEQ ID NO: 1147179 - RNA, 19 nt, Homo sapiens
  misc_RNA (1)...(19): siRNA sense strand
gaaaccuggaagauuacua

SEQ ID NO: 1147180 - RNA, 19 nt, Homo sapiens
  misc_RNA (1)...(19): siRNA sense strand
cgccuuggcucuagaagca

SEQ ID NO: 1147181 - RNA, 19 nt, Homo sapiens
  misc_RNA (1)...(19): siRNA sense strand
gcaguggggccuuuuauga

SEQ ID NO: 1147182 - RNA, 19 nt, Homo sapiens
  misc_RNA (1)...(19): siRNA sense strand
uggaagauuacuaccauuu

SEQ ID NO: 1147183 - RNA, 19 nt, Homo sapiens
  misc_RNA (1)...(19): siRNA sense strand
cagcaaacaauuccuacug

SEQ ID NO: 1147184 - RNA, 19 nt, Homo sapiens
  misc_RNA (1)...(19): siRNA sense strand
cagcagcgccaccgagaau

SEQ ID NO: 1147185 - RNA, 19 nt, Homo sapiens
  misc_RNA (1)...(19): siRNA sense strand
ugaacggcaaugauuauga

SEQ ID NO: 1147186 - RNA, 19 nt, Homo sapiens
  misc_RNA (1)...(19): siRNA sense strand
caacuacaucgacauuuac

SEQ ID NO: 1147187 - RNA, 19 nt, Homo sapiens
  misc_RNA (1)...(19): siRNA sense strand
aaacacggcacucguugug

SEQ ID NO: 1147188 - RNA, 19 nt, Homo sapiens
  misc_RNA (1)...(19): siRNA sense strand
ggaagauuacuaccauuuu

SEQ ID NO: 1147189 - RNA, 19 nt, Homo sapiens
  misc_RNA (1)...(19): siRNA sense strand
caacuugggccagauugga

SEQ ID NO: 1147190 - RNA, 19 nt, Homo sapiens
  misc_RNA (1)...(19): siRNA sense strand
gaucugcgucagcgcugua

SEQ ID NO: 1147191 - RNA, 19 nt, Homo sapiens
  misc_RNA (1)...(19): siRNA sense strand
cgcaggcccuuuacuucaa

SEQ ID NO: 1147192 - RNA, 19 nt, Homo sapiens
  misc_RNA (1)...(19): siRNA sense strand
ccaacagcaucuacaccau

SEQ ID NO: 1147193 - RNA, 19 nt, Homo sapiens
  misc_RNA (1)...(19): siRNA sense strand
cuacaucgacauuuacagu

SEQ ID NO: 1147194 - RNA, 19 nt, Homo sapiens
  misc_RNA (1)...(19): siRNA sense strand
ccagcaacaggaagugaaa

SEQ ID NO: 1147195 - RNA, 19 nt, Homo sapiens
  misc_RNA (1)...(19): siRNA sense strand
gcuuucgaguauggcauua

SEQ ID NO: 1147196 - RNA, 19 nt, Homo sapiens
  misc_RNA (1)...(19): siRNA sense strand
aauaaacacggcacucguu

SEQ ID NO: 1147197 - RNA, 19 nt, Homo sapiens
  misc_RNA (1)...(19): siRNA sense strand
caaugauuaugacccaucu

SEQ ID NO: 1147198 - RNA, 19 nt, Homo sapiens
  misc_RNA (1)...(19): siRNA sense strand
caacaugugguaccugcau

SEQ ID NO: 1147199 - RNA, 19 nt, Homo sapiens
  misc_RNA (1)...(19): siRNA sense strand
gcaaagucgcugggcauca

SEQ ID NO: 1147200 - RNA, 19 nt, Homo sapiens
  misc_RNA (1)...(19): siRNA sense strand
ggugaaauggcuccagcaa

SEQ ID NO: 1147201 - RNA, 19 nt, Homo sapiens
  misc_RNA (1)...(19): siRNA sense strand
caaacaauuccuacugcau

SEQ ID NO: 1147202 - RNA, 19 nt, Homo sapiens
  misc_RNA (1)...(19): siRNA sense strand
uaucacagcaaaaccuuua

SEQ ID NO: 1147203 - RNA, 19 nt, Homo sapiens
  misc_RNA (1)...(19): siRNA sense strand
aacgaagggugaagagaca

SEQ ID NO: 1147204 - RNA, 19 nt, Homo sapiens
  misc_RNA (1)...(19): siRNA sense strand
gcaucagacccaacuacau

SEQ ID NO: 1147205 - RNA, 19 nt, Homo sapiens
  misc_RNA (1)...(19): siRNA sense strand
guacaaugccaaaauagga

SEQ ID NO: 1147206 - RNA, 19 nt, Homo sapiens
  misc_RNA (1)...(19): siRNA sense strand
gcaggcccuuuacuucaac

SEQ ID NO: 1147207 - RNA, 19 nt, Homo sapiens
  misc_RNA (1)...(19): siRNA sense strand
ccgcaggcccuuuacuuca

SEQ ID NO: 1147208 - RNA, 19 nt, Homo sapiens
  misc_RNA (1)...(19): siRNA sense strand
cgacgugaacggcaaugau

SEQ ID NO: 1147209 - RNA, 19 nt, Homo sapiens
  misc_RNA (1)...(19): siRNA sense strand
caccgagaauggcuacaag

SEQ ID NO: 1147210 - RNA, 19 nt, Homo sapiens
  misc_RNA (1)...(19): siRNA sense strand
cgugaacggcaaugauuau

SEQ ID NO: 1147211 - RNA, 19 nt, Homo sapiens
  misc_RNA (1)...(19): siRNA sense strand
gugacccgcaggcccuuua

SEQ ID NO: 1147212 - RNA, 19 nt, Homo sapiens
  misc_RNA (1)...(19): siRNA sense strand
ccuuggcucuagaagcaaa

SEQ ID NO: 1147213 - RNA, 19 nt, Homo sapiens
  misc_RNA (1)...(19): siRNA sense strand
gcaacaggaagugaaacga

SEQ ID NO: 1147214 - RNA, 19 nt, Homo sapiens
  misc_RNA (1)...(19): siRNA sense strand
ugcgauggcuacaccaaca

SEQ ID NO: 1147215 - RNA, 19 nt, Homo sapiens
  misc_RNA (1)...(19): siRNA sense strand
ccaccgagaauggcuacaa

SEQ ID NO: 1147216 - RNA, 19 nt, Homo sapiens
  misc_RNA (1)...(19): siRNA sense strand
ccaacuacaucgacauuua

SEQ ID NO: 1147217 - RNA, 19 nt, Homo sapiens
  misc_RNA (1)...(19): siRNA sense strand
uuggaaaccuggaagauua

SEQ ID NO: 1147218 - RNA, 19 nt, Homo sapiens
  misc_RNA (1)...(19): siRNA sense strand
ugaaauggcuccagcaaca

SEQ ID NO: 1147219 - RNA, 19 nt, Homo sapiens
  misc_RNA (1)...(19): siRNA sense strand
ggacggcgaugucacagau

SEQ ID NO: 1147220 - RNA, 19 nt, Homo sapiens
  misc_RNA (1)...(19): siRNA sense strand
gaagcaaacagccaguuaa

SEQ ID NO: 1147221 - RNA, 19 nt, Homo sapiens
  misc_RNA (1)...(19): siRNA sense strand
gaacggcaaugauuaugac

SEQ ID NO: 1147222 - RNA, 19 nt, Homo sapiens
  misc_RNA (1)...(19): siRNA sense strand
gcgagcgacuggaaaguga

SEQ ID NO: 1147223 - RNA, 19 nt, Homo sapiens
  misc_RNA (1)...(19): siRNA sense strand
ccucacaccuuccucagaa

SEQ ID NO: 1147224 - RNA, 19 nt, Homo sapiens
  misc_RNA (1)...(19): siRNA sense strand
gauaugaugccagcaauga

SEQ ID NO: 1147225 - RNA, 19 nt, Homo sapiens
  misc_RNA (1)...(19): siRNA sense strand
ugacccaucuccacgauau

SEQ ID NO: 1147226 - RNA, 19 nt, Homo sapiens
  misc_RNA (1)...(19): siRNA sense strand
caacaggaagugaaacgaa

SEQ ID NO: 1147227 - RNA, 19 nt, Homo sapiens
  misc_RNA (1)...(19): siRNA sense strand
gaaagcgagcgacuggaaa

SEQ ID NO: 1147228 - RNA, 19 nt, Homo sapiens
  misc_RNA (1)...(19): siRNA sense strand
gcaaacagccaguuaaccu

SEQ ID NO: 1147229 - RNA, 19 nt, Homo sapiens
  misc_RNA (1)...(19): siRNA sense strand
agagacaggugcgaaguga

SEQ ID NO: 1147230 - RNA, 19 nt, Homo sapiens
  misc_RNA (1)...(19): siRNA sense strand
gacgugaacggcaaugauu

SEQ ID NO: 1147231 - RNA, 19 nt, Homo sapiens
  misc_RNA (1)...(19): siRNA sense strand
gaugauggcauagagagaa

SEQ ID NO: 1147232 - RNA, 19 nt, Homo sapiens
  misc_RNA (1)...(19): siRNA sense strand
cagauguggucgaggcaaa

SEQ ID NO: 1147233 - RNA, 19 nt, Homo sapiens
  misc_RNA (1)...(19): siRNA sense strand
agaagcaaacagccaguua

SEQ ID NO: 1147234 - RNA, 19 nt, Homo sapiens
  misc_RNA (1)...(19): siRNA sense strand
caaagucgcugggcaucag

SEQ ID NO: 1147235 - RNA, 19 nt, Homo sapiens
  misc_RNA (1)...(19): siRNA sense strand
gaaacgaagggugaagaga

SEQ ID NO: 1147236 - RNA, 19 nt, Homo sapiens
  misc_RNA (1)...(19): siRNA sense strand
caucagacccaacuacauc

SEQ ID NO: 1147237 - RNA, 19 nt, Homo sapiens
  misc_RNA (1)...(19): siRNA sense strand
ugaaagcgagcgacuggaa

SEQ ID NO: 1147238 - RNA, 19 nt, Homo sapiens
  misc_RNA (1)...(19): siRNA sense strand
gaagagacaggugcgaagu

SEQ ID NO: 1147239 - RNA, 19 nt, Homo sapiens
  misc_RNA (1)...(19): siRNA sense strand
caucaucgccuuggcucua

SEQ ID NO: 1147240 - RNA, 19 nt, Homo sapiens
  misc_RNA (1)...(19): siRNA sense strand
ccuggaagauuacuaccau

SEQ ID NO: 1147241 - RNA, 19 nt, Homo sapiens
  misc_RNA (1)...(19): siRNA sense strand
uuucgaguauggcauuaaa

SEQ ID NO: 1147242 - RNA, 19 nt, Homo sapiens
  misc_RNA (1)...(19): siRNA sense strand
uaugaugccagcaaugaaa

SEQ ID NO: 1147243 - RNA, 19 nt, Homo sapiens
  misc_RNA (1)...(19): siRNA sense strand
gaaaccuggaagauuacua

SEQ ID NO: 1147244 - RNA, 19 nt, Homo sapiens
  misc_RNA (1)...(19): siRNA sense strand
cgccuuggcucuagaagca

SEQ ID NO: 1147245 - RNA, 19 nt, Homo sapiens
  misc_RNA (1)...(19): siRNA sense strand
gcaguggggccuuuuauga

SEQ ID NO: 1147246 - RNA, 19 nt, Homo sapiens
  misc_RNA (1)...(19): siRNA sense strand
uggaagauuacuaccauuu

SEQ ID NO: 1147247 - RNA, 19 nt, Homo sapiens
  misc_RNA (1)...(19): siRNA sense strand
cagcaaacaauuccuacug

SEQ ID NO: 1147248 - RNA, 19 nt, Homo sapiens
  misc_RNA (1)...(19): siRNA sense strand
cagcagcgccaccgagaau

SEQ ID NO: 1147249 - RNA, 19 nt, Homo sapiens
  misc_RNA (1)...(19): siRNA sense strand
ugaacggcaaugauuauga

SEQ ID NO: 1147250 - RNA, 19 nt, Homo sapiens
  misc_RNA (1)...(19): siRNA sense strand
caacuacaucgacauuuac

SEQ ID NO: 1147251 - RNA, 19 nt, Homo sapiens
  misc_RNA (1)...(19): siRNA sense strand
aaacacggcacucguugug

SEQ ID NO: 1147252 - RNA, 19 nt, Homo sapiens
  misc_RNA (1)...(19): siRNA sense strand
ggaagauuacuaccauuuu

SEQ ID NO: 1147253 - RNA, 19 nt, Homo sapiens
  misc_RNA (1)...(19): siRNA sense strand
caacuugggccagauugga

SEQ ID NO: 1147254 - RNA, 19 nt, Homo sapiens
  misc_RNA (1)...(19): siRNA sense strand
gaucugcgucagcgcugua

SEQ ID NO: 1147255 - RNA, 19 nt, Homo sapiens
  misc_RNA (1)...(19): siRNA sense strand
cgcaggcccuuuacuucaa

SEQ ID NO: 1147256 - RNA, 19 nt, Homo sapiens
  misc_RNA (1)...(19): siRNA sense strand
ccaacagcaucuacaccau

SEQ ID NO: 1147257 - RNA, 19 nt, Homo sapiens
  misc_RNA (1)...(19): siRNA sense strand
cuacaucgacauuuacagu

SEQ ID NO: 1147258 - RNA, 19 nt, Homo sapiens
  misc_RNA (1)...(19): siRNA sense strand
ccagcaacaggaagugaaa

SEQ ID NO: 1147259 - RNA, 19 nt, Homo sapiens
  misc_RNA (1)...(19): siRNA sense strand
gcuuucgaguauggcauua

SEQ ID NO: 1147260 - RNA, 19 nt, Homo sapiens
  misc_RNA (1)...(19): siRNA sense strand
aauaaacacggcacucguu

SEQ ID NO: 1147261 - RNA, 19 nt, Homo sapiens
  misc_RNA (1)...(19): siRNA sense strand
caaugauuaugacccaucu

SEQ ID NO: 1147262 - RNA, 19 nt, Homo sapiens
  misc_RNA (1)...(19): siRNA sense strand
caacaugugguaccugcau

SEQ ID NO: 1147263 - RNA, 19 nt, Homo sapiens
  misc_RNA (1)...(19): siRNA sense strand
gcaaagucgcugggcauca

SEQ ID NO: 1147264 - RNA, 19 nt, Homo sapiens
  misc_RNA (1)...(19): siRNA sense strand
ggugaaauggcuccagcaa

SEQ ID NO: 1147265 - RNA, 19 nt, Homo sapiens
  misc_RNA (1)...(19): siRNA sense strand
caaacaauuccuacugcau

SEQ ID NO: 1147266 - RNA, 19 nt, Homo sapiens
  misc_RNA (1)...(19): siRNA sense strand
uaucacagcaaaaccuuua

SEQ ID NO: 1147267 - RNA, 19 nt, Homo sapiens
  misc_RNA (1)...(19): siRNA sense strand
aacgaagggugaagagaca

SEQ ID NO: 1147268 - RNA, 19 nt, Homo sapiens
  misc_RNA (1)...(19): siRNA sense strand
gcaucagacccaacuacau

SEQ ID NO: 1147269 - RNA, 19 nt, Homo sapiens
  misc_RNA (1)...(19): siRNA sense strand
guacaaugccaaaauagga

SEQ ID NO: 1147270 - RNA, 19 nt, Homo sapiens
  misc_RNA (1)...(19): siRNA sense strand
gcaggcccuuuacuucaac

SEQ ID NO: 1147271 - RNA, 19 nt, Homo sapiens
  misc_RNA (1)...(19): siRNA sense strand
ccgcaggcccuuuacuuca

SEQ ID NO: 1147272 - RNA, 19 nt, Homo sapiens
  misc_RNA (1)...(19): siRNA sense strand
cgacgugaacggcaaugau

SEQ ID NO: 1147273 - RNA, 19 nt, Homo sapiens
  misc_RNA (1)...(19): siRNA sense strand
caccgagaauggcuacaag

SEQ ID NO: 1147274 - RNA, 19 nt, Homo sapiens
  misc_RNA (1)...(19): siRNA sense strand
cgugaacggcaaugauuau

SEQ ID NO: 1147275 - RNA, 19 nt, Homo sapiens
  misc_RNA (1)...(19): siRNA sense strand
gugacccgcaggcccuuua

SEQ ID NO: 1147276 - RNA, 19 nt, Homo sapiens
  misc_RNA (1)...(19): siRNA sense strand
ccuuggcucuagaagcaaa

SEQ ID NO: 1147277 - RNA, 19 nt, Homo sapiens
  misc_RNA (1)...(19): siRNA sense strand
gcaacaggaagugaaacga

SEQ ID NO: 1147278 - RNA, 19 nt, Homo sapiens
  misc_RNA (1)...(19): siRNA sense strand
ugcgauggcuacaccaaca

SEQ ID NO: 1147279 - RNA, 19 nt, Homo sapiens
  misc_RNA (1)...(19): siRNA sense strand
ccaccgagaauggcuacaa

SEQ ID NO: 1147280 - RNA, 19 nt, Homo sapiens
  misc_RNA (1)...(19): siRNA sense strand
ccaacuacaucgacauuua

SEQ ID NO: 1147281 - RNA, 19 nt, Homo sapiens
  misc_RNA (1)...(19): siRNA sense strand
uuggaaaccuggaagauua

SEQ ID NO: 1147282 - RNA, 19 nt, Homo sapiens
  misc_RNA (1)...(19): siRNA sense strand
ugaaauggcuccagcaaca

SEQ ID NO: 1147283 - RNA, 19 nt, Homo sapiens
  misc_RNA (1)...(19): siRNA sense strand
ggacggcgaugucacagau

SEQ ID NO: 1147284 - RNA, 19 nt, Homo sapiens
  misc_RNA (1)...(19): siRNA sense strand
gaagcaaacagccaguuaa

SEQ ID NO: 1147285 - RNA, 19 nt, Homo sapiens
  misc_RNA (1)...(19): siRNA sense strand
gaacggcaaugauuaugac

SEQ ID NO: 1147286 - RNA, 19 nt, Homo sapiens
  misc_RNA (1)...(19): siRNA sense strand
gcgagcgacuggaaaguga

SEQ ID NO: 1147287 - RNA, 19 nt, Homo sapiens
  misc_RNA (1)...(19): siRNA sense strand
ccucacaccuuccucagaa

SEQ ID NO: 1147288 - RNA, 19 nt, Homo sapiens
  misc_RNA (1)...(19): siRNA sense strand
gauaugaugccagcaauga

SEQ ID NO: 1147289 - RNA, 19 nt, Homo sapiens
  misc_RNA (1)...(19): siRNA sense strand
ugacccaucuccacgauau

SEQ ID NO: 1147290 - RNA, 19 nt, Homo sapiens
  misc_RNA (1)...(19): siRNA sense strand
caacaggaagugaaacgaa

SEQ ID NO: 1147291 - RNA, 19 nt, Homo sapiens
  misc_RNA (1)...(19): siRNA sense strand
gaaagcgagcgacuggaaa

SEQ ID NO: 1147292 - RNA, 19 nt, Homo sapiens
  misc_RNA (1)...(19): siRNA sense strand
gcaaacagccaguuaaccu

SEQ ID NO: 1147293 - RNA, 19 nt, Homo sapiens
  misc_RNA (1)...(19): siRNA sense strand
agagacaggugcgaaguga

SEQ ID NO: 1147294 - RNA, 19 nt, Homo sapiens
  misc_RNA (1)...(19): siRNA sense strand
gacgugaacggcaaugauu

SEQ ID NO: 1147295 - RNA, 19 nt, Homo sapiens
  misc_RNA (1)...(19): siRNA sense strand
gaugauggcauagagagaa

SEQ ID NO: 1147296 - RNA, 19 nt, Homo sapiens
  misc_RNA (1)...(19): siRNA sense strand
cagauguggucgaggcaaa

SEQ ID NO: 1147297 - RNA, 19 nt, Homo sapiens
  misc_RNA (1)...(19): siRNA sense strand
agaagcaaacagccaguua

SEQ ID NO: 1147298 - RNA, 19 nt, Homo sapiens
  misc_RNA (1)...(19): siRNA sense strand
caaagucgcugggcaucag

SEQ ID NO: 1147299 - RNA, 19 nt, Homo sapiens
  misc_RNA (1)...(19): siRNA sense strand
gaaacgaagggugaagaga

SEQ ID NO: 1147300 - RNA, 19 nt, Homo sapiens
  misc_RNA (1)...(19): siRNA sense strand
caucagacccaacuacauc

SEQ ID NO: 1147301 - RNA, 19 nt, Homo sapiens
  misc_RNA (1)...(19): siRNA sense strand
ugaaagcgagcgacuggaa

SEQ ID NO: 1147302 - RNA, 19 nt, Homo sapiens
  misc_RNA (1)...(19): siRNA sense strand
gaagagacaggugcgaagu

SEQ ID NO: 1147303 - RNA, 19 nt, Homo sapiens
  misc_RNA (1)...(19): siRNA sense strand
caucaucgccuuggcucua

SEQ ID NO: 1147304 - RNA, 19 nt, Homo sapiens
  misc_RNA (1)...(19): siRNA sense strand
ccuggaagauuacuaccau

SEQ ID NO: 1147305 - RNA, 19 nt, Homo sapiens
  misc_RNA (1)...(19): siRNA sense strand
uuucgaguauggcauuaaa

SEQ ID NO: 1147306 - RNA, 19 nt, Homo sapiens
  misc_RNA (1)...(19): siRNA sense strand
uaugaugccagcaaugaaa

SEQ ID NO: 1147307 - RNA, 19 nt, Homo sapiens
  misc_RNA (1)...(19): siRNA sense strand
gaaaccuggaagauuacua

SEQ ID NO: 1147308 - RNA, 19 nt, Homo sapiens
  misc_RNA (1)...(19): siRNA sense strand
cgccuuggcucuagaagca

SEQ ID NO: 1147309 - RNA, 19 nt, Homo sapiens
  misc_RNA (1)...(19): siRNA sense strand
gcaguggggccuuuuauga

SEQ ID NO: 1147310 - RNA, 19 nt, Homo sapiens
  misc_RNA (1)...(19): siRNA sense strand
uggaagauuacuaccauuu

SEQ ID NO: 1147311 - RNA, 19 nt, Homo sapiens
  misc_RNA (1)...(19): siRNA sense strand
cagcaaacaauuccuacug

SEQ ID NO: 1147312 - RNA, 19 nt, Homo sapiens
  misc_RNA (1)...(19): siRNA sense strand
cagcagcgccaccgagaau

SEQ ID NO: 1147313 - RNA, 19 nt, Homo sapiens
  misc_RNA (1)...(19): siRNA sense strand
ugaacggcaaugauuauga

SEQ ID NO: 1147314 - RNA, 19 nt, Homo sapiens
  misc_RNA (1)...(19): siRNA sense strand
caacuacaucgacauuuac

SEQ ID NO: 1147315 - RNA, 19 nt, Homo sapiens
  misc_RNA (1)...(19): siRNA sense strand
aaacacggcacucguugug

SEQ ID NO: 1147316 - RNA, 19 nt, Homo sapiens
  misc_RNA (1)...(19): siRNA sense strand
ggaagauuacuaccauuuu

SEQ ID NO: 1147317 - RNA, 19 nt, Homo sapiens
  misc_RNA (1)...(19): siRNA sense strand
caacuugggccagauugga

SEQ ID NO: 1147318 - RNA, 19 nt, Homo sapiens
  misc_RNA (1)...(19): siRNA sense strand
gaucugcgucagcgcugua

SEQ ID NO: 1147319 - RNA, 19 nt, Homo sapiens
  misc_RNA (1)...(19): siRNA sense strand
cgcaggcccuuuacuucaa

SEQ ID NO: 1147320 - RNA, 19 nt, Homo sapiens
  misc_RNA (1)...(19): siRNA sense strand
ccaacagcaucuacaccau

SEQ ID NO: 1147321 - RNA, 19 nt, Homo sapiens
  misc_RNA (1)...(19): siRNA sense strand
cuacaucgacauuuacagu

SEQ ID NO: 1147322 - RNA, 19 nt, Homo sapiens
  misc_RNA (1)...(19): siRNA sense strand
ccagcaacaggaagugaaa

SEQ ID NO: 1147323 - RNA, 19 nt, Homo sapiens
  misc_RNA (1)...(19): siRNA sense strand
gcuuucgaguauggcauua

SEQ ID NO: 1147324 - RNA, 19 nt, Homo sapiens
  misc_RNA (1)...(19): siRNA sense strand
aauaaacacggcacucguu

SEQ ID NO: 1147325 - RNA, 19 nt, Homo sapiens
  misc_RNA (1)...(19): siRNA sense strand
caaugauuaugacccaucu

SEQ ID NO: 1147326 - RNA, 19 nt, Homo sapiens
  misc_RNA (1)...(19): siRNA sense strand
caacaugugguaccugcau

SEQ ID NO: 1147327 - RNA, 19 nt, Homo sapiens
  misc_RNA (1)...(19): siRNA sense strand
gcaaagucgcugggcauca

SEQ ID NO: 1147328 - RNA, 19 nt, Homo sapiens
  misc_RNA (1)...(19): siRNA sense strand
ggugaaauggcuccagcaa

SEQ ID NO: 1147329 - RNA, 19 nt, Homo sapiens
  misc_RNA (1)...(19): siRNA sense strand
caaacaauuccuacugcau

SEQ ID NO: 1147330 - RNA, 19 nt, Homo sapiens
  misc_RNA (1)...(19): siRNA sense strand
uaucacagcaaaaccuuua

SEQ ID NO: 1147331 - RNA, 19 nt, Homo sapiens
  misc_RNA (1)...(19): siRNA sense strand
aacgaagggugaagagaca

SEQ ID NO: 1147332 - RNA, 19 nt, Homo sapiens
  misc_RNA (1)...(19): siRNA sense strand
gcaucagacccaacuacau

SEQ ID NO: 1147333 - RNA, 19 nt, Homo sapiens
  misc_RNA (1)...(19): siRNA sense strand
guacaaugccaaaauagga

SEQ ID NO: 1147334 - RNA, 19 nt, Homo sapiens
  misc_RNA (1)...(19): siRNA sense strand
gcaggcccuuuacuucaac

SEQ ID NO: 1147335 - RNA, 19 nt, Homo sapiens
  misc_RNA (1)...(19): siRNA sense strand
ccgcaggcccuuuacuuca

SEQ ID NO: 1147336 - RNA, 19 nt, Homo sapiens
  misc_RNA (1)...(19): siRNA sense strand
cgacgugaacggcaaugau

SEQ ID NO: 1147337 - RNA, 19 nt, Homo sapiens
  misc_RNA (1)...(19): siRNA sense strand
caccgagaauggcuacaag

SEQ ID NO: 1147338 - RNA, 19 nt, Homo sapiens
  misc_RNA (1)...(19): siRNA sense strand
cgugaacggcaaugauuau

SEQ ID NO: 1147339 - RNA, 19 nt, Homo sapiens
  misc_RNA (1)...(19): siRNA sense strand
gugacccgcaggcccuuua

SEQ ID NO: 1147340 - RNA, 19 nt, Homo sapiens
  misc_RNA (1)...(19): siRNA sense strand
ccuuggcucuagaagcaaa

SEQ ID NO: 1147341 - RNA, 19 nt, Homo sapiens
  misc_RNA (1)...(19): siRNA sense strand
gcaacaggaagugaaacga

SEQ ID NO: 1147342 - RNA, 19 nt, Homo sapiens
  misc_RNA (1)...(19): siRNA sense strand
ugcgauggcuacaccaaca

SEQ ID NO: 1147343 - RNA, 19 nt, Homo sapiens
  misc_RNA (1)...(19): siRNA sense strand
ccaccgagaauggcuacaa

SEQ ID NO: 1147344 - RNA, 19 nt, Homo sapiens
  misc_RNA (1)...(19): siRNA sense strand
ccaacuacaucgacauuua

SEQ ID NO: 1147345 - RNA, 19 nt, Homo sapiens
  misc_RNA (1)...(19): siRNA sense strand
uuggaaaccuggaagauua

SEQ ID NO: 1147346 - RNA, 19 nt, Homo sapiens
  misc_RNA (1)...(19): siRNA sense strand
ugaaauggcuccagcaaca

SEQ ID NO: 1147347 - RNA, 19 nt, Homo sapiens
  misc_RNA (1)...(19): siRNA sense strand
ggacggcgaugucacagau

SEQ ID NO: 1147348 - RNA, 19 nt, Homo sapiens
  misc_RNA (1)...(19): siRNA sense strand
gaagcaaacagccaguuaa

SEQ ID NO: 1147349 - RNA, 19 nt, Homo sapiens
  misc_RNA (1)...(19): siRNA sense strand
gaacggcaaugauuaugac

SEQ ID NO: 1147350 - RNA, 19 nt, Homo sapiens
  misc_RNA (1)...(19): siRNA sense strand
gcgagcgacuggaaaguga

SEQ ID NO: 1147351 - RNA, 19 nt, Homo sapiens
  misc_RNA (1)...(19): siRNA sense strand
ccucacaccuuccucagaa

SEQ ID NO: 1147352 - RNA, 19 nt, Homo sapiens
  misc_RNA (1)...(19): siRNA sense strand
gauaugaugccagcaauga

SEQ ID NO: 1147353 - RNA, 19 nt, Homo sapiens
  misc_RNA (1)...(19): siRNA sense strand
ugacccaucuccacgauau

SEQ ID NO: 1147354 - RNA, 19 nt, Homo sapiens
  misc_RNA (1)...(19): siRNA sense strand
caacaggaagugaaacgaa

SEQ ID NO: 1147355 - RNA, 19 nt, Homo sapiens
  misc_RNA (1)...(19): siRNA sense strand
gaaagcgagcgacuggaaa

SEQ ID NO: 1147356 - RNA, 19 nt, Homo sapiens
  misc_RNA (1)...(19): siRNA sense strand
gcaaacagccaguuaaccu

SEQ ID NO: 1147357 - RNA, 19 nt, Homo sapiens
  misc_RNA (1)...(19): siRNA sense strand
agagacaggugcgaaguga

SEQ ID NO: 1147358 - RNA, 19 nt, Homo sapiens
  misc_RNA (1)...(19): siRNA sense strand
gacgugaacggcaaugauu

SEQ ID NO: 1147359 - RNA, 19 nt, Homo sapiens
  misc_RNA (1)...(19): siRNA sense strand
gaugauggcauagagagaa

SEQ ID NO: 1147360 - RNA, 19 nt, Homo sapiens
  misc_RNA (1)...(19): siRNA sense strand
cagauguggucgaggcaaa

SEQ ID NO: 1147361 - RNA, 19 nt, Homo sapiens
  misc_RNA (1)...(19): siRNA sense strand
agaagcaaacagccaguua

SEQ ID NO: 1147362 - RNA, 19 nt, Homo sapiens
  misc_RNA (1)...(19): siRNA sense strand
caaagucgcugggcaucag

SEQ ID NO: 1147363 - RNA, 19 nt, Homo sapiens
  misc_RNA (1)...(19): siRNA sense strand
gaaacgaagggugaagaga

SEQ ID NO: 1147364 - RNA, 19 nt, Homo sapiens
  misc_RNA (1)...(19): siRNA sense strand
caucagacccaacuacauc

SEQ ID NO: 1147365 - RNA, 19 nt, Homo sapiens
  misc_RNA (1)...(19): siRNA sense strand
ugaaagcgagcgacuggaa

SEQ ID NO: 1147366 - RNA, 19 nt, Homo sapiens
  misc_RNA (1)...(19): siRNA sense strand
gaagagacaggugcgaagu

SEQ ID NO: 1147367 - RNA, 19 nt, Homo sapiens
  misc_RNA (1)...(19): siRNA sense strand
caucaucgccuuggcucua

SEQ ID NO: 1147368 - RNA, 19 nt, Homo sapiens
  misc_RNA (1)...(19): siRNA sense strand
ccuggaagauuacuaccau

SEQ ID NO: 1147369 - RNA, 19 nt, Homo sapiens
  misc_RNA (1)...(19): siRNA sense strand
uuucgaguauggcauuaaa

SEQ ID NO: 1147370 - RNA, 19 nt, Homo sapiens
  misc_RNA (1)...(19): siRNA sense strand
uaugaugccagcaaugaaa

SEQ ID NO: 1147371 - RNA, 19 nt, Homo sapiens
  misc_RNA (1)...(19): siRNA sense strand
gaaaccuggaagauuacua

SEQ ID NO: 1147372 - RNA, 19 nt, Homo sapiens
  misc_RNA (1)...(19): siRNA sense strand
cgccuuggcucuagaagca

SEQ ID NO: 1147373 - RNA, 19 nt, Homo sapiens
  misc_RNA (1)...(19): siRNA sense strand
gcaguggggccuuuuauga

SEQ ID NO: 1147374 - RNA, 19 nt, Homo sapiens
  misc_RNA (1)...(19): siRNA sense strand
uggaagauuacuaccauuu

SEQ ID NO: 1147375 - RNA, 19 nt, Homo sapiens
  misc_RNA (1)...(19): siRNA sense strand
cagcaaacaauuccuacug

SEQ ID NO: 1147376 - RNA, 19 nt, Homo sapiens
  misc_RNA (1)...(19): siRNA sense strand
cagcagcgccaccgagaau

SEQ ID NO: 1147377 - RNA, 19 nt, Homo sapiens
  misc_RNA (1)...(19): siRNA sense strand
ugaacggcaaugauuauga

SEQ ID NO: 1147378 - RNA, 19 nt, Homo sapiens
  misc_RNA (1)...(19): siRNA sense strand
caacuacaucgacauuuac

SEQ ID NO: 1147379 - RNA, 19 nt, Homo sapiens
  misc_RNA (1)...(19): siRNA sense strand
aaacacggcacucguugug

SEQ ID NO: 1147380 - RNA, 19 nt, Homo sapiens
  misc_RNA (1)...(19): siRNA sense strand
ggaagauuacuaccauuuu

SEQ ID NO: 1147381 - RNA, 19 nt, Homo sapiens
  misc_RNA (1)...(19): siRNA sense strand
caacuugggccagauugga

SEQ ID NO: 1147382 - RNA, 19 nt, Homo sapiens
  misc_RNA (1)...(19): siRNA sense strand
gaucugcgucagcgcugua

SEQ ID NO: 1147383 - RNA, 19 nt, Homo sapiens
  misc_RNA (1)...(19): siRNA sense strand
cgcaggcccuuuacuucaa

SEQ ID NO: 1147384 - RNA, 19 nt, Homo sapiens
  misc_RNA (1)...(19): siRNA sense strand
ccaacagcaucuacaccau

SEQ ID NO: 1147385 - RNA, 19 nt, Homo sapiens
  misc_RNA (1)...(19): siRNA sense strand
cuacaucgacauuuacagu

SEQ ID NO: 1147386 - RNA, 19 nt, Homo sapiens
  misc_RNA (1)...(19): siRNA sense strand
ccagcaacaggaagugaaa

SEQ ID NO: 1147387 - RNA, 19 nt, Homo sapiens
  misc_RNA (1)...(19): siRNA sense strand
gcuuucgaguauggcauua

SEQ ID NO: 1147388 - RNA, 19 nt, Homo sapiens
  misc_RNA (1)...(19): siRNA sense strand
aauaaacacggcacucguu

SEQ ID NO: 1147389 - RNA, 19 nt, Homo sapiens
  misc_RNA (1)...(19): siRNA sense strand
caaugauuaugacccaucu

SEQ ID NO: 1147390 - RNA, 19 nt, Homo sapiens
  misc_RNA (1)...(19): siRNA sense strand
caacaugugguaccugcau

SEQ ID NO: 1147391 - RNA, 19 nt, Homo sapiens
  misc_RNA (1)...(19): siRNA sense strand
gcaaagucgcugggcauca

SEQ ID NO: 1147392 - RNA, 19 nt, Homo sapiens
  misc_RNA (1)...(19): siRNA sense strand
ggugaaauggcuccagcaa

SEQ ID NO: 1147393 - RNA, 19 nt, Homo sapiens
  misc_RNA (1)...(19): siRNA sense strand
caaacaauuccuacugcau

SEQ ID NO: 1147394 - RNA, 19 nt, Homo sapiens
  misc_RNA (1)...(19): siRNA sense strand
uaucacagcaaaaccuuua

SEQ ID NO: 1147395 - RNA, 19 nt, Homo sapiens
  misc_RNA (1)...(19): siRNA sense strand
aacgaagggugaagagaca

SEQ ID NO: 1147396 - RNA, 19 nt, Homo sapiens
  misc_RNA (1)...(19): siRNA sense strand
gcaucagacccaacuacau

SEQ ID NO: 1147397 - RNA, 19 nt, Homo sapiens
  misc_RNA (1)...(19): siRNA sense strand
guacaaugccaaaauagga

SEQ ID NO: 1147398 - RNA, 19 nt, Homo sapiens
  misc_RNA (1)...(19): siRNA sense strand
gcaggcccuuuacuucaac

SEQ ID NO: 1147399 - RNA, 19 nt, Homo sapiens
  misc_RNA (1)...(19): siRNA sense strand
ccgcaggcccuuuacuuca

SEQ ID NO: 1147400 - RNA, 19 nt, Homo sapiens
  misc_RNA (1)...(19): siRNA sense strand
cgacgugaacggcaaugau

SEQ ID NO: 1147401 - RNA, 19 nt, Homo sapiens
  misc_RNA (1)...(19): siRNA sense strand
caccgagaauggcuacaag

SEQ ID NO: 1147402 - RNA, 19 nt, Homo sapiens
  misc_RNA (1)...(19): siRNA sense strand
cgugaacggcaaugauuau

SEQ ID NO: 1147403 - RNA, 19 nt, Homo sapiens
  misc_RNA (1)...(19): siRNA sense strand
gugacccgcaggcccuuua

SEQ ID NO: 1147404 - RNA, 19 nt, Homo sapiens
  misc_RNA (1)...(19): siRNA sense strand
ccuuggcucuagaagcaaa

SEQ ID NO: 1147405 - RNA, 19 nt, Homo sapiens
  misc_RNA (1)...(19): siRNA sense strand
gcaacaggaagugaaacga

SEQ ID NO: 1147406 - RNA, 19 nt, Homo sapiens
  misc_RNA (1)...(19): siRNA sense strand
ugcgauggcuacaccaaca

SEQ ID NO: 1147407 - RNA, 19 nt, Homo sapiens
  misc_RNA (1)...(19): siRNA sense strand
ccaccgagaauggcuacaa

SEQ ID NO: 1147408 - RNA, 19 nt, Homo sapiens
  misc_RNA (1)...(19): siRNA sense strand
ccaacuacaucgacauuua

SEQ ID NO: 1147409 - RNA, 19 nt, Homo sapiens
  misc_RNA (1)...(19): siRNA sense strand
uuggaaaccuggaagauua

SEQ ID NO: 1147410 - RNA, 19 nt, Homo sapiens
  misc_RNA (1)...(19): siRNA sense strand
ugaaauggcuccagcaaca

SEQ ID NO: 1147411 - RNA, 19 nt, Homo sapiens
  misc_RNA (1)...(19): siRNA sense strand
ggacggcgaugucacagau

SEQ ID NO: 1147412 - RNA, 19 nt, Homo sapiens
  misc_RNA (1)...(19): siRNA sense strand
gaagcaaacagccaguuaa

SEQ ID NO: 1147413 - RNA, 19 nt, Homo sapiens
  misc_RNA (1)...(19): siRNA sense strand
gaacggcaaugauuaugac

SEQ ID NO: 1147414 - RNA, 19 nt, Homo sapiens
  misc_RNA (1)...(19): siRNA sense strand
gcgagcgacuggaaaguga

SEQ ID NO: 1147415 - RNA, 19 nt, Homo sapiens
  misc_RNA (1)...(19): siRNA sense strand
ccucacaccuuccucagaa

SEQ ID NO: 1147416 - RNA, 19 nt, Homo sapiens
  misc_RNA (1)...(19): siRNA sense strand
gauaugaugccagcaauga

SEQ ID NO: 1147417 - RNA, 19 nt, Homo sapiens
  misc_RNA (1)...(19): siRNA sense strand
ugacccaucuccacgauau

SEQ ID NO: 1147418 - RNA, 19 nt, Homo sapiens
  misc_RNA (1)...(19): siRNA sense strand
caacaggaagugaaacgaa

SEQ ID NO: 1147419 - RNA, 19 nt, Homo sapiens
  misc_RNA (1)...(19): siRNA sense strand
gaaagcgagcgacuggaaa

SEQ ID NO: 1147420 - RNA, 19 nt, Homo sapiens
  misc_RNA (1)...(19): siRNA sense strand
gcaaacagccaguuaaccu

SEQ ID NO: 1147421 - RNA, 19 nt, Homo sapiens
  misc_RNA (1)...(19): siRNA sense strand
agagacaggugcgaaguga

SEQ ID NO: 1147422 - RNA, 19 nt, Homo sapiens
  misc_RNA (1)...(19): siRNA sense strand
gacgugaacggcaaugauu

SEQ ID NO: 1147423 - RNA, 19 nt, Homo sapiens
  misc_RNA (1)...(19): siRNA sense strand
gaugauggcauagagagaa

SEQ ID NO: 1147424 - RNA, 19 nt, Homo sapiens
  misc_RNA (1)...(19): siRNA sense strand
cagauguggucgaggcaaa

SEQ ID NO: 1147425 - RNA, 19 nt, Homo sapiens
  misc_RNA (1)...(19): siRNA sense strand
agaagcaaacagccaguua

SEQ ID NO: 1147426 - RNA, 19 nt, Homo sapiens
  misc_RNA (1)...(19): siRNA sense strand
caaagucgcugggcaucag

SEQ ID NO: 1147427 - RNA, 19 nt, Homo sapiens
  misc_RNA (1)...(19): siRNA sense strand
gaaacgaagggugaagaga

SEQ ID NO: 1147428 - RNA, 19 nt, Homo sapiens
  misc_RNA (1)...(19): siRNA sense strand
caucagacccaacuacauc

SEQ ID NO: 1147429 - RNA, 19 nt, Homo sapiens
  misc_RNA (1)...(19): siRNA sense strand
ugaaagcgagcgacuggaa

SEQ ID NO: 1147430 - RNA, 19 nt, Homo sapiens
  misc_RNA (1)...(19): siRNA sense strand
gaagagacaggugcgaagu

SEQ ID NO: 1147431 - RNA, 19 nt, Homo sapiens
  misc_RNA (1)...(19): siRNA sense strand
caucaucgccuuggcucua

SEQ ID NO: 1147432 - RNA, 19 nt, Homo sapiens
  misc_RNA (1)...(19): siRNA sense strand
ccuggaagauuacuaccau

SEQ ID NO: 1147433 - RNA, 19 nt, Homo sapiens
  misc_RNA (1)...(19): siRNA sense strand
uuucgaguauggcauuaaa

SEQ ID NO: 1147434 - RNA, 19 nt, Homo sapiens
  misc_RNA (1)...(19): siRNA sense strand
uaugaugccagcaaugaaa

SEQ ID NO: 1147435 - RNA, 19 nt, Homo sapiens
  misc_RNA (1)...(19): siRNA sense strand
gaaaccuggaagauuacua

SEQ ID NO: 1147436 - RNA, 19 nt, Homo sapiens
  misc_RNA (1)...(19): siRNA sense strand
cgccuuggcucuagaagca

SEQ ID NO: 1147437 - RNA, 19 nt, Homo sapiens
  misc_RNA (1)...(19): siRNA sense strand
gcaguggggccuuuuauga

SEQ ID NO: 1147438 - RNA, 19 nt, Homo sapiens
  misc_RNA (1)...(19): siRNA sense strand
uggaagauuacuaccauuu

SEQ ID NO: 1147439 - RNA, 19 nt, Homo sapiens
  misc_RNA (1)...(19): siRNA sense strand
cagcaaacaauuccuacug

SEQ ID NO: 1147440 - RNA, 19 nt, Homo sapiens
  misc_RNA (1)...(19): siRNA sense strand
cagcagcgccaccgagaau

SEQ ID NO: 1147441 - RNA, 19 nt, Homo sapiens
  misc_RNA (1)...(19): siRNA sense strand
ugaacggcaaugauuauga

SEQ ID NO: 1147442 - RNA, 19 nt, Homo sapiens
  misc_RNA (1)...(19): siRNA sense strand
caacuacaucgacauuuac

SEQ ID NO: 1147443 - RNA, 19 nt, Homo sapiens
  misc_RNA (1)...(19): siRNA sense strand
aaacacggcacucguugug

SEQ ID NO: 1147444 - RNA, 19 nt, Homo sapiens
  misc_RNA (1)...(19): siRNA sense strand
ggaagauuacuaccauuuu

SEQ ID NO: 1147445 - RNA, 19 nt, Homo sapiens
  misc_RNA (1)...(19): siRNA sense strand
caacuugggccagauugga

SEQ ID NO: 1147446 - RNA, 19 nt, Homo sapiens
  misc_RNA (1)...(19): siRNA sense strand
gaucugcgucagcgcugua

SEQ ID NO: 1147447 - RNA, 19 nt, Homo sapiens
  misc_RNA (1)...(19): siRNA sense strand
cgcaggcccuuuacuucaa

SEQ ID NO: 1147448 - RNA, 19 nt, Homo sapiens
  misc_RNA (1)...(19): siRNA sense strand
ccaacagcaucuacaccau

SEQ ID NO: 1147449 - RNA, 19 nt, Homo sapiens
  misc_RNA (1)...(19): siRNA sense strand
cuacaucgacauuuacagu

SEQ ID NO: 1147450 - RNA, 19 nt, Homo sapiens
  misc_RNA (1)...(19): siRNA sense strand
ccagcaacaggaagugaaa

SEQ ID NO: 1147451 - RNA, 19 nt, Homo sapiens
  misc_RNA (1)...(19): siRNA sense strand
gcuuucgaguauggcauua

SEQ ID NO: 1147452 - RNA, 19 nt, Homo sapiens
  misc_RNA (1)...(19): siRNA sense strand
aauaaacacggcacucguu

SEQ ID NO: 1147453 - RNA, 19 nt, Homo sapiens
  misc_RNA (1)...(19): siRNA sense strand
caaugauuaugacccaucu

SEQ ID NO: 1147454 - RNA, 19 nt, Homo sapiens
  misc_RNA (1)...(19): siRNA sense strand
caacaugugguaccugcau

SEQ ID NO: 1147455 - RNA, 19 nt, Homo sapiens
  misc_RNA (1)...(19): siRNA sense strand
gcaaagucgcugggcauca

SEQ ID NO: 1147456 - RNA, 19 nt, Homo sapiens
  misc_RNA (1)...(19): siRNA sense strand
ggugaaauggcuccagcaa

SEQ ID NO: 1147457 - RNA, 19 nt, Homo sapiens
  misc_RNA (1)...(19): siRNA sense strand
caaacaauuccuacugcau

SEQ ID NO: 1147458 - RNA, 19 nt, Homo sapiens
  misc_RNA (1)...(19): siRNA sense strand
uaucacagcaaaaccuuua

SEQ ID NO: 1147459 - RNA, 19 nt, Homo sapiens
  misc_RNA (1)...(19): siRNA sense strand
aacgaagggugaagagaca

SEQ ID NO: 1147460 - RNA, 19 nt, Homo sapiens
  misc_RNA (1)...(19): siRNA sense strand
gcaucagacccaacuacau

SEQ ID NO: 1147461 - RNA, 19 nt, Homo sapiens
  misc_RNA (1)...(19): siRNA sense strand
guacaaugccaaaauagga

SEQ ID NO: 1147462 - RNA, 19 nt, Homo sapiens
  misc_RNA (1)...(19): siRNA sense strand
gcaggcccuuuacuucaac

SEQ ID NO: 1147463 - RNA, 19 nt, Homo sapiens
  misc_RNA (1)...(19): siRNA sense strand
ccgcaggcccuuuacuuca

SEQ ID NO: 1147464 - RNA, 19 nt, Homo sapiens
  misc_RNA (1)...(19): siRNA sense strand
cgacgugaacggcaaugau

SEQ ID NO: 1147465 - RNA, 19 nt, Homo sapiens
  misc_RNA (1)...(19): siRNA sense strand
caccgagaauggcuacaag

SEQ ID NO: 1147466 - RNA, 19 nt, Homo sapiens
  misc_RNA (1)...(19): siRNA sense strand
cgugaacggcaaugauuau

SEQ ID NO: 1147467 - RNA, 19 nt, Homo sapiens
  misc_RNA (1)...(19): siRNA sense strand
gugacccgcaggcccuuua

SEQ ID NO: 1147468 - RNA, 19 nt, Homo sapiens
  misc_RNA (1)...(19): siRNA sense strand
ccuuggcucuagaagcaaa

SEQ ID NO: 1147469 - RNA, 19 nt, Homo sapiens
  misc_RNA (1)...(19): siRNA sense strand
gcaacaggaagugaaacga

SEQ ID NO: 1147470 - RNA, 19 nt, Homo sapiens
  misc_RNA (1)...(19): siRNA sense strand
ugcgauggcuacaccaaca

SEQ ID NO: 1147471 - RNA, 19 nt, Homo sapiens
  misc_RNA (1)...(19): siRNA sense strand
ccaccgagaauggcuacaa

SEQ ID NO: 1147472 - RNA, 19 nt, Homo sapiens
  misc_RNA (1)...(19): siRNA sense strand
ggaaagagcuaauuuacaa

SEQ ID NO: 1147473 - RNA, 19 nt, Homo sapiens
  misc_RNA (1)...(19): siRNA sense strand
gcauucagcugguauaauu

SEQ ID NO: 1147474 - RNA, 19 nt, Homo sapiens
  misc_RNA (1)...(19): siRNA sense strand
gaaccaaacucaugcaaag

SEQ ID NO: 1147475 - RNA, 19 nt, Homo sapiens
  misc_RNA (1)...(19): siRNA sense strand
aaagagagcuuaucgugaa

SEQ ID NO: 1147476 - RNA, 19 nt, Homo sapiens
  misc_RNA (1)...(19): siRNA sense strand
caagauguguauuugguua

SEQ ID NO: 1147477 - RNA, 19 nt, Homo sapiens
  misc_RNA (1)...(19): siRNA sense strand
gaagaaagaagcaagaaug

SEQ ID NO: 1147478 - RNA, 19 nt, Homo sapiens
  misc_RNA (1)...(19): siRNA sense strand
cagcagaguucaugaagaa

SEQ ID NO: 1147479 - RNA, 19 nt, Homo sapiens
  misc_RNA (1)...(19): siRNA sense strand
acaaagaagucauggauug

SEQ ID NO: 1147480 - RNA, 19 nt, Homo sapiens
  misc_RNA (1)...(19): siRNA sense strand
ggagcuggaucaugaaaga

SEQ ID NO: 1147481 - RNA, 19 nt, Homo sapiens
  misc_RNA (1)...(19): siRNA sense strand
gguaugggcuacaaagaga

SEQ ID NO: 1147482 - RNA, 19 nt, Homo sapiens
  misc_RNA (1)...(19): siRNA sense strand
gcggaucucuguagacgaa

SEQ ID NO: 1147483 - RNA, 19 nt, Homo sapiens
  misc_RNA (1)...(19): siRNA sense strand
gaauggaaagagcuaauuu

SEQ ID NO: 1147484 - RNA, 19 nt, Homo sapiens
  misc_RNA (1)...(19): siRNA sense strand
gaucaguggaauaaaguua

SEQ ID NO: 1147485 - RNA, 19 nt, Homo sapiens
  misc_RNA (1)...(19): siRNA sense strand
gaagaaagagaacaugcaa

SEQ ID NO: 1147486 - RNA, 19 nt, Homo sapiens
  misc_RNA (1)...(19): siRNA sense strand
aaagagaacaugcaauuga

SEQ ID NO: 1147487 - RNA, 19 nt, Homo sapiens
  misc_RNA (1)...(19): siRNA sense strand
gcaagaaugguguuguaaa

SEQ ID NO: 1147488 - RNA, 19 nt, Homo sapiens
  misc_RNA (1)...(19): siRNA sense strand
cagaugcuuugugguauua

SEQ ID NO: 1147489 - RNA, 19 nt, Homo sapiens
  misc_RNA (1)...(19): siRNA sense strand
aaaguauccuggaaucaaa

SEQ ID NO: 1147490 - RNA, 19 nt, Homo sapiens
  misc_RNA (1)...(19): siRNA sense strand
agaaagagaacaugcaauu

SEQ ID NO: 1147491 - RNA, 19 nt, Homo sapiens
  misc_RNA (1)...(19): siRNA sense strand
aagcaagaaugguguugua

SEQ ID NO: 1147492 - RNA, 19 nt, Homo sapiens
  misc_RNA (1)...(19): siRNA sense strand
ugauacaguucuugggaua

SEQ ID NO: 1147493 - RNA, 19 nt, Homo sapiens
  misc_RNA (1)...(19): siRNA sense strand
gaaagagaacaugcaauug

SEQ ID NO: 1147494 - RNA, 19 nt, Homo sapiens
  misc_RNA (1)...(19): siRNA sense strand
cuagaagaauuucaagaug

SEQ ID NO: 1147495 - RNA, 19 nt, Homo sapiens
  misc_RNA (1)...(19): siRNA sense strand
acaaagagaacguugauau

SEQ ID NO: 1147496 - RNA, 19 nt, Homo sapiens
  misc_RNA (1)...(19): siRNA sense strand
caagaaugguguuguaaaa

SEQ ID NO: 1147497 - RNA, 19 nt, Homo sapiens
  misc_RNA (1)...(19): siRNA sense strand
gaacuuguccucuuaaaau

SEQ ID NO: 1147498 - RNA, 19 nt, Homo sapiens
  misc_RNA (1)...(19): siRNA sense strand
aagagaacaugcaauugaa

SEQ ID NO: 1147499 - RNA, 19 nt, Homo sapiens
  misc_RNA (1)...(19): siRNA sense strand
caaaguauccuggaaucaa

SEQ ID NO: 1147500 - RNA, 19 nt, Homo sapiens
  misc_RNA (1)...(19): siRNA sense strand
gagcuaauuuacaaagaag

SEQ ID NO: 1147501 - RNA, 19 nt, Homo sapiens
  misc_RNA (1)...(19): siRNA sense strand
gauuguuugugcugcauuu

SEQ ID NO: 1147502 - RNA, 19 nt, Homo sapiens
  misc_RNA (1)...(19): siRNA sense strand
gaacaugcaauugaagaau

SEQ ID NO: 1147503 - RNA, 19 nt, Homo sapiens
  misc_RNA (1)...(19): siRNA sense strand
ccagaugcuuugugguauu

SEQ ID NO: 1147504 - RNA, 19 nt, Homo sapiens
  misc_RNA (1)...(19): siRNA sense strand
gagcuuaucgugaacuugu

SEQ ID NO: 1147505 - RNA, 19 nt, Homo sapiens
  misc_RNA (1)...(19): siRNA sense strand
ggacagcgugcacuaacuu

SEQ ID NO: 1147506 - RNA, 19 nt, Homo sapiens
  misc_RNA (1)...(19): siRNA sense strand
gaauguccuaccuucuuua

SEQ ID NO: 1147507 - RNA, 19 nt, Homo sapiens
  misc_RNA (1)...(19): siRNA sense strand
gagaacaugcaauugaaga

SEQ ID NO: 1147508 - RNA, 19 nt, Homo sapiens
  misc_RNA (1)...(19): siRNA sense strand
ccaaacucaugcaaagaga

SEQ ID NO: 1147509 - RNA, 19 nt, Homo sapiens
  misc_RNA (1)...(19): siRNA sense strand
gaugcuuugugguauuaaa

SEQ ID NO: 1147510 - RNA, 19 nt, Homo sapiens
  misc_RNA (1)...(19): siRNA sense strand
agaagaauuucaagaugug

SEQ ID NO: 1147511 - RNA, 19 nt, Homo sapiens
  misc_RNA (1)...(19): siRNA sense strand
ggaagaaagaagcaagaau

SEQ ID NO: 1147512 - RNA, 19 nt, Homo sapiens
  misc_RNA (1)...(19): siRNA sense strand
uggaauuaauggaugcuaa

SEQ ID NO: 1147513 - RNA, 19 nt, Homo sapiens
  misc_RNA (1)...(19): siRNA sense strand
guauuaaacaucugcauuc

SEQ ID NO: 1147514 - RNA, 19 nt, Homo sapiens
  misc_RNA (1)...(19): siRNA sense strand
gguauuaaacaucugcauu

SEQ ID NO: 1147515 - RNA, 19 nt, Homo sapiens
  misc_RNA (1)...(19): siRNA sense strand
caacugugaggaauuaugu

SEQ ID NO: 1147516 - RNA, 19 nt, Homo sapiens
  misc_RNA (1)...(19): siRNA sense strand
aaacuucagccaacuguga

SEQ ID NO: 1147517 - RNA, 19 nt, Homo sapiens
  misc_RNA (1)...(19): siRNA sense strand
caaagagaacguugauauc

SEQ ID NO: 1147518 - RNA, 19 nt, Homo sapiens
  misc_RNA (1)...(19): siRNA sense strand
gaagucauccuggguaugg

SEQ ID NO: 1147519 - RNA, 19 nt, Homo sapiens
  misc_RNA (1)...(19): siRNA sense strand
agccaacugugaggaauua

SEQ ID NO: 1147520 - RNA, 19 nt, Homo sapiens
  misc_RNA (1)...(19): siRNA sense strand
gagagcuuaucgugaacuu

SEQ ID NO: 1147521 - RNA, 19 nt, Homo sapiens
  misc_RNA (1)...(19): siRNA sense strand
ggaagaaagagaacaugca

SEQ ID NO: 1147522 - RNA, 19 nt, Homo sapiens
  misc_RNA (1)...(19): siRNA sense strand
ugaagauccuugacuuugg

SEQ ID NO: 1147523 - RNA, 19 nt, Homo sapiens
  misc_RNA (1)...(19): siRNA sense strand
ucgugaacuuguccucuua

SEQ ID NO: 1147524 - RNA, 19 nt, Homo sapiens
  misc_RNA (1)...(19): siRNA sense strand
gugaacuuguccucuuaaa

SEQ ID NO: 1147525 - RNA, 19 nt, Homo sapiens
  misc_RNA (1)...(19): siRNA sense strand
ggaauuaugucgaaaacag

SEQ ID NO: 1147526 - RNA, 19 nt, Homo sapiens
  misc_RNA (1)...(19): siRNA sense strand
gaaacuaagccguccuuuu

SEQ ID NO: 1147527 - RNA, 19 nt, Homo sapiens
  misc_RNA (1)...(19): siRNA sense strand
uuucauccauguccacuga

SEQ ID NO: 1147528 - RNA, 19 nt, Homo sapiens
  misc_RNA (1)...(19): siRNA sense strand
gaaaacagaccaaaguauc

SEQ ID NO: 1147529 - RNA, 19 nt, Homo sapiens
  misc_RNA (1)...(19): siRNA sense strand
gaacaccaucagcagaguu

SEQ ID NO: 1147530 - RNA, 19 nt, Homo sapiens
  misc_RNA (1)...(19): siRNA sense strand
cagcugguauaauucauag

SEQ ID NO: 1147531 - RNA, 19 nt, Homo sapiens
  misc_RNA (1)...(19): siRNA sense strand
uaauggaugcuaacuuaug

SEQ ID NO: 1147532 - RNA, 19 nt, Homo sapiens
  misc_RNA (1)...(19): siRNA sense strand
agucauggauugggaagaa

SEQ ID NO: 1147533 - RNA, 19 nt, Homo sapiens
  misc_RNA (1)...(19): siRNA sense strand
gaagaauggaaagagcuaa

SEQ ID NO: 1147534 - RNA, 19 nt, Homo sapiens
  misc_RNA (1)...(19): siRNA sense strand
ugugaggaauuaugucgaa

SEQ ID NO: 1147535 - RNA, 19 nt, Homo sapiens
  misc_RNA (1)...(19): siRNA sense strand
agaccaaaguauccuggaa

SEQ ID NO: 1147536 - RNA, 19 nt, Homo sapiens
  misc_RNA (1)...(19): siRNA sense strand
gcuggaucaugaaagaaug

SEQ ID NO: 1147537 - RNA, 19 nt, Homo sapiens
  misc_RNA (1)...(19): siRNA sense strand
uuacaaagaagucauggau

SEQ ID NO: 1147538 - RNA, 19 nt, Homo sapiens
  misc_RNA (1)...(19): siRNA sense strand
acccauacaucacuguuug

SEQ ID NO: 1147539 - RNA, 19 nt, Homo sapiens
  misc_RNA (1)...(19): siRNA sense strand
acaagcggaucucuguaga

SEQ ID NO: 1147540 - RNA, 19 nt, Homo sapiens
  misc_RNA (1)...(19): siRNA sense strand
aaacaagucaagccagaga

SEQ ID NO: 1147541 - RNA, 19 nt, Homo sapiens
  misc_RNA (1)...(19): siRNA sense strand
aauggaugcuaacuuaugu

SEQ ID NO: 1147542 - RNA, 19 nt, Homo sapiens
  misc_RNA (1)...(19): siRNA sense strand
gcaacgccacuccuucuca

SEQ ID NO: 1147543 - RNA, 19 nt, Homo sapiens
  misc_RNA (1)...(19): siRNA sense strand
ucagcagaguucaugaaga

SEQ ID NO: 1147544 - RNA, 19 nt, Homo sapiens
  misc_RNA (1)...(19): siRNA sense strand
aagagaacguugauaucug

SEQ ID NO: 1147545 - RNA, 19 nt, Homo sapiens
  misc_RNA (1)...(19): siRNA sense strand
caucugcauucagcuggua

SEQ ID NO: 1147546 - RNA, 19 nt, Homo sapiens
  misc_RNA (1)...(19): siRNA sense strand
cccaccaccucaaauuuau

SEQ ID NO: 1147547 - RNA, 19 nt, Homo sapiens
  misc_RNA (1)...(19): siRNA sense strand
gacaagcggaucucuguag

SEQ ID NO: 1147548 - RNA, 19 nt, Homo sapiens
  misc_RNA (1)...(19): siRNA sense strand
gaccaaaguauccuggaau

SEQ ID NO: 1147549 - RNA, 19 nt, Homo sapiens
  misc_RNA (1)...(19): siRNA sense strand
ggaacaccaucagcagagu

SEQ ID NO: 1147550 - RNA, 19 nt, Homo sapiens
  misc_RNA (1)...(19): siRNA sense strand
aaagagaacguugauaucu

SEQ ID NO: 1147551 - RNA, 19 nt, Homo sapiens
  misc_RNA (1)...(19): siRNA sense strand
aaacuaagccguccuuuuc

SEQ ID NO: 1147552 - RNA, 19 nt, Homo sapiens
  misc_RNA (1)...(19): siRNA sense strand
uuugaagccuagcaacauu

SEQ ID NO: 1147553 - RNA, 19 nt, Homo sapiens
  misc_RNA (1)...(19): siRNA sense strand
ccaguuggaagaaagagaa

SEQ ID NO: 1147554 - RNA, 19 nt, Homo sapiens
  misc_RNA (1)...(19): siRNA sense strand
gauuggauauucccaucag

SEQ ID NO: 1147555 - RNA, 19 nt, Homo sapiens
  misc_RNA (1)...(19): siRNA sense strand
ugaagaauggaaagagcua

SEQ ID NO: 1147556 - RNA, 19 nt, Homo sapiens
  misc_RNA (1)...(19): siRNA sense strand
aacaugcaauugaagaaug

SEQ ID NO: 1147557 - RNA, 19 nt, Homo sapiens
  misc_RNA (1)...(19): siRNA sense strand
ucacuguccuaaaacguua

SEQ ID NO: 1147558 - RNA, 19 nt, Homo sapiens
  misc_RNA (1)...(19): siRNA sense strand
gaagcaagaaugguguugu

SEQ ID NO: 1147559 - RNA, 19 nt, Homo sapiens
  misc_RNA (1)...(19): siRNA sense strand
ugaaagaauguccuaccuu

SEQ ID NO: 1147560 - RNA, 19 nt, Homo sapiens
  misc_RNA (1)...(19): siRNA sense strand
gggaagaaagaagcaagaa

SEQ ID NO: 1147561 - RNA, 19 nt, Homo sapiens
  misc_RNA (1)...(19): siRNA sense strand
gcaauugaagaauggaaag

SEQ ID NO: 1147562 - RNA, 19 nt, Homo sapiens
  misc_RNA (1)...(19): siRNA sense strand
cuacaaagagaacguugau

SEQ ID NO: 1147563 - RNA, 19 nt, Homo sapiens
  misc_RNA (1)...(19): siRNA sense strand
uguccuaccuucuuuacca

SEQ ID NO: 1147564 - RNA, 19 nt, Homo sapiens
  misc_RNA (1)...(19): siRNA sense strand
ucagcugguauaauucaua

SEQ ID NO: 1147565 - RNA, 19 nt, Homo sapiens
  misc_RNA (1)...(19): siRNA sense strand
agaaugguguuguaaaaga

SEQ ID NO: 1147566 - RNA, 19 nt, Homo sapiens
  misc_RNA (1)...(19): siRNA sense strand
caucagcagaguucaugaa

SEQ ID NO: 1147567 - RNA, 19 nt, Homo sapiens
  misc_RNA (1)...(19): siRNA sense strand
gcuacaaagagaacguuga

SEQ ID NO: 1147568 - RNA, 19 nt, Homo sapiens
  misc_RNA (1)...(19): siRNA sense strand
gauacaguucuugggauaa

SEQ ID NO: 1147569 - RNA, 19 nt, Homo sapiens
  misc_RNA (1)...(19): siRNA sense strand
gauuugaagccuagcaaca

SEQ ID NO: 1147570 - RNA, 19 nt, Homo sapiens
  misc_RNA (1)...(19): siRNA sense strand
ccgaagucauccuggguau

SEQ ID NO: 1147571 - RNA, 19 nt, Homo sapiens
  misc_RNA (1)...(19): siRNA sense strand
gcagaguucaugaagaaac

SEQ ID NO: 1147572 - RNA, 19 nt, Homo sapiens
  misc_RNA (1)...(19): siRNA sense strand
ggaaagagcuaauuuacaa

SEQ ID NO: 1147573 - RNA, 19 nt, Homo sapiens
  misc_RNA (1)...(19): siRNA sense strand
gcauucagcugguauaauu

SEQ ID NO: 1147574 - RNA, 19 nt, Homo sapiens
  misc_RNA (1)...(19): siRNA sense strand
gaaccaaacucaugcaaag

SEQ ID NO: 1147575 - RNA, 19 nt, Homo sapiens
  misc_RNA (1)...(19): siRNA sense strand
aaagagagcuuaucgugaa

SEQ ID NO: 1147576 - RNA, 19 nt, Homo sapiens
  misc_RNA (1)...(19): siRNA sense strand
caagauguguauuugguua

SEQ ID NO: 1147577 - RNA, 19 nt, Homo sapiens
  misc_RNA (1)...(19): siRNA sense strand
gaagaaagaagcaagaaug

SEQ ID NO: 1147578 - RNA, 19 nt, Homo sapiens
  misc_RNA (1)...(19): siRNA sense strand
cagcagaguucaugaagaa

SEQ ID NO: 1147579 - RNA, 19 nt, Homo sapiens
  misc_RNA (1)...(19): siRNA sense strand
acaaagaagucauggauug

SEQ ID NO: 1147580 - RNA, 19 nt, Homo sapiens
  misc_RNA (1)...(19): siRNA sense strand
ggagcuggaucaugaaaga

SEQ ID NO: 1147581 - RNA, 19 nt, Homo sapiens
  misc_RNA (1)...(19): siRNA sense strand
gguaugggcuacaaagaga

SEQ ID NO: 1147582 - RNA, 19 nt, Homo sapiens
  misc_RNA (1)...(19): siRNA sense strand
gcggaucucuguagacgaa

SEQ ID NO: 1147583 - RNA, 19 nt, Homo sapiens
  misc_RNA (1)...(19): siRNA sense strand
gaauggaaagagcuaauuu

SEQ ID NO: 1147584 - RNA, 19 nt, Homo sapiens
  misc_RNA (1)...(19): siRNA sense strand
gaucaguggaauaaaguua

SEQ ID NO: 1147585 - RNA, 19 nt, Homo sapiens
  misc_RNA (1)...(19): siRNA sense strand
gaagaaagagaacaugcaa

SEQ ID NO: 1147586 - RNA, 19 nt, Homo sapiens
  misc_RNA (1)...(19): siRNA sense strand
aaagagaacaugcaauuga

SEQ ID NO: 1147587 - RNA, 19 nt, Homo sapiens
  misc_RNA (1)...(19): siRNA sense strand
gcaagaaugguguuguaaa

SEQ ID NO: 1147588 - RNA, 19 nt, Homo sapiens
  misc_RNA (1)...(19): siRNA sense strand
cagaugcuuugugguauua

SEQ ID NO: 1147589 - RNA, 19 nt, Homo sapiens
  misc_RNA (1)...(19): siRNA sense strand
aaaguauccuggaaucaaa

SEQ ID NO: 1147590 - RNA, 19 nt, Homo sapiens
  misc_RNA (1)...(19): siRNA sense strand
agaaagagaacaugcaauu

SEQ ID NO: 1147591 - RNA, 19 nt, Homo sapiens
  misc_RNA (1)...(19): siRNA sense strand
aagcaagaaugguguugua

SEQ ID NO: 1147592 - RNA, 19 nt, Homo sapiens
  misc_RNA (1)...(19): siRNA sense strand
ugauacaguucuugggaua

SEQ ID NO: 1147593 - RNA, 19 nt, Homo sapiens
  misc_RNA (1)...(19): siRNA sense strand
gaaagagaacaugcaauug

SEQ ID NO: 1147594 - RNA, 19 nt, Homo sapiens
  misc_RNA (1)...(19): siRNA sense strand
cuagaagaauuucaagaug

SEQ ID NO: 1147595 - RNA, 19 nt, Homo sapiens
  misc_RNA (1)...(19): siRNA sense strand
acaaagagaacguugauau

SEQ ID NO: 1147596 - RNA, 19 nt, Homo sapiens
  misc_RNA (1)...(19): siRNA sense strand
caagaaugguguuguaaaa

SEQ ID NO: 1147597 - RNA, 19 nt, Homo sapiens
  misc_RNA (1)...(19): siRNA sense strand
gaacuuguccucuuaaaau

SEQ ID NO: 1147598 - RNA, 19 nt, Homo sapiens
  misc_RNA (1)...(19): siRNA sense strand
aagagaacaugcaauugaa

SEQ ID NO: 1147599 - RNA, 19 nt, Homo sapiens
  misc_RNA (1)...(19): siRNA sense strand
caaaguauccuggaaucaa

SEQ ID NO: 1147600 - RNA, 19 nt, Homo sapiens
  misc_RNA (1)...(19): siRNA sense strand
gagcuaauuuacaaagaag

SEQ ID NO: 1147601 - RNA, 19 nt, Homo sapiens
  misc_RNA (1)...(19): siRNA sense strand
gauuguuugugcugcauuu

SEQ ID NO: 1147602 - RNA, 19 nt, Homo sapiens
  misc_RNA (1)...(19): siRNA sense strand
gaacaugcaauugaagaau

SEQ ID NO: 1147603 - RNA, 19 nt, Homo sapiens
  misc_RNA (1)...(19): siRNA sense strand
ccagaugcuuugugguauu

SEQ ID NO: 1147604 - RNA, 19 nt, Homo sapiens
  misc_RNA (1)...(19): siRNA sense strand
gagcuuaucgugaacuugu

SEQ ID NO: 1147605 - RNA, 19 nt, Homo sapiens
  misc_RNA (1)...(19): siRNA sense strand
ggacagcgugcacuaacuu

SEQ ID NO: 1147606 - RNA, 19 nt, Homo sapiens
  misc_RNA (1)...(19): siRNA sense strand
gaauguccuaccuucuuua

SEQ ID NO: 1147607 - RNA, 19 nt, Homo sapiens
  misc_RNA (1)...(19): siRNA sense strand
gagaacaugcaauugaaga

SEQ ID NO: 1147608 - RNA, 19 nt, Homo sapiens
  misc_RNA (1)...(19): siRNA sense strand
ccaaacucaugcaaagaga

SEQ ID NO: 1147609 - RNA, 19 nt, Homo sapiens
  misc_RNA (1)...(19): siRNA sense strand
gaugcuuugugguauuaaa

SEQ ID NO: 1147610 - RNA, 19 nt, Homo sapiens
  misc_RNA (1)...(19): siRNA sense strand
agaagaauuucaagaugug

SEQ ID NO: 1147611 - RNA, 19 nt, Homo sapiens
  misc_RNA (1)...(19): siRNA sense strand
ggaagaaagaagcaagaau

SEQ ID NO: 1147612 - RNA, 19 nt, Homo sapiens
  misc_RNA (1)...(19): siRNA sense strand
uggaauuaauggaugcuaa

SEQ ID NO: 1147613 - RNA, 19 nt, Homo sapiens
  misc_RNA (1)...(19): siRNA sense strand
guauuaaacaucugcauuc

SEQ ID NO: 1147614 - RNA, 19 nt, Homo sapiens
  misc_RNA (1)...(19): siRNA sense strand
gguauuaaacaucugcauu

SEQ ID NO: 1147615 - RNA, 19 nt, Homo sapiens
  misc_RNA (1)...(19): siRNA sense strand
caacugugaggaauuaugu

SEQ ID NO: 1147616 - RNA, 19 nt, Homo sapiens
  misc_RNA (1)...(19): siRNA sense strand
aaacuucagccaacuguga

SEQ ID NO: 1147617 - RNA, 19 nt, Homo sapiens
  misc_RNA (1)...(19): siRNA sense strand
caaagagaacguugauauc

SEQ ID NO: 1147618 - RNA, 19 nt, Homo sapiens
  misc_RNA (1)...(19): siRNA sense strand
gaagucauccuggguaugg

SEQ ID NO: 1147619 - RNA, 19 nt, Homo sapiens
  misc_RNA (1)...(19): siRNA sense strand
agccaacugugaggaauua

SEQ ID NO: 1147620 - RNA, 19 nt, Homo sapiens
  misc_RNA (1)...(19): siRNA sense strand
gagagcuuaucgugaacuu

SEQ ID NO: 1147621 - RNA, 19 nt, Homo sapiens
  misc_RNA (1)...(19): siRNA sense strand
ggaagaaagagaacaugca

SEQ ID NO: 1147622 - RNA, 19 nt, Homo sapiens
  misc_RNA (1)...(19): siRNA sense strand
ugaagauccuugacuuugg

SEQ ID NO: 1147623 - RNA, 19 nt, Homo sapiens
  misc_RNA (1)...(19): siRNA sense strand
ucgugaacuuguccucuua

SEQ ID NO: 1147624 - RNA, 19 nt, Homo sapiens
  misc_RNA (1)...(19): siRNA sense strand
gugaacuuguccucuuaaa

SEQ ID NO: 1147625 - RNA, 19 nt, Homo sapiens
  misc_RNA (1)...(19): siRNA sense strand
ggaauuaugucgaaaacag

SEQ ID NO: 1147626 - RNA, 19 nt, Homo sapiens
  misc_RNA (1)...(19): siRNA sense strand
gaaacuaagccguccuuuu

SEQ ID NO: 1147627 - RNA, 19 nt, Homo sapiens
  misc_RNA (1)...(19): siRNA sense strand
gaaaacagaccaaaguauc

SEQ ID NO: 1147628 - RNA, 19 nt, Homo sapiens
  misc_RNA (1)...(19): siRNA sense strand
gaacaccaucagcagaguu

SEQ ID NO: 1147629 - RNA, 19 nt, Homo sapiens
  misc_RNA (1)...(19): siRNA sense strand
cagcugguauaauucauag

SEQ ID NO: 1147630 - RNA, 19 nt, Homo sapiens
  misc_RNA (1)...(19): siRNA sense strand
uaauggaugcuaacuuaug

SEQ ID NO: 1147631 - RNA, 19 nt, Homo sapiens
  misc_RNA (1)...(19): siRNA sense strand
agucauggauugggaagaa

SEQ ID NO: 1147632 - RNA, 19 nt, Homo sapiens
  misc_RNA (1)...(19): siRNA sense strand
gaagaauggaaagagcuaa

SEQ ID NO: 1147633 - RNA, 19 nt, Homo sapiens
  misc_RNA (1)...(19): siRNA sense strand
ugugaggaauuaugucgaa

SEQ ID NO: 1147634 - RNA, 19 nt, Homo sapiens
  misc_RNA (1)...(19): siRNA sense strand
agaccaaaguauccuggaa

SEQ ID NO: 1147635 - RNA, 19 nt, Homo sapiens
  misc_RNA (1)...(19): siRNA sense strand
gcuggaucaugaaagaaug

SEQ ID NO: 1147636 - RNA, 19 nt, Homo sapiens
  misc_RNA (1)...(19): siRNA sense strand
uuacaaagaagucauggau

SEQ ID NO: 1147637 - RNA, 19 nt, Homo sapiens
  misc_RNA (1)...(19): siRNA sense strand
acccauacaucacuguuug

SEQ ID NO: 1147638 - RNA, 19 nt, Homo sapiens
  misc_RNA (1)...(19): siRNA sense strand
acaagcggaucucuguaga

SEQ ID NO: 1147639 - RNA, 19 nt, Homo sapiens
  misc_RNA (1)...(19): siRNA sense strand
aaacaagucaagccagaga

SEQ ID NO: 1147640 - RNA, 19 nt, Homo sapiens
  misc_RNA (1)...(19): siRNA sense strand
aauggaugcuaacuuaugu

SEQ ID NO: 1147641 - RNA, 19 nt, Homo sapiens
  misc_RNA (1)...(19): siRNA sense strand
ucagcagaguucaugaaga

SEQ ID NO: 1147642 - RNA, 19 nt, Homo sapiens
  misc_RNA (1)...(19): siRNA sense strand
aagagaacguugauaucug

SEQ ID NO: 1147643 - RNA, 19 nt, Homo sapiens
  misc_RNA (1)...(19): siRNA sense strand
caucugcauucagcuggua

SEQ ID NO: 1147644 - RNA, 19 nt, Homo sapiens
  misc_RNA (1)...(19): siRNA sense strand
aaacuaagccguccuuuuc

SEQ ID NO: 1147645 - RNA, 19 nt, Homo sapiens
  misc_RNA (1)...(19): siRNA sense strand
cccaccaccucaaauuuau

SEQ ID NO: 1147646 - RNA, 19 nt, Homo sapiens
  misc_RNA (1)...(19): siRNA sense strand
gacaagcggaucucuguag

SEQ ID NO: 1147647 - RNA, 19 nt, Homo sapiens
  misc_RNA (1)...(19): siRNA sense strand
gaccaaaguauccuggaau

SEQ ID NO: 1147648 - RNA, 19 nt, Homo sapiens
  misc_RNA (1)...(19): siRNA sense strand
ggaacaccaucagcagagu

SEQ ID NO: 1147649 - RNA, 19 nt, Homo sapiens
  misc_RNA (1)...(19): siRNA sense strand
aaagagaacguugauaucu

SEQ ID NO: 1147650 - RNA, 19 nt, Homo sapiens
  misc_RNA (1)...(19): siRNA sense strand
uuugaagccuagcaacauu

SEQ ID NO: 1147651 - RNA, 19 nt, Homo sapiens
  misc_RNA (1)...(19): siRNA sense strand
ccaguuggaagaaagagaa

SEQ ID NO: 1147652 - RNA, 19 nt, Homo sapiens
  misc_RNA (1)...(19): siRNA sense strand
gauuggauauucccaucag

SEQ ID NO: 1147653 - RNA, 19 nt, Homo sapiens
  misc_RNA (1)...(19): siRNA sense strand
ugaagaauggaaagagcua

SEQ ID NO: 1147654 - RNA, 19 nt, Homo sapiens
  misc_RNA (1)...(19): siRNA sense strand
aacaugcaauugaagaaug

SEQ ID NO: 1147655 - RNA, 19 nt, Homo sapiens
  misc_RNA (1)...(19): siRNA sense strand
ucacuguccuaaaacguua

SEQ ID NO: 1147656 - RNA, 19 nt, Homo sapiens
  misc_RNA (1)...(19): siRNA sense strand
gaagcaagaaugguguugu

SEQ ID NO: 1147657 - RNA, 19 nt, Homo sapiens
  misc_RNA (1)...(19): siRNA sense strand
ugaaagaauguccuaccuu

SEQ ID NO: 1147658 - RNA, 19 nt, Homo sapiens
  misc_RNA (1)...(19): siRNA sense strand
gggaagaaagaagcaagaa

SEQ ID NO: 1147659 - RNA, 19 nt, Homo sapiens
  misc_RNA (1)...(19): siRNA sense strand
gcaauugaagaauggaaag

SEQ ID NO: 1147660 - RNA, 19 nt, Homo sapiens
  misc_RNA (1)...(19): siRNA sense strand
cuacaaagagaacguugau

SEQ ID NO: 1147661 - RNA, 19 nt, Homo sapiens
  misc_RNA (1)...(19): siRNA sense strand
uguccuaccuucuuuacca

SEQ ID NO: 1147662 - RNA, 19 nt, Homo sapiens
  misc_RNA (1)...(19): siRNA sense strand
gauacaguucuugggauaa

SEQ ID NO: 1147663 - RNA, 19 nt, Homo sapiens
  misc_RNA (1)...(19): siRNA sense strand
agaaugguguuguaaaaga

SEQ ID NO: 1147664 - RNA, 19 nt, Homo sapiens
  misc_RNA (1)...(19): siRNA sense strand
caucagcagaguucaugaa

SEQ ID NO: 1147665 - RNA, 19 nt, Homo sapiens
  misc_RNA (1)...(19): siRNA sense strand
gcuacaaagagaacguuga

SEQ ID NO: 1147666 - RNA, 19 nt, Homo sapiens
  misc_RNA (1)...(19): siRNA sense strand
gauuugaagccuagcaaca

SEQ ID NO: 1147667 - RNA, 19 nt, Homo sapiens
  misc_RNA (1)...(19): siRNA sense strand
ucagcugguauaauucaua

SEQ ID NO: 1147668 - RNA, 19 nt, Homo sapiens
  misc_RNA (1)...(19): siRNA sense strand
ccgaagucauccuggguau

SEQ ID NO: 1147669 - RNA, 19 nt, Homo sapiens
  misc_RNA (1)...(19): siRNA sense strand
gcagaguucaugaagaaac

SEQ ID NO: 1147670 - RNA, 19 nt, Homo sapiens
  misc_RNA (1)...(19): siRNA sense strand
gacagucaguuuuauagug

SEQ ID NO: 1147671 - RNA, 19 nt, Homo sapiens
  misc_RNA (1)...(19): siRNA sense strand
caccaccucaaauuuauga

SEQ ID NO: 1147672 - RNA, 19 nt, Homo sapiens
  misc_RNA (1)...(19): siRNA sense strand
ggaaagagcuaauuuacaa

SEQ ID NO: 1147673 - RNA, 19 nt, Homo sapiens
  misc_RNA (1)...(19): siRNA sense strand
gcauucagcugguauaauu

SEQ ID NO: 1147674 - RNA, 19 nt, Homo sapiens
  misc_RNA (1)...(19): siRNA sense strand
gaaccaaacucaugcaaag

SEQ ID NO: 1147675 - RNA, 19 nt, Homo sapiens
  misc_RNA (1)...(19): siRNA sense strand
aaagagagcuuaucgugaa

SEQ ID NO: 1147676 - RNA, 19 nt, Homo sapiens
  misc_RNA (1)...(19): siRNA sense strand
caagauguguauuugguua

SEQ ID NO: 1147677 - RNA, 19 nt, Homo sapiens
  misc_RNA (1)...(19): siRNA sense strand
gaagaaagaagcaagaaug

SEQ ID NO: 1147678 - RNA, 19 nt, Homo sapiens
  misc_RNA (1)...(19): siRNA sense strand
cagcagaguucaugaagaa

SEQ ID NO: 1147679 - RNA, 19 nt, Homo sapiens
  misc_RNA (1)...(19): siRNA sense strand
acaaagaagucauggauug

SEQ ID NO: 1147680 - RNA, 19 nt, Homo sapiens
  misc_RNA (1)...(19): siRNA sense strand
ggagcuggaucaugaaaga

SEQ ID NO: 1147681 - RNA, 19 nt, Homo sapiens
  misc_RNA (1)...(19): siRNA sense strand
gguaugggcuacaaagaga

SEQ ID NO: 1147682 - RNA, 19 nt, Homo sapiens
  misc_RNA (1)...(19): siRNA sense strand
gcggaucucuguagacgaa

SEQ ID NO: 1147683 - RNA, 19 nt, Homo sapiens
  misc_RNA (1)...(19): siRNA sense strand
gaauggaaagagcuaauuu

SEQ ID NO: 1147684 - RNA, 19 nt, Homo sapiens
  misc_RNA (1)...(19): siRNA sense strand
gaucaguggaauaaaguua

SEQ ID NO: 1147685 - RNA, 19 nt, Homo sapiens
  misc_RNA (1)...(19): siRNA sense strand
gaagaaagagaacaugcaa

SEQ ID NO: 1147686 - RNA, 19 nt, Homo sapiens
  misc_RNA (1)...(19): siRNA sense strand
aaagagaacaugcaauuga

SEQ ID NO: 1147687 - RNA, 19 nt, Homo sapiens
  misc_RNA (1)...(19): siRNA sense strand
gcaagaaugguguuguaaa

SEQ ID NO: 1147688 - RNA, 19 nt, Homo sapiens
  misc_RNA (1)...(19): siRNA sense strand
cagaugcuuugugguauua

SEQ ID NO: 1147689 - RNA, 19 nt, Homo sapiens
  misc_RNA (1)...(19): siRNA sense strand
aaaguauccuggaaucaaa

SEQ ID NO: 1147690 - RNA, 19 nt, Homo sapiens
  misc_RNA (1)...(19): siRNA sense strand
agaaagagaacaugcaauu

SEQ ID NO: 1147691 - RNA, 19 nt, Homo sapiens
  misc_RNA (1)...(19): siRNA sense strand
aagcaagaaugguguugua

SEQ ID NO: 1147692 - RNA, 19 nt, Homo sapiens
  misc_RNA (1)...(19): siRNA sense strand
ugauacaguucuugggaua

SEQ ID NO: 1147693 - RNA, 19 nt, Homo sapiens
  misc_RNA (1)...(19): siRNA sense strand
gaaagagaacaugcaauug

SEQ ID NO: 1147694 - RNA, 19 nt, Homo sapiens
  misc_RNA (1)...(19): siRNA sense strand
cuagaagaauuucaagaug

SEQ ID NO: 1147695 - RNA, 19 nt, Homo sapiens
  misc_RNA (1)...(19): siRNA sense strand
acaaagagaacguugauau

SEQ ID NO: 1147696 - RNA, 19 nt, Homo sapiens
  misc_RNA (1)...(19): siRNA sense strand
caagaaugguguuguaaaa

SEQ ID NO: 1147697 - RNA, 19 nt, Homo sapiens
  misc_RNA (1)...(19): siRNA sense strand
gaacuuguccucuuaaaau

SEQ ID NO: 1147698 - RNA, 19 nt, Homo sapiens
  misc_RNA (1)...(19): siRNA sense strand
aagagaacaugcaauugaa

SEQ ID NO: 1147699 - RNA, 19 nt, Homo sapiens
  misc_RNA (1)...(19): siRNA sense strand
caaaguauccuggaaucaa

SEQ ID NO: 1147700 - RNA, 19 nt, Homo sapiens
  misc_RNA (1)...(19): siRNA sense strand
gagcuaauuuacaaagaag

SEQ ID NO: 1147701 - RNA, 19 nt, Homo sapiens
  misc_RNA (1)...(19): siRNA sense strand
gauuguuugugcugcauuu

SEQ ID NO: 1147702 - RNA, 19 nt, Homo sapiens
  misc_RNA (1)...(19): siRNA sense strand
gaacaugcaauugaagaau

SEQ ID NO: 1147703 - RNA, 19 nt, Homo sapiens
  misc_RNA (1)...(19): siRNA sense strand
ccagaugcuuugugguauu

SEQ ID NO: 1147704 - RNA, 19 nt, Homo sapiens
  misc_RNA (1)...(19): siRNA sense strand
gagcuuaucgugaacuugu

SEQ ID NO: 1147705 - RNA, 19 nt, Homo sapiens
  misc_RNA (1)...(19): siRNA sense strand
ggacagcgugcacuaacuu

SEQ ID NO: 1147706 - RNA, 19 nt, Homo sapiens
  misc_RNA (1)...(19): siRNA sense strand
gaauguccuaccuucuuua

SEQ ID NO: 1147707 - RNA, 19 nt, Homo sapiens
  misc_RNA (1)...(19): siRNA sense strand
gagaacaugcaauugaaga

SEQ ID NO: 1147708 - RNA, 19 nt, Homo sapiens
  misc_RNA (1)...(19): siRNA sense strand
ccaaacucaugcaaagaga

SEQ ID NO: 1147709 - RNA, 19 nt, Homo sapiens
  misc_RNA (1)...(19): siRNA sense strand
gaugcuuugugguauuaaa

SEQ ID NO: 1147710 - RNA, 19 nt, Homo sapiens
  misc_RNA (1)...(19): siRNA sense strand
agaagaauuucaagaugug

SEQ ID NO: 1147711 - RNA, 19 nt, Homo sapiens
  misc_RNA (1)...(19): siRNA sense strand
ggaagaaagaagcaagaau

SEQ ID NO: 1147712 - RNA, 19 nt, Homo sapiens
  misc_RNA (1)...(19): siRNA sense strand
uggaauuaauggaugcuaa

SEQ ID NO: 1147713 - RNA, 19 nt, Homo sapiens
  misc_RNA (1)...(19): siRNA sense strand
guauuaaacaucugcauuc

SEQ ID NO: 1147714 - RNA, 19 nt, Homo sapiens
  misc_RNA (1)...(19): siRNA sense strand
gguauuaaacaucugcauu

SEQ ID NO: 1147715 - RNA, 19 nt, Homo sapiens
  misc_RNA (1)...(19): siRNA sense strand
caacugugaggaauuaugu

SEQ ID NO: 1147716 - RNA, 19 nt, Homo sapiens
  misc_RNA (1)...(19): siRNA sense strand
aaacuucagccaacuguga

SEQ ID NO: 1147717 - RNA, 19 nt, Homo sapiens
  misc_RNA (1)...(19): siRNA sense strand
caaagagaacguugauauc

SEQ ID NO: 1147718 - RNA, 19 nt, Homo sapiens
  misc_RNA (1)...(19): siRNA sense strand
gaagucauccuggguaugg

SEQ ID NO: 1147719 - RNA, 19 nt, Homo sapiens
  misc_RNA (1)...(19): siRNA sense strand
agccaacugugaggaauua

SEQ ID NO: 1147720 - RNA, 19 nt, Homo sapiens
  misc_RNA (1)...(19): siRNA sense strand
gagagcuuaucgugaacuu

SEQ ID NO: 1147721 - RNA, 19 nt, Homo sapiens
  misc_RNA (1)...(19): siRNA sense strand
ggaagaaagagaacaugca

SEQ ID NO: 1147722 - RNA, 19 nt, Homo sapiens
  misc_RNA (1)...(19): siRNA sense strand
ugaagauccuugacuuugg

SEQ ID NO: 1147723 - RNA, 19 nt, Homo sapiens
  misc_RNA (1)...(19): siRNA sense strand
ucgugaacuuguccucuua

SEQ ID NO: 1147724 - RNA, 19 nt, Homo sapiens
  misc_RNA (1)...(19): siRNA sense strand
gugaacuuguccucuuaaa

SEQ ID NO: 1147725 - RNA, 19 nt, Homo sapiens
  misc_RNA (1)...(19): siRNA sense strand
ggaauuaugucgaaaacag

SEQ ID NO: 1147726 - RNA, 19 nt, Homo sapiens
  misc_RNA (1)...(19): siRNA sense strand
gaaacuaagccguccuuuu

SEQ ID NO: 1147727 - RNA, 19 nt, Homo sapiens
  misc_RNA (1)...(19): siRNA sense strand
gaaaacagaccaaaguauc

SEQ ID NO: 1147728 - RNA, 19 nt, Homo sapiens
  misc_RNA (1)...(19): siRNA sense strand
gaacaccaucagcagaguu

SEQ ID NO: 1147729 - RNA, 19 nt, Homo sapiens
  misc_RNA (1)...(19): siRNA sense strand
cagcugguauaauucauag

SEQ ID NO: 1147730 - RNA, 19 nt, Homo sapiens
  misc_RNA (1)...(19): siRNA sense strand
uaauggaugcuaacuuaug

SEQ ID NO: 1147731 - RNA, 19 nt, Homo sapiens
  misc_RNA (1)...(19): siRNA sense strand
agucauggauugggaagaa

SEQ ID NO: 1147732 - RNA, 19 nt, Homo sapiens
  misc_RNA (1)...(19): siRNA sense strand
gaagaauggaaagagcuaa

SEQ ID NO: 1147733 - RNA, 19 nt, Homo sapiens
  misc_RNA (1)...(19): siRNA sense strand
ugugaggaauuaugucgaa

SEQ ID NO: 1147734 - RNA, 19 nt, Homo sapiens
  misc_RNA (1)...(19): siRNA sense strand
agaccaaaguauccuggaa

SEQ ID NO: 1147735 - RNA, 19 nt, Homo sapiens
  misc_RNA (1)...(19): siRNA sense strand
gcuggaucaugaaagaaug

SEQ ID NO: 1147736 - RNA, 19 nt, Homo sapiens
  misc_RNA (1)...(19): siRNA sense strand
uuacaaagaagucauggau

SEQ ID NO: 1147737 - RNA, 19 nt, Homo sapiens
  misc_RNA (1)...(19): siRNA sense strand
acccauacaucacuguuug

SEQ ID NO: 1147738 - RNA, 19 nt, Homo sapiens
  misc_RNA (1)...(19): siRNA sense strand
acaagcggaucucuguaga

SEQ ID NO: 1147739 - RNA, 19 nt, Homo sapiens
  misc_RNA (1)...(19): siRNA sense strand
aaacaagucaagccagaga

SEQ ID NO: 1147740 - RNA, 19 nt, Homo sapiens
  misc_RNA (1)...(19): siRNA sense strand
aauggaugcuaacuuaugu

SEQ ID NO: 1147741 - RNA, 19 nt, Homo sapiens
  misc_RNA (1)...(19): siRNA sense strand
ucagcagaguucaugaaga

SEQ ID NO: 1147742 - RNA, 19 nt, Homo sapiens
  misc_RNA (1)...(19): siRNA sense strand
aagagaacguugauaucug

SEQ ID NO: 1147743 - RNA, 19 nt, Homo sapiens
  misc_RNA (1)...(19): siRNA sense strand
caucugcauucagcuggua

SEQ ID NO: 1147744 - RNA, 19 nt, Homo sapiens
  misc_RNA (1)...(19): siRNA sense strand
aaacuaagccguccuuuuc

SEQ ID NO: 1147745 - RNA, 19 nt, Homo sapiens
  misc_RNA (1)...(19): siRNA sense strand
cccaccaccucaaauuuau

SEQ ID NO: 1147746 - RNA, 19 nt, Homo sapiens
  misc_RNA (1)...(19): siRNA sense strand
gacaagcggaucucuguag

SEQ ID NO: 1147747 - RNA, 19 nt, Homo sapiens
  misc_RNA (1)...(19): siRNA sense strand
gaccaaaguauccuggaau

SEQ ID NO: 1147748 - RNA, 19 nt, Homo sapiens
  misc_RNA (1)...(19): siRNA sense strand
ggaacaccaucagcagagu

SEQ ID NO: 1147749 - RNA, 19 nt, Homo sapiens
  misc_RNA (1)...(19): siRNA sense strand
aaagagaacguugauaucu

SEQ ID NO: 1147750 - RNA, 19 nt, Homo sapiens
  misc_RNA (1)...(19): siRNA sense strand
uuugaagccuagcaacauu

SEQ ID NO: 1147751 - RNA, 19 nt, Homo sapiens
  misc_RNA (1)...(19): siRNA sense strand
ccaguuggaagaaagagaa

SEQ ID NO: 1147752 - RNA, 19 nt, Homo sapiens
  misc_RNA (1)...(19): siRNA sense strand
gauuggauauucccaucag

SEQ ID NO: 1147753 - RNA, 19 nt, Homo sapiens
  misc_RNA (1)...(19): siRNA sense strand
ugaagaauggaaagagcua

SEQ ID NO: 1147754 - RNA, 19 nt, Homo sapiens
  misc_RNA (1)...(19): siRNA sense strand
aacaugcaauugaagaaug

SEQ ID NO: 1147755 - RNA, 19 nt, Homo sapiens
  misc_RNA (1)...(19): siRNA sense strand
ucacuguccuaaaacguua

SEQ ID NO: 1147756 - RNA, 19 nt, Homo sapiens
  misc_RNA (1)...(19): siRNA sense strand
gaagcaagaaugguguugu

SEQ ID NO: 1147757 - RNA, 19 nt, Homo sapiens
  misc_RNA (1)...(19): siRNA sense strand
ugaaagaauguccuaccuu

SEQ ID NO: 1147758 - RNA, 19 nt, Homo sapiens
  misc_RNA (1)...(19): siRNA sense strand
gggaagaaagaagcaagaa

SEQ ID NO: 1147759 - RNA, 19 nt, Homo sapiens
  misc_RNA (1)...(19): siRNA sense strand
gcaauugaagaauggaaag

SEQ ID NO: 1147760 - RNA, 19 nt, Homo sapiens
  misc_RNA (1)...(19): siRNA sense strand
cuacaaagagaacguugau

SEQ ID NO: 1147761 - RNA, 19 nt, Homo sapiens
  misc_RNA (1)...(19): siRNA sense strand
uguccuaccuucuuuacca

SEQ ID NO: 1147762 - RNA, 19 nt, Homo sapiens
  misc_RNA (1)...(19): siRNA sense strand
gauacaguucuugggauaa

SEQ ID NO: 1147763 - RNA, 19 nt, Homo sapiens
  misc_RNA (1)...(19): siRNA sense strand
agaaugguguuguaaaaga

SEQ ID NO: 1147764 - RNA, 19 nt, Homo sapiens
  misc_RNA (1)...(19): siRNA sense strand
caucagcagaguucaugaa

SEQ ID NO: 1147765 - RNA, 19 nt, Homo sapiens
  misc_RNA (1)...(19): siRNA sense strand
gcuacaaagagaacguuga

SEQ ID NO: 1147766 - RNA, 19 nt, Homo sapiens
  misc_RNA (1)...(19): siRNA sense strand
gauuugaagccuagcaaca

SEQ ID NO: 1147767 - RNA, 19 nt, Homo sapiens
  misc_RNA (1)...(19): siRNA sense strand
ucagcugguauaauucaua

SEQ ID NO: 1147768 - RNA, 19 nt, Homo sapiens
  misc_RNA (1)...(19): siRNA sense strand
ccgaagucauccuggguau

SEQ ID NO: 1147769 - RNA, 19 nt, Homo sapiens
  misc_RNA (1)...(19): siRNA sense strand
gcagaguucaugaagaaac

SEQ ID NO: 1147770 - RNA, 19 nt, Homo sapiens
  misc_RNA (1)...(19): siRNA sense strand
gacagucaguuuuauagug

SEQ ID NO: 1147771 - RNA, 19 nt, Homo sapiens
  misc_RNA (1)...(19): siRNA sense strand
caccaccucaaauuuauga

SEQ ID NO: 1147772 - RNA, 19 nt, Homo sapiens
  misc_RNA (1)...(19): siRNA sense strand
ggaaagagcuaauuuacaa

SEQ ID NO: 1147773 - RNA, 19 nt, Homo sapiens
  misc_RNA (1)...(19): siRNA sense strand
gcauucagcugguauaauu

SEQ ID NO: 1147774 - RNA, 19 nt, Homo sapiens
  misc_RNA (1)...(19): siRNA sense strand
gaaccaaacucaugcaaag

SEQ ID NO: 1147775 - RNA, 19 nt, Homo sapiens
  misc_RNA (1)...(19): siRNA sense strand
aaagagagcuuaucgugaa

SEQ ID NO: 1147776 - RNA, 19 nt, Homo sapiens
  misc_RNA (1)...(19): siRNA sense strand
caagauguguauuugguua

SEQ ID NO: 1147777 - RNA, 19 nt, Homo sapiens
  misc_RNA (1)...(19): siRNA sense strand
gaagaaagaagcaagaaug

SEQ ID NO: 1147778 - RNA, 19 nt, Homo sapiens
  misc_RNA (1)...(19): siRNA sense strand
cagcagaguucaugaagaa

SEQ ID NO: 1147779 - RNA, 19 nt, Homo sapiens
  misc_RNA (1)...(19): siRNA sense strand
acaaagaagucauggauug

SEQ ID NO: 1147780 - RNA, 19 nt, Homo sapiens
  misc_RNA (1)...(19): siRNA sense strand
ggagcuggaucaugaaaga

SEQ ID NO: 1147781 - RNA, 19 nt, Homo sapiens
  misc_RNA (1)...(19): siRNA sense strand
gguaugggcuacaaagaga

SEQ ID NO: 1147782 - RNA, 19 nt, Homo sapiens
  misc_RNA (1)...(19): siRNA sense strand
gcggaucucuguagacgaa

SEQ ID NO: 1147783 - RNA, 19 nt, Homo sapiens
  misc_RNA (1)...(19): siRNA sense strand
gaauggaaagagcuaauuu

SEQ ID NO: 1147784 - RNA, 19 nt, Homo sapiens
  misc_RNA (1)...(19): siRNA sense strand
gaucaguggaauaaaguua

SEQ ID NO: 1147785 - RNA, 19 nt, Homo sapiens
  misc_RNA (1)...(19): siRNA sense strand
gaagaaagagaacaugcaa

SEQ ID NO: 1147786 - RNA, 19 nt, Homo sapiens
  misc_RNA (1)...(19): siRNA sense strand
aaagagaacaugcaauuga

SEQ ID NO: 1147787 - RNA, 19 nt, Homo sapiens
  misc_RNA (1)...(19): siRNA sense strand
gcaagaaugguguuguaaa

SEQ ID NO: 1147788 - RNA, 19 nt, Homo sapiens
  misc_RNA (1)...(19): siRNA sense strand
cagaugcuuugugguauua

SEQ ID NO: 1147789 - RNA, 19 nt, Homo sapiens
  misc_RNA (1)...(19): siRNA sense strand
aaaguauccuggaaucaaa

SEQ ID NO: 1147790 - RNA, 19 nt, Homo sapiens
  misc_RNA (1)...(19): siRNA sense strand
agaaagagaacaugcaauu

SEQ ID NO: 1147791 - RNA, 19 nt, Homo sapiens
  misc_RNA (1)...(19): siRNA sense strand
aagcaagaaugguguugua

SEQ ID NO: 1147792 - RNA, 19 nt, Homo sapiens
  misc_RNA (1)...(19): siRNA sense strand
ugauacaguucuugggaua

SEQ ID NO: 1147793 - RNA, 19 nt, Homo sapiens
  misc_RNA (1)...(19): siRNA sense strand
gaaagagaacaugcaauug

SEQ ID NO: 1147794 - RNA, 19 nt, Homo sapiens
  misc_RNA (1)...(19): siRNA sense strand
cuagaagaauuucaagaug

SEQ ID NO: 1147795 - RNA, 19 nt, Homo sapiens
  misc_RNA (1)...(19): siRNA sense strand
acaaagagaacguugauau

SEQ ID NO: 1147796 - RNA, 19 nt, Homo sapiens
  misc_RNA (1)...(19): siRNA sense strand
caagaaugguguuguaaaa

SEQ ID NO: 1147797 - RNA, 19 nt, Homo sapiens
  misc_RNA (1)...(19): siRNA sense strand
gaacuuguccucuuaaaau

SEQ ID NO: 1147798 - RNA, 19 nt, Homo sapiens
  misc_RNA (1)...(19): siRNA sense strand
aagagaacaugcaauugaa

SEQ ID NO: 1147799 - RNA, 19 nt, Homo sapiens
  misc_RNA (1)...(19): siRNA sense strand
caaaguauccuggaaucaa

SEQ ID NO: 1147800 - RNA, 19 nt, Homo sapiens
  misc_RNA (1)...(19): siRNA sense strand
gagcuaauuuacaaagaag

SEQ ID NO: 1147801 - RNA, 19 nt, Homo sapiens
  misc_RNA (1)...(19): siRNA sense strand
gauuguuugugcugcauuu

SEQ ID NO: 1147802 - RNA, 19 nt, Homo sapiens
  misc_RNA (1)...(19): siRNA sense strand
gaacaugcaauugaagaau

SEQ ID NO: 1147803 - RNA, 19 nt, Homo sapiens
  misc_RNA (1)...(19): siRNA sense strand
ccagaugcuuugugguauu

SEQ ID NO: 1147804 - RNA, 19 nt, Homo sapiens
  misc_RNA (1)...(19): siRNA sense strand
gagcuuaucgugaacuugu

SEQ ID NO: 1147805 - RNA, 19 nt, Homo sapiens
  misc_RNA (1)...(19): siRNA sense strand
ggacagcgugcacuaacuu

SEQ ID NO: 1147806 - RNA, 19 nt, Homo sapiens
  misc_RNA (1)...(19): siRNA sense strand
gaauguccuaccuucuuua

SEQ ID NO: 1147807 - RNA, 19 nt, Homo sapiens
  misc_RNA (1)...(19): siRNA sense strand
gagaacaugcaauugaaga

SEQ ID NO: 1147808 - RNA, 19 nt, Homo sapiens
  misc_RNA (1)...(19): siRNA sense strand
ccaaacucaugcaaagaga

SEQ ID NO: 1147809 - RNA, 19 nt, Homo sapiens
  misc_RNA (1)...(19): siRNA sense strand
gaugcuuugugguauuaaa

SEQ ID NO: 1147810 - RNA, 19 nt, Homo sapiens
  misc_RNA (1)...(19): siRNA sense strand
agaagaauuucaagaugug

SEQ ID NO: 1147811 - RNA, 19 nt, Homo sapiens
  misc_RNA (1)...(19): siRNA sense strand
ggaagaaagaagcaagaau

SEQ ID NO: 1147812 - RNA, 19 nt, Homo sapiens
  misc_RNA (1)...(19): siRNA sense strand
uggaauuaauggaugcuaa

SEQ ID NO: 1147813 - RNA, 19 nt, Homo sapiens
  misc_RNA (1)...(19): siRNA sense strand
guauuaaacaucugcauuc

SEQ ID NO: 1147814 - RNA, 19 nt, Homo sapiens
  misc_RNA (1)...(19): siRNA sense strand
gguauuaaacaucugcauu

SEQ ID NO: 1147815 - RNA, 19 nt, Homo sapiens
  misc_RNA (1)...(19): siRNA sense strand
caacugugaggaauuaugu

SEQ ID NO: 1147816 - RNA, 19 nt, Homo sapiens
  misc_RNA (1)...(19): siRNA sense strand
aaacuucagccaacuguga

SEQ ID NO: 1147817 - RNA, 19 nt, Homo sapiens
  misc_RNA (1)...(19): siRNA sense strand
caaagagaacguugauauc

SEQ ID NO: 1147818 - RNA, 19 nt, Homo sapiens
  misc_RNA (1)...(19): siRNA sense strand
gaagucauccuggguaugg

SEQ ID NO: 1147819 - RNA, 19 nt, Homo sapiens
  misc_RNA (1)...(19): siRNA sense strand
agccaacugugaggaauua

SEQ ID NO: 1147820 - RNA, 19 nt, Homo sapiens
  misc_RNA (1)...(19): siRNA sense strand
gagagcuuaucgugaacuu

SEQ ID NO: 1147821 - RNA, 19 nt, Homo sapiens
  misc_RNA (1)...(19): siRNA sense strand
ggaagaaagagaacaugca

SEQ ID NO: 1147822 - RNA, 19 nt, Homo sapiens
  misc_RNA (1)...(19): siRNA sense strand
ugaagauccuugacuuugg

SEQ ID NO: 1147823 - RNA, 19 nt, Homo sapiens
  misc_RNA (1)...(19): siRNA sense strand
ucgugaacuuguccucuua

SEQ ID NO: 1147824 - RNA, 19 nt, Homo sapiens
  misc_RNA (1)...(19): siRNA sense strand
gugaacuuguccucuuaaa

SEQ ID NO: 1147825 - RNA, 19 nt, Homo sapiens
  misc_RNA (1)...(19): siRNA sense strand
ggaauuaugucgaaaacag

SEQ ID NO: 1147826 - RNA, 19 nt, Homo sapiens
  misc_RNA (1)...(19): siRNA sense strand
gaaacuaagccguccuuuu

SEQ ID NO: 1147827 - RNA, 19 nt, Homo sapiens
  misc_RNA (1)...(19): siRNA sense strand
uuucauccauguccacuga

SEQ ID NO: 1147828 - RNA, 19 nt, Homo sapiens
  misc_RNA (1)...(19): siRNA sense strand
gaaaacagaccaaaguauc

SEQ ID NO: 1147829 - RNA, 19 nt, Homo sapiens
  misc_RNA (1)...(19): siRNA sense strand
gaacaccaucagcagaguu

SEQ ID NO: 1147830 - RNA, 19 nt, Homo sapiens
  misc_RNA (1)...(19): siRNA sense strand
cagcugguauaauucauag

SEQ ID NO: 1147831 - RNA, 19 nt, Homo sapiens
  misc_RNA (1)...(19): siRNA sense strand
uaauggaugcuaacuuaug

SEQ ID NO: 1147832 - RNA, 19 nt, Homo sapiens
  misc_RNA (1)...(19): siRNA sense strand
agucauggauugggaagaa

SEQ ID NO: 1147833 - RNA, 19 nt, Homo sapiens
  misc_RNA (1)...(19): siRNA sense strand
gaagaauggaaagagcuaa

SEQ ID NO: 1147834 - RNA, 19 nt, Homo sapiens
  misc_RNA (1)...(19): siRNA sense strand
ugugaggaauuaugucgaa

SEQ ID NO: 1147835 - RNA, 19 nt, Homo sapiens
  misc_RNA (1)...(19): siRNA sense strand
agaccaaaguauccuggaa

SEQ ID NO: 1147836 - RNA, 19 nt, Homo sapiens
  misc_RNA (1)...(19): siRNA sense strand
gcuggaucaugaaagaaug

SEQ ID NO: 1147837 - RNA, 19 nt, Homo sapiens
  misc_RNA (1)...(19): siRNA sense strand
uuacaaagaagucauggau

SEQ ID NO: 1147838 - RNA, 19 nt, Homo sapiens
  misc_RNA (1)...(19): siRNA sense strand
acccauacaucacuguuug

SEQ ID NO: 1147839 - RNA, 19 nt, Homo sapiens
  misc_RNA (1)...(19): siRNA sense strand
acaagcggaucucuguaga

SEQ ID NO: 1147840 - RNA, 19 nt, Homo sapiens
  misc_RNA (1)...(19): siRNA sense strand
aaacaagucaagccagaga

SEQ ID NO: 1147841 - RNA, 19 nt, Homo sapiens
  misc_RNA (1)...(19): siRNA sense strand
aauggaugcuaacuuaugu

SEQ ID NO: 1147842 - RNA, 19 nt, Homo sapiens
  misc_RNA (1)...(19): siRNA sense strand
gcaacgccacuccuucuca

SEQ ID NO: 1147843 - RNA, 19 nt, Homo sapiens
  misc_RNA (1)...(19): siRNA sense strand
ucagcagaguucaugaaga

SEQ ID NO: 1147844 - RNA, 19 nt, Homo sapiens
  misc_RNA (1)...(19): siRNA sense strand
aagagaacguugauaucug

SEQ ID NO: 1147845 - RNA, 19 nt, Homo sapiens
  misc_RNA (1)...(19): siRNA sense strand
caucugcauucagcuggua

SEQ ID NO: 1147846 - RNA, 19 nt, Homo sapiens
  misc_RNA (1)...(19): siRNA sense strand
cccaccaccucaaauuuau

SEQ ID NO: 1147847 - RNA, 19 nt, Homo sapiens
  misc_RNA (1)...(19): siRNA sense strand
gacaagcggaucucuguag

SEQ ID NO: 1147848 - RNA, 19 nt, Homo sapiens
  misc_RNA (1)...(19): siRNA sense strand
gaccaaaguauccuggaau

SEQ ID NO: 1147849 - RNA, 19 nt, Homo sapiens
  misc_RNA (1)...(19): siRNA sense strand
ggaacaccaucagcagagu

SEQ ID NO: 1147850 - RNA, 19 nt, Homo sapiens
  misc_RNA (1)...(19): siRNA sense strand
aaagagaacguugauaucu

SEQ ID NO: 1147851 - RNA, 19 nt, Homo sapiens
  misc_RNA (1)...(19): siRNA sense strand
aaacuaagccguccuuuuc

SEQ ID NO: 1147852 - RNA, 19 nt, Homo sapiens
  misc_RNA (1)...(19): siRNA sense strand
uuugaagccuagcaacauu

SEQ ID NO: 1147853 - RNA, 19 nt, Homo sapiens
  misc_RNA (1)...(19): siRNA sense strand
ccaguuggaagaaagagaa

SEQ ID NO: 1147854 - RNA, 19 nt, Homo sapiens
  misc_RNA (1)...(19): siRNA sense strand
gauuggauauucccaucag

SEQ ID NO: 1147855 - RNA, 19 nt, Homo sapiens
  misc_RNA (1)...(19): siRNA sense strand
ugaagaauggaaagagcua

SEQ ID NO: 1147856 - RNA, 19 nt, Homo sapiens
  misc_RNA (1)...(19): siRNA sense strand
aacaugcaauugaagaaug

SEQ ID NO: 1147857 - RNA, 19 nt, Homo sapiens
  misc_RNA (1)...(19): siRNA sense strand
ucacuguccuaaaacguua

SEQ ID NO: 1147858 - RNA, 19 nt, Homo sapiens
  misc_RNA (1)...(19): siRNA sense strand
gaagcaagaaugguguugu

SEQ ID NO: 1147859 - RNA, 19 nt, Homo sapiens
  misc_RNA (1)...(19): siRNA sense strand
ugaaagaauguccuaccuu

SEQ ID NO: 1147860 - RNA, 19 nt, Homo sapiens
  misc_RNA (1)...(19): siRNA sense strand
gggaagaaagaagcaagaa

SEQ ID NO: 1147861 - RNA, 19 nt, Homo sapiens
  misc_RNA (1)...(19): siRNA sense strand
gcaauugaagaauggaaag

SEQ ID NO: 1147862 - RNA, 19 nt, Homo sapiens
  misc_RNA (1)...(19): siRNA sense strand
cuacaaagagaacguugau

SEQ ID NO: 1147863 - RNA, 19 nt, Homo sapiens
  misc_RNA (1)...(19): siRNA sense strand
uguccuaccuucuuuacca

SEQ ID NO: 1147864 - RNA, 19 nt, Homo sapiens
  misc_RNA (1)...(19): siRNA sense strand
ucagcugguauaauucaua

SEQ ID NO: 1147865 - RNA, 19 nt, Homo sapiens
  misc_RNA (1)...(19): siRNA sense strand
agaaugguguuguaaaaga

SEQ ID NO: 1147866 - RNA, 19 nt, Homo sapiens
  misc_RNA (1)...(19): siRNA sense strand
caucagcagaguucaugaa

SEQ ID NO: 1147867 - RNA, 19 nt, Homo sapiens
  misc_RNA (1)...(19): siRNA sense strand
gcuacaaagagaacguuga

SEQ ID NO: 1147868 - RNA, 19 nt, Homo sapiens
  misc_RNA (1)...(19): siRNA sense strand
gauacaguucuugggauaa

SEQ ID NO: 1147869 - RNA, 19 nt, Homo sapiens
  misc_RNA (1)...(19): siRNA sense strand
gauuugaagccuagcaaca

SEQ ID NO: 1147870 - RNA, 19 nt, Homo sapiens
  misc_RNA (1)...(19): siRNA sense strand
ccgaagucauccuggguau

SEQ ID NO: 1147871 - RNA, 19 nt, Homo sapiens
  misc_RNA (1)...(19): siRNA sense strand
gcagaguucaugaagaaac

SEQ ID NO: 1147872 - RNA, 19 nt, Homo sapiens
  misc_RNA (1)...(19): siRNA sense strand
ggaaagagcuaauuuacaa

SEQ ID NO: 1147873 - RNA, 19 nt, Homo sapiens
  misc_RNA (1)...(19): siRNA sense strand
gcauucagcugguauaauu

SEQ ID NO: 1147874 - RNA, 19 nt, Homo sapiens
  misc_RNA (1)...(19): siRNA sense strand
gaaccaaacucaugcaaag

SEQ ID NO: 1147875 - RNA, 19 nt, Homo sapiens
  misc_RNA (1)...(19): siRNA sense strand
aaagagagcuuaucgugaa

SEQ ID NO: 1147876 - RNA, 19 nt, Homo sapiens
  misc_RNA (1)...(19): siRNA sense strand
caagauguguauuugguua

SEQ ID NO: 1147877 - RNA, 19 nt, Homo sapiens
  misc_RNA (1)...(19): siRNA sense strand
gaagaaagaagcaagaaug

SEQ ID NO: 1147878 - RNA, 19 nt, Homo sapiens
  misc_RNA (1)...(19): siRNA sense strand
cagcagaguucaugaagaa

SEQ ID NO: 1147879 - RNA, 19 nt, Homo sapiens
  misc_RNA (1)...(19): siRNA sense strand
acaaagaagucauggauug

SEQ ID NO: 1147880 - RNA, 19 nt, Homo sapiens
  misc_RNA (1)...(19): siRNA sense strand
ggagcuggaucaugaaaga

SEQ ID NO: 1147881 - RNA, 19 nt, Homo sapiens
  misc_RNA (1)...(19): siRNA sense strand
gguaugggcuacaaagaga

SEQ ID NO: 1147882 - RNA, 19 nt, Homo sapiens
  misc_RNA (1)...(19): siRNA sense strand
gcggaucucuguagacgaa

SEQ ID NO: 1147883 - RNA, 19 nt, Homo sapiens
  misc_RNA (1)...(19): siRNA sense strand
gaauggaaagagcuaauuu

SEQ ID NO: 1147884 - RNA, 19 nt, Homo sapiens
  misc_RNA (1)...(19): siRNA sense strand
gaucaguggaauaaaguua

SEQ ID NO: 1147885 - RNA, 19 nt, Homo sapiens
  misc_RNA (1)...(19): siRNA sense strand
gaagaaagagaacaugcaa

SEQ ID NO: 1147886 - RNA, 19 nt, Homo sapiens
  misc_RNA (1)...(19): siRNA sense strand
aaagagaacaugcaauuga

SEQ ID NO: 1147887 - RNA, 19 nt, Homo sapiens
  misc_RNA (1)...(19): siRNA sense strand
gcaagaaugguguuguaaa

SEQ ID NO: 1147888 - RNA, 19 nt, Homo sapiens
  misc_RNA (1)...(19): siRNA sense strand
cagaugcuuugugguauua

SEQ ID NO: 1147889 - RNA, 19 nt, Homo sapiens
  misc_RNA (1)...(19): siRNA sense strand
aaaguauccuggaaucaaa

SEQ ID NO: 1147890 - RNA, 19 nt, Homo sapiens
  misc_RNA (1)...(19): siRNA sense strand
agaaagagaacaugcaauu

SEQ ID NO: 1147891 - RNA, 19 nt, Homo sapiens
  misc_RNA (1)...(19): siRNA sense strand
aagcaagaaugguguugua

SEQ ID NO: 1147892 - RNA, 19 nt, Homo sapiens
  misc_RNA (1)...(19): siRNA sense strand
ugauacaguucuugggaua

SEQ ID NO: 1147893 - RNA, 19 nt, Homo sapiens
  misc_RNA (1)...(19): siRNA sense strand
gaaagagaacaugcaauug

SEQ ID NO: 1147894 - RNA, 19 nt, Homo sapiens
  misc_RNA (1)...(19): siRNA sense strand
cuagaagaauuucaagaug

SEQ ID NO: 1147895 - RNA, 19 nt, Homo sapiens
  misc_RNA (1)...(19): siRNA sense strand
acaaagagaacguugauau

SEQ ID NO: 1147896 - RNA, 19 nt, Homo sapiens
  misc_RNA (1)...(19): siRNA sense strand
caagaaugguguuguaaaa

SEQ ID NO: 1147897 - RNA, 19 nt, Homo sapiens
  misc_RNA (1)...(19): siRNA sense strand
gaacuuguccucuuaaaau

SEQ ID NO: 1147898 - RNA, 19 nt, Homo sapiens
  misc_RNA (1)...(19): siRNA sense strand
aagagaacaugcaauugaa

SEQ ID NO: 1147899 - RNA, 19 nt, Homo sapiens
  misc_RNA (1)...(19): siRNA sense strand
caaaguauccuggaaucaa

SEQ ID NO: 1147900 - RNA, 19 nt, Homo sapiens
  misc_RNA (1)...(19): siRNA sense strand
gagcuaauuuacaaagaag

SEQ ID NO: 1147901 - RNA, 19 nt, Homo sapiens
  misc_RNA (1)...(19): siRNA sense strand
gauuguuugugcugcauuu

SEQ ID NO: 1147902 - RNA, 19 nt, Homo sapiens
  misc_RNA (1)...(19): siRNA sense strand
gaacaugcaauugaagaau

SEQ ID NO: 1147903 - RNA, 19 nt, Homo sapiens
  misc_RNA (1)...(19): siRNA sense strand
ccagaugcuuugugguauu

SEQ ID NO: 1147904 - RNA, 19 nt, Homo sapiens
  misc_RNA (1)...(19): siRNA sense strand
gagcuuaucgugaacuugu

SEQ ID NO: 1147905 - RNA, 19 nt, Homo sapiens
  misc_RNA (1)...(19): siRNA sense strand
ggacagcgugcacuaacuu

SEQ ID NO: 1147906 - RNA, 19 nt, Homo sapiens
  misc_RNA (1)...(19): siRNA sense strand
gaauguccuaccuucuuua

SEQ ID NO: 1147907 - RNA, 19 nt, Homo sapiens
  misc_RNA (1)...(19): siRNA sense strand
gagaacaugcaauugaaga

SEQ ID NO: 1147908 - RNA, 19 nt, Homo sapiens
  misc_RNA (1)...(19): siRNA sense strand
ccaaacucaugcaaagaga

SEQ ID NO: 1147909 - RNA, 19 nt, Homo sapiens
  misc_RNA (1)...(19): siRNA sense strand
gaugcuuugugguauuaaa

SEQ ID NO: 1147910 - RNA, 19 nt, Homo sapiens
  misc_RNA (1)...(19): siRNA sense strand
agaagaauuucaagaugug

SEQ ID NO: 1147911 - RNA, 19 nt, Homo sapiens
  misc_RNA (1)...(19): siRNA sense strand
ggaagaaagaagcaagaau

SEQ ID NO: 1147912 - RNA, 19 nt, Homo sapiens
  misc_RNA (1)...(19): siRNA sense strand
uggaauuaauggaugcuaa

SEQ ID NO: 1147913 - RNA, 19 nt, Homo sapiens
  misc_RNA (1)...(19): siRNA sense strand
guauuaaacaucugcauuc

SEQ ID NO: 1147914 - RNA, 19 nt, Homo sapiens
  misc_RNA (1)...(19): siRNA sense strand
gguauuaaacaucugcauu

SEQ ID NO: 1147915 - RNA, 19 nt, Homo sapiens
  misc_RNA (1)...(19): siRNA sense strand
caacugugaggaauuaugu

SEQ ID NO: 1147916 - RNA, 19 nt, Homo sapiens
  misc_RNA (1)...(19): siRNA sense strand
aaacuucagccaacuguga

SEQ ID NO: 1147917 - RNA, 19 nt, Homo sapiens
  misc_RNA (1)...(19): siRNA sense strand
caaagagaacguugauauc

SEQ ID NO: 1147918 - RNA, 19 nt, Homo sapiens
  misc_RNA (1)...(19): siRNA sense strand
gaagucauccuggguaugg

SEQ ID NO: 1147919 - RNA, 19 nt, Homo sapiens
  misc_RNA (1)...(19): siRNA sense strand
agccaacugugaggaauua

SEQ ID NO: 1147920 - RNA, 19 nt, Homo sapiens
  misc_RNA (1)...(19): siRNA sense strand
gagagcuuaucgugaacuu

SEQ ID NO: 1147921 - RNA, 19 nt, Homo sapiens
  misc_RNA (1)...(19): siRNA sense strand
ggaagaaagagaacaugca

SEQ ID NO: 1147922 - RNA, 19 nt, Homo sapiens
  misc_RNA (1)...(19): siRNA sense strand
ugaagauccuugacuuugg

SEQ ID NO: 1147923 - RNA, 19 nt, Homo sapiens
  misc_RNA (1)...(19): siRNA sense strand
ucgugaacuuguccucuua

SEQ ID NO: 1147924 - RNA, 19 nt, Homo sapiens
  misc_RNA (1)...(19): siRNA sense strand
gugaacuuguccucuuaaa

SEQ ID NO: 1147925 - RNA, 19 nt, Homo sapiens
  misc_RNA (1)...(19): siRNA sense strand
ggaauuaugucgaaaacag

SEQ ID NO: 1147926 - RNA, 19 nt, Homo sapiens
  misc_RNA (1)...(19): siRNA sense strand
gaaacuaagccguccuuuu

SEQ ID NO: 1147927 - RNA, 19 nt, Homo sapiens
  misc_RNA (1)...(19): siRNA sense strand
uuucauccauguccacuga

SEQ ID NO: 1147928 - RNA, 19 nt, Homo sapiens
  misc_RNA (1)...(19): siRNA sense strand
gaaaacagaccaaaguauc

SEQ ID NO: 1147929 - RNA, 19 nt, Homo sapiens
  misc_RNA (1)...(19): siRNA sense strand
gaacaccaucagcagaguu

SEQ ID NO: 1147930 - RNA, 19 nt, Homo sapiens
  misc_RNA (1)...(19): siRNA sense strand
cagcugguauaauucauag

SEQ ID NO: 1147931 - RNA, 19 nt, Homo sapiens
  misc_RNA (1)...(19): siRNA sense strand
uaauggaugcuaacuuaug

SEQ ID NO: 1147932 - RNA, 19 nt, Homo sapiens
  misc_RNA (1)...(19): siRNA sense strand
agucauggauugggaagaa

SEQ ID NO: 1147933 - RNA, 19 nt, Homo sapiens
  misc_RNA (1)...(19): siRNA sense strand
gaagaauggaaagagcuaa

SEQ ID NO: 1147934 - RNA, 19 nt, Homo sapiens
  misc_RNA (1)...(19): siRNA sense strand
ugugaggaauuaugucgaa

SEQ ID NO: 1147935 - RNA, 19 nt, Homo sapiens
  misc_RNA (1)...(19): siRNA sense strand
agaccaaaguauccuggaa

SEQ ID NO: 1147936 - RNA, 19 nt, Homo sapiens
  misc_RNA (1)...(19): siRNA sense strand
gcuggaucaugaaagaaug

SEQ ID NO: 1147937 - RNA, 19 nt, Homo sapiens
  misc_RNA (1)...(19): siRNA sense strand
uuacaaagaagucauggau

SEQ ID NO: 1147938 - RNA, 19 nt, Homo sapiens
  misc_RNA (1)...(19): siRNA sense strand
acccauacaucacuguuug

SEQ ID NO: 1147939 - RNA, 19 nt, Homo sapiens
  misc_RNA (1)...(19): siRNA sense strand
acaagcggaucucuguaga

SEQ ID NO: 1147940 - RNA, 19 nt, Homo sapiens
  misc_RNA (1)...(19): siRNA sense strand
aaacaagucaagccagaga

SEQ ID NO: 1147941 - RNA, 19 nt, Homo sapiens
  misc_RNA (1)...(19): siRNA sense strand
aauggaugcuaacuuaugu

SEQ ID NO: 1147942 - RNA, 19 nt, Homo sapiens
  misc_RNA (1)...(19): siRNA sense strand
gcaacgccacuccuucuca

SEQ ID NO: 1147943 - RNA, 19 nt, Homo sapiens
  misc_RNA (1)...(19): siRNA sense strand
ucagcagaguucaugaaga

SEQ ID NO: 1147944 - RNA, 19 nt, Homo sapiens
  misc_RNA (1)...(19): siRNA sense strand
aagagaacguugauaucug

SEQ ID NO: 1147945 - RNA, 19 nt, Homo sapiens
  misc_RNA (1)...(19): siRNA sense strand
caucugcauucagcuggua

SEQ ID NO: 1147946 - RNA, 19 nt, Homo sapiens
  misc_RNA (1)...(19): siRNA sense strand
cccaccaccucaaauuuau

SEQ ID NO: 1147947 - RNA, 19 nt, Homo sapiens
  misc_RNA (1)...(19): siRNA sense strand
gacaagcggaucucuguag

SEQ ID NO: 1147948 - RNA, 19 nt, Homo sapiens
  misc_RNA (1)...(19): siRNA sense strand
gaccaaaguauccuggaau

SEQ ID NO: 1147949 - RNA, 19 nt, Homo sapiens
  misc_RNA (1)...(19): siRNA sense strand
ggaacaccaucagcagagu

SEQ ID NO: 1147950 - RNA, 19 nt, Homo sapiens
  misc_RNA (1)...(19): siRNA sense strand
aaagagaacguugauaucu

SEQ ID NO: 1147951 - RNA, 19 nt, Homo sapiens
  misc_RNA (1)...(19): siRNA sense strand
aaacuaagccguccuuuuc

SEQ ID NO: 1147952 - RNA, 19 nt, Homo sapiens
  misc_RNA (1)...(19): siRNA sense strand
uuugaagccuagcaacauu

SEQ ID NO: 1147953 - RNA, 19 nt, Homo sapiens
  misc_RNA (1)...(19): siRNA sense strand
ccaguuggaagaaagagaa

SEQ ID NO: 1147954 - RNA, 19 nt, Homo sapiens
  misc_RNA (1)...(19): siRNA sense strand
gauuggauauucccaucag

SEQ ID NO: 1147955 - RNA, 19 nt, Homo sapiens
  misc_RNA (1)...(19): siRNA sense strand
ugaagaauggaaagagcua

SEQ ID NO: 1147956 - RNA, 19 nt, Homo sapiens
  misc_RNA (1)...(19): siRNA sense strand
aacaugcaauugaagaaug

SEQ ID NO: 1147957 - RNA, 19 nt, Homo sapiens
  misc_RNA (1)...(19): siRNA sense strand
ucacuguccuaaaacguua

SEQ ID NO: 1147958 - RNA, 19 nt, Homo sapiens
  misc_RNA (1)...(19): siRNA sense strand
gaagcaagaaugguguugu

SEQ ID NO: 1147959 - RNA, 19 nt, Homo sapiens
  misc_RNA (1)...(19): siRNA sense strand
ugaaagaauguccuaccuu

SEQ ID NO: 1147960 - RNA, 19 nt, Homo sapiens
  misc_RNA (1)...(19): siRNA sense strand
gggaagaaagaagcaagaa

SEQ ID NO: 1147961 - RNA, 19 nt, Homo sapiens
  misc_RNA (1)...(19): siRNA sense strand
gcaauugaagaauggaaag

SEQ ID NO: 1147962 - RNA, 19 nt, Homo sapiens
  misc_RNA (1)...(19): siRNA sense strand
cuacaaagagaacguugau

SEQ ID NO: 1147963 - RNA, 19 nt, Homo sapiens
  misc_RNA (1)...(19): siRNA sense strand
uguccuaccuucuuuacca

SEQ ID NO: 1147964 - RNA, 19 nt, Homo sapiens
  misc_RNA (1)...(19): siRNA sense strand
ucagcugguauaauucaua

SEQ ID NO: 1147965 - RNA, 19 nt, Homo sapiens
  misc_RNA (1)...(19): siRNA sense strand
agaaugguguuguaaaaga

SEQ ID NO: 1147966 - RNA, 19 nt, Homo sapiens
  misc_RNA (1)...(19): siRNA sense strand
caucagcagaguucaugaa

SEQ ID NO: 1147967 - RNA, 19 nt, Homo sapiens
  misc_RNA (1)...(19): siRNA sense strand
gcuacaaagagaacguuga

SEQ ID NO: 1147968 - RNA, 19 nt, Homo sapiens
  misc_RNA (1)...(19): siRNA sense strand
gauacaguucuugggauaa

SEQ ID NO: 1147969 - RNA, 19 nt, Homo sapiens
  misc_RNA (1)...(19): siRNA sense strand
gauuugaagccuagcaaca

SEQ ID NO: 1147970 - RNA, 19 nt, Homo sapiens
  misc_RNA (1)...(19): siRNA sense strand
ccgaagucauccuggguau

SEQ ID NO: 1147971 - RNA, 19 nt, Homo sapiens
  misc_RNA (1)...(19): siRNA sense strand
gcagaguucaugaagaaac

SEQ ID NO: 1147972 - RNA, 19 nt, Homo sapiens
  misc_RNA (1)...(19): siRNA sense strand
ggaaagagcuaauuuacaa

SEQ ID NO: 1147973 - RNA, 19 nt, Homo sapiens
  misc_RNA (1)...(19): siRNA sense strand
gcauucagcugguauaauu

SEQ ID NO: 1147974 - RNA, 19 nt, Homo sapiens
  misc_RNA (1)...(19): siRNA sense strand
gaaccaaacucaugcaaag

SEQ ID NO: 1147975 - RNA, 19 nt, Homo sapiens
  misc_RNA (1)...(19): siRNA sense strand
aaagagagcuuaucgugaa

SEQ ID NO: 1147976 - RNA, 19 nt, Homo sapiens
  misc_RNA (1)...(19): siRNA sense strand
caagauguguauuugguua

SEQ ID NO: 1147977 - RNA, 19 nt, Homo sapiens
  misc_RNA (1)...(19): siRNA sense strand
gaagaaagaagcaagaaug

SEQ ID NO: 1147978 - RNA, 19 nt, Homo sapiens
  misc_RNA (1)...(19): siRNA sense strand
cagcagaguucaugaagaa

SEQ ID NO: 1147979 - RNA, 19 nt, Homo sapiens
  misc_RNA (1)...(19): siRNA sense strand
acaaagaagucauggauug

SEQ ID NO: 1147980 - RNA, 19 nt, Homo sapiens
  misc_RNA (1)...(19): siRNA sense strand
ggagcuggaucaugaaaga

SEQ ID NO: 1147981 - RNA, 19 nt, Homo sapiens
  misc_RNA (1)...(19): siRNA sense strand
gguaugggcuacaaagaga

SEQ ID NO: 1147982 - RNA, 19 nt, Homo sapiens
  misc_RNA (1)...(19): siRNA sense strand
gcggaucucuguagacgaa

SEQ ID NO: 1147983 - RNA, 19 nt, Homo sapiens
  misc_RNA (1)...(19): siRNA sense strand
gaauggaaagagcuaauuu

SEQ ID NO: 1147984 - RNA, 19 nt, Homo sapiens
  misc_RNA (1)...(19): siRNA sense strand
gaucaguggaauaaaguua

SEQ ID NO: 1147985 - RNA, 19 nt, Homo sapiens
  misc_RNA (1)...(19): siRNA sense strand
gaagaaagagaacaugcaa

SEQ ID NO: 1147986 - RNA, 19 nt, Homo sapiens
  misc_RNA (1)...(19): siRNA sense strand
aaagagaacaugcaauuga

SEQ ID NO: 1147987 - RNA, 19 nt, Homo sapiens
  misc_RNA (1)...(19): siRNA sense strand
gcaagaaugguguuguaaa

SEQ ID NO: 1147988 - RNA, 19 nt, Homo sapiens
  misc_RNA (1)...(19): siRNA sense strand
cagaugcuuugugguauua

SEQ ID NO: 1147989 - RNA, 19 nt, Homo sapiens
  misc_RNA (1)...(19): siRNA sense strand
aaaguauccuggaaucaaa

SEQ ID NO: 1147990 - RNA, 19 nt, Homo sapiens
  misc_RNA (1)...(19): siRNA sense strand
agaaagagaacaugcaauu

SEQ ID NO: 1147991 - RNA, 19 nt, Homo sapiens
  misc_RNA (1)...(19): siRNA sense strand
aagcaagaaugguguugua

SEQ ID NO: 1147992 - RNA, 19 nt, Homo sapiens
  misc_RNA (1)...(19): siRNA sense strand
ugauacaguucuugggaua

SEQ ID NO: 1147993 - RNA, 19 nt, Homo sapiens
  misc_RNA (1)...(19): siRNA sense strand
gaaagagaacaugcaauug

SEQ ID NO: 1147994 - RNA, 19 nt, Homo sapiens
  misc_RNA (1)...(19): siRNA sense strand
cuagaagaauuucaagaug

SEQ ID NO: 1147995 - RNA, 19 nt, Homo sapiens
  misc_RNA (1)...(19): siRNA sense strand
acaaagagaacguugauau

SEQ ID NO: 1147996 - RNA, 19 nt, Homo sapiens
  misc_RNA (1)...(19): siRNA sense strand
caagaaugguguuguaaaa

SEQ ID NO: 1147997 - RNA, 19 nt, Homo sapiens
  misc_RNA (1)...(19): siRNA sense strand
gaacuuguccucuuaaaau

SEQ ID NO: 1147998 - RNA, 19 nt, Homo sapiens
  misc_RNA (1)...(19): siRNA sense strand
aagagaacaugcaauugaa

SEQ ID NO: 1147999 - RNA, 19 nt, Homo sapiens
  misc_RNA (1)...(19): siRNA sense strand
caaaguauccuggaaucaa

SEQ ID NO: 1148000 - RNA, 19 nt, Homo sapiens
  misc_RNA (1)...(19): siRNA sense strand
gagcuaauuuacaaagaag

SEQ ID NO: 1148001 - RNA, 19 nt, Homo sapiens
  misc_RNA (1)...(19): siRNA sense strand
gauuguuugugcugcauuu

SEQ ID NO: 1148002 - RNA, 19 nt, Homo sapiens
  misc_RNA (1)...(19): siRNA sense strand
gaacaugcaauugaagaau

SEQ ID NO: 1148003 - RNA, 19 nt, Homo sapiens
  misc_RNA (1)...(19): siRNA sense strand
ccagaugcuuugugguauu

SEQ ID NO: 1148004 - RNA, 19 nt, Homo sapiens
  misc_RNA (1)...(19): siRNA sense strand
gagcuuaucgugaacuugu

SEQ ID NO: 1148005 - RNA, 19 nt, Homo sapiens
  misc_RNA (1)...(19): siRNA sense strand
ggacagcgugcacuaacuu

SEQ ID NO: 1148006 - RNA, 19 nt, Homo sapiens
  misc_RNA (1)...(19): siRNA sense strand
gaauguccuaccuucuuua

SEQ ID NO: 1148007 - RNA, 19 nt, Homo sapiens
  misc_RNA (1)...(19): siRNA sense strand
gagaacaugcaauugaaga

SEQ ID NO: 1148008 - RNA, 19 nt, Homo sapiens
  misc_RNA (1)...(19): siRNA sense strand
ccaaacucaugcaaagaga

SEQ ID NO: 1148009 - RNA, 19 nt, Homo sapiens
  misc_RNA (1)...(19): siRNA sense strand
gaugcuuugugguauuaaa

SEQ ID NO: 1148010 - RNA, 19 nt, Homo sapiens
  misc_RNA (1)...(19): siRNA sense strand
agaagaauuucaagaugug

SEQ ID NO: 1148011 - RNA, 19 nt, Homo sapiens
  misc_RNA (1)...(19): siRNA sense strand
ggaagaaagaagcaagaau

SEQ ID NO: 1148012 - RNA, 19 nt, Homo sapiens
  misc_RNA (1)...(19): siRNA sense strand
uggaauuaauggaugcuaa

SEQ ID NO: 1148013 - RNA, 19 nt, Homo sapiens
  misc_RNA (1)...(19): siRNA sense strand
guauuaaacaucugcauuc

SEQ ID NO: 1148014 - RNA, 19 nt, Homo sapiens
  misc_RNA (1)...(19): siRNA sense strand
gguauuaaacaucugcauu

SEQ ID NO: 1148015 - RNA, 19 nt, Homo sapiens
  misc_RNA (1)...(19): siRNA sense strand
caacugugaggaauuaugu

SEQ ID NO: 1148016 - RNA, 19 nt, Homo sapiens
  misc_RNA (1)...(19): siRNA sense strand
aaacuucagccaacuguga

SEQ ID NO: 1148017 - RNA, 19 nt, Homo sapiens
  misc_RNA (1)...(19): siRNA sense strand
caaagagaacguugauauc

SEQ ID NO: 1148018 - RNA, 19 nt, Homo sapiens
  misc_RNA (1)...(19): siRNA sense strand
gaagucauccuggguaugg

SEQ ID NO: 1148019 - RNA, 19 nt, Homo sapiens
  misc_RNA (1)...(19): siRNA sense strand
agccaacugugaggaauua

SEQ ID NO: 1148020 - RNA, 19 nt, Homo sapiens
  misc_RNA (1)...(19): siRNA sense strand
gagagcuuaucgugaacuu

SEQ ID NO: 1148021 - RNA, 19 nt, Homo sapiens
  misc_RNA (1)...(19): siRNA sense strand
ggaagaaagagaacaugca

SEQ ID NO: 1148022 - RNA, 19 nt, Homo sapiens
  misc_RNA (1)...(19): siRNA sense strand
ugaagauccuugacuuugg

SEQ ID NO: 1148023 - RNA, 19 nt, Homo sapiens
  misc_RNA (1)...(19): siRNA sense strand
ucgugaacuuguccucuua

SEQ ID NO: 1148024 - RNA, 19 nt, Homo sapiens
  misc_RNA (1)...(19): siRNA sense strand
gugaacuuguccucuuaaa

SEQ ID NO: 1148025 - RNA, 19 nt, Homo sapiens
  misc_RNA (1)...(19): siRNA sense strand
ggaauuaugucgaaaacag

SEQ ID NO: 1148026 - RNA, 19 nt, Homo sapiens
  misc_RNA (1)...(19): siRNA sense strand
gaaacuaagccguccuuuu

SEQ ID NO: 1148027 - RNA, 19 nt, Homo sapiens
  misc_RNA (1)...(19): siRNA sense strand
gaaaacagaccaaaguauc

SEQ ID NO: 1148028 - RNA, 19 nt, Homo sapiens
  misc_RNA (1)...(19): siRNA sense strand
gaacaccaucagcagaguu

SEQ ID NO: 1148029 - RNA, 19 nt, Homo sapiens
  misc_RNA (1)...(19): siRNA sense strand
cagcugguauaauucauag

SEQ ID NO: 1148030 - RNA, 19 nt, Homo sapiens
  misc_RNA (1)...(19): siRNA sense strand
uaauggaugcuaacuuaug

SEQ ID NO: 1148031 - RNA, 19 nt, Homo sapiens
  misc_RNA (1)...(19): siRNA sense strand
agucauggauugggaagaa

SEQ ID NO: 1148032 - RNA, 19 nt, Homo sapiens
  misc_RNA (1)...(19): siRNA sense strand
gaagaauggaaagagcuaa

SEQ ID NO: 1148033 - RNA, 19 nt, Homo sapiens
  misc_RNA (1)...(19): siRNA sense strand
ugugaggaauuaugucgaa

SEQ ID NO: 1148034 - RNA, 19 nt, Homo sapiens
  misc_RNA (1)...(19): siRNA sense strand
agaccaaaguauccuggaa

SEQ ID NO: 1148035 - RNA, 19 nt, Homo sapiens
  misc_RNA (1)...(19): siRNA sense strand
gcuggaucaugaaagaaug

SEQ ID NO: 1148036 - RNA, 19 nt, Homo sapiens
  misc_RNA (1)...(19): siRNA sense strand
uuacaaagaagucauggau

SEQ ID NO: 1148037 - RNA, 19 nt, Homo sapiens
  misc_RNA (1)...(19): siRNA sense strand
acccauacaucacuguuug

SEQ ID NO: 1148038 - RNA, 19 nt, Homo sapiens
  misc_RNA (1)...(19): siRNA sense strand
acaagcggaucucuguaga

SEQ ID NO: 1148039 - RNA, 19 nt, Homo sapiens
  misc_RNA (1)...(19): siRNA sense strand
aaacaagucaagccagaga

SEQ ID NO: 1148040 - RNA, 19 nt, Homo sapiens
  misc_RNA (1)...(19): siRNA sense strand
aauggaugcuaacuuaugu

SEQ ID NO: 1148041 - RNA, 19 nt, Homo sapiens
  misc_RNA (1)...(19): siRNA sense strand
ucagcagaguucaugaaga

SEQ ID NO: 1148042 - RNA, 19 nt, Homo sapiens
  misc_RNA (1)...(19): siRNA sense strand
aagagaacguugauaucug

SEQ ID NO: 1148043 - RNA, 19 nt, Homo sapiens
  misc_RNA (1)...(19): siRNA sense strand
caucugcauucagcuggua

SEQ ID NO: 1148044 - RNA, 19 nt, Homo sapiens
  misc_RNA (1)...(19): siRNA sense strand
aaacuaagccguccuuuuc

SEQ ID NO: 1148045 - RNA, 19 nt, Homo sapiens
  misc_RNA (1)...(19): siRNA sense strand
cccaccaccucaaauuuau

SEQ ID NO: 1148046 - RNA, 19 nt, Homo sapiens
  misc_RNA (1)...(19): siRNA sense strand
gacaagcggaucucuguag

SEQ ID NO: 1148047 - RNA, 19 nt, Homo sapiens
  misc_RNA (1)...(19): siRNA sense strand
gaccaaaguauccuggaau

SEQ ID NO: 1148048 - RNA, 19 nt, Homo sapiens
  misc_RNA (1)...(19): siRNA sense strand
ggaacaccaucagcagagu

SEQ ID NO: 1148049 - RNA, 19 nt, Homo sapiens
  misc_RNA (1)...(19): siRNA sense strand
aaagagaacguugauaucu

SEQ ID NO: 1148050 - RNA, 19 nt, Homo sapiens
  misc_RNA (1)...(19): siRNA sense strand
uuugaagccuagcaacauu

SEQ ID NO: 1148051 - RNA, 19 nt, Homo sapiens
  misc_RNA (1)...(19): siRNA sense strand
ccaguuggaagaaagagaa

SEQ ID NO: 1148052 - RNA, 19 nt, Homo sapiens
  misc_RNA (1)...(19): siRNA sense strand
gauuggauauucccaucag

SEQ ID NO: 1148053 - RNA, 19 nt, Homo sapiens
  misc_RNA (1)...(19): siRNA sense strand
ugaagaauggaaagagcua

SEQ ID NO: 1148054 - RNA, 19 nt, Homo sapiens
  misc_RNA (1)...(19): siRNA sense strand
aacaugcaauugaagaaug

SEQ ID NO: 1148055 - RNA, 19 nt, Homo sapiens
  misc_RNA (1)...(19): siRNA sense strand
ucacuguccuaaaacguua

SEQ ID NO: 1148056 - RNA, 19 nt, Homo sapiens
  misc_RNA (1)...(19): siRNA sense strand
gaagcaagaaugguguugu

SEQ ID NO: 1148057 - RNA, 19 nt, Homo sapiens
  misc_RNA (1)...(19): siRNA sense strand
ugaaagaauguccuaccuu

SEQ ID NO: 1148058 - RNA, 19 nt, Homo sapiens
  misc_RNA (1)...(19): siRNA sense strand
gggaagaaagaagcaagaa

SEQ ID NO: 1148059 - RNA, 19 nt, Homo sapiens
  misc_RNA (1)...(19): siRNA sense strand
gcaauugaagaauggaaag

SEQ ID NO: 1148060 - RNA, 19 nt, Homo sapiens
  misc_RNA (1)...(19): siRNA sense strand
cuacaaagagaacguugau

SEQ ID NO: 1148061 - RNA, 19 nt, Homo sapiens
  misc_RNA (1)...(19): siRNA sense strand
uguccuaccuucuuuacca

SEQ ID NO: 1148062 - RNA, 19 nt, Homo sapiens
  misc_RNA (1)...(19): siRNA sense strand
gauacaguucuugggauaa

SEQ ID NO: 1148063 - RNA, 19 nt, Homo sapiens
  misc_RNA (1)...(19): siRNA sense strand
agaaugguguuguaaaaga

SEQ ID NO: 1148064 - RNA, 19 nt, Homo sapiens
  misc_RNA (1)...(19): siRNA sense strand
caucagcagaguucaugaa

SEQ ID NO: 1148065 - RNA, 19 nt, Homo sapiens
  misc_RNA (1)...(19): siRNA sense strand
gcuacaaagagaacguuga

SEQ ID NO: 1148066 - RNA, 19 nt, Homo sapiens
  misc_RNA (1)...(19): siRNA sense strand
gauuugaagccuagcaaca

SEQ ID NO: 1148067 - RNA, 19 nt, Homo sapiens
  misc_RNA (1)...(19): siRNA sense strand
ucagcugguauaauucaua

SEQ ID NO: 1148068 - RNA, 19 nt, Homo sapiens
  misc_RNA (1)...(19): siRNA sense strand
ccgaagucauccuggguau

SEQ ID NO: 1148069 - RNA, 19 nt, Homo sapiens
  misc_RNA (1)...(19): siRNA sense strand
gcagaguucaugaagaaac

SEQ ID NO: 1148070 - RNA, 19 nt, Homo sapiens
  misc_RNA (1)...(19): siRNA sense strand
gacagucaguuuuauagug

SEQ ID NO: 1148071 - RNA, 19 nt, Homo sapiens
  misc_RNA (1)...(19): siRNA sense strand
caccaccucaaauuuauga

SEQ ID NO: 1148072 - RNA, 19 nt, Homo sapiens
  misc_RNA (1)...(19): siRNA sense strand
ggaaagagcuaauuuacaa

SEQ ID NO: 1148073 - RNA, 19 nt, Homo sapiens
  misc_RNA (1)...(19): siRNA sense strand
gcauucagcugguauaauu

SEQ ID NO: 1148074 - RNA, 19 nt, Homo sapiens
  misc_RNA (1)...(19): siRNA sense strand
gaaccaaacucaugcaaag

SEQ ID NO: 1148075 - RNA, 19 nt, Homo sapiens
  misc_RNA (1)...(19): siRNA sense strand
aaagagagcuuaucgugaa

SEQ ID NO: 1148076 - RNA, 19 nt, Homo sapiens
  misc_RNA (1)...(19): siRNA sense strand
caagauguguauuugguua

SEQ ID NO: 1148077 - RNA, 19 nt, Homo sapiens
  misc_RNA (1)...(19): siRNA sense strand
gaagaaagaagcaagaaug

SEQ ID NO: 1148078 - RNA, 19 nt, Homo sapiens
  misc_RNA (1)...(19): siRNA sense strand
cagcagaguucaugaagaa

SEQ ID NO: 1148079 - RNA, 19 nt, Homo sapiens
  misc_RNA (1)...(19): siRNA sense strand
acaaagaagucauggauug

SEQ ID NO: 1148080 - RNA, 19 nt, Homo sapiens
  misc_RNA (1)...(19): siRNA sense strand
ggagcuggaucaugaaaga

SEQ ID NO: 1148081 - RNA, 19 nt, Homo sapiens
  misc_RNA (1)...(19): siRNA sense strand
gguaugggcuacaaagaga

SEQ ID NO: 1148082 - RNA, 19 nt, Homo sapiens
  misc_RNA (1)...(19): siRNA sense strand
gcggaucucuguagacgaa

SEQ ID NO: 1148083 - RNA, 19 nt, Homo sapiens
  misc_RNA (1)...(19): siRNA sense strand
gaauggaaagagcuaauuu

SEQ ID NO: 1148084 - RNA, 19 nt, Homo sapiens
  misc_RNA (1)...(19): siRNA sense strand
gaucaguggaauaaaguua

SEQ ID NO: 1148085 - RNA, 19 nt, Homo sapiens
  misc_RNA (1)...(19): siRNA sense strand
gaagaaagagaacaugcaa

SEQ ID NO: 1148086 - RNA, 19 nt, Homo sapiens
  misc_RNA (1)...(19): siRNA sense strand
aaagagaacaugcaauuga

SEQ ID NO: 1148087 - RNA, 19 nt, Homo sapiens
  misc_RNA (1)...(19): siRNA sense strand
gcaagaaugguguuguaaa

SEQ ID NO: 1148088 - RNA, 19 nt, Homo sapiens
  misc_RNA (1)...(19): siRNA sense strand
cagaugcuuugugguauua

SEQ ID NO: 1148089 - RNA, 19 nt, Homo sapiens
  misc_RNA (1)...(19): siRNA sense strand
aaaguauccuggaaucaaa

SEQ ID NO: 1148090 - RNA, 19 nt, Homo sapiens
  misc_RNA (1)...(19): siRNA sense strand
agaaagagaacaugcaauu

SEQ ID NO: 1148091 - RNA, 19 nt, Homo sapiens
  misc_RNA (1)...(19): siRNA sense strand
aagcaagaaugguguugua

SEQ ID NO: 1148092 - RNA, 19 nt, Homo sapiens
  misc_RNA (1)...(19): siRNA sense strand
ugauacaguucuugggaua

SEQ ID NO: 1148093 - RNA, 19 nt, Homo sapiens
  misc_RNA (1)...(19): siRNA sense strand
gaaagagaacaugcaauug

SEQ ID NO: 1148094 - RNA, 19 nt, Homo sapiens
  misc_RNA (1)...(19): siRNA sense strand
cuagaagaauuucaagaug

SEQ ID NO: 1148095 - RNA, 19 nt, Homo sapiens
  misc_RNA (1)...(19): siRNA sense strand
acaaagagaacguugauau

SEQ ID NO: 1148096 - RNA, 19 nt, Homo sapiens
  misc_RNA (1)...(19): siRNA sense strand
caagaaugguguuguaaaa

SEQ ID NO: 1148097 - RNA, 19 nt, Homo sapiens
  misc_RNA (1)...(19): siRNA sense strand
gaacuuguccucuuaaaau

SEQ ID NO: 1148098 - RNA, 19 nt, Homo sapiens
  misc_RNA (1)...(19): siRNA sense strand
aagagaacaugcaauugaa

SEQ ID NO: 1148099 - RNA, 19 nt, Homo sapiens
  misc_RNA (1)...(19): siRNA sense strand
caaaguauccuggaaucaa

SEQ ID NO: 1148100 - RNA, 19 nt, Homo sapiens
  misc_RNA (1)...(19): siRNA sense strand
gagcuaauuuacaaagaag

SEQ ID NO: 1148101 - RNA, 19 nt, Homo sapiens
  misc_RNA (1)...(19): siRNA sense strand
gauuguuugugcugcauuu

SEQ ID NO: 1148102 - RNA, 19 nt, Homo sapiens
  misc_RNA (1)...(19): siRNA sense strand
gaacaugcaauugaagaau

SEQ ID NO: 1148103 - RNA, 19 nt, Homo sapiens
  misc_RNA (1)...(19): siRNA sense strand
ccagaugcuuugugguauu

SEQ ID NO: 1148104 - RNA, 19 nt, Homo sapiens
  misc_RNA (1)...(19): siRNA sense strand
gagcuuaucgugaacuugu

SEQ ID NO: 1148105 - RNA, 19 nt, Homo sapiens
  misc_RNA (1)...(19): siRNA sense strand
ggacagcgugcacuaacuu

SEQ ID NO: 1148106 - RNA, 19 nt, Homo sapiens
  misc_RNA (1)...(19): siRNA sense strand
gaauguccuaccuucuuua

SEQ ID NO: 1148107 - RNA, 19 nt, Homo sapiens
  misc_RNA (1)...(19): siRNA sense strand
gagaacaugcaauugaaga

SEQ ID NO: 1148108 - RNA, 19 nt, Homo sapiens
  misc_RNA (1)...(19): siRNA sense strand
ccaaacucaugcaaagaga

SEQ ID NO: 1148109 - RNA, 19 nt, Homo sapiens
  misc_RNA (1)...(19): siRNA sense strand
gaugcuuugugguauuaaa

SEQ ID NO: 1148110 - RNA, 19 nt, Homo sapiens
  misc_RNA (1)...(19): siRNA sense strand
agaagaauuucaagaugug

SEQ ID NO: 1148111 - RNA, 19 nt, Homo sapiens
  misc_RNA (1)...(19): siRNA sense strand
ggaagaaagaagcaagaau

SEQ ID NO: 1148112 - RNA, 19 nt, Homo sapiens
  misc_RNA (1)...(19): siRNA sense strand
uggaauuaauggaugcuaa

SEQ ID NO: 1148113 - RNA, 19 nt, Homo sapiens
  misc_RNA (1)...(19): siRNA sense strand
guauuaaacaucugcauuc

SEQ ID NO: 1148114 - RNA, 19 nt, Homo sapiens
  misc_RNA (1)...(19): siRNA sense strand
gguauuaaacaucugcauu

SEQ ID NO: 1148115 - RNA, 19 nt, Homo sapiens
  misc_RNA (1)...(19): siRNA sense strand
caacugugaggaauuaugu

SEQ ID NO: 1148116 - RNA, 19 nt, Homo sapiens
  misc_RNA (1)...(19): siRNA sense strand
aaacuucagccaacuguga

SEQ ID NO: 1148117 - RNA, 19 nt, Homo sapiens
  misc_RNA (1)...(19): siRNA sense strand
caaagagaacguugauauc

SEQ ID NO: 1148118 - RNA, 19 nt, Homo sapiens
  misc_RNA (1)...(19): siRNA sense strand
gaagucauccuggguaugg

SEQ ID NO: 1148119 - RNA, 19 nt, Homo sapiens
  misc_RNA (1)...(19): siRNA sense strand
agccaacugugaggaauua

SEQ ID NO: 1148120 - RNA, 19 nt, Homo sapiens
  misc_RNA (1)...(19): siRNA sense strand
gagagcuuaucgugaacuu

SEQ ID NO: 1148121 - RNA, 19 nt, Homo sapiens
  misc_RNA (1)...(19): siRNA sense strand
ggaagaaagagaacaugca

SEQ ID NO: 1148122 - RNA, 19 nt, Homo sapiens
  misc_RNA (1)...(19): siRNA sense strand
ugaagauccuugacuuugg

SEQ ID NO: 1148123 - RNA, 19 nt, Homo sapiens
  misc_RNA (1)...(19): siRNA sense strand
ucgugaacuuguccucuua

SEQ ID NO: 1148124 - RNA, 19 nt, Homo sapiens
  misc_RNA (1)...(19): siRNA sense strand
gugaacuuguccucuuaaa

SEQ ID NO: 1148125 - RNA, 19 nt, Homo sapiens
  misc_RNA (1)...(19): siRNA sense strand
ggaauuaugucgaaaacag

SEQ ID NO: 1148126 - RNA, 19 nt, Homo sapiens
  misc_RNA (1)...(19): siRNA sense strand
gaaacuaagccguccuuuu

SEQ ID NO: 1148127 - RNA, 19 nt, Homo sapiens
  misc_RNA (1)...(19): siRNA sense strand
gaaaacagaccaaaguauc

SEQ ID NO: 1148128 - RNA, 19 nt, Homo sapiens
  misc_RNA (1)...(19): siRNA sense strand
gaacaccaucagcagaguu

SEQ ID NO: 1148129 - RNA, 19 nt, Homo sapiens
  misc_RNA (1)...(19): siRNA sense strand
cagcugguauaauucauag

SEQ ID NO: 1148130 - RNA, 19 nt, Homo sapiens
  misc_RNA (1)...(19): siRNA sense strand
uaauggaugcuaacuuaug

SEQ ID NO: 1148131 - RNA, 19 nt, Homo sapiens
  misc_RNA (1)...(19): siRNA sense strand
agucauggauugggaagaa

SEQ ID NO: 1148132 - RNA, 19 nt, Homo sapiens
  misc_RNA (1)...(19): siRNA sense strand
gaagaauggaaagagcuaa

SEQ ID NO: 1148133 - RNA, 19 nt, Homo sapiens
  misc_RNA (1)...(19): siRNA sense strand
ugugaggaauuaugucgaa

SEQ ID NO: 1148134 - RNA, 19 nt, Homo sapiens
  misc_RNA (1)...(19): siRNA sense strand
agaccaaaguauccuggaa

SEQ ID NO: 1148135 - RNA, 19 nt, Homo sapiens
  misc_RNA (1)...(19): siRNA sense strand
gcuggaucaugaaagaaug

SEQ ID NO: 1148136 - RNA, 19 nt, Homo sapiens
  misc_RNA (1)...(19): siRNA sense strand
uuacaaagaagucauggau

SEQ ID NO: 1148137 - RNA, 19 nt, Homo sapiens
  misc_RNA (1)...(19): siRNA sense strand
acccauacaucacuguuug

SEQ ID NO: 1148138 - RNA, 19 nt, Homo sapiens
  misc_RNA (1)...(19): siRNA sense strand
acaagcggaucucuguaga

SEQ ID NO: 1148139 - RNA, 19 nt, Homo sapiens
  misc_RNA (1)...(19): siRNA sense strand
aaacaagucaagccagaga

SEQ ID NO: 1148140 - RNA, 19 nt, Homo sapiens
  misc_RNA (1)...(19): siRNA sense strand
aauggaugcuaacuuaugu

SEQ ID NO: 1148141 - RNA, 19 nt, Homo sapiens
  misc_RNA (1)...(19): siRNA sense strand
ucagcagaguucaugaaga

SEQ ID NO: 1148142 - RNA, 19 nt, Homo sapiens
  misc_RNA (1)...(19): siRNA sense strand
aagagaacguugauaucug

SEQ ID NO: 1148143 - RNA, 19 nt, Homo sapiens
  misc_RNA (1)...(19): siRNA sense strand
caucugcauucagcuggua

SEQ ID NO: 1148144 - RNA, 19 nt, Homo sapiens
  misc_RNA (1)...(19): siRNA sense strand
aaacuaagccguccuuuuc

SEQ ID NO: 1148145 - RNA, 19 nt, Homo sapiens
  misc_RNA (1)...(19): siRNA sense strand
cccaccaccucaaauuuau

SEQ ID NO: 1148146 - RNA, 19 nt, Homo sapiens
  misc_RNA (1)...(19): siRNA sense strand
gacaagcggaucucuguag

SEQ ID NO: 1148147 - RNA, 19 nt, Homo sapiens
  misc_RNA (1)...(19): siRNA sense strand
gaccaaaguauccuggaau

SEQ ID NO: 1148148 - RNA, 19 nt, Homo sapiens
  misc_RNA (1)...(19): siRNA sense strand
ggaacaccaucagcagagu

SEQ ID NO: 1148149 - RNA, 19 nt, Homo sapiens
  misc_RNA (1)...(19): siRNA sense strand
aaagagaacguugauaucu

SEQ ID NO: 1148150 - RNA, 19 nt, Homo sapiens
  misc_RNA (1)...(19): siRNA sense strand
uuugaagccuagcaacauu

SEQ ID NO: 1148151 - RNA, 19 nt, Homo sapiens
  misc_RNA (1)...(19): siRNA sense strand
ccaguuggaagaaagagaa

SEQ ID NO: 1148152 - RNA, 19 nt, Homo sapiens
  misc_RNA (1)...(19): siRNA sense strand
gauuggauauucccaucag

SEQ ID NO: 1148153 - RNA, 19 nt, Homo sapiens
  misc_RNA (1)...(19): siRNA sense strand
ugaagaauggaaagagcua

SEQ ID NO: 1148154 - RNA, 19 nt, Homo sapiens
  misc_RNA (1)...(19): siRNA sense strand
aacaugcaauugaagaaug

SEQ ID NO: 1148155 - RNA, 19 nt, Homo sapiens
  misc_RNA (1)...(19): siRNA sense strand
ucacuguccuaaaacguua

SEQ ID NO: 1148156 - RNA, 19 nt, Homo sapiens
  misc_RNA (1)...(19): siRNA sense strand
gaagcaagaaugguguugu

SEQ ID NO: 1148157 - RNA, 19 nt, Homo sapiens
  misc_RNA (1)...(19): siRNA sense strand
ugaaagaauguccuaccuu

SEQ ID NO: 1148158 - RNA, 19 nt, Homo sapiens
  misc_RNA (1)...(19): siRNA sense strand
gggaagaaagaagcaagaa

SEQ ID NO: 1148159 - RNA, 19 nt, Homo sapiens
  misc_RNA (1)...(19): siRNA sense strand
gcaauugaagaauggaaag

SEQ ID NO: 1148160 - RNA, 19 nt, Homo sapiens
  misc_RNA (1)...(19): siRNA sense strand
cuacaaagagaacguugau

SEQ ID NO: 1148161 - RNA, 19 nt, Homo sapiens
  misc_RNA (1)...(19): siRNA sense strand
uguccuaccuucuuuacca

SEQ ID NO: 1148162 - RNA, 19 nt, Homo sapiens
  misc_RNA (1)...(19): siRNA sense strand
gauacaguucuugggauaa

SEQ ID NO: 1148163 - RNA, 19 nt, Homo sapiens
  misc_RNA (1)...(19): siRNA sense strand
agaaugguguuguaaaaga

SEQ ID NO: 1148164 - RNA, 19 nt, Homo sapiens
  misc_RNA (1)...(19): siRNA sense strand
caucagcagaguucaugaa

SEQ ID NO: 1148165 - RNA, 19 nt, Homo sapiens
  misc_RNA (1)...(19): siRNA sense strand
gcuacaaagagaacguuga

SEQ ID NO: 1148166 - RNA, 19 nt, Homo sapiens
  misc_RNA (1)...(19): siRNA sense strand
gauuugaagccuagcaaca

SEQ ID NO: 1148167 - RNA, 19 nt, Homo sapiens
  misc_RNA (1)...(19): siRNA sense strand
ucagcugguauaauucaua

SEQ ID NO: 1148168 - RNA, 19 nt, Homo sapiens
  misc_RNA (1)...(19): siRNA sense strand
ccgaagucauccuggguau

SEQ ID NO: 1148169 - RNA, 19 nt, Homo sapiens
  misc_RNA (1)...(19): siRNA sense strand
gcagaguucaugaagaaac

SEQ ID NO: 1148170 - RNA, 19 nt, Homo sapiens
  misc_RNA (1)...(19): siRNA sense strand
gacagucaguuuuauagug

SEQ ID NO: 1148171 - RNA, 19 nt, Homo sapiens
  misc_RNA (1)...(19): siRNA sense strand
caccaccucaaauuuauga

SEQ ID NO: 1148172 - RNA, 19 nt, Homo sapiens
  misc_RNA (1)...(19): siRNA sense strand
ggaaagagcuaauuuacaa

SEQ ID NO: 1148173 - RNA, 19 nt, Homo sapiens
  misc_RNA (1)...(19): siRNA sense strand
gcauucagcugguauaauu

SEQ ID NO: 1148174 - RNA, 19 nt, Homo sapiens
  misc_RNA (1)...(19): siRNA sense strand
gaaccaaacucaugcaaag

SEQ ID NO: 1148175 - RNA, 19 nt, Homo sapiens
  misc_RNA (1)...(19): siRNA sense strand
aaagagagcuuaucgugaa

SEQ ID NO: 1148176 - RNA, 19 nt, Homo sapiens
  misc_RNA (1)...(19): siRNA sense strand
caagauguguauuugguua

SEQ ID NO: 1148177 - RNA, 19 nt, Homo sapiens
  misc_RNA (1)...(19): siRNA sense strand
gaagaaagaagcaagaaug

SEQ ID NO: 1148178 - RNA, 19 nt, Homo sapiens
  misc_RNA (1)...(19): siRNA sense strand
cagcagaguucaugaagaa

SEQ ID NO: 1148179 - RNA, 19 nt, Homo sapiens
  misc_RNA (1)...(19): siRNA sense strand
acaaagaagucauggauug

SEQ ID NO: 1148180 - RNA, 19 nt, Homo sapiens
  misc_RNA (1)...(19): siRNA sense strand
ggagcuggaucaugaaaga

SEQ ID NO: 1148181 - RNA, 19 nt, Homo sapiens
  misc_RNA (1)...(19): siRNA sense strand
gguaugggcuacaaagaga

SEQ ID NO: 1148182 - RNA, 19 nt, Homo sapiens
  misc_RNA (1)...(19): siRNA sense strand
gcggaucucuguagacgaa

SEQ ID NO: 1148183 - RNA, 19 nt, Homo sapiens
  misc_RNA (1)...(19): siRNA sense strand
gaauggaaagagcuaauuu

SEQ ID NO: 1148184 - RNA, 19 nt, Homo sapiens
  misc_RNA (1)...(19): siRNA sense strand
gaucaguggaauaaaguua

SEQ ID NO: 1148185 - RNA, 19 nt, Homo sapiens
  misc_RNA (1)...(19): siRNA sense strand
gaagaaagagaacaugcaa

SEQ ID NO: 1148186 - RNA, 19 nt, Homo sapiens
  misc_RNA (1)...(19): siRNA sense strand
aaagagaacaugcaauuga

SEQ ID NO: 1148187 - RNA, 19 nt, Homo sapiens
  misc_RNA (1)...(19): siRNA sense strand
gcaagaaugguguuguaaa

SEQ ID NO: 1148188 - RNA, 19 nt, Homo sapiens
  misc_RNA (1)...(19): siRNA sense strand
cagaugcuuugugguauua

SEQ ID NO: 1148189 - RNA, 19 nt, Homo sapiens
  misc_RNA (1)...(19): siRNA sense strand
aaaguauccuggaaucaaa

SEQ ID NO: 1148190 - RNA, 19 nt, Homo sapiens
  misc_RNA (1)...(19): siRNA sense strand
agaaagagaacaugcaauu

SEQ ID NO: 1148191 - RNA, 19 nt, Homo sapiens
  misc_RNA (1)...(19): siRNA sense strand
aagcaagaaugguguugua

SEQ ID NO: 1148192 - RNA, 19 nt, Homo sapiens
  misc_RNA (1)...(19): siRNA sense strand
ugauacaguucuugggaua

SEQ ID NO: 1148193 - RNA, 19 nt, Homo sapiens
  misc_RNA (1)...(19): siRNA sense strand
gaaagagaacaugcaauug

SEQ ID NO: 1148194 - RNA, 19 nt, Homo sapiens
  misc_RNA (1)...(19): siRNA sense strand
cuagaagaauuucaagaug

SEQ ID NO: 1148195 - RNA, 19 nt, Homo sapiens
  misc_RNA (1)...(19): siRNA sense strand
acaaagagaacguugauau

SEQ ID NO: 1148196 - RNA, 19 nt, Homo sapiens
  misc_RNA (1)...(19): siRNA sense strand
caagaaugguguuguaaaa

SEQ ID NO: 1148197 - RNA, 19 nt, Homo sapiens
  misc_RNA (1)...(19): siRNA sense strand
gaacuuguccucuuaaaau

SEQ ID NO: 1148198 - RNA, 19 nt, Homo sapiens
  misc_RNA (1)...(19): siRNA sense strand
aagagaacaugcaauugaa

SEQ ID NO: 1148199 - RNA, 19 nt, Homo sapiens
  misc_RNA (1)...(19): siRNA sense strand
caaaguauccuggaaucaa

SEQ ID NO: 1148200 - RNA, 19 nt, Homo sapiens
  misc_RNA (1)...(19): siRNA sense strand
gagcuaauuuacaaagaag

SEQ ID NO: 1148201 - RNA, 19 nt, Homo sapiens
  misc_RNA (1)...(19): siRNA sense strand
gauuguuugugcugcauuu

SEQ ID NO: 1148202 - RNA, 19 nt, Homo sapiens
  misc_RNA (1)...(19): siRNA sense strand
gaacaugcaauugaagaau

SEQ ID NO: 1148203 - RNA, 19 nt, Homo sapiens
  misc_RNA (1)...(19): siRNA sense strand
ccagaugcuuugugguauu

SEQ ID NO: 1148204 - RNA, 19 nt, Homo sapiens
  misc_RNA (1)...(19): siRNA sense strand
gagcuuaucgugaacuugu

SEQ ID NO: 1148205 - RNA, 19 nt, Homo sapiens
  misc_RNA (1)...(19): siRNA sense strand
ggacagcgugcacuaacuu

SEQ ID NO: 1148206 - RNA, 19 nt, Homo sapiens
  misc_RNA (1)...(19): siRNA sense strand
gaauguccuaccuucuuua

SEQ ID NO: 1148207 - RNA, 19 nt, Homo sapiens
  misc_RNA (1)...(19): siRNA sense strand
gagaacaugcaauugaaga

SEQ ID NO: 1148208 - RNA, 19 nt, Homo sapiens
  misc_RNA (1)...(19): siRNA sense strand
ccaaacucaugcaaagaga

SEQ ID NO: 1148209 - RNA, 19 nt, Homo sapiens
  misc_RNA (1)...(19): siRNA sense strand
gaugcuuugugguauuaaa

SEQ ID NO: 1148210 - RNA, 19 nt, Homo sapiens
  misc_RNA (1)...(19): siRNA sense strand
agaagaauuucaagaugug

SEQ ID NO: 1148211 - RNA, 19 nt, Homo sapiens
  misc_RNA (1)...(19): siRNA sense strand
ggaagaaagaagcaagaau

SEQ ID NO: 1148212 - RNA, 19 nt, Homo sapiens
  misc_RNA (1)...(19): siRNA sense strand
uggaauuaauggaugcuaa

SEQ ID NO: 1148213 - RNA, 19 nt, Homo sapiens
  misc_RNA (1)...(19): siRNA sense strand
guauuaaacaucugcauuc

SEQ ID NO: 1148214 - RNA, 19 nt, Homo sapiens
  misc_RNA (1)...(19): siRNA sense strand
gguauuaaacaucugcauu

SEQ ID NO: 1148215 - RNA, 19 nt, Homo sapiens
  misc_RNA (1)...(19): siRNA sense strand
caacugugaggaauuaugu

SEQ ID NO: 1148216 - RNA, 19 nt, Homo sapiens
  misc_RNA (1)...(19): siRNA sense strand
aaacuucagccaacuguga

SEQ ID NO: 1148217 - RNA, 19 nt, Homo sapiens
  misc_RNA (1)...(19): siRNA sense strand
caaagagaacguugauauc

SEQ ID NO: 1148218 - RNA, 19 nt, Homo sapiens
  misc_RNA (1)...(19): siRNA sense strand
gaagucauccuggguaugg

SEQ ID NO: 1148219 - RNA, 19 nt, Homo sapiens
  misc_RNA (1)...(19): siRNA sense strand
agccaacugugaggaauua

SEQ ID NO: 1148220 - RNA, 19 nt, Homo sapiens
  misc_RNA (1)...(19): siRNA sense strand
gagagcuuaucgugaacuu

SEQ ID NO: 1148221 - RNA, 19 nt, Homo sapiens
  misc_RNA (1)...(19): siRNA sense strand
ggaagaaagagaacaugca

SEQ ID NO: 1148222 - RNA, 19 nt, Homo sapiens
  misc_RNA (1)...(19): siRNA sense strand
ugaagauccuugacuuugg

SEQ ID NO: 1148223 - RNA, 19 nt, Homo sapiens
  misc_RNA (1)...(19): siRNA sense strand
ucgugaacuuguccucuua

SEQ ID NO: 1148224 - RNA, 19 nt, Homo sapiens
  misc_RNA (1)...(19): siRNA sense strand
gugaacuuguccucuuaaa

SEQ ID NO: 1148225 - RNA, 19 nt, Homo sapiens
  misc_RNA (1)...(19): siRNA sense strand
ggaauuaugucgaaaacag

SEQ ID NO: 1148226 - RNA, 19 nt, Homo sapiens
  misc_RNA (1)...(19): siRNA sense strand
gaaacuaagccguccuuuu

SEQ ID NO: 1148227 - RNA, 19 nt, Homo sapiens
  misc_RNA (1)...(19): siRNA sense strand
uuucauccauguccacuga

SEQ ID NO: 1148228 - RNA, 19 nt, Homo sapiens
  misc_RNA (1)...(19): siRNA sense strand
gaaaacagaccaaaguauc

SEQ ID NO: 1148229 - RNA, 19 nt, Homo sapiens
  misc_RNA (1)...(19): siRNA sense strand
gaacaccaucagcagaguu

SEQ ID NO: 1148230 - RNA, 19 nt, Homo sapiens
  misc_RNA (1)...(19): siRNA sense strand
cagcugguauaauucauag

SEQ ID NO: 1148231 - RNA, 19 nt, Homo sapiens
  misc_RNA (1)...(19): siRNA sense strand
uaauggaugcuaacuuaug

SEQ ID NO: 1148232 - RNA, 19 nt, Homo sapiens
  misc_RNA (1)...(19): siRNA sense strand
agucauggauugggaagaa

SEQ ID NO: 1148233 - RNA, 19 nt, Homo sapiens
  misc_RNA (1)...(19): siRNA sense strand
gaagaauggaaagagcuaa

SEQ ID NO: 1148234 - RNA, 19 nt, Homo sapiens
  misc_RNA (1)...(19): siRNA sense strand
ugugaggaauuaugucgaa

SEQ ID NO: 1148235 - RNA, 19 nt, Homo sapiens
  misc_RNA (1)...(19): siRNA sense strand
agaccaaaguauccuggaa

SEQ ID NO: 1148236 - RNA, 19 nt, Homo sapiens
  misc_RNA (1)...(19): siRNA sense strand
gcuggaucaugaaagaaug

SEQ ID NO: 1148237 - RNA, 19 nt, Homo sapiens
  misc_RNA (1)...(19): siRNA sense strand
uuacaaagaagucauggau

SEQ ID NO: 1148238 - RNA, 19 nt, Homo sapiens
  misc_RNA (1)...(19): siRNA sense strand
acccauacaucacuguuug

SEQ ID NO: 1148239 - RNA, 19 nt, Homo sapiens
  misc_RNA (1)...(19): siRNA sense strand
acaagcggaucucuguaga

SEQ ID NO: 1148240 - RNA, 19 nt, Homo sapiens
  misc_RNA (1)...(19): siRNA sense strand
aaacaagucaagccagaga

SEQ ID NO: 1148241 - RNA, 19 nt, Homo sapiens
  misc_RNA (1)...(19): siRNA sense strand
aauggaugcuaacuuaugu

SEQ ID NO: 1148242 - RNA, 19 nt, Homo sapiens
  misc_RNA (1)...(19): siRNA sense strand
gcaacgccacuccuucuca

SEQ ID NO: 1148243 - RNA, 19 nt, Homo sapiens
  misc_RNA (1)...(19): siRNA sense strand
ucagcagaguucaugaaga

SEQ ID NO: 1148244 - RNA, 19 nt, Homo sapiens
  misc_RNA (1)...(19): siRNA sense strand
aagagaacguugauaucug

SEQ ID NO: 1148245 - RNA, 19 nt, Homo sapiens
  misc_RNA (1)...(19): siRNA sense strand
caucugcauucagcuggua

SEQ ID NO: 1148246 - RNA, 19 nt, Homo sapiens
  misc_RNA (1)...(19): siRNA sense strand
cccaccaccucaaauuuau

SEQ ID NO: 1148247 - RNA, 19 nt, Homo sapiens
  misc_RNA (1)...(19): siRNA sense strand
gacaagcggaucucuguag

SEQ ID NO: 1148248 - RNA, 19 nt, Homo sapiens
  misc_RNA (1)...(19): siRNA sense strand
gaccaaaguauccuggaau

SEQ ID NO: 1148249 - RNA, 19 nt, Homo sapiens
  misc_RNA (1)...(19): siRNA sense strand
ggaacaccaucagcagagu

SEQ ID NO: 1148250 - RNA, 19 nt, Homo sapiens
  misc_RNA (1)...(19): siRNA sense strand
aaagagaacguugauaucu

SEQ ID NO: 1148251 - RNA, 19 nt, Homo sapiens
  misc_RNA (1)...(19): siRNA sense strand
aaacuaagccguccuuuuc

SEQ ID NO: 1148252 - RNA, 19 nt, Homo sapiens
  misc_RNA (1)...(19): siRNA sense strand
uuugaagccuagcaacauu

SEQ ID NO: 1148253 - RNA, 19 nt, Homo sapiens
  misc_RNA (1)...(19): siRNA sense strand
ccaguuggaagaaagagaa

SEQ ID NO: 1148254 - RNA, 19 nt, Homo sapiens
  misc_RNA (1)...(19): siRNA sense strand
gauuggauauucccaucag

SEQ ID NO: 1148255 - RNA, 19 nt, Homo sapiens
  misc_RNA (1)...(19): siRNA sense strand
ugaagaauggaaagagcua

SEQ ID NO: 1148256 - RNA, 19 nt, Homo sapiens
  misc_RNA (1)...(19): siRNA sense strand
aacaugcaauugaagaaug

SEQ ID NO: 1148257 - RNA, 19 nt, Homo sapiens
  misc_RNA (1)...(19): siRNA sense strand
ucacuguccuaaaacguua

SEQ ID NO: 1148258 - RNA, 19 nt, Homo sapiens
  misc_RNA (1)...(19): siRNA sense strand
gaagcaagaaugguguugu

SEQ ID NO: 1148259 - RNA, 19 nt, Homo sapiens
  misc_RNA (1)...(19): siRNA sense strand
ugaaagaauguccuaccuu

SEQ ID NO: 1148260 - RNA, 19 nt, Homo sapiens
  misc_RNA (1)...(19): siRNA sense strand
gggaagaaagaagcaagaa

SEQ ID NO: 1148261 - RNA, 19 nt, Homo sapiens
  misc_RNA (1)...(19): siRNA sense strand
gcaauugaagaauggaaag

SEQ ID NO: 1148262 - RNA, 19 nt, Homo sapiens
  misc_RNA (1)...(19): siRNA sense strand
cuacaaagagaacguugau

SEQ ID NO: 1148263 - RNA, 19 nt, Homo sapiens
  misc_RNA (1)...(19): siRNA sense strand
uguccuaccuucuuuacca

SEQ ID NO: 1148264 - RNA, 19 nt, Homo sapiens
  misc_RNA (1)...(19): siRNA sense strand
ucagcugguauaauucaua

SEQ ID NO: 1148265 - RNA, 19 nt, Homo sapiens
  misc_RNA (1)...(19): siRNA sense strand
agaaugguguuguaaaaga

SEQ ID NO: 1148266 - RNA, 19 nt, Homo sapiens
  misc_RNA (1)...(19): siRNA sense strand
caucagcagaguucaugaa

SEQ ID NO: 1148267 - RNA, 19 nt, Homo sapiens
  misc_RNA (1)...(19): siRNA sense strand
gcuacaaagagaacguuga

SEQ ID NO: 1148268 - RNA, 19 nt, Homo sapiens
  misc_RNA (1)...(19): siRNA sense strand
gauacaguucuugggauaa

SEQ ID NO: 1148269 - RNA, 19 nt, Homo sapiens
  misc_RNA (1)...(19): siRNA sense strand
gauuugaagccuagcaaca

SEQ ID NO: 1148270 - RNA, 19 nt, Homo sapiens
  misc_RNA (1)...(19): siRNA sense strand
ccgaagucauccuggguau

SEQ ID NO: 1148271 - RNA, 19 nt, Homo sapiens
  misc_RNA (1)...(19): siRNA sense strand
gcagaguucaugaagaaac

SEQ ID NO: 1148272 - RNA, 19 nt, Homo sapiens
  misc_RNA (1)...(19): siRNA sense strand
ggaaagagcuaauuuacaa

SEQ ID NO: 1148273 - RNA, 19 nt, Homo sapiens
  misc_RNA (1)...(19): siRNA sense strand
gcauucagcugguauaauu

SEQ ID NO: 1148274 - RNA, 19 nt, Homo sapiens
  misc_RNA (1)...(19): siRNA sense strand
gaaccaaacucaugcaaag

SEQ ID NO: 1148275 - RNA, 19 nt, Homo sapiens
  misc_RNA (1)...(19): siRNA sense strand
aaagagagcuuaucgugaa

SEQ ID NO: 1148276 - RNA, 19 nt, Homo sapiens
  misc_RNA (1)...(19): siRNA sense strand
caagauguguauuugguua

SEQ ID NO: 1148277 - RNA, 19 nt, Homo sapiens
  misc_RNA (1)...(19): siRNA sense strand
gaagaaagaagcaagaaug

SEQ ID NO: 1148278 - RNA, 19 nt, Homo sapiens
  misc_RNA (1)...(19): siRNA sense strand
cagcagaguucaugaagaa

SEQ ID NO: 1148279 - RNA, 19 nt, Homo sapiens
  misc_RNA (1)...(19): siRNA sense strand
acaaagaagucauggauug

SEQ ID NO: 1148280 - RNA, 19 nt, Homo sapiens
  misc_RNA (1)...(19): siRNA sense strand
ggagcuggaucaugaaaga

SEQ ID NO: 1148281 - RNA, 19 nt, Homo sapiens
  misc_RNA (1)...(19): siRNA sense strand
gguaugggcuacaaagaga

SEQ ID NO: 1148282 - RNA, 19 nt, Homo sapiens
  misc_RNA (1)...(19): siRNA sense strand
gcggaucucuguagacgaa

SEQ ID NO: 1148283 - RNA, 19 nt, Homo sapiens
  misc_RNA (1)...(19): siRNA sense strand
gaauggaaagagcuaauuu

SEQ ID NO: 1148284 - RNA, 19 nt, Homo sapiens
  misc_RNA (1)...(19): siRNA sense strand
gaucaguggaauaaaguua

SEQ ID NO: 1148285 - RNA, 19 nt, Homo sapiens
  misc_RNA (1)...(19): siRNA sense strand
gaagaaagagaacaugcaa

SEQ ID NO: 1148286 - RNA, 19 nt, Homo sapiens
  misc_RNA (1)...(19): siRNA sense strand
aaagagaacaugcaauuga

SEQ ID NO: 1148287 - RNA, 19 nt, Homo sapiens
  misc_RNA (1)...(19): siRNA sense strand
gcaagaaugguguuguaaa

SEQ ID NO: 1148288 - RNA, 19 nt, Homo sapiens
  misc_RNA (1)...(19): siRNA sense strand
cagaugcuuugugguauua

SEQ ID NO: 1148289 - RNA, 19 nt, Homo sapiens
  misc_RNA (1)...(19): siRNA sense strand
aaaguauccuggaaucaaa

SEQ ID NO: 1148290 - RNA, 19 nt, Homo sapiens
  misc_RNA (1)...(19): siRNA sense strand
agaaagagaacaugcaauu

SEQ ID NO: 1148291 - RNA, 19 nt, Homo sapiens
  misc_RNA (1)...(19): siRNA sense strand
aagcaagaaugguguugua

SEQ ID NO: 1148292 - RNA, 19 nt, Homo sapiens
  misc_RNA (1)...(19): siRNA sense strand
ugauacaguucuugggaua

SEQ ID NO: 1148293 - RNA, 19 nt, Homo sapiens
  misc_RNA (1)...(19): siRNA sense strand
gaaagagaacaugcaauug

SEQ ID NO: 1148294 - RNA, 19 nt, Homo sapiens
  misc_RNA (1)...(19): siRNA sense strand
cuagaagaauuucaagaug

SEQ ID NO: 1148295 - RNA, 19 nt, Homo sapiens
  misc_RNA (1)...(19): siRNA sense strand
acaaagagaacguugauau

SEQ ID NO: 1148296 - RNA, 19 nt, Homo sapiens
  misc_RNA (1)...(19): siRNA sense strand
caagaaugguguuguaaaa

SEQ ID NO: 1148297 - RNA, 19 nt, Homo sapiens
  misc_RNA (1)...(19): siRNA sense strand
gaacuuguccucuuaaaau

SEQ ID NO: 1148298 - RNA, 19 nt, Homo sapiens
  misc_RNA (1)...(19): siRNA sense strand
aagagaacaugcaauugaa

SEQ ID NO: 1148299 - RNA, 19 nt, Homo sapiens
  misc_RNA (1)...(19): siRNA sense strand
caaaguauccuggaaucaa

SEQ ID NO: 1148300 - RNA, 19 nt, Homo sapiens
  misc_RNA (1)...(19): siRNA sense strand
gagcuaauuuacaaagaag

SEQ ID NO: 1148301 - RNA, 19 nt, Homo sapiens
  misc_RNA (1)...(19): siRNA sense strand
gauuguuugugcugcauuu

SEQ ID NO: 1148302 - RNA, 19 nt, Homo sapiens
  misc_RNA (1)...(19): siRNA sense strand
gaacaugcaauugaagaau

SEQ ID NO: 1148303 - RNA, 19 nt, Homo sapiens
  misc_RNA (1)...(19): siRNA sense strand
ccagaugcuuugugguauu

SEQ ID NO: 1148304 - RNA, 19 nt, Homo sapiens
  misc_RNA (1)...(19): siRNA sense strand
gagcuuaucgugaacuugu

SEQ ID NO: 1148305 - RNA, 19 nt, Homo sapiens
  misc_RNA (1)...(19): siRNA sense strand
ggacagcgugcacuaacuu

SEQ ID NO: 1148306 - RNA, 19 nt, Homo sapiens
  misc_RNA (1)...(19): siRNA sense strand
gaauguccuaccuucuuua

SEQ ID NO: 1148307 - RNA, 19 nt, Homo sapiens
  misc_RNA (1)...(19): siRNA sense strand
gagaacaugcaauugaaga

SEQ ID NO: 1148308 - RNA, 19 nt, Homo sapiens
  misc_RNA (1)...(19): siRNA sense strand
ccaaacucaugcaaagaga

SEQ ID NO: 1148309 - RNA, 19 nt, Homo sapiens
  misc_RNA (1)...(19): siRNA sense strand
gaugcuuugugguauuaaa

SEQ ID NO: 1148310 - RNA, 19 nt, Homo sapiens
  misc_RNA (1)...(19): siRNA sense strand
agaagaauuucaagaugug

SEQ ID NO: 1148311 - RNA, 19 nt, Homo sapiens
  misc_RNA (1)...(19): siRNA sense strand
ggaagaaagaagcaagaau

SEQ ID NO: 1148312 - RNA, 19 nt, Homo sapiens
  misc_RNA (1)...(19): siRNA sense strand
uggaauuaauggaugcuaa

SEQ ID NO: 1148313 - RNA, 19 nt, Homo sapiens
  misc_RNA (1)...(19): siRNA sense strand
guauuaaacaucugcauuc

SEQ ID NO: 1148314 - RNA, 19 nt, Homo sapiens
  misc_RNA (1)...(19): siRNA sense strand
gguauuaaacaucugcauu

SEQ ID NO: 1148315 - RNA, 19 nt, Homo sapiens
  misc_RNA (1)...(19): siRNA sense strand
caacugugaggaauuaugu

SEQ ID NO: 1148316 - RNA, 19 nt, Homo sapiens
  misc_RNA (1)...(19): siRNA sense strand
aaacuucagccaacuguga

SEQ ID NO: 1148317 - RNA, 19 nt, Homo sapiens
  misc_RNA (1)...(19): siRNA sense strand
caaagagaacguugauauc

SEQ ID NO: 1148318 - RNA, 19 nt, Homo sapiens
  misc_RNA (1)...(19): siRNA sense strand
gaagucauccuggguaugg

SEQ ID NO: 1148319 - RNA, 19 nt, Homo sapiens
  misc_RNA (1)...(19): siRNA sense strand
agccaacugugaggaauua

SEQ ID NO: 1148320 - RNA, 19 nt, Homo sapiens
  misc_RNA (1)...(19): siRNA sense strand
gagagcuuaucgugaacuu

SEQ ID NO: 1148321 - RNA, 19 nt, Homo sapiens
  misc_RNA (1)...(19): siRNA sense strand
ggaagaaagagaacaugca

SEQ ID NO: 1148322 - RNA, 19 nt, Homo sapiens
  misc_RNA (1)...(19): siRNA sense strand
ugaagauccuugacuuugg

SEQ ID NO: 1148323 - RNA, 19 nt, Homo sapiens
  misc_RNA (1)...(19): siRNA sense strand
ucgugaacuuguccucuua

SEQ ID NO: 1148324 - RNA, 19 nt, Homo sapiens
  misc_RNA (1)...(19): siRNA sense strand
gugaacuuguccucuuaaa

SEQ ID NO: 1148325 - RNA, 19 nt, Homo sapiens
  misc_RNA (1)...(19): siRNA sense strand
ggaauuaugucgaaaacag

SEQ ID NO: 1148326 - RNA, 19 nt, Homo sapiens
  misc_RNA (1)...(19): siRNA sense strand
gaaacuaagccguccuuuu

SEQ ID NO: 1148327 - RNA, 19 nt, Homo sapiens
  misc_RNA (1)...(19): siRNA sense strand
uuucauccauguccacuga

SEQ ID NO: 1148328 - RNA, 19 nt, Homo sapiens
  misc_RNA (1)...(19): siRNA sense strand
gaaaacagaccaaaguauc

SEQ ID NO: 1148329 - RNA, 19 nt, Homo sapiens
  misc_RNA (1)...(19): siRNA sense strand
gaacaccaucagcagaguu

SEQ ID NO: 1148330 - RNA, 19 nt, Homo sapiens
  misc_RNA (1)...(19): siRNA sense strand
cagcugguauaauucauag

SEQ ID NO: 1148331 - RNA, 19 nt, Homo sapiens
  misc_RNA (1)...(19): siRNA sense strand
uaauggaugcuaacuuaug

SEQ ID NO: 1148332 - RNA, 19 nt, Homo sapiens
  misc_RNA (1)...(19): siRNA sense strand
agucauggauugggaagaa

SEQ ID NO: 1148333 - RNA, 19 nt, Homo sapiens
  misc_RNA (1)...(19): siRNA sense strand
gaagaauggaaagagcuaa

SEQ ID NO: 1148334 - RNA, 19 nt, Homo sapiens
  misc_RNA (1)...(19): siRNA sense strand
ugugaggaauuaugucgaa

SEQ ID NO: 1148335 - RNA, 19 nt, Homo sapiens
  misc_RNA (1)...(19): siRNA sense strand
agaccaaaguauccuggaa

SEQ ID NO: 1148336 - RNA, 19 nt, Homo sapiens
  misc_RNA (1)...(19): siRNA sense strand
gcuggaucaugaaagaaug

SEQ ID NO: 1148337 - RNA, 19 nt, Homo sapiens
  misc_RNA (1)...(19): siRNA sense strand
uuacaaagaagucauggau

SEQ ID NO: 1148338 - RNA, 19 nt, Homo sapiens
  misc_RNA (1)...(19): siRNA sense strand
acccauacaucacuguuug

SEQ ID NO: 1148339 - RNA, 19 nt, Homo sapiens
  misc_RNA (1)...(19): siRNA sense strand
acaagcggaucucuguaga

SEQ ID NO: 1148340 - RNA, 19 nt, Homo sapiens
  misc_RNA (1)...(19): siRNA sense strand
aaacaagucaagccagaga

SEQ ID NO: 1148341 - RNA, 19 nt, Homo sapiens
  misc_RNA (1)...(19): siRNA sense strand
aauggaugcuaacuuaugu

SEQ ID NO: 1148342 - RNA, 19 nt, Homo sapiens
  misc_RNA (1)...(19): siRNA sense strand
gcaacgccacuccuucuca

SEQ ID NO: 1148343 - RNA, 19 nt, Homo sapiens
  misc_RNA (1)...(19): siRNA sense strand
ucagcagaguucaugaaga

SEQ ID NO: 1148344 - RNA, 19 nt, Homo sapiens
  misc_RNA (1)...(19): siRNA sense strand
aagagaacguugauaucug

SEQ ID NO: 1148345 - RNA, 19 nt, Homo sapiens
  misc_RNA (1)...(19): siRNA sense strand
caucugcauucagcuggua

SEQ ID NO: 1148346 - RNA, 19 nt, Homo sapiens
  misc_RNA (1)...(19): siRNA sense strand
cccaccaccucaaauuuau

SEQ ID NO: 1148347 - RNA, 19 nt, Homo sapiens
  misc_RNA (1)...(19): siRNA sense strand
gacaagcggaucucuguag

SEQ ID NO: 1148348 - RNA, 19 nt, Homo sapiens
  misc_RNA (1)...(19): siRNA sense strand
gaccaaaguauccuggaau

SEQ ID NO: 1148349 - RNA, 19 nt, Homo sapiens
  misc_RNA (1)...(19): siRNA sense strand
ggaacaccaucagcagagu

SEQ ID NO: 1148350 - RNA, 19 nt, Homo sapiens
  misc_RNA (1)...(19): siRNA sense strand
aaagagaacguugauaucu

SEQ ID NO: 1148351 - RNA, 19 nt, Homo sapiens
  misc_RNA (1)...(19): siRNA sense strand
aaacuaagccguccuuuuc

SEQ ID NO: 1148352 - RNA, 19 nt, Homo sapiens
  misc_RNA (1)...(19): siRNA sense strand
uuugaagccuagcaacauu

SEQ ID NO: 1148353 - RNA, 19 nt, Homo sapiens
  misc_RNA (1)...(19): siRNA sense strand
ccaguuggaagaaagagaa

SEQ ID NO: 1148354 - RNA, 19 nt, Homo sapiens
  misc_RNA (1)...(19): siRNA sense strand
gauuggauauucccaucag

SEQ ID NO: 1148355 - RNA, 19 nt, Homo sapiens
  misc_RNA (1)...(19): siRNA sense strand
ugaagaauggaaagagcua

SEQ ID NO: 1148356 - RNA, 19 nt, Homo sapiens
  misc_RNA (1)...(19): siRNA sense strand
aacaugcaauugaagaaug

SEQ ID NO: 1148357 - RNA, 19 nt, Homo sapiens
  misc_RNA (1)...(19): siRNA sense strand
ucacuguccuaaaacguua

SEQ ID NO: 1148358 - RNA, 19 nt, Homo sapiens
  misc_RNA (1)...(19): siRNA sense strand
gaagcaagaaugguguugu

SEQ ID NO: 1148359 - RNA, 19 nt, Homo sapiens
  misc_RNA (1)...(19): siRNA sense strand
ugaaagaauguccuaccuu

SEQ ID NO: 1148360 - RNA, 19 nt, Homo sapiens
  misc_RNA (1)...(19): siRNA sense strand
gggaagaaagaagcaagaa

SEQ ID NO: 1148361 - RNA, 19 nt, Homo sapiens
  misc_RNA (1)...(19): siRNA sense strand
gcaauugaagaauggaaag

SEQ ID NO: 1148362 - RNA, 19 nt, Homo sapiens
  misc_RNA (1)...(19): siRNA sense strand
cuacaaagagaacguugau

SEQ ID NO: 1148363 - RNA, 19 nt, Homo sapiens
  misc_RNA (1)...(19): siRNA sense strand
uguccuaccuucuuuacca

SEQ ID NO: 1148364 - RNA, 19 nt, Homo sapiens
  misc_RNA (1)...(19): siRNA sense strand
ucagcugguauaauucaua

SEQ ID NO: 1148365 - RNA, 19 nt, Homo sapiens
  misc_RNA (1)...(19): siRNA sense strand
agaaugguguuguaaaaga

SEQ ID NO: 1148366 - RNA, 19 nt, Homo sapiens
  misc_RNA (1)...(19): siRNA sense strand
caucagcagaguucaugaa

SEQ ID NO: 1148367 - RNA, 19 nt, Homo sapiens
  misc_RNA (1)...(19): siRNA sense strand
gcuacaaagagaacguuga

SEQ ID NO: 1148368 - RNA, 19 nt, Homo sapiens
  misc_RNA (1)...(19): siRNA sense strand
gauacaguucuugggauaa

SEQ ID NO: 1148369 - RNA, 19 nt, Homo sapiens
  misc_RNA (1)...(19): siRNA sense strand
gauuugaagccuagcaaca

SEQ ID NO: 1148370 - RNA, 19 nt, Homo sapiens
  misc_RNA (1)...(19): siRNA sense strand
ccgaagucauccuggguau

SEQ ID NO: 1148371 - RNA, 19 nt, Homo sapiens
  misc_RNA (1)...(19): siRNA sense strand
gcagaguucaugaagaaac

SEQ ID NO: 1148372 - RNA, 19 nt, Homo sapiens
  misc_RNA (1)...(19): siRNA sense strand
ggaaagagcuaauuuacaa

SEQ ID NO: 1148373 - RNA, 19 nt, Homo sapiens
  misc_RNA (1)...(19): siRNA sense strand
gcauucagcugguauaauu

SEQ ID NO: 1148374 - RNA, 19 nt, Homo sapiens
  misc_RNA (1)...(19): siRNA sense strand
gaaccaaacucaugcaaag

SEQ ID NO: 1148375 - RNA, 19 nt, Homo sapiens
  misc_RNA (1)...(19): siRNA sense strand
aaagagagcuuaucgugaa

SEQ ID NO: 1148376 - RNA, 19 nt, Homo sapiens
  misc_RNA (1)...(19): siRNA sense strand
caagauguguauuugguua

SEQ ID NO: 1148377 - RNA, 19 nt, Homo sapiens
  misc_RNA (1)...(19): siRNA sense strand
gaagaaagaagcaagaaug

SEQ ID NO: 1148378 - RNA, 19 nt, Homo sapiens
  misc_RNA (1)...(19): siRNA sense strand
cagcagaguucaugaagaa

SEQ ID NO: 1148379 - RNA, 19 nt, Homo sapiens
  misc_RNA (1)...(19): siRNA sense strand
acaaagaagucauggauug

SEQ ID NO: 1148380 - RNA, 19 nt, Homo sapiens
  misc_RNA (1)...(19): siRNA sense strand
ggagcuggaucaugaaaga

SEQ ID NO: 1148381 - RNA, 19 nt, Homo sapiens
  misc_RNA (1)...(19): siRNA sense strand
gguaugggcuacaaagaga

SEQ ID NO: 1148382 - RNA, 19 nt, Homo sapiens
  misc_RNA (1)...(19): siRNA sense strand
gcggaucucuguagacgaa

SEQ ID NO: 1148383 - RNA, 19 nt, Homo sapiens
  misc_RNA (1)...(19): siRNA sense strand
gaauggaaagagcuaauuu

SEQ ID NO: 1148384 - RNA, 19 nt, Homo sapiens
  misc_RNA (1)...(19): siRNA sense strand
gaucaguggaauaaaguua

SEQ ID NO: 1148385 - RNA, 19 nt, Homo sapiens
  misc_RNA (1)...(19): siRNA sense strand
gaagaaagagaacaugcaa

SEQ ID NO: 1148386 - RNA, 19 nt, Homo sapiens
  misc_RNA (1)...(19): siRNA sense strand
aaagagaacaugcaauuga

SEQ ID NO: 1148387 - RNA, 19 nt, Homo sapiens
  misc_RNA (1)...(19): siRNA sense strand
gcaagaaugguguuguaaa

SEQ ID NO: 1148388 - RNA, 19 nt, Homo sapiens
  misc_RNA (1)...(19): siRNA sense strand
cagaugcuuugugguauua

SEQ ID NO: 1148389 - RNA, 19 nt, Homo sapiens
  misc_RNA (1)...(19): siRNA sense strand
aaaguauccuggaaucaaa

SEQ ID NO: 1148390 - RNA, 19 nt, Homo sapiens
  misc_RNA (1)...(19): siRNA sense strand
agaaagagaacaugcaauu

SEQ ID NO: 1148391 - RNA, 19 nt, Homo sapiens
  misc_RNA (1)...(19): siRNA sense strand
aagcaagaaugguguugua

SEQ ID NO: 1148392 - RNA, 19 nt, Homo sapiens
  misc_RNA (1)...(19): siRNA sense strand
ugauacaguucuugggaua

SEQ ID NO: 1148393 - RNA, 19 nt, Homo sapiens
  misc_RNA (1)...(19): siRNA sense strand
gaaagagaacaugcaauug

SEQ ID NO: 1148394 - RNA, 19 nt, Homo sapiens
  misc_RNA (1)...(19): siRNA sense strand
cuagaagaauuucaagaug

SEQ ID NO: 1148395 - RNA, 19 nt, Homo sapiens
  misc_RNA (1)...(19): siRNA sense strand
acaaagagaacguugauau

SEQ ID NO: 1148396 - RNA, 19 nt, Homo sapiens
  misc_RNA (1)...(19): siRNA sense strand
caagaaugguguuguaaaa

SEQ ID NO: 1148397 - RNA, 19 nt, Homo sapiens
  misc_RNA (1)...(19): siRNA sense strand
gaacuuguccucuuaaaau

SEQ ID NO: 1148398 - RNA, 19 nt, Homo sapiens
  misc_RNA (1)...(19): siRNA sense strand
aagagaacaugcaauugaa

SEQ ID NO: 1148399 - RNA, 19 nt, Homo sapiens
  misc_RNA (1)...(19): siRNA sense strand
caaaguauccuggaaucaa

SEQ ID NO: 1148400 - RNA, 19 nt, Homo sapiens
  misc_RNA (1)...(19): siRNA sense strand
gagcuaauuuacaaagaag

SEQ ID NO: 1148401 - RNA, 19 nt, Homo sapiens
  misc_RNA (1)...(19): siRNA sense strand
gauuguuugugcugcauuu

SEQ ID NO: 1148402 - RNA, 19 nt, Homo sapiens
  misc_RNA (1)...(19): siRNA sense strand
gaacaugcaauugaagaau

SEQ ID NO: 1148403 - RNA, 19 nt, Homo sapiens
  misc_RNA (1)...(19): siRNA sense strand
ccagaugcuuugugguauu

SEQ ID NO: 1148404 - RNA, 19 nt, Homo sapiens
  misc_RNA (1)...(19): siRNA sense strand
gagcuuaucgugaacuugu

SEQ ID NO: 1148405 - RNA, 19 nt, Homo sapiens
  misc_RNA (1)...(19): siRNA sense strand
ggacagcgugcacuaacuu

SEQ ID NO: 1148406 - RNA, 19 nt, Homo sapiens
  misc_RNA (1)...(19): siRNA sense strand
gaauguccuaccuucuuua

SEQ ID NO: 1148407 - RNA, 19 nt, Homo sapiens
  misc_RNA (1)...(19): siRNA sense strand
gagaacaugcaauugaaga

SEQ ID NO: 1148408 - RNA, 19 nt, Homo sapiens
  misc_RNA (1)...(19): siRNA sense strand
ccaaacucaugcaaagaga

SEQ ID NO: 1148409 - RNA, 19 nt, Homo sapiens
  misc_RNA (1)...(19): siRNA sense strand
gaugcuuugugguauuaaa

SEQ ID NO: 1148410 - RNA, 19 nt, Homo sapiens
  misc_RNA (1)...(19): siRNA sense strand
agaagaauuucaagaugug

SEQ ID NO: 1148411 - RNA, 19 nt, Homo sapiens
  misc_RNA (1)...(19): siRNA sense strand
ggaagaaagaagcaagaau

SEQ ID NO: 1148412 - RNA, 19 nt, Homo sapiens
  misc_RNA (1)...(19): siRNA sense strand
uggaauuaauggaugcuaa

SEQ ID NO: 1148413 - RNA, 19 nt, Homo sapiens
  misc_RNA (1)...(19): siRNA sense strand
guauuaaacaucugcauuc

SEQ ID NO: 1148414 - RNA, 19 nt, Homo sapiens
  misc_RNA (1)...(19): siRNA sense strand
gguauuaaacaucugcauu

SEQ ID NO: 1148415 - RNA, 19 nt, Homo sapiens
  misc_RNA (1)...(19): siRNA sense strand
caacugugaggaauuaugu

SEQ ID NO: 1148416 - RNA, 19 nt, Homo sapiens
  misc_RNA (1)...(19): siRNA sense strand
aaacuucagccaacuguga

SEQ ID NO: 1148417 - RNA, 19 nt, Homo sapiens
  misc_RNA (1)...(19): siRNA sense strand
caaagagaacguugauauc

SEQ ID NO: 1148418 - RNA, 19 nt, Homo sapiens
  misc_RNA (1)...(19): siRNA sense strand
gaagucauccuggguaugg

SEQ ID NO: 1148419 - RNA, 19 nt, Homo sapiens
  misc_RNA (1)...(19): siRNA sense strand
agccaacugugaggaauua

SEQ ID NO: 1148420 - RNA, 19 nt, Homo sapiens
  misc_RNA (1)...(19): siRNA sense strand
gagagcuuaucgugaacuu

SEQ ID NO: 1148421 - RNA, 19 nt, Homo sapiens
  misc_RNA (1)...(19): siRNA sense strand
ggaagaaagagaacaugca

SEQ ID NO: 1148422 - RNA, 19 nt, Homo sapiens
  misc_RNA (1)...(19): siRNA sense strand
ugaagauccuugacuuugg

SEQ ID NO: 1148423 - RNA, 19 nt, Homo sapiens
  misc_RNA (1)...(19): siRNA sense strand
ucgugaacuuguccucuua

SEQ ID NO: 1148424 - RNA, 19 nt, Homo sapiens
  misc_RNA (1)...(19): siRNA sense strand
gugaacuuguccucuuaaa

SEQ ID NO: 1148425 - RNA, 19 nt, Homo sapiens
  misc_RNA (1)...(19): siRNA sense strand
ggaauuaugucgaaaacag

SEQ ID NO: 1148426 - RNA, 19 nt, Homo sapiens
  misc_RNA (1)...(19): siRNA sense strand
gaaacuaagccguccuuuu

SEQ ID NO: 1148427 - RNA, 19 nt, Homo sapiens
  misc_RNA (1)...(19): siRNA sense strand
gaaaacagaccaaaguauc

SEQ ID NO: 1148428 - RNA, 19 nt, Homo sapiens
  misc_RNA (1)...(19): siRNA sense strand
gaacaccaucagcagaguu

SEQ ID NO: 1148429 - RNA, 19 nt, Homo sapiens
  misc_RNA (1)...(19): siRNA sense strand
cagcugguauaauucauag

SEQ ID NO: 1148430 - RNA, 19 nt, Homo sapiens
  misc_RNA (1)...(19): siRNA sense strand
uaauggaugcuaacuuaug

SEQ ID NO: 1148431 - RNA, 19 nt, Homo sapiens
  misc_RNA (1)...(19): siRNA sense strand
agucauggauugggaagaa

SEQ ID NO: 1148432 - RNA, 19 nt, Homo sapiens
  misc_RNA (1)...(19): siRNA sense strand
gaagaauggaaagagcuaa

SEQ ID NO: 1148433 - RNA, 19 nt, Homo sapiens
  misc_RNA (1)...(19): siRNA sense strand
ugugaggaauuaugucgaa

SEQ ID NO: 1148434 - RNA, 19 nt, Homo sapiens
  misc_RNA (1)...(19): siRNA sense strand
agaccaaaguauccuggaa

SEQ ID NO: 1148435 - RNA, 19 nt, Homo sapiens
  misc_RNA (1)...(19): siRNA sense strand
gcuggaucaugaaagaaug

SEQ ID NO: 1148436 - RNA, 19 nt, Homo sapiens
  misc_RNA (1)...(19): siRNA sense strand
uuacaaagaagucauggau

SEQ ID NO: 1148437 - RNA, 19 nt, Homo sapiens
  misc_RNA (1)...(19): siRNA sense strand
acccauacaucacuguuug

SEQ ID NO: 1148438 - RNA, 19 nt, Homo sapiens
  misc_RNA (1)...(19): siRNA sense strand
acaagcggaucucuguaga

SEQ ID NO: 1148439 - RNA, 19 nt, Homo sapiens
  misc_RNA (1)...(19): siRNA sense strand
aaacaagucaagccagaga

SEQ ID NO: 1148440 - RNA, 19 nt, Homo sapiens
  misc_RNA (1)...(19): siRNA sense strand
aauggaugcuaacuuaugu

SEQ ID NO: 1148441 - RNA, 19 nt, Homo sapiens
  misc_RNA (1)...(19): siRNA sense strand
ucagcagaguucaugaaga

SEQ ID NO: 1148442 - RNA, 19 nt, Homo sapiens
  misc_RNA (1)...(19): siRNA sense strand
aagagaacguugauaucug

SEQ ID NO: 1148443 - RNA, 19 nt, Homo sapiens
  misc_RNA (1)...(19): siRNA sense strand
caucugcauucagcuggua

SEQ ID NO: 1148444 - RNA, 19 nt, Homo sapiens
  misc_RNA (1)...(19): siRNA sense strand
aaacuaagccguccuuuuc

SEQ ID NO: 1148445 - RNA, 19 nt, Homo sapiens
  misc_RNA (1)...(19): siRNA sense strand
cccaccaccucaaauuuau

SEQ ID NO: 1148446 - RNA, 19 nt, Homo sapiens
  misc_RNA (1)...(19): siRNA sense strand
gacaagcggaucucuguag

SEQ ID NO: 1148447 - RNA, 19 nt, Homo sapiens
  misc_RNA (1)...(19): siRNA sense strand
gaccaaaguauccuggaau

SEQ ID NO: 1148448 - RNA, 19 nt, Homo sapiens
  misc_RNA (1)...(19): siRNA sense strand
ggaacaccaucagcagagu

SEQ ID NO: 1148449 - RNA, 19 nt, Homo sapiens
  misc_RNA (1)...(19): siRNA sense strand
aaagagaacguugauaucu

SEQ ID NO: 1148450 - RNA, 19 nt, Homo sapiens
  misc_RNA (1)...(19): siRNA sense strand
uuugaagccuagcaacauu

SEQ ID NO: 1148451 - RNA, 19 nt, Homo sapiens
  misc_RNA (1)...(19): siRNA sense strand
ccaguuggaagaaagagaa

SEQ ID NO: 1148452 - RNA, 19 nt, Homo sapiens
  misc_RNA (1)...(19): siRNA sense strand
gauuggauauucccaucag

SEQ ID NO: 1148453 - RNA, 19 nt, Homo sapiens
  misc_RNA (1)...(19): siRNA sense strand
ugaagaauggaaagagcua

SEQ ID NO: 1148454 - RNA, 19 nt, Homo sapiens
  misc_RNA (1)...(19): siRNA sense strand
aacaugcaauugaagaaug

SEQ ID NO: 1148455 - RNA, 19 nt, Homo sapiens
  misc_RNA (1)...(19): siRNA sense strand
ucacuguccuaaaacguua

SEQ ID NO: 1148456 - RNA, 19 nt, Homo sapiens
  misc_RNA (1)...(19): siRNA sense strand
gaagcaagaaugguguugu

SEQ ID NO: 1148457 - RNA, 19 nt, Homo sapiens
  misc_RNA (1)...(19): siRNA sense strand
ugaaagaauguccuaccuu

SEQ ID NO: 1148458 - RNA, 19 nt, Homo sapiens
  misc_RNA (1)...(19): siRNA sense strand
gggaagaaagaagcaagaa

SEQ ID NO: 1148459 - RNA, 19 nt, Homo sapiens
  misc_RNA (1)...(19): siRNA sense strand
gcaauugaagaauggaaag

SEQ ID NO: 1148460 - RNA, 19 nt, Homo sapiens
  misc_RNA (1)...(19): siRNA sense strand
cuacaaagagaacguugau

SEQ ID NO: 1148461 - RNA, 19 nt, Homo sapiens
  misc_RNA (1)...(19): siRNA sense strand
uguccuaccuucuuuacca

SEQ ID NO: 1148462 - RNA, 19 nt, Homo sapiens
  misc_RNA (1)...(19): siRNA sense strand
gauacaguucuugggauaa

SEQ ID NO: 1148463 - RNA, 19 nt, Homo sapiens
  misc_RNA (1)...(19): siRNA sense strand
agaaugguguuguaaaaga

SEQ ID NO: 1148464 - RNA, 19 nt, Homo sapiens
  misc_RNA (1)...(19): siRNA sense strand
caucagcagaguucaugaa

SEQ ID NO: 1148465 - RNA, 19 nt, Homo sapiens
  misc_RNA (1)...(19): siRNA sense strand
gcuacaaagagaacguuga

SEQ ID NO: 1148466 - RNA, 19 nt, Homo sapiens
  misc_RNA (1)...(19): siRNA sense strand
gauuugaagccuagcaaca

SEQ ID NO: 1148467 - RNA, 19 nt, Homo sapiens
  misc_RNA (1)...(19): siRNA sense strand
ucagcugguauaauucaua

SEQ ID NO: 1148468 - RNA, 19 nt, Homo sapiens
  misc_RNA (1)...(19): siRNA sense strand
ccgaagucauccuggguau

SEQ ID NO: 1148469 - RNA, 19 nt, Homo sapiens
  misc_RNA (1)...(19): siRNA sense strand
gcagaguucaugaagaaac

SEQ ID NO: 1148470 - RNA, 19 nt, Homo sapiens
  misc_RNA (1)...(19): siRNA sense strand
gacagucaguuuuauagug

SEQ ID NO: 1148471 - RNA, 19 nt, Homo sapiens
  misc_RNA (1)...(19): siRNA sense strand
caccaccucaaauuuauga

SEQ ID NO: 1148472 - RNA, 19 nt, Homo sapiens
  misc_RNA (1)...(19): siRNA sense strand
ggaaagagcuaauuuacaa

SEQ ID NO: 1148473 - RNA, 19 nt, Homo sapiens
  misc_RNA (1)...(19): siRNA sense strand
gcauucagcugguauaauu

SEQ ID NO: 1148474 - RNA, 19 nt, Homo sapiens
  misc_RNA (1)...(19): siRNA sense strand
gaaccaaacucaugcaaag

SEQ ID NO: 1148475 - RNA, 19 nt, Homo sapiens
  misc_RNA (1)...(19): siRNA sense strand
aaagagagcuuaucgugaa

SEQ ID NO: 1148476 - RNA, 19 nt, Homo sapiens
  misc_RNA (1)...(19): siRNA sense strand
caagauguguauuugguua

SEQ ID NO: 1148477 - RNA, 19 nt, Homo sapiens
  misc_RNA (1)...(19): siRNA sense strand
gaagaaagaagcaagaaug

SEQ ID NO: 1148478 - RNA, 19 nt, Homo sapiens
  misc_RNA (1)...(19): siRNA sense strand
cagcagaguucaugaagaa

SEQ ID NO: 1148479 - RNA, 19 nt, Homo sapiens
  misc_RNA (1)...(19): siRNA sense strand
acaaagaagucauggauug

SEQ ID NO: 1148480 - RNA, 19 nt, Homo sapiens
  misc_RNA (1)...(19): siRNA sense strand
ggagcuggaucaugaaaga

SEQ ID NO: 1148481 - RNA, 19 nt, Homo sapiens
  misc_RNA (1)...(19): siRNA sense strand
gguaugggcuacaaagaga

SEQ ID NO: 1148482 - RNA, 19 nt, Homo sapiens
  misc_RNA (1)...(19): siRNA sense strand
gcggaucucuguagacgaa

SEQ ID NO: 1148483 - RNA, 19 nt, Homo sapiens
  misc_RNA (1)...(19): siRNA sense strand
gaauggaaagagcuaauuu

SEQ ID NO: 1148484 - RNA, 19 nt, Homo sapiens
  misc_RNA (1)...(19): siRNA sense strand
gaucaguggaauaaaguua

SEQ ID NO: 1148485 - RNA, 19 nt, Homo sapiens
  misc_RNA (1)...(19): siRNA sense strand
gaagaaagagaacaugcaa

SEQ ID NO: 1148486 - RNA, 19 nt, Homo sapiens
  misc_RNA (1)...(19): siRNA sense strand
aaagagaacaugcaauuga

SEQ ID NO: 1148487 - RNA, 19 nt, Homo sapiens
  misc_RNA (1)...(19): siRNA sense strand
gcaagaaugguguuguaaa

SEQ ID NO: 1148488 - RNA, 19 nt, Homo sapiens
  misc_RNA (1)...(19): siRNA sense strand
cagaugcuuugugguauua

SEQ ID NO: 1148489 - RNA, 19 nt, Homo sapiens
  misc_RNA (1)...(19): siRNA sense strand
aaaguauccuggaaucaaa

SEQ ID NO: 1148490 - RNA, 19 nt, Homo sapiens
  misc_RNA (1)...(19): siRNA sense strand
agaaagagaacaugcaauu

SEQ ID NO: 1148491 - RNA, 19 nt, Homo sapiens
  misc_RNA (1)...(19): siRNA sense strand
aagcaagaaugguguugua

SEQ ID NO: 1148492 - RNA, 19 nt, Homo sapiens
  misc_RNA (1)...(19): siRNA sense strand
ugauacaguucuugggaua

SEQ ID NO: 1148493 - RNA, 19 nt, Homo sapiens
  misc_RNA (1)...(19): siRNA sense strand
gaaagagaacaugcaauug

SEQ ID NO: 1148494 - RNA, 19 nt, Homo sapiens
  misc_RNA (1)...(19): siRNA sense strand
cuagaagaauuucaagaug

SEQ ID NO: 1148495 - RNA, 19 nt, Homo sapiens
  misc_RNA (1)...(19): siRNA sense strand
acaaagagaacguugauau

SEQ ID NO: 1148496 - RNA, 19 nt, Homo sapiens
  misc_RNA (1)...(19): siRNA sense strand
caagaaugguguuguaaaa

SEQ ID NO: 1148497 - RNA, 19 nt, Homo sapiens
  misc_RNA (1)...(19): siRNA sense strand
gaacuuguccucuuaaaau

SEQ ID NO: 1148498 - RNA, 19 nt, Homo sapiens
  misc_RNA (1)...(19): siRNA sense strand
aagagaacaugcaauugaa

SEQ ID NO: 1148499 - RNA, 19 nt, Homo sapiens
  misc_RNA (1)...(19): siRNA sense strand
caaaguauccuggaaucaa

SEQ ID NO: 1148500 - RNA, 19 nt, Homo sapiens
  misc_RNA (1)...(19): siRNA sense strand
gagcuaauuuacaaagaag

SEQ ID NO: 1148501 - RNA, 19 nt, Homo sapiens
  misc_RNA (1)...(19): siRNA sense strand
gauuguuugugcugcauuu

SEQ ID NO: 1148502 - RNA, 19 nt, Homo sapiens
  misc_RNA (1)...(19): siRNA sense strand
gaacaugcaauugaagaau

SEQ ID NO: 1148503 - RNA, 19 nt, Homo sapiens
  misc_RNA (1)...(19): siRNA sense strand
ccagaugcuuugugguauu

SEQ ID NO: 1148504 - RNA, 19 nt, Homo sapiens
  misc_RNA (1)...(19): siRNA sense strand
gagcuuaucgugaacuugu

SEQ ID NO: 1148505 - RNA, 19 nt, Homo sapiens
  misc_RNA (1)...(19): siRNA sense strand
ggacagcgugcacuaacuu

SEQ ID NO: 1148506 - RNA, 19 nt, Homo sapiens
  misc_RNA (1)...(19): siRNA sense strand
gaauguccuaccuucuuua

SEQ ID NO: 1148507 - RNA, 19 nt, Homo sapiens
  misc_RNA (1)...(19): siRNA sense strand
gagaacaugcaauugaaga

SEQ ID NO: 1148508 - RNA, 19 nt, Homo sapiens
  misc_RNA (1)...(19): siRNA sense strand
ccaaacucaugcaaagaga

SEQ ID NO: 1148509 - RNA, 19 nt, Homo sapiens
  misc_RNA (1)...(19): siRNA sense strand
gaugcuuugugguauuaaa

SEQ ID NO: 1148510 - RNA, 19 nt, Homo sapiens
  misc_RNA (1)...(19): siRNA sense strand
agaagaauuucaagaugug

SEQ ID NO: 1148511 - RNA, 19 nt, Homo sapiens
  misc_RNA (1)...(19): siRNA sense strand
ggaagaaagaagcaagaau

SEQ ID NO: 1148512 - RNA, 19 nt, Homo sapiens
  misc_RNA (1)...(19): siRNA sense strand
uggaauuaauggaugcuaa

SEQ ID NO: 1148513 - RNA, 19 nt, Homo sapiens
  misc_RNA (1)...(19): siRNA sense strand
guauuaaacaucugcauuc

SEQ ID NO: 1148514 - RNA, 19 nt, Homo sapiens
  misc_RNA (1)...(19): siRNA sense strand
gguauuaaacaucugcauu

SEQ ID NO: 1148515 - RNA, 19 nt, Homo sapiens
  misc_RNA (1)...(19): siRNA sense strand
caacugugaggaauuaugu

SEQ ID NO: 1148516 - RNA, 19 nt, Homo sapiens
  misc_RNA (1)...(19): siRNA sense strand
aaacuucagccaacuguga

SEQ ID NO: 1148517 - RNA, 19 nt, Homo sapiens
  misc_RNA (1)...(19): siRNA sense strand
caaagagaacguugauauc

SEQ ID NO: 1148518 - RNA, 19 nt, Homo sapiens
  misc_RNA (1)...(19): siRNA sense strand
gaagucauccuggguaugg

SEQ ID NO: 1148519 - RNA, 19 nt, Homo sapiens
  misc_RNA (1)...(19): siRNA sense strand
agccaacugugaggaauua

SEQ ID NO: 1148520 - RNA, 19 nt, Homo sapiens
  misc_RNA (1)...(19): siRNA sense strand
gagagcuuaucgugaacuu

SEQ ID NO: 1148521 - RNA, 19 nt, Homo sapiens
  misc_RNA (1)...(19): siRNA sense strand
ggaagaaagagaacaugca

SEQ ID NO: 1148522 - RNA, 19 nt, Homo sapiens
  misc_RNA (1)...(19): siRNA sense strand
ugaagauccuugacuuugg

SEQ ID NO: 1148523 - RNA, 19 nt, Homo sapiens
  misc_RNA (1)...(19): siRNA sense strand
ucgugaacuuguccucuua

SEQ ID NO: 1148524 - RNA, 19 nt, Homo sapiens
  misc_RNA (1)...(19): siRNA sense strand
gugaacuuguccucuuaaa

SEQ ID NO: 1148525 - RNA, 19 nt, Homo sapiens
  misc_RNA (1)...(19): siRNA sense strand
ggaauuaugucgaaaacag

SEQ ID NO: 1148526 - RNA, 19 nt, Homo sapiens
  misc_RNA (1)...(19): siRNA sense strand
gaaacuaagccguccuuuu

SEQ ID NO: 1148527 - RNA, 19 nt, Homo sapiens
  misc_RNA (1)...(19): siRNA sense strand
gaaaacagaccaaaguauc

SEQ ID NO: 1148528 - RNA, 19 nt, Homo sapiens
  misc_RNA (1)...(19): siRNA sense strand
gaacaccaucagcagaguu

SEQ ID NO: 1148529 - RNA, 19 nt, Homo sapiens
  misc_RNA (1)...(19): siRNA sense strand
cagcugguauaauucauag

SEQ ID NO: 1148530 - RNA, 19 nt, Homo sapiens
  misc_RNA (1)...(19): siRNA sense strand
uaauggaugcuaacuuaug

SEQ ID NO: 1148531 - RNA, 19 nt, Homo sapiens
  misc_RNA (1)...(19): siRNA sense strand
agucauggauugggaagaa

SEQ ID NO: 1148532 - RNA, 19 nt, Homo sapiens
  misc_RNA (1)...(19): siRNA sense strand
gaagaauggaaagagcuaa

SEQ ID NO: 1148533 - RNA, 19 nt, Homo sapiens
  misc_RNA (1)...(19): siRNA sense strand
ugugaggaauuaugucgaa

SEQ ID NO: 1148534 - RNA, 19 nt, Homo sapiens
  misc_RNA (1)...(19): siRNA sense strand
agaccaaaguauccuggaa

SEQ ID NO: 1148535 - RNA, 19 nt, Homo sapiens
  misc_RNA (1)...(19): siRNA sense strand
gcuggaucaugaaagaaug

SEQ ID NO: 1148536 - RNA, 19 nt, Homo sapiens
  misc_RNA (1)...(19): siRNA sense strand
uuacaaagaagucauggau

SEQ ID NO: 1148537 - RNA, 19 nt, Homo sapiens
  misc_RNA (1)...(19): siRNA sense strand
acccauacaucacuguuug

SEQ ID NO: 1148538 - RNA, 19 nt, Homo sapiens
  misc_RNA (1)...(19): siRNA sense strand
acaagcggaucucuguaga

SEQ ID NO: 1148539 - RNA, 19 nt, Homo sapiens
  misc_RNA (1)...(19): siRNA sense strand
aaacaagucaagccagaga

SEQ ID NO: 1148540 - RNA, 19 nt, Homo sapiens
  misc_RNA (1)...(19): siRNA sense strand
aauggaugcuaacuuaugu

SEQ ID NO: 1148541 - RNA, 19 nt, Homo sapiens
  misc_RNA (1)...(19): siRNA sense strand
ucagcagaguucaugaaga

SEQ ID NO: 1148542 - RNA, 19 nt, Homo sapiens
  misc_RNA (1)...(19): siRNA sense strand
aagagaacguugauaucug

SEQ ID NO: 1148543 - RNA, 19 nt, Homo sapiens
  misc_RNA (1)...(19): siRNA sense strand
caucugcauucagcuggua

SEQ ID NO: 1148544 - RNA, 19 nt, Homo sapiens
  misc_RNA (1)...(19): siRNA sense strand
aaacuaagccguccuuuuc

SEQ ID NO: 1148545 - RNA, 19 nt, Homo sapiens
  misc_RNA (1)...(19): siRNA sense strand
cccaccaccucaaauuuau

SEQ ID NO: 1148546 - RNA, 19 nt, Homo sapiens
  misc_RNA (1)...(19): siRNA sense strand
gacaagcggaucucuguag

SEQ ID NO: 1148547 - RNA, 19 nt, Homo sapiens
  misc_RNA (1)...(19): siRNA sense strand
gaccaaaguauccuggaau

SEQ ID NO: 1148548 - RNA, 19 nt, Homo sapiens
  misc_RNA (1)...(19): siRNA sense strand
ggaacaccaucagcagagu

SEQ ID NO: 1148549 - RNA, 19 nt, Homo sapiens
  misc_RNA (1)...(19): siRNA sense strand
aaagagaacguugauaucu

SEQ ID NO: 1148550 - RNA, 19 nt, Homo sapiens
  misc_RNA (1)...(19): siRNA sense strand
uuugaagccuagcaacauu

SEQ ID NO: 1148551 - RNA, 19 nt, Homo sapiens
  misc_RNA (1)...(19): siRNA sense strand
ccaguuggaagaaagagaa

SEQ ID NO: 1148552 - RNA, 19 nt, Homo sapiens
  misc_RNA (1)...(19): siRNA sense strand
gauuggauauucccaucag

SEQ ID NO: 1148553 - RNA, 19 nt, Homo sapiens
  misc_RNA (1)...(19): siRNA sense strand
ugaagaauggaaagagcua

SEQ ID NO: 1148554 - RNA, 19 nt, Homo sapiens
  misc_RNA (1)...(19): siRNA sense strand
aacaugcaauugaagaaug

SEQ ID NO: 1148555 - RNA, 19 nt, Homo sapiens
  misc_RNA (1)...(19): siRNA sense strand
ucacuguccuaaaacguua

SEQ ID NO: 1148556 - RNA, 19 nt, Homo sapiens
  misc_RNA (1)...(19): siRNA sense strand
gaagcaagaaugguguugu

SEQ ID NO: 1148557 - RNA, 19 nt, Homo sapiens
  misc_RNA (1)...(19): siRNA sense strand
ugaaagaauguccuaccuu

SEQ ID NO: 1148558 - RNA, 19 nt, Homo sapiens
  misc_RNA (1)...(19): siRNA sense strand
gggaagaaagaagcaagaa

SEQ ID NO: 1148559 - RNA, 19 nt, Homo sapiens
  misc_RNA (1)...(19): siRNA sense strand
gcaauugaagaauggaaag

SEQ ID NO: 1148560 - RNA, 19 nt, Homo sapiens
  misc_RNA (1)...(19): siRNA sense strand
cuacaaagagaacguugau

SEQ ID NO: 1148561 - RNA, 19 nt, Homo sapiens
  misc_RNA (1)...(19): siRNA sense strand
uguccuaccuucuuuacca

SEQ ID NO: 1148562 - RNA, 19 nt, Homo sapiens
  misc_RNA (1)...(19): siRNA sense strand
gauacaguucuugggauaa

SEQ ID NO: 1148563 - RNA, 19 nt, Homo sapiens
  misc_RNA (1)...(19): siRNA sense strand
agaaugguguuguaaaaga

SEQ ID NO: 1148564 - RNA, 19 nt, Homo sapiens
  misc_RNA (1)...(19): siRNA sense strand
caucagcagaguucaugaa

SEQ ID NO: 1148565 - RNA, 19 nt, Homo sapiens
  misc_RNA (1)...(19): siRNA sense strand
gcuacaaagagaacguuga

SEQ ID NO: 1148566 - RNA, 19 nt, Homo sapiens
  misc_RNA (1)...(19): siRNA sense strand
gauuugaagccuagcaaca

SEQ ID NO: 1148567 - RNA, 19 nt, Homo sapiens
  misc_RNA (1)...(19): siRNA sense strand
ucagcugguauaauucaua

SEQ ID NO: 1148568 - RNA, 19 nt, Homo sapiens
  misc_RNA (1)...(19): siRNA sense strand
ccgaagucauccuggguau

SEQ ID NO: 1148569 - RNA, 19 nt, Homo sapiens
  misc_RNA (1)...(19): siRNA sense strand
gcagaguucaugaagaaac

SEQ ID NO: 1148570 - RNA, 19 nt, Homo sapiens
  misc_RNA (1)...(19): siRNA sense strand
gacagucaguuuuauagug

SEQ ID NO: 1148571 - RNA, 19 nt, Homo sapiens
  misc_RNA (1)...(19): siRNA sense strand
caccaccucaaauuuauga

SEQ ID NO: 1148572 - RNA, 19 nt, Homo sapiens
  misc_RNA (1)...(19): siRNA sense strand
ggaaagagcuaauuuacaa

SEQ ID NO: 1148573 - RNA, 19 nt, Homo sapiens
  misc_RNA (1)...(19): siRNA sense strand
gcauucagcugguauaauu

SEQ ID NO: 1148574 - RNA, 19 nt, Homo sapiens
  misc_RNA (1)...(19): siRNA sense strand
gaaccaaacucaugcaaag

SEQ ID NO: 1148575 - RNA, 19 nt, Homo sapiens
  misc_RNA (1)...(19): siRNA sense strand
aaagagagcuuaucgugaa

SEQ ID NO: 1148576 - RNA, 19 nt, Homo sapiens
  misc_RNA (1)...(19): siRNA sense strand
caagauguguauuugguua

SEQ ID NO: 1148577 - RNA, 19 nt, Homo sapiens
  misc_RNA (1)...(19): siRNA sense strand
gaagaaagaagcaagaaug

SEQ ID NO: 1148578 - RNA, 19 nt, Homo sapiens
  misc_RNA (1)...(19): siRNA sense strand
cagcagaguucaugaagaa

SEQ ID NO: 1148579 - RNA, 19 nt, Homo sapiens
  misc_RNA (1)...(19): siRNA sense strand
acaaagaagucauggauug

SEQ ID NO: 1148580 - RNA, 19 nt, Homo sapiens
  misc_RNA (1)...(19): siRNA sense strand
ggagcuggaucaugaaaga

SEQ ID NO: 1148581 - RNA, 19 nt, Homo sapiens
  misc_RNA (1)...(19): siRNA sense strand
gguaugggcuacaaagaga

SEQ ID NO: 1148582 - RNA, 19 nt, Homo sapiens
  misc_RNA (1)...(19): siRNA sense strand
gcggaucucuguagacgaa

SEQ ID NO: 1148583 - RNA, 19 nt, Homo sapiens
  misc_RNA (1)...(19): siRNA sense strand
gaauggaaagagcuaauuu

SEQ ID NO: 1148584 - RNA, 19 nt, Homo sapiens
  misc_RNA (1)...(19): siRNA sense strand
gaucaguggaauaaaguua

SEQ ID NO: 1148585 - RNA, 19 nt, Homo sapiens
  misc_RNA (1)...(19): siRNA sense strand
gaagaaagagaacaugcaa

SEQ ID NO: 1148586 - RNA, 19 nt, Homo sapiens
  misc_RNA (1)...(19): siRNA sense strand
aaagagaacaugcaauuga

SEQ ID NO: 1148587 - RNA, 19 nt, Homo sapiens
  misc_RNA (1)...(19): siRNA sense strand
gcaagaaugguguuguaaa

SEQ ID NO: 1148588 - RNA, 19 nt, Homo sapiens
  misc_RNA (1)...(19): siRNA sense strand
cagaugcuuugugguauua

SEQ ID NO: 1148589 - RNA, 19 nt, Homo sapiens
  misc_RNA (1)...(19): siRNA sense strand
aaaguauccuggaaucaaa

SEQ ID NO: 1148590 - RNA, 19 nt, Homo sapiens
  misc_RNA (1)...(19): siRNA sense strand
agaaagagaacaugcaauu

SEQ ID NO: 1148591 - RNA, 19 nt, Homo sapiens
  misc_RNA (1)...(19): siRNA sense strand
aagcaagaaugguguugua

SEQ ID NO: 1148592 - RNA, 19 nt, Homo sapiens
  misc_RNA (1)...(19): siRNA sense strand
ugauacaguucuugggaua

SEQ ID NO: 1148593 - RNA, 19 nt, Homo sapiens
  misc_RNA (1)...(19): siRNA sense strand
gaaagagaacaugcaauug

SEQ ID NO: 1148594 - RNA, 19 nt, Homo sapiens
  misc_RNA (1)...(19): siRNA sense strand
cuagaagaauuucaagaug

SEQ ID NO: 1148595 - RNA, 19 nt, Homo sapiens
  misc_RNA (1)...(19): siRNA sense strand
acaaagagaacguugauau

SEQ ID NO: 1148596 - RNA, 19 nt, Homo sapiens
  misc_RNA (1)...(19): siRNA sense strand
caagaaugguguuguaaaa

SEQ ID NO: 1148597 - RNA, 19 nt, Homo sapiens
  misc_RNA (1)...(19): siRNA sense strand
gaacuuguccucuuaaaau

SEQ ID NO: 1148598 - RNA, 19 nt, Homo sapiens
  misc_RNA (1)...(19): siRNA sense strand
aagagaacaugcaauugaa

SEQ ID NO: 1148599 - RNA, 19 nt, Homo sapiens
  misc_RNA (1)...(19): siRNA sense strand
caaaguauccuggaaucaa

SEQ ID NO: 1148600 - RNA, 19 nt, Homo sapiens
  misc_RNA (1)...(19): siRNA sense strand
gagcuaauuuacaaagaag

SEQ ID NO: 1148601 - RNA, 19 nt, Homo sapiens
  misc_RNA (1)...(19): siRNA sense strand
gauuguuugugcugcauuu

SEQ ID NO: 1148602 - RNA, 19 nt, Homo sapiens
  misc_RNA (1)...(19): siRNA sense strand
gaacaugcaauugaagaau

SEQ ID NO: 1148603 - RNA, 19 nt, Homo sapiens
  misc_RNA (1)...(19): siRNA sense strand
ccagaugcuuugugguauu

SEQ ID NO: 1148604 - RNA, 19 nt, Homo sapiens
  misc_RNA (1)...(19): siRNA sense strand
gagcuuaucgugaacuugu

SEQ ID NO: 1148605 - RNA, 19 nt, Homo sapiens
  misc_RNA (1)...(19): siRNA sense strand
ggacagcgugcacuaacuu

SEQ ID NO: 1148606 - RNA, 19 nt, Homo sapiens
  misc_RNA (1)...(19): siRNA sense strand
gaauguccuaccuucuuua

SEQ ID NO: 1148607 - RNA, 19 nt, Homo sapiens
  misc_RNA (1)...(19): siRNA sense strand
gagaacaugcaauugaaga

SEQ ID NO: 1148608 - RNA, 19 nt, Homo sapiens
  misc_RNA (1)...(19): siRNA sense strand
ccaaacucaugcaaagaga

SEQ ID NO: 1148609 - RNA, 19 nt, Homo sapiens
  misc_RNA (1)...(19): siRNA sense strand
gaugcuuugugguauuaaa

SEQ ID NO: 1148610 - RNA, 19 nt, Homo sapiens
  misc_RNA (1)...(19): siRNA sense strand
agaagaauuucaagaugug

SEQ ID NO: 1148611 - RNA, 19 nt, Homo sapiens
  misc_RNA (1)...(19): siRNA sense strand
ggaagaaagaagcaagaau

SEQ ID NO: 1148612 - RNA, 19 nt, Homo sapiens
  misc_RNA (1)...(19): siRNA sense strand
uggaauuaauggaugcuaa

SEQ ID NO: 1148613 - RNA, 19 nt, Homo sapiens
  misc_RNA (1)...(19): siRNA sense strand
guauuaaacaucugcauuc

SEQ ID NO: 1148614 - RNA, 19 nt, Homo sapiens
  misc_RNA (1)...(19): siRNA sense strand
gguauuaaacaucugcauu

SEQ ID NO: 1148615 - RNA, 19 nt, Homo sapiens
  misc_RNA (1)...(19): siRNA sense strand
caacugugaggaauuaugu

SEQ ID NO: 1148616 - RNA, 19 nt, Homo sapiens
  misc_RNA (1)...(19): siRNA sense strand
aaacuucagccaacuguga

SEQ ID NO: 1148617 - RNA, 19 nt, Homo sapiens
  misc_RNA (1)...(19): siRNA sense strand
caaagagaacguugauauc

SEQ ID NO: 1148618 - RNA, 19 nt, Homo sapiens
  misc_RNA (1)...(19): siRNA sense strand
gaagucauccuggguaugg

SEQ ID NO: 1148619 - RNA, 19 nt, Homo sapiens
  misc_RNA (1)...(19): siRNA sense strand
agccaacugugaggaauua

SEQ ID NO: 1148620 - RNA, 19 nt, Homo sapiens
  misc_RNA (1)...(19): siRNA sense strand
gagagcuuaucgugaacuu

SEQ ID NO: 1148621 - RNA, 19 nt, Homo sapiens
  misc_RNA (1)...(19): siRNA sense strand
ggaagaaagagaacaugca

SEQ ID NO: 1148622 - RNA, 19 nt, Homo sapiens
  misc_RNA (1)...(19): siRNA sense strand
ugaagauccuugacuuugg

SEQ ID NO: 1148623 - RNA, 19 nt, Homo sapiens
  misc_RNA (1)...(19): siRNA sense strand
ucgugaacuuguccucuua

SEQ ID NO: 1148624 - RNA, 19 nt, Homo sapiens
  misc_RNA (1)...(19): siRNA sense strand
gugaacuuguccucuuaaa

SEQ ID NO: 1148625 - RNA, 19 nt, Homo sapiens
  misc_RNA (1)...(19): siRNA sense strand
ggaauuaugucgaaaacag

SEQ ID NO: 1148626 - RNA, 19 nt, Homo sapiens
  misc_RNA (1)...(19): siRNA sense strand
gaaacuaagccguccuuuu

SEQ ID NO: 1148627 - RNA, 19 nt, Homo sapiens
  misc_RNA (1)...(19): siRNA sense strand
uuucauccauguccacuga

SEQ ID NO: 1148628 - RNA, 19 nt, Homo sapiens
  misc_RNA (1)...(19): siRNA sense strand
gaaaacagaccaaaguauc

SEQ ID NO: 1148629 - RNA, 19 nt, Homo sapiens
  misc_RNA (1)...(19): siRNA sense strand
gaacaccaucagcagaguu

SEQ ID NO: 1148630 - RNA, 19 nt, Homo sapiens
  misc_RNA (1)...(19): siRNA sense strand
cagcugguauaauucauag

SEQ ID NO: 1148631 - RNA, 19 nt, Homo sapiens
  misc_RNA (1)...(19): siRNA sense strand
uaauggaugcuaacuuaug

SEQ ID NO: 1148632 - RNA, 19 nt, Homo sapiens
  misc_RNA (1)...(19): siRNA sense strand
agucauggauugggaagaa

SEQ ID NO: 1148633 - RNA, 19 nt, Homo sapiens
  misc_RNA (1)...(19): siRNA sense strand
gaagaauggaaagagcuaa

SEQ ID NO: 1148634 - RNA, 19 nt, Homo sapiens
  misc_RNA (1)...(19): siRNA sense strand
ugugaggaauuaugucgaa

SEQ ID NO: 1148635 - RNA, 19 nt, Homo sapiens
  misc_RNA (1)...(19): siRNA sense strand
agaccaaaguauccuggaa

SEQ ID NO: 1148636 - RNA, 19 nt, Homo sapiens
  misc_RNA (1)...(19): siRNA sense strand
gcuggaucaugaaagaaug

SEQ ID NO: 1148637 - RNA, 19 nt, Homo sapiens
  misc_RNA (1)...(19): siRNA sense strand
uuacaaagaagucauggau

SEQ ID NO: 1148638 - RNA, 19 nt, Homo sapiens
  misc_RNA (1)...(19): siRNA sense strand
acccauacaucacuguuug

SEQ ID NO: 1148639 - RNA, 19 nt, Homo sapiens
  misc_RNA (1)...(19): siRNA sense strand
acaagcggaucucuguaga

SEQ ID NO: 1148640 - RNA, 19 nt, Homo sapiens
  misc_RNA (1)...(19): siRNA sense strand
aaacaagucaagccagaga

SEQ ID NO: 1148641 - RNA, 19 nt, Homo sapiens
  misc_RNA (1)...(19): siRNA sense strand
aauggaugcuaacuuaugu

SEQ ID NO: 1148642 - RNA, 19 nt, Homo sapiens
  misc_RNA (1)...(19): siRNA sense strand
gcaacgccacuccuucuca

SEQ ID NO: 1148643 - RNA, 19 nt, Homo sapiens
  misc_RNA (1)...(19): siRNA sense strand
ucagcagaguucaugaaga

SEQ ID NO: 1148644 - RNA, 19 nt, Homo sapiens
  misc_RNA (1)...(19): siRNA sense strand
aagagaacguugauaucug

SEQ ID NO: 1148645 - RNA, 19 nt, Homo sapiens
  misc_RNA (1)...(19): siRNA sense strand
caucugcauucagcuggua

SEQ ID NO: 1148646 - RNA, 19 nt, Homo sapiens
  misc_RNA (1)...(19): siRNA sense strand
cccaccaccucaaauuuau

SEQ ID NO: 1148647 - RNA, 19 nt, Homo sapiens
  misc_RNA (1)...(19): siRNA sense strand
gacaagcggaucucuguag

SEQ ID NO: 1148648 - RNA, 19 nt, Homo sapiens
  misc_RNA (1)...(19): siRNA sense strand
gaccaaaguauccuggaau

SEQ ID NO: 1148649 - RNA, 19 nt, Homo sapiens
  misc_RNA (1)...(19): siRNA sense strand
ggaacaccaucagcagagu

SEQ ID NO: 1148650 - RNA, 19 nt, Homo sapiens
  misc_RNA (1)...(19): siRNA sense strand
aaagagaacguugauaucu

SEQ ID NO: 1148651 - RNA, 19 nt, Homo sapiens
  misc_RNA (1)...(19): siRNA sense strand
aaacuaagccguccuuuuc

SEQ ID NO: 1148652 - RNA, 19 nt, Homo sapiens
  misc_RNA (1)...(19): siRNA sense strand
uuugaagccuagcaacauu

SEQ ID NO: 1148653 - RNA, 19 nt, Homo sapiens
  misc_RNA (1)...(19): siRNA sense strand
ccaguuggaagaaagagaa

SEQ ID NO: 1148654 - RNA, 19 nt, Homo sapiens
  misc_RNA (1)...(19): siRNA sense strand
gauuggauauucccaucag

SEQ ID NO: 1148655 - RNA, 19 nt, Homo sapiens
  misc_RNA (1)...(19): siRNA sense strand
ugaagaauggaaagagcua

SEQ ID NO: 1148656 - RNA, 19 nt, Homo sapiens
  misc_RNA (1)...(19): siRNA sense strand
aacaugcaauugaagaaug

SEQ ID NO: 1148657 - RNA, 19 nt, Homo sapiens
  misc_RNA (1)...(19): siRNA sense strand
ucacuguccuaaaacguua

SEQ ID NO: 1148658 - RNA, 19 nt, Homo sapiens
  misc_RNA (1)...(19): siRNA sense strand
gaagcaagaaugguguugu

SEQ ID NO: 1148659 - RNA, 19 nt, Homo sapiens
  misc_RNA (1)...(19): siRNA sense strand
ugaaagaauguccuaccuu

SEQ ID NO: 1148660 - RNA, 19 nt, Homo sapiens
  misc_RNA (1)...(19): siRNA sense strand
gggaagaaagaagcaagaa

SEQ ID NO: 1148661 - RNA, 19 nt, Homo sapiens
  misc_RNA (1)...(19): siRNA sense strand
gcaauugaagaauggaaag

SEQ ID NO: 1148662 - RNA, 19 nt, Homo sapiens
  misc_RNA (1)...(19): siRNA sense strand
cuacaaagagaacguugau

SEQ ID NO: 1148663 - RNA, 19 nt, Homo sapiens
  misc_RNA (1)...(19): siRNA sense strand
uguccuaccuucuuuacca

SEQ ID NO: 1148664 - RNA, 19 nt, Homo sapiens
  misc_RNA (1)...(19): siRNA sense strand
ucagcugguauaauucaua

SEQ ID NO: 1148665 - RNA, 19 nt, Homo sapiens
  misc_RNA (1)...(19): siRNA sense strand
agaaugguguuguaaaaga

SEQ ID NO: 1148666 - RNA, 19 nt, Homo sapiens
  misc_RNA (1)...(19): siRNA sense strand
caucagcagaguucaugaa

SEQ ID NO: 1148667 - RNA, 19 nt, Homo sapiens
  misc_RNA (1)...(19): siRNA sense strand
gcuacaaagagaacguuga

SEQ ID NO: 1148668 - RNA, 19 nt, Homo sapiens
  misc_RNA (1)...(19): siRNA sense strand
gauacaguucuugggauaa

SEQ ID NO: 1148669 - RNA, 19 nt, Homo sapiens
  misc_RNA (1)...(19): siRNA sense strand
gauuugaagccuagcaaca

SEQ ID NO: 1148670 - RNA, 19 nt, Homo sapiens
  misc_RNA (1)...(19): siRNA sense strand
ccgaagucauccuggguau

SEQ ID NO: 1148671 - RNA, 19 nt, Homo sapiens
  misc_RNA (1)...(19): siRNA sense strand
gcagaguucaugaagaaac

SEQ ID NO: 1148672 - RNA, 19 nt, Homo sapiens
  misc_RNA (1)...(19): siRNA sense strand
gagauaaggugaugucaga

SEQ ID NO: 1148673 - RNA, 19 nt, Homo sapiens
  misc_RNA (1)...(19): siRNA sense strand
ggcagcagauggagaauua

SEQ ID NO: 1148674 - RNA, 19 nt, Homo sapiens
  misc_RNA (1)...(19): siRNA sense strand
aaggagaacuauugucuua

SEQ ID NO: 1148675 - RNA, 19 nt, Homo sapiens
  misc_RNA (1)...(19): siRNA sense strand
ggagaacuauugucuuaug

SEQ ID NO: 1148676 - RNA, 19 nt, Homo sapiens
  misc_RNA (1)...(19): siRNA sense strand
gaacuauugucuuaugauc

SEQ ID NO: 1148677 - RNA, 19 nt, Homo sapiens
  misc_RNA (1)...(19): siRNA sense strand
gaucacguuugccaucuuu

SEQ ID NO: 1148678 - RNA, 19 nt, Homo sapiens
  misc_RNA (1)...(19): siRNA sense strand
ggauuaauuucaacgagaa

SEQ ID NO: 1148679 - RNA, 19 nt, Homo sapiens
  misc_RNA (1)...(19): siRNA sense strand
ggaaugaaaugugugaagu

SEQ ID NO: 1148680 - RNA, 19 nt, Homo sapiens
  misc_RNA (1)...(19): siRNA sense strand
gagaacuauugucuuauga

SEQ ID NO: 1148681 - RNA, 19 nt, Homo sapiens
  misc_RNA (1)...(19): siRNA sense strand
ugaaaugugugaaguucuu

SEQ ID NO: 1148682 - RNA, 19 nt, Homo sapiens
  misc_RNA (1)...(19): siRNA sense strand
cuacacagauugggagaaa

SEQ ID NO: 1148683 - RNA, 19 nt, Homo sapiens
  misc_RNA (1)...(19): siRNA sense strand
gauggagaauuacccgaaa

SEQ ID NO: 1148684 - RNA, 19 nt, Homo sapiens
  misc_RNA (1)...(19): siRNA sense strand
ggcuauguguuuagagaua

SEQ ID NO: 1148685 - RNA, 19 nt, Homo sapiens
  misc_RNA (1)...(19): siRNA sense strand
gcugcuaacuacacagauu

SEQ ID NO: 1148686 - RNA, 19 nt, Homo sapiens
  misc_RNA (1)...(19): siRNA sense strand
gcaaggagaacuauugucu

SEQ ID NO: 1148687 - RNA, 19 nt, Homo sapiens
  misc_RNA (1)...(19): siRNA sense strand
agaaggcgauccauaagga

SEQ ID NO: 1148688 - RNA, 19 nt, Homo sapiens
  misc_RNA (1)...(19): siRNA sense strand
gcugugggauuaauuucaa

SEQ ID NO: 1148689 - RNA, 19 nt, Homo sapiens
  misc_RNA (1)...(19): siRNA sense strand
gcuauguguuuagagauaa

SEQ ID NO: 1148690 - RNA, 19 nt, Homo sapiens
  misc_RNA (1)...(19): siRNA sense strand
gaaugaaaugugugaaguu

SEQ ID NO: 1148691 - RNA, 19 nt, Homo sapiens
  misc_RNA (1)...(19): siRNA sense strand
gaaggaggaaugaaaugug

SEQ ID NO: 1148692 - RNA, 19 nt, Homo sapiens
  misc_RNA (1)...(19): siRNA sense strand
ggaggaaugaaauguguga

SEQ ID NO: 1148693 - RNA, 19 nt, Homo sapiens
  misc_RNA (1)...(19): siRNA sense strand
aaggugaugucagaguuua

SEQ ID NO: 1148694 - RNA, 19 nt, Homo sapiens
  misc_RNA (1)...(19): siRNA sense strand
ggaaggaggaaugaaaugu

SEQ ID NO: 1148695 - RNA, 19 nt, Homo sapiens
  misc_RNA (1)...(19): siRNA sense strand
acugugggcugugggauua

SEQ ID NO: 1148696 - RNA, 19 nt, Homo sapiens
  misc_RNA (1)...(19): siRNA sense strand
gguggaaggaggaaugaaa

SEQ ID NO: 1148697 - RNA, 19 nt, Homo sapiens
  misc_RNA (1)...(19): siRNA sense strand
gagaaaaucccuuccaugu

SEQ ID NO: 1148698 - RNA, 19 nt, Homo sapiens
  misc_RNA (1)...(19): siRNA sense strand
acgagaaggcgauccauaa

SEQ ID NO: 1148699 - RNA, 19 nt, Homo sapiens
  misc_RNA (1)...(19): siRNA sense strand
aaugaaaugugugaaguuc

SEQ ID NO: 1148700 - RNA, 19 nt, Homo sapiens
  misc_RNA (1)...(19): siRNA sense strand
aaggaggaaugaaaugugu

SEQ ID NO: 1148701 - RNA, 19 nt, Homo sapiens
  misc_RNA (1)...(19): siRNA sense strand
auaaggugaugucagaguu

SEQ ID NO: 1148702 - RNA, 19 nt, Homo sapiens
  misc_RNA (1)...(19): siRNA sense strand
cccgacuccugcugcauua

SEQ ID NO: 1148703 - RNA, 19 nt, Homo sapiens
  misc_RNA (1)...(19): siRNA sense strand
gugugaaguucuugcucua

SEQ ID NO: 1148704 - RNA, 19 nt, Homo sapiens
  misc_RNA (1)...(19): siRNA sense strand
gauaaggugaugucagagu

SEQ ID NO: 1148705 - RNA, 19 nt, Homo sapiens
  misc_RNA (1)...(19): siRNA sense strand
guuuagagauaaggugaug

SEQ ID NO: 1148706 - RNA, 19 nt, Homo sapiens
  misc_RNA (1)...(19): siRNA sense strand
uaaggugaugucagaguuu

SEQ ID NO: 1148707 - RNA, 19 nt, Homo sapiens
  misc_RNA (1)...(19): siRNA sense strand
caaggagaacuauugucuu

SEQ ID NO: 1148708 - RNA, 19 nt, Homo sapiens
  misc_RNA (1)...(19): siRNA sense strand
gaaaugugugaaguucuug

SEQ ID NO: 1148709 - RNA, 19 nt, Homo sapiens
  misc_RNA (1)...(19): siRNA sense strand
ccaucuuucugucucuuau

SEQ ID NO: 1148710 - RNA, 19 nt, Homo sapiens
  misc_RNA (1)...(19): siRNA sense strand
acaggaugcaggcagauuu

SEQ ID NO: 1148711 - RNA, 19 nt, Homo sapiens
  misc_RNA (1)...(19): siRNA sense strand
gagaaggcgauccauaagg

SEQ ID NO: 1148712 - RNA, 19 nt, Homo sapiens
  misc_RNA (1)...(19): siRNA sense strand
gacuccugcugcauuaaug

SEQ ID NO: 1148713 - RNA, 19 nt, Homo sapiens
  misc_RNA (1)...(19): siRNA sense strand
gaugucagaguuuaauaac

SEQ ID NO: 1148714 - RNA, 19 nt, Homo sapiens
  misc_RNA (1)...(19): siRNA sense strand
gugaugucagaguuuaaua

SEQ ID NO: 1148715 - RNA, 19 nt, Homo sapiens
  misc_RNA (1)...(19): siRNA sense strand
cgagaaggcgauccauaag

SEQ ID NO: 1148716 - RNA, 19 nt, Homo sapiens
  misc_RNA (1)...(19): siRNA sense strand
ccugcaaggagaacuauug

SEQ ID NO: 1148717 - RNA, 19 nt, Homo sapiens
  misc_RNA (1)...(19): siRNA sense strand
guggaaggaggaaugaaau

SEQ ID NO: 1148718 - RNA, 19 nt, Homo sapiens
  misc_RNA (1)...(19): siRNA sense strand
gggcugcuaacuacacaga

SEQ ID NO: 1148719 - RNA, 19 nt, Homo sapiens
  misc_RNA (1)...(19): siRNA sense strand
ggugaugucagaguuuaau

SEQ ID NO: 1148720 - RNA, 19 nt, Homo sapiens
  misc_RNA (1)...(19): siRNA sense strand
cuggcuauguguuuagaga

SEQ ID NO: 1148721 - RNA, 19 nt, Homo sapiens
  misc_RNA (1)...(19): siRNA sense strand
cgacuccugcugcauuaau

SEQ ID NO: 1148722 - RNA, 19 nt, Homo sapiens
  misc_RNA (1)...(19): siRNA sense strand
gacaggaugcaggcagauu

SEQ ID NO: 1148723 - RNA, 19 nt, Homo sapiens
  misc_RNA (1)...(19): siRNA sense strand
gccaucuuucugucucuua

SEQ ID NO: 1148724 - RNA, 19 nt, Homo sapiens
  misc_RNA (1)...(19): siRNA sense strand
gaacagcuccguguacuga

SEQ ID NO: 1148725 - RNA, 19 nt, Homo sapiens
  misc_RNA (1)...(19): siRNA sense strand
ccaaggaugugaagcaguu

SEQ ID NO: 1148726 - RNA, 19 nt, Homo sapiens
  misc_RNA (1)...(19): siRNA sense strand
ccaccaaccuccuguaucu

SEQ ID NO: 1148727 - RNA, 19 nt, Homo sapiens
  misc_RNA (1)...(19): siRNA sense strand
gcagcaacaucaucagcaa

SEQ ID NO: 1148728 - RNA, 19 nt, Homo sapiens
  misc_RNA (1)...(19): siRNA sense strand
ccucagugcucaagaacaa

SEQ ID NO: 1148729 - RNA, 19 nt, Homo sapiens
  misc_RNA (1)...(19): siRNA sense strand
gcccaacaccuucuaugua

SEQ ID NO: 1148730 - RNA, 19 nt, Homo sapiens
  misc_RNA (1)...(19): siRNA sense strand
ucagcaaccucuucaagga

SEQ ID NO: 1148731 - RNA, 19 nt, Homo sapiens
  misc_RNA (1)...(19): siRNA sense strand
ccaccucagugcucaagaa

SEQ ID NO: 1148732 - RNA, 19 nt, Homo sapiens
  misc_RNA (1)...(19): siRNA sense strand
ucaaguaccugcucuucgu

SEQ ID NO: 1148733 - RNA, 19 nt, Homo sapiens
  misc_RNA (1)...(19): siRNA sense strand
cccaacaccuucuauguag

SEQ ID NO: 1148734 - RNA, 19 nt, Homo sapiens
  misc_RNA (1)...(19): siRNA sense strand
guggagggcugcaccaagu

SEQ ID NO: 1148735 - RNA, 19 nt, Homo sapiens
  misc_RNA (1)...(19): siRNA sense strand
cgucuucaauuucgucuuc

SEQ ID NO: 1148736 - RNA, 19 nt, Homo sapiens
  misc_RNA (1)...(19): siRNA sense strand
ugugggcgcugucaugaug

SEQ ID NO: 1148737 - RNA, 19 nt, Homo sapiens
  misc_RNA (1)...(19): siRNA sense strand
gcucuucgucuucaauuuc

SEQ ID NO: 1148738 - RNA, 19 nt, Homo sapiens
  misc_RNA (1)...(19): siRNA sense strand
ccaaggcuguggugaagac

SEQ ID NO: 1148739 - RNA, 19 nt, Homo sapiens
  misc_RNA (1)...(19): siRNA sense strand
gaccaccaaccuccuguau

SEQ ID NO: 1148740 - RNA, 19 nt, Homo sapiens
  misc_RNA (1)...(19): siRNA sense strand
ccaagugcaucaaguaccu

SEQ ID NO: 1148741 - RNA, 19 nt, Homo sapiens
  misc_RNA (1)...(19): siRNA sense strand
gaugugaagcaguucuaug

SEQ ID NO: 1148742 - RNA, 19 nt, Homo sapiens
  misc_RNA (1)...(19): siRNA sense strand
ucagugcucaagaacaauu

SEQ ID NO: 1148743 - RNA, 19 nt, Homo sapiens
  misc_RNA (1)...(19): siRNA sense strand
caucaucagcaaccucuuc

SEQ ID NO: 1148744 - RNA, 19 nt, Homo sapiens
  misc_RNA (1)...(19): siRNA sense strand
ggacugccaccagaagauc

SEQ ID NO: 1148745 - RNA, 19 nt, Homo sapiens
  misc_RNA (1)...(19): siRNA sense strand
gaggacugccaccagaaga

SEQ ID NO: 1148746 - RNA, 19 nt, Homo sapiens
  misc_RNA (1)...(19): siRNA sense strand
ggaggacugccaccagaag

SEQ ID NO: 1148747 - RNA, 19 nt, Homo sapiens
  misc_RNA (1)...(19): siRNA sense strand
caucagcaaccucuucaag

SEQ ID NO: 1148748 - RNA, 19 nt, Homo sapiens
  misc_RNA (1)...(19): siRNA sense strand
gcugugggcgcugucauga

SEQ ID NO: 1148749 - RNA, 19 nt, Homo sapiens
  misc_RNA (1)...(19): siRNA sense strand
cgccaaggcuguggugaag

SEQ ID NO: 1148750 - RNA, 19 nt, Homo sapiens
  misc_RNA (1)...(19): siRNA sense strand
caucaaguaccugcucuuc

SEQ ID NO: 1148751 - RNA, 19 nt, Homo sapiens
  misc_RNA (1)...(19): siRNA sense strand
ccagaucgccaaggaugug

SEQ ID NO: 1148752 - RNA, 19 nt, Homo sapiens
  misc_RNA (1)...(19): siRNA sense strand
ggaacagcuccguguacug

SEQ ID NO: 1148753 - RNA, 19 nt, Homo sapiens
  misc_RNA (1)...(19): siRNA sense strand
gcacacugacugcuuugac

SEQ ID NO: 1148754 - RNA, 19 nt, Homo sapiens
  misc_RNA (1)...(19): siRNA sense strand
gaagauggcugacaaaauu

SEQ ID NO: 1148755 - RNA, 19 nt, Homo sapiens
  misc_RNA (1)...(19): siRNA sense strand
gcagagacgacaagaauua

SEQ ID NO: 1148756 - RNA, 19 nt, Homo sapiens
  misc_RNA (1)...(19): siRNA sense strand
gcacuguggcaauauauua

SEQ ID NO: 1148757 - RNA, 19 nt, Homo sapiens
  misc_RNA (1)...(19): siRNA sense strand
caaauaugaugccacuaaa

SEQ ID NO: 1148758 - RNA, 19 nt, Homo sapiens
  misc_RNA (1)...(19): siRNA sense strand
gaaccuaucaucauuaauc

SEQ ID NO: 1148759 - RNA, 19 nt, Homo sapiens
  misc_RNA (1)...(19): siRNA sense strand
ugacugaugugguggguaa

SEQ ID NO: 1148760 - RNA, 19 nt, Homo sapiens
  misc_RNA (1)...(19): siRNA sense strand
ccaaauaugaugccacuaa

SEQ ID NO: 1148761 - RNA, 19 nt, Homo sapiens
  misc_RNA (1)...(19): siRNA sense strand
cagaaccuaucaucauuaa

SEQ ID NO: 1148762 - RNA, 19 nt, Homo sapiens
  misc_RNA (1)...(19): siRNA sense strand
ugauugaacuggacaaaga

SEQ ID NO: 1148763 - RNA, 19 nt, Homo sapiens
  misc_RNA (1)...(19): siRNA sense strand
caagcacuguggcaauaua

SEQ ID NO: 1148764 - RNA, 19 nt, Homo sapiens
  misc_RNA (1)...(19): siRNA sense strand
aaacggaagcugcgaauuu

SEQ ID NO: 1148765 - RNA, 19 nt, Homo sapiens
  misc_RNA (1)...(19): siRNA sense strand
ggcaauauauuaagacaca

SEQ ID NO: 1148766 - RNA, 19 nt, Homo sapiens
  misc_RNA (1)...(19): siRNA sense strand
agacccagaugaauucuuu

SEQ ID NO: 1148767 - RNA, 19 nt, Homo sapiens
  misc_RNA (1)...(19): siRNA sense strand
aaaccacaaugcaaagaaa

SEQ ID NO: 1148768 - RNA, 19 nt, Homo sapiens
  misc_RNA (1)...(19): siRNA sense strand
ggaaacggcuagauaucca

SEQ ID NO: 1148769 - RNA, 19 nt, Homo sapiens
  misc_RNA (1)...(19): siRNA sense strand
gaaaccacaaugcaaagaa

SEQ ID NO: 1148770 - RNA, 19 nt, Homo sapiens
  misc_RNA (1)...(19): siRNA sense strand
aaagacagcuuguuaugac

SEQ ID NO: 1148771 - RNA, 19 nt, Homo sapiens
  misc_RNA (1)...(19): siRNA sense strand
ggagauugcuacucuagac

SEQ ID NO: 1148772 - RNA, 19 nt, Homo sapiens
  misc_RNA (1)...(19): siRNA sense strand
cagcagagacgacaagaau

SEQ ID NO: 1148773 - RNA, 19 nt, Homo sapiens
  misc_RNA (1)...(19): siRNA sense strand
gggaguuugucaucuguga

SEQ ID NO: 1148774 - RNA, 19 nt, Homo sapiens
  misc_RNA (1)...(19): siRNA sense strand
gagcugaguucuacuucca

SEQ ID NO: 1148775 - RNA, 19 nt, Homo sapiens
  misc_RNA (1)...(19): siRNA sense strand
ccagaaccuaucaucauua

SEQ ID NO: 1148776 - RNA, 19 nt, Homo sapiens
  misc_RNA (1)...(19): siRNA sense strand
auauggaucucuuggcuuu

SEQ ID NO: 1148777 - RNA, 19 nt, Homo sapiens
  misc_RNA (1)...(19): siRNA sense strand
uaagucagaugccgaggau

SEQ ID NO: 1148778 - RNA, 19 nt, Homo sapiens
  misc_RNA (1)...(19): siRNA sense strand
cagaaucccaggccuauau

SEQ ID NO: 1148779 - RNA, 19 nt, Homo sapiens
  misc_RNA (1)...(19): siRNA sense strand
ucaaaggauucgugaacug

SEQ ID NO: 1148780 - RNA, 19 nt, Homo sapiens
  misc_RNA (1)...(19): siRNA sense strand
uuaaucaugucaucagugu

SEQ ID NO: 1148781 - RNA, 19 nt, Homo sapiens
  misc_RNA (1)...(19): siRNA sense strand
caucauuaaucaugucauc

SEQ ID NO: 1148782 - RNA, 19 nt, Homo sapiens
  misc_RNA (1)...(19): siRNA sense strand
gauucagccuuguccaaau

SEQ ID NO: 1148783 - RNA, 19 nt, Homo sapiens
  misc_RNA (1)...(19): siRNA sense strand
uccaagcacuguggcaaua

SEQ ID NO: 1148784 - RNA, 19 nt, Homo sapiens
  misc_RNA (1)...(19): siRNA sense strand
auucagccuuguccaaaua

SEQ ID NO: 1148785 - RNA, 19 nt, Homo sapiens
  misc_RNA (1)...(19): siRNA sense strand
uuaaguccuuggugauuga

SEQ ID NO: 1148786 - RNA, 19 nt, Homo sapiens
  misc_RNA (1)...(19): siRNA sense strand
ugaggaaacggcuagauau

SEQ ID NO: 1148787 - RNA, 19 nt, Homo sapiens
  misc_RNA (1)...(19): siRNA sense strand
ugaagacccagaugaauuc

SEQ ID NO: 1148788 - RNA, 19 nt, Homo sapiens
  misc_RNA (1)...(19): siRNA sense strand
gacagcuuguuaugacauu

SEQ ID NO: 1148789 - RNA, 19 nt, Homo sapiens
  misc_RNA (1)...(19): siRNA sense strand
ggauucagccuuguccaaa

SEQ ID NO: 1148790 - RNA, 19 nt, Homo sapiens
  misc_RNA (1)...(19): siRNA sense strand
aaaagaagauggcugacaa

SEQ ID NO: 1148791 - RNA, 19 nt, Homo sapiens
  misc_RNA (1)...(19): siRNA sense strand
gcgccgagcugaguucuac

SEQ ID NO: 1148792 - RNA, 19 nt, Homo sapiens
  misc_RNA (1)...(19): siRNA sense strand
ugacccgaaugaucagaaa

SEQ ID NO: 1148793 - RNA, 19 nt, Homo sapiens
  misc_RNA (1)...(19): siRNA sense strand
uaugaugccacuaaacaaa

SEQ ID NO: 1148794 - RNA, 19 nt, Homo sapiens
  misc_RNA (1)...(19): siRNA sense strand
gccgauacuucuacuccaa

SEQ ID NO: 1148795 - RNA, 19 nt, Homo sapiens
  misc_RNA (1)...(19): siRNA sense strand
accagaaccuaucaucauu

SEQ ID NO: 1148796 - RNA, 19 nt, Homo sapiens
  misc_RNA (1)...(19): siRNA sense strand
aaucaugucaucaguguug

SEQ ID NO: 1148797 - RNA, 19 nt, Homo sapiens
  misc_RNA (1)...(19): siRNA sense strand
gaggaaacggcuagauauc

SEQ ID NO: 1148798 - RNA, 19 nt, Homo sapiens
  misc_RNA (1)...(19): siRNA sense strand
aauucuaccucaaaggauu

SEQ ID NO: 1148799 - RNA, 19 nt, Homo sapiens
  misc_RNA (1)...(19): siRNA sense strand
gcccugggaauccggaaua

SEQ ID NO: 1148800 - RNA, 19 nt, Homo sapiens
  misc_RNA (1)...(19): siRNA sense strand
aaggauucgugaacuggua

SEQ ID NO: 1148801 - RNA, 19 nt, Homo sapiens
  misc_RNA (1)...(19): siRNA sense strand
aacaggagauugcuacucu

SEQ ID NO: 1148802 - RNA, 19 nt, Homo sapiens
  misc_RNA (1)...(19): siRNA sense strand
gagcgggaguuugucaucu

SEQ ID NO: 1148803 - RNA, 19 nt, Homo sapiens
  misc_RNA (1)...(19): siRNA sense strand
uugaagacccagaugaauu

SEQ ID NO: 1148804 - RNA, 19 nt, Homo sapiens
  misc_RNA (1)...(19): siRNA sense strand
caucaguguugacccgaau

SEQ ID NO: 1148805 - RNA, 19 nt, Homo sapiens
  misc_RNA (1)...(19): siRNA sense strand
ccugggagcuucggguaga

SEQ ID NO: 1148806 - RNA, 19 nt, Homo sapiens
  misc_RNA (1)...(19): siRNA sense strand
caccagaaccuaucaucau

SEQ ID NO: 1148807 - RNA, 19 nt, Homo sapiens
  misc_RNA (1)...(19): siRNA sense strand
aauaugaugccacuaaaca

SEQ ID NO: 1148808 - RNA, 19 nt, Homo sapiens
  misc_RNA (1)...(19): siRNA sense strand
ucaauccggcuaagucaga

SEQ ID NO: 1148809 - RNA, 19 nt, Homo sapiens
  misc_RNA (1)...(19): siRNA sense strand
ggaucagucccgcaagaga

SEQ ID NO: 1148810 - RNA, 19 nt, Homo sapiens
  misc_RNA (1)...(19): siRNA sense strand
ccuaucaucauuaaucaug

SEQ ID NO: 1148811 - RNA, 19 nt, Homo sapiens
  misc_RNA (1)...(19): siRNA sense strand
gcgggaguuugucaucugu

SEQ ID NO: 1148812 - RNA, 19 nt, Homo sapiens
  misc_RNA (1)...(19): siRNA sense strand
gaaacggcuagauauccaa

SEQ ID NO: 1148813 - RNA, 19 nt, Homo sapiens
  misc_RNA (1)...(19): siRNA sense strand
gcagcagagacgacaagaa

SEQ ID NO: 1148814 - RNA, 19 nt, Homo sapiens
  misc_RNA (1)...(19): siRNA sense strand
gguguacuguccuacugau

SEQ ID NO: 1148815 - RNA, 19 nt, Homo sapiens
  misc_RNA (1)...(19): siRNA sense strand
aaagaagauggcugacaaa

SEQ ID NO: 1148816 - RNA, 19 nt, Homo sapiens
  misc_RNA (1)...(19): siRNA sense strand
uugcuacucuagacaacaa

SEQ ID NO: 1148817 - RNA, 19 nt, Homo sapiens
  misc_RNA (1)...(19): siRNA sense strand
gacaaaauucuaccucaaa

SEQ ID NO: 1148818 - RNA, 19 nt, Homo sapiens
  misc_RNA (1)...(19): siRNA sense strand
uuuaaguccuuggugauug

SEQ ID NO: 1148819 - RNA, 19 nt, Homo sapiens
  misc_RNA (1)...(19): siRNA sense strand
gagacgacaagaauuagag

SEQ ID NO: 1148820 - RNA, 19 nt, Homo sapiens
  misc_RNA (1)...(19): siRNA sense strand
acaggagauugcuacucua

SEQ ID NO: 1148821 - RNA, 19 nt, Homo sapiens
  misc_RNA (1)...(19): siRNA sense strand
guggaugacaccuugaaga

SEQ ID NO: 1148822 - RNA, 19 nt, Homo sapiens
  misc_RNA (1)...(19): siRNA sense strand
gaaguggaugacaccuuga

SEQ ID NO: 1148823 - RNA, 19 nt, Homo sapiens
  misc_RNA (1)...(19): siRNA sense strand
ccaccagaaccuaucauca

SEQ ID NO: 1148824 - RNA, 19 nt, Homo sapiens
  misc_RNA (1)...(19): siRNA sense strand
gggcauccauacccagacu

SEQ ID NO: 1148825 - RNA, 19 nt, Homo sapiens
  misc_RNA (1)...(19): siRNA sense strand
augaggaaacggcuagaua

SEQ ID NO: 1148826 - RNA, 19 nt, Homo sapiens
  misc_RNA (1)...(19): siRNA sense strand
aaucgaaaccacaaugcaa

SEQ ID NO: 1148827 - RNA, 19 nt, Homo sapiens
  misc_RNA (1)...(19): siRNA sense strand
guguugacccgaaugauca

SEQ ID NO: 1148828 - RNA, 19 nt, Homo sapiens
  misc_RNA (1)...(19): siRNA sense strand
guggcaauauauuaagaca

SEQ ID NO: 1148829 - RNA, 19 nt, Homo sapiens
  misc_RNA (1)...(19): siRNA sense strand
uccuacugaugcuggauua

SEQ ID NO: 1148830 - RNA, 19 nt, Homo sapiens
  misc_RNA (1)...(19): siRNA sense strand
ugacaaaauucuaccucaa

SEQ ID NO: 1148831 - RNA, 19 nt, Homo sapiens
  misc_RNA (1)...(19): siRNA sense strand
cgacuccugggcauccaua

SEQ ID NO: 1148832 - RNA, 19 nt, Homo sapiens
  misc_RNA (1)...(19): siRNA sense strand
guacuguccuacugaugcu

SEQ ID NO: 1148833 - RNA, 19 nt, Homo sapiens
  misc_RNA (1)...(19): siRNA sense strand
ugggaauccggaauacaua

SEQ ID NO: 1148834 - RNA, 19 nt, Homo sapiens
  misc_RNA (1)...(19): siRNA sense strand
cgaaaccacaaugcaaaga

SEQ ID NO: 1148835 - RNA, 19 nt, Homo sapiens
  misc_RNA (1)...(19): siRNA sense strand
cauuaaucaugucaucagu

SEQ ID NO: 1148836 - RNA, 19 nt, Homo sapiens
  misc_RNA (1)...(19): siRNA sense strand
cuccaugccuugcuuaugc

SEQ ID NO: 1148837 - RNA, 19 nt, Homo sapiens
  misc_RNA (1)...(19): siRNA sense strand
cagccuuguccaaauauga

SEQ ID NO: 1148838 - RNA, 19 nt, Homo sapiens
  misc_RNA (1)...(19): siRNA sense strand
cagcuuguuaugacauuga

SEQ ID NO: 1148839 - RNA, 19 nt, Homo sapiens
  misc_RNA (1)...(19): siRNA sense strand
cacuguggcaauauauuaa

SEQ ID NO: 1148840 - RNA, 19 nt, Homo sapiens
  misc_RNA (1)...(19): siRNA sense strand
ccagacucguccagugauc

SEQ ID NO: 1148841 - RNA, 19 nt, Homo sapiens
  misc_RNA (1)...(19): siRNA sense strand
gggaauccggaauacauag

SEQ ID NO: 1148842 - RNA, 19 nt, Homo sapiens
  misc_RNA (1)...(19): siRNA sense strand
ccuugaagacccagaugaa

SEQ ID NO: 1148843 - RNA, 19 nt, Homo sapiens
  misc_RNA (1)...(19): siRNA sense strand
ccucaaaggauucgugaac

SEQ ID NO: 1148844 - RNA, 19 nt, Homo sapiens
  misc_RNA (1)...(19): siRNA sense strand
gaagauggcugacaaaauu

SEQ ID NO: 1148845 - RNA, 19 nt, Homo sapiens
  misc_RNA (1)...(19): siRNA sense strand
gcagagacgacaagaauua

SEQ ID NO: 1148846 - RNA, 19 nt, Homo sapiens
  misc_RNA (1)...(19): siRNA sense strand
gcacuguggcaauauauua

SEQ ID NO: 1148847 - RNA, 19 nt, Homo sapiens
  misc_RNA (1)...(19): siRNA sense strand
caaauaugaugccacuaaa

SEQ ID NO: 1148848 - RNA, 19 nt, Homo sapiens
  misc_RNA (1)...(19): siRNA sense strand
gaaccuaucaucauuaauc

SEQ ID NO: 1148849 - RNA, 19 nt, Homo sapiens
  misc_RNA (1)...(19): siRNA sense strand
ugacugaugugguggguaa

SEQ ID NO: 1148850 - RNA, 19 nt, Homo sapiens
  misc_RNA (1)...(19): siRNA sense strand
ccaaauaugaugccacuaa

SEQ ID NO: 1148851 - RNA, 19 nt, Homo sapiens
  misc_RNA (1)...(19): siRNA sense strand
cagaaccuaucaucauuaa

SEQ ID NO: 1148852 - RNA, 19 nt, Homo sapiens
  misc_RNA (1)...(19): siRNA sense strand
ugauugaacuggacaaaga

SEQ ID NO: 1148853 - RNA, 19 nt, Homo sapiens
  misc_RNA (1)...(19): siRNA sense strand
caagcacuguggcaauaua

SEQ ID NO: 1148854 - RNA, 19 nt, Homo sapiens
  misc_RNA (1)...(19): siRNA sense strand
aaacggaagcugcgaauuu

SEQ ID NO: 1148855 - RNA, 19 nt, Homo sapiens
  misc_RNA (1)...(19): siRNA sense strand
ggcaauauauuaagacaca

SEQ ID NO: 1148856 - RNA, 19 nt, Homo sapiens
  misc_RNA (1)...(19): siRNA sense strand
agacccagaugaauucuuu

SEQ ID NO: 1148857 - RNA, 19 nt, Homo sapiens
  misc_RNA (1)...(19): siRNA sense strand
aaaccacaaugcaaagaaa

SEQ ID NO: 1148858 - RNA, 19 nt, Homo sapiens
  misc_RNA (1)...(19): siRNA sense strand
ggaaacggcuagauaucca

SEQ ID NO: 1148859 - RNA, 19 nt, Homo sapiens
  misc_RNA (1)...(19): siRNA sense strand
gaaaccacaaugcaaagaa

SEQ ID NO: 1148860 - RNA, 19 nt, Homo sapiens
  misc_RNA (1)...(19): siRNA sense strand
aaagacagcuuguuaugac

SEQ ID NO: 1148861 - RNA, 19 nt, Homo sapiens
  misc_RNA (1)...(19): siRNA sense strand
ggagauugcuacucuagac

SEQ ID NO: 1148862 - RNA, 19 nt, Homo sapiens
  misc_RNA (1)...(19): siRNA sense strand
cagcagagacgacaagaau

SEQ ID NO: 1148863 - RNA, 19 nt, Homo sapiens
  misc_RNA (1)...(19): siRNA sense strand
gggaguuugucaucuguga

SEQ ID NO: 1148864 - RNA, 19 nt, Homo sapiens
  misc_RNA (1)...(19): siRNA sense strand
gagcugaguucuacuucca

SEQ ID NO: 1148865 - RNA, 19 nt, Homo sapiens
  misc_RNA (1)...(19): siRNA sense strand
ccagaaccuaucaucauua

SEQ ID NO: 1148866 - RNA, 19 nt, Homo sapiens
  misc_RNA (1)...(19): siRNA sense strand
auauggaucucuuggcuuu

SEQ ID NO: 1148867 - RNA, 19 nt, Homo sapiens
  misc_RNA (1)...(19): siRNA sense strand
uaagucagaugccgaggau

SEQ ID NO: 1148868 - RNA, 19 nt, Homo sapiens
  misc_RNA (1)...(19): siRNA sense strand
cagaaucccaggccuauau

SEQ ID NO: 1148869 - RNA, 19 nt, Homo sapiens
  misc_RNA (1)...(19): siRNA sense strand
ucaaaggauucgugaacug

SEQ ID NO: 1148870 - RNA, 19 nt, Homo sapiens
  misc_RNA (1)...(19): siRNA sense strand
uuaaucaugucaucagugu

SEQ ID NO: 1148871 - RNA, 19 nt, Homo sapiens
  misc_RNA (1)...(19): siRNA sense strand
caucauuaaucaugucauc

SEQ ID NO: 1148872 - RNA, 19 nt, Homo sapiens
  misc_RNA (1)...(19): siRNA sense strand
gauucagccuuguccaaau

SEQ ID NO: 1148873 - RNA, 19 nt, Homo sapiens
  misc_RNA (1)...(19): siRNA sense strand
uccaagcacuguggcaaua

SEQ ID NO: 1148874 - RNA, 19 nt, Homo sapiens
  misc_RNA (1)...(19): siRNA sense strand
auucagccuuguccaaaua

SEQ ID NO: 1148875 - RNA, 19 nt, Homo sapiens
  misc_RNA (1)...(19): siRNA sense strand
uuaaguccuuggugauuga

SEQ ID NO: 1148876 - RNA, 19 nt, Homo sapiens
  misc_RNA (1)...(19): siRNA sense strand
ugaggaaacggcuagauau

SEQ ID NO: 1148877 - RNA, 19 nt, Homo sapiens
  misc_RNA (1)...(19): siRNA sense strand
ugaagacccagaugaauuc

SEQ ID NO: 1148878 - RNA, 19 nt, Homo sapiens
  misc_RNA (1)...(19): siRNA sense strand
gacagcuuguuaugacauu

SEQ ID NO: 1148879 - RNA, 19 nt, Homo sapiens
  misc_RNA (1)...(19): siRNA sense strand
ggauucagccuuguccaaa

SEQ ID NO: 1148880 - RNA, 19 nt, Homo sapiens
  misc_RNA (1)...(19): siRNA sense strand
aaaagaagauggcugacaa

SEQ ID NO: 1148881 - RNA, 19 nt, Homo sapiens
  misc_RNA (1)...(19): siRNA sense strand
gcgccgagcugaguucuac

SEQ ID NO: 1148882 - RNA, 19 nt, Homo sapiens
  misc_RNA (1)...(19): siRNA sense strand
ugacccgaaugaucagaaa

SEQ ID NO: 1148883 - RNA, 19 nt, Homo sapiens
  misc_RNA (1)...(19): siRNA sense strand
uaugaugccacuaaacaaa

SEQ ID NO: 1148884 - RNA, 19 nt, Homo sapiens
  misc_RNA (1)...(19): siRNA sense strand
gccgauacuucuacuccaa

SEQ ID NO: 1148885 - RNA, 19 nt, Homo sapiens
  misc_RNA (1)...(19): siRNA sense strand
accagaaccuaucaucauu

SEQ ID NO: 1148886 - RNA, 19 nt, Homo sapiens
  misc_RNA (1)...(19): siRNA sense strand
aaucaugucaucaguguug

SEQ ID NO: 1148887 - RNA, 19 nt, Homo sapiens
  misc_RNA (1)...(19): siRNA sense strand
gaggaaacggcuagauauc

SEQ ID NO: 1148888 - RNA, 19 nt, Homo sapiens
  misc_RNA (1)...(19): siRNA sense strand
aauucuaccucaaaggauu

SEQ ID NO: 1148889 - RNA, 19 nt, Homo sapiens
  misc_RNA (1)...(19): siRNA sense strand
gcccugggaauccggaaua

SEQ ID NO: 1148890 - RNA, 19 nt, Homo sapiens
  misc_RNA (1)...(19): siRNA sense strand
aaggauucgugaacuggua

SEQ ID NO: 1148891 - RNA, 19 nt, Homo sapiens
  misc_RNA (1)...(19): siRNA sense strand
aacaggagauugcuacucu

SEQ ID NO: 1148892 - RNA, 19 nt, Homo sapiens
  misc_RNA (1)...(19): siRNA sense strand
gagcgggaguuugucaucu

SEQ ID NO: 1148893 - RNA, 19 nt, Homo sapiens
  misc_RNA (1)...(19): siRNA sense strand
uugaagacccagaugaauu

SEQ ID NO: 1148894 - RNA, 19 nt, Homo sapiens
  misc_RNA (1)...(19): siRNA sense strand
caucaguguugacccgaau

SEQ ID NO: 1148895 - RNA, 19 nt, Homo sapiens
  misc_RNA (1)...(19): siRNA sense strand
ccugggagcuucggguaga

SEQ ID NO: 1148896 - RNA, 19 nt, Homo sapiens
  misc_RNA (1)...(19): siRNA sense strand
caccagaaccuaucaucau

SEQ ID NO: 1148897 - RNA, 19 nt, Homo sapiens
  misc_RNA (1)...(19): siRNA sense strand
aauaugaugccacuaaaca

SEQ ID NO: 1148898 - RNA, 19 nt, Homo sapiens
  misc_RNA (1)...(19): siRNA sense strand
ucaauccggcuaagucaga

SEQ ID NO: 1148899 - RNA, 19 nt, Homo sapiens
  misc_RNA (1)...(19): siRNA sense strand
ggaucagucccgcaagaga

SEQ ID NO: 1148900 - RNA, 19 nt, Homo sapiens
  misc_RNA (1)...(19): siRNA sense strand
ccuaucaucauuaaucaug

SEQ ID NO: 1148901 - RNA, 19 nt, Homo sapiens
  misc_RNA (1)...(19): siRNA sense strand
gcgggaguuugucaucugu

SEQ ID NO: 1148902 - RNA, 19 nt, Homo sapiens
  misc_RNA (1)...(19): siRNA sense strand
gaaacggcuagauauccaa

SEQ ID NO: 1148903 - RNA, 19 nt, Homo sapiens
  misc_RNA (1)...(19): siRNA sense strand
gcagcagagacgacaagaa

SEQ ID NO: 1148904 - RNA, 19 nt, Homo sapiens
  misc_RNA (1)...(19): siRNA sense strand
gguguacuguccuacugau

SEQ ID NO: 1148905 - RNA, 19 nt, Homo sapiens
  misc_RNA (1)...(19): siRNA sense strand
aaagaagauggcugacaaa

SEQ ID NO: 1148906 - RNA, 19 nt, Homo sapiens
  misc_RNA (1)...(19): siRNA sense strand
uugcuacucuagacaacaa

SEQ ID NO: 1148907 - RNA, 19 nt, Homo sapiens
  misc_RNA (1)...(19): siRNA sense strand
gacaaaauucuaccucaaa

SEQ ID NO: 1148908 - RNA, 19 nt, Homo sapiens
  misc_RNA (1)...(19): siRNA sense strand
uuuaaguccuuggugauug

SEQ ID NO: 1148909 - RNA, 19 nt, Homo sapiens
  misc_RNA (1)...(19): siRNA sense strand
gagacgacaagaauuagag

SEQ ID NO: 1148910 - RNA, 19 nt, Homo sapiens
  misc_RNA (1)...(19): siRNA sense strand
acaggagauugcuacucua

SEQ ID NO: 1148911 - RNA, 19 nt, Homo sapiens
  misc_RNA (1)...(19): siRNA sense strand
guggaugacaccuugaaga

SEQ ID NO: 1148912 - RNA, 19 nt, Homo sapiens
  misc_RNA (1)...(19): siRNA sense strand
gaaguggaugacaccuuga

SEQ ID NO: 1148913 - RNA, 19 nt, Homo sapiens
  misc_RNA (1)...(19): siRNA sense strand
ccaccagaaccuaucauca

SEQ ID NO: 1148914 - RNA, 19 nt, Homo sapiens
  misc_RNA (1)...(19): siRNA sense strand
gggcauccauacccagacu

SEQ ID NO: 1148915 - RNA, 19 nt, Homo sapiens
  misc_RNA (1)...(19): siRNA sense strand
augaggaaacggcuagaua

SEQ ID NO: 1148916 - RNA, 19 nt, Homo sapiens
  misc_RNA (1)...(19): siRNA sense strand
aaucgaaaccacaaugcaa

SEQ ID NO: 1148917 - RNA, 19 nt, Homo sapiens
  misc_RNA (1)...(19): siRNA sense strand
guguugacccgaaugauca

SEQ ID NO: 1148918 - RNA, 19 nt, Homo sapiens
  misc_RNA (1)...(19): siRNA sense strand
guggcaauauauuaagaca

SEQ ID NO: 1148919 - RNA, 19 nt, Homo sapiens
  misc_RNA (1)...(19): siRNA sense strand
uccuacugaugcuggauua

SEQ ID NO: 1148920 - RNA, 19 nt, Homo sapiens
  misc_RNA (1)...(19): siRNA sense strand
ugacaaaauucuaccucaa

SEQ ID NO: 1148921 - RNA, 19 nt, Homo sapiens
  misc_RNA (1)...(19): siRNA sense strand
cgacuccugggcauccaua

SEQ ID NO: 1148922 - RNA, 19 nt, Homo sapiens
  misc_RNA (1)...(19): siRNA sense strand
guacuguccuacugaugcu

SEQ ID NO: 1148923 - RNA, 19 nt, Homo sapiens
  misc_RNA (1)...(19): siRNA sense strand
ugggaauccggaauacaua

SEQ ID NO: 1148924 - RNA, 19 nt, Homo sapiens
  misc_RNA (1)...(19): siRNA sense strand
cgaaaccacaaugcaaaga

SEQ ID NO: 1148925 - RNA, 19 nt, Homo sapiens
  misc_RNA (1)...(19): siRNA sense strand
cauuaaucaugucaucagu

SEQ ID NO: 1148926 - RNA, 19 nt, Homo sapiens
  misc_RNA (1)...(19): siRNA sense strand
cuccaugccuugcuuaugc

SEQ ID NO: 1148927 - RNA, 19 nt, Homo sapiens
  misc_RNA (1)...(19): siRNA sense strand
cagccuuguccaaauauga

SEQ ID NO: 1148928 - RNA, 19 nt, Homo sapiens
  misc_RNA (1)...(19): siRNA sense strand
cagcuuguuaugacauuga

SEQ ID NO: 1148929 - RNA, 19 nt, Homo sapiens
  misc_RNA (1)...(19): siRNA sense strand
cacuguggcaauauauuaa

SEQ ID NO: 1148930 - RNA, 19 nt, Homo sapiens
  misc_RNA (1)...(19): siRNA sense strand
ccagacucguccagugauc

SEQ ID NO: 1148931 - RNA, 19 nt, Homo sapiens
  misc_RNA (1)...(19): siRNA sense strand
gggaauccggaauacauag

SEQ ID NO: 1148932 - RNA, 19 nt, Homo sapiens
  misc_RNA (1)...(19): siRNA sense strand
ccuugaagacccagaugaa

SEQ ID NO: 1148933 - RNA, 19 nt, Homo sapiens
  misc_RNA (1)...(19): siRNA sense strand
ccucaaaggauucgugaac

SEQ ID NO: 1148934 - RNA, 19 nt, Homo sapiens
  misc_RNA (1)...(19): siRNA sense strand
gaauaacuauguacaagga

SEQ ID NO: 1148935 - RNA, 19 nt, Homo sapiens
  misc_RNA (1)...(19): siRNA sense strand
cuuaagaagugcuggaaua

SEQ ID NO: 1148936 - RNA, 19 nt, Homo sapiens
  misc_RNA (1)...(19): siRNA sense strand
gagauacuguugccucaau

SEQ ID NO: 1148937 - RNA, 19 nt, Homo sapiens
  misc_RNA (1)...(19): siRNA sense strand
acaaggacauugcaggaaa

SEQ ID NO: 1148938 - RNA, 19 nt, Homo sapiens
  misc_RNA (1)...(19): siRNA sense strand
acaguaaccgaacaacuua

SEQ ID NO: 1148939 - RNA, 19 nt, Homo sapiens
  misc_RNA (1)...(19): siRNA sense strand
gugcuggaauaacuaugua

SEQ ID NO: 1148940 - RNA, 19 nt, Homo sapiens
  misc_RNA (1)...(19): siRNA sense strand
uaaccgaacaacuuaagaa

SEQ ID NO: 1148941 - RNA, 19 nt, Homo sapiens
  misc_RNA (1)...(19): siRNA sense strand
ggaacuggaagcauguaaa

SEQ ID NO: 1148942 - RNA, 19 nt, Homo sapiens
  misc_RNA (1)...(19): siRNA sense strand
aggaaaaucugcagaguaa

SEQ ID NO: 1148943 - RNA, 19 nt, Homo sapiens
  misc_RNA (1)...(19): siRNA sense strand
gaagugcuggaauaacuau

SEQ ID NO: 1148944 - RNA, 19 nt, Homo sapiens
  misc_RNA (1)...(19): siRNA sense strand
aagaagugcuggaauaacu

SEQ ID NO: 1148945 - RNA, 19 nt, Homo sapiens
  misc_RNA (1)...(19): siRNA sense strand
gaacuggaagcauguaaaa

SEQ ID NO: 1148946 - RNA, 19 nt, Homo sapiens
  misc_RNA (1)...(19): siRNA sense strand
ccaaagccagcaacacuug

SEQ ID NO: 1148947 - RNA, 19 nt, Homo sapiens
  misc_RNA (1)...(19): siRNA sense strand
cacaguaaccgaacaacuu

SEQ ID NO: 1148948 - RNA, 19 nt, Homo sapiens
  misc_RNA (1)...(19): siRNA sense strand
gaaaaucugcagaguaaau

SEQ ID NO: 1148949 - RNA, 19 nt, Homo sapiens
  misc_RNA (1)...(19): siRNA sense strand
gaaaaugggagauacuguu

SEQ ID NO: 1148950 - RNA, 19 nt, Homo sapiens
  misc_RNA (1)...(19): siRNA sense strand
uuaagaagugcuggaauaa

SEQ ID NO: 1148951 - RNA, 19 nt, Homo sapiens
  misc_RNA (1)...(19): siRNA sense strand
uggaauaacuauguacaag

SEQ ID NO: 1148952 - RNA, 19 nt, Homo sapiens
  misc_RNA (1)...(19): siRNA sense strand
agauacuguugccucaaua

SEQ ID NO: 1148953 - RNA, 19 nt, Homo sapiens
  misc_RNA (1)...(19): siRNA sense strand
caauaucaaggaacuggaa

SEQ ID NO: 1148954 - RNA, 19 nt, Homo sapiens
  misc_RNA (1)...(19): siRNA sense strand
cuucaagacuauguuacaa

SEQ ID NO: 1148955 - RNA, 19 nt, Homo sapiens
  misc_RNA (1)...(19): siRNA sense strand
ucauugcaauucugcuguu

SEQ ID NO: 1148956 - RNA, 19 nt, Homo sapiens
  misc_RNA (1)...(19): siRNA sense strand
gauacuguugccucaauau

SEQ ID NO: 1148957 - RNA, 19 nt, Homo sapiens
  misc_RNA (1)...(19): siRNA sense strand
caugaucauugcaauucug

SEQ ID NO: 1148958 - RNA, 19 nt, Homo sapiens
  misc_RNA (1)...(19): siRNA sense strand
ucccaagccugaagacaca

SEQ ID NO: 1148959 - RNA, 19 nt, Homo sapiens
  misc_RNA (1)...(19): siRNA sense strand
caaggacauugcaggaaaa

SEQ ID NO: 1148960 - RNA, 19 nt, Homo sapiens
  misc_RNA (1)...(19): siRNA sense strand
caaggaacuggaagcaugu

SEQ ID NO: 1148961 - RNA, 19 nt, Homo sapiens
  misc_RNA (1)...(19): siRNA sense strand
acuguugccucaauaucaa

SEQ ID NO: 1148962 - RNA, 19 nt, Homo sapiens
  misc_RNA (1)...(19): siRNA sense strand
ggacauugcaggaaaaucu

SEQ ID NO: 1148963 - RNA, 19 nt, Homo sapiens
  misc_RNA (1)...(19): siRNA sense strand
uuccagaaacccacaguaa

SEQ ID NO: 1148964 - RNA, 19 nt, Homo sapiens
  misc_RNA (1)...(19): siRNA sense strand
ccugaggcacuaugugaaa

SEQ ID NO: 1148965 - RNA, 19 nt, Homo sapiens
  misc_RNA (1)...(19): siRNA sense strand
guaaccgaacaacuuaaga

SEQ ID NO: 1148966 - RNA, 19 nt, Homo sapiens
  misc_RNA (1)...(19): siRNA sense strand
acacuugcacugacucuuc

SEQ ID NO: 1148967 - RNA, 19 nt, Homo sapiens
  misc_RNA (1)...(19): siRNA sense strand
agaagugcuggaauaacua

SEQ ID NO: 1148968 - RNA, 19 nt, Homo sapiens
  misc_RNA (1)...(19): siRNA sense strand
gggcucuucaugaucauug

SEQ ID NO: 1148969 - RNA, 19 nt, Homo sapiens
  misc_RNA (1)...(19): siRNA sense strand
cacuugcacugacucuuca

SEQ ID NO: 1148970 - RNA, 19 nt, Homo sapiens
  misc_RNA (1)...(19): siRNA sense strand
ggagaaaucuggcaucaua

SEQ ID NO: 1148971 - RNA, 19 nt, Homo sapiens
  misc_RNA (1)...(19): siRNA sense strand
gaaacugaaugaaguaaug

SEQ ID NO: 1148972 - RNA, 19 nt, Homo sapiens
  misc_RNA (1)...(19): siRNA sense strand
ggacaaagccaucaaggaa

SEQ ID NO: 1148973 - RNA, 19 nt, Homo sapiens
  misc_RNA (1)...(19): siRNA sense strand
ggaauuagugguccaguua

SEQ ID NO: 1148974 - RNA, 19 nt, Homo sapiens
  misc_RNA (1)...(19): siRNA sense strand
ggucguggauucacagaua

SEQ ID NO: 1148975 - RNA, 19 nt, Homo sapiens
  misc_RNA (1)...(19): siRNA sense strand
ccaaagauguugugaggaa

SEQ ID NO: 1148976 - RNA, 19 nt, Homo sapiens
  misc_RNA (1)...(19): siRNA sense strand
guaaagaaaucuacucaag

SEQ ID NO: 1148977 - RNA, 19 nt, Homo sapiens
  misc_RNA (1)...(19): siRNA sense strand
gaagcaagccagccaagua

SEQ ID NO: 1148978 - RNA, 19 nt, Homo sapiens
  misc_RNA (1)...(19): siRNA sense strand
ggagagcuauuucacagaa

SEQ ID NO: 1148979 - RNA, 19 nt, Homo sapiens
  misc_RNA (1)...(19): siRNA sense strand
caaaggauaugcgaagaaa

SEQ ID NO: 1148980 - RNA, 19 nt, Homo sapiens
  misc_RNA (1)...(19): siRNA sense strand
gcccgacucuuaauuguaa

SEQ ID NO: 1148981 - RNA, 19 nt, Homo sapiens
  misc_RNA (1)...(19): siRNA sense strand
ccaaacauaguucagauua

SEQ ID NO: 1148982 - RNA, 19 nt, Homo sapiens
  misc_RNA (1)...(19): siRNA sense strand
gcaggaggcuuggaaguau

SEQ ID NO: 1148983 - RNA, 19 nt, Homo sapiens
  misc_RNA (1)...(19): siRNA sense strand
gaaugaagaugagaaacug

SEQ ID NO: 1148984 - RNA, 19 nt, Homo sapiens
  misc_RNA (1)...(19): siRNA sense strand
ugaagcaggugauagaaga

SEQ ID NO: 1148985 - RNA, 19 nt, Homo sapiens
  misc_RNA (1)...(19): siRNA sense strand
gcugggagcuggaauuagu

SEQ ID NO: 1148986 - RNA, 19 nt, Homo sapiens
  misc_RNA (1)...(19): siRNA sense strand
gaggaagaguggagucaga

SEQ ID NO: 1148987 - RNA, 19 nt, Homo sapiens
  misc_RNA (1)...(19): siRNA sense strand
ccaguuagagucuguguaa

SEQ ID NO: 1148988 - RNA, 19 nt, Homo sapiens
  misc_RNA (1)...(19): siRNA sense strand
gcggcacugucacuuguua

SEQ ID NO: 1148989 - RNA, 19 nt, Homo sapiens
  misc_RNA (1)...(19): siRNA sense strand
uagagucuguguaaagaaa

SEQ ID NO: 1148990 - RNA, 19 nt, Homo sapiens
  misc_RNA (1)...(19): siRNA sense strand
gauaaaguagaucgacuaa

SEQ ID NO: 1148991 - RNA, 19 nt, Homo sapiens
  misc_RNA (1)...(19): siRNA sense strand
caccgacgcccuacacuua

SEQ ID NO: 1148992 - RNA, 19 nt, Homo sapiens
  misc_RNA (1)...(19): siRNA sense strand
gaaggcaucagaaggagaa

SEQ ID NO: 1148993 - RNA, 19 nt, Homo sapiens
  misc_RNA (1)...(19): siRNA sense strand
ggaaugcaaacuccuaaga

SEQ ID NO: 1148994 - RNA, 19 nt, Homo sapiens
  misc_RNA (1)...(19): siRNA sense strand
guuagagucuguguaaaga

SEQ ID NO: 1148995 - RNA, 19 nt, Homo sapiens
  misc_RNA (1)...(19): siRNA sense strand
gcaaagaaggcaucagaag

SEQ ID NO: 1148996 - RNA, 19 nt, Homo sapiens
  misc_RNA (1)...(19): siRNA sense strand
ccaccgaggcccuggauaa

SEQ ID NO: 1148997 - RNA, 19 nt, Homo sapiens
  misc_RNA (1)...(19): siRNA sense strand
gcgcaaagaaggcaucaga

SEQ ID NO: 1148998 - RNA, 19 nt, Homo sapiens
  misc_RNA (1)...(19): siRNA sense strand
ccaaguaacaaagcagaua

SEQ ID NO: 1148999 - RNA, 19 nt, Homo sapiens
  misc_RNA (1)...(19): siRNA sense strand
gcaaaccacgucccacgaa

SEQ ID NO: 1149000 - RNA, 19 nt, Homo sapiens
  misc_RNA (1)...(19): siRNA sense strand
gaugagaaacugaaugaag

SEQ ID NO: 1149001 - RNA, 19 nt, Homo sapiens
  misc_RNA (1)...(19): siRNA sense strand
aaagaaggcaucagaagga

SEQ ID NO: 1149002 - RNA, 19 nt, Homo sapiens
  misc_RNA (1)...(19): siRNA sense strand
caggaggcuuggaaguaua

SEQ ID NO: 1149003 - RNA, 19 nt, Homo sapiens
  misc_RNA (1)...(19): siRNA sense strand
gaagaugagaaacugaaug

SEQ ID NO: 1149004 - RNA, 19 nt, Homo sapiens
  misc_RNA (1)...(19): siRNA sense strand
gauaugcgaagaaagauca

SEQ ID NO: 1149005 - RNA, 19 nt, Homo sapiens
  misc_RNA (1)...(19): siRNA sense strand
gacaaagccaucaaggaaa

SEQ ID NO: 1149006 - RNA, 19 nt, Homo sapiens
  misc_RNA (1)...(19): siRNA sense strand
ccgaggcccuggauaaugu

SEQ ID NO: 1149007 - RNA, 19 nt, Homo sapiens
  misc_RNA (1)...(19): siRNA sense strand
caccggcacuuuacagaga

SEQ ID NO: 1149008 - RNA, 19 nt, Homo sapiens
  misc_RNA (1)...(19): siRNA sense strand
gcccuacacuuacaacaag

SEQ ID NO: 1149009 - RNA, 19 nt, Homo sapiens
  misc_RNA (1)...(19): siRNA sense strand
uggcagaaauugugaagca

SEQ ID NO: 1149010 - RNA, 19 nt, Homo sapiens
  misc_RNA (1)...(19): siRNA sense strand
ugcaaacuccuaagagaua

SEQ ID NO: 1149011 - RNA, 19 nt, Homo sapiens
  misc_RNA (1)...(19): siRNA sense strand
ggaagcuccugaaggucaa

SEQ ID NO: 1149012 - RNA, 19 nt, Homo sapiens
  misc_RNA (1)...(19): siRNA sense strand
aaugcaaacuccuaagaga

SEQ ID NO: 1149013 - RNA, 19 nt, Homo sapiens
  misc_RNA (1)...(19): siRNA sense strand
gagccgaggauuccaaugu

SEQ ID NO: 1149014 - RNA, 19 nt, Homo sapiens
  misc_RNA (1)...(19): siRNA sense strand
ggagagcgacauggacaaa

SEQ ID NO: 1149015 - RNA, 19 nt, Homo sapiens
  misc_RNA (1)...(19): siRNA sense strand
caaaccacgucccacgaau

SEQ ID NO: 1149016 - RNA, 19 nt, Homo sapiens
  misc_RNA (1)...(19): siRNA sense strand
gagagaaugaagaugagaa

SEQ ID NO: 1149017 - RNA, 19 nt, Homo sapiens
  misc_RNA (1)...(19): siRNA sense strand
uggauucacagauaaagua

SEQ ID NO: 1149018 - RNA, 19 nt, Homo sapiens
  misc_RNA (1)...(19): siRNA sense strand
gagaaacugaaugaaguaa

SEQ ID NO: 1149019 - RNA, 19 nt, Homo sapiens
  misc_RNA (1)...(19): siRNA sense strand
gagguacgucugcacauga

SEQ ID NO: 1149020 - RNA, 19 nt, Homo sapiens
  misc_RNA (1)...(19): siRNA sense strand
ggaaguauaaccgggaaug

SEQ ID NO: 1149021 - RNA, 19 nt, Homo sapiens
  misc_RNA (1)...(19): siRNA sense strand
ugagaaacugaaugaagua

SEQ ID NO: 1149022 - RNA, 19 nt, Homo sapiens
  misc_RNA (1)...(19): siRNA sense strand
ccagugaaguugugugacu

SEQ ID NO: 1149023 - RNA, 19 nt, Homo sapiens
  misc_RNA (1)...(19): siRNA sense strand
aagcaagccagccaaguaa

SEQ ID NO: 1149024 - RNA, 19 nt, Homo sapiens
  misc_RNA (1)...(19): siRNA sense strand
gccgaggauuccaauguug

SEQ ID NO: 1149025 - RNA, 19 nt, Homo sapiens
  misc_RNA (1)...(19): siRNA sense strand
cugcucagcugaugaugga

SEQ ID NO: 1149026 - RNA, 19 nt, Homo sapiens
  misc_RNA (1)...(19): siRNA sense strand
acaaagccaucaaggaaac

SEQ ID NO: 1149027 - RNA, 19 nt, Homo sapiens
  misc_RNA (1)...(19): siRNA sense strand
gcaaacuccuaagagauac

SEQ ID NO: 1149028 - RNA, 19 nt, Homo sapiens
  misc_RNA (1)...(19): siRNA sense strand
aagaugagaaacugaauga

SEQ ID NO: 1149029 - RNA, 19 nt, Homo sapiens
  misc_RNA (1)...(19): siRNA sense strand
aaggauaugcgaagaaaga

SEQ ID NO: 1149030 - RNA, 19 nt, Homo sapiens
  misc_RNA (1)...(19): siRNA sense strand
ccaaaggauaugcgaagaa

SEQ ID NO: 1149031 - RNA, 19 nt, Homo sapiens
  misc_RNA (1)...(19): siRNA sense strand
guacuggaggcgcaaagaa

SEQ ID NO: 1149032 - RNA, 19 nt, Homo sapiens
  misc_RNA (1)...(19): siRNA sense strand
guucaccccuuauuaugua

SEQ ID NO: 1149033 - RNA, 19 nt, Homo sapiens
  misc_RNA (1)...(19): siRNA sense strand
gcaagccagccaaguaaca

SEQ ID NO: 1149034 - RNA, 19 nt, Homo sapiens
  misc_RNA (1)...(19): siRNA sense strand
gaagaguggagucagaucu

SEQ ID NO: 1149035 - RNA, 19 nt, Homo sapiens
  misc_RNA (1)...(19): siRNA sense strand
ggacaaggcagugguugca

SEQ ID NO: 1149036 - RNA, 19 nt, Homo sapiens
  misc_RNA (1)...(19): siRNA sense strand
gauaaugugcugccuucug

SEQ ID NO: 1149037 - RNA, 19 nt, Homo sapiens
  misc_RNA (1)...(19): siRNA sense strand
ggucaaaccggaggagaga

SEQ ID NO: 1149038 - RNA, 19 nt, Homo sapiens
  misc_RNA (1)...(19): siRNA sense strand
agagauggccaaagauguu

SEQ ID NO: 1149039 - RNA, 19 nt, Homo sapiens
  misc_RNA (1)...(19): siRNA sense strand
ccacacacccaaacauagu

SEQ ID NO: 1149040 - RNA, 19 nt, Homo sapiens
  misc_RNA (1)...(19): siRNA sense strand
gaaugcaaacuccuaagag

SEQ ID NO: 1149041 - RNA, 19 nt, Homo sapiens
  misc_RNA (1)...(19): siRNA sense strand
ugagguacgucugcacaug

SEQ ID NO: 1149042 - RNA, 19 nt, Homo sapiens
  misc_RNA (1)...(19): siRNA sense strand
gacuaaaacuggcagaaau

SEQ ID NO: 1149043 - RNA, 19 nt, Homo sapiens
  misc_RNA (1)...(19): siRNA sense strand
augagaaacugaaugaagu

SEQ ID NO: 1149044 - RNA, 19 nt, Homo sapiens
  misc_RNA (1)...(19): siRNA sense strand
gaugugauugcucagugua

SEQ ID NO: 1149045 - RNA, 19 nt, Homo sapiens
  misc_RNA (1)...(19): siRNA sense strand
gagaauggagccgaggauu

SEQ ID NO: 1149046 - RNA, 19 nt, Homo sapiens
  misc_RNA (1)...(19): siRNA sense strand
aaacaccacagccggacua

SEQ ID NO: 1149047 - RNA, 19 nt, Homo sapiens
  misc_RNA (1)...(19): siRNA sense strand
gagagcuauuucacagaau

SEQ ID NO: 1149048 - RNA, 19 nt, Homo sapiens
  misc_RNA (1)...(19): siRNA sense strand
gucguggauucacagauaa

SEQ ID NO: 1149049 - RNA, 19 nt, Homo sapiens
  misc_RNA (1)...(19): siRNA sense strand
ucagagauggccaaagaug

SEQ ID NO: 1149050 - RNA, 19 nt, Homo sapiens
  misc_RNA (1)...(19): siRNA sense strand
caaguaacaaagcagauag

SEQ ID NO: 1149051 - RNA, 19 nt, Homo sapiens
  misc_RNA (1)...(19): siRNA sense strand
gaucaugacaggcaguuuu

SEQ ID NO: 1149052 - RNA, 19 nt, Homo sapiens
  misc_RNA (1)...(19): siRNA sense strand
aaggagaaaucuggcauca

SEQ ID NO: 1149053 - RNA, 19 nt, Homo sapiens
  misc_RNA (1)...(19): siRNA sense strand
guugugugacuuuggauuu

SEQ ID NO: 1149054 - RNA, 19 nt, Homo sapiens
  misc_RNA (1)...(19): siRNA sense strand
guuaaacauugcgcacaga

SEQ ID NO: 1149055 - RNA, 19 nt, Homo sapiens
  misc_RNA (1)...(19): siRNA sense strand
gccggacuaucccaaagga

SEQ ID NO: 1149056 - RNA, 19 nt, Homo sapiens
  misc_RNA (1)...(19): siRNA sense strand
ugugauugcucaguguauu

SEQ ID NO: 1149057 - RNA, 19 nt, Homo sapiens
  misc_RNA (1)...(19): siRNA sense strand
ggcagugguugcaggaauc

SEQ ID NO: 1149058 - RNA, 19 nt, Homo sapiens
  misc_RNA (1)...(19): siRNA sense strand
gaccaccccuggcucaauu

SEQ ID NO: 1149059 - RNA, 19 nt, Homo sapiens
  misc_RNA (1)...(19): siRNA sense strand
gcgaagaaagaucaugaca

SEQ ID NO: 1149060 - RNA, 19 nt, Homo sapiens
  misc_RNA (1)...(19): siRNA sense strand
gagucuguguaaagaaauc

SEQ ID NO: 1149061 - RNA, 19 nt, Homo sapiens
  misc_RNA (1)...(19): siRNA sense strand
aaacuggcagaaauuguga

SEQ ID NO: 1149062 - RNA, 19 nt, Homo sapiens
  misc_RNA (1)...(19): siRNA sense strand
agauaaaguagaucgacua

SEQ ID NO: 1149063 - RNA, 19 nt, Homo sapiens
  misc_RNA (1)...(19): siRNA sense strand
agagaaugaagaugagaaa

SEQ ID NO: 1149064 - RNA, 19 nt, Homo sapiens
  misc_RNA (1)...(19): siRNA sense strand
ugcuaacaguguccaguuu

SEQ ID NO: 1149065 - RNA, 19 nt, Homo sapiens
  misc_RNA (1)...(19): siRNA sense strand
guauaaccgggaaugcaaa

SEQ ID NO: 1149066 - RNA, 19 nt, Homo sapiens
  misc_RNA (1)...(19): siRNA sense strand
ugccacacacccaaacaua

SEQ ID NO: 1149067 - RNA, 19 nt, Homo sapiens
  misc_RNA (1)...(19): siRNA sense strand
gagauggccaaagauguug

SEQ ID NO: 1149068 - RNA, 19 nt, Homo sapiens
  misc_RNA (1)...(19): siRNA sense strand
gaauuagugguccaguuag

SEQ ID NO: 1149069 - RNA, 19 nt, Homo sapiens
  misc_RNA (1)...(19): siRNA sense strand
gcuaacaguguccaguuuc

SEQ ID NO: 1149070 - RNA, 19 nt, Homo sapiens
  misc_RNA (1)...(19): siRNA sense strand
ggagaaaucuggcaucaua

SEQ ID NO: 1149071 - RNA, 19 nt, Homo sapiens
  misc_RNA (1)...(19): siRNA sense strand
gaaacugaaugaaguaaug

SEQ ID NO: 1149072 - RNA, 19 nt, Homo sapiens
  misc_RNA (1)...(19): siRNA sense strand
ggacaaagccaucaaggaa

SEQ ID NO: 1149073 - RNA, 19 nt, Homo sapiens
  misc_RNA (1)...(19): siRNA sense strand
ggaauuagugguccaguua

SEQ ID NO: 1149074 - RNA, 19 nt, Homo sapiens
  misc_RNA (1)...(19): siRNA sense strand
ggucguggauucacagaua

SEQ ID NO: 1149075 - RNA, 19 nt, Homo sapiens
  misc_RNA (1)...(19): siRNA sense strand
ccaaagauguugugaggaa

SEQ ID NO: 1149076 - RNA, 19 nt, Homo sapiens
  misc_RNA (1)...(19): siRNA sense strand
guaaagaaaucuacucaag

SEQ ID NO: 1149077 - RNA, 19 nt, Homo sapiens
  misc_RNA (1)...(19): siRNA sense strand
gaagcaagccagccaagua

SEQ ID NO: 1149078 - RNA, 19 nt, Homo sapiens
  misc_RNA (1)...(19): siRNA sense strand
ggagagcuauuucacagaa

SEQ ID NO: 1149079 - RNA, 19 nt, Homo sapiens
  misc_RNA (1)...(19): siRNA sense strand
caaaggauaugcgaagaaa

SEQ ID NO: 1149080 - RNA, 19 nt, Homo sapiens
  misc_RNA (1)...(19): siRNA sense strand
gcccgacucuuaauuguaa

SEQ ID NO: 1149081 - RNA, 19 nt, Homo sapiens
  misc_RNA (1)...(19): siRNA sense strand
ccaaacauaguucagauua

SEQ ID NO: 1149082 - RNA, 19 nt, Homo sapiens
  misc_RNA (1)...(19): siRNA sense strand
gcaggaggcuuggaaguau

SEQ ID NO: 1149083 - RNA, 19 nt, Homo sapiens
  misc_RNA (1)...(19): siRNA sense strand
gaaugaagaugagaaacug

SEQ ID NO: 1149084 - RNA, 19 nt, Homo sapiens
  misc_RNA (1)...(19): siRNA sense strand
ugaagcaggugauagaaga

SEQ ID NO: 1149085 - RNA, 19 nt, Homo sapiens
  misc_RNA (1)...(19): siRNA sense strand
gcugggagcuggaauuagu

SEQ ID NO: 1149086 - RNA, 19 nt, Homo sapiens
  misc_RNA (1)...(19): siRNA sense strand
gaggaagaguggagucaga

SEQ ID NO: 1149087 - RNA, 19 nt, Homo sapiens
  misc_RNA (1)...(19): siRNA sense strand
ccaguuagagucuguguaa

SEQ ID NO: 1149088 - RNA, 19 nt, Homo sapiens
  misc_RNA (1)...(19): siRNA sense strand
gcggcacugucacuuguua

SEQ ID NO: 1149089 - RNA, 19 nt, Homo sapiens
  misc_RNA (1)...(19): siRNA sense strand
uagagucuguguaaagaaa

SEQ ID NO: 1149090 - RNA, 19 nt, Homo sapiens
  misc_RNA (1)...(19): siRNA sense strand
gauaaaguagaucgacuaa

SEQ ID NO: 1149091 - RNA, 19 nt, Homo sapiens
  misc_RNA (1)...(19): siRNA sense strand
caccgacgcccuacacuua

SEQ ID NO: 1149092 - RNA, 19 nt, Homo sapiens
  misc_RNA (1)...(19): siRNA sense strand
gaaggcaucagaaggagaa

SEQ ID NO: 1149093 - RNA, 19 nt, Homo sapiens
  misc_RNA (1)...(19): siRNA sense strand
ggaaugcaaacuccuaaga

SEQ ID NO: 1149094 - RNA, 19 nt, Homo sapiens
  misc_RNA (1)...(19): siRNA sense strand
guuagagucuguguaaaga

SEQ ID NO: 1149095 - RNA, 19 nt, Homo sapiens
  misc_RNA (1)...(19): siRNA sense strand
gcaaagaaggcaucagaag

SEQ ID NO: 1149096 - RNA, 19 nt, Homo sapiens
  misc_RNA (1)...(19): siRNA sense strand
ccaccgaggcccuggauaa

SEQ ID NO: 1149097 - RNA, 19 nt, Homo sapiens
  misc_RNA (1)...(19): siRNA sense strand
gcgcaaagaaggcaucaga

SEQ ID NO: 1149098 - RNA, 19 nt, Homo sapiens
  misc_RNA (1)...(19): siRNA sense strand
ccaaguaacaaagcagaua

SEQ ID NO: 1149099 - RNA, 19 nt, Homo sapiens
  misc_RNA (1)...(19): siRNA sense strand
gcaaaccacgucccacgaa

SEQ ID NO: 1149100 - RNA, 19 nt, Homo sapiens
  misc_RNA (1)...(19): siRNA sense strand
gaugagaaacugaaugaag

SEQ ID NO: 1149101 - RNA, 19 nt, Homo sapiens
  misc_RNA (1)...(19): siRNA sense strand
aaagaaggcaucagaagga

SEQ ID NO: 1149102 - RNA, 19 nt, Homo sapiens
  misc_RNA (1)...(19): siRNA sense strand
caggaggcuuggaaguaua

SEQ ID NO: 1149103 - RNA, 19 nt, Homo sapiens
  misc_RNA (1)...(19): siRNA sense strand
gaagaugagaaacugaaug

SEQ ID NO: 1149104 - RNA, 19 nt, Homo sapiens
  misc_RNA (1)...(19): siRNA sense strand
gauaugcgaagaaagauca

SEQ ID NO: 1149105 - RNA, 19 nt, Homo sapiens
  misc_RNA (1)...(19): siRNA sense strand
gacaaagccaucaaggaaa

SEQ ID NO: 1149106 - RNA, 19 nt, Homo sapiens
  misc_RNA (1)...(19): siRNA sense strand
ccgaggcccuggauaaugu

SEQ ID NO: 1149107 - RNA, 19 nt, Homo sapiens
  misc_RNA (1)...(19): siRNA sense strand
caccggcacuuuacagaga

SEQ ID NO: 1149108 - RNA, 19 nt, Homo sapiens
  misc_RNA (1)...(19): siRNA sense strand
gcccuacacuuacaacaag

SEQ ID NO: 1149109 - RNA, 19 nt, Homo sapiens
  misc_RNA (1)...(19): siRNA sense strand
uggcagaaauugugaagca

SEQ ID NO: 1149110 - RNA, 19 nt, Homo sapiens
  misc_RNA (1)...(19): siRNA sense strand
ugcaaacuccuaagagaua

SEQ ID NO: 1149111 - RNA, 19 nt, Homo sapiens
  misc_RNA (1)...(19): siRNA sense strand
ggaagcuccugaaggucaa

SEQ ID NO: 1149112 - RNA, 19 nt, Homo sapiens
  misc_RNA (1)...(19): siRNA sense strand
aaugcaaacuccuaagaga

SEQ ID NO: 1149113 - RNA, 19 nt, Homo sapiens
  misc_RNA (1)...(19): siRNA sense strand
gagccgaggauuccaaugu

SEQ ID NO: 1149114 - RNA, 19 nt, Homo sapiens
  misc_RNA (1)...(19): siRNA sense strand
ggagagcgacauggacaaa

SEQ ID NO: 1149115 - RNA, 19 nt, Homo sapiens
  misc_RNA (1)...(19): siRNA sense strand
caaaccacgucccacgaau

SEQ ID NO: 1149116 - RNA, 19 nt, Homo sapiens
  misc_RNA (1)...(19): siRNA sense strand
gagagaaugaagaugagaa

SEQ ID NO: 1149117 - RNA, 19 nt, Homo sapiens
  misc_RNA (1)...(19): siRNA sense strand
uggauucacagauaaagua

SEQ ID NO: 1149118 - RNA, 19 nt, Homo sapiens
  misc_RNA (1)...(19): siRNA sense strand
gagaaacugaaugaaguaa

SEQ ID NO: 1149119 - RNA, 19 nt, Homo sapiens
  misc_RNA (1)...(19): siRNA sense strand
gagguacgucugcacauga

SEQ ID NO: 1149120 - RNA, 19 nt, Homo sapiens
  misc_RNA (1)...(19): siRNA sense strand
ggaaguauaaccgggaaug

SEQ ID NO: 1149121 - RNA, 19 nt, Homo sapiens
  misc_RNA (1)...(19): siRNA sense strand
ugagaaacugaaugaagua

SEQ ID NO: 1149122 - RNA, 19 nt, Homo sapiens
  misc_RNA (1)...(19): siRNA sense strand
ccagugaaguugugugacu

SEQ ID NO: 1149123 - RNA, 19 nt, Homo sapiens
  misc_RNA (1)...(19): siRNA sense strand
aagcaagccagccaaguaa

SEQ ID NO: 1149124 - RNA, 19 nt, Homo sapiens
  misc_RNA (1)...(19): siRNA sense strand
gccgaggauuccaauguug

SEQ ID NO: 1149125 - RNA, 19 nt, Homo sapiens
  misc_RNA (1)...(19): siRNA sense strand
cugcucagcugaugaugga

SEQ ID NO: 1149126 - RNA, 19 nt, Homo sapiens
  misc_RNA (1)...(19): siRNA sense strand
acaaagccaucaaggaaac

SEQ ID NO: 1149127 - RNA, 19 nt, Homo sapiens
  misc_RNA (1)...(19): siRNA sense strand
gcaaacuccuaagagauac

SEQ ID NO: 1149128 - RNA, 19 nt, Homo sapiens
  misc_RNA (1)...(19): siRNA sense strand
aagaugagaaacugaauga

SEQ ID NO: 1149129 - RNA, 19 nt, Homo sapiens
  misc_RNA (1)...(19): siRNA sense strand
aaggauaugcgaagaaaga

SEQ ID NO: 1149130 - RNA, 19 nt, Homo sapiens
  misc_RNA (1)...(19): siRNA sense strand
ccaaaggauaugcgaagaa

SEQ ID NO: 1149131 - RNA, 19 nt, Homo sapiens
  misc_RNA (1)...(19): siRNA sense strand
guacuggaggcgcaaagaa

SEQ ID NO: 1149132 - RNA, 19 nt, Homo sapiens
  misc_RNA (1)...(19): siRNA sense strand
guucaccccuuauuaugua

SEQ ID NO: 1149133 - RNA, 19 nt, Homo sapiens
  misc_RNA (1)...(19): siRNA sense strand
gcaagccagccaaguaaca

SEQ ID NO: 1149134 - RNA, 19 nt, Homo sapiens
  misc_RNA (1)...(19): siRNA sense strand
gaagaguggagucagaucu

SEQ ID NO: 1149135 - RNA, 19 nt, Homo sapiens
  misc_RNA (1)...(19): siRNA sense strand
ggacaaggcagugguugca

SEQ ID NO: 1149136 - RNA, 19 nt, Homo sapiens
  misc_RNA (1)...(19): siRNA sense strand
gauaaugugcugccuucug

SEQ ID NO: 1149137 - RNA, 19 nt, Homo sapiens
  misc_RNA (1)...(19): siRNA sense strand
ggucaaaccggaggagaga

SEQ ID NO: 1149138 - RNA, 19 nt, Homo sapiens
  misc_RNA (1)...(19): siRNA sense strand
agagauggccaaagauguu

SEQ ID NO: 1149139 - RNA, 19 nt, Homo sapiens
  misc_RNA (1)...(19): siRNA sense strand
ccacacacccaaacauagu

SEQ ID NO: 1149140 - RNA, 19 nt, Homo sapiens
  misc_RNA (1)...(19): siRNA sense strand
gaaugcaaacuccuaagag

SEQ ID NO: 1149141 - RNA, 19 nt, Homo sapiens
  misc_RNA (1)...(19): siRNA sense strand
ugagguacgucugcacaug

SEQ ID NO: 1149142 - RNA, 19 nt, Homo sapiens
  misc_RNA (1)...(19): siRNA sense strand
gacuaaaacuggcagaaau

SEQ ID NO: 1149143 - RNA, 19 nt, Homo sapiens
  misc_RNA (1)...(19): siRNA sense strand
augagaaacugaaugaagu

SEQ ID NO: 1149144 - RNA, 19 nt, Homo sapiens
  misc_RNA (1)...(19): siRNA sense strand
gaugugauugcucagugua

SEQ ID NO: 1149145 - RNA, 19 nt, Homo sapiens
  misc_RNA (1)...(19): siRNA sense strand
gagaauggagccgaggauu

SEQ ID NO: 1149146 - RNA, 19 nt, Homo sapiens
  misc_RNA (1)...(19): siRNA sense strand
aaacaccacagccggacua

SEQ ID NO: 1149147 - RNA, 19 nt, Homo sapiens
  misc_RNA (1)...(19): siRNA sense strand
gagagcuauuucacagaau

SEQ ID NO: 1149148 - RNA, 19 nt, Homo sapiens
  misc_RNA (1)...(19): siRNA sense strand
gucguggauucacagauaa

SEQ ID NO: 1149149 - RNA, 19 nt, Homo sapiens
  misc_RNA (1)...(19): siRNA sense strand
ucagagauggccaaagaug

SEQ ID NO: 1149150 - RNA, 19 nt, Homo sapiens
  misc_RNA (1)...(19): siRNA sense strand
caaguaacaaagcagauag

SEQ ID NO: 1149151 - RNA, 19 nt, Homo sapiens
  misc_RNA (1)...(19): siRNA sense strand
gaucaugacaggcaguuuu

SEQ ID NO: 1149152 - RNA, 19 nt, Homo sapiens
  misc_RNA (1)...(19): siRNA sense strand
aaggagaaaucuggcauca

SEQ ID NO: 1149153 - RNA, 19 nt, Homo sapiens
  misc_RNA (1)...(19): siRNA sense strand
guugugugacuuuggauuu

SEQ ID NO: 1149154 - RNA, 19 nt, Homo sapiens
  misc_RNA (1)...(19): siRNA sense strand
guuaaacauugcgcacaga

SEQ ID NO: 1149155 - RNA, 19 nt, Homo sapiens
  misc_RNA (1)...(19): siRNA sense strand
gccggacuaucccaaagga

SEQ ID NO: 1149156 - RNA, 19 nt, Homo sapiens
  misc_RNA (1)...(19): siRNA sense strand
ugugauugcucaguguauu

SEQ ID NO: 1149157 - RNA, 19 nt, Homo sapiens
  misc_RNA (1)...(19): siRNA sense strand
ggcagugguugcaggaauc

SEQ ID NO: 1149158 - RNA, 19 nt, Homo sapiens
  misc_RNA (1)...(19): siRNA sense strand
gaccaccccuggcucaauu

SEQ ID NO: 1149159 - RNA, 19 nt, Homo sapiens
  misc_RNA (1)...(19): siRNA sense strand
gcgaagaaagaucaugaca

SEQ ID NO: 1149160 - RNA, 19 nt, Homo sapiens
  misc_RNA (1)...(19): siRNA sense strand
gagucuguguaaagaaauc

SEQ ID NO: 1149161 - RNA, 19 nt, Homo sapiens
  misc_RNA (1)...(19): siRNA sense strand
aaacuggcagaaauuguga

SEQ ID NO: 1149162 - RNA, 19 nt, Homo sapiens
  misc_RNA (1)...(19): siRNA sense strand
agauaaaguagaucgacua

SEQ ID NO: 1149163 - RNA, 19 nt, Homo sapiens
  misc_RNA (1)...(19): siRNA sense strand
agagaaugaagaugagaaa

SEQ ID NO: 1149164 - RNA, 19 nt, Homo sapiens
  misc_RNA (1)...(19): siRNA sense strand
ugcuaacaguguccaguuu

SEQ ID NO: 1149165 - RNA, 19 nt, Homo sapiens
  misc_RNA (1)...(19): siRNA sense strand
guauaaccgggaaugcaaa

SEQ ID NO: 1149166 - RNA, 19 nt, Homo sapiens
  misc_RNA (1)...(19): siRNA sense strand
ugccacacacccaaacaua

SEQ ID NO: 1149167 - RNA, 19 nt, Homo sapiens
  misc_RNA (1)...(19): siRNA sense strand
gagauggccaaagauguug

SEQ ID NO: 1149168 - RNA, 19 nt, Homo sapiens
  misc_RNA (1)...(19): siRNA sense strand
gaauuagugguccaguuag

SEQ ID NO: 1149169 - RNA, 19 nt, Homo sapiens
  misc_RNA (1)...(19): siRNA sense strand
gcuaacaguguccaguuuc

SEQ ID NO: 1149170 - RNA, 19 nt, Homo sapiens
  misc_RNA (1)...(19): siRNA sense strand
ccaacuacaucgacauuua

SEQ ID NO: 1149171 - RNA, 19 nt, Homo sapiens
  misc_RNA (1)...(19): siRNA sense strand
uuggaaaccuggaagauua

SEQ ID NO: 1149172 - RNA, 19 nt, Homo sapiens
  misc_RNA (1)...(19): siRNA sense strand
ugaaauggcuccagcaaca

SEQ ID NO: 1149173 - RNA, 19 nt, Homo sapiens
  misc_RNA (1)...(19): siRNA sense strand
ggacggcgaugucacagau

SEQ ID NO: 1149174 - RNA, 19 nt, Homo sapiens
  misc_RNA (1)...(19): siRNA sense strand
gaagcaaacagccaguuaa

SEQ ID NO: 1149175 - RNA, 19 nt, Homo sapiens
  misc_RNA (1)...(19): siRNA sense strand
gaacggcaaugauuaugac

SEQ ID NO: 1149176 - RNA, 19 nt, Homo sapiens
  misc_RNA (1)...(19): siRNA sense strand
gcgagcgacuggaaaguga

SEQ ID NO: 1149177 - RNA, 19 nt, Homo sapiens
  misc_RNA (1)...(19): siRNA sense strand
ccucacaccuuccucagaa

SEQ ID NO: 1149178 - RNA, 19 nt, Homo sapiens
  misc_RNA (1)...(19): siRNA sense strand
gauaugaugccagcaauga

SEQ ID NO: 1149179 - RNA, 19 nt, Homo sapiens
  misc_RNA (1)...(19): siRNA sense strand
ugacccaucuccacgauau

SEQ ID NO: 1149180 - RNA, 19 nt, Homo sapiens
  misc_RNA (1)...(19): siRNA sense strand
caacaggaagugaaacgaa

SEQ ID NO: 1149181 - RNA, 19 nt, Homo sapiens
  misc_RNA (1)...(19): siRNA sense strand
gaaagcgagcgacuggaaa

SEQ ID NO: 1149182 - RNA, 19 nt, Homo sapiens
  misc_RNA (1)...(19): siRNA sense strand
gcaaacagccaguuaaccu

SEQ ID NO: 1149183 - RNA, 19 nt, Homo sapiens
  misc_RNA (1)...(19): siRNA sense strand
agagacaggugcgaaguga

SEQ ID NO: 1149184 - RNA, 19 nt, Homo sapiens
  misc_RNA (1)...(19): siRNA sense strand
gacgugaacggcaaugauu

SEQ ID NO: 1149185 - RNA, 19 nt, Homo sapiens
  misc_RNA (1)...(19): siRNA sense strand
gaugauggcauagagagaa

SEQ ID NO: 1149186 - RNA, 19 nt, Homo sapiens
  misc_RNA (1)...(19): siRNA sense strand
cagauguggucgaggcaaa

SEQ ID NO: 1149187 - RNA, 19 nt, Homo sapiens
  misc_RNA (1)...(19): siRNA sense strand
agaagcaaacagccaguua

SEQ ID NO: 1149188 - RNA, 19 nt, Homo sapiens
  misc_RNA (1)...(19): siRNA sense strand
caaagucgcugggcaucag

SEQ ID NO: 1149189 - RNA, 19 nt, Homo sapiens
  misc_RNA (1)...(19): siRNA sense strand
gaaacgaagggugaagaga

SEQ ID NO: 1149190 - RNA, 19 nt, Homo sapiens
  misc_RNA (1)...(19): siRNA sense strand
caucagacccaacuacauc

SEQ ID NO: 1149191 - RNA, 19 nt, Homo sapiens
  misc_RNA (1)...(19): siRNA sense strand
ugaaagcgagcgacuggaa

SEQ ID NO: 1149192 - RNA, 19 nt, Homo sapiens
  misc_RNA (1)...(19): siRNA sense strand
gaagagacaggugcgaagu

SEQ ID NO: 1149193 - RNA, 19 nt, Homo sapiens
  misc_RNA (1)...(19): siRNA sense strand
caucaucgccuuggcucua

SEQ ID NO: 1149194 - RNA, 19 nt, Homo sapiens
  misc_RNA (1)...(19): siRNA sense strand
ccuggaagauuacuaccau

SEQ ID NO: 1149195 - RNA, 19 nt, Homo sapiens
  misc_RNA (1)...(19): siRNA sense strand
uuucgaguauggcauuaaa

SEQ ID NO: 1149196 - RNA, 19 nt, Homo sapiens
  misc_RNA (1)...(19): siRNA sense strand
uaugaugccagcaaugaaa

SEQ ID NO: 1149197 - RNA, 19 nt, Homo sapiens
  misc_RNA (1)...(19): siRNA sense strand
gaaaccuggaagauuacua

SEQ ID NO: 1149198 - RNA, 19 nt, Homo sapiens
  misc_RNA (1)...(19): siRNA sense strand
cgccuuggcucuagaagca

SEQ ID NO: 1149199 - RNA, 19 nt, Homo sapiens
  misc_RNA (1)...(19): siRNA sense strand
gcaguggggccuuuuauga

SEQ ID NO: 1149200 - RNA, 19 nt, Homo sapiens
  misc_RNA (1)...(19): siRNA sense strand
uggaagauuacuaccauuu

SEQ ID NO: 1149201 - RNA, 19 nt, Homo sapiens
  misc_RNA (1)...(19): siRNA sense strand
cagcaaacaauuccuacug

SEQ ID NO: 1149202 - RNA, 19 nt, Homo sapiens
  misc_RNA (1)...(19): siRNA sense strand
cagcagcgccaccgagaau

SEQ ID NO: 1149203 - RNA, 19 nt, Homo sapiens
  misc_RNA (1)...(19): siRNA sense strand
ugaacggcaaugauuauga

SEQ ID NO: 1149204 - RNA, 19 nt, Homo sapiens
  misc_RNA (1)...(19): siRNA sense strand
caacuacaucgacauuuac

SEQ ID NO: 1149205 - RNA, 19 nt, Homo sapiens
  misc_RNA (1)...(19): siRNA sense strand
aaacacggcacucguugug

SEQ ID NO: 1149206 - RNA, 19 nt, Homo sapiens
  misc_RNA (1)...(19): siRNA sense strand
ggaagauuacuaccauuuu

SEQ ID NO: 1149207 - RNA, 19 nt, Homo sapiens
  misc_RNA (1)...(19): siRNA sense strand
caacuugggccagauugga

SEQ ID NO: 1149208 - RNA, 19 nt, Homo sapiens
  misc_RNA (1)...(19): siRNA sense strand
gaucugcgucagcgcugua

SEQ ID NO: 1149209 - RNA, 19 nt, Homo sapiens
  misc_RNA (1)...(19): siRNA sense strand
cgcaggcccuuuacuucaa

SEQ ID NO: 1149210 - RNA, 19 nt, Homo sapiens
  misc_RNA (1)...(19): siRNA sense strand
ccaacagcaucuacaccau

SEQ ID NO: 1149211 - RNA, 19 nt, Homo sapiens
  misc_RNA (1)...(19): siRNA sense strand
cuacaucgacauuuacagu

SEQ ID NO: 1149212 - RNA, 19 nt, Homo sapiens
  misc_RNA (1)...(19): siRNA sense strand
ccagcaacaggaagugaaa

SEQ ID NO: 1149213 - RNA, 19 nt, Homo sapiens
  misc_RNA (1)...(19): siRNA sense strand
gcuuucgaguauggcauua

SEQ ID NO: 1149214 - RNA, 19 nt, Homo sapiens
  misc_RNA (1)...(19): siRNA sense strand
aauaaacacggcacucguu

SEQ ID NO: 1149215 - RNA, 19 nt, Homo sapiens
  misc_RNA (1)...(19): siRNA sense strand
caaugauuaugacccaucu

SEQ ID NO: 1149216 - RNA, 19 nt, Homo sapiens
  misc_RNA (1)...(19): siRNA sense strand
caacaugugguaccugcau

SEQ ID NO: 1149217 - RNA, 19 nt, Homo sapiens
  misc_RNA (1)...(19): siRNA sense strand
gcaaagucgcugggcauca

SEQ ID NO: 1149218 - RNA, 19 nt, Homo sapiens
  misc_RNA (1)...(19): siRNA sense strand
ggugaaauggcuccagcaa

SEQ ID NO: 1149219 - RNA, 19 nt, Homo sapiens
  misc_RNA (1)...(19): siRNA sense strand
caaacaauuccuacugcau

SEQ ID NO: 1149220 - RNA, 19 nt, Homo sapiens
  misc_RNA (1)...(19): siRNA sense strand
uaucacagcaaaaccuuua

SEQ ID NO: 1149221 - RNA, 19 nt, Homo sapiens
  misc_RNA (1)...(19): siRNA sense strand
aacgaagggugaagagaca

SEQ ID NO: 1149222 - RNA, 19 nt, Homo sapiens
  misc_RNA (1)...(19): siRNA sense strand
gcaucagacccaacuacau

SEQ ID NO: 1149223 - RNA, 19 nt, Homo sapiens
  misc_RNA (1)...(19): siRNA sense strand
guacaaugccaaaauagga

SEQ ID NO: 1149224 - RNA, 19 nt, Homo sapiens
  misc_RNA (1)...(19): siRNA sense strand
gcaggcccuuuacuucaac

SEQ ID NO: 1149225 - RNA, 19 nt, Homo sapiens
  misc_RNA (1)...(19): siRNA sense strand
ccgcaggcccuuuacuuca

SEQ ID NO: 1149226 - RNA, 19 nt, Homo sapiens
  misc_RNA (1)...(19): siRNA sense strand
cgacgugaacggcaaugau

SEQ ID NO: 1149227 - RNA, 19 nt, Homo sapiens
  misc_RNA (1)...(19): siRNA sense strand
caccgagaauggcuacaag

SEQ ID NO: 1149228 - RNA, 19 nt, Homo sapiens
  misc_RNA (1)...(19): siRNA sense strand
cgugaacggcaaugauuau

SEQ ID NO: 1149229 - RNA, 19 nt, Homo sapiens
  misc_RNA (1)...(19): siRNA sense strand
gugacccgcaggcccuuua

SEQ ID NO: 1149230 - RNA, 19 nt, Homo sapiens
  misc_RNA (1)...(19): siRNA sense strand
ccuuggcucuagaagcaaa

SEQ ID NO: 1149231 - RNA, 19 nt, Homo sapiens
  misc_RNA (1)...(19): siRNA sense strand
gcaacaggaagugaaacga

SEQ ID NO: 1149232 - RNA, 19 nt, Homo sapiens
  misc_RNA (1)...(19): siRNA sense strand
ugcgauggcuacaccaaca

SEQ ID NO: 1149233 - RNA, 19 nt, Homo sapiens
  misc_RNA (1)...(19): siRNA sense strand
ccaccgagaauggcuacaa

SEQ ID NO: 1149234 - RNA, 19 nt, Homo sapiens
  misc_RNA (1)...(19): siRNA sense strand
ccaacuacaucgacauuua

SEQ ID NO: 1149235 - RNA, 19 nt, Homo sapiens
  misc_RNA (1)...(19): siRNA sense strand
uuggaaaccuggaagauua

SEQ ID NO: 1149236 - RNA, 19 nt, Homo sapiens
  misc_RNA (1)...(19): siRNA sense strand
ugaaauggcuccagcaaca

SEQ ID NO: 1149237 - RNA, 19 nt, Homo sapiens
  misc_RNA (1)...(19): siRNA sense strand
ggacggcgaugucacagau

SEQ ID NO: 1149238 - RNA, 19 nt, Homo sapiens
  misc_RNA (1)...(19): siRNA sense strand
gaagcaaacagccaguuaa

SEQ ID NO: 1149239 - RNA, 19 nt, Homo sapiens
  misc_RNA (1)...(19): siRNA sense strand
gaacggcaaugauuaugac

SEQ ID NO: 1149240 - RNA, 19 nt, Homo sapiens
  misc_RNA (1)...(19): siRNA sense strand
gcgagcgacuggaaaguga

SEQ ID NO: 1149241 - RNA, 19 nt, Homo sapiens
  misc_RNA (1)...(19): siRNA sense strand
ccucacaccuuccucagaa

SEQ ID NO: 1149242 - RNA, 19 nt, Homo sapiens
  misc_RNA (1)...(19): siRNA sense strand
gauaugaugccagcaauga

SEQ ID NO: 1149243 - RNA, 19 nt, Homo sapiens
  misc_RNA (1)...(19): siRNA sense strand
ugacccaucuccacgauau

SEQ ID NO: 1149244 - RNA, 19 nt, Homo sapiens
  misc_RNA (1)...(19): siRNA sense strand
caacaggaagugaaacgaa

SEQ ID NO: 1149245 - RNA, 19 nt, Homo sapiens
  misc_RNA (1)...(19): siRNA sense strand
gaaagcgagcgacuggaaa

SEQ ID NO: 1149246 - RNA, 19 nt, Homo sapiens
  misc_RNA (1)...(19): siRNA sense strand
gcaaacagccaguuaaccu

SEQ ID NO: 1149247 - RNA, 19 nt, Homo sapiens
  misc_RNA (1)...(19): siRNA sense strand
agagacaggugcgaaguga

SEQ ID NO: 1149248 - RNA, 19 nt, Homo sapiens
  misc_RNA (1)...(19): siRNA sense strand
gacgugaacggcaaugauu

SEQ ID NO: 1149249 - RNA, 19 nt, Homo sapiens
  misc_RNA (1)...(19): siRNA sense strand
gaugauggcauagagagaa

SEQ ID NO: 1149250 - RNA, 19 nt, Homo sapiens
  misc_RNA (1)...(19): siRNA sense strand
cagauguggucgaggcaaa

SEQ ID NO: 1149251 - RNA, 19 nt, Homo sapiens
  misc_RNA (1)...(19): siRNA sense strand
agaagcaaacagccaguua

SEQ ID NO: 1149252 - RNA, 19 nt, Homo sapiens
  misc_RNA (1)...(19): siRNA sense strand
caaagucgcugggcaucag

SEQ ID NO: 1149253 - RNA, 19 nt, Homo sapiens
  misc_RNA (1)...(19): siRNA sense strand
gaaacgaagggugaagaga

SEQ ID NO: 1149254 - RNA, 19 nt, Homo sapiens
  misc_RNA (1)...(19): siRNA sense strand
caucagacccaacuacauc

SEQ ID NO: 1149255 - RNA, 19 nt, Homo sapiens
  misc_RNA (1)...(19): siRNA sense strand
ugaaagcgagcgacuggaa

SEQ ID NO: 1149256 - RNA, 19 nt, Homo sapiens
  misc_RNA (1)...(19): siRNA sense strand
gaagagacaggugcgaagu

SEQ ID NO: 1149257 - RNA, 19 nt, Homo sapiens
  misc_RNA (1)...(19): siRNA sense strand
caucaucgccuuggcucua

SEQ ID NO: 1149258 - RNA, 19 nt, Homo sapiens
  misc_RNA (1)...(19): siRNA sense strand
ccuggaagauuacuaccau

SEQ ID NO: 1149259 - RNA, 19 nt, Homo sapiens
  misc_RNA (1)...(19): siRNA sense strand
uuucgaguauggcauuaaa

SEQ ID NO: 1149260 - RNA, 19 nt, Homo sapiens
  misc_RNA (1)...(19): siRNA sense strand
uaugaugccagcaaugaaa

SEQ ID NO: 1149261 - RNA, 19 nt, Homo sapiens
  misc_RNA (1)...(19): siRNA sense strand
gaaaccuggaagauuacua

SEQ ID NO: 1149262 - RNA, 19 nt, Homo sapiens
  misc_RNA (1)...(19): siRNA sense strand
cgccuuggcucuagaagca

SEQ ID NO: 1149263 - RNA, 19 nt, Homo sapiens
  misc_RNA (1)...(19): siRNA sense strand
gcaguggggccuuuuauga

SEQ ID NO: 1149264 - RNA, 19 nt, Homo sapiens
  misc_RNA (1)...(19): siRNA sense strand
uggaagauuacuaccauuu

SEQ ID NO: 1149265 - RNA, 19 nt, Homo sapiens
  misc_RNA (1)...(19): siRNA sense strand
cagcaaacaauuccuacug

SEQ ID NO: 1149266 - RNA, 19 nt, Homo sapiens
  misc_RNA (1)...(19): siRNA sense strand
cagcagcgccaccgagaau

SEQ ID NO: 1149267 - RNA, 19 nt, Homo sapiens
  misc_RNA (1)...(19): siRNA sense strand
ugaacggcaaugauuauga

SEQ ID NO: 1149268 - RNA, 19 nt, Homo sapiens
  misc_RNA (1)...(19): siRNA sense strand
caacuacaucgacauuuac

SEQ ID NO: 1149269 - RNA, 19 nt, Homo sapiens
  misc_RNA (1)...(19): siRNA sense strand
aaacacggcacucguugug

SEQ ID NO: 1149270 - RNA, 19 nt, Homo sapiens
  misc_RNA (1)...(19): siRNA sense strand
ggaagauuacuaccauuuu

SEQ ID NO: 1149271 - RNA, 19 nt, Homo sapiens
  misc_RNA (1)...(19): siRNA sense strand
caacuugggccagauugga

SEQ ID NO: 1149272 - RNA, 19 nt, Homo sapiens
  misc_RNA (1)...(19): siRNA sense strand
gaucugcgucagcgcugua

SEQ ID NO: 1149273 - RNA, 19 nt, Homo sapiens
  misc_RNA (1)...(19): siRNA sense strand
cgcaggcccuuuacuucaa

SEQ ID NO: 1149274 - RNA, 19 nt, Homo sapiens
  misc_RNA (1)...(19): siRNA sense strand
ccaacagcaucuacaccau

SEQ ID NO: 1149275 - RNA, 19 nt, Homo sapiens
  misc_RNA (1)...(19): siRNA sense strand
cuacaucgacauuuacagu

SEQ ID NO: 1149276 - RNA, 19 nt, Homo sapiens
  misc_RNA (1)...(19): siRNA sense strand
ccagcaacaggaagugaaa

SEQ ID NO: 1149277 - RNA, 19 nt, Homo sapiens
  misc_RNA (1)...(19): siRNA sense strand
gcuuucgaguauggcauua

SEQ ID NO: 1149278 - RNA, 19 nt, Homo sapiens
  misc_RNA (1)...(19): siRNA sense strand
aauaaacacggcacucguu

SEQ ID NO: 1149279 - RNA, 19 nt, Homo sapiens
  misc_RNA (1)...(19): siRNA sense strand
caaugauuaugacccaucu

SEQ ID NO: 1149280 - RNA, 19 nt, Homo sapiens
  misc_RNA (1)...(19): siRNA sense strand
caacaugugguaccugcau

SEQ ID NO: 1149281 - RNA, 19 nt, Homo sapiens
  misc_RNA (1)...(19): siRNA sense strand
gcaaagucgcugggcauca

SEQ ID NO: 1149282 - RNA, 19 nt, Homo sapiens
  misc_RNA (1)...(19): siRNA sense strand
ggugaaauggcuccagcaa

SEQ ID NO: 1149283 - RNA, 19 nt, Homo sapiens
  misc_RNA (1)...(19): siRNA sense strand
caaacaauuccuacugcau

SEQ ID NO: 1149284 - RNA, 19 nt, Homo sapiens
  misc_RNA (1)...(19): siRNA sense strand
uaucacagcaaaaccuuua

SEQ ID NO: 1149285 - RNA, 19 nt, Homo sapiens
  misc_RNA (1)...(19): siRNA sense strand
aacgaagggugaagagaca

SEQ ID NO: 1149286 - RNA, 19 nt, Homo sapiens
  misc_RNA (1)...(19): siRNA sense strand
gcaucagacccaacuacau

SEQ ID NO: 1149287 - RNA, 19 nt, Homo sapiens
  misc_RNA (1)...(19): siRNA sense strand
guacaaugccaaaauagga

SEQ ID NO: 1149288 - RNA, 19 nt, Homo sapiens
  misc_RNA (1)...(19): siRNA sense strand
gcaggcccuuuacuucaac

SEQ ID NO: 1149289 - RNA, 19 nt, Homo sapiens
  misc_RNA (1)...(19): siRNA sense strand
ccgcaggcccuuuacuuca

SEQ ID NO: 1149290 - RNA, 19 nt, Homo sapiens
  misc_RNA (1)...(19): siRNA sense strand
cgacgugaacggcaaugau

SEQ ID NO: 1149291 - RNA, 19 nt, Homo sapiens
  misc_RNA (1)...(19): siRNA sense strand
caccgagaauggcuacaag

SEQ ID NO: 1149292 - RNA, 19 nt, Homo sapiens
  misc_RNA (1)...(19): siRNA sense strand
cgugaacggcaaugauuau

SEQ ID NO: 1149293 - RNA, 19 nt, Homo sapiens
  misc_RNA (1)...(19): siRNA sense strand
gugacccgcaggcccuuua

SEQ ID NO: 1149294 - RNA, 19 nt, Homo sapiens
  misc_RNA (1)...(19): siRNA sense strand
ccuuggcucuagaagcaaa

SEQ ID NO: 1149295 - RNA, 19 nt, Homo sapiens
  misc_RNA (1)...(19): siRNA sense strand
gcaacaggaagugaaacga

SEQ ID NO: 1149296 - RNA, 19 nt, Homo sapiens
  misc_RNA (1)...(19): siRNA sense strand
ugcgauggcuacaccaaca

SEQ ID NO: 1149297 - RNA, 19 nt, Homo sapiens
  misc_RNA (1)...(19): siRNA sense strand
ccaccgagaauggcuacaa

SEQ ID NO: 1149298 - RNA, 19 nt, Homo sapiens
  misc_RNA (1)...(19): siRNA sense strand
ccaacuacaucgacauuua

SEQ ID NO: 1149299 - RNA, 19 nt, Homo sapiens
  misc_RNA (1)...(19): siRNA sense strand
uuggaaaccuggaagauua

SEQ ID NO: 1149300 - RNA, 19 nt, Homo sapiens
  misc_RNA (1)...(19): siRNA sense strand
ugaaauggcuccagcaaca

SEQ ID NO: 1149301 - RNA, 19 nt, Homo sapiens
  misc_RNA (1)...(19): siRNA sense strand
ggacggcgaugucacagau

SEQ ID NO: 1149302 - RNA, 19 nt, Homo sapiens
  misc_RNA (1)...(19): siRNA sense strand
gaagcaaacagccaguuaa

SEQ ID NO: 1149303 - RNA, 19 nt, Homo sapiens
  misc_RNA (1)...(19): siRNA sense strand
gaacggcaaugauuaugac

SEQ ID NO: 1149304 - RNA, 19 nt, Homo sapiens
  misc_RNA (1)...(19): siRNA sense strand
gcgagcgacuggaaaguga

SEQ ID NO: 1149305 - RNA, 19 nt, Homo sapiens
  misc_RNA (1)...(19): siRNA sense strand
ccucacaccuuccucagaa

SEQ ID NO: 1149306 - RNA, 19 nt, Homo sapiens
  misc_RNA (1)...(19): siRNA sense strand
gauaugaugccagcaauga

SEQ ID NO: 1149307 - RNA, 19 nt, Homo sapiens
  misc_RNA (1)...(19): siRNA sense strand
ugacccaucuccacgauau

SEQ ID NO: 1149308 - RNA, 19 nt, Homo sapiens
  misc_RNA (1)...(19): siRNA sense strand
caacaggaagugaaacgaa

SEQ ID NO: 1149309 - RNA, 19 nt, Homo sapiens
  misc_RNA (1)...(19): siRNA sense strand
gaaagcgagcgacuggaaa

SEQ ID NO: 1149310 - RNA, 19 nt, Homo sapiens
  misc_RNA (1)...(19): siRNA sense strand
gcaaacagccaguuaaccu

SEQ ID NO: 1149311 - RNA, 19 nt, Homo sapiens
  misc_RNA (1)...(19): siRNA sense strand
agagacaggugcgaaguga

SEQ ID NO: 1149312 - RNA, 19 nt, Homo sapiens
  misc_RNA (1)...(19): siRNA sense strand
gacgugaacggcaaugauu

SEQ ID NO: 1149313 - RNA, 19 nt, Homo sapiens
  misc_RNA (1)...(19): siRNA sense strand
gaugauggcauagagagaa

SEQ ID NO: 1149314 - RNA, 19 nt, Homo sapiens
  misc_RNA (1)...(19): siRNA sense strand
cagauguggucgaggcaaa

SEQ ID NO: 1149315 - RNA, 19 nt, Homo sapiens
  misc_RNA (1)...(19): siRNA sense strand
agaagcaaacagccaguua

SEQ ID NO: 1149316 - RNA, 19 nt, Homo sapiens
  misc_RNA (1)...(19): siRNA sense strand
caaagucgcugggcaucag

SEQ ID NO: 1149317 - RNA, 19 nt, Homo sapiens
  misc_RNA (1)...(19): siRNA sense strand
gaaacgaagggugaagaga

SEQ ID NO: 1149318 - RNA, 19 nt, Homo sapiens
  misc_RNA (1)...(19): siRNA sense strand
caucagacccaacuacauc

SEQ ID NO: 1149319 - RNA, 19 nt, Homo sapiens
  misc_RNA (1)...(19): siRNA sense strand
ugaaagcgagcgacuggaa

SEQ ID NO: 1149320 - RNA, 19 nt, Homo sapiens
  misc_RNA (1)...(19): siRNA sense strand
gaagagacaggugcgaagu

SEQ ID NO: 1149321 - RNA, 19 nt, Homo sapiens
  misc_RNA (1)...(19): siRNA sense strand
caucaucgccuuggcucua

SEQ ID NO: 1149322 - RNA, 19 nt, Homo sapiens
  misc_RNA (1)...(19): siRNA sense strand
ccuggaagauuacuaccau

SEQ ID NO: 1149323 - RNA, 19 nt, Homo sapiens
  misc_RNA (1)...(19): siRNA sense strand
uuucgaguauggcauuaaa

SEQ ID NO: 1149324 - RNA, 19 nt, Homo sapiens
  misc_RNA (1)...(19): siRNA sense strand
uaugaugccagcaaugaaa

SEQ ID NO: 1149325 - RNA, 19 nt, Homo sapiens
  misc_RNA (1)...(19): siRNA sense strand
gaaaccuggaagauuacua

SEQ ID NO: 1149326 - RNA, 19 nt, Homo sapiens
  misc_RNA (1)...(19): siRNA sense strand
cgccuuggcucuagaagca

SEQ ID NO: 1149327 - RNA, 19 nt, Homo sapiens
  misc_RNA (1)...(19): siRNA sense strand
gcaguggggccuuuuauga

SEQ ID NO: 1149328 - RNA, 19 nt, Homo sapiens
  misc_RNA (1)...(19): siRNA sense strand
uggaagauuacuaccauuu

SEQ ID NO: 1149329 - RNA, 19 nt, Homo sapiens
  misc_RNA (1)...(19): siRNA sense strand
cagcaaacaauuccuacug

SEQ ID NO: 1149330 - RNA, 19 nt, Homo sapiens
  misc_RNA (1)...(19): siRNA sense strand
cagcagcgccaccgagaau

SEQ ID NO: 1149331 - RNA, 19 nt, Homo sapiens
  misc_RNA (1)...(19): siRNA sense strand
ugaacggcaaugauuauga

SEQ ID NO: 1149332 - RNA, 19 nt, Homo sapiens
  misc_RNA (1)...(19): siRNA sense strand
caacuacaucgacauuuac

SEQ ID NO: 1149333 - RNA, 19 nt, Homo sapiens
  misc_RNA (1)...(19): siRNA sense strand
aaacacggcacucguugug

SEQ ID NO: 1149334 - RNA, 19 nt, Homo sapiens
  misc_RNA (1)...(19): siRNA sense strand
ggaagauuacuaccauuuu

SEQ ID NO: 1149335 - RNA, 19 nt, Homo sapiens
  misc_RNA (1)...(19): siRNA sense strand
caacuugggccagauugga

SEQ ID NO: 1149336 - RNA, 19 nt, Homo sapiens
  misc_RNA (1)...(19): siRNA sense strand
gaucugcgucagcgcugua

SEQ ID NO: 1149337 - RNA, 19 nt, Homo sapiens
  misc_RNA (1)...(19): siRNA sense strand
cgcaggcccuuuacuucaa

SEQ ID NO: 1149338 - RNA, 19 nt, Homo sapiens
  misc_RNA (1)...(19): siRNA sense strand
ccaacagcaucuacaccau

SEQ ID NO: 1149339 - RNA, 19 nt, Homo sapiens
  misc_RNA (1)...(19): siRNA sense strand
cuacaucgacauuuacagu

SEQ ID NO: 1149340 - RNA, 19 nt, Homo sapiens
  misc_RNA (1)...(19): siRNA sense strand
ccagcaacaggaagugaaa

SEQ ID NO: 1149341 - RNA, 19 nt, Homo sapiens
  misc_RNA (1)...(19): siRNA sense strand
gcuuucgaguauggcauua

SEQ ID NO: 1149342 - RNA, 19 nt, Homo sapiens
  misc_RNA (1)...(19): siRNA sense strand
aauaaacacggcacucguu

SEQ ID NO: 1149343 - RNA, 19 nt, Homo sapiens
  misc_RNA (1)...(19): siRNA sense strand
caaugauuaugacccaucu

SEQ ID NO: 1149344 - RNA, 19 nt, Homo sapiens
  misc_RNA (1)...(19): siRNA sense strand
caacaugugguaccugcau

SEQ ID NO: 1149345 - RNA, 19 nt, Homo sapiens
  misc_RNA (1)...(19): siRNA sense strand
gcaaagucgcugggcauca

SEQ ID NO: 1149346 - RNA, 19 nt, Homo sapiens
  misc_RNA (1)...(19): siRNA sense strand
ggugaaauggcuccagcaa

SEQ ID NO: 1149347 - RNA, 19 nt, Homo sapiens
  misc_RNA (1)...(19): siRNA sense strand
caaacaauuccuacugcau

SEQ ID NO: 1149348 - RNA, 19 nt, Homo sapiens
  misc_RNA (1)...(19): siRNA sense strand
uaucacagcaaaaccuuua

SEQ ID NO: 1149349 - RNA, 19 nt, Homo sapiens
  misc_RNA (1)...(19): siRNA sense strand
aacgaagggugaagagaca

SEQ ID NO: 1149350 - RNA, 19 nt, Homo sapiens
  misc_RNA (1)...(19): siRNA sense strand
gcaucagacccaacuacau

SEQ ID NO: 1149351 - RNA, 19 nt, Homo sapiens
  misc_RNA (1)...(19): siRNA sense strand
guacaaugccaaaauagga

SEQ ID NO: 1149352 - RNA, 19 nt, Homo sapiens
  misc_RNA (1)...(19): siRNA sense strand
gcaggcccuuuacuucaac

SEQ ID NO: 1149353 - RNA, 19 nt, Homo sapiens
  misc_RNA (1)...(19): siRNA sense strand
ccgcaggcccuuuacuuca

SEQ ID NO: 1149354 - RNA, 19 nt, Homo sapiens
  misc_RNA (1)...(19): siRNA sense strand
cgacgugaacggcaaugau

SEQ ID NO: 1149355 - RNA, 19 nt, Homo sapiens
  misc_RNA (1)...(19): siRNA sense strand
caccgagaauggcuacaag

SEQ ID NO: 1149356 - RNA, 19 nt, Homo sapiens
  misc_RNA (1)...(19): siRNA sense strand
cgugaacggcaaugauuau

SEQ ID NO: 1149357 - RNA, 19 nt, Homo sapiens
  misc_RNA (1)...(19): siRNA sense strand
gugacccgcaggcccuuua

SEQ ID NO: 1149358 - RNA, 19 nt, Homo sapiens
  misc_RNA (1)...(19): siRNA sense strand
ccuuggcucuagaagcaaa

SEQ ID NO: 1149359 - RNA, 19 nt, Homo sapiens
  misc_RNA (1)...(19): siRNA sense strand
gcaacaggaagugaaacga

SEQ ID NO: 1149360 - RNA, 19 nt, Homo sapiens
  misc_RNA (1)...(19): siRNA sense strand
ugcgauggcuacaccaaca

SEQ ID NO: 1149361 - RNA, 19 nt, Homo sapiens
  misc_RNA (1)...(19): siRNA sense strand
ccaccgagaauggcuacaa

SEQ ID NO: 1149362 - RNA, 19 nt, Homo sapiens
  misc_RNA (1)...(19): siRNA sense strand
ccaacuacaucgacauuua

SEQ ID NO: 1149363 - RNA, 19 nt, Homo sapiens
  misc_RNA (1)...(19): siRNA sense strand
uuggaaaccuggaagauua

SEQ ID NO: 1149364 - RNA, 19 nt, Homo sapiens
  misc_RNA (1)...(19): siRNA sense strand
ugaaauggcuccagcaaca

SEQ ID NO: 1149365 - RNA, 19 nt, Homo sapiens
  misc_RNA (1)...(19): siRNA sense strand
ggacggcgaugucacagau

SEQ ID NO: 1149366 - RNA, 19 nt, Homo sapiens
  misc_RNA (1)...(19): siRNA sense strand
gaagcaaacagccaguuaa

SEQ ID NO: 1149367 - RNA, 19 nt, Homo sapiens
  misc_RNA (1)...(19): siRNA sense strand
gaacggcaaugauuaugac

SEQ ID NO: 1149368 - RNA, 19 nt, Homo sapiens
  misc_RNA (1)...(19): siRNA sense strand
gcgagcgacuggaaaguga

SEQ ID NO: 1149369 - RNA, 19 nt, Homo sapiens
  misc_RNA (1)...(19): siRNA sense strand
ccucacaccuuccucagaa

SEQ ID NO: 1149370 - RNA, 19 nt, Homo sapiens
  misc_RNA (1)...(19): siRNA sense strand
gauaugaugccagcaauga

SEQ ID NO: 1149371 - RNA, 19 nt, Homo sapiens
  misc_RNA (1)...(19): siRNA sense strand
ugacccaucuccacgauau

SEQ ID NO: 1149372 - RNA, 19 nt, Homo sapiens
  misc_RNA (1)...(19): siRNA sense strand
caacaggaagugaaacgaa

SEQ ID NO: 1149373 - RNA, 19 nt, Homo sapiens
  misc_RNA (1)...(19): siRNA sense strand
gaaagcgagcgacuggaaa

SEQ ID NO: 1149374 - RNA, 19 nt, Homo sapiens
  misc_RNA (1)...(19): siRNA sense strand
gcaaacagccaguuaaccu

SEQ ID NO: 1149375 - RNA, 19 nt, Homo sapiens
  misc_RNA (1)...(19): siRNA sense strand
agagacaggugcgaaguga

SEQ ID NO: 1149376 - RNA, 19 nt, Homo sapiens
  misc_RNA (1)...(19): siRNA sense strand
gacgugaacggcaaugauu

SEQ ID NO: 1149377 - RNA, 19 nt, Homo sapiens
  misc_RNA (1)...(19): siRNA sense strand
gaugauggcauagagagaa

SEQ ID NO: 1149378 - RNA, 19 nt, Homo sapiens
  misc_RNA (1)...(19): siRNA sense strand
cagauguggucgaggcaaa

SEQ ID NO: 1149379 - RNA, 19 nt, Homo sapiens
  misc_RNA (1)...(19): siRNA sense strand
agaagcaaacagccaguua

SEQ ID NO: 1149380 - RNA, 19 nt, Homo sapiens
  misc_RNA (1)...(19): siRNA sense strand
caaagucgcugggcaucag

SEQ ID NO: 1149381 - RNA, 19 nt, Homo sapiens
  misc_RNA (1)...(19): siRNA sense strand
gaaacgaagggugaagaga

SEQ ID NO: 1149382 - RNA, 19 nt, Homo sapiens
  misc_RNA (1)...(19): siRNA sense strand
caucagacccaacuacauc

SEQ ID NO: 1149383 - RNA, 19 nt, Homo sapiens
  misc_RNA (1)...(19): siRNA sense strand
ugaaagcgagcgacuggaa

SEQ ID NO: 1149384 - RNA, 19 nt, Homo sapiens
  misc_RNA (1)...(19): siRNA sense strand
gaagagacaggugcgaagu

SEQ ID NO: 1149385 - RNA, 19 nt, Homo sapiens
  misc_RNA (1)...(19): siRNA sense strand
caucaucgccuuggcucua

SEQ ID NO: 1149386 - RNA, 19 nt, Homo sapiens
  misc_RNA (1)...(19): siRNA sense strand
ccuggaagauuacuaccau

SEQ ID NO: 1149387 - RNA, 19 nt, Homo sapiens
  misc_RNA (1)...(19): siRNA sense strand
uuucgaguauggcauuaaa

SEQ ID NO: 1149388 - RNA, 19 nt, Homo sapiens
  misc_RNA (1)...(19): siRNA sense strand
uaugaugccagcaaugaaa

SEQ ID NO: 1149389 - RNA, 19 nt, Homo sapiens
  misc_RNA (1)...(19): siRNA sense strand
gaaaccuggaagauuacua

SEQ ID NO: 1149390 - RNA, 19 nt, Homo sapiens
  misc_RNA (1)...(19): siRNA sense strand
cgccuuggcucuagaagca

SEQ ID NO: 1149391 - RNA, 19 nt, Homo sapiens
  misc_RNA (1)...(19): siRNA sense strand
gcaguggggccuuuuauga

SEQ ID NO: 1149392 - RNA, 19 nt, Homo sapiens
  misc_RNA (1)...(19): siRNA sense strand
uggaagauuacuaccauuu

SEQ ID NO: 1149393 - RNA, 19 nt, Homo sapiens
  misc_RNA (1)...(19): siRNA sense strand
cagcaaacaauuccuacug

SEQ ID NO: 1149394 - RNA, 19 nt, Homo sapiens
  misc_RNA (1)...(19): siRNA sense strand
cagcagcgccaccgagaau

SEQ ID NO: 1149395 - RNA, 19 nt, Homo sapiens
  misc_RNA (1)...(19): siRNA sense strand
ugaacggcaaugauuauga

SEQ ID NO: 1149396 - RNA, 19 nt, Homo sapiens
  misc_RNA (1)...(19): siRNA sense strand
caacuacaucgacauuuac

SEQ ID NO: 1149397 - RNA, 19 nt, Homo sapiens
  misc_RNA (1)...(19): siRNA sense strand
aaacacggcacucguugug

SEQ ID NO: 1149398 - RNA, 19 nt, Homo sapiens
  misc_RNA (1)...(19): siRNA sense strand
ggaagauuacuaccauuuu

SEQ ID NO: 1149399 - RNA, 19 nt, Homo sapiens
  misc_RNA (1)...(19): siRNA sense strand
caacuugggccagauugga

SEQ ID NO: 1149400 - RNA, 19 nt, Homo sapiens
  misc_RNA (1)...(19): siRNA sense strand
gaucugcgucagcgcugua

SEQ ID NO: 1149401 - RNA, 19 nt, Homo sapiens
  misc_RNA (1)...(19): siRNA sense strand
cgcaggcccuuuacuucaa

SEQ ID NO: 1149402 - RNA, 19 nt, Homo sapiens
  misc_RNA (1)...(19): siRNA sense strand
ccaacagcaucuacaccau

SEQ ID NO: 1149403 - RNA, 19 nt, Homo sapiens
  misc_RNA (1)...(19): siRNA sense strand
cuacaucgacauuuacagu

SEQ ID NO: 1149404 - RNA, 19 nt, Homo sapiens
  misc_RNA (1)...(19): siRNA sense strand
ccagcaacaggaagugaaa

SEQ ID NO: 1149405 - RNA, 19 nt, Homo sapiens
  misc_RNA (1)...(19): siRNA sense strand
gcuuucgaguauggcauua

SEQ ID NO: 1149406 - RNA, 19 nt, Homo sapiens
  misc_RNA (1)...(19): siRNA sense strand
aauaaacacggcacucguu

SEQ ID NO: 1149407 - RNA, 19 nt, Homo sapiens
  misc_RNA (1)...(19): siRNA sense strand
caaugauuaugacccaucu

SEQ ID NO: 1149408 - RNA, 19 nt, Homo sapiens
  misc_RNA (1)...(19): siRNA sense strand
caacaugugguaccugcau

SEQ ID NO: 1149409 - RNA, 19 nt, Homo sapiens
  misc_RNA (1)...(19): siRNA sense strand
gcaaagucgcugggcauca

SEQ ID NO: 1149410 - RNA, 19 nt, Homo sapiens
  misc_RNA (1)...(19): siRNA sense strand
ggugaaauggcuccagcaa

SEQ ID NO: 1149411 - RNA, 19 nt, Homo sapiens
  misc_RNA (1)...(19): siRNA sense strand
caaacaauuccuacugcau

SEQ ID NO: 1149412 - RNA, 19 nt, Homo sapiens
  misc_RNA (1)...(19): siRNA sense strand
uaucacagcaaaaccuuua

SEQ ID NO: 1149413 - RNA, 19 nt, Homo sapiens
  misc_RNA (1)...(19): siRNA sense strand
aacgaagggugaagagaca

SEQ ID NO: 1149414 - RNA, 19 nt, Homo sapiens
  misc_RNA (1)...(19): siRNA sense strand
gcaucagacccaacuacau

SEQ ID NO: 1149415 - RNA, 19 nt, Homo sapiens
  misc_RNA (1)...(19): siRNA sense strand
guacaaugccaaaauagga

SEQ ID NO: 1149416 - RNA, 19 nt, Homo sapiens
  misc_RNA (1)...(19): siRNA sense strand
gcaggcccuuuacuucaac

SEQ ID NO: 1149417 - RNA, 19 nt, Homo sapiens
  misc_RNA (1)...(19): siRNA sense strand
ccgcaggcccuuuacuuca

SEQ ID NO: 1149418 - RNA, 19 nt, Homo sapiens
  misc_RNA (1)...(19): siRNA sense strand
cgacgugaacggcaaugau

SEQ ID NO: 1149419 - RNA, 19 nt, Homo sapiens
  misc_RNA (1)...(19): siRNA sense strand
caccgagaauggcuacaag

SEQ ID NO: 1149420 - RNA, 19 nt, Homo sapiens
  misc_RNA (1)...(19): siRNA sense strand
cgugaacggcaaugauuau

SEQ ID NO: 1149421 - RNA, 19 nt, Homo sapiens
  misc_RNA (1)...(19): siRNA sense strand
gugacccgcaggcccuuua

SEQ ID NO: 1149422 - RNA, 19 nt, Homo sapiens
  misc_RNA (1)...(19): siRNA sense strand
ccuuggcucuagaagcaaa

SEQ ID NO: 1149423 - RNA, 19 nt, Homo sapiens
  misc_RNA (1)...(19): siRNA sense strand
gcaacaggaagugaaacga

SEQ ID NO: 1149424 - RNA, 19 nt, Homo sapiens
  misc_RNA (1)...(19): siRNA sense strand
ugcgauggcuacaccaaca

SEQ ID NO: 1149425 - RNA, 19 nt, Homo sapiens
  misc_RNA (1)...(19): siRNA sense strand
ccaccgagaauggcuacaa

SEQ ID NO: 1149426 - RNA, 19 nt, Homo sapiens
  misc_RNA (1)...(19): siRNA sense strand
ccaacuacaucgacauuua

SEQ ID NO: 1149427 - RNA, 19 nt, Homo sapiens
  misc_RNA (1)...(19): siRNA sense strand
uuggaaaccuggaagauua

SEQ ID NO: 1149428 - RNA, 19 nt, Homo sapiens
  misc_RNA (1)...(19): siRNA sense strand
ugaaauggcuccagcaaca

SEQ ID NO: 1149429 - RNA, 19 nt, Homo sapiens
  misc_RNA (1)...(19): siRNA sense strand
ggacggcgaugucacagau

SEQ ID NO: 1149430 - RNA, 19 nt, Homo sapiens
  misc_RNA (1)...(19): siRNA sense strand
gaagcaaacagccaguuaa

SEQ ID NO: 1149431 - RNA, 19 nt, Homo sapiens
  misc_RNA (1)...(19): siRNA sense strand
gaacggcaaugauuaugac

SEQ ID NO: 1149432 - RNA, 19 nt, Homo sapiens
  misc_RNA (1)...(19): siRNA sense strand
gcgagcgacuggaaaguga

SEQ ID NO: 1149433 - RNA, 19 nt, Homo sapiens
  misc_RNA (1)...(19): siRNA sense strand
ccucacaccuuccucagaa

SEQ ID NO: 1149434 - RNA, 19 nt, Homo sapiens
  misc_RNA (1)...(19): siRNA sense strand
gauaugaugccagcaauga

SEQ ID NO: 1149435 - RNA, 19 nt, Homo sapiens
  misc_RNA (1)...(19): siRNA sense strand
ugacccaucuccacgauau

SEQ ID NO: 1149436 - RNA, 19 nt, Homo sapiens
  misc_RNA (1)...(19): siRNA sense strand
caacaggaagugaaacgaa

SEQ ID NO: 1149437 - RNA, 19 nt, Homo sapiens
  misc_RNA (1)...(19): siRNA sense strand
gaaagcgagcgacuggaaa

SEQ ID NO: 1149438 - RNA, 19 nt, Homo sapiens
  misc_RNA (1)...(19): siRNA sense strand
gcaaacagccaguuaaccu

SEQ ID NO: 1149439 - RNA, 19 nt, Homo sapiens
  misc_RNA (1)...(19): siRNA sense strand
agagacaggugcgaaguga

SEQ ID NO: 1149440 - RNA, 19 nt, Homo sapiens
  misc_RNA (1)...(19): siRNA sense strand
gacgugaacggcaaugauu

SEQ ID NO: 1149441 - RNA, 19 nt, Homo sapiens
  misc_RNA (1)...(19): siRNA sense strand
gaugauggcauagagagaa

SEQ ID NO: 1149442 - RNA, 19 nt, Homo sapiens
  misc_RNA (1)...(19): siRNA sense strand
cagauguggucgaggcaaa

SEQ ID NO: 1149443 - RNA, 19 nt, Homo sapiens
  misc_RNA (1)...(19): siRNA sense strand
agaagcaaacagccaguua

SEQ ID NO: 1149444 - RNA, 19 nt, Homo sapiens
  misc_RNA (1)...(19): siRNA sense strand
caaagucgcugggcaucag

SEQ ID NO: 1149445 - RNA, 19 nt, Homo sapiens
  misc_RNA (1)...(19): siRNA sense strand
gaaacgaagggugaagaga

SEQ ID NO: 1149446 - RNA, 19 nt, Homo sapiens
  misc_RNA (1)...(19): siRNA sense strand
caucagacccaacuacauc

SEQ ID NO: 1149447 - RNA, 19 nt, Homo sapiens
  misc_RNA (1)...(19): siRNA sense strand
ugaaagcgagcgacuggaa

SEQ ID NO: 1149448 - RNA, 19 nt, Homo sapiens
  misc_RNA (1)...(19): siRNA sense strand
gaagagacaggugcgaagu

SEQ ID NO: 1149449 - RNA, 19 nt, Homo sapiens
  misc_RNA (1)...(19): siRNA sense strand
caucaucgccuuggcucua

SEQ ID NO: 1149450 - RNA, 19 nt, Homo sapiens
  misc_RNA (1)...(19): siRNA sense strand
ccuggaagauuacuaccau

SEQ ID NO: 1149451 - RNA, 19 nt, Homo sapiens
  misc_RNA (1)...(19): siRNA sense strand
uuucgaguauggcauuaaa

SEQ ID NO: 1149452 - RNA, 19 nt, Homo sapiens
  misc_RNA (1)...(19): siRNA sense strand
uaugaugccagcaaugaaa

SEQ ID NO: 1149453 - RNA, 19 nt, Homo sapiens
  misc_RNA (1)...(19): siRNA sense strand
gaaaccuggaagauuacua

SEQ ID NO: 1149454 - RNA, 19 nt, Homo sapiens
  misc_RNA (1)...(19): siRNA sense strand
cgccuuggcucuagaagca

SEQ ID NO: 1149455 - RNA, 19 nt, Homo sapiens
  misc_RNA (1)...(19): siRNA sense strand
gcaguggggccuuuuauga

SEQ ID NO: 1149456 - RNA, 19 nt, Homo sapiens
  misc_RNA (1)...(19): siRNA sense strand
uggaagauuacuaccauuu

SEQ ID NO: 1149457 - RNA, 19 nt, Homo sapiens
  misc_RNA (1)...(19): siRNA sense strand
cagcaaacaauuccuacug

SEQ ID NO: 1149458 - RNA, 19 nt, Homo sapiens
  misc_RNA (1)...(19): siRNA sense strand
cagcagcgccaccgagaau

SEQ ID NO: 1149459 - RNA, 19 nt, Homo sapiens
  misc_RNA (1)...(19): siRNA sense strand
ugaacggcaaugauuauga

SEQ ID NO: 1149460 - RNA, 19 nt, Homo sapiens
  misc_RNA (1)...(19): siRNA sense strand
caacuacaucgacauuuac

SEQ ID NO: 1149461 - RNA, 19 nt, Homo sapiens
  misc_RNA (1)...(19): siRNA sense strand
aaacacggcacucguugug

SEQ ID NO: 1149462 - RNA, 19 nt, Homo sapiens
  misc_RNA (1)...(19): siRNA sense strand
ggaagauuacuaccauuuu

SEQ ID NO: 1149463 - RNA, 19 nt, Homo sapiens
  misc_RNA (1)...(19): siRNA sense strand
caacuugggccagauugga

SEQ ID NO: 1149464 - RNA, 19 nt, Homo sapiens
  misc_RNA (1)...(19): siRNA sense strand
gaucugcgucagcgcugua

SEQ ID NO: 1149465 - RNA, 19 nt, Homo sapiens
  misc_RNA (1)...(19): siRNA sense strand
cgcaggcccuuuacuucaa

SEQ ID NO: 1149466 - RNA, 19 nt, Homo sapiens
  misc_RNA (1)...(19): siRNA sense strand
ccaacagcaucuacaccau

SEQ ID NO: 1149467 - RNA, 19 nt, Homo sapiens
  misc_RNA (1)...(19): siRNA sense strand
cuacaucgacauuuacagu

SEQ ID NO: 1149468 - RNA, 19 nt, Homo sapiens
  misc_RNA (1)...(19): siRNA sense strand
ccagcaacaggaagugaaa

SEQ ID NO: 1149469 - RNA, 19 nt, Homo sapiens
  misc_RNA (1)...(19): siRNA sense strand
gcuuucgaguauggcauua

SEQ ID NO: 1149470 - RNA, 19 nt, Homo sapiens
  misc_RNA (1)...(19): siRNA sense strand
aauaaacacggcacucguu

SEQ ID NO: 1149471 - RNA, 19 nt, Homo sapiens
  misc_RNA (1)...(19): siRNA sense strand
caaugauuaugacccaucu

SEQ ID NO: 1149472 - RNA, 19 nt, Homo sapiens
  misc_RNA (1)...(19): siRNA sense strand
caacaugugguaccugcau

SEQ ID NO: 1149473 - RNA, 19 nt, Homo sapiens
  misc_RNA (1)...(19): siRNA sense strand
gcaaagucgcugggcauca

SEQ ID NO: 1149474 - RNA, 19 nt, Homo sapiens
  misc_RNA (1)...(19): siRNA sense strand
ggugaaauggcuccagcaa

SEQ ID NO: 1149475 - RNA, 19 nt, Homo sapiens
  misc_RNA (1)...(19): siRNA sense strand
caaacaauuccuacugcau

SEQ ID NO: 1149476 - RNA, 19 nt, Homo sapiens
  misc_RNA (1)...(19): siRNA sense strand
uaucacagcaaaaccuuua

SEQ ID NO: 1149477 - RNA, 19 nt, Homo sapiens
  misc_RNA (1)...(19): siRNA sense strand
aacgaagggugaagagaca

SEQ ID NO: 1149478 - RNA, 19 nt, Homo sapiens
  misc_RNA (1)...(19): siRNA sense strand
gcaucagacccaacuacau

SEQ ID NO: 1149479 - RNA, 19 nt, Homo sapiens
  misc_RNA (1)...(19): siRNA sense strand
guacaaugccaaaauagga

SEQ ID NO: 1149480 - RNA, 19 nt, Homo sapiens
  misc_RNA (1)...(19): siRNA sense strand
gcaggcccuuuacuucaac

SEQ ID NO: 1149481 - RNA, 19 nt, Homo sapiens
  misc_RNA (1)...(19): siRNA sense strand
ccgcaggcccuuuacuuca

SEQ ID NO: 1149482 - RNA, 19 nt, Homo sapiens
  misc_RNA (1)...(19): siRNA sense strand
cgacgugaacggcaaugau

SEQ ID NO: 1149483 - RNA, 19 nt, Homo sapiens
  misc_RNA (1)...(19): siRNA sense strand
caccgagaauggcuacaag

SEQ ID NO: 1149484 - RNA, 19 nt, Homo sapiens
  misc_RNA (1)...(19): siRNA sense strand
cgugaacggcaaugauuau

SEQ ID NO: 1149485 - RNA, 19 nt, Homo sapiens
  misc_RNA (1)...(19): siRNA sense strand
gugacccgcaggcccuuua

SEQ ID NO: 1149486 - RNA, 19 nt, Homo sapiens
  misc_RNA (1)...(19): siRNA sense strand
ccuuggcucuagaagcaaa

SEQ ID NO: 1149487 - RNA, 19 nt, Homo sapiens
  misc_RNA (1)...(19): siRNA sense strand
gcaacaggaagugaaacga

SEQ ID NO: 1149488 - RNA, 19 nt, Homo sapiens
  misc_RNA (1)...(19): siRNA sense strand
ugcgauggcuacaccaaca

SEQ ID NO: 1149489 - RNA, 19 nt, Homo sapiens
  misc_RNA (1)...(19): siRNA sense strand
ccaccgagaauggcuacaa

SEQ ID NO: 1149490 - RNA, 19 nt, Homo sapiens
  misc_RNA (1)...(19): siRNA sense strand
ccaacuacaucgacauuua

SEQ ID NO: 1149491 - RNA, 19 nt, Homo sapiens
  misc_RNA (1)...(19): siRNA sense strand
uuggaaaccuggaagauua

SEQ ID NO: 1149492 - RNA, 19 nt, Homo sapiens
  misc_RNA (1)...(19): siRNA sense strand
ugaaauggcuccagcaaca

SEQ ID NO: 1149493 - RNA, 19 nt, Homo sapiens
  misc_RNA (1)...(19): siRNA sense strand
ggacggcgaugucacagau

SEQ ID NO: 1149494 - RNA, 19 nt, Homo sapiens
  misc_RNA (1)...(19): siRNA sense strand
gaagcaaacagccaguuaa

SEQ ID NO: 1149495 - RNA, 19 nt, Homo sapiens
  misc_RNA (1)...(19): siRNA sense strand
gaacggcaaugauuaugac

SEQ ID NO: 1149496 - RNA, 19 nt, Homo sapiens
  misc_RNA (1)...(19): siRNA sense strand
gcgagcgacuggaaaguga

SEQ ID NO: 1149497 - RNA, 19 nt, Homo sapiens
  misc_RNA (1)...(19): siRNA sense strand
ccucacaccuuccucagaa

SEQ ID NO: 1149498 - RNA, 19 nt, Homo sapiens
  misc_RNA (1)...(19): siRNA sense strand
gauaugaugccagcaauga

SEQ ID NO: 1149499 - RNA, 19 nt, Homo sapiens
  misc_RNA (1)...(19): siRNA sense strand
ugacccaucuccacgauau

SEQ ID NO: 1149500 - RNA, 19 nt, Homo sapiens
  misc_RNA (1)...(19): siRNA sense strand
caacaggaagugaaacgaa

SEQ ID NO: 1149501 - RNA, 19 nt, Homo sapiens
  misc_RNA (1)...(19): siRNA sense strand
gaaagcgagcgacuggaaa

SEQ ID NO: 1149502 - RNA, 19 nt, Homo sapiens
  misc_RNA (1)...(19): siRNA sense strand
gcaaacagccaguuaaccu

SEQ ID NO: 1149503 - RNA, 19 nt, Homo sapiens
  misc_RNA (1)...(19): siRNA sense strand
agagacaggugcgaaguga

SEQ ID NO: 1149504 - RNA, 19 nt, Homo sapiens
  misc_RNA (1)...(19): siRNA sense strand
gacgugaacggcaaugauu

SEQ ID NO: 1149505 - RNA, 19 nt, Homo sapiens
  misc_RNA (1)...(19): siRNA sense strand
gaugauggcauagagagaa

SEQ ID NO: 1149506 - RNA, 19 nt, Homo sapiens
  misc_RNA (1)...(19): siRNA sense strand
cagauguggucgaggcaaa

SEQ ID NO: 1149507 - RNA, 19 nt, Homo sapiens
  misc_RNA (1)...(19): siRNA sense strand
agaagcaaacagccaguua

SEQ ID NO: 1149508 - RNA, 19 nt, Homo sapiens
  misc_RNA (1)...(19): siRNA sense strand
caaagucgcugggcaucag

SEQ ID NO: 1149509 - RNA, 19 nt, Homo sapiens
  misc_RNA (1)...(19): siRNA sense strand
gaaacgaagggugaagaga

SEQ ID NO: 1149510 - RNA, 19 nt, Homo sapiens
  misc_RNA (1)...(19): siRNA sense strand
caucagacccaacuacauc

SEQ ID NO: 1149511 - RNA, 19 nt, Homo sapiens
  misc_RNA (1)...(19): siRNA sense strand
ugaaagcgagcgacuggaa

SEQ ID NO: 1149512 - RNA, 19 nt, Homo sapiens
  misc_RNA (1)...(19): siRNA sense strand
gaagagacaggugcgaagu

SEQ ID NO: 1149513 - RNA, 19 nt, Homo sapiens
  misc_RNA (1)...(19): siRNA sense strand
caucaucgccuuggcucua

SEQ ID NO: 1149514 - RNA, 19 nt, Homo sapiens
  misc_RNA (1)...(19): siRNA sense strand
ccuggaagauuacuaccau

SEQ ID NO: 1149515 - RNA, 19 nt, Homo sapiens
  misc_RNA (1)...(19): siRNA sense strand
uuucgaguauggcauuaaa

SEQ ID NO: 1149516 - RNA, 19 nt, Homo sapiens
  misc_RNA (1)...(19): siRNA sense strand
uaugaugccagcaaugaaa

SEQ ID NO: 1149517 - RNA, 19 nt, Homo sapiens
  misc_RNA (1)...(19): siRNA sense strand
gaaaccuggaagauuacua

SEQ ID NO: 1149518 - RNA, 19 nt, Homo sapiens
  misc_RNA (1)...(19): siRNA sense strand
cgccuuggcucuagaagca

SEQ ID NO: 1149519 - RNA, 19 nt, Homo sapiens
  misc_RNA (1)...(19): siRNA sense strand
gcaguggggccuuuuauga

SEQ ID NO: 1149520 - RNA, 19 nt, Homo sapiens
  misc_RNA (1)...(19): siRNA sense strand
uggaagauuacuaccauuu

SEQ ID NO: 1149521 - RNA, 19 nt, Homo sapiens
  misc_RNA (1)...(19): siRNA sense strand
cagcaaacaauuccuacug

SEQ ID NO: 1149522 - RNA, 19 nt, Homo sapiens
  misc_RNA (1)...(19): siRNA sense strand
cagcagcgccaccgagaau

SEQ ID NO: 1149523 - RNA, 19 nt, Homo sapiens
  misc_RNA (1)...(19): siRNA sense strand
ugaacggcaaugauuauga

SEQ ID NO: 1149524 - RNA, 19 nt, Homo sapiens
  misc_RNA (1)...(19): siRNA sense strand
caacuacaucgacauuuac

SEQ ID NO: 1149525 - RNA, 19 nt, Homo sapiens
  misc_RNA (1)...(19): siRNA sense strand
aaacacggcacucguugug

SEQ ID NO: 1149526 - RNA, 19 nt, Homo sapiens
  misc_RNA (1)...(19): siRNA sense strand
ggaagauuacuaccauuuu

SEQ ID NO: 1149527 - RNA, 19 nt, Homo sapiens
  misc_RNA (1)...(19): siRNA sense strand
caacuugggccagauugga

SEQ ID NO: 1149528 - RNA, 19 nt, Homo sapiens
  misc_RNA (1)...(19): siRNA sense strand
gaucugcgucagcgcugua

SEQ ID NO: 1149529 - RNA, 19 nt, Homo sapiens
  misc_RNA (1)...(19): siRNA sense strand
cgcaggcccuuuacuucaa

SEQ ID NO: 1149530 - RNA, 19 nt, Homo sapiens
  misc_RNA (1)...(19): siRNA sense strand
ccaacagcaucuacaccau

SEQ ID NO: 1149531 - RNA, 19 nt, Homo sapiens
  misc_RNA (1)...(19): siRNA sense strand
cuacaucgacauuuacagu

SEQ ID NO: 1149532 - RNA, 19 nt, Homo sapiens
  misc_RNA (1)...(19): siRNA sense strand
ccagcaacaggaagugaaa

SEQ ID NO: 1149533 - RNA, 19 nt, Homo sapiens
  misc_RNA (1)...(19): siRNA sense strand
gcuuucgaguauggcauua

SEQ ID NO: 1149534 - RNA, 19 nt, Homo sapiens
  misc_RNA (1)...(19): siRNA sense strand
aauaaacacggcacucguu

SEQ ID NO: 1149535 - RNA, 19 nt, Homo sapiens
  misc_RNA (1)...(19): siRNA sense strand
caaugauuaugacccaucu

SEQ ID NO: 1149536 - RNA, 19 nt, Homo sapiens
  misc_RNA (1)...(19): siRNA sense strand
caacaugugguaccugcau

SEQ ID NO: 1149537 - RNA, 19 nt, Homo sapiens
  misc_RNA (1)...(19): siRNA sense strand
gcaaagucgcugggcauca

SEQ ID NO: 1149538 - RNA, 19 nt, Homo sapiens
  misc_RNA (1)...(19): siRNA sense strand
ggugaaauggcuccagcaa

SEQ ID NO: 1149539 - RNA, 19 nt, Homo sapiens
  misc_RNA (1)...(19): siRNA sense strand
caaacaauuccuacugcau

SEQ ID NO: 1149540 - RNA, 19 nt, Homo sapiens
  misc_RNA (1)...(19): siRNA sense strand
uaucacagcaaaaccuuua

SEQ ID NO: 1149541 - RNA, 19 nt, Homo sapiens
  misc_RNA (1)...(19): siRNA sense strand
aacgaagggugaagagaca

SEQ ID NO: 1149542 - RNA, 19 nt, Homo sapiens
  misc_RNA (1)...(19): siRNA sense strand
gcaucagacccaacuacau

SEQ ID NO: 1149543 - RNA, 19 nt, Homo sapiens
  misc_RNA (1)...(19): siRNA sense strand
guacaaugccaaaauagga

SEQ ID NO: 1149544 - RNA, 19 nt, Homo sapiens
  misc_RNA (1)...(19): siRNA sense strand
gcaggcccuuuacuucaac

SEQ ID NO: 1149545 - RNA, 19 nt, Homo sapiens
  misc_RNA (1)...(19): siRNA sense strand
ccgcaggcccuuuacuuca

SEQ ID NO: 1149546 - RNA, 19 nt, Homo sapiens
  misc_RNA (1)...(19): siRNA sense strand
cgacgugaacggcaaugau

SEQ ID NO: 1149547 - RNA, 19 nt, Homo sapiens
  misc_RNA (1)...(19): siRNA sense strand
caccgagaauggcuacaag

SEQ ID NO: 1149548 - RNA, 19 nt, Homo sapiens
  misc_RNA (1)...(19): siRNA sense strand
cgugaacggcaaugauuau

SEQ ID NO: 1149549 - RNA, 19 nt, Homo sapiens
  misc_RNA (1)...(19): siRNA sense strand
gugacccgcaggcccuuua

SEQ ID NO: 1149550 - RNA, 19 nt, Homo sapiens
  misc_RNA (1)...(19): siRNA sense strand
ccuuggcucuagaagcaaa

SEQ ID NO: 1149551 - RNA, 19 nt, Homo sapiens
  misc_RNA (1)...(19): siRNA sense strand
gcaacaggaagugaaacga

SEQ ID NO: 1149552 - RNA, 19 nt, Homo sapiens
  misc_RNA (1)...(19): siRNA sense strand
ugcgauggcuacaccaaca

SEQ ID NO: 1149553 - RNA, 19 nt, Homo sapiens
  misc_RNA (1)...(19): siRNA sense strand
ccaccgagaauggcuacaa

SEQ ID NO: 1149554 - RNA, 19 nt, Homo sapiens
  misc_RNA (1)...(19): siRNA sense strand
ccaacuacaucgacauuua

SEQ ID NO: 1149555 - RNA, 19 nt, Homo sapiens
  misc_RNA (1)...(19): siRNA sense strand
uuggaaaccuggaagauua

SEQ ID NO: 1149556 - RNA, 19 nt, Homo sapiens
  misc_RNA (1)...(19): siRNA sense strand
ugaaauggcuccagcaaca

SEQ ID NO: 1149557 - RNA, 19 nt, Homo sapiens
  misc_RNA (1)...(19): siRNA sense strand
ggacggcgaugucacagau

SEQ ID NO: 1149558 - RNA, 19 nt, Homo sapiens
  misc_RNA (1)...(19): siRNA sense strand
gaagcaaacagccaguuaa

SEQ ID NO: 1149559 - RNA, 19 nt, Homo sapiens
  misc_RNA (1)...(19): siRNA sense strand
gaacggcaaugauuaugac

SEQ ID NO: 1149560 - RNA, 19 nt, Homo sapiens
  misc_RNA (1)...(19): siRNA sense strand
gcgagcgacuggaaaguga

SEQ ID NO: 1149561 - RNA, 19 nt, Homo sapiens
  misc_RNA (1)...(19): siRNA sense strand
ccucacaccuuccucagaa

SEQ ID NO: 1149562 - RNA, 19 nt, Homo sapiens
  misc_RNA (1)...(19): siRNA sense strand
gauaugaugccagcaauga

SEQ ID NO: 1149563 - RNA, 19 nt, Homo sapiens
  misc_RNA (1)...(19): siRNA sense strand
ugacccaucuccacgauau

SEQ ID NO: 1149564 - RNA, 19 nt, Homo sapiens
  misc_RNA (1)...(19): siRNA sense strand
caacaggaagugaaacgaa

SEQ ID NO: 1149565 - RNA, 19 nt, Homo sapiens
  misc_RNA (1)...(19): siRNA sense strand
gaaagcgagcgacuggaaa

SEQ ID NO: 1149566 - RNA, 19 nt, Homo sapiens
  misc_RNA (1)...(19): siRNA sense strand
gcaaacagccaguuaaccu

SEQ ID NO: 1149567 - RNA, 19 nt, Homo sapiens
  misc_RNA (1)...(19): siRNA sense strand
agagacaggugcgaaguga

SEQ ID NO: 1149568 - RNA, 19 nt, Homo sapiens
  misc_RNA (1)...(19): siRNA sense strand
gacgugaacggcaaugauu

SEQ ID NO: 1149569 - RNA, 19 nt, Homo sapiens
  misc_RNA (1)...(19): siRNA sense strand
gaugauggcauagagagaa

SEQ ID NO: 1149570 - RNA, 19 nt, Homo sapiens
  misc_RNA (1)...(19): siRNA sense strand
cagauguggucgaggcaaa

SEQ ID NO: 1149571 - RNA, 19 nt, Homo sapiens
  misc_RNA (1)...(19): siRNA sense strand
agaagcaaacagccaguua

SEQ ID NO: 1149572 - RNA, 19 nt, Homo sapiens
  misc_RNA (1)...(19): siRNA sense strand
caaagucgcugggcaucag

SEQ ID NO: 1149573 - RNA, 19 nt, Homo sapiens
  misc_RNA (1)...(19): siRNA sense strand
gaaacgaagggugaagaga

SEQ ID NO: 1149574 - RNA, 19 nt, Homo sapiens
  misc_RNA (1)...(19): siRNA sense strand
caucagacccaacuacauc

SEQ ID NO: 1149575 - RNA, 19 nt, Homo sapiens
  misc_RNA (1)...(19): siRNA sense strand
ugaaagcgagcgacuggaa

SEQ ID NO: 1149576 - RNA, 19 nt, Homo sapiens
  misc_RNA (1)...(19): siRNA sense strand
gaagagacaggugcgaagu

SEQ ID NO: 1149577 - RNA, 19 nt, Homo sapiens
  misc_RNA (1)...(19): siRNA sense strand
caucaucgccuuggcucua

SEQ ID NO: 1149578 - RNA, 19 nt, Homo sapiens
  misc_RNA (1)...(19): siRNA sense strand
ccuggaagauuacuaccau

SEQ ID NO: 1149579 - RNA, 19 nt, Homo sapiens
  misc_RNA (1)...(19): siRNA sense strand
uuucgaguauggcauuaaa

SEQ ID NO: 1149580 - RNA, 19 nt, Homo sapiens
  misc_RNA (1)...(19): siRNA sense strand
uaugaugccagcaaugaaa

SEQ ID NO: 1149581 - RNA, 19 nt, Homo sapiens
  misc_RNA (1)...(19): siRNA sense strand
gaaaccuggaagauuacua

SEQ ID NO: 1149582 - RNA, 19 nt, Homo sapiens
  misc_RNA (1)...(19): siRNA sense strand
cgccuuggcucuagaagca

SEQ ID NO: 1149583 - RNA, 19 nt, Homo sapiens
  misc_RNA (1)...(19): siRNA sense strand
gcaguggggccuuuuauga

SEQ ID NO: 1149584 - RNA, 19 nt, Homo sapiens
  misc_RNA (1)...(19): siRNA sense strand
uggaagauuacuaccauuu

SEQ ID NO: 1149585 - RNA, 19 nt, Homo sapiens
  misc_RNA (1)...(19): siRNA sense strand
cagcaaacaauuccuacug

SEQ ID NO: 1149586 - RNA, 19 nt, Homo sapiens
  misc_RNA (1)...(19): siRNA sense strand
cagcagcgccaccgagaau

SEQ ID NO: 1149587 - RNA, 19 nt, Homo sapiens
  misc_RNA (1)...(19): siRNA sense strand
ugaacggcaaugauuauga

SEQ ID NO: 1149588 - RNA, 19 nt, Homo sapiens
  misc_RNA (1)...(19): siRNA sense strand
caacuacaucgacauuuac

SEQ ID NO: 1149589 - RNA, 19 nt, Homo sapiens
  misc_RNA (1)...(19): siRNA sense strand
aaacacggcacucguugug

SEQ ID NO: 1149590 - RNA, 19 nt, Homo sapiens
  misc_RNA (1)...(19): siRNA sense strand
ggaagauuacuaccauuuu

SEQ ID NO: 1149591 - RNA, 19 nt, Homo sapiens
  misc_RNA (1)...(19): siRNA sense strand
caacuugggccagauugga

SEQ ID NO: 1149592 - RNA, 19 nt, Homo sapiens
  misc_RNA (1)...(19): siRNA sense strand
gaucugcgucagcgcugua

SEQ ID NO: 1149593 - RNA, 19 nt, Homo sapiens
  misc_RNA (1)...(19): siRNA sense strand
cgcaggcccuuuacuucaa

SEQ ID NO: 1149594 - RNA, 19 nt, Homo sapiens
  misc_RNA (1)...(19): siRNA sense strand
ccaacagcaucuacaccau

SEQ ID NO: 1149595 - RNA, 19 nt, Homo sapiens
  misc_RNA (1)...(19): siRNA sense strand
cuacaucgacauuuacagu

SEQ ID NO: 1149596 - RNA, 19 nt, Homo sapiens
  misc_RNA (1)...(19): siRNA sense strand
ccagcaacaggaagugaaa

SEQ ID NO: 1149597 - RNA, 19 nt, Homo sapiens
  misc_RNA (1)...(19): siRNA sense strand
gcuuucgaguauggcauua

SEQ ID NO: 1149598 - RNA, 19 nt, Homo sapiens
  misc_RNA (1)...(19): siRNA sense strand
aauaaacacggcacucguu

SEQ ID NO: 1149599 - RNA, 19 nt, Homo sapiens
  misc_RNA (1)...(19): siRNA sense strand
caaugauuaugacccaucu

SEQ ID NO: 1149600 - RNA, 19 nt, Homo sapiens
  misc_RNA (1)...(19): siRNA sense strand
caacaugugguaccugcau

SEQ ID NO: 1149601 - RNA, 19 nt, Homo sapiens
  misc_RNA (1)...(19): siRNA sense strand
gcaaagucgcugggcauca

SEQ ID NO: 1149602 - RNA, 19 nt, Homo sapiens
  misc_RNA (1)...(19): siRNA sense strand
ggugaaauggcuccagcaa

SEQ ID NO: 1149603 - RNA, 19 nt, Homo sapiens
  misc_RNA (1)...(19): siRNA sense strand
caaacaauuccuacugcau

SEQ ID NO: 1149604 - RNA, 19 nt, Homo sapiens
  misc_RNA (1)...(19): siRNA sense strand
uaucacagcaaaaccuuua

SEQ ID NO: 1149605 - RNA, 19 nt, Homo sapiens
  misc_RNA (1)...(19): siRNA sense strand
aacgaagggugaagagaca

SEQ ID NO: 1149606 - RNA, 19 nt, Homo sapiens
  misc_RNA (1)...(19): siRNA sense strand
gcaucagacccaacuacau

SEQ ID NO: 1149607 - RNA, 19 nt, Homo sapiens
  misc_RNA (1)...(19): siRNA sense strand
guacaaugccaaaauagga

SEQ ID NO: 1149608 - RNA, 19 nt, Homo sapiens
  misc_RNA (1)...(19): siRNA sense strand
gcaggcccuuuacuucaac

SEQ ID NO: 1149609 - RNA, 19 nt, Homo sapiens
  misc_RNA (1)...(19): siRNA sense strand
ccgcaggcccuuuacuuca

SEQ ID NO: 1149610 - RNA, 19 nt, Homo sapiens
  misc_RNA (1)...(19): siRNA sense strand
cgacgugaacggcaaugau

SEQ ID NO: 1149611 - RNA, 19 nt, Homo sapiens
  misc_RNA (1)...(19): siRNA sense strand
caccgagaauggcuacaag

SEQ ID NO: 1149612 - RNA, 19 nt, Homo sapiens
  misc_RNA (1)...(19): siRNA sense strand
cgugaacggcaaugauuau

SEQ ID NO: 1149613 - RNA, 19 nt, Homo sapiens
  misc_RNA (1)...(19): siRNA sense strand
gugacccgcaggcccuuua

SEQ ID NO: 1149614 - RNA, 19 nt, Homo sapiens
  misc_RNA (1)...(19): siRNA sense strand
ccuuggcucuagaagcaaa

SEQ ID NO: 1149615 - RNA, 19 nt, Homo sapiens
  misc_RNA (1)...(19): siRNA sense strand
gcaacaggaagugaaacga

SEQ ID NO: 1149616 - RNA, 19 nt, Homo sapiens
  misc_RNA (1)...(19): siRNA sense strand
ugcgauggcuacaccaaca

SEQ ID NO: 1149617 - RNA, 19 nt, Homo sapiens
  misc_RNA (1)...(19): siRNA sense strand
ccaccgagaauggcuacaa

SEQ ID NO: 1149618 - RNA, 19 nt, Homo sapiens
  misc_RNA (1)...(19): siRNA sense strand
ccaacuacaucgacauuua

SEQ ID NO: 1149619 - RNA, 19 nt, Homo sapiens
  misc_RNA (1)...(19): siRNA sense strand
uuggaaaccuggaagauua

SEQ ID NO: 1149620 - RNA, 19 nt, Homo sapiens
  misc_RNA (1)...(19): siRNA sense strand
ugaaauggcuccagcaaca

SEQ ID NO: 1149621 - RNA, 19 nt, Homo sapiens
  misc_RNA (1)...(19): siRNA sense strand
ggacggcgaugucacagau

SEQ ID NO: 1149622 - RNA, 19 nt, Homo sapiens
  misc_RNA (1)...(19): siRNA sense strand
gaagcaaacagccaguuaa

SEQ ID NO: 1149623 - RNA, 19 nt, Homo sapiens
  misc_RNA (1)...(19): siRNA sense strand
gaacggcaaugauuaugac

SEQ ID NO: 1149624 - RNA, 19 nt, Homo sapiens
  misc_RNA (1)...(19): siRNA sense strand
gcgagcgacuggaaaguga

SEQ ID NO: 1149625 - RNA, 19 nt, Homo sapiens
  misc_RNA (1)...(19): siRNA sense strand
ccucacaccuuccucagaa

SEQ ID NO: 1149626 - RNA, 19 nt, Homo sapiens
  misc_RNA (1)...(19): siRNA sense strand
gauaugaugccagcaauga

SEQ ID NO: 1149627 - RNA, 19 nt, Homo sapiens
  misc_RNA (1)...(19): siRNA sense strand
ugacccaucuccacgauau

SEQ ID NO: 1149628 - RNA, 19 nt, Homo sapiens
  misc_RNA (1)...(19): siRNA sense strand
caacaggaagugaaacgaa

SEQ ID NO: 1149629 - RNA, 19 nt, Homo sapiens
  misc_RNA (1)...(19): siRNA sense strand
gaaagcgagcgacuggaaa

SEQ ID NO: 1149630 - RNA, 19 nt, Homo sapiens
  misc_RNA (1)...(19): siRNA sense strand
gcaaacagccaguuaaccu

SEQ ID NO: 1149631 - RNA, 19 nt, Homo sapiens
  misc_RNA (1)...(19): siRNA sense strand
agagacaggugcgaaguga

SEQ ID NO: 1149632 - RNA, 19 nt, Homo sapiens
  misc_RNA (1)...(19): siRNA sense strand
gacgugaacggcaaugauu

SEQ ID NO: 1149633 - RNA, 19 nt, Homo sapiens
  misc_RNA (1)...(19): siRNA sense strand
gaugauggcauagagagaa

SEQ ID NO: 1149634 - RNA, 19 nt, Homo sapiens
  misc_RNA (1)...(19): siRNA sense strand
cagauguggucgaggcaaa

SEQ ID NO: 1149635 - RNA, 19 nt, Homo sapiens
  misc_RNA (1)...(19): siRNA sense strand
agaagcaaacagccaguua

SEQ ID NO: 1149636 - RNA, 19 nt, Homo sapiens
  misc_RNA (1)...(19): siRNA sense strand
caaagucgcugggcaucag

SEQ ID NO: 1149637 - RNA, 19 nt, Homo sapiens
  misc_RNA (1)...(19): siRNA sense strand
gaaacgaagggugaagaga

SEQ ID NO: 1149638 - RNA, 19 nt, Homo sapiens
  misc_RNA (1)...(19): siRNA sense strand
caucagacccaacuacauc

SEQ ID NO: 1149639 - RNA, 19 nt, Homo sapiens
  misc_RNA (1)...(19): siRNA sense strand
ugaaagcgagcgacuggaa

SEQ ID NO: 1149640 - RNA, 19 nt, Homo sapiens
  misc_RNA (1)...(19): siRNA sense strand
gaagagacaggugcgaagu

SEQ ID NO: 1149641 - RNA, 19 nt, Homo sapiens
  misc_RNA (1)...(19): siRNA sense strand
caucaucgccuuggcucua

SEQ ID NO: 1149642 - RNA, 19 nt, Homo sapiens
  misc_RNA (1)...(19): siRNA sense strand
ccuggaagauuacuaccau

SEQ ID NO: 1149643 - RNA, 19 nt, Homo sapiens
  misc_RNA (1)...(19): siRNA sense strand
uuucgaguauggcauuaaa

SEQ ID NO: 1149644 - RNA, 19 nt, Homo sapiens
  misc_RNA (1)...(19): siRNA sense strand
uaugaugccagcaaugaaa

SEQ ID NO: 1149645 - RNA, 19 nt, Homo sapiens
  misc_RNA (1)...(19): siRNA sense strand
gaaaccuggaagauuacua

SEQ ID NO: 1149646 - RNA, 19 nt, Homo sapiens
  misc_RNA (1)...(19): siRNA sense strand
cgccuuggcucuagaagca

SEQ ID NO: 1149647 - RNA, 19 nt, Homo sapiens
  misc_RNA (1)...(19): siRNA sense strand
gcaguggggccuuuuauga

SEQ ID NO: 1149648 - RNA, 19 nt, Homo sapiens
  misc_RNA (1)...(19): siRNA sense strand
uggaagauuacuaccauuu

SEQ ID NO: 1149649 - RNA, 19 nt, Homo sapiens
  misc_RNA (1)...(19): siRNA sense strand
cagcaaacaauuccuacug

SEQ ID NO: 1149650 - RNA, 19 nt, Homo sapiens
  misc_RNA (1)...(19): siRNA sense strand
cagcagcgccaccgagaau

SEQ ID NO: 1149651 - RNA, 19 nt, Homo sapiens
  misc_RNA (1)...(19): siRNA sense strand
ugaacggcaaugauuauga

SEQ ID NO: 1149652 - RNA, 19 nt, Homo sapiens
  misc_RNA (1)...(19): siRNA sense strand
caacuacaucgacauuuac

SEQ ID NO: 1149653 - RNA, 19 nt, Homo sapiens
  misc_RNA (1)...(19): siRNA sense strand
aaacacggcacucguugug

SEQ ID NO: 1149654 - RNA, 19 nt, Homo sapiens
  misc_RNA (1)...(19): siRNA sense strand
ggaagauuacuaccauuuu

SEQ ID NO: 1149655 - RNA, 19 nt, Homo sapiens
  misc_RNA (1)...(19): siRNA sense strand
caacuugggccagauugga

SEQ ID NO: 1149656 - RNA, 19 nt, Homo sapiens
  misc_RNA (1)...(19): siRNA sense strand
gaucugcgucagcgcugua

SEQ ID NO: 1149657 - RNA, 19 nt, Homo sapiens
  misc_RNA (1)...(19): siRNA sense strand
cgcaggcccuuuacuucaa

SEQ ID NO: 1149658 - RNA, 19 nt, Homo sapiens
  misc_RNA (1)...(19): siRNA sense strand
ccaacagcaucuacaccau

SEQ ID NO: 1149659 - RNA, 19 nt, Homo sapiens
  misc_RNA (1)...(19): siRNA sense strand
cuacaucgacauuuacagu

SEQ ID NO: 1149660 - RNA, 19 nt, Homo sapiens
  misc_RNA (1)...(19): siRNA sense strand
ccagcaacaggaagugaaa

SEQ ID NO: 1149661 - RNA, 19 nt, Homo sapiens
  misc_RNA (1)...(19): siRNA sense strand
gcuuucgaguauggcauua

SEQ ID NO: 1149662 - RNA, 19 nt, Homo sapiens
  misc_RNA (1)...(19): siRNA sense strand
aauaaacacggcacucguu

SEQ ID NO: 1149663 - RNA, 19 nt, Homo sapiens
  misc_RNA (1)...(19): siRNA sense strand
caaugauuaugacccaucu

SEQ ID NO: 1149664 - RNA, 19 nt, Homo sapiens
  misc_RNA (1)...(19): siRNA sense strand
caacaugugguaccugcau

SEQ ID NO: 1149665 - RNA, 19 nt, Homo sapiens
  misc_RNA (1)...(19): siRNA sense strand
gcaaagucgcugggcauca

SEQ ID NO: 1149666 - RNA, 19 nt, Homo sapiens
  misc_RNA (1)...(19): siRNA sense strand
ggugaaauggcuccagcaa

SEQ ID NO: 1149667 - RNA, 19 nt, Homo sapiens
  misc_RNA (1)...(19): siRNA sense strand
caaacaauuccuacugcau

SEQ ID NO: 1149668 - RNA, 19 nt, Homo sapiens
  misc_RNA (1)...(19): siRNA sense strand
uaucacagcaaaaccuuua

SEQ ID NO: 1149669 - RNA, 19 nt, Homo sapiens
  misc_RNA (1)...(19): siRNA sense strand
aacgaagggugaagagaca

SEQ ID NO: 1149670 - RNA, 19 nt, Homo sapiens
  misc_RNA (1)...(19): siRNA sense strand
gcaucagacccaacuacau

SEQ ID NO: 1149671 - RNA, 19 nt, Homo sapiens
  misc_RNA (1)...(19): siRNA sense strand
guacaaugccaaaauagga

SEQ ID NO: 1149672 - RNA, 19 nt, Homo sapiens
  misc_RNA (1)...(19): siRNA sense strand
gcaggcccuuuacuucaac

SEQ ID NO: 1149673 - RNA, 19 nt, Homo sapiens
  misc_RNA (1)...(19): siRNA sense strand
ccgcaggcccuuuacuuca

SEQ ID NO: 1149674 - RNA, 19 nt, Homo sapiens
  misc_RNA (1)...(19): siRNA sense strand
cgacgugaacggcaaugau

SEQ ID NO: 1149675 - RNA, 19 nt, Homo sapiens
  misc_RNA (1)...(19): siRNA sense strand
caccgagaauggcuacaag

SEQ ID NO: 1149676 - RNA, 19 nt, Homo sapiens
  misc_RNA (1)...(19): siRNA sense strand
cgugaacggcaaugauuau

SEQ ID NO: 1149677 - RNA, 19 nt, Homo sapiens
  misc_RNA (1)...(19): siRNA sense strand
gugacccgcaggcccuuua

SEQ ID NO: 1149678 - RNA, 19 nt, Homo sapiens
  misc_RNA (1)...(19): siRNA sense strand
ccuuggcucuagaagcaaa

SEQ ID NO: 1149679 - RNA, 19 nt, Homo sapiens
  misc_RNA (1)...(19): siRNA sense strand
gcaacaggaagugaaacga

SEQ ID NO: 1149680 - RNA, 19 nt, Homo sapiens
  misc_RNA (1)...(19): siRNA sense strand
ugcgauggcuacaccaaca

SEQ ID NO: 1149681 - RNA, 19 nt, Homo sapiens
  misc_RNA (1)...(19): siRNA sense strand
ccaccgagaauggcuacaa

SEQ ID NO: 1149682 - RNA, 19 nt, Homo sapiens
  misc_RNA (1)...(19): siRNA sense strand
ccaacuacaucgacauuua

SEQ ID NO: 1149683 - RNA, 19 nt, Homo sapiens
  misc_RNA (1)...(19): siRNA sense strand
uuggaaaccuggaagauua

SEQ ID NO: 1149684 - RNA, 19 nt, Homo sapiens
  misc_RNA (1)...(19): siRNA sense strand
ugaaauggcuccagcaaca

SEQ ID NO: 1149685 - RNA, 19 nt, Homo sapiens
  misc_RNA (1)...(19): siRNA sense strand
ggacggcgaugucacagau

SEQ ID NO: 1149686 - RNA, 19 nt, Homo sapiens
  misc_RNA (1)...(19): siRNA sense strand
gaagcaaacagccaguuaa

SEQ ID NO: 1149687 - RNA, 19 nt, Homo sapiens
  misc_RNA (1)...(19): siRNA sense strand
gaacggcaaugauuaugac

SEQ ID NO: 1149688 - RNA, 19 nt, Homo sapiens
  misc_RNA (1)...(19): siRNA sense strand
gcgagcgacuggaaaguga

SEQ ID NO: 1149689 - RNA, 19 nt, Homo sapiens
  misc_RNA (1)...(19): siRNA sense strand
ccucacaccuuccucagaa

SEQ ID NO: 1149690 - RNA, 19 nt, Homo sapiens
  misc_RNA (1)...(19): siRNA sense strand
gauaugaugccagcaauga

SEQ ID NO: 1149691 - RNA, 19 nt, Homo sapiens
  misc_RNA (1)...(19): siRNA sense strand
ugacccaucuccacgauau

SEQ ID NO: 1149692 - RNA, 19 nt, Homo sapiens
  misc_RNA (1)...(19): siRNA sense strand
caacaggaagugaaacgaa

SEQ ID NO: 1149693 - RNA, 19 nt, Homo sapiens
  misc_RNA (1)...(19): siRNA sense strand
gaaagcgagcgacuggaaa

SEQ ID NO: 1149694 - RNA, 19 nt, Homo sapiens
  misc_RNA (1)...(19): siRNA sense strand
gcaaacagccaguuaaccu

SEQ ID NO: 1149695 - RNA, 19 nt, Homo sapiens
  misc_RNA (1)...(19): siRNA sense strand
agagacaggugcgaaguga

SEQ ID NO: 1149696 - RNA, 19 nt, Homo sapiens
  misc_RNA (1)...(19): siRNA sense strand
gacgugaacggcaaugauu

SEQ ID NO: 1149697 - RNA, 19 nt, Homo sapiens
  misc_RNA (1)...(19): siRNA sense strand
gaugauggcauagagagaa

SEQ ID NO: 1149698 - RNA, 19 nt, Homo sapiens
  misc_RNA (1)...(19): siRNA sense strand
cagauguggucgaggcaaa

SEQ ID NO: 1149699 - RNA, 19 nt, Homo sapiens
  misc_RNA (1)...(19): siRNA sense strand
agaagcaaacagccaguua

SEQ ID NO: 1149700 - RNA, 19 nt, Homo sapiens
  misc_RNA (1)...(19): siRNA sense strand
caaagucgcugggcaucag

SEQ ID NO: 1149701 - RNA, 19 nt, Homo sapiens
  misc_RNA (1)...(19): siRNA sense strand
gaaacgaagggugaagaga

SEQ ID NO: 1149702 - RNA, 19 nt, Homo sapiens
  misc_RNA (1)...(19): siRNA sense strand
caucagacccaacuacauc

SEQ ID NO: 1149703 - RNA, 19 nt, Homo sapiens
  misc_RNA (1)...(19): siRNA sense strand
ugaaagcgagcgacuggaa

SEQ ID NO: 1149704 - RNA, 19 nt, Homo sapiens
  misc_RNA (1)...(19): siRNA sense strand
gaagagacaggugcgaagu

SEQ ID NO: 1149705 - RNA, 19 nt, Homo sapiens
  misc_RNA (1)...(19): siRNA sense strand
caucaucgccuuggcucua

SEQ ID NO: 1149706 - RNA, 19 nt, Homo sapiens
  misc_RNA (1)...(19): siRNA sense strand
ccuggaagauuacuaccau

SEQ ID NO: 1149707 - RNA, 19 nt, Homo sapiens
  misc_RNA (1)...(19): siRNA sense strand
uuucgaguauggcauuaaa

SEQ ID NO: 1149708 - RNA, 19 nt, Homo sapiens
  misc_RNA (1)...(19): siRNA sense strand
uaugaugccagcaaugaaa

SEQ ID NO: 1149709 - RNA, 19 nt, Homo sapiens
  misc_RNA (1)...(19): siRNA sense strand
gaaaccuggaagauuacua

SEQ ID NO: 1149710 - RNA, 19 nt, Homo sapiens
  misc_RNA (1)...(19): siRNA sense strand
cgccuuggcucuagaagca

SEQ ID NO: 1149711 - RNA, 19 nt, Homo sapiens
  misc_RNA (1)...(19): siRNA sense strand
gcaguggggccuuuuauga

SEQ ID NO: 1149712 - RNA, 19 nt, Homo sapiens
  misc_RNA (1)...(19): siRNA sense strand
uggaagauuacuaccauuu

SEQ ID NO: 1149713 - RNA, 19 nt, Homo sapiens
  misc_RNA (1)...(19): siRNA sense strand
cagcaaacaauuccuacug

SEQ ID NO: 1149714 - RNA, 19 nt, Homo sapiens
  misc_RNA (1)...(19): siRNA sense strand
cagcagcgccaccgagaau

SEQ ID NO: 1149715 - RNA, 19 nt, Homo sapiens
  misc_RNA (1)...(19): siRNA sense strand
ugaacggcaaugauuauga

SEQ ID NO: 1149716 - RNA, 19 nt, Homo sapiens
  misc_RNA (1)...(19): siRNA sense strand
caacuacaucgacauuuac

SEQ ID NO: 1149717 - RNA, 19 nt, Homo sapiens
  misc_RNA (1)...(19): siRNA sense strand
aaacacggcacucguugug

SEQ ID NO: 1149718 - RNA, 19 nt, Homo sapiens
  misc_RNA (1)...(19): siRNA sense strand
ggaagauuacuaccauuuu

SEQ ID NO: 1149719 - RNA, 19 nt, Homo sapiens
  misc_RNA (1)...(19): siRNA sense strand
caacuugggccagauugga

SEQ ID NO: 1149720 - RNA, 19 nt, Homo sapiens
  misc_RNA (1)...(19): siRNA sense strand
gaucugcgucagcgcugua

SEQ ID NO: 1149721 - RNA, 19 nt, Homo sapiens
  misc_RNA (1)...(19): siRNA sense strand
cgcaggcccuuuacuucaa

SEQ ID NO: 1149722 - RNA, 19 nt, Homo sapiens
  misc_RNA (1)...(19): siRNA sense strand
ccaacagcaucuacaccau

SEQ ID NO: 1149723 - RNA, 19 nt, Homo sapiens
  misc_RNA (1)...(19): siRNA sense strand
cuacaucgacauuuacagu

SEQ ID NO: 1149724 - RNA, 19 nt, Homo sapiens
  misc_RNA (1)...(19): siRNA sense strand
ccagcaacaggaagugaaa

SEQ ID NO: 1149725 - RNA, 19 nt, Homo sapiens
  misc_RNA (1)...(19): siRNA sense strand
gcuuucgaguauggcauua

SEQ ID NO: 1149726 - RNA, 19 nt, Homo sapiens
  misc_RNA (1)...(19): siRNA sense strand
aauaaacacggcacucguu

SEQ ID NO: 1149727 - RNA, 19 nt, Homo sapiens
  misc_RNA (1)...(19): siRNA sense strand
caaugauuaugacccaucu

SEQ ID NO: 1149728 - RNA, 19 nt, Homo sapiens
  misc_RNA (1)...(19): siRNA sense strand
caacaugugguaccugcau

SEQ ID NO: 1149729 - RNA, 19 nt, Homo sapiens
  misc_RNA (1)...(19): siRNA sense strand
gcaaagucgcugggcauca

SEQ ID NO: 1149730 - RNA, 19 nt, Homo sapiens
  misc_RNA (1)...(19): siRNA sense strand
ggugaaauggcuccagcaa

SEQ ID NO: 1149731 - RNA, 19 nt, Homo sapiens
  misc_RNA (1)...(19): siRNA sense strand
caaacaauuccuacugcau

SEQ ID NO: 1149732 - RNA, 19 nt, Homo sapiens
  misc_RNA (1)...(19): siRNA sense strand
uaucacagcaaaaccuuua

SEQ ID NO: 1149733 - RNA, 19 nt, Homo sapiens
  misc_RNA (1)...(19): siRNA sense strand
aacgaagggugaagagaca

SEQ ID NO: 1149734 - RNA, 19 nt, Homo sapiens
  misc_RNA (1)...(19): siRNA sense strand
gcaucagacccaacuacau

SEQ ID NO: 1149735 - RNA, 19 nt, Homo sapiens
  misc_RNA (1)...(19): siRNA sense strand
guacaaugccaaaauagga

SEQ ID NO: 1149736 - RNA, 19 nt, Homo sapiens
  misc_RNA (1)...(19): siRNA sense strand
gcaggcccuuuacuucaac

SEQ ID NO: 1149737 - RNA, 19 nt, Homo sapiens
  misc_RNA (1)...(19): siRNA sense strand
ccgcaggcccuuuacuuca

SEQ ID NO: 1149738 - RNA, 19 nt, Homo sapiens
  misc_RNA (1)...(19): siRNA sense strand
cgacgugaacggcaaugau

SEQ ID NO: 1149739 - RNA, 19 nt, Homo sapiens
  misc_RNA (1)...(19): siRNA sense strand
caccgagaauggcuacaag

SEQ ID NO: 1149740 - RNA, 19 nt, Homo sapiens
  misc_RNA (1)...(19): siRNA sense strand
cgugaacggcaaugauuau

SEQ ID NO: 1149741 - RNA, 19 nt, Homo sapiens
  misc_RNA (1)...(19): siRNA sense strand
gugacccgcaggcccuuua

SEQ ID NO: 1149742 - RNA, 19 nt, Homo sapiens
  misc_RNA (1)...(19): siRNA sense strand
ccuuggcucuagaagcaaa

SEQ ID NO: 1149743 - RNA, 19 nt, Homo sapiens
  misc_RNA (1)...(19): siRNA sense strand
gcaacaggaagugaaacga

SEQ ID NO: 1149744 - RNA, 19 nt, Homo sapiens
  misc_RNA (1)...(19): siRNA sense strand
ugcgauggcuacaccaaca

SEQ ID NO: 1149745 - RNA, 19 nt, Homo sapiens
  misc_RNA (1)...(19): siRNA sense strand
ccaccgagaauggcuacaa

SEQ ID NO: 1149746 - RNA, 19 nt, Homo sapiens
  misc_RNA (1)...(19): siRNA sense strand
ccaacuacaucgacauuua

SEQ ID NO: 1149747 - RNA, 19 nt, Homo sapiens
  misc_RNA (1)...(19): siRNA sense strand
uuggaaaccuggaagauua

SEQ ID NO: 1149748 - RNA, 19 nt, Homo sapiens
  misc_RNA (1)...(19): siRNA sense strand
ugaaauggcuccagcaaca

SEQ ID NO: 1149749 - RNA, 19 nt, Homo sapiens
  misc_RNA (1)...(19): siRNA sense strand
ggacggcgaugucacagau

SEQ ID NO: 1149750 - RNA, 19 nt, Homo sapiens
  misc_RNA (1)...(19): siRNA sense strand
gaagcaaacagccaguuaa

SEQ ID NO: 1149751 - RNA, 19 nt, Homo sapiens
  misc_RNA (1)...(19): siRNA sense strand
gaacggcaaugauuaugac

SEQ ID NO: 1149752 - RNA, 19 nt, Homo sapiens
  misc_RNA (1)...(19): siRNA sense strand
gcgagcgacuggaaaguga

SEQ ID NO: 1149753 - RNA, 19 nt, Homo sapiens
  misc_RNA (1)...(19): siRNA sense strand
ccucacaccuuccucagaa

SEQ ID NO: 1149754 - RNA, 19 nt, Homo sapiens
  misc_RNA (1)...(19): siRNA sense strand
gauaugaugccagcaauga

SEQ ID NO: 1149755 - RNA, 19 nt, Homo sapiens
  misc_RNA (1)...(19): siRNA sense strand
ugacccaucuccacgauau

SEQ ID NO: 1149756 - RNA, 19 nt, Homo sapiens
  misc_RNA (1)...(19): siRNA sense strand
caacaggaagugaaacgaa

SEQ ID NO: 1149757 - RNA, 19 nt, Homo sapiens
  misc_RNA (1)...(19): siRNA sense strand
gaaagcgagcgacuggaaa

SEQ ID NO: 1149758 - RNA, 19 nt, Homo sapiens
  misc_RNA (1)...(19): siRNA sense strand
gcaaacagccaguuaaccu

SEQ ID NO: 1149759 - RNA, 19 nt, Homo sapiens
  misc_RNA (1)...(19): siRNA sense strand
agagacaggugcgaaguga

SEQ ID NO: 1149760 - RNA, 19 nt, Homo sapiens
  misc_RNA (1)...(19): siRNA sense strand
gacgugaacggcaaugauu

SEQ ID NO: 1149761 - RNA, 19 nt, Homo sapiens
  misc_RNA (1)...(19): siRNA sense strand
gaugauggcauagagagaa

SEQ ID NO: 1149762 - RNA, 19 nt, Homo sapiens
  misc_RNA (1)...(19): siRNA sense strand
cagauguggucgaggcaaa

SEQ ID NO: 1149763 - RNA, 19 nt, Homo sapiens
  misc_RNA (1)...(19): siRNA sense strand
agaagcaaacagccaguua

SEQ ID NO: 1149764 - RNA, 19 nt, Homo sapiens
  misc_RNA (1)...(19): siRNA sense strand
caaagucgcugggcaucag

SEQ ID NO: 1149765 - RNA, 19 nt, Homo sapiens
  misc_RNA (1)...(19): siRNA sense strand
gaaacgaagggugaagaga

SEQ ID NO: 1149766 - RNA, 19 nt, Homo sapiens
  misc_RNA (1)...(19): siRNA sense strand
caucagacccaacuacauc

SEQ ID NO: 1149767 - RNA, 19 nt, Homo sapiens
  misc_RNA (1)...(19): siRNA sense strand
ugaaagcgagcgacuggaa

SEQ ID NO: 1149768 - RNA, 19 nt, Homo sapiens
  misc_RNA (1)...(19): siRNA sense strand
gaagagacaggugcgaagu

SEQ ID NO: 1149769 - RNA, 19 nt, Homo sapiens
  misc_RNA (1)...(19): siRNA sense strand
caucaucgccuuggcucua

SEQ ID NO: 1149770 - RNA, 19 nt, Homo sapiens
  misc_RNA (1)...(19): siRNA sense strand
ccuggaagauuacuaccau

SEQ ID NO: 1149771 - RNA, 19 nt, Homo sapiens
  misc_RNA (1)...(19): siRNA sense strand
uuucgaguauggcauuaaa

SEQ ID NO: 1149772 - RNA, 19 nt, Homo sapiens
  misc_RNA (1)...(19): siRNA sense strand
uaugaugccagcaaugaaa

SEQ ID NO: 1149773 - RNA, 19 nt, Homo sapiens
  misc_RNA (1)...(19): siRNA sense strand
gaaaccuggaagauuacua

SEQ ID NO: 1149774 - RNA, 19 nt, Homo sapiens
  misc_RNA (1)...(19): siRNA sense strand
cgccuuggcucuagaagca

SEQ ID NO: 1149775 - RNA, 19 nt, Homo sapiens
  misc_RNA (1)...(19): siRNA sense strand
gcaguggggccuuuuauga

SEQ ID NO: 1149776 - RNA, 19 nt, Homo sapiens
  misc_RNA (1)...(19): siRNA sense strand
uggaagauuacuaccauuu

SEQ ID NO: 1149777 - RNA, 19 nt, Homo sapiens
  misc_RNA (1)...(19): siRNA sense strand
cagcaaacaauuccuacug

SEQ ID NO: 1149778 - RNA, 19 nt, Homo sapiens
  misc_RNA (1)...(19): siRNA sense strand
cagcagcgccaccgagaau

SEQ ID NO: 1149779 - RNA, 19 nt, Homo sapiens
  misc_RNA (1)...(19): siRNA sense strand
ugaacggcaaugauuauga

SEQ ID NO: 1149780 - RNA, 19 nt, Homo sapiens
  misc_RNA (1)...(19): siRNA sense strand
caacuacaucgacauuuac

SEQ ID NO: 1149781 - RNA, 19 nt, Homo sapiens
  misc_RNA (1)...(19): siRNA sense strand
aaacacggcacucguugug

SEQ ID NO: 1149782 - RNA, 19 nt, Homo sapiens
  misc_RNA (1)...(19): siRNA sense strand
ggaagauuacuaccauuuu

SEQ ID NO: 1149783 - RNA, 19 nt, Homo sapiens
  misc_RNA (1)...(19): siRNA sense strand
caacuugggccagauugga

SEQ ID NO: 1149784 - RNA, 19 nt, Homo sapiens
  misc_RNA (1)...(19): siRNA sense strand
gaucugcgucagcgcugua

SEQ ID NO: 1149785 - RNA, 19 nt, Homo sapiens
  misc_RNA (1)...(19): siRNA sense strand
cgcaggcccuuuacuucaa

SEQ ID NO: 1149786 - RNA, 19 nt, Homo sapiens
  misc_RNA (1)...(19): siRNA sense strand
ccaacagcaucuacaccau

SEQ ID NO: 1149787 - RNA, 19 nt, Homo sapiens
  misc_RNA (1)...(19): siRNA sense strand
cuacaucgacauuuacagu

SEQ ID NO: 1149788 - RNA, 19 nt, Homo sapiens
  misc_RNA (1)...(19): siRNA sense strand
ccagcaacaggaagugaaa

SEQ ID NO: 1149789 - RNA, 19 nt, Homo sapiens
  misc_RNA (1)...(19): siRNA sense strand
gcuuucgaguauggcauua

SEQ ID NO: 1149790 - RNA, 19 nt, Homo sapiens
  misc_RNA (1)...(19): siRNA sense strand
aauaaacacggcacucguu

SEQ ID NO: 1149791 - RNA, 19 nt, Homo sapiens
  misc_RNA (1)...(19): siRNA sense strand
caaugauuaugacccaucu

SEQ ID NO: 1149792 - RNA, 19 nt, Homo sapiens
  misc_RNA (1)...(19): siRNA sense strand
caacaugugguaccugcau

SEQ ID NO: 1149793 - RNA, 19 nt, Homo sapiens
  misc_RNA (1)...(19): siRNA sense strand
gcaaagucgcugggcauca

SEQ ID NO: 1149794 - RNA, 19 nt, Homo sapiens
  misc_RNA (1)...(19): siRNA sense strand
ggugaaauggcuccagcaa

SEQ ID NO: 1149795 - RNA, 19 nt, Homo sapiens
  misc_RNA (1)...(19): siRNA sense strand
caaacaauuccuacugcau

SEQ ID NO: 1149796 - RNA, 19 nt, Homo sapiens
  misc_RNA (1)...(19): siRNA sense strand
uaucacagcaaaaccuuua

SEQ ID NO: 1149797 - RNA, 19 nt, Homo sapiens
  misc_RNA (1)...(19): siRNA sense strand
aacgaagggugaagagaca

SEQ ID NO: 1149798 - RNA, 19 nt, Homo sapiens
  misc_RNA (1)...(19): siRNA sense strand
gcaucagacccaacuacau

SEQ ID NO: 1149799 - RNA, 19 nt, Homo sapiens
  misc_RNA (1)...(19): siRNA sense strand
guacaaugccaaaauagga

SEQ ID NO: 1149800 - RNA, 19 nt, Homo sapiens
  misc_RNA (1)...(19): siRNA sense strand
gcaggcccuuuacuucaac

SEQ ID NO: 1149801 - RNA, 19 nt, Homo sapiens
  misc_RNA (1)...(19): siRNA sense strand
ccgcaggcccuuuacuuca

SEQ ID NO: 1149802 - RNA, 19 nt, Homo sapiens
  misc_RNA (1)...(19): siRNA sense strand
cgacgugaacggcaaugau

SEQ ID NO: 1149803 - RNA, 19 nt, Homo sapiens
  misc_RNA (1)...(19): siRNA sense strand
caccgagaauggcuacaag

SEQ ID NO: 1149804 - RNA, 19 nt, Homo sapiens
  misc_RNA (1)...(19): siRNA sense strand
cgugaacggcaaugauuau

SEQ ID NO: 1149805 - RNA, 19 nt, Homo sapiens
  misc_RNA (1)...(19): siRNA sense strand
gugacccgcaggcccuuua

SEQ ID NO: 1149806 - RNA, 19 nt, Homo sapiens
  misc_RNA (1)...(19): siRNA sense strand
ccuuggcucuagaagcaaa

SEQ ID NO: 1149807 - RNA, 19 nt, Homo sapiens
  misc_RNA (1)...(19): siRNA sense strand
gcaacaggaagugaaacga

SEQ ID NO: 1149808 - RNA, 19 nt, Homo sapiens
  misc_RNA (1)...(19): siRNA sense strand
ugcgauggcuacaccaaca

SEQ ID NO: 1149809 - RNA, 19 nt, Homo sapiens
  misc_RNA (1)...(19): siRNA sense strand
ccaccgagaauggcuacaa

SEQ ID NO: 1149810 - RNA, 19 nt, Homo sapiens
  misc_RNA (1)...(19): siRNA sense strand
ccaacuacaucgacauuua

SEQ ID NO: 1149811 - RNA, 19 nt, Homo sapiens
  misc_RNA (1)...(19): siRNA sense strand
uuggaaaccuggaagauua

SEQ ID NO: 1149812 - RNA, 19 nt, Homo sapiens
  misc_RNA (1)...(19): siRNA sense strand
ugaaauggcuccagcaaca

SEQ ID NO: 1149813 - RNA, 19 nt, Homo sapiens
  misc_RNA (1)...(19): siRNA sense strand
ggacggcgaugucacagau

SEQ ID NO: 1149814 - RNA, 19 nt, Homo sapiens
  misc_RNA (1)...(19): siRNA sense strand
gaagcaaacagccaguuaa

SEQ ID NO: 1149815 - RNA, 19 nt, Homo sapiens
  misc_RNA (1)...(19): siRNA sense strand
gaacggcaaugauuaugac

SEQ ID NO: 1149816 - RNA, 19 nt, Homo sapiens
  misc_RNA (1)...(19): siRNA sense strand
gcgagcgacuggaaaguga

SEQ ID NO: 1149817 - RNA, 19 nt, Homo sapiens
  misc_RNA (1)...(19): siRNA sense strand
ccucacaccuuccucagaa

SEQ ID NO: 1149818 - RNA, 19 nt, Homo sapiens
  misc_RNA (1)...(19): siRNA sense strand
gauaugaugccagcaauga

SEQ ID NO: 1149819 - RNA, 19 nt, Homo sapiens
  misc_RNA (1)...(19): siRNA sense strand
ugacccaucuccacgauau

SEQ ID NO: 1149820 - RNA, 19 nt, Homo sapiens
  misc_RNA (1)...(19): siRNA sense strand
caacaggaagugaaacgaa

SEQ ID NO: 1149821 - RNA, 19 nt, Homo sapiens
  misc_RNA (1)...(19): siRNA sense strand
gaaagcgagcgacuggaaa

SEQ ID NO: 1149822 - RNA, 19 nt, Homo sapiens
  misc_RNA (1)...(19): siRNA sense strand
gcaaacagccaguuaaccu

SEQ ID NO: 1149823 - RNA, 19 nt, Homo sapiens
  misc_RNA (1)...(19): siRNA sense strand
agagacaggugcgaaguga

SEQ ID NO: 1149824 - RNA, 19 nt, Homo sapiens
  misc_RNA (1)...(19): siRNA sense strand
gacgugaacggcaaugauu

SEQ ID NO: 1149825 - RNA, 19 nt, Homo sapiens
  misc_RNA (1)...(19): siRNA sense strand
gaugauggcauagagagaa

SEQ ID NO: 1149826 - RNA, 19 nt, Homo sapiens
  misc_RNA (1)...(19): siRNA sense strand
cagauguggucgaggcaaa

SEQ ID NO: 1149827 - RNA, 19 nt, Homo sapiens
  misc_RNA (1)...(19): siRNA sense strand
agaagcaaacagccaguua

SEQ ID NO: 1149828 - RNA, 19 nt, Homo sapiens
  misc_RNA (1)...(19): siRNA sense strand
caaagucgcugggcaucag

SEQ ID NO: 1149829 - RNA, 19 nt, Homo sapiens
  misc_RNA (1)...(19): siRNA sense strand
gaaacgaagggugaagaga

SEQ ID NO: 1149830 - RNA, 19 nt, Homo sapiens
  misc_RNA (1)...(19): siRNA sense strand
caucagacccaacuacauc

SEQ ID NO: 1149831 - RNA, 19 nt, Homo sapiens
  misc_RNA (1)...(19): siRNA sense strand
ugaaagcgagcgacuggaa

SEQ ID NO: 1149832 - RNA, 19 nt, Homo sapiens
  misc_RNA (1)...(19): siRNA sense strand
gaagagacaggugcgaagu

SEQ ID NO: 1149833 - RNA, 19 nt, Homo sapiens
  misc_RNA (1)...(19): siRNA sense strand
caucaucgccuuggcucua

SEQ ID NO: 1149834 - RNA, 19 nt, Homo sapiens
  misc_RNA (1)...(19): siRNA sense strand
ccuggaagauuacuaccau

SEQ ID NO: 1149835 - RNA, 19 nt, Homo sapiens
  misc_RNA (1)...(19): siRNA sense strand
uuucgaguauggcauuaaa

SEQ ID NO: 1149836 - RNA, 19 nt, Homo sapiens
  misc_RNA (1)...(19): siRNA sense strand
uaugaugccagcaaugaaa

SEQ ID NO: 1149837 - RNA, 19 nt, Homo sapiens
  misc_RNA (1)...(19): siRNA sense strand
gaaaccuggaagauuacua

SEQ ID NO: 1149838 - RNA, 19 nt, Homo sapiens
  misc_RNA (1)...(19): siRNA sense strand
cgccuuggcucuagaagca

SEQ ID NO: 1149839 - RNA, 19 nt, Homo sapiens
  misc_RNA (1)...(19): siRNA sense strand
gcaguggggccuuuuauga

SEQ ID NO: 1149840 - RNA, 19 nt, Homo sapiens
  misc_RNA (1)...(19): siRNA sense strand
uggaagauuacuaccauuu

SEQ ID NO: 1149841 - RNA, 19 nt, Homo sapiens
  misc_RNA (1)...(19): siRNA sense strand
cagcaaacaauuccuacug

SEQ ID NO: 1149842 - RNA, 19 nt, Homo sapiens
  misc_RNA (1)...(19): siRNA sense strand
cagcagcgccaccgagaau

SEQ ID NO: 1149843 - RNA, 19 nt, Homo sapiens
  misc_RNA (1)...(19): siRNA sense strand
ugaacggcaaugauuauga

SEQ ID NO: 1149844 - RNA, 19 nt, Homo sapiens
  misc_RNA (1)...(19): siRNA sense strand
caacuacaucgacauuuac

SEQ ID NO: 1149845 - RNA, 19 nt, Homo sapiens
  misc_RNA (1)...(19): siRNA sense strand
aaacacggcacucguugug

SEQ ID NO: 1149846 - RNA, 19 nt, Homo sapiens
  misc_RNA (1)...(19): siRNA sense strand
ggaagauuacuaccauuuu

SEQ ID NO: 1149847 - RNA, 19 nt, Homo sapiens
  misc_RNA (1)...(19): siRNA sense strand
caacuugggccagauugga

SEQ ID NO: 1149848 - RNA, 19 nt, Homo sapiens
  misc_RNA (1)...(19): siRNA sense strand
gaucugcgucagcgcugua

SEQ ID NO: 1149849 - RNA, 19 nt, Homo sapiens
  misc_RNA (1)...(19): siRNA sense strand
cgcaggcccuuuacuucaa

SEQ ID NO: 1149850 - RNA, 19 nt, Homo sapiens
  misc_RNA (1)...(19): siRNA sense strand
ccaacagcaucuacaccau

SEQ ID NO: 1149851 - RNA, 19 nt, Homo sapiens
  misc_RNA (1)...(19): siRNA sense strand
cuacaucgacauuuacagu

SEQ ID NO: 1149852 - RNA, 19 nt, Homo sapiens
  misc_RNA (1)...(19): siRNA sense strand
ccagcaacaggaagugaaa

SEQ ID NO: 1149853 - RNA, 19 nt, Homo sapiens
  misc_RNA (1)...(19): siRNA sense strand
gcuuucgaguauggcauua

SEQ ID NO: 1149854 - RNA, 19 nt, Homo sapiens
  misc_RNA (1)...(19): siRNA sense strand
aauaaacacggcacucguu

SEQ ID NO: 1149855 - RNA, 19 nt, Homo sapiens
  misc_RNA (1)...(19): siRNA sense strand
caaugauuaugacccaucu

SEQ ID NO: 1149856 - RNA, 19 nt, Homo sapiens
  misc_RNA (1)...(19): siRNA sense strand
caacaugugguaccugcau

SEQ ID NO: 1149857 - RNA, 19 nt, Homo sapiens
  misc_RNA (1)...(19): siRNA sense strand
gcaaagucgcugggcauca

SEQ ID NO: 1149858 - RNA, 19 nt, Homo sapiens
  misc_RNA (1)...(19): siRNA sense strand
ggugaaauggcuccagcaa

SEQ ID NO: 1149859 - RNA, 19 nt, Homo sapiens
  misc_RNA (1)...(19): siRNA sense strand
caaacaauuccuacugcau

SEQ ID NO: 1149860 - RNA, 19 nt, Homo sapiens
  misc_RNA (1)...(19): siRNA sense strand
uaucacagcaaaaccuuua

SEQ ID NO: 1149861 - RNA, 19 nt, Homo sapiens
  misc_RNA (1)...(19): siRNA sense strand
aacgaagggugaagagaca

SEQ ID NO: 1149862 - RNA, 19 nt, Homo sapiens
  misc_RNA (1)...(19): siRNA sense strand
gcaucagacccaacuacau

SEQ ID NO: 1149863 - RNA, 19 nt, Homo sapiens
  misc_RNA (1)...(19): siRNA sense strand
guacaaugccaaaauagga

SEQ ID NO: 1149864 - RNA, 19 nt, Homo sapiens
  misc_RNA (1)...(19): siRNA sense strand
gcaggcccuuuacuucaac

SEQ ID NO: 1149865 - RNA, 19 nt, Homo sapiens
  misc_RNA (1)...(19): siRNA sense strand
ccgcaggcccuuuacuuca

SEQ ID NO: 1149866 - RNA, 19 nt, Homo sapiens
  misc_RNA (1)...(19): siRNA sense strand
cgacgugaacggcaaugau

SEQ ID NO: 1149867 - RNA, 19 nt, Homo sapiens
  misc_RNA (1)...(19): siRNA sense strand
caccgagaauggcuacaag

SEQ ID NO: 1149868 - RNA, 19 nt, Homo sapiens
  misc_RNA (1)...(19): siRNA sense strand
cgugaacggcaaugauuau

SEQ ID NO: 1149869 - RNA, 19 nt, Homo sapiens
  misc_RNA (1)...(19): siRNA sense strand
gugacccgcaggcccuuua

SEQ ID NO: 1149870 - RNA, 19 nt, Homo sapiens
  misc_RNA (1)...(19): siRNA sense strand
ccuuggcucuagaagcaaa

SEQ ID NO: 1149871 - RNA, 19 nt, Homo sapiens
  misc_RNA (1)...(19): siRNA sense strand
gcaacaggaagugaaacga

SEQ ID NO: 1149872 - RNA, 19 nt, Homo sapiens
  misc_RNA (1)...(19): siRNA sense strand
ugcgauggcuacaccaaca

SEQ ID NO: 1149873 - RNA, 19 nt, Homo sapiens
  misc_RNA (1)...(19): siRNA sense strand
ccaccgagaauggcuacaa

SEQ ID NO: 1149874 - RNA, 19 nt, Homo sapiens
  misc_RNA (1)...(19): siRNA sense strand
ccaacuacaucgacauuua

SEQ ID NO: 1149875 - RNA, 19 nt, Homo sapiens
  misc_RNA (1)...(19): siRNA sense strand
uuggaaaccuggaagauua

SEQ ID NO: 1149876 - RNA, 19 nt, Homo sapiens
  misc_RNA (1)...(19): siRNA sense strand
ugaaauggcuccagcaaca

SEQ ID NO: 1149877 - RNA, 19 nt, Homo sapiens
  misc_RNA (1)...(19): siRNA sense strand
ggacggcgaugucacagau

SEQ ID NO: 1149878 - RNA, 19 nt, Homo sapiens
  misc_RNA (1)...(19): siRNA sense strand
gaagcaaacagccaguuaa

SEQ ID NO: 1149879 - RNA, 19 nt, Homo sapiens
  misc_RNA (1)...(19): siRNA sense strand
gaacggcaaugauuaugac

SEQ ID NO: 1149880 - RNA, 19 nt, Homo sapiens
  misc_RNA (1)...(19): siRNA sense strand
gcgagcgacuggaaaguga

SEQ ID NO: 1149881 - RNA, 19 nt, Homo sapiens
  misc_RNA (1)...(19): siRNA sense strand
ccucacaccuuccucagaa

SEQ ID NO: 1149882 - RNA, 19 nt, Homo sapiens
  misc_RNA (1)...(19): siRNA sense strand
gauaugaugccagcaauga

SEQ ID NO: 1149883 - RNA, 19 nt, Homo sapiens
  misc_RNA (1)...(19): siRNA sense strand
ugacccaucuccacgauau

SEQ ID NO: 1149884 - RNA, 19 nt, Homo sapiens
  misc_RNA (1)...(19): siRNA sense strand
caacaggaagugaaacgaa

SEQ ID NO: 1149885 - RNA, 19 nt, Homo sapiens
  misc_RNA (1)...(19): siRNA sense strand
gaaagcgagcgacuggaaa

SEQ ID NO: 1149886 - RNA, 19 nt, Homo sapiens
  misc_RNA (1)...(19): siRNA sense strand
gcaaacagccaguuaaccu

SEQ ID NO: 1149887 - RNA, 19 nt, Homo sapiens
  misc_RNA (1)...(19): siRNA sense strand
agagacaggugcgaaguga

SEQ ID NO: 1149888 - RNA, 19 nt, Homo sapiens
  misc_RNA (1)...(19): siRNA sense strand
gacgugaacggcaaugauu

SEQ ID NO: 1149889 - RNA, 19 nt, Homo sapiens
  misc_RNA (1)...(19): siRNA sense strand
gaugauggcauagagagaa

SEQ ID NO: 1149890 - RNA, 19 nt, Homo sapiens
  misc_RNA (1)...(19): siRNA sense strand
cagauguggucgaggcaaa

SEQ ID NO: 1149891 - RNA, 19 nt, Homo sapiens
  misc_RNA (1)...(19): siRNA sense strand
agaagcaaacagccaguua

SEQ ID NO: 1149892 - RNA, 19 nt, Homo sapiens
  misc_RNA (1)...(19): siRNA sense strand
caaagucgcugggcaucag

SEQ ID NO: 1149893 - RNA, 19 nt, Homo sapiens
  misc_RNA (1)...(19): siRNA sense strand
gaaacgaagggugaagaga

SEQ ID NO: 1149894 - RNA, 19 nt, Homo sapiens
  misc_RNA (1)...(19): siRNA sense strand
caucagacccaacuacauc

SEQ ID NO: 1149895 - RNA, 19 nt, Homo sapiens
  misc_RNA (1)...(19): siRNA sense strand
ugaaagcgagcgacuggaa

SEQ ID NO: 1149896 - RNA, 19 nt, Homo sapiens
  misc_RNA (1)...(19): siRNA sense strand
gaagagacaggugcgaagu

SEQ ID NO: 1149897 - RNA, 19 nt, Homo sapiens
  misc_RNA (1)...(19): siRNA sense strand
caucaucgccuuggcucua

SEQ ID NO: 1149898 - RNA, 19 nt, Homo sapiens
  misc_RNA (1)...(19): siRNA sense strand
ccuggaagauuacuaccau

SEQ ID NO: 1149899 - RNA, 19 nt, Homo sapiens
  misc_RNA (1)...(19): siRNA sense strand
uuucgaguauggcauuaaa

SEQ ID NO: 1149900 - RNA, 19 nt, Homo sapiens
  misc_RNA (1)...(19): siRNA sense strand
uaugaugccagcaaugaaa

SEQ ID NO: 1149901 - RNA, 19 nt, Homo sapiens
  misc_RNA (1)...(19): siRNA sense strand
gaaaccuggaagauuacua

SEQ ID NO: 1149902 - RNA, 19 nt, Homo sapiens
  misc_RNA (1)...(19): siRNA sense strand
cgccuuggcucuagaagca

SEQ ID NO: 1149903 - RNA, 19 nt, Homo sapiens
  misc_RNA (1)...(19): siRNA sense strand
gcaguggggccuuuuauga

SEQ ID NO: 1149904 - RNA, 19 nt, Homo sapiens
  misc_RNA (1)...(19): siRNA sense strand
uggaagauuacuaccauuu

SEQ ID NO: 1149905 - RNA, 19 nt, Homo sapiens
  misc_RNA (1)...(19): siRNA sense strand
cagcaaacaauuccuacug

SEQ ID NO: 1149906 - RNA, 19 nt, Homo sapiens
  misc_RNA (1)...(19): siRNA sense strand
cagcagcgccaccgagaau

SEQ ID NO: 1149907 - RNA, 19 nt, Homo sapiens
  misc_RNA (1)...(19): siRNA sense strand
ugaacggcaaugauuauga

SEQ ID NO: 1149908 - RNA, 19 nt, Homo sapiens
  misc_RNA (1)...(19): siRNA sense strand
caacuacaucgacauuuac

SEQ ID NO: 1149909 - RNA, 19 nt, Homo sapiens
  misc_RNA (1)...(19): siRNA sense strand
aaacacggcacucguugug

SEQ ID NO: 1149910 - RNA, 19 nt, Homo sapiens
  misc_RNA (1)...(19): siRNA sense strand
ggaagauuacuaccauuuu

SEQ ID NO: 1149911 - RNA, 19 nt, Homo sapiens
  misc_RNA (1)...(19): siRNA sense strand
caacuugggccagauugga

SEQ ID NO: 1149912 - RNA, 19 nt, Homo sapiens
  misc_RNA (1)...(19): siRNA sense strand
gaucugcgucagcgcugua

SEQ ID NO: 1149913 - RNA, 19 nt, Homo sapiens
  misc_RNA (1)...(19): siRNA sense strand
cgcaggcccuuuacuucaa

SEQ ID NO: 1149914 - RNA, 19 nt, Homo sapiens
  misc_RNA (1)...(19): siRNA sense strand
ccaacagcaucuacaccau

SEQ ID NO: 1149915 - RNA, 19 nt, Homo sapiens
  misc_RNA (1)...(19): siRNA sense strand
cuacaucgacauuuacagu

SEQ ID NO: 1149916 - RNA, 19 nt, Homo sapiens
  misc_RNA (1)...(19): siRNA sense strand
ccagcaacaggaagugaaa

SEQ ID NO: 1149917 - RNA, 19 nt, Homo sapiens
  misc_RNA (1)...(19): siRNA sense strand
gcuuucgaguauggcauua

SEQ ID NO: 1149918 - RNA, 19 nt, Homo sapiens
  misc_RNA (1)...(19): siRNA sense strand
aauaaacacggcacucguu

SEQ ID NO: 1149919 - RNA, 19 nt, Homo sapiens
  misc_RNA (1)...(19): siRNA sense strand
caaugauuaugacccaucu

SEQ ID NO: 1149920 - RNA, 19 nt, Homo sapiens
  misc_RNA (1)...(19): siRNA sense strand
caacaugugguaccugcau

SEQ ID NO: 1149921 - RNA, 19 nt, Homo sapiens
  misc_RNA (1)...(19): siRNA sense strand
gcaaagucgcugggcauca

SEQ ID NO: 1149922 - RNA, 19 nt, Homo sapiens
  misc_RNA (1)...(19): siRNA sense strand
ggugaaauggcuccagcaa

SEQ ID NO: 1149923 - RNA, 19 nt, Homo sapiens
  misc_RNA (1)...(19): siRNA sense strand
caaacaauuccuacugcau

SEQ ID NO: 1149924 - RNA, 19 nt, Homo sapiens
  misc_RNA (1)...(19): siRNA sense strand
uaucacagcaaaaccuuua

SEQ ID NO: 1149925 - RNA, 19 nt, Homo sapiens
  misc_RNA (1)...(19): siRNA sense strand
aacgaagggugaagagaca

SEQ ID NO: 1149926 - RNA, 19 nt, Homo sapiens
  misc_RNA (1)...(19): siRNA sense strand
gcaucagacccaacuacau

SEQ ID NO: 1149927 - RNA, 19 nt, Homo sapiens
  misc_RNA (1)...(19): siRNA sense strand
guacaaugccaaaauagga

SEQ ID NO: 1149928 - RNA, 19 nt, Homo sapiens
  misc_RNA (1)...(19): siRNA sense strand
gcaggcccuuuacuucaac

SEQ ID NO: 1149929 - RNA, 19 nt, Homo sapiens
  misc_RNA (1)...(19): siRNA sense strand
ccgcaggcccuuuacuuca

SEQ ID NO: 1149930 - RNA, 19 nt, Homo sapiens
  misc_RNA (1)...(19): siRNA sense strand
cgacgugaacggcaaugau

SEQ ID NO: 1149931 - RNA, 19 nt, Homo sapiens
  misc_RNA (1)...(19): siRNA sense strand
caccgagaauggcuacaag

SEQ ID NO: 1149932 - RNA, 19 nt, Homo sapiens
  misc_RNA (1)...(19): siRNA sense strand
cgugaacggcaaugauuau

SEQ ID NO: 1149933 - RNA, 19 nt, Homo sapiens
  misc_RNA (1)...(19): siRNA sense strand
gugacccgcaggcccuuua

SEQ ID NO: 1149934 - RNA, 19 nt, Homo sapiens
  misc_RNA (1)...(19): siRNA sense strand
ccuuggcucuagaagcaaa

SEQ ID NO: 1149935 - RNA, 19 nt, Homo sapiens
  misc_RNA (1)...(19): siRNA sense strand
gcaacaggaagugaaacga

SEQ ID NO: 1149936 - RNA, 19 nt, Homo sapiens
  misc_RNA (1)...(19): siRNA sense strand
ugcgauggcuacaccaaca

SEQ ID NO: 1149937 - RNA, 19 nt, Homo sapiens
  misc_RNA (1)...(19): siRNA sense strand
ccaccgagaauggcuacaa

SEQ ID NO: 1149938 - RNA, 19 nt, Homo sapiens
  misc_RNA (1)...(19): siRNA sense strand
ccaacuacaucgacauuua

SEQ ID NO: 1149939 - RNA, 19 nt, Homo sapiens
  misc_RNA (1)...(19): siRNA sense strand
uuggaaaccuggaagauua

SEQ ID NO: 1149940 - RNA, 19 nt, Homo sapiens
  misc_RNA (1)...(19): siRNA sense strand
ugaaauggcuccagcaaca

SEQ ID NO: 1149941 - RNA, 19 nt, Homo sapiens
  misc_RNA (1)...(19): siRNA sense strand
ggacggcgaugucacagau

SEQ ID NO: 1149942 - RNA, 19 nt, Homo sapiens
  misc_RNA (1)...(19): siRNA sense strand
gaagcaaacagccaguuaa

SEQ ID NO: 1149943 - RNA, 19 nt, Homo sapiens
  misc_RNA (1)...(19): siRNA sense strand
gaacggcaaugauuaugac

SEQ ID NO: 1149944 - RNA, 19 nt, Homo sapiens
  misc_RNA (1)...(19): siRNA sense strand
gcgagcgacuggaaaguga

SEQ ID NO: 1149945 - RNA, 19 nt, Homo sapiens
  misc_RNA (1)...(19): siRNA sense strand
ccucacaccuuccucagaa

SEQ ID NO: 1149946 - RNA, 19 nt, Homo sapiens
  misc_RNA (1)...(19): siRNA sense strand
gauaugaugccagcaauga

SEQ ID NO: 1149947 - RNA, 19 nt, Homo sapiens
  misc_RNA (1)...(19): siRNA sense strand
ugacccaucuccacgauau

SEQ ID NO: 1149948 - RNA, 19 nt, Homo sapiens
  misc_RNA (1)...(19): siRNA sense strand
caacaggaagugaaacgaa

SEQ ID NO: 1149949 - RNA, 19 nt, Homo sapiens
  misc_RNA (1)...(19): siRNA sense strand
gaaagcgagcgacuggaaa

SEQ ID NO: 1149950 - RNA, 19 nt, Homo sapiens
  misc_RNA (1)...(19): siRNA sense strand
gcaaacagccaguuaaccu

SEQ ID NO: 1149951 - RNA, 19 nt, Homo sapiens
  misc_RNA (1)...(19): siRNA sense strand
agagacaggugcgaaguga

SEQ ID NO: 1149952 - RNA, 19 nt, Homo sapiens
  misc_RNA (1)...(19): siRNA sense strand
gacgugaacggcaaugauu

SEQ ID NO: 1149953 - RNA, 19 nt, Homo sapiens
  misc_RNA (1)...(19): siRNA sense strand
gaugauggcauagagagaa

SEQ ID NO: 1149954 - RNA, 19 nt, Homo sapiens
  misc_RNA (1)...(19): siRNA sense strand
cagauguggucgaggcaaa

SEQ ID NO: 1149955 - RNA, 19 nt, Homo sapiens
  misc_RNA (1)...(19): siRNA sense strand
agaagcaaacagccaguua

SEQ ID NO: 1149956 - RNA, 19 nt, Homo sapiens
  misc_RNA (1)...(19): siRNA sense strand
caaagucgcugggcaucag

SEQ ID NO: 1149957 - RNA, 19 nt, Homo sapiens
  misc_RNA (1)...(19): siRNA sense strand
gaaacgaagggugaagaga

SEQ ID NO: 1149958 - RNA, 19 nt, Homo sapiens
  misc_RNA (1)...(19): siRNA sense strand
caucagacccaacuacauc

SEQ ID NO: 1149959 - RNA, 19 nt, Homo sapiens
  misc_RNA (1)...(19): siRNA sense strand
ugaaagcgagcgacuggaa

SEQ ID NO: 1149960 - RNA, 19 nt, Homo sapiens
  misc_RNA (1)...(19): siRNA sense strand
gaagagacaggugcgaagu

SEQ ID NO: 1149961 - RNA, 19 nt, Homo sapiens
  misc_RNA (1)...(19): siRNA sense strand
caucaucgccuuggcucua

SEQ ID NO: 1149962 - RNA, 19 nt, Homo sapiens
  misc_RNA (1)...(19): siRNA sense strand
ccuggaagauuacuaccau

SEQ ID NO: 1149963 - RNA, 19 nt, Homo sapiens
  misc_RNA (1)...(19): siRNA sense strand
uuucgaguauggcauuaaa

SEQ ID NO: 1149964 - RNA, 19 nt, Homo sapiens
  misc_RNA (1)...(19): siRNA sense strand
uaugaugccagcaaugaaa

SEQ ID NO: 1149965 - RNA, 19 nt, Homo sapiens
  misc_RNA (1)...(19): siRNA sense strand
gaaaccuggaagauuacua

SEQ ID NO: 1149966 - RNA, 19 nt, Homo sapiens
  misc_RNA (1)...(19): siRNA sense strand
cgccuuggcucuagaagca

SEQ ID NO: 1149967 - RNA, 19 nt, Homo sapiens
  misc_RNA (1)...(19): siRNA sense strand
gcaguggggccuuuuauga

SEQ ID NO: 1149968 - RNA, 19 nt, Homo sapiens
  misc_RNA (1)...(19): siRNA sense strand
uggaagauuacuaccauuu

SEQ ID NO: 1149969 - RNA, 19 nt, Homo sapiens
  misc_RNA (1)...(19): siRNA sense strand
cagcaaacaauuccuacug

SEQ ID NO: 1149970 - RNA, 19 nt, Homo sapiens
  misc_RNA (1)...(19): siRNA sense strand
cagcagcgccaccgagaau

SEQ ID NO: 1149971 - RNA, 19 nt, Homo sapiens
  misc_RNA (1)...(19): siRNA sense strand
ugaacggcaaugauuauga

SEQ ID NO: 1149972 - RNA, 19 nt, Homo sapiens
  misc_RNA (1)...(19): siRNA sense strand
caacuacaucgacauuuac

SEQ ID NO: 1149973 - RNA, 19 nt, Homo sapiens
  misc_RNA (1)...(19): siRNA sense strand
aaacacggcacucguugug

SEQ ID NO: 1149974 - RNA, 19 nt, Homo sapiens
  misc_RNA (1)...(19): siRNA sense strand
ggaagauuacuaccauuuu

SEQ ID NO: 1149975 - RNA, 19 nt, Homo sapiens
  misc_RNA (1)...(19): siRNA sense strand
caacuugggccagauugga

SEQ ID NO: 1149976 - RNA, 19 nt, Homo sapiens
  misc_RNA (1)...(19): siRNA sense strand
gaucugcgucagcgcugua

SEQ ID NO: 1149977 - RNA, 19 nt, Homo sapiens
  misc_RNA (1)...(19): siRNA sense strand
cgcaggcccuuuacuucaa

SEQ ID NO: 1149978 - RNA, 19 nt, Homo sapiens
  misc_RNA (1)...(19): siRNA sense strand
ccaacagcaucuacaccau

SEQ ID NO: 1149979 - RNA, 19 nt, Homo sapiens
  misc_RNA (1)...(19): siRNA sense strand
cuacaucgacauuuacagu

SEQ ID NO: 1149980 - RNA, 19 nt, Homo sapiens
  misc_RNA (1)...(19): siRNA sense strand
ccagcaacaggaagugaaa

SEQ ID NO: 1149981 - RNA, 19 nt, Homo sapiens
  misc_RNA (1)...(19): siRNA sense strand
gcuuucgaguauggcauua

SEQ ID NO: 1149982 - RNA, 19 nt, Homo sapiens
  misc_RNA (1)...(19): siRNA sense strand
aauaaacacggcacucguu

SEQ ID NO: 1149983 - RNA, 19 nt, Homo sapiens
  misc_RNA (1)...(19): siRNA sense strand
caaugauuaugacccaucu

SEQ ID NO: 1149984 - RNA, 19 nt, Homo sapiens
  misc_RNA (1)...(19): siRNA sense strand
caacaugugguaccugcau

SEQ ID NO: 1149985 - RNA, 19 nt, Homo sapiens
  misc_RNA (1)...(19): siRNA sense strand
gcaaagucgcugggcauca

SEQ ID NO: 1149986 - RNA, 19 nt, Homo sapiens
  misc_RNA (1)...(19): siRNA sense strand
ggugaaauggcuccagcaa

SEQ ID NO: 1149987 - RNA, 19 nt, Homo sapiens
  misc_RNA (1)...(19): siRNA sense strand
caaacaauuccuacugcau

SEQ ID NO: 1149988 - RNA, 19 nt, Homo sapiens
  misc_RNA (1)...(19): siRNA sense strand
uaucacagcaaaaccuuua

SEQ ID NO: 1149989 - RNA, 19 nt, Homo sapiens
  misc_RNA (1)...(19): siRNA sense strand
aacgaagggugaagagaca

SEQ ID NO: 1149990 - RNA, 19 nt, Homo sapiens
  misc_RNA (1)...(19): siRNA sense strand
gcaucagacccaacuacau

SEQ ID NO: 1149991 - RNA, 19 nt, Homo sapiens
  misc_RNA (1)...(19): siRNA sense strand
guacaaugccaaaauagga

SEQ ID NO: 1149992 - RNA, 19 nt, Homo sapiens
  misc_RNA (1)...(19): siRNA sense strand
gcaggcccuuuacuucaac

SEQ ID NO: 1149993 - RNA, 19 nt, Homo sapiens
  misc_RNA (1)...(19): siRNA sense strand
ccgcaggcccuuuacuuca

SEQ ID NO: 1149994 - RNA, 19 nt, Homo sapiens
  misc_RNA (1)...(19): siRNA sense strand
cgacgugaacggcaaugau

SEQ ID NO: 1149995 - RNA, 19 nt, Homo sapiens
  misc_RNA (1)...(19): siRNA sense strand
caccgagaauggcuacaag

SEQ ID NO: 1149996 - RNA, 19 nt, Homo sapiens
  misc_RNA (1)...(19): siRNA sense strand
cgugaacggcaaugauuau

SEQ ID NO: 1149997 - RNA, 19 nt, Homo sapiens
  misc_RNA (1)...(19): siRNA sense strand
gugacccgcaggcccuuua

SEQ ID NO: 1149998 - RNA, 19 nt, Homo sapiens
  misc_RNA (1)...(19): siRNA sense strand
ccuuggcucuagaagcaaa

SEQ ID NO: 1149999 - RNA, 19 nt, Homo sapiens
  misc_RNA (1)...(19): siRNA sense strand
gcaacaggaagugaaacga

SEQ ID NO: 1150000 - RNA, 19 nt, Homo sapiens
  misc_RNA (1)...(19): siRNA sense strand
ugcgauggcuacaccaaca

SEQ ID NO: 1150001 - RNA, 19 nt, Homo sapiens
  misc_RNA (1)...(19): siRNA sense strand
ccaccgagaauggcuacaa

SEQ ID NO: 1150002 - RNA, 19 nt, Homo sapiens
  misc_RNA (1)...(19): siRNA sense strand
ccaacuacaucgacauuua

SEQ ID NO: 1150003 - RNA, 19 nt, Homo sapiens
  misc_RNA (1)...(19): siRNA sense strand
uuggaaaccuggaagauua

SEQ ID NO: 1150004 - RNA, 19 nt, Homo sapiens
  misc_RNA (1)...(19): siRNA sense strand
ugaaauggcuccagcaaca

SEQ ID NO: 1150005 - RNA, 19 nt, Homo sapiens
  misc_RNA (1)...(19): siRNA sense strand
ggacggcgaugucacagau

SEQ ID NO: 1150006 - RNA, 19 nt, Homo sapiens
  misc_RNA (1)...(19): siRNA sense strand
gaagcaaacagccaguuaa

SEQ ID NO: 1150007 - RNA, 19 nt, Homo sapiens
  misc_RNA (1)...(19): siRNA sense strand
gaacggcaaugauuaugac

SEQ ID NO: 1150008 - RNA, 19 nt, Homo sapiens
  misc_RNA (1)...(19): siRNA sense strand
gcgagcgacuggaaaguga

SEQ ID NO: 1150009 - RNA, 19 nt, Homo sapiens
  misc_RNA (1)...(19): siRNA sense strand
ccucacaccuuccucagaa

SEQ ID NO: 1150010 - RNA, 19 nt, Homo sapiens
  misc_RNA (1)...(19): siRNA sense strand
gauaugaugccagcaauga

SEQ ID NO: 1150011 - RNA, 19 nt, Homo sapiens
  misc_RNA (1)...(19): siRNA sense strand
ugacccaucuccacgauau

SEQ ID NO: 1150012 - RNA, 19 nt, Homo sapiens
  misc_RNA (1)...(19): siRNA sense strand
caacaggaagugaaacgaa

SEQ ID NO: 1150013 - RNA, 19 nt, Homo sapiens
  misc_RNA (1)...(19): siRNA sense strand
gaaagcgagcgacuggaaa

SEQ ID NO: 1150014 - RNA, 19 nt, Homo sapiens
  misc_RNA (1)...(19): siRNA sense strand
gcaaacagccaguuaaccu

SEQ ID NO: 1150015 - RNA, 19 nt, Homo sapiens
  misc_RNA (1)...(19): siRNA sense strand
agagacaggugcgaaguga

SEQ ID NO: 1150016 - RNA, 19 nt, Homo sapiens
  misc_RNA (1)...(19): siRNA sense strand
gacgugaacggcaaugauu

SEQ ID NO: 1150017 - RNA, 19 nt, Homo sapiens
  misc_RNA (1)...(19): siRNA sense strand
gaugauggcauagagagaa

SEQ ID NO: 1150018 - RNA, 19 nt, Homo sapiens
  misc_RNA (1)...(19): siRNA sense strand
cagauguggucgaggcaaa

SEQ ID NO: 1150019 - RNA, 19 nt, Homo sapiens
  misc_RNA (1)...(19): siRNA sense strand
agaagcaaacagccaguua

SEQ ID NO: 1150020 - RNA, 19 nt, Homo sapiens
  misc_RNA (1)...(19): siRNA sense strand
caaagucgcugggcaucag

SEQ ID NO: 1150021 - RNA, 19 nt, Homo sapiens
  misc_RNA (1)...(19): siRNA sense strand
gaaacgaagggugaagaga

SEQ ID NO: 1150022 - RNA, 19 nt, Homo sapiens
  misc_RNA (1)...(19): siRNA sense strand
caucagacccaacuacauc

SEQ ID NO: 1150023 - RNA, 19 nt, Homo sapiens
  misc_RNA (1)...(19): siRNA sense strand
ugaaagcgagcgacuggaa

SEQ ID NO: 1150024 - RNA, 19 nt, Homo sapiens
  misc_RNA (1)...(19): siRNA sense strand
gaagagacaggugcgaagu

SEQ ID NO: 1150025 - RNA, 19 nt, Homo sapiens
  misc_RNA (1)...(19): siRNA sense strand
caucaucgccuuggcucua

SEQ ID NO: 1150026 - RNA, 19 nt, Homo sapiens
  misc_RNA (1)...(19): siRNA sense strand
ccuggaagauuacuaccau

SEQ ID NO: 1150027 - RNA, 19 nt, Homo sapiens
  misc_RNA (1)...(19): siRNA sense strand
uuucgaguauggcauuaaa

SEQ ID NO: 1150028 - RNA, 19 nt, Homo sapiens
  misc_RNA (1)...(19): siRNA sense strand
uaugaugccagcaaugaaa

SEQ ID NO: 1150029 - RNA, 19 nt, Homo sapiens
  misc_RNA (1)...(19): siRNA sense strand
gaaaccuggaagauuacua

SEQ ID NO: 1150030 - RNA, 19 nt, Homo sapiens
  misc_RNA (1)...(19): siRNA sense strand
cgccuuggcucuagaagca

SEQ ID NO: 1150031 - RNA, 19 nt, Homo sapiens
  misc_RNA (1)...(19): siRNA sense strand
gcaguggggccuuuuauga

SEQ ID NO: 1150032 - RNA, 19 nt, Homo sapiens
  misc_RNA (1)...(19): siRNA sense strand
uggaagauuacuaccauuu

SEQ ID NO: 1150033 - RNA, 19 nt, Homo sapiens
  misc_RNA (1)...(19): siRNA sense strand
cagcaaacaauuccuacug

SEQ ID NO: 1150034 - RNA, 19 nt, Homo sapiens
  misc_RNA (1)...(19): siRNA sense strand
cagcagcgccaccgagaau

SEQ ID NO: 1150035 - RNA, 19 nt, Homo sapiens
  misc_RNA (1)...(19): siRNA sense strand
ugaacggcaaugauuauga

SEQ ID NO: 1150036 - RNA, 19 nt, Homo sapiens
  misc_RNA (1)...(19): siRNA sense strand
caacuacaucgacauuuac

SEQ ID NO: 1150037 - RNA, 19 nt, Homo sapiens
  misc_RNA (1)...(19): siRNA sense strand
aaacacggcacucguugug

SEQ ID NO: 1150038 - RNA, 19 nt, Homo sapiens
  misc_RNA (1)...(19): siRNA sense strand
ggaagauuacuaccauuuu

SEQ ID NO: 1150039 - RNA, 19 nt, Homo sapiens
  misc_RNA (1)...(19): siRNA sense strand
caacuugggccagauugga

SEQ ID NO: 1150040 - RNA, 19 nt, Homo sapiens
  misc_RNA (1)...(19): siRNA sense strand
gaucugcgucagcgcugua

SEQ ID NO: 1150041 - RNA, 19 nt, Homo sapiens
  misc_RNA (1)...(19): siRNA sense strand
cgcaggcccuuuacuucaa

SEQ ID NO: 1150042 - RNA, 19 nt, Homo sapiens
  misc_RNA (1)...(19): siRNA sense strand
ccaacagcaucuacaccau

SEQ ID NO: 1150043 - RNA, 19 nt, Homo sapiens
  misc_RNA (1)...(19): siRNA sense strand
cuacaucgacauuuacagu

SEQ ID NO: 1150044 - RNA, 19 nt, Homo sapiens
  misc_RNA (1)...(19): siRNA sense strand
ccagcaacaggaagugaaa

SEQ ID NO: 1150045 - RNA, 19 nt, Homo sapiens
  misc_RNA (1)...(19): siRNA sense strand
gcuuucgaguauggcauua

SEQ ID NO: 1150046 - RNA, 19 nt, Homo sapiens
  misc_RNA (1)...(19): siRNA sense strand
aauaaacacggcacucguu

SEQ ID NO: 1150047 - RNA, 19 nt, Homo sapiens
  misc_RNA (1)...(19): siRNA sense strand
caaugauuaugacccaucu

SEQ ID NO: 1150048 - RNA, 19 nt, Homo sapiens
  misc_RNA (1)...(19): siRNA sense strand
caacaugugguaccugcau

SEQ ID NO: 1150049 - RNA, 19 nt, Homo sapiens
  misc_RNA (1)...(19): siRNA sense strand
gcaaagucgcugggcauca

SEQ ID NO: 1150050 - RNA, 19 nt, Homo sapiens
  misc_RNA (1)...(19): siRNA sense strand
ggugaaauggcuccagcaa

SEQ ID NO: 1150051 - RNA, 19 nt, Homo sapiens
  misc_RNA (1)...(19): siRNA sense strand
caaacaauuccuacugcau

SEQ ID NO: 1150052 - RNA, 19 nt, Homo sapiens
  misc_RNA (1)...(19): siRNA sense strand
uaucacagcaaaaccuuua

SEQ ID NO: 1150053 - RNA, 19 nt, Homo sapiens
  misc_RNA (1)...(19): siRNA sense strand
aacgaagggugaagagaca

SEQ ID NO: 1150054 - RNA, 19 nt, Homo sapiens
  misc_RNA (1)...(19): siRNA sense strand
gcaucagacccaacuacau

SEQ ID NO: 1150055 - RNA, 19 nt, Homo sapiens
  misc_RNA (1)...(19): siRNA sense strand
guacaaugccaaaauagga

SEQ ID NO: 1150056 - RNA, 19 nt, Homo sapiens
  misc_RNA (1)...(19): siRNA sense strand
gcaggcccuuuacuucaac

SEQ ID NO: 1150057 - RNA, 19 nt, Homo sapiens
  misc_RNA (1)...(19): siRNA sense strand
ccgcaggcccuuuacuuca

SEQ ID NO: 1150058 - RNA, 19 nt, Homo sapiens
  misc_RNA (1)...(19): siRNA sense strand
cgacgugaacggcaaugau

SEQ ID NO: 1150059 - RNA, 19 nt, Homo sapiens
  misc_RNA (1)...(19): siRNA sense strand
caccgagaauggcuacaag

SEQ ID NO: 1150060 - RNA, 19 nt, Homo sapiens
  misc_RNA (1)...(19): siRNA sense strand
cgugaacggcaaugauuau

SEQ ID NO: 1150061 - RNA, 19 nt, Homo sapiens
  misc_RNA (1)...(19): siRNA sense strand
gugacccgcaggcccuuua

SEQ ID NO: 1150062 - RNA, 19 nt, Homo sapiens
  misc_RNA (1)...(19): siRNA sense strand
ccuuggcucuagaagcaaa

SEQ ID NO: 1150063 - RNA, 19 nt, Homo sapiens
  misc_RNA (1)...(19): siRNA sense strand
gcaacaggaagugaaacga

SEQ ID NO: 1150064 - RNA, 19 nt, Homo sapiens
  misc_RNA (1)...(19): siRNA sense strand
ugcgauggcuacaccaaca

SEQ ID NO: 1150065 - RNA, 19 nt, Homo sapiens
  misc_RNA (1)...(19): siRNA sense strand
ccaccgagaauggcuacaa

SEQ ID NO: 1150066 - RNA, 19 nt, Homo sapiens
  misc_RNA (1)...(19): siRNA sense strand
ccaacuacaucgacauuua

SEQ ID NO: 1150067 - RNA, 19 nt, Homo sapiens
  misc_RNA (1)...(19): siRNA sense strand
uuggaaaccuggaagauua

SEQ ID NO: 1150068 - RNA, 19 nt, Homo sapiens
  misc_RNA (1)...(19): siRNA sense strand
ugaaauggcuccagcaaca

SEQ ID NO: 1150069 - RNA, 19 nt, Homo sapiens
  misc_RNA (1)...(19): siRNA sense strand
ggacggcgaugucacagau

SEQ ID NO: 1150070 - RNA, 19 nt, Homo sapiens
  misc_RNA (1)...(19): siRNA sense strand
gaagcaaacagccaguuaa

SEQ ID NO: 1150071 - RNA, 19 nt, Homo sapiens
  misc_RNA (1)...(19): siRNA sense strand
gaacggcaaugauuaugac

SEQ ID NO: 1150072 - RNA, 19 nt, Homo sapiens
  misc_RNA (1)...(19): siRNA sense strand
gcgagcgacuggaaaguga

SEQ ID NO: 1150073 - RNA, 19 nt, Homo sapiens
  misc_RNA (1)...(19): siRNA sense strand
ccucacaccuuccucagaa

SEQ ID NO: 1150074 - RNA, 19 nt, Homo sapiens
  misc_RNA (1)...(19): siRNA sense strand
gauaugaugccagcaauga

SEQ ID NO: 1150075 - RNA, 19 nt, Homo sapiens
  misc_RNA (1)...(19): siRNA sense strand
ugacccaucuccacgauau

SEQ ID NO: 1150076 - RNA, 19 nt, Homo sapiens
  misc_RNA (1)...(19): siRNA sense strand
caacaggaagugaaacgaa

SEQ ID NO: 1150077 - RNA, 19 nt, Homo sapiens
  misc_RNA (1)...(19): siRNA sense strand
gaaagcgagcgacuggaaa

SEQ ID NO: 1150078 - RNA, 19 nt, Homo sapiens
  misc_RNA (1)...(19): siRNA sense strand
gcaaacagccaguuaaccu

SEQ ID NO: 1150079 - RNA, 19 nt, Homo sapiens
  misc_RNA (1)...(19): siRNA sense strand
agagacaggugcgaaguga

SEQ ID NO: 1150080 - RNA, 19 nt, Homo sapiens
  misc_RNA (1)...(19): siRNA sense strand
gacgugaacggcaaugauu

SEQ ID NO: 1150081 - RNA, 19 nt, Homo sapiens
  misc_RNA (1)...(19): siRNA sense strand
gaugauggcauagagagaa

SEQ ID NO: 1150082 - RNA, 19 nt, Homo sapiens
  misc_RNA (1)...(19): siRNA sense strand
cagauguggucgaggcaaa

SEQ ID NO: 1150083 - RNA, 19 nt, Homo sapiens
  misc_RNA (1)...(19): siRNA sense strand
agaagcaaacagccaguua

SEQ ID NO: 1150084 - RNA, 19 nt, Homo sapiens
  misc_RNA (1)...(19): siRNA sense strand
caaagucgcugggcaucag

SEQ ID NO: 1150085 - RNA, 19 nt, Homo sapiens
  misc_RNA (1)...(19): siRNA sense strand
gaaacgaagggugaagaga

SEQ ID NO: 1150086 - RNA, 19 nt, Homo sapiens
  misc_RNA (1)...(19): siRNA sense strand
caucagacccaacuacauc

SEQ ID NO: 1150087 - RNA, 19 nt, Homo sapiens
  misc_RNA (1)...(19): siRNA sense strand
ugaaagcgagcgacuggaa

SEQ ID NO: 1150088 - RNA, 19 nt, Homo sapiens
  misc_RNA (1)...(19): siRNA sense strand
gaagagacaggugcgaagu

SEQ ID NO: 1150089 - RNA, 19 nt, Homo sapiens
  misc_RNA (1)...(19): siRNA sense strand
caucaucgccuuggcucua

SEQ ID NO: 1150090 - RNA, 19 nt, Homo sapiens
  misc_RNA (1)...(19): siRNA sense strand
ccuggaagauuacuaccau

SEQ ID NO: 1150091 - RNA, 19 nt, Homo sapiens
  misc_RNA (1)...(19): siRNA sense strand
uuucgaguauggcauuaaa

SEQ ID NO: 1150092 - RNA, 19 nt, Homo sapiens
  misc_RNA (1)...(19): siRNA sense strand
uaugaugccagcaaugaaa

SEQ ID NO: 1150093 - RNA, 19 nt, Homo sapiens
  misc_RNA (1)...(19): siRNA sense strand
gaaaccuggaagauuacua

SEQ ID NO: 1150094 - RNA, 19 nt, Homo sapiens
  misc_RNA (1)...(19): siRNA sense strand
cgccuuggcucuagaagca

SEQ ID NO: 1150095 - RNA, 19 nt, Homo sapiens
  misc_RNA (1)...(19): siRNA sense strand
gcaguggggccuuuuauga

SEQ ID NO: 1150096 - RNA, 19 nt, Homo sapiens
  misc_RNA (1)...(19): siRNA sense strand
uggaagauuacuaccauuu

SEQ ID NO: 1150097 - RNA, 19 nt, Homo sapiens
  misc_RNA (1)...(19): siRNA sense strand
cagcaaacaauuccuacug

SEQ ID NO: 1150098 - RNA, 19 nt, Homo sapiens
  misc_RNA (1)...(19): siRNA sense strand
cagcagcgccaccgagaau

SEQ ID NO: 1150099 - RNA, 19 nt, Homo sapiens
  misc_RNA (1)...(19): siRNA sense strand
ugaacggcaaugauuauga

SEQ ID NO: 1150100 - RNA, 19 nt, Homo sapiens
  misc_RNA (1)...(19): siRNA sense strand
caacuacaucgacauuuac

SEQ ID NO: 1150101 - RNA, 19 nt, Homo sapiens
  misc_RNA (1)...(19): siRNA sense strand
aaacacggcacucguugug

SEQ ID NO: 1150102 - RNA, 19 nt, Homo sapiens
  misc_RNA (1)...(19): siRNA sense strand
ggaagauuacuaccauuuu

SEQ ID NO: 1150103 - RNA, 19 nt, Homo sapiens
  misc_RNA (1)...(19): siRNA sense strand
caacuugggccagauugga

SEQ ID NO: 1150104 - RNA, 19 nt, Homo sapiens
  misc_RNA (1)...(19): siRNA sense strand
gaucugcgucagcgcugua

SEQ ID NO: 1150105 - RNA, 19 nt, Homo sapiens
  misc_RNA (1)...(19): siRNA sense strand
cgcaggcccuuuacuucaa

SEQ ID NO: 1150106 - RNA, 19 nt, Homo sapiens
  misc_RNA (1)...(19): siRNA sense strand
ccaacagcaucuacaccau

SEQ ID NO: 1150107 - RNA, 19 nt, Homo sapiens
  misc_RNA (1)...(19): siRNA sense strand
cuacaucgacauuuacagu

SEQ ID NO: 1150108 - RNA, 19 nt, Homo sapiens
  misc_RNA (1)...(19): siRNA sense strand
ccagcaacaggaagugaaa

SEQ ID NO: 1150109 - RNA, 19 nt, Homo sapiens
  misc_RNA (1)...(19): siRNA sense strand
gcuuucgaguauggcauua

SEQ ID NO: 1150110 - RNA, 19 nt, Homo sapiens
  misc_RNA (1)...(19): siRNA sense strand
aauaaacacggcacucguu

SEQ ID NO: 1150111 - RNA, 19 nt, Homo sapiens
  misc_RNA (1)...(19): siRNA sense strand
caaugauuaugacccaucu

SEQ ID NO: 1150112 - RNA, 19 nt, Homo sapiens
  misc_RNA (1)...(19): siRNA sense strand
caacaugugguaccugcau

SEQ ID NO: 1150113 - RNA, 19 nt, Homo sapiens
  misc_RNA (1)...(19): siRNA sense strand
gcaaagucgcugggcauca

SEQ ID NO: 1150114 - RNA, 19 nt, Homo sapiens
  misc_RNA (1)...(19): siRNA sense strand
ggugaaauggcuccagcaa

SEQ ID NO: 1150115 - RNA, 19 nt, Homo sapiens
  misc_RNA (1)...(19): siRNA sense strand
caaacaauuccuacugcau

SEQ ID NO: 1150116 - RNA, 19 nt, Homo sapiens
  misc_RNA (1)...(19): siRNA sense strand
uaucacagcaaaaccuuua

SEQ ID NO: 1150117 - RNA, 19 nt, Homo sapiens
  misc_RNA (1)...(19): siRNA sense strand
aacgaagggugaagagaca

SEQ ID NO: 1150118 - RNA, 19 nt, Homo sapiens
  misc_RNA (1)...(19): siRNA sense strand
gcaucagacccaacuacau

SEQ ID NO: 1150119 - RNA, 19 nt, Homo sapiens
  misc_RNA (1)...(19): siRNA sense strand
guacaaugccaaaauagga

SEQ ID NO: 1150120 - RNA, 19 nt, Homo sapiens
  misc_RNA (1)...(19): siRNA sense strand
gcaggcccuuuacuucaac

SEQ ID NO: 1150121 - RNA, 19 nt, Homo sapiens
  misc_RNA (1)...(19): siRNA sense strand
ccgcaggcccuuuacuuca

SEQ ID NO: 1150122 - RNA, 19 nt, Homo sapiens
  misc_RNA (1)...(19): siRNA sense strand
cgacgugaacggcaaugau

SEQ ID NO: 1150123 - RNA, 19 nt, Homo sapiens
  misc_RNA (1)...(19): siRNA sense strand
caccgagaauggcuacaag

SEQ ID NO: 1150124 - RNA, 19 nt, Homo sapiens
  misc_RNA (1)...(19): siRNA sense strand
cgugaacggcaaugauuau

SEQ ID NO: 1150125 - RNA, 19 nt, Homo sapiens
  misc_RNA (1)...(19): siRNA sense strand
gugacccgcaggcccuuua

SEQ ID NO: 1150126 - RNA, 19 nt, Homo sapiens
  misc_RNA (1)...(19): siRNA sense strand
ccuuggcucuagaagcaaa

SEQ ID NO: 1150127 - RNA, 19 nt, Homo sapiens
  misc_RNA (1)...(19): siRNA sense strand
gcaacaggaagugaaacga

SEQ ID NO: 1150128 - RNA, 19 nt, Homo sapiens
  misc_RNA (1)...(19): siRNA sense strand
ugcgauggcuacaccaaca

SEQ ID NO: 1150129 - RNA, 19 nt, Homo sapiens
  misc_RNA (1)...(19): siRNA sense strand
ccaccgagaauggcuacaa

SEQ ID NO: 1150130 - RNA, 19 nt, Homo sapiens
  misc_RNA (1)...(19): siRNA sense strand
ccaacuacaucgacauuua

SEQ ID NO: 1150131 - RNA, 19 nt, Homo sapiens
  misc_RNA (1)...(19): siRNA sense strand
uuggaaaccuggaagauua

SEQ ID NO: 1150132 - RNA, 19 nt, Homo sapiens
  misc_RNA (1)...(19): siRNA sense strand
ugaaauggcuccagcaaca

SEQ ID NO: 1150133 - RNA, 19 nt, Homo sapiens
  misc_RNA (1)...(19): siRNA sense strand
ggacggcgaugucacagau

SEQ ID NO: 1150134 - RNA, 19 nt, Homo sapiens
  misc_RNA (1)...(19): siRNA sense strand
gaagcaaacagccaguuaa

SEQ ID NO: 1150135 - RNA, 19 nt, Homo sapiens
  misc_RNA (1)...(19): siRNA sense strand
gaacggcaaugauuaugac

SEQ ID NO: 1150136 - RNA, 19 nt, Homo sapiens
  misc_RNA (1)...(19): siRNA sense strand
gcgagcgacuggaaaguga

SEQ ID NO: 1150137 - RNA, 19 nt, Homo sapiens
  misc_RNA (1)...(19): siRNA sense strand
ccucacaccuuccucagaa

SEQ ID NO: 1150138 - RNA, 19 nt, Homo sapiens
  misc_RNA (1)...(19): siRNA sense strand
gauaugaugccagcaauga

SEQ ID NO: 1150139 - RNA, 19 nt, Homo sapiens
  misc_RNA (1)...(19): siRNA sense strand
ugacccaucuccacgauau

SEQ ID NO: 1150140 - RNA, 19 nt, Homo sapiens
  misc_RNA (1)...(19): siRNA sense strand
caacaggaagugaaacgaa

SEQ ID NO: 1150141 - RNA, 19 nt, Homo sapiens
  misc_RNA (1)...(19): siRNA sense strand
gaaagcgagcgacuggaaa

SEQ ID NO: 1150142 - RNA, 19 nt, Homo sapiens
  misc_RNA (1)...(19): siRNA sense strand
gcaaacagccaguuaaccu

SEQ ID NO: 1150143 - RNA, 19 nt, Homo sapiens
  misc_RNA (1)...(19): siRNA sense strand
agagacaggugcgaaguga

SEQ ID NO: 1150144 - RNA, 19 nt, Homo sapiens
  misc_RNA (1)...(19): siRNA sense strand
gacgugaacggcaaugauu

SEQ ID NO: 1150145 - RNA, 19 nt, Homo sapiens
  misc_RNA (1)...(19): siRNA sense strand
gaugauggcauagagagaa

SEQ ID NO: 1150146 - RNA, 19 nt, Homo sapiens
  misc_RNA (1)...(19): siRNA sense strand
cagauguggucgaggcaaa

SEQ ID NO: 1150147 - RNA, 19 nt, Homo sapiens
  misc_RNA (1)...(19): siRNA sense strand
agaagcaaacagccaguua

SEQ ID NO: 1150148 - RNA, 19 nt, Homo sapiens
  misc_RNA (1)...(19): siRNA sense strand
caaagucgcugggcaucag

SEQ ID NO: 1150149 - RNA, 19 nt, Homo sapiens
  misc_RNA (1)...(19): siRNA sense strand
gaaacgaagggugaagaga

SEQ ID NO: 1150150 - RNA, 19 nt, Homo sapiens
  misc_RNA (1)...(19): siRNA sense strand
caucagacccaacuacauc

SEQ ID NO: 1150151 - RNA, 19 nt, Homo sapiens
  misc_RNA (1)...(19): siRNA sense strand
ugaaagcgagcgacuggaa

SEQ ID NO: 1150152 - RNA, 19 nt, Homo sapiens
  misc_RNA (1)...(19): siRNA sense strand
gaagagacaggugcgaagu

SEQ ID NO: 1150153 - RNA, 19 nt, Homo sapiens
  misc_RNA (1)...(19): siRNA sense strand
caucaucgccuuggcucua

SEQ ID NO: 1150154 - RNA, 19 nt, Homo sapiens
  misc_RNA (1)...(19): siRNA sense strand
ccuggaagauuacuaccau

SEQ ID NO: 1150155 - RNA, 19 nt, Homo sapiens
  misc_RNA (1)...(19): siRNA sense strand
uuucgaguauggcauuaaa

SEQ ID NO: 1150156 - RNA, 19 nt, Homo sapiens
  misc_RNA (1)...(19): siRNA sense strand
uaugaugccagcaaugaaa

SEQ ID NO: 1150157 - RNA, 19 nt, Homo sapiens
  misc_RNA (1)...(19): siRNA sense strand
gaaaccuggaagauuacua

SEQ ID NO: 1150158 - RNA, 19 nt, Homo sapiens
  misc_RNA (1)...(19): siRNA sense strand
cgccuuggcucuagaagca

SEQ ID NO: 1150159 - RNA, 19 nt, Homo sapiens
  misc_RNA (1)...(19): siRNA sense strand
gcaguggggccuuuuauga

SEQ ID NO: 1150160 - RNA, 19 nt, Homo sapiens
  misc_RNA (1)...(19): siRNA sense strand
uggaagauuacuaccauuu

SEQ ID NO: 1150161 - RNA, 19 nt, Homo sapiens
  misc_RNA (1)...(19): siRNA sense strand
cagcaaacaauuccuacug

SEQ ID NO: 1150162 - RNA, 19 nt, Homo sapiens
  misc_RNA (1)...(19): siRNA sense strand
cagcagcgccaccgagaau

SEQ ID NO: 1150163 - RNA, 19 nt, Homo sapiens
  misc_RNA (1)...(19): siRNA sense strand
ugaacggcaaugauuauga

SEQ ID NO: 1150164 - RNA, 19 nt, Homo sapiens
  misc_RNA (1)...(19): siRNA sense strand
caacuacaucgacauuuac

SEQ ID NO: 1150165 - RNA, 19 nt, Homo sapiens
  misc_RNA (1)...(19): siRNA sense strand
aaacacggcacucguugug

SEQ ID NO: 1150166 - RNA, 19 nt, Homo sapiens
  misc_RNA (1)...(19): siRNA sense strand
ggaagauuacuaccauuuu

SEQ ID NO: 1150167 - RNA, 19 nt, Homo sapiens
  misc_RNA (1)...(19): siRNA sense strand
caacuugggccagauugga

SEQ ID NO: 1150168 - RNA, 19 nt, Homo sapiens
  misc_RNA (1)...(19): siRNA sense strand
gaucugcgucagcgcugua

SEQ ID NO: 1150169 - RNA, 19 nt, Homo sapiens
  misc_RNA (1)...(19): siRNA sense strand
cgcaggcccuuuacuucaa

SEQ ID NO: 1150170 - RNA, 19 nt, Homo sapiens
  misc_RNA (1)...(19): siRNA sense strand
ccaacagcaucuacaccau

SEQ ID NO: 1150171 - RNA, 19 nt, Homo sapiens
  misc_RNA (1)...(19): siRNA sense strand
cuacaucgacauuuacagu

SEQ ID NO: 1150172 - RNA, 19 nt, Homo sapiens
  misc_RNA (1)...(19): siRNA sense strand
ccagcaacaggaagugaaa

SEQ ID NO: 1150173 - RNA, 19 nt, Homo sapiens
  misc_RNA (1)...(19): siRNA sense strand
gcuuucgaguauggcauua

SEQ ID NO: 1150174 - RNA, 19 nt, Homo sapiens
  misc_RNA (1)...(19): siRNA sense strand
aauaaacacggcacucguu

SEQ ID NO: 1150175 - RNA, 19 nt, Homo sapiens
  misc_RNA (1)...(19): siRNA sense strand
caaugauuaugacccaucu

SEQ ID NO: 1150176 - RNA, 19 nt, Homo sapiens
  misc_RNA (1)...(19): siRNA sense strand
caacaugugguaccugcau

SEQ ID NO: 1150177 - RNA, 19 nt, Homo sapiens
  misc_RNA (1)...(19): siRNA sense strand
gcaaagucgcugggcauca

SEQ ID NO: 1150178 - RNA, 19 nt, Homo sapiens
  misc_RNA (1)...(19): siRNA sense strand
ggugaaauggcuccagcaa

SEQ ID NO: 1150179 - RNA, 19 nt, Homo sapiens
  misc_RNA (1)...(19): siRNA sense strand
caaacaauuccuacugcau

SEQ ID NO: 1150180 - RNA, 19 nt, Homo sapiens
  misc_RNA (1)...(19): siRNA sense strand
uaucacagcaaaaccuuua

SEQ ID NO: 1150181 - RNA, 19 nt, Homo sapiens
  misc_RNA (1)...(19): siRNA sense strand
aacgaagggugaagagaca

SEQ ID NO: 1150182 - RNA, 19 nt, Homo sapiens
  misc_RNA (1)...(19): siRNA sense strand
gcaucagacccaacuacau

SEQ ID NO: 1150183 - RNA, 19 nt, Homo sapiens
  misc_RNA (1)...(19): siRNA sense strand
guacaaugccaaaauagga

SEQ ID NO: 1150184 - RNA, 19 nt, Homo sapiens
  misc_RNA (1)...(19): siRNA sense strand
gcaggcccuuuacuucaac

SEQ ID NO: 1150185 - RNA, 19 nt, Homo sapiens
  misc_RNA (1)...(19): siRNA sense strand
ccgcaggcccuuuacuuca

SEQ ID NO: 1150186 - RNA, 19 nt, Homo sapiens
  misc_RNA (1)...(19): siRNA sense strand
cgacgugaacggcaaugau

SEQ ID NO: 1150187 - RNA, 19 nt, Homo sapiens
  misc_RNA (1)...(19): siRNA sense strand
caccgagaauggcuacaag

SEQ ID NO: 1150188 - RNA, 19 nt, Homo sapiens
  misc_RNA (1)...(19): siRNA sense strand
cgugaacggcaaugauuau

SEQ ID NO: 1150189 - RNA, 19 nt, Homo sapiens
  misc_RNA (1)...(19): siRNA sense strand
gugacccgcaggcccuuua

SEQ ID NO: 1150190 - RNA, 19 nt, Homo sapiens
  misc_RNA (1)...(19): siRNA sense strand
ccuuggcucuagaagcaaa

SEQ ID NO: 1150191 - RNA, 19 nt, Homo sapiens
  misc_RNA (1)...(19): siRNA sense strand
gcaacaggaagugaaacga

SEQ ID NO: 1150192 - RNA, 19 nt, Homo sapiens
  misc_RNA (1)...(19): siRNA sense strand
ugcgauggcuacaccaaca

SEQ ID NO: 1150193 - RNA, 19 nt, Homo sapiens
  misc_RNA (1)...(19): siRNA sense strand
ccaccgagaauggcuacaa

SEQ ID NO: 1150194 - RNA, 19 nt, Homo sapiens
  misc_RNA (1)...(19): siRNA sense strand
gcaaagacaagauguggua

SEQ ID NO: 1150195 - RNA, 19 nt, Homo sapiens
  misc_RNA (1)...(19): siRNA sense strand
gacaagaugugguauuugg

SEQ ID NO: 1150196 - RNA, 19 nt, Homo sapiens
  misc_RNA (1)...(19): siRNA sense strand
aagacaagaugugguauuu

SEQ ID NO: 1150197 - RNA, 19 nt, Homo sapiens
  misc_RNA (1)...(19): siRNA sense strand
gaccaucguucacacucua

SEQ ID NO: 1150198 - RNA, 19 nt, Homo sapiens
  misc_RNA (1)...(19): siRNA sense strand
gugcuucucuugacauuuc

SEQ ID NO: 1150199 - RNA, 19 nt, Homo sapiens
  misc_RNA (1)...(19): siRNA sense strand
gagagaccauaacguggaa

SEQ ID NO: 1150200 - RNA, 19 nt, Homo sapiens
  misc_RNA (1)...(19): siRNA sense strand
gaaaaugggagaagaagaa

SEQ ID NO: 1150201 - RNA, 19 nt, Homo sapiens
  misc_RNA (1)...(19): siRNA sense strand
aaucauauauccacacaag

SEQ ID NO: 1150202 - RNA, 19 nt, Homo sapiens
  misc_RNA (1)...(19): siRNA sense strand
ccacacaagugcuucucuu

SEQ ID NO: 1150203 - RNA, 19 nt, Homo sapiens
  misc_RNA (1)...(19): siRNA sense strand
aaugggagaagaagaauaa

SEQ ID NO: 1150204 - RNA, 19 nt, Homo sapiens
  misc_RNA (1)...(19): siRNA sense strand
gcuuugggaucauggagaa

SEQ ID NO: 1150205 - RNA, 19 nt, Homo sapiens
  misc_RNA (1)...(19): siRNA sense strand
gaaaucuaccacugucgaa

SEQ ID NO: 1150206 - RNA, 19 nt, Homo sapiens
  misc_RNA (1)...(19): siRNA sense strand
uacgaggaaugucuauuga

SEQ ID NO: 1150207 - RNA, 19 nt, Homo sapiens
  misc_RNA (1)...(19): siRNA sense strand
ucaaucauauauccacaca

SEQ ID NO: 1150208 - RNA, 19 nt, Homo sapiens
  misc_RNA (1)...(19): siRNA sense strand
gaccauaacguggaauuca

SEQ ID NO: 1150209 - RNA, 19 nt, Homo sapiens
  misc_RNA (1)...(19): siRNA sense strand
aagcuggccuuggguguuu

SEQ ID NO: 1150210 - RNA, 19 nt, Homo sapiens
  misc_RNA (1)...(19): siRNA sense strand
ucauauauccacacaagug

SEQ ID NO: 1150211 - RNA, 19 nt, Homo sapiens
  misc_RNA (1)...(19): siRNA sense strand
agaggucgcuuugggauca

SEQ ID NO: 1150212 - RNA, 19 nt, Homo sapiens
  misc_RNA (1)...(19): siRNA sense strand
gcacaagauauggcaguga

SEQ ID NO: 1150213 - RNA, 19 nt, Homo sapiens
  misc_RNA (1)...(19): siRNA sense strand
gaagcuggccuuggguguu

SEQ ID NO: 1150214 - RNA, 19 nt, Homo sapiens
  misc_RNA (1)...(19): siRNA sense strand
ggagaccagcagaaaucua

SEQ ID NO: 1150215 - RNA, 19 nt, Homo sapiens
  misc_RNA (1)...(19): siRNA sense strand
cuuagaagcacaagauaug

SEQ ID NO: 1150216 - RNA, 19 nt, Homo sapiens
  misc_RNA (1)...(19): siRNA sense strand
ggaccaucguucacacucu

SEQ ID NO: 1150217 - RNA, 19 nt, Homo sapiens
  misc_RNA (1)...(19): siRNA sense strand
gagaccagcagaaaucuac

SEQ ID NO: 1150218 - RNA, 19 nt, Homo sapiens
  misc_RNA (1)...(19): siRNA sense strand
aaaaggggccaaaauaauu

SEQ ID NO: 1150219 - RNA, 19 nt, Homo sapiens
  misc_RNA (1)...(19): siRNA sense strand
auacgaggaaugucuauug

SEQ ID NO: 1150220 - RNA, 19 nt, Homo sapiens
  misc_RNA (1)...(19): siRNA sense strand
gagaccauaacguggaauu

SEQ ID NO: 1150221 - RNA, 19 nt, Homo sapiens
  misc_RNA (1)...(19): siRNA sense strand
aaagacaagaugugguauu

SEQ ID NO: 1150222 - RNA, 19 nt, Homo sapiens
  misc_RNA (1)...(19): siRNA sense strand
ggcuuuggcucaguuggaa

SEQ ID NO: 1150223 - RNA, 19 nt, Homo sapiens
  misc_RNA (1)...(19): siRNA sense strand
gccauuauuuugugaaguu

SEQ ID NO: 1150224 - RNA, 19 nt, Homo sapiens
  misc_RNA (1)...(19): siRNA sense strand
gggccaaaauaauuaaaga

SEQ ID NO: 1150225 - RNA, 19 nt, Homo sapiens
  misc_RNA (1)...(19): siRNA sense strand
ccaccugagccaccaaaga

SEQ ID NO: 1150226 - RNA, 19 nt, Homo sapiens
  misc_RNA (1)...(19): siRNA sense strand
uggcucaguuggaauucaa

SEQ ID NO: 1150227 - RNA, 19 nt, Homo sapiens
  misc_RNA (1)...(19): siRNA sense strand
guugggugcguuauggaua

SEQ ID NO: 1150228 - RNA, 19 nt, Homo sapiens
  misc_RNA (1)...(19): siRNA sense strand
caguuggaauucaaugaca

SEQ ID NO: 1150229 - RNA, 19 nt, Homo sapiens
  misc_RNA (1)...(19): siRNA sense strand
gggagaagaagaauaaaau

SEQ ID NO: 1150230 - RNA, 19 nt, Homo sapiens
  misc_RNA (1)...(19): siRNA sense strand
aaaggggccaaaauaauua

SEQ ID NO: 1150231 - RNA, 19 nt, Homo sapiens
  misc_RNA (1)...(19): siRNA sense strand
ccucggagaccagcagaaa

SEQ ID NO: 1150232 - RNA, 19 nt, Homo sapiens
  misc_RNA (1)...(19): siRNA sense strand
acaguugggugcguuaugg

SEQ ID NO: 1150233 - RNA, 19 nt, Homo sapiens
  misc_RNA (1)...(19): siRNA sense strand
gauacgaggaaugucuauu

SEQ ID NO: 1150234 - RNA, 19 nt, Homo sapiens
  misc_RNA (1)...(19): siRNA sense strand
gcagugagagaccauaacg

SEQ ID NO: 1150235 - RNA, 19 nt, Homo sapiens
  misc_RNA (1)...(19): siRNA sense strand
aaauugauacgaggaaugu

SEQ ID NO: 1150236 - RNA, 19 nt, Homo sapiens
  misc_RNA (1)...(19): siRNA sense strand
caucguucacacucuauga

SEQ ID NO: 1150237 - RNA, 19 nt, Homo sapiens
  misc_RNA (1)...(19): siRNA sense strand
guuggaauucaaugacaaa

SEQ ID NO: 1150238 - RNA, 19 nt, Homo sapiens
  misc_RNA (1)...(19): siRNA sense strand
aaaugggagaagaagaaua

SEQ ID NO: 1150239 - RNA, 19 nt, Homo sapiens
  misc_RNA (1)...(19): siRNA sense strand
gaaacgcauccgcuaccau

SEQ ID NO: 1150240 - RNA, 19 nt, Homo sapiens
  misc_RNA (1)...(19): siRNA sense strand
ucucuugacauuucucgaa

SEQ ID NO: 1150241 - RNA, 19 nt, Homo sapiens
  misc_RNA (1)...(19): siRNA sense strand
ucggagaccagcagaaauc

SEQ ID NO: 1150242 - RNA, 19 nt, Homo sapiens
  misc_RNA (1)...(19): siRNA sense strand
gcccaugccaaagaguaua

SEQ ID NO: 1150243 - RNA, 19 nt, Homo sapiens
  misc_RNA (1)...(19): siRNA sense strand
gaccaggcuuuggcucagu

SEQ ID NO: 1150244 - RNA, 19 nt, Homo sapiens
  misc_RNA (1)...(19): siRNA sense strand
ggagcagaauugaauauua

SEQ ID NO: 1150245 - RNA, 19 nt, Homo sapiens
  misc_RNA (1)...(19): siRNA sense strand
gaacugaucucugguccaa

SEQ ID NO: 1150246 - RNA, 19 nt, Homo sapiens
  misc_RNA (1)...(19): siRNA sense strand
gaaguggcaucuuguauca

SEQ ID NO: 1150247 - RNA, 19 nt, Homo sapiens
  misc_RNA (1)...(19): siRNA sense strand
caacagcccuccaaacaau

SEQ ID NO: 1150248 - RNA, 19 nt, Homo sapiens
  misc_RNA (1)...(19): siRNA sense strand
gaauaaugaugcugacuau

SEQ ID NO: 1150249 - RNA, 19 nt, Homo sapiens
  misc_RNA (1)...(19): siRNA sense strand
aaagacaacucaacuguuc

SEQ ID NO: 1150250 - RNA, 19 nt, Homo sapiens
  misc_RNA (1)...(19): siRNA sense strand
gagugcaucuucuuuguau

SEQ ID NO: 1150251 - RNA, 19 nt, Homo sapiens
  misc_RNA (1)...(19): siRNA sense strand
ccucgucaaugcuguguua

SEQ ID NO: 1150252 - RNA, 19 nt, Homo sapiens
  misc_RNA (1)...(19): siRNA sense strand
gacaauugcuguggcguaa

SEQ ID NO: 1150253 - RNA, 19 nt, Homo sapiens
  misc_RNA (1)...(19): siRNA sense strand
ggaaaugugauuauugguu

SEQ ID NO: 1150254 - RNA, 19 nt, Homo sapiens
  misc_RNA (1)...(19): siRNA sense strand
ccuggaggcuuguaaacua

SEQ ID NO: 1150255 - RNA, 19 nt, Homo sapiens
  misc_RNA (1)...(19): siRNA sense strand
cgucaaugcuguguuauga

SEQ ID NO: 1150256 - RNA, 19 nt, Homo sapiens
  misc_RNA (1)...(19): siRNA sense strand
caauugcuguggcguaaau

SEQ ID NO: 1150257 - RNA, 19 nt, Homo sapiens
  misc_RNA (1)...(19): siRNA sense strand
ggagugcaucuucuuugua

SEQ ID NO: 1150258 - RNA, 19 nt, Homo sapiens
  misc_RNA (1)...(19): siRNA sense strand
ccaaagacaacucaacugu

SEQ ID NO: 1150259 - RNA, 19 nt, Homo sapiens
  misc_RNA (1)...(19): siRNA sense strand
caaagacaacucaacuguu

SEQ ID NO: 1150260 - RNA, 19 nt, Homo sapiens
  misc_RNA (1)...(19): siRNA sense strand
gccauucucugcuggacuu

SEQ ID NO: 1150261 - RNA, 19 nt, Homo sapiens
  misc_RNA (1)...(19): siRNA sense strand
aaucagggcugcuaugaac

SEQ ID NO: 1150262 - RNA, 19 nt, Homo sapiens
  misc_RNA (1)...(19): siRNA sense strand
gggcugcuaugaacugauc

SEQ ID NO: 1150263 - RNA, 19 nt, Homo sapiens
  misc_RNA (1)...(19): siRNA sense strand
cacccaaccucuuccugaa

SEQ ID NO: 1150264 - RNA, 19 nt, Homo sapiens
  misc_RNA (1)...(19): siRNA sense strand
ucaaugcuguguuaugaac

SEQ ID NO: 1150265 - RNA, 19 nt, Homo sapiens
  misc_RNA (1)...(19): siRNA sense strand
agaauaaugaugcugacua

SEQ ID NO: 1150266 - RNA, 19 nt, Homo sapiens
  misc_RNA (1)...(19): siRNA sense strand
ccuuugaaguggcaucuug

SEQ ID NO: 1150267 - RNA, 19 nt, Homo sapiens
  misc_RNA (1)...(19): siRNA sense strand
gcaucuucuuuguaucuga

SEQ ID NO: 1150268 - RNA, 19 nt, Homo sapiens
  misc_RNA (1)...(19): siRNA sense strand
acugaucucugguccaaug

SEQ ID NO: 1150269 - RNA, 19 nt, Homo sapiens
  misc_RNA (1)...(19): siRNA sense strand
caaccuggaggcuuguaaa

SEQ ID NO: 1150270 - RNA, 19 nt, Homo sapiens
  misc_RNA (1)...(19): siRNA sense strand
uaucacagcagcaacacaa

SEQ ID NO: 1150271 - RNA, 19 nt, Homo sapiens
  misc_RNA (1)...(19): siRNA sense strand
aaacaauggagucaccaaa

SEQ ID NO: 1150272 - RNA, 19 nt, Homo sapiens
  misc_RNA (1)...(19): siRNA sense strand
cguauuucauucugauguu

SEQ ID NO: 1150273 - RNA, 19 nt, Homo sapiens
  misc_RNA (1)...(19): siRNA sense strand
cggagugcaucuucuuugu

SEQ ID NO: 1150274 - RNA, 19 nt, Homo sapiens
  misc_RNA (1)...(19): siRNA sense strand
gaucucugguccaaugaac

SEQ ID NO: 1150275 - RNA, 19 nt, Homo sapiens
  misc_RNA (1)...(19): siRNA sense strand
ugaaguggcaucuuguauc

SEQ ID NO: 1150276 - RNA, 19 nt, Homo sapiens
  misc_RNA (1)...(19): siRNA sense strand
aacaacagcccuccaaaca

SEQ ID NO: 1150277 - RNA, 19 nt, Homo sapiens
  misc_RNA (1)...(19): siRNA sense strand
gcggagugcaucuucuuug

SEQ ID NO: 1150278 - RNA, 19 nt, Homo sapiens
  misc_RNA (1)...(19): siRNA sense strand
caugaaguccagcaggaaa

SEQ ID NO: 1150279 - RNA, 19 nt, Homo sapiens
  misc_RNA (1)...(19): siRNA sense strand
uuggaaaugugauuauugg

SEQ ID NO: 1150280 - RNA, 19 nt, Homo sapiens
  misc_RNA (1)...(19): siRNA sense strand
acaaugaugaccaguggaa

SEQ ID NO: 1150281 - RNA, 19 nt, Homo sapiens
  misc_RNA (1)...(19): siRNA sense strand
uuaaagaaccucucaaccu

SEQ ID NO: 1150282 - RNA, 19 nt, Homo sapiens
  misc_RNA (1)...(19): siRNA sense strand
caaucagggcugcuaugaa

SEQ ID NO: 1150283 - RNA, 19 nt, Homo sapiens
  misc_RNA (1)...(19): siRNA sense strand
gaaaauucuucuggcguau

SEQ ID NO: 1150284 - RNA, 19 nt, Homo sapiens
  misc_RNA (1)...(19): siRNA sense strand
acaaucagggcugcuauga

SEQ ID NO: 1150285 - RNA, 19 nt, Homo sapiens
  misc_RNA (1)...(19): siRNA sense strand
caucugccuuccggacuga

SEQ ID NO: 1150286 - RNA, 19 nt, Homo sapiens
  misc_RNA (1)...(19): siRNA sense strand
acaacagcccuccaaacaa

SEQ ID NO: 1150287 - RNA, 19 nt, Homo sapiens
  misc_RNA (1)...(19): siRNA sense strand
cuagagagguaccaaaaca

SEQ ID NO: 1150288 - RNA, 19 nt, Homo sapiens
  misc_RNA (1)...(19): siRNA sense strand
ggcauuguaggcaucauga

SEQ ID NO: 1150289 - RNA, 19 nt, Homo sapiens
  misc_RNA (1)...(19): siRNA sense strand
aguggcaucuuguaucaca

SEQ ID NO: 1150290 - RNA, 19 nt, Homo sapiens
  misc_RNA (1)...(19): siRNA sense strand
aaacaacagcccuccaaac

SEQ ID NO: 1150291 - RNA, 19 nt, Homo sapiens
  misc_RNA (1)...(19): siRNA sense strand
gugcaucuucuuuguaucu

SEQ ID NO: 1150292 - RNA, 19 nt, Homo sapiens
  misc_RNA (1)...(19): siRNA sense strand
ggccaaagacaacucaacu

SEQ ID NO: 1150293 - RNA, 19 nt, Homo sapiens
  misc_RNA (1)...(19): siRNA sense strand
gccuggaucggcauauuug

SEQ ID NO: 1150294 - RNA, 19 nt, Homo sapiens
  misc_RNA (1)...(19): siRNA sense strand
gcauauuugugggcaucug

SEQ ID NO: 1150295 - RNA, 19 nt, Homo sapiens
  misc_RNA (1)...(19): siRNA sense strand
uggcguauuucauucugau

SEQ ID NO: 1150296 - RNA, 19 nt, Homo sapiens
  misc_RNA (1)...(19): siRNA sense strand
cuucuggcguauuucauuc

SEQ ID NO: 1150297 - RNA, 19 nt, Homo sapiens
  misc_RNA (1)...(19): siRNA sense strand
aguauaugccuuugaagug

SEQ ID NO: 1150298 - RNA, 19 nt, Homo sapiens
  misc_RNA (1)...(19): siRNA sense strand
gauacaaucuugaacucua

SEQ ID NO: 1150299 - RNA, 19 nt, Homo sapiens
  misc_RNA (1)...(19): siRNA sense strand
caacguugaucauaacaaa

SEQ ID NO: 1150300 - RNA, 19 nt, Homo sapiens
  misc_RNA (1)...(19): siRNA sense strand
ggaagagucguaccaagua

SEQ ID NO: 1150301 - RNA, 19 nt, Homo sapiens
  misc_RNA (1)...(19): siRNA sense strand
caacagcccucugccuuga

SEQ ID NO: 1150302 - RNA, 19 nt, Homo sapiens
  misc_RNA (1)...(19): siRNA sense strand
uauccaacguugaucauaa

SEQ ID NO: 1150303 - RNA, 19 nt, Homo sapiens
  misc_RNA (1)...(19): siRNA sense strand
gcaacguuaucgaaugauu

SEQ ID NO: 1150304 - RNA, 19 nt, Homo sapiens
  misc_RNA (1)...(19): siRNA sense strand
ucaacaacguggaaaguga

SEQ ID NO: 1150305 - RNA, 19 nt, Homo sapiens
  misc_RNA (1)...(19): siRNA sense strand
caagcaacguuaucgaaug

SEQ ID NO: 1150306 - RNA, 19 nt, Homo sapiens
  misc_RNA (1)...(19): siRNA sense strand
gaacaauggccuccuccaa

SEQ ID NO: 1150307 - RNA, 19 nt, Homo sapiens
  misc_RNA (1)...(19): siRNA sense strand
ggagaagguuauccaaguc

SEQ ID NO: 1150308 - RNA, 19 nt, Homo sapiens
  misc_RNA (1)...(19): siRNA sense strand
aagcaacguuaucgaauga

SEQ ID NO: 1150309 - RNA, 19 nt, Homo sapiens
  misc_RNA (1)...(19): siRNA sense strand
cuugaacucuaaccacaua

SEQ ID NO: 1150310 - RNA, 19 nt, Homo sapiens
  misc_RNA (1)...(19): siRNA sense strand
uuacuucuguggcccuuaa

SEQ ID NO: 1150311 - RNA, 19 nt, Homo sapiens
  misc_RNA (1)...(19): siRNA sense strand
gcccaguucuuacuucugu

SEQ ID NO: 1150312 - RNA, 19 nt, Homo sapiens
  misc_RNA (1)...(19): siRNA sense strand
gaccaagucaggacccuuu

SEQ ID NO: 1150313 - RNA, 19 nt, Homo sapiens
  misc_RNA (1)...(19): siRNA sense strand
ugauugacuuucugcguuu

SEQ ID NO: 1150314 - RNA, 19 nt, Homo sapiens
  misc_RNA (1)...(19): siRNA sense strand
gaauccgggugcaugguau

SEQ ID NO: 1150315 - RNA, 19 nt, Homo sapiens
  misc_RNA (1)...(19): siRNA sense strand
uuauccagcugcccucuaa

SEQ ID NO: 1150316 - RNA, 19 nt, Homo sapiens
  misc_RNA (1)...(19): siRNA sense strand
acaauggccuccuccaaca

SEQ ID NO: 1150317 - RNA, 19 nt, Homo sapiens
  misc_RNA (1)...(19): siRNA sense strand
agacauagcucugguugcu

SEQ ID NO: 1150318 - RNA, 19 nt, Homo sapiens
  misc_RNA (1)...(19): siRNA sense strand
ggaaacgugcguagcaaca

SEQ ID NO: 1150319 - RNA, 19 nt, Homo sapiens
  misc_RNA (1)...(19): siRNA sense strand
caugaagaguuacgugaag

SEQ ID NO: 1150320 - RNA, 19 nt, Homo sapiens
  misc_RNA (1)...(19): siRNA sense strand
caacguuaucgaaugauug

SEQ ID NO: 1150321 - RNA, 19 nt, Homo sapiens
  misc_RNA (1)...(19): siRNA sense strand
aggagaagguuauccaagu

SEQ ID NO: 1150322 - RNA, 19 nt, Homo sapiens
  misc_RNA (1)...(19): siRNA sense strand
caugcaggcuggagauaca

SEQ ID NO: 1150323 - RNA, 19 nt, Homo sapiens
  misc_RNA (1)...(19): siRNA sense strand
ccaacuuuguguccuggaa

SEQ ID NO: 1150324 - RNA, 19 nt, Homo sapiens
  misc_RNA (1)...(19): siRNA sense strand
ccgcccagaugaugaacaa

SEQ ID NO: 1150325 - RNA, 19 nt, Homo sapiens
  misc_RNA (1)...(19): siRNA sense strand
gcaacaguaggccgaguau

SEQ ID NO: 1150326 - RNA, 19 nt, Homo sapiens
  misc_RNA (1)...(19): siRNA sense strand
ggcccuuaaugccaacuuu

SEQ ID NO: 1150327 - RNA, 19 nt, Homo sapiens
  misc_RNA (1)...(19): siRNA sense strand
guuaucgaaugauugacuu

SEQ ID NO: 1150328 - RNA, 19 nt, Homo sapiens
  misc_RNA (1)...(19): siRNA sense strand
cgaauccgggugcauggua

SEQ ID NO: 1150329 - RNA, 19 nt, Homo sapiens
  misc_RNA (1)...(19): siRNA sense strand
gcccagaugaugaacaaug

SEQ ID NO: 1150330 - RNA, 19 nt, Homo sapiens
  misc_RNA (1)...(19): siRNA sense strand
aaacgugcguagcaacagu

SEQ ID NO: 1150331 - RNA, 19 nt, Homo sapiens
  misc_RNA (1)...(19): siRNA sense strand
cauaacaaacgggucauug

SEQ ID NO: 1150332 - RNA, 19 nt, Homo sapiens
  misc_RNA (1)...(19): siRNA sense strand
cacaagcaacguuaucgaa

SEQ ID NO: 1150333 - RNA, 19 nt, Homo sapiens
  misc_RNA (1)...(19): siRNA sense strand
gcuggaucaucgccacaga

SEQ ID NO: 1150334 - RNA, 19 nt, Homo sapiens
  misc_RNA (1)...(19): siRNA sense strand
ccaugaagaguuacgugaa

SEQ ID NO: 1150335 - RNA, 19 nt, Homo sapiens
  misc_RNA (1)...(19): siRNA sense strand
cagugaagaugaggaaguc

SEQ ID NO: 1150336 - RNA, 19 nt, Homo sapiens
  misc_RNA (1)...(19): siRNA sense strand
caggacccuuugaggagaa

SEQ ID NO: 1150337 - RNA, 19 nt, Homo sapiens
  misc_RNA (1)...(19): siRNA sense strand
guauccaacguugaucaua

SEQ ID NO: 1150338 - RNA, 19 nt, Homo sapiens
  misc_RNA (1)...(19): siRNA sense strand
gaguauccaacguugauca

SEQ ID NO: 1150339 - RNA, 19 nt, Homo sapiens
  misc_RNA (1)...(19): siRNA sense strand
gcuggaaacgugcguagca

SEQ ID NO: 1150340 - RNA, 19 nt, Homo sapiens
  misc_RNA (1)...(19): siRNA sense strand
gcagaugcaggugcuggaa

SEQ ID NO: 1150341 - RNA, 19 nt, Homo sapiens
  misc_RNA (1)...(19): siRNA sense strand
ccacaagcaacguuaucga

SEQ ID NO: 1150342 - RNA, 19 nt, Homo sapiens
  misc_RNA (1)...(19): siRNA sense strand
ccaagucaggacccuuuga

SEQ ID NO: 1150343 - RNA, 19 nt, Homo sapiens
  misc_RNA (1)...(19): siRNA sense strand
acaagcaacguuaucgaau

SEQ ID NO: 1150344 - RNA, 19 nt, Homo sapiens
  misc_RNA (1)...(19): siRNA sense strand
cccagaugaugaacaaugg

SEQ ID NO: 1150345 - RNA, 19 nt, Homo sapiens
  misc_RNA (1)...(19): siRNA sense strand
aaacaugcaggcuggagau

SEQ ID NO: 1150346 - RNA, 19 nt, Homo sapiens
  misc_RNA (1)...(19): siRNA sense strand
uggaucaucgccacagaaa

SEQ ID NO: 1150347 - RNA, 19 nt, Homo sapiens
  misc_RNA (1)...(19): siRNA sense strand
uuacaccagugaagaugag

SEQ ID NO: 1150348 - RNA, 19 nt, Homo sapiens
  misc_RNA (1)...(19): siRNA sense strand
ucgaaugauugacuuucug

SEQ ID NO: 1150349 - RNA, 19 nt, Homo sapiens
  misc_RNA (1)...(19): siRNA sense strand
acagcccucugccuugaug

SEQ ID NO: 1150350 - RNA, 19 nt, Homo sapiens
  misc_RNA (1)...(19): siRNA sense strand
uggaagagucguaccaagu

SEQ ID NO: 1150351 - RNA, 19 nt, Homo sapiens
  misc_RNA (1)...(19): siRNA sense strand
caucaacaacguggaaagu

SEQ ID NO: 1150352 - RNA, 19 nt, Homo sapiens
  misc_RNA (1)...(19): siRNA sense strand
ccagugaagaugaggaagu

SEQ ID NO: 1150353 - RNA, 19 nt, Homo sapiens
  misc_RNA (1)...(19): siRNA sense strand
gaacagagcuccugacaac

SEQ ID NO: 1150354 - RNA, 19 nt, Homo sapiens
  misc_RNA (1)...(19): siRNA sense strand
caagaaggauugucagaga

SEQ ID NO: 1150355 - RNA, 19 nt, Homo sapiens
  misc_RNA (1)...(19): siRNA sense strand
ucaagaaccucaacaugaa

SEQ ID NO: 1150356 - RNA, 19 nt, Homo sapiens
  misc_RNA (1)...(19): siRNA sense strand
ccaaucaacucauucagaa

SEQ ID NO: 1150357 - RNA, 19 nt, Homo sapiens
  misc_RNA (1)...(19): siRNA sense strand
gcacacaugucagcauuga

SEQ ID NO: 1150358 - RNA, 19 nt, Homo sapiens
  misc_RNA (1)...(19): siRNA sense strand
guucagcucuugacacaaa

SEQ ID NO: 1150359 - RNA, 19 nt, Homo sapiens
  misc_RNA (1)...(19): siRNA sense strand
ggaacuaucuccucucucu

SEQ ID NO: 1150360 - RNA, 19 nt, Homo sapiens
  misc_RNA (1)...(19): siRNA sense strand
ggaagaugauggcccagaa

SEQ ID NO: 1150361 - RNA, 19 nt, Homo sapiens
  misc_RNA (1)...(19): siRNA sense strand
cgaaggaacuauuugaaca

SEQ ID NO: 1150362 - RNA, 19 nt, Homo sapiens
  misc_RNA (1)...(19): siRNA sense strand
gggccuagaacccaaauua

SEQ ID NO: 1150363 - RNA, 19 nt, Homo sapiens
  misc_RNA (1)...(19): siRNA sense strand
gaagccaccuauagagaga

SEQ ID NO: 1150364 - RNA, 19 nt, Homo sapiens
  misc_RNA (1)...(19): siRNA sense strand
gauaaacagugccaagaag

SEQ ID NO: 1150365 - RNA, 19 nt, Homo sapiens
  misc_RNA (1)...(19): siRNA sense strand
gaagagauccagccacauc

SEQ ID NO: 1150366 - RNA, 19 nt, Homo sapiens
  misc_RNA (1)...(19): siRNA sense strand
uuaaagagcugggaaccuu

SEQ ID NO: 1150367 - RNA, 19 nt, Homo sapiens
  misc_RNA (1)...(19): siRNA sense strand
ggcgguggcuguaacauga

SEQ ID NO: 1150368 - RNA, 19 nt, Homo sapiens
  misc_RNA (1)...(19): siRNA sense strand
gcaccaggauaugucuuaa

SEQ ID NO: 1150369 - RNA, 19 nt, Homo sapiens
  misc_RNA (1)...(19): siRNA sense strand
cuagagagguaggaaauau

SEQ ID NO: 1150370 - RNA, 19 nt, Homo sapiens
  misc_RNA (1)...(19): siRNA sense strand
uugaacagcugaagaugaa

SEQ ID NO: 1150371 - RNA, 19 nt, Homo sapiens
  misc_RNA (1)...(19): siRNA sense strand
cagcacacaugucagcauu

SEQ ID NO: 1150372 - RNA, 19 nt, Homo sapiens
  misc_RNA (1)...(19): siRNA sense strand
gaacagcugaagaugaaga

SEQ ID NO: 1150373 - RNA, 19 nt, Homo sapiens
  misc_RNA (1)...(19): siRNA sense strand
acacaaauccaccuucuug

SEQ ID NO: 1150374 - RNA, 19 nt, Homo sapiens
  misc_RNA (1)...(19): siRNA sense strand
cuaugcagcugauugaaga

SEQ ID NO: 1150375 - RNA, 19 nt, Homo sapiens
  misc_RNA (1)...(19): siRNA sense strand
uagaggaaguugucaagau

SEQ ID NO: 1150376 - RNA, 19 nt, Homo sapiens
  misc_RNA (1)...(19): siRNA sense strand
ccggauuccucacccaaua

SEQ ID NO: 1150377 - RNA, 19 nt, Homo sapiens
  misc_RNA (1)...(19): siRNA sense strand
ucuguuaucuucacuguuc

SEQ ID NO: 1150378 - RNA, 19 nt, Homo sapiens
  misc_RNA (1)...(19): siRNA sense strand
uggccaaccuacuaaauga

SEQ ID NO: 1150379 - RNA, 19 nt, Homo sapiens
  misc_RNA (1)...(19): siRNA sense strand
gccagggccuuucgcugua

SEQ ID NO: 1150380 - RNA, 19 nt, Homo sapiens
  misc_RNA (1)...(19): siRNA sense strand
gaacaccggcucccauucu

SEQ ID NO: 1150381 - RNA, 19 nt, Homo sapiens
  misc_RNA (1)...(19): siRNA sense strand
agaggaaguugucaagaug

SEQ ID NO: 1150382 - RNA, 19 nt, Homo sapiens
  misc_RNA (1)...(19): siRNA sense strand
ggaaaaugcugugaagaga

SEQ ID NO: 1150383 - RNA, 19 nt, Homo sapiens
  misc_RNA (1)...(19): siRNA sense strand
gccaguagcaccaggauau

SEQ ID NO: 1150384 - RNA, 19 nt, Homo sapiens
  misc_RNA (1)...(19): siRNA sense strand
gaaaacaccagcccaauca

SEQ ID NO: 1150385 - RNA, 19 nt, Homo sapiens
  misc_RNA (1)...(19): siRNA sense strand
gguguaguccugaaacuga

SEQ ID NO: 1150386 - RNA, 19 nt, Homo sapiens
  misc_RNA (1)...(19): siRNA sense strand
gagccucaagcuaacuuua

SEQ ID NO: 1150387 - RNA, 19 nt, Homo sapiens
  misc_RNA (1)...(19): siRNA sense strand
gacagaagcguucaucagu

SEQ ID NO: 1150388 - RNA, 19 nt, Homo sapiens
  misc_RNA (1)...(19): siRNA sense strand
gcuauugccuaagggugua

SEQ ID NO: 1150389 - RNA, 19 nt, Homo sapiens
  misc_RNA (1)...(19): siRNA sense strand
gcuccugacaacaucauua

SEQ ID NO: 1150390 - RNA, 19 nt, Homo sapiens
  misc_RNA (1)...(19): siRNA sense strand
ccacugcuauugccuaagg

SEQ ID NO: 1150391 - RNA, 19 nt, Homo sapiens
  misc_RNA (1)...(19): siRNA sense strand
agaaggagguagagaaggu

SEQ ID NO: 1150392 - RNA, 19 nt, Homo sapiens
  misc_RNA (1)...(19): siRNA sense strand
ccaggagucucuaaacaac

SEQ ID NO: 1150393 - RNA, 19 nt, Homo sapiens
  misc_RNA (1)...(19): siRNA sense strand
ccucuuccauguuucgaaa

SEQ ID NO: 1150394 - RNA, 19 nt, Homo sapiens
  misc_RNA (1)...(19): siRNA sense strand
ugacacaaauccaccuucu

SEQ ID NO: 1150395 - RNA, 19 nt, Homo sapiens
  misc_RNA (1)...(19): siRNA sense strand
ucagauagcgaaggaacua

SEQ ID NO: 1150396 - RNA, 19 nt, Homo sapiens
  misc_RNA (1)...(19): siRNA sense strand
guuccaacccuguaacuug

SEQ ID NO: 1150397 - RNA, 19 nt, Homo sapiens
  misc_RNA (1)...(19): siRNA sense strand
gcagaaggagguagagaag

SEQ ID NO: 1150398 - RNA, 19 nt, Homo sapiens
  misc_RNA (1)...(19): siRNA sense strand
gaaggauugucagagaaca

SEQ ID NO: 1150399 - RNA, 19 nt, Homo sapiens
  misc_RNA (1)...(19): siRNA sense strand
ugauggugcuagagaggua

SEQ ID NO: 1150400 - RNA, 19 nt, Homo sapiens
  misc_RNA (1)...(19): siRNA sense strand
ggagguagagaagguuaaa

SEQ ID NO: 1150401 - RNA, 19 nt, Homo sapiens
  misc_RNA (1)...(19): siRNA sense strand
aggacaagcuucccucugu

SEQ ID NO: 1150402 - RNA, 19 nt, Homo sapiens
  misc_RNA (1)...(19): siRNA sense strand
aagaaggauugucagagaa

SEQ ID NO: 1150403 - RNA, 19 nt, Homo sapiens
  misc_RNA (1)...(19): siRNA sense strand
cgauaaacagugccaagaa

SEQ ID NO: 1150404 - RNA, 19 nt, Homo sapiens
  misc_RNA (1)...(19): siRNA sense strand
gcuagagagguaggaaaua

SEQ ID NO: 1150405 - RNA, 19 nt, Homo sapiens
  misc_RNA (1)...(19): siRNA sense strand
gccuagaacccaaauuaga

SEQ ID NO: 1150406 - RNA, 19 nt, Homo sapiens
  misc_RNA (1)...(19): siRNA sense strand
gaaucaagaaccucaacau

SEQ ID NO: 1150407 - RNA, 19 nt, Homo sapiens
  misc_RNA (1)...(19): siRNA sense strand
caucuguuaucuucacugu

SEQ ID NO: 1150408 - RNA, 19 nt, Homo sapiens
  misc_RNA (1)...(19): siRNA sense strand
ggaacuacuggccaaccua

SEQ ID NO: 1150409 - RNA, 19 nt, Homo sapiens
  misc_RNA (1)...(19): siRNA sense strand
agagagguaggaaauauga

SEQ ID NO: 1150410 - RNA, 19 nt, Homo sapiens
  misc_RNA (1)...(19): siRNA sense strand
ccuacuaaaugaacaacau

SEQ ID NO: 1150411 - RNA, 19 nt, Homo sapiens
  misc_RNA (1)...(19): siRNA sense strand
ugacugcagcccucauaaa

SEQ ID NO: 1150412 - RNA, 19 nt, Homo sapiens
  misc_RNA (1)...(19): siRNA sense strand
ggaaauaugacuggaacca

SEQ ID NO: 1150413 - RNA, 19 nt, Homo sapiens
  misc_RNA (1)...(19): siRNA sense strand
cuaaaugaacaacaucaga

SEQ ID NO: 1150414 - RNA, 19 nt, Homo sapiens
  misc_RNA (1)...(19): siRNA sense strand
ggauuuagaggaaguuguc

SEQ ID NO: 1150415 - RNA, 19 nt, Homo sapiens
  misc_RNA (1)...(19): siRNA sense strand
gucucacccuuaauuguuu

SEQ ID NO: 1150416 - RNA, 19 nt, Homo sapiens
  misc_RNA (1)...(19): siRNA sense strand
cuaccacugugaagauugu

SEQ ID NO: 1150417 - RNA, 19 nt, Homo sapiens
  misc_RNA (1)...(19): siRNA sense strand
ccagcccaaucaacucauu

SEQ ID NO: 1150418 - RNA, 19 nt, Homo sapiens
  misc_RNA (1)...(19): siRNA sense strand
gaaggaacuauuugaacag

SEQ ID NO: 1150419 - RNA, 19 nt, Homo sapiens
  misc_RNA (1)...(19): siRNA sense strand
uauccacccugcaucuguu

SEQ ID NO: 1150420 - RNA, 19 nt, Homo sapiens
  misc_RNA (1)...(19): siRNA sense strand
uagcgaaggaacuauuuga

SEQ ID NO: 1150421 - RNA, 19 nt, Homo sapiens
  misc_RNA (1)...(19): siRNA sense strand
aagaaggcuuggagacaga

SEQ ID NO: 1150422 - RNA, 19 nt, Homo sapiens
  misc_RNA (1)...(19): siRNA sense strand
uaacaccccucaagcucua

SEQ ID NO: 1150423 - RNA, 19 nt, Homo sapiens
  misc_RNA (1)...(19): siRNA sense strand
guaacuugaugggagcuau

SEQ ID NO: 1150424 - RNA, 19 nt, Homo sapiens
  misc_RNA (1)...(19): siRNA sense strand
uuccaacccuguaacuuga

SEQ ID NO: 1150425 - RNA, 19 nt, Homo sapiens
  misc_RNA (1)...(19): siRNA sense strand
ccaucgcccuucaccauca

SEQ ID NO: 1150426 - RNA, 19 nt, Homo sapiens
  misc_RNA (1)...(19): siRNA sense strand
uaaacagugccaagaagga

SEQ ID NO: 1150427 - RNA, 19 nt, Homo sapiens
  misc_RNA (1)...(19): siRNA sense strand
cuacuggccaaccuacuaa

SEQ ID NO: 1150428 - RNA, 19 nt, Homo sapiens
  misc_RNA (1)...(19): siRNA sense strand
ucagaucaaggccuagaaa

SEQ ID NO: 1150429 - RNA, 19 nt, Homo sapiens
  misc_RNA (1)...(19): siRNA sense strand
guaggaaauaugacuggaa

SEQ ID NO: 1150430 - RNA, 19 nt, Homo sapiens
  misc_RNA (1)...(19): siRNA sense strand
cggcucccauucugguuaa

SEQ ID NO: 1150431 - RNA, 19 nt, Homo sapiens
  misc_RNA (1)...(19): siRNA sense strand
ccugacaacaucauuaaau

SEQ ID NO: 1150432 - RNA, 19 nt, Homo sapiens
  misc_RNA (1)...(19): siRNA sense strand
gcagcauguucagcucuug

SEQ ID NO: 1150433 - RNA, 19 nt, Homo sapiens
  misc_RNA (1)...(19): siRNA sense strand
uaucaaaccugccccuguu

SEQ ID NO: 1150434 - RNA, 19 nt, Homo sapiens
  misc_RNA (1)...(19): siRNA sense strand
caagcuucccucugucuga

SEQ ID NO: 1150435 - RNA, 19 nt, Homo sapiens
  misc_RNA (1)...(19): siRNA sense strand
gcugggaaccuuugcucaa

SEQ ID NO: 1150436 - RNA, 19 nt, Homo sapiens
  misc_RNA (1)...(19): siRNA sense strand
ugacagugagaaucaagaa

SEQ ID NO: 1150437 - RNA, 19 nt, Homo sapiens
  misc_RNA (1)...(19): siRNA sense strand
gaagaugauggcccagaag

SEQ ID NO: 1150438 - RNA, 19 nt, Homo sapiens
  misc_RNA (1)...(19): siRNA sense strand
gaaccucaacaugaacaga

SEQ ID NO: 1150439 - RNA, 19 nt, Homo sapiens
  misc_RNA (1)...(19): siRNA sense strand
ucauaaaacugucaagaag

SEQ ID NO: 1150440 - RNA, 19 nt, Homo sapiens
  misc_RNA (1)...(19): siRNA sense strand
gaaggagguagagaagguu

SEQ ID NO: 1150441 - RNA, 19 nt, Homo sapiens
  misc_RNA (1)...(19): siRNA sense strand
cuaaggguguaguccugaa

SEQ ID NO: 1150442 - RNA, 19 nt, Homo sapiens
  misc_RNA (1)...(19): siRNA sense strand
aaucaagaaccucaacaug

SEQ ID NO: 1150443 - RNA, 19 nt, Homo sapiens
  misc_RNA (1)...(19): siRNA sense strand
gcgaaggaacuauuugaac

SEQ ID NO: 1150444 - RNA, 19 nt, Homo sapiens
  misc_RNA (1)...(19): siRNA sense strand
ugucucacccuuaauuguu

SEQ ID NO: 1150445 - RNA, 19 nt, Homo sapiens
  misc_RNA (1)...(19): siRNA sense strand
gccuuucgcuguaucaaac

SEQ ID NO: 1150446 - RNA, 19 nt, Homo sapiens
  misc_RNA (1)...(19): siRNA sense strand
ggagacagaagcguucauc

SEQ ID NO: 1150447 - RNA, 19 nt, Homo sapiens
  misc_RNA (1)...(19): siRNA sense strand
guguaguccugaaacugaa

SEQ ID NO: 1150448 - RNA, 19 nt, Homo sapiens
  misc_RNA (1)...(19): siRNA sense strand
aucaagaaccucaacauga

SEQ ID NO: 1150449 - RNA, 19 nt, Homo sapiens
  misc_RNA (1)...(19): siRNA sense strand
gaaccacugagaucaacuc

SEQ ID NO: 1150450 - RNA, 19 nt, Homo sapiens
  misc_RNA (1)...(19): siRNA sense strand
ucgcuggaccguugugaaa

SEQ ID NO: 1150451 - RNA, 19 nt, Homo sapiens
  misc_RNA (1)...(19): siRNA sense strand
caaauuagagccccaggaa

SEQ ID NO: 1150452 - RNA, 19 nt, Homo sapiens
  misc_RNA (1)...(19): siRNA sense strand
ucaguggaggugagaguuu

SEQ ID NO: 1150453 - RNA, 19 nt, Homo sapiens
  misc_RNA (1)...(19): siRNA sense strand
caaaugagcugauggaaga

SEQ ID NO: 1150454 - RNA, 19 nt, Homo sapiens
  misc_RNA (1)...(19): siRNA sense strand
gaacagagcuccugacaac

SEQ ID NO: 1150455 - RNA, 19 nt, Homo sapiens
  misc_RNA (1)...(19): siRNA sense strand
caagaaggauugucagaga

SEQ ID NO: 1150456 - RNA, 19 nt, Homo sapiens
  misc_RNA (1)...(19): siRNA sense strand
ucaagaaccucaacaugaa

SEQ ID NO: 1150457 - RNA, 19 nt, Homo sapiens
  misc_RNA (1)...(19): siRNA sense strand
ccaaucaacucauucagaa

SEQ ID NO: 1150458 - RNA, 19 nt, Homo sapiens
  misc_RNA (1)...(19): siRNA sense strand
gcacacaugucagcauuga

SEQ ID NO: 1150459 - RNA, 19 nt, Homo sapiens
  misc_RNA (1)...(19): siRNA sense strand
guucagcucuugacacaaa

SEQ ID NO: 1150460 - RNA, 19 nt, Homo sapiens
  misc_RNA (1)...(19): siRNA sense strand
ggaacuaucuccucucucu

SEQ ID NO: 1150461 - RNA, 19 nt, Homo sapiens
  misc_RNA (1)...(19): siRNA sense strand
ggaagaugauggcccagaa

SEQ ID NO: 1150462 - RNA, 19 nt, Homo sapiens
  misc_RNA (1)...(19): siRNA sense strand
cgaaggaacuauuugaaca

SEQ ID NO: 1150463 - RNA, 19 nt, Homo sapiens
  misc_RNA (1)...(19): siRNA sense strand
gauggaagaucuguuugaa

SEQ ID NO: 1150464 - RNA, 19 nt, Homo sapiens
  misc_RNA (1)...(19): siRNA sense strand
gggccuagaacccaaauua

SEQ ID NO: 1150465 - RNA, 19 nt, Homo sapiens
  misc_RNA (1)...(19): siRNA sense strand
gaagccaccuauagagaga

SEQ ID NO: 1150466 - RNA, 19 nt, Homo sapiens
  misc_RNA (1)...(19): siRNA sense strand
gauaaacagugccaagaag

SEQ ID NO: 1150467 - RNA, 19 nt, Homo sapiens
  misc_RNA (1)...(19): siRNA sense strand
gaagagauccagccacauc

SEQ ID NO: 1150468 - RNA, 19 nt, Homo sapiens
  misc_RNA (1)...(19): siRNA sense strand
uuaaagagcugggaaccuu

SEQ ID NO: 1150469 - RNA, 19 nt, Homo sapiens
  misc_RNA (1)...(19): siRNA sense strand
ggaagcaaaugagcugaug

SEQ ID NO: 1150470 - RNA, 19 nt, Homo sapiens
  misc_RNA (1)...(19): siRNA sense strand
ggcgguggcuguaacauga

SEQ ID NO: 1150471 - RNA, 19 nt, Homo sapiens
  misc_RNA (1)...(19): siRNA sense strand
gcaccaggauaugucuuaa

SEQ ID NO: 1150472 - RNA, 19 nt, Homo sapiens
  misc_RNA (1)...(19): siRNA sense strand
cuagagagguaggaaauau

SEQ ID NO: 1150473 - RNA, 19 nt, Homo sapiens
  misc_RNA (1)...(19): siRNA sense strand
uugaacagcugaagaugaa

SEQ ID NO: 1150474 - RNA, 19 nt, Homo sapiens
  misc_RNA (1)...(19): siRNA sense strand
cagcacacaugucagcauu

SEQ ID NO: 1150475 - RNA, 19 nt, Homo sapiens
  misc_RNA (1)...(19): siRNA sense strand
gaacagcugaagaugaaga

SEQ ID NO: 1150476 - RNA, 19 nt, Homo sapiens
  misc_RNA (1)...(19): siRNA sense strand
acacaaauccaccuucuug

SEQ ID NO: 1150477 - RNA, 19 nt, Homo sapiens
  misc_RNA (1)...(19): siRNA sense strand
cuaugcagcugauugaaga

SEQ ID NO: 1150478 - RNA, 19 nt, Homo sapiens
  misc_RNA (1)...(19): siRNA sense strand
uagaggaaguugucaagau

SEQ ID NO: 1150479 - RNA, 19 nt, Homo sapiens
  misc_RNA (1)...(19): siRNA sense strand
ccggauuccucacccaaua

SEQ ID NO: 1150480 - RNA, 19 nt, Homo sapiens
  misc_RNA (1)...(19): siRNA sense strand
gcugauggaagaucuguuu

SEQ ID NO: 1150481 - RNA, 19 nt, Homo sapiens
  misc_RNA (1)...(19): siRNA sense strand
ucuguuaucuucacuguuc

SEQ ID NO: 1150482 - RNA, 19 nt, Homo sapiens
  misc_RNA (1)...(19): siRNA sense strand
uggccaaccuacuaaauga

SEQ ID NO: 1150483 - RNA, 19 nt, Homo sapiens
  misc_RNA (1)...(19): siRNA sense strand
gccagggccuuucgcugua

SEQ ID NO: 1150484 - RNA, 19 nt, Homo sapiens
  misc_RNA (1)...(19): siRNA sense strand
gaacaccggcucccauucu

SEQ ID NO: 1150485 - RNA, 19 nt, Homo sapiens
  misc_RNA (1)...(19): siRNA sense strand
agaggaaguugucaagaug

SEQ ID NO: 1150486 - RNA, 19 nt, Homo sapiens
  misc_RNA (1)...(19): siRNA sense strand
ggaaaaugcugugaagaga

SEQ ID NO: 1150487 - RNA, 19 nt, Homo sapiens
  misc_RNA (1)...(19): siRNA sense strand
gccaguagcaccaggauau

SEQ ID NO: 1150488 - RNA, 19 nt, Homo sapiens
  misc_RNA (1)...(19): siRNA sense strand
gaaaacaccagcccaauca

SEQ ID NO: 1150489 - RNA, 19 nt, Homo sapiens
  misc_RNA (1)...(19): siRNA sense strand
gguguaguccugaaacuga

SEQ ID NO: 1150490 - RNA, 19 nt, Homo sapiens
  misc_RNA (1)...(19): siRNA sense strand
gcuauugccuaagggugua

SEQ ID NO: 1150491 - RNA, 19 nt, Homo sapiens
  misc_RNA (1)...(19): siRNA sense strand
gagccucaagcuaacuuua

SEQ ID NO: 1150492 - RNA, 19 nt, Homo sapiens
  misc_RNA (1)...(19): siRNA sense strand
gacagaagcguucaucagu

SEQ ID NO: 1150493 - RNA, 19 nt, Homo sapiens
  misc_RNA (1)...(19): siRNA sense strand
gcuccugacaacaucauua

SEQ ID NO: 1150494 - RNA, 19 nt, Homo sapiens
  misc_RNA (1)...(19): siRNA sense strand
ccacugcuauugccuaagg

SEQ ID NO: 1150495 - RNA, 19 nt, Homo sapiens
  misc_RNA (1)...(19): siRNA sense strand
agaaggagguagagaaggu

SEQ ID NO: 1150496 - RNA, 19 nt, Homo sapiens
  misc_RNA (1)...(19): siRNA sense strand
ccaggagucucuaaacaac

SEQ ID NO: 1150497 - RNA, 19 nt, Homo sapiens
  misc_RNA (1)...(19): siRNA sense strand
ccucuuccauguuucgaaa

SEQ ID NO: 1150498 - RNA, 19 nt, Homo sapiens
  misc_RNA (1)...(19): siRNA sense strand
ucagauagcgaaggaacua

SEQ ID NO: 1150499 - RNA, 19 nt, Homo sapiens
  misc_RNA (1)...(19): siRNA sense strand
guuccaacccuguaacuug

SEQ ID NO: 1150500 - RNA, 19 nt, Homo sapiens
  misc_RNA (1)...(19): siRNA sense strand
ugacacaaauccaccuucu

SEQ ID NO: 1150501 - RNA, 19 nt, Homo sapiens
  misc_RNA (1)...(19): siRNA sense strand
gcagaaggagguagagaag

SEQ ID NO: 1150502 - RNA, 19 nt, Homo sapiens
  misc_RNA (1)...(19): siRNA sense strand
gaaggauugucagagaaca

SEQ ID NO: 1150503 - RNA, 19 nt, Homo sapiens
  misc_RNA (1)...(19): siRNA sense strand
ugauggugcuagagaggua

SEQ ID NO: 1150504 - RNA, 19 nt, Homo sapiens
  misc_RNA (1)...(19): siRNA sense strand
ggagguagagaagguuaaa

SEQ ID NO: 1150505 - RNA, 19 nt, Homo sapiens
  misc_RNA (1)...(19): siRNA sense strand
aggacaagcuucccucugu

SEQ ID NO: 1150506 - RNA, 19 nt, Homo sapiens
  misc_RNA (1)...(19): siRNA sense strand
aagaaggauugucagagaa

SEQ ID NO: 1150507 - RNA, 19 nt, Homo sapiens
  misc_RNA (1)...(19): siRNA sense strand
cgauaaacagugccaagaa

SEQ ID NO: 1150508 - RNA, 19 nt, Homo sapiens
  misc_RNA (1)...(19): siRNA sense strand
gcuagagagguaggaaaua

SEQ ID NO: 1150509 - RNA, 19 nt, Homo sapiens
  misc_RNA (1)...(19): siRNA sense strand
gccuagaacccaaauuaga

SEQ ID NO: 1150510 - RNA, 19 nt, Homo sapiens
  misc_RNA (1)...(19): siRNA sense strand
gaaucaagaaccucaacau

SEQ ID NO: 1150511 - RNA, 19 nt, Homo sapiens
  misc_RNA (1)...(19): siRNA sense strand
caucuguuaucuucacugu

SEQ ID NO: 1150512 - RNA, 19 nt, Homo sapiens
  misc_RNA (1)...(19): siRNA sense strand
ccuacuaaaugaacaacau

SEQ ID NO: 1150513 - RNA, 19 nt, Homo sapiens
  misc_RNA (1)...(19): siRNA sense strand
agagagguaggaaauauga

SEQ ID NO: 1150514 - RNA, 19 nt, Homo sapiens
  misc_RNA (1)...(19): siRNA sense strand
ugacugcagcccucauaaa

SEQ ID NO: 1150515 - RNA, 19 nt, Homo sapiens
  misc_RNA (1)...(19): siRNA sense strand
ggaacuacuggccaaccua

SEQ ID NO: 1150516 - RNA, 19 nt, Homo sapiens
  misc_RNA (1)...(19): siRNA sense strand
gaugggauucuccaacaug

SEQ ID NO: 1150517 - RNA, 19 nt, Homo sapiens
  misc_RNA (1)...(19): siRNA sense strand
ggaaauaugacuggaacca

SEQ ID NO: 1150518 - RNA, 19 nt, Homo sapiens
  misc_RNA (1)...(19): siRNA sense strand
ccagcccaaucaacucauu

SEQ ID NO: 1150519 - RNA, 19 nt, Homo sapiens
  misc_RNA (1)...(19): siRNA sense strand
ggauuuagaggaaguuguc

SEQ ID NO: 1150520 - RNA, 19 nt, Homo sapiens
  misc_RNA (1)...(19): siRNA sense strand
cuaaaugaacaacaucaga

SEQ ID NO: 1150521 - RNA, 19 nt, Homo sapiens
  misc_RNA (1)...(19): siRNA sense strand
gucucacccuuaauuguuu

SEQ ID NO: 1150522 - RNA, 19 nt, Homo sapiens
  misc_RNA (1)...(19): siRNA sense strand
cuaccacugugaagauugu

SEQ ID NO: 1150523 - RNA, 19 nt, Homo sapiens
  misc_RNA (1)...(19): siRNA sense strand
uuccaacccuguaacuuga

SEQ ID NO: 1150524 - RNA, 19 nt, Homo sapiens
  misc_RNA (1)...(19): siRNA sense strand
uauccacccugcaucuguu

SEQ ID NO: 1150525 - RNA, 19 nt, Homo sapiens
  misc_RNA (1)...(19): siRNA sense strand
aagaaggcuuggagacaga

SEQ ID NO: 1150526 - RNA, 19 nt, Homo sapiens
  misc_RNA (1)...(19): siRNA sense strand
uaacaccccucaagcucua

SEQ ID NO: 1150527 - RNA, 19 nt, Homo sapiens
  misc_RNA (1)...(19): siRNA sense strand
uagcgaaggaacuauuuga

SEQ ID NO: 1150528 - RNA, 19 nt, Homo sapiens
  misc_RNA (1)...(19): siRNA sense strand
gaaggaacuauuugaacag

SEQ ID NO: 1150529 - RNA, 19 nt, Homo sapiens
  misc_RNA (1)...(19): siRNA sense strand
guaacuugaugggagcuau

SEQ ID NO: 1150530 - RNA, 19 nt, Homo sapiens
  misc_RNA (1)...(19): siRNA sense strand
ccaucgcccuucaccauca

SEQ ID NO: 1150531 - RNA, 19 nt, Homo sapiens
  misc_RNA (1)...(19): siRNA sense strand
uaaacagugccaagaagga

SEQ ID NO: 1150532 - RNA, 19 nt, Homo sapiens
  misc_RNA (1)...(19): siRNA sense strand
cuacuggccaaccuacuaa

SEQ ID NO: 1150533 - RNA, 19 nt, Homo sapiens
  misc_RNA (1)...(19): siRNA sense strand
ucagaucaaggccuagaaa

SEQ ID NO: 1150534 - RNA, 19 nt, Homo sapiens
  misc_RNA (1)...(19): siRNA sense strand
guaggaaauaugacuggaa

SEQ ID NO: 1150535 - RNA, 19 nt, Homo sapiens
  misc_RNA (1)...(19): siRNA sense strand
cggcucccauucugguuaa

SEQ ID NO: 1150536 - RNA, 19 nt, Homo sapiens
  misc_RNA (1)...(19): siRNA sense strand
ccugacaacaucauuaaau

SEQ ID NO: 1150537 - RNA, 19 nt, Homo sapiens
  misc_RNA (1)...(19): siRNA sense strand
gcagcauguucagcucuug

SEQ ID NO: 1150538 - RNA, 19 nt, Homo sapiens
  misc_RNA (1)...(19): siRNA sense strand
uaucaaaccugccccuguu

SEQ ID NO: 1150539 - RNA, 19 nt, Homo sapiens
  misc_RNA (1)...(19): siRNA sense strand
caagcuucccucugucuga

SEQ ID NO: 1150540 - RNA, 19 nt, Homo sapiens
  misc_RNA (1)...(19): siRNA sense strand
gcugggaaccuuugcucaa

SEQ ID NO: 1150541 - RNA, 19 nt, Homo sapiens
  misc_RNA (1)...(19): siRNA sense strand
gaagaugauggcccagaag

SEQ ID NO: 1150542 - RNA, 19 nt, Homo sapiens
  misc_RNA (1)...(19): siRNA sense strand
gaaccucaacaugaacaga

SEQ ID NO: 1150543 - RNA, 19 nt, Homo sapiens
  misc_RNA (1)...(19): siRNA sense strand
ugacagugagaaucaagaa

SEQ ID NO: 1150544 - RNA, 19 nt, Homo sapiens
  misc_RNA (1)...(19): siRNA sense strand
gaaggagguagagaagguu

SEQ ID NO: 1150545 - RNA, 19 nt, Homo sapiens
  misc_RNA (1)...(19): siRNA sense strand
cuaaggguguaguccugaa

SEQ ID NO: 1150546 - RNA, 19 nt, Homo sapiens
  misc_RNA (1)...(19): siRNA sense strand
ucauaaaacugucaagaag

SEQ ID NO: 1150547 - RNA, 19 nt, Homo sapiens
  misc_RNA (1)...(19): siRNA sense strand
aucaagaaccucaacauga

SEQ ID NO: 1150548 - RNA, 19 nt, Homo sapiens
  misc_RNA (1)...(19): siRNA sense strand
ugucucacccuuaauuguu

SEQ ID NO: 1150549 - RNA, 19 nt, Homo sapiens
  misc_RNA (1)...(19): siRNA sense strand
gccuuucgcuguaucaaac

SEQ ID NO: 1150550 - RNA, 19 nt, Homo sapiens
  misc_RNA (1)...(19): siRNA sense strand
ggagacagaagcguucauc

SEQ ID NO: 1150551 - RNA, 19 nt, Homo sapiens
  misc_RNA (1)...(19): siRNA sense strand
gcgaaggaacuauuugaac

SEQ ID NO: 1150552 - RNA, 19 nt, Homo sapiens
  misc_RNA (1)...(19): siRNA sense strand
guguaguccugaaacugaa

SEQ ID NO: 1150553 - RNA, 19 nt, Homo sapiens
  misc_RNA (1)...(19): siRNA sense strand
gaacagagcuccugacaac

SEQ ID NO: 1150554 - RNA, 19 nt, Homo sapiens
  misc_RNA (1)...(19): siRNA sense strand
caagaaggauugucagaga

SEQ ID NO: 1150555 - RNA, 19 nt, Homo sapiens
  misc_RNA (1)...(19): siRNA sense strand
ucaagaaccucaacaugaa

SEQ ID NO: 1150556 - RNA, 19 nt, Homo sapiens
  misc_RNA (1)...(19): siRNA sense strand
ccaaucaacucauucagaa

SEQ ID NO: 1150557 - RNA, 19 nt, Homo sapiens
  misc_RNA (1)...(19): siRNA sense strand
gcacacaugucagcauuga

SEQ ID NO: 1150558 - RNA, 19 nt, Homo sapiens
  misc_RNA (1)...(19): siRNA sense strand
guucagcucuugacacaaa

SEQ ID NO: 1150559 - RNA, 19 nt, Homo sapiens
  misc_RNA (1)...(19): siRNA sense strand
ggaacuaucuccucucucu

SEQ ID NO: 1150560 - RNA, 19 nt, Homo sapiens
  misc_RNA (1)...(19): siRNA sense strand
ggaagaugauggcccagaa

SEQ ID NO: 1150561 - RNA, 19 nt, Homo sapiens
  misc_RNA (1)...(19): siRNA sense strand
cgaaggaacuauuugaaca

SEQ ID NO: 1150562 - RNA, 19 nt, Homo sapiens
  misc_RNA (1)...(19): siRNA sense strand
gggccuagaacccaaauua

SEQ ID NO: 1150563 - RNA, 19 nt, Homo sapiens
  misc_RNA (1)...(19): siRNA sense strand
gaagccaccuauagagaga

SEQ ID NO: 1150564 - RNA, 19 nt, Homo sapiens
  misc_RNA (1)...(19): siRNA sense strand
gauaaacagugccaagaag

SEQ ID NO: 1150565 - RNA, 19 nt, Homo sapiens
  misc_RNA (1)...(19): siRNA sense strand
gaagagauccagccacauc

SEQ ID NO: 1150566 - RNA, 19 nt, Homo sapiens
  misc_RNA (1)...(19): siRNA sense strand
uuaaagagcugggaaccuu

SEQ ID NO: 1150567 - RNA, 19 nt, Homo sapiens
  misc_RNA (1)...(19): siRNA sense strand
ggcgguggcuguaacauga

SEQ ID NO: 1150568 - RNA, 19 nt, Homo sapiens
  misc_RNA (1)...(19): siRNA sense strand
gcaccaggauaugucuuaa

SEQ ID NO: 1150569 - RNA, 19 nt, Homo sapiens
  misc_RNA (1)...(19): siRNA sense strand
cuagagagguaggaaauau

SEQ ID NO: 1150570 - RNA, 19 nt, Homo sapiens
  misc_RNA (1)...(19): siRNA sense strand
uugaacagcugaagaugaa

SEQ ID NO: 1150571 - RNA, 19 nt, Homo sapiens
  misc_RNA (1)...(19): siRNA sense strand
cagcacacaugucagcauu

SEQ ID NO: 1150572 - RNA, 19 nt, Homo sapiens
  misc_RNA (1)...(19): siRNA sense strand
gaacagcugaagaugaaga

SEQ ID NO: 1150573 - RNA, 19 nt, Homo sapiens
  misc_RNA (1)...(19): siRNA sense strand
acacaaauccaccuucuug

SEQ ID NO: 1150574 - RNA, 19 nt, Homo sapiens
  misc_RNA (1)...(19): siRNA sense strand
cuaugcagcugauugaaga

SEQ ID NO: 1150575 - RNA, 19 nt, Homo sapiens
  misc_RNA (1)...(19): siRNA sense strand
uagaggaaguugucaagau

SEQ ID NO: 1150576 - RNA, 19 nt, Homo sapiens
  misc_RNA (1)...(19): siRNA sense strand
ccggauuccucacccaaua

SEQ ID NO: 1150577 - RNA, 19 nt, Homo sapiens
  misc_RNA (1)...(19): siRNA sense strand
ucuguuaucuucacuguuc

SEQ ID NO: 1150578 - RNA, 19 nt, Homo sapiens
  misc_RNA (1)...(19): siRNA sense strand
uggccaaccuacuaaauga

SEQ ID NO: 1150579 - RNA, 19 nt, Homo sapiens
  misc_RNA (1)...(19): siRNA sense strand
gccagggccuuucgcugua

SEQ ID NO: 1150580 - RNA, 19 nt, Homo sapiens
  misc_RNA (1)...(19): siRNA sense strand
gaacaccggcucccauucu

SEQ ID NO: 1150581 - RNA, 19 nt, Homo sapiens
  misc_RNA (1)...(19): siRNA sense strand
agaggaaguugucaagaug

SEQ ID NO: 1150582 - RNA, 19 nt, Homo sapiens
  misc_RNA (1)...(19): siRNA sense strand
ggaaaaugcugugaagaga

SEQ ID NO: 1150583 - RNA, 19 nt, Homo sapiens
  misc_RNA (1)...(19): siRNA sense strand
gccaguagcaccaggauau

SEQ ID NO: 1150584 - RNA, 19 nt, Homo sapiens
  misc_RNA (1)...(19): siRNA sense strand
gaaaacaccagcccaauca

SEQ ID NO: 1150585 - RNA, 19 nt, Homo sapiens
  misc_RNA (1)...(19): siRNA sense strand
gguguaguccugaaacuga

SEQ ID NO: 1150586 - RNA, 19 nt, Homo sapiens
  misc_RNA (1)...(19): siRNA sense strand
gcuauugccuaagggugua

SEQ ID NO: 1150587 - RNA, 19 nt, Homo sapiens
  misc_RNA (1)...(19): siRNA sense strand
gagccucaagcuaacuuua

SEQ ID NO: 1150588 - RNA, 19 nt, Homo sapiens
  misc_RNA (1)...(19): siRNA sense strand
gacagaagcguucaucagu

SEQ ID NO: 1150589 - RNA, 19 nt, Homo sapiens
  misc_RNA (1)...(19): siRNA sense strand
gcuccugacaacaucauua

SEQ ID NO: 1150590 - RNA, 19 nt, Homo sapiens
  misc_RNA (1)...(19): siRNA sense strand
ccacugcuauugccuaagg

SEQ ID NO: 1150591 - RNA, 19 nt, Homo sapiens
  misc_RNA (1)...(19): siRNA sense strand
agaaggagguagagaaggu

SEQ ID NO: 1150592 - RNA, 19 nt, Homo sapiens
  misc_RNA (1)...(19): siRNA sense strand
ccaggagucucuaaacaac

SEQ ID NO: 1150593 - RNA, 19 nt, Homo sapiens
  misc_RNA (1)...(19): siRNA sense strand
ccucuuccauguuucgaaa

SEQ ID NO: 1150594 - RNA, 19 nt, Homo sapiens
  misc_RNA (1)...(19): siRNA sense strand
ucagauagcgaaggaacua

SEQ ID NO: 1150595 - RNA, 19 nt, Homo sapiens
  misc_RNA (1)...(19): siRNA sense strand
guuccaacccuguaacuug

SEQ ID NO: 1150596 - RNA, 19 nt, Homo sapiens
  misc_RNA (1)...(19): siRNA sense strand
ugacacaaauccaccuucu

SEQ ID NO: 1150597 - RNA, 19 nt, Homo sapiens
  misc_RNA (1)...(19): siRNA sense strand
gcagaaggagguagagaag

SEQ ID NO: 1150598 - RNA, 19 nt, Homo sapiens
  misc_RNA (1)...(19): siRNA sense strand
gaaggauugucagagaaca

SEQ ID NO: 1150599 - RNA, 19 nt, Homo sapiens
  misc_RNA (1)...(19): siRNA sense strand
ugauggugcuagagaggua

SEQ ID NO: 1150600 - RNA, 19 nt, Homo sapiens
  misc_RNA (1)...(19): siRNA sense strand
ggagguagagaagguuaaa

SEQ ID NO: 1150601 - RNA, 19 nt, Homo sapiens
  misc_RNA (1)...(19): siRNA sense strand
aggacaagcuucccucugu

SEQ ID NO: 1150602 - RNA, 19 nt, Homo sapiens
  misc_RNA (1)...(19): siRNA sense strand
aagaaggauugucagagaa

SEQ ID NO: 1150603 - RNA, 19 nt, Homo sapiens
  misc_RNA (1)...(19): siRNA sense strand
cgauaaacagugccaagaa

SEQ ID NO: 1150604 - RNA, 19 nt, Homo sapiens
  misc_RNA (1)...(19): siRNA sense strand
gcuagagagguaggaaaua

SEQ ID NO: 1150605 - RNA, 19 nt, Homo sapiens
  misc_RNA (1)...(19): siRNA sense strand
gccuagaacccaaauuaga

SEQ ID NO: 1150606 - RNA, 19 nt, Homo sapiens
  misc_RNA (1)...(19): siRNA sense strand
gaaucaagaaccucaacau

SEQ ID NO: 1150607 - RNA, 19 nt, Homo sapiens
  misc_RNA (1)...(19): siRNA sense strand
caucuguuaucuucacugu

SEQ ID NO: 1150608 - RNA, 19 nt, Homo sapiens
  misc_RNA (1)...(19): siRNA sense strand
ggaacuacuggccaaccua

SEQ ID NO: 1150609 - RNA, 19 nt, Homo sapiens
  misc_RNA (1)...(19): siRNA sense strand
ccuacuaaaugaacaacau

SEQ ID NO: 1150610 - RNA, 19 nt, Homo sapiens
  misc_RNA (1)...(19): siRNA sense strand
agagagguaggaaauauga

SEQ ID NO: 1150611 - RNA, 19 nt, Homo sapiens
  misc_RNA (1)...(19): siRNA sense strand
ugacugcagcccucauaaa

SEQ ID NO: 1150612 - RNA, 19 nt, Homo sapiens
  misc_RNA (1)...(19): siRNA sense strand
gaugggauucuccaacaug

SEQ ID NO: 1150613 - RNA, 19 nt, Homo sapiens
  misc_RNA (1)...(19): siRNA sense strand
ggaaauaugacuggaacca

SEQ ID NO: 1150614 - RNA, 19 nt, Homo sapiens
  misc_RNA (1)...(19): siRNA sense strand
cuaaaugaacaacaucaga

SEQ ID NO: 1150615 - RNA, 19 nt, Homo sapiens
  misc_RNA (1)...(19): siRNA sense strand
ggauuuagaggaaguuguc

SEQ ID NO: 1150616 - RNA, 19 nt, Homo sapiens
  misc_RNA (1)...(19): siRNA sense strand
gucucacccuuaauuguuu

SEQ ID NO: 1150617 - RNA, 19 nt, Homo sapiens
  misc_RNA (1)...(19): siRNA sense strand
cuaccacugugaagauugu

SEQ ID NO: 1150618 - RNA, 19 nt, Homo sapiens
  misc_RNA (1)...(19): siRNA sense strand
ccagcccaaucaacucauu

SEQ ID NO: 1150619 - RNA, 19 nt, Homo sapiens
  misc_RNA (1)...(19): siRNA sense strand
uuccaacccuguaacuuga

SEQ ID NO: 1150620 - RNA, 19 nt, Homo sapiens
  misc_RNA (1)...(19): siRNA sense strand
uagcgaaggaacuauuuga

SEQ ID NO: 1150621 - RNA, 19 nt, Homo sapiens
  misc_RNA (1)...(19): siRNA sense strand
gaaggaacuauuugaacag

SEQ ID NO: 1150622 - RNA, 19 nt, Homo sapiens
  misc_RNA (1)...(19): siRNA sense strand
uauccacccugcaucuguu

SEQ ID NO: 1150623 - RNA, 19 nt, Homo sapiens
  misc_RNA (1)...(19): siRNA sense strand
aagaaggcuuggagacaga

SEQ ID NO: 1150624 - RNA, 19 nt, Homo sapiens
  misc_RNA (1)...(19): siRNA sense strand
uaacaccccucaagcucua

SEQ ID NO: 1150625 - RNA, 19 nt, Homo sapiens
  misc_RNA (1)...(19): siRNA sense strand
guaacuugaugggagcuau

SEQ ID NO: 1150626 - RNA, 19 nt, Homo sapiens
  misc_RNA (1)...(19): siRNA sense strand
ccaucgcccuucaccauca

SEQ ID NO: 1150627 - RNA, 19 nt, Homo sapiens
  misc_RNA (1)...(19): siRNA sense strand
uaaacagugccaagaagga

SEQ ID NO: 1150628 - RNA, 19 nt, Homo sapiens
  misc_RNA (1)...(19): siRNA sense strand
ucagaucaaggccuagaaa

SEQ ID NO: 1150629 - RNA, 19 nt, Homo sapiens
  misc_RNA (1)...(19): siRNA sense strand
guaggaaauaugacuggaa

SEQ ID NO: 1150630 - RNA, 19 nt, Homo sapiens
  misc_RNA (1)...(19): siRNA sense strand
cggcucccauucugguuaa

SEQ ID NO: 1150631 - RNA, 19 nt, Homo sapiens
  misc_RNA (1)...(19): siRNA sense strand
ccugacaacaucauuaaau

SEQ ID NO: 1150632 - RNA, 19 nt, Homo sapiens
  misc_RNA (1)...(19): siRNA sense strand
cuacuggccaaccuacuaa

SEQ ID NO: 1150633 - RNA, 19 nt, Homo sapiens
  misc_RNA (1)...(19): siRNA sense strand
gcagcauguucagcucuug

SEQ ID NO: 1150634 - RNA, 19 nt, Homo sapiens
  misc_RNA (1)...(19): siRNA sense strand
uaucaaaccugccccuguu

SEQ ID NO: 1150635 - RNA, 19 nt, Homo sapiens
  misc_RNA (1)...(19): siRNA sense strand
caagcuucccucugucuga

SEQ ID NO: 1150636 - RNA, 19 nt, Homo sapiens
  misc_RNA (1)...(19): siRNA sense strand
gcugggaaccuuugcucaa

SEQ ID NO: 1150637 - RNA, 19 nt, Homo sapiens
  misc_RNA (1)...(19): siRNA sense strand
ugacagugagaaucaagaa

SEQ ID NO: 1150638 - RNA, 19 nt, Homo sapiens
  misc_RNA (1)...(19): siRNA sense strand
gaagaugauggcccagaag

SEQ ID NO: 1150639 - RNA, 19 nt, Homo sapiens
  misc_RNA (1)...(19): siRNA sense strand
gaaccucaacaugaacaga

SEQ ID NO: 1150640 - RNA, 19 nt, Homo sapiens
  misc_RNA (1)...(19): siRNA sense strand
ucauaaaacugucaagaag

SEQ ID NO: 1150641 - RNA, 19 nt, Homo sapiens
  misc_RNA (1)...(19): siRNA sense strand
cuaaggguguaguccugaa

SEQ ID NO: 1150642 - RNA, 19 nt, Homo sapiens
  misc_RNA (1)...(19): siRNA sense strand
gaaggagguagagaagguu

SEQ ID NO: 1150643 - RNA, 19 nt, Homo sapiens
  misc_RNA (1)...(19): siRNA sense strand
aaucaagaaccucaacaug

SEQ ID NO: 1150644 - RNA, 19 nt, Homo sapiens
  misc_RNA (1)...(19): siRNA sense strand
ugucucacccuuaauuguu

SEQ ID NO: 1150645 - RNA, 19 nt, Homo sapiens
  misc_RNA (1)...(19): siRNA sense strand
gcgaaggaacuauuugaac

SEQ ID NO: 1150646 - RNA, 19 nt, Homo sapiens
  misc_RNA (1)...(19): siRNA sense strand
gccuuucgcuguaucaaac

SEQ ID NO: 1150647 - RNA, 19 nt, Homo sapiens
  misc_RNA (1)...(19): siRNA sense strand
ggagacagaagcguucauc

SEQ ID NO: 1150648 - RNA, 19 nt, Homo sapiens
  misc_RNA (1)...(19): siRNA sense strand
guguaguccugaaacugaa

SEQ ID NO: 1150649 - RNA, 19 nt, Homo sapiens
  misc_RNA (1)...(19): siRNA sense strand
aucaagaaccucaacauga

SEQ ID NO: 1150650 - RNA, 19 nt, Homo sapiens
  misc_RNA (1)...(19): siRNA sense strand
ucaguggaggugagaguuu

SEQ ID NO: 1150651 - RNA, 19 nt, Homo sapiens
  misc_RNA (1)...(19): siRNA sense strand
ucgcuggaccguugugaaa

SEQ ID NO: 1150652 - RNA, 19 nt, Homo sapiens
  misc_RNA (1)...(19): siRNA sense strand
caaauuagagccccaggaa

SEQ ID NO: 1150653 - RNA, 19 nt, Homo sapiens
  misc_RNA (1)...(19): siRNA sense strand
gaacagagcuccugacaac

SEQ ID NO: 1150654 - RNA, 19 nt, Homo sapiens
  misc_RNA (1)...(19): siRNA sense strand
caagaaggauugucagaga

SEQ ID NO: 1150655 - RNA, 19 nt, Homo sapiens
  misc_RNA (1)...(19): siRNA sense strand
ccaaucaacucauucagaa

SEQ ID NO: 1150656 - RNA, 19 nt, Homo sapiens
  misc_RNA (1)...(19): siRNA sense strand
ggaacuaucuccucucucu

SEQ ID NO: 1150657 - RNA, 19 nt, Homo sapiens
  misc_RNA (1)...(19): siRNA sense strand
gggccuagaacccaaauua

SEQ ID NO: 1150658 - RNA, 19 nt, Homo sapiens
  misc_RNA (1)...(19): siRNA sense strand
gaagccaccuauagagaga

SEQ ID NO: 1150659 - RNA, 19 nt, Homo sapiens
  misc_RNA (1)...(19): siRNA sense strand
gauaaacagugccaagaag

SEQ ID NO: 1150660 - RNA, 19 nt, Homo sapiens
  misc_RNA (1)...(19): siRNA sense strand
gaagagauccagccacauc

SEQ ID NO: 1150661 - RNA, 19 nt, Homo sapiens
  misc_RNA (1)...(19): siRNA sense strand
ggcgguggcuguaacauga

SEQ ID NO: 1150662 - RNA, 19 nt, Homo sapiens
  misc_RNA (1)...(19): siRNA sense strand
cuagagagguaggaaauau

SEQ ID NO: 1150663 - RNA, 19 nt, Homo sapiens
  misc_RNA (1)...(19): siRNA sense strand
ccggauuccucacccaaua

SEQ ID NO: 1150664 - RNA, 19 nt, Homo sapiens
  misc_RNA (1)...(19): siRNA sense strand
uagaggaaguugucaagau

SEQ ID NO: 1150665 - RNA, 19 nt, Homo sapiens
  misc_RNA (1)...(19): siRNA sense strand
ucuguuaucuucacuguuc

SEQ ID NO: 1150666 - RNA, 19 nt, Homo sapiens
  misc_RNA (1)...(19): siRNA sense strand
gccagggccuuucgcugua

SEQ ID NO: 1150667 - RNA, 19 nt, Homo sapiens
  misc_RNA (1)...(19): siRNA sense strand
gaacaccggcucccauucu

SEQ ID NO: 1150668 - RNA, 19 nt, Homo sapiens
  misc_RNA (1)...(19): siRNA sense strand
agaggaaguugucaagaug

SEQ ID NO: 1150669 - RNA, 19 nt, Homo sapiens
  misc_RNA (1)...(19): siRNA sense strand
ggaaaaugcugugaagaga

SEQ ID NO: 1150670 - RNA, 19 nt, Homo sapiens
  misc_RNA (1)...(19): siRNA sense strand
gguguaguccugaaacuga

SEQ ID NO: 1150671 - RNA, 19 nt, Homo sapiens
  misc_RNA (1)...(19): siRNA sense strand
gaaaacaccagcccaauca

SEQ ID NO: 1150672 - RNA, 19 nt, Homo sapiens
  misc_RNA (1)...(19): siRNA sense strand
gcuauugccuaagggugua

SEQ ID NO: 1150673 - RNA, 19 nt, Homo sapiens
  misc_RNA (1)...(19): siRNA sense strand
gacagaagcguucaucagu

SEQ ID NO: 1150674 - RNA, 19 nt, Homo sapiens
  misc_RNA (1)...(19): siRNA sense strand
gcuccugacaacaucauua

SEQ ID NO: 1150675 - RNA, 19 nt, Homo sapiens
  misc_RNA (1)...(19): siRNA sense strand
ccacugcuauugccuaagg

SEQ ID NO: 1150676 - RNA, 19 nt, Homo sapiens
  misc_RNA (1)...(19): siRNA sense strand
ccucuuccauguuucgaaa

SEQ ID NO: 1150677 - RNA, 19 nt, Homo sapiens
  misc_RNA (1)...(19): siRNA sense strand
ccaggagucucuaaacaac

SEQ ID NO: 1150678 - RNA, 19 nt, Homo sapiens
  misc_RNA (1)...(19): siRNA sense strand
ugauggugcuagagaggua

SEQ ID NO: 1150679 - RNA, 19 nt, Homo sapiens
  misc_RNA (1)...(19): siRNA sense strand
gaaggauugucagagaaca

SEQ ID NO: 1150680 - RNA, 19 nt, Homo sapiens
  misc_RNA (1)...(19): siRNA sense strand
aggacaagcuucccucugu

SEQ ID NO: 1150681 - RNA, 19 nt, Homo sapiens
  misc_RNA (1)...(19): siRNA sense strand
aagaaggauugucagagaa

SEQ ID NO: 1150682 - RNA, 19 nt, Homo sapiens
  misc_RNA (1)...(19): siRNA sense strand
cgauaaacagugccaagaa

SEQ ID NO: 1150683 - RNA, 19 nt, Homo sapiens
  misc_RNA (1)...(19): siRNA sense strand
gcuagagagguaggaaaua

SEQ ID NO: 1150684 - RNA, 19 nt, Homo sapiens
  misc_RNA (1)...(19): siRNA sense strand
gccuagaacccaaauuaga

SEQ ID NO: 1150685 - RNA, 19 nt, Homo sapiens
  misc_RNA (1)...(19): siRNA sense strand
caucuguuaucuucacugu

SEQ ID NO: 1150686 - RNA, 19 nt, Homo sapiens
  misc_RNA (1)...(19): siRNA sense strand
agagagguaggaaauauga

SEQ ID NO: 1150687 - RNA, 19 nt, Homo sapiens
  misc_RNA (1)...(19): siRNA sense strand
ggaaauaugacuggaacca

SEQ ID NO: 1150688 - RNA, 19 nt, Homo sapiens
  misc_RNA (1)...(19): siRNA sense strand
ccagcccaaucaacucauu

SEQ ID NO: 1150689 - RNA, 19 nt, Homo sapiens
  misc_RNA (1)...(19): siRNA sense strand
ggauuuagaggaaguuguc

SEQ ID NO: 1150690 - RNA, 19 nt, Homo sapiens
  misc_RNA (1)...(19): siRNA sense strand
gucucacccuuaauuguuu

SEQ ID NO: 1150691 - RNA, 19 nt, Homo sapiens
  misc_RNA (1)...(19): siRNA sense strand
cuaccacugugaagauugu

SEQ ID NO: 1150692 - RNA, 19 nt, Homo sapiens
  misc_RNA (1)...(19): siRNA sense strand
aagaaggcuuggagacaga

SEQ ID NO: 1150693 - RNA, 19 nt, Homo sapiens
  misc_RNA (1)...(19): siRNA sense strand
uauccacccugcaucuguu

SEQ ID NO: 1150694 - RNA, 19 nt, Homo sapiens
  misc_RNA (1)...(19): siRNA sense strand
cggcucccauucugguuaa

SEQ ID NO: 1150695 - RNA, 19 nt, Homo sapiens
  misc_RNA (1)...(19): siRNA sense strand
ccugacaacaucauuaaau

SEQ ID NO: 1150696 - RNA, 19 nt, Homo sapiens
  misc_RNA (1)...(19): siRNA sense strand
uaaacagugccaagaagga

SEQ ID NO: 1150697 - RNA, 19 nt, Homo sapiens
  misc_RNA (1)...(19): siRNA sense strand
ucagaucaaggccuagaaa

SEQ ID NO: 1150698 - RNA, 19 nt, Homo sapiens
  misc_RNA (1)...(19): siRNA sense strand
guaggaaauaugacuggaa

SEQ ID NO: 1150699 - RNA, 19 nt, Homo sapiens
  misc_RNA (1)...(19): siRNA sense strand
caagcuucccucugucuga

SEQ ID NO: 1150700 - RNA, 19 nt, Homo sapiens
  misc_RNA (1)...(19): siRNA sense strand
uaucaaaccugccccuguu

SEQ ID NO: 1150701 - RNA, 19 nt, Homo sapiens
  misc_RNA (1)...(19): siRNA sense strand
cuaaggguguaguccugaa

SEQ ID NO: 1150702 - RNA, 19 nt, Homo sapiens
  misc_RNA (1)...(19): siRNA sense strand
guguaguccugaaacugaa

SEQ ID NO: 1150703 - RNA, 19 nt, Homo sapiens
  misc_RNA (1)...(19): siRNA sense strand
ugucucacccuuaauuguu

SEQ ID NO: 1150704 - RNA, 19 nt, Homo sapiens
  misc_RNA (1)...(19): siRNA sense strand
gccuuucgcuguaucaaac

SEQ ID NO: 1150705 - RNA, 19 nt, Homo sapiens
  misc_RNA (1)...(19): siRNA sense strand
ggagacagaagcguucauc

SEQ ID NO: 1150706 - RNA, 19 nt, Homo sapiens
  misc_RNA (1)...(19): siRNA sense strand
ugccauccauccaggaaga

SEQ ID NO: 1150707 - RNA, 19 nt, Homo sapiens
  misc_RNA (1)...(19): siRNA sense strand
ucgcuggaccguugugaaa

SEQ ID NO: 1150708 - RNA, 19 nt, Homo sapiens
  misc_RNA (1)...(19): siRNA sense strand
caaauuagagccccaggaa

SEQ ID NO: 1150709 - RNA, 19 nt, Homo sapiens
  misc_RNA (1)...(19): siRNA sense strand
ucaguggaggugagaguuu

SEQ ID NO: 1150710 - RNA, 19 nt, Homo sapiens
  misc_RNA (1)...(19): siRNA sense strand
gaaccacugagaucaacuc

SEQ ID NO: 1150711 - RNA, 19 nt, Homo sapiens
  misc_RNA (1)...(19): siRNA sense strand
ucgaaagccauaugugaga

SEQ ID NO: 1150712 - RNA, 19 nt, Homo sapiens
  misc_RNA (1)...(19): siRNA sense strand
ggaagaacugcggcacaug

SEQ ID NO: 1150713 - RNA, 19 nt, Homo sapiens
  misc_RNA (1)...(19): siRNA sense strand
gccaagaaggauugucaga

SEQ ID NO: 1150714 - RNA, 19 nt, Homo sapiens
  misc_RNA (1)...(19): siRNA sense strand
cagagcuccugacaacauc

SEQ ID NO: 1150715 - RNA, 19 nt, Homo sapiens
  misc_RNA (1)...(19): siRNA sense strand
uuucgaaagccauauguga

SEQ ID NO: 1150716 - RNA, 19 nt, Homo sapiens
  misc_RNA (1)...(19): siRNA sense strand
cagcuucaacccugggaaa

SEQ ID NO: 1150717 - RNA, 19 nt, Homo sapiens
  misc_RNA (1)...(19): siRNA sense strand
acagagcuccugacaacau

SEQ ID NO: 1150718 - RNA, 19 nt, Homo sapiens
  misc_RNA (1)...(19): siRNA sense strand
gcauccaggagucucuaaa

SEQ ID NO: 1150719 - RNA, 19 nt, Homo sapiens
  misc_RNA (1)...(19): siRNA sense strand
gagacagaagcguucauca

SEQ ID NO: 1150720 - RNA, 19 nt, Homo sapiens
  misc_RNA (1)...(19): siRNA sense strand
ggccuccaccagucgauaa

SEQ ID NO: 1150721 - RNA, 19 nt, Homo sapiens
  misc_RNA (1)...(19): siRNA sense strand
ccuagaacccaaauuagag

SEQ ID NO: 1150722 - RNA, 19 nt, Homo sapiens
  misc_RNA (1)...(19): siRNA sense strand
aagaacaccggcucccauu

SEQ ID NO: 1150723 - RNA, 19 nt, Homo sapiens
  misc_RNA (1)...(19): siRNA sense strand
gugccaagaaggauuguca

SEQ ID NO: 1150724 - RNA, 19 nt, Homo sapiens
  misc_RNA (1)...(19): siRNA sense strand
ccagggccuuucgcuguau

SEQ ID NO: 1150725 - RNA, 19 nt, Homo sapiens
  misc_RNA (1)...(19): siRNA sense strand
ggaaaacaccagcccaauc

SEQ ID NO: 1150726 - RNA, 19 nt, Homo sapiens
  misc_RNA (1)...(19): siRNA sense strand
uggaagccaccuauagaga

SEQ ID NO: 1150727 - RNA, 19 nt, Homo sapiens
  misc_RNA (1)...(19): siRNA sense strand
cccugcaucuguuaucuuc

SEQ ID NO: 1150728 - RNA, 19 nt, Homo sapiens
  misc_RNA (1)...(19): siRNA sense strand
cccugccucuuccauguuu

SEQ ID NO: 1150729 - RNA, 19 nt, Homo sapiens
  misc_RNA (1)...(19): siRNA sense strand
cccaaucaacucauucaga

SEQ ID NO: 1150730 - RNA, 19 nt, Homo sapiens
  misc_RNA (1)...(19): siRNA sense strand
ugacuggaaccacugagau

SEQ ID NO: 1150731 - RNA, 19 nt, Homo sapiens
  misc_RNA (1)...(19): siRNA sense strand
ggaaguugucaagauggaa

SEQ ID NO: 1150732 - RNA, 19 nt, Homo sapiens
  misc_RNA (1)...(19): siRNA sense strand
aggaagaacugcggcacau

SEQ ID NO: 1150733 - RNA, 19 nt, Homo sapiens
  misc_RNA (1)...(19): siRNA sense strand
ggaccguugugaaaacaga

SEQ ID NO: 1150734 - RNA, 19 nt, Homo sapiens
  misc_RNA (1)...(19): siRNA sense strand
aaaaugcugugaagagauc

SEQ ID NO: 1150735 - RNA, 19 nt, Homo sapiens
  misc_RNA (1)...(19): siRNA sense strand
ggccuagaacccaaauuag

SEQ ID NO: 1150736 - RNA, 19 nt, Homo sapiens
  misc_RNA (1)...(19): siRNA sense strand
gaacagagcuccugacaac

SEQ ID NO: 1150737 - RNA, 19 nt, Homo sapiens
  misc_RNA (1)...(19): siRNA sense strand
caagaaggauugucagaga

SEQ ID NO: 1150738 - RNA, 19 nt, Homo sapiens
  misc_RNA (1)...(19): siRNA sense strand
ucaagaaccucaacaugaa

SEQ ID NO: 1150739 - RNA, 19 nt, Homo sapiens
  misc_RNA (1)...(19): siRNA sense strand
ccaaucaacucauucagaa

SEQ ID NO: 1150740 - RNA, 19 nt, Homo sapiens
  misc_RNA (1)...(19): siRNA sense strand
gcacacaugucagcauuga

SEQ ID NO: 1150741 - RNA, 19 nt, Homo sapiens
  misc_RNA (1)...(19): siRNA sense strand
guucagcucuugacacaaa

SEQ ID NO: 1150742 - RNA, 19 nt, Homo sapiens
  misc_RNA (1)...(19): siRNA sense strand
ggaacuaucuccucucucu

SEQ ID NO: 1150743 - RNA, 19 nt, Homo sapiens
  misc_RNA (1)...(19): siRNA sense strand
gggccuagaacccaaauua

SEQ ID NO: 1150744 - RNA, 19 nt, Homo sapiens
  misc_RNA (1)...(19): siRNA sense strand
gaagccaccuauagagaga

SEQ ID NO: 1150745 - RNA, 19 nt, Homo sapiens
  misc_RNA (1)...(19): siRNA sense strand
gauaaacagugccaagaag

SEQ ID NO: 1150746 - RNA, 19 nt, Homo sapiens
  misc_RNA (1)...(19): siRNA sense strand
gaagagauccagccacauc

SEQ ID NO: 1150747 - RNA, 19 nt, Homo sapiens
  misc_RNA (1)...(19): siRNA sense strand
uuaaagagcugggaaccuu

SEQ ID NO: 1150748 - RNA, 19 nt, Homo sapiens
  misc_RNA (1)...(19): siRNA sense strand
ggcgguggcuguaacauga

SEQ ID NO: 1150749 - RNA, 19 nt, Homo sapiens
  misc_RNA (1)...(19): siRNA sense strand
gcaccaggauaugucuuaa

SEQ ID NO: 1150750 - RNA, 19 nt, Homo sapiens
  misc_RNA (1)...(19): siRNA sense strand
cuagagagguaggaaauau

SEQ ID NO: 1150751 - RNA, 19 nt, Homo sapiens
  misc_RNA (1)...(19): siRNA sense strand
cagcacacaugucagcauu

SEQ ID NO: 1150752 - RNA, 19 nt, Homo sapiens
  misc_RNA (1)...(19): siRNA sense strand
acacaaauccaccuucuug

SEQ ID NO: 1150753 - RNA, 19 nt, Homo sapiens
  misc_RNA (1)...(19): siRNA sense strand
cuaugcagcugauugaaga

SEQ ID NO: 1150754 - RNA, 19 nt, Homo sapiens
  misc_RNA (1)...(19): siRNA sense strand
uagaggaaguugucaagau

SEQ ID NO: 1150755 - RNA, 19 nt, Homo sapiens
  misc_RNA (1)...(19): siRNA sense strand
ccggauuccucacccaaua

SEQ ID NO: 1150756 - RNA, 19 nt, Homo sapiens
  misc_RNA (1)...(19): siRNA sense strand
ucuguuaucuucacuguuc

SEQ ID NO: 1150757 - RNA, 19 nt, Homo sapiens
  misc_RNA (1)...(19): siRNA sense strand
gccagggccuuucgcugua

SEQ ID NO: 1150758 - RNA, 19 nt, Homo sapiens
  misc_RNA (1)...(19): siRNA sense strand
gaacaccggcucccauucu

SEQ ID NO: 1150759 - RNA, 19 nt, Homo sapiens
  misc_RNA (1)...(19): siRNA sense strand
agaggaaguugucaagaug

SEQ ID NO: 1150760 - RNA, 19 nt, Homo sapiens
  misc_RNA (1)...(19): siRNA sense strand
ggaaaaugcugugaagaga

SEQ ID NO: 1150761 - RNA, 19 nt, Homo sapiens
  misc_RNA (1)...(19): siRNA sense strand
gccaguagcaccaggauau

SEQ ID NO: 1150762 - RNA, 19 nt, Homo sapiens
  misc_RNA (1)...(19): siRNA sense strand
gaaaacaccagcccaauca

SEQ ID NO: 1150763 - RNA, 19 nt, Homo sapiens
  misc_RNA (1)...(19): siRNA sense strand
gguguaguccugaaacuga

SEQ ID NO: 1150764 - RNA, 19 nt, Homo sapiens
  misc_RNA (1)...(19): siRNA sense strand
gcuauugccuaagggugua

SEQ ID NO: 1150765 - RNA, 19 nt, Homo sapiens
  misc_RNA (1)...(19): siRNA sense strand
gacagaagcguucaucagu

SEQ ID NO: 1150766 - RNA, 19 nt, Homo sapiens
  misc_RNA (1)...(19): siRNA sense strand
gcuccugacaacaucauua

SEQ ID NO: 1150767 - RNA, 19 nt, Homo sapiens
  misc_RNA (1)...(19): siRNA sense strand
ccacugcuauugccuaagg

SEQ ID NO: 1150768 - RNA, 19 nt, Homo sapiens
  misc_RNA (1)...(19): siRNA sense strand
ccucuuccauguuucgaaa

SEQ ID NO: 1150769 - RNA, 19 nt, Homo sapiens
  misc_RNA (1)...(19): siRNA sense strand
ccaggagucucuaaacaac

SEQ ID NO: 1150770 - RNA, 19 nt, Homo sapiens
  misc_RNA (1)...(19): siRNA sense strand
agaaggagguagagaaggu

SEQ ID NO: 1150771 - RNA, 19 nt, Homo sapiens
  misc_RNA (1)...(19): siRNA sense strand
ugacacaaauccaccuucu

SEQ ID NO: 1150772 - RNA, 19 nt, Homo sapiens
  misc_RNA (1)...(19): siRNA sense strand
guuccaacccuguaacuug

SEQ ID NO: 1150773 - RNA, 19 nt, Homo sapiens
  misc_RNA (1)...(19): siRNA sense strand
ggagguagagaagguuaaa

SEQ ID NO: 1150774 - RNA, 19 nt, Homo sapiens
  misc_RNA (1)...(19): siRNA sense strand
gaaggauugucagagaaca

SEQ ID NO: 1150775 - RNA, 19 nt, Homo sapiens
  misc_RNA (1)...(19): siRNA sense strand
ugauggugcuagagaggua

SEQ ID NO: 1150776 - RNA, 19 nt, Homo sapiens
  misc_RNA (1)...(19): siRNA sense strand
gcagaaggagguagagaag

SEQ ID NO: 1150777 - RNA, 19 nt, Homo sapiens
  misc_RNA (1)...(19): siRNA sense strand
aggacaagcuucccucugu

SEQ ID NO: 1150778 - RNA, 19 nt, Homo sapiens
  misc_RNA (1)...(19): siRNA sense strand
aagaaggauugucagagaa

SEQ ID NO: 1150779 - RNA, 19 nt, Homo sapiens
  misc_RNA (1)...(19): siRNA sense strand
cgauaaacagugccaagaa

SEQ ID NO: 1150780 - RNA, 19 nt, Homo sapiens
  misc_RNA (1)...(19): siRNA sense strand
gcuagagagguaggaaaua

SEQ ID NO: 1150781 - RNA, 19 nt, Homo sapiens
  misc_RNA (1)...(19): siRNA sense strand
gccuagaacccaaauuaga

SEQ ID NO: 1150782 - RNA, 19 nt, Homo sapiens
  misc_RNA (1)...(19): siRNA sense strand
gaaucaagaaccucaacau

SEQ ID NO: 1150783 - RNA, 19 nt, Homo sapiens
  misc_RNA (1)...(19): siRNA sense strand
caucuguuaucuucacugu

SEQ ID NO: 1150784 - RNA, 19 nt, Homo sapiens
  misc_RNA (1)...(19): siRNA sense strand
ugacugcagcccucauaaa

SEQ ID NO: 1150785 - RNA, 19 nt, Homo sapiens
  misc_RNA (1)...(19): siRNA sense strand
agagagguaggaaauauga

SEQ ID NO: 1150786 - RNA, 19 nt, Homo sapiens
  misc_RNA (1)...(19): siRNA sense strand
ggaaauaugacuggaacca

SEQ ID NO: 1150787 - RNA, 19 nt, Homo sapiens
  misc_RNA (1)...(19): siRNA sense strand
ccagcccaaucaacucauu

SEQ ID NO: 1150788 - RNA, 19 nt, Homo sapiens
  misc_RNA (1)...(19): siRNA sense strand
ggauuuagaggaaguuguc

SEQ ID NO: 1150789 - RNA, 19 nt, Homo sapiens
  misc_RNA (1)...(19): siRNA sense strand
gucucacccuuaauuguuu

SEQ ID NO: 1150790 - RNA, 19 nt, Homo sapiens
  misc_RNA (1)...(19): siRNA sense strand
cuaccacugugaagauugu

SEQ ID NO: 1150791 - RNA, 19 nt, Homo sapiens
  misc_RNA (1)...(19): siRNA sense strand
uuccaacccuguaacuuga

SEQ ID NO: 1150792 - RNA, 19 nt, Homo sapiens
  misc_RNA (1)...(19): siRNA sense strand
uauccacccugcaucuguu

SEQ ID NO: 1150793 - RNA, 19 nt, Homo sapiens
  misc_RNA (1)...(19): siRNA sense strand
aagaaggcuuggagacaga

SEQ ID NO: 1150794 - RNA, 19 nt, Homo sapiens
  misc_RNA (1)...(19): siRNA sense strand
guaacuugaugggagcuau

SEQ ID NO: 1150795 - RNA, 19 nt, Homo sapiens
  misc_RNA (1)...(19): siRNA sense strand
ccaucgcccuucaccauca

SEQ ID NO: 1150796 - RNA, 19 nt, Homo sapiens
  misc_RNA (1)...(19): siRNA sense strand
uaaacagugccaagaagga

SEQ ID NO: 1150797 - RNA, 19 nt, Homo sapiens
  misc_RNA (1)...(19): siRNA sense strand
ucagaucaaggccuagaaa

SEQ ID NO: 1150798 - RNA, 19 nt, Homo sapiens
  misc_RNA (1)...(19): siRNA sense strand
guaggaaauaugacuggaa

SEQ ID NO: 1150799 - RNA, 19 nt, Homo sapiens
  misc_RNA (1)...(19): siRNA sense strand
cggcucccauucugguuaa

SEQ ID NO: 1150800 - RNA, 19 nt, Homo sapiens
  misc_RNA (1)...(19): siRNA sense strand
ccugacaacaucauuaaau

SEQ ID NO: 1150801 - RNA, 19 nt, Homo sapiens
  misc_RNA (1)...(19): siRNA sense strand
gcagcauguucagcucuug

SEQ ID NO: 1150802 - RNA, 19 nt, Homo sapiens
  misc_RNA (1)...(19): siRNA sense strand
uaucaaaccugccccuguu

SEQ ID NO: 1150803 - RNA, 19 nt, Homo sapiens
  misc_RNA (1)...(19): siRNA sense strand
caagcuucccucugucuga

SEQ ID NO: 1150804 - RNA, 19 nt, Homo sapiens
  misc_RNA (1)...(19): siRNA sense strand
gcugggaaccuuugcucaa

SEQ ID NO: 1150805 - RNA, 19 nt, Homo sapiens
  misc_RNA (1)...(19): siRNA sense strand
ugacagugagaaucaagaa

SEQ ID NO: 1150806 - RNA, 19 nt, Homo sapiens
  misc_RNA (1)...(19): siRNA sense strand
gaaccucaacaugaacaga

SEQ ID NO: 1150807 - RNA, 19 nt, Homo sapiens
  misc_RNA (1)...(19): siRNA sense strand
gaaggagguagagaagguu

SEQ ID NO: 1150808 - RNA, 19 nt, Homo sapiens
  misc_RNA (1)...(19): siRNA sense strand
cuaaggguguaguccugaa

SEQ ID NO: 1150809 - RNA, 19 nt, Homo sapiens
  misc_RNA (1)...(19): siRNA sense strand
ucauaaaacugucaagaag

SEQ ID NO: 1150810 - RNA, 19 nt, Homo sapiens
  misc_RNA (1)...(19): siRNA sense strand
aaucaagaaccucaacaug

SEQ ID NO: 1150811 - RNA, 19 nt, Homo sapiens
  misc_RNA (1)...(19): siRNA sense strand
ugucucacccuuaauuguu

SEQ ID NO: 1150812 - RNA, 19 nt, Homo sapiens
  misc_RNA (1)...(19): siRNA sense strand
gccuuucgcuguaucaaac

SEQ ID NO: 1150813 - RNA, 19 nt, Homo sapiens
  misc_RNA (1)...(19): siRNA sense strand
ggagacagaagcguucauc

SEQ ID NO: 1150814 - RNA, 19 nt, Homo sapiens
  misc_RNA (1)...(19): siRNA sense strand
guguaguccugaaacugaa

SEQ ID NO: 1150815 - RNA, 19 nt, Homo sapiens
  misc_RNA (1)...(19): siRNA sense strand
aucaagaaccucaacauga

SEQ ID NO: 1150816 - RNA, 19 nt, Homo sapiens
  misc_RNA (1)...(19): siRNA sense strand
ugccauccauccaggaaga

SEQ ID NO: 1150817 - RNA, 19 nt, Homo sapiens
  misc_RNA (1)...(19): siRNA sense strand
ucgcuggaccguugugaaa

SEQ ID NO: 1150818 - RNA, 19 nt, Homo sapiens
  misc_RNA (1)...(19): siRNA sense strand
caaauuagagccccaggaa

SEQ ID NO: 1150819 - RNA, 19 nt, Homo sapiens
  misc_RNA (1)...(19): siRNA sense strand
ucaguggaggugagaguuu

SEQ ID NO: 1150820 - RNA, 19 nt, Homo sapiens
  misc_RNA (1)...(19): siRNA sense strand
accaggauaugucuuaaag

SEQ ID NO: 1150821 - RNA, 19 nt, Homo sapiens
  misc_RNA (1)...(19): siRNA sense strand
gaaccacugagaucaacuc

SEQ ID NO: 1150822 - RNA, 19 nt, Homo sapiens
  misc_RNA (1)...(19): siRNA sense strand
cagccaaacagcagaagga

SEQ ID NO: 1150823 - RNA, 19 nt, Homo sapiens
  misc_RNA (1)...(19): siRNA sense strand
ccaacccuguaacuugaug

SEQ ID NO: 1150824 - RNA, 19 nt, Homo sapiens
  misc_RNA (1)...(19): siRNA sense strand
ucgaaagccauaugugaga

SEQ ID NO: 1150825 - RNA, 19 nt, Homo sapiens
  misc_RNA (1)...(19): siRNA sense strand
cagagcuccugacaacauc

SEQ ID NO: 1150826 - RNA, 19 nt, Homo sapiens
  misc_RNA (1)...(19): siRNA sense strand
gccaagaaggauugucaga

SEQ ID NO: 1150827 - RNA, 19 nt, Homo sapiens
  misc_RNA (1)...(19): siRNA sense strand
uuucgaaagccauauguga

SEQ ID NO: 1150828 - RNA, 19 nt, Homo sapiens
  misc_RNA (1)...(19): siRNA sense strand
cagcuucaacccugggaaa

SEQ ID NO: 1150829 - RNA, 19 nt, Homo sapiens
  misc_RNA (1)...(19): siRNA sense strand
ggaagaacugcggcacaug

SEQ ID NO: 1150830 - RNA, 19 nt, Homo sapiens
  misc_RNA (1)...(19): siRNA sense strand
gcuaugcagcugauugaag

SEQ ID NO: 1150831 - RNA, 19 nt, Homo sapiens
  misc_RNA (1)...(19): siRNA sense strand
gcauccaggagucucuaaa

SEQ ID NO: 1150832 - RNA, 19 nt, Homo sapiens
  misc_RNA (1)...(19): siRNA sense strand
acagagcuccugacaacau

SEQ ID NO: 1150833 - RNA, 19 nt, Homo sapiens
  misc_RNA (1)...(19): siRNA sense strand
gacuucagcacacauguca

SEQ ID NO: 1150834 - RNA, 19 nt, Homo sapiens
  misc_RNA (1)...(19): siRNA sense strand
ccuagaacccaaauuagag

SEQ ID NO: 1150835 - RNA, 19 nt, Homo sapiens
  misc_RNA (1)...(19): siRNA sense strand
ggccuccaccagucgauaa

SEQ ID NO: 1150836 - RNA, 19 nt, Homo sapiens
  misc_RNA (1)...(19): siRNA sense strand
gaacagagcuccugacaac

SEQ ID NO: 1150837 - RNA, 19 nt, Homo sapiens
  misc_RNA (1)...(19): siRNA sense strand
caagaaggauugucagaga

SEQ ID NO: 1150838 - RNA, 19 nt, Homo sapiens
  misc_RNA (1)...(19): siRNA sense strand
ucaagaaccucaacaugaa

SEQ ID NO: 1150839 - RNA, 19 nt, Homo sapiens
  misc_RNA (1)...(19): siRNA sense strand
ccaaucaacucauucagaa

SEQ ID NO: 1150840 - RNA, 19 nt, Homo sapiens
  misc_RNA (1)...(19): siRNA sense strand
gcacacaugucagcauuga

SEQ ID NO: 1150841 - RNA, 19 nt, Homo sapiens
  misc_RNA (1)...(19): siRNA sense strand
guucagcucuugacacaaa

SEQ ID NO: 1150842 - RNA, 19 nt, Homo sapiens
  misc_RNA (1)...(19): siRNA sense strand
ggaacuaucuccucucucu

SEQ ID NO: 1150843 - RNA, 19 nt, Homo sapiens
  misc_RNA (1)...(19): siRNA sense strand
ggaagaugauggcccagaa

SEQ ID NO: 1150844 - RNA, 19 nt, Homo sapiens
  misc_RNA (1)...(19): siRNA sense strand
cgaaggaacuauuugaaca

SEQ ID NO: 1150845 - RNA, 19 nt, Homo sapiens
  misc_RNA (1)...(19): siRNA sense strand
gggccuagaacccaaauua

SEQ ID NO: 1150846 - RNA, 19 nt, Homo sapiens
  misc_RNA (1)...(19): siRNA sense strand
gaagccaccuauagagaga

SEQ ID NO: 1150847 - RNA, 19 nt, Homo sapiens
  misc_RNA (1)...(19): siRNA sense strand
gauaaacagugccaagaag

SEQ ID NO: 1150848 - RNA, 19 nt, Homo sapiens
  misc_RNA (1)...(19): siRNA sense strand
gaagagauccagccacauc

SEQ ID NO: 1150849 - RNA, 19 nt, Homo sapiens
  misc_RNA (1)...(19): siRNA sense strand
uuaaagagcugggaaccuu

SEQ ID NO: 1150850 - RNA, 19 nt, Homo sapiens
  misc_RNA (1)...(19): siRNA sense strand
ggcgguggcuguaacauga

SEQ ID NO: 1150851 - RNA, 19 nt, Homo sapiens
  misc_RNA (1)...(19): siRNA sense strand
gcaccaggauaugucuuaa

SEQ ID NO: 1150852 - RNA, 19 nt, Homo sapiens
  misc_RNA (1)...(19): siRNA sense strand
cuagagagguaggaaauau

SEQ ID NO: 1150853 - RNA, 19 nt, Homo sapiens
  misc_RNA (1)...(19): siRNA sense strand
uugaacagcugaagaugaa

SEQ ID NO: 1150854 - RNA, 19 nt, Homo sapiens
  misc_RNA (1)...(19): siRNA sense strand
cagcacacaugucagcauu

SEQ ID NO: 1150855 - RNA, 19 nt, Homo sapiens
  misc_RNA (1)...(19): siRNA sense strand
gaacagcugaagaugaaga

SEQ ID NO: 1150856 - RNA, 19 nt, Homo sapiens
  misc_RNA (1)...(19): siRNA sense strand
acacaaauccaccuucuug

SEQ ID NO: 1150857 - RNA, 19 nt, Homo sapiens
  misc_RNA (1)...(19): siRNA sense strand
cuaugcagcugauugaaga

SEQ ID NO: 1150858 - RNA, 19 nt, Homo sapiens
  misc_RNA (1)...(19): siRNA sense strand
uagaggaaguugucaagau

SEQ ID NO: 1150859 - RNA, 19 nt, Homo sapiens
  misc_RNA (1)...(19): siRNA sense strand
ccggauuccucacccaaua

SEQ ID NO: 1150860 - RNA, 19 nt, Homo sapiens
  misc_RNA (1)...(19): siRNA sense strand
ucuguuaucuucacuguuc

SEQ ID NO: 1150861 - RNA, 19 nt, Homo sapiens
  misc_RNA (1)...(19): siRNA sense strand
uggccaaccuacuaaauga

SEQ ID NO: 1150862 - RNA, 19 nt, Homo sapiens
  misc_RNA (1)...(19): siRNA sense strand
gccagggccuuucgcugua

SEQ ID NO: 1150863 - RNA, 19 nt, Homo sapiens
  misc_RNA (1)...(19): siRNA sense strand
gaacaccggcucccauucu

SEQ ID NO: 1150864 - RNA, 19 nt, Homo sapiens
  misc_RNA (1)...(19): siRNA sense strand
agaggaaguugucaagaug

SEQ ID NO: 1150865 - RNA, 19 nt, Homo sapiens
  misc_RNA (1)...(19): siRNA sense strand
ggaaaaugcugugaagaga

SEQ ID NO: 1150866 - RNA, 19 nt, Homo sapiens
  misc_RNA (1)...(19): siRNA sense strand
gccaguagcaccaggauau

SEQ ID NO: 1150867 - RNA, 19 nt, Homo sapiens
  misc_RNA (1)...(19): siRNA sense strand
gaaaacaccagcccaauca

SEQ ID NO: 1150868 - RNA, 19 nt, Homo sapiens
  misc_RNA (1)...(19): siRNA sense strand
gguguaguccugaaacuga

SEQ ID NO: 1150869 - RNA, 19 nt, Homo sapiens
  misc_RNA (1)...(19): siRNA sense strand
gagccucaagcuaacuuua

SEQ ID NO: 1150870 - RNA, 19 nt, Homo sapiens
  misc_RNA (1)...(19): siRNA sense strand
gacagaagcguucaucagu

SEQ ID NO: 1150871 - RNA, 19 nt, Homo sapiens
  misc_RNA (1)...(19): siRNA sense strand
gcuauugccuaagggugua

SEQ ID NO: 1150872 - RNA, 19 nt, Homo sapiens
  misc_RNA (1)...(19): siRNA sense strand
gcuccugacaacaucauua

SEQ ID NO: 1150873 - RNA, 19 nt, Homo sapiens
  misc_RNA (1)...(19): siRNA sense strand
ccacugcuauugccuaagg

SEQ ID NO: 1150874 - RNA, 19 nt, Homo sapiens
  misc_RNA (1)...(19): siRNA sense strand
agaaggagguagagaaggu

SEQ ID NO: 1150875 - RNA, 19 nt, Homo sapiens
  misc_RNA (1)...(19): siRNA sense strand
ccaggagucucuaaacaac

SEQ ID NO: 1150876 - RNA, 19 nt, Homo sapiens
  misc_RNA (1)...(19): siRNA sense strand
ccucuuccauguuucgaaa

SEQ ID NO: 1150877 - RNA, 19 nt, Homo sapiens
  misc_RNA (1)...(19): siRNA sense strand
ugacacaaauccaccuucu

SEQ ID NO: 1150878 - RNA, 19 nt, Homo sapiens
  misc_RNA (1)...(19): siRNA sense strand
ucagauagcgaaggaacua

SEQ ID NO: 1150879 - RNA, 19 nt, Homo sapiens
  misc_RNA (1)...(19): siRNA sense strand
guuccaacccuguaacuug

SEQ ID NO: 1150880 - RNA, 19 nt, Homo sapiens
  misc_RNA (1)...(19): siRNA sense strand
gcagaaggagguagagaag

SEQ ID NO: 1150881 - RNA, 19 nt, Homo sapiens
  misc_RNA (1)...(19): siRNA sense strand
gaaggauugucagagaaca

SEQ ID NO: 1150882 - RNA, 19 nt, Homo sapiens
  misc_RNA (1)...(19): siRNA sense strand
ugauggugcuagagaggua

SEQ ID NO: 1150883 - RNA, 19 nt, Homo sapiens
  misc_RNA (1)...(19): siRNA sense strand
ggagguagagaagguuaaa

SEQ ID NO: 1150884 - RNA, 19 nt, Homo sapiens
  misc_RNA (1)...(19): siRNA sense strand
aggacaagcuucccucugu

SEQ ID NO: 1150885 - RNA, 19 nt, Homo sapiens
  misc_RNA (1)...(19): siRNA sense strand
aagaaggauugucagagaa

SEQ ID NO: 1150886 - RNA, 19 nt, Homo sapiens
  misc_RNA (1)...(19): siRNA sense strand
cgauaaacagugccaagaa

SEQ ID NO: 1150887 - RNA, 19 nt, Homo sapiens
  misc_RNA (1)...(19): siRNA sense strand
gcuagagagguaggaaaua

SEQ ID NO: 1150888 - RNA, 19 nt, Homo sapiens
  misc_RNA (1)...(19): siRNA sense strand
gccuagaacccaaauuaga

SEQ ID NO: 1150889 - RNA, 19 nt, Homo sapiens
  misc_RNA (1)...(19): siRNA sense strand
gaaucaagaaccucaacau

SEQ ID NO: 1150890 - RNA, 19 nt, Homo sapiens
  misc_RNA (1)...(19): siRNA sense strand
caucuguuaucuucacugu

SEQ ID NO: 1150891 - RNA, 19 nt, Homo sapiens
  misc_RNA (1)...(19): siRNA sense strand
ggaacuacuggccaaccua

SEQ ID NO: 1150892 - RNA, 19 nt, Homo sapiens
  misc_RNA (1)...(19): siRNA sense strand
agagagguaggaaauauga

SEQ ID NO: 1150893 - RNA, 19 nt, Homo sapiens
  misc_RNA (1)...(19): siRNA sense strand
ccuacuaaaugaacaacau

SEQ ID NO: 1150894 - RNA, 19 nt, Homo sapiens
  misc_RNA (1)...(19): siRNA sense strand
ugacugcagcccucauaaa

SEQ ID NO: 1150895 - RNA, 19 nt, Homo sapiens
  misc_RNA (1)...(19): siRNA sense strand
ggaaauaugacuggaacca

SEQ ID NO: 1150896 - RNA, 19 nt, Homo sapiens
  misc_RNA (1)...(19): siRNA sense strand
cuaaaugaacaacaucaga

SEQ ID NO: 1150897 - RNA, 19 nt, Homo sapiens
  misc_RNA (1)...(19): siRNA sense strand
ggauuuagaggaaguuguc

SEQ ID NO: 1150898 - RNA, 19 nt, Homo sapiens
  misc_RNA (1)...(19): siRNA sense strand
gucucacccuuaauuguuu

SEQ ID NO: 1150899 - RNA, 19 nt, Homo sapiens
  misc_RNA (1)...(19): siRNA sense strand
cuaccacugugaagauugu

SEQ ID NO: 1150900 - RNA, 19 nt, Homo sapiens
  misc_RNA (1)...(19): siRNA sense strand
ccagcccaaucaacucauu

SEQ ID NO: 1150901 - RNA, 19 nt, Homo sapiens
  misc_RNA (1)...(19): siRNA sense strand
gaaggaacuauuugaacag

SEQ ID NO: 1150902 - RNA, 19 nt, Homo sapiens
  misc_RNA (1)...(19): siRNA sense strand
uauccacccugcaucuguu

SEQ ID NO: 1150903 - RNA, 19 nt, Homo sapiens
  misc_RNA (1)...(19): siRNA sense strand
uagcgaaggaacuauuuga

SEQ ID NO: 1150904 - RNA, 19 nt, Homo sapiens
  misc_RNA (1)...(19): siRNA sense strand
aagaaggcuuggagacaga

SEQ ID NO: 1150905 - RNA, 19 nt, Homo sapiens
  misc_RNA (1)...(19): siRNA sense strand
uaacaccccucaagcucua

SEQ ID NO: 1150906 - RNA, 19 nt, Homo sapiens
  misc_RNA (1)...(19): siRNA sense strand
guaacuugaugggagcuau

SEQ ID NO: 1150907 - RNA, 19 nt, Homo sapiens
  misc_RNA (1)...(19): siRNA sense strand
uuccaacccuguaacuuga

SEQ ID NO: 1150908 - RNA, 19 nt, Homo sapiens
  misc_RNA (1)...(19): siRNA sense strand
ccaucgcccuucaccauca

SEQ ID NO: 1150909 - RNA, 19 nt, Homo sapiens
  misc_RNA (1)...(19): siRNA sense strand
uaaacagugccaagaagga

SEQ ID NO: 1150910 - RNA, 19 nt, Homo sapiens
  misc_RNA (1)...(19): siRNA sense strand
cuacuggccaaccuacuaa

SEQ ID NO: 1150911 - RNA, 19 nt, Homo sapiens
  misc_RNA (1)...(19): siRNA sense strand
ucagaucaaggccuagaaa

SEQ ID NO: 1150912 - RNA, 19 nt, Homo sapiens
  misc_RNA (1)...(19): siRNA sense strand
guaggaaauaugacuggaa

SEQ ID NO: 1150913 - RNA, 19 nt, Homo sapiens
  misc_RNA (1)...(19): siRNA sense strand
cggcucccauucugguuaa

SEQ ID NO: 1150914 - RNA, 19 nt, Homo sapiens
  misc_RNA (1)...(19): siRNA sense strand
ccugacaacaucauuaaau

SEQ ID NO: 1150915 - RNA, 19 nt, Homo sapiens
  misc_RNA (1)...(19): siRNA sense strand
gcagcauguucagcucuug

SEQ ID NO: 1150916 - RNA, 19 nt, Homo sapiens
  misc_RNA (1)...(19): siRNA sense strand
uaucaaaccugccccuguu

SEQ ID NO: 1150917 - RNA, 19 nt, Homo sapiens
  misc_RNA (1)...(19): siRNA sense strand
caagcuucccucugucuga

SEQ ID NO: 1150918 - RNA, 19 nt, Homo sapiens
  misc_RNA (1)...(19): siRNA sense strand
gcugggaaccuuugcucaa

SEQ ID NO: 1150919 - RNA, 19 nt, Homo sapiens
  misc_RNA (1)...(19): siRNA sense strand
ugacagugagaaucaagaa

SEQ ID NO: 1150920 - RNA, 19 nt, Homo sapiens
  misc_RNA (1)...(19): siRNA sense strand
gaagaugauggcccagaag

SEQ ID NO: 1150921 - RNA, 19 nt, Homo sapiens
  misc_RNA (1)...(19): siRNA sense strand
gaaccucaacaugaacaga

SEQ ID NO: 1150922 - RNA, 19 nt, Homo sapiens
  misc_RNA (1)...(19): siRNA sense strand
ucauaaaacugucaagaag

SEQ ID NO: 1150923 - RNA, 19 nt, Homo sapiens
  misc_RNA (1)...(19): siRNA sense strand
gaaggagguagagaagguu

SEQ ID NO: 1150924 - RNA, 19 nt, Homo sapiens
  misc_RNA (1)...(19): siRNA sense strand
cuaaggguguaguccugaa

SEQ ID NO: 1150925 - RNA, 19 nt, Homo sapiens
  misc_RNA (1)...(19): siRNA sense strand
aaucaagaaccucaacaug

SEQ ID NO: 1150926 - RNA, 19 nt, Homo sapiens
  misc_RNA (1)...(19): siRNA sense strand
gcgaaggaacuauuugaac

SEQ ID NO: 1150927 - RNA, 19 nt, Homo sapiens
  misc_RNA (1)...(19): siRNA sense strand
ugucucacccuuaauuguu

SEQ ID NO: 1150928 - RNA, 19 nt, Homo sapiens
  misc_RNA (1)...(19): siRNA sense strand
gccuuucgcuguaucaaac

SEQ ID NO: 1150929 - RNA, 19 nt, Homo sapiens
  misc_RNA (1)...(19): siRNA sense strand
ggagacagaagcguucauc

SEQ ID NO: 1150930 - RNA, 19 nt, Homo sapiens
  misc_RNA (1)...(19): siRNA sense strand
guguaguccugaaacugaa

SEQ ID NO: 1150931 - RNA, 19 nt, Homo sapiens
  misc_RNA (1)...(19): siRNA sense strand
aucaagaaccucaacauga

SEQ ID NO: 1150932 - RNA, 19 nt, Homo sapiens
  misc_RNA (1)...(19): siRNA sense strand
gaaccacugagaucaacuc

SEQ ID NO: 1150933 - RNA, 19 nt, Homo sapiens
  misc_RNA (1)...(19): siRNA sense strand
ucgcuggaccguugugaaa

SEQ ID NO: 1150934 - RNA, 19 nt, Homo sapiens
  misc_RNA (1)...(19): siRNA sense strand
caaauuagagccccaggaa

SEQ ID NO: 1150935 - RNA, 19 nt, Homo sapiens
  misc_RNA (1)...(19): siRNA sense strand
ucaguggaggugagaguuu

SEQ ID NO: 1150936 - RNA, 19 nt, Homo sapiens
  misc_RNA (1)...(19): siRNA sense strand
caaaugagcugauggaaga

SEQ ID NO: 1150937 - RNA, 19 nt, Homo sapiens
  misc_RNA (1)...(19): siRNA sense strand
gaacagagcuccugacaac

SEQ ID NO: 1150938 - RNA, 19 nt, Homo sapiens
  misc_RNA (1)...(19): siRNA sense strand
caagaaggauugucagaga

SEQ ID NO: 1150939 - RNA, 19 nt, Homo sapiens
  misc_RNA (1)...(19): siRNA sense strand
ucaagaaccucaacaugaa

SEQ ID NO: 1150940 - RNA, 19 nt, Homo sapiens
  misc_RNA (1)...(19): siRNA sense strand
ccaaucaacucauucagaa

SEQ ID NO: 1150941 - RNA, 19 nt, Homo sapiens
  misc_RNA (1)...(19): siRNA sense strand
gcacacaugucagcauuga

SEQ ID NO: 1150942 - RNA, 19 nt, Homo sapiens
  misc_RNA (1)...(19): siRNA sense strand
guucagcucuugacacaaa

SEQ ID NO: 1150943 - RNA, 19 nt, Homo sapiens
  misc_RNA (1)...(19): siRNA sense strand
ggaacuaucuccucucucu

SEQ ID NO: 1150944 - RNA, 19 nt, Homo sapiens
  misc_RNA (1)...(19): siRNA sense strand
ggaagaugauggcccagaa

SEQ ID NO: 1150945 - RNA, 19 nt, Homo sapiens
  misc_RNA (1)...(19): siRNA sense strand
cgaaggaacuauuugaaca

SEQ ID NO: 1150946 - RNA, 19 nt, Homo sapiens
  misc_RNA (1)...(19): siRNA sense strand
gauggaagaucuguuugaa

SEQ ID NO: 1150947 - RNA, 19 nt, Homo sapiens
  misc_RNA (1)...(19): siRNA sense strand
gggccuagaacccaaauua

SEQ ID NO: 1150948 - RNA, 19 nt, Homo sapiens
  misc_RNA (1)...(19): siRNA sense strand
gaagccaccuauagagaga

SEQ ID NO: 1150949 - RNA, 19 nt, Homo sapiens
  misc_RNA (1)...(19): siRNA sense strand
gauaaacagugccaagaag

SEQ ID NO: 1150950 - RNA, 19 nt, Homo sapiens
  misc_RNA (1)...(19): siRNA sense strand
gaagagauccagccacauc

SEQ ID NO: 1150951 - RNA, 19 nt, Homo sapiens
  misc_RNA (1)...(19): siRNA sense strand
uuaaagagcugggaaccuu

SEQ ID NO: 1150952 - RNA, 19 nt, Homo sapiens
  misc_RNA (1)...(19): siRNA sense strand
ggaagcaaaugagcugaug

SEQ ID NO: 1150953 - RNA, 19 nt, Homo sapiens
  misc_RNA (1)...(19): siRNA sense strand
ggcgguggcuguaacauga

SEQ ID NO: 1150954 - RNA, 19 nt, Homo sapiens
  misc_RNA (1)...(19): siRNA sense strand
gcaccaggauaugucuuaa

SEQ ID NO: 1150955 - RNA, 19 nt, Homo sapiens
  misc_RNA (1)...(19): siRNA sense strand
cuagagagguaggaaauau

SEQ ID NO: 1150956 - RNA, 19 nt, Homo sapiens
  misc_RNA (1)...(19): siRNA sense strand
uugaacagcugaagaugaa

SEQ ID NO: 1150957 - RNA, 19 nt, Homo sapiens
  misc_RNA (1)...(19): siRNA sense strand
cagcacacaugucagcauu

SEQ ID NO: 1150958 - RNA, 19 nt, Homo sapiens
  misc_RNA (1)...(19): siRNA sense strand
gaacagcugaagaugaaga

SEQ ID NO: 1150959 - RNA, 19 nt, Homo sapiens
  misc_RNA (1)...(19): siRNA sense strand
acacaaauccaccuucuug

SEQ ID NO: 1150960 - RNA, 19 nt, Homo sapiens
  misc_RNA (1)...(19): siRNA sense strand
cuaugcagcugauugaaga

SEQ ID NO: 1150961 - RNA, 19 nt, Homo sapiens
  misc_RNA (1)...(19): siRNA sense strand
uagaggaaguugucaagau

SEQ ID NO: 1150962 - RNA, 19 nt, Homo sapiens
  misc_RNA (1)...(19): siRNA sense strand
ccggauuccucacccaaua

SEQ ID NO: 1150963 - RNA, 19 nt, Homo sapiens
  misc_RNA (1)...(19): siRNA sense strand
gcugauggaagaucuguuu

SEQ ID NO: 1150964 - RNA, 19 nt, Homo sapiens
  misc_RNA (1)...(19): siRNA sense strand
ucuguuaucuucacuguuc

SEQ ID NO: 1150965 - RNA, 19 nt, Homo sapiens
  misc_RNA (1)...(19): siRNA sense strand
uggccaaccuacuaaauga

SEQ ID NO: 1150966 - RNA, 19 nt, Homo sapiens
  misc_RNA (1)...(19): siRNA sense strand
gccagggccuuucgcugua

SEQ ID NO: 1150967 - RNA, 19 nt, Homo sapiens
  misc_RNA (1)...(19): siRNA sense strand
gaacaccggcucccauucu

SEQ ID NO: 1150968 - RNA, 19 nt, Homo sapiens
  misc_RNA (1)...(19): siRNA sense strand
agaggaaguugucaagaug

SEQ ID NO: 1150969 - RNA, 19 nt, Homo sapiens
  misc_RNA (1)...(19): siRNA sense strand
ggaaaaugcugugaagaga

SEQ ID NO: 1150970 - RNA, 19 nt, Homo sapiens
  misc_RNA (1)...(19): siRNA sense strand
gccaguagcaccaggauau

SEQ ID NO: 1150971 - RNA, 19 nt, Homo sapiens
  misc_RNA (1)...(19): siRNA sense strand
gaaaacaccagcccaauca

SEQ ID NO: 1150972 - RNA, 19 nt, Homo sapiens
  misc_RNA (1)...(19): siRNA sense strand
gguguaguccugaaacuga

SEQ ID NO: 1150973 - RNA, 19 nt, Homo sapiens
  misc_RNA (1)...(19): siRNA sense strand
gcuauugccuaagggugua

SEQ ID NO: 1150974 - RNA, 19 nt, Homo sapiens
  misc_RNA (1)...(19): siRNA sense strand
gagccucaagcuaacuuua

SEQ ID NO: 1150975 - RNA, 19 nt, Homo sapiens
  misc_RNA (1)...(19): siRNA sense strand
gacagaagcguucaucagu

SEQ ID NO: 1150976 - RNA, 19 nt, Homo sapiens
  misc_RNA (1)...(19): siRNA sense strand
gcuccugacaacaucauua

SEQ ID NO: 1150977 - RNA, 19 nt, Homo sapiens
  misc_RNA (1)...(19): siRNA sense strand
ccacugcuauugccuaagg

SEQ ID NO: 1150978 - RNA, 19 nt, Homo sapiens
  misc_RNA (1)...(19): siRNA sense strand
agaaggagguagagaaggu

SEQ ID NO: 1150979 - RNA, 19 nt, Homo sapiens
  misc_RNA (1)...(19): siRNA sense strand
ccaggagucucuaaacaac

SEQ ID NO: 1150980 - RNA, 19 nt, Homo sapiens
  misc_RNA (1)...(19): siRNA sense strand
ccucuuccauguuucgaaa

SEQ ID NO: 1150981 - RNA, 19 nt, Homo sapiens
  misc_RNA (1)...(19): siRNA sense strand
ucagauagcgaaggaacua

SEQ ID NO: 1150982 - RNA, 19 nt, Homo sapiens
  misc_RNA (1)...(19): siRNA sense strand
guuccaacccuguaacuug

SEQ ID NO: 1150983 - RNA, 19 nt, Homo sapiens
  misc_RNA (1)...(19): siRNA sense strand
ugacacaaauccaccuucu

SEQ ID NO: 1150984 - RNA, 19 nt, Homo sapiens
  misc_RNA (1)...(19): siRNA sense strand
gcagaaggagguagagaag

SEQ ID NO: 1150985 - RNA, 19 nt, Homo sapiens
  misc_RNA (1)...(19): siRNA sense strand
gaaggauugucagagaaca

SEQ ID NO: 1150986 - RNA, 19 nt, Homo sapiens
  misc_RNA (1)...(19): siRNA sense strand
ugauggugcuagagaggua

SEQ ID NO: 1150987 - RNA, 19 nt, Homo sapiens
  misc_RNA (1)...(19): siRNA sense strand
ggagguagagaagguuaaa

SEQ ID NO: 1150988 - RNA, 19 nt, Homo sapiens
  misc_RNA (1)...(19): siRNA sense strand
aggacaagcuucccucugu

SEQ ID NO: 1150989 - RNA, 19 nt, Homo sapiens
  misc_RNA (1)...(19): siRNA sense strand
aagaaggauugucagagaa

SEQ ID NO: 1150990 - RNA, 19 nt, Homo sapiens
  misc_RNA (1)...(19): siRNA sense strand
cgauaaacagugccaagaa

SEQ ID NO: 1150991 - RNA, 19 nt, Homo sapiens
  misc_RNA (1)...(19): siRNA sense strand
gcuagagagguaggaaaua

SEQ ID NO: 1150992 - RNA, 19 nt, Homo sapiens
  misc_RNA (1)...(19): siRNA sense strand
gccuagaacccaaauuaga

SEQ ID NO: 1150993 - RNA, 19 nt, Homo sapiens
  misc_RNA (1)...(19): siRNA sense strand
gaaucaagaaccucaacau

SEQ ID NO: 1150994 - RNA, 19 nt, Homo sapiens
  misc_RNA (1)...(19): siRNA sense strand
caucuguuaucuucacugu

SEQ ID NO: 1150995 - RNA, 19 nt, Homo sapiens
  misc_RNA (1)...(19): siRNA sense strand
ccuacuaaaugaacaacau

SEQ ID NO: 1150996 - RNA, 19 nt, Homo sapiens
  misc_RNA (1)...(19): siRNA sense strand
agagagguaggaaauauga

SEQ ID NO: 1150997 - RNA, 19 nt, Homo sapiens
  misc_RNA (1)...(19): siRNA sense strand
ugacugcagcccucauaaa

SEQ ID NO: 1150998 - RNA, 19 nt, Homo sapiens
  misc_RNA (1)...(19): siRNA sense strand
ggaacuacuggccaaccua

SEQ ID NO: 1150999 - RNA, 19 nt, Homo sapiens
  misc_RNA (1)...(19): siRNA sense strand
gaugggauucuccaacaug

SEQ ID NO: 1151000 - RNA, 19 nt, Homo sapiens
  misc_RNA (1)...(19): siRNA sense strand
ggaaauaugacuggaacca

SEQ ID NO: 1151001 - RNA, 19 nt, Homo sapiens
  misc_RNA (1)...(19): siRNA sense strand
ccagcccaaucaacucauu

SEQ ID NO: 1151002 - RNA, 19 nt, Homo sapiens
  misc_RNA (1)...(19): siRNA sense strand
ggauuuagaggaaguuguc

SEQ ID NO: 1151003 - RNA, 19 nt, Homo sapiens
  misc_RNA (1)...(19): siRNA sense strand
cuaaaugaacaacaucaga

SEQ ID NO: 1151004 - RNA, 19 nt, Homo sapiens
  misc_RNA (1)...(19): siRNA sense strand
gucucacccuuaauuguuu

SEQ ID NO: 1151005 - RNA, 19 nt, Homo sapiens
  misc_RNA (1)...(19): siRNA sense strand
cuaccacugugaagauugu

SEQ ID NO: 1151006 - RNA, 19 nt, Homo sapiens
  misc_RNA (1)...(19): siRNA sense strand
uuccaacccuguaacuuga

SEQ ID NO: 1151007 - RNA, 19 nt, Homo sapiens
  misc_RNA (1)...(19): siRNA sense strand
uauccacccugcaucuguu

SEQ ID NO: 1151008 - RNA, 19 nt, Homo sapiens
  misc_RNA (1)...(19): siRNA sense strand
aagaaggcuuggagacaga

SEQ ID NO: 1151009 - RNA, 19 nt, Homo sapiens
  misc_RNA (1)...(19): siRNA sense strand
uaacaccccucaagcucua

SEQ ID NO: 1151010 - RNA, 19 nt, Homo sapiens
  misc_RNA (1)...(19): siRNA sense strand
uagcgaaggaacuauuuga

SEQ ID NO: 1151011 - RNA, 19 nt, Homo sapiens
  misc_RNA (1)...(19): siRNA sense strand
gaaggaacuauuugaacag

SEQ ID NO: 1151012 - RNA, 19 nt, Homo sapiens
  misc_RNA (1)...(19): siRNA sense strand
guaacuugaugggagcuau

SEQ ID NO: 1151013 - RNA, 19 nt, Homo sapiens
  misc_RNA (1)...(19): siRNA sense strand
ccaucgcccuucaccauca

SEQ ID NO: 1151014 - RNA, 19 nt, Homo sapiens
  misc_RNA (1)...(19): siRNA sense strand
uaaacagugccaagaagga

SEQ ID NO: 1151015 - RNA, 19 nt, Homo sapiens
  misc_RNA (1)...(19): siRNA sense strand
cuacuggccaaccuacuaa

SEQ ID NO: 1151016 - RNA, 19 nt, Homo sapiens
  misc_RNA (1)...(19): siRNA sense strand
ucagaucaaggccuagaaa

SEQ ID NO: 1151017 - RNA, 19 nt, Homo sapiens
  misc_RNA (1)...(19): siRNA sense strand
guaggaaauaugacuggaa

SEQ ID NO: 1151018 - RNA, 19 nt, Homo sapiens
  misc_RNA (1)...(19): siRNA sense strand
cggcucccauucugguuaa

SEQ ID NO: 1151019 - RNA, 19 nt, Homo sapiens
  misc_RNA (1)...(19): siRNA sense strand
ccugacaacaucauuaaau

SEQ ID NO: 1151020 - RNA, 19 nt, Homo sapiens
  misc_RNA (1)...(19): siRNA sense strand
gcagcauguucagcucuug

SEQ ID NO: 1151021 - RNA, 19 nt, Homo sapiens
  misc_RNA (1)...(19): siRNA sense strand
uaucaaaccugccccuguu

SEQ ID NO: 1151022 - RNA, 19 nt, Homo sapiens
  misc_RNA (1)...(19): siRNA sense strand
caagcuucccucugucuga

SEQ ID NO: 1151023 - RNA, 19 nt, Homo sapiens
  misc_RNA (1)...(19): siRNA sense strand
gcugggaaccuuugcucaa

SEQ ID NO: 1151024 - RNA, 19 nt, Homo sapiens
  misc_RNA (1)...(19): siRNA sense strand
gaagaugauggcccagaag

SEQ ID NO: 1151025 - RNA, 19 nt, Homo sapiens
  misc_RNA (1)...(19): siRNA sense strand
gaaccucaacaugaacaga

SEQ ID NO: 1151026 - RNA, 19 nt, Homo sapiens
  misc_RNA (1)...(19): siRNA sense strand
ugacagugagaaucaagaa

SEQ ID NO: 1151027 - RNA, 19 nt, Homo sapiens
  misc_RNA (1)...(19): siRNA sense strand
gaaggagguagagaagguu

SEQ ID NO: 1151028 - RNA, 19 nt, Homo sapiens
  misc_RNA (1)...(19): siRNA sense strand
cuaaggguguaguccugaa

SEQ ID NO: 1151029 - RNA, 19 nt, Homo sapiens
  misc_RNA (1)...(19): siRNA sense strand
ucauaaaacugucaagaag

SEQ ID NO: 1151030 - RNA, 19 nt, Homo sapiens
  misc_RNA (1)...(19): siRNA sense strand
aucaagaaccucaacauga

SEQ ID NO: 1151031 - RNA, 19 nt, Homo sapiens
  misc_RNA (1)...(19): siRNA sense strand
ugucucacccuuaauuguu

SEQ ID NO: 1151032 - RNA, 19 nt, Homo sapiens
  misc_RNA (1)...(19): siRNA sense strand
gccuuucgcuguaucaaac

SEQ ID NO: 1151033 - RNA, 19 nt, Homo sapiens
  misc_RNA (1)...(19): siRNA sense strand
ggagacagaagcguucauc

SEQ ID NO: 1151034 - RNA, 19 nt, Homo sapiens
  misc_RNA (1)...(19): siRNA sense strand
gcgaaggaacuauuugaac

SEQ ID NO: 1151035 - RNA, 19 nt, Homo sapiens
  misc_RNA (1)...(19): siRNA sense strand
guguaguccugaaacugaa

SEQ ID NO: 1151036 - RNA, 19 nt, Homo sapiens
  misc_RNA (1)...(19): siRNA sense strand
gaacagagcuccugacaac

SEQ ID NO: 1151037 - RNA, 19 nt, Homo sapiens
  misc_RNA (1)...(19): siRNA sense strand
caagaaggauugucagaga

SEQ ID NO: 1151038 - RNA, 19 nt, Homo sapiens
  misc_RNA (1)...(19): siRNA sense strand
ucaagaaccucaacaugaa

SEQ ID NO: 1151039 - RNA, 19 nt, Homo sapiens
  misc_RNA (1)...(19): siRNA sense strand
ccaaucaacucauucagaa

SEQ ID NO: 1151040 - RNA, 19 nt, Homo sapiens
  misc_RNA (1)...(19): siRNA sense strand
gcacacaugucagcauuga

SEQ ID NO: 1151041 - RNA, 19 nt, Homo sapiens
  misc_RNA (1)...(19): siRNA sense strand
guucagcucuugacacaaa

SEQ ID NO: 1151042 - RNA, 19 nt, Homo sapiens
  misc_RNA (1)...(19): siRNA sense strand
ggaacuaucuccucucucu

SEQ ID NO: 1151043 - RNA, 19 nt, Homo sapiens
  misc_RNA (1)...(19): siRNA sense strand
ggaagaugauggcccagaa

SEQ ID NO: 1151044 - RNA, 19 nt, Homo sapiens
  misc_RNA (1)...(19): siRNA sense strand
cgaaggaacuauuugaaca

SEQ ID NO: 1151045 - RNA, 19 nt, Homo sapiens
  misc_RNA (1)...(19): siRNA sense strand
gggccuagaacccaaauua

SEQ ID NO: 1151046 - RNA, 19 nt, Homo sapiens
  misc_RNA (1)...(19): siRNA sense strand
gaagccaccuauagagaga

SEQ ID NO: 1151047 - RNA, 19 nt, Homo sapiens
  misc_RNA (1)...(19): siRNA sense strand
gauaaacagugccaagaag

SEQ ID NO: 1151048 - RNA, 19 nt, Homo sapiens
  misc_RNA (1)...(19): siRNA sense strand
gaagagauccagccacauc

SEQ ID NO: 1151049 - RNA, 19 nt, Homo sapiens
  misc_RNA (1)...(19): siRNA sense strand
uuaaagagcugggaaccuu

SEQ ID NO: 1151050 - RNA, 19 nt, Homo sapiens
  misc_RNA (1)...(19): siRNA sense strand
ggcgguggcuguaacauga

SEQ ID NO: 1151051 - RNA, 19 nt, Homo sapiens
  misc_RNA (1)...(19): siRNA sense strand
gcaccaggauaugucuuaa

SEQ ID NO: 1151052 - RNA, 19 nt, Homo sapiens
  misc_RNA (1)...(19): siRNA sense strand
cuagagagguaggaaauau

SEQ ID NO: 1151053 - RNA, 19 nt, Homo sapiens
  misc_RNA (1)...(19): siRNA sense strand
uugaacagcugaagaugaa

SEQ ID NO: 1151054 - RNA, 19 nt, Homo sapiens
  misc_RNA (1)...(19): siRNA sense strand
cagcacacaugucagcauu

SEQ ID NO: 1151055 - RNA, 19 nt, Homo sapiens
  misc_RNA (1)...(19): siRNA sense strand
gaacagcugaagaugaaga

SEQ ID NO: 1151056 - RNA, 19 nt, Homo sapiens
  misc_RNA (1)...(19): siRNA sense strand
acacaaauccaccuucuug

SEQ ID NO: 1151057 - RNA, 19 nt, Homo sapiens
  misc_RNA (1)...(19): siRNA sense strand
cuaugcagcugauugaaga

SEQ ID NO: 1151058 - RNA, 19 nt, Homo sapiens
  misc_RNA (1)...(19): siRNA sense strand
uagaggaaguugucaagau

SEQ ID NO: 1151059 - RNA, 19 nt, Homo sapiens
  misc_RNA (1)...(19): siRNA sense strand
ccggauuccucacccaaua

SEQ ID NO: 1151060 - RNA, 19 nt, Homo sapiens
  misc_RNA (1)...(19): siRNA sense strand
ucuguuaucuucacuguuc

SEQ ID NO: 1151061 - RNA, 19 nt, Homo sapiens
  misc_RNA (1)...(19): siRNA sense strand
uggccaaccuacuaaauga

SEQ ID NO: 1151062 - RNA, 19 nt, Homo sapiens
  misc_RNA (1)...(19): siRNA sense strand
gccagggccuuucgcugua

SEQ ID NO: 1151063 - RNA, 19 nt, Homo sapiens
  misc_RNA (1)...(19): siRNA sense strand
gaacaccggcucccauucu

SEQ ID NO: 1151064 - RNA, 19 nt, Homo sapiens
  misc_RNA (1)...(19): siRNA sense strand
agaggaaguugucaagaug

SEQ ID NO: 1151065 - RNA, 19 nt, Homo sapiens
  misc_RNA (1)...(19): siRNA sense strand
ggaaaaugcugugaagaga

SEQ ID NO: 1151066 - RNA, 19 nt, Homo sapiens
  misc_RNA (1)...(19): siRNA sense strand
gccaguagcaccaggauau

SEQ ID NO: 1151067 - RNA, 19 nt, Homo sapiens
  misc_RNA (1)...(19): siRNA sense strand
gaaaacaccagcccaauca

SEQ ID NO: 1151068 - RNA, 19 nt, Homo sapiens
  misc_RNA (1)...(19): siRNA sense strand
gguguaguccugaaacuga

SEQ ID NO: 1151069 - RNA, 19 nt, Homo sapiens
  misc_RNA (1)...(19): siRNA sense strand
gcuauugccuaagggugua

SEQ ID NO: 1151070 - RNA, 19 nt, Homo sapiens
  misc_RNA (1)...(19): siRNA sense strand
gagccucaagcuaacuuua

SEQ ID NO: 1151071 - RNA, 19 nt, Homo sapiens
  misc_RNA (1)...(19): siRNA sense strand
gacagaagcguucaucagu

SEQ ID NO: 1151072 - RNA, 19 nt, Homo sapiens
  misc_RNA (1)...(19): siRNA sense strand
gcuccugacaacaucauua

SEQ ID NO: 1151073 - RNA, 19 nt, Homo sapiens
  misc_RNA (1)...(19): siRNA sense strand
ccacugcuauugccuaagg

SEQ ID NO: 1151074 - RNA, 19 nt, Homo sapiens
  misc_RNA (1)...(19): siRNA sense strand
agaaggagguagagaaggu

SEQ ID NO: 1151075 - RNA, 19 nt, Homo sapiens
  misc_RNA (1)...(19): siRNA sense strand
ccaggagucucuaaacaac

SEQ ID NO: 1151076 - RNA, 19 nt, Homo sapiens
  misc_RNA (1)...(19): siRNA sense strand
ccucuuccauguuucgaaa

SEQ ID NO: 1151077 - RNA, 19 nt, Homo sapiens
  misc_RNA (1)...(19): siRNA sense strand
ucagauagcgaaggaacua

SEQ ID NO: 1151078 - RNA, 19 nt, Homo sapiens
  misc_RNA (1)...(19): siRNA sense strand
guuccaacccuguaacuug

SEQ ID NO: 1151079 - RNA, 19 nt, Homo sapiens
  misc_RNA (1)...(19): siRNA sense strand
ugacacaaauccaccuucu

SEQ ID NO: 1151080 - RNA, 19 nt, Homo sapiens
  misc_RNA (1)...(19): siRNA sense strand
gcagaaggagguagagaag

SEQ ID NO: 1151081 - RNA, 19 nt, Homo sapiens
  misc_RNA (1)...(19): siRNA sense strand
gaaggauugucagagaaca

SEQ ID NO: 1151082 - RNA, 19 nt, Homo sapiens
  misc_RNA (1)...(19): siRNA sense strand
ugauggugcuagagaggua

SEQ ID NO: 1151083 - RNA, 19 nt, Homo sapiens
  misc_RNA (1)...(19): siRNA sense strand
ggagguagagaagguuaaa

SEQ ID NO: 1151084 - RNA, 19 nt, Homo sapiens
  misc_RNA (1)...(19): siRNA sense strand
aggacaagcuucccucugu

SEQ ID NO: 1151085 - RNA, 19 nt, Homo sapiens
  misc_RNA (1)...(19): siRNA sense strand
aagaaggauugucagagaa

SEQ ID NO: 1151086 - RNA, 19 nt, Homo sapiens
  misc_RNA (1)...(19): siRNA sense strand
cgauaaacagugccaagaa

SEQ ID NO: 1151087 - RNA, 19 nt, Homo sapiens
  misc_RNA (1)...(19): siRNA sense strand
gcuagagagguaggaaaua

SEQ ID NO: 1151088 - RNA, 19 nt, Homo sapiens
  misc_RNA (1)...(19): siRNA sense strand
gccuagaacccaaauuaga

SEQ ID NO: 1151089 - RNA, 19 nt, Homo sapiens
  misc_RNA (1)...(19): siRNA sense strand
gaaucaagaaccucaacau

SEQ ID NO: 1151090 - RNA, 19 nt, Homo sapiens
  misc_RNA (1)...(19): siRNA sense strand
caucuguuaucuucacugu

SEQ ID NO: 1151091 - RNA, 19 nt, Homo sapiens
  misc_RNA (1)...(19): siRNA sense strand
ggaacuacuggccaaccua

SEQ ID NO: 1151092 - RNA, 19 nt, Homo sapiens
  misc_RNA (1)...(19): siRNA sense strand
ccuacuaaaugaacaacau

SEQ ID NO: 1151093 - RNA, 19 nt, Homo sapiens
  misc_RNA (1)...(19): siRNA sense strand
agagagguaggaaauauga

SEQ ID NO: 1151094 - RNA, 19 nt, Homo sapiens
  misc_RNA (1)...(19): siRNA sense strand
ugacugcagcccucauaaa

SEQ ID NO: 1151095 - RNA, 19 nt, Homo sapiens
  misc_RNA (1)...(19): siRNA sense strand
gaugggauucuccaacaug

SEQ ID NO: 1151096 - RNA, 19 nt, Homo sapiens
  misc_RNA (1)...(19): siRNA sense strand
ggaaauaugacuggaacca

SEQ ID NO: 1151097 - RNA, 19 nt, Homo sapiens
  misc_RNA (1)...(19): siRNA sense strand
cuaaaugaacaacaucaga

SEQ ID NO: 1151098 - RNA, 19 nt, Homo sapiens
  misc_RNA (1)...(19): siRNA sense strand
ggauuuagaggaaguuguc

SEQ ID NO: 1151099 - RNA, 19 nt, Homo sapiens
  misc_RNA (1)...(19): siRNA sense strand
gucucacccuuaauuguuu

SEQ ID NO: 1151100 - RNA, 19 nt, Homo sapiens
  misc_RNA (1)...(19): siRNA sense strand
cuaccacugugaagauugu

SEQ ID NO: 1151101 - RNA, 19 nt, Homo sapiens
  misc_RNA (1)...(19): siRNA sense strand
ccagcccaaucaacucauu

SEQ ID NO: 1151102 - RNA, 19 nt, Homo sapiens
  misc_RNA (1)...(19): siRNA sense strand
uuccaacccuguaacuuga

SEQ ID NO: 1151103 - RNA, 19 nt, Homo sapiens
  misc_RNA (1)...(19): siRNA sense strand
uagcgaaggaacuauuuga

SEQ ID NO: 1151104 - RNA, 19 nt, Homo sapiens
  misc_RNA (1)...(19): siRNA sense strand
gaaggaacuauuugaacag

SEQ ID NO: 1151105 - RNA, 19 nt, Homo sapiens
  misc_RNA (1)...(19): siRNA sense strand
uauccacccugcaucuguu

SEQ ID NO: 1151106 - RNA, 19 nt, Homo sapiens
  misc_RNA (1)...(19): siRNA sense strand
aagaaggcuuggagacaga

SEQ ID NO: 1151107 - RNA, 19 nt, Homo sapiens
  misc_RNA (1)...(19): siRNA sense strand
uaacaccccucaagcucua

SEQ ID NO: 1151108 - RNA, 19 nt, Homo sapiens
  misc_RNA (1)...(19): siRNA sense strand
guaacuugaugggagcuau

SEQ ID NO: 1151109 - RNA, 19 nt, Homo sapiens
  misc_RNA (1)...(19): siRNA sense strand
ccaucgcccuucaccauca

SEQ ID NO: 1151110 - RNA, 19 nt, Homo sapiens
  misc_RNA (1)...(19): siRNA sense strand
uaaacagugccaagaagga

SEQ ID NO: 1151111 - RNA, 19 nt, Homo sapiens
  misc_RNA (1)...(19): siRNA sense strand
ucagaucaaggccuagaaa

SEQ ID NO: 1151112 - RNA, 19 nt, Homo sapiens
  misc_RNA (1)...(19): siRNA sense strand
guaggaaauaugacuggaa

SEQ ID NO: 1151113 - RNA, 19 nt, Homo sapiens
  misc_RNA (1)...(19): siRNA sense strand
cggcucccauucugguuaa

SEQ ID NO: 1151114 - RNA, 19 nt, Homo sapiens
  misc_RNA (1)...(19): siRNA sense strand
ccugacaacaucauuaaau

SEQ ID NO: 1151115 - RNA, 19 nt, Homo sapiens
  misc_RNA (1)...(19): siRNA sense strand
cuacuggccaaccuacuaa

SEQ ID NO: 1151116 - RNA, 19 nt, Homo sapiens
  misc_RNA (1)...(19): siRNA sense strand
gcagcauguucagcucuug

SEQ ID NO: 1151117 - RNA, 19 nt, Homo sapiens
  misc_RNA (1)...(19): siRNA sense strand
uaucaaaccugccccuguu

SEQ ID NO: 1151118 - RNA, 19 nt, Homo sapiens
  misc_RNA (1)...(19): siRNA sense strand
caagcuucccucugucuga

SEQ ID NO: 1151119 - RNA, 19 nt, Homo sapiens
  misc_RNA (1)...(19): siRNA sense strand
gcugggaaccuuugcucaa

SEQ ID NO: 1151120 - RNA, 19 nt, Homo sapiens
  misc_RNA (1)...(19): siRNA sense strand
ugacagugagaaucaagaa

SEQ ID NO: 1151121 - RNA, 19 nt, Homo sapiens
  misc_RNA (1)...(19): siRNA sense strand
gaagaugauggcccagaag

SEQ ID NO: 1151122 - RNA, 19 nt, Homo sapiens
  misc_RNA (1)...(19): siRNA sense strand
gaaccucaacaugaacaga

SEQ ID NO: 1151123 - RNA, 19 nt, Homo sapiens
  misc_RNA (1)...(19): siRNA sense strand
ucauaaaacugucaagaag

SEQ ID NO: 1151124 - RNA, 19 nt, Homo sapiens
  misc_RNA (1)...(19): siRNA sense strand
cuaaggguguaguccugaa

SEQ ID NO: 1151125 - RNA, 19 nt, Homo sapiens
  misc_RNA (1)...(19): siRNA sense strand
gaaggagguagagaagguu

SEQ ID NO: 1151126 - RNA, 19 nt, Homo sapiens
  misc_RNA (1)...(19): siRNA sense strand
aaucaagaaccucaacaug

SEQ ID NO: 1151127 - RNA, 19 nt, Homo sapiens
  misc_RNA (1)...(19): siRNA sense strand
ugucucacccuuaauuguu

SEQ ID NO: 1151128 - RNA, 19 nt, Homo sapiens
  misc_RNA (1)...(19): siRNA sense strand
gcgaaggaacuauuugaac

SEQ ID NO: 1151129 - RNA, 19 nt, Homo sapiens
  misc_RNA (1)...(19): siRNA sense strand
gccuuucgcuguaucaaac

SEQ ID NO: 1151130 - RNA, 19 nt, Homo sapiens
  misc_RNA (1)...(19): siRNA sense strand
ggagacagaagcguucauc

SEQ ID NO: 1151131 - RNA, 19 nt, Homo sapiens
  misc_RNA (1)...(19): siRNA sense strand
guguaguccugaaacugaa

SEQ ID NO: 1151132 - RNA, 19 nt, Homo sapiens
  misc_RNA (1)...(19): siRNA sense strand
aucaagaaccucaacauga

SEQ ID NO: 1151133 - RNA, 19 nt, Homo sapiens
  misc_RNA (1)...(19): siRNA sense strand
ucaguggaggugagaguuu

SEQ ID NO: 1151134 - RNA, 19 nt, Homo sapiens
  misc_RNA (1)...(19): siRNA sense strand
ucgcuggaccguugugaaa

SEQ ID NO: 1151135 - RNA, 19 nt, Homo sapiens
  misc_RNA (1)...(19): siRNA sense strand
caaauuagagccccaggaa

SEQ ID NO: 1151136 - RNA, 19 nt, Homo sapiens
  misc_RNA (1)...(19): siRNA sense strand
gaacagagcuccugacaac

SEQ ID NO: 1151137 - RNA, 19 nt, Homo sapiens
  misc_RNA (1)...(19): siRNA sense strand
caagaaggauugucagaga

SEQ ID NO: 1151138 - RNA, 19 nt, Homo sapiens
  misc_RNA (1)...(19): siRNA sense strand
ccaaucaacucauucagaa

SEQ ID NO: 1151139 - RNA, 19 nt, Homo sapiens
  misc_RNA (1)...(19): siRNA sense strand
ggaacuaucuccucucucu

SEQ ID NO: 1151140 - RNA, 19 nt, Homo sapiens
  misc_RNA (1)...(19): siRNA sense strand
gggccuagaacccaaauua

SEQ ID NO: 1151141 - RNA, 19 nt, Homo sapiens
  misc_RNA (1)...(19): siRNA sense strand
gaagccaccuauagagaga

SEQ ID NO: 1151142 - RNA, 19 nt, Homo sapiens
  misc_RNA (1)...(19): siRNA sense strand
gauaaacagugccaagaag

SEQ ID NO: 1151143 - RNA, 19 nt, Homo sapiens
  misc_RNA (1)...(19): siRNA sense strand
gaagagauccagccacauc

SEQ ID NO: 1151144 - RNA, 19 nt, Homo sapiens
  misc_RNA (1)...(19): siRNA sense strand
ggcgguggcuguaacauga

SEQ ID NO: 1151145 - RNA, 19 nt, Homo sapiens
  misc_RNA (1)...(19): siRNA sense strand
cuagagagguaggaaauau

SEQ ID NO: 1151146 - RNA, 19 nt, Homo sapiens
  misc_RNA (1)...(19): siRNA sense strand
ccggauuccucacccaaua

SEQ ID NO: 1151147 - RNA, 19 nt, Homo sapiens
  misc_RNA (1)...(19): siRNA sense strand
uagaggaaguugucaagau

SEQ ID NO: 1151148 - RNA, 19 nt, Homo sapiens
  misc_RNA (1)...(19): siRNA sense strand
ucuguuaucuucacuguuc

SEQ ID NO: 1151149 - RNA, 19 nt, Homo sapiens
  misc_RNA (1)...(19): siRNA sense strand
gccagggccuuucgcugua

SEQ ID NO: 1151150 - RNA, 19 nt, Homo sapiens
  misc_RNA (1)...(19): siRNA sense strand
gaacaccggcucccauucu

SEQ ID NO: 1151151 - RNA, 19 nt, Homo sapiens
  misc_RNA (1)...(19): siRNA sense strand
agaggaaguugucaagaug

SEQ ID NO: 1151152 - RNA, 19 nt, Homo sapiens
  misc_RNA (1)...(19): siRNA sense strand
ggaaaaugcugugaagaga

SEQ ID NO: 1151153 - RNA, 19 nt, Homo sapiens
  misc_RNA (1)...(19): siRNA sense strand
gguguaguccugaaacuga

SEQ ID NO: 1151154 - RNA, 19 nt, Homo sapiens
  misc_RNA (1)...(19): siRNA sense strand
gaaaacaccagcccaauca

SEQ ID NO: 1151155 - RNA, 19 nt, Homo sapiens
  misc_RNA (1)...(19): siRNA sense strand
gcuauugccuaagggugua

SEQ ID NO: 1151156 - RNA, 19 nt, Homo sapiens
  misc_RNA (1)...(19): siRNA sense strand
gacagaagcguucaucagu

SEQ ID NO: 1151157 - RNA, 19 nt, Homo sapiens
  misc_RNA (1)...(19): siRNA sense strand
gcuccugacaacaucauua

SEQ ID NO: 1151158 - RNA, 19 nt, Homo sapiens
  misc_RNA (1)...(19): siRNA sense strand
ccacugcuauugccuaagg

SEQ ID NO: 1151159 - RNA, 19 nt, Homo sapiens
  misc_RNA (1)...(19): siRNA sense strand
ccucuuccauguuucgaaa

SEQ ID NO: 1151160 - RNA, 19 nt, Homo sapiens
  misc_RNA (1)...(19): siRNA sense strand
ccaggagucucuaaacaac

SEQ ID NO: 1151161 - RNA, 19 nt, Homo sapiens
  misc_RNA (1)...(19): siRNA sense strand
ugauggugcuagagaggua

SEQ ID NO: 1151162 - RNA, 19 nt, Homo sapiens
  misc_RNA (1)...(19): siRNA sense strand
gaaggauugucagagaaca

SEQ ID NO: 1151163 - RNA, 19 nt, Homo sapiens
  misc_RNA (1)...(19): siRNA sense strand
aggacaagcuucccucugu

SEQ ID NO: 1151164 - RNA, 19 nt, Homo sapiens
  misc_RNA (1)...(19): siRNA sense strand
aagaaggauugucagagaa

SEQ ID NO: 1151165 - RNA, 19 nt, Homo sapiens
  misc_RNA (1)...(19): siRNA sense strand
cgauaaacagugccaagaa

SEQ ID NO: 1151166 - RNA, 19 nt, Homo sapiens
  misc_RNA (1)...(19): siRNA sense strand
gcuagagagguaggaaaua

SEQ ID NO: 1151167 - RNA, 19 nt, Homo sapiens
  misc_RNA (1)...(19): siRNA sense strand
gccuagaacccaaauuaga

SEQ ID NO: 1151168 - RNA, 19 nt, Homo sapiens
  misc_RNA (1)...(19): siRNA sense strand
caucuguuaucuucacugu

SEQ ID NO: 1151169 - RNA, 19 nt, Homo sapiens
  misc_RNA (1)...(19): siRNA sense strand
agagagguaggaaauauga

SEQ ID NO: 1151170 - RNA, 19 nt, Homo sapiens
  misc_RNA (1)...(19): siRNA sense strand
ggaaauaugacuggaacca

SEQ ID NO: 1151171 - RNA, 19 nt, Homo sapiens
  misc_RNA (1)...(19): siRNA sense strand
ccagcccaaucaacucauu

SEQ ID NO: 1151172 - RNA, 19 nt, Homo sapiens
  misc_RNA (1)...(19): siRNA sense strand
ggauuuagaggaaguuguc

SEQ ID NO: 1151173 - RNA, 19 nt, Homo sapiens
  misc_RNA (1)...(19): siRNA sense strand
gucucacccuuaauuguuu

SEQ ID NO: 1151174 - RNA, 19 nt, Homo sapiens
  misc_RNA (1)...(19): siRNA sense strand
cuaccacugugaagauugu

SEQ ID NO: 1151175 - RNA, 19 nt, Homo sapiens
  misc_RNA (1)...(19): siRNA sense strand
aagaaggcuuggagacaga

SEQ ID NO: 1151176 - RNA, 19 nt, Homo sapiens
  misc_RNA (1)...(19): siRNA sense strand
uauccacccugcaucuguu

SEQ ID NO: 1151177 - RNA, 19 nt, Homo sapiens
  misc_RNA (1)...(19): siRNA sense strand
cggcucccauucugguuaa

SEQ ID NO: 1151178 - RNA, 19 nt, Homo sapiens
  misc_RNA (1)...(19): siRNA sense strand
ccugacaacaucauuaaau

SEQ ID NO: 1151179 - RNA, 19 nt, Homo sapiens
  misc_RNA (1)...(19): siRNA sense strand
uaaacagugccaagaagga

SEQ ID NO: 1151180 - RNA, 19 nt, Homo sapiens
  misc_RNA (1)...(19): siRNA sense strand
ucagaucaaggccuagaaa

SEQ ID NO: 1151181 - RNA, 19 nt, Homo sapiens
  misc_RNA (1)...(19): siRNA sense strand
guaggaaauaugacuggaa

SEQ ID NO: 1151182 - RNA, 19 nt, Homo sapiens
  misc_RNA (1)...(19): siRNA sense strand
caagcuucccucugucuga

SEQ ID NO: 1151183 - RNA, 19 nt, Homo sapiens
  misc_RNA (1)...(19): siRNA sense strand
uaucaaaccugccccuguu

SEQ ID NO: 1151184 - RNA, 19 nt, Homo sapiens
  misc_RNA (1)...(19): siRNA sense strand
cuaaggguguaguccugaa

SEQ ID NO: 1151185 - RNA, 19 nt, Homo sapiens
  misc_RNA (1)...(19): siRNA sense strand
guguaguccugaaacugaa

SEQ ID NO: 1151186 - RNA, 19 nt, Homo sapiens
  misc_RNA (1)...(19): siRNA sense strand
ugucucacccuuaauuguu

SEQ ID NO: 1151187 - RNA, 19 nt, Homo sapiens
  misc_RNA (1)...(19): siRNA sense strand
gccuuucgcuguaucaaac

SEQ ID NO: 1151188 - RNA, 19 nt, Homo sapiens
  misc_RNA (1)...(19): siRNA sense strand
ggagacagaagcguucauc

SEQ ID NO: 1151189 - RNA, 19 nt, Homo sapiens
  misc_RNA (1)...(19): siRNA sense strand
ugccauccauccaggaaga

SEQ ID NO: 1151190 - RNA, 19 nt, Homo sapiens
  misc_RNA (1)...(19): siRNA sense strand
ucgcuggaccguugugaaa

SEQ ID NO: 1151191 - RNA, 19 nt, Homo sapiens
  misc_RNA (1)...(19): siRNA sense strand
caaauuagagccccaggaa

SEQ ID NO: 1151192 - RNA, 19 nt, Homo sapiens
  misc_RNA (1)...(19): siRNA sense strand
ucaguggaggugagaguuu

SEQ ID NO: 1151193 - RNA, 19 nt, Homo sapiens
  misc_RNA (1)...(19): siRNA sense strand
gaaccacugagaucaacuc

SEQ ID NO: 1151194 - RNA, 19 nt, Homo sapiens
  misc_RNA (1)...(19): siRNA sense strand
ucgaaagccauaugugaga

SEQ ID NO: 1151195 - RNA, 19 nt, Homo sapiens
  misc_RNA (1)...(19): siRNA sense strand
ggaagaacugcggcacaug

SEQ ID NO: 1151196 - RNA, 19 nt, Homo sapiens
  misc_RNA (1)...(19): siRNA sense strand
gccaagaaggauugucaga

SEQ ID NO: 1151197 - RNA, 19 nt, Homo sapiens
  misc_RNA (1)...(19): siRNA sense strand
cagagcuccugacaacauc

SEQ ID NO: 1151198 - RNA, 19 nt, Homo sapiens
  misc_RNA (1)...(19): siRNA sense strand
uuucgaaagccauauguga

SEQ ID NO: 1151199 - RNA, 19 nt, Homo sapiens
  misc_RNA (1)...(19): siRNA sense strand
cagcuucaacccugggaaa

SEQ ID NO: 1151200 - RNA, 19 nt, Homo sapiens
  misc_RNA (1)...(19): siRNA sense strand
acagagcuccugacaacau

SEQ ID NO: 1151201 - RNA, 19 nt, Homo sapiens
  misc_RNA (1)...(19): siRNA sense strand
gcauccaggagucucuaaa

SEQ ID NO: 1151202 - RNA, 19 nt, Homo sapiens
  misc_RNA (1)...(19): siRNA sense strand
gagacagaagcguucauca

SEQ ID NO: 1151203 - RNA, 19 nt, Homo sapiens
  misc_RNA (1)...(19): siRNA sense strand
ggccuccaccagucgauaa

SEQ ID NO: 1151204 - RNA, 19 nt, Homo sapiens
  misc_RNA (1)...(19): siRNA sense strand
ccuagaacccaaauuagag

SEQ ID NO: 1151205 - RNA, 19 nt, Homo sapiens
  misc_RNA (1)...(19): siRNA sense strand
aagaacaccggcucccauu

SEQ ID NO: 1151206 - RNA, 19 nt, Homo sapiens
  misc_RNA (1)...(19): siRNA sense strand
gugccaagaaggauuguca

SEQ ID NO: 1151207 - RNA, 19 nt, Homo sapiens
  misc_RNA (1)...(19): siRNA sense strand
ccagggccuuucgcuguau

SEQ ID NO: 1151208 - RNA, 19 nt, Homo sapiens
  misc_RNA (1)...(19): siRNA sense strand
ggaaaacaccagcccaauc

SEQ ID NO: 1151209 - RNA, 19 nt, Homo sapiens
  misc_RNA (1)...(19): siRNA sense strand
uggaagccaccuauagaga

SEQ ID NO: 1151210 - RNA, 19 nt, Homo sapiens
  misc_RNA (1)...(19): siRNA sense strand
cccugcaucuguuaucuuc

SEQ ID NO: 1151211 - RNA, 19 nt, Homo sapiens
  misc_RNA (1)...(19): siRNA sense strand
cccugccucuuccauguuu

SEQ ID NO: 1151212 - RNA, 19 nt, Homo sapiens
  misc_RNA (1)...(19): siRNA sense strand
cccaaucaacucauucaga

SEQ ID NO: 1151213 - RNA, 19 nt, Homo sapiens
  misc_RNA (1)...(19): siRNA sense strand
ugacuggaaccacugagau

SEQ ID NO: 1151214 - RNA, 19 nt, Homo sapiens
  misc_RNA (1)...(19): siRNA sense strand
ggaaguugucaagauggaa

SEQ ID NO: 1151215 - RNA, 19 nt, Homo sapiens
  misc_RNA (1)...(19): siRNA sense strand
aggaagaacugcggcacau

SEQ ID NO: 1151216 - RNA, 19 nt, Homo sapiens
  misc_RNA (1)...(19): siRNA sense strand
ggaccguugugaaaacaga

SEQ ID NO: 1151217 - RNA, 19 nt, Homo sapiens
  misc_RNA (1)...(19): siRNA sense strand
aaaaugcugugaagagauc

SEQ ID NO: 1151218 - RNA, 19 nt, Homo sapiens
  misc_RNA (1)...(19): siRNA sense strand
ggccuagaacccaaauuag

SEQ ID NO: 1151219 - RNA, 19 nt, Homo sapiens
  misc_RNA (1)...(19): siRNA sense strand
gaacagagcuccugacaac

SEQ ID NO: 1151220 - RNA, 19 nt, Homo sapiens
  misc_RNA (1)...(19): siRNA sense strand
caagaaggauugucagaga

SEQ ID NO: 1151221 - RNA, 19 nt, Homo sapiens
  misc_RNA (1)...(19): siRNA sense strand
ucaagaaccucaacaugaa

SEQ ID NO: 1151222 - RNA, 19 nt, Homo sapiens
  misc_RNA (1)...(19): siRNA sense strand
ccaaucaacucauucagaa

SEQ ID NO: 1151223 - RNA, 19 nt, Homo sapiens
  misc_RNA (1)...(19): siRNA sense strand
gcacacaugucagcauuga

SEQ ID NO: 1151224 - RNA, 19 nt, Homo sapiens
  misc_RNA (1)...(19): siRNA sense strand
guucagcucuugacacaaa

SEQ ID NO: 1151225 - RNA, 19 nt, Homo sapiens
  misc_RNA (1)...(19): siRNA sense strand
ggaacuaucuccucucucu

SEQ ID NO: 1151226 - RNA, 19 nt, Homo sapiens
  misc_RNA (1)...(19): siRNA sense strand
gggccuagaacccaaauua

SEQ ID NO: 1151227 - RNA, 19 nt, Homo sapiens
  misc_RNA (1)...(19): siRNA sense strand
gaagccaccuauagagaga

SEQ ID NO: 1151228 - RNA, 19 nt, Homo sapiens
  misc_RNA (1)...(19): siRNA sense strand
gauaaacagugccaagaag

SEQ ID NO: 1151229 - RNA, 19 nt, Homo sapiens
  misc_RNA (1)...(19): siRNA sense strand
gaagagauccagccacauc

SEQ ID NO: 1151230 - RNA, 19 nt, Homo sapiens
  misc_RNA (1)...(19): siRNA sense strand
uuaaagagcugggaaccuu

SEQ ID NO: 1151231 - RNA, 19 nt, Homo sapiens
  misc_RNA (1)...(19): siRNA sense strand
ggcgguggcuguaacauga

SEQ ID NO: 1151232 - RNA, 19 nt, Homo sapiens
  misc_RNA (1)...(19): siRNA sense strand
gcaccaggauaugucuuaa

SEQ ID NO: 1151233 - RNA, 19 nt, Homo sapiens
  misc_RNA (1)...(19): siRNA sense strand
cuagagagguaggaaauau

SEQ ID NO: 1151234 - RNA, 19 nt, Homo sapiens
  misc_RNA (1)...(19): siRNA sense strand
cagcacacaugucagcauu

SEQ ID NO: 1151235 - RNA, 19 nt, Homo sapiens
  misc_RNA (1)...(19): siRNA sense strand
acacaaauccaccuucuug

SEQ ID NO: 1151236 - RNA, 19 nt, Homo sapiens
  misc_RNA (1)...(19): siRNA sense strand
cuaugcagcugauugaaga

SEQ ID NO: 1151237 - RNA, 19 nt, Homo sapiens
  misc_RNA (1)...(19): siRNA sense strand
uagaggaaguugucaagau

SEQ ID NO: 1151238 - RNA, 19 nt, Homo sapiens
  misc_RNA (1)...(19): siRNA sense strand
ccggauuccucacccaaua

SEQ ID NO: 1151239 - RNA, 19 nt, Homo sapiens
  misc_RNA (1)...(19): siRNA sense strand
ucuguuaucuucacuguuc

SEQ ID NO: 1151240 - RNA, 19 nt, Homo sapiens
  misc_RNA (1)...(19): siRNA sense strand
gccagggccuuucgcugua

SEQ ID NO: 1151241 - RNA, 19 nt, Homo sapiens
  misc_RNA (1)...(19): siRNA sense strand
gaacaccggcucccauucu

SEQ ID NO: 1151242 - RNA, 19 nt, Homo sapiens
  misc_RNA (1)...(19): siRNA sense strand
agaggaaguugucaagaug

SEQ ID NO: 1151243 - RNA, 19 nt, Homo sapiens
  misc_RNA (1)...(19): siRNA sense strand
ggaaaaugcugugaagaga

SEQ ID NO: 1151244 - RNA, 19 nt, Homo sapiens
  misc_RNA (1)...(19): siRNA sense strand
gccaguagcaccaggauau

SEQ ID NO: 1151245 - RNA, 19 nt, Homo sapiens
  misc_RNA (1)...(19): siRNA sense strand
gaaaacaccagcccaauca

SEQ ID NO: 1151246 - RNA, 19 nt, Homo sapiens
  misc_RNA (1)...(19): siRNA sense strand
gguguaguccugaaacuga

SEQ ID NO: 1151247 - RNA, 19 nt, Homo sapiens
  misc_RNA (1)...(19): siRNA sense strand
gcuauugccuaagggugua

SEQ ID NO: 1151248 - RNA, 19 nt, Homo sapiens
  misc_RNA (1)...(19): siRNA sense strand
gacagaagcguucaucagu

SEQ ID NO: 1151249 - RNA, 19 nt, Homo sapiens
  misc_RNA (1)...(19): siRNA sense strand
gcuccugacaacaucauua

SEQ ID NO: 1151250 - RNA, 19 nt, Homo sapiens
  misc_RNA (1)...(19): siRNA sense strand
ccacugcuauugccuaagg

SEQ ID NO: 1151251 - RNA, 19 nt, Homo sapiens
  misc_RNA (1)...(19): siRNA sense strand
ccucuuccauguuucgaaa

SEQ ID NO: 1151252 - RNA, 19 nt, Homo sapiens
  misc_RNA (1)...(19): siRNA sense strand
ccaggagucucuaaacaac

SEQ ID NO: 1151253 - RNA, 19 nt, Homo sapiens
  misc_RNA (1)...(19): siRNA sense strand
agaaggagguagagaaggu

SEQ ID NO: 1151254 - RNA, 19 nt, Homo sapiens
  misc_RNA (1)...(19): siRNA sense strand
ugacacaaauccaccuucu

SEQ ID NO: 1151255 - RNA, 19 nt, Homo sapiens
  misc_RNA (1)...(19): siRNA sense strand
guuccaacccuguaacuug

SEQ ID NO: 1151256 - RNA, 19 nt, Homo sapiens
  misc_RNA (1)...(19): siRNA sense strand
ggagguagagaagguuaaa

SEQ ID NO: 1151257 - RNA, 19 nt, Homo sapiens
  misc_RNA (1)...(19): siRNA sense strand
gaaggauugucagagaaca

SEQ ID NO: 1151258 - RNA, 19 nt, Homo sapiens
  misc_RNA (1)...(19): siRNA sense strand
ugauggugcuagagaggua

SEQ ID NO: 1151259 - RNA, 19 nt, Homo sapiens
  misc_RNA (1)...(19): siRNA sense strand
gcagaaggagguagagaag

SEQ ID NO: 1151260 - RNA, 19 nt, Homo sapiens
  misc_RNA (1)...(19): siRNA sense strand
aggacaagcuucccucugu

SEQ ID NO: 1151261 - RNA, 19 nt, Homo sapiens
  misc_RNA (1)...(19): siRNA sense strand
aagaaggauugucagagaa

SEQ ID NO: 1151262 - RNA, 19 nt, Homo sapiens
  misc_RNA (1)...(19): siRNA sense strand
cgauaaacagugccaagaa

SEQ ID NO: 1151263 - RNA, 19 nt, Homo sapiens
  misc_RNA (1)...(19): siRNA sense strand
gcuagagagguaggaaaua

SEQ ID NO: 1151264 - RNA, 19 nt, Homo sapiens
  misc_RNA (1)...(19): siRNA sense strand
gccuagaacccaaauuaga

SEQ ID NO: 1151265 - RNA, 19 nt, Homo sapiens
  misc_RNA (1)...(19): siRNA sense strand
gaaucaagaaccucaacau

SEQ ID NO: 1151266 - RNA, 19 nt, Homo sapiens
  misc_RNA (1)...(19): siRNA sense strand
caucuguuaucuucacugu

SEQ ID NO: 1151267 - RNA, 19 nt, Homo sapiens
  misc_RNA (1)...(19): siRNA sense strand
ugacugcagcccucauaaa

SEQ ID NO: 1151268 - RNA, 19 nt, Homo sapiens
  misc_RNA (1)...(19): siRNA sense strand
agagagguaggaaauauga

SEQ ID NO: 1151269 - RNA, 19 nt, Homo sapiens
  misc_RNA (1)...(19): siRNA sense strand
ggaaauaugacuggaacca

SEQ ID NO: 1151270 - RNA, 19 nt, Homo sapiens
  misc_RNA (1)...(19): siRNA sense strand
ccagcccaaucaacucauu

SEQ ID NO: 1151271 - RNA, 19 nt, Homo sapiens
  misc_RNA (1)...(19): siRNA sense strand
ggauuuagaggaaguuguc

SEQ ID NO: 1151272 - RNA, 19 nt, Homo sapiens
  misc_RNA (1)...(19): siRNA sense strand
gucucacccuuaauuguuu

SEQ ID NO: 1151273 - RNA, 19 nt, Homo sapiens
  misc_RNA (1)...(19): siRNA sense strand
cuaccacugugaagauugu

SEQ ID NO: 1151274 - RNA, 19 nt, Homo sapiens
  misc_RNA (1)...(19): siRNA sense strand
uuccaacccuguaacuuga

SEQ ID NO: 1151275 - RNA, 19 nt, Homo sapiens
  misc_RNA (1)...(19): siRNA sense strand
uauccacccugcaucuguu

SEQ ID NO: 1151276 - RNA, 19 nt, Homo sapiens
  misc_RNA (1)...(19): siRNA sense strand
aagaaggcuuggagacaga

SEQ ID NO: 1151277 - RNA, 19 nt, Homo sapiens
  misc_RNA (1)...(19): siRNA sense strand
guaacuugaugggagcuau

SEQ ID NO: 1151278 - RNA, 19 nt, Homo sapiens
  misc_RNA (1)...(19): siRNA sense strand
ccaucgcccuucaccauca

SEQ ID NO: 1151279 - RNA, 19 nt, Homo sapiens
  misc_RNA (1)...(19): siRNA sense strand
uaaacagugccaagaagga

SEQ ID NO: 1151280 - RNA, 19 nt, Homo sapiens
  misc_RNA (1)...(19): siRNA sense strand
ucagaucaaggccuagaaa

SEQ ID NO: 1151281 - RNA, 19 nt, Homo sapiens
  misc_RNA (1)...(19): siRNA sense strand
guaggaaauaugacuggaa

SEQ ID NO: 1151282 - RNA, 19 nt, Homo sapiens
  misc_RNA (1)...(19): siRNA sense strand
cggcucccauucugguuaa

SEQ ID NO: 1151283 - RNA, 19 nt, Homo sapiens
  misc_RNA (1)...(19): siRNA sense strand
ccugacaacaucauuaaau

SEQ ID NO: 1151284 - RNA, 19 nt, Homo sapiens
  misc_RNA (1)...(19): siRNA sense strand
gcagcauguucagcucuug

SEQ ID NO: 1151285 - RNA, 19 nt, Homo sapiens
  misc_RNA (1)...(19): siRNA sense strand
uaucaaaccugccccuguu

SEQ ID NO: 1151286 - RNA, 19 nt, Homo sapiens
  misc_RNA (1)...(19): siRNA sense strand
caagcuucccucugucuga

SEQ ID NO: 1151287 - RNA, 19 nt, Homo sapiens
  misc_RNA (1)...(19): siRNA sense strand
gcugggaaccuuugcucaa

SEQ ID NO: 1151288 - RNA, 19 nt, Homo sapiens
  misc_RNA (1)...(19): siRNA sense strand
ugacagugagaaucaagaa

SEQ ID NO: 1151289 - RNA, 19 nt, Homo sapiens
  misc_RNA (1)...(19): siRNA sense strand
gaaccucaacaugaacaga

SEQ ID NO: 1151290 - RNA, 19 nt, Homo sapiens
  misc_RNA (1)...(19): siRNA sense strand
gaaggagguagagaagguu

SEQ ID NO: 1151291 - RNA, 19 nt, Homo sapiens
  misc_RNA (1)...(19): siRNA sense strand
cuaaggguguaguccugaa

SEQ ID NO: 1151292 - RNA, 19 nt, Homo sapiens
  misc_RNA (1)...(19): siRNA sense strand
ucauaaaacugucaagaag

SEQ ID NO: 1151293 - RNA, 19 nt, Homo sapiens
  misc_RNA (1)...(19): siRNA sense strand
aaucaagaaccucaacaug

SEQ ID NO: 1151294 - RNA, 19 nt, Homo sapiens
  misc_RNA (1)...(19): siRNA sense strand
ugucucacccuuaauuguu

SEQ ID NO: 1151295 - RNA, 19 nt, Homo sapiens
  misc_RNA (1)...(19): siRNA sense strand
gccuuucgcuguaucaaac

SEQ ID NO: 1151296 - RNA, 19 nt, Homo sapiens
  misc_RNA (1)...(19): siRNA sense strand
ggagacagaagcguucauc

SEQ ID NO: 1151297 - RNA, 19 nt, Homo sapiens
  misc_RNA (1)...(19): siRNA sense strand
guguaguccugaaacugaa

SEQ ID NO: 1151298 - RNA, 19 nt, Homo sapiens
  misc_RNA (1)...(19): siRNA sense strand
aucaagaaccucaacauga

SEQ ID NO: 1151299 - RNA, 19 nt, Homo sapiens
  misc_RNA (1)...(19): siRNA sense strand
ugccauccauccaggaaga

SEQ ID NO: 1151300 - RNA, 19 nt, Homo sapiens
  misc_RNA (1)...(19): siRNA sense strand
ucgcuggaccguugugaaa

SEQ ID NO: 1151301 - RNA, 19 nt, Homo sapiens
  misc_RNA (1)...(19): siRNA sense strand
caaauuagagccccaggaa

SEQ ID NO: 1151302 - RNA, 19 nt, Homo sapiens
  misc_RNA (1)...(19): siRNA sense strand
ucaguggaggugagaguuu

SEQ ID NO: 1151303 - RNA, 19 nt, Homo sapiens
  misc_RNA (1)...(19): siRNA sense strand
accaggauaugucuuaaag

SEQ ID NO: 1151304 - RNA, 19 nt, Homo sapiens
  misc_RNA (1)...(19): siRNA sense strand
gaaccacugagaucaacuc

SEQ ID NO: 1151305 - RNA, 19 nt, Homo sapiens
  misc_RNA (1)...(19): siRNA sense strand
cagccaaacagcagaagga

SEQ ID NO: 1151306 - RNA, 19 nt, Homo sapiens
  misc_RNA (1)...(19): siRNA sense strand
ccaacccuguaacuugaug

SEQ ID NO: 1151307 - RNA, 19 nt, Homo sapiens
  misc_RNA (1)...(19): siRNA sense strand
ucgaaagccauaugugaga

SEQ ID NO: 1151308 - RNA, 19 nt, Homo sapiens
  misc_RNA (1)...(19): siRNA sense strand
cagagcuccugacaacauc

SEQ ID NO: 1151309 - RNA, 19 nt, Homo sapiens
  misc_RNA (1)...(19): siRNA sense strand
gccaagaaggauugucaga

SEQ ID NO: 1151310 - RNA, 19 nt, Homo sapiens
  misc_RNA (1)...(19): siRNA sense strand
uuucgaaagccauauguga

SEQ ID NO: 1151311 - RNA, 19 nt, Homo sapiens
  misc_RNA (1)...(19): siRNA sense strand
cagcuucaacccugggaaa

SEQ ID NO: 1151312 - RNA, 19 nt, Homo sapiens
  misc_RNA (1)...(19): siRNA sense strand
ggaagaacugcggcacaug

SEQ ID NO: 1151313 - RNA, 19 nt, Homo sapiens
  misc_RNA (1)...(19): siRNA sense strand
gcuaugcagcugauugaag

SEQ ID NO: 1151314 - RNA, 19 nt, Homo sapiens
  misc_RNA (1)...(19): siRNA sense strand
gcauccaggagucucuaaa

SEQ ID NO: 1151315 - RNA, 19 nt, Homo sapiens
  misc_RNA (1)...(19): siRNA sense strand
acagagcuccugacaacau

SEQ ID NO: 1151316 - RNA, 19 nt, Homo sapiens
  misc_RNA (1)...(19): siRNA sense strand
gacuucagcacacauguca

SEQ ID NO: 1151317 - RNA, 19 nt, Homo sapiens
  misc_RNA (1)...(19): siRNA sense strand
ccuagaacccaaauuagag

SEQ ID NO: 1151318 - RNA, 19 nt, Homo sapiens
  misc_RNA (1)...(19): siRNA sense strand
ggccuccaccagucgauaa

SEQ ID NO: 1151319 - RNA, 19 nt, Homo sapiens
  misc_RNA (1)...(19): siRNA sense strand
gaacagagcuccugacaac

SEQ ID NO: 1151320 - RNA, 19 nt, Homo sapiens
  misc_RNA (1)...(19): siRNA sense strand
caagaaggauugucagaga

SEQ ID NO: 1151321 - RNA, 19 nt, Homo sapiens
  misc_RNA (1)...(19): siRNA sense strand
ucaagaaccucaacaugaa

SEQ ID NO: 1151322 - RNA, 19 nt, Homo sapiens
  misc_RNA (1)...(19): siRNA sense strand
ccaaucaacucauucagaa

SEQ ID NO: 1151323 - RNA, 19 nt, Homo sapiens
  misc_RNA (1)...(19): siRNA sense strand
gcacacaugucagcauuga

SEQ ID NO: 1151324 - RNA, 19 nt, Homo sapiens
  misc_RNA (1)...(19): siRNA sense strand
guucagcucuugacacaaa

SEQ ID NO: 1151325 - RNA, 19 nt, Homo sapiens
  misc_RNA (1)...(19): siRNA sense strand
ggaacuaucuccucucucu

SEQ ID NO: 1151326 - RNA, 19 nt, Homo sapiens
  misc_RNA (1)...(19): siRNA sense strand
ggaagaugauggcccagaa

SEQ ID NO: 1151327 - RNA, 19 nt, Homo sapiens
  misc_RNA (1)...(19): siRNA sense strand
cgaaggaacuauuugaaca

SEQ ID NO: 1151328 - RNA, 19 nt, Homo sapiens
  misc_RNA (1)...(19): siRNA sense strand
gggccuagaacccaaauua

SEQ ID NO: 1151329 - RNA, 19 nt, Homo sapiens
  misc_RNA (1)...(19): siRNA sense strand
gaagccaccuauagagaga

SEQ ID NO: 1151330 - RNA, 19 nt, Homo sapiens
  misc_RNA (1)...(19): siRNA sense strand
gauaaacagugccaagaag

SEQ ID NO: 1151331 - RNA, 19 nt, Homo sapiens
  misc_RNA (1)...(19): siRNA sense strand
gaagagauccagccacauc

SEQ ID NO: 1151332 - RNA, 19 nt, Homo sapiens
  misc_RNA (1)...(19): siRNA sense strand
uuaaagagcugggaaccuu

SEQ ID NO: 1151333 - RNA, 19 nt, Homo sapiens
  misc_RNA (1)...(19): siRNA sense strand
ggcgguggcuguaacauga

SEQ ID NO: 1151334 - RNA, 19 nt, Homo sapiens
  misc_RNA (1)...(19): siRNA sense strand
gcaccaggauaugucuuaa

SEQ ID NO: 1151335 - RNA, 19 nt, Homo sapiens
  misc_RNA (1)...(19): siRNA sense strand
cuagagagguaggaaauau

SEQ ID NO: 1151336 - RNA, 19 nt, Homo sapiens
  misc_RNA (1)...(19): siRNA sense strand
uugaacagcugaagaugaa

SEQ ID NO: 1151337 - RNA, 19 nt, Homo sapiens
  misc_RNA (1)...(19): siRNA sense strand
cagcacacaugucagcauu

SEQ ID NO: 1151338 - RNA, 19 nt, Homo sapiens
  misc_RNA (1)...(19): siRNA sense strand
gaacagcugaagaugaaga

SEQ ID NO: 1151339 - RNA, 19 nt, Homo sapiens
  misc_RNA (1)...(19): siRNA sense strand
acacaaauccaccuucuug

SEQ ID NO: 1151340 - RNA, 19 nt, Homo sapiens
  misc_RNA (1)...(19): siRNA sense strand
cuaugcagcugauugaaga

SEQ ID NO: 1151341 - RNA, 19 nt, Homo sapiens
  misc_RNA (1)...(19): siRNA sense strand
uagaggaaguugucaagau

SEQ ID NO: 1151342 - RNA, 19 nt, Homo sapiens
  misc_RNA (1)...(19): siRNA sense strand
ccggauuccucacccaaua

SEQ ID NO: 1151343 - RNA, 19 nt, Homo sapiens
  misc_RNA (1)...(19): siRNA sense strand
ucuguuaucuucacuguuc

SEQ ID NO: 1151344 - RNA, 19 nt, Homo sapiens
  misc_RNA (1)...(19): siRNA sense strand
uggccaaccuacuaaauga

SEQ ID NO: 1151345 - RNA, 19 nt, Homo sapiens
  misc_RNA (1)...(19): siRNA sense strand
gccagggccuuucgcugua

SEQ ID NO: 1151346 - RNA, 19 nt, Homo sapiens
  misc_RNA (1)...(19): siRNA sense strand
gaacaccggcucccauucu

SEQ ID NO: 1151347 - RNA, 19 nt, Homo sapiens
  misc_RNA (1)...(19): siRNA sense strand
agaggaaguugucaagaug

SEQ ID NO: 1151348 - RNA, 19 nt, Homo sapiens
  misc_RNA (1)...(19): siRNA sense strand
ggaaaaugcugugaagaga

SEQ ID NO: 1151349 - RNA, 19 nt, Homo sapiens
  misc_RNA (1)...(19): siRNA sense strand
gccaguagcaccaggauau

SEQ ID NO: 1151350 - RNA, 19 nt, Homo sapiens
  misc_RNA (1)...(19): siRNA sense strand
gaaaacaccagcccaauca

SEQ ID NO: 1151351 - RNA, 19 nt, Homo sapiens
  misc_RNA (1)...(19): siRNA sense strand
gguguaguccugaaacuga

SEQ ID NO: 1151352 - RNA, 19 nt, Homo sapiens
  misc_RNA (1)...(19): siRNA sense strand
gagccucaagcuaacuuua

SEQ ID NO: 1151353 - RNA, 19 nt, Homo sapiens
  misc_RNA (1)...(19): siRNA sense strand
gacagaagcguucaucagu

SEQ ID NO: 1151354 - RNA, 19 nt, Homo sapiens
  misc_RNA (1)...(19): siRNA sense strand
gcuauugccuaagggugua

SEQ ID NO: 1151355 - RNA, 19 nt, Homo sapiens
  misc_RNA (1)...(19): siRNA sense strand
gcuccugacaacaucauua

SEQ ID NO: 1151356 - RNA, 19 nt, Homo sapiens
  misc_RNA (1)...(19): siRNA sense strand
ccacugcuauugccuaagg

SEQ ID NO: 1151357 - RNA, 19 nt, Homo sapiens
  misc_RNA (1)...(19): siRNA sense strand
agaaggagguagagaaggu

SEQ ID NO: 1151358 - RNA, 19 nt, Homo sapiens
  misc_RNA (1)...(19): siRNA sense strand
ccaggagucucuaaacaac

SEQ ID NO: 1151359 - RNA, 19 nt, Homo sapiens
  misc_RNA (1)...(19): siRNA sense strand
ccucuuccauguuucgaaa

SEQ ID NO: 1151360 - RNA, 19 nt, Homo sapiens
  misc_RNA (1)...(19): siRNA sense strand
ugacacaaauccaccuucu

SEQ ID NO: 1151361 - RNA, 19 nt, Homo sapiens
  misc_RNA (1)...(19): siRNA sense strand
ucagauagcgaaggaacua

SEQ ID NO: 1151362 - RNA, 19 nt, Homo sapiens
  misc_RNA (1)...(19): siRNA sense strand
guuccaacccuguaacuug

SEQ ID NO: 1151363 - RNA, 19 nt, Homo sapiens
  misc_RNA (1)...(19): siRNA sense strand
gcagaaggagguagagaag

SEQ ID NO: 1151364 - RNA, 19 nt, Homo sapiens
  misc_RNA (1)...(19): siRNA sense strand
gaaggauugucagagaaca

SEQ ID NO: 1151365 - RNA, 19 nt, Homo sapiens
  misc_RNA (1)...(19): siRNA sense strand
ugauggugcuagagaggua

SEQ ID NO: 1151366 - RNA, 19 nt, Homo sapiens
  misc_RNA (1)...(19): siRNA sense strand
ggagguagagaagguuaaa

SEQ ID NO: 1151367 - RNA, 19 nt, Homo sapiens
  misc_RNA (1)...(19): siRNA sense strand
aggacaagcuucccucugu

SEQ ID NO: 1151368 - RNA, 19 nt, Homo sapiens
  misc_RNA (1)...(19): siRNA sense strand
aagaaggauugucagagaa

SEQ ID NO: 1151369 - RNA, 19 nt, Homo sapiens
  misc_RNA (1)...(19): siRNA sense strand
cgauaaacagugccaagaa

SEQ ID NO: 1151370 - RNA, 19 nt, Homo sapiens
  misc_RNA (1)...(19): siRNA sense strand
gcuagagagguaggaaaua

SEQ ID NO: 1151371 - RNA, 19 nt, Homo sapiens
  misc_RNA (1)...(19): siRNA sense strand
gccuagaacccaaauuaga

SEQ ID NO: 1151372 - RNA, 19 nt, Homo sapiens
  misc_RNA (1)...(19): siRNA sense strand
gaaucaagaaccucaacau

SEQ ID NO: 1151373 - RNA, 19 nt, Homo sapiens
  misc_RNA (1)...(19): siRNA sense strand
caucuguuaucuucacugu

SEQ ID NO: 1151374 - RNA, 19 nt, Homo sapiens
  misc_RNA (1)...(19): siRNA sense strand
ggaacuacuggccaaccua

SEQ ID NO: 1151375 - RNA, 19 nt, Homo sapiens
  misc_RNA (1)...(19): siRNA sense strand
agagagguaggaaauauga

SEQ ID NO: 1151376 - RNA, 19 nt, Homo sapiens
  misc_RNA (1)...(19): siRNA sense strand
ccuacuaaaugaacaacau

SEQ ID NO: 1151377 - RNA, 19 nt, Homo sapiens
  misc_RNA (1)...(19): siRNA sense strand
ugacugcagcccucauaaa

SEQ ID NO: 1151378 - RNA, 19 nt, Homo sapiens
  misc_RNA (1)...(19): siRNA sense strand
ggaaauaugacuggaacca

SEQ ID NO: 1151379 - RNA, 19 nt, Homo sapiens
  misc_RNA (1)...(19): siRNA sense strand
cuaaaugaacaacaucaga

SEQ ID NO: 1151380 - RNA, 19 nt, Homo sapiens
  misc_RNA (1)...(19): siRNA sense strand
ggauuuagaggaaguuguc

SEQ ID NO: 1151381 - RNA, 19 nt, Homo sapiens
  misc_RNA (1)...(19): siRNA sense strand
gucucacccuuaauuguuu

SEQ ID NO: 1151382 - RNA, 19 nt, Homo sapiens
  misc_RNA (1)...(19): siRNA sense strand
cuaccacugugaagauugu

SEQ ID NO: 1151383 - RNA, 19 nt, Homo sapiens
  misc_RNA (1)...(19): siRNA sense strand
ccagcccaaucaacucauu

SEQ ID NO: 1151384 - RNA, 19 nt, Homo sapiens
  misc_RNA (1)...(19): siRNA sense strand
gaaggaacuauuugaacag

SEQ ID NO: 1151385 - RNA, 19 nt, Homo sapiens
  misc_RNA (1)...(19): siRNA sense strand
uauccacccugcaucuguu

SEQ ID NO: 1151386 - RNA, 19 nt, Homo sapiens
  misc_RNA (1)...(19): siRNA sense strand
uagcgaaggaacuauuuga

SEQ ID NO: 1151387 - RNA, 19 nt, Homo sapiens
  misc_RNA (1)...(19): siRNA sense strand
aagaaggcuuggagacaga

SEQ ID NO: 1151388 - RNA, 19 nt, Homo sapiens
  misc_RNA (1)...(19): siRNA sense strand
uaacaccccucaagcucua

SEQ ID NO: 1151389 - RNA, 19 nt, Homo sapiens
  misc_RNA (1)...(19): siRNA sense strand
guaacuugaugggagcuau

SEQ ID NO: 1151390 - RNA, 19 nt, Homo sapiens
  misc_RNA (1)...(19): siRNA sense strand
uuccaacccuguaacuuga

SEQ ID NO: 1151391 - RNA, 19 nt, Homo sapiens
  misc_RNA (1)...(19): siRNA sense strand
ccaucgcccuucaccauca

SEQ ID NO: 1151392 - RNA, 19 nt, Homo sapiens
  misc_RNA (1)...(19): siRNA sense strand
uaaacagugccaagaagga

SEQ ID NO: 1151393 - RNA, 19 nt, Homo sapiens
  misc_RNA (1)...(19): siRNA sense strand
cuacuggccaaccuacuaa

SEQ ID NO: 1151394 - RNA, 19 nt, Homo sapiens
  misc_RNA (1)...(19): siRNA sense strand
ucagaucaaggccuagaaa

SEQ ID NO: 1151395 - RNA, 19 nt, Homo sapiens
  misc_RNA (1)...(19): siRNA sense strand
guaggaaauaugacuggaa

SEQ ID NO: 1151396 - RNA, 19 nt, Homo sapiens
  misc_RNA (1)...(19): siRNA sense strand
cggcucccauucugguuaa

SEQ ID NO: 1151397 - RNA, 19 nt, Homo sapiens
  misc_RNA (1)...(19): siRNA sense strand
ccugacaacaucauuaaau

SEQ ID NO: 1151398 - RNA, 19 nt, Homo sapiens
  misc_RNA (1)...(19): siRNA sense strand
gcagcauguucagcucuug

SEQ ID NO: 1151399 - RNA, 19 nt, Homo sapiens
  misc_RNA (1)...(19): siRNA sense strand
uaucaaaccugccccuguu

SEQ ID NO: 1151400 - RNA, 19 nt, Homo sapiens
  misc_RNA (1)...(19): siRNA sense strand
caagcuucccucugucuga

SEQ ID NO: 1151401 - RNA, 19 nt, Homo sapiens
  misc_RNA (1)...(19): siRNA sense strand
gcugggaaccuuugcucaa

SEQ ID NO: 1151402 - RNA, 19 nt, Homo sapiens
  misc_RNA (1)...(19): siRNA sense strand
ugacagugagaaucaagaa

SEQ ID NO: 1151403 - RNA, 19 nt, Homo sapiens
  misc_RNA (1)...(19): siRNA sense strand
gaagaugauggcccagaag

SEQ ID NO: 1151404 - RNA, 19 nt, Homo sapiens
  misc_RNA (1)...(19): siRNA sense strand
gaaccucaacaugaacaga

SEQ ID NO: 1151405 - RNA, 19 nt, Homo sapiens
  misc_RNA (1)...(19): siRNA sense strand
ucauaaaacugucaagaag

SEQ ID NO: 1151406 - RNA, 19 nt, Homo sapiens
  misc_RNA (1)...(19): siRNA sense strand
gaaggagguagagaagguu

SEQ ID NO: 1151407 - RNA, 19 nt, Homo sapiens
  misc_RNA (1)...(19): siRNA sense strand
cuaaggguguaguccugaa

SEQ ID NO: 1151408 - RNA, 19 nt, Homo sapiens
  misc_RNA (1)...(19): siRNA sense strand
aaucaagaaccucaacaug

SEQ ID NO: 1151409 - RNA, 19 nt, Homo sapiens
  misc_RNA (1)...(19): siRNA sense strand
gcgaaggaacuauuugaac

SEQ ID NO: 1151410 - RNA, 19 nt, Homo sapiens
  misc_RNA (1)...(19): siRNA sense strand
ugucucacccuuaauuguu

SEQ ID NO: 1151411 - RNA, 19 nt, Homo sapiens
  misc_RNA (1)...(19): siRNA sense strand
gccuuucgcuguaucaaac

SEQ ID NO: 1151412 - RNA, 19 nt, Homo sapiens
  misc_RNA (1)...(19): siRNA sense strand
ggagacagaagcguucauc

SEQ ID NO: 1151413 - RNA, 19 nt, Homo sapiens
  misc_RNA (1)...(19): siRNA sense strand
guguaguccugaaacugaa

SEQ ID NO: 1151414 - RNA, 19 nt, Homo sapiens
  misc_RNA (1)...(19): siRNA sense strand
aucaagaaccucaacauga

SEQ ID NO: 1151415 - RNA, 19 nt, Homo sapiens
  misc_RNA (1)...(19): siRNA sense strand
gaaccacugagaucaacuc

SEQ ID NO: 1151416 - RNA, 19 nt, Homo sapiens
  misc_RNA (1)...(19): siRNA sense strand
ucgcuggaccguugugaaa

SEQ ID NO: 1151417 - RNA, 19 nt, Homo sapiens
  misc_RNA (1)...(19): siRNA sense strand
caaauuagagccccaggaa

SEQ ID NO: 1151418 - RNA, 19 nt, Homo sapiens
  misc_RNA (1)...(19): siRNA sense strand
ucaguggaggugagaguuu

SEQ ID NO: 1151419 - RNA, 19 nt, Homo sapiens
  misc_RNA (1)...(19): siRNA sense strand
caaaugagcugauggaaga

SEQ ID NO: 1151420 - RNA, 19 nt, Homo sapiens
  misc_RNA (1)...(19): siRNA sense strand
gaacagagcuccugacaac

SEQ ID NO: 1151421 - RNA, 19 nt, Homo sapiens
  misc_RNA (1)...(19): siRNA sense strand
caagaaggauugucagaga

SEQ ID NO: 1151422 - RNA, 19 nt, Homo sapiens
  misc_RNA (1)...(19): siRNA sense strand
ucaagaaccucaacaugaa

SEQ ID NO: 1151423 - RNA, 19 nt, Homo sapiens
  misc_RNA (1)...(19): siRNA sense strand
ccaaucaacucauucagaa

SEQ ID NO: 1151424 - RNA, 19 nt, Homo sapiens
  misc_RNA (1)...(19): siRNA sense strand
gcacacaugucagcauuga

SEQ ID NO: 1151425 - RNA, 19 nt, Homo sapiens
  misc_RNA (1)...(19): siRNA sense strand
guucagcucuugacacaaa

SEQ ID NO: 1151426 - RNA, 19 nt, Homo sapiens
  misc_RNA (1)...(19): siRNA sense strand
ggaacuaucuccucucucu

SEQ ID NO: 1151427 - RNA, 19 nt, Homo sapiens
  misc_RNA (1)...(19): siRNA sense strand
ggaagaugauggcccagaa

SEQ ID NO: 1151428 - RNA, 19 nt, Homo sapiens
  misc_RNA (1)...(19): siRNA sense strand
cgaaggaacuauuugaaca

SEQ ID NO: 1151429 - RNA, 19 nt, Homo sapiens
  misc_RNA (1)...(19): siRNA sense strand
gauggaagaucuguuugaa

SEQ ID NO: 1151430 - RNA, 19 nt, Homo sapiens
  misc_RNA (1)...(19): siRNA sense strand
gggccuagaacccaaauua

SEQ ID NO: 1151431 - RNA, 19 nt, Homo sapiens
  misc_RNA (1)...(19): siRNA sense strand
gaagccaccuauagagaga

SEQ ID NO: 1151432 - RNA, 19 nt, Homo sapiens
  misc_RNA (1)...(19): siRNA sense strand
gauaaacagugccaagaag

SEQ ID NO: 1151433 - RNA, 19 nt, Homo sapiens
  misc_RNA (1)...(19): siRNA sense strand
gaagagauccagccacauc

SEQ ID NO: 1151434 - RNA, 19 nt, Homo sapiens
  misc_RNA (1)...(19): siRNA sense strand
uuaaagagcugggaaccuu

SEQ ID NO: 1151435 - RNA, 19 nt, Homo sapiens
  misc_RNA (1)...(19): siRNA sense strand
ggaagcaaaugagcugaug

SEQ ID NO: 1151436 - RNA, 19 nt, Homo sapiens
  misc_RNA (1)...(19): siRNA sense strand
ggcgguggcuguaacauga

SEQ ID NO: 1151437 - RNA, 19 nt, Homo sapiens
  misc_RNA (1)...(19): siRNA sense strand
gcaccaggauaugucuuaa

SEQ ID NO: 1151438 - RNA, 19 nt, Homo sapiens
  misc_RNA (1)...(19): siRNA sense strand
cuagagagguaggaaauau

SEQ ID NO: 1151439 - RNA, 19 nt, Homo sapiens
  misc_RNA (1)...(19): siRNA sense strand
uugaacagcugaagaugaa

SEQ ID NO: 1151440 - RNA, 19 nt, Homo sapiens
  misc_RNA (1)...(19): siRNA sense strand
cagcacacaugucagcauu

SEQ ID NO: 1151441 - RNA, 19 nt, Homo sapiens
  misc_RNA (1)...(19): siRNA sense strand
gaacagcugaagaugaaga

SEQ ID NO: 1151442 - RNA, 19 nt, Homo sapiens
  misc_RNA (1)...(19): siRNA sense strand
acacaaauccaccuucuug

SEQ ID NO: 1151443 - RNA, 19 nt, Homo sapiens
  misc_RNA (1)...(19): siRNA sense strand
cuaugcagcugauugaaga

SEQ ID NO: 1151444 - RNA, 19 nt, Homo sapiens
  misc_RNA (1)...(19): siRNA sense strand
uagaggaaguugucaagau

SEQ ID NO: 1151445 - RNA, 19 nt, Homo sapiens
  misc_RNA (1)...(19): siRNA sense strand
ccggauuccucacccaaua

SEQ ID NO: 1151446 - RNA, 19 nt, Homo sapiens
  misc_RNA (1)...(19): siRNA sense strand
gcugauggaagaucuguuu

SEQ ID NO: 1151447 - RNA, 19 nt, Homo sapiens
  misc_RNA (1)...(19): siRNA sense strand
ucuguuaucuucacuguuc

SEQ ID NO: 1151448 - RNA, 19 nt, Homo sapiens
  misc_RNA (1)...(19): siRNA sense strand
uggccaaccuacuaaauga

SEQ ID NO: 1151449 - RNA, 19 nt, Homo sapiens
  misc_RNA (1)...(19): siRNA sense strand
gccagggccuuucgcugua

SEQ ID NO: 1151450 - RNA, 19 nt, Homo sapiens
  misc_RNA (1)...(19): siRNA sense strand
gaacaccggcucccauucu

SEQ ID NO: 1151451 - RNA, 19 nt, Homo sapiens
  misc_RNA (1)...(19): siRNA sense strand
agaggaaguugucaagaug

SEQ ID NO: 1151452 - RNA, 19 nt, Homo sapiens
  misc_RNA (1)...(19): siRNA sense strand
ggaaaaugcugugaagaga

SEQ ID NO: 1151453 - RNA, 19 nt, Homo sapiens
  misc_RNA (1)...(19): siRNA sense strand
gccaguagcaccaggauau

SEQ ID NO: 1151454 - RNA, 19 nt, Homo sapiens
  misc_RNA (1)...(19): siRNA sense strand
gaaaacaccagcccaauca

SEQ ID NO: 1151455 - RNA, 19 nt, Homo sapiens
  misc_RNA (1)...(19): siRNA sense strand
gguguaguccugaaacuga

SEQ ID NO: 1151456 - RNA, 19 nt, Homo sapiens
  misc_RNA (1)...(19): siRNA sense strand
gcuauugccuaagggugua

SEQ ID NO: 1151457 - RNA, 19 nt, Homo sapiens
  misc_RNA (1)...(19): siRNA sense strand
gagccucaagcuaacuuua

SEQ ID NO: 1151458 - RNA, 19 nt, Homo sapiens
  misc_RNA (1)...(19): siRNA sense strand
gacagaagcguucaucagu

SEQ ID NO: 1151459 - RNA, 19 nt, Homo sapiens
  misc_RNA (1)...(19): siRNA sense strand
gcuccugacaacaucauua

SEQ ID NO: 1151460 - RNA, 19 nt, Homo sapiens
  misc_RNA (1)...(19): siRNA sense strand
ccacugcuauugccuaagg

SEQ ID NO: 1151461 - RNA, 19 nt, Homo sapiens
  misc_RNA (1)...(19): siRNA sense strand
agaaggagguagagaaggu

SEQ ID NO: 1151462 - RNA, 19 nt, Homo sapiens
  misc_RNA (1)...(19): siRNA sense strand
ccaggagucucuaaacaac

SEQ ID NO: 1151463 - RNA, 19 nt, Homo sapiens
  misc_RNA (1)...(19): siRNA sense strand
ccucuuccauguuucgaaa

SEQ ID NO: 1151464 - RNA, 19 nt, Homo sapiens
  misc_RNA (1)...(19): siRNA sense strand
ucagauagcgaaggaacua

SEQ ID NO: 1151465 - RNA, 19 nt, Homo sapiens
  misc_RNA (1)...(19): siRNA sense strand
guuccaacccuguaacuug

SEQ ID NO: 1151466 - RNA, 19 nt, Homo sapiens
  misc_RNA (1)...(19): siRNA sense strand
ugacacaaauccaccuucu

SEQ ID NO: 1151467 - RNA, 19 nt, Homo sapiens
  misc_RNA (1)...(19): siRNA sense strand
gcagaaggagguagagaag

SEQ ID NO: 1151468 - RNA, 19 nt, Homo sapiens
  misc_RNA (1)...(19): siRNA sense strand
gaaggauugucagagaaca

SEQ ID NO: 1151469 - RNA, 19 nt, Homo sapiens
  misc_RNA (1)...(19): siRNA sense strand
ugauggugcuagagaggua

SEQ ID NO: 1151470 - RNA, 19 nt, Homo sapiens
  misc_RNA (1)...(19): siRNA sense strand
ggagguagagaagguuaaa

SEQ ID NO: 1151471 - RNA, 19 nt, Homo sapiens
  misc_RNA (1)...(19): siRNA sense strand
aggacaagcuucccucugu

SEQ ID NO: 1151472 - RNA, 19 nt, Homo sapiens
  misc_RNA (1)...(19): siRNA sense strand
aagaaggauugucagagaa

SEQ ID NO: 1151473 - RNA, 19 nt, Homo sapiens
  misc_RNA (1)...(19): siRNA sense strand
cgauaaacagugccaagaa

SEQ ID NO: 1151474 - RNA, 19 nt, Homo sapiens
  misc_RNA (1)...(19): siRNA sense strand
gcuagagagguaggaaaua

SEQ ID NO: 1151475 - RNA, 19 nt, Homo sapiens
  misc_RNA (1)...(19): siRNA sense strand
gccuagaacccaaauuaga

SEQ ID NO: 1151476 - RNA, 19 nt, Homo sapiens
  misc_RNA (1)...(19): siRNA sense strand
gaaucaagaaccucaacau

SEQ ID NO: 1151477 - RNA, 19 nt, Homo sapiens
  misc_RNA (1)...(19): siRNA sense strand
caucuguuaucuucacugu

SEQ ID NO: 1151478 - RNA, 19 nt, Homo sapiens
  misc_RNA (1)...(19): siRNA sense strand
ccuacuaaaugaacaacau

SEQ ID NO: 1151479 - RNA, 19 nt, Homo sapiens
  misc_RNA (1)...(19): siRNA sense strand
agagagguaggaaauauga

SEQ ID NO: 1151480 - RNA, 19 nt, Homo sapiens
  misc_RNA (1)...(19): siRNA sense strand
ugacugcagcccucauaaa

SEQ ID NO: 1151481 - RNA, 19 nt, Homo sapiens
  misc_RNA (1)...(19): siRNA sense strand
ggaacuacuggccaaccua

SEQ ID NO: 1151482 - RNA, 19 nt, Homo sapiens
  misc_RNA (1)...(19): siRNA sense strand
gaugggauucuccaacaug

SEQ ID NO: 1151483 - RNA, 19 nt, Homo sapiens
  misc_RNA (1)...(19): siRNA sense strand
ggaaauaugacuggaacca

SEQ ID NO: 1151484 - RNA, 19 nt, Homo sapiens
  misc_RNA (1)...(19): siRNA sense strand
ccagcccaaucaacucauu

SEQ ID NO: 1151485 - RNA, 19 nt, Homo sapiens
  misc_RNA (1)...(19): siRNA sense strand
ggauuuagaggaaguuguc

SEQ ID NO: 1151486 - RNA, 19 nt, Homo sapiens
  misc_RNA (1)...(19): siRNA sense strand
cuaaaugaacaacaucaga

SEQ ID NO: 1151487 - RNA, 19 nt, Homo sapiens
  misc_RNA (1)...(19): siRNA sense strand
gucucacccuuaauuguuu

SEQ ID NO: 1151488 - RNA, 19 nt, Homo sapiens
  misc_RNA (1)...(19): siRNA sense strand
cuaccacugugaagauugu

SEQ ID NO: 1151489 - RNA, 19 nt, Homo sapiens
  misc_RNA (1)...(19): siRNA sense strand
uuccaacccuguaacuuga

SEQ ID NO: 1151490 - RNA, 19 nt, Homo sapiens
  misc_RNA (1)...(19): siRNA sense strand
uauccacccugcaucuguu

SEQ ID NO: 1151491 - RNA, 19 nt, Homo sapiens
  misc_RNA (1)...(19): siRNA sense strand
aagaaggcuuggagacaga

SEQ ID NO: 1151492 - RNA, 19 nt, Homo sapiens
  misc_RNA (1)...(19): siRNA sense strand
uaacaccccucaagcucua

SEQ ID NO: 1151493 - RNA, 19 nt, Homo sapiens
  misc_RNA (1)...(19): siRNA sense strand
uagcgaaggaacuauuuga

SEQ ID NO: 1151494 - RNA, 19 nt, Homo sapiens
  misc_RNA (1)...(19): siRNA sense strand
gaaggaacuauuugaacag

SEQ ID NO: 1151495 - RNA, 19 nt, Homo sapiens
  misc_RNA (1)...(19): siRNA sense strand
guaacuugaugggagcuau

SEQ ID NO: 1151496 - RNA, 19 nt, Homo sapiens
  misc_RNA (1)...(19): siRNA sense strand
ccaucgcccuucaccauca

SEQ ID NO: 1151497 - RNA, 19 nt, Homo sapiens
  misc_RNA (1)...(19): siRNA sense strand
uaaacagugccaagaagga

SEQ ID NO: 1151498 - RNA, 19 nt, Homo sapiens
  misc_RNA (1)...(19): siRNA sense strand
cuacuggccaaccuacuaa

SEQ ID NO: 1151499 - RNA, 19 nt, Homo sapiens
  misc_RNA (1)...(19): siRNA sense strand
ucagaucaaggccuagaaa

SEQ ID NO: 1151500 - RNA, 19 nt, Homo sapiens
  misc_RNA (1)...(19): siRNA sense strand
guaggaaauaugacuggaa

SEQ ID NO: 1151501 - RNA, 19 nt, Homo sapiens
  misc_RNA (1)...(19): siRNA sense strand
cggcucccauucugguuaa

SEQ ID NO: 1151502 - RNA, 19 nt, Homo sapiens
  misc_RNA (1)...(19): siRNA sense strand
ccugacaacaucauuaaau

SEQ ID NO: 1151503 - RNA, 19 nt, Homo sapiens
  misc_RNA (1)...(19): siRNA sense strand
gcagcauguucagcucuug

SEQ ID NO: 1151504 - RNA, 19 nt, Homo sapiens
  misc_RNA (1)...(19): siRNA sense strand
uaucaaaccugccccuguu

SEQ ID NO: 1151505 - RNA, 19 nt, Homo sapiens
  misc_RNA (1)...(19): siRNA sense strand
caagcuucccucugucuga

SEQ ID NO: 1151506 - RNA, 19 nt, Homo sapiens
  misc_RNA (1)...(19): siRNA sense strand
gcugggaaccuuugcucaa

SEQ ID NO: 1151507 - RNA, 19 nt, Homo sapiens
  misc_RNA (1)...(19): siRNA sense strand
gaagaugauggcccagaag

SEQ ID NO: 1151508 - RNA, 19 nt, Homo sapiens
  misc_RNA (1)...(19): siRNA sense strand
gaaccucaacaugaacaga

SEQ ID NO: 1151509 - RNA, 19 nt, Homo sapiens
  misc_RNA (1)...(19): siRNA sense strand
ugacagugagaaucaagaa

SEQ ID NO: 1151510 - RNA, 19 nt, Homo sapiens
  misc_RNA (1)...(19): siRNA sense strand
gaaggagguagagaagguu

SEQ ID NO: 1151511 - RNA, 19 nt, Homo sapiens
  misc_RNA (1)...(19): siRNA sense strand
cuaaggguguaguccugaa

SEQ ID NO: 1151512 - RNA, 19 nt, Homo sapiens
  misc_RNA (1)...(19): siRNA sense strand
ucauaaaacugucaagaag

SEQ ID NO: 1151513 - RNA, 19 nt, Homo sapiens
  misc_RNA (1)...(19): siRNA sense strand
aucaagaaccucaacauga

SEQ ID NO: 1151514 - RNA, 19 nt, Homo sapiens
  misc_RNA (1)...(19): siRNA sense strand
ugucucacccuuaauuguu

SEQ ID NO: 1151515 - RNA, 19 nt, Homo sapiens
  misc_RNA (1)...(19): siRNA sense strand
gccuuucgcuguaucaaac

SEQ ID NO: 1151516 - RNA, 19 nt, Homo sapiens
  misc_RNA (1)...(19): siRNA sense strand
ggagacagaagcguucauc

SEQ ID NO: 1151517 - RNA, 19 nt, Homo sapiens
  misc_RNA (1)...(19): siRNA sense strand
gcgaaggaacuauuugaac

SEQ ID NO: 1151518 - RNA, 19 nt, Homo sapiens
  misc_RNA (1)...(19): siRNA sense strand
guguaguccugaaacugaa

SEQ ID NO: 1151519 - RNA, 19 nt, Homo sapiens
  misc_RNA (1)...(19): siRNA sense strand
gaacagagcuccugacaac

SEQ ID NO: 1151520 - RNA, 19 nt, Homo sapiens
  misc_RNA (1)...(19): siRNA sense strand
caagaaggauugucagaga

SEQ ID NO: 1151521 - RNA, 19 nt, Homo sapiens
  misc_RNA (1)...(19): siRNA sense strand
ucaagaaccucaacaugaa

SEQ ID NO: 1151522 - RNA, 19 nt, Homo sapiens
  misc_RNA (1)...(19): siRNA sense strand
ccaaucaacucauucagaa

SEQ ID NO: 1151523 - RNA, 19 nt, Homo sapiens
  misc_RNA (1)...(19): siRNA sense strand
gcacacaugucagcauuga

SEQ ID NO: 1151524 - RNA, 19 nt, Homo sapiens
  misc_RNA (1)...(19): siRNA sense strand
guucagcucuugacacaaa

SEQ ID NO: 1151525 - RNA, 19 nt, Homo sapiens
  misc_RNA (1)...(19): siRNA sense strand
ggaacuaucuccucucucu

SEQ ID NO: 1151526 - RNA, 19 nt, Homo sapiens
  misc_RNA (1)...(19): siRNA sense strand
ggaagaugauggcccagaa

SEQ ID NO: 1151527 - RNA, 19 nt, Homo sapiens
  misc_RNA (1)...(19): siRNA sense strand
cgaaggaacuauuugaaca

SEQ ID NO: 1151528 - RNA, 19 nt, Homo sapiens
  misc_RNA (1)...(19): siRNA sense strand
gggccuagaacccaaauua

SEQ ID NO: 1151529 - RNA, 19 nt, Homo sapiens
  misc_RNA (1)...(19): siRNA sense strand
gaagccaccuauagagaga

SEQ ID NO: 1151530 - RNA, 19 nt, Homo sapiens
  misc_RNA (1)...(19): siRNA sense strand
gauaaacagugccaagaag

SEQ ID NO: 1151531 - RNA, 19 nt, Homo sapiens
  misc_RNA (1)...(19): siRNA sense strand
gaagagauccagccacauc

SEQ ID NO: 1151532 - RNA, 19 nt, Homo sapiens
  misc_RNA (1)...(19): siRNA sense strand
uuaaagagcugggaaccuu

SEQ ID NO: 1151533 - RNA, 19 nt, Homo sapiens
  misc_RNA (1)...(19): siRNA sense strand
ggcgguggcuguaacauga

SEQ ID NO: 1151534 - RNA, 19 nt, Homo sapiens
  misc_RNA (1)...(19): siRNA sense strand
gcaccaggauaugucuuaa

SEQ ID NO: 1151535 - RNA, 19 nt, Homo sapiens
  misc_RNA (1)...(19): siRNA sense strand
cuagagagguaggaaauau

SEQ ID NO: 1151536 - RNA, 19 nt, Homo sapiens
  misc_RNA (1)...(19): siRNA sense strand
uugaacagcugaagaugaa

SEQ ID NO: 1151537 - RNA, 19 nt, Homo sapiens
  misc_RNA (1)...(19): siRNA sense strand
cagcacacaugucagcauu

SEQ ID NO: 1151538 - RNA, 19 nt, Homo sapiens
  misc_RNA (1)...(19): siRNA sense strand
gaacagcugaagaugaaga

SEQ ID NO: 1151539 - RNA, 19 nt, Homo sapiens
  misc_RNA (1)...(19): siRNA sense strand
acacaaauccaccuucuug

SEQ ID NO: 1151540 - RNA, 19 nt, Homo sapiens
  misc_RNA (1)...(19): siRNA sense strand
cuaugcagcugauugaaga

SEQ ID NO: 1151541 - RNA, 19 nt, Homo sapiens
  misc_RNA (1)...(19): siRNA sense strand
uagaggaaguugucaagau

SEQ ID NO: 1151542 - RNA, 19 nt, Homo sapiens
  misc_RNA (1)...(19): siRNA sense strand
ccggauuccucacccaaua

SEQ ID NO: 1151543 - RNA, 19 nt, Homo sapiens
  misc_RNA (1)...(19): siRNA sense strand
ucuguuaucuucacuguuc

SEQ ID NO: 1151544 - RNA, 19 nt, Homo sapiens
  misc_RNA (1)...(19): siRNA sense strand
uggccaaccuacuaaauga

SEQ ID NO: 1151545 - RNA, 19 nt, Homo sapiens
  misc_RNA (1)...(19): siRNA sense strand
gccagggccuuucgcugua

SEQ ID NO: 1151546 - RNA, 19 nt, Homo sapiens
  misc_RNA (1)...(19): siRNA sense strand
gaacaccggcucccauucu

SEQ ID NO: 1151547 - RNA, 19 nt, Homo sapiens
  misc_RNA (1)...(19): siRNA sense strand
agaggaaguugucaagaug

SEQ ID NO: 1151548 - RNA, 19 nt, Homo sapiens
  misc_RNA (1)...(19): siRNA sense strand
ggaaaaugcugugaagaga

SEQ ID NO: 1151549 - RNA, 19 nt, Homo sapiens
  misc_RNA (1)...(19): siRNA sense strand
gccaguagcaccaggauau

SEQ ID NO: 1151550 - RNA, 19 nt, Homo sapiens
  misc_RNA (1)...(19): siRNA sense strand
gaaaacaccagcccaauca

SEQ ID NO: 1151551 - RNA, 19 nt, Homo sapiens
  misc_RNA (1)...(19): siRNA sense strand
gguguaguccugaaacuga

SEQ ID NO: 1151552 - RNA, 19 nt, Homo sapiens
  misc_RNA (1)...(19): siRNA sense strand
gcuauugccuaagggugua

SEQ ID NO: 1151553 - RNA, 19 nt, Homo sapiens
  misc_RNA (1)...(19): siRNA sense strand
gagccucaagcuaacuuua

SEQ ID NO: 1151554 - RNA, 19 nt, Homo sapiens
  misc_RNA (1)...(19): siRNA sense strand
gacagaagcguucaucagu

SEQ ID NO: 1151555 - RNA, 19 nt, Homo sapiens
  misc_RNA (1)...(19): siRNA sense strand
gcuccugacaacaucauua

SEQ ID NO: 1151556 - RNA, 19 nt, Homo sapiens
  misc_RNA (1)...(19): siRNA sense strand
ccacugcuauugccuaagg

SEQ ID NO: 1151557 - RNA, 19 nt, Homo sapiens
  misc_RNA (1)...(19): siRNA sense strand
agaaggagguagagaaggu

SEQ ID NO: 1151558 - RNA, 19 nt, Homo sapiens
  misc_RNA (1)...(19): siRNA sense strand
ccaggagucucuaaacaac

SEQ ID NO: 1151559 - RNA, 19 nt, Homo sapiens
  misc_RNA (1)...(19): siRNA sense strand
ccucuuccauguuucgaaa

SEQ ID NO: 1151560 - RNA, 19 nt, Homo sapiens
  misc_RNA (1)...(19): siRNA sense strand
ucagauagcgaaggaacua

SEQ ID NO: 1151561 - RNA, 19 nt, Homo sapiens
  misc_RNA (1)...(19): siRNA sense strand
guuccaacccuguaacuug

SEQ ID NO: 1151562 - RNA, 19 nt, Homo sapiens
  misc_RNA (1)...(19): siRNA sense strand
ugacacaaauccaccuucu

SEQ ID NO: 1151563 - RNA, 19 nt, Homo sapiens
  misc_RNA (1)...(19): siRNA sense strand
gcagaaggagguagagaag

SEQ ID NO: 1151564 - RNA, 19 nt, Homo sapiens
  misc_RNA (1)...(19): siRNA sense strand
gaaggauugucagagaaca

SEQ ID NO: 1151565 - RNA, 19 nt, Homo sapiens
  misc_RNA (1)...(19): siRNA sense strand
ugauggugcuagagaggua

SEQ ID NO: 1151566 - RNA, 19 nt, Homo sapiens
  misc_RNA (1)...(19): siRNA sense strand
ggagguagagaagguuaaa

SEQ ID NO: 1151567 - RNA, 19 nt, Homo sapiens
  misc_RNA (1)...(19): siRNA sense strand
aggacaagcuucccucugu

SEQ ID NO: 1151568 - RNA, 19 nt, Homo sapiens
  misc_RNA (1)...(19): siRNA sense strand
aagaaggauugucagagaa

SEQ ID NO: 1151569 - RNA, 19 nt, Homo sapiens
  misc_RNA (1)...(19): siRNA sense strand
cgauaaacagugccaagaa

SEQ ID NO: 1151570 - RNA, 19 nt, Homo sapiens
  misc_RNA (1)...(19): siRNA sense strand
gcuagagagguaggaaaua

SEQ ID NO: 1151571 - RNA, 19 nt, Homo sapiens
  misc_RNA (1)...(19): siRNA sense strand
gccuagaacccaaauuaga

SEQ ID NO: 1151572 - RNA, 19 nt, Homo sapiens
  misc_RNA (1)...(19): siRNA sense strand
gaaucaagaaccucaacau

SEQ ID NO: 1151573 - RNA, 19 nt, Homo sapiens
  misc_RNA (1)...(19): siRNA sense strand
caucuguuaucuucacugu

SEQ ID NO: 1151574 - RNA, 19 nt, Homo sapiens
  misc_RNA (1)...(19): siRNA sense strand
ggaacuacuggccaaccua

SEQ ID NO: 1151575 - RNA, 19 nt, Homo sapiens
  misc_RNA (1)...(19): siRNA sense strand
ccuacuaaaugaacaacau

SEQ ID NO: 1151576 - RNA, 19 nt, Homo sapiens
  misc_RNA (1)...(19): siRNA sense strand
agagagguaggaaauauga

SEQ ID NO: 1151577 - RNA, 19 nt, Homo sapiens
  misc_RNA (1)...(19): siRNA sense strand
ugacugcagcccucauaaa

SEQ ID NO: 1151578 - RNA, 19 nt, Homo sapiens
  misc_RNA (1)...(19): siRNA sense strand
gaugggauucuccaacaug

SEQ ID NO: 1151579 - RNA, 19 nt, Homo sapiens
  misc_RNA (1)...(19): siRNA sense strand
ggaaauaugacuggaacca

SEQ ID NO: 1151580 - RNA, 19 nt, Homo sapiens
  misc_RNA (1)...(19): siRNA sense strand
cuaaaugaacaacaucaga

SEQ ID NO: 1151581 - RNA, 19 nt, Homo sapiens
  misc_RNA (1)...(19): siRNA sense strand
ggauuuagaggaaguuguc

SEQ ID NO: 1151582 - RNA, 19 nt, Homo sapiens
  misc_RNA (1)...(19): siRNA sense strand
gucucacccuuaauuguuu

SEQ ID NO: 1151583 - RNA, 19 nt, Homo sapiens
  misc_RNA (1)...(19): siRNA sense strand
cuaccacugugaagauugu

SEQ ID NO: 1151584 - RNA, 19 nt, Homo sapiens
  misc_RNA (1)...(19): siRNA sense strand
ccagcccaaucaacucauu

SEQ ID NO: 1151585 - RNA, 19 nt, Homo sapiens
  misc_RNA (1)...(19): siRNA sense strand
uuccaacccuguaacuuga

SEQ ID NO: 1151586 - RNA, 19 nt, Homo sapiens
  misc_RNA (1)...(19): siRNA sense strand
uagcgaaggaacuauuuga

SEQ ID NO: 1151587 - RNA, 19 nt, Homo sapiens
  misc_RNA (1)...(19): siRNA sense strand
gaaggaacuauuugaacag

SEQ ID NO: 1151588 - RNA, 19 nt, Homo sapiens
  misc_RNA (1)...(19): siRNA sense strand
uauccacccugcaucuguu

SEQ ID NO: 1151589 - RNA, 19 nt, Homo sapiens
  misc_RNA (1)...(19): siRNA sense strand
aagaaggcuuggagacaga

SEQ ID NO: 1151590 - RNA, 19 nt, Homo sapiens
  misc_RNA (1)...(19): siRNA sense strand
uaacaccccucaagcucua

SEQ ID NO: 1151591 - RNA, 19 nt, Homo sapiens
  misc_RNA (1)...(19): siRNA sense strand
guaacuugaugggagcuau

SEQ ID NO: 1151592 - RNA, 19 nt, Homo sapiens
  misc_RNA (1)...(19): siRNA sense strand
ccaucgcccuucaccauca

SEQ ID NO: 1151593 - RNA, 19 nt, Homo sapiens
  misc_RNA (1)...(19): siRNA sense strand
uaaacagugccaagaagga

SEQ ID NO: 1151594 - RNA, 19 nt, Homo sapiens
  misc_RNA (1)...(19): siRNA sense strand
ucagaucaaggccuagaaa

SEQ ID NO: 1151595 - RNA, 19 nt, Homo sapiens
  misc_RNA (1)...(19): siRNA sense strand
guaggaaauaugacuggaa

SEQ ID NO: 1151596 - RNA, 19 nt, Homo sapiens
  misc_RNA (1)...(19): siRNA sense strand
cggcucccauucugguuaa

SEQ ID NO: 1151597 - RNA, 19 nt, Homo sapiens
  misc_RNA (1)...(19): siRNA sense strand
ccugacaacaucauuaaau

SEQ ID NO: 1151598 - RNA, 19 nt, Homo sapiens
  misc_RNA (1)...(19): siRNA sense strand
cuacuggccaaccuacuaa

SEQ ID NO: 1151599 - RNA, 19 nt, Homo sapiens
  misc_RNA (1)...(19): siRNA sense strand
gcagcauguucagcucuug

SEQ ID NO: 1151600 - RNA, 19 nt, Homo sapiens
  misc_RNA (1)...(19): siRNA sense strand
uaucaaaccugccccuguu

SEQ ID NO: 1151601 - RNA, 19 nt, Homo sapiens
  misc_RNA (1)...(19): siRNA sense strand
caagcuucccucugucuga

SEQ ID NO: 1151602 - RNA, 19 nt, Homo sapiens
  misc_RNA (1)...(19): siRNA sense strand
gcugggaaccuuugcucaa

SEQ ID NO: 1151603 - RNA, 19 nt, Homo sapiens
  misc_RNA (1)...(19): siRNA sense strand
ugacagugagaaucaagaa

SEQ ID NO: 1151604 - RNA, 19 nt, Homo sapiens
  misc_RNA (1)...(19): siRNA sense strand
gaagaugauggcccagaag

SEQ ID NO: 1151605 - RNA, 19 nt, Homo sapiens
  misc_RNA (1)...(19): siRNA sense strand
gaaccucaacaugaacaga

SEQ ID NO: 1151606 - RNA, 19 nt, Homo sapiens
  misc_RNA (1)...(19): siRNA sense strand
ucauaaaacugucaagaag

SEQ ID NO: 1151607 - RNA, 19 nt, Homo sapiens
  misc_RNA (1)...(19): siRNA sense strand
cuaaggguguaguccugaa

SEQ ID NO: 1151608 - RNA, 19 nt, Homo sapiens
  misc_RNA (1)...(19): siRNA sense strand
gaaggagguagagaagguu

SEQ ID NO: 1151609 - RNA, 19 nt, Homo sapiens
  misc_RNA (1)...(19): siRNA sense strand
aaucaagaaccucaacaug

SEQ ID NO: 1151610 - RNA, 19 nt, Homo sapiens
  misc_RNA (1)...(19): siRNA sense strand
ugucucacccuuaauuguu

SEQ ID NO: 1151611 - RNA, 19 nt, Homo sapiens
  misc_RNA (1)...(19): siRNA sense strand
gcgaaggaacuauuugaac

SEQ ID NO: 1151612 - RNA, 19 nt, Homo sapiens
  misc_RNA (1)...(19): siRNA sense strand
gccuuucgcuguaucaaac

SEQ ID NO: 1151613 - RNA, 19 nt, Homo sapiens
  misc_RNA (1)...(19): siRNA sense strand
ggagacagaagcguucauc

SEQ ID NO: 1151614 - RNA, 19 nt, Homo sapiens
  misc_RNA (1)...(19): siRNA sense strand
guguaguccugaaacugaa

SEQ ID NO: 1151615 - RNA, 19 nt, Homo sapiens
  misc_RNA (1)...(19): siRNA sense strand
aucaagaaccucaacauga

SEQ ID NO: 1151616 - RNA, 19 nt, Homo sapiens
  misc_RNA (1)...(19): siRNA sense strand
ucaguggaggugagaguuu

SEQ ID NO: 1151617 - RNA, 19 nt, Homo sapiens
  misc_RNA (1)...(19): siRNA sense strand
ucgcuggaccguugugaaa

SEQ ID NO: 1151618 - RNA, 19 nt, Homo sapiens
  misc_RNA (1)...(19): siRNA sense strand
caaauuagagccccaggaa

SEQ ID NO: 1151619 - RNA, 19 nt, Homo sapiens
  misc_RNA (1)...(19): siRNA sense strand
gaacagagcuccugacaac

SEQ ID NO: 1151620 - RNA, 19 nt, Homo sapiens
  misc_RNA (1)...(19): siRNA sense strand
caagaaggauugucagaga

SEQ ID NO: 1151621 - RNA, 19 nt, Homo sapiens
  misc_RNA (1)...(19): siRNA sense strand
ccaaucaacucauucagaa

SEQ ID NO: 1151622 - RNA, 19 nt, Homo sapiens
  misc_RNA (1)...(19): siRNA sense strand
ggaacuaucuccucucucu

SEQ ID NO: 1151623 - RNA, 19 nt, Homo sapiens
  misc_RNA (1)...(19): siRNA sense strand
gggccuagaacccaaauua

SEQ ID NO: 1151624 - RNA, 19 nt, Homo sapiens
  misc_RNA (1)...(19): siRNA sense strand
gaagccaccuauagagaga

SEQ ID NO: 1151625 - RNA, 19 nt, Homo sapiens
  misc_RNA (1)...(19): siRNA sense strand
gauaaacagugccaagaag

SEQ ID NO: 1151626 - RNA, 19 nt, Homo sapiens
  misc_RNA (1)...(19): siRNA sense strand
gaagagauccagccacauc

SEQ ID NO: 1151627 - RNA, 19 nt, Homo sapiens
  misc_RNA (1)...(19): siRNA sense strand
ggcgguggcuguaacauga

SEQ ID NO: 1151628 - RNA, 19 nt, Homo sapiens
  misc_RNA (1)...(19): siRNA sense strand
cuagagagguaggaaauau

SEQ ID NO: 1151629 - RNA, 19 nt, Homo sapiens
  misc_RNA (1)...(19): siRNA sense strand
ccggauuccucacccaaua

SEQ ID NO: 1151630 - RNA, 19 nt, Homo sapiens
  misc_RNA (1)...(19): siRNA sense strand
uagaggaaguugucaagau

SEQ ID NO: 1151631 - RNA, 19 nt, Homo sapiens
  misc_RNA (1)...(19): siRNA sense strand
ucuguuaucuucacuguuc

SEQ ID NO: 1151632 - RNA, 19 nt, Homo sapiens
  misc_RNA (1)...(19): siRNA sense strand
gccagggccuuucgcugua

SEQ ID NO: 1151633 - RNA, 19 nt, Homo sapiens
  misc_RNA (1)...(19): siRNA sense strand
gaacaccggcucccauucu

SEQ ID NO: 1151634 - RNA, 19 nt, Homo sapiens
  misc_RNA (1)...(19): siRNA sense strand
agaggaaguugucaagaug

SEQ ID NO: 1151635 - RNA, 19 nt, Homo sapiens
  misc_RNA (1)...(19): siRNA sense strand
ggaaaaugcugugaagaga

SEQ ID NO: 1151636 - RNA, 19 nt, Homo sapiens
  misc_RNA (1)...(19): siRNA sense strand
gguguaguccugaaacuga

SEQ ID NO: 1151637 - RNA, 19 nt, Homo sapiens
  misc_RNA (1)...(19): siRNA sense strand
gaaaacaccagcccaauca

SEQ ID NO: 1151638 - RNA, 19 nt, Homo sapiens
  misc_RNA (1)...(19): siRNA sense strand
gcuauugccuaagggugua

SEQ ID NO: 1151639 - RNA, 19 nt, Homo sapiens
  misc_RNA (1)...(19): siRNA sense strand
gacagaagcguucaucagu

SEQ ID NO: 1151640 - RNA, 19 nt, Homo sapiens
  misc_RNA (1)...(19): siRNA sense strand
gcuccugacaacaucauua

SEQ ID NO: 1151641 - RNA, 19 nt, Homo sapiens
  misc_RNA (1)...(19): siRNA sense strand
ccacugcuauugccuaagg

SEQ ID NO: 1151642 - RNA, 19 nt, Homo sapiens
  misc_RNA (1)...(19): siRNA sense strand
ccucuuccauguuucgaaa

SEQ ID NO: 1151643 - RNA, 19 nt, Homo sapiens
  misc_RNA (1)...(19): siRNA sense strand
ccaggagucucuaaacaac

SEQ ID NO: 1151644 - RNA, 19 nt, Homo sapiens
  misc_RNA (1)...(19): siRNA sense strand
ugauggugcuagagaggua

SEQ ID NO: 1151645 - RNA, 19 nt, Homo sapiens
  misc_RNA (1)...(19): siRNA sense strand
gaaggauugucagagaaca

SEQ ID NO: 1151646 - RNA, 19 nt, Homo sapiens
  misc_RNA (1)...(19): siRNA sense strand
aggacaagcuucccucugu

SEQ ID NO: 1151647 - RNA, 19 nt, Homo sapiens
  misc_RNA (1)...(19): siRNA sense strand
aagaaggauugucagagaa

SEQ ID NO: 1151648 - RNA, 19 nt, Homo sapiens
  misc_RNA (1)...(19): siRNA sense strand
cgauaaacagugccaagaa

SEQ ID NO: 1151649 - RNA, 19 nt, Homo sapiens
  misc_RNA (1)...(19): siRNA sense strand
gcuagagagguaggaaaua

SEQ ID NO: 1151650 - RNA, 19 nt, Homo sapiens
  misc_RNA (1)...(19): siRNA sense strand
gccuagaacccaaauuaga

SEQ ID NO: 1151651 - RNA, 19 nt, Homo sapiens
  misc_RNA (1)...(19): siRNA sense strand
caucuguuaucuucacugu

SEQ ID NO: 1151652 - RNA, 19 nt, Homo sapiens
  misc_RNA (1)...(19): siRNA sense strand
agagagguaggaaauauga

SEQ ID NO: 1151653 - RNA, 19 nt, Homo sapiens
  misc_RNA (1)...(19): siRNA sense strand
ggaaauaugacuggaacca

SEQ ID NO: 1151654 - RNA, 19 nt, Homo sapiens
  misc_RNA (1)...(19): siRNA sense strand
ccagcccaaucaacucauu

SEQ ID NO: 1151655 - RNA, 19 nt, Homo sapiens
  misc_RNA (1)...(19): siRNA sense strand
ggauuuagaggaaguuguc

SEQ ID NO: 1151656 - RNA, 19 nt, Homo sapiens
  misc_RNA (1)...(19): siRNA sense strand
gucucacccuuaauuguuu

SEQ ID NO: 1151657 - RNA, 19 nt, Homo sapiens
  misc_RNA (1)...(19): siRNA sense strand
cuaccacugugaagauugu

SEQ ID NO: 1151658 - RNA, 19 nt, Homo sapiens
  misc_RNA (1)...(19): siRNA sense strand
aagaaggcuuggagacaga

SEQ ID NO: 1151659 - RNA, 19 nt, Homo sapiens
  misc_RNA (1)...(19): siRNA sense strand
uauccacccugcaucuguu

SEQ ID NO: 1151660 - RNA, 19 nt, Homo sapiens
  misc_RNA (1)...(19): siRNA sense strand
cggcucccauucugguuaa

SEQ ID NO: 1151661 - RNA, 19 nt, Homo sapiens
  misc_RNA (1)...(19): siRNA sense strand
ccugacaacaucauuaaau

SEQ ID NO: 1151662 - RNA, 19 nt, Homo sapiens
  misc_RNA (1)...(19): siRNA sense strand
uaaacagugccaagaagga

SEQ ID NO: 1151663 - RNA, 19 nt, Homo sapiens
  misc_RNA (1)...(19): siRNA sense strand
ucagaucaaggccuagaaa

SEQ ID NO: 1151664 - RNA, 19 nt, Homo sapiens
  misc_RNA (1)...(19): siRNA sense strand
guaggaaauaugacuggaa

SEQ ID NO: 1151665 - RNA, 19 nt, Homo sapiens
  misc_RNA (1)...(19): siRNA sense strand
caagcuucccucugucuga

SEQ ID NO: 1151666 - RNA, 19 nt, Homo sapiens
  misc_RNA (1)...(19): siRNA sense strand
uaucaaaccugccccuguu

SEQ ID NO: 1151667 - RNA, 19 nt, Homo sapiens
  misc_RNA (1)...(19): siRNA sense strand
cuaaggguguaguccugaa

SEQ ID NO: 1151668 - RNA, 19 nt, Homo sapiens
  misc_RNA (1)...(19): siRNA sense strand
guguaguccugaaacugaa

SEQ ID NO: 1151669 - RNA, 19 nt, Homo sapiens
  misc_RNA (1)...(19): siRNA sense strand
ugucucacccuuaauuguu

SEQ ID NO: 1151670 - RNA, 19 nt, Homo sapiens
  misc_RNA (1)...(19): siRNA sense strand
gccuuucgcuguaucaaac

SEQ ID NO: 1151671 - RNA, 19 nt, Homo sapiens
  misc_RNA (1)...(19): siRNA sense strand
ggagacagaagcguucauc

SEQ ID NO: 1151672 - RNA, 19 nt, Homo sapiens
  misc_RNA (1)...(19): siRNA sense strand
ugccauccauccaggaaga

SEQ ID NO: 1151673 - RNA, 19 nt, Homo sapiens
  misc_RNA (1)...(19): siRNA sense strand
ucgcuggaccguugugaaa

SEQ ID NO: 1151674 - RNA, 19 nt, Homo sapiens
  misc_RNA (1)...(19): siRNA sense strand
caaauuagagccccaggaa

SEQ ID NO: 1151675 - RNA, 19 nt, Homo sapiens
  misc_RNA (1)...(19): siRNA sense strand
ucaguggaggugagaguuu

SEQ ID NO: 1151676 - RNA, 19 nt, Homo sapiens
  misc_RNA (1)...(19): siRNA sense strand
gaaccacugagaucaacuc

SEQ ID NO: 1151677 - RNA, 19 nt, Homo sapiens
  misc_RNA (1)...(19): siRNA sense strand
ucgaaagccauaugugaga

SEQ ID NO: 1151678 - RNA, 19 nt, Homo sapiens
  misc_RNA (1)...(19): siRNA sense strand
ggaagaacugcggcacaug

SEQ ID NO: 1151679 - RNA, 19 nt, Homo sapiens
  misc_RNA (1)...(19): siRNA sense strand
gccaagaaggauugucaga

SEQ ID NO: 1151680 - RNA, 19 nt, Homo sapiens
  misc_RNA (1)...(19): siRNA sense strand
cagagcuccugacaacauc

SEQ ID NO: 1151681 - RNA, 19 nt, Homo sapiens
  misc_RNA (1)...(19): siRNA sense strand
uuucgaaagccauauguga

SEQ ID NO: 1151682 - RNA, 19 nt, Homo sapiens
  misc_RNA (1)...(19): siRNA sense strand
cagcuucaacccugggaaa

SEQ ID NO: 1151683 - RNA, 19 nt, Homo sapiens
  misc_RNA (1)...(19): siRNA sense strand
acagagcuccugacaacau

SEQ ID NO: 1151684 - RNA, 19 nt, Homo sapiens
  misc_RNA (1)...(19): siRNA sense strand
gcauccaggagucucuaaa

SEQ ID NO: 1151685 - RNA, 19 nt, Homo sapiens
  misc_RNA (1)...(19): siRNA sense strand
gagacagaagcguucauca

SEQ ID NO: 1151686 - RNA, 19 nt, Homo sapiens
  misc_RNA (1)...(19): siRNA sense strand
ggccuccaccagucgauaa

SEQ ID NO: 1151687 - RNA, 19 nt, Homo sapiens
  misc_RNA (1)...(19): siRNA sense strand
ccuagaacccaaauuagag

SEQ ID NO: 1151688 - RNA, 19 nt, Homo sapiens
  misc_RNA (1)...(19): siRNA sense strand
aagaacaccggcucccauu

SEQ ID NO: 1151689 - RNA, 19 nt, Homo sapiens
  misc_RNA (1)...(19): siRNA sense strand
gugccaagaaggauuguca

SEQ ID NO: 1151690 - RNA, 19 nt, Homo sapiens
  misc_RNA (1)...(19): siRNA sense strand
ccagggccuuucgcuguau

SEQ ID NO: 1151691 - RNA, 19 nt, Homo sapiens
  misc_RNA (1)...(19): siRNA sense strand
ggaaaacaccagcccaauc

SEQ ID NO: 1151692 - RNA, 19 nt, Homo sapiens
  misc_RNA (1)...(19): siRNA sense strand
uggaagccaccuauagaga

SEQ ID NO: 1151693 - RNA, 19 nt, Homo sapiens
  misc_RNA (1)...(19): siRNA sense strand
cccugcaucuguuaucuuc

SEQ ID NO: 1151694 - RNA, 19 nt, Homo sapiens
  misc_RNA (1)...(19): siRNA sense strand
cccugccucuuccauguuu

SEQ ID NO: 1151695 - RNA, 19 nt, Homo sapiens
  misc_RNA (1)...(19): siRNA sense strand
cccaaucaacucauucaga

SEQ ID NO: 1151696 - RNA, 19 nt, Homo sapiens
  misc_RNA (1)...(19): siRNA sense strand
ugacuggaaccacugagau

SEQ ID NO: 1151697 - RNA, 19 nt, Homo sapiens
  misc_RNA (1)...(19): siRNA sense strand
ggaaguugucaagauggaa

SEQ ID NO: 1151698 - RNA, 19 nt, Homo sapiens
  misc_RNA (1)...(19): siRNA sense strand
aggaagaacugcggcacau

SEQ ID NO: 1151699 - RNA, 19 nt, Homo sapiens
  misc_RNA (1)...(19): siRNA sense strand
ggaccguugugaaaacaga

SEQ ID NO: 1151700 - RNA, 19 nt, Homo sapiens
  misc_RNA (1)...(19): siRNA sense strand
aaaaugcugugaagagauc

SEQ ID NO: 1151701 - RNA, 19 nt, Homo sapiens
  misc_RNA (1)...(19): siRNA sense strand
ggccuagaacccaaauuag

SEQ ID NO: 1151702 - RNA, 19 nt, Homo sapiens
  misc_RNA (1)...(19): siRNA sense strand
gaacagagcuccugacaac

SEQ ID NO: 1151703 - RNA, 19 nt, Homo sapiens
  misc_RNA (1)...(19): siRNA sense strand
caagaaggauugucagaga

SEQ ID NO: 1151704 - RNA, 19 nt, Homo sapiens
  misc_RNA (1)...(19): siRNA sense strand
ucaagaaccucaacaugaa

SEQ ID NO: 1151705 - RNA, 19 nt, Homo sapiens
  misc_RNA (1)...(19): siRNA sense strand
ccaaucaacucauucagaa

SEQ ID NO: 1151706 - RNA, 19 nt, Homo sapiens
  misc_RNA (1)...(19): siRNA sense strand
gcacacaugucagcauuga

SEQ ID NO: 1151707 - RNA, 19 nt, Homo sapiens
  misc_RNA (1)...(19): siRNA sense strand
guucagcucuugacacaaa

SEQ ID NO: 1151708 - RNA, 19 nt, Homo sapiens
  misc_RNA (1)...(19): siRNA sense strand
ggaacuaucuccucucucu

SEQ ID NO: 1151709 - RNA, 19 nt, Homo sapiens
  misc_RNA (1)...(19): siRNA sense strand
gggccuagaacccaaauua

SEQ ID NO: 1151710 - RNA, 19 nt, Homo sapiens
  misc_RNA (1)...(19): siRNA sense strand
gaagccaccuauagagaga

SEQ ID NO: 1151711 - RNA, 19 nt, Homo sapiens
  misc_RNA (1)...(19): siRNA sense strand
gauaaacagugccaagaag

SEQ ID NO: 1151712 - RNA, 19 nt, Homo sapiens
  misc_RNA (1)...(19): siRNA sense strand
gaagagauccagccacauc

SEQ ID NO: 1151713 - RNA, 19 nt, Homo sapiens
  misc_RNA (1)...(19): siRNA sense strand
uuaaagagcugggaaccuu

SEQ ID NO: 1151714 - RNA, 19 nt, Homo sapiens
  misc_RNA (1)...(19): siRNA sense strand
ggcgguggcuguaacauga

SEQ ID NO: 1151715 - RNA, 19 nt, Homo sapiens
  misc_RNA (1)...(19): siRNA sense strand
gcaccaggauaugucuuaa

SEQ ID NO: 1151716 - RNA, 19 nt, Homo sapiens
  misc_RNA (1)...(19): siRNA sense strand
cuagagagguaggaaauau

SEQ ID NO: 1151717 - RNA, 19 nt, Homo sapiens
  misc_RNA (1)...(19): siRNA sense strand
cagcacacaugucagcauu

SEQ ID NO: 1151718 - RNA, 19 nt, Homo sapiens
  misc_RNA (1)...(19): siRNA sense strand
acacaaauccaccuucuug

SEQ ID NO: 1151719 - RNA, 19 nt, Homo sapiens
  misc_RNA (1)...(19): siRNA sense strand
cuaugcagcugauugaaga

SEQ ID NO: 1151720 - RNA, 19 nt, Homo sapiens
  misc_RNA (1)...(19): siRNA sense strand
uagaggaaguugucaagau

SEQ ID NO: 1151721 - RNA, 19 nt, Homo sapiens
  misc_RNA (1)...(19): siRNA sense strand
ccggauuccucacccaaua

SEQ ID NO: 1151722 - RNA, 19 nt, Homo sapiens
  misc_RNA (1)...(19): siRNA sense strand
ucuguuaucuucacuguuc

SEQ ID NO: 1151723 - RNA, 19 nt, Homo sapiens
  misc_RNA (1)...(19): siRNA sense strand
gccagggccuuucgcugua

SEQ ID NO: 1151724 - RNA, 19 nt, Homo sapiens
  misc_RNA (1)...(19): siRNA sense strand
gaacaccggcucccauucu

SEQ ID NO: 1151725 - RNA, 19 nt, Homo sapiens
  misc_RNA (1)...(19): siRNA sense strand
agaggaaguugucaagaug

SEQ ID NO: 1151726 - RNA, 19 nt, Homo sapiens
  misc_RNA (1)...(19): siRNA sense strand
ggaaaaugcugugaagaga

SEQ ID NO: 1151727 - RNA, 19 nt, Homo sapiens
  misc_RNA (1)...(19): siRNA sense strand
gccaguagcaccaggauau

SEQ ID NO: 1151728 - RNA, 19 nt, Homo sapiens
  misc_RNA (1)...(19): siRNA sense strand
gaaaacaccagcccaauca

SEQ ID NO: 1151729 - RNA, 19 nt, Homo sapiens
  misc_RNA (1)...(19): siRNA sense strand
gguguaguccugaaacuga

SEQ ID NO: 1151730 - RNA, 19 nt, Homo sapiens
  misc_RNA (1)...(19): siRNA sense strand
gcuauugccuaagggugua

SEQ ID NO: 1151731 - RNA, 19 nt, Homo sapiens
  misc_RNA (1)...(19): siRNA sense strand
gacagaagcguucaucagu

SEQ ID NO: 1151732 - RNA, 19 nt, Homo sapiens
  misc_RNA (1)...(19): siRNA sense strand
gcuccugacaacaucauua

SEQ ID NO: 1151733 - RNA, 19 nt, Homo sapiens
  misc_RNA (1)...(19): siRNA sense strand
ccacugcuauugccuaagg

SEQ ID NO: 1151734 - RNA, 19 nt, Homo sapiens
  misc_RNA (1)...(19): siRNA sense strand
ccucuuccauguuucgaaa

SEQ ID NO: 1151735 - RNA, 19 nt, Homo sapiens
  misc_RNA (1)...(19): siRNA sense strand
ccaggagucucuaaacaac

SEQ ID NO: 1151736 - RNA, 19 nt, Homo sapiens
  misc_RNA (1)...(19): siRNA sense strand
agaaggagguagagaaggu

SEQ ID NO: 1151737 - RNA, 19 nt, Homo sapiens
  misc_RNA (1)...(19): siRNA sense strand
ugacacaaauccaccuucu

SEQ ID NO: 1151738 - RNA, 19 nt, Homo sapiens
  misc_RNA (1)...(19): siRNA sense strand
guuccaacccuguaacuug

SEQ ID NO: 1151739 - RNA, 19 nt, Homo sapiens
  misc_RNA (1)...(19): siRNA sense strand
ggagguagagaagguuaaa

SEQ ID NO: 1151740 - RNA, 19 nt, Homo sapiens
  misc_RNA (1)...(19): siRNA sense strand
gaaggauugucagagaaca

SEQ ID NO: 1151741 - RNA, 19 nt, Homo sapiens
  misc_RNA (1)...(19): siRNA sense strand
ugauggugcuagagaggua

SEQ ID NO: 1151742 - RNA, 19 nt, Homo sapiens
  misc_RNA (1)...(19): siRNA sense strand
gcagaaggagguagagaag

SEQ ID NO: 1151743 - RNA, 19 nt, Homo sapiens
  misc_RNA (1)...(19): siRNA sense strand
aggacaagcuucccucugu

SEQ ID NO: 1151744 - RNA, 19 nt, Homo sapiens
  misc_RNA (1)...(19): siRNA sense strand
aagaaggauugucagagaa

SEQ ID NO: 1151745 - RNA, 19 nt, Homo sapiens
  misc_RNA (1)...(19): siRNA sense strand
cgauaaacagugccaagaa

SEQ ID NO: 1151746 - RNA, 19 nt, Homo sapiens
  misc_RNA (1)...(19): siRNA sense strand
gcuagagagguaggaaaua

SEQ ID NO: 1151747 - RNA, 19 nt, Homo sapiens
  misc_RNA (1)...(19): siRNA sense strand
gccuagaacccaaauuaga

SEQ ID NO: 1151748 - RNA, 19 nt, Homo sapiens
  misc_RNA (1)...(19): siRNA sense strand
gaaucaagaaccucaacau

SEQ ID NO: 1151749 - RNA, 19 nt, Homo sapiens
  misc_RNA (1)...(19): siRNA sense strand
caucuguuaucuucacugu

SEQ ID NO: 1151750 - RNA, 19 nt, Homo sapiens
  misc_RNA (1)...(19): siRNA sense strand
ugacugcagcccucauaaa

SEQ ID NO: 1151751 - RNA, 19 nt, Homo sapiens
  misc_RNA (1)...(19): siRNA sense strand
agagagguaggaaauauga

SEQ ID NO: 1151752 - RNA, 19 nt, Homo sapiens
  misc_RNA (1)...(19): siRNA sense strand
ggaaauaugacuggaacca

SEQ ID NO: 1151753 - RNA, 19 nt, Homo sapiens
  misc_RNA (1)...(19): siRNA sense strand
ccagcccaaucaacucauu

SEQ ID NO: 1151754 - RNA, 19 nt, Homo sapiens
  misc_RNA (1)...(19): siRNA sense strand
ggauuuagaggaaguuguc

SEQ ID NO: 1151755 - RNA, 19 nt, Homo sapiens
  misc_RNA (1)...(19): siRNA sense strand
gucucacccuuaauuguuu

SEQ ID NO: 1151756 - RNA, 19 nt, Homo sapiens
  misc_RNA (1)...(19): siRNA sense strand
cuaccacugugaagauugu

SEQ ID NO: 1151757 - RNA, 19 nt, Homo sapiens
  misc_RNA (1)...(19): siRNA sense strand
uuccaacccuguaacuuga

SEQ ID NO: 1151758 - RNA, 19 nt, Homo sapiens
  misc_RNA (1)...(19): siRNA sense strand
uauccacccugcaucuguu

SEQ ID NO: 1151759 - RNA, 19 nt, Homo sapiens
  misc_RNA (1)...(19): siRNA sense strand
aagaaggcuuggagacaga

SEQ ID NO: 1151760 - RNA, 19 nt, Homo sapiens
  misc_RNA (1)...(19): siRNA sense strand
guaacuugaugggagcuau

SEQ ID NO: 1151761 - RNA, 19 nt, Homo sapiens
  misc_RNA (1)...(19): siRNA sense strand
ccaucgcccuucaccauca

SEQ ID NO: 1151762 - RNA, 19 nt, Homo sapiens
  misc_RNA (1)...(19): siRNA sense strand
uaaacagugccaagaagga

SEQ ID NO: 1151763 - RNA, 19 nt, Homo sapiens
  misc_RNA (1)...(19): siRNA sense strand
ucagaucaaggccuagaaa

SEQ ID NO: 1151764 - RNA, 19 nt, Homo sapiens
  misc_RNA (1)...(19): siRNA sense strand
guaggaaauaugacuggaa

SEQ ID NO: 1151765 - RNA, 19 nt, Homo sapiens
  misc_RNA (1)...(19): siRNA sense strand
cggcucccauucugguuaa

SEQ ID NO: 1151766 - RNA, 19 nt, Homo sapiens
  misc_RNA (1)...(19): siRNA sense strand
ccugacaacaucauuaaau

SEQ ID NO: 1151767 - RNA, 19 nt, Homo sapiens
  misc_RNA (1)...(19): siRNA sense strand
gcagcauguucagcucuug

SEQ ID NO: 1151768 - RNA, 19 nt, Homo sapiens
  misc_RNA (1)...(19): siRNA sense strand
uaucaaaccugccccuguu

SEQ ID NO: 1151769 - RNA, 19 nt, Homo sapiens
  misc_RNA (1)...(19): siRNA sense strand
caagcuucccucugucuga

SEQ ID NO: 1151770 - RNA, 19 nt, Homo sapiens
  misc_RNA (1)...(19): siRNA sense strand
gcugggaaccuuugcucaa

SEQ ID NO: 1151771 - RNA, 19 nt, Homo sapiens
  misc_RNA (1)...(19): siRNA sense strand
ugacagugagaaucaagaa

SEQ ID NO: 1151772 - RNA, 19 nt, Homo sapiens
  misc_RNA (1)...(19): siRNA sense strand
gaaccucaacaugaacaga

SEQ ID NO: 1151773 - RNA, 19 nt, Homo sapiens
  misc_RNA (1)...(19): siRNA sense strand
gaaggagguagagaagguu

SEQ ID NO: 1151774 - RNA, 19 nt, Homo sapiens
  misc_RNA (1)...(19): siRNA sense strand
cuaaggguguaguccugaa

SEQ ID NO: 1151775 - RNA, 19 nt, Homo sapiens
  misc_RNA (1)...(19): siRNA sense strand
ucauaaaacugucaagaag

SEQ ID NO: 1151776 - RNA, 19 nt, Homo sapiens
  misc_RNA (1)...(19): siRNA sense strand
aaucaagaaccucaacaug

SEQ ID NO: 1151777 - RNA, 19 nt, Homo sapiens
  misc_RNA (1)...(19): siRNA sense strand
ugucucacccuuaauuguu

SEQ ID NO: 1151778 - RNA, 19 nt, Homo sapiens
  misc_RNA (1)...(19): siRNA sense strand
gccuuucgcuguaucaaac

SEQ ID NO: 1151779 - RNA, 19 nt, Homo sapiens
  misc_RNA (1)...(19): siRNA sense strand
ggagacagaagcguucauc

SEQ ID NO: 1151780 - RNA, 19 nt, Homo sapiens
  misc_RNA (1)...(19): siRNA sense strand
guguaguccugaaacugaa

SEQ ID NO: 1151781 - RNA, 19 nt, Homo sapiens
  misc_RNA (1)...(19): siRNA sense strand
aucaagaaccucaacauga

SEQ ID NO: 1151782 - RNA, 19 nt, Homo sapiens
  misc_RNA (1)...(19): siRNA sense strand
ugccauccauccaggaaga

SEQ ID NO: 1151783 - RNA, 19 nt, Homo sapiens
  misc_RNA (1)...(19): siRNA sense strand
ucgcuggaccguugugaaa

SEQ ID NO: 1151784 - RNA, 19 nt, Homo sapiens
  misc_RNA (1)...(19): siRNA sense strand
caaauuagagccccaggaa

SEQ ID NO: 1151785 - RNA, 19 nt, Homo sapiens
  misc_RNA (1)...(19): siRNA sense strand
ucaguggaggugagaguuu

SEQ ID NO: 1151786 - RNA, 19 nt, Homo sapiens
  misc_RNA (1)...(19): siRNA sense strand
accaggauaugucuuaaag

SEQ ID NO: 1151787 - RNA, 19 nt, Homo sapiens
  misc_RNA (1)...(19): siRNA sense strand
gaaccacugagaucaacuc

SEQ ID NO: 1151788 - RNA, 19 nt, Homo sapiens
  misc_RNA (1)...(19): siRNA sense strand
cagccaaacagcagaagga

SEQ ID NO: 1151789 - RNA, 19 nt, Homo sapiens
  misc_RNA (1)...(19): siRNA sense strand
ccaacccuguaacuugaug

SEQ ID NO: 1151790 - RNA, 19 nt, Homo sapiens
  misc_RNA (1)...(19): siRNA sense strand
ucgaaagccauaugugaga

SEQ ID NO: 1151791 - RNA, 19 nt, Homo sapiens
  misc_RNA (1)...(19): siRNA sense strand
cagagcuccugacaacauc

SEQ ID NO: 1151792 - RNA, 19 nt, Homo sapiens
  misc_RNA (1)...(19): siRNA sense strand
gccaagaaggauugucaga

SEQ ID NO: 1151793 - RNA, 19 nt, Homo sapiens
  misc_RNA (1)...(19): siRNA sense strand
uuucgaaagccauauguga

SEQ ID NO: 1151794 - RNA, 19 nt, Homo sapiens
  misc_RNA (1)...(19): siRNA sense strand
cagcuucaacccugggaaa

SEQ ID NO: 1151795 - RNA, 19 nt, Homo sapiens
  misc_RNA (1)...(19): siRNA sense strand
ggaagaacugcggcacaug

SEQ ID NO: 1151796 - RNA, 19 nt, Homo sapiens
  misc_RNA (1)...(19): siRNA sense strand
gcuaugcagcugauugaag

SEQ ID NO: 1151797 - RNA, 19 nt, Homo sapiens
  misc_RNA (1)...(19): siRNA sense strand
gcauccaggagucucuaaa

SEQ ID NO: 1151798 - RNA, 19 nt, Homo sapiens
  misc_RNA (1)...(19): siRNA sense strand
acagagcuccugacaacau

SEQ ID NO: 1151799 - RNA, 19 nt, Homo sapiens
  misc_RNA (1)...(19): siRNA sense strand
gacuucagcacacauguca

SEQ ID NO: 1151800 - RNA, 19 nt, Homo sapiens
  misc_RNA (1)...(19): siRNA sense strand
ccuagaacccaaauuagag

SEQ ID NO: 1151801 - RNA, 19 nt, Homo sapiens
  misc_RNA (1)...(19): siRNA sense strand
ggccuccaccagucgauaa

SEQ ID NO: 1151802 - RNA, 19 nt, Homo sapiens
  misc_RNA (1)...(19): siRNA sense strand
gaacagagcuccugacaac

SEQ ID NO: 1151803 - RNA, 19 nt, Homo sapiens
  misc_RNA (1)...(19): siRNA sense strand
caagaaggauugucagaga

SEQ ID NO: 1151804 - RNA, 19 nt, Homo sapiens
  misc_RNA (1)...(19): siRNA sense strand
ucaagaaccucaacaugaa

SEQ ID NO: 1151805 - RNA, 19 nt, Homo sapiens
  misc_RNA (1)...(19): siRNA sense strand
ccaaucaacucauucagaa

SEQ ID NO: 1151806 - RNA, 19 nt, Homo sapiens
  misc_RNA (1)...(19): siRNA sense strand
gcacacaugucagcauuga

SEQ ID NO: 1151807 - RNA, 19 nt, Homo sapiens
  misc_RNA (1)...(19): siRNA sense strand
guucagcucuugacacaaa

SEQ ID NO: 1151808 - RNA, 19 nt, Homo sapiens
  misc_RNA (1)...(19): siRNA sense strand
ggaacuaucuccucucucu

SEQ ID NO: 1151809 - RNA, 19 nt, Homo sapiens
  misc_RNA (1)...(19): siRNA sense strand
ggaagaugauggcccagaa

SEQ ID NO: 1151810 - RNA, 19 nt, Homo sapiens
  misc_RNA (1)...(19): siRNA sense strand
cgaaggaacuauuugaaca

SEQ ID NO: 1151811 - RNA, 19 nt, Homo sapiens
  misc_RNA (1)...(19): siRNA sense strand
gggccuagaacccaaauua

SEQ ID NO: 1151812 - RNA, 19 nt, Homo sapiens
  misc_RNA (1)...(19): siRNA sense strand
gaagccaccuauagagaga

SEQ ID NO: 1151813 - RNA, 19 nt, Homo sapiens
  misc_RNA (1)...(19): siRNA sense strand
gauaaacagugccaagaag

SEQ ID NO: 1151814 - RNA, 19 nt, Homo sapiens
  misc_RNA (1)...(19): siRNA sense strand
gaagagauccagccacauc

SEQ ID NO: 1151815 - RNA, 19 nt, Homo sapiens
  misc_RNA (1)...(19): siRNA sense strand
uuaaagagcugggaaccuu

SEQ ID NO: 1151816 - RNA, 19 nt, Homo sapiens
  misc_RNA (1)...(19): siRNA sense strand
ggcgguggcuguaacauga

SEQ ID NO: 1151817 - RNA, 19 nt, Homo sapiens
  misc_RNA (1)...(19): siRNA sense strand
gcaccaggauaugucuuaa

SEQ ID NO: 1151818 - RNA, 19 nt, Homo sapiens
  misc_RNA (1)...(19): siRNA sense strand
cuagagagguaggaaauau

SEQ ID NO: 1151819 - RNA, 19 nt, Homo sapiens
  misc_RNA (1)...(19): siRNA sense strand
uugaacagcugaagaugaa

SEQ ID NO: 1151820 - RNA, 19 nt, Homo sapiens
  misc_RNA (1)...(19): siRNA sense strand
cagcacacaugucagcauu

SEQ ID NO: 1151821 - RNA, 19 nt, Homo sapiens
  misc_RNA (1)...(19): siRNA sense strand
gaacagcugaagaugaaga

SEQ ID NO: 1151822 - RNA, 19 nt, Homo sapiens
  misc_RNA (1)...(19): siRNA sense strand
acacaaauccaccuucuug

SEQ ID NO: 1151823 - RNA, 19 nt, Homo sapiens
  misc_RNA (1)...(19): siRNA sense strand
cuaugcagcugauugaaga

SEQ ID NO: 1151824 - RNA, 19 nt, Homo sapiens
  misc_RNA (1)...(19): siRNA sense strand
uagaggaaguugucaagau

SEQ ID NO: 1151825 - RNA, 19 nt, Homo sapiens
  misc_RNA (1)...(19): siRNA sense strand
ccggauuccucacccaaua

SEQ ID NO: 1151826 - RNA, 19 nt, Homo sapiens
  misc_RNA (1)...(19): siRNA sense strand
ucuguuaucuucacuguuc

SEQ ID NO: 1151827 - RNA, 19 nt, Homo sapiens
  misc_RNA (1)...(19): siRNA sense strand
uggccaaccuacuaaauga

SEQ ID NO: 1151828 - RNA, 19 nt, Homo sapiens
  misc_RNA (1)...(19): siRNA sense strand
gccagggccuuucgcugua

SEQ ID NO: 1151829 - RNA, 19 nt, Homo sapiens
  misc_RNA (1)...(19): siRNA sense strand
gaacaccggcucccauucu

SEQ ID NO: 1151830 - RNA, 19 nt, Homo sapiens
  misc_RNA (1)...(19): siRNA sense strand
agaggaaguugucaagaug

SEQ ID NO: 1151831 - RNA, 19 nt, Homo sapiens
  misc_RNA (1)...(19): siRNA sense strand
ggaaaaugcugugaagaga

SEQ ID NO: 1151832 - RNA, 19 nt, Homo sapiens
  misc_RNA (1)...(19): siRNA sense strand
gccaguagcaccaggauau

SEQ ID NO: 1151833 - RNA, 19 nt, Homo sapiens
  misc_RNA (1)...(19): siRNA sense strand
gaaaacaccagcccaauca

SEQ ID NO: 1151834 - RNA, 19 nt, Homo sapiens
  misc_RNA (1)...(19): siRNA sense strand
gguguaguccugaaacuga

SEQ ID NO: 1151835 - RNA, 19 nt, Homo sapiens
  misc_RNA (1)...(19): siRNA sense strand
gagccucaagcuaacuuua

SEQ ID NO: 1151836 - RNA, 19 nt, Homo sapiens
  misc_RNA (1)...(19): siRNA sense strand
gacagaagcguucaucagu

SEQ ID NO: 1151837 - RNA, 19 nt, Homo sapiens
  misc_RNA (1)...(19): siRNA sense strand
gcuauugccuaagggugua

SEQ ID NO: 1151838 - RNA, 19 nt, Homo sapiens
  misc_RNA (1)...(19): siRNA sense strand
gcuccugacaacaucauua

SEQ ID NO: 1151839 - RNA, 19 nt, Homo sapiens
  misc_RNA (1)...(19): siRNA sense strand
ccacugcuauugccuaagg

SEQ ID NO: 1151840 - RNA, 19 nt, Homo sapiens
  misc_RNA (1)...(19): siRNA sense strand
agaaggagguagagaaggu

SEQ ID NO: 1151841 - RNA, 19 nt, Homo sapiens
  misc_RNA (1)...(19): siRNA sense strand
ccaggagucucuaaacaac

SEQ ID NO: 1151842 - RNA, 19 nt, Homo sapiens
  misc_RNA (1)...(19): siRNA sense strand
ccucuuccauguuucgaaa

SEQ ID NO: 1151843 - RNA, 19 nt, Homo sapiens
  misc_RNA (1)...(19): siRNA sense strand
ugacacaaauccaccuucu

SEQ ID NO: 1151844 - RNA, 19 nt, Homo sapiens
  misc_RNA (1)...(19): siRNA sense strand
ucagauagcgaaggaacua

SEQ ID NO: 1151845 - RNA, 19 nt, Homo sapiens
  misc_RNA (1)...(19): siRNA sense strand
guuccaacccuguaacuug

SEQ ID NO: 1151846 - RNA, 19 nt, Homo sapiens
  misc_RNA (1)...(19): siRNA sense strand
gcagaaggagguagagaag

SEQ ID NO: 1151847 - RNA, 19 nt, Homo sapiens
  misc_RNA (1)...(19): siRNA sense strand
gaaggauugucagagaaca

SEQ ID NO: 1151848 - RNA, 19 nt, Homo sapiens
  misc_RNA (1)...(19): siRNA sense strand
ugauggugcuagagaggua

SEQ ID NO: 1151849 - RNA, 19 nt, Homo sapiens
  misc_RNA (1)...(19): siRNA sense strand
ggagguagagaagguuaaa

SEQ ID NO: 1151850 - RNA, 19 nt, Homo sapiens
  misc_RNA (1)...(19): siRNA sense strand
aggacaagcuucccucugu

SEQ ID NO: 1151851 - RNA, 19 nt, Homo sapiens
  misc_RNA (1)...(19): siRNA sense strand
aagaaggauugucagagaa

SEQ ID NO: 1151852 - RNA, 19 nt, Homo sapiens
  misc_RNA (1)...(19): siRNA sense strand
cgauaaacagugccaagaa

SEQ ID NO: 1151853 - RNA, 19 nt, Homo sapiens
  misc_RNA (1)...(19): siRNA sense strand
gcuagagagguaggaaaua

SEQ ID NO: 1151854 - RNA, 19 nt, Homo sapiens
  misc_RNA (1)...(19): siRNA sense strand
gccuagaacccaaauuaga

SEQ ID NO: 1151855 - RNA, 19 nt, Homo sapiens
  misc_RNA (1)...(19): siRNA sense strand
gaaucaagaaccucaacau

SEQ ID NO: 1151856 - RNA, 19 nt, Homo sapiens
  misc_RNA (1)...(19): siRNA sense strand
caucuguuaucuucacugu

SEQ ID NO: 1151857 - RNA, 19 nt, Homo sapiens
  misc_RNA (1)...(19): siRNA sense strand
ggaacuacuggccaaccua

SEQ ID NO: 1151858 - RNA, 19 nt, Homo sapiens
  misc_RNA (1)...(19): siRNA sense strand
agagagguaggaaauauga

SEQ ID NO: 1151859 - RNA, 19 nt, Homo sapiens
  misc_RNA (1)...(19): siRNA sense strand
ccuacuaaaugaacaacau

SEQ ID NO: 1151860 - RNA, 19 nt, Homo sapiens
  misc_RNA (1)...(19): siRNA sense strand
ugacugcagcccucauaaa

SEQ ID NO: 1151861 - RNA, 19 nt, Homo sapiens
  misc_RNA (1)...(19): siRNA sense strand
ggaaauaugacuggaacca

SEQ ID NO: 1151862 - RNA, 19 nt, Homo sapiens
  misc_RNA (1)...(19): siRNA sense strand
cuaaaugaacaacaucaga

SEQ ID NO: 1151863 - RNA, 19 nt, Homo sapiens
  misc_RNA (1)...(19): siRNA sense strand
ggauuuagaggaaguuguc

SEQ ID NO: 1151864 - RNA, 19 nt, Homo sapiens
  misc_RNA (1)...(19): siRNA sense strand
gucucacccuuaauuguuu

SEQ ID NO: 1151865 - RNA, 19 nt, Homo sapiens
  misc_RNA (1)...(19): siRNA sense strand
cuaccacugugaagauugu

SEQ ID NO: 1151866 - RNA, 19 nt, Homo sapiens
  misc_RNA (1)...(19): siRNA sense strand
ccagcccaaucaacucauu

SEQ ID NO: 1151867 - RNA, 19 nt, Homo sapiens
  misc_RNA (1)...(19): siRNA sense strand
gaaggaacuauuugaacag

SEQ ID NO: 1151868 - RNA, 19 nt, Homo sapiens
  misc_RNA (1)...(19): siRNA sense strand
uauccacccugcaucuguu

SEQ ID NO: 1151869 - RNA, 19 nt, Homo sapiens
  misc_RNA (1)...(19): siRNA sense strand
uagcgaaggaacuauuuga

SEQ ID NO: 1151870 - RNA, 19 nt, Homo sapiens
  misc_RNA (1)...(19): siRNA sense strand
aagaaggcuuggagacaga

SEQ ID NO: 1151871 - RNA, 19 nt, Homo sapiens
  misc_RNA (1)...(19): siRNA sense strand
uaacaccccucaagcucua

SEQ ID NO: 1151872 - RNA, 19 nt, Homo sapiens
  misc_RNA (1)...(19): siRNA sense strand
guaacuugaugggagcuau

SEQ ID NO: 1151873 - RNA, 19 nt, Homo sapiens
  misc_RNA (1)...(19): siRNA sense strand
uuccaacccuguaacuuga

SEQ ID NO: 1151874 - RNA, 19 nt, Homo sapiens
  misc_RNA (1)...(19): siRNA sense strand
ccaucgcccuucaccauca

SEQ ID NO: 1151875 - RNA, 19 nt, Homo sapiens
  misc_RNA (1)...(19): siRNA sense strand
uaaacagugccaagaagga

SEQ ID NO: 1151876 - RNA, 19 nt, Homo sapiens
  misc_RNA (1)...(19): siRNA sense strand
cuacuggccaaccuacuaa

SEQ ID NO: 1151877 - RNA, 19 nt, Homo sapiens
  misc_RNA (1)...(19): siRNA sense strand
ucagaucaaggccuagaaa

SEQ ID NO: 1151878 - RNA, 19 nt, Homo sapiens
  misc_RNA (1)...(19): siRNA sense strand
guaggaaauaugacuggaa

SEQ ID NO: 1151879 - RNA, 19 nt, Homo sapiens
  misc_RNA (1)...(19): siRNA sense strand
cggcucccauucugguuaa

SEQ ID NO: 1151880 - RNA, 19 nt, Homo sapiens
  misc_RNA (1)...(19): siRNA sense strand
ccugacaacaucauuaaau

SEQ ID NO: 1151881 - RNA, 19 nt, Homo sapiens
  misc_RNA (1)...(19): siRNA sense strand
gcagcauguucagcucuug

SEQ ID NO: 1151882 - RNA, 19 nt, Homo sapiens
  misc_RNA (1)...(19): siRNA sense strand
uaucaaaccugccccuguu

SEQ ID NO: 1151883 - RNA, 19 nt, Homo sapiens
  misc_RNA (1)...(19): siRNA sense strand
caagcuucccucugucuga

SEQ ID NO: 1151884 - RNA, 19 nt, Homo sapiens
  misc_RNA (1)...(19): siRNA sense strand
gcugggaaccuuugcucaa

SEQ ID NO: 1151885 - RNA, 19 nt, Homo sapiens
  misc_RNA (1)...(19): siRNA sense strand
ugacagugagaaucaagaa

SEQ ID NO: 1151886 - RNA, 19 nt, Homo sapiens
  misc_RNA (1)...(19): siRNA sense strand
gaagaugauggcccagaag

SEQ ID NO: 1151887 - RNA, 19 nt, Homo sapiens
  misc_RNA (1)...(19): siRNA sense strand
gaaccucaacaugaacaga

SEQ ID NO: 1151888 - RNA, 19 nt, Homo sapiens
  misc_RNA (1)...(19): siRNA sense strand
ucauaaaacugucaagaag

SEQ ID NO: 1151889 - RNA, 19 nt, Homo sapiens
  misc_RNA (1)...(19): siRNA sense strand
gaaggagguagagaagguu

SEQ ID NO: 1151890 - RNA, 19 nt, Homo sapiens
  misc_RNA (1)...(19): siRNA sense strand
cuaaggguguaguccugaa

SEQ ID NO: 1151891 - RNA, 19 nt, Homo sapiens
  misc_RNA (1)...(19): siRNA sense strand
aaucaagaaccucaacaug

SEQ ID NO: 1151892 - RNA, 19 nt, Homo sapiens
  misc_RNA (1)...(19): siRNA sense strand
gcgaaggaacuauuugaac

SEQ ID NO: 1151893 - RNA, 19 nt, Homo sapiens
  misc_RNA (1)...(19): siRNA sense strand
ugucucacccuuaauuguu

SEQ ID NO: 1151894 - RNA, 19 nt, Homo sapiens
  misc_RNA (1)...(19): siRNA sense strand
gccuuucgcuguaucaaac

SEQ ID NO: 1151895 - RNA, 19 nt, Homo sapiens
  misc_RNA (1)...(19): siRNA sense strand
ggagacagaagcguucauc

SEQ ID NO: 1151896 - RNA, 19 nt, Homo sapiens
  misc_RNA (1)...(19): siRNA sense strand
guguaguccugaaacugaa

SEQ ID NO: 1151897 - RNA, 19 nt, Homo sapiens
  misc_RNA (1)...(19): siRNA sense strand
aucaagaaccucaacauga

SEQ ID NO: 1151898 - RNA, 19 nt, Homo sapiens
  misc_RNA (1)...(19): siRNA sense strand
gaaccacugagaucaacuc

SEQ ID NO: 1151899 - RNA, 19 nt, Homo sapiens
  misc_RNA (1)...(19): siRNA sense strand
ucgcuggaccguugugaaa

SEQ ID NO: 1151900 - RNA, 19 nt, Homo sapiens
  misc_RNA (1)...(19): siRNA sense strand
caaauuagagccccaggaa

SEQ ID NO: 1151901 - RNA, 19 nt, Homo sapiens
  misc_RNA (1)...(19): siRNA sense strand
ucaguggaggugagaguuu

SEQ ID NO: 1151902 - RNA, 19 nt, Homo sapiens
  misc_RNA (1)...(19): siRNA sense strand
caaaugagcugauggaaga

SEQ ID NO: 1151903 - RNA, 19 nt, Homo sapiens
  misc_RNA (1)...(19): siRNA sense strand
gaacagagcuccugacaac

SEQ ID NO: 1151904 - RNA, 19 nt, Homo sapiens
  misc_RNA (1)...(19): siRNA sense strand
caagaaggauugucagaga

SEQ ID NO: 1151905 - RNA, 19 nt, Homo sapiens
  misc_RNA (1)...(19): siRNA sense strand
ucaagaaccucaacaugaa

SEQ ID NO: 1151906 - RNA, 19 nt, Homo sapiens
  misc_RNA (1)...(19): siRNA sense strand
ccaaucaacucauucagaa

SEQ ID NO: 1151907 - RNA, 19 nt, Homo sapiens
  misc_RNA (1)...(19): siRNA sense strand
gcacacaugucagcauuga

SEQ ID NO: 1151908 - RNA, 19 nt, Homo sapiens
  misc_RNA (1)...(19): siRNA sense strand
guucagcucuugacacaaa

SEQ ID NO: 1151909 - RNA, 19 nt, Homo sapiens
  misc_RNA (1)...(19): siRNA sense strand
ggaacuaucuccucucucu

SEQ ID NO: 1151910 - RNA, 19 nt, Homo sapiens
  misc_RNA (1)...(19): siRNA sense strand
ggaagaugauggcccagaa

SEQ ID NO: 1151911 - RNA, 19 nt, Homo sapiens
  misc_RNA (1)...(19): siRNA sense strand
cgaaggaacuauuugaaca

SEQ ID NO: 1151912 - RNA, 19 nt, Homo sapiens
  misc_RNA (1)...(19): siRNA sense strand
gauggaagaucuguuugaa

SEQ ID NO: 1151913 - RNA, 19 nt, Homo sapiens
  misc_RNA (1)...(19): siRNA sense strand
gggccuagaacccaaauua

SEQ ID NO: 1151914 - RNA, 19 nt, Homo sapiens
  misc_RNA (1)...(19): siRNA sense strand
gaagccaccuauagagaga

SEQ ID NO: 1151915 - RNA, 19 nt, Homo sapiens
  misc_RNA (1)...(19): siRNA sense strand
gauaaacagugccaagaag

SEQ ID NO: 1151916 - RNA, 19 nt, Homo sapiens
  misc_RNA (1)...(19): siRNA sense strand
gaagagauccagccacauc

SEQ ID NO: 1151917 - RNA, 19 nt, Homo sapiens
  misc_RNA (1)...(19): siRNA sense strand
uuaaagagcugggaaccuu

SEQ ID NO: 1151918 - RNA, 19 nt, Homo sapiens
  misc_RNA (1)...(19): siRNA sense strand
ggaagcaaaugagcugaug

SEQ ID NO: 1151919 - RNA, 19 nt, Homo sapiens
  misc_RNA (1)...(19): siRNA sense strand
ggcgguggcuguaacauga

SEQ ID NO: 1151920 - RNA, 19 nt, Homo sapiens
  misc_RNA (1)...(19): siRNA sense strand
gcaccaggauaugucuuaa

SEQ ID NO: 1151921 - RNA, 19 nt, Homo sapiens
  misc_RNA (1)...(19): siRNA sense strand
cuagagagguaggaaauau

SEQ ID NO: 1151922 - RNA, 19 nt, Homo sapiens
  misc_RNA (1)...(19): siRNA sense strand
uugaacagcugaagaugaa

SEQ ID NO: 1151923 - RNA, 19 nt, Homo sapiens
  misc_RNA (1)...(19): siRNA sense strand
cagcacacaugucagcauu

SEQ ID NO: 1151924 - RNA, 19 nt, Homo sapiens
  misc_RNA (1)...(19): siRNA sense strand
gaacagcugaagaugaaga

SEQ ID NO: 1151925 - RNA, 19 nt, Homo sapiens
  misc_RNA (1)...(19): siRNA sense strand
acacaaauccaccuucuug

SEQ ID NO: 1151926 - RNA, 19 nt, Homo sapiens
  misc_RNA (1)...(19): siRNA sense strand
cuaugcagcugauugaaga

SEQ ID NO: 1151927 - RNA, 19 nt, Homo sapiens
  misc_RNA (1)...(19): siRNA sense strand
uagaggaaguugucaagau

SEQ ID NO: 1151928 - RNA, 19 nt, Homo sapiens
  misc_RNA (1)...(19): siRNA sense strand
ccggauuccucacccaaua

SEQ ID NO: 1151929 - RNA, 19 nt, Homo sapiens
  misc_RNA (1)...(19): siRNA sense strand
gcugauggaagaucuguuu

SEQ ID NO: 1151930 - RNA, 19 nt, Homo sapiens
  misc_RNA (1)...(19): siRNA sense strand
ucuguuaucuucacuguuc

SEQ ID NO: 1151931 - RNA, 19 nt, Homo sapiens
  misc_RNA (1)...(19): siRNA sense strand
uggccaaccuacuaaauga

SEQ ID NO: 1151932 - RNA, 19 nt, Homo sapiens
  misc_RNA (1)...(19): siRNA sense strand
gccagggccuuucgcugua

SEQ ID NO: 1151933 - RNA, 19 nt, Homo sapiens
  misc_RNA (1)...(19): siRNA sense strand
gaacaccggcucccauucu

SEQ ID NO: 1151934 - RNA, 19 nt, Homo sapiens
  misc_RNA (1)...(19): siRNA sense strand
agaggaaguugucaagaug

SEQ ID NO: 1151935 - RNA, 19 nt, Homo sapiens
  misc_RNA (1)...(19): siRNA sense strand
ggaaaaugcugugaagaga

SEQ ID NO: 1151936 - RNA, 19 nt, Homo sapiens
  misc_RNA (1)...(19): siRNA sense strand
gccaguagcaccaggauau

SEQ ID NO: 1151937 - RNA, 19 nt, Homo sapiens
  misc_RNA (1)...(19): siRNA sense strand
gaaaacaccagcccaauca

SEQ ID NO: 1151938 - RNA, 19 nt, Homo sapiens
  misc_RNA (1)...(19): siRNA sense strand
gguguaguccugaaacuga

SEQ ID NO: 1151939 - RNA, 19 nt, Homo sapiens
  misc_RNA (1)...(19): siRNA sense strand
gcuauugccuaagggugua

SEQ ID NO: 1151940 - RNA, 19 nt, Homo sapiens
  misc_RNA (1)...(19): siRNA sense strand
gagccucaagcuaacuuua

SEQ ID NO: 1151941 - RNA, 19 nt, Homo sapiens
  misc_RNA (1)...(19): siRNA sense strand
gacagaagcguucaucagu

SEQ ID NO: 1151942 - RNA, 19 nt, Homo sapiens
  misc_RNA (1)...(19): siRNA sense strand
gcuccugacaacaucauua

SEQ ID NO: 1151943 - RNA, 19 nt, Homo sapiens
  misc_RNA (1)...(19): siRNA sense strand
ccacugcuauugccuaagg

SEQ ID NO: 1151944 - RNA, 19 nt, Homo sapiens
  misc_RNA (1)...(19): siRNA sense strand
agaaggagguagagaaggu

SEQ ID NO: 1151945 - RNA, 19 nt, Homo sapiens
  misc_RNA (1)...(19): siRNA sense strand
ccaggagucucuaaacaac

SEQ ID NO: 1151946 - RNA, 19 nt, Homo sapiens
  misc_RNA (1)...(19): siRNA sense strand
ccucuuccauguuucgaaa

SEQ ID NO: 1151947 - RNA, 19 nt, Homo sapiens
  misc_RNA (1)...(19): siRNA sense strand
ucagauagcgaaggaacua

SEQ ID NO: 1151948 - RNA, 19 nt, Homo sapiens
  misc_RNA (1)...(19): siRNA sense strand
guuccaacccuguaacuug

SEQ ID NO: 1151949 - RNA, 19 nt, Homo sapiens
  misc_RNA (1)...(19): siRNA sense strand
ugacacaaauccaccuucu

SEQ ID NO: 1151950 - RNA, 19 nt, Homo sapiens
  misc_RNA (1)...(19): siRNA sense strand
gcagaaggagguagagaag

SEQ ID NO: 1151951 - RNA, 19 nt, Homo sapiens
  misc_RNA (1)...(19): siRNA sense strand
gaaggauugucagagaaca

SEQ ID NO: 1151952 - RNA, 19 nt, Homo sapiens
  misc_RNA (1)...(19): siRNA sense strand
ugauggugcuagagaggua

SEQ ID NO: 1151953 - RNA, 19 nt, Homo sapiens
  misc_RNA (1)...(19): siRNA sense strand
ggagguagagaagguuaaa

SEQ ID NO: 1151954 - RNA, 19 nt, Homo sapiens
  misc_RNA (1)...(19): siRNA sense strand
aggacaagcuucccucugu

SEQ ID NO: 1151955 - RNA, 19 nt, Homo sapiens
  misc_RNA (1)...(19): siRNA sense strand
aagaaggauugucagagaa

SEQ ID NO: 1151956 - RNA, 19 nt, Homo sapiens
  misc_RNA (1)...(19): siRNA sense strand
cgauaaacagugccaagaa

SEQ ID NO: 1151957 - RNA, 19 nt, Homo sapiens
  misc_RNA (1)...(19): siRNA sense strand
gcuagagagguaggaaaua

SEQ ID NO: 1151958 - RNA, 19 nt, Homo sapiens
  misc_RNA (1)...(19): siRNA sense strand
gccuagaacccaaauuaga

SEQ ID NO: 1151959 - RNA, 19 nt, Homo sapiens
  misc_RNA (1)...(19): siRNA sense strand
gaaucaagaaccucaacau

SEQ ID NO: 1151960 - RNA, 19 nt, Homo sapiens
  misc_RNA (1)...(19): siRNA sense strand
caucuguuaucuucacugu

SEQ ID NO: 1151961 - RNA, 19 nt, Homo sapiens
  misc_RNA (1)...(19): siRNA sense strand
ccuacuaaaugaacaacau

SEQ ID NO: 1151962 - RNA, 19 nt, Homo sapiens
  misc_RNA (1)...(19): siRNA sense strand
agagagguaggaaauauga

SEQ ID NO: 1151963 - RNA, 19 nt, Homo sapiens
  misc_RNA (1)...(19): siRNA sense strand
ugacugcagcccucauaaa

SEQ ID NO: 1151964 - RNA, 19 nt, Homo sapiens
  misc_RNA (1)...(19): siRNA sense strand
ggaacuacuggccaaccua

SEQ ID NO: 1151965 - RNA, 19 nt, Homo sapiens
  misc_RNA (1)...(19): siRNA sense strand
gaugggauucuccaacaug

SEQ ID NO: 1151966 - RNA, 19 nt, Homo sapiens
  misc_RNA (1)...(19): siRNA sense strand
ggaaauaugacuggaacca

SEQ ID NO: 1151967 - RNA, 19 nt, Homo sapiens
  misc_RNA (1)...(19): siRNA sense strand
ccagcccaaucaacucauu

SEQ ID NO: 1151968 - RNA, 19 nt, Homo sapiens
  misc_RNA (1)...(19): siRNA sense strand
ggauuuagaggaaguuguc

SEQ ID NO: 1151969 - RNA, 19 nt, Homo sapiens
  misc_RNA (1)...(19): siRNA sense strand
cuaaaugaacaacaucaga

SEQ ID NO: 1151970 - RNA, 19 nt, Homo sapiens
  misc_RNA (1)...(19): siRNA sense strand
gucucacccuuaauuguuu

SEQ ID NO: 1151971 - RNA, 19 nt, Homo sapiens
  misc_RNA (1)...(19): siRNA sense strand
cuaccacugugaagauugu

SEQ ID NO: 1151972 - RNA, 19 nt, Homo sapiens
  misc_RNA (1)...(19): siRNA sense strand
uuccaacccuguaacuuga

SEQ ID NO: 1151973 - RNA, 19 nt, Homo sapiens
  misc_RNA (1)...(19): siRNA sense strand
uauccacccugcaucuguu

SEQ ID NO: 1151974 - RNA, 19 nt, Homo sapiens
  misc_RNA (1)...(19): siRNA sense strand
aagaaggcuuggagacaga

SEQ ID NO: 1151975 - RNA, 19 nt, Homo sapiens
  misc_RNA (1)...(19): siRNA sense strand
uaacaccccucaagcucua

SEQ ID NO: 1151976 - RNA, 19 nt, Homo sapiens
  misc_RNA (1)...(19): siRNA sense strand
uagcgaaggaacuauuuga

SEQ ID NO: 1151977 - RNA, 19 nt, Homo sapiens
  misc_RNA (1)...(19): siRNA sense strand
gaaggaacuauuugaacag

SEQ ID NO: 1151978 - RNA, 19 nt, Homo sapiens
  misc_RNA (1)...(19): siRNA sense strand
guaacuugaugggagcuau

SEQ ID NO: 1151979 - RNA, 19 nt, Homo sapiens
  misc_RNA (1)...(19): siRNA sense strand
ccaucgcccuucaccauca

SEQ ID NO: 1151980 - RNA, 19 nt, Homo sapiens
  misc_RNA (1)...(19): siRNA sense strand
uaaacagugccaagaagga

SEQ ID NO: 1151981 - RNA, 19 nt, Homo sapiens
  misc_RNA (1)...(19): siRNA sense strand
cuacuggccaaccuacuaa

SEQ ID NO: 1151982 - RNA, 19 nt, Homo sapiens
  misc_RNA (1)...(19): siRNA sense strand
ucagaucaaggccuagaaa

SEQ ID NO: 1151983 - RNA, 19 nt, Homo sapiens
  misc_RNA (1)...(19): siRNA sense strand
guaggaaauaugacuggaa

SEQ ID NO: 1151984 - RNA, 19 nt, Homo sapiens
  misc_RNA (1)...(19): siRNA sense strand
cggcucccauucugguuaa

SEQ ID NO: 1151985 - RNA, 19 nt, Homo sapiens
  misc_RNA (1)...(19): siRNA sense strand
ccugacaacaucauuaaau

SEQ ID NO: 1151986 - RNA, 19 nt, Homo sapiens
  misc_RNA (1)...(19): siRNA sense strand
gcagcauguucagcucuug

SEQ ID NO: 1151987 - RNA, 19 nt, Homo sapiens
  misc_RNA (1)...(19): siRNA sense strand
uaucaaaccugccccuguu

SEQ ID NO: 1151988 - RNA, 19 nt, Homo sapiens
  misc_RNA (1)...(19): siRNA sense strand
caagcuucccucugucuga

SEQ ID NO: 1151989 - RNA, 19 nt, Homo sapiens
  misc_RNA (1)...(19): siRNA sense strand
gcugggaaccuuugcucaa

SEQ ID NO: 1151990 - RNA, 19 nt, Homo sapiens
  misc_RNA (1)...(19): siRNA sense strand
gaagaugauggcccagaag

SEQ ID NO: 1151991 - RNA, 19 nt, Homo sapiens
  misc_RNA (1)...(19): siRNA sense strand
gaaccucaacaugaacaga

SEQ ID NO: 1151992 - RNA, 19 nt, Homo sapiens
  misc_RNA (1)...(19): siRNA sense strand
ugacagugagaaucaagaa

SEQ ID NO: 1151993 - RNA, 19 nt, Homo sapiens
  misc_RNA (1)...(19): siRNA sense strand
gaaggagguagagaagguu

SEQ ID NO: 1151994 - RNA, 19 nt, Homo sapiens
  misc_RNA (1)...(19): siRNA sense strand
cuaaggguguaguccugaa

SEQ ID NO: 1151995 - RNA, 19 nt, Homo sapiens
  misc_RNA (1)...(19): siRNA sense strand
ucauaaaacugucaagaag

SEQ ID NO: 1151996 - RNA, 19 nt, Homo sapiens
  misc_RNA (1)...(19): siRNA sense strand
aucaagaaccucaacauga

SEQ ID NO: 1151997 - RNA, 19 nt, Homo sapiens
  misc_RNA (1)...(19): siRNA sense strand
ugucucacccuuaauuguu

SEQ ID NO: 1151998 - RNA, 19 nt, Homo sapiens
  misc_RNA (1)...(19): siRNA sense strand
gccuuucgcuguaucaaac

SEQ ID NO: 1151999 - RNA, 19 nt, Homo sapiens
  misc_RNA (1)...(19): siRNA sense strand
ggagacagaagcguucauc

SEQ ID NO: 1152000 - RNA, 19 nt, Homo sapiens
  misc_RNA (1)...(19): siRNA sense strand
gcgaaggaacuauuugaac

SEQ ID NO: 1152001 - RNA, 19 nt, Homo sapiens
  misc_RNA (1)...(19): siRNA sense strand
guguaguccugaaacugaa

SEQ ID NO: 1152002 - RNA, 19 nt, Homo sapiens
  misc_RNA (1)...(19): siRNA sense strand
gaacagagcuccugacaac

SEQ ID NO: 1152003 - RNA, 19 nt, Homo sapiens
  misc_RNA (1)...(19): siRNA sense strand
caagaaggauugucagaga

SEQ ID NO: 1152004 - RNA, 19 nt, Homo sapiens
  misc_RNA (1)...(19): siRNA sense strand
ucaagaaccucaacaugaa

SEQ ID NO: 1152005 - RNA, 19 nt, Homo sapiens
  misc_RNA (1)...(19): siRNA sense strand
ccaaucaacucauucagaa

SEQ ID NO: 1152006 - RNA, 19 nt, Homo sapiens
  misc_RNA (1)...(19): siRNA sense strand
gcacacaugucagcauuga

SEQ ID NO: 1152007 - RNA, 19 nt, Homo sapiens
  misc_RNA (1)...(19): siRNA sense strand
guucagcucuugacacaaa

SEQ ID NO: 1152008 - RNA, 19 nt, Homo sapiens
  misc_RNA (1)...(19): siRNA sense strand
ggaacuaucuccucucucu

SEQ ID NO: 1152009 - RNA, 19 nt, Homo sapiens
  misc_RNA (1)...(19): siRNA sense strand
ggaagaugauggcccagaa

SEQ ID NO: 1152010 - RNA, 19 nt, Homo sapiens
  misc_RNA (1)...(19): siRNA sense strand
cgaaggaacuauuugaaca

SEQ ID NO: 1152011 - RNA, 19 nt, Homo sapiens
  misc_RNA (1)...(19): siRNA sense strand
gggccuagaacccaaauua

SEQ ID NO: 1152012 - RNA, 19 nt, Homo sapiens
  misc_RNA (1)...(19): siRNA sense strand
gaagccaccuauagagaga

SEQ ID NO: 1152013 - RNA, 19 nt, Homo sapiens
  misc_RNA (1)...(19): siRNA sense strand
gauaaacagugccaagaag

SEQ ID NO: 1152014 - RNA, 19 nt, Homo sapiens
  misc_RNA (1)...(19): siRNA sense strand
gaagagauccagccacauc

SEQ ID NO: 1152015 - RNA, 19 nt, Homo sapiens
  misc_RNA (1)...(19): siRNA sense strand
uuaaagagcugggaaccuu

SEQ ID NO: 1152016 - RNA, 19 nt, Homo sapiens
  misc_RNA (1)...(19): siRNA sense strand
ggcgguggcuguaacauga

SEQ ID NO: 1152017 - RNA, 19 nt, Homo sapiens
  misc_RNA (1)...(19): siRNA sense strand
gcaccaggauaugucuuaa

SEQ ID NO: 1152018 - RNA, 19 nt, Homo sapiens
  misc_RNA (1)...(19): siRNA sense strand
cuagagagguaggaaauau

SEQ ID NO: 1152019 - RNA, 19 nt, Homo sapiens
  misc_RNA (1)...(19): siRNA sense strand
uugaacagcugaagaugaa

SEQ ID NO: 1152020 - RNA, 19 nt, Homo sapiens
  misc_RNA (1)...(19): siRNA sense strand
cagcacacaugucagcauu

SEQ ID NO: 1152021 - RNA, 19 nt, Homo sapiens
  misc_RNA (1)...(19): siRNA sense strand
gaacagcugaagaugaaga

SEQ ID NO: 1152022 - RNA, 19 nt, Homo sapiens
  misc_RNA (1)...(19): siRNA sense strand
acacaaauccaccuucuug

SEQ ID NO: 1152023 - RNA, 19 nt, Homo sapiens
  misc_RNA (1)...(19): siRNA sense strand
cuaugcagcugauugaaga

SEQ ID NO: 1152024 - RNA, 19 nt, Homo sapiens
  misc_RNA (1)...(19): siRNA sense strand
uagaggaaguugucaagau

SEQ ID NO: 1152025 - RNA, 19 nt, Homo sapiens
  misc_RNA (1)...(19): siRNA sense strand
ccggauuccucacccaaua

SEQ ID NO: 1152026 - RNA, 19 nt, Homo sapiens
  misc_RNA (1)...(19): siRNA sense strand
ucuguuaucuucacuguuc

SEQ ID NO: 1152027 - RNA, 19 nt, Homo sapiens
  misc_RNA (1)...(19): siRNA sense strand
uggccaaccuacuaaauga

SEQ ID NO: 1152028 - RNA, 19 nt, Homo sapiens
  misc_RNA (1)...(19): siRNA sense strand
gccagggccuuucgcugua

SEQ ID NO: 1152029 - RNA, 19 nt, Homo sapiens
  misc_RNA (1)...(19): siRNA sense strand
gaacaccggcucccauucu

SEQ ID NO: 1152030 - RNA, 19 nt, Homo sapiens
  misc_RNA (1)...(19): siRNA sense strand
agaggaaguugucaagaug

SEQ ID NO: 1152031 - RNA, 19 nt, Homo sapiens
  misc_RNA (1)...(19): siRNA sense strand
ggaaaaugcugugaagaga

SEQ ID NO: 1152032 - RNA, 19 nt, Homo sapiens
  misc_RNA (1)...(19): siRNA sense strand
gccaguagcaccaggauau

SEQ ID NO: 1152033 - RNA, 19 nt, Homo sapiens
  misc_RNA (1)...(19): siRNA sense strand
gaaaacaccagcccaauca

SEQ ID NO: 1152034 - RNA, 19 nt, Homo sapiens
  misc_RNA (1)...(19): siRNA sense strand
gguguaguccugaaacuga

SEQ ID NO: 1152035 - RNA, 19 nt, Homo sapiens
  misc_RNA (1)...(19): siRNA sense strand
gcuauugccuaagggugua

SEQ ID NO: 1152036 - RNA, 19 nt, Homo sapiens
  misc_RNA (1)...(19): siRNA sense strand
gagccucaagcuaacuuua

SEQ ID NO: 1152037 - RNA, 19 nt, Homo sapiens
  misc_RNA (1)...(19): siRNA sense strand
gacagaagcguucaucagu

SEQ ID NO: 1152038 - RNA, 19 nt, Homo sapiens
  misc_RNA (1)...(19): siRNA sense strand
gcuccugacaacaucauua

SEQ ID NO: 1152039 - RNA, 19 nt, Homo sapiens
  misc_RNA (1)...(19): siRNA sense strand
ccacugcuauugccuaagg

SEQ ID NO: 1152040 - RNA, 19 nt, Homo sapiens
  misc_RNA (1)...(19): siRNA sense strand
agaaggagguagagaaggu

SEQ ID NO: 1152041 - RNA, 19 nt, Homo sapiens
  misc_RNA (1)...(19): siRNA sense strand
ccaggagucucuaaacaac

SEQ ID NO: 1152042 - RNA, 19 nt, Homo sapiens
  misc_RNA (1)...(19): siRNA sense strand
ccucuuccauguuucgaaa

SEQ ID NO: 1152043 - RNA, 19 nt, Homo sapiens
  misc_RNA (1)...(19): siRNA sense strand
ucagauagcgaaggaacua

SEQ ID NO: 1152044 - RNA, 19 nt, Homo sapiens
  misc_RNA (1)...(19): siRNA sense strand
guuccaacccuguaacuug

SEQ ID NO: 1152045 - RNA, 19 nt, Homo sapiens
  misc_RNA (1)...(19): siRNA sense strand
ugacacaaauccaccuucu

SEQ ID NO: 1152046 - RNA, 19 nt, Homo sapiens
  misc_RNA (1)...(19): siRNA sense strand
gcagaaggagguagagaag

SEQ ID NO: 1152047 - RNA, 19 nt, Homo sapiens
  misc_RNA (1)...(19): siRNA sense strand
gaaggauugucagagaaca

SEQ ID NO: 1152048 - RNA, 19 nt, Homo sapiens
  misc_RNA (1)...(19): siRNA sense strand
ugauggugcuagagaggua

SEQ ID NO: 1152049 - RNA, 19 nt, Homo sapiens
  misc_RNA (1)...(19): siRNA sense strand
ggagguagagaagguuaaa

SEQ ID NO: 1152050 - RNA, 19 nt, Homo sapiens
  misc_RNA (1)...(19): siRNA sense strand
aggacaagcuucccucugu

SEQ ID NO: 1152051 - RNA, 19 nt, Homo sapiens
  misc_RNA (1)...(19): siRNA sense strand
aagaaggauugucagagaa

SEQ ID NO: 1152052 - RNA, 19 nt, Homo sapiens
  misc_RNA (1)...(19): siRNA sense strand
cgauaaacagugccaagaa

SEQ ID NO: 1152053 - RNA, 19 nt, Homo sapiens
  misc_RNA (1)...(19): siRNA sense strand
gcuagagagguaggaaaua

SEQ ID NO: 1152054 - RNA, 19 nt, Homo sapiens
  misc_RNA (1)...(19): siRNA sense strand
gccuagaacccaaauuaga

SEQ ID NO: 1152055 - RNA, 19 nt, Homo sapiens
  misc_RNA (1)...(19): siRNA sense strand
gaaucaagaaccucaacau

SEQ ID NO: 1152056 - RNA, 19 nt, Homo sapiens
  misc_RNA (1)...(19): siRNA sense strand
caucuguuaucuucacugu

SEQ ID NO: 1152057 - RNA, 19 nt, Homo sapiens
  misc_RNA (1)...(19): siRNA sense strand
ggaacuacuggccaaccua

SEQ ID NO: 1152058 - RNA, 19 nt, Homo sapiens
  misc_RNA (1)...(19): siRNA sense strand
ccuacuaaaugaacaacau

SEQ ID NO: 1152059 - RNA, 19 nt, Homo sapiens
  misc_RNA (1)...(19): siRNA sense strand
agagagguaggaaauauga

SEQ ID NO: 1152060 - RNA, 19 nt, Homo sapiens
  misc_RNA (1)...(19): siRNA sense strand
ugacugcagcccucauaaa

SEQ ID NO: 1152061 - RNA, 19 nt, Homo sapiens
  misc_RNA (1)...(19): siRNA sense strand
gaugggauucuccaacaug

SEQ ID NO: 1152062 - RNA, 19 nt, Homo sapiens
  misc_RNA (1)...(19): siRNA sense strand
ggaaauaugacuggaacca

SEQ ID NO: 1152063 - RNA, 19 nt, Homo sapiens
  misc_RNA (1)...(19): siRNA sense strand
cuaaaugaacaacaucaga

SEQ ID NO: 1152064 - RNA, 19 nt, Homo sapiens
  misc_RNA (1)...(19): siRNA sense strand
ggauuuagaggaaguuguc

SEQ ID NO: 1152065 - RNA, 19 nt, Homo sapiens
  misc_RNA (1)...(19): siRNA sense strand
gucucacccuuaauuguuu

SEQ ID NO: 1152066 - RNA, 19 nt, Homo sapiens
  misc_RNA (1)...(19): siRNA sense strand
cuaccacugugaagauugu

SEQ ID NO: 1152067 - RNA, 19 nt, Homo sapiens
  misc_RNA (1)...(19): siRNA sense strand
ccagcccaaucaacucauu

SEQ ID NO: 1152068 - RNA, 19 nt, Homo sapiens
  misc_RNA (1)...(19): siRNA sense strand
uuccaacccuguaacuuga

SEQ ID NO: 1152069 - RNA, 19 nt, Homo sapiens
  misc_RNA (1)...(19): siRNA sense strand
uagcgaaggaacuauuuga

SEQ ID NO: 1152070 - RNA, 19 nt, Homo sapiens
  misc_RNA (1)...(19): siRNA sense strand
gaaggaacuauuugaacag

SEQ ID NO: 1152071 - RNA, 19 nt, Homo sapiens
  misc_RNA (1)...(19): siRNA sense strand
uauccacccugcaucuguu

SEQ ID NO: 1152072 - RNA, 19 nt, Homo sapiens
  misc_RNA (1)...(19): siRNA sense strand
aagaaggcuuggagacaga

SEQ ID NO: 1152073 - RNA, 19 nt, Homo sapiens
  misc_RNA (1)...(19): siRNA sense strand
uaacaccccucaagcucua

SEQ ID NO: 1152074 - RNA, 19 nt, Homo sapiens
  misc_RNA (1)...(19): siRNA sense strand
guaacuugaugggagcuau

SEQ ID NO: 1152075 - RNA, 19 nt, Homo sapiens
  misc_RNA (1)...(19): siRNA sense strand
ccaucgcccuucaccauca

SEQ ID NO: 1152076 - RNA, 19 nt, Homo sapiens
  misc_RNA (1)...(19): siRNA sense strand
uaaacagugccaagaagga

SEQ ID NO: 1152077 - RNA, 19 nt, Homo sapiens
  misc_RNA (1)...(19): siRNA sense strand
ucagaucaaggccuagaaa

SEQ ID NO: 1152078 - RNA, 19 nt, Homo sapiens
  misc_RNA (1)...(19): siRNA sense strand
guaggaaauaugacuggaa

SEQ ID NO: 1152079 - RNA, 19 nt, Homo sapiens
  misc_RNA (1)...(19): siRNA sense strand
cggcucccauucugguuaa

SEQ ID NO: 1152080 - RNA, 19 nt, Homo sapiens
  misc_RNA (1)...(19): siRNA sense strand
ccugacaacaucauuaaau

SEQ ID NO: 1152081 - RNA, 19 nt, Homo sapiens
  misc_RNA (1)...(19): siRNA sense strand
cuacuggccaaccuacuaa

SEQ ID NO: 1152082 - RNA, 19 nt, Homo sapiens
  misc_RNA (1)...(19): siRNA sense strand
gcagcauguucagcucuug

SEQ ID NO: 1152083 - RNA, 19 nt, Homo sapiens
  misc_RNA (1)...(19): siRNA sense strand
uaucaaaccugccccuguu

SEQ ID NO: 1152084 - RNA, 19 nt, Homo sapiens
  misc_RNA (1)...(19): siRNA sense strand
caagcuucccucugucuga

SEQ ID NO: 1152085 - RNA, 19 nt, Homo sapiens
  misc_RNA (1)...(19): siRNA sense strand
gcugggaaccuuugcucaa

SEQ ID NO: 1152086 - RNA, 19 nt, Homo sapiens
  misc_RNA (1)...(19): siRNA sense strand
ugacagugagaaucaagaa

SEQ ID NO: 1152087 - RNA, 19 nt, Homo sapiens
  misc_RNA (1)...(19): siRNA sense strand
gaagaugauggcccagaag

SEQ ID NO: 1152088 - RNA, 19 nt, Homo sapiens
  misc_RNA (1)...(19): siRNA sense strand
gaaccucaacaugaacaga

SEQ ID NO: 1152089 - RNA, 19 nt, Homo sapiens
  misc_RNA (1)...(19): siRNA sense strand
ucauaaaacugucaagaag

SEQ ID NO: 1152090 - RNA, 19 nt, Homo sapiens
  misc_RNA (1)...(19): siRNA sense strand
cuaaggguguaguccugaa

SEQ ID NO: 1152091 - RNA, 19 nt, Homo sapiens
  misc_RNA (1)...(19): siRNA sense strand
gaaggagguagagaagguu

SEQ ID NO: 1152092 - RNA, 19 nt, Homo sapiens
  misc_RNA (1)...(19): siRNA sense strand
aaucaagaaccucaacaug

SEQ ID NO: 1152093 - RNA, 19 nt, Homo sapiens
  misc_RNA (1)...(19): siRNA sense strand
ugucucacccuuaauuguu

SEQ ID NO: 1152094 - RNA, 19 nt, Homo sapiens
  misc_RNA (1)...(19): siRNA sense strand
gcgaaggaacuauuugaac

SEQ ID NO: 1152095 - RNA, 19 nt, Homo sapiens
  misc_RNA (1)...(19): siRNA sense strand
gccuuucgcuguaucaaac

SEQ ID NO: 1152096 - RNA, 19 nt, Homo sapiens
  misc_RNA (1)...(19): siRNA sense strand
ggagacagaagcguucauc

SEQ ID NO: 1152097 - RNA, 19 nt, Homo sapiens
  misc_RNA (1)...(19): siRNA sense strand
guguaguccugaaacugaa

SEQ ID NO: 1152098 - RNA, 19 nt, Homo sapiens
  misc_RNA (1)...(19): siRNA sense strand
aucaagaaccucaacauga

SEQ ID NO: 1152099 - RNA, 19 nt, Homo sapiens
  misc_RNA (1)...(19): siRNA sense strand
ucaguggaggugagaguuu

SEQ ID NO: 1152100 - RNA, 19 nt, Homo sapiens
  misc_RNA (1)...(19): siRNA sense strand
ucgcuggaccguugugaaa

SEQ ID NO: 1152101 - RNA, 19 nt, Homo sapiens
  misc_RNA (1)...(19): siRNA sense strand
caaauuagagccccaggaa

SEQ ID NO: 1152102 - RNA, 19 nt, Homo sapiens
  misc_RNA (1)...(19): siRNA sense strand
gaacagagcuccugacaac

SEQ ID NO: 1152103 - RNA, 19 nt, Homo sapiens
  misc_RNA (1)...(19): siRNA sense strand
caagaaggauugucagaga

SEQ ID NO: 1152104 - RNA, 19 nt, Homo sapiens
  misc_RNA (1)...(19): siRNA sense strand
ccaaucaacucauucagaa

SEQ ID NO: 1152105 - RNA, 19 nt, Homo sapiens
  misc_RNA (1)...(19): siRNA sense strand
ggaacuaucuccucucucu

SEQ ID NO: 1152106 - RNA, 19 nt, Homo sapiens
  misc_RNA (1)...(19): siRNA sense strand
gggccuagaacccaaauua

SEQ ID NO: 1152107 - RNA, 19 nt, Homo sapiens
  misc_RNA (1)...(19): siRNA sense strand
gaagccaccuauagagaga

SEQ ID NO: 1152108 - RNA, 19 nt, Homo sapiens
  misc_RNA (1)...(19): siRNA sense strand
gauaaacagugccaagaag

SEQ ID NO: 1152109 - RNA, 19 nt, Homo sapiens
  misc_RNA (1)...(19): siRNA sense strand
gaagagauccagccacauc

SEQ ID NO: 1152110 - RNA, 19 nt, Homo sapiens
  misc_RNA (1)...(19): siRNA sense strand
ggcgguggcuguaacauga

SEQ ID NO: 1152111 - RNA, 19 nt, Homo sapiens
  misc_RNA (1)...(19): siRNA sense strand
cuagagagguaggaaauau

SEQ ID NO: 1152112 - RNA, 19 nt, Homo sapiens
  misc_RNA (1)...(19): siRNA sense strand
ccggauuccucacccaaua

SEQ ID NO: 1152113 - RNA, 19 nt, Homo sapiens
  misc_RNA (1)...(19): siRNA sense strand
uagaggaaguugucaagau

SEQ ID NO: 1152114 - RNA, 19 nt, Homo sapiens
  misc_RNA (1)...(19): siRNA sense strand
ucuguuaucuucacuguuc

SEQ ID NO: 1152115 - RNA, 19 nt, Homo sapiens
  misc_RNA (1)...(19): siRNA sense strand
gccagggccuuucgcugua

SEQ ID NO: 1152116 - RNA, 19 nt, Homo sapiens
  misc_RNA (1)...(19): siRNA sense strand
gaacaccggcucccauucu

SEQ ID NO: 1152117 - RNA, 19 nt, Homo sapiens
  misc_RNA (1)...(19): siRNA sense strand
agaggaaguugucaagaug

SEQ ID NO: 1152118 - RNA, 19 nt, Homo sapiens
  misc_RNA (1)...(19): siRNA sense strand
ggaaaaugcugugaagaga

SEQ ID NO: 1152119 - RNA, 19 nt, Homo sapiens
  misc_RNA (1)...(19): siRNA sense strand
gguguaguccugaaacuga

SEQ ID NO: 1152120 - RNA, 19 nt, Homo sapiens
  misc_RNA (1)...(19): siRNA sense strand
gaaaacaccagcccaauca

SEQ ID NO: 1152121 - RNA, 19 nt, Homo sapiens
  misc_RNA (1)...(19): siRNA sense strand
gcuauugccuaagggugua

SEQ ID NO: 1152122 - RNA, 19 nt, Homo sapiens
  misc_RNA (1)...(19): siRNA sense strand
gacagaagcguucaucagu

SEQ ID NO: 1152123 - RNA, 19 nt, Homo sapiens
  misc_RNA (1)...(19): siRNA sense strand
gcuccugacaacaucauua

SEQ ID NO: 1152124 - RNA, 19 nt, Homo sapiens
  misc_RNA (1)...(19): siRNA sense strand
ccacugcuauugccuaagg

SEQ ID NO: 1152125 - RNA, 19 nt, Homo sapiens
  misc_RNA (1)...(19): siRNA sense strand
ccucuuccauguuucgaaa

SEQ ID NO: 1152126 - RNA, 19 nt, Homo sapiens
  misc_RNA (1)...(19): siRNA sense strand
ccaggagucucuaaacaac

SEQ ID NO: 1152127 - RNA, 19 nt, Homo sapiens
  misc_RNA (1)...(19): siRNA sense strand
ugauggugcuagagaggua

SEQ ID NO: 1152128 - RNA, 19 nt, Homo sapiens
  misc_RNA (1)...(19): siRNA sense strand
gaaggauugucagagaaca

SEQ ID NO: 1152129 - RNA, 19 nt, Homo sapiens
  misc_RNA (1)...(19): siRNA sense strand
aggacaagcuucccucugu

SEQ ID NO: 1152130 - RNA, 19 nt, Homo sapiens
  misc_RNA (1)...(19): siRNA sense strand
aagaaggauugucagagaa

SEQ ID NO: 1152131 - RNA, 19 nt, Homo sapiens
  misc_RNA (1)...(19): siRNA sense strand
cgauaaacagugccaagaa

SEQ ID NO: 1152132 - RNA, 19 nt, Homo sapiens
  misc_RNA (1)...(19): siRNA sense strand
gcuagagagguaggaaaua

SEQ ID NO: 1152133 - RNA, 19 nt, Homo sapiens
  misc_RNA (1)...(19): siRNA sense strand
gccuagaacccaaauuaga

SEQ ID NO: 1152134 - RNA, 19 nt, Homo sapiens
  misc_RNA (1)...(19): siRNA sense strand
caucuguuaucuucacugu

SEQ ID NO: 1152135 - RNA, 19 nt, Homo sapiens
  misc_RNA (1)...(19): siRNA sense strand
agagagguaggaaauauga

SEQ ID NO: 1152136 - RNA, 19 nt, Homo sapiens
  misc_RNA (1)...(19): siRNA sense strand
ggaaauaugacuggaacca

SEQ ID NO: 1152137 - RNA, 19 nt, Homo sapiens
  misc_RNA (1)...(19): siRNA sense strand
ccagcccaaucaacucauu

SEQ ID NO: 1152138 - RNA, 19 nt, Homo sapiens
  misc_RNA (1)...(19): siRNA sense strand
ggauuuagaggaaguuguc

SEQ ID NO: 1152139 - RNA, 19 nt, Homo sapiens
  misc_RNA (1)...(19): siRNA sense strand
gucucacccuuaauuguuu

SEQ ID NO: 1152140 - RNA, 19 nt, Homo sapiens
  misc_RNA (1)...(19): siRNA sense strand
cuaccacugugaagauugu

SEQ ID NO: 1152141 - RNA, 19 nt, Homo sapiens
  misc_RNA (1)...(19): siRNA sense strand
aagaaggcuuggagacaga

SEQ ID NO: 1152142 - RNA, 19 nt, Homo sapiens
  misc_RNA (1)...(19): siRNA sense strand
uauccacccugcaucuguu

SEQ ID NO: 1152143 - RNA, 19 nt, Homo sapiens
  misc_RNA (1)...(19): siRNA sense strand
cggcucccauucugguuaa

SEQ ID NO: 1152144 - RNA, 19 nt, Homo sapiens
  misc_RNA (1)...(19): siRNA sense strand
ccugacaacaucauuaaau

SEQ ID NO: 1152145 - RNA, 19 nt, Homo sapiens
  misc_RNA (1)...(19): siRNA sense strand
uaaacagugccaagaagga

SEQ ID NO: 1152146 - RNA, 19 nt, Homo sapiens
  misc_RNA (1)...(19): siRNA sense strand
ucagaucaaggccuagaaa

SEQ ID NO: 1152147 - RNA, 19 nt, Homo sapiens
  misc_RNA (1)...(19): siRNA sense strand
guaggaaauaugacuggaa

SEQ ID NO: 1152148 - RNA, 19 nt, Homo sapiens
  misc_RNA (1)...(19): siRNA sense strand
caagcuucccucugucuga

SEQ ID NO: 1152149 - RNA, 19 nt, Homo sapiens
  misc_RNA (1)...(19): siRNA sense strand
uaucaaaccugccccuguu

SEQ ID NO: 1152150 - RNA, 19 nt, Homo sapiens
  misc_RNA (1)...(19): siRNA sense strand
cuaaggguguaguccugaa

SEQ ID NO: 1152151 - RNA, 19 nt, Homo sapiens
  misc_RNA (1)...(19): siRNA sense strand
guguaguccugaaacugaa

SEQ ID NO: 1152152 - RNA, 19 nt, Homo sapiens
  misc_RNA (1)...(19): siRNA sense strand
ugucucacccuuaauuguu

SEQ ID NO: 1152153 - RNA, 19 nt, Homo sapiens
  misc_RNA (1)...(19): siRNA sense strand
gccuuucgcuguaucaaac

SEQ ID NO: 1152154 - RNA, 19 nt, Homo sapiens
  misc_RNA (1)...(19): siRNA sense strand
ggagacagaagcguucauc

SEQ ID NO: 1152155 - RNA, 19 nt, Homo sapiens
  misc_RNA (1)...(19): siRNA sense strand
ugccauccauccaggaaga

SEQ ID NO: 1152156 - RNA, 19 nt, Homo sapiens
  misc_RNA (1)...(19): siRNA sense strand
ucgcuggaccguugugaaa

SEQ ID NO: 1152157 - RNA, 19 nt, Homo sapiens
  misc_RNA (1)...(19): siRNA sense strand
caaauuagagccccaggaa

SEQ ID NO: 1152158 - RNA, 19 nt, Homo sapiens
  misc_RNA (1)...(19): siRNA sense strand
ucaguggaggugagaguuu

SEQ ID NO: 1152159 - RNA, 19 nt, Homo sapiens
  misc_RNA (1)...(19): siRNA sense strand
gaaccacugagaucaacuc

SEQ ID NO: 1152160 - RNA, 19 nt, Homo sapiens
  misc_RNA (1)...(19): siRNA sense strand
ucgaaagccauaugugaga

SEQ ID NO: 1152161 - RNA, 19 nt, Homo sapiens
  misc_RNA (1)...(19): siRNA sense strand
ggaagaacugcggcacaug

SEQ ID NO: 1152162 - RNA, 19 nt, Homo sapiens
  misc_RNA (1)...(19): siRNA sense strand
gccaagaaggauugucaga

SEQ ID NO: 1152163 - RNA, 19 nt, Homo sapiens
  misc_RNA (1)...(19): siRNA sense strand
cagagcuccugacaacauc

SEQ ID NO: 1152164 - RNA, 19 nt, Homo sapiens
  misc_RNA (1)...(19): siRNA sense strand
uuucgaaagccauauguga

SEQ ID NO: 1152165 - RNA, 19 nt, Homo sapiens
  misc_RNA (1)...(19): siRNA sense strand
cagcuucaacccugggaaa

SEQ ID NO: 1152166 - RNA, 19 nt, Homo sapiens
  misc_RNA (1)...(19): siRNA sense strand
acagagcuccugacaacau

SEQ ID NO: 1152167 - RNA, 19 nt, Homo sapiens
  misc_RNA (1)...(19): siRNA sense strand
gcauccaggagucucuaaa

SEQ ID NO: 1152168 - RNA, 19 nt, Homo sapiens
  misc_RNA (1)...(19): siRNA sense strand
gagacagaagcguucauca

SEQ ID NO: 1152169 - RNA, 19 nt, Homo sapiens
  misc_RNA (1)...(19): siRNA sense strand
ggccuccaccagucgauaa

SEQ ID NO: 1152170 - RNA, 19 nt, Homo sapiens
  misc_RNA (1)...(19): siRNA sense strand
ccuagaacccaaauuagag

SEQ ID NO: 1152171 - RNA, 19 nt, Homo sapiens
  misc_RNA (1)...(19): siRNA sense strand
aagaacaccggcucccauu

SEQ ID NO: 1152172 - RNA, 19 nt, Homo sapiens
  misc_RNA (1)...(19): siRNA sense strand
gugccaagaaggauuguca

SEQ ID NO: 1152173 - RNA, 19 nt, Homo sapiens
  misc_RNA (1)...(19): siRNA sense strand
ccagggccuuucgcuguau

SEQ ID NO: 1152174 - RNA, 19 nt, Homo sapiens
  misc_RNA (1)...(19): siRNA sense strand
ggaaaacaccagcccaauc

SEQ ID NO: 1152175 - RNA, 19 nt, Homo sapiens
  misc_RNA (1)...(19): siRNA sense strand
uggaagccaccuauagaga

SEQ ID NO: 1152176 - RNA, 19 nt, Homo sapiens
  misc_RNA (1)...(19): siRNA sense strand
cccugcaucuguuaucuuc

SEQ ID NO: 1152177 - RNA, 19 nt, Homo sapiens
  misc_RNA (1)...(19): siRNA sense strand
cccugccucuuccauguuu

SEQ ID NO: 1152178 - RNA, 19 nt, Homo sapiens
  misc_RNA (1)...(19): siRNA sense strand
cccaaucaacucauucaga

SEQ ID NO: 1152179 - RNA, 19 nt, Homo sapiens
  misc_RNA (1)...(19): siRNA sense strand
ugacuggaaccacugagau

SEQ ID NO: 1152180 - RNA, 19 nt, Homo sapiens
  misc_RNA (1)...(19): siRNA sense strand
ggaaguugucaagauggaa

SEQ ID NO: 1152181 - RNA, 19 nt, Homo sapiens
  misc_RNA (1)...(19): siRNA sense strand
aggaagaacugcggcacau

SEQ ID NO: 1152182 - RNA, 19 nt, Homo sapiens
  misc_RNA (1)...(19): siRNA sense strand
ggaccguugugaaaacaga

SEQ ID NO: 1152183 - RNA, 19 nt, Homo sapiens
  misc_RNA (1)...(19): siRNA sense strand
aaaaugcugugaagagauc

SEQ ID NO: 1152184 - RNA, 19 nt, Homo sapiens
  misc_RNA (1)...(19): siRNA sense strand
ggccuagaacccaaauuag

SEQ ID NO: 1152185 - RNA, 19 nt, Homo sapiens
  misc_RNA (1)...(19): siRNA sense strand
gaacagagcuccugacaac

SEQ ID NO: 1152186 - RNA, 19 nt, Homo sapiens
  misc_RNA (1)...(19): siRNA sense strand
caagaaggauugucagaga

SEQ ID NO: 1152187 - RNA, 19 nt, Homo sapiens
  misc_RNA (1)...(19): siRNA sense strand
ucaagaaccucaacaugaa

SEQ ID NO: 1152188 - RNA, 19 nt, Homo sapiens
  misc_RNA (1)...(19): siRNA sense strand
ccaaucaacucauucagaa

SEQ ID NO: 1152189 - RNA, 19 nt, Homo sapiens
  misc_RNA (1)...(19): siRNA sense strand
gcacacaugucagcauuga

SEQ ID NO: 1152190 - RNA, 19 nt, Homo sapiens
  misc_RNA (1)...(19): siRNA sense strand
guucagcucuugacacaaa

SEQ ID NO: 1152191 - RNA, 19 nt, Homo sapiens
  misc_RNA (1)...(19): siRNA sense strand
ggaacuaucuccucucucu

SEQ ID NO: 1152192 - RNA, 19 nt, Homo sapiens
  misc_RNA (1)...(19): siRNA sense strand
gggccuagaacccaaauua

SEQ ID NO: 1152193 - RNA, 19 nt, Homo sapiens
  misc_RNA (1)...(19): siRNA sense strand
gaagccaccuauagagaga

SEQ ID NO: 1152194 - RNA, 19 nt, Homo sapiens
  misc_RNA (1)...(19): siRNA sense strand
gauaaacagugccaagaag

SEQ ID NO: 1152195 - RNA, 19 nt, Homo sapiens
  misc_RNA (1)...(19): siRNA sense strand
gaagagauccagccacauc

SEQ ID NO: 1152196 - RNA, 19 nt, Homo sapiens
  misc_RNA (1)...(19): siRNA sense strand
uuaaagagcugggaaccuu

SEQ ID NO: 1152197 - RNA, 19 nt, Homo sapiens
  misc_RNA (1)...(19): siRNA sense strand
ggcgguggcuguaacauga

SEQ ID NO: 1152198 - RNA, 19 nt, Homo sapiens
  misc_RNA (1)...(19): siRNA sense strand
gcaccaggauaugucuuaa

SEQ ID NO: 1152199 - RNA, 19 nt, Homo sapiens
  misc_RNA (1)...(19): siRNA sense strand
cuagagagguaggaaauau

SEQ ID NO: 1152200 - RNA, 19 nt, Homo sapiens
  misc_RNA (1)...(19): siRNA sense strand
cagcacacaugucagcauu

SEQ ID NO: 1152201 - RNA, 19 nt, Homo sapiens
  misc_RNA (1)...(19): siRNA sense strand
acacaaauccaccuucuug

SEQ ID NO: 1152202 - RNA, 19 nt, Homo sapiens
  misc_RNA (1)...(19): siRNA sense strand
cuaugcagcugauugaaga

SEQ ID NO: 1152203 - RNA, 19 nt, Homo sapiens
  misc_RNA (1)...(19): siRNA sense strand
uagaggaaguugucaagau

SEQ ID NO: 1152204 - RNA, 19 nt, Homo sapiens
  misc_RNA (1)...(19): siRNA sense strand
ccggauuccucacccaaua

SEQ ID NO: 1152205 - RNA, 19 nt, Homo sapiens
  misc_RNA (1)...(19): siRNA sense strand
ucuguuaucuucacuguuc

SEQ ID NO: 1152206 - RNA, 19 nt, Homo sapiens
  misc_RNA (1)...(19): siRNA sense strand
gccagggccuuucgcugua

SEQ ID NO: 1152207 - RNA, 19 nt, Homo sapiens
  misc_RNA (1)...(19): siRNA sense strand
gaacaccggcucccauucu

SEQ ID NO: 1152208 - RNA, 19 nt, Homo sapiens
  misc_RNA (1)...(19): siRNA sense strand
agaggaaguugucaagaug

SEQ ID NO: 1152209 - RNA, 19 nt, Homo sapiens
  misc_RNA (1)...(19): siRNA sense strand
ggaaaaugcugugaagaga

SEQ ID NO: 1152210 - RNA, 19 nt, Homo sapiens
  misc_RNA (1)...(19): siRNA sense strand
gccaguagcaccaggauau

SEQ ID NO: 1152211 - RNA, 19 nt, Homo sapiens
  misc_RNA (1)...(19): siRNA sense strand
gaaaacaccagcccaauca

SEQ ID NO: 1152212 - RNA, 19 nt, Homo sapiens
  misc_RNA (1)...(19): siRNA sense strand
gguguaguccugaaacuga

SEQ ID NO: 1152213 - RNA, 19 nt, Homo sapiens
  misc_RNA (1)...(19): siRNA sense strand
gcuauugccuaagggugua

SEQ ID NO: 1152214 - RNA, 19 nt, Homo sapiens
  misc_RNA (1)...(19): siRNA sense strand
gacagaagcguucaucagu

SEQ ID NO: 1152215 - RNA, 19 nt, Homo sapiens
  misc_RNA (1)...(19): siRNA sense strand
gcuccugacaacaucauua

SEQ ID NO: 1152216 - RNA, 19 nt, Homo sapiens
  misc_RNA (1)...(19): siRNA sense strand
ccacugcuauugccuaagg

SEQ ID NO: 1152217 - RNA, 19 nt, Homo sapiens
  misc_RNA (1)...(19): siRNA sense strand
ccucuuccauguuucgaaa

SEQ ID NO: 1152218 - RNA, 19 nt, Homo sapiens
  misc_RNA (1)...(19): siRNA sense strand
ccaggagucucuaaacaac

SEQ ID NO: 1152219 - RNA, 19 nt, Homo sapiens
  misc_RNA (1)...(19): siRNA sense strand
agaaggagguagagaaggu

SEQ ID NO: 1152220 - RNA, 19 nt, Homo sapiens
  misc_RNA (1)...(19): siRNA sense strand
ugacacaaauccaccuucu

SEQ ID NO: 1152221 - RNA, 19 nt, Homo sapiens
  misc_RNA (1)...(19): siRNA sense strand
guuccaacccuguaacuug

SEQ ID NO: 1152222 - RNA, 19 nt, Homo sapiens
  misc_RNA (1)...(19): siRNA sense strand
ggagguagagaagguuaaa

SEQ ID NO: 1152223 - RNA, 19 nt, Homo sapiens
  misc_RNA (1)...(19): siRNA sense strand
gaaggauugucagagaaca

SEQ ID NO: 1152224 - RNA, 19 nt, Homo sapiens
  misc_RNA (1)...(19): siRNA sense strand
ugauggugcuagagaggua

SEQ ID NO: 1152225 - RNA, 19 nt, Homo sapiens
  misc_RNA (1)...(19): siRNA sense strand
gcagaaggagguagagaag

SEQ ID NO: 1152226 - RNA, 19 nt, Homo sapiens
  misc_RNA (1)...(19): siRNA sense strand
aggacaagcuucccucugu

SEQ ID NO: 1152227 - RNA, 19 nt, Homo sapiens
  misc_RNA (1)...(19): siRNA sense strand
aagaaggauugucagagaa

SEQ ID NO: 1152228 - RNA, 19 nt, Homo sapiens
  misc_RNA (1)...(19): siRNA sense strand
cgauaaacagugccaagaa

SEQ ID NO: 1152229 - RNA, 19 nt, Homo sapiens
  misc_RNA (1)...(19): siRNA sense strand
gcuagagagguaggaaaua

SEQ ID NO: 1152230 - RNA, 19 nt, Homo sapiens
  misc_RNA (1)...(19): siRNA sense strand
gccuagaacccaaauuaga

SEQ ID NO: 1152231 - RNA, 19 nt, Homo sapiens
  misc_RNA (1)...(19): siRNA sense strand
gaaucaagaaccucaacau

SEQ ID NO: 1152232 - RNA, 19 nt, Homo sapiens
  misc_RNA (1)...(19): siRNA sense strand
caucuguuaucuucacugu

SEQ ID NO: 1152233 - RNA, 19 nt, Homo sapiens
  misc_RNA (1)...(19): siRNA sense strand
ugacugcagcccucauaaa

SEQ ID NO: 1152234 - RNA, 19 nt, Homo sapiens
  misc_RNA (1)...(19): siRNA sense strand
agagagguaggaaauauga

SEQ ID NO: 1152235 - RNA, 19 nt, Homo sapiens
  misc_RNA (1)...(19): siRNA sense strand
ggaaauaugacuggaacca

SEQ ID NO: 1152236 - RNA, 19 nt, Homo sapiens
  misc_RNA (1)...(19): siRNA sense strand
ccagcccaaucaacucauu

SEQ ID NO: 1152237 - RNA, 19 nt, Homo sapiens
  misc_RNA (1)...(19): siRNA sense strand
ggauuuagaggaaguuguc

SEQ ID NO: 1152238 - RNA, 19 nt, Homo sapiens
  misc_RNA (1)...(19): siRNA sense strand
gucucacccuuaauuguuu

SEQ ID NO: 1152239 - RNA, 19 nt, Homo sapiens
  misc_RNA (1)...(19): siRNA sense strand
cuaccacugugaagauugu

SEQ ID NO: 1152240 - RNA, 19 nt, Homo sapiens
  misc_RNA (1)...(19): siRNA sense strand
uuccaacccuguaacuuga

SEQ ID NO: 1152241 - RNA, 19 nt, Homo sapiens
  misc_RNA (1)...(19): siRNA sense strand
uauccacccugcaucuguu

SEQ ID NO: 1152242 - RNA, 19 nt, Homo sapiens
  misc_RNA (1)...(19): siRNA sense strand
aagaaggcuuggagacaga

SEQ ID NO: 1152243 - RNA, 19 nt, Homo sapiens
  misc_RNA (1)...(19): siRNA sense strand
guaacuugaugggagcuau

SEQ ID NO: 1152244 - RNA, 19 nt, Homo sapiens
  misc_RNA (1)...(19): siRNA sense strand
ccaucgcccuucaccauca

SEQ ID NO: 1152245 - RNA, 19 nt, Homo sapiens
  misc_RNA (1)...(19): siRNA sense strand
uaaacagugccaagaagga

SEQ ID NO: 1152246 - RNA, 19 nt, Homo sapiens
  misc_RNA (1)...(19): siRNA sense strand
ucagaucaaggccuagaaa

SEQ ID NO: 1152247 - RNA, 19 nt, Homo sapiens
  misc_RNA (1)...(19): siRNA sense strand
guaggaaauaugacuggaa

SEQ ID NO: 1152248 - RNA, 19 nt, Homo sapiens
  misc_RNA (1)...(19): siRNA sense strand
cggcucccauucugguuaa

SEQ ID NO: 1152249 - RNA, 19 nt, Homo sapiens
  misc_RNA (1)...(19): siRNA sense strand
ccugacaacaucauuaaau

SEQ ID NO: 1152250 - RNA, 19 nt, Homo sapiens
  misc_RNA (1)...(19): siRNA sense strand
gcagcauguucagcucuug

SEQ ID NO: 1152251 - RNA, 19 nt, Homo sapiens
  misc_RNA (1)...(19): siRNA sense strand
uaucaaaccugccccuguu

SEQ ID NO: 1152252 - RNA, 19 nt, Homo sapiens
  misc_RNA (1)...(19): siRNA sense strand
caagcuucccucugucuga

SEQ ID NO: 1152253 - RNA, 19 nt, Homo sapiens
  misc_RNA (1)...(19): siRNA sense strand
gcugggaaccuuugcucaa

SEQ ID NO: 1152254 - RNA, 19 nt, Homo sapiens
  misc_RNA (1)...(19): siRNA sense strand
ugacagugagaaucaagaa

SEQ ID NO: 1152255 - RNA, 19 nt, Homo sapiens
  misc_RNA (1)...(19): siRNA sense strand
gaaccucaacaugaacaga

SEQ ID NO: 1152256 - RNA, 19 nt, Homo sapiens
  misc_RNA (1)...(19): siRNA sense strand
gaaggagguagagaagguu

SEQ ID NO: 1152257 - RNA, 19 nt, Homo sapiens
  misc_RNA (1)...(19): siRNA sense strand
cuaaggguguaguccugaa

SEQ ID NO: 1152258 - RNA, 19 nt, Homo sapiens
  misc_RNA (1)...(19): siRNA sense strand
ucauaaaacugucaagaag

SEQ ID NO: 1152259 - RNA, 19 nt, Homo sapiens
  misc_RNA (1)...(19): siRNA sense strand
aaucaagaaccucaacaug

SEQ ID NO: 1152260 - RNA, 19 nt, Homo sapiens
  misc_RNA (1)...(19): siRNA sense strand
ugucucacccuuaauuguu

SEQ ID NO: 1152261 - RNA, 19 nt, Homo sapiens
  misc_RNA (1)...(19): siRNA sense strand
gccuuucgcuguaucaaac

SEQ ID NO: 1152262 - RNA, 19 nt, Homo sapiens
  misc_RNA (1)...(19): siRNA sense strand
ggagacagaagcguucauc

SEQ ID NO: 1152263 - RNA, 19 nt, Homo sapiens
  misc_RNA (1)...(19): siRNA sense strand
guguaguccugaaacugaa

SEQ ID NO: 1152264 - RNA, 19 nt, Homo sapiens
  misc_RNA (1)...(19): siRNA sense strand
aucaagaaccucaacauga

SEQ ID NO: 1152265 - RNA, 19 nt, Homo sapiens
  misc_RNA (1)...(19): siRNA sense strand
ugccauccauccaggaaga

SEQ ID NO: 1152266 - RNA, 19 nt, Homo sapiens
  misc_RNA (1)...(19): siRNA sense strand
ucgcuggaccguugugaaa

SEQ ID NO: 1152267 - RNA, 19 nt, Homo sapiens
  misc_RNA (1)...(19): siRNA sense strand
caaauuagagccccaggaa

SEQ ID NO: 1152268 - RNA, 19 nt, Homo sapiens
  misc_RNA (1)...(19): siRNA sense strand
ucaguggaggugagaguuu

SEQ ID NO: 1152269 - RNA, 19 nt, Homo sapiens
  misc_RNA (1)...(19): siRNA sense strand
accaggauaugucuuaaag

SEQ ID NO: 1152270 - RNA, 19 nt, Homo sapiens
  misc_RNA (1)...(19): siRNA sense strand
gaaccacugagaucaacuc

SEQ ID NO: 1152271 - RNA, 19 nt, Homo sapiens
  misc_RNA (1)...(19): siRNA sense strand
cagccaaacagcagaagga

SEQ ID NO: 1152272 - RNA, 19 nt, Homo sapiens
  misc_RNA (1)...(19): siRNA sense strand
ccaacccuguaacuugaug

SEQ ID NO: 1152273 - RNA, 19 nt, Homo sapiens
  misc_RNA (1)...(19): siRNA sense strand
ucgaaagccauaugugaga

SEQ ID NO: 1152274 - RNA, 19 nt, Homo sapiens
  misc_RNA (1)...(19): siRNA sense strand
cagagcuccugacaacauc

SEQ ID NO: 1152275 - RNA, 19 nt, Homo sapiens
  misc_RNA (1)...(19): siRNA sense strand
gccaagaaggauugucaga

SEQ ID NO: 1152276 - RNA, 19 nt, Homo sapiens
  misc_RNA (1)...(19): siRNA sense strand
uuucgaaagccauauguga

SEQ ID NO: 1152277 - RNA, 19 nt, Homo sapiens
  misc_RNA (1)...(19): siRNA sense strand
cagcuucaacccugggaaa

SEQ ID NO: 1152278 - RNA, 19 nt, Homo sapiens
  misc_RNA (1)...(19): siRNA sense strand
ggaagaacugcggcacaug

SEQ ID NO: 1152279 - RNA, 19 nt, Homo sapiens
  misc_RNA (1)...(19): siRNA sense strand
gcuaugcagcugauugaag

SEQ ID NO: 1152280 - RNA, 19 nt, Homo sapiens
  misc_RNA (1)...(19): siRNA sense strand
gcauccaggagucucuaaa

SEQ ID NO: 1152281 - RNA, 19 nt, Homo sapiens
  misc_RNA (1)...(19): siRNA sense strand
acagagcuccugacaacau

SEQ ID NO: 1152282 - RNA, 19 nt, Homo sapiens
  misc_RNA (1)...(19): siRNA sense strand
gacuucagcacacauguca

SEQ ID NO: 1152283 - RNA, 19 nt, Homo sapiens
  misc_RNA (1)...(19): siRNA sense strand
ccuagaacccaaauuagag

SEQ ID NO: 1152284 - RNA, 19 nt, Homo sapiens
  misc_RNA (1)...(19): siRNA sense strand
ggccuccaccagucgauaa

SEQ ID NO: 1152285 - RNA, 19 nt, Homo sapiens
  misc_RNA (1)...(19): siRNA sense strand
gaacagagcuccugacaac

SEQ ID NO: 1152286 - RNA, 19 nt, Homo sapiens
  misc_RNA (1)...(19): siRNA sense strand
caagaaggauugucagaga

SEQ ID NO: 1152287 - RNA, 19 nt, Homo sapiens
  misc_RNA (1)...(19): siRNA sense strand
ucaagaaccucaacaugaa

SEQ ID NO: 1152288 - RNA, 19 nt, Homo sapiens
  misc_RNA (1)...(19): siRNA sense strand
ccaaucaacucauucagaa

SEQ ID NO: 1152289 - RNA, 19 nt, Homo sapiens
  misc_RNA (1)...(19): siRNA sense strand
gcacacaugucagcauuga

SEQ ID NO: 1152290 - RNA, 19 nt, Homo sapiens
  misc_RNA (1)...(19): siRNA sense strand
guucagcucuugacacaaa

SEQ ID NO: 1152291 - RNA, 19 nt, Homo sapiens
  misc_RNA (1)...(19): siRNA sense strand
ggaacuaucuccucucucu

SEQ ID NO: 1152292 - RNA, 19 nt, Homo sapiens
  misc_RNA (1)...(19): siRNA sense strand
ggaagaugauggcccagaa

SEQ ID NO: 1152293 - RNA, 19 nt, Homo sapiens
  misc_RNA (1)...(19): siRNA sense strand
cgaaggaacuauuugaaca

SEQ ID NO: 1152294 - RNA, 19 nt, Homo sapiens
  misc_RNA (1)...(19): siRNA sense strand
gggccuagaacccaaauua

SEQ ID NO: 1152295 - RNA, 19 nt, Homo sapiens
  misc_RNA (1)...(19): siRNA sense strand
gaagccaccuauagagaga

SEQ ID NO: 1152296 - RNA, 19 nt, Homo sapiens
  misc_RNA (1)...(19): siRNA sense strand
gauaaacagugccaagaag

SEQ ID NO: 1152297 - RNA, 19 nt, Homo sapiens
  misc_RNA (1)...(19): siRNA sense strand
gaagagauccagccacauc

SEQ ID NO: 1152298 - RNA, 19 nt, Homo sapiens
  misc_RNA (1)...(19): siRNA sense strand
uuaaagagcugggaaccuu

SEQ ID NO: 1152299 - RNA, 19 nt, Homo sapiens
  misc_RNA (1)...(19): siRNA sense strand
ggcgguggcuguaacauga

SEQ ID NO: 1152300 - RNA, 19 nt, Homo sapiens
  misc_RNA (1)...(19): siRNA sense strand
gcaccaggauaugucuuaa

SEQ ID NO: 1152301 - RNA, 19 nt, Homo sapiens
  misc_RNA (1)...(19): siRNA sense strand
cuagagagguaggaaauau

SEQ ID NO: 1152302 - RNA, 19 nt, Homo sapiens
  misc_RNA (1)...(19): siRNA sense strand
uugaacagcugaagaugaa

SEQ ID NO: 1152303 - RNA, 19 nt, Homo sapiens
  misc_RNA (1)...(19): siRNA sense strand
cagcacacaugucagcauu

SEQ ID NO: 1152304 - RNA, 19 nt, Homo sapiens
  misc_RNA (1)...(19): siRNA sense strand
gaacagcugaagaugaaga

SEQ ID NO: 1152305 - RNA, 19 nt, Homo sapiens
  misc_RNA (1)...(19): siRNA sense strand
acacaaauccaccuucuug

SEQ ID NO: 1152306 - RNA, 19 nt, Homo sapiens
  misc_RNA (1)...(19): siRNA sense strand
cuaugcagcugauugaaga

SEQ ID NO: 1152307 - RNA, 19 nt, Homo sapiens
  misc_RNA (1)...(19): siRNA sense strand
uagaggaaguugucaagau

SEQ ID NO: 1152308 - RNA, 19 nt, Homo sapiens
  misc_RNA (1)...(19): siRNA sense strand
ccggauuccucacccaaua

SEQ ID NO: 1152309 - RNA, 19 nt, Homo sapiens
  misc_RNA (1)...(19): siRNA sense strand
ucuguuaucuucacuguuc

SEQ ID NO: 1152310 - RNA, 19 nt, Homo sapiens
  misc_RNA (1)...(19): siRNA sense strand
uggccaaccuacuaaauga

SEQ ID NO: 1152311 - RNA, 19 nt, Homo sapiens
  misc_RNA (1)...(19): siRNA sense strand
gccagggccuuucgcugua

SEQ ID NO: 1152312 - RNA, 19 nt, Homo sapiens
  misc_RNA (1)...(19): siRNA sense strand
gaacaccggcucccauucu

SEQ ID NO: 1152313 - RNA, 19 nt, Homo sapiens
  misc_RNA (1)...(19): siRNA sense strand
agaggaaguugucaagaug

SEQ ID NO: 1152314 - RNA, 19 nt, Homo sapiens
  misc_RNA (1)...(19): siRNA sense strand
ggaaaaugcugugaagaga

SEQ ID NO: 1152315 - RNA, 19 nt, Homo sapiens
  misc_RNA (1)...(19): siRNA sense strand
gccaguagcaccaggauau

SEQ ID NO: 1152316 - RNA, 19 nt, Homo sapiens
  misc_RNA (1)...(19): siRNA sense strand
gaaaacaccagcccaauca

SEQ ID NO: 1152317 - RNA, 19 nt, Homo sapiens
  misc_RNA (1)...(19): siRNA sense strand
gguguaguccugaaacuga

SEQ ID NO: 1152318 - RNA, 19 nt, Homo sapiens
  misc_RNA (1)...(19): siRNA sense strand
gagccucaagcuaacuuua

SEQ ID NO: 1152319 - RNA, 19 nt, Homo sapiens
  misc_RNA (1)...(19): siRNA sense strand
gacagaagcguucaucagu

SEQ ID NO: 1152320 - RNA, 19 nt, Homo sapiens
  misc_RNA (1)...(19): siRNA sense strand
gcuauugccuaagggugua

SEQ ID NO: 1152321 - RNA, 19 nt, Homo sapiens
  misc_RNA (1)...(19): siRNA sense strand
gcuccugacaacaucauua

SEQ ID NO: 1152322 - RNA, 19 nt, Homo sapiens
  misc_RNA (1)...(19): siRNA sense strand
ccacugcuauugccuaagg

SEQ ID NO: 1152323 - RNA, 19 nt, Homo sapiens
  misc_RNA (1)...(19): siRNA sense strand
agaaggagguagagaaggu

SEQ ID NO: 1152324 - RNA, 19 nt, Homo sapiens
  misc_RNA (1)...(19): siRNA sense strand
ccaggagucucuaaacaac

SEQ ID NO: 1152325 - RNA, 19 nt, Homo sapiens
  misc_RNA (1)...(19): siRNA sense strand
ccucuuccauguuucgaaa

SEQ ID NO: 1152326 - RNA, 19 nt, Homo sapiens
  misc_RNA (1)...(19): siRNA sense strand
ugacacaaauccaccuucu

SEQ ID NO: 1152327 - RNA, 19 nt, Homo sapiens
  misc_RNA (1)...(19): siRNA sense strand
ucagauagcgaaggaacua

SEQ ID NO: 1152328 - RNA, 19 nt, Homo sapiens
  misc_RNA (1)...(19): siRNA sense strand
guuccaacccuguaacuug

SEQ ID NO: 1152329 - RNA, 19 nt, Homo sapiens
  misc_RNA (1)...(19): siRNA sense strand
gcagaaggagguagagaag

SEQ ID NO: 1152330 - RNA, 19 nt, Homo sapiens
  misc_RNA (1)...(19): siRNA sense strand
gaaggauugucagagaaca

SEQ ID NO: 1152331 - RNA, 19 nt, Homo sapiens
  misc_RNA (1)...(19): siRNA sense strand
ugauggugcuagagaggua

SEQ ID NO: 1152332 - RNA, 19 nt, Homo sapiens
  misc_RNA (1)...(19): siRNA sense strand
ggagguagagaagguuaaa

SEQ ID NO: 1152333 - RNA, 19 nt, Homo sapiens
  misc_RNA (1)...(19): siRNA sense strand
aggacaagcuucccucugu

SEQ ID NO: 1152334 - RNA, 19 nt, Homo sapiens
  misc_RNA (1)...(19): siRNA sense strand
aagaaggauugucagagaa

SEQ ID NO: 1152335 - RNA, 19 nt, Homo sapiens
  misc_RNA (1)...(19): siRNA sense strand
cgauaaacagugccaagaa

SEQ ID NO: 1152336 - RNA, 19 nt, Homo sapiens
  misc_RNA (1)...(19): siRNA sense strand
gcuagagagguaggaaaua

SEQ ID NO: 1152337 - RNA, 19 nt, Homo sapiens
  misc_RNA (1)...(19): siRNA sense strand
gccuagaacccaaauuaga

SEQ ID NO: 1152338 - RNA, 19 nt, Homo sapiens
  misc_RNA (1)...(19): siRNA sense strand
gaaucaagaaccucaacau

SEQ ID NO: 1152339 - RNA, 19 nt, Homo sapiens
  misc_RNA (1)...(19): siRNA sense strand
caucuguuaucuucacugu

SEQ ID NO: 1152340 - RNA, 19 nt, Homo sapiens
  misc_RNA (1)...(19): siRNA sense strand
ggaacuacuggccaaccua

SEQ ID NO: 1152341 - RNA, 19 nt, Homo sapiens
  misc_RNA (1)...(19): siRNA sense strand
agagagguaggaaauauga

SEQ ID NO: 1152342 - RNA, 19 nt, Homo sapiens
  misc_RNA (1)...(19): siRNA sense strand
ccuacuaaaugaacaacau

SEQ ID NO: 1152343 - RNA, 19 nt, Homo sapiens
  misc_RNA (1)...(19): siRNA sense strand
ugacugcagcccucauaaa

SEQ ID NO: 1152344 - RNA, 19 nt, Homo sapiens
  misc_RNA (1)...(19): siRNA sense strand
ggaaauaugacuggaacca

SEQ ID NO: 1152345 - RNA, 19 nt, Homo sapiens
  misc_RNA (1)...(19): siRNA sense strand
cuaaaugaacaacaucaga

SEQ ID NO: 1152346 - RNA, 19 nt, Homo sapiens
  misc_RNA (1)...(19): siRNA sense strand
ggauuuagaggaaguuguc

SEQ ID NO: 1152347 - RNA, 19 nt, Homo sapiens
  misc_RNA (1)...(19): siRNA sense strand
gucucacccuuaauuguuu

SEQ ID NO: 1152348 - RNA, 19 nt, Homo sapiens
  misc_RNA (1)...(19): siRNA sense strand
cuaccacugugaagauugu

SEQ ID NO: 1152349 - RNA, 19 nt, Homo sapiens
  misc_RNA (1)...(19): siRNA sense strand
ccagcccaaucaacucauu

SEQ ID NO: 1152350 - RNA, 19 nt, Homo sapiens
  misc_RNA (1)...(19): siRNA sense strand
gaaggaacuauuugaacag

SEQ ID NO: 1152351 - RNA, 19 nt, Homo sapiens
  misc_RNA (1)...(19): siRNA sense strand
uauccacccugcaucuguu

SEQ ID NO: 1152352 - RNA, 19 nt, Homo sapiens
  misc_RNA (1)...(19): siRNA sense strand
uagcgaaggaacuauuuga

SEQ ID NO: 1152353 - RNA, 19 nt, Homo sapiens
  misc_RNA (1)...(19): siRNA sense strand
aagaaggcuuggagacaga

SEQ ID NO: 1152354 - RNA, 19 nt, Homo sapiens
  misc_RNA (1)...(19): siRNA sense strand
uaacaccccucaagcucua

SEQ ID NO: 1152355 - RNA, 19 nt, Homo sapiens
  misc_RNA (1)...(19): siRNA sense strand
guaacuugaugggagcuau

SEQ ID NO: 1152356 - RNA, 19 nt, Homo sapiens
  misc_RNA (1)...(19): siRNA sense strand
uuccaacccuguaacuuga

SEQ ID NO: 1152357 - RNA, 19 nt, Homo sapiens
  misc_RNA (1)...(19): siRNA sense strand
ccaucgcccuucaccauca

SEQ ID NO: 1152358 - RNA, 19 nt, Homo sapiens
  misc_RNA (1)...(19): siRNA sense strand
uaaacagugccaagaagga

SEQ ID NO: 1152359 - RNA, 19 nt, Homo sapiens
  misc_RNA (1)...(19): siRNA sense strand
cuacuggccaaccuacuaa

SEQ ID NO: 1152360 - RNA, 19 nt, Homo sapiens
  misc_RNA (1)...(19): siRNA sense strand
ucagaucaaggccuagaaa

SEQ ID NO: 1152361 - RNA, 19 nt, Homo sapiens
  misc_RNA (1)...(19): siRNA sense strand
guaggaaauaugacuggaa

SEQ ID NO: 1152362 - RNA, 19 nt, Homo sapiens
  misc_RNA (1)...(19): siRNA sense strand
cggcucccauucugguuaa

SEQ ID NO: 1152363 - RNA, 19 nt, Homo sapiens
  misc_RNA (1)...(19): siRNA sense strand
ccugacaacaucauuaaau

SEQ ID NO: 1152364 - RNA, 19 nt, Homo sapiens
  misc_RNA (1)...(19): siRNA sense strand
gcagcauguucagcucuug

SEQ ID NO: 1152365 - RNA, 19 nt, Homo sapiens
  misc_RNA (1)...(19): siRNA sense strand
uaucaaaccugccccuguu

SEQ ID NO: 1152366 - RNA, 19 nt, Homo sapiens
  misc_RNA (1)...(19): siRNA sense strand
caagcuucccucugucuga

SEQ ID NO: 1152367 - RNA, 19 nt, Homo sapiens
  misc_RNA (1)...(19): siRNA sense strand
gcugggaaccuuugcucaa

SEQ ID NO: 1152368 - RNA, 19 nt, Homo sapiens
  misc_RNA (1)...(19): siRNA sense strand
ugacagugagaaucaagaa

SEQ ID NO: 1152369 - RNA, 19 nt, Homo sapiens
  misc_RNA (1)...(19): siRNA sense strand
gaagaugauggcccagaag

SEQ ID NO: 1152370 - RNA, 19 nt, Homo sapiens
  misc_RNA (1)...(19): siRNA sense strand
gaaccucaacaugaacaga

SEQ ID NO: 1152371 - RNA, 19 nt, Homo sapiens
  misc_RNA (1)...(19): siRNA sense strand
ucauaaaacugucaagaag

SEQ ID NO: 1152372 - RNA, 19 nt, Homo sapiens
  misc_RNA (1)...(19): siRNA sense strand
gaaggagguagagaagguu

SEQ ID NO: 1152373 - RNA, 19 nt, Homo sapiens
  misc_RNA (1)...(19): siRNA sense strand
cuaaggguguaguccugaa

SEQ ID NO: 1152374 - RNA, 19 nt, Homo sapiens
  misc_RNA (1)...(19): siRNA sense strand
aaucaagaaccucaacaug

SEQ ID NO: 1152375 - RNA, 19 nt, Homo sapiens
  misc_RNA (1)...(19): siRNA sense strand
gcgaaggaacuauuugaac

SEQ ID NO: 1152376 - RNA, 19 nt, Homo sapiens
  misc_RNA (1)...(19): siRNA sense strand
ugucucacccuuaauuguu

SEQ ID NO: 1152377 - RNA, 19 nt, Homo sapiens
  misc_RNA (1)...(19): siRNA sense strand
gccuuucgcuguaucaaac

SEQ ID NO: 1152378 - RNA, 19 nt, Homo sapiens
  misc_RNA (1)...(19): siRNA sense strand
ggagacagaagcguucauc

SEQ ID NO: 1152379 - RNA, 19 nt, Homo sapiens
  misc_RNA (1)...(19): siRNA sense strand
guguaguccugaaacugaa

SEQ ID NO: 1152380 - RNA, 19 nt, Homo sapiens
  misc_RNA (1)...(19): siRNA sense strand
aucaagaaccucaacauga

SEQ ID NO: 1152381 - RNA, 19 nt, Homo sapiens
  misc_RNA (1)...(19): siRNA sense strand
gaaccacugagaucaacuc

SEQ ID NO: 1152382 - RNA, 19 nt, Homo sapiens
  misc_RNA (1)...(19): siRNA sense strand
ucgcuggaccguugugaaa

SEQ ID NO: 1152383 - RNA, 19 nt, Homo sapiens
  misc_RNA (1)...(19): siRNA sense strand
caaauuagagccccaggaa

SEQ ID NO: 1152384 - RNA, 19 nt, Homo sapiens
  misc_RNA (1)...(19): siRNA sense strand
ucaguggaggugagaguuu

SEQ ID NO: 1152385 - RNA, 19 nt, Homo sapiens
  misc_RNA (1)...(19): siRNA sense strand
caaaugagcugauggaaga

SEQ ID NO: 1152386 - RNA, 19 nt, Homo sapiens
  misc_RNA (1)...(19): siRNA sense strand
gaacagagcuccugacaac

SEQ ID NO: 1152387 - RNA, 19 nt, Homo sapiens
  misc_RNA (1)...(19): siRNA sense strand
caagaaggauugucagaga

SEQ ID NO: 1152388 - RNA, 19 nt, Homo sapiens
  misc_RNA (1)...(19): siRNA sense strand
ucaagaaccucaacaugaa

SEQ ID NO: 1152389 - RNA, 19 nt, Homo sapiens
  misc_RNA (1)...(19): siRNA sense strand
ccaaucaacucauucagaa

SEQ ID NO: 1152390 - RNA, 19 nt, Homo sapiens
  misc_RNA (1)...(19): siRNA sense strand
gcacacaugucagcauuga

SEQ ID NO: 1152391 - RNA, 19 nt, Homo sapiens
  misc_RNA (1)...(19): siRNA sense strand
guucagcucuugacacaaa

SEQ ID NO: 1152392 - RNA, 19 nt, Homo sapiens
  misc_RNA (1)...(19): siRNA sense strand
ggaacuaucuccucucucu

SEQ ID NO: 1152393 - RNA, 19 nt, Homo sapiens
  misc_RNA (1)...(19): siRNA sense strand
ggaagaugauggcccagaa

SEQ ID NO: 1152394 - RNA, 19 nt, Homo sapiens
  misc_RNA (1)...(19): siRNA sense strand
cgaaggaacuauuugaaca

SEQ ID NO: 1152395 - RNA, 19 nt, Homo sapiens
  misc_RNA (1)...(19): siRNA sense strand
gauggaagaucuguuugaa

SEQ ID NO: 1152396 - RNA, 19 nt, Homo sapiens
  misc_RNA (1)...(19): siRNA sense strand
gggccuagaacccaaauua

SEQ ID NO: 1152397 - RNA, 19 nt, Homo sapiens
  misc_RNA (1)...(19): siRNA sense strand
gaagccaccuauagagaga

SEQ ID NO: 1152398 - RNA, 19 nt, Homo sapiens
  misc_RNA (1)...(19): siRNA sense strand
gauaaacagugccaagaag

SEQ ID NO: 1152399 - RNA, 19 nt, Homo sapiens
  misc_RNA (1)...(19): siRNA sense strand
gaagagauccagccacauc

SEQ ID NO: 1152400 - RNA, 19 nt, Homo sapiens
  misc_RNA (1)...(19): siRNA sense strand
uuaaagagcugggaaccuu

SEQ ID NO: 1152401 - RNA, 19 nt, Homo sapiens
  misc_RNA (1)...(19): siRNA sense strand
ggaagcaaaugagcugaug

SEQ ID NO: 1152402 - RNA, 19 nt, Homo sapiens
  misc_RNA (1)...(19): siRNA sense strand
ggcgguggcuguaacauga

SEQ ID NO: 1152403 - RNA, 19 nt, Homo sapiens
  misc_RNA (1)...(19): siRNA sense strand
gcaccaggauaugucuuaa

SEQ ID NO: 1152404 - RNA, 19 nt, Homo sapiens
  misc_RNA (1)...(19): siRNA sense strand
cuagagagguaggaaauau

SEQ ID NO: 1152405 - RNA, 19 nt, Homo sapiens
  misc_RNA (1)...(19): siRNA sense strand
uugaacagcugaagaugaa

SEQ ID NO: 1152406 - RNA, 19 nt, Homo sapiens
  misc_RNA (1)...(19): siRNA sense strand
cagcacacaugucagcauu

SEQ ID NO: 1152407 - RNA, 19 nt, Homo sapiens
  misc_RNA (1)...(19): siRNA sense strand
gaacagcugaagaugaaga

SEQ ID NO: 1152408 - RNA, 19 nt, Homo sapiens
  misc_RNA (1)...(19): siRNA sense strand
acacaaauccaccuucuug

SEQ ID NO: 1152409 - RNA, 19 nt, Homo sapiens
  misc_RNA (1)...(19): siRNA sense strand
cuaugcagcugauugaaga

SEQ ID NO: 1152410 - RNA, 19 nt, Homo sapiens
  misc_RNA (1)...(19): siRNA sense strand
uagaggaaguugucaagau

SEQ ID NO: 1152411 - RNA, 19 nt, Homo sapiens
  misc_RNA (1)...(19): siRNA sense strand
ccggauuccucacccaaua

SEQ ID NO: 1152412 - RNA, 19 nt, Homo sapiens
  misc_RNA (1)...(19): siRNA sense strand
gcugauggaagaucuguuu

SEQ ID NO: 1152413 - RNA, 19 nt, Homo sapiens
  misc_RNA (1)...(19): siRNA sense strand
ucuguuaucuucacuguuc

SEQ ID NO: 1152414 - RNA, 19 nt, Homo sapiens
  misc_RNA (1)...(19): siRNA sense strand
uggccaaccuacuaaauga

SEQ ID NO: 1152415 - RNA, 19 nt, Homo sapiens
  misc_RNA (1)...(19): siRNA sense strand
gccagggccuuucgcugua

SEQ ID NO: 1152416 - RNA, 19 nt, Homo sapiens
  misc_RNA (1)...(19): siRNA sense strand
gaacaccggcucccauucu

SEQ ID NO: 1152417 - RNA, 19 nt, Homo sapiens
  misc_RNA (1)...(19): siRNA sense strand
agaggaaguugucaagaug

SEQ ID NO: 1152418 - RNA, 19 nt, Homo sapiens
  misc_RNA (1)...(19): siRNA sense strand
ggaaaaugcugugaagaga

SEQ ID NO: 1152419 - RNA, 19 nt, Homo sapiens
  misc_RNA (1)...(19): siRNA sense strand
gccaguagcaccaggauau

SEQ ID NO: 1152420 - RNA, 19 nt, Homo sapiens
  misc_RNA (1)...(19): siRNA sense strand
gaaaacaccagcccaauca

SEQ ID NO: 1152421 - RNA, 19 nt, Homo sapiens
  misc_RNA (1)...(19): siRNA sense strand
gguguaguccugaaacuga

SEQ ID NO: 1152422 - RNA, 19 nt, Homo sapiens
  misc_RNA (1)...(19): siRNA sense strand
gcuauugccuaagggugua

SEQ ID NO: 1152423 - RNA, 19 nt, Homo sapiens
  misc_RNA (1)...(19): siRNA sense strand
gagccucaagcuaacuuua

SEQ ID NO: 1152424 - RNA, 19 nt, Homo sapiens
  misc_RNA (1)...(19): siRNA sense strand
gacagaagcguucaucagu

SEQ ID NO: 1152425 - RNA, 19 nt, Homo sapiens
  misc_RNA (1)...(19): siRNA sense strand
gcuccugacaacaucauua

SEQ ID NO: 1152426 - RNA, 19 nt, Homo sapiens
  misc_RNA (1)...(19): siRNA sense strand
ccacugcuauugccuaagg

SEQ ID NO: 1152427 - RNA, 19 nt, Homo sapiens
  misc_RNA (1)...(19): siRNA sense strand
agaaggagguagagaaggu

SEQ ID NO: 1152428 - RNA, 19 nt, Homo sapiens
  misc_RNA (1)...(19): siRNA sense strand
ccaggagucucuaaacaac

SEQ ID NO: 1152429 - RNA, 19 nt, Homo sapiens
  misc_RNA (1)...(19): siRNA sense strand
ccucuuccauguuucgaaa

SEQ ID NO: 1152430 - RNA, 19 nt, Homo sapiens
  misc_RNA (1)...(19): siRNA sense strand
ucagauagcgaaggaacua

SEQ ID NO: 1152431 - RNA, 19 nt, Homo sapiens
  misc_RNA (1)...(19): siRNA sense strand
guuccaacccuguaacuug

SEQ ID NO: 1152432 - RNA, 19 nt, Homo sapiens
  misc_RNA (1)...(19): siRNA sense strand
ugacacaaauccaccuucu

SEQ ID NO: 1152433 - RNA, 19 nt, Homo sapiens
  misc_RNA (1)...(19): siRNA sense strand
gcagaaggagguagagaag

SEQ ID NO: 1152434 - RNA, 19 nt, Homo sapiens
  misc_RNA (1)...(19): siRNA sense strand
gaaggauugucagagaaca

SEQ ID NO: 1152435 - RNA, 19 nt, Homo sapiens
  misc_RNA (1)...(19): siRNA sense strand
ugauggugcuagagaggua

SEQ ID NO: 1152436 - RNA, 19 nt, Homo sapiens
  misc_RNA (1)...(19): siRNA sense strand
ggagguagagaagguuaaa

SEQ ID NO: 1152437 - RNA, 19 nt, Homo sapiens
  misc_RNA (1)...(19): siRNA sense strand
aggacaagcuucccucugu

SEQ ID NO: 1152438 - RNA, 19 nt, Homo sapiens
  misc_RNA (1)...(19): siRNA sense strand
aagaaggauugucagagaa

SEQ ID NO: 1152439 - RNA, 19 nt, Homo sapiens
  misc_RNA (1)...(19): siRNA sense strand
cgauaaacagugccaagaa

SEQ ID NO: 1152440 - RNA, 19 nt, Homo sapiens
  misc_RNA (1)...(19): siRNA sense strand
gcuagagagguaggaaaua

SEQ ID NO: 1152441 - RNA, 19 nt, Homo sapiens
  misc_RNA (1)...(19): siRNA sense strand
gccuagaacccaaauuaga

SEQ ID NO: 1152442 - RNA, 19 nt, Homo sapiens
  misc_RNA (1)...(19): siRNA sense strand
gaaucaagaaccucaacau

SEQ ID NO: 1152443 - RNA, 19 nt, Homo sapiens
  misc_RNA (1)...(19): siRNA sense strand
caucuguuaucuucacugu

SEQ ID NO: 1152444 - RNA, 19 nt, Homo sapiens
  misc_RNA (1)...(19): siRNA sense strand
ccuacuaaaugaacaacau

SEQ ID NO: 1152445 - RNA, 19 nt, Homo sapiens
  misc_RNA (1)...(19): siRNA sense strand
agagagguaggaaauauga

SEQ ID NO: 1152446 - RNA, 19 nt, Homo sapiens
  misc_RNA (1)...(19): siRNA sense strand
ugacugcagcccucauaaa

SEQ ID NO: 1152447 - RNA, 19 nt, Homo sapiens
  misc_RNA (1)...(19): siRNA sense strand
ggaacuacuggccaaccua

SEQ ID NO: 1152448 - RNA, 19 nt, Homo sapiens
  misc_RNA (1)...(19): siRNA sense strand
gaugggauucuccaacaug

SEQ ID NO: 1152449 - RNA, 19 nt, Homo sapiens
  misc_RNA (1)...(19): siRNA sense strand
ggaaauaugacuggaacca

SEQ ID NO: 1152450 - RNA, 19 nt, Homo sapiens
  misc_RNA (1)...(19): siRNA sense strand
ccagcccaaucaacucauu

SEQ ID NO: 1152451 - RNA, 19 nt, Homo sapiens
  misc_RNA (1)...(19): siRNA sense strand
ggauuuagaggaaguuguc

SEQ ID NO: 1152452 - RNA, 19 nt, Homo sapiens
  misc_RNA (1)...(19): siRNA sense strand
cuaaaugaacaacaucaga

SEQ ID NO: 1152453 - RNA, 19 nt, Homo sapiens
  misc_RNA (1)...(19): siRNA sense strand
gucucacccuuaauuguuu

SEQ ID NO: 1152454 - RNA, 19 nt, Homo sapiens
  misc_RNA (1)...(19): siRNA sense strand
cuaccacugugaagauugu

SEQ ID NO: 1152455 - RNA, 19 nt, Homo sapiens
  misc_RNA (1)...(19): siRNA sense strand
uuccaacccuguaacuuga

SEQ ID NO: 1152456 - RNA, 19 nt, Homo sapiens
  misc_RNA (1)...(19): siRNA sense strand
uauccacccugcaucuguu

SEQ ID NO: 1152457 - RNA, 19 nt, Homo sapiens
  misc_RNA (1)...(19): siRNA sense strand
aagaaggcuuggagacaga

SEQ ID NO: 1152458 - RNA, 19 nt, Homo sapiens
  misc_RNA (1)...(19): siRNA sense strand
uaacaccccucaagcucua

SEQ ID NO: 1152459 - RNA, 19 nt, Homo sapiens
  misc_RNA (1)...(19): siRNA sense strand
uagcgaaggaacuauuuga

SEQ ID NO: 1152460 - RNA, 19 nt, Homo sapiens
  misc_RNA (1)...(19): siRNA sense strand
gaaggaacuauuugaacag

SEQ ID NO: 1152461 - RNA, 19 nt, Homo sapiens
  misc_RNA (1)...(19): siRNA sense strand
guaacuugaugggagcuau

SEQ ID NO: 1152462 - RNA, 19 nt, Homo sapiens
  misc_RNA (1)...(19): siRNA sense strand
ccaucgcccuucaccauca

SEQ ID NO: 1152463 - RNA, 19 nt, Homo sapiens
  misc_RNA (1)...(19): siRNA sense strand
uaaacagugccaagaagga

SEQ ID NO: 1152464 - RNA, 19 nt, Homo sapiens
  misc_RNA (1)...(19): siRNA sense strand
cuacuggccaaccuacuaa

SEQ ID NO: 1152465 - RNA, 19 nt, Homo sapiens
  misc_RNA (1)...(19): siRNA sense strand
ucagaucaaggccuagaaa

SEQ ID NO: 1152466 - RNA, 19 nt, Homo sapiens
  misc_RNA (1)...(19): siRNA sense strand
guaggaaauaugacuggaa

SEQ ID NO: 1152467 - RNA, 19 nt, Homo sapiens
  misc_RNA (1)...(19): siRNA sense strand
cggcucccauucugguuaa

SEQ ID NO: 1152468 - RNA, 19 nt, Homo sapiens
  misc_RNA (1)...(19): siRNA sense strand
ccugacaacaucauuaaau

SEQ ID NO: 1152469 - RNA, 19 nt, Homo sapiens
  misc_RNA (1)...(19): siRNA sense strand
gcagcauguucagcucuug

SEQ ID NO: 1152470 - RNA, 19 nt, Homo sapiens
  misc_RNA (1)...(19): siRNA sense strand
uaucaaaccugccccuguu

SEQ ID NO: 1152471 - RNA, 19 nt, Homo sapiens
  misc_RNA (1)...(19): siRNA sense strand
caagcuucccucugucuga

SEQ ID NO: 1152472 - RNA, 19 nt, Homo sapiens
  misc_RNA (1)...(19): siRNA sense strand
gcugggaaccuuugcucaa

SEQ ID NO: 1152473 - RNA, 19 nt, Homo sapiens
  misc_RNA (1)...(19): siRNA sense strand
gaagaugauggcccagaag

SEQ ID NO: 1152474 - RNA, 19 nt, Homo sapiens
  misc_RNA (1)...(19): siRNA sense strand
gaaccucaacaugaacaga

SEQ ID NO: 1152475 - RNA, 19 nt, Homo sapiens
  misc_RNA (1)...(19): siRNA sense strand
ugacagugagaaucaagaa

SEQ ID NO: 1152476 - RNA, 19 nt, Homo sapiens
  misc_RNA (1)...(19): siRNA sense strand
gaaggagguagagaagguu

SEQ ID NO: 1152477 - RNA, 19 nt, Homo sapiens
  misc_RNA (1)...(19): siRNA sense strand
cuaaggguguaguccugaa

SEQ ID NO: 1152478 - RNA, 19 nt, Homo sapiens
  misc_RNA (1)...(19): siRNA sense strand
ucauaaaacugucaagaag

SEQ ID NO: 1152479 - RNA, 19 nt, Homo sapiens
  misc_RNA (1)...(19): siRNA sense strand
aucaagaaccucaacauga

SEQ ID NO: 1152480 - RNA, 19 nt, Homo sapiens
  misc_RNA (1)...(19): siRNA sense strand
ugucucacccuuaauuguu

SEQ ID NO: 1152481 - RNA, 19 nt, Homo sapiens
  misc_RNA (1)...(19): siRNA sense strand
gccuuucgcuguaucaaac

SEQ ID NO: 1152482 - RNA, 19 nt, Homo sapiens
  misc_RNA (1)...(19): siRNA sense strand
ggagacagaagcguucauc

SEQ ID NO: 1152483 - RNA, 19 nt, Homo sapiens
  misc_RNA (1)...(19): siRNA sense strand
gcgaaggaacuauuugaac

SEQ ID NO: 1152484 - RNA, 19 nt, Homo sapiens
  misc_RNA (1)...(19): siRNA sense strand
guguaguccugaaacugaa

SEQ ID NO: 1152485 - RNA, 19 nt, Homo sapiens
  misc_RNA (1)...(19): siRNA sense strand
gaacagagcuccugacaac

SEQ ID NO: 1152486 - RNA, 19 nt, Homo sapiens
  misc_RNA (1)...(19): siRNA sense strand
caagaaggauugucagaga

SEQ ID NO: 1152487 - RNA, 19 nt, Homo sapiens
  misc_RNA (1)...(19): siRNA sense strand
ucaagaaccucaacaugaa

SEQ ID NO: 1152488 - RNA, 19 nt, Homo sapiens
  misc_RNA (1)...(19): siRNA sense strand
ccaaucaacucauucagaa

SEQ ID NO: 1152489 - RNA, 19 nt, Homo sapiens
  misc_RNA (1)...(19): siRNA sense strand
gcacacaugucagcauuga

SEQ ID NO: 1152490 - RNA, 19 nt, Homo sapiens
  misc_RNA (1)...(19): siRNA sense strand
guucagcucuugacacaaa

SEQ ID NO: 1152491 - RNA, 19 nt, Homo sapiens
  misc_RNA (1)...(19): siRNA sense strand
ggaacuaucuccucucucu

SEQ ID NO: 1152492 - RNA, 19 nt, Homo sapiens
  misc_RNA (1)...(19): siRNA sense strand
ggaagaugauggcccagaa

SEQ ID NO: 1152493 - RNA, 19 nt, Homo sapiens
  misc_RNA (1)...(19): siRNA sense strand
cgaaggaacuauuugaaca

SEQ ID NO: 1152494 - RNA, 19 nt, Homo sapiens
  misc_RNA (1)...(19): siRNA sense strand
gggccuagaacccaaauua

SEQ ID NO: 1152495 - RNA, 19 nt, Homo sapiens
  misc_RNA (1)...(19): siRNA sense strand
gaagccaccuauagagaga

SEQ ID NO: 1152496 - RNA, 19 nt, Homo sapiens
  misc_RNA (1)...(19): siRNA sense strand
gauaaacagugccaagaag

SEQ ID NO: 1152497 - RNA, 19 nt, Homo sapiens
  misc_RNA (1)...(19): siRNA sense strand
gaagagauccagccacauc

SEQ ID NO: 1152498 - RNA, 19 nt, Homo sapiens
  misc_RNA (1)...(19): siRNA sense strand
uuaaagagcugggaaccuu

SEQ ID NO: 1152499 - RNA, 19 nt, Homo sapiens
  misc_RNA (1)...(19): siRNA sense strand
ggcgguggcuguaacauga

SEQ ID NO: 1152500 - RNA, 19 nt, Homo sapiens
  misc_RNA (1)...(19): siRNA sense strand
gcaccaggauaugucuuaa

SEQ ID NO: 1152501 - RNA, 19 nt, Homo sapiens
  misc_RNA (1)...(19): siRNA sense strand
cuagagagguaggaaauau

SEQ ID NO: 1152502 - RNA, 19 nt, Homo sapiens
  misc_RNA (1)...(19): siRNA sense strand
uugaacagcugaagaugaa

SEQ ID NO: 1152503 - RNA, 19 nt, Homo sapiens
  misc_RNA (1)...(19): siRNA sense strand
cagcacacaugucagcauu

SEQ ID NO: 1152504 - RNA, 19 nt, Homo sapiens
  misc_RNA (1)...(19): siRNA sense strand
gaacagcugaagaugaaga

SEQ ID NO: 1152505 - RNA, 19 nt, Homo sapiens
  misc_RNA (1)...(19): siRNA sense strand
acacaaauccaccuucuug

SEQ ID NO: 1152506 - RNA, 19 nt, Homo sapiens
  misc_RNA (1)...(19): siRNA sense strand
cuaugcagcugauugaaga

SEQ ID NO: 1152507 - RNA, 19 nt, Homo sapiens
  misc_RNA (1)...(19): siRNA sense strand
uagaggaaguugucaagau

SEQ ID NO: 1152508 - RNA, 19 nt, Homo sapiens
  misc_RNA (1)...(19): siRNA sense strand
ccggauuccucacccaaua

SEQ ID NO: 1152509 - RNA, 19 nt, Homo sapiens
  misc_RNA (1)...(19): siRNA sense strand
ucuguuaucuucacuguuc

SEQ ID NO: 1152510 - RNA, 19 nt, Homo sapiens
  misc_RNA (1)...(19): siRNA sense strand
uggccaaccuacuaaauga

SEQ ID NO: 1152511 - RNA, 19 nt, Homo sapiens
  misc_RNA (1)...(19): siRNA sense strand
gccagggccuuucgcugua

SEQ ID NO: 1152512 - RNA, 19 nt, Homo sapiens
  misc_RNA (1)...(19): siRNA sense strand
gaacaccggcucccauucu

SEQ ID NO: 1152513 - RNA, 19 nt, Homo sapiens
  misc_RNA (1)...(19): siRNA sense strand
agaggaaguugucaagaug

SEQ ID NO: 1152514 - RNA, 19 nt, Homo sapiens
  misc_RNA (1)...(19): siRNA sense strand
ggaaaaugcugugaagaga

SEQ ID NO: 1152515 - RNA, 19 nt, Homo sapiens
  misc_RNA (1)...(19): siRNA sense strand
gccaguagcaccaggauau

SEQ ID NO: 1152516 - RNA, 19 nt, Homo sapiens
  misc_RNA (1)...(19): siRNA sense strand
gaaaacaccagcccaauca

SEQ ID NO: 1152517 - RNA, 19 nt, Homo sapiens
  misc_RNA (1)...(19): siRNA sense strand
gguguaguccugaaacuga

SEQ ID NO: 1152518 - RNA, 19 nt, Homo sapiens
  misc_RNA (1)...(19): siRNA sense strand
gcuauugccuaagggugua

SEQ ID NO: 1152519 - RNA, 19 nt, Homo sapiens
  misc_RNA (1)...(19): siRNA sense strand
gagccucaagcuaacuuua

SEQ ID NO: 1152520 - RNA, 19 nt, Homo sapiens
  misc_RNA (1)...(19): siRNA sense strand
gacagaagcguucaucagu

SEQ ID NO: 1152521 - RNA, 19 nt, Homo sapiens
  misc_RNA (1)...(19): siRNA sense strand
gcuccugacaacaucauua

SEQ ID NO: 1152522 - RNA, 19 nt, Homo sapiens
  misc_RNA (1)...(19): siRNA sense strand
ccacugcuauugccuaagg

SEQ ID NO: 1152523 - RNA, 19 nt, Homo sapiens
  misc_RNA (1)...(19): siRNA sense strand
agaaggagguagagaaggu

SEQ ID NO: 1152524 - RNA, 19 nt, Homo sapiens
  misc_RNA (1)...(19): siRNA sense strand
ccaggagucucuaaacaac

SEQ ID NO: 1152525 - RNA, 19 nt, Homo sapiens
  misc_RNA (1)...(19): siRNA sense strand
ccucuuccauguuucgaaa

SEQ ID NO: 1152526 - RNA, 19 nt, Homo sapiens
  misc_RNA (1)...(19): siRNA sense strand
ucagauagcgaaggaacua

SEQ ID NO: 1152527 - RNA, 19 nt, Homo sapiens
  misc_RNA (1)...(19): siRNA sense strand
guuccaacccuguaacuug

SEQ ID NO: 1152528 - RNA, 19 nt, Homo sapiens
  misc_RNA (1)...(19): siRNA sense strand
ugacacaaauccaccuucu

SEQ ID NO: 1152529 - RNA, 19 nt, Homo sapiens
  misc_RNA (1)...(19): siRNA sense strand
gcagaaggagguagagaag

SEQ ID NO: 1152530 - RNA, 19 nt, Homo sapiens
  misc_RNA (1)...(19): siRNA sense strand
gaaggauugucagagaaca

SEQ ID NO: 1152531 - RNA, 19 nt, Homo sapiens
  misc_RNA (1)...(19): siRNA sense strand
ugauggugcuagagaggua

SEQ ID NO: 1152532 - RNA, 19 nt, Homo sapiens
  misc_RNA (1)...(19): siRNA sense strand
ggagguagagaagguuaaa

SEQ ID NO: 1152533 - RNA, 19 nt, Homo sapiens
  misc_RNA (1)...(19): siRNA sense strand
aggacaagcuucccucugu

SEQ ID NO: 1152534 - RNA, 19 nt, Homo sapiens
  misc_RNA (1)...(19): siRNA sense strand
aagaaggauugucagagaa

SEQ ID NO: 1152535 - RNA, 19 nt, Homo sapiens
  misc_RNA (1)...(19): siRNA sense strand
cgauaaacagugccaagaa

SEQ ID NO: 1152536 - RNA, 19 nt, Homo sapiens
  misc_RNA (1)...(19): siRNA sense strand
gcuagagagguaggaaaua

SEQ ID NO: 1152537 - RNA, 19 nt, Homo sapiens
  misc_RNA (1)...(19): siRNA sense strand
gccuagaacccaaauuaga

SEQ ID NO: 1152538 - RNA, 19 nt, Homo sapiens
  misc_RNA (1)...(19): siRNA sense strand
gaaucaagaaccucaacau

SEQ ID NO: 1152539 - RNA, 19 nt, Homo sapiens
  misc_RNA (1)...(19): siRNA sense strand
caucuguuaucuucacugu

SEQ ID NO: 1152540 - RNA, 19 nt, Homo sapiens
  misc_RNA (1)...(19): siRNA sense strand
ggaacuacuggccaaccua

SEQ ID NO: 1152541 - RNA, 19 nt, Homo sapiens
  misc_RNA (1)...(19): siRNA sense strand
ccuacuaaaugaacaacau

SEQ ID NO: 1152542 - RNA, 19 nt, Homo sapiens
  misc_RNA (1)...(19): siRNA sense strand
agagagguaggaaauauga

SEQ ID NO: 1152543 - RNA, 19 nt, Homo sapiens
  misc_RNA (1)...(19): siRNA sense strand
ugacugcagcccucauaaa

SEQ ID NO: 1152544 - RNA, 19 nt, Homo sapiens
  misc_RNA (1)...(19): siRNA sense strand
gaugggauucuccaacaug

SEQ ID NO: 1152545 - RNA, 19 nt, Homo sapiens
  misc_RNA (1)...(19): siRNA sense strand
ggaaauaugacuggaacca

SEQ ID NO: 1152546 - RNA, 19 nt, Homo sapiens
  misc_RNA (1)...(19): siRNA sense strand
cuaaaugaacaacaucaga

SEQ ID NO: 1152547 - RNA, 19 nt, Homo sapiens
  misc_RNA (1)...(19): siRNA sense strand
ggauuuagaggaaguuguc

SEQ ID NO: 1152548 - RNA, 19 nt, Homo sapiens
  misc_RNA (1)...(19): siRNA sense strand
gucucacccuuaauuguuu

SEQ ID NO: 1152549 - RNA, 19 nt, Homo sapiens
  misc_RNA (1)...(19): siRNA sense strand
cuaccacugugaagauugu

SEQ ID NO: 1152550 - RNA, 19 nt, Homo sapiens
  misc_RNA (1)...(19): siRNA sense strand
ccagcccaaucaacucauu

SEQ ID NO: 1152551 - RNA, 19 nt, Homo sapiens
  misc_RNA (1)...(19): siRNA sense strand
uuccaacccuguaacuuga

SEQ ID NO: 1152552 - RNA, 19 nt, Homo sapiens
  misc_RNA (1)...(19): siRNA sense strand
uagcgaaggaacuauuuga

SEQ ID NO: 1152553 - RNA, 19 nt, Homo sapiens
  misc_RNA (1)...(19): siRNA sense strand
gaaggaacuauuugaacag

SEQ ID NO: 1152554 - RNA, 19 nt, Homo sapiens
  misc_RNA (1)...(19): siRNA sense strand
uauccacccugcaucuguu

SEQ ID NO: 1152555 - RNA, 19 nt, Homo sapiens
  misc_RNA (1)...(19): siRNA sense strand
aagaaggcuuggagacaga

SEQ ID NO: 1152556 - RNA, 19 nt, Homo sapiens
  misc_RNA (1)...(19): siRNA sense strand
uaacaccccucaagcucua

SEQ ID NO: 1152557 - RNA, 19 nt, Homo sapiens
  misc_RNA (1)...(19): siRNA sense strand
guaacuugaugggagcuau

SEQ ID NO: 1152558 - RNA, 19 nt, Homo sapiens
  misc_RNA (1)...(19): siRNA sense strand
ccaucgcccuucaccauca

SEQ ID NO: 1152559 - RNA, 19 nt, Homo sapiens
  misc_RNA (1)...(19): siRNA sense strand
uaaacagugccaagaagga

SEQ ID NO: 1152560 - RNA, 19 nt, Homo sapiens
  misc_RNA (1)...(19): siRNA sense strand
ucagaucaaggccuagaaa

SEQ ID NO: 1152561 - RNA, 19 nt, Homo sapiens
  misc_RNA (1)...(19): siRNA sense strand
guaggaaauaugacuggaa

SEQ ID NO: 1152562 - RNA, 19 nt, Homo sapiens
  misc_RNA (1)...(19): siRNA sense strand
cggcucccauucugguuaa

SEQ ID NO: 1152563 - RNA, 19 nt, Homo sapiens
  misc_RNA (1)...(19): siRNA sense strand
ccugacaacaucauuaaau

SEQ ID NO: 1152564 - RNA, 19 nt, Homo sapiens
  misc_RNA (1)...(19): siRNA sense strand
cuacuggccaaccuacuaa

SEQ ID NO: 1152565 - RNA, 19 nt, Homo sapiens
  misc_RNA (1)...(19): siRNA sense strand
gcagcauguucagcucuug

SEQ ID NO: 1152566 - RNA, 19 nt, Homo sapiens
  misc_RNA (1)...(19): siRNA sense strand
uaucaaaccugccccuguu

SEQ ID NO: 1152567 - RNA, 19 nt, Homo sapiens
  misc_RNA (1)...(19): siRNA sense strand
caagcuucccucugucuga

SEQ ID NO: 1152568 - RNA, 19 nt, Homo sapiens
  misc_RNA (1)...(19): siRNA sense strand
gcugggaaccuuugcucaa

SEQ ID NO: 1152569 - RNA, 19 nt, Homo sapiens
  misc_RNA (1)...(19): siRNA sense strand
ugacagugagaaucaagaa

SEQ ID NO: 1152570 - RNA, 19 nt, Homo sapiens
  misc_RNA (1)...(19): siRNA sense strand
gaagaugauggcccagaag

SEQ ID NO: 1152571 - RNA, 19 nt, Homo sapiens
  misc_RNA (1)...(19): siRNA sense strand
gaaccucaacaugaacaga

SEQ ID NO: 1152572 - RNA, 19 nt, Homo sapiens
  misc_RNA (1)...(19): siRNA sense strand
ucauaaaacugucaagaag

SEQ ID NO: 1152573 - RNA, 19 nt, Homo sapiens
  misc_RNA (1)...(19): siRNA sense strand
cuaaggguguaguccugaa

SEQ ID NO: 1152574 - RNA, 19 nt, Homo sapiens
  misc_RNA (1)...(19): siRNA sense strand
gaaggagguagagaagguu

SEQ ID NO: 1152575 - RNA, 19 nt, Homo sapiens
  misc_RNA (1)...(19): siRNA sense strand
aaucaagaaccucaacaug

SEQ ID NO: 1152576 - RNA, 19 nt, Homo sapiens
  misc_RNA (1)...(19): siRNA sense strand
ugucucacccuuaauuguu

SEQ ID NO: 1152577 - RNA, 19 nt, Homo sapiens
  misc_RNA (1)...(19): siRNA sense strand
gcgaaggaacuauuugaac

SEQ ID NO: 1152578 - RNA, 19 nt, Homo sapiens
  misc_RNA (1)...(19): siRNA sense strand
gccuuucgcuguaucaaac

SEQ ID NO: 1152579 - RNA, 19 nt, Homo sapiens
  misc_RNA (1)...(19): siRNA sense strand
ggagacagaagcguucauc

SEQ ID NO: 1152580 - RNA, 19 nt, Homo sapiens
  misc_RNA (1)...(19): siRNA sense strand
guguaguccugaaacugaa

SEQ ID NO: 1152581 - RNA, 19 nt, Homo sapiens
  misc_RNA (1)...(19): siRNA sense strand
aucaagaaccucaacauga

SEQ ID NO: 1152582 - RNA, 19 nt, Homo sapiens
  misc_RNA (1)...(19): siRNA sense strand
ucaguggaggugagaguuu

SEQ ID NO: 1152583 - RNA, 19 nt, Homo sapiens
  misc_RNA (1)...(19): siRNA sense strand
ucgcuggaccguugugaaa

SEQ ID NO: 1152584 - RNA, 19 nt, Homo sapiens
  misc_RNA (1)...(19): siRNA sense strand
caaauuagagccccaggaa

SEQ ID NO: 1152585 - RNA, 19 nt, Homo sapiens
  misc_RNA (1)...(19): siRNA sense strand
gaacagagcuccugacaac

SEQ ID NO: 1152586 - RNA, 19 nt, Homo sapiens
  misc_RNA (1)...(19): siRNA sense strand
caagaaggauugucagaga

SEQ ID NO: 1152587 - RNA, 19 nt, Homo sapiens
  misc_RNA (1)...(19): siRNA sense strand
ccaaucaacucauucagaa

SEQ ID NO: 1152588 - RNA, 19 nt, Homo sapiens
  misc_RNA (1)...(19): siRNA sense strand
ggaacuaucuccucucucu

SEQ ID NO: 1152589 - RNA, 19 nt, Homo sapiens
  misc_RNA (1)...(19): siRNA sense strand
gggccuagaacccaaauua

SEQ ID NO: 1152590 - RNA, 19 nt, Homo sapiens
  misc_RNA (1)...(19): siRNA sense strand
gaagccaccuauagagaga

SEQ ID NO: 1152591 - RNA, 19 nt, Homo sapiens
  misc_RNA (1)...(19): siRNA sense strand
gauaaacagugccaagaag

SEQ ID NO: 1152592 - RNA, 19 nt, Homo sapiens
  misc_RNA (1)...(19): siRNA sense strand
gaagagauccagccacauc

SEQ ID NO: 1152593 - RNA, 19 nt, Homo sapiens
  misc_RNA (1)...(19): siRNA sense strand
ggcgguggcuguaacauga

SEQ ID NO: 1152594 - RNA, 19 nt, Homo sapiens
  misc_RNA (1)...(19): siRNA sense strand
cuagagagguaggaaauau

SEQ ID NO: 1152595 - RNA, 19 nt, Homo sapiens
  misc_RNA (1)...(19): siRNA sense strand
ccggauuccucacccaaua

SEQ ID NO: 1152596 - RNA, 19 nt, Homo sapiens
  misc_RNA (1)...(19): siRNA sense strand
uagaggaaguugucaagau

SEQ ID NO: 1152597 - RNA, 19 nt, Homo sapiens
  misc_RNA (1)...(19): siRNA sense strand
ucuguuaucuucacuguuc

SEQ ID NO: 1152598 - RNA, 19 nt, Homo sapiens
  misc_RNA (1)...(19): siRNA sense strand
gccagggccuuucgcugua

SEQ ID NO: 1152599 - RNA, 19 nt, Homo sapiens
  misc_RNA (1)...(19): siRNA sense strand
gaacaccggcucccauucu

SEQ ID NO: 1152600 - RNA, 19 nt, Homo sapiens
  misc_RNA (1)...(19): siRNA sense strand
agaggaaguugucaagaug

SEQ ID NO: 1152601 - RNA, 19 nt, Homo sapiens
  misc_RNA (1)...(19): siRNA sense strand
ggaaaaugcugugaagaga

SEQ ID NO: 1152602 - RNA, 19 nt, Homo sapiens
  misc_RNA (1)...(19): siRNA sense strand
gguguaguccugaaacuga

SEQ ID NO: 1152603 - RNA, 19 nt, Homo sapiens
  misc_RNA (1)...(19): siRNA sense strand
gaaaacaccagcccaauca

SEQ ID NO: 1152604 - RNA, 19 nt, Homo sapiens
  misc_RNA (1)...(19): siRNA sense strand
gcuauugccuaagggugua

SEQ ID NO: 1152605 - RNA, 19 nt, Homo sapiens
  misc_RNA (1)...(19): siRNA sense strand
gacagaagcguucaucagu

SEQ ID NO: 1152606 - RNA, 19 nt, Homo sapiens
  misc_RNA (1)...(19): siRNA sense strand
gcuccugacaacaucauua

SEQ ID NO: 1152607 - RNA, 19 nt, Homo sapiens
  misc_RNA (1)...(19): siRNA sense strand
ccacugcuauugccuaagg

SEQ ID NO: 1152608 - RNA, 19 nt, Homo sapiens
  misc_RNA (1)...(19): siRNA sense strand
ccucuuccauguuucgaaa

SEQ ID NO: 1152609 - RNA, 19 nt, Homo sapiens
  misc_RNA (1)...(19): siRNA sense strand
ccaggagucucuaaacaac

SEQ ID NO: 1152610 - RNA, 19 nt, Homo sapiens
  misc_RNA (1)...(19): siRNA sense strand
ugauggugcuagagaggua

SEQ ID NO: 1152611 - RNA, 19 nt, Homo sapiens
  misc_RNA (1)...(19): siRNA sense strand
gaaggauugucagagaaca

SEQ ID NO: 1152612 - RNA, 19 nt, Homo sapiens
  misc_RNA (1)...(19): siRNA sense strand
aggacaagcuucccucugu

SEQ ID NO: 1152613 - RNA, 19 nt, Homo sapiens
  misc_RNA (1)...(19): siRNA sense strand
aagaaggauugucagagaa

SEQ ID NO: 1152614 - RNA, 19 nt, Homo sapiens
  misc_RNA (1)...(19): siRNA sense strand
cgauaaacagugccaagaa

SEQ ID NO: 1152615 - RNA, 19 nt, Homo sapiens
  misc_RNA (1)...(19): siRNA sense strand
gcuagagagguaggaaaua

SEQ ID NO: 1152616 - RNA, 19 nt, Homo sapiens
  misc_RNA (1)...(19): siRNA sense strand
gccuagaacccaaauuaga

SEQ ID NO: 1152617 - RNA, 19 nt, Homo sapiens
  misc_RNA (1)...(19): siRNA sense strand
caucuguuaucuucacugu

SEQ ID NO: 1152618 - RNA, 19 nt, Homo sapiens
  misc_RNA (1)...(19): siRNA sense strand
agagagguaggaaauauga

SEQ ID NO: 1152619 - RNA, 19 nt, Homo sapiens
  misc_RNA (1)...(19): siRNA sense strand
ggaaauaugacuggaacca

SEQ ID NO: 1152620 - RNA, 19 nt, Homo sapiens
  misc_RNA (1)...(19): siRNA sense strand
ccagcccaaucaacucauu

SEQ ID NO: 1152621 - RNA, 19 nt, Homo sapiens
  misc_RNA (1)...(19): siRNA sense strand
ggauuuagaggaaguuguc

SEQ ID NO: 1152622 - RNA, 19 nt, Homo sapiens
  misc_RNA (1)...(19): siRNA sense strand
gucucacccuuaauuguuu

SEQ ID NO: 1152623 - RNA, 19 nt, Homo sapiens
  misc_RNA (1)...(19): siRNA sense strand
cuaccacugugaagauugu

SEQ ID NO: 1152624 - RNA, 19 nt, Homo sapiens
  misc_RNA (1)...(19): siRNA sense strand
aagaaggcuuggagacaga

SEQ ID NO: 1152625 - RNA, 19 nt, Homo sapiens
  misc_RNA (1)...(19): siRNA sense strand
uauccacccugcaucuguu

SEQ ID NO: 1152626 - RNA, 19 nt, Homo sapiens
  misc_RNA (1)...(19): siRNA sense strand
cggcucccauucugguuaa

SEQ ID NO: 1152627 - RNA, 19 nt, Homo sapiens
  misc_RNA (1)...(19): siRNA sense strand
ccugacaacaucauuaaau

SEQ ID NO: 1152628 - RNA, 19 nt, Homo sapiens
  misc_RNA (1)...(19): siRNA sense strand
uaaacagugccaagaagga

SEQ ID NO: 1152629 - RNA, 19 nt, Homo sapiens
  misc_RNA (1)...(19): siRNA sense strand
ucagaucaaggccuagaaa

SEQ ID NO: 1152630 - RNA, 19 nt, Homo sapiens
  misc_RNA (1)...(19): siRNA sense strand
guaggaaauaugacuggaa

SEQ ID NO: 1152631 - RNA, 19 nt, Homo sapiens
  misc_RNA (1)...(19): siRNA sense strand
caagcuucccucugucuga

SEQ ID NO: 1152632 - RNA, 19 nt, Homo sapiens
  misc_RNA (1)...(19): siRNA sense strand
uaucaaaccugccccuguu

SEQ ID NO: 1152633 - RNA, 19 nt, Homo sapiens
  misc_RNA (1)...(19): siRNA sense strand
cuaaggguguaguccugaa

SEQ ID NO: 1152634 - RNA, 19 nt, Homo sapiens
  misc_RNA (1)...(19): siRNA sense strand
guguaguccugaaacugaa

SEQ ID NO: 1152635 - RNA, 19 nt, Homo sapiens
  misc_RNA (1)...(19): siRNA sense strand
ugucucacccuuaauuguu

SEQ ID NO: 1152636 - RNA, 19 nt, Homo sapiens
  misc_RNA (1)...(19): siRNA sense strand
gccuuucgcuguaucaaac

SEQ ID NO: 1152637 - RNA, 19 nt, Homo sapiens
  misc_RNA (1)...(19): siRNA sense strand
ggagacagaagcguucauc

SEQ ID NO: 1152638 - RNA, 19 nt, Homo sapiens
  misc_RNA (1)...(19): siRNA sense strand
ugccauccauccaggaaga

SEQ ID NO: 1152639 - RNA, 19 nt, Homo sapiens
  misc_RNA (1)...(19): siRNA sense strand
ucgcuggaccguugugaaa

SEQ ID NO: 1152640 - RNA, 19 nt, Homo sapiens
  misc_RNA (1)...(19): siRNA sense strand
caaauuagagccccaggaa

SEQ ID NO: 1152641 - RNA, 19 nt, Homo sapiens
  misc_RNA (1)...(19): siRNA sense strand
ucaguggaggugagaguuu

SEQ ID NO: 1152642 - RNA, 19 nt, Homo sapiens
  misc_RNA (1)...(19): siRNA sense strand
gaaccacugagaucaacuc

SEQ ID NO: 1152643 - RNA, 19 nt, Homo sapiens
  misc_RNA (1)...(19): siRNA sense strand
ucgaaagccauaugugaga

SEQ ID NO: 1152644 - RNA, 19 nt, Homo sapiens
  misc_RNA (1)...(19): siRNA sense strand
ggaagaacugcggcacaug

SEQ ID NO: 1152645 - RNA, 19 nt, Homo sapiens
  misc_RNA (1)...(19): siRNA sense strand
gccaagaaggauugucaga

SEQ ID NO: 1152646 - RNA, 19 nt, Homo sapiens
  misc_RNA (1)...(19): siRNA sense strand
cagagcuccugacaacauc

SEQ ID NO: 1152647 - RNA, 19 nt, Homo sapiens
  misc_RNA (1)...(19): siRNA sense strand
uuucgaaagccauauguga

SEQ ID NO: 1152648 - RNA, 19 nt, Homo sapiens
  misc_RNA (1)...(19): siRNA sense strand
cagcuucaacccugggaaa

SEQ ID NO: 1152649 - RNA, 19 nt, Homo sapiens
  misc_RNA (1)...(19): siRNA sense strand
acagagcuccugacaacau

SEQ ID NO: 1152650 - RNA, 19 nt, Homo sapiens
  misc_RNA (1)...(19): siRNA sense strand
gcauccaggagucucuaaa

SEQ ID NO: 1152651 - RNA, 19 nt, Homo sapiens
  misc_RNA (1)...(19): siRNA sense strand
gagacagaagcguucauca

SEQ ID NO: 1152652 - RNA, 19 nt, Homo sapiens
  misc_RNA (1)...(19): siRNA sense strand
ggccuccaccagucgauaa

SEQ ID NO: 1152653 - RNA, 19 nt, Homo sapiens
  misc_RNA (1)...(19): siRNA sense strand
ccuagaacccaaauuagag

SEQ ID NO: 1152654 - RNA, 19 nt, Homo sapiens
  misc_RNA (1)...(19): siRNA sense strand
aagaacaccggcucccauu

SEQ ID NO: 1152655 - RNA, 19 nt, Homo sapiens
  misc_RNA (1)...(19): siRNA sense strand
gugccaagaaggauuguca

SEQ ID NO: 1152656 - RNA, 19 nt, Homo sapiens
  misc_RNA (1)...(19): siRNA sense strand
ccagggccuuucgcuguau

SEQ ID NO: 1152657 - RNA, 19 nt, Homo sapiens
  misc_RNA (1)...(19): siRNA sense strand
ggaaaacaccagcccaauc

SEQ ID NO: 1152658 - RNA, 19 nt, Homo sapiens
  misc_RNA (1)...(19): siRNA sense strand
uggaagccaccuauagaga

SEQ ID NO: 1152659 - RNA, 19 nt, Homo sapiens
  misc_RNA (1)...(19): siRNA sense strand
cccugcaucuguuaucuuc

SEQ ID NO: 1152660 - RNA, 19 nt, Homo sapiens
  misc_RNA (1)...(19): siRNA sense strand
cccugccucuuccauguuu

SEQ ID NO: 1152661 - RNA, 19 nt, Homo sapiens
  misc_RNA (1)...(19): siRNA sense strand
cccaaucaacucauucaga

SEQ ID NO: 1152662 - RNA, 19 nt, Homo sapiens
  misc_RNA (1)...(19): siRNA sense strand
ugacuggaaccacugagau

SEQ ID NO: 1152663 - RNA, 19 nt, Homo sapiens
  misc_RNA (1)...(19): siRNA sense strand
ggaaguugucaagauggaa

SEQ ID NO: 1152664 - RNA, 19 nt, Homo sapiens
  misc_RNA (1)...(19): siRNA sense strand
aggaagaacugcggcacau

SEQ ID NO: 1152665 - RNA, 19 nt, Homo sapiens
  misc_RNA (1)...(19): siRNA sense strand
ggaccguugugaaaacaga

SEQ ID NO: 1152666 - RNA, 19 nt, Homo sapiens
  misc_RNA (1)...(19): siRNA sense strand
aaaaugcugugaagagauc

SEQ ID NO: 1152667 - RNA, 19 nt, Homo sapiens
  misc_RNA (1)...(19): siRNA sense strand
ggccuagaacccaaauuag

SEQ ID NO: 1152668 - RNA, 19 nt, Homo sapiens
  misc_RNA (1)...(19): siRNA sense strand
gaacagagcuccugacaac

SEQ ID NO: 1152669 - RNA, 19 nt, Homo sapiens
  misc_RNA (1)...(19): siRNA sense strand
caagaaggauugucagaga

SEQ ID NO: 1152670 - RNA, 19 nt, Homo sapiens
  misc_RNA (1)...(19): siRNA sense strand
ucaagaaccucaacaugaa

SEQ ID NO: 1152671 - RNA, 19 nt, Homo sapiens
  misc_RNA (1)...(19): siRNA sense strand
ccaaucaacucauucagaa

SEQ ID NO: 1152672 - RNA, 19 nt, Homo sapiens
  misc_RNA (1)...(19): siRNA sense strand
gcacacaugucagcauuga

SEQ ID NO: 1152673 - RNA, 19 nt, Homo sapiens
  misc_RNA (1)...(19): siRNA sense strand
guucagcucuugacacaaa

SEQ ID NO: 1152674 - RNA, 19 nt, Homo sapiens
  misc_RNA (1)...(19): siRNA sense strand
ggaacuaucuccucucucu

SEQ ID NO: 1152675 - RNA, 19 nt, Homo sapiens
  misc_RNA (1)...(19): siRNA sense strand
gggccuagaacccaaauua

SEQ ID NO: 1152676 - RNA, 19 nt, Homo sapiens
  misc_RNA (1)...(19): siRNA sense strand
gaagccaccuauagagaga

SEQ ID NO: 1152677 - RNA, 19 nt, Homo sapiens
  misc_RNA (1)...(19): siRNA sense strand
gauaaacagugccaagaag

SEQ ID NO: 1152678 - RNA, 19 nt, Homo sapiens
  misc_RNA (1)...(19): siRNA sense strand
gaagagauccagccacauc

SEQ ID NO: 1152679 - RNA, 19 nt, Homo sapiens
  misc_RNA (1)...(19): siRNA sense strand
uuaaagagcugggaaccuu

SEQ ID NO: 1152680 - RNA, 19 nt, Homo sapiens
  misc_RNA (1)...(19): siRNA sense strand
ggcgguggcuguaacauga

SEQ ID NO: 1152681 - RNA, 19 nt, Homo sapiens
  misc_RNA (1)...(19): siRNA sense strand
gcaccaggauaugucuuaa

SEQ ID NO: 1152682 - RNA, 19 nt, Homo sapiens
  misc_RNA (1)...(19): siRNA sense strand
cuagagagguaggaaauau

SEQ ID NO: 1152683 - RNA, 19 nt, Homo sapiens
  misc_RNA (1)...(19): siRNA sense strand
cagcacacaugucagcauu

SEQ ID NO: 1152684 - RNA, 19 nt, Homo sapiens
  misc_RNA (1)...(19): siRNA sense strand
acacaaauccaccuucuug

SEQ ID NO: 1152685 - RNA, 19 nt, Homo sapiens
  misc_RNA (1)...(19): siRNA sense strand
cuaugcagcugauugaaga

SEQ ID NO: 1152686 - RNA, 19 nt, Homo sapiens
  misc_RNA (1)...(19): siRNA sense strand
uagaggaaguugucaagau

SEQ ID NO: 1152687 - RNA, 19 nt, Homo sapiens
  misc_RNA (1)...(19): siRNA sense strand
ccggauuccucacccaaua

SEQ ID NO: 1152688 - RNA, 19 nt, Homo sapiens
  misc_RNA (1)...(19): siRNA sense strand
ucuguuaucuucacuguuc

SEQ ID NO: 1152689 - RNA, 19 nt, Homo sapiens
  misc_RNA (1)...(19): siRNA sense strand
gccagggccuuucgcugua

SEQ ID NO: 1152690 - RNA, 19 nt, Homo sapiens
  misc_RNA (1)...(19): siRNA sense strand
gaacaccggcucccauucu

SEQ ID NO: 1152691 - RNA, 19 nt, Homo sapiens
  misc_RNA (1)...(19): siRNA sense strand
agaggaaguugucaagaug

SEQ ID NO: 1152692 - RNA, 19 nt, Homo sapiens
  misc_RNA (1)...(19): siRNA sense strand
ggaaaaugcugugaagaga

SEQ ID NO: 1152693 - RNA, 19 nt, Homo sapiens
  misc_RNA (1)...(19): siRNA sense strand
gccaguagcaccaggauau

SEQ ID NO: 1152694 - RNA, 19 nt, Homo sapiens
  misc_RNA (1)...(19): siRNA sense strand
gaaaacaccagcccaauca

SEQ ID NO: 1152695 - RNA, 19 nt, Homo sapiens
  misc_RNA (1)...(19): siRNA sense strand
gguguaguccugaaacuga

SEQ ID NO: 1152696 - RNA, 19 nt, Homo sapiens
  misc_RNA (1)...(19): siRNA sense strand
gcuauugccuaagggugua

SEQ ID NO: 1152697 - RNA, 19 nt, Homo sapiens
  misc_RNA (1)...(19): siRNA sense strand
gacagaagcguucaucagu

SEQ ID NO: 1152698 - RNA, 19 nt, Homo sapiens
  misc_RNA (1)...(19): siRNA sense strand
gcuccugacaacaucauua

SEQ ID NO: 1152699 - RNA, 19 nt, Homo sapiens
  misc_RNA (1)...(19): siRNA sense strand
ccacugcuauugccuaagg

SEQ ID NO: 1152700 - RNA, 19 nt, Homo sapiens
  misc_RNA (1)...(19): siRNA sense strand
ccucuuccauguuucgaaa

SEQ ID NO: 1152701 - RNA, 19 nt, Homo sapiens
  misc_RNA (1)...(19): siRNA sense strand
ccaggagucucuaaacaac

SEQ ID NO: 1152702 - RNA, 19 nt, Homo sapiens
  misc_RNA (1)...(19): siRNA sense strand
agaaggagguagagaaggu

SEQ ID NO: 1152703 - RNA, 19 nt, Homo sapiens
  misc_RNA (1)...(19): siRNA sense strand
ugacacaaauccaccuucu

SEQ ID NO: 1152704 - RNA, 19 nt, Homo sapiens
  misc_RNA (1)...(19): siRNA sense strand
guuccaacccuguaacuug

SEQ ID NO: 1152705 - RNA, 19 nt, Homo sapiens
  misc_RNA (1)...(19): siRNA sense strand
ggagguagagaagguuaaa

SEQ ID NO: 1152706 - RNA, 19 nt, Homo sapiens
  misc_RNA (1)...(19): siRNA sense strand
gaaggauugucagagaaca

SEQ ID NO: 1152707 - RNA, 19 nt, Homo sapiens
  misc_RNA (1)...(19): siRNA sense strand
ugauggugcuagagaggua

SEQ ID NO: 1152708 - RNA, 19 nt, Homo sapiens
  misc_RNA (1)...(19): siRNA sense strand
gcagaaggagguagagaag

SEQ ID NO: 1152709 - RNA, 19 nt, Homo sapiens
  misc_RNA (1)...(19): siRNA sense strand
aggacaagcuucccucugu

SEQ ID NO: 1152710 - RNA, 19 nt, Homo sapiens
  misc_RNA (1)...(19): siRNA sense strand
aagaaggauugucagagaa

SEQ ID NO: 1152711 - RNA, 19 nt, Homo sapiens
  misc_RNA (1)...(19): siRNA sense strand
cgauaaacagugccaagaa

SEQ ID NO: 1152712 - RNA, 19 nt, Homo sapiens
  misc_RNA (1)...(19): siRNA sense strand
gcuagagagguaggaaaua

SEQ ID NO: 1152713 - RNA, 19 nt, Homo sapiens
  misc_RNA (1)...(19): siRNA sense strand
gccuagaacccaaauuaga

SEQ ID NO: 1152714 - RNA, 19 nt, Homo sapiens
  misc_RNA (1)...(19): siRNA sense strand
gaaucaagaaccucaacau

SEQ ID NO: 1152715 - RNA, 19 nt, Homo sapiens
  misc_RNA (1)...(19): siRNA sense strand
caucuguuaucuucacugu

SEQ ID NO: 1152716 - RNA, 19 nt, Homo sapiens
  misc_RNA (1)...(19): siRNA sense strand
ugacugcagcccucauaaa

SEQ ID NO: 1152717 - RNA, 19 nt, Homo sapiens
  misc_RNA (1)...(19): siRNA sense strand
agagagguaggaaauauga

SEQ ID NO: 1152718 - RNA, 19 nt, Homo sapiens
  misc_RNA (1)...(19): siRNA sense strand
ggaaauaugacuggaacca

SEQ ID NO: 1152719 - RNA, 19 nt, Homo sapiens
  misc_RNA (1)...(19): siRNA sense strand
ccagcccaaucaacucauu

SEQ ID NO: 1152720 - RNA, 19 nt, Homo sapiens
  misc_RNA (1)...(19): siRNA sense strand
ggauuuagaggaaguuguc

SEQ ID NO: 1152721 - RNA, 19 nt, Homo sapiens
  misc_RNA (1)...(19): siRNA sense strand
gucucacccuuaauuguuu

SEQ ID NO: 1152722 - RNA, 19 nt, Homo sapiens
  misc_RNA (1)...(19): siRNA sense strand
cuaccacugugaagauugu

SEQ ID NO: 1152723 - RNA, 19 nt, Homo sapiens
  misc_RNA (1)...(19): siRNA sense strand
uuccaacccuguaacuuga

SEQ ID NO: 1152724 - RNA, 19 nt, Homo sapiens
  misc_RNA (1)...(19): siRNA sense strand
uauccacccugcaucuguu

SEQ ID NO: 1152725 - RNA, 19 nt, Homo sapiens
  misc_RNA (1)...(19): siRNA sense strand
aagaaggcuuggagacaga

SEQ ID NO: 1152726 - RNA, 19 nt, Homo sapiens
  misc_RNA (1)...(19): siRNA sense strand
guaacuugaugggagcuau

SEQ ID NO: 1152727 - RNA, 19 nt, Homo sapiens
  misc_RNA (1)...(19): siRNA sense strand
ccaucgcccuucaccauca

SEQ ID NO: 1152728 - RNA, 19 nt, Homo sapiens
  misc_RNA (1)...(19): siRNA sense strand
uaaacagugccaagaagga

SEQ ID NO: 1152729 - RNA, 19 nt, Homo sapiens
  misc_RNA (1)...(19): siRNA sense strand
ucagaucaaggccuagaaa

SEQ ID NO: 1152730 - RNA, 19 nt, Homo sapiens
  misc_RNA (1)...(19): siRNA sense strand
guaggaaauaugacuggaa

SEQ ID NO: 1152731 - RNA, 19 nt, Homo sapiens
  misc_RNA (1)...(19): siRNA sense strand
cggcucccauucugguuaa

SEQ ID NO: 1152732 - RNA, 19 nt, Homo sapiens
  misc_RNA (1)...(19): siRNA sense strand
ccugacaacaucauuaaau

SEQ ID NO: 1152733 - RNA, 19 nt, Homo sapiens
  misc_RNA (1)...(19): siRNA sense strand
gcagcauguucagcucuug

SEQ ID NO: 1152734 - RNA, 19 nt, Homo sapiens
  misc_RNA (1)...(19): siRNA sense strand
uaucaaaccugccccuguu

SEQ ID NO: 1152735 - RNA, 19 nt, Homo sapiens
  misc_RNA (1)...(19): siRNA sense strand
caagcuucccucugucuga

SEQ ID NO: 1152736 - RNA, 19 nt, Homo sapiens
  misc_RNA (1)...(19): siRNA sense strand
gcugggaaccuuugcucaa

SEQ ID NO: 1152737 - RNA, 19 nt, Homo sapiens
  misc_RNA (1)...(19): siRNA sense strand
ugacagugagaaucaagaa

SEQ ID NO: 1152738 - RNA, 19 nt, Homo sapiens
  misc_RNA (1)...(19): siRNA sense strand
gaaccucaacaugaacaga

SEQ ID NO: 1152739 - RNA, 19 nt, Homo sapiens
  misc_RNA (1)...(19): siRNA sense strand
gaaggagguagagaagguu

SEQ ID NO: 1152740 - RNA, 19 nt, Homo sapiens
  misc_RNA (1)...(19): siRNA sense strand
cuaaggguguaguccugaa

SEQ ID NO: 1152741 - RNA, 19 nt, Homo sapiens
  misc_RNA (1)...(19): siRNA sense strand
ucauaaaacugucaagaag

SEQ ID NO: 1152742 - RNA, 19 nt, Homo sapiens
  misc_RNA (1)...(19): siRNA sense strand
aaucaagaaccucaacaug

SEQ ID NO: 1152743 - RNA, 19 nt, Homo sapiens
  misc_RNA (1)...(19): siRNA sense strand
ugucucacccuuaauuguu

SEQ ID NO: 1152744 - RNA, 19 nt, Homo sapiens
  misc_RNA (1)...(19): siRNA sense strand
gccuuucgcuguaucaaac

SEQ ID NO: 1152745 - RNA, 19 nt, Homo sapiens
  misc_RNA (1)...(19): siRNA sense strand
ggagacagaagcguucauc

SEQ ID NO: 1152746 - RNA, 19 nt, Homo sapiens
  misc_RNA (1)...(19): siRNA sense strand
guguaguccugaaacugaa

SEQ ID NO: 1152747 - RNA, 19 nt, Homo sapiens
  misc_RNA (1)...(19): siRNA sense strand
aucaagaaccucaacauga

SEQ ID NO: 1152748 - RNA, 19 nt, Homo sapiens
  misc_RNA (1)...(19): siRNA sense strand
ugccauccauccaggaaga

SEQ ID NO: 1152749 - RNA, 19 nt, Homo sapiens
  misc_RNA (1)...(19): siRNA sense strand
ucgcuggaccguugugaaa

SEQ ID NO: 1152750 - RNA, 19 nt, Homo sapiens
  misc_RNA (1)...(19): siRNA sense strand
caaauuagagccccaggaa

SEQ ID NO: 1152751 - RNA, 19 nt, Homo sapiens
  misc_RNA (1)...(19): siRNA sense strand
ucaguggaggugagaguuu

SEQ ID NO: 1152752 - RNA, 19 nt, Homo sapiens
  misc_RNA (1)...(19): siRNA sense strand
accaggauaugucuuaaag

SEQ ID NO: 1152753 - RNA, 19 nt, Homo sapiens
  misc_RNA (1)...(19): siRNA sense strand
gaaccacugagaucaacuc

SEQ ID NO: 1152754 - RNA, 19 nt, Homo sapiens
  misc_RNA (1)...(19): siRNA sense strand
cagccaaacagcagaagga

SEQ ID NO: 1152755 - RNA, 19 nt, Homo sapiens
  misc_RNA (1)...(19): siRNA sense strand
ccaacccuguaacuugaug

SEQ ID NO: 1152756 - RNA, 19 nt, Homo sapiens
  misc_RNA (1)...(19): siRNA sense strand
ucgaaagccauaugugaga

SEQ ID NO: 1152757 - RNA, 19 nt, Homo sapiens
  misc_RNA (1)...(19): siRNA sense strand
cagagcuccugacaacauc

SEQ ID NO: 1152758 - RNA, 19 nt, Homo sapiens
  misc_RNA (1)...(19): siRNA sense strand
gccaagaaggauugucaga

SEQ ID NO: 1152759 - RNA, 19 nt, Homo sapiens
  misc_RNA (1)...(19): siRNA sense strand
uuucgaaagccauauguga

SEQ ID NO: 1152760 - RNA, 19 nt, Homo sapiens
  misc_RNA (1)...(19): siRNA sense strand
cagcuucaacccugggaaa

SEQ ID NO: 1152761 - RNA, 19 nt, Homo sapiens
  misc_RNA (1)...(19): siRNA sense strand
ggaagaacugcggcacaug

SEQ ID NO: 1152762 - RNA, 19 nt, Homo sapiens
  misc_RNA (1)...(19): siRNA sense strand
gcuaugcagcugauugaag

SEQ ID NO: 1152763 - RNA, 19 nt, Homo sapiens
  misc_RNA (1)...(19): siRNA sense strand
gcauccaggagucucuaaa

SEQ ID NO: 1152764 - RNA, 19 nt, Homo sapiens
  misc_RNA (1)...(19): siRNA sense strand
acagagcuccugacaacau

SEQ ID NO: 1152765 - RNA, 19 nt, Homo sapiens
  misc_RNA (1)...(19): siRNA sense strand
gacuucagcacacauguca

SEQ ID NO: 1152766 - RNA, 19 nt, Homo sapiens
  misc_RNA (1)...(19): siRNA sense strand
ccuagaacccaaauuagag

SEQ ID NO: 1152767 - RNA, 19 nt, Homo sapiens
  misc_RNA (1)...(19): siRNA sense strand
ggccuccaccagucgauaa

SEQ ID NO: 1152768 - RNA, 19 nt, Homo sapiens
  misc_RNA (1)...(19): siRNA sense strand
ggacaagggauuaauagua

SEQ ID NO: 1152769 - RNA, 19 nt, Homo sapiens
  misc_RNA (1)...(19): siRNA sense strand
gacaagggauuaauaguau

SEQ ID NO: 1152770 - RNA, 19 nt, Homo sapiens
  misc_RNA (1)...(19): siRNA sense strand
ggaauuccaugacuccaaa

SEQ ID NO: 1152771 - RNA, 19 nt, Homo sapiens
  misc_RNA (1)...(19): siRNA sense strand
ggaaaccucuggaccucua

SEQ ID NO: 1152772 - RNA, 19 nt, Homo sapiens
  misc_RNA (1)...(19): siRNA sense strand
gaauaccucugacaugaug

SEQ ID NO: 1152773 - RNA, 19 nt, Homo sapiens
  misc_RNA (1)...(19): siRNA sense strand
caacauggcggacaacaaa

SEQ ID NO: 1152774 - RNA, 19 nt, Homo sapiens
  misc_RNA (1)...(19): siRNA sense strand
aggagaagcugaucaguaa

SEQ ID NO: 1152775 - RNA, 19 nt, Homo sapiens
  misc_RNA (1)...(19): siRNA sense strand
gcaacgacaugauuccuau

SEQ ID NO: 1152776 - RNA, 19 nt, Homo sapiens
  misc_RNA (1)...(19): siRNA sense strand
gaaggagauugguggauug

SEQ ID NO: 1152777 - RNA, 19 nt, Homo sapiens
  misc_RNA (1)...(19): siRNA sense strand
guaaagaucguacagaaga

SEQ ID NO: 1152778 - RNA, 19 nt, Homo sapiens
  misc_RNA (1)...(19): siRNA sense strand
ugaucuaucugguucaaua

SEQ ID NO: 1152779 - RNA, 19 nt, Homo sapiens
  misc_RNA (1)...(19): siRNA sense strand
ggaagaagaagaggaagua

SEQ ID NO: 1152780 - RNA, 19 nt, Homo sapiens
  misc_RNA (1)...(19): siRNA sense strand
gaauagggccugagggaaa

SEQ ID NO: 1152781 - RNA, 19 nt, Homo sapiens
  misc_RNA (1)...(19): siRNA sense strand
gagguuauaugcagaggaa

SEQ ID NO: 1152782 - RNA, 19 nt, Homo sapiens
  misc_RNA (1)...(19): siRNA sense strand
ggaagaagaagaagaacuu

SEQ ID NO: 1152783 - RNA, 19 nt, Homo sapiens
  misc_RNA (1)...(19): siRNA sense strand
gaacuggaccuccuuaugg

SEQ ID NO: 1152784 - RNA, 19 nt, Homo sapiens
  misc_RNA (1)...(19): siRNA sense strand
gcagauuccuccuuaugga

SEQ ID NO: 1152785 - RNA, 19 nt, Homo sapiens
  misc_RNA (1)...(19): siRNA sense strand
ggagauggcugugguacug

SEQ ID NO: 1152786 - RNA, 19 nt, Homo sapiens
  misc_RNA (1)...(19): siRNA sense strand
cacagcagauuccuccuua

SEQ ID NO: 1152787 - RNA, 19 nt, Homo sapiens
  misc_RNA (1)...(19): siRNA sense strand
gcacagagccaccggaaca

SEQ ID NO: 1152788 - RNA, 19 nt, Homo sapiens
  misc_RNA (1)...(19): siRNA sense strand
gaggagaagcugaucagua

SEQ ID NO: 1152789 - RNA, 19 nt, Homo sapiens
  misc_RNA (1)...(19): siRNA sense strand
guaaugaugucccucaagu

SEQ ID NO: 1152790 - RNA, 19 nt, Homo sapiens
  misc_RNA (1)...(19): siRNA sense strand
gcccuaacauggccaauau

SEQ ID NO: 1152791 - RNA, 19 nt, Homo sapiens
  misc_RNA (1)...(19): siRNA sense strand
caguaaagaucguacagaa

SEQ ID NO: 1152792 - RNA, 19 nt, Homo sapiens
  misc_RNA (1)...(19): siRNA sense strand
uauaaugccuugcccaaug

SEQ ID NO: 1152793 - RNA, 19 nt, Homo sapiens
  misc_RNA (1)...(19): siRNA sense strand
gcaaugacuuugagauguc

SEQ ID NO: 1152794 - RNA, 19 nt, Homo sapiens
  misc_RNA (1)...(19): siRNA sense strand
ggaccucuaucgccucuau

SEQ ID NO: 1152795 - RNA, 19 nt, Homo sapiens
  misc_RNA (1)...(19): siRNA sense strand
gaucagaugggcaagauga

SEQ ID NO: 1152796 - RNA, 19 nt, Homo sapiens
  misc_RNA (1)...(19): siRNA sense strand
caggaugccuuuaaugaug

SEQ ID NO: 1152797 - RNA, 19 nt, Homo sapiens
  misc_RNA (1)...(19): siRNA sense strand
ucaaugaccuccaguaagg

SEQ ID NO: 1152798 - RNA, 19 nt, Homo sapiens
  misc_RNA (1)...(19): siRNA sense strand
ccaggcagccaaacuauaa

SEQ ID NO: 1152799 - RNA, 19 nt, Homo sapiens
  misc_RNA (1)...(19): siRNA sense strand
gugguggacugcucagaua

SEQ ID NO: 1152800 - RNA, 19 nt, Homo sapiens
  misc_RNA (1)...(19): siRNA sense strand
aggcauggcuggaggcaua

SEQ ID NO: 1152801 - RNA, 19 nt, Homo sapiens
  misc_RNA (1)...(19): siRNA sense strand
gagcagcaaguuuccauuu

SEQ ID NO: 1152802 - RNA, 19 nt, Homo sapiens
  misc_RNA (1)...(19): siRNA sense strand
ugaaggagauugguggauu

SEQ ID NO: 1152803 - RNA, 19 nt, Homo sapiens
  misc_RNA (1)...(19): siRNA sense strand
gagaaguuguauagcacua

SEQ ID NO: 1152804 - RNA, 19 nt, Homo sapiens
  misc_RNA (1)...(19): siRNA sense strand
gaauccaaauccaagaaau

SEQ ID NO: 1152805 - RNA, 19 nt, Homo sapiens
  misc_RNA (1)...(19): siRNA sense strand
caacuaguguggacaugau

SEQ ID NO: 1152806 - RNA, 19 nt, Homo sapiens
  misc_RNA (1)...(19): siRNA sense strand
gaagaucaccaaguuguau

SEQ ID NO: 1152807 - RNA, 19 nt, Homo sapiens
  misc_RNA (1)...(19): siRNA sense strand
gagaagaucaccaaguugu

SEQ ID NO: 1152808 - RNA, 19 nt, Homo sapiens
  misc_RNA (1)...(19): siRNA sense strand
ggacaccacugagcauauc

SEQ ID NO: 1152809 - RNA, 19 nt, Homo sapiens
  misc_RNA (1)...(19): siRNA sense strand
ucaacauccugcuguauga

SEQ ID NO: 1152810 - RNA, 19 nt, Homo sapiens
  misc_RNA (1)...(19): siRNA sense strand
cgacagcacuaucccuaug

SEQ ID NO: 1152811 - RNA, 19 nt, Homo sapiens
  misc_RNA (1)...(19): siRNA sense strand
ggcagaaggaggagacuua

SEQ ID NO: 1152812 - RNA, 19 nt, Homo sapiens
  misc_RNA (1)...(19): siRNA sense strand
ggacauggccucgcagugu

SEQ ID NO: 1152813 - RNA, 19 nt, Homo sapiens
  misc_RNA (1)...(19): siRNA sense strand
gaaccauggccaacaauuc

SEQ ID NO: 1152814 - RNA, 19 nt, Homo sapiens
  misc_RNA (1)...(19): siRNA sense strand
gcagcaaguuuccauuugg

SEQ ID NO: 1152815 - RNA, 19 nt, Homo sapiens
  misc_RNA (1)...(19): siRNA sense strand
uaucagcccaguaugaaua

SEQ ID NO: 1152816 - RNA, 19 nt, Homo sapiens
  misc_RNA (1)...(19): siRNA sense strand
gacgaugccugauugagau

SEQ ID NO: 1152817 - RNA, 19 nt, Homo sapiens
  misc_RNA (1)...(19): siRNA sense strand
cagcuugccugaucuaucu

SEQ ID NO: 1152818 - RNA, 19 nt, Homo sapiens
  misc_RNA (1)...(19): siRNA sense strand
ggauggagcuaagaguuca

SEQ ID NO: 1152819 - RNA, 19 nt, Homo sapiens
  misc_RNA (1)...(19): siRNA sense strand
uaaagaucguacagaagaa

SEQ ID NO: 1152820 - RNA, 19 nt, Homo sapiens
  misc_RNA (1)...(19): siRNA sense strand
gaagaggaaguaguugaaa

SEQ ID NO: 1152821 - RNA, 19 nt, Homo sapiens
  misc_RNA (1)...(19): siRNA sense strand
uagagcuccuuguagaaua

SEQ ID NO: 1152822 - RNA, 19 nt, Homo sapiens
  misc_RNA (1)...(19): siRNA sense strand
gaucacagccacuauggau

SEQ ID NO: 1152823 - RNA, 19 nt, Homo sapiens
  misc_RNA (1)...(19): siRNA sense strand
gacauggccucgcaguguu

SEQ ID NO: 1152824 - RNA, 19 nt, Homo sapiens
  misc_RNA (1)...(19): siRNA sense strand
ggaaguaguugaaaaugau

SEQ ID NO: 1152825 - RNA, 19 nt, Homo sapiens
  misc_RNA (1)...(19): siRNA sense strand
gcacaugggcauuagauac

SEQ ID NO: 1152826 - RNA, 19 nt, Homo sapiens
  misc_RNA (1)...(19): siRNA sense strand
ggagauugguggauugacu

SEQ ID NO: 1152827 - RNA, 19 nt, Homo sapiens
  misc_RNA (1)...(19): siRNA sense strand
agauguggguggaccguua

SEQ ID NO: 1152828 - RNA, 19 nt, Homo sapiens
  misc_RNA (1)...(19): siRNA sense strand
gaaauccaguucuucuacu

SEQ ID NO: 1152829 - RNA, 19 nt, Homo sapiens
  misc_RNA (1)...(19): siRNA sense strand
ggcaugagcaggagcaauu

SEQ ID NO: 1152830 - RNA, 19 nt, Homo sapiens
  misc_RNA (1)...(19): siRNA sense strand
ggcaaugacuuugagaugu

SEQ ID NO: 1152831 - RNA, 19 nt, Homo sapiens
  misc_RNA (1)...(19): siRNA sense strand
guucagaggccaucaagga

SEQ ID NO: 1152832 - RNA, 19 nt, Homo sapiens
  misc_RNA (1)...(19): siRNA sense strand
ggagugaucccuucauguc

SEQ ID NO: 1152833 - RNA, 19 nt, Homo sapiens
  misc_RNA (1)...(19): siRNA sense strand
gcugccaacucuauccaaa

SEQ ID NO: 1152834 - RNA, 19 nt, Homo sapiens
  misc_RNA (1)...(19): siRNA sense strand
cauuugugauguacuguuu

SEQ ID NO: 1152835 - RNA, 19 nt, Homo sapiens
  misc_RNA (1)...(19): siRNA sense strand
ccaacaacauggcggacaa

SEQ ID NO: 1152836 - RNA, 19 nt, Homo sapiens
  misc_RNA (1)...(19): siRNA sense strand
ggacugcucagauaagcuu

SEQ ID NO: 1152837 - RNA, 19 nt, Homo sapiens
  misc_RNA (1)...(19): siRNA sense strand
ugacaagcuuccaguaaag

SEQ ID NO: 1152838 - RNA, 19 nt, Homo sapiens
  misc_RNA (1)...(19): siRNA sense strand
agaagaagaggaaguaguu

SEQ ID NO: 1152839 - RNA, 19 nt, Homo sapiens
  misc_RNA (1)...(19): siRNA sense strand
ggaacuggaccuccuuaug

SEQ ID NO: 1152840 - RNA, 19 nt, Homo sapiens
  misc_RNA (1)...(19): siRNA sense strand
cgcaggagcuaucucaaga

SEQ ID NO: 1152841 - RNA, 19 nt, Homo sapiens
  misc_RNA (1)...(19): siRNA sense strand
gcaccacuaacuuaugaaa

SEQ ID NO: 1152842 - RNA, 19 nt, Homo sapiens
  misc_RNA (1)...(19): siRNA sense strand
ucacagccacuauggauga

SEQ ID NO: 1152843 - RNA, 19 nt, Homo sapiens
  misc_RNA (1)...(19): siRNA sense strand
uugacaagcuuccaguaaa

SEQ ID NO: 1152844 - RNA, 19 nt, Homo sapiens
  misc_RNA (1)...(19): siRNA sense strand
gcagaaggaggagacuuaa

SEQ ID NO: 1152845 - RNA, 19 nt, Homo sapiens
  misc_RNA (1)...(19): siRNA sense strand
aaucaagcauugcccaaga

SEQ ID NO: 1152846 - RNA, 19 nt, Homo sapiens
  misc_RNA (1)...(19): siRNA sense strand
cacuauggaugacauguug

SEQ ID NO: 1152847 - RNA, 19 nt, Homo sapiens
  misc_RNA (1)...(19): siRNA sense strand
ccucggagcugaagaaagc

SEQ ID NO: 1152848 - RNA, 19 nt, Homo sapiens
  misc_RNA (1)...(19): siRNA sense strand
augagaagaucaccaaguu

SEQ ID NO: 1152849 - RNA, 19 nt, Homo sapiens
  misc_RNA (1)...(19): siRNA sense strand
ccaaugagaagaucaccaa

SEQ ID NO: 1152850 - RNA, 19 nt, Homo sapiens
  misc_RNA (1)...(19): siRNA sense strand
gaggacggagccuggaaua

SEQ ID NO: 1152851 - RNA, 19 nt, Homo sapiens
  misc_RNA (1)...(19): siRNA sense strand
ggcgggaacuugcaaccaa

SEQ ID NO: 1152852 - RNA, 19 nt, Homo sapiens
  misc_RNA (1)...(19): siRNA sense strand
augaauaccucugacauga

SEQ ID NO: 1152853 - RNA, 19 nt, Homo sapiens
  misc_RNA (1)...(19): siRNA sense strand
gaacucauugguuucacaa

SEQ ID NO: 1152854 - RNA, 19 nt, Homo sapiens
  misc_RNA (1)...(19): siRNA sense strand
guacgaaucacggcuguug

SEQ ID NO: 1152855 - RNA, 19 nt, Homo sapiens
  misc_RNA (1)...(19): siRNA sense strand
gaacaucaagauccuagag

SEQ ID NO: 1152856 - RNA, 19 nt, Homo sapiens
  misc_RNA (1)...(19): siRNA sense strand
gaggauggagcuaagaguu

SEQ ID NO: 1152857 - RNA, 19 nt, Homo sapiens
  misc_RNA (1)...(19): siRNA sense strand
auugagaucuuuggcauuu

SEQ ID NO: 1152858 - RNA, 19 nt, Homo sapiens
  misc_RNA (1)...(19): siRNA sense strand
cgacgaugccugauugaga

SEQ ID NO: 1152859 - RNA, 19 nt, Homo sapiens
  misc_RNA (1)...(19): siRNA sense strand
ccuaugagccaaauaagga

SEQ ID NO: 1152860 - RNA, 19 nt, Homo sapiens
  misc_RNA (1)...(19): siRNA sense strand
aaauccaguucuucuacua

SEQ ID NO: 1152861 - RNA, 19 nt, Homo sapiens
  misc_RNA (1)...(19): siRNA sense strand
caacaauguggaccugauu

SEQ ID NO: 1152862 - RNA, 19 nt, Homo sapiens
  misc_RNA (1)...(19): siRNA sense strand
gcaggcaccacuaacuuau

SEQ ID NO: 1152863 - RNA, 19 nt, Homo sapiens
  misc_RNA (1)...(19): siRNA sense strand
gaagcugaucaguaaguuu

SEQ ID NO: 1152864 - RNA, 19 nt, Homo sapiens
  misc_RNA (1)...(19): siRNA sense strand
ugagaucuuuggcauuuua

SEQ ID NO: 1152865 - RNA, 19 nt, Homo sapiens
  misc_RNA (1)...(19): siRNA sense strand
ccaucaacauccugcugua

SEQ ID NO: 1152866 - RNA, 19 nt, Homo sapiens
  misc_RNA (1)...(19): siRNA sense strand
ggacggagccuggaauagg

SEQ ID NO: 1152867 - RNA, 19 nt, Homo sapiens
  misc_RNA (1)...(19): siRNA sense strand
gaagcggaauuccaugacu

SEQ ID NO: 1152868 - RNA, 19 nt, Homo sapiens
  misc_RNA (1)...(19): siRNA sense strand
ggacaagggauuaauagua

SEQ ID NO: 1152869 - RNA, 19 nt, Homo sapiens
  misc_RNA (1)...(19): siRNA sense strand
gacaagggauuaauaguau

SEQ ID NO: 1152870 - RNA, 19 nt, Homo sapiens
  misc_RNA (1)...(19): siRNA sense strand
ggaauuccaugacuccaaa

SEQ ID NO: 1152871 - RNA, 19 nt, Homo sapiens
  misc_RNA (1)...(19): siRNA sense strand
ggaaaccucuggaccucua

SEQ ID NO: 1152872 - RNA, 19 nt, Homo sapiens
  misc_RNA (1)...(19): siRNA sense strand
gaauaccucugacaugaug

SEQ ID NO: 1152873 - RNA, 19 nt, Homo sapiens
  misc_RNA (1)...(19): siRNA sense strand
caacauggcggacaacaaa

SEQ ID NO: 1152874 - RNA, 19 nt, Homo sapiens
  misc_RNA (1)...(19): siRNA sense strand
gcaacgacaugauuccuau

SEQ ID NO: 1152875 - RNA, 19 nt, Homo sapiens
  misc_RNA (1)...(19): siRNA sense strand
gaaggagauugguggauug

SEQ ID NO: 1152876 - RNA, 19 nt, Homo sapiens
  misc_RNA (1)...(19): siRNA sense strand
ugaucuaucugguucaaua

SEQ ID NO: 1152877 - RNA, 19 nt, Homo sapiens
  misc_RNA (1)...(19): siRNA sense strand
gaauagggccugagggaaa

SEQ ID NO: 1152878 - RNA, 19 nt, Homo sapiens
  misc_RNA (1)...(19): siRNA sense strand
gagguuauaugcagaggaa

SEQ ID NO: 1152879 - RNA, 19 nt, Homo sapiens
  misc_RNA (1)...(19): siRNA sense strand
gaacuggaccuccuuaugg

SEQ ID NO: 1152880 - RNA, 19 nt, Homo sapiens
  misc_RNA (1)...(19): siRNA sense strand
gcagauuccuccuuaugga

SEQ ID NO: 1152881 - RNA, 19 nt, Homo sapiens
  misc_RNA (1)...(19): siRNA sense strand
cacagcagauuccuccuua

SEQ ID NO: 1152882 - RNA, 19 nt, Homo sapiens
  misc_RNA (1)...(19): siRNA sense strand
gcccuaacauggccaauau

SEQ ID NO: 1152883 - RNA, 19 nt, Homo sapiens
  misc_RNA (1)...(19): siRNA sense strand
uauaaugccuugcccaaug

SEQ ID NO: 1152884 - RNA, 19 nt, Homo sapiens
  misc_RNA (1)...(19): siRNA sense strand
ggaccucuaucgccucuau

SEQ ID NO: 1152885 - RNA, 19 nt, Homo sapiens
  misc_RNA (1)...(19): siRNA sense strand
gaucagaugggcaagauga

SEQ ID NO: 1152886 - RNA, 19 nt, Homo sapiens
  misc_RNA (1)...(19): siRNA sense strand
caggaugccuuuaaugaug

SEQ ID NO: 1152887 - RNA, 19 nt, Homo sapiens
  misc_RNA (1)...(19): siRNA sense strand
ucaaugaccuccaguaagg

SEQ ID NO: 1152888 - RNA, 19 nt, Homo sapiens
  misc_RNA (1)...(19): siRNA sense strand
ccaggcagccaaacuauaa

SEQ ID NO: 1152889 - RNA, 19 nt, Homo sapiens
  misc_RNA (1)...(19): siRNA sense strand
aggcauggcuggaggcaua

SEQ ID NO: 1152890 - RNA, 19 nt, Homo sapiens
  misc_RNA (1)...(19): siRNA sense strand
ugaaggagauugguggauu

SEQ ID NO: 1152891 - RNA, 19 nt, Homo sapiens
  misc_RNA (1)...(19): siRNA sense strand
gaauccaaauccaagaaau

SEQ ID NO: 1152892 - RNA, 19 nt, Homo sapiens
  misc_RNA (1)...(19): siRNA sense strand
gaagaucaccaaguuguau

SEQ ID NO: 1152893 - RNA, 19 nt, Homo sapiens
  misc_RNA (1)...(19): siRNA sense strand
gagaagaucaccaaguugu

SEQ ID NO: 1152894 - RNA, 19 nt, Homo sapiens
  misc_RNA (1)...(19): siRNA sense strand
cgacagcacuaucccuaug

SEQ ID NO: 1152895 - RNA, 19 nt, Homo sapiens
  misc_RNA (1)...(19): siRNA sense strand
ggcagaaggaggagacuua

SEQ ID NO: 1152896 - RNA, 19 nt, Homo sapiens
  misc_RNA (1)...(19): siRNA sense strand
ggacauggccucgcagugu

SEQ ID NO: 1152897 - RNA, 19 nt, Homo sapiens
  misc_RNA (1)...(19): siRNA sense strand
gaaccauggccaacaauuc

SEQ ID NO: 1152898 - RNA, 19 nt, Homo sapiens
  misc_RNA (1)...(19): siRNA sense strand
uaucagcccaguaugaaua

SEQ ID NO: 1152899 - RNA, 19 nt, Homo sapiens
  misc_RNA (1)...(19): siRNA sense strand
cagcuugccugaucuaucu

SEQ ID NO: 1152900 - RNA, 19 nt, Homo sapiens
  misc_RNA (1)...(19): siRNA sense strand
gacauggccucgcaguguu

SEQ ID NO: 1152901 - RNA, 19 nt, Homo sapiens
  misc_RNA (1)...(19): siRNA sense strand
ggagauugguggauugacu

SEQ ID NO: 1152902 - RNA, 19 nt, Homo sapiens
  misc_RNA (1)...(19): siRNA sense strand
agauguggguggaccguua

SEQ ID NO: 1152903 - RNA, 19 nt, Homo sapiens
  misc_RNA (1)...(19): siRNA sense strand
gaaauccaguucuucuacu

SEQ ID NO: 1152904 - RNA, 19 nt, Homo sapiens
  misc_RNA (1)...(19): siRNA sense strand
ggcaugagcaggagcaauu

SEQ ID NO: 1152905 - RNA, 19 nt, Homo sapiens
  misc_RNA (1)...(19): siRNA sense strand
ggagugaucccuucauguc

SEQ ID NO: 1152906 - RNA, 19 nt, Homo sapiens
  misc_RNA (1)...(19): siRNA sense strand
ccaacaacauggcggacaa

SEQ ID NO: 1152907 - RNA, 19 nt, Homo sapiens
  misc_RNA (1)...(19): siRNA sense strand
ggaacuggaccuccuuaug

SEQ ID NO: 1152908 - RNA, 19 nt, Homo sapiens
  misc_RNA (1)...(19): siRNA sense strand
gcugccaacucuauccaaa

SEQ ID NO: 1152909 - RNA, 19 nt, Homo sapiens
  misc_RNA (1)...(19): siRNA sense strand
cgcaggagcuaucucaaga

SEQ ID NO: 1152910 - RNA, 19 nt, Homo sapiens
  misc_RNA (1)...(19): siRNA sense strand
gcagaaggaggagacuuaa

SEQ ID NO: 1152911 - RNA, 19 nt, Homo sapiens
  misc_RNA (1)...(19): siRNA sense strand
aaucaagcauugcccaaga

SEQ ID NO: 1152912 - RNA, 19 nt, Homo sapiens
  misc_RNA (1)...(19): siRNA sense strand
ccucggagcugaagaaagc

SEQ ID NO: 1152913 - RNA, 19 nt, Homo sapiens
  misc_RNA (1)...(19): siRNA sense strand
augagaagaucaccaaguu

SEQ ID NO: 1152914 - RNA, 19 nt, Homo sapiens
  misc_RNA (1)...(19): siRNA sense strand
ccaaugagaagaucaccaa

SEQ ID NO: 1152915 - RNA, 19 nt, Homo sapiens
  misc_RNA (1)...(19): siRNA sense strand
gaggacggagccuggaaua

SEQ ID NO: 1152916 - RNA, 19 nt, Homo sapiens
  misc_RNA (1)...(19): siRNA sense strand
ggcgggaacuugcaaccaa

SEQ ID NO: 1152917 - RNA, 19 nt, Homo sapiens
  misc_RNA (1)...(19): siRNA sense strand
augaauaccucugacauga

SEQ ID NO: 1152918 - RNA, 19 nt, Homo sapiens
  misc_RNA (1)...(19): siRNA sense strand
ccuaugagccaaauaagga

SEQ ID NO: 1152919 - RNA, 19 nt, Homo sapiens
  misc_RNA (1)...(19): siRNA sense strand
uaguauggcuggcaugauc

SEQ ID NO: 1152920 - RNA, 19 nt, Homo sapiens
  misc_RNA (1)...(19): siRNA sense strand
ggacggagccuggaauagg

SEQ ID NO: 1152921 - RNA, 19 nt, Homo sapiens
  misc_RNA (1)...(19): siRNA sense strand
gaagcggaauuccaugacu

SEQ ID NO: 1152922 - RNA, 19 nt, Homo sapiens
  misc_RNA (1)...(19): siRNA sense strand
aaauccaguucuucuacua

SEQ ID NO: 1152923 - RNA, 19 nt, Homo sapiens
  misc_RNA (1)...(19): siRNA sense strand
gugagcacaucagggauuu

SEQ ID NO: 1152924 - RNA, 19 nt, Homo sapiens
  misc_RNA (1)...(19): siRNA sense strand
cagcagcaacgacaugauu

SEQ ID NO: 1152925 - RNA, 19 nt, Homo sapiens
  misc_RNA (1)...(19): siRNA sense strand
caacagggccagacuccau

SEQ ID NO: 1152926 - RNA, 19 nt, Homo sapiens
  misc_RNA (1)...(19): siRNA sense strand
gguaucagcccaguaugaa

SEQ ID NO: 1152927 - RNA, 19 nt, Homo sapiens
  misc_RNA (1)...(19): siRNA sense strand
gagcaggagcaauucaguu

SEQ ID NO: 1152928 - RNA, 19 nt, Homo sapiens
  misc_RNA (1)...(19): siRNA sense strand
guggugagccugagaggaa

SEQ ID NO: 1152929 - RNA, 19 nt, Homo sapiens
  misc_RNA (1)...(19): siRNA sense strand
ggaaccauggccaacaauu

SEQ ID NO: 1152930 - RNA, 19 nt, Homo sapiens
  misc_RNA (1)...(19): siRNA sense strand
ucuccuuucucuccucaua

SEQ ID NO: 1152931 - RNA, 19 nt, Homo sapiens
  misc_RNA (1)...(19): siRNA sense strand
gggccagacuccauauuac

SEQ ID NO: 1152932 - RNA, 19 nt, Homo sapiens
  misc_RNA (1)...(19): siRNA sense strand
caagaucgagguuauaugc

SEQ ID NO: 1152933 - RNA, 19 nt, Homo sapiens
  misc_RNA (1)...(19): siRNA sense strand
gcagccagcccagagauga

SEQ ID NO: 1152934 - RNA, 19 nt, Homo sapiens
  misc_RNA (1)...(19): siRNA sense strand
guggaaccauggccaacaa

SEQ ID NO: 1152935 - RNA, 19 nt, Homo sapiens
  misc_RNA (1)...(19): siRNA sense strand
ccucaaugaccuccaguaa

SEQ ID NO: 1152936 - RNA, 19 nt, Homo sapiens
  misc_RNA (1)...(19): siRNA sense strand
ucucagcagucccagcaaa

SEQ ID NO: 1152937 - RNA, 19 nt, Homo sapiens
  misc_RNA (1)...(19): siRNA sense strand
uaagggagggcaagaagau

SEQ ID NO: 1152938 - RNA, 19 nt, Homo sapiens
  misc_RNA (1)...(19): siRNA sense strand
uauggacaagggauuaaua

SEQ ID NO: 1152939 - RNA, 19 nt, Homo sapiens
  misc_RNA (1)...(19): siRNA sense strand
cagcagauuccuccuuaug

SEQ ID NO: 1152940 - RNA, 19 nt, Homo sapiens
  misc_RNA (1)...(19): siRNA sense strand
ggguaucagcccaguauga

SEQ ID NO: 1152941 - RNA, 19 nt, Homo sapiens
  misc_RNA (1)...(19): siRNA sense strand
gcaauucaguugggaucca

SEQ ID NO: 1152942 - RNA, 19 nt, Homo sapiens
  misc_RNA (1)...(19): siRNA sense strand
gccuuugaaugcaagauug

SEQ ID NO: 1152943 - RNA, 19 nt, Homo sapiens
  misc_RNA (1)...(19): siRNA sense strand
acacaggcaugggcuccua

SEQ ID NO: 1152944 - RNA, 19 nt, Homo sapiens
  misc_RNA (1)...(19): siRNA sense strand
cacaggcucagucuccuua

SEQ ID NO: 1152945 - RNA, 19 nt, Homo sapiens
  misc_RNA (1)...(19): siRNA sense strand
ccucagccauccaguccaa

SEQ ID NO: 1152946 - RNA, 19 nt, Homo sapiens
  misc_RNA (1)...(19): siRNA sense strand
gccaaggagagcagaguaa

SEQ ID NO: 1152947 - RNA, 19 nt, Homo sapiens
  misc_RNA (1)...(19): siRNA sense strand
aaacugcugucgccaugca

SEQ ID NO: 1152948 - RNA, 19 nt, Homo sapiens
  misc_RNA (1)...(19): siRNA sense strand
cagaagcggaauuccauga

SEQ ID NO: 1152949 - RNA, 19 nt, Homo sapiens
  misc_RNA (1)...(19): siRNA sense strand
agaaggaggagacuuaaag

SEQ ID NO: 1152950 - RNA, 19 nt, Homo sapiens
  misc_RNA (1)...(19): siRNA sense strand
cuacuacaaccaaugagaa

SEQ ID NO: 1152951 - RNA, 19 nt, Homo sapiens
  misc_RNA (1)...(19): siRNA sense strand
agacagaauccaaauccaa

SEQ ID NO: 1152952 - RNA, 19 nt, Homo sapiens
  misc_RNA (1)...(19): siRNA sense strand
gcucugaguccuggaguga

SEQ ID NO: 1152953 - RNA, 19 nt, Homo sapiens
  misc_RNA (1)...(19): siRNA sense strand
guauauccagugucucuau

SEQ ID NO: 1152954 - RNA, 19 nt, Homo sapiens
  misc_RNA (1)...(19): siRNA sense strand
ccaccaaaaugaacaacaa

SEQ ID NO: 1152955 - RNA, 19 nt, Homo sapiens
  misc_RNA (1)...(19): siRNA sense strand
guaagggagggcaagaaga

SEQ ID NO: 1152956 - RNA, 19 nt, Homo sapiens
  misc_RNA (1)...(19): siRNA sense strand
uggagguccuuaugacaga

SEQ ID NO: 1152957 - RNA, 19 nt, Homo sapiens
  misc_RNA (1)...(19): siRNA sense strand
gaagugacuccacauucca

SEQ ID NO: 1152958 - RNA, 19 nt, Homo sapiens
  misc_RNA (1)...(19): siRNA sense strand
ggacacccaagacagaauc

SEQ ID NO: 1152959 - RNA, 19 nt, Homo sapiens
  misc_RNA (1)...(19): siRNA sense strand
caucccagccuccacauca

SEQ ID NO: 1152960 - RNA, 19 nt, Homo sapiens
  misc_RNA (1)...(19): siRNA sense strand
ccagcaaacugccuauucc

SEQ ID NO: 1152961 - RNA, 19 nt, Homo sapiens
  misc_RNA (1)...(19): siRNA sense strand
caagacagaauccaaaucc

SEQ ID NO: 1152962 - RNA, 19 nt, Homo sapiens
  misc_RNA (1)...(19): siRNA sense strand
uguccuaugagccaaauaa

SEQ ID NO: 1152963 - RNA, 19 nt, Homo sapiens
  misc_RNA (1)...(19): siRNA sense strand
ccaggaugccuuuaaugau

SEQ ID NO: 1152964 - RNA, 19 nt, Homo sapiens
  misc_RNA (1)...(19): siRNA sense strand
uccaggaugccuuuaauga

SEQ ID NO: 1152965 - RNA, 19 nt, Homo sapiens
  misc_RNA (1)...(19): siRNA sense strand
cagaauccaaauccaagaa

SEQ ID NO: 1152966 - RNA, 19 nt, Homo sapiens
  misc_RNA (1)...(19): siRNA sense strand
gccagacuccauauuacaa

SEQ ID NO: 1152967 - RNA, 19 nt, Homo sapiens
  misc_RNA (1)...(19): siRNA sense strand
cgaaucucaugccuuccaa

SEQ ID NO: 1152968 - RNA, 19 nt, Homo sapiens
  misc_RNA (1)...(19): siRNA sense strand
ggacaagggauuaauagua

SEQ ID NO: 1152969 - RNA, 19 nt, Homo sapiens
  misc_RNA (1)...(19): siRNA sense strand
gacaagggauuaauaguau

SEQ ID NO: 1152970 - RNA, 19 nt, Homo sapiens
  misc_RNA (1)...(19): siRNA sense strand
ggaauuccaugacuccaaa

SEQ ID NO: 1152971 - RNA, 19 nt, Homo sapiens
  misc_RNA (1)...(19): siRNA sense strand
ggaaaccucuggaccucua

SEQ ID NO: 1152972 - RNA, 19 nt, Homo sapiens
  misc_RNA (1)...(19): siRNA sense strand
gaauaccucugacaugaug

SEQ ID NO: 1152973 - RNA, 19 nt, Homo sapiens
  misc_RNA (1)...(19): siRNA sense strand
caacauggcggacaacaaa

SEQ ID NO: 1152974 - RNA, 19 nt, Homo sapiens
  misc_RNA (1)...(19): siRNA sense strand
aggagaagcugaucaguaa

SEQ ID NO: 1152975 - RNA, 19 nt, Homo sapiens
  misc_RNA (1)...(19): siRNA sense strand
gcaacgacaugauuccuau

SEQ ID NO: 1152976 - RNA, 19 nt, Homo sapiens
  misc_RNA (1)...(19): siRNA sense strand
gaaggagauugguggauug

SEQ ID NO: 1152977 - RNA, 19 nt, Homo sapiens
  misc_RNA (1)...(19): siRNA sense strand
guaaagaucguacagaaga

SEQ ID NO: 1152978 - RNA, 19 nt, Homo sapiens
  misc_RNA (1)...(19): siRNA sense strand
ugaucuaucugguucaaua

SEQ ID NO: 1152979 - RNA, 19 nt, Homo sapiens
  misc_RNA (1)...(19): siRNA sense strand
ggaagaagaagaggaagua

SEQ ID NO: 1152980 - RNA, 19 nt, Homo sapiens
  misc_RNA (1)...(19): siRNA sense strand
gaauagggccugagggaaa

SEQ ID NO: 1152981 - RNA, 19 nt, Homo sapiens
  misc_RNA (1)...(19): siRNA sense strand
gagguuauaugcagaggaa

SEQ ID NO: 1152982 - RNA, 19 nt, Homo sapiens
  misc_RNA (1)...(19): siRNA sense strand
ggaagaagaagaagaacuu

SEQ ID NO: 1152983 - RNA, 19 nt, Homo sapiens
  misc_RNA (1)...(19): siRNA sense strand
gaacuggaccuccuuaugg

SEQ ID NO: 1152984 - RNA, 19 nt, Homo sapiens
  misc_RNA (1)...(19): siRNA sense strand
gcagauuccuccuuaugga

SEQ ID NO: 1152985 - RNA, 19 nt, Homo sapiens
  misc_RNA (1)...(19): siRNA sense strand
ggagauggcugugguacug

SEQ ID NO: 1152986 - RNA, 19 nt, Homo sapiens
  misc_RNA (1)...(19): siRNA sense strand
cacagcagauuccuccuua

SEQ ID NO: 1152987 - RNA, 19 nt, Homo sapiens
  misc_RNA (1)...(19): siRNA sense strand
gcacagagccaccggaaca

SEQ ID NO: 1152988 - RNA, 19 nt, Homo sapiens
  misc_RNA (1)...(19): siRNA sense strand
gaggagaagcugaucagua

SEQ ID NO: 1152989 - RNA, 19 nt, Homo sapiens
  misc_RNA (1)...(19): siRNA sense strand
guaaugaugucccucaagu

SEQ ID NO: 1152990 - RNA, 19 nt, Homo sapiens
  misc_RNA (1)...(19): siRNA sense strand
gcccuaacauggccaauau

SEQ ID NO: 1152991 - RNA, 19 nt, Homo sapiens
  misc_RNA (1)...(19): siRNA sense strand
caguaaagaucguacagaa

SEQ ID NO: 1152992 - RNA, 19 nt, Homo sapiens
  misc_RNA (1)...(19): siRNA sense strand
uauaaugccuugcccaaug

SEQ ID NO: 1152993 - RNA, 19 nt, Homo sapiens
  misc_RNA (1)...(19): siRNA sense strand
gcaaugacuuugagauguc

SEQ ID NO: 1152994 - RNA, 19 nt, Homo sapiens
  misc_RNA (1)...(19): siRNA sense strand
ggaccucuaucgccucuau

SEQ ID NO: 1152995 - RNA, 19 nt, Homo sapiens
  misc_RNA (1)...(19): siRNA sense strand
gaucagaugggcaagauga

SEQ ID NO: 1152996 - RNA, 19 nt, Homo sapiens
  misc_RNA (1)...(19): siRNA sense strand
caggaugccuuuaaugaug

SEQ ID NO: 1152997 - RNA, 19 nt, Homo sapiens
  misc_RNA (1)...(19): siRNA sense strand
ucaaugaccuccaguaagg

SEQ ID NO: 1152998 - RNA, 19 nt, Homo sapiens
  misc_RNA (1)...(19): siRNA sense strand
ccaggcagccaaacuauaa

SEQ ID NO: 1152999 - RNA, 19 nt, Homo sapiens
  misc_RNA (1)...(19): siRNA sense strand
gugguggacugcucagaua

SEQ ID NO: 1153000 - RNA, 19 nt, Homo sapiens
  misc_RNA (1)...(19): siRNA sense strand
aggcauggcuggaggcaua

SEQ ID NO: 1153001 - RNA, 19 nt, Homo sapiens
  misc_RNA (1)...(19): siRNA sense strand
gagcagcaaguuuccauuu

SEQ ID NO: 1153002 - RNA, 19 nt, Homo sapiens
  misc_RNA (1)...(19): siRNA sense strand
ugaaggagauugguggauu

SEQ ID NO: 1153003 - RNA, 19 nt, Homo sapiens
  misc_RNA (1)...(19): siRNA sense strand
gagaaguuguauagcacua

SEQ ID NO: 1153004 - RNA, 19 nt, Homo sapiens
  misc_RNA (1)...(19): siRNA sense strand
gaauccaaauccaagaaau

SEQ ID NO: 1153005 - RNA, 19 nt, Homo sapiens
  misc_RNA (1)...(19): siRNA sense strand
caacuaguguggacaugau

SEQ ID NO: 1153006 - RNA, 19 nt, Homo sapiens
  misc_RNA (1)...(19): siRNA sense strand
gaagaucaccaaguuguau

SEQ ID NO: 1153007 - RNA, 19 nt, Homo sapiens
  misc_RNA (1)...(19): siRNA sense strand
gagaagaucaccaaguugu

SEQ ID NO: 1153008 - RNA, 19 nt, Homo sapiens
  misc_RNA (1)...(19): siRNA sense strand
ggacaccacugagcauauc

SEQ ID NO: 1153009 - RNA, 19 nt, Homo sapiens
  misc_RNA (1)...(19): siRNA sense strand
ucaacauccugcuguauga

SEQ ID NO: 1153010 - RNA, 19 nt, Homo sapiens
  misc_RNA (1)...(19): siRNA sense strand
cgacagcacuaucccuaug

SEQ ID NO: 1153011 - RNA, 19 nt, Homo sapiens
  misc_RNA (1)...(19): siRNA sense strand
ggcagaaggaggagacuua

SEQ ID NO: 1153012 - RNA, 19 nt, Homo sapiens
  misc_RNA (1)...(19): siRNA sense strand
ggacauggccucgcagugu

SEQ ID NO: 1153013 - RNA, 19 nt, Homo sapiens
  misc_RNA (1)...(19): siRNA sense strand
gaaccauggccaacaauuc

SEQ ID NO: 1153014 - RNA, 19 nt, Homo sapiens
  misc_RNA (1)...(19): siRNA sense strand
gcagcaaguuuccauuugg

SEQ ID NO: 1153015 - RNA, 19 nt, Homo sapiens
  misc_RNA (1)...(19): siRNA sense strand
uaucagcccaguaugaaua

SEQ ID NO: 1153016 - RNA, 19 nt, Homo sapiens
  misc_RNA (1)...(19): siRNA sense strand
gacgaugccugauugagau

SEQ ID NO: 1153017 - RNA, 19 nt, Homo sapiens
  misc_RNA (1)...(19): siRNA sense strand
cagcuugccugaucuaucu

SEQ ID NO: 1153018 - RNA, 19 nt, Homo sapiens
  misc_RNA (1)...(19): siRNA sense strand
ggauggagcuaagaguuca

SEQ ID NO: 1153019 - RNA, 19 nt, Homo sapiens
  misc_RNA (1)...(19): siRNA sense strand
uaaagaucguacagaagaa

SEQ ID NO: 1153020 - RNA, 19 nt, Homo sapiens
  misc_RNA (1)...(19): siRNA sense strand
gaagaggaaguaguugaaa

SEQ ID NO: 1153021 - RNA, 19 nt, Homo sapiens
  misc_RNA (1)...(19): siRNA sense strand
uagagcuccuuguagaaua

SEQ ID NO: 1153022 - RNA, 19 nt, Homo sapiens
  misc_RNA (1)...(19): siRNA sense strand
gaucacagccacuauggau

SEQ ID NO: 1153023 - RNA, 19 nt, Homo sapiens
  misc_RNA (1)...(19): siRNA sense strand
gacauggccucgcaguguu

SEQ ID NO: 1153024 - RNA, 19 nt, Homo sapiens
  misc_RNA (1)...(19): siRNA sense strand
ggaaguaguugaaaaugau

SEQ ID NO: 1153025 - RNA, 19 nt, Homo sapiens
  misc_RNA (1)...(19): siRNA sense strand
gcacaugggcauuagauac

SEQ ID NO: 1153026 - RNA, 19 nt, Homo sapiens
  misc_RNA (1)...(19): siRNA sense strand
ggagauugguggauugacu

SEQ ID NO: 1153027 - RNA, 19 nt, Homo sapiens
  misc_RNA (1)...(19): siRNA sense strand
agauguggguggaccguua

SEQ ID NO: 1153028 - RNA, 19 nt, Homo sapiens
  misc_RNA (1)...(19): siRNA sense strand
gaaauccaguucuucuacu

SEQ ID NO: 1153029 - RNA, 19 nt, Homo sapiens
  misc_RNA (1)...(19): siRNA sense strand
ggcaugagcaggagcaauu

SEQ ID NO: 1153030 - RNA, 19 nt, Homo sapiens
  misc_RNA (1)...(19): siRNA sense strand
ggcaaugacuuugagaugu

SEQ ID NO: 1153031 - RNA, 19 nt, Homo sapiens
  misc_RNA (1)...(19): siRNA sense strand
guucagaggccaucaagga

SEQ ID NO: 1153032 - RNA, 19 nt, Homo sapiens
  misc_RNA (1)...(19): siRNA sense strand
ggagugaucccuucauguc

SEQ ID NO: 1153033 - RNA, 19 nt, Homo sapiens
  misc_RNA (1)...(19): siRNA sense strand
gcugccaacucuauccaaa

SEQ ID NO: 1153034 - RNA, 19 nt, Homo sapiens
  misc_RNA (1)...(19): siRNA sense strand
cauuugugauguacuguuu

SEQ ID NO: 1153035 - RNA, 19 nt, Homo sapiens
  misc_RNA (1)...(19): siRNA sense strand
ccaacaacauggcggacaa

SEQ ID NO: 1153036 - RNA, 19 nt, Homo sapiens
  misc_RNA (1)...(19): siRNA sense strand
ggacugcucagauaagcuu

SEQ ID NO: 1153037 - RNA, 19 nt, Homo sapiens
  misc_RNA (1)...(19): siRNA sense strand
ugacaagcuuccaguaaag

SEQ ID NO: 1153038 - RNA, 19 nt, Homo sapiens
  misc_RNA (1)...(19): siRNA sense strand
agaagaagaggaaguaguu

SEQ ID NO: 1153039 - RNA, 19 nt, Homo sapiens
  misc_RNA (1)...(19): siRNA sense strand
ggaacuggaccuccuuaug

SEQ ID NO: 1153040 - RNA, 19 nt, Homo sapiens
  misc_RNA (1)...(19): siRNA sense strand
cgcaggagcuaucucaaga

SEQ ID NO: 1153041 - RNA, 19 nt, Homo sapiens
  misc_RNA (1)...(19): siRNA sense strand
gcaccacuaacuuaugaaa

SEQ ID NO: 1153042 - RNA, 19 nt, Homo sapiens
  misc_RNA (1)...(19): siRNA sense strand
ucacagccacuauggauga

SEQ ID NO: 1153043 - RNA, 19 nt, Homo sapiens
  misc_RNA (1)...(19): siRNA sense strand
uugacaagcuuccaguaaa

SEQ ID NO: 1153044 - RNA, 19 nt, Homo sapiens
  misc_RNA (1)...(19): siRNA sense strand
gcagaaggaggagacuuaa

SEQ ID NO: 1153045 - RNA, 19 nt, Homo sapiens
  misc_RNA (1)...(19): siRNA sense strand
aaucaagcauugcccaaga

SEQ ID NO: 1153046 - RNA, 19 nt, Homo sapiens
  misc_RNA (1)...(19): siRNA sense strand
cacuauggaugacauguug

SEQ ID NO: 1153047 - RNA, 19 nt, Homo sapiens
  misc_RNA (1)...(19): siRNA sense strand
ccucggagcugaagaaagc

SEQ ID NO: 1153048 - RNA, 19 nt, Homo sapiens
  misc_RNA (1)...(19): siRNA sense strand
augagaagaucaccaaguu

SEQ ID NO: 1153049 - RNA, 19 nt, Homo sapiens
  misc_RNA (1)...(19): siRNA sense strand
ccaaugagaagaucaccaa

SEQ ID NO: 1153050 - RNA, 19 nt, Homo sapiens
  misc_RNA (1)...(19): siRNA sense strand
gaggacggagccuggaaua

SEQ ID NO: 1153051 - RNA, 19 nt, Homo sapiens
  misc_RNA (1)...(19): siRNA sense strand
ggcgggaacuugcaaccaa

SEQ ID NO: 1153052 - RNA, 19 nt, Homo sapiens
  misc_RNA (1)...(19): siRNA sense strand
augaauaccucugacauga

SEQ ID NO: 1153053 - RNA, 19 nt, Homo sapiens
  misc_RNA (1)...(19): siRNA sense strand
gaacucauugguuucacaa

SEQ ID NO: 1153054 - RNA, 19 nt, Homo sapiens
  misc_RNA (1)...(19): siRNA sense strand
guacgaaucacggcuguug

SEQ ID NO: 1153055 - RNA, 19 nt, Homo sapiens
  misc_RNA (1)...(19): siRNA sense strand
gaacaucaagauccuagag

SEQ ID NO: 1153056 - RNA, 19 nt, Homo sapiens
  misc_RNA (1)...(19): siRNA sense strand
gaggauggagcuaagaguu

SEQ ID NO: 1153057 - RNA, 19 nt, Homo sapiens
  misc_RNA (1)...(19): siRNA sense strand
auugagaucuuuggcauuu

SEQ ID NO: 1153058 - RNA, 19 nt, Homo sapiens
  misc_RNA (1)...(19): siRNA sense strand
cgacgaugccugauugaga

SEQ ID NO: 1153059 - RNA, 19 nt, Homo sapiens
  misc_RNA (1)...(19): siRNA sense strand
ccuaugagccaaauaagga

SEQ ID NO: 1153060 - RNA, 19 nt, Homo sapiens
  misc_RNA (1)...(19): siRNA sense strand
aaauccaguucuucuacua

SEQ ID NO: 1153061 - RNA, 19 nt, Homo sapiens
  misc_RNA (1)...(19): siRNA sense strand
caacaauguggaccugauu

SEQ ID NO: 1153062 - RNA, 19 nt, Homo sapiens
  misc_RNA (1)...(19): siRNA sense strand
gcaggcaccacuaacuuau

SEQ ID NO: 1153063 - RNA, 19 nt, Homo sapiens
  misc_RNA (1)...(19): siRNA sense strand
gaagcugaucaguaaguuu

SEQ ID NO: 1153064 - RNA, 19 nt, Homo sapiens
  misc_RNA (1)...(19): siRNA sense strand
ugagaucuuuggcauuuua

SEQ ID NO: 1153065 - RNA, 19 nt, Homo sapiens
  misc_RNA (1)...(19): siRNA sense strand
ccaucaacauccugcugua

SEQ ID NO: 1153066 - RNA, 19 nt, Homo sapiens
  misc_RNA (1)...(19): siRNA sense strand
ggacggagccuggaauagg

SEQ ID NO: 1153067 - RNA, 19 nt, Homo sapiens
  misc_RNA (1)...(19): siRNA sense strand
gaagcggaauuccaugacu

SEQ ID NO: 1153068 - RNA, 19 nt, Homo sapiens
  misc_RNA (1)...(19): siRNA sense strand
gaccagauguggacaauca

SEQ ID NO: 1153069 - RNA, 19 nt, Homo sapiens
  misc_RNA (1)...(19): siRNA sense strand
ugaaagcgcugauggacaa

SEQ ID NO: 1153070 - RNA, 19 nt, Homo sapiens
  misc_RNA (1)...(19): siRNA sense strand
gcccagaucugcaagcauu

SEQ ID NO: 1153071 - RNA, 19 nt, Homo sapiens
  misc_RNA (1)...(19): siRNA sense strand
ccaaccaaguuuauuguaa

SEQ ID NO: 1153072 - RNA, 19 nt, Homo sapiens
  misc_RNA (1)...(19): siRNA sense strand
gccgggagcuuuacuucua

SEQ ID NO: 1153073 - RNA, 19 nt, Homo sapiens
  misc_RNA (1)...(19): siRNA sense strand
gcaaagggaaagagaagaa

SEQ ID NO: 1153074 - RNA, 19 nt, Homo sapiens
  misc_RNA (1)...(19): siRNA sense strand
gagcaacauugaccggauu

SEQ ID NO: 1153075 - RNA, 19 nt, Homo sapiens
  misc_RNA (1)...(19): siRNA sense strand
gaucugagcgacaucauca

SEQ ID NO: 1153076 - RNA, 19 nt, Homo sapiens
  misc_RNA (1)...(19): siRNA sense strand
gcacaaccacuaacaacau

SEQ ID NO: 1153077 - RNA, 19 nt, Homo sapiens
  misc_RNA (1)...(19): siRNA sense strand
gacuacgccuugaagcuaa

SEQ ID NO: 1153078 - RNA, 19 nt, Homo sapiens
  misc_RNA (1)...(19): siRNA sense strand
gauguuaucaagacucuga

SEQ ID NO: 1153079 - RNA, 19 nt, Homo sapiens
  misc_RNA (1)...(19): siRNA sense strand
ccuugaagcuaaagaaugu

SEQ ID NO: 1153080 - RNA, 19 nt, Homo sapiens
  misc_RNA (1)...(19): siRNA sense strand
gagcugggacacgauguua

SEQ ID NO: 1153081 - RNA, 19 nt, Homo sapiens
  misc_RNA (1)...(19): siRNA sense strand
gaaugucgagccacucuau

SEQ ID NO: 1153082 - RNA, 19 nt, Homo sapiens
  misc_RNA (1)...(19): siRNA sense strand
accaagaccuucaccaaga

SEQ ID NO: 1153083 - RNA, 19 nt, Homo sapiens
  misc_RNA (1)...(19): siRNA sense strand
ccacgguucaguaccuuua

SEQ ID NO: 1153084 - RNA, 19 nt, Homo sapiens
  misc_RNA (1)...(19): siRNA sense strand
caaccuggcccuacucauc

SEQ ID NO: 1153085 - RNA, 19 nt, Homo sapiens
  misc_RNA (1)...(19): siRNA sense strand
gggacacgauguuaucaag

SEQ ID NO: 1153086 - RNA, 19 nt, Homo sapiens
  misc_RNA (1)...(19): siRNA sense strand
ugacuacgccuugaagcua

SEQ ID NO: 1153087 - RNA, 19 nt, Homo sapiens
  misc_RNA (1)...(19): siRNA sense strand
ugagcgacaucaucaauac

SEQ ID NO: 1153088 - RNA, 19 nt, Homo sapiens
  misc_RNA (1)...(19): siRNA sense strand
gacauugacuacgccuuga

SEQ ID NO: 1153089 - RNA, 19 nt, Homo sapiens
  misc_RNA (1)...(19): siRNA sense strand
ccaaguuuauuguaauguc

SEQ ID NO: 1153090 - RNA, 19 nt, Homo sapiens
  misc_RNA (1)...(19): siRNA sense strand
ggacgccuaucgggcagaa

SEQ ID NO: 1153091 - RNA, 19 nt, Homo sapiens
  misc_RNA (1)...(19): siRNA sense strand
ccacggacccuggacugua

SEQ ID NO: 1153092 - RNA, 19 nt, Homo sapiens
  misc_RNA (1)...(19): siRNA sense strand
gcccaccgccugacaauca

SEQ ID NO: 1153093 - RNA, 19 nt, Homo sapiens
  misc_RNA (1)...(19): siRNA sense strand
ggacacgauguuaucaaga

SEQ ID NO: 1153094 - RNA, 19 nt, Homo sapiens
  misc_RNA (1)...(19): siRNA sense strand
gacacgauguuaucaagac

SEQ ID NO: 1153095 - RNA, 19 nt, Homo sapiens
  misc_RNA (1)...(19): siRNA sense strand
ugaaggugguggcugaauc

SEQ ID NO: 1153096 - RNA, 19 nt, Homo sapiens
  misc_RNA (1)...(19): siRNA sense strand
cacggacccuggacuguau

SEQ ID NO: 1153097 - RNA, 19 nt, Homo sapiens
  misc_RNA (1)...(19): siRNA sense strand
gagaaggagguugaucuga

SEQ ID NO: 1153098 - RNA, 19 nt, Homo sapiens
  misc_RNA (1)...(19): siRNA sense strand
ggagaaggagguugaucug

SEQ ID NO: 1153099 - RNA, 19 nt, Homo sapiens
  misc_RNA (1)...(19): siRNA sense strand
agcagcagcucuacuacaa

SEQ ID NO: 1153100 - RNA, 19 nt, Homo sapiens
  misc_RNA (1)...(19): siRNA sense strand
gauuggagcagaccaugug

SEQ ID NO: 1153101 - RNA, 19 nt, Homo sapiens
  misc_RNA (1)...(19): siRNA sense strand
cggaagcccugcaaagcau

SEQ ID NO: 1153102 - RNA, 19 nt, Homo sapiens
  misc_RNA (1)...(19): siRNA sense strand
guacaucguggucucacuu

SEQ ID NO: 1153103 - RNA, 19 nt, Homo sapiens
  misc_RNA (1)...(19): siRNA sense strand
acacugugcuccuguucug

SEQ ID NO: 1153104 - RNA, 19 nt, Homo sapiens
  misc_RNA (1)...(19): siRNA sense strand
ccaagaccuucaccaagag

SEQ ID NO: 1153105 - RNA, 19 nt, Homo sapiens
  misc_RNA (1)...(19): siRNA sense strand
gccagcugcuaacggauga

SEQ ID NO: 1153106 - RNA, 19 nt, Homo sapiens
  misc_RNA (1)...(19): siRNA sense strand
ucaccaagaccuucaccaa

SEQ ID NO: 1153107 - RNA, 19 nt, Homo sapiens
  misc_RNA (1)...(19): siRNA sense strand
gaacaaccuggcccuacuc

SEQ ID NO: 1153108 - RNA, 19 nt, Homo sapiens
  misc_RNA (1)...(19): siRNA sense strand
cacaaccacuaacaacauc

SEQ ID NO: 1153109 - RNA, 19 nt, Homo sapiens
  misc_RNA (1)...(19): siRNA sense strand
gcgaccagauguggacaau

SEQ ID NO: 1153110 - RNA, 19 nt, Homo sapiens
  misc_RNA (1)...(19): siRNA sense strand
caacauugaccggauugga

SEQ ID NO: 1153111 - RNA, 19 nt, Homo sapiens
  misc_RNA (1)...(19): siRNA sense strand
gugcuccuguucuggcaaa

SEQ ID NO: 1153112 - RNA, 19 nt, Homo sapiens
  misc_RNA (1)...(19): siRNA sense strand
gacccuggacuguaucaga

SEQ ID NO: 1153113 - RNA, 19 nt, Homo sapiens
  misc_RNA (1)...(19): siRNA sense strand
agagcuggguggacgagaa

SEQ ID NO: 1153114 - RNA, 19 nt, Homo sapiens
  misc_RNA (1)...(19): siRNA sense strand
gcggaagcccugcaaagca

SEQ ID NO: 1153115 - RNA, 19 nt, Homo sapiens
  misc_RNA (1)...(19): siRNA sense strand
gaaguacaucguggucuca

SEQ ID NO: 1153116 - RNA, 19 nt, Homo sapiens
  misc_RNA (1)...(19): siRNA sense strand
ggacgucugccucaaagcu

SEQ ID NO: 1153117 - RNA, 19 nt, Homo sapiens
  misc_RNA (1)...(19): siRNA sense strand
ccuccaaccaaguuuauug

SEQ ID NO: 1153118 - RNA, 19 nt, Homo sapiens
  misc_RNA (1)...(19): siRNA sense strand
auacguccaugagcugauu

SEQ ID NO: 1153119 - RNA, 19 nt, Homo sapiens
  misc_RNA (1)...(19): siRNA sense strand
gaagcccugcaaagcauug

SEQ ID NO: 1153120 - RNA, 19 nt, Homo sapiens
  misc_RNA (1)...(19): siRNA sense strand
agaacaaccuggcccuacu

SEQ ID NO: 1153121 - RNA, 19 nt, Homo sapiens
  misc_RNA (1)...(19): siRNA sense strand
gcugggacacgauguuauc

SEQ ID NO: 1153122 - RNA, 19 nt, Homo sapiens
  misc_RNA (1)...(19): siRNA sense strand
ccgggagcuuuacuucuau

SEQ ID NO: 1153123 - RNA, 19 nt, Homo sapiens
  misc_RNA (1)...(19): siRNA sense strand
ccacagaaccccugaaguc

SEQ ID NO: 1153124 - RNA, 19 nt, Homo sapiens
  misc_RNA (1)...(19): siRNA sense strand
ggaguguccagaaguacau

SEQ ID NO: 1153125 - RNA, 19 nt, Homo sapiens
  misc_RNA (1)...(19): siRNA sense strand
cagcugugaugaccugcau

SEQ ID NO: 1153126 - RNA, 19 nt, Homo sapiens
  misc_RNA (1)...(19): siRNA sense strand
ggagaccugccagcugcua

SEQ ID NO: 1153127 - RNA, 19 nt, Homo sapiens
  misc_RNA (1)...(19): siRNA sense strand
ggaagcccugcaaagcauu

SEQ ID NO: 1153128 - RNA, 19 nt, Homo sapiens
  misc_RNA (1)...(19): siRNA sense strand
ccaccagugacauugacua

SEQ ID NO: 1153129 - RNA, 19 nt, Homo sapiens
  misc_RNA (1)...(19): siRNA sense strand
gagaccugccagcugcuaa

SEQ ID NO: 1153130 - RNA, 19 nt, Homo sapiens
  misc_RNA (1)...(19): siRNA sense strand
gagcauccacgaguugucu

SEQ ID NO: 1153131 - RNA, 19 nt, Homo sapiens
  misc_RNA (1)...(19): siRNA sense strand
caucgugagcagacaguug

SEQ ID NO: 1153132 - RNA, 19 nt, Homo sapiens
  misc_RNA (1)...(19): siRNA sense strand
ccugaugcguauggugaaa

SEQ ID NO: 1153133 - RNA, 19 nt, Homo sapiens
  misc_RNA (1)...(19): siRNA sense strand
cugagcgacaucaucaaua

SEQ ID NO: 1153134 - RNA, 19 nt, Homo sapiens
  misc_RNA (1)...(19): siRNA sense strand
gaccagauguggacaauca

SEQ ID NO: 1153135 - RNA, 19 nt, Homo sapiens
  misc_RNA (1)...(19): siRNA sense strand
ugaaagcgcugauggacaa

SEQ ID NO: 1153136 - RNA, 19 nt, Homo sapiens
  misc_RNA (1)...(19): siRNA sense strand
gcccagaucugcaagcauu

SEQ ID NO: 1153137 - RNA, 19 nt, Homo sapiens
  misc_RNA (1)...(19): siRNA sense strand
ccaaccaaguuuauuguaa

SEQ ID NO: 1153138 - RNA, 19 nt, Homo sapiens
  misc_RNA (1)...(19): siRNA sense strand
gccgggagcuuuacuucua

SEQ ID NO: 1153139 - RNA, 19 nt, Homo sapiens
  misc_RNA (1)...(19): siRNA sense strand
gcaaagggaaagagaagaa

SEQ ID NO: 1153140 - RNA, 19 nt, Homo sapiens
  misc_RNA (1)...(19): siRNA sense strand
gagcaacauugaccggauu

SEQ ID NO: 1153141 - RNA, 19 nt, Homo sapiens
  misc_RNA (1)...(19): siRNA sense strand
gaucugagcgacaucauca

SEQ ID NO: 1153142 - RNA, 19 nt, Homo sapiens
  misc_RNA (1)...(19): siRNA sense strand
gcacaaccacuaacaacau

SEQ ID NO: 1153143 - RNA, 19 nt, Homo sapiens
  misc_RNA (1)...(19): siRNA sense strand
gacuacgccuugaagcuaa

SEQ ID NO: 1153144 - RNA, 19 nt, Homo sapiens
  misc_RNA (1)...(19): siRNA sense strand
gauguuaucaagacucuga

SEQ ID NO: 1153145 - RNA, 19 nt, Homo sapiens
  misc_RNA (1)...(19): siRNA sense strand
ccuugaagcuaaagaaugu

SEQ ID NO: 1153146 - RNA, 19 nt, Homo sapiens
  misc_RNA (1)...(19): siRNA sense strand
gagcugggacacgauguua

SEQ ID NO: 1153147 - RNA, 19 nt, Homo sapiens
  misc_RNA (1)...(19): siRNA sense strand
gaaugucgagccacucuau

SEQ ID NO: 1153148 - RNA, 19 nt, Homo sapiens
  misc_RNA (1)...(19): siRNA sense strand
accaagaccuucaccaaga

SEQ ID NO: 1153149 - RNA, 19 nt, Homo sapiens
  misc_RNA (1)...(19): siRNA sense strand
ccacgguucaguaccuuua

SEQ ID NO: 1153150 - RNA, 19 nt, Homo sapiens
  misc_RNA (1)...(19): siRNA sense strand
caaccuggcccuacucauc

SEQ ID NO: 1153151 - RNA, 19 nt, Homo sapiens
  misc_RNA (1)...(19): siRNA sense strand
gggacacgauguuaucaag

SEQ ID NO: 1153152 - RNA, 19 nt, Homo sapiens
  misc_RNA (1)...(19): siRNA sense strand
ugacuacgccuugaagcua

SEQ ID NO: 1153153 - RNA, 19 nt, Homo sapiens
  misc_RNA (1)...(19): siRNA sense strand
ugagcgacaucaucaauac

SEQ ID NO: 1153154 - RNA, 19 nt, Homo sapiens
  misc_RNA (1)...(19): siRNA sense strand
gacauugacuacgccuuga

SEQ ID NO: 1153155 - RNA, 19 nt, Homo sapiens
  misc_RNA (1)...(19): siRNA sense strand
ccaaguuuauuguaauguc

SEQ ID NO: 1153156 - RNA, 19 nt, Homo sapiens
  misc_RNA (1)...(19): siRNA sense strand
ggacgccuaucgggcagaa

SEQ ID NO: 1153157 - RNA, 19 nt, Homo sapiens
  misc_RNA (1)...(19): siRNA sense strand
ccacggacccuggacugua

SEQ ID NO: 1153158 - RNA, 19 nt, Homo sapiens
  misc_RNA (1)...(19): siRNA sense strand
gcccaccgccugacaauca

SEQ ID NO: 1153159 - RNA, 19 nt, Homo sapiens
  misc_RNA (1)...(19): siRNA sense strand
ggacacgauguuaucaaga

SEQ ID NO: 1153160 - RNA, 19 nt, Homo sapiens
  misc_RNA (1)...(19): siRNA sense strand
gacacgauguuaucaagac

SEQ ID NO: 1153161 - RNA, 19 nt, Homo sapiens
  misc_RNA (1)...(19): siRNA sense strand
ugaaggugguggcugaauc

SEQ ID NO: 1153162 - RNA, 19 nt, Homo sapiens
  misc_RNA (1)...(19): siRNA sense strand
cacggacccuggacuguau

SEQ ID NO: 1153163 - RNA, 19 nt, Homo sapiens
  misc_RNA (1)...(19): siRNA sense strand
gagaaggagguugaucuga

SEQ ID NO: 1153164 - RNA, 19 nt, Homo sapiens
  misc_RNA (1)...(19): siRNA sense strand
ggagaaggagguugaucug

SEQ ID NO: 1153165 - RNA, 19 nt, Homo sapiens
  misc_RNA (1)...(19): siRNA sense strand
agcagcagcucuacuacaa

SEQ ID NO: 1153166 - RNA, 19 nt, Homo sapiens
  misc_RNA (1)...(19): siRNA sense strand
gauuggagcagaccaugug

SEQ ID NO: 1153167 - RNA, 19 nt, Homo sapiens
  misc_RNA (1)...(19): siRNA sense strand
cggaagcccugcaaagcau

SEQ ID NO: 1153168 - RNA, 19 nt, Homo sapiens
  misc_RNA (1)...(19): siRNA sense strand
guacaucguggucucacuu

SEQ ID NO: 1153169 - RNA, 19 nt, Homo sapiens
  misc_RNA (1)...(19): siRNA sense strand
acacugugcuccuguucug

SEQ ID NO: 1153170 - RNA, 19 nt, Homo sapiens
  misc_RNA (1)...(19): siRNA sense strand
ccaagaccuucaccaagag

SEQ ID NO: 1153171 - RNA, 19 nt, Homo sapiens
  misc_RNA (1)...(19): siRNA sense strand
gccagcugcuaacggauga

SEQ ID NO: 1153172 - RNA, 19 nt, Homo sapiens
  misc_RNA (1)...(19): siRNA sense strand
ucaccaagaccuucaccaa

SEQ ID NO: 1153173 - RNA, 19 nt, Homo sapiens
  misc_RNA (1)...(19): siRNA sense strand
gaacaaccuggcccuacuc

SEQ ID NO: 1153174 - RNA, 19 nt, Homo sapiens
  misc_RNA (1)...(19): siRNA sense strand
cacaaccacuaacaacauc

SEQ ID NO: 1153175 - RNA, 19 nt, Homo sapiens
  misc_RNA (1)...(19): siRNA sense strand
gcgaccagauguggacaau

SEQ ID NO: 1153176 - RNA, 19 nt, Homo sapiens
  misc_RNA (1)...(19): siRNA sense strand
caacauugaccggauugga

SEQ ID NO: 1153177 - RNA, 19 nt, Homo sapiens
  misc_RNA (1)...(19): siRNA sense strand
gugcuccuguucuggcaaa

SEQ ID NO: 1153178 - RNA, 19 nt, Homo sapiens
  misc_RNA (1)...(19): siRNA sense strand
gacccuggacuguaucaga

SEQ ID NO: 1153179 - RNA, 19 nt, Homo sapiens
  misc_RNA (1)...(19): siRNA sense strand
agagcuggguggacgagaa

SEQ ID NO: 1153180 - RNA, 19 nt, Homo sapiens
  misc_RNA (1)...(19): siRNA sense strand
gcggaagcccugcaaagca

SEQ ID NO: 1153181 - RNA, 19 nt, Homo sapiens
  misc_RNA (1)...(19): siRNA sense strand
gaaguacaucguggucuca

SEQ ID NO: 1153182 - RNA, 19 nt, Homo sapiens
  misc_RNA (1)...(19): siRNA sense strand
ggacgucugccucaaagcu

SEQ ID NO: 1153183 - RNA, 19 nt, Homo sapiens
  misc_RNA (1)...(19): siRNA sense strand
ccuccaaccaaguuuauug

SEQ ID NO: 1153184 - RNA, 19 nt, Homo sapiens
  misc_RNA (1)...(19): siRNA sense strand
auacguccaugagcugauu

SEQ ID NO: 1153185 - RNA, 19 nt, Homo sapiens
  misc_RNA (1)...(19): siRNA sense strand
gaagcccugcaaagcauug

SEQ ID NO: 1153186 - RNA, 19 nt, Homo sapiens
  misc_RNA (1)...(19): siRNA sense strand
agaacaaccuggcccuacu

SEQ ID NO: 1153187 - RNA, 19 nt, Homo sapiens
  misc_RNA (1)...(19): siRNA sense strand
gcugggacacgauguuauc

SEQ ID NO: 1153188 - RNA, 19 nt, Homo sapiens
  misc_RNA (1)...(19): siRNA sense strand
ccgggagcuuuacuucuau

SEQ ID NO: 1153189 - RNA, 19 nt, Homo sapiens
  misc_RNA (1)...(19): siRNA sense strand
ccacagaaccccugaaguc

SEQ ID NO: 1153190 - RNA, 19 nt, Homo sapiens
  misc_RNA (1)...(19): siRNA sense strand
ggaguguccagaaguacau

SEQ ID NO: 1153191 - RNA, 19 nt, Homo sapiens
  misc_RNA (1)...(19): siRNA sense strand
cagcugugaugaccugcau

SEQ ID NO: 1153192 - RNA, 19 nt, Homo sapiens
  misc_RNA (1)...(19): siRNA sense strand
ggagaccugccagcugcua

SEQ ID NO: 1153193 - RNA, 19 nt, Homo sapiens
  misc_RNA (1)...(19): siRNA sense strand
ggaagcccugcaaagcauu

SEQ ID NO: 1153194 - RNA, 19 nt, Homo sapiens
  misc_RNA (1)...(19): siRNA sense strand
ccaccagugacauugacua

SEQ ID NO: 1153195 - RNA, 19 nt, Homo sapiens
  misc_RNA (1)...(19): siRNA sense strand
gagaccugccagcugcuaa

SEQ ID NO: 1153196 - RNA, 19 nt, Homo sapiens
  misc_RNA (1)...(19): siRNA sense strand
gagcauccacgaguugucu

SEQ ID NO: 1153197 - RNA, 19 nt, Homo sapiens
  misc_RNA (1)...(19): siRNA sense strand
caucgugagcagacaguug

SEQ ID NO: 1153198 - RNA, 19 nt, Homo sapiens
  misc_RNA (1)...(19): siRNA sense strand
ccugaugcguauggugaaa

SEQ ID NO: 1153199 - RNA, 19 nt, Homo sapiens
  misc_RNA (1)...(19): siRNA sense strand
cugagcgacaucaucaaua

SEQ ID NO: 1153200 - RNA, 19 nt, Homo sapiens
  misc_RNA (1)...(19): siRNA sense strand
gaccagauguggacaauca

SEQ ID NO: 1153201 - RNA, 19 nt, Homo sapiens
  misc_RNA (1)...(19): siRNA sense strand
ugaaagcgcugauggacaa

SEQ ID NO: 1153202 - RNA, 19 nt, Homo sapiens
  misc_RNA (1)...(19): siRNA sense strand
gcccagaucugcaagcauu

SEQ ID NO: 1153203 - RNA, 19 nt, Homo sapiens
  misc_RNA (1)...(19): siRNA sense strand
ccaaccaaguuuauuguaa

SEQ ID NO: 1153204 - RNA, 19 nt, Homo sapiens
  misc_RNA (1)...(19): siRNA sense strand
gccgggagcuuuacuucua

SEQ ID NO: 1153205 - RNA, 19 nt, Homo sapiens
  misc_RNA (1)...(19): siRNA sense strand
gcaaagggaaagagaagaa

SEQ ID NO: 1153206 - RNA, 19 nt, Homo sapiens
  misc_RNA (1)...(19): siRNA sense strand
gagcaacauugaccggauu

SEQ ID NO: 1153207 - RNA, 19 nt, Homo sapiens
  misc_RNA (1)...(19): siRNA sense strand
gaucugagcgacaucauca

SEQ ID NO: 1153208 - RNA, 19 nt, Homo sapiens
  misc_RNA (1)...(19): siRNA sense strand
gcacaaccacuaacaacau

SEQ ID NO: 1153209 - RNA, 19 nt, Homo sapiens
  misc_RNA (1)...(19): siRNA sense strand
gacuacgccuugaagcuaa

SEQ ID NO: 1153210 - RNA, 19 nt, Homo sapiens
  misc_RNA (1)...(19): siRNA sense strand
gauguuaucaagacucuga

SEQ ID NO: 1153211 - RNA, 19 nt, Homo sapiens
  misc_RNA (1)...(19): siRNA sense strand
ccuugaagcuaaagaaugu

SEQ ID NO: 1153212 - RNA, 19 nt, Homo sapiens
  misc_RNA (1)...(19): siRNA sense strand
gagcugggacacgauguua

SEQ ID NO: 1153213 - RNA, 19 nt, Homo sapiens
  misc_RNA (1)...(19): siRNA sense strand
gaaugucgagccacucuau

SEQ ID NO: 1153214 - RNA, 19 nt, Homo sapiens
  misc_RNA (1)...(19): siRNA sense strand
accaagaccuucaccaaga

SEQ ID NO: 1153215 - RNA, 19 nt, Homo sapiens
  misc_RNA (1)...(19): siRNA sense strand
ccacgguucaguaccuuua

SEQ ID NO: 1153216 - RNA, 19 nt, Homo sapiens
  misc_RNA (1)...(19): siRNA sense strand
caaccuggcccuacucauc

SEQ ID NO: 1153217 - RNA, 19 nt, Homo sapiens
  misc_RNA (1)...(19): siRNA sense strand
gggacacgauguuaucaag

SEQ ID NO: 1153218 - RNA, 19 nt, Homo sapiens
  misc_RNA (1)...(19): siRNA sense strand
ugacuacgccuugaagcua

SEQ ID NO: 1153219 - RNA, 19 nt, Homo sapiens
  misc_RNA (1)...(19): siRNA sense strand
ugagcgacaucaucaauac

SEQ ID NO: 1153220 - RNA, 19 nt, Homo sapiens
  misc_RNA (1)...(19): siRNA sense strand
gacauugacuacgccuuga

SEQ ID NO: 1153221 - RNA, 19 nt, Homo sapiens
  misc_RNA (1)...(19): siRNA sense strand
ccaaguuuauuguaauguc

SEQ ID NO: 1153222 - RNA, 19 nt, Homo sapiens
  misc_RNA (1)...(19): siRNA sense strand
ggacgccuaucgggcagaa

SEQ ID NO: 1153223 - RNA, 19 nt, Homo sapiens
  misc_RNA (1)...(19): siRNA sense strand
ccacggacccuggacugua

SEQ ID NO: 1153224 - RNA, 19 nt, Homo sapiens
  misc_RNA (1)...(19): siRNA sense strand
gcccaccgccugacaauca

SEQ ID NO: 1153225 - RNA, 19 nt, Homo sapiens
  misc_RNA (1)...(19): siRNA sense strand
ggacacgauguuaucaaga

SEQ ID NO: 1153226 - RNA, 19 nt, Homo sapiens
  misc_RNA (1)...(19): siRNA sense strand
gacacgauguuaucaagac

SEQ ID NO: 1153227 - RNA, 19 nt, Homo sapiens
  misc_RNA (1)...(19): siRNA sense strand
ugaaggugguggcugaauc

SEQ ID NO: 1153228 - RNA, 19 nt, Homo sapiens
  misc_RNA (1)...(19): siRNA sense strand
cacggacccuggacuguau

SEQ ID NO: 1153229 - RNA, 19 nt, Homo sapiens
  misc_RNA (1)...(19): siRNA sense strand
gagaaggagguugaucuga

SEQ ID NO: 1153230 - RNA, 19 nt, Homo sapiens
  misc_RNA (1)...(19): siRNA sense strand
ggagaaggagguugaucug

SEQ ID NO: 1153231 - RNA, 19 nt, Homo sapiens
  misc_RNA (1)...(19): siRNA sense strand
agcagcagcucuacuacaa

SEQ ID NO: 1153232 - RNA, 19 nt, Homo sapiens
  misc_RNA (1)...(19): siRNA sense strand
gauuggagcagaccaugug

SEQ ID NO: 1153233 - RNA, 19 nt, Homo sapiens
  misc_RNA (1)...(19): siRNA sense strand
cggaagcccugcaaagcau

SEQ ID NO: 1153234 - RNA, 19 nt, Homo sapiens
  misc_RNA (1)...(19): siRNA sense strand
guacaucguggucucacuu

SEQ ID NO: 1153235 - RNA, 19 nt, Homo sapiens
  misc_RNA (1)...(19): siRNA sense strand
acacugugcuccuguucug

SEQ ID NO: 1153236 - RNA, 19 nt, Homo sapiens
  misc_RNA (1)...(19): siRNA sense strand
ccaagaccuucaccaagag

SEQ ID NO: 1153237 - RNA, 19 nt, Homo sapiens
  misc_RNA (1)...(19): siRNA sense strand
gccagcugcuaacggauga

SEQ ID NO: 1153238 - RNA, 19 nt, Homo sapiens
  misc_RNA (1)...(19): siRNA sense strand
ucaccaagaccuucaccaa

SEQ ID NO: 1153239 - RNA, 19 nt, Homo sapiens
  misc_RNA (1)...(19): siRNA sense strand
gaacaaccuggcccuacuc

SEQ ID NO: 1153240 - RNA, 19 nt, Homo sapiens
  misc_RNA (1)...(19): siRNA sense strand
cacaaccacuaacaacauc

SEQ ID NO: 1153241 - RNA, 19 nt, Homo sapiens
  misc_RNA (1)...(19): siRNA sense strand
gcgaccagauguggacaau

SEQ ID NO: 1153242 - RNA, 19 nt, Homo sapiens
  misc_RNA (1)...(19): siRNA sense strand
caacauugaccggauugga

SEQ ID NO: 1153243 - RNA, 19 nt, Homo sapiens
  misc_RNA (1)...(19): siRNA sense strand
gugcuccuguucuggcaaa

SEQ ID NO: 1153244 - RNA, 19 nt, Homo sapiens
  misc_RNA (1)...(19): siRNA sense strand
gacccuggacuguaucaga

SEQ ID NO: 1153245 - RNA, 19 nt, Homo sapiens
  misc_RNA (1)...(19): siRNA sense strand
agagcuggguggacgagaa

SEQ ID NO: 1153246 - RNA, 19 nt, Homo sapiens
  misc_RNA (1)...(19): siRNA sense strand
gcggaagcccugcaaagca

SEQ ID NO: 1153247 - RNA, 19 nt, Homo sapiens
  misc_RNA (1)...(19): siRNA sense strand
gaaguacaucguggucuca

SEQ ID NO: 1153248 - RNA, 19 nt, Homo sapiens
  misc_RNA (1)...(19): siRNA sense strand
ggacgucugccucaaagcu

SEQ ID NO: 1153249 - RNA, 19 nt, Homo sapiens
  misc_RNA (1)...(19): siRNA sense strand
ccuccaaccaaguuuauug

SEQ ID NO: 1153250 - RNA, 19 nt, Homo sapiens
  misc_RNA (1)...(19): siRNA sense strand
auacguccaugagcugauu

SEQ ID NO: 1153251 - RNA, 19 nt, Homo sapiens
  misc_RNA (1)...(19): siRNA sense strand
gaagcccugcaaagcauug

SEQ ID NO: 1153252 - RNA, 19 nt, Homo sapiens
  misc_RNA (1)...(19): siRNA sense strand
agaacaaccuggcccuacu

SEQ ID NO: 1153253 - RNA, 19 nt, Homo sapiens
  misc_RNA (1)...(19): siRNA sense strand
gcugggacacgauguuauc

SEQ ID NO: 1153254 - RNA, 19 nt, Homo sapiens
  misc_RNA (1)...(19): siRNA sense strand
ccgggagcuuuacuucuau

SEQ ID NO: 1153255 - RNA, 19 nt, Homo sapiens
  misc_RNA (1)...(19): siRNA sense strand
ccacagaaccccugaaguc

SEQ ID NO: 1153256 - RNA, 19 nt, Homo sapiens
  misc_RNA (1)...(19): siRNA sense strand
ggaguguccagaaguacau

SEQ ID NO: 1153257 - RNA, 19 nt, Homo sapiens
  misc_RNA (1)...(19): siRNA sense strand
cagcugugaugaccugcau

SEQ ID NO: 1153258 - RNA, 19 nt, Homo sapiens
  misc_RNA (1)...(19): siRNA sense strand
ggagaccugccagcugcua

SEQ ID NO: 1153259 - RNA, 19 nt, Homo sapiens
  misc_RNA (1)...(19): siRNA sense strand
ggaagcccugcaaagcauu

SEQ ID NO: 1153260 - RNA, 19 nt, Homo sapiens
  misc_RNA (1)...(19): siRNA sense strand
ccaccagugacauugacua

SEQ ID NO: 1153261 - RNA, 19 nt, Homo sapiens
  misc_RNA (1)...(19): siRNA sense strand
gagaccugccagcugcuaa

SEQ ID NO: 1153262 - RNA, 19 nt, Homo sapiens
  misc_RNA (1)...(19): siRNA sense strand
gagcauccacgaguugucu

SEQ ID NO: 1153263 - RNA, 19 nt, Homo sapiens
  misc_RNA (1)...(19): siRNA sense strand
caucgugagcagacaguug

SEQ ID NO: 1153264 - RNA, 19 nt, Homo sapiens
  misc_RNA (1)...(19): siRNA sense strand
ccugaugcguauggugaaa

SEQ ID NO: 1153265 - RNA, 19 nt, Homo sapiens
  misc_RNA (1)...(19): siRNA sense strand
cugagcgacaucaucaaua

SEQ ID NO: 1153266 - RNA, 19 nt, Homo sapiens
  misc_RNA (1)...(19): siRNA sense strand
gaccagauguggacaauca

SEQ ID NO: 1153267 - RNA, 19 nt, Homo sapiens
  misc_RNA (1)...(19): siRNA sense strand
ugaaagcgcugauggacaa

SEQ ID NO: 1153268 - RNA, 19 nt, Homo sapiens
  misc_RNA (1)...(19): siRNA sense strand
gcccagaucugcaagcauu

SEQ ID NO: 1153269 - RNA, 19 nt, Homo sapiens
  misc_RNA (1)...(19): siRNA sense strand
ccaaccaaguuuauuguaa

SEQ ID NO: 1153270 - RNA, 19 nt, Homo sapiens
  misc_RNA (1)...(19): siRNA sense strand
gccgggagcuuuacuucua

SEQ ID NO: 1153271 - RNA, 19 nt, Homo sapiens
  misc_RNA (1)...(19): siRNA sense strand
gcaaagggaaagagaagaa

SEQ ID NO: 1153272 - RNA, 19 nt, Homo sapiens
  misc_RNA (1)...(19): siRNA sense strand
gagcaacauugaccggauu

SEQ ID NO: 1153273 - RNA, 19 nt, Homo sapiens
  misc_RNA (1)...(19): siRNA sense strand
gaucugagcgacaucauca

SEQ ID NO: 1153274 - RNA, 19 nt, Homo sapiens
  misc_RNA (1)...(19): siRNA sense strand
gcacaaccacuaacaacau

SEQ ID NO: 1153275 - RNA, 19 nt, Homo sapiens
  misc_RNA (1)...(19): siRNA sense strand
gacuacgccuugaagcuaa

SEQ ID NO: 1153276 - RNA, 19 nt, Homo sapiens
  misc_RNA (1)...(19): siRNA sense strand
gauguuaucaagacucuga

SEQ ID NO: 1153277 - RNA, 19 nt, Homo sapiens
  misc_RNA (1)...(19): siRNA sense strand
ccuugaagcuaaagaaugu

SEQ ID NO: 1153278 - RNA, 19 nt, Homo sapiens
  misc_RNA (1)...(19): siRNA sense strand
gagcugggacacgauguua

SEQ ID NO: 1153279 - RNA, 19 nt, Homo sapiens
  misc_RNA (1)...(19): siRNA sense strand
gaaugucgagccacucuau

SEQ ID NO: 1153280 - RNA, 19 nt, Homo sapiens
  misc_RNA (1)...(19): siRNA sense strand
accaagaccuucaccaaga

SEQ ID NO: 1153281 - RNA, 19 nt, Homo sapiens
  misc_RNA (1)...(19): siRNA sense strand
ccacgguucaguaccuuua

SEQ ID NO: 1153282 - RNA, 19 nt, Homo sapiens
  misc_RNA (1)...(19): siRNA sense strand
caaccuggcccuacucauc

SEQ ID NO: 1153283 - RNA, 19 nt, Homo sapiens
  misc_RNA (1)...(19): siRNA sense strand
gggacacgauguuaucaag

SEQ ID NO: 1153284 - RNA, 19 nt, Homo sapiens
  misc_RNA (1)...(19): siRNA sense strand
ugacuacgccuugaagcua

SEQ ID NO: 1153285 - RNA, 19 nt, Homo sapiens
  misc_RNA (1)...(19): siRNA sense strand
ugagcgacaucaucaauac

SEQ ID NO: 1153286 - RNA, 19 nt, Homo sapiens
  misc_RNA (1)...(19): siRNA sense strand
gacauugacuacgccuuga

SEQ ID NO: 1153287 - RNA, 19 nt, Homo sapiens
  misc_RNA (1)...(19): siRNA sense strand
ccaaguuuauuguaauguc

SEQ ID NO: 1153288 - RNA, 19 nt, Homo sapiens
  misc_RNA (1)...(19): siRNA sense strand
ggacgccuaucgggcagaa

SEQ ID NO: 1153289 - RNA, 19 nt, Homo sapiens
  misc_RNA (1)...(19): siRNA sense strand
ccacggacccuggacugua

SEQ ID NO: 1153290 - RNA, 19 nt, Homo sapiens
  misc_RNA (1)...(19): siRNA sense strand
gcccaccgccugacaauca

SEQ ID NO: 1153291 - RNA, 19 nt, Homo sapiens
  misc_RNA (1)...(19): siRNA sense strand
ggacacgauguuaucaaga

SEQ ID NO: 1153292 - RNA, 19 nt, Homo sapiens
  misc_RNA (1)...(19): siRNA sense strand
gacacgauguuaucaagac

SEQ ID NO: 1153293 - RNA, 19 nt, Homo sapiens
  misc_RNA (1)...(19): siRNA sense strand
ugaaggugguggcugaauc

SEQ ID NO: 1153294 - RNA, 19 nt, Homo sapiens
  misc_RNA (1)...(19): siRNA sense strand
cacggacccuggacuguau

SEQ ID NO: 1153295 - RNA, 19 nt, Homo sapiens
  misc_RNA (1)...(19): siRNA sense strand
gagaaggagguugaucuga

SEQ ID NO: 1153296 - RNA, 19 nt, Homo sapiens
  misc_RNA (1)...(19): siRNA sense strand
ggagaaggagguugaucug

SEQ ID NO: 1153297 - RNA, 19 nt, Homo sapiens
  misc_RNA (1)...(19): siRNA sense strand
agcagcagcucuacuacaa

SEQ ID NO: 1153298 - RNA, 19 nt, Homo sapiens
  misc_RNA (1)...(19): siRNA sense strand
gauuggagcagaccaugug

SEQ ID NO: 1153299 - RNA, 19 nt, Homo sapiens
  misc_RNA (1)...(19): siRNA sense strand
cggaagcccugcaaagcau

SEQ ID NO: 1153300 - RNA, 19 nt, Homo sapiens
  misc_RNA (1)...(19): siRNA sense strand
guacaucguggucucacuu

SEQ ID NO: 1153301 - RNA, 19 nt, Homo sapiens
  misc_RNA (1)...(19): siRNA sense strand
acacugugcuccuguucug

SEQ ID NO: 1153302 - RNA, 19 nt, Homo sapiens
  misc_RNA (1)...(19): siRNA sense strand
ccaagaccuucaccaagag

SEQ ID NO: 1153303 - RNA, 19 nt, Homo sapiens
  misc_RNA (1)...(19): siRNA sense strand
gccagcugcuaacggauga

SEQ ID NO: 1153304 - RNA, 19 nt, Homo sapiens
  misc_RNA (1)...(19): siRNA sense strand
ucaccaagaccuucaccaa

SEQ ID NO: 1153305 - RNA, 19 nt, Homo sapiens
  misc_RNA (1)...(19): siRNA sense strand
gaacaaccuggcccuacuc

SEQ ID NO: 1153306 - RNA, 19 nt, Homo sapiens
  misc_RNA (1)...(19): siRNA sense strand
cacaaccacuaacaacauc

SEQ ID NO: 1153307 - RNA, 19 nt, Homo sapiens
  misc_RNA (1)...(19): siRNA sense strand
gcgaccagauguggacaau

SEQ ID NO: 1153308 - RNA, 19 nt, Homo sapiens
  misc_RNA (1)...(19): siRNA sense strand
caacauugaccggauugga

SEQ ID NO: 1153309 - RNA, 19 nt, Homo sapiens
  misc_RNA (1)...(19): siRNA sense strand
gugcuccuguucuggcaaa

SEQ ID NO: 1153310 - RNA, 19 nt, Homo sapiens
  misc_RNA (1)...(19): siRNA sense strand
gacccuggacuguaucaga

SEQ ID NO: 1153311 - RNA, 19 nt, Homo sapiens
  misc_RNA (1)...(19): siRNA sense strand
agagcuggguggacgagaa

SEQ ID NO: 1153312 - RNA, 19 nt, Homo sapiens
  misc_RNA (1)...(19): siRNA sense strand
gcggaagcccugcaaagca

SEQ ID NO: 1153313 - RNA, 19 nt, Homo sapiens
  misc_RNA (1)...(19): siRNA sense strand
gaaguacaucguggucuca

SEQ ID NO: 1153314 - RNA, 19 nt, Homo sapiens
  misc_RNA (1)...(19): siRNA sense strand
ggacgucugccucaaagcu

SEQ ID NO: 1153315 - RNA, 19 nt, Homo sapiens
  misc_RNA (1)...(19): siRNA sense strand
ccuccaaccaaguuuauug

SEQ ID NO: 1153316 - RNA, 19 nt, Homo sapiens
  misc_RNA (1)...(19): siRNA sense strand
auacguccaugagcugauu

SEQ ID NO: 1153317 - RNA, 19 nt, Homo sapiens
  misc_RNA (1)...(19): siRNA sense strand
gaagcccugcaaagcauug

SEQ ID NO: 1153318 - RNA, 19 nt, Homo sapiens
  misc_RNA (1)...(19): siRNA sense strand
agaacaaccuggcccuacu

SEQ ID NO: 1153319 - RNA, 19 nt, Homo sapiens
  misc_RNA (1)...(19): siRNA sense strand
gcugggacacgauguuauc

SEQ ID NO: 1153320 - RNA, 19 nt, Homo sapiens
  misc_RNA (1)...(19): siRNA sense strand
ccgggagcuuuacuucuau

SEQ ID NO: 1153321 - RNA, 19 nt, Homo sapiens
  misc_RNA (1)...(19): siRNA sense strand
ccacagaaccccugaaguc

SEQ ID NO: 1153322 - RNA, 19 nt, Homo sapiens
  misc_RNA (1)...(19): siRNA sense strand
ggaguguccagaaguacau

SEQ ID NO: 1153323 - RNA, 19 nt, Homo sapiens
  misc_RNA (1)...(19): siRNA sense strand
cagcugugaugaccugcau

SEQ ID NO: 1153324 - RNA, 19 nt, Homo sapiens
  misc_RNA (1)...(19): siRNA sense strand
ggagaccugccagcugcua

SEQ ID NO: 1153325 - RNA, 19 nt, Homo sapiens
  misc_RNA (1)...(19): siRNA sense strand
ggaagcccugcaaagcauu

SEQ ID NO: 1153326 - RNA, 19 nt, Homo sapiens
  misc_RNA (1)...(19): siRNA sense strand
ccaccagugacauugacua

SEQ ID NO: 1153327 - RNA, 19 nt, Homo sapiens
  misc_RNA (1)...(19): siRNA sense strand
gagaccugccagcugcuaa

SEQ ID NO: 1153328 - RNA, 19 nt, Homo sapiens
  misc_RNA (1)...(19): siRNA sense strand
gagcauccacgaguugucu

SEQ ID NO: 1153329 - RNA, 19 nt, Homo sapiens
  misc_RNA (1)...(19): siRNA sense strand
caucgugagcagacaguug

SEQ ID NO: 1153330 - RNA, 19 nt, Homo sapiens
  misc_RNA (1)...(19): siRNA sense strand
ccugaugcguauggugaaa

SEQ ID NO: 1153331 - RNA, 19 nt, Homo sapiens
  misc_RNA (1)...(19): siRNA sense strand
cugagcgacaucaucaaua

SEQ ID NO: 1153332 - RNA, 19 nt, Homo sapiens
  misc_RNA (1)...(19): siRNA sense strand
gaccagauguggacaauca

SEQ ID NO: 1153333 - RNA, 19 nt, Homo sapiens
  misc_RNA (1)...(19): siRNA sense strand
ugaaagcgcugauggacaa

SEQ ID NO: 1153334 - RNA, 19 nt, Homo sapiens
  misc_RNA (1)...(19): siRNA sense strand
gcccagaucugcaagcauu

SEQ ID NO: 1153335 - RNA, 19 nt, Homo sapiens
  misc_RNA (1)...(19): siRNA sense strand
ccaaccaaguuuauuguaa

SEQ ID NO: 1153336 - RNA, 19 nt, Homo sapiens
  misc_RNA (1)...(19): siRNA sense strand
gccgggagcuuuacuucua

SEQ ID NO: 1153337 - RNA, 19 nt, Homo sapiens
  misc_RNA (1)...(19): siRNA sense strand
gcaaagggaaagagaagaa

SEQ ID NO: 1153338 - RNA, 19 nt, Homo sapiens
  misc_RNA (1)...(19): siRNA sense strand
gagcaacauugaccggauu

SEQ ID NO: 1153339 - RNA, 19 nt, Homo sapiens
  misc_RNA (1)...(19): siRNA sense strand
gaucugagcgacaucauca

SEQ ID NO: 1153340 - RNA, 19 nt, Homo sapiens
  misc_RNA (1)...(19): siRNA sense strand
gcacaaccacuaacaacau

SEQ ID NO: 1153341 - RNA, 19 nt, Homo sapiens
  misc_RNA (1)...(19): siRNA sense strand
gacuacgccuugaagcuaa

SEQ ID NO: 1153342 - RNA, 19 nt, Homo sapiens
  misc_RNA (1)...(19): siRNA sense strand
gauguuaucaagacucuga

SEQ ID NO: 1153343 - RNA, 19 nt, Homo sapiens
  misc_RNA (1)...(19): siRNA sense strand
ccuugaagcuaaagaaugu

SEQ ID NO: 1153344 - RNA, 19 nt, Homo sapiens
  misc_RNA (1)...(19): siRNA sense strand
gagcugggacacgauguua

SEQ ID NO: 1153345 - RNA, 19 nt, Homo sapiens
  misc_RNA (1)...(19): siRNA sense strand
gaaugucgagccacucuau

SEQ ID NO: 1153346 - RNA, 19 nt, Homo sapiens
  misc_RNA (1)...(19): siRNA sense strand
accaagaccuucaccaaga

SEQ ID NO: 1153347 - RNA, 19 nt, Homo sapiens
  misc_RNA (1)...(19): siRNA sense strand
ccacgguucaguaccuuua

SEQ ID NO: 1153348 - RNA, 19 nt, Homo sapiens
  misc_RNA (1)...(19): siRNA sense strand
caaccuggcccuacucauc

SEQ ID NO: 1153349 - RNA, 19 nt, Homo sapiens
  misc_RNA (1)...(19): siRNA sense strand
gggacacgauguuaucaag

SEQ ID NO: 1153350 - RNA, 19 nt, Homo sapiens
  misc_RNA (1)...(19): siRNA sense strand
ugacuacgccuugaagcua

SEQ ID NO: 1153351 - RNA, 19 nt, Homo sapiens
  misc_RNA (1)...(19): siRNA sense strand
ugagcgacaucaucaauac

SEQ ID NO: 1153352 - RNA, 19 nt, Homo sapiens
  misc_RNA (1)...(19): siRNA sense strand
gacauugacuacgccuuga

SEQ ID NO: 1153353 - RNA, 19 nt, Homo sapiens
  misc_RNA (1)...(19): siRNA sense strand
ccaaguuuauuguaauguc

SEQ ID NO: 1153354 - RNA, 19 nt, Homo sapiens
  misc_RNA (1)...(19): siRNA sense strand
ggacgccuaucgggcagaa

SEQ ID NO: 1153355 - RNA, 19 nt, Homo sapiens
  misc_RNA (1)...(19): siRNA sense strand
ccacggacccuggacugua

SEQ ID NO: 1153356 - RNA, 19 nt, Homo sapiens
  misc_RNA (1)...(19): siRNA sense strand
gcccaccgccugacaauca

SEQ ID NO: 1153357 - RNA, 19 nt, Homo sapiens
  misc_RNA (1)...(19): siRNA sense strand
ggacacgauguuaucaaga

SEQ ID NO: 1153358 - RNA, 19 nt, Homo sapiens
  misc_RNA (1)...(19): siRNA sense strand
gacacgauguuaucaagac

SEQ ID NO: 1153359 - RNA, 19 nt, Homo sapiens
  misc_RNA (1)...(19): siRNA sense strand
ugaaggugguggcugaauc

SEQ ID NO: 1153360 - RNA, 19 nt, Homo sapiens
  misc_RNA (1)...(19): siRNA sense strand
cacggacccuggacuguau

SEQ ID NO: 1153361 - RNA, 19 nt, Homo sapiens
  misc_RNA (1)...(19): siRNA sense strand
gagaaggagguugaucuga

SEQ ID NO: 1153362 - RNA, 19 nt, Homo sapiens
  misc_RNA (1)...(19): siRNA sense strand
ggagaaggagguugaucug

SEQ ID NO: 1153363 - RNA, 19 nt, Homo sapiens
  misc_RNA (1)...(19): siRNA sense strand
agcagcagcucuacuacaa

SEQ ID NO: 1153364 - RNA, 19 nt, Homo sapiens
  misc_RNA (1)...(19): siRNA sense strand
gauuggagcagaccaugug

SEQ ID NO: 1153365 - RNA, 19 nt, Homo sapiens
  misc_RNA (1)...(19): siRNA sense strand
cggaagcccugcaaagcau

SEQ ID NO: 1153366 - RNA, 19 nt, Homo sapiens
  misc_RNA (1)...(19): siRNA sense strand
guacaucguggucucacuu

SEQ ID NO: 1153367 - RNA, 19 nt, Homo sapiens
  misc_RNA (1)...(19): siRNA sense strand
acacugugcuccuguucug

SEQ ID NO: 1153368 - RNA, 19 nt, Homo sapiens
  misc_RNA (1)...(19): siRNA sense strand
ccaagaccuucaccaagag

SEQ ID NO: 1153369 - RNA, 19 nt, Homo sapiens
  misc_RNA (1)...(19): siRNA sense strand
gccagcugcuaacggauga

SEQ ID NO: 1153370 - RNA, 19 nt, Homo sapiens
  misc_RNA (1)...(19): siRNA sense strand
ucaccaagaccuucaccaa

SEQ ID NO: 1153371 - RNA, 19 nt, Homo sapiens
  misc_RNA (1)...(19): siRNA sense strand
gaacaaccuggcccuacuc

SEQ ID NO: 1153372 - RNA, 19 nt, Homo sapiens
  misc_RNA (1)...(19): siRNA sense strand
cacaaccacuaacaacauc

SEQ ID NO: 1153373 - RNA, 19 nt, Homo sapiens
  misc_RNA (1)...(19): siRNA sense strand
gcgaccagauguggacaau

SEQ ID NO: 1153374 - RNA, 19 nt, Homo sapiens
  misc_RNA (1)...(19): siRNA sense strand
caacauugaccggauugga

SEQ ID NO: 1153375 - RNA, 19 nt, Homo sapiens
  misc_RNA (1)...(19): siRNA sense strand
gugcuccuguucuggcaaa

SEQ ID NO: 1153376 - RNA, 19 nt, Homo sapiens
  misc_RNA (1)...(19): siRNA sense strand
gacccuggacuguaucaga

SEQ ID NO: 1153377 - RNA, 19 nt, Homo sapiens
  misc_RNA (1)...(19): siRNA sense strand
agagcuggguggacgagaa

SEQ ID NO: 1153378 - RNA, 19 nt, Homo sapiens
  misc_RNA (1)...(19): siRNA sense strand
gcggaagcccugcaaagca

SEQ ID NO: 1153379 - RNA, 19 nt, Homo sapiens
  misc_RNA (1)...(19): siRNA sense strand
gaaguacaucguggucuca

SEQ ID NO: 1153380 - RNA, 19 nt, Homo sapiens
  misc_RNA (1)...(19): siRNA sense strand
ggacgucugccucaaagcu

SEQ ID NO: 1153381 - RNA, 19 nt, Homo sapiens
  misc_RNA (1)...(19): siRNA sense strand
ccuccaaccaaguuuauug

SEQ ID NO: 1153382 - RNA, 19 nt, Homo sapiens
  misc_RNA (1)...(19): siRNA sense strand
auacguccaugagcugauu

SEQ ID NO: 1153383 - RNA, 19 nt, Homo sapiens
  misc_RNA (1)...(19): siRNA sense strand
gaagcccugcaaagcauug

SEQ ID NO: 1153384 - RNA, 19 nt, Homo sapiens
  misc_RNA (1)...(19): siRNA sense strand
agaacaaccuggcccuacu

SEQ ID NO: 1153385 - RNA, 19 nt, Homo sapiens
  misc_RNA (1)...(19): siRNA sense strand
gcugggacacgauguuauc

SEQ ID NO: 1153386 - RNA, 19 nt, Homo sapiens
  misc_RNA (1)...(19): siRNA sense strand
ccgggagcuuuacuucuau

SEQ ID NO: 1153387 - RNA, 19 nt, Homo sapiens
  misc_RNA (1)...(19): siRNA sense strand
ccacagaaccccugaaguc

SEQ ID NO: 1153388 - RNA, 19 nt, Homo sapiens
  misc_RNA (1)...(19): siRNA sense strand
ggaguguccagaaguacau

SEQ ID NO: 1153389 - RNA, 19 nt, Homo sapiens
  misc_RNA (1)...(19): siRNA sense strand
cagcugugaugaccugcau

SEQ ID NO: 1153390 - RNA, 19 nt, Homo sapiens
  misc_RNA (1)...(19): siRNA sense strand
ggagaccugccagcugcua

SEQ ID NO: 1153391 - RNA, 19 nt, Homo sapiens
  misc_RNA (1)...(19): siRNA sense strand
ggaagcccugcaaagcauu

SEQ ID NO: 1153392 - RNA, 19 nt, Homo sapiens
  misc_RNA (1)...(19): siRNA sense strand
ccaccagugacauugacua

SEQ ID NO: 1153393 - RNA, 19 nt, Homo sapiens
  misc_RNA (1)...(19): siRNA sense strand
gagaccugccagcugcuaa

SEQ ID NO: 1153394 - RNA, 19 nt, Homo sapiens
  misc_RNA (1)...(19): siRNA sense strand
gagcauccacgaguugucu

SEQ ID NO: 1153395 - RNA, 19 nt, Homo sapiens
  misc_RNA (1)...(19): siRNA sense strand
caucgugagcagacaguug

SEQ ID NO: 1153396 - RNA, 19 nt, Homo sapiens
  misc_RNA (1)...(19): siRNA sense strand
ccugaugcguauggugaaa

SEQ ID NO: 1153397 - RNA, 19 nt, Homo sapiens
  misc_RNA (1)...(19): siRNA sense strand
cugagcgacaucaucaaua

SEQ ID NO: 1153398 - RNA, 19 nt, Homo sapiens
  misc_RNA (1)...(19): siRNA sense strand
gaccagauguggacaauca

SEQ ID NO: 1153399 - RNA, 19 nt, Homo sapiens
  misc_RNA (1)...(19): siRNA sense strand
ugaaagcgcugauggacaa

SEQ ID NO: 1153400 - RNA, 19 nt, Homo sapiens
  misc_RNA (1)...(19): siRNA sense strand
gcccagaucugcaagcauu

SEQ ID NO: 1153401 - RNA, 19 nt, Homo sapiens
  misc_RNA (1)...(19): siRNA sense strand
ccaaccaaguuuauuguaa

SEQ ID NO: 1153402 - RNA, 19 nt, Homo sapiens
  misc_RNA (1)...(19): siRNA sense strand
gccgggagcuuuacuucua

SEQ ID NO: 1153403 - RNA, 19 nt, Homo sapiens
  misc_RNA (1)...(19): siRNA sense strand
gcaaagggaaagagaagaa

SEQ ID NO: 1153404 - RNA, 19 nt, Homo sapiens
  misc_RNA (1)...(19): siRNA sense strand
gagcaacauugaccggauu

SEQ ID NO: 1153405 - RNA, 19 nt, Homo sapiens
  misc_RNA (1)...(19): siRNA sense strand
gaucugagcgacaucauca

SEQ ID NO: 1153406 - RNA, 19 nt, Homo sapiens
  misc_RNA (1)...(19): siRNA sense strand
gcacaaccacuaacaacau

SEQ ID NO: 1153407 - RNA, 19 nt, Homo sapiens
  misc_RNA (1)...(19): siRNA sense strand
gacuacgccuugaagcuaa

SEQ ID NO: 1153408 - RNA, 19 nt, Homo sapiens
  misc_RNA (1)...(19): siRNA sense strand
gauguuaucaagacucuga

SEQ ID NO: 1153409 - RNA, 19 nt, Homo sapiens
  misc_RNA (1)...(19): siRNA sense strand
ccuugaagcuaaagaaugu

SEQ ID NO: 1153410 - RNA, 19 nt, Homo sapiens
  misc_RNA (1)...(19): siRNA sense strand
gagcugggacacgauguua

SEQ ID NO: 1153411 - RNA, 19 nt, Homo sapiens
  misc_RNA (1)...(19): siRNA sense strand
gaaugucgagccacucuau

SEQ ID NO: 1153412 - RNA, 19 nt, Homo sapiens
  misc_RNA (1)...(19): siRNA sense strand
accaagaccuucaccaaga

SEQ ID NO: 1153413 - RNA, 19 nt, Homo sapiens
  misc_RNA (1)...(19): siRNA sense strand
ccacgguucaguaccuuua

SEQ ID NO: 1153414 - RNA, 19 nt, Homo sapiens
  misc_RNA (1)...(19): siRNA sense strand
caaccuggcccuacucauc

SEQ ID NO: 1153415 - RNA, 19 nt, Homo sapiens
  misc_RNA (1)...(19): siRNA sense strand
gggacacgauguuaucaag

SEQ ID NO: 1153416 - RNA, 19 nt, Homo sapiens
  misc_RNA (1)...(19): siRNA sense strand
ugacuacgccuugaagcua

SEQ ID NO: 1153417 - RNA, 19 nt, Homo sapiens
  misc_RNA (1)...(19): siRNA sense strand
ugagcgacaucaucaauac

SEQ ID NO: 1153418 - RNA, 19 nt, Homo sapiens
  misc_RNA (1)...(19): siRNA sense strand
gacauugacuacgccuuga

SEQ ID NO: 1153419 - RNA, 19 nt, Homo sapiens
  misc_RNA (1)...(19): siRNA sense strand
ccaaguuuauuguaauguc

SEQ ID NO: 1153420 - RNA, 19 nt, Homo sapiens
  misc_RNA (1)...(19): siRNA sense strand
ggacgccuaucgggcagaa

SEQ ID NO: 1153421 - RNA, 19 nt, Homo sapiens
  misc_RNA (1)...(19): siRNA sense strand
ccacggacccuggacugua

SEQ ID NO: 1153422 - RNA, 19 nt, Homo sapiens
  misc_RNA (1)...(19): siRNA sense strand
gcccaccgccugacaauca

SEQ ID NO: 1153423 - RNA, 19 nt, Homo sapiens
  misc_RNA (1)...(19): siRNA sense strand
ggacacgauguuaucaaga

SEQ ID NO: 1153424 - RNA, 19 nt, Homo sapiens
  misc_RNA (1)...(19): siRNA sense strand
gacacgauguuaucaagac

SEQ ID NO: 1153425 - RNA, 19 nt, Homo sapiens
  misc_RNA (1)...(19): siRNA sense strand
ugaaggugguggcugaauc

SEQ ID NO: 1153426 - RNA, 19 nt, Homo sapiens
  misc_RNA (1)...(19): siRNA sense strand
cacggacccuggacuguau

SEQ ID NO: 1153427 - RNA, 19 nt, Homo sapiens
  misc_RNA (1)...(19): siRNA sense strand
gagaaggagguugaucuga

SEQ ID NO: 1153428 - RNA, 19 nt, Homo sapiens
  misc_RNA (1)...(19): siRNA sense strand
ggagaaggagguugaucug

SEQ ID NO: 1153429 - RNA, 19 nt, Homo sapiens
  misc_RNA (1)...(19): siRNA sense strand
agcagcagcucuacuacaa

SEQ ID NO: 1153430 - RNA, 19 nt, Homo sapiens
  misc_RNA (1)...(19): siRNA sense strand
gauuggagcagaccaugug

SEQ ID NO: 1153431 - RNA, 19 nt, Homo sapiens
  misc_RNA (1)...(19): siRNA sense strand
cggaagcccugcaaagcau

SEQ ID NO: 1153432 - RNA, 19 nt, Homo sapiens
  misc_RNA (1)...(19): siRNA sense strand
guacaucguggucucacuu

SEQ ID NO: 1153433 - RNA, 19 nt, Homo sapiens
  misc_RNA (1)...(19): siRNA sense strand
acacugugcuccuguucug

SEQ ID NO: 1153434 - RNA, 19 nt, Homo sapiens
  misc_RNA (1)...(19): siRNA sense strand
ccaagaccuucaccaagag

SEQ ID NO: 1153435 - RNA, 19 nt, Homo sapiens
  misc_RNA (1)...(19): siRNA sense strand
gccagcugcuaacggauga

SEQ ID NO: 1153436 - RNA, 19 nt, Homo sapiens
  misc_RNA (1)...(19): siRNA sense strand
ucaccaagaccuucaccaa

SEQ ID NO: 1153437 - RNA, 19 nt, Homo sapiens
  misc_RNA (1)...(19): siRNA sense strand
gaacaaccuggcccuacuc

SEQ ID NO: 1153438 - RNA, 19 nt, Homo sapiens
  misc_RNA (1)...(19): siRNA sense strand
cacaaccacuaacaacauc

SEQ ID NO: 1153439 - RNA, 19 nt, Homo sapiens
  misc_RNA (1)...(19): siRNA sense strand
gcgaccagauguggacaau

SEQ ID NO: 1153440 - RNA, 19 nt, Homo sapiens
  misc_RNA (1)...(19): siRNA sense strand
caacauugaccggauugga

SEQ ID NO: 1153441 - RNA, 19 nt, Homo sapiens
  misc_RNA (1)...(19): siRNA sense strand
gugcuccuguucuggcaaa

SEQ ID NO: 1153442 - RNA, 19 nt, Homo sapiens
  misc_RNA (1)...(19): siRNA sense strand
gacccuggacuguaucaga

SEQ ID NO: 1153443 - RNA, 19 nt, Homo sapiens
  misc_RNA (1)...(19): siRNA sense strand
agagcuggguggacgagaa

SEQ ID NO: 1153444 - RNA, 19 nt, Homo sapiens
  misc_RNA (1)...(19): siRNA sense strand
gcggaagcccugcaaagca

SEQ ID NO: 1153445 - RNA, 19 nt, Homo sapiens
  misc_RNA (1)...(19): siRNA sense strand
gaaguacaucguggucuca

SEQ ID NO: 1153446 - RNA, 19 nt, Homo sapiens
  misc_RNA (1)...(19): siRNA sense strand
ggacgucugccucaaagcu

SEQ ID NO: 1153447 - RNA, 19 nt, Homo sapiens
  misc_RNA (1)...(19): siRNA sense strand
ccuccaaccaaguuuauug

SEQ ID NO: 1153448 - RNA, 19 nt, Homo sapiens
  misc_RNA (1)...(19): siRNA sense strand
auacguccaugagcugauu

SEQ ID NO: 1153449 - RNA, 19 nt, Homo sapiens
  misc_RNA (1)...(19): siRNA sense strand
gaagcccugcaaagcauug

SEQ ID NO: 1153450 - RNA, 19 nt, Homo sapiens
  misc_RNA (1)...(19): siRNA sense strand
agaacaaccuggcccuacu

SEQ ID NO: 1153451 - RNA, 19 nt, Homo sapiens
  misc_RNA (1)...(19): siRNA sense strand
gcugggacacgauguuauc

SEQ ID NO: 1153452 - RNA, 19 nt, Homo sapiens
  misc_RNA (1)...(19): siRNA sense strand
ccgggagcuuuacuucuau

SEQ ID NO: 1153453 - RNA, 19 nt, Homo sapiens
  misc_RNA (1)...(19): siRNA sense strand
ccacagaaccccugaaguc

SEQ ID NO: 1153454 - RNA, 19 nt, Homo sapiens
  misc_RNA (1)...(19): siRNA sense strand
ggaguguccagaaguacau

SEQ ID NO: 1153455 - RNA, 19 nt, Homo sapiens
  misc_RNA (1)...(19): siRNA sense strand
cagcugugaugaccugcau

SEQ ID NO: 1153456 - RNA, 19 nt, Homo sapiens
  misc_RNA (1)...(19): siRNA sense strand
ggagaccugccagcugcua

SEQ ID NO: 1153457 - RNA, 19 nt, Homo sapiens
  misc_RNA (1)...(19): siRNA sense strand
ggaagcccugcaaagcauu

SEQ ID NO: 1153458 - RNA, 19 nt, Homo sapiens
  misc_RNA (1)...(19): siRNA sense strand
ccaccagugacauugacua

SEQ ID NO: 1153459 - RNA, 19 nt, Homo sapiens
  misc_RNA (1)...(19): siRNA sense strand
gagaccugccagcugcuaa

SEQ ID NO: 1153460 - RNA, 19 nt, Homo sapiens
  misc_RNA (1)...(19): siRNA sense strand
gagcauccacgaguugucu

SEQ ID NO: 1153461 - RNA, 19 nt, Homo sapiens
  misc_RNA (1)...(19): siRNA sense strand
caucgugagcagacaguug

SEQ ID NO: 1153462 - RNA, 19 nt, Homo sapiens
  misc_RNA (1)...(19): siRNA sense strand
ccugaugcguauggugaaa

SEQ ID NO: 1153463 - RNA, 19 nt, Homo sapiens
  misc_RNA (1)...(19): siRNA sense strand
cugagcgacaucaucaaua

SEQ ID NO: 1153464 - RNA, 19 nt, Homo sapiens
  misc_RNA (1)...(19): siRNA sense strand
gaccagauguggacaauca

SEQ ID NO: 1153465 - RNA, 19 nt, Homo sapiens
  misc_RNA (1)...(19): siRNA sense strand
ugaaagcgcugauggacaa

SEQ ID NO: 1153466 - RNA, 19 nt, Homo sapiens
  misc_RNA (1)...(19): siRNA sense strand
gcccagaucugcaagcauu

SEQ ID NO: 1153467 - RNA, 19 nt, Homo sapiens
  misc_RNA (1)...(19): siRNA sense strand
ccaaccaaguuuauuguaa

SEQ ID NO: 1153468 - RNA, 19 nt, Homo sapiens
  misc_RNA (1)...(19): siRNA sense strand
gccgggagcuuuacuucua

SEQ ID NO: 1153469 - RNA, 19 nt, Homo sapiens
  misc_RNA (1)...(19): siRNA sense strand
gcaaagggaaagagaagaa

SEQ ID NO: 1153470 - RNA, 19 nt, Homo sapiens
  misc_RNA (1)...(19): siRNA sense strand
gagcaacauugaccggauu

SEQ ID NO: 1153471 - RNA, 19 nt, Homo sapiens
  misc_RNA (1)...(19): siRNA sense strand
gaucugagcgacaucauca

SEQ ID NO: 1153472 - RNA, 19 nt, Homo sapiens
  misc_RNA (1)...(19): siRNA sense strand
gcacaaccacuaacaacau

SEQ ID NO: 1153473 - RNA, 19 nt, Homo sapiens
  misc_RNA (1)...(19): siRNA sense strand
gacuacgccuugaagcuaa

SEQ ID NO: 1153474 - RNA, 19 nt, Homo sapiens
  misc_RNA (1)...(19): siRNA sense strand
gauguuaucaagacucuga

SEQ ID NO: 1153475 - RNA, 19 nt, Homo sapiens
  misc_RNA (1)...(19): siRNA sense strand
ccuugaagcuaaagaaugu

SEQ ID NO: 1153476 - RNA, 19 nt, Homo sapiens
  misc_RNA (1)...(19): siRNA sense strand
gagcugggacacgauguua

SEQ ID NO: 1153477 - RNA, 19 nt, Homo sapiens
  misc_RNA (1)...(19): siRNA sense strand
gaaugucgagccacucuau

SEQ ID NO: 1153478 - RNA, 19 nt, Homo sapiens
  misc_RNA (1)...(19): siRNA sense strand
accaagaccuucaccaaga

SEQ ID NO: 1153479 - RNA, 19 nt, Homo sapiens
  misc_RNA (1)...(19): siRNA sense strand
ccacgguucaguaccuuua

SEQ ID NO: 1153480 - RNA, 19 nt, Homo sapiens
  misc_RNA (1)...(19): siRNA sense strand
caaccuggcccuacucauc

SEQ ID NO: 1153481 - RNA, 19 nt, Homo sapiens
  misc_RNA (1)...(19): siRNA sense strand
gggacacgauguuaucaag

SEQ ID NO: 1153482 - RNA, 19 nt, Homo sapiens
  misc_RNA (1)...(19): siRNA sense strand
ugacuacgccuugaagcua

SEQ ID NO: 1153483 - RNA, 19 nt, Homo sapiens
  misc_RNA (1)...(19): siRNA sense strand
ugagcgacaucaucaauac

SEQ ID NO: 1153484 - RNA, 19 nt, Homo sapiens
  misc_RNA (1)...(19): siRNA sense strand
gacauugacuacgccuuga

SEQ ID NO: 1153485 - RNA, 19 nt, Homo sapiens
  misc_RNA (1)...(19): siRNA sense strand
ccaaguuuauuguaauguc

SEQ ID NO: 1153486 - RNA, 19 nt, Homo sapiens
  misc_RNA (1)...(19): siRNA sense strand
ggacgccuaucgggcagaa

SEQ ID NO: 1153487 - RNA, 19 nt, Homo sapiens
  misc_RNA (1)...(19): siRNA sense strand
ccacggacccuggacugua

SEQ ID NO: 1153488 - RNA, 19 nt, Homo sapiens
  misc_RNA (1)...(19): siRNA sense strand
gcccaccgccugacaauca

SEQ ID NO: 1153489 - RNA, 19 nt, Homo sapiens
  misc_RNA (1)...(19): siRNA sense strand
ggacacgauguuaucaaga

SEQ ID NO: 1153490 - RNA, 19 nt, Homo sapiens
  misc_RNA (1)...(19): siRNA sense strand
gacacgauguuaucaagac

SEQ ID NO: 1153491 - RNA, 19 nt, Homo sapiens
  misc_RNA (1)...(19): siRNA sense strand
ugaaggugguggcugaauc

SEQ ID NO: 1153492 - RNA, 19 nt, Homo sapiens
  misc_RNA (1)...(19): siRNA sense strand
cacggacccuggacuguau

SEQ ID NO: 1153493 - RNA, 19 nt, Homo sapiens
  misc_RNA (1)...(19): siRNA sense strand
gagaaggagguugaucuga

SEQ ID NO: 1153494 - RNA, 19 nt, Homo sapiens
  misc_RNA (1)...(19): siRNA sense strand
ggagaaggagguugaucug

SEQ ID NO: 1153495 - RNA, 19 nt, Homo sapiens
  misc_RNA (1)...(19): siRNA sense strand
agcagcagcucuacuacaa

SEQ ID NO: 1153496 - RNA, 19 nt, Homo sapiens
  misc_RNA (1)...(19): siRNA sense strand
gauuggagcagaccaugug

SEQ ID NO: 1153497 - RNA, 19 nt, Homo sapiens
  misc_RNA (1)...(19): siRNA sense strand
cggaagcccugcaaagcau

SEQ ID NO: 1153498 - RNA, 19 nt, Homo sapiens
  misc_RNA (1)...(19): siRNA sense strand
guacaucguggucucacuu

SEQ ID NO: 1153499 - RNA, 19 nt, Homo sapiens
  misc_RNA (1)...(19): siRNA sense strand
acacugugcuccuguucug

SEQ ID NO: 1153500 - RNA, 19 nt, Homo sapiens
  misc_RNA (1)...(19): siRNA sense strand
ccaagaccuucaccaagag

SEQ ID NO: 1153501 - RNA, 19 nt, Homo sapiens
  misc_RNA (1)...(19): siRNA sense strand
gccagcugcuaacggauga

SEQ ID NO: 1153502 - RNA, 19 nt, Homo sapiens
  misc_RNA (1)...(19): siRNA sense strand
ucaccaagaccuucaccaa

SEQ ID NO: 1153503 - RNA, 19 nt, Homo sapiens
  misc_RNA (1)...(19): siRNA sense strand
gaacaaccuggcccuacuc

SEQ ID NO: 1153504 - RNA, 19 nt, Homo sapiens
  misc_RNA (1)...(19): siRNA sense strand
cacaaccacuaacaacauc

SEQ ID NO: 1153505 - RNA, 19 nt, Homo sapiens
  misc_RNA (1)...(19): siRNA sense strand
gcgaccagauguggacaau

SEQ ID NO: 1153506 - RNA, 19 nt, Homo sapiens
  misc_RNA (1)...(19): siRNA sense strand
caacauugaccggauugga

SEQ ID NO: 1153507 - RNA, 19 nt, Homo sapiens
  misc_RNA (1)...(19): siRNA sense strand
gugcuccuguucuggcaaa

SEQ ID NO: 1153508 - RNA, 19 nt, Homo sapiens
  misc_RNA (1)...(19): siRNA sense strand
gacccuggacuguaucaga

SEQ ID NO: 1153509 - RNA, 19 nt, Homo sapiens
  misc_RNA (1)...(19): siRNA sense strand
agagcuggguggacgagaa

SEQ ID NO: 1153510 - RNA, 19 nt, Homo sapiens
  misc_RNA (1)...(19): siRNA sense strand
gcggaagcccugcaaagca

SEQ ID NO: 1153511 - RNA, 19 nt, Homo sapiens
  misc_RNA (1)...(19): siRNA sense strand
gaaguacaucguggucuca

SEQ ID NO: 1153512 - RNA, 19 nt, Homo sapiens
  misc_RNA (1)...(19): siRNA sense strand
ggacgucugccucaaagcu

SEQ ID NO: 1153513 - RNA, 19 nt, Homo sapiens
  misc_RNA (1)...(19): siRNA sense strand
ccuccaaccaaguuuauug

SEQ ID NO: 1153514 - RNA, 19 nt, Homo sapiens
  misc_RNA (1)...(19): siRNA sense strand
auacguccaugagcugauu

SEQ ID NO: 1153515 - RNA, 19 nt, Homo sapiens
  misc_RNA (1)...(19): siRNA sense strand
gaagcccugcaaagcauug

SEQ ID NO: 1153516 - RNA, 19 nt, Homo sapiens
  misc_RNA (1)...(19): siRNA sense strand
agaacaaccuggcccuacu

SEQ ID NO: 1153517 - RNA, 19 nt, Homo sapiens
  misc_RNA (1)...(19): siRNA sense strand
gcugggacacgauguuauc

SEQ ID NO: 1153518 - RNA, 19 nt, Homo sapiens
  misc_RNA (1)...(19): siRNA sense strand
ccgggagcuuuacuucuau

SEQ ID NO: 1153519 - RNA, 19 nt, Homo sapiens
  misc_RNA (1)...(19): siRNA sense strand
ccacagaaccccugaaguc

SEQ ID NO: 1153520 - RNA, 19 nt, Homo sapiens
  misc_RNA (1)...(19): siRNA sense strand
ggaguguccagaaguacau

SEQ ID NO: 1153521 - RNA, 19 nt, Homo sapiens
  misc_RNA (1)...(19): siRNA sense strand
cagcugugaugaccugcau

SEQ ID NO: 1153522 - RNA, 19 nt, Homo sapiens
  misc_RNA (1)...(19): siRNA sense strand
ggagaccugccagcugcua

SEQ ID NO: 1153523 - RNA, 19 nt, Homo sapiens
  misc_RNA (1)...(19): siRNA sense strand
ggaagcccugcaaagcauu

SEQ ID NO: 1153524 - RNA, 19 nt, Homo sapiens
  misc_RNA (1)...(19): siRNA sense strand
ccaccagugacauugacua

SEQ ID NO: 1153525 - RNA, 19 nt, Homo sapiens
  misc_RNA (1)...(19): siRNA sense strand
gagaccugccagcugcuaa

SEQ ID NO: 1153526 - RNA, 19 nt, Homo sapiens
  misc_RNA (1)...(19): siRNA sense strand
gagcauccacgaguugucu

SEQ ID NO: 1153527 - RNA, 19 nt, Homo sapiens
  misc_RNA (1)...(19): siRNA sense strand
caucgugagcagacaguug

SEQ ID NO: 1153528 - RNA, 19 nt, Homo sapiens
  misc_RNA (1)...(19): siRNA sense strand
ccugaugcguauggugaaa

SEQ ID NO: 1153529 - RNA, 19 nt, Homo sapiens
  misc_RNA (1)...(19): siRNA sense strand
cugagcgacaucaucaaua

SEQ ID NO: 1153530 - RNA, 19 nt, Homo sapiens
  misc_RNA (1)...(19): siRNA sense strand
gaccagauguggacaauca

SEQ ID NO: 1153531 - RNA, 19 nt, Homo sapiens
  misc_RNA (1)...(19): siRNA sense strand
ugaaagcgcugauggacaa

SEQ ID NO: 1153532 - RNA, 19 nt, Homo sapiens
  misc_RNA (1)...(19): siRNA sense strand
gcccagaucugcaagcauu

SEQ ID NO: 1153533 - RNA, 19 nt, Homo sapiens
  misc_RNA (1)...(19): siRNA sense strand
ccaaccaaguuuauuguaa

SEQ ID NO: 1153534 - RNA, 19 nt, Homo sapiens
  misc_RNA (1)...(19): siRNA sense strand
gccgggagcuuuacuucua

SEQ ID NO: 1153535 - RNA, 19 nt, Homo sapiens
  misc_RNA (1)...(19): siRNA sense strand
gcaaagggaaagagaagaa

SEQ ID NO: 1153536 - RNA, 19 nt, Homo sapiens
  misc_RNA (1)...(19): siRNA sense strand
gagcaacauugaccggauu

SEQ ID NO: 1153537 - RNA, 19 nt, Homo sapiens
  misc_RNA (1)...(19): siRNA sense strand
gaucugagcgacaucauca

SEQ ID NO: 1153538 - RNA, 19 nt, Homo sapiens
  misc_RNA (1)...(19): siRNA sense strand
gcacaaccacuaacaacau

SEQ ID NO: 1153539 - RNA, 19 nt, Homo sapiens
  misc_RNA (1)...(19): siRNA sense strand
gacuacgccuugaagcuaa

SEQ ID NO: 1153540 - RNA, 19 nt, Homo sapiens
  misc_RNA (1)...(19): siRNA sense strand
gauguuaucaagacucuga

SEQ ID NO: 1153541 - RNA, 19 nt, Homo sapiens
  misc_RNA (1)...(19): siRNA sense strand
ccuugaagcuaaagaaugu

SEQ ID NO: 1153542 - RNA, 19 nt, Homo sapiens
  misc_RNA (1)...(19): siRNA sense strand
gagcugggacacgauguua

SEQ ID NO: 1153543 - RNA, 19 nt, Homo sapiens
  misc_RNA (1)...(19): siRNA sense strand
gaaugucgagccacucuau

SEQ ID NO: 1153544 - RNA, 19 nt, Homo sapiens
  misc_RNA (1)...(19): siRNA sense strand
accaagaccuucaccaaga

SEQ ID NO: 1153545 - RNA, 19 nt, Homo sapiens
  misc_RNA (1)...(19): siRNA sense strand
ccacgguucaguaccuuua

SEQ ID NO: 1153546 - RNA, 19 nt, Homo sapiens
  misc_RNA (1)...(19): siRNA sense strand
caaccuggcccuacucauc

SEQ ID NO: 1153547 - RNA, 19 nt, Homo sapiens
  misc_RNA (1)...(19): siRNA sense strand
gggacacgauguuaucaag

SEQ ID NO: 1153548 - RNA, 19 nt, Homo sapiens
  misc_RNA (1)...(19): siRNA sense strand
ugacuacgccuugaagcua

SEQ ID NO: 1153549 - RNA, 19 nt, Homo sapiens
  misc_RNA (1)...(19): siRNA sense strand
ugagcgacaucaucaauac

SEQ ID NO: 1153550 - RNA, 19 nt, Homo sapiens
  misc_RNA (1)...(19): siRNA sense strand
gacauugacuacgccuuga

SEQ ID NO: 1153551 - RNA, 19 nt, Homo sapiens
  misc_RNA (1)...(19): siRNA sense strand
ccaaguuuauuguaauguc

SEQ ID NO: 1153552 - RNA, 19 nt, Homo sapiens
  misc_RNA (1)...(19): siRNA sense strand
ggacgccuaucgggcagaa

SEQ ID NO: 1153553 - RNA, 19 nt, Homo sapiens
  misc_RNA (1)...(19): siRNA sense strand
ccacggacccuggacugua

SEQ ID NO: 1153554 - RNA, 19 nt, Homo sapiens
  misc_RNA (1)...(19): siRNA sense strand
gcccaccgccugacaauca

SEQ ID NO: 1153555 - RNA, 19 nt, Homo sapiens
  misc_RNA (1)...(19): siRNA sense strand
ggacacgauguuaucaaga

SEQ ID NO: 1153556 - RNA, 19 nt, Homo sapiens
  misc_RNA (1)...(19): siRNA sense strand
gacacgauguuaucaagac

SEQ ID NO: 1153557 - RNA, 19 nt, Homo sapiens
  misc_RNA (1)...(19): siRNA sense strand
ugaaggugguggcugaauc

SEQ ID NO: 1153558 - RNA, 19 nt, Homo sapiens
  misc_RNA (1)...(19): siRNA sense strand
cacggacccuggacuguau

SEQ ID NO: 1153559 - RNA, 19 nt, Homo sapiens
  misc_RNA (1)...(19): siRNA sense strand
gagaaggagguugaucuga

SEQ ID NO: 1153560 - RNA, 19 nt, Homo sapiens
  misc_RNA (1)...(19): siRNA sense strand
ggagaaggagguugaucug

SEQ ID NO: 1153561 - RNA, 19 nt, Homo sapiens
  misc_RNA (1)...(19): siRNA sense strand
agcagcagcucuacuacaa

SEQ ID NO: 1153562 - RNA, 19 nt, Homo sapiens
  misc_RNA (1)...(19): siRNA sense strand
gauuggagcagaccaugug

SEQ ID NO: 1153563 - RNA, 19 nt, Homo sapiens
  misc_RNA (1)...(19): siRNA sense strand
cggaagcccugcaaagcau

SEQ ID NO: 1153564 - RNA, 19 nt, Homo sapiens
  misc_RNA (1)...(19): siRNA sense strand
guacaucguggucucacuu

SEQ ID NO: 1153565 - RNA, 19 nt, Homo sapiens
  misc_RNA (1)...(19): siRNA sense strand
acacugugcuccuguucug

SEQ ID NO: 1153566 - RNA, 19 nt, Homo sapiens
  misc_RNA (1)...(19): siRNA sense strand
ccaagaccuucaccaagag

SEQ ID NO: 1153567 - RNA, 19 nt, Homo sapiens
  misc_RNA (1)...(19): siRNA sense strand
gccagcugcuaacggauga

SEQ ID NO: 1153568 - RNA, 19 nt, Homo sapiens
  misc_RNA (1)...(19): siRNA sense strand
ucaccaagaccuucaccaa

SEQ ID NO: 1153569 - RNA, 19 nt, Homo sapiens
  misc_RNA (1)...(19): siRNA sense strand
gaacaaccuggcccuacuc

SEQ ID NO: 1153570 - RNA, 19 nt, Homo sapiens
  misc_RNA (1)...(19): siRNA sense strand
cacaaccacuaacaacauc

SEQ ID NO: 1153571 - RNA, 19 nt, Homo sapiens
  misc_RNA (1)...(19): siRNA sense strand
gcgaccagauguggacaau

SEQ ID NO: 1153572 - RNA, 19 nt, Homo sapiens
  misc_RNA (1)...(19): siRNA sense strand
caacauugaccggauugga

SEQ ID NO: 1153573 - RNA, 19 nt, Homo sapiens
  misc_RNA (1)...(19): siRNA sense strand
gugcuccuguucuggcaaa

SEQ ID NO: 1153574 - RNA, 19 nt, Homo sapiens
  misc_RNA (1)...(19): siRNA sense strand
gacccuggacuguaucaga

SEQ ID NO: 1153575 - RNA, 19 nt, Homo sapiens
  misc_RNA (1)...(19): siRNA sense strand
agagcuggguggacgagaa

SEQ ID NO: 1153576 - RNA, 19 nt, Homo sapiens
  misc_RNA (1)...(19): siRNA sense strand
gcggaagcccugcaaagca

SEQ ID NO: 1153577 - RNA, 19 nt, Homo sapiens
  misc_RNA (1)...(19): siRNA sense strand
gaaguacaucguggucuca

SEQ ID NO: 1153578 - RNA, 19 nt, Homo sapiens
  misc_RNA (1)...(19): siRNA sense strand
ggacgucugccucaaagcu

SEQ ID NO: 1153579 - RNA, 19 nt, Homo sapiens
  misc_RNA (1)...(19): siRNA sense strand
ccuccaaccaaguuuauug

SEQ ID NO: 1153580 - RNA, 19 nt, Homo sapiens
  misc_RNA (1)...(19): siRNA sense strand
auacguccaugagcugauu

SEQ ID NO: 1153581 - RNA, 19 nt, Homo sapiens
  misc_RNA (1)...(19): siRNA sense strand
gaagcccugcaaagcauug

SEQ ID NO: 1153582 - RNA, 19 nt, Homo sapiens
  misc_RNA (1)...(19): siRNA sense strand
agaacaaccuggcccuacu

SEQ ID NO: 1153583 - RNA, 19 nt, Homo sapiens
  misc_RNA (1)...(19): siRNA sense strand
gcugggacacgauguuauc

SEQ ID NO: 1153584 - RNA, 19 nt, Homo sapiens
  misc_RNA (1)...(19): siRNA sense strand
ccgggagcuuuacuucuau

SEQ ID NO: 1153585 - RNA, 19 nt, Homo sapiens
  misc_RNA (1)...(19): siRNA sense strand
ccacagaaccccugaaguc

SEQ ID NO: 1153586 - RNA, 19 nt, Homo sapiens
  misc_RNA (1)...(19): siRNA sense strand
ggaguguccagaaguacau

SEQ ID NO: 1153587 - RNA, 19 nt, Homo sapiens
  misc_RNA (1)...(19): siRNA sense strand
cagcugugaugaccugcau

SEQ ID NO: 1153588 - RNA, 19 nt, Homo sapiens
  misc_RNA (1)...(19): siRNA sense strand
ggagaccugccagcugcua

SEQ ID NO: 1153589 - RNA, 19 nt, Homo sapiens
  misc_RNA (1)...(19): siRNA sense strand
ggaagcccugcaaagcauu

SEQ ID NO: 1153590 - RNA, 19 nt, Homo sapiens
  misc_RNA (1)...(19): siRNA sense strand
ccaccagugacauugacua

SEQ ID NO: 1153591 - RNA, 19 nt, Homo sapiens
  misc_RNA (1)...(19): siRNA sense strand
gagaccugccagcugcuaa

SEQ ID NO: 1153592 - RNA, 19 nt, Homo sapiens
  misc_RNA (1)...(19): siRNA sense strand
gagcauccacgaguugucu

SEQ ID NO: 1153593 - RNA, 19 nt, Homo sapiens
  misc_RNA (1)...(19): siRNA sense strand
caucgugagcagacaguug

SEQ ID NO: 1153594 - RNA, 19 nt, Homo sapiens
  misc_RNA (1)...(19): siRNA sense strand
ccugaugcguauggugaaa

SEQ ID NO: 1153595 - RNA, 19 nt, Homo sapiens
  misc_RNA (1)...(19): siRNA sense strand
cugagcgacaucaucaaua

SEQ ID NO: 1153596 - RNA, 19 nt, Homo sapiens
  misc_RNA (1)...(19): siRNA sense strand
ccaacuacaucgacauuua

SEQ ID NO: 1153597 - RNA, 19 nt, Homo sapiens
  misc_RNA (1)...(19): siRNA sense strand
uuggaaaccuggaagauua

SEQ ID NO: 1153598 - RNA, 19 nt, Homo sapiens
  misc_RNA (1)...(19): siRNA sense strand
ugaaauggcuccagcaaca

SEQ ID NO: 1153599 - RNA, 19 nt, Homo sapiens
  misc_RNA (1)...(19): siRNA sense strand
ggacggcgaugucacagau

SEQ ID NO: 1153600 - RNA, 19 nt, Homo sapiens
  misc_RNA (1)...(19): siRNA sense strand
gaagcaaacagccaguuaa

SEQ ID NO: 1153601 - RNA, 19 nt, Homo sapiens
  misc_RNA (1)...(19): siRNA sense strand
gaacggcaaugauuaugac

SEQ ID NO: 1153602 - RNA, 19 nt, Homo sapiens
  misc_RNA (1)...(19): siRNA sense strand
gcgagcgacuggaaaguga

SEQ ID NO: 1153603 - RNA, 19 nt, Homo sapiens
  misc_RNA (1)...(19): siRNA sense strand
ccucacaccuuccucagaa

SEQ ID NO: 1153604 - RNA, 19 nt, Homo sapiens
  misc_RNA (1)...(19): siRNA sense strand
gauaugaugccagcaauga

SEQ ID NO: 1153605 - RNA, 19 nt, Homo sapiens
  misc_RNA (1)...(19): siRNA sense strand
ugacccaucuccacgauau

SEQ ID NO: 1153606 - RNA, 19 nt, Homo sapiens
  misc_RNA (1)...(19): siRNA sense strand
caacaggaagugaaacgaa

SEQ ID NO: 1153607 - RNA, 19 nt, Homo sapiens
  misc_RNA (1)...(19): siRNA sense strand
gaaagcgagcgacuggaaa

SEQ ID NO: 1153608 - RNA, 19 nt, Homo sapiens
  misc_RNA (1)...(19): siRNA sense strand
gcaaacagccaguuaaccu

SEQ ID NO: 1153609 - RNA, 19 nt, Homo sapiens
  misc_RNA (1)...(19): siRNA sense strand
agagacaggugcgaaguga

SEQ ID NO: 1153610 - RNA, 19 nt, Homo sapiens
  misc_RNA (1)...(19): siRNA sense strand
gacgugaacggcaaugauu

SEQ ID NO: 1153611 - RNA, 19 nt, Homo sapiens
  misc_RNA (1)...(19): siRNA sense strand
gaugauggcauagagagaa

SEQ ID NO: 1153612 - RNA, 19 nt, Homo sapiens
  misc_RNA (1)...(19): siRNA sense strand
cagauguggucgaggcaaa

SEQ ID NO: 1153613 - RNA, 19 nt, Homo sapiens
  misc_RNA (1)...(19): siRNA sense strand
agaagcaaacagccaguua

SEQ ID NO: 1153614 - RNA, 19 nt, Homo sapiens
  misc_RNA (1)...(19): siRNA sense strand
caaagucgcugggcaucag

SEQ ID NO: 1153615 - RNA, 19 nt, Homo sapiens
  misc_RNA (1)...(19): siRNA sense strand
gaaacgaagggugaagaga

SEQ ID NO: 1153616 - RNA, 19 nt, Homo sapiens
  misc_RNA (1)...(19): siRNA sense strand
caucagacccaacuacauc

SEQ ID NO: 1153617 - RNA, 19 nt, Homo sapiens
  misc_RNA (1)...(19): siRNA sense strand
ugaaagcgagcgacuggaa

SEQ ID NO: 1153618 - RNA, 19 nt, Homo sapiens
  misc_RNA (1)...(19): siRNA sense strand
gaagagacaggugcgaagu

SEQ ID NO: 1153619 - RNA, 19 nt, Homo sapiens
  misc_RNA (1)...(19): siRNA sense strand
caucaucgccuuggcucua

SEQ ID NO: 1153620 - RNA, 19 nt, Homo sapiens
  misc_RNA (1)...(19): siRNA sense strand
ccuggaagauuacuaccau

SEQ ID NO: 1153621 - RNA, 19 nt, Homo sapiens
  misc_RNA (1)...(19): siRNA sense strand
uuucgaguauggcauuaaa

SEQ ID NO: 1153622 - RNA, 19 nt, Homo sapiens
  misc_RNA (1)...(19): siRNA sense strand
uaugaugccagcaaugaaa

SEQ ID NO: 1153623 - RNA, 19 nt, Homo sapiens
  misc_RNA (1)...(19): siRNA sense strand
gaaaccuggaagauuacua

SEQ ID NO: 1153624 - RNA, 19 nt, Homo sapiens
  misc_RNA (1)...(19): siRNA sense strand
cgccuuggcucuagaagca

SEQ ID NO: 1153625 - RNA, 19 nt, Homo sapiens
  misc_RNA (1)...(19): siRNA sense strand
gcaguggggccuuuuauga

SEQ ID NO: 1153626 - RNA, 19 nt, Homo sapiens
  misc_RNA (1)...(19): siRNA sense strand
uggaagauuacuaccauuu

SEQ ID NO: 1153627 - RNA, 19 nt, Homo sapiens
  misc_RNA (1)...(19): siRNA sense strand
cagcaaacaauuccuacug

SEQ ID NO: 1153628 - RNA, 19 nt, Homo sapiens
  misc_RNA (1)...(19): siRNA sense strand
cagcagcgccaccgagaau

SEQ ID NO: 1153629 - RNA, 19 nt, Homo sapiens
  misc_RNA (1)...(19): siRNA sense strand
ugaacggcaaugauuauga

SEQ ID NO: 1153630 - RNA, 19 nt, Homo sapiens
  misc_RNA (1)...(19): siRNA sense strand
caacuacaucgacauuuac

SEQ ID NO: 1153631 - RNA, 19 nt, Homo sapiens
  misc_RNA (1)...(19): siRNA sense strand
aaacacggcacucguugug

SEQ ID NO: 1153632 - RNA, 19 nt, Homo sapiens
  misc_RNA (1)...(19): siRNA sense strand
ggaagauuacuaccauuuu

SEQ ID NO: 1153633 - RNA, 19 nt, Homo sapiens
  misc_RNA (1)...(19): siRNA sense strand
caacuugggccagauugga

SEQ ID NO: 1153634 - RNA, 19 nt, Homo sapiens
  misc_RNA (1)...(19): siRNA sense strand
gaucugcgucagcgcugua

SEQ ID NO: 1153635 - RNA, 19 nt, Homo sapiens
  misc_RNA (1)...(19): siRNA sense strand
cgcaggcccuuuacuucaa

SEQ ID NO: 1153636 - RNA, 19 nt, Homo sapiens
  misc_RNA (1)...(19): siRNA sense strand
ccaacagcaucuacaccau

SEQ ID NO: 1153637 - RNA, 19 nt, Homo sapiens
  misc_RNA (1)...(19): siRNA sense strand
cuacaucgacauuuacagu

SEQ ID NO: 1153638 - RNA, 19 nt, Homo sapiens
  misc_RNA (1)...(19): siRNA sense strand
ccagcaacaggaagugaaa

SEQ ID NO: 1153639 - RNA, 19 nt, Homo sapiens
  misc_RNA (1)...(19): siRNA sense strand
gcuuucgaguauggcauua

SEQ ID NO: 1153640 - RNA, 19 nt, Homo sapiens
  misc_RNA (1)...(19): siRNA sense strand
aauaaacacggcacucguu

SEQ ID NO: 1153641 - RNA, 19 nt, Homo sapiens
  misc_RNA (1)...(19): siRNA sense strand
caaugauuaugacccaucu

SEQ ID NO: 1153642 - RNA, 19 nt, Homo sapiens
  misc_RNA (1)...(19): siRNA sense strand
caacaugugguaccugcau

SEQ ID NO: 1153643 - RNA, 19 nt, Homo sapiens
  misc_RNA (1)...(19): siRNA sense strand
gcaaagucgcugggcauca

SEQ ID NO: 1153644 - RNA, 19 nt, Homo sapiens
  misc_RNA (1)...(19): siRNA sense strand
ggugaaauggcuccagcaa

SEQ ID NO: 1153645 - RNA, 19 nt, Homo sapiens
  misc_RNA (1)...(19): siRNA sense strand
caaacaauuccuacugcau

SEQ ID NO: 1153646 - RNA, 19 nt, Homo sapiens
  misc_RNA (1)...(19): siRNA sense strand
uaucacagcaaaaccuuua

SEQ ID NO: 1153647 - RNA, 19 nt, Homo sapiens
  misc_RNA (1)...(19): siRNA sense strand
aacgaagggugaagagaca

SEQ ID NO: 1153648 - RNA, 19 nt, Homo sapiens
  misc_RNA (1)...(19): siRNA sense strand
gcaucagacccaacuacau

SEQ ID NO: 1153649 - RNA, 19 nt, Homo sapiens
  misc_RNA (1)...(19): siRNA sense strand
guacaaugccaaaauagga

SEQ ID NO: 1153650 - RNA, 19 nt, Homo sapiens
  misc_RNA (1)...(19): siRNA sense strand
gcaggcccuuuacuucaac

SEQ ID NO: 1153651 - RNA, 19 nt, Homo sapiens
  misc_RNA (1)...(19): siRNA sense strand
ccgcaggcccuuuacuuca

SEQ ID NO: 1153652 - RNA, 19 nt, Homo sapiens
  misc_RNA (1)...(19): siRNA sense strand
cgacgugaacggcaaugau

SEQ ID NO: 1153653 - RNA, 19 nt, Homo sapiens
  misc_RNA (1)...(19): siRNA sense strand
caccgagaauggcuacaag

SEQ ID NO: 1153654 - RNA, 19 nt, Homo sapiens
  misc_RNA (1)...(19): siRNA sense strand
cgugaacggcaaugauuau

SEQ ID NO: 1153655 - RNA, 19 nt, Homo sapiens
  misc_RNA (1)...(19): siRNA sense strand
gugacccgcaggcccuuua

SEQ ID NO: 1153656 - RNA, 19 nt, Homo sapiens
  misc_RNA (1)...(19): siRNA sense strand
ccuuggcucuagaagcaaa

SEQ ID NO: 1153657 - RNA, 19 nt, Homo sapiens
  misc_RNA (1)...(19): siRNA sense strand
gcaacaggaagugaaacga

SEQ ID NO: 1153658 - RNA, 19 nt, Homo sapiens
  misc_RNA (1)...(19): siRNA sense strand
ugcgauggcuacaccaaca

SEQ ID NO: 1153659 - RNA, 19 nt, Homo sapiens
  misc_RNA (1)...(19): siRNA sense strand
ccaccgagaauggcuacaa

SEQ ID NO: 1153660 - RNA, 19 nt, Homo sapiens
  misc_RNA (1)...(19): siRNA sense strand
ccaacuacaucgacauuua

SEQ ID NO: 1153661 - RNA, 19 nt, Homo sapiens
  misc_RNA (1)...(19): siRNA sense strand
uuggaaaccuggaagauua

SEQ ID NO: 1153662 - RNA, 19 nt, Homo sapiens
  misc_RNA (1)...(19): siRNA sense strand
ugaaauggcuccagcaaca

SEQ ID NO: 1153663 - RNA, 19 nt, Homo sapiens
  misc_RNA (1)...(19): siRNA sense strand
ggacggcgaugucacagau

SEQ ID NO: 1153664 - RNA, 19 nt, Homo sapiens
  misc_RNA (1)...(19): siRNA sense strand
gaagcaaacagccaguuaa

SEQ ID NO: 1153665 - RNA, 19 nt, Homo sapiens
  misc_RNA (1)...(19): siRNA sense strand
gaacggcaaugauuaugac

SEQ ID NO: 1153666 - RNA, 19 nt, Homo sapiens
  misc_RNA (1)...(19): siRNA sense strand
gcgagcgacuggaaaguga

SEQ ID NO: 1153667 - RNA, 19 nt, Homo sapiens
  misc_RNA (1)...(19): siRNA sense strand
ccucacaccuuccucagaa

SEQ ID NO: 1153668 - RNA, 19 nt, Homo sapiens
  misc_RNA (1)...(19): siRNA sense strand
gauaugaugccagcaauga

SEQ ID NO: 1153669 - RNA, 19 nt, Homo sapiens
  misc_RNA (1)...(19): siRNA sense strand
ugacccaucuccacgauau

SEQ ID NO: 1153670 - RNA, 19 nt, Homo sapiens
  misc_RNA (1)...(19): siRNA sense strand
caacaggaagugaaacgaa

SEQ ID NO: 1153671 - RNA, 19 nt, Homo sapiens
  misc_RNA (1)...(19): siRNA sense strand
gaaagcgagcgacuggaaa

SEQ ID NO: 1153672 - RNA, 19 nt, Homo sapiens
  misc_RNA (1)...(19): siRNA sense strand
gcaaacagccaguuaaccu

SEQ ID NO: 1153673 - RNA, 19 nt, Homo sapiens
  misc_RNA (1)...(19): siRNA sense strand
agagacaggugcgaaguga

SEQ ID NO: 1153674 - RNA, 19 nt, Homo sapiens
  misc_RNA (1)...(19): siRNA sense strand
gacgugaacggcaaugauu

SEQ ID NO: 1153675 - RNA, 19 nt, Homo sapiens
  misc_RNA (1)...(19): siRNA sense strand
gaugauggcauagagagaa

SEQ ID NO: 1153676 - RNA, 19 nt, Homo sapiens
  misc_RNA (1)...(19): siRNA sense strand
cagauguggucgaggcaaa

SEQ ID NO: 1153677 - RNA, 19 nt, Homo sapiens
  misc_RNA (1)...(19): siRNA sense strand
agaagcaaacagccaguua

SEQ ID NO: 1153678 - RNA, 19 nt, Homo sapiens
  misc_RNA (1)...(19): siRNA sense strand
caaagucgcugggcaucag

SEQ ID NO: 1153679 - RNA, 19 nt, Homo sapiens
  misc_RNA (1)...(19): siRNA sense strand
gaaacgaagggugaagaga

SEQ ID NO: 1153680 - RNA, 19 nt, Homo sapiens
  misc_RNA (1)...(19): siRNA sense strand
caucagacccaacuacauc

SEQ ID NO: 1153681 - RNA, 19 nt, Homo sapiens
  misc_RNA (1)...(19): siRNA sense strand
ugaaagcgagcgacuggaa

SEQ ID NO: 1153682 - RNA, 19 nt, Homo sapiens
  misc_RNA (1)...(19): siRNA sense strand
gaagagacaggugcgaagu

SEQ ID NO: 1153683 - RNA, 19 nt, Homo sapiens
  misc_RNA (1)...(19): siRNA sense strand
caucaucgccuuggcucua

SEQ ID NO: 1153684 - RNA, 19 nt, Homo sapiens
  misc_RNA (1)...(19): siRNA sense strand
ccuggaagauuacuaccau

SEQ ID NO: 1153685 - RNA, 19 nt, Homo sapiens
  misc_RNA (1)...(19): siRNA sense strand
uuucgaguauggcauuaaa

SEQ ID NO: 1153686 - RNA, 19 nt, Homo sapiens
  misc_RNA (1)...(19): siRNA sense strand
uaugaugccagcaaugaaa

SEQ ID NO: 1153687 - RNA, 19 nt, Homo sapiens
  misc_RNA (1)...(19): siRNA sense strand
gaaaccuggaagauuacua

SEQ ID NO: 1153688 - RNA, 19 nt, Homo sapiens
  misc_RNA (1)...(19): siRNA sense strand
cgccuuggcucuagaagca

SEQ ID NO: 1153689 - RNA, 19 nt, Homo sapiens
  misc_RNA (1)...(19): siRNA sense strand
gcaguggggccuuuuauga

SEQ ID NO: 1153690 - RNA, 19 nt, Homo sapiens
  misc_RNA (1)...(19): siRNA sense strand
uggaagauuacuaccauuu

SEQ ID NO: 1153691 - RNA, 19 nt, Homo sapiens
  misc_RNA (1)...(19): siRNA sense strand
cagcaaacaauuccuacug

SEQ ID NO: 1153692 - RNA, 19 nt, Homo sapiens
  misc_RNA (1)...(19): siRNA sense strand
cagcagcgccaccgagaau

SEQ ID NO: 1153693 - RNA, 19 nt, Homo sapiens
  misc_RNA (1)...(19): siRNA sense strand
ugaacggcaaugauuauga

SEQ ID NO: 1153694 - RNA, 19 nt, Homo sapiens
  misc_RNA (1)...(19): siRNA sense strand
caacuacaucgacauuuac

SEQ ID NO: 1153695 - RNA, 19 nt, Homo sapiens
  misc_RNA (1)...(19): siRNA sense strand
aaacacggcacucguugug

SEQ ID NO: 1153696 - RNA, 19 nt, Homo sapiens
  misc_RNA (1)...(19): siRNA sense strand
ggaagauuacuaccauuuu

SEQ ID NO: 1153697 - RNA, 19 nt, Homo sapiens
  misc_RNA (1)...(19): siRNA sense strand
caacuugggccagauugga

SEQ ID NO: 1153698 - RNA, 19 nt, Homo sapiens
  misc_RNA (1)...(19): siRNA sense strand
gaucugcgucagcgcugua

SEQ ID NO: 1153699 - RNA, 19 nt, Homo sapiens
  misc_RNA (1)...(19): siRNA sense strand
cgcaggcccuuuacuucaa

SEQ ID NO: 1153700 - RNA, 19 nt, Homo sapiens
  misc_RNA (1)...(19): siRNA sense strand
ccaacagcaucuacaccau

SEQ ID NO: 1153701 - RNA, 19 nt, Homo sapiens
  misc_RNA (1)...(19): siRNA sense strand
cuacaucgacauuuacagu

SEQ ID NO: 1153702 - RNA, 19 nt, Homo sapiens
  misc_RNA (1)...(19): siRNA sense strand
ccagcaacaggaagugaaa

SEQ ID NO: 1153703 - RNA, 19 nt, Homo sapiens
  misc_RNA (1)...(19): siRNA sense strand
gcuuucgaguauggcauua

SEQ ID NO: 1153704 - RNA, 19 nt, Homo sapiens
  misc_RNA (1)...(19): siRNA sense strand
aauaaacacggcacucguu

SEQ ID NO: 1153705 - RNA, 19 nt, Homo sapiens
  misc_RNA (1)...(19): siRNA sense strand
caaugauuaugacccaucu

SEQ ID NO: 1153706 - RNA, 19 nt, Homo sapiens
  misc_RNA (1)...(19): siRNA sense strand
caacaugugguaccugcau

SEQ ID NO: 1153707 - RNA, 19 nt, Homo sapiens
  misc_RNA (1)...(19): siRNA sense strand
gcaaagucgcugggcauca

SEQ ID NO: 1153708 - RNA, 19 nt, Homo sapiens
  misc_RNA (1)...(19): siRNA sense strand
ggugaaauggcuccagcaa

SEQ ID NO: 1153709 - RNA, 19 nt, Homo sapiens
  misc_RNA (1)...(19): siRNA sense strand
caaacaauuccuacugcau

SEQ ID NO: 1153710 - RNA, 19 nt, Homo sapiens
  misc_RNA (1)...(19): siRNA sense strand
uaucacagcaaaaccuuua

SEQ ID NO: 1153711 - RNA, 19 nt, Homo sapiens
  misc_RNA (1)...(19): siRNA sense strand
aacgaagggugaagagaca

SEQ ID NO: 1153712 - RNA, 19 nt, Homo sapiens
  misc_RNA (1)...(19): siRNA sense strand
gcaucagacccaacuacau

SEQ ID NO: 1153713 - RNA, 19 nt, Homo sapiens
  misc_RNA (1)...(19): siRNA sense strand
guacaaugccaaaauagga

SEQ ID NO: 1153714 - RNA, 19 nt, Homo sapiens
  misc_RNA (1)...(19): siRNA sense strand
gcaggcccuuuacuucaac

SEQ ID NO: 1153715 - RNA, 19 nt, Homo sapiens
  misc_RNA (1)...(19): siRNA sense strand
ccgcaggcccuuuacuuca

SEQ ID NO: 1153716 - RNA, 19 nt, Homo sapiens
  misc_RNA (1)...(19): siRNA sense strand
cgacgugaacggcaaugau

SEQ ID NO: 1153717 - RNA, 19 nt, Homo sapiens
  misc_RNA (1)...(19): siRNA sense strand
caccgagaauggcuacaag

SEQ ID NO: 1153718 - RNA, 19 nt, Homo sapiens
  misc_RNA (1)...(19): siRNA sense strand
cgugaacggcaaugauuau

SEQ ID NO: 1153719 - RNA, 19 nt, Homo sapiens
  misc_RNA (1)...(19): siRNA sense strand
gugacccgcaggcccuuua

SEQ ID NO: 1153720 - RNA, 19 nt, Homo sapiens
  misc_RNA (1)...(19): siRNA sense strand
ccuuggcucuagaagcaaa

SEQ ID NO: 1153721 - RNA, 19 nt, Homo sapiens
  misc_RNA (1)...(19): siRNA sense strand
gcaacaggaagugaaacga

SEQ ID NO: 1153722 - RNA, 19 nt, Homo sapiens
  misc_RNA (1)...(19): siRNA sense strand
ugcgauggcuacaccaaca

SEQ ID NO: 1153723 - RNA, 19 nt, Homo sapiens
  misc_RNA (1)...(19): siRNA sense strand
ccaccgagaauggcuacaa

SEQ ID NO: 1153724 - RNA, 19 nt, Homo sapiens
  misc_RNA (1)...(19): siRNA sense strand
ccaacuacaucgacauuua

SEQ ID NO: 1153725 - RNA, 19 nt, Homo sapiens
  misc_RNA (1)...(19): siRNA sense strand
uuggaaaccuggaagauua

SEQ ID NO: 1153726 - RNA, 19 nt, Homo sapiens
  misc_RNA (1)...(19): siRNA sense strand
ugaaauggcuccagcaaca

SEQ ID NO: 1153727 - RNA, 19 nt, Homo sapiens
  misc_RNA (1)...(19): siRNA sense strand
ggacggcgaugucacagau

SEQ ID NO: 1153728 - RNA, 19 nt, Homo sapiens
  misc_RNA (1)...(19): siRNA sense strand
gaagcaaacagccaguuaa

SEQ ID NO: 1153729 - RNA, 19 nt, Homo sapiens
  misc_RNA (1)...(19): siRNA sense strand
gaacggcaaugauuaugac

SEQ ID NO: 1153730 - RNA, 19 nt, Homo sapiens
  misc_RNA (1)...(19): siRNA sense strand
gcgagcgacuggaaaguga

SEQ ID NO: 1153731 - RNA, 19 nt, Homo sapiens
  misc_RNA (1)...(19): siRNA sense strand
ccucacaccuuccucagaa

SEQ ID NO: 1153732 - RNA, 19 nt, Homo sapiens
  misc_RNA (1)...(19): siRNA sense strand
gauaugaugccagcaauga

SEQ ID NO: 1153733 - RNA, 19 nt, Homo sapiens
  misc_RNA (1)...(19): siRNA sense strand
ugacccaucuccacgauau

SEQ ID NO: 1153734 - RNA, 19 nt, Homo sapiens
  misc_RNA (1)...(19): siRNA sense strand
caacaggaagugaaacgaa

SEQ ID NO: 1153735 - RNA, 19 nt, Homo sapiens
  misc_RNA (1)...(19): siRNA sense strand
gaaagcgagcgacuggaaa

SEQ ID NO: 1153736 - RNA, 19 nt, Homo sapiens
  misc_RNA (1)...(19): siRNA sense strand
gcaaacagccaguuaaccu

SEQ ID NO: 1153737 - RNA, 19 nt, Homo sapiens
  misc_RNA (1)...(19): siRNA sense strand
agagacaggugcgaaguga

SEQ ID NO: 1153738 - RNA, 19 nt, Homo sapiens
  misc_RNA (1)...(19): siRNA sense strand
gacgugaacggcaaugauu

SEQ ID NO: 1153739 - RNA, 19 nt, Homo sapiens
  misc_RNA (1)...(19): siRNA sense strand
gaugauggcauagagagaa

SEQ ID NO: 1153740 - RNA, 19 nt, Homo sapiens
  misc_RNA (1)...(19): siRNA sense strand
cagauguggucgaggcaaa

SEQ ID NO: 1153741 - RNA, 19 nt, Homo sapiens
  misc_RNA (1)...(19): siRNA sense strand
agaagcaaacagccaguua

SEQ ID NO: 1153742 - RNA, 19 nt, Homo sapiens
  misc_RNA (1)...(19): siRNA sense strand
caaagucgcugggcaucag

SEQ ID NO: 1153743 - RNA, 19 nt, Homo sapiens
  misc_RNA (1)...(19): siRNA sense strand
gaaacgaagggugaagaga

SEQ ID NO: 1153744 - RNA, 19 nt, Homo sapiens
  misc_RNA (1)...(19): siRNA sense strand
caucagacccaacuacauc

SEQ ID NO: 1153745 - RNA, 19 nt, Homo sapiens
  misc_RNA (1)...(19): siRNA sense strand
ugaaagcgagcgacuggaa

SEQ ID NO: 1153746 - RNA, 19 nt, Homo sapiens
  misc_RNA (1)...(19): siRNA sense strand
gaagagacaggugcgaagu

SEQ ID NO: 1153747 - RNA, 19 nt, Homo sapiens
  misc_RNA (1)...(19): siRNA sense strand
caucaucgccuuggcucua

SEQ ID NO: 1153748 - RNA, 19 nt, Homo sapiens
  misc_RNA (1)...(19): siRNA sense strand
ccuggaagauuacuaccau

SEQ ID NO: 1153749 - RNA, 19 nt, Homo sapiens
  misc_RNA (1)...(19): siRNA sense strand
uuucgaguauggcauuaaa

SEQ ID NO: 1153750 - RNA, 19 nt, Homo sapiens
  misc_RNA (1)...(19): siRNA sense strand
uaugaugccagcaaugaaa

SEQ ID NO: 1153751 - RNA, 19 nt, Homo sapiens
  misc_RNA (1)...(19): siRNA sense strand
gaaaccuggaagauuacua

SEQ ID NO: 1153752 - RNA, 19 nt, Homo sapiens
  misc_RNA (1)...(19): siRNA sense strand
cgccuuggcucuagaagca

SEQ ID NO: 1153753 - RNA, 19 nt, Homo sapiens
  misc_RNA (1)...(19): siRNA sense strand
gcaguggggccuuuuauga

SEQ ID NO: 1153754 - RNA, 19 nt, Homo sapiens
  misc_RNA (1)...(19): siRNA sense strand
uggaagauuacuaccauuu

SEQ ID NO: 1153755 - RNA, 19 nt, Homo sapiens
  misc_RNA (1)...(19): siRNA sense strand
cagcaaacaauuccuacug

SEQ ID NO: 1153756 - RNA, 19 nt, Homo sapiens
  misc_RNA (1)...(19): siRNA sense strand
cagcagcgccaccgagaau

SEQ ID NO: 1153757 - RNA, 19 nt, Homo sapiens
  misc_RNA (1)...(19): siRNA sense strand
ugaacggcaaugauuauga

SEQ ID NO: 1153758 - RNA, 19 nt, Homo sapiens
  misc_RNA (1)...(19): siRNA sense strand
caacuacaucgacauuuac

SEQ ID NO: 1153759 - RNA, 19 nt, Homo sapiens
  misc_RNA (1)...(19): siRNA sense strand
aaacacggcacucguugug

SEQ ID NO: 1153760 - RNA, 19 nt, Homo sapiens
  misc_RNA (1)...(19): siRNA sense strand
ggaagauuacuaccauuuu

SEQ ID NO: 1153761 - RNA, 19 nt, Homo sapiens
  misc_RNA (1)...(19): siRNA sense strand
caacuugggccagauugga

SEQ ID NO: 1153762 - RNA, 19 nt, Homo sapiens
  misc_RNA (1)...(19): siRNA sense strand
gaucugcgucagcgcugua

SEQ ID NO: 1153763 - RNA, 19 nt, Homo sapiens
  misc_RNA (1)...(19): siRNA sense strand
cgcaggcccuuuacuucaa

SEQ ID NO: 1153764 - RNA, 19 nt, Homo sapiens
  misc_RNA (1)...(19): siRNA sense strand
ccaacagcaucuacaccau

SEQ ID NO: 1153765 - RNA, 19 nt, Homo sapiens
  misc_RNA (1)...(19): siRNA sense strand
cuacaucgacauuuacagu

SEQ ID NO: 1153766 - RNA, 19 nt, Homo sapiens
  misc_RNA (1)...(19): siRNA sense strand
ccagcaacaggaagugaaa

SEQ ID NO: 1153767 - RNA, 19 nt, Homo sapiens
  misc_RNA (1)...(19): siRNA sense strand
gcuuucgaguauggcauua

SEQ ID NO: 1153768 - RNA, 19 nt, Homo sapiens
  misc_RNA (1)...(19): siRNA sense strand
aauaaacacggcacucguu

SEQ ID NO: 1153769 - RNA, 19 nt, Homo sapiens
  misc_RNA (1)...(19): siRNA sense strand
caaugauuaugacccaucu

SEQ ID NO: 1153770 - RNA, 19 nt, Homo sapiens
  misc_RNA (1)...(19): siRNA sense strand
caacaugugguaccugcau

SEQ ID NO: 1153771 - RNA, 19 nt, Homo sapiens
  misc_RNA (1)...(19): siRNA sense strand
gcaaagucgcugggcauca

SEQ ID NO: 1153772 - RNA, 19 nt, Homo sapiens
  misc_RNA (1)...(19): siRNA sense strand
ggugaaauggcuccagcaa

SEQ ID NO: 1153773 - RNA, 19 nt, Homo sapiens
  misc_RNA (1)...(19): siRNA sense strand
caaacaauuccuacugcau

SEQ ID NO: 1153774 - RNA, 19 nt, Homo sapiens
  misc_RNA (1)...(19): siRNA sense strand
uaucacagcaaaaccuuua

SEQ ID NO: 1153775 - RNA, 19 nt, Homo sapiens
  misc_RNA (1)...(19): siRNA sense strand
aacgaagggugaagagaca

SEQ ID NO: 1153776 - RNA, 19 nt, Homo sapiens
  misc_RNA (1)...(19): siRNA sense strand
gcaucagacccaacuacau

SEQ ID NO: 1153777 - RNA, 19 nt, Homo sapiens
  misc_RNA (1)...(19): siRNA sense strand
guacaaugccaaaauagga

SEQ ID NO: 1153778 - RNA, 19 nt, Homo sapiens
  misc_RNA (1)...(19): siRNA sense strand
gcaggcccuuuacuucaac

SEQ ID NO: 1153779 - RNA, 19 nt, Homo sapiens
  misc_RNA (1)...(19): siRNA sense strand
ccgcaggcccuuuacuuca

SEQ ID NO: 1153780 - RNA, 19 nt, Homo sapiens
  misc_RNA (1)...(19): siRNA sense strand
cgacgugaacggcaaugau

SEQ ID NO: 1153781 - RNA, 19 nt, Homo sapiens
  misc_RNA (1)...(19): siRNA sense strand
caccgagaauggcuacaag

SEQ ID NO: 1153782 - RNA, 19 nt, Homo sapiens
  misc_RNA (1)...(19): siRNA sense strand
cgugaacggcaaugauuau

SEQ ID NO: 1153783 - RNA, 19 nt, Homo sapiens
  misc_RNA (1)...(19): siRNA sense strand
gugacccgcaggcccuuua

SEQ ID NO: 1153784 - RNA, 19 nt, Homo sapiens
  misc_RNA (1)...(19): siRNA sense strand
ccuuggcucuagaagcaaa

SEQ ID NO: 1153785 - RNA, 19 nt, Homo sapiens
  misc_RNA (1)...(19): siRNA sense strand
gcaacaggaagugaaacga

SEQ ID NO: 1153786 - RNA, 19 nt, Homo sapiens
  misc_RNA (1)...(19): siRNA sense strand
ugcgauggcuacaccaaca

SEQ ID NO: 1153787 - RNA, 19 nt, Homo sapiens
  misc_RNA (1)...(19): siRNA sense strand
ccaccgagaauggcuacaa

SEQ ID NO: 1153788 - RNA, 19 nt, Homo sapiens
  misc_RNA (1)...(19): siRNA sense strand
ccaacuacaucgacauuua

SEQ ID NO: 1153789 - RNA, 19 nt, Homo sapiens
  misc_RNA (1)...(19): siRNA sense strand
uuggaaaccuggaagauua

SEQ ID NO: 1153790 - RNA, 19 nt, Homo sapiens
  misc_RNA (1)...(19): siRNA sense strand
ugaaauggcuccagcaaca

SEQ ID NO: 1153791 - RNA, 19 nt, Homo sapiens
  misc_RNA (1)...(19): siRNA sense strand
ggacggcgaugucacagau

SEQ ID NO: 1153792 - RNA, 19 nt, Homo sapiens
  misc_RNA (1)...(19): siRNA sense strand
gaagcaaacagccaguuaa

SEQ ID NO: 1153793 - RNA, 19 nt, Homo sapiens
  misc_RNA (1)...(19): siRNA sense strand
gaacggcaaugauuaugac

SEQ ID NO: 1153794 - RNA, 19 nt, Homo sapiens
  misc_RNA (1)...(19): siRNA sense strand
gcgagcgacuggaaaguga

SEQ ID NO: 1153795 - RNA, 19 nt, Homo sapiens
  misc_RNA (1)...(19): siRNA sense strand
ccucacaccuuccucagaa

SEQ ID NO: 1153796 - RNA, 19 nt, Homo sapiens
  misc_RNA (1)...(19): siRNA sense strand
gauaugaugccagcaauga

SEQ ID NO: 1153797 - RNA, 19 nt, Homo sapiens
  misc_RNA (1)...(19): siRNA sense strand
ugacccaucuccacgauau

SEQ ID NO: 1153798 - RNA, 19 nt, Homo sapiens
  misc_RNA (1)...(19): siRNA sense strand
caacaggaagugaaacgaa

SEQ ID NO: 1153799 - RNA, 19 nt, Homo sapiens
  misc_RNA (1)...(19): siRNA sense strand
gaaagcgagcgacuggaaa

SEQ ID NO: 1153800 - RNA, 19 nt, Homo sapiens
  misc_RNA (1)...(19): siRNA sense strand
gcaaacagccaguuaaccu

SEQ ID NO: 1153801 - RNA, 19 nt, Homo sapiens
  misc_RNA (1)...(19): siRNA sense strand
agagacaggugcgaaguga

SEQ ID NO: 1153802 - RNA, 19 nt, Homo sapiens
  misc_RNA (1)...(19): siRNA sense strand
gacgugaacggcaaugauu

SEQ ID NO: 1153803 - RNA, 19 nt, Homo sapiens
  misc_RNA (1)...(19): siRNA sense strand
gaugauggcauagagagaa

SEQ ID NO: 1153804 - RNA, 19 nt, Homo sapiens
  misc_RNA (1)...(19): siRNA sense strand
cagauguggucgaggcaaa

SEQ ID NO: 1153805 - RNA, 19 nt, Homo sapiens
  misc_RNA (1)...(19): siRNA sense strand
agaagcaaacagccaguua

SEQ ID NO: 1153806 - RNA, 19 nt, Homo sapiens
  misc_RNA (1)...(19): siRNA sense strand
caaagucgcugggcaucag

SEQ ID NO: 1153807 - RNA, 19 nt, Homo sapiens
  misc_RNA (1)...(19): siRNA sense strand
gaaacgaagggugaagaga

SEQ ID NO: 1153808 - RNA, 19 nt, Homo sapiens
  misc_RNA (1)...(19): siRNA sense strand
caucagacccaacuacauc

SEQ ID NO: 1153809 - RNA, 19 nt, Homo sapiens
  misc_RNA (1)...(19): siRNA sense strand
ugaaagcgagcgacuggaa

SEQ ID NO: 1153810 - RNA, 19 nt, Homo sapiens
  misc_RNA (1)...(19): siRNA sense strand
gaagagacaggugcgaagu

SEQ ID NO: 1153811 - RNA, 19 nt, Homo sapiens
  misc_RNA (1)...(19): siRNA sense strand
caucaucgccuuggcucua

SEQ ID NO: 1153812 - RNA, 19 nt, Homo sapiens
  misc_RNA (1)...(19): siRNA sense strand
ccuggaagauuacuaccau

SEQ ID NO: 1153813 - RNA, 19 nt, Homo sapiens
  misc_RNA (1)...(19): siRNA sense strand
uuucgaguauggcauuaaa

SEQ ID NO: 1153814 - RNA, 19 nt, Homo sapiens
  misc_RNA (1)...(19): siRNA sense strand
uaugaugccagcaaugaaa

SEQ ID NO: 1153815 - RNA, 19 nt, Homo sapiens
  misc_RNA (1)...(19): siRNA sense strand
gaaaccuggaagauuacua

SEQ ID NO: 1153816 - RNA, 19 nt, Homo sapiens
  misc_RNA (1)...(19): siRNA sense strand
cgccuuggcucuagaagca

SEQ ID NO: 1153817 - RNA, 19 nt, Homo sapiens
  misc_RNA (1)...(19): siRNA sense strand
gcaguggggccuuuuauga

SEQ ID NO: 1153818 - RNA, 19 nt, Homo sapiens
  misc_RNA (1)...(19): siRNA sense strand
uggaagauuacuaccauuu

SEQ ID NO: 1153819 - RNA, 19 nt, Homo sapiens
  misc_RNA (1)...(19): siRNA sense strand
cagcaaacaauuccuacug

SEQ ID NO: 1153820 - RNA, 19 nt, Homo sapiens
  misc_RNA (1)...(19): siRNA sense strand
cagcagcgccaccgagaau

SEQ ID NO: 1153821 - RNA, 19 nt, Homo sapiens
  misc_RNA (1)...(19): siRNA sense strand
ugaacggcaaugauuauga

SEQ ID NO: 1153822 - RNA, 19 nt, Homo sapiens
  misc_RNA (1)...(19): siRNA sense strand
caacuacaucgacauuuac

SEQ ID NO: 1153823 - RNA, 19 nt, Homo sapiens
  misc_RNA (1)...(19): siRNA sense strand
aaacacggcacucguugug

SEQ ID NO: 1153824 - RNA, 19 nt, Homo sapiens
  misc_RNA (1)...(19): siRNA sense strand
ggaagauuacuaccauuuu

SEQ ID NO: 1153825 - RNA, 19 nt, Homo sapiens
  misc_RNA (1)...(19): siRNA sense strand
caacuugggccagauugga

SEQ ID NO: 1153826 - RNA, 19 nt, Homo sapiens
  misc_RNA (1)...(19): siRNA sense strand
gaucugcgucagcgcugua

SEQ ID NO: 1153827 - RNA, 19 nt, Homo sapiens
  misc_RNA (1)...(19): siRNA sense strand
cgcaggcccuuuacuucaa

SEQ ID NO: 1153828 - RNA, 19 nt, Homo sapiens
  misc_RNA (1)...(19): siRNA sense strand
ccaacagcaucuacaccau

SEQ ID NO: 1153829 - RNA, 19 nt, Homo sapiens
  misc_RNA (1)...(19): siRNA sense strand
cuacaucgacauuuacagu

SEQ ID NO: 1153830 - RNA, 19 nt, Homo sapiens
  misc_RNA (1)...(19): siRNA sense strand
ccagcaacaggaagugaaa

SEQ ID NO: 1153831 - RNA, 19 nt, Homo sapiens
  misc_RNA (1)...(19): siRNA sense strand
gcuuucgaguauggcauua

SEQ ID NO: 1153832 - RNA, 19 nt, Homo sapiens
  misc_RNA (1)...(19): siRNA sense strand
aauaaacacggcacucguu

SEQ ID NO: 1153833 - RNA, 19 nt, Homo sapiens
  misc_RNA (1)...(19): siRNA sense strand
caaugauuaugacccaucu

SEQ ID NO: 1153834 - RNA, 19 nt, Homo sapiens
  misc_RNA (1)...(19): siRNA sense strand
caacaugugguaccugcau

SEQ ID NO: 1153835 - RNA, 19 nt, Homo sapiens
  misc_RNA (1)...(19): siRNA sense strand
gcaaagucgcugggcauca

SEQ ID NO: 1153836 - RNA, 19 nt, Homo sapiens
  misc_RNA (1)...(19): siRNA sense strand
ggugaaauggcuccagcaa

SEQ ID NO: 1153837 - RNA, 19 nt, Homo sapiens
  misc_RNA (1)...(19): siRNA sense strand
caaacaauuccuacugcau

SEQ ID NO: 1153838 - RNA, 19 nt, Homo sapiens
  misc_RNA (1)...(19): siRNA sense strand
uaucacagcaaaaccuuua

SEQ ID NO: 1153839 - RNA, 19 nt, Homo sapiens
  misc_RNA (1)...(19): siRNA sense strand
aacgaagggugaagagaca

SEQ ID NO: 1153840 - RNA, 19 nt, Homo sapiens
  misc_RNA (1)...(19): siRNA sense strand
gcaucagacccaacuacau

SEQ ID NO: 1153841 - RNA, 19 nt, Homo sapiens
  misc_RNA (1)...(19): siRNA sense strand
guacaaugccaaaauagga

SEQ ID NO: 1153842 - RNA, 19 nt, Homo sapiens
  misc_RNA (1)...(19): siRNA sense strand
gcaggcccuuuacuucaac

SEQ ID NO: 1153843 - RNA, 19 nt, Homo sapiens
  misc_RNA (1)...(19): siRNA sense strand
ccgcaggcccuuuacuuca

SEQ ID NO: 1153844 - RNA, 19 nt, Homo sapiens
  misc_RNA (1)...(19): siRNA sense strand
cgacgugaacggcaaugau

SEQ ID NO: 1153845 - RNA, 19 nt, Homo sapiens
  misc_RNA (1)...(19): siRNA sense strand
caccgagaauggcuacaag

SEQ ID NO: 1153846 - RNA, 19 nt, Homo sapiens
  misc_RNA (1)...(19): siRNA sense strand
cgugaacggcaaugauuau

SEQ ID NO: 1153847 - RNA, 19 nt, Homo sapiens
  misc_RNA (1)...(19): siRNA sense strand
gugacccgcaggcccuuua

SEQ ID NO: 1153848 - RNA, 19 nt, Homo sapiens
  misc_RNA (1)...(19): siRNA sense strand
ccuuggcucuagaagcaaa

SEQ ID NO: 1153849 - RNA, 19 nt, Homo sapiens
  misc_RNA (1)...(19): siRNA sense strand
gcaacaggaagugaaacga

SEQ ID NO: 1153850 - RNA, 19 nt, Homo sapiens
  misc_RNA (1)...(19): siRNA sense strand
ugcgauggcuacaccaaca

SEQ ID NO: 1153851 - RNA, 19 nt, Homo sapiens
  misc_RNA (1)...(19): siRNA sense strand
ccaccgagaauggcuacaa

SEQ ID NO: 1153852 - RNA, 19 nt, Homo sapiens
  misc_RNA (1)...(19): siRNA sense strand
ccaacuacaucgacauuua

SEQ ID NO: 1153853 - RNA, 19 nt, Homo sapiens
  misc_RNA (1)...(19): siRNA sense strand
uuggaaaccuggaagauua

SEQ ID NO: 1153854 - RNA, 19 nt, Homo sapiens
  misc_RNA (1)...(19): siRNA sense strand
ugaaauggcuccagcaaca

SEQ ID NO: 1153855 - RNA, 19 nt, Homo sapiens
  misc_RNA (1)...(19): siRNA sense strand
ggacggcgaugucacagau

SEQ ID NO: 1153856 - RNA, 19 nt, Homo sapiens
  misc_RNA (1)...(19): siRNA sense strand
gaagcaaacagccaguuaa

SEQ ID NO: 1153857 - RNA, 19 nt, Homo sapiens
  misc_RNA (1)...(19): siRNA sense strand
gaacggcaaugauuaugac

SEQ ID NO: 1153858 - RNA, 19 nt, Homo sapiens
  misc_RNA (1)...(19): siRNA sense strand
gcgagcgacuggaaaguga

SEQ ID NO: 1153859 - RNA, 19 nt, Homo sapiens
  misc_RNA (1)...(19): siRNA sense strand
ccucacaccuuccucagaa

SEQ ID NO: 1153860 - RNA, 19 nt, Homo sapiens
  misc_RNA (1)...(19): siRNA sense strand
gauaugaugccagcaauga

SEQ ID NO: 1153861 - RNA, 19 nt, Homo sapiens
  misc_RNA (1)...(19): siRNA sense strand
ugacccaucuccacgauau

SEQ ID NO: 1153862 - RNA, 19 nt, Homo sapiens
  misc_RNA (1)...(19): siRNA sense strand
caacaggaagugaaacgaa

SEQ ID NO: 1153863 - RNA, 19 nt, Homo sapiens
  misc_RNA (1)...(19): siRNA sense strand
gaaagcgagcgacuggaaa

SEQ ID NO: 1153864 - RNA, 19 nt, Homo sapiens
  misc_RNA (1)...(19): siRNA sense strand
gcaaacagccaguuaaccu

SEQ ID NO: 1153865 - RNA, 19 nt, Homo sapiens
  misc_RNA (1)...(19): siRNA sense strand
agagacaggugcgaaguga

SEQ ID NO: 1153866 - RNA, 19 nt, Homo sapiens
  misc_RNA (1)...(19): siRNA sense strand
gacgugaacggcaaugauu

SEQ ID NO: 1153867 - RNA, 19 nt, Homo sapiens
  misc_RNA (1)...(19): siRNA sense strand
gaugauggcauagagagaa

SEQ ID NO: 1153868 - RNA, 19 nt, Homo sapiens
  misc_RNA (1)...(19): siRNA sense strand
cagauguggucgaggcaaa

SEQ ID NO: 1153869 - RNA, 19 nt, Homo sapiens
  misc_RNA (1)...(19): siRNA sense strand
agaagcaaacagccaguua

SEQ ID NO: 1153870 - RNA, 19 nt, Homo sapiens
  misc_RNA (1)...(19): siRNA sense strand
caaagucgcugggcaucag

SEQ ID NO: 1153871 - RNA, 19 nt, Homo sapiens
  misc_RNA (1)...(19): siRNA sense strand
gaaacgaagggugaagaga

SEQ ID NO: 1153872 - RNA, 19 nt, Homo sapiens
  misc_RNA (1)...(19): siRNA sense strand
caucagacccaacuacauc

SEQ ID NO: 1153873 - RNA, 19 nt, Homo sapiens
  misc_RNA (1)...(19): siRNA sense strand
ugaaagcgagcgacuggaa

SEQ ID NO: 1153874 - RNA, 19 nt, Homo sapiens
  misc_RNA (1)...(19): siRNA sense strand
gaagagacaggugcgaagu

SEQ ID NO: 1153875 - RNA, 19 nt, Homo sapiens
  misc_RNA (1)...(19): siRNA sense strand
caucaucgccuuggcucua

SEQ ID NO: 1153876 - RNA, 19 nt, Homo sapiens
  misc_RNA (1)...(19): siRNA sense strand
ccuggaagauuacuaccau

SEQ ID NO: 1153877 - RNA, 19 nt, Homo sapiens
  misc_RNA (1)...(19): siRNA sense strand
uuucgaguauggcauuaaa

SEQ ID NO: 1153878 - RNA, 19 nt, Homo sapiens
  misc_RNA (1)...(19): siRNA sense strand
uaugaugccagcaaugaaa

SEQ ID NO: 1153879 - RNA, 19 nt, Homo sapiens
  misc_RNA (1)...(19): siRNA sense strand
gaaaccuggaagauuacua

SEQ ID NO: 1153880 - RNA, 19 nt, Homo sapiens
  misc_RNA (1)...(19): siRNA sense strand
cgccuuggcucuagaagca

SEQ ID NO: 1153881 - RNA, 19 nt, Homo sapiens
  misc_RNA (1)...(19): siRNA sense strand
gcaguggggccuuuuauga

SEQ ID NO: 1153882 - RNA, 19 nt, Homo sapiens
  misc_RNA (1)...(19): siRNA sense strand
uggaagauuacuaccauuu

SEQ ID NO: 1153883 - RNA, 19 nt, Homo sapiens
  misc_RNA (1)...(19): siRNA sense strand
cagcaaacaauuccuacug

SEQ ID NO: 1153884 - RNA, 19 nt, Homo sapiens
  misc_RNA (1)...(19): siRNA sense strand
cagcagcgccaccgagaau

SEQ ID NO: 1153885 - RNA, 19 nt, Homo sapiens
  misc_RNA (1)...(19): siRNA sense strand
ugaacggcaaugauuauga

SEQ ID NO: 1153886 - RNA, 19 nt, Homo sapiens
  misc_RNA (1)...(19): siRNA sense strand
caacuacaucgacauuuac

SEQ ID NO: 1153887 - RNA, 19 nt, Homo sapiens
  misc_RNA (1)...(19): siRNA sense strand
aaacacggcacucguugug

SEQ ID NO: 1153888 - RNA, 19 nt, Homo sapiens
  misc_RNA (1)...(19): siRNA sense strand
ggaagauuacuaccauuuu

SEQ ID NO: 1153889 - RNA, 19 nt, Homo sapiens
  misc_RNA (1)...(19): siRNA sense strand
caacuugggccagauugga

SEQ ID NO: 1153890 - RNA, 19 nt, Homo sapiens
  misc_RNA (1)...(19): siRNA sense strand
gaucugcgucagcgcugua

SEQ ID NO: 1153891 - RNA, 19 nt, Homo sapiens
  misc_RNA (1)...(19): siRNA sense strand
cgcaggcccuuuacuucaa

SEQ ID NO: 1153892 - RNA, 19 nt, Homo sapiens
  misc_RNA (1)...(19): siRNA sense strand
ccaacagcaucuacaccau

SEQ ID NO: 1153893 - RNA, 19 nt, Homo sapiens
  misc_RNA (1)...(19): siRNA sense strand
cuacaucgacauuuacagu

SEQ ID NO: 1153894 - RNA, 19 nt, Homo sapiens
  misc_RNA (1)...(19): siRNA sense strand
ccagcaacaggaagugaaa

SEQ ID NO: 1153895 - RNA, 19 nt, Homo sapiens
  misc_RNA (1)...(19): siRNA sense strand
gcuuucgaguauggcauua

SEQ ID NO: 1153896 - RNA, 19 nt, Homo sapiens
  misc_RNA (1)...(19): siRNA sense strand
aauaaacacggcacucguu

SEQ ID NO: 1153897 - RNA, 19 nt, Homo sapiens
  misc_RNA (1)...(19): siRNA sense strand
caaugauuaugacccaucu

SEQ ID NO: 1153898 - RNA, 19 nt, Homo sapiens
  misc_RNA (1)...(19): siRNA sense strand
caacaugugguaccugcau

SEQ ID NO: 1153899 - RNA, 19 nt, Homo sapiens
  misc_RNA (1)...(19): siRNA sense strand
gcaaagucgcugggcauca

SEQ ID NO: 1153900 - RNA, 19 nt, Homo sapiens
  misc_RNA (1)...(19): siRNA sense strand
ggugaaauggcuccagcaa

SEQ ID NO: 1153901 - RNA, 19 nt, Homo sapiens
  misc_RNA (1)...(19): siRNA sense strand
caaacaauuccuacugcau

SEQ ID NO: 1153902 - RNA, 19 nt, Homo sapiens
  misc_RNA (1)...(19): siRNA sense strand
uaucacagcaaaaccuuua

SEQ ID NO: 1153903 - RNA, 19 nt, Homo sapiens
  misc_RNA (1)...(19): siRNA sense strand
aacgaagggugaagagaca

SEQ ID NO: 1153904 - RNA, 19 nt, Homo sapiens
  misc_RNA (1)...(19): siRNA sense strand
gcaucagacccaacuacau

SEQ ID NO: 1153905 - RNA, 19 nt, Homo sapiens
  misc_RNA (1)...(19): siRNA sense strand
guacaaugccaaaauagga

SEQ ID NO: 1153906 - RNA, 19 nt, Homo sapiens
  misc_RNA (1)...(19): siRNA sense strand
gcaggcccuuuacuucaac

SEQ ID NO: 1153907 - RNA, 19 nt, Homo sapiens
  misc_RNA (1)...(19): siRNA sense strand
ccgcaggcccuuuacuuca

SEQ ID NO: 1153908 - RNA, 19 nt, Homo sapiens
  misc_RNA (1)...(19): siRNA sense strand
cgacgugaacggcaaugau

SEQ ID NO: 1153909 - RNA, 19 nt, Homo sapiens
  misc_RNA (1)...(19): siRNA sense strand
caccgagaauggcuacaag

SEQ ID NO: 1153910 - RNA, 19 nt, Homo sapiens
  misc_RNA (1)...(19): siRNA sense strand
cgugaacggcaaugauuau

SEQ ID NO: 1153911 - RNA, 19 nt, Homo sapiens
  misc_RNA (1)...(19): siRNA sense strand
gugacccgcaggcccuuua

SEQ ID NO: 1153912 - RNA, 19 nt, Homo sapiens
  misc_RNA (1)...(19): siRNA sense strand
ccuuggcucuagaagcaaa

SEQ ID NO: 1153913 - RNA, 19 nt, Homo sapiens
  misc_RNA (1)...(19): siRNA sense strand
gcaacaggaagugaaacga

SEQ ID NO: 1153914 - RNA, 19 nt, Homo sapiens
  misc_RNA (1)...(19): siRNA sense strand
ugcgauggcuacaccaaca

SEQ ID NO: 1153915 - RNA, 19 nt, Homo sapiens
  misc_RNA (1)...(19): siRNA sense strand
ccaccgagaauggcuacaa

SEQ ID NO: 1153916 - RNA, 19 nt, Homo sapiens
  misc_RNA (1)...(19): siRNA sense strand
ccaacuacaucgacauuua

SEQ ID NO: 1153917 - RNA, 19 nt, Homo sapiens
  misc_RNA (1)...(19): siRNA sense strand
uuggaaaccuggaagauua

SEQ ID NO: 1153918 - RNA, 19 nt, Homo sapiens
  misc_RNA (1)...(19): siRNA sense strand
ugaaauggcuccagcaaca

SEQ ID NO: 1153919 - RNA, 19 nt, Homo sapiens
  misc_RNA (1)...(19): siRNA sense strand
ggacggcgaugucacagau

SEQ ID NO: 1153920 - RNA, 19 nt, Homo sapiens
  misc_RNA (1)...(19): siRNA sense strand
gaagcaaacagccaguuaa

SEQ ID NO: 1153921 - RNA, 19 nt, Homo sapiens
  misc_RNA (1)...(19): siRNA sense strand
gaacggcaaugauuaugac

SEQ ID NO: 1153922 - RNA, 19 nt, Homo sapiens
  misc_RNA (1)...(19): siRNA sense strand
gcgagcgacuggaaaguga

SEQ ID NO: 1153923 - RNA, 19 nt, Homo sapiens
  misc_RNA (1)...(19): siRNA sense strand
ccucacaccuuccucagaa

SEQ ID NO: 1153924 - RNA, 19 nt, Homo sapiens
  misc_RNA (1)...(19): siRNA sense strand
gauaugaugccagcaauga

SEQ ID NO: 1153925 - RNA, 19 nt, Homo sapiens
  misc_RNA (1)...(19): siRNA sense strand
ugacccaucuccacgauau

SEQ ID NO: 1153926 - RNA, 19 nt, Homo sapiens
  misc_RNA (1)...(19): siRNA sense strand
caacaggaagugaaacgaa

SEQ ID NO: 1153927 - RNA, 19 nt, Homo sapiens
  misc_RNA (1)...(19): siRNA sense strand
gaaagcgagcgacuggaaa

SEQ ID NO: 1153928 - RNA, 19 nt, Homo sapiens
  misc_RNA (1)...(19): siRNA sense strand
gcaaacagccaguuaaccu

SEQ ID NO: 1153929 - RNA, 19 nt, Homo sapiens
  misc_RNA (1)...(19): siRNA sense strand
agagacaggugcgaaguga

SEQ ID NO: 1153930 - RNA, 19 nt, Homo sapiens
  misc_RNA (1)...(19): siRNA sense strand
gacgugaacggcaaugauu

SEQ ID NO: 1153931 - RNA, 19 nt, Homo sapiens
  misc_RNA (1)...(19): siRNA sense strand
gaugauggcauagagagaa

SEQ ID NO: 1153932 - RNA, 19 nt, Homo sapiens
  misc_RNA (1)...(19): siRNA sense strand
cagauguggucgaggcaaa

SEQ ID NO: 1153933 - RNA, 19 nt, Homo sapiens
  misc_RNA (1)...(19): siRNA sense strand
agaagcaaacagccaguua

SEQ ID NO: 1153934 - RNA, 19 nt, Homo sapiens
  misc_RNA (1)...(19): siRNA sense strand
caaagucgcugggcaucag

SEQ ID NO: 1153935 - RNA, 19 nt, Homo sapiens
  misc_RNA (1)...(19): siRNA sense strand
gaaacgaagggugaagaga

SEQ ID NO: 1153936 - RNA, 19 nt, Homo sapiens
  misc_RNA (1)...(19): siRNA sense strand
caucagacccaacuacauc

SEQ ID NO: 1153937 - RNA, 19 nt, Homo sapiens
  misc_RNA (1)...(19): siRNA sense strand
ugaaagcgagcgacuggaa

SEQ ID NO: 1153938 - RNA, 19 nt, Homo sapiens
  misc_RNA (1)...(19): siRNA sense strand
gaagagacaggugcgaagu

SEQ ID NO: 1153939 - RNA, 19 nt, Homo sapiens
  misc_RNA (1)...(19): siRNA sense strand
caucaucgccuuggcucua

SEQ ID NO: 1153940 - RNA, 19 nt, Homo sapiens
  misc_RNA (1)...(19): siRNA sense strand
ccuggaagauuacuaccau

SEQ ID NO: 1153941 - RNA, 19 nt, Homo sapiens
  misc_RNA (1)...(19): siRNA sense strand
uuucgaguauggcauuaaa

SEQ ID NO: 1153942 - RNA, 19 nt, Homo sapiens
  misc_RNA (1)...(19): siRNA sense strand
uaugaugccagcaaugaaa

SEQ ID NO: 1153943 - RNA, 19 nt, Homo sapiens
  misc_RNA (1)...(19): siRNA sense strand
gaaaccuggaagauuacua

SEQ ID NO: 1153944 - RNA, 19 nt, Homo sapiens
  misc_RNA (1)...(19): siRNA sense strand
cgccuuggcucuagaagca

SEQ ID NO: 1153945 - RNA, 19 nt, Homo sapiens
  misc_RNA (1)...(19): siRNA sense strand
gcaguggggccuuuuauga

SEQ ID NO: 1153946 - RNA, 19 nt, Homo sapiens
  misc_RNA (1)...(19): siRNA sense strand
uggaagauuacuaccauuu

SEQ ID NO: 1153947 - RNA, 19 nt, Homo sapiens
  misc_RNA (1)...(19): siRNA sense strand
cagcaaacaauuccuacug

SEQ ID NO: 1153948 - RNA, 19 nt, Homo sapiens
  misc_RNA (1)...(19): siRNA sense strand
cagcagcgccaccgagaau

SEQ ID NO: 1153949 - RNA, 19 nt, Homo sapiens
  misc_RNA (1)...(19): siRNA sense strand
ugaacggcaaugauuauga

SEQ ID NO: 1153950 - RNA, 19 nt, Homo sapiens
  misc_RNA (1)...(19): siRNA sense strand
caacuacaucgacauuuac

SEQ ID NO: 1153951 - RNA, 19 nt, Homo sapiens
  misc_RNA (1)...(19): siRNA sense strand
aaacacggcacucguugug

SEQ ID NO: 1153952 - RNA, 19 nt, Homo sapiens
  misc_RNA (1)...(19): siRNA sense strand
ggaagauuacuaccauuuu

SEQ ID NO: 1153953 - RNA, 19 nt, Homo sapiens
  misc_RNA (1)...(19): siRNA sense strand
caacuugggccagauugga

SEQ ID NO: 1153954 - RNA, 19 nt, Homo sapiens
  misc_RNA (1)...(19): siRNA sense strand
gaucugcgucagcgcugua

SEQ ID NO: 1153955 - RNA, 19 nt, Homo sapiens
  misc_RNA (1)...(19): siRNA sense strand
cgcaggcccuuuacuucaa

SEQ ID NO: 1153956 - RNA, 19 nt, Homo sapiens
  misc_RNA (1)...(19): siRNA sense strand
ccaacagcaucuacaccau

SEQ ID NO: 1153957 - RNA, 19 nt, Homo sapiens
  misc_RNA (1)...(19): siRNA sense strand
cuacaucgacauuuacagu

SEQ ID NO: 1153958 - RNA, 19 nt, Homo sapiens
  misc_RNA (1)...(19): siRNA sense strand
ccagcaacaggaagugaaa

SEQ ID NO: 1153959 - RNA, 19 nt, Homo sapiens
  misc_RNA (1)...(19): siRNA sense strand
gcuuucgaguauggcauua

SEQ ID NO: 1153960 - RNA, 19 nt, Homo sapiens
  misc_RNA (1)...(19): siRNA sense strand
aauaaacacggcacucguu

SEQ ID NO: 1153961 - RNA, 19 nt, Homo sapiens
  misc_RNA (1)...(19): siRNA sense strand
caaugauuaugacccaucu

SEQ ID NO: 1153962 - RNA, 19 nt, Homo sapiens
  misc_RNA (1)...(19): siRNA sense strand
caacaugugguaccugcau

SEQ ID NO: 1153963 - RNA, 19 nt, Homo sapiens
  misc_RNA (1)...(19): siRNA sense strand
gcaaagucgcugggcauca

SEQ ID NO: 1153964 - RNA, 19 nt, Homo sapiens
  misc_RNA (1)...(19): siRNA sense strand
ggugaaauggcuccagcaa

SEQ ID NO: 1153965 - RNA, 19 nt, Homo sapiens
  misc_RNA (1)...(19): siRNA sense strand
caaacaauuccuacugcau

SEQ ID NO: 1153966 - RNA, 19 nt, Homo sapiens
  misc_RNA (1)...(19): siRNA sense strand
uaucacagcaaaaccuuua

SEQ ID NO: 1153967 - RNA, 19 nt, Homo sapiens
  misc_RNA (1)...(19): siRNA sense strand
aacgaagggugaagagaca

SEQ ID NO: 1153968 - RNA, 19 nt, Homo sapiens
  misc_RNA (1)...(19): siRNA sense strand
gcaucagacccaacuacau

SEQ ID NO: 1153969 - RNA, 19 nt, Homo sapiens
  misc_RNA (1)...(19): siRNA sense strand
guacaaugccaaaauagga

SEQ ID NO: 1153970 - RNA, 19 nt, Homo sapiens
  misc_RNA (1)...(19): siRNA sense strand
gcaggcccuuuacuucaac

SEQ ID NO: 1153971 - RNA, 19 nt, Homo sapiens
  misc_RNA (1)...(19): siRNA sense strand
ccgcaggcccuuuacuuca

SEQ ID NO: 1153972 - RNA, 19 nt, Homo sapiens
  misc_RNA (1)...(19): siRNA sense strand
cgacgugaacggcaaugau

SEQ ID NO: 1153973 - RNA, 19 nt, Homo sapiens
  misc_RNA (1)...(19): siRNA sense strand
caccgagaauggcuacaag

SEQ ID NO: 1153974 - RNA, 19 nt, Homo sapiens
  misc_RNA (1)...(19): siRNA sense strand
cgugaacggcaaugauuau

SEQ ID NO: 1153975 - RNA, 19 nt, Homo sapiens
  misc_RNA (1)...(19): siRNA sense strand
gugacccgcaggcccuuua

SEQ ID NO: 1153976 - RNA, 19 nt, Homo sapiens
  misc_RNA (1)...(19): siRNA sense strand
ccuuggcucuagaagcaaa

SEQ ID NO: 1153977 - RNA, 19 nt, Homo sapiens
  misc_RNA (1)...(19): siRNA sense strand
gcaacaggaagugaaacga

SEQ ID NO: 1153978 - RNA, 19 nt, Homo sapiens
  misc_RNA (1)...(19): siRNA sense strand
ugcgauggcuacaccaaca

SEQ ID NO: 1153979 - RNA, 19 nt, Homo sapiens
  misc_RNA (1)...(19): siRNA sense strand
ccaccgagaauggcuacaa

SEQ ID NO: 1153980 - RNA, 19 nt, Homo sapiens
  misc_RNA (1)...(19): siRNA sense strand
ccaacuacaucgacauuua

SEQ ID NO: 1153981 - RNA, 19 nt, Homo sapiens
  misc_RNA (1)...(19): siRNA sense strand
uuggaaaccuggaagauua

SEQ ID NO: 1153982 - RNA, 19 nt, Homo sapiens
  misc_RNA (1)...(19): siRNA sense strand
ugaaauggcuccagcaaca

SEQ ID NO: 1153983 - RNA, 19 nt, Homo sapiens
  misc_RNA (1)...(19): siRNA sense strand
ggacggcgaugucacagau

SEQ ID NO: 1153984 - RNA, 19 nt, Homo sapiens
  misc_RNA (1)...(19): siRNA sense strand
gaagcaaacagccaguuaa

SEQ ID NO: 1153985 - RNA, 19 nt, Homo sapiens
  misc_RNA (1)...(19): siRNA sense strand
gaacggcaaugauuaugac

SEQ ID NO: 1153986 - RNA, 19 nt, Homo sapiens
  misc_RNA (1)...(19): siRNA sense strand
gcgagcgacuggaaaguga

SEQ ID NO: 1153987 - RNA, 19 nt, Homo sapiens
  misc_RNA (1)...(19): siRNA sense strand
ccucacaccuuccucagaa

SEQ ID NO: 1153988 - RNA, 19 nt, Homo sapiens
  misc_RNA (1)...(19): siRNA sense strand
gauaugaugccagcaauga

SEQ ID NO: 1153989 - RNA, 19 nt, Homo sapiens
  misc_RNA (1)...(19): siRNA sense strand
ugacccaucuccacgauau

SEQ ID NO: 1153990 - RNA, 19 nt, Homo sapiens
  misc_RNA (1)...(19): siRNA sense strand
caacaggaagugaaacgaa

SEQ ID NO: 1153991 - RNA, 19 nt, Homo sapiens
  misc_RNA (1)...(19): siRNA sense strand
gaaagcgagcgacuggaaa

SEQ ID NO: 1153992 - RNA, 19 nt, Homo sapiens
  misc_RNA (1)...(19): siRNA sense strand
gcaaacagccaguuaaccu

SEQ ID NO: 1153993 - RNA, 19 nt, Homo sapiens
  misc_RNA (1)...(19): siRNA sense strand
agagacaggugcgaaguga

SEQ ID NO: 1153994 - RNA, 19 nt, Homo sapiens
  misc_RNA (1)...(19): siRNA sense strand
gacgugaacggcaaugauu

SEQ ID NO: 1153995 - RNA, 19 nt, Homo sapiens
  misc_RNA (1)...(19): siRNA sense strand
gaugauggcauagagagaa

SEQ ID NO: 1153996 - RNA, 19 nt, Homo sapiens
  misc_RNA (1)...(19): siRNA sense strand
cagauguggucgaggcaaa

SEQ ID NO: 1153997 - RNA, 19 nt, Homo sapiens
  misc_RNA (1)...(19): siRNA sense strand
agaagcaaacagccaguua

SEQ ID NO: 1153998 - RNA, 19 nt, Homo sapiens
  misc_RNA (1)...(19): siRNA sense strand
caaagucgcugggcaucag

SEQ ID NO: 1153999 - RNA, 19 nt, Homo sapiens
  misc_RNA (1)...(19): siRNA sense strand
gaaacgaagggugaagaga

SEQ ID NO: 1154000 - RNA, 19 nt, Homo sapiens
  misc_RNA (1)...(19): siRNA sense strand
caucagacccaacuacauc

SEQ ID NO: 1154001 - RNA, 19 nt, Homo sapiens
  misc_RNA (1)...(19): siRNA sense strand
ugaaagcgagcgacuggaa

SEQ ID NO: 1154002 - RNA, 19 nt, Homo sapiens
  misc_RNA (1)...(19): siRNA sense strand
gaagagacaggugcgaagu

SEQ ID NO: 1154003 - RNA, 19 nt, Homo sapiens
  misc_RNA (1)...(19): siRNA sense strand
caucaucgccuuggcucua

SEQ ID NO: 1154004 - RNA, 19 nt, Homo sapiens
  misc_RNA (1)...(19): siRNA sense strand
ccuggaagauuacuaccau

SEQ ID NO: 1154005 - RNA, 19 nt, Homo sapiens
  misc_RNA (1)...(19): siRNA sense strand
uuucgaguauggcauuaaa

SEQ ID NO: 1154006 - RNA, 19 nt, Homo sapiens
  misc_RNA (1)...(19): siRNA sense strand
uaugaugccagcaaugaaa

SEQ ID NO: 1154007 - RNA, 19 nt, Homo sapiens
  misc_RNA (1)...(19): siRNA sense strand
gaaaccuggaagauuacua

SEQ ID NO: 1154008 - RNA, 19 nt, Homo sapiens
  misc_RNA (1)...(19): siRNA sense strand
cgccuuggcucuagaagca

SEQ ID NO: 1154009 - RNA, 19 nt, Homo sapiens
  misc_RNA (1)...(19): siRNA sense strand
gcaguggggccuuuuauga

SEQ ID NO: 1154010 - RNA, 19 nt, Homo sapiens
  misc_RNA (1)...(19): siRNA sense strand
uggaagauuacuaccauuu

SEQ ID NO: 1154011 - RNA, 19 nt, Homo sapiens
  misc_RNA (1)...(19): siRNA sense strand
cagcaaacaauuccuacug

SEQ ID NO: 1154012 - RNA, 19 nt, Homo sapiens
  misc_RNA (1)...(19): siRNA sense strand
cagcagcgccaccgagaau

SEQ ID NO: 1154013 - RNA, 19 nt, Homo sapiens
  misc_RNA (1)...(19): siRNA sense strand
ugaacggcaaugauuauga

SEQ ID NO: 1154014 - RNA, 19 nt, Homo sapiens
  misc_RNA (1)...(19): siRNA sense strand
caacuacaucgacauuuac

SEQ ID NO: 1154015 - RNA, 19 nt, Homo sapiens
  misc_RNA (1)...(19): siRNA sense strand
aaacacggcacucguugug

SEQ ID NO: 1154016 - RNA, 19 nt, Homo sapiens
  misc_RNA (1)...(19): siRNA sense strand
ggaagauuacuaccauuuu

SEQ ID NO: 1154017 - RNA, 19 nt, Homo sapiens
  misc_RNA (1)...(19): siRNA sense strand
caacuugggccagauugga

SEQ ID NO: 1154018 - RNA, 19 nt, Homo sapiens
  misc_RNA (1)...(19): siRNA sense strand
gaucugcgucagcgcugua

SEQ ID NO: 1154019 - RNA, 19 nt, Homo sapiens
  misc_RNA (1)...(19): siRNA sense strand
cgcaggcccuuuacuucaa

SEQ ID NO: 1154020 - RNA, 19 nt, Homo sapiens
  misc_RNA (1)...(19): siRNA sense strand
ccaacagcaucuacaccau

SEQ ID NO: 1154021 - RNA, 19 nt, Homo sapiens
  misc_RNA (1)...(19): siRNA sense strand
cuacaucgacauuuacagu

SEQ ID NO: 1154022 - RNA, 19 nt, Homo sapiens
  misc_RNA (1)...(19): siRNA sense strand
ccagcaacaggaagugaaa

SEQ ID NO: 1154023 - RNA, 19 nt, Homo sapiens
  misc_RNA (1)...(19): siRNA sense strand
gcuuucgaguauggcauua

SEQ ID NO: 1154024 - RNA, 19 nt, Homo sapiens
  misc_RNA (1)...(19): siRNA sense strand
aauaaacacggcacucguu

SEQ ID NO: 1154025 - RNA, 19 nt, Homo sapiens
  misc_RNA (1)...(19): siRNA sense strand
caaugauuaugacccaucu

SEQ ID NO: 1154026 - RNA, 19 nt, Homo sapiens
  misc_RNA (1)...(19): siRNA sense strand
caacaugugguaccugcau

SEQ ID NO: 1154027 - RNA, 19 nt, Homo sapiens
  misc_RNA (1)...(19): siRNA sense strand
gcaaagucgcugggcauca

SEQ ID NO: 1154028 - RNA, 19 nt, Homo sapiens
  misc_RNA (1)...(19): siRNA sense strand
ggugaaauggcuccagcaa

SEQ ID NO: 1154029 - RNA, 19 nt, Homo sapiens
  misc_RNA (1)...(19): siRNA sense strand
caaacaauuccuacugcau

SEQ ID NO: 1154030 - RNA, 19 nt, Homo sapiens
  misc_RNA (1)...(19): siRNA sense strand
uaucacagcaaaaccuuua

SEQ ID NO: 1154031 - RNA, 19 nt, Homo sapiens
  misc_RNA (1)...(19): siRNA sense strand
aacgaagggugaagagaca

SEQ ID NO: 1154032 - RNA, 19 nt, Homo sapiens
  misc_RNA (1)...(19): siRNA sense strand
gcaucagacccaacuacau

SEQ ID NO: 1154033 - RNA, 19 nt, Homo sapiens
  misc_RNA (1)...(19): siRNA sense strand
guacaaugccaaaauagga

SEQ ID NO: 1154034 - RNA, 19 nt, Homo sapiens
  misc_RNA (1)...(19): siRNA sense strand
gcaggcccuuuacuucaac

SEQ ID NO: 1154035 - RNA, 19 nt, Homo sapiens
  misc_RNA (1)...(19): siRNA sense strand
ccgcaggcccuuuacuuca

SEQ ID NO: 1154036 - RNA, 19 nt, Homo sapiens
  misc_RNA (1)...(19): siRNA sense strand
cgacgugaacggcaaugau

SEQ ID NO: 1154037 - RNA, 19 nt, Homo sapiens
  misc_RNA (1)...(19): siRNA sense strand
caccgagaauggcuacaag

SEQ ID NO: 1154038 - RNA, 19 nt, Homo sapiens
  misc_RNA (1)...(19): siRNA sense strand
cgugaacggcaaugauuau

SEQ ID NO: 1154039 - RNA, 19 nt, Homo sapiens
  misc_RNA (1)...(19): siRNA sense strand
gugacccgcaggcccuuua

SEQ ID NO: 1154040 - RNA, 19 nt, Homo sapiens
  misc_RNA (1)...(19): siRNA sense strand
ccuuggcucuagaagcaaa

SEQ ID NO: 1154041 - RNA, 19 nt, Homo sapiens
  misc_RNA (1)...(19): siRNA sense strand
gcaacaggaagugaaacga

SEQ ID NO: 1154042 - RNA, 19 nt, Homo sapiens
  misc_RNA (1)...(19): siRNA sense strand
ugcgauggcuacaccaaca

SEQ ID NO: 1154043 - RNA, 19 nt, Homo sapiens
  misc_RNA (1)...(19): siRNA sense strand
ccaccgagaauggcuacaa

SEQ ID NO: 1154044 - RNA, 19 nt, Homo sapiens
  misc_RNA (1)...(19): siRNA sense strand
ccaacuacaucgacauuua

SEQ ID NO: 1154045 - RNA, 19 nt, Homo sapiens
  misc_RNA (1)...(19): siRNA sense strand
uuggaaaccuggaagauua

SEQ ID NO: 1154046 - RNA, 19 nt, Homo sapiens
  misc_RNA (1)...(19): siRNA sense strand
ugaaauggcuccagcaaca

SEQ ID NO: 1154047 - RNA, 19 nt, Homo sapiens
  misc_RNA (1)...(19): siRNA sense strand
ggacggcgaugucacagau

SEQ ID NO: 1154048 - RNA, 19 nt, Homo sapiens
  misc_RNA (1)...(19): siRNA sense strand
gaagcaaacagccaguuaa

SEQ ID NO: 1154049 - RNA, 19 nt, Homo sapiens
  misc_RNA (1)...(19): siRNA sense strand
gaacggcaaugauuaugac

SEQ ID NO: 1154050 - RNA, 19 nt, Homo sapiens
  misc_RNA (1)...(19): siRNA sense strand
gcgagcgacuggaaaguga

SEQ ID NO: 1154051 - RNA, 19 nt, Homo sapiens
  misc_RNA (1)...(19): siRNA sense strand
ccucacaccuuccucagaa

SEQ ID NO: 1154052 - RNA, 19 nt, Homo sapiens
  misc_RNA (1)...(19): siRNA sense strand
gauaugaugccagcaauga

SEQ ID NO: 1154053 - RNA, 19 nt, Homo sapiens
  misc_RNA (1)...(19): siRNA sense strand
ugacccaucuccacgauau

SEQ ID NO: 1154054 - RNA, 19 nt, Homo sapiens
  misc_RNA (1)...(19): siRNA sense strand
caacaggaagugaaacgaa

SEQ ID NO: 1154055 - RNA, 19 nt, Homo sapiens
  misc_RNA (1)...(19): siRNA sense strand
gaaagcgagcgacuggaaa

SEQ ID NO: 1154056 - RNA, 19 nt, Homo sapiens
  misc_RNA (1)...(19): siRNA sense strand
gcaaacagccaguuaaccu

SEQ ID NO: 1154057 - RNA, 19 nt, Homo sapiens
  misc_RNA (1)...(19): siRNA sense strand
agagacaggugcgaaguga

SEQ ID NO: 1154058 - RNA, 19 nt, Homo sapiens
  misc_RNA (1)...(19): siRNA sense strand
gacgugaacggcaaugauu

SEQ ID NO: 1154059 - RNA, 19 nt, Homo sapiens
  misc_RNA (1)...(19): siRNA sense strand
gaugauggcauagagagaa

SEQ ID NO: 1154060 - RNA, 19 nt, Homo sapiens
  misc_RNA (1)...(19): siRNA sense strand
cagauguggucgaggcaaa

SEQ ID NO: 1154061 - RNA, 19 nt, Homo sapiens
  misc_RNA (1)...(19): siRNA sense strand
agaagcaaacagccaguua

SEQ ID NO: 1154062 - RNA, 19 nt, Homo sapiens
  misc_RNA (1)...(19): siRNA sense strand
caaagucgcugggcaucag

SEQ ID NO: 1154063 - RNA, 19 nt, Homo sapiens
  misc_RNA (1)...(19): siRNA sense strand
gaaacgaagggugaagaga

SEQ ID NO: 1154064 - RNA, 19 nt, Homo sapiens
  misc_RNA (1)...(19): siRNA sense strand
caucagacccaacuacauc

SEQ ID NO: 1154065 - RNA, 19 nt, Homo sapiens
  misc_RNA (1)...(19): siRNA sense strand
ugaaagcgagcgacuggaa

SEQ ID NO: 1154066 - RNA, 19 nt, Homo sapiens
  misc_RNA (1)...(19): siRNA sense strand
gaagagacaggugcgaagu

SEQ ID NO: 1154067 - RNA, 19 nt, Homo sapiens
  misc_RNA (1)...(19): siRNA sense strand
caucaucgccuuggcucua

SEQ ID NO: 1154068 - RNA, 19 nt, Homo sapiens
  misc_RNA (1)...(19): siRNA sense strand
ccuggaagauuacuaccau

SEQ ID NO: 1154069 - RNA, 19 nt, Homo sapiens
  misc_RNA (1)...(19): siRNA sense strand
uuucgaguauggcauuaaa

SEQ ID NO: 1154070 - RNA, 19 nt, Homo sapiens
  misc_RNA (1)...(19): siRNA sense strand
uaugaugccagcaaugaaa

SEQ ID NO: 1154071 - RNA, 19 nt, Homo sapiens
  misc_RNA (1)...(19): siRNA sense strand
gaaaccuggaagauuacua

SEQ ID NO: 1154072 - RNA, 19 nt, Homo sapiens
  misc_RNA (1)...(19): siRNA sense strand
cgccuuggcucuagaagca

SEQ ID NO: 1154073 - RNA, 19 nt, Homo sapiens
  misc_RNA (1)...(19): siRNA sense strand
gcaguggggccuuuuauga

SEQ ID NO: 1154074 - RNA, 19 nt, Homo sapiens
  misc_RNA (1)...(19): siRNA sense strand
uggaagauuacuaccauuu

SEQ ID NO: 1154075 - RNA, 19 nt, Homo sapiens
  misc_RNA (1)...(19): siRNA sense strand
cagcaaacaauuccuacug

SEQ ID NO: 1154076 - RNA, 19 nt, Homo sapiens
  misc_RNA (1)...(19): siRNA sense strand
cagcagcgccaccgagaau

SEQ ID NO: 1154077 - RNA, 19 nt, Homo sapiens
  misc_RNA (1)...(19): siRNA sense strand
ugaacggcaaugauuauga

SEQ ID NO: 1154078 - RNA, 19 nt, Homo sapiens
  misc_RNA (1)...(19): siRNA sense strand
caacuacaucgacauuuac

SEQ ID NO: 1154079 - RNA, 19 nt, Homo sapiens
  misc_RNA (1)...(19): siRNA sense strand
aaacacggcacucguugug

SEQ ID NO: 1154080 - RNA, 19 nt, Homo sapiens
  misc_RNA (1)...(19): siRNA sense strand
ggaagauuacuaccauuuu

SEQ ID NO: 1154081 - RNA, 19 nt, Homo sapiens
  misc_RNA (1)...(19): siRNA sense strand
caacuugggccagauugga

SEQ ID NO: 1154082 - RNA, 19 nt, Homo sapiens
  misc_RNA (1)...(19): siRNA sense strand
gaucugcgucagcgcugua

SEQ ID NO: 1154083 - RNA, 19 nt, Homo sapiens
  misc_RNA (1)...(19): siRNA sense strand
cgcaggcccuuuacuucaa

SEQ ID NO: 1154084 - RNA, 19 nt, Homo sapiens
  misc_RNA (1)...(19): siRNA sense strand
ccaacagcaucuacaccau

SEQ ID NO: 1154085 - RNA, 19 nt, Homo sapiens
  misc_RNA (1)...(19): siRNA sense strand
cuacaucgacauuuacagu

SEQ ID NO: 1154086 - RNA, 19 nt, Homo sapiens
  misc_RNA (1)...(19): siRNA sense strand
ccagcaacaggaagugaaa

SEQ ID NO: 1154087 - RNA, 19 nt, Homo sapiens
  misc_RNA (1)...(19): siRNA sense strand
gcuuucgaguauggcauua

SEQ ID NO: 1154088 - RNA, 19 nt, Homo sapiens
  misc_RNA (1)...(19): siRNA sense strand
aauaaacacggcacucguu

SEQ ID NO: 1154089 - RNA, 19 nt, Homo sapiens
  misc_RNA (1)...(19): siRNA sense strand
caaugauuaugacccaucu

SEQ ID NO: 1154090 - RNA, 19 nt, Homo sapiens
  misc_RNA (1)...(19): siRNA sense strand
caacaugugguaccugcau

SEQ ID NO: 1154091 - RNA, 19 nt, Homo sapiens
  misc_RNA (1)...(19): siRNA sense strand
gcaaagucgcugggcauca

SEQ ID NO: 1154092 - RNA, 19 nt, Homo sapiens
  misc_RNA (1)...(19): siRNA sense strand
ggugaaauggcuccagcaa

SEQ ID NO: 1154093 - RNA, 19 nt, Homo sapiens
  misc_RNA (1)...(19): siRNA sense strand
caaacaauuccuacugcau

SEQ ID NO: 1154094 - RNA, 19 nt, Homo sapiens
  misc_RNA (1)...(19): siRNA sense strand
uaucacagcaaaaccuuua

SEQ ID NO: 1154095 - RNA, 19 nt, Homo sapiens
  misc_RNA (1)...(19): siRNA sense strand
aacgaagggugaagagaca

SEQ ID NO: 1154096 - RNA, 19 nt, Homo sapiens
  misc_RNA (1)...(19): siRNA sense strand
gcaucagacccaacuacau

SEQ ID NO: 1154097 - RNA, 19 nt, Homo sapiens
  misc_RNA (1)...(19): siRNA sense strand
guacaaugccaaaauagga

SEQ ID NO: 1154098 - RNA, 19 nt, Homo sapiens
  misc_RNA (1)...(19): siRNA sense strand
gcaggcccuuuacuucaac

SEQ ID NO: 1154099 - RNA, 19 nt, Homo sapiens
  misc_RNA (1)...(19): siRNA sense strand
ccgcaggcccuuuacuuca

SEQ ID NO: 1154100 - RNA, 19 nt, Homo sapiens
  misc_RNA (1)...(19): siRNA sense strand
cgacgugaacggcaaugau

SEQ ID NO: 1154101 - RNA, 19 nt, Homo sapiens
  misc_RNA (1)...(19): siRNA sense strand
caccgagaauggcuacaag

SEQ ID NO: 1154102 - RNA, 19 nt, Homo sapiens
  misc_RNA (1)...(19): siRNA sense strand
cgugaacggcaaugauuau

SEQ ID NO: 1154103 - RNA, 19 nt, Homo sapiens
  misc_RNA (1)...(19): siRNA sense strand
gugacccgcaggcccuuua

SEQ ID NO: 1154104 - RNA, 19 nt, Homo sapiens
  misc_RNA (1)...(19): siRNA sense strand
ccuuggcucuagaagcaaa

SEQ ID NO: 1154105 - RNA, 19 nt, Homo sapiens
  misc_RNA (1)...(19): siRNA sense strand
gcaacaggaagugaaacga

SEQ ID NO: 1154106 - RNA, 19 nt, Homo sapiens
  misc_RNA (1)...(19): siRNA sense strand
ugcgauggcuacaccaaca

SEQ ID NO: 1154107 - RNA, 19 nt, Homo sapiens
  misc_RNA (1)...(19): siRNA sense strand
ccaccgagaauggcuacaa

SEQ ID NO: 1154108 - RNA, 19 nt, Homo sapiens
  misc_RNA (1)...(19): siRNA sense strand
ccaacuacaucgacauuua

SEQ ID NO: 1154109 - RNA, 19 nt, Homo sapiens
  misc_RNA (1)...(19): siRNA sense strand
uuggaaaccuggaagauua

SEQ ID NO: 1154110 - RNA, 19 nt, Homo sapiens
  misc_RNA (1)...(19): siRNA sense strand
ugaaauggcuccagcaaca

SEQ ID NO: 1154111 - RNA, 19 nt, Homo sapiens
  misc_RNA (1)...(19): siRNA sense strand
ggacggcgaugucacagau

SEQ ID NO: 1154112 - RNA, 19 nt, Homo sapiens
  misc_RNA (1)...(19): siRNA sense strand
gaagcaaacagccaguuaa

SEQ ID NO: 1154113 - RNA, 19 nt, Homo sapiens
  misc_RNA (1)...(19): siRNA sense strand
gaacggcaaugauuaugac

SEQ ID NO: 1154114 - RNA, 19 nt, Homo sapiens
  misc_RNA (1)...(19): siRNA sense strand
gcgagcgacuggaaaguga

SEQ ID NO: 1154115 - RNA, 19 nt, Homo sapiens
  misc_RNA (1)...(19): siRNA sense strand
ccucacaccuuccucagaa

SEQ ID NO: 1154116 - RNA, 19 nt, Homo sapiens
  misc_RNA (1)...(19): siRNA sense strand
gauaugaugccagcaauga

SEQ ID NO: 1154117 - RNA, 19 nt, Homo sapiens
  misc_RNA (1)...(19): siRNA sense strand
ugacccaucuccacgauau

SEQ ID NO: 1154118 - RNA, 19 nt, Homo sapiens
  misc_RNA (1)...(19): siRNA sense strand
caacaggaagugaaacgaa

SEQ ID NO: 1154119 - RNA, 19 nt, Homo sapiens
  misc_RNA (1)...(19): siRNA sense strand
gaaagcgagcgacuggaaa

SEQ ID NO: 1154120 - RNA, 19 nt, Homo sapiens
  misc_RNA (1)...(19): siRNA sense strand
gcaaacagccaguuaaccu

SEQ ID NO: 1154121 - RNA, 19 nt, Homo sapiens
  misc_RNA (1)...(19): siRNA sense strand
agagacaggugcgaaguga

SEQ ID NO: 1154122 - RNA, 19 nt, Homo sapiens
  misc_RNA (1)...(19): siRNA sense strand
gacgugaacggcaaugauu

SEQ ID NO: 1154123 - RNA, 19 nt, Homo sapiens
  misc_RNA (1)...(19): siRNA sense strand
gaugauggcauagagagaa

SEQ ID NO: 1154124 - RNA, 19 nt, Homo sapiens
  misc_RNA (1)...(19): siRNA sense strand
cagauguggucgaggcaaa

SEQ ID NO: 1154125 - RNA, 19 nt, Homo sapiens
  misc_RNA (1)...(19): siRNA sense strand
agaagcaaacagccaguua

SEQ ID NO: 1154126 - RNA, 19 nt, Homo sapiens
  misc_RNA (1)...(19): siRNA sense strand
caaagucgcugggcaucag

SEQ ID NO: 1154127 - RNA, 19 nt, Homo sapiens
  misc_RNA (1)...(19): siRNA sense strand
gaaacgaagggugaagaga

SEQ ID NO: 1154128 - RNA, 19 nt, Homo sapiens
  misc_RNA (1)...(19): siRNA sense strand
caucagacccaacuacauc

SEQ ID NO: 1154129 - RNA, 19 nt, Homo sapiens
  misc_RNA (1)...(19): siRNA sense strand
ugaaagcgagcgacuggaa

SEQ ID NO: 1154130 - RNA, 19 nt, Homo sapiens
  misc_RNA (1)...(19): siRNA sense strand
gaagagacaggugcgaagu

SEQ ID NO: 1154131 - RNA, 19 nt, Homo sapiens
  misc_RNA (1)...(19): siRNA sense strand
caucaucgccuuggcucua

SEQ ID NO: 1154132 - RNA, 19 nt, Homo sapiens
  misc_RNA (1)...(19): siRNA sense strand
ccuggaagauuacuaccau

SEQ ID NO: 1154133 - RNA, 19 nt, Homo sapiens
  misc_RNA (1)...(19): siRNA sense strand
uuucgaguauggcauuaaa

SEQ ID NO: 1154134 - RNA, 19 nt, Homo sapiens
  misc_RNA (1)...(19): siRNA sense strand
uaugaugccagcaaugaaa

SEQ ID NO: 1154135 - RNA, 19 nt, Homo sapiens
  misc_RNA (1)...(19): siRNA sense strand
gaaaccuggaagauuacua

SEQ ID NO: 1154136 - RNA, 19 nt, Homo sapiens
  misc_RNA (1)...(19): siRNA sense strand
cgccuuggcucuagaagca

SEQ ID NO: 1154137 - RNA, 19 nt, Homo sapiens
  misc_RNA (1)...(19): siRNA sense strand
gcaguggggccuuuuauga

SEQ ID NO: 1154138 - RNA, 19 nt, Homo sapiens
  misc_RNA (1)...(19): siRNA sense strand
uggaagauuacuaccauuu

SEQ ID NO: 1154139 - RNA, 19 nt, Homo sapiens
  misc_RNA (1)...(19): siRNA sense strand
cagcaaacaauuccuacug

SEQ ID NO: 1154140 - RNA, 19 nt, Homo sapiens
  misc_RNA (1)...(19): siRNA sense strand
cagcagcgccaccgagaau

SEQ ID NO: 1154141 - RNA, 19 nt, Homo sapiens
  misc_RNA (1)...(19): siRNA sense strand
ugaacggcaaugauuauga

SEQ ID NO: 1154142 - RNA, 19 nt, Homo sapiens
  misc_RNA (1)...(19): siRNA sense strand
caacuacaucgacauuuac

SEQ ID NO: 1154143 - RNA, 19 nt, Homo sapiens
  misc_RNA (1)...(19): siRNA sense strand
aaacacggcacucguugug

SEQ ID NO: 1154144 - RNA, 19 nt, Homo sapiens
  misc_RNA (1)...(19): siRNA sense strand
ggaagauuacuaccauuuu

SEQ ID NO: 1154145 - RNA, 19 nt, Homo sapiens
  misc_RNA (1)...(19): siRNA sense strand
caacuugggccagauugga

SEQ ID NO: 1154146 - RNA, 19 nt, Homo sapiens
  misc_RNA (1)...(19): siRNA sense strand
gaucugcgucagcgcugua

SEQ ID NO: 1154147 - RNA, 19 nt, Homo sapiens
  misc_RNA (1)...(19): siRNA sense strand
cgcaggcccuuuacuucaa

SEQ ID NO: 1154148 - RNA, 19 nt, Homo sapiens
  misc_RNA (1)...(19): siRNA sense strand
ccaacagcaucuacaccau

SEQ ID NO: 1154149 - RNA, 19 nt, Homo sapiens
  misc_RNA (1)...(19): siRNA sense strand
cuacaucgacauuuacagu

SEQ ID NO: 1154150 - RNA, 19 nt, Homo sapiens
  misc_RNA (1)...(19): siRNA sense strand
ccagcaacaggaagugaaa

SEQ ID NO: 1154151 - RNA, 19 nt, Homo sapiens
  misc_RNA (1)...(19): siRNA sense strand
gcuuucgaguauggcauua

SEQ ID NO: 1154152 - RNA, 19 nt, Homo sapiens
  misc_RNA (1)...(19): siRNA sense strand
aauaaacacggcacucguu

SEQ ID NO: 1154153 - RNA, 19 nt, Homo sapiens
  misc_RNA (1)...(19): siRNA sense strand
caaugauuaugacccaucu

SEQ ID NO: 1154154 - RNA, 19 nt, Homo sapiens
  misc_RNA (1)...(19): siRNA sense strand
caacaugugguaccugcau

SEQ ID NO: 1154155 - RNA, 19 nt, Homo sapiens
  misc_RNA (1)...(19): siRNA sense strand
gcaaagucgcugggcauca

SEQ ID NO: 1154156 - RNA, 19 nt, Homo sapiens
  misc_RNA (1)...(19): siRNA sense strand
ggugaaauggcuccagcaa

SEQ ID NO: 1154157 - RNA, 19 nt, Homo sapiens
  misc_RNA (1)...(19): siRNA sense strand
caaacaauuccuacugcau

SEQ ID NO: 1154158 - RNA, 19 nt, Homo sapiens
  misc_RNA (1)...(19): siRNA sense strand
uaucacagcaaaaccuuua

SEQ ID NO: 1154159 - RNA, 19 nt, Homo sapiens
  misc_RNA (1)...(19): siRNA sense strand
aacgaagggugaagagaca

SEQ ID NO: 1154160 - RNA, 19 nt, Homo sapiens
  misc_RNA (1)...(19): siRNA sense strand
gcaucagacccaacuacau

SEQ ID NO: 1154161 - RNA, 19 nt, Homo sapiens
  misc_RNA (1)...(19): siRNA sense strand
guacaaugccaaaauagga

SEQ ID NO: 1154162 - RNA, 19 nt, Homo sapiens
  misc_RNA (1)...(19): siRNA sense strand
gcaggcccuuuacuucaac

SEQ ID NO: 1154163 - RNA, 19 nt, Homo sapiens
  misc_RNA (1)...(19): siRNA sense strand
ccgcaggcccuuuacuuca

SEQ ID NO: 1154164 - RNA, 19 nt, Homo sapiens
  misc_RNA (1)...(19): siRNA sense strand
cgacgugaacggcaaugau

SEQ ID NO: 1154165 - RNA, 19 nt, Homo sapiens
  misc_RNA (1)...(19): siRNA sense strand
caccgagaauggcuacaag

SEQ ID NO: 1154166 - RNA, 19 nt, Homo sapiens
  misc_RNA (1)...(19): siRNA sense strand
cgugaacggcaaugauuau

SEQ ID NO: 1154167 - RNA, 19 nt, Homo sapiens
  misc_RNA (1)...(19): siRNA sense strand
gugacccgcaggcccuuua

SEQ ID NO: 1154168 - RNA, 19 nt, Homo sapiens
  misc_RNA (1)...(19): siRNA sense strand
ccuuggcucuagaagcaaa

SEQ ID NO: 1154169 - RNA, 19 nt, Homo sapiens
  misc_RNA (1)...(19): siRNA sense strand
gcaacaggaagugaaacga

SEQ ID NO: 1154170 - RNA, 19 nt, Homo sapiens
  misc_RNA (1)...(19): siRNA sense strand
ugcgauggcuacaccaaca

SEQ ID NO: 1154171 - RNA, 19 nt, Homo sapiens
  misc_RNA (1)...(19): siRNA sense strand
ccaccgagaauggcuacaa

SEQ ID NO: 1154172 - RNA, 19 nt, Homo sapiens
  misc_RNA (1)...(19): siRNA sense strand
ccaacuacaucgacauuua

SEQ ID NO: 1154173 - RNA, 19 nt, Homo sapiens
  misc_RNA (1)...(19): siRNA sense strand
uuggaaaccuggaagauua

SEQ ID NO: 1154174 - RNA, 19 nt, Homo sapiens
  misc_RNA (1)...(19): siRNA sense strand
ugaaauggcuccagcaaca

SEQ ID NO: 1154175 - RNA, 19 nt, Homo sapiens
  misc_RNA (1)...(19): siRNA sense strand
ggacggcgaugucacagau

SEQ ID NO: 1154176 - RNA, 19 nt, Homo sapiens
  misc_RNA (1)...(19): siRNA sense strand
gaagcaaacagccaguuaa

SEQ ID NO: 1154177 - RNA, 19 nt, Homo sapiens
  misc_RNA (1)...(19): siRNA sense strand
gaacggcaaugauuaugac

SEQ ID NO: 1154178 - RNA, 19 nt, Homo sapiens
  misc_RNA (1)...(19): siRNA sense strand
gcgagcgacuggaaaguga

SEQ ID NO: 1154179 - RNA, 19 nt, Homo sapiens
  misc_RNA (1)...(19): siRNA sense strand
ccucacaccuuccucagaa

SEQ ID NO: 1154180 - RNA, 19 nt, Homo sapiens
  misc_RNA (1)...(19): siRNA sense strand
gauaugaugccagcaauga

SEQ ID NO: 1154181 - RNA, 19 nt, Homo sapiens
  misc_RNA (1)...(19): siRNA sense strand
ugacccaucuccacgauau

SEQ ID NO: 1154182 - RNA, 19 nt, Homo sapiens
  misc_RNA (1)...(19): siRNA sense strand
caacaggaagugaaacgaa

SEQ ID NO: 1154183 - RNA, 19 nt, Homo sapiens
  misc_RNA (1)...(19): siRNA sense strand
gaaagcgagcgacuggaaa

SEQ ID NO: 1154184 - RNA, 19 nt, Homo sapiens
  misc_RNA (1)...(19): siRNA sense strand
gcaaacagccaguuaaccu

SEQ ID NO: 1154185 - RNA, 19 nt, Homo sapiens
  misc_RNA (1)...(19): siRNA sense strand
agagacaggugcgaaguga

SEQ ID NO: 1154186 - RNA, 19 nt, Homo sapiens
  misc_RNA (1)...(19): siRNA sense strand
gacgugaacggcaaugauu

SEQ ID NO: 1154187 - RNA, 19 nt, Homo sapiens
  misc_RNA (1)...(19): siRNA sense strand
gaugauggcauagagagaa

SEQ ID NO: 1154188 - RNA, 19 nt, Homo sapiens
  misc_RNA (1)...(19): siRNA sense strand
cagauguggucgaggcaaa

SEQ ID NO: 1154189 - RNA, 19 nt, Homo sapiens
  misc_RNA (1)...(19): siRNA sense strand
agaagcaaacagccaguua

SEQ ID NO: 1154190 - RNA, 19 nt, Homo sapiens
  misc_RNA (1)...(19): siRNA sense strand
caaagucgcugggcaucag

SEQ ID NO: 1154191 - RNA, 19 nt, Homo sapiens
  misc_RNA (1)...(19): siRNA sense strand
gaaacgaagggugaagaga

SEQ ID NO: 1154192 - RNA, 19 nt, Homo sapiens
  misc_RNA (1)...(19): siRNA sense strand
caucagacccaacuacauc

SEQ ID NO: 1154193 - RNA, 19 nt, Homo sapiens
  misc_RNA (1)...(19): siRNA sense strand
ugaaagcgagcgacuggaa

SEQ ID NO: 1154194 - RNA, 19 nt, Homo sapiens
  misc_RNA (1)...(19): siRNA sense strand
gaagagacaggugcgaagu

SEQ ID NO: 1154195 - RNA, 19 nt, Homo sapiens
  misc_RNA (1)...(19): siRNA sense strand
caucaucgccuuggcucua

SEQ ID NO: 1154196 - RNA, 19 nt, Homo sapiens
  misc_RNA (1)...(19): siRNA sense strand
ccuggaagauuacuaccau

SEQ ID NO: 1154197 - RNA, 19 nt, Homo sapiens
  misc_RNA (1)...(19): siRNA sense strand
uuucgaguauggcauuaaa

SEQ ID NO: 1154198 - RNA, 19 nt, Homo sapiens
  misc_RNA (1)...(19): siRNA sense strand
uaugaugccagcaaugaaa

SEQ ID NO: 1154199 - RNA, 19 nt, Homo sapiens
  misc_RNA (1)...(19): siRNA sense strand
gaaaccuggaagauuacua

SEQ ID NO: 1154200 - RNA, 19 nt, Homo sapiens
  misc_RNA (1)...(19): siRNA sense strand
cgccuuggcucuagaagca

SEQ ID NO: 1154201 - RNA, 19 nt, Homo sapiens
  misc_RNA (1)...(19): siRNA sense strand
gcaguggggccuuuuauga

SEQ ID NO: 1154202 - RNA, 19 nt, Homo sapiens
  misc_RNA (1)...(19): siRNA sense strand
uggaagauuacuaccauuu

SEQ ID NO: 1154203 - RNA, 19 nt, Homo sapiens
  misc_RNA (1)...(19): siRNA sense strand
cagcaaacaauuccuacug

SEQ ID NO: 1154204 - RNA, 19 nt, Homo sapiens
  misc_RNA (1)...(19): siRNA sense strand
cagcagcgccaccgagaau

SEQ ID NO: 1154205 - RNA, 19 nt, Homo sapiens
  misc_RNA (1)...(19): siRNA sense strand
ugaacggcaaugauuauga

SEQ ID NO: 1154206 - RNA, 19 nt, Homo sapiens
  misc_RNA (1)...(19): siRNA sense strand
caacuacaucgacauuuac

SEQ ID NO: 1154207 - RNA, 19 nt, Homo sapiens
  misc_RNA (1)...(19): siRNA sense strand
aaacacggcacucguugug

SEQ ID NO: 1154208 - RNA, 19 nt, Homo sapiens
  misc_RNA (1)...(19): siRNA sense strand
ggaagauuacuaccauuuu

SEQ ID NO: 1154209 - RNA, 19 nt, Homo sapiens
  misc_RNA (1)...(19): siRNA sense strand
caacuugggccagauugga

SEQ ID NO: 1154210 - RNA, 19 nt, Homo sapiens
  misc_RNA (1)...(19): siRNA sense strand
gaucugcgucagcgcugua

SEQ ID NO: 1154211 - RNA, 19 nt, Homo sapiens
  misc_RNA (1)...(19): siRNA sense strand
cgcaggcccuuuacuucaa

SEQ ID NO: 1154212 - RNA, 19 nt, Homo sapiens
  misc_RNA (1)...(19): siRNA sense strand
ccaacagcaucuacaccau

SEQ ID NO: 1154213 - RNA, 19 nt, Homo sapiens
  misc_RNA (1)...(19): siRNA sense strand
cuacaucgacauuuacagu

SEQ ID NO: 1154214 - RNA, 19 nt, Homo sapiens
  misc_RNA (1)...(19): siRNA sense strand
ccagcaacaggaagugaaa

SEQ ID NO: 1154215 - RNA, 19 nt, Homo sapiens
  misc_RNA (1)...(19): siRNA sense strand
gcuuucgaguauggcauua

SEQ ID NO: 1154216 - RNA, 19 nt, Homo sapiens
  misc_RNA (1)...(19): siRNA sense strand
aauaaacacggcacucguu

SEQ ID NO: 1154217 - RNA, 19 nt, Homo sapiens
  misc_RNA (1)...(19): siRNA sense strand
caaugauuaugacccaucu

SEQ ID NO: 1154218 - RNA, 19 nt, Homo sapiens
  misc_RNA (1)...(19): siRNA sense strand
caacaugugguaccugcau

SEQ ID NO: 1154219 - RNA, 19 nt, Homo sapiens
  misc_RNA (1)...(19): siRNA sense strand
gcaaagucgcugggcauca

SEQ ID NO: 1154220 - RNA, 19 nt, Homo sapiens
  misc_RNA (1)...(19): siRNA sense strand
ggugaaauggcuccagcaa

SEQ ID NO: 1154221 - RNA, 19 nt, Homo sapiens
  misc_RNA (1)...(19): siRNA sense strand
caaacaauuccuacugcau

SEQ ID NO: 1154222 - RNA, 19 nt, Homo sapiens
  misc_RNA (1)...(19): siRNA sense strand
uaucacagcaaaaccuuua

SEQ ID NO: 1154223 - RNA, 19 nt, Homo sapiens
  misc_RNA (1)...(19): siRNA sense strand
aacgaagggugaagagaca

SEQ ID NO: 1154224 - RNA, 19 nt, Homo sapiens
  misc_RNA (1)...(19): siRNA sense strand
gcaucagacccaacuacau

SEQ ID NO: 1154225 - RNA, 19 nt, Homo sapiens
  misc_RNA (1)...(19): siRNA sense strand
guacaaugccaaaauagga

SEQ ID NO: 1154226 - RNA, 19 nt, Homo sapiens
  misc_RNA (1)...(19): siRNA sense strand
gcaggcccuuuacuucaac

SEQ ID NO: 1154227 - RNA, 19 nt, Homo sapiens
  misc_RNA (1)...(19): siRNA sense strand
ccgcaggcccuuuacuuca

SEQ ID NO: 1154228 - RNA, 19 nt, Homo sapiens
  misc_RNA (1)...(19): siRNA sense strand
cgacgugaacggcaaugau

SEQ ID NO: 1154229 - RNA, 19 nt, Homo sapiens
  misc_RNA (1)...(19): siRNA sense strand
caccgagaauggcuacaag

SEQ ID NO: 1154230 - RNA, 19 nt, Homo sapiens
  misc_RNA (1)...(19): siRNA sense strand
cgugaacggcaaugauuau

SEQ ID NO: 1154231 - RNA, 19 nt, Homo sapiens
  misc_RNA (1)...(19): siRNA sense strand
gugacccgcaggcccuuua

SEQ ID NO: 1154232 - RNA, 19 nt, Homo sapiens
  misc_RNA (1)...(19): siRNA sense strand
ccuuggcucuagaagcaaa

SEQ ID NO: 1154233 - RNA, 19 nt, Homo sapiens
  misc_RNA (1)...(19): siRNA sense strand
gcaacaggaagugaaacga

SEQ ID NO: 1154234 - RNA, 19 nt, Homo sapiens
  misc_RNA (1)...(19): siRNA sense strand
ugcgauggcuacaccaaca

SEQ ID NO: 1154235 - RNA, 19 nt, Homo sapiens
  misc_RNA (1)...(19): siRNA sense strand
ccaccgagaauggcuacaa

SEQ ID NO: 1154236 - RNA, 19 nt, Homo sapiens
  misc_RNA (1)...(19): siRNA sense strand
ccaacuacaucgacauuua

SEQ ID NO: 1154237 - RNA, 19 nt, Homo sapiens
  misc_RNA (1)...(19): siRNA sense strand
uuggaaaccuggaagauua

SEQ ID NO: 1154238 - RNA, 19 nt, Homo sapiens
  misc_RNA (1)...(19): siRNA sense strand
ugaaauggcuccagcaaca

SEQ ID NO: 1154239 - RNA, 19 nt, Homo sapiens
  misc_RNA (1)...(19): siRNA sense strand
ggacggcgaugucacagau

SEQ ID NO: 1154240 - RNA, 19 nt, Homo sapiens
  misc_RNA (1)...(19): siRNA sense strand
gaagcaaacagccaguuaa

SEQ ID NO: 1154241 - RNA, 19 nt, Homo sapiens
  misc_RNA (1)...(19): siRNA sense strand
gaacggcaaugauuaugac

SEQ ID NO: 1154242 - RNA, 19 nt, Homo sapiens
  misc_RNA (1)...(19): siRNA sense strand
gcgagcgacuggaaaguga

SEQ ID NO: 1154243 - RNA, 19 nt, Homo sapiens
  misc_RNA (1)...(19): siRNA sense strand
ccucacaccuuccucagaa

SEQ ID NO: 1154244 - RNA, 19 nt, Homo sapiens
  misc_RNA (1)...(19): siRNA sense strand
gauaugaugccagcaauga

SEQ ID NO: 1154245 - RNA, 19 nt, Homo sapiens
  misc_RNA (1)...(19): siRNA sense strand
ugacccaucuccacgauau

SEQ ID NO: 1154246 - RNA, 19 nt, Homo sapiens
  misc_RNA (1)...(19): siRNA sense strand
caacaggaagugaaacgaa

SEQ ID NO: 1154247 - RNA, 19 nt, Homo sapiens
  misc_RNA (1)...(19): siRNA sense strand
gaaagcgagcgacuggaaa

SEQ ID NO: 1154248 - RNA, 19 nt, Homo sapiens
  misc_RNA (1)...(19): siRNA sense strand
gcaaacagccaguuaaccu

SEQ ID NO: 1154249 - RNA, 19 nt, Homo sapiens
  misc_RNA (1)...(19): siRNA sense strand
agagacaggugcgaaguga

SEQ ID NO: 1154250 - RNA, 19 nt, Homo sapiens
  misc_RNA (1)...(19): siRNA sense strand
gacgugaacggcaaugauu

SEQ ID NO: 1154251 - RNA, 19 nt, Homo sapiens
  misc_RNA (1)...(19): siRNA sense strand
gaugauggcauagagagaa

SEQ ID NO: 1154252 - RNA, 19 nt, Homo sapiens
  misc_RNA (1)...(19): siRNA sense strand
cagauguggucgaggcaaa

SEQ ID NO: 1154253 - RNA, 19 nt, Homo sapiens
  misc_RNA (1)...(19): siRNA sense strand
agaagcaaacagccaguua

SEQ ID NO: 1154254 - RNA, 19 nt, Homo sapiens
  misc_RNA (1)...(19): siRNA sense strand
caaagucgcugggcaucag

SEQ ID NO: 1154255 - RNA, 19 nt, Homo sapiens
  misc_RNA (1)...(19): siRNA sense strand
gaaacgaagggugaagaga

SEQ ID NO: 1154256 - RNA, 19 nt, Homo sapiens
  misc_RNA (1)...(19): siRNA sense strand
caucagacccaacuacauc

SEQ ID NO: 1154257 - RNA, 19 nt, Homo sapiens
  misc_RNA (1)...(19): siRNA sense strand
ugaaagcgagcgacuggaa

SEQ ID NO: 1154258 - RNA, 19 nt, Homo sapiens
  misc_RNA (1)...(19): siRNA sense strand
gaagagacaggugcgaagu

SEQ ID NO: 1154259 - RNA, 19 nt, Homo sapiens
  misc_RNA (1)...(19): siRNA sense strand
caucaucgccuuggcucua

SEQ ID NO: 1154260 - RNA, 19 nt, Homo sapiens
  misc_RNA (1)...(19): siRNA sense strand
ccuggaagauuacuaccau

SEQ ID NO: 1154261 - RNA, 19 nt, Homo sapiens
  misc_RNA (1)...(19): siRNA sense strand
uuucgaguauggcauuaaa

SEQ ID NO: 1154262 - RNA, 19 nt, Homo sapiens
  misc_RNA (1)...(19): siRNA sense strand
uaugaugccagcaaugaaa

SEQ ID NO: 1154263 - RNA, 19 nt, Homo sapiens
  misc_RNA (1)...(19): siRNA sense strand
gaaaccuggaagauuacua

SEQ ID NO: 1154264 - RNA, 19 nt, Homo sapiens
  misc_RNA (1)...(19): siRNA sense strand
cgccuuggcucuagaagca

SEQ ID NO: 1154265 - RNA, 19 nt, Homo sapiens
  misc_RNA (1)...(19): siRNA sense strand
gcaguggggccuuuuauga

SEQ ID NO: 1154266 - RNA, 19 nt, Homo sapiens
  misc_RNA (1)...(19): siRNA sense strand
uggaagauuacuaccauuu

SEQ ID NO: 1154267 - RNA, 19 nt, Homo sapiens
  misc_RNA (1)...(19): siRNA sense strand
cagcaaacaauuccuacug

SEQ ID NO: 1154268 - RNA, 19 nt, Homo sapiens
  misc_RNA (1)...(19): siRNA sense strand
cagcagcgccaccgagaau

SEQ ID NO: 1154269 - RNA, 19 nt, Homo sapiens
  misc_RNA (1)...(19): siRNA sense strand
ugaacggcaaugauuauga

SEQ ID NO: 1154270 - RNA, 19 nt, Homo sapiens
  misc_RNA (1)...(19): siRNA sense strand
caacuacaucgacauuuac

SEQ ID NO: 1154271 - RNA, 19 nt, Homo sapiens
  misc_RNA (1)...(19): siRNA sense strand
aaacacggcacucguugug

SEQ ID NO: 1154272 - RNA, 19 nt, Homo sapiens
  misc_RNA (1)...(19): siRNA sense strand
ggaagauuacuaccauuuu

SEQ ID NO: 1154273 - RNA, 19 nt, Homo sapiens
  misc_RNA (1)...(19): siRNA sense strand
caacuugggccagauugga

SEQ ID NO: 1154274 - RNA, 19 nt, Homo sapiens
  misc_RNA (1)...(19): siRNA sense strand
gaucugcgucagcgcugua

SEQ ID NO: 1154275 - RNA, 19 nt, Homo sapiens
  misc_RNA (1)...(19): siRNA sense strand
cgcaggcccuuuacuucaa

SEQ ID NO: 1154276 - RNA, 19 nt, Homo sapiens
  misc_RNA (1)...(19): siRNA sense strand
ccaacagcaucuacaccau

SEQ ID NO: 1154277 - RNA, 19 nt, Homo sapiens
  misc_RNA (1)...(19): siRNA sense strand
cuacaucgacauuuacagu

SEQ ID NO: 1154278 - RNA, 19 nt, Homo sapiens
  misc_RNA (1)...(19): siRNA sense strand
ccagcaacaggaagugaaa

SEQ ID NO: 1154279 - RNA, 19 nt, Homo sapiens
  misc_RNA (1)...(19): siRNA sense strand
gcuuucgaguauggcauua

SEQ ID NO: 1154280 - RNA, 19 nt, Homo sapiens
  misc_RNA (1)...(19): siRNA sense strand
aauaaacacggcacucguu

SEQ ID NO: 1154281 - RNA, 19 nt, Homo sapiens
  misc_RNA (1)...(19): siRNA sense strand
caaugauuaugacccaucu

SEQ ID NO: 1154282 - RNA, 19 nt, Homo sapiens
  misc_RNA (1)...(19): siRNA sense strand
caacaugugguaccugcau

SEQ ID NO: 1154283 - RNA, 19 nt, Homo sapiens
  misc_RNA (1)...(19): siRNA sense strand
gcaaagucgcugggcauca

SEQ ID NO: 1154284 - RNA, 19 nt, Homo sapiens
  misc_RNA (1)...(19): siRNA sense strand
ggugaaauggcuccagcaa

SEQ ID NO: 1154285 - RNA, 19 nt, Homo sapiens
  misc_RNA (1)...(19): siRNA sense strand
caaacaauuccuacugcau

SEQ ID NO: 1154286 - RNA, 19 nt, Homo sapiens
  misc_RNA (1)...(19): siRNA sense strand
uaucacagcaaaaccuuua

SEQ ID NO: 1154287 - RNA, 19 nt, Homo sapiens
  misc_RNA (1)...(19): siRNA sense strand
aacgaagggugaagagaca

SEQ ID NO: 1154288 - RNA, 19 nt, Homo sapiens
  misc_RNA (1)...(19): siRNA sense strand
gcaucagacccaacuacau

SEQ ID NO: 1154289 - RNA, 19 nt, Homo sapiens
  misc_RNA (1)...(19): siRNA sense strand
guacaaugccaaaauagga

SEQ ID NO: 1154290 - RNA, 19 nt, Homo sapiens
  misc_RNA (1)...(19): siRNA sense strand
gcaggcccuuuacuucaac

SEQ ID NO: 1154291 - RNA, 19 nt, Homo sapiens
  misc_RNA (1)...(19): siRNA sense strand
ccgcaggcccuuuacuuca

SEQ ID NO: 1154292 - RNA, 19 nt, Homo sapiens
  misc_RNA (1)...(19): siRNA sense strand
cgacgugaacggcaaugau

SEQ ID NO: 1154293 - RNA, 19 nt, Homo sapiens
  misc_RNA (1)...(19): siRNA sense strand
caccgagaauggcuacaag

SEQ ID NO: 1154294 - RNA, 19 nt, Homo sapiens
  misc_RNA (1)...(19): siRNA sense strand
cgugaacggcaaugauuau

SEQ ID NO: 1154295 - RNA, 19 nt, Homo sapiens
  misc_RNA (1)...(19): siRNA sense strand
gugacccgcaggcccuuua

SEQ ID NO: 1154296 - RNA, 19 nt, Homo sapiens
  misc_RNA (1)...(19): siRNA sense strand
ccuuggcucuagaagcaaa

SEQ ID NO: 1154297 - RNA, 19 nt, Homo sapiens
  misc_RNA (1)...(19): siRNA sense strand
gcaacaggaagugaaacga

SEQ ID NO: 1154298 - RNA, 19 nt, Homo sapiens
  misc_RNA (1)...(19): siRNA sense strand
ugcgauggcuacaccaaca

SEQ ID NO: 1154299 - RNA, 19 nt, Homo sapiens
  misc_RNA (1)...(19): siRNA sense strand
ccaccgagaauggcuacaa

SEQ ID NO: 1154300 - RNA, 19 nt, Homo sapiens
  misc_RNA (1)...(19): siRNA sense strand
ccaacuacaucgacauuua

SEQ ID NO: 1154301 - RNA, 19 nt, Homo sapiens
  misc_RNA (1)...(19): siRNA sense strand
uuggaaaccuggaagauua

SEQ ID NO: 1154302 - RNA, 19 nt, Homo sapiens
  misc_RNA (1)...(19): siRNA sense strand
ugaaauggcuccagcaaca

SEQ ID NO: 1154303 - RNA, 19 nt, Homo sapiens
  misc_RNA (1)...(19): siRNA sense strand
ggacggcgaugucacagau

SEQ ID NO: 1154304 - RNA, 19 nt, Homo sapiens
  misc_RNA (1)...(19): siRNA sense strand
gaagcaaacagccaguuaa

SEQ ID NO: 1154305 - RNA, 19 nt, Homo sapiens
  misc_RNA (1)...(19): siRNA sense strand
gaacggcaaugauuaugac

SEQ ID NO: 1154306 - RNA, 19 nt, Homo sapiens
  misc_RNA (1)...(19): siRNA sense strand
gcgagcgacuggaaaguga

SEQ ID NO: 1154307 - RNA, 19 nt, Homo sapiens
  misc_RNA (1)...(19): siRNA sense strand
ccucacaccuuccucagaa

SEQ ID NO: 1154308 - RNA, 19 nt, Homo sapiens
  misc_RNA (1)...(19): siRNA sense strand
gauaugaugccagcaauga

SEQ ID NO: 1154309 - RNA, 19 nt, Homo sapiens
  misc_RNA (1)...(19): siRNA sense strand
ugacccaucuccacgauau

SEQ ID NO: 1154310 - RNA, 19 nt, Homo sapiens
  misc_RNA (1)...(19): siRNA sense strand
caacaggaagugaaacgaa

SEQ ID NO: 1154311 - RNA, 19 nt, Homo sapiens
  misc_RNA (1)...(19): siRNA sense strand
gaaagcgagcgacuggaaa

SEQ ID NO: 1154312 - RNA, 19 nt, Homo sapiens
  misc_RNA (1)...(19): siRNA sense strand
gcaaacagccaguuaaccu

SEQ ID NO: 1154313 - RNA, 19 nt, Homo sapiens
  misc_RNA (1)...(19): siRNA sense strand
agagacaggugcgaaguga

SEQ ID NO: 1154314 - RNA, 19 nt, Homo sapiens
  misc_RNA (1)...(19): siRNA sense strand
gacgugaacggcaaugauu

SEQ ID NO: 1154315 - RNA, 19 nt, Homo sapiens
  misc_RNA (1)...(19): siRNA sense strand
gaugauggcauagagagaa

SEQ ID NO: 1154316 - RNA, 19 nt, Homo sapiens
  misc_RNA (1)...(19): siRNA sense strand
cagauguggucgaggcaaa

SEQ ID NO: 1154317 - RNA, 19 nt, Homo sapiens
  misc_RNA (1)...(19): siRNA sense strand
agaagcaaacagccaguua

SEQ ID NO: 1154318 - RNA, 19 nt, Homo sapiens
  misc_RNA (1)...(19): siRNA sense strand
caaagucgcugggcaucag

SEQ ID NO: 1154319 - RNA, 19 nt, Homo sapiens
  misc_RNA (1)...(19): siRNA sense strand
gaaacgaagggugaagaga

SEQ ID NO: 1154320 - RNA, 19 nt, Homo sapiens
  misc_RNA (1)...(19): siRNA sense strand
caucagacccaacuacauc

SEQ ID NO: 1154321 - RNA, 19 nt, Homo sapiens
  misc_RNA (1)...(19): siRNA sense strand
ugaaagcgagcgacuggaa

SEQ ID NO: 1154322 - RNA, 19 nt, Homo sapiens
  misc_RNA (1)...(19): siRNA sense strand
gaagagacaggugcgaagu

SEQ ID NO: 1154323 - RNA, 19 nt, Homo sapiens
  misc_RNA (1)...(19): siRNA sense strand
caucaucgccuuggcucua

SEQ ID NO: 1154324 - RNA, 19 nt, Homo sapiens
  misc_RNA (1)...(19): siRNA sense strand
ccuggaagauuacuaccau

SEQ ID NO: 1154325 - RNA, 19 nt, Homo sapiens
  misc_RNA (1)...(19): siRNA sense strand
uuucgaguauggcauuaaa

SEQ ID NO: 1154326 - RNA, 19 nt, Homo sapiens
  misc_RNA (1)...(19): siRNA sense strand
uaugaugccagcaaugaaa

SEQ ID NO: 1154327 - RNA, 19 nt, Homo sapiens
  misc_RNA (1)...(19): siRNA sense strand
gaaaccuggaagauuacua

SEQ ID NO: 1154328 - RNA, 19 nt, Homo sapiens
  misc_RNA (1)...(19): siRNA sense strand
cgccuuggcucuagaagca

SEQ ID NO: 1154329 - RNA, 19 nt, Homo sapiens
  misc_RNA (1)...(19): siRNA sense strand
gcaguggggccuuuuauga

SEQ ID NO: 1154330 - RNA, 19 nt, Homo sapiens
  misc_RNA (1)...(19): siRNA sense strand
uggaagauuacuaccauuu

SEQ ID NO: 1154331 - RNA, 19 nt, Homo sapiens
  misc_RNA (1)...(19): siRNA sense strand
cagcaaacaauuccuacug

SEQ ID NO: 1154332 - RNA, 19 nt, Homo sapiens
  misc_RNA (1)...(19): siRNA sense strand
cagcagcgccaccgagaau

SEQ ID NO: 1154333 - RNA, 19 nt, Homo sapiens
  misc_RNA (1)...(19): siRNA sense strand
ugaacggcaaugauuauga

SEQ ID NO: 1154334 - RNA, 19 nt, Homo sapiens
  misc_RNA (1)...(19): siRNA sense strand
caacuacaucgacauuuac

SEQ ID NO: 1154335 - RNA, 19 nt, Homo sapiens
  misc_RNA (1)...(19): siRNA sense strand
aaacacggcacucguugug

SEQ ID NO: 1154336 - RNA, 19 nt, Homo sapiens
  misc_RNA (1)...(19): siRNA sense strand
ggaagauuacuaccauuuu

SEQ ID NO: 1154337 - RNA, 19 nt, Homo sapiens
  misc_RNA (1)...(19): siRNA sense strand
caacuugggccagauugga

SEQ ID NO: 1154338 - RNA, 19 nt, Homo sapiens
  misc_RNA (1)...(19): siRNA sense strand
gaucugcgucagcgcugua

SEQ ID NO: 1154339 - RNA, 19 nt, Homo sapiens
  misc_RNA (1)...(19): siRNA sense strand
cgcaggcccuuuacuucaa

SEQ ID NO: 1154340 - RNA, 19 nt, Homo sapiens
  misc_RNA (1)...(19): siRNA sense strand
ccaacagcaucuacaccau

SEQ ID NO: 1154341 - RNA, 19 nt, Homo sapiens
  misc_RNA (1)...(19): siRNA sense strand
cuacaucgacauuuacagu

SEQ ID NO: 1154342 - RNA, 19 nt, Homo sapiens
  misc_RNA (1)...(19): siRNA sense strand
ccagcaacaggaagugaaa

SEQ ID NO: 1154343 - RNA, 19 nt, Homo sapiens
  misc_RNA (1)...(19): siRNA sense strand
gcuuucgaguauggcauua

SEQ ID NO: 1154344 - RNA, 19 nt, Homo sapiens
  misc_RNA (1)...(19): siRNA sense strand
aauaaacacggcacucguu

SEQ ID NO: 1154345 - RNA, 19 nt, Homo sapiens
  misc_RNA (1)...(19): siRNA sense strand
caaugauuaugacccaucu

SEQ ID NO: 1154346 - RNA, 19 nt, Homo sapiens
  misc_RNA (1)...(19): siRNA sense strand
caacaugugguaccugcau

SEQ ID NO: 1154347 - RNA, 19 nt, Homo sapiens
  misc_RNA (1)...(19): siRNA sense strand
gcaaagucgcugggcauca

SEQ ID NO: 1154348 - RNA, 19 nt, Homo sapiens
  misc_RNA (1)...(19): siRNA sense strand
ggugaaauggcuccagcaa

SEQ ID NO: 1154349 - RNA, 19 nt, Homo sapiens
  misc_RNA (1)...(19): siRNA sense strand
caaacaauuccuacugcau

SEQ ID NO: 1154350 - RNA, 19 nt, Homo sapiens
  misc_RNA (1)...(19): siRNA sense strand
uaucacagcaaaaccuuua

SEQ ID NO: 1154351 - RNA, 19 nt, Homo sapiens
  misc_RNA (1)...(19): siRNA sense strand
aacgaagggugaagagaca

SEQ ID NO: 1154352 - RNA, 19 nt, Homo sapiens
  misc_RNA (1)...(19): siRNA sense strand
gcaucagacccaacuacau

SEQ ID NO: 1154353 - RNA, 19 nt, Homo sapiens
  misc_RNA (1)...(19): siRNA sense strand
guacaaugccaaaauagga

SEQ ID NO: 1154354 - RNA, 19 nt, Homo sapiens
  misc_RNA (1)...(19): siRNA sense strand
gcaggcccuuuacuucaac

SEQ ID NO: 1154355 - RNA, 19 nt, Homo sapiens
  misc_RNA (1)...(19): siRNA sense strand
ccgcaggcccuuuacuuca

SEQ ID NO: 1154356 - RNA, 19 nt, Homo sapiens
  misc_RNA (1)...(19): siRNA sense strand
cgacgugaacggcaaugau

SEQ ID NO: 1154357 - RNA, 19 nt, Homo sapiens
  misc_RNA (1)...(19): siRNA sense strand
caccgagaauggcuacaag

SEQ ID NO: 1154358 - RNA, 19 nt, Homo sapiens
  misc_RNA (1)...(19): siRNA sense strand
cgugaacggcaaugauuau

SEQ ID NO: 1154359 - RNA, 19 nt, Homo sapiens
  misc_RNA (1)...(19): siRNA sense strand
gugacccgcaggcccuuua

SEQ ID NO: 1154360 - RNA, 19 nt, Homo sapiens
  misc_RNA (1)...(19): siRNA sense strand
ccuuggcucuagaagcaaa

SEQ ID NO: 1154361 - RNA, 19 nt, Homo sapiens
  misc_RNA (1)...(19): siRNA sense strand
gcaacaggaagugaaacga

SEQ ID NO: 1154362 - RNA, 19 nt, Homo sapiens
  misc_RNA (1)...(19): siRNA sense strand
ugcgauggcuacaccaaca

SEQ ID NO: 1154363 - RNA, 19 nt, Homo sapiens
  misc_RNA (1)...(19): siRNA sense strand
ccaccgagaauggcuacaa

SEQ ID NO: 1154364 - RNA, 19 nt, Homo sapiens
  misc_RNA (1)...(19): siRNA sense strand
ccaacuacaucgacauuua

SEQ ID NO: 1154365 - RNA, 19 nt, Homo sapiens
  misc_RNA (1)...(19): siRNA sense strand
uuggaaaccuggaagauua

SEQ ID NO: 1154366 - RNA, 19 nt, Homo sapiens
  misc_RNA (1)...(19): siRNA sense strand
ugaaauggcuccagcaaca

SEQ ID NO: 1154367 - RNA, 19 nt, Homo sapiens
  misc_RNA (1)...(19): siRNA sense strand
ggacggcgaugucacagau

SEQ ID NO: 1154368 - RNA, 19 nt, Homo sapiens
  misc_RNA (1)...(19): siRNA sense strand
gaagcaaacagccaguuaa

SEQ ID NO: 1154369 - RNA, 19 nt, Homo sapiens
  misc_RNA (1)...(19): siRNA sense strand
gaacggcaaugauuaugac

SEQ ID NO: 1154370 - RNA, 19 nt, Homo sapiens
  misc_RNA (1)...(19): siRNA sense strand
gcgagcgacuggaaaguga

SEQ ID NO: 1154371 - RNA, 19 nt, Homo sapiens
  misc_RNA (1)...(19): siRNA sense strand
ccucacaccuuccucagaa

SEQ ID NO: 1154372 - RNA, 19 nt, Homo sapiens
  misc_RNA (1)...(19): siRNA sense strand
gauaugaugccagcaauga

SEQ ID NO: 1154373 - RNA, 19 nt, Homo sapiens
  misc_RNA (1)...(19): siRNA sense strand
ugacccaucuccacgauau

SEQ ID NO: 1154374 - RNA, 19 nt, Homo sapiens
  misc_RNA (1)...(19): siRNA sense strand
caacaggaagugaaacgaa

SEQ ID NO: 1154375 - RNA, 19 nt, Homo sapiens
  misc_RNA (1)...(19): siRNA sense strand
gaaagcgagcgacuggaaa

SEQ ID NO: 1154376 - RNA, 19 nt, Homo sapiens
  misc_RNA (1)...(19): siRNA sense strand
gcaaacagccaguuaaccu

SEQ ID NO: 1154377 - RNA, 19 nt, Homo sapiens
  misc_RNA (1)...(19): siRNA sense strand
agagacaggugcgaaguga

SEQ ID NO: 1154378 - RNA, 19 nt, Homo sapiens
  misc_RNA (1)...(19): siRNA sense strand
gacgugaacggcaaugauu

SEQ ID NO: 1154379 - RNA, 19 nt, Homo sapiens
  misc_RNA (1)...(19): siRNA sense strand
gaugauggcauagagagaa

SEQ ID NO: 1154380 - RNA, 19 nt, Homo sapiens
  misc_RNA (1)...(19): siRNA sense strand
cagauguggucgaggcaaa

SEQ ID NO: 1154381 - RNA, 19 nt, Homo sapiens
  misc_RNA (1)...(19): siRNA sense strand
agaagcaaacagccaguua

SEQ ID NO: 1154382 - RNA, 19 nt, Homo sapiens
  misc_RNA (1)...(19): siRNA sense strand
caaagucgcugggcaucag

SEQ ID NO: 1154383 - RNA, 19 nt, Homo sapiens
  misc_RNA (1)...(19): siRNA sense strand
gaaacgaagggugaagaga

SEQ ID NO: 1154384 - RNA, 19 nt, Homo sapiens
  misc_RNA (1)...(19): siRNA sense strand
caucagacccaacuacauc

SEQ ID NO: 1154385 - RNA, 19 nt, Homo sapiens
  misc_RNA (1)...(19): siRNA sense strand
ugaaagcgagcgacuggaa

SEQ ID NO: 1154386 - RNA, 19 nt, Homo sapiens
  misc_RNA (1)...(19): siRNA sense strand
gaagagacaggugcgaagu

SEQ ID NO: 1154387 - RNA, 19 nt, Homo sapiens
  misc_RNA (1)...(19): siRNA sense strand
caucaucgccuuggcucua

SEQ ID NO: 1154388 - RNA, 19 nt, Homo sapiens
  misc_RNA (1)...(19): siRNA sense strand
ccuggaagauuacuaccau

SEQ ID NO: 1154389 - RNA, 19 nt, Homo sapiens
  misc_RNA (1)...(19): siRNA sense strand
uuucgaguauggcauuaaa

SEQ ID NO: 1154390 - RNA, 19 nt, Homo sapiens
  misc_RNA (1)...(19): siRNA sense strand
uaugaugccagcaaugaaa

SEQ ID NO: 1154391 - RNA, 19 nt, Homo sapiens
  misc_RNA (1)...(19): siRNA sense strand
gaaaccuggaagauuacua

SEQ ID NO: 1154392 - RNA, 19 nt, Homo sapiens
  misc_RNA (1)...(19): siRNA sense strand
cgccuuggcucuagaagca

SEQ ID NO: 1154393 - RNA, 19 nt, Homo sapiens
  misc_RNA (1)...(19): siRNA sense strand
gcaguggggccuuuuauga

SEQ ID NO: 1154394 - RNA, 19 nt, Homo sapiens
  misc_RNA (1)...(19): siRNA sense strand
uggaagauuacuaccauuu

SEQ ID NO: 1154395 - RNA, 19 nt, Homo sapiens
  misc_RNA (1)...(19): siRNA sense strand
cagcaaacaauuccuacug

SEQ ID NO: 1154396 - RNA, 19 nt, Homo sapiens
  misc_RNA (1)...(19): siRNA sense strand
cagcagcgccaccgagaau

SEQ ID NO: 1154397 - RNA, 19 nt, Homo sapiens
  misc_RNA (1)...(19): siRNA sense strand
ugaacggcaaugauuauga

SEQ ID NO: 1154398 - RNA, 19 nt, Homo sapiens
  misc_RNA (1)...(19): siRNA sense strand
caacuacaucgacauuuac

SEQ ID NO: 1154399 - RNA, 19 nt, Homo sapiens
  misc_RNA (1)...(19): siRNA sense strand
aaacacggcacucguugug

SEQ ID NO: 1154400 - RNA, 19 nt, Homo sapiens
  misc_RNA (1)...(19): siRNA sense strand
ggaagauuacuaccauuuu

SEQ ID NO: 1154401 - RNA, 19 nt, Homo sapiens
  misc_RNA (1)...(19): siRNA sense strand
caacuugggccagauugga

SEQ ID NO: 1154402 - RNA, 19 nt, Homo sapiens
  misc_RNA (1)...(19): siRNA sense strand
gaucugcgucagcgcugua

SEQ ID NO: 1154403 - RNA, 19 nt, Homo sapiens
  misc_RNA (1)...(19): siRNA sense strand
cgcaggcccuuuacuucaa

SEQ ID NO: 1154404 - RNA, 19 nt, Homo sapiens
  misc_RNA (1)...(19): siRNA sense strand
ccaacagcaucuacaccau

SEQ ID NO: 1154405 - RNA, 19 nt, Homo sapiens
  misc_RNA (1)...(19): siRNA sense strand
cuacaucgacauuuacagu

SEQ ID NO: 1154406 - RNA, 19 nt, Homo sapiens
  misc_RNA (1)...(19): siRNA sense strand
ccagcaacaggaagugaaa

SEQ ID NO: 1154407 - RNA, 19 nt, Homo sapiens
  misc_RNA (1)...(19): siRNA sense strand
gcuuucgaguauggcauua

SEQ ID NO: 1154408 - RNA, 19 nt, Homo sapiens
  misc_RNA (1)...(19): siRNA sense strand
aauaaacacggcacucguu

SEQ ID NO: 1154409 - RNA, 19 nt, Homo sapiens
  misc_RNA (1)...(19): siRNA sense strand
caaugauuaugacccaucu

SEQ ID NO: 1154410 - RNA, 19 nt, Homo sapiens
  misc_RNA (1)...(19): siRNA sense strand
caacaugugguaccugcau

SEQ ID NO: 1154411 - RNA, 19 nt, Homo sapiens
  misc_RNA (1)...(19): siRNA sense strand
gcaaagucgcugggcauca

SEQ ID NO: 1154412 - RNA, 19 nt, Homo sapiens
  misc_RNA (1)...(19): siRNA sense strand
ggugaaauggcuccagcaa

SEQ ID NO: 1154413 - RNA, 19 nt, Homo sapiens
  misc_RNA (1)...(19): siRNA sense strand
caaacaauuccuacugcau

SEQ ID NO: 1154414 - RNA, 19 nt, Homo sapiens
  misc_RNA (1)...(19): siRNA sense strand
uaucacagcaaaaccuuua

SEQ ID NO: 1154415 - RNA, 19 nt, Homo sapiens
  misc_RNA (1)...(19): siRNA sense strand
aacgaagggugaagagaca

SEQ ID NO: 1154416 - RNA, 19 nt, Homo sapiens
  misc_RNA (1)...(19): siRNA sense strand
gcaucagacccaacuacau

SEQ ID NO: 1154417 - RNA, 19 nt, Homo sapiens
  misc_RNA (1)...(19): siRNA sense strand
guacaaugccaaaauagga

SEQ ID NO: 1154418 - RNA, 19 nt, Homo sapiens
  misc_RNA (1)...(19): siRNA sense strand
gcaggcccuuuacuucaac

SEQ ID NO: 1154419 - RNA, 19 nt, Homo sapiens
  misc_RNA (1)...(19): siRNA sense strand
ccgcaggcccuuuacuuca

SEQ ID NO: 1154420 - RNA, 19 nt, Homo sapiens
  misc_RNA (1)...(19): siRNA sense strand
cgacgugaacggcaaugau

SEQ ID NO: 1154421 - RNA, 19 nt, Homo sapiens
  misc_RNA (1)...(19): siRNA sense strand
caccgagaauggcuacaag

SEQ ID NO: 1154422 - RNA, 19 nt, Homo sapiens
  misc_RNA (1)...(19): siRNA sense strand
cgugaacggcaaugauuau

SEQ ID NO: 1154423 - RNA, 19 nt, Homo sapiens
  misc_RNA (1)...(19): siRNA sense strand
gugacccgcaggcccuuua

SEQ ID NO: 1154424 - RNA, 19 nt, Homo sapiens
  misc_RNA (1)...(19): siRNA sense strand
ccuuggcucuagaagcaaa

SEQ ID NO: 1154425 - RNA, 19 nt, Homo sapiens
  misc_RNA (1)...(19): siRNA sense strand
gcaacaggaagugaaacga

SEQ ID NO: 1154426 - RNA, 19 nt, Homo sapiens
  misc_RNA (1)...(19): siRNA sense strand
ugcgauggcuacaccaaca

SEQ ID NO: 1154427 - RNA, 19 nt, Homo sapiens
  misc_RNA (1)...(19): siRNA sense strand
ccaccgagaauggcuacaa

SEQ ID NO: 1154428 - RNA, 19 nt, Homo sapiens
  misc_RNA (1)...(19): siRNA sense strand
ccaacuacaucgacauuua

SEQ ID NO: 1154429 - RNA, 19 nt, Homo sapiens
  misc_RNA (1)...(19): siRNA sense strand
uuggaaaccuggaagauua

SEQ ID NO: 1154430 - RNA, 19 nt, Homo sapiens
  misc_RNA (1)...(19): siRNA sense strand
ugaaauggcuccagcaaca

SEQ ID NO: 1154431 - RNA, 19 nt, Homo sapiens
  misc_RNA (1)...(19): siRNA sense strand
ggacggcgaugucacagau

SEQ ID NO: 1154432 - RNA, 19 nt, Homo sapiens
  misc_RNA (1)...(19): siRNA sense strand
gaagcaaacagccaguuaa

SEQ ID NO: 1154433 - RNA, 19 nt, Homo sapiens
  misc_RNA (1)...(19): siRNA sense strand
gaacggcaaugauuaugac

SEQ ID NO: 1154434 - RNA, 19 nt, Homo sapiens
  misc_RNA (1)...(19): siRNA sense strand
gcgagcgacuggaaaguga

SEQ ID NO: 1154435 - RNA, 19 nt, Homo sapiens
  misc_RNA (1)...(19): siRNA sense strand
ccucacaccuuccucagaa

SEQ ID NO: 1154436 - RNA, 19 nt, Homo sapiens
  misc_RNA (1)...(19): siRNA sense strand
gauaugaugccagcaauga

SEQ ID NO: 1154437 - RNA, 19 nt, Homo sapiens
  misc_RNA (1)...(19): siRNA sense strand
ugacccaucuccacgauau

SEQ ID NO: 1154438 - RNA, 19 nt, Homo sapiens
  misc_RNA (1)...(19): siRNA sense strand
caacaggaagugaaacgaa

SEQ ID NO: 1154439 - RNA, 19 nt, Homo sapiens
  misc_RNA (1)...(19): siRNA sense strand
gaaagcgagcgacuggaaa

SEQ ID NO: 1154440 - RNA, 19 nt, Homo sapiens
  misc_RNA (1)...(19): siRNA sense strand
gcaaacagccaguuaaccu

SEQ ID NO: 1154441 - RNA, 19 nt, Homo sapiens
  misc_RNA (1)...(19): siRNA sense strand
agagacaggugcgaaguga

SEQ ID NO: 1154442 - RNA, 19 nt, Homo sapiens
  misc_RNA (1)...(19): siRNA sense strand
gacgugaacggcaaugauu

SEQ ID NO: 1154443 - RNA, 19 nt, Homo sapiens
  misc_RNA (1)...(19): siRNA sense strand
gaugauggcauagagagaa

SEQ ID NO: 1154444 - RNA, 19 nt, Homo sapiens
  misc_RNA (1)...(19): siRNA sense strand
cagauguggucgaggcaaa

SEQ ID NO: 1154445 - RNA, 19 nt, Homo sapiens
  misc_RNA (1)...(19): siRNA sense strand
agaagcaaacagccaguua

SEQ ID NO: 1154446 - RNA, 19 nt, Homo sapiens
  misc_RNA (1)...(19): siRNA sense strand
caaagucgcugggcaucag

SEQ ID NO: 1154447 - RNA, 19 nt, Homo sapiens
  misc_RNA (1)...(19): siRNA sense strand
gaaacgaagggugaagaga

SEQ ID NO: 1154448 - RNA, 19 nt, Homo sapiens
  misc_RNA (1)...(19): siRNA sense strand
caucagacccaacuacauc

SEQ ID NO: 1154449 - RNA, 19 nt, Homo sapiens
  misc_RNA (1)...(19): siRNA sense strand
ugaaagcgagcgacuggaa

SEQ ID NO: 1154450 - RNA, 19 nt, Homo sapiens
  misc_RNA (1)...(19): siRNA sense strand
gaagagacaggugcgaagu

SEQ ID NO: 1154451 - RNA, 19 nt, Homo sapiens
  misc_RNA (1)...(19): siRNA sense strand
caucaucgccuuggcucua

SEQ ID NO: 1154452 - RNA, 19 nt, Homo sapiens
  misc_RNA (1)...(19): siRNA sense strand
ccuggaagauuacuaccau

SEQ ID NO: 1154453 - RNA, 19 nt, Homo sapiens
  misc_RNA (1)...(19): siRNA sense strand
uuucgaguauggcauuaaa

SEQ ID NO: 1154454 - RNA, 19 nt, Homo sapiens
  misc_RNA (1)...(19): siRNA sense strand
uaugaugccagcaaugaaa

SEQ ID NO: 1154455 - RNA, 19 nt, Homo sapiens
  misc_RNA (1)...(19): siRNA sense strand
gaaaccuggaagauuacua

SEQ ID NO: 1154456 - RNA, 19 nt, Homo sapiens
  misc_RNA (1)...(19): siRNA sense strand
cgccuuggcucuagaagca

SEQ ID NO: 1154457 - RNA, 19 nt, Homo sapiens
  misc_RNA (1)...(19): siRNA sense strand
gcaguggggccuuuuauga

SEQ ID NO: 1154458 - RNA, 19 nt, Homo sapiens
  misc_RNA (1)...(19): siRNA sense strand
uggaagauuacuaccauuu

SEQ ID NO: 1154459 - RNA, 19 nt, Homo sapiens
  misc_RNA (1)...(19): siRNA sense strand
cagcaaacaauuccuacug

SEQ ID NO: 1154460 - RNA, 19 nt, Homo sapiens
  misc_RNA (1)...(19): siRNA sense strand
cagcagcgccaccgagaau

SEQ ID NO: 1154461 - RNA, 19 nt, Homo sapiens
  misc_RNA (1)...(19): siRNA sense strand
ugaacggcaaugauuauga

SEQ ID NO: 1154462 - RNA, 19 nt, Homo sapiens
  misc_RNA (1)...(19): siRNA sense strand
caacuacaucgacauuuac

SEQ ID NO: 1154463 - RNA, 19 nt, Homo sapiens
  misc_RNA (1)...(19): siRNA sense strand
aaacacggcacucguugug

SEQ ID NO: 1154464 - RNA, 19 nt, Homo sapiens
  misc_RNA (1)...(19): siRNA sense strand
ggaagauuacuaccauuuu

SEQ ID NO: 1154465 - RNA, 19 nt, Homo sapiens
  misc_RNA (1)...(19): siRNA sense strand
caacuugggccagauugga

SEQ ID NO: 1154466 - RNA, 19 nt, Homo sapiens
  misc_RNA (1)...(19): siRNA sense strand
gaucugcgucagcgcugua

SEQ ID NO: 1154467 - RNA, 19 nt, Homo sapiens
  misc_RNA (1)...(19): siRNA sense strand
cgcaggcccuuuacuucaa

SEQ ID NO: 1154468 - RNA, 19 nt, Homo sapiens
  misc_RNA (1)...(19): siRNA sense strand
ccaacagcaucuacaccau

SEQ ID NO: 1154469 - RNA, 19 nt, Homo sapiens
  misc_RNA (1)...(19): siRNA sense strand
cuacaucgacauuuacagu

SEQ ID NO: 1154470 - RNA, 19 nt, Homo sapiens
  misc_RNA (1)...(19): siRNA sense strand
ccagcaacaggaagugaaa

SEQ ID NO: 1154471 - RNA, 19 nt, Homo sapiens
  misc_RNA (1)...(19): siRNA sense strand
gcuuucgaguauggcauua

SEQ ID NO: 1154472 - RNA, 19 nt, Homo sapiens
  misc_RNA (1)...(19): siRNA sense strand
aauaaacacggcacucguu

SEQ ID NO: 1154473 - RNA, 19 nt, Homo sapiens
  misc_RNA (1)...(19): siRNA sense strand
caaugauuaugacccaucu

SEQ ID NO: 1154474 - RNA, 19 nt, Homo sapiens
  misc_RNA (1)...(19): siRNA sense strand
caacaugugguaccugcau

SEQ ID NO: 1154475 - RNA, 19 nt, Homo sapiens
  misc_RNA (1)...(19): siRNA sense strand
gcaaagucgcugggcauca

SEQ ID NO: 1154476 - RNA, 19 nt, Homo sapiens
  misc_RNA (1)...(19): siRNA sense strand
ggugaaauggcuccagcaa

SEQ ID NO: 1154477 - RNA, 19 nt, Homo sapiens
  misc_RNA (1)...(19): siRNA sense strand
caaacaauuccuacugcau

SEQ ID NO: 1154478 - RNA, 19 nt, Homo sapiens
  misc_RNA (1)...(19): siRNA sense strand
uaucacagcaaaaccuuua

SEQ ID NO: 1154479 - RNA, 19 nt, Homo sapiens
  misc_RNA (1)...(19): siRNA sense strand
aacgaagggugaagagaca

SEQ ID NO: 1154480 - RNA, 19 nt, Homo sapiens
  misc_RNA (1)...(19): siRNA sense strand
gcaucagacccaacuacau

SEQ ID NO: 1154481 - RNA, 19 nt, Homo sapiens
  misc_RNA (1)...(19): siRNA sense strand
guacaaugccaaaauagga

SEQ ID NO: 1154482 - RNA, 19 nt, Homo sapiens
  misc_RNA (1)...(19): siRNA sense strand
gcaggcccuuuacuucaac

SEQ ID NO: 1154483 - RNA, 19 nt, Homo sapiens
  misc_RNA (1)...(19): siRNA sense strand
ccgcaggcccuuuacuuca

SEQ ID NO: 1154484 - RNA, 19 nt, Homo sapiens
  misc_RNA (1)...(19): siRNA sense strand
cgacgugaacggcaaugau

SEQ ID NO: 1154485 - RNA, 19 nt, Homo sapiens
  misc_RNA (1)...(19): siRNA sense strand
caccgagaauggcuacaag

SEQ ID NO: 1154486 - RNA, 19 nt, Homo sapiens
  misc_RNA (1)...(19): siRNA sense strand
cgugaacggcaaugauuau

SEQ ID NO: 1154487 - RNA, 19 nt, Homo sapiens
  misc_RNA (1)...(19): siRNA sense strand
gugacccgcaggcccuuua

SEQ ID NO: 1154488 - RNA, 19 nt, Homo sapiens
  misc_RNA (1)...(19): siRNA sense strand
ccuuggcucuagaagcaaa

SEQ ID NO: 1154489 - RNA, 19 nt, Homo sapiens
  misc_RNA (1)...(19): siRNA sense strand
gcaacaggaagugaaacga

SEQ ID NO: 1154490 - RNA, 19 nt, Homo sapiens
  misc_RNA (1)...(19): siRNA sense strand
ugcgauggcuacaccaaca

SEQ ID NO: 1154491 - RNA, 19 nt, Homo sapiens
  misc_RNA (1)...(19): siRNA sense strand
ccaccgagaauggcuacaa

SEQ ID NO: 1154492 - RNA, 19 nt, Homo sapiens
  misc_RNA (1)...(19): siRNA sense strand
ccaacuacaucgacauuua

SEQ ID NO: 1154493 - RNA, 19 nt, Homo sapiens
  misc_RNA (1)...(19): siRNA sense strand
uuggaaaccuggaagauua

SEQ ID NO: 1154494 - RNA, 19 nt, Homo sapiens
  misc_RNA (1)...(19): siRNA sense strand
ugaaauggcuccagcaaca

SEQ ID NO: 1154495 - RNA, 19 nt, Homo sapiens
  misc_RNA (1)...(19): siRNA sense strand
ggacggcgaugucacagau

SEQ ID NO: 1154496 - RNA, 19 nt, Homo sapiens
  misc_RNA (1)...(19): siRNA sense strand
gaagcaaacagccaguuaa

SEQ ID NO: 1154497 - RNA, 19 nt, Homo sapiens
  misc_RNA (1)...(19): siRNA sense strand
gaacggcaaugauuaugac

SEQ ID NO: 1154498 - RNA, 19 nt, Homo sapiens
  misc_RNA (1)...(19): siRNA sense strand
gcgagcgacuggaaaguga

SEQ ID NO: 1154499 - RNA, 19 nt, Homo sapiens
  misc_RNA (1)...(19): siRNA sense strand
ccucacaccuuccucagaa

SEQ ID NO: 1154500 - RNA, 19 nt, Homo sapiens
  misc_RNA (1)...(19): siRNA sense strand
gauaugaugccagcaauga

SEQ ID NO: 1154501 - RNA, 19 nt, Homo sapiens
  misc_RNA (1)...(19): siRNA sense strand
ugacccaucuccacgauau

SEQ ID NO: 1154502 - RNA, 19 nt, Homo sapiens
  misc_RNA (1)...(19): siRNA sense strand
caacaggaagugaaacgaa

SEQ ID NO: 1154503 - RNA, 19 nt, Homo sapiens
  misc_RNA (1)...(19): siRNA sense strand
gaaagcgagcgacuggaaa

SEQ ID NO: 1154504 - RNA, 19 nt, Homo sapiens
  misc_RNA (1)...(19): siRNA sense strand
gcaaacagccaguuaaccu

SEQ ID NO: 1154505 - RNA, 19 nt, Homo sapiens
  misc_RNA (1)...(19): siRNA sense strand
agagacaggugcgaaguga

SEQ ID NO: 1154506 - RNA, 19 nt, Homo sapiens
  misc_RNA (1)...(19): siRNA sense strand
gacgugaacggcaaugauu

SEQ ID NO: 1154507 - RNA, 19 nt, Homo sapiens
  misc_RNA (1)...(19): siRNA sense strand
gaugauggcauagagagaa

SEQ ID NO: 1154508 - RNA, 19 nt, Homo sapiens
  misc_RNA (1)...(19): siRNA sense strand
cagauguggucgaggcaaa

SEQ ID NO: 1154509 - RNA, 19 nt, Homo sapiens
  misc_RNA (1)...(19): siRNA sense strand
agaagcaaacagccaguua

SEQ ID NO: 1154510 - RNA, 19 nt, Homo sapiens
  misc_RNA (1)...(19): siRNA sense strand
caaagucgcugggcaucag

SEQ ID NO: 1154511 - RNA, 19 nt, Homo sapiens
  misc_RNA (1)...(19): siRNA sense strand
gaaacgaagggugaagaga

SEQ ID NO: 1154512 - RNA, 19 nt, Homo sapiens
  misc_RNA (1)...(19): siRNA sense strand
caucagacccaacuacauc

SEQ ID NO: 1154513 - RNA, 19 nt, Homo sapiens
  misc_RNA (1)...(19): siRNA sense strand
ugaaagcgagcgacuggaa

SEQ ID NO: 1154514 - RNA, 19 nt, Homo sapiens
  misc_RNA (1)...(19): siRNA sense strand
gaagagacaggugcgaagu

SEQ ID NO: 1154515 - RNA, 19 nt, Homo sapiens
  misc_RNA (1)...(19): siRNA sense strand
caucaucgccuuggcucua

SEQ ID NO: 1154516 - RNA, 19 nt, Homo sapiens
  misc_RNA (1)...(19): siRNA sense strand
ccuggaagauuacuaccau

SEQ ID NO: 1154517 - RNA, 19 nt, Homo sapiens
  misc_RNA (1)...(19): siRNA sense strand
uuucgaguauggcauuaaa

SEQ ID NO: 1154518 - RNA, 19 nt, Homo sapiens
  misc_RNA (1)...(19): siRNA sense strand
uaugaugccagcaaugaaa

SEQ ID NO: 1154519 - RNA, 19 nt, Homo sapiens
  misc_RNA (1)...(19): siRNA sense strand
gaaaccuggaagauuacua

SEQ ID NO: 1154520 - RNA, 19 nt, Homo sapiens
  misc_RNA (1)...(19): siRNA sense strand
cgccuuggcucuagaagca

SEQ ID NO: 1154521 - RNA, 19 nt, Homo sapiens
  misc_RNA (1)...(19): siRNA sense strand
gcaguggggccuuuuauga

SEQ ID NO: 1154522 - RNA, 19 nt, Homo sapiens
  misc_RNA (1)...(19): siRNA sense strand
uggaagauuacuaccauuu

SEQ ID NO: 1154523 - RNA, 19 nt, Homo sapiens
  misc_RNA (1)...(19): siRNA sense strand
cagcaaacaauuccuacug

SEQ ID NO: 1154524 - RNA, 19 nt, Homo sapiens
  misc_RNA (1)...(19): siRNA sense strand
cagcagcgccaccgagaau

SEQ ID NO: 1154525 - RNA, 19 nt, Homo sapiens
  misc_RNA (1)...(19): siRNA sense strand
ugaacggcaaugauuauga

SEQ ID NO: 1154526 - RNA, 19 nt, Homo sapiens
  misc_RNA (1)...(19): siRNA sense strand
caacuacaucgacauuuac

SEQ ID NO: 1154527 - RNA, 19 nt, Homo sapiens
  misc_RNA (1)...(19): siRNA sense strand
aaacacggcacucguugug

SEQ ID NO: 1154528 - RNA, 19 nt, Homo sapiens
  misc_RNA (1)...(19): siRNA sense strand
ggaagauuacuaccauuuu

SEQ ID NO: 1154529 - RNA, 19 nt, Homo sapiens
  misc_RNA (1)...(19): siRNA sense strand
caacuugggccagauugga

SEQ ID NO: 1154530 - RNA, 19 nt, Homo sapiens
  misc_RNA (1)...(19): siRNA sense strand
gaucugcgucagcgcugua

SEQ ID NO: 1154531 - RNA, 19 nt, Homo sapiens
  misc_RNA (1)...(19): siRNA sense strand
cgcaggcccuuuacuucaa

SEQ ID NO: 1154532 - RNA, 19 nt, Homo sapiens
  misc_RNA (1)...(19): siRNA sense strand
ccaacagcaucuacaccau

SEQ ID NO: 1154533 - RNA, 19 nt, Homo sapiens
  misc_RNA (1)...(19): siRNA sense strand
cuacaucgacauuuacagu

SEQ ID NO: 1154534 - RNA, 19 nt, Homo sapiens
  misc_RNA (1)...(19): siRNA sense strand
ccagcaacaggaagugaaa

SEQ ID NO: 1154535 - RNA, 19 nt, Homo sapiens
  misc_RNA (1)...(19): siRNA sense strand
gcuuucgaguauggcauua

SEQ ID NO: 1154536 - RNA, 19 nt, Homo sapiens
  misc_RNA (1)...(19): siRNA sense strand
aauaaacacggcacucguu

SEQ ID NO: 1154537 - RNA, 19 nt, Homo sapiens
  misc_RNA (1)...(19): siRNA sense strand
caaugauuaugacccaucu

SEQ ID NO: 1154538 - RNA, 19 nt, Homo sapiens
  misc_RNA (1)...(19): siRNA sense strand
caacaugugguaccugcau

SEQ ID NO: 1154539 - RNA, 19 nt, Homo sapiens
  misc_RNA (1)...(19): siRNA sense strand
gcaaagucgcugggcauca

SEQ ID NO: 1154540 - RNA, 19 nt, Homo sapiens
  misc_RNA (1)...(19): siRNA sense strand
ggugaaauggcuccagcaa

SEQ ID NO: 1154541 - RNA, 19 nt, Homo sapiens
  misc_RNA (1)...(19): siRNA sense strand
caaacaauuccuacugcau

SEQ ID NO: 1154542 - RNA, 19 nt, Homo sapiens
  misc_RNA (1)...(19): siRNA sense strand
uaucacagcaaaaccuuua

SEQ ID NO: 1154543 - RNA, 19 nt, Homo sapiens
  misc_RNA (1)...(19): siRNA sense strand
aacgaagggugaagagaca

SEQ ID NO: 1154544 - RNA, 19 nt, Homo sapiens
  misc_RNA (1)...(19): siRNA sense strand
gcaucagacccaacuacau

SEQ ID NO: 1154545 - RNA, 19 nt, Homo sapiens
  misc_RNA (1)...(19): siRNA sense strand
guacaaugccaaaauagga

SEQ ID NO: 1154546 - RNA, 19 nt, Homo sapiens
  misc_RNA (1)...(19): siRNA sense strand
gcaggcccuuuacuucaac

SEQ ID NO: 1154547 - RNA, 19 nt, Homo sapiens
  misc_RNA (1)...(19): siRNA sense strand
ccgcaggcccuuuacuuca

SEQ ID NO: 1154548 - RNA, 19 nt, Homo sapiens
  misc_RNA (1)...(19): siRNA sense strand
cgacgugaacggcaaugau

SEQ ID NO: 1154549 - RNA, 19 nt, Homo sapiens
  misc_RNA (1)...(19): siRNA sense strand
caccgagaauggcuacaag

SEQ ID NO: 1154550 - RNA, 19 nt, Homo sapiens
  misc_RNA (1)...(19): siRNA sense strand
cgugaacggcaaugauuau

SEQ ID NO: 1154551 - RNA, 19 nt, Homo sapiens
  misc_RNA (1)...(19): siRNA sense strand
gugacccgcaggcccuuua

SEQ ID NO: 1154552 - RNA, 19 nt, Homo sapiens
  misc_RNA (1)...(19): siRNA sense strand
ccuuggcucuagaagcaaa

SEQ ID NO: 1154553 - RNA, 19 nt, Homo sapiens
  misc_RNA (1)...(19): siRNA sense strand
gcaacaggaagugaaacga

SEQ ID NO: 1154554 - RNA, 19 nt, Homo sapiens
  misc_RNA (1)...(19): siRNA sense strand
ugcgauggcuacaccaaca

SEQ ID NO: 1154555 - RNA, 19 nt, Homo sapiens
  misc_RNA (1)...(19): siRNA sense strand
ccaccgagaauggcuacaa

SEQ ID NO: 1154556 - RNA, 19 nt, Homo sapiens
  misc_RNA (1)...(19): siRNA sense strand
ccaacuacaucgacauuua

SEQ ID NO: 1154557 - RNA, 19 nt, Homo sapiens
  misc_RNA (1)...(19): siRNA sense strand
uuggaaaccuggaagauua

SEQ ID NO: 1154558 - RNA, 19 nt, Homo sapiens
  misc_RNA (1)...(19): siRNA sense strand
ugaaauggcuccagcaaca

SEQ ID NO: 1154559 - RNA, 19 nt, Homo sapiens
  misc_RNA (1)...(19): siRNA sense strand
ggacggcgaugucacagau

SEQ ID NO: 1154560 - RNA, 19 nt, Homo sapiens
  misc_RNA (1)...(19): siRNA sense strand
gaagcaaacagccaguuaa

SEQ ID NO: 1154561 - RNA, 19 nt, Homo sapiens
  misc_RNA (1)...(19): siRNA sense strand
gaacggcaaugauuaugac

SEQ ID NO: 1154562 - RNA, 19 nt, Homo sapiens
  misc_RNA (1)...(19): siRNA sense strand
gcgagcgacuggaaaguga

SEQ ID NO: 1154563 - RNA, 19 nt, Homo sapiens
  misc_RNA (1)...(19): siRNA sense strand
ccucacaccuuccucagaa

SEQ ID NO: 1154564 - RNA, 19 nt, Homo sapiens
  misc_RNA (1)...(19): siRNA sense strand
gauaugaugccagcaauga

SEQ ID NO: 1154565 - RNA, 19 nt, Homo sapiens
  misc_RNA (1)...(19): siRNA sense strand
ugacccaucuccacgauau

SEQ ID NO: 1154566 - RNA, 19 nt, Homo sapiens
  misc_RNA (1)...(19): siRNA sense strand
caacaggaagugaaacgaa

SEQ ID NO: 1154567 - RNA, 19 nt, Homo sapiens
  misc_RNA (1)...(19): siRNA sense strand
gaaagcgagcgacuggaaa

SEQ ID NO: 1154568 - RNA, 19 nt, Homo sapiens
  misc_RNA (1)...(19): siRNA sense strand
gcaaacagccaguuaaccu

SEQ ID NO: 1154569 - RNA, 19 nt, Homo sapiens
  misc_RNA (1)...(19): siRNA sense strand
agagacaggugcgaaguga

SEQ ID NO: 1154570 - RNA, 19 nt, Homo sapiens
  misc_RNA (1)...(19): siRNA sense strand
gacgugaacggcaaugauu

SEQ ID NO: 1154571 - RNA, 19 nt, Homo sapiens
  misc_RNA (1)...(19): siRNA sense strand
gaugauggcauagagagaa

SEQ ID NO: 1154572 - RNA, 19 nt, Homo sapiens
  misc_RNA (1)...(19): siRNA sense strand
cagauguggucgaggcaaa

SEQ ID NO: 1154573 - RNA, 19 nt, Homo sapiens
  misc_RNA (1)...(19): siRNA sense strand
agaagcaaacagccaguua

SEQ ID NO: 1154574 - RNA, 19 nt, Homo sapiens
  misc_RNA (1)...(19): siRNA sense strand
caaagucgcugggcaucag

SEQ ID NO: 1154575 - RNA, 19 nt, Homo sapiens
  misc_RNA (1)...(19): siRNA sense strand
gaaacgaagggugaagaga

SEQ ID NO: 1154576 - RNA, 19 nt, Homo sapiens
  misc_RNA (1)...(19): siRNA sense strand
caucagacccaacuacauc

SEQ ID NO: 1154577 - RNA, 19 nt, Homo sapiens
  misc_RNA (1)...(19): siRNA sense strand
ugaaagcgagcgacuggaa

SEQ ID NO: 1154578 - RNA, 19 nt, Homo sapiens
  misc_RNA (1)...(19): siRNA sense strand
gaagagacaggugcgaagu

SEQ ID NO: 1154579 - RNA, 19 nt, Homo sapiens
  misc_RNA (1)...(19): siRNA sense strand
caucaucgccuuggcucua

SEQ ID NO: 1154580 - RNA, 19 nt, Homo sapiens
  misc_RNA (1)...(19): siRNA sense strand
ccuggaagauuacuaccau

SEQ ID NO: 1154581 - RNA, 19 nt, Homo sapiens
  misc_RNA (1)...(19): siRNA sense strand
uuucgaguauggcauuaaa

SEQ ID NO: 1154582 - RNA, 19 nt, Homo sapiens
  misc_RNA (1)...(19): siRNA sense strand
uaugaugccagcaaugaaa

SEQ ID NO: 1154583 - RNA, 19 nt, Homo sapiens
  misc_RNA (1)...(19): siRNA sense strand
gaaaccuggaagauuacua

SEQ ID NO: 1154584 - RNA, 19 nt, Homo sapiens
  misc_RNA (1)...(19): siRNA sense strand
cgccuuggcucuagaagca

SEQ ID NO: 1154585 - RNA, 19 nt, Homo sapiens
  misc_RNA (1)...(19): siRNA sense strand
gcaguggggccuuuuauga

SEQ ID NO: 1154586 - RNA, 19 nt, Homo sapiens
  misc_RNA (1)...(19): siRNA sense strand
uggaagauuacuaccauuu

SEQ ID NO: 1154587 - RNA, 19 nt, Homo sapiens
  misc_RNA (1)...(19): siRNA sense strand
cagcaaacaauuccuacug

SEQ ID NO: 1154588 - RNA, 19 nt, Homo sapiens
  misc_RNA (1)...(19): siRNA sense strand
cagcagcgccaccgagaau

SEQ ID NO: 1154589 - RNA, 19 nt, Homo sapiens
  misc_RNA (1)...(19): siRNA sense strand
ugaacggcaaugauuauga

SEQ ID NO: 1154590 - RNA, 19 nt, Homo sapiens
  misc_RNA (1)...(19): siRNA sense strand
caacuacaucgacauuuac

SEQ ID NO: 1154591 - RNA, 19 nt, Homo sapiens
  misc_RNA (1)...(19): siRNA sense strand
aaacacggcacucguugug

SEQ ID NO: 1154592 - RNA, 19 nt, Homo sapiens
  misc_RNA (1)...(19): siRNA sense strand
ggaagauuacuaccauuuu

SEQ ID NO: 1154593 - RNA, 19 nt, Homo sapiens
  misc_RNA (1)...(19): siRNA sense strand
caacuugggccagauugga

SEQ ID NO: 1154594 - RNA, 19 nt, Homo sapiens
  misc_RNA (1)...(19): siRNA sense strand
gaucugcgucagcgcugua

SEQ ID NO: 1154595 - RNA, 19 nt, Homo sapiens
  misc_RNA (1)...(19): siRNA sense strand
cgcaggcccuuuacuucaa

SEQ ID NO: 1154596 - RNA, 19 nt, Homo sapiens
  misc_RNA (1)...(19): siRNA sense strand
ccaacagcaucuacaccau

SEQ ID NO: 1154597 - RNA, 19 nt, Homo sapiens
  misc_RNA (1)...(19): siRNA sense strand
cuacaucgacauuuacagu

SEQ ID NO: 1154598 - RNA, 19 nt, Homo sapiens
  misc_RNA (1)...(19): siRNA sense strand
ccagcaacaggaagugaaa

SEQ ID NO: 1154599 - RNA, 19 nt, Homo sapiens
  misc_RNA (1)...(19): siRNA sense strand
gcuuucgaguauggcauua

SEQ ID NO: 1154600 - RNA, 19 nt, Homo sapiens
  misc_RNA (1)...(19): siRNA sense strand
aauaaacacggcacucguu

SEQ ID NO: 1154601 - RNA, 19 nt, Homo sapiens
  misc_RNA (1)...(19): siRNA sense strand
caaugauuaugacccaucu

SEQ ID NO: 1154602 - RNA, 19 nt, Homo sapiens
  misc_RNA (1)...(19): siRNA sense strand
caacaugugguaccugcau

SEQ ID NO: 1154603 - RNA, 19 nt, Homo sapiens
  misc_RNA (1)...(19): siRNA sense strand
gcaaagucgcugggcauca

SEQ ID NO: 1154604 - RNA, 19 nt, Homo sapiens
  misc_RNA (1)...(19): siRNA sense strand
ggugaaauggcuccagcaa

SEQ ID NO: 1154605 - RNA, 19 nt, Homo sapiens
  misc_RNA (1)...(19): siRNA sense strand
caaacaauuccuacugcau

SEQ ID NO: 1154606 - RNA, 19 nt, Homo sapiens
  misc_RNA (1)...(19): siRNA sense strand
uaucacagcaaaaccuuua

SEQ ID NO: 1154607 - RNA, 19 nt, Homo sapiens
  misc_RNA (1)...(19): siRNA sense strand
aacgaagggugaagagaca

SEQ ID NO: 1154608 - RNA, 19 nt, Homo sapiens
  misc_RNA (1)...(19): siRNA sense strand
gcaucagacccaacuacau

SEQ ID NO: 1154609 - RNA, 19 nt, Homo sapiens
  misc_RNA (1)...(19): siRNA sense strand
guacaaugccaaaauagga

SEQ ID NO: 1154610 - RNA, 19 nt, Homo sapiens
  misc_RNA (1)...(19): siRNA sense strand
gcaggcccuuuacuucaac

SEQ ID NO: 1154611 - RNA, 19 nt, Homo sapiens
  misc_RNA (1)...(19): siRNA sense strand
ccgcaggcccuuuacuuca

SEQ ID NO: 1154612 - RNA, 19 nt, Homo sapiens
  misc_RNA (1)...(19): siRNA sense strand
cgacgugaacggcaaugau

SEQ ID NO: 1154613 - RNA, 19 nt, Homo sapiens
  misc_RNA (1)...(19): siRNA sense strand
caccgagaauggcuacaag

SEQ ID NO: 1154614 - RNA, 19 nt, Homo sapiens
  misc_RNA (1)...(19): siRNA sense strand
cgugaacggcaaugauuau

SEQ ID NO: 1154615 - RNA, 19 nt, Homo sapiens
  misc_RNA (1)...(19): siRNA sense strand
gugacccgcaggcccuuua

SEQ ID NO: 1154616 - RNA, 19 nt, Homo sapiens
  misc_RNA (1)...(19): siRNA sense strand
ccuuggcucuagaagcaaa

SEQ ID NO: 1154617 - RNA, 19 nt, Homo sapiens
  misc_RNA (1)...(19): siRNA sense strand
gcaacaggaagugaaacga

SEQ ID NO: 1154618 - RNA, 19 nt, Homo sapiens
  misc_RNA (1)...(19): siRNA sense strand
ugcgauggcuacaccaaca

SEQ ID NO: 1154619 - RNA, 19 nt, Homo sapiens
  misc_RNA (1)...(19): siRNA sense strand
ccaccgagaauggcuacaa

SEQ ID NO: 1154620 - RNA, 19 nt, Homo sapiens
  misc_RNA (1)...(19): siRNA sense strand
gaugaucgaugacaaugaa

SEQ ID NO: 1154621 - RNA, 19 nt, Homo sapiens
  misc_RNA (1)...(19): siRNA sense strand
ccaagaaguuccucaaugu

SEQ ID NO: 1154622 - RNA, 19 nt, Homo sapiens
  misc_RNA (1)...(19): siRNA sense strand
ggacagcccugaccucacu

SEQ ID NO: 1154623 - RNA, 19 nt, Homo sapiens
  misc_RNA (1)...(19): siRNA sense strand
gcgccuuccuggaguacua

SEQ ID NO: 1154624 - RNA, 19 nt, Homo sapiens
  misc_RNA (1)...(19): siRNA sense strand
gaccucacuuucuccaaga

SEQ ID NO: 1154625 - RNA, 19 nt, Homo sapiens
  misc_RNA (1)...(19): siRNA sense strand
uccaagaaguuccucaaug

SEQ ID NO: 1154626 - RNA, 19 nt, Homo sapiens
  misc_RNA (1)...(19): siRNA sense strand
cgaagaggacgacgaggaa

SEQ ID NO: 1154627 - RNA, 19 nt, Homo sapiens
  misc_RNA (1)...(19): siRNA sense strand
aguuugagaugaucgauga

SEQ ID NO: 1154628 - RNA, 19 nt, Homo sapiens
  misc_RNA (1)...(19): siRNA sense strand
gauugccacugcccggaaa

SEQ ID NO: 1154629 - RNA, 19 nt, Homo sapiens
  misc_RNA (1)...(19): siRNA sense strand
gcccugaccucacuuucuc

SEQ ID NO: 1154630 - RNA, 19 nt, Homo sapiens
  misc_RNA (1)...(19): siRNA sense strand
gagaugaucgaugacaaug

SEQ ID NO: 1154631 - RNA, 19 nt, Homo sapiens
  misc_RNA (1)...(19): siRNA sense strand
cgcaacagcugcuauuucg

SEQ ID NO: 1154632 - RNA, 19 nt, Homo sapiens
  misc_RNA (1)...(19): siRNA sense strand
gcagccauuucuuccagau

SEQ ID NO: 1154633 - RNA, 19 nt, Homo sapiens
  misc_RNA (1)...(19): siRNA sense strand
agaaguuccucaaugucuu

SEQ ID NO: 1154634 - RNA, 19 nt, Homo sapiens
  misc_RNA (1)...(19): siRNA sense strand
agccauuucuuccagauga

SEQ ID NO: 1154635 - RNA, 19 nt, Homo sapiens
  misc_RNA (1)...(19): siRNA sense strand
acacgcuggugguggauga

SEQ ID NO: 1154636 - RNA, 19 nt, Homo sapiens
  misc_RNA (1)...(19): siRNA sense strand
uuccagcgcugcagccauu

SEQ ID NO: 1154637 - RNA, 19 nt, Homo sapiens
  misc_RNA (1)...(19): siRNA sense strand
acgcgucgcugguguacga

SEQ ID NO: 1154638 - RNA, 19 nt, Homo sapiens
  misc_RNA (1)...(19): siRNA sense strand
gggcaacggcauccugugu

SEQ ID NO: 1154639 - RNA, 19 nt, Homo sapiens
  misc_RNA (1)...(19): siRNA sense strand
gcagccaugcagaagauug

SEQ ID NO: 1154640 - RNA, 19 nt, Homo sapiens
  misc_RNA (1)...(19): siRNA sense strand
gcgcugcagccauuucuuc

SEQ ID NO: 1154641 - RNA, 19 nt, Homo sapiens
  misc_RNA (1)...(19): siRNA sense strand
uguacgacgcggucaagua

SEQ ID NO: 1154642 - RNA, 19 nt, Homo sapiens
  misc_RNA (1)...(19): siRNA sense strand
aggaugacuuccaggaguu

SEQ ID NO: 1154643 - RNA, 19 nt, Homo sapiens
  misc_RNA (1)...(19): siRNA sense strand
caagaaguuccucaauguc

SEQ ID NO: 1154644 - RNA, 19 nt, Homo sapiens
  misc_RNA (1)...(19): siRNA sense strand
gccauuucuuccagaugaa

SEQ ID NO: 1154645 - RNA, 19 nt, Homo sapiens
  misc_RNA (1)...(19): siRNA sense strand
ggaugacuuccaggaguuu

SEQ ID NO: 1154646 - RNA, 19 nt, Homo sapiens
  misc_RNA (1)...(19): siRNA sense strand
ccugugaccucgagaucuc

SEQ ID NO: 1154647 - RNA, 19 nt, Homo sapiens
  misc_RNA (1)...(19): siRNA sense strand
gccacugcccggaaacuga

SEQ ID NO: 1154648 - RNA, 19 nt, Homo sapiens
  misc_RNA (1)...(19): siRNA sense strand
uccaggaguuugagaugau

SEQ ID NO: 1154649 - RNA, 19 nt, Homo sapiens
  misc_RNA (1)...(19): siRNA sense strand
ccgcaacagcugcuauuuc

SEQ ID NO: 1154650 - RNA, 19 nt, Homo sapiens
  misc_RNA (1)...(19): siRNA sense strand
ugagaugaucgaugacaau

SEQ ID NO: 1154651 - RNA, 19 nt, Homo sapiens
  misc_RNA (1)...(19): siRNA sense strand
gaucgaugacaaugaagag

SEQ ID NO: 1154652 - RNA, 19 nt, Homo sapiens
  misc_RNA (1)...(19): siRNA sense strand
gaugaucgaugacaaugaa

SEQ ID NO: 1154653 - RNA, 19 nt, Homo sapiens
  misc_RNA (1)...(19): siRNA sense strand
ccaagaaguuccucaaugu

SEQ ID NO: 1154654 - RNA, 19 nt, Homo sapiens
  misc_RNA (1)...(19): siRNA sense strand
ggacagcccugaccucacu

SEQ ID NO: 1154655 - RNA, 19 nt, Homo sapiens
  misc_RNA (1)...(19): siRNA sense strand
gcgccuuccuggaguacua

SEQ ID NO: 1154656 - RNA, 19 nt, Homo sapiens
  misc_RNA (1)...(19): siRNA sense strand
gaccucacuuucuccaaga

SEQ ID NO: 1154657 - RNA, 19 nt, Homo sapiens
  misc_RNA (1)...(19): siRNA sense strand
uccaagaaguuccucaaug

SEQ ID NO: 1154658 - RNA, 19 nt, Homo sapiens
  misc_RNA (1)...(19): siRNA sense strand
cgaagaggacgacgaggaa

SEQ ID NO: 1154659 - RNA, 19 nt, Homo sapiens
  misc_RNA (1)...(19): siRNA sense strand
aguuugagaugaucgauga

SEQ ID NO: 1154660 - RNA, 19 nt, Homo sapiens
  misc_RNA (1)...(19): siRNA sense strand
gauugccacugcccggaaa

SEQ ID NO: 1154661 - RNA, 19 nt, Homo sapiens
  misc_RNA (1)...(19): siRNA sense strand
gcccugaccucacuuucuc

SEQ ID NO: 1154662 - RNA, 19 nt, Homo sapiens
  misc_RNA (1)...(19): siRNA sense strand
gagaugaucgaugacaaug

SEQ ID NO: 1154663 - RNA, 19 nt, Homo sapiens
  misc_RNA (1)...(19): siRNA sense strand
cgcaacagcugcuauuucg

SEQ ID NO: 1154664 - RNA, 19 nt, Homo sapiens
  misc_RNA (1)...(19): siRNA sense strand
gcagccauuucuuccagau

SEQ ID NO: 1154665 - RNA, 19 nt, Homo sapiens
  misc_RNA (1)...(19): siRNA sense strand
agaaguuccucaaugucuu

SEQ ID NO: 1154666 - RNA, 19 nt, Homo sapiens
  misc_RNA (1)...(19): siRNA sense strand
agccauuucuuccagauga

SEQ ID NO: 1154667 - RNA, 19 nt, Homo sapiens
  misc_RNA (1)...(19): siRNA sense strand
acacgcuggugguggauga

SEQ ID NO: 1154668 - RNA, 19 nt, Homo sapiens
  misc_RNA (1)...(19): siRNA sense strand
uuccagcgcugcagccauu

SEQ ID NO: 1154669 - RNA, 19 nt, Homo sapiens
  misc_RNA (1)...(19): siRNA sense strand
acgcgucgcugguguacga

SEQ ID NO: 1154670 - RNA, 19 nt, Homo sapiens
  misc_RNA (1)...(19): siRNA sense strand
gggcaacggcauccugugu

SEQ ID NO: 1154671 - RNA, 19 nt, Homo sapiens
  misc_RNA (1)...(19): siRNA sense strand
gcagccaugcagaagauug

SEQ ID NO: 1154672 - RNA, 19 nt, Homo sapiens
  misc_RNA (1)...(19): siRNA sense strand
gcgcugcagccauuucuuc

SEQ ID NO: 1154673 - RNA, 19 nt, Homo sapiens
  misc_RNA (1)...(19): siRNA sense strand
uguacgacgcggucaagua

SEQ ID NO: 1154674 - RNA, 19 nt, Homo sapiens
  misc_RNA (1)...(19): siRNA sense strand
aggaugacuuccaggaguu

SEQ ID NO: 1154675 - RNA, 19 nt, Homo sapiens
  misc_RNA (1)...(19): siRNA sense strand
caagaaguuccucaauguc

SEQ ID NO: 1154676 - RNA, 19 nt, Homo sapiens
  misc_RNA (1)...(19): siRNA sense strand
gccauuucuuccagaugaa

SEQ ID NO: 1154677 - RNA, 19 nt, Homo sapiens
  misc_RNA (1)...(19): siRNA sense strand
ggaugacuuccaggaguuu

SEQ ID NO: 1154678 - RNA, 19 nt, Homo sapiens
  misc_RNA (1)...(19): siRNA sense strand
ccugugaccucgagaucuc

SEQ ID NO: 1154679 - RNA, 19 nt, Homo sapiens
  misc_RNA (1)...(19): siRNA sense strand
gccacugcccggaaacuga

SEQ ID NO: 1154680 - RNA, 19 nt, Homo sapiens
  misc_RNA (1)...(19): siRNA sense strand
uccaggaguuugagaugau

SEQ ID NO: 1154681 - RNA, 19 nt, Homo sapiens
  misc_RNA (1)...(19): siRNA sense strand
ccgcaacagcugcuauuuc

SEQ ID NO: 1154682 - RNA, 19 nt, Homo sapiens
  misc_RNA (1)...(19): siRNA sense strand
ugagaugaucgaugacaau

SEQ ID NO: 1154683 - RNA, 19 nt, Homo sapiens
  misc_RNA (1)...(19): siRNA sense strand
gaucgaugacaaugaagag

SEQ ID NO: 1154684 - RNA, 19 nt, Homo sapiens
  misc_RNA (1)...(19): siRNA sense strand
gaugaucgaugacaaugaa

SEQ ID NO: 1154685 - RNA, 19 nt, Homo sapiens
  misc_RNA (1)...(19): siRNA sense strand
ccaagaaguuccucaaugu

SEQ ID NO: 1154686 - RNA, 19 nt, Homo sapiens
  misc_RNA (1)...(19): siRNA sense strand
ggacagcccugaccucacu

SEQ ID NO: 1154687 - RNA, 19 nt, Homo sapiens
  misc_RNA (1)...(19): siRNA sense strand
gcgccuuccuggaguacua

SEQ ID NO: 1154688 - RNA, 19 nt, Homo sapiens
  misc_RNA (1)...(19): siRNA sense strand
gaccucacuuucuccaaga

SEQ ID NO: 1154689 - RNA, 19 nt, Homo sapiens
  misc_RNA (1)...(19): siRNA sense strand
uccaagaaguuccucaaug

SEQ ID NO: 1154690 - RNA, 19 nt, Homo sapiens
  misc_RNA (1)...(19): siRNA sense strand
cgaagaggacgacgaggaa

SEQ ID NO: 1154691 - RNA, 19 nt, Homo sapiens
  misc_RNA (1)...(19): siRNA sense strand
aguuugagaugaucgauga

SEQ ID NO: 1154692 - RNA, 19 nt, Homo sapiens
  misc_RNA (1)...(19): siRNA sense strand
gauugccacugcccggaaa

SEQ ID NO: 1154693 - RNA, 19 nt, Homo sapiens
  misc_RNA (1)...(19): siRNA sense strand
gcccugaccucacuuucuc

SEQ ID NO: 1154694 - RNA, 19 nt, Homo sapiens
  misc_RNA (1)...(19): siRNA sense strand
gagaugaucgaugacaaug

SEQ ID NO: 1154695 - RNA, 19 nt, Homo sapiens
  misc_RNA (1)...(19): siRNA sense strand
cgcaacagcugcuauuucg

SEQ ID NO: 1154696 - RNA, 19 nt, Homo sapiens
  misc_RNA (1)...(19): siRNA sense strand
gcagccauuucuuccagau

SEQ ID NO: 1154697 - RNA, 19 nt, Homo sapiens
  misc_RNA (1)...(19): siRNA sense strand
agaaguuccucaaugucuu

SEQ ID NO: 1154698 - RNA, 19 nt, Homo sapiens
  misc_RNA (1)...(19): siRNA sense strand
agccauuucuuccagauga

SEQ ID NO: 1154699 - RNA, 19 nt, Homo sapiens
  misc_RNA (1)...(19): siRNA sense strand
acacgcuggugguggauga

SEQ ID NO: 1154700 - RNA, 19 nt, Homo sapiens
  misc_RNA (1)...(19): siRNA sense strand
uuccagcgcugcagccauu

SEQ ID NO: 1154701 - RNA, 19 nt, Homo sapiens
  misc_RNA (1)...(19): siRNA sense strand
acgcgucgcugguguacga

SEQ ID NO: 1154702 - RNA, 19 nt, Homo sapiens
  misc_RNA (1)...(19): siRNA sense strand
gggcaacggcauccugugu

SEQ ID NO: 1154703 - RNA, 19 nt, Homo sapiens
  misc_RNA (1)...(19): siRNA sense strand
gcagccaugcagaagauug

SEQ ID NO: 1154704 - RNA, 19 nt, Homo sapiens
  misc_RNA (1)...(19): siRNA sense strand
gcgcugcagccauuucuuc

SEQ ID NO: 1154705 - RNA, 19 nt, Homo sapiens
  misc_RNA (1)...(19): siRNA sense strand
uguacgacgcggucaagua

SEQ ID NO: 1154706 - RNA, 19 nt, Homo sapiens
  misc_RNA (1)...(19): siRNA sense strand
aggaugacuuccaggaguu

SEQ ID NO: 1154707 - RNA, 19 nt, Homo sapiens
  misc_RNA (1)...(19): siRNA sense strand
caagaaguuccucaauguc

SEQ ID NO: 1154708 - RNA, 19 nt, Homo sapiens
  misc_RNA (1)...(19): siRNA sense strand
gccauuucuuccagaugaa

SEQ ID NO: 1154709 - RNA, 19 nt, Homo sapiens
  misc_RNA (1)...(19): siRNA sense strand
ggaugacuuccaggaguuu

SEQ ID NO: 1154710 - RNA, 19 nt, Homo sapiens
  misc_RNA (1)...(19): siRNA sense strand
ccugugaccucgagaucuc

SEQ ID NO: 1154711 - RNA, 19 nt, Homo sapiens
  misc_RNA (1)...(19): siRNA sense strand
gccacugcccggaaacuga

SEQ ID NO: 1154712 - RNA, 19 nt, Homo sapiens
  misc_RNA (1)...(19): siRNA sense strand
uccaggaguuugagaugau

SEQ ID NO: 1154713 - RNA, 19 nt, Homo sapiens
  misc_RNA (1)...(19): siRNA sense strand
ccgcaacagcugcuauuuc

SEQ ID NO: 1154714 - RNA, 19 nt, Homo sapiens
  misc_RNA (1)...(19): siRNA sense strand
ugagaugaucgaugacaau

SEQ ID NO: 1154715 - RNA, 19 nt, Homo sapiens
  misc_RNA (1)...(19): siRNA sense strand
gaucgaugacaaugaagag

SEQ ID NO: 1154716 - RNA, 19 nt, Homo sapiens
  misc_RNA (1)...(19): siRNA sense strand
ggagaaagcuguucacuua

SEQ ID NO: 1154717 - RNA, 19 nt, Homo sapiens
  misc_RNA (1)...(19): siRNA sense strand
gaaauaaugccugaacuua

SEQ ID NO: 1154718 - RNA, 19 nt, Homo sapiens
  misc_RNA (1)...(19): siRNA sense strand
gaagauugauccauuguug

SEQ ID NO: 1154719 - RNA, 19 nt, Homo sapiens
  misc_RNA (1)...(19): siRNA sense strand
uuacguagcuguuccagaa

SEQ ID NO: 1154720 - RNA, 19 nt, Homo sapiens
  misc_RNA (1)...(19): siRNA sense strand
ugaggaugaugucuauuua

SEQ ID NO: 1154721 - RNA, 19 nt, Homo sapiens
  misc_RNA (1)...(19): siRNA sense strand
gcaagcaguuauuaaugaa

SEQ ID NO: 1154722 - RNA, 19 nt, Homo sapiens
  misc_RNA (1)...(19): siRNA sense strand
gaagguuuauuacugaaga

SEQ ID NO: 1154723 - RNA, 19 nt, Homo sapiens
  misc_RNA (1)...(19): siRNA sense strand
ugaaauuguugcagacuuu

SEQ ID NO: 1154724 - RNA, 19 nt, Homo sapiens
  misc_RNA (1)...(19): siRNA sense strand
gcaaaguguuuaucuugau

SEQ ID NO: 1154725 - RNA, 19 nt, Homo sapiens
  misc_RNA (1)...(19): siRNA sense strand
uaucagacaucacuuuguu

SEQ ID NO: 1154726 - RNA, 19 nt, Homo sapiens
  misc_RNA (1)...(19): siRNA sense strand
uacaaagucugcaaagaaa

SEQ ID NO: 1154727 - RNA, 19 nt, Homo sapiens
  misc_RNA (1)...(19): siRNA sense strand
uaagguagaugaagaaagg

SEQ ID NO: 1154728 - RNA, 19 nt, Homo sapiens
  misc_RNA (1)...(19): siRNA sense strand
gacaugaaauuaagguaga

SEQ ID NO: 1154729 - RNA, 19 nt, Homo sapiens
  misc_RNA (1)...(19): siRNA sense strand
gaauuugggucccuuugug

SEQ ID NO: 1154730 - RNA, 19 nt, Homo sapiens
  misc_RNA (1)...(19): siRNA sense strand
gaaagcuguucacuuacuu

SEQ ID NO: 1154731 - RNA, 19 nt, Homo sapiens
  misc_RNA (1)...(19): siRNA sense strand
gcacagaccgcugaauuug

SEQ ID NO: 1154732 - RNA, 19 nt, Homo sapiens
  misc_RNA (1)...(19): siRNA sense strand
agacaucacuuuguucuug

SEQ ID NO: 1154733 - RNA, 19 nt, Homo sapiens
  misc_RNA (1)...(19): siRNA sense strand
cuacaaagucugcaaagaa

SEQ ID NO: 1154734 - RNA, 19 nt, Homo sapiens
  misc_RNA (1)...(19): siRNA sense strand
gcaggaggcacuagucuga

SEQ ID NO: 1154735 - RNA, 19 nt, Homo sapiens
  misc_RNA (1)...(19): siRNA sense strand
caaaauagcggaagaaaau

SEQ ID NO: 1154736 - RNA, 19 nt, Homo sapiens
  misc_RNA (1)...(19): siRNA sense strand
cauuggauaugucaaguga

SEQ ID NO: 1154737 - RNA, 19 nt, Homo sapiens
  misc_RNA (1)...(19): siRNA sense strand
ugcaagcaguuauuaauga

SEQ ID NO: 1154738 - RNA, 19 nt, Homo sapiens
  misc_RNA (1)...(19): siRNA sense strand
uuaccaguguucuuaguuu

SEQ ID NO: 1154739 - RNA, 19 nt, Homo sapiens
  misc_RNA (1)...(19): siRNA sense strand
gcuacaaagucugcaaaga

SEQ ID NO: 1154740 - RNA, 19 nt, Homo sapiens
  misc_RNA (1)...(19): siRNA sense strand
uacagaagauuugggauga

SEQ ID NO: 1154741 - RNA, 19 nt, Homo sapiens
  misc_RNA (1)...(19): siRNA sense strand
ugccugaacuuaaucgauu

SEQ ID NO: 1154742 - RNA, 19 nt, Homo sapiens
  misc_RNA (1)...(19): siRNA sense strand
gaggaugaugucuauuuaa

SEQ ID NO: 1154743 - RNA, 19 nt, Homo sapiens
  misc_RNA (1)...(19): siRNA sense strand
gaaauuaagguagaugaag

SEQ ID NO: 1154744 - RNA, 19 nt, Homo sapiens
  misc_RNA (1)...(19): siRNA sense strand
ccauuuaccaguguucuua

SEQ ID NO: 1154745 - RNA, 19 nt, Homo sapiens
  misc_RNA (1)...(19): siRNA sense strand
gaagauuugggaugaugaa

SEQ ID NO: 1154746 - RNA, 19 nt, Homo sapiens
  misc_RNA (1)...(19): siRNA sense strand
uauaugagguggagaaagc

SEQ ID NO: 1154747 - RNA, 19 nt, Homo sapiens
  misc_RNA (1)...(19): siRNA sense strand
cagaagauuugggaugaug

SEQ ID NO: 1154748 - RNA, 19 nt, Homo sapiens
  misc_RNA (1)...(19): siRNA sense strand
uuacagagaaugcaucaga

SEQ ID NO: 1154749 - RNA, 19 nt, Homo sapiens
  misc_RNA (1)...(19): siRNA sense strand
aggaggcacuagucugaua

SEQ ID NO: 1154750 - RNA, 19 nt, Homo sapiens
  misc_RNA (1)...(19): siRNA sense strand
cguagcuguuccagaaaua

SEQ ID NO: 1154751 - RNA, 19 nt, Homo sapiens
  misc_RNA (1)...(19): siRNA sense strand
agugaagguuuauuacuga

SEQ ID NO: 1154752 - RNA, 19 nt, Homo sapiens
  misc_RNA (1)...(19): siRNA sense strand
guccaaagcaaaguguuua

SEQ ID NO: 1154753 - RNA, 19 nt, Homo sapiens
  misc_RNA (1)...(19): siRNA sense strand
ggcacagaccgcugaauuu

SEQ ID NO: 1154754 - RNA, 19 nt, Homo sapiens
  misc_RNA (1)...(19): siRNA sense strand
caaagcaaaguguuuaucu

SEQ ID NO: 1154755 - RNA, 19 nt, Homo sapiens
  misc_RNA (1)...(19): siRNA sense strand
cuucguaguucaacaagug

SEQ ID NO: 1154756 - RNA, 19 nt, Homo sapiens
  misc_RNA (1)...(19): siRNA sense strand
gaaugcaucagaggucaaa

SEQ ID NO: 1154757 - RNA, 19 nt, Homo sapiens
  misc_RNA (1)...(19): siRNA sense strand
aagcaaaguguuuaucuug

SEQ ID NO: 1154758 - RNA, 19 nt, Homo sapiens
  misc_RNA (1)...(19): siRNA sense strand
uacugaagauugauccauu

SEQ ID NO: 1154759 - RNA, 19 nt, Homo sapiens
  misc_RNA (1)...(19): siRNA sense strand
gacaucacuuuguucuugu

SEQ ID NO: 1154760 - RNA, 19 nt, Homo sapiens
  misc_RNA (1)...(19): siRNA sense strand
gauccauuguugccuaaag

SEQ ID NO: 1154761 - RNA, 19 nt, Homo sapiens
  misc_RNA (1)...(19): siRNA sense strand
agaaagcuguucacuuacu

SEQ ID NO: 1154762 - RNA, 19 nt, Homo sapiens
  misc_RNA (1)...(19): siRNA sense strand
cgaaaucaauaaaguugcu

SEQ ID NO: 1154763 - RNA, 19 nt, Homo sapiens
  misc_RNA (1)...(19): siRNA sense strand
ggaaggcgaaccugaggau

SEQ ID NO: 1154764 - RNA, 19 nt, Homo sapiens
  misc_RNA (1)...(19): siRNA sense strand
aagugaagguuuauuacug

SEQ ID NO: 1154765 - RNA, 19 nt, Homo sapiens
  misc_RNA (1)...(19): siRNA sense strand
gauauggcacugggaaaga

SEQ ID NO: 1154766 - RNA, 19 nt, Homo sapiens
  misc_RNA (1)...(19): siRNA sense strand
gauuaaggaagaaacugaa

SEQ ID NO: 1154767 - RNA, 19 nt, Homo sapiens
  misc_RNA (1)...(19): siRNA sense strand
cugaggaugaugucuauuu

SEQ ID NO: 1154768 - RNA, 19 nt, Homo sapiens
  misc_RNA (1)...(19): siRNA sense strand
gugaagguuuauuacugaa

SEQ ID NO: 1154769 - RNA, 19 nt, Homo sapiens
  misc_RNA (1)...(19): siRNA sense strand
caacaagugaagguuuauu

SEQ ID NO: 1154770 - RNA, 19 nt, Homo sapiens
  misc_RNA (1)...(19): siRNA sense strand
agcaaaguguuuaucuuga

SEQ ID NO: 1154771 - RNA, 19 nt, Homo sapiens
  misc_RNA (1)...(19): siRNA sense strand
auuguugccuaaagaagua

SEQ ID NO: 1154772 - RNA, 19 nt, Homo sapiens
  misc_RNA (1)...(19): siRNA sense strand
caaaauagcaacauuggau

SEQ ID NO: 1154773 - RNA, 19 nt, Homo sapiens
  misc_RNA (1)...(19): siRNA sense strand
cgauuaaggaagaaacuga

SEQ ID NO: 1154774 - RNA, 19 nt, Homo sapiens
  misc_RNA (1)...(19): siRNA sense strand
agaaauaaugccugaacuu

SEQ ID NO: 1154775 - RNA, 19 nt, Homo sapiens
  misc_RNA (1)...(19): siRNA sense strand
cuuccgaaaucaauaaagu

SEQ ID NO: 1154776 - RNA, 19 nt, Homo sapiens
  misc_RNA (1)...(19): siRNA sense strand
uaccaguguucuuaguuug

SEQ ID NO: 1154777 - RNA, 19 nt, Homo sapiens
  misc_RNA (1)...(19): siRNA sense strand
gauauaugagguggagaaa

SEQ ID NO: 1154778 - RNA, 19 nt, Homo sapiens
  misc_RNA (1)...(19): siRNA sense strand
guguuuaucuugauuugac

SEQ ID NO: 1154779 - RNA, 19 nt, Homo sapiens
  misc_RNA (1)...(19): siRNA sense strand
cagaaauaaugccugaacu

SEQ ID NO: 1154780 - RNA, 19 nt, Homo sapiens
  misc_RNA (1)...(19): siRNA sense strand
acugaagauugauccauug

SEQ ID NO: 1154781 - RNA, 19 nt, Homo sapiens
  misc_RNA (1)...(19): siRNA sense strand
ucacuuuguucuuguucug

SEQ ID NO: 1154782 - RNA, 19 nt, Homo sapiens
  misc_RNA (1)...(19): siRNA sense strand
gaacuuucuccagaccaaa

SEQ ID NO: 1154783 - RNA, 19 nt, Homo sapiens
  misc_RNA (1)...(19): siRNA sense strand
aaagcuguucacuuacuua

SEQ ID NO: 1154784 - RNA, 19 nt, Homo sapiens
  misc_RNA (1)...(19): siRNA sense strand
caagugaagguuuauuacu

SEQ ID NO: 1154785 - RNA, 19 nt, Homo sapiens
  misc_RNA (1)...(19): siRNA sense strand
ggagccauuuaccaguguu

SEQ ID NO: 1154786 - RNA, 19 nt, Homo sapiens
  misc_RNA (1)...(19): siRNA sense strand
gugcuuuccuucguaguuc

SEQ ID NO: 1154787 - RNA, 19 nt, Homo sapiens
  misc_RNA (1)...(19): siRNA sense strand
uauccaaagcuuucucgaa

SEQ ID NO: 1154788 - RNA, 19 nt, Homo sapiens
  misc_RNA (1)...(19): siRNA sense strand
ggauauggcacugggaaag

SEQ ID NO: 1154789 - RNA, 19 nt, Homo sapiens
  misc_RNA (1)...(19): siRNA sense strand
guuuaucagacaucacuuu

SEQ ID NO: 1154790 - RNA, 19 nt, Homo sapiens
  misc_RNA (1)...(19): siRNA sense strand
ugugguacgugcuuuccuu

SEQ ID NO: 1154791 - RNA, 19 nt, Homo sapiens
  misc_RNA (1)...(19): siRNA sense strand
aggcacagaccgcugaauu

SEQ ID NO: 1154792 - RNA, 19 nt, Homo sapiens
  misc_RNA (1)...(19): siRNA sense strand
guagcuguuccagaaauaa

SEQ ID NO: 1154793 - RNA, 19 nt, Homo sapiens
  misc_RNA (1)...(19): siRNA sense strand
cgagugcccaacagacauu

SEQ ID NO: 1154794 - RNA, 19 nt, Homo sapiens
  misc_RNA (1)...(19): siRNA sense strand
gguacgugcuuuccuucgu

SEQ ID NO: 1154795 - RNA, 19 nt, Homo sapiens
  misc_RNA (1)...(19): siRNA sense strand
gauagcugccaaucugcaa

SEQ ID NO: 1154796 - RNA, 19 nt, Homo sapiens
  misc_RNA (1)...(19): siRNA sense strand
ccagaaauaaugccugaac

SEQ ID NO: 1154797 - RNA, 19 nt, Homo sapiens
  misc_RNA (1)...(19): siRNA sense strand
uaguuugccauacccauuu

SEQ ID NO: 1154798 - RNA, 19 nt, Homo sapiens
  misc_RNA (1)...(19): siRNA sense strand
gcacugggaaagaagaaaa

SEQ ID NO: 1154799 - RNA, 19 nt, Homo sapiens
  misc_RNA (1)...(19): siRNA sense strand
agauauaugagguggagaa

SEQ ID NO: 1154800 - RNA, 19 nt, Homo sapiens
  misc_RNA (1)...(19): siRNA sense strand
aaggcgaaccugaggauga

SEQ ID NO: 1154801 - RNA, 19 nt, Homo sapiens
  misc_RNA (1)...(19): siRNA sense strand
caucagaggucaaaauagc

SEQ ID NO: 1154802 - RNA, 19 nt, Homo sapiens
  misc_RNA (1)...(19): siRNA sense strand
guucuuaguuugccauacc

SEQ ID NO: 1154803 - RNA, 19 nt, Homo sapiens
  misc_RNA (1)...(19): siRNA sense strand
auauggcacugggaaagaa

SEQ ID NO: 1154804 - RNA, 19 nt, Homo sapiens
  misc_RNA (1)...(19): siRNA sense strand
gcuuauacccgagacagau

SEQ ID NO: 1154805 - RNA, 19 nt, Homo sapiens
  misc_RNA (1)...(19): siRNA sense strand
cuuauacccgagacagaua

SEQ ID NO: 1154806 - RNA, 19 nt, Homo sapiens
  misc_RNA (1)...(19): siRNA sense strand
ccaaagcaaaguguuuauc

SEQ ID NO: 1154807 - RNA, 19 nt, Homo sapiens
  misc_RNA (1)...(19): siRNA sense strand
gguuuauuacugaagauug

SEQ ID NO: 1154808 - RNA, 19 nt, Homo sapiens
  misc_RNA (1)...(19): siRNA sense strand
uccgaaaucaauaaaguug

SEQ ID NO: 1154809 - RNA, 19 nt, Homo sapiens
  misc_RNA (1)...(19): siRNA sense strand
aagcuguucacuuacuuaa

SEQ ID NO: 1154810 - RNA, 19 nt, Homo sapiens
  misc_RNA (1)...(19): siRNA sense strand
gauuugacacuggauaugg

SEQ ID NO: 1154811 - RNA, 19 nt, Homo sapiens
  misc_RNA (1)...(19): siRNA sense strand
gagaacaacucauuacuug

SEQ ID NO: 1154812 - RNA, 19 nt, Homo sapiens
  misc_RNA (1)...(19): siRNA sense strand
gaacaacucauuacuugaa

SEQ ID NO: 1154813 - RNA, 19 nt, Homo sapiens
  misc_RNA (1)...(19): siRNA sense strand
gaauuccacucuuugguuu

SEQ ID NO: 1154814 - RNA, 19 nt, Homo sapiens
  misc_RNA (1)...(19): siRNA sense strand
gaaacgcuggcaucaauua

SEQ ID NO: 1154815 - RNA, 19 nt, Homo sapiens
  misc_RNA (1)...(19): siRNA sense strand
gggaaacgcuggcaucaau

SEQ ID NO: 1154816 - RNA, 19 nt, Homo sapiens
  misc_RNA (1)...(19): siRNA sense strand
gagaagcgcucugucuuug

SEQ ID NO: 1154817 - RNA, 19 nt, Homo sapiens
  misc_RNA (1)...(19): siRNA sense strand
gagagcagccagaagaaua

SEQ ID NO: 1154818 - RNA, 19 nt, Homo sapiens
  misc_RNA (1)...(19): siRNA sense strand
uacaagaccuuccggaauu

SEQ ID NO: 1154819 - RNA, 19 nt, Homo sapiens
  misc_RNA (1)...(19): siRNA sense strand
gaucccugcugucaucuuu

SEQ ID NO: 1154820 - RNA, 19 nt, Homo sapiens
  misc_RNA (1)...(19): siRNA sense strand
ucaauuaucgggaguggua

SEQ ID NO: 1154821 - RNA, 19 nt, Homo sapiens
  misc_RNA (1)...(19): siRNA sense strand
ggagaacaacucauuacuu

SEQ ID NO: 1154822 - RNA, 19 nt, Homo sapiens
  misc_RNA (1)...(19): siRNA sense strand
gcagcuguccucaguauga

SEQ ID NO: 1154823 - RNA, 19 nt, Homo sapiens
  misc_RNA (1)...(19): siRNA sense strand
ggaauuccacucuuugguu

SEQ ID NO: 1154824 - RNA, 19 nt, Homo sapiens
  misc_RNA (1)...(19): siRNA sense strand
uggagaaggucuuucgaaa

SEQ ID NO: 1154825 - RNA, 19 nt, Homo sapiens
  misc_RNA (1)...(19): siRNA sense strand
gacggugguugccaucuuu

SEQ ID NO: 1154826 - RNA, 19 nt, Homo sapiens
  misc_RNA (1)...(19): siRNA sense strand
acaagaccuuccggaauua

SEQ ID NO: 1154827 - RNA, 19 nt, Homo sapiens
  misc_RNA (1)...(19): siRNA sense strand
gaacugucauuacgaccau

SEQ ID NO: 1154828 - RNA, 19 nt, Homo sapiens
  misc_RNA (1)...(19): siRNA sense strand
gggagucaguccaauagga

SEQ ID NO: 1154829 - RNA, 19 nt, Homo sapiens
  misc_RNA (1)...(19): siRNA sense strand
gacgaucccugcugucauc

SEQ ID NO: 1154830 - RNA, 19 nt, Homo sapiens
  misc_RNA (1)...(19): siRNA sense strand
caacuuggaaccaucuuug

SEQ ID NO: 1154831 - RNA, 19 nt, Homo sapiens
  misc_RNA (1)...(19): siRNA sense strand
caaccauccuguucaucuu

SEQ ID NO: 1154832 - RNA, 19 nt, Homo sapiens
  misc_RNA (1)...(19): siRNA sense strand
gcugucaucuuuaaguaca

SEQ ID NO: 1154833 - RNA, 19 nt, Homo sapiens
  misc_RNA (1)...(19): siRNA sense strand
cgagaagcgcucugucuuu

SEQ ID NO: 1154834 - RNA, 19 nt, Homo sapiens
  misc_RNA (1)...(19): siRNA sense strand
ggagucaguccaauaggaa

SEQ ID NO: 1154835 - RNA, 19 nt, Homo sapiens
  misc_RNA (1)...(19): siRNA sense strand
aagaagaggugggugaaau

SEQ ID NO: 1154836 - RNA, 19 nt, Homo sapiens
  misc_RNA (1)...(19): siRNA sense strand
acucuuugguuucuuauug

SEQ ID NO: 1154837 - RNA, 19 nt, Homo sapiens
  misc_RNA (1)...(19): siRNA sense strand
cggagcagcugaacaagca

SEQ ID NO: 1154838 - RNA, 19 nt, Homo sapiens
  misc_RNA (1)...(19): siRNA sense strand
cuuauuggcuggaauugga

SEQ ID NO: 1154839 - RNA, 19 nt, Homo sapiens
  misc_RNA (1)...(19): siRNA sense strand
gaagaggugggugaaauca

SEQ ID NO: 1154840 - RNA, 19 nt, Homo sapiens
  misc_RNA (1)...(19): siRNA sense strand
gaagcgcucugucuuugcu

SEQ ID NO: 1154841 - RNA, 19 nt, Homo sapiens
  misc_RNA (1)...(19): siRNA sense strand
ggaaaagcauugcaagagu

SEQ ID NO: 1154842 - RNA, 19 nt, Homo sapiens
  misc_RNA (1)...(19): siRNA sense strand
ccaacaaccugcgccugaa

SEQ ID NO: 1154843 - RNA, 19 nt, Homo sapiens
  misc_RNA (1)...(19): siRNA sense strand
gauccagcaugcucuugau

SEQ ID NO: 1154844 - RNA, 19 nt, Homo sapiens
  misc_RNA (1)...(19): siRNA sense strand
caacaucaucaacaaguuc

SEQ ID NO: 1154845 - RNA, 19 nt, Homo sapiens
  misc_RNA (1)...(19): siRNA sense strand
ggaguccauuuacuuugug

SEQ ID NO: 1154846 - RNA, 19 nt, Homo sapiens
  misc_RNA (1)...(19): siRNA sense strand
ggaaacgcuggcaucaauu

SEQ ID NO: 1154847 - RNA, 19 nt, Homo sapiens
  misc_RNA (1)...(19): siRNA sense strand
gaggacaacaucaucaaca

SEQ ID NO: 1154848 - RNA, 19 nt, Homo sapiens
  misc_RNA (1)...(19): siRNA sense strand
uauaugccaucuuuggaau

SEQ ID NO: 1154849 - RNA, 19 nt, Homo sapiens
  misc_RNA (1)...(19): siRNA sense strand
gacaacaucaucaacaagu

SEQ ID NO: 1154850 - RNA, 19 nt, Homo sapiens
  misc_RNA (1)...(19): siRNA sense strand
cugcugucaucuuuaagua

SEQ ID NO: 1154851 - RNA, 19 nt, Homo sapiens
  misc_RNA (1)...(19): siRNA sense strand
caagugagucagaccaaga

SEQ ID NO: 1154852 - RNA, 19 nt, Homo sapiens
  misc_RNA (1)...(19): siRNA sense strand
ggaaccaucuuugggaaaa

SEQ ID NO: 1154853 - RNA, 19 nt, Homo sapiens
  misc_RNA (1)...(19): siRNA sense strand
agaauaccaucgccuugga

SEQ ID NO: 1154854 - RNA, 19 nt, Homo sapiens
  misc_RNA (1)...(19): siRNA sense strand
ucccugcugucaucuuuaa

SEQ ID NO: 1154855 - RNA, 19 nt, Homo sapiens
  misc_RNA (1)...(19): siRNA sense strand
ggccggagcagcugaacaa

SEQ ID NO: 1154856 - RNA, 19 nt, Homo sapiens
  misc_RNA (1)...(19): siRNA sense strand
acaacaucaucaacaaguu

SEQ ID NO: 1154857 - RNA, 19 nt, Homo sapiens
  misc_RNA (1)...(19): siRNA sense strand
gagauuggcuacggguucu

SEQ ID NO: 1154858 - RNA, 19 nt, Homo sapiens
  misc_RNA (1)...(19): siRNA sense strand
guuggagaacggaaugaua

SEQ ID NO: 1154859 - RNA, 19 nt, Homo sapiens
  misc_RNA (1)...(19): siRNA sense strand
cuacaagaccuuccggaau

SEQ ID NO: 1154860 - RNA, 19 nt, Homo sapiens
  misc_RNA (1)...(19): siRNA sense strand
gcauuguguuugugacgau

SEQ ID NO: 1154861 - RNA, 19 nt, Homo sapiens
  misc_RNA (1)...(19): siRNA sense strand
gcccgaggacguucagaaa

SEQ ID NO: 1154862 - RNA, 19 nt, Homo sapiens
  misc_RNA (1)...(19): siRNA sense strand
cauuggagcagcccuuuga

SEQ ID NO: 1154863 - RNA, 19 nt, Homo sapiens
  misc_RNA (1)...(19): siRNA sense strand
ggacaacaucaucaacaag

SEQ ID NO: 1154864 - RNA, 19 nt, Homo sapiens
  misc_RNA (1)...(19): siRNA sense strand
agaggugggugaaaucaag

SEQ ID NO: 1154865 - RNA, 19 nt, Homo sapiens
  misc_RNA (1)...(19): siRNA sense strand
ucaguaugaucggagauug

SEQ ID NO: 1154866 - RNA, 19 nt, Homo sapiens
  misc_RNA (1)...(19): siRNA sense strand
uccacucuuugguuucuua

SEQ ID NO: 1154867 - RNA, 19 nt, Homo sapiens
  misc_RNA (1)...(19): siRNA sense strand
ggagaaggucuuucgaaaa

SEQ ID NO: 1154868 - RNA, 19 nt, Homo sapiens
  misc_RNA (1)...(19): siRNA sense strand
gugguggucuaccuuguca

SEQ ID NO: 1154869 - RNA, 19 nt, Homo sapiens
  misc_RNA (1)...(19): siRNA sense strand
aggacaacaucaucaacaa

SEQ ID NO: 1154870 - RNA, 19 nt, Homo sapiens
  misc_RNA (1)...(19): siRNA sense strand
uugcagcuguccucaguau

SEQ ID NO: 1154871 - RNA, 19 nt, Homo sapiens
  misc_RNA (1)...(19): siRNA sense strand
uaugccaucuuuggaauuc

SEQ ID NO: 1154872 - RNA, 19 nt, Homo sapiens
  misc_RNA (1)...(19): siRNA sense strand
gccggagaacaacucauua

SEQ ID NO: 1154873 - RNA, 19 nt, Homo sapiens
  misc_RNA (1)...(19): siRNA sense strand
agacggugguugccaucuu

SEQ ID NO: 1154874 - RNA, 19 nt, Homo sapiens
  misc_RNA (1)...(19): siRNA sense strand
ugaaggaggcaaaaucuuu

SEQ ID NO: 1154875 - RNA, 19 nt, Homo sapiens
  misc_RNA (1)...(19): siRNA sense strand
caucucaaccauccuguuc

SEQ ID NO: 1154876 - RNA, 19 nt, Homo sapiens
  misc_RNA (1)...(19): siRNA sense strand
gaaacucuuccaacaacag

SEQ ID NO: 1154877 - RNA, 19 nt, Homo sapiens
  misc_RNA (1)...(19): siRNA sense strand
caaugucacggcugaguuc

SEQ ID NO: 1154878 - RNA, 19 nt, Homo sapiens
  misc_RNA (1)...(19): siRNA sense strand
cagaguggaaggccaaugu

SEQ ID NO: 1154879 - RNA, 19 nt, Homo sapiens
  misc_RNA (1)...(19): siRNA sense strand
gcuacggguucuguccaaa

SEQ ID NO: 1154880 - RNA, 19 nt, Homo sapiens
  misc_RNA (1)...(19): siRNA sense strand
gagcacugaaggaggcaaa

SEQ ID NO: 1154881 - RNA, 19 nt, Homo sapiens
  misc_RNA (1)...(19): siRNA sense strand
ggguccaccuccagacuca

SEQ ID NO: 1154882 - RNA, 19 nt, Homo sapiens
  misc_RNA (1)...(19): siRNA sense strand
acggugggcuuuggugauu

SEQ ID NO: 1154883 - RNA, 19 nt, Homo sapiens
  misc_RNA (1)...(19): siRNA sense strand
guggagaaggucuuucgaa

SEQ ID NO: 1154884 - RNA, 19 nt, Homo sapiens
  misc_RNA (1)...(19): siRNA sense strand
gcgggagucaguccaauag

SEQ ID NO: 1154885 - RNA, 19 nt, Homo sapiens
  misc_RNA (1)...(19): siRNA sense strand
cucauuacuugaagacaga

SEQ ID NO: 1154886 - RNA, 19 nt, Homo sapiens
  misc_RNA (1)...(19): siRNA sense strand
cggaauuccugcgggauca

SEQ ID NO: 1154887 - RNA, 19 nt, Homo sapiens
  misc_RNA (1)...(19): siRNA sense strand
acaacucauuacuugaaga

SEQ ID NO: 1154888 - RNA, 19 nt, Homo sapiens
  misc_RNA (1)...(19): siRNA sense strand
ucucaaccauccuguucau

SEQ ID NO: 1154889 - RNA, 19 nt, Homo sapiens
  misc_RNA (1)...(19): siRNA sense strand
uuugagagcagccagaaga

SEQ ID NO: 1154890 - RNA, 19 nt, Homo sapiens
  misc_RNA (1)...(19): siRNA sense strand
gauacccacggacaccaaa

SEQ ID NO: 1154891 - RNA, 19 nt, Homo sapiens
  misc_RNA (1)...(19): siRNA sense strand
ccuccagacucaccaagag

SEQ ID NO: 1154892 - RNA, 19 nt, Homo sapiens
  misc_RNA (1)...(19): siRNA sense strand
agaccgucaugaaguggaa

SEQ ID NO: 1154893 - RNA, 19 nt, Homo sapiens
  misc_RNA (1)...(19): siRNA sense strand
ccaaugucacggcugaguu

SEQ ID NO: 1154894 - RNA, 19 nt, Homo sapiens
  misc_RNA (1)...(19): siRNA sense strand
gaguggaaggccaauguca

SEQ ID NO: 1154895 - RNA, 19 nt, Homo sapiens
  misc_RNA (1)...(19): siRNA sense strand
gcuugcagaccgucaugaa

SEQ ID NO: 1154896 - RNA, 19 nt, Homo sapiens
  misc_RNA (1)...(19): siRNA sense strand
uaucgggagugguauaagc

SEQ ID NO: 1154897 - RNA, 19 nt, Homo sapiens
  misc_RNA (1)...(19): siRNA sense strand
ucaaccauccuguucaucu

SEQ ID NO: 1154898 - RNA, 19 nt, Homo sapiens
  misc_RNA (1)...(19): siRNA sense strand
uuauaugccaucuuuggaa

SEQ ID NO: 1154899 - RNA, 19 nt, Homo sapiens
  misc_RNA (1)...(19): siRNA sense strand
ccgagaagcgcucugucuu

SEQ ID NO: 1154900 - RNA, 19 nt, Homo sapiens
  misc_RNA (1)...(19): siRNA sense strand
cacuggcggucuugucuuc

SEQ ID NO: 1154901 - RNA, 19 nt, Homo sapiens
  misc_RNA (1)...(19): siRNA sense strand
cagcuguccucaguaugau

SEQ ID NO: 1154902 - RNA, 19 nt, Homo sapiens
  misc_RNA (1)...(19): siRNA sense strand
acuugaagacagaaacuaa

SEQ ID NO: 1154903 - RNA, 19 nt, Homo sapiens
  misc_RNA (1)...(19): siRNA sense strand
ccgaggacguucagaaaau

SEQ ID NO: 1154904 - RNA, 19 nt, Homo sapiens
  misc_RNA (1)...(19): siRNA sense strand
gaccuugcccgaggacguu

SEQ ID NO: 1154905 - RNA, 19 nt, Homo sapiens
  misc_RNA (1)...(19): siRNA sense strand
caacaaccugcgccugaag

SEQ ID NO: 1154906 - RNA, 19 nt, Homo sapiens
  misc_RNA (1)...(19): siRNA sense strand
aaagaagaggugggugaaa

SEQ ID NO: 1154907 - RNA, 19 nt, Homo sapiens
  misc_RNA (1)...(19): siRNA sense strand
ggcuacggguucuguccaa

SEQ ID NO: 1154908 - RNA, 19 nt, Homo sapiens
  misc_RNA (1)...(19): siRNA sense strand
ccugcgggaucaugucugu

SEQ ID NO: 1154909 - RNA, 19 nt, Homo sapiens
  misc_RNA (1)...(19): siRNA sense strand
gagaacaacucauuacuug

SEQ ID NO: 1154910 - RNA, 19 nt, Homo sapiens
  misc_RNA (1)...(19): siRNA sense strand
gaacaacucauuacuugaa

SEQ ID NO: 1154911 - RNA, 19 nt, Homo sapiens
  misc_RNA (1)...(19): siRNA sense strand
gaauuccacucuuugguuu

SEQ ID NO: 1154912 - RNA, 19 nt, Homo sapiens
  misc_RNA (1)...(19): siRNA sense strand
gaaacgcuggcaucaauua

SEQ ID NO: 1154913 - RNA, 19 nt, Homo sapiens
  misc_RNA (1)...(19): siRNA sense strand
gggaaacgcuggcaucaau

SEQ ID NO: 1154914 - RNA, 19 nt, Homo sapiens
  misc_RNA (1)...(19): siRNA sense strand
gagaagcgcucugucuuug

SEQ ID NO: 1154915 - RNA, 19 nt, Homo sapiens
  misc_RNA (1)...(19): siRNA sense strand
gagagcagccagaagaaua

SEQ ID NO: 1154916 - RNA, 19 nt, Homo sapiens
  misc_RNA (1)...(19): siRNA sense strand
uacaagaccuuccggaauu

SEQ ID NO: 1154917 - RNA, 19 nt, Homo sapiens
  misc_RNA (1)...(19): siRNA sense strand
gaucccugcugucaucuuu

SEQ ID NO: 1154918 - RNA, 19 nt, Homo sapiens
  misc_RNA (1)...(19): siRNA sense strand
ucaauuaucgggaguggua

SEQ ID NO: 1154919 - RNA, 19 nt, Homo sapiens
  misc_RNA (1)...(19): siRNA sense strand
ggagaacaacucauuacuu

SEQ ID NO: 1154920 - RNA, 19 nt, Homo sapiens
  misc_RNA (1)...(19): siRNA sense strand
gcagcuguccucaguauga

SEQ ID NO: 1154921 - RNA, 19 nt, Homo sapiens
  misc_RNA (1)...(19): siRNA sense strand
ggaauuccacucuuugguu

SEQ ID NO: 1154922 - RNA, 19 nt, Homo sapiens
  misc_RNA (1)...(19): siRNA sense strand
uggagaaggucuuucgaaa

SEQ ID NO: 1154923 - RNA, 19 nt, Homo sapiens
  misc_RNA (1)...(19): siRNA sense strand
gacggugguugccaucuuu

SEQ ID NO: 1154924 - RNA, 19 nt, Homo sapiens
  misc_RNA (1)...(19): siRNA sense strand
acaagaccuuccggaauua

SEQ ID NO: 1154925 - RNA, 19 nt, Homo sapiens
  misc_RNA (1)...(19): siRNA sense strand
gaacugucauuacgaccau

SEQ ID NO: 1154926 - RNA, 19 nt, Homo sapiens
  misc_RNA (1)...(19): siRNA sense strand
gggagucaguccaauagga

SEQ ID NO: 1154927 - RNA, 19 nt, Homo sapiens
  misc_RNA (1)...(19): siRNA sense strand
gacgaucccugcugucauc

SEQ ID NO: 1154928 - RNA, 19 nt, Homo sapiens
  misc_RNA (1)...(19): siRNA sense strand
caacuuggaaccaucuuug

SEQ ID NO: 1154929 - RNA, 19 nt, Homo sapiens
  misc_RNA (1)...(19): siRNA sense strand
caaccauccuguucaucuu

SEQ ID NO: 1154930 - RNA, 19 nt, Homo sapiens
  misc_RNA (1)...(19): siRNA sense strand
gcugucaucuuuaaguaca

SEQ ID NO: 1154931 - RNA, 19 nt, Homo sapiens
  misc_RNA (1)...(19): siRNA sense strand
cgagaagcgcucugucuuu

SEQ ID NO: 1154932 - RNA, 19 nt, Homo sapiens
  misc_RNA (1)...(19): siRNA sense strand
ggagucaguccaauaggaa

SEQ ID NO: 1154933 - RNA, 19 nt, Homo sapiens
  misc_RNA (1)...(19): siRNA sense strand
aagaagaggugggugaaau

SEQ ID NO: 1154934 - RNA, 19 nt, Homo sapiens
  misc_RNA (1)...(19): siRNA sense strand
acucuuugguuucuuauug

SEQ ID NO: 1154935 - RNA, 19 nt, Homo sapiens
  misc_RNA (1)...(19): siRNA sense strand
cggagcagcugaacaagca

SEQ ID NO: 1154936 - RNA, 19 nt, Homo sapiens
  misc_RNA (1)...(19): siRNA sense strand
cuuauuggcuggaauugga

SEQ ID NO: 1154937 - RNA, 19 nt, Homo sapiens
  misc_RNA (1)...(19): siRNA sense strand
gaagaggugggugaaauca

SEQ ID NO: 1154938 - RNA, 19 nt, Homo sapiens
  misc_RNA (1)...(19): siRNA sense strand
gaagcgcucugucuuugcu

SEQ ID NO: 1154939 - RNA, 19 nt, Homo sapiens
  misc_RNA (1)...(19): siRNA sense strand
ggaaaagcauugcaagagu

SEQ ID NO: 1154940 - RNA, 19 nt, Homo sapiens
  misc_RNA (1)...(19): siRNA sense strand
ccaacaaccugcgccugaa

SEQ ID NO: 1154941 - RNA, 19 nt, Homo sapiens
  misc_RNA (1)...(19): siRNA sense strand
gauccagcaugcucuugau

SEQ ID NO: 1154942 - RNA, 19 nt, Homo sapiens
  misc_RNA (1)...(19): siRNA sense strand
caacaucaucaacaaguuc

SEQ ID NO: 1154943 - RNA, 19 nt, Homo sapiens
  misc_RNA (1)...(19): siRNA sense strand
ggaguccauuuacuuugug

SEQ ID NO: 1154944 - RNA, 19 nt, Homo sapiens
  misc_RNA (1)...(19): siRNA sense strand
ggaaacgcuggcaucaauu

SEQ ID NO: 1154945 - RNA, 19 nt, Homo sapiens
  misc_RNA (1)...(19): siRNA sense strand
gaggacaacaucaucaaca

SEQ ID NO: 1154946 - RNA, 19 nt, Homo sapiens
  misc_RNA (1)...(19): siRNA sense strand
uauaugccaucuuuggaau

SEQ ID NO: 1154947 - RNA, 19 nt, Homo sapiens
  misc_RNA (1)...(19): siRNA sense strand
gacaacaucaucaacaagu

SEQ ID NO: 1154948 - RNA, 19 nt, Homo sapiens
  misc_RNA (1)...(19): siRNA sense strand
cugcugucaucuuuaagua

SEQ ID NO: 1154949 - RNA, 19 nt, Homo sapiens
  misc_RNA (1)...(19): siRNA sense strand
caagugagucagaccaaga

SEQ ID NO: 1154950 - RNA, 19 nt, Homo sapiens
  misc_RNA (1)...(19): siRNA sense strand
ggaaccaucuuugggaaaa

SEQ ID NO: 1154951 - RNA, 19 nt, Homo sapiens
  misc_RNA (1)...(19): siRNA sense strand
agaauaccaucgccuugga

SEQ ID NO: 1154952 - RNA, 19 nt, Homo sapiens
  misc_RNA (1)...(19): siRNA sense strand
ucccugcugucaucuuuaa

SEQ ID NO: 1154953 - RNA, 19 nt, Homo sapiens
  misc_RNA (1)...(19): siRNA sense strand
ggccggagcagcugaacaa

SEQ ID NO: 1154954 - RNA, 19 nt, Homo sapiens
  misc_RNA (1)...(19): siRNA sense strand
acaacaucaucaacaaguu

SEQ ID NO: 1154955 - RNA, 19 nt, Homo sapiens
  misc_RNA (1)...(19): siRNA sense strand
gagauuggcuacggguucu

SEQ ID NO: 1154956 - RNA, 19 nt, Homo sapiens
  misc_RNA (1)...(19): siRNA sense strand
guuggagaacggaaugaua

SEQ ID NO: 1154957 - RNA, 19 nt, Homo sapiens
  misc_RNA (1)...(19): siRNA sense strand
cuacaagaccuuccggaau

SEQ ID NO: 1154958 - RNA, 19 nt, Homo sapiens
  misc_RNA (1)...(19): siRNA sense strand
gcauuguguuugugacgau

SEQ ID NO: 1154959 - RNA, 19 nt, Homo sapiens
  misc_RNA (1)...(19): siRNA sense strand
gcccgaggacguucagaaa

SEQ ID NO: 1154960 - RNA, 19 nt, Homo sapiens
  misc_RNA (1)...(19): siRNA sense strand
cauuggagcagcccuuuga

SEQ ID NO: 1154961 - RNA, 19 nt, Homo sapiens
  misc_RNA (1)...(19): siRNA sense strand
ggacaacaucaucaacaag

SEQ ID NO: 1154962 - RNA, 19 nt, Homo sapiens
  misc_RNA (1)...(19): siRNA sense strand
agaggugggugaaaucaag

SEQ ID NO: 1154963 - RNA, 19 nt, Homo sapiens
  misc_RNA (1)...(19): siRNA sense strand
ucaguaugaucggagauug

SEQ ID NO: 1154964 - RNA, 19 nt, Homo sapiens
  misc_RNA (1)...(19): siRNA sense strand
uccacucuuugguuucuua

SEQ ID NO: 1154965 - RNA, 19 nt, Homo sapiens
  misc_RNA (1)...(19): siRNA sense strand
ggagaaggucuuucgaaaa

SEQ ID NO: 1154966 - RNA, 19 nt, Homo sapiens
  misc_RNA (1)...(19): siRNA sense strand
gugguggucuaccuuguca

SEQ ID NO: 1154967 - RNA, 19 nt, Homo sapiens
  misc_RNA (1)...(19): siRNA sense strand
aggacaacaucaucaacaa

SEQ ID NO: 1154968 - RNA, 19 nt, Homo sapiens
  misc_RNA (1)...(19): siRNA sense strand
uugcagcuguccucaguau

SEQ ID NO: 1154969 - RNA, 19 nt, Homo sapiens
  misc_RNA (1)...(19): siRNA sense strand
uaugccaucuuuggaauuc

SEQ ID NO: 1154970 - RNA, 19 nt, Homo sapiens
  misc_RNA (1)...(19): siRNA sense strand
gccggagaacaacucauua

SEQ ID NO: 1154971 - RNA, 19 nt, Homo sapiens
  misc_RNA (1)...(19): siRNA sense strand
agacggugguugccaucuu

SEQ ID NO: 1154972 - RNA, 19 nt, Homo sapiens
  misc_RNA (1)...(19): siRNA sense strand
ugaaggaggcaaaaucuuu

SEQ ID NO: 1154973 - RNA, 19 nt, Homo sapiens
  misc_RNA (1)...(19): siRNA sense strand
caucucaaccauccuguuc

SEQ ID NO: 1154974 - RNA, 19 nt, Homo sapiens
  misc_RNA (1)...(19): siRNA sense strand
gaaacucuuccaacaacag

SEQ ID NO: 1154975 - RNA, 19 nt, Homo sapiens
  misc_RNA (1)...(19): siRNA sense strand
caaugucacggcugaguuc

SEQ ID NO: 1154976 - RNA, 19 nt, Homo sapiens
  misc_RNA (1)...(19): siRNA sense strand
cagaguggaaggccaaugu

SEQ ID NO: 1154977 - RNA, 19 nt, Homo sapiens
  misc_RNA (1)...(19): siRNA sense strand
gcuacggguucuguccaaa

SEQ ID NO: 1154978 - RNA, 19 nt, Homo sapiens
  misc_RNA (1)...(19): siRNA sense strand
gagcacugaaggaggcaaa

SEQ ID NO: 1154979 - RNA, 19 nt, Homo sapiens
  misc_RNA (1)...(19): siRNA sense strand
ggguccaccuccagacuca

SEQ ID NO: 1154980 - RNA, 19 nt, Homo sapiens
  misc_RNA (1)...(19): siRNA sense strand
acggugggcuuuggugauu

SEQ ID NO: 1154981 - RNA, 19 nt, Homo sapiens
  misc_RNA (1)...(19): siRNA sense strand
guggagaaggucuuucgaa

SEQ ID NO: 1154982 - RNA, 19 nt, Homo sapiens
  misc_RNA (1)...(19): siRNA sense strand
gcgggagucaguccaauag

SEQ ID NO: 1154983 - RNA, 19 nt, Homo sapiens
  misc_RNA (1)...(19): siRNA sense strand
cucauuacuugaagacaga

SEQ ID NO: 1154984 - RNA, 19 nt, Homo sapiens
  misc_RNA (1)...(19): siRNA sense strand
cggaauuccugcgggauca

SEQ ID NO: 1154985 - RNA, 19 nt, Homo sapiens
  misc_RNA (1)...(19): siRNA sense strand
acaacucauuacuugaaga

SEQ ID NO: 1154986 - RNA, 19 nt, Homo sapiens
  misc_RNA (1)...(19): siRNA sense strand
ucucaaccauccuguucau

SEQ ID NO: 1154987 - RNA, 19 nt, Homo sapiens
  misc_RNA (1)...(19): siRNA sense strand
uuugagagcagccagaaga

SEQ ID NO: 1154988 - RNA, 19 nt, Homo sapiens
  misc_RNA (1)...(19): siRNA sense strand
gauacccacggacaccaaa

SEQ ID NO: 1154989 - RNA, 19 nt, Homo sapiens
  misc_RNA (1)...(19): siRNA sense strand
ccuccagacucaccaagag

SEQ ID NO: 1154990 - RNA, 19 nt, Homo sapiens
  misc_RNA (1)...(19): siRNA sense strand
agaccgucaugaaguggaa

SEQ ID NO: 1154991 - RNA, 19 nt, Homo sapiens
  misc_RNA (1)...(19): siRNA sense strand
ccaaugucacggcugaguu

SEQ ID NO: 1154992 - RNA, 19 nt, Homo sapiens
  misc_RNA (1)...(19): siRNA sense strand
gaguggaaggccaauguca

SEQ ID NO: 1154993 - RNA, 19 nt, Homo sapiens
  misc_RNA (1)...(19): siRNA sense strand
gcuugcagaccgucaugaa

SEQ ID NO: 1154994 - RNA, 19 nt, Homo sapiens
  misc_RNA (1)...(19): siRNA sense strand
uaucgggagugguauaagc

SEQ ID NO: 1154995 - RNA, 19 nt, Homo sapiens
  misc_RNA (1)...(19): siRNA sense strand
ucaaccauccuguucaucu

SEQ ID NO: 1154996 - RNA, 19 nt, Homo sapiens
  misc_RNA (1)...(19): siRNA sense strand
uuauaugccaucuuuggaa

SEQ ID NO: 1154997 - RNA, 19 nt, Homo sapiens
  misc_RNA (1)...(19): siRNA sense strand
ccgagaagcgcucugucuu

SEQ ID NO: 1154998 - RNA, 19 nt, Homo sapiens
  misc_RNA (1)...(19): siRNA sense strand
cacuggcggucuugucuuc

SEQ ID NO: 1154999 - RNA, 19 nt, Homo sapiens
  misc_RNA (1)...(19): siRNA sense strand
cagcuguccucaguaugau

SEQ ID NO: 1155000 - RNA, 19 nt, Homo sapiens
  misc_RNA (1)...(19): siRNA sense strand
acuugaagacagaaacuaa

SEQ ID NO: 1155001 - RNA, 19 nt, Homo sapiens
  misc_RNA (1)...(19): siRNA sense strand
ccgaggacguucagaaaau

SEQ ID NO: 1155002 - RNA, 19 nt, Homo sapiens
  misc_RNA (1)...(19): siRNA sense strand
gaccuugcccgaggacguu

SEQ ID NO: 1155003 - RNA, 19 nt, Homo sapiens
  misc_RNA (1)...(19): siRNA sense strand
caacaaccugcgccugaag

SEQ ID NO: 1155004 - RNA, 19 nt, Homo sapiens
  misc_RNA (1)...(19): siRNA sense strand
aaagaagaggugggugaaa

SEQ ID NO: 1155005 - RNA, 19 nt, Homo sapiens
  misc_RNA (1)...(19): siRNA sense strand
ggcuacggguucuguccaa

SEQ ID NO: 1155006 - RNA, 19 nt, Homo sapiens
  misc_RNA (1)...(19): siRNA sense strand
ccugcgggaucaugucugu

SEQ ID NO: 1155007 - RNA, 19 nt, Homo sapiens
  misc_RNA (1)...(19): siRNA sense strand
gagaacaacucauuacuug

SEQ ID NO: 1155008 - RNA, 19 nt, Homo sapiens
  misc_RNA (1)...(19): siRNA sense strand
gaacaacucauuacuugaa

SEQ ID NO: 1155009 - RNA, 19 nt, Homo sapiens
  misc_RNA (1)...(19): siRNA sense strand
gaauuccacucuuugguuu

SEQ ID NO: 1155010 - RNA, 19 nt, Homo sapiens
  misc_RNA (1)...(19): siRNA sense strand
gaaacgcuggcaucaauua

SEQ ID NO: 1155011 - RNA, 19 nt, Homo sapiens
  misc_RNA (1)...(19): siRNA sense strand
gggaaacgcuggcaucaau

SEQ ID NO: 1155012 - RNA, 19 nt, Homo sapiens
  misc_RNA (1)...(19): siRNA sense strand
gagaagcgcucugucuuug

SEQ ID NO: 1155013 - RNA, 19 nt, Homo sapiens
  misc_RNA (1)...(19): siRNA sense strand
gagagcagccagaagaaua

SEQ ID NO: 1155014 - RNA, 19 nt, Homo sapiens
  misc_RNA (1)...(19): siRNA sense strand
uacaagaccuuccggaauu

SEQ ID NO: 1155015 - RNA, 19 nt, Homo sapiens
  misc_RNA (1)...(19): siRNA sense strand
gaucccugcugucaucuuu

SEQ ID NO: 1155016 - RNA, 19 nt, Homo sapiens
  misc_RNA (1)...(19): siRNA sense strand
ucaauuaucgggaguggua

SEQ ID NO: 1155017 - RNA, 19 nt, Homo sapiens
  misc_RNA (1)...(19): siRNA sense strand
ggagaacaacucauuacuu

SEQ ID NO: 1155018 - RNA, 19 nt, Homo sapiens
  misc_RNA (1)...(19): siRNA sense strand
gcagcuguccucaguauga

SEQ ID NO: 1155019 - RNA, 19 nt, Homo sapiens
  misc_RNA (1)...(19): siRNA sense strand
ggaauuccacucuuugguu

SEQ ID NO: 1155020 - RNA, 19 nt, Homo sapiens
  misc_RNA (1)...(19): siRNA sense strand
uggagaaggucuuucgaaa

SEQ ID NO: 1155021 - RNA, 19 nt, Homo sapiens
  misc_RNA (1)...(19): siRNA sense strand
gacggugguugccaucuuu

SEQ ID NO: 1155022 - RNA, 19 nt, Homo sapiens
  misc_RNA (1)...(19): siRNA sense strand
acaagaccuuccggaauua

SEQ ID NO: 1155023 - RNA, 19 nt, Homo sapiens
  misc_RNA (1)...(19): siRNA sense strand
gaacugucauuacgaccau

SEQ ID NO: 1155024 - RNA, 19 nt, Homo sapiens
  misc_RNA (1)...(19): siRNA sense strand
gggagucaguccaauagga

SEQ ID NO: 1155025 - RNA, 19 nt, Homo sapiens
  misc_RNA (1)...(19): siRNA sense strand
gacgaucccugcugucauc

SEQ ID NO: 1155026 - RNA, 19 nt, Homo sapiens
  misc_RNA (1)...(19): siRNA sense strand
caacuuggaaccaucuuug

SEQ ID NO: 1155027 - RNA, 19 nt, Homo sapiens
  misc_RNA (1)...(19): siRNA sense strand
caaccauccuguucaucuu

SEQ ID NO: 1155028 - RNA, 19 nt, Homo sapiens
  misc_RNA (1)...(19): siRNA sense strand
gcugucaucuuuaaguaca

SEQ ID NO: 1155029 - RNA, 19 nt, Homo sapiens
  misc_RNA (1)...(19): siRNA sense strand
cgagaagcgcucugucuuu

SEQ ID NO: 1155030 - RNA, 19 nt, Homo sapiens
  misc_RNA (1)...(19): siRNA sense strand
ggagucaguccaauaggaa

SEQ ID NO: 1155031 - RNA, 19 nt, Homo sapiens
  misc_RNA (1)...(19): siRNA sense strand
aagaagaggugggugaaau

SEQ ID NO: 1155032 - RNA, 19 nt, Homo sapiens
  misc_RNA (1)...(19): siRNA sense strand
acucuuugguuucuuauug

SEQ ID NO: 1155033 - RNA, 19 nt, Homo sapiens
  misc_RNA (1)...(19): siRNA sense strand
cggagcagcugaacaagca

SEQ ID NO: 1155034 - RNA, 19 nt, Homo sapiens
  misc_RNA (1)...(19): siRNA sense strand
cuuauuggcuggaauugga

SEQ ID NO: 1155035 - RNA, 19 nt, Homo sapiens
  misc_RNA (1)...(19): siRNA sense strand
gaagaggugggugaaauca

SEQ ID NO: 1155036 - RNA, 19 nt, Homo sapiens
  misc_RNA (1)...(19): siRNA sense strand
gaagcgcucugucuuugcu

SEQ ID NO: 1155037 - RNA, 19 nt, Homo sapiens
  misc_RNA (1)...(19): siRNA sense strand
ggaaaagcauugcaagagu

SEQ ID NO: 1155038 - RNA, 19 nt, Homo sapiens
  misc_RNA (1)...(19): siRNA sense strand
ccaacaaccugcgccugaa

SEQ ID NO: 1155039 - RNA, 19 nt, Homo sapiens
  misc_RNA (1)...(19): siRNA sense strand
gauccagcaugcucuugau

SEQ ID NO: 1155040 - RNA, 19 nt, Homo sapiens
  misc_RNA (1)...(19): siRNA sense strand
caacaucaucaacaaguuc

SEQ ID NO: 1155041 - RNA, 19 nt, Homo sapiens
  misc_RNA (1)...(19): siRNA sense strand
ggaguccauuuacuuugug

SEQ ID NO: 1155042 - RNA, 19 nt, Homo sapiens
  misc_RNA (1)...(19): siRNA sense strand
ggaaacgcuggcaucaauu

SEQ ID NO: 1155043 - RNA, 19 nt, Homo sapiens
  misc_RNA (1)...(19): siRNA sense strand
gaggacaacaucaucaaca

SEQ ID NO: 1155044 - RNA, 19 nt, Homo sapiens
  misc_RNA (1)...(19): siRNA sense strand
uauaugccaucuuuggaau

SEQ ID NO: 1155045 - RNA, 19 nt, Homo sapiens
  misc_RNA (1)...(19): siRNA sense strand
gacaacaucaucaacaagu

SEQ ID NO: 1155046 - RNA, 19 nt, Homo sapiens
  misc_RNA (1)...(19): siRNA sense strand
cugcugucaucuuuaagua

SEQ ID NO: 1155047 - RNA, 19 nt, Homo sapiens
  misc_RNA (1)...(19): siRNA sense strand
caagugagucagaccaaga

SEQ ID NO: 1155048 - RNA, 19 nt, Homo sapiens
  misc_RNA (1)...(19): siRNA sense strand
ggaaccaucuuugggaaaa

SEQ ID NO: 1155049 - RNA, 19 nt, Homo sapiens
  misc_RNA (1)...(19): siRNA sense strand
agaauaccaucgccuugga

SEQ ID NO: 1155050 - RNA, 19 nt, Homo sapiens
  misc_RNA (1)...(19): siRNA sense strand
ucccugcugucaucuuuaa

SEQ ID NO: 1155051 - RNA, 19 nt, Homo sapiens
  misc_RNA (1)...(19): siRNA sense strand
ggccggagcagcugaacaa

SEQ ID NO: 1155052 - RNA, 19 nt, Homo sapiens
  misc_RNA (1)...(19): siRNA sense strand
acaacaucaucaacaaguu

SEQ ID NO: 1155053 - RNA, 19 nt, Homo sapiens
  misc_RNA (1)...(19): siRNA sense strand
gagauuggcuacggguucu

SEQ ID NO: 1155054 - RNA, 19 nt, Homo sapiens
  misc_RNA (1)...(19): siRNA sense strand
guuggagaacggaaugaua

SEQ ID NO: 1155055 - RNA, 19 nt, Homo sapiens
  misc_RNA (1)...(19): siRNA sense strand
cuacaagaccuuccggaau

SEQ ID NO: 1155056 - RNA, 19 nt, Homo sapiens
  misc_RNA (1)...(19): siRNA sense strand
gcauuguguuugugacgau

SEQ ID NO: 1155057 - RNA, 19 nt, Homo sapiens
  misc_RNA (1)...(19): siRNA sense strand
gcccgaggacguucagaaa

SEQ ID NO: 1155058 - RNA, 19 nt, Homo sapiens
  misc_RNA (1)...(19): siRNA sense strand
cauuggagcagcccuuuga

SEQ ID NO: 1155059 - RNA, 19 nt, Homo sapiens
  misc_RNA (1)...(19): siRNA sense strand
ggacaacaucaucaacaag

SEQ ID NO: 1155060 - RNA, 19 nt, Homo sapiens
  misc_RNA (1)...(19): siRNA sense strand
agaggugggugaaaucaag

SEQ ID NO: 1155061 - RNA, 19 nt, Homo sapiens
  misc_RNA (1)...(19): siRNA sense strand
ucaguaugaucggagauug

SEQ ID NO: 1155062 - RNA, 19 nt, Homo sapiens
  misc_RNA (1)...(19): siRNA sense strand
uccacucuuugguuucuua

SEQ ID NO: 1155063 - RNA, 19 nt, Homo sapiens
  misc_RNA (1)...(19): siRNA sense strand
ggagaaggucuuucgaaaa

SEQ ID NO: 1155064 - RNA, 19 nt, Homo sapiens
  misc_RNA (1)...(19): siRNA sense strand
gugguggucuaccuuguca

SEQ ID NO: 1155065 - RNA, 19 nt, Homo sapiens
  misc_RNA (1)...(19): siRNA sense strand
aggacaacaucaucaacaa

SEQ ID NO: 1155066 - RNA, 19 nt, Homo sapiens
  misc_RNA (1)...(19): siRNA sense strand
uugcagcuguccucaguau

SEQ ID NO: 1155067 - RNA, 19 nt, Homo sapiens
  misc_RNA (1)...(19): siRNA sense strand
uaugccaucuuuggaauuc

SEQ ID NO: 1155068 - RNA, 19 nt, Homo sapiens
  misc_RNA (1)...(19): siRNA sense strand
gccggagaacaacucauua

SEQ ID NO: 1155069 - RNA, 19 nt, Homo sapiens
  misc_RNA (1)...(19): siRNA sense strand
agacggugguugccaucuu

SEQ ID NO: 1155070 - RNA, 19 nt, Homo sapiens
  misc_RNA (1)...(19): siRNA sense strand
ugaaggaggcaaaaucuuu

SEQ ID NO: 1155071 - RNA, 19 nt, Homo sapiens
  misc_RNA (1)...(19): siRNA sense strand
caucucaaccauccuguuc

SEQ ID NO: 1155072 - RNA, 19 nt, Homo sapiens
  misc_RNA (1)...(19): siRNA sense strand
gaaacucuuccaacaacag

SEQ ID NO: 1155073 - RNA, 19 nt, Homo sapiens
  misc_RNA (1)...(19): siRNA sense strand
caaugucacggcugaguuc

SEQ ID NO: 1155074 - RNA, 19 nt, Homo sapiens
  misc_RNA (1)...(19): siRNA sense strand
cagaguggaaggccaaugu

SEQ ID NO: 1155075 - RNA, 19 nt, Homo sapiens
  misc_RNA (1)...(19): siRNA sense strand
gcuacggguucuguccaaa

SEQ ID NO: 1155076 - RNA, 19 nt, Homo sapiens
  misc_RNA (1)...(19): siRNA sense strand
gagcacugaaggaggcaaa

SEQ ID NO: 1155077 - RNA, 19 nt, Homo sapiens
  misc_RNA (1)...(19): siRNA sense strand
ggguccaccuccagacuca

SEQ ID NO: 1155078 - RNA, 19 nt, Homo sapiens
  misc_RNA (1)...(19): siRNA sense strand
acggugggcuuuggugauu

SEQ ID NO: 1155079 - RNA, 19 nt, Homo sapiens
  misc_RNA (1)...(19): siRNA sense strand
guggagaaggucuuucgaa

SEQ ID NO: 1155080 - RNA, 19 nt, Homo sapiens
  misc_RNA (1)...(19): siRNA sense strand
gcgggagucaguccaauag

SEQ ID NO: 1155081 - RNA, 19 nt, Homo sapiens
  misc_RNA (1)...(19): siRNA sense strand
cucauuacuugaagacaga

SEQ ID NO: 1155082 - RNA, 19 nt, Homo sapiens
  misc_RNA (1)...(19): siRNA sense strand
cggaauuccugcgggauca

SEQ ID NO: 1155083 - RNA, 19 nt, Homo sapiens
  misc_RNA (1)...(19): siRNA sense strand
acaacucauuacuugaaga

SEQ ID NO: 1155084 - RNA, 19 nt, Homo sapiens
  misc_RNA (1)...(19): siRNA sense strand
ucucaaccauccuguucau

SEQ ID NO: 1155085 - RNA, 19 nt, Homo sapiens
  misc_RNA (1)...(19): siRNA sense strand
uuugagagcagccagaaga

SEQ ID NO: 1155086 - RNA, 19 nt, Homo sapiens
  misc_RNA (1)...(19): siRNA sense strand
gauacccacggacaccaaa

SEQ ID NO: 1155087 - RNA, 19 nt, Homo sapiens
  misc_RNA (1)...(19): siRNA sense strand
ccuccagacucaccaagag

SEQ ID NO: 1155088 - RNA, 19 nt, Homo sapiens
  misc_RNA (1)...(19): siRNA sense strand
agaccgucaugaaguggaa

SEQ ID NO: 1155089 - RNA, 19 nt, Homo sapiens
  misc_RNA (1)...(19): siRNA sense strand
ccaaugucacggcugaguu

SEQ ID NO: 1155090 - RNA, 19 nt, Homo sapiens
  misc_RNA (1)...(19): siRNA sense strand
gaguggaaggccaauguca

SEQ ID NO: 1155091 - RNA, 19 nt, Homo sapiens
  misc_RNA (1)...(19): siRNA sense strand
gcuugcagaccgucaugaa

SEQ ID NO: 1155092 - RNA, 19 nt, Homo sapiens
  misc_RNA (1)...(19): siRNA sense strand
uaucgggagugguauaagc

SEQ ID NO: 1155093 - RNA, 19 nt, Homo sapiens
  misc_RNA (1)...(19): siRNA sense strand
ucaaccauccuguucaucu

SEQ ID NO: 1155094 - RNA, 19 nt, Homo sapiens
  misc_RNA (1)...(19): siRNA sense strand
uuauaugccaucuuuggaa

SEQ ID NO: 1155095 - RNA, 19 nt, Homo sapiens
  misc_RNA (1)...(19): siRNA sense strand
ccgagaagcgcucugucuu

SEQ ID NO: 1155096 - RNA, 19 nt, Homo sapiens
  misc_RNA (1)...(19): siRNA sense strand
cacuggcggucuugucuuc

SEQ ID NO: 1155097 - RNA, 19 nt, Homo sapiens
  misc_RNA (1)...(19): siRNA sense strand
cagcuguccucaguaugau

SEQ ID NO: 1155098 - RNA, 19 nt, Homo sapiens
  misc_RNA (1)...(19): siRNA sense strand
acuugaagacagaaacuaa

SEQ ID NO: 1155099 - RNA, 19 nt, Homo sapiens
  misc_RNA (1)...(19): siRNA sense strand
ccgaggacguucagaaaau

SEQ ID NO: 1155100 - RNA, 19 nt, Homo sapiens
  misc_RNA (1)...(19): siRNA sense strand
gaccuugcccgaggacguu

SEQ ID NO: 1155101 - RNA, 19 nt, Homo sapiens
  misc_RNA (1)...(19): siRNA sense strand
caacaaccugcgccugaag

SEQ ID NO: 1155102 - RNA, 19 nt, Homo sapiens
  misc_RNA (1)...(19): siRNA sense strand
aaagaagaggugggugaaa

SEQ ID NO: 1155103 - RNA, 19 nt, Homo sapiens
  misc_RNA (1)...(19): siRNA sense strand
ggcuacggguucuguccaa

SEQ ID NO: 1155104 - RNA, 19 nt, Homo sapiens
  misc_RNA (1)...(19): siRNA sense strand
ccugcgggaucaugucugu

SEQ ID NO: 1155105 - RNA, 19 nt, Homo sapiens
  misc_RNA (1)...(19): siRNA sense strand
ccaacuacaucgacauuua

SEQ ID NO: 1155106 - RNA, 19 nt, Homo sapiens
  misc_RNA (1)...(19): siRNA sense strand
uuggaaaccuggaagauua

SEQ ID NO: 1155107 - RNA, 19 nt, Homo sapiens
  misc_RNA (1)...(19): siRNA sense strand
ugaaauggcuccagcaaca

SEQ ID NO: 1155108 - RNA, 19 nt, Homo sapiens
  misc_RNA (1)...(19): siRNA sense strand
ggacggcgaugucacagau

SEQ ID NO: 1155109 - RNA, 19 nt, Homo sapiens
  misc_RNA (1)...(19): siRNA sense strand
gaagcaaacagccaguuaa

SEQ ID NO: 1155110 - RNA, 19 nt, Homo sapiens
  misc_RNA (1)...(19): siRNA sense strand
gaacggcaaugauuaugac

SEQ ID NO: 1155111 - RNA, 19 nt, Homo sapiens
  misc_RNA (1)...(19): siRNA sense strand
gcgagcgacuggaaaguga

SEQ ID NO: 1155112 - RNA, 19 nt, Homo sapiens
  misc_RNA (1)...(19): siRNA sense strand
ccucacaccuuccucagaa

SEQ ID NO: 1155113 - RNA, 19 nt, Homo sapiens
  misc_RNA (1)...(19): siRNA sense strand
gauaugaugccagcaauga

SEQ ID NO: 1155114 - RNA, 19 nt, Homo sapiens
  misc_RNA (1)...(19): siRNA sense strand
ugacccaucuccacgauau

SEQ ID NO: 1155115 - RNA, 19 nt, Homo sapiens
  misc_RNA (1)...(19): siRNA sense strand
caacaggaagugaaacgaa

SEQ ID NO: 1155116 - RNA, 19 nt, Homo sapiens
  misc_RNA (1)...(19): siRNA sense strand
gaaagcgagcgacuggaaa

SEQ ID NO: 1155117 - RNA, 19 nt, Homo sapiens
  misc_RNA (1)...(19): siRNA sense strand
gcaaacagccaguuaaccu

SEQ ID NO: 1155118 - RNA, 19 nt, Homo sapiens
  misc_RNA (1)...(19): siRNA sense strand
agagacaggugcgaaguga

SEQ ID NO: 1155119 - RNA, 19 nt, Homo sapiens
  misc_RNA (1)...(19): siRNA sense strand
gacgugaacggcaaugauu

SEQ ID NO: 1155120 - RNA, 19 nt, Homo sapiens
  misc_RNA (1)...(19): siRNA sense strand
gaugauggcauagagagaa

SEQ ID NO: 1155121 - RNA, 19 nt, Homo sapiens
  misc_RNA (1)...(19): siRNA sense strand
cagauguggucgaggcaaa

SEQ ID NO: 1155122 - RNA, 19 nt, Homo sapiens
  misc_RNA (1)...(19): siRNA sense strand
agaagcaaacagccaguua

SEQ ID NO: 1155123 - RNA, 19 nt, Homo sapiens
  misc_RNA (1)...(19): siRNA sense strand
caaagucgcugggcaucag

SEQ ID NO: 1155124 - RNA, 19 nt, Homo sapiens
  misc_RNA (1)...(19): siRNA sense strand
gaaacgaagggugaagaga

SEQ ID NO: 1155125 - RNA, 19 nt, Homo sapiens
  misc_RNA (1)...(19): siRNA sense strand
caucagacccaacuacauc

SEQ ID NO: 1155126 - RNA, 19 nt, Homo sapiens
  misc_RNA (1)...(19): siRNA sense strand
ugaaagcgagcgacuggaa

SEQ ID NO: 1155127 - RNA, 19 nt, Homo sapiens
  misc_RNA (1)...(19): siRNA sense strand
gaagagacaggugcgaagu

SEQ ID NO: 1155128 - RNA, 19 nt, Homo sapiens
  misc_RNA (1)...(19): siRNA sense strand
caucaucgccuuggcucua

SEQ ID NO: 1155129 - RNA, 19 nt, Homo sapiens
  misc_RNA (1)...(19): siRNA sense strand
ccuggaagauuacuaccau

SEQ ID NO: 1155130 - RNA, 19 nt, Homo sapiens
  misc_RNA (1)...(19): siRNA sense strand
uuucgaguauggcauuaaa

SEQ ID NO: 1155131 - RNA, 19 nt, Homo sapiens
  misc_RNA (1)...(19): siRNA sense strand
uaugaugccagcaaugaaa

SEQ ID NO: 1155132 - RNA, 19 nt, Homo sapiens
  misc_RNA (1)...(19): siRNA sense strand
gaaaccuggaagauuacua

SEQ ID NO: 1155133 - RNA, 19 nt, Homo sapiens
  misc_RNA (1)...(19): siRNA sense strand
cgccuuggcucuagaagca

SEQ ID NO: 1155134 - RNA, 19 nt, Homo sapiens
  misc_RNA (1)...(19): siRNA sense strand
gcaguggggccuuuuauga

SEQ ID NO: 1155135 - RNA, 19 nt, Homo sapiens
  misc_RNA (1)...(19): siRNA sense strand
uggaagauuacuaccauuu

SEQ ID NO: 1155136 - RNA, 19 nt, Homo sapiens
  misc_RNA (1)...(19): siRNA sense strand
cagcaaacaauuccuacug

SEQ ID NO: 1155137 - RNA, 19 nt, Homo sapiens
  misc_RNA (1)...(19): siRNA sense strand
cagcagcgccaccgagaau

SEQ ID NO: 1155138 - RNA, 19 nt, Homo sapiens
  misc_RNA (1)...(19): siRNA sense strand
ugaacggcaaugauuauga

SEQ ID NO: 1155139 - RNA, 19 nt, Homo sapiens
  misc_RNA (1)...(19): siRNA sense strand
caacuacaucgacauuuac

SEQ ID NO: 1155140 - RNA, 19 nt, Homo sapiens
  misc_RNA (1)...(19): siRNA sense strand
aaacacggcacucguugug

SEQ ID NO: 1155141 - RNA, 19 nt, Homo sapiens
  misc_RNA (1)...(19): siRNA sense strand
ggaagauuacuaccauuuu

SEQ ID NO: 1155142 - RNA, 19 nt, Homo sapiens
  misc_RNA (1)...(19): siRNA sense strand
caacuugggccagauugga

SEQ ID NO: 1155143 - RNA, 19 nt, Homo sapiens
  misc_RNA (1)...(19): siRNA sense strand
gaucugcgucagcgcugua

SEQ ID NO: 1155144 - RNA, 19 nt, Homo sapiens
  misc_RNA (1)...(19): siRNA sense strand
cgcaggcccuuuacuucaa

SEQ ID NO: 1155145 - RNA, 19 nt, Homo sapiens
  misc_RNA (1)...(19): siRNA sense strand
ccaacagcaucuacaccau

SEQ ID NO: 1155146 - RNA, 19 nt, Homo sapiens
  misc_RNA (1)...(19): siRNA sense strand
cuacaucgacauuuacagu

SEQ ID NO: 1155147 - RNA, 19 nt, Homo sapiens
  misc_RNA (1)...(19): siRNA sense strand
ccagcaacaggaagugaaa

SEQ ID NO: 1155148 - RNA, 19 nt, Homo sapiens
  misc_RNA (1)...(19): siRNA sense strand
gcuuucgaguauggcauua

SEQ ID NO: 1155149 - RNA, 19 nt, Homo sapiens
  misc_RNA (1)...(19): siRNA sense strand
aauaaacacggcacucguu

SEQ ID NO: 1155150 - RNA, 19 nt, Homo sapiens
  misc_RNA (1)...(19): siRNA sense strand
caaugauuaugacccaucu

SEQ ID NO: 1155151 - RNA, 19 nt, Homo sapiens
  misc_RNA (1)...(19): siRNA sense strand
caacaugugguaccugcau

SEQ ID NO: 1155152 - RNA, 19 nt, Homo sapiens
  misc_RNA (1)...(19): siRNA sense strand
gcaaagucgcugggcauca

SEQ ID NO: 1155153 - RNA, 19 nt, Homo sapiens
  misc_RNA (1)...(19): siRNA sense strand
ggugaaauggcuccagcaa

SEQ ID NO: 1155154 - RNA, 19 nt, Homo sapiens
  misc_RNA (1)...(19): siRNA sense strand
caaacaauuccuacugcau

SEQ ID NO: 1155155 - RNA, 19 nt, Homo sapiens
  misc_RNA (1)...(19): siRNA sense strand
uaucacagcaaaaccuuua

SEQ ID NO: 1155156 - RNA, 19 nt, Homo sapiens
  misc_RNA (1)...(19): siRNA sense strand
aacgaagggugaagagaca

SEQ ID NO: 1155157 - RNA, 19 nt, Homo sapiens
  misc_RNA (1)...(19): siRNA sense strand
gcaucagacccaacuacau

SEQ ID NO: 1155158 - RNA, 19 nt, Homo sapiens
  misc_RNA (1)...(19): siRNA sense strand
guacaaugccaaaauagga

SEQ ID NO: 1155159 - RNA, 19 nt, Homo sapiens
  misc_RNA (1)...(19): siRNA sense strand
gcaggcccuuuacuucaac

SEQ ID NO: 1155160 - RNA, 19 nt, Homo sapiens
  misc_RNA (1)...(19): siRNA sense strand
ccgcaggcccuuuacuuca

SEQ ID NO: 1155161 - RNA, 19 nt, Homo sapiens
  misc_RNA (1)...(19): siRNA sense strand
cgacgugaacggcaaugau

SEQ ID NO: 1155162 - RNA, 19 nt, Homo sapiens
  misc_RNA (1)...(19): siRNA sense strand
caccgagaauggcuacaag

SEQ ID NO: 1155163 - RNA, 19 nt, Homo sapiens
  misc_RNA (1)...(19): siRNA sense strand
cgugaacggcaaugauuau

SEQ ID NO: 1155164 - RNA, 19 nt, Homo sapiens
  misc_RNA (1)...(19): siRNA sense strand
gugacccgcaggcccuuua

SEQ ID NO: 1155165 - RNA, 19 nt, Homo sapiens
  misc_RNA (1)...(19): siRNA sense strand
ccuuggcucuagaagcaaa

SEQ ID NO: 1155166 - RNA, 19 nt, Homo sapiens
  misc_RNA (1)...(19): siRNA sense strand
gcaacaggaagugaaacga

SEQ ID NO: 1155167 - RNA, 19 nt, Homo sapiens
  misc_RNA (1)...(19): siRNA sense strand
ugcgauggcuacaccaaca

SEQ ID NO: 1155168 - RNA, 19 nt, Homo sapiens
  misc_RNA (1)...(19): siRNA sense strand
ccaccgagaauggcuacaa

SEQ ID NO: 1155169 - RNA, 19 nt, Homo sapiens
  misc_RNA (1)...(19): siRNA sense strand
ccaacuacaucgacauuua

SEQ ID NO: 1155170 - RNA, 19 nt, Homo sapiens
  misc_RNA (1)...(19): siRNA sense strand
uuggaaaccuggaagauua

SEQ ID NO: 1155171 - RNA, 19 nt, Homo sapiens
  misc_RNA (1)...(19): siRNA sense strand
ugaaauggcuccagcaaca

SEQ ID NO: 1155172 - RNA, 19 nt, Homo sapiens
  misc_RNA (1)...(19): siRNA sense strand
ggacggcgaugucacagau

SEQ ID NO: 1155173 - RNA, 19 nt, Homo sapiens
  misc_RNA (1)...(19): siRNA sense strand
gaagcaaacagccaguuaa

SEQ ID NO: 1155174 - RNA, 19 nt, Homo sapiens
  misc_RNA (1)...(19): siRNA sense strand
gaacggcaaugauuaugac

SEQ ID NO: 1155175 - RNA, 19 nt, Homo sapiens
  misc_RNA (1)...(19): siRNA sense strand
gcgagcgacuggaaaguga

SEQ ID NO: 1155176 - RNA, 19 nt, Homo sapiens
  misc_RNA (1)...(19): siRNA sense strand
ccucacaccuuccucagaa

SEQ ID NO: 1155177 - RNA, 19 nt, Homo sapiens
  misc_RNA (1)...(19): siRNA sense strand
gauaugaugccagcaauga

SEQ ID NO: 1155178 - RNA, 19 nt, Homo sapiens
  misc_RNA (1)...(19): siRNA sense strand
ugacccaucuccacgauau

SEQ ID NO: 1155179 - RNA, 19 nt, Homo sapiens
  misc_RNA (1)...(19): siRNA sense strand
caacaggaagugaaacgaa

SEQ ID NO: 1155180 - RNA, 19 nt, Homo sapiens
  misc_RNA (1)...(19): siRNA sense strand
gaaagcgagcgacuggaaa

SEQ ID NO: 1155181 - RNA, 19 nt, Homo sapiens
  misc_RNA (1)...(19): siRNA sense strand
gcaaacagccaguuaaccu

SEQ ID NO: 1155182 - RNA, 19 nt, Homo sapiens
  misc_RNA (1)...(19): siRNA sense strand
agagacaggugcgaaguga

SEQ ID NO: 1155183 - RNA, 19 nt, Homo sapiens
  misc_RNA (1)...(19): siRNA sense strand
gacgugaacggcaaugauu

SEQ ID NO: 1155184 - RNA, 19 nt, Homo sapiens
  misc_RNA (1)...(19): siRNA sense strand
gaugauggcauagagagaa

SEQ ID NO: 1155185 - RNA, 19 nt, Homo sapiens
  misc_RNA (1)...(19): siRNA sense strand
cagauguggucgaggcaaa

SEQ ID NO: 1155186 - RNA, 19 nt, Homo sapiens
  misc_RNA (1)...(19): siRNA sense strand
agaagcaaacagccaguua

SEQ ID NO: 1155187 - RNA, 19 nt, Homo sapiens
  misc_RNA (1)...(19): siRNA sense strand
caaagucgcugggcaucag

SEQ ID NO: 1155188 - RNA, 19 nt, Homo sapiens
  misc_RNA (1)...(19): siRNA sense strand
gaaacgaagggugaagaga

SEQ ID NO: 1155189 - RNA, 19 nt, Homo sapiens
  misc_RNA (1)...(19): siRNA sense strand
caucagacccaacuacauc

SEQ ID NO: 1155190 - RNA, 19 nt, Homo sapiens
  misc_RNA (1)...(19): siRNA sense strand
ugaaagcgagcgacuggaa

SEQ ID NO: 1155191 - RNA, 19 nt, Homo sapiens
  misc_RNA (1)...(19): siRNA sense strand
gaagagacaggugcgaagu

SEQ ID NO: 1155192 - RNA, 19 nt, Homo sapiens
  misc_RNA (1)...(19): siRNA sense strand
caucaucgccuuggcucua

SEQ ID NO: 1155193 - RNA, 19 nt, Homo sapiens
  misc_RNA (1)...(19): siRNA sense strand
ccuggaagauuacuaccau

SEQ ID NO: 1155194 - RNA, 19 nt, Homo sapiens
  misc_RNA (1)...(19): siRNA sense strand
uuucgaguauggcauuaaa

SEQ ID NO: 1155195 - RNA, 19 nt, Homo sapiens
  misc_RNA (1)...(19): siRNA sense strand
uaugaugccagcaaugaaa

SEQ ID NO: 1155196 - RNA, 19 nt, Homo sapiens
  misc_RNA (1)...(19): siRNA sense strand
gaaaccuggaagauuacua

SEQ ID NO: 1155197 - RNA, 19 nt, Homo sapiens
  misc_RNA (1)...(19): siRNA sense strand
cgccuuggcucuagaagca

SEQ ID NO: 1155198 - RNA, 19 nt, Homo sapiens
  misc_RNA (1)...(19): siRNA sense strand
gcaguggggccuuuuauga

SEQ ID NO: 1155199 - RNA, 19 nt, Homo sapiens
  misc_RNA (1)...(19): siRNA sense strand
uggaagauuacuaccauuu

SEQ ID NO: 1155200 - RNA, 19 nt, Homo sapiens
  misc_RNA (1)...(19): siRNA sense strand
cagcaaacaauuccuacug

SEQ ID NO: 1155201 - RNA, 19 nt, Homo sapiens
  misc_RNA (1)...(19): siRNA sense strand
cagcagcgccaccgagaau

SEQ ID NO: 1155202 - RNA, 19 nt, Homo sapiens
  misc_RNA (1)...(19): siRNA sense strand
ugaacggcaaugauuauga

SEQ ID NO: 1155203 - RNA, 19 nt, Homo sapiens
  misc_RNA (1)...(19): siRNA sense strand
caacuacaucgacauuuac

SEQ ID NO: 1155204 - RNA, 19 nt, Homo sapiens
  misc_RNA (1)...(19): siRNA sense strand
aaacacggcacucguugug

SEQ ID NO: 1155205 - RNA, 19 nt, Homo sapiens
  misc_RNA (1)...(19): siRNA sense strand
ggaagauuacuaccauuuu

SEQ ID NO: 1155206 - RNA, 19 nt, Homo sapiens
  misc_RNA (1)...(19): siRNA sense strand
caacuugggccagauugga

SEQ ID NO: 1155207 - RNA, 19 nt, Homo sapiens
  misc_RNA (1)...(19): siRNA sense strand
gaucugcgucagcgcugua

SEQ ID NO: 1155208 - RNA, 19 nt, Homo sapiens
  misc_RNA (1)...(19): siRNA sense strand
cgcaggcccuuuacuucaa

SEQ ID NO: 1155209 - RNA, 19 nt, Homo sapiens
  misc_RNA (1)...(19): siRNA sense strand
ccaacagcaucuacaccau

SEQ ID NO: 1155210 - RNA, 19 nt, Homo sapiens
  misc_RNA (1)...(19): siRNA sense strand
cuacaucgacauuuacagu

SEQ ID NO: 1155211 - RNA, 19 nt, Homo sapiens
  misc_RNA (1)...(19): siRNA sense strand
ccagcaacaggaagugaaa

SEQ ID NO: 1155212 - RNA, 19 nt, Homo sapiens
  misc_RNA (1)...(19): siRNA sense strand
gcuuucgaguauggcauua

SEQ ID NO: 1155213 - RNA, 19 nt, Homo sapiens
  misc_RNA (1)...(19): siRNA sense strand
aauaaacacggcacucguu

SEQ ID NO: 1155214 - RNA, 19 nt, Homo sapiens
  misc_RNA (1)...(19): siRNA sense strand
caaugauuaugacccaucu

SEQ ID NO: 1155215 - RNA, 19 nt, Homo sapiens
  misc_RNA (1)...(19): siRNA sense strand
caacaugugguaccugcau

SEQ ID NO: 1155216 - RNA, 19 nt, Homo sapiens
  misc_RNA (1)...(19): siRNA sense strand
gcaaagucgcugggcauca

SEQ ID NO: 1155217 - RNA, 19 nt, Homo sapiens
  misc_RNA (1)...(19): siRNA sense strand
ggugaaauggcuccagcaa

SEQ ID NO: 1155218 - RNA, 19 nt, Homo sapiens
  misc_RNA (1)...(19): siRNA sense strand
caaacaauuccuacugcau

SEQ ID NO: 1155219 - RNA, 19 nt, Homo sapiens
  misc_RNA (1)...(19): siRNA sense strand
uaucacagcaaaaccuuua

SEQ ID NO: 1155220 - RNA, 19 nt, Homo sapiens
  misc_RNA (1)...(19): siRNA sense strand
aacgaagggugaagagaca

SEQ ID NO: 1155221 - RNA, 19 nt, Homo sapiens
  misc_RNA (1)...(19): siRNA sense strand
gcaucagacccaacuacau

SEQ ID NO: 1155222 - RNA, 19 nt, Homo sapiens
  misc_RNA (1)...(19): siRNA sense strand
guacaaugccaaaauagga

SEQ ID NO: 1155223 - RNA, 19 nt, Homo sapiens
  misc_RNA (1)...(19): siRNA sense strand
gcaggcccuuuacuucaac

SEQ ID NO: 1155224 - RNA, 19 nt, Homo sapiens
  misc_RNA (1)...(19): siRNA sense strand
ccgcaggcccuuuacuuca

SEQ ID NO: 1155225 - RNA, 19 nt, Homo sapiens
  misc_RNA (1)...(19): siRNA sense strand
cgacgugaacggcaaugau

SEQ ID NO: 1155226 - RNA, 19 nt, Homo sapiens
  misc_RNA (1)...(19): siRNA sense strand
caccgagaauggcuacaag

SEQ ID NO: 1155227 - RNA, 19 nt, Homo sapiens
  misc_RNA (1)...(19): siRNA sense strand
cgugaacggcaaugauuau

SEQ ID NO: 1155228 - RNA, 19 nt, Homo sapiens
  misc_RNA (1)...(19): siRNA sense strand
gugacccgcaggcccuuua

SEQ ID NO: 1155229 - RNA, 19 nt, Homo sapiens
  misc_RNA (1)...(19): siRNA sense strand
ccuuggcucuagaagcaaa

SEQ ID NO: 1155230 - RNA, 19 nt, Homo sapiens
  misc_RNA (1)...(19): siRNA sense strand
gcaacaggaagugaaacga

SEQ ID NO: 1155231 - RNA, 19 nt, Homo sapiens
  misc_RNA (1)...(19): siRNA sense strand
ugcgauggcuacaccaaca

SEQ ID NO: 1155232 - RNA, 19 nt, Homo sapiens
  misc_RNA (1)...(19): siRNA sense strand
ccaccgagaauggcuacaa

SEQ ID NO: 1155233 - RNA, 19 nt, Homo sapiens
  misc_RNA (1)...(19): siRNA sense strand
ccaacuacaucgacauuua

SEQ ID NO: 1155234 - RNA, 19 nt, Homo sapiens
  misc_RNA (1)...(19): siRNA sense strand
uuggaaaccuggaagauua

SEQ ID NO: 1155235 - RNA, 19 nt, Homo sapiens
  misc_RNA (1)...(19): siRNA sense strand
ugaaauggcuccagcaaca

SEQ ID NO: 1155236 - RNA, 19 nt, Homo sapiens
  misc_RNA (1)...(19): siRNA sense strand
ggacggcgaugucacagau

SEQ ID NO: 1155237 - RNA, 19 nt, Homo sapiens
  misc_RNA (1)...(19): siRNA sense strand
gaagcaaacagccaguuaa

SEQ ID NO: 1155238 - RNA, 19 nt, Homo sapiens
  misc_RNA (1)...(19): siRNA sense strand
gaacggcaaugauuaugac

SEQ ID NO: 1155239 - RNA, 19 nt, Homo sapiens
  misc_RNA (1)...(19): siRNA sense strand
gcgagcgacuggaaaguga

SEQ ID NO: 1155240 - RNA, 19 nt, Homo sapiens
  misc_RNA (1)...(19): siRNA sense strand
ccucacaccuuccucagaa

SEQ ID NO: 1155241 - RNA, 19 nt, Homo sapiens
  misc_RNA (1)...(19): siRNA sense strand
gauaugaugccagcaauga

SEQ ID NO: 1155242 - RNA, 19 nt, Homo sapiens
  misc_RNA (1)...(19): siRNA sense strand
ugacccaucuccacgauau

SEQ ID NO: 1155243 - RNA, 19 nt, Homo sapiens
  misc_RNA (1)...(19): siRNA sense strand
caacaggaagugaaacgaa

SEQ ID NO: 1155244 - RNA, 19 nt, Homo sapiens
  misc_RNA (1)...(19): siRNA sense strand
gaaagcgagcgacuggaaa

SEQ ID NO: 1155245 - RNA, 19 nt, Homo sapiens
  misc_RNA (1)...(19): siRNA sense strand
gcaaacagccaguuaaccu

SEQ ID NO: 1155246 - RNA, 19 nt, Homo sapiens
  misc_RNA (1)...(19): siRNA sense strand
agagacaggugcgaaguga

SEQ ID NO: 1155247 - RNA, 19 nt, Homo sapiens
  misc_RNA (1)...(19): siRNA sense strand
gacgugaacggcaaugauu

SEQ ID NO: 1155248 - RNA, 19 nt, Homo sapiens
  misc_RNA (1)...(19): siRNA sense strand
gaugauggcauagagagaa

SEQ ID NO: 1155249 - RNA, 19 nt, Homo sapiens
  misc_RNA (1)...(19): siRNA sense strand
cagauguggucgaggcaaa

SEQ ID NO: 1155250 - RNA, 19 nt, Homo sapiens
  misc_RNA (1)...(19): siRNA sense strand
agaagcaaacagccaguua

SEQ ID NO: 1155251 - RNA, 19 nt, Homo sapiens
  misc_RNA (1)...(19): siRNA sense strand
caaagucgcugggcaucag

SEQ ID NO: 1155252 - RNA, 19 nt, Homo sapiens
  misc_RNA (1)...(19): siRNA sense strand
gaaacgaagggugaagaga

SEQ ID NO: 1155253 - RNA, 19 nt, Homo sapiens
  misc_RNA (1)...(19): siRNA sense strand
caucagacccaacuacauc

SEQ ID NO: 1155254 - RNA, 19 nt, Homo sapiens
  misc_RNA (1)...(19): siRNA sense strand
ugaaagcgagcgacuggaa

SEQ ID NO: 1155255 - RNA, 19 nt, Homo sapiens
  misc_RNA (1)...(19): siRNA sense strand
gaagagacaggugcgaagu

SEQ ID NO: 1155256 - RNA, 19 nt, Homo sapiens
  misc_RNA (1)...(19): siRNA sense strand
caucaucgccuuggcucua

SEQ ID NO: 1155257 - RNA, 19 nt, Homo sapiens
  misc_RNA (1)...(19): siRNA sense strand
ccuggaagauuacuaccau

SEQ ID NO: 1155258 - RNA, 19 nt, Homo sapiens
  misc_RNA (1)...(19): siRNA sense strand
uuucgaguauggcauuaaa

SEQ ID NO: 1155259 - RNA, 19 nt, Homo sapiens
  misc_RNA (1)...(19): siRNA sense strand
uaugaugccagcaaugaaa

SEQ ID NO: 1155260 - RNA, 19 nt, Homo sapiens
  misc_RNA (1)...(19): siRNA sense strand
gaaaccuggaagauuacua

SEQ ID NO: 1155261 - RNA, 19 nt, Homo sapiens
  misc_RNA (1)...(19): siRNA sense strand
cgccuuggcucuagaagca

SEQ ID NO: 1155262 - RNA, 19 nt, Homo sapiens
  misc_RNA (1)...(19): siRNA sense strand
gcaguggggccuuuuauga

SEQ ID NO: 1155263 - RNA, 19 nt, Homo sapiens
  misc_RNA (1)...(19): siRNA sense strand
uggaagauuacuaccauuu

SEQ ID NO: 1155264 - RNA, 19 nt, Homo sapiens
  misc_RNA (1)...(19): siRNA sense strand
cagcaaacaauuccuacug

SEQ ID NO: 1155265 - RNA, 19 nt, Homo sapiens
  misc_RNA (1)...(19): siRNA sense strand
cagcagcgccaccgagaau

SEQ ID NO: 1155266 - RNA, 19 nt, Homo sapiens
  misc_RNA (1)...(19): siRNA sense strand
ugaacggcaaugauuauga

SEQ ID NO: 1155267 - RNA, 19 nt, Homo sapiens
  misc_RNA (1)...(19): siRNA sense strand
caacuacaucgacauuuac

SEQ ID NO: 1155268 - RNA, 19 nt, Homo sapiens
  misc_RNA (1)...(19): siRNA sense strand
aaacacggcacucguugug

SEQ ID NO: 1155269 - RNA, 19 nt, Homo sapiens
  misc_RNA (1)...(19): siRNA sense strand
ggaagauuacuaccauuuu

SEQ ID NO: 1155270 - RNA, 19 nt, Homo sapiens
  misc_RNA (1)...(19): siRNA sense strand
caacuugggccagauugga

SEQ ID NO: 1155271 - RNA, 19 nt, Homo sapiens
  misc_RNA (1)...(19): siRNA sense strand
gaucugcgucagcgcugua

SEQ ID NO: 1155272 - RNA, 19 nt, Homo sapiens
  misc_RNA (1)...(19): siRNA sense strand
cgcaggcccuuuacuucaa

SEQ ID NO: 1155273 - RNA, 19 nt, Homo sapiens
  misc_RNA (1)...(19): siRNA sense strand
ccaacagcaucuacaccau

SEQ ID NO: 1155274 - RNA, 19 nt, Homo sapiens
  misc_RNA (1)...(19): siRNA sense strand
cuacaucgacauuuacagu

SEQ ID NO: 1155275 - RNA, 19 nt, Homo sapiens
  misc_RNA (1)...(19): siRNA sense strand
ccagcaacaggaagugaaa

SEQ ID NO: 1155276 - RNA, 19 nt, Homo sapiens
  misc_RNA (1)...(19): siRNA sense strand
gcuuucgaguauggcauua

SEQ ID NO: 1155277 - RNA, 19 nt, Homo sapiens
  misc_RNA (1)...(19): siRNA sense strand
aauaaacacggcacucguu

SEQ ID NO: 1155278 - RNA, 19 nt, Homo sapiens
  misc_RNA (1)...(19): siRNA sense strand
caaugauuaugacccaucu

SEQ ID NO: 1155279 - RNA, 19 nt, Homo sapiens
  misc_RNA (1)...(19): siRNA sense strand
caacaugugguaccugcau

SEQ ID NO: 1155280 - RNA, 19 nt, Homo sapiens
  misc_RNA (1)...(19): siRNA sense strand
gcaaagucgcugggcauca

SEQ ID NO: 1155281 - RNA, 19 nt, Homo sapiens
  misc_RNA (1)...(19): siRNA sense strand
ggugaaauggcuccagcaa

SEQ ID NO: 1155282 - RNA, 19 nt, Homo sapiens
  misc_RNA (1)...(19): siRNA sense strand
caaacaauuccuacugcau

SEQ ID NO: 1155283 - RNA, 19 nt, Homo sapiens
  misc_RNA (1)...(19): siRNA sense strand
uaucacagcaaaaccuuua

SEQ ID NO: 1155284 - RNA, 19 nt, Homo sapiens
  misc_RNA (1)...(19): siRNA sense strand
aacgaagggugaagagaca

SEQ ID NO: 1155285 - RNA, 19 nt, Homo sapiens
  misc_RNA (1)...(19): siRNA sense strand
gcaucagacccaacuacau

SEQ ID NO: 1155286 - RNA, 19 nt, Homo sapiens
  misc_RNA (1)...(19): siRNA sense strand
guacaaugccaaaauagga

SEQ ID NO: 1155287 - RNA, 19 nt, Homo sapiens
  misc_RNA (1)...(19): siRNA sense strand
gcaggcccuuuacuucaac

SEQ ID NO: 1155288 - RNA, 19 nt, Homo sapiens
  misc_RNA (1)...(19): siRNA sense strand
ccgcaggcccuuuacuuca

SEQ ID NO: 1155289 - RNA, 19 nt, Homo sapiens
  misc_RNA (1)...(19): siRNA sense strand
cgacgugaacggcaaugau

SEQ ID NO: 1155290 - RNA, 19 nt, Homo sapiens
  misc_RNA (1)...(19): siRNA sense strand
caccgagaauggcuacaag

SEQ ID NO: 1155291 - RNA, 19 nt, Homo sapiens
  misc_RNA (1)...(19): siRNA sense strand
cgugaacggcaaugauuau

SEQ ID NO: 1155292 - RNA, 19 nt, Homo sapiens
  misc_RNA (1)...(19): siRNA sense strand
gugacccgcaggcccuuua

SEQ ID NO: 1155293 - RNA, 19 nt, Homo sapiens
  misc_RNA (1)...(19): siRNA sense strand
ccuuggcucuagaagcaaa

SEQ ID NO: 1155294 - RNA, 19 nt, Homo sapiens
  misc_RNA (1)...(19): siRNA sense strand
gcaacaggaagugaaacga

SEQ ID NO: 1155295 - RNA, 19 nt, Homo sapiens
  misc_RNA (1)...(19): siRNA sense strand
ugcgauggcuacaccaaca

SEQ ID NO: 1155296 - RNA, 19 nt, Homo sapiens
  misc_RNA (1)...(19): siRNA sense strand
ccaccgagaauggcuacaa

SEQ ID NO: 1155297 - RNA, 19 nt, Homo sapiens
  misc_RNA (1)...(19): siRNA sense strand
ccaacuacaucgacauuua

SEQ ID NO: 1155298 - RNA, 19 nt, Homo sapiens
  misc_RNA (1)...(19): siRNA sense strand
uuggaaaccuggaagauua

SEQ ID NO: 1155299 - RNA, 19 nt, Homo sapiens
  misc_RNA (1)...(19): siRNA sense strand
ugaaauggcuccagcaaca

SEQ ID NO: 1155300 - RNA, 19 nt, Homo sapiens
  misc_RNA (1)...(19): siRNA sense strand
ggacggcgaugucacagau

SEQ ID NO: 1155301 - RNA, 19 nt, Homo sapiens
  misc_RNA (1)...(19): siRNA sense strand
gaagcaaacagccaguuaa

SEQ ID NO: 1155302 - RNA, 19 nt, Homo sapiens
  misc_RNA (1)...(19): siRNA sense strand
gaacggcaaugauuaugac

SEQ ID NO: 1155303 - RNA, 19 nt, Homo sapiens
  misc_RNA (1)...(19): siRNA sense strand
gcgagcgacuggaaaguga

SEQ ID NO: 1155304 - RNA, 19 nt, Homo sapiens
  misc_RNA (1)...(19): siRNA sense strand
ccucacaccuuccucagaa

SEQ ID NO: 1155305 - RNA, 19 nt, Homo sapiens
  misc_RNA (1)...(19): siRNA sense strand
gauaugaugccagcaauga

SEQ ID NO: 1155306 - RNA, 19 nt, Homo sapiens
  misc_RNA (1)...(19): siRNA sense strand
ugacccaucuccacgauau

SEQ ID NO: 1155307 - RNA, 19 nt, Homo sapiens
  misc_RNA (1)...(19): siRNA sense strand
caacaggaagugaaacgaa

SEQ ID NO: 1155308 - RNA, 19 nt, Homo sapiens
  misc_RNA (1)...(19): siRNA sense strand
gaaagcgagcgacuggaaa

SEQ ID NO: 1155309 - RNA, 19 nt, Homo sapiens
  misc_RNA (1)...(19): siRNA sense strand
gcaaacagccaguuaaccu

SEQ ID NO: 1155310 - RNA, 19 nt, Homo sapiens
  misc_RNA (1)...(19): siRNA sense strand
agagacaggugcgaaguga

SEQ ID NO: 1155311 - RNA, 19 nt, Homo sapiens
  misc_RNA (1)...(19): siRNA sense strand
gacgugaacggcaaugauu

SEQ ID NO: 1155312 - RNA, 19 nt, Homo sapiens
  misc_RNA (1)...(19): siRNA sense strand
gaugauggcauagagagaa

SEQ ID NO: 1155313 - RNA, 19 nt, Homo sapiens
  misc_RNA (1)...(19): siRNA sense strand
cagauguggucgaggcaaa

SEQ ID NO: 1155314 - RNA, 19 nt, Homo sapiens
  misc_RNA (1)...(19): siRNA sense strand
agaagcaaacagccaguua

SEQ ID NO: 1155315 - RNA, 19 nt, Homo sapiens
  misc_RNA (1)...(19): siRNA sense strand
caaagucgcugggcaucag

SEQ ID NO: 1155316 - RNA, 19 nt, Homo sapiens
  misc_RNA (1)...(19): siRNA sense strand
gaaacgaagggugaagaga

SEQ ID NO: 1155317 - RNA, 19 nt, Homo sapiens
  misc_RNA (1)...(19): siRNA sense strand
caucagacccaacuacauc

SEQ ID NO: 1155318 - RNA, 19 nt, Homo sapiens
  misc_RNA (1)...(19): siRNA sense strand
ugaaagcgagcgacuggaa

SEQ ID NO: 1155319 - RNA, 19 nt, Homo sapiens
  misc_RNA (1)...(19): siRNA sense strand
gaagagacaggugcgaagu

SEQ ID NO: 1155320 - RNA, 19 nt, Homo sapiens
  misc_RNA (1)...(19): siRNA sense strand
caucaucgccuuggcucua

SEQ ID NO: 1155321 - RNA, 19 nt, Homo sapiens
  misc_RNA (1)...(19): siRNA sense strand
ccuggaagauuacuaccau

SEQ ID NO: 1155322 - RNA, 19 nt, Homo sapiens
  misc_RNA (1)...(19): siRNA sense strand
uuucgaguauggcauuaaa

SEQ ID NO: 1155323 - RNA, 19 nt, Homo sapiens
  misc_RNA (1)...(19): siRNA sense strand
uaugaugccagcaaugaaa

SEQ ID NO: 1155324 - RNA, 19 nt, Homo sapiens
  misc_RNA (1)...(19): siRNA sense strand
gaaaccuggaagauuacua

SEQ ID NO: 1155325 - RNA, 19 nt, Homo sapiens
  misc_RNA (1)...(19): siRNA sense strand
cgccuuggcucuagaagca

SEQ ID NO: 1155326 - RNA, 19 nt, Homo sapiens
  misc_RNA (1)...(19): siRNA sense strand
gcaguggggccuuuuauga

SEQ ID NO: 1155327 - RNA, 19 nt, Homo sapiens
  misc_RNA (1)...(19): siRNA sense strand
uggaagauuacuaccauuu

SEQ ID NO: 1155328 - RNA, 19 nt, Homo sapiens
  misc_RNA (1)...(19): siRNA sense strand
cagcaaacaauuccuacug

SEQ ID NO: 1155329 - RNA, 19 nt, Homo sapiens
  misc_RNA (1)...(19): siRNA sense strand
cagcagcgccaccgagaau

SEQ ID NO: 1155330 - RNA, 19 nt, Homo sapiens
  misc_RNA (1)...(19): siRNA sense strand
ugaacggcaaugauuauga

SEQ ID NO: 1155331 - RNA, 19 nt, Homo sapiens
  misc_RNA (1)...(19): siRNA sense strand
caacuacaucgacauuuac

SEQ ID NO: 1155332 - RNA, 19 nt, Homo sapiens
  misc_RNA (1)...(19): siRNA sense strand
aaacacggcacucguugug

SEQ ID NO: 1155333 - RNA, 19 nt, Homo sapiens
  misc_RNA (1)...(19): siRNA sense strand
ggaagauuacuaccauuuu

SEQ ID NO: 1155334 - RNA, 19 nt, Homo sapiens
  misc_RNA (1)...(19): siRNA sense strand
caacuugggccagauugga

SEQ ID NO: 1155335 - RNA, 19 nt, Homo sapiens
  misc_RNA (1)...(19): siRNA sense strand
gaucugcgucagcgcugua

SEQ ID NO: 1155336 - RNA, 19 nt, Homo sapiens
  misc_RNA (1)...(19): siRNA sense strand
cgcaggcccuuuacuucaa

SEQ ID NO: 1155337 - RNA, 19 nt, Homo sapiens
  misc_RNA (1)...(19): siRNA sense strand
ccaacagcaucuacaccau

SEQ ID NO: 1155338 - RNA, 19 nt, Homo sapiens
  misc_RNA (1)...(19): siRNA sense strand
cuacaucgacauuuacagu

SEQ ID NO: 1155339 - RNA, 19 nt, Homo sapiens
  misc_RNA (1)...(19): siRNA sense strand
ccagcaacaggaagugaaa

SEQ ID NO: 1155340 - RNA, 19 nt, Homo sapiens
  misc_RNA (1)...(19): siRNA sense strand
gcuuucgaguauggcauua

SEQ ID NO: 1155341 - RNA, 19 nt, Homo sapiens
  misc_RNA (1)...(19): siRNA sense strand
aauaaacacggcacucguu

SEQ ID NO: 1155342 - RNA, 19 nt, Homo sapiens
  misc_RNA (1)...(19): siRNA sense strand
caaugauuaugacccaucu

SEQ ID NO: 1155343 - RNA, 19 nt, Homo sapiens
  misc_RNA (1)...(19): siRNA sense strand
caacaugugguaccugcau

SEQ ID NO: 1155344 - RNA, 19 nt, Homo sapiens
  misc_RNA (1)...(19): siRNA sense strand
gcaaagucgcugggcauca

SEQ ID NO: 1155345 - RNA, 19 nt, Homo sapiens
  misc_RNA (1)...(19): siRNA sense strand
ggugaaauggcuccagcaa

SEQ ID NO: 1155346 - RNA, 19 nt, Homo sapiens
  misc_RNA (1)...(19): siRNA sense strand
caaacaauuccuacugcau

SEQ ID NO: 1155347 - RNA, 19 nt, Homo sapiens
  misc_RNA (1)...(19): siRNA sense strand
uaucacagcaaaaccuuua

SEQ ID NO: 1155348 - RNA, 19 nt, Homo sapiens
  misc_RNA (1)...(19): siRNA sense strand
aacgaagggugaagagaca

SEQ ID NO: 1155349 - RNA, 19 nt, Homo sapiens
  misc_RNA (1)...(19): siRNA sense strand
gcaucagacccaacuacau

SEQ ID NO: 1155350 - RNA, 19 nt, Homo sapiens
  misc_RNA (1)...(19): siRNA sense strand
guacaaugccaaaauagga

SEQ ID NO: 1155351 - RNA, 19 nt, Homo sapiens
  misc_RNA (1)...(19): siRNA sense strand
gcaggcccuuuacuucaac

SEQ ID NO: 1155352 - RNA, 19 nt, Homo sapiens
  misc_RNA (1)...(19): siRNA sense strand
ccgcaggcccuuuacuuca

SEQ ID NO: 1155353 - RNA, 19 nt, Homo sapiens
  misc_RNA (1)...(19): siRNA sense strand
cgacgugaacggcaaugau

SEQ ID NO: 1155354 - RNA, 19 nt, Homo sapiens
  misc_RNA (1)...(19): siRNA sense strand
caccgagaauggcuacaag

SEQ ID NO: 1155355 - RNA, 19 nt, Homo sapiens
  misc_RNA (1)...(19): siRNA sense strand
cgugaacggcaaugauuau

SEQ ID NO: 1155356 - RNA, 19 nt, Homo sapiens
  misc_RNA (1)...(19): siRNA sense strand
gugacccgcaggcccuuua

SEQ ID NO: 1155357 - RNA, 19 nt, Homo sapiens
  misc_RNA (1)...(19): siRNA sense strand
ccuuggcucuagaagcaaa

SEQ ID NO: 1155358 - RNA, 19 nt, Homo sapiens
  misc_RNA (1)...(19): siRNA sense strand
gcaacaggaagugaaacga

SEQ ID NO: 1155359 - RNA, 19 nt, Homo sapiens
  misc_RNA (1)...(19): siRNA sense strand
ugcgauggcuacaccaaca

SEQ ID NO: 1155360 - RNA, 19 nt, Homo sapiens
  misc_RNA (1)...(19): siRNA sense strand
ccaccgagaauggcuacaa

SEQ ID NO: 1155361 - RNA, 19 nt, Homo sapiens
  misc_RNA (1)...(19): siRNA sense strand
ccaacuacaucgacauuua

SEQ ID NO: 1155362 - RNA, 19 nt, Homo sapiens
  misc_RNA (1)...(19): siRNA sense strand
uuggaaaccuggaagauua

SEQ ID NO: 1155363 - RNA, 19 nt, Homo sapiens
  misc_RNA (1)...(19): siRNA sense strand
ugaaauggcuccagcaaca

SEQ ID NO: 1155364 - RNA, 19 nt, Homo sapiens
  misc_RNA (1)...(19): siRNA sense strand
ggacggcgaugucacagau

SEQ ID NO: 1155365 - RNA, 19 nt, Homo sapiens
  misc_RNA (1)...(19): siRNA sense strand
gaagcaaacagccaguuaa

SEQ ID NO: 1155366 - RNA, 19 nt, Homo sapiens
  misc_RNA (1)...(19): siRNA sense strand
gaacggcaaugauuaugac

SEQ ID NO: 1155367 - RNA, 19 nt, Homo sapiens
  misc_RNA (1)...(19): siRNA sense strand
gcgagcgacuggaaaguga

SEQ ID NO: 1155368 - RNA, 19 nt, Homo sapiens
  misc_RNA (1)...(19): siRNA sense strand
ccucacaccuuccucagaa

SEQ ID NO: 1155369 - RNA, 19 nt, Homo sapiens
  misc_RNA (1)...(19): siRNA sense strand
gauaugaugccagcaauga

SEQ ID NO: 1155370 - RNA, 19 nt, Homo sapiens
  misc_RNA (1)...(19): siRNA sense strand
ugacccaucuccacgauau

SEQ ID NO: 1155371 - RNA, 19 nt, Homo sapiens
  misc_RNA (1)...(19): siRNA sense strand
caacaggaagugaaacgaa

SEQ ID NO: 1155372 - RNA, 19 nt, Homo sapiens
  misc_RNA (1)...(19): siRNA sense strand
gaaagcgagcgacuggaaa

SEQ ID NO: 1155373 - RNA, 19 nt, Homo sapiens
  misc_RNA (1)...(19): siRNA sense strand
gcaaacagccaguuaaccu

SEQ ID NO: 1155374 - RNA, 19 nt, Homo sapiens
  misc_RNA (1)...(19): siRNA sense strand
agagacaggugcgaaguga

SEQ ID NO: 1155375 - RNA, 19 nt, Homo sapiens
  misc_RNA (1)...(19): siRNA sense strand
gacgugaacggcaaugauu

SEQ ID NO: 1155376 - RNA, 19 nt, Homo sapiens
  misc_RNA (1)...(19): siRNA sense strand
gaugauggcauagagagaa

SEQ ID NO: 1155377 - RNA, 19 nt, Homo sapiens
  misc_RNA (1)...(19): siRNA sense strand
cagauguggucgaggcaaa

SEQ ID NO: 1155378 - RNA, 19 nt, Homo sapiens
  misc_RNA (1)...(19): siRNA sense strand
agaagcaaacagccaguua

SEQ ID NO: 1155379 - RNA, 19 nt, Homo sapiens
  misc_RNA (1)...(19): siRNA sense strand
caaagucgcugggcaucag

SEQ ID NO: 1155380 - RNA, 19 nt, Homo sapiens
  misc_RNA (1)...(19): siRNA sense strand
gaaacgaagggugaagaga

SEQ ID NO: 1155381 - RNA, 19 nt, Homo sapiens
  misc_RNA (1)...(19): siRNA sense strand
caucagacccaacuacauc

SEQ ID NO: 1155382 - RNA, 19 nt, Homo sapiens
  misc_RNA (1)...(19): siRNA sense strand
ugaaagcgagcgacuggaa

SEQ ID NO: 1155383 - RNA, 19 nt, Homo sapiens
  misc_RNA (1)...(19): siRNA sense strand
gaagagacaggugcgaagu

SEQ ID NO: 1155384 - RNA, 19 nt, Homo sapiens
  misc_RNA (1)...(19): siRNA sense strand
caucaucgccuuggcucua

SEQ ID NO: 1155385 - RNA, 19 nt, Homo sapiens
  misc_RNA (1)...(19): siRNA sense strand
ccuggaagauuacuaccau

SEQ ID NO: 1155386 - RNA, 19 nt, Homo sapiens
  misc_RNA (1)...(19): siRNA sense strand
uuucgaguauggcauuaaa

SEQ ID NO: 1155387 - RNA, 19 nt, Homo sapiens
  misc_RNA (1)...(19): siRNA sense strand
uaugaugccagcaaugaaa

SEQ ID NO: 1155388 - RNA, 19 nt, Homo sapiens
  misc_RNA (1)...(19): siRNA sense strand
gaaaccuggaagauuacua

SEQ ID NO: 1155389 - RNA, 19 nt, Homo sapiens
  misc_RNA (1)...(19): siRNA sense strand
cgccuuggcucuagaagca

SEQ ID NO: 1155390 - RNA, 19 nt, Homo sapiens
  misc_RNA (1)...(19): siRNA sense strand
gcaguggggccuuuuauga

SEQ ID NO: 1155391 - RNA, 19 nt, Homo sapiens
  misc_RNA (1)...(19): siRNA sense strand
uggaagauuacuaccauuu

SEQ ID NO: 1155392 - RNA, 19 nt, Homo sapiens
  misc_RNA (1)...(19): siRNA sense strand
cagcaaacaauuccuacug

SEQ ID NO: 1155393 - RNA, 19 nt, Homo sapiens
  misc_RNA (1)...(19): siRNA sense strand
cagcagcgccaccgagaau

SEQ ID NO: 1155394 - RNA, 19 nt, Homo sapiens
  misc_RNA (1)...(19): siRNA sense strand
ugaacggcaaugauuauga

SEQ ID NO: 1155395 - RNA, 19 nt, Homo sapiens
  misc_RNA (1)...(19): siRNA sense strand
caacuacaucgacauuuac

SEQ ID NO: 1155396 - RNA, 19 nt, Homo sapiens
  misc_RNA (1)...(19): siRNA sense strand
aaacacggcacucguugug

SEQ ID NO: 1155397 - RNA, 19 nt, Homo sapiens
  misc_RNA (1)...(19): siRNA sense strand
ggaagauuacuaccauuuu

SEQ ID NO: 1155398 - RNA, 19 nt, Homo sapiens
  misc_RNA (1)...(19): siRNA sense strand
caacuugggccagauugga

SEQ ID NO: 1155399 - RNA, 19 nt, Homo sapiens
  misc_RNA (1)...(19): siRNA sense strand
gaucugcgucagcgcugua

SEQ ID NO: 1155400 - RNA, 19 nt, Homo sapiens
  misc_RNA (1)...(19): siRNA sense strand
cgcaggcccuuuacuucaa

SEQ ID NO: 1155401 - RNA, 19 nt, Homo sapiens
  misc_RNA (1)...(19): siRNA sense strand
ccaacagcaucuacaccau

SEQ ID NO: 1155402 - RNA, 19 nt, Homo sapiens
  misc_RNA (1)...(19): siRNA sense strand
cuacaucgacauuuacagu

SEQ ID NO: 1155403 - RNA, 19 nt, Homo sapiens
  misc_RNA (1)...(19): siRNA sense strand
ccagcaacaggaagugaaa

SEQ ID NO: 1155404 - RNA, 19 nt, Homo sapiens
  misc_RNA (1)...(19): siRNA sense strand
gcuuucgaguauggcauua

SEQ ID NO: 1155405 - RNA, 19 nt, Homo sapiens
  misc_RNA (1)...(19): siRNA sense strand
aauaaacacggcacucguu

SEQ ID NO: 1155406 - RNA, 19 nt, Homo sapiens
  misc_RNA (1)...(19): siRNA sense strand
caaugauuaugacccaucu

SEQ ID NO: 1155407 - RNA, 19 nt, Homo sapiens
  misc_RNA (1)...(19): siRNA sense strand
caacaugugguaccugcau

SEQ ID NO: 1155408 - RNA, 19 nt, Homo sapiens
  misc_RNA (1)...(19): siRNA sense strand
gcaaagucgcugggcauca

SEQ ID NO: 1155409 - RNA, 19 nt, Homo sapiens
  misc_RNA (1)...(19): siRNA sense strand
ggugaaauggcuccagcaa

SEQ ID NO: 1155410 - RNA, 19 nt, Homo sapiens
  misc_RNA (1)...(19): siRNA sense strand
caaacaauuccuacugcau

SEQ ID NO: 1155411 - RNA, 19 nt, Homo sapiens
  misc_RNA (1)...(19): siRNA sense strand
uaucacagcaaaaccuuua

SEQ ID NO: 1155412 - RNA, 19 nt, Homo sapiens
  misc_RNA (1)...(19): siRNA sense strand
aacgaagggugaagagaca

SEQ ID NO: 1155413 - RNA, 19 nt, Homo sapiens
  misc_RNA (1)...(19): siRNA sense strand
gcaucagacccaacuacau

SEQ ID NO: 1155414 - RNA, 19 nt, Homo sapiens
  misc_RNA (1)...(19): siRNA sense strand
guacaaugccaaaauagga

SEQ ID NO: 1155415 - RNA, 19 nt, Homo sapiens
  misc_RNA (1)...(19): siRNA sense strand
gcaggcccuuuacuucaac

SEQ ID NO: 1155416 - RNA, 19 nt, Homo sapiens
  misc_RNA (1)...(19): siRNA sense strand
ccgcaggcccuuuacuuca

SEQ ID NO: 1155417 - RNA, 19 nt, Homo sapiens
  misc_RNA (1)...(19): siRNA sense strand
cgacgugaacggcaaugau

SEQ ID NO: 1155418 - RNA, 19 nt, Homo sapiens
  misc_RNA (1)...(19): siRNA sense strand
caccgagaauggcuacaag

SEQ ID NO: 1155419 - RNA, 19 nt, Homo sapiens
  misc_RNA (1)...(19): siRNA sense strand
cgugaacggcaaugauuau

SEQ ID NO: 1155420 - RNA, 19 nt, Homo sapiens
  misc_RNA (1)...(19): siRNA sense strand
gugacccgcaggcccuuua

SEQ ID NO: 1155421 - RNA, 19 nt, Homo sapiens
  misc_RNA (1)...(19): siRNA sense strand
ccuuggcucuagaagcaaa

SEQ ID NO: 1155422 - RNA, 19 nt, Homo sapiens
  misc_RNA (1)...(19): siRNA sense strand
gcaacaggaagugaaacga

SEQ ID NO: 1155423 - RNA, 19 nt, Homo sapiens
  misc_RNA (1)...(19): siRNA sense strand
ugcgauggcuacaccaaca

SEQ ID NO: 1155424 - RNA, 19 nt, Homo sapiens
  misc_RNA (1)...(19): siRNA sense strand
ccaccgagaauggcuacaa

SEQ ID NO: 1155425 - RNA, 19 nt, Homo sapiens
  misc_RNA (1)...(19): siRNA sense strand
ccaacuacaucgacauuua

SEQ ID NO: 1155426 - RNA, 19 nt, Homo sapiens
  misc_RNA (1)...(19): siRNA sense strand
uuggaaaccuggaagauua

SEQ ID NO: 1155427 - RNA, 19 nt, Homo sapiens
  misc_RNA (1)...(19): siRNA sense strand
ugaaauggcuccagcaaca

SEQ ID NO: 1155428 - RNA, 19 nt, Homo sapiens
  misc_RNA (1)...(19): siRNA sense strand
ggacggcgaugucacagau

SEQ ID NO: 1155429 - RNA, 19 nt, Homo sapiens
  misc_RNA (1)...(19): siRNA sense strand
gaagcaaacagccaguuaa

SEQ ID NO: 1155430 - RNA, 19 nt, Homo sapiens
  misc_RNA (1)...(19): siRNA sense strand
gaacggcaaugauuaugac

SEQ ID NO: 1155431 - RNA, 19 nt, Homo sapiens
  misc_RNA (1)...(19): siRNA sense strand
gcgagcgacuggaaaguga

SEQ ID NO: 1155432 - RNA, 19 nt, Homo sapiens
  misc_RNA (1)...(19): siRNA sense strand
ccucacaccuuccucagaa

SEQ ID NO: 1155433 - RNA, 19 nt, Homo sapiens
  misc_RNA (1)...(19): siRNA sense strand
gauaugaugccagcaauga

SEQ ID NO: 1155434 - RNA, 19 nt, Homo sapiens
  misc_RNA (1)...(19): siRNA sense strand
ugacccaucuccacgauau

SEQ ID NO: 1155435 - RNA, 19 nt, Homo sapiens
  misc_RNA (1)...(19): siRNA sense strand
caacaggaagugaaacgaa

SEQ ID NO: 1155436 - RNA, 19 nt, Homo sapiens
  misc_RNA (1)...(19): siRNA sense strand
gaaagcgagcgacuggaaa

SEQ ID NO: 1155437 - RNA, 19 nt, Homo sapiens
  misc_RNA (1)...(19): siRNA sense strand
gcaaacagccaguuaaccu

SEQ ID NO: 1155438 - RNA, 19 nt, Homo sapiens
  misc_RNA (1)...(19): siRNA sense strand
agagacaggugcgaaguga

SEQ ID NO: 1155439 - RNA, 19 nt, Homo sapiens
  misc_RNA (1)...(19): siRNA sense strand
gacgugaacggcaaugauu

SEQ ID NO: 1155440 - RNA, 19 nt, Homo sapiens
  misc_RNA (1)...(19): siRNA sense strand
gaugauggcauagagagaa

SEQ ID NO: 1155441 - RNA, 19 nt, Homo sapiens
  misc_RNA (1)...(19): siRNA sense strand
cagauguggucgaggcaaa

SEQ ID NO: 1155442 - RNA, 19 nt, Homo sapiens
  misc_RNA (1)...(19): siRNA sense strand
agaagcaaacagccaguua

SEQ ID NO: 1155443 - RNA, 19 nt, Homo sapiens
  misc_RNA (1)...(19): siRNA sense strand
caaagucgcugggcaucag

SEQ ID NO: 1155444 - RNA, 19 nt, Homo sapiens
  misc_RNA (1)...(19): siRNA sense strand
gaaacgaagggugaagaga

SEQ ID NO: 1155445 - RNA, 19 nt, Homo sapiens
  misc_RNA (1)...(19): siRNA sense strand
caucagacccaacuacauc

SEQ ID NO: 1155446 - RNA, 19 nt, Homo sapiens
  misc_RNA (1)...(19): siRNA sense strand
ugaaagcgagcgacuggaa

SEQ ID NO: 1155447 - RNA, 19 nt, Homo sapiens
  misc_RNA (1)...(19): siRNA sense strand
gaagagacaggugcgaagu

SEQ ID NO: 1155448 - RNA, 19 nt, Homo sapiens
  misc_RNA (1)...(19): siRNA sense strand
caucaucgccuuggcucua

SEQ ID NO: 1155449 - RNA, 19 nt, Homo sapiens
  misc_RNA (1)...(19): siRNA sense strand
ccuggaagauuacuaccau

SEQ ID NO: 1155450 - RNA, 19 nt, Homo sapiens
  misc_RNA (1)...(19): siRNA sense strand
uuucgaguauggcauuaaa

SEQ ID NO: 1155451 - RNA, 19 nt, Homo sapiens
  misc_RNA (1)...(19): siRNA sense strand
uaugaugccagcaaugaaa

SEQ ID NO: 1155452 - RNA, 19 nt, Homo sapiens
  misc_RNA (1)...(19): siRNA sense strand
gaaaccuggaagauuacua

SEQ ID NO: 1155453 - RNA, 19 nt, Homo sapiens
  misc_RNA (1)...(19): siRNA sense strand
cgccuuggcucuagaagca

SEQ ID NO: 1155454 - RNA, 19 nt, Homo sapiens
  misc_RNA (1)...(19): siRNA sense strand
gcaguggggccuuuuauga

SEQ ID NO: 1155455 - RNA, 19 nt, Homo sapiens
  misc_RNA (1)...(19): siRNA sense strand
uggaagauuacuaccauuu

SEQ ID NO: 1155456 - RNA, 19 nt, Homo sapiens
  misc_RNA (1)...(19): siRNA sense strand
cagcaaacaauuccuacug

SEQ ID NO: 1155457 - RNA, 19 nt, Homo sapiens
  misc_RNA (1)...(19): siRNA sense strand
cagcagcgccaccgagaau

SEQ ID NO: 1155458 - RNA, 19 nt, Homo sapiens
  misc_RNA (1)...(19): siRNA sense strand
ugaacggcaaugauuauga

SEQ ID NO: 1155459 - RNA, 19 nt, Homo sapiens
  misc_RNA (1)...(19): siRNA sense strand
caacuacaucgacauuuac

SEQ ID NO: 1155460 - RNA, 19 nt, Homo sapiens
  misc_RNA (1)...(19): siRNA sense strand
aaacacggcacucguugug

SEQ ID NO: 1155461 - RNA, 19 nt, Homo sapiens
  misc_RNA (1)...(19): siRNA sense strand
ggaagauuacuaccauuuu

SEQ ID NO: 1155462 - RNA, 19 nt, Homo sapiens
  misc_RNA (1)...(19): siRNA sense strand
caacuugggccagauugga

SEQ ID NO: 1155463 - RNA, 19 nt, Homo sapiens
  misc_RNA (1)...(19): siRNA sense strand
gaucugcgucagcgcugua

SEQ ID NO: 1155464 - RNA, 19 nt, Homo sapiens
  misc_RNA (1)...(19): siRNA sense strand
cgcaggcccuuuacuucaa

SEQ ID NO: 1155465 - RNA, 19 nt, Homo sapiens
  misc_RNA (1)...(19): siRNA sense strand
ccaacagcaucuacaccau

SEQ ID NO: 1155466 - RNA, 19 nt, Homo sapiens
  misc_RNA (1)...(19): siRNA sense strand
cuacaucgacauuuacagu

SEQ ID NO: 1155467 - RNA, 19 nt, Homo sapiens
  misc_RNA (1)...(19): siRNA sense strand
ccagcaacaggaagugaaa

SEQ ID NO: 1155468 - RNA, 19 nt, Homo sapiens
  misc_RNA (1)...(19): siRNA sense strand
gcuuucgaguauggcauua

SEQ ID NO: 1155469 - RNA, 19 nt, Homo sapiens
  misc_RNA (1)...(19): siRNA sense strand
aauaaacacggcacucguu

SEQ ID NO: 1155470 - RNA, 19 nt, Homo sapiens
  misc_RNA (1)...(19): siRNA sense strand
caaugauuaugacccaucu

SEQ ID NO: 1155471 - RNA, 19 nt, Homo sapiens
  misc_RNA (1)...(19): siRNA sense strand
caacaugugguaccugcau

SEQ ID NO: 1155472 - RNA, 19 nt, Homo sapiens
  misc_RNA (1)...(19): siRNA sense strand
gcaaagucgcugggcauca

SEQ ID NO: 1155473 - RNA, 19 nt, Homo sapiens
  misc_RNA (1)...(19): siRNA sense strand
ggugaaauggcuccagcaa

SEQ ID NO: 1155474 - RNA, 19 nt, Homo sapiens
  misc_RNA (1)...(19): siRNA sense strand
caaacaauuccuacugcau

SEQ ID NO: 1155475 - RNA, 19 nt, Homo sapiens
  misc_RNA (1)...(19): siRNA sense strand
uaucacagcaaaaccuuua

SEQ ID NO: 1155476 - RNA, 19 nt, Homo sapiens
  misc_RNA (1)...(19): siRNA sense strand
aacgaagggugaagagaca

SEQ ID NO: 1155477 - RNA, 19 nt, Homo sapiens
  misc_RNA (1)...(19): siRNA sense strand
gcaucagacccaacuacau

SEQ ID NO: 1155478 - RNA, 19 nt, Homo sapiens
  misc_RNA (1)...(19): siRNA sense strand
guacaaugccaaaauagga

SEQ ID NO: 1155479 - RNA, 19 nt, Homo sapiens
  misc_RNA (1)...(19): siRNA sense strand
gcaggcccuuuacuucaac

SEQ ID NO: 1155480 - RNA, 19 nt, Homo sapiens
  misc_RNA (1)...(19): siRNA sense strand
ccgcaggcccuuuacuuca

SEQ ID NO: 1155481 - RNA, 19 nt, Homo sapiens
  misc_RNA (1)...(19): siRNA sense strand
cgacgugaacggcaaugau

SEQ ID NO: 1155482 - RNA, 19 nt, Homo sapiens
  misc_RNA (1)...(19): siRNA sense strand
caccgagaauggcuacaag

SEQ ID NO: 1155483 - RNA, 19 nt, Homo sapiens
  misc_RNA (1)...(19): siRNA sense strand
cgugaacggcaaugauuau

SEQ ID NO: 1155484 - RNA, 19 nt, Homo sapiens
  misc_RNA (1)...(19): siRNA sense strand
gugacccgcaggcccuuua

SEQ ID NO: 1155485 - RNA, 19 nt, Homo sapiens
  misc_RNA (1)...(19): siRNA sense strand
ccuuggcucuagaagcaaa

SEQ ID NO: 1155486 - RNA, 19 nt, Homo sapiens
  misc_RNA (1)...(19): siRNA sense strand
gcaacaggaagugaaacga

SEQ ID NO: 1155487 - RNA, 19 nt, Homo sapiens
  misc_RNA (1)...(19): siRNA sense strand
ugcgauggcuacaccaaca

SEQ ID NO: 1155488 - RNA, 19 nt, Homo sapiens
  misc_RNA (1)...(19): siRNA sense strand
ccaccgagaauggcuacaa

SEQ ID NO: 1155489 - RNA, 19 nt, Homo sapiens
  misc_RNA (1)...(19): siRNA sense strand
ccaacuacaucgacauuua

SEQ ID NO: 1155490 - RNA, 19 nt, Homo sapiens
  misc_RNA (1)...(19): siRNA sense strand
uuggaaaccuggaagauua

SEQ ID NO: 1155491 - RNA, 19 nt, Homo sapiens
  misc_RNA (1)...(19): siRNA sense strand
ugaaauggcuccagcaaca

SEQ ID NO: 1155492 - RNA, 19 nt, Homo sapiens
  misc_RNA (1)...(19): siRNA sense strand
ggacggcgaugucacagau

SEQ ID NO: 1155493 - RNA, 19 nt, Homo sapiens
  misc_RNA (1)...(19): siRNA sense strand
gaagcaaacagccaguuaa

SEQ ID NO: 1155494 - RNA, 19 nt, Homo sapiens
  misc_RNA (1)...(19): siRNA sense strand
gaacggcaaugauuaugac

SEQ ID NO: 1155495 - RNA, 19 nt, Homo sapiens
  misc_RNA (1)...(19): siRNA sense strand
gcgagcgacuggaaaguga

SEQ ID NO: 1155496 - RNA, 19 nt, Homo sapiens
  misc_RNA (1)...(19): siRNA sense strand
ccucacaccuuccucagaa

SEQ ID NO: 1155497 - RNA, 19 nt, Homo sapiens
  misc_RNA (1)...(19): siRNA sense strand
gauaugaugccagcaauga

SEQ ID NO: 1155498 - RNA, 19 nt, Homo sapiens
  misc_RNA (1)...(19): siRNA sense strand
ugacccaucuccacgauau

SEQ ID NO: 1155499 - RNA, 19 nt, Homo sapiens
  misc_RNA (1)...(19): siRNA sense strand
caacaggaagugaaacgaa

SEQ ID NO: 1155500 - RNA, 19 nt, Homo sapiens
  misc_RNA (1)...(19): siRNA sense strand
gaaagcgagcgacuggaaa

SEQ ID NO: 1155501 - RNA, 19 nt, Homo sapiens
  misc_RNA (1)...(19): siRNA sense strand
gcaaacagccaguuaaccu

SEQ ID NO: 1155502 - RNA, 19 nt, Homo sapiens
  misc_RNA (1)...(19): siRNA sense strand
agagacaggugcgaaguga

SEQ ID NO: 1155503 - RNA, 19 nt, Homo sapiens
  misc_RNA (1)...(19): siRNA sense strand
gacgugaacggcaaugauu

SEQ ID NO: 1155504 - RNA, 19 nt, Homo sapiens
  misc_RNA (1)...(19): siRNA sense strand
gaugauggcauagagagaa

SEQ ID NO: 1155505 - RNA, 19 nt, Homo sapiens
  misc_RNA (1)...(19): siRNA sense strand
cagauguggucgaggcaaa

SEQ ID NO: 1155506 - RNA, 19 nt, Homo sapiens
  misc_RNA (1)...(19): siRNA sense strand
agaagcaaacagccaguua

SEQ ID NO: 1155507 - RNA, 19 nt, Homo sapiens
  misc_RNA (1)...(19): siRNA sense strand
caaagucgcugggcaucag

SEQ ID NO: 1155508 - RNA, 19 nt, Homo sapiens
  misc_RNA (1)...(19): siRNA sense strand
gaaacgaagggugaagaga

SEQ ID NO: 1155509 - RNA, 19 nt, Homo sapiens
  misc_RNA (1)...(19): siRNA sense strand
caucagacccaacuacauc

SEQ ID NO: 1155510 - RNA, 19 nt, Homo sapiens
  misc_RNA (1)...(19): siRNA sense strand
ugaaagcgagcgacuggaa

SEQ ID NO: 1155511 - RNA, 19 nt, Homo sapiens
  misc_RNA (1)...(19): siRNA sense strand
gaagagacaggugcgaagu

SEQ ID NO: 1155512 - RNA, 19 nt, Homo sapiens
  misc_RNA (1)...(19): siRNA sense strand
caucaucgccuuggcucua

SEQ ID NO: 1155513 - RNA, 19 nt, Homo sapiens
  misc_RNA (1)...(19): siRNA sense strand
ccuggaagauuacuaccau

SEQ ID NO: 1155514 - RNA, 19 nt, Homo sapiens
  misc_RNA (1)...(19): siRNA sense strand
uuucgaguauggcauuaaa

SEQ ID NO: 1155515 - RNA, 19 nt, Homo sapiens
  misc_RNA (1)...(19): siRNA sense strand
uaugaugccagcaaugaaa

SEQ ID NO: 1155516 - RNA, 19 nt, Homo sapiens
  misc_RNA (1)...(19): siRNA sense strand
gaaaccuggaagauuacua

SEQ ID NO: 1155517 - RNA, 19 nt, Homo sapiens
  misc_RNA (1)...(19): siRNA sense strand
cgccuuggcucuagaagca

SEQ ID NO: 1155518 - RNA, 19 nt, Homo sapiens
  misc_RNA (1)...(19): siRNA sense strand
gcaguggggccuuuuauga

SEQ ID NO: 1155519 - RNA, 19 nt, Homo sapiens
  misc_RNA (1)...(19): siRNA sense strand
uggaagauuacuaccauuu

SEQ ID NO: 1155520 - RNA, 19 nt, Homo sapiens
  misc_RNA (1)...(19): siRNA sense strand
cagcaaacaauuccuacug

SEQ ID NO: 1155521 - RNA, 19 nt, Homo sapiens
  misc_RNA (1)...(19): siRNA sense strand
cagcagcgccaccgagaau

SEQ ID NO: 1155522 - RNA, 19 nt, Homo sapiens
  misc_RNA (1)...(19): siRNA sense strand
ugaacggcaaugauuauga

SEQ ID NO: 1155523 - RNA, 19 nt, Homo sapiens
  misc_RNA (1)...(19): siRNA sense strand
caacuacaucgacauuuac

SEQ ID NO: 1155524 - RNA, 19 nt, Homo sapiens
  misc_RNA (1)...(19): siRNA sense strand
aaacacggcacucguugug

SEQ ID NO: 1155525 - RNA, 19 nt, Homo sapiens
  misc_RNA (1)...(19): siRNA sense strand
ggaagauuacuaccauuuu

SEQ ID NO: 1155526 - RNA, 19 nt, Homo sapiens
  misc_RNA (1)...(19): siRNA sense strand
caacuugggccagauugga

SEQ ID NO: 1155527 - RNA, 19 nt, Homo sapiens
  misc_RNA (1)...(19): siRNA sense strand
gaucugcgucagcgcugua

SEQ ID NO: 1155528 - RNA, 19 nt, Homo sapiens
  misc_RNA (1)...(19): siRNA sense strand
cgcaggcccuuuacuucaa

SEQ ID NO: 1155529 - RNA, 19 nt, Homo sapiens
  misc_RNA (1)...(19): siRNA sense strand
ccaacagcaucuacaccau

SEQ ID NO: 1155530 - RNA, 19 nt, Homo sapiens
  misc_RNA (1)...(19): siRNA sense strand
cuacaucgacauuuacagu

SEQ ID NO: 1155531 - RNA, 19 nt, Homo sapiens
  misc_RNA (1)...(19): siRNA sense strand
ccagcaacaggaagugaaa

SEQ ID NO: 1155532 - RNA, 19 nt, Homo sapiens
  misc_RNA (1)...(19): siRNA sense strand
gcuuucgaguauggcauua

SEQ ID NO: 1155533 - RNA, 19 nt, Homo sapiens
  misc_RNA (1)...(19): siRNA sense strand
aauaaacacggcacucguu

SEQ ID NO: 1155534 - RNA, 19 nt, Homo sapiens
  misc_RNA (1)...(19): siRNA sense strand
caaugauuaugacccaucu

SEQ ID NO: 1155535 - RNA, 19 nt, Homo sapiens
  misc_RNA (1)...(19): siRNA sense strand
caacaugugguaccugcau

SEQ ID NO: 1155536 - RNA, 19 nt, Homo sapiens
  misc_RNA (1)...(19): siRNA sense strand
gcaaagucgcugggcauca

SEQ ID NO: 1155537 - RNA, 19 nt, Homo sapiens
  misc_RNA (1)...(19): siRNA sense strand
ggugaaauggcuccagcaa

SEQ ID NO: 1155538 - RNA, 19 nt, Homo sapiens
  misc_RNA (1)...(19): siRNA sense strand
caaacaauuccuacugcau

SEQ ID NO: 1155539 - RNA, 19 nt, Homo sapiens
  misc_RNA (1)...(19): siRNA sense strand
uaucacagcaaaaccuuua

SEQ ID NO: 1155540 - RNA, 19 nt, Homo sapiens
  misc_RNA (1)...(19): siRNA sense strand
aacgaagggugaagagaca

SEQ ID NO: 1155541 - RNA, 19 nt, Homo sapiens
  misc_RNA (1)...(19): siRNA sense strand
gcaucagacccaacuacau

SEQ ID NO: 1155542 - RNA, 19 nt, Homo sapiens
  misc_RNA (1)...(19): siRNA sense strand
guacaaugccaaaauagga

SEQ ID NO: 1155543 - RNA, 19 nt, Homo sapiens
  misc_RNA (1)...(19): siRNA sense strand
gcaggcccuuuacuucaac

SEQ ID NO: 1155544 - RNA, 19 nt, Homo sapiens
  misc_RNA (1)...(19): siRNA sense strand
ccgcaggcccuuuacuuca

SEQ ID NO: 1155545 - RNA, 19 nt, Homo sapiens
  misc_RNA (1)...(19): siRNA sense strand
cgacgugaacggcaaugau

SEQ ID NO: 1155546 - RNA, 19 nt, Homo sapiens
  misc_RNA (1)...(19): siRNA sense strand
caccgagaauggcuacaag

SEQ ID NO: 1155547 - RNA, 19 nt, Homo sapiens
  misc_RNA (1)...(19): siRNA sense strand
cgugaacggcaaugauuau

SEQ ID NO: 1155548 - RNA, 19 nt, Homo sapiens
  misc_RNA (1)...(19): siRNA sense strand
gugacccgcaggcccuuua

SEQ ID NO: 1155549 - RNA, 19 nt, Homo sapiens
  misc_RNA (1)...(19): siRNA sense strand
ccuuggcucuagaagcaaa

SEQ ID NO: 1155550 - RNA, 19 nt, Homo sapiens
  misc_RNA (1)...(19): siRNA sense strand
gcaacaggaagugaaacga

SEQ ID NO: 1155551 - RNA, 19 nt, Homo sapiens
  misc_RNA (1)...(19): siRNA sense strand
ugcgauggcuacaccaaca

SEQ ID NO: 1155552 - RNA, 19 nt, Homo sapiens
  misc_RNA (1)...(19): siRNA sense strand
ccaccgagaauggcuacaa

SEQ ID NO: 1155553 - RNA, 19 nt, Homo sapiens
  misc_RNA (1)...(19): siRNA sense strand
ccaacuacaucgacauuua

SEQ ID NO: 1155554 - RNA, 19 nt, Homo sapiens
  misc_RNA (1)...(19): siRNA sense strand
uuggaaaccuggaagauua

SEQ ID NO: 1155555 - RNA, 19 nt, Homo sapiens
  misc_RNA (1)...(19): siRNA sense strand
ugaaauggcuccagcaaca

SEQ ID NO: 1155556 - RNA, 19 nt, Homo sapiens
  misc_RNA (1)...(19): siRNA sense strand
ggacggcgaugucacagau

SEQ ID NO: 1155557 - RNA, 19 nt, Homo sapiens
  misc_RNA (1)...(19): siRNA sense strand
gaagcaaacagccaguuaa

SEQ ID NO: 1155558 - RNA, 19 nt, Homo sapiens
  misc_RNA (1)...(19): siRNA sense strand
gaacggcaaugauuaugac

SEQ ID NO: 1155559 - RNA, 19 nt, Homo sapiens
  misc_RNA (1)...(19): siRNA sense strand
gcgagcgacuggaaaguga

SEQ ID NO: 1155560 - RNA, 19 nt, Homo sapiens
  misc_RNA (1)...(19): siRNA sense strand
ccucacaccuuccucagaa

SEQ ID NO: 1155561 - RNA, 19 nt, Homo sapiens
  misc_RNA (1)...(19): siRNA sense strand
gauaugaugccagcaauga

SEQ ID NO: 1155562 - RNA, 19 nt, Homo sapiens
  misc_RNA (1)...(19): siRNA sense strand
ugacccaucuccacgauau

SEQ ID NO: 1155563 - RNA, 19 nt, Homo sapiens
  misc_RNA (1)...(19): siRNA sense strand
caacaggaagugaaacgaa

SEQ ID NO: 1155564 - RNA, 19 nt, Homo sapiens
  misc_RNA (1)...(19): siRNA sense strand
gaaagcgagcgacuggaaa

SEQ ID NO: 1155565 - RNA, 19 nt, Homo sapiens
  misc_RNA (1)...(19): siRNA sense strand
gcaaacagccaguuaaccu

SEQ ID NO: 1155566 - RNA, 19 nt, Homo sapiens
  misc_RNA (1)...(19): siRNA sense strand
agagacaggugcgaaguga

SEQ ID NO: 1155567 - RNA, 19 nt, Homo sapiens
  misc_RNA (1)...(19): siRNA sense strand
gacgugaacggcaaugauu

SEQ ID NO: 1155568 - RNA, 19 nt, Homo sapiens
  misc_RNA (1)...(19): siRNA sense strand
gaugauggcauagagagaa

SEQ ID NO: 1155569 - RNA, 19 nt, Homo sapiens
  misc_RNA (1)...(19): siRNA sense strand
cagauguggucgaggcaaa

SEQ ID NO: 1155570 - RNA, 19 nt, Homo sapiens
  misc_RNA (1)...(19): siRNA sense strand
agaagcaaacagccaguua

SEQ ID NO: 1155571 - RNA, 19 nt, Homo sapiens
  misc_RNA (1)...(19): siRNA sense strand
caaagucgcugggcaucag

SEQ ID NO: 1155572 - RNA, 19 nt, Homo sapiens
  misc_RNA (1)...(19): siRNA sense strand
gaaacgaagggugaagaga

SEQ ID NO: 1155573 - RNA, 19 nt, Homo sapiens
  misc_RNA (1)...(19): siRNA sense strand
caucagacccaacuacauc

SEQ ID NO: 1155574 - RNA, 19 nt, Homo sapiens
  misc_RNA (1)...(19): siRNA sense strand
ugaaagcgagcgacuggaa

SEQ ID NO: 1155575 - RNA, 19 nt, Homo sapiens
  misc_RNA (1)...(19): siRNA sense strand
gaagagacaggugcgaagu

SEQ ID NO: 1155576 - RNA, 19 nt, Homo sapiens
  misc_RNA (1)...(19): siRNA sense strand
caucaucgccuuggcucua

SEQ ID NO: 1155577 - RNA, 19 nt, Homo sapiens
  misc_RNA (1)...(19): siRNA sense strand
ccuggaagauuacuaccau

SEQ ID NO: 1155578 - RNA, 19 nt, Homo sapiens
  misc_RNA (1)...(19): siRNA sense strand
uuucgaguauggcauuaaa

SEQ ID NO: 1155579 - RNA, 19 nt, Homo sapiens
  misc_RNA (1)...(19): siRNA sense strand
uaugaugccagcaaugaaa

SEQ ID NO: 1155580 - RNA, 19 nt, Homo sapiens
  misc_RNA (1)...(19): siRNA sense strand
gaaaccuggaagauuacua

SEQ ID NO: 1155581 - RNA, 19 nt, Homo sapiens
  misc_RNA (1)...(19): siRNA sense strand
cgccuuggcucuagaagca

SEQ ID NO: 1155582 - RNA, 19 nt, Homo sapiens
  misc_RNA (1)...(19): siRNA sense strand
gcaguggggccuuuuauga

SEQ ID NO: 1155583 - RNA, 19 nt, Homo sapiens
  misc_RNA (1)...(19): siRNA sense strand
uggaagauuacuaccauuu

SEQ ID NO: 1155584 - RNA, 19 nt, Homo sapiens
  misc_RNA (1)...(19): siRNA sense strand
cagcaaacaauuccuacug

SEQ ID NO: 1155585 - RNA, 19 nt, Homo sapiens
  misc_RNA (1)...(19): siRNA sense strand
cagcagcgccaccgagaau

SEQ ID NO: 1155586 - RNA, 19 nt, Homo sapiens
  misc_RNA (1)...(19): siRNA sense strand
ugaacggcaaugauuauga

SEQ ID NO: 1155587 - RNA, 19 nt, Homo sapiens
  misc_RNA (1)...(19): siRNA sense strand
caacuacaucgacauuuac

SEQ ID NO: 1155588 - RNA, 19 nt, Homo sapiens
  misc_RNA (1)...(19): siRNA sense strand
aaacacggcacucguugug

SEQ ID NO: 1155589 - RNA, 19 nt, Homo sapiens
  misc_RNA (1)...(19): siRNA sense strand
ggaagauuacuaccauuuu

SEQ ID NO: 1155590 - RNA, 19 nt, Homo sapiens
  misc_RNA (1)...(19): siRNA sense strand
caacuugggccagauugga

SEQ ID NO: 1155591 - RNA, 19 nt, Homo sapiens
  misc_RNA (1)...(19): siRNA sense strand
gaucugcgucagcgcugua

SEQ ID NO: 1155592 - RNA, 19 nt, Homo sapiens
  misc_RNA (1)...(19): siRNA sense strand
cgcaggcccuuuacuucaa

SEQ ID NO: 1155593 - RNA, 19 nt, Homo sapiens
  misc_RNA (1)...(19): siRNA sense strand
ccaacagcaucuacaccau

SEQ ID NO: 1155594 - RNA, 19 nt, Homo sapiens
  misc_RNA (1)...(19): siRNA sense strand
cuacaucgacauuuacagu

SEQ ID NO: 1155595 - RNA, 19 nt, Homo sapiens
  misc_RNA (1)...(19): siRNA sense strand
ccagcaacaggaagugaaa

SEQ ID NO: 1155596 - RNA, 19 nt, Homo sapiens
  misc_RNA (1)...(19): siRNA sense strand
gcuuucgaguauggcauua

SEQ ID NO: 1155597 - RNA, 19 nt, Homo sapiens
  misc_RNA (1)...(19): siRNA sense strand
aauaaacacggcacucguu

SEQ ID NO: 1155598 - RNA, 19 nt, Homo sapiens
  misc_RNA (1)...(19): siRNA sense strand
caaugauuaugacccaucu

SEQ ID NO: 1155599 - RNA, 19 nt, Homo sapiens
  misc_RNA (1)...(19): siRNA sense strand
caacaugugguaccugcau

SEQ ID NO: 1155600 - RNA, 19 nt, Homo sapiens
  misc_RNA (1)...(19): siRNA sense strand
gcaaagucgcugggcauca

SEQ ID NO: 1155601 - RNA, 19 nt, Homo sapiens
  misc_RNA (1)...(19): siRNA sense strand
ggugaaauggcuccagcaa

SEQ ID NO: 1155602 - RNA, 19 nt, Homo sapiens
  misc_RNA (1)...(19): siRNA sense strand
caaacaauuccuacugcau

SEQ ID NO: 1155603 - RNA, 19 nt, Homo sapiens
  misc_RNA (1)...(19): siRNA sense strand
uaucacagcaaaaccuuua

SEQ ID NO: 1155604 - RNA, 19 nt, Homo sapiens
  misc_RNA (1)...(19): siRNA sense strand
aacgaagggugaagagaca

SEQ ID NO: 1155605 - RNA, 19 nt, Homo sapiens
  misc_RNA (1)...(19): siRNA sense strand
gcaucagacccaacuacau

SEQ ID NO: 1155606 - RNA, 19 nt, Homo sapiens
  misc_RNA (1)...(19): siRNA sense strand
guacaaugccaaaauagga

SEQ ID NO: 1155607 - RNA, 19 nt, Homo sapiens
  misc_RNA (1)...(19): siRNA sense strand
gcaggcccuuuacuucaac

SEQ ID NO: 1155608 - RNA, 19 nt, Homo sapiens
  misc_RNA (1)...(19): siRNA sense strand
ccgcaggcccuuuacuuca

SEQ ID NO: 1155609 - RNA, 19 nt, Homo sapiens
  misc_RNA (1)...(19): siRNA sense strand
cgacgugaacggcaaugau

SEQ ID NO: 1155610 - RNA, 19 nt, Homo sapiens
  misc_RNA (1)...(19): siRNA sense strand
caccgagaauggcuacaag

SEQ ID NO: 1155611 - RNA, 19 nt, Homo sapiens
  misc_RNA (1)...(19): siRNA sense strand
cgugaacggcaaugauuau

SEQ ID NO: 1155612 - RNA, 19 nt, Homo sapiens
  misc_RNA (1)...(19): siRNA sense strand
gugacccgcaggcccuuua

SEQ ID NO: 1155613 - RNA, 19 nt, Homo sapiens
  misc_RNA (1)...(19): siRNA sense strand
ccuuggcucuagaagcaaa

SEQ ID NO: 1155614 - RNA, 19 nt, Homo sapiens
  misc_RNA (1)...(19): siRNA sense strand
gcaacaggaagugaaacga

SEQ ID NO: 1155615 - RNA, 19 nt, Homo sapiens
  misc_RNA (1)...(19): siRNA sense strand
ugcgauggcuacaccaaca

SEQ ID NO: 1155616 - RNA, 19 nt, Homo sapiens
  misc_RNA (1)...(19): siRNA sense strand
ccaccgagaauggcuacaa

SEQ ID NO: 1155617 - RNA, 19 nt, Homo sapiens
  misc_RNA (1)...(19): siRNA sense strand
gaagaggaauugagaacua

SEQ ID NO: 1155618 - RNA, 19 nt, Homo sapiens
  misc_RNA (1)...(19): siRNA sense strand
gaauugagaacuacuauga

SEQ ID NO: 1155619 - RNA, 19 nt, Homo sapiens
  misc_RNA (1)...(19): siRNA sense strand
gaacuacuaugaugaucug

SEQ ID NO: 1155620 - RNA, 19 nt, Homo sapiens
  misc_RNA (1)...(19): siRNA sense strand
gaacgacaacauucgaaga

SEQ ID NO: 1155621 - RNA, 19 nt, Homo sapiens
  misc_RNA (1)...(19): siRNA sense strand
gaaccagaccauugacuuc

SEQ ID NO: 1155622 - RNA, 19 nt, Homo sapiens
  misc_RNA (1)...(19): siRNA sense strand
caccauguguggcuacaaa

SEQ ID NO: 1155623 - RNA, 19 nt, Homo sapiens
  misc_RNA (1)...(19): siRNA sense strand
ggacaacuacaccaucaug

SEQ ID NO: 1155624 - RNA, 19 nt, Homo sapiens
  misc_RNA (1)...(19): siRNA sense strand
ggaucugccucaucaugga

SEQ ID NO: 1155625 - RNA, 19 nt, Homo sapiens
  misc_RNA (1)...(19): siRNA sense strand
ggaaccagaccauugacuu

SEQ ID NO: 1155626 - RNA, 19 nt, Homo sapiens
  misc_RNA (1)...(19): siRNA sense strand
ggagcacucugucacugau

SEQ ID NO: 1155627 - RNA, 19 nt, Homo sapiens
  misc_RNA (1)...(19): siRNA sense strand
acaaggagcguuucagugu

SEQ ID NO: 1155628 - RNA, 19 nt, Homo sapiens
  misc_RNA (1)...(19): siRNA sense strand
cauggacuuuguucagaaa

SEQ ID NO: 1155629 - RNA, 19 nt, Homo sapiens
  misc_RNA (1)...(19): siRNA sense strand
guugagcggcagaaauaua

SEQ ID NO: 1155630 - RNA, 19 nt, Homo sapiens
  misc_RNA (1)...(19): siRNA sense strand
guucauggucuccuucauu

SEQ ID NO: 1155631 - RNA, 19 nt, Homo sapiens
  misc_RNA (1)...(19): siRNA sense strand
ucauggacuuuguucagaa

SEQ ID NO: 1155632 - RNA, 19 nt, Homo sapiens
  misc_RNA (1)...(19): siRNA sense strand
gaggaauugagaacuacua

SEQ ID NO: 1155633 - RNA, 19 nt, Homo sapiens
  misc_RNA (1)...(19): siRNA sense strand
cuugggaucugccucauca

SEQ ID NO: 1155634 - RNA, 19 nt, Homo sapiens
  misc_RNA (1)...(19): siRNA sense strand
gacaacauucgaagaggaa

SEQ ID NO: 1155635 - RNA, 19 nt, Homo sapiens
  misc_RNA (1)...(19): siRNA sense strand
uggaggacaucaucaugga

SEQ ID NO: 1155636 - RNA, 19 nt, Homo sapiens
  misc_RNA (1)...(19): siRNA sense strand
gugacaaccuguaccuucu

SEQ ID NO: 1155637 - RNA, 19 nt, Homo sapiens
  misc_RNA (1)...(19): siRNA sense strand
augaugaucuggacuucaa

SEQ ID NO: 1155638 - RNA, 19 nt, Homo sapiens
  misc_RNA (1)...(19): siRNA sense strand
auugagaacuacuaugaug

SEQ ID NO: 1155639 - RNA, 19 nt, Homo sapiens
  misc_RNA (1)...(19): siRNA sense strand
agguugagcggcagaaaua

SEQ ID NO: 1155640 - RNA, 19 nt, Homo sapiens
  misc_RNA (1)...(19): siRNA sense strand
cgacaaggagcguuucagu

SEQ ID NO: 1155641 - RNA, 19 nt, Homo sapiens
  misc_RNA (1)...(19): siRNA sense strand
gagaacuacuaugaugauc

SEQ ID NO: 1155642 - RNA, 19 nt, Homo sapiens
  misc_RNA (1)...(19): siRNA sense strand
ccauugacuuccugaacga

SEQ ID NO: 1155643 - RNA, 19 nt, Homo sapiens
  misc_RNA (1)...(19): siRNA sense strand
ggaauugagaacuacuaug

SEQ ID NO: 1155644 - RNA, 19 nt, Homo sapiens
  misc_RNA (1)...(19): siRNA sense strand
uucauggucuccuucauug

SEQ ID NO: 1155645 - RNA, 19 nt, Homo sapiens
  misc_RNA (1)...(19): siRNA sense strand
ggaacacgacagaaguugu

SEQ ID NO: 1155646 - RNA, 19 nt, Homo sapiens
  misc_RNA (1)...(19): siRNA sense strand
cuacaaaacuaucgacaag

SEQ ID NO: 1155647 - RNA, 19 nt, Homo sapiens
  misc_RNA (1)...(19): siRNA sense strand
ucacuuaucaucuauucca

SEQ ID NO: 1155648 - RNA, 19 nt, Homo sapiens
  misc_RNA (1)...(19): siRNA sense strand
ggagcaagaaucaguacca

SEQ ID NO: 1155649 - RNA, 19 nt, Homo sapiens
  misc_RNA (1)...(19): siRNA sense strand
caaccuguaccuucuccaa

SEQ ID NO: 1155650 - RNA, 19 nt, Homo sapiens
  misc_RNA (1)...(19): siRNA sense strand
uugagcggcagaaauauaa

SEQ ID NO: 1155651 - RNA, 19 nt, Homo sapiens
  misc_RNA (1)...(19): siRNA sense strand
gcaccaacgccgugaucau

SEQ ID NO: 1155652 - RNA, 19 nt, Homo sapiens
  misc_RNA (1)...(19): siRNA sense strand
acaaaacuaucgacaagga

SEQ ID NO: 1155653 - RNA, 19 nt, Homo sapiens
  misc_RNA (1)...(19): siRNA sense strand
ggaggacuaccgagauugg

SEQ ID NO: 1155654 - RNA, 19 nt, Homo sapiens
  misc_RNA (1)...(19): siRNA sense strand
ugagaacuacuaugaugau

SEQ ID NO: 1155655 - RNA, 19 nt, Homo sapiens
  misc_RNA (1)...(19): siRNA sense strand
gagguugagcggcagaaau

SEQ ID NO: 1155656 - RNA, 19 nt, Homo sapiens
  misc_RNA (1)...(19): siRNA sense strand
caggaacacgacagaaguu

SEQ ID NO: 1155657 - RNA, 19 nt, Homo sapiens
  misc_RNA (1)...(19): siRNA sense strand
ccaacgccgugaucaucug

SEQ ID NO: 1155658 - RNA, 19 nt, Homo sapiens
  misc_RNA (1)...(19): siRNA sense strand
ggggaggacuaccgagauu

SEQ ID NO: 1155659 - RNA, 19 nt, Homo sapiens
  misc_RNA (1)...(19): siRNA sense strand
ucugguucauggacaacua

SEQ ID NO: 1155660 - RNA, 19 nt, Homo sapiens
  misc_RNA (1)...(19): siRNA sense strand
caucauggacuuuguucag

SEQ ID NO: 1155661 - RNA, 19 nt, Homo sapiens
  misc_RNA (1)...(19): siRNA sense strand
ggcacgggaugcugcuugu

SEQ ID NO: 1155662 - RNA, 19 nt, Homo sapiens
  misc_RNA (1)...(19): siRNA sense strand
cccuacaccugcugcauca

SEQ ID NO: 1155663 - RNA, 19 nt, Homo sapiens
  misc_RNA (1)...(19): siRNA sense strand
gguggaggacaucaucaug

SEQ ID NO: 1155664 - RNA, 19 nt, Homo sapiens
  misc_RNA (1)...(19): siRNA sense strand
ucaggaacacgacagaagu

SEQ ID NO: 1155665 - RNA, 19 nt, Homo sapiens
  misc_RNA (1)...(19): siRNA sense strand
gcaucaggaacacgacaga

SEQ ID NO: 1155666 - RNA, 19 nt, Homo sapiens
  misc_RNA (1)...(19): siRNA sense strand
cuaccucuggcucaaguuu

SEQ ID NO: 1155667 - RNA, 19 nt, Homo sapiens
  misc_RNA (1)...(19): siRNA sense strand
uaccgagauuggagcaaga

SEQ ID NO: 1155668 - RNA, 19 nt, Homo sapiens
  misc_RNA (1)...(19): siRNA sense strand
gaccauugacuuccugaac

SEQ ID NO: 1155669 - RNA, 19 nt, Homo sapiens
  misc_RNA (1)...(19): siRNA sense strand
ggaacaaccucaccacaua

SEQ ID NO: 1155670 - RNA, 19 nt, Homo sapiens
  misc_RNA (1)...(19): siRNA sense strand
caaggagucuggaugaaua

SEQ ID NO: 1155671 - RNA, 19 nt, Homo sapiens
  misc_RNA (1)...(19): siRNA sense strand
acaagaugcucaacaauaa

SEQ ID NO: 1155672 - RNA, 19 nt, Homo sapiens
  misc_RNA (1)...(19): siRNA sense strand
ggucagauuucuccaauga

SEQ ID NO: 1155673 - RNA, 19 nt, Homo sapiens
  misc_RNA (1)...(19): siRNA sense strand
acaaagugcugaaggauaa

SEQ ID NO: 1155674 - RNA, 19 nt, Homo sapiens
  misc_RNA (1)...(19): siRNA sense strand
gaauaucacugucccagau

SEQ ID NO: 1155675 - RNA, 19 nt, Homo sapiens
  misc_RNA (1)...(19): siRNA sense strand
gguggcugcuucucuauua

SEQ ID NO: 1155676 - RNA, 19 nt, Homo sapiens
  misc_RNA (1)...(19): siRNA sense strand
gacaaccucuucacucaaa

SEQ ID NO: 1155677 - RNA, 19 nt, Homo sapiens
  misc_RNA (1)...(19): siRNA sense strand
gaucaagcuuuacuucaug

SEQ ID NO: 1155678 - RNA, 19 nt, Homo sapiens
  misc_RNA (1)...(19): siRNA sense strand
gaggugacuuggaauauca

SEQ ID NO: 1155679 - RNA, 19 nt, Homo sapiens
  misc_RNA (1)...(19): siRNA sense strand
ccagauggguuucggauca

SEQ ID NO: 1155680 - RNA, 19 nt, Homo sapiens
  misc_RNA (1)...(19): siRNA sense strand
ggaucaagcuuuacuucau

SEQ ID NO: 1155681 - RNA, 19 nt, Homo sapiens
  misc_RNA (1)...(19): siRNA sense strand
gcaguuugaggacauauuu

SEQ ID NO: 1155682 - RNA, 19 nt, Homo sapiens
  misc_RNA (1)...(19): siRNA sense strand
gaugggacguggaguaaca

SEQ ID NO: 1155683 - RNA, 19 nt, Homo sapiens
  misc_RNA (1)...(19): siRNA sense strand
auacagggcugcaggaaau

SEQ ID NO: 1155684 - RNA, 19 nt, Homo sapiens
  misc_RNA (1)...(19): siRNA sense strand
ccuccuaccuuugugaaua

SEQ ID NO: 1155685 - RNA, 19 nt, Homo sapiens
  misc_RNA (1)...(19): siRNA sense strand
gguuucggaucaagcuuua

SEQ ID NO: 1155686 - RNA, 19 nt, Homo sapiens
  misc_RNA (1)...(19): siRNA sense strand
uacaagaugcucaacaaua

SEQ ID NO: 1155687 - RNA, 19 nt, Homo sapiens
  misc_RNA (1)...(19): siRNA sense strand
gcuacaaagugcugaagga

SEQ ID NO: 1155688 - RNA, 19 nt, Homo sapiens
  misc_RNA (1)...(19): siRNA sense strand
auacaagucugagaucaaa

SEQ ID NO: 1155689 - RNA, 19 nt, Homo sapiens
  misc_RNA (1)...(19): siRNA sense strand
caacaauaacacagguaua

SEQ ID NO: 1155690 - RNA, 19 nt, Homo sapiens
  misc_RNA (1)...(19): siRNA sense strand
ggaauccuccuaccuuugu

SEQ ID NO: 1155691 - RNA, 19 nt, Homo sapiens
  misc_RNA (1)...(19): siRNA sense strand
ggacguggaguaacaagau

SEQ ID NO: 1155692 - RNA, 19 nt, Homo sapiens
  misc_RNA (1)...(19): siRNA sense strand
gaaggauaauguggagaug

SEQ ID NO: 1155693 - RNA, 19 nt, Homo sapiens
  misc_RNA (1)...(19): siRNA sense strand
caggagcccuauuacaaga

SEQ ID NO: 1155694 - RNA, 19 nt, Homo sapiens
  misc_RNA (1)...(19): siRNA sense strand
ugacacaggcuacaaagug

SEQ ID NO: 1155695 - RNA, 19 nt, Homo sapiens
  misc_RNA (1)...(19): siRNA sense strand
acaagucugagaucaaaua

SEQ ID NO: 1155696 - RNA, 19 nt, Homo sapiens
  misc_RNA (1)...(19): siRNA sense strand
auucagaggugacuuggaa

SEQ ID NO: 1155697 - RNA, 19 nt, Homo sapiens
  misc_RNA (1)...(19): siRNA sense strand
guccugauccuguuccaua

SEQ ID NO: 1155698 - RNA, 19 nt, Homo sapiens
  misc_RNA (1)...(19): siRNA sense strand
gagucuggaugaauaaagu

SEQ ID NO: 1155699 - RNA, 19 nt, Homo sapiens
  misc_RNA (1)...(19): siRNA sense strand
gucaggagcccuauuacaa

SEQ ID NO: 1155700 - RNA, 19 nt, Homo sapiens
  misc_RNA (1)...(19): siRNA sense strand
ggagcccuauuacaagaug

SEQ ID NO: 1155701 - RNA, 19 nt, Homo sapiens
  misc_RNA (1)...(19): siRNA sense strand
gcuggaggcucucauacag

SEQ ID NO: 1155702 - RNA, 19 nt, Homo sapiens
  misc_RNA (1)...(19): siRNA sense strand
gacguggaguaacaagauu

SEQ ID NO: 1155703 - RNA, 19 nt, Homo sapiens
  misc_RNA (1)...(19): siRNA sense strand
ucagaggugacuuggaaua

SEQ ID NO: 1155704 - RNA, 19 nt, Homo sapiens
  misc_RNA (1)...(19): siRNA sense strand
cugaucaccuucucuacaa

SEQ ID NO: 1155705 - RNA, 19 nt, Homo sapiens
  misc_RNA (1)...(19): siRNA sense strand
caauauguuuggccagauc

SEQ ID NO: 1155706 - RNA, 19 nt, Homo sapiens
  misc_RNA (1)...(19): siRNA sense strand
gcuacauccuccacacaga

SEQ ID NO: 1155707 - RNA, 19 nt, Homo sapiens
  misc_RNA (1)...(19): siRNA sense strand
gggcugaucaccuucucua

SEQ ID NO: 1155708 - RNA, 19 nt, Homo sapiens
  misc_RNA (1)...(19): siRNA sense strand
acaagauucccaccuguaa

SEQ ID NO: 1155709 - RNA, 19 nt, Homo sapiens
  misc_RNA (1)...(19): siRNA sense strand
agccaaguauuucuucaaa

SEQ ID NO: 1155710 - RNA, 19 nt, Homo sapiens
  misc_RNA (1)...(19): siRNA sense strand
ccacauacaagucugagau

SEQ ID NO: 1155711 - RNA, 19 nt, Homo sapiens
  misc_RNA (1)...(19): siRNA sense strand
gaacaaccucaccacauac

SEQ ID NO: 1155712 - RNA, 19 nt, Homo sapiens
  misc_RNA (1)...(19): siRNA sense strand
gagccacaguguccugauc

SEQ ID NO: 1155713 - RNA, 19 nt, Homo sapiens
  misc_RNA (1)...(19): siRNA sense strand
ucacuuuccggucagauuu

SEQ ID NO: 1155714 - RNA, 19 nt, Homo sapiens
  misc_RNA (1)...(19): siRNA sense strand
caagauucccaccuguaaa

SEQ ID NO: 1155715 - RNA, 19 nt, Homo sapiens
  misc_RNA (1)...(19): siRNA sense strand
agucugagaucaaauacuc

SEQ ID NO: 1155716 - RNA, 19 nt, Homo sapiens
  misc_RNA (1)...(19): siRNA sense strand
gugaauaugacuaugugaa

SEQ ID NO: 1155717 - RNA, 19 nt, Homo sapiens
  misc_RNA (1)...(19): siRNA sense strand
gcccaaggagucuggauga

SEQ ID NO: 1155718 - RNA, 19 nt, Homo sapiens
  misc_RNA (1)...(19): siRNA sense strand
uacaaagugcugaaggaua

SEQ ID NO: 1155719 - RNA, 19 nt, Homo sapiens
  misc_RNA (1)...(19): siRNA sense strand
cgaguggagugcagugaca

SEQ ID NO: 1155720 - RNA, 19 nt, Homo sapiens
  misc_RNA (1)...(19): siRNA sense strand
caagccaaguauuucuuca

SEQ ID NO: 1155721 - RNA, 19 nt, Homo sapiens
  misc_RNA (1)...(19): siRNA sense strand
gaucaccagcccugacuuc

SEQ ID NO: 1155722 - RNA, 19 nt, Homo sapiens
  misc_RNA (1)...(19): siRNA sense strand
ugacuuggaauaucacugu

SEQ ID NO: 1155723 - RNA, 19 nt, Homo sapiens
  misc_RNA (1)...(19): siRNA sense strand
cugaaugccuguauaccau

SEQ ID NO: 1155724 - RNA, 19 nt, Homo sapiens
  misc_RNA (1)...(19): siRNA sense strand
auuacaagaugcucaacaa

SEQ ID NO: 1155725 - RNA, 19 nt, Homo sapiens
  misc_RNA (1)...(19): siRNA sense strand
aggauaauguggagaugga

SEQ ID NO: 1155726 - RNA, 19 nt, Homo sapiens
  misc_RNA (1)...(19): siRNA sense strand
cuacaucaagaucaaaguu

SEQ ID NO: 1155727 - RNA, 19 nt, Homo sapiens
  misc_RNA (1)...(19): siRNA sense strand
gcacccagagccacagugu

SEQ ID NO: 1155728 - RNA, 19 nt, Homo sapiens
  misc_RNA (1)...(19): siRNA sense strand
gcugaucaccuucucuaca

SEQ ID NO: 1155729 - RNA, 19 nt, Homo sapiens
  misc_RNA (1)...(19): siRNA sense strand
uuggaauccuccuaccuuu

SEQ ID NO: 1155730 - RNA, 19 nt, Homo sapiens
  misc_RNA (1)...(19): siRNA sense strand
ccaaggagucuggaugaau

SEQ ID NO: 1155731 - RNA, 19 nt, Homo sapiens
  misc_RNA (1)...(19): siRNA sense strand
ccggucagauuucuccaau

SEQ ID NO: 1155732 - RNA, 19 nt, Homo sapiens
  misc_RNA (1)...(19): siRNA sense strand
ccucccaagccaaguauuu

SEQ ID NO: 1155733 - RNA, 19 nt, Homo sapiens
  misc_RNA (1)...(19): siRNA sense strand
ugaaggauaauguggagau

SEQ ID NO: 1155734 - RNA, 19 nt, Homo sapiens
  misc_RNA (1)...(19): siRNA sense strand
ucaacaauaacacagguau

SEQ ID NO: 1155735 - RNA, 19 nt, Homo sapiens
  misc_RNA (1)...(19): siRNA sense strand
agaggugacuuggaauauc

SEQ ID NO: 1155736 - RNA, 19 nt, Homo sapiens
  misc_RNA (1)...(19): siRNA sense strand
ugaauaugacuaugugaag

SEQ ID NO: 1155737 - RNA, 19 nt, Homo sapiens
  misc_RNA (1)...(19): siRNA sense strand
uaccuguucugcccaagga

SEQ ID NO: 1155738 - RNA, 19 nt, Homo sapiens
  misc_RNA (1)...(19): siRNA sense strand
cauacaagucugagaucaa

SEQ ID NO: 1155739 - RNA, 19 nt, Homo sapiens
  misc_RNA (1)...(19): siRNA sense strand
cuucaugcacuucaacuug

SEQ ID NO: 1155740 - RNA, 19 nt, Homo sapiens
  misc_RNA (1)...(19): siRNA sense strand
caaccucaccacauacaag

SEQ ID NO: 1155741 - RNA, 19 nt, Homo sapiens
  misc_RNA (1)...(19): siRNA sense strand
gccaaguauuucuucaaag

SEQ ID NO: 1155742 - RNA, 19 nt, Homo sapiens
  misc_RNA (1)...(19): siRNA sense strand
gaccacuacugccacaacu

SEQ ID NO: 1155743 - RNA, 19 nt, Homo sapiens
  misc_RNA (1)...(19): siRNA sense strand
cuacugccacaacuacauu

SEQ ID NO: 1155744 - RNA, 19 nt, Homo sapiens
  misc_RNA (1)...(19): siRNA sense strand
cagauggguuucggaucaa

SEQ ID NO: 1155745 - RNA, 19 nt, Homo sapiens
  misc_RNA (1)...(19): siRNA sense strand
ccacuacugccacaacuac

SEQ ID NO: 1155746 - RNA, 19 nt, Homo sapiens
  misc_RNA (1)...(19): siRNA sense strand
acauacaagucugagauca

SEQ ID NO: 1155747 - RNA, 19 nt, Homo sapiens
  misc_RNA (1)...(19): siRNA sense strand
cauacagggcugcaggaaa

SEQ ID NO: 1155748 - RNA, 19 nt, Homo sapiens
  misc_RNA (1)...(19): siRNA sense strand
cuccuaccuuugugaauau

SEQ ID NO: 1155749 - RNA, 19 nt, Homo sapiens
  misc_RNA (1)...(19): siRNA sense strand
ucaggagcccuauuacaag

SEQ ID NO: 1155750 - RNA, 19 nt, Homo sapiens
  misc_RNA (1)...(19): siRNA sense strand
aacacgggcugaucaccuu

SEQ ID NO: 1155751 - RNA, 19 nt, Homo sapiens
  misc_RNA (1)...(19): siRNA sense strand
gggccuuucuguggagaga

SEQ ID NO: 1155752 - RNA, 19 nt, Homo sapiens
  misc_RNA (1)...(19): siRNA sense strand
gaauccuccuaccuuugug

SEQ ID NO: 1155753 - RNA, 19 nt, Homo sapiens
  misc_RNA (1)...(19): siRNA sense strand
cccuaugacuacaucaaga

SEQ ID NO: 1155754 - RNA, 19 nt, Homo sapiens
  misc_RNA (1)...(19): siRNA sense strand
gcucugaaugccuguauac

SEQ ID NO: 1155755 - RNA, 19 nt, Homo sapiens
  misc_RNA (1)...(19): siRNA sense strand
gagcucugaaugccuguau

SEQ ID NO: 1155756 - RNA, 19 nt, Homo sapiens
  misc_RNA (1)...(19): siRNA sense strand
ggguuucggaucaagcuuu

SEQ ID NO: 1155757 - RNA, 19 nt, Homo sapiens
  misc_RNA (1)...(19): siRNA sense strand
ccaagccaaguauuucuuc

SEQ ID NO: 1155758 - RNA, 19 nt, Homo sapiens
  misc_RNA (1)...(19): siRNA sense strand
cagaggugacuuggaauau

SEQ ID NO: 1155759 - RNA, 19 nt, Homo sapiens
  misc_RNA (1)...(19): siRNA sense strand
guaaaauuguagacuguag

SEQ ID NO: 1155760 - RNA, 19 nt, Homo sapiens
  misc_RNA (1)...(19): siRNA sense strand
aaggaugggacguggagua

SEQ ID NO: 1155761 - RNA, 19 nt, Homo sapiens
  misc_RNA (1)...(19): siRNA sense strand
gauugagugucugaaggau

SEQ ID NO: 1155762 - RNA, 19 nt, Homo sapiens
  misc_RNA (1)...(19): siRNA sense strand
gcuggaggaggguuucaug

SEQ ID NO: 1155763 - RNA, 19 nt, Homo sapiens
  misc_RNA (1)...(19): siRNA sense strand
ggagucuggaugaauaaag

SEQ ID NO: 1155764 - RNA, 19 nt, Homo sapiens
  misc_RNA (1)...(19): siRNA sense strand
ucuauuaugcucugugcuu

SEQ ID NO: 1155765 - RNA, 19 nt, Homo sapiens
  misc_RNA (1)...(19): siRNA sense strand
gugauucagaggugacuug

SEQ ID NO: 1155766 - RNA, 19 nt, Homo sapiens
  misc_RNA (1)...(19): siRNA sense strand
ugacaacucgggagagaac

SEQ ID NO: 1155767 - RNA, 19 nt, Homo sapiens
  misc_RNA (1)...(19): siRNA sense strand
ggacacauuccagauugag

SEQ ID NO: 1155768 - RNA, 19 nt, Homo sapiens
  misc_RNA (1)...(19): siRNA sense strand
aacaagauucccaccugua

SEQ ID NO: 1155769 - RNA, 19 nt, Homo sapiens
  misc_RNA (1)...(19): siRNA sense strand
ggaacaaccucaccacaua

SEQ ID NO: 1155770 - RNA, 19 nt, Homo sapiens
  misc_RNA (1)...(19): siRNA sense strand
caaggagucuggaugaaua

SEQ ID NO: 1155771 - RNA, 19 nt, Homo sapiens
  misc_RNA (1)...(19): siRNA sense strand
acaagaugcucaacaauaa

SEQ ID NO: 1155772 - RNA, 19 nt, Homo sapiens
  misc_RNA (1)...(19): siRNA sense strand
ggucagauuucuccaauga

SEQ ID NO: 1155773 - RNA, 19 nt, Homo sapiens
  misc_RNA (1)...(19): siRNA sense strand
acaaagugcugaaggauaa

SEQ ID NO: 1155774 - RNA, 19 nt, Homo sapiens
  misc_RNA (1)...(19): siRNA sense strand
gaauaucacugucccagau

SEQ ID NO: 1155775 - RNA, 19 nt, Homo sapiens
  misc_RNA (1)...(19): siRNA sense strand
gguggcugcuucucuauua

SEQ ID NO: 1155776 - RNA, 19 nt, Homo sapiens
  misc_RNA (1)...(19): siRNA sense strand
gacaaccucuucacucaaa

SEQ ID NO: 1155777 - RNA, 19 nt, Homo sapiens
  misc_RNA (1)...(19): siRNA sense strand
gaucaagcuuuacuucaug

SEQ ID NO: 1155778 - RNA, 19 nt, Homo sapiens
  misc_RNA (1)...(19): siRNA sense strand
gaggugacuuggaauauca

SEQ ID NO: 1155779 - RNA, 19 nt, Homo sapiens
  misc_RNA (1)...(19): siRNA sense strand
ccagauggguuucggauca

SEQ ID NO: 1155780 - RNA, 19 nt, Homo sapiens
  misc_RNA (1)...(19): siRNA sense strand
ggaucaagcuuuacuucau

SEQ ID NO: 1155781 - RNA, 19 nt, Homo sapiens
  misc_RNA (1)...(19): siRNA sense strand
gcaguuugaggacauauuu

SEQ ID NO: 1155782 - RNA, 19 nt, Homo sapiens
  misc_RNA (1)...(19): siRNA sense strand
gaugggacguggaguaaca

SEQ ID NO: 1155783 - RNA, 19 nt, Homo sapiens
  misc_RNA (1)...(19): siRNA sense strand
auacagggcugcaggaaau

SEQ ID NO: 1155784 - RNA, 19 nt, Homo sapiens
  misc_RNA (1)...(19): siRNA sense strand
ccuccuaccuuugugaaua

SEQ ID NO: 1155785 - RNA, 19 nt, Homo sapiens
  misc_RNA (1)...(19): siRNA sense strand
gguuucggaucaagcuuua

SEQ ID NO: 1155786 - RNA, 19 nt, Homo sapiens
  misc_RNA (1)...(19): siRNA sense strand
uacaagaugcucaacaaua

SEQ ID NO: 1155787 - RNA, 19 nt, Homo sapiens
  misc_RNA (1)...(19): siRNA sense strand
gcuacaaagugcugaagga

SEQ ID NO: 1155788 - RNA, 19 nt, Homo sapiens
  misc_RNA (1)...(19): siRNA sense strand
auacaagucugagaucaaa

SEQ ID NO: 1155789 - RNA, 19 nt, Homo sapiens
  misc_RNA (1)...(19): siRNA sense strand
caacaauaacacagguaua

SEQ ID NO: 1155790 - RNA, 19 nt, Homo sapiens
  misc_RNA (1)...(19): siRNA sense strand
ggaauccuccuaccuuugu

SEQ ID NO: 1155791 - RNA, 19 nt, Homo sapiens
  misc_RNA (1)...(19): siRNA sense strand
ggacguggaguaacaagau

SEQ ID NO: 1155792 - RNA, 19 nt, Homo sapiens
  misc_RNA (1)...(19): siRNA sense strand
gaaggauaauguggagaug

SEQ ID NO: 1155793 - RNA, 19 nt, Homo sapiens
  misc_RNA (1)...(19): siRNA sense strand
caggagcccuauuacaaga

SEQ ID NO: 1155794 - RNA, 19 nt, Homo sapiens
  misc_RNA (1)...(19): siRNA sense strand
ugacacaggcuacaaagug

SEQ ID NO: 1155795 - RNA, 19 nt, Homo sapiens
  misc_RNA (1)...(19): siRNA sense strand
acaagucugagaucaaaua

SEQ ID NO: 1155796 - RNA, 19 nt, Homo sapiens
  misc_RNA (1)...(19): siRNA sense strand
auucagaggugacuuggaa

SEQ ID NO: 1155797 - RNA, 19 nt, Homo sapiens
  misc_RNA (1)...(19): siRNA sense strand
guccugauccuguuccaua

SEQ ID NO: 1155798 - RNA, 19 nt, Homo sapiens
  misc_RNA (1)...(19): siRNA sense strand
gagucuggaugaauaaagu

SEQ ID NO: 1155799 - RNA, 19 nt, Homo sapiens
  misc_RNA (1)...(19): siRNA sense strand
gucaggagcccuauuacaa

SEQ ID NO: 1155800 - RNA, 19 nt, Homo sapiens
  misc_RNA (1)...(19): siRNA sense strand
ggagcccuauuacaagaug

SEQ ID NO: 1155801 - RNA, 19 nt, Homo sapiens
  misc_RNA (1)...(19): siRNA sense strand
gcuggaggcucucauacag

SEQ ID NO: 1155802 - RNA, 19 nt, Homo sapiens
  misc_RNA (1)...(19): siRNA sense strand
gacguggaguaacaagauu

SEQ ID NO: 1155803 - RNA, 19 nt, Homo sapiens
  misc_RNA (1)...(19): siRNA sense strand
ucagaggugacuuggaaua

SEQ ID NO: 1155804 - RNA, 19 nt, Homo sapiens
  misc_RNA (1)...(19): siRNA sense strand
cugaucaccuucucuacaa

SEQ ID NO: 1155805 - RNA, 19 nt, Homo sapiens
  misc_RNA (1)...(19): siRNA sense strand
caauauguuuggccagauc

SEQ ID NO: 1155806 - RNA, 19 nt, Homo sapiens
  misc_RNA (1)...(19): siRNA sense strand
gcuacauccuccacacaga

SEQ ID NO: 1155807 - RNA, 19 nt, Homo sapiens
  misc_RNA (1)...(19): siRNA sense strand
gggcugaucaccuucucua

SEQ ID NO: 1155808 - RNA, 19 nt, Homo sapiens
  misc_RNA (1)...(19): siRNA sense strand
acaagauucccaccuguaa

SEQ ID NO: 1155809 - RNA, 19 nt, Homo sapiens
  misc_RNA (1)...(19): siRNA sense strand
agccaaguauuucuucaaa

SEQ ID NO: 1155810 - RNA, 19 nt, Homo sapiens
  misc_RNA (1)...(19): siRNA sense strand
ccacauacaagucugagau

SEQ ID NO: 1155811 - RNA, 19 nt, Homo sapiens
  misc_RNA (1)...(19): siRNA sense strand
gaacaaccucaccacauac

SEQ ID NO: 1155812 - RNA, 19 nt, Homo sapiens
  misc_RNA (1)...(19): siRNA sense strand
gagccacaguguccugauc

SEQ ID NO: 1155813 - RNA, 19 nt, Homo sapiens
  misc_RNA (1)...(19): siRNA sense strand
ucacuuuccggucagauuu

SEQ ID NO: 1155814 - RNA, 19 nt, Homo sapiens
  misc_RNA (1)...(19): siRNA sense strand
caagauucccaccuguaaa

SEQ ID NO: 1155815 - RNA, 19 nt, Homo sapiens
  misc_RNA (1)...(19): siRNA sense strand
agucugagaucaaauacuc

SEQ ID NO: 1155816 - RNA, 19 nt, Homo sapiens
  misc_RNA (1)...(19): siRNA sense strand
gugaauaugacuaugugaa

SEQ ID NO: 1155817 - RNA, 19 nt, Homo sapiens
  misc_RNA (1)...(19): siRNA sense strand
gcccaaggagucuggauga

SEQ ID NO: 1155818 - RNA, 19 nt, Homo sapiens
  misc_RNA (1)...(19): siRNA sense strand
uacaaagugcugaaggaua

SEQ ID NO: 1155819 - RNA, 19 nt, Homo sapiens
  misc_RNA (1)...(19): siRNA sense strand
cgaguggagugcagugaca

SEQ ID NO: 1155820 - RNA, 19 nt, Homo sapiens
  misc_RNA (1)...(19): siRNA sense strand
caagccaaguauuucuuca

SEQ ID NO: 1155821 - RNA, 19 nt, Homo sapiens
  misc_RNA (1)...(19): siRNA sense strand
gaucaccagcccugacuuc

SEQ ID NO: 1155822 - RNA, 19 nt, Homo sapiens
  misc_RNA (1)...(19): siRNA sense strand
ugacuuggaauaucacugu

SEQ ID NO: 1155823 - RNA, 19 nt, Homo sapiens
  misc_RNA (1)...(19): siRNA sense strand
cugaaugccuguauaccau

SEQ ID NO: 1155824 - RNA, 19 nt, Homo sapiens
  misc_RNA (1)...(19): siRNA sense strand
auuacaagaugcucaacaa

SEQ ID NO: 1155825 - RNA, 19 nt, Homo sapiens
  misc_RNA (1)...(19): siRNA sense strand
aggauaauguggagaugga

SEQ ID NO: 1155826 - RNA, 19 nt, Homo sapiens
  misc_RNA (1)...(19): siRNA sense strand
cuacaucaagaucaaaguu

SEQ ID NO: 1155827 - RNA, 19 nt, Homo sapiens
  misc_RNA (1)...(19): siRNA sense strand
gcacccagagccacagugu

SEQ ID NO: 1155828 - RNA, 19 nt, Homo sapiens
  misc_RNA (1)...(19): siRNA sense strand
gcugaucaccuucucuaca

SEQ ID NO: 1155829 - RNA, 19 nt, Homo sapiens
  misc_RNA (1)...(19): siRNA sense strand
uuggaauccuccuaccuuu

SEQ ID NO: 1155830 - RNA, 19 nt, Homo sapiens
  misc_RNA (1)...(19): siRNA sense strand
ccaaggagucuggaugaau

SEQ ID NO: 1155831 - RNA, 19 nt, Homo sapiens
  misc_RNA (1)...(19): siRNA sense strand
ccggucagauuucuccaau

SEQ ID NO: 1155832 - RNA, 19 nt, Homo sapiens
  misc_RNA (1)...(19): siRNA sense strand
ccucccaagccaaguauuu

SEQ ID NO: 1155833 - RNA, 19 nt, Homo sapiens
  misc_RNA (1)...(19): siRNA sense strand
ugaaggauaauguggagau

SEQ ID NO: 1155834 - RNA, 19 nt, Homo sapiens
  misc_RNA (1)...(19): siRNA sense strand
ucaacaauaacacagguau

SEQ ID NO: 1155835 - RNA, 19 nt, Homo sapiens
  misc_RNA (1)...(19): siRNA sense strand
agaggugacuuggaauauc

SEQ ID NO: 1155836 - RNA, 19 nt, Homo sapiens
  misc_RNA (1)...(19): siRNA sense strand
ugaauaugacuaugugaag

SEQ ID NO: 1155837 - RNA, 19 nt, Homo sapiens
  misc_RNA (1)...(19): siRNA sense strand
uaccuguucugcccaagga

SEQ ID NO: 1155838 - RNA, 19 nt, Homo sapiens
  misc_RNA (1)...(19): siRNA sense strand
cauacaagucugagaucaa

SEQ ID NO: 1155839 - RNA, 19 nt, Homo sapiens
  misc_RNA (1)...(19): siRNA sense strand
cuucaugcacuucaacuug

SEQ ID NO: 1155840 - RNA, 19 nt, Homo sapiens
  misc_RNA (1)...(19): siRNA sense strand
caaccucaccacauacaag

SEQ ID NO: 1155841 - RNA, 19 nt, Homo sapiens
  misc_RNA (1)...(19): siRNA sense strand
gccaaguauuucuucaaag

SEQ ID NO: 1155842 - RNA, 19 nt, Homo sapiens
  misc_RNA (1)...(19): siRNA sense strand
gaccacuacugccacaacu

SEQ ID NO: 1155843 - RNA, 19 nt, Homo sapiens
  misc_RNA (1)...(19): siRNA sense strand
cuacugccacaacuacauu

SEQ ID NO: 1155844 - RNA, 19 nt, Homo sapiens
  misc_RNA (1)...(19): siRNA sense strand
cagauggguuucggaucaa

SEQ ID NO: 1155845 - RNA, 19 nt, Homo sapiens
  misc_RNA (1)...(19): siRNA sense strand
ccacuacugccacaacuac

SEQ ID NO: 1155846 - RNA, 19 nt, Homo sapiens
  misc_RNA (1)...(19): siRNA sense strand
acauacaagucugagauca

SEQ ID NO: 1155847 - RNA, 19 nt, Homo sapiens
  misc_RNA (1)...(19): siRNA sense strand
cauacagggcugcaggaaa

SEQ ID NO: 1155848 - RNA, 19 nt, Homo sapiens
  misc_RNA (1)...(19): siRNA sense strand
cuccuaccuuugugaauau

SEQ ID NO: 1155849 - RNA, 19 nt, Homo sapiens
  misc_RNA (1)...(19): siRNA sense strand
ucaggagcccuauuacaag

SEQ ID NO: 1155850 - RNA, 19 nt, Homo sapiens
  misc_RNA (1)...(19): siRNA sense strand
aacacgggcugaucaccuu

SEQ ID NO: 1155851 - RNA, 19 nt, Homo sapiens
  misc_RNA (1)...(19): siRNA sense strand
gggccuuucuguggagaga

SEQ ID NO: 1155852 - RNA, 19 nt, Homo sapiens
  misc_RNA (1)...(19): siRNA sense strand
gaauccuccuaccuuugug

SEQ ID NO: 1155853 - RNA, 19 nt, Homo sapiens
  misc_RNA (1)...(19): siRNA sense strand
cccuaugacuacaucaaga

SEQ ID NO: 1155854 - RNA, 19 nt, Homo sapiens
  misc_RNA (1)...(19): siRNA sense strand
gcucugaaugccuguauac

SEQ ID NO: 1155855 - RNA, 19 nt, Homo sapiens
  misc_RNA (1)...(19): siRNA sense strand
gagcucugaaugccuguau

SEQ ID NO: 1155856 - RNA, 19 nt, Homo sapiens
  misc_RNA (1)...(19): siRNA sense strand
ggguuucggaucaagcuuu

SEQ ID NO: 1155857 - RNA, 19 nt, Homo sapiens
  misc_RNA (1)...(19): siRNA sense strand
ccaagccaaguauuucuuc

SEQ ID NO: 1155858 - RNA, 19 nt, Homo sapiens
  misc_RNA (1)...(19): siRNA sense strand
cagaggugacuuggaauau

SEQ ID NO: 1155859 - RNA, 19 nt, Homo sapiens
  misc_RNA (1)...(19): siRNA sense strand
guaaaauuguagacuguag

SEQ ID NO: 1155860 - RNA, 19 nt, Homo sapiens
  misc_RNA (1)...(19): siRNA sense strand
aaggaugggacguggagua

SEQ ID NO: 1155861 - RNA, 19 nt, Homo sapiens
  misc_RNA (1)...(19): siRNA sense strand
gauugagugucugaaggau

SEQ ID NO: 1155862 - RNA, 19 nt, Homo sapiens
  misc_RNA (1)...(19): siRNA sense strand
gcuggaggaggguuucaug

SEQ ID NO: 1155863 - RNA, 19 nt, Homo sapiens
  misc_RNA (1)...(19): siRNA sense strand
ggagucuggaugaauaaag

SEQ ID NO: 1155864 - RNA, 19 nt, Homo sapiens
  misc_RNA (1)...(19): siRNA sense strand
ucuauuaugcucugugcuu

SEQ ID NO: 1155865 - RNA, 19 nt, Homo sapiens
  misc_RNA (1)...(19): siRNA sense strand
gugauucagaggugacuug

SEQ ID NO: 1155866 - RNA, 19 nt, Homo sapiens
  misc_RNA (1)...(19): siRNA sense strand
ugacaacucgggagagaac

SEQ ID NO: 1155867 - RNA, 19 nt, Homo sapiens
  misc_RNA (1)...(19): siRNA sense strand
ggacacauuccagauugag

SEQ ID NO: 1155868 - RNA, 19 nt, Homo sapiens
  misc_RNA (1)...(19): siRNA sense strand
aacaagauucccaccugua

SEQ ID NO: 1155869 - RNA, 19 nt, Homo sapiens
  misc_RNA (1)...(19): siRNA sense strand
ggaacaaccucaccacaua

SEQ ID NO: 1155870 - RNA, 19 nt, Homo sapiens
  misc_RNA (1)...(19): siRNA sense strand
caaggagucuggaugaaua

SEQ ID NO: 1155871 - RNA, 19 nt, Homo sapiens
  misc_RNA (1)...(19): siRNA sense strand
acaagaugcucaacaauaa

SEQ ID NO: 1155872 - RNA, 19 nt, Homo sapiens
  misc_RNA (1)...(19): siRNA sense strand
ggucagauuucuccaauga

SEQ ID NO: 1155873 - RNA, 19 nt, Homo sapiens
  misc_RNA (1)...(19): siRNA sense strand
acaaagugcugaaggauaa

SEQ ID NO: 1155874 - RNA, 19 nt, Homo sapiens
  misc_RNA (1)...(19): siRNA sense strand
gaauaucacugucccagau

SEQ ID NO: 1155875 - RNA, 19 nt, Homo sapiens
  misc_RNA (1)...(19): siRNA sense strand
gguggcugcuucucuauua

SEQ ID NO: 1155876 - RNA, 19 nt, Homo sapiens
  misc_RNA (1)...(19): siRNA sense strand
gacaaccucuucacucaaa

SEQ ID NO: 1155877 - RNA, 19 nt, Homo sapiens
  misc_RNA (1)...(19): siRNA sense strand
gaucaagcuuuacuucaug

SEQ ID NO: 1155878 - RNA, 19 nt, Homo sapiens
  misc_RNA (1)...(19): siRNA sense strand
gaggugacuuggaauauca

SEQ ID NO: 1155879 - RNA, 19 nt, Homo sapiens
  misc_RNA (1)...(19): siRNA sense strand
ccagauggguuucggauca

SEQ ID NO: 1155880 - RNA, 19 nt, Homo sapiens
  misc_RNA (1)...(19): siRNA sense strand
ggaucaagcuuuacuucau

SEQ ID NO: 1155881 - RNA, 19 nt, Homo sapiens
  misc_RNA (1)...(19): siRNA sense strand
gcaguuugaggacauauuu

SEQ ID NO: 1155882 - RNA, 19 nt, Homo sapiens
  misc_RNA (1)...(19): siRNA sense strand
gaugggacguggaguaaca

SEQ ID NO: 1155883 - RNA, 19 nt, Homo sapiens
  misc_RNA (1)...(19): siRNA sense strand
auacagggcugcaggaaau

SEQ ID NO: 1155884 - RNA, 19 nt, Homo sapiens
  misc_RNA (1)...(19): siRNA sense strand
ccuccuaccuuugugaaua

SEQ ID NO: 1155885 - RNA, 19 nt, Homo sapiens
  misc_RNA (1)...(19): siRNA sense strand
gguuucggaucaagcuuua

SEQ ID NO: 1155886 - RNA, 19 nt, Homo sapiens
  misc_RNA (1)...(19): siRNA sense strand
uacaagaugcucaacaaua

SEQ ID NO: 1155887 - RNA, 19 nt, Homo sapiens
  misc_RNA (1)...(19): siRNA sense strand
gcuacaaagugcugaagga

SEQ ID NO: 1155888 - RNA, 19 nt, Homo sapiens
  misc_RNA (1)...(19): siRNA sense strand
auacaagucugagaucaaa

SEQ ID NO: 1155889 - RNA, 19 nt, Homo sapiens
  misc_RNA (1)...(19): siRNA sense strand
caacaauaacacagguaua

SEQ ID NO: 1155890 - RNA, 19 nt, Homo sapiens
  misc_RNA (1)...(19): siRNA sense strand
ggaauccuccuaccuuugu

SEQ ID NO: 1155891 - RNA, 19 nt, Homo sapiens
  misc_RNA (1)...(19): siRNA sense strand
ggacguggaguaacaagau

SEQ ID NO: 1155892 - RNA, 19 nt, Homo sapiens
  misc_RNA (1)...(19): siRNA sense strand
gaaggauaauguggagaug

SEQ ID NO: 1155893 - RNA, 19 nt, Homo sapiens
  misc_RNA (1)...(19): siRNA sense strand
caggagcccuauuacaaga

SEQ ID NO: 1155894 - RNA, 19 nt, Homo sapiens
  misc_RNA (1)...(19): siRNA sense strand
ugacacaggcuacaaagug

SEQ ID NO: 1155895 - RNA, 19 nt, Homo sapiens
  misc_RNA (1)...(19): siRNA sense strand
acaagucugagaucaaaua

SEQ ID NO: 1155896 - RNA, 19 nt, Homo sapiens
  misc_RNA (1)...(19): siRNA sense strand
auucagaggugacuuggaa

SEQ ID NO: 1155897 - RNA, 19 nt, Homo sapiens
  misc_RNA (1)...(19): siRNA sense strand
guccugauccuguuccaua

SEQ ID NO: 1155898 - RNA, 19 nt, Homo sapiens
  misc_RNA (1)...(19): siRNA sense strand
gagucuggaugaauaaagu

SEQ ID NO: 1155899 - RNA, 19 nt, Homo sapiens
  misc_RNA (1)...(19): siRNA sense strand
gucaggagcccuauuacaa

SEQ ID NO: 1155900 - RNA, 19 nt, Homo sapiens
  misc_RNA (1)...(19): siRNA sense strand
ggagcccuauuacaagaug

SEQ ID NO: 1155901 - RNA, 19 nt, Homo sapiens
  misc_RNA (1)...(19): siRNA sense strand
gcuggaggcucucauacag

SEQ ID NO: 1155902 - RNA, 19 nt, Homo sapiens
  misc_RNA (1)...(19): siRNA sense strand
gacguggaguaacaagauu

SEQ ID NO: 1155903 - RNA, 19 nt, Homo sapiens
  misc_RNA (1)...(19): siRNA sense strand
ucagaggugacuuggaaua

SEQ ID NO: 1155904 - RNA, 19 nt, Homo sapiens
  misc_RNA (1)...(19): siRNA sense strand
cugaucaccuucucuacaa

SEQ ID NO: 1155905 - RNA, 19 nt, Homo sapiens
  misc_RNA (1)...(19): siRNA sense strand
caauauguuuggccagauc

SEQ ID NO: 1155906 - RNA, 19 nt, Homo sapiens
  misc_RNA (1)...(19): siRNA sense strand
gcuacauccuccacacaga

SEQ ID NO: 1155907 - RNA, 19 nt, Homo sapiens
  misc_RNA (1)...(19): siRNA sense strand
gggcugaucaccuucucua

SEQ ID NO: 1155908 - RNA, 19 nt, Homo sapiens
  misc_RNA (1)...(19): siRNA sense strand
acaagauucccaccuguaa

SEQ ID NO: 1155909 - RNA, 19 nt, Homo sapiens
  misc_RNA (1)...(19): siRNA sense strand
agccaaguauuucuucaaa

SEQ ID NO: 1155910 - RNA, 19 nt, Homo sapiens
  misc_RNA (1)...(19): siRNA sense strand
ccacauacaagucugagau

SEQ ID NO: 1155911 - RNA, 19 nt, Homo sapiens
  misc_RNA (1)...(19): siRNA sense strand
gaacaaccucaccacauac

SEQ ID NO: 1155912 - RNA, 19 nt, Homo sapiens
  misc_RNA (1)...(19): siRNA sense strand
gagccacaguguccugauc

SEQ ID NO: 1155913 - RNA, 19 nt, Homo sapiens
  misc_RNA (1)...(19): siRNA sense strand
ucacuuuccggucagauuu

SEQ ID NO: 1155914 - RNA, 19 nt, Homo sapiens
  misc_RNA (1)...(19): siRNA sense strand
caagauucccaccuguaaa

SEQ ID NO: 1155915 - RNA, 19 nt, Homo sapiens
  misc_RNA (1)...(19): siRNA sense strand
agucugagaucaaauacuc

SEQ ID NO: 1155916 - RNA, 19 nt, Homo sapiens
  misc_RNA (1)...(19): siRNA sense strand
gugaauaugacuaugugaa

SEQ ID NO: 1155917 - RNA, 19 nt, Homo sapiens
  misc_RNA (1)...(19): siRNA sense strand
gcccaaggagucuggauga

SEQ ID NO: 1155918 - RNA, 19 nt, Homo sapiens
  misc_RNA (1)...(19): siRNA sense strand
uacaaagugcugaaggaua

SEQ ID NO: 1155919 - RNA, 19 nt, Homo sapiens
  misc_RNA (1)...(19): siRNA sense strand
cgaguggagugcagugaca

SEQ ID NO: 1155920 - RNA, 19 nt, Homo sapiens
  misc_RNA (1)...(19): siRNA sense strand
caagccaaguauuucuuca

SEQ ID NO: 1155921 - RNA, 19 nt, Homo sapiens
  misc_RNA (1)...(19): siRNA sense strand
gaucaccagcccugacuuc

SEQ ID NO: 1155922 - RNA, 19 nt, Homo sapiens
  misc_RNA (1)...(19): siRNA sense strand
ugacuuggaauaucacugu

SEQ ID NO: 1155923 - RNA, 19 nt, Homo sapiens
  misc_RNA (1)...(19): siRNA sense strand
cugaaugccuguauaccau

SEQ ID NO: 1155924 - RNA, 19 nt, Homo sapiens
  misc_RNA (1)...(19): siRNA sense strand
auuacaagaugcucaacaa

SEQ ID NO: 1155925 - RNA, 19 nt, Homo sapiens
  misc_RNA (1)...(19): siRNA sense strand
aggauaauguggagaugga

SEQ ID NO: 1155926 - RNA, 19 nt, Homo sapiens
  misc_RNA (1)...(19): siRNA sense strand
cuacaucaagaucaaaguu

SEQ ID NO: 1155927 - RNA, 19 nt, Homo sapiens
  misc_RNA (1)...(19): siRNA sense strand
gcacccagagccacagugu

SEQ ID NO: 1155928 - RNA, 19 nt, Homo sapiens
  misc_RNA (1)...(19): siRNA sense strand
gcugaucaccuucucuaca

SEQ ID NO: 1155929 - RNA, 19 nt, Homo sapiens
  misc_RNA (1)...(19): siRNA sense strand
uuggaauccuccuaccuuu

SEQ ID NO: 1155930 - RNA, 19 nt, Homo sapiens
  misc_RNA (1)...(19): siRNA sense strand
ccaaggagucuggaugaau

SEQ ID NO: 1155931 - RNA, 19 nt, Homo sapiens
  misc_RNA (1)...(19): siRNA sense strand
ccggucagauuucuccaau

SEQ ID NO: 1155932 - RNA, 19 nt, Homo sapiens
  misc_RNA (1)...(19): siRNA sense strand
ccucccaagccaaguauuu

SEQ ID NO: 1155933 - RNA, 19 nt, Homo sapiens
  misc_RNA (1)...(19): siRNA sense strand
ugaaggauaauguggagau

SEQ ID NO: 1155934 - RNA, 19 nt, Homo sapiens
  misc_RNA (1)...(19): siRNA sense strand
ucaacaauaacacagguau

SEQ ID NO: 1155935 - RNA, 19 nt, Homo sapiens
  misc_RNA (1)...(19): siRNA sense strand
agaggugacuuggaauauc

SEQ ID NO: 1155936 - RNA, 19 nt, Homo sapiens
  misc_RNA (1)...(19): siRNA sense strand
ugaauaugacuaugugaag

SEQ ID NO: 1155937 - RNA, 19 nt, Homo sapiens
  misc_RNA (1)...(19): siRNA sense strand
uaccuguucugcccaagga

SEQ ID NO: 1155938 - RNA, 19 nt, Homo sapiens
  misc_RNA (1)...(19): siRNA sense strand
cauacaagucugagaucaa

SEQ ID NO: 1155939 - RNA, 19 nt, Homo sapiens
  misc_RNA (1)...(19): siRNA sense strand
cuucaugcacuucaacuug

SEQ ID NO: 1155940 - RNA, 19 nt, Homo sapiens
  misc_RNA (1)...(19): siRNA sense strand
caaccucaccacauacaag

SEQ ID NO: 1155941 - RNA, 19 nt, Homo sapiens
  misc_RNA (1)...(19): siRNA sense strand
gccaaguauuucuucaaag

SEQ ID NO: 1155942 - RNA, 19 nt, Homo sapiens
  misc_RNA (1)...(19): siRNA sense strand
gaccacuacugccacaacu

SEQ ID NO: 1155943 - RNA, 19 nt, Homo sapiens
  misc_RNA (1)...(19): siRNA sense strand
cuacugccacaacuacauu

SEQ ID NO: 1155944 - RNA, 19 nt, Homo sapiens
  misc_RNA (1)...(19): siRNA sense strand
cagauggguuucggaucaa

SEQ ID NO: 1155945 - RNA, 19 nt, Homo sapiens
  misc_RNA (1)...(19): siRNA sense strand
ccacuacugccacaacuac

SEQ ID NO: 1155946 - RNA, 19 nt, Homo sapiens
  misc_RNA (1)...(19): siRNA sense strand
acauacaagucugagauca

SEQ ID NO: 1155947 - RNA, 19 nt, Homo sapiens
  misc_RNA (1)...(19): siRNA sense strand
cauacagggcugcaggaaa

SEQ ID NO: 1155948 - RNA, 19 nt, Homo sapiens
  misc_RNA (1)...(19): siRNA sense strand
cuccuaccuuugugaauau

SEQ ID NO: 1155949 - RNA, 19 nt, Homo sapiens
  misc_RNA (1)...(19): siRNA sense strand
ucaggagcccuauuacaag

SEQ ID NO: 1155950 - RNA, 19 nt, Homo sapiens
  misc_RNA (1)...(19): siRNA sense strand
aacacgggcugaucaccuu

SEQ ID NO: 1155951 - RNA, 19 nt, Homo sapiens
  misc_RNA (1)...(19): siRNA sense strand
gggccuuucuguggagaga

SEQ ID NO: 1155952 - RNA, 19 nt, Homo sapiens
  misc_RNA (1)...(19): siRNA sense strand
gaauccuccuaccuuugug

SEQ ID NO: 1155953 - RNA, 19 nt, Homo sapiens
  misc_RNA (1)...(19): siRNA sense strand
cccuaugacuacaucaaga

SEQ ID NO: 1155954 - RNA, 19 nt, Homo sapiens
  misc_RNA (1)...(19): siRNA sense strand
gcucugaaugccuguauac

SEQ ID NO: 1155955 - RNA, 19 nt, Homo sapiens
  misc_RNA (1)...(19): siRNA sense strand
gagcucugaaugccuguau

SEQ ID NO: 1155956 - RNA, 19 nt, Homo sapiens
  misc_RNA (1)...(19): siRNA sense strand
ggguuucggaucaagcuuu

SEQ ID NO: 1155957 - RNA, 19 nt, Homo sapiens
  misc_RNA (1)...(19): siRNA sense strand
ccaagccaaguauuucuuc

SEQ ID NO: 1155958 - RNA, 19 nt, Homo sapiens
  misc_RNA (1)...(19): siRNA sense strand
cagaggugacuuggaauau

SEQ ID NO: 1155959 - RNA, 19 nt, Homo sapiens
  misc_RNA (1)...(19): siRNA sense strand
guaaaauuguagacuguag

SEQ ID NO: 1155960 - RNA, 19 nt, Homo sapiens
  misc_RNA (1)...(19): siRNA sense strand
aaggaugggacguggagua

SEQ ID NO: 1155961 - RNA, 19 nt, Homo sapiens
  misc_RNA (1)...(19): siRNA sense strand
gauugagugucugaaggau

SEQ ID NO: 1155962 - RNA, 19 nt, Homo sapiens
  misc_RNA (1)...(19): siRNA sense strand
gcuggaggaggguuucaug

SEQ ID NO: 1155963 - RNA, 19 nt, Homo sapiens
  misc_RNA (1)...(19): siRNA sense strand
ggagucuggaugaauaaag

SEQ ID NO: 1155964 - RNA, 19 nt, Homo sapiens
  misc_RNA (1)...(19): siRNA sense strand
ucuauuaugcucugugcuu

SEQ ID NO: 1155965 - RNA, 19 nt, Homo sapiens
  misc_RNA (1)...(19): siRNA sense strand
gugauucagaggugacuug

SEQ ID NO: 1155966 - RNA, 19 nt, Homo sapiens
  misc_RNA (1)...(19): siRNA sense strand
ugacaacucgggagagaac

SEQ ID NO: 1155967 - RNA, 19 nt, Homo sapiens
  misc_RNA (1)...(19): siRNA sense strand
ggacacauuccagauugag

SEQ ID NO: 1155968 - RNA, 19 nt, Homo sapiens
  misc_RNA (1)...(19): siRNA sense strand
aacaagauucccaccugua

SEQ ID NO: 1155969 - RNA, 19 nt, Homo sapiens
  misc_RNA (1)...(19): siRNA sense strand
ggaacaaccucaccacaua

SEQ ID NO: 1155970 - RNA, 19 nt, Homo sapiens
  misc_RNA (1)...(19): siRNA sense strand
caaggagucuggaugaaua

SEQ ID NO: 1155971 - RNA, 19 nt, Homo sapiens
  misc_RNA (1)...(19): siRNA sense strand
acaagaugcucaacaauaa

SEQ ID NO: 1155972 - RNA, 19 nt, Homo sapiens
  misc_RNA (1)...(19): siRNA sense strand
ggucagauuucuccaauga

SEQ ID NO: 1155973 - RNA, 19 nt, Homo sapiens
  misc_RNA (1)...(19): siRNA sense strand
acaaagugcugaaggauaa

SEQ ID NO: 1155974 - RNA, 19 nt, Homo sapiens
  misc_RNA (1)...(19): siRNA sense strand
gaauaucacugucccagau

SEQ ID NO: 1155975 - RNA, 19 nt, Homo sapiens
  misc_RNA (1)...(19): siRNA sense strand
gguggcugcuucucuauua

SEQ ID NO: 1155976 - RNA, 19 nt, Homo sapiens
  misc_RNA (1)...(19): siRNA sense strand
gacaaccucuucacucaaa

SEQ ID NO: 1155977 - RNA, 19 nt, Homo sapiens
  misc_RNA (1)...(19): siRNA sense strand
gaucaagcuuuacuucaug

SEQ ID NO: 1155978 - RNA, 19 nt, Homo sapiens
  misc_RNA (1)...(19): siRNA sense strand
gaggugacuuggaauauca

SEQ ID NO: 1155979 - RNA, 19 nt, Homo sapiens
  misc_RNA (1)...(19): siRNA sense strand
ccagauggguuucggauca

SEQ ID NO: 1155980 - RNA, 19 nt, Homo sapiens
  misc_RNA (1)...(19): siRNA sense strand
ggaucaagcuuuacuucau

SEQ ID NO: 1155981 - RNA, 19 nt, Homo sapiens
  misc_RNA (1)...(19): siRNA sense strand
gcaguuugaggacauauuu

SEQ ID NO: 1155982 - RNA, 19 nt, Homo sapiens
  misc_RNA (1)...(19): siRNA sense strand
gaugggacguggaguaaca

SEQ ID NO: 1155983 - RNA, 19 nt, Homo sapiens
  misc_RNA (1)...(19): siRNA sense strand
auacagggcugcaggaaau

SEQ ID NO: 1155984 - RNA, 19 nt, Homo sapiens
  misc_RNA (1)...(19): siRNA sense strand
ccuccuaccuuugugaaua

SEQ ID NO: 1155985 - RNA, 19 nt, Homo sapiens
  misc_RNA (1)...(19): siRNA sense strand
gguuucggaucaagcuuua

SEQ ID NO: 1155986 - RNA, 19 nt, Homo sapiens
  misc_RNA (1)...(19): siRNA sense strand
uacaagaugcucaacaaua

SEQ ID NO: 1155987 - RNA, 19 nt, Homo sapiens
  misc_RNA (1)...(19): siRNA sense strand
gcuacaaagugcugaagga

SEQ ID NO: 1155988 - RNA, 19 nt, Homo sapiens
  misc_RNA (1)...(19): siRNA sense strand
auacaagucugagaucaaa

SEQ ID NO: 1155989 - RNA, 19 nt, Homo sapiens
  misc_RNA (1)...(19): siRNA sense strand
caacaauaacacagguaua

SEQ ID NO: 1155990 - RNA, 19 nt, Homo sapiens
  misc_RNA (1)...(19): siRNA sense strand
ggaauccuccuaccuuugu

SEQ ID NO: 1155991 - RNA, 19 nt, Homo sapiens
  misc_RNA (1)...(19): siRNA sense strand
ggacguggaguaacaagau

SEQ ID NO: 1155992 - RNA, 19 nt, Homo sapiens
  misc_RNA (1)...(19): siRNA sense strand
gaaggauaauguggagaug

SEQ ID NO: 1155993 - RNA, 19 nt, Homo sapiens
  misc_RNA (1)...(19): siRNA sense strand
caggagcccuauuacaaga

SEQ ID NO: 1155994 - RNA, 19 nt, Homo sapiens
  misc_RNA (1)...(19): siRNA sense strand
ugacacaggcuacaaagug

SEQ ID NO: 1155995 - RNA, 19 nt, Homo sapiens
  misc_RNA (1)...(19): siRNA sense strand
acaagucugagaucaaaua

SEQ ID NO: 1155996 - RNA, 19 nt, Homo sapiens
  misc_RNA (1)...(19): siRNA sense strand
auucagaggugacuuggaa

SEQ ID NO: 1155997 - RNA, 19 nt, Homo sapiens
  misc_RNA (1)...(19): siRNA sense strand
guccugauccuguuccaua

SEQ ID NO: 1155998 - RNA, 19 nt, Homo sapiens
  misc_RNA (1)...(19): siRNA sense strand
gagucuggaugaauaaagu

SEQ ID NO: 1155999 - RNA, 19 nt, Homo sapiens
  misc_RNA (1)...(19): siRNA sense strand
gucaggagcccuauuacaa

SEQ ID NO: 1156000 - RNA, 19 nt, Homo sapiens
  misc_RNA (1)...(19): siRNA sense strand
ggagcccuauuacaagaug

SEQ ID NO: 1156001 - RNA, 19 nt, Homo sapiens
  misc_RNA (1)...(19): siRNA sense strand
gcuggaggcucucauacag

SEQ ID NO: 1156002 - RNA, 19 nt, Homo sapiens
  misc_RNA (1)...(19): siRNA sense strand
gacguggaguaacaagauu

SEQ ID NO: 1156003 - RNA, 19 nt, Homo sapiens
  misc_RNA (1)...(19): siRNA sense strand
ucagaggugacuuggaaua

SEQ ID NO: 1156004 - RNA, 19 nt, Homo sapiens
  misc_RNA (1)...(19): siRNA sense strand
cugaucaccuucucuacaa

SEQ ID NO: 1156005 - RNA, 19 nt, Homo sapiens
  misc_RNA (1)...(19): siRNA sense strand
caauauguuuggccagauc

SEQ ID NO: 1156006 - RNA, 19 nt, Homo sapiens
  misc_RNA (1)...(19): siRNA sense strand
gcuacauccuccacacaga

SEQ ID NO: 1156007 - RNA, 19 nt, Homo sapiens
  misc_RNA (1)...(19): siRNA sense strand
gggcugaucaccuucucua

SEQ ID NO: 1156008 - RNA, 19 nt, Homo sapiens
  misc_RNA (1)...(19): siRNA sense strand
acaagauucccaccuguaa

SEQ ID NO: 1156009 - RNA, 19 nt, Homo sapiens
  misc_RNA (1)...(19): siRNA sense strand
agccaaguauuucuucaaa

SEQ ID NO: 1156010 - RNA, 19 nt, Homo sapiens
  misc_RNA (1)...(19): siRNA sense strand
ccacauacaagucugagau

SEQ ID NO: 1156011 - RNA, 19 nt, Homo sapiens
  misc_RNA (1)...(19): siRNA sense strand
gaacaaccucaccacauac

SEQ ID NO: 1156012 - RNA, 19 nt, Homo sapiens
  misc_RNA (1)...(19): siRNA sense strand
gagccacaguguccugauc

SEQ ID NO: 1156013 - RNA, 19 nt, Homo sapiens
  misc_RNA (1)...(19): siRNA sense strand
ucacuuuccggucagauuu

SEQ ID NO: 1156014 - RNA, 19 nt, Homo sapiens
  misc_RNA (1)...(19): siRNA sense strand
caagauucccaccuguaaa

SEQ ID NO: 1156015 - RNA, 19 nt, Homo sapiens
  misc_RNA (1)...(19): siRNA sense strand
agucugagaucaaauacuc

SEQ ID NO: 1156016 - RNA, 19 nt, Homo sapiens
  misc_RNA (1)...(19): siRNA sense strand
gugaauaugacuaugugaa

SEQ ID NO: 1156017 - RNA, 19 nt, Homo sapiens
  misc_RNA (1)...(19): siRNA sense strand
gcccaaggagucuggauga

SEQ ID NO: 1156018 - RNA, 19 nt, Homo sapiens
  misc_RNA (1)...(19): siRNA sense strand
uacaaagugcugaaggaua

SEQ ID NO: 1156019 - RNA, 19 nt, Homo sapiens
  misc_RNA (1)...(19): siRNA sense strand
cgaguggagugcagugaca

SEQ ID NO: 1156020 - RNA, 19 nt, Homo sapiens
  misc_RNA (1)...(19): siRNA sense strand
caagccaaguauuucuuca

SEQ ID NO: 1156021 - RNA, 19 nt, Homo sapiens
  misc_RNA (1)...(19): siRNA sense strand
gaucaccagcccugacuuc

SEQ ID NO: 1156022 - RNA, 19 nt, Homo sapiens
  misc_RNA (1)...(19): siRNA sense strand
ugacuuggaauaucacugu

SEQ ID NO: 1156023 - RNA, 19 nt, Homo sapiens
  misc_RNA (1)...(19): siRNA sense strand
cugaaugccuguauaccau

SEQ ID NO: 1156024 - RNA, 19 nt, Homo sapiens
  misc_RNA (1)...(19): siRNA sense strand
auuacaagaugcucaacaa

SEQ ID NO: 1156025 - RNA, 19 nt, Homo sapiens
  misc_RNA (1)...(19): siRNA sense strand
aggauaauguggagaugga

SEQ ID NO: 1156026 - RNA, 19 nt, Homo sapiens
  misc_RNA (1)...(19): siRNA sense strand
cuacaucaagaucaaaguu

SEQ ID NO: 1156027 - RNA, 19 nt, Homo sapiens
  misc_RNA (1)...(19): siRNA sense strand
gcacccagagccacagugu

SEQ ID NO: 1156028 - RNA, 19 nt, Homo sapiens
  misc_RNA (1)...(19): siRNA sense strand
gcugaucaccuucucuaca

SEQ ID NO: 1156029 - RNA, 19 nt, Homo sapiens
  misc_RNA (1)...(19): siRNA sense strand
uuggaauccuccuaccuuu

SEQ ID NO: 1156030 - RNA, 19 nt, Homo sapiens
  misc_RNA (1)...(19): siRNA sense strand
ccaaggagucuggaugaau

SEQ ID NO: 1156031 - RNA, 19 nt, Homo sapiens
  misc_RNA (1)...(19): siRNA sense strand
ccggucagauuucuccaau

SEQ ID NO: 1156032 - RNA, 19 nt, Homo sapiens
  misc_RNA (1)...(19): siRNA sense strand
ccucccaagccaaguauuu

SEQ ID NO: 1156033 - RNA, 19 nt, Homo sapiens
  misc_RNA (1)...(19): siRNA sense strand
ugaaggauaauguggagau

SEQ ID NO: 1156034 - RNA, 19 nt, Homo sapiens
  misc_RNA (1)...(19): siRNA sense strand
ucaacaauaacacagguau

SEQ ID NO: 1156035 - RNA, 19 nt, Homo sapiens
  misc_RNA (1)...(19): siRNA sense strand
agaggugacuuggaauauc

SEQ ID NO: 1156036 - RNA, 19 nt, Homo sapiens
  misc_RNA (1)...(19): siRNA sense strand
ugaauaugacuaugugaag

SEQ ID NO: 1156037 - RNA, 19 nt, Homo sapiens
  misc_RNA (1)...(19): siRNA sense strand
uaccuguucugcccaagga

SEQ ID NO: 1156038 - RNA, 19 nt, Homo sapiens
  misc_RNA (1)...(19): siRNA sense strand
cauacaagucugagaucaa

SEQ ID NO: 1156039 - RNA, 19 nt, Homo sapiens
  misc_RNA (1)...(19): siRNA sense strand
cuucaugcacuucaacuug

SEQ ID NO: 1156040 - RNA, 19 nt, Homo sapiens
  misc_RNA (1)...(19): siRNA sense strand
caaccucaccacauacaag

SEQ ID NO: 1156041 - RNA, 19 nt, Homo sapiens
  misc_RNA (1)...(19): siRNA sense strand
gccaaguauuucuucaaag

SEQ ID NO: 1156042 - RNA, 19 nt, Homo sapiens
  misc_RNA (1)...(19): siRNA sense strand
gaccacuacugccacaacu

SEQ ID NO: 1156043 - RNA, 19 nt, Homo sapiens
  misc_RNA (1)...(19): siRNA sense strand
cuacugccacaacuacauu

SEQ ID NO: 1156044 - RNA, 19 nt, Homo sapiens
  misc_RNA (1)...(19): siRNA sense strand
cagauggguuucggaucaa

SEQ ID NO: 1156045 - RNA, 19 nt, Homo sapiens
  misc_RNA (1)...(19): siRNA sense strand
ccacuacugccacaacuac

SEQ ID NO: 1156046 - RNA, 19 nt, Homo sapiens
  misc_RNA (1)...(19): siRNA sense strand
acauacaagucugagauca

SEQ ID NO: 1156047 - RNA, 19 nt, Homo sapiens
  misc_RNA (1)...(19): siRNA sense strand
cauacagggcugcaggaaa

SEQ ID NO: 1156048 - RNA, 19 nt, Homo sapiens
  misc_RNA (1)...(19): siRNA sense strand
cuccuaccuuugugaauau

SEQ ID NO: 1156049 - RNA, 19 nt, Homo sapiens
  misc_RNA (1)...(19): siRNA sense strand
ucaggagcccuauuacaag

SEQ ID NO: 1156050 - RNA, 19 nt, Homo sapiens
  misc_RNA (1)...(19): siRNA sense strand
aacacgggcugaucaccuu

SEQ ID NO: 1156051 - RNA, 19 nt, Homo sapiens
  misc_RNA (1)...(19): siRNA sense strand
gggccuuucuguggagaga

SEQ ID NO: 1156052 - RNA, 19 nt, Homo sapiens
  misc_RNA (1)...(19): siRNA sense strand
gaauccuccuaccuuugug

SEQ ID NO: 1156053 - RNA, 19 nt, Homo sapiens
  misc_RNA (1)...(19): siRNA sense strand
cccuaugacuacaucaaga

SEQ ID NO: 1156054 - RNA, 19 nt, Homo sapiens
  misc_RNA (1)...(19): siRNA sense strand
gcucugaaugccuguauac

SEQ ID NO: 1156055 - RNA, 19 nt, Homo sapiens
  misc_RNA (1)...(19): siRNA sense strand
gagcucugaaugccuguau

SEQ ID NO: 1156056 - RNA, 19 nt, Homo sapiens
  misc_RNA (1)...(19): siRNA sense strand
ggguuucggaucaagcuuu

SEQ ID NO: 1156057 - RNA, 19 nt, Homo sapiens
  misc_RNA (1)...(19): siRNA sense strand
ccaagccaaguauuucuuc

SEQ ID NO: 1156058 - RNA, 19 nt, Homo sapiens
  misc_RNA (1)...(19): siRNA sense strand
cagaggugacuuggaauau

SEQ ID NO: 1156059 - RNA, 19 nt, Homo sapiens
  misc_RNA (1)...(19): siRNA sense strand
guaaaauuguagacuguag

SEQ ID NO: 1156060 - RNA, 19 nt, Homo sapiens
  misc_RNA (1)...(19): siRNA sense strand
aaggaugggacguggagua

SEQ ID NO: 1156061 - RNA, 19 nt, Homo sapiens
  misc_RNA (1)...(19): siRNA sense strand
gauugagugucugaaggau

SEQ ID NO: 1156062 - RNA, 19 nt, Homo sapiens
  misc_RNA (1)...(19): siRNA sense strand
gcuggaggaggguuucaug

SEQ ID NO: 1156063 - RNA, 19 nt, Homo sapiens
  misc_RNA (1)...(19): siRNA sense strand
ggagucuggaugaauaaag

SEQ ID NO: 1156064 - RNA, 19 nt, Homo sapiens
  misc_RNA (1)...(19): siRNA sense strand
ucuauuaugcucugugcuu

SEQ ID NO: 1156065 - RNA, 19 nt, Homo sapiens
  misc_RNA (1)...(19): siRNA sense strand
gugauucagaggugacuug

SEQ ID NO: 1156066 - RNA, 19 nt, Homo sapiens
  misc_RNA (1)...(19): siRNA sense strand
ugacaacucgggagagaac

SEQ ID NO: 1156067 - RNA, 19 nt, Homo sapiens
  misc_RNA (1)...(19): siRNA sense strand
ggacacauuccagauugag

SEQ ID NO: 1156068 - RNA, 19 nt, Homo sapiens
  misc_RNA (1)...(19): siRNA sense strand
aacaagauucccaccugua

SEQ ID NO: 1156069 - RNA, 19 nt, Homo sapiens
  misc_RNA (1)...(19): siRNA sense strand
guacugcaaucuacaauaa

SEQ ID NO: 1156070 - RNA, 19 nt, Homo sapiens
  misc_RNA (1)...(19): siRNA sense strand
ggacucacccuacuucaaa

SEQ ID NO: 1156071 - RNA, 19 nt, Homo sapiens
  misc_RNA (1)...(19): siRNA sense strand
ucaaucagcuuuuguauga

SEQ ID NO: 1156072 - RNA, 19 nt, Homo sapiens
  misc_RNA (1)...(19): siRNA sense strand
gcaaaaggcucacgaccaa

SEQ ID NO: 1156073 - RNA, 19 nt, Homo sapiens
  misc_RNA (1)...(19): siRNA sense strand
ugaugauccucuucaauuu

SEQ ID NO: 1156074 - RNA, 19 nt, Homo sapiens
  misc_RNA (1)...(19): siRNA sense strand
ccauguaucuguacugcaa

SEQ ID NO: 1156075 - RNA, 19 nt, Homo sapiens
  misc_RNA (1)...(19): siRNA sense strand
ggucuuugcucuugguuuc

SEQ ID NO: 1156076 - RNA, 19 nt, Homo sapiens
  misc_RNA (1)...(19): siRNA sense strand
ucaauuugcucaucuuucu

SEQ ID NO: 1156077 - RNA, 19 nt, Homo sapiens
  misc_RNA (1)...(19): siRNA sense strand
guagaggguugcuucaauc

SEQ ID NO: 1156078 - RNA, 19 nt, Homo sapiens
  misc_RNA (1)...(19): siRNA sense strand
gguagugccugccaucaag

SEQ ID NO: 1156079 - RNA, 19 nt, Homo sapiens
  misc_RNA (1)...(19): siRNA sense strand
cacaauggcugagcacuuc

SEQ ID NO: 1156080 - RNA, 19 nt, Homo sapiens
  misc_RNA (1)...(19): siRNA sense strand
uguaugacauccgaacuaa

SEQ ID NO: 1156081 - RNA, 19 nt, Homo sapiens
  misc_RNA (1)...(19): siRNA sense strand
gaugauccucuucaauuug

SEQ ID NO: 1156082 - RNA, 19 nt, Homo sapiens
  misc_RNA (1)...(19): siRNA sense strand
gcuguggcuucaccaacua

SEQ ID NO: 1156083 - RNA, 19 nt, Homo sapiens
  misc_RNA (1)...(19): siRNA sense strand
uaugacauccgaacuaaug

SEQ ID NO: 1156084 - RNA, 19 nt, Homo sapiens
  misc_RNA (1)...(19): siRNA sense strand
gcuauggugcuaagacuga

SEQ ID NO: 1156085 - RNA, 19 nt, Homo sapiens
  misc_RNA (1)...(19): siRNA sense strand
ccagugccaugcaguuugu

SEQ ID NO: 1156086 - RNA, 19 nt, Homo sapiens
  misc_RNA (1)...(19): siRNA sense strand
caucuucauugcugagguu

SEQ ID NO: 1156087 - RNA, 19 nt, Homo sapiens
  misc_RNA (1)...(19): siRNA sense strand
guuguggucuuugcucuug

SEQ ID NO: 1156088 - RNA, 19 nt, Homo sapiens
  misc_RNA (1)...(19): siRNA sense strand
caacacagccaaugaaacc

SEQ ID NO: 1156089 - RNA, 19 nt, Homo sapiens
  misc_RNA (1)...(19): siRNA sense strand
gcaucugggugucaaucga

SEQ ID NO: 1156090 - RNA, 19 nt, Homo sapiens
  misc_RNA (1)...(19): siRNA sense strand
ugcuucagcuucauuaaga

SEQ ID NO: 1156091 - RNA, 19 nt, Homo sapiens
  misc_RNA (1)...(19): siRNA sense strand
ucaccaacacagccaauga

SEQ ID NO: 1156092 - RNA, 19 nt, Homo sapiens
  misc_RNA (1)...(19): siRNA sense strand
uaucuguacugcaaucuac

SEQ ID NO: 1156093 - RNA, 19 nt, Homo sapiens
  misc_RNA (1)...(19): siRNA sense strand
aguagaggguugcuucaau

SEQ ID NO: 1156094 - RNA, 19 nt, Homo sapiens
  misc_RNA (1)...(19): siRNA sense strand
ccacaauggcugagcacuu

SEQ ID NO: 1156095 - RNA, 19 nt, Homo sapiens
  misc_RNA (1)...(19): siRNA sense strand
ucacccuacuucaaagaga

SEQ ID NO: 1156096 - RNA, 19 nt, Homo sapiens
  misc_RNA (1)...(19): siRNA sense strand
ccaugaugauccucuucaa

SEQ ID NO: 1156097 - RNA, 19 nt, Homo sapiens
  misc_RNA (1)...(19): siRNA sense strand
gcagugcuucagcuucauu

SEQ ID NO: 1156098 - RNA, 19 nt, Homo sapiens
  misc_RNA (1)...(19): siRNA sense strand
cacccuacuucaaagagaa

SEQ ID NO: 1156099 - RNA, 19 nt, Homo sapiens
  misc_RNA (1)...(19): siRNA sense strand
ucaccaacuauacggauuu

SEQ ID NO: 1156100 - RNA, 19 nt, Homo sapiens
  misc_RNA (1)...(19): siRNA sense strand
augaugauccucuucaauu

SEQ ID NO: 1156101 - RNA, 19 nt, Homo sapiens
  misc_RNA (1)...(19): siRNA sense strand
gggcugcuauggugcuaag

SEQ ID NO: 1156102 - RNA, 19 nt, Homo sapiens
  misc_RNA (1)...(19): siRNA sense strand
ggaacaccaccaugaaagg

SEQ ID NO: 1156103 - RNA, 19 nt, Homo sapiens
  misc_RNA (1)...(19): siRNA sense strand
ugccugccaucaagaaaga

SEQ ID NO: 1156104 - RNA, 19 nt, Homo sapiens
  misc_RNA (1)...(19): siRNA sense strand
caccaacacagccaaugaa

SEQ ID NO: 1156105 - RNA, 19 nt, Homo sapiens
  misc_RNA (1)...(19): siRNA sense strand
agugugcccucgugacguu

SEQ ID NO: 1156106 - RNA, 19 nt, Homo sapiens
  misc_RNA (1)...(19): siRNA sense strand
guaucuguacugcaaucua

SEQ ID NO: 1156107 - RNA, 19 nt, Homo sapiens
  misc_RNA (1)...(19): siRNA sense strand
ccaugcaguuugucaacgu

SEQ ID NO: 1156108 - RNA, 19 nt, Homo sapiens
  misc_RNA (1)...(19): siRNA sense strand
ccucuucaauuugcucauc

SEQ ID NO: 1156109 - RNA, 19 nt, Homo sapiens
  misc_RNA (1)...(19): siRNA sense strand
caugaugauccucuucaau

SEQ ID NO: 1156110 - RNA, 19 nt, Homo sapiens
  misc_RNA (1)...(19): siRNA sense strand
ccaacuauacggauuuuga

SEQ ID NO: 1156111 - RNA, 19 nt, Homo sapiens
  misc_RNA (1)...(19): siRNA sense strand
gcaaggagcaugugcagaa

SEQ ID NO: 1156112 - RNA, 19 nt, Homo sapiens
  misc_RNA (1)...(19): siRNA sense strand
gcaccgacuucuucauuga

SEQ ID NO: 1156113 - RNA, 19 nt, Homo sapiens
  misc_RNA (1)...(19): siRNA sense strand
ggauccaguucaccaaaua

SEQ ID NO: 1156114 - RNA, 19 nt, Homo sapiens
  misc_RNA (1)...(19): siRNA sense strand
gaaggcggaugacaagugu

SEQ ID NO: 1156115 - RNA, 19 nt, Homo sapiens
  misc_RNA (1)...(19): siRNA sense strand
gggaauggcugugcagaug

SEQ ID NO: 1156116 - RNA, 19 nt, Homo sapiens
  misc_RNA (1)...(19): siRNA sense strand
cagcaacugugacggauug

SEQ ID NO: 1156117 - RNA, 19 nt, Homo sapiens
  misc_RNA (1)...(19): siRNA sense strand
gcagacauauggccaggau

SEQ ID NO: 1156118 - RNA, 19 nt, Homo sapiens
  misc_RNA (1)...(19): siRNA sense strand
gcugugcccucaaccauga

SEQ ID NO: 1156119 - RNA, 19 nt, Homo sapiens
  misc_RNA (1)...(19): siRNA sense strand
gaauaucguagaugagauu

SEQ ID NO: 1156120 - RNA, 19 nt, Homo sapiens
  misc_RNA (1)...(19): siRNA sense strand
gaugagcagugccgcuuug

SEQ ID NO: 1156121 - RNA, 19 nt, Homo sapiens
  misc_RNA (1)...(19): siRNA sense strand
gcagcagccuggccuacaa

SEQ ID NO: 1156122 - RNA, 19 nt, Homo sapiens
  misc_RNA (1)...(19): siRNA sense strand
gcagugccgcuuugacuuu

SEQ ID NO: 1156123 - RNA, 19 nt, Homo sapiens
  misc_RNA (1)...(19): siRNA sense strand
ggagaagaccugagacauc

SEQ ID NO: 1156124 - RNA, 19 nt, Homo sapiens
  misc_RNA (1)...(19): siRNA sense strand
ccaggcacauccagauuga

SEQ ID NO: 1156125 - RNA, 19 nt, Homo sapiens
  misc_RNA (1)...(19): siRNA sense strand
gggaucaacuacucaaugg

SEQ ID NO: 1156126 - RNA, 19 nt, Homo sapiens
  misc_RNA (1)...(19): siRNA sense strand
uggaggagauggacaccua

SEQ ID NO: 1156127 - RNA, 19 nt, Homo sapiens
  misc_RNA (1)...(19): siRNA sense strand
gcacagacagcaccgacuu

SEQ ID NO: 1156128 - RNA, 19 nt, Homo sapiens
  misc_RNA (1)...(19): siRNA sense strand
gguggaggaugccaaggaa

SEQ ID NO: 1156129 - RNA, 19 nt, Homo sapiens
  misc_RNA (1)...(19): siRNA sense strand
gcagcuaccgggacccaua

SEQ ID NO: 1156130 - RNA, 19 nt, Homo sapiens
  misc_RNA (1)...(19): siRNA sense strand
gagcugcaccucucuggaa

SEQ ID NO: 1156131 - RNA, 19 nt, Homo sapiens
  misc_RNA (1)...(19): siRNA sense strand
ggacacgccacccacacua

SEQ ID NO: 1156132 - RNA, 19 nt, Homo sapiens
  misc_RNA (1)...(19): siRNA sense strand
gaucgcuacugcuccauuc

SEQ ID NO: 1156133 - RNA, 19 nt, Homo sapiens
  misc_RNA (1)...(19): siRNA sense strand
cuggaaagcucagugacua

SEQ ID NO: 1156134 - RNA, 19 nt, Homo sapiens
  misc_RNA (1)...(19): siRNA sense strand
uguccuaccugcugccuuu

SEQ ID NO: 1156135 - RNA, 19 nt, Homo sapiens
  misc_RNA (1)...(19): siRNA sense strand
gaucaacuacucaauggau

SEQ ID NO: 1156136 - RNA, 19 nt, Homo sapiens
  misc_RNA (1)...(19): siRNA sense strand
cuacuucaaugucacuguu

SEQ ID NO: 1156137 - RNA, 19 nt, Homo sapiens
  misc_RNA (1)...(19): siRNA sense strand
caggagcucuggauacaag

SEQ ID NO: 1156138 - RNA, 19 nt, Homo sapiens
  misc_RNA (1)...(19): siRNA sense strand
cuacaucccauuaacaaga

SEQ ID NO: 1156139 - RNA, 19 nt, Homo sapiens
  misc_RNA (1)...(19): siRNA sense strand
uaucguagaugagauuuac

SEQ ID NO: 1156140 - RNA, 19 nt, Homo sapiens
  misc_RNA (1)...(19): siRNA sense strand
guccucacccucaugaaua

SEQ ID NO: 1156141 - RNA, 19 nt, Homo sapiens
  misc_RNA (1)...(19): siRNA sense strand
cugcagagccuccuggaaa

SEQ ID NO: 1156142 - RNA, 19 nt, Homo sapiens
  misc_RNA (1)...(19): siRNA sense strand
gccgaugucugggaacuug

SEQ ID NO: 1156143 - RNA, 19 nt, Homo sapiens
  misc_RNA (1)...(19): siRNA sense strand
ccaacagccucgggcauug

SEQ ID NO: 1156144 - RNA, 19 nt, Homo sapiens
  misc_RNA (1)...(19): siRNA sense strand
ccuacgagccugacgauga

SEQ ID NO: 1156145 - RNA, 19 nt, Homo sapiens
  misc_RNA (1)...(19): siRNA sense strand
ggaaagcucagugacuaug

SEQ ID NO: 1156146 - RNA, 19 nt, Homo sapiens
  misc_RNA (1)...(19): siRNA sense strand
gaauggcugugcagaugag

SEQ ID NO: 1156147 - RNA, 19 nt, Homo sapiens
  misc_RNA (1)...(19): siRNA sense strand
agacagcaccgacuucuuc

SEQ ID NO: 1156148 - RNA, 19 nt, Homo sapiens
  misc_RNA (1)...(19): siRNA sense strand
gaggaaaucaccagaacuc

SEQ ID NO: 1156149 - RNA, 19 nt, Homo sapiens
  misc_RNA (1)...(19): siRNA sense strand
ggaauggcugugcagauga

SEQ ID NO: 1156150 - RNA, 19 nt, Homo sapiens
  misc_RNA (1)...(19): siRNA sense strand
cagcaccgacuucuucauu

SEQ ID NO: 1156151 - RNA, 19 nt, Homo sapiens
  misc_RNA (1)...(19): siRNA sense strand
gggauccaguucaccaaau

SEQ ID NO: 1156152 - RNA, 19 nt, Homo sapiens
  misc_RNA (1)...(19): siRNA sense strand
ccucaugaauaucguagau

SEQ ID NO: 1156153 - RNA, 19 nt, Homo sapiens
  misc_RNA (1)...(19): siRNA sense strand
gggacgugguguucaugaa

SEQ ID NO: 1156154 - RNA, 19 nt, Homo sapiens
  misc_RNA (1)...(19): siRNA sense strand
aggagcaugugcagaacua

SEQ ID NO: 1156155 - RNA, 19 nt, Homo sapiens
  misc_RNA (1)...(19): siRNA sense strand
caccggcucugcugugugu

SEQ ID NO: 1156156 - RNA, 19 nt, Homo sapiens
  misc_RNA (1)...(19): siRNA sense strand
gggauaggccagacacugu

SEQ ID NO: 1156157 - RNA, 19 nt, Homo sapiens
  misc_RNA (1)...(19): siRNA sense strand
gaugacaaguguggagucu

SEQ ID NO: 1156158 - RNA, 19 nt, Homo sapiens
  misc_RNA (1)...(19): siRNA sense strand
ggcaaguggugcuucaaag

SEQ ID NO: 1156159 - RNA, 19 nt, Homo sapiens
  misc_RNA (1)...(19): siRNA sense strand
gccacucccucuacuucaa

SEQ ID NO: 1156160 - RNA, 19 nt, Homo sapiens
  misc_RNA (1)...(19): siRNA sense strand
caaagggcaaccuggagaa

SEQ ID NO: 1156161 - RNA, 19 nt, Homo sapiens
  misc_RNA (1)...(19): siRNA sense strand
ggagcauccuggagcaucu

SEQ ID NO: 1156162 - RNA, 19 nt, Homo sapiens
  misc_RNA (1)...(19): siRNA sense strand
gaaagccaacgggaucaga

SEQ ID NO: 1156163 - RNA, 19 nt, Homo sapiens
  misc_RNA (1)...(19): siRNA sense strand
gagauggacaccuaugagu

SEQ ID NO: 1156164 - RNA, 19 nt, Homo sapiens
  misc_RNA (1)...(19): siRNA sense strand
uggaguggcaggaggauuu

SEQ ID NO: 1156165 - RNA, 19 nt, Homo sapiens
  misc_RNA (1)...(19): siRNA sense strand
gaggagggauccaguucac

SEQ ID NO: 1156166 - RNA, 19 nt, Homo sapiens
  misc_RNA (1)...(19): siRNA sense strand
gagcagugccgcuuugacu

SEQ ID NO: 1156167 - RNA, 19 nt, Homo sapiens
  misc_RNA (1)...(19): siRNA sense strand
gagcaugugcagaacuaug

SEQ ID NO: 1156168 - RNA, 19 nt, Homo sapiens
  misc_RNA (1)...(19): siRNA sense strand
cuccucagccuucgugaua

SEQ ID NO: 1156169 - RNA, 19 nt, Homo sapiens
  misc_RNA (1)...(19): siRNA sense strand
gcagccuggccuacaagua

SEQ ID NO: 1156170 - RNA, 19 nt, Homo sapiens
  misc_RNA (1)...(19): siRNA sense strand
ccagaagugugagcugauc

SEQ ID NO: 1156171 - RNA, 19 nt, Homo sapiens
  misc_RNA (1)...(19): siRNA sense strand
gcaaguggugcuucaaagg

SEQ ID NO: 1156172 - RNA, 19 nt, Homo sapiens
  misc_RNA (1)...(19): siRNA sense strand
ggagauggacaccuaugag

SEQ ID NO: 1156173 - RNA, 19 nt, Homo sapiens
  misc_RNA (1)...(19): siRNA sense strand
ggaggagggauccaguuca

SEQ ID NO: 1156174 - RNA, 19 nt, Homo sapiens
  misc_RNA (1)...(19): siRNA sense strand
cagacgagaccaccacaug

SEQ ID NO: 1156175 - RNA, 19 nt, Homo sapiens
  misc_RNA (1)...(19): siRNA sense strand
uagggcccauguucgagua

SEQ ID NO: 1156176 - RNA, 19 nt, Homo sapiens
  misc_RNA (1)...(19): siRNA sense strand
gccaacagccucgggcauu

SEQ ID NO: 1156177 - RNA, 19 nt, Homo sapiens
  misc_RNA (1)...(19): siRNA sense strand
ccaugaaggcggaugacaa

SEQ ID NO: 1156178 - RNA, 19 nt, Homo sapiens
  misc_RNA (1)...(19): siRNA sense strand
ugagcaccaugaccacguu

SEQ ID NO: 1156179 - RNA, 19 nt, Homo sapiens
  misc_RNA (1)...(19): siRNA sense strand
gugcuuagggcccauguuc

SEQ ID NO: 1156180 - RNA, 19 nt, Homo sapiens
  misc_RNA (1)...(19): siRNA sense strand
acgacugccuccucgauga

SEQ ID NO: 1156181 - RNA, 19 nt, Homo sapiens
  misc_RNA (1)...(19): siRNA sense strand
ccugcacaaugaagccuuu

SEQ ID NO: 1156182 - RNA, 19 nt, Homo sapiens
  misc_RNA (1)...(19): siRNA sense strand
ggacccagcaucccuuugc

SEQ ID NO: 1156183 - RNA, 19 nt, Homo sapiens
  misc_RNA (1)...(19): siRNA sense strand
gaaagcucagugacuaugg

SEQ ID NO: 1156184 - RNA, 19 nt, Homo sapiens
  misc_RNA (1)...(19): siRNA sense strand
gccacaagccggaccuuca

SEQ ID NO: 1156185 - RNA, 19 nt, Homo sapiens
  misc_RNA (1)...(19): siRNA sense strand
gccaggcacauccagauug

SEQ ID NO: 1156186 - RNA, 19 nt, Homo sapiens
  misc_RNA (1)...(19): siRNA sense strand
ugaaggcggaugacaagug

SEQ ID NO: 1156187 - RNA, 19 nt, Homo sapiens
  misc_RNA (1)...(19): siRNA sense strand
caaguggugcuucaaaggu

SEQ ID NO: 1156188 - RNA, 19 nt, Homo sapiens
  misc_RNA (1)...(19): siRNA sense strand
gugcagccauccugacaac

SEQ ID NO: 1156189 - RNA, 19 nt, Homo sapiens
  misc_RNA (1)...(19): siRNA sense strand
ggaugagcagugccgcuuu

SEQ ID NO: 1156190 - RNA, 19 nt, Homo sapiens
  misc_RNA (1)...(19): siRNA sense strand
gagcugugcccucaaccau

SEQ ID NO: 1156191 - RNA, 19 nt, Homo sapiens
  misc_RNA (1)...(19): siRNA sense strand
gcgccacucccucuacuuc

SEQ ID NO: 1156192 - RNA, 19 nt, Homo sapiens
  misc_RNA (1)...(19): siRNA sense strand
caugaaggcggaugacaag

SEQ ID NO: 1156193 - RNA, 19 nt, Homo sapiens
  misc_RNA (1)...(19): siRNA sense strand
cuacgagccugacgaugac

SEQ ID NO: 1156194 - RNA, 19 nt, Homo sapiens
  misc_RNA (1)...(19): siRNA sense strand
gcaccaugaccacguugug

SEQ ID NO: 1156195 - RNA, 19 nt, Homo sapiens
  misc_RNA (1)...(19): siRNA sense strand
ugaauaucguagaugagau

SEQ ID NO: 1156196 - RNA, 19 nt, Homo sapiens
  misc_RNA (1)...(19): siRNA sense strand
gacagucccugagccugau

SEQ ID NO: 1156197 - RNA, 19 nt, Homo sapiens
  misc_RNA (1)...(19): siRNA sense strand
gcaggcaggagcucucaag

SEQ ID NO: 1156198 - RNA, 19 nt, Homo sapiens
  misc_RNA (1)...(19): siRNA sense strand
gcuuagggcccauguucga

SEQ ID NO: 1156199 - RNA, 19 nt, Homo sapiens
  misc_RNA (1)...(19): siRNA sense strand
ucaacuacucaauggauga

SEQ ID NO: 1156200 - RNA, 19 nt, Homo sapiens
  misc_RNA (1)...(19): siRNA sense strand
gagcuccuggaccaaguuu

SEQ ID NO: 1156201 - RNA, 19 nt, Homo sapiens
  misc_RNA (1)...(19): siRNA sense strand
uacaucccauuaacaagau

SEQ ID NO: 1156202 - RNA, 19 nt, Homo sapiens
  misc_RNA (1)...(19): siRNA sense strand
gaaccccuacaucccauua

SEQ ID NO: 1156203 - RNA, 19 nt, Homo sapiens
  misc_RNA (1)...(19): siRNA sense strand
uggaggaaaucaccagaac

SEQ ID NO: 1156204 - RNA, 19 nt, Homo sapiens
  misc_RNA (1)...(19): siRNA sense strand
ccaauggaacccacaaggu

SEQ ID NO: 1156205 - RNA, 19 nt, Homo sapiens
  misc_RNA (1)...(19): siRNA sense strand
gaggagauggacaccuaug

SEQ ID NO: 1156206 - RNA, 19 nt, Homo sapiens
  misc_RNA (1)...(19): siRNA sense strand
cggcaaguggugcuucaaa

SEQ ID NO: 1156207 - RNA, 19 nt, Homo sapiens
  misc_RNA (1)...(19): siRNA sense strand
uguguguccugcaucaaga

SEQ ID NO: 1156208 - RNA, 19 nt, Homo sapiens
  misc_RNA (1)...(19): siRNA sense strand
caaggagcaugugcagaac

SEQ ID NO: 1156209 - RNA, 19 nt, Homo sapiens
  misc_RNA (1)...(19): siRNA sense strand
ccauuaacaagauaucauc

SEQ ID NO: 1156210 - RNA, 19 nt, Homo sapiens
  misc_RNA (1)...(19): siRNA sense strand
ggaggagauggacaccuau

SEQ ID NO: 1156211 - RNA, 19 nt, Homo sapiens
  misc_RNA (1)...(19): siRNA sense strand
gcaaggagcaugugcagaa

SEQ ID NO: 1156212 - RNA, 19 nt, Homo sapiens
  misc_RNA (1)...(19): siRNA sense strand
gcaccgacuucuucauuga

SEQ ID NO: 1156213 - RNA, 19 nt, Homo sapiens
  misc_RNA (1)...(19): siRNA sense strand
ggauccaguucaccaaaua

SEQ ID NO: 1156214 - RNA, 19 nt, Homo sapiens
  misc_RNA (1)...(19): siRNA sense strand
gaaggcggaugacaagugu

SEQ ID NO: 1156215 - RNA, 19 nt, Homo sapiens
  misc_RNA (1)...(19): siRNA sense strand
gggaauggcugugcagaug

SEQ ID NO: 1156216 - RNA, 19 nt, Homo sapiens
  misc_RNA (1)...(19): siRNA sense strand
cagcaacugugacggauug

SEQ ID NO: 1156217 - RNA, 19 nt, Homo sapiens
  misc_RNA (1)...(19): siRNA sense strand
gcagacauauggccaggau

SEQ ID NO: 1156218 - RNA, 19 nt, Homo sapiens
  misc_RNA (1)...(19): siRNA sense strand
gcugugcccucaaccauga

SEQ ID NO: 1156219 - RNA, 19 nt, Homo sapiens
  misc_RNA (1)...(19): siRNA sense strand
gaauaucguagaugagauu

SEQ ID NO: 1156220 - RNA, 19 nt, Homo sapiens
  misc_RNA (1)...(19): siRNA sense strand
gaugagcagugccgcuuug

SEQ ID NO: 1156221 - RNA, 19 nt, Homo sapiens
  misc_RNA (1)...(19): siRNA sense strand
gcagcagccuggccuacaa

SEQ ID NO: 1156222 - RNA, 19 nt, Homo sapiens
  misc_RNA (1)...(19): siRNA sense strand
gcagugccgcuuugacuuu

SEQ ID NO: 1156223 - RNA, 19 nt, Homo sapiens
  misc_RNA (1)...(19): siRNA sense strand
ggagaagaccugagacauc

SEQ ID NO: 1156224 - RNA, 19 nt, Homo sapiens
  misc_RNA (1)...(19): siRNA sense strand
ccaggcacauccagauuga

SEQ ID NO: 1156225 - RNA, 19 nt, Homo sapiens
  misc_RNA (1)...(19): siRNA sense strand
gggaucaacuacucaaugg

SEQ ID NO: 1156226 - RNA, 19 nt, Homo sapiens
  misc_RNA (1)...(19): siRNA sense strand
uggaggagauggacaccua

SEQ ID NO: 1156227 - RNA, 19 nt, Homo sapiens
  misc_RNA (1)...(19): siRNA sense strand
gcacagacagcaccgacuu

SEQ ID NO: 1156228 - RNA, 19 nt, Homo sapiens
  misc_RNA (1)...(19): siRNA sense strand
gguggaggaugccaaggaa

SEQ ID NO: 1156229 - RNA, 19 nt, Homo sapiens
  misc_RNA (1)...(19): siRNA sense strand
gcagcuaccgggacccaua

SEQ ID NO: 1156230 - RNA, 19 nt, Homo sapiens
  misc_RNA (1)...(19): siRNA sense strand
gagcugcaccucucuggaa

SEQ ID NO: 1156231 - RNA, 19 nt, Homo sapiens
  misc_RNA (1)...(19): siRNA sense strand
ggacacgccacccacacua

SEQ ID NO: 1156232 - RNA, 19 nt, Homo sapiens
  misc_RNA (1)...(19): siRNA sense strand
gaucgcuacugcuccauuc

SEQ ID NO: 1156233 - RNA, 19 nt, Homo sapiens
  misc_RNA (1)...(19): siRNA sense strand
cuggaaagcucagugacua

SEQ ID NO: 1156234 - RNA, 19 nt, Homo sapiens
  misc_RNA (1)...(19): siRNA sense strand
uguccuaccugcugccuuu

SEQ ID NO: 1156235 - RNA, 19 nt, Homo sapiens
  misc_RNA (1)...(19): siRNA sense strand
gaucaacuacucaauggau

SEQ ID NO: 1156236 - RNA, 19 nt, Homo sapiens
  misc_RNA (1)...(19): siRNA sense strand
cuacuucaaugucacuguu

SEQ ID NO: 1156237 - RNA, 19 nt, Homo sapiens
  misc_RNA (1)...(19): siRNA sense strand
caggagcucuggauacaag

SEQ ID NO: 1156238 - RNA, 19 nt, Homo sapiens
  misc_RNA (1)...(19): siRNA sense strand
cuacaucccauuaacaaga

SEQ ID NO: 1156239 - RNA, 19 nt, Homo sapiens
  misc_RNA (1)...(19): siRNA sense strand
uaucguagaugagauuuac

SEQ ID NO: 1156240 - RNA, 19 nt, Homo sapiens
  misc_RNA (1)...(19): siRNA sense strand
guccucacccucaugaaua

SEQ ID NO: 1156241 - RNA, 19 nt, Homo sapiens
  misc_RNA (1)...(19): siRNA sense strand
cugcagagccuccuggaaa

SEQ ID NO: 1156242 - RNA, 19 nt, Homo sapiens
  misc_RNA (1)...(19): siRNA sense strand
gccgaugucugggaacuug

SEQ ID NO: 1156243 - RNA, 19 nt, Homo sapiens
  misc_RNA (1)...(19): siRNA sense strand
ccaacagccucgggcauug

SEQ ID NO: 1156244 - RNA, 19 nt, Homo sapiens
  misc_RNA (1)...(19): siRNA sense strand
ccuacgagccugacgauga

SEQ ID NO: 1156245 - RNA, 19 nt, Homo sapiens
  misc_RNA (1)...(19): siRNA sense strand
ggaaagcucagugacuaug

SEQ ID NO: 1156246 - RNA, 19 nt, Homo sapiens
  misc_RNA (1)...(19): siRNA sense strand
gaauggcugugcagaugag

SEQ ID NO: 1156247 - RNA, 19 nt, Homo sapiens
  misc_RNA (1)...(19): siRNA sense strand
agacagcaccgacuucuuc

SEQ ID NO: 1156248 - RNA, 19 nt, Homo sapiens
  misc_RNA (1)...(19): siRNA sense strand
gaggaaaucaccagaacuc

SEQ ID NO: 1156249 - RNA, 19 nt, Homo sapiens
  misc_RNA (1)...(19): siRNA sense strand
ggaauggcugugcagauga

SEQ ID NO: 1156250 - RNA, 19 nt, Homo sapiens
  misc_RNA (1)...(19): siRNA sense strand
cagcaccgacuucuucauu

SEQ ID NO: 1156251 - RNA, 19 nt, Homo sapiens
  misc_RNA (1)...(19): siRNA sense strand
gggauccaguucaccaaau

SEQ ID NO: 1156252 - RNA, 19 nt, Homo sapiens
  misc_RNA (1)...(19): siRNA sense strand
ccucaugaauaucguagau

SEQ ID NO: 1156253 - RNA, 19 nt, Homo sapiens
  misc_RNA (1)...(19): siRNA sense strand
gggacgugguguucaugaa

SEQ ID NO: 1156254 - RNA, 19 nt, Homo sapiens
  misc_RNA (1)...(19): siRNA sense strand
aggagcaugugcagaacua

SEQ ID NO: 1156255 - RNA, 19 nt, Homo sapiens
  misc_RNA (1)...(19): siRNA sense strand
caccggcucugcugugugu

SEQ ID NO: 1156256 - RNA, 19 nt, Homo sapiens
  misc_RNA (1)...(19): siRNA sense strand
gggauaggccagacacugu

SEQ ID NO: 1156257 - RNA, 19 nt, Homo sapiens
  misc_RNA (1)...(19): siRNA sense strand
gaugacaaguguggagucu

SEQ ID NO: 1156258 - RNA, 19 nt, Homo sapiens
  misc_RNA (1)...(19): siRNA sense strand
ggcaaguggugcuucaaag

SEQ ID NO: 1156259 - RNA, 19 nt, Homo sapiens
  misc_RNA (1)...(19): siRNA sense strand
gccacucccucuacuucaa

SEQ ID NO: 1156260 - RNA, 19 nt, Homo sapiens
  misc_RNA (1)...(19): siRNA sense strand
caaagggcaaccuggagaa

SEQ ID NO: 1156261 - RNA, 19 nt, Homo sapiens
  misc_RNA (1)...(19): siRNA sense strand
ggagcauccuggagcaucu

SEQ ID NO: 1156262 - RNA, 19 nt, Homo sapiens
  misc_RNA (1)...(19): siRNA sense strand
gaaagccaacgggaucaga

SEQ ID NO: 1156263 - RNA, 19 nt, Homo sapiens
  misc_RNA (1)...(19): siRNA sense strand
gagauggacaccuaugagu

SEQ ID NO: 1156264 - RNA, 19 nt, Homo sapiens
  misc_RNA (1)...(19): siRNA sense strand
uggaguggcaggaggauuu

SEQ ID NO: 1156265 - RNA, 19 nt, Homo sapiens
  misc_RNA (1)...(19): siRNA sense strand
gaggagggauccaguucac

SEQ ID NO: 1156266 - RNA, 19 nt, Homo sapiens
  misc_RNA (1)...(19): siRNA sense strand
gagcagugccgcuuugacu

SEQ ID NO: 1156267 - RNA, 19 nt, Homo sapiens
  misc_RNA (1)...(19): siRNA sense strand
gagcaugugcagaacuaug

SEQ ID NO: 1156268 - RNA, 19 nt, Homo sapiens
  misc_RNA (1)...(19): siRNA sense strand
cuccucagccuucgugaua

SEQ ID NO: 1156269 - RNA, 19 nt, Homo sapiens
  misc_RNA (1)...(19): siRNA sense strand
gcagccuggccuacaagua

SEQ ID NO: 1156270 - RNA, 19 nt, Homo sapiens
  misc_RNA (1)...(19): siRNA sense strand
ccagaagugugagcugauc

SEQ ID NO: 1156271 - RNA, 19 nt, Homo sapiens
  misc_RNA (1)...(19): siRNA sense strand
gcaaguggugcuucaaagg

SEQ ID NO: 1156272 - RNA, 19 nt, Homo sapiens
  misc_RNA (1)...(19): siRNA sense strand
ggagauggacaccuaugag

SEQ ID NO: 1156273 - RNA, 19 nt, Homo sapiens
  misc_RNA (1)...(19): siRNA sense strand
ggaggagggauccaguuca

SEQ ID NO: 1156274 - RNA, 19 nt, Homo sapiens
  misc_RNA (1)...(19): siRNA sense strand
cagacgagaccaccacaug

SEQ ID NO: 1156275 - RNA, 19 nt, Homo sapiens
  misc_RNA (1)...(19): siRNA sense strand
uagggcccauguucgagua

SEQ ID NO: 1156276 - RNA, 19 nt, Homo sapiens
  misc_RNA (1)...(19): siRNA sense strand
gccaacagccucgggcauu

SEQ ID NO: 1156277 - RNA, 19 nt, Homo sapiens
  misc_RNA (1)...(19): siRNA sense strand
ccaugaaggcggaugacaa

SEQ ID NO: 1156278 - RNA, 19 nt, Homo sapiens
  misc_RNA (1)...(19): siRNA sense strand
ugagcaccaugaccacguu

SEQ ID NO: 1156279 - RNA, 19 nt, Homo sapiens
  misc_RNA (1)...(19): siRNA sense strand
gugcuuagggcccauguuc

SEQ ID NO: 1156280 - RNA, 19 nt, Homo sapiens
  misc_RNA (1)...(19): siRNA sense strand
acgacugccuccucgauga

SEQ ID NO: 1156281 - RNA, 19 nt, Homo sapiens
  misc_RNA (1)...(19): siRNA sense strand
ccugcacaaugaagccuuu

SEQ ID NO: 1156282 - RNA, 19 nt, Homo sapiens
  misc_RNA (1)...(19): siRNA sense strand
ggacccagcaucccuuugc

SEQ ID NO: 1156283 - RNA, 19 nt, Homo sapiens
  misc_RNA (1)...(19): siRNA sense strand
gaaagcucagugacuaugg

SEQ ID NO: 1156284 - RNA, 19 nt, Homo sapiens
  misc_RNA (1)...(19): siRNA sense strand
gccacaagccggaccuuca

SEQ ID NO: 1156285 - RNA, 19 nt, Homo sapiens
  misc_RNA (1)...(19): siRNA sense strand
gccaggcacauccagauug

SEQ ID NO: 1156286 - RNA, 19 nt, Homo sapiens
  misc_RNA (1)...(19): siRNA sense strand
ugaaggcggaugacaagug

SEQ ID NO: 1156287 - RNA, 19 nt, Homo sapiens
  misc_RNA (1)...(19): siRNA sense strand
caaguggugcuucaaaggu

SEQ ID NO: 1156288 - RNA, 19 nt, Homo sapiens
  misc_RNA (1)...(19): siRNA sense strand
gugcagccauccugacaac

SEQ ID NO: 1156289 - RNA, 19 nt, Homo sapiens
  misc_RNA (1)...(19): siRNA sense strand
ggaugagcagugccgcuuu

SEQ ID NO: 1156290 - RNA, 19 nt, Homo sapiens
  misc_RNA (1)...(19): siRNA sense strand
gagcugugcccucaaccau

SEQ ID NO: 1156291 - RNA, 19 nt, Homo sapiens
  misc_RNA (1)...(19): siRNA sense strand
gcgccacucccucuacuuc

SEQ ID NO: 1156292 - RNA, 19 nt, Homo sapiens
  misc_RNA (1)...(19): siRNA sense strand
caugaaggcggaugacaag

SEQ ID NO: 1156293 - RNA, 19 nt, Homo sapiens
  misc_RNA (1)...(19): siRNA sense strand
cuacgagccugacgaugac

SEQ ID NO: 1156294 - RNA, 19 nt, Homo sapiens
  misc_RNA (1)...(19): siRNA sense strand
gcaccaugaccacguugug

SEQ ID NO: 1156295 - RNA, 19 nt, Homo sapiens
  misc_RNA (1)...(19): siRNA sense strand
ugaauaucguagaugagau

SEQ ID NO: 1156296 - RNA, 19 nt, Homo sapiens
  misc_RNA (1)...(19): siRNA sense strand
gacagucccugagccugau

SEQ ID NO: 1156297 - RNA, 19 nt, Homo sapiens
  misc_RNA (1)...(19): siRNA sense strand
gcaggcaggagcucucaag

SEQ ID NO: 1156298 - RNA, 19 nt, Homo sapiens
  misc_RNA (1)...(19): siRNA sense strand
gcuuagggcccauguucga

SEQ ID NO: 1156299 - RNA, 19 nt, Homo sapiens
  misc_RNA (1)...(19): siRNA sense strand
ucaacuacucaauggauga

SEQ ID NO: 1156300 - RNA, 19 nt, Homo sapiens
  misc_RNA (1)...(19): siRNA sense strand
gagcuccuggaccaaguuu

SEQ ID NO: 1156301 - RNA, 19 nt, Homo sapiens
  misc_RNA (1)...(19): siRNA sense strand
uacaucccauuaacaagau

SEQ ID NO: 1156302 - RNA, 19 nt, Homo sapiens
  misc_RNA (1)...(19): siRNA sense strand
gaaccccuacaucccauua

SEQ ID NO: 1156303 - RNA, 19 nt, Homo sapiens
  misc_RNA (1)...(19): siRNA sense strand
uggaggaaaucaccagaac

SEQ ID NO: 1156304 - RNA, 19 nt, Homo sapiens
  misc_RNA (1)...(19): siRNA sense strand
ccaauggaacccacaaggu

SEQ ID NO: 1156305 - RNA, 19 nt, Homo sapiens
  misc_RNA (1)...(19): siRNA sense strand
gaggagauggacaccuaug

SEQ ID NO: 1156306 - RNA, 19 nt, Homo sapiens
  misc_RNA (1)...(19): siRNA sense strand
cggcaaguggugcuucaaa

SEQ ID NO: 1156307 - RNA, 19 nt, Homo sapiens
  misc_RNA (1)...(19): siRNA sense strand
uguguguccugcaucaaga

SEQ ID NO: 1156308 - RNA, 19 nt, Homo sapiens
  misc_RNA (1)...(19): siRNA sense strand
caaggagcaugugcagaac

SEQ ID NO: 1156309 - RNA, 19 nt, Homo sapiens
  misc_RNA (1)...(19): siRNA sense strand
ccauuaacaagauaucauc

SEQ ID NO: 1156310 - RNA, 19 nt, Homo sapiens
  misc_RNA (1)...(19): siRNA sense strand
ggaggagauggacaccuau

SEQ ID NO: 1156311 - RNA, 19 nt, Homo sapiens
  misc_RNA (1)...(19): siRNA sense strand
gauauuugcugcugaagua

SEQ ID NO: 1156312 - RNA, 19 nt, Homo sapiens
  misc_RNA (1)...(19): siRNA sense strand
gaagaggcuuacaaugauu

SEQ ID NO: 1156313 - RNA, 19 nt, Homo sapiens
  misc_RNA (1)...(19): siRNA sense strand
uaaaggaguuaucaucaga

SEQ ID NO: 1156314 - RNA, 19 nt, Homo sapiens
  misc_RNA (1)...(19): siRNA sense strand
gaucggccgucauugcuuu

SEQ ID NO: 1156315 - RNA, 19 nt, Homo sapiens
  misc_RNA (1)...(19): siRNA sense strand
gaaauugagaccauaauca

SEQ ID NO: 1156316 - RNA, 19 nt, Homo sapiens
  misc_RNA (1)...(19): siRNA sense strand
ugaagaggcuuacaaugau

SEQ ID NO: 1156317 - RNA, 19 nt, Homo sapiens
  misc_RNA (1)...(19): siRNA sense strand
gacgaucuuuggcaugaua

SEQ ID NO: 1156318 - RNA, 19 nt, Homo sapiens
  misc_RNA (1)...(19): siRNA sense strand
aguaaccacuggaguauuu

SEQ ID NO: 1156319 - RNA, 19 nt, Homo sapiens
  misc_RNA (1)...(19): siRNA sense strand
ggaauugucgguauuggaa

SEQ ID NO: 1156320 - RNA, 19 nt, Homo sapiens
  misc_RNA (1)...(19): siRNA sense strand
gaaguaaccacuggaguau

SEQ ID NO: 1156321 - RNA, 19 nt, Homo sapiens
  misc_RNA (1)...(19): siRNA sense strand
auacgaaacucacgagaug

SEQ ID NO: 1156322 - RNA, 19 nt, Homo sapiens
  misc_RNA (1)...(19): siRNA sense strand
ccacuggaguauuugcuuu

SEQ ID NO: 1156323 - RNA, 19 nt, Homo sapiens
  misc_RNA (1)...(19): siRNA sense strand
ugaaguaaccacuggagua

SEQ ID NO: 1156324 - RNA, 19 nt, Homo sapiens
  misc_RNA (1)...(19): siRNA sense strand
guucggaggugccauaaag

SEQ ID NO: 1156325 - RNA, 19 nt, Homo sapiens
  misc_RNA (1)...(19): siRNA sense strand
gagaccauaaucaguguua

SEQ ID NO: 1156326 - RNA, 19 nt, Homo sapiens
  misc_RNA (1)...(19): siRNA sense strand
ggugauauuugcugcugaa

SEQ ID NO: 1156327 - RNA, 19 nt, Homo sapiens
  misc_RNA (1)...(19): siRNA sense strand
caaccuacaugcccaaagg

SEQ ID NO: 1156328 - RNA, 19 nt, Homo sapiens
  misc_RNA (1)...(19): siRNA sense strand
agaauugcaucgaugaaau

SEQ ID NO: 1156329 - RNA, 19 nt, Homo sapiens
  misc_RNA (1)...(19): siRNA sense strand
gaugaaauugagaccauaa

SEQ ID NO: 1156330 - RNA, 19 nt, Homo sapiens
  misc_RNA (1)...(19): siRNA sense strand
acacaagaauugcaucgau

SEQ ID NO: 1156331 - RNA, 19 nt, Homo sapiens
  misc_RNA (1)...(19): siRNA sense strand
guagcuauccgacauguuc

SEQ ID NO: 1156332 - RNA, 19 nt, Homo sapiens
  misc_RNA (1)...(19): siRNA sense strand
gaggugccauaaaggaguu

SEQ ID NO: 1156333 - RNA, 19 nt, Homo sapiens
  misc_RNA (1)...(19): siRNA sense strand
augaagaggcuuacaauga

SEQ ID NO: 1156334 - RNA, 19 nt, Homo sapiens
  misc_RNA (1)...(19): siRNA sense strand
cgaugaaauugagaccaua

SEQ ID NO: 1156335 - RNA, 19 nt, Homo sapiens
  misc_RNA (1)...(19): siRNA sense strand
guaugaagaggcuuacaau

SEQ ID NO: 1156336 - RNA, 19 nt, Homo sapiens
  misc_RNA (1)...(19): siRNA sense strand
gaaaagaaagcuccgaaca

SEQ ID NO: 1156337 - RNA, 19 nt, Homo sapiens
  misc_RNA (1)...(19): siRNA sense strand
gauacgaaacucacgagau

SEQ ID NO: 1156338 - RNA, 19 nt, Homo sapiens
  misc_RNA (1)...(19): siRNA sense strand
gagcuucuaggacacaaga

SEQ ID NO: 1156339 - RNA, 19 nt, Homo sapiens
  misc_RNA (1)...(19): siRNA sense strand
ucauuggaauugucgguau

SEQ ID NO: 1156340 - RNA, 19 nt, Homo sapiens
  misc_RNA (1)...(19): siRNA sense strand
cauuggaauugucgguauu

SEQ ID NO: 1156341 - RNA, 19 nt, Homo sapiens
  misc_RNA (1)...(19): siRNA sense strand
ggccugcggugcaucaagu

SEQ ID NO: 1156342 - RNA, 19 nt, Homo sapiens
  misc_RNA (1)...(19): siRNA sense strand
caccuuccacucaacauuu

SEQ ID NO: 1156343 - RNA, 19 nt, Homo sapiens
  misc_RNA (1)...(19): siRNA sense strand
ggacacucaucaccuucca

SEQ ID NO: 1156344 - RNA, 19 nt, Homo sapiens
  misc_RNA (1)...(19): siRNA sense strand
cugacgaucuuuggcauga

SEQ ID NO: 1156345 - RNA, 19 nt, Homo sapiens
  misc_RNA (1)...(19): siRNA sense strand
gcaggucugacgaucuuug

SEQ ID NO: 1156346 - RNA, 19 nt, Homo sapiens
  misc_RNA (1)...(19): siRNA sense strand
gcaaugugugcuuggauca

SEQ ID NO: 1156347 - RNA, 19 nt, Homo sapiens
  misc_RNA (1)...(19): siRNA sense strand
cgucauugcuuuuggacua

SEQ ID NO: 1156348 - RNA, 19 nt, Homo sapiens
  misc_RNA (1)...(19): siRNA sense strand
uugcaggucugacgaucuu

SEQ ID NO: 1156349 - RNA, 19 nt, Homo sapiens
  misc_RNA (1)...(19): siRNA sense strand
acaagaauugcaucgauga

SEQ ID NO: 1156350 - RNA, 19 nt, Homo sapiens
  misc_RNA (1)...(19): siRNA sense strand
ccauguaugaagaggcuua

SEQ ID NO: 1156351 - RNA, 19 nt, Homo sapiens
  misc_RNA (1)...(19): siRNA sense strand
ucgaugaaauugagaccau

SEQ ID NO: 1156352 - RNA, 19 nt, Homo sapiens
  misc_RNA (1)...(19): siRNA sense strand
gcuucaaccugcucuucug

SEQ ID NO: 1156353 - RNA, 19 nt, Homo sapiens
  misc_RNA (1)...(19): siRNA sense strand
gguccucugcugugcgaua

SEQ ID NO: 1156354 - RNA, 19 nt, Homo sapiens
  misc_RNA (1)...(19): siRNA sense strand
caagaauugcaucgaugaa

SEQ ID NO: 1156355 - RNA, 19 nt, Homo sapiens
  misc_RNA (1)...(19): siRNA sense strand
acauuucagugcuguggaa

SEQ ID NO: 1156356 - RNA, 19 nt, Homo sapiens
  misc_RNA (1)...(19): siRNA sense strand
aagaggcuuacaaugauua

SEQ ID NO: 1156357 - RNA, 19 nt, Homo sapiens
  misc_RNA (1)...(19): siRNA sense strand
ggcaaugggacacucauca

SEQ ID NO: 1156358 - RNA, 19 nt, Homo sapiens
  misc_RNA (1)...(19): siRNA sense strand
gaucuuuggcaugauauuc

SEQ ID NO: 1156359 - RNA, 19 nt, Homo sapiens
  misc_RNA (1)...(19): siRNA sense strand
uugcaucgaugaaauugag

SEQ ID NO: 1156360 - RNA, 19 nt, Homo sapiens
  misc_RNA (1)...(19): siRNA sense strand
gaccauaaucaguguuaag

SEQ ID NO: 1156361 - RNA, 19 nt, Homo sapiens
  misc_RNA (1)...(19): siRNA sense strand
ugaaauugagaccauaauc

SEQ ID NO: 1156362 - RNA, 19 nt, Homo sapiens
  misc_RNA (1)...(19): siRNA sense strand
cccagaguauuucuaugug

SEQ ID NO: 1156363 - RNA, 19 nt, Homo sapiens
  misc_RNA (1)...(19): siRNA sense strand
gaauugcaggucugacgau

SEQ ID NO: 1156364 - RNA, 19 nt, Homo sapiens
  misc_RNA (1)...(19): siRNA sense strand
acucaucaccuuccacuca

SEQ ID NO: 1156365 - RNA, 19 nt, Homo sapiens
  misc_RNA (1)...(19): siRNA sense strand
gcuuacaaugauuaccuua

SEQ ID NO: 1156366 - RNA, 19 nt, Homo sapiens
  misc_RNA (1)...(19): siRNA sense strand
ggcuuacaaugauuaccuu

SEQ ID NO: 1156367 - RNA, 19 nt, Homo sapiens
  misc_RNA (1)...(19): siRNA sense strand
ggguagcuauccgacaugu

SEQ ID NO: 1156368 - RNA, 19 nt, Homo sapiens
  misc_RNA (1)...(19): siRNA sense strand
agaccauaaucaguguuaa

SEQ ID NO: 1156369 - RNA, 19 nt, Homo sapiens
  misc_RNA (1)...(19): siRNA sense strand
aagaauugcaucgaugaaa

SEQ ID NO: 1156370 - RNA, 19 nt, Homo sapiens
  misc_RNA (1)...(19): siRNA sense strand
ucagugcuguggaaaagaa

SEQ ID NO: 1156371 - RNA, 19 nt, Homo sapiens
  misc_RNA (1)...(19): siRNA sense strand
ugacaaagcuggagaagga

SEQ ID NO: 1156372 - RNA, 19 nt, Homo sapiens
  misc_RNA (1)...(19): siRNA sense strand
ggacagagaccacccacua

SEQ ID NO: 1156373 - RNA, 19 nt, Homo sapiens
  misc_RNA (1)...(19): siRNA sense strand
gcacaugggcugcgucuuu

SEQ ID NO: 1156374 - RNA, 19 nt, Homo sapiens
  misc_RNA (1)...(19): siRNA sense strand
ccagugcgcuucaagauga

SEQ ID NO: 1156375 - RNA, 19 nt, Homo sapiens
  misc_RNA (1)...(19): siRNA sense strand
gaacaucugcuuugagguu

SEQ ID NO: 1156376 - RNA, 19 nt, Homo sapiens
  misc_RNA (1)...(19): siRNA sense strand
ccacuacccugagaacuuu

SEQ ID NO: 1156377 - RNA, 19 nt, Homo sapiens
  misc_RNA (1)...(19): siRNA sense strand
ggacugggaccgaguaaga

SEQ ID NO: 1156378 - RNA, 19 nt, Homo sapiens
  misc_RNA (1)...(19): siRNA sense strand
ggagaucgcacagauguuu

SEQ ID NO: 1156379 - RNA, 19 nt, Homo sapiens
  misc_RNA (1)...(19): siRNA sense strand
gcacggcuacuauaagauu

SEQ ID NO: 1156380 - RNA, 19 nt, Homo sapiens
  misc_RNA (1)...(19): siRNA sense strand
ccaucaagcucuacaagga

SEQ ID NO: 1156381 - RNA, 19 nt, Homo sapiens
  misc_RNA (1)...(19): siRNA sense strand
caacaaaugggacaaagug

SEQ ID NO: 1156382 - RNA, 19 nt, Homo sapiens
  misc_RNA (1)...(19): siRNA sense strand
gugcacggcuacuauaaga

SEQ ID NO: 1156383 - RNA, 19 nt, Homo sapiens
  misc_RNA (1)...(19): siRNA sense strand
gggagaacaucugcuuuga

SEQ ID NO: 1156384 - RNA, 19 nt, Homo sapiens
  misc_RNA (1)...(19): siRNA sense strand
gaagguggccugcaacaag

SEQ ID NO: 1156385 - RNA, 19 nt, Homo sapiens
  misc_RNA (1)...(19): siRNA sense strand
gaggagagccugcccacuu

SEQ ID NO: 1156386 - RNA, 19 nt, Homo sapiens
  misc_RNA (1)...(19): siRNA sense strand
ggagagacaugauaaaauc

SEQ ID NO: 1156387 - RNA, 19 nt, Homo sapiens
  misc_RNA (1)...(19): siRNA sense strand
ucaccagguuucagacuaa

SEQ ID NO: 1156388 - RNA, 19 nt, Homo sapiens
  misc_RNA (1)...(19): siRNA sense strand
caacaagugcaacguggua

SEQ ID NO: 1156389 - RNA, 19 nt, Homo sapiens
  misc_RNA (1)...(19): siRNA sense strand
agacagaucucuccuuuug

SEQ ID NO: 1156390 - RNA, 19 nt, Homo sapiens
  misc_RNA (1)...(19): siRNA sense strand
guacaucaccagacacuuc

SEQ ID NO: 1156391 - RNA, 19 nt, Homo sapiens
  misc_RNA (1)...(19): siRNA sense strand
cgaguacacugggaccuuu

SEQ ID NO: 1156392 - RNA, 19 nt, Homo sapiens
  misc_RNA (1)...(19): siRNA sense strand
gcagugcaguggagaagca

SEQ ID NO: 1156393 - RNA, 19 nt, Homo sapiens
  misc_RNA (1)...(19): siRNA sense strand
uuagacagcucucucaucu

SEQ ID NO: 1156394 - RNA, 19 nt, Homo sapiens
  misc_RNA (1)...(19): siRNA sense strand
ccagguuucagacuaaaua

SEQ ID NO: 1156395 - RNA, 19 nt, Homo sapiens
  misc_RNA (1)...(19): siRNA sense strand
gagccuguccucacacaaa

SEQ ID NO: 1156396 - RNA, 19 nt, Homo sapiens
  misc_RNA (1)...(19): siRNA sense strand
ggaccgaguaagaguguuu

SEQ ID NO: 1156397 - RNA, 19 nt, Homo sapiens
  misc_RNA (1)...(19): siRNA sense strand
agaagcagcugaaccugau

SEQ ID NO: 1156398 - RNA, 19 nt, Homo sapiens
  misc_RNA (1)...(19): siRNA sense strand
caagaugacgucugucugu

SEQ ID NO: 1156399 - RNA, 19 nt, Homo sapiens
  misc_RNA (1)...(19): siRNA sense strand
gccagugcguggaauguga

SEQ ID NO: 1156400 - RNA, 19 nt, Homo sapiens
  misc_RNA (1)...(19): siRNA sense strand
caccaucuccuucagaauu

SEQ ID NO: 1156401 - RNA, 19 nt, Homo sapiens
  misc_RNA (1)...(19): siRNA sense strand
cguggcggcucuaugagua

SEQ ID NO: 1156402 - RNA, 19 nt, Homo sapiens
  misc_RNA (1)...(19): siRNA sense strand
aggccaagguuaacacuga

SEQ ID NO: 1156403 - RNA, 19 nt, Homo sapiens
  misc_RNA (1)...(19): siRNA sense strand
ucaucacgcucauggagaa

SEQ ID NO: 1156404 - RNA, 19 nt, Homo sapiens
  misc_RNA (1)...(19): siRNA sense strand
gccacaagcaggaaagaaa

SEQ ID NO: 1156405 - RNA, 19 nt, Homo sapiens
  misc_RNA (1)...(19): siRNA sense strand
gcuucaagaugacgucugu

SEQ ID NO: 1156406 - RNA, 19 nt, Homo sapiens
  misc_RNA (1)...(19): siRNA sense strand
ccacagaggccgaauuagg

SEQ ID NO: 1156407 - RNA, 19 nt, Homo sapiens
  misc_RNA (1)...(19): siRNA sense strand
gguuaacacugacaaagac

SEQ ID NO: 1156408 - RNA, 19 nt, Homo sapiens
  misc_RNA (1)...(19): siRNA sense strand
cagcaucccugugcauauc

SEQ ID NO: 1156409 - RNA, 19 nt, Homo sapiens
  misc_RNA (1)...(19): siRNA sense strand
ugccacagaggccgaauua

SEQ ID NO: 1156410 - RNA, 19 nt, Homo sapiens
  misc_RNA (1)...(19): siRNA sense strand
gcauucaccagguuucaga

SEQ ID NO: 1156411 - RNA, 19 nt, Homo sapiens
  misc_RNA (1)...(19): siRNA sense strand
gggauucuguguggagaga

SEQ ID NO: 1156412 - RNA, 19 nt, Homo sapiens
  misc_RNA (1)...(19): siRNA sense strand
aggagagccugcccacuug

SEQ ID NO: 1156413 - RNA, 19 nt, Homo sapiens
  misc_RNA (1)...(19): siRNA sense strand
uggcauggaugaguugaug

SEQ ID NO: 1156414 - RNA, 19 nt, Homo sapiens
  misc_RNA (1)...(19): siRNA sense strand
gcugugcauucaccagguu

SEQ ID NO: 1156415 - RNA, 19 nt, Homo sapiens
  misc_RNA (1)...(19): siRNA sense strand
agacgaacccacccgacua

SEQ ID NO: 1156416 - RNA, 19 nt, Homo sapiens
  misc_RNA (1)...(19): siRNA sense strand
ugagaacuuugaccugaag

SEQ ID NO: 1156417 - RNA, 19 nt, Homo sapiens
  misc_RNA (1)...(19): siRNA sense strand
gagcuggaccugcgaaucg

SEQ ID NO: 1156418 - RNA, 19 nt, Homo sapiens
  misc_RNA (1)...(19): siRNA sense strand
ccagacggcccaaggacaa

SEQ ID NO: 1156419 - RNA, 19 nt, Homo sapiens
  misc_RNA (1)...(19): siRNA sense strand
ccugaacacuguggagaug

SEQ ID NO: 1156420 - RNA, 19 nt, Homo sapiens
  misc_RNA (1)...(19): siRNA sense strand
caaagacagaucucuccuu

SEQ ID NO: 1156421 - RNA, 19 nt, Homo sapiens
  misc_RNA (1)...(19): siRNA sense strand
cggagaagaaagaagcuaa

SEQ ID NO: 1156422 - RNA, 19 nt, Homo sapiens
  misc_RNA (1)...(19): siRNA sense strand
gcgaugagacgcagcacau

SEQ ID NO: 1156423 - RNA, 19 nt, Homo sapiens
  misc_RNA (1)...(19): siRNA sense strand
gaagacugugcucaugguu

SEQ ID NO: 1156424 - RNA, 19 nt, Homo sapiens
  misc_RNA (1)...(19): siRNA sense strand
uaacacugacaaagacaga

SEQ ID NO: 1156425 - RNA, 19 nt, Homo sapiens
  misc_RNA (1)...(19): siRNA sense strand
acagcucucucaucuccuu

SEQ ID NO: 1156426 - RNA, 19 nt, Homo sapiens
  misc_RNA (1)...(19): siRNA sense strand
ggaagguggccugcaacaa

SEQ ID NO: 1156427 - RNA, 19 nt, Homo sapiens
  misc_RNA (1)...(19): siRNA sense strand
ugauggaggugucuuucuc

SEQ ID NO: 1156428 - RNA, 19 nt, Homo sapiens
  misc_RNA (1)...(19): siRNA sense strand
gcauggaugaguugaugga

SEQ ID NO: 1156429 - RNA, 19 nt, Homo sapiens
  misc_RNA (1)...(19): siRNA sense strand
gagcaccaucuccuucaga

SEQ ID NO: 1156430 - RNA, 19 nt, Homo sapiens
  misc_RNA (1)...(19): siRNA sense strand
gauaaaauccaguccuuca

SEQ ID NO: 1156431 - RNA, 19 nt, Homo sapiens
  misc_RNA (1)...(19): siRNA sense strand
gauuuagacagcucucuca

SEQ ID NO: 1156432 - RNA, 19 nt, Homo sapiens
  misc_RNA (1)...(19): siRNA sense strand
agaaaggcaugggcugcaa

SEQ ID NO: 1156433 - RNA, 19 nt, Homo sapiens
  misc_RNA (1)...(19): siRNA sense strand
caagguuaacacugacaaa

SEQ ID NO: 1156434 - RNA, 19 nt, Homo sapiens
  misc_RNA (1)...(19): siRNA sense strand
gugcugcaggccaagguua

SEQ ID NO: 1156435 - RNA, 19 nt, Homo sapiens
  misc_RNA (1)...(19): siRNA sense strand
gugcauaucaacaacaucu

SEQ ID NO: 1156436 - RNA, 19 nt, Homo sapiens
  misc_RNA (1)...(19): siRNA sense strand
aggugaagaugcuggagaa

SEQ ID NO: 1156437 - RNA, 19 nt, Homo sapiens
  misc_RNA (1)...(19): siRNA sense strand
gcucaugguugcugaaaag

SEQ ID NO: 1156438 - RNA, 19 nt, Homo sapiens
  misc_RNA (1)...(19): siRNA sense strand
ggagaacaucugcuuugag

SEQ ID NO: 1156439 - RNA, 19 nt, Homo sapiens
  misc_RNA (1)...(19): siRNA sense strand
gcaucccugugcauaucaa

SEQ ID NO: 1156440 - RNA, 19 nt, Homo sapiens
  misc_RNA (1)...(19): siRNA sense strand
gccagcaucccugugcaua

SEQ ID NO: 1156441 - RNA, 19 nt, Homo sapiens
  misc_RNA (1)...(19): siRNA sense strand
gaagcgguuguuagcagaa

SEQ ID NO: 1156442 - RNA, 19 nt, Homo sapiens
  misc_RNA (1)...(19): siRNA sense strand
gggagccuguccucacaca

SEQ ID NO: 1156443 - RNA, 19 nt, Homo sapiens
  misc_RNA (1)...(19): siRNA sense strand
gauucuguguggagagaca

SEQ ID NO: 1156444 - RNA, 19 nt, Homo sapiens
  misc_RNA (1)...(19): siRNA sense strand
ccugcucaguccacgagua

SEQ ID NO: 1156445 - RNA, 19 nt, Homo sapiens
  misc_RNA (1)...(19): siRNA sense strand
guuguuagcagaagguauc

SEQ ID NO: 1156446 - RNA, 19 nt, Homo sapiens
  misc_RNA (1)...(19): siRNA sense strand
cugagaacuuugaccugaa

SEQ ID NO: 1156447 - RNA, 19 nt, Homo sapiens
  misc_RNA (1)...(19): siRNA sense strand
ugucuguggucacgugaug

SEQ ID NO: 1156448 - RNA, 19 nt, Homo sapiens
  misc_RNA (1)...(19): siRNA sense strand
caccagguuucagacuaaa

SEQ ID NO: 1156449 - RNA, 19 nt, Homo sapiens
  misc_RNA (1)...(19): siRNA sense strand
aguggaagguggccugcaa

SEQ ID NO: 1156450 - RNA, 19 nt, Homo sapiens
  misc_RNA (1)...(19): siRNA sense strand
uaaaauccaguccuucaaa

SEQ ID NO: 1156451 - RNA, 19 nt, Homo sapiens
  misc_RNA (1)...(19): siRNA sense strand
guguggagagacaugauaa

SEQ ID NO: 1156452 - RNA, 19 nt, Homo sapiens
  misc_RNA (1)...(19): siRNA sense strand
aagguggccugcaacaagu

SEQ ID NO: 1156453 - RNA, 19 nt, Homo sapiens
  misc_RNA (1)...(19): siRNA sense strand
gagcugguccuguggucau

SEQ ID NO: 1156454 - RNA, 19 nt, Homo sapiens
  misc_RNA (1)...(19): siRNA sense strand
gcugcccucuggaugacuu

SEQ ID NO: 1156455 - RNA, 19 nt, Homo sapiens
  misc_RNA (1)...(19): siRNA sense strand
acgcguggcggcucuauga

SEQ ID NO: 1156456 - RNA, 19 nt, Homo sapiens
  misc_RNA (1)...(19): siRNA sense strand
ggaaagaaaaggccaagca

SEQ ID NO: 1156457 - RNA, 19 nt, Homo sapiens
  misc_RNA (1)...(19): siRNA sense strand
cgggagaucgcacagaugu

SEQ ID NO: 1156458 - RNA, 19 nt, Homo sapiens
  misc_RNA (1)...(19): siRNA sense strand
ccacaacgaggcgcucuca

SEQ ID NO: 1156459 - RNA, 19 nt, Homo sapiens
  misc_RNA (1)...(19): siRNA sense strand
ggagaagaaagaagcuaac

SEQ ID NO: 1156460 - RNA, 19 nt, Homo sapiens
  misc_RNA (1)...(19): siRNA sense strand
acagaucucuccuuuugga

SEQ ID NO: 1156461 - RNA, 19 nt, Homo sapiens
  misc_RNA (1)...(19): siRNA sense strand
uccgagacaugaagaaagg

SEQ ID NO: 1156462 - RNA, 19 nt, Homo sapiens
  misc_RNA (1)...(19): siRNA sense strand
gcaccaucaagcucuacaa

SEQ ID NO: 1156463 - RNA, 19 nt, Homo sapiens
  misc_RNA (1)...(19): siRNA sense strand
ggaggccacaagcaggaaa

SEQ ID NO: 1156464 - RNA, 19 nt, Homo sapiens
  misc_RNA (1)...(19): siRNA sense strand
accaucuccuucagaauug

SEQ ID NO: 1156465 - RNA, 19 nt, Homo sapiens
  misc_RNA (1)...(19): siRNA sense strand
cacccacccuuccgagaca

SEQ ID NO: 1156466 - RNA, 19 nt, Homo sapiens
  misc_RNA (1)...(19): siRNA sense strand
ccagaacggcaccaucaag

SEQ ID NO: 1156467 - RNA, 19 nt, Homo sapiens
  misc_RNA (1)...(19): siRNA sense strand
uugcuggcauggaugaguu

SEQ ID NO: 1156468 - RNA, 19 nt, Homo sapiens
  misc_RNA (1)...(19): siRNA sense strand
ccaccaaccucggcaucgu

SEQ ID NO: 1156469 - RNA, 19 nt, Homo sapiens
  misc_RNA (1)...(19): siRNA sense strand
cgggaagaccguccucuca

SEQ ID NO: 1156470 - RNA, 19 nt, Homo sapiens
  misc_RNA (1)...(19): siRNA sense strand
gagaacaacucauuacuug

SEQ ID NO: 1156471 - RNA, 19 nt, Homo sapiens
  misc_RNA (1)...(19): siRNA sense strand
gaacaacucauuacuugaa

SEQ ID NO: 1156472 - RNA, 19 nt, Homo sapiens
  misc_RNA (1)...(19): siRNA sense strand
gaauuccacucuuugguuu

SEQ ID NO: 1156473 - RNA, 19 nt, Homo sapiens
  misc_RNA (1)...(19): siRNA sense strand
gaaacgcuggcaucaauua

SEQ ID NO: 1156474 - RNA, 19 nt, Homo sapiens
  misc_RNA (1)...(19): siRNA sense strand
gggaaacgcuggcaucaau

SEQ ID NO: 1156475 - RNA, 19 nt, Homo sapiens
  misc_RNA (1)...(19): siRNA sense strand
gagaagcgcucugucuuug

SEQ ID NO: 1156476 - RNA, 19 nt, Homo sapiens
  misc_RNA (1)...(19): siRNA sense strand
gagagcagccagaagaaua

SEQ ID NO: 1156477 - RNA, 19 nt, Homo sapiens
  misc_RNA (1)...(19): siRNA sense strand
uacaagaccuuccggaauu

SEQ ID NO: 1156478 - RNA, 19 nt, Homo sapiens
  misc_RNA (1)...(19): siRNA sense strand
gaucccugcugucaucuuu

SEQ ID NO: 1156479 - RNA, 19 nt, Homo sapiens
  misc_RNA (1)...(19): siRNA sense strand
ucaauuaucgggaguggua

SEQ ID NO: 1156480 - RNA, 19 nt, Homo sapiens
  misc_RNA (1)...(19): siRNA sense strand
ggagaacaacucauuacuu

SEQ ID NO: 1156481 - RNA, 19 nt, Homo sapiens
  misc_RNA (1)...(19): siRNA sense strand
gcagcuguccucaguauga

SEQ ID NO: 1156482 - RNA, 19 nt, Homo sapiens
  misc_RNA (1)...(19): siRNA sense strand
ggaauuccacucuuugguu

SEQ ID NO: 1156483 - RNA, 19 nt, Homo sapiens
  misc_RNA (1)...(19): siRNA sense strand
uggagaaggucuuucgaaa

SEQ ID NO: 1156484 - RNA, 19 nt, Homo sapiens
  misc_RNA (1)...(19): siRNA sense strand
gacggugguugccaucuuu

SEQ ID NO: 1156485 - RNA, 19 nt, Homo sapiens
  misc_RNA (1)...(19): siRNA sense strand
acaagaccuuccggaauua

SEQ ID NO: 1156486 - RNA, 19 nt, Homo sapiens
  misc_RNA (1)...(19): siRNA sense strand
gaacugucauuacgaccau

SEQ ID NO: 1156487 - RNA, 19 nt, Homo sapiens
  misc_RNA (1)...(19): siRNA sense strand
gggagucaguccaauagga

SEQ ID NO: 1156488 - RNA, 19 nt, Homo sapiens
  misc_RNA (1)...(19): siRNA sense strand
gacgaucccugcugucauc

SEQ ID NO: 1156489 - RNA, 19 nt, Homo sapiens
  misc_RNA (1)...(19): siRNA sense strand
caacuuggaaccaucuuug

SEQ ID NO: 1156490 - RNA, 19 nt, Homo sapiens
  misc_RNA (1)...(19): siRNA sense strand
caaccauccuguucaucuu

SEQ ID NO: 1156491 - RNA, 19 nt, Homo sapiens
  misc_RNA (1)...(19): siRNA sense strand
gcugucaucuuuaaguaca

SEQ ID NO: 1156492 - RNA, 19 nt, Homo sapiens
  misc_RNA (1)...(19): siRNA sense strand
cgagaagcgcucugucuuu

SEQ ID NO: 1156493 - RNA, 19 nt, Homo sapiens
  misc_RNA (1)...(19): siRNA sense strand
ggagucaguccaauaggaa

SEQ ID NO: 1156494 - RNA, 19 nt, Homo sapiens
  misc_RNA (1)...(19): siRNA sense strand
aagaagaggugggugaaau

SEQ ID NO: 1156495 - RNA, 19 nt, Homo sapiens
  misc_RNA (1)...(19): siRNA sense strand
acucuuugguuucuuauug

SEQ ID NO: 1156496 - RNA, 19 nt, Homo sapiens
  misc_RNA (1)...(19): siRNA sense strand
cggagcagcugaacaagca

SEQ ID NO: 1156497 - RNA, 19 nt, Homo sapiens
  misc_RNA (1)...(19): siRNA sense strand
cuuauuggcuggaauugga

SEQ ID NO: 1156498 - RNA, 19 nt, Homo sapiens
  misc_RNA (1)...(19): siRNA sense strand
gaagaggugggugaaauca

SEQ ID NO: 1156499 - RNA, 19 nt, Homo sapiens
  misc_RNA (1)...(19): siRNA sense strand
gaagcgcucugucuuugcu

SEQ ID NO: 1156500 - RNA, 19 nt, Homo sapiens
  misc_RNA (1)...(19): siRNA sense strand
ggaaaagcauugcaagagu

SEQ ID NO: 1156501 - RNA, 19 nt, Homo sapiens
  misc_RNA (1)...(19): siRNA sense strand
ccaacaaccugcgccugaa

SEQ ID NO: 1156502 - RNA, 19 nt, Homo sapiens
  misc_RNA (1)...(19): siRNA sense strand
gauccagcaugcucuugau

SEQ ID NO: 1156503 - RNA, 19 nt, Homo sapiens
  misc_RNA (1)...(19): siRNA sense strand
caacaucaucaacaaguuc

SEQ ID NO: 1156504 - RNA, 19 nt, Homo sapiens
  misc_RNA (1)...(19): siRNA sense strand
ggaguccauuuacuuugug

SEQ ID NO: 1156505 - RNA, 19 nt, Homo sapiens
  misc_RNA (1)...(19): siRNA sense strand
ggaaacgcuggcaucaauu

SEQ ID NO: 1156506 - RNA, 19 nt, Homo sapiens
  misc_RNA (1)...(19): siRNA sense strand
gaggacaacaucaucaaca

SEQ ID NO: 1156507 - RNA, 19 nt, Homo sapiens
  misc_RNA (1)...(19): siRNA sense strand
uauaugccaucuuuggaau

SEQ ID NO: 1156508 - RNA, 19 nt, Homo sapiens
  misc_RNA (1)...(19): siRNA sense strand
gacaacaucaucaacaagu

SEQ ID NO: 1156509 - RNA, 19 nt, Homo sapiens
  misc_RNA (1)...(19): siRNA sense strand
cugcugucaucuuuaagua

SEQ ID NO: 1156510 - RNA, 19 nt, Homo sapiens
  misc_RNA (1)...(19): siRNA sense strand
caagugagucagaccaaga

SEQ ID NO: 1156511 - RNA, 19 nt, Homo sapiens
  misc_RNA (1)...(19): siRNA sense strand
ggaaccaucuuugggaaaa

SEQ ID NO: 1156512 - RNA, 19 nt, Homo sapiens
  misc_RNA (1)...(19): siRNA sense strand
agaauaccaucgccuugga

SEQ ID NO: 1156513 - RNA, 19 nt, Homo sapiens
  misc_RNA (1)...(19): siRNA sense strand
ucccugcugucaucuuuaa

SEQ ID NO: 1156514 - RNA, 19 nt, Homo sapiens
  misc_RNA (1)...(19): siRNA sense strand
ggccggagcagcugaacaa

SEQ ID NO: 1156515 - RNA, 19 nt, Homo sapiens
  misc_RNA (1)...(19): siRNA sense strand
acaacaucaucaacaaguu

SEQ ID NO: 1156516 - RNA, 19 nt, Homo sapiens
  misc_RNA (1)...(19): siRNA sense strand
gagauuggcuacggguucu

SEQ ID NO: 1156517 - RNA, 19 nt, Homo sapiens
  misc_RNA (1)...(19): siRNA sense strand
guuggagaacggaaugaua

SEQ ID NO: 1156518 - RNA, 19 nt, Homo sapiens
  misc_RNA (1)...(19): siRNA sense strand
cuacaagaccuuccggaau

SEQ ID NO: 1156519 - RNA, 19 nt, Homo sapiens
  misc_RNA (1)...(19): siRNA sense strand
gcauuguguuugugacgau

SEQ ID NO: 1156520 - RNA, 19 nt, Homo sapiens
  misc_RNA (1)...(19): siRNA sense strand
gcccgaggacguucagaaa

SEQ ID NO: 1156521 - RNA, 19 nt, Homo sapiens
  misc_RNA (1)...(19): siRNA sense strand
cauuggagcagcccuuuga

SEQ ID NO: 1156522 - RNA, 19 nt, Homo sapiens
  misc_RNA (1)...(19): siRNA sense strand
ggacaacaucaucaacaag

SEQ ID NO: 1156523 - RNA, 19 nt, Homo sapiens
  misc_RNA (1)...(19): siRNA sense strand
agaggugggugaaaucaag

SEQ ID NO: 1156524 - RNA, 19 nt, Homo sapiens
  misc_RNA (1)...(19): siRNA sense strand
ucaguaugaucggagauug

SEQ ID NO: 1156525 - RNA, 19 nt, Homo sapiens
  misc_RNA (1)...(19): siRNA sense strand
uccacucuuugguuucuua

SEQ ID NO: 1156526 - RNA, 19 nt, Homo sapiens
  misc_RNA (1)...(19): siRNA sense strand
ggagaaggucuuucgaaaa

SEQ ID NO: 1156527 - RNA, 19 nt, Homo sapiens
  misc_RNA (1)...(19): siRNA sense strand
gugguggucuaccuuguca

SEQ ID NO: 1156528 - RNA, 19 nt, Homo sapiens
  misc_RNA (1)...(19): siRNA sense strand
aggacaacaucaucaacaa

SEQ ID NO: 1156529 - RNA, 19 nt, Homo sapiens
  misc_RNA (1)...(19): siRNA sense strand
uugcagcuguccucaguau

SEQ ID NO: 1156530 - RNA, 19 nt, Homo sapiens
  misc_RNA (1)...(19): siRNA sense strand
uaugccaucuuuggaauuc

SEQ ID NO: 1156531 - RNA, 19 nt, Homo sapiens
  misc_RNA (1)...(19): siRNA sense strand
gccggagaacaacucauua

SEQ ID NO: 1156532 - RNA, 19 nt, Homo sapiens
  misc_RNA (1)...(19): siRNA sense strand
agacggugguugccaucuu

SEQ ID NO: 1156533 - RNA, 19 nt, Homo sapiens
  misc_RNA (1)...(19): siRNA sense strand
ugaaggaggcaaaaucuuu

SEQ ID NO: 1156534 - RNA, 19 nt, Homo sapiens
  misc_RNA (1)...(19): siRNA sense strand
caucucaaccauccuguuc

SEQ ID NO: 1156535 - RNA, 19 nt, Homo sapiens
  misc_RNA (1)...(19): siRNA sense strand
gaaacucuuccaacaacag

SEQ ID NO: 1156536 - RNA, 19 nt, Homo sapiens
  misc_RNA (1)...(19): siRNA sense strand
caaugucacggcugaguuc

SEQ ID NO: 1156537 - RNA, 19 nt, Homo sapiens
  misc_RNA (1)...(19): siRNA sense strand
cagaguggaaggccaaugu

SEQ ID NO: 1156538 - RNA, 19 nt, Homo sapiens
  misc_RNA (1)...(19): siRNA sense strand
gcuacggguucuguccaaa

SEQ ID NO: 1156539 - RNA, 19 nt, Homo sapiens
  misc_RNA (1)...(19): siRNA sense strand
gagcacugaaggaggcaaa

SEQ ID NO: 1156540 - RNA, 19 nt, Homo sapiens
  misc_RNA (1)...(19): siRNA sense strand
ggguccaccuccagacuca

SEQ ID NO: 1156541 - RNA, 19 nt, Homo sapiens
  misc_RNA (1)...(19): siRNA sense strand
acggugggcuuuggugauu

SEQ ID NO: 1156542 - RNA, 19 nt, Homo sapiens
  misc_RNA (1)...(19): siRNA sense strand
guggagaaggucuuucgaa

SEQ ID NO: 1156543 - RNA, 19 nt, Homo sapiens
  misc_RNA (1)...(19): siRNA sense strand
gcgggagucaguccaauag

SEQ ID NO: 1156544 - RNA, 19 nt, Homo sapiens
  misc_RNA (1)...(19): siRNA sense strand
cucauuacuugaagacaga

SEQ ID NO: 1156545 - RNA, 19 nt, Homo sapiens
  misc_RNA (1)...(19): siRNA sense strand
cggaauuccugcgggauca

SEQ ID NO: 1156546 - RNA, 19 nt, Homo sapiens
  misc_RNA (1)...(19): siRNA sense strand
acaacucauuacuugaaga

SEQ ID NO: 1156547 - RNA, 19 nt, Homo sapiens
  misc_RNA (1)...(19): siRNA sense strand
ucucaaccauccuguucau

SEQ ID NO: 1156548 - RNA, 19 nt, Homo sapiens
  misc_RNA (1)...(19): siRNA sense strand
uuugagagcagccagaaga

SEQ ID NO: 1156549 - RNA, 19 nt, Homo sapiens
  misc_RNA (1)...(19): siRNA sense strand
gauacccacggacaccaaa

SEQ ID NO: 1156550 - RNA, 19 nt, Homo sapiens
  misc_RNA (1)...(19): siRNA sense strand
ccuccagacucaccaagag

SEQ ID NO: 1156551 - RNA, 19 nt, Homo sapiens
  misc_RNA (1)...(19): siRNA sense strand
agaccgucaugaaguggaa

SEQ ID NO: 1156552 - RNA, 19 nt, Homo sapiens
  misc_RNA (1)...(19): siRNA sense strand
ccaaugucacggcugaguu

SEQ ID NO: 1156553 - RNA, 19 nt, Homo sapiens
  misc_RNA (1)...(19): siRNA sense strand
gaguggaaggccaauguca

SEQ ID NO: 1156554 - RNA, 19 nt, Homo sapiens
  misc_RNA (1)...(19): siRNA sense strand
gcuugcagaccgucaugaa

SEQ ID NO: 1156555 - RNA, 19 nt, Homo sapiens
  misc_RNA (1)...(19): siRNA sense strand
uaucgggagugguauaagc

SEQ ID NO: 1156556 - RNA, 19 nt, Homo sapiens
  misc_RNA (1)...(19): siRNA sense strand
ucaaccauccuguucaucu

SEQ ID NO: 1156557 - RNA, 19 nt, Homo sapiens
  misc_RNA (1)...(19): siRNA sense strand
uuauaugccaucuuuggaa

SEQ ID NO: 1156558 - RNA, 19 nt, Homo sapiens
  misc_RNA (1)...(19): siRNA sense strand
ccgagaagcgcucugucuu

SEQ ID NO: 1156559 - RNA, 19 nt, Homo sapiens
  misc_RNA (1)...(19): siRNA sense strand
cacuggcggucuugucuuc

SEQ ID NO: 1156560 - RNA, 19 nt, Homo sapiens
  misc_RNA (1)...(19): siRNA sense strand
cagcuguccucaguaugau

SEQ ID NO: 1156561 - RNA, 19 nt, Homo sapiens
  misc_RNA (1)...(19): siRNA sense strand
acuugaagacagaaacuaa

SEQ ID NO: 1156562 - RNA, 19 nt, Homo sapiens
  misc_RNA (1)...(19): siRNA sense strand
ccgaggacguucagaaaau

SEQ ID NO: 1156563 - RNA, 19 nt, Homo sapiens
  misc_RNA (1)...(19): siRNA sense strand
gaccuugcccgaggacguu

SEQ ID NO: 1156564 - RNA, 19 nt, Homo sapiens
  misc_RNA (1)...(19): siRNA sense strand
caacaaccugcgccugaag

SEQ ID NO: 1156565 - RNA, 19 nt, Homo sapiens
  misc_RNA (1)...(19): siRNA sense strand
aaagaagaggugggugaaa

SEQ ID NO: 1156566 - RNA, 19 nt, Homo sapiens
  misc_RNA (1)...(19): siRNA sense strand
ggcuacggguucuguccaa

SEQ ID NO: 1156567 - RNA, 19 nt, Homo sapiens
  misc_RNA (1)...(19): siRNA sense strand
ccugcgggaucaugucugu

SEQ ID NO: 1156568 - RNA, 19 nt, Homo sapiens
  misc_RNA (1)...(19): siRNA sense strand
gagaacaacucauuacuug

SEQ ID NO: 1156569 - RNA, 19 nt, Homo sapiens
  misc_RNA (1)...(19): siRNA sense strand
gaacaacucauuacuugaa

SEQ ID NO: 1156570 - RNA, 19 nt, Homo sapiens
  misc_RNA (1)...(19): siRNA sense strand
gaauuccacucuuugguuu

SEQ ID NO: 1156571 - RNA, 19 nt, Homo sapiens
  misc_RNA (1)...(19): siRNA sense strand
gaaacgcuggcaucaauua

SEQ ID NO: 1156572 - RNA, 19 nt, Homo sapiens
  misc_RNA (1)...(19): siRNA sense strand
gggaaacgcuggcaucaau

SEQ ID NO: 1156573 - RNA, 19 nt, Homo sapiens
  misc_RNA (1)...(19): siRNA sense strand
gagaagcgcucugucuuug

SEQ ID NO: 1156574 - RNA, 19 nt, Homo sapiens
  misc_RNA (1)...(19): siRNA sense strand
gagagcagccagaagaaua

SEQ ID NO: 1156575 - RNA, 19 nt, Homo sapiens
  misc_RNA (1)...(19): siRNA sense strand
uacaagaccuuccggaauu

SEQ ID NO: 1156576 - RNA, 19 nt, Homo sapiens
  misc_RNA (1)...(19): siRNA sense strand
gaucccugcugucaucuuu

SEQ ID NO: 1156577 - RNA, 19 nt, Homo sapiens
  misc_RNA (1)...(19): siRNA sense strand
ucaauuaucgggaguggua

SEQ ID NO: 1156578 - RNA, 19 nt, Homo sapiens
  misc_RNA (1)...(19): siRNA sense strand
ggagaacaacucauuacuu

SEQ ID NO: 1156579 - RNA, 19 nt, Homo sapiens
  misc_RNA (1)...(19): siRNA sense strand
gcagcuguccucaguauga

SEQ ID NO: 1156580 - RNA, 19 nt, Homo sapiens
  misc_RNA (1)...(19): siRNA sense strand
ggaauuccacucuuugguu

SEQ ID NO: 1156581 - RNA, 19 nt, Homo sapiens
  misc_RNA (1)...(19): siRNA sense strand
uggagaaggucuuucgaaa

SEQ ID NO: 1156582 - RNA, 19 nt, Homo sapiens
  misc_RNA (1)...(19): siRNA sense strand
gacggugguugccaucuuu

SEQ ID NO: 1156583 - RNA, 19 nt, Homo sapiens
  misc_RNA (1)...(19): siRNA sense strand
acaagaccuuccggaauua

SEQ ID NO: 1156584 - RNA, 19 nt, Homo sapiens
  misc_RNA (1)...(19): siRNA sense strand
gaacugucauuacgaccau

SEQ ID NO: 1156585 - RNA, 19 nt, Homo sapiens
  misc_RNA (1)...(19): siRNA sense strand
gggagucaguccaauagga

SEQ ID NO: 1156586 - RNA, 19 nt, Homo sapiens
  misc_RNA (1)...(19): siRNA sense strand
gacgaucccugcugucauc

SEQ ID NO: 1156587 - RNA, 19 nt, Homo sapiens
  misc_RNA (1)...(19): siRNA sense strand
caacuuggaaccaucuuug

SEQ ID NO: 1156588 - RNA, 19 nt, Homo sapiens
  misc_RNA (1)...(19): siRNA sense strand
caaccauccuguucaucuu

SEQ ID NO: 1156589 - RNA, 19 nt, Homo sapiens
  misc_RNA (1)...(19): siRNA sense strand
gcugucaucuuuaaguaca

SEQ ID NO: 1156590 - RNA, 19 nt, Homo sapiens
  misc_RNA (1)...(19): siRNA sense strand
cgagaagcgcucugucuuu

SEQ ID NO: 1156591 - RNA, 19 nt, Homo sapiens
  misc_RNA (1)...(19): siRNA sense strand
ggagucaguccaauaggaa

SEQ ID NO: 1156592 - RNA, 19 nt, Homo sapiens
  misc_RNA (1)...(19): siRNA sense strand
aagaagaggugggugaaau

SEQ ID NO: 1156593 - RNA, 19 nt, Homo sapiens
  misc_RNA (1)...(19): siRNA sense strand
acucuuugguuucuuauug

SEQ ID NO: 1156594 - RNA, 19 nt, Homo sapiens
  misc_RNA (1)...(19): siRNA sense strand
cggagcagcugaacaagca

SEQ ID NO: 1156595 - RNA, 19 nt, Homo sapiens
  misc_RNA (1)...(19): siRNA sense strand
cuuauuggcuggaauugga

SEQ ID NO: 1156596 - RNA, 19 nt, Homo sapiens
  misc_RNA (1)...(19): siRNA sense strand
gaagaggugggugaaauca

SEQ ID NO: 1156597 - RNA, 19 nt, Homo sapiens
  misc_RNA (1)...(19): siRNA sense strand
gaagcgcucugucuuugcu

SEQ ID NO: 1156598 - RNA, 19 nt, Homo sapiens
  misc_RNA (1)...(19): siRNA sense strand
ggaaaagcauugcaagagu

SEQ ID NO: 1156599 - RNA, 19 nt, Homo sapiens
  misc_RNA (1)...(19): siRNA sense strand
ccaacaaccugcgccugaa

SEQ ID NO: 1156600 - RNA, 19 nt, Homo sapiens
  misc_RNA (1)...(19): siRNA sense strand
gauccagcaugcucuugau

SEQ ID NO: 1156601 - RNA, 19 nt, Homo sapiens
  misc_RNA (1)...(19): siRNA sense strand
caacaucaucaacaaguuc

SEQ ID NO: 1156602 - RNA, 19 nt, Homo sapiens
  misc_RNA (1)...(19): siRNA sense strand
ggaguccauuuacuuugug

SEQ ID NO: 1156603 - RNA, 19 nt, Homo sapiens
  misc_RNA (1)...(19): siRNA sense strand
ggaaacgcuggcaucaauu

SEQ ID NO: 1156604 - RNA, 19 nt, Homo sapiens
  misc_RNA (1)...(19): siRNA sense strand
gaggacaacaucaucaaca

SEQ ID NO: 1156605 - RNA, 19 nt, Homo sapiens
  misc_RNA (1)...(19): siRNA sense strand
uauaugccaucuuuggaau

SEQ ID NO: 1156606 - RNA, 19 nt, Homo sapiens
  misc_RNA (1)...(19): siRNA sense strand
gacaacaucaucaacaagu

SEQ ID NO: 1156607 - RNA, 19 nt, Homo sapiens
  misc_RNA (1)...(19): siRNA sense strand
cugcugucaucuuuaagua

SEQ ID NO: 1156608 - RNA, 19 nt, Homo sapiens
  misc_RNA (1)...(19): siRNA sense strand
caagugagucagaccaaga

SEQ ID NO: 1156609 - RNA, 19 nt, Homo sapiens
  misc_RNA (1)...(19): siRNA sense strand
ggaaccaucuuugggaaaa

SEQ ID NO: 1156610 - RNA, 19 nt, Homo sapiens
  misc_RNA (1)...(19): siRNA sense strand
agaauaccaucgccuugga

SEQ ID NO: 1156611 - RNA, 19 nt, Homo sapiens
  misc_RNA (1)...(19): siRNA sense strand
ucccugcugucaucuuuaa

SEQ ID NO: 1156612 - RNA, 19 nt, Homo sapiens
  misc_RNA (1)...(19): siRNA sense strand
ggccggagcagcugaacaa

SEQ ID NO: 1156613 - RNA, 19 nt, Homo sapiens
  misc_RNA (1)...(19): siRNA sense strand
acaacaucaucaacaaguu

SEQ ID NO: 1156614 - RNA, 19 nt, Homo sapiens
  misc_RNA (1)...(19): siRNA sense strand
gagauuggcuacggguucu

SEQ ID NO: 1156615 - RNA, 19 nt, Homo sapiens
  misc_RNA (1)...(19): siRNA sense strand
guuggagaacggaaugaua

SEQ ID NO: 1156616 - RNA, 19 nt, Homo sapiens
  misc_RNA (1)...(19): siRNA sense strand
cuacaagaccuuccggaau

SEQ ID NO: 1156617 - RNA, 19 nt, Homo sapiens
  misc_RNA (1)...(19): siRNA sense strand
gcauuguguuugugacgau

SEQ ID NO: 1156618 - RNA, 19 nt, Homo sapiens
  misc_RNA (1)...(19): siRNA sense strand
gcccgaggacguucagaaa

SEQ ID NO: 1156619 - RNA, 19 nt, Homo sapiens
  misc_RNA (1)...(19): siRNA sense strand
cauuggagcagcccuuuga

SEQ ID NO: 1156620 - RNA, 19 nt, Homo sapiens
  misc_RNA (1)...(19): siRNA sense strand
ggacaacaucaucaacaag

SEQ ID NO: 1156621 - RNA, 19 nt, Homo sapiens
  misc_RNA (1)...(19): siRNA sense strand
agaggugggugaaaucaag

SEQ ID NO: 1156622 - RNA, 19 nt, Homo sapiens
  misc_RNA (1)...(19): siRNA sense strand
ucaguaugaucggagauug

SEQ ID NO: 1156623 - RNA, 19 nt, Homo sapiens
  misc_RNA (1)...(19): siRNA sense strand
uccacucuuugguuucuua

SEQ ID NO: 1156624 - RNA, 19 nt, Homo sapiens
  misc_RNA (1)...(19): siRNA sense strand
ggagaaggucuuucgaaaa

SEQ ID NO: 1156625 - RNA, 19 nt, Homo sapiens
  misc_RNA (1)...(19): siRNA sense strand
gugguggucuaccuuguca

SEQ ID NO: 1156626 - RNA, 19 nt, Homo sapiens
  misc_RNA (1)...(19): siRNA sense strand
aggacaacaucaucaacaa

SEQ ID NO: 1156627 - RNA, 19 nt, Homo sapiens
  misc_RNA (1)...(19): siRNA sense strand
uugcagcuguccucaguau

SEQ ID NO: 1156628 - RNA, 19 nt, Homo sapiens
  misc_RNA (1)...(19): siRNA sense strand
uaugccaucuuuggaauuc

SEQ ID NO: 1156629 - RNA, 19 nt, Homo sapiens
  misc_RNA (1)...(19): siRNA sense strand
gccggagaacaacucauua

SEQ ID NO: 1156630 - RNA, 19 nt, Homo sapiens
  misc_RNA (1)...(19): siRNA sense strand
agacggugguugccaucuu

SEQ ID NO: 1156631 - RNA, 19 nt, Homo sapiens
  misc_RNA (1)...(19): siRNA sense strand
ugaaggaggcaaaaucuuu

SEQ ID NO: 1156632 - RNA, 19 nt, Homo sapiens
  misc_RNA (1)...(19): siRNA sense strand
caucucaaccauccuguuc

SEQ ID NO: 1156633 - RNA, 19 nt, Homo sapiens
  misc_RNA (1)...(19): siRNA sense strand
gaaacucuuccaacaacag

SEQ ID NO: 1156634 - RNA, 19 nt, Homo sapiens
  misc_RNA (1)...(19): siRNA sense strand
caaugucacggcugaguuc

SEQ ID NO: 1156635 - RNA, 19 nt, Homo sapiens
  misc_RNA (1)...(19): siRNA sense strand
cagaguggaaggccaaugu

SEQ ID NO: 1156636 - RNA, 19 nt, Homo sapiens
  misc_RNA (1)...(19): siRNA sense strand
gcuacggguucuguccaaa

SEQ ID NO: 1156637 - RNA, 19 nt, Homo sapiens
  misc_RNA (1)...(19): siRNA sense strand
gagcacugaaggaggcaaa

SEQ ID NO: 1156638 - RNA, 19 nt, Homo sapiens
  misc_RNA (1)...(19): siRNA sense strand
ggguccaccuccagacuca

SEQ ID NO: 1156639 - RNA, 19 nt, Homo sapiens
  misc_RNA (1)...(19): siRNA sense strand
acggugggcuuuggugauu

SEQ ID NO: 1156640 - RNA, 19 nt, Homo sapiens
  misc_RNA (1)...(19): siRNA sense strand
guggagaaggucuuucgaa

SEQ ID NO: 1156641 - RNA, 19 nt, Homo sapiens
  misc_RNA (1)...(19): siRNA sense strand
gcgggagucaguccaauag

SEQ ID NO: 1156642 - RNA, 19 nt, Homo sapiens
  misc_RNA (1)...(19): siRNA sense strand
cucauuacuugaagacaga

SEQ ID NO: 1156643 - RNA, 19 nt, Homo sapiens
  misc_RNA (1)...(19): siRNA sense strand
cggaauuccugcgggauca

SEQ ID NO: 1156644 - RNA, 19 nt, Homo sapiens
  misc_RNA (1)...(19): siRNA sense strand
acaacucauuacuugaaga

SEQ ID NO: 1156645 - RNA, 19 nt, Homo sapiens
  misc_RNA (1)...(19): siRNA sense strand
ucucaaccauccuguucau

SEQ ID NO: 1156646 - RNA, 19 nt, Homo sapiens
  misc_RNA (1)...(19): siRNA sense strand
uuugagagcagccagaaga

SEQ ID NO: 1156647 - RNA, 19 nt, Homo sapiens
  misc_RNA (1)...(19): siRNA sense strand
gauacccacggacaccaaa

SEQ ID NO: 1156648 - RNA, 19 nt, Homo sapiens
  misc_RNA (1)...(19): siRNA sense strand
ccuccagacucaccaagag

SEQ ID NO: 1156649 - RNA, 19 nt, Homo sapiens
  misc_RNA (1)...(19): siRNA sense strand
agaccgucaugaaguggaa

SEQ ID NO: 1156650 - RNA, 19 nt, Homo sapiens
  misc_RNA (1)...(19): siRNA sense strand
ccaaugucacggcugaguu

SEQ ID NO: 1156651 - RNA, 19 nt, Homo sapiens
  misc_RNA (1)...(19): siRNA sense strand
gaguggaaggccaauguca

SEQ ID NO: 1156652 - RNA, 19 nt, Homo sapiens
  misc_RNA (1)...(19): siRNA sense strand
gcuugcagaccgucaugaa

SEQ ID NO: 1156653 - RNA, 19 nt, Homo sapiens
  misc_RNA (1)...(19): siRNA sense strand
uaucgggagugguauaagc

SEQ ID NO: 1156654 - RNA, 19 nt, Homo sapiens
  misc_RNA (1)...(19): siRNA sense strand
ucaaccauccuguucaucu

SEQ ID NO: 1156655 - RNA, 19 nt, Homo sapiens
  misc_RNA (1)...(19): siRNA sense strand
uuauaugccaucuuuggaa

SEQ ID NO: 1156656 - RNA, 19 nt, Homo sapiens
  misc_RNA (1)...(19): siRNA sense strand
ccgagaagcgcucugucuu

SEQ ID NO: 1156657 - RNA, 19 nt, Homo sapiens
  misc_RNA (1)...(19): siRNA sense strand
cacuggcggucuugucuuc

SEQ ID NO: 1156658 - RNA, 19 nt, Homo sapiens
  misc_RNA (1)...(19): siRNA sense strand
cagcuguccucaguaugau

SEQ ID NO: 1156659 - RNA, 19 nt, Homo sapiens
  misc_RNA (1)...(19): siRNA sense strand
acuugaagacagaaacuaa

SEQ ID NO: 1156660 - RNA, 19 nt, Homo sapiens
  misc_RNA (1)...(19): siRNA sense strand
ccgaggacguucagaaaau

SEQ ID NO: 1156661 - RNA, 19 nt, Homo sapiens
  misc_RNA (1)...(19): siRNA sense strand
gaccuugcccgaggacguu

SEQ ID NO: 1156662 - RNA, 19 nt, Homo sapiens
  misc_RNA (1)...(19): siRNA sense strand
caacaaccugcgccugaag

SEQ ID NO: 1156663 - RNA, 19 nt, Homo sapiens
  misc_RNA (1)...(19): siRNA sense strand
aaagaagaggugggugaaa

SEQ ID NO: 1156664 - RNA, 19 nt, Homo sapiens
  misc_RNA (1)...(19): siRNA sense strand
ggcuacggguucuguccaa

SEQ ID NO: 1156665 - RNA, 19 nt, Homo sapiens
  misc_RNA (1)...(19): siRNA sense strand
ccugcgggaucaugucugu

SEQ ID NO: 1156666 - RNA, 19 nt, Homo sapiens
  misc_RNA (1)...(19): siRNA sense strand
gagaacaacucauuacuug

SEQ ID NO: 1156667 - RNA, 19 nt, Homo sapiens
  misc_RNA (1)...(19): siRNA sense strand
gaacaacucauuacuugaa

SEQ ID NO: 1156668 - RNA, 19 nt, Homo sapiens
  misc_RNA (1)...(19): siRNA sense strand
gaauuccacucuuugguuu

SEQ ID NO: 1156669 - RNA, 19 nt, Homo sapiens
  misc_RNA (1)...(19): siRNA sense strand
gaaacgcuggcaucaauua

SEQ ID NO: 1156670 - RNA, 19 nt, Homo sapiens
  misc_RNA (1)...(19): siRNA sense strand
gggaaacgcuggcaucaau

SEQ ID NO: 1156671 - RNA, 19 nt, Homo sapiens
  misc_RNA (1)...(19): siRNA sense strand
gagaagcgcucugucuuug

SEQ ID NO: 1156672 - RNA, 19 nt, Homo sapiens
  misc_RNA (1)...(19): siRNA sense strand
gagagcagccagaagaaua

SEQ ID NO: 1156673 - RNA, 19 nt, Homo sapiens
  misc_RNA (1)...(19): siRNA sense strand
uacaagaccuuccggaauu

SEQ ID NO: 1156674 - RNA, 19 nt, Homo sapiens
  misc_RNA (1)...(19): siRNA sense strand
gaucccugcugucaucuuu

SEQ ID NO: 1156675 - RNA, 19 nt, Homo sapiens
  misc_RNA (1)...(19): siRNA sense strand
ucaauuaucgggaguggua

SEQ ID NO: 1156676 - RNA, 19 nt, Homo sapiens
  misc_RNA (1)...(19): siRNA sense strand
ggagaacaacucauuacuu

SEQ ID NO: 1156677 - RNA, 19 nt, Homo sapiens
  misc_RNA (1)...(19): siRNA sense strand
gcagcuguccucaguauga

SEQ ID NO: 1156678 - RNA, 19 nt, Homo sapiens
  misc_RNA (1)...(19): siRNA sense strand
ggaauuccacucuuugguu

SEQ ID NO: 1156679 - RNA, 19 nt, Homo sapiens
  misc_RNA (1)...(19): siRNA sense strand
uggagaaggucuuucgaaa

SEQ ID NO: 1156680 - RNA, 19 nt, Homo sapiens
  misc_RNA (1)...(19): siRNA sense strand
gacggugguugccaucuuu

SEQ ID NO: 1156681 - RNA, 19 nt, Homo sapiens
  misc_RNA (1)...(19): siRNA sense strand
acaagaccuuccggaauua

SEQ ID NO: 1156682 - RNA, 19 nt, Homo sapiens
  misc_RNA (1)...(19): siRNA sense strand
gaacugucauuacgaccau

SEQ ID NO: 1156683 - RNA, 19 nt, Homo sapiens
  misc_RNA (1)...(19): siRNA sense strand
gggagucaguccaauagga

SEQ ID NO: 1156684 - RNA, 19 nt, Homo sapiens
  misc_RNA (1)...(19): siRNA sense strand
gacgaucccugcugucauc

SEQ ID NO: 1156685 - RNA, 19 nt, Homo sapiens
  misc_RNA (1)...(19): siRNA sense strand
caacuuggaaccaucuuug

SEQ ID NO: 1156686 - RNA, 19 nt, Homo sapiens
  misc_RNA (1)...(19): siRNA sense strand
caaccauccuguucaucuu

SEQ ID NO: 1156687 - RNA, 19 nt, Homo sapiens
  misc_RNA (1)...(19): siRNA sense strand
gcugucaucuuuaaguaca

SEQ ID NO: 1156688 - RNA, 19 nt, Homo sapiens
  misc_RNA (1)...(19): siRNA sense strand
cgagaagcgcucugucuuu

SEQ ID NO: 1156689 - RNA, 19 nt, Homo sapiens
  misc_RNA (1)...(19): siRNA sense strand
ggagucaguccaauaggaa

SEQ ID NO: 1156690 - RNA, 19 nt, Homo sapiens
  misc_RNA (1)...(19): siRNA sense strand
aagaagaggugggugaaau

SEQ ID NO: 1156691 - RNA, 19 nt, Homo sapiens
  misc_RNA (1)...(19): siRNA sense strand
acucuuugguuucuuauug

SEQ ID NO: 1156692 - RNA, 19 nt, Homo sapiens
  misc_RNA (1)...(19): siRNA sense strand
cggagcagcugaacaagca

SEQ ID NO: 1156693 - RNA, 19 nt, Homo sapiens
  misc_RNA (1)...(19): siRNA sense strand
cuuauuggcuggaauugga

SEQ ID NO: 1156694 - RNA, 19 nt, Homo sapiens
  misc_RNA (1)...(19): siRNA sense strand
gaagaggugggugaaauca

SEQ ID NO: 1156695 - RNA, 19 nt, Homo sapiens
  misc_RNA (1)...(19): siRNA sense strand
gaagcgcucugucuuugcu

SEQ ID NO: 1156696 - RNA, 19 nt, Homo sapiens
  misc_RNA (1)...(19): siRNA sense strand
ggaaaagcauugcaagagu

SEQ ID NO: 1156697 - RNA, 19 nt, Homo sapiens
  misc_RNA (1)...(19): siRNA sense strand
ccaacaaccugcgccugaa

SEQ ID NO: 1156698 - RNA, 19 nt, Homo sapiens
  misc_RNA (1)...(19): siRNA sense strand
gauccagcaugcucuugau

SEQ ID NO: 1156699 - RNA, 19 nt, Homo sapiens
  misc_RNA (1)...(19): siRNA sense strand
caacaucaucaacaaguuc

SEQ ID NO: 1156700 - RNA, 19 nt, Homo sapiens
  misc_RNA (1)...(19): siRNA sense strand
ggaguccauuuacuuugug

SEQ ID NO: 1156701 - RNA, 19 nt, Homo sapiens
  misc_RNA (1)...(19): siRNA sense strand
ggaaacgcuggcaucaauu

SEQ ID NO: 1156702 - RNA, 19 nt, Homo sapiens
  misc_RNA (1)...(19): siRNA sense strand
gaggacaacaucaucaaca

SEQ ID NO: 1156703 - RNA, 19 nt, Homo sapiens
  misc_RNA (1)...(19): siRNA sense strand
uauaugccaucuuuggaau

SEQ ID NO: 1156704 - RNA, 19 nt, Homo sapiens
  misc_RNA (1)...(19): siRNA sense strand
gacaacaucaucaacaagu

SEQ ID NO: 1156705 - RNA, 19 nt, Homo sapiens
  misc_RNA (1)...(19): siRNA sense strand
cugcugucaucuuuaagua

SEQ ID NO: 1156706 - RNA, 19 nt, Homo sapiens
  misc_RNA (1)...(19): siRNA sense strand
caagugagucagaccaaga

SEQ ID NO: 1156707 - RNA, 19 nt, Homo sapiens
  misc_RNA (1)...(19): siRNA sense strand
ggaaccaucuuugggaaaa

SEQ ID NO: 1156708 - RNA, 19 nt, Homo sapiens
  misc_RNA (1)...(19): siRNA sense strand
agaauaccaucgccuugga

SEQ ID NO: 1156709 - RNA, 19 nt, Homo sapiens
  misc_RNA (1)...(19): siRNA sense strand
ucccugcugucaucuuuaa

SEQ ID NO: 1156710 - RNA, 19 nt, Homo sapiens
  misc_RNA (1)...(19): siRNA sense strand
ggccggagcagcugaacaa

SEQ ID NO: 1156711 - RNA, 19 nt, Homo sapiens
  misc_RNA (1)...(19): siRNA sense strand
acaacaucaucaacaaguu

SEQ ID NO: 1156712 - RNA, 19 nt, Homo sapiens
  misc_RNA (1)...(19): siRNA sense strand
gagauuggcuacggguucu

SEQ ID NO: 1156713 - RNA, 19 nt, Homo sapiens
  misc_RNA (1)...(19): siRNA sense strand
guuggagaacggaaugaua

SEQ ID NO: 1156714 - RNA, 19 nt, Homo sapiens
  misc_RNA (1)...(19): siRNA sense strand
cuacaagaccuuccggaau

SEQ ID NO: 1156715 - RNA, 19 nt, Homo sapiens
  misc_RNA (1)...(19): siRNA sense strand
gcauuguguuugugacgau

SEQ ID NO: 1156716 - RNA, 19 nt, Homo sapiens
  misc_RNA (1)...(19): siRNA sense strand
gcccgaggacguucagaaa

SEQ ID NO: 1156717 - RNA, 19 nt, Homo sapiens
  misc_RNA (1)...(19): siRNA sense strand
cauuggagcagcccuuuga

SEQ ID NO: 1156718 - RNA, 19 nt, Homo sapiens
  misc_RNA (1)...(19): siRNA sense strand
ggacaacaucaucaacaag

SEQ ID NO: 1156719 - RNA, 19 nt, Homo sapiens
  misc_RNA (1)...(19): siRNA sense strand
agaggugggugaaaucaag

SEQ ID NO: 1156720 - RNA, 19 nt, Homo sapiens
  misc_RNA (1)...(19): siRNA sense strand
ucaguaugaucggagauug

SEQ ID NO: 1156721 - RNA, 19 nt, Homo sapiens
  misc_RNA (1)...(19): siRNA sense strand
uccacucuuugguuucuua

SEQ ID NO: 1156722 - RNA, 19 nt, Homo sapiens
  misc_RNA (1)...(19): siRNA sense strand
ggagaaggucuuucgaaaa

SEQ ID NO: 1156723 - RNA, 19 nt, Homo sapiens
  misc_RNA (1)...(19): siRNA sense strand
gugguggucuaccuuguca

SEQ ID NO: 1156724 - RNA, 19 nt, Homo sapiens
  misc_RNA (1)...(19): siRNA sense strand
aggacaacaucaucaacaa

SEQ ID NO: 1156725 - RNA, 19 nt, Homo sapiens
  misc_RNA (1)...(19): siRNA sense strand
uugcagcuguccucaguau

SEQ ID NO: 1156726 - RNA, 19 nt, Homo sapiens
  misc_RNA (1)...(19): siRNA sense strand
uaugccaucuuuggaauuc

SEQ ID NO: 1156727 - RNA, 19 nt, Homo sapiens
  misc_RNA (1)...(19): siRNA sense strand
gccggagaacaacucauua

SEQ ID NO: 1156728 - RNA, 19 nt, Homo sapiens
  misc_RNA (1)...(19): siRNA sense strand
agacggugguugccaucuu

SEQ ID NO: 1156729 - RNA, 19 nt, Homo sapiens
  misc_RNA (1)...(19): siRNA sense strand
ugaaggaggcaaaaucuuu

SEQ ID NO: 1156730 - RNA, 19 nt, Homo sapiens
  misc_RNA (1)...(19): siRNA sense strand
caucucaaccauccuguuc

SEQ ID NO: 1156731 - RNA, 19 nt, Homo sapiens
  misc_RNA (1)...(19): siRNA sense strand
gaaacucuuccaacaacag

SEQ ID NO: 1156732 - RNA, 19 nt, Homo sapiens
  misc_RNA (1)...(19): siRNA sense strand
caaugucacggcugaguuc

SEQ ID NO: 1156733 - RNA, 19 nt, Homo sapiens
  misc_RNA (1)...(19): siRNA sense strand
cagaguggaaggccaaugu

SEQ ID NO: 1156734 - RNA, 19 nt, Homo sapiens
  misc_RNA (1)...(19): siRNA sense strand
gcuacggguucuguccaaa

SEQ ID NO: 1156735 - RNA, 19 nt, Homo sapiens
  misc_RNA (1)...(19): siRNA sense strand
gagcacugaaggaggcaaa

SEQ ID NO: 1156736 - RNA, 19 nt, Homo sapiens
  misc_RNA (1)...(19): siRNA sense strand
ggguccaccuccagacuca

SEQ ID NO: 1156737 - RNA, 19 nt, Homo sapiens
  misc_RNA (1)...(19): siRNA sense strand
acggugggcuuuggugauu

SEQ ID NO: 1156738 - RNA, 19 nt, Homo sapiens
  misc_RNA (1)...(19): siRNA sense strand
guggagaaggucuuucgaa

SEQ ID NO: 1156739 - RNA, 19 nt, Homo sapiens
  misc_RNA (1)...(19): siRNA sense strand
gcgggagucaguccaauag

SEQ ID NO: 1156740 - RNA, 19 nt, Homo sapiens
  misc_RNA (1)...(19): siRNA sense strand
cucauuacuugaagacaga

SEQ ID NO: 1156741 - RNA, 19 nt, Homo sapiens
  misc_RNA (1)...(19): siRNA sense strand
cggaauuccugcgggauca

SEQ ID NO: 1156742 - RNA, 19 nt, Homo sapiens
  misc_RNA (1)...(19): siRNA sense strand
acaacucauuacuugaaga

SEQ ID NO: 1156743 - RNA, 19 nt, Homo sapiens
  misc_RNA (1)...(19): siRNA sense strand
ucucaaccauccuguucau

SEQ ID NO: 1156744 - RNA, 19 nt, Homo sapiens
  misc_RNA (1)...(19): siRNA sense strand
uuugagagcagccagaaga

SEQ ID NO: 1156745 - RNA, 19 nt, Homo sapiens
  misc_RNA (1)...(19): siRNA sense strand
gauacccacggacaccaaa

SEQ ID NO: 1156746 - RNA, 19 nt, Homo sapiens
  misc_RNA (1)...(19): siRNA sense strand
ccuccagacucaccaagag

SEQ ID NO: 1156747 - RNA, 19 nt, Homo sapiens
  misc_RNA (1)...(19): siRNA sense strand
agaccgucaugaaguggaa

SEQ ID NO: 1156748 - RNA, 19 nt, Homo sapiens
  misc_RNA (1)...(19): siRNA sense strand
ccaaugucacggcugaguu

SEQ ID NO: 1156749 - RNA, 19 nt, Homo sapiens
  misc_RNA (1)...(19): siRNA sense strand
gaguggaaggccaauguca

SEQ ID NO: 1156750 - RNA, 19 nt, Homo sapiens
  misc_RNA (1)...(19): siRNA sense strand
gcuugcagaccgucaugaa

SEQ ID NO: 1156751 - RNA, 19 nt, Homo sapiens
  misc_RNA (1)...(19): siRNA sense strand
uaucgggagugguauaagc

SEQ ID NO: 1156752 - RNA, 19 nt, Homo sapiens
  misc_RNA (1)...(19): siRNA sense strand
ucaaccauccuguucaucu

SEQ ID NO: 1156753 - RNA, 19 nt, Homo sapiens
  misc_RNA (1)...(19): siRNA sense strand
uuauaugccaucuuuggaa

SEQ ID NO: 1156754 - RNA, 19 nt, Homo sapiens
  misc_RNA (1)...(19): siRNA sense strand
ccgagaagcgcucugucuu

SEQ ID NO: 1156755 - RNA, 19 nt, Homo sapiens
  misc_RNA (1)...(19): siRNA sense strand
cacuggcggucuugucuuc

SEQ ID NO: 1156756 - RNA, 19 nt, Homo sapiens
  misc_RNA (1)...(19): siRNA sense strand
cagcuguccucaguaugau

SEQ ID NO: 1156757 - RNA, 19 nt, Homo sapiens
  misc_RNA (1)...(19): siRNA sense strand
acuugaagacagaaacuaa

SEQ ID NO: 1156758 - RNA, 19 nt, Homo sapiens
  misc_RNA (1)...(19): siRNA sense strand
ccgaggacguucagaaaau

SEQ ID NO: 1156759 - RNA, 19 nt, Homo sapiens
  misc_RNA (1)...(19): siRNA sense strand
gaccuugcccgaggacguu

SEQ ID NO: 1156760 - RNA, 19 nt, Homo sapiens
  misc_RNA (1)...(19): siRNA sense strand
caacaaccugcgccugaag

SEQ ID NO: 1156761 - RNA, 19 nt, Homo sapiens
  misc_RNA (1)...(19): siRNA sense strand
aaagaagaggugggugaaa

SEQ ID NO: 1156762 - RNA, 19 nt, Homo sapiens
  misc_RNA (1)...(19): siRNA sense strand
ggcuacggguucuguccaa

SEQ ID NO: 1156763 - RNA, 19 nt, Homo sapiens
  misc_RNA (1)...(19): siRNA sense strand
ccugcgggaucaugucugu

SEQ ID NO: 1156764 - RNA, 19 nt, Homo sapiens
  misc_RNA (1)...(19): siRNA sense strand
gaagagagauugaaaccaa

SEQ ID NO: 1156765 - RNA, 19 nt, Homo sapiens
  misc_RNA (1)...(19): siRNA sense strand
ggaaagaaguaguugucua

SEQ ID NO: 1156766 - RNA, 19 nt, Homo sapiens
  misc_RNA (1)...(19): siRNA sense strand
ggacaggcaucuuuguuug

SEQ ID NO: 1156767 - RNA, 19 nt, Homo sapiens
  misc_RNA (1)...(19): siRNA sense strand
acagggagcucaauucaaa

SEQ ID NO: 1156768 - RNA, 19 nt, Homo sapiens
  misc_RNA (1)...(19): siRNA sense strand
agaaagugcuggaaauaaa

SEQ ID NO: 1156769 - RNA, 19 nt, Homo sapiens
  misc_RNA (1)...(19): siRNA sense strand
gcacaucaauagucuaaca

SEQ ID NO: 1156770 - RNA, 19 nt, Homo sapiens
  misc_RNA (1)...(19): siRNA sense strand
gcaaaccuguugaugagaa

SEQ ID NO: 1156771 - RNA, 19 nt, Homo sapiens
  misc_RNA (1)...(19): siRNA sense strand
ccacaaauaccaccucuaa

SEQ ID NO: 1156772 - RNA, 19 nt, Homo sapiens
  misc_RNA (1)...(19): siRNA sense strand
gaacuucguuuagaggauu

SEQ ID NO: 1156773 - RNA, 19 nt, Homo sapiens
  misc_RNA (1)...(19): siRNA sense strand
gaugaagauucccuuguuu

SEQ ID NO: 1156774 - RNA, 19 nt, Homo sapiens
  misc_RNA (1)...(19): siRNA sense strand
gaacaaccaaccuaagauu

SEQ ID NO: 1156775 - RNA, 19 nt, Homo sapiens
  misc_RNA (1)...(19): siRNA sense strand
ucacuaagguugguuacua

SEQ ID NO: 1156776 - RNA, 19 nt, Homo sapiens
  misc_RNA (1)...(19): siRNA sense strand
uggcacaacuucaacauuu

SEQ ID NO: 1156777 - RNA, 19 nt, Homo sapiens
  misc_RNA (1)...(19): siRNA sense strand
gaaggaagcagugaagaaa

SEQ ID NO: 1156778 - RNA, 19 nt, Homo sapiens
  misc_RNA (1)...(19): siRNA sense strand
gcagaccaauacuggauuu

SEQ ID NO: 1156779 - RNA, 19 nt, Homo sapiens
  misc_RNA (1)...(19): siRNA sense strand
cuacuuagaugauaaccaa

SEQ ID NO: 1156780 - RNA, 19 nt, Homo sapiens
  misc_RNA (1)...(19): siRNA sense strand
ggagagagauuuaguuucc

SEQ ID NO: 1156781 - RNA, 19 nt, Homo sapiens
  misc_RNA (1)...(19): siRNA sense strand
gaaggaagagagauugaaa

SEQ ID NO: 1156782 - RNA, 19 nt, Homo sapiens
  misc_RNA (1)...(19): siRNA sense strand
ugaaggagaugugaauuug

SEQ ID NO: 1156783 - RNA, 19 nt, Homo sapiens
  misc_RNA (1)...(19): siRNA sense strand
gaaagguuaugguucaauc

SEQ ID NO: 1156784 - RNA, 19 nt, Homo sapiens
  misc_RNA (1)...(19): siRNA sense strand
ggucaaagcuggaguuagc

SEQ ID NO: 1156785 - RNA, 19 nt, Homo sapiens
  misc_RNA (1)...(19): siRNA sense strand
gugaagggcuaaauaggaa

SEQ ID NO: 1156786 - RNA, 19 nt, Homo sapiens
  misc_RNA (1)...(19): siRNA sense strand
caacuggcuuuggcaauuu

SEQ ID NO: 1156787 - RNA, 19 nt, Homo sapiens
  misc_RNA (1)...(19): siRNA sense strand
uuacuacaccuacucauua

SEQ ID NO: 1156788 - RNA, 19 nt, Homo sapiens
  misc_RNA (1)...(19): siRNA sense strand
ggaggccucuuuggaaauu

SEQ ID NO: 1156789 - RNA, 19 nt, Homo sapiens
  misc_RNA (1)...(19): siRNA sense strand
ggaccagucucuucucauc

SEQ ID NO: 1156790 - RNA, 19 nt, Homo sapiens
  misc_RNA (1)...(19): siRNA sense strand
ccagaaggcucuuacuaca

SEQ ID NO: 1156791 - RNA, 19 nt, Homo sapiens
  misc_RNA (1)...(19): siRNA sense strand
ccaagaagagcauuaagaa

SEQ ID NO: 1156792 - RNA, 19 nt, Homo sapiens
  misc_RNA (1)...(19): siRNA sense strand
gaagagcauuaagaaguug

SEQ ID NO: 1156793 - RNA, 19 nt, Homo sapiens
  misc_RNA (1)...(19): siRNA sense strand
ggaaggaagcagugaagaa

SEQ ID NO: 1156794 - RNA, 19 nt, Homo sapiens
  misc_RNA (1)...(19): siRNA sense strand
aaacaugcgugcugcuuug

SEQ ID NO: 1156795 - RNA, 19 nt, Homo sapiens
  misc_RNA (1)...(19): siRNA sense strand
ccaggaggauuguuuggaa

SEQ ID NO: 1156796 - RNA, 19 nt, Homo sapiens
  misc_RNA (1)...(19): siRNA sense strand
gauaucaacuaugaaggaa

SEQ ID NO: 1156797 - RNA, 19 nt, Homo sapiens
  misc_RNA (1)...(19): siRNA sense strand
ggaguuuggccaacagaua

SEQ ID NO: 1156798 - RNA, 19 nt, Homo sapiens
  misc_RNA (1)...(19): siRNA sense strand
gcacccagcagguauuauu

SEQ ID NO: 1156799 - RNA, 19 nt, Homo sapiens
  misc_RNA (1)...(19): siRNA sense strand
ggaaauaaacacagcaaca

SEQ ID NO: 1156800 - RNA, 19 nt, Homo sapiens
  misc_RNA (1)...(19): siRNA sense strand
agaagagcauuaagaaguu

SEQ ID NO: 1156801 - RNA, 19 nt, Homo sapiens
  misc_RNA (1)...(19): siRNA sense strand
gcacuaacauaaguaccaa

SEQ ID NO: 1156802 - RNA, 19 nt, Homo sapiens
  misc_RNA (1)...(19): siRNA sense strand
ggaaacagggagcucaauu

SEQ ID NO: 1156803 - RNA, 19 nt, Homo sapiens
  misc_RNA (1)...(19): siRNA sense strand
uaucaacuaugaaggaaga

SEQ ID NO: 1156804 - RNA, 19 nt, Homo sapiens
  misc_RNA (1)...(19): siRNA sense strand
ccagaucgccuugcugaua

SEQ ID NO: 1156805 - RNA, 19 nt, Homo sapiens
  misc_RNA (1)...(19): siRNA sense strand
gaacuaguacaacuggauu

SEQ ID NO: 1156806 - RNA, 19 nt, Homo sapiens
  misc_RNA (1)...(19): siRNA sense strand
gaaacagggagcucaauuc

SEQ ID NO: 1156807 - RNA, 19 nt, Homo sapiens
  misc_RNA (1)...(19): siRNA sense strand
gaagaaggaagagagauug

SEQ ID NO: 1156808 - RNA, 19 nt, Homo sapiens
  misc_RNA (1)...(19): siRNA sense strand
guaccaagcaccaguguau

SEQ ID NO: 1156809 - RNA, 19 nt, Homo sapiens
  misc_RNA (1)...(19): siRNA sense strand
uaagcaaaccuguugauga

SEQ ID NO: 1156810 - RNA, 19 nt, Homo sapiens
  misc_RNA (1)...(19): siRNA sense strand
cuacugggacuacuauuaa

SEQ ID NO: 1156811 - RNA, 19 nt, Homo sapiens
  misc_RNA (1)...(19): siRNA sense strand
gcaagucacuagaggaacu

SEQ ID NO: 1156812 - RNA, 19 nt, Homo sapiens
  misc_RNA (1)...(19): siRNA sense strand
guugaagacugcuccuuug

SEQ ID NO: 1156813 - RNA, 19 nt, Homo sapiens
  misc_RNA (1)...(19): siRNA sense strand
uugcugauaucaacuauga

SEQ ID NO: 1156814 - RNA, 19 nt, Homo sapiens
  misc_RNA (1)...(19): siRNA sense strand
uaggaaggcugaaguuaca

SEQ ID NO: 1156815 - RNA, 19 nt, Homo sapiens
  misc_RNA (1)...(19): siRNA sense strand
ugauaccauuguugcauua

SEQ ID NO: 1156816 - RNA, 19 nt, Homo sapiens
  misc_RNA (1)...(19): siRNA sense strand
cuacaccuacucauuauaa

SEQ ID NO: 1156817 - RNA, 19 nt, Homo sapiens
  misc_RNA (1)...(19): siRNA sense strand
acaaauaccagugggaaua

SEQ ID NO: 1156818 - RNA, 19 nt, Homo sapiens
  misc_RNA (1)...(19): siRNA sense strand
guacagauacuauggucaa

SEQ ID NO: 1156819 - RNA, 19 nt, Homo sapiens
  misc_RNA (1)...(19): siRNA sense strand
gagcauccgucuaaaacua

SEQ ID NO: 1156820 - RNA, 19 nt, Homo sapiens
  misc_RNA (1)...(19): siRNA sense strand
uagaggaacuucguuuaga

SEQ ID NO: 1156821 - RNA, 19 nt, Homo sapiens
  misc_RNA (1)...(19): siRNA sense strand
caacagaaucagcagacua

SEQ ID NO: 1156822 - RNA, 19 nt, Homo sapiens
  misc_RNA (1)...(19): siRNA sense strand
uguuuaaggucucccauuu

SEQ ID NO: 1156823 - RNA, 19 nt, Homo sapiens
  misc_RNA (1)...(19): siRNA sense strand
gaguuuggccaacagauaa

SEQ ID NO: 1156824 - RNA, 19 nt, Homo sapiens
  misc_RNA (1)...(19): siRNA sense strand
gguuaugguucaaucuauu

SEQ ID NO: 1156825 - RNA, 19 nt, Homo sapiens
  misc_RNA (1)...(19): siRNA sense strand
ggaugaccgagaagaaaua

SEQ ID NO: 1156826 - RNA, 19 nt, Homo sapiens
  misc_RNA (1)...(19): siRNA sense strand
gcaacaguguggaugauac

SEQ ID NO: 1156827 - RNA, 19 nt, Homo sapiens
  misc_RNA (1)...(19): siRNA sense strand
caagucacaucucuuugau

SEQ ID NO: 1156828 - RNA, 19 nt, Homo sapiens
  misc_RNA (1)...(19): siRNA sense strand
ugucagacccuaagaagaa

SEQ ID NO: 1156829 - RNA, 19 nt, Homo sapiens
  misc_RNA (1)...(19): siRNA sense strand
caacaccaugggauuauuu

SEQ ID NO: 1156830 - RNA, 19 nt, Homo sapiens
  misc_RNA (1)...(19): siRNA sense strand
ggcaauaacaagcuuacua

SEQ ID NO: 1156831 - RNA, 19 nt, Homo sapiens
  misc_RNA (1)...(19): siRNA sense strand
cagaucgccuugcugauau

SEQ ID NO: 1156832 - RNA, 19 nt, Homo sapiens
  misc_RNA (1)...(19): siRNA sense strand
gggaacaaccaaccuaaga

SEQ ID NO: 1156833 - RNA, 19 nt, Homo sapiens
  misc_RNA (1)...(19): siRNA sense strand
acaaauaccaccucuaauc

SEQ ID NO: 1156834 - RNA, 19 nt, Homo sapiens
  misc_RNA (1)...(19): siRNA sense strand
cagguauuauucucacuaa

SEQ ID NO: 1156835 - RNA, 19 nt, Homo sapiens
  misc_RNA (1)...(19): siRNA sense strand
agaugaagauucccuuguu

SEQ ID NO: 1156836 - RNA, 19 nt, Homo sapiens
  misc_RNA (1)...(19): siRNA sense strand
ccaagucacaucucuuuga

SEQ ID NO: 1156837 - RNA, 19 nt, Homo sapiens
  misc_RNA (1)...(19): siRNA sense strand
gcaauaacaagcuuacuac

SEQ ID NO: 1156838 - RNA, 19 nt, Homo sapiens
  misc_RNA (1)...(19): siRNA sense strand
gcaccaacaccaugggauu

SEQ ID NO: 1156839 - RNA, 19 nt, Homo sapiens
  misc_RNA (1)...(19): siRNA sense strand
aaacaaugccuuugcacaa

SEQ ID NO: 1156840 - RNA, 19 nt, Homo sapiens
  misc_RNA (1)...(19): siRNA sense strand
guacaaagaaguugaagac

SEQ ID NO: 1156841 - RNA, 19 nt, Homo sapiens
  misc_RNA (1)...(19): siRNA sense strand
gaaggagaugugaauuuga

SEQ ID NO: 1156842 - RNA, 19 nt, Homo sapiens
  misc_RNA (1)...(19): siRNA sense strand
gcauuugguucuagcaaca

SEQ ID NO: 1156843 - RNA, 19 nt, Homo sapiens
  misc_RNA (1)...(19): siRNA sense strand
aagcaaaccuguugaugag

SEQ ID NO: 1156844 - RNA, 19 nt, Homo sapiens
  misc_RNA (1)...(19): siRNA sense strand
aaauccagguggucucuuu

SEQ ID NO: 1156845 - RNA, 19 nt, Homo sapiens
  misc_RNA (1)...(19): siRNA sense strand
guguauuacugcuaugaaa

SEQ ID NO: 1156846 - RNA, 19 nt, Homo sapiens
  misc_RNA (1)...(19): siRNA sense strand
gaaauaaacacagcaacag

SEQ ID NO: 1156847 - RNA, 19 nt, Homo sapiens
  misc_RNA (1)...(19): siRNA sense strand
cagaaagugcuggaaauaa

SEQ ID NO: 1156848 - RNA, 19 nt, Homo sapiens
  misc_RNA (1)...(19): siRNA sense strand
agagagauuuaguuuccua

SEQ ID NO: 1156849 - RNA, 19 nt, Homo sapiens
  misc_RNA (1)...(19): siRNA sense strand
aaaucuagcuucaccaucu

SEQ ID NO: 1156850 - RNA, 19 nt, Homo sapiens
  misc_RNA (1)...(19): siRNA sense strand
cagcacaucaauagucuaa

SEQ ID NO: 1156851 - RNA, 19 nt, Homo sapiens
  misc_RNA (1)...(19): siRNA sense strand
ggauggagaugaagauucc

SEQ ID NO: 1156852 - RNA, 19 nt, Homo sapiens
  misc_RNA (1)...(19): siRNA sense strand
ggaggagcauccgucuaaa

SEQ ID NO: 1156853 - RNA, 19 nt, Homo sapiens
  misc_RNA (1)...(19): siRNA sense strand
caacuaugaaggaagauug

SEQ ID NO: 1156854 - RNA, 19 nt, Homo sapiens
  misc_RNA (1)...(19): siRNA sense strand
gcagguauuauucucacua

SEQ ID NO: 1156855 - RNA, 19 nt, Homo sapiens
  misc_RNA (1)...(19): siRNA sense strand
ccagcuaccuccacaagca

SEQ ID NO: 1156856 - RNA, 19 nt, Homo sapiens
  misc_RNA (1)...(19): siRNA sense strand
ucggaaagguuaugguuca

SEQ ID NO: 1156857 - RNA, 19 nt, Homo sapiens
  misc_RNA (1)...(19): siRNA sense strand
gaagaaccuuaauaauagc

SEQ ID NO: 1156858 - RNA, 19 nt, Homo sapiens
  misc_RNA (1)...(19): siRNA sense strand
ucaauagucuaacauacuc

SEQ ID NO: 1156859 - RNA, 19 nt, Homo sapiens
  misc_RNA (1)...(19): siRNA sense strand
caacugguacagauacuau

SEQ ID NO: 1156860 - RNA, 19 nt, Homo sapiens
  misc_RNA (1)...(19): siRNA sense strand
guucuuggguguuuaaggu

SEQ ID NO: 1156861 - RNA, 19 nt, Homo sapiens
  misc_RNA (1)...(19): siRNA sense strand
ggugaagggcuaaauagga

SEQ ID NO: 1156862 - RNA, 19 nt, Homo sapiens
  misc_RNA (1)...(19): siRNA sense strand
ccagcaggauggagaugaa

SEQ ID NO: 1156863 - RNA, 19 nt, Homo sapiens
  misc_RNA (1)...(19): siRNA sense strand
uggaagcaguuucaaggaa

SEQ ID NO: 1156864 - RNA, 19 nt, Homo sapiens
  misc_RNA (1)...(19): siRNA sense strand
gaagagagauugaaaccaa

SEQ ID NO: 1156865 - RNA, 19 nt, Homo sapiens
  misc_RNA (1)...(19): siRNA sense strand
ggaaagaaguaguugucua

SEQ ID NO: 1156866 - RNA, 19 nt, Homo sapiens
  misc_RNA (1)...(19): siRNA sense strand
ggacaggcaucuuuguuug

SEQ ID NO: 1156867 - RNA, 19 nt, Homo sapiens
  misc_RNA (1)...(19): siRNA sense strand
acagggagcucaauucaaa

SEQ ID NO: 1156868 - RNA, 19 nt, Homo sapiens
  misc_RNA (1)...(19): siRNA sense strand
agaaagugcuggaaauaaa

SEQ ID NO: 1156869 - RNA, 19 nt, Homo sapiens
  misc_RNA (1)...(19): siRNA sense strand
gcacaucaauagucuaaca

SEQ ID NO: 1156870 - RNA, 19 nt, Homo sapiens
  misc_RNA (1)...(19): siRNA sense strand
gcaaaccuguugaugagaa

SEQ ID NO: 1156871 - RNA, 19 nt, Homo sapiens
  misc_RNA (1)...(19): siRNA sense strand
ccacaaauaccaccucuaa

SEQ ID NO: 1156872 - RNA, 19 nt, Homo sapiens
  misc_RNA (1)...(19): siRNA sense strand
gaacuucguuuagaggauu

SEQ ID NO: 1156873 - RNA, 19 nt, Homo sapiens
  misc_RNA (1)...(19): siRNA sense strand
gaugaagauucccuuguuu

SEQ ID NO: 1156874 - RNA, 19 nt, Homo sapiens
  misc_RNA (1)...(19): siRNA sense strand
gaacaaccaaccuaagauu

SEQ ID NO: 1156875 - RNA, 19 nt, Homo sapiens
  misc_RNA (1)...(19): siRNA sense strand
ucacuaagguugguuacua

SEQ ID NO: 1156876 - RNA, 19 nt, Homo sapiens
  misc_RNA (1)...(19): siRNA sense strand
uggcacaacuucaacauuu

SEQ ID NO: 1156877 - RNA, 19 nt, Homo sapiens
  misc_RNA (1)...(19): siRNA sense strand
gaaggaagcagugaagaaa

SEQ ID NO: 1156878 - RNA, 19 nt, Homo sapiens
  misc_RNA (1)...(19): siRNA sense strand
gcagaccaauacuggauuu

SEQ ID NO: 1156879 - RNA, 19 nt, Homo sapiens
  misc_RNA (1)...(19): siRNA sense strand
cuacuuagaugauaaccaa

SEQ ID NO: 1156880 - RNA, 19 nt, Homo sapiens
  misc_RNA (1)...(19): siRNA sense strand
ggagagagauuuaguuucc

SEQ ID NO: 1156881 - RNA, 19 nt, Homo sapiens
  misc_RNA (1)...(19): siRNA sense strand
gaaggaagagagauugaaa

SEQ ID NO: 1156882 - RNA, 19 nt, Homo sapiens
  misc_RNA (1)...(19): siRNA sense strand
ugaaggagaugugaauuug

SEQ ID NO: 1156883 - RNA, 19 nt, Homo sapiens
  misc_RNA (1)...(19): siRNA sense strand
gaaagguuaugguucaauc

SEQ ID NO: 1156884 - RNA, 19 nt, Homo sapiens
  misc_RNA (1)...(19): siRNA sense strand
ggucaaagcuggaguuagc

SEQ ID NO: 1156885 - RNA, 19 nt, Homo sapiens
  misc_RNA (1)...(19): siRNA sense strand
gugaagggcuaaauaggaa

SEQ ID NO: 1156886 - RNA, 19 nt, Homo sapiens
  misc_RNA (1)...(19): siRNA sense strand
caacuggcuuuggcaauuu

SEQ ID NO: 1156887 - RNA, 19 nt, Homo sapiens
  misc_RNA (1)...(19): siRNA sense strand
uuacuacaccuacucauua

SEQ ID NO: 1156888 - RNA, 19 nt, Homo sapiens
  misc_RNA (1)...(19): siRNA sense strand
ggaggccucuuuggaaauu

SEQ ID NO: 1156889 - RNA, 19 nt, Homo sapiens
  misc_RNA (1)...(19): siRNA sense strand
ggaccagucucuucucauc

SEQ ID NO: 1156890 - RNA, 19 nt, Homo sapiens
  misc_RNA (1)...(19): siRNA sense strand
ccagaaggcucuuacuaca

SEQ ID NO: 1156891 - RNA, 19 nt, Homo sapiens
  misc_RNA (1)...(19): siRNA sense strand
ccaagaagagcauuaagaa

SEQ ID NO: 1156892 - RNA, 19 nt, Homo sapiens
  misc_RNA (1)...(19): siRNA sense strand
gaagagcauuaagaaguug

SEQ ID NO: 1156893 - RNA, 19 nt, Homo sapiens
  misc_RNA (1)...(19): siRNA sense strand
ggaaggaagcagugaagaa

SEQ ID NO: 1156894 - RNA, 19 nt, Homo sapiens
  misc_RNA (1)...(19): siRNA sense strand
aaacaugcgugcugcuuug

SEQ ID NO: 1156895 - RNA, 19 nt, Homo sapiens
  misc_RNA (1)...(19): siRNA sense strand
ccaggaggauuguuuggaa

SEQ ID NO: 1156896 - RNA, 19 nt, Homo sapiens
  misc_RNA (1)...(19): siRNA sense strand
gauaucaacuaugaaggaa

SEQ ID NO: 1156897 - RNA, 19 nt, Homo sapiens
  misc_RNA (1)...(19): siRNA sense strand
ggaguuuggccaacagaua

SEQ ID NO: 1156898 - RNA, 19 nt, Homo sapiens
  misc_RNA (1)...(19): siRNA sense strand
gcacccagcagguauuauu

SEQ ID NO: 1156899 - RNA, 19 nt, Homo sapiens
  misc_RNA (1)...(19): siRNA sense strand
ggaaauaaacacagcaaca

SEQ ID NO: 1156900 - RNA, 19 nt, Homo sapiens
  misc_RNA (1)...(19): siRNA sense strand
agaagagcauuaagaaguu

SEQ ID NO: 1156901 - RNA, 19 nt, Homo sapiens
  misc_RNA (1)...(19): siRNA sense strand
gcacuaacauaaguaccaa

SEQ ID NO: 1156902 - RNA, 19 nt, Homo sapiens
  misc_RNA (1)...(19): siRNA sense strand
ggaaacagggagcucaauu

SEQ ID NO: 1156903 - RNA, 19 nt, Homo sapiens
  misc_RNA (1)...(19): siRNA sense strand
uaucaacuaugaaggaaga

SEQ ID NO: 1156904 - RNA, 19 nt, Homo sapiens
  misc_RNA (1)...(19): siRNA sense strand
ccagaucgccuugcugaua

SEQ ID NO: 1156905 - RNA, 19 nt, Homo sapiens
  misc_RNA (1)...(19): siRNA sense strand
gaacuaguacaacuggauu

SEQ ID NO: 1156906 - RNA, 19 nt, Homo sapiens
  misc_RNA (1)...(19): siRNA sense strand
gaaacagggagcucaauuc

SEQ ID NO: 1156907 - RNA, 19 nt, Homo sapiens
  misc_RNA (1)...(19): siRNA sense strand
gaagaaggaagagagauug

SEQ ID NO: 1156908 - RNA, 19 nt, Homo sapiens
  misc_RNA (1)...(19): siRNA sense strand
guaccaagcaccaguguau

SEQ ID NO: 1156909 - RNA, 19 nt, Homo sapiens
  misc_RNA (1)...(19): siRNA sense strand
uaagcaaaccuguugauga

SEQ ID NO: 1156910 - RNA, 19 nt, Homo sapiens
  misc_RNA (1)...(19): siRNA sense strand
cuacugggacuacuauuaa

SEQ ID NO: 1156911 - RNA, 19 nt, Homo sapiens
  misc_RNA (1)...(19): siRNA sense strand
gcaagucacuagaggaacu

SEQ ID NO: 1156912 - RNA, 19 nt, Homo sapiens
  misc_RNA (1)...(19): siRNA sense strand
guugaagacugcuccuuug

SEQ ID NO: 1156913 - RNA, 19 nt, Homo sapiens
  misc_RNA (1)...(19): siRNA sense strand
uugcugauaucaacuauga

SEQ ID NO: 1156914 - RNA, 19 nt, Homo sapiens
  misc_RNA (1)...(19): siRNA sense strand
uaggaaggcugaaguuaca

SEQ ID NO: 1156915 - RNA, 19 nt, Homo sapiens
  misc_RNA (1)...(19): siRNA sense strand
ugauaccauuguugcauua

SEQ ID NO: 1156916 - RNA, 19 nt, Homo sapiens
  misc_RNA (1)...(19): siRNA sense strand
cuacaccuacucauuauaa

SEQ ID NO: 1156917 - RNA, 19 nt, Homo sapiens
  misc_RNA (1)...(19): siRNA sense strand
acaaauaccagugggaaua

SEQ ID NO: 1156918 - RNA, 19 nt, Homo sapiens
  misc_RNA (1)...(19): siRNA sense strand
guacagauacuauggucaa

SEQ ID NO: 1156919 - RNA, 19 nt, Homo sapiens
  misc_RNA (1)...(19): siRNA sense strand
gagcauccgucuaaaacua

SEQ ID NO: 1156920 - RNA, 19 nt, Homo sapiens
  misc_RNA (1)...(19): siRNA sense strand
uagaggaacuucguuuaga

SEQ ID NO: 1156921 - RNA, 19 nt, Homo sapiens
  misc_RNA (1)...(19): siRNA sense strand
caacagaaucagcagacua

SEQ ID NO: 1156922 - RNA, 19 nt, Homo sapiens
  misc_RNA (1)...(19): siRNA sense strand
uguuuaaggucucccauuu

SEQ ID NO: 1156923 - RNA, 19 nt, Homo sapiens
  misc_RNA (1)...(19): siRNA sense strand
gaguuuggccaacagauaa

SEQ ID NO: 1156924 - RNA, 19 nt, Homo sapiens
  misc_RNA (1)...(19): siRNA sense strand
gguuaugguucaaucuauu

SEQ ID NO: 1156925 - RNA, 19 nt, Homo sapiens
  misc_RNA (1)...(19): siRNA sense strand
ggaugaccgagaagaaaua

SEQ ID NO: 1156926 - RNA, 19 nt, Homo sapiens
  misc_RNA (1)...(19): siRNA sense strand
gcaacaguguggaugauac

SEQ ID NO: 1156927 - RNA, 19 nt, Homo sapiens
  misc_RNA (1)...(19): siRNA sense strand
caagucacaucucuuugau

SEQ ID NO: 1156928 - RNA, 19 nt, Homo sapiens
  misc_RNA (1)...(19): siRNA sense strand
ugucagacccuaagaagaa

SEQ ID NO: 1156929 - RNA, 19 nt, Homo sapiens
  misc_RNA (1)...(19): siRNA sense strand
caacaccaugggauuauuu

SEQ ID NO: 1156930 - RNA, 19 nt, Homo sapiens
  misc_RNA (1)...(19): siRNA sense strand
ggcaauaacaagcuuacua

SEQ ID NO: 1156931 - RNA, 19 nt, Homo sapiens
  misc_RNA (1)...(19): siRNA sense strand
cagaucgccuugcugauau

SEQ ID NO: 1156932 - RNA, 19 nt, Homo sapiens
  misc_RNA (1)...(19): siRNA sense strand
gggaacaaccaaccuaaga

SEQ ID NO: 1156933 - RNA, 19 nt, Homo sapiens
  misc_RNA (1)...(19): siRNA sense strand
acaaauaccaccucuaauc

SEQ ID NO: 1156934 - RNA, 19 nt, Homo sapiens
  misc_RNA (1)...(19): siRNA sense strand
cagguauuauucucacuaa

SEQ ID NO: 1156935 - RNA, 19 nt, Homo sapiens
  misc_RNA (1)...(19): siRNA sense strand
agaugaagauucccuuguu

SEQ ID NO: 1156936 - RNA, 19 nt, Homo sapiens
  misc_RNA (1)...(19): siRNA sense strand
ccaagucacaucucuuuga

SEQ ID NO: 1156937 - RNA, 19 nt, Homo sapiens
  misc_RNA (1)...(19): siRNA sense strand
gcaauaacaagcuuacuac

SEQ ID NO: 1156938 - RNA, 19 nt, Homo sapiens
  misc_RNA (1)...(19): siRNA sense strand
gcaccaacaccaugggauu

SEQ ID NO: 1156939 - RNA, 19 nt, Homo sapiens
  misc_RNA (1)...(19): siRNA sense strand
aaacaaugccuuugcacaa

SEQ ID NO: 1156940 - RNA, 19 nt, Homo sapiens
  misc_RNA (1)...(19): siRNA sense strand
guacaaagaaguugaagac

SEQ ID NO: 1156941 - RNA, 19 nt, Homo sapiens
  misc_RNA (1)...(19): siRNA sense strand
gaaggagaugugaauuuga

SEQ ID NO: 1156942 - RNA, 19 nt, Homo sapiens
  misc_RNA (1)...(19): siRNA sense strand
gcauuugguucuagcaaca

SEQ ID NO: 1156943 - RNA, 19 nt, Homo sapiens
  misc_RNA (1)...(19): siRNA sense strand
aagcaaaccuguugaugag

SEQ ID NO: 1156944 - RNA, 19 nt, Homo sapiens
  misc_RNA (1)...(19): siRNA sense strand
aaauccagguggucucuuu

SEQ ID NO: 1156945 - RNA, 19 nt, Homo sapiens
  misc_RNA (1)...(19): siRNA sense strand
guguauuacugcuaugaaa

SEQ ID NO: 1156946 - RNA, 19 nt, Homo sapiens
  misc_RNA (1)...(19): siRNA sense strand
gaaauaaacacagcaacag

SEQ ID NO: 1156947 - RNA, 19 nt, Homo sapiens
  misc_RNA (1)...(19): siRNA sense strand
cagaaagugcuggaaauaa

SEQ ID NO: 1156948 - RNA, 19 nt, Homo sapiens
  misc_RNA (1)...(19): siRNA sense strand
agagagauuuaguuuccua

SEQ ID NO: 1156949 - RNA, 19 nt, Homo sapiens
  misc_RNA (1)...(19): siRNA sense strand
aaaucuagcuucaccaucu

SEQ ID NO: 1156950 - RNA, 19 nt, Homo sapiens
  misc_RNA (1)...(19): siRNA sense strand
cagcacaucaauagucuaa

SEQ ID NO: 1156951 - RNA, 19 nt, Homo sapiens
  misc_RNA (1)...(19): siRNA sense strand
ggauggagaugaagauucc

SEQ ID NO: 1156952 - RNA, 19 nt, Homo sapiens
  misc_RNA (1)...(19): siRNA sense strand
ggaggagcauccgucuaaa

SEQ ID NO: 1156953 - RNA, 19 nt, Homo sapiens
  misc_RNA (1)...(19): siRNA sense strand
caacuaugaaggaagauug

SEQ ID NO: 1156954 - RNA, 19 nt, Homo sapiens
  misc_RNA (1)...(19): siRNA sense strand
gcagguauuauucucacua

SEQ ID NO: 1156955 - RNA, 19 nt, Homo sapiens
  misc_RNA (1)...(19): siRNA sense strand
ccagcuaccuccacaagca

SEQ ID NO: 1156956 - RNA, 19 nt, Homo sapiens
  misc_RNA (1)...(19): siRNA sense strand
ucggaaagguuaugguuca

SEQ ID NO: 1156957 - RNA, 19 nt, Homo sapiens
  misc_RNA (1)...(19): siRNA sense strand
gaagaaccuuaauaauagc

SEQ ID NO: 1156958 - RNA, 19 nt, Homo sapiens
  misc_RNA (1)...(19): siRNA sense strand
ucaauagucuaacauacuc

SEQ ID NO: 1156959 - RNA, 19 nt, Homo sapiens
  misc_RNA (1)...(19): siRNA sense strand
caacugguacagauacuau

SEQ ID NO: 1156960 - RNA, 19 nt, Homo sapiens
  misc_RNA (1)...(19): siRNA sense strand
guucuuggguguuuaaggu

SEQ ID NO: 1156961 - RNA, 19 nt, Homo sapiens
  misc_RNA (1)...(19): siRNA sense strand
ggugaagggcuaaauagga

SEQ ID NO: 1156962 - RNA, 19 nt, Homo sapiens
  misc_RNA (1)...(19): siRNA sense strand
ccagcaggauggagaugaa

SEQ ID NO: 1156963 - RNA, 19 nt, Homo sapiens
  misc_RNA (1)...(19): siRNA sense strand
uggaagcaguuucaaggaa

SEQ ID NO: 1156964 - RNA, 19 nt, Homo sapiens
  misc_RNA (1)...(19): siRNA sense strand
gaagagagauugaaaccaa

SEQ ID NO: 1156965 - RNA, 19 nt, Homo sapiens
  misc_RNA (1)...(19): siRNA sense strand
ggaaagaaguaguugucua

SEQ ID NO: 1156966 - RNA, 19 nt, Homo sapiens
  misc_RNA (1)...(19): siRNA sense strand
ggacaggcaucuuuguuug

SEQ ID NO: 1156967 - RNA, 19 nt, Homo sapiens
  misc_RNA (1)...(19): siRNA sense strand
acagggagcucaauucaaa

SEQ ID NO: 1156968 - RNA, 19 nt, Homo sapiens
  misc_RNA (1)...(19): siRNA sense strand
agaaagugcuggaaauaaa

SEQ ID NO: 1156969 - RNA, 19 nt, Homo sapiens
  misc_RNA (1)...(19): siRNA sense strand
gcacaucaauagucuaaca

SEQ ID NO: 1156970 - RNA, 19 nt, Homo sapiens
  misc_RNA (1)...(19): siRNA sense strand
gcaaaccuguugaugagaa

SEQ ID NO: 1156971 - RNA, 19 nt, Homo sapiens
  misc_RNA (1)...(19): siRNA sense strand
ccacaaauaccaccucuaa

SEQ ID NO: 1156972 - RNA, 19 nt, Homo sapiens
  misc_RNA (1)...(19): siRNA sense strand
gaacuucguuuagaggauu

SEQ ID NO: 1156973 - RNA, 19 nt, Homo sapiens
  misc_RNA (1)...(19): siRNA sense strand
gaugaagauucccuuguuu

SEQ ID NO: 1156974 - RNA, 19 nt, Homo sapiens
  misc_RNA (1)...(19): siRNA sense strand
gaacaaccaaccuaagauu

SEQ ID NO: 1156975 - RNA, 19 nt, Homo sapiens
  misc_RNA (1)...(19): siRNA sense strand
ucacuaagguugguuacua

SEQ ID NO: 1156976 - RNA, 19 nt, Homo sapiens
  misc_RNA (1)...(19): siRNA sense strand
uggcacaacuucaacauuu

SEQ ID NO: 1156977 - RNA, 19 nt, Homo sapiens
  misc_RNA (1)...(19): siRNA sense strand
gaaggaagcagugaagaaa

SEQ ID NO: 1156978 - RNA, 19 nt, Homo sapiens
  misc_RNA (1)...(19): siRNA sense strand
gcagaccaauacuggauuu

SEQ ID NO: 1156979 - RNA, 19 nt, Homo sapiens
  misc_RNA (1)...(19): siRNA sense strand
cuacuuagaugauaaccaa

SEQ ID NO: 1156980 - RNA, 19 nt, Homo sapiens
  misc_RNA (1)...(19): siRNA sense strand
ggagagagauuuaguuucc

SEQ ID NO: 1156981 - RNA, 19 nt, Homo sapiens
  misc_RNA (1)...(19): siRNA sense strand
gaaggaagagagauugaaa

SEQ ID NO: 1156982 - RNA, 19 nt, Homo sapiens
  misc_RNA (1)...(19): siRNA sense strand
ugaaggagaugugaauuug

SEQ ID NO: 1156983 - RNA, 19 nt, Homo sapiens
  misc_RNA (1)...(19): siRNA sense strand
gaaagguuaugguucaauc

SEQ ID NO: 1156984 - RNA, 19 nt, Homo sapiens
  misc_RNA (1)...(19): siRNA sense strand
ggucaaagcuggaguuagc

SEQ ID NO: 1156985 - RNA, 19 nt, Homo sapiens
  misc_RNA (1)...(19): siRNA sense strand
gugaagggcuaaauaggaa

SEQ ID NO: 1156986 - RNA, 19 nt, Homo sapiens
  misc_RNA (1)...(19): siRNA sense strand
caacuggcuuuggcaauuu

SEQ ID NO: 1156987 - RNA, 19 nt, Homo sapiens
  misc_RNA (1)...(19): siRNA sense strand
uuacuacaccuacucauua

SEQ ID NO: 1156988 - RNA, 19 nt, Homo sapiens
  misc_RNA (1)...(19): siRNA sense strand
ggaggccucuuuggaaauu

SEQ ID NO: 1156989 - RNA, 19 nt, Homo sapiens
  misc_RNA (1)...(19): siRNA sense strand
ggaccagucucuucucauc

SEQ ID NO: 1156990 - RNA, 19 nt, Homo sapiens
  misc_RNA (1)...(19): siRNA sense strand
ccagaaggcucuuacuaca

SEQ ID NO: 1156991 - RNA, 19 nt, Homo sapiens
  misc_RNA (1)...(19): siRNA sense strand
ccaagaagagcauuaagaa

SEQ ID NO: 1156992 - RNA, 19 nt, Homo sapiens
  misc_RNA (1)...(19): siRNA sense strand
gaagagcauuaagaaguug

SEQ ID NO: 1156993 - RNA, 19 nt, Homo sapiens
  misc_RNA (1)...(19): siRNA sense strand
ggaaggaagcagugaagaa

SEQ ID NO: 1156994 - RNA, 19 nt, Homo sapiens
  misc_RNA (1)...(19): siRNA sense strand
aaacaugcgugcugcuuug

SEQ ID NO: 1156995 - RNA, 19 nt, Homo sapiens
  misc_RNA (1)...(19): siRNA sense strand
ccaggaggauuguuuggaa

SEQ ID NO: 1156996 - RNA, 19 nt, Homo sapiens
  misc_RNA (1)...(19): siRNA sense strand
gauaucaacuaugaaggaa

SEQ ID NO: 1156997 - RNA, 19 nt, Homo sapiens
  misc_RNA (1)...(19): siRNA sense strand
ggaguuuggccaacagaua

SEQ ID NO: 1156998 - RNA, 19 nt, Homo sapiens
  misc_RNA (1)...(19): siRNA sense strand
gcacccagcagguauuauu

SEQ ID NO: 1156999 - RNA, 19 nt, Homo sapiens
  misc_RNA (1)...(19): siRNA sense strand
ggaaauaaacacagcaaca

SEQ ID NO: 1157000 - RNA, 19 nt, Homo sapiens
  misc_RNA (1)...(19): siRNA sense strand
agaagagcauuaagaaguu

SEQ ID NO: 1157001 - RNA, 19 nt, Homo sapiens
  misc_RNA (1)...(19): siRNA sense strand
gcacuaacauaaguaccaa

SEQ ID NO: 1157002 - RNA, 19 nt, Homo sapiens
  misc_RNA (1)...(19): siRNA sense strand
ggaaacagggagcucaauu

SEQ ID NO: 1157003 - RNA, 19 nt, Homo sapiens
  misc_RNA (1)...(19): siRNA sense strand
uaucaacuaugaaggaaga

SEQ ID NO: 1157004 - RNA, 19 nt, Homo sapiens
  misc_RNA (1)...(19): siRNA sense strand
ccagaucgccuugcugaua

SEQ ID NO: 1157005 - RNA, 19 nt, Homo sapiens
  misc_RNA (1)...(19): siRNA sense strand
gaacuaguacaacuggauu

SEQ ID NO: 1157006 - RNA, 19 nt, Homo sapiens
  misc_RNA (1)...(19): siRNA sense strand
gaaacagggagcucaauuc

SEQ ID NO: 1157007 - RNA, 19 nt, Homo sapiens
  misc_RNA (1)...(19): siRNA sense strand
gaagaaggaagagagauug

SEQ ID NO: 1157008 - RNA, 19 nt, Homo sapiens
  misc_RNA (1)...(19): siRNA sense strand
guaccaagcaccaguguau

SEQ ID NO: 1157009 - RNA, 19 nt, Homo sapiens
  misc_RNA (1)...(19): siRNA sense strand
uaagcaaaccuguugauga

SEQ ID NO: 1157010 - RNA, 19 nt, Homo sapiens
  misc_RNA (1)...(19): siRNA sense strand
cuacugggacuacuauuaa

SEQ ID NO: 1157011 - RNA, 19 nt, Homo sapiens
  misc_RNA (1)...(19): siRNA sense strand
gcaagucacuagaggaacu

SEQ ID NO: 1157012 - RNA, 19 nt, Homo sapiens
  misc_RNA (1)...(19): siRNA sense strand
guugaagacugcuccuuug

SEQ ID NO: 1157013 - RNA, 19 nt, Homo sapiens
  misc_RNA (1)...(19): siRNA sense strand
uugcugauaucaacuauga

SEQ ID NO: 1157014 - RNA, 19 nt, Homo sapiens
  misc_RNA (1)...(19): siRNA sense strand
uaggaaggcugaaguuaca

SEQ ID NO: 1157015 - RNA, 19 nt, Homo sapiens
  misc_RNA (1)...(19): siRNA sense strand
ugauaccauuguugcauua

SEQ ID NO: 1157016 - RNA, 19 nt, Homo sapiens
  misc_RNA (1)...(19): siRNA sense strand
cuacaccuacucauuauaa

SEQ ID NO: 1157017 - RNA, 19 nt, Homo sapiens
  misc_RNA (1)...(19): siRNA sense strand
acaaauaccagugggaaua

SEQ ID NO: 1157018 - RNA, 19 nt, Homo sapiens
  misc_RNA (1)...(19): siRNA sense strand
guacagauacuauggucaa

SEQ ID NO: 1157019 - RNA, 19 nt, Homo sapiens
  misc_RNA (1)...(19): siRNA sense strand
gagcauccgucuaaaacua

SEQ ID NO: 1157020 - RNA, 19 nt, Homo sapiens
  misc_RNA (1)...(19): siRNA sense strand
uagaggaacuucguuuaga

SEQ ID NO: 1157021 - RNA, 19 nt, Homo sapiens
  misc_RNA (1)...(19): siRNA sense strand
caacagaaucagcagacua

SEQ ID NO: 1157022 - RNA, 19 nt, Homo sapiens
  misc_RNA (1)...(19): siRNA sense strand
uguuuaaggucucccauuu

SEQ ID NO: 1157023 - RNA, 19 nt, Homo sapiens
  misc_RNA (1)...(19): siRNA sense strand
gaguuuggccaacagauaa

SEQ ID NO: 1157024 - RNA, 19 nt, Homo sapiens
  misc_RNA (1)...(19): siRNA sense strand
gguuaugguucaaucuauu

SEQ ID NO: 1157025 - RNA, 19 nt, Homo sapiens
  misc_RNA (1)...(19): siRNA sense strand
ggaugaccgagaagaaaua

SEQ ID NO: 1157026 - RNA, 19 nt, Homo sapiens
  misc_RNA (1)...(19): siRNA sense strand
gcaacaguguggaugauac

SEQ ID NO: 1157027 - RNA, 19 nt, Homo sapiens
  misc_RNA (1)...(19): siRNA sense strand
caagucacaucucuuugau

SEQ ID NO: 1157028 - RNA, 19 nt, Homo sapiens
  misc_RNA (1)...(19): siRNA sense strand
ugucagacccuaagaagaa

SEQ ID NO: 1157029 - RNA, 19 nt, Homo sapiens
  misc_RNA (1)...(19): siRNA sense strand
caacaccaugggauuauuu

SEQ ID NO: 1157030 - RNA, 19 nt, Homo sapiens
  misc_RNA (1)...(19): siRNA sense strand
ggcaauaacaagcuuacua

SEQ ID NO: 1157031 - RNA, 19 nt, Homo sapiens
  misc_RNA (1)...(19): siRNA sense strand
cagaucgccuugcugauau

SEQ ID NO: 1157032 - RNA, 19 nt, Homo sapiens
  misc_RNA (1)...(19): siRNA sense strand
gggaacaaccaaccuaaga

SEQ ID NO: 1157033 - RNA, 19 nt, Homo sapiens
  misc_RNA (1)...(19): siRNA sense strand
acaaauaccaccucuaauc

SEQ ID NO: 1157034 - RNA, 19 nt, Homo sapiens
  misc_RNA (1)...(19): siRNA sense strand
cagguauuauucucacuaa

SEQ ID NO: 1157035 - RNA, 19 nt, Homo sapiens
  misc_RNA (1)...(19): siRNA sense strand
agaugaagauucccuuguu

SEQ ID NO: 1157036 - RNA, 19 nt, Homo sapiens
  misc_RNA (1)...(19): siRNA sense strand
ccaagucacaucucuuuga

SEQ ID NO: 1157037 - RNA, 19 nt, Homo sapiens
  misc_RNA (1)...(19): siRNA sense strand
gcaauaacaagcuuacuac

SEQ ID NO: 1157038 - RNA, 19 nt, Homo sapiens
  misc_RNA (1)...(19): siRNA sense strand
gcaccaacaccaugggauu

SEQ ID NO: 1157039 - RNA, 19 nt, Homo sapiens
  misc_RNA (1)...(19): siRNA sense strand
aaacaaugccuuugcacaa

SEQ ID NO: 1157040 - RNA, 19 nt, Homo sapiens
  misc_RNA (1)...(19): siRNA sense strand
guacaaagaaguugaagac

SEQ ID NO: 1157041 - RNA, 19 nt, Homo sapiens
  misc_RNA (1)...(19): siRNA sense strand
gaaggagaugugaauuuga

SEQ ID NO: 1157042 - RNA, 19 nt, Homo sapiens
  misc_RNA (1)...(19): siRNA sense strand
gcauuugguucuagcaaca

SEQ ID NO: 1157043 - RNA, 19 nt, Homo sapiens
  misc_RNA (1)...(19): siRNA sense strand
aagcaaaccuguugaugag

SEQ ID NO: 1157044 - RNA, 19 nt, Homo sapiens
  misc_RNA (1)...(19): siRNA sense strand
aaauccagguggucucuuu

SEQ ID NO: 1157045 - RNA, 19 nt, Homo sapiens
  misc_RNA (1)...(19): siRNA sense strand
guguauuacugcuaugaaa

SEQ ID NO: 1157046 - RNA, 19 nt, Homo sapiens
  misc_RNA (1)...(19): siRNA sense strand
gaaauaaacacagcaacag

SEQ ID NO: 1157047 - RNA, 19 nt, Homo sapiens
  misc_RNA (1)...(19): siRNA sense strand
cagaaagugcuggaaauaa

SEQ ID NO: 1157048 - RNA, 19 nt, Homo sapiens
  misc_RNA (1)...(19): siRNA sense strand
agagagauuuaguuuccua

SEQ ID NO: 1157049 - RNA, 19 nt, Homo sapiens
  misc_RNA (1)...(19): siRNA sense strand
aaaucuagcuucaccaucu

SEQ ID NO: 1157050 - RNA, 19 nt, Homo sapiens
  misc_RNA (1)...(19): siRNA sense strand
cagcacaucaauagucuaa

SEQ ID NO: 1157051 - RNA, 19 nt, Homo sapiens
  misc_RNA (1)...(19): siRNA sense strand
ggauggagaugaagauucc

SEQ ID NO: 1157052 - RNA, 19 nt, Homo sapiens
  misc_RNA (1)...(19): siRNA sense strand
ggaggagcauccgucuaaa

SEQ ID NO: 1157053 - RNA, 19 nt, Homo sapiens
  misc_RNA (1)...(19): siRNA sense strand
caacuaugaaggaagauug

SEQ ID NO: 1157054 - RNA, 19 nt, Homo sapiens
  misc_RNA (1)...(19): siRNA sense strand
gcagguauuauucucacua

SEQ ID NO: 1157055 - RNA, 19 nt, Homo sapiens
  misc_RNA (1)...(19): siRNA sense strand
ccagcuaccuccacaagca

SEQ ID NO: 1157056 - RNA, 19 nt, Homo sapiens
  misc_RNA (1)...(19): siRNA sense strand
ucggaaagguuaugguuca

SEQ ID NO: 1157057 - RNA, 19 nt, Homo sapiens
  misc_RNA (1)...(19): siRNA sense strand
gaagaaccuuaauaauagc

SEQ ID NO: 1157058 - RNA, 19 nt, Homo sapiens
  misc_RNA (1)...(19): siRNA sense strand
ucaauagucuaacauacuc

SEQ ID NO: 1157059 - RNA, 19 nt, Homo sapiens
  misc_RNA (1)...(19): siRNA sense strand
caacugguacagauacuau

SEQ ID NO: 1157060 - RNA, 19 nt, Homo sapiens
  misc_RNA (1)...(19): siRNA sense strand
guucuuggguguuuaaggu

SEQ ID NO: 1157061 - RNA, 19 nt, Homo sapiens
  misc_RNA (1)...(19): siRNA sense strand
ggugaagggcuaaauagga

SEQ ID NO: 1157062 - RNA, 19 nt, Homo sapiens
  misc_RNA (1)...(19): siRNA sense strand
ccagcaggauggagaugaa

SEQ ID NO: 1157063 - RNA, 19 nt, Homo sapiens
  misc_RNA (1)...(19): siRNA sense strand
uggaagcaguuucaaggaa

SEQ ID NO: 1157064 - RNA, 19 nt, Homo sapiens
  misc_RNA (1)...(19): siRNA sense strand
gaagagagauugaaaccaa

SEQ ID NO: 1157065 - RNA, 19 nt, Homo sapiens
  misc_RNA (1)...(19): siRNA sense strand
ggaaagaaguaguugucua

SEQ ID NO: 1157066 - RNA, 19 nt, Homo sapiens
  misc_RNA (1)...(19): siRNA sense strand
ggacaggcaucuuuguuug

SEQ ID NO: 1157067 - RNA, 19 nt, Homo sapiens
  misc_RNA (1)...(19): siRNA sense strand
acagggagcucaauucaaa

SEQ ID NO: 1157068 - RNA, 19 nt, Homo sapiens
  misc_RNA (1)...(19): siRNA sense strand
agaaagugcuggaaauaaa

SEQ ID NO: 1157069 - RNA, 19 nt, Homo sapiens
  misc_RNA (1)...(19): siRNA sense strand
gcacaucaauagucuaaca

SEQ ID NO: 1157070 - RNA, 19 nt, Homo sapiens
  misc_RNA (1)...(19): siRNA sense strand
gcaaaccuguugaugagaa

SEQ ID NO: 1157071 - RNA, 19 nt, Homo sapiens
  misc_RNA (1)...(19): siRNA sense strand
ccacaaauaccaccucuaa

SEQ ID NO: 1157072 - RNA, 19 nt, Homo sapiens
  misc_RNA (1)...(19): siRNA sense strand
gaacuucguuuagaggauu

SEQ ID NO: 1157073 - RNA, 19 nt, Homo sapiens
  misc_RNA (1)...(19): siRNA sense strand
gaugaagauucccuuguuu

SEQ ID NO: 1157074 - RNA, 19 nt, Homo sapiens
  misc_RNA (1)...(19): siRNA sense strand
gaacaaccaaccuaagauu

SEQ ID NO: 1157075 - RNA, 19 nt, Homo sapiens
  misc_RNA (1)...(19): siRNA sense strand
ucacuaagguugguuacua

SEQ ID NO: 1157076 - RNA, 19 nt, Homo sapiens
  misc_RNA (1)...(19): siRNA sense strand
uggcacaacuucaacauuu

SEQ ID NO: 1157077 - RNA, 19 nt, Homo sapiens
  misc_RNA (1)...(19): siRNA sense strand
gaaggaagcagugaagaaa

SEQ ID NO: 1157078 - RNA, 19 nt, Homo sapiens
  misc_RNA (1)...(19): siRNA sense strand
gcagaccaauacuggauuu

SEQ ID NO: 1157079 - RNA, 19 nt, Homo sapiens
  misc_RNA (1)...(19): siRNA sense strand
cuacuuagaugauaaccaa

SEQ ID NO: 1157080 - RNA, 19 nt, Homo sapiens
  misc_RNA (1)...(19): siRNA sense strand
ggagagagauuuaguuucc

SEQ ID NO: 1157081 - RNA, 19 nt, Homo sapiens
  misc_RNA (1)...(19): siRNA sense strand
gaaggaagagagauugaaa

SEQ ID NO: 1157082 - RNA, 19 nt, Homo sapiens
  misc_RNA (1)...(19): siRNA sense strand
ugaaggagaugugaauuug

SEQ ID NO: 1157083 - RNA, 19 nt, Homo sapiens
  misc_RNA (1)...(19): siRNA sense strand
gaaagguuaugguucaauc

SEQ ID NO: 1157084 - RNA, 19 nt, Homo sapiens
  misc_RNA (1)...(19): siRNA sense strand
ggucaaagcuggaguuagc

SEQ ID NO: 1157085 - RNA, 19 nt, Homo sapiens
  misc_RNA (1)...(19): siRNA sense strand
gugaagggcuaaauaggaa

SEQ ID NO: 1157086 - RNA, 19 nt, Homo sapiens
  misc_RNA (1)...(19): siRNA sense strand
caacuggcuuuggcaauuu

SEQ ID NO: 1157087 - RNA, 19 nt, Homo sapiens
  misc_RNA (1)...(19): siRNA sense strand
uuacuacaccuacucauua

SEQ ID NO: 1157088 - RNA, 19 nt, Homo sapiens
  misc_RNA (1)...(19): siRNA sense strand
ggaggccucuuuggaaauu

SEQ ID NO: 1157089 - RNA, 19 nt, Homo sapiens
  misc_RNA (1)...(19): siRNA sense strand
ggaccagucucuucucauc

SEQ ID NO: 1157090 - RNA, 19 nt, Homo sapiens
  misc_RNA (1)...(19): siRNA sense strand
ccagaaggcucuuacuaca

SEQ ID NO: 1157091 - RNA, 19 nt, Homo sapiens
  misc_RNA (1)...(19): siRNA sense strand
ccaagaagagcauuaagaa

SEQ ID NO: 1157092 - RNA, 19 nt, Homo sapiens
  misc_RNA (1)...(19): siRNA sense strand
gaagagcauuaagaaguug

SEQ ID NO: 1157093 - RNA, 19 nt, Homo sapiens
  misc_RNA (1)...(19): siRNA sense strand
ggaaggaagcagugaagaa

SEQ ID NO: 1157094 - RNA, 19 nt, Homo sapiens
  misc_RNA (1)...(19): siRNA sense strand
aaacaugcgugcugcuuug

SEQ ID NO: 1157095 - RNA, 19 nt, Homo sapiens
  misc_RNA (1)...(19): siRNA sense strand
ccaggaggauuguuuggaa

SEQ ID NO: 1157096 - RNA, 19 nt, Homo sapiens
  misc_RNA (1)...(19): siRNA sense strand
gauaucaacuaugaaggaa

SEQ ID NO: 1157097 - RNA, 19 nt, Homo sapiens
  misc_RNA (1)...(19): siRNA sense strand
ggaguuuggccaacagaua

SEQ ID NO: 1157098 - RNA, 19 nt, Homo sapiens
  misc_RNA (1)...(19): siRNA sense strand
gcacccagcagguauuauu

SEQ ID NO: 1157099 - RNA, 19 nt, Homo sapiens
  misc_RNA (1)...(19): siRNA sense strand
ggaaauaaacacagcaaca

SEQ ID NO: 1157100 - RNA, 19 nt, Homo sapiens
  misc_RNA (1)...(19): siRNA sense strand
agaagagcauuaagaaguu

SEQ ID NO: 1157101 - RNA, 19 nt, Homo sapiens
  misc_RNA (1)...(19): siRNA sense strand
gcacuaacauaaguaccaa

SEQ ID NO: 1157102 - RNA, 19 nt, Homo sapiens
  misc_RNA (1)...(19): siRNA sense strand
ggaaacagggagcucaauu

SEQ ID NO: 1157103 - RNA, 19 nt, Homo sapiens
  misc_RNA (1)...(19): siRNA sense strand
uaucaacuaugaaggaaga

SEQ ID NO: 1157104 - RNA, 19 nt, Homo sapiens
  misc_RNA (1)...(19): siRNA sense strand
ccagaucgccuugcugaua

SEQ ID NO: 1157105 - RNA, 19 nt, Homo sapiens
  misc_RNA (1)...(19): siRNA sense strand
gaacuaguacaacuggauu

SEQ ID NO: 1157106 - RNA, 19 nt, Homo sapiens
  misc_RNA (1)...(19): siRNA sense strand
gaaacagggagcucaauuc

SEQ ID NO: 1157107 - RNA, 19 nt, Homo sapiens
  misc_RNA (1)...(19): siRNA sense strand
gaagaaggaagagagauug

SEQ ID NO: 1157108 - RNA, 19 nt, Homo sapiens
  misc_RNA (1)...(19): siRNA sense strand
guaccaagcaccaguguau

SEQ ID NO: 1157109 - RNA, 19 nt, Homo sapiens
  misc_RNA (1)...(19): siRNA sense strand
uaagcaaaccuguugauga

SEQ ID NO: 1157110 - RNA, 19 nt, Homo sapiens
  misc_RNA (1)...(19): siRNA sense strand
cuacugggacuacuauuaa

SEQ ID NO: 1157111 - RNA, 19 nt, Homo sapiens
  misc_RNA (1)...(19): siRNA sense strand
gcaagucacuagaggaacu

SEQ ID NO: 1157112 - RNA, 19 nt, Homo sapiens
  misc_RNA (1)...(19): siRNA sense strand
guugaagacugcuccuuug

SEQ ID NO: 1157113 - RNA, 19 nt, Homo sapiens
  misc_RNA (1)...(19): siRNA sense strand
uugcugauaucaacuauga

SEQ ID NO: 1157114 - RNA, 19 nt, Homo sapiens
  misc_RNA (1)...(19): siRNA sense strand
uaggaaggcugaaguuaca

SEQ ID NO: 1157115 - RNA, 19 nt, Homo sapiens
  misc_RNA (1)...(19): siRNA sense strand
ugauaccauuguugcauua

SEQ ID NO: 1157116 - RNA, 19 nt, Homo sapiens
  misc_RNA (1)...(19): siRNA sense strand
cuacaccuacucauuauaa

SEQ ID NO: 1157117 - RNA, 19 nt, Homo sapiens
  misc_RNA (1)...(19): siRNA sense strand
acaaauaccagugggaaua

SEQ ID NO: 1157118 - RNA, 19 nt, Homo sapiens
  misc_RNA (1)...(19): siRNA sense strand
guacagauacuauggucaa

SEQ ID NO: 1157119 - RNA, 19 nt, Homo sapiens
  misc_RNA (1)...(19): siRNA sense strand
gagcauccgucuaaaacua

SEQ ID NO: 1157120 - RNA, 19 nt, Homo sapiens
  misc_RNA (1)...(19): siRNA sense strand
uagaggaacuucguuuaga

SEQ ID NO: 1157121 - RNA, 19 nt, Homo sapiens
  misc_RNA (1)...(19): siRNA sense strand
caacagaaucagcagacua

SEQ ID NO: 1157122 - RNA, 19 nt, Homo sapiens
  misc_RNA (1)...(19): siRNA sense strand
uguuuaaggucucccauuu

SEQ ID NO: 1157123 - RNA, 19 nt, Homo sapiens
  misc_RNA (1)...(19): siRNA sense strand
gaguuuggccaacagauaa

SEQ ID NO: 1157124 - RNA, 19 nt, Homo sapiens
  misc_RNA (1)...(19): siRNA sense strand
gguuaugguucaaucuauu

SEQ ID NO: 1157125 - RNA, 19 nt, Homo sapiens
  misc_RNA (1)...(19): siRNA sense strand
ggaugaccgagaagaaaua

SEQ ID NO: 1157126 - RNA, 19 nt, Homo sapiens
  misc_RNA (1)...(19): siRNA sense strand
gcaacaguguggaugauac

SEQ ID NO: 1157127 - RNA, 19 nt, Homo sapiens
  misc_RNA (1)...(19): siRNA sense strand
caagucacaucucuuugau

SEQ ID NO: 1157128 - RNA, 19 nt, Homo sapiens
  misc_RNA (1)...(19): siRNA sense strand
ugucagacccuaagaagaa

SEQ ID NO: 1157129 - RNA, 19 nt, Homo sapiens
  misc_RNA (1)...(19): siRNA sense strand
caacaccaugggauuauuu

SEQ ID NO: 1157130 - RNA, 19 nt, Homo sapiens
  misc_RNA (1)...(19): siRNA sense strand
ggcaauaacaagcuuacua

SEQ ID NO: 1157131 - RNA, 19 nt, Homo sapiens
  misc_RNA (1)...(19): siRNA sense strand
cagaucgccuugcugauau

SEQ ID NO: 1157132 - RNA, 19 nt, Homo sapiens
  misc_RNA (1)...(19): siRNA sense strand
gggaacaaccaaccuaaga

SEQ ID NO: 1157133 - RNA, 19 nt, Homo sapiens
  misc_RNA (1)...(19): siRNA sense strand
acaaauaccaccucuaauc

SEQ ID NO: 1157134 - RNA, 19 nt, Homo sapiens
  misc_RNA (1)...(19): siRNA sense strand
cagguauuauucucacuaa

SEQ ID NO: 1157135 - RNA, 19 nt, Homo sapiens
  misc_RNA (1)...(19): siRNA sense strand
agaugaagauucccuuguu

SEQ ID NO: 1157136 - RNA, 19 nt, Homo sapiens
  misc_RNA (1)...(19): siRNA sense strand
ccaagucacaucucuuuga

SEQ ID NO: 1157137 - RNA, 19 nt, Homo sapiens
  misc_RNA (1)...(19): siRNA sense strand
gcaauaacaagcuuacuac

SEQ ID NO: 1157138 - RNA, 19 nt, Homo sapiens
  misc_RNA (1)...(19): siRNA sense strand
gcaccaacaccaugggauu

SEQ ID NO: 1157139 - RNA, 19 nt, Homo sapiens
  misc_RNA (1)...(19): siRNA sense strand
aaacaaugccuuugcacaa

SEQ ID NO: 1157140 - RNA, 19 nt, Homo sapiens
  misc_RNA (1)...(19): siRNA sense strand
guacaaagaaguugaagac

SEQ ID NO: 1157141 - RNA, 19 nt, Homo sapiens
  misc_RNA (1)...(19): siRNA sense strand
gaaggagaugugaauuuga

SEQ ID NO: 1157142 - RNA, 19 nt, Homo sapiens
  misc_RNA (1)...(19): siRNA sense strand
gcauuugguucuagcaaca

SEQ ID NO: 1157143 - RNA, 19 nt, Homo sapiens
  misc_RNA (1)...(19): siRNA sense strand
aagcaaaccuguugaugag

SEQ ID NO: 1157144 - RNA, 19 nt, Homo sapiens
  misc_RNA (1)...(19): siRNA sense strand
aaauccagguggucucuuu

SEQ ID NO: 1157145 - RNA, 19 nt, Homo sapiens
  misc_RNA (1)...(19): siRNA sense strand
guguauuacugcuaugaaa

SEQ ID NO: 1157146 - RNA, 19 nt, Homo sapiens
  misc_RNA (1)...(19): siRNA sense strand
gaaauaaacacagcaacag

SEQ ID NO: 1157147 - RNA, 19 nt, Homo sapiens
  misc_RNA (1)...(19): siRNA sense strand
cagaaagugcuggaaauaa

SEQ ID NO: 1157148 - RNA, 19 nt, Homo sapiens
  misc_RNA (1)...(19): siRNA sense strand
agagagauuuaguuuccua

SEQ ID NO: 1157149 - RNA, 19 nt, Homo sapiens
  misc_RNA (1)...(19): siRNA sense strand
aaaucuagcuucaccaucu

SEQ ID NO: 1157150 - RNA, 19 nt, Homo sapiens
  misc_RNA (1)...(19): siRNA sense strand
cagcacaucaauagucuaa

SEQ ID NO: 1157151 - RNA, 19 nt, Homo sapiens
  misc_RNA (1)...(19): siRNA sense strand
ggauggagaugaagauucc

SEQ ID NO: 1157152 - RNA, 19 nt, Homo sapiens
  misc_RNA (1)...(19): siRNA sense strand
ggaggagcauccgucuaaa

SEQ ID NO: 1157153 - RNA, 19 nt, Homo sapiens
  misc_RNA (1)...(19): siRNA sense strand
caacuaugaaggaagauug

SEQ ID NO: 1157154 - RNA, 19 nt, Homo sapiens
  misc_RNA (1)...(19): siRNA sense strand
gcagguauuauucucacua

SEQ ID NO: 1157155 - RNA, 19 nt, Homo sapiens
  misc_RNA (1)...(19): siRNA sense strand
ccagcuaccuccacaagca

SEQ ID NO: 1157156 - RNA, 19 nt, Homo sapiens
  misc_RNA (1)...(19): siRNA sense strand
ucggaaagguuaugguuca

SEQ ID NO: 1157157 - RNA, 19 nt, Homo sapiens
  misc_RNA (1)...(19): siRNA sense strand
gaagaaccuuaauaauagc

SEQ ID NO: 1157158 - RNA, 19 nt, Homo sapiens
  misc_RNA (1)...(19): siRNA sense strand
ucaauagucuaacauacuc

SEQ ID NO: 1157159 - RNA, 19 nt, Homo sapiens
  misc_RNA (1)...(19): siRNA sense strand
caacugguacagauacuau

SEQ ID NO: 1157160 - RNA, 19 nt, Homo sapiens
  misc_RNA (1)...(19): siRNA sense strand
guucuuggguguuuaaggu

SEQ ID NO: 1157161 - RNA, 19 nt, Homo sapiens
  misc_RNA (1)...(19): siRNA sense strand
ggugaagggcuaaauagga

SEQ ID NO: 1157162 - RNA, 19 nt, Homo sapiens
  misc_RNA (1)...(19): siRNA sense strand
ccagcaggauggagaugaa

SEQ ID NO: 1157163 - RNA, 19 nt, Homo sapiens
  misc_RNA (1)...(19): siRNA sense strand
uggaagcaguuucaaggaa

SEQ ID NO: 1157164 - RNA, 19 nt, Homo sapiens
  misc_RNA (1)...(19): siRNA sense strand
gaagagagauugaaaccaa

SEQ ID NO: 1157165 - RNA, 19 nt, Homo sapiens
  misc_RNA (1)...(19): siRNA sense strand
ggaaagaaguaguugucua

SEQ ID NO: 1157166 - RNA, 19 nt, Homo sapiens
  misc_RNA (1)...(19): siRNA sense strand
ggacaggcaucuuuguuug

SEQ ID NO: 1157167 - RNA, 19 nt, Homo sapiens
  misc_RNA (1)...(19): siRNA sense strand
acagggagcucaauucaaa

SEQ ID NO: 1157168 - RNA, 19 nt, Homo sapiens
  misc_RNA (1)...(19): siRNA sense strand
agaaagugcuggaaauaaa

SEQ ID NO: 1157169 - RNA, 19 nt, Homo sapiens
  misc_RNA (1)...(19): siRNA sense strand
gcacaucaauagucuaaca

SEQ ID NO: 1157170 - RNA, 19 nt, Homo sapiens
  misc_RNA (1)...(19): siRNA sense strand
gcaaaccuguugaugagaa

SEQ ID NO: 1157171 - RNA, 19 nt, Homo sapiens
  misc_RNA (1)...(19): siRNA sense strand
ccacaaauaccaccucuaa

SEQ ID NO: 1157172 - RNA, 19 nt, Homo sapiens
  misc_RNA (1)...(19): siRNA sense strand
gaacuucguuuagaggauu

SEQ ID NO: 1157173 - RNA, 19 nt, Homo sapiens
  misc_RNA (1)...(19): siRNA sense strand
gaugaagauucccuuguuu

SEQ ID NO: 1157174 - RNA, 19 nt, Homo sapiens
  misc_RNA (1)...(19): siRNA sense strand
gaacaaccaaccuaagauu

SEQ ID NO: 1157175 - RNA, 19 nt, Homo sapiens
  misc_RNA (1)...(19): siRNA sense strand
ucacuaagguugguuacua

SEQ ID NO: 1157176 - RNA, 19 nt, Homo sapiens
  misc_RNA (1)...(19): siRNA sense strand
uggcacaacuucaacauuu

SEQ ID NO: 1157177 - RNA, 19 nt, Homo sapiens
  misc_RNA (1)...(19): siRNA sense strand
gaaggaagcagugaagaaa

SEQ ID NO: 1157178 - RNA, 19 nt, Homo sapiens
  misc_RNA (1)...(19): siRNA sense strand
gcagaccaauacuggauuu

SEQ ID NO: 1157179 - RNA, 19 nt, Homo sapiens
  misc_RNA (1)...(19): siRNA sense strand
cuacuuagaugauaaccaa

SEQ ID NO: 1157180 - RNA, 19 nt, Homo sapiens
  misc_RNA (1)...(19): siRNA sense strand
ggagagagauuuaguuucc

SEQ ID NO: 1157181 - RNA, 19 nt, Homo sapiens
  misc_RNA (1)...(19): siRNA sense strand
gaaggaagagagauugaaa

SEQ ID NO: 1157182 - RNA, 19 nt, Homo sapiens
  misc_RNA (1)...(19): siRNA sense strand
ugaaggagaugugaauuug

SEQ ID NO: 1157183 - RNA, 19 nt, Homo sapiens
  misc_RNA (1)...(19): siRNA sense strand
gaaagguuaugguucaauc

SEQ ID NO: 1157184 - RNA, 19 nt, Homo sapiens
  misc_RNA (1)...(19): siRNA sense strand
ggucaaagcuggaguuagc

SEQ ID NO: 1157185 - RNA, 19 nt, Homo sapiens
  misc_RNA (1)...(19): siRNA sense strand
gugaagggcuaaauaggaa

SEQ ID NO: 1157186 - RNA, 19 nt, Homo sapiens
  misc_RNA (1)...(19): siRNA sense strand
caacuggcuuuggcaauuu

SEQ ID NO: 1157187 - RNA, 19 nt, Homo sapiens
  misc_RNA (1)...(19): siRNA sense strand
uuacuacaccuacucauua

SEQ ID NO: 1157188 - RNA, 19 nt, Homo sapiens
  misc_RNA (1)...(19): siRNA sense strand
ggaggccucuuuggaaauu

SEQ ID NO: 1157189 - RNA, 19 nt, Homo sapiens
  misc_RNA (1)...(19): siRNA sense strand
ggaccagucucuucucauc

SEQ ID NO: 1157190 - RNA, 19 nt, Homo sapiens
  misc_RNA (1)...(19): siRNA sense strand
ccagaaggcucuuacuaca

SEQ ID NO: 1157191 - RNA, 19 nt, Homo sapiens
  misc_RNA (1)...(19): siRNA sense strand
ccaagaagagcauuaagaa

SEQ ID NO: 1157192 - RNA, 19 nt, Homo sapiens
  misc_RNA (1)...(19): siRNA sense strand
gaagagcauuaagaaguug

SEQ ID NO: 1157193 - RNA, 19 nt, Homo sapiens
  misc_RNA (1)...(19): siRNA sense strand
ggaaggaagcagugaagaa

SEQ ID NO: 1157194 - RNA, 19 nt, Homo sapiens
  misc_RNA (1)...(19): siRNA sense strand
aaacaugcgugcugcuuug

SEQ ID NO: 1157195 - RNA, 19 nt, Homo sapiens
  misc_RNA (1)...(19): siRNA sense strand
ccaggaggauuguuuggaa

SEQ ID NO: 1157196 - RNA, 19 nt, Homo sapiens
  misc_RNA (1)...(19): siRNA sense strand
gauaucaacuaugaaggaa

SEQ ID NO: 1157197 - RNA, 19 nt, Homo sapiens
  misc_RNA (1)...(19): siRNA sense strand
ggaguuuggccaacagaua

SEQ ID NO: 1157198 - RNA, 19 nt, Homo sapiens
  misc_RNA (1)...(19): siRNA sense strand
gcacccagcagguauuauu

SEQ ID NO: 1157199 - RNA, 19 nt, Homo sapiens
  misc_RNA (1)...(19): siRNA sense strand
ggaaauaaacacagcaaca

SEQ ID NO: 1157200 - RNA, 19 nt, Homo sapiens
  misc_RNA (1)...(19): siRNA sense strand
agaagagcauuaagaaguu

SEQ ID NO: 1157201 - RNA, 19 nt, Homo sapiens
  misc_RNA (1)...(19): siRNA sense strand
gcacuaacauaaguaccaa

SEQ ID NO: 1157202 - RNA, 19 nt, Homo sapiens
  misc_RNA (1)...(19): siRNA sense strand
ggaaacagggagcucaauu

SEQ ID NO: 1157203 - RNA, 19 nt, Homo sapiens
  misc_RNA (1)...(19): siRNA sense strand
uaucaacuaugaaggaaga

SEQ ID NO: 1157204 - RNA, 19 nt, Homo sapiens
  misc_RNA (1)...(19): siRNA sense strand
ccagaucgccuugcugaua

SEQ ID NO: 1157205 - RNA, 19 nt, Homo sapiens
  misc_RNA (1)...(19): siRNA sense strand
gaacuaguacaacuggauu

SEQ ID NO: 1157206 - RNA, 19 nt, Homo sapiens
  misc_RNA (1)...(19): siRNA sense strand
gaaacagggagcucaauuc

SEQ ID NO: 1157207 - RNA, 19 nt, Homo sapiens
  misc_RNA (1)...(19): siRNA sense strand
gaagaaggaagagagauug

SEQ ID NO: 1157208 - RNA, 19 nt, Homo sapiens
  misc_RNA (1)...(19): siRNA sense strand
guaccaagcaccaguguau

SEQ ID NO: 1157209 - RNA, 19 nt, Homo sapiens
  misc_RNA (1)...(19): siRNA sense strand
uaagcaaaccuguugauga

SEQ ID NO: 1157210 - RNA, 19 nt, Homo sapiens
  misc_RNA (1)...(19): siRNA sense strand
cuacugggacuacuauuaa

SEQ ID NO: 1157211 - RNA, 19 nt, Homo sapiens
  misc_RNA (1)...(19): siRNA sense strand
gcaagucacuagaggaacu

SEQ ID NO: 1157212 - RNA, 19 nt, Homo sapiens
  misc_RNA (1)...(19): siRNA sense strand
guugaagacugcuccuuug

SEQ ID NO: 1157213 - RNA, 19 nt, Homo sapiens
  misc_RNA (1)...(19): siRNA sense strand
uugcugauaucaacuauga

SEQ ID NO: 1157214 - RNA, 19 nt, Homo sapiens
  misc_RNA (1)...(19): siRNA sense strand
uaggaaggcugaaguuaca

SEQ ID NO: 1157215 - RNA, 19 nt, Homo sapiens
  misc_RNA (1)...(19): siRNA sense strand
ugauaccauuguugcauua

SEQ ID NO: 1157216 - RNA, 19 nt, Homo sapiens
  misc_RNA (1)...(19): siRNA sense strand
cuacaccuacucauuauaa

SEQ ID NO: 1157217 - RNA, 19 nt, Homo sapiens
  misc_RNA (1)...(19): siRNA sense strand
acaaauaccagugggaaua

SEQ ID NO: 1157218 - RNA, 19 nt, Homo sapiens
  misc_RNA (1)...(19): siRNA sense strand
guacagauacuauggucaa

SEQ ID NO: 1157219 - RNA, 19 nt, Homo sapiens
  misc_RNA (1)...(19): siRNA sense strand
gagcauccgucuaaaacua

SEQ ID NO: 1157220 - RNA, 19 nt, Homo sapiens
  misc_RNA (1)...(19): siRNA sense strand
uagaggaacuucguuuaga

SEQ ID NO: 1157221 - RNA, 19 nt, Homo sapiens
  misc_RNA (1)...(19): siRNA sense strand
caacagaaucagcagacua

SEQ ID NO: 1157222 - RNA, 19 nt, Homo sapiens
  misc_RNA (1)...(19): siRNA sense strand
uguuuaaggucucccauuu

SEQ ID NO: 1157223 - RNA, 19 nt, Homo sapiens
  misc_RNA (1)...(19): siRNA sense strand
gaguuuggccaacagauaa

SEQ ID NO: 1157224 - RNA, 19 nt, Homo sapiens
  misc_RNA (1)...(19): siRNA sense strand
gguuaugguucaaucuauu

SEQ ID NO: 1157225 - RNA, 19 nt, Homo sapiens
  misc_RNA (1)...(19): siRNA sense strand
ggaugaccgagaagaaaua

SEQ ID NO: 1157226 - RNA, 19 nt, Homo sapiens
  misc_RNA (1)...(19): siRNA sense strand
gcaacaguguggaugauac

SEQ ID NO: 1157227 - RNA, 19 nt, Homo sapiens
  misc_RNA (1)...(19): siRNA sense strand
caagucacaucucuuugau

SEQ ID NO: 1157228 - RNA, 19 nt, Homo sapiens
  misc_RNA (1)...(19): siRNA sense strand
ugucagacccuaagaagaa

SEQ ID NO: 1157229 - RNA, 19 nt, Homo sapiens
  misc_RNA (1)...(19): siRNA sense strand
caacaccaugggauuauuu

SEQ ID NO: 1157230 - RNA, 19 nt, Homo sapiens
  misc_RNA (1)...(19): siRNA sense strand
ggcaauaacaagcuuacua

SEQ ID NO: 1157231 - RNA, 19 nt, Homo sapiens
  misc_RNA (1)...(19): siRNA sense strand
cagaucgccuugcugauau

SEQ ID NO: 1157232 - RNA, 19 nt, Homo sapiens
  misc_RNA (1)...(19): siRNA sense strand
gggaacaaccaaccuaaga

SEQ ID NO: 1157233 - RNA, 19 nt, Homo sapiens
  misc_RNA (1)...(19): siRNA sense strand
acaaauaccaccucuaauc

SEQ ID NO: 1157234 - RNA, 19 nt, Homo sapiens
  misc_RNA (1)...(19): siRNA sense strand
cagguauuauucucacuaa

SEQ ID NO: 1157235 - RNA, 19 nt, Homo sapiens
  misc_RNA (1)...(19): siRNA sense strand
agaugaagauucccuuguu

SEQ ID NO: 1157236 - RNA, 19 nt, Homo sapiens
  misc_RNA (1)...(19): siRNA sense strand
ccaagucacaucucuuuga

SEQ ID NO: 1157237 - RNA, 19 nt, Homo sapiens
  misc_RNA (1)...(19): siRNA sense strand
gcaauaacaagcuuacuac

SEQ ID NO: 1157238 - RNA, 19 nt, Homo sapiens
  misc_RNA (1)...(19): siRNA sense strand
gcaccaacaccaugggauu

SEQ ID NO: 1157239 - RNA, 19 nt, Homo sapiens
  misc_RNA (1)...(19): siRNA sense strand
aaacaaugccuuugcacaa

SEQ ID NO: 1157240 - RNA, 19 nt, Homo sapiens
  misc_RNA (1)...(19): siRNA sense strand
guacaaagaaguugaagac

SEQ ID NO: 1157241 - RNA, 19 nt, Homo sapiens
  misc_RNA (1)...(19): siRNA sense strand
gaaggagaugugaauuuga

SEQ ID NO: 1157242 - RNA, 19 nt, Homo sapiens
  misc_RNA (1)...(19): siRNA sense strand
gcauuugguucuagcaaca

SEQ ID NO: 1157243 - RNA, 19 nt, Homo sapiens
  misc_RNA (1)...(19): siRNA sense strand
aagcaaaccuguugaugag

SEQ ID NO: 1157244 - RNA, 19 nt, Homo sapiens
  misc_RNA (1)...(19): siRNA sense strand
aaauccagguggucucuuu

SEQ ID NO: 1157245 - RNA, 19 nt, Homo sapiens
  misc_RNA (1)...(19): siRNA sense strand
guguauuacugcuaugaaa

SEQ ID NO: 1157246 - RNA, 19 nt, Homo sapiens
  misc_RNA (1)...(19): siRNA sense strand
gaaauaaacacagcaacag

SEQ ID NO: 1157247 - RNA, 19 nt, Homo sapiens
  misc_RNA (1)...(19): siRNA sense strand
cagaaagugcuggaaauaa

SEQ ID NO: 1157248 - RNA, 19 nt, Homo sapiens
  misc_RNA (1)...(19): siRNA sense strand
agagagauuuaguuuccua

SEQ ID NO: 1157249 - RNA, 19 nt, Homo sapiens
  misc_RNA (1)...(19): siRNA sense strand
aaaucuagcuucaccaucu

SEQ ID NO: 1157250 - RNA, 19 nt, Homo sapiens
  misc_RNA (1)...(19): siRNA sense strand
cagcacaucaauagucuaa

SEQ ID NO: 1157251 - RNA, 19 nt, Homo sapiens
  misc_RNA (1)...(19): siRNA sense strand
ggauggagaugaagauucc

SEQ ID NO: 1157252 - RNA, 19 nt, Homo sapiens
  misc_RNA (1)...(19): siRNA sense strand
ggaggagcauccgucuaaa

SEQ ID NO: 1157253 - RNA, 19 nt, Homo sapiens
  misc_RNA (1)...(19): siRNA sense strand
caacuaugaaggaagauug

SEQ ID NO: 1157254 - RNA, 19 nt, Homo sapiens
  misc_RNA (1)...(19): siRNA sense strand
gcagguauuauucucacua

SEQ ID NO: 1157255 - RNA, 19 nt, Homo sapiens
  misc_RNA (1)...(19): siRNA sense strand
ccagcuaccuccacaagca

SEQ ID NO: 1157256 - RNA, 19 nt, Homo sapiens
  misc_RNA (1)...(19): siRNA sense strand
ucggaaagguuaugguuca

SEQ ID NO: 1157257 - RNA, 19 nt, Homo sapiens
  misc_RNA (1)...(19): siRNA sense strand
gaagaaccuuaauaauagc

SEQ ID NO: 1157258 - RNA, 19 nt, Homo sapiens
  misc_RNA (1)...(19): siRNA sense strand
ucaauagucuaacauacuc

SEQ ID NO: 1157259 - RNA, 19 nt, Homo sapiens
  misc_RNA (1)...(19): siRNA sense strand
caacugguacagauacuau

SEQ ID NO: 1157260 - RNA, 19 nt, Homo sapiens
  misc_RNA (1)...(19): siRNA sense strand
guucuuggguguuuaaggu

SEQ ID NO: 1157261 - RNA, 19 nt, Homo sapiens
  misc_RNA (1)...(19): siRNA sense strand
ggugaagggcuaaauagga

SEQ ID NO: 1157262 - RNA, 19 nt, Homo sapiens
  misc_RNA (1)...(19): siRNA sense strand
ccagcaggauggagaugaa

SEQ ID NO: 1157263 - RNA, 19 nt, Homo sapiens
  misc_RNA (1)...(19): siRNA sense strand
uggaagcaguuucaaggaa

SEQ ID NO: 1157264 - RNA, 19 nt, Homo sapiens
  misc_RNA (1)...(19): siRNA sense strand
gaagagagauugaaaccaa

SEQ ID NO: 1157265 - RNA, 19 nt, Homo sapiens
  misc_RNA (1)...(19): siRNA sense strand
ggaaagaaguaguugucua

SEQ ID NO: 1157266 - RNA, 19 nt, Homo sapiens
  misc_RNA (1)...(19): siRNA sense strand
ggacaggcaucuuuguuug

SEQ ID NO: 1157267 - RNA, 19 nt, Homo sapiens
  misc_RNA (1)...(19): siRNA sense strand
acagggagcucaauucaaa

SEQ ID NO: 1157268 - RNA, 19 nt, Homo sapiens
  misc_RNA (1)...(19): siRNA sense strand
agaaagugcuggaaauaaa

SEQ ID NO: 1157269 - RNA, 19 nt, Homo sapiens
  misc_RNA (1)...(19): siRNA sense strand
gcacaucaauagucuaaca

SEQ ID NO: 1157270 - RNA, 19 nt, Homo sapiens
  misc_RNA (1)...(19): siRNA sense strand
gcaaaccuguugaugagaa

SEQ ID NO: 1157271 - RNA, 19 nt, Homo sapiens
  misc_RNA (1)...(19): siRNA sense strand
ccacaaauaccaccucuaa

SEQ ID NO: 1157272 - RNA, 19 nt, Homo sapiens
  misc_RNA (1)...(19): siRNA sense strand
gaacuucguuuagaggauu

SEQ ID NO: 1157273 - RNA, 19 nt, Homo sapiens
  misc_RNA (1)...(19): siRNA sense strand
gaugaagauucccuuguuu

SEQ ID NO: 1157274 - RNA, 19 nt, Homo sapiens
  misc_RNA (1)...(19): siRNA sense strand
gaacaaccaaccuaagauu

SEQ ID NO: 1157275 - RNA, 19 nt, Homo sapiens
  misc_RNA (1)...(19): siRNA sense strand
ucacuaagguugguuacua

SEQ ID NO: 1157276 - RNA, 19 nt, Homo sapiens
  misc_RNA (1)...(19): siRNA sense strand
uggcacaacuucaacauuu

SEQ ID NO: 1157277 - RNA, 19 nt, Homo sapiens
  misc_RNA (1)...(19): siRNA sense strand
gaaggaagcagugaagaaa

SEQ ID NO: 1157278 - RNA, 19 nt, Homo sapiens
  misc_RNA (1)...(19): siRNA sense strand
gcagaccaauacuggauuu

SEQ ID NO: 1157279 - RNA, 19 nt, Homo sapiens
  misc_RNA (1)...(19): siRNA sense strand
cuacuuagaugauaaccaa

SEQ ID NO: 1157280 - RNA, 19 nt, Homo sapiens
  misc_RNA (1)...(19): siRNA sense strand
ggagagagauuuaguuucc

SEQ ID NO: 1157281 - RNA, 19 nt, Homo sapiens
  misc_RNA (1)...(19): siRNA sense strand
gaaggaagagagauugaaa

SEQ ID NO: 1157282 - RNA, 19 nt, Homo sapiens
  misc_RNA (1)...(19): siRNA sense strand
ugaaggagaugugaauuug

SEQ ID NO: 1157283 - RNA, 19 nt, Homo sapiens
  misc_RNA (1)...(19): siRNA sense strand
gaaagguuaugguucaauc

SEQ ID NO: 1157284 - RNA, 19 nt, Homo sapiens
  misc_RNA (1)...(19): siRNA sense strand
ggucaaagcuggaguuagc

SEQ ID NO: 1157285 - RNA, 19 nt, Homo sapiens
  misc_RNA (1)...(19): siRNA sense strand
gugaagggcuaaauaggaa

SEQ ID NO: 1157286 - RNA, 19 nt, Homo sapiens
  misc_RNA (1)...(19): siRNA sense strand
caacuggcuuuggcaauuu

SEQ ID NO: 1157287 - RNA, 19 nt, Homo sapiens
  misc_RNA (1)...(19): siRNA sense strand
uuacuacaccuacucauua

SEQ ID NO: 1157288 - RNA, 19 nt, Homo sapiens
  misc_RNA (1)...(19): siRNA sense strand
ggaggccucuuuggaaauu

SEQ ID NO: 1157289 - RNA, 19 nt, Homo sapiens
  misc_RNA (1)...(19): siRNA sense strand
ggaccagucucuucucauc

SEQ ID NO: 1157290 - RNA, 19 nt, Homo sapiens
  misc_RNA (1)...(19): siRNA sense strand
ccagaaggcucuuacuaca

SEQ ID NO: 1157291 - RNA, 19 nt, Homo sapiens
  misc_RNA (1)...(19): siRNA sense strand
ccaagaagagcauuaagaa

SEQ ID NO: 1157292 - RNA, 19 nt, Homo sapiens
  misc_RNA (1)...(19): siRNA sense strand
gaagagcauuaagaaguug

SEQ ID NO: 1157293 - RNA, 19 nt, Homo sapiens
  misc_RNA (1)...(19): siRNA sense strand
ggaaggaagcagugaagaa

SEQ ID NO: 1157294 - RNA, 19 nt, Homo sapiens
  misc_RNA (1)...(19): siRNA sense strand
aaacaugcgugcugcuuug

SEQ ID NO: 1157295 - RNA, 19 nt, Homo sapiens
  misc_RNA (1)...(19): siRNA sense strand
ccaggaggauuguuuggaa

SEQ ID NO: 1157296 - RNA, 19 nt, Homo sapiens
  misc_RNA (1)...(19): siRNA sense strand
gauaucaacuaugaaggaa

SEQ ID NO: 1157297 - RNA, 19 nt, Homo sapiens
  misc_RNA (1)...(19): siRNA sense strand
ggaguuuggccaacagaua

SEQ ID NO: 1157298 - RNA, 19 nt, Homo sapiens
  misc_RNA (1)...(19): siRNA sense strand
gcacccagcagguauuauu

SEQ ID NO: 1157299 - RNA, 19 nt, Homo sapiens
  misc_RNA (1)...(19): siRNA sense strand
ggaaauaaacacagcaaca

SEQ ID NO: 1157300 - RNA, 19 nt, Homo sapiens
  misc_RNA (1)...(19): siRNA sense strand
agaagagcauuaagaaguu

SEQ ID NO: 1157301 - RNA, 19 nt, Homo sapiens
  misc_RNA (1)...(19): siRNA sense strand
gcacuaacauaaguaccaa

SEQ ID NO: 1157302 - RNA, 19 nt, Homo sapiens
  misc_RNA (1)...(19): siRNA sense strand
ggaaacagggagcucaauu

SEQ ID NO: 1157303 - RNA, 19 nt, Homo sapiens
  misc_RNA (1)...(19): siRNA sense strand
uaucaacuaugaaggaaga

SEQ ID NO: 1157304 - RNA, 19 nt, Homo sapiens
  misc_RNA (1)...(19): siRNA sense strand
ccagaucgccuugcugaua

SEQ ID NO: 1157305 - RNA, 19 nt, Homo sapiens
  misc_RNA (1)...(19): siRNA sense strand
gaacuaguacaacuggauu

SEQ ID NO: 1157306 - RNA, 19 nt, Homo sapiens
  misc_RNA (1)...(19): siRNA sense strand
gaaacagggagcucaauuc

SEQ ID NO: 1157307 - RNA, 19 nt, Homo sapiens
  misc_RNA (1)...(19): siRNA sense strand
gaagaaggaagagagauug

SEQ ID NO: 1157308 - RNA, 19 nt, Homo sapiens
  misc_RNA (1)...(19): siRNA sense strand
guaccaagcaccaguguau

SEQ ID NO: 1157309 - RNA, 19 nt, Homo sapiens
  misc_RNA (1)...(19): siRNA sense strand
uaagcaaaccuguugauga

SEQ ID NO: 1157310 - RNA, 19 nt, Homo sapiens
  misc_RNA (1)...(19): siRNA sense strand
cuacugggacuacuauuaa

SEQ ID NO: 1157311 - RNA, 19 nt, Homo sapiens
  misc_RNA (1)...(19): siRNA sense strand
gcaagucacuagaggaacu

SEQ ID NO: 1157312 - RNA, 19 nt, Homo sapiens
  misc_RNA (1)...(19): siRNA sense strand
guugaagacugcuccuuug

SEQ ID NO: 1157313 - RNA, 19 nt, Homo sapiens
  misc_RNA (1)...(19): siRNA sense strand
uugcugauaucaacuauga

SEQ ID NO: 1157314 - RNA, 19 nt, Homo sapiens
  misc_RNA (1)...(19): siRNA sense strand
uaggaaggcugaaguuaca

SEQ ID NO: 1157315 - RNA, 19 nt, Homo sapiens
  misc_RNA (1)...(19): siRNA sense strand
ugauaccauuguugcauua

SEQ ID NO: 1157316 - RNA, 19 nt, Homo sapiens
  misc_RNA (1)...(19): siRNA sense strand
cuacaccuacucauuauaa

SEQ ID NO: 1157317 - RNA, 19 nt, Homo sapiens
  misc_RNA (1)...(19): siRNA sense strand
acaaauaccagugggaaua

SEQ ID NO: 1157318 - RNA, 19 nt, Homo sapiens
  misc_RNA (1)...(19): siRNA sense strand
guacagauacuauggucaa

SEQ ID NO: 1157319 - RNA, 19 nt, Homo sapiens
  misc_RNA (1)...(19): siRNA sense strand
gagcauccgucuaaaacua

SEQ ID NO: 1157320 - RNA, 19 nt, Homo sapiens
  misc_RNA (1)...(19): siRNA sense strand
uagaggaacuucguuuaga

SEQ ID NO: 1157321 - RNA, 19 nt, Homo sapiens
  misc_RNA (1)...(19): siRNA sense strand
caacagaaucagcagacua

SEQ ID NO: 1157322 - RNA, 19 nt, Homo sapiens
  misc_RNA (1)...(19): siRNA sense strand
uguuuaaggucucccauuu

SEQ ID NO: 1157323 - RNA, 19 nt, Homo sapiens
  misc_RNA (1)...(19): siRNA sense strand
gaguuuggccaacagauaa

SEQ ID NO: 1157324 - RNA, 19 nt, Homo sapiens
  misc_RNA (1)...(19): siRNA sense strand
gguuaugguucaaucuauu

SEQ ID NO: 1157325 - RNA, 19 nt, Homo sapiens
  misc_RNA (1)...(19): siRNA sense strand
ggaugaccgagaagaaaua

SEQ ID NO: 1157326 - RNA, 19 nt, Homo sapiens
  misc_RNA (1)...(19): siRNA sense strand
gcaacaguguggaugauac

SEQ ID NO: 1157327 - RNA, 19 nt, Homo sapiens
  misc_RNA (1)...(19): siRNA sense strand
caagucacaucucuuugau

SEQ ID NO: 1157328 - RNA, 19 nt, Homo sapiens
  misc_RNA (1)...(19): siRNA sense strand
ugucagacccuaagaagaa

SEQ ID NO: 1157329 - RNA, 19 nt, Homo sapiens
  misc_RNA (1)...(19): siRNA sense strand
caacaccaugggauuauuu

SEQ ID NO: 1157330 - RNA, 19 nt, Homo sapiens
  misc_RNA (1)...(19): siRNA sense strand
ggcaauaacaagcuuacua

SEQ ID NO: 1157331 - RNA, 19 nt, Homo sapiens
  misc_RNA (1)...(19): siRNA sense strand
cagaucgccuugcugauau

SEQ ID NO: 1157332 - RNA, 19 nt, Homo sapiens
  misc_RNA (1)...(19): siRNA sense strand
gggaacaaccaaccuaaga

SEQ ID NO: 1157333 - RNA, 19 nt, Homo sapiens
  misc_RNA (1)...(19): siRNA sense strand
acaaauaccaccucuaauc

SEQ ID NO: 1157334 - RNA, 19 nt, Homo sapiens
  misc_RNA (1)...(19): siRNA sense strand
cagguauuauucucacuaa

SEQ ID NO: 1157335 - RNA, 19 nt, Homo sapiens
  misc_RNA (1)...(19): siRNA sense strand
agaugaagauucccuuguu

SEQ ID NO: 1157336 - RNA, 19 nt, Homo sapiens
  misc_RNA (1)...(19): siRNA sense strand
ccaagucacaucucuuuga

SEQ ID NO: 1157337 - RNA, 19 nt, Homo sapiens
  misc_RNA (1)...(19): siRNA sense strand
gcaauaacaagcuuacuac

SEQ ID NO: 1157338 - RNA, 19 nt, Homo sapiens
  misc_RNA (1)...(19): siRNA sense strand
gcaccaacaccaugggauu

SEQ ID NO: 1157339 - RNA, 19 nt, Homo sapiens
  misc_RNA (1)...(19): siRNA sense strand
aaacaaugccuuugcacaa

SEQ ID NO: 1157340 - RNA, 19 nt, Homo sapiens
  misc_RNA (1)...(19): siRNA sense strand
guacaaagaaguugaagac

SEQ ID NO: 1157341 - RNA, 19 nt, Homo sapiens
  misc_RNA (1)...(19): siRNA sense strand
gaaggagaugugaauuuga

SEQ ID NO: 1157342 - RNA, 19 nt, Homo sapiens
  misc_RNA (1)...(19): siRNA sense strand
gcauuugguucuagcaaca

SEQ ID NO: 1157343 - RNA, 19 nt, Homo sapiens
  misc_RNA (1)...(19): siRNA sense strand
aagcaaaccuguugaugag

SEQ ID NO: 1157344 - RNA, 19 nt, Homo sapiens
  misc_RNA (1)...(19): siRNA sense strand
aaauccagguggucucuuu

SEQ ID NO: 1157345 - RNA, 19 nt, Homo sapiens
  misc_RNA (1)...(19): siRNA sense strand
guguauuacugcuaugaaa

SEQ ID NO: 1157346 - RNA, 19 nt, Homo sapiens
  misc_RNA (1)...(19): siRNA sense strand
gaaauaaacacagcaacag

SEQ ID NO: 1157347 - RNA, 19 nt, Homo sapiens
  misc_RNA (1)...(19): siRNA sense strand
cagaaagugcuggaaauaa

SEQ ID NO: 1157348 - RNA, 19 nt, Homo sapiens
  misc_RNA (1)...(19): siRNA sense strand
agagagauuuaguuuccua

SEQ ID NO: 1157349 - RNA, 19 nt, Homo sapiens
  misc_RNA (1)...(19): siRNA sense strand
aaaucuagcuucaccaucu

SEQ ID NO: 1157350 - RNA, 19 nt, Homo sapiens
  misc_RNA (1)...(19): siRNA sense strand
cagcacaucaauagucuaa

SEQ ID NO: 1157351 - RNA, 19 nt, Homo sapiens
  misc_RNA (1)...(19): siRNA sense strand
ggauggagaugaagauucc

SEQ ID NO: 1157352 - RNA, 19 nt, Homo sapiens
  misc_RNA (1)...(19): siRNA sense strand
ggaggagcauccgucuaaa

SEQ ID NO: 1157353 - RNA, 19 nt, Homo sapiens
  misc_RNA (1)...(19): siRNA sense strand
caacuaugaaggaagauug

SEQ ID NO: 1157354 - RNA, 19 nt, Homo sapiens
  misc_RNA (1)...(19): siRNA sense strand
gcagguauuauucucacua

SEQ ID NO: 1157355 - RNA, 19 nt, Homo sapiens
  misc_RNA (1)...(19): siRNA sense strand
ccagcuaccuccacaagca

SEQ ID NO: 1157356 - RNA, 19 nt, Homo sapiens
  misc_RNA (1)...(19): siRNA sense strand
ucggaaagguuaugguuca

SEQ ID NO: 1157357 - RNA, 19 nt, Homo sapiens
  misc_RNA (1)...(19): siRNA sense strand
gaagaaccuuaauaauagc

SEQ ID NO: 1157358 - RNA, 19 nt, Homo sapiens
  misc_RNA (1)...(19): siRNA sense strand
ucaauagucuaacauacuc

SEQ ID NO: 1157359 - RNA, 19 nt, Homo sapiens
  misc_RNA (1)...(19): siRNA sense strand
caacugguacagauacuau

SEQ ID NO: 1157360 - RNA, 19 nt, Homo sapiens
  misc_RNA (1)...(19): siRNA sense strand
guucuuggguguuuaaggu

SEQ ID NO: 1157361 - RNA, 19 nt, Homo sapiens
  misc_RNA (1)...(19): siRNA sense strand
ggugaagggcuaaauagga

SEQ ID NO: 1157362 - RNA, 19 nt, Homo sapiens
  misc_RNA (1)...(19): siRNA sense strand
ccagcaggauggagaugaa

SEQ ID NO: 1157363 - RNA, 19 nt, Homo sapiens
  misc_RNA (1)...(19): siRNA sense strand
uggaagcaguuucaaggaa

SEQ ID NO: 1157364 - RNA, 19 nt, Homo sapiens
  misc_RNA (1)...(19): siRNA sense strand
gaagagagauugaaaccaa

SEQ ID NO: 1157365 - RNA, 19 nt, Homo sapiens
  misc_RNA (1)...(19): siRNA sense strand
ggaaagaaguaguugucua

SEQ ID NO: 1157366 - RNA, 19 nt, Homo sapiens
  misc_RNA (1)...(19): siRNA sense strand
ggacaggcaucuuuguuug

SEQ ID NO: 1157367 - RNA, 19 nt, Homo sapiens
  misc_RNA (1)...(19): siRNA sense strand
acagggagcucaauucaaa

SEQ ID NO: 1157368 - RNA, 19 nt, Homo sapiens
  misc_RNA (1)...(19): siRNA sense strand
agaaagugcuggaaauaaa

SEQ ID NO: 1157369 - RNA, 19 nt, Homo sapiens
  misc_RNA (1)...(19): siRNA sense strand
gcacaucaauagucuaaca

SEQ ID NO: 1157370 - RNA, 19 nt, Homo sapiens
  misc_RNA (1)...(19): siRNA sense strand
gcaaaccuguugaugagaa

SEQ ID NO: 1157371 - RNA, 19 nt, Homo sapiens
  misc_RNA (1)...(19): siRNA sense strand
ccacaaauaccaccucuaa

SEQ ID NO: 1157372 - RNA, 19 nt, Homo sapiens
  misc_RNA (1)...(19): siRNA sense strand
gaacuucguuuagaggauu

SEQ ID NO: 1157373 - RNA, 19 nt, Homo sapiens
  misc_RNA (1)...(19): siRNA sense strand
gaugaagauucccuuguuu

SEQ ID NO: 1157374 - RNA, 19 nt, Homo sapiens
  misc_RNA (1)...(19): siRNA sense strand
gaacaaccaaccuaagauu

SEQ ID NO: 1157375 - RNA, 19 nt, Homo sapiens
  misc_RNA (1)...(19): siRNA sense strand
ucacuaagguugguuacua

SEQ ID NO: 1157376 - RNA, 19 nt, Homo sapiens
  misc_RNA (1)...(19): siRNA sense strand
uggcacaacuucaacauuu

SEQ ID NO: 1157377 - RNA, 19 nt, Homo sapiens
  misc_RNA (1)...(19): siRNA sense strand
gaaggaagcagugaagaaa

SEQ ID NO: 1157378 - RNA, 19 nt, Homo sapiens
  misc_RNA (1)...(19): siRNA sense strand
gcagaccaauacuggauuu

SEQ ID NO: 1157379 - RNA, 19 nt, Homo sapiens
  misc_RNA (1)...(19): siRNA sense strand
cuacuuagaugauaaccaa

SEQ ID NO: 1157380 - RNA, 19 nt, Homo sapiens
  misc_RNA (1)...(19): siRNA sense strand
ggagagagauuuaguuucc

SEQ ID NO: 1157381 - RNA, 19 nt, Homo sapiens
  misc_RNA (1)...(19): siRNA sense strand
gaaggaagagagauugaaa

SEQ ID NO: 1157382 - RNA, 19 nt, Homo sapiens
  misc_RNA (1)...(19): siRNA sense strand
ugaaggagaugugaauuug

SEQ ID NO: 1157383 - RNA, 19 nt, Homo sapiens
  misc_RNA (1)...(19): siRNA sense strand
gaaagguuaugguucaauc

SEQ ID NO: 1157384 - RNA, 19 nt, Homo sapiens
  misc_RNA (1)...(19): siRNA sense strand
ggucaaagcuggaguuagc

SEQ ID NO: 1157385 - RNA, 19 nt, Homo sapiens
  misc_RNA (1)...(19): siRNA sense strand
gugaagggcuaaauaggaa

SEQ ID NO: 1157386 - RNA, 19 nt, Homo sapiens
  misc_RNA (1)...(19): siRNA sense strand
caacuggcuuuggcaauuu

SEQ ID NO: 1157387 - RNA, 19 nt, Homo sapiens
  misc_RNA (1)...(19): siRNA sense strand
uuacuacaccuacucauua

SEQ ID NO: 1157388 - RNA, 19 nt, Homo sapiens
  misc_RNA (1)...(19): siRNA sense strand
ggaggccucuuuggaaauu

SEQ ID NO: 1157389 - RNA, 19 nt, Homo sapiens
  misc_RNA (1)...(19): siRNA sense strand
ggaccagucucuucucauc

SEQ ID NO: 1157390 - RNA, 19 nt, Homo sapiens
  misc_RNA (1)...(19): siRNA sense strand
ccagaaggcucuuacuaca

SEQ ID NO: 1157391 - RNA, 19 nt, Homo sapiens
  misc_RNA (1)...(19): siRNA sense strand
ccaagaagagcauuaagaa

SEQ ID NO: 1157392 - RNA, 19 nt, Homo sapiens
  misc_RNA (1)...(19): siRNA sense strand
gaagagcauuaagaaguug

SEQ ID NO: 1157393 - RNA, 19 nt, Homo sapiens
  misc_RNA (1)...(19): siRNA sense strand
ggaaggaagcagugaagaa

SEQ ID NO: 1157394 - RNA, 19 nt, Homo sapiens
  misc_RNA (1)...(19): siRNA sense strand
aaacaugcgugcugcuuug

SEQ ID NO: 1157395 - RNA, 19 nt, Homo sapiens
  misc_RNA (1)...(19): siRNA sense strand
ccaggaggauuguuuggaa

SEQ ID NO: 1157396 - RNA, 19 nt, Homo sapiens
  misc_RNA (1)...(19): siRNA sense strand
gauaucaacuaugaaggaa

SEQ ID NO: 1157397 - RNA, 19 nt, Homo sapiens
  misc_RNA (1)...(19): siRNA sense strand
ggaguuuggccaacagaua

SEQ ID NO: 1157398 - RNA, 19 nt, Homo sapiens
  misc_RNA (1)...(19): siRNA sense strand
gcacccagcagguauuauu

SEQ ID NO: 1157399 - RNA, 19 nt, Homo sapiens
  misc_RNA (1)...(19): siRNA sense strand
ggaaauaaacacagcaaca

SEQ ID NO: 1157400 - RNA, 19 nt, Homo sapiens
  misc_RNA (1)...(19): siRNA sense strand
agaagagcauuaagaaguu

SEQ ID NO: 1157401 - RNA, 19 nt, Homo sapiens
  misc_RNA (1)...(19): siRNA sense strand
gcacuaacauaaguaccaa

SEQ ID NO: 1157402 - RNA, 19 nt, Homo sapiens
  misc_RNA (1)...(19): siRNA sense strand
ggaaacagggagcucaauu

SEQ ID NO: 1157403 - RNA, 19 nt, Homo sapiens
  misc_RNA (1)...(19): siRNA sense strand
uaucaacuaugaaggaaga

SEQ ID NO: 1157404 - RNA, 19 nt, Homo sapiens
  misc_RNA (1)...(19): siRNA sense strand
ccagaucgccuugcugaua

SEQ ID NO: 1157405 - RNA, 19 nt, Homo sapiens
  misc_RNA (1)...(19): siRNA sense strand
gaacuaguacaacuggauu

SEQ ID NO: 1157406 - RNA, 19 nt, Homo sapiens
  misc_RNA (1)...(19): siRNA sense strand
gaaacagggagcucaauuc

SEQ ID NO: 1157407 - RNA, 19 nt, Homo sapiens
  misc_RNA (1)...(19): siRNA sense strand
gaagaaggaagagagauug

SEQ ID NO: 1157408 - RNA, 19 nt, Homo sapiens
  misc_RNA (1)...(19): siRNA sense strand
guaccaagcaccaguguau

SEQ ID NO: 1157409 - RNA, 19 nt, Homo sapiens
  misc_RNA (1)...(19): siRNA sense strand
uaagcaaaccuguugauga

SEQ ID NO: 1157410 - RNA, 19 nt, Homo sapiens
  misc_RNA (1)...(19): siRNA sense strand
cuacugggacuacuauuaa

SEQ ID NO: 1157411 - RNA, 19 nt, Homo sapiens
  misc_RNA (1)...(19): siRNA sense strand
gcaagucacuagaggaacu

SEQ ID NO: 1157412 - RNA, 19 nt, Homo sapiens
  misc_RNA (1)...(19): siRNA sense strand
guugaagacugcuccuuug

SEQ ID NO: 1157413 - RNA, 19 nt, Homo sapiens
  misc_RNA (1)...(19): siRNA sense strand
uugcugauaucaacuauga

SEQ ID NO: 1157414 - RNA, 19 nt, Homo sapiens
  misc_RNA (1)...(19): siRNA sense strand
uaggaaggcugaaguuaca

SEQ ID NO: 1157415 - RNA, 19 nt, Homo sapiens
  misc_RNA (1)...(19): siRNA sense strand
ugauaccauuguugcauua

SEQ ID NO: 1157416 - RNA, 19 nt, Homo sapiens
  misc_RNA (1)...(19): siRNA sense strand
cuacaccuacucauuauaa

SEQ ID NO: 1157417 - RNA, 19 nt, Homo sapiens
  misc_RNA (1)...(19): siRNA sense strand
acaaauaccagugggaaua

SEQ ID NO: 1157418 - RNA, 19 nt, Homo sapiens
  misc_RNA (1)...(19): siRNA sense strand
guacagauacuauggucaa

SEQ ID NO: 1157419 - RNA, 19 nt, Homo sapiens
  misc_RNA (1)...(19): siRNA sense strand
gagcauccgucuaaaacua

SEQ ID NO: 1157420 - RNA, 19 nt, Homo sapiens
  misc_RNA (1)...(19): siRNA sense strand
uagaggaacuucguuuaga

SEQ ID NO: 1157421 - RNA, 19 nt, Homo sapiens
  misc_RNA (1)...(19): siRNA sense strand
caacagaaucagcagacua

SEQ ID NO: 1157422 - RNA, 19 nt, Homo sapiens
  misc_RNA (1)...(19): siRNA sense strand
uguuuaaggucucccauuu

SEQ ID NO: 1157423 - RNA, 19 nt, Homo sapiens
  misc_RNA (1)...(19): siRNA sense strand
gaguuuggccaacagauaa

SEQ ID NO: 1157424 - RNA, 19 nt, Homo sapiens
  misc_RNA (1)...(19): siRNA sense strand
gguuaugguucaaucuauu

SEQ ID NO: 1157425 - RNA, 19 nt, Homo sapiens
  misc_RNA (1)...(19): siRNA sense strand
ggaugaccgagaagaaaua

SEQ ID NO: 1157426 - RNA, 19 nt, Homo sapiens
  misc_RNA (1)...(19): siRNA sense strand
gcaacaguguggaugauac

SEQ ID NO: 1157427 - RNA, 19 nt, Homo sapiens
  misc_RNA (1)...(19): siRNA sense strand
caagucacaucucuuugau

SEQ ID NO: 1157428 - RNA, 19 nt, Homo sapiens
  misc_RNA (1)...(19): siRNA sense strand
ugucagacccuaagaagaa

SEQ ID NO: 1157429 - RNA, 19 nt, Homo sapiens
  misc_RNA (1)...(19): siRNA sense strand
caacaccaugggauuauuu

SEQ ID NO: 1157430 - RNA, 19 nt, Homo sapiens
  misc_RNA (1)...(19): siRNA sense strand
ggcaauaacaagcuuacua

SEQ ID NO: 1157431 - RNA, 19 nt, Homo sapiens
  misc_RNA (1)...(19): siRNA sense strand
cagaucgccuugcugauau

SEQ ID NO: 1157432 - RNA, 19 nt, Homo sapiens
  misc_RNA (1)...(19): siRNA sense strand
gggaacaaccaaccuaaga

SEQ ID NO: 1157433 - RNA, 19 nt, Homo sapiens
  misc_RNA (1)...(19): siRNA sense strand
acaaauaccaccucuaauc

SEQ ID NO: 1157434 - RNA, 19 nt, Homo sapiens
  misc_RNA (1)...(19): siRNA sense strand
cagguauuauucucacuaa

SEQ ID NO: 1157435 - RNA, 19 nt, Homo sapiens
  misc_RNA (1)...(19): siRNA sense strand
agaugaagauucccuuguu

SEQ ID NO: 1157436 - RNA, 19 nt, Homo sapiens
  misc_RNA (1)...(19): siRNA sense strand
ccaagucacaucucuuuga

SEQ ID NO: 1157437 - RNA, 19 nt, Homo sapiens
  misc_RNA (1)...(19): siRNA sense strand
gcaauaacaagcuuacuac

SEQ ID NO: 1157438 - RNA, 19 nt, Homo sapiens
  misc_RNA (1)...(19): siRNA sense strand
gcaccaacaccaugggauu

SEQ ID NO: 1157439 - RNA, 19 nt, Homo sapiens
  misc_RNA (1)...(19): siRNA sense strand
aaacaaugccuuugcacaa

SEQ ID NO: 1157440 - RNA, 19 nt, Homo sapiens
  misc_RNA (1)...(19): siRNA sense strand
guacaaagaaguugaagac

SEQ ID NO: 1157441 - RNA, 19 nt, Homo sapiens
  misc_RNA (1)...(19): siRNA sense strand
gaaggagaugugaauuuga

SEQ ID NO: 1157442 - RNA, 19 nt, Homo sapiens
  misc_RNA (1)...(19): siRNA sense strand
gcauuugguucuagcaaca

SEQ ID NO: 1157443 - RNA, 19 nt, Homo sapiens
  misc_RNA (1)...(19): siRNA sense strand
aagcaaaccuguugaugag

SEQ ID NO: 1157444 - RNA, 19 nt, Homo sapiens
  misc_RNA (1)...(19): siRNA sense strand
aaauccagguggucucuuu

SEQ ID NO: 1157445 - RNA, 19 nt, Homo sapiens
  misc_RNA (1)...(19): siRNA sense strand
guguauuacugcuaugaaa

SEQ ID NO: 1157446 - RNA, 19 nt, Homo sapiens
  misc_RNA (1)...(19): siRNA sense strand
gaaauaaacacagcaacag

SEQ ID NO: 1157447 - RNA, 19 nt, Homo sapiens
  misc_RNA (1)...(19): siRNA sense strand
cagaaagugcuggaaauaa

SEQ ID NO: 1157448 - RNA, 19 nt, Homo sapiens
  misc_RNA (1)...(19): siRNA sense strand
agagagauuuaguuuccua

SEQ ID NO: 1157449 - RNA, 19 nt, Homo sapiens
  misc_RNA (1)...(19): siRNA sense strand
aaaucuagcuucaccaucu

SEQ ID NO: 1157450 - RNA, 19 nt, Homo sapiens
  misc_RNA (1)...(19): siRNA sense strand
cagcacaucaauagucuaa

SEQ ID NO: 1157451 - RNA, 19 nt, Homo sapiens
  misc_RNA (1)...(19): siRNA sense strand
ggauggagaugaagauucc

SEQ ID NO: 1157452 - RNA, 19 nt, Homo sapiens
  misc_RNA (1)...(19): siRNA sense strand
ggaggagcauccgucuaaa

SEQ ID NO: 1157453 - RNA, 19 nt, Homo sapiens
  misc_RNA (1)...(19): siRNA sense strand
caacuaugaaggaagauug

SEQ ID NO: 1157454 - RNA, 19 nt, Homo sapiens
  misc_RNA (1)...(19): siRNA sense strand
gcagguauuauucucacua

SEQ ID NO: 1157455 - RNA, 19 nt, Homo sapiens
  misc_RNA (1)...(19): siRNA sense strand
ccagcuaccuccacaagca

SEQ ID NO: 1157456 - RNA, 19 nt, Homo sapiens
  misc_RNA (1)...(19): siRNA sense strand
ucggaaagguuaugguuca

SEQ ID NO: 1157457 - RNA, 19 nt, Homo sapiens
  misc_RNA (1)...(19): siRNA sense strand
gaagaaccuuaauaauagc

SEQ ID NO: 1157458 - RNA, 19 nt, Homo sapiens
  misc_RNA (1)...(19): siRNA sense strand
ucaauagucuaacauacuc

SEQ ID NO: 1157459 - RNA, 19 nt, Homo sapiens
  misc_RNA (1)...(19): siRNA sense strand
caacugguacagauacuau

SEQ ID NO: 1157460 - RNA, 19 nt, Homo sapiens
  misc_RNA (1)...(19): siRNA sense strand
guucuuggguguuuaaggu

SEQ ID NO: 1157461 - RNA, 19 nt, Homo sapiens
  misc_RNA (1)...(19): siRNA sense strand
ggugaagggcuaaauagga

SEQ ID NO: 1157462 - RNA, 19 nt, Homo sapiens
  misc_RNA (1)...(19): siRNA sense strand
ccagcaggauggagaugaa

SEQ ID NO: 1157463 - RNA, 19 nt, Homo sapiens
  misc_RNA (1)...(19): siRNA sense strand
uggaagcaguuucaaggaa

SEQ ID NO: 1157464 - RNA, 19 nt, Homo sapiens
  misc_RNA (1)...(19): siRNA sense strand
gaagagagauugaaaccaa

SEQ ID NO: 1157465 - RNA, 19 nt, Homo sapiens
  misc_RNA (1)...(19): siRNA sense strand
ggaaagaaguaguugucua

SEQ ID NO: 1157466 - RNA, 19 nt, Homo sapiens
  misc_RNA (1)...(19): siRNA sense strand
ggacaggcaucuuuguuug

SEQ ID NO: 1157467 - RNA, 19 nt, Homo sapiens
  misc_RNA (1)...(19): siRNA sense strand
acagggagcucaauucaaa

SEQ ID NO: 1157468 - RNA, 19 nt, Homo sapiens
  misc_RNA (1)...(19): siRNA sense strand
agaaagugcuggaaauaaa

SEQ ID NO: 1157469 - RNA, 19 nt, Homo sapiens
  misc_RNA (1)...(19): siRNA sense strand
gcacaucaauagucuaaca

SEQ ID NO: 1157470 - RNA, 19 nt, Homo sapiens
  misc_RNA (1)...(19): siRNA sense strand
gcaaaccuguugaugagaa

SEQ ID NO: 1157471 - RNA, 19 nt, Homo sapiens
  misc_RNA (1)...(19): siRNA sense strand
ccacaaauaccaccucuaa

SEQ ID NO: 1157472 - RNA, 19 nt, Homo sapiens
  misc_RNA (1)...(19): siRNA sense strand
gaacuucguuuagaggauu

SEQ ID NO: 1157473 - RNA, 19 nt, Homo sapiens
  misc_RNA (1)...(19): siRNA sense strand
gaugaagauucccuuguuu

SEQ ID NO: 1157474 - RNA, 19 nt, Homo sapiens
  misc_RNA (1)...(19): siRNA sense strand
gaacaaccaaccuaagauu

SEQ ID NO: 1157475 - RNA, 19 nt, Homo sapiens
  misc_RNA (1)...(19): siRNA sense strand
ucacuaagguugguuacua

SEQ ID NO: 1157476 - RNA, 19 nt, Homo sapiens
  misc_RNA (1)...(19): siRNA sense strand
uggcacaacuucaacauuu

SEQ ID NO: 1157477 - RNA, 19 nt, Homo sapiens
  misc_RNA (1)...(19): siRNA sense strand
gaaggaagcagugaagaaa

SEQ ID NO: 1157478 - RNA, 19 nt, Homo sapiens
  misc_RNA (1)...(19): siRNA sense strand
gcagaccaauacuggauuu

SEQ ID NO: 1157479 - RNA, 19 nt, Homo sapiens
  misc_RNA (1)...(19): siRNA sense strand
cuacuuagaugauaaccaa

SEQ ID NO: 1157480 - RNA, 19 nt, Homo sapiens
  misc_RNA (1)...(19): siRNA sense strand
ggagagagauuuaguuucc

SEQ ID NO: 1157481 - RNA, 19 nt, Homo sapiens
  misc_RNA (1)...(19): siRNA sense strand
gaaggaagagagauugaaa

SEQ ID NO: 1157482 - RNA, 19 nt, Homo sapiens
  misc_RNA (1)...(19): siRNA sense strand
ugaaggagaugugaauuug

SEQ ID NO: 1157483 - RNA, 19 nt, Homo sapiens
  misc_RNA (1)...(19): siRNA sense strand
gaaagguuaugguucaauc

SEQ ID NO: 1157484 - RNA, 19 nt, Homo sapiens
  misc_RNA (1)...(19): siRNA sense strand
ggucaaagcuggaguuagc

SEQ ID NO: 1157485 - RNA, 19 nt, Homo sapiens
  misc_RNA (1)...(19): siRNA sense strand
gugaagggcuaaauaggaa

SEQ ID NO: 1157486 - RNA, 19 nt, Homo sapiens
  misc_RNA (1)...(19): siRNA sense strand
caacuggcuuuggcaauuu

SEQ ID NO: 1157487 - RNA, 19 nt, Homo sapiens
  misc_RNA (1)...(19): siRNA sense strand
uuacuacaccuacucauua

SEQ ID NO: 1157488 - RNA, 19 nt, Homo sapiens
  misc_RNA (1)...(19): siRNA sense strand
ggaggccucuuuggaaauu

SEQ ID NO: 1157489 - RNA, 19 nt, Homo sapiens
  misc_RNA (1)...(19): siRNA sense strand
ggaccagucucuucucauc

SEQ ID NO: 1157490 - RNA, 19 nt, Homo sapiens
  misc_RNA (1)...(19): siRNA sense strand
ccagaaggcucuuacuaca

SEQ ID NO: 1157491 - RNA, 19 nt, Homo sapiens
  misc_RNA (1)...(19): siRNA sense strand
ccaagaagagcauuaagaa

SEQ ID NO: 1157492 - RNA, 19 nt, Homo sapiens
  misc_RNA (1)...(19): siRNA sense strand
gaagagcauuaagaaguug

SEQ ID NO: 1157493 - RNA, 19 nt, Homo sapiens
  misc_RNA (1)...(19): siRNA sense strand
ggaaggaagcagugaagaa

SEQ ID NO: 1157494 - RNA, 19 nt, Homo sapiens
  misc_RNA (1)...(19): siRNA sense strand
aaacaugcgugcugcuuug

SEQ ID NO: 1157495 - RNA, 19 nt, Homo sapiens
  misc_RNA (1)...(19): siRNA sense strand
ccaggaggauuguuuggaa

SEQ ID NO: 1157496 - RNA, 19 nt, Homo sapiens
  misc_RNA (1)...(19): siRNA sense strand
gauaucaacuaugaaggaa

SEQ ID NO: 1157497 - RNA, 19 nt, Homo sapiens
  misc_RNA (1)...(19): siRNA sense strand
ggaguuuggccaacagaua

SEQ ID NO: 1157498 - RNA, 19 nt, Homo sapiens
  misc_RNA (1)...(19): siRNA sense strand
gcacccagcagguauuauu

SEQ ID NO: 1157499 - RNA, 19 nt, Homo sapiens
  misc_RNA (1)...(19): siRNA sense strand
ggaaauaaacacagcaaca

SEQ ID NO: 1157500 - RNA, 19 nt, Homo sapiens
  misc_RNA (1)...(19): siRNA sense strand
agaagagcauuaagaaguu

SEQ ID NO: 1157501 - RNA, 19 nt, Homo sapiens
  misc_RNA (1)...(19): siRNA sense strand
gcacuaacauaaguaccaa

SEQ ID NO: 1157502 - RNA, 19 nt, Homo sapiens
  misc_RNA (1)...(19): siRNA sense strand
ggaaacagggagcucaauu

SEQ ID NO: 1157503 - RNA, 19 nt, Homo sapiens
  misc_RNA (1)...(19): siRNA sense strand
uaucaacuaugaaggaaga

SEQ ID NO: 1157504 - RNA, 19 nt, Homo sapiens
  misc_RNA (1)...(19): siRNA sense strand
ccagaucgccuugcugaua

SEQ ID NO: 1157505 - RNA, 19 nt, Homo sapiens
  misc_RNA (1)...(19): siRNA sense strand
gaacuaguacaacuggauu

SEQ ID NO: 1157506 - RNA, 19 nt, Homo sapiens
  misc_RNA (1)...(19): siRNA sense strand
gaaacagggagcucaauuc

SEQ ID NO: 1157507 - RNA, 19 nt, Homo sapiens
  misc_RNA (1)...(19): siRNA sense strand
gaagaaggaagagagauug

SEQ ID NO: 1157508 - RNA, 19 nt, Homo sapiens
  misc_RNA (1)...(19): siRNA sense strand
guaccaagcaccaguguau

SEQ ID NO: 1157509 - RNA, 19 nt, Homo sapiens
  misc_RNA (1)...(19): siRNA sense strand
uaagcaaaccuguugauga

SEQ ID NO: 1157510 - RNA, 19 nt, Homo sapiens
  misc_RNA (1)...(19): siRNA sense strand
cuacugggacuacuauuaa

SEQ ID NO: 1157511 - RNA, 19 nt, Homo sapiens
  misc_RNA (1)...(19): siRNA sense strand
gcaagucacuagaggaacu

SEQ ID NO: 1157512 - RNA, 19 nt, Homo sapiens
  misc_RNA (1)...(19): siRNA sense strand
guugaagacugcuccuuug

SEQ ID NO: 1157513 - RNA, 19 nt, Homo sapiens
  misc_RNA (1)...(19): siRNA sense strand
uugcugauaucaacuauga

SEQ ID NO: 1157514 - RNA, 19 nt, Homo sapiens
  misc_RNA (1)...(19): siRNA sense strand
uaggaaggcugaaguuaca

SEQ ID NO: 1157515 - RNA, 19 nt, Homo sapiens
  misc_RNA (1)...(19): siRNA sense strand
ugauaccauuguugcauua

SEQ ID NO: 1157516 - RNA, 19 nt, Homo sapiens
  misc_RNA (1)...(19): siRNA sense strand
cuacaccuacucauuauaa

SEQ ID NO: 1157517 - RNA, 19 nt, Homo sapiens
  misc_RNA (1)...(19): siRNA sense strand
acaaauaccagugggaaua

SEQ ID NO: 1157518 - RNA, 19 nt, Homo sapiens
  misc_RNA (1)...(19): siRNA sense strand
guacagauacuauggucaa

SEQ ID NO: 1157519 - RNA, 19 nt, Homo sapiens
  misc_RNA (1)...(19): siRNA sense strand
gagcauccgucuaaaacua

SEQ ID NO: 1157520 - RNA, 19 nt, Homo sapiens
  misc_RNA (1)...(19): siRNA sense strand
uagaggaacuucguuuaga

SEQ ID NO: 1157521 - RNA, 19 nt, Homo sapiens
  misc_RNA (1)...(19): siRNA sense strand
caacagaaucagcagacua

SEQ ID NO: 1157522 - RNA, 19 nt, Homo sapiens
  misc_RNA (1)...(19): siRNA sense strand
uguuuaaggucucccauuu

SEQ ID NO: 1157523 - RNA, 19 nt, Homo sapiens
  misc_RNA (1)...(19): siRNA sense strand
gaguuuggccaacagauaa

SEQ ID NO: 1157524 - RNA, 19 nt, Homo sapiens
  misc_RNA (1)...(19): siRNA sense strand
gguuaugguucaaucuauu

SEQ ID NO: 1157525 - RNA, 19 nt, Homo sapiens
  misc_RNA (1)...(19): siRNA sense strand
ggaugaccgagaagaaaua

SEQ ID NO: 1157526 - RNA, 19 nt, Homo sapiens
  misc_RNA (1)...(19): siRNA sense strand
gcaacaguguggaugauac

SEQ ID NO: 1157527 - RNA, 19 nt, Homo sapiens
  misc_RNA (1)...(19): siRNA sense strand
caagucacaucucuuugau

SEQ ID NO: 1157528 - RNA, 19 nt, Homo sapiens
  misc_RNA (1)...(19): siRNA sense strand
ugucagacccuaagaagaa

SEQ ID NO: 1157529 - RNA, 19 nt, Homo sapiens
  misc_RNA (1)...(19): siRNA sense strand
caacaccaugggauuauuu

SEQ ID NO: 1157530 - RNA, 19 nt, Homo sapiens
  misc_RNA (1)...(19): siRNA sense strand
ggcaauaacaagcuuacua

SEQ ID NO: 1157531 - RNA, 19 nt, Homo sapiens
  misc_RNA (1)...(19): siRNA sense strand
cagaucgccuugcugauau

SEQ ID NO: 1157532 - RNA, 19 nt, Homo sapiens
  misc_RNA (1)...(19): siRNA sense strand
gggaacaaccaaccuaaga

SEQ ID NO: 1157533 - RNA, 19 nt, Homo sapiens
  misc_RNA (1)...(19): siRNA sense strand
acaaauaccaccucuaauc

SEQ ID NO: 1157534 - RNA, 19 nt, Homo sapiens
  misc_RNA (1)...(19): siRNA sense strand
cagguauuauucucacuaa

SEQ ID NO: 1157535 - RNA, 19 nt, Homo sapiens
  misc_RNA (1)...(19): siRNA sense strand
agaugaagauucccuuguu

SEQ ID NO: 1157536 - RNA, 19 nt, Homo sapiens
  misc_RNA (1)...(19): siRNA sense strand
ccaagucacaucucuuuga

SEQ ID NO: 1157537 - RNA, 19 nt, Homo sapiens
  misc_RNA (1)...(19): siRNA sense strand
gcaauaacaagcuuacuac

SEQ ID NO: 1157538 - RNA, 19 nt, Homo sapiens
  misc_RNA (1)...(19): siRNA sense strand
gcaccaacaccaugggauu

SEQ ID NO: 1157539 - RNA, 19 nt, Homo sapiens
  misc_RNA (1)...(19): siRNA sense strand
aaacaaugccuuugcacaa

SEQ ID NO: 1157540 - RNA, 19 nt, Homo sapiens
  misc_RNA (1)...(19): siRNA sense strand
guacaaagaaguugaagac

SEQ ID NO: 1157541 - RNA, 19 nt, Homo sapiens
  misc_RNA (1)...(19): siRNA sense strand
gaaggagaugugaauuuga

SEQ ID NO: 1157542 - RNA, 19 nt, Homo sapiens
  misc_RNA (1)...(19): siRNA sense strand
gcauuugguucuagcaaca

SEQ ID NO: 1157543 - RNA, 19 nt, Homo sapiens
  misc_RNA (1)...(19): siRNA sense strand
aagcaaaccuguugaugag

SEQ ID NO: 1157544 - RNA, 19 nt, Homo sapiens
  misc_RNA (1)...(19): siRNA sense strand
aaauccagguggucucuuu

SEQ ID NO: 1157545 - RNA, 19 nt, Homo sapiens
  misc_RNA (1)...(19): siRNA sense strand
guguauuacugcuaugaaa

SEQ ID NO: 1157546 - RNA, 19 nt, Homo sapiens
  misc_RNA (1)...(19): siRNA sense strand
gaaauaaacacagcaacag

SEQ ID NO: 1157547 - RNA, 19 nt, Homo sapiens
  misc_RNA (1)...(19): siRNA sense strand
cagaaagugcuggaaauaa

SEQ ID NO: 1157548 - RNA, 19 nt, Homo sapiens
  misc_RNA (1)...(19): siRNA sense strand
agagagauuuaguuuccua

SEQ ID NO: 1157549 - RNA, 19 nt, Homo sapiens
  misc_RNA (1)...(19): siRNA sense strand
aaaucuagcuucaccaucu

SEQ ID NO: 1157550 - RNA, 19 nt, Homo sapiens
  misc_RNA (1)...(19): siRNA sense strand
cagcacaucaauagucuaa

SEQ ID NO: 1157551 - RNA, 19 nt, Homo sapiens
  misc_RNA (1)...(19): siRNA sense strand
ggauggagaugaagauucc

SEQ ID NO: 1157552 - RNA, 19 nt, Homo sapiens
  misc_RNA (1)...(19): siRNA sense strand
ggaggagcauccgucuaaa

SEQ ID NO: 1157553 - RNA, 19 nt, Homo sapiens
  misc_RNA (1)...(19): siRNA sense strand
caacuaugaaggaagauug

SEQ ID NO: 1157554 - RNA, 19 nt, Homo sapiens
  misc_RNA (1)...(19): siRNA sense strand
gcagguauuauucucacua

SEQ ID NO: 1157555 - RNA, 19 nt, Homo sapiens
  misc_RNA (1)...(19): siRNA sense strand
ccagcuaccuccacaagca

SEQ ID NO: 1157556 - RNA, 19 nt, Homo sapiens
  misc_RNA (1)...(19): siRNA sense strand
ucggaaagguuaugguuca

SEQ ID NO: 1157557 - RNA, 19 nt, Homo sapiens
  misc_RNA (1)...(19): siRNA sense strand
gaagaaccuuaauaauagc

SEQ ID NO: 1157558 - RNA, 19 nt, Homo sapiens
  misc_RNA (1)...(19): siRNA sense strand
ucaauagucuaacauacuc

SEQ ID NO: 1157559 - RNA, 19 nt, Homo sapiens
  misc_RNA (1)...(19): siRNA sense strand
caacugguacagauacuau

SEQ ID NO: 1157560 - RNA, 19 nt, Homo sapiens
  misc_RNA (1)...(19): siRNA sense strand
guucuuggguguuuaaggu

SEQ ID NO: 1157561 - RNA, 19 nt, Homo sapiens
  misc_RNA (1)...(19): siRNA sense strand
ggugaagggcuaaauagga

SEQ ID NO: 1157562 - RNA, 19 nt, Homo sapiens
  misc_RNA (1)...(19): siRNA sense strand
ccagcaggauggagaugaa

SEQ ID NO: 1157563 - RNA, 19 nt, Homo sapiens
  misc_RNA (1)...(19): siRNA sense strand
uggaagcaguuucaaggaa

SEQ ID NO: 1157564 - RNA, 19 nt, Homo sapiens
  misc_RNA (1)...(19): siRNA sense strand
ugaagaagcuacaagaaau

SEQ ID NO: 1157565 - RNA, 19 nt, Homo sapiens
  misc_RNA (1)...(19): siRNA sense strand
agagacagcugcauuguug

SEQ ID NO: 1157566 - RNA, 19 nt, Homo sapiens
  misc_RNA (1)...(19): siRNA sense strand
uauaagaccuacaauggaa

SEQ ID NO: 1157567 - RNA, 19 nt, Homo sapiens
  misc_RNA (1)...(19): siRNA sense strand
gcucaucccugcuguagug

SEQ ID NO: 1157568 - RNA, 19 nt, Homo sapiens
  misc_RNA (1)...(19): siRNA sense strand
guacagagacagcugcauu

SEQ ID NO: 1157569 - RNA, 19 nt, Homo sapiens
  misc_RNA (1)...(19): siRNA sense strand
gcacuggcauuugcagcua

SEQ ID NO: 1157570 - RNA, 19 nt, Homo sapiens
  misc_RNA (1)...(19): siRNA sense strand
acagauugguucaaagaaa

SEQ ID NO: 1157571 - RNA, 19 nt, Homo sapiens
  misc_RNA (1)...(19): siRNA sense strand
guagagauccugcuuacga

SEQ ID NO: 1157572 - RNA, 19 nt, Homo sapiens
  misc_RNA (1)...(19): siRNA sense strand
ucacuuaugaugacuauga

SEQ ID NO: 1157573 - RNA, 19 nt, Homo sapiens
  misc_RNA (1)...(19): siRNA sense strand
gugaagaagcuacaagaaa

SEQ ID NO: 1157574 - RNA, 19 nt, Homo sapiens
  misc_RNA (1)...(19): siRNA sense strand
gcauucagaaaguguauaa

SEQ ID NO: 1157575 - RNA, 19 nt, Homo sapiens
  misc_RNA (1)...(19): siRNA sense strand
gaguagagauccugcuuac

SEQ ID NO: 1157576 - RNA, 19 nt, Homo sapiens
  misc_RNA (1)...(19): siRNA sense strand
ggaguagagauccugcuua

SEQ ID NO: 1157577 - RNA, 19 nt, Homo sapiens
  misc_RNA (1)...(19): siRNA sense strand
ggcaucaccuccuccaaga

SEQ ID NO: 1157578 - RNA, 19 nt, Homo sapiens
  misc_RNA (1)...(19): siRNA sense strand
gaagcuacaagaaaucaug

SEQ ID NO: 1157579 - RNA, 19 nt, Homo sapiens
  misc_RNA (1)...(19): siRNA sense strand
ccuaugucuucaucacuua

SEQ ID NO: 1157580 - RNA, 19 nt, Homo sapiens
  misc_RNA (1)...(19): siRNA sense strand
gaagaagcuacaagaaauc

SEQ ID NO: 1157581 - RNA, 19 nt, Homo sapiens
  misc_RNA (1)...(19): siRNA sense strand
ugacuaugaccacuucuuu

SEQ ID NO: 1157582 - RNA, 19 nt, Homo sapiens
  misc_RNA (1)...(19): siRNA sense strand
cagagagacugccagcaau

SEQ ID NO: 1157583 - RNA, 19 nt, Homo sapiens
  misc_RNA (1)...(19): siRNA sense strand
gagacugccagcaauugua

SEQ ID NO: 1157584 - RNA, 19 nt, Homo sapiens
  misc_RNA (1)...(19): siRNA sense strand
gaucgcagcauucagaaag

SEQ ID NO: 1157585 - RNA, 19 nt, Homo sapiens
  misc_RNA (1)...(19): siRNA sense strand
guauaagaccuacaaugga

SEQ ID NO: 1157586 - RNA, 19 nt, Homo sapiens
  misc_RNA (1)...(19): siRNA sense strand
gugugaggcucuaguagug

SEQ ID NO: 1157587 - RNA, 19 nt, Homo sapiens
  misc_RNA (1)...(19): siRNA sense strand
uacaagaaaucaugaugca

SEQ ID NO: 1157588 - RNA, 19 nt, Homo sapiens
  misc_RNA (1)...(19): siRNA sense strand
gccuaugucuucaucacuu

SEQ ID NO: 1157589 - RNA, 19 nt, Homo sapiens
  misc_RNA (1)...(19): siRNA sense strand
gaauucacaacuacucaga

SEQ ID NO: 1157590 - RNA, 19 nt, Homo sapiens
  misc_RNA (1)...(19): siRNA sense strand
ugagguugaucgcagcauu

SEQ ID NO: 1157591 - RNA, 19 nt, Homo sapiens
  misc_RNA (1)...(19): siRNA sense strand
gagagacugccagcaauug

SEQ ID NO: 1157592 - RNA, 19 nt, Homo sapiens
  misc_RNA (1)...(19): siRNA sense strand
cagcugcauuguuguggaa

SEQ ID NO: 1157593 - RNA, 19 nt, Homo sapiens
  misc_RNA (1)...(19): siRNA sense strand
gugaggcucuaguagugaa

SEQ ID NO: 1157594 - RNA, 19 nt, Homo sapiens
  misc_RNA (1)...(19): siRNA sense strand
guugaucgcagcauucaga

SEQ ID NO: 1157595 - RNA, 19 nt, Homo sapiens
  misc_RNA (1)...(19): siRNA sense strand
cagauugguucaaagaaac

SEQ ID NO: 1157596 - RNA, 19 nt, Homo sapiens
  misc_RNA (1)...(19): siRNA sense strand
ugaugacuaugaccacuuc

SEQ ID NO: 1157597 - RNA, 19 nt, Homo sapiens
  misc_RNA (1)...(19): siRNA sense strand
agacugccagcaauuguaa

SEQ ID NO: 1157598 - RNA, 19 nt, Homo sapiens
  misc_RNA (1)...(19): siRNA sense strand
gggagccuaugucuucauc

SEQ ID NO: 1157599 - RNA, 19 nt, Homo sapiens
  misc_RNA (1)...(19): siRNA sense strand
gcugcauuguuguggaauu

SEQ ID NO: 1157600 - RNA, 19 nt, Homo sapiens
  misc_RNA (1)...(19): siRNA sense strand
gugcuugcaucguguugug

SEQ ID NO: 1157601 - RNA, 19 nt, Homo sapiens
  misc_RNA (1)...(19): siRNA sense strand
acuaugaccacuucuuuga

SEQ ID NO: 1157602 - RNA, 19 nt, Homo sapiens
  misc_RNA (1)...(19): siRNA sense strand
ugugggagccuaugucuuc

SEQ ID NO: 1157603 - RNA, 19 nt, Homo sapiens
  misc_RNA (1)...(19): siRNA sense strand
gaaaauacagauugguuca

SEQ ID NO: 1157604 - RNA, 19 nt, Homo sapiens
  misc_RNA (1)...(19): siRNA sense strand
gcagcauucagaaagugua

SEQ ID NO: 1157605 - RNA, 19 nt, Homo sapiens
  misc_RNA (1)...(19): siRNA sense strand
guagugaucauagcuguag

SEQ ID NO: 1157606 - RNA, 19 nt, Homo sapiens
  misc_RNA (1)...(19): siRNA sense strand
gcuauugauuauguacaga

SEQ ID NO: 1157607 - RNA, 19 nt, Homo sapiens
  misc_RNA (1)...(19): siRNA sense strand
gcuacaagaaaucaugaug

SEQ ID NO: 1157608 - RNA, 19 nt, Homo sapiens
  misc_RNA (1)...(19): siRNA sense strand
auacagauugguucaaaga

SEQ ID NO: 1157609 - RNA, 19 nt, Homo sapiens
  misc_RNA (1)...(19): siRNA sense strand
gagccuaugucuucaucac

SEQ ID NO: 1157610 - RNA, 19 nt, Homo sapiens
  misc_RNA (1)...(19): siRNA sense strand
gcuguaggagcccugcuuu

SEQ ID NO: 1157611 - RNA, 19 nt, Homo sapiens
  misc_RNA (1)...(19): siRNA sense strand
gacuaugaccacuucuuug

SEQ ID NO: 1157612 - RNA, 19 nt, Homo sapiens
  misc_RNA (1)...(19): siRNA sense strand
cagagacagcugcauuguu

SEQ ID NO: 1157613 - RNA, 19 nt, Homo sapiens
  misc_RNA (1)...(19): siRNA sense strand
uuucaucauugggcuaauu

SEQ ID NO: 1157614 - RNA, 19 nt, Homo sapiens
  misc_RNA (1)...(19): siRNA sense strand
ggugugaggcucuaguagu

SEQ ID NO: 1157615 - RNA, 19 nt, Homo sapiens
  misc_RNA (1)...(19): siRNA sense strand
agaaaguguauaagaccua

SEQ ID NO: 1157616 - RNA, 19 nt, Homo sapiens
  misc_RNA (1)...(19): siRNA sense strand
caucccugcuguagugauc

SEQ ID NO: 1157617 - RNA, 19 nt, Homo sapiens
  misc_RNA (1)...(19): siRNA sense strand
agagagacugccagcaauu

SEQ ID NO: 1157618 - RNA, 19 nt, Homo sapiens
  misc_RNA (1)...(19): siRNA sense strand
gagguugaucgcagcauuc

SEQ ID NO: 1157619 - RNA, 19 nt, Homo sapiens
  misc_RNA (1)...(19): siRNA sense strand
caauggaaccaacccugau

SEQ ID NO: 1157620 - RNA, 19 nt, Homo sapiens
  misc_RNA (1)...(19): siRNA sense strand
uugauuauguacagagaca

SEQ ID NO: 1157621 - RNA, 19 nt, Homo sapiens
  misc_RNA (1)...(19): siRNA sense strand
ugaagaagcuacaagaaau

SEQ ID NO: 1157622 - RNA, 19 nt, Homo sapiens
  misc_RNA (1)...(19): siRNA sense strand
agagacagcugcauuguug

SEQ ID NO: 1157623 - RNA, 19 nt, Homo sapiens
  misc_RNA (1)...(19): siRNA sense strand
uauaagaccuacaauggaa

SEQ ID NO: 1157624 - RNA, 19 nt, Homo sapiens
  misc_RNA (1)...(19): siRNA sense strand
gcucaucccugcuguagug

SEQ ID NO: 1157625 - RNA, 19 nt, Homo sapiens
  misc_RNA (1)...(19): siRNA sense strand
guacagagacagcugcauu

SEQ ID NO: 1157626 - RNA, 19 nt, Homo sapiens
  misc_RNA (1)...(19): siRNA sense strand
gcacuggcauuugcagcua

SEQ ID NO: 1157627 - RNA, 19 nt, Homo sapiens
  misc_RNA (1)...(19): siRNA sense strand
acagauugguucaaagaaa

SEQ ID NO: 1157628 - RNA, 19 nt, Homo sapiens
  misc_RNA (1)...(19): siRNA sense strand
guagagauccugcuuacga

SEQ ID NO: 1157629 - RNA, 19 nt, Homo sapiens
  misc_RNA (1)...(19): siRNA sense strand
ucacuuaugaugacuauga

SEQ ID NO: 1157630 - RNA, 19 nt, Homo sapiens
  misc_RNA (1)...(19): siRNA sense strand
gugaagaagcuacaagaaa

SEQ ID NO: 1157631 - RNA, 19 nt, Homo sapiens
  misc_RNA (1)...(19): siRNA sense strand
gcauucagaaaguguauaa

SEQ ID NO: 1157632 - RNA, 19 nt, Homo sapiens
  misc_RNA (1)...(19): siRNA sense strand
gaguagagauccugcuuac

SEQ ID NO: 1157633 - RNA, 19 nt, Homo sapiens
  misc_RNA (1)...(19): siRNA sense strand
ggaguagagauccugcuua

SEQ ID NO: 1157634 - RNA, 19 nt, Homo sapiens
  misc_RNA (1)...(19): siRNA sense strand
ggcaucaccuccuccaaga

SEQ ID NO: 1157635 - RNA, 19 nt, Homo sapiens
  misc_RNA (1)...(19): siRNA sense strand
gaagcuacaagaaaucaug

SEQ ID NO: 1157636 - RNA, 19 nt, Homo sapiens
  misc_RNA (1)...(19): siRNA sense strand
ccuaugucuucaucacuua

SEQ ID NO: 1157637 - RNA, 19 nt, Homo sapiens
  misc_RNA (1)...(19): siRNA sense strand
gaagaagcuacaagaaauc

SEQ ID NO: 1157638 - RNA, 19 nt, Homo sapiens
  misc_RNA (1)...(19): siRNA sense strand
ugacuaugaccacuucuuu

SEQ ID NO: 1157639 - RNA, 19 nt, Homo sapiens
  misc_RNA (1)...(19): siRNA sense strand
cagagagacugccagcaau

SEQ ID NO: 1157640 - RNA, 19 nt, Homo sapiens
  misc_RNA (1)...(19): siRNA sense strand
gagacugccagcaauugua

SEQ ID NO: 1157641 - RNA, 19 nt, Homo sapiens
  misc_RNA (1)...(19): siRNA sense strand
gaucgcagcauucagaaag

SEQ ID NO: 1157642 - RNA, 19 nt, Homo sapiens
  misc_RNA (1)...(19): siRNA sense strand
guauaagaccuacaaugga

SEQ ID NO: 1157643 - RNA, 19 nt, Homo sapiens
  misc_RNA (1)...(19): siRNA sense strand
gugugaggcucuaguagug

SEQ ID NO: 1157644 - RNA, 19 nt, Homo sapiens
  misc_RNA (1)...(19): siRNA sense strand
uacaagaaaucaugaugca

SEQ ID NO: 1157645 - RNA, 19 nt, Homo sapiens
  misc_RNA (1)...(19): siRNA sense strand
gccuaugucuucaucacuu

SEQ ID NO: 1157646 - RNA, 19 nt, Homo sapiens
  misc_RNA (1)...(19): siRNA sense strand
gaauucacaacuacucaga

SEQ ID NO: 1157647 - RNA, 19 nt, Homo sapiens
  misc_RNA (1)...(19): siRNA sense strand
ugagguugaucgcagcauu

SEQ ID NO: 1157648 - RNA, 19 nt, Homo sapiens
  misc_RNA (1)...(19): siRNA sense strand
gagagacugccagcaauug

SEQ ID NO: 1157649 - RNA, 19 nt, Homo sapiens
  misc_RNA (1)...(19): siRNA sense strand
cagcugcauuguuguggaa

SEQ ID NO: 1157650 - RNA, 19 nt, Homo sapiens
  misc_RNA (1)...(19): siRNA sense strand
gugaggcucuaguagugaa

SEQ ID NO: 1157651 - RNA, 19 nt, Homo sapiens
  misc_RNA (1)...(19): siRNA sense strand
guugaucgcagcauucaga

SEQ ID NO: 1157652 - RNA, 19 nt, Homo sapiens
  misc_RNA (1)...(19): siRNA sense strand
cagauugguucaaagaaac

SEQ ID NO: 1157653 - RNA, 19 nt, Homo sapiens
  misc_RNA (1)...(19): siRNA sense strand
ugaugacuaugaccacuuc

SEQ ID NO: 1157654 - RNA, 19 nt, Homo sapiens
  misc_RNA (1)...(19): siRNA sense strand
agacugccagcaauuguaa

SEQ ID NO: 1157655 - RNA, 19 nt, Homo sapiens
  misc_RNA (1)...(19): siRNA sense strand
gggagccuaugucuucauc

SEQ ID NO: 1157656 - RNA, 19 nt, Homo sapiens
  misc_RNA (1)...(19): siRNA sense strand
gcugcauuguuguggaauu

SEQ ID NO: 1157657 - RNA, 19 nt, Homo sapiens
  misc_RNA (1)...(19): siRNA sense strand
gugcuugcaucguguugug

SEQ ID NO: 1157658 - RNA, 19 nt, Homo sapiens
  misc_RNA (1)...(19): siRNA sense strand
acuaugaccacuucuuuga

SEQ ID NO: 1157659 - RNA, 19 nt, Homo sapiens
  misc_RNA (1)...(19): siRNA sense strand
ugugggagccuaugucuuc

SEQ ID NO: 1157660 - RNA, 19 nt, Homo sapiens
  misc_RNA (1)...(19): siRNA sense strand
gaaaauacagauugguuca

SEQ ID NO: 1157661 - RNA, 19 nt, Homo sapiens
  misc_RNA (1)...(19): siRNA sense strand
gcagcauucagaaagugua

SEQ ID NO: 1157662 - RNA, 19 nt, Homo sapiens
  misc_RNA (1)...(19): siRNA sense strand
guagugaucauagcuguag

SEQ ID NO: 1157663 - RNA, 19 nt, Homo sapiens
  misc_RNA (1)...(19): siRNA sense strand
gcuauugauuauguacaga

SEQ ID NO: 1157664 - RNA, 19 nt, Homo sapiens
  misc_RNA (1)...(19): siRNA sense strand
gcuacaagaaaucaugaug

SEQ ID NO: 1157665 - RNA, 19 nt, Homo sapiens
  misc_RNA (1)...(19): siRNA sense strand
auacagauugguucaaaga

SEQ ID NO: 1157666 - RNA, 19 nt, Homo sapiens
  misc_RNA (1)...(19): siRNA sense strand
gagccuaugucuucaucac

SEQ ID NO: 1157667 - RNA, 19 nt, Homo sapiens
  misc_RNA (1)...(19): siRNA sense strand
gcuguaggagcccugcuuu

SEQ ID NO: 1157668 - RNA, 19 nt, Homo sapiens
  misc_RNA (1)...(19): siRNA sense strand
gacuaugaccacuucuuug

SEQ ID NO: 1157669 - RNA, 19 nt, Homo sapiens
  misc_RNA (1)...(19): siRNA sense strand
cagagacagcugcauuguu

SEQ ID NO: 1157670 - RNA, 19 nt, Homo sapiens
  misc_RNA (1)...(19): siRNA sense strand
uuucaucauugggcuaauu

SEQ ID NO: 1157671 - RNA, 19 nt, Homo sapiens
  misc_RNA (1)...(19): siRNA sense strand
ggugugaggcucuaguagu

SEQ ID NO: 1157672 - RNA, 19 nt, Homo sapiens
  misc_RNA (1)...(19): siRNA sense strand
agaaaguguauaagaccua

SEQ ID NO: 1157673 - RNA, 19 nt, Homo sapiens
  misc_RNA (1)...(19): siRNA sense strand
caucccugcuguagugauc

SEQ ID NO: 1157674 - RNA, 19 nt, Homo sapiens
  misc_RNA (1)...(19): siRNA sense strand
agagagacugccagcaauu

SEQ ID NO: 1157675 - RNA, 19 nt, Homo sapiens
  misc_RNA (1)...(19): siRNA sense strand
gagguugaucgcagcauuc

SEQ ID NO: 1157676 - RNA, 19 nt, Homo sapiens
  misc_RNA (1)...(19): siRNA sense strand
caauggaaccaacccugau

SEQ ID NO: 1157677 - RNA, 19 nt, Homo sapiens
  misc_RNA (1)...(19): siRNA sense strand
uugauuauguacagagaca

SEQ ID NO: 1157678 - RNA, 19 nt, Homo sapiens
  misc_RNA (1)...(19): siRNA sense strand
ggacaagggauuaauagua

SEQ ID NO: 1157679 - RNA, 19 nt, Homo sapiens
  misc_RNA (1)...(19): siRNA sense strand
gacaagggauuaauaguau

SEQ ID NO: 1157680 - RNA, 19 nt, Homo sapiens
  misc_RNA (1)...(19): siRNA sense strand
ggaauuccaugacuccaaa

SEQ ID NO: 1157681 - RNA, 19 nt, Homo sapiens
  misc_RNA (1)...(19): siRNA sense strand
ggaaaccucuggaccucua

SEQ ID NO: 1157682 - RNA, 19 nt, Homo sapiens
  misc_RNA (1)...(19): siRNA sense strand
gaauaccucugacaugaug

SEQ ID NO: 1157683 - RNA, 19 nt, Homo sapiens
  misc_RNA (1)...(19): siRNA sense strand
caacauggcggacaacaaa

SEQ ID NO: 1157684 - RNA, 19 nt, Homo sapiens
  misc_RNA (1)...(19): siRNA sense strand
aggagaagcugaucaguaa

SEQ ID NO: 1157685 - RNA, 19 nt, Homo sapiens
  misc_RNA (1)...(19): siRNA sense strand
gcaacgacaugauuccuau

SEQ ID NO: 1157686 - RNA, 19 nt, Homo sapiens
  misc_RNA (1)...(19): siRNA sense strand
gaaggagauugguggauug

SEQ ID NO: 1157687 - RNA, 19 nt, Homo sapiens
  misc_RNA (1)...(19): siRNA sense strand
guaaagaucguacagaaga

SEQ ID NO: 1157688 - RNA, 19 nt, Homo sapiens
  misc_RNA (1)...(19): siRNA sense strand
ugaucuaucugguucaaua

SEQ ID NO: 1157689 - RNA, 19 nt, Homo sapiens
  misc_RNA (1)...(19): siRNA sense strand
ggaagaagaagaggaagua

SEQ ID NO: 1157690 - RNA, 19 nt, Homo sapiens
  misc_RNA (1)...(19): siRNA sense strand
gaauagggccugagggaaa

SEQ ID NO: 1157691 - RNA, 19 nt, Homo sapiens
  misc_RNA (1)...(19): siRNA sense strand
gagguuauaugcagaggaa

SEQ ID NO: 1157692 - RNA, 19 nt, Homo sapiens
  misc_RNA (1)...(19): siRNA sense strand
ggaagaagaagaagaacuu

SEQ ID NO: 1157693 - RNA, 19 nt, Homo sapiens
  misc_RNA (1)...(19): siRNA sense strand
gaacuggaccuccuuaugg

SEQ ID NO: 1157694 - RNA, 19 nt, Homo sapiens
  misc_RNA (1)...(19): siRNA sense strand
gcagauuccuccuuaugga

SEQ ID NO: 1157695 - RNA, 19 nt, Homo sapiens
  misc_RNA (1)...(19): siRNA sense strand
ggagauggcugugguacug

SEQ ID NO: 1157696 - RNA, 19 nt, Homo sapiens
  misc_RNA (1)...(19): siRNA sense strand
cacagcagauuccuccuua

SEQ ID NO: 1157697 - RNA, 19 nt, Homo sapiens
  misc_RNA (1)...(19): siRNA sense strand
gcacagagccaccggaaca

SEQ ID NO: 1157698 - RNA, 19 nt, Homo sapiens
  misc_RNA (1)...(19): siRNA sense strand
gaggagaagcugaucagua

SEQ ID NO: 1157699 - RNA, 19 nt, Homo sapiens
  misc_RNA (1)...(19): siRNA sense strand
guaaugaugucccucaagu

SEQ ID NO: 1157700 - RNA, 19 nt, Homo sapiens
  misc_RNA (1)...(19): siRNA sense strand
gcccuaacauggccaauau

SEQ ID NO: 1157701 - RNA, 19 nt, Homo sapiens
  misc_RNA (1)...(19): siRNA sense strand
caguaaagaucguacagaa

SEQ ID NO: 1157702 - RNA, 19 nt, Homo sapiens
  misc_RNA (1)...(19): siRNA sense strand
uauaaugccuugcccaaug

SEQ ID NO: 1157703 - RNA, 19 nt, Homo sapiens
  misc_RNA (1)...(19): siRNA sense strand
gcaaugacuuugagauguc

SEQ ID NO: 1157704 - RNA, 19 nt, Homo sapiens
  misc_RNA (1)...(19): siRNA sense strand
ggaccucuaucgccucuau

SEQ ID NO: 1157705 - RNA, 19 nt, Homo sapiens
  misc_RNA (1)...(19): siRNA sense strand
gaucagaugggcaagauga

SEQ ID NO: 1157706 - RNA, 19 nt, Homo sapiens
  misc_RNA (1)...(19): siRNA sense strand
caggaugccuuuaaugaug

SEQ ID NO: 1157707 - RNA, 19 nt, Homo sapiens
  misc_RNA (1)...(19): siRNA sense strand
ucaaugaccuccaguaagg

SEQ ID NO: 1157708 - RNA, 19 nt, Homo sapiens
  misc_RNA (1)...(19): siRNA sense strand
ccaggcagccaaacuauaa

SEQ ID NO: 1157709 - RNA, 19 nt, Homo sapiens
  misc_RNA (1)...(19): siRNA sense strand
gugguggacugcucagaua

SEQ ID NO: 1157710 - RNA, 19 nt, Homo sapiens
  misc_RNA (1)...(19): siRNA sense strand
aggcauggcuggaggcaua

SEQ ID NO: 1157711 - RNA, 19 nt, Homo sapiens
  misc_RNA (1)...(19): siRNA sense strand
gagcagcaaguuuccauuu

SEQ ID NO: 1157712 - RNA, 19 nt, Homo sapiens
  misc_RNA (1)...(19): siRNA sense strand
ugaaggagauugguggauu

SEQ ID NO: 1157713 - RNA, 19 nt, Homo sapiens
  misc_RNA (1)...(19): siRNA sense strand
gagaaguuguauagcacua

SEQ ID NO: 1157714 - RNA, 19 nt, Homo sapiens
  misc_RNA (1)...(19): siRNA sense strand
gaauccaaauccaagaaau

SEQ ID NO: 1157715 - RNA, 19 nt, Homo sapiens
  misc_RNA (1)...(19): siRNA sense strand
caacuaguguggacaugau

SEQ ID NO: 1157716 - RNA, 19 nt, Homo sapiens
  misc_RNA (1)...(19): siRNA sense strand
gaagaucaccaaguuguau

SEQ ID NO: 1157717 - RNA, 19 nt, Homo sapiens
  misc_RNA (1)...(19): siRNA sense strand
gagaagaucaccaaguugu

SEQ ID NO: 1157718 - RNA, 19 nt, Homo sapiens
  misc_RNA (1)...(19): siRNA sense strand
ggacaccacugagcauauc

SEQ ID NO: 1157719 - RNA, 19 nt, Homo sapiens
  misc_RNA (1)...(19): siRNA sense strand
ucaacauccugcuguauga

SEQ ID NO: 1157720 - RNA, 19 nt, Homo sapiens
  misc_RNA (1)...(19): siRNA sense strand
cgacagcacuaucccuaug

SEQ ID NO: 1157721 - RNA, 19 nt, Homo sapiens
  misc_RNA (1)...(19): siRNA sense strand
ggcagaaggaggagacuua

SEQ ID NO: 1157722 - RNA, 19 nt, Homo sapiens
  misc_RNA (1)...(19): siRNA sense strand
ggacauggccucgcagugu

SEQ ID NO: 1157723 - RNA, 19 nt, Homo sapiens
  misc_RNA (1)...(19): siRNA sense strand
gaaccauggccaacaauuc

SEQ ID NO: 1157724 - RNA, 19 nt, Homo sapiens
  misc_RNA (1)...(19): siRNA sense strand
gcagcaaguuuccauuugg

SEQ ID NO: 1157725 - RNA, 19 nt, Homo sapiens
  misc_RNA (1)...(19): siRNA sense strand
uaucagcccaguaugaaua

SEQ ID NO: 1157726 - RNA, 19 nt, Homo sapiens
  misc_RNA (1)...(19): siRNA sense strand
gacgaugccugauugagau

SEQ ID NO: 1157727 - RNA, 19 nt, Homo sapiens
  misc_RNA (1)...(19): siRNA sense strand
cagcuugccugaucuaucu

SEQ ID NO: 1157728 - RNA, 19 nt, Homo sapiens
  misc_RNA (1)...(19): siRNA sense strand
ggauggagcuaagaguuca

SEQ ID NO: 1157729 - RNA, 19 nt, Homo sapiens
  misc_RNA (1)...(19): siRNA sense strand
uaaagaucguacagaagaa

SEQ ID NO: 1157730 - RNA, 19 nt, Homo sapiens
  misc_RNA (1)...(19): siRNA sense strand
gaagaggaaguaguugaaa

SEQ ID NO: 1157731 - RNA, 19 nt, Homo sapiens
  misc_RNA (1)...(19): siRNA sense strand
uagagcuccuuguagaaua

SEQ ID NO: 1157732 - RNA, 19 nt, Homo sapiens
  misc_RNA (1)...(19): siRNA sense strand
gaucacagccacuauggau

SEQ ID NO: 1157733 - RNA, 19 nt, Homo sapiens
  misc_RNA (1)...(19): siRNA sense strand
gacauggccucgcaguguu

SEQ ID NO: 1157734 - RNA, 19 nt, Homo sapiens
  misc_RNA (1)...(19): siRNA sense strand
ggaaguaguugaaaaugau

SEQ ID NO: 1157735 - RNA, 19 nt, Homo sapiens
  misc_RNA (1)...(19): siRNA sense strand
gcacaugggcauuagauac

SEQ ID NO: 1157736 - RNA, 19 nt, Homo sapiens
  misc_RNA (1)...(19): siRNA sense strand
ggagauugguggauugacu

SEQ ID NO: 1157737 - RNA, 19 nt, Homo sapiens
  misc_RNA (1)...(19): siRNA sense strand
agauguggguggaccguua

SEQ ID NO: 1157738 - RNA, 19 nt, Homo sapiens
  misc_RNA (1)...(19): siRNA sense strand
gaaauccaguucuucuacu

SEQ ID NO: 1157739 - RNA, 19 nt, Homo sapiens
  misc_RNA (1)...(19): siRNA sense strand
ggcaugagcaggagcaauu

SEQ ID NO: 1157740 - RNA, 19 nt, Homo sapiens
  misc_RNA (1)...(19): siRNA sense strand
ggcaaugacuuugagaugu

SEQ ID NO: 1157741 - RNA, 19 nt, Homo sapiens
  misc_RNA (1)...(19): siRNA sense strand
guucagaggccaucaagga

SEQ ID NO: 1157742 - RNA, 19 nt, Homo sapiens
  misc_RNA (1)...(19): siRNA sense strand
ggagugaucccuucauguc

SEQ ID NO: 1157743 - RNA, 19 nt, Homo sapiens
  misc_RNA (1)...(19): siRNA sense strand
gcugccaacucuauccaaa

SEQ ID NO: 1157744 - RNA, 19 nt, Homo sapiens
  misc_RNA (1)...(19): siRNA sense strand
cauuugugauguacuguuu

SEQ ID NO: 1157745 - RNA, 19 nt, Homo sapiens
  misc_RNA (1)...(19): siRNA sense strand
ccaacaacauggcggacaa

SEQ ID NO: 1157746 - RNA, 19 nt, Homo sapiens
  misc_RNA (1)...(19): siRNA sense strand
ggacugcucagauaagcuu

SEQ ID NO: 1157747 - RNA, 19 nt, Homo sapiens
  misc_RNA (1)...(19): siRNA sense strand
ugacaagcuuccaguaaag

SEQ ID NO: 1157748 - RNA, 19 nt, Homo sapiens
  misc_RNA (1)...(19): siRNA sense strand
agaagaagaggaaguaguu

SEQ ID NO: 1157749 - RNA, 19 nt, Homo sapiens
  misc_RNA (1)...(19): siRNA sense strand
ggaacuggaccuccuuaug

SEQ ID NO: 1157750 - RNA, 19 nt, Homo sapiens
  misc_RNA (1)...(19): siRNA sense strand
cgcaggagcuaucucaaga

SEQ ID NO: 1157751 - RNA, 19 nt, Homo sapiens
  misc_RNA (1)...(19): siRNA sense strand
gcaccacuaacuuaugaaa

SEQ ID NO: 1157752 - RNA, 19 nt, Homo sapiens
  misc_RNA (1)...(19): siRNA sense strand
ucacagccacuauggauga

SEQ ID NO: 1157753 - RNA, 19 nt, Homo sapiens
  misc_RNA (1)...(19): siRNA sense strand
uugacaagcuuccaguaaa

SEQ ID NO: 1157754 - RNA, 19 nt, Homo sapiens
  misc_RNA (1)...(19): siRNA sense strand
gcagaaggaggagacuuaa

SEQ ID NO: 1157755 - RNA, 19 nt, Homo sapiens
  misc_RNA (1)...(19): siRNA sense strand
aaucaagcauugcccaaga

SEQ ID NO: 1157756 - RNA, 19 nt, Homo sapiens
  misc_RNA (1)...(19): siRNA sense strand
cacuauggaugacauguug

SEQ ID NO: 1157757 - RNA, 19 nt, Homo sapiens
  misc_RNA (1)...(19): siRNA sense strand
ccucggagcugaagaaagc

SEQ ID NO: 1157758 - RNA, 19 nt, Homo sapiens
  misc_RNA (1)...(19): siRNA sense strand
augagaagaucaccaaguu

SEQ ID NO: 1157759 - RNA, 19 nt, Homo sapiens
  misc_RNA (1)...(19): siRNA sense strand
ccaaugagaagaucaccaa

SEQ ID NO: 1157760 - RNA, 19 nt, Homo sapiens
  misc_RNA (1)...(19): siRNA sense strand
gaggacggagccuggaaua

SEQ ID NO: 1157761 - RNA, 19 nt, Homo sapiens
  misc_RNA (1)...(19): siRNA sense strand
ggcgggaacuugcaaccaa

SEQ ID NO: 1157762 - RNA, 19 nt, Homo sapiens
  misc_RNA (1)...(19): siRNA sense strand
augaauaccucugacauga

SEQ ID NO: 1157763 - RNA, 19 nt, Homo sapiens
  misc_RNA (1)...(19): siRNA sense strand
gaacucauugguuucacaa

SEQ ID NO: 1157764 - RNA, 19 nt, Homo sapiens
  misc_RNA (1)...(19): siRNA sense strand
guacgaaucacggcuguug

SEQ ID NO: 1157765 - RNA, 19 nt, Homo sapiens
  misc_RNA (1)...(19): siRNA sense strand
gaacaucaagauccuagag

SEQ ID NO: 1157766 - RNA, 19 nt, Homo sapiens
  misc_RNA (1)...(19): siRNA sense strand
gaggauggagcuaagaguu

SEQ ID NO: 1157767 - RNA, 19 nt, Homo sapiens
  misc_RNA (1)...(19): siRNA sense strand
auugagaucuuuggcauuu

SEQ ID NO: 1157768 - RNA, 19 nt, Homo sapiens
  misc_RNA (1)...(19): siRNA sense strand
cgacgaugccugauugaga

SEQ ID NO: 1157769 - RNA, 19 nt, Homo sapiens
  misc_RNA (1)...(19): siRNA sense strand
ccuaugagccaaauaagga

SEQ ID NO: 1157770 - RNA, 19 nt, Homo sapiens
  misc_RNA (1)...(19): siRNA sense strand
aaauccaguucuucuacua

SEQ ID NO: 1157771 - RNA, 19 nt, Homo sapiens
  misc_RNA (1)...(19): siRNA sense strand
caacaauguggaccugauu

SEQ ID NO: 1157772 - RNA, 19 nt, Homo sapiens
  misc_RNA (1)...(19): siRNA sense strand
gcaggcaccacuaacuuau

SEQ ID NO: 1157773 - RNA, 19 nt, Homo sapiens
  misc_RNA (1)...(19): siRNA sense strand
gaagcugaucaguaaguuu

SEQ ID NO: 1157774 - RNA, 19 nt, Homo sapiens
  misc_RNA (1)...(19): siRNA sense strand
ugagaucuuuggcauuuua

SEQ ID NO: 1157775 - RNA, 19 nt, Homo sapiens
  misc_RNA (1)...(19): siRNA sense strand
ccaucaacauccugcugua

SEQ ID NO: 1157776 - RNA, 19 nt, Homo sapiens
  misc_RNA (1)...(19): siRNA sense strand
ggacggagccuggaauagg

SEQ ID NO: 1157777 - RNA, 19 nt, Homo sapiens
  misc_RNA (1)...(19): siRNA sense strand
gaagcggaauuccaugacu

SEQ ID NO: 1157778 - RNA, 19 nt, Homo sapiens
  misc_RNA (1)...(19): siRNA sense strand
ggacaagggauuaauagua

SEQ ID NO: 1157779 - RNA, 19 nt, Homo sapiens
  misc_RNA (1)...(19): siRNA sense strand
gacaagggauuaauaguau

SEQ ID NO: 1157780 - RNA, 19 nt, Homo sapiens
  misc_RNA (1)...(19): siRNA sense strand
ggaauuccaugacuccaaa

SEQ ID NO: 1157781 - RNA, 19 nt, Homo sapiens
  misc_RNA (1)...(19): siRNA sense strand
ggaaaccucuggaccucua

SEQ ID NO: 1157782 - RNA, 19 nt, Homo sapiens
  misc_RNA (1)...(19): siRNA sense strand
gaauaccucugacaugaug

SEQ ID NO: 1157783 - RNA, 19 nt, Homo sapiens
  misc_RNA (1)...(19): siRNA sense strand
caacauggcggacaacaaa

SEQ ID NO: 1157784 - RNA, 19 nt, Homo sapiens
  misc_RNA (1)...(19): siRNA sense strand
gcaacgacaugauuccuau

SEQ ID NO: 1157785 - RNA, 19 nt, Homo sapiens
  misc_RNA (1)...(19): siRNA sense strand
gaaggagauugguggauug

SEQ ID NO: 1157786 - RNA, 19 nt, Homo sapiens
  misc_RNA (1)...(19): siRNA sense strand
ugaucuaucugguucaaua

SEQ ID NO: 1157787 - RNA, 19 nt, Homo sapiens
  misc_RNA (1)...(19): siRNA sense strand
gaauagggccugagggaaa

SEQ ID NO: 1157788 - RNA, 19 nt, Homo sapiens
  misc_RNA (1)...(19): siRNA sense strand
gagguuauaugcagaggaa

SEQ ID NO: 1157789 - RNA, 19 nt, Homo sapiens
  misc_RNA (1)...(19): siRNA sense strand
gaacuggaccuccuuaugg

SEQ ID NO: 1157790 - RNA, 19 nt, Homo sapiens
  misc_RNA (1)...(19): siRNA sense strand
gcagauuccuccuuaugga

SEQ ID NO: 1157791 - RNA, 19 nt, Homo sapiens
  misc_RNA (1)...(19): siRNA sense strand
cacagcagauuccuccuua

SEQ ID NO: 1157792 - RNA, 19 nt, Homo sapiens
  misc_RNA (1)...(19): siRNA sense strand
gcccuaacauggccaauau

SEQ ID NO: 1157793 - RNA, 19 nt, Homo sapiens
  misc_RNA (1)...(19): siRNA sense strand
uauaaugccuugcccaaug

SEQ ID NO: 1157794 - RNA, 19 nt, Homo sapiens
  misc_RNA (1)...(19): siRNA sense strand
ggaccucuaucgccucuau

SEQ ID NO: 1157795 - RNA, 19 nt, Homo sapiens
  misc_RNA (1)...(19): siRNA sense strand
gaucagaugggcaagauga

SEQ ID NO: 1157796 - RNA, 19 nt, Homo sapiens
  misc_RNA (1)...(19): siRNA sense strand
caggaugccuuuaaugaug

SEQ ID NO: 1157797 - RNA, 19 nt, Homo sapiens
  misc_RNA (1)...(19): siRNA sense strand
ucaaugaccuccaguaagg

SEQ ID NO: 1157798 - RNA, 19 nt, Homo sapiens
  misc_RNA (1)...(19): siRNA sense strand
ccaggcagccaaacuauaa

SEQ ID NO: 1157799 - RNA, 19 nt, Homo sapiens
  misc_RNA (1)...(19): siRNA sense strand
aggcauggcuggaggcaua

SEQ ID NO: 1157800 - RNA, 19 nt, Homo sapiens
  misc_RNA (1)...(19): siRNA sense strand
ugaaggagauugguggauu

SEQ ID NO: 1157801 - RNA, 19 nt, Homo sapiens
  misc_RNA (1)...(19): siRNA sense strand
gaauccaaauccaagaaau

SEQ ID NO: 1157802 - RNA, 19 nt, Homo sapiens
  misc_RNA (1)...(19): siRNA sense strand
gaagaucaccaaguuguau

SEQ ID NO: 1157803 - RNA, 19 nt, Homo sapiens
  misc_RNA (1)...(19): siRNA sense strand
gagaagaucaccaaguugu

SEQ ID NO: 1157804 - RNA, 19 nt, Homo sapiens
  misc_RNA (1)...(19): siRNA sense strand
cgacagcacuaucccuaug

SEQ ID NO: 1157805 - RNA, 19 nt, Homo sapiens
  misc_RNA (1)...(19): siRNA sense strand
ggcagaaggaggagacuua

SEQ ID NO: 1157806 - RNA, 19 nt, Homo sapiens
  misc_RNA (1)...(19): siRNA sense strand
ggacauggccucgcagugu

SEQ ID NO: 1157807 - RNA, 19 nt, Homo sapiens
  misc_RNA (1)...(19): siRNA sense strand
gaaccauggccaacaauuc

SEQ ID NO: 1157808 - RNA, 19 nt, Homo sapiens
  misc_RNA (1)...(19): siRNA sense strand
uaucagcccaguaugaaua

SEQ ID NO: 1157809 - RNA, 19 nt, Homo sapiens
  misc_RNA (1)...(19): siRNA sense strand
cagcuugccugaucuaucu

SEQ ID NO: 1157810 - RNA, 19 nt, Homo sapiens
  misc_RNA (1)...(19): siRNA sense strand
gacauggccucgcaguguu

SEQ ID NO: 1157811 - RNA, 19 nt, Homo sapiens
  misc_RNA (1)...(19): siRNA sense strand
ggagauugguggauugacu

SEQ ID NO: 1157812 - RNA, 19 nt, Homo sapiens
  misc_RNA (1)...(19): siRNA sense strand
agauguggguggaccguua

SEQ ID NO: 1157813 - RNA, 19 nt, Homo sapiens
  misc_RNA (1)...(19): siRNA sense strand
gaaauccaguucuucuacu

SEQ ID NO: 1157814 - RNA, 19 nt, Homo sapiens
  misc_RNA (1)...(19): siRNA sense strand
ggcaugagcaggagcaauu

SEQ ID NO: 1157815 - RNA, 19 nt, Homo sapiens
  misc_RNA (1)...(19): siRNA sense strand
ggagugaucccuucauguc

SEQ ID NO: 1157816 - RNA, 19 nt, Homo sapiens
  misc_RNA (1)...(19): siRNA sense strand
ccaacaacauggcggacaa

SEQ ID NO: 1157817 - RNA, 19 nt, Homo sapiens
  misc_RNA (1)...(19): siRNA sense strand
ggaacuggaccuccuuaug

SEQ ID NO: 1157818 - RNA, 19 nt, Homo sapiens
  misc_RNA (1)...(19): siRNA sense strand
gcugccaacucuauccaaa

SEQ ID NO: 1157819 - RNA, 19 nt, Homo sapiens
  misc_RNA (1)...(19): siRNA sense strand
cgcaggagcuaucucaaga

SEQ ID NO: 1157820 - RNA, 19 nt, Homo sapiens
  misc_RNA (1)...(19): siRNA sense strand
gcagaaggaggagacuuaa

SEQ ID NO: 1157821 - RNA, 19 nt, Homo sapiens
  misc_RNA (1)...(19): siRNA sense strand
aaucaagcauugcccaaga

SEQ ID NO: 1157822 - RNA, 19 nt, Homo sapiens
  misc_RNA (1)...(19): siRNA sense strand
ccucggagcugaagaaagc

SEQ ID NO: 1157823 - RNA, 19 nt, Homo sapiens
  misc_RNA (1)...(19): siRNA sense strand
augagaagaucaccaaguu

SEQ ID NO: 1157824 - RNA, 19 nt, Homo sapiens
  misc_RNA (1)...(19): siRNA sense strand
ccaaugagaagaucaccaa

SEQ ID NO: 1157825 - RNA, 19 nt, Homo sapiens
  misc_RNA (1)...(19): siRNA sense strand
gaggacggagccuggaaua

SEQ ID NO: 1157826 - RNA, 19 nt, Homo sapiens
  misc_RNA (1)...(19): siRNA sense strand
ggcgggaacuugcaaccaa

SEQ ID NO: 1157827 - RNA, 19 nt, Homo sapiens
  misc_RNA (1)...(19): siRNA sense strand
augaauaccucugacauga

SEQ ID NO: 1157828 - RNA, 19 nt, Homo sapiens
  misc_RNA (1)...(19): siRNA sense strand
ccuaugagccaaauaagga

SEQ ID NO: 1157829 - RNA, 19 nt, Homo sapiens
  misc_RNA (1)...(19): siRNA sense strand
uaguauggcuggcaugauc

SEQ ID NO: 1157830 - RNA, 19 nt, Homo sapiens
  misc_RNA (1)...(19): siRNA sense strand
ggacggagccuggaauagg

SEQ ID NO: 1157831 - RNA, 19 nt, Homo sapiens
  misc_RNA (1)...(19): siRNA sense strand
gaagcggaauuccaugacu

SEQ ID NO: 1157832 - RNA, 19 nt, Homo sapiens
  misc_RNA (1)...(19): siRNA sense strand
aaauccaguucuucuacua

SEQ ID NO: 1157833 - RNA, 19 nt, Homo sapiens
  misc_RNA (1)...(19): siRNA sense strand
gugagcacaucagggauuu

SEQ ID NO: 1157834 - RNA, 19 nt, Homo sapiens
  misc_RNA (1)...(19): siRNA sense strand
cagcagcaacgacaugauu

SEQ ID NO: 1157835 - RNA, 19 nt, Homo sapiens
  misc_RNA (1)...(19): siRNA sense strand
caacagggccagacuccau

SEQ ID NO: 1157836 - RNA, 19 nt, Homo sapiens
  misc_RNA (1)...(19): siRNA sense strand
gguaucagcccaguaugaa

SEQ ID NO: 1157837 - RNA, 19 nt, Homo sapiens
  misc_RNA (1)...(19): siRNA sense strand
gagcaggagcaauucaguu

SEQ ID NO: 1157838 - RNA, 19 nt, Homo sapiens
  misc_RNA (1)...(19): siRNA sense strand
guggugagccugagaggaa

SEQ ID NO: 1157839 - RNA, 19 nt, Homo sapiens
  misc_RNA (1)...(19): siRNA sense strand
ggaaccauggccaacaauu

SEQ ID NO: 1157840 - RNA, 19 nt, Homo sapiens
  misc_RNA (1)...(19): siRNA sense strand
ucuccuuucucuccucaua

SEQ ID NO: 1157841 - RNA, 19 nt, Homo sapiens
  misc_RNA (1)...(19): siRNA sense strand
gggccagacuccauauuac

SEQ ID NO: 1157842 - RNA, 19 nt, Homo sapiens
  misc_RNA (1)...(19): siRNA sense strand
caagaucgagguuauaugc

SEQ ID NO: 1157843 - RNA, 19 nt, Homo sapiens
  misc_RNA (1)...(19): siRNA sense strand
gcagccagcccagagauga

SEQ ID NO: 1157844 - RNA, 19 nt, Homo sapiens
  misc_RNA (1)...(19): siRNA sense strand
guggaaccauggccaacaa

SEQ ID NO: 1157845 - RNA, 19 nt, Homo sapiens
  misc_RNA (1)...(19): siRNA sense strand
ccucaaugaccuccaguaa

SEQ ID NO: 1157846 - RNA, 19 nt, Homo sapiens
  misc_RNA (1)...(19): siRNA sense strand
ucucagcagucccagcaaa

SEQ ID NO: 1157847 - RNA, 19 nt, Homo sapiens
  misc_RNA (1)...(19): siRNA sense strand
uaagggagggcaagaagau

SEQ ID NO: 1157848 - RNA, 19 nt, Homo sapiens
  misc_RNA (1)...(19): siRNA sense strand
uauggacaagggauuaaua

SEQ ID NO: 1157849 - RNA, 19 nt, Homo sapiens
  misc_RNA (1)...(19): siRNA sense strand
cagcagauuccuccuuaug

SEQ ID NO: 1157850 - RNA, 19 nt, Homo sapiens
  misc_RNA (1)...(19): siRNA sense strand
ggguaucagcccaguauga

SEQ ID NO: 1157851 - RNA, 19 nt, Homo sapiens
  misc_RNA (1)...(19): siRNA sense strand
gcaauucaguugggaucca

SEQ ID NO: 1157852 - RNA, 19 nt, Homo sapiens
  misc_RNA (1)...(19): siRNA sense strand
gccuuugaaugcaagauug

SEQ ID NO: 1157853 - RNA, 19 nt, Homo sapiens
  misc_RNA (1)...(19): siRNA sense strand
acacaggcaugggcuccua

SEQ ID NO: 1157854 - RNA, 19 nt, Homo sapiens
  misc_RNA (1)...(19): siRNA sense strand
cacaggcucagucuccuua

SEQ ID NO: 1157855 - RNA, 19 nt, Homo sapiens
  misc_RNA (1)...(19): siRNA sense strand
ccucagccauccaguccaa

SEQ ID NO: 1157856 - RNA, 19 nt, Homo sapiens
  misc_RNA (1)...(19): siRNA sense strand
gccaaggagagcagaguaa

SEQ ID NO: 1157857 - RNA, 19 nt, Homo sapiens
  misc_RNA (1)...(19): siRNA sense strand
aaacugcugucgccaugca

SEQ ID NO: 1157858 - RNA, 19 nt, Homo sapiens
  misc_RNA (1)...(19): siRNA sense strand
cagaagcggaauuccauga

SEQ ID NO: 1157859 - RNA, 19 nt, Homo sapiens
  misc_RNA (1)...(19): siRNA sense strand
agaaggaggagacuuaaag

SEQ ID NO: 1157860 - RNA, 19 nt, Homo sapiens
  misc_RNA (1)...(19): siRNA sense strand
cuacuacaaccaaugagaa

SEQ ID NO: 1157861 - RNA, 19 nt, Homo sapiens
  misc_RNA (1)...(19): siRNA sense strand
agacagaauccaaauccaa

SEQ ID NO: 1157862 - RNA, 19 nt, Homo sapiens
  misc_RNA (1)...(19): siRNA sense strand
gcucugaguccuggaguga

SEQ ID NO: 1157863 - RNA, 19 nt, Homo sapiens
  misc_RNA (1)...(19): siRNA sense strand
guauauccagugucucuau

SEQ ID NO: 1157864 - RNA, 19 nt, Homo sapiens
  misc_RNA (1)...(19): siRNA sense strand
ccaccaaaaugaacaacaa

SEQ ID NO: 1157865 - RNA, 19 nt, Homo sapiens
  misc_RNA (1)...(19): siRNA sense strand
guaagggagggcaagaaga

SEQ ID NO: 1157866 - RNA, 19 nt, Homo sapiens
  misc_RNA (1)...(19): siRNA sense strand
uggagguccuuaugacaga

SEQ ID NO: 1157867 - RNA, 19 nt, Homo sapiens
  misc_RNA (1)...(19): siRNA sense strand
gaagugacuccacauucca

SEQ ID NO: 1157868 - RNA, 19 nt, Homo sapiens
  misc_RNA (1)...(19): siRNA sense strand
ggacacccaagacagaauc

SEQ ID NO: 1157869 - RNA, 19 nt, Homo sapiens
  misc_RNA (1)...(19): siRNA sense strand
caucccagccuccacauca

SEQ ID NO: 1157870 - RNA, 19 nt, Homo sapiens
  misc_RNA (1)...(19): siRNA sense strand
ccagcaaacugccuauucc

SEQ ID NO: 1157871 - RNA, 19 nt, Homo sapiens
  misc_RNA (1)...(19): siRNA sense strand
caagacagaauccaaaucc

SEQ ID NO: 1157872 - RNA, 19 nt, Homo sapiens
  misc_RNA (1)...(19): siRNA sense strand
uguccuaugagccaaauaa

SEQ ID NO: 1157873 - RNA, 19 nt, Homo sapiens
  misc_RNA (1)...(19): siRNA sense strand
ccaggaugccuuuaaugau

SEQ ID NO: 1157874 - RNA, 19 nt, Homo sapiens
  misc_RNA (1)...(19): siRNA sense strand
uccaggaugccuuuaauga

SEQ ID NO: 1157875 - RNA, 19 nt, Homo sapiens
  misc_RNA (1)...(19): siRNA sense strand
cagaauccaaauccaagaa

SEQ ID NO: 1157876 - RNA, 19 nt, Homo sapiens
  misc_RNA (1)...(19): siRNA sense strand
gccagacuccauauuacaa

SEQ ID NO: 1157877 - RNA, 19 nt, Homo sapiens
  misc_RNA (1)...(19): siRNA sense strand
cgaaucucaugccuuccaa

SEQ ID NO: 1157878 - RNA, 19 nt, Homo sapiens
  misc_RNA (1)...(19): siRNA sense strand
ggacaagggauuaauagua

SEQ ID NO: 1157879 - RNA, 19 nt, Homo sapiens
  misc_RNA (1)...(19): siRNA sense strand
gacaagggauuaauaguau

SEQ ID NO: 1157880 - RNA, 19 nt, Homo sapiens
  misc_RNA (1)...(19): siRNA sense strand
ggaauuccaugacuccaaa

SEQ ID NO: 1157881 - RNA, 19 nt, Homo sapiens
  misc_RNA (1)...(19): siRNA sense strand
ggaaaccucuggaccucua

SEQ ID NO: 1157882 - RNA, 19 nt, Homo sapiens
  misc_RNA (1)...(19): siRNA sense strand
gaauaccucugacaugaug

SEQ ID NO: 1157883 - RNA, 19 nt, Homo sapiens
  misc_RNA (1)...(19): siRNA sense strand
caacauggcggacaacaaa

SEQ ID NO: 1157884 - RNA, 19 nt, Homo sapiens
  misc_RNA (1)...(19): siRNA sense strand
aggagaagcugaucaguaa

SEQ ID NO: 1157885 - RNA, 19 nt, Homo sapiens
  misc_RNA (1)...(19): siRNA sense strand
gcaacgacaugauuccuau

SEQ ID NO: 1157886 - RNA, 19 nt, Homo sapiens
  misc_RNA (1)...(19): siRNA sense strand
gaaggagauugguggauug

SEQ ID NO: 1157887 - RNA, 19 nt, Homo sapiens
  misc_RNA (1)...(19): siRNA sense strand
guaaagaucguacagaaga

SEQ ID NO: 1157888 - RNA, 19 nt, Homo sapiens
  misc_RNA (1)...(19): siRNA sense strand
ugaucuaucugguucaaua

SEQ ID NO: 1157889 - RNA, 19 nt, Homo sapiens
  misc_RNA (1)...(19): siRNA sense strand
ggaagaagaagaggaagua

SEQ ID NO: 1157890 - RNA, 19 nt, Homo sapiens
  misc_RNA (1)...(19): siRNA sense strand
gaauagggccugagggaaa

SEQ ID NO: 1157891 - RNA, 19 nt, Homo sapiens
  misc_RNA (1)...(19): siRNA sense strand
gagguuauaugcagaggaa

SEQ ID NO: 1157892 - RNA, 19 nt, Homo sapiens
  misc_RNA (1)...(19): siRNA sense strand
ggaagaagaagaagaacuu

SEQ ID NO: 1157893 - RNA, 19 nt, Homo sapiens
  misc_RNA (1)...(19): siRNA sense strand
gaacuggaccuccuuaugg

SEQ ID NO: 1157894 - RNA, 19 nt, Homo sapiens
  misc_RNA (1)...(19): siRNA sense strand
gcagauuccuccuuaugga

SEQ ID NO: 1157895 - RNA, 19 nt, Homo sapiens
  misc_RNA (1)...(19): siRNA sense strand
ggagauggcugugguacug

SEQ ID NO: 1157896 - RNA, 19 nt, Homo sapiens
  misc_RNA (1)...(19): siRNA sense strand
cacagcagauuccuccuua

SEQ ID NO: 1157897 - RNA, 19 nt, Homo sapiens
  misc_RNA (1)...(19): siRNA sense strand
gcacagagccaccggaaca

SEQ ID NO: 1157898 - RNA, 19 nt, Homo sapiens
  misc_RNA (1)...(19): siRNA sense strand
gaggagaagcugaucagua

SEQ ID NO: 1157899 - RNA, 19 nt, Homo sapiens
  misc_RNA (1)...(19): siRNA sense strand
guaaugaugucccucaagu

SEQ ID NO: 1157900 - RNA, 19 nt, Homo sapiens
  misc_RNA (1)...(19): siRNA sense strand
gcccuaacauggccaauau

SEQ ID NO: 1157901 - RNA, 19 nt, Homo sapiens
  misc_RNA (1)...(19): siRNA sense strand
caguaaagaucguacagaa

SEQ ID NO: 1157902 - RNA, 19 nt, Homo sapiens
  misc_RNA (1)...(19): siRNA sense strand
uauaaugccuugcccaaug

SEQ ID NO: 1157903 - RNA, 19 nt, Homo sapiens
  misc_RNA (1)...(19): siRNA sense strand
gcaaugacuuugagauguc

SEQ ID NO: 1157904 - RNA, 19 nt, Homo sapiens
  misc_RNA (1)...(19): siRNA sense strand
ggaccucuaucgccucuau

SEQ ID NO: 1157905 - RNA, 19 nt, Homo sapiens
  misc_RNA (1)...(19): siRNA sense strand
gaucagaugggcaagauga

SEQ ID NO: 1157906 - RNA, 19 nt, Homo sapiens
  misc_RNA (1)...(19): siRNA sense strand
caggaugccuuuaaugaug

SEQ ID NO: 1157907 - RNA, 19 nt, Homo sapiens
  misc_RNA (1)...(19): siRNA sense strand
ucaaugaccuccaguaagg

SEQ ID NO: 1157908 - RNA, 19 nt, Homo sapiens
  misc_RNA (1)...(19): siRNA sense strand
ccaggcagccaaacuauaa

SEQ ID NO: 1157909 - RNA, 19 nt, Homo sapiens
  misc_RNA (1)...(19): siRNA sense strand
gugguggacugcucagaua

SEQ ID NO: 1157910 - RNA, 19 nt, Homo sapiens
  misc_RNA (1)...(19): siRNA sense strand
aggcauggcuggaggcaua

SEQ ID NO: 1157911 - RNA, 19 nt, Homo sapiens
  misc_RNA (1)...(19): siRNA sense strand
gagcagcaaguuuccauuu

SEQ ID NO: 1157912 - RNA, 19 nt, Homo sapiens
  misc_RNA (1)...(19): siRNA sense strand
ugaaggagauugguggauu

SEQ ID NO: 1157913 - RNA, 19 nt, Homo sapiens
  misc_RNA (1)...(19): siRNA sense strand
gagaaguuguauagcacua

SEQ ID NO: 1157914 - RNA, 19 nt, Homo sapiens
  misc_RNA (1)...(19): siRNA sense strand
gaauccaaauccaagaaau

SEQ ID NO: 1157915 - RNA, 19 nt, Homo sapiens
  misc_RNA (1)...(19): siRNA sense strand
caacuaguguggacaugau

SEQ ID NO: 1157916 - RNA, 19 nt, Homo sapiens
  misc_RNA (1)...(19): siRNA sense strand
gaagaucaccaaguuguau

SEQ ID NO: 1157917 - RNA, 19 nt, Homo sapiens
  misc_RNA (1)...(19): siRNA sense strand
gagaagaucaccaaguugu

SEQ ID NO: 1157918 - RNA, 19 nt, Homo sapiens
  misc_RNA (1)...(19): siRNA sense strand
ggacaccacugagcauauc

SEQ ID NO: 1157919 - RNA, 19 nt, Homo sapiens
  misc_RNA (1)...(19): siRNA sense strand
ucaacauccugcuguauga

SEQ ID NO: 1157920 - RNA, 19 nt, Homo sapiens
  misc_RNA (1)...(19): siRNA sense strand
cgacagcacuaucccuaug

SEQ ID NO: 1157921 - RNA, 19 nt, Homo sapiens
  misc_RNA (1)...(19): siRNA sense strand
ggcagaaggaggagacuua

SEQ ID NO: 1157922 - RNA, 19 nt, Homo sapiens
  misc_RNA (1)...(19): siRNA sense strand
ggacauggccucgcagugu

SEQ ID NO: 1157923 - RNA, 19 nt, Homo sapiens
  misc_RNA (1)...(19): siRNA sense strand
gaaccauggccaacaauuc

SEQ ID NO: 1157924 - RNA, 19 nt, Homo sapiens
  misc_RNA (1)...(19): siRNA sense strand
gcagcaaguuuccauuugg

SEQ ID NO: 1157925 - RNA, 19 nt, Homo sapiens
  misc_RNA (1)...(19): siRNA sense strand
uaucagcccaguaugaaua

SEQ ID NO: 1157926 - RNA, 19 nt, Homo sapiens
  misc_RNA (1)...(19): siRNA sense strand
gacgaugccugauugagau

SEQ ID NO: 1157927 - RNA, 19 nt, Homo sapiens
  misc_RNA (1)...(19): siRNA sense strand
cagcuugccugaucuaucu

SEQ ID NO: 1157928 - RNA, 19 nt, Homo sapiens
  misc_RNA (1)...(19): siRNA sense strand
ggauggagcuaagaguuca

SEQ ID NO: 1157929 - RNA, 19 nt, Homo sapiens
  misc_RNA (1)...(19): siRNA sense strand
uaaagaucguacagaagaa

SEQ ID NO: 1157930 - RNA, 19 nt, Homo sapiens
  misc_RNA (1)...(19): siRNA sense strand
gaagaggaaguaguugaaa

SEQ ID NO: 1157931 - RNA, 19 nt, Homo sapiens
  misc_RNA (1)...(19): siRNA sense strand
uagagcuccuuguagaaua

SEQ ID NO: 1157932 - RNA, 19 nt, Homo sapiens
  misc_RNA (1)...(19): siRNA sense strand
gaucacagccacuauggau

SEQ ID NO: 1157933 - RNA, 19 nt, Homo sapiens
  misc_RNA (1)...(19): siRNA sense strand
gacauggccucgcaguguu

SEQ ID NO: 1157934 - RNA, 19 nt, Homo sapiens
  misc_RNA (1)...(19): siRNA sense strand
ggaaguaguugaaaaugau

SEQ ID NO: 1157935 - RNA, 19 nt, Homo sapiens
  misc_RNA (1)...(19): siRNA sense strand
gcacaugggcauuagauac

SEQ ID NO: 1157936 - RNA, 19 nt, Homo sapiens
  misc_RNA (1)...(19): siRNA sense strand
ggagauugguggauugacu

SEQ ID NO: 1157937 - RNA, 19 nt, Homo sapiens
  misc_RNA (1)...(19): siRNA sense strand
agauguggguggaccguua

SEQ ID NO: 1157938 - RNA, 19 nt, Homo sapiens
  misc_RNA (1)...(19): siRNA sense strand
gaaauccaguucuucuacu

SEQ ID NO: 1157939 - RNA, 19 nt, Homo sapiens
  misc_RNA (1)...(19): siRNA sense strand
ggcaugagcaggagcaauu

SEQ ID NO: 1157940 - RNA, 19 nt, Homo sapiens
  misc_RNA (1)...(19): siRNA sense strand
ggcaaugacuuugagaugu

SEQ ID NO: 1157941 - RNA, 19 nt, Homo sapiens
  misc_RNA (1)...(19): siRNA sense strand
guucagaggccaucaagga

SEQ ID NO: 1157942 - RNA, 19 nt, Homo sapiens
  misc_RNA (1)...(19): siRNA sense strand
ggagugaucccuucauguc

SEQ ID NO: 1157943 - RNA, 19 nt, Homo sapiens
  misc_RNA (1)...(19): siRNA sense strand
gcugccaacucuauccaaa

SEQ ID NO: 1157944 - RNA, 19 nt, Homo sapiens
  misc_RNA (1)...(19): siRNA sense strand
cauuugugauguacuguuu

SEQ ID NO: 1157945 - RNA, 19 nt, Homo sapiens
  misc_RNA (1)...(19): siRNA sense strand
ccaacaacauggcggacaa

SEQ ID NO: 1157946 - RNA, 19 nt, Homo sapiens
  misc_RNA (1)...(19): siRNA sense strand
ggacugcucagauaagcuu

SEQ ID NO: 1157947 - RNA, 19 nt, Homo sapiens
  misc_RNA (1)...(19): siRNA sense strand
ugacaagcuuccaguaaag

SEQ ID NO: 1157948 - RNA, 19 nt, Homo sapiens
  misc_RNA (1)...(19): siRNA sense strand
agaagaagaggaaguaguu

SEQ ID NO: 1157949 - RNA, 19 nt, Homo sapiens
  misc_RNA (1)...(19): siRNA sense strand
ggaacuggaccuccuuaug

SEQ ID NO: 1157950 - RNA, 19 nt, Homo sapiens
  misc_RNA (1)...(19): siRNA sense strand
cgcaggagcuaucucaaga

SEQ ID NO: 1157951 - RNA, 19 nt, Homo sapiens
  misc_RNA (1)...(19): siRNA sense strand
gcaccacuaacuuaugaaa

SEQ ID NO: 1157952 - RNA, 19 nt, Homo sapiens
  misc_RNA (1)...(19): siRNA sense strand
ucacagccacuauggauga

SEQ ID NO: 1157953 - RNA, 19 nt, Homo sapiens
  misc_RNA (1)...(19): siRNA sense strand
uugacaagcuuccaguaaa

SEQ ID NO: 1157954 - RNA, 19 nt, Homo sapiens
  misc_RNA (1)...(19): siRNA sense strand
gcagaaggaggagacuuaa

SEQ ID NO: 1157955 - RNA, 19 nt, Homo sapiens
  misc_RNA (1)...(19): siRNA sense strand
aaucaagcauugcccaaga

SEQ ID NO: 1157956 - RNA, 19 nt, Homo sapiens
  misc_RNA (1)...(19): siRNA sense strand
cacuauggaugacauguug

SEQ ID NO: 1157957 - RNA, 19 nt, Homo sapiens
  misc_RNA (1)...(19): siRNA sense strand
ccucggagcugaagaaagc

SEQ ID NO: 1157958 - RNA, 19 nt, Homo sapiens
  misc_RNA (1)...(19): siRNA sense strand
augagaagaucaccaaguu

SEQ ID NO: 1157959 - RNA, 19 nt, Homo sapiens
  misc_RNA (1)...(19): siRNA sense strand
ccaaugagaagaucaccaa

SEQ ID NO: 1157960 - RNA, 19 nt, Homo sapiens
  misc_RNA (1)...(19): siRNA sense strand
gaggacggagccuggaaua

SEQ ID NO: 1157961 - RNA, 19 nt, Homo sapiens
  misc_RNA (1)...(19): siRNA sense strand
ggcgggaacuugcaaccaa

SEQ ID NO: 1157962 - RNA, 19 nt, Homo sapiens
  misc_RNA (1)...(19): siRNA sense strand
augaauaccucugacauga

SEQ ID NO: 1157963 - RNA, 19 nt, Homo sapiens
  misc_RNA (1)...(19): siRNA sense strand
gaacucauugguuucacaa

SEQ ID NO: 1157964 - RNA, 19 nt, Homo sapiens
  misc_RNA (1)...(19): siRNA sense strand
guacgaaucacggcuguug

SEQ ID NO: 1157965 - RNA, 19 nt, Homo sapiens
  misc_RNA (1)...(19): siRNA sense strand
gaacaucaagauccuagag

SEQ ID NO: 1157966 - RNA, 19 nt, Homo sapiens
  misc_RNA (1)...(19): siRNA sense strand
gaggauggagcuaagaguu

SEQ ID NO: 1157967 - RNA, 19 nt, Homo sapiens
  misc_RNA (1)...(19): siRNA sense strand
auugagaucuuuggcauuu

SEQ ID NO: 1157968 - RNA, 19 nt, Homo sapiens
  misc_RNA (1)...(19): siRNA sense strand
cgacgaugccugauugaga

SEQ ID NO: 1157969 - RNA, 19 nt, Homo sapiens
  misc_RNA (1)...(19): siRNA sense strand
ccuaugagccaaauaagga

SEQ ID NO: 1157970 - RNA, 19 nt, Homo sapiens
  misc_RNA (1)...(19): siRNA sense strand
aaauccaguucuucuacua

SEQ ID NO: 1157971 - RNA, 19 nt, Homo sapiens
  misc_RNA (1)...(19): siRNA sense strand
caacaauguggaccugauu

SEQ ID NO: 1157972 - RNA, 19 nt, Homo sapiens
  misc_RNA (1)...(19): siRNA sense strand
gcaggcaccacuaacuuau

SEQ ID NO: 1157973 - RNA, 19 nt, Homo sapiens
  misc_RNA (1)...(19): siRNA sense strand
gaagcugaucaguaaguuu

SEQ ID NO: 1157974 - RNA, 19 nt, Homo sapiens
  misc_RNA (1)...(19): siRNA sense strand
ugagaucuuuggcauuuua

SEQ ID NO: 1157975 - RNA, 19 nt, Homo sapiens
  misc_RNA (1)...(19): siRNA sense strand
ccaucaacauccugcugua

SEQ ID NO: 1157976 - RNA, 19 nt, Homo sapiens
  misc_RNA (1)...(19): siRNA sense strand
ggacggagccuggaauagg

SEQ ID NO: 1157977 - RNA, 19 nt, Homo sapiens
  misc_RNA (1)...(19): siRNA sense strand
gaagcggaauuccaugacu

SEQ ID NO: 1157978 - RNA, 19 nt, Homo sapiens
  misc_RNA (1)...(19): siRNA sense strand
ggagagauguuuaaacuga

SEQ ID NO: 1157979 - RNA, 19 nt, Homo sapiens
  misc_RNA (1)...(19): siRNA sense strand
ggaauggaaugguacuuua

SEQ ID NO: 1157980 - RNA, 19 nt, Homo sapiens
  misc_RNA (1)...(19): siRNA sense strand
gaucagaccucuugagaag

SEQ ID NO: 1157981 - RNA, 19 nt, Homo sapiens
  misc_RNA (1)...(19): siRNA sense strand
ggaaaugaauucuaagagu

SEQ ID NO: 1157982 - RNA, 19 nt, Homo sapiens
  misc_RNA (1)...(19): siRNA sense strand
cauggaagcccaaauauuu

SEQ ID NO: 1157983 - RNA, 19 nt, Homo sapiens
  misc_RNA (1)...(19): siRNA sense strand
ggagauguaugcagauuuc

SEQ ID NO: 1157984 - RNA, 19 nt, Homo sapiens
  misc_RNA (1)...(19): siRNA sense strand
caacauaaccugggcaauu

SEQ ID NO: 1157985 - RNA, 19 nt, Homo sapiens
  misc_RNA (1)...(19): siRNA sense strand
gaaugguacuuuagaguuc

SEQ ID NO: 1157986 - RNA, 19 nt, Homo sapiens
  misc_RNA (1)...(19): siRNA sense strand
gaggaucagcguaguauaa

SEQ ID NO: 1157987 - RNA, 19 nt, Homo sapiens
  misc_RNA (1)...(19): siRNA sense strand
gggagugccucaacuuguu

SEQ ID NO: 1157988 - RNA, 19 nt, Homo sapiens
  misc_RNA (1)...(19): siRNA sense strand
guacucagcgacagugaua

SEQ ID NO: 1157989 - RNA, 19 nt, Homo sapiens
  misc_RNA (1)...(19): siRNA sense strand
ccaaauaccacauggaaau

SEQ ID NO: 1157990 - RNA, 19 nt, Homo sapiens
  misc_RNA (1)...(19): siRNA sense strand
gggaaaguccacaggguua

SEQ ID NO: 1157991 - RNA, 19 nt, Homo sapiens
  misc_RNA (1)...(19): siRNA sense strand
ggaaugguacuuuagaguu

SEQ ID NO: 1157992 - RNA, 19 nt, Homo sapiens
  misc_RNA (1)...(19): siRNA sense strand
gcuaauggagagauguuua

SEQ ID NO: 1157993 - RNA, 19 nt, Homo sapiens
  misc_RNA (1)...(19): siRNA sense strand
caucauaggcgagacauuu

SEQ ID NO: 1157994 - RNA, 19 nt, Homo sapiens
  misc_RNA (1)...(19): siRNA sense strand
ucagagagaugaugaacca

SEQ ID NO: 1157995 - RNA, 19 nt, Homo sapiens
  misc_RNA (1)...(19): siRNA sense strand
gcagaacagguacuucgua

SEQ ID NO: 1157996 - RNA, 19 nt, Homo sapiens
  misc_RNA (1)...(19): siRNA sense strand
gagagucauuugcuucguu

SEQ ID NO: 1157997 - RNA, 19 nt, Homo sapiens
  misc_RNA (1)...(19): siRNA sense strand
gaauggauuugaccaaggu

SEQ ID NO: 1157998 - RNA, 19 nt, Homo sapiens
  misc_RNA (1)...(19): siRNA sense strand
aacauaaccugggcaauuu

SEQ ID NO: 1157999 - RNA, 19 nt, Homo sapiens
  misc_RNA (1)...(19): siRNA sense strand
gaagucagagagaugauga

SEQ ID NO: 1158000 - RNA, 19 nt, Homo sapiens
  misc_RNA (1)...(19): siRNA sense strand
cgucaacacucauguaugg

SEQ ID NO: 1158001 - RNA, 19 nt, Homo sapiens
  misc_RNA (1)...(19): siRNA sense strand
gcuucgagcuugugccaaa

SEQ ID NO: 1158002 - RNA, 19 nt, Homo sapiens
  misc_RNA (1)...(19): siRNA sense strand
gaucagcguaguauaauuc

SEQ ID NO: 1158003 - RNA, 19 nt, Homo sapiens
  misc_RNA (1)...(19): siRNA sense strand
aaacucugcugaagacgaa

SEQ ID NO: 1158004 - RNA, 19 nt, Homo sapiens
  misc_RNA (1)...(19): siRNA sense strand
ccacauggaacacccaauu

SEQ ID NO: 1158005 - RNA, 19 nt, Homo sapiens
  misc_RNA (1)...(19): siRNA sense strand
acacgaagccuuucuaugg

SEQ ID NO: 1158006 - RNA, 19 nt, Homo sapiens
  misc_RNA (1)...(19): siRNA sense strand
ggaucagcguaguauaauu

SEQ ID NO: 1158007 - RNA, 19 nt, Homo sapiens
  misc_RNA (1)...(19): siRNA sense strand
gguguacucugcuaaugga

SEQ ID NO: 1158008 - RNA, 19 nt, Homo sapiens
  misc_RNA (1)...(19): siRNA sense strand
gucuuuaucuggagccaua

SEQ ID NO: 1158009 - RNA, 19 nt, Homo sapiens
  misc_RNA (1)...(19): siRNA sense strand
ccacaggguuaccgcagaa

SEQ ID NO: 1158010 - RNA, 19 nt, Homo sapiens
  misc_RNA (1)...(19): siRNA sense strand
ggagugccucaacuuguua

SEQ ID NO: 1158011 - RNA, 19 nt, Homo sapiens
  misc_RNA (1)...(19): siRNA sense strand
gagccaagagucaguauuc

SEQ ID NO: 1158012 - RNA, 19 nt, Homo sapiens
  misc_RNA (1)...(19): siRNA sense strand
gaagagccaagagucagua

SEQ ID NO: 1158013 - RNA, 19 nt, Homo sapiens
  misc_RNA (1)...(19): siRNA sense strand
caccauggaagcccaaaua

SEQ ID NO: 1158014 - RNA, 19 nt, Homo sapiens
  misc_RNA (1)...(19): siRNA sense strand
caacaauggagaaaccaaa

SEQ ID NO: 1158015 - RNA, 19 nt, Homo sapiens
  misc_RNA (1)...(19): siRNA sense strand
ccgcagaagugaagcacaa

SEQ ID NO: 1158016 - RNA, 19 nt, Homo sapiens
  misc_RNA (1)...(19): siRNA sense strand
gaguucaccuacaacaaug

SEQ ID NO: 1158017 - RNA, 19 nt, Homo sapiens
  misc_RNA (1)...(19): siRNA sense strand
gggaauggaaugguacuuu

SEQ ID NO: 1158018 - RNA, 19 nt, Homo sapiens
  misc_RNA (1)...(19): siRNA sense strand
ggguggagcucggaggaaa

SEQ ID NO: 1158019 - RNA, 19 nt, Homo sapiens
  misc_RNA (1)...(19): siRNA sense strand
caucucauuucacaacuca

SEQ ID NO: 1158020 - RNA, 19 nt, Homo sapiens
  misc_RNA (1)...(19): siRNA sense strand
ucagaccucuugagaagca

SEQ ID NO: 1158021 - RNA, 19 nt, Homo sapiens
  misc_RNA (1)...(19): siRNA sense strand
uccaaaagcuacaaacuaa

SEQ ID NO: 1158022 - RNA, 19 nt, Homo sapiens
  misc_RNA (1)...(19): siRNA sense strand
gcaaagcaaacaccagaag

SEQ ID NO: 1158023 - RNA, 19 nt, Homo sapiens
  misc_RNA (1)...(19): siRNA sense strand
cacgaagccuuucuaugga

SEQ ID NO: 1158024 - RNA, 19 nt, Homo sapiens
  misc_RNA (1)...(19): siRNA sense strand
ccaagucacauuccacaga

SEQ ID NO: 1158025 - RNA, 19 nt, Homo sapiens
  misc_RNA (1)...(19): siRNA sense strand
cuaauggagagauguuuaa

SEQ ID NO: 1158026 - RNA, 19 nt, Homo sapiens
  misc_RNA (1)...(19): siRNA sense strand
ucauuugcuucguugagua

SEQ ID NO: 1158027 - RNA, 19 nt, Homo sapiens
  misc_RNA (1)...(19): siRNA sense strand
gauguaugcagauuucaug

SEQ ID NO: 1158028 - RNA, 19 nt, Homo sapiens
  misc_RNA (1)...(19): siRNA sense strand
ggaguccugucuuuaucug

SEQ ID NO: 1158029 - RNA, 19 nt, Homo sapiens
  misc_RNA (1)...(19): siRNA sense strand
acugagagcugcugaugca

SEQ ID NO: 1158030 - RNA, 19 nt, Homo sapiens
  misc_RNA (1)...(19): siRNA sense strand
ccauggaagcccaaauauu

SEQ ID NO: 1158031 - RNA, 19 nt, Homo sapiens
  misc_RNA (1)...(19): siRNA sense strand
gaauggaaugguacuuuag

SEQ ID NO: 1158032 - RNA, 19 nt, Homo sapiens
  misc_RNA (1)...(19): siRNA sense strand
ucacaacucaaacuuggaa

SEQ ID NO: 1158033 - RNA, 19 nt, Homo sapiens
  misc_RNA (1)...(19): siRNA sense strand
caaugaagauaaggaagag

SEQ ID NO: 1158034 - RNA, 19 nt, Homo sapiens
  misc_RNA (1)...(19): siRNA sense strand
gagagcugcugaugcaaaa

SEQ ID NO: 1158035 - RNA, 19 nt, Homo sapiens
  misc_RNA (1)...(19): siRNA sense strand
caacccaaccaacaccauu

SEQ ID NO: 1158036 - RNA, 19 nt, Homo sapiens
  misc_RNA (1)...(19): siRNA sense strand
ugacaaugaagauaaggaa

SEQ ID NO: 1158037 - RNA, 19 nt, Homo sapiens
  misc_RNA (1)...(19): siRNA sense strand
uggaagggcagcagaagaa

SEQ ID NO: 1158038 - RNA, 19 nt, Homo sapiens
  misc_RNA (1)...(19): siRNA sense strand
ccaaagucaucgacacaac

SEQ ID NO: 1158039 - RNA, 19 nt, Homo sapiens
  misc_RNA (1)...(19): siRNA sense strand
caucaacugugccaagacu

SEQ ID NO: 1158040 - RNA, 19 nt, Homo sapiens
  misc_RNA (1)...(19): siRNA sense strand
ccaccuuuauccuggagaa

SEQ ID NO: 1158041 - RNA, 19 nt, Homo sapiens
  misc_RNA (1)...(19): siRNA sense strand
acaaugaagauaaggaaga

SEQ ID NO: 1158042 - RNA, 19 nt, Homo sapiens
  misc_RNA (1)...(19): siRNA sense strand
agagauguuuaaacugaga

SEQ ID NO: 1158043 - RNA, 19 nt, Homo sapiens
  misc_RNA (1)...(19): siRNA sense strand
cagaggagagagucauuug

SEQ ID NO: 1158044 - RNA, 19 nt, Homo sapiens
  misc_RNA (1)...(19): siRNA sense strand
aaacuuggaauggauuuga

SEQ ID NO: 1158045 - RNA, 19 nt, Homo sapiens
  misc_RNA (1)...(19): siRNA sense strand
cagcguaguauaauucuuc

SEQ ID NO: 1158046 - RNA, 19 nt, Homo sapiens
  misc_RNA (1)...(19): siRNA sense strand
ggaggaucagcguaguaua

SEQ ID NO: 1158047 - RNA, 19 nt, Homo sapiens
  misc_RNA (1)...(19): siRNA sense strand
caaauaccacauggaaaug

SEQ ID NO: 1158048 - RNA, 19 nt, Homo sapiens
  misc_RNA (1)...(19): siRNA sense strand
cuuuagaguucaccuacaa

SEQ ID NO: 1158049 - RNA, 19 nt, Homo sapiens
  misc_RNA (1)...(19): siRNA sense strand
gcuggcauccugcaguauu

SEQ ID NO: 1158050 - RNA, 19 nt, Homo sapiens
  misc_RNA (1)...(19): siRNA sense strand
gaagagacugugcgucaac

SEQ ID NO: 1158051 - RNA, 19 nt, Homo sapiens
  misc_RNA (1)...(19): siRNA sense strand
uaaggaagagacggaauug

SEQ ID NO: 1158052 - RNA, 19 nt, Homo sapiens
  misc_RNA (1)...(19): siRNA sense strand
aauaccacauggaaaugaa

SEQ ID NO: 1158053 - RNA, 19 nt, Homo sapiens
  misc_RNA (1)...(19): siRNA sense strand
ccacccaucuccugcuucu

SEQ ID NO: 1158054 - RNA, 19 nt, Homo sapiens
  misc_RNA (1)...(19): siRNA sense strand
cgaugaagcuccccacaug

SEQ ID NO: 1158055 - RNA, 19 nt, Homo sapiens
  misc_RNA (1)...(19): siRNA sense strand
ugaaugagcaaagcaaaca

SEQ ID NO: 1158056 - RNA, 19 nt, Homo sapiens
  misc_RNA (1)...(19): siRNA sense strand
guauucacccugccuagug

SEQ ID NO: 1158057 - RNA, 19 nt, Homo sapiens
  misc_RNA (1)...(19): siRNA sense strand
caacucaaacuuggaaugg

SEQ ID NO: 1158058 - RNA, 19 nt, Homo sapiens
  misc_RNA (1)...(19): siRNA sense strand
ugagagcugcugaugcaaa

SEQ ID NO: 1158059 - RNA, 19 nt, Homo sapiens
  misc_RNA (1)...(19): siRNA sense strand
ucacgaagucagagagaug

SEQ ID NO: 1158060 - RNA, 19 nt, Homo sapiens
  misc_RNA (1)...(19): siRNA sense strand
gccaguguaucccaagaag

SEQ ID NO: 1158061 - RNA, 19 nt, Homo sapiens
  misc_RNA (1)...(19): siRNA sense strand
cuacaacaauggagaaacc

SEQ ID NO: 1158062 - RNA, 19 nt, Homo sapiens
  misc_RNA (1)...(19): siRNA sense strand
guacuuuagaguucaccua

SEQ ID NO: 1158063 - RNA, 19 nt, Homo sapiens
  misc_RNA (1)...(19): siRNA sense strand
ccacacgaagccuuucuau

SEQ ID NO: 1158064 - RNA, 19 nt, Homo sapiens
  misc_RNA (1)...(19): siRNA sense strand
ucacugcuccugggaaguu

SEQ ID NO: 1158065 - RNA, 19 nt, Homo sapiens
  misc_RNA (1)...(19): siRNA sense strand
acucaaacuuggaauggau

SEQ ID NO: 1158066 - RNA, 19 nt, Homo sapiens
  misc_RNA (1)...(19): siRNA sense strand
aggcuggcauccugcagua

SEQ ID NO: 1158067 - RNA, 19 nt, Homo sapiens
  misc_RNA (1)...(19): siRNA sense strand
gaugaugaaccagguggaa

SEQ ID NO: 1158068 - RNA, 19 nt, Homo sapiens
  misc_RNA (1)...(19): siRNA sense strand
caguguaucccaagaagau

SEQ ID NO: 1158069 - RNA, 19 nt, Homo sapiens
  misc_RNA (1)...(19): siRNA sense strand
agaguucaccuacaacaau

SEQ ID NO: 1158070 - RNA, 19 nt, Homo sapiens
  misc_RNA (1)...(19): siRNA sense strand
auggagagauguuuaaacu

SEQ ID NO: 1158071 - RNA, 19 nt, Homo sapiens
  misc_RNA (1)...(19): siRNA sense strand
gacugugcgucaacacuca

SEQ ID NO: 1158072 - RNA, 19 nt, Homo sapiens
  misc_RNA (1)...(19): siRNA sense strand
aggacagggucaagccuaa

SEQ ID NO: 1158073 - RNA, 19 nt, Homo sapiens
  misc_RNA (1)...(19): siRNA sense strand
uuugcuucguugaguauua

SEQ ID NO: 1158074 - RNA, 19 nt, Homo sapiens
  misc_RNA (1)...(19): siRNA sense strand
aaacugagagcugcugaug

SEQ ID NO: 1158075 - RNA, 19 nt, Homo sapiens
  misc_RNA (1)...(19): siRNA sense strand
uuaccaaacucugcugaag

SEQ ID NO: 1158076 - RNA, 19 nt, Homo sapiens
  misc_RNA (1)...(19): siRNA sense strand
gagaaccuccgcacaccau

SEQ ID NO: 1158077 - RNA, 19 nt, Homo sapiens
  misc_RNA (1)...(19): siRNA sense strand
gacagggucaagccuaaga

SEQ ID NO: 1158078 - RNA, 19 nt, Homo sapiens
  misc_RNA (1)...(19): siRNA sense strand
ggaaaugacucacagaaag

SEQ ID NO: 1158079 - RNA, 19 nt, Homo sapiens
  misc_RNA (1)...(19): siRNA sense strand
ugacugaucugcuggacua

SEQ ID NO: 1158080 - RNA, 19 nt, Homo sapiens
  misc_RNA (1)...(19): siRNA sense strand
ugaauucgcugaagcagaa

SEQ ID NO: 1158081 - RNA, 19 nt, Homo sapiens
  misc_RNA (1)...(19): siRNA sense strand
gaagcaaucugggaagaga

SEQ ID NO: 1158082 - RNA, 19 nt, Homo sapiens
  misc_RNA (1)...(19): siRNA sense strand
gaugagauucugcgcuaua

SEQ ID NO: 1158083 - RNA, 19 nt, Homo sapiens
  misc_RNA (1)...(19): siRNA sense strand
aaaucacagucuaccauua

SEQ ID NO: 1158084 - RNA, 19 nt, Homo sapiens
  misc_RNA (1)...(19): siRNA sense strand
gaagauccuccaguccuua

SEQ ID NO: 1158085 - RNA, 19 nt, Homo sapiens
  misc_RNA (1)...(19): siRNA sense strand
gaacauuuccacaguacug

SEQ ID NO: 1158086 - RNA, 19 nt, Homo sapiens
  misc_RNA (1)...(19): siRNA sense strand
ccauuuaugugauuugcaa

SEQ ID NO: 1158087 - RNA, 19 nt, Homo sapiens
  misc_RNA (1)...(19): siRNA sense strand
gggaaaugacucacagaaa

SEQ ID NO: 1158088 - RNA, 19 nt, Homo sapiens
  misc_RNA (1)...(19): siRNA sense strand
gcagcuuguugcucuuuga

SEQ ID NO: 1158089 - RNA, 19 nt, Homo sapiens
  misc_RNA (1)...(19): siRNA sense strand
gcucuuugaugcccugaga

SEQ ID NO: 1158090 - RNA, 19 nt, Homo sapiens
  misc_RNA (1)...(19): siRNA sense strand
ggaggagguacucgccuua

SEQ ID NO: 1158091 - RNA, 19 nt, Homo sapiens
  misc_RNA (1)...(19): siRNA sense strand
gaagcagggcacacaagaa

SEQ ID NO: 1158092 - RNA, 19 nt, Homo sapiens
  misc_RNA (1)...(19): siRNA sense strand
gggcauuuccgcucuauuc

SEQ ID NO: 1158093 - RNA, 19 nt, Homo sapiens
  misc_RNA (1)...(19): siRNA sense strand
caaaucacagucuaccauu

SEQ ID NO: 1158094 - RNA, 19 nt, Homo sapiens
  misc_RNA (1)...(19): siRNA sense strand
ggagguacucgccuuacaa

SEQ ID NO: 1158095 - RNA, 19 nt, Homo sapiens
  misc_RNA (1)...(19): siRNA sense strand
gcuguccacuagcgcagua

SEQ ID NO: 1158096 - RNA, 19 nt, Homo sapiens
  misc_RNA (1)...(19): siRNA sense strand
ugaagauccuccaguccuu

SEQ ID NO: 1158097 - RNA, 19 nt, Homo sapiens
  misc_RNA (1)...(19): siRNA sense strand
cccacucgcuaccugguua

SEQ ID NO: 1158098 - RNA, 19 nt, Homo sapiens
  misc_RNA (1)...(19): siRNA sense strand
gggcugcuguccccauuua

SEQ ID NO: 1158099 - RNA, 19 nt, Homo sapiens
  misc_RNA (1)...(19): siRNA sense strand
acacaucccucugaaacau

SEQ ID NO: 1158100 - RNA, 19 nt, Homo sapiens
  misc_RNA (1)...(19): siRNA sense strand
uauaagcgacugcuggauu

SEQ ID NO: 1158101 - RNA, 19 nt, Homo sapiens
  misc_RNA (1)...(19): siRNA sense strand
cugaucugcuggacuauga

SEQ ID NO: 1158102 - RNA, 19 nt, Homo sapiens
  misc_RNA (1)...(19): siRNA sense strand
gaaaugacucacagaaagc

SEQ ID NO: 1158103 - RNA, 19 nt, Homo sapiens
  misc_RNA (1)...(19): siRNA sense strand
gcaggaaccgcagccagaa

SEQ ID NO: 1158104 - RNA, 19 nt, Homo sapiens
  misc_RNA (1)...(19): siRNA sense strand
ucaagaguuagacccuuua

SEQ ID NO: 1158105 - RNA, 19 nt, Homo sapiens
  misc_RNA (1)...(19): siRNA sense strand
cucaagaguuagacccuuu

SEQ ID NO: 1158106 - RNA, 19 nt, Homo sapiens
  misc_RNA (1)...(19): siRNA sense strand
acaucccucugaaacauuu

SEQ ID NO: 1158107 - RNA, 19 nt, Homo sapiens
  misc_RNA (1)...(19): siRNA sense strand
gccuuggccuuguggacua

SEQ ID NO: 1158108 - RNA, 19 nt, Homo sapiens
  misc_RNA (1)...(19): siRNA sense strand
caagaguuagacccuuuaa

SEQ ID NO: 1158109 - RNA, 19 nt, Homo sapiens
  misc_RNA (1)...(19): siRNA sense strand
cucgcuaccugguuaauga

SEQ ID NO: 1158110 - RNA, 19 nt, Homo sapiens
  misc_RNA (1)...(19): siRNA sense strand
uguggacuaugacguggua

SEQ ID NO: 1158111 - RNA, 19 nt, Homo sapiens
  misc_RNA (1)...(19): siRNA sense strand
ccaaaucacagucuaccau

SEQ ID NO: 1158112 - RNA, 19 nt, Homo sapiens
  misc_RNA (1)...(19): siRNA sense strand
acagaaagccgugaagauc

SEQ ID NO: 1158113 - RNA, 19 nt, Homo sapiens
  misc_RNA (1)...(19): siRNA sense strand
auaagcgacugcuggauuc

SEQ ID NO: 1158114 - RNA, 19 nt, Homo sapiens
  misc_RNA (1)...(19): siRNA sense strand
aaucacagucuaccauuau

SEQ ID NO: 1158115 - RNA, 19 nt, Homo sapiens
  misc_RNA (1)...(19): siRNA sense strand
aagaagcaaucugggaaga

SEQ ID NO: 1158116 - RNA, 19 nt, Homo sapiens
  misc_RNA (1)...(19): siRNA sense strand
gagggcauuuccgcucuau

SEQ ID NO: 1158117 - RNA, 19 nt, Homo sapiens
  misc_RNA (1)...(19): siRNA sense strand
gaggagcguguuucuguca

SEQ ID NO: 1158118 - RNA, 19 nt, Homo sapiens
  misc_RNA (1)...(19): siRNA sense strand
agguggagguggacauuug

SEQ ID NO: 1158119 - RNA, 19 nt, Homo sapiens
  misc_RNA (1)...(19): siRNA sense strand
uuugcaaacugggaaauga

SEQ ID NO: 1158120 - RNA, 19 nt, Homo sapiens
  misc_RNA (1)...(19): siRNA sense strand
acuaugacgugguagagau

SEQ ID NO: 1158121 - RNA, 19 nt, Homo sapiens
  misc_RNA (1)...(19): siRNA sense strand
cuacacaucccucugaaac

SEQ ID NO: 1158122 - RNA, 19 nt, Homo sapiens
  misc_RNA (1)...(19): siRNA sense strand
gcccuacacaucccucuga

SEQ ID NO: 1158123 - RNA, 19 nt, Homo sapiens
  misc_RNA (1)...(19): siRNA sense strand
guguuucugucaccgacua

SEQ ID NO: 1158124 - RNA, 19 nt, Homo sapiens
  misc_RNA (1)...(19): siRNA sense strand
ucacagucuaccauuauga

SEQ ID NO: 1158125 - RNA, 19 nt, Homo sapiens
  misc_RNA (1)...(19): siRNA sense strand
caaacugggaaaugacuca

SEQ ID NO: 1158126 - RNA, 19 nt, Homo sapiens
  misc_RNA (1)...(19): siRNA sense strand
cagcagcucaagaguuaga

SEQ ID NO: 1158127 - RNA, 19 nt, Homo sapiens
  misc_RNA (1)...(19): siRNA sense strand
gagaagcagggcacacaag

SEQ ID NO: 1158128 - RNA, 19 nt, Homo sapiens
  misc_RNA (1)...(19): siRNA sense strand
aagcuggcgucggcucuuu

SEQ ID NO: 1158129 - RNA, 19 nt, Homo sapiens
  misc_RNA (1)...(19): siRNA sense strand
gcgcuucgagggccaaauc

SEQ ID NO: 1158130 - RNA, 19 nt, Homo sapiens
  misc_RNA (1)...(19): siRNA sense strand
uuagacccuuuaacaguuc

SEQ ID NO: 1158131 - RNA, 19 nt, Homo sapiens
  misc_RNA (1)...(19): siRNA sense strand
cagcggagacagugaccaa

SEQ ID NO: 1158132 - RNA, 19 nt, Homo sapiens
  misc_RNA (1)...(19): siRNA sense strand
gagguacucgccuuacaag

SEQ ID NO: 1158133 - RNA, 19 nt, Homo sapiens
  misc_RNA (1)...(19): siRNA sense strand
agaagcagggcacacaaga

SEQ ID NO: 1158134 - RNA, 19 nt, Homo sapiens
  misc_RNA (1)...(19): siRNA sense strand
ggccugggcugccaaaauc

SEQ ID NO: 1158135 - RNA, 19 nt, Homo sapiens
  misc_RNA (1)...(19): siRNA sense strand
cacagaaagccgugaagau

SEQ ID NO: 1158136 - RNA, 19 nt, Homo sapiens
  misc_RNA (1)...(19): siRNA sense strand
ggacuaugacgugguagag

SEQ ID NO: 1158137 - RNA, 19 nt, Homo sapiens
  misc_RNA (1)...(19): siRNA sense strand
gguacucgccuuacaagcu

SEQ ID NO: 1158138 - RNA, 19 nt, Homo sapiens
  misc_RNA (1)...(19): siRNA sense strand
gacgguggcccuugcuauc

SEQ ID NO: 1158139 - RNA, 19 nt, Homo sapiens
  misc_RNA (1)...(19): siRNA sense strand
uuacaguggcagcuuguug

SEQ ID NO: 1158140 - RNA, 19 nt, Homo sapiens
  misc_RNA (1)...(19): siRNA sense strand
aagcagggcacacaagaag

SEQ ID NO: 1158141 - RNA, 19 nt, Homo sapiens
  misc_RNA (1)...(19): siRNA sense strand
caacgugaggaggaauuga

SEQ ID NO: 1158142 - RNA, 19 nt, Homo sapiens
  misc_RNA (1)...(19): siRNA sense strand
uaagaaagaugaacacuug

SEQ ID NO: 1158143 - RNA, 19 nt, Homo sapiens
  misc_RNA (1)...(19): siRNA sense strand
ggagaaagccuucaaaugu

SEQ ID NO: 1158144 - RNA, 19 nt, Homo sapiens
  misc_RNA (1)...(19): siRNA sense strand
caacaacccugugagauuu

SEQ ID NO: 1158145 - RNA, 19 nt, Homo sapiens
  misc_RNA (1)...(19): siRNA sense strand
gagaaagccuucaaauguu

SEQ ID NO: 1158146 - RNA, 19 nt, Homo sapiens
  misc_RNA (1)...(19): siRNA sense strand
gaggagaacaugcuacuua

SEQ ID NO: 1158147 - RNA, 19 nt, Homo sapiens
  misc_RNA (1)...(19): siRNA sense strand
gaggcaaguugucuaauga

SEQ ID NO: 1158148 - RNA, 19 nt, Homo sapiens
  misc_RNA (1)...(19): siRNA sense strand
ggaggcaaguugucuaaug

SEQ ID NO: 1158149 - RNA, 19 nt, Homo sapiens
  misc_RNA (1)...(19): siRNA sense strand
gaacagauguaaugguaac

SEQ ID NO: 1158150 - RNA, 19 nt, Homo sapiens
  misc_RNA (1)...(19): siRNA sense strand
gagaggaggucgaacagau

SEQ ID NO: 1158151 - RNA, 19 nt, Homo sapiens
  misc_RNA (1)...(19): siRNA sense strand
ucgaacagauguaauggua

SEQ ID NO: 1158152 - RNA, 19 nt, Homo sapiens
  misc_RNA (1)...(19): siRNA sense strand
gcagauaccacucaggaaa

SEQ ID NO: 1158153 - RNA, 19 nt, Homo sapiens
  misc_RNA (1)...(19): siRNA sense strand
agaaagccuucaaauguuu

SEQ ID NO: 1158154 - RNA, 19 nt, Homo sapiens
  misc_RNA (1)...(19): siRNA sense strand
uagcaaauauggacucaga

SEQ ID NO: 1158155 - RNA, 19 nt, Homo sapiens
  misc_RNA (1)...(19): siRNA sense strand
ggacucagagaaacagaua

SEQ ID NO: 1158156 - RNA, 19 nt, Homo sapiens
  misc_RNA (1)...(19): siRNA sense strand
gaacuaaaggaaguaauug

SEQ ID NO: 1158157 - RNA, 19 nt, Homo sapiens
  misc_RNA (1)...(19): siRNA sense strand
gaaaacgacuucaguguca

SEQ ID NO: 1158158 - RNA, 19 nt, Homo sapiens
  misc_RNA (1)...(19): siRNA sense strand
cauugaaccuggagaagaa

SEQ ID NO: 1158159 - RNA, 19 nt, Homo sapiens
  misc_RNA (1)...(19): siRNA sense strand
ucgaggagcucaaggcauu

SEQ ID NO: 1158160 - RNA, 19 nt, Homo sapiens
  misc_RNA (1)...(19): siRNA sense strand
gcaggaagaacuaaaggaa

SEQ ID NO: 1158161 - RNA, 19 nt, Homo sapiens
  misc_RNA (1)...(19): siRNA sense strand
ggacagagucgcuauguac

SEQ ID NO: 1158162 - RNA, 19 nt, Homo sapiens
  misc_RNA (1)...(19): siRNA sense strand
ggaaguaauugaacguuuu

SEQ ID NO: 1158163 - RNA, 19 nt, Homo sapiens
  misc_RNA (1)...(19): siRNA sense strand
gcaaauauggacucagaga

SEQ ID NO: 1158164 - RNA, 19 nt, Homo sapiens
  misc_RNA (1)...(19): siRNA sense strand
caggagaaauuauucaaag

SEQ ID NO: 1158165 - RNA, 19 nt, Homo sapiens
  misc_RNA (1)...(19): siRNA sense strand
gaaccuggagaagaaauuu

SEQ ID NO: 1158166 - RNA, 19 nt, Homo sapiens
  misc_RNA (1)...(19): siRNA sense strand
gguucuugaucccuauuua

SEQ ID NO: 1158167 - RNA, 19 nt, Homo sapiens
  misc_RNA (1)...(19): siRNA sense strand
gcaggagaaauuauucaaa

SEQ ID NO: 1158168 - RNA, 19 nt, Homo sapiens
  misc_RNA (1)...(19): siRNA sense strand
gaugaacacuuggagaaag

SEQ ID NO: 1158169 - RNA, 19 nt, Homo sapiens
  misc_RNA (1)...(19): siRNA sense strand
gaagaacuaaaggaaguaa

SEQ ID NO: 1158170 - RNA, 19 nt, Homo sapiens
  misc_RNA (1)...(19): siRNA sense strand
gauugcagaccuaauugua

SEQ ID NO: 1158171 - RNA, 19 nt, Homo sapiens
  misc_RNA (1)...(19): siRNA sense strand
gugaauggcaggagaaaug

SEQ ID NO: 1158172 - RNA, 19 nt, Homo sapiens
  misc_RNA (1)...(19): siRNA sense strand
cgagauacagcauguguga

SEQ ID NO: 1158173 - RNA, 19 nt, Homo sapiens
  misc_RNA (1)...(19): siRNA sense strand
aaauauggacucagagaaa

SEQ ID NO: 1158174 - RNA, 19 nt, Homo sapiens
  misc_RNA (1)...(19): siRNA sense strand
caaguugucuaaugaccau

SEQ ID NO: 1158175 - RNA, 19 nt, Homo sapiens
  misc_RNA (1)...(19): siRNA sense strand
cgacuucagugucauguac

SEQ ID NO: 1158176 - RNA, 19 nt, Homo sapiens
  misc_RNA (1)...(19): siRNA sense strand
gagaaauggaggcaaguug

SEQ ID NO: 1158177 - RNA, 19 nt, Homo sapiens
  misc_RNA (1)...(19): siRNA sense strand
gaaggcaggaagaacuaaa

SEQ ID NO: 1158178 - RNA, 19 nt, Homo sapiens
  misc_RNA (1)...(19): siRNA sense strand
ggaggucgaacagauguaa

SEQ ID NO: 1158179 - RNA, 19 nt, Homo sapiens
  misc_RNA (1)...(19): siRNA sense strand
uuauggagauggguucuuu

SEQ ID NO: 1158180 - RNA, 19 nt, Homo sapiens
  misc_RNA (1)...(19): siRNA sense strand
caugauugcagaccuaauu

SEQ ID NO: 1158181 - RNA, 19 nt, Homo sapiens
  misc_RNA (1)...(19): siRNA sense strand
acaacaacccugugagauu

SEQ ID NO: 1158182 - RNA, 19 nt, Homo sapiens
  misc_RNA (1)...(19): siRNA sense strand
ccaaggaacucugugaaaa

SEQ ID NO: 1158183 - RNA, 19 nt, Homo sapiens
  misc_RNA (1)...(19): siRNA sense strand
gucaaucugucagcucuaa

SEQ ID NO: 1158184 - RNA, 19 nt, Homo sapiens
  misc_RNA (1)...(19): siRNA sense strand
agaccuaauuguaaguuug

SEQ ID NO: 1158185 - RNA, 19 nt, Homo sapiens
  misc_RNA (1)...(19): siRNA sense strand
ggaagaacuaaaggaagua

SEQ ID NO: 1158186 - RNA, 19 nt, Homo sapiens
  misc_RNA (1)...(19): siRNA sense strand
gcuggguccugcugcguuu

SEQ ID NO: 1158187 - RNA, 19 nt, Homo sapiens
  misc_RNA (1)...(19): siRNA sense strand
cuaaugaccaucagcagaa

SEQ ID NO: 1158188 - RNA, 19 nt, Homo sapiens
  misc_RNA (1)...(19): siRNA sense strand
aaugguaacucgggauuug

SEQ ID NO: 1158189 - RNA, 19 nt, Homo sapiens
  misc_RNA (1)...(19): siRNA sense strand
gcacggcacuauuuucuca

SEQ ID NO: 1158190 - RNA, 19 nt, Homo sapiens
  misc_RNA (1)...(19): siRNA sense strand
aggaagaacuaaaggaagu

SEQ ID NO: 1158191 - RNA, 19 nt, Homo sapiens
  misc_RNA (1)...(19): siRNA sense strand
caaauauggacucagagaa

SEQ ID NO: 1158192 - RNA, 19 nt, Homo sapiens
  misc_RNA (1)...(19): siRNA sense strand
gccaaggaacucugugaaa

SEQ ID NO: 1158193 - RNA, 19 nt, Homo sapiens
  misc_RNA (1)...(19): siRNA sense strand
gaacaugcuacuuagacau

SEQ ID NO: 1158194 - RNA, 19 nt, Homo sapiens
  misc_RNA (1)...(19): siRNA sense strand
guaccauccucuggaaugu

SEQ ID NO: 1158195 - RNA, 19 nt, Homo sapiens
  misc_RNA (1)...(19): siRNA sense strand
gaaauggaggcaaguuguc

SEQ ID NO: 1158196 - RNA, 19 nt, Homo sapiens
  misc_RNA (1)...(19): siRNA sense strand
ggagaacaugcuacuuaga

SEQ ID NO: 1158197 - RNA, 19 nt, Homo sapiens
  misc_RNA (1)...(19): siRNA sense strand
ccaaaauaguugcaacaaa

SEQ ID NO: 1158198 - RNA, 19 nt, Homo sapiens
  misc_RNA (1)...(19): siRNA sense strand
gaaugggcacggcacuauu

SEQ ID NO: 1158199 - RNA, 19 nt, Homo sapiens
  misc_RNA (1)...(19): siRNA sense strand
aggaaguaauugaacguuu

SEQ ID NO: 1158200 - RNA, 19 nt, Homo sapiens
  misc_RNA (1)...(19): siRNA sense strand
uaaaggaaggcaggaagaa

SEQ ID NO: 1158201 - RNA, 19 nt, Homo sapiens
  misc_RNA (1)...(19): siRNA sense strand
cagaccuaauuguaaguuu

SEQ ID NO: 1158202 - RNA, 19 nt, Homo sapiens
  misc_RNA (1)...(19): siRNA sense strand
gagaacaugcuacuuagac

SEQ ID NO: 1158203 - RNA, 19 nt, Homo sapiens
  misc_RNA (1)...(19): siRNA sense strand
ggagaaauggaggcaaguu

SEQ ID NO: 1158204 - RNA, 19 nt, Homo sapiens
  misc_RNA (1)...(19): siRNA sense strand
uauguaccauccucuggaa

SEQ ID NO: 1158205 - RNA, 19 nt, Homo sapiens
  misc_RNA (1)...(19): siRNA sense strand
guaaugguaacucgggauu

SEQ ID NO: 1158206 - RNA, 19 nt, Homo sapiens
  misc_RNA (1)...(19): siRNA sense strand
aaugaauacuagcgccuuu

SEQ ID NO: 1158207 - RNA, 19 nt, Homo sapiens
  misc_RNA (1)...(19): siRNA sense strand
ggaaggcaggaagaacuaa

SEQ ID NO: 1158208 - RNA, 19 nt, Homo sapiens
  misc_RNA (1)...(19): siRNA sense strand
cuacuuagacauggagaaa

SEQ ID NO: 1158209 - RNA, 19 nt, Homo sapiens
  misc_RNA (1)...(19): siRNA sense strand
gaaggacagagucgcuaug

SEQ ID NO: 1158210 - RNA, 19 nt, Homo sapiens
  misc_RNA (1)...(19): siRNA sense strand
gaauuacugguggguugua

SEQ ID NO: 1158211 - RNA, 19 nt, Homo sapiens
  misc_RNA (1)...(19): siRNA sense strand
caaaauggagccaaaauag

SEQ ID NO: 1158212 - RNA, 19 nt, Homo sapiens
  misc_RNA (1)...(19): siRNA sense strand
guaauagauacucaucaga

SEQ ID NO: 1158213 - RNA, 19 nt, Homo sapiens
  misc_RNA (1)...(19): siRNA sense strand
uguaauagauacucaucag

SEQ ID NO: 1158214 - RNA, 19 nt, Homo sapiens
  misc_RNA (1)...(19): siRNA sense strand
agaauaaaaugcaggagaa

SEQ ID NO: 1158215 - RNA, 19 nt, Homo sapiens
  misc_RNA (1)...(19): siRNA sense strand
aagaugaacacuuggagaa

SEQ ID NO: 1158216 - RNA, 19 nt, Homo sapiens
  misc_RNA (1)...(19): siRNA sense strand
ugagauuuaggccuauuaa

SEQ ID NO: 1158217 - RNA, 19 nt, Homo sapiens
  misc_RNA (1)...(19): siRNA sense strand
gucauguacuccacaagga

SEQ ID NO: 1158218 - RNA, 19 nt, Homo sapiens
  misc_RNA (1)...(19): siRNA sense strand
uaacucgggauuugaagga

SEQ ID NO: 1158219 - RNA, 19 nt, Homo sapiens
  misc_RNA (1)...(19): siRNA sense strand
caaaagaguggaaacgaaa

SEQ ID NO: 1158220 - RNA, 19 nt, Homo sapiens
  misc_RNA (1)...(19): siRNA sense strand
ugaccuagcaaccaguuug

SEQ ID NO: 1158221 - RNA, 19 nt, Homo sapiens
  misc_RNA (1)...(19): siRNA sense strand
gcagaccuaauuguaaguu

SEQ ID NO: 1158222 - RNA, 19 nt, Homo sapiens
  misc_RNA (1)...(19): siRNA sense strand
uagauacucaucagaacaa

SEQ ID NO: 1158223 - RNA, 19 nt, Homo sapiens
  misc_RNA (1)...(19): siRNA sense strand
cgaaugggcacggcacuau

SEQ ID NO: 1158224 - RNA, 19 nt, Homo sapiens
  misc_RNA (1)...(19): siRNA sense strand
uggagaaagccuucaaaug

SEQ ID NO: 1158225 - RNA, 19 nt, Homo sapiens
  misc_RNA (1)...(19): siRNA sense strand
gaacaaaauggagccaaaa

SEQ ID NO: 1158226 - RNA, 19 nt, Homo sapiens
  misc_RNA (1)...(19): siRNA sense strand
gaccuaauuguaaguuugu

SEQ ID NO: 1158227 - RNA, 19 nt, Homo sapiens
  misc_RNA (1)...(19): siRNA sense strand
gaccaucagcagaaucaau

SEQ ID NO: 1158228 - RNA, 19 nt, Homo sapiens
  misc_RNA (1)...(19): siRNA sense strand
acucagagaaacagauaaa

SEQ ID NO: 1158229 - RNA, 19 nt, Homo sapiens
  misc_RNA (1)...(19): siRNA sense strand
gaggaggucgaacagaugu

SEQ ID NO: 1158230 - RNA, 19 nt, Homo sapiens
  misc_RNA (1)...(19): siRNA sense strand
aaccaugauugcagaccua

SEQ ID NO: 1158231 - RNA, 19 nt, Homo sapiens
  misc_RNA (1)...(19): siRNA sense strand
agaacaugcuacuuagaca

SEQ ID NO: 1158232 - RNA, 19 nt, Homo sapiens
  misc_RNA (1)...(19): siRNA sense strand
gaguggaaacgaaaugaca

SEQ ID NO: 1158233 - RNA, 19 nt, Homo sapiens
  misc_RNA (1)...(19): siRNA sense strand
uggaauguccgccaaggaa

SEQ ID NO: 1158234 - RNA, 19 nt, Homo sapiens
  misc_RNA (1)...(19): siRNA sense strand
gugagauuuaggccuauua

SEQ ID NO: 1158235 - RNA, 19 nt, Homo sapiens
  misc_RNA (1)...(19): siRNA sense strand
aaugggcacggcacuauuu

SEQ ID NO: 1158236 - RNA, 19 nt, Homo sapiens
  misc_RNA (1)...(19): siRNA sense strand
cagagaaacagauaaacgu

SEQ ID NO: 1158237 - RNA, 19 nt, Homo sapiens
  misc_RNA (1)...(19): siRNA sense strand
uugcagaccuaauuguaag

SEQ ID NO: 1158238 - RNA, 19 nt, Homo sapiens
  misc_RNA (1)...(19): siRNA sense strand
aggagaacaugcuacuuag

SEQ ID NO: 1158239 - RNA, 19 nt, Homo sapiens
  misc_RNA (1)...(19): siRNA sense strand
acaaaagaguggaaacgaa

SEQ ID NO: 1158240 - RNA, 19 nt, Homo sapiens
  misc_RNA (1)...(19): siRNA sense strand
uuacugguggguuguauug

SEQ ID NO: 1158241 - RNA, 19 nt, Homo sapiens
  misc_RNA (1)...(19): siRNA sense strand
gguccugcugcguuuauaa

SEQ ID NO: 1158242 - RNA, 19 nt, Homo sapiens
  misc_RNA (1)...(19): siRNA sense strand
uaagaaagaugaacacuug

SEQ ID NO: 1158243 - RNA, 19 nt, Homo sapiens
  misc_RNA (1)...(19): siRNA sense strand
ggagaaagccuucaaaugu

SEQ ID NO: 1158244 - RNA, 19 nt, Homo sapiens
  misc_RNA (1)...(19): siRNA sense strand
caacaacccugugagauuu

SEQ ID NO: 1158245 - RNA, 19 nt, Homo sapiens
  misc_RNA (1)...(19): siRNA sense strand
gagaaagccuucaaauguu

SEQ ID NO: 1158246 - RNA, 19 nt, Homo sapiens
  misc_RNA (1)...(19): siRNA sense strand
gaggagaacaugcuacuua

SEQ ID NO: 1158247 - RNA, 19 nt, Homo sapiens
  misc_RNA (1)...(19): siRNA sense strand
gaggcaaguugucuaauga

SEQ ID NO: 1158248 - RNA, 19 nt, Homo sapiens
  misc_RNA (1)...(19): siRNA sense strand
ggaggcaaguugucuaaug

SEQ ID NO: 1158249 - RNA, 19 nt, Homo sapiens
  misc_RNA (1)...(19): siRNA sense strand
gaacagauguaaugguaac

SEQ ID NO: 1158250 - RNA, 19 nt, Homo sapiens
  misc_RNA (1)...(19): siRNA sense strand
gagaggaggucgaacagau

SEQ ID NO: 1158251 - RNA, 19 nt, Homo sapiens
  misc_RNA (1)...(19): siRNA sense strand
ucgaacagauguaauggua

SEQ ID NO: 1158252 - RNA, 19 nt, Homo sapiens
  misc_RNA (1)...(19): siRNA sense strand
gcagauaccacucaggaaa

SEQ ID NO: 1158253 - RNA, 19 nt, Homo sapiens
  misc_RNA (1)...(19): siRNA sense strand
agaaagccuucaaauguuu

SEQ ID NO: 1158254 - RNA, 19 nt, Homo sapiens
  misc_RNA (1)...(19): siRNA sense strand
uagcaaauauggacucaga

SEQ ID NO: 1158255 - RNA, 19 nt, Homo sapiens
  misc_RNA (1)...(19): siRNA sense strand
ggacucagagaaacagaua

SEQ ID NO: 1158256 - RNA, 19 nt, Homo sapiens
  misc_RNA (1)...(19): siRNA sense strand
gaacuaaaggaaguaauug

SEQ ID NO: 1158257 - RNA, 19 nt, Homo sapiens
  misc_RNA (1)...(19): siRNA sense strand
gaaaacgacuucaguguca

SEQ ID NO: 1158258 - RNA, 19 nt, Homo sapiens
  misc_RNA (1)...(19): siRNA sense strand
cauugaaccuggagaagaa

SEQ ID NO: 1158259 - RNA, 19 nt, Homo sapiens
  misc_RNA (1)...(19): siRNA sense strand
ucgaggagcucaaggcauu

SEQ ID NO: 1158260 - RNA, 19 nt, Homo sapiens
  misc_RNA (1)...(19): siRNA sense strand
gcaggaagaacuaaaggaa

SEQ ID NO: 1158261 - RNA, 19 nt, Homo sapiens
  misc_RNA (1)...(19): siRNA sense strand
ggacagagucgcuauguac

SEQ ID NO: 1158262 - RNA, 19 nt, Homo sapiens
  misc_RNA (1)...(19): siRNA sense strand
ggaaguaauugaacguuuu

SEQ ID NO: 1158263 - RNA, 19 nt, Homo sapiens
  misc_RNA (1)...(19): siRNA sense strand
gcaaauauggacucagaga

SEQ ID NO: 1158264 - RNA, 19 nt, Homo sapiens
  misc_RNA (1)...(19): siRNA sense strand
caggagaaauuauucaaag

SEQ ID NO: 1158265 - RNA, 19 nt, Homo sapiens
  misc_RNA (1)...(19): siRNA sense strand
gaaccuggagaagaaauuu

SEQ ID NO: 1158266 - RNA, 19 nt, Homo sapiens
  misc_RNA (1)...(19): siRNA sense strand
gguucuugaucccuauuua

SEQ ID NO: 1158267 - RNA, 19 nt, Homo sapiens
  misc_RNA (1)...(19): siRNA sense strand
gcaggagaaauuauucaaa

SEQ ID NO: 1158268 - RNA, 19 nt, Homo sapiens
  misc_RNA (1)...(19): siRNA sense strand
gaugaacacuuggagaaag

SEQ ID NO: 1158269 - RNA, 19 nt, Homo sapiens
  misc_RNA (1)...(19): siRNA sense strand
gaagaacuaaaggaaguaa

SEQ ID NO: 1158270 - RNA, 19 nt, Homo sapiens
  misc_RNA (1)...(19): siRNA sense strand
gauugcagaccuaauugua

SEQ ID NO: 1158271 - RNA, 19 nt, Homo sapiens
  misc_RNA (1)...(19): siRNA sense strand
gugaauggcaggagaaaug

SEQ ID NO: 1158272 - RNA, 19 nt, Homo sapiens
  misc_RNA (1)...(19): siRNA sense strand
cgagauacagcauguguga

SEQ ID NO: 1158273 - RNA, 19 nt, Homo sapiens
  misc_RNA (1)...(19): siRNA sense strand
aaauauggacucagagaaa

SEQ ID NO: 1158274 - RNA, 19 nt, Homo sapiens
  misc_RNA (1)...(19): siRNA sense strand
caaguugucuaaugaccau

SEQ ID NO: 1158275 - RNA, 19 nt, Homo sapiens
  misc_RNA (1)...(19): siRNA sense strand
cgacuucagugucauguac

SEQ ID NO: 1158276 - RNA, 19 nt, Homo sapiens
  misc_RNA (1)...(19): siRNA sense strand
gagaaauggaggcaaguug

SEQ ID NO: 1158277 - RNA, 19 nt, Homo sapiens
  misc_RNA (1)...(19): siRNA sense strand
gaaggcaggaagaacuaaa

SEQ ID NO: 1158278 - RNA, 19 nt, Homo sapiens
  misc_RNA (1)...(19): siRNA sense strand
ggaggucgaacagauguaa

SEQ ID NO: 1158279 - RNA, 19 nt, Homo sapiens
  misc_RNA (1)...(19): siRNA sense strand
uuauggagauggguucuuu

SEQ ID NO: 1158280 - RNA, 19 nt, Homo sapiens
  misc_RNA (1)...(19): siRNA sense strand
caugauugcagaccuaauu

SEQ ID NO: 1158281 - RNA, 19 nt, Homo sapiens
  misc_RNA (1)...(19): siRNA sense strand
acaacaacccugugagauu

SEQ ID NO: 1158282 - RNA, 19 nt, Homo sapiens
  misc_RNA (1)...(19): siRNA sense strand
ccaaggaacucugugaaaa

SEQ ID NO: 1158283 - RNA, 19 nt, Homo sapiens
  misc_RNA (1)...(19): siRNA sense strand
gucaaucugucagcucuaa

SEQ ID NO: 1158284 - RNA, 19 nt, Homo sapiens
  misc_RNA (1)...(19): siRNA sense strand
agaccuaauuguaaguuug

SEQ ID NO: 1158285 - RNA, 19 nt, Homo sapiens
  misc_RNA (1)...(19): siRNA sense strand
ggaagaacuaaaggaagua

SEQ ID NO: 1158286 - RNA, 19 nt, Homo sapiens
  misc_RNA (1)...(19): siRNA sense strand
gcuggguccugcugcguuu

SEQ ID NO: 1158287 - RNA, 19 nt, Homo sapiens
  misc_RNA (1)...(19): siRNA sense strand
cuaaugaccaucagcagaa

SEQ ID NO: 1158288 - RNA, 19 nt, Homo sapiens
  misc_RNA (1)...(19): siRNA sense strand
aaugguaacucgggauuug

SEQ ID NO: 1158289 - RNA, 19 nt, Homo sapiens
  misc_RNA (1)...(19): siRNA sense strand
gcacggcacuauuuucuca

SEQ ID NO: 1158290 - RNA, 19 nt, Homo sapiens
  misc_RNA (1)...(19): siRNA sense strand
aggaagaacuaaaggaagu

SEQ ID NO: 1158291 - RNA, 19 nt, Homo sapiens
  misc_RNA (1)...(19): siRNA sense strand
caaauauggacucagagaa

SEQ ID NO: 1158292 - RNA, 19 nt, Homo sapiens
  misc_RNA (1)...(19): siRNA sense strand
gccaaggaacucugugaaa

SEQ ID NO: 1158293 - RNA, 19 nt, Homo sapiens
  misc_RNA (1)...(19): siRNA sense strand
gaacaugcuacuuagacau

SEQ ID NO: 1158294 - RNA, 19 nt, Homo sapiens
  misc_RNA (1)...(19): siRNA sense strand
guaccauccucuggaaugu

SEQ ID NO: 1158295 - RNA, 19 nt, Homo sapiens
  misc_RNA (1)...(19): siRNA sense strand
gaaauggaggcaaguuguc

SEQ ID NO: 1158296 - RNA, 19 nt, Homo sapiens
  misc_RNA (1)...(19): siRNA sense strand
ggagaacaugcuacuuaga

SEQ ID NO: 1158297 - RNA, 19 nt, Homo sapiens
  misc_RNA (1)...(19): siRNA sense strand
ccaaaauaguugcaacaaa

SEQ ID NO: 1158298 - RNA, 19 nt, Homo sapiens
  misc_RNA (1)...(19): siRNA sense strand
gaaugggcacggcacuauu

SEQ ID NO: 1158299 - RNA, 19 nt, Homo sapiens
  misc_RNA (1)...(19): siRNA sense strand
aggaaguaauugaacguuu

SEQ ID NO: 1158300 - RNA, 19 nt, Homo sapiens
  misc_RNA (1)...(19): siRNA sense strand
uaaaggaaggcaggaagaa

SEQ ID NO: 1158301 - RNA, 19 nt, Homo sapiens
  misc_RNA (1)...(19): siRNA sense strand
cagaccuaauuguaaguuu

SEQ ID NO: 1158302 - RNA, 19 nt, Homo sapiens
  misc_RNA (1)...(19): siRNA sense strand
gagaacaugcuacuuagac

SEQ ID NO: 1158303 - RNA, 19 nt, Homo sapiens
  misc_RNA (1)...(19): siRNA sense strand
ggagaaauggaggcaaguu

SEQ ID NO: 1158304 - RNA, 19 nt, Homo sapiens
  misc_RNA (1)...(19): siRNA sense strand
uauguaccauccucuggaa

SEQ ID NO: 1158305 - RNA, 19 nt, Homo sapiens
  misc_RNA (1)...(19): siRNA sense strand
guaaugguaacucgggauu

SEQ ID NO: 1158306 - RNA, 19 nt, Homo sapiens
  misc_RNA (1)...(19): siRNA sense strand
aaugaauacuagcgccuuu

SEQ ID NO: 1158307 - RNA, 19 nt, Homo sapiens
  misc_RNA (1)...(19): siRNA sense strand
ggaaggcaggaagaacuaa

SEQ ID NO: 1158308 - RNA, 19 nt, Homo sapiens
  misc_RNA (1)...(19): siRNA sense strand
cuacuuagacauggagaaa

SEQ ID NO: 1158309 - RNA, 19 nt, Homo sapiens
  misc_RNA (1)...(19): siRNA sense strand
gaaggacagagucgcuaug

SEQ ID NO: 1158310 - RNA, 19 nt, Homo sapiens
  misc_RNA (1)...(19): siRNA sense strand
gaauuacugguggguugua

SEQ ID NO: 1158311 - RNA, 19 nt, Homo sapiens
  misc_RNA (1)...(19): siRNA sense strand
caaaauggagccaaaauag

SEQ ID NO: 1158312 - RNA, 19 nt, Homo sapiens
  misc_RNA (1)...(19): siRNA sense strand
guaauagauacucaucaga

SEQ ID NO: 1158313 - RNA, 19 nt, Homo sapiens
  misc_RNA (1)...(19): siRNA sense strand
uguaauagauacucaucag

SEQ ID NO: 1158314 - RNA, 19 nt, Homo sapiens
  misc_RNA (1)...(19): siRNA sense strand
agaauaaaaugcaggagaa

SEQ ID NO: 1158315 - RNA, 19 nt, Homo sapiens
  misc_RNA (1)...(19): siRNA sense strand
aagaugaacacuuggagaa

SEQ ID NO: 1158316 - RNA, 19 nt, Homo sapiens
  misc_RNA (1)...(19): siRNA sense strand
ugagauuuaggccuauuaa

SEQ ID NO: 1158317 - RNA, 19 nt, Homo sapiens
  misc_RNA (1)...(19): siRNA sense strand
gucauguacuccacaagga

SEQ ID NO: 1158318 - RNA, 19 nt, Homo sapiens
  misc_RNA (1)...(19): siRNA sense strand
uaacucgggauuugaagga

SEQ ID NO: 1158319 - RNA, 19 nt, Homo sapiens
  misc_RNA (1)...(19): siRNA sense strand
caaaagaguggaaacgaaa

SEQ ID NO: 1158320 - RNA, 19 nt, Homo sapiens
  misc_RNA (1)...(19): siRNA sense strand
ugaccuagcaaccaguuug

SEQ ID NO: 1158321 - RNA, 19 nt, Homo sapiens
  misc_RNA (1)...(19): siRNA sense strand
gcagaccuaauuguaaguu

SEQ ID NO: 1158322 - RNA, 19 nt, Homo sapiens
  misc_RNA (1)...(19): siRNA sense strand
uagauacucaucagaacaa

SEQ ID NO: 1158323 - RNA, 19 nt, Homo sapiens
  misc_RNA (1)...(19): siRNA sense strand
cgaaugggcacggcacuau

SEQ ID NO: 1158324 - RNA, 19 nt, Homo sapiens
  misc_RNA (1)...(19): siRNA sense strand
uggagaaagccuucaaaug

SEQ ID NO: 1158325 - RNA, 19 nt, Homo sapiens
  misc_RNA (1)...(19): siRNA sense strand
gaacaaaauggagccaaaa

SEQ ID NO: 1158326 - RNA, 19 nt, Homo sapiens
  misc_RNA (1)...(19): siRNA sense strand
gaccuaauuguaaguuugu

SEQ ID NO: 1158327 - RNA, 19 nt, Homo sapiens
  misc_RNA (1)...(19): siRNA sense strand
gaccaucagcagaaucaau

SEQ ID NO: 1158328 - RNA, 19 nt, Homo sapiens
  misc_RNA (1)...(19): siRNA sense strand
acucagagaaacagauaaa

SEQ ID NO: 1158329 - RNA, 19 nt, Homo sapiens
  misc_RNA (1)...(19): siRNA sense strand
gaggaggucgaacagaugu

SEQ ID NO: 1158330 - RNA, 19 nt, Homo sapiens
  misc_RNA (1)...(19): siRNA sense strand
aaccaugauugcagaccua

SEQ ID NO: 1158331 - RNA, 19 nt, Homo sapiens
  misc_RNA (1)...(19): siRNA sense strand
agaacaugcuacuuagaca

SEQ ID NO: 1158332 - RNA, 19 nt, Homo sapiens
  misc_RNA (1)...(19): siRNA sense strand
gaguggaaacgaaaugaca

SEQ ID NO: 1158333 - RNA, 19 nt, Homo sapiens
  misc_RNA (1)...(19): siRNA sense strand
uggaauguccgccaaggaa

SEQ ID NO: 1158334 - RNA, 19 nt, Homo sapiens
  misc_RNA (1)...(19): siRNA sense strand
gugagauuuaggccuauua

SEQ ID NO: 1158335 - RNA, 19 nt, Homo sapiens
  misc_RNA (1)...(19): siRNA sense strand
aaugggcacggcacuauuu

SEQ ID NO: 1158336 - RNA, 19 nt, Homo sapiens
  misc_RNA (1)...(19): siRNA sense strand
cagagaaacagauaaacgu

SEQ ID NO: 1158337 - RNA, 19 nt, Homo sapiens
  misc_RNA (1)...(19): siRNA sense strand
uugcagaccuaauuguaag

SEQ ID NO: 1158338 - RNA, 19 nt, Homo sapiens
  misc_RNA (1)...(19): siRNA sense strand
aggagaacaugcuacuuag

SEQ ID NO: 1158339 - RNA, 19 nt, Homo sapiens
  misc_RNA (1)...(19): siRNA sense strand
acaaaagaguggaaacgaa

SEQ ID NO: 1158340 - RNA, 19 nt, Homo sapiens
  misc_RNA (1)...(19): siRNA sense strand
uuacugguggguuguauug

SEQ ID NO: 1158341 - RNA, 19 nt, Homo sapiens
  misc_RNA (1)...(19): siRNA sense strand
gguccugcugcguuuauaa

SEQ ID NO: 1158342 - RNA, 19 nt, Homo sapiens
  misc_RNA (1)...(19): siRNA sense strand
ggaauaacauuucuuggaa

SEQ ID NO: 1158343 - RNA, 19 nt, Homo sapiens
  misc_RNA (1)...(19): siRNA sense strand
ucaaagaccagcuguauuu

SEQ ID NO: 1158344 - RNA, 19 nt, Homo sapiens
  misc_RNA (1)...(19): siRNA sense strand
gaagucaguuguugcauca

SEQ ID NO: 1158345 - RNA, 19 nt, Homo sapiens
  misc_RNA (1)...(19): siRNA sense strand
gaccagcuguauuucuuua

SEQ ID NO: 1158346 - RNA, 19 nt, Homo sapiens
  misc_RNA (1)...(19): siRNA sense strand
ccagcuguauuucuuuaua

SEQ ID NO: 1158347 - RNA, 19 nt, Homo sapiens
  misc_RNA (1)...(19): siRNA sense strand
gaucaaagaccagcuguau

SEQ ID NO: 1158348 - RNA, 19 nt, Homo sapiens
  misc_RNA (1)...(19): siRNA sense strand
gaaguugaccagcagauug

SEQ ID NO: 1158349 - RNA, 19 nt, Homo sapiens
  misc_RNA (1)...(19): siRNA sense strand
uggcuucaaugucauauuu

SEQ ID NO: 1158350 - RNA, 19 nt, Homo sapiens
  misc_RNA (1)...(19): siRNA sense strand
cuaaagaucccgcagaaga

SEQ ID NO: 1158351 - RNA, 19 nt, Homo sapiens
  misc_RNA (1)...(19): siRNA sense strand
ggagcucacugccggaguu

SEQ ID NO: 1158352 - RNA, 19 nt, Homo sapiens
  misc_RNA (1)...(19): siRNA sense strand
gcugaugauuggaaccuaa

SEQ ID NO: 1158353 - RNA, 19 nt, Homo sapiens
  misc_RNA (1)...(19): siRNA sense strand
ggaguucuagcauuuguuu

SEQ ID NO: 1158354 - RNA, 19 nt, Homo sapiens
  misc_RNA (1)...(19): siRNA sense strand
gggaauaacauuucuugga

SEQ ID NO: 1158355 - RNA, 19 nt, Homo sapiens
  misc_RNA (1)...(19): siRNA sense strand
cuacaaggguccugaaguc

SEQ ID NO: 1158356 - RNA, 19 nt, Homo sapiens
  misc_RNA (1)...(19): siRNA sense strand
gaugauuggaaccuaaaua

SEQ ID NO: 1158357 - RNA, 19 nt, Homo sapiens
  misc_RNA (1)...(19): siRNA sense strand
ggaguucuguccaacaucu

SEQ ID NO: 1158358 - RNA, 19 nt, Homo sapiens
  misc_RNA (1)...(19): siRNA sense strand
gggaugacauugauuugca

SEQ ID NO: 1158359 - RNA, 19 nt, Homo sapiens
  misc_RNA (1)...(19): siRNA sense strand
ggaggagugauguucauuu

SEQ ID NO: 1158360 - RNA, 19 nt, Homo sapiens
  misc_RNA (1)...(19): siRNA sense strand
uaacauuucuuggaauugg

SEQ ID NO: 1158361 - RNA, 19 nt, Homo sapiens
  misc_RNA (1)...(19): siRNA sense strand
gaauuugguuagcgauauc

SEQ ID NO: 1158362 - RNA, 19 nt, Homo sapiens
  misc_RNA (1)...(19): siRNA sense strand
gaggagugauguucauuuu

SEQ ID NO: 1158363 - RNA, 19 nt, Homo sapiens
  misc_RNA (1)...(19): siRNA sense strand
cacuaaagaucccgcagaa

SEQ ID NO: 1158364 - RNA, 19 nt, Homo sapiens
  misc_RNA (1)...(19): siRNA sense strand
gagcauaucgggaugacau

SEQ ID NO: 1158365 - RNA, 19 nt, Homo sapiens
  misc_RNA (1)...(19): siRNA sense strand
acaacaacaucagagcaua

SEQ ID NO: 1158366 - RNA, 19 nt, Homo sapiens
  misc_RNA (1)...(19): siRNA sense strand
ugccggaguucuagcauuu

SEQ ID NO: 1158367 - RNA, 19 nt, Homo sapiens
  misc_RNA (1)...(19): siRNA sense strand
ggaugacauugauuugcaa

SEQ ID NO: 1158368 - RNA, 19 nt, Homo sapiens
  misc_RNA (1)...(19): siRNA sense strand
ucaaagacuggaucaaaga

SEQ ID NO: 1158369 - RNA, 19 nt, Homo sapiens
  misc_RNA (1)...(19): siRNA sense strand
caacaacaucagagcauau

SEQ ID NO: 1158370 - RNA, 19 nt, Homo sapiens
  misc_RNA (1)...(19): siRNA sense strand
uccaacaucucuuccauca

SEQ ID NO: 1158371 - RNA, 19 nt, Homo sapiens
  misc_RNA (1)...(19): siRNA sense strand
guuguugcaucaaauacuu

SEQ ID NO: 1158372 - RNA, 19 nt, Homo sapiens
  misc_RNA (1)...(19): siRNA sense strand
auauuuggcuucaauguca

SEQ ID NO: 1158373 - RNA, 19 nt, Homo sapiens
  misc_RNA (1)...(19): siRNA sense strand
cuucauauuuggcuucaau

SEQ ID NO: 1158374 - RNA, 19 nt, Homo sapiens
  misc_RNA (1)...(19): siRNA sense strand
caguuuggcucuuccuugu

SEQ ID NO: 1158375 - RNA, 19 nt, Homo sapiens
  misc_RNA (1)...(19): siRNA sense strand
agaauuugguuagcgauau

SEQ ID NO: 1158376 - RNA, 19 nt, Homo sapiens
  misc_RNA (1)...(19): siRNA sense strand
gcucacugccggaguucua

SEQ ID NO: 1158377 - RNA, 19 nt, Homo sapiens
  misc_RNA (1)...(19): siRNA sense strand
agaagugguugcaggacaa

SEQ ID NO: 1158378 - RNA, 19 nt, Homo sapiens
  misc_RNA (1)...(19): siRNA sense strand
uuacuucaauugcacagau

SEQ ID NO: 1158379 - RNA, 19 nt, Homo sapiens
  misc_RNA (1)...(19): siRNA sense strand
ucaguuguugcaucaaaua

SEQ ID NO: 1158380 - RNA, 19 nt, Homo sapiens
  misc_RNA (1)...(19): siRNA sense strand
ggagugauguucauuuugg

SEQ ID NO: 1158381 - RNA, 19 nt, Homo sapiens
  misc_RNA (1)...(19): siRNA sense strand
uaaagaucccgcagaagau

SEQ ID NO: 1158382 - RNA, 19 nt, Homo sapiens
  misc_RNA (1)...(19): siRNA sense strand
ggacugugggcauggaaug

SEQ ID NO: 1158383 - RNA, 19 nt, Homo sapiens
  misc_RNA (1)...(19): siRNA sense strand
gcacuacaaggguccugaa

SEQ ID NO: 1158384 - RNA, 19 nt, Homo sapiens
  misc_RNA (1)...(19): siRNA sense strand
agucaguuguugcaucaaa

SEQ ID NO: 1158385 - RNA, 19 nt, Homo sapiens
  misc_RNA (1)...(19): siRNA sense strand
agacuucacccaggaauau

SEQ ID NO: 1158386 - RNA, 19 nt, Homo sapiens
  misc_RNA (1)...(19): siRNA sense strand
gugguugcaggacaauuua

SEQ ID NO: 1158387 - RNA, 19 nt, Homo sapiens
  misc_RNA (1)...(19): siRNA sense strand
cagaauuugguuagcgaua

SEQ ID NO: 1158388 - RNA, 19 nt, Homo sapiens
  misc_RNA (1)...(19): siRNA sense strand
uuucauaggcauugcauug

SEQ ID NO: 1158389 - RNA, 19 nt, Homo sapiens
  misc_RNA (1)...(19): siRNA sense strand
uuucaaagacuggaucaaa

SEQ ID NO: 1158390 - RNA, 19 nt, Homo sapiens
  misc_RNA (1)...(19): siRNA sense strand
gcaagucgagagcgaugug

SEQ ID NO: 1158391 - RNA, 19 nt, Homo sapiens
  misc_RNA (1)...(19): siRNA sense strand
ggaucaaagaccagcugua

SEQ ID NO: 1158392 - RNA, 19 nt, Homo sapiens
  misc_RNA (1)...(19): siRNA sense strand
gauguggcguuccauucuc

SEQ ID NO: 1158393 - RNA, 19 nt, Homo sapiens
  misc_RNA (1)...(19): siRNA sense strand
ccauucuccugcugcacua

SEQ ID NO: 1158394 - RNA, 19 nt, Homo sapiens
  misc_RNA (1)...(19): siRNA sense strand
cauaucgggaugacauuga

SEQ ID NO: 1158395 - RNA, 19 nt, Homo sapiens
  misc_RNA (1)...(19): siRNA sense strand
gcauaucgggaugacauug

SEQ ID NO: 1158396 - RNA, 19 nt, Homo sapiens
  misc_RNA (1)...(19): siRNA sense strand
caucguugcugguauuuuc

SEQ ID NO: 1158397 - RNA, 19 nt, Homo sapiens
  misc_RNA (1)...(19): siRNA sense strand
ggacaauuuaaccaucguu

SEQ ID NO: 1158398 - RNA, 19 nt, Homo sapiens
  misc_RNA (1)...(19): siRNA sense strand
uucaaagacuggaucaaag

SEQ ID NO: 1158399 - RNA, 19 nt, Homo sapiens
  misc_RNA (1)...(19): siRNA sense strand
gcgauguggcguuccauuc

SEQ ID NO: 1158400 - RNA, 19 nt, Homo sapiens
  misc_RNA (1)...(19): siRNA sense strand
gaugacauugauuugcaaa

SEQ ID NO: 1158401 - RNA, 19 nt, Homo sapiens
  misc_RNA (1)...(19): siRNA sense strand
caaagaccagcuguauuuc

SEQ ID NO: 1158402 - RNA, 19 nt, Homo sapiens
  misc_RNA (1)...(19): siRNA sense strand
aaggaguucuguccaacau

SEQ ID NO: 1158403 - RNA, 19 nt, Homo sapiens
  misc_RNA (1)...(19): siRNA sense strand
ccggaguucuagcauuugu

SEQ ID NO: 1158404 - RNA, 19 nt, Homo sapiens
  misc_RNA (1)...(19): siRNA sense strand
gguuagcgauaucgaagcu

SEQ ID NO: 1158405 - RNA, 19 nt, Homo sapiens
  misc_RNA (1)...(19): siRNA sense strand
ugacccaguuuggcucuuc

SEQ ID NO: 1158406 - RNA, 19 nt, Homo sapiens
  misc_RNA (1)...(19): siRNA sense strand
gucaguuguugcaucaaau

SEQ ID NO: 1158407 - RNA, 19 nt, Homo sapiens
  misc_RNA (1)...(19): siRNA sense strand
gauguucauuuugggauuu

SEQ ID NO: 1158408 - RNA, 19 nt, Homo sapiens
  misc_RNA (1)...(19): siRNA sense strand
aaagaucccgcagaagaug

SEQ ID NO: 1158409 - RNA, 19 nt, Homo sapiens
  misc_RNA (1)...(19): siRNA sense strand
ucaauugcacagauuccaa

SEQ ID NO: 1158410 - RNA, 19 nt, Homo sapiens
  misc_RNA (1)...(19): siRNA sense strand
guugaccagcagauuguaa

SEQ ID NO: 1158411 - RNA, 19 nt, Homo sapiens
  misc_RNA (1)...(19): siRNA sense strand
gcuucaaugucauauuuug

SEQ ID NO: 1158412 - RNA, 19 nt, Homo sapiens
  misc_RNA (1)...(19): siRNA sense strand
cauccuaccuuucuacuua

SEQ ID NO: 1158413 - RNA, 19 nt, Homo sapiens
  misc_RNA (1)...(19): siRNA sense strand
aauauggccugcaauagua

SEQ ID NO: 1158414 - RNA, 19 nt, Homo sapiens
  misc_RNA (1)...(19): siRNA sense strand
gugaggauccugagaauuu

SEQ ID NO: 1158415 - RNA, 19 nt, Homo sapiens
  misc_RNA (1)...(19): siRNA sense strand
ggacauacucuucgagcua

SEQ ID NO: 1158416 - RNA, 19 nt, Homo sapiens
  misc_RNA (1)...(19): siRNA sense strand
ucgccuaugugcucaauua

SEQ ID NO: 1158417 - RNA, 19 nt, Homo sapiens
  misc_RNA (1)...(19): siRNA sense strand
ccuaugugcucaauuacua

SEQ ID NO: 1158418 - RNA, 19 nt, Homo sapiens
  misc_RNA (1)...(19): siRNA sense strand
gaucuacuaugccgagaga

SEQ ID NO: 1158419 - RNA, 19 nt, Homo sapiens
  misc_RNA (1)...(19): siRNA sense strand
gaauaucauugacuuugug

SEQ ID NO: 1158420 - RNA, 19 nt, Homo sapiens
  misc_RNA (1)...(19): siRNA sense strand
caaguguuguucuacagua

SEQ ID NO: 1158421 - RNA, 19 nt, Homo sapiens
  misc_RNA (1)...(19): siRNA sense strand
gaacacgccuggcccuucu

SEQ ID NO: 1158422 - RNA, 19 nt, Homo sapiens
  misc_RNA (1)...(19): siRNA sense strand
gauauuugcuaccaugauc

SEQ ID NO: 1158423 - RNA, 19 nt, Homo sapiens
  misc_RNA (1)...(19): siRNA sense strand
gagcuaguacuaaugaauu

SEQ ID NO: 1158424 - RNA, 19 nt, Homo sapiens
  misc_RNA (1)...(19): siRNA sense strand
uuaaauauggccugcaaua

SEQ ID NO: 1158425 - RNA, 19 nt, Homo sapiens
  misc_RNA (1)...(19): siRNA sense strand
acacaugucugggcaaaga

SEQ ID NO: 1158426 - RNA, 19 nt, Homo sapiens
  misc_RNA (1)...(19): siRNA sense strand
caggcaagcucaccuacuu

SEQ ID NO: 1158427 - RNA, 19 nt, Homo sapiens
  misc_RNA (1)...(19): siRNA sense strand
gcaauaguacacagaguga

SEQ ID NO: 1158428 - RNA, 19 nt, Homo sapiens
  misc_RNA (1)...(19): siRNA sense strand
caaagacaaucgacuucug

SEQ ID NO: 1158429 - RNA, 19 nt, Homo sapiens
  misc_RNA (1)...(19): siRNA sense strand
gauccugccuugacguaug

SEQ ID NO: 1158430 - RNA, 19 nt, Homo sapiens
  misc_RNA (1)...(19): siRNA sense strand
ucagugggcugucauccaa

SEQ ID NO: 1158431 - RNA, 19 nt, Homo sapiens
  misc_RNA (1)...(19): siRNA sense strand
uaacgacccuucagcuagu

SEQ ID NO: 1158432 - RNA, 19 nt, Homo sapiens
  misc_RNA (1)...(19): siRNA sense strand
guacacagagugacacaug

SEQ ID NO: 1158433 - RNA, 19 nt, Homo sapiens
  misc_RNA (1)...(19): siRNA sense strand
guccagagccgccagguuu

SEQ ID NO: 1158434 - RNA, 19 nt, Homo sapiens
  misc_RNA (1)...(19): siRNA sense strand
gagcccugcugcuggauga

SEQ ID NO: 1158435 - RNA, 19 nt, Homo sapiens
  misc_RNA (1)...(19): siRNA sense strand
caaagcugcuaaagaugug

SEQ ID NO: 1158436 - RNA, 19 nt, Homo sapiens
  misc_RNA (1)...(19): siRNA sense strand
ccaaagcugcuaaagaugu

SEQ ID NO: 1158437 - RNA, 19 nt, Homo sapiens
  misc_RNA (1)...(19): siRNA sense strand
auccaaagcugcuaaagau

SEQ ID NO: 1158438 - RNA, 19 nt, Homo sapiens
  misc_RNA (1)...(19): siRNA sense strand
gggcaaagacaaucgacuu

SEQ ID NO: 1158439 - RNA, 19 nt, Homo sapiens
  misc_RNA (1)...(19): siRNA sense strand
gacagaaccagucaucaau

SEQ ID NO: 1158440 - RNA, 19 nt, Homo sapiens
  misc_RNA (1)...(19): siRNA sense strand
cagaaccagucaucaaugg

SEQ ID NO: 1158441 - RNA, 19 nt, Homo sapiens
  misc_RNA (1)...(19): siRNA sense strand
ccaagaggcugggcaucga

SEQ ID NO: 1158442 - RNA, 19 nt, Homo sapiens
  misc_RNA (1)...(19): siRNA sense strand
gaguguguguggugugguu

SEQ ID NO: 1158443 - RNA, 19 nt, Homo sapiens
  misc_RNA (1)...(19): siRNA sense strand
guucuacaguaugaaauug

SEQ ID NO: 1158444 - RNA, 19 nt, Homo sapiens
  misc_RNA (1)...(19): siRNA sense strand
agacagaaccagucaucaa

SEQ ID NO: 1158445 - RNA, 19 nt, Homo sapiens
  misc_RNA (1)...(19): siRNA sense strand
acaaucgacuucuggaaca

SEQ ID NO: 1158446 - RNA, 19 nt, Homo sapiens
  misc_RNA (1)...(19): siRNA sense strand
cuagugagcacacacaguu

SEQ ID NO: 1158447 - RNA, 19 nt, Homo sapiens
  misc_RNA (1)...(19): siRNA sense strand
caagacagaaccagucauc

SEQ ID NO: 1158448 - RNA, 19 nt, Homo sapiens
  misc_RNA (1)...(19): siRNA sense strand
gcaaagcagaaacuuccaa

SEQ ID NO: 1158449 - RNA, 19 nt, Homo sapiens
  misc_RNA (1)...(19): siRNA sense strand
guacuacuccuuggcaaug

SEQ ID NO: 1158450 - RNA, 19 nt, Homo sapiens
  misc_RNA (1)...(19): siRNA sense strand
gcacccggcacgaaaccua

SEQ ID NO: 1158451 - RNA, 19 nt, Homo sapiens
  misc_RNA (1)...(19): siRNA sense strand
cauccaaagcugcuaaaga

SEQ ID NO: 1158452 - RNA, 19 nt, Homo sapiens
  misc_RNA (1)...(19): siRNA sense strand
aaauauggccugcaauagu

SEQ ID NO: 1158453 - RNA, 19 nt, Homo sapiens
  misc_RNA (1)...(19): siRNA sense strand
uugcuaccaugaucuacua

SEQ ID NO: 1158454 - RNA, 19 nt, Homo sapiens
  misc_RNA (1)...(19): siRNA sense strand
aauuaaauauggccugcaa

SEQ ID NO: 1158455 - RNA, 19 nt, Homo sapiens
  misc_RNA (1)...(19): siRNA sense strand
aagcagaaacuuccaagga

SEQ ID NO: 1158456 - RNA, 19 nt, Homo sapiens
  misc_RNA (1)...(19): siRNA sense strand
ccgccagguuuauugcuuu

SEQ ID NO: 1158457 - RNA, 19 nt, Homo sapiens
  misc_RNA (1)...(19): siRNA sense strand
gaacaacgagagggugauc

SEQ ID NO: 1158458 - RNA, 19 nt, Homo sapiens
  misc_RNA (1)...(19): siRNA sense strand
uggaaacacaugaagcuuu

SEQ ID NO: 1158459 - RNA, 19 nt, Homo sapiens
  misc_RNA (1)...(19): siRNA sense strand
gccagugccugucauuguc

SEQ ID NO: 1158460 - RNA, 19 nt, Homo sapiens
  misc_RNA (1)...(19): siRNA sense strand
caugugggcccucuucgaa

SEQ ID NO: 1158461 - RNA, 19 nt, Homo sapiens
  misc_RNA (1)...(19): siRNA sense strand
cauccugguuucaauuaca

SEQ ID NO: 1158462 - RNA, 19 nt, Homo sapiens
  misc_RNA (1)...(19): siRNA sense strand
guauguagaaggagugugu

SEQ ID NO: 1158463 - RNA, 19 nt, Homo sapiens
  misc_RNA (1)...(19): siRNA sense strand
guguuguucuacaguauga

SEQ ID NO: 1158464 - RNA, 19 nt, Homo sapiens
  misc_RNA (1)...(19): siRNA sense strand
aggaggagcuggccuucug

SEQ ID NO: 1158465 - RNA, 19 nt, Homo sapiens
  misc_RNA (1)...(19): siRNA sense strand
aggaggcgcuggacaucuu

SEQ ID NO: 1158466 - RNA, 19 nt, Homo sapiens
  misc_RNA (1)...(19): siRNA sense strand
gcaaagacaaucgacuucu

SEQ ID NO: 1158467 - RNA, 19 nt, Homo sapiens
  misc_RNA (1)...(19): siRNA sense strand
uaaauauggccugcaauag

SEQ ID NO: 1158468 - RNA, 19 nt, Homo sapiens
  misc_RNA (1)...(19): siRNA sense strand
gagugggagcucaaccuaa

SEQ ID NO: 1158469 - RNA, 19 nt, Homo sapiens
  misc_RNA (1)...(19): siRNA sense strand
ccuaacgacccuucagcua

SEQ ID NO: 1158470 - RNA, 19 nt, Homo sapiens
  misc_RNA (1)...(19): siRNA sense strand
agucaucaauggcacaagu

SEQ ID NO: 1158471 - RNA, 19 nt, Homo sapiens
  misc_RNA (1)...(19): siRNA sense strand
ggcaauggcaaagcagaaa

SEQ ID NO: 1158472 - RNA, 19 nt, Homo sapiens
  misc_RNA (1)...(19): siRNA sense strand
gcuggagugcugacaauag

SEQ ID NO: 1158473 - RNA, 19 nt, Homo sapiens
  misc_RNA (1)...(19): siRNA sense strand
aaacggauccugccuugac

SEQ ID NO: 1158474 - RNA, 19 nt, Homo sapiens
  misc_RNA (1)...(19): siRNA sense strand
gaaacggauccugccuuga

SEQ ID NO: 1158475 - RNA, 19 nt, Homo sapiens
  misc_RNA (1)...(19): siRNA sense strand
gcaagaucgagaacaacga

SEQ ID NO: 1158476 - RNA, 19 nt, Homo sapiens
  misc_RNA (1)...(19): siRNA sense strand
cuaccaugaucuacuaugc

SEQ ID NO: 1158477 - RNA, 19 nt, Homo sapiens
  misc_RNA (1)...(19): siRNA sense strand
uguguggugugguuuacuu

SEQ ID NO: 1158478 - RNA, 19 nt, Homo sapiens
  misc_RNA (1)...(19): siRNA sense strand
uggcuggagugcugacaau

SEQ ID NO: 1158479 - RNA, 19 nt, Homo sapiens
  misc_RNA (1)...(19): siRNA sense strand
ggcaaagacaaucgacuuc

SEQ ID NO: 1158480 - RNA, 19 nt, Homo sapiens
  misc_RNA (1)...(19): siRNA sense strand
gccgccagguuuauugcuu

SEQ ID NO: 1158481 - RNA, 19 nt, Homo sapiens
  misc_RNA (1)...(19): siRNA sense strand
ccucagggugguaagguuu

SEQ ID NO: 1158482 - RNA, 19 nt, Homo sapiens
  misc_RNA (1)...(19): siRNA sense strand
ugagggugcuuggacauac

SEQ ID NO: 1158483 - RNA, 19 nt, Homo sapiens
  misc_RNA (1)...(19): siRNA sense strand
cucaagacccugccuggaa

SEQ ID NO: 1158484 - RNA, 19 nt, Homo sapiens
  misc_RNA (1)...(19): siRNA sense strand
cgagcuaguacuaaugaau

SEQ ID NO: 1158485 - RNA, 19 nt, Homo sapiens
  misc_RNA (1)...(19): siRNA sense strand
gcuuggacauacucuucga

SEQ ID NO: 1158486 - RNA, 19 nt, Homo sapiens
  misc_RNA (1)...(19): siRNA sense strand
gugcuuggacauacucuuc

SEQ ID NO: 1158487 - RNA, 19 nt, Homo sapiens
  misc_RNA (1)...(19): siRNA sense strand
gcaugugggcccucuucga

SEQ ID NO: 1158488 - RNA, 19 nt, Homo sapiens
  misc_RNA (1)...(19): siRNA sense strand
gagggugcuuggacauacu

SEQ ID NO: 1158489 - RNA, 19 nt, Homo sapiens
  misc_RNA (1)...(19): siRNA sense strand
cuugacguauguagaagga

SEQ ID NO: 1158490 - RNA, 19 nt, Homo sapiens
  misc_RNA (1)...(19): siRNA sense strand
guuguucuacaguaugaaa

SEQ ID NO: 1158491 - RNA, 19 nt, Homo sapiens
  misc_RNA (1)...(19): siRNA sense strand
cccaauaaacuugaauuca

SEQ ID NO: 1158492 - RNA, 19 nt, Homo sapiens
  misc_RNA (1)...(19): siRNA sense strand
cgacuucuggaacauaaca

SEQ ID NO: 1158493 - RNA, 19 nt, Homo sapiens
  misc_RNA (1)...(19): siRNA sense strand
gagcacacacaguucaaaa

SEQ ID NO: 1158494 - RNA, 19 nt, Homo sapiens
  misc_RNA (1)...(19): siRNA sense strand
agugggagcucaaccuaac

SEQ ID NO: 1158495 - RNA, 19 nt, Homo sapiens
  misc_RNA (1)...(19): siRNA sense strand
cgagagagugggagcucaa

SEQ ID NO: 1158496 - RNA, 19 nt, Homo sapiens
  misc_RNA (1)...(19): siRNA sense strand
acucuucgagcuaguacua

SEQ ID NO: 1158497 - RNA, 19 nt, Homo sapiens
  misc_RNA (1)...(19): siRNA sense strand
cauccuaccuuucuacuua

SEQ ID NO: 1158498 - RNA, 19 nt, Homo sapiens
  misc_RNA (1)...(19): siRNA sense strand
aauauggccugcaauagua

SEQ ID NO: 1158499 - RNA, 19 nt, Homo sapiens
  misc_RNA (1)...(19): siRNA sense strand
gugaggauccugagaauuu

SEQ ID NO: 1158500 - RNA, 19 nt, Homo sapiens
  misc_RNA (1)...(19): siRNA sense strand
ggacauacucuucgagcua

SEQ ID NO: 1158501 - RNA, 19 nt, Homo sapiens
  misc_RNA (1)...(19): siRNA sense strand
ucgccuaugugcucaauua

SEQ ID NO: 1158502 - RNA, 19 nt, Homo sapiens
  misc_RNA (1)...(19): siRNA sense strand
ccuaugugcucaauuacua

SEQ ID NO: 1158503 - RNA, 19 nt, Homo sapiens
  misc_RNA (1)...(19): siRNA sense strand
gaucuacuaugccgagaga

SEQ ID NO: 1158504 - RNA, 19 nt, Homo sapiens
  misc_RNA (1)...(19): siRNA sense strand
gaauaucauugacuuugug

SEQ ID NO: 1158505 - RNA, 19 nt, Homo sapiens
  misc_RNA (1)...(19): siRNA sense strand
caaguguuguucuacagua

SEQ ID NO: 1158506 - RNA, 19 nt, Homo sapiens
  misc_RNA (1)...(19): siRNA sense strand
gaacacgccuggcccuucu

SEQ ID NO: 1158507 - RNA, 19 nt, Homo sapiens
  misc_RNA (1)...(19): siRNA sense strand
gauauuugcuaccaugauc

SEQ ID NO: 1158508 - RNA, 19 nt, Homo sapiens
  misc_RNA (1)...(19): siRNA sense strand
gagcuaguacuaaugaauu

SEQ ID NO: 1158509 - RNA, 19 nt, Homo sapiens
  misc_RNA (1)...(19): siRNA sense strand
uuaaauauggccugcaaua

SEQ ID NO: 1158510 - RNA, 19 nt, Homo sapiens
  misc_RNA (1)...(19): siRNA sense strand
acacaugucugggcaaaga

SEQ ID NO: 1158511 - RNA, 19 nt, Homo sapiens
  misc_RNA (1)...(19): siRNA sense strand
caggcaagcucaccuacuu

SEQ ID NO: 1158512 - RNA, 19 nt, Homo sapiens
  misc_RNA (1)...(19): siRNA sense strand
gcaauaguacacagaguga

SEQ ID NO: 1158513 - RNA, 19 nt, Homo sapiens
  misc_RNA (1)...(19): siRNA sense strand
caaagacaaucgacuucug

SEQ ID NO: 1158514 - RNA, 19 nt, Homo sapiens
  misc_RNA (1)...(19): siRNA sense strand
gauccugccuugacguaug

SEQ ID NO: 1158515 - RNA, 19 nt, Homo sapiens
  misc_RNA (1)...(19): siRNA sense strand
ucagugggcugucauccaa

SEQ ID NO: 1158516 - RNA, 19 nt, Homo sapiens
  misc_RNA (1)...(19): siRNA sense strand
uaacgacccuucagcuagu

SEQ ID NO: 1158517 - RNA, 19 nt, Homo sapiens
  misc_RNA (1)...(19): siRNA sense strand
guacacagagugacacaug

SEQ ID NO: 1158518 - RNA, 19 nt, Homo sapiens
  misc_RNA (1)...(19): siRNA sense strand
guccagagccgccagguuu

SEQ ID NO: 1158519 - RNA, 19 nt, Homo sapiens
  misc_RNA (1)...(19): siRNA sense strand
gagcccugcugcuggauga

SEQ ID NO: 1158520 - RNA, 19 nt, Homo sapiens
  misc_RNA (1)...(19): siRNA sense strand
caaagcugcuaaagaugug

SEQ ID NO: 1158521 - RNA, 19 nt, Homo sapiens
  misc_RNA (1)...(19): siRNA sense strand
ccaaagcugcuaaagaugu

SEQ ID NO: 1158522 - RNA, 19 nt, Homo sapiens
  misc_RNA (1)...(19): siRNA sense strand
auccaaagcugcuaaagau

SEQ ID NO: 1158523 - RNA, 19 nt, Homo sapiens
  misc_RNA (1)...(19): siRNA sense strand
gggcaaagacaaucgacuu

SEQ ID NO: 1158524 - RNA, 19 nt, Homo sapiens
  misc_RNA (1)...(19): siRNA sense strand
gacagaaccagucaucaau

SEQ ID NO: 1158525 - RNA, 19 nt, Homo sapiens
  misc_RNA (1)...(19): siRNA sense strand
cagaaccagucaucaaugg

SEQ ID NO: 1158526 - RNA, 19 nt, Homo sapiens
  misc_RNA (1)...(19): siRNA sense strand
ccaagaggcugggcaucga

SEQ ID NO: 1158527 - RNA, 19 nt, Homo sapiens
  misc_RNA (1)...(19): siRNA sense strand
gaguguguguggugugguu

SEQ ID NO: 1158528 - RNA, 19 nt, Homo sapiens
  misc_RNA (1)...(19): siRNA sense strand
guucuacaguaugaaauug

SEQ ID NO: 1158529 - RNA, 19 nt, Homo sapiens
  misc_RNA (1)...(19): siRNA sense strand
agacagaaccagucaucaa

SEQ ID NO: 1158530 - RNA, 19 nt, Homo sapiens
  misc_RNA (1)...(19): siRNA sense strand
acaaucgacuucuggaaca

SEQ ID NO: 1158531 - RNA, 19 nt, Homo sapiens
  misc_RNA (1)...(19): siRNA sense strand
cuagugagcacacacaguu

SEQ ID NO: 1158532 - RNA, 19 nt, Homo sapiens
  misc_RNA (1)...(19): siRNA sense strand
caagacagaaccagucauc

SEQ ID NO: 1158533 - RNA, 19 nt, Homo sapiens
  misc_RNA (1)...(19): siRNA sense strand
gcaaagcagaaacuuccaa

SEQ ID NO: 1158534 - RNA, 19 nt, Homo sapiens
  misc_RNA (1)...(19): siRNA sense strand
guacuacuccuuggcaaug

SEQ ID NO: 1158535 - RNA, 19 nt, Homo sapiens
  misc_RNA (1)...(19): siRNA sense strand
gcacccggcacgaaaccua

SEQ ID NO: 1158536 - RNA, 19 nt, Homo sapiens
  misc_RNA (1)...(19): siRNA sense strand
cauccaaagcugcuaaaga

SEQ ID NO: 1158537 - RNA, 19 nt, Homo sapiens
  misc_RNA (1)...(19): siRNA sense strand
aaauauggccugcaauagu

SEQ ID NO: 1158538 - RNA, 19 nt, Homo sapiens
  misc_RNA (1)...(19): siRNA sense strand
uugcuaccaugaucuacua

SEQ ID NO: 1158539 - RNA, 19 nt, Homo sapiens
  misc_RNA (1)...(19): siRNA sense strand
aauuaaauauggccugcaa

SEQ ID NO: 1158540 - RNA, 19 nt, Homo sapiens
  misc_RNA (1)...(19): siRNA sense strand
aagcagaaacuuccaagga

SEQ ID NO: 1158541 - RNA, 19 nt, Homo sapiens
  misc_RNA (1)...(19): siRNA sense strand
ccgccagguuuauugcuuu

SEQ ID NO: 1158542 - RNA, 19 nt, Homo sapiens
  misc_RNA (1)...(19): siRNA sense strand
gaacaacgagagggugauc

SEQ ID NO: 1158543 - RNA, 19 nt, Homo sapiens
  misc_RNA (1)...(19): siRNA sense strand
uggaaacacaugaagcuuu

SEQ ID NO: 1158544 - RNA, 19 nt, Homo sapiens
  misc_RNA (1)...(19): siRNA sense strand
gccagugccugucauuguc

SEQ ID NO: 1158545 - RNA, 19 nt, Homo sapiens
  misc_RNA (1)...(19): siRNA sense strand
caugugggcccucuucgaa

SEQ ID NO: 1158546 - RNA, 19 nt, Homo sapiens
  misc_RNA (1)...(19): siRNA sense strand
cauccugguuucaauuaca

SEQ ID NO: 1158547 - RNA, 19 nt, Homo sapiens
  misc_RNA (1)...(19): siRNA sense strand
guauguagaaggagugugu

SEQ ID NO: 1158548 - RNA, 19 nt, Homo sapiens
  misc_RNA (1)...(19): siRNA sense strand
guguuguucuacaguauga

SEQ ID NO: 1158549 - RNA, 19 nt, Homo sapiens
  misc_RNA (1)...(19): siRNA sense strand
aggaggagcuggccuucug

SEQ ID NO: 1158550 - RNA, 19 nt, Homo sapiens
  misc_RNA (1)...(19): siRNA sense strand
aggaggcgcuggacaucuu

SEQ ID NO: 1158551 - RNA, 19 nt, Homo sapiens
  misc_RNA (1)...(19): siRNA sense strand
gcaaagacaaucgacuucu

SEQ ID NO: 1158552 - RNA, 19 nt, Homo sapiens
  misc_RNA (1)...(19): siRNA sense strand
uaaauauggccugcaauag

SEQ ID NO: 1158553 - RNA, 19 nt, Homo sapiens
  misc_RNA (1)...(19): siRNA sense strand
gagugggagcucaaccuaa

SEQ ID NO: 1158554 - RNA, 19 nt, Homo sapiens
  misc_RNA (1)...(19): siRNA sense strand
ccuaacgacccuucagcua

SEQ ID NO: 1158555 - RNA, 19 nt, Homo sapiens
  misc_RNA (1)...(19): siRNA sense strand
agucaucaauggcacaagu

SEQ ID NO: 1158556 - RNA, 19 nt, Homo sapiens
  misc_RNA (1)...(19): siRNA sense strand
ggcaauggcaaagcagaaa

SEQ ID NO: 1158557 - RNA, 19 nt, Homo sapiens
  misc_RNA (1)...(19): siRNA sense strand
gcuggagugcugacaauag

SEQ ID NO: 1158558 - RNA, 19 nt, Homo sapiens
  misc_RNA (1)...(19): siRNA sense strand
aaacggauccugccuugac

SEQ ID NO: 1158559 - RNA, 19 nt, Homo sapiens
  misc_RNA (1)...(19): siRNA sense strand
gaaacggauccugccuuga

SEQ ID NO: 1158560 - RNA, 19 nt, Homo sapiens
  misc_RNA (1)...(19): siRNA sense strand
gcaagaucgagaacaacga

SEQ ID NO: 1158561 - RNA, 19 nt, Homo sapiens
  misc_RNA (1)...(19): siRNA sense strand
cuaccaugaucuacuaugc

SEQ ID NO: 1158562 - RNA, 19 nt, Homo sapiens
  misc_RNA (1)...(19): siRNA sense strand
uguguggugugguuuacuu

SEQ ID NO: 1158563 - RNA, 19 nt, Homo sapiens
  misc_RNA (1)...(19): siRNA sense strand
uggcuggagugcugacaau

SEQ ID NO: 1158564 - RNA, 19 nt, Homo sapiens
  misc_RNA (1)...(19): siRNA sense strand
ggcaaagacaaucgacuuc

SEQ ID NO: 1158565 - RNA, 19 nt, Homo sapiens
  misc_RNA (1)...(19): siRNA sense strand
gccgccagguuuauugcuu

SEQ ID NO: 1158566 - RNA, 19 nt, Homo sapiens
  misc_RNA (1)...(19): siRNA sense strand
ccucagggugguaagguuu

SEQ ID NO: 1158567 - RNA, 19 nt, Homo sapiens
  misc_RNA (1)...(19): siRNA sense strand
ugagggugcuuggacauac

SEQ ID NO: 1158568 - RNA, 19 nt, Homo sapiens
  misc_RNA (1)...(19): siRNA sense strand
cucaagacccugccuggaa

SEQ ID NO: 1158569 - RNA, 19 nt, Homo sapiens
  misc_RNA (1)...(19): siRNA sense strand
cgagcuaguacuaaugaau

SEQ ID NO: 1158570 - RNA, 19 nt, Homo sapiens
  misc_RNA (1)...(19): siRNA sense strand
gcuuggacauacucuucga

SEQ ID NO: 1158571 - RNA, 19 nt, Homo sapiens
  misc_RNA (1)...(19): siRNA sense strand
gugcuuggacauacucuuc

SEQ ID NO: 1158572 - RNA, 19 nt, Homo sapiens
  misc_RNA (1)...(19): siRNA sense strand
gcaugugggcccucuucga

SEQ ID NO: 1158573 - RNA, 19 nt, Homo sapiens
  misc_RNA (1)...(19): siRNA sense strand
gagggugcuuggacauacu

SEQ ID NO: 1158574 - RNA, 19 nt, Homo sapiens
  misc_RNA (1)...(19): siRNA sense strand
cuugacguauguagaagga

SEQ ID NO: 1158575 - RNA, 19 nt, Homo sapiens
  misc_RNA (1)...(19): siRNA sense strand
guuguucuacaguaugaaa

SEQ ID NO: 1158576 - RNA, 19 nt, Homo sapiens
  misc_RNA (1)...(19): siRNA sense strand
cccaauaaacuugaauuca

SEQ ID NO: 1158577 - RNA, 19 nt, Homo sapiens
  misc_RNA (1)...(19): siRNA sense strand
cgacuucuggaacauaaca

SEQ ID NO: 1158578 - RNA, 19 nt, Homo sapiens
  misc_RNA (1)...(19): siRNA sense strand
gagcacacacaguucaaaa

SEQ ID NO: 1158579 - RNA, 19 nt, Homo sapiens
  misc_RNA (1)...(19): siRNA sense strand
agugggagcucaaccuaac

SEQ ID NO: 1158580 - RNA, 19 nt, Homo sapiens
  misc_RNA (1)...(19): siRNA sense strand
cgagagagugggagcucaa

SEQ ID NO: 1158581 - RNA, 19 nt, Homo sapiens
  misc_RNA (1)...(19): siRNA sense strand
acucuucgagcuaguacua

SEQ ID NO: 1158582 - RNA, 19 nt, Homo sapiens
  misc_RNA (1)...(19): siRNA sense strand
cauccuaccuuucuacuua

SEQ ID NO: 1158583 - RNA, 19 nt, Homo sapiens
  misc_RNA (1)...(19): siRNA sense strand
aauauggccugcaauagua

SEQ ID NO: 1158584 - RNA, 19 nt, Homo sapiens
  misc_RNA (1)...(19): siRNA sense strand
gugaggauccugagaauuu

SEQ ID NO: 1158585 - RNA, 19 nt, Homo sapiens
  misc_RNA (1)...(19): siRNA sense strand
ggacauacucuucgagcua

SEQ ID NO: 1158586 - RNA, 19 nt, Homo sapiens
  misc_RNA (1)...(19): siRNA sense strand
ucgccuaugugcucaauua

SEQ ID NO: 1158587 - RNA, 19 nt, Homo sapiens
  misc_RNA (1)...(19): siRNA sense strand
ccuaugugcucaauuacua

SEQ ID NO: 1158588 - RNA, 19 nt, Homo sapiens
  misc_RNA (1)...(19): siRNA sense strand
gaucuacuaugccgagaga

SEQ ID NO: 1158589 - RNA, 19 nt, Homo sapiens
  misc_RNA (1)...(19): siRNA sense strand
gaauaucauugacuuugug

SEQ ID NO: 1158590 - RNA, 19 nt, Homo sapiens
  misc_RNA (1)...(19): siRNA sense strand
caaguguuguucuacagua

SEQ ID NO: 1158591 - RNA, 19 nt, Homo sapiens
  misc_RNA (1)...(19): siRNA sense strand
gaacacgccuggcccuucu

SEQ ID NO: 1158592 - RNA, 19 nt, Homo sapiens
  misc_RNA (1)...(19): siRNA sense strand
gauauuugcuaccaugauc

SEQ ID NO: 1158593 - RNA, 19 nt, Homo sapiens
  misc_RNA (1)...(19): siRNA sense strand
gagcuaguacuaaugaauu

SEQ ID NO: 1158594 - RNA, 19 nt, Homo sapiens
  misc_RNA (1)...(19): siRNA sense strand
uuaaauauggccugcaaua

SEQ ID NO: 1158595 - RNA, 19 nt, Homo sapiens
  misc_RNA (1)...(19): siRNA sense strand
acacaugucugggcaaaga

SEQ ID NO: 1158596 - RNA, 19 nt, Homo sapiens
  misc_RNA (1)...(19): siRNA sense strand
caggcaagcucaccuacuu

SEQ ID NO: 1158597 - RNA, 19 nt, Homo sapiens
  misc_RNA (1)...(19): siRNA sense strand
gcaauaguacacagaguga

SEQ ID NO: 1158598 - RNA, 19 nt, Homo sapiens
  misc_RNA (1)...(19): siRNA sense strand
caaagacaaucgacuucug

SEQ ID NO: 1158599 - RNA, 19 nt, Homo sapiens
  misc_RNA (1)...(19): siRNA sense strand
gauccugccuugacguaug

SEQ ID NO: 1158600 - RNA, 19 nt, Homo sapiens
  misc_RNA (1)...(19): siRNA sense strand
ucagugggcugucauccaa

SEQ ID NO: 1158601 - RNA, 19 nt, Homo sapiens
  misc_RNA (1)...(19): siRNA sense strand
uaacgacccuucagcuagu

SEQ ID NO: 1158602 - RNA, 19 nt, Homo sapiens
  misc_RNA (1)...(19): siRNA sense strand
guacacagagugacacaug

SEQ ID NO: 1158603 - RNA, 19 nt, Homo sapiens
  misc_RNA (1)...(19): siRNA sense strand
guccagagccgccagguuu

SEQ ID NO: 1158604 - RNA, 19 nt, Homo sapiens
  misc_RNA (1)...(19): siRNA sense strand
gagcccugcugcuggauga

SEQ ID NO: 1158605 - RNA, 19 nt, Homo sapiens
  misc_RNA (1)...(19): siRNA sense strand
caaagcugcuaaagaugug

SEQ ID NO: 1158606 - RNA, 19 nt, Homo sapiens
  misc_RNA (1)...(19): siRNA sense strand
ccaaagcugcuaaagaugu

SEQ ID NO: 1158607 - RNA, 19 nt, Homo sapiens
  misc_RNA (1)...(19): siRNA sense strand
auccaaagcugcuaaagau

SEQ ID NO: 1158608 - RNA, 19 nt, Homo sapiens
  misc_RNA (1)...(19): siRNA sense strand
gggcaaagacaaucgacuu

SEQ ID NO: 1158609 - RNA, 19 nt, Homo sapiens
  misc_RNA (1)...(19): siRNA sense strand
gacagaaccagucaucaau

SEQ ID NO: 1158610 - RNA, 19 nt, Homo sapiens
  misc_RNA (1)...(19): siRNA sense strand
cagaaccagucaucaaugg

SEQ ID NO: 1158611 - RNA, 19 nt, Homo sapiens
  misc_RNA (1)...(19): siRNA sense strand
ccaagaggcugggcaucga

SEQ ID NO: 1158612 - RNA, 19 nt, Homo sapiens
  misc_RNA (1)...(19): siRNA sense strand
gaguguguguggugugguu

SEQ ID NO: 1158613 - RNA, 19 nt, Homo sapiens
  misc_RNA (1)...(19): siRNA sense strand
guucuacaguaugaaauug

SEQ ID NO: 1158614 - RNA, 19 nt, Homo sapiens
  misc_RNA (1)...(19): siRNA sense strand
agacagaaccagucaucaa

SEQ ID NO: 1158615 - RNA, 19 nt, Homo sapiens
  misc_RNA (1)...(19): siRNA sense strand
acaaucgacuucuggaaca

SEQ ID NO: 1158616 - RNA, 19 nt, Homo sapiens
  misc_RNA (1)...(19): siRNA sense strand
cuagugagcacacacaguu

SEQ ID NO: 1158617 - RNA, 19 nt, Homo sapiens
  misc_RNA (1)...(19): siRNA sense strand
caagacagaaccagucauc

SEQ ID NO: 1158618 - RNA, 19 nt, Homo sapiens
  misc_RNA (1)...(19): siRNA sense strand
gcaaagcagaaacuuccaa

SEQ ID NO: 1158619 - RNA, 19 nt, Homo sapiens
  misc_RNA (1)...(19): siRNA sense strand
guacuacuccuuggcaaug

SEQ ID NO: 1158620 - RNA, 19 nt, Homo sapiens
  misc_RNA (1)...(19): siRNA sense strand
gcacccggcacgaaaccua

SEQ ID NO: 1158621 - RNA, 19 nt, Homo sapiens
  misc_RNA (1)...(19): siRNA sense strand
cauccaaagcugcuaaaga

SEQ ID NO: 1158622 - RNA, 19 nt, Homo sapiens
  misc_RNA (1)...(19): siRNA sense strand
aaauauggccugcaauagu

SEQ ID NO: 1158623 - RNA, 19 nt, Homo sapiens
  misc_RNA (1)...(19): siRNA sense strand
uugcuaccaugaucuacua

SEQ ID NO: 1158624 - RNA, 19 nt, Homo sapiens
  misc_RNA (1)...(19): siRNA sense strand
aauuaaauauggccugcaa

SEQ ID NO: 1158625 - RNA, 19 nt, Homo sapiens
  misc_RNA (1)...(19): siRNA sense strand
aagcagaaacuuccaagga

SEQ ID NO: 1158626 - RNA, 19 nt, Homo sapiens
  misc_RNA (1)...(19): siRNA sense strand
ccgccagguuuauugcuuu

SEQ ID NO: 1158627 - RNA, 19 nt, Homo sapiens
  misc_RNA (1)...(19): siRNA sense strand
gaacaacgagagggugauc

SEQ ID NO: 1158628 - RNA, 19 nt, Homo sapiens
  misc_RNA (1)...(19): siRNA sense strand
uggaaacacaugaagcuuu

SEQ ID NO: 1158629 - RNA, 19 nt, Homo sapiens
  misc_RNA (1)...(19): siRNA sense strand
gccagugccugucauuguc

SEQ ID NO: 1158630 - RNA, 19 nt, Homo sapiens
  misc_RNA (1)...(19): siRNA sense strand
caugugggcccucuucgaa

SEQ ID NO: 1158631 - RNA, 19 nt, Homo sapiens
  misc_RNA (1)...(19): siRNA sense strand
cauccugguuucaauuaca

SEQ ID NO: 1158632 - RNA, 19 nt, Homo sapiens
  misc_RNA (1)...(19): siRNA sense strand
guauguagaaggagugugu

SEQ ID NO: 1158633 - RNA, 19 nt, Homo sapiens
  misc_RNA (1)...(19): siRNA sense strand
guguuguucuacaguauga

SEQ ID NO: 1158634 - RNA, 19 nt, Homo sapiens
  misc_RNA (1)...(19): siRNA sense strand
aggaggagcuggccuucug

SEQ ID NO: 1158635 - RNA, 19 nt, Homo sapiens
  misc_RNA (1)...(19): siRNA sense strand
aggaggcgcuggacaucuu

SEQ ID NO: 1158636 - RNA, 19 nt, Homo sapiens
  misc_RNA (1)...(19): siRNA sense strand
gcaaagacaaucgacuucu

SEQ ID NO: 1158637 - RNA, 19 nt, Homo sapiens
  misc_RNA (1)...(19): siRNA sense strand
uaaauauggccugcaauag

SEQ ID NO: 1158638 - RNA, 19 nt, Homo sapiens
  misc_RNA (1)...(19): siRNA sense strand
gagugggagcucaaccuaa

SEQ ID NO: 1158639 - RNA, 19 nt, Homo sapiens
  misc_RNA (1)...(19): siRNA sense strand
ccuaacgacccuucagcua

SEQ ID NO: 1158640 - RNA, 19 nt, Homo sapiens
  misc_RNA (1)...(19): siRNA sense strand
agucaucaauggcacaagu

SEQ ID NO: 1158641 - RNA, 19 nt, Homo sapiens
  misc_RNA (1)...(19): siRNA sense strand
ggcaauggcaaagcagaaa

SEQ ID NO: 1158642 - RNA, 19 nt, Homo sapiens
  misc_RNA (1)...(19): siRNA sense strand
gcuggagugcugacaauag

SEQ ID NO: 1158643 - RNA, 19 nt, Homo sapiens
  misc_RNA (1)...(19): siRNA sense strand
aaacggauccugccuugac

SEQ ID NO: 1158644 - RNA, 19 nt, Homo sapiens
  misc_RNA (1)...(19): siRNA sense strand
gaaacggauccugccuuga

SEQ ID NO: 1158645 - RNA, 19 nt, Homo sapiens
  misc_RNA (1)...(19): siRNA sense strand
gcaagaucgagaacaacga

SEQ ID NO: 1158646 - RNA, 19 nt, Homo sapiens
  misc_RNA (1)...(19): siRNA sense strand
cuaccaugaucuacuaugc

SEQ ID NO: 1158647 - RNA, 19 nt, Homo sapiens
  misc_RNA (1)...(19): siRNA sense strand
uguguggugugguuuacuu

SEQ ID NO: 1158648 - RNA, 19 nt, Homo sapiens
  misc_RNA (1)...(19): siRNA sense strand
uggcuggagugcugacaau

SEQ ID NO: 1158649 - RNA, 19 nt, Homo sapiens
  misc_RNA (1)...(19): siRNA sense strand
ggcaaagacaaucgacuuc

SEQ ID NO: 1158650 - RNA, 19 nt, Homo sapiens
  misc_RNA (1)...(19): siRNA sense strand
gccgccagguuuauugcuu

SEQ ID NO: 1158651 - RNA, 19 nt, Homo sapiens
  misc_RNA (1)...(19): siRNA sense strand
ccucagggugguaagguuu

SEQ ID NO: 1158652 - RNA, 19 nt, Homo sapiens
  misc_RNA (1)...(19): siRNA sense strand
ugagggugcuuggacauac

SEQ ID NO: 1158653 - RNA, 19 nt, Homo sapiens
  misc_RNA (1)...(19): siRNA sense strand
cucaagacccugccuggaa

SEQ ID NO: 1158654 - RNA, 19 nt, Homo sapiens
  misc_RNA (1)...(19): siRNA sense strand
cgagcuaguacuaaugaau

SEQ ID NO: 1158655 - RNA, 19 nt, Homo sapiens
  misc_RNA (1)...(19): siRNA sense strand
gcuuggacauacucuucga

SEQ ID NO: 1158656 - RNA, 19 nt, Homo sapiens
  misc_RNA (1)...(19): siRNA sense strand
gugcuuggacauacucuuc

SEQ ID NO: 1158657 - RNA, 19 nt, Homo sapiens
  misc_RNA (1)...(19): siRNA sense strand
gcaugugggcccucuucga

SEQ ID NO: 1158658 - RNA, 19 nt, Homo sapiens
  misc_RNA (1)...(19): siRNA sense strand
gagggugcuuggacauacu

SEQ ID NO: 1158659 - RNA, 19 nt, Homo sapiens
  misc_RNA (1)...(19): siRNA sense strand
cuugacguauguagaagga

SEQ ID NO: 1158660 - RNA, 19 nt, Homo sapiens
  misc_RNA (1)...(19): siRNA sense strand
guuguucuacaguaugaaa

SEQ ID NO: 1158661 - RNA, 19 nt, Homo sapiens
  misc_RNA (1)...(19): siRNA sense strand
cccaauaaacuugaauuca

SEQ ID NO: 1158662 - RNA, 19 nt, Homo sapiens
  misc_RNA (1)...(19): siRNA sense strand
cgacuucuggaacauaaca

SEQ ID NO: 1158663 - RNA, 19 nt, Homo sapiens
  misc_RNA (1)...(19): siRNA sense strand
gagcacacacaguucaaaa

SEQ ID NO: 1158664 - RNA, 19 nt, Homo sapiens
  misc_RNA (1)...(19): siRNA sense strand
agugggagcucaaccuaac

SEQ ID NO: 1158665 - RNA, 19 nt, Homo sapiens
  misc_RNA (1)...(19): siRNA sense strand
cgagagagugggagcucaa

SEQ ID NO: 1158666 - RNA, 19 nt, Homo sapiens
  misc_RNA (1)...(19): siRNA sense strand
acucuucgagcuaguacua

SEQ ID NO: 1158667 - RNA, 19 nt, Homo sapiens
  misc_RNA (1)...(19): siRNA sense strand
gcaaggagcaugugcagaa

SEQ ID NO: 1158668 - RNA, 19 nt, Homo sapiens
  misc_RNA (1)...(19): siRNA sense strand
gcaccgacuucuucauuga

SEQ ID NO: 1158669 - RNA, 19 nt, Homo sapiens
  misc_RNA (1)...(19): siRNA sense strand
ggauccaguucaccaaaua

SEQ ID NO: 1158670 - RNA, 19 nt, Homo sapiens
  misc_RNA (1)...(19): siRNA sense strand
gaaggcggaugacaagugu

SEQ ID NO: 1158671 - RNA, 19 nt, Homo sapiens
  misc_RNA (1)...(19): siRNA sense strand
gggaauggcugugcagaug

SEQ ID NO: 1158672 - RNA, 19 nt, Homo sapiens
  misc_RNA (1)...(19): siRNA sense strand
cagcaacugugacggauug

SEQ ID NO: 1158673 - RNA, 19 nt, Homo sapiens
  misc_RNA (1)...(19): siRNA sense strand
gcagacauauggccaggau

SEQ ID NO: 1158674 - RNA, 19 nt, Homo sapiens
  misc_RNA (1)...(19): siRNA sense strand
gcugugcccucaaccauga

SEQ ID NO: 1158675 - RNA, 19 nt, Homo sapiens
  misc_RNA (1)...(19): siRNA sense strand
gaauaucguagaugagauu

SEQ ID NO: 1158676 - RNA, 19 nt, Homo sapiens
  misc_RNA (1)...(19): siRNA sense strand
gaugagcagugccgcuuug

SEQ ID NO: 1158677 - RNA, 19 nt, Homo sapiens
  misc_RNA (1)...(19): siRNA sense strand
gcagcagccuggccuacaa

SEQ ID NO: 1158678 - RNA, 19 nt, Homo sapiens
  misc_RNA (1)...(19): siRNA sense strand
gcagugccgcuuugacuuu

SEQ ID NO: 1158679 - RNA, 19 nt, Homo sapiens
  misc_RNA (1)...(19): siRNA sense strand
ggagaagaccugagacauc

SEQ ID NO: 1158680 - RNA, 19 nt, Homo sapiens
  misc_RNA (1)...(19): siRNA sense strand
ccaggcacauccagauuga

SEQ ID NO: 1158681 - RNA, 19 nt, Homo sapiens
  misc_RNA (1)...(19): siRNA sense strand
gggaucaacuacucaaugg

SEQ ID NO: 1158682 - RNA, 19 nt, Homo sapiens
  misc_RNA (1)...(19): siRNA sense strand
uggaggagauggacaccua

SEQ ID NO: 1158683 - RNA, 19 nt, Homo sapiens
  misc_RNA (1)...(19): siRNA sense strand
gcacagacagcaccgacuu

SEQ ID NO: 1158684 - RNA, 19 nt, Homo sapiens
  misc_RNA (1)...(19): siRNA sense strand
gguggaggaugccaaggaa

SEQ ID NO: 1158685 - RNA, 19 nt, Homo sapiens
  misc_RNA (1)...(19): siRNA sense strand
gcagcuaccgggacccaua

SEQ ID NO: 1158686 - RNA, 19 nt, Homo sapiens
  misc_RNA (1)...(19): siRNA sense strand
gagcugcaccucucuggaa

SEQ ID NO: 1158687 - RNA, 19 nt, Homo sapiens
  misc_RNA (1)...(19): siRNA sense strand
ggacacgccacccacacua

SEQ ID NO: 1158688 - RNA, 19 nt, Homo sapiens
  misc_RNA (1)...(19): siRNA sense strand
gaucgcuacugcuccauuc

SEQ ID NO: 1158689 - RNA, 19 nt, Homo sapiens
  misc_RNA (1)...(19): siRNA sense strand
cuggaaagcucagugacua

SEQ ID NO: 1158690 - RNA, 19 nt, Homo sapiens
  misc_RNA (1)...(19): siRNA sense strand
uguccuaccugcugccuuu

SEQ ID NO: 1158691 - RNA, 19 nt, Homo sapiens
  misc_RNA (1)...(19): siRNA sense strand
gaucaacuacucaauggau

SEQ ID NO: 1158692 - RNA, 19 nt, Homo sapiens
  misc_RNA (1)...(19): siRNA sense strand
cuacuucaaugucacuguu

SEQ ID NO: 1158693 - RNA, 19 nt, Homo sapiens
  misc_RNA (1)...(19): siRNA sense strand
caggagcucuggauacaag

SEQ ID NO: 1158694 - RNA, 19 nt, Homo sapiens
  misc_RNA (1)...(19): siRNA sense strand
cuacaucccauuaacaaga

SEQ ID NO: 1158695 - RNA, 19 nt, Homo sapiens
  misc_RNA (1)...(19): siRNA sense strand
uaucguagaugagauuuac

SEQ ID NO: 1158696 - RNA, 19 nt, Homo sapiens
  misc_RNA (1)...(19): siRNA sense strand
guccucacccucaugaaua

SEQ ID NO: 1158697 - RNA, 19 nt, Homo sapiens
  misc_RNA (1)...(19): siRNA sense strand
cugcagagccuccuggaaa

SEQ ID NO: 1158698 - RNA, 19 nt, Homo sapiens
  misc_RNA (1)...(19): siRNA sense strand
gccgaugucugggaacuug

SEQ ID NO: 1158699 - RNA, 19 nt, Homo sapiens
  misc_RNA (1)...(19): siRNA sense strand
ccaacagccucgggcauug

SEQ ID NO: 1158700 - RNA, 19 nt, Homo sapiens
  misc_RNA (1)...(19): siRNA sense strand
ccuacgagccugacgauga

SEQ ID NO: 1158701 - RNA, 19 nt, Homo sapiens
  misc_RNA (1)...(19): siRNA sense strand
ggaaagcucagugacuaug

SEQ ID NO: 1158702 - RNA, 19 nt, Homo sapiens
  misc_RNA (1)...(19): siRNA sense strand
gaauggcugugcagaugag

SEQ ID NO: 1158703 - RNA, 19 nt, Homo sapiens
  misc_RNA (1)...(19): siRNA sense strand
agacagcaccgacuucuuc

SEQ ID NO: 1158704 - RNA, 19 nt, Homo sapiens
  misc_RNA (1)...(19): siRNA sense strand
gaggaaaucaccagaacuc

SEQ ID NO: 1158705 - RNA, 19 nt, Homo sapiens
  misc_RNA (1)...(19): siRNA sense strand
ggaauggcugugcagauga

SEQ ID NO: 1158706 - RNA, 19 nt, Homo sapiens
  misc_RNA (1)...(19): siRNA sense strand
cagcaccgacuucuucauu

SEQ ID NO: 1158707 - RNA, 19 nt, Homo sapiens
  misc_RNA (1)...(19): siRNA sense strand
gggauccaguucaccaaau

SEQ ID NO: 1158708 - RNA, 19 nt, Homo sapiens
  misc_RNA (1)...(19): siRNA sense strand
ccucaugaauaucguagau

SEQ ID NO: 1158709 - RNA, 19 nt, Homo sapiens
  misc_RNA (1)...(19): siRNA sense strand
gggacgugguguucaugaa

SEQ ID NO: 1158710 - RNA, 19 nt, Homo sapiens
  misc_RNA (1)...(19): siRNA sense strand
aggagcaugugcagaacua

SEQ ID NO: 1158711 - RNA, 19 nt, Homo sapiens
  misc_RNA (1)...(19): siRNA sense strand
caccggcucugcugugugu

SEQ ID NO: 1158712 - RNA, 19 nt, Homo sapiens
  misc_RNA (1)...(19): siRNA sense strand
gggauaggccagacacugu

SEQ ID NO: 1158713 - RNA, 19 nt, Homo sapiens
  misc_RNA (1)...(19): siRNA sense strand
gaugacaaguguggagucu

SEQ ID NO: 1158714 - RNA, 19 nt, Homo sapiens
  misc_RNA (1)...(19): siRNA sense strand
ggcaaguggugcuucaaag

SEQ ID NO: 1158715 - RNA, 19 nt, Homo sapiens
  misc_RNA (1)...(19): siRNA sense strand
gccacucccucuacuucaa

SEQ ID NO: 1158716 - RNA, 19 nt, Homo sapiens
  misc_RNA (1)...(19): siRNA sense strand
caaagggcaaccuggagaa

SEQ ID NO: 1158717 - RNA, 19 nt, Homo sapiens
  misc_RNA (1)...(19): siRNA sense strand
ggagcauccuggagcaucu

SEQ ID NO: 1158718 - RNA, 19 nt, Homo sapiens
  misc_RNA (1)...(19): siRNA sense strand
gaaagccaacgggaucaga

SEQ ID NO: 1158719 - RNA, 19 nt, Homo sapiens
  misc_RNA (1)...(19): siRNA sense strand
gagauggacaccuaugagu

SEQ ID NO: 1158720 - RNA, 19 nt, Homo sapiens
  misc_RNA (1)...(19): siRNA sense strand
uggaguggcaggaggauuu

SEQ ID NO: 1158721 - RNA, 19 nt, Homo sapiens
  misc_RNA (1)...(19): siRNA sense strand
gaggagggauccaguucac

SEQ ID NO: 1158722 - RNA, 19 nt, Homo sapiens
  misc_RNA (1)...(19): siRNA sense strand
gagcagugccgcuuugacu

SEQ ID NO: 1158723 - RNA, 19 nt, Homo sapiens
  misc_RNA (1)...(19): siRNA sense strand
gagcaugugcagaacuaug

SEQ ID NO: 1158724 - RNA, 19 nt, Homo sapiens
  misc_RNA (1)...(19): siRNA sense strand
cuccucagccuucgugaua

SEQ ID NO: 1158725 - RNA, 19 nt, Homo sapiens
  misc_RNA (1)...(19): siRNA sense strand
gcagccuggccuacaagua

SEQ ID NO: 1158726 - RNA, 19 nt, Homo sapiens
  misc_RNA (1)...(19): siRNA sense strand
ccagaagugugagcugauc

SEQ ID NO: 1158727 - RNA, 19 nt, Homo sapiens
  misc_RNA (1)...(19): siRNA sense strand
gcaaguggugcuucaaagg

SEQ ID NO: 1158728 - RNA, 19 nt, Homo sapiens
  misc_RNA (1)...(19): siRNA sense strand
ggagauggacaccuaugag

SEQ ID NO: 1158729 - RNA, 19 nt, Homo sapiens
  misc_RNA (1)...(19): siRNA sense strand
ggaggagggauccaguuca

SEQ ID NO: 1158730 - RNA, 19 nt, Homo sapiens
  misc_RNA (1)...(19): siRNA sense strand
cagacgagaccaccacaug

SEQ ID NO: 1158731 - RNA, 19 nt, Homo sapiens
  misc_RNA (1)...(19): siRNA sense strand
uagggcccauguucgagua

SEQ ID NO: 1158732 - RNA, 19 nt, Homo sapiens
  misc_RNA (1)...(19): siRNA sense strand
gccaacagccucgggcauu

SEQ ID NO: 1158733 - RNA, 19 nt, Homo sapiens
  misc_RNA (1)...(19): siRNA sense strand
ccaugaaggcggaugacaa

SEQ ID NO: 1158734 - RNA, 19 nt, Homo sapiens
  misc_RNA (1)...(19): siRNA sense strand
ugagcaccaugaccacguu

SEQ ID NO: 1158735 - RNA, 19 nt, Homo sapiens
  misc_RNA (1)...(19): siRNA sense strand
gugcuuagggcccauguuc

SEQ ID NO: 1158736 - RNA, 19 nt, Homo sapiens
  misc_RNA (1)...(19): siRNA sense strand
acgacugccuccucgauga

SEQ ID NO: 1158737 - RNA, 19 nt, Homo sapiens
  misc_RNA (1)...(19): siRNA sense strand
ccugcacaaugaagccuuu

SEQ ID NO: 1158738 - RNA, 19 nt, Homo sapiens
  misc_RNA (1)...(19): siRNA sense strand
ggacccagcaucccuuugc

SEQ ID NO: 1158739 - RNA, 19 nt, Homo sapiens
  misc_RNA (1)...(19): siRNA sense strand
gaaagcucagugacuaugg

SEQ ID NO: 1158740 - RNA, 19 nt, Homo sapiens
  misc_RNA (1)...(19): siRNA sense strand
gccacaagccggaccuuca

SEQ ID NO: 1158741 - RNA, 19 nt, Homo sapiens
  misc_RNA (1)...(19): siRNA sense strand
gccaggcacauccagauug

SEQ ID NO: 1158742 - RNA, 19 nt, Homo sapiens
  misc_RNA (1)...(19): siRNA sense strand
ugaaggcggaugacaagug

SEQ ID NO: 1158743 - RNA, 19 nt, Homo sapiens
  misc_RNA (1)...(19): siRNA sense strand
caaguggugcuucaaaggu

SEQ ID NO: 1158744 - RNA, 19 nt, Homo sapiens
  misc_RNA (1)...(19): siRNA sense strand
gugcagccauccugacaac

SEQ ID NO: 1158745 - RNA, 19 nt, Homo sapiens
  misc_RNA (1)...(19): siRNA sense strand
ggaugagcagugccgcuuu

SEQ ID NO: 1158746 - RNA, 19 nt, Homo sapiens
  misc_RNA (1)...(19): siRNA sense strand
gagcugugcccucaaccau

SEQ ID NO: 1158747 - RNA, 19 nt, Homo sapiens
  misc_RNA (1)...(19): siRNA sense strand
gcgccacucccucuacuuc

SEQ ID NO: 1158748 - RNA, 19 nt, Homo sapiens
  misc_RNA (1)...(19): siRNA sense strand
caugaaggcggaugacaag

SEQ ID NO: 1158749 - RNA, 19 nt, Homo sapiens
  misc_RNA (1)...(19): siRNA sense strand
cuacgagccugacgaugac

SEQ ID NO: 1158750 - RNA, 19 nt, Homo sapiens
  misc_RNA (1)...(19): siRNA sense strand
gcaccaugaccacguugug

SEQ ID NO: 1158751 - RNA, 19 nt, Homo sapiens
  misc_RNA (1)...(19): siRNA sense strand
ugaauaucguagaugagau

SEQ ID NO: 1158752 - RNA, 19 nt, Homo sapiens
  misc_RNA (1)...(19): siRNA sense strand
gacagucccugagccugau

SEQ ID NO: 1158753 - RNA, 19 nt, Homo sapiens
  misc_RNA (1)...(19): siRNA sense strand
gcaggcaggagcucucaag

SEQ ID NO: 1158754 - RNA, 19 nt, Homo sapiens
  misc_RNA (1)...(19): siRNA sense strand
gcuuagggcccauguucga

SEQ ID NO: 1158755 - RNA, 19 nt, Homo sapiens
  misc_RNA (1)...(19): siRNA sense strand
ucaacuacucaauggauga

SEQ ID NO: 1158756 - RNA, 19 nt, Homo sapiens
  misc_RNA (1)...(19): siRNA sense strand
gagcuccuggaccaaguuu

SEQ ID NO: 1158757 - RNA, 19 nt, Homo sapiens
  misc_RNA (1)...(19): siRNA sense strand
uacaucccauuaacaagau

SEQ ID NO: 1158758 - RNA, 19 nt, Homo sapiens
  misc_RNA (1)...(19): siRNA sense strand
gaaccccuacaucccauua

SEQ ID NO: 1158759 - RNA, 19 nt, Homo sapiens
  misc_RNA (1)...(19): siRNA sense strand
uggaggaaaucaccagaac

SEQ ID NO: 1158760 - RNA, 19 nt, Homo sapiens
  misc_RNA (1)...(19): siRNA sense strand
ccaauggaacccacaaggu

SEQ ID NO: 1158761 - RNA, 19 nt, Homo sapiens
  misc_RNA (1)...(19): siRNA sense strand
gaggagauggacaccuaug

SEQ ID NO: 1158762 - RNA, 19 nt, Homo sapiens
  misc_RNA (1)...(19): siRNA sense strand
cggcaaguggugcuucaaa

SEQ ID NO: 1158763 - RNA, 19 nt, Homo sapiens
  misc_RNA (1)...(19): siRNA sense strand
uguguguccugcaucaaga

SEQ ID NO: 1158764 - RNA, 19 nt, Homo sapiens
  misc_RNA (1)...(19): siRNA sense strand
caaggagcaugugcagaac

SEQ ID NO: 1158765 - RNA, 19 nt, Homo sapiens
  misc_RNA (1)...(19): siRNA sense strand
ccauuaacaagauaucauc

SEQ ID NO: 1158766 - RNA, 19 nt, Homo sapiens
  misc_RNA (1)...(19): siRNA sense strand
ggaggagauggacaccuau

SEQ ID NO: 1158767 - RNA, 19 nt, Homo sapiens
  misc_RNA (1)...(19): siRNA sense strand
gcaaggagcaugugcagaa

SEQ ID NO: 1158768 - RNA, 19 nt, Homo sapiens
  misc_RNA (1)...(19): siRNA sense strand
gcaccgacuucuucauuga

SEQ ID NO: 1158769 - RNA, 19 nt, Homo sapiens
  misc_RNA (1)...(19): siRNA sense strand
ggauccaguucaccaaaua

SEQ ID NO: 1158770 - RNA, 19 nt, Homo sapiens
  misc_RNA (1)...(19): siRNA sense strand
gaaggcggaugacaagugu

SEQ ID NO: 1158771 - RNA, 19 nt, Homo sapiens
  misc_RNA (1)...(19): siRNA sense strand
gggaauggcugugcagaug

SEQ ID NO: 1158772 - RNA, 19 nt, Homo sapiens
  misc_RNA (1)...(19): siRNA sense strand
cagcaacugugacggauug

SEQ ID NO: 1158773 - RNA, 19 nt, Homo sapiens
  misc_RNA (1)...(19): siRNA sense strand
gcagacauauggccaggau

SEQ ID NO: 1158774 - RNA, 19 nt, Homo sapiens
  misc_RNA (1)...(19): siRNA sense strand
gcugugcccucaaccauga

SEQ ID NO: 1158775 - RNA, 19 nt, Homo sapiens
  misc_RNA (1)...(19): siRNA sense strand
gaauaucguagaugagauu

SEQ ID NO: 1158776 - RNA, 19 nt, Homo sapiens
  misc_RNA (1)...(19): siRNA sense strand
gaugagcagugccgcuuug

SEQ ID NO: 1158777 - RNA, 19 nt, Homo sapiens
  misc_RNA (1)...(19): siRNA sense strand
gcagcagccuggccuacaa

SEQ ID NO: 1158778 - RNA, 19 nt, Homo sapiens
  misc_RNA (1)...(19): siRNA sense strand
gcagugccgcuuugacuuu

SEQ ID NO: 1158779 - RNA, 19 nt, Homo sapiens
  misc_RNA (1)...(19): siRNA sense strand
ggagaagaccugagacauc

SEQ ID NO: 1158780 - RNA, 19 nt, Homo sapiens
  misc_RNA (1)...(19): siRNA sense strand
ccaggcacauccagauuga

SEQ ID NO: 1158781 - RNA, 19 nt, Homo sapiens
  misc_RNA (1)...(19): siRNA sense strand
gggaucaacuacucaaugg

SEQ ID NO: 1158782 - RNA, 19 nt, Homo sapiens
  misc_RNA (1)...(19): siRNA sense strand
uggaggagauggacaccua

SEQ ID NO: 1158783 - RNA, 19 nt, Homo sapiens
  misc_RNA (1)...(19): siRNA sense strand
gcacagacagcaccgacuu

SEQ ID NO: 1158784 - RNA, 19 nt, Homo sapiens
  misc_RNA (1)...(19): siRNA sense strand
gguggaggaugccaaggaa

SEQ ID NO: 1158785 - RNA, 19 nt, Homo sapiens
  misc_RNA (1)...(19): siRNA sense strand
gcagcuaccgggacccaua

SEQ ID NO: 1158786 - RNA, 19 nt, Homo sapiens
  misc_RNA (1)...(19): siRNA sense strand
gagcugcaccucucuggaa

SEQ ID NO: 1158787 - RNA, 19 nt, Homo sapiens
  misc_RNA (1)...(19): siRNA sense strand
ggacacgccacccacacua

SEQ ID NO: 1158788 - RNA, 19 nt, Homo sapiens
  misc_RNA (1)...(19): siRNA sense strand
gaucgcuacugcuccauuc

SEQ ID NO: 1158789 - RNA, 19 nt, Homo sapiens
  misc_RNA (1)...(19): siRNA sense strand
cuggaaagcucagugacua

SEQ ID NO: 1158790 - RNA, 19 nt, Homo sapiens
  misc_RNA (1)...(19): siRNA sense strand
uguccuaccugcugccuuu

SEQ ID NO: 1158791 - RNA, 19 nt, Homo sapiens
  misc_RNA (1)...(19): siRNA sense strand
gaucaacuacucaauggau

SEQ ID NO: 1158792 - RNA, 19 nt, Homo sapiens
  misc_RNA (1)...(19): siRNA sense strand
cuacuucaaugucacuguu

SEQ ID NO: 1158793 - RNA, 19 nt, Homo sapiens
  misc_RNA (1)...(19): siRNA sense strand
caggagcucuggauacaag

SEQ ID NO: 1158794 - RNA, 19 nt, Homo sapiens
  misc_RNA (1)...(19): siRNA sense strand
cuacaucccauuaacaaga

SEQ ID NO: 1158795 - RNA, 19 nt, Homo sapiens
  misc_RNA (1)...(19): siRNA sense strand
uaucguagaugagauuuac

SEQ ID NO: 1158796 - RNA, 19 nt, Homo sapiens
  misc_RNA (1)...(19): siRNA sense strand
guccucacccucaugaaua

SEQ ID NO: 1158797 - RNA, 19 nt, Homo sapiens
  misc_RNA (1)...(19): siRNA sense strand
cugcagagccuccuggaaa

SEQ ID NO: 1158798 - RNA, 19 nt, Homo sapiens
  misc_RNA (1)...(19): siRNA sense strand
gccgaugucugggaacuug

SEQ ID NO: 1158799 - RNA, 19 nt, Homo sapiens
  misc_RNA (1)...(19): siRNA sense strand
ccaacagccucgggcauug

SEQ ID NO: 1158800 - RNA, 19 nt, Homo sapiens
  misc_RNA (1)...(19): siRNA sense strand
ccuacgagccugacgauga

SEQ ID NO: 1158801 - RNA, 19 nt, Homo sapiens
  misc_RNA (1)...(19): siRNA sense strand
ggaaagcucagugacuaug

SEQ ID NO: 1158802 - RNA, 19 nt, Homo sapiens
  misc_RNA (1)...(19): siRNA sense strand
gaauggcugugcagaugag

SEQ ID NO: 1158803 - RNA, 19 nt, Homo sapiens
  misc_RNA (1)...(19): siRNA sense strand
agacagcaccgacuucuuc

SEQ ID NO: 1158804 - RNA, 19 nt, Homo sapiens
  misc_RNA (1)...(19): siRNA sense strand
gaggaaaucaccagaacuc

SEQ ID NO: 1158805 - RNA, 19 nt, Homo sapiens
  misc_RNA (1)...(19): siRNA sense strand
ggaauggcugugcagauga

SEQ ID NO: 1158806 - RNA, 19 nt, Homo sapiens
  misc_RNA (1)...(19): siRNA sense strand
cagcaccgacuucuucauu

SEQ ID NO: 1158807 - RNA, 19 nt, Homo sapiens
  misc_RNA (1)...(19): siRNA sense strand
gggauccaguucaccaaau

SEQ ID NO: 1158808 - RNA, 19 nt, Homo sapiens
  misc_RNA (1)...(19): siRNA sense strand
ccucaugaauaucguagau

SEQ ID NO: 1158809 - RNA, 19 nt, Homo sapiens
  misc_RNA (1)...(19): siRNA sense strand
gggacgugguguucaugaa

SEQ ID NO: 1158810 - RNA, 19 nt, Homo sapiens
  misc_RNA (1)...(19): siRNA sense strand
aggagcaugugcagaacua

SEQ ID NO: 1158811 - RNA, 19 nt, Homo sapiens
  misc_RNA (1)...(19): siRNA sense strand
caccggcucugcugugugu

SEQ ID NO: 1158812 - RNA, 19 nt, Homo sapiens
  misc_RNA (1)...(19): siRNA sense strand
gggauaggccagacacugu

SEQ ID NO: 1158813 - RNA, 19 nt, Homo sapiens
  misc_RNA (1)...(19): siRNA sense strand
gaugacaaguguggagucu

SEQ ID NO: 1158814 - RNA, 19 nt, Homo sapiens
  misc_RNA (1)...(19): siRNA sense strand
ggcaaguggugcuucaaag

SEQ ID NO: 1158815 - RNA, 19 nt, Homo sapiens
  misc_RNA (1)...(19): siRNA sense strand
gccacucccucuacuucaa

SEQ ID NO: 1158816 - RNA, 19 nt, Homo sapiens
  misc_RNA (1)...(19): siRNA sense strand
caaagggcaaccuggagaa

SEQ ID NO: 1158817 - RNA, 19 nt, Homo sapiens
  misc_RNA (1)...(19): siRNA sense strand
ggagcauccuggagcaucu

SEQ ID NO: 1158818 - RNA, 19 nt, Homo sapiens
  misc_RNA (1)...(19): siRNA sense strand
gaaagccaacgggaucaga

SEQ ID NO: 1158819 - RNA, 19 nt, Homo sapiens
  misc_RNA (1)...(19): siRNA sense strand
gagauggacaccuaugagu

SEQ ID NO: 1158820 - RNA, 19 nt, Homo sapiens
  misc_RNA (1)...(19): siRNA sense strand
uggaguggcaggaggauuu

SEQ ID NO: 1158821 - RNA, 19 nt, Homo sapiens
  misc_RNA (1)...(19): siRNA sense strand
gaggagggauccaguucac

SEQ ID NO: 1158822 - RNA, 19 nt, Homo sapiens
  misc_RNA (1)...(19): siRNA sense strand
gagcagugccgcuuugacu

SEQ ID NO: 1158823 - RNA, 19 nt, Homo sapiens
  misc_RNA (1)...(19): siRNA sense strand
gagcaugugcagaacuaug

SEQ ID NO: 1158824 - RNA, 19 nt, Homo sapiens
  misc_RNA (1)...(19): siRNA sense strand
cuccucagccuucgugaua

SEQ ID NO: 1158825 - RNA, 19 nt, Homo sapiens
  misc_RNA (1)...(19): siRNA sense strand
gcagccuggccuacaagua

SEQ ID NO: 1158826 - RNA, 19 nt, Homo sapiens
  misc_RNA (1)...(19): siRNA sense strand
ccagaagugugagcugauc

SEQ ID NO: 1158827 - RNA, 19 nt, Homo sapiens
  misc_RNA (1)...(19): siRNA sense strand
gcaaguggugcuucaaagg

SEQ ID NO: 1158828 - RNA, 19 nt, Homo sapiens
  misc_RNA (1)...(19): siRNA sense strand
ggagauggacaccuaugag

SEQ ID NO: 1158829 - RNA, 19 nt, Homo sapiens
  misc_RNA (1)...(19): siRNA sense strand
ggaggagggauccaguuca

SEQ ID NO: 1158830 - RNA, 19 nt, Homo sapiens
  misc_RNA (1)...(19): siRNA sense strand
cagacgagaccaccacaug

SEQ ID NO: 1158831 - RNA, 19 nt, Homo sapiens
  misc_RNA (1)...(19): siRNA sense strand
uagggcccauguucgagua

SEQ ID NO: 1158832 - RNA, 19 nt, Homo sapiens
  misc_RNA (1)...(19): siRNA sense strand
gccaacagccucgggcauu

SEQ ID NO: 1158833 - RNA, 19 nt, Homo sapiens
  misc_RNA (1)...(19): siRNA sense strand
ccaugaaggcggaugacaa

SEQ ID NO: 1158834 - RNA, 19 nt, Homo sapiens
  misc_RNA (1)...(19): siRNA sense strand
ugagcaccaugaccacguu

SEQ ID NO: 1158835 - RNA, 19 nt, Homo sapiens
  misc_RNA (1)...(19): siRNA sense strand
gugcuuagggcccauguuc

SEQ ID NO: 1158836 - RNA, 19 nt, Homo sapiens
  misc_RNA (1)...(19): siRNA sense strand
acgacugccuccucgauga

SEQ ID NO: 1158837 - RNA, 19 nt, Homo sapiens
  misc_RNA (1)...(19): siRNA sense strand
ccugcacaaugaagccuuu

SEQ ID NO: 1158838 - RNA, 19 nt, Homo sapiens
  misc_RNA (1)...(19): siRNA sense strand
ggacccagcaucccuuugc

SEQ ID NO: 1158839 - RNA, 19 nt, Homo sapiens
  misc_RNA (1)...(19): siRNA sense strand
gaaagcucagugacuaugg

SEQ ID NO: 1158840 - RNA, 19 nt, Homo sapiens
  misc_RNA (1)...(19): siRNA sense strand
gccacaagccggaccuuca

SEQ ID NO: 1158841 - RNA, 19 nt, Homo sapiens
  misc_RNA (1)...(19): siRNA sense strand
gccaggcacauccagauug

SEQ ID NO: 1158842 - RNA, 19 nt, Homo sapiens
  misc_RNA (1)...(19): siRNA sense strand
ugaaggcggaugacaagug

SEQ ID NO: 1158843 - RNA, 19 nt, Homo sapiens
  misc_RNA (1)...(19): siRNA sense strand
caaguggugcuucaaaggu

SEQ ID NO: 1158844 - RNA, 19 nt, Homo sapiens
  misc_RNA (1)...(19): siRNA sense strand
gugcagccauccugacaac

SEQ ID NO: 1158845 - RNA, 19 nt, Homo sapiens
  misc_RNA (1)...(19): siRNA sense strand
ggaugagcagugccgcuuu

SEQ ID NO: 1158846 - RNA, 19 nt, Homo sapiens
  misc_RNA (1)...(19): siRNA sense strand
gagcugugcccucaaccau

SEQ ID NO: 1158847 - RNA, 19 nt, Homo sapiens
  misc_RNA (1)...(19): siRNA sense strand
gcgccacucccucuacuuc

SEQ ID NO: 1158848 - RNA, 19 nt, Homo sapiens
  misc_RNA (1)...(19): siRNA sense strand
caugaaggcggaugacaag

SEQ ID NO: 1158849 - RNA, 19 nt, Homo sapiens
  misc_RNA (1)...(19): siRNA sense strand
cuacgagccugacgaugac

SEQ ID NO: 1158850 - RNA, 19 nt, Homo sapiens
  misc_RNA (1)...(19): siRNA sense strand
gcaccaugaccacguugug

SEQ ID NO: 1158851 - RNA, 19 nt, Homo sapiens
  misc_RNA (1)...(19): siRNA sense strand
ugaauaucguagaugagau

SEQ ID NO: 1158852 - RNA, 19 nt, Homo sapiens
  misc_RNA (1)...(19): siRNA sense strand
gacagucccugagccugau

SEQ ID NO: 1158853 - RNA, 19 nt, Homo sapiens
  misc_RNA (1)...(19): siRNA sense strand
gcaggcaggagcucucaag

SEQ ID NO: 1158854 - RNA, 19 nt, Homo sapiens
  misc_RNA (1)...(19): siRNA sense strand
gcuuagggcccauguucga

SEQ ID NO: 1158855 - RNA, 19 nt, Homo sapiens
  misc_RNA (1)...(19): siRNA sense strand
ucaacuacucaauggauga

SEQ ID NO: 1158856 - RNA, 19 nt, Homo sapiens
  misc_RNA (1)...(19): siRNA sense strand
gagcuccuggaccaaguuu

SEQ ID NO: 1158857 - RNA, 19 nt, Homo sapiens
  misc_RNA (1)...(19): siRNA sense strand
uacaucccauuaacaagau

SEQ ID NO: 1158858 - RNA, 19 nt, Homo sapiens
  misc_RNA (1)...(19): siRNA sense strand
gaaccccuacaucccauua

SEQ ID NO: 1158859 - RNA, 19 nt, Homo sapiens
  misc_RNA (1)...(19): siRNA sense strand
uggaggaaaucaccagaac

SEQ ID NO: 1158860 - RNA, 19 nt, Homo sapiens
  misc_RNA (1)...(19): siRNA sense strand
ccaauggaacccacaaggu

SEQ ID NO: 1158861 - RNA, 19 nt, Homo sapiens
  misc_RNA (1)...(19): siRNA sense strand
gaggagauggacaccuaug

SEQ ID NO: 1158862 - RNA, 19 nt, Homo sapiens
  misc_RNA (1)...(19): siRNA sense strand
cggcaaguggugcuucaaa

SEQ ID NO: 1158863 - RNA, 19 nt, Homo sapiens
  misc_RNA (1)...(19): siRNA sense strand
uguguguccugcaucaaga

SEQ ID NO: 1158864 - RNA, 19 nt, Homo sapiens
  misc_RNA (1)...(19): siRNA sense strand
caaggagcaugugcagaac

SEQ ID NO: 1158865 - RNA, 19 nt, Homo sapiens
  misc_RNA (1)...(19): siRNA sense strand
ccauuaacaagauaucauc

SEQ ID NO: 1158866 - RNA, 19 nt, Homo sapiens
  misc_RNA (1)...(19): siRNA sense strand
ggaggagauggacaccuau

SEQ ID NO: 1158867 - RNA, 19 nt, Homo sapiens
  misc_RNA (1)...(19): siRNA sense strand
gaacaaagacgagcucaug

SEQ ID NO: 1158868 - RNA, 19 nt, Homo sapiens
  misc_RNA (1)...(19): siRNA sense strand
uggaagaacucaugaacaa

SEQ ID NO: 1158869 - RNA, 19 nt, Homo sapiens
  misc_RNA (1)...(19): siRNA sense strand
uggcaaagcugcagaagca

SEQ ID NO: 1158870 - RNA, 19 nt, Homo sapiens
  misc_RNA (1)...(19): siRNA sense strand
gaagaacucaugaacaagu

SEQ ID NO: 1158871 - RNA, 19 nt, Homo sapiens
  misc_RNA (1)...(19): siRNA sense strand
ggucggagcuggaagaacu

SEQ ID NO: 1158872 - RNA, 19 nt, Homo sapiens
  misc_RNA (1)...(19): siRNA sense strand
ggaagaagaagggcaagaa

SEQ ID NO: 1158873 - RNA, 19 nt, Homo sapiens
  misc_RNA (1)...(19): siRNA sense strand
uaucggugcucaaggauga

SEQ ID NO: 1158874 - RNA, 19 nt, Homo sapiens
  misc_RNA (1)...(19): siRNA sense strand
caccagccauggccaagua

SEQ ID NO: 1158875 - RNA, 19 nt, Homo sapiens
  misc_RNA (1)...(19): siRNA sense strand
gagcagaggaagaaguauu

SEQ ID NO: 1158876 - RNA, 19 nt, Homo sapiens
  misc_RNA (1)...(19): siRNA sense strand
gcgaagccaucacgucugu

SEQ ID NO: 1158877 - RNA, 19 nt, Homo sapiens
  misc_RNA (1)...(19): siRNA sense strand
aggaggagcugaagaaagu

SEQ ID NO: 1158878 - RNA, 19 nt, Homo sapiens
  misc_RNA (1)...(19): siRNA sense strand
ccacauucaucauggacaa

SEQ ID NO: 1158879 - RNA, 19 nt, Homo sapiens
  misc_RNA (1)...(19): siRNA sense strand
ccagucagcuccccacaua

SEQ ID NO: 1158880 - RNA, 19 nt, Homo sapiens
  misc_RNA (1)...(19): siRNA sense strand
ucaagauccuguaugacuu

SEQ ID NO: 1158881 - RNA, 19 nt, Homo sapiens
  misc_RNA (1)...(19): siRNA sense strand
gauccuguaugacuucaca

SEQ ID NO: 1158882 - RNA, 19 nt, Homo sapiens
  misc_RNA (1)...(19): siRNA sense strand
aggaggagcuggaagacuu

SEQ ID NO: 1158883 - RNA, 19 nt, Homo sapiens
  misc_RNA (1)...(19): siRNA sense strand
gaagaagaagggcaagaag

SEQ ID NO: 1158884 - RNA, 19 nt, Homo sapiens
  misc_RNA (1)...(19): siRNA sense strand
acaaggaggagcugaagaa

SEQ ID NO: 1158885 - RNA, 19 nt, Homo sapiens
  misc_RNA (1)...(19): siRNA sense strand
cgugcuggcucagaagaua

SEQ ID NO: 1158886 - RNA, 19 nt, Homo sapiens
  misc_RNA (1)...(19): siRNA sense strand
gcaccuggccacauucauc

SEQ ID NO: 1158887 - RNA, 19 nt, Homo sapiens
  misc_RNA (1)...(19): siRNA sense strand
guacgugcccugcaacauc

SEQ ID NO: 1158888 - RNA, 19 nt, Homo sapiens
  misc_RNA (1)...(19): siRNA sense strand
caagccggauguccacuuc

SEQ ID NO: 1158889 - RNA, 19 nt, Homo sapiens
  misc_RNA (1)...(19): siRNA sense strand
gagccgacaguccauaaga

SEQ ID NO: 1158890 - RNA, 19 nt, Homo sapiens
  misc_RNA (1)...(19): siRNA sense strand
cauaagaaacucccagaag

SEQ ID NO: 1158891 - RNA, 19 nt, Homo sapiens
  misc_RNA (1)...(19): siRNA sense strand
gaaaugccaacgagcuauc

SEQ ID NO: 1158892 - RNA, 19 nt, Homo sapiens
  misc_RNA (1)...(19): siRNA sense strand
caacuccaacgucaucaug

SEQ ID NO: 1158893 - RNA, 19 nt, Homo sapiens
  misc_RNA (1)...(19): siRNA sense strand
gaggaggugaguccaguga

SEQ ID NO: 1158894 - RNA, 19 nt, Homo sapiens
  misc_RNA (1)...(19): siRNA sense strand
gacaagagcgaagccauca

SEQ ID NO: 1158895 - RNA, 19 nt, Homo sapiens
  misc_RNA (1)...(19): siRNA sense strand
gagcaggccggucagaagu

SEQ ID NO: 1158896 - RNA, 19 nt, Homo sapiens
  misc_RNA (1)...(19): siRNA sense strand
uaagaaacucccagaagca

SEQ ID NO: 1158897 - RNA, 19 nt, Homo sapiens
  misc_RNA (1)...(19): siRNA sense strand
caucgacugcuuccagaaa

SEQ ID NO: 1158898 - RNA, 19 nt, Homo sapiens
  misc_RNA (1)...(19): siRNA sense strand
ggacgacaucgagugguuu

SEQ ID NO: 1158899 - RNA, 19 nt, Homo sapiens
  misc_RNA (1)...(19): siRNA sense strand
acgucaagauccuguauga

SEQ ID NO: 1158900 - RNA, 19 nt, Homo sapiens
  misc_RNA (1)...(19): siRNA sense strand
ccaaguacgucaagauccu

SEQ ID NO: 1158901 - RNA, 19 nt, Homo sapiens
  misc_RNA (1)...(19): siRNA sense strand
gaagggacaccaggagaag

SEQ ID NO: 1158902 - RNA, 19 nt, Homo sapiens
  misc_RNA (1)...(19): siRNA sense strand
gagcuggaagaacucauga

SEQ ID NO: 1158903 - RNA, 19 nt, Homo sapiens
  misc_RNA (1)...(19): siRNA sense strand
gcucuucucccucaacaag

SEQ ID NO: 1158904 - RNA, 19 nt, Homo sapiens
  misc_RNA (1)...(19): siRNA sense strand
gcacauggacgaggucaac

SEQ ID NO: 1158905 - RNA, 19 nt, Homo sapiens
  misc_RNA (1)...(19): siRNA sense strand
gcgaguucaucgacugcuu

SEQ ID NO: 1158906 - RNA, 19 nt, Homo sapiens
  misc_RNA (1)...(19): siRNA sense strand
ggagcuggaagaacucaug

SEQ ID NO: 1158907 - RNA, 19 nt, Homo sapiens
  misc_RNA (1)...(19): siRNA sense strand
caaggaggagcugaagaaa

SEQ ID NO: 1158908 - RNA, 19 nt, Homo sapiens
  misc_RNA (1)...(19): siRNA sense strand
caagauccuguaugacuuc

SEQ ID NO: 1158909 - RNA, 19 nt, Homo sapiens
  misc_RNA (1)...(19): siRNA sense strand
gccgacaguccauaagaaa

SEQ ID NO: 1158910 - RNA, 19 nt, Homo sapiens
  misc_RNA (1)...(19): siRNA sense strand
ugaagggacaccaggagaa

SEQ ID NO: 1158911 - RNA, 19 nt, Homo sapiens
  misc_RNA (1)...(19): siRNA sense strand
cucagaagauagagaagga

SEQ ID NO: 1158912 - RNA, 19 nt, Homo sapiens
  misc_RNA (1)...(19): siRNA sense strand
ccacucagcgagccagguu

SEQ ID NO: 1158913 - RNA, 19 nt, Homo sapiens
  misc_RNA (1)...(19): siRNA sense strand
gcaagccggauguccacuu

SEQ ID NO: 1158914 - RNA, 19 nt, Homo sapiens
  misc_RNA (1)...(19): siRNA sense strand
gcaggccggucagaaguac

SEQ ID NO: 1158915 - RNA, 19 nt, Homo sapiens
  misc_RNA (1)...(19): siRNA sense strand
guacgucaagauccuguau

SEQ ID NO: 1158916 - RNA, 19 nt, Homo sapiens
  misc_RNA (1)...(19): siRNA sense strand
uagagaaggagacgcaaau

SEQ ID NO: 1158917 - RNA, 19 nt, Homo sapiens
  misc_RNA (1)...(19): siRNA sense strand
ggacaccaggagaagauuc

SEQ ID NO: 1158918 - RNA, 19 nt, Homo sapiens
  misc_RNA (1)...(19): siRNA sense strand
gccagacgguccucaacca

SEQ ID NO: 1158919 - RNA, 19 nt, Homo sapiens
  misc_RNA (1)...(19): siRNA sense strand
gagcucauccggaaaauca

SEQ ID NO: 1158920 - RNA, 19 nt, Homo sapiens
  misc_RNA (1)...(19): siRNA sense strand
ugacuucacagcccgaaau

SEQ ID NO: 1158921 - RNA, 19 nt, Homo sapiens
  misc_RNA (1)...(19): siRNA sense strand
gcucgugcacuuccucuuc

SEQ ID NO: 1158922 - RNA, 19 nt, Homo sapiens
  misc_RNA (1)...(19): siRNA sense strand
uggacgacaucgagugguu

SEQ ID NO: 1158923 - RNA, 19 nt, Homo sapiens
  misc_RNA (1)...(19): siRNA sense strand
caacaaggaggagcugaag

SEQ ID NO: 1158924 - RNA, 19 nt, Homo sapiens
  misc_RNA (1)...(19): siRNA sense strand
ccgaaaugccaacgagcua

SEQ ID NO: 1158925 - RNA, 19 nt, Homo sapiens
  misc_RNA (1)...(19): siRNA sense strand
agaaguauuccaacuccaa

SEQ ID NO: 1158926 - RNA, 19 nt, Homo sapiens
  misc_RNA (1)...(19): siRNA sense strand
cgacaguccauaagaaacu

SEQ ID NO: 1158927 - RNA, 19 nt, Homo sapiens
  misc_RNA (1)...(19): siRNA sense strand
ugcagaagcacauccagaa

SEQ ID NO: 1158928 - RNA, 19 nt, Homo sapiens
  misc_RNA (1)...(19): siRNA sense strand
acagccagcucaccaugca

SEQ ID NO: 1158929 - RNA, 19 nt, Homo sapiens
  misc_RNA (1)...(19): siRNA sense strand
ucaacaaggaggagcugaa

SEQ ID NO: 1158930 - RNA, 19 nt, Homo sapiens
  misc_RNA (1)...(19): siRNA sense strand
cagcucuucucccucaaca

SEQ ID NO: 1158931 - RNA, 19 nt, Homo sapiens
  misc_RNA (1)...(19): siRNA sense strand
ggucaacgacgagcucauc

SEQ ID NO: 1158932 - RNA, 19 nt, Homo sapiens
  misc_RNA (1)...(19): siRNA sense strand
gugagccgacaguccauaa

SEQ ID NO: 1158933 - RNA, 19 nt, Homo sapiens
  misc_RNA (1)...(19): siRNA sense strand
cacaggaggagcuggaaga

SEQ ID NO: 1158934 - RNA, 19 nt, Homo sapiens
  misc_RNA (1)...(19): siRNA sense strand
ggaagaacucaugaacaag

SEQ ID NO: 1158935 - RNA, 19 nt, Homo sapiens
  misc_RNA (1)...(19): siRNA sense strand
ggccaaguacgucaagauc

SEQ ID NO: 1158936 - RNA, 19 nt, Homo sapiens
  misc_RNA (1)...(19): siRNA sense strand
ccauaagaaacucccagaa

SEQ ID NO: 1158937 - RNA, 19 nt, Homo sapiens
  misc_RNA (1)...(19): siRNA sense strand
agccgacaguccauaagaa

SEQ ID NO: 1158938 - RNA, 19 nt, Homo sapiens
  misc_RNA (1)...(19): siRNA sense strand
gagaugccguggacuuccu

SEQ ID NO: 1158939 - RNA, 19 nt, Homo sapiens
  misc_RNA (1)...(19): siRNA sense strand
gcagaagcacauccagaac

SEQ ID NO: 1158940 - RNA, 19 nt, Homo sapiens
  misc_RNA (1)...(19): siRNA sense strand
uugagcagaggaagaagua

SEQ ID NO: 1158941 - RNA, 19 nt, Homo sapiens
  misc_RNA (1)...(19): siRNA sense strand
cgacaucgagugguuugug

SEQ ID NO: 1158942 - RNA, 19 nt, Homo sapiens
  misc_RNA (1)...(19): siRNA sense strand
gacgacaucgagugguuug

SEQ ID NO: 1158943 - RNA, 19 nt, Homo sapiens
  misc_RNA (1)...(19): siRNA sense strand
gcagccagacgguccucaa

SEQ ID NO: 1158944 - RNA, 19 nt, Homo sapiens
  misc_RNA (1)...(19): siRNA sense strand
cgaaaugccaacgagcuau

SEQ ID NO: 1158945 - RNA, 19 nt, Homo sapiens
  misc_RNA (1)...(19): siRNA sense strand
gaggagcugaagaaagugu

SEQ ID NO: 1158946 - RNA, 19 nt, Homo sapiens
  misc_RNA (1)...(19): siRNA sense strand
gggacacgcuggagcauua

SEQ ID NO: 1158947 - RNA, 19 nt, Homo sapiens
  misc_RNA (1)...(19): siRNA sense strand
caccugcccugaccaguuu

SEQ ID NO: 1158948 - RNA, 19 nt, Homo sapiens
  misc_RNA (1)...(19): siRNA sense strand
cggaggugcucauguuuga

SEQ ID NO: 1158949 - RNA, 19 nt, Homo sapiens
  misc_RNA (1)...(19): siRNA sense strand
gaccguaaacccucacgua

SEQ ID NO: 1158950 - RNA, 19 nt, Homo sapiens
  misc_RNA (1)...(19): siRNA sense strand
gaugacucccguuagcuua

SEQ ID NO: 1158951 - RNA, 19 nt, Homo sapiens
  misc_RNA (1)...(19): siRNA sense strand
acacacagccagaccguaa

SEQ ID NO: 1158952 - RNA, 19 nt, Homo sapiens
  misc_RNA (1)...(19): siRNA sense strand
gcaccugcccugaccaguu

SEQ ID NO: 1158953 - RNA, 19 nt, Homo sapiens
  misc_RNA (1)...(19): siRNA sense strand
caacguggccaccuucauc

SEQ ID NO: 1158954 - RNA, 19 nt, Homo sapiens
  misc_RNA (1)...(19): siRNA sense strand
gcgacaacguggccaccuu

SEQ ID NO: 1158955 - RNA, 19 nt, Homo sapiens
  misc_RNA (1)...(19): siRNA sense strand
gcuccugacucugccuauu

SEQ ID NO: 1158956 - RNA, 19 nt, Homo sapiens
  misc_RNA (1)...(19): siRNA sense strand
ccugagaugacucccguua

SEQ ID NO: 1158957 - RNA, 19 nt, Homo sapiens
  misc_RNA (1)...(19): siRNA sense strand
ggcaugcccugcacucagu

SEQ ID NO: 1158958 - RNA, 19 nt, Homo sapiens
  misc_RNA (1)...(19): siRNA sense strand
cguaaacccucacguaucc

SEQ ID NO: 1158959 - RNA, 19 nt, Homo sapiens
  misc_RNA (1)...(19): siRNA sense strand
gagacgggcagcacucaug

SEQ ID NO: 1158960 - RNA, 19 nt, Homo sapiens
  misc_RNA (1)...(19): siRNA sense strand
cguccuggguggcaaaugu

SEQ ID NO: 1158961 - RNA, 19 nt, Homo sapiens
  misc_RNA (1)...(19): siRNA sense strand
ugccggaggugcucauguu

SEQ ID NO: 1158962 - RNA, 19 nt, Homo sapiens
  misc_RNA (1)...(19): siRNA sense strand
ugagaugacucccguuagc

SEQ ID NO: 1158963 - RNA, 19 nt, Homo sapiens
  misc_RNA (1)...(19): siRNA sense strand
ccaagagcgugcggccauu

SEQ ID NO: 1158964 - RNA, 19 nt, Homo sapiens
  misc_RNA (1)...(19): siRNA sense strand
ccugaccaguuucccauga

SEQ ID NO: 1158965 - RNA, 19 nt, Homo sapiens
  misc_RNA (1)...(19): siRNA sense strand
caagagcgugcggccauuu

SEQ ID NO: 1158966 - RNA, 19 nt, Homo sapiens
  misc_RNA (1)...(19): siRNA sense strand
agcauuaccuggacaagca

SEQ ID NO: 1158967 - RNA, 19 nt, Homo sapiens
  misc_RNA (1)...(19): siRNA sense strand
gcaguuugagcaggagauu

SEQ ID NO: 1158968 - RNA, 19 nt, Homo sapiens
  misc_RNA (1)...(19): siRNA sense strand
ggccauuucgcuccaguga

SEQ ID NO: 1158969 - RNA, 19 nt, Homo sapiens
  misc_RNA (1)...(19): siRNA sense strand
gcugaggagccacgugaug

SEQ ID NO: 1158970 - RNA, 19 nt, Homo sapiens
  misc_RNA (1)...(19): siRNA sense strand
gaccuggugcugcgcaaga

SEQ ID NO: 1158971 - RNA, 19 nt, Homo sapiens
  misc_RNA (1)...(19): siRNA sense strand
ugaccaguuucccaugauc

SEQ ID NO: 1158972 - RNA, 19 nt, Homo sapiens
  misc_RNA (1)...(19): siRNA sense strand
gccgagggucugcaccuuu

SEQ ID NO: 1158973 - RNA, 19 nt, Homo sapiens
  misc_RNA (1)...(19): siRNA sense strand
gggaggacaccacugaaac

SEQ ID NO: 1158974 - RNA, 19 nt, Homo sapiens
  misc_RNA (1)...(19): siRNA sense strand
gccuauuguuccuccaguu

SEQ ID NO: 1158975 - RNA, 19 nt, Homo sapiens
  misc_RNA (1)...(19): siRNA sense strand
gggacacgcuggagcauua

SEQ ID NO: 1158976 - RNA, 19 nt, Homo sapiens
  misc_RNA (1)...(19): siRNA sense strand
caccugcccugaccaguuu

SEQ ID NO: 1158977 - RNA, 19 nt, Homo sapiens
  misc_RNA (1)...(19): siRNA sense strand
cggaggugcucauguuuga

SEQ ID NO: 1158978 - RNA, 19 nt, Homo sapiens
  misc_RNA (1)...(19): siRNA sense strand
gaccguaaacccucacgua

SEQ ID NO: 1158979 - RNA, 19 nt, Homo sapiens
  misc_RNA (1)...(19): siRNA sense strand
gaugacucccguuagcuua

SEQ ID NO: 1158980 - RNA, 19 nt, Homo sapiens
  misc_RNA (1)...(19): siRNA sense strand
acacacagccagaccguaa

SEQ ID NO: 1158981 - RNA, 19 nt, Homo sapiens
  misc_RNA (1)...(19): siRNA sense strand
gcaccugcccugaccaguu

SEQ ID NO: 1158982 - RNA, 19 nt, Homo sapiens
  misc_RNA (1)...(19): siRNA sense strand
caacguggccaccuucauc

SEQ ID NO: 1158983 - RNA, 19 nt, Homo sapiens
  misc_RNA (1)...(19): siRNA sense strand
gcgacaacguggccaccuu

SEQ ID NO: 1158984 - RNA, 19 nt, Homo sapiens
  misc_RNA (1)...(19): siRNA sense strand
gcuccugacucugccuauu

SEQ ID NO: 1158985 - RNA, 19 nt, Homo sapiens
  misc_RNA (1)...(19): siRNA sense strand
ccugagaugacucccguua

SEQ ID NO: 1158986 - RNA, 19 nt, Homo sapiens
  misc_RNA (1)...(19): siRNA sense strand
ggcaugcccugcacucagu

SEQ ID NO: 1158987 - RNA, 19 nt, Homo sapiens
  misc_RNA (1)...(19): siRNA sense strand
cguaaacccucacguaucc

SEQ ID NO: 1158988 - RNA, 19 nt, Homo sapiens
  misc_RNA (1)...(19): siRNA sense strand
gagacgggcagcacucaug

SEQ ID NO: 1158989 - RNA, 19 nt, Homo sapiens
  misc_RNA (1)...(19): siRNA sense strand
cguccuggguggcaaaugu

SEQ ID NO: 1158990 - RNA, 19 nt, Homo sapiens
  misc_RNA (1)...(19): siRNA sense strand
ugccggaggugcucauguu

SEQ ID NO: 1158991 - RNA, 19 nt, Homo sapiens
  misc_RNA (1)...(19): siRNA sense strand
ugagaugacucccguuagc

SEQ ID NO: 1158992 - RNA, 19 nt, Homo sapiens
  misc_RNA (1)...(19): siRNA sense strand
ccaagagcgugcggccauu

SEQ ID NO: 1158993 - RNA, 19 nt, Homo sapiens
  misc_RNA (1)...(19): siRNA sense strand
ccugaccaguuucccauga

SEQ ID NO: 1158994 - RNA, 19 nt, Homo sapiens
  misc_RNA (1)...(19): siRNA sense strand
caagagcgugcggccauuu

SEQ ID NO: 1158995 - RNA, 19 nt, Homo sapiens
  misc_RNA (1)...(19): siRNA sense strand
agcauuaccuggacaagca

SEQ ID NO: 1158996 - RNA, 19 nt, Homo sapiens
  misc_RNA (1)...(19): siRNA sense strand
gcaguuugagcaggagauu

SEQ ID NO: 1158997 - RNA, 19 nt, Homo sapiens
  misc_RNA (1)...(19): siRNA sense strand
ggccauuucgcuccaguga

SEQ ID NO: 1158998 - RNA, 19 nt, Homo sapiens
  misc_RNA (1)...(19): siRNA sense strand
gcugaggagccacgugaug

SEQ ID NO: 1158999 - RNA, 19 nt, Homo sapiens
  misc_RNA (1)...(19): siRNA sense strand
gaccuggugcugcgcaaga

SEQ ID NO: 1159000 - RNA, 19 nt, Homo sapiens
  misc_RNA (1)...(19): siRNA sense strand
ugaccaguuucccaugauc

SEQ ID NO: 1159001 - RNA, 19 nt, Homo sapiens
  misc_RNA (1)...(19): siRNA sense strand
gccgagggucugcaccuuu

SEQ ID NO: 1159002 - RNA, 19 nt, Homo sapiens
  misc_RNA (1)...(19): siRNA sense strand
gggaggacaccacugaaac

SEQ ID NO: 1159003 - RNA, 19 nt, Homo sapiens
  misc_RNA (1)...(19): siRNA sense strand
gccuauuguuccuccaguu

SEQ ID NO: 1159004 - RNA, 19 nt, Homo sapiens
  misc_RNA (1)...(19): siRNA sense strand
gggacacgcuggagcauua

SEQ ID NO: 1159005 - RNA, 19 nt, Homo sapiens
  misc_RNA (1)...(19): siRNA sense strand
caccugcccugaccaguuu

SEQ ID NO: 1159006 - RNA, 19 nt, Homo sapiens
  misc_RNA (1)...(19): siRNA sense strand
cggaggugcucauguuuga

SEQ ID NO: 1159007 - RNA, 19 nt, Homo sapiens
  misc_RNA (1)...(19): siRNA sense strand
gaugacucccguuagcuua

SEQ ID NO: 1159008 - RNA, 19 nt, Homo sapiens
  misc_RNA (1)...(19): siRNA sense strand
gcaccugcccugaccaguu

SEQ ID NO: 1159009 - RNA, 19 nt, Homo sapiens
  misc_RNA (1)...(19): siRNA sense strand
caacguggccaccuucauc

SEQ ID NO: 1159010 - RNA, 19 nt, Homo sapiens
  misc_RNA (1)...(19): siRNA sense strand
gcgacaacguggccaccuu

SEQ ID NO: 1159011 - RNA, 19 nt, Homo sapiens
  misc_RNA (1)...(19): siRNA sense strand
ccugagaugacucccguua

SEQ ID NO: 1159012 - RNA, 19 nt, Homo sapiens
  misc_RNA (1)...(19): siRNA sense strand
ugccggaggugcucauguu

SEQ ID NO: 1159013 - RNA, 19 nt, Homo sapiens
  misc_RNA (1)...(19): siRNA sense strand
ugagaugacucccguuagc

SEQ ID NO: 1159014 - RNA, 19 nt, Homo sapiens
  misc_RNA (1)...(19): siRNA sense strand
ccaagagcgugcggccauu

SEQ ID NO: 1159015 - RNA, 19 nt, Homo sapiens
  misc_RNA (1)...(19): siRNA sense strand
ccugaccaguuucccauga

SEQ ID NO: 1159016 - RNA, 19 nt, Homo sapiens
  misc_RNA (1)...(19): siRNA sense strand
caagagcgugcggccauuu

SEQ ID NO: 1159017 - RNA, 19 nt, Homo sapiens
  misc_RNA (1)...(19): siRNA sense strand
agcauuaccuggacaagca

SEQ ID NO: 1159018 - RNA, 19 nt, Homo sapiens
  misc_RNA (1)...(19): siRNA sense strand
gcaguuugagcaggagauu

SEQ ID NO: 1159019 - RNA, 19 nt, Homo sapiens
  misc_RNA (1)...(19): siRNA sense strand
gcugaggagccacgugaug

SEQ ID NO: 1159020 - RNA, 19 nt, Homo sapiens
  misc_RNA (1)...(19): siRNA sense strand
ggccauuucgcuccaguga

SEQ ID NO: 1159021 - RNA, 19 nt, Homo sapiens
  misc_RNA (1)...(19): siRNA sense strand
gaccuggugcugcgcaaga

SEQ ID NO: 1159022 - RNA, 19 nt, Homo sapiens
  misc_RNA (1)...(19): siRNA sense strand
ugaccaguuucccaugauc

SEQ ID NO: 1159023 - RNA, 19 nt, Homo sapiens
  misc_RNA (1)...(19): siRNA sense strand
gccgagggucugcaccuuu

SEQ ID NO: 1159024 - RNA, 19 nt, Homo sapiens
  misc_RNA (1)...(19): siRNA sense strand
gggaggacaccacugaaac

SEQ ID NO: 1159025 - RNA, 19 nt, Homo sapiens
  misc_RNA (1)...(19): siRNA sense strand
cgaaacagcuauauaaaga

SEQ ID NO: 1159026 - RNA, 19 nt, Homo sapiens
  misc_RNA (1)...(19): siRNA sense strand
gcacaaggacaauauuuaa

SEQ ID NO: 1159027 - RNA, 19 nt, Homo sapiens
  misc_RNA (1)...(19): siRNA sense strand
caagacaucuaccauccua

SEQ ID NO: 1159028 - RNA, 19 nt, Homo sapiens
  misc_RNA (1)...(19): siRNA sense strand
ugacagagauacacuuguu

SEQ ID NO: 1159029 - RNA, 19 nt, Homo sapiens
  misc_RNA (1)...(19): siRNA sense strand
gugcgaaacagcuauauaa

SEQ ID NO: 1159030 - RNA, 19 nt, Homo sapiens
  misc_RNA (1)...(19): siRNA sense strand
gauucugccucaucuguaa

SEQ ID NO: 1159031 - RNA, 19 nt, Homo sapiens
  misc_RNA (1)...(19): siRNA sense strand
ggaccgauccugagcuuug

SEQ ID NO: 1159032 - RNA, 19 nt, Homo sapiens
  misc_RNA (1)...(19): siRNA sense strand
gagaagaguaauugagaaa

SEQ ID NO: 1159033 - RNA, 19 nt, Homo sapiens
  misc_RNA (1)...(19): siRNA sense strand
ggacaauauuuaagaaagg

SEQ ID NO: 1159034 - RNA, 19 nt, Homo sapiens
  misc_RNA (1)...(19): siRNA sense strand
ccacagacccugaaugauc

SEQ ID NO: 1159035 - RNA, 19 nt, Homo sapiens
  misc_RNA (1)...(19): siRNA sense strand
ggaaugaaagcacuaguca

SEQ ID NO: 1159036 - RNA, 19 nt, Homo sapiens
  misc_RNA (1)...(19): siRNA sense strand
cagaaugccuugagaagag

SEQ ID NO: 1159037 - RNA, 19 nt, Homo sapiens
  misc_RNA (1)...(19): siRNA sense strand
ugaguaccauucagaaguu

SEQ ID NO: 1159038 - RNA, 19 nt, Homo sapiens
  misc_RNA (1)...(19): siRNA sense strand
gaagaagagaaaguugaua

SEQ ID NO: 1159039 - RNA, 19 nt, Homo sapiens
  misc_RNA (1)...(19): siRNA sense strand
ugauauaagugaagaugga

SEQ ID NO: 1159040 - RNA, 19 nt, Homo sapiens
  misc_RNA (1)...(19): siRNA sense strand
gcauagaguugacuuucca

SEQ ID NO: 1159041 - RNA, 19 nt, Homo sapiens
  misc_RNA (1)...(19): siRNA sense strand
caugauauccugacagaga

SEQ ID NO: 1159042 - RNA, 19 nt, Homo sapiens
  misc_RNA (1)...(19): siRNA sense strand
gcguagggcucugaacauu

SEQ ID NO: 1159043 - RNA, 19 nt, Homo sapiens
  misc_RNA (1)...(19): siRNA sense strand
gacauugaguacaggcuuu

SEQ ID NO: 1159044 - RNA, 19 nt, Homo sapiens
  misc_RNA (1)...(19): siRNA sense strand
aagugaagauggaaugaaa

SEQ ID NO: 1159045 - RNA, 19 nt, Homo sapiens
  misc_RNA (1)...(19): siRNA sense strand
ccucauugcugcauuucaa

SEQ ID NO: 1159046 - RNA, 19 nt, Homo sapiens
  misc_RNA (1)...(19): siRNA sense strand
ggccacagacccugaauga

SEQ ID NO: 1159047 - RNA, 19 nt, Homo sapiens
  misc_RNA (1)...(19): siRNA sense strand
gguuggcacugcaugauau

SEQ ID NO: 1159048 - RNA, 19 nt, Homo sapiens
  misc_RNA (1)...(19): siRNA sense strand
ugaaagcacuagucacucu

SEQ ID NO: 1159049 - RNA, 19 nt, Homo sapiens
  misc_RNA (1)...(19): siRNA sense strand
ugagaagaguaauugagaa

SEQ ID NO: 1159050 - RNA, 19 nt, Homo sapiens
  misc_RNA (1)...(19): siRNA sense strand
ggaagaagagaaaguugau

SEQ ID NO: 1159051 - RNA, 19 nt, Homo sapiens
  misc_RNA (1)...(19): siRNA sense strand
guagggcucugaacauuuu

SEQ ID NO: 1159052 - RNA, 19 nt, Homo sapiens
  misc_RNA (1)...(19): siRNA sense strand
gaacaugucguggaagaag

SEQ ID NO: 1159053 - RNA, 19 nt, Homo sapiens
  misc_RNA (1)...(19): siRNA sense strand
gaguugacuuuccaucuuc

SEQ ID NO: 1159054 - RNA, 19 nt, Homo sapiens
  misc_RNA (1)...(19): siRNA sense strand
cauccuagccugugcgaaa

SEQ ID NO: 1159055 - RNA, 19 nt, Homo sapiens
  misc_RNA (1)...(19): siRNA sense strand
gcgaaacagcuauauaaag

SEQ ID NO: 1159056 - RNA, 19 nt, Homo sapiens
  misc_RNA (1)...(19): siRNA sense strand
agaguugacuuuccaucuu

SEQ ID NO: 1159057 - RNA, 19 nt, Homo sapiens
  misc_RNA (1)...(19): siRNA sense strand
gagcaccaauauggccuuu

SEQ ID NO: 1159058 - RNA, 19 nt, Homo sapiens
  misc_RNA (1)...(19): siRNA sense strand
caccacagccuacagaaau

SEQ ID NO: 1159059 - RNA, 19 nt, Homo sapiens
  misc_RNA (1)...(19): siRNA sense strand
uggaacaugucguggaaga

SEQ ID NO: 1159060 - RNA, 19 nt, Homo sapiens
  misc_RNA (1)...(19): siRNA sense strand
cagaaauauuacagaguug

SEQ ID NO: 1159061 - RNA, 19 nt, Homo sapiens
  misc_RNA (1)...(19): siRNA sense strand
ggacaggcaagacaucuac

SEQ ID NO: 1159062 - RNA, 19 nt, Homo sapiens
  misc_RNA (1)...(19): siRNA sense strand
uggacuggauguugaauca

SEQ ID NO: 1159063 - RNA, 19 nt, Homo sapiens
  misc_RNA (1)...(19): siRNA sense strand
ccuggaacaugucguggaa

SEQ ID NO: 1159064 - RNA, 19 nt, Homo sapiens
  misc_RNA (1)...(19): siRNA sense strand
uagcacaaggacaauauuu

SEQ ID NO: 1159065 - RNA, 19 nt, Homo sapiens
  misc_RNA (1)...(19): siRNA sense strand
gcuagcacaaggacaauau

SEQ ID NO: 1159066 - RNA, 19 nt, Homo sapiens
  misc_RNA (1)...(19): siRNA sense strand
cuagugaucuuggaugaag

SEQ ID NO: 1159067 - RNA, 19 nt, Homo sapiens
  misc_RNA (1)...(19): siRNA sense strand
gaguaccauucagaaguuu

SEQ ID NO: 1159068 - RNA, 19 nt, Homo sapiens
  misc_RNA (1)...(19): siRNA sense strand
gacuuuccaucuucaguuc

SEQ ID NO: 1159069 - RNA, 19 nt, Homo sapiens
  misc_RNA (1)...(19): siRNA sense strand
cacagacccugaaugaucu

SEQ ID NO: 1159070 - RNA, 19 nt, Homo sapiens
  misc_RNA (1)...(19): siRNA sense strand
ugcaugauauccugacaga

SEQ ID NO: 1159071 - RNA, 19 nt, Homo sapiens
  misc_RNA (1)...(19): siRNA sense strand
agucagacauugccaacau

SEQ ID NO: 1159072 - RNA, 19 nt, Homo sapiens
  misc_RNA (1)...(19): siRNA sense strand
ggcacccgcucaagucaga

SEQ ID NO: 1159073 - RNA, 19 nt, Homo sapiens
  misc_RNA (1)...(19): siRNA sense strand
gaagaccgacugccacacu

SEQ ID NO: 1159074 - RNA, 19 nt, Homo sapiens
  misc_RNA (1)...(19): siRNA sense strand
gacagagauacacuuguuu

SEQ ID NO: 1159075 - RNA, 19 nt, Homo sapiens
  misc_RNA (1)...(19): siRNA sense strand
ccagaaugccuugagaaga

SEQ ID NO: 1159076 - RNA, 19 nt, Homo sapiens
  misc_RNA (1)...(19): siRNA sense strand
cauuucaagucaccagaga

SEQ ID NO: 1159077 - RNA, 19 nt, Homo sapiens
  misc_RNA (1)...(19): siRNA sense strand
uggcagacauugaguacag

SEQ ID NO: 1159078 - RNA, 19 nt, Homo sapiens
  misc_RNA (1)...(19): siRNA sense strand
accacagccuacagaaaua

SEQ ID NO: 1159079 - RNA, 19 nt, Homo sapiens
  misc_RNA (1)...(19): siRNA sense strand
gcacuagucacucuuucca

SEQ ID NO: 1159080 - RNA, 19 nt, Homo sapiens
  misc_RNA (1)...(19): siRNA sense strand
gagaaaguugauauaagug

SEQ ID NO: 1159081 - RNA, 19 nt, Homo sapiens
  misc_RNA (1)...(19): siRNA sense strand
guaccauucagaaguuuau

SEQ ID NO: 1159082 - RNA, 19 nt, Homo sapiens
  misc_RNA (1)...(19): siRNA sense strand
gaaagcacuagucacucuu

SEQ ID NO: 1159083 - RNA, 19 nt, Homo sapiens
  misc_RNA (1)...(19): siRNA sense strand
ucagaugaccgaggaauag

SEQ ID NO: 1159084 - RNA, 19 nt, Homo sapiens
  misc_RNA (1)...(19): siRNA sense strand
acagagauacacuuguuug

SEQ ID NO: 1159085 - RNA, 19 nt, Homo sapiens
  misc_RNA (1)...(19): siRNA sense strand
ggguuggcacugcaugaua

SEQ ID NO: 1159086 - RNA, 19 nt, Homo sapiens
  misc_RNA (1)...(19): siRNA sense strand
gauauaagugaagauggaa

SEQ ID NO: 1159087 - RNA, 19 nt, Homo sapiens
  misc_RNA (1)...(19): siRNA sense strand
caucuucaguucgaauaca

SEQ ID NO: 1159088 - RNA, 19 nt, Homo sapiens
  misc_RNA (1)...(19): siRNA sense strand
caccagagaccugauuguu

SEQ ID NO: 1159089 - RNA, 19 nt, Homo sapiens
  misc_RNA (1)...(19): siRNA sense strand
agcacaaggacaauauuua

SEQ ID NO: 1159090 - RNA, 19 nt, Homo sapiens
  misc_RNA (1)...(19): siRNA sense strand
ggagaccucagcacucaag

SEQ ID NO: 1159091 - RNA, 19 nt, Homo sapiens
  misc_RNA (1)...(19): siRNA sense strand
ccgcucaagucagacauug

SEQ ID NO: 1159092 - RNA, 19 nt, Homo sapiens
  misc_RNA (1)...(19): siRNA sense strand
uggaagaagagaaaguuga

SEQ ID NO: 1159093 - RNA, 19 nt, Homo sapiens
  misc_RNA (1)...(19): siRNA sense strand
aagcagacgccaugacuca

SEQ ID NO: 1159094 - RNA, 19 nt, Homo sapiens
  misc_RNA (1)...(19): siRNA sense strand
uugcagagcaccaauaugg

SEQ ID NO: 1159095 - RNA, 19 nt, Homo sapiens
  misc_RNA (1)...(19): siRNA sense strand
ucaccacagccuacagaaa

SEQ ID NO: 1159096 - RNA, 19 nt, Homo sapiens
  misc_RNA (1)...(19): siRNA sense strand
uaagugaagauggaaugaa

SEQ ID NO: 1159097 - RNA, 19 nt, Homo sapiens
  misc_RNA (1)...(19): siRNA sense strand
ugacuuuccaucuucaguu

SEQ ID NO: 1159098 - RNA, 19 nt, Homo sapiens
  misc_RNA (1)...(19): siRNA sense strand
acacuuguuugugcauaga

SEQ ID NO: 1159099 - RNA, 19 nt, Homo sapiens
  misc_RNA (1)...(19): siRNA sense strand
gacauucugaguaccauuc

SEQ ID NO: 1159100 - RNA, 19 nt, Homo sapiens
  misc_RNA (1)...(19): siRNA sense strand
ugacucaggacgcccagaa

SEQ ID NO: 1159101 - RNA, 19 nt, Homo sapiens
  misc_RNA (1)...(19): siRNA sense strand
acagccuacagaaauauua

SEQ ID NO: 1159102 - RNA, 19 nt, Homo sapiens
  misc_RNA (1)...(19): siRNA sense strand
ccacagccuacagaaauau

SEQ ID NO: 1159103 - RNA, 19 nt, Homo sapiens
  misc_RNA (1)...(19): siRNA sense strand
gggacaggcaagacaucua

SEQ ID NO: 1159104 - RNA, 19 nt, Homo sapiens
  misc_RNA (1)...(19): siRNA sense strand
gaugaccgaggaauagaca

SEQ ID NO: 1159105 - RNA, 19 nt, Homo sapiens
  misc_RNA (1)...(19): siRNA sense strand
uauaagugaagauggaaug

SEQ ID NO: 1159106 - RNA, 19 nt, Homo sapiens
  misc_RNA (1)...(19): siRNA sense strand
ccucaucuguaacuaucug

SEQ ID NO: 1159107 - RNA, 19 nt, Homo sapiens
  misc_RNA (1)...(19): siRNA sense strand
ucacagaaaauaccagauu

SEQ ID NO: 1159108 - RNA, 19 nt, Homo sapiens
  misc_RNA (1)...(19): siRNA sense strand
gugcauagaguugacuuuc

SEQ ID NO: 1159109 - RNA, 19 nt, Homo sapiens
  misc_RNA (1)...(19): siRNA sense strand
auacacuuguuugugcaua

SEQ ID NO: 1159110 - RNA, 19 nt, Homo sapiens
  misc_RNA (1)...(19): siRNA sense strand
ggacauucugaguaccauu

SEQ ID NO: 1159111 - RNA, 19 nt, Homo sapiens
  misc_RNA (1)...(19): siRNA sense strand
gaaacagcuauauaaagac

SEQ ID NO: 1159112 - RNA, 19 nt, Homo sapiens
  misc_RNA (1)...(19): siRNA sense strand
ccugacuccugaacucaug

SEQ ID NO: 1159113 - RNA, 19 nt, Homo sapiens
  misc_RNA (1)...(19): siRNA sense strand
gcccagaaugccuugagaa

SEQ ID NO: 1159114 - RNA, 19 nt, Homo sapiens
  misc_RNA (1)...(19): siRNA sense strand
cguagggcucugaacauuu

SEQ ID NO: 1159115 - RNA, 19 nt, Homo sapiens
  misc_RNA (1)...(19): siRNA sense strand
ggaacaugucguggaagaa

SEQ ID NO: 1159116 - RNA, 19 nt, Homo sapiens
  misc_RNA (1)...(19): siRNA sense strand
uugagaagaguaauugaga

SEQ ID NO: 1159117 - RNA, 19 nt, Homo sapiens
  misc_RNA (1)...(19): siRNA sense strand
cgaccaagaucaggaaccu

SEQ ID NO: 1159118 - RNA, 19 nt, Homo sapiens
  misc_RNA (1)...(19): siRNA sense strand
aaugaaagcacuagucacu

SEQ ID NO: 1159119 - RNA, 19 nt, Homo sapiens
  misc_RNA (1)...(19): siRNA sense strand
ugucguggaagaagagaaa

SEQ ID NO: 1159120 - RNA, 19 nt, Homo sapiens
  misc_RNA (1)...(19): siRNA sense strand
ugccucaucuguaacuauc

SEQ ID NO: 1159121 - RNA, 19 nt, Homo sapiens
  misc_RNA (1)...(19): siRNA sense strand
ccauucagaaguuuaucaa

SEQ ID NO: 1159122 - RNA, 19 nt, Homo sapiens
  misc_RNA (1)...(19): siRNA sense strand
caucuguaacuaucuguca

SEQ ID NO: 1159123 - RNA, 19 nt, Homo sapiens
  misc_RNA (1)...(19): siRNA sense strand
ccgaggaauagacaucauu

SEQ ID NO: 1159124 - RNA, 19 nt, Homo sapiens
  misc_RNA (1)...(19): siRNA sense strand
gcacaaggacaauauuuaa

SEQ ID NO: 1159125 - RNA, 19 nt, Homo sapiens
  misc_RNA (1)...(19): siRNA sense strand
ugacagagauacacuuguu

SEQ ID NO: 1159126 - RNA, 19 nt, Homo sapiens
  misc_RNA (1)...(19): siRNA sense strand
gauucugccucaucuguaa

SEQ ID NO: 1159127 - RNA, 19 nt, Homo sapiens
  misc_RNA (1)...(19): siRNA sense strand
ggaccgauccugagcuuug

SEQ ID NO: 1159128 - RNA, 19 nt, Homo sapiens
  misc_RNA (1)...(19): siRNA sense strand
gagaagaguaauugagaaa

SEQ ID NO: 1159129 - RNA, 19 nt, Homo sapiens
  misc_RNA (1)...(19): siRNA sense strand
ggacaauauuuaagaaagg

SEQ ID NO: 1159130 - RNA, 19 nt, Homo sapiens
  misc_RNA (1)...(19): siRNA sense strand
ggaaugaaagcacuaguca

SEQ ID NO: 1159131 - RNA, 19 nt, Homo sapiens
  misc_RNA (1)...(19): siRNA sense strand
cagaaugccuugagaagag

SEQ ID NO: 1159132 - RNA, 19 nt, Homo sapiens
  misc_RNA (1)...(19): siRNA sense strand
gaagaagagaaaguugaua

SEQ ID NO: 1159133 - RNA, 19 nt, Homo sapiens
  misc_RNA (1)...(19): siRNA sense strand
ugauauaagugaagaugga

SEQ ID NO: 1159134 - RNA, 19 nt, Homo sapiens
  misc_RNA (1)...(19): siRNA sense strand
gcauagaguugacuuucca

SEQ ID NO: 1159135 - RNA, 19 nt, Homo sapiens
  misc_RNA (1)...(19): siRNA sense strand
caugauauccugacagaga

SEQ ID NO: 1159136 - RNA, 19 nt, Homo sapiens
  misc_RNA (1)...(19): siRNA sense strand
gcguagggcucugaacauu

SEQ ID NO: 1159137 - RNA, 19 nt, Homo sapiens
  misc_RNA (1)...(19): siRNA sense strand
gacauugaguacaggcuuu

SEQ ID NO: 1159138 - RNA, 19 nt, Homo sapiens
  misc_RNA (1)...(19): siRNA sense strand
aagugaagauggaaugaaa

SEQ ID NO: 1159139 - RNA, 19 nt, Homo sapiens
  misc_RNA (1)...(19): siRNA sense strand
ccucauugcugcauuucaa

SEQ ID NO: 1159140 - RNA, 19 nt, Homo sapiens
  misc_RNA (1)...(19): siRNA sense strand
ugagaagaguaauugagaa

SEQ ID NO: 1159141 - RNA, 19 nt, Homo sapiens
  misc_RNA (1)...(19): siRNA sense strand
gguuggcacugcaugauau

SEQ ID NO: 1159142 - RNA, 19 nt, Homo sapiens
  misc_RNA (1)...(19): siRNA sense strand
ugaaagcacuagucacucu

SEQ ID NO: 1159143 - RNA, 19 nt, Homo sapiens
  misc_RNA (1)...(19): siRNA sense strand
ggaagaagagaaaguugau

SEQ ID NO: 1159144 - RNA, 19 nt, Homo sapiens
  misc_RNA (1)...(19): siRNA sense strand
guagggcucugaacauuuu

SEQ ID NO: 1159145 - RNA, 19 nt, Homo sapiens
  misc_RNA (1)...(19): siRNA sense strand
gaacaugucguggaagaag

SEQ ID NO: 1159146 - RNA, 19 nt, Homo sapiens
  misc_RNA (1)...(19): siRNA sense strand
gaguugacuuuccaucuuc

SEQ ID NO: 1159147 - RNA, 19 nt, Homo sapiens
  misc_RNA (1)...(19): siRNA sense strand
agaguugacuuuccaucuu

SEQ ID NO: 1159148 - RNA, 19 nt, Homo sapiens
  misc_RNA (1)...(19): siRNA sense strand
gagcaccaauauggccuuu

SEQ ID NO: 1159149 - RNA, 19 nt, Homo sapiens
  misc_RNA (1)...(19): siRNA sense strand
caccacagccuacagaaau

SEQ ID NO: 1159150 - RNA, 19 nt, Homo sapiens
  misc_RNA (1)...(19): siRNA sense strand
uggaacaugucguggaaga

SEQ ID NO: 1159151 - RNA, 19 nt, Homo sapiens
  misc_RNA (1)...(19): siRNA sense strand
cagaaauauuacagaguug

SEQ ID NO: 1159152 - RNA, 19 nt, Homo sapiens
  misc_RNA (1)...(19): siRNA sense strand
ccuggaacaugucguggaa

SEQ ID NO: 1159153 - RNA, 19 nt, Homo sapiens
  misc_RNA (1)...(19): siRNA sense strand
uagcacaaggacaauauuu

SEQ ID NO: 1159154 - RNA, 19 nt, Homo sapiens
  misc_RNA (1)...(19): siRNA sense strand
uggacuggauguugaauca

SEQ ID NO: 1159155 - RNA, 19 nt, Homo sapiens
  misc_RNA (1)...(19): siRNA sense strand
cuagugaucuuggaugaag

SEQ ID NO: 1159156 - RNA, 19 nt, Homo sapiens
  misc_RNA (1)...(19): siRNA sense strand
gcuagcacaaggacaauau

SEQ ID NO: 1159157 - RNA, 19 nt, Homo sapiens
  misc_RNA (1)...(19): siRNA sense strand
gacuuuccaucuucaguuc

SEQ ID NO: 1159158 - RNA, 19 nt, Homo sapiens
  misc_RNA (1)...(19): siRNA sense strand
ggcacccgcucaagucaga

SEQ ID NO: 1159159 - RNA, 19 nt, Homo sapiens
  misc_RNA (1)...(19): siRNA sense strand
ugcaugauauccugacaga

SEQ ID NO: 1159160 - RNA, 19 nt, Homo sapiens
  misc_RNA (1)...(19): siRNA sense strand
agucagacauugccaacau

SEQ ID NO: 1159161 - RNA, 19 nt, Homo sapiens
  misc_RNA (1)...(19): siRNA sense strand
gacagagauacacuuguuu

SEQ ID NO: 1159162 - RNA, 19 nt, Homo sapiens
  misc_RNA (1)...(19): siRNA sense strand
ccagaaugccuugagaaga

SEQ ID NO: 1159163 - RNA, 19 nt, Homo sapiens
  misc_RNA (1)...(19): siRNA sense strand
cauuucaagucaccagaga

SEQ ID NO: 1159164 - RNA, 19 nt, Homo sapiens
  misc_RNA (1)...(19): siRNA sense strand
uggcagacauugaguacag

SEQ ID NO: 1159165 - RNA, 19 nt, Homo sapiens
  misc_RNA (1)...(19): siRNA sense strand
accacagccuacagaaaua

SEQ ID NO: 1159166 - RNA, 19 nt, Homo sapiens
  misc_RNA (1)...(19): siRNA sense strand
gcacuagucacucuuucca

SEQ ID NO: 1159167 - RNA, 19 nt, Homo sapiens
  misc_RNA (1)...(19): siRNA sense strand
gagaaaguugauauaagug

SEQ ID NO: 1159168 - RNA, 19 nt, Homo sapiens
  misc_RNA (1)...(19): siRNA sense strand
gaaagcacuagucacucuu

SEQ ID NO: 1159169 - RNA, 19 nt, Homo sapiens
  misc_RNA (1)...(19): siRNA sense strand
gauauaagugaagauggaa

SEQ ID NO: 1159170 - RNA, 19 nt, Homo sapiens
  misc_RNA (1)...(19): siRNA sense strand
ucagaugaccgaggaauag

SEQ ID NO: 1159171 - RNA, 19 nt, Homo sapiens
  misc_RNA (1)...(19): siRNA sense strand
acagagauacacuuguuug

SEQ ID NO: 1159172 - RNA, 19 nt, Homo sapiens
  misc_RNA (1)...(19): siRNA sense strand
ggguuggcacugcaugaua

SEQ ID NO: 1159173 - RNA, 19 nt, Homo sapiens
  misc_RNA (1)...(19): siRNA sense strand
caucuucaguucgaauaca

SEQ ID NO: 1159174 - RNA, 19 nt, Homo sapiens
  misc_RNA (1)...(19): siRNA sense strand
caccagagaccugauuguu

SEQ ID NO: 1159175 - RNA, 19 nt, Homo sapiens
  misc_RNA (1)...(19): siRNA sense strand
uggaagaagagaaaguuga

SEQ ID NO: 1159176 - RNA, 19 nt, Homo sapiens
  misc_RNA (1)...(19): siRNA sense strand
agcacaaggacaauauuua

SEQ ID NO: 1159177 - RNA, 19 nt, Homo sapiens
  misc_RNA (1)...(19): siRNA sense strand
ccgcucaagucagacauug

SEQ ID NO: 1159178 - RNA, 19 nt, Homo sapiens
  misc_RNA (1)...(19): siRNA sense strand
aagcagacgccaugacuca

SEQ ID NO: 1159179 - RNA, 19 nt, Homo sapiens
  misc_RNA (1)...(19): siRNA sense strand
uugcagagcaccaauaugg

SEQ ID NO: 1159180 - RNA, 19 nt, Homo sapiens
  misc_RNA (1)...(19): siRNA sense strand
ucaccacagccuacagaaa

SEQ ID NO: 1159181 - RNA, 19 nt, Homo sapiens
  misc_RNA (1)...(19): siRNA sense strand
uaagugaagauggaaugaa

SEQ ID NO: 1159182 - RNA, 19 nt, Homo sapiens
  misc_RNA (1)...(19): siRNA sense strand
ugacuuuccaucuucaguu

SEQ ID NO: 1159183 - RNA, 19 nt, Homo sapiens
  misc_RNA (1)...(19): siRNA sense strand
acacuuguuugugcauaga

SEQ ID NO: 1159184 - RNA, 19 nt, Homo sapiens
  misc_RNA (1)...(19): siRNA sense strand
ccucaucuguaacuaucug

SEQ ID NO: 1159185 - RNA, 19 nt, Homo sapiens
  misc_RNA (1)...(19): siRNA sense strand
acagccuacagaaauauua

SEQ ID NO: 1159186 - RNA, 19 nt, Homo sapiens
  misc_RNA (1)...(19): siRNA sense strand
ccacagccuacagaaauau

SEQ ID NO: 1159187 - RNA, 19 nt, Homo sapiens
  misc_RNA (1)...(19): siRNA sense strand
ugacucaggacgcccagaa

SEQ ID NO: 1159188 - RNA, 19 nt, Homo sapiens
  misc_RNA (1)...(19): siRNA sense strand
uauaagugaagauggaaug

SEQ ID NO: 1159189 - RNA, 19 nt, Homo sapiens
  misc_RNA (1)...(19): siRNA sense strand
gaugaccgaggaauagaca

SEQ ID NO: 1159190 - RNA, 19 nt, Homo sapiens
  misc_RNA (1)...(19): siRNA sense strand
ccugacuccugaacucaug

SEQ ID NO: 1159191 - RNA, 19 nt, Homo sapiens
  misc_RNA (1)...(19): siRNA sense strand
gugcauagaguugacuuuc

SEQ ID NO: 1159192 - RNA, 19 nt, Homo sapiens
  misc_RNA (1)...(19): siRNA sense strand
auacacuuguuugugcaua

SEQ ID NO: 1159193 - RNA, 19 nt, Homo sapiens
  misc_RNA (1)...(19): siRNA sense strand
ucacagaaaauaccagauu

SEQ ID NO: 1159194 - RNA, 19 nt, Homo sapiens
  misc_RNA (1)...(19): siRNA sense strand
ggaacaugucguggaagaa

SEQ ID NO: 1159195 - RNA, 19 nt, Homo sapiens
  misc_RNA (1)...(19): siRNA sense strand
gcccagaaugccuugagaa

SEQ ID NO: 1159196 - RNA, 19 nt, Homo sapiens
  misc_RNA (1)...(19): siRNA sense strand
cguagggcucugaacauuu

SEQ ID NO: 1159197 - RNA, 19 nt, Homo sapiens
  misc_RNA (1)...(19): siRNA sense strand
ugucguggaagaagagaaa

SEQ ID NO: 1159198 - RNA, 19 nt, Homo sapiens
  misc_RNA (1)...(19): siRNA sense strand
uugagaagaguaauugaga

SEQ ID NO: 1159199 - RNA, 19 nt, Homo sapiens
  misc_RNA (1)...(19): siRNA sense strand
aaugaaagcacuagucacu

SEQ ID NO: 1159200 - RNA, 19 nt, Homo sapiens
  misc_RNA (1)...(19): siRNA sense strand
ugccucaucuguaacuauc

SEQ ID NO: 1159201 - RNA, 19 nt, Homo sapiens
  misc_RNA (1)...(19): siRNA sense strand
caucuguaacuaucuguca

SEQ ID NO: 1159202 - RNA, 19 nt, Homo sapiens
  misc_RNA (1)...(19): siRNA sense strand
ccgaggaauagacaucauu

SEQ ID NO: 1159203 - RNA, 19 nt, Homo sapiens
  misc_RNA (1)...(19): siRNA sense strand
gaagacacguuguuaccua

SEQ ID NO: 1159204 - RNA, 19 nt, Homo sapiens
  misc_RNA (1)...(19): siRNA sense strand
ccacacagcuuucccugaa

SEQ ID NO: 1159205 - RNA, 19 nt, Homo sapiens
  misc_RNA (1)...(19): siRNA sense strand
gagcagaguggaaugaaua

SEQ ID NO: 1159206 - RNA, 19 nt, Homo sapiens
  misc_RNA (1)...(19): siRNA sense strand
gaaaaugccuaugaagaua

SEQ ID NO: 1159207 - RNA, 19 nt, Homo sapiens
  misc_RNA (1)...(19): siRNA sense strand
gcaaaucuguggccuccaa

SEQ ID NO: 1159208 - RNA, 19 nt, Homo sapiens
  misc_RNA (1)...(19): siRNA sense strand
ggaagaccaucaaagugaa

SEQ ID NO: 1159209 - RNA, 19 nt, Homo sapiens
  misc_RNA (1)...(19): siRNA sense strand
gaaaauccuuugaguuuga

SEQ ID NO: 1159210 - RNA, 19 nt, Homo sapiens
  misc_RNA (1)...(19): siRNA sense strand
ccaaggagaauccauauga

SEQ ID NO: 1159211 - RNA, 19 nt, Homo sapiens
  misc_RNA (1)...(19): siRNA sense strand
gggaagaccaucaaaguga

SEQ ID NO: 1159212 - RNA, 19 nt, Homo sapiens
  misc_RNA (1)...(19): siRNA sense strand
cgaagucuccuaccaguuu

SEQ ID NO: 1159213 - RNA, 19 nt, Homo sapiens
  misc_RNA (1)...(19): siRNA sense strand
guuguuaccuaggaaguua

SEQ ID NO: 1159214 - RNA, 19 nt, Homo sapiens
  misc_RNA (1)...(19): siRNA sense strand
agaauuaacuccaucuaca

SEQ ID NO: 1159215 - RNA, 19 nt, Homo sapiens
  misc_RNA (1)...(19): siRNA sense strand
gaccaugacugccaacaag

SEQ ID NO: 1159216 - RNA, 19 nt, Homo sapiens
  misc_RNA (1)...(19): siRNA sense strand
cgagaggccuuccgcaaau

SEQ ID NO: 1159217 - RNA, 19 nt, Homo sapiens
  misc_RNA (1)...(19): siRNA sense strand
ggucuauccuuucaugaga

SEQ ID NO: 1159218 - RNA, 19 nt, Homo sapiens
  misc_RNA (1)...(19): siRNA sense strand
cgacgaagacacguuguua

SEQ ID NO: 1159219 - RNA, 19 nt, Homo sapiens
  misc_RNA (1)...(19): siRNA sense strand
ggacuggcuuccuguguca

SEQ ID NO: 1159220 - RNA, 19 nt, Homo sapiens
  misc_RNA (1)...(19): siRNA sense strand
gcauuggucuauccuuuca

SEQ ID NO: 1159221 - RNA, 19 nt, Homo sapiens
  misc_RNA (1)...(19): siRNA sense strand
aagcuuguccaaagaauua

SEQ ID NO: 1159222 - RNA, 19 nt, Homo sapiens
  misc_RNA (1)...(19): siRNA sense strand
gaggaaagaagagauuaaa

SEQ ID NO: 1159223 - RNA, 19 nt, Homo sapiens
  misc_RNA (1)...(19): siRNA sense strand
ugaaacagcaucacugaga

SEQ ID NO: 1159224 - RNA, 19 nt, Homo sapiens
  misc_RNA (1)...(19): siRNA sense strand
gaauuaacuccaucuacaa

SEQ ID NO: 1159225 - RNA, 19 nt, Homo sapiens
  misc_RNA (1)...(19): siRNA sense strand
caucuacaaugccaagaga

SEQ ID NO: 1159226 - RNA, 19 nt, Homo sapiens
  misc_RNA (1)...(19): siRNA sense strand
agaguggaaugaauaaguu

SEQ ID NO: 1159227 - RNA, 19 nt, Homo sapiens
  misc_RNA (1)...(19): siRNA sense strand
ccaucaaagugaagacauu

SEQ ID NO: 1159228 - RNA, 19 nt, Homo sapiens
  misc_RNA (1)...(19): siRNA sense strand
gagaggaaagaagagauua

SEQ ID NO: 1159229 - RNA, 19 nt, Homo sapiens
  misc_RNA (1)...(19): siRNA sense strand
gcagugagaccuuuucuuu

SEQ ID NO: 1159230 - RNA, 19 nt, Homo sapiens
  misc_RNA (1)...(19): siRNA sense strand
cagaaaauccuuugaguuu

SEQ ID NO: 1159231 - RNA, 19 nt, Homo sapiens
  misc_RNA (1)...(19): siRNA sense strand
uauggagucucagauguuu

SEQ ID NO: 1159232 - RNA, 19 nt, Homo sapiens
  misc_RNA (1)...(19): siRNA sense strand
guauagcagugagaccuuu

SEQ ID NO: 1159233 - RNA, 19 nt, Homo sapiens
  misc_RNA (1)...(19): siRNA sense strand
aaaugaaguuucuccacaa

SEQ ID NO: 1159234 - RNA, 19 nt, Homo sapiens
  misc_RNA (1)...(19): siRNA sense strand
gcgagaggccuuccgcaaa

SEQ ID NO: 1159235 - RNA, 19 nt, Homo sapiens
  misc_RNA (1)...(19): siRNA sense strand
ggacuuaaagagccgaaga

SEQ ID NO: 1159236 - RNA, 19 nt, Homo sapiens
  misc_RNA (1)...(19): siRNA sense strand
gaguggagcaguacuuaga

SEQ ID NO: 1159237 - RNA, 19 nt, Homo sapiens
  misc_RNA (1)...(19): siRNA sense strand
agaagaagccaucgcgaaa

SEQ ID NO: 1159238 - RNA, 19 nt, Homo sapiens
  misc_RNA (1)...(19): siRNA sense strand
agugggaacuggucagaaa

SEQ ID NO: 1159239 - RNA, 19 nt, Homo sapiens
  misc_RNA (1)...(19): siRNA sense strand
gccaagagaggaaagaaga

SEQ ID NO: 1159240 - RNA, 19 nt, Homo sapiens
  misc_RNA (1)...(19): siRNA sense strand
ggagcaguacuuagaagaa

SEQ ID NO: 1159241 - RNA, 19 nt, Homo sapiens
  misc_RNA (1)...(19): siRNA sense strand
gaagucuccuaccaguuuc

SEQ ID NO: 1159242 - RNA, 19 nt, Homo sapiens
  misc_RNA (1)...(19): siRNA sense strand
caagacagggagcuaagaa

SEQ ID NO: 1159243 - RNA, 19 nt, Homo sapiens
  misc_RNA (1)...(19): siRNA sense strand
caaggagaauccauaugag

SEQ ID NO: 1159244 - RNA, 19 nt, Homo sapiens
  misc_RNA (1)...(19): siRNA sense strand
gcgaguggagcaguacuua

SEQ ID NO: 1159245 - RNA, 19 nt, Homo sapiens
  misc_RNA (1)...(19): siRNA sense strand
cugcauuggucuauccuuu

SEQ ID NO: 1159246 - RNA, 19 nt, Homo sapiens
  misc_RNA (1)...(19): siRNA sense strand
ccagagguguacuguguca

SEQ ID NO: 1159247 - RNA, 19 nt, Homo sapiens
  misc_RNA (1)...(19): siRNA sense strand
ugccagagguguacugugu

SEQ ID NO: 1159248 - RNA, 19 nt, Homo sapiens
  misc_RNA (1)...(19): siRNA sense strand
ccacugagaaugguacuga

SEQ ID NO: 1159249 - RNA, 19 nt, Homo sapiens
  misc_RNA (1)...(19): siRNA sense strand
acagggagcuaagaaagug

SEQ ID NO: 1159250 - RNA, 19 nt, Homo sapiens
  misc_RNA (1)...(19): siRNA sense strand
ucugggaucugaccgauuc

SEQ ID NO: 1159251 - RNA, 19 nt, Homo sapiens
  misc_RNA (1)...(19): siRNA sense strand
agaacuccuuggacucuuu

SEQ ID NO: 1159252 - RNA, 19 nt, Homo sapiens
  misc_RNA (1)...(19): siRNA sense strand
gagcaguacuuagaagaac

SEQ ID NO: 1159253 - RNA, 19 nt, Homo sapiens
  misc_RNA (1)...(19): siRNA sense strand
gaauguaauacccucaaug

SEQ ID NO: 1159254 - RNA, 19 nt, Homo sapiens
  misc_RNA (1)...(19): siRNA sense strand
gaggaagaaugagcugauc

SEQ ID NO: 1159255 - RNA, 19 nt, Homo sapiens
  misc_RNA (1)...(19): siRNA sense strand
gagaaccaacccaaguuug

SEQ ID NO: 1159256 - RNA, 19 nt, Homo sapiens
  misc_RNA (1)...(19): siRNA sense strand
uuuccaagguccuagauga

SEQ ID NO: 1159257 - RNA, 19 nt, Homo sapiens
  misc_RNA (1)...(19): siRNA sense strand
auaugaggauguggacuua

SEQ ID NO: 1159258 - RNA, 19 nt, Homo sapiens
  misc_RNA (1)...(19): siRNA sense strand
gauggcagcagacgcuuug

SEQ ID NO: 1159259 - RNA, 19 nt, Homo sapiens
  misc_RNA (1)...(19): siRNA sense strand
aagaagccaucgcgaaaca

SEQ ID NO: 1159260 - RNA, 19 nt, Homo sapiens
  misc_RNA (1)...(19): siRNA sense strand
gagaucugcccaaggagaa

SEQ ID NO: 1159261 - RNA, 19 nt, Homo sapiens
  misc_RNA (1)...(19): siRNA sense strand
cagcucauccgaaucuuug

SEQ ID NO: 1159262 - RNA, 19 nt, Homo sapiens
  misc_RNA (1)...(19): siRNA sense strand
cccagcaacugucugagaa

SEQ ID NO: 1159263 - RNA, 19 nt, Homo sapiens
  misc_RNA (1)...(19): siRNA sense strand
gcaacaaaaugaaguuucu

SEQ ID NO: 1159264 - RNA, 19 nt, Homo sapiens
  misc_RNA (1)...(19): siRNA sense strand
ugagaaccaacccaaguuu

SEQ ID NO: 1159265 - RNA, 19 nt, Homo sapiens
  misc_RNA (1)...(19): siRNA sense strand
aacaagaauuccagcauca

SEQ ID NO: 1159266 - RNA, 19 nt, Homo sapiens
  misc_RNA (1)...(19): siRNA sense strand
gagguguacugugucauca

SEQ ID NO: 1159267 - RNA, 19 nt, Homo sapiens
  misc_RNA (1)...(19): siRNA sense strand
ccuccagccucaaugaaga

SEQ ID NO: 1159268 - RNA, 19 nt, Homo sapiens
  misc_RNA (1)...(19): siRNA sense strand
augaggauguggacuuaaa

SEQ ID NO: 1159269 - RNA, 19 nt, Homo sapiens
  misc_RNA (1)...(19): siRNA sense strand
cgacuccgacgaugaaugu

SEQ ID NO: 1159270 - RNA, 19 nt, Homo sapiens
  misc_RNA (1)...(19): siRNA sense strand
ccaagaggcacagccauga

SEQ ID NO: 1159271 - RNA, 19 nt, Homo sapiens
  misc_RNA (1)...(19): siRNA sense strand
caagagaggaaagaagaga

SEQ ID NO: 1159272 - RNA, 19 nt, Homo sapiens
  misc_RNA (1)...(19): siRNA sense strand
uggagcacguggacuuuga

SEQ ID NO: 1159273 - RNA, 19 nt, Homo sapiens
  misc_RNA (1)...(19): siRNA sense strand
gaagauauugugggagauc

SEQ ID NO: 1159274 - RNA, 19 nt, Homo sapiens
  misc_RNA (1)...(19): siRNA sense strand
gaggauguggacuuaaaga

SEQ ID NO: 1159275 - RNA, 19 nt, Homo sapiens
  misc_RNA (1)...(19): siRNA sense strand
cagggaagaccaucaaagu

SEQ ID NO: 1159276 - RNA, 19 nt, Homo sapiens
  misc_RNA (1)...(19): siRNA sense strand
gaacuccuuggacucuuug

SEQ ID NO: 1159277 - RNA, 19 nt, Homo sapiens
  misc_RNA (1)...(19): siRNA sense strand
aggaggcgcugauggugaa

SEQ ID NO: 1159278 - RNA, 19 nt, Homo sapiens
  misc_RNA (1)...(19): siRNA sense strand
cauaugaggauguggacuu

SEQ ID NO: 1159279 - RNA, 19 nt, Homo sapiens
  misc_RNA (1)...(19): siRNA sense strand
ccaagcuuguccaaagaau

SEQ ID NO: 1159280 - RNA, 19 nt, Homo sapiens
  misc_RNA (1)...(19): siRNA sense strand
ggaacuggucagaaaggaa

SEQ ID NO: 1159281 - RNA, 19 nt, Homo sapiens
  misc_RNA (1)...(19): siRNA sense strand
gggaacuggucagaaagga

SEQ ID NO: 1159282 - RNA, 19 nt, Homo sapiens
  misc_RNA (1)...(19): siRNA sense strand
ugaauguaauacccucaau

SEQ ID NO: 1159283 - RNA, 19 nt, Homo sapiens
  misc_RNA (1)...(19): siRNA sense strand
cagcgacuccgacgaugaa

SEQ ID NO: 1159284 - RNA, 19 nt, Homo sapiens
  misc_RNA (1)...(19): siRNA sense strand
ggaagaaugagcugaucuc

SEQ ID NO: 1159285 - RNA, 19 nt, Homo sapiens
  misc_RNA (1)...(19): siRNA sense strand
agaagaaaaugccuaugaa

SEQ ID NO: 1159286 - RNA, 19 nt, Homo sapiens
  misc_RNA (1)...(19): siRNA sense strand
uggugucccucaagaagaa

SEQ ID NO: 1159287 - RNA, 19 nt, Homo sapiens
  misc_RNA (1)...(19): siRNA sense strand
gagaggccuuccgcaaauc

SEQ ID NO: 1159288 - RNA, 19 nt, Homo sapiens
  misc_RNA (1)...(19): siRNA sense strand
ugacagcgacuccgacgau

SEQ ID NO: 1159289 - RNA, 19 nt, Homo sapiens
  misc_RNA (1)...(19): siRNA sense strand
gagaacuccuuggacucuu

SEQ ID NO: 1159290 - RNA, 19 nt, Homo sapiens
  misc_RNA (1)...(19): siRNA sense strand
auaaguuucuccgagguuu

SEQ ID NO: 1159291 - RNA, 19 nt, Homo sapiens
  misc_RNA (1)...(19): siRNA sense strand
ugagcagaguggaaugaau

SEQ ID NO: 1159292 - RNA, 19 nt, Homo sapiens
  misc_RNA (1)...(19): siRNA sense strand
uaagaaagugucgggcaaa

SEQ ID NO: 1159293 - RNA, 19 nt, Homo sapiens
  misc_RNA (1)...(19): siRNA sense strand
gacacguuguuaccuagga

SEQ ID NO: 1159294 - RNA, 19 nt, Homo sapiens
  misc_RNA (1)...(19): siRNA sense strand
ugacugccaacaagaauuc

SEQ ID NO: 1159295 - RNA, 19 nt, Homo sapiens
  misc_RNA (1)...(19): siRNA sense strand
gcagaggaaaggcucaaag

SEQ ID NO: 1159296 - RNA, 19 nt, Homo sapiens
  misc_RNA (1)...(19): siRNA sense strand
gaugcgagaggcagaggaa

SEQ ID NO: 1159297 - RNA, 19 nt, Homo sapiens
  misc_RNA (1)...(19): siRNA sense strand
gcagaaaauccuuugaguu

SEQ ID NO: 1159298 - RNA, 19 nt, Homo sapiens
  misc_RNA (1)...(19): siRNA sense strand
gaguggaaugaauaaguuu

SEQ ID NO: 1159299 - RNA, 19 nt, Homo sapiens
  misc_RNA (1)...(19): siRNA sense strand
cagaguggaaugaauaagu

SEQ ID NO: 1159300 - RNA, 19 nt, Homo sapiens
  misc_RNA (1)...(19): siRNA sense strand
guguuuauccgguucuuug

SEQ ID NO: 1159301 - RNA, 19 nt, Homo sapiens
  misc_RNA (1)...(19): siRNA sense strand
gugguggugucccucaaga

SEQ ID NO: 1159302 - RNA, 19 nt, Homo sapiens
  misc_RNA (1)...(19): siRNA sense strand
agaggaaagaagagauuaa

SEQ ID NO: 1159303 - RNA, 19 nt, Homo sapiens
  misc_RNA (1)...(19): siRNA sense strand
gaagacacguuguuaccua

SEQ ID NO: 1159304 - RNA, 19 nt, Homo sapiens
  misc_RNA (1)...(19): siRNA sense strand
ccacacagcuuucccugaa

SEQ ID NO: 1159305 - RNA, 19 nt, Homo sapiens
  misc_RNA (1)...(19): siRNA sense strand
gagcagaguggaaugaaua

SEQ ID NO: 1159306 - RNA, 19 nt, Homo sapiens
  misc_RNA (1)...(19): siRNA sense strand
gaaaaugccuaugaagaua

SEQ ID NO: 1159307 - RNA, 19 nt, Homo sapiens
  misc_RNA (1)...(19): siRNA sense strand
gcaaaucuguggccuccaa

SEQ ID NO: 1159308 - RNA, 19 nt, Homo sapiens
  misc_RNA (1)...(19): siRNA sense strand
ggaagaccaucaaagugaa

SEQ ID NO: 1159309 - RNA, 19 nt, Homo sapiens
  misc_RNA (1)...(19): siRNA sense strand
gaaaauccuuugaguuuga

SEQ ID NO: 1159310 - RNA, 19 nt, Homo sapiens
  misc_RNA (1)...(19): siRNA sense strand
ccaaggagaauccauauga

SEQ ID NO: 1159311 - RNA, 19 nt, Homo sapiens
  misc_RNA (1)...(19): siRNA sense strand
gggaagaccaucaaaguga

SEQ ID NO: 1159312 - RNA, 19 nt, Homo sapiens
  misc_RNA (1)...(19): siRNA sense strand
cgaagucuccuaccaguuu

SEQ ID NO: 1159313 - RNA, 19 nt, Homo sapiens
  misc_RNA (1)...(19): siRNA sense strand
guuguuaccuaggaaguua

SEQ ID NO: 1159314 - RNA, 19 nt, Homo sapiens
  misc_RNA (1)...(19): siRNA sense strand
agaauuaacuccaucuaca

SEQ ID NO: 1159315 - RNA, 19 nt, Homo sapiens
  misc_RNA (1)...(19): siRNA sense strand
gaccaugacugccaacaag

SEQ ID NO: 1159316 - RNA, 19 nt, Homo sapiens
  misc_RNA (1)...(19): siRNA sense strand
cgagaggccuuccgcaaau

SEQ ID NO: 1159317 - RNA, 19 nt, Homo sapiens
  misc_RNA (1)...(19): siRNA sense strand
ggucuauccuuucaugaga

SEQ ID NO: 1159318 - RNA, 19 nt, Homo sapiens
  misc_RNA (1)...(19): siRNA sense strand
cgacgaagacacguuguua

SEQ ID NO: 1159319 - RNA, 19 nt, Homo sapiens
  misc_RNA (1)...(19): siRNA sense strand
ggacuggcuuccuguguca

SEQ ID NO: 1159320 - RNA, 19 nt, Homo sapiens
  misc_RNA (1)...(19): siRNA sense strand
gcauuggucuauccuuuca

SEQ ID NO: 1159321 - RNA, 19 nt, Homo sapiens
  misc_RNA (1)...(19): siRNA sense strand
aagcuuguccaaagaauua

SEQ ID NO: 1159322 - RNA, 19 nt, Homo sapiens
  misc_RNA (1)...(19): siRNA sense strand
gaggaaagaagagauuaaa

SEQ ID NO: 1159323 - RNA, 19 nt, Homo sapiens
  misc_RNA (1)...(19): siRNA sense strand
ugaaacagcaucacugaga

SEQ ID NO: 1159324 - RNA, 19 nt, Homo sapiens
  misc_RNA (1)...(19): siRNA sense strand
gaauuaacuccaucuacaa

SEQ ID NO: 1159325 - RNA, 19 nt, Homo sapiens
  misc_RNA (1)...(19): siRNA sense strand
caucuacaaugccaagaga

SEQ ID NO: 1159326 - RNA, 19 nt, Homo sapiens
  misc_RNA (1)...(19): siRNA sense strand
agaguggaaugaauaaguu

SEQ ID NO: 1159327 - RNA, 19 nt, Homo sapiens
  misc_RNA (1)...(19): siRNA sense strand
ccaucaaagugaagacauu

SEQ ID NO: 1159328 - RNA, 19 nt, Homo sapiens
  misc_RNA (1)...(19): siRNA sense strand
gagaggaaagaagagauua

SEQ ID NO: 1159329 - RNA, 19 nt, Homo sapiens
  misc_RNA (1)...(19): siRNA sense strand
gcagugagaccuuuucuuu

SEQ ID NO: 1159330 - RNA, 19 nt, Homo sapiens
  misc_RNA (1)...(19): siRNA sense strand
cagaaaauccuuugaguuu

SEQ ID NO: 1159331 - RNA, 19 nt, Homo sapiens
  misc_RNA (1)...(19): siRNA sense strand
uauggagucucagauguuu

SEQ ID NO: 1159332 - RNA, 19 nt, Homo sapiens
  misc_RNA (1)...(19): siRNA sense strand
guauagcagugagaccuuu

SEQ ID NO: 1159333 - RNA, 19 nt, Homo sapiens
  misc_RNA (1)...(19): siRNA sense strand
aaaugaaguuucuccacaa

SEQ ID NO: 1159334 - RNA, 19 nt, Homo sapiens
  misc_RNA (1)...(19): siRNA sense strand
gcgagaggccuuccgcaaa

SEQ ID NO: 1159335 - RNA, 19 nt, Homo sapiens
  misc_RNA (1)...(19): siRNA sense strand
ggacuuaaagagccgaaga

SEQ ID NO: 1159336 - RNA, 19 nt, Homo sapiens
  misc_RNA (1)...(19): siRNA sense strand
gaguggagcaguacuuaga

SEQ ID NO: 1159337 - RNA, 19 nt, Homo sapiens
  misc_RNA (1)...(19): siRNA sense strand
agaagaagccaucgcgaaa

SEQ ID NO: 1159338 - RNA, 19 nt, Homo sapiens
  misc_RNA (1)...(19): siRNA sense strand
agugggaacuggucagaaa

SEQ ID NO: 1159339 - RNA, 19 nt, Homo sapiens
  misc_RNA (1)...(19): siRNA sense strand
gccaagagaggaaagaaga

SEQ ID NO: 1159340 - RNA, 19 nt, Homo sapiens
  misc_RNA (1)...(19): siRNA sense strand
ggagcaguacuuagaagaa

SEQ ID NO: 1159341 - RNA, 19 nt, Homo sapiens
  misc_RNA (1)...(19): siRNA sense strand
gaagucuccuaccaguuuc

SEQ ID NO: 1159342 - RNA, 19 nt, Homo sapiens
  misc_RNA (1)...(19): siRNA sense strand
caagacagggagcuaagaa

SEQ ID NO: 1159343 - RNA, 19 nt, Homo sapiens
  misc_RNA (1)...(19): siRNA sense strand
caaggagaauccauaugag

SEQ ID NO: 1159344 - RNA, 19 nt, Homo sapiens
  misc_RNA (1)...(19): siRNA sense strand
gcgaguggagcaguacuua

SEQ ID NO: 1159345 - RNA, 19 nt, Homo sapiens
  misc_RNA (1)...(19): siRNA sense strand
cugcauuggucuauccuuu

SEQ ID NO: 1159346 - RNA, 19 nt, Homo sapiens
  misc_RNA (1)...(19): siRNA sense strand
ccagagguguacuguguca

SEQ ID NO: 1159347 - RNA, 19 nt, Homo sapiens
  misc_RNA (1)...(19): siRNA sense strand
ugccagagguguacugugu

SEQ ID NO: 1159348 - RNA, 19 nt, Homo sapiens
  misc_RNA (1)...(19): siRNA sense strand
ccacugagaaugguacuga

SEQ ID NO: 1159349 - RNA, 19 nt, Homo sapiens
  misc_RNA (1)...(19): siRNA sense strand
acagggagcuaagaaagug

SEQ ID NO: 1159350 - RNA, 19 nt, Homo sapiens
  misc_RNA (1)...(19): siRNA sense strand
ucugggaucugaccgauuc

SEQ ID NO: 1159351 - RNA, 19 nt, Homo sapiens
  misc_RNA (1)...(19): siRNA sense strand
agaacuccuuggacucuuu

SEQ ID NO: 1159352 - RNA, 19 nt, Homo sapiens
  misc_RNA (1)...(19): siRNA sense strand
gagcaguacuuagaagaac

SEQ ID NO: 1159353 - RNA, 19 nt, Homo sapiens
  misc_RNA (1)...(19): siRNA sense strand
gaauguaauacccucaaug

SEQ ID NO: 1159354 - RNA, 19 nt, Homo sapiens
  misc_RNA (1)...(19): siRNA sense strand
gaggaagaaugagcugauc

SEQ ID NO: 1159355 - RNA, 19 nt, Homo sapiens
  misc_RNA (1)...(19): siRNA sense strand
gagaaccaacccaaguuug

SEQ ID NO: 1159356 - RNA, 19 nt, Homo sapiens
  misc_RNA (1)...(19): siRNA sense strand
uuuccaagguccuagauga

SEQ ID NO: 1159357 - RNA, 19 nt, Homo sapiens
  misc_RNA (1)...(19): siRNA sense strand
auaugaggauguggacuua

SEQ ID NO: 1159358 - RNA, 19 nt, Homo sapiens
  misc_RNA (1)...(19): siRNA sense strand
gauggcagcagacgcuuug

SEQ ID NO: 1159359 - RNA, 19 nt, Homo sapiens
  misc_RNA (1)...(19): siRNA sense strand
aagaagccaucgcgaaaca

SEQ ID NO: 1159360 - RNA, 19 nt, Homo sapiens
  misc_RNA (1)...(19): siRNA sense strand
gagaucugcccaaggagaa

SEQ ID NO: 1159361 - RNA, 19 nt, Homo sapiens
  misc_RNA (1)...(19): siRNA sense strand
cagcucauccgaaucuuug

SEQ ID NO: 1159362 - RNA, 19 nt, Homo sapiens
  misc_RNA (1)...(19): siRNA sense strand
cccagcaacugucugagaa

SEQ ID NO: 1159363 - RNA, 19 nt, Homo sapiens
  misc_RNA (1)...(19): siRNA sense strand
gcaacaaaaugaaguuucu

SEQ ID NO: 1159364 - RNA, 19 nt, Homo sapiens
  misc_RNA (1)...(19): siRNA sense strand
ugagaaccaacccaaguuu

SEQ ID NO: 1159365 - RNA, 19 nt, Homo sapiens
  misc_RNA (1)...(19): siRNA sense strand
aacaagaauuccagcauca

SEQ ID NO: 1159366 - RNA, 19 nt, Homo sapiens
  misc_RNA (1)...(19): siRNA sense strand
gagguguacugugucauca

SEQ ID NO: 1159367 - RNA, 19 nt, Homo sapiens
  misc_RNA (1)...(19): siRNA sense strand
ccuccagccucaaugaaga

SEQ ID NO: 1159368 - RNA, 19 nt, Homo sapiens
  misc_RNA (1)...(19): siRNA sense strand
augaggauguggacuuaaa

SEQ ID NO: 1159369 - RNA, 19 nt, Homo sapiens
  misc_RNA (1)...(19): siRNA sense strand
cgacuccgacgaugaaugu

SEQ ID NO: 1159370 - RNA, 19 nt, Homo sapiens
  misc_RNA (1)...(19): siRNA sense strand
ccaagaggcacagccauga

SEQ ID NO: 1159371 - RNA, 19 nt, Homo sapiens
  misc_RNA (1)...(19): siRNA sense strand
caagagaggaaagaagaga

SEQ ID NO: 1159372 - RNA, 19 nt, Homo sapiens
  misc_RNA (1)...(19): siRNA sense strand
uggagcacguggacuuuga

SEQ ID NO: 1159373 - RNA, 19 nt, Homo sapiens
  misc_RNA (1)...(19): siRNA sense strand
gaagauauugugggagauc

SEQ ID NO: 1159374 - RNA, 19 nt, Homo sapiens
  misc_RNA (1)...(19): siRNA sense strand
gaggauguggacuuaaaga

SEQ ID NO: 1159375 - RNA, 19 nt, Homo sapiens
  misc_RNA (1)...(19): siRNA sense strand
cagggaagaccaucaaagu

SEQ ID NO: 1159376 - RNA, 19 nt, Homo sapiens
  misc_RNA (1)...(19): siRNA sense strand
gaacuccuuggacucuuug

SEQ ID NO: 1159377 - RNA, 19 nt, Homo sapiens
  misc_RNA (1)...(19): siRNA sense strand
aggaggcgcugauggugaa

SEQ ID NO: 1159378 - RNA, 19 nt, Homo sapiens
  misc_RNA (1)...(19): siRNA sense strand
cauaugaggauguggacuu

SEQ ID NO: 1159379 - RNA, 19 nt, Homo sapiens
  misc_RNA (1)...(19): siRNA sense strand
ccaagcuuguccaaagaau

SEQ ID NO: 1159380 - RNA, 19 nt, Homo sapiens
  misc_RNA (1)...(19): siRNA sense strand
ggaacuggucagaaaggaa

SEQ ID NO: 1159381 - RNA, 19 nt, Homo sapiens
  misc_RNA (1)...(19): siRNA sense strand
gggaacuggucagaaagga

SEQ ID NO: 1159382 - RNA, 19 nt, Homo sapiens
  misc_RNA (1)...(19): siRNA sense strand
ugaauguaauacccucaau

SEQ ID NO: 1159383 - RNA, 19 nt, Homo sapiens
  misc_RNA (1)...(19): siRNA sense strand
cagcgacuccgacgaugaa

SEQ ID NO: 1159384 - RNA, 19 nt, Homo sapiens
  misc_RNA (1)...(19): siRNA sense strand
ggaagaaugagcugaucuc

SEQ ID NO: 1159385 - RNA, 19 nt, Homo sapiens
  misc_RNA (1)...(19): siRNA sense strand
agaagaaaaugccuaugaa

SEQ ID NO: 1159386 - RNA, 19 nt, Homo sapiens
  misc_RNA (1)...(19): siRNA sense strand
uggugucccucaagaagaa

SEQ ID NO: 1159387 - RNA, 19 nt, Homo sapiens
  misc_RNA (1)...(19): siRNA sense strand
gagaggccuuccgcaaauc

SEQ ID NO: 1159388 - RNA, 19 nt, Homo sapiens
  misc_RNA (1)...(19): siRNA sense strand
ugacagcgacuccgacgau

SEQ ID NO: 1159389 - RNA, 19 nt, Homo sapiens
  misc_RNA (1)...(19): siRNA sense strand
gagaacuccuuggacucuu

SEQ ID NO: 1159390 - RNA, 19 nt, Homo sapiens
  misc_RNA (1)...(19): siRNA sense strand
auaaguuucuccgagguuu

SEQ ID NO: 1159391 - RNA, 19 nt, Homo sapiens
  misc_RNA (1)...(19): siRNA sense strand
ugagcagaguggaaugaau

SEQ ID NO: 1159392 - RNA, 19 nt, Homo sapiens
  misc_RNA (1)...(19): siRNA sense strand
uaagaaagugucgggcaaa

SEQ ID NO: 1159393 - RNA, 19 nt, Homo sapiens
  misc_RNA (1)...(19): siRNA sense strand
gacacguuguuaccuagga

SEQ ID NO: 1159394 - RNA, 19 nt, Homo sapiens
  misc_RNA (1)...(19): siRNA sense strand
ugacugccaacaagaauuc

SEQ ID NO: 1159395 - RNA, 19 nt, Homo sapiens
  misc_RNA (1)...(19): siRNA sense strand
gcagaggaaaggcucaaag

SEQ ID NO: 1159396 - RNA, 19 nt, Homo sapiens
  misc_RNA (1)...(19): siRNA sense strand
gaugcgagaggcagaggaa

SEQ ID NO: 1159397 - RNA, 19 nt, Homo sapiens
  misc_RNA (1)...(19): siRNA sense strand
gcagaaaauccuuugaguu

SEQ ID NO: 1159398 - RNA, 19 nt, Homo sapiens
  misc_RNA (1)...(19): siRNA sense strand
gaguggaaugaauaaguuu

SEQ ID NO: 1159399 - RNA, 19 nt, Homo sapiens
  misc_RNA (1)...(19): siRNA sense strand
cagaguggaaugaauaagu

SEQ ID NO: 1159400 - RNA, 19 nt, Homo sapiens
  misc_RNA (1)...(19): siRNA sense strand
guguuuauccgguucuuug

SEQ ID NO: 1159401 - RNA, 19 nt, Homo sapiens
  misc_RNA (1)...(19): siRNA sense strand
gugguggugucccucaaga

SEQ ID NO: 1159402 - RNA, 19 nt, Homo sapiens
  misc_RNA (1)...(19): siRNA sense strand
agaggaaagaagagauuaa

SEQ ID NO: 1159403 - RNA, 19 nt, Homo sapiens
  misc_RNA (1)...(19): siRNA sense strand
caaaugagaauagcacugu

SEQ ID NO: 1159404 - RNA, 19 nt, Homo sapiens
  misc_RNA (1)...(19): siRNA sense strand
gcaaauacagaccacuucu

SEQ ID NO: 1159405 - RNA, 19 nt, Homo sapiens
  misc_RNA (1)...(19): siRNA sense strand
gggcaaauacagaccacuu

SEQ ID NO: 1159406 - RNA, 19 nt, Homo sapiens
  misc_RNA (1)...(19): siRNA sense strand
gaagccaucacugcuauca

SEQ ID NO: 1159407 - RNA, 19 nt, Homo sapiens
  misc_RNA (1)...(19): siRNA sense strand
gaccacuucugcaaaugag

SEQ ID NO: 1159408 - RNA, 19 nt, Homo sapiens
  misc_RNA (1)...(19): siRNA sense strand
aaugagaauagcacuguuu

SEQ ID NO: 1159409 - RNA, 19 nt, Homo sapiens
  misc_RNA (1)...(19): siRNA sense strand
agccaucacugcuaucauc

SEQ ID NO: 1159410 - RNA, 19 nt, Homo sapiens
  misc_RNA (1)...(19): siRNA sense strand
aaaugagaauagcacuguu

SEQ ID NO: 1159411 - RNA, 19 nt, Homo sapiens
  misc_RNA (1)...(19): siRNA sense strand
ugcggaagcuucgggagaa

SEQ ID NO: 1159412 - RNA, 19 nt, Homo sapiens
  misc_RNA (1)...(19): siRNA sense strand
ggcaaauacagaccacuuc

SEQ ID NO: 1159413 - RNA, 19 nt, Homo sapiens
  misc_RNA (1)...(19): siRNA sense strand
agaccacuucugcaaauga

SEQ ID NO: 1159414 - RNA, 19 nt, Homo sapiens
  misc_RNA (1)...(19): siRNA sense strand
caaaugagaauagcacugu

SEQ ID NO: 1159415 - RNA, 19 nt, Homo sapiens
  misc_RNA (1)...(19): siRNA sense strand
gcaaauacagaccacuucu

SEQ ID NO: 1159416 - RNA, 19 nt, Homo sapiens
  misc_RNA (1)...(19): siRNA sense strand
gggcaaauacagaccacuu

SEQ ID NO: 1159417 - RNA, 19 nt, Homo sapiens
  misc_RNA (1)...(19): siRNA sense strand
gaagccaucacugcuauca

SEQ ID NO: 1159418 - RNA, 19 nt, Homo sapiens
  misc_RNA (1)...(19): siRNA sense strand
gaccacuucugcaaaugag

SEQ ID NO: 1159419 - RNA, 19 nt, Homo sapiens
  misc_RNA (1)...(19): siRNA sense strand
aaugagaauagcacuguuu

SEQ ID NO: 1159420 - RNA, 19 nt, Homo sapiens
  misc_RNA (1)...(19): siRNA sense strand
agccaucacugcuaucauc

SEQ ID NO: 1159421 - RNA, 19 nt, Homo sapiens
  misc_RNA (1)...(19): siRNA sense strand
aaaugagaauagcacuguu

SEQ ID NO: 1159422 - RNA, 19 nt, Homo sapiens
  misc_RNA (1)...(19): siRNA sense strand
ugcggaagcuucgggagaa

SEQ ID NO: 1159423 - RNA, 19 nt, Homo sapiens
  misc_RNA (1)...(19): siRNA sense strand
ggcaaauacagaccacuuc

SEQ ID NO: 1159424 - RNA, 19 nt, Homo sapiens
  misc_RNA (1)...(19): siRNA sense strand
agaccacuucugcaaauga

SEQ ID NO: 1159425 - RNA, 19 nt, Homo sapiens
  misc_RNA (1)...(19): siRNA sense strand
caaaugagaauagcacugu

SEQ ID NO: 1159426 - RNA, 19 nt, Homo sapiens
  misc_RNA (1)...(19): siRNA sense strand
gcaaauacagaccacuucu

SEQ ID NO: 1159427 - RNA, 19 nt, Homo sapiens
  misc_RNA (1)...(19): siRNA sense strand
gggcaaauacagaccacuu

SEQ ID NO: 1159428 - RNA, 19 nt, Homo sapiens
  misc_RNA (1)...(19): siRNA sense strand
gaagccaucacugcuauca

SEQ ID NO: 1159429 - RNA, 19 nt, Homo sapiens
  misc_RNA (1)...(19): siRNA sense strand
gaccacuucugcaaaugag

SEQ ID NO: 1159430 - RNA, 19 nt, Homo sapiens
  misc_RNA (1)...(19): siRNA sense strand
aaugagaauagcacuguuu

SEQ ID NO: 1159431 - RNA, 19 nt, Homo sapiens
  misc_RNA (1)...(19): siRNA sense strand
agccaucacugcuaucauc

SEQ ID NO: 1159432 - RNA, 19 nt, Homo sapiens
  misc_RNA (1)...(19): siRNA sense strand
aaaugagaauagcacuguu

SEQ ID NO: 1159433 - RNA, 19 nt, Homo sapiens
  misc_RNA (1)...(19): siRNA sense strand
ugcggaagcuucgggagaa

SEQ ID NO: 1159434 - RNA, 19 nt, Homo sapiens
  misc_RNA (1)...(19): siRNA sense strand
ggcaaauacagaccacuuc

SEQ ID NO: 1159435 - RNA, 19 nt, Homo sapiens
  misc_RNA (1)...(19): siRNA sense strand
agaccacuucugcaaauga

SEQ ID NO: 1159436 - RNA, 19 nt, Homo sapiens
  misc_RNA (1)...(19): siRNA sense strand
ggaggagauugacgacauu

SEQ ID NO: 1159437 - RNA, 19 nt, Homo sapiens
  misc_RNA (1)...(19): siRNA sense strand
gacauuggcuaugcgcuau

SEQ ID NO: 1159438 - RNA, 19 nt, Homo sapiens
  misc_RNA (1)...(19): siRNA sense strand
gaagcggcguagcgacgaa

SEQ ID NO: 1159439 - RNA, 19 nt, Homo sapiens
  misc_RNA (1)...(19): siRNA sense strand
agaagggccugcagaaacu

SEQ ID NO: 1159440 - RNA, 19 nt, Homo sapiens
  misc_RNA (1)...(19): siRNA sense strand
gggaggacaacguggauug

SEQ ID NO: 1159441 - RNA, 19 nt, Homo sapiens
  misc_RNA (1)...(19): siRNA sense strand
gggaugaggaugacaccaa

SEQ ID NO: 1159442 - RNA, 19 nt, Homo sapiens
  misc_RNA (1)...(19): siRNA sense strand
ccagaagggccugcagaaa

SEQ ID NO: 1159443 - RNA, 19 nt, Homo sapiens
  misc_RNA (1)...(19): siRNA sense strand
gcuauacaguggccuacag

SEQ ID NO: 1159444 - RNA, 19 nt, Homo sapiens
  misc_RNA (1)...(19): siRNA sense strand
ggagcugcaggccuacuuu

SEQ ID NO: 1159445 - RNA, 19 nt, Homo sapiens
  misc_RNA (1)...(19): siRNA sense strand
gcccuuagccagccagugu

SEQ ID NO: 1159446 - RNA, 19 nt, Homo sapiens
  misc_RNA (1)...(19): siRNA sense strand
cagaagggccugcagaaac

SEQ ID NO: 1159447 - RNA, 19 nt, Homo sapiens
  misc_RNA (1)...(19): siRNA sense strand
ugacgaccgccuccucuug

SEQ ID NO: 1159448 - RNA, 19 nt, Homo sapiens
  misc_RNA (1)...(19): siRNA sense strand
aggaggagauugacgacau

SEQ ID NO: 1159449 - RNA, 19 nt, Homo sapiens
  misc_RNA (1)...(19): siRNA sense strand
ucccggaacugcccuuugg

SEQ ID NO: 1159450 - RNA, 19 nt, Homo sapiens
  misc_RNA (1)...(19): siRNA sense strand
gauugacgacauuggcuau

SEQ ID NO: 1159451 - RNA, 19 nt, Homo sapiens
  misc_RNA (1)...(19): siRNA sense strand
gaggacaacguggauugga

SEQ ID NO: 1159452 - RNA, 19 nt, Homo sapiens
  misc_RNA (1)...(19): siRNA sense strand
gagcugcaggccuacuuuc

SEQ ID NO: 1159453 - RNA, 19 nt, Homo sapiens
  misc_RNA (1)...(19): siRNA sense strand
ggaggagauugacgacauu

SEQ ID NO: 1159454 - RNA, 19 nt, Homo sapiens
  misc_RNA (1)...(19): siRNA sense strand
gacauuggcuaugcgcuau

SEQ ID NO: 1159455 - RNA, 19 nt, Homo sapiens
  misc_RNA (1)...(19): siRNA sense strand
gaagcggcguagcgacgaa

SEQ ID NO: 1159456 - RNA, 19 nt, Homo sapiens
  misc_RNA (1)...(19): siRNA sense strand
agaagggccugcagaaacu

SEQ ID NO: 1159457 - RNA, 19 nt, Homo sapiens
  misc_RNA (1)...(19): siRNA sense strand
gggaggacaacguggauug

SEQ ID NO: 1159458 - RNA, 19 nt, Homo sapiens
  misc_RNA (1)...(19): siRNA sense strand
gggaugaggaugacaccaa

SEQ ID NO: 1159459 - RNA, 19 nt, Homo sapiens
  misc_RNA (1)...(19): siRNA sense strand
ccagaagggccugcagaaa

SEQ ID NO: 1159460 - RNA, 19 nt, Homo sapiens
  misc_RNA (1)...(19): siRNA sense strand
gcuauacaguggccuacag

SEQ ID NO: 1159461 - RNA, 19 nt, Homo sapiens
  misc_RNA (1)...(19): siRNA sense strand
ggagcugcaggccuacuuu

SEQ ID NO: 1159462 - RNA, 19 nt, Homo sapiens
  misc_RNA (1)...(19): siRNA sense strand
gcccuuagccagccagugu

SEQ ID NO: 1159463 - RNA, 19 nt, Homo sapiens
  misc_RNA (1)...(19): siRNA sense strand
cagaagggccugcagaaac

SEQ ID NO: 1159464 - RNA, 19 nt, Homo sapiens
  misc_RNA (1)...(19): siRNA sense strand
ugacgaccgccuccucuug

SEQ ID NO: 1159465 - RNA, 19 nt, Homo sapiens
  misc_RNA (1)...(19): siRNA sense strand
aggaggagauugacgacau

SEQ ID NO: 1159466 - RNA, 19 nt, Homo sapiens
  misc_RNA (1)...(19): siRNA sense strand
ucccggaacugcccuuugg

SEQ ID NO: 1159467 - RNA, 19 nt, Homo sapiens
  misc_RNA (1)...(19): siRNA sense strand
gauugacgacauuggcuau

SEQ ID NO: 1159468 - RNA, 19 nt, Homo sapiens
  misc_RNA (1)...(19): siRNA sense strand
gaggacaacguggauugga

SEQ ID NO: 1159469 - RNA, 19 nt, Homo sapiens
  misc_RNA (1)...(19): siRNA sense strand
gagcugcaggccuacuuuc

SEQ ID NO: 1159470 - RNA, 19 nt, Homo sapiens
  misc_RNA (1)...(19): siRNA sense strand
gagaaggaguggccuauua

SEQ ID NO: 1159471 - RNA, 19 nt, Homo sapiens
  misc_RNA (1)...(19): siRNA sense strand
gcagggaucuuacaucuau

SEQ ID NO: 1159472 - RNA, 19 nt, Homo sapiens
  misc_RNA (1)...(19): siRNA sense strand
gaucuuacaucuaucagaa

SEQ ID NO: 1159473 - RNA, 19 nt, Homo sapiens
  misc_RNA (1)...(19): siRNA sense strand
ggagaucacugccauugug

SEQ ID NO: 1159474 - RNA, 19 nt, Homo sapiens
  misc_RNA (1)...(19): siRNA sense strand
acaagaaucuagaggagua

SEQ ID NO: 1159475 - RNA, 19 nt, Homo sapiens
  misc_RNA (1)...(19): siRNA sense strand
gagaacggcuguaccuguu

SEQ ID NO: 1159476 - RNA, 19 nt, Homo sapiens
  misc_RNA (1)...(19): siRNA sense strand
gaaaagcacuacucaguug

SEQ ID NO: 1159477 - RNA, 19 nt, Homo sapiens
  misc_RNA (1)...(19): siRNA sense strand
cuucguggcuucaagaaua

SEQ ID NO: 1159478 - RNA, 19 nt, Homo sapiens
  misc_RNA (1)...(19): siRNA sense strand
gaccagaaguuugaaguga

SEQ ID NO: 1159479 - RNA, 19 nt, Homo sapiens
  misc_RNA (1)...(19): siRNA sense strand
gaacggcuguaccuguuug

SEQ ID NO: 1159480 - RNA, 19 nt, Homo sapiens
  misc_RNA (1)...(19): siRNA sense strand
uuaagagucucaaagucua

SEQ ID NO: 1159481 - RNA, 19 nt, Homo sapiens
  misc_RNA (1)...(19): siRNA sense strand
acucagagcuagagaagga

SEQ ID NO: 1159482 - RNA, 19 nt, Homo sapiens
  misc_RNA (1)...(19): siRNA sense strand
ggaguggccuauuaagagu

SEQ ID NO: 1159483 - RNA, 19 nt, Homo sapiens
  misc_RNA (1)...(19): siRNA sense strand
guccugagcuacuuugaga

SEQ ID NO: 1159484 - RNA, 19 nt, Homo sapiens
  misc_RNA (1)...(19): siRNA sense strand
caguguaucuggaagagaa

SEQ ID NO: 1159485 - RNA, 19 nt, Homo sapiens
  misc_RNA (1)...(19): siRNA sense strand
ugagcuacuuugagaauga

SEQ ID NO: 1159486 - RNA, 19 nt, Homo sapiens
  misc_RNA (1)...(19): siRNA sense strand
caaccuggcaauuguguuu

SEQ ID NO: 1159487 - RNA, 19 nt, Homo sapiens
  misc_RNA (1)...(19): siRNA sense strand
gggugagacuggauacuga

SEQ ID NO: 1159488 - RNA, 19 nt, Homo sapiens
  misc_RNA (1)...(19): siRNA sense strand
gcacguggaugauguuucc

SEQ ID NO: 1159489 - RNA, 19 nt, Homo sapiens
  misc_RNA (1)...(19): siRNA sense strand
acaaggacgcuuacucuaa

SEQ ID NO: 1159490 - RNA, 19 nt, Homo sapiens
  misc_RNA (1)...(19): siRNA sense strand
ggacagaaacacuuaucga

SEQ ID NO: 1159491 - RNA, 19 nt, Homo sapiens
  misc_RNA (1)...(19): siRNA sense strand
guucagugcuucucagaca

SEQ ID NO: 1159492 - RNA, 19 nt, Homo sapiens
  misc_RNA (1)...(19): siRNA sense strand
ggaacaaccggaccacaga

SEQ ID NO: 1159493 - RNA, 19 nt, Homo sapiens
  misc_RNA (1)...(19): siRNA sense strand
gggcugggaucaacugcuu

SEQ ID NO: 1159494 - RNA, 19 nt, Homo sapiens
  misc_RNA (1)...(19): siRNA sense strand
uggaagaccucauuaacca

SEQ ID NO: 1159495 - RNA, 19 nt, Homo sapiens
  misc_RNA (1)...(19): siRNA sense strand
gggacaaagugcagcucua

SEQ ID NO: 1159496 - RNA, 19 nt, Homo sapiens
  misc_RNA (1)...(19): siRNA sense strand
uaacaaggacgcuuacucu

SEQ ID NO: 1159497 - RNA, 19 nt, Homo sapiens
  misc_RNA (1)...(19): siRNA sense strand
gcuggaggccucagagauu

SEQ ID NO: 1159498 - RNA, 19 nt, Homo sapiens
  misc_RNA (1)...(19): siRNA sense strand
aagugcagcucuacaagaa

SEQ ID NO: 1159499 - RNA, 19 nt, Homo sapiens
  misc_RNA (1)...(19): siRNA sense strand
ucagggagaaggacuauug

SEQ ID NO: 1159500 - RNA, 19 nt, Homo sapiens
  misc_RNA (1)...(19): siRNA sense strand
ggaagcagcgggaggagau

SEQ ID NO: 1159501 - RNA, 19 nt, Homo sapiens
  misc_RNA (1)...(19): siRNA sense strand
gugcagcucuacaagaauc

SEQ ID NO: 1159502 - RNA, 19 nt, Homo sapiens
  misc_RNA (1)...(19): siRNA sense strand
gaggagaucacugccauug

SEQ ID NO: 1159503 - RNA, 19 nt, Homo sapiens
  misc_RNA (1)...(19): siRNA sense strand
gcgagcagcacguggauga

SEQ ID NO: 1159504 - RNA, 19 nt, Homo sapiens
  misc_RNA (1)...(19): siRNA sense strand
gaagagccgcugcaacuac

SEQ ID NO: 1159505 - RNA, 19 nt, Homo sapiens
  misc_RNA (1)...(19): siRNA sense strand
gcgaagagccgcugcaacu

SEQ ID NO: 1159506 - RNA, 19 nt, Homo sapiens
  misc_RNA (1)...(19): siRNA sense strand
ggagcuccgugcugucuuc

SEQ ID NO: 1159507 - RNA, 19 nt, Homo sapiens
  misc_RNA (1)...(19): siRNA sense strand
gcuuugagcacaccuuuga

SEQ ID NO: 1159508 - RNA, 19 nt, Homo sapiens
  misc_RNA (1)...(19): siRNA sense strand
ccagaaguuugaagugauc

SEQ ID NO: 1159509 - RNA, 19 nt, Homo sapiens
  misc_RNA (1)...(19): siRNA sense strand
gcagagacugagcagcaua

SEQ ID NO: 1159510 - RNA, 19 nt, Homo sapiens
  misc_RNA (1)...(19): siRNA sense strand
gagcgaaggaggacacugu

SEQ ID NO: 1159511 - RNA, 19 nt, Homo sapiens
  misc_RNA (1)...(19): siRNA sense strand
agaaggaguggccuauuaa

SEQ ID NO: 1159512 - RNA, 19 nt, Homo sapiens
  misc_RNA (1)...(19): siRNA sense strand
gacuucaucugcacagugu

SEQ ID NO: 1159513 - RNA, 19 nt, Homo sapiens
  misc_RNA (1)...(19): siRNA sense strand
agacugagcagcauaucaa

SEQ ID NO: 1159514 - RNA, 19 nt, Homo sapiens
  misc_RNA (1)...(19): siRNA sense strand
agaagaaggcagagacuga

SEQ ID NO: 1159515 - RNA, 19 nt, Homo sapiens
  misc_RNA (1)...(19): siRNA sense strand
ccgcagggaucuuacaucu

SEQ ID NO: 1159516 - RNA, 19 nt, Homo sapiens
  misc_RNA (1)...(19): siRNA sense strand
gggagugguucgcuaccuu

SEQ ID NO: 1159517 - RNA, 19 nt, Homo sapiens
  misc_RNA (1)...(19): siRNA sense strand
gcacaguguaucuggaaga

SEQ ID NO: 1159518 - RNA, 19 nt, Homo sapiens
  misc_RNA (1)...(19): siRNA sense strand
gaaggaggacacuguacau

SEQ ID NO: 1159519 - RNA, 19 nt, Homo sapiens
  misc_RNA (1)...(19): siRNA sense strand
aggaagguguggacagaaa

SEQ ID NO: 1159520 - RNA, 19 nt, Homo sapiens
  misc_RNA (1)...(19): siRNA sense strand
gaucaccugcgauacuuug

SEQ ID NO: 1159521 - RNA, 19 nt, Homo sapiens
  misc_RNA (1)...(19): siRNA sense strand
auacugaucaccugcgaua

SEQ ID NO: 1159522 - RNA, 19 nt, Homo sapiens
  misc_RNA (1)...(19): siRNA sense strand
ggagugguucgcuaccuuu

SEQ ID NO: 1159523 - RNA, 19 nt, Homo sapiens
  misc_RNA (1)...(19): siRNA sense strand
agacagagaaacaugagaa

SEQ ID NO: 1159524 - RNA, 19 nt, Homo sapiens
  misc_RNA (1)...(19): siRNA sense strand
gcaugccggugacuucauc

SEQ ID NO: 1159525 - RNA, 19 nt, Homo sapiens
  misc_RNA (1)...(19): siRNA sense strand
gggaugaggaagaggauga

SEQ ID NO: 1159526 - RNA, 19 nt, Homo sapiens
  misc_RNA (1)...(19): siRNA sense strand
acaguaacaaggacgcuua

SEQ ID NO: 1159527 - RNA, 19 nt, Homo sapiens
  misc_RNA (1)...(19): siRNA sense strand
gaagagaagaaggcagaga

SEQ ID NO: 1159528 - RNA, 19 nt, Homo sapiens
  misc_RNA (1)...(19): siRNA sense strand
aggaagagcucaggaagca

SEQ ID NO: 1159529 - RNA, 19 nt, Homo sapiens
  misc_RNA (1)...(19): siRNA sense strand
gugcacaaccuggcaauug

SEQ ID NO: 1159530 - RNA, 19 nt, Homo sapiens
  misc_RNA (1)...(19): siRNA sense strand
gagggcaucuaccgcaagu

SEQ ID NO: 1159531 - RNA, 19 nt, Homo sapiens
  misc_RNA (1)...(19): siRNA sense strand
gagaaugagcgggcaguga

SEQ ID NO: 1159532 - RNA, 19 nt, Homo sapiens
  misc_RNA (1)...(19): siRNA sense strand
cacaguggcuuccucuaca

SEQ ID NO: 1159533 - RNA, 19 nt, Homo sapiens
  misc_RNA (1)...(19): siRNA sense strand
acaggaagguguggacaga

SEQ ID NO: 1159534 - RNA, 19 nt, Homo sapiens
  misc_RNA (1)...(19): siRNA sense strand
uuaucgagcucuucuuaca

SEQ ID NO: 1159535 - RNA, 19 nt, Homo sapiens
  misc_RNA (1)...(19): siRNA sense strand
ggucaaguguauugcuaag

SEQ ID NO: 1159536 - RNA, 19 nt, Homo sapiens
  misc_RNA (1)...(19): siRNA sense strand
ucagccaccuguacugugu

SEQ ID NO: 1159537 - RNA, 19 nt, Homo sapiens
  misc_RNA (1)...(19): siRNA sense strand
cacaaacaaccgaaccuuu

SEQ ID NO: 1159538 - RNA, 19 nt, Homo sapiens
  misc_RNA (1)...(19): siRNA sense strand
cagaugggcaggacuacaa

SEQ ID NO: 1159539 - RNA, 19 nt, Homo sapiens
  misc_RNA (1)...(19): siRNA sense strand
agacagaugggcaggacua

SEQ ID NO: 1159540 - RNA, 19 nt, Homo sapiens
  misc_RNA (1)...(19): siRNA sense strand
uuacaucuaucagaaacga

SEQ ID NO: 1159541 - RNA, 19 nt, Homo sapiens
  misc_RNA (1)...(19): siRNA sense strand
gcauuggcaucaccuucau

SEQ ID NO: 1159542 - RNA, 19 nt, Homo sapiens
  misc_RNA (1)...(19): siRNA sense strand
ggacaaagugcagcucuac

SEQ ID NO: 1159543 - RNA, 19 nt, Homo sapiens
  misc_RNA (1)...(19): siRNA sense strand
ggaccagaaguuugaagug

SEQ ID NO: 1159544 - RNA, 19 nt, Homo sapiens
  misc_RNA (1)...(19): siRNA sense strand
cagagaaacaugagaagca

SEQ ID NO: 1159545 - RNA, 19 nt, Homo sapiens
  misc_RNA (1)...(19): siRNA sense strand
gcucaugagugggucaagu

SEQ ID NO: 1159546 - RNA, 19 nt, Homo sapiens
  misc_RNA (1)...(19): siRNA sense strand
cccaauggcggauggcaua

SEQ ID NO: 1159547 - RNA, 19 nt, Homo sapiens
  misc_RNA (1)...(19): siRNA sense strand
acaaagugcagcucuacaa

SEQ ID NO: 1159548 - RNA, 19 nt, Homo sapiens
  misc_RNA (1)...(19): siRNA sense strand
uugaagugaucacaaacaa

SEQ ID NO: 1159549 - RNA, 19 nt, Homo sapiens
  misc_RNA (1)...(19): siRNA sense strand
ggaaaagcacuacucaguu

SEQ ID NO: 1159550 - RNA, 19 nt, Homo sapiens
  misc_RNA (1)...(19): siRNA sense strand
gaaggaguggccuauuaag

SEQ ID NO: 1159551 - RNA, 19 nt, Homo sapiens
  misc_RNA (1)...(19): siRNA sense strand
gagcagcacguggaugaug

SEQ ID NO: 1159552 - RNA, 19 nt, Homo sapiens
  misc_RNA (1)...(19): siRNA sense strand
gggcaucuaccgcaagugu

SEQ ID NO: 1159553 - RNA, 19 nt, Homo sapiens
  misc_RNA (1)...(19): siRNA sense strand
gagggcugguucucucuca

SEQ ID NO: 1159554 - RNA, 19 nt, Homo sapiens
  misc_RNA (1)...(19): siRNA sense strand
gagcuucguggcuucaaga

SEQ ID NO: 1159555 - RNA, 19 nt, Homo sapiens
  misc_RNA (1)...(19): siRNA sense strand
gaagguguggacagaaaca

SEQ ID NO: 1159556 - RNA, 19 nt, Homo sapiens
  misc_RNA (1)...(19): siRNA sense strand
gcaagugugggcagacauc

SEQ ID NO: 1159557 - RNA, 19 nt, Homo sapiens
  misc_RNA (1)...(19): siRNA sense strand
uauuaagagucucaaaguc

SEQ ID NO: 1159558 - RNA, 19 nt, Homo sapiens
  misc_RNA (1)...(19): siRNA sense strand
cuggcuggcuggacaagaa

SEQ ID NO: 1159559 - RNA, 19 nt, Homo sapiens
  misc_RNA (1)...(19): siRNA sense strand
gcuucacaguggugcauga

SEQ ID NO: 1159560 - RNA, 19 nt, Homo sapiens
  misc_RNA (1)...(19): siRNA sense strand
cgaagagccgcugcaacua

SEQ ID NO: 1159561 - RNA, 19 nt, Homo sapiens
  misc_RNA (1)...(19): siRNA sense strand
ugggucaaguguauugcua

SEQ ID NO: 1159562 - RNA, 19 nt, Homo sapiens
  misc_RNA (1)...(19): siRNA sense strand
uagagaaggagcagugguu

SEQ ID NO: 1159563 - RNA, 19 nt, Homo sapiens
  misc_RNA (1)...(19): siRNA sense strand
aggaugaccacgccuauga

SEQ ID NO: 1159564 - RNA, 19 nt, Homo sapiens
  misc_RNA (1)...(19): siRNA sense strand
agugguaccucugcuguga

SEQ ID NO: 1159565 - RNA, 19 nt, Homo sapiens
  misc_RNA (1)...(19): siRNA sense strand
uggaggccaugcugcugua

SEQ ID NO: 1159566 - RNA, 19 nt, Homo sapiens
  misc_RNA (1)...(19): siRNA sense strand
ggacuauuggaccugcuuu

SEQ ID NO: 1159567 - RNA, 19 nt, Homo sapiens
  misc_RNA (1)...(19): siRNA sense strand
cgaaggaggacacuguaca

SEQ ID NO: 1159568 - RNA, 19 nt, Homo sapiens
  misc_RNA (1)...(19): siRNA sense strand
gagugggucaaguguauug

SEQ ID NO: 1159569 - RNA, 19 nt, Homo sapiens
  misc_RNA (1)...(19): siRNA sense strand
augagugggucaaguguau

SEQ ID NO: 1159570 - RNA, 19 nt, Homo sapiens
  misc_RNA (1)...(19): siRNA sense strand
gagaaggaguggccuauua

SEQ ID NO: 1159571 - RNA, 19 nt, Homo sapiens
  misc_RNA (1)...(19): siRNA sense strand
gcagggaucuuacaucuau

SEQ ID NO: 1159572 - RNA, 19 nt, Homo sapiens
  misc_RNA (1)...(19): siRNA sense strand
gaucuuacaucuaucagaa

SEQ ID NO: 1159573 - RNA, 19 nt, Homo sapiens
  misc_RNA (1)...(19): siRNA sense strand
ggagaucacugccauugug

SEQ ID NO: 1159574 - RNA, 19 nt, Homo sapiens
  misc_RNA (1)...(19): siRNA sense strand
acaagaaucuagaggagua

SEQ ID NO: 1159575 - RNA, 19 nt, Homo sapiens
  misc_RNA (1)...(19): siRNA sense strand
gagaacggcuguaccuguu

SEQ ID NO: 1159576 - RNA, 19 nt, Homo sapiens
  misc_RNA (1)...(19): siRNA sense strand
gaaaagcacuacucaguug

SEQ ID NO: 1159577 - RNA, 19 nt, Homo sapiens
  misc_RNA (1)...(19): siRNA sense strand
cuucguggcuucaagaaua

SEQ ID NO: 1159578 - RNA, 19 nt, Homo sapiens
  misc_RNA (1)...(19): siRNA sense strand
gaccagaaguuugaaguga

SEQ ID NO: 1159579 - RNA, 19 nt, Homo sapiens
  misc_RNA (1)...(19): siRNA sense strand
gaacggcuguaccuguuug

SEQ ID NO: 1159580 - RNA, 19 nt, Homo sapiens
  misc_RNA (1)...(19): siRNA sense strand
uuaagagucucaaagucua

SEQ ID NO: 1159581 - RNA, 19 nt, Homo sapiens
  misc_RNA (1)...(19): siRNA sense strand
acucagagcuagagaagga

SEQ ID NO: 1159582 - RNA, 19 nt, Homo sapiens
  misc_RNA (1)...(19): siRNA sense strand
ggaguggccuauuaagagu

SEQ ID NO: 1159583 - RNA, 19 nt, Homo sapiens
  misc_RNA (1)...(19): siRNA sense strand
guccugagcuacuuugaga

SEQ ID NO: 1159584 - RNA, 19 nt, Homo sapiens
  misc_RNA (1)...(19): siRNA sense strand
caguguaucuggaagagaa

SEQ ID NO: 1159585 - RNA, 19 nt, Homo sapiens
  misc_RNA (1)...(19): siRNA sense strand
ugagcuacuuugagaauga

SEQ ID NO: 1159586 - RNA, 19 nt, Homo sapiens
  misc_RNA (1)...(19): siRNA sense strand
caaccuggcaauuguguuu

SEQ ID NO: 1159587 - RNA, 19 nt, Homo sapiens
  misc_RNA (1)...(19): siRNA sense strand
gggugagacuggauacuga

SEQ ID NO: 1159588 - RNA, 19 nt, Homo sapiens
  misc_RNA (1)...(19): siRNA sense strand
gcacguggaugauguuucc

SEQ ID NO: 1159589 - RNA, 19 nt, Homo sapiens
  misc_RNA (1)...(19): siRNA sense strand
acaaggacgcuuacucuaa

SEQ ID NO: 1159590 - RNA, 19 nt, Homo sapiens
  misc_RNA (1)...(19): siRNA sense strand
ggacagaaacacuuaucga

SEQ ID NO: 1159591 - RNA, 19 nt, Homo sapiens
  misc_RNA (1)...(19): siRNA sense strand
guucagugcuucucagaca

SEQ ID NO: 1159592 - RNA, 19 nt, Homo sapiens
  misc_RNA (1)...(19): siRNA sense strand
ggaacaaccggaccacaga

SEQ ID NO: 1159593 - RNA, 19 nt, Homo sapiens
  misc_RNA (1)...(19): siRNA sense strand
gggcugggaucaacugcuu

SEQ ID NO: 1159594 - RNA, 19 nt, Homo sapiens
  misc_RNA (1)...(19): siRNA sense strand
uggaagaccucauuaacca

SEQ ID NO: 1159595 - RNA, 19 nt, Homo sapiens
  misc_RNA (1)...(19): siRNA sense strand
gggacaaagugcagcucua

SEQ ID NO: 1159596 - RNA, 19 nt, Homo sapiens
  misc_RNA (1)...(19): siRNA sense strand
uaacaaggacgcuuacucu

SEQ ID NO: 1159597 - RNA, 19 nt, Homo sapiens
  misc_RNA (1)...(19): siRNA sense strand
gcuggaggccucagagauu

SEQ ID NO: 1159598 - RNA, 19 nt, Homo sapiens
  misc_RNA (1)...(19): siRNA sense strand
aagugcagcucuacaagaa

SEQ ID NO: 1159599 - RNA, 19 nt, Homo sapiens
  misc_RNA (1)...(19): siRNA sense strand
ucagggagaaggacuauug

SEQ ID NO: 1159600 - RNA, 19 nt, Homo sapiens
  misc_RNA (1)...(19): siRNA sense strand
ggaagcagcgggaggagau

SEQ ID NO: 1159601 - RNA, 19 nt, Homo sapiens
  misc_RNA (1)...(19): siRNA sense strand
gugcagcucuacaagaauc

SEQ ID NO: 1159602 - RNA, 19 nt, Homo sapiens
  misc_RNA (1)...(19): siRNA sense strand
gaggagaucacugccauug

SEQ ID NO: 1159603 - RNA, 19 nt, Homo sapiens
  misc_RNA (1)...(19): siRNA sense strand
gcgagcagcacguggauga

SEQ ID NO: 1159604 - RNA, 19 nt, Homo sapiens
  misc_RNA (1)...(19): siRNA sense strand
gaagagccgcugcaacuac

SEQ ID NO: 1159605 - RNA, 19 nt, Homo sapiens
  misc_RNA (1)...(19): siRNA sense strand
gcgaagagccgcugcaacu

SEQ ID NO: 1159606 - RNA, 19 nt, Homo sapiens
  misc_RNA (1)...(19): siRNA sense strand
ggagcuccgugcugucuuc

SEQ ID NO: 1159607 - RNA, 19 nt, Homo sapiens
  misc_RNA (1)...(19): siRNA sense strand
gcuuugagcacaccuuuga

SEQ ID NO: 1159608 - RNA, 19 nt, Homo sapiens
  misc_RNA (1)...(19): siRNA sense strand
ccagaaguuugaagugauc

SEQ ID NO: 1159609 - RNA, 19 nt, Homo sapiens
  misc_RNA (1)...(19): siRNA sense strand
gcagagacugagcagcaua

SEQ ID NO: 1159610 - RNA, 19 nt, Homo sapiens
  misc_RNA (1)...(19): siRNA sense strand
gagcgaaggaggacacugu

SEQ ID NO: 1159611 - RNA, 19 nt, Homo sapiens
  misc_RNA (1)...(19): siRNA sense strand
agaaggaguggccuauuaa

SEQ ID NO: 1159612 - RNA, 19 nt, Homo sapiens
  misc_RNA (1)...(19): siRNA sense strand
gacuucaucugcacagugu

SEQ ID NO: 1159613 - RNA, 19 nt, Homo sapiens
  misc_RNA (1)...(19): siRNA sense strand
agacugagcagcauaucaa

SEQ ID NO: 1159614 - RNA, 19 nt, Homo sapiens
  misc_RNA (1)...(19): siRNA sense strand
agaagaaggcagagacuga

SEQ ID NO: 1159615 - RNA, 19 nt, Homo sapiens
  misc_RNA (1)...(19): siRNA sense strand
ccgcagggaucuuacaucu

SEQ ID NO: 1159616 - RNA, 19 nt, Homo sapiens
  misc_RNA (1)...(19): siRNA sense strand
gggagugguucgcuaccuu

SEQ ID NO: 1159617 - RNA, 19 nt, Homo sapiens
  misc_RNA (1)...(19): siRNA sense strand
gcacaguguaucuggaaga

SEQ ID NO: 1159618 - RNA, 19 nt, Homo sapiens
  misc_RNA (1)...(19): siRNA sense strand
gaaggaggacacuguacau

SEQ ID NO: 1159619 - RNA, 19 nt, Homo sapiens
  misc_RNA (1)...(19): siRNA sense strand
aggaagguguggacagaaa

SEQ ID NO: 1159620 - RNA, 19 nt, Homo sapiens
  misc_RNA (1)...(19): siRNA sense strand
gaucaccugcgauacuuug

SEQ ID NO: 1159621 - RNA, 19 nt, Homo sapiens
  misc_RNA (1)...(19): siRNA sense strand
auacugaucaccugcgaua

SEQ ID NO: 1159622 - RNA, 19 nt, Homo sapiens
  misc_RNA (1)...(19): siRNA sense strand
ggagugguucgcuaccuuu

SEQ ID NO: 1159623 - RNA, 19 nt, Homo sapiens
  misc_RNA (1)...(19): siRNA sense strand
agacagagaaacaugagaa

SEQ ID NO: 1159624 - RNA, 19 nt, Homo sapiens
  misc_RNA (1)...(19): siRNA sense strand
gcaugccggugacuucauc

SEQ ID NO: 1159625 - RNA, 19 nt, Homo sapiens
  misc_RNA (1)...(19): siRNA sense strand
gggaugaggaagaggauga

SEQ ID NO: 1159626 - RNA, 19 nt, Homo sapiens
  misc_RNA (1)...(19): siRNA sense strand
acaguaacaaggacgcuua

SEQ ID NO: 1159627 - RNA, 19 nt, Homo sapiens
  misc_RNA (1)...(19): siRNA sense strand
gaagagaagaaggcagaga

SEQ ID NO: 1159628 - RNA, 19 nt, Homo sapiens
  misc_RNA (1)...(19): siRNA sense strand
aggaagagcucaggaagca

SEQ ID NO: 1159629 - RNA, 19 nt, Homo sapiens
  misc_RNA (1)...(19): siRNA sense strand
gugcacaaccuggcaauug

SEQ ID NO: 1159630 - RNA, 19 nt, Homo sapiens
  misc_RNA (1)...(19): siRNA sense strand
gagggcaucuaccgcaagu

SEQ ID NO: 1159631 - RNA, 19 nt, Homo sapiens
  misc_RNA (1)...(19): siRNA sense strand
gagaaugagcgggcaguga

SEQ ID NO: 1159632 - RNA, 19 nt, Homo sapiens
  misc_RNA (1)...(19): siRNA sense strand
cacaguggcuuccucuaca

SEQ ID NO: 1159633 - RNA, 19 nt, Homo sapiens
  misc_RNA (1)...(19): siRNA sense strand
acaggaagguguggacaga

SEQ ID NO: 1159634 - RNA, 19 nt, Homo sapiens
  misc_RNA (1)...(19): siRNA sense strand
uuaucgagcucuucuuaca

SEQ ID NO: 1159635 - RNA, 19 nt, Homo sapiens
  misc_RNA (1)...(19): siRNA sense strand
ggucaaguguauugcuaag

SEQ ID NO: 1159636 - RNA, 19 nt, Homo sapiens
  misc_RNA (1)...(19): siRNA sense strand
ucagccaccuguacugugu

SEQ ID NO: 1159637 - RNA, 19 nt, Homo sapiens
  misc_RNA (1)...(19): siRNA sense strand
cacaaacaaccgaaccuuu

SEQ ID NO: 1159638 - RNA, 19 nt, Homo sapiens
  misc_RNA (1)...(19): siRNA sense strand
cagaugggcaggacuacaa

SEQ ID NO: 1159639 - RNA, 19 nt, Homo sapiens
  misc_RNA (1)...(19): siRNA sense strand
agacagaugggcaggacua

SEQ ID NO: 1159640 - RNA, 19 nt, Homo sapiens
  misc_RNA (1)...(19): siRNA sense strand
uuacaucuaucagaaacga

SEQ ID NO: 1159641 - RNA, 19 nt, Homo sapiens
  misc_RNA (1)...(19): siRNA sense strand
gcauuggcaucaccuucau

SEQ ID NO: 1159642 - RNA, 19 nt, Homo sapiens
  misc_RNA (1)...(19): siRNA sense strand
ggacaaagugcagcucuac

SEQ ID NO: 1159643 - RNA, 19 nt, Homo sapiens
  misc_RNA (1)...(19): siRNA sense strand
ggaccagaaguuugaagug

SEQ ID NO: 1159644 - RNA, 19 nt, Homo sapiens
  misc_RNA (1)...(19): siRNA sense strand
cagagaaacaugagaagca

SEQ ID NO: 1159645 - RNA, 19 nt, Homo sapiens
  misc_RNA (1)...(19): siRNA sense strand
gcucaugagugggucaagu

SEQ ID NO: 1159646 - RNA, 19 nt, Homo sapiens
  misc_RNA (1)...(19): siRNA sense strand
cccaauggcggauggcaua

SEQ ID NO: 1159647 - RNA, 19 nt, Homo sapiens
  misc_RNA (1)...(19): siRNA sense strand
acaaagugcagcucuacaa

SEQ ID NO: 1159648 - RNA, 19 nt, Homo sapiens
  misc_RNA (1)...(19): siRNA sense strand
uugaagugaucacaaacaa

SEQ ID NO: 1159649 - RNA, 19 nt, Homo sapiens
  misc_RNA (1)...(19): siRNA sense strand
ggaaaagcacuacucaguu

SEQ ID NO: 1159650 - RNA, 19 nt, Homo sapiens
  misc_RNA (1)...(19): siRNA sense strand
gaaggaguggccuauuaag

SEQ ID NO: 1159651 - RNA, 19 nt, Homo sapiens
  misc_RNA (1)...(19): siRNA sense strand
gagcagcacguggaugaug

SEQ ID NO: 1159652 - RNA, 19 nt, Homo sapiens
  misc_RNA (1)...(19): siRNA sense strand
gggcaucuaccgcaagugu

SEQ ID NO: 1159653 - RNA, 19 nt, Homo sapiens
  misc_RNA (1)...(19): siRNA sense strand
gagggcugguucucucuca

SEQ ID NO: 1159654 - RNA, 19 nt, Homo sapiens
  misc_RNA (1)...(19): siRNA sense strand
gagcuucguggcuucaaga

SEQ ID NO: 1159655 - RNA, 19 nt, Homo sapiens
  misc_RNA (1)...(19): siRNA sense strand
gaagguguggacagaaaca

SEQ ID NO: 1159656 - RNA, 19 nt, Homo sapiens
  misc_RNA (1)...(19): siRNA sense strand
gcaagugugggcagacauc

SEQ ID NO: 1159657 - RNA, 19 nt, Homo sapiens
  misc_RNA (1)...(19): siRNA sense strand
uauuaagagucucaaaguc

SEQ ID NO: 1159658 - RNA, 19 nt, Homo sapiens
  misc_RNA (1)...(19): siRNA sense strand
cuggcuggcuggacaagaa

SEQ ID NO: 1159659 - RNA, 19 nt, Homo sapiens
  misc_RNA (1)...(19): siRNA sense strand
gcuucacaguggugcauga

SEQ ID NO: 1159660 - RNA, 19 nt, Homo sapiens
  misc_RNA (1)...(19): siRNA sense strand
cgaagagccgcugcaacua

SEQ ID NO: 1159661 - RNA, 19 nt, Homo sapiens
  misc_RNA (1)...(19): siRNA sense strand
ugggucaaguguauugcua

SEQ ID NO: 1159662 - RNA, 19 nt, Homo sapiens
  misc_RNA (1)...(19): siRNA sense strand
uagagaaggagcagugguu

SEQ ID NO: 1159663 - RNA, 19 nt, Homo sapiens
  misc_RNA (1)...(19): siRNA sense strand
aggaugaccacgccuauga

SEQ ID NO: 1159664 - RNA, 19 nt, Homo sapiens
  misc_RNA (1)...(19): siRNA sense strand
agugguaccucugcuguga

SEQ ID NO: 1159665 - RNA, 19 nt, Homo sapiens
  misc_RNA (1)...(19): siRNA sense strand
uggaggccaugcugcugua

SEQ ID NO: 1159666 - RNA, 19 nt, Homo sapiens
  misc_RNA (1)...(19): siRNA sense strand
ggacuauuggaccugcuuu

SEQ ID NO: 1159667 - RNA, 19 nt, Homo sapiens
  misc_RNA (1)...(19): siRNA sense strand
cgaaggaggacacuguaca

SEQ ID NO: 1159668 - RNA, 19 nt, Homo sapiens
  misc_RNA (1)...(19): siRNA sense strand
gagugggucaaguguauug

SEQ ID NO: 1159669 - RNA, 19 nt, Homo sapiens
  misc_RNA (1)...(19): siRNA sense strand
augagugggucaaguguau

SEQ ID NO: 1159670 - RNA, 19 nt, Homo sapiens
  misc_RNA (1)...(19): siRNA sense strand
gcaagaagcuuuaaauuga

SEQ ID NO: 1159671 - RNA, 19 nt, Homo sapiens
  misc_RNA (1)...(19): siRNA sense strand
gaacccgacuguaguauua

SEQ ID NO: 1159672 - RNA, 19 nt, Homo sapiens
  misc_RNA (1)...(19): siRNA sense strand
gaacagcuguauagcauuu

SEQ ID NO: 1159673 - RNA, 19 nt, Homo sapiens
  misc_RNA (1)...(19): siRNA sense strand
gauggaagcagaagaauua

SEQ ID NO: 1159674 - RNA, 19 nt, Homo sapiens
  misc_RNA (1)...(19): siRNA sense strand
ggacucugaucauaaguua

SEQ ID NO: 1159675 - RNA, 19 nt, Homo sapiens
  misc_RNA (1)...(19): siRNA sense strand
caaagaggacuucuauuua

SEQ ID NO: 1159676 - RNA, 19 nt, Homo sapiens
  misc_RNA (1)...(19): siRNA sense strand
cuaaggagcucuacccaua

SEQ ID NO: 1159677 - RNA, 19 nt, Homo sapiens
  misc_RNA (1)...(19): siRNA sense strand
gaucauaaguuaccaucaa

SEQ ID NO: 1159678 - RNA, 19 nt, Homo sapiens
  misc_RNA (1)...(19): siRNA sense strand
gaaaccggauguucuagaa

SEQ ID NO: 1159679 - RNA, 19 nt, Homo sapiens
  misc_RNA (1)...(19): siRNA sense strand
caagaaagcugggcaaagu

SEQ ID NO: 1159680 - RNA, 19 nt, Homo sapiens
  misc_RNA (1)...(19): siRNA sense strand
gaaggaaucuugaaaauca

SEQ ID NO: 1159681 - RNA, 19 nt, Homo sapiens
  misc_RNA (1)...(19): siRNA sense strand
uaacagaagcugacuauga

SEQ ID NO: 1159682 - RNA, 19 nt, Homo sapiens
  misc_RNA (1)...(19): siRNA sense strand
ggagauagaaugcacuuaa

SEQ ID NO: 1159683 - RNA, 19 nt, Homo sapiens
  misc_RNA (1)...(19): siRNA sense strand
guucagaaaugcucagaaa

SEQ ID NO: 1159684 - RNA, 19 nt, Homo sapiens
  misc_RNA (1)...(19): siRNA sense strand
gcacaaggacgauaaacuu

SEQ ID NO: 1159685 - RNA, 19 nt, Homo sapiens
  misc_RNA (1)...(19): siRNA sense strand
acaaagaggacuucuauuu

SEQ ID NO: 1159686 - RNA, 19 nt, Homo sapiens
  misc_RNA (1)...(19): siRNA sense strand
cuaaagacauugaggaaga

SEQ ID NO: 1159687 - RNA, 19 nt, Homo sapiens
  misc_RNA (1)...(19): siRNA sense strand
ggugauccuuugcauauaa

SEQ ID NO: 1159688 - RNA, 19 nt, Homo sapiens
  misc_RNA (1)...(19): siRNA sense strand
gaauuucucuaccauaaca

SEQ ID NO: 1159689 - RNA, 19 nt, Homo sapiens
  misc_RNA (1)...(19): siRNA sense strand
gguuuaggaugcaaauaua

SEQ ID NO: 1159690 - RNA, 19 nt, Homo sapiens
  misc_RNA (1)...(19): siRNA sense strand
cauauuggaucucugcuuu

SEQ ID NO: 1159691 - RNA, 19 nt, Homo sapiens
  misc_RNA (1)...(19): siRNA sense strand
gaagaucaagucaaacaaa

SEQ ID NO: 1159692 - RNA, 19 nt, Homo sapiens
  misc_RNA (1)...(19): siRNA sense strand
gaaaugcucagaaaucaau

SEQ ID NO: 1159693 - RNA, 19 nt, Homo sapiens
  misc_RNA (1)...(19): siRNA sense strand
ucaaacaaauggacauaga

SEQ ID NO: 1159694 - RNA, 19 nt, Homo sapiens
  misc_RNA (1)...(19): siRNA sense strand
ggucaacucuucuacaaag

SEQ ID NO: 1159695 - RNA, 19 nt, Homo sapiens
  misc_RNA (1)...(19): siRNA sense strand
guacagaugguaaugcuuu

SEQ ID NO: 1159696 - RNA, 19 nt, Homo sapiens
  misc_RNA (1)...(19): siRNA sense strand
ggaaggaacccgacuguag

SEQ ID NO: 1159697 - RNA, 19 nt, Homo sapiens
  misc_RNA (1)...(19): siRNA sense strand
gggacaaacuagugaagaa

SEQ ID NO: 1159698 - RNA, 19 nt, Homo sapiens
  misc_RNA (1)...(19): siRNA sense strand
gaugacaaggaaagaauua

SEQ ID NO: 1159699 - RNA, 19 nt, Homo sapiens
  misc_RNA (1)...(19): siRNA sense strand
caaagaagaaccauccaaa

SEQ ID NO: 1159700 - RNA, 19 nt, Homo sapiens
  misc_RNA (1)...(19): siRNA sense strand
uggaauuucucuaccauaa

SEQ ID NO: 1159701 - RNA, 19 nt, Homo sapiens
  misc_RNA (1)...(19): siRNA sense strand
gaagcugacuaugauuuga

SEQ ID NO: 1159702 - RNA, 19 nt, Homo sapiens
  misc_RNA (1)...(19): siRNA sense strand
ugaaacaucucaagcucaa

SEQ ID NO: 1159703 - RNA, 19 nt, Homo sapiens
  misc_RNA (1)...(19): siRNA sense strand
gcucagaaaucaaucacau

SEQ ID NO: 1159704 - RNA, 19 nt, Homo sapiens
  misc_RNA (1)...(19): siRNA sense strand
cagaaaugcucagaaauca

SEQ ID NO: 1159705 - RNA, 19 nt, Homo sapiens
  misc_RNA (1)...(19): siRNA sense strand
gauagaaugcacuuaagaa

SEQ ID NO: 1159706 - RNA, 19 nt, Homo sapiens
  misc_RNA (1)...(19): siRNA sense strand
ugaaguauauguagaaagg

SEQ ID NO: 1159707 - RNA, 19 nt, Homo sapiens
  misc_RNA (1)...(19): siRNA sense strand
ggagauuuguuaauugaag

SEQ ID NO: 1159708 - RNA, 19 nt, Homo sapiens
  misc_RNA (1)...(19): siRNA sense strand
gaauguaauugaggaccua

SEQ ID NO: 1159709 - RNA, 19 nt, Homo sapiens
  misc_RNA (1)...(19): siRNA sense strand
gugaagaagugaauguaau

SEQ ID NO: 1159710 - RNA, 19 nt, Homo sapiens
  misc_RNA (1)...(19): siRNA sense strand
ucacaugaaugcccauaau

SEQ ID NO: 1159711 - RNA, 19 nt, Homo sapiens
  misc_RNA (1)...(19): siRNA sense strand
gcaagaaguucagggagau

SEQ ID NO: 1159712 - RNA, 19 nt, Homo sapiens
  misc_RNA (1)...(19): siRNA sense strand
ggcaaagucugcaaaugga

SEQ ID NO: 1159713 - RNA, 19 nt, Homo sapiens
  misc_RNA (1)...(19): siRNA sense strand
auaaaggccuaaagacauu

SEQ ID NO: 1159714 - RNA, 19 nt, Homo sapiens
  misc_RNA (1)...(19): siRNA sense strand
gugaacagcuguauagcau

SEQ ID NO: 1159715 - RNA, 19 nt, Homo sapiens
  misc_RNA (1)...(19): siRNA sense strand
gagauagaaugcacuuaag

SEQ ID NO: 1159716 - RNA, 19 nt, Homo sapiens
  misc_RNA (1)...(19): siRNA sense strand
cuucuaaacucucuucaga

SEQ ID NO: 1159717 - RNA, 19 nt, Homo sapiens
  misc_RNA (1)...(19): siRNA sense strand
caagaacccuuccaaaaga

SEQ ID NO: 1159718 - RNA, 19 nt, Homo sapiens
  misc_RNA (1)...(19): siRNA sense strand
gaugaccaguaucuuuauu

SEQ ID NO: 1159719 - RNA, 19 nt, Homo sapiens
  misc_RNA (1)...(19): siRNA sense strand
gcuggagauuuguuaauug

SEQ ID NO: 1159720 - RNA, 19 nt, Homo sapiens
  misc_RNA (1)...(19): siRNA sense strand
gaugaugcacugcuuacua

SEQ ID NO: 1159721 - RNA, 19 nt, Homo sapiens
  misc_RNA (1)...(19): siRNA sense strand
uagcauuuguuacacagua

SEQ ID NO: 1159722 - RNA, 19 nt, Homo sapiens
  misc_RNA (1)...(19): siRNA sense strand
gggcccaucuuuaucuuug

SEQ ID NO: 1159723 - RNA, 19 nt, Homo sapiens
  misc_RNA (1)...(19): siRNA sense strand
cuuaaccgcugacacaauu

SEQ ID NO: 1159724 - RNA, 19 nt, Homo sapiens
  misc_RNA (1)...(19): siRNA sense strand
ggacaaauccagcuugcau

SEQ ID NO: 1159725 - RNA, 19 nt, Homo sapiens
  misc_RNA (1)...(19): siRNA sense strand
gaaggaacccgacuguagu

SEQ ID NO: 1159726 - RNA, 19 nt, Homo sapiens
  misc_RNA (1)...(19): siRNA sense strand
acaaggaugugaagaguag

SEQ ID NO: 1159727 - RNA, 19 nt, Homo sapiens
  misc_RNA (1)...(19): siRNA sense strand
acacaaagaggacuucuau

SEQ ID NO: 1159728 - RNA, 19 nt, Homo sapiens
  misc_RNA (1)...(19): siRNA sense strand
ucggauaucuccugugaug

SEQ ID NO: 1159729 - RNA, 19 nt, Homo sapiens
  misc_RNA (1)...(19): siRNA sense strand
uguauaggguucagaaaug

SEQ ID NO: 1159730 - RNA, 19 nt, Homo sapiens
  misc_RNA (1)...(19): siRNA sense strand
aaggaggcuucuugaguua

SEQ ID NO: 1159731 - RNA, 19 nt, Homo sapiens
  misc_RNA (1)...(19): siRNA sense strand
gaagaaccauccaaaauac

SEQ ID NO: 1159732 - RNA, 19 nt, Homo sapiens
  misc_RNA (1)...(19): siRNA sense strand
ggccacauuugaagucauu

SEQ ID NO: 1159733 - RNA, 19 nt, Homo sapiens
  misc_RNA (1)...(19): siRNA sense strand
gcauuuauacguucucuuc

SEQ ID NO: 1159734 - RNA, 19 nt, Homo sapiens
  misc_RNA (1)...(19): siRNA sense strand
caaaagaauuacaggauga

SEQ ID NO: 1159735 - RNA, 19 nt, Homo sapiens
  misc_RNA (1)...(19): siRNA sense strand
ggacaggaauagcaaagcu

SEQ ID NO: 1159736 - RNA, 19 nt, Homo sapiens
  misc_RNA (1)...(19): siRNA sense strand
gcaccuguguugugauagu

SEQ ID NO: 1159737 - RNA, 19 nt, Homo sapiens
  misc_RNA (1)...(19): siRNA sense strand
guaguaaacaugacaagau

SEQ ID NO: 1159738 - RNA, 19 nt, Homo sapiens
  misc_RNA (1)...(19): siRNA sense strand
caaacgaagggacaaacua

SEQ ID NO: 1159739 - RNA, 19 nt, Homo sapiens
  misc_RNA (1)...(19): siRNA sense strand
gaaaucaaucacaugaaug

SEQ ID NO: 1159740 - RNA, 19 nt, Homo sapiens
  misc_RNA (1)...(19): siRNA sense strand
ucagaaaucaaucacauga

SEQ ID NO: 1159741 - RNA, 19 nt, Homo sapiens
  misc_RNA (1)...(19): siRNA sense strand
ugaagaacuuaaugugguu

SEQ ID NO: 1159742 - RNA, 19 nt, Homo sapiens
  misc_RNA (1)...(19): siRNA sense strand
gaagaagugaauguaauug

SEQ ID NO: 1159743 - RNA, 19 nt, Homo sapiens
  misc_RNA (1)...(19): siRNA sense strand
aacagaagcugacuaugau

SEQ ID NO: 1159744 - RNA, 19 nt, Homo sapiens
  misc_RNA (1)...(19): siRNA sense strand
gccaccagcuggaaaggaa

SEQ ID NO: 1159745 - RNA, 19 nt, Homo sapiens
  misc_RNA (1)...(19): siRNA sense strand
uaguaaacaugacaagaug

SEQ ID NO: 1159746 - RNA, 19 nt, Homo sapiens
  misc_RNA (1)...(19): siRNA sense strand
ggcuggagauuuguuaauu

SEQ ID NO: 1159747 - RNA, 19 nt, Homo sapiens
  misc_RNA (1)...(19): siRNA sense strand
agaaaaggcugguuugcua

SEQ ID NO: 1159748 - RNA, 19 nt, Homo sapiens
  misc_RNA (1)...(19): siRNA sense strand
caagaagcuuuaaauugag

SEQ ID NO: 1159749 - RNA, 19 nt, Homo sapiens
  misc_RNA (1)...(19): siRNA sense strand
gacgauaaacuucgaaauc

SEQ ID NO: 1159750 - RNA, 19 nt, Homo sapiens
  misc_RNA (1)...(19): siRNA sense strand
uggaugaccaguaucuuua

SEQ ID NO: 1159751 - RNA, 19 nt, Homo sapiens
  misc_RNA (1)...(19): siRNA sense strand
cggaguggaugaccaguau

SEQ ID NO: 1159752 - RNA, 19 nt, Homo sapiens
  misc_RNA (1)...(19): siRNA sense strand
ggauaucuccugugaugga

SEQ ID NO: 1159753 - RNA, 19 nt, Homo sapiens
  misc_RNA (1)...(19): siRNA sense strand
caugaaugcccauaauuug

SEQ ID NO: 1159754 - RNA, 19 nt, Homo sapiens
  misc_RNA (1)...(19): siRNA sense strand
gaaaacaucagcuugaaga

SEQ ID NO: 1159755 - RNA, 19 nt, Homo sapiens
  misc_RNA (1)...(19): siRNA sense strand
gaggguguauuaagucaag

SEQ ID NO: 1159756 - RNA, 19 nt, Homo sapiens
  misc_RNA (1)...(19): siRNA sense strand
uggcaccuguguugugaua

SEQ ID NO: 1159757 - RNA, 19 nt, Homo sapiens
  misc_RNA (1)...(19): siRNA sense strand
ggacauagaaaauagcuuu

SEQ ID NO: 1159758 - RNA, 19 nt, Homo sapiens
  misc_RNA (1)...(19): siRNA sense strand
gcacaaugguucaaaaugg

SEQ ID NO: 1159759 - RNA, 19 nt, Homo sapiens
  misc_RNA (1)...(19): siRNA sense strand
gggcaaagucugcaaaugg

SEQ ID NO: 1159760 - RNA, 19 nt, Homo sapiens
  misc_RNA (1)...(19): siRNA sense strand
cagaagcugacuaugauuu

SEQ ID NO: 1159761 - RNA, 19 nt, Homo sapiens
  misc_RNA (1)...(19): siRNA sense strand
caaggacgauaaacuucga

SEQ ID NO: 1159762 - RNA, 19 nt, Homo sapiens
  misc_RNA (1)...(19): siRNA sense strand
ggaagcagaagaauuaacu

SEQ ID NO: 1159763 - RNA, 19 nt, Homo sapiens
  misc_RNA (1)...(19): siRNA sense strand
gaucaagucaaacaaaugg

SEQ ID NO: 1159764 - RNA, 19 nt, Homo sapiens
  misc_RNA (1)...(19): siRNA sense strand
uaauuuggccuuggucuuu

SEQ ID NO: 1159765 - RNA, 19 nt, Homo sapiens
  misc_RNA (1)...(19): siRNA sense strand
ucagaaaugcucagaaauc

SEQ ID NO: 1159766 - RNA, 19 nt, Homo sapiens
  misc_RNA (1)...(19): siRNA sense strand
augaugcacugcuuacuaa

SEQ ID NO: 1159767 - RNA, 19 nt, Homo sapiens
  misc_RNA (1)...(19): siRNA sense strand
gaugcaagaagcuuuaaau

SEQ ID NO: 1159768 - RNA, 19 nt, Homo sapiens
  misc_RNA (1)...(19): siRNA sense strand
gacaagauguuuucucuca

SEQ ID NO: 1159769 - RNA, 19 nt, Homo sapiens
  misc_RNA (1)...(19): siRNA sense strand
cauaaaggccuaaagacau

SEQ ID NO: 1159770 - RNA, 19 nt, Homo sapiens
  misc_RNA (1)...(19): siRNA sense strand
gcaagaagcuuuaaauuga

SEQ ID NO: 1159771 - RNA, 19 nt, Homo sapiens
  misc_RNA (1)...(19): siRNA sense strand
gaacccgacuguaguauua

SEQ ID NO: 1159772 - RNA, 19 nt, Homo sapiens
  misc_RNA (1)...(19): siRNA sense strand
gaacagcuguauagcauuu

SEQ ID NO: 1159773 - RNA, 19 nt, Homo sapiens
  misc_RNA (1)...(19): siRNA sense strand
gauggaagcagaagaauua

SEQ ID NO: 1159774 - RNA, 19 nt, Homo sapiens
  misc_RNA (1)...(19): siRNA sense strand
ggacucugaucauaaguua

SEQ ID NO: 1159775 - RNA, 19 nt, Homo sapiens
  misc_RNA (1)...(19): siRNA sense strand
caaagaggacuucuauuua

SEQ ID NO: 1159776 - RNA, 19 nt, Homo sapiens
  misc_RNA (1)...(19): siRNA sense strand
cuaaggagcucuacccaua

SEQ ID NO: 1159777 - RNA, 19 nt, Homo sapiens
  misc_RNA (1)...(19): siRNA sense strand
gaucauaaguuaccaucaa

SEQ ID NO: 1159778 - RNA, 19 nt, Homo sapiens
  misc_RNA (1)...(19): siRNA sense strand
caagaaagcugggcaaagu

SEQ ID NO: 1159779 - RNA, 19 nt, Homo sapiens
  misc_RNA (1)...(19): siRNA sense strand
gaaggaaucuugaaaauca

SEQ ID NO: 1159780 - RNA, 19 nt, Homo sapiens
  misc_RNA (1)...(19): siRNA sense strand
uaacagaagcugacuauga

SEQ ID NO: 1159781 - RNA, 19 nt, Homo sapiens
  misc_RNA (1)...(19): siRNA sense strand
ggagauagaaugcacuuaa

SEQ ID NO: 1159782 - RNA, 19 nt, Homo sapiens
  misc_RNA (1)...(19): siRNA sense strand
guucagaaaugcucagaaa

SEQ ID NO: 1159783 - RNA, 19 nt, Homo sapiens
  misc_RNA (1)...(19): siRNA sense strand
gcacaaggacgauaaacuu

SEQ ID NO: 1159784 - RNA, 19 nt, Homo sapiens
  misc_RNA (1)...(19): siRNA sense strand
acaaagaggacuucuauuu

SEQ ID NO: 1159785 - RNA, 19 nt, Homo sapiens
  misc_RNA (1)...(19): siRNA sense strand
cuaaagacauugaggaaga

SEQ ID NO: 1159786 - RNA, 19 nt, Homo sapiens
  misc_RNA (1)...(19): siRNA sense strand
ggugauccuuugcauauaa

SEQ ID NO: 1159787 - RNA, 19 nt, Homo sapiens
  misc_RNA (1)...(19): siRNA sense strand
gaauuucucuaccauaaca

SEQ ID NO: 1159788 - RNA, 19 nt, Homo sapiens
  misc_RNA (1)...(19): siRNA sense strand
gguuuaggaugcaaauaua

SEQ ID NO: 1159789 - RNA, 19 nt, Homo sapiens
  misc_RNA (1)...(19): siRNA sense strand
cauauuggaucucugcuuu

SEQ ID NO: 1159790 - RNA, 19 nt, Homo sapiens
  misc_RNA (1)...(19): siRNA sense strand
gaagaucaagucaaacaaa

SEQ ID NO: 1159791 - RNA, 19 nt, Homo sapiens
  misc_RNA (1)...(19): siRNA sense strand
gaaaugcucagaaaucaau

SEQ ID NO: 1159792 - RNA, 19 nt, Homo sapiens
  misc_RNA (1)...(19): siRNA sense strand
ucaaacaaauggacauaga

SEQ ID NO: 1159793 - RNA, 19 nt, Homo sapiens
  misc_RNA (1)...(19): siRNA sense strand
ggucaacucuucuacaaag

SEQ ID NO: 1159794 - RNA, 19 nt, Homo sapiens
  misc_RNA (1)...(19): siRNA sense strand
guacagaugguaaugcuuu

SEQ ID NO: 1159795 - RNA, 19 nt, Homo sapiens
  misc_RNA (1)...(19): siRNA sense strand
ggaaggaacccgacuguag

SEQ ID NO: 1159796 - RNA, 19 nt, Homo sapiens
  misc_RNA (1)...(19): siRNA sense strand
gggacaaacuagugaagaa

SEQ ID NO: 1159797 - RNA, 19 nt, Homo sapiens
  misc_RNA (1)...(19): siRNA sense strand
gaugacaaggaaagaauua

SEQ ID NO: 1159798 - RNA, 19 nt, Homo sapiens
  misc_RNA (1)...(19): siRNA sense strand
caaagaagaaccauccaaa

SEQ ID NO: 1159799 - RNA, 19 nt, Homo sapiens
  misc_RNA (1)...(19): siRNA sense strand
uggaauuucucuaccauaa

SEQ ID NO: 1159800 - RNA, 19 nt, Homo sapiens
  misc_RNA (1)...(19): siRNA sense strand
gaagcugacuaugauuuga

SEQ ID NO: 1159801 - RNA, 19 nt, Homo sapiens
  misc_RNA (1)...(19): siRNA sense strand
ugaaacaucucaagcucaa

SEQ ID NO: 1159802 - RNA, 19 nt, Homo sapiens
  misc_RNA (1)...(19): siRNA sense strand
gcucagaaaucaaucacau

SEQ ID NO: 1159803 - RNA, 19 nt, Homo sapiens
  misc_RNA (1)...(19): siRNA sense strand
cagaaaugcucagaaauca

SEQ ID NO: 1159804 - RNA, 19 nt, Homo sapiens
  misc_RNA (1)...(19): siRNA sense strand
gauagaaugcacuuaagaa

SEQ ID NO: 1159805 - RNA, 19 nt, Homo sapiens
  misc_RNA (1)...(19): siRNA sense strand
ugaaguauauguagaaagg

SEQ ID NO: 1159806 - RNA, 19 nt, Homo sapiens
  misc_RNA (1)...(19): siRNA sense strand
ggagauuuguuaauugaag

SEQ ID NO: 1159807 - RNA, 19 nt, Homo sapiens
  misc_RNA (1)...(19): siRNA sense strand
gaauguaauugaggaccua

SEQ ID NO: 1159808 - RNA, 19 nt, Homo sapiens
  misc_RNA (1)...(19): siRNA sense strand
gugaagaagugaauguaau

SEQ ID NO: 1159809 - RNA, 19 nt, Homo sapiens
  misc_RNA (1)...(19): siRNA sense strand
ucacaugaaugcccauaau

SEQ ID NO: 1159810 - RNA, 19 nt, Homo sapiens
  misc_RNA (1)...(19): siRNA sense strand
gcaagaaguucagggagau

SEQ ID NO: 1159811 - RNA, 19 nt, Homo sapiens
  misc_RNA (1)...(19): siRNA sense strand
gagauagaaugcacuuaag

SEQ ID NO: 1159812 - RNA, 19 nt, Homo sapiens
  misc_RNA (1)...(19): siRNA sense strand
auaaaggccuaaagacauu

SEQ ID NO: 1159813 - RNA, 19 nt, Homo sapiens
  misc_RNA (1)...(19): siRNA sense strand
ggcaaagucugcaaaugga

SEQ ID NO: 1159814 - RNA, 19 nt, Homo sapiens
  misc_RNA (1)...(19): siRNA sense strand
gugaacagcuguauagcau

SEQ ID NO: 1159815 - RNA, 19 nt, Homo sapiens
  misc_RNA (1)...(19): siRNA sense strand
cuucuaaacucucuucaga

SEQ ID NO: 1159816 - RNA, 19 nt, Homo sapiens
  misc_RNA (1)...(19): siRNA sense strand
caagaacccuuccaaaaga

SEQ ID NO: 1159817 - RNA, 19 nt, Homo sapiens
  misc_RNA (1)...(19): siRNA sense strand
gaugaccaguaucuuuauu

SEQ ID NO: 1159818 - RNA, 19 nt, Homo sapiens
  misc_RNA (1)...(19): siRNA sense strand
gcuggagauuuguuaauug

SEQ ID NO: 1159819 - RNA, 19 nt, Homo sapiens
  misc_RNA (1)...(19): siRNA sense strand
gaugaugcacugcuuacua

SEQ ID NO: 1159820 - RNA, 19 nt, Homo sapiens
  misc_RNA (1)...(19): siRNA sense strand
uagcauuuguuacacagua

SEQ ID NO: 1159821 - RNA, 19 nt, Homo sapiens
  misc_RNA (1)...(19): siRNA sense strand
gggcccaucuuuaucuuug

SEQ ID NO: 1159822 - RNA, 19 nt, Homo sapiens
  misc_RNA (1)...(19): siRNA sense strand
cuuaaccgcugacacaauu

SEQ ID NO: 1159823 - RNA, 19 nt, Homo sapiens
  misc_RNA (1)...(19): siRNA sense strand
ggacaaauccagcuugcau

SEQ ID NO: 1159824 - RNA, 19 nt, Homo sapiens
  misc_RNA (1)...(19): siRNA sense strand
gaaggaacccgacuguagu

SEQ ID NO: 1159825 - RNA, 19 nt, Homo sapiens
  misc_RNA (1)...(19): siRNA sense strand
acaaggaugugaagaguag

SEQ ID NO: 1159826 - RNA, 19 nt, Homo sapiens
  misc_RNA (1)...(19): siRNA sense strand
acacaaagaggacuucuau

SEQ ID NO: 1159827 - RNA, 19 nt, Homo sapiens
  misc_RNA (1)...(19): siRNA sense strand
ucggauaucuccugugaug

SEQ ID NO: 1159828 - RNA, 19 nt, Homo sapiens
  misc_RNA (1)...(19): siRNA sense strand
uguauaggguucagaaaug

SEQ ID NO: 1159829 - RNA, 19 nt, Homo sapiens
  misc_RNA (1)...(19): siRNA sense strand
aaggaggcuucuugaguua

SEQ ID NO: 1159830 - RNA, 19 nt, Homo sapiens
  misc_RNA (1)...(19): siRNA sense strand
gaagaaccauccaaaauac

SEQ ID NO: 1159831 - RNA, 19 nt, Homo sapiens
  misc_RNA (1)...(19): siRNA sense strand
ggccacauuugaagucauu

SEQ ID NO: 1159832 - RNA, 19 nt, Homo sapiens
  misc_RNA (1)...(19): siRNA sense strand
gcauuuauacguucucuuc

SEQ ID NO: 1159833 - RNA, 19 nt, Homo sapiens
  misc_RNA (1)...(19): siRNA sense strand
caaaagaauuacaggauga

SEQ ID NO: 1159834 - RNA, 19 nt, Homo sapiens
  misc_RNA (1)...(19): siRNA sense strand
ggacaggaauagcaaagcu

SEQ ID NO: 1159835 - RNA, 19 nt, Homo sapiens
  misc_RNA (1)...(19): siRNA sense strand
gcaccuguguugugauagu

SEQ ID NO: 1159836 - RNA, 19 nt, Homo sapiens
  misc_RNA (1)...(19): siRNA sense strand
guaguaaacaugacaagau

SEQ ID NO: 1159837 - RNA, 19 nt, Homo sapiens
  misc_RNA (1)...(19): siRNA sense strand
caaacgaagggacaaacua

SEQ ID NO: 1159838 - RNA, 19 nt, Homo sapiens
  misc_RNA (1)...(19): siRNA sense strand
gaaaucaaucacaugaaug

SEQ ID NO: 1159839 - RNA, 19 nt, Homo sapiens
  misc_RNA (1)...(19): siRNA sense strand
ucagaaaucaaucacauga

SEQ ID NO: 1159840 - RNA, 19 nt, Homo sapiens
  misc_RNA (1)...(19): siRNA sense strand
ugaagaacuuaaugugguu

SEQ ID NO: 1159841 - RNA, 19 nt, Homo sapiens
  misc_RNA (1)...(19): siRNA sense strand
gaagaagugaauguaauug

SEQ ID NO: 1159842 - RNA, 19 nt, Homo sapiens
  misc_RNA (1)...(19): siRNA sense strand
aacagaagcugacuaugau

SEQ ID NO: 1159843 - RNA, 19 nt, Homo sapiens
  misc_RNA (1)...(19): siRNA sense strand
gccaccagcuggaaaggaa

SEQ ID NO: 1159844 - RNA, 19 nt, Homo sapiens
  misc_RNA (1)...(19): siRNA sense strand
uaguaaacaugacaagaug

SEQ ID NO: 1159845 - RNA, 19 nt, Homo sapiens
  misc_RNA (1)...(19): siRNA sense strand
ggcuggagauuuguuaauu

SEQ ID NO: 1159846 - RNA, 19 nt, Homo sapiens
  misc_RNA (1)...(19): siRNA sense strand
agaaaaggcugguuugcua

SEQ ID NO: 1159847 - RNA, 19 nt, Homo sapiens
  misc_RNA (1)...(19): siRNA sense strand
caagaagcuuuaaauugag

SEQ ID NO: 1159848 - RNA, 19 nt, Homo sapiens
  misc_RNA (1)...(19): siRNA sense strand
gacgauaaacuucgaaauc

SEQ ID NO: 1159849 - RNA, 19 nt, Homo sapiens
  misc_RNA (1)...(19): siRNA sense strand
uggaugaccaguaucuuua

SEQ ID NO: 1159850 - RNA, 19 nt, Homo sapiens
  misc_RNA (1)...(19): siRNA sense strand
cggaguggaugaccaguau

SEQ ID NO: 1159851 - RNA, 19 nt, Homo sapiens
  misc_RNA (1)...(19): siRNA sense strand
ggauaucuccugugaugga

SEQ ID NO: 1159852 - RNA, 19 nt, Homo sapiens
  misc_RNA (1)...(19): siRNA sense strand
caugaaugcccauaauuug

SEQ ID NO: 1159853 - RNA, 19 nt, Homo sapiens
  misc_RNA (1)...(19): siRNA sense strand
gaaaacaucagcuugaaga

SEQ ID NO: 1159854 - RNA, 19 nt, Homo sapiens
  misc_RNA (1)...(19): siRNA sense strand
gcacaaugguucaaaaugg

SEQ ID NO: 1159855 - RNA, 19 nt, Homo sapiens
  misc_RNA (1)...(19): siRNA sense strand
gaggguguauuaagucaag

SEQ ID NO: 1159856 - RNA, 19 nt, Homo sapiens
  misc_RNA (1)...(19): siRNA sense strand
uggcaccuguguugugaua

SEQ ID NO: 1159857 - RNA, 19 nt, Homo sapiens
  misc_RNA (1)...(19): siRNA sense strand
ggacauagaaaauagcuuu

SEQ ID NO: 1159858 - RNA, 19 nt, Homo sapiens
  misc_RNA (1)...(19): siRNA sense strand
gggcaaagucugcaaaugg

SEQ ID NO: 1159859 - RNA, 19 nt, Homo sapiens
  misc_RNA (1)...(19): siRNA sense strand
cagaagcugacuaugauuu

SEQ ID NO: 1159860 - RNA, 19 nt, Homo sapiens
  misc_RNA (1)...(19): siRNA sense strand
caaggacgauaaacuucga

SEQ ID NO: 1159861 - RNA, 19 nt, Homo sapiens
  misc_RNA (1)...(19): siRNA sense strand
ggaagcagaagaauuaacu

SEQ ID NO: 1159862 - RNA, 19 nt, Homo sapiens
  misc_RNA (1)...(19): siRNA sense strand
gaucaagucaaacaaaugg

SEQ ID NO: 1159863 - RNA, 19 nt, Homo sapiens
  misc_RNA (1)...(19): siRNA sense strand
uaauuuggccuuggucuuu

SEQ ID NO: 1159864 - RNA, 19 nt, Homo sapiens
  misc_RNA (1)...(19): siRNA sense strand
ucagaaaugcucagaaauc

SEQ ID NO: 1159865 - RNA, 19 nt, Homo sapiens
  misc_RNA (1)...(19): siRNA sense strand
augaugcacugcuuacuaa

SEQ ID NO: 1159866 - RNA, 19 nt, Homo sapiens
  misc_RNA (1)...(19): siRNA sense strand
gaugcaagaagcuuuaaau

SEQ ID NO: 1159867 - RNA, 19 nt, Homo sapiens
  misc_RNA (1)...(19): siRNA sense strand
cuggagauuuguuaauuga

SEQ ID NO: 1159868 - RNA, 19 nt, Homo sapiens
  misc_RNA (1)...(19): siRNA sense strand
cauaaaggccuaaagacau

SEQ ID NO: 1159869 - RNA, 19 nt, Homo sapiens
  misc_RNA (1)...(19): siRNA sense strand
gacaagauguuuucucuca

SEQ ID NO: 1159870 - RNA, 19 nt, Homo sapiens
  misc_RNA (1)...(19): siRNA sense strand
ugacauagaugaaguggua

SEQ ID NO: 1159871 - RNA, 19 nt, Homo sapiens
  misc_RNA (1)...(19): siRNA sense strand
gaagagaucgacaguauuu

SEQ ID NO: 1159872 - RNA, 19 nt, Homo sapiens
  misc_RNA (1)...(19): siRNA sense strand
ggaaauauucucauccuua

SEQ ID NO: 1159873 - RNA, 19 nt, Homo sapiens
  misc_RNA (1)...(19): siRNA sense strand
gcaggaccauggcuauuua

SEQ ID NO: 1159874 - RNA, 19 nt, Homo sapiens
  misc_RNA (1)...(19): siRNA sense strand
ggagagaauuugauuaugu

SEQ ID NO: 1159875 - RNA, 19 nt, Homo sapiens
  misc_RNA (1)...(19): siRNA sense strand
gaaacaggaugggaaauau

SEQ ID NO: 1159876 - RNA, 19 nt, Homo sapiens
  misc_RNA (1)...(19): siRNA sense strand
gaaauauucucauccuuag

SEQ ID NO: 1159877 - RNA, 19 nt, Homo sapiens
  misc_RNA (1)...(19): siRNA sense strand
gaggagccaucgacagaua

SEQ ID NO: 1159878 - RNA, 19 nt, Homo sapiens
  misc_RNA (1)...(19): siRNA sense strand
ggaggcauauugugugaaa

SEQ ID NO: 1159879 - RNA, 19 nt, Homo sapiens
  misc_RNA (1)...(19): siRNA sense strand
uagaugaagugguauauga

SEQ ID NO: 1159880 - RNA, 19 nt, Homo sapiens
  misc_RNA (1)...(19): siRNA sense strand
gcaaagauguacucauucu

SEQ ID NO: 1159881 - RNA, 19 nt, Homo sapiens
  misc_RNA (1)...(19): siRNA sense strand
caaagaagggagagaauuu

SEQ ID NO: 1159882 - RNA, 19 nt, Homo sapiens
  misc_RNA (1)...(19): siRNA sense strand
ugacgaagauucaccuuau

SEQ ID NO: 1159883 - RNA, 19 nt, Homo sapiens
  misc_RNA (1)...(19): siRNA sense strand
uggcaaagauguacucauu

SEQ ID NO: 1159884 - RNA, 19 nt, Homo sapiens
  misc_RNA (1)...(19): siRNA sense strand
aagaagagaucgacaguau

SEQ ID NO: 1159885 - RNA, 19 nt, Homo sapiens
  misc_RNA (1)...(19): siRNA sense strand
gaacaaaguagaggaaaga

SEQ ID NO: 1159886 - RNA, 19 nt, Homo sapiens
  misc_RNA (1)...(19): siRNA sense strand
gaagagguacgccaaagaa

SEQ ID NO: 1159887 - RNA, 19 nt, Homo sapiens
  misc_RNA (1)...(19): siRNA sense strand
gaagcaguuuggaaauauu

SEQ ID NO: 1159888 - RNA, 19 nt, Homo sapiens
  misc_RNA (1)...(19): siRNA sense strand
ggaaagaaugaaagaauug

SEQ ID NO: 1159889 - RNA, 19 nt, Homo sapiens
  misc_RNA (1)...(19): siRNA sense strand
gaagggagagaauuugauu

SEQ ID NO: 1159890 - RNA, 19 nt, Homo sapiens
  misc_RNA (1)...(19): siRNA sense strand
gaagauucaccuuaucaaa

SEQ ID NO: 1159891 - RNA, 19 nt, Homo sapiens
  misc_RNA (1)...(19): siRNA sense strand
gagagaauuugauuaugug

SEQ ID NO: 1159892 - RNA, 19 nt, Homo sapiens
  misc_RNA (1)...(19): siRNA sense strand
caaaguagaggaaagaaug

SEQ ID NO: 1159893 - RNA, 19 nt, Homo sapiens
  misc_RNA (1)...(19): siRNA sense strand
gagagugauuuggcauaua

SEQ ID NO: 1159894 - RNA, 19 nt, Homo sapiens
  misc_RNA (1)...(19): siRNA sense strand
gaauuuacccacauggauu

SEQ ID NO: 1159895 - RNA, 19 nt, Homo sapiens
  misc_RNA (1)...(19): siRNA sense strand
cagaagcacugucgcucua

SEQ ID NO: 1159896 - RNA, 19 nt, Homo sapiens
  misc_RNA (1)...(19): siRNA sense strand
gaggaaagaaugaaagaau

SEQ ID NO: 1159897 - RNA, 19 nt, Homo sapiens
  misc_RNA (1)...(19): siRNA sense strand
cgaagcaguuuggaaauau

SEQ ID NO: 1159898 - RNA, 19 nt, Homo sapiens
  misc_RNA (1)...(19): siRNA sense strand
gaaacgauuaccacccaua

SEQ ID NO: 1159899 - RNA, 19 nt, Homo sapiens
  misc_RNA (1)...(19): siRNA sense strand
ucgaagcaguuuggaaaua

SEQ ID NO: 1159900 - RNA, 19 nt, Homo sapiens
  misc_RNA (1)...(19): siRNA sense strand
gcacagcacgcucgacuuc

SEQ ID NO: 1159901 - RNA, 19 nt, Homo sapiens
  misc_RNA (1)...(19): siRNA sense strand
gguagagauugaccaaaug

SEQ ID NO: 1159902 - RNA, 19 nt, Homo sapiens
  misc_RNA (1)...(19): siRNA sense strand
ugaaacaggaugggaaaua

SEQ ID NO: 1159903 - RNA, 19 nt, Homo sapiens
  misc_RNA (1)...(19): siRNA sense strand
gcaguggcaaagaagauua

SEQ ID NO: 1159904 - RNA, 19 nt, Homo sapiens
  misc_RNA (1)...(19): siRNA sense strand
guauuguccuguggaauuu

SEQ ID NO: 1159905 - RNA, 19 nt, Homo sapiens
  misc_RNA (1)...(19): siRNA sense strand
gaagcacugucgcucuaug

SEQ ID NO: 1159906 - RNA, 19 nt, Homo sapiens
  misc_RNA (1)...(19): siRNA sense strand
aaacaagaacggcagcuuu

SEQ ID NO: 1159907 - RNA, 19 nt, Homo sapiens
  misc_RNA (1)...(19): siRNA sense strand
ucacuaugguagagauuga

SEQ ID NO: 1159908 - RNA, 19 nt, Homo sapiens
  misc_RNA (1)...(19): siRNA sense strand
ugcuggaccuucagaguua

SEQ ID NO: 1159909 - RNA, 19 nt, Homo sapiens
  misc_RNA (1)...(19): siRNA sense strand
caaccuacacaaacaagaa

SEQ ID NO: 1159910 - RNA, 19 nt, Homo sapiens
  misc_RNA (1)...(19): siRNA sense strand
gauguuaauuuggcagaga

SEQ ID NO: 1159911 - RNA, 19 nt, Homo sapiens
  misc_RNA (1)...(19): siRNA sense strand
caaagauggucacuauggu

SEQ ID NO: 1159912 - RNA, 19 nt, Homo sapiens
  misc_RNA (1)...(19): siRNA sense strand
ccaaagauggucacuaugg

SEQ ID NO: 1159913 - RNA, 19 nt, Homo sapiens
  misc_RNA (1)...(19): siRNA sense strand
gggagagaauuugauuaug

SEQ ID NO: 1159914 - RNA, 19 nt, Homo sapiens
  misc_RNA (1)...(19): siRNA sense strand
guaagaaauacaugcgaaa

SEQ ID NO: 1159915 - RNA, 19 nt, Homo sapiens
  misc_RNA (1)...(19): siRNA sense strand
gaauugagucaggacagua

SEQ ID NO: 1159916 - RNA, 19 nt, Homo sapiens
  misc_RNA (1)...(19): siRNA sense strand
ccaaagaagggagagaauu

SEQ ID NO: 1159917 - RNA, 19 nt, Homo sapiens
  misc_RNA (1)...(19): siRNA sense strand
caugggcaguggcaaagaa

SEQ ID NO: 1159918 - RNA, 19 nt, Homo sapiens
  misc_RNA (1)...(19): siRNA sense strand
gaaugaaagaauugaguca

SEQ ID NO: 1159919 - RNA, 19 nt, Homo sapiens
  misc_RNA (1)...(19): siRNA sense strand
caaagaagagaucgacagu

SEQ ID NO: 1159920 - RNA, 19 nt, Homo sapiens
  misc_RNA (1)...(19): siRNA sense strand
cacugucgcucuaugaaga

SEQ ID NO: 1159921 - RNA, 19 nt, Homo sapiens
  misc_RNA (1)...(19): siRNA sense strand
cagaagaagauuccacaug

SEQ ID NO: 1159922 - RNA, 19 nt, Homo sapiens
  misc_RNA (1)...(19): siRNA sense strand
aaagauggucacuauggua

SEQ ID NO: 1159923 - RNA, 19 nt, Homo sapiens
  misc_RNA (1)...(19): siRNA sense strand
agagugauuuggcauauac

SEQ ID NO: 1159924 - RNA, 19 nt, Homo sapiens
  misc_RNA (1)...(19): siRNA sense strand
ggcaggaccauggcuauuu

SEQ ID NO: 1159925 - RNA, 19 nt, Homo sapiens
  misc_RNA (1)...(19): siRNA sense strand
agauuacacuggcaaagau

SEQ ID NO: 1159926 - RNA, 19 nt, Homo sapiens
  misc_RNA (1)...(19): siRNA sense strand
gacgaagauucaccuuauc

SEQ ID NO: 1159927 - RNA, 19 nt, Homo sapiens
  misc_RNA (1)...(19): siRNA sense strand
aaacaggaugggaaauauu

SEQ ID NO: 1159928 - RNA, 19 nt, Homo sapiens
  misc_RNA (1)...(19): siRNA sense strand
cuuagacaaucuuaaagga

SEQ ID NO: 1159929 - RNA, 19 nt, Homo sapiens
  misc_RNA (1)...(19): siRNA sense strand
gcaaggcaaagaagagauc

SEQ ID NO: 1159930 - RNA, 19 nt, Homo sapiens
  misc_RNA (1)...(19): siRNA sense strand
ccacgucuccagaagaaga

SEQ ID NO: 1159931 - RNA, 19 nt, Homo sapiens
  misc_RNA (1)...(19): siRNA sense strand
ugacagcuguuccaaucuc

SEQ ID NO: 1159932 - RNA, 19 nt, Homo sapiens
  misc_RNA (1)...(19): siRNA sense strand
uuugacagcuguuccaauc

SEQ ID NO: 1159933 - RNA, 19 nt, Homo sapiens
  misc_RNA (1)...(19): siRNA sense strand
uaaaggagacugcuaucag

SEQ ID NO: 1159934 - RNA, 19 nt, Homo sapiens
  misc_RNA (1)...(19): siRNA sense strand
ggagacggaggcauauugu

SEQ ID NO: 1159935 - RNA, 19 nt, Homo sapiens
  misc_RNA (1)...(19): siRNA sense strand
ugaacaaaguagaggaaag

SEQ ID NO: 1159936 - RNA, 19 nt, Homo sapiens
  misc_RNA (1)...(19): siRNA sense strand
cuucauacuuggaauugug

SEQ ID NO: 1159937 - RNA, 19 nt, Homo sapiens
  misc_RNA (1)...(19): siRNA sense strand
uguauuguccuguggaauu

SEQ ID NO: 1159938 - RNA, 19 nt, Homo sapiens
  misc_RNA (1)...(19): siRNA sense strand
agacugcuaucagguucua

SEQ ID NO: 1159939 - RNA, 19 nt, Homo sapiens
  misc_RNA (1)...(19): siRNA sense strand
uuagcaaccuacacaaaca

SEQ ID NO: 1159940 - RNA, 19 nt, Homo sapiens
  misc_RNA (1)...(19): siRNA sense strand
agagagugauuuggcauau

SEQ ID NO: 1159941 - RNA, 19 nt, Homo sapiens
  misc_RNA (1)...(19): siRNA sense strand
gagaauuuacccacaugga

SEQ ID NO: 1159942 - RNA, 19 nt, Homo sapiens
  misc_RNA (1)...(19): siRNA sense strand
gguauaugacgaagauuca

SEQ ID NO: 1159943 - RNA, 19 nt, Homo sapiens
  misc_RNA (1)...(19): siRNA sense strand
aacaggaugggaaauauuu

SEQ ID NO: 1159944 - RNA, 19 nt, Homo sapiens
  misc_RNA (1)...(19): siRNA sense strand
cagagagugauuuggcaua

SEQ ID NO: 1159945 - RNA, 19 nt, Homo sapiens
  misc_RNA (1)...(19): siRNA sense strand
caucaugggcaguggcaaa

SEQ ID NO: 1159946 - RNA, 19 nt, Homo sapiens
  misc_RNA (1)...(19): siRNA sense strand
acucgaagcaguuuggaaa

SEQ ID NO: 1159947 - RNA, 19 nt, Homo sapiens
  misc_RNA (1)...(19): siRNA sense strand
agacggaggcauauugugu

SEQ ID NO: 1159948 - RNA, 19 nt, Homo sapiens
  misc_RNA (1)...(19): siRNA sense strand
cuccacgucuccagaagaa

SEQ ID NO: 1159949 - RNA, 19 nt, Homo sapiens
  misc_RNA (1)...(19): siRNA sense strand
aaagaagggagagaauuug

SEQ ID NO: 1159950 - RNA, 19 nt, Homo sapiens
  misc_RNA (1)...(19): siRNA sense strand
gauggucacuaugguagag

SEQ ID NO: 1159951 - RNA, 19 nt, Homo sapiens
  misc_RNA (1)...(19): siRNA sense strand
aaaguagaggaaagaauga

SEQ ID NO: 1159952 - RNA, 19 nt, Homo sapiens
  misc_RNA (1)...(19): siRNA sense strand
guugaaacaggaugggaaa

SEQ ID NO: 1159953 - RNA, 19 nt, Homo sapiens
  misc_RNA (1)...(19): siRNA sense strand
caugggaguuucucagacu

SEQ ID NO: 1159954 - RNA, 19 nt, Homo sapiens
  misc_RNA (1)...(19): siRNA sense strand
cagcuuugccaauuugaga

SEQ ID NO: 1159955 - RNA, 19 nt, Homo sapiens
  misc_RNA (1)...(19): siRNA sense strand
uaaaaggccuccaguccau

SEQ ID NO: 1159956 - RNA, 19 nt, Homo sapiens
  misc_RNA (1)...(19): siRNA sense strand
gaagauuacacuggcaaag

SEQ ID NO: 1159957 - RNA, 19 nt, Homo sapiens
  misc_RNA (1)...(19): siRNA sense strand
agugguauaugacgaagau

SEQ ID NO: 1159958 - RNA, 19 nt, Homo sapiens
  misc_RNA (1)...(19): siRNA sense strand
guagaggaaagaaugaaag

SEQ ID NO: 1159959 - RNA, 19 nt, Homo sapiens
  misc_RNA (1)...(19): siRNA sense strand
aaaggccuccaguccauuu

SEQ ID NO: 1159960 - RNA, 19 nt, Homo sapiens
  misc_RNA (1)...(19): siRNA sense strand
ugaagagguacgccaaaga

SEQ ID NO: 1159961 - RNA, 19 nt, Homo sapiens
  misc_RNA (1)...(19): siRNA sense strand
ucccgguacugaagaggua

SEQ ID NO: 1159962 - RNA, 19 nt, Homo sapiens
  misc_RNA (1)...(19): siRNA sense strand
auugauggguguaagaaau

SEQ ID NO: 1159963 - RNA, 19 nt, Homo sapiens
  misc_RNA (1)...(19): siRNA sense strand
ugaagugguauaugacgaa

SEQ ID NO: 1159964 - RNA, 19 nt, Homo sapiens
  misc_RNA (1)...(19): siRNA sense strand
uagaggaaagaaugaaaga

SEQ ID NO: 1159965 - RNA, 19 nt, Homo sapiens
  misc_RNA (1)...(19): siRNA sense strand
gcgcaaggcaaagaagaga

SEQ ID NO: 1159966 - RNA, 19 nt, Homo sapiens
  misc_RNA (1)...(19): siRNA sense strand
gcacugucgcucuaugaag

SEQ ID NO: 1159967 - RNA, 19 nt, Homo sapiens
  misc_RNA (1)...(19): siRNA sense strand
agggagagaauuugauuau

SEQ ID NO: 1159968 - RNA, 19 nt, Homo sapiens
  misc_RNA (1)...(19): siRNA sense strand
aaagaagagaucgacagua

SEQ ID NO: 1159969 - RNA, 19 nt, Homo sapiens
  misc_RNA (1)...(19): siRNA sense strand
uuacacuguuuggaagaaa

SEQ ID NO: 1159970 - RNA, 19 nt, Homo sapiens
  misc_RNA (1)...(19): siRNA sense strand
guugagaccuuguauaaua

SEQ ID NO: 1159971 - RNA, 19 nt, Homo sapiens
  misc_RNA (1)...(19): siRNA sense strand
ggacagcacuuuauaauac

SEQ ID NO: 1159972 - RNA, 19 nt, Homo sapiens
  misc_RNA (1)...(19): siRNA sense strand
ggaaaccacugcaagcaaa

SEQ ID NO: 1159973 - RNA, 19 nt, Homo sapiens
  misc_RNA (1)...(19): siRNA sense strand
uaacggugcuaacucuaua

SEQ ID NO: 1159974 - RNA, 19 nt, Homo sapiens
  misc_RNA (1)...(19): siRNA sense strand
gaaguuagcucgguucaac

SEQ ID NO: 1159975 - RNA, 19 nt, Homo sapiens
  misc_RNA (1)...(19): siRNA sense strand
ggaaaacucccguugauua

SEQ ID NO: 1159976 - RNA, 19 nt, Homo sapiens
  misc_RNA (1)...(19): siRNA sense strand
gauaaaguacaucccaaua

SEQ ID NO: 1159977 - RNA, 19 nt, Homo sapiens
  misc_RNA (1)...(19): siRNA sense strand
ccaaagaucuuagcaagca

SEQ ID NO: 1159978 - RNA, 19 nt, Homo sapiens
  misc_RNA (1)...(19): siRNA sense strand
guucaacgcccaugaguuu

SEQ ID NO: 1159979 - RNA, 19 nt, Homo sapiens
  misc_RNA (1)...(19): siRNA sense strand
cgccauaucucccaaguga

SEQ ID NO: 1159980 - RNA, 19 nt, Homo sapiens
  misc_RNA (1)...(19): siRNA sense strand
guuugagacuguuaucuuu

SEQ ID NO: 1159981 - RNA, 19 nt, Homo sapiens
  misc_RNA (1)...(19): siRNA sense strand
gcagacagcagccuggauu

SEQ ID NO: 1159982 - RNA, 19 nt, Homo sapiens
  misc_RNA (1)...(19): siRNA sense strand
caauaaagcggaauucauc

SEQ ID NO: 1159983 - RNA, 19 nt, Homo sapiens
  misc_RNA (1)...(19): siRNA sense strand
gacccugcgucuauuauga

SEQ ID NO: 1159984 - RNA, 19 nt, Homo sapiens
  misc_RNA (1)...(19): siRNA sense strand
ucauugacauucucaguga

SEQ ID NO: 1159985 - RNA, 19 nt, Homo sapiens
  misc_RNA (1)...(19): siRNA sense strand
ggacagacuagccuucuau

SEQ ID NO: 1159986 - RNA, 19 nt, Homo sapiens
  misc_RNA (1)...(19): siRNA sense strand
gaacagggaaucuugaaac

SEQ ID NO: 1159987 - RNA, 19 nt, Homo sapiens
  misc_RNA (1)...(19): siRNA sense strand
caacacugcuucagauggu

SEQ ID NO: 1159988 - RNA, 19 nt, Homo sapiens
  misc_RNA (1)...(19): siRNA sense strand
caagccaacuucuuucauc

SEQ ID NO: 1159989 - RNA, 19 nt, Homo sapiens
  misc_RNA (1)...(19): siRNA sense strand
uuuacaggcugaauuauug

SEQ ID NO: 1159990 - RNA, 19 nt, Homo sapiens
  misc_RNA (1)...(19): siRNA sense strand
gaaguugacaggcgagaga

SEQ ID NO: 1159991 - RNA, 19 nt, Homo sapiens
  misc_RNA (1)...(19): siRNA sense strand
uaauaacggugcuaacucu

SEQ ID NO: 1159992 - RNA, 19 nt, Homo sapiens
  misc_RNA (1)...(19): siRNA sense strand
gcagagcgccucguggaaa

SEQ ID NO: 1159993 - RNA, 19 nt, Homo sapiens
  misc_RNA (1)...(19): siRNA sense strand
gcaggaaaccagaucacaa

SEQ ID NO: 1159994 - RNA, 19 nt, Homo sapiens
  misc_RNA (1)...(19): siRNA sense strand
gaagacacagauuuggaaa

SEQ ID NO: 1159995 - RNA, 19 nt, Homo sapiens
  misc_RNA (1)...(19): siRNA sense strand
caggaaaccagaucacaaa

SEQ ID NO: 1159996 - RNA, 19 nt, Homo sapiens
  misc_RNA (1)...(19): siRNA sense strand
gaaaucagggcagacagaa

SEQ ID NO: 1159997 - RNA, 19 nt, Homo sapiens
  misc_RNA (1)...(19): siRNA sense strand
uugaagaacuugccaugga

SEQ ID NO: 1159998 - RNA, 19 nt, Homo sapiens
  misc_RNA (1)...(19): siRNA sense strand
gcacaagccaacuucuuuc

SEQ ID NO: 1159999 - RNA, 19 nt, Homo sapiens
  misc_RNA (1)...(19): siRNA sense strand
agacuagccuucuaucucu

SEQ ID NO: 1160000 - RNA, 19 nt, Homo sapiens
  misc_RNA (1)...(19): siRNA sense strand
gagaacagggaaucuugaa

SEQ ID NO: 1160001 - RNA, 19 nt, Homo sapiens
  misc_RNA (1)...(19): siRNA sense strand
ugaagaacuugccauggau

SEQ ID NO: 1160002 - RNA, 19 nt, Homo sapiens
  misc_RNA (1)...(19): siRNA sense strand
cgaagacacagauuuggaa

SEQ ID NO: 1160003 - RNA, 19 nt, Homo sapiens
  misc_RNA (1)...(19): siRNA sense strand
gagcacaagccaacuucuu

SEQ ID NO: 1160004 - RNA, 19 nt, Homo sapiens
  misc_RNA (1)...(19): siRNA sense strand
agacgaagacacagauuug

SEQ ID NO: 1160005 - RNA, 19 nt, Homo sapiens
  misc_RNA (1)...(19): siRNA sense strand
guaaauaggggaacguuuu

SEQ ID NO: 1160006 - RNA, 19 nt, Homo sapiens
  misc_RNA (1)...(19): siRNA sense strand
aaauggacagcacuuuaua

SEQ ID NO: 1160007 - RNA, 19 nt, Homo sapiens
  misc_RNA (1)...(19): siRNA sense strand
ggcaaaagcugcuaagaag

SEQ ID NO: 1160008 - RNA, 19 nt, Homo sapiens
  misc_RNA (1)...(19): siRNA sense strand
ggagacagcagggcaguuc

SEQ ID NO: 1160009 - RNA, 19 nt, Homo sapiens
  misc_RNA (1)...(19): siRNA sense strand
ugguugagaccuuguauaa

SEQ ID NO: 1160010 - RNA, 19 nt, Homo sapiens
  misc_RNA (1)...(19): siRNA sense strand
gauguuagcguucguccau

SEQ ID NO: 1160011 - RNA, 19 nt, Homo sapiens
  misc_RNA (1)...(19): siRNA sense strand
agccaaguaucagauguua

SEQ ID NO: 1160012 - RNA, 19 nt, Homo sapiens
  misc_RNA (1)...(19): siRNA sense strand
guggaagacguaaagcuaa

SEQ ID NO: 1160013 - RNA, 19 nt, Homo sapiens
  misc_RNA (1)...(19): siRNA sense strand
acgaucagcccgacuauga

SEQ ID NO: 1160014 - RNA, 19 nt, Homo sapiens
  misc_RNA (1)...(19): siRNA sense strand
cagagcgccucguggaaau

SEQ ID NO: 1160015 - RNA, 19 nt, Homo sapiens
  misc_RNA (1)...(19): siRNA sense strand
gcaaggagggcaccaugag

SEQ ID NO: 1160016 - RNA, 19 nt, Homo sapiens
  misc_RNA (1)...(19): siRNA sense strand
gcugaauuauuggcaguau

SEQ ID NO: 1160017 - RNA, 19 nt, Homo sapiens
  misc_RNA (1)...(19): siRNA sense strand
ccaagugaggcaucugaaa

SEQ ID NO: 1160018 - RNA, 19 nt, Homo sapiens
  misc_RNA (1)...(19): siRNA sense strand
caaaagcugcuaagaagaa

SEQ ID NO: 1160019 - RNA, 19 nt, Homo sapiens
  misc_RNA (1)...(19): siRNA sense strand
cuauaugggagcauucuuu

SEQ ID NO: 1160020 - RNA, 19 nt, Homo sapiens
  misc_RNA (1)...(19): siRNA sense strand
cgaaaucagggcagacaga

SEQ ID NO: 1160021 - RNA, 19 nt, Homo sapiens
  misc_RNA (1)...(19): siRNA sense strand
guacucaucaacacgaaau

SEQ ID NO: 1160022 - RNA, 19 nt, Homo sapiens
  misc_RNA (1)...(19): siRNA sense strand
gccuggauuugucugaauu

SEQ ID NO: 1160023 - RNA, 19 nt, Homo sapiens
  misc_RNA (1)...(19): siRNA sense strand
gaaaacucccguugauuau

SEQ ID NO: 1160024 - RNA, 19 nt, Homo sapiens
  misc_RNA (1)...(19): siRNA sense strand
gauuuuacaggcugaauua

SEQ ID NO: 1160025 - RNA, 19 nt, Homo sapiens
  misc_RNA (1)...(19): siRNA sense strand
gagccaaguaucagauguu

SEQ ID NO: 1160026 - RNA, 19 nt, Homo sapiens
  misc_RNA (1)...(19): siRNA sense strand
uaaagcggaauucaucaga

SEQ ID NO: 1160027 - RNA, 19 nt, Homo sapiens
  misc_RNA (1)...(19): siRNA sense strand
ccaauaaagcggaauucau

SEQ ID NO: 1160028 - RNA, 19 nt, Homo sapiens
  misc_RNA (1)...(19): siRNA sense strand
gcuggacccugcgucuauu

SEQ ID NO: 1160029 - RNA, 19 nt, Homo sapiens
  misc_RNA (1)...(19): siRNA sense strand
uggaagacguaaagcuaau

SEQ ID NO: 1160030 - RNA, 19 nt, Homo sapiens
  misc_RNA (1)...(19): siRNA sense strand
cagacgaagacacagauuu

SEQ ID NO: 1160031 - RNA, 19 nt, Homo sapiens
  misc_RNA (1)...(19): siRNA sense strand
uugccacgcuggucauuga

SEQ ID NO: 1160032 - RNA, 19 nt, Homo sapiens
  misc_RNA (1)...(19): siRNA sense strand
uggacagcacuuuauaaua

SEQ ID NO: 1160033 - RNA, 19 nt, Homo sapiens
  misc_RNA (1)...(19): siRNA sense strand
aaacucccguugauuaugc

SEQ ID NO: 1160034 - RNA, 19 nt, Homo sapiens
  misc_RNA (1)...(19): siRNA sense strand
ggaugacgauagugugacu

SEQ ID NO: 1160035 - RNA, 19 nt, Homo sapiens
  misc_RNA (1)...(19): siRNA sense strand
cagcguggcaucagacgaa

SEQ ID NO: 1160036 - RNA, 19 nt, Homo sapiens
  misc_RNA (1)...(19): siRNA sense strand
gaguacucaucaacacgaa

SEQ ID NO: 1160037 - RNA, 19 nt, Homo sapiens
  misc_RNA (1)...(19): siRNA sense strand
cugaauuauuggcaguaua

SEQ ID NO: 1160038 - RNA, 19 nt, Homo sapiens
  misc_RNA (1)...(19): siRNA sense strand
caaagaucuuagcaagcaa

SEQ ID NO: 1160039 - RNA, 19 nt, Homo sapiens
  misc_RNA (1)...(19): siRNA sense strand
gugagaacagggaaucuug

SEQ ID NO: 1160040 - RNA, 19 nt, Homo sapiens
  misc_RNA (1)...(19): siRNA sense strand
gaucagcccgacuaugaca

SEQ ID NO: 1160041 - RNA, 19 nt, Homo sapiens
  misc_RNA (1)...(19): siRNA sense strand
uagugugacugccaaagau

SEQ ID NO: 1160042 - RNA, 19 nt, Homo sapiens
  misc_RNA (1)...(19): siRNA sense strand
gacagcagccuggauuugu

SEQ ID NO: 1160043 - RNA, 19 nt, Homo sapiens
  misc_RNA (1)...(19): siRNA sense strand
gagcagacccaggcacaca

SEQ ID NO: 1160044 - RNA, 19 nt, Homo sapiens
  misc_RNA (1)...(19): siRNA sense strand
ugagcuaacggacagacua

SEQ ID NO: 1160045 - RNA, 19 nt, Homo sapiens
  misc_RNA (1)...(19): siRNA sense strand
caagugaggcaucugaaac

SEQ ID NO: 1160046 - RNA, 19 nt, Homo sapiens
  misc_RNA (1)...(19): siRNA sense strand
cggacagacuagccuucua

SEQ ID NO: 1160047 - RNA, 19 nt, Homo sapiens
  misc_RNA (1)...(19): siRNA sense strand
ggacccugcgucuauuaug

SEQ ID NO: 1160048 - RNA, 19 nt, Homo sapiens
  misc_RNA (1)...(19): siRNA sense strand
cagcagggcaguucucucu

SEQ ID NO: 1160049 - RNA, 19 nt, Homo sapiens
  misc_RNA (1)...(19): siRNA sense strand
gagcuaacggacagacuag

SEQ ID NO: 1160050 - RNA, 19 nt, Homo sapiens
  misc_RNA (1)...(19): siRNA sense strand
acaggauucuagugggaaa

SEQ ID NO: 1160051 - RNA, 19 nt, Homo sapiens
  misc_RNA (1)...(19): siRNA sense strand
caaagcagggcagauuuua

SEQ ID NO: 1160052 - RNA, 19 nt, Homo sapiens
  misc_RNA (1)...(19): siRNA sense strand
ccaaguaucagauguuagc

SEQ ID NO: 1160053 - RNA, 19 nt, Homo sapiens
  misc_RNA (1)...(19): siRNA sense strand
gacccaggcacacaggauu

SEQ ID NO: 1160054 - RNA, 19 nt, Homo sapiens
  misc_RNA (1)...(19): siRNA sense strand
caucagacgaagacacaga

SEQ ID NO: 1160055 - RNA, 19 nt, Homo sapiens
  misc_RNA (1)...(19): siRNA sense strand
acaacgaucagcccgacua

SEQ ID NO: 1160056 - RNA, 19 nt, Homo sapiens
  misc_RNA (1)...(19): siRNA sense strand
uauaugggagcauucuuug

SEQ ID NO: 1160057 - RNA, 19 nt, Homo sapiens
  misc_RNA (1)...(19): siRNA sense strand
cuccaacacugcuucagau

SEQ ID NO: 1160058 - RNA, 19 nt, Homo sapiens
  misc_RNA (1)...(19): siRNA sense strand
cagacuagccuucuaucuc

SEQ ID NO: 1160059 - RNA, 19 nt, Homo sapiens
  misc_RNA (1)...(19): siRNA sense strand
ugagaacagggaaucuuga

SEQ ID NO: 1160060 - RNA, 19 nt, Homo sapiens
  misc_RNA (1)...(19): siRNA sense strand
uugagacuguuaucuuuag

SEQ ID NO: 1160061 - RNA, 19 nt, Homo sapiens
  misc_RNA (1)...(19): siRNA sense strand
caacgaucagcccgacuau

SEQ ID NO: 1160062 - RNA, 19 nt, Homo sapiens
  misc_RNA (1)...(19): siRNA sense strand
cagccuggauuugucugaa

SEQ ID NO: 1160063 - RNA, 19 nt, Homo sapiens
  misc_RNA (1)...(19): siRNA sense strand
aauggacagcacuuuauaa

SEQ ID NO: 1160064 - RNA, 19 nt, Homo sapiens
  misc_RNA (1)...(19): siRNA sense strand
aguggaagacguaaagcua

SEQ ID NO: 1160065 - RNA, 19 nt, Homo sapiens
  misc_RNA (1)...(19): siRNA sense strand
aaucagggcagacagaagu

SEQ ID NO: 1160066 - RNA, 19 nt, Homo sapiens
  misc_RNA (1)...(19): siRNA sense strand
agacacagauuuggaaacc

SEQ ID NO: 1160067 - RNA, 19 nt, Homo sapiens
  misc_RNA (1)...(19): siRNA sense strand
auguggagcucauacugaa

SEQ ID NO: 1160068 - RNA, 19 nt, Homo sapiens
  misc_RNA (1)...(19): siRNA sense strand
uauaauaacggugcuaacu

SEQ ID NO: 1160069 - RNA, 19 nt, Homo sapiens
  misc_RNA (1)...(19): siRNA sense strand
ucagggcagacagaaguua

SEQ ID NO: 1160070 - RNA, 19 nt, Homo sapiens
  misc_RNA (1)...(19): siRNA sense strand
guugagaccuuguauaaua

SEQ ID NO: 1160071 - RNA, 19 nt, Homo sapiens
  misc_RNA (1)...(19): siRNA sense strand
ggacagcacuuuauaauac

SEQ ID NO: 1160072 - RNA, 19 nt, Homo sapiens
  misc_RNA (1)...(19): siRNA sense strand
ggaaaccacugcaagcaaa

SEQ ID NO: 1160073 - RNA, 19 nt, Homo sapiens
  misc_RNA (1)...(19): siRNA sense strand
uaacggugcuaacucuaua

SEQ ID NO: 1160074 - RNA, 19 nt, Homo sapiens
  misc_RNA (1)...(19): siRNA sense strand
gaaguuagcucgguucaac

SEQ ID NO: 1160075 - RNA, 19 nt, Homo sapiens
  misc_RNA (1)...(19): siRNA sense strand
ggaaaacucccguugauua

SEQ ID NO: 1160076 - RNA, 19 nt, Homo sapiens
  misc_RNA (1)...(19): siRNA sense strand
gauaaaguacaucccaaua

SEQ ID NO: 1160077 - RNA, 19 nt, Homo sapiens
  misc_RNA (1)...(19): siRNA sense strand
ccaaagaucuuagcaagca

SEQ ID NO: 1160078 - RNA, 19 nt, Homo sapiens
  misc_RNA (1)...(19): siRNA sense strand
guucaacgcccaugaguuu

SEQ ID NO: 1160079 - RNA, 19 nt, Homo sapiens
  misc_RNA (1)...(19): siRNA sense strand
cgccauaucucccaaguga

SEQ ID NO: 1160080 - RNA, 19 nt, Homo sapiens
  misc_RNA (1)...(19): siRNA sense strand
guuugagacuguuaucuuu

SEQ ID NO: 1160081 - RNA, 19 nt, Homo sapiens
  misc_RNA (1)...(19): siRNA sense strand
gcagacagcagccuggauu

SEQ ID NO: 1160082 - RNA, 19 nt, Homo sapiens
  misc_RNA (1)...(19): siRNA sense strand
caauaaagcggaauucauc

SEQ ID NO: 1160083 - RNA, 19 nt, Homo sapiens
  misc_RNA (1)...(19): siRNA sense strand
gacccugcgucuauuauga

SEQ ID NO: 1160084 - RNA, 19 nt, Homo sapiens
  misc_RNA (1)...(19): siRNA sense strand
ucauugacauucucaguga

SEQ ID NO: 1160085 - RNA, 19 nt, Homo sapiens
  misc_RNA (1)...(19): siRNA sense strand
ggacagacuagccuucuau

SEQ ID NO: 1160086 - RNA, 19 nt, Homo sapiens
  misc_RNA (1)...(19): siRNA sense strand
gaacagggaaucuugaaac

SEQ ID NO: 1160087 - RNA, 19 nt, Homo sapiens
  misc_RNA (1)...(19): siRNA sense strand
caacacugcuucagauggu

SEQ ID NO: 1160088 - RNA, 19 nt, Homo sapiens
  misc_RNA (1)...(19): siRNA sense strand
caagccaacuucuuucauc

SEQ ID NO: 1160089 - RNA, 19 nt, Homo sapiens
  misc_RNA (1)...(19): siRNA sense strand
uuuacaggcugaauuauug

SEQ ID NO: 1160090 - RNA, 19 nt, Homo sapiens
  misc_RNA (1)...(19): siRNA sense strand
gaaguugacaggcgagaga

SEQ ID NO: 1160091 - RNA, 19 nt, Homo sapiens
  misc_RNA (1)...(19): siRNA sense strand
uaauaacggugcuaacucu

SEQ ID NO: 1160092 - RNA, 19 nt, Homo sapiens
  misc_RNA (1)...(19): siRNA sense strand
gcagagcgccucguggaaa

SEQ ID NO: 1160093 - RNA, 19 nt, Homo sapiens
  misc_RNA (1)...(19): siRNA sense strand
gcaggaaaccagaucacaa

SEQ ID NO: 1160094 - RNA, 19 nt, Homo sapiens
  misc_RNA (1)...(19): siRNA sense strand
gaagacacagauuuggaaa

SEQ ID NO: 1160095 - RNA, 19 nt, Homo sapiens
  misc_RNA (1)...(19): siRNA sense strand
caggaaaccagaucacaaa

SEQ ID NO: 1160096 - RNA, 19 nt, Homo sapiens
  misc_RNA (1)...(19): siRNA sense strand
gaaaucagggcagacagaa

SEQ ID NO: 1160097 - RNA, 19 nt, Homo sapiens
  misc_RNA (1)...(19): siRNA sense strand
uugaagaacuugccaugga

SEQ ID NO: 1160098 - RNA, 19 nt, Homo sapiens
  misc_RNA (1)...(19): siRNA sense strand
gcacaagccaacuucuuuc

SEQ ID NO: 1160099 - RNA, 19 nt, Homo sapiens
  misc_RNA (1)...(19): siRNA sense strand
agacuagccuucuaucucu

SEQ ID NO: 1160100 - RNA, 19 nt, Homo sapiens
  misc_RNA (1)...(19): siRNA sense strand
gagaacagggaaucuugaa

SEQ ID NO: 1160101 - RNA, 19 nt, Homo sapiens
  misc_RNA (1)...(19): siRNA sense strand
ugaagaacuugccauggau

SEQ ID NO: 1160102 - RNA, 19 nt, Homo sapiens
  misc_RNA (1)...(19): siRNA sense strand
cgaagacacagauuuggaa

SEQ ID NO: 1160103 - RNA, 19 nt, Homo sapiens
  misc_RNA (1)...(19): siRNA sense strand
gagcacaagccaacuucuu

SEQ ID NO: 1160104 - RNA, 19 nt, Homo sapiens
  misc_RNA (1)...(19): siRNA sense strand
agacgaagacacagauuug

SEQ ID NO: 1160105 - RNA, 19 nt, Homo sapiens
  misc_RNA (1)...(19): siRNA sense strand
guaaauaggggaacguuuu

SEQ ID NO: 1160106 - RNA, 19 nt, Homo sapiens
  misc_RNA (1)...(19): siRNA sense strand
aaauggacagcacuuuaua

SEQ ID NO: 1160107 - RNA, 19 nt, Homo sapiens
  misc_RNA (1)...(19): siRNA sense strand
ggcaaaagcugcuaagaag

SEQ ID NO: 1160108 - RNA, 19 nt, Homo sapiens
  misc_RNA (1)...(19): siRNA sense strand
ggagacagcagggcaguuc

SEQ ID NO: 1160109 - RNA, 19 nt, Homo sapiens
  misc_RNA (1)...(19): siRNA sense strand
ugguugagaccuuguauaa

SEQ ID NO: 1160110 - RNA, 19 nt, Homo sapiens
  misc_RNA (1)...(19): siRNA sense strand
gauguuagcguucguccau

SEQ ID NO: 1160111 - RNA, 19 nt, Homo sapiens
  misc_RNA (1)...(19): siRNA sense strand
agccaaguaucagauguua

SEQ ID NO: 1160112 - RNA, 19 nt, Homo sapiens
  misc_RNA (1)...(19): siRNA sense strand
guggaagacguaaagcuaa

SEQ ID NO: 1160113 - RNA, 19 nt, Homo sapiens
  misc_RNA (1)...(19): siRNA sense strand
acgaucagcccgacuauga

SEQ ID NO: 1160114 - RNA, 19 nt, Homo sapiens
  misc_RNA (1)...(19): siRNA sense strand
cagagcgccucguggaaau

SEQ ID NO: 1160115 - RNA, 19 nt, Homo sapiens
  misc_RNA (1)...(19): siRNA sense strand
gcaaggagggcaccaugag

SEQ ID NO: 1160116 - RNA, 19 nt, Homo sapiens
  misc_RNA (1)...(19): siRNA sense strand
gcugaauuauuggcaguau

SEQ ID NO: 1160117 - RNA, 19 nt, Homo sapiens
  misc_RNA (1)...(19): siRNA sense strand
ccaagugaggcaucugaaa

SEQ ID NO: 1160118 - RNA, 19 nt, Homo sapiens
  misc_RNA (1)...(19): siRNA sense strand
caaaagcugcuaagaagaa

SEQ ID NO: 1160119 - RNA, 19 nt, Homo sapiens
  misc_RNA (1)...(19): siRNA sense strand
cuauaugggagcauucuuu

SEQ ID NO: 1160120 - RNA, 19 nt, Homo sapiens
  misc_RNA (1)...(19): siRNA sense strand
cgaaaucagggcagacaga

SEQ ID NO: 1160121 - RNA, 19 nt, Homo sapiens
  misc_RNA (1)...(19): siRNA sense strand
guacucaucaacacgaaau

SEQ ID NO: 1160122 - RNA, 19 nt, Homo sapiens
  misc_RNA (1)...(19): siRNA sense strand
gccuggauuugucugaauu

SEQ ID NO: 1160123 - RNA, 19 nt, Homo sapiens
  misc_RNA (1)...(19): siRNA sense strand
gaaaacucccguugauuau

SEQ ID NO: 1160124 - RNA, 19 nt, Homo sapiens
  misc_RNA (1)...(19): siRNA sense strand
gauuuuacaggcugaauua

SEQ ID NO: 1160125 - RNA, 19 nt, Homo sapiens
  misc_RNA (1)...(19): siRNA sense strand
gagccaaguaucagauguu

SEQ ID NO: 1160126 - RNA, 19 nt, Homo sapiens
  misc_RNA (1)...(19): siRNA sense strand
uaaagcggaauucaucaga

SEQ ID NO: 1160127 - RNA, 19 nt, Homo sapiens
  misc_RNA (1)...(19): siRNA sense strand
ccaauaaagcggaauucau

SEQ ID NO: 1160128 - RNA, 19 nt, Homo sapiens
  misc_RNA (1)...(19): siRNA sense strand
gcuggacccugcgucuauu

SEQ ID NO: 1160129 - RNA, 19 nt, Homo sapiens
  misc_RNA (1)...(19): siRNA sense strand
uggaagacguaaagcuaau

SEQ ID NO: 1160130 - RNA, 19 nt, Homo sapiens
  misc_RNA (1)...(19): siRNA sense strand
cagacgaagacacagauuu

SEQ ID NO: 1160131 - RNA, 19 nt, Homo sapiens
  misc_RNA (1)...(19): siRNA sense strand
uugccacgcuggucauuga

SEQ ID NO: 1160132 - RNA, 19 nt, Homo sapiens
  misc_RNA (1)...(19): siRNA sense strand
uggacagcacuuuauaaua

SEQ ID NO: 1160133 - RNA, 19 nt, Homo sapiens
  misc_RNA (1)...(19): siRNA sense strand
aaacucccguugauuaugc

SEQ ID NO: 1160134 - RNA, 19 nt, Homo sapiens
  misc_RNA (1)...(19): siRNA sense strand
ggaugacgauagugugacu

SEQ ID NO: 1160135 - RNA, 19 nt, Homo sapiens
  misc_RNA (1)...(19): siRNA sense strand
cagcguggcaucagacgaa

SEQ ID NO: 1160136 - RNA, 19 nt, Homo sapiens
  misc_RNA (1)...(19): siRNA sense strand
gaguacucaucaacacgaa

SEQ ID NO: 1160137 - RNA, 19 nt, Homo sapiens
  misc_RNA (1)...(19): siRNA sense strand
cugaauuauuggcaguaua

SEQ ID NO: 1160138 - RNA, 19 nt, Homo sapiens
  misc_RNA (1)...(19): siRNA sense strand
caaagaucuuagcaagcaa

SEQ ID NO: 1160139 - RNA, 19 nt, Homo sapiens
  misc_RNA (1)...(19): siRNA sense strand
gugagaacagggaaucuug

SEQ ID NO: 1160140 - RNA, 19 nt, Homo sapiens
  misc_RNA (1)...(19): siRNA sense strand
gaucagcccgacuaugaca

SEQ ID NO: 1160141 - RNA, 19 nt, Homo sapiens
  misc_RNA (1)...(19): siRNA sense strand
uagugugacugccaaagau

SEQ ID NO: 1160142 - RNA, 19 nt, Homo sapiens
  misc_RNA (1)...(19): siRNA sense strand
gacagcagccuggauuugu

SEQ ID NO: 1160143 - RNA, 19 nt, Homo sapiens
  misc_RNA (1)...(19): siRNA sense strand
gagcagacccaggcacaca

SEQ ID NO: 1160144 - RNA, 19 nt, Homo sapiens
  misc_RNA (1)...(19): siRNA sense strand
ugagcuaacggacagacua

SEQ ID NO: 1160145 - RNA, 19 nt, Homo sapiens
  misc_RNA (1)...(19): siRNA sense strand
caagugaggcaucugaaac

SEQ ID NO: 1160146 - RNA, 19 nt, Homo sapiens
  misc_RNA (1)...(19): siRNA sense strand
cggacagacuagccuucua

SEQ ID NO: 1160147 - RNA, 19 nt, Homo sapiens
  misc_RNA (1)...(19): siRNA sense strand
ggacccugcgucuauuaug

SEQ ID NO: 1160148 - RNA, 19 nt, Homo sapiens
  misc_RNA (1)...(19): siRNA sense strand
cagcagggcaguucucucu

SEQ ID NO: 1160149 - RNA, 19 nt, Homo sapiens
  misc_RNA (1)...(19): siRNA sense strand
gagcuaacggacagacuag

SEQ ID NO: 1160150 - RNA, 19 nt, Homo sapiens
  misc_RNA (1)...(19): siRNA sense strand
acaggauucuagugggaaa

SEQ ID NO: 1160151 - RNA, 19 nt, Homo sapiens
  misc_RNA (1)...(19): siRNA sense strand
caaagcagggcagauuuua

SEQ ID NO: 1160152 - RNA, 19 nt, Homo sapiens
  misc_RNA (1)...(19): siRNA sense strand
ccaaguaucagauguuagc

SEQ ID NO: 1160153 - RNA, 19 nt, Homo sapiens
  misc_RNA (1)...(19): siRNA sense strand
gacccaggcacacaggauu

SEQ ID NO: 1160154 - RNA, 19 nt, Homo sapiens
  misc_RNA (1)...(19): siRNA sense strand
caucagacgaagacacaga

SEQ ID NO: 1160155 - RNA, 19 nt, Homo sapiens
  misc_RNA (1)...(19): siRNA sense strand
acaacgaucagcccgacua

SEQ ID NO: 1160156 - RNA, 19 nt, Homo sapiens
  misc_RNA (1)...(19): siRNA sense strand
uauaugggagcauucuuug

SEQ ID NO: 1160157 - RNA, 19 nt, Homo sapiens
  misc_RNA (1)...(19): siRNA sense strand
cuccaacacugcuucagau

SEQ ID NO: 1160158 - RNA, 19 nt, Homo sapiens
  misc_RNA (1)...(19): siRNA sense strand
cagacuagccuucuaucuc

SEQ ID NO: 1160159 - RNA, 19 nt, Homo sapiens
  misc_RNA (1)...(19): siRNA sense strand
ugagaacagggaaucuuga

SEQ ID NO: 1160160 - RNA, 19 nt, Homo sapiens
  misc_RNA (1)...(19): siRNA sense strand
uugagacuguuaucuuuag

SEQ ID NO: 1160161 - RNA, 19 nt, Homo sapiens
  misc_RNA (1)...(19): siRNA sense strand
caacgaucagcccgacuau

SEQ ID NO: 1160162 - RNA, 19 nt, Homo sapiens
  misc_RNA (1)...(19): siRNA sense strand
cagccuggauuugucugaa

SEQ ID NO: 1160163 - RNA, 19 nt, Homo sapiens
  misc_RNA (1)...(19): siRNA sense strand
aauggacagcacuuuauaa

SEQ ID NO: 1160164 - RNA, 19 nt, Homo sapiens
  misc_RNA (1)...(19): siRNA sense strand
aguggaagacguaaagcua

SEQ ID NO: 1160165 - RNA, 19 nt, Homo sapiens
  misc_RNA (1)...(19): siRNA sense strand
aaucagggcagacagaagu

SEQ ID NO: 1160166 - RNA, 19 nt, Homo sapiens
  misc_RNA (1)...(19): siRNA sense strand
agacacagauuuggaaacc

SEQ ID NO: 1160167 - RNA, 19 nt, Homo sapiens
  misc_RNA (1)...(19): siRNA sense strand
auguggagcucauacugaa

SEQ ID NO: 1160168 - RNA, 19 nt, Homo sapiens
  misc_RNA (1)...(19): siRNA sense strand
uauaauaacggugcuaacu

SEQ ID NO: 1160169 - RNA, 19 nt, Homo sapiens
  misc_RNA (1)...(19): siRNA sense strand
ucagggcagacagaaguua

SEQ ID NO: 1160170 - RNA, 19 nt, Homo sapiens
  misc_RNA (1)...(19): siRNA sense strand
guugagaccuuguauaaua

SEQ ID NO: 1160171 - RNA, 19 nt, Homo sapiens
  misc_RNA (1)...(19): siRNA sense strand
ggacagcacuuuauaauac

SEQ ID NO: 1160172 - RNA, 19 nt, Homo sapiens
  misc_RNA (1)...(19): siRNA sense strand
ggaaaccacugcaagcaaa

SEQ ID NO: 1160173 - RNA, 19 nt, Homo sapiens
  misc_RNA (1)...(19): siRNA sense strand
uaacggugcuaacucuaua

SEQ ID NO: 1160174 - RNA, 19 nt, Homo sapiens
  misc_RNA (1)...(19): siRNA sense strand
gaaguuagcucgguucaac

SEQ ID NO: 1160175 - RNA, 19 nt, Homo sapiens
  misc_RNA (1)...(19): siRNA sense strand
ggaaaacucccguugauua

SEQ ID NO: 1160176 - RNA, 19 nt, Homo sapiens
  misc_RNA (1)...(19): siRNA sense strand
gauaaaguacaucccaaua

SEQ ID NO: 1160177 - RNA, 19 nt, Homo sapiens
  misc_RNA (1)...(19): siRNA sense strand
ccaaagaucuuagcaagca

SEQ ID NO: 1160178 - RNA, 19 nt, Homo sapiens
  misc_RNA (1)...(19): siRNA sense strand
guucaacgcccaugaguuu

SEQ ID NO: 1160179 - RNA, 19 nt, Homo sapiens
  misc_RNA (1)...(19): siRNA sense strand
cgccauaucucccaaguga

SEQ ID NO: 1160180 - RNA, 19 nt, Homo sapiens
  misc_RNA (1)...(19): siRNA sense strand
guuugagacuguuaucuuu

SEQ ID NO: 1160181 - RNA, 19 nt, Homo sapiens
  misc_RNA (1)...(19): siRNA sense strand
gcagacagcagccuggauu

SEQ ID NO: 1160182 - RNA, 19 nt, Homo sapiens
  misc_RNA (1)...(19): siRNA sense strand
caauaaagcggaauucauc

SEQ ID NO: 1160183 - RNA, 19 nt, Homo sapiens
  misc_RNA (1)...(19): siRNA sense strand
gacccugcgucuauuauga

SEQ ID NO: 1160184 - RNA, 19 nt, Homo sapiens
  misc_RNA (1)...(19): siRNA sense strand
ucauugacauucucaguga

SEQ ID NO: 1160185 - RNA, 19 nt, Homo sapiens
  misc_RNA (1)...(19): siRNA sense strand
ggacagacuagccuucuau

SEQ ID NO: 1160186 - RNA, 19 nt, Homo sapiens
  misc_RNA (1)...(19): siRNA sense strand
gaacagggaaucuugaaac

SEQ ID NO: 1160187 - RNA, 19 nt, Homo sapiens
  misc_RNA (1)...(19): siRNA sense strand
caacacugcuucagauggu

SEQ ID NO: 1160188 - RNA, 19 nt, Homo sapiens
  misc_RNA (1)...(19): siRNA sense strand
caagccaacuucuuucauc

SEQ ID NO: 1160189 - RNA, 19 nt, Homo sapiens
  misc_RNA (1)...(19): siRNA sense strand
uuuacaggcugaauuauug

SEQ ID NO: 1160190 - RNA, 19 nt, Homo sapiens
  misc_RNA (1)...(19): siRNA sense strand
gaaguugacaggcgagaga

SEQ ID NO: 1160191 - RNA, 19 nt, Homo sapiens
  misc_RNA (1)...(19): siRNA sense strand
uaauaacggugcuaacucu

SEQ ID NO: 1160192 - RNA, 19 nt, Homo sapiens
  misc_RNA (1)...(19): siRNA sense strand
gcagagcgccucguggaaa

SEQ ID NO: 1160193 - RNA, 19 nt, Homo sapiens
  misc_RNA (1)...(19): siRNA sense strand
gcaggaaaccagaucacaa

SEQ ID NO: 1160194 - RNA, 19 nt, Homo sapiens
  misc_RNA (1)...(19): siRNA sense strand
gaagacacagauuuggaaa

SEQ ID NO: 1160195 - RNA, 19 nt, Homo sapiens
  misc_RNA (1)...(19): siRNA sense strand
caggaaaccagaucacaaa

SEQ ID NO: 1160196 - RNA, 19 nt, Homo sapiens
  misc_RNA (1)...(19): siRNA sense strand
gaaaucagggcagacagaa

SEQ ID NO: 1160197 - RNA, 19 nt, Homo sapiens
  misc_RNA (1)...(19): siRNA sense strand
uugaagaacuugccaugga

SEQ ID NO: 1160198 - RNA, 19 nt, Homo sapiens
  misc_RNA (1)...(19): siRNA sense strand
gcacaagccaacuucuuuc

SEQ ID NO: 1160199 - RNA, 19 nt, Homo sapiens
  misc_RNA (1)...(19): siRNA sense strand
agacuagccuucuaucucu

SEQ ID NO: 1160200 - RNA, 19 nt, Homo sapiens
  misc_RNA (1)...(19): siRNA sense strand
gagaacagggaaucuugaa

SEQ ID NO: 1160201 - RNA, 19 nt, Homo sapiens
  misc_RNA (1)...(19): siRNA sense strand
ugaagaacuugccauggau

SEQ ID NO: 1160202 - RNA, 19 nt, Homo sapiens
  misc_RNA (1)...(19): siRNA sense strand
cgaagacacagauuuggaa

SEQ ID NO: 1160203 - RNA, 19 nt, Homo sapiens
  misc_RNA (1)...(19): siRNA sense strand
gagcacaagccaacuucuu

SEQ ID NO: 1160204 - RNA, 19 nt, Homo sapiens
  misc_RNA (1)...(19): siRNA sense strand
agacgaagacacagauuug

SEQ ID NO: 1160205 - RNA, 19 nt, Homo sapiens
  misc_RNA (1)...(19): siRNA sense strand
guaaauaggggaacguuuu

SEQ ID NO: 1160206 - RNA, 19 nt, Homo sapiens
  misc_RNA (1)...(19): siRNA sense strand
aaauggacagcacuuuaua

SEQ ID NO: 1160207 - RNA, 19 nt, Homo sapiens
  misc_RNA (1)...(19): siRNA sense strand
ggcaaaagcugcuaagaag

SEQ ID NO: 1160208 - RNA, 19 nt, Homo sapiens
  misc_RNA (1)...(19): siRNA sense strand
ggagacagcagggcaguuc

SEQ ID NO: 1160209 - RNA, 19 nt, Homo sapiens
  misc_RNA (1)...(19): siRNA sense strand
ugguugagaccuuguauaa

SEQ ID NO: 1160210 - RNA, 19 nt, Homo sapiens
  misc_RNA (1)...(19): siRNA sense strand
gauguuagcguucguccau

SEQ ID NO: 1160211 - RNA, 19 nt, Homo sapiens
  misc_RNA (1)...(19): siRNA sense strand
agccaaguaucagauguua

SEQ ID NO: 1160212 - RNA, 19 nt, Homo sapiens
  misc_RNA (1)...(19): siRNA sense strand
guggaagacguaaagcuaa

SEQ ID NO: 1160213 - RNA, 19 nt, Homo sapiens
  misc_RNA (1)...(19): siRNA sense strand
acgaucagcccgacuauga

SEQ ID NO: 1160214 - RNA, 19 nt, Homo sapiens
  misc_RNA (1)...(19): siRNA sense strand
cagagcgccucguggaaau

SEQ ID NO: 1160215 - RNA, 19 nt, Homo sapiens
  misc_RNA (1)...(19): siRNA sense strand
gcaaggagggcaccaugag

SEQ ID NO: 1160216 - RNA, 19 nt, Homo sapiens
  misc_RNA (1)...(19): siRNA sense strand
gcugaauuauuggcaguau

SEQ ID NO: 1160217 - RNA, 19 nt, Homo sapiens
  misc_RNA (1)...(19): siRNA sense strand
ccaagugaggcaucugaaa

SEQ ID NO: 1160218 - RNA, 19 nt, Homo sapiens
  misc_RNA (1)...(19): siRNA sense strand
caaaagcugcuaagaagaa

SEQ ID NO: 1160219 - RNA, 19 nt, Homo sapiens
  misc_RNA (1)...(19): siRNA sense strand
cuauaugggagcauucuuu

SEQ ID NO: 1160220 - RNA, 19 nt, Homo sapiens
  misc_RNA (1)...(19): siRNA sense strand
cgaaaucagggcagacaga

SEQ ID NO: 1160221 - RNA, 19 nt, Homo sapiens
  misc_RNA (1)...(19): siRNA sense strand
guacucaucaacacgaaau

SEQ ID NO: 1160222 - RNA, 19 nt, Homo sapiens
  misc_RNA (1)...(19): siRNA sense strand
gccuggauuugucugaauu

SEQ ID NO: 1160223 - RNA, 19 nt, Homo sapiens
  misc_RNA (1)...(19): siRNA sense strand
gaaaacucccguugauuau

SEQ ID NO: 1160224 - RNA, 19 nt, Homo sapiens
  misc_RNA (1)...(19): siRNA sense strand
gauuuuacaggcugaauua

SEQ ID NO: 1160225 - RNA, 19 nt, Homo sapiens
  misc_RNA (1)...(19): siRNA sense strand
gagccaaguaucagauguu

SEQ ID NO: 1160226 - RNA, 19 nt, Homo sapiens
  misc_RNA (1)...(19): siRNA sense strand
uaaagcggaauucaucaga

SEQ ID NO: 1160227 - RNA, 19 nt, Homo sapiens
  misc_RNA (1)...(19): siRNA sense strand
ccaauaaagcggaauucau

SEQ ID NO: 1160228 - RNA, 19 nt, Homo sapiens
  misc_RNA (1)...(19): siRNA sense strand
gcuggacccugcgucuauu

SEQ ID NO: 1160229 - RNA, 19 nt, Homo sapiens
  misc_RNA (1)...(19): siRNA sense strand
uggaagacguaaagcuaau

SEQ ID NO: 1160230 - RNA, 19 nt, Homo sapiens
  misc_RNA (1)...(19): siRNA sense strand
cagacgaagacacagauuu

SEQ ID NO: 1160231 - RNA, 19 nt, Homo sapiens
  misc_RNA (1)...(19): siRNA sense strand
uugccacgcuggucauuga

SEQ ID NO: 1160232 - RNA, 19 nt, Homo sapiens
  misc_RNA (1)...(19): siRNA sense strand
uggacagcacuuuauaaua

SEQ ID NO: 1160233 - RNA, 19 nt, Homo sapiens
  misc_RNA (1)...(19): siRNA sense strand
aaacucccguugauuaugc

SEQ ID NO: 1160234 - RNA, 19 nt, Homo sapiens
  misc_RNA (1)...(19): siRNA sense strand
ggaugacgauagugugacu

SEQ ID NO: 1160235 - RNA, 19 nt, Homo sapiens
  misc_RNA (1)...(19): siRNA sense strand
cagcguggcaucagacgaa

SEQ ID NO: 1160236 - RNA, 19 nt, Homo sapiens
  misc_RNA (1)...(19): siRNA sense strand
gaguacucaucaacacgaa

SEQ ID NO: 1160237 - RNA, 19 nt, Homo sapiens
  misc_RNA (1)...(19): siRNA sense strand
cugaauuauuggcaguaua

SEQ ID NO: 1160238 - RNA, 19 nt, Homo sapiens
  misc_RNA (1)...(19): siRNA sense strand
caaagaucuuagcaagcaa

SEQ ID NO: 1160239 - RNA, 19 nt, Homo sapiens
  misc_RNA (1)...(19): siRNA sense strand
gugagaacagggaaucuug

SEQ ID NO: 1160240 - RNA, 19 nt, Homo sapiens
  misc_RNA (1)...(19): siRNA sense strand
gaucagcccgacuaugaca

SEQ ID NO: 1160241 - RNA, 19 nt, Homo sapiens
  misc_RNA (1)...(19): siRNA sense strand
uagugugacugccaaagau

SEQ ID NO: 1160242 - RNA, 19 nt, Homo sapiens
  misc_RNA (1)...(19): siRNA sense strand
gacagcagccuggauuugu

SEQ ID NO: 1160243 - RNA, 19 nt, Homo sapiens
  misc_RNA (1)...(19): siRNA sense strand
gagcagacccaggcacaca

SEQ ID NO: 1160244 - RNA, 19 nt, Homo sapiens
  misc_RNA (1)...(19): siRNA sense strand
ugagcuaacggacagacua

SEQ ID NO: 1160245 - RNA, 19 nt, Homo sapiens
  misc_RNA (1)...(19): siRNA sense strand
caagugaggcaucugaaac

SEQ ID NO: 1160246 - RNA, 19 nt, Homo sapiens
  misc_RNA (1)...(19): siRNA sense strand
cggacagacuagccuucua

SEQ ID NO: 1160247 - RNA, 19 nt, Homo sapiens
  misc_RNA (1)...(19): siRNA sense strand
ggacccugcgucuauuaug

SEQ ID NO: 1160248 - RNA, 19 nt, Homo sapiens
  misc_RNA (1)...(19): siRNA sense strand
cagcagggcaguucucucu

SEQ ID NO: 1160249 - RNA, 19 nt, Homo sapiens
  misc_RNA (1)...(19): siRNA sense strand
gagcuaacggacagacuag

SEQ ID NO: 1160250 - RNA, 19 nt, Homo sapiens
  misc_RNA (1)...(19): siRNA sense strand
acaggauucuagugggaaa

SEQ ID NO: 1160251 - RNA, 19 nt, Homo sapiens
  misc_RNA (1)...(19): siRNA sense strand
caaagcagggcagauuuua

SEQ ID NO: 1160252 - RNA, 19 nt, Homo sapiens
  misc_RNA (1)...(19): siRNA sense strand
ccaaguaucagauguuagc

SEQ ID NO: 1160253 - RNA, 19 nt, Homo sapiens
  misc_RNA (1)...(19): siRNA sense strand
gacccaggcacacaggauu

SEQ ID NO: 1160254 - RNA, 19 nt, Homo sapiens
  misc_RNA (1)...(19): siRNA sense strand
caucagacgaagacacaga

SEQ ID NO: 1160255 - RNA, 19 nt, Homo sapiens
  misc_RNA (1)...(19): siRNA sense strand
acaacgaucagcccgacua

SEQ ID NO: 1160256 - RNA, 19 nt, Homo sapiens
  misc_RNA (1)...(19): siRNA sense strand
uauaugggagcauucuuug

SEQ ID NO: 1160257 - RNA, 19 nt, Homo sapiens
  misc_RNA (1)...(19): siRNA sense strand
cuccaacacugcuucagau

SEQ ID NO: 1160258 - RNA, 19 nt, Homo sapiens
  misc_RNA (1)...(19): siRNA sense strand
cagacuagccuucuaucuc

SEQ ID NO: 1160259 - RNA, 19 nt, Homo sapiens
  misc_RNA (1)...(19): siRNA sense strand
ugagaacagggaaucuuga

SEQ ID NO: 1160260 - RNA, 19 nt, Homo sapiens
  misc_RNA (1)...(19): siRNA sense strand
uugagacuguuaucuuuag

SEQ ID NO: 1160261 - RNA, 19 nt, Homo sapiens
  misc_RNA (1)...(19): siRNA sense strand
caacgaucagcccgacuau

SEQ ID NO: 1160262 - RNA, 19 nt, Homo sapiens
  misc_RNA (1)...(19): siRNA sense strand
cagccuggauuugucugaa

SEQ ID NO: 1160263 - RNA, 19 nt, Homo sapiens
  misc_RNA (1)...(19): siRNA sense strand
aauggacagcacuuuauaa

SEQ ID NO: 1160264 - RNA, 19 nt, Homo sapiens
  misc_RNA (1)...(19): siRNA sense strand
aguggaagacguaaagcua

SEQ ID NO: 1160265 - RNA, 19 nt, Homo sapiens
  misc_RNA (1)...(19): siRNA sense strand
aaucagggcagacagaagu

SEQ ID NO: 1160266 - RNA, 19 nt, Homo sapiens
  misc_RNA (1)...(19): siRNA sense strand
agacacagauuuggaaacc

SEQ ID NO: 1160267 - RNA, 19 nt, Homo sapiens
  misc_RNA (1)...(19): siRNA sense strand
auguggagcucauacugaa

SEQ ID NO: 1160268 - RNA, 19 nt, Homo sapiens
  misc_RNA (1)...(19): siRNA sense strand
uauaauaacggugcuaacu

SEQ ID NO: 1160269 - RNA, 19 nt, Homo sapiens
  misc_RNA (1)...(19): siRNA sense strand
ucagggcagacagaaguua

SEQ ID NO: 1160270 - RNA, 19 nt, Homo sapiens
  misc_RNA (1)...(19): siRNA sense strand
guugagaccuuguauaaua

SEQ ID NO: 1160271 - RNA, 19 nt, Homo sapiens
  misc_RNA (1)...(19): siRNA sense strand
ggacagcacuuuauaauac

SEQ ID NO: 1160272 - RNA, 19 nt, Homo sapiens
  misc_RNA (1)...(19): siRNA sense strand
ggaaaccacugcaagcaaa

SEQ ID NO: 1160273 - RNA, 19 nt, Homo sapiens
  misc_RNA (1)...(19): siRNA sense strand
uaacggugcuaacucuaua

SEQ ID NO: 1160274 - RNA, 19 nt, Homo sapiens
  misc_RNA (1)...(19): siRNA sense strand
gaaguuagcucgguucaac

SEQ ID NO: 1160275 - RNA, 19 nt, Homo sapiens
  misc_RNA (1)...(19): siRNA sense strand
ggaaaacucccguugauua

SEQ ID NO: 1160276 - RNA, 19 nt, Homo sapiens
  misc_RNA (1)...(19): siRNA sense strand
gauaaaguacaucccaaua

SEQ ID NO: 1160277 - RNA, 19 nt, Homo sapiens
  misc_RNA (1)...(19): siRNA sense strand
ccaaagaucuuagcaagca

SEQ ID NO: 1160278 - RNA, 19 nt, Homo sapiens
  misc_RNA (1)...(19): siRNA sense strand
guucaacgcccaugaguuu

SEQ ID NO: 1160279 - RNA, 19 nt, Homo sapiens
  misc_RNA (1)...(19): siRNA sense strand
cgccauaucucccaaguga

SEQ ID NO: 1160280 - RNA, 19 nt, Homo sapiens
  misc_RNA (1)...(19): siRNA sense strand
guuugagacuguuaucuuu

SEQ ID NO: 1160281 - RNA, 19 nt, Homo sapiens
  misc_RNA (1)...(19): siRNA sense strand
gcagacagcagccuggauu

SEQ ID NO: 1160282 - RNA, 19 nt, Homo sapiens
  misc_RNA (1)...(19): siRNA sense strand
caauaaagcggaauucauc

SEQ ID NO: 1160283 - RNA, 19 nt, Homo sapiens
  misc_RNA (1)...(19): siRNA sense strand
gacccugcgucuauuauga

SEQ ID NO: 1160284 - RNA, 19 nt, Homo sapiens
  misc_RNA (1)...(19): siRNA sense strand
ucauugacauucucaguga

SEQ ID NO: 1160285 - RNA, 19 nt, Homo sapiens
  misc_RNA (1)...(19): siRNA sense strand
ggacagacuagccuucuau

SEQ ID NO: 1160286 - RNA, 19 nt, Homo sapiens
  misc_RNA (1)...(19): siRNA sense strand
gaacagggaaucuugaaac

SEQ ID NO: 1160287 - RNA, 19 nt, Homo sapiens
  misc_RNA (1)...(19): siRNA sense strand
caacacugcuucagauggu

SEQ ID NO: 1160288 - RNA, 19 nt, Homo sapiens
  misc_RNA (1)...(19): siRNA sense strand
caagccaacuucuuucauc

SEQ ID NO: 1160289 - RNA, 19 nt, Homo sapiens
  misc_RNA (1)...(19): siRNA sense strand
uuuacaggcugaauuauug

SEQ ID NO: 1160290 - RNA, 19 nt, Homo sapiens
  misc_RNA (1)...(19): siRNA sense strand
gaaguugacaggcgagaga

SEQ ID NO: 1160291 - RNA, 19 nt, Homo sapiens
  misc_RNA (1)...(19): siRNA sense strand
uaauaacggugcuaacucu

SEQ ID NO: 1160292 - RNA, 19 nt, Homo sapiens
  misc_RNA (1)...(19): siRNA sense strand
gcagagcgccucguggaaa

SEQ ID NO: 1160293 - RNA, 19 nt, Homo sapiens
  misc_RNA (1)...(19): siRNA sense strand
gcaggaaaccagaucacaa

SEQ ID NO: 1160294 - RNA, 19 nt, Homo sapiens
  misc_RNA (1)...(19): siRNA sense strand
gaagacacagauuuggaaa

SEQ ID NO: 1160295 - RNA, 19 nt, Homo sapiens
  misc_RNA (1)...(19): siRNA sense strand
caggaaaccagaucacaaa

SEQ ID NO: 1160296 - RNA, 19 nt, Homo sapiens
  misc_RNA (1)...(19): siRNA sense strand
gaaaucagggcagacagaa

SEQ ID NO: 1160297 - RNA, 19 nt, Homo sapiens
  misc_RNA (1)...(19): siRNA sense strand
uugaagaacuugccaugga

SEQ ID NO: 1160298 - RNA, 19 nt, Homo sapiens
  misc_RNA (1)...(19): siRNA sense strand
gcacaagccaacuucuuuc

SEQ ID NO: 1160299 - RNA, 19 nt, Homo sapiens
  misc_RNA (1)...(19): siRNA sense strand
agacuagccuucuaucucu

SEQ ID NO: 1160300 - RNA, 19 nt, Homo sapiens
  misc_RNA (1)...(19): siRNA sense strand
gagaacagggaaucuugaa

SEQ ID NO: 1160301 - RNA, 19 nt, Homo sapiens
  misc_RNA (1)...(19): siRNA sense strand
ugaagaacuugccauggau

SEQ ID NO: 1160302 - RNA, 19 nt, Homo sapiens
  misc_RNA (1)...(19): siRNA sense strand
cgaagacacagauuuggaa

SEQ ID NO: 1160303 - RNA, 19 nt, Homo sapiens
  misc_RNA (1)...(19): siRNA sense strand
gagcacaagccaacuucuu

SEQ ID NO: 1160304 - RNA, 19 nt, Homo sapiens
  misc_RNA (1)...(19): siRNA sense strand
agacgaagacacagauuug

SEQ ID NO: 1160305 - RNA, 19 nt, Homo sapiens
  misc_RNA (1)...(19): siRNA sense strand
guaaauaggggaacguuuu

SEQ ID NO: 1160306 - RNA, 19 nt, Homo sapiens
  misc_RNA (1)...(19): siRNA sense strand
aaauggacagcacuuuaua

SEQ ID NO: 1160307 - RNA, 19 nt, Homo sapiens
  misc_RNA (1)...(19): siRNA sense strand
ggcaaaagcugcuaagaag

SEQ ID NO: 1160308 - RNA, 19 nt, Homo sapiens
  misc_RNA (1)...(19): siRNA sense strand
ggagacagcagggcaguuc

SEQ ID NO: 1160309 - RNA, 19 nt, Homo sapiens
  misc_RNA (1)...(19): siRNA sense strand
ugguugagaccuuguauaa

SEQ ID NO: 1160310 - RNA, 19 nt, Homo sapiens
  misc_RNA (1)...(19): siRNA sense strand
gauguuagcguucguccau

SEQ ID NO: 1160311 - RNA, 19 nt, Homo sapiens
  misc_RNA (1)...(19): siRNA sense strand
agccaaguaucagauguua

SEQ ID NO: 1160312 - RNA, 19 nt, Homo sapiens
  misc_RNA (1)...(19): siRNA sense strand
guggaagacguaaagcuaa

SEQ ID NO: 1160313 - RNA, 19 nt, Homo sapiens
  misc_RNA (1)...(19): siRNA sense strand
cagagcgccucguggaaau

SEQ ID NO: 1160314 - RNA, 19 nt, Homo sapiens
  misc_RNA (1)...(19): siRNA sense strand
gcaaggagggcaccaugag

SEQ ID NO: 1160315 - RNA, 19 nt, Homo sapiens
  misc_RNA (1)...(19): siRNA sense strand
gcugaauuauuggcaguau

SEQ ID NO: 1160316 - RNA, 19 nt, Homo sapiens
  misc_RNA (1)...(19): siRNA sense strand
ccaagugaggcaucugaaa

SEQ ID NO: 1160317 - RNA, 19 nt, Homo sapiens
  misc_RNA (1)...(19): siRNA sense strand
caaaagcugcuaagaagaa

SEQ ID NO: 1160318 - RNA, 19 nt, Homo sapiens
  misc_RNA (1)...(19): siRNA sense strand
cuauaugggagcauucuuu

SEQ ID NO: 1160319 - RNA, 19 nt, Homo sapiens
  misc_RNA (1)...(19): siRNA sense strand
cgaaaucagggcagacaga

SEQ ID NO: 1160320 - RNA, 19 nt, Homo sapiens
  misc_RNA (1)...(19): siRNA sense strand
guacucaucaacacgaaau

SEQ ID NO: 1160321 - RNA, 19 nt, Homo sapiens
  misc_RNA (1)...(19): siRNA sense strand
gccuggauuugucugaauu

SEQ ID NO: 1160322 - RNA, 19 nt, Homo sapiens
  misc_RNA (1)...(19): siRNA sense strand
gaaaacucccguugauuau

SEQ ID NO: 1160323 - RNA, 19 nt, Homo sapiens
  misc_RNA (1)...(19): siRNA sense strand
gauuuuacaggcugaauua

SEQ ID NO: 1160324 - RNA, 19 nt, Homo sapiens
  misc_RNA (1)...(19): siRNA sense strand
gagccaaguaucagauguu

SEQ ID NO: 1160325 - RNA, 19 nt, Homo sapiens
  misc_RNA (1)...(19): siRNA sense strand
uaaagcggaauucaucaga

SEQ ID NO: 1160326 - RNA, 19 nt, Homo sapiens
  misc_RNA (1)...(19): siRNA sense strand
ccaauaaagcggaauucau

SEQ ID NO: 1160327 - RNA, 19 nt, Homo sapiens
  misc_RNA (1)...(19): siRNA sense strand
gcuggacccugcgucuauu

SEQ ID NO: 1160328 - RNA, 19 nt, Homo sapiens
  misc_RNA (1)...(19): siRNA sense strand
uggaagacguaaagcuaau

SEQ ID NO: 1160329 - RNA, 19 nt, Homo sapiens
  misc_RNA (1)...(19): siRNA sense strand
cagacgaagacacagauuu

SEQ ID NO: 1160330 - RNA, 19 nt, Homo sapiens
  misc_RNA (1)...(19): siRNA sense strand
uugccacgcuggucauuga

SEQ ID NO: 1160331 - RNA, 19 nt, Homo sapiens
  misc_RNA (1)...(19): siRNA sense strand
uggacagcacuuuauaaua

SEQ ID NO: 1160332 - RNA, 19 nt, Homo sapiens
  misc_RNA (1)...(19): siRNA sense strand
aaacucccguugauuaugc

SEQ ID NO: 1160333 - RNA, 19 nt, Homo sapiens
  misc_RNA (1)...(19): siRNA sense strand
ggaugacgauagugugacu

SEQ ID NO: 1160334 - RNA, 19 nt, Homo sapiens
  misc_RNA (1)...(19): siRNA sense strand
cagcguggcaucagacgaa

SEQ ID NO: 1160335 - RNA, 19 nt, Homo sapiens
  misc_RNA (1)...(19): siRNA sense strand
gaguacucaucaacacgaa

SEQ ID NO: 1160336 - RNA, 19 nt, Homo sapiens
  misc_RNA (1)...(19): siRNA sense strand
cugaauuauuggcaguaua

SEQ ID NO: 1160337 - RNA, 19 nt, Homo sapiens
  misc_RNA (1)...(19): siRNA sense strand
caaagaucuuagcaagcaa

SEQ ID NO: 1160338 - RNA, 19 nt, Homo sapiens
  misc_RNA (1)...(19): siRNA sense strand
gugagaacagggaaucuug

SEQ ID NO: 1160339 - RNA, 19 nt, Homo sapiens
  misc_RNA (1)...(19): siRNA sense strand
gaucagcccgacuaugaca

SEQ ID NO: 1160340 - RNA, 19 nt, Homo sapiens
  misc_RNA (1)...(19): siRNA sense strand
uagugugacugccaaagau

SEQ ID NO: 1160341 - RNA, 19 nt, Homo sapiens
  misc_RNA (1)...(19): siRNA sense strand
gacagcagccuggauuugu

SEQ ID NO: 1160342 - RNA, 19 nt, Homo sapiens
  misc_RNA (1)...(19): siRNA sense strand
gagcagacccaggcacaca

SEQ ID NO: 1160343 - RNA, 19 nt, Homo sapiens
  misc_RNA (1)...(19): siRNA sense strand
ugagcuaacggacagacua

SEQ ID NO: 1160344 - RNA, 19 nt, Homo sapiens
  misc_RNA (1)...(19): siRNA sense strand
caagugaggcaucugaaac

SEQ ID NO: 1160345 - RNA, 19 nt, Homo sapiens
  misc_RNA (1)...(19): siRNA sense strand
cggacagacuagccuucua

SEQ ID NO: 1160346 - RNA, 19 nt, Homo sapiens
  misc_RNA (1)...(19): siRNA sense strand
ggacccugcgucuauuaug

SEQ ID NO: 1160347 - RNA, 19 nt, Homo sapiens
  misc_RNA (1)...(19): siRNA sense strand
cagcagggcaguucucucu

SEQ ID NO: 1160348 - RNA, 19 nt, Homo sapiens
  misc_RNA (1)...(19): siRNA sense strand
gagcuaacggacagacuag

SEQ ID NO: 1160349 - RNA, 19 nt, Homo sapiens
  misc_RNA (1)...(19): siRNA sense strand
acaggauucuagugggaaa

SEQ ID NO: 1160350 - RNA, 19 nt, Homo sapiens
  misc_RNA (1)...(19): siRNA sense strand
caaagcagggcagauuuua

SEQ ID NO: 1160351 - RNA, 19 nt, Homo sapiens
  misc_RNA (1)...(19): siRNA sense strand
ccaaguaucagauguuagc

SEQ ID NO: 1160352 - RNA, 19 nt, Homo sapiens
  misc_RNA (1)...(19): siRNA sense strand
gacccaggcacacaggauu

SEQ ID NO: 1160353 - RNA, 19 nt, Homo sapiens
  misc_RNA (1)...(19): siRNA sense strand
caucagacgaagacacaga

SEQ ID NO: 1160354 - RNA, 19 nt, Homo sapiens
  misc_RNA (1)...(19): siRNA sense strand
uauaugggagcauucuuug

SEQ ID NO: 1160355 - RNA, 19 nt, Homo sapiens
  misc_RNA (1)...(19): siRNA sense strand
cuccaacacugcuucagau

SEQ ID NO: 1160356 - RNA, 19 nt, Homo sapiens
  misc_RNA (1)...(19): siRNA sense strand
cagacuagccuucuaucuc

SEQ ID NO: 1160357 - RNA, 19 nt, Homo sapiens
  misc_RNA (1)...(19): siRNA sense strand
ugagaacagggaaucuuga

SEQ ID NO: 1160358 - RNA, 19 nt, Homo sapiens
  misc_RNA (1)...(19): siRNA sense strand
uugagacuguuaucuuuag

SEQ ID NO: 1160359 - RNA, 19 nt, Homo sapiens
  misc_RNA (1)...(19): siRNA sense strand
cagccuggauuugucugaa

SEQ ID NO: 1160360 - RNA, 19 nt, Homo sapiens
  misc_RNA (1)...(19): siRNA sense strand
aauggacagcacuuuauaa

SEQ ID NO: 1160361 - RNA, 19 nt, Homo sapiens
  misc_RNA (1)...(19): siRNA sense strand
aguggaagacguaaagcua

SEQ ID NO: 1160362 - RNA, 19 nt, Homo sapiens
  misc_RNA (1)...(19): siRNA sense strand
gaauucaucagagccaagu

SEQ ID NO: 1160363 - RNA, 19 nt, Homo sapiens
  misc_RNA (1)...(19): siRNA sense strand
agacacagauuuggaaacc

SEQ ID NO: 1160364 - RNA, 19 nt, Homo sapiens
  misc_RNA (1)...(19): siRNA sense strand
auguggagcucauacugaa

SEQ ID NO: 1160365 - RNA, 19 nt, Homo sapiens
  misc_RNA (1)...(19): siRNA sense strand
ucagggcagacagaaguua

SEQ ID NO: 1160366 - RNA, 19 nt, Homo sapiens
  misc_RNA (1)...(19): siRNA sense strand
aaucagggcagacagaagu

SEQ ID NO: 1160367 - RNA, 19 nt, Homo sapiens
  misc_RNA (1)...(19): siRNA sense strand
uauaauaacggugcuaacu

SEQ ID NO: 1160368 - RNA, 19 nt, Homo sapiens
  misc_RNA (1)...(19): siRNA sense strand
ggcaaggagggcaccauga

SEQ ID NO: 1160369 - RNA, 19 nt, Homo sapiens
  misc_RNA (1)...(19): siRNA sense strand
ggcaucagacgaagacaca

SEQ ID NO: 1160370 - RNA, 19 nt, Homo sapiens
  misc_RNA (1)...(19): siRNA sense strand
gagaggagcuggccuauga

SEQ ID NO: 1160371 - RNA, 19 nt, Homo sapiens
  misc_RNA (1)...(19): siRNA sense strand
gaacguggaugacucaguu

SEQ ID NO: 1160372 - RNA, 19 nt, Homo sapiens
  misc_RNA (1)...(19): siRNA sense strand
gcaauaaacaucaacuuca

SEQ ID NO: 1160373 - RNA, 19 nt, Homo sapiens
  misc_RNA (1)...(19): siRNA sense strand
ugaaggaguucgacaagga

SEQ ID NO: 1160374 - RNA, 19 nt, Homo sapiens
  misc_RNA (1)...(19): siRNA sense strand
gaggaacgccaaugugauu

SEQ ID NO: 1160375 - RNA, 19 nt, Homo sapiens
  misc_RNA (1)...(19): siRNA sense strand
guggagauguuuaaggauu

SEQ ID NO: 1160376 - RNA, 19 nt, Homo sapiens
  misc_RNA (1)...(19): siRNA sense strand
cggcugagauggauuacuu

SEQ ID NO: 1160377 - RNA, 19 nt, Homo sapiens
  misc_RNA (1)...(19): siRNA sense strand
caaugugauucccaacuuu

SEQ ID NO: 1160378 - RNA, 19 nt, Homo sapiens
  misc_RNA (1)...(19): siRNA sense strand
ccaaugugauucccaacuu

SEQ ID NO: 1160379 - RNA, 19 nt, Homo sapiens
  misc_RNA (1)...(19): siRNA sense strand
guucacagccucuggauau

SEQ ID NO: 1160380 - RNA, 19 nt, Homo sapiens
  misc_RNA (1)...(19): siRNA sense strand
caagugccauugccaguca

SEQ ID NO: 1160381 - RNA, 19 nt, Homo sapiens
  misc_RNA (1)...(19): siRNA sense strand
uggagauguuuaaggauua

SEQ ID NO: 1160382 - RNA, 19 nt, Homo sapiens
  misc_RNA (1)...(19): siRNA sense strand
gaugcaaacuaguccugaa

SEQ ID NO: 1160383 - RNA, 19 nt, Homo sapiens
  misc_RNA (1)...(19): siRNA sense strand
gaggaggacugcaagaaaa

SEQ ID NO: 1160384 - RNA, 19 nt, Homo sapiens
  misc_RNA (1)...(19): siRNA sense strand
ggucuucucugugcugaug

SEQ ID NO: 1160385 - RNA, 19 nt, Homo sapiens
  misc_RNA (1)...(19): siRNA sense strand
caucagcaauaaacaucaa

SEQ ID NO: 1160386 - RNA, 19 nt, Homo sapiens
  misc_RNA (1)...(19): siRNA sense strand
gaacccaucagcaauaaac

SEQ ID NO: 1160387 - RNA, 19 nt, Homo sapiens
  misc_RNA (1)...(19): siRNA sense strand
gagaaucguggagauguuu

SEQ ID NO: 1160388 - RNA, 19 nt, Homo sapiens
  misc_RNA (1)...(19): siRNA sense strand
accacuacguguuuaauuu

SEQ ID NO: 1160389 - RNA, 19 nt, Homo sapiens
  misc_RNA (1)...(19): siRNA sense strand
cgaggaggacugcaagaaa

SEQ ID NO: 1160390 - RNA, 19 nt, Homo sapiens
  misc_RNA (1)...(19): siRNA sense strand
ggauuacccgccagccaua

SEQ ID NO: 1160391 - RNA, 19 nt, Homo sapiens
  misc_RNA (1)...(19): siRNA sense strand
ccacuacguguuuaauuug

SEQ ID NO: 1160392 - RNA, 19 nt, Homo sapiens
  misc_RNA (1)...(19): siRNA sense strand
gaccacuacguguuuaauu

SEQ ID NO: 1160393 - RNA, 19 nt, Homo sapiens
  misc_RNA (1)...(19): siRNA sense strand
gaaucguggagauguuuaa

SEQ ID NO: 1160394 - RNA, 19 nt, Homo sapiens
  misc_RNA (1)...(19): siRNA sense strand
ugagaaucguggagauguu

SEQ ID NO: 1160395 - RNA, 19 nt, Homo sapiens
  misc_RNA (1)...(19): siRNA sense strand
cuaguggccugcuuuccaa

SEQ ID NO: 1160396 - RNA, 19 nt, Homo sapiens
  misc_RNA (1)...(19): siRNA sense strand
gguaaucgcaggcaucucu

SEQ ID NO: 1160397 - RNA, 19 nt, Homo sapiens
  misc_RNA (1)...(19): siRNA sense strand
gauccuaguggccugcuuu

SEQ ID NO: 1160398 - RNA, 19 nt, Homo sapiens
  misc_RNA (1)...(19): siRNA sense strand
ucguggagauguuuaagga

SEQ ID NO: 1160399 - RNA, 19 nt, Homo sapiens
  misc_RNA (1)...(19): siRNA sense strand
ggaguucgacaaggagaaa

SEQ ID NO: 1160400 - RNA, 19 nt, Homo sapiens
  misc_RNA (1)...(19): siRNA sense strand
cuacguguuuaauuugguu

SEQ ID NO: 1160401 - RNA, 19 nt, Homo sapiens
  misc_RNA (1)...(19): siRNA sense strand
ccaacauucuggacgaagu

SEQ ID NO: 1160402 - RNA, 19 nt, Homo sapiens
  misc_RNA (1)...(19): siRNA sense strand
ggaggaacgccaaugugau

SEQ ID NO: 1160403 - RNA, 19 nt, Homo sapiens
  misc_RNA (1)...(19): siRNA sense strand
gcucggguccugaaaucuu

SEQ ID NO: 1160404 - RNA, 19 nt, Homo sapiens
  misc_RNA (1)...(19): siRNA sense strand
ggagauguuuaaggauuac

SEQ ID NO: 1160405 - RNA, 19 nt, Homo sapiens
  misc_RNA (1)...(19): siRNA sense strand
cucggguccugaaaucuua

SEQ ID NO: 1160406 - RNA, 19 nt, Homo sapiens
  misc_RNA (1)...(19): siRNA sense strand
uaucugucauucagcauca

SEQ ID NO: 1160407 - RNA, 19 nt, Homo sapiens
  misc_RNA (1)...(19): siRNA sense strand
gcgaggaggacugcaagaa

SEQ ID NO: 1160408 - RNA, 19 nt, Homo sapiens
  misc_RNA (1)...(19): siRNA sense strand
ugacagcgccaacauucug

SEQ ID NO: 1160409 - RNA, 19 nt, Homo sapiens
  misc_RNA (1)...(19): siRNA sense strand
uuacucagucgucgaggua

SEQ ID NO: 1160410 - RNA, 19 nt, Homo sapiens
  misc_RNA (1)...(19): siRNA sense strand
aaagaagggcuccaugucu

SEQ ID NO: 1160411 - RNA, 19 nt, Homo sapiens
  misc_RNA (1)...(19): siRNA sense strand
gagccgucguggugcaaau

SEQ ID NO: 1160412 - RNA, 19 nt, Homo sapiens
  misc_RNA (1)...(19): siRNA sense strand
gcugugaccacuacguguu

SEQ ID NO: 1160413 - RNA, 19 nt, Homo sapiens
  misc_RNA (1)...(19): siRNA sense strand
ucacgucuccgcugcuguu

SEQ ID NO: 1160414 - RNA, 19 nt, Homo sapiens
  misc_RNA (1)...(19): siRNA sense strand
ccucggcaauugugagcuu

SEQ ID NO: 1160415 - RNA, 19 nt, Homo sapiens
  misc_RNA (1)...(19): siRNA sense strand
uaauuugguuuggaugcaa

SEQ ID NO: 1160416 - RNA, 19 nt, Homo sapiens
  misc_RNA (1)...(19): siRNA sense strand
ugugaccacuacguguuua

SEQ ID NO: 1160417 - RNA, 19 nt, Homo sapiens
  misc_RNA (1)...(19): siRNA sense strand
gaccugcagcugucgaaga

SEQ ID NO: 1160418 - RNA, 19 nt, Homo sapiens
  misc_RNA (1)...(19): siRNA sense strand
cuggauaucugucauucag

SEQ ID NO: 1160419 - RNA, 19 nt, Homo sapiens
  misc_RNA (1)...(19): siRNA sense strand
auucccaacuuucagauau

SEQ ID NO: 1160420 - RNA, 19 nt, Homo sapiens
  misc_RNA (1)...(19): siRNA sense strand
gauucccaacuuucagaua

SEQ ID NO: 1160421 - RNA, 19 nt, Homo sapiens
  misc_RNA (1)...(19): siRNA sense strand
ccaggaggaacgccaaugu

SEQ ID NO: 1160422 - RNA, 19 nt, Homo sapiens
  misc_RNA (1)...(19): siRNA sense strand
ucccaacuuucagauauug

SEQ ID NO: 1160423 - RNA, 19 nt, Homo sapiens
  misc_RNA (1)...(19): siRNA sense strand
ggagguccugauugccaua

SEQ ID NO: 1160424 - RNA, 19 nt, Homo sapiens
  misc_RNA (1)...(19): siRNA sense strand
cagcagagugucccagcaa

SEQ ID NO: 1160425 - RNA, 19 nt, Homo sapiens
  misc_RNA (1)...(19): siRNA sense strand
ccaacuuucagauauuguu

SEQ ID NO: 1160426 - RNA, 19 nt, Homo sapiens
  misc_RNA (1)...(19): siRNA sense strand
aggaggaacgccaauguga

SEQ ID NO: 1160427 - RNA, 19 nt, Homo sapiens
  misc_RNA (1)...(19): siRNA sense strand
ucaugagaaucguggagau

SEQ ID NO: 1160428 - RNA, 19 nt, Homo sapiens
  misc_RNA (1)...(19): siRNA sense strand
gcagagugucccagcaagu

SEQ ID NO: 1160429 - RNA, 19 nt, Homo sapiens
  misc_RNA (1)...(19): siRNA sense strand
ggcccacaccucucaguga

SEQ ID NO: 1160430 - RNA, 19 nt, Homo sapiens
  misc_RNA (1)...(19): siRNA sense strand
cccaggagccauucagaga

SEQ ID NO: 1160431 - RNA, 19 nt, Homo sapiens
  misc_RNA (1)...(19): siRNA sense strand
caacauucuggacgaagug

SEQ ID NO: 1160432 - RNA, 19 nt, Homo sapiens
  misc_RNA (1)...(19): siRNA sense strand
cagcaauaaacaucaacuu

SEQ ID NO: 1160433 - RNA, 19 nt, Homo sapiens
  misc_RNA (1)...(19): siRNA sense strand
ucugacagcgccaacauuc

SEQ ID NO: 1160434 - RNA, 19 nt, Homo sapiens
  misc_RNA (1)...(19): siRNA sense strand
agaagggcuccaugucuga

SEQ ID NO: 1160435 - RNA, 19 nt, Homo sapiens
  misc_RNA (1)...(19): siRNA sense strand
cacagccucuggauaucug

SEQ ID NO: 1160436 - RNA, 19 nt, Homo sapiens
  misc_RNA (1)...(19): siRNA sense strand
gagaggagcuggccuauga

SEQ ID NO: 1160437 - RNA, 19 nt, Homo sapiens
  misc_RNA (1)...(19): siRNA sense strand
gaacguggaugacucaguu

SEQ ID NO: 1160438 - RNA, 19 nt, Homo sapiens
  misc_RNA (1)...(19): siRNA sense strand
gcaauaaacaucaacuuca

SEQ ID NO: 1160439 - RNA, 19 nt, Homo sapiens
  misc_RNA (1)...(19): siRNA sense strand
ugaaggaguucgacaagga

SEQ ID NO: 1160440 - RNA, 19 nt, Homo sapiens
  misc_RNA (1)...(19): siRNA sense strand
gaggaacgccaaugugauu

SEQ ID NO: 1160441 - RNA, 19 nt, Homo sapiens
  misc_RNA (1)...(19): siRNA sense strand
guggagauguuuaaggauu

SEQ ID NO: 1160442 - RNA, 19 nt, Homo sapiens
  misc_RNA (1)...(19): siRNA sense strand
cggcugagauggauuacuu

SEQ ID NO: 1160443 - RNA, 19 nt, Homo sapiens
  misc_RNA (1)...(19): siRNA sense strand
caaugugauucccaacuuu

SEQ ID NO: 1160444 - RNA, 19 nt, Homo sapiens
  misc_RNA (1)...(19): siRNA sense strand
ccaaugugauucccaacuu

SEQ ID NO: 1160445 - RNA, 19 nt, Homo sapiens
  misc_RNA (1)...(19): siRNA sense strand
guucacagccucuggauau

SEQ ID NO: 1160446 - RNA, 19 nt, Homo sapiens
  misc_RNA (1)...(19): siRNA sense strand
caagugccauugccaguca

SEQ ID NO: 1160447 - RNA, 19 nt, Homo sapiens
  misc_RNA (1)...(19): siRNA sense strand
uggagauguuuaaggauua

SEQ ID NO: 1160448 - RNA, 19 nt, Homo sapiens
  misc_RNA (1)...(19): siRNA sense strand
gaugcaaacuaguccugaa

SEQ ID NO: 1160449 - RNA, 19 nt, Homo sapiens
  misc_RNA (1)...(19): siRNA sense strand
gaggaggacugcaagaaaa

SEQ ID NO: 1160450 - RNA, 19 nt, Homo sapiens
  misc_RNA (1)...(19): siRNA sense strand
ggucuucucugugcugaug

SEQ ID NO: 1160451 - RNA, 19 nt, Homo sapiens
  misc_RNA (1)...(19): siRNA sense strand
caucagcaauaaacaucaa

SEQ ID NO: 1160452 - RNA, 19 nt, Homo sapiens
  misc_RNA (1)...(19): siRNA sense strand
gaacccaucagcaauaaac

SEQ ID NO: 1160453 - RNA, 19 nt, Homo sapiens
  misc_RNA (1)...(19): siRNA sense strand
gagaaucguggagauguuu

SEQ ID NO: 1160454 - RNA, 19 nt, Homo sapiens
  misc_RNA (1)...(19): siRNA sense strand
accacuacguguuuaauuu

SEQ ID NO: 1160455 - RNA, 19 nt, Homo sapiens
  misc_RNA (1)...(19): siRNA sense strand
cgaggaggacugcaagaaa

SEQ ID NO: 1160456 - RNA, 19 nt, Homo sapiens
  misc_RNA (1)...(19): siRNA sense strand
ggauuacccgccagccaua

SEQ ID NO: 1160457 - RNA, 19 nt, Homo sapiens
  misc_RNA (1)...(19): siRNA sense strand
ccacuacguguuuaauuug

SEQ ID NO: 1160458 - RNA, 19 nt, Homo sapiens
  misc_RNA (1)...(19): siRNA sense strand
gaccacuacguguuuaauu

SEQ ID NO: 1160459 - RNA, 19 nt, Homo sapiens
  misc_RNA (1)...(19): siRNA sense strand
gaaucguggagauguuuaa

SEQ ID NO: 1160460 - RNA, 19 nt, Homo sapiens
  misc_RNA (1)...(19): siRNA sense strand
ugagaaucguggagauguu

SEQ ID NO: 1160461 - RNA, 19 nt, Homo sapiens
  misc_RNA (1)...(19): siRNA sense strand
cuaguggccugcuuuccaa

SEQ ID NO: 1160462 - RNA, 19 nt, Homo sapiens
  misc_RNA (1)...(19): siRNA sense strand
gguaaucgcaggcaucucu

SEQ ID NO: 1160463 - RNA, 19 nt, Homo sapiens
  misc_RNA (1)...(19): siRNA sense strand
gauccuaguggccugcuuu

SEQ ID NO: 1160464 - RNA, 19 nt, Homo sapiens
  misc_RNA (1)...(19): siRNA sense strand
ucguggagauguuuaagga

SEQ ID NO: 1160465 - RNA, 19 nt, Homo sapiens
  misc_RNA (1)...(19): siRNA sense strand
ggaguucgacaaggagaaa

SEQ ID NO: 1160466 - RNA, 19 nt, Homo sapiens
  misc_RNA (1)...(19): siRNA sense strand
cuacguguuuaauuugguu

SEQ ID NO: 1160467 - RNA, 19 nt, Homo sapiens
  misc_RNA (1)...(19): siRNA sense strand
ccaacauucuggacgaagu

SEQ ID NO: 1160468 - RNA, 19 nt, Homo sapiens
  misc_RNA (1)...(19): siRNA sense strand
ggaggaacgccaaugugau

SEQ ID NO: 1160469 - RNA, 19 nt, Homo sapiens
  misc_RNA (1)...(19): siRNA sense strand
gcucggguccugaaaucuu

SEQ ID NO: 1160470 - RNA, 19 nt, Homo sapiens
  misc_RNA (1)...(19): siRNA sense strand
ggagauguuuaaggauuac

SEQ ID NO: 1160471 - RNA, 19 nt, Homo sapiens
  misc_RNA (1)...(19): siRNA sense strand
cucggguccugaaaucuua

SEQ ID NO: 1160472 - RNA, 19 nt, Homo sapiens
  misc_RNA (1)...(19): siRNA sense strand
uaucugucauucagcauca

SEQ ID NO: 1160473 - RNA, 19 nt, Homo sapiens
  misc_RNA (1)...(19): siRNA sense strand
gcgaggaggacugcaagaa

SEQ ID NO: 1160474 - RNA, 19 nt, Homo sapiens
  misc_RNA (1)...(19): siRNA sense strand
ugacagcgccaacauucug

SEQ ID NO: 1160475 - RNA, 19 nt, Homo sapiens
  misc_RNA (1)...(19): siRNA sense strand
uuacucagucgucgaggua

SEQ ID NO: 1160476 - RNA, 19 nt, Homo sapiens
  misc_RNA (1)...(19): siRNA sense strand
aaagaagggcuccaugucu

SEQ ID NO: 1160477 - RNA, 19 nt, Homo sapiens
  misc_RNA (1)...(19): siRNA sense strand
gagccgucguggugcaaau

SEQ ID NO: 1160478 - RNA, 19 nt, Homo sapiens
  misc_RNA (1)...(19): siRNA sense strand
gcugugaccacuacguguu

SEQ ID NO: 1160479 - RNA, 19 nt, Homo sapiens
  misc_RNA (1)...(19): siRNA sense strand
ucacgucuccgcugcuguu

SEQ ID NO: 1160480 - RNA, 19 nt, Homo sapiens
  misc_RNA (1)...(19): siRNA sense strand
ccucggcaauugugagcuu

SEQ ID NO: 1160481 - RNA, 19 nt, Homo sapiens
  misc_RNA (1)...(19): siRNA sense strand
uaauuugguuuggaugcaa

SEQ ID NO: 1160482 - RNA, 19 nt, Homo sapiens
  misc_RNA (1)...(19): siRNA sense strand
ugugaccacuacguguuua

SEQ ID NO: 1160483 - RNA, 19 nt, Homo sapiens
  misc_RNA (1)...(19): siRNA sense strand
gaccugcagcugucgaaga

SEQ ID NO: 1160484 - RNA, 19 nt, Homo sapiens
  misc_RNA (1)...(19): siRNA sense strand
cuggauaucugucauucag

SEQ ID NO: 1160485 - RNA, 19 nt, Homo sapiens
  misc_RNA (1)...(19): siRNA sense strand
auucccaacuuucagauau

SEQ ID NO: 1160486 - RNA, 19 nt, Homo sapiens
  misc_RNA (1)...(19): siRNA sense strand
gauucccaacuuucagaua

SEQ ID NO: 1160487 - RNA, 19 nt, Homo sapiens
  misc_RNA (1)...(19): siRNA sense strand
ccaggaggaacgccaaugu

SEQ ID NO: 1160488 - RNA, 19 nt, Homo sapiens
  misc_RNA (1)...(19): siRNA sense strand
ucccaacuuucagauauug

SEQ ID NO: 1160489 - RNA, 19 nt, Homo sapiens
  misc_RNA (1)...(19): siRNA sense strand
ggagguccugauugccaua

SEQ ID NO: 1160490 - RNA, 19 nt, Homo sapiens
  misc_RNA (1)...(19): siRNA sense strand
cagcagagugucccagcaa

SEQ ID NO: 1160491 - RNA, 19 nt, Homo sapiens
  misc_RNA (1)...(19): siRNA sense strand
ccaacuuucagauauuguu

SEQ ID NO: 1160492 - RNA, 19 nt, Homo sapiens
  misc_RNA (1)...(19): siRNA sense strand
aggaggaacgccaauguga

SEQ ID NO: 1160493 - RNA, 19 nt, Homo sapiens
  misc_RNA (1)...(19): siRNA sense strand
ucaugagaaucguggagau

SEQ ID NO: 1160494 - RNA, 19 nt, Homo sapiens
  misc_RNA (1)...(19): siRNA sense strand
gcagagugucccagcaagu

SEQ ID NO: 1160495 - RNA, 19 nt, Homo sapiens
  misc_RNA (1)...(19): siRNA sense strand
ggcccacaccucucaguga

SEQ ID NO: 1160496 - RNA, 19 nt, Homo sapiens
  misc_RNA (1)...(19): siRNA sense strand
cccaggagccauucagaga

SEQ ID NO: 1160497 - RNA, 19 nt, Homo sapiens
  misc_RNA (1)...(19): siRNA sense strand
caacauucuggacgaagug

SEQ ID NO: 1160498 - RNA, 19 nt, Homo sapiens
  misc_RNA (1)...(19): siRNA sense strand
cagcaauaaacaucaacuu

SEQ ID NO: 1160499 - RNA, 19 nt, Homo sapiens
  misc_RNA (1)...(19): siRNA sense strand
ucugacagcgccaacauuc

SEQ ID NO: 1160500 - RNA, 19 nt, Homo sapiens
  misc_RNA (1)...(19): siRNA sense strand
agaagggcuccaugucuga

SEQ ID NO: 1160501 - RNA, 19 nt, Homo sapiens
  misc_RNA (1)...(19): siRNA sense strand
cacagccucuggauaucug

SEQ ID NO: 1160502 - RNA, 19 nt, Homo sapiens
  misc_RNA (1)...(19): siRNA sense strand
gaaguaugcuguucucuau

SEQ ID NO: 1160503 - RNA, 19 nt, Homo sapiens
  misc_RNA (1)...(19): siRNA sense strand
caaaugaagugcugacaaa

SEQ ID NO: 1160504 - RNA, 19 nt, Homo sapiens
  misc_RNA (1)...(19): siRNA sense strand
gagaagcuauugaagauga

SEQ ID NO: 1160505 - RNA, 19 nt, Homo sapiens
  misc_RNA (1)...(19): siRNA sense strand
gaaaccagaugaagaagau

SEQ ID NO: 1160506 - RNA, 19 nt, Homo sapiens
  misc_RNA (1)...(19): siRNA sense strand
ggaacacgaugaaccuauu

SEQ ID NO: 1160507 - RNA, 19 nt, Homo sapiens
  misc_RNA (1)...(19): siRNA sense strand
guggagaucuggaugauga

SEQ ID NO: 1160508 - RNA, 19 nt, Homo sapiens
  misc_RNA (1)...(19): siRNA sense strand
cugaagcacuugaaagaua

SEQ ID NO: 1160509 - RNA, 19 nt, Homo sapiens
  misc_RNA (1)...(19): siRNA sense strand
gaaaggaaguaugcuguuc

SEQ ID NO: 1160510 - RNA, 19 nt, Homo sapiens
  misc_RNA (1)...(19): siRNA sense strand
ggaaacuggugaagaaaca

SEQ ID NO: 1160511 - RNA, 19 nt, Homo sapiens
  misc_RNA (1)...(19): siRNA sense strand
agaggaaacuggugaagaa

SEQ ID NO: 1160512 - RNA, 19 nt, Homo sapiens
  misc_RNA (1)...(19): siRNA sense strand
uccaaugacucuuucuuua

SEQ ID NO: 1160513 - RNA, 19 nt, Homo sapiens
  misc_RNA (1)...(19): siRNA sense strand
caaauucuaugaggaaguu

SEQ ID NO: 1160514 - RNA, 19 nt, Homo sapiens
  misc_RNA (1)...(19): siRNA sense strand
acaaagacauacaggauga

SEQ ID NO: 1160515 - RNA, 19 nt, Homo sapiens
  misc_RNA (1)...(19): siRNA sense strand
ggaugauguugaagaagua

SEQ ID NO: 1160516 - RNA, 19 nt, Homo sapiens
  misc_RNA (1)...(19): siRNA sense strand
ggaaguaugcuguucucua

SEQ ID NO: 1160517 - RNA, 19 nt, Homo sapiens
  misc_RNA (1)...(19): siRNA sense strand
ccaaugacucuuucuuuaa

SEQ ID NO: 1160518 - RNA, 19 nt, Homo sapiens
  misc_RNA (1)...(19): siRNA sense strand
caaguuaaaugugcacaga

SEQ ID NO: 1160519 - RNA, 19 nt, Homo sapiens
  misc_RNA (1)...(19): siRNA sense strand
aaagugaaguucucagaug

SEQ ID NO: 1160520 - RNA, 19 nt, Homo sapiens
  misc_RNA (1)...(19): siRNA sense strand
ccaacaggauacauugaaa

SEQ ID NO: 1160521 - RNA, 19 nt, Homo sapiens
  misc_RNA (1)...(19): siRNA sense strand
ucagcuaacuguucagaug

SEQ ID NO: 1160522 - RNA, 19 nt, Homo sapiens
  misc_RNA (1)...(19): siRNA sense strand
ggaaaaugauccagacuau

SEQ ID NO: 1160523 - RNA, 19 nt, Homo sapiens
  misc_RNA (1)...(19): siRNA sense strand
ggucagaaccagaugauuc

SEQ ID NO: 1160524 - RNA, 19 nt, Homo sapiens
  misc_RNA (1)...(19): siRNA sense strand
ugaagaagcggaugaggaa

SEQ ID NO: 1160525 - RNA, 19 nt, Homo sapiens
  misc_RNA (1)...(19): siRNA sense strand
uggagaagcuauugaagau

SEQ ID NO: 1160526 - RNA, 19 nt, Homo sapiens
  misc_RNA (1)...(19): siRNA sense strand
caaagaacagucugaacuu

SEQ ID NO: 1160527 - RNA, 19 nt, Homo sapiens
  misc_RNA (1)...(19): siRNA sense strand
ugaagcacuugaaagauau

SEQ ID NO: 1160528 - RNA, 19 nt, Homo sapiens
  misc_RNA (1)...(19): siRNA sense strand
aguuaaaugugcacagaua

SEQ ID NO: 1160529 - RNA, 19 nt, Homo sapiens
  misc_RNA (1)...(19): siRNA sense strand
gaaauuauggguuguacag

SEQ ID NO: 1160530 - RNA, 19 nt, Homo sapiens
  misc_RNA (1)...(19): siRNA sense strand
aaagaacagucugaacuug

SEQ ID NO: 1160531 - RNA, 19 nt, Homo sapiens
  misc_RNA (1)...(19): siRNA sense strand
caacaaagaacagucugaa

SEQ ID NO: 1160532 - RNA, 19 nt, Homo sapiens
  misc_RNA (1)...(19): siRNA sense strand
caagauugaagaugagaaa

SEQ ID NO: 1160533 - RNA, 19 nt, Homo sapiens
  misc_RNA (1)...(19): siRNA sense strand
caaugacucuuucuuuaac

SEQ ID NO: 1160534 - RNA, 19 nt, Homo sapiens
  misc_RNA (1)...(19): siRNA sense strand
cuucgaaauuggucacuuu

SEQ ID NO: 1160535 - RNA, 19 nt, Homo sapiens
  misc_RNA (1)...(19): siRNA sense strand
uagaaacaccaacaggaua

SEQ ID NO: 1160536 - RNA, 19 nt, Homo sapiens
  misc_RNA (1)...(19): siRNA sense strand
caagggacgugggacaguu

SEQ ID NO: 1160537 - RNA, 19 nt, Homo sapiens
  misc_RNA (1)...(19): siRNA sense strand
acagauagaagccaaauuc

SEQ ID NO: 1160538 - RNA, 19 nt, Homo sapiens
  misc_RNA (1)...(19): siRNA sense strand
ucuaucagccucuauuuga

SEQ ID NO: 1160539 - RNA, 19 nt, Homo sapiens
  misc_RNA (1)...(19): siRNA sense strand
ggaagaagaaggagaugag

SEQ ID NO: 1160540 - RNA, 19 nt, Homo sapiens
  misc_RNA (1)...(19): siRNA sense strand
gcugcagacuucgaaauug

SEQ ID NO: 1160541 - RNA, 19 nt, Homo sapiens
  misc_RNA (1)...(19): siRNA sense strand
agaagaagcagaaacacaa

SEQ ID NO: 1160542 - RNA, 19 nt, Homo sapiens
  misc_RNA (1)...(19): siRNA sense strand
aggccaagauugaagauga

SEQ ID NO: 1160543 - RNA, 19 nt, Homo sapiens
  misc_RNA (1)...(19): siRNA sense strand
ggaaaccagaugaagaaga

SEQ ID NO: 1160544 - RNA, 19 nt, Homo sapiens
  misc_RNA (1)...(19): siRNA sense strand
guagaaacaccaacaggau

SEQ ID NO: 1160545 - RNA, 19 nt, Homo sapiens
  misc_RNA (1)...(19): siRNA sense strand
ugaagaugaugaugaugau

SEQ ID NO: 1160546 - RNA, 19 nt, Homo sapiens
  misc_RNA (1)...(19): siRNA sense strand
gaaagaaaaggccaagauu

SEQ ID NO: 1160547 - RNA, 19 nt, Homo sapiens
  misc_RNA (1)...(19): siRNA sense strand
ucggaggaauugaaagaaa

SEQ ID NO: 1160548 - RNA, 19 nt, Homo sapiens
  misc_RNA (1)...(19): siRNA sense strand
ggcagacauugacaacaaa

SEQ ID NO: 1160549 - RNA, 19 nt, Homo sapiens
  misc_RNA (1)...(19): siRNA sense strand
agauuuggaugauguugaa

SEQ ID NO: 1160550 - RNA, 19 nt, Homo sapiens
  misc_RNA (1)...(19): siRNA sense strand
ggacgugggacaguucgua

SEQ ID NO: 1160551 - RNA, 19 nt, Homo sapiens
  misc_RNA (1)...(19): siRNA sense strand
ugacaaagacauacaggau

SEQ ID NO: 1160552 - RNA, 19 nt, Homo sapiens
  misc_RNA (1)...(19): siRNA sense strand
cgaugaaccuauucugaag

SEQ ID NO: 1160553 - RNA, 19 nt, Homo sapiens
  misc_RNA (1)...(19): siRNA sense strand
gagcguauaaucccaagau

SEQ ID NO: 1160554 - RNA, 19 nt, Homo sapiens
  misc_RNA (1)...(19): siRNA sense strand
agaaguagaagaagaggaa

SEQ ID NO: 1160555 - RNA, 19 nt, Homo sapiens
  misc_RNA (1)...(19): siRNA sense strand
gaagaaggagaugaggaaa

SEQ ID NO: 1160556 - RNA, 19 nt, Homo sapiens
  misc_RNA (1)...(19): siRNA sense strand
gaugagauuucggaggaau

SEQ ID NO: 1160557 - RNA, 19 nt, Homo sapiens
  misc_RNA (1)...(19): siRNA sense strand
ugaagaagaugagauuucg

SEQ ID NO: 1160558 - RNA, 19 nt, Homo sapiens
  misc_RNA (1)...(19): siRNA sense strand
gaacacgaugaaccuauuc

SEQ ID NO: 1160559 - RNA, 19 nt, Homo sapiens
  misc_RNA (1)...(19): siRNA sense strand
uaaaugugcacagauagaa

SEQ ID NO: 1160560 - RNA, 19 nt, Homo sapiens
  misc_RNA (1)...(19): siRNA sense strand
agaacagucugaacuugau

SEQ ID NO: 1160561 - RNA, 19 nt, Homo sapiens
  misc_RNA (1)...(19): siRNA sense strand
guacagggugccagauaga

SEQ ID NO: 1160562 - RNA, 19 nt, Homo sapiens
  misc_RNA (1)...(19): siRNA sense strand
agaagaaggagaugaggaa

SEQ ID NO: 1160563 - RNA, 19 nt, Homo sapiens
  misc_RNA (1)...(19): siRNA sense strand
uugaagaaguagaagaaga

SEQ ID NO: 1160564 - RNA, 19 nt, Homo sapiens
  misc_RNA (1)...(19): siRNA sense strand
gcacagauagaagccaaau

SEQ ID NO: 1160565 - RNA, 19 nt, Homo sapiens
  misc_RNA (1)...(19): siRNA sense strand
uauccuugcugcagacuuc

SEQ ID NO: 1160566 - RNA, 19 nt, Homo sapiens
  misc_RNA (1)...(19): siRNA sense strand
gaguggagaucuggaugau

SEQ ID NO: 1160567 - RNA, 19 nt, Homo sapiens
  misc_RNA (1)...(19): siRNA sense strand
agaugauucugaucccuuu

SEQ ID NO: 1160568 - RNA, 19 nt, Homo sapiens
  misc_RNA (1)...(19): siRNA sense strand
uggaugauguugaagaagu

SEQ ID NO: 1160569 - RNA, 19 nt, Homo sapiens
  misc_RNA (1)...(19): siRNA sense strand
aguaugcuguucucuauca

SEQ ID NO: 1160570 - RNA, 19 nt, Homo sapiens
  misc_RNA (1)...(19): siRNA sense strand
aaaaugauccagacuauga

SEQ ID NO: 1160571 - RNA, 19 nt, Homo sapiens
  misc_RNA (1)...(19): siRNA sense strand
uuaagaagaagcagaaaca

SEQ ID NO: 1160572 - RNA, 19 nt, Homo sapiens
  misc_RNA (1)...(19): siRNA sense strand
acgagugaaugcucucaaa

SEQ ID NO: 1160573 - RNA, 19 nt, Homo sapiens
  misc_RNA (1)...(19): siRNA sense strand
ugaugaagaaggugaagaa

SEQ ID NO: 1160574 - RNA, 19 nt, Homo sapiens
  misc_RNA (1)...(19): siRNA sense strand
gaagaagcagaaacacaag

SEQ ID NO: 1160575 - RNA, 19 nt, Homo sapiens
  misc_RNA (1)...(19): siRNA sense strand
ggugccagauagauuggaa

SEQ ID NO: 1160576 - RNA, 19 nt, Homo sapiens
  misc_RNA (1)...(19): siRNA sense strand
uuugauggaccagaaauua

SEQ ID NO: 1160577 - RNA, 19 nt, Homo sapiens
  misc_RNA (1)...(19): siRNA sense strand
acuuugaacccaaugaaua

SEQ ID NO: 1160578 - RNA, 19 nt, Homo sapiens
  misc_RNA (1)...(19): siRNA sense strand
agacauugacaacaaagaa

SEQ ID NO: 1160579 - RNA, 19 nt, Homo sapiens
  misc_RNA (1)...(19): siRNA sense strand
gaugaggucagaaccagau

SEQ ID NO: 1160580 - RNA, 19 nt, Homo sapiens
  misc_RNA (1)...(19): siRNA sense strand
gaagaugaugaugaugauu

SEQ ID NO: 1160581 - RNA, 19 nt, Homo sapiens
  misc_RNA (1)...(19): siRNA sense strand
gccuaugaguuuugucuua

SEQ ID NO: 1160582 - RNA, 19 nt, Homo sapiens
  misc_RNA (1)...(19): siRNA sense strand
gaucuugaaaggaaguaug

SEQ ID NO: 1160583 - RNA, 19 nt, Homo sapiens
  misc_RNA (1)...(19): siRNA sense strand
cauacaggaugaggucaga

SEQ ID NO: 1160584 - RNA, 19 nt, Homo sapiens
  misc_RNA (1)...(19): siRNA sense strand
gaugaagaagaugagauuu

SEQ ID NO: 1160585 - RNA, 19 nt, Homo sapiens
  misc_RNA (1)...(19): siRNA sense strand
gugaauggaaaccagauga

SEQ ID NO: 1160586 - RNA, 19 nt, Homo sapiens
  misc_RNA (1)...(19): siRNA sense strand
caacaggauacauugaaag

SEQ ID NO: 1160587 - RNA, 19 nt, Homo sapiens
  misc_RNA (1)...(19): siRNA sense strand
ggaugaugaugcugaagcu

SEQ ID NO: 1160588 - RNA, 19 nt, Homo sapiens
  misc_RNA (1)...(19): siRNA sense strand
ccagaaauuauggguugua

SEQ ID NO: 1160589 - RNA, 19 nt, Homo sapiens
  misc_RNA (1)...(19): siRNA sense strand
gaggaaacuggugaagaaa

SEQ ID NO: 1160590 - RNA, 19 nt, Homo sapiens
  misc_RNA (1)...(19): siRNA sense strand
uuaagaauguugacuugcu

SEQ ID NO: 1160591 - RNA, 19 nt, Homo sapiens
  misc_RNA (1)...(19): siRNA sense strand
cagcuaacuguucagauga

SEQ ID NO: 1160592 - RNA, 19 nt, Homo sapiens
  misc_RNA (1)...(19): siRNA sense strand
agaugaagaagaugagauu

SEQ ID NO: 1160593 - RNA, 19 nt, Homo sapiens
  misc_RNA (1)...(19): siRNA sense strand
gaauggaaaccagaugaag

SEQ ID NO: 1160594 - RNA, 19 nt, Homo sapiens
  misc_RNA (1)...(19): siRNA sense strand
acaaagaacagucugaacu

SEQ ID NO: 1160595 - RNA, 19 nt, Homo sapiens
  misc_RNA (1)...(19): siRNA sense strand
aaacuggugaagaaacaaa

SEQ ID NO: 1160596 - RNA, 19 nt, Homo sapiens
  misc_RNA (1)...(19): siRNA sense strand
aagaacagucugaacuuga

SEQ ID NO: 1160597 - RNA, 19 nt, Homo sapiens
  misc_RNA (1)...(19): siRNA sense strand
ugauggaccagaaauuaug

SEQ ID NO: 1160598 - RNA, 19 nt, Homo sapiens
  misc_RNA (1)...(19): siRNA sense strand
uugcagcccuucaagaaag

SEQ ID NO: 1160599 - RNA, 19 nt, Homo sapiens
  misc_RNA (1)...(19): siRNA sense strand
gaagugcugacaaagacau

SEQ ID NO: 1160600 - RNA, 19 nt, Homo sapiens
  misc_RNA (1)...(19): siRNA sense strand
uaaagugaaguucucagau

SEQ ID NO: 1160601 - RNA, 19 nt, Homo sapiens
  misc_RNA (1)...(19): siRNA sense strand
gaagcacuugaaagauauu

SEQ ID NO: 1160602 - RNA, 19 nt, Homo sapiens
  misc_RNA (1)...(19): siRNA sense strand
gaaguaugcuguucucuau

SEQ ID NO: 1160603 - RNA, 19 nt, Homo sapiens
  misc_RNA (1)...(19): siRNA sense strand
caaaugaagugcugacaaa

SEQ ID NO: 1160604 - RNA, 19 nt, Homo sapiens
  misc_RNA (1)...(19): siRNA sense strand
gagaagcuauugaagauga

SEQ ID NO: 1160605 - RNA, 19 nt, Homo sapiens
  misc_RNA (1)...(19): siRNA sense strand
gaaaccagaugaagaagau

SEQ ID NO: 1160606 - RNA, 19 nt, Homo sapiens
  misc_RNA (1)...(19): siRNA sense strand
ggaacacgaugaaccuauu

SEQ ID NO: 1160607 - RNA, 19 nt, Homo sapiens
  misc_RNA (1)...(19): siRNA sense strand
guggagaucuggaugauga

SEQ ID NO: 1160608 - RNA, 19 nt, Homo sapiens
  misc_RNA (1)...(19): siRNA sense strand
cugaagcacuugaaagaua

SEQ ID NO: 1160609 - RNA, 19 nt, Homo sapiens
  misc_RNA (1)...(19): siRNA sense strand
gaaaggaaguaugcuguuc

SEQ ID NO: 1160610 - RNA, 19 nt, Homo sapiens
  misc_RNA (1)...(19): siRNA sense strand
ggaaacuggugaagaaaca

SEQ ID NO: 1160611 - RNA, 19 nt, Homo sapiens
  misc_RNA (1)...(19): siRNA sense strand
agaggaaacuggugaagaa

SEQ ID NO: 1160612 - RNA, 19 nt, Homo sapiens
  misc_RNA (1)...(19): siRNA sense strand
uccaaugacucuuucuuua

SEQ ID NO: 1160613 - RNA, 19 nt, Homo sapiens
  misc_RNA (1)...(19): siRNA sense strand
caaauucuaugaggaaguu

SEQ ID NO: 1160614 - RNA, 19 nt, Homo sapiens
  misc_RNA (1)...(19): siRNA sense strand
acaaagacauacaggauga

SEQ ID NO: 1160615 - RNA, 19 nt, Homo sapiens
  misc_RNA (1)...(19): siRNA sense strand
ggaugauguugaagaagua

SEQ ID NO: 1160616 - RNA, 19 nt, Homo sapiens
  misc_RNA (1)...(19): siRNA sense strand
ggaaguaugcuguucucua

SEQ ID NO: 1160617 - RNA, 19 nt, Homo sapiens
  misc_RNA (1)...(19): siRNA sense strand
ccaaugacucuuucuuuaa

SEQ ID NO: 1160618 - RNA, 19 nt, Homo sapiens
  misc_RNA (1)...(19): siRNA sense strand
caaguuaaaugugcacaga

SEQ ID NO: 1160619 - RNA, 19 nt, Homo sapiens
  misc_RNA (1)...(19): siRNA sense strand
aaagugaaguucucagaug

SEQ ID NO: 1160620 - RNA, 19 nt, Homo sapiens
  misc_RNA (1)...(19): siRNA sense strand
ccaacaggauacauugaaa

SEQ ID NO: 1160621 - RNA, 19 nt, Homo sapiens
  misc_RNA (1)...(19): siRNA sense strand
ucagcuaacuguucagaug

SEQ ID NO: 1160622 - RNA, 19 nt, Homo sapiens
  misc_RNA (1)...(19): siRNA sense strand
ggaaaaugauccagacuau

SEQ ID NO: 1160623 - RNA, 19 nt, Homo sapiens
  misc_RNA (1)...(19): siRNA sense strand
ggucagaaccagaugauuc

SEQ ID NO: 1160624 - RNA, 19 nt, Homo sapiens
  misc_RNA (1)...(19): siRNA sense strand
ugaagaagcggaugaggaa

SEQ ID NO: 1160625 - RNA, 19 nt, Homo sapiens
  misc_RNA (1)...(19): siRNA sense strand
uggagaagcuauugaagau

SEQ ID NO: 1160626 - RNA, 19 nt, Homo sapiens
  misc_RNA (1)...(19): siRNA sense strand
caaagaacagucugaacuu

SEQ ID NO: 1160627 - RNA, 19 nt, Homo sapiens
  misc_RNA (1)...(19): siRNA sense strand
ugaagcacuugaaagauau

SEQ ID NO: 1160628 - RNA, 19 nt, Homo sapiens
  misc_RNA (1)...(19): siRNA sense strand
aguuaaaugugcacagaua

SEQ ID NO: 1160629 - RNA, 19 nt, Homo sapiens
  misc_RNA (1)...(19): siRNA sense strand
gaaauuauggguuguacag

SEQ ID NO: 1160630 - RNA, 19 nt, Homo sapiens
  misc_RNA (1)...(19): siRNA sense strand
aaagaacagucugaacuug

SEQ ID NO: 1160631 - RNA, 19 nt, Homo sapiens
  misc_RNA (1)...(19): siRNA sense strand
caacaaagaacagucugaa

SEQ ID NO: 1160632 - RNA, 19 nt, Homo sapiens
  misc_RNA (1)...(19): siRNA sense strand
caagauugaagaugagaaa

SEQ ID NO: 1160633 - RNA, 19 nt, Homo sapiens
  misc_RNA (1)...(19): siRNA sense strand
caaugacucuuucuuuaac

SEQ ID NO: 1160634 - RNA, 19 nt, Homo sapiens
  misc_RNA (1)...(19): siRNA sense strand
cuucgaaauuggucacuuu

SEQ ID NO: 1160635 - RNA, 19 nt, Homo sapiens
  misc_RNA (1)...(19): siRNA sense strand
uagaaacaccaacaggaua

SEQ ID NO: 1160636 - RNA, 19 nt, Homo sapiens
  misc_RNA (1)...(19): siRNA sense strand
caagggacgugggacaguu

SEQ ID NO: 1160637 - RNA, 19 nt, Homo sapiens
  misc_RNA (1)...(19): siRNA sense strand
acagauagaagccaaauuc

SEQ ID NO: 1160638 - RNA, 19 nt, Homo sapiens
  misc_RNA (1)...(19): siRNA sense strand
ucuaucagccucuauuuga

SEQ ID NO: 1160639 - RNA, 19 nt, Homo sapiens
  misc_RNA (1)...(19): siRNA sense strand
ggaagaagaaggagaugag

SEQ ID NO: 1160640 - RNA, 19 nt, Homo sapiens
  misc_RNA (1)...(19): siRNA sense strand
gcugcagacuucgaaauug

SEQ ID NO: 1160641 - RNA, 19 nt, Homo sapiens
  misc_RNA (1)...(19): siRNA sense strand
agaagaagcagaaacacaa

SEQ ID NO: 1160642 - RNA, 19 nt, Homo sapiens
  misc_RNA (1)...(19): siRNA sense strand
aggccaagauugaagauga

SEQ ID NO: 1160643 - RNA, 19 nt, Homo sapiens
  misc_RNA (1)...(19): siRNA sense strand
ggaaaccagaugaagaaga

SEQ ID NO: 1160644 - RNA, 19 nt, Homo sapiens
  misc_RNA (1)...(19): siRNA sense strand
guagaaacaccaacaggau

SEQ ID NO: 1160645 - RNA, 19 nt, Homo sapiens
  misc_RNA (1)...(19): siRNA sense strand
ugaagaugaugaugaugau

SEQ ID NO: 1160646 - RNA, 19 nt, Homo sapiens
  misc_RNA (1)...(19): siRNA sense strand
gaaagaaaaggccaagauu

SEQ ID NO: 1160647 - RNA, 19 nt, Homo sapiens
  misc_RNA (1)...(19): siRNA sense strand
ucggaggaauugaaagaaa

SEQ ID NO: 1160648 - RNA, 19 nt, Homo sapiens
  misc_RNA (1)...(19): siRNA sense strand
ggcagacauugacaacaaa

SEQ ID NO: 1160649 - RNA, 19 nt, Homo sapiens
  misc_RNA (1)...(19): siRNA sense strand
agauuuggaugauguugaa

SEQ ID NO: 1160650 - RNA, 19 nt, Homo sapiens
  misc_RNA (1)...(19): siRNA sense strand
ggacgugggacaguucgua

SEQ ID NO: 1160651 - RNA, 19 nt, Homo sapiens
  misc_RNA (1)...(19): siRNA sense strand
ugacaaagacauacaggau

SEQ ID NO: 1160652 - RNA, 19 nt, Homo sapiens
  misc_RNA (1)...(19): siRNA sense strand
cgaugaaccuauucugaag

SEQ ID NO: 1160653 - RNA, 19 nt, Homo sapiens
  misc_RNA (1)...(19): siRNA sense strand
gagcguauaaucccaagau

SEQ ID NO: 1160654 - RNA, 19 nt, Homo sapiens
  misc_RNA (1)...(19): siRNA sense strand
agaaguagaagaagaggaa

SEQ ID NO: 1160655 - RNA, 19 nt, Homo sapiens
  misc_RNA (1)...(19): siRNA sense strand
gaagaaggagaugaggaaa

SEQ ID NO: 1160656 - RNA, 19 nt, Homo sapiens
  misc_RNA (1)...(19): siRNA sense strand
gaugagauuucggaggaau

SEQ ID NO: 1160657 - RNA, 19 nt, Homo sapiens
  misc_RNA (1)...(19): siRNA sense strand
ugaagaagaugagauuucg

SEQ ID NO: 1160658 - RNA, 19 nt, Homo sapiens
  misc_RNA (1)...(19): siRNA sense strand
gaacacgaugaaccuauuc

SEQ ID NO: 1160659 - RNA, 19 nt, Homo sapiens
  misc_RNA (1)...(19): siRNA sense strand
uaaaugugcacagauagaa

SEQ ID NO: 1160660 - RNA, 19 nt, Homo sapiens
  misc_RNA (1)...(19): siRNA sense strand
agaacagucugaacuugau

SEQ ID NO: 1160661 - RNA, 19 nt, Homo sapiens
  misc_RNA (1)...(19): siRNA sense strand
guacagggugccagauaga

SEQ ID NO: 1160662 - RNA, 19 nt, Homo sapiens
  misc_RNA (1)...(19): siRNA sense strand
agaagaaggagaugaggaa

SEQ ID NO: 1160663 - RNA, 19 nt, Homo sapiens
  misc_RNA (1)...(19): siRNA sense strand
uugaagaaguagaagaaga

SEQ ID NO: 1160664 - RNA, 19 nt, Homo sapiens
  misc_RNA (1)...(19): siRNA sense strand
gcacagauagaagccaaau

SEQ ID NO: 1160665 - RNA, 19 nt, Homo sapiens
  misc_RNA (1)...(19): siRNA sense strand
uauccuugcugcagacuuc

SEQ ID NO: 1160666 - RNA, 19 nt, Homo sapiens
  misc_RNA (1)...(19): siRNA sense strand
gaguggagaucuggaugau

SEQ ID NO: 1160667 - RNA, 19 nt, Homo sapiens
  misc_RNA (1)...(19): siRNA sense strand
agaugauucugaucccuuu

SEQ ID NO: 1160668 - RNA, 19 nt, Homo sapiens
  misc_RNA (1)...(19): siRNA sense strand
uggaugauguugaagaagu

SEQ ID NO: 1160669 - RNA, 19 nt, Homo sapiens
  misc_RNA (1)...(19): siRNA sense strand
aguaugcuguucucuauca

SEQ ID NO: 1160670 - RNA, 19 nt, Homo sapiens
  misc_RNA (1)...(19): siRNA sense strand
aaaaugauccagacuauga

SEQ ID NO: 1160671 - RNA, 19 nt, Homo sapiens
  misc_RNA (1)...(19): siRNA sense strand
uuaagaagaagcagaaaca

SEQ ID NO: 1160672 - RNA, 19 nt, Homo sapiens
  misc_RNA (1)...(19): siRNA sense strand
acgagugaaugcucucaaa

SEQ ID NO: 1160673 - RNA, 19 nt, Homo sapiens
  misc_RNA (1)...(19): siRNA sense strand
ugaugaagaaggugaagaa

SEQ ID NO: 1160674 - RNA, 19 nt, Homo sapiens
  misc_RNA (1)...(19): siRNA sense strand
gaagaagcagaaacacaag

SEQ ID NO: 1160675 - RNA, 19 nt, Homo sapiens
  misc_RNA (1)...(19): siRNA sense strand
ggugccagauagauuggaa

SEQ ID NO: 1160676 - RNA, 19 nt, Homo sapiens
  misc_RNA (1)...(19): siRNA sense strand
uuugauggaccagaaauua

SEQ ID NO: 1160677 - RNA, 19 nt, Homo sapiens
  misc_RNA (1)...(19): siRNA sense strand
acuuugaacccaaugaaua

SEQ ID NO: 1160678 - RNA, 19 nt, Homo sapiens
  misc_RNA (1)...(19): siRNA sense strand
agacauugacaacaaagaa

SEQ ID NO: 1160679 - RNA, 19 nt, Homo sapiens
  misc_RNA (1)...(19): siRNA sense strand
gaugaggucagaaccagau

SEQ ID NO: 1160680 - RNA, 19 nt, Homo sapiens
  misc_RNA (1)...(19): siRNA sense strand
gaagaugaugaugaugauu

SEQ ID NO: 1160681 - RNA, 19 nt, Homo sapiens
  misc_RNA (1)...(19): siRNA sense strand
gccuaugaguuuugucuua

SEQ ID NO: 1160682 - RNA, 19 nt, Homo sapiens
  misc_RNA (1)...(19): siRNA sense strand
gaucuugaaaggaaguaug

SEQ ID NO: 1160683 - RNA, 19 nt, Homo sapiens
  misc_RNA (1)...(19): siRNA sense strand
cauacaggaugaggucaga

SEQ ID NO: 1160684 - RNA, 19 nt, Homo sapiens
  misc_RNA (1)...(19): siRNA sense strand
gaugaagaagaugagauuu

SEQ ID NO: 1160685 - RNA, 19 nt, Homo sapiens
  misc_RNA (1)...(19): siRNA sense strand
gugaauggaaaccagauga

SEQ ID NO: 1160686 - RNA, 19 nt, Homo sapiens
  misc_RNA (1)...(19): siRNA sense strand
caacaggauacauugaaag

SEQ ID NO: 1160687 - RNA, 19 nt, Homo sapiens
  misc_RNA (1)...(19): siRNA sense strand
ggaugaugaugcugaagcu

SEQ ID NO: 1160688 - RNA, 19 nt, Homo sapiens
  misc_RNA (1)...(19): siRNA sense strand
ccagaaauuauggguugua

SEQ ID NO: 1160689 - RNA, 19 nt, Homo sapiens
  misc_RNA (1)...(19): siRNA sense strand
gaggaaacuggugaagaaa

SEQ ID NO: 1160690 - RNA, 19 nt, Homo sapiens
  misc_RNA (1)...(19): siRNA sense strand
uuaagaauguugacuugcu

SEQ ID NO: 1160691 - RNA, 19 nt, Homo sapiens
  misc_RNA (1)...(19): siRNA sense strand
cagcuaacuguucagauga

SEQ ID NO: 1160692 - RNA, 19 nt, Homo sapiens
  misc_RNA (1)...(19): siRNA sense strand
agaugaagaagaugagauu

SEQ ID NO: 1160693 - RNA, 19 nt, Homo sapiens
  misc_RNA (1)...(19): siRNA sense strand
gaauggaaaccagaugaag

SEQ ID NO: 1160694 - RNA, 19 nt, Homo sapiens
  misc_RNA (1)...(19): siRNA sense strand
acaaagaacagucugaacu

SEQ ID NO: 1160695 - RNA, 19 nt, Homo sapiens
  misc_RNA (1)...(19): siRNA sense strand
aaacuggugaagaaacaaa

SEQ ID NO: 1160696 - RNA, 19 nt, Homo sapiens
  misc_RNA (1)...(19): siRNA sense strand
aagaacagucugaacuuga

SEQ ID NO: 1160697 - RNA, 19 nt, Homo sapiens
  misc_RNA (1)...(19): siRNA sense strand
ugauggaccagaaauuaug

SEQ ID NO: 1160698 - RNA, 19 nt, Homo sapiens
  misc_RNA (1)...(19): siRNA sense strand
uugcagcccuucaagaaag

SEQ ID NO: 1160699 - RNA, 19 nt, Homo sapiens
  misc_RNA (1)...(19): siRNA sense strand
gaagugcugacaaagacau

SEQ ID NO: 1160700 - RNA, 19 nt, Homo sapiens
  misc_RNA (1)...(19): siRNA sense strand
uaaagugaaguucucagau

SEQ ID NO: 1160701 - RNA, 19 nt, Homo sapiens
  misc_RNA (1)...(19): siRNA sense strand
gaagcacuugaaagauauu

SEQ ID NO: 1160702 - RNA, 19 nt, Homo sapiens
  misc_RNA (1)...(19): siRNA sense strand
gaaaauggguccuguguaa

SEQ ID NO: 1160703 - RNA, 19 nt, Homo sapiens
  misc_RNA (1)...(19): siRNA sense strand
gcagugagcugucggucaa

SEQ ID NO: 1160704 - RNA, 19 nt, Homo sapiens
  misc_RNA (1)...(19): siRNA sense strand
guagagagcuuuguaucga

SEQ ID NO: 1160705 - RNA, 19 nt, Homo sapiens
  misc_RNA (1)...(19): siRNA sense strand
ggaggacccaguugagaaa

SEQ ID NO: 1160706 - RNA, 19 nt, Homo sapiens
  misc_RNA (1)...(19): siRNA sense strand
uaucgaggcugcagaaguc

SEQ ID NO: 1160707 - RNA, 19 nt, Homo sapiens
  misc_RNA (1)...(19): siRNA sense strand
cgacguagagagcuuugua

SEQ ID NO: 1160708 - RNA, 19 nt, Homo sapiens
  misc_RNA (1)...(19): siRNA sense strand
aauggguccuguguaauua

SEQ ID NO: 1160709 - RNA, 19 nt, Homo sapiens
  misc_RNA (1)...(19): siRNA sense strand
ccaggucgcugucaauggu

SEQ ID NO: 1160710 - RNA, 19 nt, Homo sapiens
  misc_RNA (1)...(19): siRNA sense strand
aaauggguccuguguaauu

SEQ ID NO: 1160711 - RNA, 19 nt, Homo sapiens
  misc_RNA (1)...(19): siRNA sense strand
gggaggacccaguugagaa

SEQ ID NO: 1160712 - RNA, 19 nt, Homo sapiens
  misc_RNA (1)...(19): siRNA sense strand
acaaagagaaagugucaga

SEQ ID NO: 1160713 - RNA, 19 nt, Homo sapiens
  misc_RNA (1)...(19): siRNA sense strand
ggaaggcgagguggaaaug

SEQ ID NO: 1160714 - RNA, 19 nt, Homo sapiens
  misc_RNA (1)...(19): siRNA sense strand
acaccgacgugcugcagaa

SEQ ID NO: 1160715 - RNA, 19 nt, Homo sapiens
  misc_RNA (1)...(19): siRNA sense strand
gcagugauggagaagcaaa

SEQ ID NO: 1160716 - RNA, 19 nt, Homo sapiens
  misc_RNA (1)...(19): siRNA sense strand
cuccggagcuguugcacuu

SEQ ID NO: 1160717 - RNA, 19 nt, Homo sapiens
  misc_RNA (1)...(19): siRNA sense strand
ggaaguggacauccugaac

SEQ ID NO: 1160718 - RNA, 19 nt, Homo sapiens
  misc_RNA (1)...(19): siRNA sense strand
agccucagcuggagucaga

SEQ ID NO: 1160719 - RNA, 19 nt, Homo sapiens
  misc_RNA (1)...(19): siRNA sense strand
uggaggcagugauggagaa

SEQ ID NO: 1160720 - RNA, 19 nt, Homo sapiens
  misc_RNA (1)...(19): siRNA sense strand
auacagacccgaguucuuc

SEQ ID NO: 1160721 - RNA, 19 nt, Homo sapiens
  misc_RNA (1)...(19): siRNA sense strand
gagcuguugcacuuccuuu

SEQ ID NO: 1160722 - RNA, 19 nt, Homo sapiens
  misc_RNA (1)...(19): siRNA sense strand
ggacccaguugagaaacag

SEQ ID NO: 1160723 - RNA, 19 nt, Homo sapiens
  misc_RNA (1)...(19): siRNA sense strand
ccgacgugcugcagaagau

SEQ ID NO: 1160724 - RNA, 19 nt, Homo sapiens
  misc_RNA (1)...(19): siRNA sense strand
guccugaccuggcgguucu

SEQ ID NO: 1160725 - RNA, 19 nt, Homo sapiens
  misc_RNA (1)...(19): siRNA sense strand
aaggcgagguggaaaugga

SEQ ID NO: 1160726 - RNA, 19 nt, Homo sapiens
  misc_RNA (1)...(19): siRNA sense strand
agucagagacagcaggaaa

SEQ ID NO: 1160727 - RNA, 19 nt, Homo sapiens
  misc_RNA (1)...(19): siRNA sense strand
gaggacaaagagaaagugu

SEQ ID NO: 1160728 - RNA, 19 nt, Homo sapiens
  misc_RNA (1)...(19): siRNA sense strand
ccuguguaauuaugacuuc

SEQ ID NO: 1160729 - RNA, 19 nt, Homo sapiens
  misc_RNA (1)...(19): siRNA sense strand
ggaaaauggguccugugua

SEQ ID NO: 1160730 - RNA, 19 nt, Homo sapiens
  misc_RNA (1)...(19): siRNA sense strand
gguggaaggcgagguggaa

SEQ ID NO: 1160731 - RNA, 19 nt, Homo sapiens
  misc_RNA (1)...(19): siRNA sense strand
ggucaagcagcgggacgua

SEQ ID NO: 1160732 - RNA, 19 nt, Homo sapiens
  misc_RNA (1)...(19): siRNA sense strand
gggaaguggacauccugaa

SEQ ID NO: 1160733 - RNA, 19 nt, Homo sapiens
  misc_RNA (1)...(19): siRNA sense strand
ggaggacaaagagaaagug

SEQ ID NO: 1160734 - RNA, 19 nt, Homo sapiens
  misc_RNA (1)...(19): siRNA sense strand
gacguagagagcuuuguau

SEQ ID NO: 1160735 - RNA, 19 nt, Homo sapiens
  misc_RNA (1)...(19): siRNA sense strand
cauacagacccgaguucuu

SEQ ID NO: 1160736 - RNA, 19 nt, Homo sapiens
  misc_RNA (1)...(19): siRNA sense strand
gaaaauggguccuguguaa

SEQ ID NO: 1160737 - RNA, 19 nt, Homo sapiens
  misc_RNA (1)...(19): siRNA sense strand
gcagugagcugucggucaa

SEQ ID NO: 1160738 - RNA, 19 nt, Homo sapiens
  misc_RNA (1)...(19): siRNA sense strand
guagagagcuuuguaucga

SEQ ID NO: 1160739 - RNA, 19 nt, Homo sapiens
  misc_RNA (1)...(19): siRNA sense strand
ggaggacccaguugagaaa

SEQ ID NO: 1160740 - RNA, 19 nt, Homo sapiens
  misc_RNA (1)...(19): siRNA sense strand
uaucgaggcugcagaaguc

SEQ ID NO: 1160741 - RNA, 19 nt, Homo sapiens
  misc_RNA (1)...(19): siRNA sense strand
cgacguagagagcuuugua

SEQ ID NO: 1160742 - RNA, 19 nt, Homo sapiens
  misc_RNA (1)...(19): siRNA sense strand
aauggguccuguguaauua

SEQ ID NO: 1160743 - RNA, 19 nt, Homo sapiens
  misc_RNA (1)...(19): siRNA sense strand
ccaggucgcugucaauggu

SEQ ID NO: 1160744 - RNA, 19 nt, Homo sapiens
  misc_RNA (1)...(19): siRNA sense strand
aaauggguccuguguaauu

SEQ ID NO: 1160745 - RNA, 19 nt, Homo sapiens
  misc_RNA (1)...(19): siRNA sense strand
gggaggacccaguugagaa

SEQ ID NO: 1160746 - RNA, 19 nt, Homo sapiens
  misc_RNA (1)...(19): siRNA sense strand
acaaagagaaagugucaga

SEQ ID NO: 1160747 - RNA, 19 nt, Homo sapiens
  misc_RNA (1)...(19): siRNA sense strand
ggaaggcgagguggaaaug

SEQ ID NO: 1160748 - RNA, 19 nt, Homo sapiens
  misc_RNA (1)...(19): siRNA sense strand
acaccgacgugcugcagaa

SEQ ID NO: 1160749 - RNA, 19 nt, Homo sapiens
  misc_RNA (1)...(19): siRNA sense strand
gcagugauggagaagcaaa

SEQ ID NO: 1160750 - RNA, 19 nt, Homo sapiens
  misc_RNA (1)...(19): siRNA sense strand
cuccggagcuguugcacuu

SEQ ID NO: 1160751 - RNA, 19 nt, Homo sapiens
  misc_RNA (1)...(19): siRNA sense strand
ggaaguggacauccugaac

SEQ ID NO: 1160752 - RNA, 19 nt, Homo sapiens
  misc_RNA (1)...(19): siRNA sense strand
agccucagcuggagucaga

SEQ ID NO: 1160753 - RNA, 19 nt, Homo sapiens
  misc_RNA (1)...(19): siRNA sense strand
uggaggcagugauggagaa

SEQ ID NO: 1160754 - RNA, 19 nt, Homo sapiens
  misc_RNA (1)...(19): siRNA sense strand
auacagacccgaguucuuc

SEQ ID NO: 1160755 - RNA, 19 nt, Homo sapiens
  misc_RNA (1)...(19): siRNA sense strand
gagcuguugcacuuccuuu

SEQ ID NO: 1160756 - RNA, 19 nt, Homo sapiens
  misc_RNA (1)...(19): siRNA sense strand
ggacccaguugagaaacag

SEQ ID NO: 1160757 - RNA, 19 nt, Homo sapiens
  misc_RNA (1)...(19): siRNA sense strand
ccgacgugcugcagaagau

SEQ ID NO: 1160758 - RNA, 19 nt, Homo sapiens
  misc_RNA (1)...(19): siRNA sense strand
guccugaccuggcgguucu

SEQ ID NO: 1160759 - RNA, 19 nt, Homo sapiens
  misc_RNA (1)...(19): siRNA sense strand
aaggcgagguggaaaugga

SEQ ID NO: 1160760 - RNA, 19 nt, Homo sapiens
  misc_RNA (1)...(19): siRNA sense strand
agucagagacagcaggaaa

SEQ ID NO: 1160761 - RNA, 19 nt, Homo sapiens
  misc_RNA (1)...(19): siRNA sense strand
gaggacaaagagaaagugu

SEQ ID NO: 1160762 - RNA, 19 nt, Homo sapiens
  misc_RNA (1)...(19): siRNA sense strand
ccuguguaauuaugacuuc

SEQ ID NO: 1160763 - RNA, 19 nt, Homo sapiens
  misc_RNA (1)...(19): siRNA sense strand
ggaaaauggguccugugua

SEQ ID NO: 1160764 - RNA, 19 nt, Homo sapiens
  misc_RNA (1)...(19): siRNA sense strand
gguggaaggcgagguggaa

SEQ ID NO: 1160765 - RNA, 19 nt, Homo sapiens
  misc_RNA (1)...(19): siRNA sense strand
ggucaagcagcgggacgua

SEQ ID NO: 1160766 - RNA, 19 nt, Homo sapiens
  misc_RNA (1)...(19): siRNA sense strand
gggaaguggacauccugaa

SEQ ID NO: 1160767 - RNA, 19 nt, Homo sapiens
  misc_RNA (1)...(19): siRNA sense strand
ggaggacaaagagaaagug

SEQ ID NO: 1160768 - RNA, 19 nt, Homo sapiens
  misc_RNA (1)...(19): siRNA sense strand
gacguagagagcuuuguau

SEQ ID NO: 1160769 - RNA, 19 nt, Homo sapiens
  misc_RNA (1)...(19): siRNA sense strand
cauacagacccgaguucuu

SEQ ID NO: 1160770 - RNA, 19 nt, Homo sapiens
  misc_RNA (1)...(19): siRNA sense strand
gaaaauggguccuguguaa

SEQ ID NO: 1160771 - RNA, 19 nt, Homo sapiens
  misc_RNA (1)...(19): siRNA sense strand
gcagugagcugucggucaa

SEQ ID NO: 1160772 - RNA, 19 nt, Homo sapiens
  misc_RNA (1)...(19): siRNA sense strand
guagagagcuuuguaucga

SEQ ID NO: 1160773 - RNA, 19 nt, Homo sapiens
  misc_RNA (1)...(19): siRNA sense strand
ggaggacccaguugagaaa

SEQ ID NO: 1160774 - RNA, 19 nt, Homo sapiens
  misc_RNA (1)...(19): siRNA sense strand
uaucgaggcugcagaaguc

SEQ ID NO: 1160775 - RNA, 19 nt, Homo sapiens
  misc_RNA (1)...(19): siRNA sense strand
cgacguagagagcuuugua

SEQ ID NO: 1160776 - RNA, 19 nt, Homo sapiens
  misc_RNA (1)...(19): siRNA sense strand
aauggguccuguguaauua

SEQ ID NO: 1160777 - RNA, 19 nt, Homo sapiens
  misc_RNA (1)...(19): siRNA sense strand
ccaggucgcugucaauggu

SEQ ID NO: 1160778 - RNA, 19 nt, Homo sapiens
  misc_RNA (1)...(19): siRNA sense strand
aaauggguccuguguaauu

SEQ ID NO: 1160779 - RNA, 19 nt, Homo sapiens
  misc_RNA (1)...(19): siRNA sense strand
gggaggacccaguugagaa

SEQ ID NO: 1160780 - RNA, 19 nt, Homo sapiens
  misc_RNA (1)...(19): siRNA sense strand
acaaagagaaagugucaga

SEQ ID NO: 1160781 - RNA, 19 nt, Homo sapiens
  misc_RNA (1)...(19): siRNA sense strand
ggaaggcgagguggaaaug

SEQ ID NO: 1160782 - RNA, 19 nt, Homo sapiens
  misc_RNA (1)...(19): siRNA sense strand
acaccgacgugcugcagaa

SEQ ID NO: 1160783 - RNA, 19 nt, Homo sapiens
  misc_RNA (1)...(19): siRNA sense strand
gcagugauggagaagcaaa

SEQ ID NO: 1160784 - RNA, 19 nt, Homo sapiens
  misc_RNA (1)...(19): siRNA sense strand
cuccggagcuguugcacuu

SEQ ID NO: 1160785 - RNA, 19 nt, Homo sapiens
  misc_RNA (1)...(19): siRNA sense strand
ggaaguggacauccugaac

SEQ ID NO: 1160786 - RNA, 19 nt, Homo sapiens
  misc_RNA (1)...(19): siRNA sense strand
agccucagcuggagucaga

SEQ ID NO: 1160787 - RNA, 19 nt, Homo sapiens
  misc_RNA (1)...(19): siRNA sense strand
uggaggcagugauggagaa

SEQ ID NO: 1160788 - RNA, 19 nt, Homo sapiens
  misc_RNA (1)...(19): siRNA sense strand
auacagacccgaguucuuc

SEQ ID NO: 1160789 - RNA, 19 nt, Homo sapiens
  misc_RNA (1)...(19): siRNA sense strand
gagcuguugcacuuccuuu

SEQ ID NO: 1160790 - RNA, 19 nt, Homo sapiens
  misc_RNA (1)...(19): siRNA sense strand
ggacccaguugagaaacag

SEQ ID NO: 1160791 - RNA, 19 nt, Homo sapiens
  misc_RNA (1)...(19): siRNA sense strand
ccgacgugcugcagaagau

SEQ ID NO: 1160792 - RNA, 19 nt, Homo sapiens
  misc_RNA (1)...(19): siRNA sense strand
guccugaccuggcgguucu

SEQ ID NO: 1160793 - RNA, 19 nt, Homo sapiens
  misc_RNA (1)...(19): siRNA sense strand
aaggcgagguggaaaugga

SEQ ID NO: 1160794 - RNA, 19 nt, Homo sapiens
  misc_RNA (1)...(19): siRNA sense strand
agucagagacagcaggaaa

SEQ ID NO: 1160795 - RNA, 19 nt, Homo sapiens
  misc_RNA (1)...(19): siRNA sense strand
gaggacaaagagaaagugu

SEQ ID NO: 1160796 - RNA, 19 nt, Homo sapiens
  misc_RNA (1)...(19): siRNA sense strand
ccuguguaauuaugacuuc

SEQ ID NO: 1160797 - RNA, 19 nt, Homo sapiens
  misc_RNA (1)...(19): siRNA sense strand
ggaaaauggguccugugua

SEQ ID NO: 1160798 - RNA, 19 nt, Homo sapiens
  misc_RNA (1)...(19): siRNA sense strand
gguggaaggcgagguggaa

SEQ ID NO: 1160799 - RNA, 19 nt, Homo sapiens
  misc_RNA (1)...(19): siRNA sense strand
ggucaagcagcgggacgua

SEQ ID NO: 1160800 - RNA, 19 nt, Homo sapiens
  misc_RNA (1)...(19): siRNA sense strand
gggaaguggacauccugaa

SEQ ID NO: 1160801 - RNA, 19 nt, Homo sapiens
  misc_RNA (1)...(19): siRNA sense strand
ggaggacaaagagaaagug

SEQ ID NO: 1160802 - RNA, 19 nt, Homo sapiens
  misc_RNA (1)...(19): siRNA sense strand
gacguagagagcuuuguau

SEQ ID NO: 1160803 - RNA, 19 nt, Homo sapiens
  misc_RNA (1)...(19): siRNA sense strand
cauacagacccgaguucuu

SEQ ID NO: 1160804 - RNA, 19 nt, Homo sapiens
  misc_RNA (1)...(19): siRNA sense strand
gaagagagcuguugagauc

SEQ ID NO: 1160805 - RNA, 19 nt, Homo sapiens
  misc_RNA (1)...(19): siRNA sense strand
caggagagcucaagaaugg

SEQ ID NO: 1160806 - RNA, 19 nt, Homo sapiens
  misc_RNA (1)...(19): siRNA sense strand
ggacuucucugcacagcau

SEQ ID NO: 1160807 - RNA, 19 nt, Homo sapiens
  misc_RNA (1)...(19): siRNA sense strand
ggagggaggccaugacuug

SEQ ID NO: 1160808 - RNA, 19 nt, Homo sapiens
  misc_RNA (1)...(19): siRNA sense strand
guuauuagcaccuuuaaga

SEQ ID NO: 1160809 - RNA, 19 nt, Homo sapiens
  misc_RNA (1)...(19): siRNA sense strand
caagagccaugcccaguuc

SEQ ID NO: 1160810 - RNA, 19 nt, Homo sapiens
  misc_RNA (1)...(19): siRNA sense strand
cagcagagcacccucauug

SEQ ID NO: 1160811 - RNA, 19 nt, Homo sapiens
  misc_RNA (1)...(19): siRNA sense strand
ggagcugugugcagaaguu

SEQ ID NO: 1160812 - RNA, 19 nt, Homo sapiens
  misc_RNA (1)...(19): siRNA sense strand
gaauuccucuugucgaagu

SEQ ID NO: 1160813 - RNA, 19 nt, Homo sapiens
  misc_RNA (1)...(19): siRNA sense strand
aaagugcguucaaggcuaa

SEQ ID NO: 1160814 - RNA, 19 nt, Homo sapiens
  misc_RNA (1)...(19): siRNA sense strand
aggaagagcuggagaagca

SEQ ID NO: 1160815 - RNA, 19 nt, Homo sapiens
  misc_RNA (1)...(19): siRNA sense strand
gagcaaagagagugccauu

SEQ ID NO: 1160816 - RNA, 19 nt, Homo sapiens
  misc_RNA (1)...(19): siRNA sense strand
ggcaagauccucaccaaga

SEQ ID NO: 1160817 - RNA, 19 nt, Homo sapiens
  misc_RNA (1)...(19): siRNA sense strand
gcaaggaugggacuguuau

SEQ ID NO: 1160818 - RNA, 19 nt, Homo sapiens
  misc_RNA (1)...(19): siRNA sense strand
gcaagauccucaccaagac

SEQ ID NO: 1160819 - RNA, 19 nt, Homo sapiens
  misc_RNA (1)...(19): siRNA sense strand
gaacaaggagaagagcaaa

SEQ ID NO: 1160820 - RNA, 19 nt, Homo sapiens
  misc_RNA (1)...(19): siRNA sense strand
gcacccagcaggcguucua

SEQ ID NO: 1160821 - RNA, 19 nt, Homo sapiens
  misc_RNA (1)...(19): siRNA sense strand
ggaacaaggagaagagcaa

SEQ ID NO: 1160822 - RNA, 19 nt, Homo sapiens
  misc_RNA (1)...(19): siRNA sense strand
ugacaacgggaacuucuuu

SEQ ID NO: 1160823 - RNA, 19 nt, Homo sapiens
  misc_RNA (1)...(19): siRNA sense strand
uagagaaagucaucgagau

SEQ ID NO: 1160824 - RNA, 19 nt, Homo sapiens
  misc_RNA (1)...(19): siRNA sense strand
gagcccaccaugcuucuuu

SEQ ID NO: 1160825 - RNA, 19 nt, Homo sapiens
  misc_RNA (1)...(19): siRNA sense strand
ggacgccucccuccuacaa

SEQ ID NO: 1160826 - RNA, 19 nt, Homo sapiens
  misc_RNA (1)...(19): siRNA sense strand
gggaggaggaggaggauug

SEQ ID NO: 1160827 - RNA, 19 nt, Homo sapiens
  misc_RNA (1)...(19): siRNA sense strand
ggacuguuauuagcaccuu

SEQ ID NO: 1160828 - RNA, 19 nt, Homo sapiens
  misc_RNA (1)...(19): siRNA sense strand
gcaggagagcucaagaaug

SEQ ID NO: 1160829 - RNA, 19 nt, Homo sapiens
  misc_RNA (1)...(19): siRNA sense strand
ccucugaacccaacuugaa

SEQ ID NO: 1160830 - RNA, 19 nt, Homo sapiens
  misc_RNA (1)...(19): siRNA sense strand
ggaugggacuguuauuagc

SEQ ID NO: 1160831 - RNA, 19 nt, Homo sapiens
  misc_RNA (1)...(19): siRNA sense strand
ucgcugaguuccagaaaca

SEQ ID NO: 1160832 - RNA, 19 nt, Homo sapiens
  misc_RNA (1)...(19): siRNA sense strand
ggagacguggaguaccuua

SEQ ID NO: 1160833 - RNA, 19 nt, Homo sapiens
  misc_RNA (1)...(19): siRNA sense strand
gggcgucguccguguguaa

SEQ ID NO: 1160834 - RNA, 19 nt, Homo sapiens
  misc_RNA (1)...(19): siRNA sense strand
gcagaagcagcuccuguuc

SEQ ID NO: 1160835 - RNA, 19 nt, Homo sapiens
  misc_RNA (1)...(19): siRNA sense strand
gcaguggccacgcuagaga

SEQ ID NO: 1160836 - RNA, 19 nt, Homo sapiens
  misc_RNA (1)...(19): siRNA sense strand
ggacauucaccauggcaau

SEQ ID NO: 1160837 - RNA, 19 nt, Homo sapiens
  misc_RNA (1)...(19): siRNA sense strand
ggaaccauccuuggaaauc

SEQ ID NO: 1160838 - RNA, 19 nt, Homo sapiens
  misc_RNA (1)...(19): siRNA sense strand
gcaaguucaugagcacauc

SEQ ID NO: 1160839 - RNA, 19 nt, Homo sapiens
  misc_RNA (1)...(19): siRNA sense strand
guucaaggcuaaaacagaa

SEQ ID NO: 1160840 - RNA, 19 nt, Homo sapiens
  misc_RNA (1)...(19): siRNA sense strand
gccuggugcuggauacaaa

SEQ ID NO: 1160841 - RNA, 19 nt, Homo sapiens
  misc_RNA (1)...(19): siRNA sense strand
ggaggaggaggacgaggaa

SEQ ID NO: 1160842 - RNA, 19 nt, Homo sapiens
  misc_RNA (1)...(19): siRNA sense strand
cgggaaccauccuuggaaa

SEQ ID NO: 1160843 - RNA, 19 nt, Homo sapiens
  misc_RNA (1)...(19): siRNA sense strand
guuugaugcuguugaagga

SEQ ID NO: 1160844 - RNA, 19 nt, Homo sapiens
  misc_RNA (1)...(19): siRNA sense strand
aaggaugggacuguuauua

SEQ ID NO: 1160845 - RNA, 19 nt, Homo sapiens
  misc_RNA (1)...(19): siRNA sense strand
gaaccauccuuggaaaucc

SEQ ID NO: 1160846 - RNA, 19 nt, Homo sapiens
  misc_RNA (1)...(19): siRNA sense strand
ugacuugaccgccaucugu

SEQ ID NO: 1160847 - RNA, 19 nt, Homo sapiens
  misc_RNA (1)...(19): siRNA sense strand
ggauucugcuucuucaacu

SEQ ID NO: 1160848 - RNA, 19 nt, Homo sapiens
  misc_RNA (1)...(19): siRNA sense strand
auuagcaccuuuaagaaga

SEQ ID NO: 1160849 - RNA, 19 nt, Homo sapiens
  misc_RNA (1)...(19): siRNA sense strand
ggagagcucaagaauggau

SEQ ID NO: 1160850 - RNA, 19 nt, Homo sapiens
  misc_RNA (1)...(19): siRNA sense strand
gaggaggccgagacuguga

SEQ ID NO: 1160851 - RNA, 19 nt, Homo sapiens
  misc_RNA (1)...(19): siRNA sense strand
ucaucgagauccagagcaa

SEQ ID NO: 1160852 - RNA, 19 nt, Homo sapiens
  misc_RNA (1)...(19): siRNA sense strand
ucucggcucugcucagugu

SEQ ID NO: 1160853 - RNA, 19 nt, Homo sapiens
  misc_RNA (1)...(19): siRNA sense strand
ccaagagccaugcccaguu

SEQ ID NO: 1160854 - RNA, 19 nt, Homo sapiens
  misc_RNA (1)...(19): siRNA sense strand
ggagaagagcaaagagagu

SEQ ID NO: 1160855 - RNA, 19 nt, Homo sapiens
  misc_RNA (1)...(19): siRNA sense strand
cacgaguucucaccugaug

SEQ ID NO: 1160856 - RNA, 19 nt, Homo sapiens
  misc_RNA (1)...(19): siRNA sense strand
ccaagcagcagcaggagau

SEQ ID NO: 1160857 - RNA, 19 nt, Homo sapiens
  misc_RNA (1)...(19): siRNA sense strand
caugagcacauccucuauu

SEQ ID NO: 1160858 - RNA, 19 nt, Homo sapiens
  misc_RNA (1)...(19): siRNA sense strand
gcccauugcccacgaguuc

SEQ ID NO: 1160859 - RNA, 19 nt, Homo sapiens
  misc_RNA (1)...(19): siRNA sense strand
ggacugggacauucaccau

SEQ ID NO: 1160860 - RNA, 19 nt, Homo sapiens
  misc_RNA (1)...(19): siRNA sense strand
acaaggagaagagcaaaga

SEQ ID NO: 1160861 - RNA, 19 nt, Homo sapiens
  misc_RNA (1)...(19): siRNA sense strand
gccaugggauucugcuucu

SEQ ID NO: 1160862 - RNA, 19 nt, Homo sapiens
  misc_RNA (1)...(19): siRNA sense strand
ccacagccaugggauucug

SEQ ID NO: 1160863 - RNA, 19 nt, Homo sapiens
  misc_RNA (1)...(19): siRNA sense strand
gagcacauccucuauuccu

SEQ ID NO: 1160864 - RNA, 19 nt, Homo sapiens
  misc_RNA (1)...(19): siRNA sense strand
ucaagcagcagcaggagau

SEQ ID NO: 1160865 - RNA, 19 nt, Homo sapiens
  misc_RNA (1)...(19): siRNA sense strand
gcagaagcagcagcagcua

SEQ ID NO: 1160866 - RNA, 19 nt, Homo sapiens
  misc_RNA (1)...(19): siRNA sense strand
cagcaugaccaccugacaa

SEQ ID NO: 1160867 - RNA, 19 nt, Homo sapiens
  misc_RNA (1)...(19): siRNA sense strand
gaugucaggucgggaacca

SEQ ID NO: 1160868 - RNA, 19 nt, Homo sapiens
  misc_RNA (1)...(19): siRNA sense strand
cggguuugaugcuguugaa

SEQ ID NO: 1160869 - RNA, 19 nt, Homo sapiens
  misc_RNA (1)...(19): siRNA sense strand
uuaagaagagagcuguuga

SEQ ID NO: 1160870 - RNA, 19 nt, Homo sapiens
  misc_RNA (1)...(19): siRNA sense strand
cgagucggaugggauguca

SEQ ID NO: 1160871 - RNA, 19 nt, Homo sapiens
  misc_RNA (1)...(19): siRNA sense strand
caccugaugugguccuagu

SEQ ID NO: 1160872 - RNA, 19 nt, Homo sapiens
  misc_RNA (1)...(19): siRNA sense strand
ccaaccaguucagccucua

SEQ ID NO: 1160873 - RNA, 19 nt, Homo sapiens
  misc_RNA (1)...(19): siRNA sense strand
caaaacuccuacagcagaa

SEQ ID NO: 1160874 - RNA, 19 nt, Homo sapiens
  misc_RNA (1)...(19): siRNA sense strand
gagggaggccaugacuuga

SEQ ID NO: 1160875 - RNA, 19 nt, Homo sapiens
  misc_RNA (1)...(19): siRNA sense strand
gcaggaagagcuggagaag

SEQ ID NO: 1160876 - RNA, 19 nt, Homo sapiens
  misc_RNA (1)...(19): siRNA sense strand
caucguggacugggacauu

SEQ ID NO: 1160877 - RNA, 19 nt, Homo sapiens
  misc_RNA (1)...(19): siRNA sense strand
ucgcaaggaugggacuguu

SEQ ID NO: 1160878 - RNA, 19 nt, Homo sapiens
  misc_RNA (1)...(19): siRNA sense strand
uggccacgcuagagaaagu

SEQ ID NO: 1160879 - RNA, 19 nt, Homo sapiens
  misc_RNA (1)...(19): siRNA sense strand
gcagcagagcacccucauu

SEQ ID NO: 1160880 - RNA, 19 nt, Homo sapiens
  misc_RNA (1)...(19): siRNA sense strand
caaggaugggacuguuauu

SEQ ID NO: 1160881 - RNA, 19 nt, Homo sapiens
  misc_RNA (1)...(19): siRNA sense strand
aagaagagagcuguugaga

SEQ ID NO: 1160882 - RNA, 19 nt, Homo sapiens
  misc_RNA (1)...(19): siRNA sense strand
ugggcaagauccucaccaa

SEQ ID NO: 1160883 - RNA, 19 nt, Homo sapiens
  misc_RNA (1)...(19): siRNA sense strand
aacaacagcaccagcaguu

SEQ ID NO: 1160884 - RNA, 19 nt, Homo sapiens
  misc_RNA (1)...(19): siRNA sense strand
augagcacauccucuauuc

SEQ ID NO: 1160885 - RNA, 19 nt, Homo sapiens
  misc_RNA (1)...(19): siRNA sense strand
gaugggacuguuauuagca

SEQ ID NO: 1160886 - RNA, 19 nt, Homo sapiens
  misc_RNA (1)...(19): siRNA sense strand
cuggguggcuacucuguca

SEQ ID NO: 1160887 - RNA, 19 nt, Homo sapiens
  misc_RNA (1)...(19): siRNA sense strand
ccucugugcucuacaucuc

SEQ ID NO: 1160888 - RNA, 19 nt, Homo sapiens
  misc_RNA (1)...(19): siRNA sense strand
gcacgcugaccggcaaguu

SEQ ID NO: 1160889 - RNA, 19 nt, Homo sapiens
  misc_RNA (1)...(19): siRNA sense strand
cgcaaggaugggacuguua

SEQ ID NO: 1160890 - RNA, 19 nt, Homo sapiens
  misc_RNA (1)...(19): siRNA sense strand
cgaguucucaccugaugug

SEQ ID NO: 1160891 - RNA, 19 nt, Homo sapiens
  misc_RNA (1)...(19): siRNA sense strand
gcaucgggguggacaguga

SEQ ID NO: 1160892 - RNA, 19 nt, Homo sapiens
  misc_RNA (1)...(19): siRNA sense strand
ggagccuggugcuggauac

SEQ ID NO: 1160893 - RNA, 19 nt, Homo sapiens
  misc_RNA (1)...(19): siRNA sense strand
gcugagaauggcuuuacug

SEQ ID NO: 1160894 - RNA, 19 nt, Homo sapiens
  misc_RNA (1)...(19): siRNA sense strand
agaaagucaucgagaucca

SEQ ID NO: 1160895 - RNA, 19 nt, Homo sapiens
  misc_RNA (1)...(19): siRNA sense strand
agagaaagucaucgagauc

SEQ ID NO: 1160896 - RNA, 19 nt, Homo sapiens
  misc_RNA (1)...(19): siRNA sense strand
ggcaggaagagcuggagaa

SEQ ID NO: 1160897 - RNA, 19 nt, Homo sapiens
  misc_RNA (1)...(19): siRNA sense strand
gcuaugacaacgggaacuu

SEQ ID NO: 1160898 - RNA, 19 nt, Homo sapiens
  misc_RNA (1)...(19): siRNA sense strand
caugggauucugcuucuuc

SEQ ID NO: 1160899 - RNA, 19 nt, Homo sapiens
  misc_RNA (1)...(19): siRNA sense strand
ggacaccacgccgaggaau

SEQ ID NO: 1160900 - RNA, 19 nt, Homo sapiens
  misc_RNA (1)...(19): siRNA sense strand
ugcuggagcuggccuucaa

SEQ ID NO: 1160901 - RNA, 19 nt, Homo sapiens
  misc_RNA (1)...(19): siRNA sense strand
cagaccagcccgucaagca

SEQ ID NO: 1160902 - RNA, 19 nt, Homo sapiens
  misc_RNA (1)...(19): siRNA sense strand
aagcugaggcuccaggaau

SEQ ID NO: 1160903 - RNA, 19 nt, Homo sapiens
  misc_RNA (1)...(19): siRNA sense strand
agcugaggcuccaggaauu

SEQ ID NO: 1160904 - RNA, 19 nt, Homo sapiens
  misc_RNA (1)...(19): siRNA sense strand
gaagagagcuguugagauc

SEQ ID NO: 1160905 - RNA, 19 nt, Homo sapiens
  misc_RNA (1)...(19): siRNA sense strand
caggagagcucaagaaugg

SEQ ID NO: 1160906 - RNA, 19 nt, Homo sapiens
  misc_RNA (1)...(19): siRNA sense strand
ggacuucucugcacagcau

SEQ ID NO: 1160907 - RNA, 19 nt, Homo sapiens
  misc_RNA (1)...(19): siRNA sense strand
ggagggaggccaugacuug

SEQ ID NO: 1160908 - RNA, 19 nt, Homo sapiens
  misc_RNA (1)...(19): siRNA sense strand
guuauuagcaccuuuaaga

SEQ ID NO: 1160909 - RNA, 19 nt, Homo sapiens
  misc_RNA (1)...(19): siRNA sense strand
caagagccaugcccaguuc

SEQ ID NO: 1160910 - RNA, 19 nt, Homo sapiens
  misc_RNA (1)...(19): siRNA sense strand
cagcagagcacccucauug

SEQ ID NO: 1160911 - RNA, 19 nt, Homo sapiens
  misc_RNA (1)...(19): siRNA sense strand
ggagcugugugcagaaguu

SEQ ID NO: 1160912 - RNA, 19 nt, Homo sapiens
  misc_RNA (1)...(19): siRNA sense strand
gaauuccucuugucgaagu

SEQ ID NO: 1160913 - RNA, 19 nt, Homo sapiens
  misc_RNA (1)...(19): siRNA sense strand
aaagugcguucaaggcuaa

SEQ ID NO: 1160914 - RNA, 19 nt, Homo sapiens
  misc_RNA (1)...(19): siRNA sense strand
aggaagagcuggagaagca

SEQ ID NO: 1160915 - RNA, 19 nt, Homo sapiens
  misc_RNA (1)...(19): siRNA sense strand
gagcaaagagagugccauu

SEQ ID NO: 1160916 - RNA, 19 nt, Homo sapiens
  misc_RNA (1)...(19): siRNA sense strand
ggcaagauccucaccaaga

SEQ ID NO: 1160917 - RNA, 19 nt, Homo sapiens
  misc_RNA (1)...(19): siRNA sense strand
gcaaggaugggacuguuau

SEQ ID NO: 1160918 - RNA, 19 nt, Homo sapiens
  misc_RNA (1)...(19): siRNA sense strand
gcaagauccucaccaagac

SEQ ID NO: 1160919 - RNA, 19 nt, Homo sapiens
  misc_RNA (1)...(19): siRNA sense strand
gaacaaggagaagagcaaa

SEQ ID NO: 1160920 - RNA, 19 nt, Homo sapiens
  misc_RNA (1)...(19): siRNA sense strand
gcacccagcaggcguucua

SEQ ID NO: 1160921 - RNA, 19 nt, Homo sapiens
  misc_RNA (1)...(19): siRNA sense strand
ggaacaaggagaagagcaa

SEQ ID NO: 1160922 - RNA, 19 nt, Homo sapiens
  misc_RNA (1)...(19): siRNA sense strand
ugacaacgggaacuucuuu

SEQ ID NO: 1160923 - RNA, 19 nt, Homo sapiens
  misc_RNA (1)...(19): siRNA sense strand
uagagaaagucaucgagau

SEQ ID NO: 1160924 - RNA, 19 nt, Homo sapiens
  misc_RNA (1)...(19): siRNA sense strand
gagcccaccaugcuucuuu

SEQ ID NO: 1160925 - RNA, 19 nt, Homo sapiens
  misc_RNA (1)...(19): siRNA sense strand
ggacgccucccuccuacaa

SEQ ID NO: 1160926 - RNA, 19 nt, Homo sapiens
  misc_RNA (1)...(19): siRNA sense strand
gggaggaggaggaggauug

SEQ ID NO: 1160927 - RNA, 19 nt, Homo sapiens
  misc_RNA (1)...(19): siRNA sense strand
ggacuguuauuagcaccuu

SEQ ID NO: 1160928 - RNA, 19 nt, Homo sapiens
  misc_RNA (1)...(19): siRNA sense strand
gcaggagagcucaagaaug

SEQ ID NO: 1160929 - RNA, 19 nt, Homo sapiens
  misc_RNA (1)...(19): siRNA sense strand
ccucugaacccaacuugaa

SEQ ID NO: 1160930 - RNA, 19 nt, Homo sapiens
  misc_RNA (1)...(19): siRNA sense strand
ggaugggacuguuauuagc

SEQ ID NO: 1160931 - RNA, 19 nt, Homo sapiens
  misc_RNA (1)...(19): siRNA sense strand
ucgcugaguuccagaaaca

SEQ ID NO: 1160932 - RNA, 19 nt, Homo sapiens
  misc_RNA (1)...(19): siRNA sense strand
ggagacguggaguaccuua

SEQ ID NO: 1160933 - RNA, 19 nt, Homo sapiens
  misc_RNA (1)...(19): siRNA sense strand
gggcgucguccguguguaa

SEQ ID NO: 1160934 - RNA, 19 nt, Homo sapiens
  misc_RNA (1)...(19): siRNA sense strand
gcagaagcagcuccuguuc

SEQ ID NO: 1160935 - RNA, 19 nt, Homo sapiens
  misc_RNA (1)...(19): siRNA sense strand
gcaguggccacgcuagaga

SEQ ID NO: 1160936 - RNA, 19 nt, Homo sapiens
  misc_RNA (1)...(19): siRNA sense strand
ggacauucaccauggcaau

SEQ ID NO: 1160937 - RNA, 19 nt, Homo sapiens
  misc_RNA (1)...(19): siRNA sense strand
ggaaccauccuuggaaauc

SEQ ID NO: 1160938 - RNA, 19 nt, Homo sapiens
  misc_RNA (1)...(19): siRNA sense strand
gcaaguucaugagcacauc

SEQ ID NO: 1160939 - RNA, 19 nt, Homo sapiens
  misc_RNA (1)...(19): siRNA sense strand
guucaaggcuaaaacagaa

SEQ ID NO: 1160940 - RNA, 19 nt, Homo sapiens
  misc_RNA (1)...(19): siRNA sense strand
gccuggugcuggauacaaa

SEQ ID NO: 1160941 - RNA, 19 nt, Homo sapiens
  misc_RNA (1)...(19): siRNA sense strand
ggaggaggaggacgaggaa

SEQ ID NO: 1160942 - RNA, 19 nt, Homo sapiens
  misc_RNA (1)...(19): siRNA sense strand
cgggaaccauccuuggaaa

SEQ ID NO: 1160943 - RNA, 19 nt, Homo sapiens
  misc_RNA (1)...(19): siRNA sense strand
guuugaugcuguugaagga

SEQ ID NO: 1160944 - RNA, 19 nt, Homo sapiens
  misc_RNA (1)...(19): siRNA sense strand
aaggaugggacuguuauua

SEQ ID NO: 1160945 - RNA, 19 nt, Homo sapiens
  misc_RNA (1)...(19): siRNA sense strand
gaaccauccuuggaaaucc

SEQ ID NO: 1160946 - RNA, 19 nt, Homo sapiens
  misc_RNA (1)...(19): siRNA sense strand
ugacuugaccgccaucugu

SEQ ID NO: 1160947 - RNA, 19 nt, Homo sapiens
  misc_RNA (1)...(19): siRNA sense strand
ggauucugcuucuucaacu

SEQ ID NO: 1160948 - RNA, 19 nt, Homo sapiens
  misc_RNA (1)...(19): siRNA sense strand
auuagcaccuuuaagaaga

SEQ ID NO: 1160949 - RNA, 19 nt, Homo sapiens
  misc_RNA (1)...(19): siRNA sense strand
ggagagcucaagaauggau

SEQ ID NO: 1160950 - RNA, 19 nt, Homo sapiens
  misc_RNA (1)...(19): siRNA sense strand
gaggaggccgagacuguga

SEQ ID NO: 1160951 - RNA, 19 nt, Homo sapiens
  misc_RNA (1)...(19): siRNA sense strand
ucaucgagauccagagcaa

SEQ ID NO: 1160952 - RNA, 19 nt, Homo sapiens
  misc_RNA (1)...(19): siRNA sense strand
ucucggcucugcucagugu

SEQ ID NO: 1160953 - RNA, 19 nt, Homo sapiens
  misc_RNA (1)...(19): siRNA sense strand
ccaagagccaugcccaguu

SEQ ID NO: 1160954 - RNA, 19 nt, Homo sapiens
  misc_RNA (1)...(19): siRNA sense strand
ggagaagagcaaagagagu

SEQ ID NO: 1160955 - RNA, 19 nt, Homo sapiens
  misc_RNA (1)...(19): siRNA sense strand
cacgaguucucaccugaug

SEQ ID NO: 1160956 - RNA, 19 nt, Homo sapiens
  misc_RNA (1)...(19): siRNA sense strand
ccaagcagcagcaggagau

SEQ ID NO: 1160957 - RNA, 19 nt, Homo sapiens
  misc_RNA (1)...(19): siRNA sense strand
caugagcacauccucuauu

SEQ ID NO: 1160958 - RNA, 19 nt, Homo sapiens
  misc_RNA (1)...(19): siRNA sense strand
gcccauugcccacgaguuc

SEQ ID NO: 1160959 - RNA, 19 nt, Homo sapiens
  misc_RNA (1)...(19): siRNA sense strand
ggacugggacauucaccau

SEQ ID NO: 1160960 - RNA, 19 nt, Homo sapiens
  misc_RNA (1)...(19): siRNA sense strand
acaaggagaagagcaaaga

SEQ ID NO: 1160961 - RNA, 19 nt, Homo sapiens
  misc_RNA (1)...(19): siRNA sense strand
gccaugggauucugcuucu

SEQ ID NO: 1160962 - RNA, 19 nt, Homo sapiens
  misc_RNA (1)...(19): siRNA sense strand
ccacagccaugggauucug

SEQ ID NO: 1160963 - RNA, 19 nt, Homo sapiens
  misc_RNA (1)...(19): siRNA sense strand
gagcacauccucuauuccu

SEQ ID NO: 1160964 - RNA, 19 nt, Homo sapiens
  misc_RNA (1)...(19): siRNA sense strand
ucaagcagcagcaggagau

SEQ ID NO: 1160965 - RNA, 19 nt, Homo sapiens
  misc_RNA (1)...(19): siRNA sense strand
gcagaagcagcagcagcua

SEQ ID NO: 1160966 - RNA, 19 nt, Homo sapiens
  misc_RNA (1)...(19): siRNA sense strand
cagcaugaccaccugacaa

SEQ ID NO: 1160967 - RNA, 19 nt, Homo sapiens
  misc_RNA (1)...(19): siRNA sense strand
gaugucaggucgggaacca

SEQ ID NO: 1160968 - RNA, 19 nt, Homo sapiens
  misc_RNA (1)...(19): siRNA sense strand
cggguuugaugcuguugaa

SEQ ID NO: 1160969 - RNA, 19 nt, Homo sapiens
  misc_RNA (1)...(19): siRNA sense strand
uuaagaagagagcuguuga

SEQ ID NO: 1160970 - RNA, 19 nt, Homo sapiens
  misc_RNA (1)...(19): siRNA sense strand
cgagucggaugggauguca

SEQ ID NO: 1160971 - RNA, 19 nt, Homo sapiens
  misc_RNA (1)...(19): siRNA sense strand
caccugaugugguccuagu

SEQ ID NO: 1160972 - RNA, 19 nt, Homo sapiens
  misc_RNA (1)...(19): siRNA sense strand
ccaaccaguucagccucua

SEQ ID NO: 1160973 - RNA, 19 nt, Homo sapiens
  misc_RNA (1)...(19): siRNA sense strand
caaaacuccuacagcagaa

SEQ ID NO: 1160974 - RNA, 19 nt, Homo sapiens
  misc_RNA (1)...(19): siRNA sense strand
gagggaggccaugacuuga

SEQ ID NO: 1160975 - RNA, 19 nt, Homo sapiens
  misc_RNA (1)...(19): siRNA sense strand
gcaggaagagcuggagaag

SEQ ID NO: 1160976 - RNA, 19 nt, Homo sapiens
  misc_RNA (1)...(19): siRNA sense strand
caucguggacugggacauu

SEQ ID NO: 1160977 - RNA, 19 nt, Homo sapiens
  misc_RNA (1)...(19): siRNA sense strand
ucgcaaggaugggacuguu

SEQ ID NO: 1160978 - RNA, 19 nt, Homo sapiens
  misc_RNA (1)...(19): siRNA sense strand
uggccacgcuagagaaagu

SEQ ID NO: 1160979 - RNA, 19 nt, Homo sapiens
  misc_RNA (1)...(19): siRNA sense strand
gcagcagagcacccucauu

SEQ ID NO: 1160980 - RNA, 19 nt, Homo sapiens
  misc_RNA (1)...(19): siRNA sense strand
caaggaugggacuguuauu

SEQ ID NO: 1160981 - RNA, 19 nt, Homo sapiens
  misc_RNA (1)...(19): siRNA sense strand
aagaagagagcuguugaga

SEQ ID NO: 1160982 - RNA, 19 nt, Homo sapiens
  misc_RNA (1)...(19): siRNA sense strand
ugggcaagauccucaccaa

SEQ ID NO: 1160983 - RNA, 19 nt, Homo sapiens
  misc_RNA (1)...(19): siRNA sense strand
aacaacagcaccagcaguu

SEQ ID NO: 1160984 - RNA, 19 nt, Homo sapiens
  misc_RNA (1)...(19): siRNA sense strand
augagcacauccucuauuc

SEQ ID NO: 1160985 - RNA, 19 nt, Homo sapiens
  misc_RNA (1)...(19): siRNA sense strand
gaugggacuguuauuagca

SEQ ID NO: 1160986 - RNA, 19 nt, Homo sapiens
  misc_RNA (1)...(19): siRNA sense strand
cuggguggcuacucuguca

SEQ ID NO: 1160987 - RNA, 19 nt, Homo sapiens
  misc_RNA (1)...(19): siRNA sense strand
ccucugugcucuacaucuc

SEQ ID NO: 1160988 - RNA, 19 nt, Homo sapiens
  misc_RNA (1)...(19): siRNA sense strand
gcacgcugaccggcaaguu

SEQ ID NO: 1160989 - RNA, 19 nt, Homo sapiens
  misc_RNA (1)...(19): siRNA sense strand
cgcaaggaugggacuguua

SEQ ID NO: 1160990 - RNA, 19 nt, Homo sapiens
  misc_RNA (1)...(19): siRNA sense strand
cgaguucucaccugaugug

SEQ ID NO: 1160991 - RNA, 19 nt, Homo sapiens
  misc_RNA (1)...(19): siRNA sense strand
gcaucgggguggacaguga

SEQ ID NO: 1160992 - RNA, 19 nt, Homo sapiens
  misc_RNA (1)...(19): siRNA sense strand
ggagccuggugcuggauac

SEQ ID NO: 1160993 - RNA, 19 nt, Homo sapiens
  misc_RNA (1)...(19): siRNA sense strand
gcugagaauggcuuuacug

SEQ ID NO: 1160994 - RNA, 19 nt, Homo sapiens
  misc_RNA (1)...(19): siRNA sense strand
agaaagucaucgagaucca

SEQ ID NO: 1160995 - RNA, 19 nt, Homo sapiens
  misc_RNA (1)...(19): siRNA sense strand
agagaaagucaucgagauc

SEQ ID NO: 1160996 - RNA, 19 nt, Homo sapiens
  misc_RNA (1)...(19): siRNA sense strand
ggcaggaagagcuggagaa

SEQ ID NO: 1160997 - RNA, 19 nt, Homo sapiens
  misc_RNA (1)...(19): siRNA sense strand
gcuaugacaacgggaacuu

SEQ ID NO: 1160998 - RNA, 19 nt, Homo sapiens
  misc_RNA (1)...(19): siRNA sense strand
caugggauucugcuucuuc

SEQ ID NO: 1160999 - RNA, 19 nt, Homo sapiens
  misc_RNA (1)...(19): siRNA sense strand
ggacaccacgccgaggaau

SEQ ID NO: 1161000 - RNA, 19 nt, Homo sapiens
  misc_RNA (1)...(19): siRNA sense strand
ugcuggagcuggccuucaa

SEQ ID NO: 1161001 - RNA, 19 nt, Homo sapiens
  misc_RNA (1)...(19): siRNA sense strand
cagaccagcccgucaagca

SEQ ID NO: 1161002 - RNA, 19 nt, Homo sapiens
  misc_RNA (1)...(19): siRNA sense strand
aagcugaggcuccaggaau

SEQ ID NO: 1161003 - RNA, 19 nt, Homo sapiens
  misc_RNA (1)...(19): siRNA sense strand
agcugaggcuccaggaauu

SEQ ID NO: 1161004 - RNA, 19 nt, Homo sapiens
  misc_RNA (1)...(19): siRNA sense strand
gcaaaguacuccuggugua

SEQ ID NO: 1161005 - RNA, 19 nt, Homo sapiens
  misc_RNA (1)...(19): siRNA sense strand
gaagaaagaucagcaacug

SEQ ID NO: 1161006 - RNA, 19 nt, Homo sapiens
  misc_RNA (1)...(19): siRNA sense strand
gcagauggcuggcaugagu

SEQ ID NO: 1161007 - RNA, 19 nt, Homo sapiens
  misc_RNA (1)...(19): siRNA sense strand
cagaagaaguggcaaagaa

SEQ ID NO: 1161008 - RNA, 19 nt, Homo sapiens
  misc_RNA (1)...(19): siRNA sense strand
caagauaugggaaauacua

SEQ ID NO: 1161009 - RNA, 19 nt, Homo sapiens
  misc_RNA (1)...(19): siRNA sense strand
aagcaagacuacucuauga

SEQ ID NO: 1161010 - RNA, 19 nt, Homo sapiens
  misc_RNA (1)...(19): siRNA sense strand
ggucaaaucagucaaccua

SEQ ID NO: 1161011 - RNA, 19 nt, Homo sapiens
  misc_RNA (1)...(19): siRNA sense strand
ccagagaacuuucgaagac

SEQ ID NO: 1161012 - RNA, 19 nt, Homo sapiens
  misc_RNA (1)...(19): siRNA sense strand
ccaauggguuuaugggaaa

SEQ ID NO: 1161013 - RNA, 19 nt, Homo sapiens
  misc_RNA (1)...(19): siRNA sense strand
gggaggaggacaacaagua

SEQ ID NO: 1161014 - RNA, 19 nt, Homo sapiens
  misc_RNA (1)...(19): siRNA sense strand
ucaaaucagucaaccuaga

SEQ ID NO: 1161015 - RNA, 19 nt, Homo sapiens
  misc_RNA (1)...(19): siRNA sense strand
gggaaauacuaaagcaaga

SEQ ID NO: 1161016 - RNA, 19 nt, Homo sapiens
  misc_RNA (1)...(19): siRNA sense strand
gugcuggaauucauagaaa

SEQ ID NO: 1161017 - RNA, 19 nt, Homo sapiens
  misc_RNA (1)...(19): siRNA sense strand
ugccauagcuauuacaaau

SEQ ID NO: 1161018 - RNA, 19 nt, Homo sapiens
  misc_RNA (1)...(19): siRNA sense strand
ucacugagcaaacuacaaa

SEQ ID NO: 1161019 - RNA, 19 nt, Homo sapiens
  misc_RNA (1)...(19): siRNA sense strand
ggaucuagauuuauucacu

SEQ ID NO: 1161020 - RNA, 19 nt, Homo sapiens
  misc_RNA (1)...(19): siRNA sense strand
gcacaggaaccauucaaca

SEQ ID NO: 1161021 - RNA, 19 nt, Homo sapiens
  misc_RNA (1)...(19): siRNA sense strand
gaagaccacagacagauca

SEQ ID NO: 1161022 - RNA, 19 nt, Homo sapiens
  misc_RNA (1)...(19): siRNA sense strand
ggaauucauagaaaucuug

SEQ ID NO: 1161023 - RNA, 19 nt, Homo sapiens
  misc_RNA (1)...(19): siRNA sense strand
aagccaaucuuccagagaa

SEQ ID NO: 1161024 - RNA, 19 nt, Homo sapiens
  misc_RNA (1)...(19): siRNA sense strand
ucuaaucccuuaccugcaa

SEQ ID NO: 1161025 - RNA, 19 nt, Homo sapiens
  misc_RNA (1)...(19): siRNA sense strand
gcaagacuacucuaugaag

SEQ ID NO: 1161026 - RNA, 19 nt, Homo sapiens
  misc_RNA (1)...(19): siRNA sense strand
cugaaaagcugcagaagaa

SEQ ID NO: 1161027 - RNA, 19 nt, Homo sapiens
  misc_RNA (1)...(19): siRNA sense strand
ggaauauugguguguuuau

SEQ ID NO: 1161028 - RNA, 19 nt, Homo sapiens
  misc_RNA (1)...(19): siRNA sense strand
auacagugcaugcaagaua

SEQ ID NO: 1161029 - RNA, 19 nt, Homo sapiens
  misc_RNA (1)...(19): siRNA sense strand
uaaagcaagacuacucuau

SEQ ID NO: 1161030 - RNA, 19 nt, Homo sapiens
  misc_RNA (1)...(19): siRNA sense strand
gagaaaaggagccagaaaa

SEQ ID NO: 1161031 - RNA, 19 nt, Homo sapiens
  misc_RNA (1)...(19): siRNA sense strand
gaggaauggugggacaaau

SEQ ID NO: 1161032 - RNA, 19 nt, Homo sapiens
  misc_RNA (1)...(19): siRNA sense strand
gcagaagaaagaucagcaa

SEQ ID NO: 1161033 - RNA, 19 nt, Homo sapiens
  misc_RNA (1)...(19): siRNA sense strand
cagaugugcuggaauucau

SEQ ID NO: 1161034 - RNA, 19 nt, Homo sapiens
  misc_RNA (1)...(19): siRNA sense strand
acaagcaccagcugcauuu

SEQ ID NO: 1161035 - RNA, 19 nt, Homo sapiens
  misc_RNA (1)...(19): siRNA sense strand
agaagaaguggcaaagaaa

SEQ ID NO: 1161036 - RNA, 19 nt, Homo sapiens
  misc_RNA (1)...(19): siRNA sense strand
uuggaccgaugauuucuaa

SEQ ID NO: 1161037 - RNA, 19 nt, Homo sapiens
  misc_RNA (1)...(19): siRNA sense strand
cagaacagauacagugcau

SEQ ID NO: 1161038 - RNA, 19 nt, Homo sapiens
  misc_RNA (1)...(19): siRNA sense strand
uacagugcaugcaagauau

SEQ ID NO: 1161039 - RNA, 19 nt, Homo sapiens
  misc_RNA (1)...(19): siRNA sense strand
ggaauggugggacaaaugg

SEQ ID NO: 1161040 - RNA, 19 nt, Homo sapiens
  misc_RNA (1)...(19): siRNA sense strand
ggaaaugugaugggacaga

SEQ ID NO: 1161041 - RNA, 19 nt, Homo sapiens
  misc_RNA (1)...(19): siRNA sense strand
caaaguacuccugguguau

SEQ ID NO: 1161042 - RNA, 19 nt, Homo sapiens
  misc_RNA (1)...(19): siRNA sense strand
gaagaaguggcaaagaaac

SEQ ID NO: 1161043 - RNA, 19 nt, Homo sapiens
  misc_RNA (1)...(19): siRNA sense strand
gauaugggaaauacuaaag

SEQ ID NO: 1161044 - RNA, 19 nt, Homo sapiens
  misc_RNA (1)...(19): siRNA sense strand
uggagccucucacagauga

SEQ ID NO: 1161045 - RNA, 19 nt, Homo sapiens
  misc_RNA (1)...(19): siRNA sense strand
ggccuuauaggaaauguga

SEQ ID NO: 1161046 - RNA, 19 nt, Homo sapiens
  misc_RNA (1)...(19): siRNA sense strand
aaguacuccugguguauuu

SEQ ID NO: 1161047 - RNA, 19 nt, Homo sapiens
  misc_RNA (1)...(19): siRNA sense strand
ggaggaauggugggacaaa

SEQ ID NO: 1161048 - RNA, 19 nt, Homo sapiens
  misc_RNA (1)...(19): siRNA sense strand
uuucagggcuuuccaucga

SEQ ID NO: 1161049 - RNA, 19 nt, Homo sapiens
  misc_RNA (1)...(19): siRNA sense strand
gacuccaucuuaucucugu

SEQ ID NO: 1161050 - RNA, 19 nt, Homo sapiens
  misc_RNA (1)...(19): siRNA sense strand
caguggagccucucacaga

SEQ ID NO: 1161051 - RNA, 19 nt, Homo sapiens
  misc_RNA (1)...(19): siRNA sense strand
uaugggaaaugcacaaacu

SEQ ID NO: 1161052 - RNA, 19 nt, Homo sapiens
  misc_RNA (1)...(19): siRNA sense strand
aaaaguaccagcccuaaaa

SEQ ID NO: 1161053 - RNA, 19 nt, Homo sapiens
  misc_RNA (1)...(19): siRNA sense strand
ggaagcucaucaggucaga

SEQ ID NO: 1161054 - RNA, 19 nt, Homo sapiens
  misc_RNA (1)...(19): siRNA sense strand
ugaugccacuuccucagaa

SEQ ID NO: 1161055 - RNA, 19 nt, Homo sapiens
  misc_RNA (1)...(19): siRNA sense strand
ggacagcagaacagauaca

SEQ ID NO: 1161056 - RNA, 19 nt, Homo sapiens
  misc_RNA (1)...(19): siRNA sense strand
acagcaggauggucuggaa

SEQ ID NO: 1161057 - RNA, 19 nt, Homo sapiens
  misc_RNA (1)...(19): siRNA sense strand
acagaugaaucagcagaug

SEQ ID NO: 1161058 - RNA, 19 nt, Homo sapiens
  misc_RNA (1)...(19): siRNA sense strand
aaagcaagacuacucuaug

SEQ ID NO: 1161059 - RNA, 19 nt, Homo sapiens
  misc_RNA (1)...(19): siRNA sense strand
uaugggaaauacuaaagca

SEQ ID NO: 1161060 - RNA, 19 nt, Homo sapiens
  misc_RNA (1)...(19): siRNA sense strand
uauccagggucaaaucagu

SEQ ID NO: 1161061 - RNA, 19 nt, Homo sapiens
  misc_RNA (1)...(19): siRNA sense strand
guacuccugguguauuuau

SEQ ID NO: 1161062 - RNA, 19 nt, Homo sapiens
  misc_RNA (1)...(19): siRNA sense strand
gaaauacuaaagcaagacu

SEQ ID NO: 1161063 - RNA, 19 nt, Homo sapiens
  misc_RNA (1)...(19): siRNA sense strand
ucauauauccagggucaaa

SEQ ID NO: 1161064 - RNA, 19 nt, Homo sapiens
  misc_RNA (1)...(19): siRNA sense strand
ggaggaggacaacaaguac

SEQ ID NO: 1161065 - RNA, 19 nt, Homo sapiens
  misc_RNA (1)...(19): siRNA sense strand
cagucaaccuagaccaaug

SEQ ID NO: 1161066 - RNA, 19 nt, Homo sapiens
  misc_RNA (1)...(19): siRNA sense strand
ugagggaggaggacaacaa

SEQ ID NO: 1161067 - RNA, 19 nt, Homo sapiens
  misc_RNA (1)...(19): siRNA sense strand
gcaugcaagauaugggaaa

SEQ ID NO: 1161068 - RNA, 19 nt, Homo sapiens
  misc_RNA (1)...(19): siRNA sense strand
agaucaagcaguggaauuu

SEQ ID NO: 1161069 - RNA, 19 nt, Homo sapiens
  misc_RNA (1)...(19): siRNA sense strand
gcuggcaugaguaucagua

SEQ ID NO: 1161070 - RNA, 19 nt, Homo sapiens
  misc_RNA (1)...(19): siRNA sense strand
gggagaaggcucagaagcu

SEQ ID NO: 1161071 - RNA, 19 nt, Homo sapiens
  misc_RNA (1)...(19): siRNA sense strand
ugcaagauaugggaaauac

SEQ ID NO: 1161072 - RNA, 19 nt, Homo sapiens
  misc_RNA (1)...(19): siRNA sense strand
ggaaccauucaacagcaaa

SEQ ID NO: 1161073 - RNA, 19 nt, Homo sapiens
  misc_RNA (1)...(19): siRNA sense strand
auggacagcagaacagaua

SEQ ID NO: 1161074 - RNA, 19 nt, Homo sapiens
  misc_RNA (1)...(19): siRNA sense strand
aaaguacuccugguguauu

SEQ ID NO: 1161075 - RNA, 19 nt, Homo sapiens
  misc_RNA (1)...(19): siRNA sense strand
ugagcaaacuacaaaauca

SEQ ID NO: 1161076 - RNA, 19 nt, Homo sapiens
  misc_RNA (1)...(19): siRNA sense strand
cagaucaagcaguggaauu

SEQ ID NO: 1161077 - RNA, 19 nt, Homo sapiens
  misc_RNA (1)...(19): siRNA sense strand
caugcaagauaugggaaau

SEQ ID NO: 1161078 - RNA, 19 nt, Homo sapiens
  misc_RNA (1)...(19): siRNA sense strand
ggcaugaguaucaguagug

SEQ ID NO: 1161079 - RNA, 19 nt, Homo sapiens
  misc_RNA (1)...(19): siRNA sense strand
uggaauauugguguguuua

SEQ ID NO: 1161080 - RNA, 19 nt, Homo sapiens
  misc_RNA (1)...(19): siRNA sense strand
cuggaauauugguguguuu

SEQ ID NO: 1161081 - RNA, 19 nt, Homo sapiens
  misc_RNA (1)...(19): siRNA sense strand
gcagcaccagcucauccua

SEQ ID NO: 1161082 - RNA, 19 nt, Homo sapiens
  misc_RNA (1)...(19): siRNA sense strand
guguuuauuugcaucagau

SEQ ID NO: 1161083 - RNA, 19 nt, Homo sapiens
  misc_RNA (1)...(19): siRNA sense strand
acagauacagugcaugcaa

SEQ ID NO: 1161084 - RNA, 19 nt, Homo sapiens
  misc_RNA (1)...(19): siRNA sense strand
ugcagcuccuggccuuaua

SEQ ID NO: 1161085 - RNA, 19 nt, Homo sapiens
  misc_RNA (1)...(19): siRNA sense strand
cacaagcaccagcugcauu

SEQ ID NO: 1161086 - RNA, 19 nt, Homo sapiens
  misc_RNA (1)...(19): siRNA sense strand
gaaccauucaacagcaaag

SEQ ID NO: 1161087 - RNA, 19 nt, Homo sapiens
  misc_RNA (1)...(19): siRNA sense strand
aucagcaacuggagccuaa

SEQ ID NO: 1161088 - RNA, 19 nt, Homo sapiens
  misc_RNA (1)...(19): siRNA sense strand
ccuggaauauugguguguu

SEQ ID NO: 1161089 - RNA, 19 nt, Homo sapiens
  misc_RNA (1)...(19): siRNA sense strand
gcuggaauucauagaaauc

SEQ ID NO: 1161090 - RNA, 19 nt, Homo sapiens
  misc_RNA (1)...(19): siRNA sense strand
gaaaagcugcagaagaaag

SEQ ID NO: 1161091 - RNA, 19 nt, Homo sapiens
  misc_RNA (1)...(19): siRNA sense strand
gcaggauggucuggaagcu

SEQ ID NO: 1161092 - RNA, 19 nt, Homo sapiens
  misc_RNA (1)...(19): siRNA sense strand
gugaugccacuuccucaga

SEQ ID NO: 1161093 - RNA, 19 nt, Homo sapiens
  misc_RNA (1)...(19): siRNA sense strand
caaaucagucaaccuagac

SEQ ID NO: 1161094 - RNA, 19 nt, Homo sapiens
  misc_RNA (1)...(19): siRNA sense strand
aaucagaagaaguggcaaa

SEQ ID NO: 1161095 - RNA, 19 nt, Homo sapiens
  misc_RNA (1)...(19): siRNA sense strand
ucaagcacauggcggauua

SEQ ID NO: 1161096 - RNA, 19 nt, Homo sapiens
  misc_RNA (1)...(19): siRNA sense strand
gcacgucgcacuucgaguu

SEQ ID NO: 1161097 - RNA, 19 nt, Homo sapiens
  misc_RNA (1)...(19): siRNA sense strand
acgaggagcugcuggaagu

SEQ ID NO: 1161098 - RNA, 19 nt, Homo sapiens
  misc_RNA (1)...(19): siRNA sense strand
cggauuacccggacuacaa

SEQ ID NO: 1161099 - RNA, 19 nt, Homo sapiens
  misc_RNA (1)...(19): siRNA sense strand
uagcaucgcagaccugguu

SEQ ID NO: 1161100 - RNA, 19 nt, Homo sapiens
  misc_RNA (1)...(19): siRNA sense strand
agaggccgaugaacgcauu

SEQ ID NO: 1161101 - RNA, 19 nt, Homo sapiens
  misc_RNA (1)...(19): siRNA sense strand
ggaggagucgcugggcuuu

SEQ ID NO: 1161102 - RNA, 19 nt, Homo sapiens
  misc_RNA (1)...(19): siRNA sense strand
acgaggagccggaggaaga

SEQ ID NO: 1161103 - RNA, 19 nt, Homo sapiens
  misc_RNA (1)...(19): siRNA sense strand
cugcaggacucggagaaga

SEQ ID NO: 1161104 - RNA, 19 nt, Homo sapiens
  misc_RNA (1)...(19): siRNA sense strand
cggagaagaucccguucgu

SEQ ID NO: 1161105 - RNA, 19 nt, Homo sapiens
  misc_RNA (1)...(19): siRNA sense strand
ggauuacccggacuacaag

SEQ ID NO: 1161106 - RNA, 19 nt, Homo sapiens
  misc_RNA (1)...(19): siRNA sense strand
gcacgaacggcggaagauc

SEQ ID NO: 1161107 - RNA, 19 nt, Homo sapiens
  misc_RNA (1)...(19): siRNA sense strand
gcccgaggacgacgaugaa

SEQ ID NO: 1161108 - RNA, 19 nt, Homo sapiens
  misc_RNA (1)...(19): siRNA sense strand
gcaggacucggagaagauc

SEQ ID NO: 1161109 - RNA, 19 nt, Homo sapiens
  misc_RNA (1)...(19): siRNA sense strand
caagagagcccaucugcua

SEQ ID NO: 1161110 - RNA, 19 nt, Homo sapiens
  misc_RNA (1)...(19): siRNA sense strand
gaagguggcugaguugguu

SEQ ID NO: 1161111 - RNA, 19 nt, Homo sapiens
  misc_RNA (1)...(19): siRNA sense strand
ccacaaauaucgagucaag

SEQ ID NO: 1161112 - RNA, 19 nt, Homo sapiens
  misc_RNA (1)...(19): siRNA sense strand
ucaaggagccggucacaaa

SEQ ID NO: 1161113 - RNA, 19 nt, Homo sapiens
  misc_RNA (1)...(19): siRNA sense strand
ggaagcugcucacccaaga

SEQ ID NO: 1161114 - RNA, 19 nt, Homo sapiens
  misc_RNA (1)...(19): siRNA sense strand
aagaagcacugaaauugaa

SEQ ID NO: 1161115 - RNA, 19 nt, Homo sapiens
  misc_RNA (1)...(19): siRNA sense strand
ccaagaagcacugaaauug

SEQ ID NO: 1161116 - RNA, 19 nt, Homo sapiens
  misc_RNA (1)...(19): siRNA sense strand
caagaagcacugaaauuga

SEQ ID NO: 1161117 - RNA, 19 nt, Homo sapiens
  misc_RNA (1)...(19): siRNA sense strand
uggcugaguugguucauuu

SEQ ID NO: 1161118 - RNA, 19 nt, Homo sapiens
  misc_RNA (1)...(19): siRNA sense strand
cggcaaagccuccgaguuc

SEQ ID NO: 1161119 - RNA, 19 nt, Homo sapiens
  misc_RNA (1)...(19): siRNA sense strand
ggagcaagagggagucuga

SEQ ID NO: 1161120 - RNA, 19 nt, Homo sapiens
  misc_RNA (1)...(19): siRNA sense strand
acaaauaucgagucaagga

SEQ ID NO: 1161121 - RNA, 19 nt, Homo sapiens
  misc_RNA (1)...(19): siRNA sense strand
gcacugcaagccugaugaa

SEQ ID NO: 1161122 - RNA, 19 nt, Homo sapiens
  misc_RNA (1)...(19): siRNA sense strand
ggucacaaaggcagaaaug

SEQ ID NO: 1161123 - RNA, 19 nt, Homo sapiens
  misc_RNA (1)...(19): siRNA sense strand
acccaucccuuuaugaaga

SEQ ID NO: 1161124 - RNA, 19 nt, Homo sapiens
  misc_RNA (1)...(19): siRNA sense strand
ggaguucauguuccaagaa

SEQ ID NO: 1161125 - RNA, 19 nt, Homo sapiens
  misc_RNA (1)...(19): siRNA sense strand
ggugugauccuaaccaaag

SEQ ID NO: 1161126 - RNA, 19 nt, Homo sapiens
  misc_RNA (1)...(19): siRNA sense strand
aauugaagguggcugaguu

SEQ ID NO: 1161127 - RNA, 19 nt, Homo sapiens
  misc_RNA (1)...(19): siRNA sense strand
gaguucauguuccaagaag

SEQ ID NO: 1161128 - RNA, 19 nt, Homo sapiens
  misc_RNA (1)...(19): siRNA sense strand
ugggaagcguugaguguga

SEQ ID NO: 1161129 - RNA, 19 nt, Homo sapiens
  misc_RNA (1)...(19): siRNA sense strand
caagauugggugcaggaaa

SEQ ID NO: 1161130 - RNA, 19 nt, Homo sapiens
  misc_RNA (1)...(19): siRNA sense strand
gcgcuacuuuccugugauc

SEQ ID NO: 1161131 - RNA, 19 nt, Homo sapiens
  misc_RNA (1)...(19): siRNA sense strand
ggcaaagccuccgaguuca

SEQ ID NO: 1161132 - RNA, 19 nt, Homo sapiens
  misc_RNA (1)...(19): siRNA sense strand
guuccaagaagcacugaaa

SEQ ID NO: 1161133 - RNA, 19 nt, Homo sapiens
  misc_RNA (1)...(19): siRNA sense strand
cuacuuuccugugaucuuc

SEQ ID NO: 1161134 - RNA, 19 nt, Homo sapiens
  misc_RNA (1)...(19): siRNA sense strand
gcugcugggucaucaaguc

SEQ ID NO: 1161135 - RNA, 19 nt, Homo sapiens
  misc_RNA (1)...(19): siRNA sense strand
ggcgcuuccuccuccauuu

SEQ ID NO: 1161136 - RNA, 19 nt, Homo sapiens
  misc_RNA (1)...(19): siRNA sense strand
gcuggagagcgucaucaaa

SEQ ID NO: 1161137 - RNA, 19 nt, Homo sapiens
  misc_RNA (1)...(19): siRNA sense strand
cuacccaucccuuuaugaa

SEQ ID NO: 1161138 - RNA, 19 nt, Homo sapiens
  misc_RNA (1)...(19): siRNA sense strand
ucaugcaggugaucuuugg

SEQ ID NO: 1161139 - RNA, 19 nt, Homo sapiens
  misc_RNA (1)...(19): siRNA sense strand
gcaaagccuccgaguucau

SEQ ID NO: 1161140 - RNA, 19 nt, Homo sapiens
  misc_RNA (1)...(19): siRNA sense strand
aagcgcuacuuuccuguga

SEQ ID NO: 1161141 - RNA, 19 nt, Homo sapiens
  misc_RNA (1)...(19): siRNA sense strand
caaagccuccgaguucaug

SEQ ID NO: 1161142 - RNA, 19 nt, Homo sapiens
  misc_RNA (1)...(19): siRNA sense strand
gauccuaaccaaagacaac

SEQ ID NO: 1161143 - RNA, 19 nt, Homo sapiens
  misc_RNA (1)...(19): siRNA sense strand
uccaagaagcacugaaauu

SEQ ID NO: 1161144 - RNA, 19 nt, Homo sapiens
  misc_RNA (1)...(19): siRNA sense strand
aaauuacaagcgcuacuuu

SEQ ID NO: 1161145 - RNA, 19 nt, Homo sapiens
  misc_RNA (1)...(19): siRNA sense strand
ggugaucuuuggcacugau

SEQ ID NO: 1161146 - RNA, 19 nt, Homo sapiens
  misc_RNA (1)...(19): siRNA sense strand
gggaagcguugagugugau

SEQ ID NO: 1161147 - RNA, 19 nt, Homo sapiens
  misc_RNA (1)...(19): siRNA sense strand
gcagucaagaagaggaaga

SEQ ID NO: 1161148 - RNA, 19 nt, Homo sapiens
  misc_RNA (1)...(19): siRNA sense strand
caagccugaugaagaccuu

SEQ ID NO: 1161149 - RNA, 19 nt, Homo sapiens
  misc_RNA (1)...(19): siRNA sense strand
cugcaagccugaugaagac

SEQ ID NO: 1161150 - RNA, 19 nt, Homo sapiens
  misc_RNA (1)...(19): siRNA sense strand
gcgaggaggaggagacuac

SEQ ID NO: 1161151 - RNA, 19 nt, Homo sapiens
  misc_RNA (1)...(19): siRNA sense strand
gauagcaugcugggugaug

SEQ ID NO: 1161152 - RNA, 19 nt, Homo sapiens
  misc_RNA (1)...(19): siRNA sense strand
cuuggccucucgugcgaua

SEQ ID NO: 1161153 - RNA, 19 nt, Homo sapiens
  misc_RNA (1)...(19): siRNA sense strand
guucaugcaggugaucuuu

SEQ ID NO: 1161154 - RNA, 19 nt, Homo sapiens
  misc_RNA (1)...(19): siRNA sense strand
gagaggacuugggccugau

SEQ ID NO: 1161155 - RNA, 19 nt, Homo sapiens
  misc_RNA (1)...(19): siRNA sense strand
caaggagccggucacaaag

SEQ ID NO: 1161156 - RNA, 19 nt, Homo sapiens
  misc_RNA (1)...(19): siRNA sense strand
ggucaugcucaaugcaaga

SEQ ID NO: 1161157 - RNA, 19 nt, Homo sapiens
  misc_RNA (1)...(19): siRNA sense strand
ccugugaucuucggcaaag

SEQ ID NO: 1161158 - RNA, 19 nt, Homo sapiens
  misc_RNA (1)...(19): siRNA sense strand
ucacaaaggcagaaaugcu

SEQ ID NO: 1161159 - RNA, 19 nt, Homo sapiens
  misc_RNA (1)...(19): siRNA sense strand
gugugauccuaaccaaaga

SEQ ID NO: 1161160 - RNA, 19 nt, Homo sapiens
  misc_RNA (1)...(19): siRNA sense strand
ccuccuccauuuccgucua

SEQ ID NO: 1161161 - RNA, 19 nt, Homo sapiens
  misc_RNA (1)...(19): siRNA sense strand
ucugcuacccaucccuuua

SEQ ID NO: 1161162 - RNA, 19 nt, Homo sapiens
  misc_RNA (1)...(19): siRNA sense strand
aagauugggugcaggaaaa

SEQ ID NO: 1161163 - RNA, 19 nt, Homo sapiens
  misc_RNA (1)...(19): siRNA sense strand
aagcugcucacccaagauu

SEQ ID NO: 1161164 - RNA, 19 nt, Homo sapiens
  misc_RNA (1)...(19): siRNA sense strand
gaucuuuggcacugaugug

SEQ ID NO: 1161165 - RNA, 19 nt, Homo sapiens
  misc_RNA (1)...(19): siRNA sense strand
ugaaaccagcuaugagaag

SEQ ID NO: 1161166 - RNA, 19 nt, Homo sapiens
  misc_RNA (1)...(19): siRNA sense strand
gaagaggaagagccaagcu

SEQ ID NO: 1161167 - RNA, 19 nt, Homo sapiens
  misc_RNA (1)...(19): siRNA sense strand
agacuaccuccuccucuga

SEQ ID NO: 1161168 - RNA, 19 nt, Homo sapiens
  misc_RNA (1)...(19): siRNA sense strand
gaagaaacaacaggaauua

SEQ ID NO: 1161169 - RNA, 19 nt, Homo sapiens
  misc_RNA (1)...(19): siRNA sense strand
gaagacauccugguuguua

SEQ ID NO: 1161170 - RNA, 19 nt, Homo sapiens
  misc_RNA (1)...(19): siRNA sense strand
gacaagaucuucccagcua

SEQ ID NO: 1161171 - RNA, 19 nt, Homo sapiens
  misc_RNA (1)...(19): siRNA sense strand
gaaaugcccuaucugcaaa

SEQ ID NO: 1161172 - RNA, 19 nt, Homo sapiens
  misc_RNA (1)...(19): siRNA sense strand
gaaugaaacuacugcaaug

SEQ ID NO: 1161173 - RNA, 19 nt, Homo sapiens
  misc_RNA (1)...(19): siRNA sense strand
gaagacaacccgugaguau

SEQ ID NO: 1161174 - RNA, 19 nt, Homo sapiens
  misc_RNA (1)...(19): siRNA sense strand
cagaagauguccucagaaa

SEQ ID NO: 1161175 - RNA, 19 nt, Homo sapiens
  misc_RNA (1)...(19): siRNA sense strand
ccaaggaugaugaguauua

SEQ ID NO: 1161176 - RNA, 19 nt, Homo sapiens
  misc_RNA (1)...(19): siRNA sense strand
ggaaacccauauucuggua

SEQ ID NO: 1161177 - RNA, 19 nt, Homo sapiens
  misc_RNA (1)...(19): siRNA sense strand
agacaacccgugaguauua

SEQ ID NO: 1161178 - RNA, 19 nt, Homo sapiens
  misc_RNA (1)...(19): siRNA sense strand
gaaggaggcgcaagacaaa

SEQ ID NO: 1161179 - RNA, 19 nt, Homo sapiens
  misc_RNA (1)...(19): siRNA sense strand
cuacagagcaucaauaaga

SEQ ID NO: 1161180 - RNA, 19 nt, Homo sapiens
  misc_RNA (1)...(19): siRNA sense strand
gaaacaacaggaauuaaug

SEQ ID NO: 1161181 - RNA, 19 nt, Homo sapiens
  misc_RNA (1)...(19): siRNA sense strand
gcugucaacucaagagaaa

SEQ ID NO: 1161182 - RNA, 19 nt, Homo sapiens
  misc_RNA (1)...(19): siRNA sense strand
gacgucacaugucauuaua

SEQ ID NO: 1161183 - RNA, 19 nt, Homo sapiens
  misc_RNA (1)...(19): siRNA sense strand
gcaggaaguccaauucaaa

SEQ ID NO: 1161184 - RNA, 19 nt, Homo sapiens
  misc_RNA (1)...(19): siRNA sense strand
gcccaaggaugaugaguau

SEQ ID NO: 1161185 - RNA, 19 nt, Homo sapiens
  misc_RNA (1)...(19): siRNA sense strand
agacagagcugcuucaacu

SEQ ID NO: 1161186 - RNA, 19 nt, Homo sapiens
  misc_RNA (1)...(19): siRNA sense strand
caaaugaagcagaaugaaa

SEQ ID NO: 1161187 - RNA, 19 nt, Homo sapiens
  misc_RNA (1)...(19): siRNA sense strand
ggauuggauuggcaucuuu

SEQ ID NO: 1161188 - RNA, 19 nt, Homo sapiens
  misc_RNA (1)...(19): siRNA sense strand
gaccaccucuuucucaguu

SEQ ID NO: 1161189 - RNA, 19 nt, Homo sapiens
  misc_RNA (1)...(19): siRNA sense strand
ugaaagaacagaaggacua

SEQ ID NO: 1161190 - RNA, 19 nt, Homo sapiens
  misc_RNA (1)...(19): siRNA sense strand
gaaguccaauucaaagcuu

SEQ ID NO: 1161191 - RNA, 19 nt, Homo sapiens
  misc_RNA (1)...(19): siRNA sense strand
ggacgucacaugucauuau

SEQ ID NO: 1161192 - RNA, 19 nt, Homo sapiens
  misc_RNA (1)...(19): siRNA sense strand
ucucucaggucaucuuuaa

SEQ ID NO: 1161193 - RNA, 19 nt, Homo sapiens
  misc_RNA (1)...(19): siRNA sense strand
caacaaggagcuuugcaaa

SEQ ID NO: 1161194 - RNA, 19 nt, Homo sapiens
  misc_RNA (1)...(19): siRNA sense strand
cagagaagcagaucuuuga

SEQ ID NO: 1161195 - RNA, 19 nt, Homo sapiens
  misc_RNA (1)...(19): siRNA sense strand
gagcaucaauaagaaguug

SEQ ID NO: 1161196 - RNA, 19 nt, Homo sapiens
  misc_RNA (1)...(19): siRNA sense strand
ccaccucuuucucaguuua

SEQ ID NO: 1161197 - RNA, 19 nt, Homo sapiens
  misc_RNA (1)...(19): siRNA sense strand
gcagauugcucaguuacau

SEQ ID NO: 1161198 - RNA, 19 nt, Homo sapiens
  misc_RNA (1)...(19): siRNA sense strand
ccauugaccuaaacaacaa

SEQ ID NO: 1161199 - RNA, 19 nt, Homo sapiens
  misc_RNA (1)...(19): siRNA sense strand
caacaaaucagcuaaacag

SEQ ID NO: 1161200 - RNA, 19 nt, Homo sapiens
  misc_RNA (1)...(19): siRNA sense strand
gaacaaaaccagaagaugu

SEQ ID NO: 1161201 - RNA, 19 nt, Homo sapiens
  misc_RNA (1)...(19): siRNA sense strand
ucagggagaucaagauaag

SEQ ID NO: 1161202 - RNA, 19 nt, Homo sapiens
  misc_RNA (1)...(19): siRNA sense strand
caaguauuccuuuccaauu

SEQ ID NO: 1161203 - RNA, 19 nt, Homo sapiens
  misc_RNA (1)...(19): siRNA sense strand
gaacugaaagugaaagaac

SEQ ID NO: 1161204 - RNA, 19 nt, Homo sapiens
  misc_RNA (1)...(19): siRNA sense strand
gagcaaguauuccuuucca

SEQ ID NO: 1161205 - RNA, 19 nt, Homo sapiens
  misc_RNA (1)...(19): siRNA sense strand
gaaacuacugcaaugaaga

SEQ ID NO: 1161206 - RNA, 19 nt, Homo sapiens
  misc_RNA (1)...(19): siRNA sense strand
gcaaguauuccuuuccaau

SEQ ID NO: 1161207 - RNA, 19 nt, Homo sapiens
  misc_RNA (1)...(19): siRNA sense strand
gagugagaacgaaauuaua

SEQ ID NO: 1161208 - RNA, 19 nt, Homo sapiens
  misc_RNA (1)...(19): siRNA sense strand
cuacugcaaugaagaaaca

SEQ ID NO: 1161209 - RNA, 19 nt, Homo sapiens
  misc_RNA (1)...(19): siRNA sense strand
gaagauguccucagaaaau

SEQ ID NO: 1161210 - RNA, 19 nt, Homo sapiens
  misc_RNA (1)...(19): siRNA sense strand
gaaggacuauugggagaca

SEQ ID NO: 1161211 - RNA, 19 nt, Homo sapiens
  misc_RNA (1)...(19): siRNA sense strand
agaaagaaauggagaagcu

SEQ ID NO: 1161212 - RNA, 19 nt, Homo sapiens
  misc_RNA (1)...(19): siRNA sense strand
gcaguuagagcagcugaaa

SEQ ID NO: 1161213 - RNA, 19 nt, Homo sapiens
  misc_RNA (1)...(19): siRNA sense strand
gaaagugaaagaacagaag

SEQ ID NO: 1161214 - RNA, 19 nt, Homo sapiens
  misc_RNA (1)...(19): siRNA sense strand
gaggagaccaucaaagauc

SEQ ID NO: 1161215 - RNA, 19 nt, Homo sapiens
  misc_RNA (1)...(19): siRNA sense strand
ugaagaaacaacaggaauu

SEQ ID NO: 1161216 - RNA, 19 nt, Homo sapiens
  misc_RNA (1)...(19): siRNA sense strand
gaaagaacagaaggacuau

SEQ ID NO: 1161217 - RNA, 19 nt, Homo sapiens
  misc_RNA (1)...(19): siRNA sense strand
ggauuggcaucuuuagagu

SEQ ID NO: 1161218 - RNA, 19 nt, Homo sapiens
  misc_RNA (1)...(19): siRNA sense strand
ggaagacaacccgugagua

SEQ ID NO: 1161219 - RNA, 19 nt, Homo sapiens
  misc_RNA (1)...(19): siRNA sense strand
uacagagcaucaauaagaa

SEQ ID NO: 1161220 - RNA, 19 nt, Homo sapiens
  misc_RNA (1)...(19): siRNA sense strand
gcagagacagaaagagaga

SEQ ID NO: 1161221 - RNA, 19 nt, Homo sapiens
  misc_RNA (1)...(19): siRNA sense strand
gaaauggagaagcuuguuc

SEQ ID NO: 1161222 - RNA, 19 nt, Homo sapiens
  misc_RNA (1)...(19): siRNA sense strand
gcaaaugaagcagaaugaa

SEQ ID NO: 1161223 - RNA, 19 nt, Homo sapiens
  misc_RNA (1)...(19): siRNA sense strand
gagcaaaugaagcagaaug

SEQ ID NO: 1161224 - RNA, 19 nt, Homo sapiens
  misc_RNA (1)...(19): siRNA sense strand
ggaaaaugaccaccucuuu

SEQ ID NO: 1161225 - RNA, 19 nt, Homo sapiens
  misc_RNA (1)...(19): siRNA sense strand
uuaauucuuugccguauca

SEQ ID NO: 1161226 - RNA, 19 nt, Homo sapiens
  misc_RNA (1)...(19): siRNA sense strand
ugagugagaacgaaauuau

SEQ ID NO: 1161227 - RNA, 19 nt, Homo sapiens
  misc_RNA (1)...(19): siRNA sense strand
gaagcagaacucagacaug

SEQ ID NO: 1161228 - RNA, 19 nt, Homo sapiens
  misc_RNA (1)...(19): siRNA sense strand
ucacaugucauuauaccuu

SEQ ID NO: 1161229 - RNA, 19 nt, Homo sapiens
  misc_RNA (1)...(19): siRNA sense strand
ugaaacuacugcaaugaag

SEQ ID NO: 1161230 - RNA, 19 nt, Homo sapiens
  misc_RNA (1)...(19): siRNA sense strand
ggaaggaccagaagaagcu

SEQ ID NO: 1161231 - RNA, 19 nt, Homo sapiens
  misc_RNA (1)...(19): siRNA sense strand
guucagggagaucaagaua

SEQ ID NO: 1161232 - RNA, 19 nt, Homo sapiens
  misc_RNA (1)...(19): siRNA sense strand
aagaacagaaggacuauug

SEQ ID NO: 1161233 - RNA, 19 nt, Homo sapiens
  misc_RNA (1)...(19): siRNA sense strand
gaaagagagauuggaagga

SEQ ID NO: 1161234 - RNA, 19 nt, Homo sapiens
  misc_RNA (1)...(19): siRNA sense strand
ggaggagaccaucaaagau

SEQ ID NO: 1161235 - RNA, 19 nt, Homo sapiens
  misc_RNA (1)...(19): siRNA sense strand
gaagcagaaugaaacuacu

SEQ ID NO: 1161236 - RNA, 19 nt, Homo sapiens
  misc_RNA (1)...(19): siRNA sense strand
caacucaagagaaagaaau

SEQ ID NO: 1161237 - RNA, 19 nt, Homo sapiens
  misc_RNA (1)...(19): siRNA sense strand
uuaacaguguggagaaguu

SEQ ID NO: 1161238 - RNA, 19 nt, Homo sapiens
  misc_RNA (1)...(19): siRNA sense strand
aagcagaugauauuuguga

SEQ ID NO: 1161239 - RNA, 19 nt, Homo sapiens
  misc_RNA (1)...(19): siRNA sense strand
gauuggauuggcaucuuua

SEQ ID NO: 1161240 - RNA, 19 nt, Homo sapiens
  misc_RNA (1)...(19): siRNA sense strand
agaaaugcccuaucugcaa

SEQ ID NO: 1161241 - RNA, 19 nt, Homo sapiens
  misc_RNA (1)...(19): siRNA sense strand
ugaaggaggcgcaagacaa

SEQ ID NO: 1161242 - RNA, 19 nt, Homo sapiens
  misc_RNA (1)...(19): siRNA sense strand
uaacugaacagaggaagga

SEQ ID NO: 1161243 - RNA, 19 nt, Homo sapiens
  misc_RNA (1)...(19): siRNA sense strand
gagaucaagauaagacaga

SEQ ID NO: 1161244 - RNA, 19 nt, Homo sapiens
  misc_RNA (1)...(19): siRNA sense strand
cuaaacaacaaaucagcua

SEQ ID NO: 1161245 - RNA, 19 nt, Homo sapiens
  misc_RNA (1)...(19): siRNA sense strand
cuacagagaagcagaucuu

SEQ ID NO: 1161246 - RNA, 19 nt, Homo sapiens
  misc_RNA (1)...(19): siRNA sense strand
gaaagaaauggagaagcuu

SEQ ID NO: 1161247 - RNA, 19 nt, Homo sapiens
  misc_RNA (1)...(19): siRNA sense strand
aaacuacugcaaugaagaa

SEQ ID NO: 1161248 - RNA, 19 nt, Homo sapiens
  misc_RNA (1)...(19): siRNA sense strand
ugaugaguauuaccaguuc

SEQ ID NO: 1161249 - RNA, 19 nt, Homo sapiens
  misc_RNA (1)...(19): siRNA sense strand
aaguauuccuuuccaauuc

SEQ ID NO: 1161250 - RNA, 19 nt, Homo sapiens
  misc_RNA (1)...(19): siRNA sense strand
cuuacuaccugcccaagga

SEQ ID NO: 1161251 - RNA, 19 nt, Homo sapiens
  misc_RNA (1)...(19): siRNA sense strand
gagcagacaguggagcaaa

SEQ ID NO: 1161252 - RNA, 19 nt, Homo sapiens
  misc_RNA (1)...(19): siRNA sense strand
gggagcaaguauuccuuuc

SEQ ID NO: 1161253 - RNA, 19 nt, Homo sapiens
  misc_RNA (1)...(19): siRNA sense strand
accagaagauguccucaga

SEQ ID NO: 1161254 - RNA, 19 nt, Homo sapiens
  misc_RNA (1)...(19): siRNA sense strand
uggagcaaaugaagcagaa

SEQ ID NO: 1161255 - RNA, 19 nt, Homo sapiens
  misc_RNA (1)...(19): siRNA sense strand
gauaagacagagcaguuag

SEQ ID NO: 1161256 - RNA, 19 nt, Homo sapiens
  misc_RNA (1)...(19): siRNA sense strand
gcccagcugucaacucaag

SEQ ID NO: 1161257 - RNA, 19 nt, Homo sapiens
  misc_RNA (1)...(19): siRNA sense strand
ugaccuaaacaacaaauca

SEQ ID NO: 1161258 - RNA, 19 nt, Homo sapiens
  misc_RNA (1)...(19): siRNA sense strand
gagaagcagaucuuugaag

SEQ ID NO: 1161259 - RNA, 19 nt, Homo sapiens
  misc_RNA (1)...(19): siRNA sense strand
uagaaacccuacagagcau

SEQ ID NO: 1161260 - RNA, 19 nt, Homo sapiens
  misc_RNA (1)...(19): siRNA sense strand
gagcuagaaacccuacaga

SEQ ID NO: 1161261 - RNA, 19 nt, Homo sapiens
  misc_RNA (1)...(19): siRNA sense strand
ggaucacugucauuucucu

SEQ ID NO: 1161262 - RNA, 19 nt, Homo sapiens
  misc_RNA (1)...(19): siRNA sense strand
caaggaugaugaguauuac

SEQ ID NO: 1161263 - RNA, 19 nt, Homo sapiens
  misc_RNA (1)...(19): siRNA sense strand
agaggaaggaccagaagaa

SEQ ID NO: 1161264 - RNA, 19 nt, Homo sapiens
  misc_RNA (1)...(19): siRNA sense strand
gcagaugauauuugugauc

SEQ ID NO: 1161265 - RNA, 19 nt, Homo sapiens
  misc_RNA (1)...(19): siRNA sense strand
aaacccauauucugguauc

SEQ ID NO: 1161266 - RNA, 19 nt, Homo sapiens
  misc_RNA (1)...(19): siRNA sense strand
agaaugaaacuacugcaau

SEQ ID NO: 1161267 - RNA, 19 nt, Homo sapiens
  misc_RNA (1)...(19): siRNA sense strand
gcagacaguggagcaaaug

SEQ ID NO: 1161268 - RNA, 19 nt, Homo sapiens
  misc_RNA (1)...(19): siRNA sense strand
gaaguaugcuguucucuau

SEQ ID NO: 1161269 - RNA, 19 nt, Homo sapiens
  misc_RNA (1)...(19): siRNA sense strand
caaaugaagugcugacaaa

SEQ ID NO: 1161270 - RNA, 19 nt, Homo sapiens
  misc_RNA (1)...(19): siRNA sense strand
gagaagcuauugaagauga

SEQ ID NO: 1161271 - RNA, 19 nt, Homo sapiens
  misc_RNA (1)...(19): siRNA sense strand
gaaaccagaugaagaagau

SEQ ID NO: 1161272 - RNA, 19 nt, Homo sapiens
  misc_RNA (1)...(19): siRNA sense strand
ggaacacgaugaaccuauu

SEQ ID NO: 1161273 - RNA, 19 nt, Homo sapiens
  misc_RNA (1)...(19): siRNA sense strand
guggagaucuggaugauga

SEQ ID NO: 1161274 - RNA, 19 nt, Homo sapiens
  misc_RNA (1)...(19): siRNA sense strand
cugaagcacuugaaagaua

SEQ ID NO: 1161275 - RNA, 19 nt, Homo sapiens
  misc_RNA (1)...(19): siRNA sense strand
gaaaggaaguaugcuguuc

SEQ ID NO: 1161276 - RNA, 19 nt, Homo sapiens
  misc_RNA (1)...(19): siRNA sense strand
ggaaacuggugaagaaaca

SEQ ID NO: 1161277 - RNA, 19 nt, Homo sapiens
  misc_RNA (1)...(19): siRNA sense strand
agaggaaacuggugaagaa

SEQ ID NO: 1161278 - RNA, 19 nt, Homo sapiens
  misc_RNA (1)...(19): siRNA sense strand
uccaaugacucuuucuuua

SEQ ID NO: 1161279 - RNA, 19 nt, Homo sapiens
  misc_RNA (1)...(19): siRNA sense strand
caaauucuaugaggaaguu

SEQ ID NO: 1161280 - RNA, 19 nt, Homo sapiens
  misc_RNA (1)...(19): siRNA sense strand
acaaagacauacaggauga

SEQ ID NO: 1161281 - RNA, 19 nt, Homo sapiens
  misc_RNA (1)...(19): siRNA sense strand
ggaugauguugaagaagua

SEQ ID NO: 1161282 - RNA, 19 nt, Homo sapiens
  misc_RNA (1)...(19): siRNA sense strand
ggaaguaugcuguucucua

SEQ ID NO: 1161283 - RNA, 19 nt, Homo sapiens
  misc_RNA (1)...(19): siRNA sense strand
ccaaugacucuuucuuuaa

SEQ ID NO: 1161284 - RNA, 19 nt, Homo sapiens
  misc_RNA (1)...(19): siRNA sense strand
caaguuaaaugugcacaga

SEQ ID NO: 1161285 - RNA, 19 nt, Homo sapiens
  misc_RNA (1)...(19): siRNA sense strand
aaagugaaguucucagaug

SEQ ID NO: 1161286 - RNA, 19 nt, Homo sapiens
  misc_RNA (1)...(19): siRNA sense strand
ccaacaggauacauugaaa

SEQ ID NO: 1161287 - RNA, 19 nt, Homo sapiens
  misc_RNA (1)...(19): siRNA sense strand
ucagcuaacuguucagaug

SEQ ID NO: 1161288 - RNA, 19 nt, Homo sapiens
  misc_RNA (1)...(19): siRNA sense strand
ggaaaaugauccagacuau

SEQ ID NO: 1161289 - RNA, 19 nt, Homo sapiens
  misc_RNA (1)...(19): siRNA sense strand
ggucagaaccagaugauuc

SEQ ID NO: 1161290 - RNA, 19 nt, Homo sapiens
  misc_RNA (1)...(19): siRNA sense strand
ugaagaagcggaugaggaa

SEQ ID NO: 1161291 - RNA, 19 nt, Homo sapiens
  misc_RNA (1)...(19): siRNA sense strand
uggagaagcuauugaagau

SEQ ID NO: 1161292 - RNA, 19 nt, Homo sapiens
  misc_RNA (1)...(19): siRNA sense strand
caaagaacagucugaacuu

SEQ ID NO: 1161293 - RNA, 19 nt, Homo sapiens
  misc_RNA (1)...(19): siRNA sense strand
ugaagcacuugaaagauau

SEQ ID NO: 1161294 - RNA, 19 nt, Homo sapiens
  misc_RNA (1)...(19): siRNA sense strand
aguuaaaugugcacagaua

SEQ ID NO: 1161295 - RNA, 19 nt, Homo sapiens
  misc_RNA (1)...(19): siRNA sense strand
gaaauuauggguuguacag

SEQ ID NO: 1161296 - RNA, 19 nt, Homo sapiens
  misc_RNA (1)...(19): siRNA sense strand
aaagaacagucugaacuug

SEQ ID NO: 1161297 - RNA, 19 nt, Homo sapiens
  misc_RNA (1)...(19): siRNA sense strand
caacaaagaacagucugaa

SEQ ID NO: 1161298 - RNA, 19 nt, Homo sapiens
  misc_RNA (1)...(19): siRNA sense strand
caagauugaagaugagaaa

SEQ ID NO: 1161299 - RNA, 19 nt, Homo sapiens
  misc_RNA (1)...(19): siRNA sense strand
caaugacucuuucuuuaac

SEQ ID NO: 1161300 - RNA, 19 nt, Homo sapiens
  misc_RNA (1)...(19): siRNA sense strand
cuucgaaauuggucacuuu

SEQ ID NO: 1161301 - RNA, 19 nt, Homo sapiens
  misc_RNA (1)...(19): siRNA sense strand
uagaaacaccaacaggaua

SEQ ID NO: 1161302 - RNA, 19 nt, Homo sapiens
  misc_RNA (1)...(19): siRNA sense strand
caagggacgugggacaguu

SEQ ID NO: 1161303 - RNA, 19 nt, Homo sapiens
  misc_RNA (1)...(19): siRNA sense strand
acagauagaagccaaauuc

SEQ ID NO: 1161304 - RNA, 19 nt, Homo sapiens
  misc_RNA (1)...(19): siRNA sense strand
ucuaucagccucuauuuga

SEQ ID NO: 1161305 - RNA, 19 nt, Homo sapiens
  misc_RNA (1)...(19): siRNA sense strand
ggaagaagaaggagaugag

SEQ ID NO: 1161306 - RNA, 19 nt, Homo sapiens
  misc_RNA (1)...(19): siRNA sense strand
gcugcagacuucgaaauug

SEQ ID NO: 1161307 - RNA, 19 nt, Homo sapiens
  misc_RNA (1)...(19): siRNA sense strand
agaagaagcagaaacacaa

SEQ ID NO: 1161308 - RNA, 19 nt, Homo sapiens
  misc_RNA (1)...(19): siRNA sense strand
aggccaagauugaagauga

SEQ ID NO: 1161309 - RNA, 19 nt, Homo sapiens
  misc_RNA (1)...(19): siRNA sense strand
ggaaaccagaugaagaaga

SEQ ID NO: 1161310 - RNA, 19 nt, Homo sapiens
  misc_RNA (1)...(19): siRNA sense strand
guagaaacaccaacaggau

SEQ ID NO: 1161311 - RNA, 19 nt, Homo sapiens
  misc_RNA (1)...(19): siRNA sense strand
ugaagaugaugaugaugau

SEQ ID NO: 1161312 - RNA, 19 nt, Homo sapiens
  misc_RNA (1)...(19): siRNA sense strand
gaaagaaaaggccaagauu

SEQ ID NO: 1161313 - RNA, 19 nt, Homo sapiens
  misc_RNA (1)...(19): siRNA sense strand
ucggaggaauugaaagaaa

SEQ ID NO: 1161314 - RNA, 19 nt, Homo sapiens
  misc_RNA (1)...(19): siRNA sense strand
ggcagacauugacaacaaa

SEQ ID NO: 1161315 - RNA, 19 nt, Homo sapiens
  misc_RNA (1)...(19): siRNA sense strand
agauuuggaugauguugaa

SEQ ID NO: 1161316 - RNA, 19 nt, Homo sapiens
  misc_RNA (1)...(19): siRNA sense strand
ggacgugggacaguucgua

SEQ ID NO: 1161317 - RNA, 19 nt, Homo sapiens
  misc_RNA (1)...(19): siRNA sense strand
ugacaaagacauacaggau

SEQ ID NO: 1161318 - RNA, 19 nt, Homo sapiens
  misc_RNA (1)...(19): siRNA sense strand
cgaugaaccuauucugaag

SEQ ID NO: 1161319 - RNA, 19 nt, Homo sapiens
  misc_RNA (1)...(19): siRNA sense strand
gagcguauaaucccaagau

SEQ ID NO: 1161320 - RNA, 19 nt, Homo sapiens
  misc_RNA (1)...(19): siRNA sense strand
agaaguagaagaagaggaa

SEQ ID NO: 1161321 - RNA, 19 nt, Homo sapiens
  misc_RNA (1)...(19): siRNA sense strand
gaagaaggagaugaggaaa

SEQ ID NO: 1161322 - RNA, 19 nt, Homo sapiens
  misc_RNA (1)...(19): siRNA sense strand
gaugagauuucggaggaau

SEQ ID NO: 1161323 - RNA, 19 nt, Homo sapiens
  misc_RNA (1)...(19): siRNA sense strand
ugaagaagaugagauuucg

SEQ ID NO: 1161324 - RNA, 19 nt, Homo sapiens
  misc_RNA (1)...(19): siRNA sense strand
gaacacgaugaaccuauuc

SEQ ID NO: 1161325 - RNA, 19 nt, Homo sapiens
  misc_RNA (1)...(19): siRNA sense strand
uaaaugugcacagauagaa

SEQ ID NO: 1161326 - RNA, 19 nt, Homo sapiens
  misc_RNA (1)...(19): siRNA sense strand
agaacagucugaacuugau

SEQ ID NO: 1161327 - RNA, 19 nt, Homo sapiens
  misc_RNA (1)...(19): siRNA sense strand
guacagggugccagauaga

SEQ ID NO: 1161328 - RNA, 19 nt, Homo sapiens
  misc_RNA (1)...(19): siRNA sense strand
agaagaaggagaugaggaa

SEQ ID NO: 1161329 - RNA, 19 nt, Homo sapiens
  misc_RNA (1)...(19): siRNA sense strand
uugaagaaguagaagaaga

SEQ ID NO: 1161330 - RNA, 19 nt, Homo sapiens
  misc_RNA (1)...(19): siRNA sense strand
gcacagauagaagccaaau

SEQ ID NO: 1161331 - RNA, 19 nt, Homo sapiens
  misc_RNA (1)...(19): siRNA sense strand
uauccuugcugcagacuuc

SEQ ID NO: 1161332 - RNA, 19 nt, Homo sapiens
  misc_RNA (1)...(19): siRNA sense strand
gaguggagaucuggaugau

SEQ ID NO: 1161333 - RNA, 19 nt, Homo sapiens
  misc_RNA (1)...(19): siRNA sense strand
agaugauucugaucccuuu

SEQ ID NO: 1161334 - RNA, 19 nt, Homo sapiens
  misc_RNA (1)...(19): siRNA sense strand
uggaugauguugaagaagu

SEQ ID NO: 1161335 - RNA, 19 nt, Homo sapiens
  misc_RNA (1)...(19): siRNA sense strand
aguaugcuguucucuauca

SEQ ID NO: 1161336 - RNA, 19 nt, Homo sapiens
  misc_RNA (1)...(19): siRNA sense strand
aaaaugauccagacuauga

SEQ ID NO: 1161337 - RNA, 19 nt, Homo sapiens
  misc_RNA (1)...(19): siRNA sense strand
uuaagaagaagcagaaaca

SEQ ID NO: 1161338 - RNA, 19 nt, Homo sapiens
  misc_RNA (1)...(19): siRNA sense strand
acgagugaaugcucucaaa

SEQ ID NO: 1161339 - RNA, 19 nt, Homo sapiens
  misc_RNA (1)...(19): siRNA sense strand
ugaugaagaaggugaagaa

SEQ ID NO: 1161340 - RNA, 19 nt, Homo sapiens
  misc_RNA (1)...(19): siRNA sense strand
gaagaagcagaaacacaag

SEQ ID NO: 1161341 - RNA, 19 nt, Homo sapiens
  misc_RNA (1)...(19): siRNA sense strand
ggugccagauagauuggaa

SEQ ID NO: 1161342 - RNA, 19 nt, Homo sapiens
  misc_RNA (1)...(19): siRNA sense strand
uuugauggaccagaaauua

SEQ ID NO: 1161343 - RNA, 19 nt, Homo sapiens
  misc_RNA (1)...(19): siRNA sense strand
acuuugaacccaaugaaua

SEQ ID NO: 1161344 - RNA, 19 nt, Homo sapiens
  misc_RNA (1)...(19): siRNA sense strand
agacauugacaacaaagaa

SEQ ID NO: 1161345 - RNA, 19 nt, Homo sapiens
  misc_RNA (1)...(19): siRNA sense strand
gaugaggucagaaccagau

SEQ ID NO: 1161346 - RNA, 19 nt, Homo sapiens
  misc_RNA (1)...(19): siRNA sense strand
gaagaugaugaugaugauu

SEQ ID NO: 1161347 - RNA, 19 nt, Homo sapiens
  misc_RNA (1)...(19): siRNA sense strand
gccuaugaguuuugucuua

SEQ ID NO: 1161348 - RNA, 19 nt, Homo sapiens
  misc_RNA (1)...(19): siRNA sense strand
gaucuugaaaggaaguaug

SEQ ID NO: 1161349 - RNA, 19 nt, Homo sapiens
  misc_RNA (1)...(19): siRNA sense strand
cauacaggaugaggucaga

SEQ ID NO: 1161350 - RNA, 19 nt, Homo sapiens
  misc_RNA (1)...(19): siRNA sense strand
gaugaagaagaugagauuu

SEQ ID NO: 1161351 - RNA, 19 nt, Homo sapiens
  misc_RNA (1)...(19): siRNA sense strand
gugaauggaaaccagauga

SEQ ID NO: 1161352 - RNA, 19 nt, Homo sapiens
  misc_RNA (1)...(19): siRNA sense strand
caacaggauacauugaaag

SEQ ID NO: 1161353 - RNA, 19 nt, Homo sapiens
  misc_RNA (1)...(19): siRNA sense strand
ggaugaugaugcugaagcu

SEQ ID NO: 1161354 - RNA, 19 nt, Homo sapiens
  misc_RNA (1)...(19): siRNA sense strand
ccagaaauuauggguugua

SEQ ID NO: 1161355 - RNA, 19 nt, Homo sapiens
  misc_RNA (1)...(19): siRNA sense strand
gaggaaacuggugaagaaa

SEQ ID NO: 1161356 - RNA, 19 nt, Homo sapiens
  misc_RNA (1)...(19): siRNA sense strand
uuaagaauguugacuugcu

SEQ ID NO: 1161357 - RNA, 19 nt, Homo sapiens
  misc_RNA (1)...(19): siRNA sense strand
cagcuaacuguucagauga

SEQ ID NO: 1161358 - RNA, 19 nt, Homo sapiens
  misc_RNA (1)...(19): siRNA sense strand
agaugaagaagaugagauu

SEQ ID NO: 1161359 - RNA, 19 nt, Homo sapiens
  misc_RNA (1)...(19): siRNA sense strand
gaauggaaaccagaugaag

SEQ ID NO: 1161360 - RNA, 19 nt, Homo sapiens
  misc_RNA (1)...(19): siRNA sense strand
acaaagaacagucugaacu

SEQ ID NO: 1161361 - RNA, 19 nt, Homo sapiens
  misc_RNA (1)...(19): siRNA sense strand
aaacuggugaagaaacaaa

SEQ ID NO: 1161362 - RNA, 19 nt, Homo sapiens
  misc_RNA (1)...(19): siRNA sense strand
aagaacagucugaacuuga

SEQ ID NO: 1161363 - RNA, 19 nt, Homo sapiens
  misc_RNA (1)...(19): siRNA sense strand
ugauggaccagaaauuaug

SEQ ID NO: 1161364 - RNA, 19 nt, Homo sapiens
  misc_RNA (1)...(19): siRNA sense strand
uugcagcccuucaagaaag

SEQ ID NO: 1161365 - RNA, 19 nt, Homo sapiens
  misc_RNA (1)...(19): siRNA sense strand
gaagugcugacaaagacau

SEQ ID NO: 1161366 - RNA, 19 nt, Homo sapiens
  misc_RNA (1)...(19): siRNA sense strand
uaaagugaaguucucagau

SEQ ID NO: 1161367 - RNA, 19 nt, Homo sapiens
  misc_RNA (1)...(19): siRNA sense strand
gaagcacuugaaagauauu

SEQ ID NO: 1161368 - RNA, 19 nt, Homo sapiens
  misc_RNA (1)...(19): siRNA sense strand
gaaguaugcuguucucuau

SEQ ID NO: 1161369 - RNA, 19 nt, Homo sapiens
  misc_RNA (1)...(19): siRNA sense strand
caaaugaagugcugacaaa

SEQ ID NO: 1161370 - RNA, 19 nt, Homo sapiens
  misc_RNA (1)...(19): siRNA sense strand
gagaagcuauugaagauga

SEQ ID NO: 1161371 - RNA, 19 nt, Homo sapiens
  misc_RNA (1)...(19): siRNA sense strand
gaaaccagaugaagaagau

SEQ ID NO: 1161372 - RNA, 19 nt, Homo sapiens
  misc_RNA (1)...(19): siRNA sense strand
ggaacacgaugaaccuauu

SEQ ID NO: 1161373 - RNA, 19 nt, Homo sapiens
  misc_RNA (1)...(19): siRNA sense strand
guggagaucuggaugauga

SEQ ID NO: 1161374 - RNA, 19 nt, Homo sapiens
  misc_RNA (1)...(19): siRNA sense strand
cugaagcacuugaaagaua

SEQ ID NO: 1161375 - RNA, 19 nt, Homo sapiens
  misc_RNA (1)...(19): siRNA sense strand
gaaaggaaguaugcuguuc

SEQ ID NO: 1161376 - RNA, 19 nt, Homo sapiens
  misc_RNA (1)...(19): siRNA sense strand
ggaaacuggugaagaaaca

SEQ ID NO: 1161377 - RNA, 19 nt, Homo sapiens
  misc_RNA (1)...(19): siRNA sense strand
agaggaaacuggugaagaa

SEQ ID NO: 1161378 - RNA, 19 nt, Homo sapiens
  misc_RNA (1)...(19): siRNA sense strand
uccaaugacucuuucuuua

SEQ ID NO: 1161379 - RNA, 19 nt, Homo sapiens
  misc_RNA (1)...(19): siRNA sense strand
caaauucuaugaggaaguu

SEQ ID NO: 1161380 - RNA, 19 nt, Homo sapiens
  misc_RNA (1)...(19): siRNA sense strand
acaaagacauacaggauga

SEQ ID NO: 1161381 - RNA, 19 nt, Homo sapiens
  misc_RNA (1)...(19): siRNA sense strand
ggaugauguugaagaagua

SEQ ID NO: 1161382 - RNA, 19 nt, Homo sapiens
  misc_RNA (1)...(19): siRNA sense strand
ggaaguaugcuguucucua

SEQ ID NO: 1161383 - RNA, 19 nt, Homo sapiens
  misc_RNA (1)...(19): siRNA sense strand
ccaaugacucuuucuuuaa

SEQ ID NO: 1161384 - RNA, 19 nt, Homo sapiens
  misc_RNA (1)...(19): siRNA sense strand
caaguuaaaugugcacaga

SEQ ID NO: 1161385 - RNA, 19 nt, Homo sapiens
  misc_RNA (1)...(19): siRNA sense strand
aaagugaaguucucagaug

SEQ ID NO: 1161386 - RNA, 19 nt, Homo sapiens
  misc_RNA (1)...(19): siRNA sense strand
ccaacaggauacauugaaa

SEQ ID NO: 1161387 - RNA, 19 nt, Homo sapiens
  misc_RNA (1)...(19): siRNA sense strand
ucagcuaacuguucagaug

SEQ ID NO: 1161388 - RNA, 19 nt, Homo sapiens
  misc_RNA (1)...(19): siRNA sense strand
ggaaaaugauccagacuau

SEQ ID NO: 1161389 - RNA, 19 nt, Homo sapiens
  misc_RNA (1)...(19): siRNA sense strand
ggucagaaccagaugauuc

SEQ ID NO: 1161390 - RNA, 19 nt, Homo sapiens
  misc_RNA (1)...(19): siRNA sense strand
ugaagaagcggaugaggaa

SEQ ID NO: 1161391 - RNA, 19 nt, Homo sapiens
  misc_RNA (1)...(19): siRNA sense strand
uggagaagcuauugaagau

SEQ ID NO: 1161392 - RNA, 19 nt, Homo sapiens
  misc_RNA (1)...(19): siRNA sense strand
caaagaacagucugaacuu

SEQ ID NO: 1161393 - RNA, 19 nt, Homo sapiens
  misc_RNA (1)...(19): siRNA sense strand
ugaagcacuugaaagauau

SEQ ID NO: 1161394 - RNA, 19 nt, Homo sapiens
  misc_RNA (1)...(19): siRNA sense strand
aguuaaaugugcacagaua

SEQ ID NO: 1161395 - RNA, 19 nt, Homo sapiens
  misc_RNA (1)...(19): siRNA sense strand
gaaauuauggguuguacag

SEQ ID NO: 1161396 - RNA, 19 nt, Homo sapiens
  misc_RNA (1)...(19): siRNA sense strand
aaagaacagucugaacuug

SEQ ID NO: 1161397 - RNA, 19 nt, Homo sapiens
  misc_RNA (1)...(19): siRNA sense strand
caacaaagaacagucugaa

SEQ ID NO: 1161398 - RNA, 19 nt, Homo sapiens
  misc_RNA (1)...(19): siRNA sense strand
caagauugaagaugagaaa

SEQ ID NO: 1161399 - RNA, 19 nt, Homo sapiens
  misc_RNA (1)...(19): siRNA sense strand
caaugacucuuucuuuaac

SEQ ID NO: 1161400 - RNA, 19 nt, Homo sapiens
  misc_RNA (1)...(19): siRNA sense strand
cuucgaaauuggucacuuu

SEQ ID NO: 1161401 - RNA, 19 nt, Homo sapiens
  misc_RNA (1)...(19): siRNA sense strand
uagaaacaccaacaggaua

SEQ ID NO: 1161402 - RNA, 19 nt, Homo sapiens
  misc_RNA (1)...(19): siRNA sense strand
caagggacgugggacaguu

SEQ ID NO: 1161403 - RNA, 19 nt, Homo sapiens
  misc_RNA (1)...(19): siRNA sense strand
acagauagaagccaaauuc

SEQ ID NO: 1161404 - RNA, 19 nt, Homo sapiens
  misc_RNA (1)...(19): siRNA sense strand
ucuaucagccucuauuuga

SEQ ID NO: 1161405 - RNA, 19 nt, Homo sapiens
  misc_RNA (1)...(19): siRNA sense strand
ggaagaagaaggagaugag

SEQ ID NO: 1161406 - RNA, 19 nt, Homo sapiens
  misc_RNA (1)...(19): siRNA sense strand
gcugcagacuucgaaauug

SEQ ID NO: 1161407 - RNA, 19 nt, Homo sapiens
  misc_RNA (1)...(19): siRNA sense strand
agaagaagcagaaacacaa

SEQ ID NO: 1161408 - RNA, 19 nt, Homo sapiens
  misc_RNA (1)...(19): siRNA sense strand
aggccaagauugaagauga

SEQ ID NO: 1161409 - RNA, 19 nt, Homo sapiens
  misc_RNA (1)...(19): siRNA sense strand
ggaaaccagaugaagaaga

SEQ ID NO: 1161410 - RNA, 19 nt, Homo sapiens
  misc_RNA (1)...(19): siRNA sense strand
guagaaacaccaacaggau

SEQ ID NO: 1161411 - RNA, 19 nt, Homo sapiens
  misc_RNA (1)...(19): siRNA sense strand
ugaagaugaugaugaugau

SEQ ID NO: 1161412 - RNA, 19 nt, Homo sapiens
  misc_RNA (1)...(19): siRNA sense strand
gaaagaaaaggccaagauu

SEQ ID NO: 1161413 - RNA, 19 nt, Homo sapiens
  misc_RNA (1)...(19): siRNA sense strand
ucggaggaauugaaagaaa

SEQ ID NO: 1161414 - RNA, 19 nt, Homo sapiens
  misc_RNA (1)...(19): siRNA sense strand
ggcagacauugacaacaaa

SEQ ID NO: 1161415 - RNA, 19 nt, Homo sapiens
  misc_RNA (1)...(19): siRNA sense strand
agauuuggaugauguugaa

SEQ ID NO: 1161416 - RNA, 19 nt, Homo sapiens
  misc_RNA (1)...(19): siRNA sense strand
ggacgugggacaguucgua

SEQ ID NO: 1161417 - RNA, 19 nt, Homo sapiens
  misc_RNA (1)...(19): siRNA sense strand
ugacaaagacauacaggau

SEQ ID NO: 1161418 - RNA, 19 nt, Homo sapiens
  misc_RNA (1)...(19): siRNA sense strand
cgaugaaccuauucugaag

SEQ ID NO: 1161419 - RNA, 19 nt, Homo sapiens
  misc_RNA (1)...(19): siRNA sense strand
gagcguauaaucccaagau

SEQ ID NO: 1161420 - RNA, 19 nt, Homo sapiens
  misc_RNA (1)...(19): siRNA sense strand
agaaguagaagaagaggaa

SEQ ID NO: 1161421 - RNA, 19 nt, Homo sapiens
  misc_RNA (1)...(19): siRNA sense strand
gaagaaggagaugaggaaa

SEQ ID NO: 1161422 - RNA, 19 nt, Homo sapiens
  misc_RNA (1)...(19): siRNA sense strand
gaugagauuucggaggaau

SEQ ID NO: 1161423 - RNA, 19 nt, Homo sapiens
  misc_RNA (1)...(19): siRNA sense strand
ugaagaagaugagauuucg

SEQ ID NO: 1161424 - RNA, 19 nt, Homo sapiens
  misc_RNA (1)...(19): siRNA sense strand
gaacacgaugaaccuauuc

SEQ ID NO: 1161425 - RNA, 19 nt, Homo sapiens
  misc_RNA (1)...(19): siRNA sense strand
uaaaugugcacagauagaa

SEQ ID NO: 1161426 - RNA, 19 nt, Homo sapiens
  misc_RNA (1)...(19): siRNA sense strand
agaacagucugaacuugau

SEQ ID NO: 1161427 - RNA, 19 nt, Homo sapiens
  misc_RNA (1)...(19): siRNA sense strand
guacagggugccagauaga

SEQ ID NO: 1161428 - RNA, 19 nt, Homo sapiens
  misc_RNA (1)...(19): siRNA sense strand
agaagaaggagaugaggaa

SEQ ID NO: 1161429 - RNA, 19 nt, Homo sapiens
  misc_RNA (1)...(19): siRNA sense strand
uugaagaaguagaagaaga

SEQ ID NO: 1161430 - RNA, 19 nt, Homo sapiens
  misc_RNA (1)...(19): siRNA sense strand
gcacagauagaagccaaau

SEQ ID NO: 1161431 - RNA, 19 nt, Homo sapiens
  misc_RNA (1)...(19): siRNA sense strand
uauccuugcugcagacuuc

SEQ ID NO: 1161432 - RNA, 19 nt, Homo sapiens
  misc_RNA (1)...(19): siRNA sense strand
gaguggagaucuggaugau

SEQ ID NO: 1161433 - RNA, 19 nt, Homo sapiens
  misc_RNA (1)...(19): siRNA sense strand
agaugauucugaucccuuu

SEQ ID NO: 1161434 - RNA, 19 nt, Homo sapiens
  misc_RNA (1)...(19): siRNA sense strand
uggaugauguugaagaagu

SEQ ID NO: 1161435 - RNA, 19 nt, Homo sapiens
  misc_RNA (1)...(19): siRNA sense strand
aguaugcuguucucuauca

SEQ ID NO: 1161436 - RNA, 19 nt, Homo sapiens
  misc_RNA (1)...(19): siRNA sense strand
aaaaugauccagacuauga

SEQ ID NO: 1161437 - RNA, 19 nt, Homo sapiens
  misc_RNA (1)...(19): siRNA sense strand
uuaagaagaagcagaaaca

SEQ ID NO: 1161438 - RNA, 19 nt, Homo sapiens
  misc_RNA (1)...(19): siRNA sense strand
acgagugaaugcucucaaa

SEQ ID NO: 1161439 - RNA, 19 nt, Homo sapiens
  misc_RNA (1)...(19): siRNA sense strand
ugaugaagaaggugaagaa

SEQ ID NO: 1161440 - RNA, 19 nt, Homo sapiens
  misc_RNA (1)...(19): siRNA sense strand
gaagaagcagaaacacaag

SEQ ID NO: 1161441 - RNA, 19 nt, Homo sapiens
  misc_RNA (1)...(19): siRNA sense strand
ggugccagauagauuggaa

SEQ ID NO: 1161442 - RNA, 19 nt, Homo sapiens
  misc_RNA (1)...(19): siRNA sense strand
uuugauggaccagaaauua

SEQ ID NO: 1161443 - RNA, 19 nt, Homo sapiens
  misc_RNA (1)...(19): siRNA sense strand
acuuugaacccaaugaaua

SEQ ID NO: 1161444 - RNA, 19 nt, Homo sapiens
  misc_RNA (1)...(19): siRNA sense strand
agacauugacaacaaagaa

SEQ ID NO: 1161445 - RNA, 19 nt, Homo sapiens
  misc_RNA (1)...(19): siRNA sense strand
gaugaggucagaaccagau

SEQ ID NO: 1161446 - RNA, 19 nt, Homo sapiens
  misc_RNA (1)...(19): siRNA sense strand
gaagaugaugaugaugauu

SEQ ID NO: 1161447 - RNA, 19 nt, Homo sapiens
  misc_RNA (1)...(19): siRNA sense strand
gccuaugaguuuugucuua

SEQ ID NO: 1161448 - RNA, 19 nt, Homo sapiens
  misc_RNA (1)...(19): siRNA sense strand
gaucuugaaaggaaguaug

SEQ ID NO: 1161449 - RNA, 19 nt, Homo sapiens
  misc_RNA (1)...(19): siRNA sense strand
cauacaggaugaggucaga

SEQ ID NO: 1161450 - RNA, 19 nt, Homo sapiens
  misc_RNA (1)...(19): siRNA sense strand
gaugaagaagaugagauuu

SEQ ID NO: 1161451 - RNA, 19 nt, Homo sapiens
  misc_RNA (1)...(19): siRNA sense strand
gugaauggaaaccagauga

SEQ ID NO: 1161452 - RNA, 19 nt, Homo sapiens
  misc_RNA (1)...(19): siRNA sense strand
caacaggauacauugaaag

SEQ ID NO: 1161453 - RNA, 19 nt, Homo sapiens
  misc_RNA (1)...(19): siRNA sense strand
ggaugaugaugcugaagcu

SEQ ID NO: 1161454 - RNA, 19 nt, Homo sapiens
  misc_RNA (1)...(19): siRNA sense strand
ccagaaauuauggguugua

SEQ ID NO: 1161455 - RNA, 19 nt, Homo sapiens
  misc_RNA (1)...(19): siRNA sense strand
gaggaaacuggugaagaaa

SEQ ID NO: 1161456 - RNA, 19 nt, Homo sapiens
  misc_RNA (1)...(19): siRNA sense strand
uuaagaauguugacuugcu

SEQ ID NO: 1161457 - RNA, 19 nt, Homo sapiens
  misc_RNA (1)...(19): siRNA sense strand
cagcuaacuguucagauga

SEQ ID NO: 1161458 - RNA, 19 nt, Homo sapiens
  misc_RNA (1)...(19): siRNA sense strand
agaugaagaagaugagauu

SEQ ID NO: 1161459 - RNA, 19 nt, Homo sapiens
  misc_RNA (1)...(19): siRNA sense strand
gaauggaaaccagaugaag

SEQ ID NO: 1161460 - RNA, 19 nt, Homo sapiens
  misc_RNA (1)...(19): siRNA sense strand
acaaagaacagucugaacu

SEQ ID NO: 1161461 - RNA, 19 nt, Homo sapiens
  misc_RNA (1)...(19): siRNA sense strand
aaacuggugaagaaacaaa

SEQ ID NO: 1161462 - RNA, 19 nt, Homo sapiens
  misc_RNA (1)...(19): siRNA sense strand
aagaacagucugaacuuga

SEQ ID NO: 1161463 - RNA, 19 nt, Homo sapiens
  misc_RNA (1)...(19): siRNA sense strand
ugauggaccagaaauuaug

SEQ ID NO: 1161464 - RNA, 19 nt, Homo sapiens
  misc_RNA (1)...(19): siRNA sense strand
uugcagcccuucaagaaag

SEQ ID NO: 1161465 - RNA, 19 nt, Homo sapiens
  misc_RNA (1)...(19): siRNA sense strand
gaagugcugacaaagacau

SEQ ID NO: 1161466 - RNA, 19 nt, Homo sapiens
  misc_RNA (1)...(19): siRNA sense strand
uaaagugaaguucucagau

SEQ ID NO: 1161467 - RNA, 19 nt, Homo sapiens
  misc_RNA (1)...(19): siRNA sense strand
gaagcacuugaaagauauu

SEQ ID NO: 1161468 - RNA, 19 nt, Homo sapiens
  misc_RNA (1)...(19): siRNA sense strand
ggacugaaauacauuaaug

SEQ ID NO: 1161469 - RNA, 19 nt, Homo sapiens
  misc_RNA (1)...(19): siRNA sense strand
aaaccacacuaggcaaaga

SEQ ID NO: 1161470 - RNA, 19 nt, Homo sapiens
  misc_RNA (1)...(19): siRNA sense strand
uaaugugggugauuuagcu

SEQ ID NO: 1161471 - RNA, 19 nt, Homo sapiens
  misc_RNA (1)...(19): siRNA sense strand
caaagaacuugcgucaaaa

SEQ ID NO: 1161472 - RNA, 19 nt, Homo sapiens
  misc_RNA (1)...(19): siRNA sense strand
cauuaaugugggugauuua

SEQ ID NO: 1161473 - RNA, 19 nt, Homo sapiens
  misc_RNA (1)...(19): siRNA sense strand
gaacuugcgucaaaaucag

SEQ ID NO: 1161474 - RNA, 19 nt, Homo sapiens
  misc_RNA (1)...(19): siRNA sense strand
acacuaggcaaagaacuug

SEQ ID NO: 1161475 - RNA, 19 nt, Homo sapiens
  misc_RNA (1)...(19): siRNA sense strand
gcaaggacacuuucuacuc

SEQ ID NO: 1161476 - RNA, 19 nt, Homo sapiens
  misc_RNA (1)...(19): siRNA sense strand
cgacuacuccaacgagaag

SEQ ID NO: 1161477 - RNA, 19 nt, Homo sapiens
  misc_RNA (1)...(19): siRNA sense strand
guucgaggccuucuaugca

SEQ ID NO: 1161478 - RNA, 19 nt, Homo sapiens
  misc_RNA (1)...(19): siRNA sense strand
ucucccaccucugcgagua

SEQ ID NO: 1161479 - RNA, 19 nt, Homo sapiens
  misc_RNA (1)...(19): siRNA sense strand
gcaaggacacuuucuacuc

SEQ ID NO: 1161480 - RNA, 19 nt, Homo sapiens
  misc_RNA (1)...(19): siRNA sense strand
cgacuacuccaacgagaag

SEQ ID NO: 1161481 - RNA, 19 nt, Homo sapiens
  misc_RNA (1)...(19): siRNA sense strand
guucgaggccuucuaugca

SEQ ID NO: 1161482 - RNA, 19 nt, Homo sapiens
  misc_RNA (1)...(19): siRNA sense strand
ucucccaccucugcgagua

SEQ ID NO: 1161483 - RNA, 19 nt, Homo sapiens
  misc_RNA (1)...(19): siRNA sense strand
ucaaucaugucgagaaaua

SEQ ID NO: 1161484 - RNA, 19 nt, Homo sapiens
  misc_RNA (1)...(19): siRNA sense strand
caagacaccucaaucaugu

SEQ ID NO: 1161485 - RNA, 19 nt, Homo sapiens
  misc_RNA (1)...(19): siRNA sense strand
ggccagaugucaagagaga

SEQ ID NO: 1161486 - RNA, 19 nt, Homo sapiens
  misc_RNA (1)...(19): siRNA sense strand
gccagaagcucaccggaau

SEQ ID NO: 1161487 - RNA, 19 nt, Homo sapiens
  misc_RNA (1)...(19): siRNA sense strand
ugucagagaagaccaauuu

SEQ ID NO: 1161488 - RNA, 19 nt, Homo sapiens
  misc_RNA (1)...(19): siRNA sense strand
caaaugcugucagagaaga

SEQ ID NO: 1161489 - RNA, 19 nt, Homo sapiens
  misc_RNA (1)...(19): siRNA sense strand
gcagauacaggcagaguuc

SEQ ID NO: 1161490 - RNA, 19 nt, Homo sapiens
  misc_RNA (1)...(19): siRNA sense strand
uaccagagcacaagaagaa

SEQ ID NO: 1161491 - RNA, 19 nt, Homo sapiens
  misc_RNA (1)...(19): siRNA sense strand
ccaagacaccucaaucaug

SEQ ID NO: 1161492 - RNA, 19 nt, Homo sapiens
  misc_RNA (1)...(19): siRNA sense strand
agaagaagcgcaagggaaa

SEQ ID NO: 1161493 - RNA, 19 nt, Homo sapiens
  misc_RNA (1)...(19): siRNA sense strand
ccucaaucaugucgagaaa

SEQ ID NO: 1161494 - RNA, 19 nt, Homo sapiens
  misc_RNA (1)...(19): siRNA sense strand
gcgacuggauguauaagca

SEQ ID NO: 1161495 - RNA, 19 nt, Homo sapiens
  misc_RNA (1)...(19): siRNA sense strand
uguauaagcaucgguuuaa

SEQ ID NO: 1161496 - RNA, 19 nt, Homo sapiens
  misc_RNA (1)...(19): siRNA sense strand
ccaaagggccagaugucaa

SEQ ID NO: 1161497 - RNA, 19 nt, Homo sapiens
  misc_RNA (1)...(19): siRNA sense strand
cagaagaagagaagcaaau

SEQ ID NO: 1161498 - RNA, 19 nt, Homo sapiens
  misc_RNA (1)...(19): siRNA sense strand
ggccagugguccagacaau

SEQ ID NO: 1161499 - RNA, 19 nt, Homo sapiens
  misc_RNA (1)...(19): siRNA sense strand
gauacaggcagaguucuug

SEQ ID NO: 1161500 - RNA, 19 nt, Homo sapiens
  misc_RNA (1)...(19): siRNA sense strand
gcccaagacaccucaauca

SEQ ID NO: 1161501 - RNA, 19 nt, Homo sapiens
  misc_RNA (1)...(19): siRNA sense strand
gagaaauaacgcagauaca

SEQ ID NO: 1161502 - RNA, 19 nt, Homo sapiens
  misc_RNA (1)...(19): siRNA sense strand
ucuaacugguuuaucaaug

SEQ ID NO: 1161503 - RNA, 19 nt, Homo sapiens
  misc_RNA (1)...(19): siRNA sense strand
cagagaagaccaauuuguc

SEQ ID NO: 1161504 - RNA, 19 nt, Homo sapiens
  misc_RNA (1)...(19): siRNA sense strand
gcagaguucuugccuuacc

SEQ ID NO: 1161505 - RNA, 19 nt, Homo sapiens
  misc_RNA (1)...(19): siRNA sense strand
caaagggccagaugucaag

SEQ ID NO: 1161506 - RNA, 19 nt, Homo sapiens
  misc_RNA (1)...(19): siRNA sense strand
gaagaagagaagcaaaugc

SEQ ID NO: 1161507 - RNA, 19 nt, Homo sapiens
  misc_RNA (1)...(19): siRNA sense strand
gcaaaugcugucagagaag

SEQ ID NO: 1161508 - RNA, 19 nt, Homo sapiens
  misc_RNA (1)...(19): siRNA sense strand
ucagagaagaccaauuugu

SEQ ID NO: 1161509 - RNA, 19 nt, Homo sapiens
  misc_RNA (1)...(19): siRNA sense strand
gacgcauucucccggauau

SEQ ID NO: 1161510 - RNA, 19 nt, Homo sapiens
  misc_RNA (1)...(19): siRNA sense strand
ccagaagcucaccggaaua

SEQ ID NO: 1161511 - RNA, 19 nt, Homo sapiens
  misc_RNA (1)...(19): siRNA sense strand
guauaagcaucgguuuaag

SEQ ID NO: 1161512 - RNA, 19 nt, Homo sapiens
  misc_RNA (1)...(19): siRNA sense strand
cuaacugguuuaucaaugc

SEQ ID NO: 1161513 - RNA, 19 nt, Homo sapiens
  misc_RNA (1)...(19): siRNA sense strand
cgagaaauaacgcagauac

SEQ ID NO: 1161514 - RNA, 19 nt, Homo sapiens
  misc_RNA (1)...(19): siRNA sense strand
ccagugguccagacaaugu

SEQ ID NO: 1161515 - RNA, 19 nt, Homo sapiens
  misc_RNA (1)...(19): siRNA sense strand
gaaacgaccccaucauugg

SEQ ID NO: 1161516 - RNA, 19 nt, Homo sapiens
  misc_RNA (1)...(19): siRNA sense strand
cuccgcgacuggauguaua

SEQ ID NO: 1161517 - RNA, 19 nt, Homo sapiens
  misc_RNA (1)...(19): siRNA sense strand
gucgagaaauaacgcagau

SEQ ID NO: 1161518 - RNA, 19 nt, Homo sapiens
  misc_RNA (1)...(19): siRNA sense strand
gaccaauuugucuuuguug

SEQ ID NO: 1161519 - RNA, 19 nt, Homo sapiens
  misc_RNA (1)...(19): siRNA sense strand
ccacaaaacgggcaaagau

SEQ ID NO: 1161520 - RNA, 19 nt, Homo sapiens
  misc_RNA (1)...(19): siRNA sense strand
agaagaagagaagcaaaug

SEQ ID NO: 1161521 - RNA, 19 nt, Homo sapiens
  misc_RNA (1)...(19): siRNA sense strand
cagaagcucaccggaauag

SEQ ID NO: 1161522 - RNA, 19 nt, Homo sapiens
  misc_RNA (1)...(19): siRNA sense strand
ucccggauaugcuucaaca

SEQ ID NO: 1161523 - RNA, 19 nt, Homo sapiens
  misc_RNA (1)...(19): siRNA sense strand
agacgcauucucccggaua

SEQ ID NO: 1161524 - RNA, 19 nt, Homo sapiens
  misc_RNA (1)...(19): siRNA sense strand
ccaaagcccagcccaagac

SEQ ID NO: 1161525 - RNA, 19 nt, Homo sapiens
  misc_RNA (1)...(19): siRNA sense strand
uaacugguuuaucaaugcu

SEQ ID NO: 1161526 - RNA, 19 nt, Homo sapiens
  misc_RNA (1)...(19): siRNA sense strand
cagccgaguccguuaagau

SEQ ID NO: 1161527 - RNA, 19 nt, Homo sapiens
  misc_RNA (1)...(19): siRNA sense strand
gccaaagggccagauguca

SEQ ID NO: 1161528 - RNA, 19 nt, Homo sapiens
  misc_RNA (1)...(19): siRNA sense strand
agaaauaacgcagauacag

SEQ ID NO: 1161529 - RNA, 19 nt, Homo sapiens
  misc_RNA (1)...(19): siRNA sense strand
caaucaugucgagaaauaa

SEQ ID NO: 1161530 - RNA, 19 nt, Homo sapiens
  misc_RNA (1)...(19): siRNA sense strand
gcagauccgucacagacua

SEQ ID NO: 1161531 - RNA, 19 nt, Homo sapiens
  misc_RNA (1)...(19): siRNA sense strand
cagaaggccugcccucaga

SEQ ID NO: 1161532 - RNA, 19 nt, Homo sapiens
  misc_RNA (1)...(19): siRNA sense strand
ucaacaaggucgacaagca

SEQ ID NO: 1161533 - RNA, 19 nt, Homo sapiens
  misc_RNA (1)...(19): siRNA sense strand
uggaaauccuggaguacaa

SEQ ID NO: 1161534 - RNA, 19 nt, Homo sapiens
  misc_RNA (1)...(19): siRNA sense strand
ggaguacaacuucaacaag

SEQ ID NO: 1161535 - RNA, 19 nt, Homo sapiens
  misc_RNA (1)...(19): siRNA sense strand
gaggagacccagaaauggu

SEQ ID NO: 1161536 - RNA, 19 nt, Homo sapiens
  misc_RNA (1)...(19): siRNA sense strand
cagaggaccagguggaaau

SEQ ID NO: 1161537 - RNA, 19 nt, Homo sapiens
  misc_RNA (1)...(19): siRNA sense strand
ggaggagacccagaaaugg

SEQ ID NO: 1161538 - RNA, 19 nt, Homo sapiens
  misc_RNA (1)...(19): siRNA sense strand
ggagacccagaaaugguuu

SEQ ID NO: 1161539 - RNA, 19 nt, Homo sapiens
  misc_RNA (1)...(19): siRNA sense strand
uuaagcagcgccuggcaaa

SEQ ID NO: 1161540 - RNA, 19 nt, Homo sapiens
  misc_RNA (1)...(19): siRNA sense strand
aggaggagacccagaaaug

SEQ ID NO: 1161541 - RNA, 19 nt, Homo sapiens
  misc_RNA (1)...(19): siRNA sense strand
agguggaaauccuggagua

SEQ ID NO: 1161542 - RNA, 19 nt, Homo sapiens
  misc_RNA (1)...(19): siRNA sense strand
gaggaggagacccagaaau

SEQ ID NO: 1161543 - RNA, 19 nt, Homo sapiens
  misc_RNA (1)...(19): siRNA sense strand
gagacccagaaaugguuua

SEQ ID NO: 1161544 - RNA, 19 nt, Homo sapiens
  misc_RNA (1)...(19): siRNA sense strand
gaaggccugcccucagagu

SEQ ID NO: 1161545 - RNA, 19 nt, Homo sapiens
  misc_RNA (1)...(19): siRNA sense strand
ccgaggaggagacccagaa

SEQ ID NO: 1161546 - RNA, 19 nt, Homo sapiens
  misc_RNA (1)...(19): siRNA sense strand
cagauccgucacagacuaa

SEQ ID NO: 1161547 - RNA, 19 nt, Homo sapiens
  misc_RNA (1)...(19): siRNA sense strand
cgaggaggagacccagaaa

SEQ ID NO: 1161548 - RNA, 19 nt, Homo sapiens
  misc_RNA (1)...(19): siRNA sense strand
gcagauccgucacagacua

SEQ ID NO: 1161549 - RNA, 19 nt, Homo sapiens
  misc_RNA (1)...(19): siRNA sense strand
cagaaggccugcccucaga

SEQ ID NO: 1161550 - RNA, 19 nt, Homo sapiens
  misc_RNA (1)...(19): siRNA sense strand
ucaacaaggucgacaagca

SEQ ID NO: 1161551 - RNA, 19 nt, Homo sapiens
  misc_RNA (1)...(19): siRNA sense strand
uggaaauccuggaguacaa

SEQ ID NO: 1161552 - RNA, 19 nt, Homo sapiens
  misc_RNA (1)...(19): siRNA sense strand
ggaguacaacuucaacaag

SEQ ID NO: 1161553 - RNA, 19 nt, Homo sapiens
  misc_RNA (1)...(19): siRNA sense strand
gaggagacccagaaauggu

SEQ ID NO: 1161554 - RNA, 19 nt, Homo sapiens
  misc_RNA (1)...(19): siRNA sense strand
cagaggaccagguggaaau

SEQ ID NO: 1161555 - RNA, 19 nt, Homo sapiens
  misc_RNA (1)...(19): siRNA sense strand
ggaggagacccagaaaugg

SEQ ID NO: 1161556 - RNA, 19 nt, Homo sapiens
  misc_RNA (1)...(19): siRNA sense strand
ggagacccagaaaugguuu

SEQ ID NO: 1161557 - RNA, 19 nt, Homo sapiens
  misc_RNA (1)...(19): siRNA sense strand
uuaagcagcgccuggcaaa

SEQ ID NO: 1161558 - RNA, 19 nt, Homo sapiens
  misc_RNA (1)...(19): siRNA sense strand
aggaggagacccagaaaug

SEQ ID NO: 1161559 - RNA, 19 nt, Homo sapiens
  misc_RNA (1)...(19): siRNA sense strand
agguggaaauccuggagua

SEQ ID NO: 1161560 - RNA, 19 nt, Homo sapiens
  misc_RNA (1)...(19): siRNA sense strand
gaggaggagacccagaaau

SEQ ID NO: 1161561 - RNA, 19 nt, Homo sapiens
  misc_RNA (1)...(19): siRNA sense strand
gagacccagaaaugguuua

SEQ ID NO: 1161562 - RNA, 19 nt, Homo sapiens
  misc_RNA (1)...(19): siRNA sense strand
gaaggccugcccucagagu

SEQ ID NO: 1161563 - RNA, 19 nt, Homo sapiens
  misc_RNA (1)...(19): siRNA sense strand
ccgaggaggagacccagaa

SEQ ID NO: 1161564 - RNA, 19 nt, Homo sapiens
  misc_RNA (1)...(19): siRNA sense strand
cagauccgucacagacuaa

SEQ ID NO: 1161565 - RNA, 19 nt, Homo sapiens
  misc_RNA (1)...(19): siRNA sense strand
cgaggaggagacccagaaa

SEQ ID NO: 1161566 - RNA, 19 nt, Homo sapiens
  misc_RNA (1)...(19): siRNA sense strand
gcagauccgucacagacua

SEQ ID NO: 1161567 - RNA, 19 nt, Homo sapiens
  misc_RNA (1)...(19): siRNA sense strand
cagaaggccugcccucaga

SEQ ID NO: 1161568 - RNA, 19 nt, Homo sapiens
  misc_RNA (1)...(19): siRNA sense strand
ucaacaaggucgacaagca

SEQ ID NO: 1161569 - RNA, 19 nt, Homo sapiens
  misc_RNA (1)...(19): siRNA sense strand
uggaaauccuggaguacaa

SEQ ID NO: 1161570 - RNA, 19 nt, Homo sapiens
  misc_RNA (1)...(19): siRNA sense strand
ggaguacaacuucaacaag

SEQ ID NO: 1161571 - RNA, 19 nt, Homo sapiens
  misc_RNA (1)...(19): siRNA sense strand
gaggagacccagaaauggu

SEQ ID NO: 1161572 - RNA, 19 nt, Homo sapiens
  misc_RNA (1)...(19): siRNA sense strand
cagaggaccagguggaaau

SEQ ID NO: 1161573 - RNA, 19 nt, Homo sapiens
  misc_RNA (1)...(19): siRNA sense strand
ggaggagacccagaaaugg

SEQ ID NO: 1161574 - RNA, 19 nt, Homo sapiens
  misc_RNA (1)...(19): siRNA sense strand
ggagacccagaaaugguuu

SEQ ID NO: 1161575 - RNA, 19 nt, Homo sapiens
  misc_RNA (1)...(19): siRNA sense strand
uuaagcagcgccuggcaaa

SEQ ID NO: 1161576 - RNA, 19 nt, Homo sapiens
  misc_RNA (1)...(19): siRNA sense strand
aggaggagacccagaaaug

SEQ ID NO: 1161577 - RNA, 19 nt, Homo sapiens
  misc_RNA (1)...(19): siRNA sense strand
agguggaaauccuggagua

SEQ ID NO: 1161578 - RNA, 19 nt, Homo sapiens
  misc_RNA (1)...(19): siRNA sense strand
gaggaggagacccagaaau

SEQ ID NO: 1161579 - RNA, 19 nt, Homo sapiens
  misc_RNA (1)...(19): siRNA sense strand
gagacccagaaaugguuua

SEQ ID NO: 1161580 - RNA, 19 nt, Homo sapiens
  misc_RNA (1)...(19): siRNA sense strand
gaaggccugcccucagagu

SEQ ID NO: 1161581 - RNA, 19 nt, Homo sapiens
  misc_RNA (1)...(19): siRNA sense strand
ccgaggaggagacccagaa

SEQ ID NO: 1161582 - RNA, 19 nt, Homo sapiens
  misc_RNA (1)...(19): siRNA sense strand
cagauccgucacagacuaa

SEQ ID NO: 1161583 - RNA, 19 nt, Homo sapiens
  misc_RNA (1)...(19): siRNA sense strand
cgaggaggagacccagaaa

SEQ ID NO: 1161584 - RNA, 19 nt, Homo sapiens
  misc_RNA (1)...(19): siRNA sense strand
gcagauccgucacagacua

SEQ ID NO: 1161585 - RNA, 19 nt, Homo sapiens
  misc_RNA (1)...(19): siRNA sense strand
cagaaggccugcccucaga

SEQ ID NO: 1161586 - RNA, 19 nt, Homo sapiens
  misc_RNA (1)...(19): siRNA sense strand
ucaacaaggucgacaagca

SEQ ID NO: 1161587 - RNA, 19 nt, Homo sapiens
  misc_RNA (1)...(19): siRNA sense strand
uggaaauccuggaguacaa

SEQ ID NO: 1161588 - RNA, 19 nt, Homo sapiens
  misc_RNA (1)...(19): siRNA sense strand
ggaguacaacuucaacaag

SEQ ID NO: 1161589 - RNA, 19 nt, Homo sapiens
  misc_RNA (1)...(19): siRNA sense strand
gaggagacccagaaauggu

SEQ ID NO: 1161590 - RNA, 19 nt, Homo sapiens
  misc_RNA (1)...(19): siRNA sense strand
cagaggaccagguggaaau

SEQ ID NO: 1161591 - RNA, 19 nt, Homo sapiens
  misc_RNA (1)...(19): siRNA sense strand
ggaggagacccagaaaugg

SEQ ID NO: 1161592 - RNA, 19 nt, Homo sapiens
  misc_RNA (1)...(19): siRNA sense strand
ggagacccagaaaugguuu

SEQ ID NO: 1161593 - RNA, 19 nt, Homo sapiens
  misc_RNA (1)...(19): siRNA sense strand
uuaagcagcgccuggcaaa

SEQ ID NO: 1161594 - RNA, 19 nt, Homo sapiens
  misc_RNA (1)...(19): siRNA sense strand
aggaggagacccagaaaug

SEQ ID NO: 1161595 - RNA, 19 nt, Homo sapiens
  misc_RNA (1)...(19): siRNA sense strand
agguggaaauccuggagua

SEQ ID NO: 1161596 - RNA, 19 nt, Homo sapiens
  misc_RNA (1)...(19): siRNA sense strand
gaggaggagacccagaaau

SEQ ID NO: 1161597 - RNA, 19 nt, Homo sapiens
  misc_RNA (1)...(19): siRNA sense strand
gagacccagaaaugguuua

SEQ ID NO: 1161598 - RNA, 19 nt, Homo sapiens
  misc_RNA (1)...(19): siRNA sense strand
gaaggccugcccucagagu

SEQ ID NO: 1161599 - RNA, 19 nt, Homo sapiens
  misc_RNA (1)...(19): siRNA sense strand
ccgaggaggagacccagaa

SEQ ID NO: 1161600 - RNA, 19 nt, Homo sapiens
  misc_RNA (1)...(19): siRNA sense strand
cagauccgucacagacuaa

SEQ ID NO: 1161601 - RNA, 19 nt, Homo sapiens
  misc_RNA (1)...(19): siRNA sense strand
cgaggaggagacccagaaa

SEQ ID NO: 1161602 - RNA, 19 nt, Homo sapiens
  misc_RNA (1)...(19): siRNA sense strand
gcagauccgucacagacua

SEQ ID NO: 1161603 - RNA, 19 nt, Homo sapiens
  misc_RNA (1)...(19): siRNA sense strand
cagaaggccugcccucaga

SEQ ID NO: 1161604 - RNA, 19 nt, Homo sapiens
  misc_RNA (1)...(19): siRNA sense strand
ucaacaaggucgacaagca

SEQ ID NO: 1161605 - RNA, 19 nt, Homo sapiens
  misc_RNA (1)...(19): siRNA sense strand
uggaaauccuggaguacaa

SEQ ID NO: 1161606 - RNA, 19 nt, Homo sapiens
  misc_RNA (1)...(19): siRNA sense strand
ggaguacaacuucaacaag

SEQ ID NO: 1161607 - RNA, 19 nt, Homo sapiens
  misc_RNA (1)...(19): siRNA sense strand
gaggagacccagaaauggu

SEQ ID NO: 1161608 - RNA, 19 nt, Homo sapiens
  misc_RNA (1)...(19): siRNA sense strand
cagaggaccagguggaaau

SEQ ID NO: 1161609 - RNA, 19 nt, Homo sapiens
  misc_RNA (1)...(19): siRNA sense strand
ggaggagacccagaaaugg

SEQ ID NO: 1161610 - RNA, 19 nt, Homo sapiens
  misc_RNA (1)...(19): siRNA sense strand
ggagacccagaaaugguuu

SEQ ID NO: 1161611 - RNA, 19 nt, Homo sapiens
  misc_RNA (1)...(19): siRNA sense strand
uuaagcagcgccuggcaaa

SEQ ID NO: 1161612 - RNA, 19 nt, Homo sapiens
  misc_RNA (1)...(19): siRNA sense strand
aggaggagacccagaaaug

SEQ ID NO: 1161613 - RNA, 19 nt, Homo sapiens
  misc_RNA (1)...(19): siRNA sense strand
agguggaaauccuggagua

SEQ ID NO: 1161614 - RNA, 19 nt, Homo sapiens
  misc_RNA (1)...(19): siRNA sense strand
gaggaggagacccagaaau

SEQ ID NO: 1161615 - RNA, 19 nt, Homo sapiens
  misc_RNA (1)...(19): siRNA sense strand
gagacccagaaaugguuua

SEQ ID NO: 1161616 - RNA, 19 nt, Homo sapiens
  misc_RNA (1)...(19): siRNA sense strand
gaaggccugcccucagagu

SEQ ID NO: 1161617 - RNA, 19 nt, Homo sapiens
  misc_RNA (1)...(19): siRNA sense strand
ccgaggaggagacccagaa

SEQ ID NO: 1161618 - RNA, 19 nt, Homo sapiens
  misc_RNA (1)...(19): siRNA sense strand
cagauccgucacagacuaa

SEQ ID NO: 1161619 - RNA, 19 nt, Homo sapiens
  misc_RNA (1)...(19): siRNA sense strand
cgaggaggagacccagaaa

SEQ ID NO: 1161620 - RNA, 19 nt, Homo sapiens
  misc_RNA (1)...(19): siRNA sense strand
gcagauccgucacagacua

SEQ ID NO: 1161621 - RNA, 19 nt, Homo sapiens
  misc_RNA (1)...(19): siRNA sense strand
cagaaggccugcccucaga

SEQ ID NO: 1161622 - RNA, 19 nt, Homo sapiens
  misc_RNA (1)...(19): siRNA sense strand
ucaacaaggucgacaagca

SEQ ID NO: 1161623 - RNA, 19 nt, Homo sapiens
  misc_RNA (1)...(19): siRNA sense strand
uggaaauccuggaguacaa

SEQ ID NO: 1161624 - RNA, 19 nt, Homo sapiens
  misc_RNA (1)...(19): siRNA sense strand
ggaguacaacuucaacaag

SEQ ID NO: 1161625 - RNA, 19 nt, Homo sapiens
  misc_RNA (1)...(19): siRNA sense strand
gaggagacccagaaauggu

SEQ ID NO: 1161626 - RNA, 19 nt, Homo sapiens
  misc_RNA (1)...(19): siRNA sense strand
cagaggaccagguggaaau

SEQ ID NO: 1161627 - RNA, 19 nt, Homo sapiens
  misc_RNA (1)...(19): siRNA sense strand
ggaggagacccagaaaugg

SEQ ID NO: 1161628 - RNA, 19 nt, Homo sapiens
  misc_RNA (1)...(19): siRNA sense strand
ggagacccagaaaugguuu

SEQ ID NO: 1161629 - RNA, 19 nt, Homo sapiens
  misc_RNA (1)...(19): siRNA sense strand
uuaagcagcgccuggcaaa

SEQ ID NO: 1161630 - RNA, 19 nt, Homo sapiens
  misc_RNA (1)...(19): siRNA sense strand
aggaggagacccagaaaug

SEQ ID NO: 1161631 - RNA, 19 nt, Homo sapiens
  misc_RNA (1)...(19): siRNA sense strand
agguggaaauccuggagua

SEQ ID NO: 1161632 - RNA, 19 nt, Homo sapiens
  misc_RNA (1)...(19): siRNA sense strand
gaggaggagacccagaaau

SEQ ID NO: 1161633 - RNA, 19 nt, Homo sapiens
  misc_RNA (1)...(19): siRNA sense strand
gagacccagaaaugguuua

SEQ ID NO: 1161634 - RNA, 19 nt, Homo sapiens
  misc_RNA (1)...(19): siRNA sense strand
gaaggccugcccucagagu

SEQ ID NO: 1161635 - RNA, 19 nt, Homo sapiens
  misc_RNA (1)...(19): siRNA sense strand
ccgaggaggagacccagaa

SEQ ID NO: 1161636 - RNA, 19 nt, Homo sapiens
  misc_RNA (1)...(19): siRNA sense strand
cagauccgucacagacuaa

SEQ ID NO: 1161637 - RNA, 19 nt, Homo sapiens
  misc_RNA (1)...(19): siRNA sense strand
cgaggaggagacccagaaa

SEQ ID NO: 1161638 - RNA, 19 nt, Homo sapiens
  misc_RNA (1)...(19): siRNA sense strand
ggagggaucccacuucuua

SEQ ID NO: 1161639 - RNA, 19 nt, Homo sapiens
  misc_RNA (1)...(19): siRNA sense strand
ggacuacuuuccugagaua

SEQ ID NO: 1161640 - RNA, 19 nt, Homo sapiens
  misc_RNA (1)...(19): siRNA sense strand
gcacugauccugcaugcua

SEQ ID NO: 1161641 - RNA, 19 nt, Homo sapiens
  misc_RNA (1)...(19): siRNA sense strand
gaaaguucuugaguacaua

SEQ ID NO: 1161642 - RNA, 19 nt, Homo sapiens
  misc_RNA (1)...(19): siRNA sense strand
caacugcucuuuggcauug

SEQ ID NO: 1161643 - RNA, 19 nt, Homo sapiens
  misc_RNA (1)...(19): siRNA sense strand
guaugaagaugcuuugaga

SEQ ID NO: 1161644 - RNA, 19 nt, Homo sapiens
  misc_RNA (1)...(19): siRNA sense strand
gaugaaaguucuugaguac

SEQ ID NO: 1161645 - RNA, 19 nt, Homo sapiens
  misc_RNA (1)...(19): siRNA sense strand
gauagacccugaguccuuu

SEQ ID NO: 1161646 - RNA, 19 nt, Homo sapiens
  misc_RNA (1)...(19): siRNA sense strand
guacauagccaaugccaau

SEQ ID NO: 1161647 - RNA, 19 nt, Homo sapiens
  misc_RNA (1)...(19): siRNA sense strand
ggaacugcaucccugaaga

SEQ ID NO: 1161648 - RNA, 19 nt, Homo sapiens
  misc_RNA (1)...(19): siRNA sense strand
cuacuuuccugagauauuu

SEQ ID NO: 1161649 - RNA, 19 nt, Homo sapiens
  misc_RNA (1)...(19): siRNA sense strand
caagauauacuacaugaca

SEQ ID NO: 1161650 - RNA, 19 nt, Homo sapiens
  misc_RNA (1)...(19): siRNA sense strand
gcauugaugugaaggaagu

SEQ ID NO: 1161651 - RNA, 19 nt, Homo sapiens
  misc_RNA (1)...(19): siRNA sense strand
gagcagagcaugcccaagu

SEQ ID NO: 1161652 - RNA, 19 nt, Homo sapiens
  misc_RNA (1)...(19): siRNA sense strand
agaugaaaguucuugagua

SEQ ID NO: 1161653 - RNA, 19 nt, Homo sapiens
  misc_RNA (1)...(19): siRNA sense strand
ugaaaguucuugaguacau

SEQ ID NO: 1161654 - RNA, 19 nt, Homo sapiens
  misc_RNA (1)...(19): siRNA sense strand
ggagggagagggagucuga

SEQ ID NO: 1161655 - RNA, 19 nt, Homo sapiens
  misc_RNA (1)...(19): siRNA sense strand
gauaauaguccugggugua

SEQ ID NO: 1161656 - RNA, 19 nt, Homo sapiens
  misc_RNA (1)...(19): siRNA sense strand
gaucacaaaggcagaaaug

SEQ ID NO: 1161657 - RNA, 19 nt, Homo sapiens
  misc_RNA (1)...(19): siRNA sense strand
gcaugcaacugcucuuugg

SEQ ID NO: 1161658 - RNA, 19 nt, Homo sapiens
  misc_RNA (1)...(19): siRNA sense strand
cccaagauauacuacauga

SEQ ID NO: 1161659 - RNA, 19 nt, Homo sapiens
  misc_RNA (1)...(19): siRNA sense strand
cuacaugacaagauaauug

SEQ ID NO: 1161660 - RNA, 19 nt, Homo sapiens
  misc_RNA (1)...(19): siRNA sense strand
gggaaguccugagcauuau

SEQ ID NO: 1161661 - RNA, 19 nt, Homo sapiens
  misc_RNA (1)...(19): siRNA sense strand
ugggaaguccugagcauua

SEQ ID NO: 1161662 - RNA, 19 nt, Homo sapiens
  misc_RNA (1)...(19): siRNA sense strand
ucaaggggcugaucacaaa

SEQ ID NO: 1161663 - RNA, 19 nt, Homo sapiens
  misc_RNA (1)...(19): siRNA sense strand
gaaaaggaggggccaagua

SEQ ID NO: 1161664 - RNA, 19 nt, Homo sapiens
  misc_RNA (1)...(19): siRNA sense strand
uaccucgccugaccugaua

SEQ ID NO: 1161665 - RNA, 19 nt, Homo sapiens
  misc_RNA (1)...(19): siRNA sense strand
cugcaucccugaagagguu

SEQ ID NO: 1161666 - RNA, 19 nt, Homo sapiens
  misc_RNA (1)...(19): siRNA sense strand
aaaauugggugcaggaaaa

SEQ ID NO: 1161667 - RNA, 19 nt, Homo sapiens
  misc_RNA (1)...(19): siRNA sense strand
gauccugcaugcuaugagu

SEQ ID NO: 1161668 - RNA, 19 nt, Homo sapiens
  misc_RNA (1)...(19): siRNA sense strand
ccagcaagaugaaaguucu

SEQ ID NO: 1161669 - RNA, 19 nt, Homo sapiens
  misc_RNA (1)...(19): siRNA sense strand
gcacugcaagccugaggaa

SEQ ID NO: 1161670 - RNA, 19 nt, Homo sapiens
  misc_RNA (1)...(19): siRNA sense strand
ccacuagccacuccuaugu

SEQ ID NO: 1161671 - RNA, 19 nt, Homo sapiens
  misc_RNA (1)...(19): siRNA sense strand
caagucuggccuccugaua

SEQ ID NO: 1161672 - RNA, 19 nt, Homo sapiens
  misc_RNA (1)...(19): siRNA sense strand
gaacugcaucccugaagag

SEQ ID NO: 1161673 - RNA, 19 nt, Homo sapiens
  misc_RNA (1)...(19): siRNA sense strand
cccucaaccucucuuauga

SEQ ID NO: 1161674 - RNA, 19 nt, Homo sapiens
  misc_RNA (1)...(19): siRNA sense strand
acccaucccuguaugaaga

SEQ ID NO: 1161675 - RNA, 19 nt, Homo sapiens
  misc_RNA (1)...(19): siRNA sense strand
ugauagacccugaguccuu

SEQ ID NO: 1161676 - RNA, 19 nt, Homo sapiens
  misc_RNA (1)...(19): siRNA sense strand
ccgcaaguaucgagucaag

SEQ ID NO: 1161677 - RNA, 19 nt, Homo sapiens
  misc_RNA (1)...(19): siRNA sense strand
agggagcacuuccucuuug

SEQ ID NO: 1161678 - RNA, 19 nt, Homo sapiens
  misc_RNA (1)...(19): siRNA sense strand
gcaacugcucuuuggcauu

SEQ ID NO: 1161679 - RNA, 19 nt, Homo sapiens
  misc_RNA (1)...(19): siRNA sense strand
agucuggccuccugauaau

SEQ ID NO: 1161680 - RNA, 19 nt, Homo sapiens
  misc_RNA (1)...(19): siRNA sense strand
aaagaagucagcacugcaa

SEQ ID NO: 1161681 - RNA, 19 nt, Homo sapiens
  misc_RNA (1)...(19): siRNA sense strand
auaauaguccuggguguaa

SEQ ID NO: 1161682 - RNA, 19 nt, Homo sapiens
  misc_RNA (1)...(19): siRNA sense strand
gaaguccugagcauuaugg

SEQ ID NO: 1161683 - RNA, 19 nt, Homo sapiens
  misc_RNA (1)...(19): siRNA sense strand
uagggaagccucuguaugc

SEQ ID NO: 1161684 - RNA, 19 nt, Homo sapiens
  misc_RNA (1)...(19): siRNA sense strand
cucaaccucucuuaugaug

SEQ ID NO: 1161685 - RNA, 19 nt, Homo sapiens
  misc_RNA (1)...(19): siRNA sense strand
ccacuccuauguccuuguc

SEQ ID NO: 1161686 - RNA, 19 nt, Homo sapiens
  misc_RNA (1)...(19): siRNA sense strand
gauauacuacaugacaaga

SEQ ID NO: 1161687 - RNA, 19 nt, Homo sapiens
  misc_RNA (1)...(19): siRNA sense strand
gggagcacuuccucuuugg

SEQ ID NO: 1161688 - RNA, 19 nt, Homo sapiens
  misc_RNA (1)...(19): siRNA sense strand
gaaugugggcacucuagag

SEQ ID NO: 1161689 - RNA, 19 nt, Homo sapiens
  misc_RNA (1)...(19): siRNA sense strand
guaccucgccugaccugau

SEQ ID NO: 1161690 - RNA, 19 nt, Homo sapiens
  misc_RNA (1)...(19): siRNA sense strand
uaauaguccuggguguaau

SEQ ID NO: 1161691 - RNA, 19 nt, Homo sapiens
  misc_RNA (1)...(19): siRNA sense strand
gacaagauaauugauuugg

SEQ ID NO: 1161692 - RNA, 19 nt, Homo sapiens
  misc_RNA (1)...(19): siRNA sense strand
uggcauugaugugaaggaa

SEQ ID NO: 1161693 - RNA, 19 nt, Homo sapiens
  misc_RNA (1)...(19): siRNA sense strand
ucacaaaggcagaaaugcu

SEQ ID NO: 1161694 - RNA, 19 nt, Homo sapiens
  misc_RNA (1)...(19): siRNA sense strand
ggaaguccugagcauuaug

SEQ ID NO: 1161695 - RNA, 19 nt, Homo sapiens
  misc_RNA (1)...(19): siRNA sense strand
aguccuggguguaaucuuc

SEQ ID NO: 1161696 - RNA, 19 nt, Homo sapiens
  misc_RNA (1)...(19): siRNA sense strand
gagaccagcaagaugaaag

SEQ ID NO: 1161697 - RNA, 19 nt, Homo sapiens
  misc_RNA (1)...(19): siRNA sense strand
cuucuuacccaucccugua

SEQ ID NO: 1161698 - RNA, 19 nt, Homo sapiens
  misc_RNA (1)...(19): siRNA sense strand
gcugcugagucaccaaguc

SEQ ID NO: 1161699 - RNA, 19 nt, Homo sapiens
  misc_RNA (1)...(19): siRNA sense strand
aagucuggccuccugauaa

SEQ ID NO: 1161700 - RNA, 19 nt, Homo sapiens
  misc_RNA (1)...(19): siRNA sense strand
augaagaugcuuugagaga

SEQ ID NO: 1161701 - RNA, 19 nt, Homo sapiens
  misc_RNA (1)...(19): siRNA sense strand
guaggaagguggccgaguu

SEQ ID NO: 1161702 - RNA, 19 nt, Homo sapiens
  misc_RNA (1)...(19): siRNA sense strand
ugaaaguccugcaccauau

SEQ ID NO: 1161703 - RNA, 19 nt, Homo sapiens
  misc_RNA (1)...(19): siRNA sense strand
gaaaccagcuaugugaaag

SEQ ID NO: 1161704 - RNA, 19 nt, Homo sapiens
  misc_RNA (1)...(19): siRNA sense strand
ccagggagccggucacaaa

SEQ ID NO: 1161705 - RNA, 19 nt, Homo sapiens
  misc_RNA (1)...(19): siRNA sense strand
gggaggagcugaguguguu

SEQ ID NO: 1161706 - RNA, 19 nt, Homo sapiens
  misc_RNA (1)...(19): siRNA sense strand
gauccugcauguuaugaau

SEQ ID NO: 1161707 - RNA, 19 nt, Homo sapiens
  misc_RNA (1)...(19): siRNA sense strand
gugaaaguccugcaccaua

SEQ ID NO: 1161708 - RNA, 19 nt, Homo sapiens
  misc_RNA (1)...(19): siRNA sense strand
gaagguggccgaguugguu

SEQ ID NO: 1161709 - RNA, 19 nt, Homo sapiens
  misc_RNA (1)...(19): siRNA sense strand
gcacugcaagccugaagaa

SEQ ID NO: 1161710 - RNA, 19 nt, Homo sapiens
  misc_RNA (1)...(19): siRNA sense strand
ggagugucgucggaaauug

SEQ ID NO: 1161711 - RNA, 19 nt, Homo sapiens
  misc_RNA (1)...(19): siRNA sense strand
gauaaucguccuggccaua

SEQ ID NO: 1161712 - RNA, 19 nt, Homo sapiens
  misc_RNA (1)...(19): siRNA sense strand
guugaaaccagcuauguga

SEQ ID NO: 1161713 - RNA, 19 nt, Homo sapiens
  misc_RNA (1)...(19): siRNA sense strand
uggccgaguugguucauuu

SEQ ID NO: 1161714 - RNA, 19 nt, Homo sapiens
  misc_RNA (1)...(19): siRNA sense strand
caagggcccucguugaaac

SEQ ID NO: 1161715 - RNA, 19 nt, Homo sapiens
  misc_RNA (1)...(19): siRNA sense strand
gaaaguccugcaccauaug

SEQ ID NO: 1161716 - RNA, 19 nt, Homo sapiens
  misc_RNA (1)...(19): siRNA sense strand
ugaaaccagcuaugugaaa

SEQ ID NO: 1161717 - RNA, 19 nt, Homo sapiens
  misc_RNA (1)...(19): siRNA sense strand
ggucacaaaggcagaaaug

SEQ ID NO: 1161718 - RNA, 19 nt, Homo sapiens
  misc_RNA (1)...(19): siRNA sense strand
aagcagcacucaguaggaa

SEQ ID NO: 1161719 - RNA, 19 nt, Homo sapiens
  misc_RNA (1)...(19): siRNA sense strand
ggaggagcugaguguguua

SEQ ID NO: 1161720 - RNA, 19 nt, Homo sapiens
  misc_RNA (1)...(19): siRNA sense strand
ggacuccagcaaccaagaa

SEQ ID NO: 1161721 - RNA, 19 nt, Homo sapiens
  misc_RNA (1)...(19): siRNA sense strand
ccaagggcccucguugaaa

SEQ ID NO: 1161722 - RNA, 19 nt, Homo sapiens
  misc_RNA (1)...(19): siRNA sense strand
gggagugucgucggaaauu

SEQ ID NO: 1161723 - RNA, 19 nt, Homo sapiens
  misc_RNA (1)...(19): siRNA sense strand
agaagcugcucacccaaca

SEQ ID NO: 1161724 - RNA, 19 nt, Homo sapiens
  misc_RNA (1)...(19): siRNA sense strand
uaaucguccuggccauaau

SEQ ID NO: 1161725 - RNA, 19 nt, Homo sapiens
  misc_RNA (1)...(19): siRNA sense strand
cagugauccugcauguuau

SEQ ID NO: 1161726 - RNA, 19 nt, Homo sapiens
  misc_RNA (1)...(19): siRNA sense strand
ggagcugaguguguuagag

SEQ ID NO: 1161727 - RNA, 19 nt, Homo sapiens
  misc_RNA (1)...(19): siRNA sense strand
caagcagcacucaguagga

SEQ ID NO: 1161728 - RNA, 19 nt, Homo sapiens
  misc_RNA (1)...(19): siRNA sense strand
ucacaaaggcagaaaugcu

SEQ ID NO: 1161729 - RNA, 19 nt, Homo sapiens
  misc_RNA (1)...(19): siRNA sense strand
uccaagggcccucguugaa

SEQ ID NO: 1161730 - RNA, 19 nt, Homo sapiens
  misc_RNA (1)...(19): siRNA sense strand
ccuugcagcuggucuuugg

SEQ ID NO: 1161731 - RNA, 19 nt, Homo sapiens
  misc_RNA (1)...(19): siRNA sense strand
ggaagguggccgaguuggu

SEQ ID NO: 1161732 - RNA, 19 nt, Homo sapiens
  misc_RNA (1)...(19): siRNA sense strand
gcugcucacccaacauuuc

SEQ ID NO: 1161733 - RNA, 19 nt, Homo sapiens
  misc_RNA (1)...(19): siRNA sense strand
ccucuucuacucuaguuga

SEQ ID NO: 1161734 - RNA, 19 nt, Homo sapiens
  misc_RNA (1)...(19): siRNA sense strand
aagcugcucacccaacauu

SEQ ID NO: 1161735 - RNA, 19 nt, Homo sapiens
  misc_RNA (1)...(19): siRNA sense strand
guccaagggcccucguuga

SEQ ID NO: 1161736 - RNA, 19 nt, Homo sapiens
  misc_RNA (1)...(19): siRNA sense strand
ggaguccgaguuccaagca

SEQ ID NO: 1161737 - RNA, 19 nt, Homo sapiens
  misc_RNA (1)...(19): siRNA sense strand
gcugccuccuccucuucua

SEQ ID NO: 1161738 - RNA, 19 nt, Homo sapiens
  misc_RNA (1)...(19): siRNA sense strand
gggugacaaucagaucaug

SEQ ID NO: 1161739 - RNA, 19 nt, Homo sapiens
  misc_RNA (1)...(19): siRNA sense strand
guuccaagcagcacucagu

SEQ ID NO: 1161740 - RNA, 19 nt, Homo sapiens
  misc_RNA (1)...(19): siRNA sense strand
ccuaugaggacuccagcaa

SEQ ID NO: 1161741 - RNA, 19 nt, Homo sapiens
  misc_RNA (1)...(19): siRNA sense strand
gcccugagcuggacuacuu

SEQ ID NO: 1161742 - RNA, 19 nt, Homo sapiens
  misc_RNA (1)...(19): siRNA sense strand
gcagcugccugugguguuu

SEQ ID NO: 1161743 - RNA, 19 nt, Homo sapiens
  misc_RNA (1)...(19): siRNA sense strand
caauacagauggcuucaag

SEQ ID NO: 1161744 - RNA, 19 nt, Homo sapiens
  misc_RNA (1)...(19): siRNA sense strand
gaggaaggaggguguguuu

SEQ ID NO: 1161745 - RNA, 19 nt, Homo sapiens
  misc_RNA (1)...(19): siRNA sense strand
ggccuggacucgcucauga

SEQ ID NO: 1161746 - RNA, 19 nt, Homo sapiens
  misc_RNA (1)...(19): siRNA sense strand
cgacuuggcugcugucaac

SEQ ID NO: 1161747 - RNA, 19 nt, Homo sapiens
  misc_RNA (1)...(19): siRNA sense strand
ggaagcacauuggcaaagu

SEQ ID NO: 1161748 - RNA, 19 nt, Homo sapiens
  misc_RNA (1)...(19): siRNA sense strand
gaacaugcccagccugaag

SEQ ID NO: 1161749 - RNA, 19 nt, Homo sapiens
  misc_RNA (1)...(19): siRNA sense strand
gggacaaccuggaguucuu

SEQ ID NO: 1161750 - RNA, 19 nt, Homo sapiens
  misc_RNA (1)...(19): siRNA sense strand
ggcagaagcuguacacacu

SEQ ID NO: 1161751 - RNA, 19 nt, Homo sapiens
  misc_RNA (1)...(19): siRNA sense strand
gagcguaucugugagaaac

SEQ ID NO: 1161752 - RNA, 19 nt, Homo sapiens
  misc_RNA (1)...(19): siRNA sense strand
gacgagagcaccuuugaug

SEQ ID NO: 1161753 - RNA, 19 nt, Homo sapiens
  misc_RNA (1)...(19): siRNA sense strand
ucacggacauggagcacaa

SEQ ID NO: 1161754 - RNA, 19 nt, Homo sapiens
  misc_RNA (1)...(19): siRNA sense strand
gagauggcuugcuggagaa

SEQ ID NO: 1161755 - RNA, 19 nt, Homo sapiens
  misc_RNA (1)...(19): siRNA sense strand
caugguggcugcccugaga

SEQ ID NO: 1161756 - RNA, 19 nt, Homo sapiens
  misc_RNA (1)...(19): siRNA sense strand
gagagcaccuuugaugaca

SEQ ID NO: 1161757 - RNA, 19 nt, Homo sapiens
  misc_RNA (1)...(19): siRNA sense strand
ggacagugcaucaaagaag

SEQ ID NO: 1161758 - RNA, 19 nt, Homo sapiens
  misc_RNA (1)...(19): siRNA sense strand
ugacaucguccauucguuu

SEQ ID NO: 1161759 - RNA, 19 nt, Homo sapiens
  misc_RNA (1)...(19): siRNA sense strand
ggacuacuuuguggucuuc

SEQ ID NO: 1161760 - RNA, 19 nt, Homo sapiens
  misc_RNA (1)...(19): siRNA sense strand
gcauggcuaucuuccugaa

SEQ ID NO: 1161761 - RNA, 19 nt, Homo sapiens
  misc_RNA (1)...(19): siRNA sense strand
aagccgagcugcaccauca

SEQ ID NO: 1161762 - RNA, 19 nt, Homo sapiens
  misc_RNA (1)...(19): siRNA sense strand
ccauggagcguaucuguga

SEQ ID NO: 1161763 - RNA, 19 nt, Homo sapiens
  misc_RNA (1)...(19): siRNA sense strand
gaagcacauuggcaaaguc

SEQ ID NO: 1161764 - RNA, 19 nt, Homo sapiens
  misc_RNA (1)...(19): siRNA sense strand
caacuacggcuuugccaau

SEQ ID NO: 1161765 - RNA, 19 nt, Homo sapiens
  misc_RNA (1)...(19): siRNA sense strand
agggagaccuggugaugaa

SEQ ID NO: 1161766 - RNA, 19 nt, Homo sapiens
  misc_RNA (1)...(19): siRNA sense strand
gguaugcgacgggaaagua

SEQ ID NO: 1161767 - RNA, 19 nt, Homo sapiens
  misc_RNA (1)...(19): siRNA sense strand
ccaaccggcucuccuucuu

SEQ ID NO: 1161768 - RNA, 19 nt, Homo sapiens
  misc_RNA (1)...(19): siRNA sense strand
gggagacgcugcucaucca

SEQ ID NO: 1161769 - RNA, 19 nt, Homo sapiens
  misc_RNA (1)...(19): siRNA sense strand
caacuuccgcgacaucaug

SEQ ID NO: 1161770 - RNA, 19 nt, Homo sapiens
  misc_RNA (1)...(19): siRNA sense strand
ggugagcccugugcuguuc

SEQ ID NO: 1161771 - RNA, 19 nt, Homo sapiens
  misc_RNA (1)...(19): siRNA sense strand
gcuuugugcuggcugagaa

SEQ ID NO: 1161772 - RNA, 19 nt, Homo sapiens
  misc_RNA (1)...(19): siRNA sense strand
gcaaauucgaccuuucuca

SEQ ID NO: 1161773 - RNA, 19 nt, Homo sapiens
  misc_RNA (1)...(19): siRNA sense strand
ggugugugcugcucuccaa

SEQ ID NO: 1161774 - RNA, 19 nt, Homo sapiens
  misc_RNA (1)...(19): siRNA sense strand
cuuccgagauuccauccua

SEQ ID NO: 1161775 - RNA, 19 nt, Homo sapiens
  misc_RNA (1)...(19): siRNA sense strand
gcaacucacgcuccggaaa

SEQ ID NO: 1161776 - RNA, 19 nt, Homo sapiens
  misc_RNA (1)...(19): siRNA sense strand
gccguggucuugagagaug

SEQ ID NO: 1161777 - RNA, 19 nt, Homo sapiens
  misc_RNA (1)...(19): siRNA sense strand
ugaagaacgugacauucca

SEQ ID NO: 1161778 - RNA, 19 nt, Homo sapiens
  misc_RNA (1)...(19): siRNA sense strand
ucuccgggcuccacacuga

SEQ ID NO: 1161779 - RNA, 19 nt, Homo sapiens
  misc_RNA (1)...(19): siRNA sense strand
gaacggcaaccugguagug

SEQ ID NO: 1161780 - RNA, 19 nt, Homo sapiens
  misc_RNA (1)...(19): siRNA sense strand
ggaaggaggguguguuugc

SEQ ID NO: 1161781 - RNA, 19 nt, Homo sapiens
  misc_RNA (1)...(19): siRNA sense strand
ggaggcaucaacccagauu

SEQ ID NO: 1161782 - RNA, 19 nt, Homo sapiens
  misc_RNA (1)...(19): siRNA sense strand
caaccuggccguggucuug

SEQ ID NO: 1161783 - RNA, 19 nt, Homo sapiens
  misc_RNA (1)...(19): siRNA sense strand
ggaggcugcuguggaagga

SEQ ID NO: 1161784 - RNA, 19 nt, Homo sapiens
  misc_RNA (1)...(19): siRNA sense strand
cgacuacggcccucauuuc

SEQ ID NO: 1161785 - RNA, 19 nt, Homo sapiens
  misc_RNA (1)...(19): siRNA sense strand
aggcugaaguuuacaagga

SEQ ID NO: 1161786 - RNA, 19 nt, Homo sapiens
  misc_RNA (1)...(19): siRNA sense strand
ugcaggagcucaagaaggu

SEQ ID NO: 1161787 - RNA, 19 nt, Homo sapiens
  misc_RNA (1)...(19): siRNA sense strand
gaggacgccuuccgcuaca

SEQ ID NO: 1161788 - RNA, 19 nt, Homo sapiens
  misc_RNA (1)...(19): siRNA sense strand
gcugaaggccaucaacugu

SEQ ID NO: 1161789 - RNA, 19 nt, Homo sapiens
  misc_RNA (1)...(19): siRNA sense strand
cuggaccgcuuccgagauu

SEQ ID NO: 1161790 - RNA, 19 nt, Homo sapiens
  misc_RNA (1)...(19): siRNA sense strand
ccagauaggccucauagac

SEQ ID NO: 1161791 - RNA, 19 nt, Homo sapiens
  misc_RNA (1)...(19): siRNA sense strand
ggcccaggcugaaguuuac

SEQ ID NO: 1161792 - RNA, 19 nt, Homo sapiens
  misc_RNA (1)...(19): siRNA sense strand
caacaccuccgugcaguuc

SEQ ID NO: 1161793 - RNA, 19 nt, Homo sapiens
  misc_RNA (1)...(19): siRNA sense strand
ccagguaugcgacgggaaa

SEQ ID NO: 1161794 - RNA, 19 nt, Homo sapiens
  misc_RNA (1)...(19): siRNA sense strand
cgaguacaaugucaacaac

SEQ ID NO: 1161795 - RNA, 19 nt, Homo sapiens
  misc_RNA (1)...(19): siRNA sense strand
guauggccuuccacuccua

SEQ ID NO: 1161796 - RNA, 19 nt, Homo sapiens
  misc_RNA (1)...(19): siRNA sense strand
gcacagacgagagcaccuu

SEQ ID NO: 1161797 - RNA, 19 nt, Homo sapiens
  misc_RNA (1)...(19): siRNA sense strand
ugagucauuugaauacauc

SEQ ID NO: 1161798 - RNA, 19 nt, Homo sapiens
  misc_RNA (1)...(19): siRNA sense strand
aggcugcuguggaaggaua

SEQ ID NO: 1161799 - RNA, 19 nt, Homo sapiens
  misc_RNA (1)...(19): siRNA sense strand
agacggaggccauaugcuu

SEQ ID NO: 1161800 - RNA, 19 nt, Homo sapiens
  misc_RNA (1)...(19): siRNA sense strand
cauccuggcugacgaagac

SEQ ID NO: 1161801 - RNA, 19 nt, Homo sapiens
  misc_RNA (1)...(19): siRNA sense strand
gcuccaacgugcacaucau

SEQ ID NO: 1161802 - RNA, 19 nt, Homo sapiens
  misc_RNA (1)...(19): siRNA sense strand
caucggcgguguggacaug

SEQ ID NO: 1161803 - RNA, 19 nt, Homo sapiens
  misc_RNA (1)...(19): siRNA sense strand
uggagcagcugaggaagga

SEQ ID NO: 1161804 - RNA, 19 nt, Homo sapiens
  misc_RNA (1)...(19): siRNA sense strand
cagacgagagcaccuuuga

SEQ ID NO: 1161805 - RNA, 19 nt, Homo sapiens
  misc_RNA (1)...(19): siRNA sense strand
gcucugggaugggcacaca

SEQ ID NO: 1161806 - RNA, 19 nt, Homo sapiens
  misc_RNA (1)...(19): siRNA sense strand
acagagcaacuacggcuuu

SEQ ID NO: 1161807 - RNA, 19 nt, Homo sapiens
  misc_RNA (1)...(19): siRNA sense strand
gcaaugcgggacagagcaa

SEQ ID NO: 1161808 - RNA, 19 nt, Homo sapiens
  misc_RNA (1)...(19): siRNA sense strand
cagaagcucguguugacuu

SEQ ID NO: 1161809 - RNA, 19 nt, Homo sapiens
  misc_RNA (1)...(19): siRNA sense strand
agagaacggcaaccuggua

SEQ ID NO: 1161810 - RNA, 19 nt, Homo sapiens
  misc_RNA (1)...(19): siRNA sense strand
ggacagccugcuagguaug

SEQ ID NO: 1161811 - RNA, 19 nt, Homo sapiens
  misc_RNA (1)...(19): siRNA sense strand
cagagcaacuacggcuuug

SEQ ID NO: 1161812 - RNA, 19 nt, Homo sapiens
  misc_RNA (1)...(19): siRNA sense strand
ugacugccauccagauagg

SEQ ID NO: 1161813 - RNA, 19 nt, Homo sapiens
  misc_RNA (1)...(19): siRNA sense strand
gcaccagcuucgccaacuc

SEQ ID NO: 1161814 - RNA, 19 nt, Homo sapiens
  misc_RNA (1)...(19): siRNA sense strand
gggaugugccuuccaacug

SEQ ID NO: 1161815 - RNA, 19 nt, Homo sapiens
  misc_RNA (1)...(19): siRNA sense strand
ccucagcucucagcaacau

SEQ ID NO: 1161816 - RNA, 19 nt, Homo sapiens
  misc_RNA (1)...(19): siRNA sense strand
acacugccguggagaacau

SEQ ID NO: 1161817 - RNA, 19 nt, Homo sapiens
  misc_RNA (1)...(19): siRNA sense strand
ccgagucuccugaccacua

SEQ ID NO: 1161818 - RNA, 19 nt, Homo sapiens
  misc_RNA (1)...(19): siRNA sense strand
guggucuucuccucuguga

SEQ ID NO: 1161819 - RNA, 19 nt, Homo sapiens
  misc_RNA (1)...(19): siRNA sense strand
ugaacuccuuggcggaaga

SEQ ID NO: 1161820 - RNA, 19 nt, Homo sapiens
  misc_RNA (1)...(19): siRNA sense strand
auacagauggcuucaagga

SEQ ID NO: 1161821 - RNA, 19 nt, Homo sapiens
  misc_RNA (1)...(19): siRNA sense strand
ugcuggaagucaccuauga

SEQ ID NO: 1161822 - RNA, 19 nt, Homo sapiens
  misc_RNA (1)...(19): siRNA sense strand
gcaggacaaggcccaagug

SEQ ID NO: 1161823 - RNA, 19 nt, Homo sapiens
  misc_RNA (1)...(19): siRNA sense strand
ccuucgaggugucagagaa

SEQ ID NO: 1161824 - RNA, 19 nt, Homo sapiens
  misc_RNA (1)...(19): siRNA sense strand
ggacaaccuggaguucuuc

SEQ ID NO: 1161825 - RNA, 19 nt, Homo sapiens
  misc_RNA (1)...(19): siRNA sense strand
gcuggaagucaccuaugaa

SEQ ID NO: 1161826 - RNA, 19 nt, Homo sapiens
  misc_RNA (1)...(19): siRNA sense strand
uguacacacugcaggacaa

SEQ ID NO: 1161827 - RNA, 19 nt, Homo sapiens
  misc_RNA (1)...(19): siRNA sense strand
caucguccauucguuugug

SEQ ID NO: 1161828 - RNA, 19 nt, Homo sapiens
  misc_RNA (1)...(19): siRNA sense strand
gugcagaagcucguguuga

SEQ ID NO: 1161829 - RNA, 19 nt, Homo sapiens
  misc_RNA (1)...(19): siRNA sense strand
uggcccaggcugaaguuua

SEQ ID NO: 1161830 - RNA, 19 nt, Homo sapiens
  misc_RNA (1)...(19): siRNA sense strand
caucaaagaagcccaucuc

SEQ ID NO: 1161831 - RNA, 19 nt, Homo sapiens
  misc_RNA (1)...(19): siRNA sense strand
ugcagaagcucguguugac

SEQ ID NO: 1161832 - RNA, 19 nt, Homo sapiens
  misc_RNA (1)...(19): siRNA sense strand
ggacgccuuccgcuacaug

SEQ ID NO: 1161833 - RNA, 19 nt, Homo sapiens
  misc_RNA (1)...(19): siRNA sense strand
ucugggaugugccuuccaa

SEQ ID NO: 1161834 - RNA, 19 nt, Homo sapiens
  misc_RNA (1)...(19): siRNA sense strand
acaccaugcugcagauguc

SEQ ID NO: 1161835 - RNA, 19 nt, Homo sapiens
  misc_RNA (1)...(19): siRNA sense strand
ccagauucacuccgaggaa

SEQ ID NO: 1161836 - RNA, 19 nt, Homo sapiens
  misc_RNA (1)...(19): siRNA sense strand
ggccaaacccaagcugaug

SEQ ID NO: 1161837 - RNA, 19 nt, Homo sapiens
  misc_RNA (1)...(19): siRNA sense strand
cuacuacgccucccucaac

SEQ ID NO: 1161838 - RNA, 19 nt, Homo sapiens
  misc_RNA (1)...(19): siRNA sense strand
ccgaguacaaugucaacaa

SEQ ID NO: 1161839 - RNA, 19 nt, Homo sapiens
  misc_RNA (1)...(19): siRNA sense strand
gacaucguccauucguuug

SEQ ID NO: 1161840 - RNA, 19 nt, Homo sapiens
  misc_RNA (1)...(19): siRNA sense strand
caacucacgcuccggaaac

SEQ ID NO: 1161841 - RNA, 19 nt, Homo sapiens
  misc_RNA (1)...(19): siRNA sense strand
caacagaaccaagaaauua

SEQ ID NO: 1161842 - RNA, 19 nt, Homo sapiens
  misc_RNA (1)...(19): siRNA sense strand
ggacaaugcugcuacucua

SEQ ID NO: 1161843 - RNA, 19 nt, Homo sapiens
  misc_RNA (1)...(19): siRNA sense strand
gagaaggaauguagcauga

SEQ ID NO: 1161844 - RNA, 19 nt, Homo sapiens
  misc_RNA (1)...(19): siRNA sense strand
agaaggaggugcugcauaa

SEQ ID NO: 1161845 - RNA, 19 nt, Homo sapiens
  misc_RNA (1)...(19): siRNA sense strand
ucaauggucuuguuuguga

SEQ ID NO: 1161846 - RNA, 19 nt, Homo sapiens
  misc_RNA (1)...(19): siRNA sense strand
gcaggaagcucagggcaaa

SEQ ID NO: 1161847 - RNA, 19 nt, Homo sapiens
  misc_RNA (1)...(19): siRNA sense strand
gcaaagcgguggccgagau

SEQ ID NO: 1161848 - RNA, 19 nt, Homo sapiens
  misc_RNA (1)...(19): siRNA sense strand
gcaugcagcuuaacuugga

SEQ ID NO: 1161849 - RNA, 19 nt, Homo sapiens
  misc_RNA (1)...(19): siRNA sense strand
gagaauaucagcagaggaa

SEQ ID NO: 1161850 - RNA, 19 nt, Homo sapiens
  misc_RNA (1)...(19): siRNA sense strand
gaaggaauguagcaugagu

SEQ ID NO: 1161851 - RNA, 19 nt, Homo sapiens
  misc_RNA (1)...(19): siRNA sense strand
gaauaucagcagaggaaua

SEQ ID NO: 1161852 - RNA, 19 nt, Homo sapiens
  misc_RNA (1)...(19): siRNA sense strand
uuguaaagcugacuaauga

SEQ ID NO: 1161853 - RNA, 19 nt, Homo sapiens
  misc_RNA (1)...(19): siRNA sense strand
gcaagagaaaucagaauug

SEQ ID NO: 1161854 - RNA, 19 nt, Homo sapiens
  misc_RNA (1)...(19): siRNA sense strand
caacaaggaguuaaccaaa

SEQ ID NO: 1161855 - RNA, 19 nt, Homo sapiens
  misc_RNA (1)...(19): siRNA sense strand
ggaguuaaccaaagagaga

SEQ ID NO: 1161856 - RNA, 19 nt, Homo sapiens
  misc_RNA (1)...(19): siRNA sense strand
ugacggaacuccugcuuca

SEQ ID NO: 1161857 - RNA, 19 nt, Homo sapiens
  misc_RNA (1)...(19): siRNA sense strand
cagagcaggugcacacauu

SEQ ID NO: 1161858 - RNA, 19 nt, Homo sapiens
  misc_RNA (1)...(19): siRNA sense strand
gcucaauggucuuguuugu

SEQ ID NO: 1161859 - RNA, 19 nt, Homo sapiens
  misc_RNA (1)...(19): siRNA sense strand
acaaggaguuaaccaaaga

SEQ ID NO: 1161860 - RNA, 19 nt, Homo sapiens
  misc_RNA (1)...(19): siRNA sense strand
caagagaaaucagaauugg

SEQ ID NO: 1161861 - RNA, 19 nt, Homo sapiens
  misc_RNA (1)...(19): siRNA sense strand
gaaacaacagaaccaagaa

SEQ ID NO: 1161862 - RNA, 19 nt, Homo sapiens
  misc_RNA (1)...(19): siRNA sense strand
agagggagcugggaaagaa

SEQ ID NO: 1161863 - RNA, 19 nt, Homo sapiens
  misc_RNA (1)...(19): siRNA sense strand
caaaagaaguuagagauga

SEQ ID NO: 1161864 - RNA, 19 nt, Homo sapiens
  misc_RNA (1)...(19): siRNA sense strand
cagcuuaacuuggaagaau

SEQ ID NO: 1161865 - RNA, 19 nt, Homo sapiens
  misc_RNA (1)...(19): siRNA sense strand
gcaguuacagguucacauu

SEQ ID NO: 1161866 - RNA, 19 nt, Homo sapiens
  misc_RNA (1)...(19): siRNA sense strand
gaaagaaggagagucugaa

SEQ ID NO: 1161867 - RNA, 19 nt, Homo sapiens
  misc_RNA (1)...(19): siRNA sense strand
ggagucgguuagacaacua

SEQ ID NO: 1161868 - RNA, 19 nt, Homo sapiens
  misc_RNA (1)...(19): siRNA sense strand
aaucagaauuggaagagaa

SEQ ID NO: 1161869 - RNA, 19 nt, Homo sapiens
  misc_RNA (1)...(19): siRNA sense strand
cugcagagcggauuuguaa

SEQ ID NO: 1161870 - RNA, 19 nt, Homo sapiens
  misc_RNA (1)...(19): siRNA sense strand
gcaaugaggaccugaagca

SEQ ID NO: 1161871 - RNA, 19 nt, Homo sapiens
  misc_RNA (1)...(19): siRNA sense strand
gaaucaugaugcugacaau

SEQ ID NO: 1161872 - RNA, 19 nt, Homo sapiens
  misc_RNA (1)...(19): siRNA sense strand
gagaaggaggugcugcaua

SEQ ID NO: 1161873 - RNA, 19 nt, Homo sapiens
  misc_RNA (1)...(19): siRNA sense strand
gaagcaagagaaaucagaa

SEQ ID NO: 1161874 - RNA, 19 nt, Homo sapiens
  misc_RNA (1)...(19): siRNA sense strand
gaaggagagucugaagauc

SEQ ID NO: 1161875 - RNA, 19 nt, Homo sapiens
  misc_RNA (1)...(19): siRNA sense strand
gcagaaagaaggagagucu

SEQ ID NO: 1161876 - RNA, 19 nt, Homo sapiens
  misc_RNA (1)...(19): siRNA sense strand
caaugucccuaaucucaug

SEQ ID NO: 1161877 - RNA, 19 nt, Homo sapiens
  misc_RNA (1)...(19): siRNA sense strand
gaccauagggauccucgua

SEQ ID NO: 1161878 - RNA, 19 nt, Homo sapiens
  misc_RNA (1)...(19): siRNA sense strand
gagaggagaaggaauguag

SEQ ID NO: 1161879 - RNA, 19 nt, Homo sapiens
  misc_RNA (1)...(19): siRNA sense strand
cuacaaauggagagagaua

SEQ ID NO: 1161880 - RNA, 19 nt, Homo sapiens
  misc_RNA (1)...(19): siRNA sense strand
caagaacacccaaagcaau

SEQ ID NO: 1161881 - RNA, 19 nt, Homo sapiens
  misc_RNA (1)...(19): siRNA sense strand
aagaaagaaugccaccaaa

SEQ ID NO: 1161882 - RNA, 19 nt, Homo sapiens
  misc_RNA (1)...(19): siRNA sense strand
ggagagacagacaccauug

SEQ ID NO: 1161883 - RNA, 19 nt, Homo sapiens
  misc_RNA (1)...(19): siRNA sense strand
gcagagcggauuuguaaag

SEQ ID NO: 1161884 - RNA, 19 nt, Homo sapiens
  misc_RNA (1)...(19): siRNA sense strand
aaccaagacuuucucauca

SEQ ID NO: 1161885 - RNA, 19 nt, Homo sapiens
  misc_RNA (1)...(19): siRNA sense strand
ggagaaggcagaccugaag

SEQ ID NO: 1161886 - RNA, 19 nt, Homo sapiens
  misc_RNA (1)...(19): siRNA sense strand
guaaagcugacuaaugaga

SEQ ID NO: 1161887 - RNA, 19 nt, Homo sapiens
  misc_RNA (1)...(19): siRNA sense strand
ugaaacaacagaaccaaga

SEQ ID NO: 1161888 - RNA, 19 nt, Homo sapiens
  misc_RNA (1)...(19): siRNA sense strand
agagaaaucagaauuggaa

SEQ ID NO: 1161889 - RNA, 19 nt, Homo sapiens
  misc_RNA (1)...(19): siRNA sense strand
agagaaagcugaguuacag

SEQ ID NO: 1161890 - RNA, 19 nt, Homo sapiens
  misc_RNA (1)...(19): siRNA sense strand
gcaguaacccugagacaac

SEQ ID NO: 1161891 - RNA, 19 nt, Homo sapiens
  misc_RNA (1)...(19): siRNA sense strand
ccagcuauguaacaaacaa

SEQ ID NO: 1161892 - RNA, 19 nt, Homo sapiens
  misc_RNA (1)...(19): siRNA sense strand
ccagaacccugcugaugag

SEQ ID NO: 1161893 - RNA, 19 nt, Homo sapiens
  misc_RNA (1)...(19): siRNA sense strand
gagacgagcuuggcugaac

SEQ ID NO: 1161894 - RNA, 19 nt, Homo sapiens
  misc_RNA (1)...(19): siRNA sense strand
gagcaggugcacacauuga

SEQ ID NO: 1161895 - RNA, 19 nt, Homo sapiens
  misc_RNA (1)...(19): siRNA sense strand
gaauagcccugguguuccu

SEQ ID NO: 1161896 - RNA, 19 nt, Homo sapiens
  misc_RNA (1)...(19): siRNA sense strand
agaagaaggcagacaggua

SEQ ID NO: 1161897 - RNA, 19 nt, Homo sapiens
  misc_RNA (1)...(19): siRNA sense strand
gaaauugaaacaacagaac

SEQ ID NO: 1161898 - RNA, 19 nt, Homo sapiens
  misc_RNA (1)...(19): siRNA sense strand
gaggguagaggaacuggaa

SEQ ID NO: 1161899 - RNA, 19 nt, Homo sapiens
  misc_RNA (1)...(19): siRNA sense strand
gggaggaggaggaggauga

SEQ ID NO: 1161900 - RNA, 19 nt, Homo sapiens
  misc_RNA (1)...(19): siRNA sense strand
ggaugcagcagaugucaga

SEQ ID NO: 1161901 - RNA, 19 nt, Homo sapiens
  misc_RNA (1)...(19): siRNA sense strand
aaagaaagaaugccaccaa

SEQ ID NO: 1161902 - RNA, 19 nt, Homo sapiens
  misc_RNA (1)...(19): siRNA sense strand
gaaggagaggguagaggaa

SEQ ID NO: 1161903 - RNA, 19 nt, Homo sapiens
  misc_RNA (1)...(19): siRNA sense strand
uuagacaacuacaaaugga

SEQ ID NO: 1161904 - RNA, 19 nt, Homo sapiens
  misc_RNA (1)...(19): siRNA sense strand
gaaaucagaauuggaagag

SEQ ID NO: 1161905 - RNA, 19 nt, Homo sapiens
  misc_RNA (1)...(19): siRNA sense strand
uggaugaaaccaagacuuu

SEQ ID NO: 1161906 - RNA, 19 nt, Homo sapiens
  misc_RNA (1)...(19): siRNA sense strand
uuaccgggcugacgagaau

SEQ ID NO: 1161907 - RNA, 19 nt, Homo sapiens
  misc_RNA (1)...(19): siRNA sense strand
gccaagaguugcaggaaac

SEQ ID NO: 1161908 - RNA, 19 nt, Homo sapiens
  misc_RNA (1)...(19): siRNA sense strand
ugagcgagcugaaggaaac

SEQ ID NO: 1161909 - RNA, 19 nt, Homo sapiens
  misc_RNA (1)...(19): siRNA sense strand
gagauaaauaugcggagaa

SEQ ID NO: 1161910 - RNA, 19 nt, Homo sapiens
  misc_RNA (1)...(19): siRNA sense strand
uaacuuggaagaauugcaa

SEQ ID NO: 1161911 - RNA, 19 nt, Homo sapiens
  misc_RNA (1)...(19): siRNA sense strand
ggaccugaagcaagagaaa

SEQ ID NO: 1161912 - RNA, 19 nt, Homo sapiens
  misc_RNA (1)...(19): siRNA sense strand
guaacaaacaaacaacuca

SEQ ID NO: 1161913 - RNA, 19 nt, Homo sapiens
  misc_RNA (1)...(19): siRNA sense strand
aaaccaagacuuucucauc

SEQ ID NO: 1161914 - RNA, 19 nt, Homo sapiens
  misc_RNA (1)...(19): siRNA sense strand
gggcugacgagaaugauga

SEQ ID NO: 1161915 - RNA, 19 nt, Homo sapiens
  misc_RNA (1)...(19): siRNA sense strand
ugagagaggagaaggaaug

SEQ ID NO: 1161916 - RNA, 19 nt, Homo sapiens
  misc_RNA (1)...(19): siRNA sense strand
gaacuccugcuucaacagu

SEQ ID NO: 1161917 - RNA, 19 nt, Homo sapiens
  misc_RNA (1)...(19): siRNA sense strand
acaaacaacucaauaucac

SEQ ID NO: 1161918 - RNA, 19 nt, Homo sapiens
  misc_RNA (1)...(19): siRNA sense strand
ggacuccagcuauguaaca

SEQ ID NO: 1161919 - RNA, 19 nt, Homo sapiens
  misc_RNA (1)...(19): siRNA sense strand
cggaucaguuggaagaaga

SEQ ID NO: 1161920 - RNA, 19 nt, Homo sapiens
  misc_RNA (1)...(19): siRNA sense strand
gaaagaaugccaccaaaag

SEQ ID NO: 1161921 - RNA, 19 nt, Homo sapiens
  misc_RNA (1)...(19): siRNA sense strand
caacagcucaauggucuug

SEQ ID NO: 1161922 - RNA, 19 nt, Homo sapiens
  misc_RNA (1)...(19): siRNA sense strand
gcagcugcuucgugagaug

SEQ ID NO: 1161923 - RNA, 19 nt, Homo sapiens
  misc_RNA (1)...(19): siRNA sense strand
aggaggagaugaaggugaa

SEQ ID NO: 1161924 - RNA, 19 nt, Homo sapiens
  misc_RNA (1)...(19): siRNA sense strand
aggaggugcugcauaauca

SEQ ID NO: 1161925 - RNA, 19 nt, Homo sapiens
  misc_RNA (1)...(19): siRNA sense strand
acaaauggagagagauaaa

SEQ ID NO: 1161926 - RNA, 19 nt, Homo sapiens
  misc_RNA (1)...(19): siRNA sense strand
ccauagggauccucguauc

SEQ ID NO: 1161927 - RNA, 19 nt, Homo sapiens
  misc_RNA (1)...(19): siRNA sense strand
accaagaaauuacggauca

SEQ ID NO: 1161928 - RNA, 19 nt, Homo sapiens
  misc_RNA (1)...(19): siRNA sense strand
aaacaacagaaccaagaaa

SEQ ID NO: 1161929 - RNA, 19 nt, Homo sapiens
  misc_RNA (1)...(19): siRNA sense strand
cggcaucucagaaucauga

SEQ ID NO: 1161930 - RNA, 19 nt, Homo sapiens
  misc_RNA (1)...(19): siRNA sense strand
cugcagagccgcuuuaugg

SEQ ID NO: 1161931 - RNA, 19 nt, Homo sapiens
  misc_RNA (1)...(19): siRNA sense strand
caaugcugcuacucuacaa

SEQ ID NO: 1161932 - RNA, 19 nt, Homo sapiens
  misc_RNA (1)...(19): siRNA sense strand
gguuagacaacuacaaaug

SEQ ID NO: 1161933 - RNA, 19 nt, Homo sapiens
  misc_RNA (1)...(19): siRNA sense strand
cugcuaaccugaaggaucu

SEQ ID NO: 1161934 - RNA, 19 nt, Homo sapiens
  misc_RNA (1)...(19): siRNA sense strand
gccaagaggcucaaagucu

SEQ ID NO: 1161935 - RNA, 19 nt, Homo sapiens
  misc_RNA (1)...(19): siRNA sense strand
ggcagaggaugcagcagau

SEQ ID NO: 1161936 - RNA, 19 nt, Homo sapiens
  misc_RNA (1)...(19): siRNA sense strand
augaggaccugaagcaaga

SEQ ID NO: 1161937 - RNA, 19 nt, Homo sapiens
  misc_RNA (1)...(19): siRNA sense strand
ccagccgccugcaguauuc

SEQ ID NO: 1161938 - RNA, 19 nt, Homo sapiens
  misc_RNA (1)...(19): siRNA sense strand
agaaauuacggaucaguug

SEQ ID NO: 1161939 - RNA, 19 nt, Homo sapiens
  misc_RNA (1)...(19): siRNA sense strand
uaaagcugacuaaugagaa

SEQ ID NO: 1161940 - RNA, 19 nt, Homo sapiens
  misc_RNA (1)...(19): siRNA sense strand
ugggcgagcugcaggagaa

SEQ ID NO: 1161941 - RNA, 19 nt, Homo sapiens
  misc_RNA (1)...(19): siRNA sense strand
gaacuuggcucugcuguuu

SEQ ID NO: 1161942 - RNA, 19 nt, Homo sapiens
  misc_RNA (1)...(19): siRNA sense strand
gagaagaucuggucuaauc

SEQ ID NO: 1161943 - RNA, 19 nt, Homo sapiens
  misc_RNA (1)...(19): siRNA sense strand
guaaugagauaguacaguu

SEQ ID NO: 1161944 - RNA, 19 nt, Homo sapiens
  misc_RNA (1)...(19): siRNA sense strand
ggaggagucugauguacuu

SEQ ID NO: 1161945 - RNA, 19 nt, Homo sapiens
  misc_RNA (1)...(19): siRNA sense strand
ggagaaauauaaagaugug

SEQ ID NO: 1161946 - RNA, 19 nt, Homo sapiens
  misc_RNA (1)...(19): siRNA sense strand
ccagacagcucccaaaucu

SEQ ID NO: 1161947 - RNA, 19 nt, Homo sapiens
  misc_RNA (1)...(19): siRNA sense strand
gaagaugcaccucuacuug

SEQ ID NO: 1161948 - RNA, 19 nt, Homo sapiens
  misc_RNA (1)...(19): siRNA sense strand
gaccaagagucgaagcuuu

SEQ ID NO: 1161949 - RNA, 19 nt, Homo sapiens
  misc_RNA (1)...(19): siRNA sense strand
gacccaaccugcugaagaa

SEQ ID NO: 1161950 - RNA, 19 nt, Homo sapiens
  misc_RNA (1)...(19): siRNA sense strand
gaaaagcucuaaaccagaa

SEQ ID NO: 1161951 - RNA, 19 nt, Homo sapiens
  misc_RNA (1)...(19): siRNA sense strand
ggagcugacuaaccaggua

SEQ ID NO: 1161952 - RNA, 19 nt, Homo sapiens
  misc_RNA (1)...(19): siRNA sense strand
gcagaaaugugcggcucua

SEQ ID NO: 1161953 - RNA, 19 nt, Homo sapiens
  misc_RNA (1)...(19): siRNA sense strand
gaacgggaguggccuuugg

SEQ ID NO: 1161954 - RNA, 19 nt, Homo sapiens
  misc_RNA (1)...(19): siRNA sense strand
cuacaucucugucuuugau

SEQ ID NO: 1161955 - RNA, 19 nt, Homo sapiens
  misc_RNA (1)...(19): siRNA sense strand
aaacagaggagaccaguga

SEQ ID NO: 1161956 - RNA, 19 nt, Homo sapiens
  misc_RNA (1)...(19): siRNA sense strand
uaaauacuguggagaugau

SEQ ID NO: 1161957 - RNA, 19 nt, Homo sapiens
  misc_RNA (1)...(19): siRNA sense strand
cuggagagcuggcacugua

SEQ ID NO: 1161958 - RNA, 19 nt, Homo sapiens
  misc_RNA (1)...(19): siRNA sense strand
cagcuucccugcucuugaa

SEQ ID NO: 1161959 - RNA, 19 nt, Homo sapiens
  misc_RNA (1)...(19): siRNA sense strand
gaugaaaugugggauugga

SEQ ID NO: 1161960 - RNA, 19 nt, Homo sapiens
  misc_RNA (1)...(19): siRNA sense strand
ucacauugauacuagagaa

SEQ ID NO: 1161961 - RNA, 19 nt, Homo sapiens
  misc_RNA (1)...(19): siRNA sense strand
ggaauccgcaagaaguuaa

SEQ ID NO: 1161962 - RNA, 19 nt, Homo sapiens
  misc_RNA (1)...(19): siRNA sense strand
ccacuggccuuccaacaca

SEQ ID NO: 1161963 - RNA, 19 nt, Homo sapiens
  misc_RNA (1)...(19): siRNA sense strand
uaucgauucugaccaggua

SEQ ID NO: 1161964 - RNA, 19 nt, Homo sapiens
  misc_RNA (1)...(19): siRNA sense strand
caagcuggcugccucuuca

SEQ ID NO: 1161965 - RNA, 19 nt, Homo sapiens
  misc_RNA (1)...(19): siRNA sense strand
gaagguguauaccggaaag

SEQ ID NO: 1161966 - RNA, 19 nt, Homo sapiens
  misc_RNA (1)...(19): siRNA sense strand
gucauuggaucaacccuuu

SEQ ID NO: 1161967 - RNA, 19 nt, Homo sapiens
  misc_RNA (1)...(19): siRNA sense strand
gcagcaaggacaacaaguu

SEQ ID NO: 1161968 - RNA, 19 nt, Homo sapiens
  misc_RNA (1)...(19): siRNA sense strand
ugacccagcuccucugugu

SEQ ID NO: 1161969 - RNA, 19 nt, Homo sapiens
  misc_RNA (1)...(19): siRNA sense strand
gaguucaucucccgaaagu

SEQ ID NO: 1161970 - RNA, 19 nt, Homo sapiens
  misc_RNA (1)...(19): siRNA sense strand
cugagaagaucuggucuaa

SEQ ID NO: 1161971 - RNA, 19 nt, Homo sapiens
  misc_RNA (1)...(19): siRNA sense strand
gcacugacgaggaugaaau

SEQ ID NO: 1161972 - RNA, 19 nt, Homo sapiens
  misc_RNA (1)...(19): siRNA sense strand
gaaaugugcggcucuaaac

SEQ ID NO: 1161973 - RNA, 19 nt, Homo sapiens
  misc_RNA (1)...(19): siRNA sense strand
cagauaagaaagagcauuu

SEQ ID NO: 1161974 - RNA, 19 nt, Homo sapiens
  misc_RNA (1)...(19): siRNA sense strand
ggucuuagagcaggcuuua

SEQ ID NO: 1161975 - RNA, 19 nt, Homo sapiens
  misc_RNA (1)...(19): siRNA sense strand
cauggaaguuuauauagag

SEQ ID NO: 1161976 - RNA, 19 nt, Homo sapiens
  misc_RNA (1)...(19): siRNA sense strand
cgucagaaguuuggcacua

SEQ ID NO: 1161977 - RNA, 19 nt, Homo sapiens
  misc_RNA (1)...(19): siRNA sense strand
ggacagugaagccagagaa

SEQ ID NO: 1161978 - RNA, 19 nt, Homo sapiens
  misc_RNA (1)...(19): siRNA sense strand
gccaguguaugaggaagua

SEQ ID NO: 1161979 - RNA, 19 nt, Homo sapiens
  misc_RNA (1)...(19): siRNA sense strand
uagcucagauugacuugga

SEQ ID NO: 1161980 - RNA, 19 nt, Homo sapiens
  misc_RNA (1)...(19): siRNA sense strand
acacgggaguggacaguga

SEQ ID NO: 1161981 - RNA, 19 nt, Homo sapiens
  misc_RNA (1)...(19): siRNA sense strand
agagagagcagagguguuu

SEQ ID NO: 1161982 - RNA, 19 nt, Homo sapiens
  misc_RNA (1)...(19): siRNA sense strand
ggagaucagugugguuucu

SEQ ID NO: 1161983 - RNA, 19 nt, Homo sapiens
  misc_RNA (1)...(19): siRNA sense strand
ugucuggaguaaugagaua

SEQ ID NO: 1161984 - RNA, 19 nt, Homo sapiens
  misc_RNA (1)...(19): siRNA sense strand
gagcaggcuuuacaauggu

SEQ ID NO: 1161985 - RNA, 19 nt, Homo sapiens
  misc_RNA (1)...(19): siRNA sense strand
acgagugucuggaguaaug

SEQ ID NO: 1161986 - RNA, 19 nt, Homo sapiens
  misc_RNA (1)...(19): siRNA sense strand
guacgaggagccaguguau

SEQ ID NO: 1161987 - RNA, 19 nt, Homo sapiens
  misc_RNA (1)...(19): siRNA sense strand
gggaauccgcaagaaguua

SEQ ID NO: 1161988 - RNA, 19 nt, Homo sapiens
  misc_RNA (1)...(19): siRNA sense strand
agagcaggcuuuacaaugg

SEQ ID NO: 1161989 - RNA, 19 nt, Homo sapiens
  misc_RNA (1)...(19): siRNA sense strand
cagcugggauggacuugug

SEQ ID NO: 1161990 - RNA, 19 nt, Homo sapiens
  misc_RNA (1)...(19): siRNA sense strand
cgagguggcugagaagauc

SEQ ID NO: 1161991 - RNA, 19 nt, Homo sapiens
  misc_RNA (1)...(19): siRNA sense strand
ggagucugauguacuuugg

SEQ ID NO: 1161992 - RNA, 19 nt, Homo sapiens
  misc_RNA (1)...(19): siRNA sense strand
uccauguucuuuccaauga

SEQ ID NO: 1161993 - RNA, 19 nt, Homo sapiens
  misc_RNA (1)...(19): siRNA sense strand
gaucccaaaucagauagug

SEQ ID NO: 1161994 - RNA, 19 nt, Homo sapiens
  misc_RNA (1)...(19): siRNA sense strand
ucuuugauaucgauucuga

SEQ ID NO: 1161995 - RNA, 19 nt, Homo sapiens
  misc_RNA (1)...(19): siRNA sense strand
gagcuggcacuguacaaga

SEQ ID NO: 1161996 - RNA, 19 nt, Homo sapiens
  misc_RNA (1)...(19): siRNA sense strand
gagcagucuucagcccuaa

SEQ ID NO: 1161997 - RNA, 19 nt, Homo sapiens
  misc_RNA (1)...(19): siRNA sense strand
cugaggagcugacuaacca

SEQ ID NO: 1161998 - RNA, 19 nt, Homo sapiens
  misc_RNA (1)...(19): siRNA sense strand
cuggagaccucaucaugga

SEQ ID NO: 1161999 - RNA, 19 nt, Homo sapiens
  misc_RNA (1)...(19): siRNA sense strand
gagauaguacaguuauuca

SEQ ID NO: 1162000 - RNA, 19 nt, Homo sapiens
  misc_RNA (1)...(19): siRNA sense strand
gccagaggguguucguguu

SEQ ID NO: 1162001 - RNA, 19 nt, Homo sapiens
  misc_RNA (1)...(19): siRNA sense strand
guggagaugaugccuaauu

SEQ ID NO: 1162002 - RNA, 19 nt, Homo sapiens
  misc_RNA (1)...(19): siRNA sense strand
guucugggaucuccaaggu

SEQ ID NO: 1162003 - RNA, 19 nt, Homo sapiens
  misc_RNA (1)...(19): siRNA sense strand
ggaccaccagcauccuuaa

SEQ ID NO: 1162004 - RNA, 19 nt, Homo sapiens
  misc_RNA (1)...(19): siRNA sense strand
gauaagaaagagcauuugg

SEQ ID NO: 1162005 - RNA, 19 nt, Homo sapiens
  misc_RNA (1)...(19): siRNA sense strand
gaaauguuugcaucggaaa

SEQ ID NO: 1162006 - RNA, 19 nt, Homo sapiens
  misc_RNA (1)...(19): siRNA sense strand
uggagaugaugccuaauuc

SEQ ID NO: 1162007 - RNA, 19 nt, Homo sapiens
  misc_RNA (1)...(19): siRNA sense strand
acgaggagccaguguauga

SEQ ID NO: 1162008 - RNA, 19 nt, Homo sapiens
  misc_RNA (1)...(19): siRNA sense strand
uuaaagcccagcacgauga

SEQ ID NO: 1162009 - RNA, 19 nt, Homo sapiens
  misc_RNA (1)...(19): siRNA sense strand
ccagguagcucagauugac

SEQ ID NO: 1162010 - RNA, 19 nt, Homo sapiens
  misc_RNA (1)...(19): siRNA sense strand
cagaggagaccagugauga

SEQ ID NO: 1162011 - RNA, 19 nt, Homo sapiens
  misc_RNA (1)...(19): siRNA sense strand
ggaguaaugagauaguaca

SEQ ID NO: 1162012 - RNA, 19 nt, Homo sapiens
  misc_RNA (1)...(19): siRNA sense strand
ucagaaguuuggcacuaug

SEQ ID NO: 1162013 - RNA, 19 nt, Homo sapiens
  misc_RNA (1)...(19): siRNA sense strand
cuucagcccuaaauacugu

SEQ ID NO: 1162014 - RNA, 19 nt, Homo sapiens
  misc_RNA (1)...(19): siRNA sense strand
gaggaugaaaugugggauu

SEQ ID NO: 1162015 - RNA, 19 nt, Homo sapiens
  misc_RNA (1)...(19): siRNA sense strand
cuguggagaugaugccuaa

SEQ ID NO: 1162016 - RNA, 19 nt, Homo sapiens
  misc_RNA (1)...(19): siRNA sense strand
gaccucaucauggaaguuu

SEQ ID NO: 1162017 - RNA, 19 nt, Homo sapiens
  misc_RNA (1)...(19): siRNA sense strand
gaccagguagcucagauug

SEQ ID NO: 1162018 - RNA, 19 nt, Homo sapiens
  misc_RNA (1)...(19): siRNA sense strand
ucuaucgggugcagaaaug

SEQ ID NO: 1162019 - RNA, 19 nt, Homo sapiens
  misc_RNA (1)...(19): siRNA sense strand
cuggagaaauauaaagaug

SEQ ID NO: 1162020 - RNA, 19 nt, Homo sapiens
  misc_RNA (1)...(19): siRNA sense strand
gaccucauuucacccuaug

SEQ ID NO: 1162021 - RNA, 19 nt, Homo sapiens
  misc_RNA (1)...(19): siRNA sense strand
gggcuucacauugauacua

SEQ ID NO: 1162022 - RNA, 19 nt, Homo sapiens
  misc_RNA (1)...(19): siRNA sense strand
acagguauccgacgugaga

SEQ ID NO: 1162023 - RNA, 19 nt, Homo sapiens
  misc_RNA (1)...(19): siRNA sense strand
acgaggaguugaagcaguu

SEQ ID NO: 1162024 - RNA, 19 nt, Homo sapiens
  misc_RNA (1)...(19): siRNA sense strand
agaaaugugcggcucuaaa

SEQ ID NO: 1162025 - RNA, 19 nt, Homo sapiens
  misc_RNA (1)...(19): siRNA sense strand
ggugacagguuccccuuuu

SEQ ID NO: 1162026 - RNA, 19 nt, Homo sapiens
  misc_RNA (1)...(19): siRNA sense strand
ucagggaaacuaugucuuc

SEQ ID NO: 1162027 - RNA, 19 nt, Homo sapiens
  misc_RNA (1)...(19): siRNA sense strand
ccuaaauacuguggagaug

SEQ ID NO: 1162028 - RNA, 19 nt, Homo sapiens
  misc_RNA (1)...(19): siRNA sense strand
gucagaaguuuggcacuau

SEQ ID NO: 1162029 - RNA, 19 nt, Homo sapiens
  misc_RNA (1)...(19): siRNA sense strand
agaaucagcgccuggagaa

SEQ ID NO: 1162030 - RNA, 19 nt, Homo sapiens
  misc_RNA (1)...(19): siRNA sense strand
ggagcugcguggacacaag

SEQ ID NO: 1162031 - RNA, 19 nt, Homo sapiens
  misc_RNA (1)...(19): siRNA sense strand
cagcaaggacaacaaguuc

SEQ ID NO: 1162032 - RNA, 19 nt, Homo sapiens
  misc_RNA (1)...(19): siRNA sense strand
uaugccagcuucuccuuca

SEQ ID NO: 1162033 - RNA, 19 nt, Homo sapiens
  misc_RNA (1)...(19): siRNA sense strand
gcaccggaaacgcauucua

SEQ ID NO: 1162034 - RNA, 19 nt, Homo sapiens
  misc_RNA (1)...(19): siRNA sense strand
gagaugaugccuaauucca

SEQ ID NO: 1162035 - RNA, 19 nt, Homo sapiens
  misc_RNA (1)...(19): siRNA sense strand
gcagucccgucagcaacaa

SEQ ID NO: 1162036 - RNA, 19 nt, Homo sapiens
  misc_RNA (1)...(19): siRNA sense strand
ccaaccugcugaagaacau

SEQ ID NO: 1162037 - RNA, 19 nt, Homo sapiens
  misc_RNA (1)...(19): siRNA sense strand
cggugcaccuggagcagua

SEQ ID NO: 1162038 - RNA, 19 nt, Homo sapiens
  misc_RNA (1)...(19): siRNA sense strand
caggagaucagugugguuu

SEQ ID NO: 1162039 - RNA, 19 nt, Homo sapiens
  misc_RNA (1)...(19): siRNA sense strand
uagagcaggcuuuacaaug

SEQ ID NO: 1162040 - RNA, 19 nt, Homo sapiens
  misc_RNA (1)...(19): siRNA sense strand
ggaagguguauaccggaaa

SEQ ID NO: 1162041 - RNA, 19 nt, Homo sapiens
  misc_RNA (1)...(19): siRNA sense strand
gaacuuugcucgaaggaau

SEQ ID NO: 1162042 - RNA, 19 nt, Homo sapiens
  misc_RNA (1)...(19): siRNA sense strand
uagaagaccugaauucaug

SEQ ID NO: 1162043 - RNA, 19 nt, Homo sapiens
  misc_RNA (1)...(19): siRNA sense strand
gaagaaacgacuacagaaa

SEQ ID NO: 1162044 - RNA, 19 nt, Homo sapiens
  misc_RNA (1)...(19): siRNA sense strand
gcaaaguuauucuaccuau

SEQ ID NO: 1162045 - RNA, 19 nt, Homo sapiens
  misc_RNA (1)...(19): siRNA sense strand
gaugagcagucaaauuaug

SEQ ID NO: 1162046 - RNA, 19 nt, Homo sapiens
  misc_RNA (1)...(19): siRNA sense strand
cagaacagaugcugauuca

SEQ ID NO: 1162047 - RNA, 19 nt, Homo sapiens
  misc_RNA (1)...(19): siRNA sense strand
gcaacagugucauuugaug

SEQ ID NO: 1162048 - RNA, 19 nt, Homo sapiens
  misc_RNA (1)...(19): siRNA sense strand
caaauaagaagaccggaaa

SEQ ID NO: 1162049 - RNA, 19 nt, Homo sapiens
  misc_RNA (1)...(19): siRNA sense strand
gauaacaacacaaucuuug

SEQ ID NO: 1162050 - RNA, 19 nt, Homo sapiens
  misc_RNA (1)...(19): siRNA sense strand
ggacaagcaucacaaagcu

SEQ ID NO: 1162051 - RNA, 19 nt, Homo sapiens
  misc_RNA (1)...(19): siRNA sense strand
gauggaagagguccuauga

SEQ ID NO: 1162052 - RNA, 19 nt, Homo sapiens
  misc_RNA (1)...(19): siRNA sense strand
ggaagaaacgacuacagaa

SEQ ID NO: 1162053 - RNA, 19 nt, Homo sapiens
  misc_RNA (1)...(19): siRNA sense strand
ggacagaggaggcggcuau

SEQ ID NO: 1162054 - RNA, 19 nt, Homo sapiens
  misc_RNA (1)...(19): siRNA sense strand
augaugagcagucaaauua

SEQ ID NO: 1162055 - RNA, 19 nt, Homo sapiens
  misc_RNA (1)...(19): siRNA sense strand
acaaagcuauucuggcuau

SEQ ID NO: 1162056 - RNA, 19 nt, Homo sapiens
  misc_RNA (1)...(19): siRNA sense strand
agaaacgacuacagaaaug

SEQ ID NO: 1162057 - RNA, 19 nt, Homo sapiens
  misc_RNA (1)...(19): siRNA sense strand
gccauugacugguuugaug

SEQ ID NO: 1162058 - RNA, 19 nt, Homo sapiens
  misc_RNA (1)...(19): siRNA sense strand
aaacgacugauuccucuua

SEQ ID NO: 1162059 - RNA, 19 nt, Homo sapiens
  misc_RNA (1)...(19): siRNA sense strand
gggauuggguuugcccuaa

SEQ ID NO: 1162060 - RNA, 19 nt, Homo sapiens
  misc_RNA (1)...(19): siRNA sense strand
caagaugaccgucgugaug

SEQ ID NO: 1162061 - RNA, 19 nt, Homo sapiens
  misc_RNA (1)...(19): siRNA sense strand
gccagcaaccauauaauaa

SEQ ID NO: 1162062 - RNA, 19 nt, Homo sapiens
  misc_RNA (1)...(19): siRNA sense strand
caugauuccuauagucaaa

SEQ ID NO: 1162063 - RNA, 19 nt, Homo sapiens
  misc_RNA (1)...(19): siRNA sense strand
gagcagcaaaguuauucua

SEQ ID NO: 1162064 - RNA, 19 nt, Homo sapiens
  misc_RNA (1)...(19): siRNA sense strand
aauaugaacuuugcucgaa

SEQ ID NO: 1162065 - RNA, 19 nt, Homo sapiens
  misc_RNA (1)...(19): siRNA sense strand
uggaagagguccuaugaca

SEQ ID NO: 1162066 - RNA, 19 nt, Homo sapiens
  misc_RNA (1)...(19): siRNA sense strand
gcaguccuaucauucacaa

SEQ ID NO: 1162067 - RNA, 19 nt, Homo sapiens
  misc_RNA (1)...(19): siRNA sense strand
ugaccgcgguggcuucaaa

SEQ ID NO: 1162068 - RNA, 19 nt, Homo sapiens
  misc_RNA (1)...(19): siRNA sense strand
gcggaaauaugaacuuugc

SEQ ID NO: 1162069 - RNA, 19 nt, Homo sapiens
  misc_RNA (1)...(19): siRNA sense strand
gggagggugugucuacaga

SEQ ID NO: 1162070 - RNA, 19 nt, Homo sapiens
  misc_RNA (1)...(19): siRNA sense strand
gaaacgacuacagaaauga

SEQ ID NO: 1162071 - RNA, 19 nt, Homo sapiens
  misc_RNA (1)...(19): siRNA sense strand
caacaucaaggcucauaug

SEQ ID NO: 1162072 - RNA, 19 nt, Homo sapiens
  misc_RNA (1)...(19): siRNA sense strand
gcgaggccguggaggauau

SEQ ID NO: 1162073 - RNA, 19 nt, Homo sapiens
  misc_RNA (1)...(19): siRNA sense strand
gcagucaggcuaugaucaa

SEQ ID NO: 1162074 - RNA, 19 nt, Homo sapiens
  misc_RNA (1)...(19): siRNA sense strand
gaggagaucgaggagguua

SEQ ID NO: 1162075 - RNA, 19 nt, Homo sapiens
  misc_RNA (1)...(19): siRNA sense strand
gaggagaucgaggagguua

SEQ ID NO: 1162076 - RNA, 19 nt, Homo sapiens
  misc_RNA (1)...(19): siRNA sense strand
gagcucauauagccagcaa

SEQ ID NO: 1162077 - RNA, 19 nt, Homo sapiens
  misc_RNA (1)...(19): siRNA sense strand
caaaguuauucuaccuaug

SEQ ID NO: 1162078 - RNA, 19 nt, Homo sapiens
  misc_RNA (1)...(19): siRNA sense strand
ggaggcaacagugucauuu

SEQ ID NO: 1162079 - RNA, 19 nt, Homo sapiens
  misc_RNA (1)...(19): siRNA sense strand
gcagucaaauuaugaucag

SEQ ID NO: 1162080 - RNA, 19 nt, Homo sapiens
  misc_RNA (1)...(19): siRNA sense strand
ccaaggcuauggacaagca

SEQ ID NO: 1162081 - RNA, 19 nt, Homo sapiens
  misc_RNA (1)...(19): siRNA sense strand
cauauagccagcaaccaua

SEQ ID NO: 1162082 - RNA, 19 nt, Homo sapiens
  misc_RNA (1)...(19): siRNA sense strand
agaccgagguggaggcuau

SEQ ID NO: 1162083 - RNA, 19 nt, Homo sapiens
  misc_RNA (1)...(19): siRNA sense strand
aggcaacagugucauuuga

SEQ ID NO: 1162084 - RNA, 19 nt, Homo sapiens
  misc_RNA (1)...(19): siRNA sense strand
gagggugugucuacagauc

SEQ ID NO: 1162085 - RNA, 19 nt, Homo sapiens
  misc_RNA (1)...(19): siRNA sense strand
ucaacaagauucauaugac

SEQ ID NO: 1162086 - RNA, 19 nt, Homo sapiens
  misc_RNA (1)...(19): siRNA sense strand
gccagacuauggucaacaa

SEQ ID NO: 1162087 - RNA, 19 nt, Homo sapiens
  misc_RNA (1)...(19): siRNA sense strand
agacuauggucaacaagau

SEQ ID NO: 1162088 - RNA, 19 nt, Homo sapiens
  misc_RNA (1)...(19): siRNA sense strand
ccgaggagguggcuaugga

SEQ ID NO: 1162089 - RNA, 19 nt, Homo sapiens
  misc_RNA (1)...(19): siRNA sense strand
ggauuggguuugcccuaau

SEQ ID NO: 1162090 - RNA, 19 nt, Homo sapiens
  misc_RNA (1)...(19): siRNA sense strand
gcagcaugauuccuauagu

SEQ ID NO: 1162091 - RNA, 19 nt, Homo sapiens
  misc_RNA (1)...(19): siRNA sense strand
cauaugaugagcagucaaa

SEQ ID NO: 1162092 - RNA, 19 nt, Homo sapiens
  misc_RNA (1)...(19): siRNA sense strand
cagcaugauuccuauaguc

SEQ ID NO: 1162093 - RNA, 19 nt, Homo sapiens
  misc_RNA (1)...(19): siRNA sense strand
gcuaugggcaaacgacuga

SEQ ID NO: 1162094 - RNA, 19 nt, Homo sapiens
  misc_RNA (1)...(19): siRNA sense strand
agaccgagguggcuaugga

SEQ ID NO: 1162095 - RNA, 19 nt, Homo sapiens
  misc_RNA (1)...(19): siRNA sense strand
cagcuaaggcagccauuga

SEQ ID NO: 1162096 - RNA, 19 nt, Homo sapiens
  misc_RNA (1)...(19): siRNA sense strand
aaccagcaguccuaucauu

SEQ ID NO: 1162097 - RNA, 19 nt, Homo sapiens
  misc_RNA (1)...(19): siRNA sense strand
agaauuccauggcaacauc

SEQ ID NO: 1162098 - RNA, 19 nt, Homo sapiens
  misc_RNA (1)...(19): siRNA sense strand
ggggugagcagcaaaguua

SEQ ID NO: 1162099 - RNA, 19 nt, Homo sapiens
  misc_RNA (1)...(19): siRNA sense strand
gggaguucuuuaaacaaau

SEQ ID NO: 1162100 - RNA, 19 nt, Homo sapiens
  misc_RNA (1)...(19): siRNA sense strand
agaccgaaguggaggcuau

SEQ ID NO: 1162101 - RNA, 19 nt, Homo sapiens
  misc_RNA (1)...(19): siRNA sense strand
ggcaacaucauuaaagugu

SEQ ID NO: 1162102 - RNA, 19 nt, Homo sapiens
  misc_RNA (1)...(19): siRNA sense strand
caaaagcagagcucauaua

SEQ ID NO: 1162103 - RNA, 19 nt, Homo sapiens
  misc_RNA (1)...(19): siRNA sense strand
aagaaacgacuacagaaau

SEQ ID NO: 1162104 - RNA, 19 nt, Homo sapiens
  misc_RNA (1)...(19): siRNA sense strand
gucaacaagauucauauga

SEQ ID NO: 1162105 - RNA, 19 nt, Homo sapiens
  misc_RNA (1)...(19): siRNA sense strand
gcgcaaccgaccauacuga

SEQ ID NO: 1162106 - RNA, 19 nt, Homo sapiens
  misc_RNA (1)...(19): siRNA sense strand
ggagaucgaggagguuaug

SEQ ID NO: 1162107 - RNA, 19 nt, Homo sapiens
  misc_RNA (1)...(19): siRNA sense strand
ggggaguucuuuaaacaaa

SEQ ID NO: 1162108 - RNA, 19 nt, Homo sapiens
  misc_RNA (1)...(19): siRNA sense strand
cgacugauuccucuuaugg

SEQ ID NO: 1162109 - RNA, 19 nt, Homo sapiens
  misc_RNA (1)...(19): siRNA sense strand
cagcaaaguuauucuaccu

SEQ ID NO: 1162110 - RNA, 19 nt, Homo sapiens
  misc_RNA (1)...(19): siRNA sense strand
agccagcaaccauauaaua

SEQ ID NO: 1162111 - RNA, 19 nt, Homo sapiens
  misc_RNA (1)...(19): siRNA sense strand
guuauucuaccuauggaaa

SEQ ID NO: 1162112 - RNA, 19 nt, Homo sapiens
  misc_RNA (1)...(19): siRNA sense strand
ucacaguccuauggugguu

SEQ ID NO: 1162113 - RNA, 19 nt, Homo sapiens
  misc_RNA (1)...(19): siRNA sense strand
gaggcaacagugucauuug

SEQ ID NO: 1162114 - RNA, 19 nt, Homo sapiens
  misc_RNA (1)...(19): siRNA sense strand
ggugagcagcaaaguuauu

SEQ ID NO: 1162115 - RNA, 19 nt, Homo sapiens
  misc_RNA (1)...(19): siRNA sense strand
gaccagcagucaggcuaug

SEQ ID NO: 1162116 - RNA, 19 nt, Homo sapiens
  misc_RNA (1)...(19): siRNA sense strand
ccuaugaccagccagacua

SEQ ID NO: 1162117 - RNA, 19 nt, Homo sapiens
  misc_RNA (1)...(19): siRNA sense strand
uaugaugagcagucaaauu

SEQ ID NO: 1162118 - RNA, 19 nt, Homo sapiens
  misc_RNA (1)...(19): siRNA sense strand
caggagugguggcggcuau

SEQ ID NO: 1162119 - RNA, 19 nt, Homo sapiens
  misc_RNA (1)...(19): siRNA sense strand
cagaggaggcggcuaugga

SEQ ID NO: 1162120 - RNA, 19 nt, Homo sapiens
  misc_RNA (1)...(19): siRNA sense strand
uagaggucguggaggcuuu

SEQ ID NO: 1162121 - RNA, 19 nt, Homo sapiens
  misc_RNA (1)...(19): siRNA sense strand
aaaguuauucuaccuaugg

SEQ ID NO: 1162122 - RNA, 19 nt, Homo sapiens
  misc_RNA (1)...(19): siRNA sense strand
gucgugaugugaguaggua

SEQ ID NO: 1162123 - RNA, 19 nt, Homo sapiens
  misc_RNA (1)...(19): siRNA sense strand
ucagcagcaugauuccuau

SEQ ID NO: 1162124 - RNA, 19 nt, Homo sapiens
  misc_RNA (1)...(19): siRNA sense strand
aacauggaaucaucaggaa

SEQ ID NO: 1162125 - RNA, 19 nt, Homo sapiens
  misc_RNA (1)...(19): siRNA sense strand
cggcuaugguggagacaga

SEQ ID NO: 1162126 - RNA, 19 nt, Homo sapiens
  misc_RNA (1)...(19): siRNA sense strand
cggcuaugguggagacaga

SEQ ID NO: 1162127 - RNA, 19 nt, Homo sapiens
  misc_RNA (1)...(19): siRNA sense strand
uuccauggcaacaucauua

SEQ ID NO: 1162128 - RNA, 19 nt, Homo sapiens
  misc_RNA (1)...(19): siRNA sense strand
aggcagccauugacugguu

SEQ ID NO: 1162129 - RNA, 19 nt, Homo sapiens
  misc_RNA (1)...(19): siRNA sense strand
ggucaacaagauucauaug

SEQ ID NO: 1162130 - RNA, 19 nt, Homo sapiens
  misc_RNA (1)...(19): siRNA sense strand
acaagcaucacaaagcuau

SEQ ID NO: 1162131 - RNA, 19 nt, Homo sapiens
  misc_RNA (1)...(19): siRNA sense strand
ggaaaaccaaugauaaauc

SEQ ID NO: 1162132 - RNA, 19 nt, Homo sapiens
  misc_RNA (1)...(19): siRNA sense strand
gggugugucuacagaucaa

SEQ ID NO: 1162133 - RNA, 19 nt, Homo sapiens
  misc_RNA (1)...(19): siRNA sense strand
ccagcaguccuaucauuca

SEQ ID NO: 1162134 - RNA, 19 nt, Homo sapiens
  misc_RNA (1)...(19): siRNA sense strand
gaucagcgcaaccgaccau

SEQ ID NO: 1162135 - RNA, 19 nt, Homo sapiens
  misc_RNA (1)...(19): siRNA sense strand
aggaagaaacgacuacaga

SEQ ID NO: 1162136 - RNA, 19 nt, Homo sapiens
  misc_RNA (1)...(19): siRNA sense strand
gacagaacuacagcgguua

SEQ ID NO: 1162137 - RNA, 19 nt, Homo sapiens
  misc_RNA (1)...(19): siRNA sense strand
ccacuagaagaccugaauu

SEQ ID NO: 1162138 - RNA, 19 nt, Homo sapiens
  misc_RNA (1)...(19): siRNA sense strand
ggcagccauugacugguuu

SEQ ID NO: 1162139 - RNA, 19 nt, Homo sapiens
  misc_RNA (1)...(19): siRNA sense strand
cagacaaggacacaggaaa

SEQ ID NO: 1162140 - RNA, 19 nt, Homo sapiens
  misc_RNA (1)...(19): siRNA sense strand
ccagaacagaugcugauuc

SEQ ID NO: 1162141 - RNA, 19 nt, Homo sapiens
  misc_RNA (1)...(19): siRNA sense strand
gaacuuugcucgaaggaau

SEQ ID NO: 1162142 - RNA, 19 nt, Homo sapiens
  misc_RNA (1)...(19): siRNA sense strand
uagaagaccugaauucaug

SEQ ID NO: 1162143 - RNA, 19 nt, Homo sapiens
  misc_RNA (1)...(19): siRNA sense strand
gaagaaacgacuacagaaa

SEQ ID NO: 1162144 - RNA, 19 nt, Homo sapiens
  misc_RNA (1)...(19): siRNA sense strand
gcaaaguuauucuaccuau

SEQ ID NO: 1162145 - RNA, 19 nt, Homo sapiens
  misc_RNA (1)...(19): siRNA sense strand
gaugagcagucaaauuaug

SEQ ID NO: 1162146 - RNA, 19 nt, Homo sapiens
  misc_RNA (1)...(19): siRNA sense strand
cagaacagaugcugauuca

SEQ ID NO: 1162147 - RNA, 19 nt, Homo sapiens
  misc_RNA (1)...(19): siRNA sense strand
gcaacagugucauuugaug

SEQ ID NO: 1162148 - RNA, 19 nt, Homo sapiens
  misc_RNA (1)...(19): siRNA sense strand
caaauaagaagaccggaaa

SEQ ID NO: 1162149 - RNA, 19 nt, Homo sapiens
  misc_RNA (1)...(19): siRNA sense strand
gauaacaacacaaucuuug

SEQ ID NO: 1162150 - RNA, 19 nt, Homo sapiens
  misc_RNA (1)...(19): siRNA sense strand
ggacaagcaucacaaagcu

SEQ ID NO: 1162151 - RNA, 19 nt, Homo sapiens
  misc_RNA (1)...(19): siRNA sense strand
gauggaagagguccuauga

SEQ ID NO: 1162152 - RNA, 19 nt, Homo sapiens
  misc_RNA (1)...(19): siRNA sense strand
ggaagaaacgacuacagaa

SEQ ID NO: 1162153 - RNA, 19 nt, Homo sapiens
  misc_RNA (1)...(19): siRNA sense strand
ggacagaggaggcggcuau

SEQ ID NO: 1162154 - RNA, 19 nt, Homo sapiens
  misc_RNA (1)...(19): siRNA sense strand
augaugagcagucaaauua

SEQ ID NO: 1162155 - RNA, 19 nt, Homo sapiens
  misc_RNA (1)...(19): siRNA sense strand
acaaagcuauucuggcuau

SEQ ID NO: 1162156 - RNA, 19 nt, Homo sapiens
  misc_RNA (1)...(19): siRNA sense strand
agaaacgacuacagaaaug

SEQ ID NO: 1162157 - RNA, 19 nt, Homo sapiens
  misc_RNA (1)...(19): siRNA sense strand
gccauugacugguuugaug

SEQ ID NO: 1162158 - RNA, 19 nt, Homo sapiens
  misc_RNA (1)...(19): siRNA sense strand
aaacgacugauuccucuua

SEQ ID NO: 1162159 - RNA, 19 nt, Homo sapiens
  misc_RNA (1)...(19): siRNA sense strand
gggauuggguuugcccuaa

SEQ ID NO: 1162160 - RNA, 19 nt, Homo sapiens
  misc_RNA (1)...(19): siRNA sense strand
caagaugaccgucgugaug

SEQ ID NO: 1162161 - RNA, 19 nt, Homo sapiens
  misc_RNA (1)...(19): siRNA sense strand
gccagcaaccauauaauaa

SEQ ID NO: 1162162 - RNA, 19 nt, Homo sapiens
  misc_RNA (1)...(19): siRNA sense strand
caugauuccuauagucaaa

SEQ ID NO: 1162163 - RNA, 19 nt, Homo sapiens
  misc_RNA (1)...(19): siRNA sense strand
gagcagcaaaguuauucua

SEQ ID NO: 1162164 - RNA, 19 nt, Homo sapiens
  misc_RNA (1)...(19): siRNA sense strand
aauaugaacuuugcucgaa

SEQ ID NO: 1162165 - RNA, 19 nt, Homo sapiens
  misc_RNA (1)...(19): siRNA sense strand
uggaagagguccuaugaca

SEQ ID NO: 1162166 - RNA, 19 nt, Homo sapiens
  misc_RNA (1)...(19): siRNA sense strand
gcaguccuaucauucacaa

SEQ ID NO: 1162167 - RNA, 19 nt, Homo sapiens
  misc_RNA (1)...(19): siRNA sense strand
ugaccgcgguggcuucaaa

SEQ ID NO: 1162168 - RNA, 19 nt, Homo sapiens
  misc_RNA (1)...(19): siRNA sense strand
gcggaaauaugaacuuugc

SEQ ID NO: 1162169 - RNA, 19 nt, Homo sapiens
  misc_RNA (1)...(19): siRNA sense strand
gggagggugugucuacaga

SEQ ID NO: 1162170 - RNA, 19 nt, Homo sapiens
  misc_RNA (1)...(19): siRNA sense strand
gaaacgacuacagaaauga

SEQ ID NO: 1162171 - RNA, 19 nt, Homo sapiens
  misc_RNA (1)...(19): siRNA sense strand
caacaucaaggcucauaug

SEQ ID NO: 1162172 - RNA, 19 nt, Homo sapiens
  misc_RNA (1)...(19): siRNA sense strand
gcgaggccguggaggauau

SEQ ID NO: 1162173 - RNA, 19 nt, Homo sapiens
  misc_RNA (1)...(19): siRNA sense strand
gcagucaggcuaugaucaa

SEQ ID NO: 1162174 - RNA, 19 nt, Homo sapiens
  misc_RNA (1)...(19): siRNA sense strand
gaggagaucgaggagguua

SEQ ID NO: 1162175 - RNA, 19 nt, Homo sapiens
  misc_RNA (1)...(19): siRNA sense strand
gaggagaucgaggagguua

SEQ ID NO: 1162176 - RNA, 19 nt, Homo sapiens
  misc_RNA (1)...(19): siRNA sense strand
gagcucauauagccagcaa

SEQ ID NO: 1162177 - RNA, 19 nt, Homo sapiens
  misc_RNA (1)...(19): siRNA sense strand
caaaguuauucuaccuaug

SEQ ID NO: 1162178 - RNA, 19 nt, Homo sapiens
  misc_RNA (1)...(19): siRNA sense strand
ggaggcaacagugucauuu

SEQ ID NO: 1162179 - RNA, 19 nt, Homo sapiens
  misc_RNA (1)...(19): siRNA sense strand
gcagucaaauuaugaucag

SEQ ID NO: 1162180 - RNA, 19 nt, Homo sapiens
  misc_RNA (1)...(19): siRNA sense strand
ccaaggcuauggacaagca

SEQ ID NO: 1162181 - RNA, 19 nt, Homo sapiens
  misc_RNA (1)...(19): siRNA sense strand
cauauagccagcaaccaua

SEQ ID NO: 1162182 - RNA, 19 nt, Homo sapiens
  misc_RNA (1)...(19): siRNA sense strand
agaccgagguggaggcuau

SEQ ID NO: 1162183 - RNA, 19 nt, Homo sapiens
  misc_RNA (1)...(19): siRNA sense strand
aggcaacagugucauuuga

SEQ ID NO: 1162184 - RNA, 19 nt, Homo sapiens
  misc_RNA (1)...(19): siRNA sense strand
gagggugugucuacagauc

SEQ ID NO: 1162185 - RNA, 19 nt, Homo sapiens
  misc_RNA (1)...(19): siRNA sense strand
ucaacaagauucauaugac

SEQ ID NO: 1162186 - RNA, 19 nt, Homo sapiens
  misc_RNA (1)...(19): siRNA sense strand
gccagacuauggucaacaa

SEQ ID NO: 1162187 - RNA, 19 nt, Homo sapiens
  misc_RNA (1)...(19): siRNA sense strand
agacuauggucaacaagau

SEQ ID NO: 1162188 - RNA, 19 nt, Homo sapiens
  misc_RNA (1)...(19): siRNA sense strand
ccgaggagguggcuaugga

SEQ ID NO: 1162189 - RNA, 19 nt, Homo sapiens
  misc_RNA (1)...(19): siRNA sense strand
ggauuggguuugcccuaau

SEQ ID NO: 1162190 - RNA, 19 nt, Homo sapiens
  misc_RNA (1)...(19): siRNA sense strand
gcagcaugauuccuauagu

SEQ ID NO: 1162191 - RNA, 19 nt, Homo sapiens
  misc_RNA (1)...(19): siRNA sense strand
cauaugaugagcagucaaa

SEQ ID NO: 1162192 - RNA, 19 nt, Homo sapiens
  misc_RNA (1)...(19): siRNA sense strand
cagcaugauuccuauaguc

SEQ ID NO: 1162193 - RNA, 19 nt, Homo sapiens
  misc_RNA (1)...(19): siRNA sense strand
gcuaugggcaaacgacuga

SEQ ID NO: 1162194 - RNA, 19 nt, Homo sapiens
  misc_RNA (1)...(19): siRNA sense strand
agaccgagguggcuaugga

SEQ ID NO: 1162195 - RNA, 19 nt, Homo sapiens
  misc_RNA (1)...(19): siRNA sense strand
cagcuaaggcagccauuga

SEQ ID NO: 1162196 - RNA, 19 nt, Homo sapiens
  misc_RNA (1)...(19): siRNA sense strand
aaccagcaguccuaucauu

SEQ ID NO: 1162197 - RNA, 19 nt, Homo sapiens
  misc_RNA (1)...(19): siRNA sense strand
agaauuccauggcaacauc

SEQ ID NO: 1162198 - RNA, 19 nt, Homo sapiens
  misc_RNA (1)...(19): siRNA sense strand
ggggugagcagcaaaguua

SEQ ID NO: 1162199 - RNA, 19 nt, Homo sapiens
  misc_RNA (1)...(19): siRNA sense strand
gggaguucuuuaaacaaau

SEQ ID NO: 1162200 - RNA, 19 nt, Homo sapiens
  misc_RNA (1)...(19): siRNA sense strand
agaccgaaguggaggcuau

SEQ ID NO: 1162201 - RNA, 19 nt, Homo sapiens
  misc_RNA (1)...(19): siRNA sense strand
ggcaacaucauuaaagugu

SEQ ID NO: 1162202 - RNA, 19 nt, Homo sapiens
  misc_RNA (1)...(19): siRNA sense strand
caaaagcagagcucauaua

SEQ ID NO: 1162203 - RNA, 19 nt, Homo sapiens
  misc_RNA (1)...(19): siRNA sense strand
aagaaacgacuacagaaau

SEQ ID NO: 1162204 - RNA, 19 nt, Homo sapiens
  misc_RNA (1)...(19): siRNA sense strand
gucaacaagauucauauga

SEQ ID NO: 1162205 - RNA, 19 nt, Homo sapiens
  misc_RNA (1)...(19): siRNA sense strand
gcgcaaccgaccauacuga

SEQ ID NO: 1162206 - RNA, 19 nt, Homo sapiens
  misc_RNA (1)...(19): siRNA sense strand
ggagaucgaggagguuaug

SEQ ID NO: 1162207 - RNA, 19 nt, Homo sapiens
  misc_RNA (1)...(19): siRNA sense strand
ggggaguucuuuaaacaaa

SEQ ID NO: 1162208 - RNA, 19 nt, Homo sapiens
  misc_RNA (1)...(19): siRNA sense strand
cgacugauuccucuuaugg

SEQ ID NO: 1162209 - RNA, 19 nt, Homo sapiens
  misc_RNA (1)...(19): siRNA sense strand
cagcaaaguuauucuaccu

SEQ ID NO: 1162210 - RNA, 19 nt, Homo sapiens
  misc_RNA (1)...(19): siRNA sense strand
agccagcaaccauauaaua

SEQ ID NO: 1162211 - RNA, 19 nt, Homo sapiens
  misc_RNA (1)...(19): siRNA sense strand
guuauucuaccuauggaaa

SEQ ID NO: 1162212 - RNA, 19 nt, Homo sapiens
  misc_RNA (1)...(19): siRNA sense strand
ucacaguccuauggugguu

SEQ ID NO: 1162213 - RNA, 19 nt, Homo sapiens
  misc_RNA (1)...(19): siRNA sense strand
gaggcaacagugucauuug

SEQ ID NO: 1162214 - RNA, 19 nt, Homo sapiens
  misc_RNA (1)...(19): siRNA sense strand
ggugagcagcaaaguuauu

SEQ ID NO: 1162215 - RNA, 19 nt, Homo sapiens
  misc_RNA (1)...(19): siRNA sense strand
gaccagcagucaggcuaug

SEQ ID NO: 1162216 - RNA, 19 nt, Homo sapiens
  misc_RNA (1)...(19): siRNA sense strand
ccuaugaccagccagacua

SEQ ID NO: 1162217 - RNA, 19 nt, Homo sapiens
  misc_RNA (1)...(19): siRNA sense strand
uaugaugagcagucaaauu

SEQ ID NO: 1162218 - RNA, 19 nt, Homo sapiens
  misc_RNA (1)...(19): siRNA sense strand
caggagugguggcggcuau

SEQ ID NO: 1162219 - RNA, 19 nt, Homo sapiens
  misc_RNA (1)...(19): siRNA sense strand
cagaggaggcggcuaugga

SEQ ID NO: 1162220 - RNA, 19 nt, Homo sapiens
  misc_RNA (1)...(19): siRNA sense strand
uagaggucguggaggcuuu

SEQ ID NO: 1162221 - RNA, 19 nt, Homo sapiens
  misc_RNA (1)...(19): siRNA sense strand
aaaguuauucuaccuaugg

SEQ ID NO: 1162222 - RNA, 19 nt, Homo sapiens
  misc_RNA (1)...(19): siRNA sense strand
gucgugaugugaguaggua

SEQ ID NO: 1162223 - RNA, 19 nt, Homo sapiens
  misc_RNA (1)...(19): siRNA sense strand
ucagcagcaugauuccuau

SEQ ID NO: 1162224 - RNA, 19 nt, Homo sapiens
  misc_RNA (1)...(19): siRNA sense strand
aacauggaaucaucaggaa

SEQ ID NO: 1162225 - RNA, 19 nt, Homo sapiens
  misc_RNA (1)...(19): siRNA sense strand
cggcuaugguggagacaga

SEQ ID NO: 1162226 - RNA, 19 nt, Homo sapiens
  misc_RNA (1)...(19): siRNA sense strand
cggcuaugguggagacaga

SEQ ID NO: 1162227 - RNA, 19 nt, Homo sapiens
  misc_RNA (1)...(19): siRNA sense strand
uuccauggcaacaucauua

SEQ ID NO: 1162228 - RNA, 19 nt, Homo sapiens
  misc_RNA (1)...(19): siRNA sense strand
aggcagccauugacugguu

SEQ ID NO: 1162229 - RNA, 19 nt, Homo sapiens
  misc_RNA (1)...(19): siRNA sense strand
ggucaacaagauucauaug

SEQ ID NO: 1162230 - RNA, 19 nt, Homo sapiens
  misc_RNA (1)...(19): siRNA sense strand
acaagcaucacaaagcuau

SEQ ID NO: 1162231 - RNA, 19 nt, Homo sapiens
  misc_RNA (1)...(19): siRNA sense strand
ggaaaaccaaugauaaauc

SEQ ID NO: 1162232 - RNA, 19 nt, Homo sapiens
  misc_RNA (1)...(19): siRNA sense strand
gggugugucuacagaucaa

SEQ ID NO: 1162233 - RNA, 19 nt, Homo sapiens
  misc_RNA (1)...(19): siRNA sense strand
ccagcaguccuaucauuca

SEQ ID NO: 1162234 - RNA, 19 nt, Homo sapiens
  misc_RNA (1)...(19): siRNA sense strand
gaucagcgcaaccgaccau

SEQ ID NO: 1162235 - RNA, 19 nt, Homo sapiens
  misc_RNA (1)...(19): siRNA sense strand
aggaagaaacgacuacaga

SEQ ID NO: 1162236 - RNA, 19 nt, Homo sapiens
  misc_RNA (1)...(19): siRNA sense strand
gacagaacuacagcgguua

SEQ ID NO: 1162237 - RNA, 19 nt, Homo sapiens
  misc_RNA (1)...(19): siRNA sense strand
ccacuagaagaccugaauu

SEQ ID NO: 1162238 - RNA, 19 nt, Homo sapiens
  misc_RNA (1)...(19): siRNA sense strand
ggcagccauugacugguuu

SEQ ID NO: 1162239 - RNA, 19 nt, Homo sapiens
  misc_RNA (1)...(19): siRNA sense strand
cagacaaggacacaggaaa

SEQ ID NO: 1162240 - RNA, 19 nt, Homo sapiens
  misc_RNA (1)...(19): siRNA sense strand
ccagaacagaugcugauuc

SEQ ID NO: 1162241 - RNA, 19 nt, Homo sapiens
  misc_RNA (1)...(19): siRNA sense strand
ggagauggaccaagaguuu

SEQ ID NO: 1162242 - RNA, 19 nt, Homo sapiens
  misc_RNA (1)...(19): siRNA sense strand
gagaggagcugcgggagaa

SEQ ID NO: 1162243 - RNA, 19 nt, Homo sapiens
  misc_RNA (1)...(19): siRNA sense strand
gcucuauccuguccaagua

SEQ ID NO: 1162244 - RNA, 19 nt, Homo sapiens
  misc_RNA (1)...(19): siRNA sense strand
ggaagaagaagccugacua

SEQ ID NO: 1162245 - RNA, 19 nt, Homo sapiens
  misc_RNA (1)...(19): siRNA sense strand
ggagaaggacggcuacaaa

SEQ ID NO: 1162246 - RNA, 19 nt, Homo sapiens
  misc_RNA (1)...(19): siRNA sense strand
agaaggaccuggcagagaa

SEQ ID NO: 1162247 - RNA, 19 nt, Homo sapiens
  misc_RNA (1)...(19): siRNA sense strand
gaggagauggugaccuuua

SEQ ID NO: 1162248 - RNA, 19 nt, Homo sapiens
  misc_RNA (1)...(19): siRNA sense strand
gaagauaaagacccuagga

SEQ ID NO: 1162249 - RNA, 19 nt, Homo sapiens
  misc_RNA (1)...(19): siRNA sense strand
gcgagaaggugguggagau

SEQ ID NO: 1162250 - RNA, 19 nt, Homo sapiens
  misc_RNA (1)...(19): siRNA sense strand
gcuacaaacccgacguuaa

SEQ ID NO: 1162251 - RNA, 19 nt, Homo sapiens
  misc_RNA (1)...(19): siRNA sense strand
ggagaaggagguaguagug

SEQ ID NO: 1162252 - RNA, 19 nt, Homo sapiens
  misc_RNA (1)...(19): siRNA sense strand
ggcaagggcucaggcaaga

SEQ ID NO: 1162253 - RNA, 19 nt, Homo sapiens
  misc_RNA (1)...(19): siRNA sense strand
uggaggagauggaccaaga

SEQ ID NO: 1162254 - RNA, 19 nt, Homo sapiens
  misc_RNA (1)...(19): siRNA sense strand
caggcaagaugaagacaga

SEQ ID NO: 1162255 - RNA, 19 nt, Homo sapiens
  misc_RNA (1)...(19): siRNA sense strand
agaagcagcagcaggauuu

SEQ ID NO: 1162256 - RNA, 19 nt, Homo sapiens
  misc_RNA (1)...(19): siRNA sense strand
gaaggagaaggagguagua

SEQ ID NO: 1162257 - RNA, 19 nt, Homo sapiens
  misc_RNA (1)...(19): siRNA sense strand
ggccaucgaugacaaguac

SEQ ID NO: 1162258 - RNA, 19 nt, Homo sapiens
  misc_RNA (1)...(19): siRNA sense strand
gaagagggccaaguuacug

SEQ ID NO: 1162259 - RNA, 19 nt, Homo sapiens
  misc_RNA (1)...(19): siRNA sense strand
uuaaugccaucaagaagga

SEQ ID NO: 1162260 - RNA, 19 nt, Homo sapiens
  misc_RNA (1)...(19): siRNA sense strand
aggaggagcucauggacuu

SEQ ID NO: 1162261 - RNA, 19 nt, Homo sapiens
  misc_RNA (1)...(19): siRNA sense strand
ccaaguuacuggaggagau

SEQ ID NO: 1162262 - RNA, 19 nt, Homo sapiens
  misc_RNA (1)...(19): siRNA sense strand
ggcgaugccuccucacuca

SEQ ID NO: 1162263 - RNA, 19 nt, Homo sapiens
  misc_RNA (1)...(19): siRNA sense strand
cuacaaacccgacguuaag

SEQ ID NO: 1162264 - RNA, 19 nt, Homo sapiens
  misc_RNA (1)...(19): siRNA sense strand
ggagauggugaccuuuaaa

SEQ ID NO: 1162265 - RNA, 19 nt, Homo sapiens
  misc_RNA (1)...(19): siRNA sense strand
cgaacaccaucaccaagug

SEQ ID NO: 1162266 - RNA, 19 nt, Homo sapiens
  misc_RNA (1)...(19): siRNA sense strand
cuaacaaacuccgggcaaa

SEQ ID NO: 1162267 - RNA, 19 nt, Homo sapiens
  misc_RNA (1)...(19): siRNA sense strand
gagaaggaccuggcagaga

SEQ ID NO: 1162268 - RNA, 19 nt, Homo sapiens
  misc_RNA (1)...(19): siRNA sense strand
ugguggagauugugaagaa

SEQ ID NO: 1162269 - RNA, 19 nt, Homo sapiens
  misc_RNA (1)...(19): siRNA sense strand
gaagaagaagccugacuac

SEQ ID NO: 1162270 - RNA, 19 nt, Homo sapiens
  misc_RNA (1)...(19): siRNA sense strand
acgugaaccugguggauaa

SEQ ID NO: 1162271 - RNA, 19 nt, Homo sapiens
  misc_RNA (1)...(19): siRNA sense strand
ggagguuaaugccaucaag

SEQ ID NO: 1162272 - RNA, 19 nt, Homo sapiens
  misc_RNA (1)...(19): siRNA sense strand
gagaagagggccaaguuac

SEQ ID NO: 1162273 - RNA, 19 nt, Homo sapiens
  misc_RNA (1)...(19): siRNA sense strand
cagagaagagggccaaguu

SEQ ID NO: 1162274 - RNA, 19 nt, Homo sapiens
  misc_RNA (1)...(19): siRNA sense strand
agagaagagggccaaguua

SEQ ID NO: 1162275 - RNA, 19 nt, Homo sapiens
  misc_RNA (1)...(19): siRNA sense strand
gggagacaaugauucuuac

SEQ ID NO: 1162276 - RNA, 19 nt, Homo sapiens
  misc_RNA (1)...(19): siRNA sense strand
ucacacaggacuucaagga

SEQ ID NO: 1162277 - RNA, 19 nt, Homo sapiens
  misc_RNA (1)...(19): siRNA sense strand
caaugauucuuacccucaa

SEQ ID NO: 1162278 - RNA, 19 nt, Homo sapiens
  misc_RNA (1)...(19): siRNA sense strand
cacaggacuucaaggagaa

SEQ ID NO: 1162279 - RNA, 19 nt, Homo sapiens
  misc_RNA (1)...(19): siRNA sense strand
uguacugcaucgaggauaa

SEQ ID NO: 1162280 - RNA, 19 nt, Homo sapiens
  misc_RNA (1)...(19): siRNA sense strand
aggagauggugaccuuuaa

SEQ ID NO: 1162281 - RNA, 19 nt, Homo sapiens
  misc_RNA (1)...(19): siRNA sense strand
gagaagcagcagcaggauu

SEQ ID NO: 1162282 - RNA, 19 nt, Homo sapiens
  misc_RNA (1)...(19): siRNA sense strand
cugaggagauggugaccuu

SEQ ID NO: 1162283 - RNA, 19 nt, Homo sapiens
  misc_RNA (1)...(19): siRNA sense strand
gcuccugugucagaacaaa

SEQ ID NO: 1162284 - RNA, 19 nt, Homo sapiens
  misc_RNA (1)...(19): siRNA sense strand
gaggaaccgaucgugaaua

SEQ ID NO: 1162285 - RNA, 19 nt, Homo sapiens
  misc_RNA (1)...(19): siRNA sense strand
agaaggugguggagauugu

SEQ ID NO: 1162286 - RNA, 19 nt, Homo sapiens
  misc_RNA (1)...(19): siRNA sense strand
aggaaccgaucgugaauag

SEQ ID NO: 1162287 - RNA, 19 nt, Homo sapiens
  misc_RNA (1)...(19): siRNA sense strand
cgaggagacuaacaaacuc

SEQ ID NO: 1162288 - RNA, 19 nt, Homo sapiens
  misc_RNA (1)...(19): siRNA sense strand
gcaucgaggagacuaacaa

SEQ ID NO: 1162289 - RNA, 19 nt, Homo sapiens
  misc_RNA (1)...(19): siRNA sense strand
uaagaucgaauacguggau

SEQ ID NO: 1162290 - RNA, 19 nt, Homo sapiens
  misc_RNA (1)...(19): siRNA sense strand
gcgagacaguggcgagaag

SEQ ID NO: 1162291 - RNA, 19 nt, Homo sapiens
  misc_RNA (1)...(19): siRNA sense strand
gaacgugaaccugguggau

SEQ ID NO: 1162292 - RNA, 19 nt, Homo sapiens
  misc_RNA (1)...(19): siRNA sense strand
caagggcucaggcaagaug

SEQ ID NO: 1162293 - RNA, 19 nt, Homo sapiens
  misc_RNA (1)...(19): siRNA sense strand
gagaaggacggcuacaaac

SEQ ID NO: 1162294 - RNA, 19 nt, Homo sapiens
  misc_RNA (1)...(19): siRNA sense strand
caagaaggagaaggaggua

SEQ ID NO: 1162295 - RNA, 19 nt, Homo sapiens
  misc_RNA (1)...(19): siRNA sense strand
auaaggagcgggcagagaa

SEQ ID NO: 1162296 - RNA, 19 nt, Homo sapiens
  misc_RNA (1)...(19): siRNA sense strand
ggggagacaaugauucuua

SEQ ID NO: 1162297 - RNA, 19 nt, Homo sapiens
  misc_RNA (1)...(19): siRNA sense strand
ggaauaccgaggcuucaca

SEQ ID NO: 1162298 - RNA, 19 nt, Homo sapiens
  misc_RNA (1)...(19): siRNA sense strand
caaaagcuggggaagauaa

SEQ ID NO: 1162299 - RNA, 19 nt, Homo sapiens
  misc_RNA (1)...(19): siRNA sense strand
gagaaggugguggagauug

SEQ ID NO: 1162300 - RNA, 19 nt, Homo sapiens
  misc_RNA (1)...(19): siRNA sense strand
gagguuaaugccaucaaga

SEQ ID NO: 1162301 - RNA, 19 nt, Homo sapiens
  misc_RNA (1)...(19): siRNA sense strand
gcgaacaccaucaccaagu

SEQ ID NO: 1162302 - RNA, 19 nt, Homo sapiens
  misc_RNA (1)...(19): siRNA sense strand
gauaaggagcgggcagaga

SEQ ID NO: 1162303 - RNA, 19 nt, Homo sapiens
  misc_RNA (1)...(19): siRNA sense strand
guccaaguaugacgaagag

SEQ ID NO: 1162304 - RNA, 19 nt, Homo sapiens
  misc_RNA (1)...(19): siRNA sense strand
gaggcgcuccugaagaaga

SEQ ID NO: 1162305 - RNA, 19 nt, Homo sapiens
  misc_RNA (1)...(19): siRNA sense strand
caacgguggcuccgaaucu

SEQ ID NO: 1162306 - RNA, 19 nt, Homo sapiens
  misc_RNA (1)...(19): siRNA sense strand
caaguaugacgaagagcuu

SEQ ID NO: 1162307 - RNA, 19 nt, Homo sapiens
  misc_RNA (1)...(19): siRNA sense strand
gagauggaccaagaguuug

SEQ ID NO: 1162308 - RNA, 19 nt, Homo sapiens
  misc_RNA (1)...(19): siRNA sense strand
gaaccuggacgaggagaag

SEQ ID NO: 1162309 - RNA, 19 nt, Homo sapiens
  misc_RNA (1)...(19): siRNA sense strand
caacgccacguccgaguuc

SEQ ID NO: 1162310 - RNA, 19 nt, Homo sapiens
  misc_RNA (1)...(19): siRNA sense strand
ccaagcggagggugaagaa

SEQ ID NO: 1162311 - RNA, 19 nt, Homo sapiens
  misc_RNA (1)...(19): siRNA sense strand
agaagaagccugacuaccu

SEQ ID NO: 1162312 - RNA, 19 nt, Homo sapiens
  misc_RNA (1)...(19): siRNA sense strand
caucgaggagacuaacaaa

SEQ ID NO: 1162313 - RNA, 19 nt, Homo sapiens
  misc_RNA (1)...(19): siRNA sense strand
ugaagaaaauccgcaagaa

SEQ ID NO: 1162314 - RNA, 19 nt, Homo sapiens
  misc_RNA (1)...(19): siRNA sense strand
ugaaccugguggauaagga

SEQ ID NO: 1162315 - RNA, 19 nt, Homo sapiens
  misc_RNA (1)...(19): siRNA sense strand
caaacccgacguuaagauc

SEQ ID NO: 1162316 - RNA, 19 nt, Homo sapiens
  misc_RNA (1)...(19): siRNA sense strand
gcccugcuccugugucaga

SEQ ID NO: 1162317 - RNA, 19 nt, Homo sapiens
  misc_RNA (1)...(19): siRNA sense strand
gaggagcucauggacuuug

SEQ ID NO: 1162318 - RNA, 19 nt, Homo sapiens
  misc_RNA (1)...(19): siRNA sense strand
uaaggagcgggcagagaaa

SEQ ID NO: 1162319 - RNA, 19 nt, Homo sapiens
  misc_RNA (1)...(19): siRNA sense strand
ggaaacucacacccaagga

SEQ ID NO: 1162320 - RNA, 19 nt, Homo sapiens
  misc_RNA (1)...(19): siRNA sense strand
ggagaacauggacaucagu

SEQ ID NO: 1162321 - RNA, 19 nt, Homo sapiens
  misc_RNA (1)...(19): siRNA sense strand
aagcagaaggcucagaaga

SEQ ID NO: 1162322 - RNA, 19 nt, Homo sapiens
  misc_RNA (1)...(19): siRNA sense strand
agaagcagaaggcucagaa

SEQ ID NO: 1162323 - RNA, 19 nt, Homo sapiens
  misc_RNA (1)...(19): siRNA sense strand
cgaggaaccgaucgugaau

SEQ ID NO: 1162324 - RNA, 19 nt, Homo sapiens
  misc_RNA (1)...(19): siRNA sense strand
gaagaaaauccgcaagaag

SEQ ID NO: 1162325 - RNA, 19 nt, Homo sapiens
  misc_RNA (1)...(19): siRNA sense strand
gcaugaacgcgaacaccau

SEQ ID NO: 1162326 - RNA, 19 nt, Homo sapiens
  misc_RNA (1)...(19): siRNA sense strand
ccguggagcaugccauuga

SEQ ID NO: 1162327 - RNA, 19 nt, Homo sapiens
  misc_RNA (1)...(19): siRNA sense strand
uaacaaacuccgggcaaag

SEQ ID NO: 1162328 - RNA, 19 nt, Homo sapiens
  misc_RNA (1)...(19): siRNA sense strand
ucacacccaaggaggcuuu

SEQ ID NO: 1162329 - RNA, 19 nt, Homo sapiens
  misc_RNA (1)...(19): siRNA sense strand
agaagcgccugcugaacca

SEQ ID NO: 1162330 - RNA, 19 nt, Homo sapiens
  misc_RNA (1)...(19): siRNA sense strand
ccucagccguguacugcau

SEQ ID NO: 1162331 - RNA, 19 nt, Homo sapiens
  misc_RNA (1)...(19): siRNA sense strand
gcagagaagagggccaagu

SEQ ID NO: 1162332 - RNA, 19 nt, Homo sapiens
  misc_RNA (1)...(19): siRNA sense strand
aggaggacgugcuggugaa

SEQ ID NO: 1162333 - RNA, 19 nt, Homo sapiens
  misc_RNA (1)...(19): siRNA sense strand
cugacuaccugcccuaugc

SEQ ID NO: 1162334 - RNA, 19 nt, Homo sapiens
  misc_RNA (1)...(19): siRNA sense strand
gagauggugaccuuuaaaa

SEQ ID NO: 1162335 - RNA, 19 nt, Homo sapiens
  misc_RNA (1)...(19): siRNA sense strand
ggaggagcucauggacuuu

SEQ ID NO: 1162336 - RNA, 19 nt, Homo sapiens
  misc_RNA (1)...(19): siRNA sense strand
gaagcagaaggcucagaag

SEQ ID NO: 1162337 - RNA, 19 nt, Homo sapiens
  misc_RNA (1)...(19): siRNA sense strand
gaggagauggaccaagagu

SEQ ID NO: 1162338 - RNA, 19 nt, Homo sapiens
  misc_RNA (1)...(19): siRNA sense strand
gaucgaauacguggaugag

SEQ ID NO: 1162339 - RNA, 19 nt, Homo sapiens
  misc_RNA (1)...(19): siRNA sense strand
ucgaggagacuaacaaacu

SEQ ID NO: 1162340 - RNA, 19 nt, Homo sapiens
  misc_RNA (1)...(19): siRNA sense strand
caaggaggagcccgugaca

SEQ ID NO: 1162341 - RNA, 19 nt, Homo sapiens
  misc_RNA (1)...(19): siRNA sense strand
ugaagaagcucaucacuga

SEQ ID NO: 1162342 - RNA, 19 nt, Homo sapiens
  misc_RNA (1)...(19): siRNA sense strand
ugaaggacaucaucaaaga

SEQ ID NO: 1162343 - RNA, 19 nt, Homo sapiens
  misc_RNA (1)...(19): siRNA sense strand
gaugaaaguccucaaguuu

SEQ ID NO: 1162344 - RNA, 19 nt, Homo sapiens
  misc_RNA (1)...(19): siRNA sense strand
aaagaaggaucccaaggaa

SEQ ID NO: 1162345 - RNA, 19 nt, Homo sapiens
  misc_RNA (1)...(19): siRNA sense strand
gaccgccacucucacauuu

SEQ ID NO: 1162346 - RNA, 19 nt, Homo sapiens
  misc_RNA (1)...(19): siRNA sense strand
gauacaucauucacucuuu

SEQ ID NO: 1162347 - RNA, 19 nt, Homo sapiens
  misc_RNA (1)...(19): siRNA sense strand
agacgaagauucccaucaa

SEQ ID NO: 1162348 - RNA, 19 nt, Homo sapiens
  misc_RNA (1)...(19): siRNA sense strand
gagaagguauuugggauuc

SEQ ID NO: 1162349 - RNA, 19 nt, Homo sapiens
  misc_RNA (1)...(19): siRNA sense strand
gcucggacaugcugaagga

SEQ ID NO: 1162350 - RNA, 19 nt, Homo sapiens
  misc_RNA (1)...(19): siRNA sense strand
gaagguauuugggauucaa

SEQ ID NO: 1162351 - RNA, 19 nt, Homo sapiens
  misc_RNA (1)...(19): siRNA sense strand
caagggagggcaaaugauu

SEQ ID NO: 1162352 - RNA, 19 nt, Homo sapiens
  misc_RNA (1)...(19): siRNA sense strand
agaaguaccuggacuaugc

SEQ ID NO: 1162353 - RNA, 19 nt, Homo sapiens
  misc_RNA (1)...(19): siRNA sense strand
ugaaguaccuuuuggcuaa

SEQ ID NO: 1162354 - RNA, 19 nt, Homo sapiens
  misc_RNA (1)...(19): siRNA sense strand
ugauaagaaugaccacuug

SEQ ID NO: 1162355 - RNA, 19 nt, Homo sapiens
  misc_RNA (1)...(19): siRNA sense strand
ugacaaugccugccacuga

SEQ ID NO: 1162356 - RNA, 19 nt, Homo sapiens
  misc_RNA (1)...(19): siRNA sense strand
ggccugcgcucuuacuaug

SEQ ID NO: 1162357 - RNA, 19 nt, Homo sapiens
  misc_RNA (1)...(19): siRNA sense strand
gagauuagagcucgaaugg

SEQ ID NO: 1162358 - RNA, 19 nt, Homo sapiens
  misc_RNA (1)...(19): siRNA sense strand
ccauguggcugauacaaag

SEQ ID NO: 1162359 - RNA, 19 nt, Homo sapiens
  misc_RNA (1)...(19): siRNA sense strand
agaugaaaguccucaaguu

SEQ ID NO: 1162360 - RNA, 19 nt, Homo sapiens
  misc_RNA (1)...(19): siRNA sense strand
gcucuucgcuggccuuggu

SEQ ID NO: 1162361 - RNA, 19 nt, Homo sapiens
  misc_RNA (1)...(19): siRNA sense strand
ggaaugggcagcucaguac

SEQ ID NO: 1162362 - RNA, 19 nt, Homo sapiens
  misc_RNA (1)...(19): siRNA sense strand
gaaggacaucaucaaagaa

SEQ ID NO: 1162363 - RNA, 19 nt, Homo sapiens
  misc_RNA (1)...(19): siRNA sense strand
gauggaagcggauuugaag

SEQ ID NO: 1162364 - RNA, 19 nt, Homo sapiens
  misc_RNA (1)...(19): siRNA sense strand
ggagaagguauuugggauu

SEQ ID NO: 1162365 - RNA, 19 nt, Homo sapiens
  misc_RNA (1)...(19): siRNA sense strand
cuaaagaccagacgaagau

SEQ ID NO: 1162366 - RNA, 19 nt, Homo sapiens
  misc_RNA (1)...(19): siRNA sense strand
agaaggaucccaaggaaug

SEQ ID NO: 1162367 - RNA, 19 nt, Homo sapiens
  misc_RNA (1)...(19): siRNA sense strand
gcuaaagaccagacgaaga

SEQ ID NO: 1162368 - RNA, 19 nt, Homo sapiens
  misc_RNA (1)...(19): siRNA sense strand
gggaggugcugcgcaaguu

SEQ ID NO: 1162369 - RNA, 19 nt, Homo sapiens
  misc_RNA (1)...(19): siRNA sense strand
caaagaauacacugaugug

SEQ ID NO: 1162370 - RNA, 19 nt, Homo sapiens
  misc_RNA (1)...(19): siRNA sense strand
cgagaguggugcaggucua

SEQ ID NO: 1162371 - RNA, 19 nt, Homo sapiens
  misc_RNA (1)...(19): siRNA sense strand
gauacaaaggucaauacaa

SEQ ID NO: 1162372 - RNA, 19 nt, Homo sapiens
  misc_RNA (1)...(19): siRNA sense strand
uaugagaccagcaagauga

SEQ ID NO: 1162373 - RNA, 19 nt, Homo sapiens
  misc_RNA (1)...(19): siRNA sense strand
ggacaucaucaaagaauac

SEQ ID NO: 1162374 - RNA, 19 nt, Homo sapiens
  misc_RNA (1)...(19): siRNA sense strand
gcugaaggacaucaucaaa

SEQ ID NO: 1162375 - RNA, 19 nt, Homo sapiens
  misc_RNA (1)...(19): siRNA sense strand
gagugcagcugcccagucu

SEQ ID NO: 1162376 - RNA, 19 nt, Homo sapiens
  misc_RNA (1)...(19): siRNA sense strand
ugaaaguccucaaguuugc

SEQ ID NO: 1162377 - RNA, 19 nt, Homo sapiens
  misc_RNA (1)...(19): siRNA sense strand
gcagaaguaccuggacuau

SEQ ID NO: 1162378 - RNA, 19 nt, Homo sapiens
  misc_RNA (1)...(19): siRNA sense strand
gaggauggcagcagugauc

SEQ ID NO: 1162379 - RNA, 19 nt, Homo sapiens
  misc_RNA (1)...(19): siRNA sense strand
auacaucauucacucuuug

SEQ ID NO: 1162380 - RNA, 19 nt, Homo sapiens
  misc_RNA (1)...(19): siRNA sense strand
guauuugggauucaauuga

SEQ ID NO: 1162381 - RNA, 19 nt, Homo sapiens
  misc_RNA (1)...(19): siRNA sense strand
agcagaagcuaaagccaaa

SEQ ID NO: 1162382 - RNA, 19 nt, Homo sapiens
  misc_RNA (1)...(19): siRNA sense strand
gcccugggauacaucauuc

SEQ ID NO: 1162383 - RNA, 19 nt, Homo sapiens
  misc_RNA (1)...(19): siRNA sense strand
caaggucaaagccaagaaa

SEQ ID NO: 1162384 - RNA, 19 nt, Homo sapiens
  misc_RNA (1)...(19): siRNA sense strand
ugacagugacccagaaugu

SEQ ID NO: 1162385 - RNA, 19 nt, Homo sapiens
  misc_RNA (1)...(19): siRNA sense strand
ggaaauugauaagaaugac

SEQ ID NO: 1162386 - RNA, 19 nt, Homo sapiens
  misc_RNA (1)...(19): siRNA sense strand
ucccugagaucaccuaaag

SEQ ID NO: 1162387 - RNA, 19 nt, Homo sapiens
  misc_RNA (1)...(19): siRNA sense strand
gauccaggcgggagcagaa

SEQ ID NO: 1162388 - RNA, 19 nt, Homo sapiens
  misc_RNA (1)...(19): siRNA sense strand
ggauacaucauucacucuu

SEQ ID NO: 1162389 - RNA, 19 nt, Homo sapiens
  misc_RNA (1)...(19): siRNA sense strand
ucaaagaauacacugaugu

SEQ ID NO: 1162390 - RNA, 19 nt, Homo sapiens
  misc_RNA (1)...(19): siRNA sense strand
cagcugacaccaagaaaca

SEQ ID NO: 1162391 - RNA, 19 nt, Homo sapiens
  misc_RNA (1)...(19): siRNA sense strand
gcucgaugaugcagacucu

SEQ ID NO: 1162392 - RNA, 19 nt, Homo sapiens
  misc_RNA (1)...(19): siRNA sense strand
caagcugggucugcucaug

SEQ ID NO: 1162393 - RNA, 19 nt, Homo sapiens
  misc_RNA (1)...(19): siRNA sense strand
gcugauacaaaggucaaua

SEQ ID NO: 1162394 - RNA, 19 nt, Homo sapiens
  misc_RNA (1)...(19): siRNA sense strand
caacugggacgaagcugau

SEQ ID NO: 1162395 - RNA, 19 nt, Homo sapiens
  misc_RNA (1)...(19): siRNA sense strand
gggaacgacuaaggacuca

SEQ ID NO: 1162396 - RNA, 19 nt, Homo sapiens
  misc_RNA (1)...(19): siRNA sense strand
cugccaagcuccagucauc

SEQ ID NO: 1162397 - RNA, 19 nt, Homo sapiens
  misc_RNA (1)...(19): siRNA sense strand
auaagaaugaccacuugua

SEQ ID NO: 1162398 - RNA, 19 nt, Homo sapiens
  misc_RNA (1)...(19): siRNA sense strand
cccgaaaggugaagcaucu

SEQ ID NO: 1162399 - RNA, 19 nt, Homo sapiens
  misc_RNA (1)...(19): siRNA sense strand
cugaugaguuugugaagca

SEQ ID NO: 1162400 - RNA, 19 nt, Homo sapiens
  misc_RNA (1)...(19): siRNA sense strand
gguauuugggauucaauug

SEQ ID NO: 1162401 - RNA, 19 nt, Homo sapiens
  misc_RNA (1)...(19): siRNA sense strand
gacgaagauucccaucaag

SEQ ID NO: 1162402 - RNA, 19 nt, Homo sapiens
  misc_RNA (1)...(19): siRNA sense strand
uaagaaugaccacuuguac

SEQ ID NO: 1162403 - RNA, 19 nt, Homo sapiens
  misc_RNA (1)...(19): siRNA sense strand
ggcgggagcagaagcuaaa

SEQ ID NO: 1162404 - RNA, 19 nt, Homo sapiens
  misc_RNA (1)...(19): siRNA sense strand
ggacaguagcucgaugaug

SEQ ID NO: 1162405 - RNA, 19 nt, Homo sapiens
  misc_RNA (1)...(19): siRNA sense strand
gagaguggugcaggucuaa

SEQ ID NO: 1162406 - RNA, 19 nt, Homo sapiens
  misc_RNA (1)...(19): siRNA sense strand
agaaugaccacuuguacau

SEQ ID NO: 1162407 - RNA, 19 nt, Homo sapiens
  misc_RNA (1)...(19): siRNA sense strand
gcaagggagggcaaaugau

SEQ ID NO: 1162408 - RNA, 19 nt, Homo sapiens
  misc_RNA (1)...(19): siRNA sense strand
gaccacuuguacauucuuc

SEQ ID NO: 1162409 - RNA, 19 nt, Homo sapiens
  misc_RNA (1)...(19): siRNA sense strand
gauggcagcagugaucaga

SEQ ID NO: 1162410 - RNA, 19 nt, Homo sapiens
  misc_RNA (1)...(19): siRNA sense strand
cgauggaagcggauuugaa

SEQ ID NO: 1162411 - RNA, 19 nt, Homo sapiens
  misc_RNA (1)...(19): siRNA sense strand
caagaugaaaguccucaag

SEQ ID NO: 1162412 - RNA, 19 nt, Homo sapiens
  misc_RNA (1)...(19): siRNA sense strand
gauaagaaugaccacuugu

SEQ ID NO: 1162413 - RNA, 19 nt, Homo sapiens
  misc_RNA (1)...(19): siRNA sense strand
aggacaucaucaaagaaua

SEQ ID NO: 1162414 - RNA, 19 nt, Homo sapiens
  misc_RNA (1)...(19): siRNA sense strand
ccagugaggcugucaucug

SEQ ID NO: 1162415 - RNA, 19 nt, Homo sapiens
  misc_RNA (1)...(19): siRNA sense strand
gcugacaccaagaaacaga

SEQ ID NO: 1162416 - RNA, 19 nt, Homo sapiens
  misc_RNA (1)...(19): siRNA sense strand
cuucuuagcaucaucuuca

SEQ ID NO: 1162417 - RNA, 19 nt, Homo sapiens
  misc_RNA (1)...(19): siRNA sense strand
gcugacugauacccagguu

SEQ ID NO: 1162418 - RNA, 19 nt, Homo sapiens
  misc_RNA (1)...(19): siRNA sense strand
uggcagcagugaucagagu

SEQ ID NO: 1162419 - RNA, 19 nt, Homo sapiens
  misc_RNA (1)...(19): siRNA sense strand
uagcagcugacaccaagaa

SEQ ID NO: 1162420 - RNA, 19 nt, Homo sapiens
  misc_RNA (1)...(19): siRNA sense strand
agacaccgaaggccucaaa

SEQ ID NO: 1162421 - RNA, 19 nt, Homo sapiens
  misc_RNA (1)...(19): siRNA sense strand
gcauacugggaacgacuaa

SEQ ID NO: 1162422 - RNA, 19 nt, Homo sapiens
  misc_RNA (1)...(19): siRNA sense strand
ggaggugcugcgcaaguug

SEQ ID NO: 1162423 - RNA, 19 nt, Homo sapiens
  misc_RNA (1)...(19): siRNA sense strand
uacaaaggcucaggagacu

SEQ ID NO: 1162424 - RNA, 19 nt, Homo sapiens
  misc_RNA (1)...(19): siRNA sense strand
cugcucauggugcuucuua

SEQ ID NO: 1162425 - RNA, 19 nt, Homo sapiens
  misc_RNA (1)...(19): siRNA sense strand
gaaguaccuuuuggcuaaa

SEQ ID NO: 1162426 - RNA, 19 nt, Homo sapiens
  misc_RNA (1)...(19): siRNA sense strand
gcaccuuagagcccacuga

SEQ ID NO: 1162427 - RNA, 19 nt, Homo sapiens
  misc_RNA (1)...(19): siRNA sense strand
ccgccacucucacauuugg

SEQ ID NO: 1162428 - RNA, 19 nt, Homo sapiens
  misc_RNA (1)...(19): siRNA sense strand
ugaccgccacucucacauu

SEQ ID NO: 1162429 - RNA, 19 nt, Homo sapiens
  misc_RNA (1)...(19): siRNA sense strand
guaccgagaggcgauggaa

SEQ ID NO: 1162430 - RNA, 19 nt, Homo sapiens
  misc_RNA (1)...(19): siRNA sense strand
gagaccagcaagaugaaag

SEQ ID NO: 1162431 - RNA, 19 nt, Homo sapiens
  misc_RNA (1)...(19): siRNA sense strand
ugcaagggagggcaaauga

SEQ ID NO: 1162432 - RNA, 19 nt, Homo sapiens
  misc_RNA (1)...(19): siRNA sense strand
uaucggacccugggccaaa

SEQ ID NO: 1162433 - RNA, 19 nt, Homo sapiens
  misc_RNA (1)...(19): siRNA sense strand
ggucucagaggaugugaag

SEQ ID NO: 1162434 - RNA, 19 nt, Homo sapiens
  misc_RNA (1)...(19): siRNA sense strand
aaggacaucaucaaagaau

SEQ ID NO: 1162435 - RNA, 19 nt, Homo sapiens
  misc_RNA (1)...(19): siRNA sense strand
ccugugguuucuccuacaa

SEQ ID NO: 1162436 - RNA, 19 nt, Homo sapiens
  misc_RNA (1)...(19): siRNA sense strand
gcucuggugccugugguuu

SEQ ID NO: 1162437 - RNA, 19 nt, Homo sapiens
  misc_RNA (1)...(19): siRNA sense strand
aggaaugggcagcucagua

SEQ ID NO: 1162438 - RNA, 19 nt, Homo sapiens
  misc_RNA (1)...(19): siRNA sense strand
gaaggaucccaaggaaugg

SEQ ID NO: 1162439 - RNA, 19 nt, Homo sapiens
  misc_RNA (1)...(19): siRNA sense strand
gggccugcgcucuuacuau

SEQ ID NO: 1162440 - RNA, 19 nt, Homo sapiens
  misc_RNA (1)...(19): siRNA sense strand
ugacugauacccagguucu

SEQ ID NO: 1162441 - RNA, 19 nt, Homo sapiens
  misc_RNA (1)...(19): siRNA sense strand
ugaagaagcucaucacuga

SEQ ID NO: 1162442 - RNA, 19 nt, Homo sapiens
  misc_RNA (1)...(19): siRNA sense strand
ugaaggacaucaucaaaga

SEQ ID NO: 1162443 - RNA, 19 nt, Homo sapiens
  misc_RNA (1)...(19): siRNA sense strand
gaugaaaguccucaaguuu

SEQ ID NO: 1162444 - RNA, 19 nt, Homo sapiens
  misc_RNA (1)...(19): siRNA sense strand
aaagaaggaucccaaggaa

SEQ ID NO: 1162445 - RNA, 19 nt, Homo sapiens
  misc_RNA (1)...(19): siRNA sense strand
gaccgccacucucacauuu

SEQ ID NO: 1162446 - RNA, 19 nt, Homo sapiens
  misc_RNA (1)...(19): siRNA sense strand
gauacaucauucacucuuu

SEQ ID NO: 1162447 - RNA, 19 nt, Homo sapiens
  misc_RNA (1)...(19): siRNA sense strand
agacgaagauucccaucaa

SEQ ID NO: 1162448 - RNA, 19 nt, Homo sapiens
  misc_RNA (1)...(19): siRNA sense strand
gagaagguauuugggauuc

SEQ ID NO: 1162449 - RNA, 19 nt, Homo sapiens
  misc_RNA (1)...(19): siRNA sense strand
gcucggacaugcugaagga

SEQ ID NO: 1162450 - RNA, 19 nt, Homo sapiens
  misc_RNA (1)...(19): siRNA sense strand
gaagguauuugggauucaa

SEQ ID NO: 1162451 - RNA, 19 nt, Homo sapiens
  misc_RNA (1)...(19): siRNA sense strand
caagggagggcaaaugauu

SEQ ID NO: 1162452 - RNA, 19 nt, Homo sapiens
  misc_RNA (1)...(19): siRNA sense strand
agaaguaccuggacuaugc

SEQ ID NO: 1162453 - RNA, 19 nt, Homo sapiens
  misc_RNA (1)...(19): siRNA sense strand
ugaaguaccuuuuggcuaa

SEQ ID NO: 1162454 - RNA, 19 nt, Homo sapiens
  misc_RNA (1)...(19): siRNA sense strand
ugauaagaaugaccacuug

SEQ ID NO: 1162455 - RNA, 19 nt, Homo sapiens
  misc_RNA (1)...(19): siRNA sense strand
ugacaaugccugccacuga

SEQ ID NO: 1162456 - RNA, 19 nt, Homo sapiens
  misc_RNA (1)...(19): siRNA sense strand
ggccugcgcucuuacuaug

SEQ ID NO: 1162457 - RNA, 19 nt, Homo sapiens
  misc_RNA (1)...(19): siRNA sense strand
gagauuagagcucgaaugg

SEQ ID NO: 1162458 - RNA, 19 nt, Homo sapiens
  misc_RNA (1)...(19): siRNA sense strand
ccauguggcugauacaaag

SEQ ID NO: 1162459 - RNA, 19 nt, Homo sapiens
  misc_RNA (1)...(19): siRNA sense strand
agaugaaaguccucaaguu

SEQ ID NO: 1162460 - RNA, 19 nt, Homo sapiens
  misc_RNA (1)...(19): siRNA sense strand
gcucuucgcuggccuuggu

SEQ ID NO: 1162461 - RNA, 19 nt, Homo sapiens
  misc_RNA (1)...(19): siRNA sense strand
ggaaugggcagcucaguac

SEQ ID NO: 1162462 - RNA, 19 nt, Homo sapiens
  misc_RNA (1)...(19): siRNA sense strand
gaaggacaucaucaaagaa

SEQ ID NO: 1162463 - RNA, 19 nt, Homo sapiens
  misc_RNA (1)...(19): siRNA sense strand
gauggaagcggauuugaag

SEQ ID NO: 1162464 - RNA, 19 nt, Homo sapiens
  misc_RNA (1)...(19): siRNA sense strand
ggagaagguauuugggauu

SEQ ID NO: 1162465 - RNA, 19 nt, Homo sapiens
  misc_RNA (1)...(19): siRNA sense strand
cuaaagaccagacgaagau

SEQ ID NO: 1162466 - RNA, 19 nt, Homo sapiens
  misc_RNA (1)...(19): siRNA sense strand
agaaggaucccaaggaaug

SEQ ID NO: 1162467 - RNA, 19 nt, Homo sapiens
  misc_RNA (1)...(19): siRNA sense strand
gcuaaagaccagacgaaga

SEQ ID NO: 1162468 - RNA, 19 nt, Homo sapiens
  misc_RNA (1)...(19): siRNA sense strand
gggaggugcugcgcaaguu

SEQ ID NO: 1162469 - RNA, 19 nt, Homo sapiens
  misc_RNA (1)...(19): siRNA sense strand
caaagaauacacugaugug

SEQ ID NO: 1162470 - RNA, 19 nt, Homo sapiens
  misc_RNA (1)...(19): siRNA sense strand
cgagaguggugcaggucua

SEQ ID NO: 1162471 - RNA, 19 nt, Homo sapiens
  misc_RNA (1)...(19): siRNA sense strand
gauacaaaggucaauacaa

SEQ ID NO: 1162472 - RNA, 19 nt, Homo sapiens
  misc_RNA (1)...(19): siRNA sense strand
uaugagaccagcaagauga

SEQ ID NO: 1162473 - RNA, 19 nt, Homo sapiens
  misc_RNA (1)...(19): siRNA sense strand
ggacaucaucaaagaauac

SEQ ID NO: 1162474 - RNA, 19 nt, Homo sapiens
  misc_RNA (1)...(19): siRNA sense strand
gcugaaggacaucaucaaa

SEQ ID NO: 1162475 - RNA, 19 nt, Homo sapiens
  misc_RNA (1)...(19): siRNA sense strand
gagugcagcugcccagucu

SEQ ID NO: 1162476 - RNA, 19 nt, Homo sapiens
  misc_RNA (1)...(19): siRNA sense strand
ugaaaguccucaaguuugc

SEQ ID NO: 1162477 - RNA, 19 nt, Homo sapiens
  misc_RNA (1)...(19): siRNA sense strand
gcagaaguaccuggacuau

SEQ ID NO: 1162478 - RNA, 19 nt, Homo sapiens
  misc_RNA (1)...(19): siRNA sense strand
gaggauggcagcagugauc

SEQ ID NO: 1162479 - RNA, 19 nt, Homo sapiens
  misc_RNA (1)...(19): siRNA sense strand
auacaucauucacucuuug

SEQ ID NO: 1162480 - RNA, 19 nt, Homo sapiens
  misc_RNA (1)...(19): siRNA sense strand
guauuugggauucaauuga

SEQ ID NO: 1162481 - RNA, 19 nt, Homo sapiens
  misc_RNA (1)...(19): siRNA sense strand
agcagaagcuaaagccaaa

SEQ ID NO: 1162482 - RNA, 19 nt, Homo sapiens
  misc_RNA (1)...(19): siRNA sense strand
gcccugggauacaucauuc

SEQ ID NO: 1162483 - RNA, 19 nt, Homo sapiens
  misc_RNA (1)...(19): siRNA sense strand
caaggucaaagccaagaaa

SEQ ID NO: 1162484 - RNA, 19 nt, Homo sapiens
  misc_RNA (1)...(19): siRNA sense strand
ugacagugacccagaaugu

SEQ ID NO: 1162485 - RNA, 19 nt, Homo sapiens
  misc_RNA (1)...(19): siRNA sense strand
ggaaauugauaagaaugac

SEQ ID NO: 1162486 - RNA, 19 nt, Homo sapiens
  misc_RNA (1)...(19): siRNA sense strand
ucccugagaucaccuaaag

SEQ ID NO: 1162487 - RNA, 19 nt, Homo sapiens
  misc_RNA (1)...(19): siRNA sense strand
gauccaggcgggagcagaa

SEQ ID NO: 1162488 - RNA, 19 nt, Homo sapiens
  misc_RNA (1)...(19): siRNA sense strand
ggauacaucauucacucuu

SEQ ID NO: 1162489 - RNA, 19 nt, Homo sapiens
  misc_RNA (1)...(19): siRNA sense strand
ucaaagaauacacugaugu

SEQ ID NO: 1162490 - RNA, 19 nt, Homo sapiens
  misc_RNA (1)...(19): siRNA sense strand
cagcugacaccaagaaaca

SEQ ID NO: 1162491 - RNA, 19 nt, Homo sapiens
  misc_RNA (1)...(19): siRNA sense strand
gcucgaugaugcagacucu

SEQ ID NO: 1162492 - RNA, 19 nt, Homo sapiens
  misc_RNA (1)...(19): siRNA sense strand
caagcugggucugcucaug

SEQ ID NO: 1162493 - RNA, 19 nt, Homo sapiens
  misc_RNA (1)...(19): siRNA sense strand
gcugauacaaaggucaaua

SEQ ID NO: 1162494 - RNA, 19 nt, Homo sapiens
  misc_RNA (1)...(19): siRNA sense strand
caacugggacgaagcugau

SEQ ID NO: 1162495 - RNA, 19 nt, Homo sapiens
  misc_RNA (1)...(19): siRNA sense strand
gggaacgacuaaggacuca

SEQ ID NO: 1162496 - RNA, 19 nt, Homo sapiens
  misc_RNA (1)...(19): siRNA sense strand
cugccaagcuccagucauc

SEQ ID NO: 1162497 - RNA, 19 nt, Homo sapiens
  misc_RNA (1)...(19): siRNA sense strand
auaagaaugaccacuugua

SEQ ID NO: 1162498 - RNA, 19 nt, Homo sapiens
  misc_RNA (1)...(19): siRNA sense strand
cccgaaaggugaagcaucu

SEQ ID NO: 1162499 - RNA, 19 nt, Homo sapiens
  misc_RNA (1)...(19): siRNA sense strand
cugaugaguuugugaagca

SEQ ID NO: 1162500 - RNA, 19 nt, Homo sapiens
  misc_RNA (1)...(19): siRNA sense strand
gguauuugggauucaauug

SEQ ID NO: 1162501 - RNA, 19 nt, Homo sapiens
  misc_RNA (1)...(19): siRNA sense strand
gacgaagauucccaucaag

SEQ ID NO: 1162502 - RNA, 19 nt, Homo sapiens
  misc_RNA (1)...(19): siRNA sense strand
uaagaaugaccacuuguac

SEQ ID NO: 1162503 - RNA, 19 nt, Homo sapiens
  misc_RNA (1)...(19): siRNA sense strand
ggcgggagcagaagcuaaa

SEQ ID NO: 1162504 - RNA, 19 nt, Homo sapiens
  misc_RNA (1)...(19): siRNA sense strand
ggacaguagcucgaugaug

SEQ ID NO: 1162505 - RNA, 19 nt, Homo sapiens
  misc_RNA (1)...(19): siRNA sense strand
gagaguggugcaggucuaa

SEQ ID NO: 1162506 - RNA, 19 nt, Homo sapiens
  misc_RNA (1)...(19): siRNA sense strand
agaaugaccacuuguacau

SEQ ID NO: 1162507 - RNA, 19 nt, Homo sapiens
  misc_RNA (1)...(19): siRNA sense strand
gcaagggagggcaaaugau

SEQ ID NO: 1162508 - RNA, 19 nt, Homo sapiens
  misc_RNA (1)...(19): siRNA sense strand
gaccacuuguacauucuuc

SEQ ID NO: 1162509 - RNA, 19 nt, Homo sapiens
  misc_RNA (1)...(19): siRNA sense strand
gauggcagcagugaucaga

SEQ ID NO: 1162510 - RNA, 19 nt, Homo sapiens
  misc_RNA (1)...(19): siRNA sense strand
cgauggaagcggauuugaa

SEQ ID NO: 1162511 - RNA, 19 nt, Homo sapiens
  misc_RNA (1)...(19): siRNA sense strand
caagaugaaaguccucaag

SEQ ID NO: 1162512 - RNA, 19 nt, Homo sapiens
  misc_RNA (1)...(19): siRNA sense strand
gauaagaaugaccacuugu

SEQ ID NO: 1162513 - RNA, 19 nt, Homo sapiens
  misc_RNA (1)...(19): siRNA sense strand
aggacaucaucaaagaaua

SEQ ID NO: 1162514 - RNA, 19 nt, Homo sapiens
  misc_RNA (1)...(19): siRNA sense strand
ccagugaggcugucaucug

SEQ ID NO: 1162515 - RNA, 19 nt, Homo sapiens
  misc_RNA (1)...(19): siRNA sense strand
gcugacaccaagaaacaga

SEQ ID NO: 1162516 - RNA, 19 nt, Homo sapiens
  misc_RNA (1)...(19): siRNA sense strand
cuucuuagcaucaucuuca

SEQ ID NO: 1162517 - RNA, 19 nt, Homo sapiens
  misc_RNA (1)...(19): siRNA sense strand
gcugacugauacccagguu

SEQ ID NO: 1162518 - RNA, 19 nt, Homo sapiens
  misc_RNA (1)...(19): siRNA sense strand
uggcagcagugaucagagu

SEQ ID NO: 1162519 - RNA, 19 nt, Homo sapiens
  misc_RNA (1)...(19): siRNA sense strand
uagcagcugacaccaagaa

SEQ ID NO: 1162520 - RNA, 19 nt, Homo sapiens
  misc_RNA (1)...(19): siRNA sense strand
agacaccgaaggccucaaa

SEQ ID NO: 1162521 - RNA, 19 nt, Homo sapiens
  misc_RNA (1)...(19): siRNA sense strand
gcauacugggaacgacuaa

SEQ ID NO: 1162522 - RNA, 19 nt, Homo sapiens
  misc_RNA (1)...(19): siRNA sense strand
ggaggugcugcgcaaguug

SEQ ID NO: 1162523 - RNA, 19 nt, Homo sapiens
  misc_RNA (1)...(19): siRNA sense strand
uacaaaggcucaggagacu

SEQ ID NO: 1162524 - RNA, 19 nt, Homo sapiens
  misc_RNA (1)...(19): siRNA sense strand
cugcucauggugcuucuua

SEQ ID NO: 1162525 - RNA, 19 nt, Homo sapiens
  misc_RNA (1)...(19): siRNA sense strand
gaaguaccuuuuggcuaaa

SEQ ID NO: 1162526 - RNA, 19 nt, Homo sapiens
  misc_RNA (1)...(19): siRNA sense strand
gcaccuuagagcccacuga

SEQ ID NO: 1162527 - RNA, 19 nt, Homo sapiens
  misc_RNA (1)...(19): siRNA sense strand
ccgccacucucacauuugg

SEQ ID NO: 1162528 - RNA, 19 nt, Homo sapiens
  misc_RNA (1)...(19): siRNA sense strand
ugaccgccacucucacauu

SEQ ID NO: 1162529 - RNA, 19 nt, Homo sapiens
  misc_RNA (1)...(19): siRNA sense strand
guaccgagaggcgauggaa

SEQ ID NO: 1162530 - RNA, 19 nt, Homo sapiens
  misc_RNA (1)...(19): siRNA sense strand
gagaccagcaagaugaaag

SEQ ID NO: 1162531 - RNA, 19 nt, Homo sapiens
  misc_RNA (1)...(19): siRNA sense strand
ugcaagggagggcaaauga

SEQ ID NO: 1162532 - RNA, 19 nt, Homo sapiens
  misc_RNA (1)...(19): siRNA sense strand
uaucggacccugggccaaa

SEQ ID NO: 1162533 - RNA, 19 nt, Homo sapiens
  misc_RNA (1)...(19): siRNA sense strand
ggucucagaggaugugaag

SEQ ID NO: 1162534 - RNA, 19 nt, Homo sapiens
  misc_RNA (1)...(19): siRNA sense strand
aaggacaucaucaaagaau

SEQ ID NO: 1162535 - RNA, 19 nt, Homo sapiens
  misc_RNA (1)...(19): siRNA sense strand
ccugugguuucuccuacaa

SEQ ID NO: 1162536 - RNA, 19 nt, Homo sapiens
  misc_RNA (1)...(19): siRNA sense strand
gcucuggugccugugguuu

SEQ ID NO: 1162537 - RNA, 19 nt, Homo sapiens
  misc_RNA (1)...(19): siRNA sense strand
aggaaugggcagcucagua

SEQ ID NO: 1162538 - RNA, 19 nt, Homo sapiens
  misc_RNA (1)...(19): siRNA sense strand
gaaggaucccaaggaaugg

SEQ ID NO: 1162539 - RNA, 19 nt, Homo sapiens
  misc_RNA (1)...(19): siRNA sense strand
gggccugcgcucuuacuau

SEQ ID NO: 1162540 - RNA, 19 nt, Homo sapiens
  misc_RNA (1)...(19): siRNA sense strand
ugacugauacccagguucu

SEQ ID NO: 1162541 - RNA, 19 nt, Homo sapiens
  misc_RNA (1)...(19): siRNA sense strand
gggcagaacuguacaagga

SEQ ID NO: 1162542 - RNA, 19 nt, Homo sapiens
  misc_RNA (1)...(19): siRNA sense strand
gaaguaaggcugucagaga

SEQ ID NO: 1162543 - RNA, 19 nt, Homo sapiens
  misc_RNA (1)...(19): siRNA sense strand
acaaggagccuaccaauga

SEQ ID NO: 1162544 - RNA, 19 nt, Homo sapiens
  misc_RNA (1)...(19): siRNA sense strand
gaagaaggaucggauugau

SEQ ID NO: 1162545 - RNA, 19 nt, Homo sapiens
  misc_RNA (1)...(19): siRNA sense strand
ggccagagcugcaggacaa

SEQ ID NO: 1162546 - RNA, 19 nt, Homo sapiens
  misc_RNA (1)...(19): siRNA sense strand
gcacggcugucuaugaugu

SEQ ID NO: 1162547 - RNA, 19 nt, Homo sapiens
  misc_RNA (1)...(19): siRNA sense strand
uagaggagcuacuaaagga

SEQ ID NO: 1162548 - RNA, 19 nt, Homo sapiens
  misc_RNA (1)...(19): siRNA sense strand
acacauggguccugcaaga

SEQ ID NO: 1162549 - RNA, 19 nt, Homo sapiens
  misc_RNA (1)...(19): siRNA sense strand
gaagaagaaggaucggauu

SEQ ID NO: 1162550 - RNA, 19 nt, Homo sapiens
  misc_RNA (1)...(19): siRNA sense strand
gggaucaguuuaugucuca

SEQ ID NO: 1162551 - RNA, 19 nt, Homo sapiens
  misc_RNA (1)...(19): siRNA sense strand
ugagaagugucuugcaguu

SEQ ID NO: 1162552 - RNA, 19 nt, Homo sapiens
  misc_RNA (1)...(19): siRNA sense strand
cagcucagaucccucuuug

SEQ ID NO: 1162553 - RNA, 19 nt, Homo sapiens
  misc_RNA (1)...(19): siRNA sense strand
agaagugucuugcaguuuc

SEQ ID NO: 1162554 - RNA, 19 nt, Homo sapiens
  misc_RNA (1)...(19): siRNA sense strand
aaguaaggcugucagagaa

SEQ ID NO: 1162555 - RNA, 19 nt, Homo sapiens
  misc_RNA (1)...(19): siRNA sense strand
aaaccuguguccacuaugu

SEQ ID NO: 1162556 - RNA, 19 nt, Homo sapiens
  misc_RNA (1)...(19): siRNA sense strand
agaaaccuguguccacuau

SEQ ID NO: 1162557 - RNA, 19 nt, Homo sapiens
  misc_RNA (1)...(19): siRNA sense strand
guaaggcugucagagaaga

SEQ ID NO: 1162558 - RNA, 19 nt, Homo sapiens
  misc_RNA (1)...(19): siRNA sense strand
ccugaaacccucacuguug

SEQ ID NO: 1162559 - RNA, 19 nt, Homo sapiens
  misc_RNA (1)...(19): siRNA sense strand
agacugagaucuuguucca

SEQ ID NO: 1162560 - RNA, 19 nt, Homo sapiens
  misc_RNA (1)...(19): siRNA sense strand
ugucaaccauucugaguuc

SEQ ID NO: 1162561 - RNA, 19 nt, Homo sapiens
  misc_RNA (1)...(19): siRNA sense strand
cagccaagauccaccaaag

SEQ ID NO: 1162562 - RNA, 19 nt, Homo sapiens
  misc_RNA (1)...(19): siRNA sense strand
gaggcacggcugucuauga

SEQ ID NO: 1162563 - RNA, 19 nt, Homo sapiens
  misc_RNA (1)...(19): siRNA sense strand
guacaaggagccuaccaau

SEQ ID NO: 1162564 - RNA, 19 nt, Homo sapiens
  misc_RNA (1)...(19): siRNA sense strand
gaagugucuugcaguuucu

SEQ ID NO: 1162565 - RNA, 19 nt, Homo sapiens
  misc_RNA (1)...(19): siRNA sense strand
gagaagugucuugcaguuu

SEQ ID NO: 1162566 - RNA, 19 nt, Homo sapiens
  misc_RNA (1)...(19): siRNA sense strand
ggaaggcacaggcaaagag

SEQ ID NO: 1162567 - RNA, 19 nt, Homo sapiens
  misc_RNA (1)...(19): siRNA sense strand
caaggagccuaccaaugag

SEQ ID NO: 1162568 - RNA, 19 nt, Homo sapiens
  misc_RNA (1)...(19): siRNA sense strand
caaccucugugcugauguc

SEQ ID NO: 1162569 - RNA, 19 nt, Homo sapiens
  misc_RNA (1)...(19): siRNA sense strand
ucaacgggaucaguuuaug

SEQ ID NO: 1162570 - RNA, 19 nt, Homo sapiens
  misc_RNA (1)...(19): siRNA sense strand
ccaaugaggagcuuaaucg

SEQ ID NO: 1162571 - RNA, 19 nt, Homo sapiens
  misc_RNA (1)...(19): siRNA sense strand
ggacaucagccaagaucca

SEQ ID NO: 1162572 - RNA, 19 nt, Homo sapiens
  misc_RNA (1)...(19): siRNA sense strand
ugucagagaagaagaagga

SEQ ID NO: 1162573 - RNA, 19 nt, Homo sapiens
  misc_RNA (1)...(19): siRNA sense strand
cagccucuaugucccagaa

SEQ ID NO: 1162574 - RNA, 19 nt, Homo sapiens
  misc_RNA (1)...(19): siRNA sense strand
acauggguccugcaagaua

SEQ ID NO: 1162575 - RNA, 19 nt, Homo sapiens
  misc_RNA (1)...(19): siRNA sense strand
guuuaugucucagcucaga

SEQ ID NO: 1162576 - RNA, 19 nt, Homo sapiens
  misc_RNA (1)...(19): siRNA sense strand
ucggauugaugccuuccua

SEQ ID NO: 1162577 - RNA, 19 nt, Homo sapiens
  misc_RNA (1)...(19): siRNA sense strand
gccaagauccaccaaagca

SEQ ID NO: 1162578 - RNA, 19 nt, Homo sapiens
  misc_RNA (1)...(19): siRNA sense strand
ggacaaugguggggacuau

SEQ ID NO: 1162579 - RNA, 19 nt, Homo sapiens
  misc_RNA (1)...(19): siRNA sense strand
caacgggaucaguuuaugu

SEQ ID NO: 1162580 - RNA, 19 nt, Homo sapiens
  misc_RNA (1)...(19): siRNA sense strand
uaacacauggguccugcaa

SEQ ID NO: 1162581 - RNA, 19 nt, Homo sapiens
  misc_RNA (1)...(19): siRNA sense strand
cagcccagguuacuguugu

SEQ ID NO: 1162582 - RNA, 19 nt, Homo sapiens
  misc_RNA (1)...(19): siRNA sense strand
gacuaugucucagcugcuu

SEQ ID NO: 1162583 - RNA, 19 nt, Homo sapiens
  misc_RNA (1)...(19): siRNA sense strand
cagcagggcagaacuguac

SEQ ID NO: 1162584 - RNA, 19 nt, Homo sapiens
  misc_RNA (1)...(19): siRNA sense strand
agaagaaggaucggauuga

SEQ ID NO: 1162585 - RNA, 19 nt, Homo sapiens
  misc_RNA (1)...(19): siRNA sense strand
ggacaaggacgggcugaac

SEQ ID NO: 1162586 - RNA, 19 nt, Homo sapiens
  misc_RNA (1)...(19): siRNA sense strand
cugcaucuccguccacuga

SEQ ID NO: 1162587 - RNA, 19 nt, Homo sapiens
  misc_RNA (1)...(19): siRNA sense strand
aggcacggcugucuaugau

SEQ ID NO: 1162588 - RNA, 19 nt, Homo sapiens
  misc_RNA (1)...(19): siRNA sense strand
ggccuucuccguugucuuc

SEQ ID NO: 1162589 - RNA, 19 nt, Homo sapiens
  misc_RNA (1)...(19): siRNA sense strand
caagggccaggguggguuu

SEQ ID NO: 1162590 - RNA, 19 nt, Homo sapiens
  misc_RNA (1)...(19): siRNA sense strand
gcaucuccguccacugagu

SEQ ID NO: 1162591 - RNA, 19 nt, Homo sapiens
  misc_RNA (1)...(19): siRNA sense strand
cuaccaaugaggagcuuaa

SEQ ID NO: 1162592 - RNA, 19 nt, Homo sapiens
  misc_RNA (1)...(19): siRNA sense strand
cugguugucuuccuugugu

SEQ ID NO: 1162593 - RNA, 19 nt, Homo sapiens
  misc_RNA (1)...(19): siRNA sense strand
cacuccagcuugcuucguu

SEQ ID NO: 1162594 - RNA, 19 nt, Homo sapiens
  misc_RNA (1)...(19): siRNA sense strand
agucaacgggaucaguuua

SEQ ID NO: 1162595 - RNA, 19 nt, Homo sapiens
  misc_RNA (1)...(19): siRNA sense strand
gcaagauccauaccaccau

SEQ ID NO: 1162596 - RNA, 19 nt, Homo sapiens
  misc_RNA (1)...(19): siRNA sense strand
cauccgaccagacaucaau

SEQ ID NO: 1162597 - RNA, 19 nt, Homo sapiens
  misc_RNA (1)...(19): siRNA sense strand
aagaagaaggaucggauug

SEQ ID NO: 1162598 - RNA, 19 nt, Homo sapiens
  misc_RNA (1)...(19): siRNA sense strand
ccucugugcugaugucacu

SEQ ID NO: 1162599 - RNA, 19 nt, Homo sapiens
  misc_RNA (1)...(19): siRNA sense strand
gggagacugagaucuuguu

SEQ ID NO: 1162600 - RNA, 19 nt, Homo sapiens
  misc_RNA (1)...(19): siRNA sense strand
uccguugucuuccuggauu

SEQ ID NO: 1162601 - RNA, 19 nt, Homo sapiens
  misc_RNA (1)...(19): siRNA sense strand
cauggguccugcaagauac

SEQ ID NO: 1162602 - RNA, 19 nt, Homo sapiens
  misc_RNA (1)...(19): siRNA sense strand
ucgggagacugagaucuug

SEQ ID NO: 1162603 - RNA, 19 nt, Homo sapiens
  misc_RNA (1)...(19): siRNA sense strand
ccagcuugcuucguuuaca

SEQ ID NO: 1162604 - RNA, 19 nt, Homo sapiens
  misc_RNA (1)...(19): siRNA sense strand
ucccagaagcgccuuauuc

SEQ ID NO: 1162605 - RNA, 19 nt, Homo sapiens
  misc_RNA (1)...(19): siRNA sense strand
gcagggcagaacuguacaa

SEQ ID NO: 1162606 - RNA, 19 nt, Homo sapiens
  misc_RNA (1)...(19): siRNA sense strand
cagaaaccuguguccacua

SEQ ID NO: 1162607 - RNA, 19 nt, Homo sapiens
  misc_RNA (1)...(19): siRNA sense strand
gcuaaauuccgccaguucu

SEQ ID NO: 1162608 - RNA, 19 nt, Homo sapiens
  misc_RNA (1)...(19): siRNA sense strand
gguuccaccugcuguugau

SEQ ID NO: 1162609 - RNA, 19 nt, Homo sapiens
  misc_RNA (1)...(19): siRNA sense strand
gaaggauggcguggcacuu

SEQ ID NO: 1162610 - RNA, 19 nt, Homo sapiens
  misc_RNA (1)...(19): siRNA sense strand
caccugaaacccucacugu

SEQ ID NO: 1162611 - RNA, 19 nt, Homo sapiens
  misc_RNA (1)...(19): siRNA sense strand
gauccgggcuuuugaccau

SEQ ID NO: 1162612 - RNA, 19 nt, Homo sapiens
  misc_RNA (1)...(19): siRNA sense strand
ggagacugagaucuuguuc

SEQ ID NO: 1162613 - RNA, 19 nt, Homo sapiens
  misc_RNA (1)...(19): siRNA sense strand
gcaaagaggggaagaaagc

SEQ ID NO: 1162614 - RNA, 19 nt, Homo sapiens
  misc_RNA (1)...(19): siRNA sense strand
caugcugguugucuuccuu

SEQ ID NO: 1162615 - RNA, 19 nt, Homo sapiens
  misc_RNA (1)...(19): siRNA sense strand
gaccaugcccagggaaauc

SEQ ID NO: 1162616 - RNA, 19 nt, Homo sapiens
  misc_RNA (1)...(19): siRNA sense strand
ggcacuccaugcugacauc

SEQ ID NO: 1162617 - RNA, 19 nt, Homo sapiens
  misc_RNA (1)...(19): siRNA sense strand
cagcuugcuucguuuacag

SEQ ID NO: 1162618 - RNA, 19 nt, Homo sapiens
  misc_RNA (1)...(19): siRNA sense strand
gggcagaacuguacaagga

SEQ ID NO: 1162619 - RNA, 19 nt, Homo sapiens
  misc_RNA (1)...(19): siRNA sense strand
gaaguaaggcugucagaga

SEQ ID NO: 1162620 - RNA, 19 nt, Homo sapiens
  misc_RNA (1)...(19): siRNA sense strand
acaaggagccuaccaauga

SEQ ID NO: 1162621 - RNA, 19 nt, Homo sapiens
  misc_RNA (1)...(19): siRNA sense strand
gaagaaggaucggauugau

SEQ ID NO: 1162622 - RNA, 19 nt, Homo sapiens
  misc_RNA (1)...(19): siRNA sense strand
ggccagagcugcaggacaa

SEQ ID NO: 1162623 - RNA, 19 nt, Homo sapiens
  misc_RNA (1)...(19): siRNA sense strand
gcacggcugucuaugaugu

SEQ ID NO: 1162624 - RNA, 19 nt, Homo sapiens
  misc_RNA (1)...(19): siRNA sense strand
uagaggagcuacuaaagga

SEQ ID NO: 1162625 - RNA, 19 nt, Homo sapiens
  misc_RNA (1)...(19): siRNA sense strand
acacauggguccugcaaga

SEQ ID NO: 1162626 - RNA, 19 nt, Homo sapiens
  misc_RNA (1)...(19): siRNA sense strand
gaagaagaaggaucggauu

SEQ ID NO: 1162627 - RNA, 19 nt, Homo sapiens
  misc_RNA (1)...(19): siRNA sense strand
gggaucaguuuaugucuca

SEQ ID NO: 1162628 - RNA, 19 nt, Homo sapiens
  misc_RNA (1)...(19): siRNA sense strand
ugagaagugucuugcaguu

SEQ ID NO: 1162629 - RNA, 19 nt, Homo sapiens
  misc_RNA (1)...(19): siRNA sense strand
cagcucagaucccucuuug

SEQ ID NO: 1162630 - RNA, 19 nt, Homo sapiens
  misc_RNA (1)...(19): siRNA sense strand
agaagugucuugcaguuuc

SEQ ID NO: 1162631 - RNA, 19 nt, Homo sapiens
  misc_RNA (1)...(19): siRNA sense strand
aaguaaggcugucagagaa

SEQ ID NO: 1162632 - RNA, 19 nt, Homo sapiens
  misc_RNA (1)...(19): siRNA sense strand
aaaccuguguccacuaugu

SEQ ID NO: 1162633 - RNA, 19 nt, Homo sapiens
  misc_RNA (1)...(19): siRNA sense strand
agaaaccuguguccacuau

SEQ ID NO: 1162634 - RNA, 19 nt, Homo sapiens
  misc_RNA (1)...(19): siRNA sense strand
guaaggcugucagagaaga

SEQ ID NO: 1162635 - RNA, 19 nt, Homo sapiens
  misc_RNA (1)...(19): siRNA sense strand
ccugaaacccucacuguug

SEQ ID NO: 1162636 - RNA, 19 nt, Homo sapiens
  misc_RNA (1)...(19): siRNA sense strand
agacugagaucuuguucca

SEQ ID NO: 1162637 - RNA, 19 nt, Homo sapiens
  misc_RNA (1)...(19): siRNA sense strand
ugucaaccauucugaguuc

SEQ ID NO: 1162638 - RNA, 19 nt, Homo sapiens
  misc_RNA (1)...(19): siRNA sense strand
cagccaagauccaccaaag

SEQ ID NO: 1162639 - RNA, 19 nt, Homo sapiens
  misc_RNA (1)...(19): siRNA sense strand
gaggcacggcugucuauga

SEQ ID NO: 1162640 - RNA, 19 nt, Homo sapiens
  misc_RNA (1)...(19): siRNA sense strand
guacaaggagccuaccaau

SEQ ID NO: 1162641 - RNA, 19 nt, Homo sapiens
  misc_RNA (1)...(19): siRNA sense strand
gaagugucuugcaguuucu

SEQ ID NO: 1162642 - RNA, 19 nt, Homo sapiens
  misc_RNA (1)...(19): siRNA sense strand
gagaagugucuugcaguuu

SEQ ID NO: 1162643 - RNA, 19 nt, Homo sapiens
  misc_RNA (1)...(19): siRNA sense strand
ggaaggcacaggcaaagag

SEQ ID NO: 1162644 - RNA, 19 nt, Homo sapiens
  misc_RNA (1)...(19): siRNA sense strand
gaaaauguggcccuucuga

SEQ ID NO: 1162645 - RNA, 19 nt, Homo sapiens
  misc_RNA (1)...(19): siRNA sense strand
caaggagccuaccaaugag

SEQ ID NO: 1162646 - RNA, 19 nt, Homo sapiens
  misc_RNA (1)...(19): siRNA sense strand
caaccucugugcugauguc

SEQ ID NO: 1162647 - RNA, 19 nt, Homo sapiens
  misc_RNA (1)...(19): siRNA sense strand
ucaacgggaucaguuuaug

SEQ ID NO: 1162648 - RNA, 19 nt, Homo sapiens
  misc_RNA (1)...(19): siRNA sense strand
ccaaugaggagcuuaaucg

SEQ ID NO: 1162649 - RNA, 19 nt, Homo sapiens
  misc_RNA (1)...(19): siRNA sense strand
ggacaucagccaagaucca

SEQ ID NO: 1162650 - RNA, 19 nt, Homo sapiens
  misc_RNA (1)...(19): siRNA sense strand
ugucagagaagaagaagga

SEQ ID NO: 1162651 - RNA, 19 nt, Homo sapiens
  misc_RNA (1)...(19): siRNA sense strand
cagccucuaugucccagaa

SEQ ID NO: 1162652 - RNA, 19 nt, Homo sapiens
  misc_RNA (1)...(19): siRNA sense strand
acauggguccugcaagaua

SEQ ID NO: 1162653 - RNA, 19 nt, Homo sapiens
  misc_RNA (1)...(19): siRNA sense strand
guuuaugucucagcucaga

SEQ ID NO: 1162654 - RNA, 19 nt, Homo sapiens
  misc_RNA (1)...(19): siRNA sense strand
ucggauugaugccuuccua

SEQ ID NO: 1162655 - RNA, 19 nt, Homo sapiens
  misc_RNA (1)...(19): siRNA sense strand
gccaagauccaccaaagca

SEQ ID NO: 1162656 - RNA, 19 nt, Homo sapiens
  misc_RNA (1)...(19): siRNA sense strand
ggacaaugguggggacuau

SEQ ID NO: 1162657 - RNA, 19 nt, Homo sapiens
  misc_RNA (1)...(19): siRNA sense strand
caacgggaucaguuuaugu

SEQ ID NO: 1162658 - RNA, 19 nt, Homo sapiens
  misc_RNA (1)...(19): siRNA sense strand
uaacacauggguccugcaa

SEQ ID NO: 1162659 - RNA, 19 nt, Homo sapiens
  misc_RNA (1)...(19): siRNA sense strand
cagcccagguuacuguugu

SEQ ID NO: 1162660 - RNA, 19 nt, Homo sapiens
  misc_RNA (1)...(19): siRNA sense strand
gacuaugucucagcugcuu

SEQ ID NO: 1162661 - RNA, 19 nt, Homo sapiens
  misc_RNA (1)...(19): siRNA sense strand
agaagaaggaucggauuga

SEQ ID NO: 1162662 - RNA, 19 nt, Homo sapiens
  misc_RNA (1)...(19): siRNA sense strand
cagcagggcagaacuguac

SEQ ID NO: 1162663 - RNA, 19 nt, Homo sapiens
  misc_RNA (1)...(19): siRNA sense strand
ggacaaggacgggcugaac

SEQ ID NO: 1162664 - RNA, 19 nt, Homo sapiens
  misc_RNA (1)...(19): siRNA sense strand
cugcaucuccguccacuga

SEQ ID NO: 1162665 - RNA, 19 nt, Homo sapiens
  misc_RNA (1)...(19): siRNA sense strand
aggcacggcugucuaugau

SEQ ID NO: 1162666 - RNA, 19 nt, Homo sapiens
  misc_RNA (1)...(19): siRNA sense strand
ggccuucuccguugucuuc

SEQ ID NO: 1162667 - RNA, 19 nt, Homo sapiens
  misc_RNA (1)...(19): siRNA sense strand
caagggccaggguggguuu

SEQ ID NO: 1162668 - RNA, 19 nt, Homo sapiens
  misc_RNA (1)...(19): siRNA sense strand
cuaccaaugaggagcuuaa

SEQ ID NO: 1162669 - RNA, 19 nt, Homo sapiens
  misc_RNA (1)...(19): siRNA sense strand
gcaucuccguccacugagu

SEQ ID NO: 1162670 - RNA, 19 nt, Homo sapiens
  misc_RNA (1)...(19): siRNA sense strand
cugguugucuuccuugugu

SEQ ID NO: 1162671 - RNA, 19 nt, Homo sapiens
  misc_RNA (1)...(19): siRNA sense strand
cacuccagcuugcuucguu

SEQ ID NO: 1162672 - RNA, 19 nt, Homo sapiens
  misc_RNA (1)...(19): siRNA sense strand
agucaacgggaucaguuua

SEQ ID NO: 1162673 - RNA, 19 nt, Homo sapiens
  misc_RNA (1)...(19): siRNA sense strand
gcaagauccauaccaccau

SEQ ID NO: 1162674 - RNA, 19 nt, Homo sapiens
  misc_RNA (1)...(19): siRNA sense strand
cauccgaccagacaucaau

SEQ ID NO: 1162675 - RNA, 19 nt, Homo sapiens
  misc_RNA (1)...(19): siRNA sense strand
gggagacugagaucuuguu

SEQ ID NO: 1162676 - RNA, 19 nt, Homo sapiens
  misc_RNA (1)...(19): siRNA sense strand
ccucugugcugaugucacu

SEQ ID NO: 1162677 - RNA, 19 nt, Homo sapiens
  misc_RNA (1)...(19): siRNA sense strand
uccguugucuuccuggauu

SEQ ID NO: 1162678 - RNA, 19 nt, Homo sapiens
  misc_RNA (1)...(19): siRNA sense strand
ucgggagacugagaucuug

SEQ ID NO: 1162679 - RNA, 19 nt, Homo sapiens
  misc_RNA (1)...(19): siRNA sense strand
cauggguccugcaagauac

SEQ ID NO: 1162680 - RNA, 19 nt, Homo sapiens
  misc_RNA (1)...(19): siRNA sense strand
aagaagaaggaucggauug

SEQ ID NO: 1162681 - RNA, 19 nt, Homo sapiens
  misc_RNA (1)...(19): siRNA sense strand
ccagcuugcuucguuuaca

SEQ ID NO: 1162682 - RNA, 19 nt, Homo sapiens
  misc_RNA (1)...(19): siRNA sense strand
ucccagaagcgccuuauuc

SEQ ID NO: 1162683 - RNA, 19 nt, Homo sapiens
  misc_RNA (1)...(19): siRNA sense strand
gaaggauggcguggcacuu

SEQ ID NO: 1162684 - RNA, 19 nt, Homo sapiens
  misc_RNA (1)...(19): siRNA sense strand
cagaaaccuguguccacua

SEQ ID NO: 1162685 - RNA, 19 nt, Homo sapiens
  misc_RNA (1)...(19): siRNA sense strand
gcagggcagaacuguacaa

SEQ ID NO: 1162686 - RNA, 19 nt, Homo sapiens
  misc_RNA (1)...(19): siRNA sense strand
gcuaaauuccgccaguucu

SEQ ID NO: 1162687 - RNA, 19 nt, Homo sapiens
  misc_RNA (1)...(19): siRNA sense strand
gguuccaccugcuguugau

SEQ ID NO: 1162688 - RNA, 19 nt, Homo sapiens
  misc_RNA (1)...(19): siRNA sense strand
caccugaaacccucacugu

SEQ ID NO: 1162689 - RNA, 19 nt, Homo sapiens
  misc_RNA (1)...(19): siRNA sense strand
gauccgggcuuuugaccau

SEQ ID NO: 1162690 - RNA, 19 nt, Homo sapiens
  misc_RNA (1)...(19): siRNA sense strand
ggagacugagaucuuguuc

SEQ ID NO: 1162691 - RNA, 19 nt, Homo sapiens
  misc_RNA (1)...(19): siRNA sense strand
gcaaagaggggaagaaagc

SEQ ID NO: 1162692 - RNA, 19 nt, Homo sapiens
  misc_RNA (1)...(19): siRNA sense strand
caugcugguugucuuccuu

SEQ ID NO: 1162693 - RNA, 19 nt, Homo sapiens
  misc_RNA (1)...(19): siRNA sense strand
gaccaugcccagggaaauc

SEQ ID NO: 1162694 - RNA, 19 nt, Homo sapiens
  misc_RNA (1)...(19): siRNA sense strand
ggcacuccaugcugacauc

SEQ ID NO: 1162695 - RNA, 19 nt, Homo sapiens
  misc_RNA (1)...(19): siRNA sense strand
cagcuugcuucguuuacag

SEQ ID NO: 1162696 - RNA, 19 nt, Homo sapiens
  misc_RNA (1)...(19): siRNA sense strand
gggcagaacuguacaagga

SEQ ID NO: 1162697 - RNA, 19 nt, Homo sapiens
  misc_RNA (1)...(19): siRNA sense strand
gaaguaaggcugucagaga

SEQ ID NO: 1162698 - RNA, 19 nt, Homo sapiens
  misc_RNA (1)...(19): siRNA sense strand
acaaggagccuaccaauga

SEQ ID NO: 1162699 - RNA, 19 nt, Homo sapiens
  misc_RNA (1)...(19): siRNA sense strand
gaagaaggaucggauugau

SEQ ID NO: 1162700 - RNA, 19 nt, Homo sapiens
  misc_RNA (1)...(19): siRNA sense strand
ggccagagcugcaggacaa

SEQ ID NO: 1162701 - RNA, 19 nt, Homo sapiens
  misc_RNA (1)...(19): siRNA sense strand
gcacggcugucuaugaugu

SEQ ID NO: 1162702 - RNA, 19 nt, Homo sapiens
  misc_RNA (1)...(19): siRNA sense strand
uagaggagcuacuaaagga

SEQ ID NO: 1162703 - RNA, 19 nt, Homo sapiens
  misc_RNA (1)...(19): siRNA sense strand
acacauggguccugcaaga

SEQ ID NO: 1162704 - RNA, 19 nt, Homo sapiens
  misc_RNA (1)...(19): siRNA sense strand
gaagaagaaggaucggauu

SEQ ID NO: 1162705 - RNA, 19 nt, Homo sapiens
  misc_RNA (1)...(19): siRNA sense strand
gggaucaguuuaugucuca

SEQ ID NO: 1162706 - RNA, 19 nt, Homo sapiens
  misc_RNA (1)...(19): siRNA sense strand
ugagaagugucuugcaguu

SEQ ID NO: 1162707 - RNA, 19 nt, Homo sapiens
  misc_RNA (1)...(19): siRNA sense strand
cagcucagaucccucuuug

SEQ ID NO: 1162708 - RNA, 19 nt, Homo sapiens
  misc_RNA (1)...(19): siRNA sense strand
agaagugucuugcaguuuc

SEQ ID NO: 1162709 - RNA, 19 nt, Homo sapiens
  misc_RNA (1)...(19): siRNA sense strand
aaguaaggcugucagagaa

SEQ ID NO: 1162710 - RNA, 19 nt, Homo sapiens
  misc_RNA (1)...(19): siRNA sense strand
aaaccuguguccacuaugu

SEQ ID NO: 1162711 - RNA, 19 nt, Homo sapiens
  misc_RNA (1)...(19): siRNA sense strand
agaaaccuguguccacuau

SEQ ID NO: 1162712 - RNA, 19 nt, Homo sapiens
  misc_RNA (1)...(19): siRNA sense strand
guaaggcugucagagaaga

SEQ ID NO: 1162713 - RNA, 19 nt, Homo sapiens
  misc_RNA (1)...(19): siRNA sense strand
ccugaaacccucacuguug

SEQ ID NO: 1162714 - RNA, 19 nt, Homo sapiens
  misc_RNA (1)...(19): siRNA sense strand
agacugagaucuuguucca

SEQ ID NO: 1162715 - RNA, 19 nt, Homo sapiens
  misc_RNA (1)...(19): siRNA sense strand
ugucaaccauucugaguuc

SEQ ID NO: 1162716 - RNA, 19 nt, Homo sapiens
  misc_RNA (1)...(19): siRNA sense strand
cagccaagauccaccaaag

SEQ ID NO: 1162717 - RNA, 19 nt, Homo sapiens
  misc_RNA (1)...(19): siRNA sense strand
gaggcacggcugucuauga

SEQ ID NO: 1162718 - RNA, 19 nt, Homo sapiens
  misc_RNA (1)...(19): siRNA sense strand
guacaaggagccuaccaau

SEQ ID NO: 1162719 - RNA, 19 nt, Homo sapiens
  misc_RNA (1)...(19): siRNA sense strand
gaagugucuugcaguuucu

SEQ ID NO: 1162720 - RNA, 19 nt, Homo sapiens
  misc_RNA (1)...(19): siRNA sense strand
gagaagugucuugcaguuu

SEQ ID NO: 1162721 - RNA, 19 nt, Homo sapiens
  misc_RNA (1)...(19): siRNA sense strand
ggaaggcacaggcaaagag

SEQ ID NO: 1162722 - RNA, 19 nt, Homo sapiens
  misc_RNA (1)...(19): siRNA sense strand
caaggagccuaccaaugag

SEQ ID NO: 1162723 - RNA, 19 nt, Homo sapiens
  misc_RNA (1)...(19): siRNA sense strand
caaccucugugcugauguc

SEQ ID NO: 1162724 - RNA, 19 nt, Homo sapiens
  misc_RNA (1)...(19): siRNA sense strand
ucaacgggaucaguuuaug

SEQ ID NO: 1162725 - RNA, 19 nt, Homo sapiens
  misc_RNA (1)...(19): siRNA sense strand
ccaaugaggagcuuaaucg

SEQ ID NO: 1162726 - RNA, 19 nt, Homo sapiens
  misc_RNA (1)...(19): siRNA sense strand
ggacaucagccaagaucca

SEQ ID NO: 1162727 - RNA, 19 nt, Homo sapiens
  misc_RNA (1)...(19): siRNA sense strand
ugucagagaagaagaagga

SEQ ID NO: 1162728 - RNA, 19 nt, Homo sapiens
  misc_RNA (1)...(19): siRNA sense strand
cagccucuaugucccagaa

SEQ ID NO: 1162729 - RNA, 19 nt, Homo sapiens
  misc_RNA (1)...(19): siRNA sense strand
acauggguccugcaagaua

SEQ ID NO: 1162730 - RNA, 19 nt, Homo sapiens
  misc_RNA (1)...(19): siRNA sense strand
guuuaugucucagcucaga

SEQ ID NO: 1162731 - RNA, 19 nt, Homo sapiens
  misc_RNA (1)...(19): siRNA sense strand
ucggauugaugccuuccua

SEQ ID NO: 1162732 - RNA, 19 nt, Homo sapiens
  misc_RNA (1)...(19): siRNA sense strand
gccaagauccaccaaagca

SEQ ID NO: 1162733 - RNA, 19 nt, Homo sapiens
  misc_RNA (1)...(19): siRNA sense strand
ggacaaugguggggacuau

SEQ ID NO: 1162734 - RNA, 19 nt, Homo sapiens
  misc_RNA (1)...(19): siRNA sense strand
caacgggaucaguuuaugu

SEQ ID NO: 1162735 - RNA, 19 nt, Homo sapiens
  misc_RNA (1)...(19): siRNA sense strand
uaacacauggguccugcaa

SEQ ID NO: 1162736 - RNA, 19 nt, Homo sapiens
  misc_RNA (1)...(19): siRNA sense strand
cagcccagguuacuguugu

SEQ ID NO: 1162737 - RNA, 19 nt, Homo sapiens
  misc_RNA (1)...(19): siRNA sense strand
gacuaugucucagcugcuu

SEQ ID NO: 1162738 - RNA, 19 nt, Homo sapiens
  misc_RNA (1)...(19): siRNA sense strand
cagcagggcagaacuguac

SEQ ID NO: 1162739 - RNA, 19 nt, Homo sapiens
  misc_RNA (1)...(19): siRNA sense strand
agaagaaggaucggauuga

SEQ ID NO: 1162740 - RNA, 19 nt, Homo sapiens
  misc_RNA (1)...(19): siRNA sense strand
ggacaaggacgggcugaac

SEQ ID NO: 1162741 - RNA, 19 nt, Homo sapiens
  misc_RNA (1)...(19): siRNA sense strand
cugcaucuccguccacuga

SEQ ID NO: 1162742 - RNA, 19 nt, Homo sapiens
  misc_RNA (1)...(19): siRNA sense strand
aggcacggcugucuaugau

SEQ ID NO: 1162743 - RNA, 19 nt, Homo sapiens
  misc_RNA (1)...(19): siRNA sense strand
ggccuucuccguugucuuc

SEQ ID NO: 1162744 - RNA, 19 nt, Homo sapiens
  misc_RNA (1)...(19): siRNA sense strand
caagggccaggguggguuu

SEQ ID NO: 1162745 - RNA, 19 nt, Homo sapiens
  misc_RNA (1)...(19): siRNA sense strand
gcaucuccguccacugagu

SEQ ID NO: 1162746 - RNA, 19 nt, Homo sapiens
  misc_RNA (1)...(19): siRNA sense strand
cuaccaaugaggagcuuaa

SEQ ID NO: 1162747 - RNA, 19 nt, Homo sapiens
  misc_RNA (1)...(19): siRNA sense strand
cugguugucuuccuugugu

SEQ ID NO: 1162748 - RNA, 19 nt, Homo sapiens
  misc_RNA (1)...(19): siRNA sense strand
cacuccagcuugcuucguu

SEQ ID NO: 1162749 - RNA, 19 nt, Homo sapiens
  misc_RNA (1)...(19): siRNA sense strand
agucaacgggaucaguuua

SEQ ID NO: 1162750 - RNA, 19 nt, Homo sapiens
  misc_RNA (1)...(19): siRNA sense strand
gcaagauccauaccaccau

SEQ ID NO: 1162751 - RNA, 19 nt, Homo sapiens
  misc_RNA (1)...(19): siRNA sense strand
cauccgaccagacaucaau

SEQ ID NO: 1162752 - RNA, 19 nt, Homo sapiens
  misc_RNA (1)...(19): siRNA sense strand
aagaagaaggaucggauug

SEQ ID NO: 1162753 - RNA, 19 nt, Homo sapiens
  misc_RNA (1)...(19): siRNA sense strand
ccucugugcugaugucacu

SEQ ID NO: 1162754 - RNA, 19 nt, Homo sapiens
  misc_RNA (1)...(19): siRNA sense strand
gggagacugagaucuuguu

SEQ ID NO: 1162755 - RNA, 19 nt, Homo sapiens
  misc_RNA (1)...(19): siRNA sense strand
uccguugucuuccuggauu

SEQ ID NO: 1162756 - RNA, 19 nt, Homo sapiens
  misc_RNA (1)...(19): siRNA sense strand
cauggguccugcaagauac

SEQ ID NO: 1162757 - RNA, 19 nt, Homo sapiens
  misc_RNA (1)...(19): siRNA sense strand
ucgggagacugagaucuug

SEQ ID NO: 1162758 - RNA, 19 nt, Homo sapiens
  misc_RNA (1)...(19): siRNA sense strand
ccagcuugcuucguuuaca

SEQ ID NO: 1162759 - RNA, 19 nt, Homo sapiens
  misc_RNA (1)...(19): siRNA sense strand
ucccagaagcgccuuauuc

SEQ ID NO: 1162760 - RNA, 19 nt, Homo sapiens
  misc_RNA (1)...(19): siRNA sense strand
gcagggcagaacuguacaa

SEQ ID NO: 1162761 - RNA, 19 nt, Homo sapiens
  misc_RNA (1)...(19): siRNA sense strand
cagaaaccuguguccacua

SEQ ID NO: 1162762 - RNA, 19 nt, Homo sapiens
  misc_RNA (1)...(19): siRNA sense strand
gcuaaauuccgccaguucu

SEQ ID NO: 1162763 - RNA, 19 nt, Homo sapiens
  misc_RNA (1)...(19): siRNA sense strand
gguuccaccugcuguugau

SEQ ID NO: 1162764 - RNA, 19 nt, Homo sapiens
  misc_RNA (1)...(19): siRNA sense strand
gaaggauggcguggcacuu

SEQ ID NO: 1162765 - RNA, 19 nt, Homo sapiens
  misc_RNA (1)...(19): siRNA sense strand
caccugaaacccucacugu

SEQ ID NO: 1162766 - RNA, 19 nt, Homo sapiens
  misc_RNA (1)...(19): siRNA sense strand
gauccgggcuuuugaccau

SEQ ID NO: 1162767 - RNA, 19 nt, Homo sapiens
  misc_RNA (1)...(19): siRNA sense strand
ggagacugagaucuuguuc

SEQ ID NO: 1162768 - RNA, 19 nt, Homo sapiens
  misc_RNA (1)...(19): siRNA sense strand
gcaaagaggggaagaaagc

SEQ ID NO: 1162769 - RNA, 19 nt, Homo sapiens
  misc_RNA (1)...(19): siRNA sense strand
caugcugguugucuuccuu

SEQ ID NO: 1162770 - RNA, 19 nt, Homo sapiens
  misc_RNA (1)...(19): siRNA sense strand
gaccaugcccagggaaauc

SEQ ID NO: 1162771 - RNA, 19 nt, Homo sapiens
  misc_RNA (1)...(19): siRNA sense strand
ggcacuccaugcugacauc

SEQ ID NO: 1162772 - RNA, 19 nt, Homo sapiens
  misc_RNA (1)...(19): siRNA sense strand
cagcuugcuucguuuacag

SEQ ID NO: 1162773 - RNA, 19 nt, Homo sapiens
  misc_RNA (1)...(19): siRNA sense strand
gaaauggacuauucaauug

SEQ ID NO: 1162774 - RNA, 19 nt, Homo sapiens
  misc_RNA (1)...(19): siRNA sense strand
gaagaggccugccauacua

SEQ ID NO: 1162775 - RNA, 19 nt, Homo sapiens
  misc_RNA (1)...(19): siRNA sense strand
gcagugauauguucugaaa

SEQ ID NO: 1162776 - RNA, 19 nt, Homo sapiens
  misc_RNA (1)...(19): siRNA sense strand
gcuugaaguucgauuauua

SEQ ID NO: 1162777 - RNA, 19 nt, Homo sapiens
  misc_RNA (1)...(19): siRNA sense strand
gcaaagaugucaaggaagu

SEQ ID NO: 1162778 - RNA, 19 nt, Homo sapiens
  misc_RNA (1)...(19): siRNA sense strand
ggaagaagaccuugcuuaa

SEQ ID NO: 1162779 - RNA, 19 nt, Homo sapiens
  misc_RNA (1)...(19): siRNA sense strand
uaacaagcauugacaaaga

SEQ ID NO: 1162780 - RNA, 19 nt, Homo sapiens
  misc_RNA (1)...(19): siRNA sense strand
ccauugaacugucaucuaa

SEQ ID NO: 1162781 - RNA, 19 nt, Homo sapiens
  misc_RNA (1)...(19): siRNA sense strand
cagcucaugucauuauuua

SEQ ID NO: 1162782 - RNA, 19 nt, Homo sapiens
  misc_RNA (1)...(19): siRNA sense strand
gaacagugcuugucauugc

SEQ ID NO: 1162783 - RNA, 19 nt, Homo sapiens
  misc_RNA (1)...(19): siRNA sense strand
gcacaauguuccugaagaa

SEQ ID NO: 1162784 - RNA, 19 nt, Homo sapiens
  misc_RNA (1)...(19): siRNA sense strand
gauggcaccuugacuauau

SEQ ID NO: 1162785 - RNA, 19 nt, Homo sapiens
  misc_RNA (1)...(19): siRNA sense strand
ugacagagaagaacuauuu

SEQ ID NO: 1162786 - RNA, 19 nt, Homo sapiens
  misc_RNA (1)...(19): siRNA sense strand
ucacggaguucaaguguaa

SEQ ID NO: 1162787 - RNA, 19 nt, Homo sapiens
  misc_RNA (1)...(19): siRNA sense strand
ugcaauaacucuacaagua

SEQ ID NO: 1162788 - RNA, 19 nt, Homo sapiens
  misc_RNA (1)...(19): siRNA sense strand
acacagacauuguagauga

SEQ ID NO: 1162789 - RNA, 19 nt, Homo sapiens
  misc_RNA (1)...(19): siRNA sense strand
gaugacaccuuacacuuau

SEQ ID NO: 1162790 - RNA, 19 nt, Homo sapiens
  misc_RNA (1)...(19): siRNA sense strand
ggagguuugucauaugaua

SEQ ID NO: 1162791 - RNA, 19 nt, Homo sapiens
  misc_RNA (1)...(19): siRNA sense strand
gaacaacgcuaggaacagu

SEQ ID NO: 1162792 - RNA, 19 nt, Homo sapiens
  misc_RNA (1)...(19): siRNA sense strand
gcucaaaguuacccagaaa

SEQ ID NO: 1162793 - RNA, 19 nt, Homo sapiens
  misc_RNA (1)...(19): siRNA sense strand
gcuaaagacaucuaaagua

SEQ ID NO: 1162794 - RNA, 19 nt, Homo sapiens
  misc_RNA (1)...(19): siRNA sense strand
gaagaacuauuuggagaau

SEQ ID NO: 1162795 - RNA, 19 nt, Homo sapiens
  misc_RNA (1)...(19): siRNA sense strand
gaucuccgcucuucauuuc

SEQ ID NO: 1162796 - RNA, 19 nt, Homo sapiens
  misc_RNA (1)...(19): siRNA sense strand
gaauaaagccauugaacug

SEQ ID NO: 1162797 - RNA, 19 nt, Homo sapiens
  misc_RNA (1)...(19): siRNA sense strand
gguacuauauugagguuaa

SEQ ID NO: 1162798 - RNA, 19 nt, Homo sapiens
  misc_RNA (1)...(19): siRNA sense strand
ugagauaaaugauguggaa

SEQ ID NO: 1162799 - RNA, 19 nt, Homo sapiens
  misc_RNA (1)...(19): siRNA sense strand
gaaacaccauacccaaaug

SEQ ID NO: 1162800 - RNA, 19 nt, Homo sapiens
  misc_RNA (1)...(19): siRNA sense strand
gaaaaucccuacccuuuga

SEQ ID NO: 1162801 - RNA, 19 nt, Homo sapiens
  misc_RNA (1)...(19): siRNA sense strand
gaacgagguaauauacaua

SEQ ID NO: 1162802 - RNA, 19 nt, Homo sapiens
  misc_RNA (1)...(19): siRNA sense strand
aaagaaagccgacuacaga

SEQ ID NO: 1162803 - RNA, 19 nt, Homo sapiens
  misc_RNA (1)...(19): siRNA sense strand
gaaagagggcagaaacuug

SEQ ID NO: 1162804 - RNA, 19 nt, Homo sapiens
  misc_RNA (1)...(19): siRNA sense strand
gaaccaccacaacaaauaa

SEQ ID NO: 1162805 - RNA, 19 nt, Homo sapiens
  misc_RNA (1)...(19): siRNA sense strand
gacagaaacgucaagguua

SEQ ID NO: 1162806 - RNA, 19 nt, Homo sapiens
  misc_RNA (1)...(19): siRNA sense strand
aagaagaccuugcuuaaca

SEQ ID NO: 1162807 - RNA, 19 nt, Homo sapiens
  misc_RNA (1)...(19): siRNA sense strand
uaugggaccucaaaucaaa

SEQ ID NO: 1162808 - RNA, 19 nt, Homo sapiens
  misc_RNA (1)...(19): siRNA sense strand
acagaaauccagagacuua

SEQ ID NO: 1162809 - RNA, 19 nt, Homo sapiens
  misc_RNA (1)...(19): siRNA sense strand
gugcaucgcuggaguuuca

SEQ ID NO: 1162810 - RNA, 19 nt, Homo sapiens
  misc_RNA (1)...(19): siRNA sense strand
gcaauaacucuacaaguau

SEQ ID NO: 1162811 - RNA, 19 nt, Homo sapiens
  misc_RNA (1)...(19): siRNA sense strand
gugauaauguaccuuguuu

SEQ ID NO: 1162812 - RNA, 19 nt, Homo sapiens
  misc_RNA (1)...(19): siRNA sense strand
aaaccaguaugcagugaua

SEQ ID NO: 1162813 - RNA, 19 nt, Homo sapiens
  misc_RNA (1)...(19): siRNA sense strand
ccugggcacuauugaauua

SEQ ID NO: 1162814 - RNA, 19 nt, Homo sapiens
  misc_RNA (1)...(19): siRNA sense strand
gcagagaaaggguuacauu

SEQ ID NO: 1162815 - RNA, 19 nt, Homo sapiens
  misc_RNA (1)...(19): siRNA sense strand
guaauugugucuccaagug

SEQ ID NO: 1162816 - RNA, 19 nt, Homo sapiens
  misc_RNA (1)...(19): siRNA sense strand
gaacucagacuggugcuuu

SEQ ID NO: 1162817 - RNA, 19 nt, Homo sapiens
  misc_RNA (1)...(19): siRNA sense strand
cagcuccaguuccugauua

SEQ ID NO: 1162818 - RNA, 19 nt, Homo sapiens
  misc_RNA (1)...(19): siRNA sense strand
gcauugcuaugguugacua

SEQ ID NO: 1162819 - RNA, 19 nt, Homo sapiens
  misc_RNA (1)...(19): siRNA sense strand
uaaacagucuccagguuau

SEQ ID NO: 1162820 - RNA, 19 nt, Homo sapiens
  misc_RNA (1)...(19): siRNA sense strand
ccagaaccaugcaaaccua

SEQ ID NO: 1162821 - RNA, 19 nt, Homo sapiens
  misc_RNA (1)...(19): siRNA sense strand
gagaaaggguuacauuuug

SEQ ID NO: 1162822 - RNA, 19 nt, Homo sapiens
  misc_RNA (1)...(19): siRNA sense strand
caaaguuacccagaaauaa

SEQ ID NO: 1162823 - RNA, 19 nt, Homo sapiens
  misc_RNA (1)...(19): siRNA sense strand
ggagaaccaccacaacaaa

SEQ ID NO: 1162824 - RNA, 19 nt, Homo sapiens
  misc_RNA (1)...(19): siRNA sense strand
ucaaaguuacccagaaaua

SEQ ID NO: 1162825 - RNA, 19 nt, Homo sapiens
  misc_RNA (1)...(19): siRNA sense strand
gaacugcggccauguuauc

SEQ ID NO: 1162826 - RNA, 19 nt, Homo sapiens
  misc_RNA (1)...(19): siRNA sense strand
gggauucuuuaaaggcuua

SEQ ID NO: 1162827 - RNA, 19 nt, Homo sapiens
  misc_RNA (1)...(19): siRNA sense strand
uaagaccucuguuggaugu

SEQ ID NO: 1162828 - RNA, 19 nt, Homo sapiens
  misc_RNA (1)...(19): siRNA sense strand
guggagauauuguagcauu

SEQ ID NO: 1162829 - RNA, 19 nt, Homo sapiens
  misc_RNA (1)...(19): siRNA sense strand
cugcaaagaugucaaggaa

SEQ ID NO: 1162830 - RNA, 19 nt, Homo sapiens
  misc_RNA (1)...(19): siRNA sense strand
gaagauccauaugccauuc

SEQ ID NO: 1162831 - RNA, 19 nt, Homo sapiens
  misc_RNA (1)...(19): siRNA sense strand
guccaggaguagaauguua

SEQ ID NO: 1162832 - RNA, 19 nt, Homo sapiens
  misc_RNA (1)...(19): siRNA sense strand
gugaaacguuuacucgaaa

SEQ ID NO: 1162833 - RNA, 19 nt, Homo sapiens
  misc_RNA (1)...(19): siRNA sense strand
gaggaucgcugcaaaucuc

SEQ ID NO: 1162834 - RNA, 19 nt, Homo sapiens
  misc_RNA (1)...(19): siRNA sense strand
guaucugccuugccuguuu

SEQ ID NO: 1162835 - RNA, 19 nt, Homo sapiens
  misc_RNA (1)...(19): siRNA sense strand
gaaguaaucacagaaguca

SEQ ID NO: 1162836 - RNA, 19 nt, Homo sapiens
  misc_RNA (1)...(19): siRNA sense strand
ccucagcccuggccuuuga

SEQ ID NO: 1162837 - RNA, 19 nt, Homo sapiens
  misc_RNA (1)...(19): siRNA sense strand
uggaguuguuggugaauua

SEQ ID NO: 1162838 - RNA, 19 nt, Homo sapiens
  misc_RNA (1)...(19): siRNA sense strand
caguggagcugcaguaauc

SEQ ID NO: 1162839 - RNA, 19 nt, Homo sapiens
  misc_RNA (1)...(19): siRNA sense strand
gauauuguagcauugagua

SEQ ID NO: 1162840 - RNA, 19 nt, Homo sapiens
  misc_RNA (1)...(19): siRNA sense strand
caggagguuugucauauga

SEQ ID NO: 1162841 - RNA, 19 nt, Homo sapiens
  misc_RNA (1)...(19): siRNA sense strand
ugaugacaccuuacacuua

SEQ ID NO: 1162842 - RNA, 19 nt, Homo sapiens
  misc_RNA (1)...(19): siRNA sense strand
acaaagauaagaaguggua

SEQ ID NO: 1162843 - RNA, 19 nt, Homo sapiens
  misc_RNA (1)...(19): siRNA sense strand
gaaaagcaagcaaaaguaa

SEQ ID NO: 1162844 - RNA, 19 nt, Homo sapiens
  misc_RNA (1)...(19): siRNA sense strand
uaccacaggcugcuuaaua

SEQ ID NO: 1162845 - RNA, 19 nt, Homo sapiens
  misc_RNA (1)...(19): siRNA sense strand
ggugcaaucuugagaaugg

SEQ ID NO: 1162846 - RNA, 19 nt, Homo sapiens
  misc_RNA (1)...(19): siRNA sense strand
ucucauccaucuaccagua

SEQ ID NO: 1162847 - RNA, 19 nt, Homo sapiens
  misc_RNA (1)...(19): siRNA sense strand
gcacugaacgagguaauau

SEQ ID NO: 1162848 - RNA, 19 nt, Homo sapiens
  misc_RNA (1)...(19): siRNA sense strand
gaacugucaucuaaaucuc

SEQ ID NO: 1162849 - RNA, 19 nt, Homo sapiens
  misc_RNA (1)...(19): siRNA sense strand
guuaaaaggugcaaucuug

SEQ ID NO: 1162850 - RNA, 19 nt, Homo sapiens
  misc_RNA (1)...(19): siRNA sense strand
ugacaaagaaucccgagaa

SEQ ID NO: 1162851 - RNA, 19 nt, Homo sapiens
  misc_RNA (1)...(19): siRNA sense strand
gggcuugggugcucaaagu

SEQ ID NO: 1162852 - RNA, 19 nt, Homo sapiens
  misc_RNA (1)...(19): siRNA sense strand
agaccuugcuuaacaguga

SEQ ID NO: 1162853 - RNA, 19 nt, Homo sapiens
  misc_RNA (1)...(19): siRNA sense strand
uuaaacagucuccagguua

SEQ ID NO: 1162854 - RNA, 19 nt, Homo sapiens
  misc_RNA (1)...(19): siRNA sense strand
gccaauggacauauaauga

SEQ ID NO: 1162855 - RNA, 19 nt, Homo sapiens
  misc_RNA (1)...(19): siRNA sense strand
aagcuuaccuacugaccua

SEQ ID NO: 1162856 - RNA, 19 nt, Homo sapiens
  misc_RNA (1)...(19): siRNA sense strand
gccggucugugugauauua

SEQ ID NO: 1162857 - RNA, 19 nt, Homo sapiens
  misc_RNA (1)...(19): siRNA sense strand
gcagucaauucuuccuaug

SEQ ID NO: 1162858 - RNA, 19 nt, Homo sapiens
  misc_RNA (1)...(19): siRNA sense strand
ggcagcaucuggaguuguu

SEQ ID NO: 1162859 - RNA, 19 nt, Homo sapiens
  misc_RNA (1)...(19): siRNA sense strand
uuauauggcucuaaugauc

SEQ ID NO: 1162860 - RNA, 19 nt, Homo sapiens
  misc_RNA (1)...(19): siRNA sense strand
ggaauaaagccauugaacu

SEQ ID NO: 1162861 - RNA, 19 nt, Homo sapiens
  misc_RNA (1)...(19): siRNA sense strand
acccagaacugugcuuaua

SEQ ID NO: 1162862 - RNA, 19 nt, Homo sapiens
  misc_RNA (1)...(19): siRNA sense strand
ggauaccacaggcugcuua

SEQ ID NO: 1162863 - RNA, 19 nt, Homo sapiens
  misc_RNA (1)...(19): siRNA sense strand
gacaaagaaucccgagaag

SEQ ID NO: 1162864 - RNA, 19 nt, Homo sapiens
  misc_RNA (1)...(19): siRNA sense strand
gaaagccgacuacagauac

SEQ ID NO: 1162865 - RNA, 19 nt, Homo sapiens
  misc_RNA (1)...(19): siRNA sense strand
cagagaaaggguuacauuu

SEQ ID NO: 1162866 - RNA, 19 nt, Homo sapiens
  misc_RNA (1)...(19): siRNA sense strand
gaaacuuggcgaucuggaa

SEQ ID NO: 1162867 - RNA, 19 nt, Homo sapiens
  misc_RNA (1)...(19): siRNA sense strand
ccagaacugugcuuauaag

SEQ ID NO: 1162868 - RNA, 19 nt, Homo sapiens
  misc_RNA (1)...(19): siRNA sense strand
ugugaaacguuuacucgaa

SEQ ID NO: 1162869 - RNA, 19 nt, Homo sapiens
  misc_RNA (1)...(19): siRNA sense strand
ucaaggaaguuaagcuuac

SEQ ID NO: 1162870 - RNA, 19 nt, Homo sapiens
  misc_RNA (1)...(19): siRNA sense strand
gagccggucugugugauau

SEQ ID NO: 1162871 - RNA, 19 nt, Homo sapiens
  misc_RNA (1)...(19): siRNA sense strand
gggcacuauugaauuauau

SEQ ID NO: 1162872 - RNA, 19 nt, Homo sapiens
  misc_RNA (1)...(19): siRNA sense strand
gauaaaugauguggaaacu

SEQ ID NO: 1162873 - RNA, 19 nt, Homo sapiens
  misc_RNA (1)...(19): siRNA sense strand
ccagacuucuucuuucuua

SEQ ID NO: 1162874 - RNA, 19 nt, Homo sapiens
  misc_RNA (1)...(19): siRNA sense strand
caucaaaugucaucaacuu

SEQ ID NO: 1162875 - RNA, 19 nt, Homo sapiens
  misc_RNA (1)...(19): siRNA sense strand
caacccggcugcauuaaau

SEQ ID NO: 1162876 - RNA, 19 nt, Homo sapiens
  misc_RNA (1)...(19): siRNA sense strand
caaccuauuuccaaugaga

SEQ ID NO: 1162877 - RNA, 19 nt, Homo sapiens
  misc_RNA (1)...(19): siRNA sense strand
caaccagacuucuucuuuc

SEQ ID NO: 1162878 - RNA, 19 nt, Homo sapiens
  misc_RNA (1)...(19): siRNA sense strand
ucauaaugcucccaucaaa

SEQ ID NO: 1162879 - RNA, 19 nt, Homo sapiens
  misc_RNA (1)...(19): siRNA sense strand
ggacugccauagagccaaa

SEQ ID NO: 1162880 - RNA, 19 nt, Homo sapiens
  misc_RNA (1)...(19): siRNA sense strand
cacaaccuauuuccaauga

SEQ ID NO: 1162881 - RNA, 19 nt, Homo sapiens
  misc_RNA (1)...(19): siRNA sense strand
ccaaccagacuucuucuuu

SEQ ID NO: 1162882 - RNA, 19 nt, Homo sapiens
  misc_RNA (1)...(19): siRNA sense strand
cauuaaauccugccucauu

SEQ ID NO: 1162883 - RNA, 19 nt, Homo sapiens
  misc_RNA (1)...(19): siRNA sense strand
agaaacgucuacaggcaaa

SEQ ID NO: 1162884 - RNA, 19 nt, Homo sapiens
  misc_RNA (1)...(19): siRNA sense strand
caucacaaccuauuuccaa

SEQ ID NO: 1162885 - RNA, 19 nt, Homo sapiens
  misc_RNA (1)...(19): siRNA sense strand
gacuucuucuuucuuauga

SEQ ID NO: 1162886 - RNA, 19 nt, Homo sapiens
  misc_RNA (1)...(19): siRNA sense strand
ugucaacccggcugcauua

SEQ ID NO: 1162887 - RNA, 19 nt, Homo sapiens
  misc_RNA (1)...(19): siRNA sense strand
ugucugcccugguggguuu

SEQ ID NO: 1162888 - RNA, 19 nt, Homo sapiens
  misc_RNA (1)...(19): siRNA sense strand
gauuaucauucaccuuaca

SEQ ID NO: 1162889 - RNA, 19 nt, Homo sapiens
  misc_RNA (1)...(19): siRNA sense strand
gcugguuucuacuguguug

SEQ ID NO: 1162890 - RNA, 19 nt, Homo sapiens
  misc_RNA (1)...(19): siRNA sense strand
ggauauaccaaccagacuu

SEQ ID NO: 1162891 - RNA, 19 nt, Homo sapiens
  misc_RNA (1)...(19): siRNA sense strand
gugcugcaguggaaacaga

SEQ ID NO: 1162892 - RNA, 19 nt, Homo sapiens
  misc_RNA (1)...(19): siRNA sense strand
caaaugucaucaacuucuc

SEQ ID NO: 1162893 - RNA, 19 nt, Homo sapiens
  misc_RNA (1)...(19): siRNA sense strand
auaaugcucccaucaaaug

SEQ ID NO: 1162894 - RNA, 19 nt, Homo sapiens
  misc_RNA (1)...(19): siRNA sense strand
gauauaccaaccagacuuc

SEQ ID NO: 1162895 - RNA, 19 nt, Homo sapiens
  misc_RNA (1)...(19): siRNA sense strand
auuaaauccugccucauug

SEQ ID NO: 1162896 - RNA, 19 nt, Homo sapiens
  misc_RNA (1)...(19): siRNA sense strand
gcuggaacucugucucuga

SEQ ID NO: 1162897 - RNA, 19 nt, Homo sapiens
  misc_RNA (1)...(19): siRNA sense strand
ucaaaugucaucaacuucu

SEQ ID NO: 1162898 - RNA, 19 nt, Homo sapiens
  misc_RNA (1)...(19): siRNA sense strand
caucauaaugcucccauca

SEQ ID NO: 1162899 - RNA, 19 nt, Homo sapiens
  misc_RNA (1)...(19): siRNA sense strand
gcaaaagucaaaguuauug

SEQ ID NO: 1162900 - RNA, 19 nt, Homo sapiens
  misc_RNA (1)...(19): siRNA sense strand
cauaaugcucccaucaaau

SEQ ID NO: 1162901 - RNA, 19 nt, Homo sapiens
  misc_RNA (1)...(19): siRNA sense strand
caguguaaguuggacgaaa

SEQ ID NO: 1162902 - RNA, 19 nt, Homo sapiens
  misc_RNA (1)...(19): siRNA sense strand
ucacaaccuauuuccaaug

SEQ ID NO: 1162903 - RNA, 19 nt, Homo sapiens
  misc_RNA (1)...(19): siRNA sense strand
uuucuacuguguuggaguu

SEQ ID NO: 1162904 - RNA, 19 nt, Homo sapiens
  misc_RNA (1)...(19): siRNA sense strand
ucaacccggcugcauuaaa

SEQ ID NO: 1162905 - RNA, 19 nt, Homo sapiens
  misc_RNA (1)...(19): siRNA sense strand
aaccagacuucuucuuucu

SEQ ID NO: 1162906 - RNA, 19 nt, Homo sapiens
  misc_RNA (1)...(19): siRNA sense strand
agacuucuucuuucuuaug

SEQ ID NO: 1162907 - RNA, 19 nt, Homo sapiens
  misc_RNA (1)...(19): siRNA sense strand
ccucauugcaguguaaguu

SEQ ID NO: 1162908 - RNA, 19 nt, Homo sapiens
  misc_RNA (1)...(19): siRNA sense strand
cuggaacucugucucugau

SEQ ID NO: 1162909 - RNA, 19 nt, Homo sapiens
  misc_RNA (1)...(19): siRNA sense strand
cagacuucuucuuucuuau

SEQ ID NO: 1162910 - RNA, 19 nt, Homo sapiens
  misc_RNA (1)...(19): siRNA sense strand
ccagaaauuuccagacaaa

SEQ ID NO: 1162911 - RNA, 19 nt, Homo sapiens
  misc_RNA (1)...(19): siRNA sense strand
gcaaccaaaucggaugaua

SEQ ID NO: 1162912 - RNA, 19 nt, Homo sapiens
  misc_RNA (1)...(19): siRNA sense strand
caagagcugugaaggaaga

SEQ ID NO: 1162913 - RNA, 19 nt, Homo sapiens
  misc_RNA (1)...(19): siRNA sense strand
acaaagagauacugagaau

SEQ ID NO: 1162914 - RNA, 19 nt, Homo sapiens
  misc_RNA (1)...(19): siRNA sense strand
gcacacugcuccucuuucu

SEQ ID NO: 1162915 - RNA, 19 nt, Homo sapiens
  misc_RNA (1)...(19): siRNA sense strand
gaagcaccgucaaggaaga

SEQ ID NO: 1162916 - RNA, 19 nt, Homo sapiens
  misc_RNA (1)...(19): siRNA sense strand
caagcaccauggccaguuu

SEQ ID NO: 1162917 - RNA, 19 nt, Homo sapiens
  misc_RNA (1)...(19): siRNA sense strand
gaugguacgcguugcuaua

SEQ ID NO: 1162918 - RNA, 19 nt, Homo sapiens
  misc_RNA (1)...(19): siRNA sense strand
gcaaugcucagcucauaau

SEQ ID NO: 1162919 - RNA, 19 nt, Homo sapiens
  misc_RNA (1)...(19): siRNA sense strand
ggagggagacggauuucuu

SEQ ID NO: 1162920 - RNA, 19 nt, Homo sapiens
  misc_RNA (1)...(19): siRNA sense strand
uacagaacaugcaguaaug

SEQ ID NO: 1162921 - RNA, 19 nt, Homo sapiens
  misc_RNA (1)...(19): siRNA sense strand
aaaagguccugaucacuua

SEQ ID NO: 1162922 - RNA, 19 nt, Homo sapiens
  misc_RNA (1)...(19): siRNA sense strand
gagggagacggauuucuuu

SEQ ID NO: 1162923 - RNA, 19 nt, Homo sapiens
  misc_RNA (1)...(19): siRNA sense strand
gacaacccauguucacuca

SEQ ID NO: 1162924 - RNA, 19 nt, Homo sapiens
  misc_RNA (1)...(19): siRNA sense strand
ugacaucggcugagugcua

SEQ ID NO: 1162925 - RNA, 19 nt, Homo sapiens
  misc_RNA (1)...(19): siRNA sense strand
cagcagauuucauugucaa

SEQ ID NO: 1162926 - RNA, 19 nt, Homo sapiens
  misc_RNA (1)...(19): siRNA sense strand
gggaagcaccgucaaggaa

SEQ ID NO: 1162927 - RNA, 19 nt, Homo sapiens
  misc_RNA (1)...(19): siRNA sense strand
gaucacuuauaucuggaaa

SEQ ID NO: 1162928 - RNA, 19 nt, Homo sapiens
  misc_RNA (1)...(19): siRNA sense strand
cauauucgccuugucuuaa

SEQ ID NO: 1162929 - RNA, 19 nt, Homo sapiens
  misc_RNA (1)...(19): siRNA sense strand
gaaauuuccagacaaagag

SEQ ID NO: 1162930 - RNA, 19 nt, Homo sapiens
  misc_RNA (1)...(19): siRNA sense strand
ccaaaucggaugauacugu

SEQ ID NO: 1162931 - RNA, 19 nt, Homo sapiens
  misc_RNA (1)...(19): siRNA sense strand
aaagagauacugagaaugg

SEQ ID NO: 1162932 - RNA, 19 nt, Homo sapiens
  misc_RNA (1)...(19): siRNA sense strand
caacccauguucacucaag

SEQ ID NO: 1162933 - RNA, 19 nt, Homo sapiens
  misc_RNA (1)...(19): siRNA sense strand
gauggagggagacggauuu

SEQ ID NO: 1162934 - RNA, 19 nt, Homo sapiens
  misc_RNA (1)...(19): siRNA sense strand
gauaugugcaucagugguu

SEQ ID NO: 1162935 - RNA, 19 nt, Homo sapiens
  misc_RNA (1)...(19): siRNA sense strand
cagaaucuuuggauaugug

SEQ ID NO: 1162936 - RNA, 19 nt, Homo sapiens
  misc_RNA (1)...(19): siRNA sense strand
uacagaaucuuuggauaug

SEQ ID NO: 1162937 - RNA, 19 nt, Homo sapiens
  misc_RNA (1)...(19): siRNA sense strand
gcugagugcuacgaucuga

SEQ ID NO: 1162938 - RNA, 19 nt, Homo sapiens
  misc_RNA (1)...(19): siRNA sense strand
gcuacgaucugaggagcaa

SEQ ID NO: 1162939 - RNA, 19 nt, Homo sapiens
  misc_RNA (1)...(19): siRNA sense strand
gaguggaaaugcauguaca

SEQ ID NO: 1162940 - RNA, 19 nt, Homo sapiens
  misc_RNA (1)...(19): siRNA sense strand
cgauacagaacaugcagua

SEQ ID NO: 1162941 - RNA, 19 nt, Homo sapiens
  misc_RNA (1)...(19): siRNA sense strand
agcaagagcugugaaggaa

SEQ ID NO: 1162942 - RNA, 19 nt, Homo sapiens
  misc_RNA (1)...(19): siRNA sense strand
agacaaagagauacugaga

SEQ ID NO: 1162943 - RNA, 19 nt, Homo sapiens
  misc_RNA (1)...(19): siRNA sense strand
guagacauauucgccuugu

SEQ ID NO: 1162944 - RNA, 19 nt, Homo sapiens
  misc_RNA (1)...(19): siRNA sense strand
gagguuaucagcugacauc

SEQ ID NO: 1162945 - RNA, 19 nt, Homo sapiens
  misc_RNA (1)...(19): siRNA sense strand
gggcuccgcugacaguaca

SEQ ID NO: 1162946 - RNA, 19 nt, Homo sapiens
  misc_RNA (1)...(19): siRNA sense strand
cagauuucauugucaagau

SEQ ID NO: 1162947 - RNA, 19 nt, Homo sapiens
  misc_RNA (1)...(19): siRNA sense strand
acuuauaucuggaaaccaa

SEQ ID NO: 1162948 - RNA, 19 nt, Homo sapiens
  misc_RNA (1)...(19): siRNA sense strand
gacaaagagauacugagaa

SEQ ID NO: 1162949 - RNA, 19 nt, Homo sapiens
  misc_RNA (1)...(19): siRNA sense strand
gaagaguggaaaugcaugu

SEQ ID NO: 1162950 - RNA, 19 nt, Homo sapiens
  misc_RNA (1)...(19): siRNA sense strand
gagacggauuucuuuccuu

SEQ ID NO: 1162951 - RNA, 19 nt, Homo sapiens
  misc_RNA (1)...(19): siRNA sense strand
agucucaacuccacaggaa

SEQ ID NO: 1162952 - RNA, 19 nt, Homo sapiens
  misc_RNA (1)...(19): siRNA sense strand
ggagacggauuucuuuccu

SEQ ID NO: 1162953 - RNA, 19 nt, Homo sapiens
  misc_RNA (1)...(19): siRNA sense strand
acucacagcagauuucauu

SEQ ID NO: 1162954 - RNA, 19 nt, Homo sapiens
  misc_RNA (1)...(19): siRNA sense strand
ggacugcccaccagaagca

SEQ ID NO: 1162955 - RNA, 19 nt, Homo sapiens
  misc_RNA (1)...(19): siRNA sense strand
agaaauuuccagacaaaga

SEQ ID NO: 1162956 - RNA, 19 nt, Homo sapiens
  misc_RNA (1)...(19): siRNA sense strand
gcaccgucaaggaagauaa

SEQ ID NO: 1162957 - RNA, 19 nt, Homo sapiens
  misc_RNA (1)...(19): siRNA sense strand
gcagauuucauugucaaga

SEQ ID NO: 1162958 - RNA, 19 nt, Homo sapiens
  misc_RNA (1)...(19): siRNA sense strand
cacagcagauuucauuguc

SEQ ID NO: 1162959 - RNA, 19 nt, Homo sapiens
  misc_RNA (1)...(19): siRNA sense strand
guacaguccaguucaucuu

SEQ ID NO: 1162960 - RNA, 19 nt, Homo sapiens
  misc_RNA (1)...(19): siRNA sense strand
ggaccacucacagcagauu

SEQ ID NO: 1162961 - RNA, 19 nt, Homo sapiens
  misc_RNA (1)...(19): siRNA sense strand
gagugcaacuuggauccuu

SEQ ID NO: 1162962 - RNA, 19 nt, Homo sapiens
  misc_RNA (1)...(19): siRNA sense strand
acauauucgccuugucuua

SEQ ID NO: 1162963 - RNA, 19 nt, Homo sapiens
  misc_RNA (1)...(19): siRNA sense strand
ucacagcagauuucauugu

SEQ ID NO: 1162964 - RNA, 19 nt, Homo sapiens
  misc_RNA (1)...(19): siRNA sense strand
auacagaacaugcaguaau

SEQ ID NO: 1162965 - RNA, 19 nt, Homo sapiens
  misc_RNA (1)...(19): siRNA sense strand
auauucgccuugucuuaaa

SEQ ID NO: 1162966 - RNA, 19 nt, Homo sapiens
  misc_RNA (1)...(19): siRNA sense strand
ccagacaaagagauacuga

SEQ ID NO: 1162967 - RNA, 19 nt, Homo sapiens
  misc_RNA (1)...(19): siRNA sense strand
caacuccacaggaacuuuc

SEQ ID NO: 1162968 - RNA, 19 nt, Homo sapiens
  misc_RNA (1)...(19): siRNA sense strand
ggcuuccugugucuaauga

SEQ ID NO: 1162969 - RNA, 19 nt, Homo sapiens
  misc_RNA (1)...(19): siRNA sense strand
gagcugugaaggaagaaau

SEQ ID NO: 1162970 - RNA, 19 nt, Homo sapiens
  misc_RNA (1)...(19): siRNA sense strand
caaccaaaucggaugauac

SEQ ID NO: 1162971 - RNA, 19 nt, Homo sapiens
  misc_RNA (1)...(19): siRNA sense strand
ugaauggcuuccugugucu

SEQ ID NO: 1162972 - RNA, 19 nt, Homo sapiens
  misc_RNA (1)...(19): siRNA sense strand
gauacagaacaugcaguaa

SEQ ID NO: 1162973 - RNA, 19 nt, Homo sapiens
  misc_RNA (1)...(19): siRNA sense strand
gagaacaucaaacccaaac

SEQ ID NO: 1162974 - RNA, 19 nt, Homo sapiens
  misc_RNA (1)...(19): siRNA sense strand
caguucaucuucuaucaac

SEQ ID NO: 1162975 - RNA, 19 nt, Homo sapiens
  misc_RNA (1)...(19): siRNA sense strand
ugacaguacaguccaguuc

SEQ ID NO: 1162976 - RNA, 19 nt, Homo sapiens
  misc_RNA (1)...(19): siRNA sense strand
uuguugaacuagcaccuaa

SEQ ID NO: 1162977 - RNA, 19 nt, Homo sapiens
  misc_RNA (1)...(19): siRNA sense strand
guggaagaguggaaaugca

SEQ ID NO: 1162978 - RNA, 19 nt, Homo sapiens
  misc_RNA (1)...(19): siRNA sense strand
cgucaaggaagauaacugu

SEQ ID NO: 1162979 - RNA, 19 nt, Homo sapiens
  misc_RNA (1)...(19): siRNA sense strand
gguuuaugccaaauuguug

SEQ ID NO: 1162980 - RNA, 19 nt, Homo sapiens
  misc_RNA (1)...(19): siRNA sense strand
guugcuauacagaaucuuu

SEQ ID NO: 1162981 - RNA, 19 nt, Homo sapiens
  misc_RNA (1)...(19): siRNA sense strand
caagugccaagccaaagga

SEQ ID NO: 1162982 - RNA, 19 nt, Homo sapiens
  misc_RNA (1)...(19): siRNA sense strand
gacaguacaguccaguuca

SEQ ID NO: 1162983 - RNA, 19 nt, Homo sapiens
  misc_RNA (1)...(19): siRNA sense strand
uuccagaaauuuccagaca

SEQ ID NO: 1162984 - RNA, 19 nt, Homo sapiens
  misc_RNA (1)...(19): siRNA sense strand
gacuaaaggugaaaacagu

SEQ ID NO: 1162985 - RNA, 19 nt, Homo sapiens
  misc_RNA (1)...(19): siRNA sense strand
uaaaagguccugaucacuu

SEQ ID NO: 1162986 - RNA, 19 nt, Homo sapiens
  misc_RNA (1)...(19): siRNA sense strand
ccagcucuccgcaaccaaa

SEQ ID NO: 1162987 - RNA, 19 nt, Homo sapiens
  misc_RNA (1)...(19): siRNA sense strand
ucacuuauaucuggaaacc

SEQ ID NO: 1162988 - RNA, 19 nt, Homo sapiens
  misc_RNA (1)...(19): siRNA sense strand
guccugaucacuuauaucu

SEQ ID NO: 1162989 - RNA, 19 nt, Homo sapiens
  misc_RNA (1)...(19): siRNA sense strand
agugguuuaugccaaauug

SEQ ID NO: 1162990 - RNA, 19 nt, Homo sapiens
  misc_RNA (1)...(19): siRNA sense strand
caguccaguucaucuucua

SEQ ID NO: 1162991 - RNA, 19 nt, Homo sapiens
  misc_RNA (1)...(19): siRNA sense strand
gguccgagggcaguauaaa

SEQ ID NO: 1162992 - RNA, 19 nt, Homo sapiens
  misc_RNA (1)...(19): siRNA sense strand
gguacgcguugcuauacag

SEQ ID NO: 1162993 - RNA, 19 nt, Homo sapiens
  misc_RNA (1)...(19): siRNA sense strand
ggaugauacugugguugca

SEQ ID NO: 1162994 - RNA, 19 nt, Homo sapiens
  misc_RNA (1)...(19): siRNA sense strand
acgcguugcuauacagaau

SEQ ID NO: 1162995 - RNA, 19 nt, Homo sapiens
  misc_RNA (1)...(19): siRNA sense strand
uccagaaauuuccagacaa

SEQ ID NO: 1162996 - RNA, 19 nt, Homo sapiens
  misc_RNA (1)...(19): siRNA sense strand
gugccaagccaaaggaaca

SEQ ID NO: 1162997 - RNA, 19 nt, Homo sapiens
  misc_RNA (1)...(19): siRNA sense strand
gcguugcuauacagaaucu

SEQ ID NO: 1162998 - RNA, 19 nt, Homo sapiens
  misc_RNA (1)...(19): siRNA sense strand
gaccacucacagcagauuu

SEQ ID NO: 1162999 - RNA, 19 nt, Homo sapiens
  misc_RNA (1)...(19): siRNA sense strand
acagcagauuucauuguca

SEQ ID NO: 1163000 - RNA, 19 nt, Homo sapiens
  misc_RNA (1)...(19): siRNA sense strand
acagaaucuuuggauaugu

SEQ ID NO: 1163001 - RNA, 19 nt, Homo sapiens
  misc_RNA (1)...(19): siRNA sense strand
uccaguucaucuucuauca

SEQ ID NO: 1163002 - RNA, 19 nt, Homo sapiens
  misc_RNA (1)...(19): siRNA sense strand
acaguacaguccaguucau

SEQ ID NO: 1163003 - RNA, 19 nt, Homo sapiens
  misc_RNA (1)...(19): siRNA sense strand
gguugcaauucccuaugga

SEQ ID NO: 1163004 - RNA, 19 nt, Homo sapiens
  misc_RNA (1)...(19): siRNA sense strand
ccagaaauuuccagacaaa

SEQ ID NO: 1163005 - RNA, 19 nt, Homo sapiens
  misc_RNA (1)...(19): siRNA sense strand
gcaaccaaaucggaugaua

SEQ ID NO: 1163006 - RNA, 19 nt, Homo sapiens
  misc_RNA (1)...(19): siRNA sense strand
caagagcugugaaggaaga

SEQ ID NO: 1163007 - RNA, 19 nt, Homo sapiens
  misc_RNA (1)...(19): siRNA sense strand
acaaagagauacugagaau

SEQ ID NO: 1163008 - RNA, 19 nt, Homo sapiens
  misc_RNA (1)...(19): siRNA sense strand
gcacacugcuccucuuucu

SEQ ID NO: 1163009 - RNA, 19 nt, Homo sapiens
  misc_RNA (1)...(19): siRNA sense strand
gaagcaccgucaaggaaga

SEQ ID NO: 1163010 - RNA, 19 nt, Homo sapiens
  misc_RNA (1)...(19): siRNA sense strand
caagcaccauggccaguuu

SEQ ID NO: 1163011 - RNA, 19 nt, Homo sapiens
  misc_RNA (1)...(19): siRNA sense strand
gaugguacgcguugcuaua

SEQ ID NO: 1163012 - RNA, 19 nt, Homo sapiens
  misc_RNA (1)...(19): siRNA sense strand
gcaaugcucagcucauaau

SEQ ID NO: 1163013 - RNA, 19 nt, Homo sapiens
  misc_RNA (1)...(19): siRNA sense strand
ggagggagacggauuucuu

SEQ ID NO: 1163014 - RNA, 19 nt, Homo sapiens
  misc_RNA (1)...(19): siRNA sense strand
uacagaacaugcaguaaug

SEQ ID NO: 1163015 - RNA, 19 nt, Homo sapiens
  misc_RNA (1)...(19): siRNA sense strand
aaaagguccugaucacuua

SEQ ID NO: 1163016 - RNA, 19 nt, Homo sapiens
  misc_RNA (1)...(19): siRNA sense strand
gagggagacggauuucuuu

SEQ ID NO: 1163017 - RNA, 19 nt, Homo sapiens
  misc_RNA (1)...(19): siRNA sense strand
gacaacccauguucacuca

SEQ ID NO: 1163018 - RNA, 19 nt, Homo sapiens
  misc_RNA (1)...(19): siRNA sense strand
ugacaucggcugagugcua

SEQ ID NO: 1163019 - RNA, 19 nt, Homo sapiens
  misc_RNA (1)...(19): siRNA sense strand
cagcagauuucauugucaa

SEQ ID NO: 1163020 - RNA, 19 nt, Homo sapiens
  misc_RNA (1)...(19): siRNA sense strand
gggaagcaccgucaaggaa

SEQ ID NO: 1163021 - RNA, 19 nt, Homo sapiens
  misc_RNA (1)...(19): siRNA sense strand
gaucacuuauaucuggaaa

SEQ ID NO: 1163022 - RNA, 19 nt, Homo sapiens
  misc_RNA (1)...(19): siRNA sense strand
cauauucgccuugucuuaa

SEQ ID NO: 1163023 - RNA, 19 nt, Homo sapiens
  misc_RNA (1)...(19): siRNA sense strand
gaaauuuccagacaaagag

SEQ ID NO: 1163024 - RNA, 19 nt, Homo sapiens
  misc_RNA (1)...(19): siRNA sense strand
ccaaaucggaugauacugu

SEQ ID NO: 1163025 - RNA, 19 nt, Homo sapiens
  misc_RNA (1)...(19): siRNA sense strand
aaagagauacugagaaugg

SEQ ID NO: 1163026 - RNA, 19 nt, Homo sapiens
  misc_RNA (1)...(19): siRNA sense strand
caacccauguucacucaag

SEQ ID NO: 1163027 - RNA, 19 nt, Homo sapiens
  misc_RNA (1)...(19): siRNA sense strand
gauggagggagacggauuu

SEQ ID NO: 1163028 - RNA, 19 nt, Homo sapiens
  misc_RNA (1)...(19): siRNA sense strand
gauaugugcaucagugguu

SEQ ID NO: 1163029 - RNA, 19 nt, Homo sapiens
  misc_RNA (1)...(19): siRNA sense strand
cagaaucuuuggauaugug

SEQ ID NO: 1163030 - RNA, 19 nt, Homo sapiens
  misc_RNA (1)...(19): siRNA sense strand
uacagaaucuuuggauaug

SEQ ID NO: 1163031 - RNA, 19 nt, Homo sapiens
  misc_RNA (1)...(19): siRNA sense strand
gcugagugcuacgaucuga

SEQ ID NO: 1163032 - RNA, 19 nt, Homo sapiens
  misc_RNA (1)...(19): siRNA sense strand
gcuacgaucugaggagcaa

SEQ ID NO: 1163033 - RNA, 19 nt, Homo sapiens
  misc_RNA (1)...(19): siRNA sense strand
gaguggaaaugcauguaca

SEQ ID NO: 1163034 - RNA, 19 nt, Homo sapiens
  misc_RNA (1)...(19): siRNA sense strand
cgauacagaacaugcagua

SEQ ID NO: 1163035 - RNA, 19 nt, Homo sapiens
  misc_RNA (1)...(19): siRNA sense strand
agcaagagcugugaaggaa

SEQ ID NO: 1163036 - RNA, 19 nt, Homo sapiens
  misc_RNA (1)...(19): siRNA sense strand
agacaaagagauacugaga

SEQ ID NO: 1163037 - RNA, 19 nt, Homo sapiens
  misc_RNA (1)...(19): siRNA sense strand
guagacauauucgccuugu

SEQ ID NO: 1163038 - RNA, 19 nt, Homo sapiens
  misc_RNA (1)...(19): siRNA sense strand
gagguuaucagcugacauc

SEQ ID NO: 1163039 - RNA, 19 nt, Homo sapiens
  misc_RNA (1)...(19): siRNA sense strand
gggcuccgcugacaguaca

SEQ ID NO: 1163040 - RNA, 19 nt, Homo sapiens
  misc_RNA (1)...(19): siRNA sense strand
cagauuucauugucaagau

SEQ ID NO: 1163041 - RNA, 19 nt, Homo sapiens
  misc_RNA (1)...(19): siRNA sense strand
acuuauaucuggaaaccaa

SEQ ID NO: 1163042 - RNA, 19 nt, Homo sapiens
  misc_RNA (1)...(19): siRNA sense strand
gacaaagagauacugagaa

SEQ ID NO: 1163043 - RNA, 19 nt, Homo sapiens
  misc_RNA (1)...(19): siRNA sense strand
gaagaguggaaaugcaugu

SEQ ID NO: 1163044 - RNA, 19 nt, Homo sapiens
  misc_RNA (1)...(19): siRNA sense strand
gagacggauuucuuuccuu

SEQ ID NO: 1163045 - RNA, 19 nt, Homo sapiens
  misc_RNA (1)...(19): siRNA sense strand
agucucaacuccacaggaa

SEQ ID NO: 1163046 - RNA, 19 nt, Homo sapiens
  misc_RNA (1)...(19): siRNA sense strand
ggagacggauuucuuuccu

SEQ ID NO: 1163047 - RNA, 19 nt, Homo sapiens
  misc_RNA (1)...(19): siRNA sense strand
acucacagcagauuucauu

SEQ ID NO: 1163048 - RNA, 19 nt, Homo sapiens
  misc_RNA (1)...(19): siRNA sense strand
ggacugcccaccagaagca

SEQ ID NO: 1163049 - RNA, 19 nt, Homo sapiens
  misc_RNA (1)...(19): siRNA sense strand
agaaauuuccagacaaaga

SEQ ID NO: 1163050 - RNA, 19 nt, Homo sapiens
  misc_RNA (1)...(19): siRNA sense strand
gcaccgucaaggaagauaa

SEQ ID NO: 1163051 - RNA, 19 nt, Homo sapiens
  misc_RNA (1)...(19): siRNA sense strand
gcagauuucauugucaaga

SEQ ID NO: 1163052 - RNA, 19 nt, Homo sapiens
  misc_RNA (1)...(19): siRNA sense strand
cacagcagauuucauuguc

SEQ ID NO: 1163053 - RNA, 19 nt, Homo sapiens
  misc_RNA (1)...(19): siRNA sense strand
guacaguccaguucaucuu

SEQ ID NO: 1163054 - RNA, 19 nt, Homo sapiens
  misc_RNA (1)...(19): siRNA sense strand
ggaccacucacagcagauu

SEQ ID NO: 1163055 - RNA, 19 nt, Homo sapiens
  misc_RNA (1)...(19): siRNA sense strand
gagugcaacuuggauccuu

SEQ ID NO: 1163056 - RNA, 19 nt, Homo sapiens
  misc_RNA (1)...(19): siRNA sense strand
acauauucgccuugucuua

SEQ ID NO: 1163057 - RNA, 19 nt, Homo sapiens
  misc_RNA (1)...(19): siRNA sense strand
ucacagcagauuucauugu

SEQ ID NO: 1163058 - RNA, 19 nt, Homo sapiens
  misc_RNA (1)...(19): siRNA sense strand
auacagaacaugcaguaau

SEQ ID NO: 1163059 - RNA, 19 nt, Homo sapiens
  misc_RNA (1)...(19): siRNA sense strand
auauucgccuugucuuaaa

SEQ ID NO: 1163060 - RNA, 19 nt, Homo sapiens
  misc_RNA (1)...(19): siRNA sense strand
ccagacaaagagauacuga

SEQ ID NO: 1163061 - RNA, 19 nt, Homo sapiens
  misc_RNA (1)...(19): siRNA sense strand
caacuccacaggaacuuuc

SEQ ID NO: 1163062 - RNA, 19 nt, Homo sapiens
  misc_RNA (1)...(19): siRNA sense strand
ggcuuccugugucuaauga

SEQ ID NO: 1163063 - RNA, 19 nt, Homo sapiens
  misc_RNA (1)...(19): siRNA sense strand
gagcugugaaggaagaaau

SEQ ID NO: 1163064 - RNA, 19 nt, Homo sapiens
  misc_RNA (1)...(19): siRNA sense strand
caaccaaaucggaugauac

SEQ ID NO: 1163065 - RNA, 19 nt, Homo sapiens
  misc_RNA (1)...(19): siRNA sense strand
ugaauggcuuccugugucu

SEQ ID NO: 1163066 - RNA, 19 nt, Homo sapiens
  misc_RNA (1)...(19): siRNA sense strand
gauacagaacaugcaguaa

SEQ ID NO: 1163067 - RNA, 19 nt, Homo sapiens
  misc_RNA (1)...(19): siRNA sense strand
gagaacaucaaacccaaac

SEQ ID NO: 1163068 - RNA, 19 nt, Homo sapiens
  misc_RNA (1)...(19): siRNA sense strand
caguucaucuucuaucaac

SEQ ID NO: 1163069 - RNA, 19 nt, Homo sapiens
  misc_RNA (1)...(19): siRNA sense strand
ugacaguacaguccaguuc

SEQ ID NO: 1163070 - RNA, 19 nt, Homo sapiens
  misc_RNA (1)...(19): siRNA sense strand
uuguugaacuagcaccuaa

SEQ ID NO: 1163071 - RNA, 19 nt, Homo sapiens
  misc_RNA (1)...(19): siRNA sense strand
guggaagaguggaaaugca

SEQ ID NO: 1163072 - RNA, 19 nt, Homo sapiens
  misc_RNA (1)...(19): siRNA sense strand
cgucaaggaagauaacugu

SEQ ID NO: 1163073 - RNA, 19 nt, Homo sapiens
  misc_RNA (1)...(19): siRNA sense strand
gguuuaugccaaauuguug

SEQ ID NO: 1163074 - RNA, 19 nt, Homo sapiens
  misc_RNA (1)...(19): siRNA sense strand
guugcuauacagaaucuuu

SEQ ID NO: 1163075 - RNA, 19 nt, Homo sapiens
  misc_RNA (1)...(19): siRNA sense strand
caagugccaagccaaagga

SEQ ID NO: 1163076 - RNA, 19 nt, Homo sapiens
  misc_RNA (1)...(19): siRNA sense strand
gacaguacaguccaguuca

SEQ ID NO: 1163077 - RNA, 19 nt, Homo sapiens
  misc_RNA (1)...(19): siRNA sense strand
uuccagaaauuuccagaca

SEQ ID NO: 1163078 - RNA, 19 nt, Homo sapiens
  misc_RNA (1)...(19): siRNA sense strand
gacuaaaggugaaaacagu

SEQ ID NO: 1163079 - RNA, 19 nt, Homo sapiens
  misc_RNA (1)...(19): siRNA sense strand
uaaaagguccugaucacuu

SEQ ID NO: 1163080 - RNA, 19 nt, Homo sapiens
  misc_RNA (1)...(19): siRNA sense strand
ccagcucuccgcaaccaaa

SEQ ID NO: 1163081 - RNA, 19 nt, Homo sapiens
  misc_RNA (1)...(19): siRNA sense strand
ucacuuauaucuggaaacc

SEQ ID NO: 1163082 - RNA, 19 nt, Homo sapiens
  misc_RNA (1)...(19): siRNA sense strand
guccugaucacuuauaucu

SEQ ID NO: 1163083 - RNA, 19 nt, Homo sapiens
  misc_RNA (1)...(19): siRNA sense strand
agugguuuaugccaaauug

SEQ ID NO: 1163084 - RNA, 19 nt, Homo sapiens
  misc_RNA (1)...(19): siRNA sense strand
caguccaguucaucuucua

SEQ ID NO: 1163085 - RNA, 19 nt, Homo sapiens
  misc_RNA (1)...(19): siRNA sense strand
gguccgagggcaguauaaa

SEQ ID NO: 1163086 - RNA, 19 nt, Homo sapiens
  misc_RNA (1)...(19): siRNA sense strand
gguacgcguugcuauacag

SEQ ID NO: 1163087 - RNA, 19 nt, Homo sapiens
  misc_RNA (1)...(19): siRNA sense strand
ggaugauacugugguugca

SEQ ID NO: 1163088 - RNA, 19 nt, Homo sapiens
  misc_RNA (1)...(19): siRNA sense strand
acgcguugcuauacagaau

SEQ ID NO: 1163089 - RNA, 19 nt, Homo sapiens
  misc_RNA (1)...(19): siRNA sense strand
uccagaaauuuccagacaa

SEQ ID NO: 1163090 - RNA, 19 nt, Homo sapiens
  misc_RNA (1)...(19): siRNA sense strand
gugccaagccaaaggaaca

SEQ ID NO: 1163091 - RNA, 19 nt, Homo sapiens
  misc_RNA (1)...(19): siRNA sense strand
gcguugcuauacagaaucu

SEQ ID NO: 1163092 - RNA, 19 nt, Homo sapiens
  misc_RNA (1)...(19): siRNA sense strand
gaccacucacagcagauuu

SEQ ID NO: 1163093 - RNA, 19 nt, Homo sapiens
  misc_RNA (1)...(19): siRNA sense strand
acagcagauuucauuguca

SEQ ID NO: 1163094 - RNA, 19 nt, Homo sapiens
  misc_RNA (1)...(19): siRNA sense strand
acagaaucuuuggauaugu

SEQ ID NO: 1163095 - RNA, 19 nt, Homo sapiens
  misc_RNA (1)...(19): siRNA sense strand
uccaguucaucuucuauca

SEQ ID NO: 1163096 - RNA, 19 nt, Homo sapiens
  misc_RNA (1)...(19): siRNA sense strand
acaguacaguccaguucau

SEQ ID NO: 1163097 - RNA, 19 nt, Homo sapiens
  misc_RNA (1)...(19): siRNA sense strand
gguugcaauucccuaugga

SEQ ID NO: 1163098 - RNA, 19 nt, Homo sapiens
  misc_RNA (1)...(19): siRNA sense strand
ccagaaauuuccagacaaa

SEQ ID NO: 1163099 - RNA, 19 nt, Homo sapiens
  misc_RNA (1)...(19): siRNA sense strand
gcaaccaaaucggaugaua

SEQ ID NO: 1163100 - RNA, 19 nt, Homo sapiens
  misc_RNA (1)...(19): siRNA sense strand
caagagcugugaaggaaga

SEQ ID NO: 1163101 - RNA, 19 nt, Homo sapiens
  misc_RNA (1)...(19): siRNA sense strand
acaaagagauacugagaau

SEQ ID NO: 1163102 - RNA, 19 nt, Homo sapiens
  misc_RNA (1)...(19): siRNA sense strand
gcacacugcuccucuuucu

SEQ ID NO: 1163103 - RNA, 19 nt, Homo sapiens
  misc_RNA (1)...(19): siRNA sense strand
gaagcaccgucaaggaaga

SEQ ID NO: 1163104 - RNA, 19 nt, Homo sapiens
  misc_RNA (1)...(19): siRNA sense strand
caagcaccauggccaguuu

SEQ ID NO: 1163105 - RNA, 19 nt, Homo sapiens
  misc_RNA (1)...(19): siRNA sense strand
gaugguacgcguugcuaua

SEQ ID NO: 1163106 - RNA, 19 nt, Homo sapiens
  misc_RNA (1)...(19): siRNA sense strand
gcaaugcucagcucauaau

SEQ ID NO: 1163107 - RNA, 19 nt, Homo sapiens
  misc_RNA (1)...(19): siRNA sense strand
ggagggagacggauuucuu

SEQ ID NO: 1163108 - RNA, 19 nt, Homo sapiens
  misc_RNA (1)...(19): siRNA sense strand
uacagaacaugcaguaaug

SEQ ID NO: 1163109 - RNA, 19 nt, Homo sapiens
  misc_RNA (1)...(19): siRNA sense strand
aaaagguccugaucacuua

SEQ ID NO: 1163110 - RNA, 19 nt, Homo sapiens
  misc_RNA (1)...(19): siRNA sense strand
gagggagacggauuucuuu

SEQ ID NO: 1163111 - RNA, 19 nt, Homo sapiens
  misc_RNA (1)...(19): siRNA sense strand
gacaacccauguucacuca

SEQ ID NO: 1163112 - RNA, 19 nt, Homo sapiens
  misc_RNA (1)...(19): siRNA sense strand
ugacaucggcugagugcua

SEQ ID NO: 1163113 - RNA, 19 nt, Homo sapiens
  misc_RNA (1)...(19): siRNA sense strand
cagcagauuucauugucaa

SEQ ID NO: 1163114 - RNA, 19 nt, Homo sapiens
  misc_RNA (1)...(19): siRNA sense strand
gggaagcaccgucaaggaa

SEQ ID NO: 1163115 - RNA, 19 nt, Homo sapiens
  misc_RNA (1)...(19): siRNA sense strand
gaucacuuauaucuggaaa

SEQ ID NO: 1163116 - RNA, 19 nt, Homo sapiens
  misc_RNA (1)...(19): siRNA sense strand
cauauucgccuugucuuaa

SEQ ID NO: 1163117 - RNA, 19 nt, Homo sapiens
  misc_RNA (1)...(19): siRNA sense strand
gaaauuuccagacaaagag

SEQ ID NO: 1163118 - RNA, 19 nt, Homo sapiens
  misc_RNA (1)...(19): siRNA sense strand
ccaaaucggaugauacugu

SEQ ID NO: 1163119 - RNA, 19 nt, Homo sapiens
  misc_RNA (1)...(19): siRNA sense strand
aaagagauacugagaaugg

SEQ ID NO: 1163120 - RNA, 19 nt, Homo sapiens
  misc_RNA (1)...(19): siRNA sense strand
caacccauguucacucaag

SEQ ID NO: 1163121 - RNA, 19 nt, Homo sapiens
  misc_RNA (1)...(19): siRNA sense strand
gauggagggagacggauuu

SEQ ID NO: 1163122 - RNA, 19 nt, Homo sapiens
  misc_RNA (1)...(19): siRNA sense strand
gauaugugcaucagugguu

SEQ ID NO: 1163123 - RNA, 19 nt, Homo sapiens
  misc_RNA (1)...(19): siRNA sense strand
cagaaucuuuggauaugug

SEQ ID NO: 1163124 - RNA, 19 nt, Homo sapiens
  misc_RNA (1)...(19): siRNA sense strand
uacagaaucuuuggauaug

SEQ ID NO: 1163125 - RNA, 19 nt, Homo sapiens
  misc_RNA (1)...(19): siRNA sense strand
gcugagugcuacgaucuga

SEQ ID NO: 1163126 - RNA, 19 nt, Homo sapiens
  misc_RNA (1)...(19): siRNA sense strand
gcuacgaucugaggagcaa

SEQ ID NO: 1163127 - RNA, 19 nt, Homo sapiens
  misc_RNA (1)...(19): siRNA sense strand
gaguggaaaugcauguaca

SEQ ID NO: 1163128 - RNA, 19 nt, Homo sapiens
  misc_RNA (1)...(19): siRNA sense strand
cgauacagaacaugcagua

SEQ ID NO: 1163129 - RNA, 19 nt, Homo sapiens
  misc_RNA (1)...(19): siRNA sense strand
agcaagagcugugaaggaa

SEQ ID NO: 1163130 - RNA, 19 nt, Homo sapiens
  misc_RNA (1)...(19): siRNA sense strand
agacaaagagauacugaga

SEQ ID NO: 1163131 - RNA, 19 nt, Homo sapiens
  misc_RNA (1)...(19): siRNA sense strand
guagacauauucgccuugu

SEQ ID NO: 1163132 - RNA, 19 nt, Homo sapiens
  misc_RNA (1)...(19): siRNA sense strand
gagguuaucagcugacauc

SEQ ID NO: 1163133 - RNA, 19 nt, Homo sapiens
  misc_RNA (1)...(19): siRNA sense strand
gggcuccgcugacaguaca

SEQ ID NO: 1163134 - RNA, 19 nt, Homo sapiens
  misc_RNA (1)...(19): siRNA sense strand
cagauuucauugucaagau

SEQ ID NO: 1163135 - RNA, 19 nt, Homo sapiens
  misc_RNA (1)...(19): siRNA sense strand
acuuauaucuggaaaccaa

SEQ ID NO: 1163136 - RNA, 19 nt, Homo sapiens
  misc_RNA (1)...(19): siRNA sense strand
gacaaagagauacugagaa

SEQ ID NO: 1163137 - RNA, 19 nt, Homo sapiens
  misc_RNA (1)...(19): siRNA sense strand
gaagaguggaaaugcaugu

SEQ ID NO: 1163138 - RNA, 19 nt, Homo sapiens
  misc_RNA (1)...(19): siRNA sense strand
gagacggauuucuuuccuu

SEQ ID NO: 1163139 - RNA, 19 nt, Homo sapiens
  misc_RNA (1)...(19): siRNA sense strand
agucucaacuccacaggaa

SEQ ID NO: 1163140 - RNA, 19 nt, Homo sapiens
  misc_RNA (1)...(19): siRNA sense strand
ggagacggauuucuuuccu

SEQ ID NO: 1163141 - RNA, 19 nt, Homo sapiens
  misc_RNA (1)...(19): siRNA sense strand
acucacagcagauuucauu

SEQ ID NO: 1163142 - RNA, 19 nt, Homo sapiens
  misc_RNA (1)...(19): siRNA sense strand
ggacugcccaccagaagca

SEQ ID NO: 1163143 - RNA, 19 nt, Homo sapiens
  misc_RNA (1)...(19): siRNA sense strand
agaaauuuccagacaaaga

SEQ ID NO: 1163144 - RNA, 19 nt, Homo sapiens
  misc_RNA (1)...(19): siRNA sense strand
gcaccgucaaggaagauaa

SEQ ID NO: 1163145 - RNA, 19 nt, Homo sapiens
  misc_RNA (1)...(19): siRNA sense strand
gcagauuucauugucaaga

SEQ ID NO: 1163146 - RNA, 19 nt, Homo sapiens
  misc_RNA (1)...(19): siRNA sense strand
cacagcagauuucauuguc

SEQ ID NO: 1163147 - RNA, 19 nt, Homo sapiens
  misc_RNA (1)...(19): siRNA sense strand
guacaguccaguucaucuu

SEQ ID NO: 1163148 - RNA, 19 nt, Homo sapiens
  misc_RNA (1)...(19): siRNA sense strand
ggaccacucacagcagauu

SEQ ID NO: 1163149 - RNA, 19 nt, Homo sapiens
  misc_RNA (1)...(19): siRNA sense strand
gagugcaacuuggauccuu

SEQ ID NO: 1163150 - RNA, 19 nt, Homo sapiens
  misc_RNA (1)...(19): siRNA sense strand
acauauucgccuugucuua

SEQ ID NO: 1163151 - RNA, 19 nt, Homo sapiens
  misc_RNA (1)...(19): siRNA sense strand
ucacagcagauuucauugu

SEQ ID NO: 1163152 - RNA, 19 nt, Homo sapiens
  misc_RNA (1)...(19): siRNA sense strand
auacagaacaugcaguaau

SEQ ID NO: 1163153 - RNA, 19 nt, Homo sapiens
  misc_RNA (1)...(19): siRNA sense strand
auauucgccuugucuuaaa

SEQ ID NO: 1163154 - RNA, 19 nt, Homo sapiens
  misc_RNA (1)...(19): siRNA sense strand
ccagacaaagagauacuga

SEQ ID NO: 1163155 - RNA, 19 nt, Homo sapiens
  misc_RNA (1)...(19): siRNA sense strand
caacuccacaggaacuuuc

SEQ ID NO: 1163156 - RNA, 19 nt, Homo sapiens
  misc_RNA (1)...(19): siRNA sense strand
ggcuuccugugucuaauga

SEQ ID NO: 1163157 - RNA, 19 nt, Homo sapiens
  misc_RNA (1)...(19): siRNA sense strand
gagcugugaaggaagaaau

SEQ ID NO: 1163158 - RNA, 19 nt, Homo sapiens
  misc_RNA (1)...(19): siRNA sense strand
caaccaaaucggaugauac

SEQ ID NO: 1163159 - RNA, 19 nt, Homo sapiens
  misc_RNA (1)...(19): siRNA sense strand
ugaauggcuuccugugucu

SEQ ID NO: 1163160 - RNA, 19 nt, Homo sapiens
  misc_RNA (1)...(19): siRNA sense strand
gauacagaacaugcaguaa

SEQ ID NO: 1163161 - RNA, 19 nt, Homo sapiens
  misc_RNA (1)...(19): siRNA sense strand
gagaacaucaaacccaaac

SEQ ID NO: 1163162 - RNA, 19 nt, Homo sapiens
  misc_RNA (1)...(19): siRNA sense strand
caguucaucuucuaucaac

SEQ ID NO: 1163163 - RNA, 19 nt, Homo sapiens
  misc_RNA (1)...(19): siRNA sense strand
ugacaguacaguccaguuc

SEQ ID NO: 1163164 - RNA, 19 nt, Homo sapiens
  misc_RNA (1)...(19): siRNA sense strand
uuguugaacuagcaccuaa

SEQ ID NO: 1163165 - RNA, 19 nt, Homo sapiens
  misc_RNA (1)...(19): siRNA sense strand
guggaagaguggaaaugca

SEQ ID NO: 1163166 - RNA, 19 nt, Homo sapiens
  misc_RNA (1)...(19): siRNA sense strand
cgucaaggaagauaacugu

SEQ ID NO: 1163167 - RNA, 19 nt, Homo sapiens
  misc_RNA (1)...(19): siRNA sense strand
gguuuaugccaaauuguug

SEQ ID NO: 1163168 - RNA, 19 nt, Homo sapiens
  misc_RNA (1)...(19): siRNA sense strand
guugcuauacagaaucuuu

SEQ ID NO: 1163169 - RNA, 19 nt, Homo sapiens
  misc_RNA (1)...(19): siRNA sense strand
caagugccaagccaaagga

SEQ ID NO: 1163170 - RNA, 19 nt, Homo sapiens
  misc_RNA (1)...(19): siRNA sense strand
gacaguacaguccaguuca

SEQ ID NO: 1163171 - RNA, 19 nt, Homo sapiens
  misc_RNA (1)...(19): siRNA sense strand
uuccagaaauuuccagaca

SEQ ID NO: 1163172 - RNA, 19 nt, Homo sapiens
  misc_RNA (1)...(19): siRNA sense strand
gacuaaaggugaaaacagu

SEQ ID NO: 1163173 - RNA, 19 nt, Homo sapiens
  misc_RNA (1)...(19): siRNA sense strand
uaaaagguccugaucacuu

SEQ ID NO: 1163174 - RNA, 19 nt, Homo sapiens
  misc_RNA (1)...(19): siRNA sense strand
ccagcucuccgcaaccaaa

SEQ ID NO: 1163175 - RNA, 19 nt, Homo sapiens
  misc_RNA (1)...(19): siRNA sense strand
ucacuuauaucuggaaacc

SEQ ID NO: 1163176 - RNA, 19 nt, Homo sapiens
  misc_RNA (1)...(19): siRNA sense strand
guccugaucacuuauaucu

SEQ ID NO: 1163177 - RNA, 19 nt, Homo sapiens
  misc_RNA (1)...(19): siRNA sense strand
agugguuuaugccaaauug

SEQ ID NO: 1163178 - RNA, 19 nt, Homo sapiens
  misc_RNA (1)...(19): siRNA sense strand
caguccaguucaucuucua

SEQ ID NO: 1163179 - RNA, 19 nt, Homo sapiens
  misc_RNA (1)...(19): siRNA sense strand
gguccgagggcaguauaaa

SEQ ID NO: 1163180 - RNA, 19 nt, Homo sapiens
  misc_RNA (1)...(19): siRNA sense strand
gguacgcguugcuauacag

SEQ ID NO: 1163181 - RNA, 19 nt, Homo sapiens
  misc_RNA (1)...(19): siRNA sense strand
ggaugauacugugguugca

SEQ ID NO: 1163182 - RNA, 19 nt, Homo sapiens
  misc_RNA (1)...(19): siRNA sense strand
acgcguugcuauacagaau

SEQ ID NO: 1163183 - RNA, 19 nt, Homo sapiens
  misc_RNA (1)...(19): siRNA sense strand
uccagaaauuuccagacaa

SEQ ID NO: 1163184 - RNA, 19 nt, Homo sapiens
  misc_RNA (1)...(19): siRNA sense strand
gugccaagccaaaggaaca

SEQ ID NO: 1163185 - RNA, 19 nt, Homo sapiens
  misc_RNA (1)...(19): siRNA sense strand
gcguugcuauacagaaucu

SEQ ID NO: 1163186 - RNA, 19 nt, Homo sapiens
  misc_RNA (1)...(19): siRNA sense strand
gaccacucacagcagauuu

SEQ ID NO: 1163187 - RNA, 19 nt, Homo sapiens
  misc_RNA (1)...(19): siRNA sense strand
acagcagauuucauuguca

SEQ ID NO: 1163188 - RNA, 19 nt, Homo sapiens
  misc_RNA (1)...(19): siRNA sense strand
acagaaucuuuggauaugu

SEQ ID NO: 1163189 - RNA, 19 nt, Homo sapiens
  misc_RNA (1)...(19): siRNA sense strand
uccaguucaucuucuauca

SEQ ID NO: 1163190 - RNA, 19 nt, Homo sapiens
  misc_RNA (1)...(19): siRNA sense strand
acaguacaguccaguucau

SEQ ID NO: 1163191 - RNA, 19 nt, Homo sapiens
  misc_RNA (1)...(19): siRNA sense strand
gguugcaauucccuaugga

SEQ ID NO: 1163192 - RNA, 19 nt, Homo sapiens
  misc_RNA (1)...(19): siRNA sense strand
guacaaagauucccucgaa

SEQ ID NO: 1163193 - RNA, 19 nt, Homo sapiens
  misc_RNA (1)...(19): siRNA sense strand
gaaccugaguuaagugaug

SEQ ID NO: 1163194 - RNA, 19 nt, Homo sapiens
  misc_RNA (1)...(19): siRNA sense strand
gcuagaagaaccugaguua

SEQ ID NO: 1163195 - RNA, 19 nt, Homo sapiens
  misc_RNA (1)...(19): siRNA sense strand
gagcugucuuccagaaaua

SEQ ID NO: 1163196 - RNA, 19 nt, Homo sapiens
  misc_RNA (1)...(19): siRNA sense strand
gagccaaccuaauguggaa

SEQ ID NO: 1163197 - RNA, 19 nt, Homo sapiens
  misc_RNA (1)...(19): siRNA sense strand
gagcagcacucgaccucuu

SEQ ID NO: 1163198 - RNA, 19 nt, Homo sapiens
  misc_RNA (1)...(19): siRNA sense strand
agaaauauguucccuccuu

SEQ ID NO: 1163199 - RNA, 19 nt, Homo sapiens
  misc_RNA (1)...(19): siRNA sense strand
gagagccaccuguuaauau

SEQ ID NO: 1163200 - RNA, 19 nt, Homo sapiens
  misc_RNA (1)...(19): siRNA sense strand
gauccaagcuaccauuugc

SEQ ID NO: 1163201 - RNA, 19 nt, Homo sapiens
  misc_RNA (1)...(19): siRNA sense strand
agaagaaccugaguuaagu

SEQ ID NO: 1163202 - RNA, 19 nt, Homo sapiens
  misc_RNA (1)...(19): siRNA sense strand
gcaagauuguggaccuguu

SEQ ID NO: 1163203 - RNA, 19 nt, Homo sapiens
  misc_RNA (1)...(19): siRNA sense strand
guuggcaugucuacaauga

SEQ ID NO: 1163204 - RNA, 19 nt, Homo sapiens
  misc_RNA (1)...(19): siRNA sense strand
ggccugagccacccacuuu

SEQ ID NO: 1163205 - RNA, 19 nt, Homo sapiens
  misc_RNA (1)...(19): siRNA sense strand
uucaguagguguagacuuu

SEQ ID NO: 1163206 - RNA, 19 nt, Homo sapiens
  misc_RNA (1)...(19): siRNA sense strand
gcaggaugcccaagaguuc

SEQ ID NO: 1163207 - RNA, 19 nt, Homo sapiens
  misc_RNA (1)...(19): siRNA sense strand
cgagagccaccuguuaaua

SEQ ID NO: 1163208 - RNA, 19 nt, Homo sapiens
  misc_RNA (1)...(19): siRNA sense strand
ccacccacuuugagacgua

SEQ ID NO: 1163209 - RNA, 19 nt, Homo sapiens
  misc_RNA (1)...(19): siRNA sense strand
cgagcugucuuccagaaau

SEQ ID NO: 1163210 - RNA, 19 nt, Homo sapiens
  misc_RNA (1)...(19): siRNA sense strand
uagaagaaccugaguuaag

SEQ ID NO: 1163211 - RNA, 19 nt, Homo sapiens
  misc_RNA (1)...(19): siRNA sense strand
gagcuagagucggagaaug

SEQ ID NO: 1163212 - RNA, 19 nt, Homo sapiens
  misc_RNA (1)...(19): siRNA sense strand
cuucgggacuucugucuga

SEQ ID NO: 1163213 - RNA, 19 nt, Homo sapiens
  misc_RNA (1)...(19): siRNA sense strand
cgagaggacagcaagauug

SEQ ID NO: 1163214 - RNA, 19 nt, Homo sapiens
  misc_RNA (1)...(19): siRNA sense strand
ugaccgagccaaccuaaug

SEQ ID NO: 1163215 - RNA, 19 nt, Homo sapiens
  misc_RNA (1)...(19): siRNA sense strand
agagcucacugaagccuuu

SEQ ID NO: 1163216 - RNA, 19 nt, Homo sapiens
  misc_RNA (1)...(19): siRNA sense strand
aaaguugacaguacaaaga

SEQ ID NO: 1163217 - RNA, 19 nt, Homo sapiens
  misc_RNA (1)...(19): siRNA sense strand
caagauuguggaccuguuu

SEQ ID NO: 1163218 - RNA, 19 nt, Homo sapiens
  misc_RNA (1)...(19): siRNA sense strand
gagccuuucuacucugaug

SEQ ID NO: 1163219 - RNA, 19 nt, Homo sapiens
  misc_RNA (1)...(19): siRNA sense strand
gagaggacagcaagauugu

SEQ ID NO: 1163220 - RNA, 19 nt, Homo sapiens
  misc_RNA (1)...(19): siRNA sense strand
aaccuaauguggaaacguu

SEQ ID NO: 1163221 - RNA, 19 nt, Homo sapiens
  misc_RNA (1)...(19): siRNA sense strand
gugcuguucuaccaacuga

SEQ ID NO: 1163222 - RNA, 19 nt, Homo sapiens
  misc_RNA (1)...(19): siRNA sense strand
uacaaugacucucgugucu

SEQ ID NO: 1163223 - RNA, 19 nt, Homo sapiens
  misc_RNA (1)...(19): siRNA sense strand
gaugaccgagccaaccuaa

SEQ ID NO: 1163224 - RNA, 19 nt, Homo sapiens
  misc_RNA (1)...(19): siRNA sense strand
gaaacacgugcuuccugaa

SEQ ID NO: 1163225 - RNA, 19 nt, Homo sapiens
  misc_RNA (1)...(19): siRNA sense strand
cgggauuguuucaaccuuu

SEQ ID NO: 1163226 - RNA, 19 nt, Homo sapiens
  misc_RNA (1)...(19): siRNA sense strand
gcgagaggacagcaagauu

SEQ ID NO: 1163227 - RNA, 19 nt, Homo sapiens
  misc_RNA (1)...(19): siRNA sense strand
gaagaaccugaguuaagug

SEQ ID NO: 1163228 - RNA, 19 nt, Homo sapiens
  misc_RNA (1)...(19): siRNA sense strand
gagcggcuacaccuugaaa

SEQ ID NO: 1163229 - RNA, 19 nt, Homo sapiens
  misc_RNA (1)...(19): siRNA sense strand
cuacucugaugacaagaug

SEQ ID NO: 1163230 - RNA, 19 nt, Homo sapiens
  misc_RNA (1)...(19): siRNA sense strand
gaugaacggcucaagaaac

SEQ ID NO: 1163231 - RNA, 19 nt, Homo sapiens
  misc_RNA (1)...(19): siRNA sense strand
ugaguuaagugaugaugac

SEQ ID NO: 1163232 - RNA, 19 nt, Homo sapiens
  misc_RNA (1)...(19): siRNA sense strand
gcuacgugcuguucuacca

SEQ ID NO: 1163233 - RNA, 19 nt, Homo sapiens
  misc_RNA (1)...(19): siRNA sense strand
ccucugagccuuucuacuc

SEQ ID NO: 1163234 - RNA, 19 nt, Homo sapiens
  misc_RNA (1)...(19): siRNA sense strand
agagccaccuguuaauauc

SEQ ID NO: 1163235 - RNA, 19 nt, Homo sapiens
  misc_RNA (1)...(19): siRNA sense strand
gcagcaaggagcgcagaaa

SEQ ID NO: 1163236 - RNA, 19 nt, Homo sapiens
  misc_RNA (1)...(19): siRNA sense strand
ucugggcucuggucauguu

SEQ ID NO: 1163237 - RNA, 19 nt, Homo sapiens
  misc_RNA (1)...(19): siRNA sense strand
cccgagagccaccuguuaa

SEQ ID NO: 1163238 - RNA, 19 nt, Homo sapiens
  misc_RNA (1)...(19): siRNA sense strand
ggauccaagcuaccauuug

SEQ ID NO: 1163239 - RNA, 19 nt, Homo sapiens
  misc_RNA (1)...(19): siRNA sense strand
aaacacgugcuuccugaau

SEQ ID NO: 1163240 - RNA, 19 nt, Homo sapiens
  misc_RNA (1)...(19): siRNA sense strand
gaggggcucugcuagaaga

SEQ ID NO: 1163241 - RNA, 19 nt, Homo sapiens
  misc_RNA (1)...(19): siRNA sense strand
caccgauacuugccaaugg

SEQ ID NO: 1163242 - RNA, 19 nt, Homo sapiens
  misc_RNA (1)...(19): siRNA sense strand
gggauccaagcuaccauuu

SEQ ID NO: 1163243 - RNA, 19 nt, Homo sapiens
  misc_RNA (1)...(19): siRNA sense strand
ccagcaggaugcccaagag

SEQ ID NO: 1163244 - RNA, 19 nt, Homo sapiens
  misc_RNA (1)...(19): siRNA sense strand
cugaugaacggcucaagaa

SEQ ID NO: 1163245 - RNA, 19 nt, Homo sapiens
  misc_RNA (1)...(19): siRNA sense strand
guuucaaccuuuucacuaa

SEQ ID NO: 1163246 - RNA, 19 nt, Homo sapiens
  misc_RNA (1)...(19): siRNA sense strand
uuucuacucugaugacaag

SEQ ID NO: 1163247 - RNA, 19 nt, Homo sapiens
  misc_RNA (1)...(19): siRNA sense strand
cuucugggcucuggucaug

SEQ ID NO: 1163248 - RNA, 19 nt, Homo sapiens
  misc_RNA (1)...(19): siRNA sense strand
uggagcggcuacaccuuga

SEQ ID NO: 1163249 - RNA, 19 nt, Homo sapiens
  misc_RNA (1)...(19): siRNA sense strand
gcuguucuaccaacugaug

SEQ ID NO: 1163250 - RNA, 19 nt, Homo sapiens
  misc_RNA (1)...(19): siRNA sense strand
gggauuguuucaaccuuuu

SEQ ID NO: 1163251 - RNA, 19 nt, Homo sapiens
  misc_RNA (1)...(19): siRNA sense strand
gcgggauuguuucaaccuu

SEQ ID NO: 1163252 - RNA, 19 nt, Homo sapiens
  misc_RNA (1)...(19): siRNA sense strand
cuagaagaaccugaguuaa

SEQ ID NO: 1163253 - RNA, 19 nt, Homo sapiens
  misc_RNA (1)...(19): siRNA sense strand
cccaagaguuccugaagcu

SEQ ID NO: 1163254 - RNA, 19 nt, Homo sapiens
  misc_RNA (1)...(19): siRNA sense strand
ugaugaacggcucaagaaa

SEQ ID NO: 1163255 - RNA, 19 nt, Homo sapiens
  misc_RNA (1)...(19): siRNA sense strand
uggcaugucuacaaugacu

SEQ ID NO: 1163256 - RNA, 19 nt, Homo sapiens
  misc_RNA (1)...(19): siRNA sense strand
gaccgagccaaccuaaugu

SEQ ID NO: 1163257 - RNA, 19 nt, Homo sapiens
  misc_RNA (1)...(19): siRNA sense strand
uccugaagcuccucaugga

SEQ ID NO: 1163258 - RNA, 19 nt, Homo sapiens
  misc_RNA (1)...(19): siRNA sense strand
ggucauguuggccuucgaa

SEQ ID NO: 1163259 - RNA, 19 nt, Homo sapiens
  misc_RNA (1)...(19): siRNA sense strand
ccacuauggccacuacaca

SEQ ID NO: 1163260 - RNA, 19 nt, Homo sapiens
  misc_RNA (1)...(19): siRNA sense strand
aaccugaguuaagugauga

SEQ ID NO: 1163261 - RNA, 19 nt, Homo sapiens
  misc_RNA (1)...(19): siRNA sense strand
ugaagccuuugcagaugug

SEQ ID NO: 1163262 - RNA, 19 nt, Homo sapiens
  misc_RNA (1)...(19): siRNA sense strand
cugaagccuuugcagaugu

SEQ ID NO: 1163263 - RNA, 19 nt, Homo sapiens
  misc_RNA (1)...(19): siRNA sense strand
acugaagccuuugcagaug

SEQ ID NO: 1163264 - RNA, 19 nt, Homo sapiens
  misc_RNA (1)...(19): siRNA sense strand
augaacggcucaagaaacu

SEQ ID NO: 1163265 - RNA, 19 nt, Homo sapiens
  misc_RNA (1)...(19): siRNA sense strand
gcggcuacaccuugaaauc

SEQ ID NO: 1163266 - RNA, 19 nt, Homo sapiens
  misc_RNA (1)...(19): siRNA sense strand
aacacgugcuuccugaaug

SEQ ID NO: 1163267 - RNA, 19 nt, Homo sapiens
  misc_RNA (1)...(19): siRNA sense strand
ggagaaugccccagugugu

SEQ ID NO: 1163268 - RNA, 19 nt, Homo sapiens
  misc_RNA (1)...(19): siRNA sense strand
gugccaggccuguggguau

SEQ ID NO: 1163269 - RNA, 19 nt, Homo sapiens
  misc_RNA (1)...(19): siRNA sense strand
cggcuacaccuugaaauca

SEQ ID NO: 1163270 - RNA, 19 nt, Homo sapiens
  misc_RNA (1)...(19): siRNA sense strand
acacgugcuuccugaaugc

SEQ ID NO: 1163271 - RNA, 19 nt, Homo sapiens
  misc_RNA (1)...(19): siRNA sense strand
ccugagccacccacuuuga

SEQ ID NO: 1163272 - RNA, 19 nt, Homo sapiens
  misc_RNA (1)...(19): siRNA sense strand
guugacaguacaaagauuc

SEQ ID NO: 1163273 - RNA, 19 nt, Homo sapiens
  misc_RNA (1)...(19): siRNA sense strand
ccaccgauacuugccaaug

SEQ ID NO: 1163274 - RNA, 19 nt, Homo sapiens
  misc_RNA (1)...(19): siRNA sense strand
guacaaagauucccucgaa

SEQ ID NO: 1163275 - RNA, 19 nt, Homo sapiens
  misc_RNA (1)...(19): siRNA sense strand
gaaccugaguuaagugaug

SEQ ID NO: 1163276 - RNA, 19 nt, Homo sapiens
  misc_RNA (1)...(19): siRNA sense strand
gcuagaagaaccugaguua

SEQ ID NO: 1163277 - RNA, 19 nt, Homo sapiens
  misc_RNA (1)...(19): siRNA sense strand
gagcugucuuccagaaaua

SEQ ID NO: 1163278 - RNA, 19 nt, Homo sapiens
  misc_RNA (1)...(19): siRNA sense strand
gagccaaccuaauguggaa

SEQ ID NO: 1163279 - RNA, 19 nt, Homo sapiens
  misc_RNA (1)...(19): siRNA sense strand
gagcagcacucgaccucuu

SEQ ID NO: 1163280 - RNA, 19 nt, Homo sapiens
  misc_RNA (1)...(19): siRNA sense strand
agaaauauguucccuccuu

SEQ ID NO: 1163281 - RNA, 19 nt, Homo sapiens
  misc_RNA (1)...(19): siRNA sense strand
gagagccaccuguuaauau

SEQ ID NO: 1163282 - RNA, 19 nt, Homo sapiens
  misc_RNA (1)...(19): siRNA sense strand
gauccaagcuaccauuugc

SEQ ID NO: 1163283 - RNA, 19 nt, Homo sapiens
  misc_RNA (1)...(19): siRNA sense strand
agaagaaccugaguuaagu

SEQ ID NO: 1163284 - RNA, 19 nt, Homo sapiens
  misc_RNA (1)...(19): siRNA sense strand
gcaagauuguggaccuguu

SEQ ID NO: 1163285 - RNA, 19 nt, Homo sapiens
  misc_RNA (1)...(19): siRNA sense strand
guuggcaugucuacaauga

SEQ ID NO: 1163286 - RNA, 19 nt, Homo sapiens
  misc_RNA (1)...(19): siRNA sense strand
ggccugagccacccacuuu

SEQ ID NO: 1163287 - RNA, 19 nt, Homo sapiens
  misc_RNA (1)...(19): siRNA sense strand
uucaguagguguagacuuu

SEQ ID NO: 1163288 - RNA, 19 nt, Homo sapiens
  misc_RNA (1)...(19): siRNA sense strand
gcaggaugcccaagaguuc

SEQ ID NO: 1163289 - RNA, 19 nt, Homo sapiens
  misc_RNA (1)...(19): siRNA sense strand
cgagagccaccuguuaaua

SEQ ID NO: 1163290 - RNA, 19 nt, Homo sapiens
  misc_RNA (1)...(19): siRNA sense strand
ccacccacuuugagacgua

SEQ ID NO: 1163291 - RNA, 19 nt, Homo sapiens
  misc_RNA (1)...(19): siRNA sense strand
cgagcugucuuccagaaau

SEQ ID NO: 1163292 - RNA, 19 nt, Homo sapiens
  misc_RNA (1)...(19): siRNA sense strand
uagaagaaccugaguuaag

SEQ ID NO: 1163293 - RNA, 19 nt, Homo sapiens
  misc_RNA (1)...(19): siRNA sense strand
gagcuagagucggagaaug

SEQ ID NO: 1163294 - RNA, 19 nt, Homo sapiens
  misc_RNA (1)...(19): siRNA sense strand
cuucgggacuucugucuga

SEQ ID NO: 1163295 - RNA, 19 nt, Homo sapiens
  misc_RNA (1)...(19): siRNA sense strand
cgagaggacagcaagauug

SEQ ID NO: 1163296 - RNA, 19 nt, Homo sapiens
  misc_RNA (1)...(19): siRNA sense strand
ugaccgagccaaccuaaug

SEQ ID NO: 1163297 - RNA, 19 nt, Homo sapiens
  misc_RNA (1)...(19): siRNA sense strand
agagcucacugaagccuuu

SEQ ID NO: 1163298 - RNA, 19 nt, Homo sapiens
  misc_RNA (1)...(19): siRNA sense strand
aaaguugacaguacaaaga

SEQ ID NO: 1163299 - RNA, 19 nt, Homo sapiens
  misc_RNA (1)...(19): siRNA sense strand
caagauuguggaccuguuu

SEQ ID NO: 1163300 - RNA, 19 nt, Homo sapiens
  misc_RNA (1)...(19): siRNA sense strand
gagccuuucuacucugaug

SEQ ID NO: 1163301 - RNA, 19 nt, Homo sapiens
  misc_RNA (1)...(19): siRNA sense strand
gagaggacagcaagauugu

SEQ ID NO: 1163302 - RNA, 19 nt, Homo sapiens
  misc_RNA (1)...(19): siRNA sense strand
aaccuaauguggaaacguu

SEQ ID NO: 1163303 - RNA, 19 nt, Homo sapiens
  misc_RNA (1)...(19): siRNA sense strand
gugcuguucuaccaacuga

SEQ ID NO: 1163304 - RNA, 19 nt, Homo sapiens
  misc_RNA (1)...(19): siRNA sense strand
uacaaugacucucgugucu

SEQ ID NO: 1163305 - RNA, 19 nt, Homo sapiens
  misc_RNA (1)...(19): siRNA sense strand
gaugaccgagccaaccuaa

SEQ ID NO: 1163306 - RNA, 19 nt, Homo sapiens
  misc_RNA (1)...(19): siRNA sense strand
gaaacacgugcuuccugaa

SEQ ID NO: 1163307 - RNA, 19 nt, Homo sapiens
  misc_RNA (1)...(19): siRNA sense strand
cgggauuguuucaaccuuu

SEQ ID NO: 1163308 - RNA, 19 nt, Homo sapiens
  misc_RNA (1)...(19): siRNA sense strand
gcgagaggacagcaagauu

SEQ ID NO: 1163309 - RNA, 19 nt, Homo sapiens
  misc_RNA (1)...(19): siRNA sense strand
gaagaaccugaguuaagug

SEQ ID NO: 1163310 - RNA, 19 nt, Homo sapiens
  misc_RNA (1)...(19): siRNA sense strand
gagcggcuacaccuugaaa

SEQ ID NO: 1163311 - RNA, 19 nt, Homo sapiens
  misc_RNA (1)...(19): siRNA sense strand
cuacucugaugacaagaug

SEQ ID NO: 1163312 - RNA, 19 nt, Homo sapiens
  misc_RNA (1)...(19): siRNA sense strand
gaugaacggcucaagaaac

SEQ ID NO: 1163313 - RNA, 19 nt, Homo sapiens
  misc_RNA (1)...(19): siRNA sense strand
ugaguuaagugaugaugac

SEQ ID NO: 1163314 - RNA, 19 nt, Homo sapiens
  misc_RNA (1)...(19): siRNA sense strand
gcuacgugcuguucuacca

SEQ ID NO: 1163315 - RNA, 19 nt, Homo sapiens
  misc_RNA (1)...(19): siRNA sense strand
ccucugagccuuucuacuc

SEQ ID NO: 1163316 - RNA, 19 nt, Homo sapiens
  misc_RNA (1)...(19): siRNA sense strand
agagccaccuguuaauauc

SEQ ID NO: 1163317 - RNA, 19 nt, Homo sapiens
  misc_RNA (1)...(19): siRNA sense strand
gcagcaaggagcgcagaaa

SEQ ID NO: 1163318 - RNA, 19 nt, Homo sapiens
  misc_RNA (1)...(19): siRNA sense strand
ucugggcucuggucauguu

SEQ ID NO: 1163319 - RNA, 19 nt, Homo sapiens
  misc_RNA (1)...(19): siRNA sense strand
cccgagagccaccuguuaa

SEQ ID NO: 1163320 - RNA, 19 nt, Homo sapiens
  misc_RNA (1)...(19): siRNA sense strand
ggauccaagcuaccauuug

SEQ ID NO: 1163321 - RNA, 19 nt, Homo sapiens
  misc_RNA (1)...(19): siRNA sense strand
aaacacgugcuuccugaau

SEQ ID NO: 1163322 - RNA, 19 nt, Homo sapiens
  misc_RNA (1)...(19): siRNA sense strand
gaggggcucugcuagaaga

SEQ ID NO: 1163323 - RNA, 19 nt, Homo sapiens
  misc_RNA (1)...(19): siRNA sense strand
caccgauacuugccaaugg

SEQ ID NO: 1163324 - RNA, 19 nt, Homo sapiens
  misc_RNA (1)...(19): siRNA sense strand
gggauccaagcuaccauuu

SEQ ID NO: 1163325 - RNA, 19 nt, Homo sapiens
  misc_RNA (1)...(19): siRNA sense strand
ccagcaggaugcccaagag

SEQ ID NO: 1163326 - RNA, 19 nt, Homo sapiens
  misc_RNA (1)...(19): siRNA sense strand
cugaugaacggcucaagaa

SEQ ID NO: 1163327 - RNA, 19 nt, Homo sapiens
  misc_RNA (1)...(19): siRNA sense strand
guuucaaccuuuucacuaa

SEQ ID NO: 1163328 - RNA, 19 nt, Homo sapiens
  misc_RNA (1)...(19): siRNA sense strand
uuucuacucugaugacaag

SEQ ID NO: 1163329 - RNA, 19 nt, Homo sapiens
  misc_RNA (1)...(19): siRNA sense strand
cuucugggcucuggucaug

SEQ ID NO: 1163330 - RNA, 19 nt, Homo sapiens
  misc_RNA (1)...(19): siRNA sense strand
uggagcggcuacaccuuga

SEQ ID NO: 1163331 - RNA, 19 nt, Homo sapiens
  misc_RNA (1)...(19): siRNA sense strand
gcuguucuaccaacugaug

SEQ ID NO: 1163332 - RNA, 19 nt, Homo sapiens
  misc_RNA (1)...(19): siRNA sense strand
gggauuguuucaaccuuuu

SEQ ID NO: 1163333 - RNA, 19 nt, Homo sapiens
  misc_RNA (1)...(19): siRNA sense strand
gcgggauuguuucaaccuu

SEQ ID NO: 1163334 - RNA, 19 nt, Homo sapiens
  misc_RNA (1)...(19): siRNA sense strand
cuagaagaaccugaguuaa

SEQ ID NO: 1163335 - RNA, 19 nt, Homo sapiens
  misc_RNA (1)...(19): siRNA sense strand
cccaagaguuccugaagcu

SEQ ID NO: 1163336 - RNA, 19 nt, Homo sapiens
  misc_RNA (1)...(19): siRNA sense strand
ugaugaacggcucaagaaa

SEQ ID NO: 1163337 - RNA, 19 nt, Homo sapiens
  misc_RNA (1)...(19): siRNA sense strand
uggcaugucuacaaugacu

SEQ ID NO: 1163338 - RNA, 19 nt, Homo sapiens
  misc_RNA (1)...(19): siRNA sense strand
gaccgagccaaccuaaugu

SEQ ID NO: 1163339 - RNA, 19 nt, Homo sapiens
  misc_RNA (1)...(19): siRNA sense strand
uccugaagcuccucaugga

SEQ ID NO: 1163340 - RNA, 19 nt, Homo sapiens
  misc_RNA (1)...(19): siRNA sense strand
ggucauguuggccuucgaa

SEQ ID NO: 1163341 - RNA, 19 nt, Homo sapiens
  misc_RNA (1)...(19): siRNA sense strand
ccacuauggccacuacaca

SEQ ID NO: 1163342 - RNA, 19 nt, Homo sapiens
  misc_RNA (1)...(19): siRNA sense strand
aaccugaguuaagugauga

SEQ ID NO: 1163343 - RNA, 19 nt, Homo sapiens
  misc_RNA (1)...(19): siRNA sense strand
ugaagccuuugcagaugug

SEQ ID NO: 1163344 - RNA, 19 nt, Homo sapiens
  misc_RNA (1)...(19): siRNA sense strand
cugaagccuuugcagaugu

SEQ ID NO: 1163345 - RNA, 19 nt, Homo sapiens
  misc_RNA (1)...(19): siRNA sense strand
acugaagccuuugcagaug

SEQ ID NO: 1163346 - RNA, 19 nt, Homo sapiens
  misc_RNA (1)...(19): siRNA sense strand
augaacggcucaagaaacu

SEQ ID NO: 1163347 - RNA, 19 nt, Homo sapiens
  misc_RNA (1)...(19): siRNA sense strand
gcggcuacaccuugaaauc

SEQ ID NO: 1163348 - RNA, 19 nt, Homo sapiens
  misc_RNA (1)...(19): siRNA sense strand
aacacgugcuuccugaaug

SEQ ID NO: 1163349 - RNA, 19 nt, Homo sapiens
  misc_RNA (1)...(19): siRNA sense strand
ggagaaugccccagugugu

SEQ ID NO: 1163350 - RNA, 19 nt, Homo sapiens
  misc_RNA (1)...(19): siRNA sense strand
gugccaggccuguggguau

SEQ ID NO: 1163351 - RNA, 19 nt, Homo sapiens
  misc_RNA (1)...(19): siRNA sense strand
cggcuacaccuugaaauca

SEQ ID NO: 1163352 - RNA, 19 nt, Homo sapiens
  misc_RNA (1)...(19): siRNA sense strand
acacgugcuuccugaaugc

SEQ ID NO: 1163353 - RNA, 19 nt, Homo sapiens
  misc_RNA (1)...(19): siRNA sense strand
ccugagccacccacuuuga

SEQ ID NO: 1163354 - RNA, 19 nt, Homo sapiens
  misc_RNA (1)...(19): siRNA sense strand
guugacaguacaaagauuc

SEQ ID NO: 1163355 - RNA, 19 nt, Homo sapiens
  misc_RNA (1)...(19): siRNA sense strand
ccaccgauacuugccaaug

SEQ ID NO: 1163356 - RNA, 19 nt, Homo sapiens
  misc_RNA (1)...(19): siRNA sense strand
ccagaaauuuccagacaaa

SEQ ID NO: 1163357 - RNA, 19 nt, Homo sapiens
  misc_RNA (1)...(19): siRNA sense strand
gcaaccaaaucggaugaua

SEQ ID NO: 1163358 - RNA, 19 nt, Homo sapiens
  misc_RNA (1)...(19): siRNA sense strand
caagagcugugaaggaaga

SEQ ID NO: 1163359 - RNA, 19 nt, Homo sapiens
  misc_RNA (1)...(19): siRNA sense strand
acaaagagauacugagaau

SEQ ID NO: 1163360 - RNA, 19 nt, Homo sapiens
  misc_RNA (1)...(19): siRNA sense strand
gcacacugcuccucuuucu

SEQ ID NO: 1163361 - RNA, 19 nt, Homo sapiens
  misc_RNA (1)...(19): siRNA sense strand
gaagcaccgucaaggaaga

SEQ ID NO: 1163362 - RNA, 19 nt, Homo sapiens
  misc_RNA (1)...(19): siRNA sense strand
caagcaccauggccaguuu

SEQ ID NO: 1163363 - RNA, 19 nt, Homo sapiens
  misc_RNA (1)...(19): siRNA sense strand
gaugguacgcguugcuaua

SEQ ID NO: 1163364 - RNA, 19 nt, Homo sapiens
  misc_RNA (1)...(19): siRNA sense strand
gcaaugcucagcucauaau

SEQ ID NO: 1163365 - RNA, 19 nt, Homo sapiens
  misc_RNA (1)...(19): siRNA sense strand
ggagggagacggauuucuu

SEQ ID NO: 1163366 - RNA, 19 nt, Homo sapiens
  misc_RNA (1)...(19): siRNA sense strand
uacagaacaugcaguaaug

SEQ ID NO: 1163367 - RNA, 19 nt, Homo sapiens
  misc_RNA (1)...(19): siRNA sense strand
aaaagguccugaucacuua

SEQ ID NO: 1163368 - RNA, 19 nt, Homo sapiens
  misc_RNA (1)...(19): siRNA sense strand
gagggagacggauuucuuu

SEQ ID NO: 1163369 - RNA, 19 nt, Homo sapiens
  misc_RNA (1)...(19): siRNA sense strand
gacaacccauguucacuca

SEQ ID NO: 1163370 - RNA, 19 nt, Homo sapiens
  misc_RNA (1)...(19): siRNA sense strand
ugacaucggcugagugcua

SEQ ID NO: 1163371 - RNA, 19 nt, Homo sapiens
  misc_RNA (1)...(19): siRNA sense strand
cagcagauuucauugucaa

SEQ ID NO: 1163372 - RNA, 19 nt, Homo sapiens
  misc_RNA (1)...(19): siRNA sense strand
gggaagcaccgucaaggaa

SEQ ID NO: 1163373 - RNA, 19 nt, Homo sapiens
  misc_RNA (1)...(19): siRNA sense strand
gaucacuuauaucuggaaa

SEQ ID NO: 1163374 - RNA, 19 nt, Homo sapiens
  misc_RNA (1)...(19): siRNA sense strand
cauauucgccuugucuuaa

SEQ ID NO: 1163375 - RNA, 19 nt, Homo sapiens
  misc_RNA (1)...(19): siRNA sense strand
gaaauuuccagacaaagag

SEQ ID NO: 1163376 - RNA, 19 nt, Homo sapiens
  misc_RNA (1)...(19): siRNA sense strand
ccaaaucggaugauacugu

SEQ ID NO: 1163377 - RNA, 19 nt, Homo sapiens
  misc_RNA (1)...(19): siRNA sense strand
aaagagauacugagaaugg

SEQ ID NO: 1163378 - RNA, 19 nt, Homo sapiens
  misc_RNA (1)...(19): siRNA sense strand
caacccauguucacucaag

SEQ ID NO: 1163379 - RNA, 19 nt, Homo sapiens
  misc_RNA (1)...(19): siRNA sense strand
gauggagggagacggauuu

SEQ ID NO: 1163380 - RNA, 19 nt, Homo sapiens
  misc_RNA (1)...(19): siRNA sense strand
gauaugugcaucagugguu

SEQ ID NO: 1163381 - RNA, 19 nt, Homo sapiens
  misc_RNA (1)...(19): siRNA sense strand
cagaaucuuuggauaugug

SEQ ID NO: 1163382 - RNA, 19 nt, Homo sapiens
  misc_RNA (1)...(19): siRNA sense strand
uacagaaucuuuggauaug

SEQ ID NO: 1163383 - RNA, 19 nt, Homo sapiens
  misc_RNA (1)...(19): siRNA sense strand
gcugagugcuacgaucuga

SEQ ID NO: 1163384 - RNA, 19 nt, Homo sapiens
  misc_RNA (1)...(19): siRNA sense strand
gcuacgaucugaggagcaa

SEQ ID NO: 1163385 - RNA, 19 nt, Homo sapiens
  misc_RNA (1)...(19): siRNA sense strand
gaguggaaaugcauguaca

SEQ ID NO: 1163386 - RNA, 19 nt, Homo sapiens
  misc_RNA (1)...(19): siRNA sense strand
cgauacagaacaugcagua

SEQ ID NO: 1163387 - RNA, 19 nt, Homo sapiens
  misc_RNA (1)...(19): siRNA sense strand
agcaagagcugugaaggaa

SEQ ID NO: 1163388 - RNA, 19 nt, Homo sapiens
  misc_RNA (1)...(19): siRNA sense strand
agacaaagagauacugaga

SEQ ID NO: 1163389 - RNA, 19 nt, Homo sapiens
  misc_RNA (1)...(19): siRNA sense strand
guagacauauucgccuugu

SEQ ID NO: 1163390 - RNA, 19 nt, Homo sapiens
  misc_RNA (1)...(19): siRNA sense strand
gagguuaucagcugacauc

SEQ ID NO: 1163391 - RNA, 19 nt, Homo sapiens
  misc_RNA (1)...(19): siRNA sense strand
gggcuccgcugacaguaca

SEQ ID NO: 1163392 - RNA, 19 nt, Homo sapiens
  misc_RNA (1)...(19): siRNA sense strand
cagauuucauugucaagau

SEQ ID NO: 1163393 - RNA, 19 nt, Homo sapiens
  misc_RNA (1)...(19): siRNA sense strand
acuuauaucuggaaaccaa

SEQ ID NO: 1163394 - RNA, 19 nt, Homo sapiens
  misc_RNA (1)...(19): siRNA sense strand
gacaaagagauacugagaa

SEQ ID NO: 1163395 - RNA, 19 nt, Homo sapiens
  misc_RNA (1)...(19): siRNA sense strand
gaagaguggaaaugcaugu

SEQ ID NO: 1163396 - RNA, 19 nt, Homo sapiens
  misc_RNA (1)...(19): siRNA sense strand
gagacggauuucuuuccuu

SEQ ID NO: 1163397 - RNA, 19 nt, Homo sapiens
  misc_RNA (1)...(19): siRNA sense strand
agucucaacuccacaggaa

SEQ ID NO: 1163398 - RNA, 19 nt, Homo sapiens
  misc_RNA (1)...(19): siRNA sense strand
ggagacggauuucuuuccu

SEQ ID NO: 1163399 - RNA, 19 nt, Homo sapiens
  misc_RNA (1)...(19): siRNA sense strand
acucacagcagauuucauu

SEQ ID NO: 1163400 - RNA, 19 nt, Homo sapiens
  misc_RNA (1)...(19): siRNA sense strand
ggacugcccaccagaagca

SEQ ID NO: 1163401 - RNA, 19 nt, Homo sapiens
  misc_RNA (1)...(19): siRNA sense strand
agaaauuuccagacaaaga

SEQ ID NO: 1163402 - RNA, 19 nt, Homo sapiens
  misc_RNA (1)...(19): siRNA sense strand
gcaccgucaaggaagauaa

SEQ ID NO: 1163403 - RNA, 19 nt, Homo sapiens
  misc_RNA (1)...(19): siRNA sense strand
gcagauuucauugucaaga

SEQ ID NO: 1163404 - RNA, 19 nt, Homo sapiens
  misc_RNA (1)...(19): siRNA sense strand
cacagcagauuucauuguc

SEQ ID NO: 1163405 - RNA, 19 nt, Homo sapiens
  misc_RNA (1)...(19): siRNA sense strand
guacaguccaguucaucuu

SEQ ID NO: 1163406 - RNA, 19 nt, Homo sapiens
  misc_RNA (1)...(19): siRNA sense strand
ggaccacucacagcagauu

SEQ ID NO: 1163407 - RNA, 19 nt, Homo sapiens
  misc_RNA (1)...(19): siRNA sense strand
gagugcaacuuggauccuu

SEQ ID NO: 1163408 - RNA, 19 nt, Homo sapiens
  misc_RNA (1)...(19): siRNA sense strand
acauauucgccuugucuua

SEQ ID NO: 1163409 - RNA, 19 nt, Homo sapiens
  misc_RNA (1)...(19): siRNA sense strand
ucacagcagauuucauugu

SEQ ID NO: 1163410 - RNA, 19 nt, Homo sapiens
  misc_RNA (1)...(19): siRNA sense strand
auacagaacaugcaguaau

SEQ ID NO: 1163411 - RNA, 19 nt, Homo sapiens
  misc_RNA (1)...(19): siRNA sense strand
auauucgccuugucuuaaa

SEQ ID NO: 1163412 - RNA, 19 nt, Homo sapiens
  misc_RNA (1)...(19): siRNA sense strand
ccagacaaagagauacuga

SEQ ID NO: 1163413 - RNA, 19 nt, Homo sapiens
  misc_RNA (1)...(19): siRNA sense strand
caacuccacaggaacuuuc

SEQ ID NO: 1163414 - RNA, 19 nt, Homo sapiens
  misc_RNA (1)...(19): siRNA sense strand
ggcuuccugugucuaauga

SEQ ID NO: 1163415 - RNA, 19 nt, Homo sapiens
  misc_RNA (1)...(19): siRNA sense strand
gagcugugaaggaagaaau

SEQ ID NO: 1163416 - RNA, 19 nt, Homo sapiens
  misc_RNA (1)...(19): siRNA sense strand
caaccaaaucggaugauac

SEQ ID NO: 1163417 - RNA, 19 nt, Homo sapiens
  misc_RNA (1)...(19): siRNA sense strand
ugaauggcuuccugugucu

SEQ ID NO: 1163418 - RNA, 19 nt, Homo sapiens
  misc_RNA (1)...(19): siRNA sense strand
gauacagaacaugcaguaa

SEQ ID NO: 1163419 - RNA, 19 nt, Homo sapiens
  misc_RNA (1)...(19): siRNA sense strand
gagaacaucaaacccaaac

SEQ ID NO: 1163420 - RNA, 19 nt, Homo sapiens
  misc_RNA (1)...(19): siRNA sense strand
caguucaucuucuaucaac

SEQ ID NO: 1163421 - RNA, 19 nt, Homo sapiens
  misc_RNA (1)...(19): siRNA sense strand
ugacaguacaguccaguuc

SEQ ID NO: 1163422 - RNA, 19 nt, Homo sapiens
  misc_RNA (1)...(19): siRNA sense strand
uuguugaacuagcaccuaa

SEQ ID NO: 1163423 - RNA, 19 nt, Homo sapiens
  misc_RNA (1)...(19): siRNA sense strand
guggaagaguggaaaugca

SEQ ID NO: 1163424 - RNA, 19 nt, Homo sapiens
  misc_RNA (1)...(19): siRNA sense strand
cgucaaggaagauaacugu

SEQ ID NO: 1163425 - RNA, 19 nt, Homo sapiens
  misc_RNA (1)...(19): siRNA sense strand
gguuuaugccaaauuguug

SEQ ID NO: 1163426 - RNA, 19 nt, Homo sapiens
  misc_RNA (1)...(19): siRNA sense strand
guugcuauacagaaucuuu

SEQ ID NO: 1163427 - RNA, 19 nt, Homo sapiens
  misc_RNA (1)...(19): siRNA sense strand
caagugccaagccaaagga

SEQ ID NO: 1163428 - RNA, 19 nt, Homo sapiens
  misc_RNA (1)...(19): siRNA sense strand
gacaguacaguccaguuca

SEQ ID NO: 1163429 - RNA, 19 nt, Homo sapiens
  misc_RNA (1)...(19): siRNA sense strand
uuccagaaauuuccagaca

SEQ ID NO: 1163430 - RNA, 19 nt, Homo sapiens
  misc_RNA (1)...(19): siRNA sense strand
gacuaaaggugaaaacagu

SEQ ID NO: 1163431 - RNA, 19 nt, Homo sapiens
  misc_RNA (1)...(19): siRNA sense strand
uaaaagguccugaucacuu

SEQ ID NO: 1163432 - RNA, 19 nt, Homo sapiens
  misc_RNA (1)...(19): siRNA sense strand
ccagcucuccgcaaccaaa

SEQ ID NO: 1163433 - RNA, 19 nt, Homo sapiens
  misc_RNA (1)...(19): siRNA sense strand
ucacuuauaucuggaaacc

SEQ ID NO: 1163434 - RNA, 19 nt, Homo sapiens
  misc_RNA (1)...(19): siRNA sense strand
guccugaucacuuauaucu

SEQ ID NO: 1163435 - RNA, 19 nt, Homo sapiens
  misc_RNA (1)...(19): siRNA sense strand
agugguuuaugccaaauug

SEQ ID NO: 1163436 - RNA, 19 nt, Homo sapiens
  misc_RNA (1)...(19): siRNA sense strand
caguccaguucaucuucua

SEQ ID NO: 1163437 - RNA, 19 nt, Homo sapiens
  misc_RNA (1)...(19): siRNA sense strand
gguccgagggcaguauaaa

SEQ ID NO: 1163438 - RNA, 19 nt, Homo sapiens
  misc_RNA (1)...(19): siRNA sense strand
gguacgcguugcuauacag

SEQ ID NO: 1163439 - RNA, 19 nt, Homo sapiens
  misc_RNA (1)...(19): siRNA sense strand
ggaugauacugugguugca

SEQ ID NO: 1163440 - RNA, 19 nt, Homo sapiens
  misc_RNA (1)...(19): siRNA sense strand
acgcguugcuauacagaau

SEQ ID NO: 1163441 - RNA, 19 nt, Homo sapiens
  misc_RNA (1)...(19): siRNA sense strand
uccagaaauuuccagacaa

SEQ ID NO: 1163442 - RNA, 19 nt, Homo sapiens
  misc_RNA (1)...(19): siRNA sense strand
gugccaagccaaaggaaca

SEQ ID NO: 1163443 - RNA, 19 nt, Homo sapiens
  misc_RNA (1)...(19): siRNA sense strand
gcguugcuauacagaaucu

SEQ ID NO: 1163444 - RNA, 19 nt, Homo sapiens
  misc_RNA (1)...(19): siRNA sense strand
gaccacucacagcagauuu

SEQ ID NO: 1163445 - RNA, 19 nt, Homo sapiens
  misc_RNA (1)...(19): siRNA sense strand
acagcagauuucauuguca

SEQ ID NO: 1163446 - RNA, 19 nt, Homo sapiens
  misc_RNA (1)...(19): siRNA sense strand
acagaaucuuuggauaugu

SEQ ID NO: 1163447 - RNA, 19 nt, Homo sapiens
  misc_RNA (1)...(19): siRNA sense strand
uccaguucaucuucuauca

SEQ ID NO: 1163448 - RNA, 19 nt, Homo sapiens
  misc_RNA (1)...(19): siRNA sense strand
acaguacaguccaguucau

SEQ ID NO: 1163449 - RNA, 19 nt, Homo sapiens
  misc_RNA (1)...(19): siRNA sense strand
gguugcaauucccuaugga

SEQ ID NO: 1163450 - RNA, 19 nt, Homo sapiens
  misc_RNA (1)...(19): siRNA sense strand
ccagaaauuuccagacaaa

SEQ ID NO: 1163451 - RNA, 19 nt, Homo sapiens
  misc_RNA (1)...(19): siRNA sense strand
gcaaccaaaucggaugaua

SEQ ID NO: 1163452 - RNA, 19 nt, Homo sapiens
  misc_RNA (1)...(19): siRNA sense strand
caagagcugugaaggaaga

SEQ ID NO: 1163453 - RNA, 19 nt, Homo sapiens
  misc_RNA (1)...(19): siRNA sense strand
acaaagagauacugagaau

SEQ ID NO: 1163454 - RNA, 19 nt, Homo sapiens
  misc_RNA (1)...(19): siRNA sense strand
gcacacugcuccucuuucu

SEQ ID NO: 1163455 - RNA, 19 nt, Homo sapiens
  misc_RNA (1)...(19): siRNA sense strand
gaagcaccgucaaggaaga

SEQ ID NO: 1163456 - RNA, 19 nt, Homo sapiens
  misc_RNA (1)...(19): siRNA sense strand
caagcaccauggccaguuu

SEQ ID NO: 1163457 - RNA, 19 nt, Homo sapiens
  misc_RNA (1)...(19): siRNA sense strand
gaugguacgcguugcuaua

SEQ ID NO: 1163458 - RNA, 19 nt, Homo sapiens
  misc_RNA (1)...(19): siRNA sense strand
gcaaugcucagcucauaau

SEQ ID NO: 1163459 - RNA, 19 nt, Homo sapiens
  misc_RNA (1)...(19): siRNA sense strand
ggagggagacggauuucuu

SEQ ID NO: 1163460 - RNA, 19 nt, Homo sapiens
  misc_RNA (1)...(19): siRNA sense strand
uacagaacaugcaguaaug

SEQ ID NO: 1163461 - RNA, 19 nt, Homo sapiens
  misc_RNA (1)...(19): siRNA sense strand
aaaagguccugaucacuua

SEQ ID NO: 1163462 - RNA, 19 nt, Homo sapiens
  misc_RNA (1)...(19): siRNA sense strand
gagggagacggauuucuuu

SEQ ID NO: 1163463 - RNA, 19 nt, Homo sapiens
  misc_RNA (1)...(19): siRNA sense strand
gacaacccauguucacuca

SEQ ID NO: 1163464 - RNA, 19 nt, Homo sapiens
  misc_RNA (1)...(19): siRNA sense strand
ugacaucggcugagugcua

SEQ ID NO: 1163465 - RNA, 19 nt, Homo sapiens
  misc_RNA (1)...(19): siRNA sense strand
cagcagauuucauugucaa

SEQ ID NO: 1163466 - RNA, 19 nt, Homo sapiens
  misc_RNA (1)...(19): siRNA sense strand
gggaagcaccgucaaggaa

SEQ ID NO: 1163467 - RNA, 19 nt, Homo sapiens
  misc_RNA (1)...(19): siRNA sense strand
gaucacuuauaucuggaaa

SEQ ID NO: 1163468 - RNA, 19 nt, Homo sapiens
  misc_RNA (1)...(19): siRNA sense strand
cauauucgccuugucuuaa

SEQ ID NO: 1163469 - RNA, 19 nt, Homo sapiens
  misc_RNA (1)...(19): siRNA sense strand
gaaauuuccagacaaagag

SEQ ID NO: 1163470 - RNA, 19 nt, Homo sapiens
  misc_RNA (1)...(19): siRNA sense strand
ccaaaucggaugauacugu

SEQ ID NO: 1163471 - RNA, 19 nt, Homo sapiens
  misc_RNA (1)...(19): siRNA sense strand
aaagagauacugagaaugg

SEQ ID NO: 1163472 - RNA, 19 nt, Homo sapiens
  misc_RNA (1)...(19): siRNA sense strand
caacccauguucacucaag

SEQ ID NO: 1163473 - RNA, 19 nt, Homo sapiens
  misc_RNA (1)...(19): siRNA sense strand
gauggagggagacggauuu

SEQ ID NO: 1163474 - RNA, 19 nt, Homo sapiens
  misc_RNA (1)...(19): siRNA sense strand
gauaugugcaucagugguu

SEQ ID NO: 1163475 - RNA, 19 nt, Homo sapiens
  misc_RNA (1)...(19): siRNA sense strand
cagaaucuuuggauaugug

SEQ ID NO: 1163476 - RNA, 19 nt, Homo sapiens
  misc_RNA (1)...(19): siRNA sense strand
uacagaaucuuuggauaug

SEQ ID NO: 1163477 - RNA, 19 nt, Homo sapiens
  misc_RNA (1)...(19): siRNA sense strand
gcugagugcuacgaucuga

SEQ ID NO: 1163478 - RNA, 19 nt, Homo sapiens
  misc_RNA (1)...(19): siRNA sense strand
gcuacgaucugaggagcaa

SEQ ID NO: 1163479 - RNA, 19 nt, Homo sapiens
  misc_RNA (1)...(19): siRNA sense strand
gaguggaaaugcauguaca

SEQ ID NO: 1163480 - RNA, 19 nt, Homo sapiens
  misc_RNA (1)...(19): siRNA sense strand
cgauacagaacaugcagua

SEQ ID NO: 1163481 - RNA, 19 nt, Homo sapiens
  misc_RNA (1)...(19): siRNA sense strand
agcaagagcugugaaggaa

SEQ ID NO: 1163482 - RNA, 19 nt, Homo sapiens
  misc_RNA (1)...(19): siRNA sense strand
agacaaagagauacugaga

SEQ ID NO: 1163483 - RNA, 19 nt, Homo sapiens
  misc_RNA (1)...(19): siRNA sense strand
guagacauauucgccuugu

SEQ ID NO: 1163484 - RNA, 19 nt, Homo sapiens
  misc_RNA (1)...(19): siRNA sense strand
gagguuaucagcugacauc

SEQ ID NO: 1163485 - RNA, 19 nt, Homo sapiens
  misc_RNA (1)...(19): siRNA sense strand
gggcuccgcugacaguaca

SEQ ID NO: 1163486 - RNA, 19 nt, Homo sapiens
  misc_RNA (1)...(19): siRNA sense strand
cagauuucauugucaagau

SEQ ID NO: 1163487 - RNA, 19 nt, Homo sapiens
  misc_RNA (1)...(19): siRNA sense strand
acuuauaucuggaaaccaa

SEQ ID NO: 1163488 - RNA, 19 nt, Homo sapiens
  misc_RNA (1)...(19): siRNA sense strand
gacaaagagauacugagaa

SEQ ID NO: 1163489 - RNA, 19 nt, Homo sapiens
  misc_RNA (1)...(19): siRNA sense strand
gaagaguggaaaugcaugu

SEQ ID NO: 1163490 - RNA, 19 nt, Homo sapiens
  misc_RNA (1)...(19): siRNA sense strand
gagacggauuucuuuccuu

SEQ ID NO: 1163491 - RNA, 19 nt, Homo sapiens
  misc_RNA (1)...(19): siRNA sense strand
agucucaacuccacaggaa

SEQ ID NO: 1163492 - RNA, 19 nt, Homo sapiens
  misc_RNA (1)...(19): siRNA sense strand
ggagacggauuucuuuccu

SEQ ID NO: 1163493 - RNA, 19 nt, Homo sapiens
  misc_RNA (1)...(19): siRNA sense strand
acucacagcagauuucauu

SEQ ID NO: 1163494 - RNA, 19 nt, Homo sapiens
  misc_RNA (1)...(19): siRNA sense strand
ggacugcccaccagaagca

SEQ ID NO: 1163495 - RNA, 19 nt, Homo sapiens
  misc_RNA (1)...(19): siRNA sense strand
agaaauuuccagacaaaga

SEQ ID NO: 1163496 - RNA, 19 nt, Homo sapiens
  misc_RNA (1)...(19): siRNA sense strand
gcaccgucaaggaagauaa

SEQ ID NO: 1163497 - RNA, 19 nt, Homo sapiens
  misc_RNA (1)...(19): siRNA sense strand
gcagauuucauugucaaga

SEQ ID NO: 1163498 - RNA, 19 nt, Homo sapiens
  misc_RNA (1)...(19): siRNA sense strand
cacagcagauuucauuguc

SEQ ID NO: 1163499 - RNA, 19 nt, Homo sapiens
  misc_RNA (1)...(19): siRNA sense strand
guacaguccaguucaucuu

SEQ ID NO: 1163500 - RNA, 19 nt, Homo sapiens
  misc_RNA (1)...(19): siRNA sense strand
ggaccacucacagcagauu

SEQ ID NO: 1163501 - RNA, 19 nt, Homo sapiens
  misc_RNA (1)...(19): siRNA sense strand
gagugcaacuuggauccuu

SEQ ID NO: 1163502 - RNA, 19 nt, Homo sapiens
  misc_RNA (1)...(19): siRNA sense strand
acauauucgccuugucuua

SEQ ID NO: 1163503 - RNA, 19 nt, Homo sapiens
  misc_RNA (1)...(19): siRNA sense strand
ucacagcagauuucauugu

SEQ ID NO: 1163504 - RNA, 19 nt, Homo sapiens
  misc_RNA (1)...(19): siRNA sense strand
auacagaacaugcaguaau

SEQ ID NO: 1163505 - RNA, 19 nt, Homo sapiens
  misc_RNA (1)...(19): siRNA sense strand
auauucgccuugucuuaaa

SEQ ID NO: 1163506 - RNA, 19 nt, Homo sapiens
  misc_RNA (1)...(19): siRNA sense strand
ccagacaaagagauacuga

SEQ ID NO: 1163507 - RNA, 19 nt, Homo sapiens
  misc_RNA (1)...(19): siRNA sense strand
caacuccacaggaacuuuc

SEQ ID NO: 1163508 - RNA, 19 nt, Homo sapiens
  misc_RNA (1)...(19): siRNA sense strand
ggcuuccugugucuaauga

SEQ ID NO: 1163509 - RNA, 19 nt, Homo sapiens
  misc_RNA (1)...(19): siRNA sense strand
gagcugugaaggaagaaau

SEQ ID NO: 1163510 - RNA, 19 nt, Homo sapiens
  misc_RNA (1)...(19): siRNA sense strand
caaccaaaucggaugauac

SEQ ID NO: 1163511 - RNA, 19 nt, Homo sapiens
  misc_RNA (1)...(19): siRNA sense strand
ugaauggcuuccugugucu

SEQ ID NO: 1163512 - RNA, 19 nt, Homo sapiens
  misc_RNA (1)...(19): siRNA sense strand
gauacagaacaugcaguaa

SEQ ID NO: 1163513 - RNA, 19 nt, Homo sapiens
  misc_RNA (1)...(19): siRNA sense strand
gagaacaucaaacccaaac

SEQ ID NO: 1163514 - RNA, 19 nt, Homo sapiens
  misc_RNA (1)...(19): siRNA sense strand
caguucaucuucuaucaac

SEQ ID NO: 1163515 - RNA, 19 nt, Homo sapiens
  misc_RNA (1)...(19): siRNA sense strand
ugacaguacaguccaguuc

SEQ ID NO: 1163516 - RNA, 19 nt, Homo sapiens
  misc_RNA (1)...(19): siRNA sense strand
uuguugaacuagcaccuaa

SEQ ID NO: 1163517 - RNA, 19 nt, Homo sapiens
  misc_RNA (1)...(19): siRNA sense strand
guggaagaguggaaaugca

SEQ ID NO: 1163518 - RNA, 19 nt, Homo sapiens
  misc_RNA (1)...(19): siRNA sense strand
cgucaaggaagauaacugu

SEQ ID NO: 1163519 - RNA, 19 nt, Homo sapiens
  misc_RNA (1)...(19): siRNA sense strand
gguuuaugccaaauuguug

SEQ ID NO: 1163520 - RNA, 19 nt, Homo sapiens
  misc_RNA (1)...(19): siRNA sense strand
guugcuauacagaaucuuu

SEQ ID NO: 1163521 - RNA, 19 nt, Homo sapiens
  misc_RNA (1)...(19): siRNA sense strand
caagugccaagccaaagga

SEQ ID NO: 1163522 - RNA, 19 nt, Homo sapiens
  misc_RNA (1)...(19): siRNA sense strand
gacaguacaguccaguuca

SEQ ID NO: 1163523 - RNA, 19 nt, Homo sapiens
  misc_RNA (1)...(19): siRNA sense strand
uuccagaaauuuccagaca

SEQ ID NO: 1163524 - RNA, 19 nt, Homo sapiens
  misc_RNA (1)...(19): siRNA sense strand
gacuaaaggugaaaacagu

SEQ ID NO: 1163525 - RNA, 19 nt, Homo sapiens
  misc_RNA (1)...(19): siRNA sense strand
uaaaagguccugaucacuu

SEQ ID NO: 1163526 - RNA, 19 nt, Homo sapiens
  misc_RNA (1)...(19): siRNA sense strand
ccagcucuccgcaaccaaa

SEQ ID NO: 1163527 - RNA, 19 nt, Homo sapiens
  misc_RNA (1)...(19): siRNA sense strand
ucacuuauaucuggaaacc

SEQ ID NO: 1163528 - RNA, 19 nt, Homo sapiens
  misc_RNA (1)...(19): siRNA sense strand
guccugaucacuuauaucu

SEQ ID NO: 1163529 - RNA, 19 nt, Homo sapiens
  misc_RNA (1)...(19): siRNA sense strand
agugguuuaugccaaauug

SEQ ID NO: 1163530 - RNA, 19 nt, Homo sapiens
  misc_RNA (1)...(19): siRNA sense strand
caguccaguucaucuucua

SEQ ID NO: 1163531 - RNA, 19 nt, Homo sapiens
  misc_RNA (1)...(19): siRNA sense strand
gguccgagggcaguauaaa

SEQ ID NO: 1163532 - RNA, 19 nt, Homo sapiens
  misc_RNA (1)...(19): siRNA sense strand
gguacgcguugcuauacag

SEQ ID NO: 1163533 - RNA, 19 nt, Homo sapiens
  misc_RNA (1)...(19): siRNA sense strand
ggaugauacugugguugca

SEQ ID NO: 1163534 - RNA, 19 nt, Homo sapiens
  misc_RNA (1)...(19): siRNA sense strand
acgcguugcuauacagaau

SEQ ID NO: 1163535 - RNA, 19 nt, Homo sapiens
  misc_RNA (1)...(19): siRNA sense strand
uccagaaauuuccagacaa

SEQ ID NO: 1163536 - RNA, 19 nt, Homo sapiens
  misc_RNA (1)...(19): siRNA sense strand
gugccaagccaaaggaaca

SEQ ID NO: 1163537 - RNA, 19 nt, Homo sapiens
  misc_RNA (1)...(19): siRNA sense strand
gcguugcuauacagaaucu

SEQ ID NO: 1163538 - RNA, 19 nt, Homo sapiens
  misc_RNA (1)...(19): siRNA sense strand
gaccacucacagcagauuu

SEQ ID NO: 1163539 - RNA, 19 nt, Homo sapiens
  misc_RNA (1)...(19): siRNA sense strand
acagcagauuucauuguca

SEQ ID NO: 1163540 - RNA, 19 nt, Homo sapiens
  misc_RNA (1)...(19): siRNA sense strand
acagaaucuuuggauaugu

SEQ ID NO: 1163541 - RNA, 19 nt, Homo sapiens
  misc_RNA (1)...(19): siRNA sense strand
uccaguucaucuucuauca

SEQ ID NO: 1163542 - RNA, 19 nt, Homo sapiens
  misc_RNA (1)...(19): siRNA sense strand
acaguacaguccaguucau

SEQ ID NO: 1163543 - RNA, 19 nt, Homo sapiens
  misc_RNA (1)...(19): siRNA sense strand
gguugcaauucccuaugga

SEQ ID NO: 1163544 - RNA, 19 nt, Homo sapiens
  misc_RNA (1)...(19): siRNA sense strand
ccagaaauuuccagacaaa

SEQ ID NO: 1163545 - RNA, 19 nt, Homo sapiens
  misc_RNA (1)...(19): siRNA sense strand
gcaaccaaaucggaugaua

SEQ ID NO: 1163546 - RNA, 19 nt, Homo sapiens
  misc_RNA (1)...(19): siRNA sense strand
caagagcugugaaggaaga

SEQ ID NO: 1163547 - RNA, 19 nt, Homo sapiens
  misc_RNA (1)...(19): siRNA sense strand
acaaagagauacugagaau

SEQ ID NO: 1163548 - RNA, 19 nt, Homo sapiens
  misc_RNA (1)...(19): siRNA sense strand
gcacacugcuccucuuucu

SEQ ID NO: 1163549 - RNA, 19 nt, Homo sapiens
  misc_RNA (1)...(19): siRNA sense strand
gaagcaccgucaaggaaga

SEQ ID NO: 1163550 - RNA, 19 nt, Homo sapiens
  misc_RNA (1)...(19): siRNA sense strand
caagcaccauggccaguuu

SEQ ID NO: 1163551 - RNA, 19 nt, Homo sapiens
  misc_RNA (1)...(19): siRNA sense strand
gaugguacgcguugcuaua

SEQ ID NO: 1163552 - RNA, 19 nt, Homo sapiens
  misc_RNA (1)...(19): siRNA sense strand
gcaaugcucagcucauaau

SEQ ID NO: 1163553 - RNA, 19 nt, Homo sapiens
  misc_RNA (1)...(19): siRNA sense strand
ggagggagacggauuucuu

SEQ ID NO: 1163554 - RNA, 19 nt, Homo sapiens
  misc_RNA (1)...(19): siRNA sense strand
uacagaacaugcaguaaug

SEQ ID NO: 1163555 - RNA, 19 nt, Homo sapiens
  misc_RNA (1)...(19): siRNA sense strand
aaaagguccugaucacuua

SEQ ID NO: 1163556 - RNA, 19 nt, Homo sapiens
  misc_RNA (1)...(19): siRNA sense strand
gagggagacggauuucuuu

SEQ ID NO: 1163557 - RNA, 19 nt, Homo sapiens
  misc_RNA (1)...(19): siRNA sense strand
gacaacccauguucacuca

SEQ ID NO: 1163558 - RNA, 19 nt, Homo sapiens
  misc_RNA (1)...(19): siRNA sense strand
ugacaucggcugagugcua

SEQ ID NO: 1163559 - RNA, 19 nt, Homo sapiens
  misc_RNA (1)...(19): siRNA sense strand
cagcagauuucauugucaa

SEQ ID NO: 1163560 - RNA, 19 nt, Homo sapiens
  misc_RNA (1)...(19): siRNA sense strand
gggaagcaccgucaaggaa

SEQ ID NO: 1163561 - RNA, 19 nt, Homo sapiens
  misc_RNA (1)...(19): siRNA sense strand
gaucacuuauaucuggaaa

SEQ ID NO: 1163562 - RNA, 19 nt, Homo sapiens
  misc_RNA (1)...(19): siRNA sense strand
cauauucgccuugucuuaa

SEQ ID NO: 1163563 - RNA, 19 nt, Homo sapiens
  misc_RNA (1)...(19): siRNA sense strand
gaaauuuccagacaaagag

SEQ ID NO: 1163564 - RNA, 19 nt, Homo sapiens
  misc_RNA (1)...(19): siRNA sense strand
ccaaaucggaugauacugu

SEQ ID NO: 1163565 - RNA, 19 nt, Homo sapiens
  misc_RNA (1)...(19): siRNA sense strand
aaagagauacugagaaugg

SEQ ID NO: 1163566 - RNA, 19 nt, Homo sapiens
  misc_RNA (1)...(19): siRNA sense strand
caacccauguucacucaag

SEQ ID NO: 1163567 - RNA, 19 nt, Homo sapiens
  misc_RNA (1)...(19): siRNA sense strand
gauggagggagacggauuu

SEQ ID NO: 1163568 - RNA, 19 nt, Homo sapiens
  misc_RNA (1)...(19): siRNA sense strand
gauaugugcaucagugguu

SEQ ID NO: 1163569 - RNA, 19 nt, Homo sapiens
  misc_RNA (1)...(19): siRNA sense strand
cagaaucuuuggauaugug

SEQ ID NO: 1163570 - RNA, 19 nt, Homo sapiens
  misc_RNA (1)...(19): siRNA sense strand
uacagaaucuuuggauaug

SEQ ID NO: 1163571 - RNA, 19 nt, Homo sapiens
  misc_RNA (1)...(19): siRNA sense strand
gcugagugcuacgaucuga

SEQ ID NO: 1163572 - RNA, 19 nt, Homo sapiens
  misc_RNA (1)...(19): siRNA sense strand
gcuacgaucugaggagcaa

SEQ ID NO: 1163573 - RNA, 19 nt, Homo sapiens
  misc_RNA (1)...(19): siRNA sense strand
gaguggaaaugcauguaca

SEQ ID NO: 1163574 - RNA, 19 nt, Homo sapiens
  misc_RNA (1)...(19): siRNA sense strand
cgauacagaacaugcagua

SEQ ID NO: 1163575 - RNA, 19 nt, Homo sapiens
  misc_RNA (1)...(19): siRNA sense strand
agcaagagcugugaaggaa

SEQ ID NO: 1163576 - RNA, 19 nt, Homo sapiens
  misc_RNA (1)...(19): siRNA sense strand
agacaaagagauacugaga

SEQ ID NO: 1163577 - RNA, 19 nt, Homo sapiens
  misc_RNA (1)...(19): siRNA sense strand
guagacauauucgccuugu

SEQ ID NO: 1163578 - RNA, 19 nt, Homo sapiens
  misc_RNA (1)...(19): siRNA sense strand
gagguuaucagcugacauc

SEQ ID NO: 1163579 - RNA, 19 nt, Homo sapiens
  misc_RNA (1)...(19): siRNA sense strand
gggcuccgcugacaguaca

SEQ ID NO: 1163580 - RNA, 19 nt, Homo sapiens
  misc_RNA (1)...(19): siRNA sense strand
cagauuucauugucaagau

SEQ ID NO: 1163581 - RNA, 19 nt, Homo sapiens
  misc_RNA (1)...(19): siRNA sense strand
acuuauaucuggaaaccaa

SEQ ID NO: 1163582 - RNA, 19 nt, Homo sapiens
  misc_RNA (1)...(19): siRNA sense strand
gacaaagagauacugagaa

SEQ ID NO: 1163583 - RNA, 19 nt, Homo sapiens
  misc_RNA (1)...(19): siRNA sense strand
gaagaguggaaaugcaugu

SEQ ID NO: 1163584 - RNA, 19 nt, Homo sapiens
  misc_RNA (1)...(19): siRNA sense strand
gagacggauuucuuuccuu

SEQ ID NO: 1163585 - RNA, 19 nt, Homo sapiens
  misc_RNA (1)...(19): siRNA sense strand
agucucaacuccacaggaa

SEQ ID NO: 1163586 - RNA, 19 nt, Homo sapiens
  misc_RNA (1)...(19): siRNA sense strand
ggagacggauuucuuuccu

SEQ ID NO: 1163587 - RNA, 19 nt, Homo sapiens
  misc_RNA (1)...(19): siRNA sense strand
acucacagcagauuucauu

SEQ ID NO: 1163588 - RNA, 19 nt, Homo sapiens
  misc_RNA (1)...(19): siRNA sense strand
ggacugcccaccagaagca

SEQ ID NO: 1163589 - RNA, 19 nt, Homo sapiens
  misc_RNA (1)...(19): siRNA sense strand
agaaauuuccagacaaaga

SEQ ID NO: 1163590 - RNA, 19 nt, Homo sapiens
  misc_RNA (1)...(19): siRNA sense strand
gcaccgucaaggaagauaa

SEQ ID NO: 1163591 - RNA, 19 nt, Homo sapiens
  misc_RNA (1)...(19): siRNA sense strand
gcagauuucauugucaaga

SEQ ID NO: 1163592 - RNA, 19 nt, Homo sapiens
  misc_RNA (1)...(19): siRNA sense strand
cacagcagauuucauuguc

SEQ ID NO: 1163593 - RNA, 19 nt, Homo sapiens
  misc_RNA (1)...(19): siRNA sense strand
guacaguccaguucaucuu

SEQ ID NO: 1163594 - RNA, 19 nt, Homo sapiens
  misc_RNA (1)...(19): siRNA sense strand
ggaccacucacagcagauu

SEQ ID NO: 1163595 - RNA, 19 nt, Homo sapiens
  misc_RNA (1)...(19): siRNA sense strand
gagugcaacuuggauccuu

SEQ ID NO: 1163596 - RNA, 19 nt, Homo sapiens
  misc_RNA (1)...(19): siRNA sense strand
acauauucgccuugucuua

SEQ ID NO: 1163597 - RNA, 19 nt, Homo sapiens
  misc_RNA (1)...(19): siRNA sense strand
ucacagcagauuucauugu

SEQ ID NO: 1163598 - RNA, 19 nt, Homo sapiens
  misc_RNA (1)...(19): siRNA sense strand
auacagaacaugcaguaau

SEQ ID NO: 1163599 - RNA, 19 nt, Homo sapiens
  misc_RNA (1)...(19): siRNA sense strand
auauucgccuugucuuaaa

SEQ ID NO: 1163600 - RNA, 19 nt, Homo sapiens
  misc_RNA (1)...(19): siRNA sense strand
ccagacaaagagauacuga

SEQ ID NO: 1163601 - RNA, 19 nt, Homo sapiens
  misc_RNA (1)...(19): siRNA sense strand
caacuccacaggaacuuuc

SEQ ID NO: 1163602 - RNA, 19 nt, Homo sapiens
  misc_RNA (1)...(19): siRNA sense strand
ggcuuccugugucuaauga

SEQ ID NO: 1163603 - RNA, 19 nt, Homo sapiens
  misc_RNA (1)...(19): siRNA sense strand
gagcugugaaggaagaaau

SEQ ID NO: 1163604 - RNA, 19 nt, Homo sapiens
  misc_RNA (1)...(19): siRNA sense strand
caaccaaaucggaugauac

SEQ ID NO: 1163605 - RNA, 19 nt, Homo sapiens
  misc_RNA (1)...(19): siRNA sense strand
ugaauggcuuccugugucu

SEQ ID NO: 1163606 - RNA, 19 nt, Homo sapiens
  misc_RNA (1)...(19): siRNA sense strand
gauacagaacaugcaguaa

SEQ ID NO: 1163607 - RNA, 19 nt, Homo sapiens
  misc_RNA (1)...(19): siRNA sense strand
gagaacaucaaacccaaac

SEQ ID NO: 1163608 - RNA, 19 nt, Homo sapiens
  misc_RNA (1)...(19): siRNA sense strand
caguucaucuucuaucaac

SEQ ID NO: 1163609 - RNA, 19 nt, Homo sapiens
  misc_RNA (1)...(19): siRNA sense strand
ugacaguacaguccaguuc

SEQ ID NO: 1163610 - RNA, 19 nt, Homo sapiens
  misc_RNA (1)...(19): siRNA sense strand
uuguugaacuagcaccuaa

SEQ ID NO: 1163611 - RNA, 19 nt, Homo sapiens
  misc_RNA (1)...(19): siRNA sense strand
guggaagaguggaaaugca

SEQ ID NO: 1163612 - RNA, 19 nt, Homo sapiens
  misc_RNA (1)...(19): siRNA sense strand
cgucaaggaagauaacugu

SEQ ID NO: 1163613 - RNA, 19 nt, Homo sapiens
  misc_RNA (1)...(19): siRNA sense strand
gguuuaugccaaauuguug

SEQ ID NO: 1163614 - RNA, 19 nt, Homo sapiens
  misc_RNA (1)...(19): siRNA sense strand
guugcuauacagaaucuuu

SEQ ID NO: 1163615 - RNA, 19 nt, Homo sapiens
  misc_RNA (1)...(19): siRNA sense strand
caagugccaagccaaagga

SEQ ID NO: 1163616 - RNA, 19 nt, Homo sapiens
  misc_RNA (1)...(19): siRNA sense strand
gacaguacaguccaguuca

SEQ ID NO: 1163617 - RNA, 19 nt, Homo sapiens
  misc_RNA (1)...(19): siRNA sense strand
uuccagaaauuuccagaca

SEQ ID NO: 1163618 - RNA, 19 nt, Homo sapiens
  misc_RNA (1)...(19): siRNA sense strand
gacuaaaggugaaaacagu

SEQ ID NO: 1163619 - RNA, 19 nt, Homo sapiens
  misc_RNA (1)...(19): siRNA sense strand
uaaaagguccugaucacuu

SEQ ID NO: 1163620 - RNA, 19 nt, Homo sapiens
  misc_RNA (1)...(19): siRNA sense strand
ccagcucuccgcaaccaaa

SEQ ID NO: 1163621 - RNA, 19 nt, Homo sapiens
  misc_RNA (1)...(19): siRNA sense strand
ucacuuauaucuggaaacc

SEQ ID NO: 1163622 - RNA, 19 nt, Homo sapiens
  misc_RNA (1)...(19): siRNA sense strand
guccugaucacuuauaucu

SEQ ID NO: 1163623 - RNA, 19 nt, Homo sapiens
  misc_RNA (1)...(19): siRNA sense strand
agugguuuaugccaaauug

SEQ ID NO: 1163624 - RNA, 19 nt, Homo sapiens
  misc_RNA (1)...(19): siRNA sense strand
caguccaguucaucuucua

SEQ ID NO: 1163625 - RNA, 19 nt, Homo sapiens
  misc_RNA (1)...(19): siRNA sense strand
gguccgagggcaguauaaa

SEQ ID NO: 1163626 - RNA, 19 nt, Homo sapiens
  misc_RNA (1)...(19): siRNA sense strand
gguacgcguugcuauacag

SEQ ID NO: 1163627 - RNA, 19 nt, Homo sapiens
  misc_RNA (1)...(19): siRNA sense strand
ggaugauacugugguugca

SEQ ID NO: 1163628 - RNA, 19 nt, Homo sapiens
  misc_RNA (1)...(19): siRNA sense strand
acgcguugcuauacagaau

SEQ ID NO: 1163629 - RNA, 19 nt, Homo sapiens
  misc_RNA (1)...(19): siRNA sense strand
uccagaaauuuccagacaa

SEQ ID NO: 1163630 - RNA, 19 nt, Homo sapiens
  misc_RNA (1)...(19): siRNA sense strand
gugccaagccaaaggaaca

SEQ ID NO: 1163631 - RNA, 19 nt, Homo sapiens
  misc_RNA (1)...(19): siRNA sense strand
gcguugcuauacagaaucu

SEQ ID NO: 1163632 - RNA, 19 nt, Homo sapiens
  misc_RNA (1)...(19): siRNA sense strand
gaccacucacagcagauuu

SEQ ID NO: 1163633 - RNA, 19 nt, Homo sapiens
  misc_RNA (1)...(19): siRNA sense strand
acagcagauuucauuguca

SEQ ID NO: 1163634 - RNA, 19 nt, Homo sapiens
  misc_RNA (1)...(19): siRNA sense strand
acagaaucuuuggauaugu

SEQ ID NO: 1163635 - RNA, 19 nt, Homo sapiens
  misc_RNA (1)...(19): siRNA sense strand
uccaguucaucuucuauca

SEQ ID NO: 1163636 - RNA, 19 nt, Homo sapiens
  misc_RNA (1)...(19): siRNA sense strand
acaguacaguccaguucau

SEQ ID NO: 1163637 - RNA, 19 nt, Homo sapiens
  misc_RNA (1)...(19): siRNA sense strand
gguugcaauucccuaugga

SEQ ID NO: 1163638 - RNA, 19 nt, Homo sapiens
  misc_RNA (1)...(19): siRNA sense strand
ccaaggagcuggucacaaa

SEQ ID NO: 1163639 - RNA, 19 nt, Homo sapiens
  misc_RNA (1)...(19): siRNA sense strand
ggaaacugcucacccaaga

SEQ ID NO: 1163640 - RNA, 19 nt, Homo sapiens
  misc_RNA (1)...(19): siRNA sense strand
guaacaagguggaugaguu

SEQ ID NO: 1163641 - RNA, 19 nt, Homo sapiens
  misc_RNA (1)...(19): siRNA sense strand
caagacaggccuucugaua

SEQ ID NO: 1163642 - RNA, 19 nt, Homo sapiens
  misc_RNA (1)...(19): siRNA sense strand
gagaagcacucaguaacaa

SEQ ID NO: 1163643 - RNA, 19 nt, Homo sapiens
  misc_RNA (1)...(19): siRNA sense strand
ucagggagccucugccuua

SEQ ID NO: 1163644 - RNA, 19 nt, Homo sapiens
  misc_RNA (1)...(19): siRNA sense strand
agacaggccuucugauaau

SEQ ID NO: 1163645 - RNA, 19 nt, Homo sapiens
  misc_RNA (1)...(19): siRNA sense strand
gaaaccagcuaugugaaag

SEQ ID NO: 1163646 - RNA, 19 nt, Homo sapiens
  misc_RNA (1)...(19): siRNA sense strand
ggaggaagagggagucuga

SEQ ID NO: 1163647 - RNA, 19 nt, Homo sapiens
  misc_RNA (1)...(19): siRNA sense strand
ggagggagcacacugucua

SEQ ID NO: 1163648 - RNA, 19 nt, Homo sapiens
  misc_RNA (1)...(19): siRNA sense strand
gcaaguaucgagccaagga

SEQ ID NO: 1163649 - RNA, 19 nt, Homo sapiens
  misc_RNA (1)...(19): siRNA sense strand
ugaaaguccuggagcaugu

SEQ ID NO: 1163650 - RNA, 19 nt, Homo sapiens
  misc_RNA (1)...(19): siRNA sense strand
gcauugacgugaaggaagu

SEQ ID NO: 1163651 - RNA, 19 nt, Homo sapiens
  misc_RNA (1)...(19): siRNA sense strand
cagaaaugcuggagagagu

SEQ ID NO: 1163652 - RNA, 19 nt, Homo sapiens
  misc_RNA (1)...(19): siRNA sense strand
uaacaagguggaugaguug

SEQ ID NO: 1163653 - RNA, 19 nt, Homo sapiens
  misc_RNA (1)...(19): siRNA sense strand
gcagguacccggcaguaau

SEQ ID NO: 1163654 - RNA, 19 nt, Homo sapiens
  misc_RNA (1)...(19): siRNA sense strand
gccugggccuuuccuauga

SEQ ID NO: 1163655 - RNA, 19 nt, Homo sapiens
  misc_RNA (1)...(19): siRNA sense strand
caagggcucuggcugaaac

SEQ ID NO: 1163656 - RNA, 19 nt, Homo sapiens
  misc_RNA (1)...(19): siRNA sense strand
gggaggagcugggugugau

SEQ ID NO: 1163657 - RNA, 19 nt, Homo sapiens
  misc_RNA (1)...(19): siRNA sense strand
aaacugcucacccaagauu

SEQ ID NO: 1163658 - RNA, 19 nt, Homo sapiens
  misc_RNA (1)...(19): siRNA sense strand
gaaaugcuggagagaguca

SEQ ID NO: 1163659 - RNA, 19 nt, Homo sapiens
  misc_RNA (1)...(19): siRNA sense strand
ugaaaccagcuaugugaaa

SEQ ID NO: 1163660 - RNA, 19 nt, Homo sapiens
  misc_RNA (1)...(19): siRNA sense strand
aagacaggccuucugauaa

SEQ ID NO: 1163661 - RNA, 19 nt, Homo sapiens
  misc_RNA (1)...(19): siRNA sense strand
ggucacaaaggcagaaaug

SEQ ID NO: 1163662 - RNA, 19 nt, Homo sapiens
  misc_RNA (1)...(19): siRNA sense strand
ggguaauaaucagaucuuu

SEQ ID NO: 1163663 - RNA, 19 nt, Homo sapiens
  misc_RNA (1)...(19): siRNA sense strand
gcacugcaagccugaggaa

SEQ ID NO: 1163664 - RNA, 19 nt, Homo sapiens
  misc_RNA (1)...(19): siRNA sense strand
gcacaggcuccuacuacug

SEQ ID NO: 1163665 - RNA, 19 nt, Homo sapiens
  misc_RNA (1)...(19): siRNA sense strand
cagggucaaugcaagaguu

SEQ ID NO: 1163666 - RNA, 19 nt, Homo sapiens
  misc_RNA (1)...(19): siRNA sense strand
guaauaaucagaucuuucc

SEQ ID NO: 1163667 - RNA, 19 nt, Homo sapiens
  misc_RNA (1)...(19): siRNA sense strand
gcuggaggcaacccaauga

SEQ ID NO: 1163668 - RNA, 19 nt, Homo sapiens
  misc_RNA (1)...(19): siRNA sense strand
caagauugggugcaggaaa

SEQ ID NO: 1163669 - RNA, 19 nt, Homo sapiens
  misc_RNA (1)...(19): siRNA sense strand
gguaauaaucagaucuuuc

SEQ ID NO: 1163670 - RNA, 19 nt, Homo sapiens
  misc_RNA (1)...(19): siRNA sense strand
ccgagucccugaagaugau

SEQ ID NO: 1163671 - RNA, 19 nt, Homo sapiens
  misc_RNA (1)...(19): siRNA sense strand
cgagaagcacucaguaaca

SEQ ID NO: 1163672 - RNA, 19 nt, Homo sapiens
  misc_RNA (1)...(19): siRNA sense strand
ucaguaacaagguggauga

SEQ ID NO: 1163673 - RNA, 19 nt, Homo sapiens
  misc_RNA (1)...(19): siRNA sense strand
cacaggcuccuacuacuga

SEQ ID NO: 1163674 - RNA, 19 nt, Homo sapiens
  misc_RNA (1)...(19): siRNA sense strand
gcgcugcuuuccugugauc

SEQ ID NO: 1163675 - RNA, 19 nt, Homo sapiens
  misc_RNA (1)...(19): siRNA sense strand
gaugaucuuuggcauugac

SEQ ID NO: 1163676 - RNA, 19 nt, Homo sapiens
  misc_RNA (1)...(19): siRNA sense strand
augauggccugcuggguaa

SEQ ID NO: 1163677 - RNA, 19 nt, Homo sapiens
  misc_RNA (1)...(19): siRNA sense strand
ggucagggucaaugcaaga

SEQ ID NO: 1163678 - RNA, 19 nt, Homo sapiens
  misc_RNA (1)...(19): siRNA sense strand
gcguugaggcccaagaaga

SEQ ID NO: 1163679 - RNA, 19 nt, Homo sapiens
  misc_RNA (1)...(19): siRNA sense strand
gauggccugcuggguaaua

SEQ ID NO: 1163680 - RNA, 19 nt, Homo sapiens
  misc_RNA (1)...(19): siRNA sense strand
ugacgcagaguccuuguuc

SEQ ID NO: 1163681 - RNA, 19 nt, Homo sapiens
  misc_RNA (1)...(19): siRNA sense strand
guaauccugcgcgcuauga

SEQ ID NO: 1163682 - RNA, 19 nt, Homo sapiens
  misc_RNA (1)...(19): siRNA sense strand
gacaggccuucugauaauc

SEQ ID NO: 1163683 - RNA, 19 nt, Homo sapiens
  misc_RNA (1)...(19): siRNA sense strand
gaaacugcucacccaagau

SEQ ID NO: 1163684 - RNA, 19 nt, Homo sapiens
  misc_RNA (1)...(19): siRNA sense strand
gggagcacacugucuaugg

SEQ ID NO: 1163685 - RNA, 19 nt, Homo sapiens
  misc_RNA (1)...(19): siRNA sense strand
ucacaaaggcagaaaugcu

SEQ ID NO: 1163686 - RNA, 19 nt, Homo sapiens
  misc_RNA (1)...(19): siRNA sense strand
gugcacaggcuccuacuac

SEQ ID NO: 1163687 - RNA, 19 nt, Homo sapiens
  misc_RNA (1)...(19): siRNA sense strand
gagggagcacacugucuau

SEQ ID NO: 1163688 - RNA, 19 nt, Homo sapiens
  misc_RNA (1)...(19): siRNA sense strand
ccugugaucuucggcaaag

SEQ ID NO: 1163689 - RNA, 19 nt, Homo sapiens
  misc_RNA (1)...(19): siRNA sense strand
gcuggagagagucaucaaa

SEQ ID NO: 1163690 - RNA, 19 nt, Homo sapiens
  misc_RNA (1)...(19): siRNA sense strand
gccucugccuuacccacua

SEQ ID NO: 1163691 - RNA, 19 nt, Homo sapiens
  misc_RNA (1)...(19): siRNA sense strand
uccaagggcucuggcugaa

SEQ ID NO: 1163692 - RNA, 19 nt, Homo sapiens
  misc_RNA (1)...(19): siRNA sense strand
aagauugggugcaggaaaa

SEQ ID NO: 1163693 - RNA, 19 nt, Homo sapiens
  misc_RNA (1)...(19): siRNA sense strand
cccaagacaggccuucuga

SEQ ID NO: 1163694 - RNA, 19 nt, Homo sapiens
  misc_RNA (1)...(19): siRNA sense strand
agaagagucagcacugcaa

SEQ ID NO: 1163695 - RNA, 19 nt, Homo sapiens
  misc_RNA (1)...(19): siRNA sense strand
ucaccugccugggccuuuc

SEQ ID NO: 1163696 - RNA, 19 nt, Homo sapiens
  misc_RNA (1)...(19): siRNA sense strand
ggacaagaaucuaucauug

SEQ ID NO: 1163697 - RNA, 19 nt, Homo sapiens
  misc_RNA (1)...(19): siRNA sense strand
caagagauacgcuacauaa

SEQ ID NO: 1163698 - RNA, 19 nt, Homo sapiens
  misc_RNA (1)...(19): siRNA sense strand
caaaggcgauaacaucuau

SEQ ID NO: 1163699 - RNA, 19 nt, Homo sapiens
  misc_RNA (1)...(19): siRNA sense strand
gcgauaacaucuaugaaug

SEQ ID NO: 1163700 - RNA, 19 nt, Homo sapiens
  misc_RNA (1)...(19): siRNA sense strand
gcacuaaccauuucuaaag

SEQ ID NO: 1163701 - RNA, 19 nt, Homo sapiens
  misc_RNA (1)...(19): siRNA sense strand
ccaagaagaaggagaguaa

SEQ ID NO: 1163702 - RNA, 19 nt, Homo sapiens
  misc_RNA (1)...(19): siRNA sense strand
gguguauucuuucucgaua

SEQ ID NO: 1163703 - RNA, 19 nt, Homo sapiens
  misc_RNA (1)...(19): siRNA sense strand
gagcagaacaugacagaau

SEQ ID NO: 1163704 - RNA, 19 nt, Homo sapiens
  misc_RNA (1)...(19): siRNA sense strand
gauaacaucuaugaaugga

SEQ ID NO: 1163705 - RNA, 19 nt, Homo sapiens
  misc_RNA (1)...(19): siRNA sense strand
ucuaucugcucacuucuua

SEQ ID NO: 1163706 - RNA, 19 nt, Homo sapiens
  misc_RNA (1)...(19): siRNA sense strand
gacaguggaccaagagaua

SEQ ID NO: 1163707 - RNA, 19 nt, Homo sapiens
  misc_RNA (1)...(19): siRNA sense strand
guaugagggugguguauuc

SEQ ID NO: 1163708 - RNA, 19 nt, Homo sapiens
  misc_RNA (1)...(19): siRNA sense strand
gagaguaaagucagcauga

SEQ ID NO: 1163709 - RNA, 19 nt, Homo sapiens
  misc_RNA (1)...(19): siRNA sense strand
ugagggugguguauucuuu

SEQ ID NO: 1163710 - RNA, 19 nt, Homo sapiens
  misc_RNA (1)...(19): siRNA sense strand
gaaguauugccacucagua

SEQ ID NO: 1163711 - RNA, 19 nt, Homo sapiens
  misc_RNA (1)...(19): siRNA sense strand
caacagagcagaacaugac

SEQ ID NO: 1163712 - RNA, 19 nt, Homo sapiens
  misc_RNA (1)...(19): siRNA sense strand
cagcaaaccgagaaagaaa

SEQ ID NO: 1163713 - RNA, 19 nt, Homo sapiens
  misc_RNA (1)...(19): siRNA sense strand
gcuuggacauauugaaaga

SEQ ID NO: 1163714 - RNA, 19 nt, Homo sapiens
  misc_RNA (1)...(19): siRNA sense strand
guuauuugcuuggacauau

SEQ ID NO: 1163715 - RNA, 19 nt, Homo sapiens
  misc_RNA (1)...(19): siRNA sense strand
gaagaaggagaguaaaguc

SEQ ID NO: 1163716 - RNA, 19 nt, Homo sapiens
  misc_RNA (1)...(19): siRNA sense strand
cuucaagccuccaaagguu

SEQ ID NO: 1163717 - RNA, 19 nt, Homo sapiens
  misc_RNA (1)...(19): siRNA sense strand
gcaaaccgagaaagaaaca

SEQ ID NO: 1163718 - RNA, 19 nt, Homo sapiens
  misc_RNA (1)...(19): siRNA sense strand
ccaaaggcgauaacaucua

SEQ ID NO: 1163719 - RNA, 19 nt, Homo sapiens
  misc_RNA (1)...(19): siRNA sense strand
guccagcacuaaccauuuc

SEQ ID NO: 1163720 - RNA, 19 nt, Homo sapiens
  misc_RNA (1)...(19): siRNA sense strand
gucaagguguuauuugcuu

SEQ ID NO: 1163721 - RNA, 19 nt, Homo sapiens
  misc_RNA (1)...(19): siRNA sense strand
ccaagagauacgcuacaua

SEQ ID NO: 1163722 - RNA, 19 nt, Homo sapiens
  misc_RNA (1)...(19): siRNA sense strand
ggcgauaacaucuaugaau

SEQ ID NO: 1163723 - RNA, 19 nt, Homo sapiens
  misc_RNA (1)...(19): siRNA sense strand
aaaccgagaaagaaacaaa

SEQ ID NO: 1163724 - RNA, 19 nt, Homo sapiens
  misc_RNA (1)...(19): siRNA sense strand
gccagacaguggaccaaga

SEQ ID NO: 1163725 - RNA, 19 nt, Homo sapiens
  misc_RNA (1)...(19): siRNA sense strand
guauugccacucaguauau

SEQ ID NO: 1163726 - RNA, 19 nt, Homo sapiens
  misc_RNA (1)...(19): siRNA sense strand
aagguuacauuucggacaa

SEQ ID NO: 1163727 - RNA, 19 nt, Homo sapiens
  misc_RNA (1)...(19): siRNA sense strand
ggaaguauugccacucagu

SEQ ID NO: 1163728 - RNA, 19 nt, Homo sapiens
  misc_RNA (1)...(19): siRNA sense strand
ccagcaaaccgagaaagaa

SEQ ID NO: 1163729 - RNA, 19 nt, Homo sapiens
  misc_RNA (1)...(19): siRNA sense strand
cagcacuaaccauuucuaa

SEQ ID NO: 1163730 - RNA, 19 nt, Homo sapiens
  misc_RNA (1)...(19): siRNA sense strand
cggacaagaaucuaucauu

SEQ ID NO: 1163731 - RNA, 19 nt, Homo sapiens
  misc_RNA (1)...(19): siRNA sense strand
cacuaaccauuucuaaagu

SEQ ID NO: 1163732 - RNA, 19 nt, Homo sapiens
  misc_RNA (1)...(19): siRNA sense strand
ugggaaguauugccacuca

SEQ ID NO: 1163733 - RNA, 19 nt, Homo sapiens
  misc_RNA (1)...(19): siRNA sense strand
caagaagaaggagaguaaa

SEQ ID NO: 1163734 - RNA, 19 nt, Homo sapiens
  misc_RNA (1)...(19): siRNA sense strand
cuccaaagguuacauuucg

SEQ ID NO: 1163735 - RNA, 19 nt, Homo sapiens
  misc_RNA (1)...(19): siRNA sense strand
agcagaacaugacagaaug

SEQ ID NO: 1163736 - RNA, 19 nt, Homo sapiens
  misc_RNA (1)...(19): siRNA sense strand
cagagcagaacaugacaga

SEQ ID NO: 1163737 - RNA, 19 nt, Homo sapiens
  misc_RNA (1)...(19): siRNA sense strand
ccaaccagcaaaccgagaa

SEQ ID NO: 1163738 - RNA, 19 nt, Homo sapiens
  misc_RNA (1)...(19): siRNA sense strand
guaaagucagcaugagcaa

SEQ ID NO: 1163739 - RNA, 19 nt, Homo sapiens
  misc_RNA (1)...(19): siRNA sense strand
gaguccagcacuaaccauu

SEQ ID NO: 1163740 - RNA, 19 nt, Homo sapiens
  misc_RNA (1)...(19): siRNA sense strand
ccaacagagcagaacauga

SEQ ID NO: 1163741 - RNA, 19 nt, Homo sapiens
  misc_RNA (1)...(19): siRNA sense strand
ccacucaguauaugaccaa

SEQ ID NO: 1163742 - RNA, 19 nt, Homo sapiens
  misc_RNA (1)...(19): siRNA sense strand
gguuacauuucggacaaga

SEQ ID NO: 1163743 - RNA, 19 nt, Homo sapiens
  misc_RNA (1)...(19): siRNA sense strand
aguauugccacucaguaua

SEQ ID NO: 1163744 - RNA, 19 nt, Homo sapiens
  misc_RNA (1)...(19): siRNA sense strand
guguauucuuucucgauau

SEQ ID NO: 1163745 - RNA, 19 nt, Homo sapiens
  misc_RNA (1)...(19): siRNA sense strand
cuuucuaucugcucacuuc

SEQ ID NO: 1163746 - RNA, 19 nt, Homo sapiens
  misc_RNA (1)...(19): siRNA sense strand
caaccagcaaaccgagaaa

SEQ ID NO: 1163747 - RNA, 19 nt, Homo sapiens
  misc_RNA (1)...(19): siRNA sense strand
cagucaagguguuauuugc

SEQ ID NO: 1163748 - RNA, 19 nt, Homo sapiens
  misc_RNA (1)...(19): siRNA sense strand
uuacauuucggacaagaau

SEQ ID NO: 1163749 - RNA, 19 nt, Homo sapiens
  misc_RNA (1)...(19): siRNA sense strand
uguauucuuucucgauauc

SEQ ID NO: 1163750 - RNA, 19 nt, Homo sapiens
  misc_RNA (1)...(19): siRNA sense strand
ucccaaaggcgauaacauc

SEQ ID NO: 1163751 - RNA, 19 nt, Homo sapiens
  misc_RNA (1)...(19): siRNA sense strand
gcagaacaugacagaaugg

SEQ ID NO: 1163752 - RNA, 19 nt, Homo sapiens
  misc_RNA (1)...(19): siRNA sense strand
agaagaaggagaguaaagu

SEQ ID NO: 1163753 - RNA, 19 nt, Homo sapiens
  misc_RNA (1)...(19): siRNA sense strand
cgauaacaucuaugaaugg

SEQ ID NO: 1163754 - RNA, 19 nt, Homo sapiens
  misc_RNA (1)...(19): siRNA sense strand
gacagaauggccagacagu

SEQ ID NO: 1163755 - RNA, 19 nt, Homo sapiens
  misc_RNA (1)...(19): siRNA sense strand
uaaagucagcaugagcaaa

SEQ ID NO: 1163756 - RNA, 19 nt, Homo sapiens
  misc_RNA (1)...(19): siRNA sense strand
acagucaagguguuauuug

SEQ ID NO: 1163757 - RNA, 19 nt, Homo sapiens
  misc_RNA (1)...(19): siRNA sense strand
gaccaacagagcagaacau

SEQ ID NO: 1163758 - RNA, 19 nt, Homo sapiens
  misc_RNA (1)...(19): siRNA sense strand
ggacaagaaucuaucauug

SEQ ID NO: 1163759 - RNA, 19 nt, Homo sapiens
  misc_RNA (1)...(19): siRNA sense strand
caagagauacgcuacauaa

SEQ ID NO: 1163760 - RNA, 19 nt, Homo sapiens
  misc_RNA (1)...(19): siRNA sense strand
caaaggcgauaacaucuau

SEQ ID NO: 1163761 - RNA, 19 nt, Homo sapiens
  misc_RNA (1)...(19): siRNA sense strand
gcgauaacaucuaugaaug

SEQ ID NO: 1163762 - RNA, 19 nt, Homo sapiens
  misc_RNA (1)...(19): siRNA sense strand
gcacuaaccauuucuaaag

SEQ ID NO: 1163763 - RNA, 19 nt, Homo sapiens
  misc_RNA (1)...(19): siRNA sense strand
ccaagaagaaggagaguaa

SEQ ID NO: 1163764 - RNA, 19 nt, Homo sapiens
  misc_RNA (1)...(19): siRNA sense strand
gguguauucuuucucgaua

SEQ ID NO: 1163765 - RNA, 19 nt, Homo sapiens
  misc_RNA (1)...(19): siRNA sense strand
gagcagaacaugacagaau

SEQ ID NO: 1163766 - RNA, 19 nt, Homo sapiens
  misc_RNA (1)...(19): siRNA sense strand
gauaacaucuaugaaugga

SEQ ID NO: 1163767 - RNA, 19 nt, Homo sapiens
  misc_RNA (1)...(19): siRNA sense strand
ucuaucugcucacuucuua

SEQ ID NO: 1163768 - RNA, 19 nt, Homo sapiens
  misc_RNA (1)...(19): siRNA sense strand
gacaguggaccaagagaua

SEQ ID NO: 1163769 - RNA, 19 nt, Homo sapiens
  misc_RNA (1)...(19): siRNA sense strand
guaugagggugguguauuc

SEQ ID NO: 1163770 - RNA, 19 nt, Homo sapiens
  misc_RNA (1)...(19): siRNA sense strand
gagaguaaagucagcauga

SEQ ID NO: 1163771 - RNA, 19 nt, Homo sapiens
  misc_RNA (1)...(19): siRNA sense strand
ugagggugguguauucuuu

SEQ ID NO: 1163772 - RNA, 19 nt, Homo sapiens
  misc_RNA (1)...(19): siRNA sense strand
gaaguauugccacucagua

SEQ ID NO: 1163773 - RNA, 19 nt, Homo sapiens
  misc_RNA (1)...(19): siRNA sense strand
caacagagcagaacaugac

SEQ ID NO: 1163774 - RNA, 19 nt, Homo sapiens
  misc_RNA (1)...(19): siRNA sense strand
cagcaaaccgagaaagaaa

SEQ ID NO: 1163775 - RNA, 19 nt, Homo sapiens
  misc_RNA (1)...(19): siRNA sense strand
gcuuggacauauugaaaga

SEQ ID NO: 1163776 - RNA, 19 nt, Homo sapiens
  misc_RNA (1)...(19): siRNA sense strand
guuauuugcuuggacauau

SEQ ID NO: 1163777 - RNA, 19 nt, Homo sapiens
  misc_RNA (1)...(19): siRNA sense strand
gaagaaggagaguaaaguc

SEQ ID NO: 1163778 - RNA, 19 nt, Homo sapiens
  misc_RNA (1)...(19): siRNA sense strand
cuucaagccuccaaagguu

SEQ ID NO: 1163779 - RNA, 19 nt, Homo sapiens
  misc_RNA (1)...(19): siRNA sense strand
gcaaaccgagaaagaaaca

SEQ ID NO: 1163780 - RNA, 19 nt, Homo sapiens
  misc_RNA (1)...(19): siRNA sense strand
ccaaaggcgauaacaucua

SEQ ID NO: 1163781 - RNA, 19 nt, Homo sapiens
  misc_RNA (1)...(19): siRNA sense strand
guccagcacuaaccauuuc

SEQ ID NO: 1163782 - RNA, 19 nt, Homo sapiens
  misc_RNA (1)...(19): siRNA sense strand
gucaagguguuauuugcuu

SEQ ID NO: 1163783 - RNA, 19 nt, Homo sapiens
  misc_RNA (1)...(19): siRNA sense strand
ccaagagauacgcuacaua

SEQ ID NO: 1163784 - RNA, 19 nt, Homo sapiens
  misc_RNA (1)...(19): siRNA sense strand
ggcgauaacaucuaugaau

SEQ ID NO: 1163785 - RNA, 19 nt, Homo sapiens
  misc_RNA (1)...(19): siRNA sense strand
aaaccgagaaagaaacaaa

SEQ ID NO: 1163786 - RNA, 19 nt, Homo sapiens
  misc_RNA (1)...(19): siRNA sense strand
gccagacaguggaccaaga

SEQ ID NO: 1163787 - RNA, 19 nt, Homo sapiens
  misc_RNA (1)...(19): siRNA sense strand
guauugccacucaguauau

SEQ ID NO: 1163788 - RNA, 19 nt, Homo sapiens
  misc_RNA (1)...(19): siRNA sense strand
aagguuacauuucggacaa

SEQ ID NO: 1163789 - RNA, 19 nt, Homo sapiens
  misc_RNA (1)...(19): siRNA sense strand
ggaaguauugccacucagu

SEQ ID NO: 1163790 - RNA, 19 nt, Homo sapiens
  misc_RNA (1)...(19): siRNA sense strand
ccagcaaaccgagaaagaa

SEQ ID NO: 1163791 - RNA, 19 nt, Homo sapiens
  misc_RNA (1)...(19): siRNA sense strand
cagcacuaaccauuucuaa

SEQ ID NO: 1163792 - RNA, 19 nt, Homo sapiens
  misc_RNA (1)...(19): siRNA sense strand
cggacaagaaucuaucauu

SEQ ID NO: 1163793 - RNA, 19 nt, Homo sapiens
  misc_RNA (1)...(19): siRNA sense strand
cacuaaccauuucuaaagu

SEQ ID NO: 1163794 - RNA, 19 nt, Homo sapiens
  misc_RNA (1)...(19): siRNA sense strand
ugggaaguauugccacuca

SEQ ID NO: 1163795 - RNA, 19 nt, Homo sapiens
  misc_RNA (1)...(19): siRNA sense strand
caagaagaaggagaguaaa

SEQ ID NO: 1163796 - RNA, 19 nt, Homo sapiens
  misc_RNA (1)...(19): siRNA sense strand
cuccaaagguuacauuucg

SEQ ID NO: 1163797 - RNA, 19 nt, Homo sapiens
  misc_RNA (1)...(19): siRNA sense strand
agcagaacaugacagaaug

SEQ ID NO: 1163798 - RNA, 19 nt, Homo sapiens
  misc_RNA (1)...(19): siRNA sense strand
cagagcagaacaugacaga

SEQ ID NO: 1163799 - RNA, 19 nt, Homo sapiens
  misc_RNA (1)...(19): siRNA sense strand
ccaaccagcaaaccgagaa

SEQ ID NO: 1163800 - RNA, 19 nt, Homo sapiens
  misc_RNA (1)...(19): siRNA sense strand
guaaagucagcaugagcaa

SEQ ID NO: 1163801 - RNA, 19 nt, Homo sapiens
  misc_RNA (1)...(19): siRNA sense strand
gaguccagcacuaaccauu

SEQ ID NO: 1163802 - RNA, 19 nt, Homo sapiens
  misc_RNA (1)...(19): siRNA sense strand
ccaacagagcagaacauga

SEQ ID NO: 1163803 - RNA, 19 nt, Homo sapiens
  misc_RNA (1)...(19): siRNA sense strand
ccacucaguauaugaccaa

SEQ ID NO: 1163804 - RNA, 19 nt, Homo sapiens
  misc_RNA (1)...(19): siRNA sense strand
gguuacauuucggacaaga

SEQ ID NO: 1163805 - RNA, 19 nt, Homo sapiens
  misc_RNA (1)...(19): siRNA sense strand
aguauugccacucaguaua

SEQ ID NO: 1163806 - RNA, 19 nt, Homo sapiens
  misc_RNA (1)...(19): siRNA sense strand
guguauucuuucucgauau

SEQ ID NO: 1163807 - RNA, 19 nt, Homo sapiens
  misc_RNA (1)...(19): siRNA sense strand
cuuucuaucugcucacuuc

SEQ ID NO: 1163808 - RNA, 19 nt, Homo sapiens
  misc_RNA (1)...(19): siRNA sense strand
caaccagcaaaccgagaaa

SEQ ID NO: 1163809 - RNA, 19 nt, Homo sapiens
  misc_RNA (1)...(19): siRNA sense strand
cagucaagguguuauuugc

SEQ ID NO: 1163810 - RNA, 19 nt, Homo sapiens
  misc_RNA (1)...(19): siRNA sense strand
uuacauuucggacaagaau

SEQ ID NO: 1163811 - RNA, 19 nt, Homo sapiens
  misc_RNA (1)...(19): siRNA sense strand
uguauucuuucucgauauc

SEQ ID NO: 1163812 - RNA, 19 nt, Homo sapiens
  misc_RNA (1)...(19): siRNA sense strand
ucccaaaggcgauaacauc

SEQ ID NO: 1163813 - RNA, 19 nt, Homo sapiens
  misc_RNA (1)...(19): siRNA sense strand
gcagaacaugacagaaugg

SEQ ID NO: 1163814 - RNA, 19 nt, Homo sapiens
  misc_RNA (1)...(19): siRNA sense strand
agaagaaggagaguaaagu

SEQ ID NO: 1163815 - RNA, 19 nt, Homo sapiens
  misc_RNA (1)...(19): siRNA sense strand
cgauaacaucuaugaaugg

SEQ ID NO: 1163816 - RNA, 19 nt, Homo sapiens
  misc_RNA (1)...(19): siRNA sense strand
gacagaauggccagacagu

SEQ ID NO: 1163817 - RNA, 19 nt, Homo sapiens
  misc_RNA (1)...(19): siRNA sense strand
uaaagucagcaugagcaaa

SEQ ID NO: 1163818 - RNA, 19 nt, Homo sapiens
  misc_RNA (1)...(19): siRNA sense strand
acagucaagguguuauuug

SEQ ID NO: 1163819 - RNA, 19 nt, Homo sapiens
  misc_RNA (1)...(19): siRNA sense strand
gaccaacagagcagaacau

SEQ ID NO: 1163820 - RNA, 19 nt, Homo sapiens
  misc_RNA (1)...(19): siRNA sense strand
agaaagagcuugacaguaa

SEQ ID NO: 1163821 - RNA, 19 nt, Homo sapiens
  misc_RNA (1)...(19): siRNA sense strand
ugcaagagcugaauuauaa

SEQ ID NO: 1163822 - RNA, 19 nt, Homo sapiens
  misc_RNA (1)...(19): siRNA sense strand
ggaaguaguucacaaaaua

SEQ ID NO: 1163823 - RNA, 19 nt, Homo sapiens
  misc_RNA (1)...(19): siRNA sense strand
ugaaguaucuguauccaaa

SEQ ID NO: 1163824 - RNA, 19 nt, Homo sapiens
  misc_RNA (1)...(19): siRNA sense strand
gaaaggaaguaguucacaa

SEQ ID NO: 1163825 - RNA, 19 nt, Homo sapiens
  misc_RNA (1)...(19): siRNA sense strand
uaaaggaacuggauauauc

SEQ ID NO: 1163826 - RNA, 19 nt, Homo sapiens
  misc_RNA (1)...(19): siRNA sense strand
gagcuucacucccuuaguu

SEQ ID NO: 1163827 - RNA, 19 nt, Homo sapiens
  misc_RNA (1)...(19): siRNA sense strand
gaaagagcuugacaguaaa

SEQ ID NO: 1163828 - RNA, 19 nt, Homo sapiens
  misc_RNA (1)...(19): siRNA sense strand
gaacaugacccuaucacaa

SEQ ID NO: 1163829 - RNA, 19 nt, Homo sapiens
  misc_RNA (1)...(19): siRNA sense strand
ucaagagccuggaagauuu

SEQ ID NO: 1163830 - RNA, 19 nt, Homo sapiens
  misc_RNA (1)...(19): siRNA sense strand
gaauaugacuucaaaugca

SEQ ID NO: 1163831 - RNA, 19 nt, Homo sapiens
  misc_RNA (1)...(19): siRNA sense strand
agaaugcccugauuaauga

SEQ ID NO: 1163832 - RNA, 19 nt, Homo sapiens
  misc_RNA (1)...(19): siRNA sense strand
ucacugaacuuacccagaa

SEQ ID NO: 1163833 - RNA, 19 nt, Homo sapiens
  misc_RNA (1)...(19): siRNA sense strand
gcacagugauguuagacaa

SEQ ID NO: 1163834 - RNA, 19 nt, Homo sapiens
  misc_RNA (1)...(19): siRNA sense strand
gaccgcaccuucagucuuu

SEQ ID NO: 1163835 - RNA, 19 nt, Homo sapiens
  misc_RNA (1)...(19): siRNA sense strand
ggacaagguuauguguaua

SEQ ID NO: 1163836 - RNA, 19 nt, Homo sapiens
  misc_RNA (1)...(19): siRNA sense strand
uaauagaguugcugaaugu

SEQ ID NO: 1163837 - RNA, 19 nt, Homo sapiens
  misc_RNA (1)...(19): siRNA sense strand
ggaacuggauauaucaaga

SEQ ID NO: 1163838 - RNA, 19 nt, Homo sapiens
  misc_RNA (1)...(19): siRNA sense strand
gaaauacaccuacgaacau

SEQ ID NO: 1163839 - RNA, 19 nt, Homo sapiens
  misc_RNA (1)...(19): siRNA sense strand
cagcagagcgccuguauug

SEQ ID NO: 1163840 - RNA, 19 nt, Homo sapiens
  misc_RNA (1)...(19): siRNA sense strand
ggcaaagagugaucagaaa

SEQ ID NO: 1163841 - RNA, 19 nt, Homo sapiens
  misc_RNA (1)...(19): siRNA sense strand
gggcucagcuuucagaagu

SEQ ID NO: 1163842 - RNA, 19 nt, Homo sapiens
  misc_RNA (1)...(19): siRNA sense strand
ucagaaaugugaaggacaa

SEQ ID NO: 1163843 - RNA, 19 nt, Homo sapiens
  misc_RNA (1)...(19): siRNA sense strand
gaaagcauccuagaacuca

SEQ ID NO: 1163844 - RNA, 19 nt, Homo sapiens
  misc_RNA (1)...(19): siRNA sense strand
gcaauugaaagaacagaaa

SEQ ID NO: 1163845 - RNA, 19 nt, Homo sapiens
  misc_RNA (1)...(19): siRNA sense strand
ugucacagcuggaugauca

SEQ ID NO: 1163846 - RNA, 19 nt, Homo sapiens
  misc_RNA (1)...(19): siRNA sense strand
ggaacuugauggcccuaaa

SEQ ID NO: 1163847 - RNA, 19 nt, Homo sapiens
  misc_RNA (1)...(19): siRNA sense strand
gauuaaugaugaacuagug

SEQ ID NO: 1163848 - RNA, 19 nt, Homo sapiens
  misc_RNA (1)...(19): siRNA sense strand
caaaagaggucucaaugug

SEQ ID NO: 1163849 - RNA, 19 nt, Homo sapiens
  misc_RNA (1)...(19): siRNA sense strand
ggagcacgcugccaaugau

SEQ ID NO: 1163850 - RNA, 19 nt, Homo sapiens
  misc_RNA (1)...(19): siRNA sense strand
agacugaguugauuucugu

SEQ ID NO: 1163851 - RNA, 19 nt, Homo sapiens
  misc_RNA (1)...(19): siRNA sense strand
ccagaugucuaugaucauu

SEQ ID NO: 1163852 - RNA, 19 nt, Homo sapiens
  misc_RNA (1)...(19): siRNA sense strand
cagaaugcccugauuaaug

SEQ ID NO: 1163853 - RNA, 19 nt, Homo sapiens
  misc_RNA (1)...(19): siRNA sense strand
uaagagaaaggaaguaguu

SEQ ID NO: 1163854 - RNA, 19 nt, Homo sapiens
  misc_RNA (1)...(19): siRNA sense strand
gaaaacgcccagagauuua

SEQ ID NO: 1163855 - RNA, 19 nt, Homo sapiens
  misc_RNA (1)...(19): siRNA sense strand
guauagagcaugaaaucaa

SEQ ID NO: 1163856 - RNA, 19 nt, Homo sapiens
  misc_RNA (1)...(19): siRNA sense strand
caagagccuggaagauuua

SEQ ID NO: 1163857 - RNA, 19 nt, Homo sapiens
  misc_RNA (1)...(19): siRNA sense strand
ccuggaagauuuacaagau

SEQ ID NO: 1163858 - RNA, 19 nt, Homo sapiens
  misc_RNA (1)...(19): siRNA sense strand
cuggauauaucaagacuga

SEQ ID NO: 1163859 - RNA, 19 nt, Homo sapiens
  misc_RNA (1)...(19): siRNA sense strand
caaguucggcagcagcuua

SEQ ID NO: 1163860 - RNA, 19 nt, Homo sapiens
  misc_RNA (1)...(19): siRNA sense strand
acagcuggaugaucaauau

SEQ ID NO: 1163861 - RNA, 19 nt, Homo sapiens
  misc_RNA (1)...(19): siRNA sense strand
agucauggcugcugagaau

SEQ ID NO: 1163862 - RNA, 19 nt, Homo sapiens
  misc_RNA (1)...(19): siRNA sense strand
gaugugaaugagagaaaua

SEQ ID NO: 1163863 - RNA, 19 nt, Homo sapiens
  misc_RNA (1)...(19): siRNA sense strand
ggaaaacgcccagagauuu

SEQ ID NO: 1163864 - RNA, 19 nt, Homo sapiens
  misc_RNA (1)...(19): siRNA sense strand
agcguaaucuucaggauaa

SEQ ID NO: 1163865 - RNA, 19 nt, Homo sapiens
  misc_RNA (1)...(19): siRNA sense strand
gggccuccauccuuuggua

SEQ ID NO: 1163866 - RNA, 19 nt, Homo sapiens
  misc_RNA (1)...(19): siRNA sense strand
ccauggaaaucagacagua

SEQ ID NO: 1163867 - RNA, 19 nt, Homo sapiens
  misc_RNA (1)...(19): siRNA sense strand
uggaagauuuacaagauga

SEQ ID NO: 1163868 - RNA, 19 nt, Homo sapiens
  misc_RNA (1)...(19): siRNA sense strand
gguugggccuccauccuuu

SEQ ID NO: 1163869 - RNA, 19 nt, Homo sapiens
  misc_RNA (1)...(19): siRNA sense strand
ggaggaauuggaacagaaa

SEQ ID NO: 1163870 - RNA, 19 nt, Homo sapiens
  misc_RNA (1)...(19): siRNA sense strand
gacaguaaagucagaaaug

SEQ ID NO: 1163871 - RNA, 19 nt, Homo sapiens
  misc_RNA (1)...(19): siRNA sense strand
ucagagcacagugauguua

SEQ ID NO: 1163872 - RNA, 19 nt, Homo sapiens
  misc_RNA (1)...(19): siRNA sense strand
ugagacuguuggugaaauu

SEQ ID NO: 1163873 - RNA, 19 nt, Homo sapiens
  misc_RNA (1)...(19): siRNA sense strand
ccugauuaaugaugaacua

SEQ ID NO: 1163874 - RNA, 19 nt, Homo sapiens
  misc_RNA (1)...(19): siRNA sense strand
gaaggacaagguuaugugu

SEQ ID NO: 1163875 - RNA, 19 nt, Homo sapiens
  misc_RNA (1)...(19): siRNA sense strand
cugagaauauuccugagaa

SEQ ID NO: 1163876 - RNA, 19 nt, Homo sapiens
  misc_RNA (1)...(19): siRNA sense strand
guugaacccuacacgaaga

SEQ ID NO: 1163877 - RNA, 19 nt, Homo sapiens
  misc_RNA (1)...(19): siRNA sense strand
acaguaaagucagaaaugu

SEQ ID NO: 1163878 - RNA, 19 nt, Homo sapiens
  misc_RNA (1)...(19): siRNA sense strand
ugacaucauucgcaauuac

SEQ ID NO: 1163879 - RNA, 19 nt, Homo sapiens
  misc_RNA (1)...(19): siRNA sense strand
gaaugagagaaauacagua

SEQ ID NO: 1163880 - RNA, 19 nt, Homo sapiens
  misc_RNA (1)...(19): siRNA sense strand
gauaaagaugugaaugaga

SEQ ID NO: 1163881 - RNA, 19 nt, Homo sapiens
  misc_RNA (1)...(19): siRNA sense strand
guaccuggcacagugguua

SEQ ID NO: 1163882 - RNA, 19 nt, Homo sapiens
  misc_RNA (1)...(19): siRNA sense strand
aaagagugaucagaaacaa

SEQ ID NO: 1163883 - RNA, 19 nt, Homo sapiens
  misc_RNA (1)...(19): siRNA sense strand
ccaaugguguggcaaagag

SEQ ID NO: 1163884 - RNA, 19 nt, Homo sapiens
  misc_RNA (1)...(19): siRNA sense strand
aggacaagguuauguguau

SEQ ID NO: 1163885 - RNA, 19 nt, Homo sapiens
  misc_RNA (1)...(19): siRNA sense strand
gaaugucacugaacuuacc

SEQ ID NO: 1163886 - RNA, 19 nt, Homo sapiens
  misc_RNA (1)...(19): siRNA sense strand
cauccuagaacucauuaaa

SEQ ID NO: 1163887 - RNA, 19 nt, Homo sapiens
  misc_RNA (1)...(19): siRNA sense strand
gcacgaugggcucagcuuu

SEQ ID NO: 1163888 - RNA, 19 nt, Homo sapiens
  misc_RNA (1)...(19): siRNA sense strand
ggaagacccaauccagaug

SEQ ID NO: 1163889 - RNA, 19 nt, Homo sapiens
  misc_RNA (1)...(19): siRNA sense strand
caucguuacugaagagcuu

SEQ ID NO: 1163890 - RNA, 19 nt, Homo sapiens
  misc_RNA (1)...(19): siRNA sense strand
cuacgaacaugacccuauc

SEQ ID NO: 1163891 - RNA, 19 nt, Homo sapiens
  misc_RNA (1)...(19): siRNA sense strand
uggaucagcugcagaacug

SEQ ID NO: 1163892 - RNA, 19 nt, Homo sapiens
  misc_RNA (1)...(19): siRNA sense strand
auaauagaguugcugaaug

SEQ ID NO: 1163893 - RNA, 19 nt, Homo sapiens
  misc_RNA (1)...(19): siRNA sense strand
aaaggaaguaguucacaaa

SEQ ID NO: 1163894 - RNA, 19 nt, Homo sapiens
  misc_RNA (1)...(19): siRNA sense strand
gaaaugugaaggacaaggu

SEQ ID NO: 1163895 - RNA, 19 nt, Homo sapiens
  misc_RNA (1)...(19): siRNA sense strand
gaaaggaaaauucuggaaa

SEQ ID NO: 1163896 - RNA, 19 nt, Homo sapiens
  misc_RNA (1)...(19): siRNA sense strand
caauccagaugucuaugau

SEQ ID NO: 1163897 - RNA, 19 nt, Homo sapiens
  misc_RNA (1)...(19): siRNA sense strand
ggauauaucaagacugagu

SEQ ID NO: 1163898 - RNA, 19 nt, Homo sapiens
  misc_RNA (1)...(19): siRNA sense strand
guacgaacuucagcagcuu

SEQ ID NO: 1163899 - RNA, 19 nt, Homo sapiens
  misc_RNA (1)...(19): siRNA sense strand
agaaauacaccuacgaaca

SEQ ID NO: 1163900 - RNA, 19 nt, Homo sapiens
  misc_RNA (1)...(19): siRNA sense strand
ggaauuggaacagaaauac

SEQ ID NO: 1163901 - RNA, 19 nt, Homo sapiens
  misc_RNA (1)...(19): siRNA sense strand
caaagagugaucagaaaca

SEQ ID NO: 1163902 - RNA, 19 nt, Homo sapiens
  misc_RNA (1)...(19): siRNA sense strand
gggagcacgcugccaauga

SEQ ID NO: 1163903 - RNA, 19 nt, Homo sapiens
  misc_RNA (1)...(19): siRNA sense strand
gaacuugauggcccuaaag

SEQ ID NO: 1163904 - RNA, 19 nt, Homo sapiens
  misc_RNA (1)...(19): siRNA sense strand
caaaagugaugaacaugga

SEQ ID NO: 1163905 - RNA, 19 nt, Homo sapiens
  misc_RNA (1)...(19): siRNA sense strand
gaaauugcaagagcugaau

SEQ ID NO: 1163906 - RNA, 19 nt, Homo sapiens
  misc_RNA (1)...(19): siRNA sense strand
agaggccgcuggucuugaa

SEQ ID NO: 1163907 - RNA, 19 nt, Homo sapiens
  misc_RNA (1)...(19): siRNA sense strand
gaagacccaauccagaugu

SEQ ID NO: 1163908 - RNA, 19 nt, Homo sapiens
  misc_RNA (1)...(19): siRNA sense strand
cuaaaggaacuggauauau

SEQ ID NO: 1163909 - RNA, 19 nt, Homo sapiens
  misc_RNA (1)...(19): siRNA sense strand
gcuguuacuuucccugaca

SEQ ID NO: 1163910 - RNA, 19 nt, Homo sapiens
  misc_RNA (1)...(19): siRNA sense strand
cgaccucucugcccguugu

SEQ ID NO: 1163911 - RNA, 19 nt, Homo sapiens
  misc_RNA (1)...(19): siRNA sense strand
aacaugacccuaucacaaa

SEQ ID NO: 1163912 - RNA, 19 nt, Homo sapiens
  misc_RNA (1)...(19): siRNA sense strand
gcaaagagugaucagaaac

SEQ ID NO: 1163913 - RNA, 19 nt, Homo sapiens
  misc_RNA (1)...(19): siRNA sense strand
uauagagcaugaaaucaag

SEQ ID NO: 1163914 - RNA, 19 nt, Homo sapiens
  misc_RNA (1)...(19): siRNA sense strand
acagcugucugaaggaaga

SEQ ID NO: 1163915 - RNA, 19 nt, Homo sapiens
  misc_RNA (1)...(19): siRNA sense strand
cagagccaauggaacuuga

SEQ ID NO: 1163916 - RNA, 19 nt, Homo sapiens
  misc_RNA (1)...(19): siRNA sense strand
ugaucaauauagucgcuuu

SEQ ID NO: 1163917 - RNA, 19 nt, Homo sapiens
  misc_RNA (1)...(19): siRNA sense strand
gcuggaugaucaauauagu

SEQ ID NO: 1163918 - RNA, 19 nt, Homo sapiens
  misc_RNA (1)...(19): siRNA sense strand
gauugaaagcauccuagaa

SEQ ID NO: 1163919 - RNA, 19 nt, Homo sapiens
  misc_RNA (1)...(19): siRNA sense strand
ugauaaagaugugaaugag

SEQ ID NO: 1163920 - RNA, 19 nt, Homo sapiens
  misc_RNA (1)...(19): siRNA sense strand
agaaagagcuugacaguaa

SEQ ID NO: 1163921 - RNA, 19 nt, Homo sapiens
  misc_RNA (1)...(19): siRNA sense strand
ugcaagagcugaauuauaa

SEQ ID NO: 1163922 - RNA, 19 nt, Homo sapiens
  misc_RNA (1)...(19): siRNA sense strand
ggaaguaguucacaaaaua

SEQ ID NO: 1163923 - RNA, 19 nt, Homo sapiens
  misc_RNA (1)...(19): siRNA sense strand
ugaaguaucuguauccaaa

SEQ ID NO: 1163924 - RNA, 19 nt, Homo sapiens
  misc_RNA (1)...(19): siRNA sense strand
gaaaggaaguaguucacaa

SEQ ID NO: 1163925 - RNA, 19 nt, Homo sapiens
  misc_RNA (1)...(19): siRNA sense strand
uaaaggaacuggauauauc

SEQ ID NO: 1163926 - RNA, 19 nt, Homo sapiens
  misc_RNA (1)...(19): siRNA sense strand
gagcuucacucccuuaguu

SEQ ID NO: 1163927 - RNA, 19 nt, Homo sapiens
  misc_RNA (1)...(19): siRNA sense strand
gaaagagcuugacaguaaa

SEQ ID NO: 1163928 - RNA, 19 nt, Homo sapiens
  misc_RNA (1)...(19): siRNA sense strand
gaacaugacccuaucacaa

SEQ ID NO: 1163929 - RNA, 19 nt, Homo sapiens
  misc_RNA (1)...(19): siRNA sense strand
ucaagagccuggaagauuu

SEQ ID NO: 1163930 - RNA, 19 nt, Homo sapiens
  misc_RNA (1)...(19): siRNA sense strand
gaauaugacuucaaaugca

SEQ ID NO: 1163931 - RNA, 19 nt, Homo sapiens
  misc_RNA (1)...(19): siRNA sense strand
agaaugcccugauuaauga

SEQ ID NO: 1163932 - RNA, 19 nt, Homo sapiens
  misc_RNA (1)...(19): siRNA sense strand
ucacugaacuuacccagaa

SEQ ID NO: 1163933 - RNA, 19 nt, Homo sapiens
  misc_RNA (1)...(19): siRNA sense strand
gcacagugauguuagacaa

SEQ ID NO: 1163934 - RNA, 19 nt, Homo sapiens
  misc_RNA (1)...(19): siRNA sense strand
gaccgcaccuucagucuuu

SEQ ID NO: 1163935 - RNA, 19 nt, Homo sapiens
  misc_RNA (1)...(19): siRNA sense strand
ggacaagguuauguguaua

SEQ ID NO: 1163936 - RNA, 19 nt, Homo sapiens
  misc_RNA (1)...(19): siRNA sense strand
uaauagaguugcugaaugu

SEQ ID NO: 1163937 - RNA, 19 nt, Homo sapiens
  misc_RNA (1)...(19): siRNA sense strand
ggaacuggauauaucaaga

SEQ ID NO: 1163938 - RNA, 19 nt, Homo sapiens
  misc_RNA (1)...(19): siRNA sense strand
gaaauacaccuacgaacau

SEQ ID NO: 1163939 - RNA, 19 nt, Homo sapiens
  misc_RNA (1)...(19): siRNA sense strand
cagcagagcgccuguauug

SEQ ID NO: 1163940 - RNA, 19 nt, Homo sapiens
  misc_RNA (1)...(19): siRNA sense strand
ggcaaagagugaucagaaa

SEQ ID NO: 1163941 - RNA, 19 nt, Homo sapiens
  misc_RNA (1)...(19): siRNA sense strand
gggcucagcuuucagaagu

SEQ ID NO: 1163942 - RNA, 19 nt, Homo sapiens
  misc_RNA (1)...(19): siRNA sense strand
ucagaaaugugaaggacaa

SEQ ID NO: 1163943 - RNA, 19 nt, Homo sapiens
  misc_RNA (1)...(19): siRNA sense strand
gaaagcauccuagaacuca

SEQ ID NO: 1163944 - RNA, 19 nt, Homo sapiens
  misc_RNA (1)...(19): siRNA sense strand
gcaauugaaagaacagaaa

SEQ ID NO: 1163945 - RNA, 19 nt, Homo sapiens
  misc_RNA (1)...(19): siRNA sense strand
ugucacagcuggaugauca

SEQ ID NO: 1163946 - RNA, 19 nt, Homo sapiens
  misc_RNA (1)...(19): siRNA sense strand
ggaacuugauggcccuaaa

SEQ ID NO: 1163947 - RNA, 19 nt, Homo sapiens
  misc_RNA (1)...(19): siRNA sense strand
gauuaaugaugaacuagug

SEQ ID NO: 1163948 - RNA, 19 nt, Homo sapiens
  misc_RNA (1)...(19): siRNA sense strand
caaaagaggucucaaugug

SEQ ID NO: 1163949 - RNA, 19 nt, Homo sapiens
  misc_RNA (1)...(19): siRNA sense strand
ggagcacgcugccaaugau

SEQ ID NO: 1163950 - RNA, 19 nt, Homo sapiens
  misc_RNA (1)...(19): siRNA sense strand
agacugaguugauuucugu

SEQ ID NO: 1163951 - RNA, 19 nt, Homo sapiens
  misc_RNA (1)...(19): siRNA sense strand
ccagaugucuaugaucauu

SEQ ID NO: 1163952 - RNA, 19 nt, Homo sapiens
  misc_RNA (1)...(19): siRNA sense strand
cagaaugcccugauuaaug

SEQ ID NO: 1163953 - RNA, 19 nt, Homo sapiens
  misc_RNA (1)...(19): siRNA sense strand
uaagagaaaggaaguaguu

SEQ ID NO: 1163954 - RNA, 19 nt, Homo sapiens
  misc_RNA (1)...(19): siRNA sense strand
gaaaacgcccagagauuua

SEQ ID NO: 1163955 - RNA, 19 nt, Homo sapiens
  misc_RNA (1)...(19): siRNA sense strand
guauagagcaugaaaucaa

SEQ ID NO: 1163956 - RNA, 19 nt, Homo sapiens
  misc_RNA (1)...(19): siRNA sense strand
caagagccuggaagauuua

SEQ ID NO: 1163957 - RNA, 19 nt, Homo sapiens
  misc_RNA (1)...(19): siRNA sense strand
ccuggaagauuuacaagau

SEQ ID NO: 1163958 - RNA, 19 nt, Homo sapiens
  misc_RNA (1)...(19): siRNA sense strand
cuggauauaucaagacuga

SEQ ID NO: 1163959 - RNA, 19 nt, Homo sapiens
  misc_RNA (1)...(19): siRNA sense strand
caaguucggcagcagcuua

SEQ ID NO: 1163960 - RNA, 19 nt, Homo sapiens
  misc_RNA (1)...(19): siRNA sense strand
acagcuggaugaucaauau

SEQ ID NO: 1163961 - RNA, 19 nt, Homo sapiens
  misc_RNA (1)...(19): siRNA sense strand
agucauggcugcugagaau

SEQ ID NO: 1163962 - RNA, 19 nt, Homo sapiens
  misc_RNA (1)...(19): siRNA sense strand
gaugugaaugagagaaaua

SEQ ID NO: 1163963 - RNA, 19 nt, Homo sapiens
  misc_RNA (1)...(19): siRNA sense strand
ggaaaacgcccagagauuu

SEQ ID NO: 1163964 - RNA, 19 nt, Homo sapiens
  misc_RNA (1)...(19): siRNA sense strand
agcguaaucuucaggauaa

SEQ ID NO: 1163965 - RNA, 19 nt, Homo sapiens
  misc_RNA (1)...(19): siRNA sense strand
gggccuccauccuuuggua

SEQ ID NO: 1163966 - RNA, 19 nt, Homo sapiens
  misc_RNA (1)...(19): siRNA sense strand
ccauggaaaucagacagua

SEQ ID NO: 1163967 - RNA, 19 nt, Homo sapiens
  misc_RNA (1)...(19): siRNA sense strand
uggaagauuuacaagauga

SEQ ID NO: 1163968 - RNA, 19 nt, Homo sapiens
  misc_RNA (1)...(19): siRNA sense strand
gguugggccuccauccuuu

SEQ ID NO: 1163969 - RNA, 19 nt, Homo sapiens
  misc_RNA (1)...(19): siRNA sense strand
ggaggaauuggaacagaaa

SEQ ID NO: 1163970 - RNA, 19 nt, Homo sapiens
  misc_RNA (1)...(19): siRNA sense strand
gacaguaaagucagaaaug

SEQ ID NO: 1163971 - RNA, 19 nt, Homo sapiens
  misc_RNA (1)...(19): siRNA sense strand
ucagagcacagugauguua

SEQ ID NO: 1163972 - RNA, 19 nt, Homo sapiens
  misc_RNA (1)...(19): siRNA sense strand
ugagacuguuggugaaauu

SEQ ID NO: 1163973 - RNA, 19 nt, Homo sapiens
  misc_RNA (1)...(19): siRNA sense strand
ccugauuaaugaugaacua

SEQ ID NO: 1163974 - RNA, 19 nt, Homo sapiens
  misc_RNA (1)...(19): siRNA sense strand
gaaggacaagguuaugugu

SEQ ID NO: 1163975 - RNA, 19 nt, Homo sapiens
  misc_RNA (1)...(19): siRNA sense strand
cugagaauauuccugagaa

SEQ ID NO: 1163976 - RNA, 19 nt, Homo sapiens
  misc_RNA (1)...(19): siRNA sense strand
guugaacccuacacgaaga

SEQ ID NO: 1163977 - RNA, 19 nt, Homo sapiens
  misc_RNA (1)...(19): siRNA sense strand
acaguaaagucagaaaugu

SEQ ID NO: 1163978 - RNA, 19 nt, Homo sapiens
  misc_RNA (1)...(19): siRNA sense strand
ugacaucauucgcaauuac

SEQ ID NO: 1163979 - RNA, 19 nt, Homo sapiens
  misc_RNA (1)...(19): siRNA sense strand
gaaugagagaaauacagua

SEQ ID NO: 1163980 - RNA, 19 nt, Homo sapiens
  misc_RNA (1)...(19): siRNA sense strand
gauaaagaugugaaugaga

SEQ ID NO: 1163981 - RNA, 19 nt, Homo sapiens
  misc_RNA (1)...(19): siRNA sense strand
guaccuggcacagugguua

SEQ ID NO: 1163982 - RNA, 19 nt, Homo sapiens
  misc_RNA (1)...(19): siRNA sense strand
aaagagugaucagaaacaa

SEQ ID NO: 1163983 - RNA, 19 nt, Homo sapiens
  misc_RNA (1)...(19): siRNA sense strand
ccaaugguguggcaaagag

SEQ ID NO: 1163984 - RNA, 19 nt, Homo sapiens
  misc_RNA (1)...(19): siRNA sense strand
aggacaagguuauguguau

SEQ ID NO: 1163985 - RNA, 19 nt, Homo sapiens
  misc_RNA (1)...(19): siRNA sense strand
gaaugucacugaacuuacc

SEQ ID NO: 1163986 - RNA, 19 nt, Homo sapiens
  misc_RNA (1)...(19): siRNA sense strand
cauccuagaacucauuaaa

SEQ ID NO: 1163987 - RNA, 19 nt, Homo sapiens
  misc_RNA (1)...(19): siRNA sense strand
gcacgaugggcucagcuuu

SEQ ID NO: 1163988 - RNA, 19 nt, Homo sapiens
  misc_RNA (1)...(19): siRNA sense strand
ggaagacccaauccagaug

SEQ ID NO: 1163989 - RNA, 19 nt, Homo sapiens
  misc_RNA (1)...(19): siRNA sense strand
caucguuacugaagagcuu

SEQ ID NO: 1163990 - RNA, 19 nt, Homo sapiens
  misc_RNA (1)...(19): siRNA sense strand
cuacgaacaugacccuauc

SEQ ID NO: 1163991 - RNA, 19 nt, Homo sapiens
  misc_RNA (1)...(19): siRNA sense strand
uggaucagcugcagaacug

SEQ ID NO: 1163992 - RNA, 19 nt, Homo sapiens
  misc_RNA (1)...(19): siRNA sense strand
auaauagaguugcugaaug

SEQ ID NO: 1163993 - RNA, 19 nt, Homo sapiens
  misc_RNA (1)...(19): siRNA sense strand
aaaggaaguaguucacaaa

SEQ ID NO: 1163994 - RNA, 19 nt, Homo sapiens
  misc_RNA (1)...(19): siRNA sense strand
gaaaugugaaggacaaggu

SEQ ID NO: 1163995 - RNA, 19 nt, Homo sapiens
  misc_RNA (1)...(19): siRNA sense strand
gaaaggaaaauucuggaaa

SEQ ID NO: 1163996 - RNA, 19 nt, Homo sapiens
  misc_RNA (1)...(19): siRNA sense strand
caauccagaugucuaugau

SEQ ID NO: 1163997 - RNA, 19 nt, Homo sapiens
  misc_RNA (1)...(19): siRNA sense strand
ggauauaucaagacugagu

SEQ ID NO: 1163998 - RNA, 19 nt, Homo sapiens
  misc_RNA (1)...(19): siRNA sense strand
guacgaacuucagcagcuu

SEQ ID NO: 1163999 - RNA, 19 nt, Homo sapiens
  misc_RNA (1)...(19): siRNA sense strand
agaaauacaccuacgaaca

SEQ ID NO: 1164000 - RNA, 19 nt, Homo sapiens
  misc_RNA (1)...(19): siRNA sense strand
ggaauuggaacagaaauac

SEQ ID NO: 1164001 - RNA, 19 nt, Homo sapiens
  misc_RNA (1)...(19): siRNA sense strand
caaagagugaucagaaaca

SEQ ID NO: 1164002 - RNA, 19 nt, Homo sapiens
  misc_RNA (1)...(19): siRNA sense strand
gggagcacgcugccaauga

SEQ ID NO: 1164003 - RNA, 19 nt, Homo sapiens
  misc_RNA (1)...(19): siRNA sense strand
gaacuugauggcccuaaag

SEQ ID NO: 1164004 - RNA, 19 nt, Homo sapiens
  misc_RNA (1)...(19): siRNA sense strand
caaaagugaugaacaugga

SEQ ID NO: 1164005 - RNA, 19 nt, Homo sapiens
  misc_RNA (1)...(19): siRNA sense strand
gaaauugcaagagcugaau

SEQ ID NO: 1164006 - RNA, 19 nt, Homo sapiens
  misc_RNA (1)...(19): siRNA sense strand
agaggccgcuggucuugaa

SEQ ID NO: 1164007 - RNA, 19 nt, Homo sapiens
  misc_RNA (1)...(19): siRNA sense strand
gaagacccaauccagaugu

SEQ ID NO: 1164008 - RNA, 19 nt, Homo sapiens
  misc_RNA (1)...(19): siRNA sense strand
cuaaaggaacuggauauau

SEQ ID NO: 1164009 - RNA, 19 nt, Homo sapiens
  misc_RNA (1)...(19): siRNA sense strand
gcuguuacuuucccugaca

SEQ ID NO: 1164010 - RNA, 19 nt, Homo sapiens
  misc_RNA (1)...(19): siRNA sense strand
cgaccucucugcccguugu

SEQ ID NO: 1164011 - RNA, 19 nt, Homo sapiens
  misc_RNA (1)...(19): siRNA sense strand
aacaugacccuaucacaaa

SEQ ID NO: 1164012 - RNA, 19 nt, Homo sapiens
  misc_RNA (1)...(19): siRNA sense strand
gcaaagagugaucagaaac

SEQ ID NO: 1164013 - RNA, 19 nt, Homo sapiens
  misc_RNA (1)...(19): siRNA sense strand
uauagagcaugaaaucaag

SEQ ID NO: 1164014 - RNA, 19 nt, Homo sapiens
  misc_RNA (1)...(19): siRNA sense strand
acagcugucugaaggaaga

SEQ ID NO: 1164015 - RNA, 19 nt, Homo sapiens
  misc_RNA (1)...(19): siRNA sense strand
cagagccaauggaacuuga

SEQ ID NO: 1164016 - RNA, 19 nt, Homo sapiens
  misc_RNA (1)...(19): siRNA sense strand
ugaucaauauagucgcuuu

SEQ ID NO: 1164017 - RNA, 19 nt, Homo sapiens
  misc_RNA (1)...(19): siRNA sense strand
gcuggaugaucaauauagu

SEQ ID NO: 1164018 - RNA, 19 nt, Homo sapiens
  misc_RNA (1)...(19): siRNA sense strand
gauugaaagcauccuagaa

SEQ ID NO: 1164019 - RNA, 19 nt, Homo sapiens
  misc_RNA (1)...(19): siRNA sense strand
ugauaaagaugugaaugag

SEQ ID NO: 1164020 - RNA, 19 nt, Homo sapiens
  misc_RNA (1)...(19): siRNA sense strand
ccaagaauauggagauuaa

SEQ ID NO: 1164021 - RNA, 19 nt, Homo sapiens
  misc_RNA (1)...(19): siRNA sense strand
gaauggcuuugacuacuua

SEQ ID NO: 1164022 - RNA, 19 nt, Homo sapiens
  misc_RNA (1)...(19): siRNA sense strand
gcacccaccuuuaccagua

SEQ ID NO: 1164023 - RNA, 19 nt, Homo sapiens
  misc_RNA (1)...(19): siRNA sense strand
gggaaauggugauggauaa

SEQ ID NO: 1164024 - RNA, 19 nt, Homo sapiens
  misc_RNA (1)...(19): siRNA sense strand
gcacauggccacucugaaa

SEQ ID NO: 1164025 - RNA, 19 nt, Homo sapiens
  misc_RNA (1)...(19): siRNA sense strand
gcagagaucuauuaaugag

SEQ ID NO: 1164026 - RNA, 19 nt, Homo sapiens
  misc_RNA (1)...(19): siRNA sense strand
uugcagagaucuauuaaug

SEQ ID NO: 1164027 - RNA, 19 nt, Homo sapiens
  misc_RNA (1)...(19): siRNA sense strand
gccagagucuccagaauuc

SEQ ID NO: 1164028 - RNA, 19 nt, Homo sapiens
  misc_RNA (1)...(19): siRNA sense strand
ccaauguacucacgggauu

SEQ ID NO: 1164029 - RNA, 19 nt, Homo sapiens
  misc_RNA (1)...(19): siRNA sense strand
gggaugcccugguaaucaa

SEQ ID NO: 1164030 - RNA, 19 nt, Homo sapiens
  misc_RNA (1)...(19): siRNA sense strand
ggaagaaaugucaaauaug

SEQ ID NO: 1164031 - RNA, 19 nt, Homo sapiens
  misc_RNA (1)...(19): siRNA sense strand
cagcuaagccucuggaaau

SEQ ID NO: 1164032 - RNA, 19 nt, Homo sapiens
  misc_RNA (1)...(19): siRNA sense strand
gagaauggcuuugacuacu

SEQ ID NO: 1164033 - RNA, 19 nt, Homo sapiens
  misc_RNA (1)...(19): siRNA sense strand
gaguugcagagaucuauua

SEQ ID NO: 1164034 - RNA, 19 nt, Homo sapiens
  misc_RNA (1)...(19): siRNA sense strand
gaaauggugauggauaaga

SEQ ID NO: 1164035 - RNA, 19 nt, Homo sapiens
  misc_RNA (1)...(19): siRNA sense strand
aaacagaagggaaugaaga

SEQ ID NO: 1164036 - RNA, 19 nt, Homo sapiens
  misc_RNA (1)...(19): siRNA sense strand
gcaccacccuccagaacca

SEQ ID NO: 1164037 - RNA, 19 nt, Homo sapiens
  misc_RNA (1)...(19): siRNA sense strand
gaggaggaguugcagagau

SEQ ID NO: 1164038 - RNA, 19 nt, Homo sapiens
  misc_RNA (1)...(19): siRNA sense strand
uuuccucgcuacuguguua

SEQ ID NO: 1164039 - RNA, 19 nt, Homo sapiens
  misc_RNA (1)...(19): siRNA sense strand
aaauggugauggauaagaa

SEQ ID NO: 1164040 - RNA, 19 nt, Homo sapiens
  misc_RNA (1)...(19): siRNA sense strand
uguguuaguuggaugguuu

SEQ ID NO: 1164041 - RNA, 19 nt, Homo sapiens
  misc_RNA (1)...(19): siRNA sense strand
ggcuuugacuacuuacuaa

SEQ ID NO: 1164042 - RNA, 19 nt, Homo sapiens
  misc_RNA (1)...(19): siRNA sense strand
gaucauaugaaucccaaau

SEQ ID NO: 1164043 - RNA, 19 nt, Homo sapiens
  misc_RNA (1)...(19): siRNA sense strand
cggcaguucuucaauguuc

SEQ ID NO: 1164044 - RNA, 19 nt, Homo sapiens
  misc_RNA (1)...(19): siRNA sense strand
uuacaggcacccaccuuua

SEQ ID NO: 1164045 - RNA, 19 nt, Homo sapiens
  misc_RNA (1)...(19): siRNA sense strand
ggacacagaguauagaaaa

SEQ ID NO: 1164046 - RNA, 19 nt, Homo sapiens
  misc_RNA (1)...(19): siRNA sense strand
gauaagaaacacuuuaagc

SEQ ID NO: 1164047 - RNA, 19 nt, Homo sapiens
  misc_RNA (1)...(19): siRNA sense strand
uaaaguaaaggacuacauc

SEQ ID NO: 1164048 - RNA, 19 nt, Homo sapiens
  misc_RNA (1)...(19): siRNA sense strand
ucauaugaaucccaaaugg

SEQ ID NO: 1164049 - RNA, 19 nt, Homo sapiens
  misc_RNA (1)...(19): siRNA sense strand
aaaaugggaugcccuggua

SEQ ID NO: 1164050 - RNA, 19 nt, Homo sapiens
  misc_RNA (1)...(19): siRNA sense strand
gccaagaauauggagauua

SEQ ID NO: 1164051 - RNA, 19 nt, Homo sapiens
  misc_RNA (1)...(19): siRNA sense strand
agaauggcuuugacuacuu

SEQ ID NO: 1164052 - RNA, 19 nt, Homo sapiens
  misc_RNA (1)...(19): siRNA sense strand
uuacuaacauacagugaca

SEQ ID NO: 1164053 - RNA, 19 nt, Homo sapiens
  misc_RNA (1)...(19): siRNA sense strand
ugaagcgguuggaagaaau

SEQ ID NO: 1164054 - RNA, 19 nt, Homo sapiens
  misc_RNA (1)...(19): siRNA sense strand
gguguuuccucgcuacugu

SEQ ID NO: 1164055 - RNA, 19 nt, Homo sapiens
  misc_RNA (1)...(19): siRNA sense strand
ggucagaucauaugaaucc

SEQ ID NO: 1164056 - RNA, 19 nt, Homo sapiens
  misc_RNA (1)...(19): siRNA sense strand
gguuagugguuccgagguu

SEQ ID NO: 1164057 - RNA, 19 nt, Homo sapiens
  misc_RNA (1)...(19): siRNA sense strand
uaugaaucccaaaugguua

SEQ ID NO: 1164058 - RNA, 19 nt, Homo sapiens
  misc_RNA (1)...(19): siRNA sense strand
aggacuacaucucagcuaa

SEQ ID NO: 1164059 - RNA, 19 nt, Homo sapiens
  misc_RNA (1)...(19): siRNA sense strand
ccucggcaguucuucaaug

SEQ ID NO: 1164060 - RNA, 19 nt, Homo sapiens
  misc_RNA (1)...(19): siRNA sense strand
uaacauacagugacaaucc

SEQ ID NO: 1164061 - RNA, 19 nt, Homo sapiens
  misc_RNA (1)...(19): siRNA sense strand
guacucacgggauuauguu

SEQ ID NO: 1164062 - RNA, 19 nt, Homo sapiens
  misc_RNA (1)...(19): siRNA sense strand
ccaaacagaagggaaugaa

SEQ ID NO: 1164063 - RNA, 19 nt, Homo sapiens
  misc_RNA (1)...(19): siRNA sense strand
ugagagggaugugguuagu

SEQ ID NO: 1164064 - RNA, 19 nt, Homo sapiens
  misc_RNA (1)...(19): siRNA sense strand
gcuaagccucuggaaauga

SEQ ID NO: 1164065 - RNA, 19 nt, Homo sapiens
  misc_RNA (1)...(19): siRNA sense strand
gcccugcucggauugagua

SEQ ID NO: 1164066 - RNA, 19 nt, Homo sapiens
  misc_RNA (1)...(19): siRNA sense strand
ggauaagaaacacuuuaag

SEQ ID NO: 1164067 - RNA, 19 nt, Homo sapiens
  misc_RNA (1)...(19): siRNA sense strand
acucugaaagccaagaaua

SEQ ID NO: 1164068 - RNA, 19 nt, Homo sapiens
  misc_RNA (1)...(19): siRNA sense strand
caauguacucacgggauua

SEQ ID NO: 1164069 - RNA, 19 nt, Homo sapiens
  misc_RNA (1)...(19): siRNA sense strand
gaagcgguuggaagaaaug

SEQ ID NO: 1164070 - RNA, 19 nt, Homo sapiens
  misc_RNA (1)...(19): siRNA sense strand
agaugaagcgguuggaaga

SEQ ID NO: 1164071 - RNA, 19 nt, Homo sapiens
  misc_RNA (1)...(19): siRNA sense strand
cuaagccucuggaaaugag

SEQ ID NO: 1164072 - RNA, 19 nt, Homo sapiens
  misc_RNA (1)...(19): siRNA sense strand
ugaaagccaagaauaugga

SEQ ID NO: 1164073 - RNA, 19 nt, Homo sapiens
  misc_RNA (1)...(19): siRNA sense strand
ugggaaauggugauggaua

SEQ ID NO: 1164074 - RNA, 19 nt, Homo sapiens
  misc_RNA (1)...(19): siRNA sense strand
ccaccagccaguccucuga

SEQ ID NO: 1164075 - RNA, 19 nt, Homo sapiens
  misc_RNA (1)...(19): siRNA sense strand
aguaaaggacuacaucuca

SEQ ID NO: 1164076 - RNA, 19 nt, Homo sapiens
  misc_RNA (1)...(19): siRNA sense strand
ggaguugcagagaucuauu

SEQ ID NO: 1164077 - RNA, 19 nt, Homo sapiens
  misc_RNA (1)...(19): siRNA sense strand
agggucagaucauaugaau

SEQ ID NO: 1164078 - RNA, 19 nt, Homo sapiens
  misc_RNA (1)...(19): siRNA sense strand
gaugaagcgguuggaagaa

SEQ ID NO: 1164079 - RNA, 19 nt, Homo sapiens
  misc_RNA (1)...(19): siRNA sense strand
acucacgggauuauguuua

SEQ ID NO: 1164080 - RNA, 19 nt, Homo sapiens
  misc_RNA (1)...(19): siRNA sense strand
augaagcgguuggaagaaa

SEQ ID NO: 1164081 - RNA, 19 nt, Homo sapiens
  misc_RNA (1)...(19): siRNA sense strand
gauggauaagaaacacuuu

SEQ ID NO: 1164082 - RNA, 19 nt, Homo sapiens
  misc_RNA (1)...(19): siRNA sense strand
ggacuacaucucagcuaag

SEQ ID NO: 1164083 - RNA, 19 nt, Homo sapiens
  misc_RNA (1)...(19): siRNA sense strand
cagauuuccuggagaagcu

SEQ ID NO: 1164084 - RNA, 19 nt, Homo sapiens
  misc_RNA (1)...(19): siRNA sense strand
ugccagagucuccagaauu

SEQ ID NO: 1164085 - RNA, 19 nt, Homo sapiens
  misc_RNA (1)...(19): siRNA sense strand
ggaggaggaguugcagaga

SEQ ID NO: 1164086 - RNA, 19 nt, Homo sapiens
  misc_RNA (1)...(19): siRNA sense strand
uuuggaaccuacacagaug

SEQ ID NO: 1164087 - RNA, 19 nt, Homo sapiens
  misc_RNA (1)...(19): siRNA sense strand
gcgguuggaagaaauguca

SEQ ID NO: 1164088 - RNA, 19 nt, Homo sapiens
  misc_RNA (1)...(19): siRNA sense strand
uggcuuugacuacuuacua

SEQ ID NO: 1164089 - RNA, 19 nt, Homo sapiens
  misc_RNA (1)...(19): siRNA sense strand
auaugaaucccaaaugguu

SEQ ID NO: 1164090 - RNA, 19 nt, Homo sapiens
  misc_RNA (1)...(19): siRNA sense strand
aggaggaguugcagagauc

SEQ ID NO: 1164091 - RNA, 19 nt, Homo sapiens
  misc_RNA (1)...(19): siRNA sense strand
gugccagagucuccagaau

SEQ ID NO: 1164092 - RNA, 19 nt, Homo sapiens
  misc_RNA (1)...(19): siRNA sense strand
cagcuggacacagaguaua

SEQ ID NO: 1164093 - RNA, 19 nt, Homo sapiens
  misc_RNA (1)...(19): siRNA sense strand
cucacgggauuauguuuau

SEQ ID NO: 1164094 - RNA, 19 nt, Homo sapiens
  misc_RNA (1)...(19): siRNA sense strand
gaggaguugcagagaucua

SEQ ID NO: 1164095 - RNA, 19 nt, Homo sapiens
  misc_RNA (1)...(19): siRNA sense strand
ucagcuaagccucuggaaa

SEQ ID NO: 1164096 - RNA, 19 nt, Homo sapiens
  misc_RNA (1)...(19): siRNA sense strand
ucugaaagccaagaauaug

SEQ ID NO: 1164097 - RNA, 19 nt, Homo sapiens
  misc_RNA (1)...(19): siRNA sense strand
gguaacccauuuuccuuau

SEQ ID NO: 1164098 - RNA, 19 nt, Homo sapiens
  misc_RNA (1)...(19): siRNA sense strand
gagguucuucacuggguaa

SEQ ID NO: 1164099 - RNA, 19 nt, Homo sapiens
  misc_RNA (1)...(19): siRNA sense strand
ugugacaccucggcaguuc

SEQ ID NO: 1164100 - RNA, 19 nt, Homo sapiens
  misc_RNA (1)...(19): siRNA sense strand
ccucugagcgaaagaacga

SEQ ID NO: 1164101 - RNA, 19 nt, Homo sapiens
  misc_RNA (1)...(19): siRNA sense strand
gcuacuguguuaguuggau

SEQ ID NO: 1164102 - RNA, 19 nt, Homo sapiens
  misc_RNA (1)...(19): siRNA sense strand
ucacgggauuauguuuaug

SEQ ID NO: 1164103 - RNA, 19 nt, Homo sapiens
  misc_RNA (1)...(19): siRNA sense strand
gacuacaucucagcuaagc

SEQ ID NO: 1164104 - RNA, 19 nt, Homo sapiens
  misc_RNA (1)...(19): siRNA sense strand
uauguucggcgguauagug

SEQ ID NO: 1164105 - RNA, 19 nt, Homo sapiens
  misc_RNA (1)...(19): siRNA sense strand
ugacaccucggcaguucuu

SEQ ID NO: 1164106 - RNA, 19 nt, Homo sapiens
  misc_RNA (1)...(19): siRNA sense strand
gguuggaagaaaugucaaa

SEQ ID NO: 1164107 - RNA, 19 nt, Homo sapiens
  misc_RNA (1)...(19): siRNA sense strand
gauccaggaggaggaguug

SEQ ID NO: 1164108 - RNA, 19 nt, Homo sapiens
  misc_RNA (1)...(19): siRNA sense strand
ugagaauggcuuugacuac

SEQ ID NO: 1164109 - RNA, 19 nt, Homo sapiens
  misc_RNA (1)...(19): siRNA sense strand
caaacagaagggaaugaag

SEQ ID NO: 1164110 - RNA, 19 nt, Homo sapiens
  misc_RNA (1)...(19): siRNA sense strand
cgucagggucagaucauau

SEQ ID NO: 1164111 - RNA, 19 nt, Homo sapiens
  misc_RNA (1)...(19): siRNA sense strand
ggaaauggugauggauaag

SEQ ID NO: 1164112 - RNA, 19 nt, Homo sapiens
  misc_RNA (1)...(19): siRNA sense strand
ccaagaauauggagauuaa

SEQ ID NO: 1164113 - RNA, 19 nt, Homo sapiens
  misc_RNA (1)...(19): siRNA sense strand
gaauggcuuugacuacuua

SEQ ID NO: 1164114 - RNA, 19 nt, Homo sapiens
  misc_RNA (1)...(19): siRNA sense strand
gcacccaccuuuaccagua

SEQ ID NO: 1164115 - RNA, 19 nt, Homo sapiens
  misc_RNA (1)...(19): siRNA sense strand
gggaaauggugauggauaa

SEQ ID NO: 1164116 - RNA, 19 nt, Homo sapiens
  misc_RNA (1)...(19): siRNA sense strand
gcacauggccacucugaaa

SEQ ID NO: 1164117 - RNA, 19 nt, Homo sapiens
  misc_RNA (1)...(19): siRNA sense strand
gcagagaucuauuaaugag

SEQ ID NO: 1164118 - RNA, 19 nt, Homo sapiens
  misc_RNA (1)...(19): siRNA sense strand
uugcagagaucuauuaaug

SEQ ID NO: 1164119 - RNA, 19 nt, Homo sapiens
  misc_RNA (1)...(19): siRNA sense strand
gccagagucuccagaauuc

SEQ ID NO: 1164120 - RNA, 19 nt, Homo sapiens
  misc_RNA (1)...(19): siRNA sense strand
ccaauguacucacgggauu

SEQ ID NO: 1164121 - RNA, 19 nt, Homo sapiens
  misc_RNA (1)...(19): siRNA sense strand
gggaugcccugguaaucaa

SEQ ID NO: 1164122 - RNA, 19 nt, Homo sapiens
  misc_RNA (1)...(19): siRNA sense strand
ggaagaaaugucaaauaug

SEQ ID NO: 1164123 - RNA, 19 nt, Homo sapiens
  misc_RNA (1)...(19): siRNA sense strand
cagcuaagccucuggaaau

SEQ ID NO: 1164124 - RNA, 19 nt, Homo sapiens
  misc_RNA (1)...(19): siRNA sense strand
gagaauggcuuugacuacu

SEQ ID NO: 1164125 - RNA, 19 nt, Homo sapiens
  misc_RNA (1)...(19): siRNA sense strand
gaguugcagagaucuauua

SEQ ID NO: 1164126 - RNA, 19 nt, Homo sapiens
  misc_RNA (1)...(19): siRNA sense strand
gaaauggugauggauaaga

SEQ ID NO: 1164127 - RNA, 19 nt, Homo sapiens
  misc_RNA (1)...(19): siRNA sense strand
aaacagaagggaaugaaga

SEQ ID NO: 1164128 - RNA, 19 nt, Homo sapiens
  misc_RNA (1)...(19): siRNA sense strand
gcaccacccuccagaacca

SEQ ID NO: 1164129 - RNA, 19 nt, Homo sapiens
  misc_RNA (1)...(19): siRNA sense strand
gaggaggaguugcagagau

SEQ ID NO: 1164130 - RNA, 19 nt, Homo sapiens
  misc_RNA (1)...(19): siRNA sense strand
uuuccucgcuacuguguua

SEQ ID NO: 1164131 - RNA, 19 nt, Homo sapiens
  misc_RNA (1)...(19): siRNA sense strand
aaauggugauggauaagaa

SEQ ID NO: 1164132 - RNA, 19 nt, Homo sapiens
  misc_RNA (1)...(19): siRNA sense strand
uguguuaguuggaugguuu

SEQ ID NO: 1164133 - RNA, 19 nt, Homo sapiens
  misc_RNA (1)...(19): siRNA sense strand
ggcuuugacuacuuacuaa

SEQ ID NO: 1164134 - RNA, 19 nt, Homo sapiens
  misc_RNA (1)...(19): siRNA sense strand
gaucauaugaaucccaaau

SEQ ID NO: 1164135 - RNA, 19 nt, Homo sapiens
  misc_RNA (1)...(19): siRNA sense strand
cggcaguucuucaauguuc

SEQ ID NO: 1164136 - RNA, 19 nt, Homo sapiens
  misc_RNA (1)...(19): siRNA sense strand
uuacaggcacccaccuuua

SEQ ID NO: 1164137 - RNA, 19 nt, Homo sapiens
  misc_RNA (1)...(19): siRNA sense strand
ggacacagaguauagaaaa

SEQ ID NO: 1164138 - RNA, 19 nt, Homo sapiens
  misc_RNA (1)...(19): siRNA sense strand
gauaagaaacacuuuaagc

SEQ ID NO: 1164139 - RNA, 19 nt, Homo sapiens
  misc_RNA (1)...(19): siRNA sense strand
uaaaguaaaggacuacauc

SEQ ID NO: 1164140 - RNA, 19 nt, Homo sapiens
  misc_RNA (1)...(19): siRNA sense strand
ucauaugaaucccaaaugg

SEQ ID NO: 1164141 - RNA, 19 nt, Homo sapiens
  misc_RNA (1)...(19): siRNA sense strand
aaaaugggaugcccuggua

SEQ ID NO: 1164142 - RNA, 19 nt, Homo sapiens
  misc_RNA (1)...(19): siRNA sense strand
gccaagaauauggagauua

SEQ ID NO: 1164143 - RNA, 19 nt, Homo sapiens
  misc_RNA (1)...(19): siRNA sense strand
agaauggcuuugacuacuu

SEQ ID NO: 1164144 - RNA, 19 nt, Homo sapiens
  misc_RNA (1)...(19): siRNA sense strand
uuacuaacauacagugaca

SEQ ID NO: 1164145 - RNA, 19 nt, Homo sapiens
  misc_RNA (1)...(19): siRNA sense strand
ugaagcgguuggaagaaau

SEQ ID NO: 1164146 - RNA, 19 nt, Homo sapiens
  misc_RNA (1)...(19): siRNA sense strand
gguguuuccucgcuacugu

SEQ ID NO: 1164147 - RNA, 19 nt, Homo sapiens
  misc_RNA (1)...(19): siRNA sense strand
ggucagaucauaugaaucc

SEQ ID NO: 1164148 - RNA, 19 nt, Homo sapiens
  misc_RNA (1)...(19): siRNA sense strand
gguuagugguuccgagguu

SEQ ID NO: 1164149 - RNA, 19 nt, Homo sapiens
  misc_RNA (1)...(19): siRNA sense strand
uaugaaucccaaaugguua

SEQ ID NO: 1164150 - RNA, 19 nt, Homo sapiens
  misc_RNA (1)...(19): siRNA sense strand
aggacuacaucucagcuaa

SEQ ID NO: 1164151 - RNA, 19 nt, Homo sapiens
  misc_RNA (1)...(19): siRNA sense strand
ccucggcaguucuucaaug

SEQ ID NO: 1164152 - RNA, 19 nt, Homo sapiens
  misc_RNA (1)...(19): siRNA sense strand
uaacauacagugacaaucc

SEQ ID NO: 1164153 - RNA, 19 nt, Homo sapiens
  misc_RNA (1)...(19): siRNA sense strand
guacucacgggauuauguu

SEQ ID NO: 1164154 - RNA, 19 nt, Homo sapiens
  misc_RNA (1)...(19): siRNA sense strand
ccaaacagaagggaaugaa

SEQ ID NO: 1164155 - RNA, 19 nt, Homo sapiens
  misc_RNA (1)...(19): siRNA sense strand
ugagagggaugugguuagu

SEQ ID NO: 1164156 - RNA, 19 nt, Homo sapiens
  misc_RNA (1)...(19): siRNA sense strand
gcuaagccucuggaaauga

SEQ ID NO: 1164157 - RNA, 19 nt, Homo sapiens
  misc_RNA (1)...(19): siRNA sense strand
gcccugcucggauugagua

SEQ ID NO: 1164158 - RNA, 19 nt, Homo sapiens
  misc_RNA (1)...(19): siRNA sense strand
ggauaagaaacacuuuaag

SEQ ID NO: 1164159 - RNA, 19 nt, Homo sapiens
  misc_RNA (1)...(19): siRNA sense strand
acucugaaagccaagaaua

SEQ ID NO: 1164160 - RNA, 19 nt, Homo sapiens
  misc_RNA (1)...(19): siRNA sense strand
caauguacucacgggauua

SEQ ID NO: 1164161 - RNA, 19 nt, Homo sapiens
  misc_RNA (1)...(19): siRNA sense strand
gaagcgguuggaagaaaug

SEQ ID NO: 1164162 - RNA, 19 nt, Homo sapiens
  misc_RNA (1)...(19): siRNA sense strand
agaugaagcgguuggaaga

SEQ ID NO: 1164163 - RNA, 19 nt, Homo sapiens
  misc_RNA (1)...(19): siRNA sense strand
cuaagccucuggaaaugag

SEQ ID NO: 1164164 - RNA, 19 nt, Homo sapiens
  misc_RNA (1)...(19): siRNA sense strand
ugaaagccaagaauaugga

SEQ ID NO: 1164165 - RNA, 19 nt, Homo sapiens
  misc_RNA (1)...(19): siRNA sense strand
ugggaaauggugauggaua

SEQ ID NO: 1164166 - RNA, 19 nt, Homo sapiens
  misc_RNA (1)...(19): siRNA sense strand
ccaccagccaguccucuga

SEQ ID NO: 1164167 - RNA, 19 nt, Homo sapiens
  misc_RNA (1)...(19): siRNA sense strand
aguaaaggacuacaucuca

SEQ ID NO: 1164168 - RNA, 19 nt, Homo sapiens
  misc_RNA (1)...(19): siRNA sense strand
ggaguugcagagaucuauu

SEQ ID NO: 1164169 - RNA, 19 nt, Homo sapiens
  misc_RNA (1)...(19): siRNA sense strand
agggucagaucauaugaau

SEQ ID NO: 1164170 - RNA, 19 nt, Homo sapiens
  misc_RNA (1)...(19): siRNA sense strand
gaugaagcgguuggaagaa

SEQ ID NO: 1164171 - RNA, 19 nt, Homo sapiens
  misc_RNA (1)...(19): siRNA sense strand
acucacgggauuauguuua

SEQ ID NO: 1164172 - RNA, 19 nt, Homo sapiens
  misc_RNA (1)...(19): siRNA sense strand
augaagcgguuggaagaaa

SEQ ID NO: 1164173 - RNA, 19 nt, Homo sapiens
  misc_RNA (1)...(19): siRNA sense strand
gauggauaagaaacacuuu

SEQ ID NO: 1164174 - RNA, 19 nt, Homo sapiens
  misc_RNA (1)...(19): siRNA sense strand
ggacuacaucucagcuaag

SEQ ID NO: 1164175 - RNA, 19 nt, Homo sapiens
  misc_RNA (1)...(19): siRNA sense strand
cagauuuccuggagaagcu

SEQ ID NO: 1164176 - RNA, 19 nt, Homo sapiens
  misc_RNA (1)...(19): siRNA sense strand
ugccagagucuccagaauu

SEQ ID NO: 1164177 - RNA, 19 nt, Homo sapiens
  misc_RNA (1)...(19): siRNA sense strand
ggaggaggaguugcagaga

SEQ ID NO: 1164178 - RNA, 19 nt, Homo sapiens
  misc_RNA (1)...(19): siRNA sense strand
uuuggaaccuacacagaug

SEQ ID NO: 1164179 - RNA, 19 nt, Homo sapiens
  misc_RNA (1)...(19): siRNA sense strand
gcgguuggaagaaauguca

SEQ ID NO: 1164180 - RNA, 19 nt, Homo sapiens
  misc_RNA (1)...(19): siRNA sense strand
uggcuuugacuacuuacua

SEQ ID NO: 1164181 - RNA, 19 nt, Homo sapiens
  misc_RNA (1)...(19): siRNA sense strand
auaugaaucccaaaugguu

SEQ ID NO: 1164182 - RNA, 19 nt, Homo sapiens
  misc_RNA (1)...(19): siRNA sense strand
aggaggaguugcagagauc

SEQ ID NO: 1164183 - RNA, 19 nt, Homo sapiens
  misc_RNA (1)...(19): siRNA sense strand
gugccagagucuccagaau

SEQ ID NO: 1164184 - RNA, 19 nt, Homo sapiens
  misc_RNA (1)...(19): siRNA sense strand
cagcuggacacagaguaua

SEQ ID NO: 1164185 - RNA, 19 nt, Homo sapiens
  misc_RNA (1)...(19): siRNA sense strand
cucacgggauuauguuuau

SEQ ID NO: 1164186 - RNA, 19 nt, Homo sapiens
  misc_RNA (1)...(19): siRNA sense strand
gaggaguugcagagaucua

SEQ ID NO: 1164187 - RNA, 19 nt, Homo sapiens
  misc_RNA (1)...(19): siRNA sense strand
ucagcuaagccucuggaaa

SEQ ID NO: 1164188 - RNA, 19 nt, Homo sapiens
  misc_RNA (1)...(19): siRNA sense strand
ucugaaagccaagaauaug

SEQ ID NO: 1164189 - RNA, 19 nt, Homo sapiens
  misc_RNA (1)...(19): siRNA sense strand
gguaacccauuuuccuuau

SEQ ID NO: 1164190 - RNA, 19 nt, Homo sapiens
  misc_RNA (1)...(19): siRNA sense strand
gagguucuucacuggguaa

SEQ ID NO: 1164191 - RNA, 19 nt, Homo sapiens
  misc_RNA (1)...(19): siRNA sense strand
ugugacaccucggcaguuc

SEQ ID NO: 1164192 - RNA, 19 nt, Homo sapiens
  misc_RNA (1)...(19): siRNA sense strand
ccucugagcgaaagaacga

SEQ ID NO: 1164193 - RNA, 19 nt, Homo sapiens
  misc_RNA (1)...(19): siRNA sense strand
gcuacuguguuaguuggau

SEQ ID NO: 1164194 - RNA, 19 nt, Homo sapiens
  misc_RNA (1)...(19): siRNA sense strand
ucacgggauuauguuuaug

SEQ ID NO: 1164195 - RNA, 19 nt, Homo sapiens
  misc_RNA (1)...(19): siRNA sense strand
gacuacaucucagcuaagc

SEQ ID NO: 1164196 - RNA, 19 nt, Homo sapiens
  misc_RNA (1)...(19): siRNA sense strand
uauguucggcgguauagug

SEQ ID NO: 1164197 - RNA, 19 nt, Homo sapiens
  misc_RNA (1)...(19): siRNA sense strand
ugacaccucggcaguucuu

SEQ ID NO: 1164198 - RNA, 19 nt, Homo sapiens
  misc_RNA (1)...(19): siRNA sense strand
gguuggaagaaaugucaaa

SEQ ID NO: 1164199 - RNA, 19 nt, Homo sapiens
  misc_RNA (1)...(19): siRNA sense strand
gauccaggaggaggaguug

SEQ ID NO: 1164200 - RNA, 19 nt, Homo sapiens
  misc_RNA (1)...(19): siRNA sense strand
ugagaauggcuuugacuac

SEQ ID NO: 1164201 - RNA, 19 nt, Homo sapiens
  misc_RNA (1)...(19): siRNA sense strand
caaacagaagggaaugaag

SEQ ID NO: 1164202 - RNA, 19 nt, Homo sapiens
  misc_RNA (1)...(19): siRNA sense strand
cgucagggucagaucauau

SEQ ID NO: 1164203 - RNA, 19 nt, Homo sapiens
  misc_RNA (1)...(19): siRNA sense strand
ggaaauggugauggauaag

SEQ ID NO: 1164204 - RNA, 19 nt, Homo sapiens
  misc_RNA (1)...(19): siRNA sense strand
ccaagaauauggagauuaa

SEQ ID NO: 1164205 - RNA, 19 nt, Homo sapiens
  misc_RNA (1)...(19): siRNA sense strand
gaauggcuuugacuacuua

SEQ ID NO: 1164206 - RNA, 19 nt, Homo sapiens
  misc_RNA (1)...(19): siRNA sense strand
gcacccaccuuuaccagua

SEQ ID NO: 1164207 - RNA, 19 nt, Homo sapiens
  misc_RNA (1)...(19): siRNA sense strand
gggaaauggugauggauaa

SEQ ID NO: 1164208 - RNA, 19 nt, Homo sapiens
  misc_RNA (1)...(19): siRNA sense strand
gcacauggccacucugaaa

SEQ ID NO: 1164209 - RNA, 19 nt, Homo sapiens
  misc_RNA (1)...(19): siRNA sense strand
gcagagaucuauuaaugag

SEQ ID NO: 1164210 - RNA, 19 nt, Homo sapiens
  misc_RNA (1)...(19): siRNA sense strand
uugcagagaucuauuaaug

SEQ ID NO: 1164211 - RNA, 19 nt, Homo sapiens
  misc_RNA (1)...(19): siRNA sense strand
gccagagucuccagaauuc

SEQ ID NO: 1164212 - RNA, 19 nt, Homo sapiens
  misc_RNA (1)...(19): siRNA sense strand
ccaauguacucacgggauu

SEQ ID NO: 1164213 - RNA, 19 nt, Homo sapiens
  misc_RNA (1)...(19): siRNA sense strand
gggaugcccugguaaucaa

SEQ ID NO: 1164214 - RNA, 19 nt, Homo sapiens
  misc_RNA (1)...(19): siRNA sense strand
ggaagaaaugucaaauaug

SEQ ID NO: 1164215 - RNA, 19 nt, Homo sapiens
  misc_RNA (1)...(19): siRNA sense strand
cagcuaagccucuggaaau

SEQ ID NO: 1164216 - RNA, 19 nt, Homo sapiens
  misc_RNA (1)...(19): siRNA sense strand
gagaauggcuuugacuacu

SEQ ID NO: 1164217 - RNA, 19 nt, Homo sapiens
  misc_RNA (1)...(19): siRNA sense strand
gaguugcagagaucuauua

SEQ ID NO: 1164218 - RNA, 19 nt, Homo sapiens
  misc_RNA (1)...(19): siRNA sense strand
gaaauggugauggauaaga

SEQ ID NO: 1164219 - RNA, 19 nt, Homo sapiens
  misc_RNA (1)...(19): siRNA sense strand
aaacagaagggaaugaaga

SEQ ID NO: 1164220 - RNA, 19 nt, Homo sapiens
  misc_RNA (1)...(19): siRNA sense strand
gcaccacccuccagaacca

SEQ ID NO: 1164221 - RNA, 19 nt, Homo sapiens
  misc_RNA (1)...(19): siRNA sense strand
gaggaggaguugcagagau

SEQ ID NO: 1164222 - RNA, 19 nt, Homo sapiens
  misc_RNA (1)...(19): siRNA sense strand
uuuccucgcuacuguguua

SEQ ID NO: 1164223 - RNA, 19 nt, Homo sapiens
  misc_RNA (1)...(19): siRNA sense strand
aaauggugauggauaagaa

SEQ ID NO: 1164224 - RNA, 19 nt, Homo sapiens
  misc_RNA (1)...(19): siRNA sense strand
uguguuaguuggaugguuu

SEQ ID NO: 1164225 - RNA, 19 nt, Homo sapiens
  misc_RNA (1)...(19): siRNA sense strand
ggcuuugacuacuuacuaa

SEQ ID NO: 1164226 - RNA, 19 nt, Homo sapiens
  misc_RNA (1)...(19): siRNA sense strand
gaucauaugaaucccaaau

SEQ ID NO: 1164227 - RNA, 19 nt, Homo sapiens
  misc_RNA (1)...(19): siRNA sense strand
cggcaguucuucaauguuc

SEQ ID NO: 1164228 - RNA, 19 nt, Homo sapiens
  misc_RNA (1)...(19): siRNA sense strand
uuacaggcacccaccuuua

SEQ ID NO: 1164229 - RNA, 19 nt, Homo sapiens
  misc_RNA (1)...(19): siRNA sense strand
ggacacagaguauagaaaa

SEQ ID NO: 1164230 - RNA, 19 nt, Homo sapiens
  misc_RNA (1)...(19): siRNA sense strand
gauaagaaacacuuuaagc

SEQ ID NO: 1164231 - RNA, 19 nt, Homo sapiens
  misc_RNA (1)...(19): siRNA sense strand
uaaaguaaaggacuacauc

SEQ ID NO: 1164232 - RNA, 19 nt, Homo sapiens
  misc_RNA (1)...(19): siRNA sense strand
ucauaugaaucccaaaugg

SEQ ID NO: 1164233 - RNA, 19 nt, Homo sapiens
  misc_RNA (1)...(19): siRNA sense strand
aaaaugggaugcccuggua

SEQ ID NO: 1164234 - RNA, 19 nt, Homo sapiens
  misc_RNA (1)...(19): siRNA sense strand
gccaagaauauggagauua

SEQ ID NO: 1164235 - RNA, 19 nt, Homo sapiens
  misc_RNA (1)...(19): siRNA sense strand
agaauggcuuugacuacuu

SEQ ID NO: 1164236 - RNA, 19 nt, Homo sapiens
  misc_RNA (1)...(19): siRNA sense strand
uuacuaacauacagugaca

SEQ ID NO: 1164237 - RNA, 19 nt, Homo sapiens
  misc_RNA (1)...(19): siRNA sense strand
ugaagcgguuggaagaaau

SEQ ID NO: 1164238 - RNA, 19 nt, Homo sapiens
  misc_RNA (1)...(19): siRNA sense strand
gguguuuccucgcuacugu

SEQ ID NO: 1164239 - RNA, 19 nt, Homo sapiens
  misc_RNA (1)...(19): siRNA sense strand
ggucagaucauaugaaucc

SEQ ID NO: 1164240 - RNA, 19 nt, Homo sapiens
  misc_RNA (1)...(19): siRNA sense strand
gguuagugguuccgagguu

SEQ ID NO: 1164241 - RNA, 19 nt, Homo sapiens
  misc_RNA (1)...(19): siRNA sense strand
uaugaaucccaaaugguua

SEQ ID NO: 1164242 - RNA, 19 nt, Homo sapiens
  misc_RNA (1)...(19): siRNA sense strand
aggacuacaucucagcuaa

SEQ ID NO: 1164243 - RNA, 19 nt, Homo sapiens
  misc_RNA (1)...(19): siRNA sense strand
ccucggcaguucuucaaug

SEQ ID NO: 1164244 - RNA, 19 nt, Homo sapiens
  misc_RNA (1)...(19): siRNA sense strand
uaacauacagugacaaucc

SEQ ID NO: 1164245 - RNA, 19 nt, Homo sapiens
  misc_RNA (1)...(19): siRNA sense strand
guacucacgggauuauguu

SEQ ID NO: 1164246 - RNA, 19 nt, Homo sapiens
  misc_RNA (1)...(19): siRNA sense strand
ccaaacagaagggaaugaa

SEQ ID NO: 1164247 - RNA, 19 nt, Homo sapiens
  misc_RNA (1)...(19): siRNA sense strand
ugagagggaugugguuagu

SEQ ID NO: 1164248 - RNA, 19 nt, Homo sapiens
  misc_RNA (1)...(19): siRNA sense strand
gcuaagccucuggaaauga

SEQ ID NO: 1164249 - RNA, 19 nt, Homo sapiens
  misc_RNA (1)...(19): siRNA sense strand
gcccugcucggauugagua

SEQ ID NO: 1164250 - RNA, 19 nt, Homo sapiens
  misc_RNA (1)...(19): siRNA sense strand
ggauaagaaacacuuuaag

SEQ ID NO: 1164251 - RNA, 19 nt, Homo sapiens
  misc_RNA (1)...(19): siRNA sense strand
acucugaaagccaagaaua

SEQ ID NO: 1164252 - RNA, 19 nt, Homo sapiens
  misc_RNA (1)...(19): siRNA sense strand
caauguacucacgggauua

SEQ ID NO: 1164253 - RNA, 19 nt, Homo sapiens
  misc_RNA (1)...(19): siRNA sense strand
gaagcgguuggaagaaaug

SEQ ID NO: 1164254 - RNA, 19 nt, Homo sapiens
  misc_RNA (1)...(19): siRNA sense strand
agaugaagcgguuggaaga

SEQ ID NO: 1164255 - RNA, 19 nt, Homo sapiens
  misc_RNA (1)...(19): siRNA sense strand
cuaagccucuggaaaugag

SEQ ID NO: 1164256 - RNA, 19 nt, Homo sapiens
  misc_RNA (1)...(19): siRNA sense strand
ugaaagccaagaauaugga

SEQ ID NO: 1164257 - RNA, 19 nt, Homo sapiens
  misc_RNA (1)...(19): siRNA sense strand
ugggaaauggugauggaua

SEQ ID NO: 1164258 - RNA, 19 nt, Homo sapiens
  misc_RNA (1)...(19): siRNA sense strand
ccaccagccaguccucuga

SEQ ID NO: 1164259 - RNA, 19 nt, Homo sapiens
  misc_RNA (1)...(19): siRNA sense strand
aguaaaggacuacaucuca

SEQ ID NO: 1164260 - RNA, 19 nt, Homo sapiens
  misc_RNA (1)...(19): siRNA sense strand
ggaguugcagagaucuauu

SEQ ID NO: 1164261 - RNA, 19 nt, Homo sapiens
  misc_RNA (1)...(19): siRNA sense strand
agggucagaucauaugaau

SEQ ID NO: 1164262 - RNA, 19 nt, Homo sapiens
  misc_RNA (1)...(19): siRNA sense strand
gaugaagcgguuggaagaa

SEQ ID NO: 1164263 - RNA, 19 nt, Homo sapiens
  misc_RNA (1)...(19): siRNA sense strand
acucacgggauuauguuua

SEQ ID NO: 1164264 - RNA, 19 nt, Homo sapiens
  misc_RNA (1)...(19): siRNA sense strand
augaagcgguuggaagaaa

SEQ ID NO: 1164265 - RNA, 19 nt, Homo sapiens
  misc_RNA (1)...(19): siRNA sense strand
gauggauaagaaacacuuu

SEQ ID NO: 1164266 - RNA, 19 nt, Homo sapiens
  misc_RNA (1)...(19): siRNA sense strand
ggacuacaucucagcuaag

SEQ ID NO: 1164267 - RNA, 19 nt, Homo sapiens
  misc_RNA (1)...(19): siRNA sense strand
cagauuuccuggagaagcu

SEQ ID NO: 1164268 - RNA, 19 nt, Homo sapiens
  misc_RNA (1)...(19): siRNA sense strand
ugccagagucuccagaauu

SEQ ID NO: 1164269 - RNA, 19 nt, Homo sapiens
  misc_RNA (1)...(19): siRNA sense strand
ggaggaggaguugcagaga

SEQ ID NO: 1164270 - RNA, 19 nt, Homo sapiens
  misc_RNA (1)...(19): siRNA sense strand
uuuggaaccuacacagaug

SEQ ID NO: 1164271 - RNA, 19 nt, Homo sapiens
  misc_RNA (1)...(19): siRNA sense strand
gcgguuggaagaaauguca

SEQ ID NO: 1164272 - RNA, 19 nt, Homo sapiens
  misc_RNA (1)...(19): siRNA sense strand
uggcuuugacuacuuacua

SEQ ID NO: 1164273 - RNA, 19 nt, Homo sapiens
  misc_RNA (1)...(19): siRNA sense strand
auaugaaucccaaaugguu

SEQ ID NO: 1164274 - RNA, 19 nt, Homo sapiens
  misc_RNA (1)...(19): siRNA sense strand
aggaggaguugcagagauc

SEQ ID NO: 1164275 - RNA, 19 nt, Homo sapiens
  misc_RNA (1)...(19): siRNA sense strand
gugccagagucuccagaau

SEQ ID NO: 1164276 - RNA, 19 nt, Homo sapiens
  misc_RNA (1)...(19): siRNA sense strand
cagcuggacacagaguaua

SEQ ID NO: 1164277 - RNA, 19 nt, Homo sapiens
  misc_RNA (1)...(19): siRNA sense strand
cucacgggauuauguuuau

SEQ ID NO: 1164278 - RNA, 19 nt, Homo sapiens
  misc_RNA (1)...(19): siRNA sense strand
gaggaguugcagagaucua

SEQ ID NO: 1164279 - RNA, 19 nt, Homo sapiens
  misc_RNA (1)...(19): siRNA sense strand
ucagcuaagccucuggaaa

SEQ ID NO: 1164280 - RNA, 19 nt, Homo sapiens
  misc_RNA (1)...(19): siRNA sense strand
ucugaaagccaagaauaug

SEQ ID NO: 1164281 - RNA, 19 nt, Homo sapiens
  misc_RNA (1)...(19): siRNA sense strand
gguaacccauuuuccuuau

SEQ ID NO: 1164282 - RNA, 19 nt, Homo sapiens
  misc_RNA (1)...(19): siRNA sense strand
gagguucuucacuggguaa

SEQ ID NO: 1164283 - RNA, 19 nt, Homo sapiens
  misc_RNA (1)...(19): siRNA sense strand
ugugacaccucggcaguuc

SEQ ID NO: 1164284 - RNA, 19 nt, Homo sapiens
  misc_RNA (1)...(19): siRNA sense strand
ccucugagcgaaagaacga

SEQ ID NO: 1164285 - RNA, 19 nt, Homo sapiens
  misc_RNA (1)...(19): siRNA sense strand
gcuacuguguuaguuggau

SEQ ID NO: 1164286 - RNA, 19 nt, Homo sapiens
  misc_RNA (1)...(19): siRNA sense strand
ucacgggauuauguuuaug

SEQ ID NO: 1164287 - RNA, 19 nt, Homo sapiens
  misc_RNA (1)...(19): siRNA sense strand
gacuacaucucagcuaagc

SEQ ID NO: 1164288 - RNA, 19 nt, Homo sapiens
  misc_RNA (1)...(19): siRNA sense strand
uauguucggcgguauagug

SEQ ID NO: 1164289 - RNA, 19 nt, Homo sapiens
  misc_RNA (1)...(19): siRNA sense strand
ugacaccucggcaguucuu

SEQ ID NO: 1164290 - RNA, 19 nt, Homo sapiens
  misc_RNA (1)...(19): siRNA sense strand
gguuggaagaaaugucaaa

SEQ ID NO: 1164291 - RNA, 19 nt, Homo sapiens
  misc_RNA (1)...(19): siRNA sense strand
gauccaggaggaggaguug

SEQ ID NO: 1164292 - RNA, 19 nt, Homo sapiens
  misc_RNA (1)...(19): siRNA sense strand
ugagaauggcuuugacuac

SEQ ID NO: 1164293 - RNA, 19 nt, Homo sapiens
  misc_RNA (1)...(19): siRNA sense strand
caaacagaagggaaugaag

SEQ ID NO: 1164294 - RNA, 19 nt, Homo sapiens
  misc_RNA (1)...(19): siRNA sense strand
cgucagggucagaucauau

SEQ ID NO: 1164295 - RNA, 19 nt, Homo sapiens
  misc_RNA (1)...(19): siRNA sense strand
ggaaauggugauggauaag

SEQ ID NO: 1164296 - RNA, 19 nt, Homo sapiens
  misc_RNA (1)...(19): siRNA sense strand
ccaagaauauggagauuaa

SEQ ID NO: 1164297 - RNA, 19 nt, Homo sapiens
  misc_RNA (1)...(19): siRNA sense strand
gaauggcuuugacuacuua

SEQ ID NO: 1164298 - RNA, 19 nt, Homo sapiens
  misc_RNA (1)...(19): siRNA sense strand
gcacccaccuuuaccagua

SEQ ID NO: 1164299 - RNA, 19 nt, Homo sapiens
  misc_RNA (1)...(19): siRNA sense strand
gggaaauggugauggauaa

SEQ ID NO: 1164300 - RNA, 19 nt, Homo sapiens
  misc_RNA (1)...(19): siRNA sense strand
gcacauggccacucugaaa

SEQ ID NO: 1164301 - RNA, 19 nt, Homo sapiens
  misc_RNA (1)...(19): siRNA sense strand
gcagagaucuauuaaugag

SEQ ID NO: 1164302 - RNA, 19 nt, Homo sapiens
  misc_RNA (1)...(19): siRNA sense strand
uugcagagaucuauuaaug

SEQ ID NO: 1164303 - RNA, 19 nt, Homo sapiens
  misc_RNA (1)...(19): siRNA sense strand
gccagagucuccagaauuc

SEQ ID NO: 1164304 - RNA, 19 nt, Homo sapiens
  misc_RNA (1)...(19): siRNA sense strand
ccaauguacucacgggauu

SEQ ID NO: 1164305 - RNA, 19 nt, Homo sapiens
  misc_RNA (1)...(19): siRNA sense strand
gggaugcccugguaaucaa

SEQ ID NO: 1164306 - RNA, 19 nt, Homo sapiens
  misc_RNA (1)...(19): siRNA sense strand
ggaagaaaugucaaauaug

SEQ ID NO: 1164307 - RNA, 19 nt, Homo sapiens
  misc_RNA (1)...(19): siRNA sense strand
cagcuaagccucuggaaau

SEQ ID NO: 1164308 - RNA, 19 nt, Homo sapiens
  misc_RNA (1)...(19): siRNA sense strand
gagaauggcuuugacuacu

SEQ ID NO: 1164309 - RNA, 19 nt, Homo sapiens
  misc_RNA (1)...(19): siRNA sense strand
gaguugcagagaucuauua

SEQ ID NO: 1164310 - RNA, 19 nt, Homo sapiens
  misc_RNA (1)...(19): siRNA sense strand
gaaauggugauggauaaga

SEQ ID NO: 1164311 - RNA, 19 nt, Homo sapiens
  misc_RNA (1)...(19): siRNA sense strand
aaacagaagggaaugaaga

SEQ ID NO: 1164312 - RNA, 19 nt, Homo sapiens
  misc_RNA (1)...(19): siRNA sense strand
gcaccacccuccagaacca

SEQ ID NO: 1164313 - RNA, 19 nt, Homo sapiens
  misc_RNA (1)...(19): siRNA sense strand
gaggaggaguugcagagau

SEQ ID NO: 1164314 - RNA, 19 nt, Homo sapiens
  misc_RNA (1)...(19): siRNA sense strand
uuuccucgcuacuguguua

SEQ ID NO: 1164315 - RNA, 19 nt, Homo sapiens
  misc_RNA (1)...(19): siRNA sense strand
aaauggugauggauaagaa

SEQ ID NO: 1164316 - RNA, 19 nt, Homo sapiens
  misc_RNA (1)...(19): siRNA sense strand
uguguuaguuggaugguuu

SEQ ID NO: 1164317 - RNA, 19 nt, Homo sapiens
  misc_RNA (1)...(19): siRNA sense strand
ggcuuugacuacuuacuaa

SEQ ID NO: 1164318 - RNA, 19 nt, Homo sapiens
  misc_RNA (1)...(19): siRNA sense strand
gaucauaugaaucccaaau

SEQ ID NO: 1164319 - RNA, 19 nt, Homo sapiens
  misc_RNA (1)...(19): siRNA sense strand
cggcaguucuucaauguuc

SEQ ID NO: 1164320 - RNA, 19 nt, Homo sapiens
  misc_RNA (1)...(19): siRNA sense strand
uuacaggcacccaccuuua

SEQ ID NO: 1164321 - RNA, 19 nt, Homo sapiens
  misc_RNA (1)...(19): siRNA sense strand
ggacacagaguauagaaaa

SEQ ID NO: 1164322 - RNA, 19 nt, Homo sapiens
  misc_RNA (1)...(19): siRNA sense strand
gauaagaaacacuuuaagc

SEQ ID NO: 1164323 - RNA, 19 nt, Homo sapiens
  misc_RNA (1)...(19): siRNA sense strand
uaaaguaaaggacuacauc

SEQ ID NO: 1164324 - RNA, 19 nt, Homo sapiens
  misc_RNA (1)...(19): siRNA sense strand
ucauaugaaucccaaaugg

SEQ ID NO: 1164325 - RNA, 19 nt, Homo sapiens
  misc_RNA (1)...(19): siRNA sense strand
aaaaugggaugcccuggua

SEQ ID NO: 1164326 - RNA, 19 nt, Homo sapiens
  misc_RNA (1)...(19): siRNA sense strand
gccaagaauauggagauua

SEQ ID NO: 1164327 - RNA, 19 nt, Homo sapiens
  misc_RNA (1)...(19): siRNA sense strand
agaauggcuuugacuacuu

SEQ ID NO: 1164328 - RNA, 19 nt, Homo sapiens
  misc_RNA (1)...(19): siRNA sense strand
uuacuaacauacagugaca

SEQ ID NO: 1164329 - RNA, 19 nt, Homo sapiens
  misc_RNA (1)...(19): siRNA sense strand
ugaagcgguuggaagaaau

SEQ ID NO: 1164330 - RNA, 19 nt, Homo sapiens
  misc_RNA (1)...(19): siRNA sense strand
gguguuuccucgcuacugu

SEQ ID NO: 1164331 - RNA, 19 nt, Homo sapiens
  misc_RNA (1)...(19): siRNA sense strand
ggucagaucauaugaaucc

SEQ ID NO: 1164332 - RNA, 19 nt, Homo sapiens
  misc_RNA (1)...(19): siRNA sense strand
gguuagugguuccgagguu

SEQ ID NO: 1164333 - RNA, 19 nt, Homo sapiens
  misc_RNA (1)...(19): siRNA sense strand
uaugaaucccaaaugguua

SEQ ID NO: 1164334 - RNA, 19 nt, Homo sapiens
  misc_RNA (1)...(19): siRNA sense strand
aggacuacaucucagcuaa

SEQ ID NO: 1164335 - RNA, 19 nt, Homo sapiens
  misc_RNA (1)...(19): siRNA sense strand
ccucggcaguucuucaaug

SEQ ID NO: 1164336 - RNA, 19 nt, Homo sapiens
  misc_RNA (1)...(19): siRNA sense strand
uaacauacagugacaaucc

SEQ ID NO: 1164337 - RNA, 19 nt, Homo sapiens
  misc_RNA (1)...(19): siRNA sense strand
guacucacgggauuauguu

SEQ ID NO: 1164338 - RNA, 19 nt, Homo sapiens
  misc_RNA (1)...(19): siRNA sense strand
ccaaacagaagggaaugaa

SEQ ID NO: 1164339 - RNA, 19 nt, Homo sapiens
  misc_RNA (1)...(19): siRNA sense strand
ugagagggaugugguuagu

SEQ ID NO: 1164340 - RNA, 19 nt, Homo sapiens
  misc_RNA (1)...(19): siRNA sense strand
gcuaagccucuggaaauga

SEQ ID NO: 1164341 - RNA, 19 nt, Homo sapiens
  misc_RNA (1)...(19): siRNA sense strand
gcccugcucggauugagua

SEQ ID NO: 1164342 - RNA, 19 nt, Homo sapiens
  misc_RNA (1)...(19): siRNA sense strand
ggauaagaaacacuuuaag

SEQ ID NO: 1164343 - RNA, 19 nt, Homo sapiens
  misc_RNA (1)...(19): siRNA sense strand
acucugaaagccaagaaua

SEQ ID NO: 1164344 - RNA, 19 nt, Homo sapiens
  misc_RNA (1)...(19): siRNA sense strand
caauguacucacgggauua

SEQ ID NO: 1164345 - RNA, 19 nt, Homo sapiens
  misc_RNA (1)...(19): siRNA sense strand
gaagcgguuggaagaaaug

SEQ ID NO: 1164346 - RNA, 19 nt, Homo sapiens
  misc_RNA (1)...(19): siRNA sense strand
agaugaagcgguuggaaga

SEQ ID NO: 1164347 - RNA, 19 nt, Homo sapiens
  misc_RNA (1)...(19): siRNA sense strand
cuaagccucuggaaaugag

SEQ ID NO: 1164348 - RNA, 19 nt, Homo sapiens
  misc_RNA (1)...(19): siRNA sense strand
ugaaagccaagaauaugga

SEQ ID NO: 1164349 - RNA, 19 nt, Homo sapiens
  misc_RNA (1)...(19): siRNA sense strand
ugggaaauggugauggaua

SEQ ID NO: 1164350 - RNA, 19 nt, Homo sapiens
  misc_RNA (1)...(19): siRNA sense strand
ccaccagccaguccucuga

SEQ ID NO: 1164351 - RNA, 19 nt, Homo sapiens
  misc_RNA (1)...(19): siRNA sense strand
aguaaaggacuacaucuca

SEQ ID NO: 1164352 - RNA, 19 nt, Homo sapiens
  misc_RNA (1)...(19): siRNA sense strand
ggaguugcagagaucuauu

SEQ ID NO: 1164353 - RNA, 19 nt, Homo sapiens
  misc_RNA (1)...(19): siRNA sense strand
agggucagaucauaugaau

SEQ ID NO: 1164354 - RNA, 19 nt, Homo sapiens
  misc_RNA (1)...(19): siRNA sense strand
gaugaagcgguuggaagaa

SEQ ID NO: 1164355 - RNA, 19 nt, Homo sapiens
  misc_RNA (1)...(19): siRNA sense strand
acucacgggauuauguuua

SEQ ID NO: 1164356 - RNA, 19 nt, Homo sapiens
  misc_RNA (1)...(19): siRNA sense strand
augaagcgguuggaagaaa

SEQ ID NO: 1164357 - RNA, 19 nt, Homo sapiens
  misc_RNA (1)...(19): siRNA sense strand
gauggauaagaaacacuuu

SEQ ID NO: 1164358 - RNA, 19 nt, Homo sapiens
  misc_RNA (1)...(19): siRNA sense strand
ggacuacaucucagcuaag

SEQ ID NO: 1164359 - RNA, 19 nt, Homo sapiens
  misc_RNA (1)...(19): siRNA sense strand
cagauuuccuggagaagcu

SEQ ID NO: 1164360 - RNA, 19 nt, Homo sapiens
  misc_RNA (1)...(19): siRNA sense strand
ugccagagucuccagaauu

SEQ ID NO: 1164361 - RNA, 19 nt, Homo sapiens
  misc_RNA (1)...(19): siRNA sense strand
ggaggaggaguugcagaga

SEQ ID NO: 1164362 - RNA, 19 nt, Homo sapiens
  misc_RNA (1)...(19): siRNA sense strand
uuuggaaccuacacagaug

SEQ ID NO: 1164363 - RNA, 19 nt, Homo sapiens
  misc_RNA (1)...(19): siRNA sense strand
gcgguuggaagaaauguca

SEQ ID NO: 1164364 - RNA, 19 nt, Homo sapiens
  misc_RNA (1)...(19): siRNA sense strand
uggcuuugacuacuuacua

SEQ ID NO: 1164365 - RNA, 19 nt, Homo sapiens
  misc_RNA (1)...(19): siRNA sense strand
auaugaaucccaaaugguu

SEQ ID NO: 1164366 - RNA, 19 nt, Homo sapiens
  misc_RNA (1)...(19): siRNA sense strand
aggaggaguugcagagauc

SEQ ID NO: 1164367 - RNA, 19 nt, Homo sapiens
  misc_RNA (1)...(19): siRNA sense strand
gugccagagucuccagaau

SEQ ID NO: 1164368 - RNA, 19 nt, Homo sapiens
  misc_RNA (1)...(19): siRNA sense strand
cagcuggacacagaguaua

SEQ ID NO: 1164369 - RNA, 19 nt, Homo sapiens
  misc_RNA (1)...(19): siRNA sense strand
cucacgggauuauguuuau

SEQ ID NO: 1164370 - RNA, 19 nt, Homo sapiens
  misc_RNA (1)...(19): siRNA sense strand
gaggaguugcagagaucua

SEQ ID NO: 1164371 - RNA, 19 nt, Homo sapiens
  misc_RNA (1)...(19): siRNA sense strand
ucagcuaagccucuggaaa

SEQ ID NO: 1164372 - RNA, 19 nt, Homo sapiens
  misc_RNA (1)...(19): siRNA sense strand
ucugaaagccaagaauaug

SEQ ID NO: 1164373 - RNA, 19 nt, Homo sapiens
  misc_RNA (1)...(19): siRNA sense strand
gguaacccauuuuccuuau

SEQ ID NO: 1164374 - RNA, 19 nt, Homo sapiens
  misc_RNA (1)...(19): siRNA sense strand
gagguucuucacuggguaa

SEQ ID NO: 1164375 - RNA, 19 nt, Homo sapiens
  misc_RNA (1)...(19): siRNA sense strand
ugugacaccucggcaguuc

SEQ ID NO: 1164376 - RNA, 19 nt, Homo sapiens
  misc_RNA (1)...(19): siRNA sense strand
ccucugagcgaaagaacga

SEQ ID NO: 1164377 - RNA, 19 nt, Homo sapiens
  misc_RNA (1)...(19): siRNA sense strand
gcuacuguguuaguuggau

SEQ ID NO: 1164378 - RNA, 19 nt, Homo sapiens
  misc_RNA (1)...(19): siRNA sense strand
ucacgggauuauguuuaug

SEQ ID NO: 1164379 - RNA, 19 nt, Homo sapiens
  misc_RNA (1)...(19): siRNA sense strand
gacuacaucucagcuaagc

SEQ ID NO: 1164380 - RNA, 19 nt, Homo sapiens
  misc_RNA (1)...(19): siRNA sense strand
uauguucggcgguauagug

SEQ ID NO: 1164381 - RNA, 19 nt, Homo sapiens
  misc_RNA (1)...(19): siRNA sense strand
ugacaccucggcaguucuu

SEQ ID NO: 1164382 - RNA, 19 nt, Homo sapiens
  misc_RNA (1)...(19): siRNA sense strand
gguuggaagaaaugucaaa

SEQ ID NO: 1164383 - RNA, 19 nt, Homo sapiens
  misc_RNA (1)...(19): siRNA sense strand
gauccaggaggaggaguug

SEQ ID NO: 1164384 - RNA, 19 nt, Homo sapiens
  misc_RNA (1)...(19): siRNA sense strand
ugagaauggcuuugacuac

SEQ ID NO: 1164385 - RNA, 19 nt, Homo sapiens
  misc_RNA (1)...(19): siRNA sense strand
caaacagaagggaaugaag

SEQ ID NO: 1164386 - RNA, 19 nt, Homo sapiens
  misc_RNA (1)...(19): siRNA sense strand
cgucagggucagaucauau

SEQ ID NO: 1164387 - RNA, 19 nt, Homo sapiens
  misc_RNA (1)...(19): siRNA sense strand
ggaaauggugauggauaag

SEQ ID NO: 1164388 - RNA, 19 nt, Homo sapiens
  misc_RNA (1)...(19): siRNA sense strand
gaagaguguugaaggauua

SEQ ID NO: 1164389 - RNA, 19 nt, Homo sapiens
  misc_RNA (1)...(19): siRNA sense strand
ggacaacgguuacggcuau

SEQ ID NO: 1164390 - RNA, 19 nt, Homo sapiens
  misc_RNA (1)...(19): siRNA sense strand
gcaaagagcucagcaaagg

SEQ ID NO: 1164391 - RNA, 19 nt, Homo sapiens
  misc_RNA (1)...(19): siRNA sense strand
aagcagaacugaauaagaa

SEQ ID NO: 1164392 - RNA, 19 nt, Homo sapiens
  misc_RNA (1)...(19): siRNA sense strand
gaagacagcaauucacaaa

SEQ ID NO: 1164393 - RNA, 19 nt, Homo sapiens
  misc_RNA (1)...(19): siRNA sense strand
cgacaaauacuccaaguuu

SEQ ID NO: 1164394 - RNA, 19 nt, Homo sapiens
  misc_RNA (1)...(19): siRNA sense strand
caaugggucugucuacuuu

SEQ ID NO: 1164395 - RNA, 19 nt, Homo sapiens
  misc_RNA (1)...(19): siRNA sense strand
gcaugaacauuacggauau

SEQ ID NO: 1164396 - RNA, 19 nt, Homo sapiens
  misc_RNA (1)...(19): siRNA sense strand
cauuaaagaugccuugaaa

SEQ ID NO: 1164397 - RNA, 19 nt, Homo sapiens
  misc_RNA (1)...(19): siRNA sense strand
agacagaaacaccuuauua

SEQ ID NO: 1164398 - RNA, 19 nt, Homo sapiens
  misc_RNA (1)...(19): siRNA sense strand
ucagaaagcccuucaagaa

SEQ ID NO: 1164399 - RNA, 19 nt, Homo sapiens
  misc_RNA (1)...(19): siRNA sense strand
agucagcgcuucaauauga

SEQ ID NO: 1164400 - RNA, 19 nt, Homo sapiens
  misc_RNA (1)...(19): siRNA sense strand
gacagaaacaccuuauuaa

SEQ ID NO: 1164401 - RNA, 19 nt, Homo sapiens
  misc_RNA (1)...(19): siRNA sense strand
ccaaggauuugcucucuga

SEQ ID NO: 1164402 - RNA, 19 nt, Homo sapiens
  misc_RNA (1)...(19): siRNA sense strand
gcaaagggcaagccaagaa

SEQ ID NO: 1164403 - RNA, 19 nt, Homo sapiens
  misc_RNA (1)...(19): siRNA sense strand
gaagaagcagaacugaaua

SEQ ID NO: 1164404 - RNA, 19 nt, Homo sapiens
  misc_RNA (1)...(19): siRNA sense strand
ggagucagcgcuucaauau

SEQ ID NO: 1164405 - RNA, 19 nt, Homo sapiens
  misc_RNA (1)...(19): siRNA sense strand
ggaagaagccaaggauuug

SEQ ID NO: 1164406 - RNA, 19 nt, Homo sapiens
  misc_RNA (1)...(19): siRNA sense strand
ccacagagccacuugagaa

SEQ ID NO: 1164407 - RNA, 19 nt, Homo sapiens
  misc_RNA (1)...(19): siRNA sense strand
gagaagcucuacaaggaau

SEQ ID NO: 1164408 - RNA, 19 nt, Homo sapiens
  misc_RNA (1)...(19): siRNA sense strand
ggaaggacacccuggacua

SEQ ID NO: 1164409 - RNA, 19 nt, Homo sapiens
  misc_RNA (1)...(19): siRNA sense strand
gaacauuacggauauugau

SEQ ID NO: 1164410 - RNA, 19 nt, Homo sapiens
  misc_RNA (1)...(19): siRNA sense strand
gcaaagcuggccaagauga

SEQ ID NO: 1164411 - RNA, 19 nt, Homo sapiens
  misc_RNA (1)...(19): siRNA sense strand
ggaggaaacaggaacaaga

SEQ ID NO: 1164412 - RNA, 19 nt, Homo sapiens
  misc_RNA (1)...(19): siRNA sense strand
gggcuucgauggacauuca

SEQ ID NO: 1164413 - RNA, 19 nt, Homo sapiens
  misc_RNA (1)...(19): siRNA sense strand
ggauauugaugacaagauc

SEQ ID NO: 1164414 - RNA, 19 nt, Homo sapiens
  misc_RNA (1)...(19): siRNA sense strand
cauggaagcucugaauguu

SEQ ID NO: 1164415 - RNA, 19 nt, Homo sapiens
  misc_RNA (1)...(19): siRNA sense strand
aggagaagcucuacaagga

SEQ ID NO: 1164416 - RNA, 19 nt, Homo sapiens
  misc_RNA (1)...(19): siRNA sense strand
gaaggagugcggaagauug

SEQ ID NO: 1164417 - RNA, 19 nt, Homo sapiens
  misc_RNA (1)...(19): siRNA sense strand
caugcagacuccaccuuua

SEQ ID NO: 1164418 - RNA, 19 nt, Homo sapiens
  misc_RNA (1)...(19): siRNA sense strand
gaagcagaacugaauaaga

SEQ ID NO: 1164419 - RNA, 19 nt, Homo sapiens
  misc_RNA (1)...(19): siRNA sense strand
ucuccaagcugcccaaguu

SEQ ID NO: 1164420 - RNA, 19 nt, Homo sapiens
  misc_RNA (1)...(19): siRNA sense strand
gaggaaacaggaacaagaa

SEQ ID NO: 1164421 - RNA, 19 nt, Homo sapiens
  misc_RNA (1)...(19): siRNA sense strand
gcagaccgccugagugaga

SEQ ID NO: 1164422 - RNA, 19 nt, Homo sapiens
  misc_RNA (1)...(19): siRNA sense strand
ugagaagaguguugaagga

SEQ ID NO: 1164423 - RNA, 19 nt, Homo sapiens
  misc_RNA (1)...(19): siRNA sense strand
ccagugagauguucuuguc

SEQ ID NO: 1164424 - RNA, 19 nt, Homo sapiens
  misc_RNA (1)...(19): siRNA sense strand
caacgacuuugccuuaugg

SEQ ID NO: 1164425 - RNA, 19 nt, Homo sapiens
  misc_RNA (1)...(19): siRNA sense strand
uuacggauauugaugacaa

SEQ ID NO: 1164426 - RNA, 19 nt, Homo sapiens
  misc_RNA (1)...(19): siRNA sense strand
gggcaaagagcucagcaaa

SEQ ID NO: 1164427 - RNA, 19 nt, Homo sapiens
  misc_RNA (1)...(19): siRNA sense strand
gugaguaugugccagaaau

SEQ ID NO: 1164428 - RNA, 19 nt, Homo sapiens
  misc_RNA (1)...(19): siRNA sense strand
agaagaguguugaaggauu

SEQ ID NO: 1164429 - RNA, 19 nt, Homo sapiens
  misc_RNA (1)...(19): siRNA sense strand
ggaaagccgugaggaagag

SEQ ID NO: 1164430 - RNA, 19 nt, Homo sapiens
  misc_RNA (1)...(19): siRNA sense strand
gaagaagaagcagaacuga

SEQ ID NO: 1164431 - RNA, 19 nt, Homo sapiens
  misc_RNA (1)...(19): siRNA sense strand
gccagaaauugugaacuuu

SEQ ID NO: 1164432 - RNA, 19 nt, Homo sapiens
  misc_RNA (1)...(19): siRNA sense strand
acacuuggcugugauguca

SEQ ID NO: 1164433 - RNA, 19 nt, Homo sapiens
  misc_RNA (1)...(19): siRNA sense strand
gagaaggagugcggaagau

SEQ ID NO: 1164434 - RNA, 19 nt, Homo sapiens
  misc_RNA (1)...(19): siRNA sense strand
cagaaauugugaacuuugu

SEQ ID NO: 1164435 - RNA, 19 nt, Homo sapiens
  misc_RNA (1)...(19): siRNA sense strand
ugaaacugguagacagaaa

SEQ ID NO: 1164436 - RNA, 19 nt, Homo sapiens
  misc_RNA (1)...(19): siRNA sense strand
agaagaagcagaacugaau

SEQ ID NO: 1164437 - RNA, 19 nt, Homo sapiens
  misc_RNA (1)...(19): siRNA sense strand
gaaguucuugaaugaguuu

SEQ ID NO: 1164438 - RNA, 19 nt, Homo sapiens
  misc_RNA (1)...(19): siRNA sense strand
gcacucagcacggcaguug

SEQ ID NO: 1164439 - RNA, 19 nt, Homo sapiens
  misc_RNA (1)...(19): siRNA sense strand
uggaagaagccaaggauuu

SEQ ID NO: 1164440 - RNA, 19 nt, Homo sapiens
  misc_RNA (1)...(19): siRNA sense strand
gcagauggcccagaaugga

SEQ ID NO: 1164441 - RNA, 19 nt, Homo sapiens
  misc_RNA (1)...(19): siRNA sense strand
ccaacgacuuugccuuaug

SEQ ID NO: 1164442 - RNA, 19 nt, Homo sapiens
  misc_RNA (1)...(19): siRNA sense strand
gcgagaagcacuccuaugg

SEQ ID NO: 1164443 - RNA, 19 nt, Homo sapiens
  misc_RNA (1)...(19): siRNA sense strand
gggucugucuacuuugaua

SEQ ID NO: 1164444 - RNA, 19 nt, Homo sapiens
  misc_RNA (1)...(19): siRNA sense strand
gaacuuuguccagaagauu

SEQ ID NO: 1164445 - RNA, 19 nt, Homo sapiens
  misc_RNA (1)...(19): siRNA sense strand
gggagaagaagaagcagaa

SEQ ID NO: 1164446 - RNA, 19 nt, Homo sapiens
  misc_RNA (1)...(19): siRNA sense strand
gaaacaggaacaagaagca

SEQ ID NO: 1164447 - RNA, 19 nt, Homo sapiens
  misc_RNA (1)...(19): siRNA sense strand
ugccagaaauugugaacuu

SEQ ID NO: 1164448 - RNA, 19 nt, Homo sapiens
  misc_RNA (1)...(19): siRNA sense strand
ggagaagcucuacaaggaa

SEQ ID NO: 1164449 - RNA, 19 nt, Homo sapiens
  misc_RNA (1)...(19): siRNA sense strand
gaggagaagaggaagaaga

SEQ ID NO: 1164450 - RNA, 19 nt, Homo sapiens
  misc_RNA (1)...(19): siRNA sense strand
cagugcagcuugccacaga

SEQ ID NO: 1164451 - RNA, 19 nt, Homo sapiens
  misc_RNA (1)...(19): siRNA sense strand
gagaagaggaagaagaaag

SEQ ID NO: 1164452 - RNA, 19 nt, Homo sapiens
  misc_RNA (1)...(19): siRNA sense strand
acaauuccaucuucuccaa

SEQ ID NO: 1164453 - RNA, 19 nt, Homo sapiens
  misc_RNA (1)...(19): siRNA sense strand
gaucagaaagcccuucaag

SEQ ID NO: 1164454 - RNA, 19 nt, Homo sapiens
  misc_RNA (1)...(19): siRNA sense strand
ggaacaagaagcagcaaag

SEQ ID NO: 1164455 - RNA, 19 nt, Homo sapiens
  misc_RNA (1)...(19): siRNA sense strand
gaagaggagaagaggaaga

SEQ ID NO: 1164456 - RNA, 19 nt, Homo sapiens
  misc_RNA (1)...(19): siRNA sense strand
uggagaacaucgcccugua

SEQ ID NO: 1164457 - RNA, 19 nt, Homo sapiens
  misc_RNA (1)...(19): siRNA sense strand
acaaagcccucugugacaa

SEQ ID NO: 1164458 - RNA, 19 nt, Homo sapiens
  misc_RNA (1)...(19): siRNA sense strand
acaacagccucaccaggaa

SEQ ID NO: 1164459 - RNA, 19 nt, Homo sapiens
  misc_RNA (1)...(19): siRNA sense strand
gcagaugcucgaacggauu

SEQ ID NO: 1164460 - RNA, 19 nt, Homo sapiens
  misc_RNA (1)...(19): siRNA sense strand
ggacuuccacagagacaug

SEQ ID NO: 1164461 - RNA, 19 nt, Homo sapiens
  misc_RNA (1)...(19): siRNA sense strand
ucggaggccuacuuugaaa

SEQ ID NO: 1164462 - RNA, 19 nt, Homo sapiens
  misc_RNA (1)...(19): siRNA sense strand
ucacccauaugcugaagau

SEQ ID NO: 1164463 - RNA, 19 nt, Homo sapiens
  misc_RNA (1)...(19): siRNA sense strand
ucccaacgacuuugccuua

SEQ ID NO: 1164464 - RNA, 19 nt, Homo sapiens
  misc_RNA (1)...(19): siRNA sense strand
agaagaggaagaagaaaga

SEQ ID NO: 1164465 - RNA, 19 nt, Homo sapiens
  misc_RNA (1)...(19): siRNA sense strand
cuucagguguuaucagaau

SEQ ID NO: 1164466 - RNA, 19 nt, Homo sapiens
  misc_RNA (1)...(19): siRNA sense strand
agacagcaauucacaaagc

SEQ ID NO: 1164467 - RNA, 19 nt, Homo sapiens
  misc_RNA (1)...(19): siRNA sense strand
acaagaagacagcaauuca

SEQ ID NO: 1164468 - RNA, 19 nt, Homo sapiens
  misc_RNA (1)...(19): siRNA sense strand
ccagaaauugugaacuuug

SEQ ID NO: 1164469 - RNA, 19 nt, Homo sapiens
  misc_RNA (1)...(19): siRNA sense strand
gguagacagaaacaccuua

SEQ ID NO: 1164470 - RNA, 19 nt, Homo sapiens
  misc_RNA (1)...(19): siRNA sense strand
gcaccgucauggaagagau

SEQ ID NO: 1164471 - RNA, 19 nt, Homo sapiens
  misc_RNA (1)...(19): siRNA sense strand
gacaagaagacagcaauuc

SEQ ID NO: 1164472 - RNA, 19 nt, Homo sapiens
  misc_RNA (1)...(19): siRNA sense strand
gaacuuuuaugacaagaag

SEQ ID NO: 1164473 - RNA, 19 nt, Homo sapiens
  misc_RNA (1)...(19): siRNA sense strand
ccaaugggucugucuacuu

SEQ ID NO: 1164474 - RNA, 19 nt, Homo sapiens
  misc_RNA (1)...(19): siRNA sense strand
cuacaucucuuuugauauc

SEQ ID NO: 1164475 - RNA, 19 nt, Homo sapiens
  misc_RNA (1)...(19): siRNA sense strand
gaaguguucauaccucaag

SEQ ID NO: 1164476 - RNA, 19 nt, Homo sapiens
  misc_RNA (1)...(19): siRNA sense strand
uggaagcucugaauguucu

SEQ ID NO: 1164477 - RNA, 19 nt, Homo sapiens
  misc_RNA (1)...(19): siRNA sense strand
gugagauguucuugucaga

SEQ ID NO: 1164478 - RNA, 19 nt, Homo sapiens
  misc_RNA (1)...(19): siRNA sense strand
gaguaugugccagaaauug

SEQ ID NO: 1164479 - RNA, 19 nt, Homo sapiens
  misc_RNA (1)...(19): siRNA sense strand
gaaggacacccuggacuac

SEQ ID NO: 1164480 - RNA, 19 nt, Homo sapiens
  misc_RNA (1)...(19): siRNA sense strand
gaagcucuacaaggaauau

SEQ ID NO: 1164481 - RNA, 19 nt, Homo sapiens
  misc_RNA (1)...(19): siRNA sense strand
gucagaaaccgacaaauac

SEQ ID NO: 1164482 - RNA, 19 nt, Homo sapiens
  misc_RNA (1)...(19): siRNA sense strand
gaaaagagacggguugaag

SEQ ID NO: 1164483 - RNA, 19 nt, Homo sapiens
  misc_RNA (1)...(19): siRNA sense strand
guagacagaaacaccuuau

SEQ ID NO: 1164484 - RNA, 19 nt, Homo sapiens
  misc_RNA (1)...(19): siRNA sense strand
cgagaaggagugcggaaga

SEQ ID NO: 1164485 - RNA, 19 nt, Homo sapiens
  misc_RNA (1)...(19): siRNA sense strand
gguccuacaucucuuuuga

SEQ ID NO: 1164486 - RNA, 19 nt, Homo sapiens
  misc_RNA (1)...(19): siRNA sense strand
ugacaagaagacagcaauu

SEQ ID NO: 1164487 - RNA, 19 nt, Homo sapiens
  misc_RNA (1)...(19): siRNA sense strand
caaagcuggccaagaugaa

SEQ ID NO: 1164488 - RNA, 19 nt, Homo sapiens
  misc_RNA (1)...(19): siRNA sense strand
gaagaguguugaaggauua

SEQ ID NO: 1164489 - RNA, 19 nt, Homo sapiens
  misc_RNA (1)...(19): siRNA sense strand
ggacaacgguuacggcuau

SEQ ID NO: 1164490 - RNA, 19 nt, Homo sapiens
  misc_RNA (1)...(19): siRNA sense strand
gcaaagagcucagcaaagg

SEQ ID NO: 1164491 - RNA, 19 nt, Homo sapiens
  misc_RNA (1)...(19): siRNA sense strand
aagcagaacugaauaagaa

SEQ ID NO: 1164492 - RNA, 19 nt, Homo sapiens
  misc_RNA (1)...(19): siRNA sense strand
gaagacagcaauucacaaa

SEQ ID NO: 1164493 - RNA, 19 nt, Homo sapiens
  misc_RNA (1)...(19): siRNA sense strand
cgacaaauacuccaaguuu

SEQ ID NO: 1164494 - RNA, 19 nt, Homo sapiens
  misc_RNA (1)...(19): siRNA sense strand
caaugggucugucuacuuu

SEQ ID NO: 1164495 - RNA, 19 nt, Homo sapiens
  misc_RNA (1)...(19): siRNA sense strand
gcaugaacauuacggauau

SEQ ID NO: 1164496 - RNA, 19 nt, Homo sapiens
  misc_RNA (1)...(19): siRNA sense strand
cauuaaagaugccuugaaa

SEQ ID NO: 1164497 - RNA, 19 nt, Homo sapiens
  misc_RNA (1)...(19): siRNA sense strand
agacagaaacaccuuauua

SEQ ID NO: 1164498 - RNA, 19 nt, Homo sapiens
  misc_RNA (1)...(19): siRNA sense strand
ucagaaagcccuucaagaa

SEQ ID NO: 1164499 - RNA, 19 nt, Homo sapiens
  misc_RNA (1)...(19): siRNA sense strand
agucagcgcuucaauauga

SEQ ID NO: 1164500 - RNA, 19 nt, Homo sapiens
  misc_RNA (1)...(19): siRNA sense strand
gacagaaacaccuuauuaa

SEQ ID NO: 1164501 - RNA, 19 nt, Homo sapiens
  misc_RNA (1)...(19): siRNA sense strand
ccaaggauuugcucucuga

SEQ ID NO: 1164502 - RNA, 19 nt, Homo sapiens
  misc_RNA (1)...(19): siRNA sense strand
gcaaagggcaagccaagaa

SEQ ID NO: 1164503 - RNA, 19 nt, Homo sapiens
  misc_RNA (1)...(19): siRNA sense strand
gaagaagcagaacugaaua

SEQ ID NO: 1164504 - RNA, 19 nt, Homo sapiens
  misc_RNA (1)...(19): siRNA sense strand
ggagucagcgcuucaauau

SEQ ID NO: 1164505 - RNA, 19 nt, Homo sapiens
  misc_RNA (1)...(19): siRNA sense strand
ggaagaagccaaggauuug

SEQ ID NO: 1164506 - RNA, 19 nt, Homo sapiens
  misc_RNA (1)...(19): siRNA sense strand
ccacagagccacuugagaa

SEQ ID NO: 1164507 - RNA, 19 nt, Homo sapiens
  misc_RNA (1)...(19): siRNA sense strand
ggaaggacacccuggacua

SEQ ID NO: 1164508 - RNA, 19 nt, Homo sapiens
  misc_RNA (1)...(19): siRNA sense strand
gaacauuacggauauugau

SEQ ID NO: 1164509 - RNA, 19 nt, Homo sapiens
  misc_RNA (1)...(19): siRNA sense strand
gcaaagcuggccaagauga

SEQ ID NO: 1164510 - RNA, 19 nt, Homo sapiens
  misc_RNA (1)...(19): siRNA sense strand
ggaggaaacaggaacaaga

SEQ ID NO: 1164511 - RNA, 19 nt, Homo sapiens
  misc_RNA (1)...(19): siRNA sense strand
gggcuucgauggacauuca

SEQ ID NO: 1164512 - RNA, 19 nt, Homo sapiens
  misc_RNA (1)...(19): siRNA sense strand
ggauauugaugacaagauc

SEQ ID NO: 1164513 - RNA, 19 nt, Homo sapiens
  misc_RNA (1)...(19): siRNA sense strand
cauggaagcucugaauguu

SEQ ID NO: 1164514 - RNA, 19 nt, Homo sapiens
  misc_RNA (1)...(19): siRNA sense strand
gaaggagugcggaagauug

SEQ ID NO: 1164515 - RNA, 19 nt, Homo sapiens
  misc_RNA (1)...(19): siRNA sense strand
caugcagacuccaccuuua

SEQ ID NO: 1164516 - RNA, 19 nt, Homo sapiens
  misc_RNA (1)...(19): siRNA sense strand
gaagcagaacugaauaaga

SEQ ID NO: 1164517 - RNA, 19 nt, Homo sapiens
  misc_RNA (1)...(19): siRNA sense strand
ucuccaagcugcccaaguu

SEQ ID NO: 1164518 - RNA, 19 nt, Homo sapiens
  misc_RNA (1)...(19): siRNA sense strand
gaggaaacaggaacaagaa

SEQ ID NO: 1164519 - RNA, 19 nt, Homo sapiens
  misc_RNA (1)...(19): siRNA sense strand
gcagaccgccugagugaga

SEQ ID NO: 1164520 - RNA, 19 nt, Homo sapiens
  misc_RNA (1)...(19): siRNA sense strand
ugagaagaguguugaagga

SEQ ID NO: 1164521 - RNA, 19 nt, Homo sapiens
  misc_RNA (1)...(19): siRNA sense strand
ccagugagauguucuuguc

SEQ ID NO: 1164522 - RNA, 19 nt, Homo sapiens
  misc_RNA (1)...(19): siRNA sense strand
caacgacuuugccuuaugg

SEQ ID NO: 1164523 - RNA, 19 nt, Homo sapiens
  misc_RNA (1)...(19): siRNA sense strand
uuacggauauugaugacaa

SEQ ID NO: 1164524 - RNA, 19 nt, Homo sapiens
  misc_RNA (1)...(19): siRNA sense strand
gggcaaagagcucagcaaa

SEQ ID NO: 1164525 - RNA, 19 nt, Homo sapiens
  misc_RNA (1)...(19): siRNA sense strand
gugaguaugugccagaaau

SEQ ID NO: 1164526 - RNA, 19 nt, Homo sapiens
  misc_RNA (1)...(19): siRNA sense strand
agaagaguguugaaggauu

SEQ ID NO: 1164527 - RNA, 19 nt, Homo sapiens
  misc_RNA (1)...(19): siRNA sense strand
ggaaagccgugaggaagag

SEQ ID NO: 1164528 - RNA, 19 nt, Homo sapiens
  misc_RNA (1)...(19): siRNA sense strand
gaagaagaagcagaacuga

SEQ ID NO: 1164529 - RNA, 19 nt, Homo sapiens
  misc_RNA (1)...(19): siRNA sense strand
gccagaaauugugaacuuu

SEQ ID NO: 1164530 - RNA, 19 nt, Homo sapiens
  misc_RNA (1)...(19): siRNA sense strand
acacuuggcugugauguca

SEQ ID NO: 1164531 - RNA, 19 nt, Homo sapiens
  misc_RNA (1)...(19): siRNA sense strand
gagaaggagugcggaagau

SEQ ID NO: 1164532 - RNA, 19 nt, Homo sapiens
  misc_RNA (1)...(19): siRNA sense strand
cagaaauugugaacuuugu

SEQ ID NO: 1164533 - RNA, 19 nt, Homo sapiens
  misc_RNA (1)...(19): siRNA sense strand
ugaaacugguagacagaaa

SEQ ID NO: 1164534 - RNA, 19 nt, Homo sapiens
  misc_RNA (1)...(19): siRNA sense strand
agaagaagcagaacugaau

SEQ ID NO: 1164535 - RNA, 19 nt, Homo sapiens
  misc_RNA (1)...(19): siRNA sense strand
gaaguucuugaaugaguuu

SEQ ID NO: 1164536 - RNA, 19 nt, Homo sapiens
  misc_RNA (1)...(19): siRNA sense strand
gcacucagcacggcaguug

SEQ ID NO: 1164537 - RNA, 19 nt, Homo sapiens
  misc_RNA (1)...(19): siRNA sense strand
uggaagaagccaaggauuu

SEQ ID NO: 1164538 - RNA, 19 nt, Homo sapiens
  misc_RNA (1)...(19): siRNA sense strand
ccaacgacuuugccuuaug

SEQ ID NO: 1164539 - RNA, 19 nt, Homo sapiens
  misc_RNA (1)...(19): siRNA sense strand
gcgagaagcacuccuaugg

SEQ ID NO: 1164540 - RNA, 19 nt, Homo sapiens
  misc_RNA (1)...(19): siRNA sense strand
gggucugucuacuuugaua

SEQ ID NO: 1164541 - RNA, 19 nt, Homo sapiens
  misc_RNA (1)...(19): siRNA sense strand
gaacuuuguccagaagauu

SEQ ID NO: 1164542 - RNA, 19 nt, Homo sapiens
  misc_RNA (1)...(19): siRNA sense strand
gggagaagaagaagcagaa

SEQ ID NO: 1164543 - RNA, 19 nt, Homo sapiens
  misc_RNA (1)...(19): siRNA sense strand
gaaacaggaacaagaagca

SEQ ID NO: 1164544 - RNA, 19 nt, Homo sapiens
  misc_RNA (1)...(19): siRNA sense strand
ugccagaaauugugaacuu

SEQ ID NO: 1164545 - RNA, 19 nt, Homo sapiens
  misc_RNA (1)...(19): siRNA sense strand
gaggagaagaggaagaaga

SEQ ID NO: 1164546 - RNA, 19 nt, Homo sapiens
  misc_RNA (1)...(19): siRNA sense strand
cagugcagcuugccacaga

SEQ ID NO: 1164547 - RNA, 19 nt, Homo sapiens
  misc_RNA (1)...(19): siRNA sense strand
gagaagaggaagaagaaag

SEQ ID NO: 1164548 - RNA, 19 nt, Homo sapiens
  misc_RNA (1)...(19): siRNA sense strand
acaauuccaucuucuccaa

SEQ ID NO: 1164549 - RNA, 19 nt, Homo sapiens
  misc_RNA (1)...(19): siRNA sense strand
gaucagaaagcccuucaag

SEQ ID NO: 1164550 - RNA, 19 nt, Homo sapiens
  misc_RNA (1)...(19): siRNA sense strand
ggaacaagaagcagcaaag

SEQ ID NO: 1164551 - RNA, 19 nt, Homo sapiens
  misc_RNA (1)...(19): siRNA sense strand
gaagaggagaagaggaaga

SEQ ID NO: 1164552 - RNA, 19 nt, Homo sapiens
  misc_RNA (1)...(19): siRNA sense strand
uggagaacaucgcccugua

SEQ ID NO: 1164553 - RNA, 19 nt, Homo sapiens
  misc_RNA (1)...(19): siRNA sense strand
acaaagcccucugugacaa

SEQ ID NO: 1164554 - RNA, 19 nt, Homo sapiens
  misc_RNA (1)...(19): siRNA sense strand
acaacagccucaccaggaa

SEQ ID NO: 1164555 - RNA, 19 nt, Homo sapiens
  misc_RNA (1)...(19): siRNA sense strand
gcagaugcucgaacggauu

SEQ ID NO: 1164556 - RNA, 19 nt, Homo sapiens
  misc_RNA (1)...(19): siRNA sense strand
ggacuuccacagagacaug

SEQ ID NO: 1164557 - RNA, 19 nt, Homo sapiens
  misc_RNA (1)...(19): siRNA sense strand
ucggaggccuacuuugaaa

SEQ ID NO: 1164558 - RNA, 19 nt, Homo sapiens
  misc_RNA (1)...(19): siRNA sense strand
ucacccauaugcugaagau

SEQ ID NO: 1164559 - RNA, 19 nt, Homo sapiens
  misc_RNA (1)...(19): siRNA sense strand
ucccaacgacuuugccuua

SEQ ID NO: 1164560 - RNA, 19 nt, Homo sapiens
  misc_RNA (1)...(19): siRNA sense strand
agaagaggaagaagaaaga

SEQ ID NO: 1164561 - RNA, 19 nt, Homo sapiens
  misc_RNA (1)...(19): siRNA sense strand
cuucagguguuaucagaau

SEQ ID NO: 1164562 - RNA, 19 nt, Homo sapiens
  misc_RNA (1)...(19): siRNA sense strand
agacagcaauucacaaagc

SEQ ID NO: 1164563 - RNA, 19 nt, Homo sapiens
  misc_RNA (1)...(19): siRNA sense strand
acaagaagacagcaauuca

SEQ ID NO: 1164564 - RNA, 19 nt, Homo sapiens
  misc_RNA (1)...(19): siRNA sense strand
ccagaaauugugaacuuug

SEQ ID NO: 1164565 - RNA, 19 nt, Homo sapiens
  misc_RNA (1)...(19): siRNA sense strand
gguagacagaaacaccuua

SEQ ID NO: 1164566 - RNA, 19 nt, Homo sapiens
  misc_RNA (1)...(19): siRNA sense strand
gcaccgucauggaagagau

SEQ ID NO: 1164567 - RNA, 19 nt, Homo sapiens
  misc_RNA (1)...(19): siRNA sense strand
gacaagaagacagcaauuc

SEQ ID NO: 1164568 - RNA, 19 nt, Homo sapiens
  misc_RNA (1)...(19): siRNA sense strand
gaacuuuuaugacaagaag

SEQ ID NO: 1164569 - RNA, 19 nt, Homo sapiens
  misc_RNA (1)...(19): siRNA sense strand
ccaaugggucugucuacuu

SEQ ID NO: 1164570 - RNA, 19 nt, Homo sapiens
  misc_RNA (1)...(19): siRNA sense strand
cuacaucucuuuugauauc

SEQ ID NO: 1164571 - RNA, 19 nt, Homo sapiens
  misc_RNA (1)...(19): siRNA sense strand
gaaguguucauaccucaag

SEQ ID NO: 1164572 - RNA, 19 nt, Homo sapiens
  misc_RNA (1)...(19): siRNA sense strand
uggaagcucugaauguucu

SEQ ID NO: 1164573 - RNA, 19 nt, Homo sapiens
  misc_RNA (1)...(19): siRNA sense strand
gugagauguucuugucaga

SEQ ID NO: 1164574 - RNA, 19 nt, Homo sapiens
  misc_RNA (1)...(19): siRNA sense strand
gaguaugugccagaaauug

SEQ ID NO: 1164575 - RNA, 19 nt, Homo sapiens
  misc_RNA (1)...(19): siRNA sense strand
gguccuacaucucuuuuga

SEQ ID NO: 1164576 - RNA, 19 nt, Homo sapiens
  misc_RNA (1)...(19): siRNA sense strand
gucagaaaccgacaaauac

SEQ ID NO: 1164577 - RNA, 19 nt, Homo sapiens
  misc_RNA (1)...(19): siRNA sense strand
gaaaagagacggguugaag

SEQ ID NO: 1164578 - RNA, 19 nt, Homo sapiens
  misc_RNA (1)...(19): siRNA sense strand
guagacagaaacaccuuau

SEQ ID NO: 1164579 - RNA, 19 nt, Homo sapiens
  misc_RNA (1)...(19): siRNA sense strand
cgagaaggagugcggaaga

SEQ ID NO: 1164580 - RNA, 19 nt, Homo sapiens
  misc_RNA (1)...(19): siRNA sense strand
gaaggacacccuggacuac

SEQ ID NO: 1164581 - RNA, 19 nt, Homo sapiens
  misc_RNA (1)...(19): siRNA sense strand
ccaugcagacuccaccuuu

SEQ ID NO: 1164582 - RNA, 19 nt, Homo sapiens
  misc_RNA (1)...(19): siRNA sense strand
caaagcuggccaagaugaa

SEQ ID NO: 1164583 - RNA, 19 nt, Homo sapiens
  misc_RNA (1)...(19): siRNA sense strand
ugacaagaagacagcaauu

SEQ ID NO: 1164584 - RNA, 19 nt, Homo sapiens
  misc_RNA (1)...(19): siRNA sense strand
aagaagcagaacugaauaa

SEQ ID NO: 1164585 - RNA, 19 nt, Homo sapiens
  misc_RNA (1)...(19): siRNA sense strand
gcagacuccaccuuuacaa

SEQ ID NO: 1164586 - RNA, 19 nt, Homo sapiens
  misc_RNA (1)...(19): siRNA sense strand
cccuguaccucacccauau

SEQ ID NO: 1164587 - RNA, 19 nt, Homo sapiens
  misc_RNA (1)...(19): siRNA sense strand
cccauaugcugaagaucuu

SEQ ID NO: 1164588 - RNA, 19 nt, Homo sapiens
  misc_RNA (1)...(19): siRNA sense strand
ggagaaggguuucccagua

SEQ ID NO: 1164589 - RNA, 19 nt, Homo sapiens
  misc_RNA (1)...(19): siRNA sense strand
gagaaggguuucccaguaa

SEQ ID NO: 1164590 - RNA, 19 nt, Homo sapiens
  misc_RNA (1)...(19): siRNA sense strand
gaaguuuccuggauacuau

SEQ ID NO: 1164591 - RNA, 19 nt, Homo sapiens
  misc_RNA (1)...(19): siRNA sense strand
gagacaaccuacuuuaaga

SEQ ID NO: 1164592 - RNA, 19 nt, Homo sapiens
  misc_RNA (1)...(19): siRNA sense strand
uuaagaaguuuccuggaua

SEQ ID NO: 1164593 - RNA, 19 nt, Homo sapiens
  misc_RNA (1)...(19): siRNA sense strand
gagaugagccugucaccaa

SEQ ID NO: 1164594 - RNA, 19 nt, Homo sapiens
  misc_RNA (1)...(19): siRNA sense strand
ccacaaccuucaaguaugu

SEQ ID NO: 1164595 - RNA, 19 nt, Homo sapiens
  misc_RNA (1)...(19): siRNA sense strand
gcaccuggcuugccuaaaa

SEQ ID NO: 1164596 - RNA, 19 nt, Homo sapiens
  misc_RNA (1)...(19): siRNA sense strand
ucaagaagcagauuagaga

SEQ ID NO: 1164597 - RNA, 19 nt, Homo sapiens
  misc_RNA (1)...(19): siRNA sense strand
ccacauauccggacgugaa

SEQ ID NO: 1164598 - RNA, 19 nt, Homo sapiens
  misc_RNA (1)...(19): siRNA sense strand
ggaagauugcucagaauga

SEQ ID NO: 1164599 - RNA, 19 nt, Homo sapiens
  misc_RNA (1)...(19): siRNA sense strand
caacuuugaugugacuaaa

SEQ ID NO: 1164600 - RNA, 19 nt, Homo sapiens
  misc_RNA (1)...(19): siRNA sense strand
ggaccaggauggcuauuac

SEQ ID NO: 1164601 - RNA, 19 nt, Homo sapiens
  misc_RNA (1)...(19): siRNA sense strand
aauacaaggugaccaaguu

SEQ ID NO: 1164602 - RNA, 19 nt, Homo sapiens
  misc_RNA (1)...(19): siRNA sense strand
ccgaggagcucaagaagca

SEQ ID NO: 1164603 - RNA, 19 nt, Homo sapiens
  misc_RNA (1)...(19): siRNA sense strand
gugaaugccucuacugcuu

SEQ ID NO: 1164604 - RNA, 19 nt, Homo sapiens
  misc_RNA (1)...(19): siRNA sense strand
ggagucagcacuuguggaa

SEQ ID NO: 1164605 - RNA, 19 nt, Homo sapiens
  misc_RNA (1)...(19): siRNA sense strand
gaaugccucuacugcuuug

SEQ ID NO: 1164606 - RNA, 19 nt, Homo sapiens
  misc_RNA (1)...(19): siRNA sense strand
gaagauugcucagaaugac

SEQ ID NO: 1164607 - RNA, 19 nt, Homo sapiens
  misc_RNA (1)...(19): siRNA sense strand
guggacaccuucuggcaaa

SEQ ID NO: 1164608 - RNA, 19 nt, Homo sapiens
  misc_RNA (1)...(19): siRNA sense strand
ccacucagaucacauacca

SEQ ID NO: 1164609 - RNA, 19 nt, Homo sapiens
  misc_RNA (1)...(19): siRNA sense strand
gagcucaagaagcagauua

SEQ ID NO: 1164610 - RNA, 19 nt, Homo sapiens
  misc_RNA (1)...(19): siRNA sense strand
gauuccagcugcagucuuc

SEQ ID NO: 1164611 - RNA, 19 nt, Homo sapiens
  misc_RNA (1)...(19): siRNA sense strand
acaauguacuggaucgaaa

SEQ ID NO: 1164612 - RNA, 19 nt, Homo sapiens
  misc_RNA (1)...(19): siRNA sense strand
gugaacggaucuuggauuc

SEQ ID NO: 1164613 - RNA, 19 nt, Homo sapiens
  misc_RNA (1)...(19): siRNA sense strand
gggaaaaucuucauugagu

SEQ ID NO: 1164614 - RNA, 19 nt, Homo sapiens
  misc_RNA (1)...(19): siRNA sense strand
ggagaccacucagaucaca

SEQ ID NO: 1164615 - RNA, 19 nt, Homo sapiens
  misc_RNA (1)...(19): siRNA sense strand
guuggaaggugaagcugaa

SEQ ID NO: 1164616 - RNA, 19 nt, Homo sapiens
  misc_RNA (1)...(19): siRNA sense strand
gccacaaccuucaaguaug

SEQ ID NO: 1164617 - RNA, 19 nt, Homo sapiens
  misc_RNA (1)...(19): siRNA sense strand
guacaacuuugaugugacu

SEQ ID NO: 1164618 - RNA, 19 nt, Homo sapiens
  misc_RNA (1)...(19): siRNA sense strand
agagacagguggccacaug

SEQ ID NO: 1164619 - RNA, 19 nt, Homo sapiens
  misc_RNA (1)...(19): siRNA sense strand
gaucacauaccaucagcuu

SEQ ID NO: 1164620 - RNA, 19 nt, Homo sapiens
  misc_RNA (1)...(19): siRNA sense strand
ucagcaauguucuccgaaa

SEQ ID NO: 1164621 - RNA, 19 nt, Homo sapiens
  misc_RNA (1)...(19): siRNA sense strand
aagguuaucugguguucaa

SEQ ID NO: 1164622 - RNA, 19 nt, Homo sapiens
  misc_RNA (1)...(19): siRNA sense strand
gcagaagugucaggagaag

SEQ ID NO: 1164623 - RNA, 19 nt, Homo sapiens
  misc_RNA (1)...(19): siRNA sense strand
uaagaaguuuccuggauac

SEQ ID NO: 1164624 - RNA, 19 nt, Homo sapiens
  misc_RNA (1)...(19): siRNA sense strand
caacuaccaacaucugcua

SEQ ID NO: 1164625 - RNA, 19 nt, Homo sapiens
  misc_RNA (1)...(19): siRNA sense strand
gaucaugcgcacagucuau

SEQ ID NO: 1164626 - RNA, 19 nt, Homo sapiens
  misc_RNA (1)...(19): siRNA sense strand
gcuuugcacuccauugugu

SEQ ID NO: 1164627 - RNA, 19 nt, Homo sapiens
  misc_RNA (1)...(19): siRNA sense strand
gaaaacagggcauucagaa

SEQ ID NO: 1164628 - RNA, 19 nt, Homo sapiens
  misc_RNA (1)...(19): siRNA sense strand
gcagucuucucaucacuac

SEQ ID NO: 1164629 - RNA, 19 nt, Homo sapiens
  misc_RNA (1)...(19): siRNA sense strand
uuuccuggauacuauguua

SEQ ID NO: 1164630 - RNA, 19 nt, Homo sapiens
  misc_RNA (1)...(19): siRNA sense strand
gggagacauugccaaggaa

SEQ ID NO: 1164631 - RNA, 19 nt, Homo sapiens
  misc_RNA (1)...(19): siRNA sense strand
gagccugucaccaagcaua

SEQ ID NO: 1164632 - RNA, 19 nt, Homo sapiens
  misc_RNA (1)...(19): siRNA sense strand
agacauugccaaggaauuu

SEQ ID NO: 1164633 - RNA, 19 nt, Homo sapiens
  misc_RNA (1)...(19): siRNA sense strand
gagguggagucagcacuug

SEQ ID NO: 1164634 - RNA, 19 nt, Homo sapiens
  misc_RNA (1)...(19): siRNA sense strand
cagcacuuguggaacauga

SEQ ID NO: 1164635 - RNA, 19 nt, Homo sapiens
  misc_RNA (1)...(19): siRNA sense strand
gaucgaaauguccaugaga

SEQ ID NO: 1164636 - RNA, 19 nt, Homo sapiens
  misc_RNA (1)...(19): siRNA sense strand
ugucaucagucaccucuuc

SEQ ID NO: 1164637 - RNA, 19 nt, Homo sapiens
  misc_RNA (1)...(19): siRNA sense strand
gggcauccuugcagguguu

SEQ ID NO: 1164638 - RNA, 19 nt, Homo sapiens
  misc_RNA (1)...(19): siRNA sense strand
ugacuuccaugcagaggau

SEQ ID NO: 1164639 - RNA, 19 nt, Homo sapiens
  misc_RNA (1)...(19): siRNA sense strand
ugaugugacuaaagggaaa

SEQ ID NO: 1164640 - RNA, 19 nt, Homo sapiens
  misc_RNA (1)...(19): siRNA sense strand
gaaggguuucccaguaaga

SEQ ID NO: 1164641 - RNA, 19 nt, Homo sapiens
  misc_RNA (1)...(19): siRNA sense strand
gaaaagauuggccccauug

SEQ ID NO: 1164642 - RNA, 19 nt, Homo sapiens
  misc_RNA (1)...(19): siRNA sense strand
accaacaucugcuacaaug

SEQ ID NO: 1164643 - RNA, 19 nt, Homo sapiens
  misc_RNA (1)...(19): siRNA sense strand
gggaccaggauggcuauua

SEQ ID NO: 1164644 - RNA, 19 nt, Homo sapiens
  misc_RNA (1)...(19): siRNA sense strand
uuuaagaaguuuccuggau

SEQ ID NO: 1164645 - RNA, 19 nt, Homo sapiens
  misc_RNA (1)...(19): siRNA sense strand
aaggugaagcugaagguua

SEQ ID NO: 1164646 - RNA, 19 nt, Homo sapiens
  misc_RNA (1)...(19): siRNA sense strand
ggaucgaaauguccaugag

SEQ ID NO: 1164647 - RNA, 19 nt, Homo sapiens
  misc_RNA (1)...(19): siRNA sense strand
cagacuacauccagaaugc

SEQ ID NO: 1164648 - RNA, 19 nt, Homo sapiens
  misc_RNA (1)...(19): siRNA sense strand
agucagcacuuguggaaca

SEQ ID NO: 1164649 - RNA, 19 nt, Homo sapiens
  misc_RNA (1)...(19): siRNA sense strand
ugagacaaccuacuuuaag

SEQ ID NO: 1164650 - RNA, 19 nt, Homo sapiens
  misc_RNA (1)...(19): siRNA sense strand
cacgaacgcuuugagacaa

SEQ ID NO: 1164651 - RNA, 19 nt, Homo sapiens
  misc_RNA (1)...(19): siRNA sense strand
ccacgaacgcuuugagaca

SEQ ID NO: 1164652 - RNA, 19 nt, Homo sapiens
  misc_RNA (1)...(19): siRNA sense strand
gagcaacuaccaacaucug

SEQ ID NO: 1164653 - RNA, 19 nt, Homo sapiens
  misc_RNA (1)...(19): siRNA sense strand
cgguacaacuuugauguga

SEQ ID NO: 1164654 - RNA, 19 nt, Homo sapiens
  misc_RNA (1)...(19): siRNA sense strand
aggugaagcugaagguuau

SEQ ID NO: 1164655 - RNA, 19 nt, Homo sapiens
  misc_RNA (1)...(19): siRNA sense strand
cagcugcagucuucucauc

SEQ ID NO: 1164656 - RNA, 19 nt, Homo sapiens
  misc_RNA (1)...(19): siRNA sense strand
agaccacucagaucacaua

SEQ ID NO: 1164657 - RNA, 19 nt, Homo sapiens
  misc_RNA (1)...(19): siRNA sense strand
gggaaaagcuugugaaccu

SEQ ID NO: 1164658 - RNA, 19 nt, Homo sapiens
  misc_RNA (1)...(19): siRNA sense strand
cuggaucacuggcaggauu

SEQ ID NO: 1164659 - RNA, 19 nt, Homo sapiens
  misc_RNA (1)...(19): siRNA sense strand
ucacauaccaucagcuucu

SEQ ID NO: 1164660 - RNA, 19 nt, Homo sapiens
  misc_RNA (1)...(19): siRNA sense strand
caagaagcagauuagagaa

SEQ ID NO: 1164661 - RNA, 19 nt, Homo sapiens
  misc_RNA (1)...(19): siRNA sense strand
ucaccgaggagcucaagaa

SEQ ID NO: 1164662 - RNA, 19 nt, Homo sapiens
  misc_RNA (1)...(19): siRNA sense strand
ccaaggaauuuuacuggaa

SEQ ID NO: 1164663 - RNA, 19 nt, Homo sapiens
  misc_RNA (1)...(19): siRNA sense strand
cuaccaacaucugcuacaa

SEQ ID NO: 1164664 - RNA, 19 nt, Homo sapiens
  misc_RNA (1)...(19): siRNA sense strand
gcagacauugguuggauca

SEQ ID NO: 1164665 - RNA, 19 nt, Homo sapiens
  misc_RNA (1)...(19): siRNA sense strand
gcagaucucauggaaccaa

SEQ ID NO: 1164666 - RNA, 19 nt, Homo sapiens
  misc_RNA (1)...(19): siRNA sense strand
gcccauuccuucgguacaa

SEQ ID NO: 1164667 - RNA, 19 nt, Homo sapiens
  misc_RNA (1)...(19): siRNA sense strand
ugguguagcuccugcaauc

SEQ ID NO: 1164668 - RNA, 19 nt, Homo sapiens
  misc_RNA (1)...(19): siRNA sense strand
acaaauacaaggugaccaa

SEQ ID NO: 1164669 - RNA, 19 nt, Homo sapiens
  misc_RNA (1)...(19): siRNA sense strand
guccaagugugucaguuca

SEQ ID NO: 1164670 - RNA, 19 nt, Homo sapiens
  misc_RNA (1)...(19): siRNA sense strand
gagcccgaguggugugaug

SEQ ID NO: 1164671 - RNA, 19 nt, Homo sapiens
  misc_RNA (1)...(19): siRNA sense strand
cuccugcaauccugaauga

SEQ ID NO: 1164672 - RNA, 19 nt, Homo sapiens
  misc_RNA (1)...(19): siRNA sense strand
ugaaugccucuacugcuuu

SEQ ID NO: 1164673 - RNA, 19 nt, Homo sapiens
  misc_RNA (1)...(19): siRNA sense strand
ccaucuacaugccuaugau

SEQ ID NO: 1164674 - RNA, 19 nt, Homo sapiens
  misc_RNA (1)...(19): siRNA sense strand
uggcaggauugaugacaug

SEQ ID NO: 1164675 - RNA, 19 nt, Homo sapiens
  misc_RNA (1)...(19): siRNA sense strand
ucacuggcaggauugauga

SEQ ID NO: 1164676 - RNA, 19 nt, Homo sapiens
  misc_RNA (1)...(19): siRNA sense strand
agacaaccuacuuuaagaa

SEQ ID NO: 1164677 - RNA, 19 nt, Homo sapiens
  misc_RNA (1)...(19): siRNA sense strand
gaaccacgaacgcuuugag

SEQ ID NO: 1164678 - RNA, 19 nt, Homo sapiens
  misc_RNA (1)...(19): siRNA sense strand
gaaggugaagcugaagguu

SEQ ID NO: 1164679 - RNA, 19 nt, Homo sapiens
  misc_RNA (1)...(19): siRNA sense strand
gacagguggccacauguug

SEQ ID NO: 1164680 - RNA, 19 nt, Homo sapiens
  misc_RNA (1)...(19): siRNA sense strand
uagccacaaccuucaagua

SEQ ID NO: 1164681 - RNA, 19 nt, Homo sapiens
  misc_RNA (1)...(19): siRNA sense strand
uaagaggucaugcccagau

SEQ ID NO: 1164682 - RNA, 19 nt, Homo sapiens
  misc_RNA (1)...(19): siRNA sense strand
cggcagacauugguuggau

SEQ ID NO: 1164683 - RNA, 19 nt, Homo sapiens
  misc_RNA (1)...(19): siRNA sense strand
aagaagcagauuagagaaa

SEQ ID NO: 1164684 - RNA, 19 nt, Homo sapiens
  misc_RNA (1)...(19): siRNA sense strand
ggaagaguuggaaggugaa

SEQ ID NO: 1164685 - RNA, 19 nt, Homo sapiens
  misc_RNA (1)...(19): siRNA sense strand
gagacauugccaaggaauu

SEQ ID NO: 1164686 - RNA, 19 nt, Homo sapiens
  misc_RNA (1)...(19): siRNA sense strand
uuugagacaaccuacuuua

SEQ ID NO: 1164687 - RNA, 19 nt, Homo sapiens
  misc_RNA (1)...(19): siRNA sense strand
ggggagacauugccaagga

SEQ ID NO: 1164688 - RNA, 19 nt, Homo sapiens
  misc_RNA (1)...(19): siRNA sense strand
ggagaaggguuucccagua

SEQ ID NO: 1164689 - RNA, 19 nt, Homo sapiens
  misc_RNA (1)...(19): siRNA sense strand
gagaaggguuucccaguaa

SEQ ID NO: 1164690 - RNA, 19 nt, Homo sapiens
  misc_RNA (1)...(19): siRNA sense strand
gaaguuuccuggauacuau

SEQ ID NO: 1164691 - RNA, 19 nt, Homo sapiens
  misc_RNA (1)...(19): siRNA sense strand
gagacaaccuacuuuaaga

SEQ ID NO: 1164692 - RNA, 19 nt, Homo sapiens
  misc_RNA (1)...(19): siRNA sense strand
uuaagaaguuuccuggaua

SEQ ID NO: 1164693 - RNA, 19 nt, Homo sapiens
  misc_RNA (1)...(19): siRNA sense strand
gagaugagccugucaccaa

SEQ ID NO: 1164694 - RNA, 19 nt, Homo sapiens
  misc_RNA (1)...(19): siRNA sense strand
ccacaaccuucaaguaugu

SEQ ID NO: 1164695 - RNA, 19 nt, Homo sapiens
  misc_RNA (1)...(19): siRNA sense strand
gcaccuggcuugccuaaaa

SEQ ID NO: 1164696 - RNA, 19 nt, Homo sapiens
  misc_RNA (1)...(19): siRNA sense strand
ucaagaagcagauuagaga

SEQ ID NO: 1164697 - RNA, 19 nt, Homo sapiens
  misc_RNA (1)...(19): siRNA sense strand
ccacauauccggacgugaa

SEQ ID NO: 1164698 - RNA, 19 nt, Homo sapiens
  misc_RNA (1)...(19): siRNA sense strand
ggaagauugcucagaauga

SEQ ID NO: 1164699 - RNA, 19 nt, Homo sapiens
  misc_RNA (1)...(19): siRNA sense strand
ggaccaggauggcuauuac

SEQ ID NO: 1164700 - RNA, 19 nt, Homo sapiens
  misc_RNA (1)...(19): siRNA sense strand
aauacaaggugaccaaguu

SEQ ID NO: 1164701 - RNA, 19 nt, Homo sapiens
  misc_RNA (1)...(19): siRNA sense strand
ccgaggagcucaagaagca

SEQ ID NO: 1164702 - RNA, 19 nt, Homo sapiens
  misc_RNA (1)...(19): siRNA sense strand
gugaaugccucuacugcuu

SEQ ID NO: 1164703 - RNA, 19 nt, Homo sapiens
  misc_RNA (1)...(19): siRNA sense strand
ggagucagcacuuguggaa

SEQ ID NO: 1164704 - RNA, 19 nt, Homo sapiens
  misc_RNA (1)...(19): siRNA sense strand
gaaugccucuacugcuuug

SEQ ID NO: 1164705 - RNA, 19 nt, Homo sapiens
  misc_RNA (1)...(19): siRNA sense strand
gaagauugcucagaaugac

SEQ ID NO: 1164706 - RNA, 19 nt, Homo sapiens
  misc_RNA (1)...(19): siRNA sense strand
guggacaccuucuggcaaa

SEQ ID NO: 1164707 - RNA, 19 nt, Homo sapiens
  misc_RNA (1)...(19): siRNA sense strand
ccacucagaucacauacca

SEQ ID NO: 1164708 - RNA, 19 nt, Homo sapiens
  misc_RNA (1)...(19): siRNA sense strand
gagcucaagaagcagauua

SEQ ID NO: 1164709 - RNA, 19 nt, Homo sapiens
  misc_RNA (1)...(19): siRNA sense strand
gauuccagcugcagucuuc

SEQ ID NO: 1164710 - RNA, 19 nt, Homo sapiens
  misc_RNA (1)...(19): siRNA sense strand
gugaacggaucuuggauuc

SEQ ID NO: 1164711 - RNA, 19 nt, Homo sapiens
  misc_RNA (1)...(19): siRNA sense strand
acaauguacuggaucgaaa

SEQ ID NO: 1164712 - RNA, 19 nt, Homo sapiens
  misc_RNA (1)...(19): siRNA sense strand
ggagaccacucagaucaca

SEQ ID NO: 1164713 - RNA, 19 nt, Homo sapiens
  misc_RNA (1)...(19): siRNA sense strand
guuggaaggugaagcugaa

SEQ ID NO: 1164714 - RNA, 19 nt, Homo sapiens
  misc_RNA (1)...(19): siRNA sense strand
gccacaaccuucaaguaug

SEQ ID NO: 1164715 - RNA, 19 nt, Homo sapiens
  misc_RNA (1)...(19): siRNA sense strand
gaucacauaccaucagcuu

SEQ ID NO: 1164716 - RNA, 19 nt, Homo sapiens
  misc_RNA (1)...(19): siRNA sense strand
agagacagguggccacaug

SEQ ID NO: 1164717 - RNA, 19 nt, Homo sapiens
  misc_RNA (1)...(19): siRNA sense strand
ucagcaauguucuccgaaa

SEQ ID NO: 1164718 - RNA, 19 nt, Homo sapiens
  misc_RNA (1)...(19): siRNA sense strand
aagguuaucugguguucaa

SEQ ID NO: 1164719 - RNA, 19 nt, Homo sapiens
  misc_RNA (1)...(19): siRNA sense strand
gcagaagugucaggagaag

SEQ ID NO: 1164720 - RNA, 19 nt, Homo sapiens
  misc_RNA (1)...(19): siRNA sense strand
uaagaaguuuccuggauac

SEQ ID NO: 1164721 - RNA, 19 nt, Homo sapiens
  misc_RNA (1)...(19): siRNA sense strand
gaaaacagggcauucagaa

SEQ ID NO: 1164722 - RNA, 19 nt, Homo sapiens
  misc_RNA (1)...(19): siRNA sense strand
gaucaugcgcacagucuau

SEQ ID NO: 1164723 - RNA, 19 nt, Homo sapiens
  misc_RNA (1)...(19): siRNA sense strand
caacuaccaacaucugcua

SEQ ID NO: 1164724 - RNA, 19 nt, Homo sapiens
  misc_RNA (1)...(19): siRNA sense strand
gcuuugcacuccauugugu

SEQ ID NO: 1164725 - RNA, 19 nt, Homo sapiens
  misc_RNA (1)...(19): siRNA sense strand
gcagucuucucaucacuac

SEQ ID NO: 1164726 - RNA, 19 nt, Homo sapiens
  misc_RNA (1)...(19): siRNA sense strand
uuuccuggauacuauguua

SEQ ID NO: 1164727 - RNA, 19 nt, Homo sapiens
  misc_RNA (1)...(19): siRNA sense strand
gagccugucaccaagcaua

SEQ ID NO: 1164728 - RNA, 19 nt, Homo sapiens
  misc_RNA (1)...(19): siRNA sense strand
gagguggagucagcacuug

SEQ ID NO: 1164729 - RNA, 19 nt, Homo sapiens
  misc_RNA (1)...(19): siRNA sense strand
cagcacuuguggaacauga

SEQ ID NO: 1164730 - RNA, 19 nt, Homo sapiens
  misc_RNA (1)...(19): siRNA sense strand
ugacuuccaugcagaggau

SEQ ID NO: 1164731 - RNA, 19 nt, Homo sapiens
  misc_RNA (1)...(19): siRNA sense strand
ugucaucagucaccucuuc

SEQ ID NO: 1164732 - RNA, 19 nt, Homo sapiens
  misc_RNA (1)...(19): siRNA sense strand
gaucgaaauguccaugaga

SEQ ID NO: 1164733 - RNA, 19 nt, Homo sapiens
  misc_RNA (1)...(19): siRNA sense strand
gggcauccuugcagguguu

SEQ ID NO: 1164734 - RNA, 19 nt, Homo sapiens
  misc_RNA (1)...(19): siRNA sense strand
gaaggguuucccaguaaga

SEQ ID NO: 1164735 - RNA, 19 nt, Homo sapiens
  misc_RNA (1)...(19): siRNA sense strand
gaaaagauuggccccauug

SEQ ID NO: 1164736 - RNA, 19 nt, Homo sapiens
  misc_RNA (1)...(19): siRNA sense strand
aaggugaagcugaagguua

SEQ ID NO: 1164737 - RNA, 19 nt, Homo sapiens
  misc_RNA (1)...(19): siRNA sense strand
accaacaucugcuacaaug

SEQ ID NO: 1164738 - RNA, 19 nt, Homo sapiens
  misc_RNA (1)...(19): siRNA sense strand
gggaccaggauggcuauua

SEQ ID NO: 1164739 - RNA, 19 nt, Homo sapiens
  misc_RNA (1)...(19): siRNA sense strand
uuuaagaaguuuccuggau

SEQ ID NO: 1164740 - RNA, 19 nt, Homo sapiens
  misc_RNA (1)...(19): siRNA sense strand
agaccacucagaucacaua

SEQ ID NO: 1164741 - RNA, 19 nt, Homo sapiens
  misc_RNA (1)...(19): siRNA sense strand
cagacuacauccagaaugc

SEQ ID NO: 1164742 - RNA, 19 nt, Homo sapiens
  misc_RNA (1)...(19): siRNA sense strand
agucagcacuuguggaaca

SEQ ID NO: 1164743 - RNA, 19 nt, Homo sapiens
  misc_RNA (1)...(19): siRNA sense strand
ggaucgaaauguccaugag

SEQ ID NO: 1164744 - RNA, 19 nt, Homo sapiens
  misc_RNA (1)...(19): siRNA sense strand
gagcaacuaccaacaucug

SEQ ID NO: 1164745 - RNA, 19 nt, Homo sapiens
  misc_RNA (1)...(19): siRNA sense strand
ugagacaaccuacuuuaag

SEQ ID NO: 1164746 - RNA, 19 nt, Homo sapiens
  misc_RNA (1)...(19): siRNA sense strand
cacgaacgcuuugagacaa

SEQ ID NO: 1164747 - RNA, 19 nt, Homo sapiens
  misc_RNA (1)...(19): siRNA sense strand
ccacgaacgcuuugagaca

SEQ ID NO: 1164748 - RNA, 19 nt, Homo sapiens
  misc_RNA (1)...(19): siRNA sense strand
aggugaagcugaagguuau

SEQ ID NO: 1164749 - RNA, 19 nt, Homo sapiens
  misc_RNA (1)...(19): siRNA sense strand
cagcugcagucuucucauc

SEQ ID NO: 1164750 - RNA, 19 nt, Homo sapiens
  misc_RNA (1)...(19): siRNA sense strand
gggaaaagcuugugaaccu

SEQ ID NO: 1164751 - RNA, 19 nt, Homo sapiens
  misc_RNA (1)...(19): siRNA sense strand
cuggaucacuggcaggauu

SEQ ID NO: 1164752 - RNA, 19 nt, Homo sapiens
  misc_RNA (1)...(19): siRNA sense strand
gcagaucucauggaaccaa

SEQ ID NO: 1164753 - RNA, 19 nt, Homo sapiens
  misc_RNA (1)...(19): siRNA sense strand
caagaagcagauuagagaa

SEQ ID NO: 1164754 - RNA, 19 nt, Homo sapiens
  misc_RNA (1)...(19): siRNA sense strand
ucaccgaggagcucaagaa

SEQ ID NO: 1164755 - RNA, 19 nt, Homo sapiens
  misc_RNA (1)...(19): siRNA sense strand
ucacauaccaucagcuucu

SEQ ID NO: 1164756 - RNA, 19 nt, Homo sapiens
  misc_RNA (1)...(19): siRNA sense strand
gcagacauugguuggauca

SEQ ID NO: 1164757 - RNA, 19 nt, Homo sapiens
  misc_RNA (1)...(19): siRNA sense strand
cuaccaacaucugcuacaa

SEQ ID NO: 1164758 - RNA, 19 nt, Homo sapiens
  misc_RNA (1)...(19): siRNA sense strand
acaaauacaaggugaccaa

SEQ ID NO: 1164759 - RNA, 19 nt, Homo sapiens
  misc_RNA (1)...(19): siRNA sense strand
ugguguagcuccugcaauc

SEQ ID NO: 1164760 - RNA, 19 nt, Homo sapiens
  misc_RNA (1)...(19): siRNA sense strand
gagcccgaguggugugaug

SEQ ID NO: 1164761 - RNA, 19 nt, Homo sapiens
  misc_RNA (1)...(19): siRNA sense strand
guccaagugugucaguuca

SEQ ID NO: 1164762 - RNA, 19 nt, Homo sapiens
  misc_RNA (1)...(19): siRNA sense strand
cuccugcaauccugaauga

SEQ ID NO: 1164763 - RNA, 19 nt, Homo sapiens
  misc_RNA (1)...(19): siRNA sense strand
ugaaugccucuacugcuuu

SEQ ID NO: 1164764 - RNA, 19 nt, Homo sapiens
  misc_RNA (1)...(19): siRNA sense strand
ccaucuacaugccuaugau

SEQ ID NO: 1164765 - RNA, 19 nt, Homo sapiens
  misc_RNA (1)...(19): siRNA sense strand
uggcaggauugaugacaug

SEQ ID NO: 1164766 - RNA, 19 nt, Homo sapiens
  misc_RNA (1)...(19): siRNA sense strand
ucacuggcaggauugauga

SEQ ID NO: 1164767 - RNA, 19 nt, Homo sapiens
  misc_RNA (1)...(19): siRNA sense strand
agacaaccuacuuuaagaa

SEQ ID NO: 1164768 - RNA, 19 nt, Homo sapiens
  misc_RNA (1)...(19): siRNA sense strand
gaaccacgaacgcuuugag

SEQ ID NO: 1164769 - RNA, 19 nt, Homo sapiens
  misc_RNA (1)...(19): siRNA sense strand
gaaggugaagcugaagguu

SEQ ID NO: 1164770 - RNA, 19 nt, Homo sapiens
  misc_RNA (1)...(19): siRNA sense strand
gacagguggccacauguug

SEQ ID NO: 1164771 - RNA, 19 nt, Homo sapiens
  misc_RNA (1)...(19): siRNA sense strand
uagccacaaccuucaagua

SEQ ID NO: 1164772 - RNA, 19 nt, Homo sapiens
  misc_RNA (1)...(19): siRNA sense strand
uaagaggucaugcccagau

SEQ ID NO: 1164773 - RNA, 19 nt, Homo sapiens
  misc_RNA (1)...(19): siRNA sense strand
cggcagacauugguuggau

SEQ ID NO: 1164774 - RNA, 19 nt, Homo sapiens
  misc_RNA (1)...(19): siRNA sense strand
aagaagcagauuagagaaa

SEQ ID NO: 1164775 - RNA, 19 nt, Homo sapiens
  misc_RNA (1)...(19): siRNA sense strand
ggaagaguuggaaggugaa

SEQ ID NO: 1164776 - RNA, 19 nt, Homo sapiens
  misc_RNA (1)...(19): siRNA sense strand
uuugagacaaccuacuuua

SEQ ID NO: 1164777 - RNA, 19 nt, Homo sapiens
  misc_RNA (1)...(19): siRNA sense strand
ucacuacagaugccuucua

SEQ ID NO: 1164778 - RNA, 19 nt, Homo sapiens
  misc_RNA (1)...(19): siRNA sense strand
gaagggugaaugccucuac

SEQ ID NO: 1164779 - RNA, 19 nt, Homo sapiens
  misc_RNA (1)...(19): siRNA sense strand
ggacaccugcugaguacag

SEQ ID NO: 1164780 - RNA, 19 nt, Homo sapiens
  misc_RNA (1)...(19): siRNA sense strand
gcuuugagacaaccuacuu

SEQ ID NO: 1164781 - RNA, 19 nt, Homo sapiens
  misc_RNA (1)...(19): siRNA sense strand
ggaaggugaagcugaaggu

SEQ ID NO: 1164782 - RNA, 19 nt, Homo sapiens
  misc_RNA (1)...(19): siRNA sense strand
gggaccgaguggccaucua

SEQ ID NO: 1164783 - RNA, 19 nt, Homo sapiens
  misc_RNA (1)...(19): siRNA sense strand
gcucaugaaguuuggagau

SEQ ID NO: 1164784 - RNA, 19 nt, Homo sapiens
  misc_RNA (1)...(19): siRNA sense strand
acaaggugaccaaguucua

SEQ ID NO: 1164785 - RNA, 19 nt, Homo sapiens
  misc_RNA (1)...(19): siRNA sense strand
ggaaccaagggauugacuu

SEQ ID NO: 1164786 - RNA, 19 nt, Homo sapiens
  misc_RNA (1)...(19): siRNA sense strand
acgaggcccugcagaagug

SEQ ID NO: 1164787 - RNA, 19 nt, Homo sapiens
  misc_RNA (1)...(19): siRNA sense strand
cuacagaugccuucuacag

SEQ ID NO: 1164788 - RNA, 19 nt, Homo sapiens
  misc_RNA (1)...(19): siRNA sense strand
gcagagaaguugccaagua

SEQ ID NO: 1164789 - RNA, 19 nt, Homo sapiens
  misc_RNA (1)...(19): siRNA sense strand
gaggagagcuuggauagaa

SEQ ID NO: 1164790 - RNA, 19 nt, Homo sapiens
  misc_RNA (1)...(19): siRNA sense strand
gaggagagcuuggauagaa

SEQ ID NO: 1164791 - RNA, 19 nt, Homo sapiens
  misc_RNA (1)...(19): siRNA sense strand
gagcugaaccucaccaaua

SEQ ID NO: 1164792 - RNA, 19 nt, Homo sapiens
  misc_RNA (1)...(19): siRNA sense strand
acacagagcuggcaaagga

SEQ ID NO: 1164793 - RNA, 19 nt, Homo sapiens
  misc_RNA (1)...(19): siRNA sense strand
ggaaauaacggucaucugu

SEQ ID NO: 1164794 - RNA, 19 nt, Homo sapiens
  misc_RNA (1)...(19): siRNA sense strand
gaggagggcuuggauagaa

SEQ ID NO: 1164795 - RNA, 19 nt, Homo sapiens
  misc_RNA (1)...(19): siRNA sense strand
gaggagggcuuggauagaa

SEQ ID NO: 1164796 - RNA, 19 nt, Homo sapiens
  misc_RNA (1)...(19): siRNA sense strand
gaggagggcuuggauagaa

SEQ ID NO: 1164797 - RNA, 19 nt, Homo sapiens
  misc_RNA (1)...(19): siRNA sense strand
ccaaaucgauuccucuaga

SEQ ID NO: 1164798 - RNA, 19 nt, Homo sapiens
  misc_RNA (1)...(19): siRNA sense strand
ggauagaaaugaggagauu

SEQ ID NO: 1164799 - RNA, 19 nt, Homo sapiens
  misc_RNA (1)...(19): siRNA sense strand
gaagacgucugucccaaag

SEQ ID NO: 1164800 - RNA, 19 nt, Homo sapiens
  misc_RNA (1)...(19): siRNA sense strand
caaaucagcugaggugugu

SEQ ID NO: 1164801 - RNA, 19 nt, Homo sapiens
  misc_RNA (1)...(19): siRNA sense strand
acaaagcgcugaacuugau

SEQ ID NO: 1164802 - RNA, 19 nt, Homo sapiens
  misc_RNA (1)...(19): siRNA sense strand
gagaugaagugguguugau

SEQ ID NO: 1164803 - RNA, 19 nt, Homo sapiens
  misc_RNA (1)...(19): siRNA sense strand
ccaggacacugcucagauu

SEQ ID NO: 1164804 - RNA, 19 nt, Homo sapiens
  misc_RNA (1)...(19): siRNA sense strand
guacuauucuccagcaaau

SEQ ID NO: 1164805 - RNA, 19 nt, Homo sapiens
  misc_RNA (1)...(19): siRNA sense strand
gccaagaucuacauuucaa

SEQ ID NO: 1164806 - RNA, 19 nt, Homo sapiens
  misc_RNA (1)...(19): siRNA sense strand
agacgucugucccaaagua

SEQ ID NO: 1164807 - RNA, 19 nt, Homo sapiens
  misc_RNA (1)...(19): siRNA sense strand
caagugaucucagaagcaa

SEQ ID NO: 1164808 - RNA, 19 nt, Homo sapiens
  misc_RNA (1)...(19): siRNA sense strand
gggagcaugucuuggaauu

SEQ ID NO: 1164809 - RNA, 19 nt, Homo sapiens
  misc_RNA (1)...(19): siRNA sense strand
gaagaugccaccuguguca

SEQ ID NO: 1164810 - RNA, 19 nt, Homo sapiens
  misc_RNA (1)...(19): siRNA sense strand
caacuggucuuccucugau

SEQ ID NO: 1164811 - RNA, 19 nt, Homo sapiens
  misc_RNA (1)...(19): siRNA sense strand
gauaaucucccaagugauc

SEQ ID NO: 1164812 - RNA, 19 nt, Homo sapiens
  misc_RNA (1)...(19): siRNA sense strand
ugaagaagcucuguugucu

SEQ ID NO: 1164813 - RNA, 19 nt, Homo sapiens
  misc_RNA (1)...(19): siRNA sense strand
uugcucaggugacaaguua

SEQ ID NO: 1164814 - RNA, 19 nt, Homo sapiens
  misc_RNA (1)...(19): siRNA sense strand
gagcaugucuuggaauugg

SEQ ID NO: 1164815 - RNA, 19 nt, Homo sapiens
  misc_RNA (1)...(19): siRNA sense strand
ggacacugcucagauucuu

SEQ ID NO: 1164816 - RNA, 19 nt, Homo sapiens
  misc_RNA (1)...(19): siRNA sense strand
gauauaagagggugaaagu

SEQ ID NO: 1164817 - RNA, 19 nt, Homo sapiens
  misc_RNA (1)...(19): siRNA sense strand
guccagaucugccacauag

SEQ ID NO: 1164818 - RNA, 19 nt, Homo sapiens
  misc_RNA (1)...(19): siRNA sense strand
gaugaagugguguugauaa

SEQ ID NO: 1164819 - RNA, 19 nt, Homo sapiens
  misc_RNA (1)...(19): siRNA sense strand
cagagaaguugccaaguag

SEQ ID NO: 1164820 - RNA, 19 nt, Homo sapiens
  misc_RNA (1)...(19): siRNA sense strand
gugccaagaucuacauuuc

SEQ ID NO: 1164821 - RNA, 19 nt, Homo sapiens
  misc_RNA (1)...(19): siRNA sense strand
cccaaaggguguacuauuc

SEQ ID NO: 1164822 - RNA, 19 nt, Homo sapiens
  misc_RNA (1)...(19): siRNA sense strand
ggagugugguuggagauga

SEQ ID NO: 1164823 - RNA, 19 nt, Homo sapiens
  misc_RNA (1)...(19): siRNA sense strand
gggaaaaggugcuugaaga

SEQ ID NO: 1164824 - RNA, 19 nt, Homo sapiens
  misc_RNA (1)...(19): siRNA sense strand
gaaaugaggagagcuugga

SEQ ID NO: 1164825 - RNA, 19 nt, Homo sapiens
  misc_RNA (1)...(19): siRNA sense strand
cagcauggauuccguggau

SEQ ID NO: 1164826 - RNA, 19 nt, Homo sapiens
  misc_RNA (1)...(19): siRNA sense strand
ggaagacgucugucccaaa

SEQ ID NO: 1164827 - RNA, 19 nt, Homo sapiens
  misc_RNA (1)...(19): siRNA sense strand
uacgugagcugccugaaga

SEQ ID NO: 1164828 - RNA, 19 nt, Homo sapiens
  misc_RNA (1)...(19): siRNA sense strand
gaacuugauugggaagaag

SEQ ID NO: 1164829 - RNA, 19 nt, Homo sapiens
  misc_RNA (1)...(19): siRNA sense strand
auagaaggcucucaacauc

SEQ ID NO: 1164830 - RNA, 19 nt, Homo sapiens
  misc_RNA (1)...(19): siRNA sense strand
gaagugguguugauaaacc

SEQ ID NO: 1164831 - RNA, 19 nt, Homo sapiens
  misc_RNA (1)...(19): siRNA sense strand
ggaggaagaguauguagca

SEQ ID NO: 1164832 - RNA, 19 nt, Homo sapiens
  misc_RNA (1)...(19): siRNA sense strand
ggacuacggcggauauaag

SEQ ID NO: 1164833 - RNA, 19 nt, Homo sapiens
  misc_RNA (1)...(19): siRNA sense strand
agacaaagcgcugaacuug

SEQ ID NO: 1164834 - RNA, 19 nt, Homo sapiens
  misc_RNA (1)...(19): siRNA sense strand
gaaaugaggagggcuugga

SEQ ID NO: 1164835 - RNA, 19 nt, Homo sapiens
  misc_RNA (1)...(19): siRNA sense strand
gaaaugaggagggcuugga

SEQ ID NO: 1164836 - RNA, 19 nt, Homo sapiens
  misc_RNA (1)...(19): siRNA sense strand
gaaaugaggagggcuugga

SEQ ID NO: 1164837 - RNA, 19 nt, Homo sapiens
  misc_RNA (1)...(19): siRNA sense strand
gacagguggugaagccaaa

SEQ ID NO: 1164838 - RNA, 19 nt, Homo sapiens
  misc_RNA (1)...(19): siRNA sense strand
gagcuuggauagaaaugag

SEQ ID NO: 1164839 - RNA, 19 nt, Homo sapiens
  misc_RNA (1)...(19): siRNA sense strand
gagcuuggauagaaaugag

SEQ ID NO: 1164840 - RNA, 19 nt, Homo sapiens
  misc_RNA (1)...(19): siRNA sense strand
ucacagagccuccagaaaa

SEQ ID NO: 1164841 - RNA, 19 nt, Homo sapiens
  misc_RNA (1)...(19): siRNA sense strand
ucaagaagacugagagcuu

SEQ ID NO: 1164842 - RNA, 19 nt, Homo sapiens
  misc_RNA (1)...(19): siRNA sense strand
gaaaguacugugcccuuca

SEQ ID NO: 1164843 - RNA, 19 nt, Homo sapiens
  misc_RNA (1)...(19): siRNA sense strand
gauagaaaugaggagauua

SEQ ID NO: 1164844 - RNA, 19 nt, Homo sapiens
  misc_RNA (1)...(19): siRNA sense strand
gaaccucaccaauaucuac

SEQ ID NO: 1164845 - RNA, 19 nt, Homo sapiens
  misc_RNA (1)...(19): siRNA sense strand
ccagaucugccacauagaa

SEQ ID NO: 1164846 - RNA, 19 nt, Homo sapiens
  misc_RNA (1)...(19): siRNA sense strand
gacaggaacagcauggauu

SEQ ID NO: 1164847 - RNA, 19 nt, Homo sapiens
  misc_RNA (1)...(19): siRNA sense strand
agggagaacugggcaauga

SEQ ID NO: 1164848 - RNA, 19 nt, Homo sapiens
  misc_RNA (1)...(19): siRNA sense strand
gagugugguuggagaugaa

SEQ ID NO: 1164849 - RNA, 19 nt, Homo sapiens
  misc_RNA (1)...(19): siRNA sense strand
ccucgggcauucuuccuaa

SEQ ID NO: 1164850 - RNA, 19 nt, Homo sapiens
  misc_RNA (1)...(19): siRNA sense strand
gacaguaagccaaauaucu

SEQ ID NO: 1164851 - RNA, 19 nt, Homo sapiens
  misc_RNA (1)...(19): siRNA sense strand
uauaagagggugaaaguag

SEQ ID NO: 1164852 - RNA, 19 nt, Homo sapiens
  misc_RNA (1)...(19): siRNA sense strand
ccacauagaaggcucucaa

SEQ ID NO: 1164853 - RNA, 19 nt, Homo sapiens
  misc_RNA (1)...(19): siRNA sense strand
uaacaccacagacaugaga

SEQ ID NO: 1164854 - RNA, 19 nt, Homo sapiens
  misc_RNA (1)...(19): siRNA sense strand
gacaaagcgcugaacuuga

SEQ ID NO: 1164855 - RNA, 19 nt, Homo sapiens
  misc_RNA (1)...(19): siRNA sense strand
auaagagggugaaaguaga

SEQ ID NO: 1164856 - RNA, 19 nt, Homo sapiens
  misc_RNA (1)...(19): siRNA sense strand
cagcugagguguguaagca

SEQ ID NO: 1164857 - RNA, 19 nt, Homo sapiens
  misc_RNA (1)...(19): siRNA sense strand
gaccauggaugcggaagca

SEQ ID NO: 1164858 - RNA, 19 nt, Homo sapiens
  misc_RNA (1)...(19): siRNA sense strand
guacugugcccuucagcaa

SEQ ID NO: 1164859 - RNA, 19 nt, Homo sapiens
  misc_RNA (1)...(19): siRNA sense strand
ccaaggacaguaagccaaa

SEQ ID NO: 1164860 - RNA, 19 nt, Homo sapiens
  misc_RNA (1)...(19): siRNA sense strand
agagagcugugucccaguu

SEQ ID NO: 1164861 - RNA, 19 nt, Homo sapiens
  misc_RNA (1)...(19): siRNA sense strand
guauguagcagagaaguug

SEQ ID NO: 1164862 - RNA, 19 nt, Homo sapiens
  misc_RNA (1)...(19): siRNA sense strand
aagaguauguagcagagaa

SEQ ID NO: 1164863 - RNA, 19 nt, Homo sapiens
  misc_RNA (1)...(19): siRNA sense strand
gcaggaggaagaguaugua

SEQ ID NO: 1164864 - RNA, 19 nt, Homo sapiens
  misc_RNA (1)...(19): siRNA sense strand
ggagagggcaagagagaca

SEQ ID NO: 1164865 - RNA, 19 nt, Homo sapiens
  misc_RNA (1)...(19): siRNA sense strand
agaaggcucucaacaucau

SEQ ID NO: 1164866 - RNA, 19 nt, Homo sapiens
  misc_RNA (1)...(19): siRNA sense strand
cgggcugccuuccagauaa

SEQ ID NO: 1164867 - RNA, 19 nt, Homo sapiens
  misc_RNA (1)...(19): siRNA sense strand
gggcugacccugccaucaa

SEQ ID NO: 1164868 - RNA, 19 nt, Homo sapiens
  misc_RNA (1)...(19): siRNA sense strand
gcaaugaggagagcuugga

SEQ ID NO: 1164869 - RNA, 19 nt, Homo sapiens
  misc_RNA (1)...(19): siRNA sense strand
ucagacagcagccaaagug

SEQ ID NO: 1164870 - RNA, 19 nt, Homo sapiens
  misc_RNA (1)...(19): siRNA sense strand
caaaucgauuccucuagag

SEQ ID NO: 1164871 - RNA, 19 nt, Homo sapiens
  misc_RNA (1)...(19): siRNA sense strand
cauagaaggcucucaacau

SEQ ID NO: 1164872 - RNA, 19 nt, Homo sapiens
  misc_RNA (1)...(19): siRNA sense strand
gauagcuguugcagucuca

SEQ ID NO: 1164873 - RNA, 19 nt, Homo sapiens
  misc_RNA (1)...(19): siRNA sense strand
caaaggguguacuauucuc

SEQ ID NO: 1164874 - RNA, 19 nt, Homo sapiens
  misc_RNA (1)...(19): siRNA sense strand
gggcugccuuccagauaau

SEQ ID NO: 1164875 - RNA, 19 nt, Homo sapiens
  misc_RNA (1)...(19): siRNA sense strand
ucagcagggugccaaggaa

SEQ ID NO: 1164876 - RNA, 19 nt, Homo sapiens
  misc_RNA (1)...(19): siRNA sense strand
ugaacuugauugggaagaa

SEQ ID NO: 1164877 - RNA, 19 nt, Homo sapiens
  misc_RNA (1)...(19): siRNA sense strand
ggacaguaagccaaauauc

SEQ ID NO: 1164878 - RNA, 19 nt, Homo sapiens
  misc_RNA (1)...(19): siRNA sense strand
gguugcaggucgugugugu

SEQ ID NO: 1164879 - RNA, 19 nt, Homo sapiens
  misc_RNA (1)...(19): siRNA sense strand
gggcuuggauagaaaugag

SEQ ID NO: 1164880 - RNA, 19 nt, Homo sapiens
  misc_RNA (1)...(19): siRNA sense strand
gggcuuggauagaaaugag

SEQ ID NO: 1164881 - RNA, 19 nt, Homo sapiens
  misc_RNA (1)...(19): siRNA sense strand
gggcuuggauagaaaugag

SEQ ID NO: 1164882 - RNA, 19 nt, Homo sapiens
  misc_RNA (1)...(19): siRNA sense strand
ggagagcuuggauagaaau

SEQ ID NO: 1164883 - RNA, 19 nt, Homo sapiens
  misc_RNA (1)...(19): siRNA sense strand
augaagugguguugauaaa

SEQ ID NO: 1164884 - RNA, 19 nt, Homo sapiens
  misc_RNA (1)...(19): siRNA sense strand
ugauucagcuguggagugu

SEQ ID NO: 1164885 - RNA, 19 nt, Homo sapiens
  misc_RNA (1)...(19): siRNA sense strand
gacgugcuccggcaaauca

SEQ ID NO: 1164886 - RNA, 19 nt, Homo sapiens
  misc_RNA (1)...(19): siRNA sense strand
acugagagcuuccaaaaug

SEQ ID NO: 1164887 - RNA, 19 nt, Homo sapiens
  misc_RNA (1)...(19): siRNA sense strand
ggagagcuuggauagaaau

SEQ ID NO: 1164888 - RNA, 19 nt, Homo sapiens
  misc_RNA (1)...(19): siRNA sense strand
gcagagaaguugccaagua

SEQ ID NO: 1164889 - RNA, 19 nt, Homo sapiens
  misc_RNA (1)...(19): siRNA sense strand
gaggagagcuuggauagaa

SEQ ID NO: 1164890 - RNA, 19 nt, Homo sapiens
  misc_RNA (1)...(19): siRNA sense strand
gaggagagcuuggauagaa

SEQ ID NO: 1164891 - RNA, 19 nt, Homo sapiens
  misc_RNA (1)...(19): siRNA sense strand
acacagagcuggcaaagga

SEQ ID NO: 1164892 - RNA, 19 nt, Homo sapiens
  misc_RNA (1)...(19): siRNA sense strand
gaggagggcuuggauagaa

SEQ ID NO: 1164893 - RNA, 19 nt, Homo sapiens
  misc_RNA (1)...(19): siRNA sense strand
gaggagggcuuggauagaa

SEQ ID NO: 1164894 - RNA, 19 nt, Homo sapiens
  misc_RNA (1)...(19): siRNA sense strand
gaggagggcuuggauagaa

SEQ ID NO: 1164895 - RNA, 19 nt, Homo sapiens
  misc_RNA (1)...(19): siRNA sense strand
ccaaaucgauuccucuaga

SEQ ID NO: 1164896 - RNA, 19 nt, Homo sapiens
  misc_RNA (1)...(19): siRNA sense strand
ggauagaaaugaggagauu

SEQ ID NO: 1164897 - RNA, 19 nt, Homo sapiens
  misc_RNA (1)...(19): siRNA sense strand
gaagacgucugucccaaag

SEQ ID NO: 1164898 - RNA, 19 nt, Homo sapiens
  misc_RNA (1)...(19): siRNA sense strand
caaaucagcugaggugugu

SEQ ID NO: 1164899 - RNA, 19 nt, Homo sapiens
  misc_RNA (1)...(19): siRNA sense strand
ccaggacacugcucagauu

SEQ ID NO: 1164900 - RNA, 19 nt, Homo sapiens
  misc_RNA (1)...(19): siRNA sense strand
guacuauucuccagcaaau

SEQ ID NO: 1164901 - RNA, 19 nt, Homo sapiens
  misc_RNA (1)...(19): siRNA sense strand
agacgucugucccaaagua

SEQ ID NO: 1164902 - RNA, 19 nt, Homo sapiens
  misc_RNA (1)...(19): siRNA sense strand
caagugaucucagaagcaa

SEQ ID NO: 1164903 - RNA, 19 nt, Homo sapiens
  misc_RNA (1)...(19): siRNA sense strand
gggagcaugucuuggaauu

SEQ ID NO: 1164904 - RNA, 19 nt, Homo sapiens
  misc_RNA (1)...(19): siRNA sense strand
gaagaugccaccuguguca

SEQ ID NO: 1164905 - RNA, 19 nt, Homo sapiens
  misc_RNA (1)...(19): siRNA sense strand
gauaaucucccaagugauc

SEQ ID NO: 1164906 - RNA, 19 nt, Homo sapiens
  misc_RNA (1)...(19): siRNA sense strand
ugaagaagcucuguugucu

SEQ ID NO: 1164907 - RNA, 19 nt, Homo sapiens
  misc_RNA (1)...(19): siRNA sense strand
gagcaugucuuggaauugg

SEQ ID NO: 1164908 - RNA, 19 nt, Homo sapiens
  misc_RNA (1)...(19): siRNA sense strand
ggacacugcucagauucuu

SEQ ID NO: 1164909 - RNA, 19 nt, Homo sapiens
  misc_RNA (1)...(19): siRNA sense strand
cagagaaguugccaaguag

SEQ ID NO: 1164910 - RNA, 19 nt, Homo sapiens
  misc_RNA (1)...(19): siRNA sense strand
cccaaaggguguacuauuc

SEQ ID NO: 1164911 - RNA, 19 nt, Homo sapiens
  misc_RNA (1)...(19): siRNA sense strand
gggaaaaggugcuugaaga

SEQ ID NO: 1164912 - RNA, 19 nt, Homo sapiens
  misc_RNA (1)...(19): siRNA sense strand
ggaagacgucugucccaaa

SEQ ID NO: 1164913 - RNA, 19 nt, Homo sapiens
  misc_RNA (1)...(19): siRNA sense strand
gaaaugaggagagcuugga

SEQ ID NO: 1164914 - RNA, 19 nt, Homo sapiens
  misc_RNA (1)...(19): siRNA sense strand
uacgugagcugccugaaga

SEQ ID NO: 1164915 - RNA, 19 nt, Homo sapiens
  misc_RNA (1)...(19): siRNA sense strand
ggaggaagaguauguagca

SEQ ID NO: 1164916 - RNA, 19 nt, Homo sapiens
  misc_RNA (1)...(19): siRNA sense strand
gaaaugaggagggcuugga

SEQ ID NO: 1164917 - RNA, 19 nt, Homo sapiens
  misc_RNA (1)...(19): siRNA sense strand
gaaaugaggagggcuugga

SEQ ID NO: 1164918 - RNA, 19 nt, Homo sapiens
  misc_RNA (1)...(19): siRNA sense strand
gaaaugaggagggcuugga

SEQ ID NO: 1164919 - RNA, 19 nt, Homo sapiens
  misc_RNA (1)...(19): siRNA sense strand
gacagguggugaagccaaa

SEQ ID NO: 1164920 - RNA, 19 nt, Homo sapiens
  misc_RNA (1)...(19): siRNA sense strand
gagcuuggauagaaaugag

SEQ ID NO: 1164921 - RNA, 19 nt, Homo sapiens
  misc_RNA (1)...(19): siRNA sense strand
gagcuuggauagaaaugag

SEQ ID NO: 1164922 - RNA, 19 nt, Homo sapiens
  misc_RNA (1)...(19): siRNA sense strand
ucacagagccuccagaaaa

SEQ ID NO: 1164923 - RNA, 19 nt, Homo sapiens
  misc_RNA (1)...(19): siRNA sense strand
gaaaguacugugcccuuca

SEQ ID NO: 1164924 - RNA, 19 nt, Homo sapiens
  misc_RNA (1)...(19): siRNA sense strand
gauagaaaugaggagauua

SEQ ID NO: 1164925 - RNA, 19 nt, Homo sapiens
  misc_RNA (1)...(19): siRNA sense strand
ccucgggcauucuuccuaa

SEQ ID NO: 1164926 - RNA, 19 nt, Homo sapiens
  misc_RNA (1)...(19): siRNA sense strand
agggagaacugggcaauga

SEQ ID NO: 1164927 - RNA, 19 nt, Homo sapiens
  misc_RNA (1)...(19): siRNA sense strand
uaacaccacagacaugaga

SEQ ID NO: 1164928 - RNA, 19 nt, Homo sapiens
  misc_RNA (1)...(19): siRNA sense strand
gacaguaagccaaauaucu

SEQ ID NO: 1164929 - RNA, 19 nt, Homo sapiens
  misc_RNA (1)...(19): siRNA sense strand
cagcugagguguguaagca

SEQ ID NO: 1164930 - RNA, 19 nt, Homo sapiens
  misc_RNA (1)...(19): siRNA sense strand
gaccauggaugcggaagca

SEQ ID NO: 1164931 - RNA, 19 nt, Homo sapiens
  misc_RNA (1)...(19): siRNA sense strand
guacugugcccuucagcaa

SEQ ID NO: 1164932 - RNA, 19 nt, Homo sapiens
  misc_RNA (1)...(19): siRNA sense strand
ccaaggacaguaagccaaa

SEQ ID NO: 1164933 - RNA, 19 nt, Homo sapiens
  misc_RNA (1)...(19): siRNA sense strand
agagagcugugucccaguu

SEQ ID NO: 1164934 - RNA, 19 nt, Homo sapiens
  misc_RNA (1)...(19): siRNA sense strand
guauguagcagagaaguug

SEQ ID NO: 1164935 - RNA, 19 nt, Homo sapiens
  misc_RNA (1)...(19): siRNA sense strand
aagaguauguagcagagaa

SEQ ID NO: 1164936 - RNA, 19 nt, Homo sapiens
  misc_RNA (1)...(19): siRNA sense strand
gcaggaggaagaguaugua

SEQ ID NO: 1164937 - RNA, 19 nt, Homo sapiens
  misc_RNA (1)...(19): siRNA sense strand
ggagagggcaagagagaca

SEQ ID NO: 1164938 - RNA, 19 nt, Homo sapiens
  misc_RNA (1)...(19): siRNA sense strand
gggcugacccugccaucaa

SEQ ID NO: 1164939 - RNA, 19 nt, Homo sapiens
  misc_RNA (1)...(19): siRNA sense strand
cgggcugccuuccagauaa

SEQ ID NO: 1164940 - RNA, 19 nt, Homo sapiens
  misc_RNA (1)...(19): siRNA sense strand
gcaaugaggagagcuugga

SEQ ID NO: 1164941 - RNA, 19 nt, Homo sapiens
  misc_RNA (1)...(19): siRNA sense strand
caaaucgauuccucuagag

SEQ ID NO: 1164942 - RNA, 19 nt, Homo sapiens
  misc_RNA (1)...(19): siRNA sense strand
ucagacagcagccaaagug

SEQ ID NO: 1164943 - RNA, 19 nt, Homo sapiens
  misc_RNA (1)...(19): siRNA sense strand
caaaggguguacuauucuc

SEQ ID NO: 1164944 - RNA, 19 nt, Homo sapiens
  misc_RNA (1)...(19): siRNA sense strand
gggcugccuuccagauaau

SEQ ID NO: 1164945 - RNA, 19 nt, Homo sapiens
  misc_RNA (1)...(19): siRNA sense strand
ucagcagggugccaaggaa

SEQ ID NO: 1164946 - RNA, 19 nt, Homo sapiens
  misc_RNA (1)...(19): siRNA sense strand
ggacaguaagccaaauauc

SEQ ID NO: 1164947 - RNA, 19 nt, Homo sapiens
  misc_RNA (1)...(19): siRNA sense strand
gguugcaggucgugugugu

SEQ ID NO: 1164948 - RNA, 19 nt, Homo sapiens
  misc_RNA (1)...(19): siRNA sense strand
gggcuuggauagaaaugag

SEQ ID NO: 1164949 - RNA, 19 nt, Homo sapiens
  misc_RNA (1)...(19): siRNA sense strand
gggcuuggauagaaaugag

SEQ ID NO: 1164950 - RNA, 19 nt, Homo sapiens
  misc_RNA (1)...(19): siRNA sense strand
gggcuuggauagaaaugag

SEQ ID NO: 1164951 - RNA, 19 nt, Homo sapiens
  misc_RNA (1)...(19): siRNA sense strand
ggagagcuuggauagaaau

SEQ ID NO: 1164952 - RNA, 19 nt, Homo sapiens
  misc_RNA (1)...(19): siRNA sense strand
ggagagcuuggauagaaau

SEQ ID NO: 1164953 - RNA, 19 nt, Homo sapiens
  misc_RNA (1)...(19): siRNA sense strand
ggaaaaggugcuugaagaa

SEQ ID NO: 1164954 - RNA, 19 nt, Homo sapiens
  misc_RNA (1)...(19): siRNA sense strand
gcgggcugccuuccagaua

SEQ ID NO: 1164955 - RNA, 19 nt, Homo sapiens
  misc_RNA (1)...(19): siRNA sense strand
gacuggugaugccguguug

SEQ ID NO: 1164956 - RNA, 19 nt, Homo sapiens
  misc_RNA (1)...(19): siRNA sense strand
caaggacaguaagccaaau

SEQ ID NO: 1164957 - RNA, 19 nt, Homo sapiens
  misc_RNA (1)...(19): siRNA sense strand
aaucagcugagguguguaa

SEQ ID NO: 1164958 - RNA, 19 nt, Homo sapiens
  misc_RNA (1)...(19): siRNA sense strand
ggacuggugaugccguguu

SEQ ID NO: 1164959 - RNA, 19 nt, Homo sapiens
  misc_RNA (1)...(19): siRNA sense strand
gagaaguugccaaguaggu

SEQ ID NO: 1164960 - RNA, 19 nt, Homo sapiens
  misc_RNA (1)...(19): siRNA sense strand
ugucccaguucaccagaaa

SEQ ID NO: 1164961 - RNA, 19 nt, Homo sapiens
  misc_RNA (1)...(19): siRNA sense strand
caccacgguuggcaagguu

SEQ ID NO: 1164962 - RNA, 19 nt, Homo sapiens
  misc_RNA (1)...(19): siRNA sense strand
ccaguuccguucgcucuuc

SEQ ID NO: 1164963 - RNA, 19 nt, Homo sapiens
  misc_RNA (1)...(19): siRNA sense strand
ucagaguccucgggcauuc

SEQ ID NO: 1164964 - RNA, 19 nt, Homo sapiens
  misc_RNA (1)...(19): siRNA sense strand
ccaaaggguguacuauucu

SEQ ID NO: 1164965 - RNA, 19 nt, Homo sapiens
  misc_RNA (1)...(19): siRNA sense strand
ucagauucuuucagcacuu

SEQ ID NO: 1164966 - RNA, 19 nt, Homo sapiens
  misc_RNA (1)...(19): siRNA sense strand
ggugaagccaaaucgauuc

SEQ ID NO: 1164967 - RNA, 19 nt, Homo sapiens
  misc_RNA (1)...(19): siRNA sense strand
cagauucuuucagcacuuc

SEQ ID NO: 1164968 - RNA, 19 nt, Homo sapiens
  misc_RNA (1)...(19): siRNA sense strand
aggagagcuuggauagaaa

SEQ ID NO: 1164969 - RNA, 19 nt, Homo sapiens
  misc_RNA (1)...(19): siRNA sense strand
aggagagcuuggauagaaa

SEQ ID NO: 1164970 - RNA, 19 nt, Homo sapiens
  misc_RNA (1)...(19): siRNA sense strand
acugugcccuucagcaaug

SEQ ID NO: 1164971 - RNA, 19 nt, Homo sapiens
  misc_RNA (1)...(19): siRNA sense strand
aaggacaguaagccaaaua

SEQ ID NO: 1164972 - RNA, 19 nt, Homo sapiens
  misc_RNA (1)...(19): siRNA sense strand
uggaagaugccaccugugu

SEQ ID NO: 1164973 - RNA, 19 nt, Homo sapiens
  misc_RNA (1)...(19): siRNA sense strand
ggccagugcaggaggaaga

SEQ ID NO: 1164974 - RNA, 19 nt, Homo sapiens
  misc_RNA (1)...(19): siRNA sense strand
ccaccugugucaccugcau

SEQ ID NO: 1164975 - RNA, 19 nt, Homo sapiens
  misc_RNA (1)...(19): siRNA sense strand
ggagggcuuggauagaaau

SEQ ID NO: 1164976 - RNA, 19 nt, Homo sapiens
  misc_RNA (1)...(19): siRNA sense strand
aggagggcuuggauagaaa

SEQ ID NO: 1164977 - RNA, 19 nt, Homo sapiens
  misc_RNA (1)...(19): siRNA sense strand
ggagggcuuggauagaaau

SEQ ID NO: 1164978 - RNA, 19 nt, Homo sapiens
  misc_RNA (1)...(19): siRNA sense strand
aggagggcuuggauagaaa

SEQ ID NO: 1164979 - RNA, 19 nt, Homo sapiens
  misc_RNA (1)...(19): siRNA sense strand
ggagggcuuggauagaaau

SEQ ID NO: 1164980 - RNA, 19 nt, Homo sapiens
  misc_RNA (1)...(19): siRNA sense strand
aggagggcuuggauagaaa

SEQ ID NO: 1164981 - RNA, 19 nt, Homo sapiens
  misc_RNA (1)...(19): siRNA sense strand
ccuaacaccacagacauga

SEQ ID NO: 1164982 - RNA, 19 nt, Homo sapiens
  misc_RNA (1)...(19): siRNA sense strand
gagauugcgaccaggaaca

SEQ ID NO: 1164983 - RNA, 19 nt, Homo sapiens
  misc_RNA (1)...(19): siRNA sense strand
acacugcucagauucuuuc

SEQ ID NO: 1164984 - RNA, 19 nt, Homo sapiens
  misc_RNA (1)...(19): siRNA sense strand
ccaccacgguuggcaaggu

SEQ ID NO: 1164985 - RNA, 19 nt, Homo sapiens
  misc_RNA (1)...(19): siRNA sense strand
ucucccaagugaucucaga

SEQ ID NO: 1164986 - RNA, 19 nt, Homo sapiens
  misc_RNA (1)...(19): siRNA sense strand
gaagaguauguagcagaga

SEQ ID NO: 1164987 - RNA, 19 nt, Homo sapiens
  misc_RNA (1)...(19): siRNA sense strand
acaguaagccaaauaucuc

SEQ ID NO: 1164988 - RNA, 19 nt, Homo sapiens
  misc_RNA (1)...(19): siRNA sense strand
ccaacgaccugcagcaaua

SEQ ID NO: 1164989 - RNA, 19 nt, Homo sapiens
  misc_RNA (1)...(19): siRNA sense strand
ggagaagcaucgugaguga

SEQ ID NO: 1164990 - RNA, 19 nt, Homo sapiens
  misc_RNA (1)...(19): siRNA sense strand
ccacuuugguguuucauaa

SEQ ID NO: 1164991 - RNA, 19 nt, Homo sapiens
  misc_RNA (1)...(19): siRNA sense strand
gagcagagaugugggaaug

SEQ ID NO: 1164992 - RNA, 19 nt, Homo sapiens
  misc_RNA (1)...(19): siRNA sense strand
gaucauggaugcuaccaau

SEQ ID NO: 1164993 - RNA, 19 nt, Homo sapiens
  misc_RNA (1)...(19): siRNA sense strand
ggaaacaaccagucaguga

SEQ ID NO: 1164994 - RNA, 19 nt, Homo sapiens
  misc_RNA (1)...(19): siRNA sense strand
gaaaucaucaugggcuaua

SEQ ID NO: 1164995 - RNA, 19 nt, Homo sapiens
  misc_RNA (1)...(19): siRNA sense strand
gaguugaauuaucagcuua

SEQ ID NO: 1164996 - RNA, 19 nt, Homo sapiens
  misc_RNA (1)...(19): siRNA sense strand
gaggaucccggaaauuuaa

SEQ ID NO: 1164997 - RNA, 19 nt, Homo sapiens
  misc_RNA (1)...(19): siRNA sense strand
gagcagguaucuugagaag

SEQ ID NO: 1164998 - RNA, 19 nt, Homo sapiens
  misc_RNA (1)...(19): siRNA sense strand
gaaggaggcgucacuuuca

SEQ ID NO: 1164999 - RNA, 19 nt, Homo sapiens
  misc_RNA (1)...(19): siRNA sense strand
gaccaacaaucccaagaau

SEQ ID NO: 1165000 - RNA, 19 nt, Homo sapiens
  misc_RNA (1)...(19): siRNA sense strand
ugcaagaucugaauggaaa

SEQ ID NO: 1165001 - RNA, 19 nt, Homo sapiens
  misc_RNA (1)...(19): siRNA sense strand
gagauugaccagcaguaua

SEQ ID NO: 1165002 - RNA, 19 nt, Homo sapiens
  misc_RNA (1)...(19): siRNA sense strand
ucacuuggguggagaagga

SEQ ID NO: 1165003 - RNA, 19 nt, Homo sapiens
  misc_RNA (1)...(19): siRNA sense strand
ggaagagagugcaggaucu

SEQ ID NO: 1165004 - RNA, 19 nt, Homo sapiens
  misc_RNA (1)...(19): siRNA sense strand
gaagaggcggcaacagauu

SEQ ID NO: 1165005 - RNA, 19 nt, Homo sapiens
  misc_RNA (1)...(19): siRNA sense strand
caacaugucauuugcugaa

SEQ ID NO: 1165006 - RNA, 19 nt, Homo sapiens
  misc_RNA (1)...(19): siRNA sense strand
gggcguccauccuguggua

SEQ ID NO: 1165007 - RNA, 19 nt, Homo sapiens
  misc_RNA (1)...(19): siRNA sense strand
ucagacccgucaacaaauu

SEQ ID NO: 1165008 - RNA, 19 nt, Homo sapiens
  misc_RNA (1)...(19): siRNA sense strand
ccaacaaucccaagaaugu

SEQ ID NO: 1165009 - RNA, 19 nt, Homo sapiens
  misc_RNA (1)...(19): siRNA sense strand
gaaucacgccuucuacaga

SEQ ID NO: 1165010 - RNA, 19 nt, Homo sapiens
  misc_RNA (1)...(19): siRNA sense strand
cagaggaucccggaaauuu

SEQ ID NO: 1165011 - RNA, 19 nt, Homo sapiens
  misc_RNA (1)...(19): siRNA sense strand
caacagauugccugcauug

SEQ ID NO: 1165012 - RNA, 19 nt, Homo sapiens
  misc_RNA (1)...(19): siRNA sense strand
aaaugaaagugguagagaa

SEQ ID NO: 1165013 - RNA, 19 nt, Homo sapiens
  misc_RNA (1)...(19): siRNA sense strand
gaaucaagcaguuucuuca

SEQ ID NO: 1165014 - RNA, 19 nt, Homo sapiens
  misc_RNA (1)...(19): siRNA sense strand
gaagagagugcaggaucua

SEQ ID NO: 1165015 - RNA, 19 nt, Homo sapiens
  misc_RNA (1)...(19): siRNA sense strand
cagccucucugcagaauuc

SEQ ID NO: 1165016 - RNA, 19 nt, Homo sapiens
  misc_RNA (1)...(19): siRNA sense strand
gauaacgucauuagcagaa

SEQ ID NO: 1165017 - RNA, 19 nt, Homo sapiens
  misc_RNA (1)...(19): siRNA sense strand
uccaucagcucuacaguga

SEQ ID NO: 1165018 - RNA, 19 nt, Homo sapiens
  misc_RNA (1)...(19): siRNA sense strand
ggaagaggcggcaacagau

SEQ ID NO: 1165019 - RNA, 19 nt, Homo sapiens
  misc_RNA (1)...(19): siRNA sense strand
caggaugacuuugauuuca

SEQ ID NO: 1165020 - RNA, 19 nt, Homo sapiens
  misc_RNA (1)...(19): siRNA sense strand
agaaggacaucagcgguaa

SEQ ID NO: 1165021 - RNA, 19 nt, Homo sapiens
  misc_RNA (1)...(19): siRNA sense strand
gguacaacaugcugaccaa

SEQ ID NO: 1165022 - RNA, 19 nt, Homo sapiens
  misc_RNA (1)...(19): siRNA sense strand
caucagcucuacagugaca

SEQ ID NO: 1165023 - RNA, 19 nt, Homo sapiens
  misc_RNA (1)...(19): siRNA sense strand
agucgaauguucucuauca

SEQ ID NO: 1165024 - RNA, 19 nt, Homo sapiens
  misc_RNA (1)...(19): siRNA sense strand
ugaugcaguuuggaaauaa

SEQ ID NO: 1165025 - RNA, 19 nt, Homo sapiens
  misc_RNA (1)...(19): siRNA sense strand
cacuuuagauucauugaug

SEQ ID NO: 1165026 - RNA, 19 nt, Homo sapiens
  misc_RNA (1)...(19): siRNA sense strand
agaccaaguuuaucugugu

SEQ ID NO: 1165027 - RNA, 19 nt, Homo sapiens
  misc_RNA (1)...(19): siRNA sense strand
ggacguugcagcucucaga

SEQ ID NO: 1165028 - RNA, 19 nt, Homo sapiens
  misc_RNA (1)...(19): siRNA sense strand
agaaucacaugccacuuug

SEQ ID NO: 1165029 - RNA, 19 nt, Homo sapiens
  misc_RNA (1)...(19): siRNA sense strand
cagagcagguaucuugaga

SEQ ID NO: 1165030 - RNA, 19 nt, Homo sapiens
  misc_RNA (1)...(19): siRNA sense strand
ccaguucacuacuaaaguc

SEQ ID NO: 1165031 - RNA, 19 nt, Homo sapiens
  misc_RNA (1)...(19): siRNA sense strand
gaagaccaaguuuaucugu

SEQ ID NO: 1165032 - RNA, 19 nt, Homo sapiens
  misc_RNA (1)...(19): siRNA sense strand
cuucagagcagguaucuug

SEQ ID NO: 1165033 - RNA, 19 nt, Homo sapiens
  misc_RNA (1)...(19): siRNA sense strand
acaacaugcugaccaacaa

SEQ ID NO: 1165034 - RNA, 19 nt, Homo sapiens
  misc_RNA (1)...(19): siRNA sense strand
gagucaagauugggcauau

SEQ ID NO: 1165035 - RNA, 19 nt, Homo sapiens
  misc_RNA (1)...(19): siRNA sense strand
uaaagugugcauugacaaa

SEQ ID NO: 1165036 - RNA, 19 nt, Homo sapiens
  misc_RNA (1)...(19): siRNA sense strand
cuucagacccgucaacaaa

SEQ ID NO: 1165037 - RNA, 19 nt, Homo sapiens
  misc_RNA (1)...(19): siRNA sense strand
gaauggaaacaaccaguca

SEQ ID NO: 1165038 - RNA, 19 nt, Homo sapiens
  misc_RNA (1)...(19): siRNA sense strand
ugaaagugguagagaaucu

SEQ ID NO: 1165039 - RNA, 19 nt, Homo sapiens
  misc_RNA (1)...(19): siRNA sense strand
ugaguugaauuaucagcuu

SEQ ID NO: 1165040 - RNA, 19 nt, Homo sapiens
  misc_RNA (1)...(19): siRNA sense strand
aagaaucacaugccacuuu

SEQ ID NO: 1165041 - RNA, 19 nt, Homo sapiens
  misc_RNA (1)...(19): siRNA sense strand
ccacuggucuaucucuauc

SEQ ID NO: 1165042 - RNA, 19 nt, Homo sapiens
  misc_RNA (1)...(19): siRNA sense strand
guggugaucuccaacaucu

SEQ ID NO: 1165043 - RNA, 19 nt, Homo sapiens
  misc_RNA (1)...(19): siRNA sense strand
ucccugaguugaauuauca

SEQ ID NO: 1165044 - RNA, 19 nt, Homo sapiens
  misc_RNA (1)...(19): siRNA sense strand
gagagugcaggaucuagaa

SEQ ID NO: 1165045 - RNA, 19 nt, Homo sapiens
  misc_RNA (1)...(19): siRNA sense strand
agaggaucccggaaauuua

SEQ ID NO: 1165046 - RNA, 19 nt, Homo sapiens
  misc_RNA (1)...(19): siRNA sense strand
gaaucuccaggaugacuuu

SEQ ID NO: 1165047 - RNA, 19 nt, Homo sapiens
  misc_RNA (1)...(19): siRNA sense strand
gaggaggcauucggaaagu

SEQ ID NO: 1165048 - RNA, 19 nt, Homo sapiens
  misc_RNA (1)...(19): siRNA sense strand
caucaugggcuauaagauc

SEQ ID NO: 1165049 - RNA, 19 nt, Homo sapiens
  misc_RNA (1)...(19): siRNA sense strand
ugaugaacauggaagaauc

SEQ ID NO: 1165050 - RNA, 19 nt, Homo sapiens
  misc_RNA (1)...(19): siRNA sense strand
agugacagcuucccaaugg

SEQ ID NO: 1165051 - RNA, 19 nt, Homo sapiens
  misc_RNA (1)...(19): siRNA sense strand
uagauucauugaugcaguu

SEQ ID NO: 1165052 - RNA, 19 nt, Homo sapiens
  misc_RNA (1)...(19): siRNA sense strand
ccauugaccugccgauguc

SEQ ID NO: 1165053 - RNA, 19 nt, Homo sapiens
  misc_RNA (1)...(19): siRNA sense strand
ggaggaggcauucggaaag

SEQ ID NO: 1165054 - RNA, 19 nt, Homo sapiens
  misc_RNA (1)...(19): siRNA sense strand
uauaagaucauggaugcua

SEQ ID NO: 1165055 - RNA, 19 nt, Homo sapiens
  misc_RNA (1)...(19): siRNA sense strand
caaaagugaugaacaugga

SEQ ID NO: 1165056 - RNA, 19 nt, Homo sapiens
  misc_RNA (1)...(19): siRNA sense strand
gcguccaguucacuacuaa

SEQ ID NO: 1165057 - RNA, 19 nt, Homo sapiens
  misc_RNA (1)...(19): siRNA sense strand
ugaacaacaugucauuugc

SEQ ID NO: 1165058 - RNA, 19 nt, Homo sapiens
  misc_RNA (1)...(19): siRNA sense strand
gaugcaguuuggaaauaau

SEQ ID NO: 1165059 - RNA, 19 nt, Homo sapiens
  misc_RNA (1)...(19): siRNA sense strand
uugaugcaguuuggaaaua

SEQ ID NO: 1165060 - RNA, 19 nt, Homo sapiens
  misc_RNA (1)...(19): siRNA sense strand
ggaggcauucggaaaguau

SEQ ID NO: 1165061 - RNA, 19 nt, Homo sapiens
  misc_RNA (1)...(19): siRNA sense strand
gggcauaugcggccagcaa

SEQ ID NO: 1165062 - RNA, 19 nt, Homo sapiens
  misc_RNA (1)...(19): siRNA sense strand
ucauggaugcuaccaauau

SEQ ID NO: 1165063 - RNA, 19 nt, Homo sapiens
  misc_RNA (1)...(19): siRNA sense strand
ucccggaaauuuaacauuc

SEQ ID NO: 1165064 - RNA, 19 nt, Homo sapiens
  misc_RNA (1)...(19): siRNA sense strand
uaacgucauuagcagaauc

SEQ ID NO: 1165065 - RNA, 19 nt, Homo sapiens
  misc_RNA (1)...(19): siRNA sense strand
cagcacaaucuacgaagaa

SEQ ID NO: 1165066 - RNA, 19 nt, Homo sapiens
  misc_RNA (1)...(19): siRNA sense strand
gaccagaugcggagaagca

SEQ ID NO: 1165067 - RNA, 19 nt, Homo sapiens
  misc_RNA (1)...(19): siRNA sense strand
ggagacaugcaagaucuga

SEQ ID NO: 1165068 - RNA, 19 nt, Homo sapiens
  misc_RNA (1)...(19): siRNA sense strand
ugcaggaucuagaacagaa

SEQ ID NO: 1165069 - RNA, 19 nt, Homo sapiens
  misc_RNA (1)...(19): siRNA sense strand
cacaaucuacgaagaauca

SEQ ID NO: 1165070 - RNA, 19 nt, Homo sapiens
  misc_RNA (1)...(19): siRNA sense strand
uacgaagaaucaagcaguu

SEQ ID NO: 1165071 - RNA, 19 nt, Homo sapiens
  misc_RNA (1)...(19): siRNA sense strand
cugcagaauucaaacacuu

SEQ ID NO: 1165072 - RNA, 19 nt, Homo sapiens
  misc_RNA (1)...(19): siRNA sense strand
ucagcacaaucuacgaaga

SEQ ID NO: 1165073 - RNA, 19 nt, Homo sapiens
  misc_RNA (1)...(19): siRNA sense strand
cugcaagagucgaauguuc

SEQ ID NO: 1165074 - RNA, 19 nt, Homo sapiens
  misc_RNA (1)...(19): siRNA sense strand
caagaccggcguccaguuc

SEQ ID NO: 1165075 - RNA, 19 nt, Homo sapiens
  misc_RNA (1)...(19): siRNA sense strand
cgaagaaucaagcaguuuc

SEQ ID NO: 1165076 - RNA, 19 nt, Homo sapiens
  misc_RNA (1)...(19): siRNA sense strand
aaggagacaugcaagaucu

SEQ ID NO: 1165077 - RNA, 19 nt, Homo sapiens
  misc_RNA (1)...(19): siRNA sense strand
uaccugaagaccaaguuua

SEQ ID NO: 1165078 - RNA, 19 nt, Homo sapiens
  misc_RNA (1)...(19): siRNA sense strand
cugaggagcugcaccugau

SEQ ID NO: 1165079 - RNA, 19 nt, Homo sapiens
  misc_RNA (1)...(19): siRNA sense strand
caacaacggcagccucucu

SEQ ID NO: 1165080 - RNA, 19 nt, Homo sapiens
  misc_RNA (1)...(19): siRNA sense strand
uggaagaggcggcaacaga

SEQ ID NO: 1165081 - RNA, 19 nt, Homo sapiens
  misc_RNA (1)...(19): siRNA sense strand
ggagauugcccggauugug

SEQ ID NO: 1165082 - RNA, 19 nt, Homo sapiens
  misc_RNA (1)...(19): siRNA sense strand
agaaggaggcgucacuuuc

SEQ ID NO: 1165083 - RNA, 19 nt, Homo sapiens
  misc_RNA (1)...(19): siRNA sense strand
caaagaaggaggcgucacu

SEQ ID NO: 1165084 - RNA, 19 nt, Homo sapiens
  misc_RNA (1)...(19): siRNA sense strand
ggcguccaguucacuacua

SEQ ID NO: 1165085 - RNA, 19 nt, Homo sapiens
  misc_RNA (1)...(19): siRNA sense strand
gagagauugaccagcagua

SEQ ID NO: 1165086 - RNA, 19 nt, Homo sapiens
  misc_RNA (1)...(19): siRNA sense strand
ugaaagcagcaaagaagga

SEQ ID NO: 1165087 - RNA, 19 nt, Homo sapiens
  misc_RNA (1)...(19): siRNA sense strand
ggugaucuccaacaucugu

SEQ ID NO: 1165088 - RNA, 19 nt, Homo sapiens
  misc_RNA (1)...(19): siRNA sense strand
ccaacgaccugcagcaaua

SEQ ID NO: 1165089 - RNA, 19 nt, Homo sapiens
  misc_RNA (1)...(19): siRNA sense strand
ggagaagcaucgugaguga

SEQ ID NO: 1165090 - RNA, 19 nt, Homo sapiens
  misc_RNA (1)...(19): siRNA sense strand
ccacuuugguguuucauaa

SEQ ID NO: 1165091 - RNA, 19 nt, Homo sapiens
  misc_RNA (1)...(19): siRNA sense strand
gagcagagaugugggaaug

SEQ ID NO: 1165092 - RNA, 19 nt, Homo sapiens
  misc_RNA (1)...(19): siRNA sense strand
gaucauggaugcuaccaau

SEQ ID NO: 1165093 - RNA, 19 nt, Homo sapiens
  misc_RNA (1)...(19): siRNA sense strand
ggaaacaaccagucaguga

SEQ ID NO: 1165094 - RNA, 19 nt, Homo sapiens
  misc_RNA (1)...(19): siRNA sense strand
gaaaucaucaugggcuaua

SEQ ID NO: 1165095 - RNA, 19 nt, Homo sapiens
  misc_RNA (1)...(19): siRNA sense strand
gaguugaauuaucagcuua

SEQ ID NO: 1165096 - RNA, 19 nt, Homo sapiens
  misc_RNA (1)...(19): siRNA sense strand
gaggaucccggaaauuuaa

SEQ ID NO: 1165097 - RNA, 19 nt, Homo sapiens
  misc_RNA (1)...(19): siRNA sense strand
gagcagguaucuugagaag

SEQ ID NO: 1165098 - RNA, 19 nt, Homo sapiens
  misc_RNA (1)...(19): siRNA sense strand
gaaggaggcgucacuuuca

SEQ ID NO: 1165099 - RNA, 19 nt, Homo sapiens
  misc_RNA (1)...(19): siRNA sense strand
gaccaacaaucccaagaau

SEQ ID NO: 1165100 - RNA, 19 nt, Homo sapiens
  misc_RNA (1)...(19): siRNA sense strand
ugcaagaucugaauggaaa

SEQ ID NO: 1165101 - RNA, 19 nt, Homo sapiens
  misc_RNA (1)...(19): siRNA sense strand
gagauugaccagcaguaua

SEQ ID NO: 1165102 - RNA, 19 nt, Homo sapiens
  misc_RNA (1)...(19): siRNA sense strand
ucacuuggguggagaagga

SEQ ID NO: 1165103 - RNA, 19 nt, Homo sapiens
  misc_RNA (1)...(19): siRNA sense strand
ggaagagagugcaggaucu

SEQ ID NO: 1165104 - RNA, 19 nt, Homo sapiens
  misc_RNA (1)...(19): siRNA sense strand
gaagaggcggcaacagauu

SEQ ID NO: 1165105 - RNA, 19 nt, Homo sapiens
  misc_RNA (1)...(19): siRNA sense strand
caacaugucauuugcugaa

SEQ ID NO: 1165106 - RNA, 19 nt, Homo sapiens
  misc_RNA (1)...(19): siRNA sense strand
gggcguccauccuguggua

SEQ ID NO: 1165107 - RNA, 19 nt, Homo sapiens
  misc_RNA (1)...(19): siRNA sense strand
ucagacccgucaacaaauu

SEQ ID NO: 1165108 - RNA, 19 nt, Homo sapiens
  misc_RNA (1)...(19): siRNA sense strand
ccaacaaucccaagaaugu

SEQ ID NO: 1165109 - RNA, 19 nt, Homo sapiens
  misc_RNA (1)...(19): siRNA sense strand
gaaucacgccuucuacaga

SEQ ID NO: 1165110 - RNA, 19 nt, Homo sapiens
  misc_RNA (1)...(19): siRNA sense strand
cagaggaucccggaaauuu

SEQ ID NO: 1165111 - RNA, 19 nt, Homo sapiens
  misc_RNA (1)...(19): siRNA sense strand
caacagauugccugcauug

SEQ ID NO: 1165112 - RNA, 19 nt, Homo sapiens
  misc_RNA (1)...(19): siRNA sense strand
aaaugaaagugguagagaa

SEQ ID NO: 1165113 - RNA, 19 nt, Homo sapiens
  misc_RNA (1)...(19): siRNA sense strand
gaaucaagcaguuucuuca

SEQ ID NO: 1165114 - RNA, 19 nt, Homo sapiens
  misc_RNA (1)...(19): siRNA sense strand
gaagagagugcaggaucua

SEQ ID NO: 1165115 - RNA, 19 nt, Homo sapiens
  misc_RNA (1)...(19): siRNA sense strand
cagccucucugcagaauuc

SEQ ID NO: 1165116 - RNA, 19 nt, Homo sapiens
  misc_RNA (1)...(19): siRNA sense strand
gauaacgucauuagcagaa

SEQ ID NO: 1165117 - RNA, 19 nt, Homo sapiens
  misc_RNA (1)...(19): siRNA sense strand
uccaucagcucuacaguga

SEQ ID NO: 1165118 - RNA, 19 nt, Homo sapiens
  misc_RNA (1)...(19): siRNA sense strand
ggaagaggcggcaacagau

SEQ ID NO: 1165119 - RNA, 19 nt, Homo sapiens
  misc_RNA (1)...(19): siRNA sense strand
caggaugacuuugauuuca

SEQ ID NO: 1165120 - RNA, 19 nt, Homo sapiens
  misc_RNA (1)...(19): siRNA sense strand
agaaggacaucagcgguaa

SEQ ID NO: 1165121 - RNA, 19 nt, Homo sapiens
  misc_RNA (1)...(19): siRNA sense strand
gguacaacaugcugaccaa

SEQ ID NO: 1165122 - RNA, 19 nt, Homo sapiens
  misc_RNA (1)...(19): siRNA sense strand
caucagcucuacagugaca

SEQ ID NO: 1165123 - RNA, 19 nt, Homo sapiens
  misc_RNA (1)...(19): siRNA sense strand
agucgaauguucucuauca

SEQ ID NO: 1165124 - RNA, 19 nt, Homo sapiens
  misc_RNA (1)...(19): siRNA sense strand
ugaugcaguuuggaaauaa

SEQ ID NO: 1165125 - RNA, 19 nt, Homo sapiens
  misc_RNA (1)...(19): siRNA sense strand
cacuuuagauucauugaug

SEQ ID NO: 1165126 - RNA, 19 nt, Homo sapiens
  misc_RNA (1)...(19): siRNA sense strand
agaccaaguuuaucugugu

SEQ ID NO: 1165127 - RNA, 19 nt, Homo sapiens
  misc_RNA (1)...(19): siRNA sense strand
ggacguugcagcucucaga

SEQ ID NO: 1165128 - RNA, 19 nt, Homo sapiens
  misc_RNA (1)...(19): siRNA sense strand
agaaucacaugccacuuug

SEQ ID NO: 1165129 - RNA, 19 nt, Homo sapiens
  misc_RNA (1)...(19): siRNA sense strand
cagagcagguaucuugaga

SEQ ID NO: 1165130 - RNA, 19 nt, Homo sapiens
  misc_RNA (1)...(19): siRNA sense strand
ccaguucacuacuaaaguc

SEQ ID NO: 1165131 - RNA, 19 nt, Homo sapiens
  misc_RNA (1)...(19): siRNA sense strand
gaagaccaaguuuaucugu

SEQ ID NO: 1165132 - RNA, 19 nt, Homo sapiens
  misc_RNA (1)...(19): siRNA sense strand
cuucagagcagguaucuug

SEQ ID NO: 1165133 - RNA, 19 nt, Homo sapiens
  misc_RNA (1)...(19): siRNA sense strand
acaacaugcugaccaacaa

SEQ ID NO: 1165134 - RNA, 19 nt, Homo sapiens
  misc_RNA (1)...(19): siRNA sense strand
gagucaagauugggcauau

SEQ ID NO: 1165135 - RNA, 19 nt, Homo sapiens
  misc_RNA (1)...(19): siRNA sense strand
uaaagugugcauugacaaa

SEQ ID NO: 1165136 - RNA, 19 nt, Homo sapiens
  misc_RNA (1)...(19): siRNA sense strand
cuucagacccgucaacaaa

SEQ ID NO: 1165137 - RNA, 19 nt, Homo sapiens
  misc_RNA (1)...(19): siRNA sense strand
gaauggaaacaaccaguca

SEQ ID NO: 1165138 - RNA, 19 nt, Homo sapiens
  misc_RNA (1)...(19): siRNA sense strand
ugaaagugguagagaaucu

SEQ ID NO: 1165139 - RNA, 19 nt, Homo sapiens
  misc_RNA (1)...(19): siRNA sense strand
ugaguugaauuaucagcuu

SEQ ID NO: 1165140 - RNA, 19 nt, Homo sapiens
  misc_RNA (1)...(19): siRNA sense strand
aagaaucacaugccacuuu

SEQ ID NO: 1165141 - RNA, 19 nt, Homo sapiens
  misc_RNA (1)...(19): siRNA sense strand
ccacuggucuaucucuauc

SEQ ID NO: 1165142 - RNA, 19 nt, Homo sapiens
  misc_RNA (1)...(19): siRNA sense strand
guggugaucuccaacaucu

SEQ ID NO: 1165143 - RNA, 19 nt, Homo sapiens
  misc_RNA (1)...(19): siRNA sense strand
ucccugaguugaauuauca

SEQ ID NO: 1165144 - RNA, 19 nt, Homo sapiens
  misc_RNA (1)...(19): siRNA sense strand
gagagugcaggaucuagaa

SEQ ID NO: 1165145 - RNA, 19 nt, Homo sapiens
  misc_RNA (1)...(19): siRNA sense strand
agaggaucccggaaauuua

SEQ ID NO: 1165146 - RNA, 19 nt, Homo sapiens
  misc_RNA (1)...(19): siRNA sense strand
gaaucuccaggaugacuuu

SEQ ID NO: 1165147 - RNA, 19 nt, Homo sapiens
  misc_RNA (1)...(19): siRNA sense strand
gaggaggcauucggaaagu

SEQ ID NO: 1165148 - RNA, 19 nt, Homo sapiens
  misc_RNA (1)...(19): siRNA sense strand
caucaugggcuauaagauc

SEQ ID NO: 1165149 - RNA, 19 nt, Homo sapiens
  misc_RNA (1)...(19): siRNA sense strand
ugaugaacauggaagaauc

SEQ ID NO: 1165150 - RNA, 19 nt, Homo sapiens
  misc_RNA (1)...(19): siRNA sense strand
agugacagcuucccaaugg

SEQ ID NO: 1165151 - RNA, 19 nt, Homo sapiens
  misc_RNA (1)...(19): siRNA sense strand
uagauucauugaugcaguu

SEQ ID NO: 1165152 - RNA, 19 nt, Homo sapiens
  misc_RNA (1)...(19): siRNA sense strand
ccauugaccugccgauguc

SEQ ID NO: 1165153 - RNA, 19 nt, Homo sapiens
  misc_RNA (1)...(19): siRNA sense strand
ggaggaggcauucggaaag

SEQ ID NO: 1165154 - RNA, 19 nt, Homo sapiens
  misc_RNA (1)...(19): siRNA sense strand
uauaagaucauggaugcua

SEQ ID NO: 1165155 - RNA, 19 nt, Homo sapiens
  misc_RNA (1)...(19): siRNA sense strand
caaaagugaugaacaugga

SEQ ID NO: 1165156 - RNA, 19 nt, Homo sapiens
  misc_RNA (1)...(19): siRNA sense strand
gcguccaguucacuacuaa

SEQ ID NO: 1165157 - RNA, 19 nt, Homo sapiens
  misc_RNA (1)...(19): siRNA sense strand
ugaacaacaugucauuugc

SEQ ID NO: 1165158 - RNA, 19 nt, Homo sapiens
  misc_RNA (1)...(19): siRNA sense strand
gaugcaguuuggaaauaau

SEQ ID NO: 1165159 - RNA, 19 nt, Homo sapiens
  misc_RNA (1)...(19): siRNA sense strand
uugaugcaguuuggaaaua

SEQ ID NO: 1165160 - RNA, 19 nt, Homo sapiens
  misc_RNA (1)...(19): siRNA sense strand
ggaggcauucggaaaguau

SEQ ID NO: 1165161 - RNA, 19 nt, Homo sapiens
  misc_RNA (1)...(19): siRNA sense strand
gggcauaugcggccagcaa

SEQ ID NO: 1165162 - RNA, 19 nt, Homo sapiens
  misc_RNA (1)...(19): siRNA sense strand
ucauggaugcuaccaauau

SEQ ID NO: 1165163 - RNA, 19 nt, Homo sapiens
  misc_RNA (1)...(19): siRNA sense strand
ucccggaaauuuaacauuc

SEQ ID NO: 1165164 - RNA, 19 nt, Homo sapiens
  misc_RNA (1)...(19): siRNA sense strand
uaacgucauuagcagaauc

SEQ ID NO: 1165165 - RNA, 19 nt, Homo sapiens
  misc_RNA (1)...(19): siRNA sense strand
cagcacaaucuacgaagaa

SEQ ID NO: 1165166 - RNA, 19 nt, Homo sapiens
  misc_RNA (1)...(19): siRNA sense strand
gaccagaugcggagaagca

SEQ ID NO: 1165167 - RNA, 19 nt, Homo sapiens
  misc_RNA (1)...(19): siRNA sense strand
ggagacaugcaagaucuga

SEQ ID NO: 1165168 - RNA, 19 nt, Homo sapiens
  misc_RNA (1)...(19): siRNA sense strand
ugcaggaucuagaacagaa

SEQ ID NO: 1165169 - RNA, 19 nt, Homo sapiens
  misc_RNA (1)...(19): siRNA sense strand
cacaaucuacgaagaauca

SEQ ID NO: 1165170 - RNA, 19 nt, Homo sapiens
  misc_RNA (1)...(19): siRNA sense strand
uacgaagaaucaagcaguu

SEQ ID NO: 1165171 - RNA, 19 nt, Homo sapiens
  misc_RNA (1)...(19): siRNA sense strand
cugcagaauucaaacacuu

SEQ ID NO: 1165172 - RNA, 19 nt, Homo sapiens
  misc_RNA (1)...(19): siRNA sense strand
ucagcacaaucuacgaaga

SEQ ID NO: 1165173 - RNA, 19 nt, Homo sapiens
  misc_RNA (1)...(19): siRNA sense strand
cugcaagagucgaauguuc

SEQ ID NO: 1165174 - RNA, 19 nt, Homo sapiens
  misc_RNA (1)...(19): siRNA sense strand
caagaccggcguccaguuc

SEQ ID NO: 1165175 - RNA, 19 nt, Homo sapiens
  misc_RNA (1)...(19): siRNA sense strand
cgaagaaucaagcaguuuc

SEQ ID NO: 1165176 - RNA, 19 nt, Homo sapiens
  misc_RNA (1)...(19): siRNA sense strand
aaggagacaugcaagaucu

SEQ ID NO: 1165177 - RNA, 19 nt, Homo sapiens
  misc_RNA (1)...(19): siRNA sense strand
uaccugaagaccaaguuua

SEQ ID NO: 1165178 - RNA, 19 nt, Homo sapiens
  misc_RNA (1)...(19): siRNA sense strand
cugaggagcugcaccugau

SEQ ID NO: 1165179 - RNA, 19 nt, Homo sapiens
  misc_RNA (1)...(19): siRNA sense strand
caacaacggcagccucucu

SEQ ID NO: 1165180 - RNA, 19 nt, Homo sapiens
  misc_RNA (1)...(19): siRNA sense strand
uggaagaggcggcaacaga

SEQ ID NO: 1165181 - RNA, 19 nt, Homo sapiens
  misc_RNA (1)...(19): siRNA sense strand
ggagauugcccggauugug

SEQ ID NO: 1165182 - RNA, 19 nt, Homo sapiens
  misc_RNA (1)...(19): siRNA sense strand
agaaggaggcgucacuuuc

SEQ ID NO: 1165183 - RNA, 19 nt, Homo sapiens
  misc_RNA (1)...(19): siRNA sense strand
caaagaaggaggcgucacu

SEQ ID NO: 1165184 - RNA, 19 nt, Homo sapiens
  misc_RNA (1)...(19): siRNA sense strand
ggcguccaguucacuacua

SEQ ID NO: 1165185 - RNA, 19 nt, Homo sapiens
  misc_RNA (1)...(19): siRNA sense strand
gagagauugaccagcagua

SEQ ID NO: 1165186 - RNA, 19 nt, Homo sapiens
  misc_RNA (1)...(19): siRNA sense strand
ugaaagcagcaaagaagga

SEQ ID NO: 1165187 - RNA, 19 nt, Homo sapiens
  misc_RNA (1)...(19): siRNA sense strand
ggugaucuccaacaucugu

SEQ ID NO: 1165188 - RNA, 19 nt, Homo sapiens
  misc_RNA (1)...(19): siRNA sense strand
ccaacgaccugcagcaaua

SEQ ID NO: 1165189 - RNA, 19 nt, Homo sapiens
  misc_RNA (1)...(19): siRNA sense strand
ggagaagcaucgugaguga

SEQ ID NO: 1165190 - RNA, 19 nt, Homo sapiens
  misc_RNA (1)...(19): siRNA sense strand
ccacuuugguguuucauaa

SEQ ID NO: 1165191 - RNA, 19 nt, Homo sapiens
  misc_RNA (1)...(19): siRNA sense strand
gagcagagaugugggaaug

SEQ ID NO: 1165192 - RNA, 19 nt, Homo sapiens
  misc_RNA (1)...(19): siRNA sense strand
gaucauggaugcuaccaau

SEQ ID NO: 1165193 - RNA, 19 nt, Homo sapiens
  misc_RNA (1)...(19): siRNA sense strand
ggaaacaaccagucaguga

SEQ ID NO: 1165194 - RNA, 19 nt, Homo sapiens
  misc_RNA (1)...(19): siRNA sense strand
gaaaucaucaugggcuaua

SEQ ID NO: 1165195 - RNA, 19 nt, Homo sapiens
  misc_RNA (1)...(19): siRNA sense strand
gaguugaauuaucagcuua

SEQ ID NO: 1165196 - RNA, 19 nt, Homo sapiens
  misc_RNA (1)...(19): siRNA sense strand
gaggaucccggaaauuuaa

SEQ ID NO: 1165197 - RNA, 19 nt, Homo sapiens
  misc_RNA (1)...(19): siRNA sense strand
gagcagguaucuugagaag

SEQ ID NO: 1165198 - RNA, 19 nt, Homo sapiens
  misc_RNA (1)...(19): siRNA sense strand
gaaggaggcgucacuuuca

SEQ ID NO: 1165199 - RNA, 19 nt, Homo sapiens
  misc_RNA (1)...(19): siRNA sense strand
gaccaacaaucccaagaau

SEQ ID NO: 1165200 - RNA, 19 nt, Homo sapiens
  misc_RNA (1)...(19): siRNA sense strand
ugcaagaucugaauggaaa

SEQ ID NO: 1165201 - RNA, 19 nt, Homo sapiens
  misc_RNA (1)...(19): siRNA sense strand
gagauugaccagcaguaua

SEQ ID NO: 1165202 - RNA, 19 nt, Homo sapiens
  misc_RNA (1)...(19): siRNA sense strand
ucacuuggguggagaagga

SEQ ID NO: 1165203 - RNA, 19 nt, Homo sapiens
  misc_RNA (1)...(19): siRNA sense strand
ggaagagagugcaggaucu

SEQ ID NO: 1165204 - RNA, 19 nt, Homo sapiens
  misc_RNA (1)...(19): siRNA sense strand
gaagaggcggcaacagauu

SEQ ID NO: 1165205 - RNA, 19 nt, Homo sapiens
  misc_RNA (1)...(19): siRNA sense strand
caacaugucauuugcugaa

SEQ ID NO: 1165206 - RNA, 19 nt, Homo sapiens
  misc_RNA (1)...(19): siRNA sense strand
gggcguccauccuguggua

SEQ ID NO: 1165207 - RNA, 19 nt, Homo sapiens
  misc_RNA (1)...(19): siRNA sense strand
ucagacccgucaacaaauu

SEQ ID NO: 1165208 - RNA, 19 nt, Homo sapiens
  misc_RNA (1)...(19): siRNA sense strand
ccaacaaucccaagaaugu

SEQ ID NO: 1165209 - RNA, 19 nt, Homo sapiens
  misc_RNA (1)...(19): siRNA sense strand
gaaucacgccuucuacaga

SEQ ID NO: 1165210 - RNA, 19 nt, Homo sapiens
  misc_RNA (1)...(19): siRNA sense strand
cagaggaucccggaaauuu

SEQ ID NO: 1165211 - RNA, 19 nt, Homo sapiens
  misc_RNA (1)...(19): siRNA sense strand
caacagauugccugcauug

SEQ ID NO: 1165212 - RNA, 19 nt, Homo sapiens
  misc_RNA (1)...(19): siRNA sense strand
aaaugaaagugguagagaa

SEQ ID NO: 1165213 - RNA, 19 nt, Homo sapiens
  misc_RNA (1)...(19): siRNA sense strand
gaaucaagcaguuucuuca

SEQ ID NO: 1165214 - RNA, 19 nt, Homo sapiens
  misc_RNA (1)...(19): siRNA sense strand
gaagagagugcaggaucua

SEQ ID NO: 1165215 - RNA, 19 nt, Homo sapiens
  misc_RNA (1)...(19): siRNA sense strand
cagccucucugcagaauuc

SEQ ID NO: 1165216 - RNA, 19 nt, Homo sapiens
  misc_RNA (1)...(19): siRNA sense strand
gauaacgucauuagcagaa

SEQ ID NO: 1165217 - RNA, 19 nt, Homo sapiens
  misc_RNA (1)...(19): siRNA sense strand
uccaucagcucuacaguga

SEQ ID NO: 1165218 - RNA, 19 nt, Homo sapiens
  misc_RNA (1)...(19): siRNA sense strand
ggaagaggcggcaacagau

SEQ ID NO: 1165219 - RNA, 19 nt, Homo sapiens
  misc_RNA (1)...(19): siRNA sense strand
caggaugacuuugauuuca

SEQ ID NO: 1165220 - RNA, 19 nt, Homo sapiens
  misc_RNA (1)...(19): siRNA sense strand
agaaggacaucagcgguaa

SEQ ID NO: 1165221 - RNA, 19 nt, Homo sapiens
  misc_RNA (1)...(19): siRNA sense strand
gguacaacaugcugaccaa

SEQ ID NO: 1165222 - RNA, 19 nt, Homo sapiens
  misc_RNA (1)...(19): siRNA sense strand
caucagcucuacagugaca

SEQ ID NO: 1165223 - RNA, 19 nt, Homo sapiens
  misc_RNA (1)...(19): siRNA sense strand
agucgaauguucucuauca

SEQ ID NO: 1165224 - RNA, 19 nt, Homo sapiens
  misc_RNA (1)...(19): siRNA sense strand
ugaugcaguuuggaaauaa

SEQ ID NO: 1165225 - RNA, 19 nt, Homo sapiens
  misc_RNA (1)...(19): siRNA sense strand
cacuuuagauucauugaug

SEQ ID NO: 1165226 - RNA, 19 nt, Homo sapiens
  misc_RNA (1)...(19): siRNA sense strand
agaccaaguuuaucugugu

SEQ ID NO: 1165227 - RNA, 19 nt, Homo sapiens
  misc_RNA (1)...(19): siRNA sense strand
ggacguugcagcucucaga

SEQ ID NO: 1165228 - RNA, 19 nt, Homo sapiens
  misc_RNA (1)...(19): siRNA sense strand
agaaucacaugccacuuug

SEQ ID NO: 1165229 - RNA, 19 nt, Homo sapiens
  misc_RNA (1)...(19): siRNA sense strand
cagagcagguaucuugaga

SEQ ID NO: 1165230 - RNA, 19 nt, Homo sapiens
  misc_RNA (1)...(19): siRNA sense strand
ccaguucacuacuaaaguc

SEQ ID NO: 1165231 - RNA, 19 nt, Homo sapiens
  misc_RNA (1)...(19): siRNA sense strand
gaagaccaaguuuaucugu

SEQ ID NO: 1165232 - RNA, 19 nt, Homo sapiens
  misc_RNA (1)...(19): siRNA sense strand
cuucagagcagguaucuug

SEQ ID NO: 1165233 - RNA, 19 nt, Homo sapiens
  misc_RNA (1)...(19): siRNA sense strand
acaacaugcugaccaacaa

SEQ ID NO: 1165234 - RNA, 19 nt, Homo sapiens
  misc_RNA (1)...(19): siRNA sense strand
gagucaagauugggcauau

SEQ ID NO: 1165235 - RNA, 19 nt, Homo sapiens
  misc_RNA (1)...(19): siRNA sense strand
uaaagugugcauugacaaa

SEQ ID NO: 1165236 - RNA, 19 nt, Homo sapiens
  misc_RNA (1)...(19): siRNA sense strand
cuucagacccgucaacaaa

SEQ ID NO: 1165237 - RNA, 19 nt, Homo sapiens
  misc_RNA (1)...(19): siRNA sense strand
gaauggaaacaaccaguca

SEQ ID NO: 1165238 - RNA, 19 nt, Homo sapiens
  misc_RNA (1)...(19): siRNA sense strand
ugaaagugguagagaaucu

SEQ ID NO: 1165239 - RNA, 19 nt, Homo sapiens
  misc_RNA (1)...(19): siRNA sense strand
ugaguugaauuaucagcuu

SEQ ID NO: 1165240 - RNA, 19 nt, Homo sapiens
  misc_RNA (1)...(19): siRNA sense strand
aagaaucacaugccacuuu

SEQ ID NO: 1165241 - RNA, 19 nt, Homo sapiens
  misc_RNA (1)...(19): siRNA sense strand
ccacuggucuaucucuauc

SEQ ID NO: 1165242 - RNA, 19 nt, Homo sapiens
  misc_RNA (1)...(19): siRNA sense strand
guggugaucuccaacaucu

SEQ ID NO: 1165243 - RNA, 19 nt, Homo sapiens
  misc_RNA (1)...(19): siRNA sense strand
ucccugaguugaauuauca

SEQ ID NO: 1165244 - RNA, 19 nt, Homo sapiens
  misc_RNA (1)...(19): siRNA sense strand
gagagugcaggaucuagaa

SEQ ID NO: 1165245 - RNA, 19 nt, Homo sapiens
  misc_RNA (1)...(19): siRNA sense strand
agaggaucccggaaauuua

SEQ ID NO: 1165246 - RNA, 19 nt, Homo sapiens
  misc_RNA (1)...(19): siRNA sense strand
gaaucuccaggaugacuuu

SEQ ID NO: 1165247 - RNA, 19 nt, Homo sapiens
  misc_RNA (1)...(19): siRNA sense strand
gaggaggcauucggaaagu

SEQ ID NO: 1165248 - RNA, 19 nt, Homo sapiens
  misc_RNA (1)...(19): siRNA sense strand
caucaugggcuauaagauc

SEQ ID NO: 1165249 - RNA, 19 nt, Homo sapiens
  misc_RNA (1)...(19): siRNA sense strand
ugaugaacauggaagaauc

SEQ ID NO: 1165250 - RNA, 19 nt, Homo sapiens
  misc_RNA (1)...(19): siRNA sense strand
agugacagcuucccaaugg

SEQ ID NO: 1165251 - RNA, 19 nt, Homo sapiens
  misc_RNA (1)...(19): siRNA sense strand
uagauucauugaugcaguu

SEQ ID NO: 1165252 - RNA, 19 nt, Homo sapiens
  misc_RNA (1)...(19): siRNA sense strand
ccauugaccugccgauguc

SEQ ID NO: 1165253 - RNA, 19 nt, Homo sapiens
  misc_RNA (1)...(19): siRNA sense strand
ggaggaggcauucggaaag

SEQ ID NO: 1165254 - RNA, 19 nt, Homo sapiens
  misc_RNA (1)...(19): siRNA sense strand
uauaagaucauggaugcua

SEQ ID NO: 1165255 - RNA, 19 nt, Homo sapiens
  misc_RNA (1)...(19): siRNA sense strand
caaaagugaugaacaugga

SEQ ID NO: 1165256 - RNA, 19 nt, Homo sapiens
  misc_RNA (1)...(19): siRNA sense strand
gcguccaguucacuacuaa

SEQ ID NO: 1165257 - RNA, 19 nt, Homo sapiens
  misc_RNA (1)...(19): siRNA sense strand
ugaacaacaugucauuugc

SEQ ID NO: 1165258 - RNA, 19 nt, Homo sapiens
  misc_RNA (1)...(19): siRNA sense strand
gaugcaguuuggaaauaau

SEQ ID NO: 1165259 - RNA, 19 nt, Homo sapiens
  misc_RNA (1)...(19): siRNA sense strand
uugaugcaguuuggaaaua

SEQ ID NO: 1165260 - RNA, 19 nt, Homo sapiens
  misc_RNA (1)...(19): siRNA sense strand
ggaggcauucggaaaguau

SEQ ID NO: 1165261 - RNA, 19 nt, Homo sapiens
  misc_RNA (1)...(19): siRNA sense strand
gggcauaugcggccagcaa

SEQ ID NO: 1165262 - RNA, 19 nt, Homo sapiens
  misc_RNA (1)...(19): siRNA sense strand
ucauggaugcuaccaauau

SEQ ID NO: 1165263 - RNA, 19 nt, Homo sapiens
  misc_RNA (1)...(19): siRNA sense strand
ucccggaaauuuaacauuc

SEQ ID NO: 1165264 - RNA, 19 nt, Homo sapiens
  misc_RNA (1)...(19): siRNA sense strand
uaacgucauuagcagaauc

SEQ ID NO: 1165265 - RNA, 19 nt, Homo sapiens
  misc_RNA (1)...(19): siRNA sense strand
cagcacaaucuacgaagaa

SEQ ID NO: 1165266 - RNA, 19 nt, Homo sapiens
  misc_RNA (1)...(19): siRNA sense strand
gaccagaugcggagaagca

SEQ ID NO: 1165267 - RNA, 19 nt, Homo sapiens
  misc_RNA (1)...(19): siRNA sense strand
ggagacaugcaagaucuga

SEQ ID NO: 1165268 - RNA, 19 nt, Homo sapiens
  misc_RNA (1)...(19): siRNA sense strand
ugcaggaucuagaacagaa

SEQ ID NO: 1165269 - RNA, 19 nt, Homo sapiens
  misc_RNA (1)...(19): siRNA sense strand
cacaaucuacgaagaauca

SEQ ID NO: 1165270 - RNA, 19 nt, Homo sapiens
  misc_RNA (1)...(19): siRNA sense strand
uacgaagaaucaagcaguu

SEQ ID NO: 1165271 - RNA, 19 nt, Homo sapiens
  misc_RNA (1)...(19): siRNA sense strand
cugcagaauucaaacacuu

SEQ ID NO: 1165272 - RNA, 19 nt, Homo sapiens
  misc_RNA (1)...(19): siRNA sense strand
ucagcacaaucuacgaaga

SEQ ID NO: 1165273 - RNA, 19 nt, Homo sapiens
  misc_RNA (1)...(19): siRNA sense strand
cugcaagagucgaauguuc

SEQ ID NO: 1165274 - RNA, 19 nt, Homo sapiens
  misc_RNA (1)...(19): siRNA sense strand
caagaccggcguccaguuc

SEQ ID NO: 1165275 - RNA, 19 nt, Homo sapiens
  misc_RNA (1)...(19): siRNA sense strand
cgaagaaucaagcaguuuc

SEQ ID NO: 1165276 - RNA, 19 nt, Homo sapiens
  misc_RNA (1)...(19): siRNA sense strand
aaggagacaugcaagaucu

SEQ ID NO: 1165277 - RNA, 19 nt, Homo sapiens
  misc_RNA (1)...(19): siRNA sense strand
uaccugaagaccaaguuua

SEQ ID NO: 1165278 - RNA, 19 nt, Homo sapiens
  misc_RNA (1)...(19): siRNA sense strand
cugaggagcugcaccugau

SEQ ID NO: 1165279 - RNA, 19 nt, Homo sapiens
  misc_RNA (1)...(19): siRNA sense strand
caacaacggcagccucucu

SEQ ID NO: 1165280 - RNA, 19 nt, Homo sapiens
  misc_RNA (1)...(19): siRNA sense strand
uggaagaggcggcaacaga

SEQ ID NO: 1165281 - RNA, 19 nt, Homo sapiens
  misc_RNA (1)...(19): siRNA sense strand
ggagauugcccggauugug

SEQ ID NO: 1165282 - RNA, 19 nt, Homo sapiens
  misc_RNA (1)...(19): siRNA sense strand
agaaggaggcgucacuuuc

SEQ ID NO: 1165283 - RNA, 19 nt, Homo sapiens
  misc_RNA (1)...(19): siRNA sense strand
caaagaaggaggcgucacu

SEQ ID NO: 1165284 - RNA, 19 nt, Homo sapiens
  misc_RNA (1)...(19): siRNA sense strand
ggcguccaguucacuacua

SEQ ID NO: 1165285 - RNA, 19 nt, Homo sapiens
  misc_RNA (1)...(19): siRNA sense strand
gagagauugaccagcagua

SEQ ID NO: 1165286 - RNA, 19 nt, Homo sapiens
  misc_RNA (1)...(19): siRNA sense strand
ugaaagcagcaaagaagga

SEQ ID NO: 1165287 - RNA, 19 nt, Homo sapiens
  misc_RNA (1)...(19): siRNA sense strand
ggugaucuccaacaucugu

SEQ ID NO: 1165288 - RNA, 19 nt, Homo sapiens
  misc_RNA (1)...(19): siRNA sense strand
ccaacgaccugcagcaaua

SEQ ID NO: 1165289 - RNA, 19 nt, Homo sapiens
  misc_RNA (1)...(19): siRNA sense strand
ggagaagcaucgugaguga

SEQ ID NO: 1165290 - RNA, 19 nt, Homo sapiens
  misc_RNA (1)...(19): siRNA sense strand
ccacuuugguguuucauaa

SEQ ID NO: 1165291 - RNA, 19 nt, Homo sapiens
  misc_RNA (1)...(19): siRNA sense strand
gagcagagaugugggaaug

SEQ ID NO: 1165292 - RNA, 19 nt, Homo sapiens
  misc_RNA (1)...(19): siRNA sense strand
gaucauggaugcuaccaau

SEQ ID NO: 1165293 - RNA, 19 nt, Homo sapiens
  misc_RNA (1)...(19): siRNA sense strand
ggaaacaaccagucaguga

SEQ ID NO: 1165294 - RNA, 19 nt, Homo sapiens
  misc_RNA (1)...(19): siRNA sense strand
gaaaucaucaugggcuaua

SEQ ID NO: 1165295 - RNA, 19 nt, Homo sapiens
  misc_RNA (1)...(19): siRNA sense strand
gaguugaauuaucagcuua

SEQ ID NO: 1165296 - RNA, 19 nt, Homo sapiens
  misc_RNA (1)...(19): siRNA sense strand
gaggaucccggaaauuuaa

SEQ ID NO: 1165297 - RNA, 19 nt, Homo sapiens
  misc_RNA (1)...(19): siRNA sense strand
gagcagguaucuugagaag

SEQ ID NO: 1165298 - RNA, 19 nt, Homo sapiens
  misc_RNA (1)...(19): siRNA sense strand
gaaggaggcgucacuuuca

SEQ ID NO: 1165299 - RNA, 19 nt, Homo sapiens
  misc_RNA (1)...(19): siRNA sense strand
gaccaacaaucccaagaau

SEQ ID NO: 1165300 - RNA, 19 nt, Homo sapiens
  misc_RNA (1)...(19): siRNA sense strand
ugcaagaucugaauggaaa

SEQ ID NO: 1165301 - RNA, 19 nt, Homo sapiens
  misc_RNA (1)...(19): siRNA sense strand
gagauugaccagcaguaua

SEQ ID NO: 1165302 - RNA, 19 nt, Homo sapiens
  misc_RNA (1)...(19): siRNA sense strand
ucacuuggguggagaagga

SEQ ID NO: 1165303 - RNA, 19 nt, Homo sapiens
  misc_RNA (1)...(19): siRNA sense strand
ggaagagagugcaggaucu

SEQ ID NO: 1165304 - RNA, 19 nt, Homo sapiens
  misc_RNA (1)...(19): siRNA sense strand
gaagaggcggcaacagauu

SEQ ID NO: 1165305 - RNA, 19 nt, Homo sapiens
  misc_RNA (1)...(19): siRNA sense strand
caacaugucauuugcugaa

SEQ ID NO: 1165306 - RNA, 19 nt, Homo sapiens
  misc_RNA (1)...(19): siRNA sense strand
gggcguccauccuguggua

SEQ ID NO: 1165307 - RNA, 19 nt, Homo sapiens
  misc_RNA (1)...(19): siRNA sense strand
ucagacccgucaacaaauu

SEQ ID NO: 1165308 - RNA, 19 nt, Homo sapiens
  misc_RNA (1)...(19): siRNA sense strand
ccaacaaucccaagaaugu

SEQ ID NO: 1165309 - RNA, 19 nt, Homo sapiens
  misc_RNA (1)...(19): siRNA sense strand
gaaucacgccuucuacaga

SEQ ID NO: 1165310 - RNA, 19 nt, Homo sapiens
  misc_RNA (1)...(19): siRNA sense strand
cagaggaucccggaaauuu

SEQ ID NO: 1165311 - RNA, 19 nt, Homo sapiens
  misc_RNA (1)...(19): siRNA sense strand
caacagauugccugcauug

SEQ ID NO: 1165312 - RNA, 19 nt, Homo sapiens
  misc_RNA (1)...(19): siRNA sense strand
aaaugaaagugguagagaa

SEQ ID NO: 1165313 - RNA, 19 nt, Homo sapiens
  misc_RNA (1)...(19): siRNA sense strand
gaaucaagcaguuucuuca

SEQ ID NO: 1165314 - RNA, 19 nt, Homo sapiens
  misc_RNA (1)...(19): siRNA sense strand
gaagagagugcaggaucua

SEQ ID NO: 1165315 - RNA, 19 nt, Homo sapiens
  misc_RNA (1)...(19): siRNA sense strand
cagccucucugcagaauuc

SEQ ID NO: 1165316 - RNA, 19 nt, Homo sapiens
  misc_RNA (1)...(19): siRNA sense strand
gauaacgucauuagcagaa

SEQ ID NO: 1165317 - RNA, 19 nt, Homo sapiens
  misc_RNA (1)...(19): siRNA sense strand
uccaucagcucuacaguga

SEQ ID NO: 1165318 - RNA, 19 nt, Homo sapiens
  misc_RNA (1)...(19): siRNA sense strand
ggaagaggcggcaacagau

SEQ ID NO: 1165319 - RNA, 19 nt, Homo sapiens
  misc_RNA (1)...(19): siRNA sense strand
caggaugacuuugauuuca

SEQ ID NO: 1165320 - RNA, 19 nt, Homo sapiens
  misc_RNA (1)...(19): siRNA sense strand
agaaggacaucagcgguaa

SEQ ID NO: 1165321 - RNA, 19 nt, Homo sapiens
  misc_RNA (1)...(19): siRNA sense strand
gguacaacaugcugaccaa

SEQ ID NO: 1165322 - RNA, 19 nt, Homo sapiens
  misc_RNA (1)...(19): siRNA sense strand
caucagcucuacagugaca

SEQ ID NO: 1165323 - RNA, 19 nt, Homo sapiens
  misc_RNA (1)...(19): siRNA sense strand
agucgaauguucucuauca

SEQ ID NO: 1165324 - RNA, 19 nt, Homo sapiens
  misc_RNA (1)...(19): siRNA sense strand
ugaugcaguuuggaaauaa

SEQ ID NO: 1165325 - RNA, 19 nt, Homo sapiens
  misc_RNA (1)...(19): siRNA sense strand
cacuuuagauucauugaug

SEQ ID NO: 1165326 - RNA, 19 nt, Homo sapiens
  misc_RNA (1)...(19): siRNA sense strand
agaccaaguuuaucugugu

SEQ ID NO: 1165327 - RNA, 19 nt, Homo sapiens
  misc_RNA (1)...(19): siRNA sense strand
ggacguugcagcucucaga

SEQ ID NO: 1165328 - RNA, 19 nt, Homo sapiens
  misc_RNA (1)...(19): siRNA sense strand
agaaucacaugccacuuug

SEQ ID NO: 1165329 - RNA, 19 nt, Homo sapiens
  misc_RNA (1)...(19): siRNA sense strand
cagagcagguaucuugaga

SEQ ID NO: 1165330 - RNA, 19 nt, Homo sapiens
  misc_RNA (1)...(19): siRNA sense strand
ccaguucacuacuaaaguc

SEQ ID NO: 1165331 - RNA, 19 nt, Homo sapiens
  misc_RNA (1)...(19): siRNA sense strand
gaagaccaaguuuaucugu

SEQ ID NO: 1165332 - RNA, 19 nt, Homo sapiens
  misc_RNA (1)...(19): siRNA sense strand
cuucagagcagguaucuug

SEQ ID NO: 1165333 - RNA, 19 nt, Homo sapiens
  misc_RNA (1)...(19): siRNA sense strand
acaacaugcugaccaacaa

SEQ ID NO: 1165334 - RNA, 19 nt, Homo sapiens
  misc_RNA (1)...(19): siRNA sense strand
gagucaagauugggcauau

SEQ ID NO: 1165335 - RNA, 19 nt, Homo sapiens
  misc_RNA (1)...(19): siRNA sense strand
uaaagugugcauugacaaa

SEQ ID NO: 1165336 - RNA, 19 nt, Homo sapiens
  misc_RNA (1)...(19): siRNA sense strand
cuucagacccgucaacaaa

SEQ ID NO: 1165337 - RNA, 19 nt, Homo sapiens
  misc_RNA (1)...(19): siRNA sense strand
gaauggaaacaaccaguca

SEQ ID NO: 1165338 - RNA, 19 nt, Homo sapiens
  misc_RNA (1)...(19): siRNA sense strand
ugaaagugguagagaaucu

SEQ ID NO: 1165339 - RNA, 19 nt, Homo sapiens
  misc_RNA (1)...(19): siRNA sense strand
ugaguugaauuaucagcuu

SEQ ID NO: 1165340 - RNA, 19 nt, Homo sapiens
  misc_RNA (1)...(19): siRNA sense strand
aagaaucacaugccacuuu

SEQ ID NO: 1165341 - RNA, 19 nt, Homo sapiens
  misc_RNA (1)...(19): siRNA sense strand
ccacuggucuaucucuauc

SEQ ID NO: 1165342 - RNA, 19 nt, Homo sapiens
  misc_RNA (1)...(19): siRNA sense strand
guggugaucuccaacaucu

SEQ ID NO: 1165343 - RNA, 19 nt, Homo sapiens
  misc_RNA (1)...(19): siRNA sense strand
ucccugaguugaauuauca

SEQ ID NO: 1165344 - RNA, 19 nt, Homo sapiens
  misc_RNA (1)...(19): siRNA sense strand
gagagugcaggaucuagaa

SEQ ID NO: 1165345 - RNA, 19 nt, Homo sapiens
  misc_RNA (1)...(19): siRNA sense strand
agaggaucccggaaauuua

SEQ ID NO: 1165346 - RNA, 19 nt, Homo sapiens
  misc_RNA (1)...(19): siRNA sense strand
gaaucuccaggaugacuuu

SEQ ID NO: 1165347 - RNA, 19 nt, Homo sapiens
  misc_RNA (1)...(19): siRNA sense strand
gaggaggcauucggaaagu

SEQ ID NO: 1165348 - RNA, 19 nt, Homo sapiens
  misc_RNA (1)...(19): siRNA sense strand
caucaugggcuauaagauc

SEQ ID NO: 1165349 - RNA, 19 nt, Homo sapiens
  misc_RNA (1)...(19): siRNA sense strand
ugaugaacauggaagaauc

SEQ ID NO: 1165350 - RNA, 19 nt, Homo sapiens
  misc_RNA (1)...(19): siRNA sense strand
agugacagcuucccaaugg

SEQ ID NO: 1165351 - RNA, 19 nt, Homo sapiens
  misc_RNA (1)...(19): siRNA sense strand
uagauucauugaugcaguu

SEQ ID NO: 1165352 - RNA, 19 nt, Homo sapiens
  misc_RNA (1)...(19): siRNA sense strand
ccauugaccugccgauguc

SEQ ID NO: 1165353 - RNA, 19 nt, Homo sapiens
  misc_RNA (1)...(19): siRNA sense strand
ggaggaggcauucggaaag

SEQ ID NO: 1165354 - RNA, 19 nt, Homo sapiens
  misc_RNA (1)...(19): siRNA sense strand
uauaagaucauggaugcua

SEQ ID NO: 1165355 - RNA, 19 nt, Homo sapiens
  misc_RNA (1)...(19): siRNA sense strand
caaaagugaugaacaugga

SEQ ID NO: 1165356 - RNA, 19 nt, Homo sapiens
  misc_RNA (1)...(19): siRNA sense strand
gcguccaguucacuacuaa

SEQ ID NO: 1165357 - RNA, 19 nt, Homo sapiens
  misc_RNA (1)...(19): siRNA sense strand
ugaacaacaugucauuugc

SEQ ID NO: 1165358 - RNA, 19 nt, Homo sapiens
  misc_RNA (1)...(19): siRNA sense strand
gaugcaguuuggaaauaau

SEQ ID NO: 1165359 - RNA, 19 nt, Homo sapiens
  misc_RNA (1)...(19): siRNA sense strand
uugaugcaguuuggaaaua

SEQ ID NO: 1165360 - RNA, 19 nt, Homo sapiens
  misc_RNA (1)...(19): siRNA sense strand
ggaggcauucggaaaguau

SEQ ID NO: 1165361 - RNA, 19 nt, Homo sapiens
  misc_RNA (1)...(19): siRNA sense strand
gggcauaugcggccagcaa

SEQ ID NO: 1165362 - RNA, 19 nt, Homo sapiens
  misc_RNA (1)...(19): siRNA sense strand
ucauggaugcuaccaauau

SEQ ID NO: 1165363 - RNA, 19 nt, Homo sapiens
  misc_RNA (1)...(19): siRNA sense strand
ucccggaaauuuaacauuc

SEQ ID NO: 1165364 - RNA, 19 nt, Homo sapiens
  misc_RNA (1)...(19): siRNA sense strand
uaacgucauuagcagaauc

SEQ ID NO: 1165365 - RNA, 19 nt, Homo sapiens
  misc_RNA (1)...(19): siRNA sense strand
cagcacaaucuacgaagaa

SEQ ID NO: 1165366 - RNA, 19 nt, Homo sapiens
  misc_RNA (1)...(19): siRNA sense strand
gaccagaugcggagaagca

SEQ ID NO: 1165367 - RNA, 19 nt, Homo sapiens
  misc_RNA (1)...(19): siRNA sense strand
ggagacaugcaagaucuga

SEQ ID NO: 1165368 - RNA, 19 nt, Homo sapiens
  misc_RNA (1)...(19): siRNA sense strand
ugcaggaucuagaacagaa

SEQ ID NO: 1165369 - RNA, 19 nt, Homo sapiens
  misc_RNA (1)...(19): siRNA sense strand
cacaaucuacgaagaauca

SEQ ID NO: 1165370 - RNA, 19 nt, Homo sapiens
  misc_RNA (1)...(19): siRNA sense strand
uacgaagaaucaagcaguu

SEQ ID NO: 1165371 - RNA, 19 nt, Homo sapiens
  misc_RNA (1)...(19): siRNA sense strand
cugcagaauucaaacacuu

SEQ ID NO: 1165372 - RNA, 19 nt, Homo sapiens
  misc_RNA (1)...(19): siRNA sense strand
ucagcacaaucuacgaaga

SEQ ID NO: 1165373 - RNA, 19 nt, Homo sapiens
  misc_RNA (1)...(19): siRNA sense strand
cugcaagagucgaauguuc

SEQ ID NO: 1165374 - RNA, 19 nt, Homo sapiens
  misc_RNA (1)...(19): siRNA sense strand
caagaccggcguccaguuc

SEQ ID NO: 1165375 - RNA, 19 nt, Homo sapiens
  misc_RNA (1)...(19): siRNA sense strand
cgaagaaucaagcaguuuc

SEQ ID NO: 1165376 - RNA, 19 nt, Homo sapiens
  misc_RNA (1)...(19): siRNA sense strand
aaggagacaugcaagaucu

SEQ ID NO: 1165377 - RNA, 19 nt, Homo sapiens
  misc_RNA (1)...(19): siRNA sense strand
uaccugaagaccaaguuua

SEQ ID NO: 1165378 - RNA, 19 nt, Homo sapiens
  misc_RNA (1)...(19): siRNA sense strand
cugaggagcugcaccugau

SEQ ID NO: 1165379 - RNA, 19 nt, Homo sapiens
  misc_RNA (1)...(19): siRNA sense strand
caacaacggcagccucucu

SEQ ID NO: 1165380 - RNA, 19 nt, Homo sapiens
  misc_RNA (1)...(19): siRNA sense strand
uggaagaggcggcaacaga

SEQ ID NO: 1165381 - RNA, 19 nt, Homo sapiens
  misc_RNA (1)...(19): siRNA sense strand
ggagauugcccggauugug

SEQ ID NO: 1165382 - RNA, 19 nt, Homo sapiens
  misc_RNA (1)...(19): siRNA sense strand
agaaggaggcgucacuuuc

SEQ ID NO: 1165383 - RNA, 19 nt, Homo sapiens
  misc_RNA (1)...(19): siRNA sense strand
caaagaaggaggcgucacu

SEQ ID NO: 1165384 - RNA, 19 nt, Homo sapiens
  misc_RNA (1)...(19): siRNA sense strand
ggcguccaguucacuacua

SEQ ID NO: 1165385 - RNA, 19 nt, Homo sapiens
  misc_RNA (1)...(19): siRNA sense strand
gagagauugaccagcagua

SEQ ID NO: 1165386 - RNA, 19 nt, Homo sapiens
  misc_RNA (1)...(19): siRNA sense strand
ugaaagcagcaaagaagga

SEQ ID NO: 1165387 - RNA, 19 nt, Homo sapiens
  misc_RNA (1)...(19): siRNA sense strand
ggugaucuccaacaucugu

SEQ ID NO: 1165388 - RNA, 19 nt, Homo sapiens
  misc_RNA (1)...(19): siRNA sense strand
gcacgaagguuuacaagga

SEQ ID NO: 1165389 - RNA, 19 nt, Homo sapiens
  misc_RNA (1)...(19): siRNA sense strand
ccacacagacccauguuaa

SEQ ID NO: 1165390 - RNA, 19 nt, Homo sapiens
  misc_RNA (1)...(19): siRNA sense strand
gaucuuacugcuauccuua

SEQ ID NO: 1165391 - RNA, 19 nt, Homo sapiens
  misc_RNA (1)...(19): siRNA sense strand
ggaaccaccuguacugucu

SEQ ID NO: 1165392 - RNA, 19 nt, Homo sapiens
  misc_RNA (1)...(19): siRNA sense strand
ggaaacugcaggagaagaa

SEQ ID NO: 1165393 - RNA, 19 nt, Homo sapiens
  misc_RNA (1)...(19): siRNA sense strand
uacaaggacuuacuggaaa

SEQ ID NO: 1165394 - RNA, 19 nt, Homo sapiens
  misc_RNA (1)...(19): siRNA sense strand
gauaaaugacaccaugaaa

SEQ ID NO: 1165395 - RNA, 19 nt, Homo sapiens
  misc_RNA (1)...(19): siRNA sense strand
gaucaaggccucgaaguca

SEQ ID NO: 1165396 - RNA, 19 nt, Homo sapiens
  misc_RNA (1)...(19): siRNA sense strand
gaggcguccuggucaauga

SEQ ID NO: 1165397 - RNA, 19 nt, Homo sapiens
  misc_RNA (1)...(19): siRNA sense strand
gagcccagaugugaccuuu

SEQ ID NO: 1165398 - RNA, 19 nt, Homo sapiens
  misc_RNA (1)...(19): siRNA sense strand
ugucauccauggugaagaa

SEQ ID NO: 1165399 - RNA, 19 nt, Homo sapiens
  misc_RNA (1)...(19): siRNA sense strand
ggauaaaugacaccaugaa

SEQ ID NO: 1165400 - RNA, 19 nt, Homo sapiens
  misc_RNA (1)...(19): siRNA sense strand
gaagguuuacaaggacuua

SEQ ID NO: 1165401 - RNA, 19 nt, Homo sapiens
  misc_RNA (1)...(19): siRNA sense strand
acugcaagaugaaugagua

SEQ ID NO: 1165402 - RNA, 19 nt, Homo sapiens
  misc_RNA (1)...(19): siRNA sense strand
uuacaaggacuuacuggaa

SEQ ID NO: 1165403 - RNA, 19 nt, Homo sapiens
  misc_RNA (1)...(19): siRNA sense strand
ucaccaaguggauaaauga

SEQ ID NO: 1165404 - RNA, 19 nt, Homo sapiens
  misc_RNA (1)...(19): siRNA sense strand
cuuggaaacugcaggagaa

SEQ ID NO: 1165405 - RNA, 19 nt, Homo sapiens
  misc_RNA (1)...(19): siRNA sense strand
acacagacccauguuaaug

SEQ ID NO: 1165406 - RNA, 19 nt, Homo sapiens
  misc_RNA (1)...(19): siRNA sense strand
caaguucaccaaguggaua

SEQ ID NO: 1165407 - RNA, 19 nt, Homo sapiens
  misc_RNA (1)...(19): siRNA sense strand
cacagacccauguuaauga

SEQ ID NO: 1165408 - RNA, 19 nt, Homo sapiens
  misc_RNA (1)...(19): siRNA sense strand
gcccagggugacaagauua

SEQ ID NO: 1165409 - RNA, 19 nt, Homo sapiens
  misc_RNA (1)...(19): siRNA sense strand
gaagaagcccagggugaca

SEQ ID NO: 1165410 - RNA, 19 nt, Homo sapiens
  misc_RNA (1)...(19): siRNA sense strand
cauccauggugaagaaagu

SEQ ID NO: 1165411 - RNA, 19 nt, Homo sapiens
  misc_RNA (1)...(19): siRNA sense strand
ggugacaagauuauugaug

SEQ ID NO: 1165412 - RNA, 19 nt, Homo sapiens
  misc_RNA (1)...(19): siRNA sense strand
ggagagcucagaggaucaa

SEQ ID NO: 1165413 - RNA, 19 nt, Homo sapiens
  misc_RNA (1)...(19): siRNA sense strand
gcaaguucaccaaguggau

SEQ ID NO: 1165414 - RNA, 19 nt, Homo sapiens
  misc_RNA (1)...(19): siRNA sense strand
ggaucaaggccucgaaguc

SEQ ID NO: 1165415 - RNA, 19 nt, Homo sapiens
  misc_RNA (1)...(19): siRNA sense strand
gcccagaugugaccuuucc

SEQ ID NO: 1165416 - RNA, 19 nt, Homo sapiens
  misc_RNA (1)...(19): siRNA sense strand
ccaaugacccaggagucua

SEQ ID NO: 1165417 - RNA, 19 nt, Homo sapiens
  misc_RNA (1)...(19): siRNA sense strand
ucaaggccucgaagucauu

SEQ ID NO: 1165418 - RNA, 19 nt, Homo sapiens
  misc_RNA (1)...(19): siRNA sense strand
cagggugacaagauuauug

SEQ ID NO: 1165419 - RNA, 19 nt, Homo sapiens
  misc_RNA (1)...(19): siRNA sense strand
ccguuggugugcagaggua

SEQ ID NO: 1165420 - RNA, 19 nt, Homo sapiens
  misc_RNA (1)...(19): siRNA sense strand
gugcaccugggcagugaua

SEQ ID NO: 1165421 - RNA, 19 nt, Homo sapiens
  misc_RNA (1)...(19): siRNA sense strand
ggaggcguccuggucaaug

SEQ ID NO: 1165422 - RNA, 19 nt, Homo sapiens
  misc_RNA (1)...(19): siRNA sense strand
cgccugcaauggugacuca

SEQ ID NO: 1165423 - RNA, 19 nt, Homo sapiens
  misc_RNA (1)...(19): siRNA sense strand
caggacugcacgaagguuu

SEQ ID NO: 1165424 - RNA, 19 nt, Homo sapiens
  misc_RNA (1)...(19): siRNA sense strand
gcacgaagguuuacaagga

SEQ ID NO: 1165425 - RNA, 19 nt, Homo sapiens
  misc_RNA (1)...(19): siRNA sense strand
ccacacagacccauguuaa

SEQ ID NO: 1165426 - RNA, 19 nt, Homo sapiens
  misc_RNA (1)...(19): siRNA sense strand
gaucuuacugcuauccuua

SEQ ID NO: 1165427 - RNA, 19 nt, Homo sapiens
  misc_RNA (1)...(19): siRNA sense strand
ggaaccaccuguacugucu

SEQ ID NO: 1165428 - RNA, 19 nt, Homo sapiens
  misc_RNA (1)...(19): siRNA sense strand
ggaaacugcaggagaagaa

SEQ ID NO: 1165429 - RNA, 19 nt, Homo sapiens
  misc_RNA (1)...(19): siRNA sense strand
uacaaggacuuacuggaaa

SEQ ID NO: 1165430 - RNA, 19 nt, Homo sapiens
  misc_RNA (1)...(19): siRNA sense strand
gauaaaugacaccaugaaa

SEQ ID NO: 1165431 - RNA, 19 nt, Homo sapiens
  misc_RNA (1)...(19): siRNA sense strand
gaucaaggccucgaaguca

SEQ ID NO: 1165432 - RNA, 19 nt, Homo sapiens
  misc_RNA (1)...(19): siRNA sense strand
gaggcguccuggucaauga

SEQ ID NO: 1165433 - RNA, 19 nt, Homo sapiens
  misc_RNA (1)...(19): siRNA sense strand
gagcccagaugugaccuuu

SEQ ID NO: 1165434 - RNA, 19 nt, Homo sapiens
  misc_RNA (1)...(19): siRNA sense strand
ugucauccauggugaagaa

SEQ ID NO: 1165435 - RNA, 19 nt, Homo sapiens
  misc_RNA (1)...(19): siRNA sense strand
ggauaaaugacaccaugaa

SEQ ID NO: 1165436 - RNA, 19 nt, Homo sapiens
  misc_RNA (1)...(19): siRNA sense strand
gaagguuuacaaggacuua

SEQ ID NO: 1165437 - RNA, 19 nt, Homo sapiens
  misc_RNA (1)...(19): siRNA sense strand
acugcaagaugaaugagua

SEQ ID NO: 1165438 - RNA, 19 nt, Homo sapiens
  misc_RNA (1)...(19): siRNA sense strand
uuacaaggacuuacuggaa

SEQ ID NO: 1165439 - RNA, 19 nt, Homo sapiens
  misc_RNA (1)...(19): siRNA sense strand
ucaccaaguggauaaauga

SEQ ID NO: 1165440 - RNA, 19 nt, Homo sapiens
  misc_RNA (1)...(19): siRNA sense strand
cuuggaaacugcaggagaa

SEQ ID NO: 1165441 - RNA, 19 nt, Homo sapiens
  misc_RNA (1)...(19): siRNA sense strand
acacagacccauguuaaug

SEQ ID NO: 1165442 - RNA, 19 nt, Homo sapiens
  misc_RNA (1)...(19): siRNA sense strand
caaguucaccaaguggaua

SEQ ID NO: 1165443 - RNA, 19 nt, Homo sapiens
  misc_RNA (1)...(19): siRNA sense strand
cacagacccauguuaauga

SEQ ID NO: 1165444 - RNA, 19 nt, Homo sapiens
  misc_RNA (1)...(19): siRNA sense strand
gcccagggugacaagauua

SEQ ID NO: 1165445 - RNA, 19 nt, Homo sapiens
  misc_RNA (1)...(19): siRNA sense strand
gaagaagcccagggugaca

SEQ ID NO: 1165446 - RNA, 19 nt, Homo sapiens
  misc_RNA (1)...(19): siRNA sense strand
cauccauggugaagaaagu

SEQ ID NO: 1165447 - RNA, 19 nt, Homo sapiens
  misc_RNA (1)...(19): siRNA sense strand
ggugacaagauuauugaug

SEQ ID NO: 1165448 - RNA, 19 nt, Homo sapiens
  misc_RNA (1)...(19): siRNA sense strand
ggagagcucagaggaucaa

SEQ ID NO: 1165449 - RNA, 19 nt, Homo sapiens
  misc_RNA (1)...(19): siRNA sense strand
gcaaguucaccaaguggau

SEQ ID NO: 1165450 - RNA, 19 nt, Homo sapiens
  misc_RNA (1)...(19): siRNA sense strand
ggaucaaggccucgaaguc

SEQ ID NO: 1165451 - RNA, 19 nt, Homo sapiens
  misc_RNA (1)...(19): siRNA sense strand
gcccagaugugaccuuucc

SEQ ID NO: 1165452 - RNA, 19 nt, Homo sapiens
  misc_RNA (1)...(19): siRNA sense strand
ccaaugacccaggagucua

SEQ ID NO: 1165453 - RNA, 19 nt, Homo sapiens
  misc_RNA (1)...(19): siRNA sense strand
ucaaggccucgaagucauu

SEQ ID NO: 1165454 - RNA, 19 nt, Homo sapiens
  misc_RNA (1)...(19): siRNA sense strand
cagggugacaagauuauug

SEQ ID NO: 1165455 - RNA, 19 nt, Homo sapiens
  misc_RNA (1)...(19): siRNA sense strand
ccguuggugugcagaggua

SEQ ID NO: 1165456 - RNA, 19 nt, Homo sapiens
  misc_RNA (1)...(19): siRNA sense strand
gugcaccugggcagugaua

SEQ ID NO: 1165457 - RNA, 19 nt, Homo sapiens
  misc_RNA (1)...(19): siRNA sense strand
ggaggcguccuggucaaug

SEQ ID NO: 1165458 - RNA, 19 nt, Homo sapiens
  misc_RNA (1)...(19): siRNA sense strand
cgccugcaauggugacuca

SEQ ID NO: 1165459 - RNA, 19 nt, Homo sapiens
  misc_RNA (1)...(19): siRNA sense strand
caggacugcacgaagguuu

SEQ ID NO: 1165460 - RNA, 19 nt, Homo sapiens
  misc_RNA (1)...(19): siRNA sense strand
gcacgaagguuuacaagga

SEQ ID NO: 1165461 - RNA, 19 nt, Homo sapiens
  misc_RNA (1)...(19): siRNA sense strand
ccacacagacccauguuaa

SEQ ID NO: 1165462 - RNA, 19 nt, Homo sapiens
  misc_RNA (1)...(19): siRNA sense strand
gaucuuacugcuauccuua

SEQ ID NO: 1165463 - RNA, 19 nt, Homo sapiens
  misc_RNA (1)...(19): siRNA sense strand
ggaaccaccuguacugucu

SEQ ID NO: 1165464 - RNA, 19 nt, Homo sapiens
  misc_RNA (1)...(19): siRNA sense strand
ggaaacugcaggagaagaa

SEQ ID NO: 1165465 - RNA, 19 nt, Homo sapiens
  misc_RNA (1)...(19): siRNA sense strand
uacaaggacuuacuggaaa

SEQ ID NO: 1165466 - RNA, 19 nt, Homo sapiens
  misc_RNA (1)...(19): siRNA sense strand
gauaaaugacaccaugaaa

SEQ ID NO: 1165467 - RNA, 19 nt, Homo sapiens
  misc_RNA (1)...(19): siRNA sense strand
gaucaaggccucgaaguca

SEQ ID NO: 1165468 - RNA, 19 nt, Homo sapiens
  misc_RNA (1)...(19): siRNA sense strand
gaggcguccuggucaauga

SEQ ID NO: 1165469 - RNA, 19 nt, Homo sapiens
  misc_RNA (1)...(19): siRNA sense strand
gagcccagaugugaccuuu

SEQ ID NO: 1165470 - RNA, 19 nt, Homo sapiens
  misc_RNA (1)...(19): siRNA sense strand
ugucauccauggugaagaa

SEQ ID NO: 1165471 - RNA, 19 nt, Homo sapiens
  misc_RNA (1)...(19): siRNA sense strand
ggauaaaugacaccaugaa

SEQ ID NO: 1165472 - RNA, 19 nt, Homo sapiens
  misc_RNA (1)...(19): siRNA sense strand
gaagguuuacaaggacuua

SEQ ID NO: 1165473 - RNA, 19 nt, Homo sapiens
  misc_RNA (1)...(19): siRNA sense strand
acugcaagaugaaugagua

SEQ ID NO: 1165474 - RNA, 19 nt, Homo sapiens
  misc_RNA (1)...(19): siRNA sense strand
uuacaaggacuuacuggaa

SEQ ID NO: 1165475 - RNA, 19 nt, Homo sapiens
  misc_RNA (1)...(19): siRNA sense strand
ucaccaaguggauaaauga

SEQ ID NO: 1165476 - RNA, 19 nt, Homo sapiens
  misc_RNA (1)...(19): siRNA sense strand
cuuggaaacugcaggagaa

SEQ ID NO: 1165477 - RNA, 19 nt, Homo sapiens
  misc_RNA (1)...(19): siRNA sense strand
acacagacccauguuaaug

SEQ ID NO: 1165478 - RNA, 19 nt, Homo sapiens
  misc_RNA (1)...(19): siRNA sense strand
caaguucaccaaguggaua

SEQ ID NO: 1165479 - RNA, 19 nt, Homo sapiens
  misc_RNA (1)...(19): siRNA sense strand
cacagacccauguuaauga

SEQ ID NO: 1165480 - RNA, 19 nt, Homo sapiens
  misc_RNA (1)...(19): siRNA sense strand
gcccagggugacaagauua

SEQ ID NO: 1165481 - RNA, 19 nt, Homo sapiens
  misc_RNA (1)...(19): siRNA sense strand
gaagaagcccagggugaca

SEQ ID NO: 1165482 - RNA, 19 nt, Homo sapiens
  misc_RNA (1)...(19): siRNA sense strand
cauccauggugaagaaagu

SEQ ID NO: 1165483 - RNA, 19 nt, Homo sapiens
  misc_RNA (1)...(19): siRNA sense strand
ggugacaagauuauugaug

SEQ ID NO: 1165484 - RNA, 19 nt, Homo sapiens
  misc_RNA (1)...(19): siRNA sense strand
ggagagcucagaggaucaa

SEQ ID NO: 1165485 - RNA, 19 nt, Homo sapiens
  misc_RNA (1)...(19): siRNA sense strand
gcaaguucaccaaguggau

SEQ ID NO: 1165486 - RNA, 19 nt, Homo sapiens
  misc_RNA (1)...(19): siRNA sense strand
ggaucaaggccucgaaguc

SEQ ID NO: 1165487 - RNA, 19 nt, Homo sapiens
  misc_RNA (1)...(19): siRNA sense strand
gcccagaugugaccuuucc

SEQ ID NO: 1165488 - RNA, 19 nt, Homo sapiens
  misc_RNA (1)...(19): siRNA sense strand
ccaaugacccaggagucua

SEQ ID NO: 1165489 - RNA, 19 nt, Homo sapiens
  misc_RNA (1)...(19): siRNA sense strand
ucaaggccucgaagucauu

SEQ ID NO: 1165490 - RNA, 19 nt, Homo sapiens
  misc_RNA (1)...(19): siRNA sense strand
cagggugacaagauuauug

SEQ ID NO: 1165491 - RNA, 19 nt, Homo sapiens
  misc_RNA (1)...(19): siRNA sense strand
ccguuggugugcagaggua

SEQ ID NO: 1165492 - RNA, 19 nt, Homo sapiens
  misc_RNA (1)...(19): siRNA sense strand
gugcaccugggcagugaua

SEQ ID NO: 1165493 - RNA, 19 nt, Homo sapiens
  misc_RNA (1)...(19): siRNA sense strand
ggaggcguccuggucaaug

SEQ ID NO: 1165494 - RNA, 19 nt, Homo sapiens
  misc_RNA (1)...(19): siRNA sense strand
cgccugcaauggugacuca

SEQ ID NO: 1165495 - RNA, 19 nt, Homo sapiens
  misc_RNA (1)...(19): siRNA sense strand
caggacugcacgaagguuu

SEQ ID NO: 1165496 - RNA, 19 nt, Homo sapiens
  misc_RNA (1)...(19): siRNA sense strand
gcacgaagguuuacaagga

SEQ ID NO: 1165497 - RNA, 19 nt, Homo sapiens
  misc_RNA (1)...(19): siRNA sense strand
ccacacagacccauguuaa

SEQ ID NO: 1165498 - RNA, 19 nt, Homo sapiens
  misc_RNA (1)...(19): siRNA sense strand
gaucuuacugcuauccuua

SEQ ID NO: 1165499 - RNA, 19 nt, Homo sapiens
  misc_RNA (1)...(19): siRNA sense strand
ggaaccaccuguacugucu

SEQ ID NO: 1165500 - RNA, 19 nt, Homo sapiens
  misc_RNA (1)...(19): siRNA sense strand
ggaaacugcaggagaagaa

SEQ ID NO: 1165501 - RNA, 19 nt, Homo sapiens
  misc_RNA (1)...(19): siRNA sense strand
uacaaggacuuacuggaaa

SEQ ID NO: 1165502 - RNA, 19 nt, Homo sapiens
  misc_RNA (1)...(19): siRNA sense strand
gauaaaugacaccaugaaa

SEQ ID NO: 1165503 - RNA, 19 nt, Homo sapiens
  misc_RNA (1)...(19): siRNA sense strand
gaucaaggccucgaaguca

SEQ ID NO: 1165504 - RNA, 19 nt, Homo sapiens
  misc_RNA (1)...(19): siRNA sense strand
gaggcguccuggucaauga

SEQ ID NO: 1165505 - RNA, 19 nt, Homo sapiens
  misc_RNA (1)...(19): siRNA sense strand
gagcccagaugugaccuuu

SEQ ID NO: 1165506 - RNA, 19 nt, Homo sapiens
  misc_RNA (1)...(19): siRNA sense strand
ugucauccauggugaagaa

SEQ ID NO: 1165507 - RNA, 19 nt, Homo sapiens
  misc_RNA (1)...(19): siRNA sense strand
ggauaaaugacaccaugaa

SEQ ID NO: 1165508 - RNA, 19 nt, Homo sapiens
  misc_RNA (1)...(19): siRNA sense strand
gaagguuuacaaggacuua

SEQ ID NO: 1165509 - RNA, 19 nt, Homo sapiens
  misc_RNA (1)...(19): siRNA sense strand
acugcaagaugaaugagua

SEQ ID NO: 1165510 - RNA, 19 nt, Homo sapiens
  misc_RNA (1)...(19): siRNA sense strand
uuacaaggacuuacuggaa

SEQ ID NO: 1165511 - RNA, 19 nt, Homo sapiens
  misc_RNA (1)...(19): siRNA sense strand
ucaccaaguggauaaauga

SEQ ID NO: 1165512 - RNA, 19 nt, Homo sapiens
  misc_RNA (1)...(19): siRNA sense strand
cuuggaaacugcaggagaa

SEQ ID NO: 1165513 - RNA, 19 nt, Homo sapiens
  misc_RNA (1)...(19): siRNA sense strand
acacagacccauguuaaug

SEQ ID NO: 1165514 - RNA, 19 nt, Homo sapiens
  misc_RNA (1)...(19): siRNA sense strand
caaguucaccaaguggaua

SEQ ID NO: 1165515 - RNA, 19 nt, Homo sapiens
  misc_RNA (1)...(19): siRNA sense strand
cacagacccauguuaauga

SEQ ID NO: 1165516 - RNA, 19 nt, Homo sapiens
  misc_RNA (1)...(19): siRNA sense strand
gcccagggugacaagauua

SEQ ID NO: 1165517 - RNA, 19 nt, Homo sapiens
  misc_RNA (1)...(19): siRNA sense strand
gaagaagcccagggugaca

SEQ ID NO: 1165518 - RNA, 19 nt, Homo sapiens
  misc_RNA (1)...(19): siRNA sense strand
cauccauggugaagaaagu

SEQ ID NO: 1165519 - RNA, 19 nt, Homo sapiens
  misc_RNA (1)...(19): siRNA sense strand
ggugacaagauuauugaug

SEQ ID NO: 1165520 - RNA, 19 nt, Homo sapiens
  misc_RNA (1)...(19): siRNA sense strand
ggagagcucagaggaucaa

SEQ ID NO: 1165521 - RNA, 19 nt, Homo sapiens
  misc_RNA (1)...(19): siRNA sense strand
gcaaguucaccaaguggau

SEQ ID NO: 1165522 - RNA, 19 nt, Homo sapiens
  misc_RNA (1)...(19): siRNA sense strand
ggaucaaggccucgaaguc

SEQ ID NO: 1165523 - RNA, 19 nt, Homo sapiens
  misc_RNA (1)...(19): siRNA sense strand
gcccagaugugaccuuucc

SEQ ID NO: 1165524 - RNA, 19 nt, Homo sapiens
  misc_RNA (1)...(19): siRNA sense strand
ccaaugacccaggagucua

SEQ ID NO: 1165525 - RNA, 19 nt, Homo sapiens
  misc_RNA (1)...(19): siRNA sense strand
ucaaggccucgaagucauu

SEQ ID NO: 1165526 - RNA, 19 nt, Homo sapiens
  misc_RNA (1)...(19): siRNA sense strand
cagggugacaagauuauug

SEQ ID NO: 1165527 - RNA, 19 nt, Homo sapiens
  misc_RNA (1)...(19): siRNA sense strand
ccguuggugugcagaggua

SEQ ID NO: 1165528 - RNA, 19 nt, Homo sapiens
  misc_RNA (1)...(19): siRNA sense strand
gugcaccugggcagugaua

SEQ ID NO: 1165529 - RNA, 19 nt, Homo sapiens
  misc_RNA (1)...(19): siRNA sense strand
ggaggcguccuggucaaug

SEQ ID NO: 1165530 - RNA, 19 nt, Homo sapiens
  misc_RNA (1)...(19): siRNA sense strand
cgccugcaauggugacuca

SEQ ID NO: 1165531 - RNA, 19 nt, Homo sapiens
  misc_RNA (1)...(19): siRNA sense strand
caggacugcacgaagguuu

SEQ ID NO: 1165532 - RNA, 19 nt, Homo sapiens
  misc_RNA (1)...(19): siRNA sense strand
gaaggaagauguggaaguu

SEQ ID NO: 1165533 - RNA, 19 nt, Homo sapiens
  misc_RNA (1)...(19): siRNA sense strand
gggaacaaaugaucaauga

SEQ ID NO: 1165534 - RNA, 19 nt, Homo sapiens
  misc_RNA (1)...(19): siRNA sense strand
gcuaaagcuugaugacauu

SEQ ID NO: 1165535 - RNA, 19 nt, Homo sapiens
  misc_RNA (1)...(19): siRNA sense strand
caacacgccuagagcuaaa

SEQ ID NO: 1165536 - RNA, 19 nt, Homo sapiens
  misc_RNA (1)...(19): siRNA sense strand
guaagaaacagaaggaaga

SEQ ID NO: 1165537 - RNA, 19 nt, Homo sapiens
  misc_RNA (1)...(19): siRNA sense strand
ccaauaaucguucaucuca

SEQ ID NO: 1165538 - RNA, 19 nt, Homo sapiens
  misc_RNA (1)...(19): siRNA sense strand
ccauugggcuuagcaguga

SEQ ID NO: 1165539 - RNA, 19 nt, Homo sapiens
  misc_RNA (1)...(19): siRNA sense strand
ggaagauguggaaguugua

SEQ ID NO: 1165540 - RNA, 19 nt, Homo sapiens
  misc_RNA (1)...(19): siRNA sense strand
ugaugacauugaagaguuu

SEQ ID NO: 1165541 - RNA, 19 nt, Homo sapiens
  misc_RNA (1)...(19): siRNA sense strand
ugaagaguuugagaacauu

SEQ ID NO: 1165542 - RNA, 19 nt, Homo sapiens
  misc_RNA (1)...(19): siRNA sense strand
caagagccgggaacaaaug

SEQ ID NO: 1165543 - RNA, 19 nt, Homo sapiens
  misc_RNA (1)...(19): siRNA sense strand
aaagcuugaugacauugaa

SEQ ID NO: 1165544 - RNA, 19 nt, Homo sapiens
  misc_RNA (1)...(19): siRNA sense strand
gaaaccaacacgccuagag

SEQ ID NO: 1165545 - RNA, 19 nt, Homo sapiens
  misc_RNA (1)...(19): siRNA sense strand
uugaugacauugaagaguu

SEQ ID NO: 1165546 - RNA, 19 nt, Homo sapiens
  misc_RNA (1)...(19): siRNA sense strand
gaaacagaaggaagaugug

SEQ ID NO: 1165547 - RNA, 19 nt, Homo sapiens
  misc_RNA (1)...(19): siRNA sense strand
caauaaucguucaucucaa

SEQ ID NO: 1165548 - RNA, 19 nt, Homo sapiens
  misc_RNA (1)...(19): siRNA sense strand
ccaacacgccuagagcuaa

SEQ ID NO: 1165549 - RNA, 19 nt, Homo sapiens
  misc_RNA (1)...(19): siRNA sense strand
uugaagaguuugagaacau

SEQ ID NO: 1165550 - RNA, 19 nt, Homo sapiens
  misc_RNA (1)...(19): siRNA sense strand
aaucguucaucucaauuug

SEQ ID NO: 1165551 - RNA, 19 nt, Homo sapiens
  misc_RNA (1)...(19): siRNA sense strand
aggaagauguggaaguugu

SEQ ID NO: 1165552 - RNA, 19 nt, Homo sapiens
  misc_RNA (1)...(19): siRNA sense strand
agaaacagaaggaagaugu

SEQ ID NO: 1165553 - RNA, 19 nt, Homo sapiens
  misc_RNA (1)...(19): siRNA sense strand
cccaagagccgggaacaaa

SEQ ID NO: 1165554 - RNA, 19 nt, Homo sapiens
  misc_RNA (1)...(19): siRNA sense strand
caacccaagcccaauaauc

SEQ ID NO: 1165555 - RNA, 19 nt, Homo sapiens
  misc_RNA (1)...(19): siRNA sense strand
ccaagagccgggaacaaau

SEQ ID NO: 1165556 - RNA, 19 nt, Homo sapiens
  misc_RNA (1)...(19): siRNA sense strand
caauuuggaagucuugaau

SEQ ID NO: 1165557 - RNA, 19 nt, Homo sapiens
  misc_RNA (1)...(19): siRNA sense strand
gaucggauugguuauaaac

SEQ ID NO: 1165558 - RNA, 19 nt, Homo sapiens
  misc_RNA (1)...(19): siRNA sense strand
gcccaauaaucguucaucu

SEQ ID NO: 1165559 - RNA, 19 nt, Homo sapiens
  misc_RNA (1)...(19): siRNA sense strand
acagaaggaagauguggaa

SEQ ID NO: 1165560 - RNA, 19 nt, Homo sapiens
  misc_RNA (1)...(19): siRNA sense strand
augaucggauugguuauaa

SEQ ID NO: 1165561 - RNA, 19 nt, Homo sapiens
  misc_RNA (1)...(19): siRNA sense strand
aggcagugauggagaagga

SEQ ID NO: 1165562 - RNA, 19 nt, Homo sapiens
  misc_RNA (1)...(19): siRNA sense strand
gaagauguggaaguuguag

SEQ ID NO: 1165563 - RNA, 19 nt, Homo sapiens
  misc_RNA (1)...(19): siRNA sense strand
gaagaguuugagaacauuc

SEQ ID NO: 1165564 - RNA, 19 nt, Homo sapiens
  misc_RNA (1)...(19): siRNA sense strand
ugaucggauugguuauaaa

SEQ ID NO: 1165565 - RNA, 19 nt, Homo sapiens
  misc_RNA (1)...(19): siRNA sense strand
ccuggagacccguaagaaa

SEQ ID NO: 1165566 - RNA, 19 nt, Homo sapiens
  misc_RNA (1)...(19): siRNA sense strand
aaugaucggauugguuaua

SEQ ID NO: 1165567 - RNA, 19 nt, Homo sapiens
  misc_RNA (1)...(19): siRNA sense strand
gaccuggagacccguaaga

SEQ ID NO: 1165568 - RNA, 19 nt, Homo sapiens
  misc_RNA (1)...(19): siRNA sense strand
ucguucaucucaauuugga

SEQ ID NO: 1165569 - RNA, 19 nt, Homo sapiens
  misc_RNA (1)...(19): siRNA sense strand
aggaggcagugauggagaa

SEQ ID NO: 1165570 - RNA, 19 nt, Homo sapiens
  misc_RNA (1)...(19): siRNA sense strand
uugagaacauucgaaagga

SEQ ID NO: 1165571 - RNA, 19 nt, Homo sapiens
  misc_RNA (1)...(19): siRNA sense strand
uaaagcuugaugacauuga

SEQ ID NO: 1165572 - RNA, 19 nt, Homo sapiens
  misc_RNA (1)...(19): siRNA sense strand
gagccgggaacaaaugauc

SEQ ID NO: 1165573 - RNA, 19 nt, Homo sapiens
  misc_RNA (1)...(19): siRNA sense strand
uaagaaacagaaggaagau

SEQ ID NO: 1165574 - RNA, 19 nt, Homo sapiens
  misc_RNA (1)...(19): siRNA sense strand
caagcccaauaaucguuca

SEQ ID NO: 1165575 - RNA, 19 nt, Homo sapiens
  misc_RNA (1)...(19): siRNA sense strand
gacauugaagaguuugaga

SEQ ID NO: 1165576 - RNA, 19 nt, Homo sapiens
  misc_RNA (1)...(19): siRNA sense strand
gaaagucggugaacacauu

SEQ ID NO: 1165577 - RNA, 19 nt, Homo sapiens
  misc_RNA (1)...(19): siRNA sense strand
caugaaagcugaaaugaaa

SEQ ID NO: 1165578 - RNA, 19 nt, Homo sapiens
  misc_RNA (1)...(19): siRNA sense strand
gaagaagacuguccugguu

SEQ ID NO: 1165579 - RNA, 19 nt, Homo sapiens
  misc_RNA (1)...(19): siRNA sense strand
ugaagaaccugcauaauau

SEQ ID NO: 1165580 - RNA, 19 nt, Homo sapiens
  misc_RNA (1)...(19): siRNA sense strand
gaacagaccucaaaaccua

SEQ ID NO: 1165581 - RNA, 19 nt, Homo sapiens
  misc_RNA (1)...(19): siRNA sense strand
caagauugcuucugaaaug

SEQ ID NO: 1165582 - RNA, 19 nt, Homo sapiens
  misc_RNA (1)...(19): siRNA sense strand
ucagugaucuccagaagua

SEQ ID NO: 1165583 - RNA, 19 nt, Homo sapiens
  misc_RNA (1)...(19): siRNA sense strand
aaucagugcucuacaaaua

SEQ ID NO: 1165584 - RNA, 19 nt, Homo sapiens
  misc_RNA (1)...(19): siRNA sense strand
gcaaggggcucaugguuua

SEQ ID NO: 1165585 - RNA, 19 nt, Homo sapiens
  misc_RNA (1)...(19): siRNA sense strand
gaucaaugcuuccacagau

SEQ ID NO: 1165586 - RNA, 19 nt, Homo sapiens
  misc_RNA (1)...(19): siRNA sense strand
caaacaagcucccucugau

SEQ ID NO: 1165587 - RNA, 19 nt, Homo sapiens
  misc_RNA (1)...(19): siRNA sense strand
gggcaaagauacaugugaa

SEQ ID NO: 1165588 - RNA, 19 nt, Homo sapiens
  misc_RNA (1)...(19): siRNA sense strand
gaucaggaccggaaaguga

SEQ ID NO: 1165589 - RNA, 19 nt, Homo sapiens
  misc_RNA (1)...(19): siRNA sense strand
ugaaacaacuagaaucuca

SEQ ID NO: 1165590 - RNA, 19 nt, Homo sapiens
  misc_RNA (1)...(19): siRNA sense strand
gaacaaagagagaaucagu

SEQ ID NO: 1165591 - RNA, 19 nt, Homo sapiens
  misc_RNA (1)...(19): siRNA sense strand
ggaaucagagucuugaauu

SEQ ID NO: 1165592 - RNA, 19 nt, Homo sapiens
  misc_RNA (1)...(19): siRNA sense strand
caaggacacugagaagaaa

SEQ ID NO: 1165593 - RNA, 19 nt, Homo sapiens
  misc_RNA (1)...(19): siRNA sense strand
caagcagccucggcaaaua

SEQ ID NO: 1165594 - RNA, 19 nt, Homo sapiens
  misc_RNA (1)...(19): siRNA sense strand
caagcgaacgggcaauuua

SEQ ID NO: 1165595 - RNA, 19 nt, Homo sapiens
  misc_RNA (1)...(19): siRNA sense strand
ugacaaagcggaagaacaa

SEQ ID NO: 1165596 - RNA, 19 nt, Homo sapiens
  misc_RNA (1)...(19): siRNA sense strand
gugaacacauucucaaaga

SEQ ID NO: 1165597 - RNA, 19 nt, Homo sapiens
  misc_RNA (1)...(19): siRNA sense strand
gcucaugguuuaugcaaau

SEQ ID NO: 1165598 - RNA, 19 nt, Homo sapiens
  misc_RNA (1)...(19): siRNA sense strand
aaaccuacgucuagaaaug

SEQ ID NO: 1165599 - RNA, 19 nt, Homo sapiens
  misc_RNA (1)...(19): siRNA sense strand
gcaugaagaaccugcauaa

SEQ ID NO: 1165600 - RNA, 19 nt, Homo sapiens
  misc_RNA (1)...(19): siRNA sense strand
ccgacuaucuucucuggua

SEQ ID NO: 1165601 - RNA, 19 nt, Homo sapiens
  misc_RNA (1)...(19): siRNA sense strand
gagcaaaaguggagacaaa

SEQ ID NO: 1165602 - RNA, 19 nt, Homo sapiens
  misc_RNA (1)...(19): siRNA sense strand
ccacagaacuaucaagacu

SEQ ID NO: 1165603 - RNA, 19 nt, Homo sapiens
  misc_RNA (1)...(19): siRNA sense strand
agaaacugcuuaaugagaa

SEQ ID NO: 1165604 - RNA, 19 nt, Homo sapiens
  misc_RNA (1)...(19): siRNA sense strand
cagggaagguggccagaaa

SEQ ID NO: 1165605 - RNA, 19 nt, Homo sapiens
  misc_RNA (1)...(19): siRNA sense strand
gagagagagcaaagaauuu

SEQ ID NO: 1165606 - RNA, 19 nt, Homo sapiens
  misc_RNA (1)...(19): siRNA sense strand
ucagaguacucaauaugaa

SEQ ID NO: 1165607 - RNA, 19 nt, Homo sapiens
  misc_RNA (1)...(19): siRNA sense strand
gaagaaccugcauaauauu

SEQ ID NO: 1165608 - RNA, 19 nt, Homo sapiens
  misc_RNA (1)...(19): siRNA sense strand
gagauuguguccgauuuga

SEQ ID NO: 1165609 - RNA, 19 nt, Homo sapiens
  misc_RNA (1)...(19): siRNA sense strand
augaagaaccugcauaaua

SEQ ID NO: 1165610 - RNA, 19 nt, Homo sapiens
  misc_RNA (1)...(19): siRNA sense strand
gaacugacagcugcagaaa

SEQ ID NO: 1165611 - RNA, 19 nt, Homo sapiens
  misc_RNA (1)...(19): siRNA sense strand
cagauucacuggccaagga

SEQ ID NO: 1165612 - RNA, 19 nt, Homo sapiens
  misc_RNA (1)...(19): siRNA sense strand
caagguggcuaccaaagca

SEQ ID NO: 1165613 - RNA, 19 nt, Homo sapiens
  misc_RNA (1)...(19): siRNA sense strand
agagaaaucuguucaacca

SEQ ID NO: 1165614 - RNA, 19 nt, Homo sapiens
  misc_RNA (1)...(19): siRNA sense strand
cuucugaaauggccuauga

SEQ ID NO: 1165615 - RNA, 19 nt, Homo sapiens
  misc_RNA (1)...(19): siRNA sense strand
gauugcagccucccaguuu

SEQ ID NO: 1165616 - RNA, 19 nt, Homo sapiens
  misc_RNA (1)...(19): siRNA sense strand
uucagaaacugcuuaauga

SEQ ID NO: 1165617 - RNA, 19 nt, Homo sapiens
  misc_RNA (1)...(19): siRNA sense strand
gauggucucucucaugaag

SEQ ID NO: 1165618 - RNA, 19 nt, Homo sapiens
  misc_RNA (1)...(19): siRNA sense strand
gcucagaaggcaacuuaaa

SEQ ID NO: 1165619 - RNA, 19 nt, Homo sapiens
  misc_RNA (1)...(19): siRNA sense strand
gaacgggcaauuuauagau

SEQ ID NO: 1165620 - RNA, 19 nt, Homo sapiens
  misc_RNA (1)...(19): siRNA sense strand
gcaaagauacaugugaaga

SEQ ID NO: 1165621 - RNA, 19 nt, Homo sapiens
  misc_RNA (1)...(19): siRNA sense strand
auaaggaaaucaaggagaa

SEQ ID NO: 1165622 - RNA, 19 nt, Homo sapiens
  misc_RNA (1)...(19): siRNA sense strand
ggacaaaggcaaaaugaaa

SEQ ID NO: 1165623 - RNA, 19 nt, Homo sapiens
  misc_RNA (1)...(19): siRNA sense strand
cagcucagaaggcaacuua

SEQ ID NO: 1165624 - RNA, 19 nt, Homo sapiens
  misc_RNA (1)...(19): siRNA sense strand
gugaugaagcucugccuua

SEQ ID NO: 1165625 - RNA, 19 nt, Homo sapiens
  misc_RNA (1)...(19): siRNA sense strand
caaagauacaugugaagaa

SEQ ID NO: 1165626 - RNA, 19 nt, Homo sapiens
  misc_RNA (1)...(19): siRNA sense strand
cccuuaagcugauccagua

SEQ ID NO: 1165627 - RNA, 19 nt, Homo sapiens
  misc_RNA (1)...(19): siRNA sense strand
acugacagcugcagaaaug

SEQ ID NO: 1165628 - RNA, 19 nt, Homo sapiens
  misc_RNA (1)...(19): siRNA sense strand
ucaaggacacugagaagaa

SEQ ID NO: 1165629 - RNA, 19 nt, Homo sapiens
  misc_RNA (1)...(19): siRNA sense strand
caagaggucaugaaguuug

SEQ ID NO: 1165630 - RNA, 19 nt, Homo sapiens
  misc_RNA (1)...(19): siRNA sense strand
aauaaucagugcucuacaa

SEQ ID NO: 1165631 - RNA, 19 nt, Homo sapiens
  misc_RNA (1)...(19): siRNA sense strand
cuaaccaucuggaaccaaa

SEQ ID NO: 1165632 - RNA, 19 nt, Homo sapiens
  misc_RNA (1)...(19): siRNA sense strand
caagagaaaucuguucaac

SEQ ID NO: 1165633 - RNA, 19 nt, Homo sapiens
  misc_RNA (1)...(19): siRNA sense strand
ucugucauaugcaucuuua

SEQ ID NO: 1165634 - RNA, 19 nt, Homo sapiens
  misc_RNA (1)...(19): siRNA sense strand
acacagagggcgaauauca

SEQ ID NO: 1165635 - RNA, 19 nt, Homo sapiens
  misc_RNA (1)...(19): siRNA sense strand
gauaugcuuugucgaugug

SEQ ID NO: 1165636 - RNA, 19 nt, Homo sapiens
  misc_RNA (1)...(19): siRNA sense strand
gaaccugcauaauauuacu

SEQ ID NO: 1165637 - RNA, 19 nt, Homo sapiens
  misc_RNA (1)...(19): siRNA sense strand
ccgauuugauugauucuug

SEQ ID NO: 1165638 - RNA, 19 nt, Homo sapiens
  misc_RNA (1)...(19): siRNA sense strand
ggaaaucaaggagaaguug

SEQ ID NO: 1165639 - RNA, 19 nt, Homo sapiens
  misc_RNA (1)...(19): siRNA sense strand
agagagagagcaaagaauu

SEQ ID NO: 1165640 - RNA, 19 nt, Homo sapiens
  misc_RNA (1)...(19): siRNA sense strand
gcugcucgcuaaccuguga

SEQ ID NO: 1165641 - RNA, 19 nt, Homo sapiens
  misc_RNA (1)...(19): siRNA sense strand
ccaggagcaucaagaacuu

SEQ ID NO: 1165642 - RNA, 19 nt, Homo sapiens
  misc_RNA (1)...(19): siRNA sense strand
ugucaaacaucguucuaau

SEQ ID NO: 1165643 - RNA, 19 nt, Homo sapiens
  misc_RNA (1)...(19): siRNA sense strand
caaagcaugcagcaauaaa

SEQ ID NO: 1165644 - RNA, 19 nt, Homo sapiens
  misc_RNA (1)...(19): siRNA sense strand
gugaggagaaggagacuaa

SEQ ID NO: 1165645 - RNA, 19 nt, Homo sapiens
  misc_RNA (1)...(19): siRNA sense strand
gauuguguccgauuugauu

SEQ ID NO: 1165646 - RNA, 19 nt, Homo sapiens
  misc_RNA (1)...(19): siRNA sense strand
ucaaacaagcucccucuga

SEQ ID NO: 1165647 - RNA, 19 nt, Homo sapiens
  misc_RNA (1)...(19): siRNA sense strand
uguaggaggucuucuucaa

SEQ ID NO: 1165648 - RNA, 19 nt, Homo sapiens
  misc_RNA (1)...(19): siRNA sense strand
ugaugaagcucugccuuau

SEQ ID NO: 1165649 - RNA, 19 nt, Homo sapiens
  misc_RNA (1)...(19): siRNA sense strand
aaagauacaugugaagaag

SEQ ID NO: 1165650 - RNA, 19 nt, Homo sapiens
  misc_RNA (1)...(19): siRNA sense strand
aggagaaguuggaagguaa

SEQ ID NO: 1165651 - RNA, 19 nt, Homo sapiens
  misc_RNA (1)...(19): siRNA sense strand
cgacuaucuucucugguaa

SEQ ID NO: 1165652 - RNA, 19 nt, Homo sapiens
  misc_RNA (1)...(19): siRNA sense strand
gaucaagugaacauagauu

SEQ ID NO: 1165653 - RNA, 19 nt, Homo sapiens
  misc_RNA (1)...(19): siRNA sense strand
ccagagagagagcaaagaa

SEQ ID NO: 1165654 - RNA, 19 nt, Homo sapiens
  misc_RNA (1)...(19): siRNA sense strand
ugggaaagguggccaggaa

SEQ ID NO: 1165655 - RNA, 19 nt, Homo sapiens
  misc_RNA (1)...(19): siRNA sense strand
ucaugaaguuugccaagga

SEQ ID NO: 1165656 - RNA, 19 nt, Homo sapiens
  misc_RNA (1)...(19): siRNA sense strand
gcucagaguacucaauaug

SEQ ID NO: 1165657 - RNA, 19 nt, Homo sapiens
  misc_RNA (1)...(19): siRNA sense strand
cagcaucugugguccugaa

SEQ ID NO: 1165658 - RNA, 19 nt, Homo sapiens
  misc_RNA (1)...(19): siRNA sense strand
agaaguaugccuuggguuu

SEQ ID NO: 1165659 - RNA, 19 nt, Homo sapiens
  misc_RNA (1)...(19): siRNA sense strand
ucuuggacaugaaguaauu

SEQ ID NO: 1165660 - RNA, 19 nt, Homo sapiens
  misc_RNA (1)...(19): siRNA sense strand
gcaagcgaacgggcaauuu

SEQ ID NO: 1165661 - RNA, 19 nt, Homo sapiens
  misc_RNA (1)...(19): siRNA sense strand
ugaauucuccaccaugaaa

SEQ ID NO: 1165662 - RNA, 19 nt, Homo sapiens
  misc_RNA (1)...(19): siRNA sense strand
gaucccaaaugcaggaauc

SEQ ID NO: 1165663 - RNA, 19 nt, Homo sapiens
  misc_RNA (1)...(19): siRNA sense strand
aaggagaaguuggaaggua

SEQ ID NO: 1165664 - RNA, 19 nt, Homo sapiens
  misc_RNA (1)...(19): siRNA sense strand
uggacuggcugcucgcuaa

SEQ ID NO: 1165665 - RNA, 19 nt, Homo sapiens
  misc_RNA (1)...(19): siRNA sense strand
cuacaaauagcuugcagaa

SEQ ID NO: 1165666 - RNA, 19 nt, Homo sapiens
  misc_RNA (1)...(19): siRNA sense strand
cugaugauauugacugguu

SEQ ID NO: 1165667 - RNA, 19 nt, Homo sapiens
  misc_RNA (1)...(19): siRNA sense strand
gauugucucugcccuuaag

SEQ ID NO: 1165668 - RNA, 19 nt, Homo sapiens
  misc_RNA (1)...(19): siRNA sense strand
accaaagcaugcagcaaua

SEQ ID NO: 1165669 - RNA, 19 nt, Homo sapiens
  misc_RNA (1)...(19): siRNA sense strand
gcaggaaucagagucuuga

SEQ ID NO: 1165670 - RNA, 19 nt, Homo sapiens
  misc_RNA (1)...(19): siRNA sense strand
agacacagagggcgaauau

SEQ ID NO: 1165671 - RNA, 19 nt, Homo sapiens
  misc_RNA (1)...(19): siRNA sense strand
gaagcucugccuuaucaug

SEQ ID NO: 1165672 - RNA, 19 nt, Homo sapiens
  misc_RNA (1)...(19): siRNA sense strand
cagaaacugcuuaaugaga

SEQ ID NO: 1165673 - RNA, 19 nt, Homo sapiens
  misc_RNA (1)...(19): siRNA sense strand
cugauugucucugcccuua

SEQ ID NO: 1165674 - RNA, 19 nt, Homo sapiens
  misc_RNA (1)...(19): siRNA sense strand
ggaacugacagcugcagaa

SEQ ID NO: 1165675 - RNA, 19 nt, Homo sapiens
  misc_RNA (1)...(19): siRNA sense strand
ugaaauggccuaugaagcu

SEQ ID NO: 1165676 - RNA, 19 nt, Homo sapiens
  misc_RNA (1)...(19): siRNA sense strand
gaaagucggugaacacauu

SEQ ID NO: 1165677 - RNA, 19 nt, Homo sapiens
  misc_RNA (1)...(19): siRNA sense strand
caugaaagcugaaaugaaa

SEQ ID NO: 1165678 - RNA, 19 nt, Homo sapiens
  misc_RNA (1)...(19): siRNA sense strand
gaagaagacuguccugguu

SEQ ID NO: 1165679 - RNA, 19 nt, Homo sapiens
  misc_RNA (1)...(19): siRNA sense strand
ugaagaaccugcauaauau

SEQ ID NO: 1165680 - RNA, 19 nt, Homo sapiens
  misc_RNA (1)...(19): siRNA sense strand
gaacagaccucaaaaccua

SEQ ID NO: 1165681 - RNA, 19 nt, Homo sapiens
  misc_RNA (1)...(19): siRNA sense strand
caagauugcuucugaaaug

SEQ ID NO: 1165682 - RNA, 19 nt, Homo sapiens
  misc_RNA (1)...(19): siRNA sense strand
ucagugaucuccagaagua

SEQ ID NO: 1165683 - RNA, 19 nt, Homo sapiens
  misc_RNA (1)...(19): siRNA sense strand
aaucagugcucuacaaaua

SEQ ID NO: 1165684 - RNA, 19 nt, Homo sapiens
  misc_RNA (1)...(19): siRNA sense strand
gcaaggggcucaugguuua

SEQ ID NO: 1165685 - RNA, 19 nt, Homo sapiens
  misc_RNA (1)...(19): siRNA sense strand
gaucaaugcuuccacagau

SEQ ID NO: 1165686 - RNA, 19 nt, Homo sapiens
  misc_RNA (1)...(19): siRNA sense strand
caaacaagcucccucugau

SEQ ID NO: 1165687 - RNA, 19 nt, Homo sapiens
  misc_RNA (1)...(19): siRNA sense strand
gggcaaagauacaugugaa

SEQ ID NO: 1165688 - RNA, 19 nt, Homo sapiens
  misc_RNA (1)...(19): siRNA sense strand
gaucaggaccggaaaguga

SEQ ID NO: 1165689 - RNA, 19 nt, Homo sapiens
  misc_RNA (1)...(19): siRNA sense strand
ugaaacaacuagaaucuca

SEQ ID NO: 1165690 - RNA, 19 nt, Homo sapiens
  misc_RNA (1)...(19): siRNA sense strand
gaacaaagagagaaucagu

SEQ ID NO: 1165691 - RNA, 19 nt, Homo sapiens
  misc_RNA (1)...(19): siRNA sense strand
ggaaucagagucuugaauu

SEQ ID NO: 1165692 - RNA, 19 nt, Homo sapiens
  misc_RNA (1)...(19): siRNA sense strand
caaggacacugagaagaaa

SEQ ID NO: 1165693 - RNA, 19 nt, Homo sapiens
  misc_RNA (1)...(19): siRNA sense strand
caagcagccucggcaaaua

SEQ ID NO: 1165694 - RNA, 19 nt, Homo sapiens
  misc_RNA (1)...(19): siRNA sense strand
caagcgaacgggcaauuua

SEQ ID NO: 1165695 - RNA, 19 nt, Homo sapiens
  misc_RNA (1)...(19): siRNA sense strand
ugacaaagcggaagaacaa

SEQ ID NO: 1165696 - RNA, 19 nt, Homo sapiens
  misc_RNA (1)...(19): siRNA sense strand
gugaacacauucucaaaga

SEQ ID NO: 1165697 - RNA, 19 nt, Homo sapiens
  misc_RNA (1)...(19): siRNA sense strand
gcucaugguuuaugcaaau

SEQ ID NO: 1165698 - RNA, 19 nt, Homo sapiens
  misc_RNA (1)...(19): siRNA sense strand
aaaccuacgucuagaaaug

SEQ ID NO: 1165699 - RNA, 19 nt, Homo sapiens
  misc_RNA (1)...(19): siRNA sense strand
gcaugaagaaccugcauaa

SEQ ID NO: 1165700 - RNA, 19 nt, Homo sapiens
  misc_RNA (1)...(19): siRNA sense strand
ccgacuaucuucucuggua

SEQ ID NO: 1165701 - RNA, 19 nt, Homo sapiens
  misc_RNA (1)...(19): siRNA sense strand
gagcaaaaguggagacaaa

SEQ ID NO: 1165702 - RNA, 19 nt, Homo sapiens
  misc_RNA (1)...(19): siRNA sense strand
ccacagaacuaucaagacu

SEQ ID NO: 1165703 - RNA, 19 nt, Homo sapiens
  misc_RNA (1)...(19): siRNA sense strand
agaaacugcuuaaugagaa

SEQ ID NO: 1165704 - RNA, 19 nt, Homo sapiens
  misc_RNA (1)...(19): siRNA sense strand
cagggaagguggccagaaa

SEQ ID NO: 1165705 - RNA, 19 nt, Homo sapiens
  misc_RNA (1)...(19): siRNA sense strand
gagagagagcaaagaauuu

SEQ ID NO: 1165706 - RNA, 19 nt, Homo sapiens
  misc_RNA (1)...(19): siRNA sense strand
ucagaguacucaauaugaa

SEQ ID NO: 1165707 - RNA, 19 nt, Homo sapiens
  misc_RNA (1)...(19): siRNA sense strand
gaagaaccugcauaauauu

SEQ ID NO: 1165708 - RNA, 19 nt, Homo sapiens
  misc_RNA (1)...(19): siRNA sense strand
gagauuguguccgauuuga

SEQ ID NO: 1165709 - RNA, 19 nt, Homo sapiens
  misc_RNA (1)...(19): siRNA sense strand
augaagaaccugcauaaua

SEQ ID NO: 1165710 - RNA, 19 nt, Homo sapiens
  misc_RNA (1)...(19): siRNA sense strand
gaacugacagcugcagaaa

SEQ ID NO: 1165711 - RNA, 19 nt, Homo sapiens
  misc_RNA (1)...(19): siRNA sense strand
cagauucacuggccaagga

SEQ ID NO: 1165712 - RNA, 19 nt, Homo sapiens
  misc_RNA (1)...(19): siRNA sense strand
caagguggcuaccaaagca

SEQ ID NO: 1165713 - RNA, 19 nt, Homo sapiens
  misc_RNA (1)...(19): siRNA sense strand
agagaaaucuguucaacca

SEQ ID NO: 1165714 - RNA, 19 nt, Homo sapiens
  misc_RNA (1)...(19): siRNA sense strand
cuucugaaauggccuauga

SEQ ID NO: 1165715 - RNA, 19 nt, Homo sapiens
  misc_RNA (1)...(19): siRNA sense strand
gauugcagccucccaguuu

SEQ ID NO: 1165716 - RNA, 19 nt, Homo sapiens
  misc_RNA (1)...(19): siRNA sense strand
uucagaaacugcuuaauga

SEQ ID NO: 1165717 - RNA, 19 nt, Homo sapiens
  misc_RNA (1)...(19): siRNA sense strand
gauggucucucucaugaag

SEQ ID NO: 1165718 - RNA, 19 nt, Homo sapiens
  misc_RNA (1)...(19): siRNA sense strand
gcucagaaggcaacuuaaa

SEQ ID NO: 1165719 - RNA, 19 nt, Homo sapiens
  misc_RNA (1)...(19): siRNA sense strand
gaacgggcaauuuauagau

SEQ ID NO: 1165720 - RNA, 19 nt, Homo sapiens
  misc_RNA (1)...(19): siRNA sense strand
gcaaagauacaugugaaga

SEQ ID NO: 1165721 - RNA, 19 nt, Homo sapiens
  misc_RNA (1)...(19): siRNA sense strand
auaaggaaaucaaggagaa

SEQ ID NO: 1165722 - RNA, 19 nt, Homo sapiens
  misc_RNA (1)...(19): siRNA sense strand
ggacaaaggcaaaaugaaa

SEQ ID NO: 1165723 - RNA, 19 nt, Homo sapiens
  misc_RNA (1)...(19): siRNA sense strand
cagcucagaaggcaacuua

SEQ ID NO: 1165724 - RNA, 19 nt, Homo sapiens
  misc_RNA (1)...(19): siRNA sense strand
gugaugaagcucugccuua

SEQ ID NO: 1165725 - RNA, 19 nt, Homo sapiens
  misc_RNA (1)...(19): siRNA sense strand
caaagauacaugugaagaa

SEQ ID NO: 1165726 - RNA, 19 nt, Homo sapiens
  misc_RNA (1)...(19): siRNA sense strand
cccuuaagcugauccagua

SEQ ID NO: 1165727 - RNA, 19 nt, Homo sapiens
  misc_RNA (1)...(19): siRNA sense strand
acugacagcugcagaaaug

SEQ ID NO: 1165728 - RNA, 19 nt, Homo sapiens
  misc_RNA (1)...(19): siRNA sense strand
ucaaggacacugagaagaa

SEQ ID NO: 1165729 - RNA, 19 nt, Homo sapiens
  misc_RNA (1)...(19): siRNA sense strand
caagaggucaugaaguuug

SEQ ID NO: 1165730 - RNA, 19 nt, Homo sapiens
  misc_RNA (1)...(19): siRNA sense strand
aauaaucagugcucuacaa

SEQ ID NO: 1165731 - RNA, 19 nt, Homo sapiens
  misc_RNA (1)...(19): siRNA sense strand
cuaaccaucuggaaccaaa

SEQ ID NO: 1165732 - RNA, 19 nt, Homo sapiens
  misc_RNA (1)...(19): siRNA sense strand
caagagaaaucuguucaac

SEQ ID NO: 1165733 - RNA, 19 nt, Homo sapiens
  misc_RNA (1)...(19): siRNA sense strand
ucugucauaugcaucuuua

SEQ ID NO: 1165734 - RNA, 19 nt, Homo sapiens
  misc_RNA (1)...(19): siRNA sense strand
acacagagggcgaauauca

SEQ ID NO: 1165735 - RNA, 19 nt, Homo sapiens
  misc_RNA (1)...(19): siRNA sense strand
gauaugcuuugucgaugug

SEQ ID NO: 1165736 - RNA, 19 nt, Homo sapiens
  misc_RNA (1)...(19): siRNA sense strand
gaaccugcauaauauuacu

SEQ ID NO: 1165737 - RNA, 19 nt, Homo sapiens
  misc_RNA (1)...(19): siRNA sense strand
ccgauuugauugauucuug

SEQ ID NO: 1165738 - RNA, 19 nt, Homo sapiens
  misc_RNA (1)...(19): siRNA sense strand
ggaaaucaaggagaaguug

SEQ ID NO: 1165739 - RNA, 19 nt, Homo sapiens
  misc_RNA (1)...(19): siRNA sense strand
agagagagagcaaagaauu

SEQ ID NO: 1165740 - RNA, 19 nt, Homo sapiens
  misc_RNA (1)...(19): siRNA sense strand
gcugcucgcuaaccuguga

SEQ ID NO: 1165741 - RNA, 19 nt, Homo sapiens
  misc_RNA (1)...(19): siRNA sense strand
ccaggagcaucaagaacuu

SEQ ID NO: 1165742 - RNA, 19 nt, Homo sapiens
  misc_RNA (1)...(19): siRNA sense strand
ugucaaacaucguucuaau

SEQ ID NO: 1165743 - RNA, 19 nt, Homo sapiens
  misc_RNA (1)...(19): siRNA sense strand
caaagcaugcagcaauaaa

SEQ ID NO: 1165744 - RNA, 19 nt, Homo sapiens
  misc_RNA (1)...(19): siRNA sense strand
gugaggagaaggagacuaa

SEQ ID NO: 1165745 - RNA, 19 nt, Homo sapiens
  misc_RNA (1)...(19): siRNA sense strand
gauuguguccgauuugauu

SEQ ID NO: 1165746 - RNA, 19 nt, Homo sapiens
  misc_RNA (1)...(19): siRNA sense strand
ucaaacaagcucccucuga

SEQ ID NO: 1165747 - RNA, 19 nt, Homo sapiens
  misc_RNA (1)...(19): siRNA sense strand
uguaggaggucuucuucaa

SEQ ID NO: 1165748 - RNA, 19 nt, Homo sapiens
  misc_RNA (1)...(19): siRNA sense strand
ugaugaagcucugccuuau

SEQ ID NO: 1165749 - RNA, 19 nt, Homo sapiens
  misc_RNA (1)...(19): siRNA sense strand
aaagauacaugugaagaag

SEQ ID NO: 1165750 - RNA, 19 nt, Homo sapiens
  misc_RNA (1)...(19): siRNA sense strand
aggagaaguuggaagguaa

SEQ ID NO: 1165751 - RNA, 19 nt, Homo sapiens
  misc_RNA (1)...(19): siRNA sense strand
cgacuaucuucucugguaa

SEQ ID NO: 1165752 - RNA, 19 nt, Homo sapiens
  misc_RNA (1)...(19): siRNA sense strand
gaucaagugaacauagauu

SEQ ID NO: 1165753 - RNA, 19 nt, Homo sapiens
  misc_RNA (1)...(19): siRNA sense strand
ccagagagagagcaaagaa

SEQ ID NO: 1165754 - RNA, 19 nt, Homo sapiens
  misc_RNA (1)...(19): siRNA sense strand
ugggaaagguggccaggaa

SEQ ID NO: 1165755 - RNA, 19 nt, Homo sapiens
  misc_RNA (1)...(19): siRNA sense strand
ucaugaaguuugccaagga

SEQ ID NO: 1165756 - RNA, 19 nt, Homo sapiens
  misc_RNA (1)...(19): siRNA sense strand
gcucagaguacucaauaug

SEQ ID NO: 1165757 - RNA, 19 nt, Homo sapiens
  misc_RNA (1)...(19): siRNA sense strand
cagcaucugugguccugaa

SEQ ID NO: 1165758 - RNA, 19 nt, Homo sapiens
  misc_RNA (1)...(19): siRNA sense strand
agaaguaugccuuggguuu

SEQ ID NO: 1165759 - RNA, 19 nt, Homo sapiens
  misc_RNA (1)...(19): siRNA sense strand
ucuuggacaugaaguaauu

SEQ ID NO: 1165760 - RNA, 19 nt, Homo sapiens
  misc_RNA (1)...(19): siRNA sense strand
gcaagcgaacgggcaauuu

SEQ ID NO: 1165761 - RNA, 19 nt, Homo sapiens
  misc_RNA (1)...(19): siRNA sense strand
ugaauucuccaccaugaaa

SEQ ID NO: 1165762 - RNA, 19 nt, Homo sapiens
  misc_RNA (1)...(19): siRNA sense strand
gaucccaaaugcaggaauc

SEQ ID NO: 1165763 - RNA, 19 nt, Homo sapiens
  misc_RNA (1)...(19): siRNA sense strand
aaggagaaguuggaaggua

SEQ ID NO: 1165764 - RNA, 19 nt, Homo sapiens
  misc_RNA (1)...(19): siRNA sense strand
uggacuggcugcucgcuaa

SEQ ID NO: 1165765 - RNA, 19 nt, Homo sapiens
  misc_RNA (1)...(19): siRNA sense strand
cuacaaauagcuugcagaa

SEQ ID NO: 1165766 - RNA, 19 nt, Homo sapiens
  misc_RNA (1)...(19): siRNA sense strand
gauugucucugcccuuaag

SEQ ID NO: 1165767 - RNA, 19 nt, Homo sapiens
  misc_RNA (1)...(19): siRNA sense strand
accaaagcaugcagcaaua

SEQ ID NO: 1165768 - RNA, 19 nt, Homo sapiens
  misc_RNA (1)...(19): siRNA sense strand
cugaugauauugacugguu

SEQ ID NO: 1165769 - RNA, 19 nt, Homo sapiens
  misc_RNA (1)...(19): siRNA sense strand
gcaggaaucagagucuuga

SEQ ID NO: 1165770 - RNA, 19 nt, Homo sapiens
  misc_RNA (1)...(19): siRNA sense strand
agacacagagggcgaauau

SEQ ID NO: 1165771 - RNA, 19 nt, Homo sapiens
  misc_RNA (1)...(19): siRNA sense strand
gaagcucugccuuaucaug

SEQ ID NO: 1165772 - RNA, 19 nt, Homo sapiens
  misc_RNA (1)...(19): siRNA sense strand
cagaaacugcuuaaugaga

SEQ ID NO: 1165773 - RNA, 19 nt, Homo sapiens
  misc_RNA (1)...(19): siRNA sense strand
cugauugucucugcccuua

SEQ ID NO: 1165774 - RNA, 19 nt, Homo sapiens
  misc_RNA (1)...(19): siRNA sense strand
ggaacugacagcugcagaa

SEQ ID NO: 1165775 - RNA, 19 nt, Homo sapiens
  misc_RNA (1)...(19): siRNA sense strand
ugaaauggccuaugaagcu

SEQ ID NO: 1165776 - RNA, 19 nt, Homo sapiens
  misc_RNA (1)...(19): siRNA sense strand
gcaaaguugugaaucaaga

SEQ ID NO: 1165777 - RNA, 19 nt, Homo sapiens
  misc_RNA (1)...(19): siRNA sense strand
caaggaaucuguguuugaa

SEQ ID NO: 1165778 - RNA, 19 nt, Homo sapiens
  misc_RNA (1)...(19): siRNA sense strand
cgacuacacucucuucaau

SEQ ID NO: 1165779 - RNA, 19 nt, Homo sapiens
  misc_RNA (1)...(19): siRNA sense strand
gaggcaaaguugugaauca

SEQ ID NO: 1165780 - RNA, 19 nt, Homo sapiens
  misc_RNA (1)...(19): siRNA sense strand
uacacucucuucaaucuaa

SEQ ID NO: 1165781 - RNA, 19 nt, Homo sapiens
  misc_RNA (1)...(19): siRNA sense strand
aaacaagggcguucaagga

SEQ ID NO: 1165782 - RNA, 19 nt, Homo sapiens
  misc_RNA (1)...(19): siRNA sense strand
ggugaaggcuaucucuaca

SEQ ID NO: 1165783 - RNA, 19 nt, Homo sapiens
  misc_RNA (1)...(19): siRNA sense strand
gaaccaucgcuacaugaaa

SEQ ID NO: 1165784 - RNA, 19 nt, Homo sapiens
  misc_RNA (1)...(19): siRNA sense strand
aaaccaagcccucaucaca

SEQ ID NO: 1165785 - RNA, 19 nt, Homo sapiens
  misc_RNA (1)...(19): siRNA sense strand
gaauggaggcaaaguugug

SEQ ID NO: 1165786 - RNA, 19 nt, Homo sapiens
  misc_RNA (1)...(19): siRNA sense strand
acaagggcguucaaggaaa

SEQ ID NO: 1165787 - RNA, 19 nt, Homo sapiens
  misc_RNA (1)...(19): siRNA sense strand
caugaauggugaaggcuau

SEQ ID NO: 1165788 - RNA, 19 nt, Homo sapiens
  misc_RNA (1)...(19): siRNA sense strand
aaccaucgcuacaugaaau

SEQ ID NO: 1165789 - RNA, 19 nt, Homo sapiens
  misc_RNA (1)...(19): siRNA sense strand
agagaaccaucgcuacaug

SEQ ID NO: 1165790 - RNA, 19 nt, Homo sapiens
  misc_RNA (1)...(19): siRNA sense strand
ugaaggcuaucucuacagu

SEQ ID NO: 1165791 - RNA, 19 nt, Homo sapiens
  misc_RNA (1)...(19): siRNA sense strand
cuauugaaguguguaugua

SEQ ID NO: 1165792 - RNA, 19 nt, Homo sapiens
  misc_RNA (1)...(19): siRNA sense strand
gaaaccuauugaagugugu

SEQ ID NO: 1165793 - RNA, 19 nt, Homo sapiens
  misc_RNA (1)...(19): siRNA sense strand
acuacuaugugaucuauuc

SEQ ID NO: 1165794 - RNA, 19 nt, Homo sapiens
  misc_RNA (1)...(19): siRNA sense strand
accaagcccucaucacauu

SEQ ID NO: 1165795 - RNA, 19 nt, Homo sapiens
  misc_RNA (1)...(19): siRNA sense strand
aaggcuaucucuacaguuc

SEQ ID NO: 1165796 - RNA, 19 nt, Homo sapiens
  misc_RNA (1)...(19): siRNA sense strand
gagaaccaucgcuacauga

SEQ ID NO: 1165797 - RNA, 19 nt, Homo sapiens
  misc_RNA (1)...(19): siRNA sense strand
ucucuacaguucagauguu

SEQ ID NO: 1165798 - RNA, 19 nt, Homo sapiens
  misc_RNA (1)...(19): siRNA sense strand
gcucaaagggauugugaca

SEQ ID NO: 1165799 - RNA, 19 nt, Homo sapiens
  misc_RNA (1)...(19): siRNA sense strand
guaccgaaaccuauugaag

SEQ ID NO: 1165800 - RNA, 19 nt, Homo sapiens
  misc_RNA (1)...(19): siRNA sense strand
caagggcguucaaggaaaa

SEQ ID NO: 1165801 - RNA, 19 nt, Homo sapiens
  misc_RNA (1)...(19): siRNA sense strand
ggaacaccaaccaugaaug

SEQ ID NO: 1165802 - RNA, 19 nt, Homo sapiens
  misc_RNA (1)...(19): siRNA sense strand
cagaugcacccagauggua

SEQ ID NO: 1165803 - RNA, 19 nt, Homo sapiens
  misc_RNA (1)...(19): siRNA sense strand
acuaugugaucuauucuuc

SEQ ID NO: 1165804 - RNA, 19 nt, Homo sapiens
  misc_RNA (1)...(19): siRNA sense strand
uaugugaucuauucuucca

SEQ ID NO: 1165805 - RNA, 19 nt, Homo sapiens
  misc_RNA (1)...(19): siRNA sense strand
gcagaugcacccagauggu

SEQ ID NO: 1165806 - RNA, 19 nt, Homo sapiens
  misc_RNA (1)...(19): siRNA sense strand
accgaaaccuauugaagug

SEQ ID NO: 1165807 - RNA, 19 nt, Homo sapiens
  misc_RNA (1)...(19): siRNA sense strand
aggcaaaguugugaaucaa

SEQ ID NO: 1165808 - RNA, 19 nt, Homo sapiens
  misc_RNA (1)...(19): siRNA sense strand
cagcucaaagggauuguga

SEQ ID NO: 1165809 - RNA, 19 nt, Homo sapiens
  misc_RNA (1)...(19): siRNA sense strand
cuacaugaaauuggagaaa

SEQ ID NO: 1165810 - RNA, 19 nt, Homo sapiens
  misc_RNA (1)...(19): siRNA sense strand
uaccgaaaccuauugaagu

SEQ ID NO: 1165811 - RNA, 19 nt, Homo sapiens
  misc_RNA (1)...(19): siRNA sense strand
gcgacuacacucucuucaa

SEQ ID NO: 1165812 - RNA, 19 nt, Homo sapiens
  misc_RNA (1)...(19): siRNA sense strand
acuacacucucuucaaucu

SEQ ID NO: 1165813 - RNA, 19 nt, Homo sapiens
  misc_RNA (1)...(19): siRNA sense strand
gggacucaauaaagaaggu

SEQ ID NO: 1165814 - RNA, 19 nt, Homo sapiens
  misc_RNA (1)...(19): siRNA sense strand
guaccgccagcaagaauca

SEQ ID NO: 1165815 - RNA, 19 nt, Homo sapiens
  misc_RNA (1)...(19): siRNA sense strand
aacaagggcguucaaggaa

SEQ ID NO: 1165816 - RNA, 19 nt, Homo sapiens
  misc_RNA (1)...(19): siRNA sense strand
gaaggcuaucucuacaguu

SEQ ID NO: 1165817 - RNA, 19 nt, Homo sapiens
  misc_RNA (1)...(19): siRNA sense strand
caugaauggaggcaaaguu

SEQ ID NO: 1165818 - RNA, 19 nt, Homo sapiens
  misc_RNA (1)...(19): siRNA sense strand
gggaacagagugaagaaaa

SEQ ID NO: 1165819 - RNA, 19 nt, Homo sapiens
  misc_RNA (1)...(19): siRNA sense strand
ggaacagagugaagaaaac

SEQ ID NO: 1165820 - RNA, 19 nt, Homo sapiens
  misc_RNA (1)...(19): siRNA sense strand
gccucuauguggccaugaa

SEQ ID NO: 1165821 - RNA, 19 nt, Homo sapiens
  misc_RNA (1)...(19): siRNA sense strand
ucuggaacaccaaccauga

SEQ ID NO: 1165822 - RNA, 19 nt, Homo sapiens
  misc_RNA (1)...(19): siRNA sense strand
ccaagcccucaucacauuu

SEQ ID NO: 1165823 - RNA, 19 nt, Homo sapiens
  misc_RNA (1)...(19): siRNA sense strand
gaugggaccaaggacgaaa

SEQ ID NO: 1165824 - RNA, 19 nt, Homo sapiens
  misc_RNA (1)...(19): siRNA sense strand
caaaguugugaaucaagau

SEQ ID NO: 1165825 - RNA, 19 nt, Homo sapiens
  misc_RNA (1)...(19): siRNA sense strand
agaaccaucgcuacaugaa

SEQ ID NO: 1165826 - RNA, 19 nt, Homo sapiens
  misc_RNA (1)...(19): siRNA sense strand
acagagaaccaucgcuaca

SEQ ID NO: 1165827 - RNA, 19 nt, Homo sapiens
  misc_RNA (1)...(19): siRNA sense strand
ccuauugaaguguguaugu

SEQ ID NO: 1165828 - RNA, 19 nt, Homo sapiens
  misc_RNA (1)...(19): siRNA sense strand
uguaguggccauccaagga

SEQ ID NO: 1165829 - RNA, 19 nt, Homo sapiens
  misc_RNA (1)...(19): siRNA sense strand
gcaaaguugugaaucaaga

SEQ ID NO: 1165830 - RNA, 19 nt, Homo sapiens
  misc_RNA (1)...(19): siRNA sense strand
caaggaaucuguguuugaa

SEQ ID NO: 1165831 - RNA, 19 nt, Homo sapiens
  misc_RNA (1)...(19): siRNA sense strand
cgacuacacucucuucaau

SEQ ID NO: 1165832 - RNA, 19 nt, Homo sapiens
  misc_RNA (1)...(19): siRNA sense strand
gaggcaaaguugugaauca

SEQ ID NO: 1165833 - RNA, 19 nt, Homo sapiens
  misc_RNA (1)...(19): siRNA sense strand
uacacucucuucaaucuaa

SEQ ID NO: 1165834 - RNA, 19 nt, Homo sapiens
  misc_RNA (1)...(19): siRNA sense strand
aaacaagggcguucaagga

SEQ ID NO: 1165835 - RNA, 19 nt, Homo sapiens
  misc_RNA (1)...(19): siRNA sense strand
ggugaaggcuaucucuaca

SEQ ID NO: 1165836 - RNA, 19 nt, Homo sapiens
  misc_RNA (1)...(19): siRNA sense strand
gaaccaucgcuacaugaaa

SEQ ID NO: 1165837 - RNA, 19 nt, Homo sapiens
  misc_RNA (1)...(19): siRNA sense strand
aaaccaagcccucaucaca

SEQ ID NO: 1165838 - RNA, 19 nt, Homo sapiens
  misc_RNA (1)...(19): siRNA sense strand
gaauggaggcaaaguugug

SEQ ID NO: 1165839 - RNA, 19 nt, Homo sapiens
  misc_RNA (1)...(19): siRNA sense strand
acaagggcguucaaggaaa

SEQ ID NO: 1165840 - RNA, 19 nt, Homo sapiens
  misc_RNA (1)...(19): siRNA sense strand
caugaauggugaaggcuau

SEQ ID NO: 1165841 - RNA, 19 nt, Homo sapiens
  misc_RNA (1)...(19): siRNA sense strand
aaccaucgcuacaugaaau

SEQ ID NO: 1165842 - RNA, 19 nt, Homo sapiens
  misc_RNA (1)...(19): siRNA sense strand
agagaaccaucgcuacaug

SEQ ID NO: 1165843 - RNA, 19 nt, Homo sapiens
  misc_RNA (1)...(19): siRNA sense strand
ugaaggcuaucucuacagu

SEQ ID NO: 1165844 - RNA, 19 nt, Homo sapiens
  misc_RNA (1)...(19): siRNA sense strand
cuauugaaguguguaugua

SEQ ID NO: 1165845 - RNA, 19 nt, Homo sapiens
  misc_RNA (1)...(19): siRNA sense strand
gaaaccuauugaagugugu

SEQ ID NO: 1165846 - RNA, 19 nt, Homo sapiens
  misc_RNA (1)...(19): siRNA sense strand
acuacuaugugaucuauuc

SEQ ID NO: 1165847 - RNA, 19 nt, Homo sapiens
  misc_RNA (1)...(19): siRNA sense strand
accaagcccucaucacauu

SEQ ID NO: 1165848 - RNA, 19 nt, Homo sapiens
  misc_RNA (1)...(19): siRNA sense strand
aaggcuaucucuacaguuc

SEQ ID NO: 1165849 - RNA, 19 nt, Homo sapiens
  misc_RNA (1)...(19): siRNA sense strand
gagaaccaucgcuacauga

SEQ ID NO: 1165850 - RNA, 19 nt, Homo sapiens
  misc_RNA (1)...(19): siRNA sense strand
ucucuacaguucagauguu

SEQ ID NO: 1165851 - RNA, 19 nt, Homo sapiens
  misc_RNA (1)...(19): siRNA sense strand
gcucaaagggauugugaca

SEQ ID NO: 1165852 - RNA, 19 nt, Homo sapiens
  misc_RNA (1)...(19): siRNA sense strand
guaccgaaaccuauugaag

SEQ ID NO: 1165853 - RNA, 19 nt, Homo sapiens
  misc_RNA (1)...(19): siRNA sense strand
caagggcguucaaggaaaa

SEQ ID NO: 1165854 - RNA, 19 nt, Homo sapiens
  misc_RNA (1)...(19): siRNA sense strand
ggaacaccaaccaugaaug

SEQ ID NO: 1165855 - RNA, 19 nt, Homo sapiens
  misc_RNA (1)...(19): siRNA sense strand
cagaugcacccagauggua

SEQ ID NO: 1165856 - RNA, 19 nt, Homo sapiens
  misc_RNA (1)...(19): siRNA sense strand
acuaugugaucuauucuuc

SEQ ID NO: 1165857 - RNA, 19 nt, Homo sapiens
  misc_RNA (1)...(19): siRNA sense strand
uaugugaucuauucuucca

SEQ ID NO: 1165858 - RNA, 19 nt, Homo sapiens
  misc_RNA (1)...(19): siRNA sense strand
gcagaugcacccagauggu

SEQ ID NO: 1165859 - RNA, 19 nt, Homo sapiens
  misc_RNA (1)...(19): siRNA sense strand
accgaaaccuauugaagug

SEQ ID NO: 1165860 - RNA, 19 nt, Homo sapiens
  misc_RNA (1)...(19): siRNA sense strand
aggcaaaguugugaaucaa

SEQ ID NO: 1165861 - RNA, 19 nt, Homo sapiens
  misc_RNA (1)...(19): siRNA sense strand
cagcucaaagggauuguga

SEQ ID NO: 1165862 - RNA, 19 nt, Homo sapiens
  misc_RNA (1)...(19): siRNA sense strand
cuacaugaaauuggagaaa

SEQ ID NO: 1165863 - RNA, 19 nt, Homo sapiens
  misc_RNA (1)...(19): siRNA sense strand
uaccgaaaccuauugaagu

SEQ ID NO: 1165864 - RNA, 19 nt, Homo sapiens
  misc_RNA (1)...(19): siRNA sense strand
gcgacuacacucucuucaa

SEQ ID NO: 1165865 - RNA, 19 nt, Homo sapiens
  misc_RNA (1)...(19): siRNA sense strand
acuacacucucuucaaucu

SEQ ID NO: 1165866 - RNA, 19 nt, Homo sapiens
  misc_RNA (1)...(19): siRNA sense strand
gggacucaauaaagaaggu

SEQ ID NO: 1165867 - RNA, 19 nt, Homo sapiens
  misc_RNA (1)...(19): siRNA sense strand
guaccgccagcaagaauca

SEQ ID NO: 1165868 - RNA, 19 nt, Homo sapiens
  misc_RNA (1)...(19): siRNA sense strand
aacaagggcguucaaggaa

SEQ ID NO: 1165869 - RNA, 19 nt, Homo sapiens
  misc_RNA (1)...(19): siRNA sense strand
gaaggcuaucucuacaguu

SEQ ID NO: 1165870 - RNA, 19 nt, Homo sapiens
  misc_RNA (1)...(19): siRNA sense strand
caugaauggaggcaaaguu

SEQ ID NO: 1165871 - RNA, 19 nt, Homo sapiens
  misc_RNA (1)...(19): siRNA sense strand
gggaacagagugaagaaaa

SEQ ID NO: 1165872 - RNA, 19 nt, Homo sapiens
  misc_RNA (1)...(19): siRNA sense strand
ggaacagagugaagaaaac

SEQ ID NO: 1165873 - RNA, 19 nt, Homo sapiens
  misc_RNA (1)...(19): siRNA sense strand
gccucuauguggccaugaa

SEQ ID NO: 1165874 - RNA, 19 nt, Homo sapiens
  misc_RNA (1)...(19): siRNA sense strand
ucuggaacaccaaccauga

SEQ ID NO: 1165875 - RNA, 19 nt, Homo sapiens
  misc_RNA (1)...(19): siRNA sense strand
ccaagcccucaucacauuu

SEQ ID NO: 1165876 - RNA, 19 nt, Homo sapiens
  misc_RNA (1)...(19): siRNA sense strand
gaugggaccaaggacgaaa

SEQ ID NO: 1165877 - RNA, 19 nt, Homo sapiens
  misc_RNA (1)...(19): siRNA sense strand
caaaguugugaaucaagau

SEQ ID NO: 1165878 - RNA, 19 nt, Homo sapiens
  misc_RNA (1)...(19): siRNA sense strand
agaaccaucgcuacaugaa

SEQ ID NO: 1165879 - RNA, 19 nt, Homo sapiens
  misc_RNA (1)...(19): siRNA sense strand
acagagaaccaucgcuaca

SEQ ID NO: 1165880 - RNA, 19 nt, Homo sapiens
  misc_RNA (1)...(19): siRNA sense strand
ccuauugaaguguguaugu

SEQ ID NO: 1165881 - RNA, 19 nt, Homo sapiens
  misc_RNA (1)...(19): siRNA sense strand
uguaguggccauccaagga

SEQ ID NO: 1165882 - RNA, 19 nt, Homo sapiens
  misc_RNA (1)...(19): siRNA sense strand
ccagaaagcugacagaugu

SEQ ID NO: 1165883 - RNA, 19 nt, Homo sapiens
  misc_RNA (1)...(19): siRNA sense strand
gagaagauauaaccggauu

SEQ ID NO: 1165884 - RNA, 19 nt, Homo sapiens
  misc_RNA (1)...(19): siRNA sense strand
caaagaggcuggaaggaau

SEQ ID NO: 1165885 - RNA, 19 nt, Homo sapiens
  misc_RNA (1)...(19): siRNA sense strand
gaaccagccuccucucuca

SEQ ID NO: 1165886 - RNA, 19 nt, Homo sapiens
  misc_RNA (1)...(19): siRNA sense strand
gaagauggaagucuagauu

SEQ ID NO: 1165887 - RNA, 19 nt, Homo sapiens
  misc_RNA (1)...(19): siRNA sense strand
ggaaaucccuccggugaau

SEQ ID NO: 1165888 - RNA, 19 nt, Homo sapiens
  misc_RNA (1)...(19): siRNA sense strand
gaagagaaaccauuuagag

SEQ ID NO: 1165889 - RNA, 19 nt, Homo sapiens
  misc_RNA (1)...(19): siRNA sense strand
gcuaagaauugaguuaaug

SEQ ID NO: 1165890 - RNA, 19 nt, Homo sapiens
  misc_RNA (1)...(19): siRNA sense strand
gauggcaacugucgugaga

SEQ ID NO: 1165891 - RNA, 19 nt, Homo sapiens
  misc_RNA (1)...(19): siRNA sense strand
acagacaaaugaaaucuug

SEQ ID NO: 1165892 - RNA, 19 nt, Homo sapiens
  misc_RNA (1)...(19): siRNA sense strand
gagaaaccauuuagagacu

SEQ ID NO: 1165893 - RNA, 19 nt, Homo sapiens
  misc_RNA (1)...(19): siRNA sense strand
aaucaaacuucucgacuug

SEQ ID NO: 1165894 - RNA, 19 nt, Homo sapiens
  misc_RNA (1)...(19): siRNA sense strand
gaagggaaccgagccuauu

SEQ ID NO: 1165895 - RNA, 19 nt, Homo sapiens
  misc_RNA (1)...(19): siRNA sense strand
gauauaaccggauucaaca

SEQ ID NO: 1165896 - RNA, 19 nt, Homo sapiens
  misc_RNA (1)...(19): siRNA sense strand
gaaaccauuuagagacugu

SEQ ID NO: 1165897 - RNA, 19 nt, Homo sapiens
  misc_RNA (1)...(19): siRNA sense strand
ggaagaguuggacaccuua

SEQ ID NO: 1165898 - RNA, 19 nt, Homo sapiens
  misc_RNA (1)...(19): siRNA sense strand
gcaaugugccuacacuuuc

SEQ ID NO: 1165899 - RNA, 19 nt, Homo sapiens
  misc_RNA (1)...(19): siRNA sense strand
gaggaagagaaaccauuua

SEQ ID NO: 1165900 - RNA, 19 nt, Homo sapiens
  misc_RNA (1)...(19): siRNA sense strand
ggcaguacaugcuaagaau

SEQ ID NO: 1165901 - RNA, 19 nt, Homo sapiens
  misc_RNA (1)...(19): siRNA sense strand
uagagacugugcagaugua

SEQ ID NO: 1165902 - RNA, 19 nt, Homo sapiens
  misc_RNA (1)...(19): siRNA sense strand
gaagauauaaccggauuca

SEQ ID NO: 1165903 - RNA, 19 nt, Homo sapiens
  misc_RNA (1)...(19): siRNA sense strand
uaaaggaagagaaagagaa

SEQ ID NO: 1165904 - RNA, 19 nt, Homo sapiens
  misc_RNA (1)...(19): siRNA sense strand
ggaagagaaaccauuuaga

SEQ ID NO: 1165905 - RNA, 19 nt, Homo sapiens
  misc_RNA (1)...(19): siRNA sense strand
caaugugccuacacuuuca

SEQ ID NO: 1165906 - RNA, 19 nt, Homo sapiens
  misc_RNA (1)...(19): siRNA sense strand
ccaaagaggcuggaaggaa

SEQ ID NO: 1165907 - RNA, 19 nt, Homo sapiens
  misc_RNA (1)...(19): siRNA sense strand
caacaacaguguccuucag

SEQ ID NO: 1165908 - RNA, 19 nt, Homo sapiens
  misc_RNA (1)...(19): siRNA sense strand
gaggcuggaaggaauauaa

SEQ ID NO: 1165909 - RNA, 19 nt, Homo sapiens
  misc_RNA (1)...(19): siRNA sense strand
aaaucaaacuucucgacuu

SEQ ID NO: 1165910 - RNA, 19 nt, Homo sapiens
  misc_RNA (1)...(19): siRNA sense strand
gagaggaagagaaaccauu

SEQ ID NO: 1165911 - RNA, 19 nt, Homo sapiens
  misc_RNA (1)...(19): siRNA sense strand
gaaaucccuccggugaaua

SEQ ID NO: 1165912 - RNA, 19 nt, Homo sapiens
  misc_RNA (1)...(19): siRNA sense strand
cagaggcaguacaugcuaa

SEQ ID NO: 1165913 - RNA, 19 nt, Homo sapiens
  misc_RNA (1)...(19): siRNA sense strand
gguacuaaaucaaacuucu

SEQ ID NO: 1165914 - RNA, 19 nt, Homo sapiens
  misc_RNA (1)...(19): siRNA sense strand
ugacagauuccacauagga

SEQ ID NO: 1165915 - RNA, 19 nt, Homo sapiens
  misc_RNA (1)...(19): siRNA sense strand
ggaagggaaccgagccuau

SEQ ID NO: 1165916 - RNA, 19 nt, Homo sapiens
  misc_RNA (1)...(19): siRNA sense strand
gaaagcugacagauguuga

SEQ ID NO: 1165917 - RNA, 19 nt, Homo sapiens
  misc_RNA (1)...(19): siRNA sense strand
ucuuagaaauggaaggaaa

SEQ ID NO: 1165918 - RNA, 19 nt, Homo sapiens
  misc_RNA (1)...(19): siRNA sense strand
cccagaaacuucaacaucu

SEQ ID NO: 1165919 - RNA, 19 nt, Homo sapiens
  misc_RNA (1)...(19): siRNA sense strand
gagccuauucacaguauga

SEQ ID NO: 1165920 - RNA, 19 nt, Homo sapiens
  misc_RNA (1)...(19): siRNA sense strand
aagucuagauuuccaaaga

SEQ ID NO: 1165921 - RNA, 19 nt, Homo sapiens
  misc_RNA (1)...(19): siRNA sense strand
agauggaagucuagauuuc

SEQ ID NO: 1165922 - RNA, 19 nt, Homo sapiens
  misc_RNA (1)...(19): siRNA sense strand
gcaauauggaugucaaugg

SEQ ID NO: 1165923 - RNA, 19 nt, Homo sapiens
  misc_RNA (1)...(19): siRNA sense strand
gaagaguuggacaccuuaa

SEQ ID NO: 1165924 - RNA, 19 nt, Homo sapiens
  misc_RNA (1)...(19): siRNA sense strand
ccuacaagcuagagaagca

SEQ ID NO: 1165925 - RNA, 19 nt, Homo sapiens
  misc_RNA (1)...(19): siRNA sense strand
agacccagguacuaaauca

SEQ ID NO: 1165926 - RNA, 19 nt, Homo sapiens
  misc_RNA (1)...(19): siRNA sense strand
agaacacgauggcaacugu

SEQ ID NO: 1165927 - RNA, 19 nt, Homo sapiens
  misc_RNA (1)...(19): siRNA sense strand
gcaguacaugcuaagaauu

SEQ ID NO: 1165928 - RNA, 19 nt, Homo sapiens
  misc_RNA (1)...(19): siRNA sense strand
ucacauagggugcagcaau

SEQ ID NO: 1165929 - RNA, 19 nt, Homo sapiens
  misc_RNA (1)...(19): siRNA sense strand
agacugugcagauguauau

SEQ ID NO: 1165930 - RNA, 19 nt, Homo sapiens
  misc_RNA (1)...(19): siRNA sense strand
aauacaacaucgugaagau

SEQ ID NO: 1165931 - RNA, 19 nt, Homo sapiens
  misc_RNA (1)...(19): siRNA sense strand
agaauucauuauccaccua

SEQ ID NO: 1165932 - RNA, 19 nt, Homo sapiens
  misc_RNA (1)...(19): siRNA sense strand
uaauaugccagaacccaaa

SEQ ID NO: 1165933 - RNA, 19 nt, Homo sapiens
  misc_RNA (1)...(19): siRNA sense strand
acaacaguguccuucagaa

SEQ ID NO: 1165934 - RNA, 19 nt, Homo sapiens
  misc_RNA (1)...(19): siRNA sense strand
gaaacuucaacaucuggaa

SEQ ID NO: 1165935 - RNA, 19 nt, Homo sapiens
  misc_RNA (1)...(19): siRNA sense strand
caguacaugcuaagaauug

SEQ ID NO: 1165936 - RNA, 19 nt, Homo sapiens
  misc_RNA (1)...(19): siRNA sense strand
agaggaagagaaaccauuu

SEQ ID NO: 1165937 - RNA, 19 nt, Homo sapiens
  misc_RNA (1)...(19): siRNA sense strand
cgucaaacauauauaaucc

SEQ ID NO: 1165938 - RNA, 19 nt, Homo sapiens
  misc_RNA (1)...(19): siRNA sense strand
aggaagaguuggacaccuu

SEQ ID NO: 1165939 - RNA, 19 nt, Homo sapiens
  misc_RNA (1)...(19): siRNA sense strand
gagaauuacauuguggaaa

SEQ ID NO: 1165940 - RNA, 19 nt, Homo sapiens
  misc_RNA (1)...(19): siRNA sense strand
gaacaugugauggaaaauu

SEQ ID NO: 1165941 - RNA, 19 nt, Homo sapiens
  misc_RNA (1)...(19): siRNA sense strand
ggagauggcccagauacag

SEQ ID NO: 1165942 - RNA, 19 nt, Homo sapiens
  misc_RNA (1)...(19): siRNA sense strand
aaagaggcuggaaggaaua

SEQ ID NO: 1165943 - RNA, 19 nt, Homo sapiens
  misc_RNA (1)...(19): siRNA sense strand
cacauagggugcagcaauc

SEQ ID NO: 1165944 - RNA, 19 nt, Homo sapiens
  misc_RNA (1)...(19): siRNA sense strand
gagacugugcagauguaua

SEQ ID NO: 1165945 - RNA, 19 nt, Homo sapiens
  misc_RNA (1)...(19): siRNA sense strand
aagagaaaccauuuagaga

SEQ ID NO: 1165946 - RNA, 19 nt, Homo sapiens
  misc_RNA (1)...(19): siRNA sense strand
gaaaacacaaggaagaguu

SEQ ID NO: 1165947 - RNA, 19 nt, Homo sapiens
  misc_RNA (1)...(19): siRNA sense strand
gcaacuucuucaacagaca

SEQ ID NO: 1165948 - RNA, 19 nt, Homo sapiens
  misc_RNA (1)...(19): siRNA sense strand
guugagacccagguacuaa

SEQ ID NO: 1165949 - RNA, 19 nt, Homo sapiens
  misc_RNA (1)...(19): siRNA sense strand
gcugcuggagaauucauua

SEQ ID NO: 1165950 - RNA, 19 nt, Homo sapiens
  misc_RNA (1)...(19): siRNA sense strand
uauacucaguggcugcaaa

SEQ ID NO: 1165951 - RNA, 19 nt, Homo sapiens
  misc_RNA (1)...(19): siRNA sense strand
caugcuaagaauugaguua

SEQ ID NO: 1165952 - RNA, 19 nt, Homo sapiens
  misc_RNA (1)...(19): siRNA sense strand
caacagacaaaugaaaucu

SEQ ID NO: 1165953 - RNA, 19 nt, Homo sapiens
  misc_RNA (1)...(19): siRNA sense strand
gcaacugucgugagaguac

SEQ ID NO: 1165954 - RNA, 19 nt, Homo sapiens
  misc_RNA (1)...(19): siRNA sense strand
ucgugaagauggaagucua

SEQ ID NO: 1165955 - RNA, 19 nt, Homo sapiens
  misc_RNA (1)...(19): siRNA sense strand
ggaaaagcaauuaaacaga

SEQ ID NO: 1165956 - RNA, 19 nt, Homo sapiens
  misc_RNA (1)...(19): siRNA sense strand
ccgagccuauucacaguau

SEQ ID NO: 1165957 - RNA, 19 nt, Homo sapiens
  misc_RNA (1)...(19): siRNA sense strand
gguuacucgucaaacauau

SEQ ID NO: 1165958 - RNA, 19 nt, Homo sapiens
  misc_RNA (1)...(19): siRNA sense strand
ugccuacacuuucauucuu

SEQ ID NO: 1165959 - RNA, 19 nt, Homo sapiens
  misc_RNA (1)...(19): siRNA sense strand
cgacagaccaguacaacac

SEQ ID NO: 1165960 - RNA, 19 nt, Homo sapiens
  misc_RNA (1)...(19): siRNA sense strand
gcccagauacagcagaaug

SEQ ID NO: 1165961 - RNA, 19 nt, Homo sapiens
  misc_RNA (1)...(19): siRNA sense strand
cauaggaaaugaaaagcaa

SEQ ID NO: 1165962 - RNA, 19 nt, Homo sapiens
  misc_RNA (1)...(19): siRNA sense strand
gaaaacagugggagaagau

SEQ ID NO: 1165963 - RNA, 19 nt, Homo sapiens
  misc_RNA (1)...(19): siRNA sense strand
ccaccuacaagcuagagaa

SEQ ID NO: 1165964 - RNA, 19 nt, Homo sapiens
  misc_RNA (1)...(19): siRNA sense strand
gcuggagaauucauuaucc

SEQ ID NO: 1165965 - RNA, 19 nt, Homo sapiens
  misc_RNA (1)...(19): siRNA sense strand
agucggagauggcccagau

SEQ ID NO: 1165966 - RNA, 19 nt, Homo sapiens
  misc_RNA (1)...(19): siRNA sense strand
aagauggaagucuagauuu

SEQ ID NO: 1165967 - RNA, 19 nt, Homo sapiens
  misc_RNA (1)...(19): siRNA sense strand
guuacucgucaaacauaua

SEQ ID NO: 1165968 - RNA, 19 nt, Homo sapiens
  misc_RNA (1)...(19): siRNA sense strand
aaacagugggagaagauau

SEQ ID NO: 1165969 - RNA, 19 nt, Homo sapiens
  misc_RNA (1)...(19): siRNA sense strand
ggaaggaaaacacaaggaa

SEQ ID NO: 1165970 - RNA, 19 nt, Homo sapiens
  misc_RNA (1)...(19): siRNA sense strand
guaauacaacaucgugaag

SEQ ID NO: 1165971 - RNA, 19 nt, Homo sapiens
  misc_RNA (1)...(19): siRNA sense strand
gggagguuggacuguaaua

SEQ ID NO: 1165972 - RNA, 19 nt, Homo sapiens
  misc_RNA (1)...(19): siRNA sense strand
gccuacacuuucauucuuc

SEQ ID NO: 1165973 - RNA, 19 nt, Homo sapiens
  misc_RNA (1)...(19): siRNA sense strand
ugucaaucuuugcacuaaa

SEQ ID NO: 1165974 - RNA, 19 nt, Homo sapiens
  misc_RNA (1)...(19): siRNA sense strand
ucgcugccauucugacuca

SEQ ID NO: 1165975 - RNA, 19 nt, Homo sapiens
  misc_RNA (1)...(19): siRNA sense strand
aacagugggagaagauaua

SEQ ID NO: 1165976 - RNA, 19 nt, Homo sapiens
  misc_RNA (1)...(19): siRNA sense strand
uggcaacugucgugagagu

SEQ ID NO: 1165977 - RNA, 19 nt, Homo sapiens
  misc_RNA (1)...(19): siRNA sense strand
ucagaggcaguacaugcua

SEQ ID NO: 1165978 - RNA, 19 nt, Homo sapiens
  misc_RNA (1)...(19): siRNA sense strand
aauauuggcuggggaauga

SEQ ID NO: 1165979 - RNA, 19 nt, Homo sapiens
  misc_RNA (1)...(19): siRNA sense strand
agaguacgacagaccagua

SEQ ID NO: 1165980 - RNA, 19 nt, Homo sapiens
  misc_RNA (1)...(19): siRNA sense strand
uaauacaacaucgugaaga

SEQ ID NO: 1165981 - RNA, 19 nt, Homo sapiens
  misc_RNA (1)...(19): siRNA sense strand
caacuucuucaacagacaa

SEQ ID NO: 1165982 - RNA, 19 nt, Homo sapiens
  misc_RNA (1)...(19): siRNA sense strand
ccagaaagcugacagaugu

SEQ ID NO: 1165983 - RNA, 19 nt, Homo sapiens
  misc_RNA (1)...(19): siRNA sense strand
gagaagauauaaccggauu

SEQ ID NO: 1165984 - RNA, 19 nt, Homo sapiens
  misc_RNA (1)...(19): siRNA sense strand
caaagaggcuggaaggaau

SEQ ID NO: 1165985 - RNA, 19 nt, Homo sapiens
  misc_RNA (1)...(19): siRNA sense strand
gaaccagccuccucucuca

SEQ ID NO: 1165986 - RNA, 19 nt, Homo sapiens
  misc_RNA (1)...(19): siRNA sense strand
gaagauggaagucuagauu

SEQ ID NO: 1165987 - RNA, 19 nt, Homo sapiens
  misc_RNA (1)...(19): siRNA sense strand
ggaaaucccuccggugaau

SEQ ID NO: 1165988 - RNA, 19 nt, Homo sapiens
  misc_RNA (1)...(19): siRNA sense strand
gaagagaaaccauuuagag

SEQ ID NO: 1165989 - RNA, 19 nt, Homo sapiens
  misc_RNA (1)...(19): siRNA sense strand
gcuaagaauugaguuaaug

SEQ ID NO: 1165990 - RNA, 19 nt, Homo sapiens
  misc_RNA (1)...(19): siRNA sense strand
gauggcaacugucgugaga

SEQ ID NO: 1165991 - RNA, 19 nt, Homo sapiens
  misc_RNA (1)...(19): siRNA sense strand
acagacaaaugaaaucuug

SEQ ID NO: 1165992 - RNA, 19 nt, Homo sapiens
  misc_RNA (1)...(19): siRNA sense strand
gagaaaccauuuagagacu

SEQ ID NO: 1165993 - RNA, 19 nt, Homo sapiens
  misc_RNA (1)...(19): siRNA sense strand
aaucaaacuucucgacuug

SEQ ID NO: 1165994 - RNA, 19 nt, Homo sapiens
  misc_RNA (1)...(19): siRNA sense strand
gaagggaaccgagccuauu

SEQ ID NO: 1165995 - RNA, 19 nt, Homo sapiens
  misc_RNA (1)...(19): siRNA sense strand
gauauaaccggauucaaca

SEQ ID NO: 1165996 - RNA, 19 nt, Homo sapiens
  misc_RNA (1)...(19): siRNA sense strand
gaaaccauuuagagacugu

SEQ ID NO: 1165997 - RNA, 19 nt, Homo sapiens
  misc_RNA (1)...(19): siRNA sense strand
ggaagaguuggacaccuua

SEQ ID NO: 1165998 - RNA, 19 nt, Homo sapiens
  misc_RNA (1)...(19): siRNA sense strand
gcaaugugccuacacuuuc

SEQ ID NO: 1165999 - RNA, 19 nt, Homo sapiens
  misc_RNA (1)...(19): siRNA sense strand
gaggaagagaaaccauuua

SEQ ID NO: 1166000 - RNA, 19 nt, Homo sapiens
  misc_RNA (1)...(19): siRNA sense strand
ggcaguacaugcuaagaau

SEQ ID NO: 1166001 - RNA, 19 nt, Homo sapiens
  misc_RNA (1)...(19): siRNA sense strand
uagagacugugcagaugua

SEQ ID NO: 1166002 - RNA, 19 nt, Homo sapiens
  misc_RNA (1)...(19): siRNA sense strand
gaagauauaaccggauuca

SEQ ID NO: 1166003 - RNA, 19 nt, Homo sapiens
  misc_RNA (1)...(19): siRNA sense strand
uaaaggaagagaaagagaa

SEQ ID NO: 1166004 - RNA, 19 nt, Homo sapiens
  misc_RNA (1)...(19): siRNA sense strand
ggaagagaaaccauuuaga

SEQ ID NO: 1166005 - RNA, 19 nt, Homo sapiens
  misc_RNA (1)...(19): siRNA sense strand
caaugugccuacacuuuca

SEQ ID NO: 1166006 - RNA, 19 nt, Homo sapiens
  misc_RNA (1)...(19): siRNA sense strand
ccaaagaggcuggaaggaa

SEQ ID NO: 1166007 - RNA, 19 nt, Homo sapiens
  misc_RNA (1)...(19): siRNA sense strand
caacaacaguguccuucag

SEQ ID NO: 1166008 - RNA, 19 nt, Homo sapiens
  misc_RNA (1)...(19): siRNA sense strand
gaggcuggaaggaauauaa

SEQ ID NO: 1166009 - RNA, 19 nt, Homo sapiens
  misc_RNA (1)...(19): siRNA sense strand
aaaucaaacuucucgacuu

SEQ ID NO: 1166010 - RNA, 19 nt, Homo sapiens
  misc_RNA (1)...(19): siRNA sense strand
gagaggaagagaaaccauu

SEQ ID NO: 1166011 - RNA, 19 nt, Homo sapiens
  misc_RNA (1)...(19): siRNA sense strand
gaaaucccuccggugaaua

SEQ ID NO: 1166012 - RNA, 19 nt, Homo sapiens
  misc_RNA (1)...(19): siRNA sense strand
cagaggcaguacaugcuaa

SEQ ID NO: 1166013 - RNA, 19 nt, Homo sapiens
  misc_RNA (1)...(19): siRNA sense strand
gguacuaaaucaaacuucu

SEQ ID NO: 1166014 - RNA, 19 nt, Homo sapiens
  misc_RNA (1)...(19): siRNA sense strand
ugacagauuccacauagga

SEQ ID NO: 1166015 - RNA, 19 nt, Homo sapiens
  misc_RNA (1)...(19): siRNA sense strand
ggaagggaaccgagccuau

SEQ ID NO: 1166016 - RNA, 19 nt, Homo sapiens
  misc_RNA (1)...(19): siRNA sense strand
gaaagcugacagauguuga

SEQ ID NO: 1166017 - RNA, 19 nt, Homo sapiens
  misc_RNA (1)...(19): siRNA sense strand
ucuuagaaauggaaggaaa

SEQ ID NO: 1166018 - RNA, 19 nt, Homo sapiens
  misc_RNA (1)...(19): siRNA sense strand
cccagaaacuucaacaucu

SEQ ID NO: 1166019 - RNA, 19 nt, Homo sapiens
  misc_RNA (1)...(19): siRNA sense strand
gagccuauucacaguauga

SEQ ID NO: 1166020 - RNA, 19 nt, Homo sapiens
  misc_RNA (1)...(19): siRNA sense strand
aagucuagauuuccaaaga

SEQ ID NO: 1166021 - RNA, 19 nt, Homo sapiens
  misc_RNA (1)...(19): siRNA sense strand
agauggaagucuagauuuc

SEQ ID NO: 1166022 - RNA, 19 nt, Homo sapiens
  misc_RNA (1)...(19): siRNA sense strand
gcaauauggaugucaaugg

SEQ ID NO: 1166023 - RNA, 19 nt, Homo sapiens
  misc_RNA (1)...(19): siRNA sense strand
gaagaguuggacaccuuaa

SEQ ID NO: 1166024 - RNA, 19 nt, Homo sapiens
  misc_RNA (1)...(19): siRNA sense strand
ccuacaagcuagagaagca

SEQ ID NO: 1166025 - RNA, 19 nt, Homo sapiens
  misc_RNA (1)...(19): siRNA sense strand
agacccagguacuaaauca

SEQ ID NO: 1166026 - RNA, 19 nt, Homo sapiens
  misc_RNA (1)...(19): siRNA sense strand
agaacacgauggcaacugu

SEQ ID NO: 1166027 - RNA, 19 nt, Homo sapiens
  misc_RNA (1)...(19): siRNA sense strand
gcaguacaugcuaagaauu

SEQ ID NO: 1166028 - RNA, 19 nt, Homo sapiens
  misc_RNA (1)...(19): siRNA sense strand
ucacauagggugcagcaau

SEQ ID NO: 1166029 - RNA, 19 nt, Homo sapiens
  misc_RNA (1)...(19): siRNA sense strand
agacugugcagauguauau

SEQ ID NO: 1166030 - RNA, 19 nt, Homo sapiens
  misc_RNA (1)...(19): siRNA sense strand
aauacaacaucgugaagau

SEQ ID NO: 1166031 - RNA, 19 nt, Homo sapiens
  misc_RNA (1)...(19): siRNA sense strand
agaauucauuauccaccua

SEQ ID NO: 1166032 - RNA, 19 nt, Homo sapiens
  misc_RNA (1)...(19): siRNA sense strand
uaauaugccagaacccaaa

SEQ ID NO: 1166033 - RNA, 19 nt, Homo sapiens
  misc_RNA (1)...(19): siRNA sense strand
acaacaguguccuucagaa

SEQ ID NO: 1166034 - RNA, 19 nt, Homo sapiens
  misc_RNA (1)...(19): siRNA sense strand
gaaacuucaacaucuggaa

SEQ ID NO: 1166035 - RNA, 19 nt, Homo sapiens
  misc_RNA (1)...(19): siRNA sense strand
caguacaugcuaagaauug

SEQ ID NO: 1166036 - RNA, 19 nt, Homo sapiens
  misc_RNA (1)...(19): siRNA sense strand
agaggaagagaaaccauuu

SEQ ID NO: 1166037 - RNA, 19 nt, Homo sapiens
  misc_RNA (1)...(19): siRNA sense strand
cgucaaacauauauaaucc

SEQ ID NO: 1166038 - RNA, 19 nt, Homo sapiens
  misc_RNA (1)...(19): siRNA sense strand
aggaagaguuggacaccuu

SEQ ID NO: 1166039 - RNA, 19 nt, Homo sapiens
  misc_RNA (1)...(19): siRNA sense strand
gagaauuacauuguggaaa

SEQ ID NO: 1166040 - RNA, 19 nt, Homo sapiens
  misc_RNA (1)...(19): siRNA sense strand
gaacaugugauggaaaauu

SEQ ID NO: 1166041 - RNA, 19 nt, Homo sapiens
  misc_RNA (1)...(19): siRNA sense strand
ggagauggcccagauacag

SEQ ID NO: 1166042 - RNA, 19 nt, Homo sapiens
  misc_RNA (1)...(19): siRNA sense strand
aaagaggcuggaaggaaua

SEQ ID NO: 1166043 - RNA, 19 nt, Homo sapiens
  misc_RNA (1)...(19): siRNA sense strand
cacauagggugcagcaauc

SEQ ID NO: 1166044 - RNA, 19 nt, Homo sapiens
  misc_RNA (1)...(19): siRNA sense strand
gagacugugcagauguaua

SEQ ID NO: 1166045 - RNA, 19 nt, Homo sapiens
  misc_RNA (1)...(19): siRNA sense strand
aagagaaaccauuuagaga

SEQ ID NO: 1166046 - RNA, 19 nt, Homo sapiens
  misc_RNA (1)...(19): siRNA sense strand
gaaaacacaaggaagaguu

SEQ ID NO: 1166047 - RNA, 19 nt, Homo sapiens
  misc_RNA (1)...(19): siRNA sense strand
gcaacuucuucaacagaca

SEQ ID NO: 1166048 - RNA, 19 nt, Homo sapiens
  misc_RNA (1)...(19): siRNA sense strand
guugagacccagguacuaa

SEQ ID NO: 1166049 - RNA, 19 nt, Homo sapiens
  misc_RNA (1)...(19): siRNA sense strand
gcugcuggagaauucauua

SEQ ID NO: 1166050 - RNA, 19 nt, Homo sapiens
  misc_RNA (1)...(19): siRNA sense strand
uauacucaguggcugcaaa

SEQ ID NO: 1166051 - RNA, 19 nt, Homo sapiens
  misc_RNA (1)...(19): siRNA sense strand
caugcuaagaauugaguua

SEQ ID NO: 1166052 - RNA, 19 nt, Homo sapiens
  misc_RNA (1)...(19): siRNA sense strand
caacagacaaaugaaaucu

SEQ ID NO: 1166053 - RNA, 19 nt, Homo sapiens
  misc_RNA (1)...(19): siRNA sense strand
gcaacugucgugagaguac

SEQ ID NO: 1166054 - RNA, 19 nt, Homo sapiens
  misc_RNA (1)...(19): siRNA sense strand
ucgugaagauggaagucua

SEQ ID NO: 1166055 - RNA, 19 nt, Homo sapiens
  misc_RNA (1)...(19): siRNA sense strand
ggaaaagcaauuaaacaga

SEQ ID NO: 1166056 - RNA, 19 nt, Homo sapiens
  misc_RNA (1)...(19): siRNA sense strand
ccgagccuauucacaguau

SEQ ID NO: 1166057 - RNA, 19 nt, Homo sapiens
  misc_RNA (1)...(19): siRNA sense strand
gguuacucgucaaacauau

SEQ ID NO: 1166058 - RNA, 19 nt, Homo sapiens
  misc_RNA (1)...(19): siRNA sense strand
ugccuacacuuucauucuu

SEQ ID NO: 1166059 - RNA, 19 nt, Homo sapiens
  misc_RNA (1)...(19): siRNA sense strand
cgacagaccaguacaacac

SEQ ID NO: 1166060 - RNA, 19 nt, Homo sapiens
  misc_RNA (1)...(19): siRNA sense strand
gcccagauacagcagaaug

SEQ ID NO: 1166061 - RNA, 19 nt, Homo sapiens
  misc_RNA (1)...(19): siRNA sense strand
cauaggaaaugaaaagcaa

SEQ ID NO: 1166062 - RNA, 19 nt, Homo sapiens
  misc_RNA (1)...(19): siRNA sense strand
gaaaacagugggagaagau

SEQ ID NO: 1166063 - RNA, 19 nt, Homo sapiens
  misc_RNA (1)...(19): siRNA sense strand
ccaccuacaagcuagagaa

SEQ ID NO: 1166064 - RNA, 19 nt, Homo sapiens
  misc_RNA (1)...(19): siRNA sense strand
gcuggagaauucauuaucc

SEQ ID NO: 1166065 - RNA, 19 nt, Homo sapiens
  misc_RNA (1)...(19): siRNA sense strand
agucggagauggcccagau

SEQ ID NO: 1166066 - RNA, 19 nt, Homo sapiens
  misc_RNA (1)...(19): siRNA sense strand
aagauggaagucuagauuu

SEQ ID NO: 1166067 - RNA, 19 nt, Homo sapiens
  misc_RNA (1)...(19): siRNA sense strand
guuacucgucaaacauaua

SEQ ID NO: 1166068 - RNA, 19 nt, Homo sapiens
  misc_RNA (1)...(19): siRNA sense strand
aaacagugggagaagauau

SEQ ID NO: 1166069 - RNA, 19 nt, Homo sapiens
  misc_RNA (1)...(19): siRNA sense strand
ggaaggaaaacacaaggaa

SEQ ID NO: 1166070 - RNA, 19 nt, Homo sapiens
  misc_RNA (1)...(19): siRNA sense strand
guaauacaacaucgugaag

SEQ ID NO: 1166071 - RNA, 19 nt, Homo sapiens
  misc_RNA (1)...(19): siRNA sense strand
gggagguuggacuguaaua

SEQ ID NO: 1166072 - RNA, 19 nt, Homo sapiens
  misc_RNA (1)...(19): siRNA sense strand
gccuacacuuucauucuuc

SEQ ID NO: 1166073 - RNA, 19 nt, Homo sapiens
  misc_RNA (1)...(19): siRNA sense strand
ugucaaucuuugcacuaaa

SEQ ID NO: 1166074 - RNA, 19 nt, Homo sapiens
  misc_RNA (1)...(19): siRNA sense strand
ucgcugccauucugacuca

SEQ ID NO: 1166075 - RNA, 19 nt, Homo sapiens
  misc_RNA (1)...(19): siRNA sense strand
aacagugggagaagauaua

SEQ ID NO: 1166076 - RNA, 19 nt, Homo sapiens
  misc_RNA (1)...(19): siRNA sense strand
uggcaacugucgugagagu

SEQ ID NO: 1166077 - RNA, 19 nt, Homo sapiens
  misc_RNA (1)...(19): siRNA sense strand
ucagaggcaguacaugcua

SEQ ID NO: 1166078 - RNA, 19 nt, Homo sapiens
  misc_RNA (1)...(19): siRNA sense strand
aauauuggcuggggaauga

SEQ ID NO: 1166079 - RNA, 19 nt, Homo sapiens
  misc_RNA (1)...(19): siRNA sense strand
agaguacgacagaccagua

SEQ ID NO: 1166080 - RNA, 19 nt, Homo sapiens
  misc_RNA (1)...(19): siRNA sense strand
uaauacaacaucgugaaga

SEQ ID NO: 1166081 - RNA, 19 nt, Homo sapiens
  misc_RNA (1)...(19): siRNA sense strand
caacuucuucaacagacaa

SEQ ID NO: 1166082 - RNA, 19 nt, Homo sapiens
  misc_RNA (1)...(19): siRNA sense strand
gaacuucccuuaagaguca

SEQ ID NO: 1166083 - RNA, 19 nt, Homo sapiens
  misc_RNA (1)...(19): siRNA sense strand
ggaaugaccuggcagauca

SEQ ID NO: 1166084 - RNA, 19 nt, Homo sapiens
  misc_RNA (1)...(19): siRNA sense strand
ccaagucgcuggagccauu

SEQ ID NO: 1166085 - RNA, 19 nt, Homo sapiens
  misc_RNA (1)...(19): siRNA sense strand
gggaacaacuucaguccaa

SEQ ID NO: 1166086 - RNA, 19 nt, Homo sapiens
  misc_RNA (1)...(19): siRNA sense strand
ugagcacgcugaaggcuua

SEQ ID NO: 1166087 - RNA, 19 nt, Homo sapiens
  misc_RNA (1)...(19): siRNA sense strand
caaccuagaacuucccuua

SEQ ID NO: 1166088 - RNA, 19 nt, Homo sapiens
  misc_RNA (1)...(19): siRNA sense strand
gcagagagccaguguuugu

SEQ ID NO: 1166089 - RNA, 19 nt, Homo sapiens
  misc_RNA (1)...(19): siRNA sense strand
uaaccagacugugacauuu

SEQ ID NO: 1166090 - RNA, 19 nt, Homo sapiens
  misc_RNA (1)...(19): siRNA sense strand
gcaagaagugccaagauug

SEQ ID NO: 1166091 - RNA, 19 nt, Homo sapiens
  misc_RNA (1)...(19): siRNA sense strand
gggccagguucuccuauuu

SEQ ID NO: 1166092 - RNA, 19 nt, Homo sapiens
  misc_RNA (1)...(19): siRNA sense strand
gaaaacagcccacugaugu

SEQ ID NO: 1166093 - RNA, 19 nt, Homo sapiens
  misc_RNA (1)...(19): siRNA sense strand
ggacuguggucugccauug

SEQ ID NO: 1166094 - RNA, 19 nt, Homo sapiens
  misc_RNA (1)...(19): siRNA sense strand
gggaagaaaggcccaacua

SEQ ID NO: 1166095 - RNA, 19 nt, Homo sapiens
  misc_RNA (1)...(19): siRNA sense strand
gaacuccuccuuccugcuu

SEQ ID NO: 1166096 - RNA, 19 nt, Homo sapiens
  misc_RNA (1)...(19): siRNA sense strand
uccaagggcugcaguucua

SEQ ID NO: 1166097 - RNA, 19 nt, Homo sapiens
  misc_RNA (1)...(19): siRNA sense strand
ccuagaacuucccuuaaga

SEQ ID NO: 1166098 - RNA, 19 nt, Homo sapiens
  misc_RNA (1)...(19): siRNA sense strand
caaugguggucgugugauu

SEQ ID NO: 1166099 - RNA, 19 nt, Homo sapiens
  misc_RNA (1)...(19): siRNA sense strand
ggagagguaucgcccugau

SEQ ID NO: 1166100 - RNA, 19 nt, Homo sapiens
  misc_RNA (1)...(19): siRNA sense strand
gugaauuacugcuacaauc

SEQ ID NO: 1166101 - RNA, 19 nt, Homo sapiens
  misc_RNA (1)...(19): siRNA sense strand
ggagaugcuuuuccacuuu

SEQ ID NO: 1166102 - RNA, 19 nt, Homo sapiens
  misc_RNA (1)...(19): siRNA sense strand
ccuaugcccuguuucucua

SEQ ID NO: 1166103 - RNA, 19 nt, Homo sapiens
  misc_RNA (1)...(19): siRNA sense strand
ggagugaggagcccaggaa

SEQ ID NO: 1166104 - RNA, 19 nt, Homo sapiens
  misc_RNA (1)...(19): siRNA sense strand
gccauucacucuggagauu

SEQ ID NO: 1166105 - RNA, 19 nt, Homo sapiens
  misc_RNA (1)...(19): siRNA sense strand
gcagggacgacgggacuua

SEQ ID NO: 1166106 - RNA, 19 nt, Homo sapiens
  misc_RNA (1)...(19): siRNA sense strand
gggcagaccacgcugauuc

SEQ ID NO: 1166107 - RNA, 19 nt, Homo sapiens
  misc_RNA (1)...(19): siRNA sense strand
gggaagacgugcgcgaugu

SEQ ID NO: 1166108 - RNA, 19 nt, Homo sapiens
  misc_RNA (1)...(19): siRNA sense strand
gcaagcaucggacuucaca

SEQ ID NO: 1166109 - RNA, 19 nt, Homo sapiens
  misc_RNA (1)...(19): siRNA sense strand
gaauuacugcuacaaucaa

SEQ ID NO: 1166110 - RNA, 19 nt, Homo sapiens
  misc_RNA (1)...(19): siRNA sense strand
ugacaagcccuaccucugu

SEQ ID NO: 1166111 - RNA, 19 nt, Homo sapiens
  misc_RNA (1)...(19): siRNA sense strand
gcuccugggcugaacauuu

SEQ ID NO: 1166112 - RNA, 19 nt, Homo sapiens
  misc_RNA (1)...(19): siRNA sense strand
ccagcugccuuccaacuuc

SEQ ID NO: 1166113 - RNA, 19 nt, Homo sapiens
  misc_RNA (1)...(19): siRNA sense strand
gcaccgacuuggagcucuu

SEQ ID NO: 1166114 - RNA, 19 nt, Homo sapiens
  misc_RNA (1)...(19): siRNA sense strand
gaaacucgacgcguucuuc

SEQ ID NO: 1166115 - RNA, 19 nt, Homo sapiens
  misc_RNA (1)...(19): siRNA sense strand
cagaugcgauggcuacaag

SEQ ID NO: 1166116 - RNA, 19 nt, Homo sapiens
  misc_RNA (1)...(19): siRNA sense strand
caaggccacugcuacaucu

SEQ ID NO: 1166117 - RNA, 19 nt, Homo sapiens
  misc_RNA (1)...(19): siRNA sense strand
gccaguguuuguacaauca

SEQ ID NO: 1166118 - RNA, 19 nt, Homo sapiens
  misc_RNA (1)...(19): siRNA sense strand
agcaagaagugccaagauu

SEQ ID NO: 1166119 - RNA, 19 nt, Homo sapiens
  misc_RNA (1)...(19): siRNA sense strand
ggauuagaaagaucacaaa

SEQ ID NO: 1166120 - RNA, 19 nt, Homo sapiens
  misc_RNA (1)...(19): siRNA sense strand
gggcuacugugaccaugga

SEQ ID NO: 1166121 - RNA, 19 nt, Homo sapiens
  misc_RNA (1)...(19): siRNA sense strand
acuuggagcucuuugagaa

SEQ ID NO: 1166122 - RNA, 19 nt, Homo sapiens
  misc_RNA (1)...(19): siRNA sense strand
ggaagaaaggcccaacuac

SEQ ID NO: 1166123 - RNA, 19 nt, Homo sapiens
  misc_RNA (1)...(19): siRNA sense strand
ggucaaugcccacgccuau

SEQ ID NO: 1166124 - RNA, 19 nt, Homo sapiens
  misc_RNA (1)...(19): siRNA sense strand
gaucaucuucccagaguca

SEQ ID NO: 1166125 - RNA, 19 nt, Homo sapiens
  misc_RNA (1)...(19): siRNA sense strand
caaguggaacgaaucgauu

SEQ ID NO: 1166126 - RNA, 19 nt, Homo sapiens
  misc_RNA (1)...(19): siRNA sense strand
ggagcucuuuccuguguca

SEQ ID NO: 1166127 - RNA, 19 nt, Homo sapiens
  misc_RNA (1)...(19): siRNA sense strand
cuccugggcugaacauuug

SEQ ID NO: 1166128 - RNA, 19 nt, Homo sapiens
  misc_RNA (1)...(19): siRNA sense strand
caggccgagucuuggauua

SEQ ID NO: 1166129 - RNA, 19 nt, Homo sapiens
  misc_RNA (1)...(19): siRNA sense strand
gcucuuuccugugucagaa

SEQ ID NO: 1166130 - RNA, 19 nt, Homo sapiens
  misc_RNA (1)...(19): siRNA sense strand
ucauugacuuccugaacaa

SEQ ID NO: 1166131 - RNA, 19 nt, Homo sapiens
  misc_RNA (1)...(19): siRNA sense strand
guucuucggcaucuucuuu

SEQ ID NO: 1166132 - RNA, 19 nt, Homo sapiens
  misc_RNA (1)...(19): siRNA sense strand
gaagacgugcgcgauguga

SEQ ID NO: 1166133 - RNA, 19 nt, Homo sapiens
  misc_RNA (1)...(19): siRNA sense strand
ggccgagucuuggauuaga

SEQ ID NO: 1166134 - RNA, 19 nt, Homo sapiens
  misc_RNA (1)...(19): siRNA sense strand
ugaauuacugcuacaauca

SEQ ID NO: 1166135 - RNA, 19 nt, Homo sapiens
  misc_RNA (1)...(19): siRNA sense strand
aguccugcccugugaauua

SEQ ID NO: 1166136 - RNA, 19 nt, Homo sapiens
  misc_RNA (1)...(19): siRNA sense strand
gcagcguccuuggcaguug

SEQ ID NO: 1166137 - RNA, 19 nt, Homo sapiens
  misc_RNA (1)...(19): siRNA sense strand
gugagcaccugagcaugaa

SEQ ID NO: 1166138 - RNA, 19 nt, Homo sapiens
  misc_RNA (1)...(19): siRNA sense strand
gagccaguguuuguacaau

SEQ ID NO: 1166139 - RNA, 19 nt, Homo sapiens
  misc_RNA (1)...(19): siRNA sense strand
gagagccaguguuuguaca

SEQ ID NO: 1166140 - RNA, 19 nt, Homo sapiens
  misc_RNA (1)...(19): siRNA sense strand
ggaauacgagacguucuau

SEQ ID NO: 1166141 - RNA, 19 nt, Homo sapiens
  misc_RNA (1)...(19): siRNA sense strand
cgacgggacuuacgauucc

SEQ ID NO: 1166142 - RNA, 19 nt, Homo sapiens
  misc_RNA (1)...(19): siRNA sense strand
gaacauuugaucuccaacu

SEQ ID NO: 1166143 - RNA, 19 nt, Homo sapiens
  misc_RNA (1)...(19): siRNA sense strand
guccaacugucaaccuaga

SEQ ID NO: 1166144 - RNA, 19 nt, Homo sapiens
  misc_RNA (1)...(19): siRNA sense strand
gcuccucucuccgugauuc

SEQ ID NO: 1166145 - RNA, 19 nt, Homo sapiens
  misc_RNA (1)...(19): siRNA sense strand
acgccacccucaaucagua

SEQ ID NO: 1166146 - RNA, 19 nt, Homo sapiens
  misc_RNA (1)...(19): siRNA sense strand
ccacaucaccaccuuggau

SEQ ID NO: 1166147 - RNA, 19 nt, Homo sapiens
  misc_RNA (1)...(19): siRNA sense strand
gaacaacuucaguccaacu

SEQ ID NO: 1166148 - RNA, 19 nt, Homo sapiens
  misc_RNA (1)...(19): siRNA sense strand
ucaguuacaccuucaaugg

SEQ ID NO: 1166149 - RNA, 19 nt, Homo sapiens
  misc_RNA (1)...(19): siRNA sense strand
aaccaguccugcccuguga

SEQ ID NO: 1166150 - RNA, 19 nt, Homo sapiens
  misc_RNA (1)...(19): siRNA sense strand
caacgggacaggccuccuu

SEQ ID NO: 1166151 - RNA, 19 nt, Homo sapiens
  misc_RNA (1)...(19): siRNA sense strand
gguggaggcguucuuauac

SEQ ID NO: 1166152 - RNA, 19 nt, Homo sapiens
  misc_RNA (1)...(19): siRNA sense strand
ggugguggaggcguucuua

SEQ ID NO: 1166153 - RNA, 19 nt, Homo sapiens
  misc_RNA (1)...(19): siRNA sense strand
gaacgccacccucaaucag

SEQ ID NO: 1166154 - RNA, 19 nt, Homo sapiens
  misc_RNA (1)...(19): siRNA sense strand
gcaggccgagucuuggauu

SEQ ID NO: 1166155 - RNA, 19 nt, Homo sapiens
  misc_RNA (1)...(19): siRNA sense strand
ugguggaggcguucuuaua

SEQ ID NO: 1166156 - RNA, 19 nt, Homo sapiens
  misc_RNA (1)...(19): siRNA sense strand
gacgggagcagguccuaug

SEQ ID NO: 1166157 - RNA, 19 nt, Homo sapiens
  misc_RNA (1)...(19): siRNA sense strand
gccgagucuuggauuagaa

SEQ ID NO: 1166158 - RNA, 19 nt, Homo sapiens
  misc_RNA (1)...(19): siRNA sense strand
acacgagggaagucaguaa

SEQ ID NO: 1166159 - RNA, 19 nt, Homo sapiens
  misc_RNA (1)...(19): siRNA sense strand
ugugagcaccugagcauga

SEQ ID NO: 1166160 - RNA, 19 nt, Homo sapiens
  misc_RNA (1)...(19): siRNA sense strand
ggaagacgugcgcgaugug

SEQ ID NO: 1166161 - RNA, 19 nt, Homo sapiens
  misc_RNA (1)...(19): siRNA sense strand
ggacgacgggacuuacgau

SEQ ID NO: 1166162 - RNA, 19 nt, Homo sapiens
  misc_RNA (1)...(19): siRNA sense strand
ccaaguggaacgaaucgau

SEQ ID NO: 1166163 - RNA, 19 nt, Homo sapiens
  misc_RNA (1)...(19): siRNA sense strand
gaccacauuuuaucaggaa

SEQ ID NO: 1166164 - RNA, 19 nt, Homo sapiens
  misc_RNA (1)...(19): siRNA sense strand
augcagagagccaguguuu

SEQ ID NO: 1166165 - RNA, 19 nt, Homo sapiens
  misc_RNA (1)...(19): siRNA sense strand
gaauacgagacguucuaug

SEQ ID NO: 1166166 - RNA, 19 nt, Homo sapiens
  misc_RNA (1)...(19): siRNA sense strand
ugaucgcgcucuccaacau

SEQ ID NO: 1166167 - RNA, 19 nt, Homo sapiens
  misc_RNA (1)...(19): siRNA sense strand
ccuuggauggugucaguua

SEQ ID NO: 1166168 - RNA, 19 nt, Homo sapiens
  misc_RNA (1)...(19): siRNA sense strand
cagcugccuuccaacuuca

SEQ ID NO: 1166169 - RNA, 19 nt, Homo sapiens
  misc_RNA (1)...(19): siRNA sense strand
gcagcuguguguccuucuc

SEQ ID NO: 1166170 - RNA, 19 nt, Homo sapiens
  misc_RNA (1)...(19): siRNA sense strand
cacagacaauggccagauc

SEQ ID NO: 1166171 - RNA, 19 nt, Homo sapiens
  misc_RNA (1)...(19): siRNA sense strand
gcacgcugaaggcuuacuu

SEQ ID NO: 1166172 - RNA, 19 nt, Homo sapiens
  misc_RNA (1)...(19): siRNA sense strand
cgaacgccacccucaauca

SEQ ID NO: 1166173 - RNA, 19 nt, Homo sapiens
  misc_RNA (1)...(19): siRNA sense strand
cugaacauuugaucuccaa

SEQ ID NO: 1166174 - RNA, 19 nt, Homo sapiens
  misc_RNA (1)...(19): siRNA sense strand
gagaugcuuuuccacuuug

SEQ ID NO: 1166175 - RNA, 19 nt, Homo sapiens
  misc_RNA (1)...(19): siRNA sense strand
ggggagcucuuuccugugu

SEQ ID NO: 1166176 - RNA, 19 nt, Homo sapiens
  misc_RNA (1)...(19): siRNA sense strand
cagagagccaguguuugua

SEQ ID NO: 1166177 - RNA, 19 nt, Homo sapiens
  misc_RNA (1)...(19): siRNA sense strand
caacgcaagcaucggacuu

SEQ ID NO: 1166178 - RNA, 19 nt, Homo sapiens
  misc_RNA (1)...(19): siRNA sense strand
gggcugaacauuugaucuc

SEQ ID NO: 1166179 - RNA, 19 nt, Homo sapiens
  misc_RNA (1)...(19): siRNA sense strand
caacuucaccccuguuuuc

SEQ ID NO: 1166180 - RNA, 19 nt, Homo sapiens
  misc_RNA (1)...(19): siRNA sense strand
auaaccagacugugacauu

SEQ ID NO: 1166181 - RNA, 19 nt, Homo sapiens
  misc_RNA (1)...(19): siRNA sense strand
gugaggagcccaggaacga

SEQ ID NO: 1166182 - RNA, 19 nt, Homo sapiens
  misc_RNA (1)...(19): siRNA sense strand
gaacuucccuuaagaguca

SEQ ID NO: 1166183 - RNA, 19 nt, Homo sapiens
  misc_RNA (1)...(19): siRNA sense strand
ggaaugaccuggcagauca

SEQ ID NO: 1166184 - RNA, 19 nt, Homo sapiens
  misc_RNA (1)...(19): siRNA sense strand
ccaagucgcuggagccauu

SEQ ID NO: 1166185 - RNA, 19 nt, Homo sapiens
  misc_RNA (1)...(19): siRNA sense strand
gggaacaacuucaguccaa

SEQ ID NO: 1166186 - RNA, 19 nt, Homo sapiens
  misc_RNA (1)...(19): siRNA sense strand
ugagcacgcugaaggcuua

SEQ ID NO: 1166187 - RNA, 19 nt, Homo sapiens
  misc_RNA (1)...(19): siRNA sense strand
caaccuagaacuucccuua

SEQ ID NO: 1166188 - RNA, 19 nt, Homo sapiens
  misc_RNA (1)...(19): siRNA sense strand
gcagagagccaguguuugu

SEQ ID NO: 1166189 - RNA, 19 nt, Homo sapiens
  misc_RNA (1)...(19): siRNA sense strand
uaaccagacugugacauuu

SEQ ID NO: 1166190 - RNA, 19 nt, Homo sapiens
  misc_RNA (1)...(19): siRNA sense strand
gcaagaagugccaagauug

SEQ ID NO: 1166191 - RNA, 19 nt, Homo sapiens
  misc_RNA (1)...(19): siRNA sense strand
gggccagguucuccuauuu

SEQ ID NO: 1166192 - RNA, 19 nt, Homo sapiens
  misc_RNA (1)...(19): siRNA sense strand
gaaaacagcccacugaugu

SEQ ID NO: 1166193 - RNA, 19 nt, Homo sapiens
  misc_RNA (1)...(19): siRNA sense strand
ggacuguggucugccauug

SEQ ID NO: 1166194 - RNA, 19 nt, Homo sapiens
  misc_RNA (1)...(19): siRNA sense strand
gggaagaaaggcccaacua

SEQ ID NO: 1166195 - RNA, 19 nt, Homo sapiens
  misc_RNA (1)...(19): siRNA sense strand
gaacuccuccuuccugcuu

SEQ ID NO: 1166196 - RNA, 19 nt, Homo sapiens
  misc_RNA (1)...(19): siRNA sense strand
uccaagggcugcaguucua

SEQ ID NO: 1166197 - RNA, 19 nt, Homo sapiens
  misc_RNA (1)...(19): siRNA sense strand
ccuagaacuucccuuaaga

SEQ ID NO: 1166198 - RNA, 19 nt, Homo sapiens
  misc_RNA (1)...(19): siRNA sense strand
caaugguggucgugugauu

SEQ ID NO: 1166199 - RNA, 19 nt, Homo sapiens
  misc_RNA (1)...(19): siRNA sense strand
ggagagguaucgcccugau

SEQ ID NO: 1166200 - RNA, 19 nt, Homo sapiens
  misc_RNA (1)...(19): siRNA sense strand
gugaauuacugcuacaauc

SEQ ID NO: 1166201 - RNA, 19 nt, Homo sapiens
  misc_RNA (1)...(19): siRNA sense strand
ggagaugcuuuuccacuuu

SEQ ID NO: 1166202 - RNA, 19 nt, Homo sapiens
  misc_RNA (1)...(19): siRNA sense strand
ccuaugcccuguuucucua

SEQ ID NO: 1166203 - RNA, 19 nt, Homo sapiens
  misc_RNA (1)...(19): siRNA sense strand
ggagugaggagcccaggaa

SEQ ID NO: 1166204 - RNA, 19 nt, Homo sapiens
  misc_RNA (1)...(19): siRNA sense strand
gccauucacucuggagauu

SEQ ID NO: 1166205 - RNA, 19 nt, Homo sapiens
  misc_RNA (1)...(19): siRNA sense strand
gcagggacgacgggacuua

SEQ ID NO: 1166206 - RNA, 19 nt, Homo sapiens
  misc_RNA (1)...(19): siRNA sense strand
gggcagaccacgcugauuc

SEQ ID NO: 1166207 - RNA, 19 nt, Homo sapiens
  misc_RNA (1)...(19): siRNA sense strand
gggaagacgugcgcgaugu

SEQ ID NO: 1166208 - RNA, 19 nt, Homo sapiens
  misc_RNA (1)...(19): siRNA sense strand
gcaagcaucggacuucaca

SEQ ID NO: 1166209 - RNA, 19 nt, Homo sapiens
  misc_RNA (1)...(19): siRNA sense strand
gaauuacugcuacaaucaa

SEQ ID NO: 1166210 - RNA, 19 nt, Homo sapiens
  misc_RNA (1)...(19): siRNA sense strand
ugacaagcccuaccucugu

SEQ ID NO: 1166211 - RNA, 19 nt, Homo sapiens
  misc_RNA (1)...(19): siRNA sense strand
gcuccugggcugaacauuu

SEQ ID NO: 1166212 - RNA, 19 nt, Homo sapiens
  misc_RNA (1)...(19): siRNA sense strand
ccagcugccuuccaacuuc

SEQ ID NO: 1166213 - RNA, 19 nt, Homo sapiens
  misc_RNA (1)...(19): siRNA sense strand
gcaccgacuuggagcucuu

SEQ ID NO: 1166214 - RNA, 19 nt, Homo sapiens
  misc_RNA (1)...(19): siRNA sense strand
gaaacucgacgcguucuuc

SEQ ID NO: 1166215 - RNA, 19 nt, Homo sapiens
  misc_RNA (1)...(19): siRNA sense strand
cagaugcgauggcuacaag

SEQ ID NO: 1166216 - RNA, 19 nt, Homo sapiens
  misc_RNA (1)...(19): siRNA sense strand
caaggccacugcuacaucu

SEQ ID NO: 1166217 - RNA, 19 nt, Homo sapiens
  misc_RNA (1)...(19): siRNA sense strand
gccaguguuuguacaauca

SEQ ID NO: 1166218 - RNA, 19 nt, Homo sapiens
  misc_RNA (1)...(19): siRNA sense strand
agcaagaagugccaagauu

SEQ ID NO: 1166219 - RNA, 19 nt, Homo sapiens
  misc_RNA (1)...(19): siRNA sense strand
ggauuagaaagaucacaaa

SEQ ID NO: 1166220 - RNA, 19 nt, Homo sapiens
  misc_RNA (1)...(19): siRNA sense strand
gggcuacugugaccaugga

SEQ ID NO: 1166221 - RNA, 19 nt, Homo sapiens
  misc_RNA (1)...(19): siRNA sense strand
acuuggagcucuuugagaa

SEQ ID NO: 1166222 - RNA, 19 nt, Homo sapiens
  misc_RNA (1)...(19): siRNA sense strand
ggaagaaaggcccaacuac

SEQ ID NO: 1166223 - RNA, 19 nt, Homo sapiens
  misc_RNA (1)...(19): siRNA sense strand
ggucaaugcccacgccuau

SEQ ID NO: 1166224 - RNA, 19 nt, Homo sapiens
  misc_RNA (1)...(19): siRNA sense strand
gaucaucuucccagaguca

SEQ ID NO: 1166225 - RNA, 19 nt, Homo sapiens
  misc_RNA (1)...(19): siRNA sense strand
caaguggaacgaaucgauu

SEQ ID NO: 1166226 - RNA, 19 nt, Homo sapiens
  misc_RNA (1)...(19): siRNA sense strand
ggagcucuuuccuguguca

SEQ ID NO: 1166227 - RNA, 19 nt, Homo sapiens
  misc_RNA (1)...(19): siRNA sense strand
cuccugggcugaacauuug

SEQ ID NO: 1166228 - RNA, 19 nt, Homo sapiens
  misc_RNA (1)...(19): siRNA sense strand
caggccgagucuuggauua

SEQ ID NO: 1166229 - RNA, 19 nt, Homo sapiens
  misc_RNA (1)...(19): siRNA sense strand
gcucuuuccugugucagaa

SEQ ID NO: 1166230 - RNA, 19 nt, Homo sapiens
  misc_RNA (1)...(19): siRNA sense strand
ucauugacuuccugaacaa

SEQ ID NO: 1166231 - RNA, 19 nt, Homo sapiens
  misc_RNA (1)...(19): siRNA sense strand
guucuucggcaucuucuuu

SEQ ID NO: 1166232 - RNA, 19 nt, Homo sapiens
  misc_RNA (1)...(19): siRNA sense strand
gaagacgugcgcgauguga

SEQ ID NO: 1166233 - RNA, 19 nt, Homo sapiens
  misc_RNA (1)...(19): siRNA sense strand
ggccgagucuuggauuaga

SEQ ID NO: 1166234 - RNA, 19 nt, Homo sapiens
  misc_RNA (1)...(19): siRNA sense strand
ugaauuacugcuacaauca

SEQ ID NO: 1166235 - RNA, 19 nt, Homo sapiens
  misc_RNA (1)...(19): siRNA sense strand
aguccugcccugugaauua

SEQ ID NO: 1166236 - RNA, 19 nt, Homo sapiens
  misc_RNA (1)...(19): siRNA sense strand
gcagcguccuuggcaguug

SEQ ID NO: 1166237 - RNA, 19 nt, Homo sapiens
  misc_RNA (1)...(19): siRNA sense strand
gugagcaccugagcaugaa

SEQ ID NO: 1166238 - RNA, 19 nt, Homo sapiens
  misc_RNA (1)...(19): siRNA sense strand
gagccaguguuuguacaau

SEQ ID NO: 1166239 - RNA, 19 nt, Homo sapiens
  misc_RNA (1)...(19): siRNA sense strand
gagagccaguguuuguaca

SEQ ID NO: 1166240 - RNA, 19 nt, Homo sapiens
  misc_RNA (1)...(19): siRNA sense strand
ggaauacgagacguucuau

SEQ ID NO: 1166241 - RNA, 19 nt, Homo sapiens
  misc_RNA (1)...(19): siRNA sense strand
cgacgggacuuacgauucc

SEQ ID NO: 1166242 - RNA, 19 nt, Homo sapiens
  misc_RNA (1)...(19): siRNA sense strand
gaacauuugaucuccaacu

SEQ ID NO: 1166243 - RNA, 19 nt, Homo sapiens
  misc_RNA (1)...(19): siRNA sense strand
guccaacugucaaccuaga

SEQ ID NO: 1166244 - RNA, 19 nt, Homo sapiens
  misc_RNA (1)...(19): siRNA sense strand
gcuccucucuccgugauuc

SEQ ID NO: 1166245 - RNA, 19 nt, Homo sapiens
  misc_RNA (1)...(19): siRNA sense strand
acgccacccucaaucagua

SEQ ID NO: 1166246 - RNA, 19 nt, Homo sapiens
  misc_RNA (1)...(19): siRNA sense strand
ccacaucaccaccuuggau

SEQ ID NO: 1166247 - RNA, 19 nt, Homo sapiens
  misc_RNA (1)...(19): siRNA sense strand
gaacaacuucaguccaacu

SEQ ID NO: 1166248 - RNA, 19 nt, Homo sapiens
  misc_RNA (1)...(19): siRNA sense strand
ucaguuacaccuucaaugg

SEQ ID NO: 1166249 - RNA, 19 nt, Homo sapiens
  misc_RNA (1)...(19): siRNA sense strand
aaccaguccugcccuguga

SEQ ID NO: 1166250 - RNA, 19 nt, Homo sapiens
  misc_RNA (1)...(19): siRNA sense strand
caacgggacaggccuccuu

SEQ ID NO: 1166251 - RNA, 19 nt, Homo sapiens
  misc_RNA (1)...(19): siRNA sense strand
gguggaggcguucuuauac

SEQ ID NO: 1166252 - RNA, 19 nt, Homo sapiens
  misc_RNA (1)...(19): siRNA sense strand
ggugguggaggcguucuua

SEQ ID NO: 1166253 - RNA, 19 nt, Homo sapiens
  misc_RNA (1)...(19): siRNA sense strand
gaacgccacccucaaucag

SEQ ID NO: 1166254 - RNA, 19 nt, Homo sapiens
  misc_RNA (1)...(19): siRNA sense strand
gcaggccgagucuuggauu

SEQ ID NO: 1166255 - RNA, 19 nt, Homo sapiens
  misc_RNA (1)...(19): siRNA sense strand
ugguggaggcguucuuaua

SEQ ID NO: 1166256 - RNA, 19 nt, Homo sapiens
  misc_RNA (1)...(19): siRNA sense strand
gacgggagcagguccuaug

SEQ ID NO: 1166257 - RNA, 19 nt, Homo sapiens
  misc_RNA (1)...(19): siRNA sense strand
gccgagucuuggauuagaa

SEQ ID NO: 1166258 - RNA, 19 nt, Homo sapiens
  misc_RNA (1)...(19): siRNA sense strand
acacgagggaagucaguaa

SEQ ID NO: 1166259 - RNA, 19 nt, Homo sapiens
  misc_RNA (1)...(19): siRNA sense strand
ugugagcaccugagcauga

SEQ ID NO: 1166260 - RNA, 19 nt, Homo sapiens
  misc_RNA (1)...(19): siRNA sense strand
ggaagacgugcgcgaugug

SEQ ID NO: 1166261 - RNA, 19 nt, Homo sapiens
  misc_RNA (1)...(19): siRNA sense strand
ggacgacgggacuuacgau

SEQ ID NO: 1166262 - RNA, 19 nt, Homo sapiens
  misc_RNA (1)...(19): siRNA sense strand
ccaaguggaacgaaucgau

SEQ ID NO: 1166263 - RNA, 19 nt, Homo sapiens
  misc_RNA (1)...(19): siRNA sense strand
gaccacauuuuaucaggaa

SEQ ID NO: 1166264 - RNA, 19 nt, Homo sapiens
  misc_RNA (1)...(19): siRNA sense strand
augcagagagccaguguuu

SEQ ID NO: 1166265 - RNA, 19 nt, Homo sapiens
  misc_RNA (1)...(19): siRNA sense strand
gaauacgagacguucuaug

SEQ ID NO: 1166266 - RNA, 19 nt, Homo sapiens
  misc_RNA (1)...(19): siRNA sense strand
ugaucgcgcucuccaacau

SEQ ID NO: 1166267 - RNA, 19 nt, Homo sapiens
  misc_RNA (1)...(19): siRNA sense strand
ccuuggauggugucaguua

SEQ ID NO: 1166268 - RNA, 19 nt, Homo sapiens
  misc_RNA (1)...(19): siRNA sense strand
cagcugccuuccaacuuca

SEQ ID NO: 1166269 - RNA, 19 nt, Homo sapiens
  misc_RNA (1)...(19): siRNA sense strand
gcagcuguguguccuucuc

SEQ ID NO: 1166270 - RNA, 19 nt, Homo sapiens
  misc_RNA (1)...(19): siRNA sense strand
cacagacaauggccagauc

SEQ ID NO: 1166271 - RNA, 19 nt, Homo sapiens
  misc_RNA (1)...(19): siRNA sense strand
gcacgcugaaggcuuacuu

SEQ ID NO: 1166272 - RNA, 19 nt, Homo sapiens
  misc_RNA (1)...(19): siRNA sense strand
cgaacgccacccucaauca

SEQ ID NO: 1166273 - RNA, 19 nt, Homo sapiens
  misc_RNA (1)...(19): siRNA sense strand
cugaacauuugaucuccaa

SEQ ID NO: 1166274 - RNA, 19 nt, Homo sapiens
  misc_RNA (1)...(19): siRNA sense strand
gagaugcuuuuccacuuug

SEQ ID NO: 1166275 - RNA, 19 nt, Homo sapiens
  misc_RNA (1)...(19): siRNA sense strand
ggggagcucuuuccugugu

SEQ ID NO: 1166276 - RNA, 19 nt, Homo sapiens
  misc_RNA (1)...(19): siRNA sense strand
cagagagccaguguuugua

SEQ ID NO: 1166277 - RNA, 19 nt, Homo sapiens
  misc_RNA (1)...(19): siRNA sense strand
caacgcaagcaucggacuu

SEQ ID NO: 1166278 - RNA, 19 nt, Homo sapiens
  misc_RNA (1)...(19): siRNA sense strand
gggcugaacauuugaucuc

SEQ ID NO: 1166279 - RNA, 19 nt, Homo sapiens
  misc_RNA (1)...(19): siRNA sense strand
caacuucaccccuguuuuc

SEQ ID NO: 1166280 - RNA, 19 nt, Homo sapiens
  misc_RNA (1)...(19): siRNA sense strand
auaaccagacugugacauu

SEQ ID NO: 1166281 - RNA, 19 nt, Homo sapiens
  misc_RNA (1)...(19): siRNA sense strand
gugaggagcccaggaacga

SEQ ID NO: 1166282 - RNA, 19 nt, Homo sapiens
  misc_RNA (1)...(19): siRNA sense strand
gaacuucccuuaagaguca

SEQ ID NO: 1166283 - RNA, 19 nt, Homo sapiens
  misc_RNA (1)...(19): siRNA sense strand
ggaaugaccuggcagauca

SEQ ID NO: 1166284 - RNA, 19 nt, Homo sapiens
  misc_RNA (1)...(19): siRNA sense strand
ccaagucgcuggagccauu

SEQ ID NO: 1166285 - RNA, 19 nt, Homo sapiens
  misc_RNA (1)...(19): siRNA sense strand
gggaacaacuucaguccaa

SEQ ID NO: 1166286 - RNA, 19 nt, Homo sapiens
  misc_RNA (1)...(19): siRNA sense strand
ugagcacgcugaaggcuua

SEQ ID NO: 1166287 - RNA, 19 nt, Homo sapiens
  misc_RNA (1)...(19): siRNA sense strand
caaccuagaacuucccuua

SEQ ID NO: 1166288 - RNA, 19 nt, Homo sapiens
  misc_RNA (1)...(19): siRNA sense strand
gcagagagccaguguuugu

SEQ ID NO: 1166289 - RNA, 19 nt, Homo sapiens
  misc_RNA (1)...(19): siRNA sense strand
uaaccagacugugacauuu

SEQ ID NO: 1166290 - RNA, 19 nt, Homo sapiens
  misc_RNA (1)...(19): siRNA sense strand
gcaagaagugccaagauug

SEQ ID NO: 1166291 - RNA, 19 nt, Homo sapiens
  misc_RNA (1)...(19): siRNA sense strand
gggccagguucuccuauuu

SEQ ID NO: 1166292 - RNA, 19 nt, Homo sapiens
  misc_RNA (1)...(19): siRNA sense strand
gaaaacagcccacugaugu

SEQ ID NO: 1166293 - RNA, 19 nt, Homo sapiens
  misc_RNA (1)...(19): siRNA sense strand
ggacuguggucugccauug

SEQ ID NO: 1166294 - RNA, 19 nt, Homo sapiens
  misc_RNA (1)...(19): siRNA sense strand
gggaagaaaggcccaacua

SEQ ID NO: 1166295 - RNA, 19 nt, Homo sapiens
  misc_RNA (1)...(19): siRNA sense strand
gaacuccuccuuccugcuu

SEQ ID NO: 1166296 - RNA, 19 nt, Homo sapiens
  misc_RNA (1)...(19): siRNA sense strand
uccaagggcugcaguucua

SEQ ID NO: 1166297 - RNA, 19 nt, Homo sapiens
  misc_RNA (1)...(19): siRNA sense strand
ccuagaacuucccuuaaga

SEQ ID NO: 1166298 - RNA, 19 nt, Homo sapiens
  misc_RNA (1)...(19): siRNA sense strand
caaugguggucgugugauu

SEQ ID NO: 1166299 - RNA, 19 nt, Homo sapiens
  misc_RNA (1)...(19): siRNA sense strand
ggagagguaucgcccugau

SEQ ID NO: 1166300 - RNA, 19 nt, Homo sapiens
  misc_RNA (1)...(19): siRNA sense strand
gugaauuacugcuacaauc

SEQ ID NO: 1166301 - RNA, 19 nt, Homo sapiens
  misc_RNA (1)...(19): siRNA sense strand
ggagaugcuuuuccacuuu

SEQ ID NO: 1166302 - RNA, 19 nt, Homo sapiens
  misc_RNA (1)...(19): siRNA sense strand
ccuaugcccuguuucucua

SEQ ID NO: 1166303 - RNA, 19 nt, Homo sapiens
  misc_RNA (1)...(19): siRNA sense strand
ggagugaggagcccaggaa

SEQ ID NO: 1166304 - RNA, 19 nt, Homo sapiens
  misc_RNA (1)...(19): siRNA sense strand
gccauucacucuggagauu

SEQ ID NO: 1166305 - RNA, 19 nt, Homo sapiens
  misc_RNA (1)...(19): siRNA sense strand
gcagggacgacgggacuua

SEQ ID NO: 1166306 - RNA, 19 nt, Homo sapiens
  misc_RNA (1)...(19): siRNA sense strand
gggcagaccacgcugauuc

SEQ ID NO: 1166307 - RNA, 19 nt, Homo sapiens
  misc_RNA (1)...(19): siRNA sense strand
gggaagacgugcgcgaugu

SEQ ID NO: 1166308 - RNA, 19 nt, Homo sapiens
  misc_RNA (1)...(19): siRNA sense strand
gcaagcaucggacuucaca

SEQ ID NO: 1166309 - RNA, 19 nt, Homo sapiens
  misc_RNA (1)...(19): siRNA sense strand
gaauuacugcuacaaucaa

SEQ ID NO: 1166310 - RNA, 19 nt, Homo sapiens
  misc_RNA (1)...(19): siRNA sense strand
ugacaagcccuaccucugu

SEQ ID NO: 1166311 - RNA, 19 nt, Homo sapiens
  misc_RNA (1)...(19): siRNA sense strand
gcuccugggcugaacauuu

SEQ ID NO: 1166312 - RNA, 19 nt, Homo sapiens
  misc_RNA (1)...(19): siRNA sense strand
ccagcugccuuccaacuuc

SEQ ID NO: 1166313 - RNA, 19 nt, Homo sapiens
  misc_RNA (1)...(19): siRNA sense strand
gcaccgacuuggagcucuu

SEQ ID NO: 1166314 - RNA, 19 nt, Homo sapiens
  misc_RNA (1)...(19): siRNA sense strand
gaaacucgacgcguucuuc

SEQ ID NO: 1166315 - RNA, 19 nt, Homo sapiens
  misc_RNA (1)...(19): siRNA sense strand
cagaugcgauggcuacaag

SEQ ID NO: 1166316 - RNA, 19 nt, Homo sapiens
  misc_RNA (1)...(19): siRNA sense strand
caaggccacugcuacaucu

SEQ ID NO: 1166317 - RNA, 19 nt, Homo sapiens
  misc_RNA (1)...(19): siRNA sense strand
gccaguguuuguacaauca

SEQ ID NO: 1166318 - RNA, 19 nt, Homo sapiens
  misc_RNA (1)...(19): siRNA sense strand
agcaagaagugccaagauu

SEQ ID NO: 1166319 - RNA, 19 nt, Homo sapiens
  misc_RNA (1)...(19): siRNA sense strand
ggauuagaaagaucacaaa

SEQ ID NO: 1166320 - RNA, 19 nt, Homo sapiens
  misc_RNA (1)...(19): siRNA sense strand
gggcuacugugaccaugga

SEQ ID NO: 1166321 - RNA, 19 nt, Homo sapiens
  misc_RNA (1)...(19): siRNA sense strand
acuuggagcucuuugagaa

SEQ ID NO: 1166322 - RNA, 19 nt, Homo sapiens
  misc_RNA (1)...(19): siRNA sense strand
ggaagaaaggcccaacuac

SEQ ID NO: 1166323 - RNA, 19 nt, Homo sapiens
  misc_RNA (1)...(19): siRNA sense strand
ggucaaugcccacgccuau

SEQ ID NO: 1166324 - RNA, 19 nt, Homo sapiens
  misc_RNA (1)...(19): siRNA sense strand
gaucaucuucccagaguca

SEQ ID NO: 1166325 - RNA, 19 nt, Homo sapiens
  misc_RNA (1)...(19): siRNA sense strand
caaguggaacgaaucgauu

SEQ ID NO: 1166326 - RNA, 19 nt, Homo sapiens
  misc_RNA (1)...(19): siRNA sense strand
ggagcucuuuccuguguca

SEQ ID NO: 1166327 - RNA, 19 nt, Homo sapiens
  misc_RNA (1)...(19): siRNA sense strand
cuccugggcugaacauuug

SEQ ID NO: 1166328 - RNA, 19 nt, Homo sapiens
  misc_RNA (1)...(19): siRNA sense strand
caggccgagucuuggauua

SEQ ID NO: 1166329 - RNA, 19 nt, Homo sapiens
  misc_RNA (1)...(19): siRNA sense strand
gcucuuuccugugucagaa

SEQ ID NO: 1166330 - RNA, 19 nt, Homo sapiens
  misc_RNA (1)...(19): siRNA sense strand
ucauugacuuccugaacaa

SEQ ID NO: 1166331 - RNA, 19 nt, Homo sapiens
  misc_RNA (1)...(19): siRNA sense strand
guucuucggcaucuucuuu

SEQ ID NO: 1166332 - RNA, 19 nt, Homo sapiens
  misc_RNA (1)...(19): siRNA sense strand
gaagacgugcgcgauguga

SEQ ID NO: 1166333 - RNA, 19 nt, Homo sapiens
  misc_RNA (1)...(19): siRNA sense strand
ggccgagucuuggauuaga

SEQ ID NO: 1166334 - RNA, 19 nt, Homo sapiens
  misc_RNA (1)...(19): siRNA sense strand
ugaauuacugcuacaauca

SEQ ID NO: 1166335 - RNA, 19 nt, Homo sapiens
  misc_RNA (1)...(19): siRNA sense strand
aguccugcccugugaauua

SEQ ID NO: 1166336 - RNA, 19 nt, Homo sapiens
  misc_RNA (1)...(19): siRNA sense strand
gcagcguccuuggcaguug

SEQ ID NO: 1166337 - RNA, 19 nt, Homo sapiens
  misc_RNA (1)...(19): siRNA sense strand
gugagcaccugagcaugaa

SEQ ID NO: 1166338 - RNA, 19 nt, Homo sapiens
  misc_RNA (1)...(19): siRNA sense strand
gagccaguguuuguacaau

SEQ ID NO: 1166339 - RNA, 19 nt, Homo sapiens
  misc_RNA (1)...(19): siRNA sense strand
gagagccaguguuuguaca

SEQ ID NO: 1166340 - RNA, 19 nt, Homo sapiens
  misc_RNA (1)...(19): siRNA sense strand
ggaauacgagacguucuau

SEQ ID NO: 1166341 - RNA, 19 nt, Homo sapiens
  misc_RNA (1)...(19): siRNA sense strand
cgacgggacuuacgauucc

SEQ ID NO: 1166342 - RNA, 19 nt, Homo sapiens
  misc_RNA (1)...(19): siRNA sense strand
gaacauuugaucuccaacu

SEQ ID NO: 1166343 - RNA, 19 nt, Homo sapiens
  misc_RNA (1)...(19): siRNA sense strand
guccaacugucaaccuaga

SEQ ID NO: 1166344 - RNA, 19 nt, Homo sapiens
  misc_RNA (1)...(19): siRNA sense strand
gcuccucucuccgugauuc

SEQ ID NO: 1166345 - RNA, 19 nt, Homo sapiens
  misc_RNA (1)...(19): siRNA sense strand
acgccacccucaaucagua

SEQ ID NO: 1166346 - RNA, 19 nt, Homo sapiens
  misc_RNA (1)...(19): siRNA sense strand
ccacaucaccaccuuggau

SEQ ID NO: 1166347 - RNA, 19 nt, Homo sapiens
  misc_RNA (1)...(19): siRNA sense strand
gaacaacuucaguccaacu

SEQ ID NO: 1166348 - RNA, 19 nt, Homo sapiens
  misc_RNA (1)...(19): siRNA sense strand
ucaguuacaccuucaaugg

SEQ ID NO: 1166349 - RNA, 19 nt, Homo sapiens
  misc_RNA (1)...(19): siRNA sense strand
aaccaguccugcccuguga

SEQ ID NO: 1166350 - RNA, 19 nt, Homo sapiens
  misc_RNA (1)...(19): siRNA sense strand
caacgggacaggccuccuu

SEQ ID NO: 1166351 - RNA, 19 nt, Homo sapiens
  misc_RNA (1)...(19): siRNA sense strand
gguggaggcguucuuauac

SEQ ID NO: 1166352 - RNA, 19 nt, Homo sapiens
  misc_RNA (1)...(19): siRNA sense strand
ggugguggaggcguucuua

SEQ ID NO: 1166353 - RNA, 19 nt, Homo sapiens
  misc_RNA (1)...(19): siRNA sense strand
gaacgccacccucaaucag

SEQ ID NO: 1166354 - RNA, 19 nt, Homo sapiens
  misc_RNA (1)...(19): siRNA sense strand
gcaggccgagucuuggauu

SEQ ID NO: 1166355 - RNA, 19 nt, Homo sapiens
  misc_RNA (1)...(19): siRNA sense strand
ugguggaggcguucuuaua

SEQ ID NO: 1166356 - RNA, 19 nt, Homo sapiens
  misc_RNA (1)...(19): siRNA sense strand
gacgggagcagguccuaug

SEQ ID NO: 1166357 - RNA, 19 nt, Homo sapiens
  misc_RNA (1)...(19): siRNA sense strand
gccgagucuuggauuagaa

SEQ ID NO: 1166358 - RNA, 19 nt, Homo sapiens
  misc_RNA (1)...(19): siRNA sense strand
acacgagggaagucaguaa

SEQ ID NO: 1166359 - RNA, 19 nt, Homo sapiens
  misc_RNA (1)...(19): siRNA sense strand
ugugagcaccugagcauga

SEQ ID NO: 1166360 - RNA, 19 nt, Homo sapiens
  misc_RNA (1)...(19): siRNA sense strand
ggaagacgugcgcgaugug

SEQ ID NO: 1166361 - RNA, 19 nt, Homo sapiens
  misc_RNA (1)...(19): siRNA sense strand
ggacgacgggacuuacgau

SEQ ID NO: 1166362 - RNA, 19 nt, Homo sapiens
  misc_RNA (1)...(19): siRNA sense strand
ccaaguggaacgaaucgau

SEQ ID NO: 1166363 - RNA, 19 nt, Homo sapiens
  misc_RNA (1)...(19): siRNA sense strand
gaccacauuuuaucaggaa

SEQ ID NO: 1166364 - RNA, 19 nt, Homo sapiens
  misc_RNA (1)...(19): siRNA sense strand
augcagagagccaguguuu

SEQ ID NO: 1166365 - RNA, 19 nt, Homo sapiens
  misc_RNA (1)...(19): siRNA sense strand
gaauacgagacguucuaug

SEQ ID NO: 1166366 - RNA, 19 nt, Homo sapiens
  misc_RNA (1)...(19): siRNA sense strand
ugaucgcgcucuccaacau

SEQ ID NO: 1166367 - RNA, 19 nt, Homo sapiens
  misc_RNA (1)...(19): siRNA sense strand
ccuuggauggugucaguua

SEQ ID NO: 1166368 - RNA, 19 nt, Homo sapiens
  misc_RNA (1)...(19): siRNA sense strand
cagcugccuuccaacuuca

SEQ ID NO: 1166369 - RNA, 19 nt, Homo sapiens
  misc_RNA (1)...(19): siRNA sense strand
gcagcuguguguccuucuc

SEQ ID NO: 1166370 - RNA, 19 nt, Homo sapiens
  misc_RNA (1)...(19): siRNA sense strand
cacagacaauggccagauc

SEQ ID NO: 1166371 - RNA, 19 nt, Homo sapiens
  misc_RNA (1)...(19): siRNA sense strand
gcacgcugaaggcuuacuu

SEQ ID NO: 1166372 - RNA, 19 nt, Homo sapiens
  misc_RNA (1)...(19): siRNA sense strand
cgaacgccacccucaauca

SEQ ID NO: 1166373 - RNA, 19 nt, Homo sapiens
  misc_RNA (1)...(19): siRNA sense strand
cugaacauuugaucuccaa

SEQ ID NO: 1166374 - RNA, 19 nt, Homo sapiens
  misc_RNA (1)...(19): siRNA sense strand
gagaugcuuuuccacuuug

SEQ ID NO: 1166375 - RNA, 19 nt, Homo sapiens
  misc_RNA (1)...(19): siRNA sense strand
ggggagcucuuuccugugu

SEQ ID NO: 1166376 - RNA, 19 nt, Homo sapiens
  misc_RNA (1)...(19): siRNA sense strand
cagagagccaguguuugua

SEQ ID NO: 1166377 - RNA, 19 nt, Homo sapiens
  misc_RNA (1)...(19): siRNA sense strand
caacgcaagcaucggacuu

SEQ ID NO: 1166378 - RNA, 19 nt, Homo sapiens
  misc_RNA (1)...(19): siRNA sense strand
gggcugaacauuugaucuc

SEQ ID NO: 1166379 - RNA, 19 nt, Homo sapiens
  misc_RNA (1)...(19): siRNA sense strand
caacuucaccccuguuuuc

SEQ ID NO: 1166380 - RNA, 19 nt, Homo sapiens
  misc_RNA (1)...(19): siRNA sense strand
auaaccagacugugacauu

SEQ ID NO: 1166381 - RNA, 19 nt, Homo sapiens
  misc_RNA (1)...(19): siRNA sense strand
gugaggagcccaggaacga

SEQ ID NO: 1166382 - RNA, 19 nt, Homo sapiens
  misc_RNA (1)...(19): siRNA sense strand
ccuaugcccuguuucucua

SEQ ID NO: 1166383 - RNA, 19 nt, Homo sapiens
  misc_RNA (1)...(19): siRNA sense strand
ggauuagaaagaucacaaa

SEQ ID NO: 1166384 - RNA, 19 nt, Homo sapiens
  misc_RNA (1)...(19): siRNA sense strand
ggucaaugcccacgccuau

SEQ ID NO: 1166385 - RNA, 19 nt, Homo sapiens
  misc_RNA (1)...(19): siRNA sense strand
gaucaucuucccagaguca

SEQ ID NO: 1166386 - RNA, 19 nt, Homo sapiens
  misc_RNA (1)...(19): siRNA sense strand
caggccgagucuuggauua

SEQ ID NO: 1166387 - RNA, 19 nt, Homo sapiens
  misc_RNA (1)...(19): siRNA sense strand
ggccgagucuuggauuaga

SEQ ID NO: 1166388 - RNA, 19 nt, Homo sapiens
  misc_RNA (1)...(19): siRNA sense strand
ggaauacgagacguucuau

SEQ ID NO: 1166389 - RNA, 19 nt, Homo sapiens
  misc_RNA (1)...(19): siRNA sense strand
gcuccucucuccgugauuc

SEQ ID NO: 1166390 - RNA, 19 nt, Homo sapiens
  misc_RNA (1)...(19): siRNA sense strand
gcaggccgagucuuggauu

SEQ ID NO: 1166391 - RNA, 19 nt, Homo sapiens
  misc_RNA (1)...(19): siRNA sense strand
gacgggagcagguccuaug

SEQ ID NO: 1166392 - RNA, 19 nt, Homo sapiens
  misc_RNA (1)...(19): siRNA sense strand
gccgagucuuggauuagaa

SEQ ID NO: 1166393 - RNA, 19 nt, Homo sapiens
  misc_RNA (1)...(19): siRNA sense strand
gaccacauuuuaucaggaa

SEQ ID NO: 1166394 - RNA, 19 nt, Homo sapiens
  misc_RNA (1)...(19): siRNA sense strand
gaauacgagacguucuaug

SEQ ID NO: 1166395 - RNA, 19 nt, Homo sapiens
  misc_RNA (1)...(19): siRNA sense strand
cacagacaauggccagauc

SEQ ID NO: 1166396 - RNA, 19 nt, Homo sapiens
  misc_RNA (1)...(19): siRNA sense strand
ggaggaccguggacuucac

SEQ ID NO: 1166397 - RNA, 19 nt, Homo sapiens
  misc_RNA (1)...(19): siRNA sense strand
aauacgagacguucuaugg

SEQ ID NO: 1166398 - RNA, 19 nt, Homo sapiens
  misc_RNA (1)...(19): siRNA sense strand
cugggacgaugcugacuuc

SEQ ID NO: 1166399 - RNA, 19 nt, Homo sapiens
  misc_RNA (1)...(19): siRNA sense strand
aggaauacgagacguucua

SEQ ID NO: 1166400 - RNA, 19 nt, Homo sapiens
  misc_RNA (1)...(19): siRNA sense strand
ggaaugaccuggcagauca

SEQ ID NO: 1166401 - RNA, 19 nt, Homo sapiens
  misc_RNA (1)...(19): siRNA sense strand
ccaagucgcuggagccauu

SEQ ID NO: 1166402 - RNA, 19 nt, Homo sapiens
  misc_RNA (1)...(19): siRNA sense strand
gcagagagccaguguuugu

SEQ ID NO: 1166403 - RNA, 19 nt, Homo sapiens
  misc_RNA (1)...(19): siRNA sense strand
uaaccagacugugacauuu

SEQ ID NO: 1166404 - RNA, 19 nt, Homo sapiens
  misc_RNA (1)...(19): siRNA sense strand
gcaagaagugccaagauug

SEQ ID NO: 1166405 - RNA, 19 nt, Homo sapiens
  misc_RNA (1)...(19): siRNA sense strand
gaaaacagcccacugaugu

SEQ ID NO: 1166406 - RNA, 19 nt, Homo sapiens
  misc_RNA (1)...(19): siRNA sense strand
ggacuguggucugccauug

SEQ ID NO: 1166407 - RNA, 19 nt, Homo sapiens
  misc_RNA (1)...(19): siRNA sense strand
gggaagaaaggcccaacua

SEQ ID NO: 1166408 - RNA, 19 nt, Homo sapiens
  misc_RNA (1)...(19): siRNA sense strand
gaacuccuccuuccugcuu

SEQ ID NO: 1166409 - RNA, 19 nt, Homo sapiens
  misc_RNA (1)...(19): siRNA sense strand
uccaagggcugcaguucua

SEQ ID NO: 1166410 - RNA, 19 nt, Homo sapiens
  misc_RNA (1)...(19): siRNA sense strand
caaugguggucgugugauu

SEQ ID NO: 1166411 - RNA, 19 nt, Homo sapiens
  misc_RNA (1)...(19): siRNA sense strand
ggagagguaucgcccugau

SEQ ID NO: 1166412 - RNA, 19 nt, Homo sapiens
  misc_RNA (1)...(19): siRNA sense strand
ggagaugcuuuuccacuuu

SEQ ID NO: 1166413 - RNA, 19 nt, Homo sapiens
  misc_RNA (1)...(19): siRNA sense strand
ccuaugcccuguuucucua

SEQ ID NO: 1166414 - RNA, 19 nt, Homo sapiens
  misc_RNA (1)...(19): siRNA sense strand
gccauucacucuggagauu

SEQ ID NO: 1166415 - RNA, 19 nt, Homo sapiens
  misc_RNA (1)...(19): siRNA sense strand
gcagggacgacgggacuua

SEQ ID NO: 1166416 - RNA, 19 nt, Homo sapiens
  misc_RNA (1)...(19): siRNA sense strand
gggcagaccacgcugauuc

SEQ ID NO: 1166417 - RNA, 19 nt, Homo sapiens
  misc_RNA (1)...(19): siRNA sense strand
gcaagcaucggacuucaca

SEQ ID NO: 1166418 - RNA, 19 nt, Homo sapiens
  misc_RNA (1)...(19): siRNA sense strand
ugacaagcccuaccucugu

SEQ ID NO: 1166419 - RNA, 19 nt, Homo sapiens
  misc_RNA (1)...(19): siRNA sense strand
gcuccugggcugaacauuu

SEQ ID NO: 1166420 - RNA, 19 nt, Homo sapiens
  misc_RNA (1)...(19): siRNA sense strand
ccagcugccuuccaacuuc

SEQ ID NO: 1166421 - RNA, 19 nt, Homo sapiens
  misc_RNA (1)...(19): siRNA sense strand
gcaccgacuuggagcucuu

SEQ ID NO: 1166422 - RNA, 19 nt, Homo sapiens
  misc_RNA (1)...(19): siRNA sense strand
gccaguguuuguacaauca

SEQ ID NO: 1166423 - RNA, 19 nt, Homo sapiens
  misc_RNA (1)...(19): siRNA sense strand
agcaagaagugccaagauu

SEQ ID NO: 1166424 - RNA, 19 nt, Homo sapiens
  misc_RNA (1)...(19): siRNA sense strand
ggauuagaaagaucacaaa

SEQ ID NO: 1166425 - RNA, 19 nt, Homo sapiens
  misc_RNA (1)...(19): siRNA sense strand
acuuggagcucuuugagaa

SEQ ID NO: 1166426 - RNA, 19 nt, Homo sapiens
  misc_RNA (1)...(19): siRNA sense strand
ggaagaaaggcccaacuac

SEQ ID NO: 1166427 - RNA, 19 nt, Homo sapiens
  misc_RNA (1)...(19): siRNA sense strand
ggucaaugcccacgccuau

SEQ ID NO: 1166428 - RNA, 19 nt, Homo sapiens
  misc_RNA (1)...(19): siRNA sense strand
gaucaucuucccagaguca

SEQ ID NO: 1166429 - RNA, 19 nt, Homo sapiens
  misc_RNA (1)...(19): siRNA sense strand
ggagcucuuuccuguguca

SEQ ID NO: 1166430 - RNA, 19 nt, Homo sapiens
  misc_RNA (1)...(19): siRNA sense strand
cuccugggcugaacauuug

SEQ ID NO: 1166431 - RNA, 19 nt, Homo sapiens
  misc_RNA (1)...(19): siRNA sense strand
caggccgagucuuggauua

SEQ ID NO: 1166432 - RNA, 19 nt, Homo sapiens
  misc_RNA (1)...(19): siRNA sense strand
gcucuuuccugugucagaa

SEQ ID NO: 1166433 - RNA, 19 nt, Homo sapiens
  misc_RNA (1)...(19): siRNA sense strand
ggccgagucuuggauuaga

SEQ ID NO: 1166434 - RNA, 19 nt, Homo sapiens
  misc_RNA (1)...(19): siRNA sense strand
gcagcguccuuggcaguug

SEQ ID NO: 1166435 - RNA, 19 nt, Homo sapiens
  misc_RNA (1)...(19): siRNA sense strand
gagccaguguuuguacaau

SEQ ID NO: 1166436 - RNA, 19 nt, Homo sapiens
  misc_RNA (1)...(19): siRNA sense strand
gagagccaguguuuguaca

SEQ ID NO: 1166437 - RNA, 19 nt, Homo sapiens
  misc_RNA (1)...(19): siRNA sense strand
ggaauacgagacguucuau

SEQ ID NO: 1166438 - RNA, 19 nt, Homo sapiens
  misc_RNA (1)...(19): siRNA sense strand
cgacgggacuuacgauucc

SEQ ID NO: 1166439 - RNA, 19 nt, Homo sapiens
  misc_RNA (1)...(19): siRNA sense strand
gaacauuugaucuccaacu

SEQ ID NO: 1166440 - RNA, 19 nt, Homo sapiens
  misc_RNA (1)...(19): siRNA sense strand
gcuccucucuccgugauuc

SEQ ID NO: 1166441 - RNA, 19 nt, Homo sapiens
  misc_RNA (1)...(19): siRNA sense strand
acgccacccucaaucagua

SEQ ID NO: 1166442 - RNA, 19 nt, Homo sapiens
  misc_RNA (1)...(19): siRNA sense strand
ccacaucaccaccuuggau

SEQ ID NO: 1166443 - RNA, 19 nt, Homo sapiens
  misc_RNA (1)...(19): siRNA sense strand
ucaguuacaccuucaaugg

SEQ ID NO: 1166444 - RNA, 19 nt, Homo sapiens
  misc_RNA (1)...(19): siRNA sense strand
aaccaguccugcccuguga

SEQ ID NO: 1166445 - RNA, 19 nt, Homo sapiens
  misc_RNA (1)...(19): siRNA sense strand
caacgggacaggccuccuu

SEQ ID NO: 1166446 - RNA, 19 nt, Homo sapiens
  misc_RNA (1)...(19): siRNA sense strand
gaacgccacccucaaucag

SEQ ID NO: 1166447 - RNA, 19 nt, Homo sapiens
  misc_RNA (1)...(19): siRNA sense strand
gcaggccgagucuuggauu

SEQ ID NO: 1166448 - RNA, 19 nt, Homo sapiens
  misc_RNA (1)...(19): siRNA sense strand
gacgggagcagguccuaug

SEQ ID NO: 1166449 - RNA, 19 nt, Homo sapiens
  misc_RNA (1)...(19): siRNA sense strand
gccgagucuuggauuagaa

SEQ ID NO: 1166450 - RNA, 19 nt, Homo sapiens
  misc_RNA (1)...(19): siRNA sense strand
acacgagggaagucaguaa

SEQ ID NO: 1166451 - RNA, 19 nt, Homo sapiens
  misc_RNA (1)...(19): siRNA sense strand
gaccacauuuuaucaggaa

SEQ ID NO: 1166452 - RNA, 19 nt, Homo sapiens
  misc_RNA (1)...(19): siRNA sense strand
augcagagagccaguguuu

SEQ ID NO: 1166453 - RNA, 19 nt, Homo sapiens
  misc_RNA (1)...(19): siRNA sense strand
ugaucgcgcucuccaacau

SEQ ID NO: 1166454 - RNA, 19 nt, Homo sapiens
  misc_RNA (1)...(19): siRNA sense strand
ccuuggauggugucaguua

SEQ ID NO: 1166455 - RNA, 19 nt, Homo sapiens
  misc_RNA (1)...(19): siRNA sense strand
ggacgacgggacuuacgau

SEQ ID NO: 1166456 - RNA, 19 nt, Homo sapiens
  misc_RNA (1)...(19): siRNA sense strand
gaauacgagacguucuaug

SEQ ID NO: 1166457 - RNA, 19 nt, Homo sapiens
  misc_RNA (1)...(19): siRNA sense strand
cacagacaauggccagauc

SEQ ID NO: 1166458 - RNA, 19 nt, Homo sapiens
  misc_RNA (1)...(19): siRNA sense strand
cgaacgccacccucaauca

SEQ ID NO: 1166459 - RNA, 19 nt, Homo sapiens
  misc_RNA (1)...(19): siRNA sense strand
cugaacauuugaucuccaa

SEQ ID NO: 1166460 - RNA, 19 nt, Homo sapiens
  misc_RNA (1)...(19): siRNA sense strand
cagcugccuuccaacuuca

SEQ ID NO: 1166461 - RNA, 19 nt, Homo sapiens
  misc_RNA (1)...(19): siRNA sense strand
gagaugcuuuuccacuuug

SEQ ID NO: 1166462 - RNA, 19 nt, Homo sapiens
  misc_RNA (1)...(19): siRNA sense strand
ggggagcucuuuccugugu

SEQ ID NO: 1166463 - RNA, 19 nt, Homo sapiens
  misc_RNA (1)...(19): siRNA sense strand
cagagagccaguguuugua

SEQ ID NO: 1166464 - RNA, 19 nt, Homo sapiens
  misc_RNA (1)...(19): siRNA sense strand
caacgcaagcaucggacuu

SEQ ID NO: 1166465 - RNA, 19 nt, Homo sapiens
  misc_RNA (1)...(19): siRNA sense strand
gggcugaacauuugaucuc

SEQ ID NO: 1166466 - RNA, 19 nt, Homo sapiens
  misc_RNA (1)...(19): siRNA sense strand
caacuucaccccuguuuuc

SEQ ID NO: 1166467 - RNA, 19 nt, Homo sapiens
  misc_RNA (1)...(19): siRNA sense strand
ggaaugacaagcccuaccu

SEQ ID NO: 1166468 - RNA, 19 nt, Homo sapiens
  misc_RNA (1)...(19): siRNA sense strand
auaaccagacugugacauu

SEQ ID NO: 1166469 - RNA, 19 nt, Homo sapiens
  misc_RNA (1)...(19): siRNA sense strand
aauacgagacguucuaugg

SEQ ID NO: 1166470 - RNA, 19 nt, Homo sapiens
  misc_RNA (1)...(19): siRNA sense strand
agacagcugcaccgacuug

SEQ ID NO: 1166471 - RNA, 19 nt, Homo sapiens
  misc_RNA (1)...(19): siRNA sense strand
uccguguccugcuggauaa

SEQ ID NO: 1166472 - RNA, 19 nt, Homo sapiens
  misc_RNA (1)...(19): siRNA sense strand
ggaggaccguggacuucac

SEQ ID NO: 1166473 - RNA, 19 nt, Homo sapiens
  misc_RNA (1)...(19): siRNA sense strand
cugggacgaugcugacuuc

SEQ ID NO: 1166474 - RNA, 19 nt, Homo sapiens
  misc_RNA (1)...(19): siRNA sense strand
ccacgugggcugugcuaca

SEQ ID NO: 1166475 - RNA, 19 nt, Homo sapiens
  misc_RNA (1)...(19): siRNA sense strand
aggaauacgagacguucua

SEQ ID NO: 1166476 - RNA, 19 nt, Homo sapiens
  misc_RNA (1)...(19): siRNA sense strand
uuggagcucuuugagaaug

SEQ ID NO: 1166477 - RNA, 19 nt, Homo sapiens
  misc_RNA (1)...(19): siRNA sense strand
gcaagaacuuccauuauug

SEQ ID NO: 1166478 - RNA, 19 nt, Homo sapiens
  misc_RNA (1)...(19): siRNA sense strand
gaaagaaagggaaguauuu

SEQ ID NO: 1166479 - RNA, 19 nt, Homo sapiens
  misc_RNA (1)...(19): siRNA sense strand
uuaaauagcucaccaauca

SEQ ID NO: 1166480 - RNA, 19 nt, Homo sapiens
  misc_RNA (1)...(19): siRNA sense strand
gacagaagguggugaagua

SEQ ID NO: 1166481 - RNA, 19 nt, Homo sapiens
  misc_RNA (1)...(19): siRNA sense strand
gaaauacgcagaugacaaa

SEQ ID NO: 1166482 - RNA, 19 nt, Homo sapiens
  misc_RNA (1)...(19): siRNA sense strand
ugacacagcucaagaaugu

SEQ ID NO: 1166483 - RNA, 19 nt, Homo sapiens
  misc_RNA (1)...(19): siRNA sense strand
ugacaaggaugaaauagaa

SEQ ID NO: 1166484 - RNA, 19 nt, Homo sapiens
  misc_RNA (1)...(19): siRNA sense strand
ccaaagaacuaaacauuca

SEQ ID NO: 1166485 - RNA, 19 nt, Homo sapiens
  misc_RNA (1)...(19): siRNA sense strand
gagaagccauuaucagaaa

SEQ ID NO: 1166486 - RNA, 19 nt, Homo sapiens
  misc_RNA (1)...(19): siRNA sense strand
uaaagcagguuuggcauua

SEQ ID NO: 1166487 - RNA, 19 nt, Homo sapiens
  misc_RNA (1)...(19): siRNA sense strand
gagaaacaaugguaaaugu

SEQ ID NO: 1166488 - RNA, 19 nt, Homo sapiens
  misc_RNA (1)...(19): siRNA sense strand
gcacuacuauccagauuug

SEQ ID NO: 1166489 - RNA, 19 nt, Homo sapiens
  misc_RNA (1)...(19): siRNA sense strand
ggaaagcagagaaccauua

SEQ ID NO: 1166490 - RNA, 19 nt, Homo sapiens
  misc_RNA (1)...(19): siRNA sense strand
ggagacacagugacuauua

SEQ ID NO: 1166491 - RNA, 19 nt, Homo sapiens
  misc_RNA (1)...(19): siRNA sense strand
gaacuuacucugaugaauu

SEQ ID NO: 1166492 - RNA, 19 nt, Homo sapiens
  misc_RNA (1)...(19): siRNA sense strand
caaggcauauugauuugua

SEQ ID NO: 1166493 - RNA, 19 nt, Homo sapiens
  misc_RNA (1)...(19): siRNA sense strand
ggcaauacaucagguguua

SEQ ID NO: 1166494 - RNA, 19 nt, Homo sapiens
  misc_RNA (1)...(19): siRNA sense strand
gaacaugugauugcaauaa

SEQ ID NO: 1166495 - RNA, 19 nt, Homo sapiens
  misc_RNA (1)...(19): siRNA sense strand
ucacaaggcauauugauuu

SEQ ID NO: 1166496 - RNA, 19 nt, Homo sapiens
  misc_RNA (1)...(19): siRNA sense strand
aaacagagccagagguuaa

SEQ ID NO: 1166497 - RNA, 19 nt, Homo sapiens
  misc_RNA (1)...(19): siRNA sense strand
aaugugagcuuguucauga

SEQ ID NO: 1166498 - RNA, 19 nt, Homo sapiens
  misc_RNA (1)...(19): siRNA sense strand
gaggauauaguggaaauua

SEQ ID NO: 1166499 - RNA, 19 nt, Homo sapiens
  misc_RNA (1)...(19): siRNA sense strand
gaaaguacauuggcuaugc

SEQ ID NO: 1166500 - RNA, 19 nt, Homo sapiens
  misc_RNA (1)...(19): siRNA sense strand
agaagacgcugaggauaua

SEQ ID NO: 1166501 - RNA, 19 nt, Homo sapiens
  misc_RNA (1)...(19): siRNA sense strand
cgauagcucuccuuugauu

SEQ ID NO: 1166502 - RNA, 19 nt, Homo sapiens
  misc_RNA (1)...(19): siRNA sense strand
uauagcaacugaacuaaga

SEQ ID NO: 1166503 - RNA, 19 nt, Homo sapiens
  misc_RNA (1)...(19): siRNA sense strand
gaaggauugucuaaugaug

SEQ ID NO: 1166504 - RNA, 19 nt, Homo sapiens
  misc_RNA (1)...(19): siRNA sense strand
cacaguagcucguaugaau

SEQ ID NO: 1166505 - RNA, 19 nt, Homo sapiens
  misc_RNA (1)...(19): siRNA sense strand
caggaaggauugucuaaug

SEQ ID NO: 1166506 - RNA, 19 nt, Homo sapiens
  misc_RNA (1)...(19): siRNA sense strand
ugcaagaacuuccauuauu

SEQ ID NO: 1166507 - RNA, 19 nt, Homo sapiens
  misc_RNA (1)...(19): siRNA sense strand
ggugggaacuucucaggaa

SEQ ID NO: 1166508 - RNA, 19 nt, Homo sapiens
  misc_RNA (1)...(19): siRNA sense strand
cacagaagcugcucgaguu

SEQ ID NO: 1166509 - RNA, 19 nt, Homo sapiens
  misc_RNA (1)...(19): siRNA sense strand
gcagauugccaaagaacua

SEQ ID NO: 1166510 - RNA, 19 nt, Homo sapiens
  misc_RNA (1)...(19): siRNA sense strand
ugagaagauucaagcauuu

SEQ ID NO: 1166511 - RNA, 19 nt, Homo sapiens
  misc_RNA (1)...(19): siRNA sense strand
ggacgaggaagauuucaaa

SEQ ID NO: 1166512 - RNA, 19 nt, Homo sapiens
  misc_RNA (1)...(19): siRNA sense strand
uacaucagguguuaacuaa

SEQ ID NO: 1166513 - RNA, 19 nt, Homo sapiens
  misc_RNA (1)...(19): siRNA sense strand
gagagaagcaggucggauu

SEQ ID NO: 1166514 - RNA, 19 nt, Homo sapiens
  misc_RNA (1)...(19): siRNA sense strand
gcuaggaacuuacucugau

SEQ ID NO: 1166515 - RNA, 19 nt, Homo sapiens
  misc_RNA (1)...(19): siRNA sense strand
ggaagcuggugcccuggua

SEQ ID NO: 1166516 - RNA, 19 nt, Homo sapiens
  misc_RNA (1)...(19): siRNA sense strand
gcaugcagcugaguuacaa

SEQ ID NO: 1166517 - RNA, 19 nt, Homo sapiens
  misc_RNA (1)...(19): siRNA sense strand
gaaaauacauugcucuaag

SEQ ID NO: 1166518 - RNA, 19 nt, Homo sapiens
  misc_RNA (1)...(19): siRNA sense strand
aacauuggaucgauucaua

SEQ ID NO: 1166519 - RNA, 19 nt, Homo sapiens
  misc_RNA (1)...(19): siRNA sense strand
ggaaacagagccagagguu

SEQ ID NO: 1166520 - RNA, 19 nt, Homo sapiens
  misc_RNA (1)...(19): siRNA sense strand
gaucgauucauaccauaua

SEQ ID NO: 1166521 - RNA, 19 nt, Homo sapiens
  misc_RNA (1)...(19): siRNA sense strand
ucaaauacuuccguacuug

SEQ ID NO: 1166522 - RNA, 19 nt, Homo sapiens
  misc_RNA (1)...(19): siRNA sense strand
guacaacuaugagccuuug

SEQ ID NO: 1166523 - RNA, 19 nt, Homo sapiens
  misc_RNA (1)...(19): siRNA sense strand
gcuggaagcuuuauuucuc

SEQ ID NO: 1166524 - RNA, 19 nt, Homo sapiens
  misc_RNA (1)...(19): siRNA sense strand
guauagaggcagaggauuu

SEQ ID NO: 1166525 - RNA, 19 nt, Homo sapiens
  misc_RNA (1)...(19): siRNA sense strand
caacguugcugaaagaacu

SEQ ID NO: 1166526 - RNA, 19 nt, Homo sapiens
  misc_RNA (1)...(19): siRNA sense strand
uggaggacauuacaauaaa

SEQ ID NO: 1166527 - RNA, 19 nt, Homo sapiens
  misc_RNA (1)...(19): siRNA sense strand
gaauugaugucugaugauc

SEQ ID NO: 1166528 - RNA, 19 nt, Homo sapiens
  misc_RNA (1)...(19): siRNA sense strand
gauaguuccucuggagauu

SEQ ID NO: 1166529 - RNA, 19 nt, Homo sapiens
  misc_RNA (1)...(19): siRNA sense strand
aaacguacuucugaacaaa

SEQ ID NO: 1166530 - RNA, 19 nt, Homo sapiens
  misc_RNA (1)...(19): siRNA sense strand
cagcaugguucuggaauga

SEQ ID NO: 1166531 - RNA, 19 nt, Homo sapiens
  misc_RNA (1)...(19): siRNA sense strand
caaagaagacgcugaggau

SEQ ID NO: 1166532 - RNA, 19 nt, Homo sapiens
  misc_RNA (1)...(19): siRNA sense strand
gaaacagagccagagguua

SEQ ID NO: 1166533 - RNA, 19 nt, Homo sapiens
  misc_RNA (1)...(19): siRNA sense strand
ugauggaguucucacuuaa

SEQ ID NO: 1166534 - RNA, 19 nt, Homo sapiens
  misc_RNA (1)...(19): siRNA sense strand
guucgugucaguaauauaa

SEQ ID NO: 1166535 - RNA, 19 nt, Homo sapiens
  misc_RNA (1)...(19): siRNA sense strand
gcaaggguguacaacuaug

SEQ ID NO: 1166536 - RNA, 19 nt, Homo sapiens
  misc_RNA (1)...(19): siRNA sense strand
gaagcuuuauuucucugaa

SEQ ID NO: 1166537 - RNA, 19 nt, Homo sapiens
  misc_RNA (1)...(19): siRNA sense strand
ugaccaggguuaccucuug

SEQ ID NO: 1166538 - RNA, 19 nt, Homo sapiens
  misc_RNA (1)...(19): siRNA sense strand
ggauauaguggaaauuaug

SEQ ID NO: 1166539 - RNA, 19 nt, Homo sapiens
  misc_RNA (1)...(19): siRNA sense strand
gagcaagguuggaauugag

SEQ ID NO: 1166540 - RNA, 19 nt, Homo sapiens
  misc_RNA (1)...(19): siRNA sense strand
gagcaaauuacuauggaaa

SEQ ID NO: 1166541 - RNA, 19 nt, Homo sapiens
  misc_RNA (1)...(19): siRNA sense strand
agcgauagcucuccuuuga

SEQ ID NO: 1166542 - RNA, 19 nt, Homo sapiens
  misc_RNA (1)...(19): siRNA sense strand
uaccagauauagcaacuga

SEQ ID NO: 1166543 - RNA, 19 nt, Homo sapiens
  misc_RNA (1)...(19): siRNA sense strand
cagauuugauuuggucuuu

SEQ ID NO: 1166544 - RNA, 19 nt, Homo sapiens
  misc_RNA (1)...(19): siRNA sense strand
ggagaaacaaugguaaaug

SEQ ID NO: 1166545 - RNA, 19 nt, Homo sapiens
  misc_RNA (1)...(19): siRNA sense strand
cgaggaagauuucaaagcu

SEQ ID NO: 1166546 - RNA, 19 nt, Homo sapiens
  misc_RNA (1)...(19): siRNA sense strand
gagcuuuccucuuccagau

SEQ ID NO: 1166547 - RNA, 19 nt, Homo sapiens
  misc_RNA (1)...(19): siRNA sense strand
ggaaugagcaacaggucaa

SEQ ID NO: 1166548 - RNA, 19 nt, Homo sapiens
  misc_RNA (1)...(19): siRNA sense strand
cgagcaagguuggaauuga

SEQ ID NO: 1166549 - RNA, 19 nt, Homo sapiens
  misc_RNA (1)...(19): siRNA sense strand
gaaagcagagaaccauuag

SEQ ID NO: 1166550 - RNA, 19 nt, Homo sapiens
  misc_RNA (1)...(19): siRNA sense strand
caaaguauuagucuugcua

SEQ ID NO: 1166551 - RNA, 19 nt, Homo sapiens
  misc_RNA (1)...(19): siRNA sense strand
uugauggaguucucacuua

SEQ ID NO: 1166552 - RNA, 19 nt, Homo sapiens
  misc_RNA (1)...(19): siRNA sense strand
ccacauccuuguuguugga

SEQ ID NO: 1166553 - RNA, 19 nt, Homo sapiens
  misc_RNA (1)...(19): siRNA sense strand
gagaggaagcaaccaaaga

SEQ ID NO: 1166554 - RNA, 19 nt, Homo sapiens
  misc_RNA (1)...(19): siRNA sense strand
ugagcaucaugaucacuua

SEQ ID NO: 1166555 - RNA, 19 nt, Homo sapiens
  misc_RNA (1)...(19): siRNA sense strand
cagcaaaguauuagucuug

SEQ ID NO: 1166556 - RNA, 19 nt, Homo sapiens
  misc_RNA (1)...(19): siRNA sense strand
ggucugacgguaacucuuu

SEQ ID NO: 1166557 - RNA, 19 nt, Homo sapiens
  misc_RNA (1)...(19): siRNA sense strand
guggagaaauucagagcuu

SEQ ID NO: 1166558 - RNA, 19 nt, Homo sapiens
  misc_RNA (1)...(19): siRNA sense strand
ggaacuuacucugaugaau

SEQ ID NO: 1166559 - RNA, 19 nt, Homo sapiens
  misc_RNA (1)...(19): siRNA sense strand
gaaacaauagaucccauuc

SEQ ID NO: 1166560 - RNA, 19 nt, Homo sapiens
  misc_RNA (1)...(19): siRNA sense strand
cgaugaauuugauaagaug

SEQ ID NO: 1166561 - RNA, 19 nt, Homo sapiens
  misc_RNA (1)...(19): siRNA sense strand
gaucaagguauuuguggaa

SEQ ID NO: 1166562 - RNA, 19 nt, Homo sapiens
  misc_RNA (1)...(19): siRNA sense strand
gagagaaagagaacacaga

SEQ ID NO: 1166563 - RNA, 19 nt, Homo sapiens
  misc_RNA (1)...(19): siRNA sense strand
gaccaggguuaccucuuga

SEQ ID NO: 1166564 - RNA, 19 nt, Homo sapiens
  misc_RNA (1)...(19): siRNA sense strand
cauuagcagugccacagua

SEQ ID NO: 1166565 - RNA, 19 nt, Homo sapiens
  misc_RNA (1)...(19): siRNA sense strand
gacgguaacucuuucaaaa

SEQ ID NO: 1166566 - RNA, 19 nt, Homo sapiens
  misc_RNA (1)...(19): siRNA sense strand
cgaggcaggucauuuacug

SEQ ID NO: 1166567 - RNA, 19 nt, Homo sapiens
  misc_RNA (1)...(19): siRNA sense strand
aauacagucuucccacaaa

SEQ ID NO: 1166568 - RNA, 19 nt, Homo sapiens
  misc_RNA (1)...(19): siRNA sense strand
caucagguguuaacuaagg

SEQ ID NO: 1166569 - RNA, 19 nt, Homo sapiens
  misc_RNA (1)...(19): siRNA sense strand
guaugacaaggaugaaaua

SEQ ID NO: 1166570 - RNA, 19 nt, Homo sapiens
  misc_RNA (1)...(19): siRNA sense strand
cacaaggcauauugauuug

SEQ ID NO: 1166571 - RNA, 19 nt, Homo sapiens
  misc_RNA (1)...(19): siRNA sense strand
caacaggucaacagcgaaa

SEQ ID NO: 1166572 - RNA, 19 nt, Homo sapiens
  misc_RNA (1)...(19): siRNA sense strand
gccauuaucagaaagacua

SEQ ID NO: 1166573 - RNA, 19 nt, Homo sapiens
  misc_RNA (1)...(19): siRNA sense strand
ggaggacauuacaauaaag

SEQ ID NO: 1166574 - RNA, 19 nt, Homo sapiens
  misc_RNA (1)...(19): siRNA sense strand
uggaaucgaugaauuugau

SEQ ID NO: 1166575 - RNA, 19 nt, Homo sapiens
  misc_RNA (1)...(19): siRNA sense strand
ugucgaggcaggucauuua

SEQ ID NO: 1166576 - RNA, 19 nt, Homo sapiens
  misc_RNA (1)...(19): siRNA sense strand
gcagcaaaguauuagucuu

SEQ ID NO: 1166577 - RNA, 19 nt, Homo sapiens
  misc_RNA (1)...(19): siRNA sense strand
gcaagaacuuccauuauug

SEQ ID NO: 1166578 - RNA, 19 nt, Homo sapiens
  misc_RNA (1)...(19): siRNA sense strand
gaaagaaagggaaguauuu

SEQ ID NO: 1166579 - RNA, 19 nt, Homo sapiens
  misc_RNA (1)...(19): siRNA sense strand
uuaaauagcucaccaauca

SEQ ID NO: 1166580 - RNA, 19 nt, Homo sapiens
  misc_RNA (1)...(19): siRNA sense strand
gacagaagguggugaagua

SEQ ID NO: 1166581 - RNA, 19 nt, Homo sapiens
  misc_RNA (1)...(19): siRNA sense strand
gaaauacgcagaugacaaa

SEQ ID NO: 1166582 - RNA, 19 nt, Homo sapiens
  misc_RNA (1)...(19): siRNA sense strand
ugacacagcucaagaaugu

SEQ ID NO: 1166583 - RNA, 19 nt, Homo sapiens
  misc_RNA (1)...(19): siRNA sense strand
ugacaaggaugaaauagaa

SEQ ID NO: 1166584 - RNA, 19 nt, Homo sapiens
  misc_RNA (1)...(19): siRNA sense strand
ccaaagaacuaaacauuca

SEQ ID NO: 1166585 - RNA, 19 nt, Homo sapiens
  misc_RNA (1)...(19): siRNA sense strand
gagaagccauuaucagaaa

SEQ ID NO: 1166586 - RNA, 19 nt, Homo sapiens
  misc_RNA (1)...(19): siRNA sense strand
uaaagcagguuuggcauua

SEQ ID NO: 1166587 - RNA, 19 nt, Homo sapiens
  misc_RNA (1)...(19): siRNA sense strand
gagaaacaaugguaaaugu

SEQ ID NO: 1166588 - RNA, 19 nt, Homo sapiens
  misc_RNA (1)...(19): siRNA sense strand
gcacuacuauccagauuug

SEQ ID NO: 1166589 - RNA, 19 nt, Homo sapiens
  misc_RNA (1)...(19): siRNA sense strand
ggaaagcagagaaccauua

SEQ ID NO: 1166590 - RNA, 19 nt, Homo sapiens
  misc_RNA (1)...(19): siRNA sense strand
ggagacacagugacuauua

SEQ ID NO: 1166591 - RNA, 19 nt, Homo sapiens
  misc_RNA (1)...(19): siRNA sense strand
gaacuuacucugaugaauu

SEQ ID NO: 1166592 - RNA, 19 nt, Homo sapiens
  misc_RNA (1)...(19): siRNA sense strand
caaggcauauugauuugua

SEQ ID NO: 1166593 - RNA, 19 nt, Homo sapiens
  misc_RNA (1)...(19): siRNA sense strand
ggcaauacaucagguguua

SEQ ID NO: 1166594 - RNA, 19 nt, Homo sapiens
  misc_RNA (1)...(19): siRNA sense strand
gaacaugugauugcaauaa

SEQ ID NO: 1166595 - RNA, 19 nt, Homo sapiens
  misc_RNA (1)...(19): siRNA sense strand
ucacaaggcauauugauuu

SEQ ID NO: 1166596 - RNA, 19 nt, Homo sapiens
  misc_RNA (1)...(19): siRNA sense strand
aaacagagccagagguuaa

SEQ ID NO: 1166597 - RNA, 19 nt, Homo sapiens
  misc_RNA (1)...(19): siRNA sense strand
aaugugagcuuguucauga

SEQ ID NO: 1166598 - RNA, 19 nt, Homo sapiens
  misc_RNA (1)...(19): siRNA sense strand
gaggauauaguggaaauua

SEQ ID NO: 1166599 - RNA, 19 nt, Homo sapiens
  misc_RNA (1)...(19): siRNA sense strand
gaaaguacauuggcuaugc

SEQ ID NO: 1166600 - RNA, 19 nt, Homo sapiens
  misc_RNA (1)...(19): siRNA sense strand
agaagacgcugaggauaua

SEQ ID NO: 1166601 - RNA, 19 nt, Homo sapiens
  misc_RNA (1)...(19): siRNA sense strand
cgauagcucuccuuugauu

SEQ ID NO: 1166602 - RNA, 19 nt, Homo sapiens
  misc_RNA (1)...(19): siRNA sense strand
uauagcaacugaacuaaga

SEQ ID NO: 1166603 - RNA, 19 nt, Homo sapiens
  misc_RNA (1)...(19): siRNA sense strand
gaaggauugucuaaugaug

SEQ ID NO: 1166604 - RNA, 19 nt, Homo sapiens
  misc_RNA (1)...(19): siRNA sense strand
cacaguagcucguaugaau

SEQ ID NO: 1166605 - RNA, 19 nt, Homo sapiens
  misc_RNA (1)...(19): siRNA sense strand
caggaaggauugucuaaug

SEQ ID NO: 1166606 - RNA, 19 nt, Homo sapiens
  misc_RNA (1)...(19): siRNA sense strand
ugcaagaacuuccauuauu

SEQ ID NO: 1166607 - RNA, 19 nt, Homo sapiens
  misc_RNA (1)...(19): siRNA sense strand
ggugggaacuucucaggaa

SEQ ID NO: 1166608 - RNA, 19 nt, Homo sapiens
  misc_RNA (1)...(19): siRNA sense strand
cacagaagcugcucgaguu

SEQ ID NO: 1166609 - RNA, 19 nt, Homo sapiens
  misc_RNA (1)...(19): siRNA sense strand
gcagauugccaaagaacua

SEQ ID NO: 1166610 - RNA, 19 nt, Homo sapiens
  misc_RNA (1)...(19): siRNA sense strand
ugagaagauucaagcauuu

SEQ ID NO: 1166611 - RNA, 19 nt, Homo sapiens
  misc_RNA (1)...(19): siRNA sense strand
ggacgaggaagauuucaaa

SEQ ID NO: 1166612 - RNA, 19 nt, Homo sapiens
  misc_RNA (1)...(19): siRNA sense strand
uacaucagguguuaacuaa

SEQ ID NO: 1166613 - RNA, 19 nt, Homo sapiens
  misc_RNA (1)...(19): siRNA sense strand
gagagaagcaggucggauu

SEQ ID NO: 1166614 - RNA, 19 nt, Homo sapiens
  misc_RNA (1)...(19): siRNA sense strand
gcuaggaacuuacucugau

SEQ ID NO: 1166615 - RNA, 19 nt, Homo sapiens
  misc_RNA (1)...(19): siRNA sense strand
ggaagcuggugcccuggua

SEQ ID NO: 1166616 - RNA, 19 nt, Homo sapiens
  misc_RNA (1)...(19): siRNA sense strand
gcaugcagcugaguuacaa

SEQ ID NO: 1166617 - RNA, 19 nt, Homo sapiens
  misc_RNA (1)...(19): siRNA sense strand
gaaaauacauugcucuaag

SEQ ID NO: 1166618 - RNA, 19 nt, Homo sapiens
  misc_RNA (1)...(19): siRNA sense strand
aacauuggaucgauucaua

SEQ ID NO: 1166619 - RNA, 19 nt, Homo sapiens
  misc_RNA (1)...(19): siRNA sense strand
ggaaacagagccagagguu

SEQ ID NO: 1166620 - RNA, 19 nt, Homo sapiens
  misc_RNA (1)...(19): siRNA sense strand
gaucgauucauaccauaua

SEQ ID NO: 1166621 - RNA, 19 nt, Homo sapiens
  misc_RNA (1)...(19): siRNA sense strand
ucaaauacuuccguacuug

SEQ ID NO: 1166622 - RNA, 19 nt, Homo sapiens
  misc_RNA (1)...(19): siRNA sense strand
guacaacuaugagccuuug

SEQ ID NO: 1166623 - RNA, 19 nt, Homo sapiens
  misc_RNA (1)...(19): siRNA sense strand
gcuggaagcuuuauuucuc

SEQ ID NO: 1166624 - RNA, 19 nt, Homo sapiens
  misc_RNA (1)...(19): siRNA sense strand
guauagaggcagaggauuu

SEQ ID NO: 1166625 - RNA, 19 nt, Homo sapiens
  misc_RNA (1)...(19): siRNA sense strand
caacguugcugaaagaacu

SEQ ID NO: 1166626 - RNA, 19 nt, Homo sapiens
  misc_RNA (1)...(19): siRNA sense strand
uggaggacauuacaauaaa

SEQ ID NO: 1166627 - RNA, 19 nt, Homo sapiens
  misc_RNA (1)...(19): siRNA sense strand
gaauugaugucugaugauc

SEQ ID NO: 1166628 - RNA, 19 nt, Homo sapiens
  misc_RNA (1)...(19): siRNA sense strand
gauaguuccucuggagauu

SEQ ID NO: 1166629 - RNA, 19 nt, Homo sapiens
  misc_RNA (1)...(19): siRNA sense strand
aaacguacuucugaacaaa

SEQ ID NO: 1166630 - RNA, 19 nt, Homo sapiens
  misc_RNA (1)...(19): siRNA sense strand
cagcaugguucuggaauga

SEQ ID NO: 1166631 - RNA, 19 nt, Homo sapiens
  misc_RNA (1)...(19): siRNA sense strand
caaagaagacgcugaggau

SEQ ID NO: 1166632 - RNA, 19 nt, Homo sapiens
  misc_RNA (1)...(19): siRNA sense strand
gaaacagagccagagguua

SEQ ID NO: 1166633 - RNA, 19 nt, Homo sapiens
  misc_RNA (1)...(19): siRNA sense strand
ugauggaguucucacuuaa

SEQ ID NO: 1166634 - RNA, 19 nt, Homo sapiens
  misc_RNA (1)...(19): siRNA sense strand
guucgugucaguaauauaa

SEQ ID NO: 1166635 - RNA, 19 nt, Homo sapiens
  misc_RNA (1)...(19): siRNA sense strand
gcaaggguguacaacuaug

SEQ ID NO: 1166636 - RNA, 19 nt, Homo sapiens
  misc_RNA (1)...(19): siRNA sense strand
gaagcuuuauuucucugaa

SEQ ID NO: 1166637 - RNA, 19 nt, Homo sapiens
  misc_RNA (1)...(19): siRNA sense strand
ugaccaggguuaccucuug

SEQ ID NO: 1166638 - RNA, 19 nt, Homo sapiens
  misc_RNA (1)...(19): siRNA sense strand
ggauauaguggaaauuaug

SEQ ID NO: 1166639 - RNA, 19 nt, Homo sapiens
  misc_RNA (1)...(19): siRNA sense strand
gagcaagguuggaauugag

SEQ ID NO: 1166640 - RNA, 19 nt, Homo sapiens
  misc_RNA (1)...(19): siRNA sense strand
gagcaaauuacuauggaaa

SEQ ID NO: 1166641 - RNA, 19 nt, Homo sapiens
  misc_RNA (1)...(19): siRNA sense strand
agcgauagcucuccuuuga

SEQ ID NO: 1166642 - RNA, 19 nt, Homo sapiens
  misc_RNA (1)...(19): siRNA sense strand
uaccagauauagcaacuga

SEQ ID NO: 1166643 - RNA, 19 nt, Homo sapiens
  misc_RNA (1)...(19): siRNA sense strand
cagauuugauuuggucuuu

SEQ ID NO: 1166644 - RNA, 19 nt, Homo sapiens
  misc_RNA (1)...(19): siRNA sense strand
ggagaaacaaugguaaaug

SEQ ID NO: 1166645 - RNA, 19 nt, Homo sapiens
  misc_RNA (1)...(19): siRNA sense strand
cgaggaagauuucaaagcu

SEQ ID NO: 1166646 - RNA, 19 nt, Homo sapiens
  misc_RNA (1)...(19): siRNA sense strand
gagcuuuccucuuccagau

SEQ ID NO: 1166647 - RNA, 19 nt, Homo sapiens
  misc_RNA (1)...(19): siRNA sense strand
ggaaugagcaacaggucaa

SEQ ID NO: 1166648 - RNA, 19 nt, Homo sapiens
  misc_RNA (1)...(19): siRNA sense strand
cgagcaagguuggaauuga

SEQ ID NO: 1166649 - RNA, 19 nt, Homo sapiens
  misc_RNA (1)...(19): siRNA sense strand
gaaagcagagaaccauuag

SEQ ID NO: 1166650 - RNA, 19 nt, Homo sapiens
  misc_RNA (1)...(19): siRNA sense strand
caaaguauuagucuugcua

SEQ ID NO: 1166651 - RNA, 19 nt, Homo sapiens
  misc_RNA (1)...(19): siRNA sense strand
uugauggaguucucacuua

SEQ ID NO: 1166652 - RNA, 19 nt, Homo sapiens
  misc_RNA (1)...(19): siRNA sense strand
ccacauccuuguuguugga

SEQ ID NO: 1166653 - RNA, 19 nt, Homo sapiens
  misc_RNA (1)...(19): siRNA sense strand
gagaggaagcaaccaaaga

SEQ ID NO: 1166654 - RNA, 19 nt, Homo sapiens
  misc_RNA (1)...(19): siRNA sense strand
ugagcaucaugaucacuua

SEQ ID NO: 1166655 - RNA, 19 nt, Homo sapiens
  misc_RNA (1)...(19): siRNA sense strand
cagcaaaguauuagucuug

SEQ ID NO: 1166656 - RNA, 19 nt, Homo sapiens
  misc_RNA (1)...(19): siRNA sense strand
ggucugacgguaacucuuu

SEQ ID NO: 1166657 - RNA, 19 nt, Homo sapiens
  misc_RNA (1)...(19): siRNA sense strand
guggagaaauucagagcuu

SEQ ID NO: 1166658 - RNA, 19 nt, Homo sapiens
  misc_RNA (1)...(19): siRNA sense strand
ggaacuuacucugaugaau

SEQ ID NO: 1166659 - RNA, 19 nt, Homo sapiens
  misc_RNA (1)...(19): siRNA sense strand
gaaacaauagaucccauuc

SEQ ID NO: 1166660 - RNA, 19 nt, Homo sapiens
  misc_RNA (1)...(19): siRNA sense strand
cgaugaauuugauaagaug

SEQ ID NO: 1166661 - RNA, 19 nt, Homo sapiens
  misc_RNA (1)...(19): siRNA sense strand
gaucaagguauuuguggaa

SEQ ID NO: 1166662 - RNA, 19 nt, Homo sapiens
  misc_RNA (1)...(19): siRNA sense strand
gagagaaagagaacacaga

SEQ ID NO: 1166663 - RNA, 19 nt, Homo sapiens
  misc_RNA (1)...(19): siRNA sense strand
gaccaggguuaccucuuga

SEQ ID NO: 1166664 - RNA, 19 nt, Homo sapiens
  misc_RNA (1)...(19): siRNA sense strand
cauuagcagugccacagua

SEQ ID NO: 1166665 - RNA, 19 nt, Homo sapiens
  misc_RNA (1)...(19): siRNA sense strand
gacgguaacucuuucaaaa

SEQ ID NO: 1166666 - RNA, 19 nt, Homo sapiens
  misc_RNA (1)...(19): siRNA sense strand
cgaggcaggucauuuacug

SEQ ID NO: 1166667 - RNA, 19 nt, Homo sapiens
  misc_RNA (1)...(19): siRNA sense strand
aauacagucuucccacaaa

SEQ ID NO: 1166668 - RNA, 19 nt, Homo sapiens
  misc_RNA (1)...(19): siRNA sense strand
caucagguguuaacuaagg

SEQ ID NO: 1166669 - RNA, 19 nt, Homo sapiens
  misc_RNA (1)...(19): siRNA sense strand
guaugacaaggaugaaaua

SEQ ID NO: 1166670 - RNA, 19 nt, Homo sapiens
  misc_RNA (1)...(19): siRNA sense strand
cacaaggcauauugauuug

SEQ ID NO: 1166671 - RNA, 19 nt, Homo sapiens
  misc_RNA (1)...(19): siRNA sense strand
caacaggucaacagcgaaa

SEQ ID NO: 1166672 - RNA, 19 nt, Homo sapiens
  misc_RNA (1)...(19): siRNA sense strand
gccauuaucagaaagacua

SEQ ID NO: 1166673 - RNA, 19 nt, Homo sapiens
  misc_RNA (1)...(19): siRNA sense strand
ggaggacauuacaauaaag

SEQ ID NO: 1166674 - RNA, 19 nt, Homo sapiens
  misc_RNA (1)...(19): siRNA sense strand
uggaaucgaugaauuugau

SEQ ID NO: 1166675 - RNA, 19 nt, Homo sapiens
  misc_RNA (1)...(19): siRNA sense strand
ugucgaggcaggucauuua

SEQ ID NO: 1166676 - RNA, 19 nt, Homo sapiens
  misc_RNA (1)...(19): siRNA sense strand
gcagcaaaguauuagucuu

SEQ ID NO: 1166677 - RNA, 19 nt, Homo sapiens
  misc_RNA (1)...(19): siRNA sense strand
ccagaaagcugacagaugu

SEQ ID NO: 1166678 - RNA, 19 nt, Homo sapiens
  misc_RNA (1)...(19): siRNA sense strand
gagaagauauaaccggauu

SEQ ID NO: 1166679 - RNA, 19 nt, Homo sapiens
  misc_RNA (1)...(19): siRNA sense strand
caaagaggcuggaaggaau

SEQ ID NO: 1166680 - RNA, 19 nt, Homo sapiens
  misc_RNA (1)...(19): siRNA sense strand
gaaccagccuccucucuca

SEQ ID NO: 1166681 - RNA, 19 nt, Homo sapiens
  misc_RNA (1)...(19): siRNA sense strand
gaagauggaagucuagauu

SEQ ID NO: 1166682 - RNA, 19 nt, Homo sapiens
  misc_RNA (1)...(19): siRNA sense strand
ggaaaucccuccggugaau

SEQ ID NO: 1166683 - RNA, 19 nt, Homo sapiens
  misc_RNA (1)...(19): siRNA sense strand
gaagagaaaccauuuagag

SEQ ID NO: 1166684 - RNA, 19 nt, Homo sapiens
  misc_RNA (1)...(19): siRNA sense strand
gcuaagaauugaguuaaug

SEQ ID NO: 1166685 - RNA, 19 nt, Homo sapiens
  misc_RNA (1)...(19): siRNA sense strand
gauggcaacugucgugaga

SEQ ID NO: 1166686 - RNA, 19 nt, Homo sapiens
  misc_RNA (1)...(19): siRNA sense strand
acagacaaaugaaaucuug

SEQ ID NO: 1166687 - RNA, 19 nt, Homo sapiens
  misc_RNA (1)...(19): siRNA sense strand
gagaaaccauuuagagacu

SEQ ID NO: 1166688 - RNA, 19 nt, Homo sapiens
  misc_RNA (1)...(19): siRNA sense strand
aaucaaacuucucgacuug

SEQ ID NO: 1166689 - RNA, 19 nt, Homo sapiens
  misc_RNA (1)...(19): siRNA sense strand
gaagggaaccgagccuauu

SEQ ID NO: 1166690 - RNA, 19 nt, Homo sapiens
  misc_RNA (1)...(19): siRNA sense strand
gauauaaccggauucaaca

SEQ ID NO: 1166691 - RNA, 19 nt, Homo sapiens
  misc_RNA (1)...(19): siRNA sense strand
gaaaccauuuagagacugu

SEQ ID NO: 1166692 - RNA, 19 nt, Homo sapiens
  misc_RNA (1)...(19): siRNA sense strand
ggaagaguuggacaccuua

SEQ ID NO: 1166693 - RNA, 19 nt, Homo sapiens
  misc_RNA (1)...(19): siRNA sense strand
gcaaugugccuacacuuuc

SEQ ID NO: 1166694 - RNA, 19 nt, Homo sapiens
  misc_RNA (1)...(19): siRNA sense strand
gaggaagagaaaccauuua

SEQ ID NO: 1166695 - RNA, 19 nt, Homo sapiens
  misc_RNA (1)...(19): siRNA sense strand
ggcaguacaugcuaagaau

SEQ ID NO: 1166696 - RNA, 19 nt, Homo sapiens
  misc_RNA (1)...(19): siRNA sense strand
uagagacugugcagaugua

SEQ ID NO: 1166697 - RNA, 19 nt, Homo sapiens
  misc_RNA (1)...(19): siRNA sense strand
gaagauauaaccggauuca

SEQ ID NO: 1166698 - RNA, 19 nt, Homo sapiens
  misc_RNA (1)...(19): siRNA sense strand
uaaaggaagagaaagagaa

SEQ ID NO: 1166699 - RNA, 19 nt, Homo sapiens
  misc_RNA (1)...(19): siRNA sense strand
ggaagagaaaccauuuaga

SEQ ID NO: 1166700 - RNA, 19 nt, Homo sapiens
  misc_RNA (1)...(19): siRNA sense strand
caaugugccuacacuuuca

SEQ ID NO: 1166701 - RNA, 19 nt, Homo sapiens
  misc_RNA (1)...(19): siRNA sense strand
ccaaagaggcuggaaggaa

SEQ ID NO: 1166702 - RNA, 19 nt, Homo sapiens
  misc_RNA (1)...(19): siRNA sense strand
caacaacaguguccuucag

SEQ ID NO: 1166703 - RNA, 19 nt, Homo sapiens
  misc_RNA (1)...(19): siRNA sense strand
gaggcuggaaggaauauaa

SEQ ID NO: 1166704 - RNA, 19 nt, Homo sapiens
  misc_RNA (1)...(19): siRNA sense strand
aaaucaaacuucucgacuu

SEQ ID NO: 1166705 - RNA, 19 nt, Homo sapiens
  misc_RNA (1)...(19): siRNA sense strand
gagaggaagagaaaccauu

SEQ ID NO: 1166706 - RNA, 19 nt, Homo sapiens
  misc_RNA (1)...(19): siRNA sense strand
gaaaucccuccggugaaua

SEQ ID NO: 1166707 - RNA, 19 nt, Homo sapiens
  misc_RNA (1)...(19): siRNA sense strand
cagaggcaguacaugcuaa

SEQ ID NO: 1166708 - RNA, 19 nt, Homo sapiens
  misc_RNA (1)...(19): siRNA sense strand
gguacuaaaucaaacuucu

SEQ ID NO: 1166709 - RNA, 19 nt, Homo sapiens
  misc_RNA (1)...(19): siRNA sense strand
ugacagauuccacauagga

SEQ ID NO: 1166710 - RNA, 19 nt, Homo sapiens
  misc_RNA (1)...(19): siRNA sense strand
ggaagggaaccgagccuau

SEQ ID NO: 1166711 - RNA, 19 nt, Homo sapiens
  misc_RNA (1)...(19): siRNA sense strand
gaaagcugacagauguuga

SEQ ID NO: 1166712 - RNA, 19 nt, Homo sapiens
  misc_RNA (1)...(19): siRNA sense strand
ucuuagaaauggaaggaaa

SEQ ID NO: 1166713 - RNA, 19 nt, Homo sapiens
  misc_RNA (1)...(19): siRNA sense strand
cccagaaacuucaacaucu

SEQ ID NO: 1166714 - RNA, 19 nt, Homo sapiens
  misc_RNA (1)...(19): siRNA sense strand
gagccuauucacaguauga

SEQ ID NO: 1166715 - RNA, 19 nt, Homo sapiens
  misc_RNA (1)...(19): siRNA sense strand
aagucuagauuuccaaaga

SEQ ID NO: 1166716 - RNA, 19 nt, Homo sapiens
  misc_RNA (1)...(19): siRNA sense strand
agauggaagucuagauuuc

SEQ ID NO: 1166717 - RNA, 19 nt, Homo sapiens
  misc_RNA (1)...(19): siRNA sense strand
gcaauauggaugucaaugg

SEQ ID NO: 1166718 - RNA, 19 nt, Homo sapiens
  misc_RNA (1)...(19): siRNA sense strand
gaagaguuggacaccuuaa

SEQ ID NO: 1166719 - RNA, 19 nt, Homo sapiens
  misc_RNA (1)...(19): siRNA sense strand
ccuacaagcuagagaagca

SEQ ID NO: 1166720 - RNA, 19 nt, Homo sapiens
  misc_RNA (1)...(19): siRNA sense strand
agacccagguacuaaauca

SEQ ID NO: 1166721 - RNA, 19 nt, Homo sapiens
  misc_RNA (1)...(19): siRNA sense strand
agaacacgauggcaacugu

SEQ ID NO: 1166722 - RNA, 19 nt, Homo sapiens
  misc_RNA (1)...(19): siRNA sense strand
gcaguacaugcuaagaauu

SEQ ID NO: 1166723 - RNA, 19 nt, Homo sapiens
  misc_RNA (1)...(19): siRNA sense strand
ucacauagggugcagcaau

SEQ ID NO: 1166724 - RNA, 19 nt, Homo sapiens
  misc_RNA (1)...(19): siRNA sense strand
agacugugcagauguauau

SEQ ID NO: 1166725 - RNA, 19 nt, Homo sapiens
  misc_RNA (1)...(19): siRNA sense strand
aauacaacaucgugaagau

SEQ ID NO: 1166726 - RNA, 19 nt, Homo sapiens
  misc_RNA (1)...(19): siRNA sense strand
agaauucauuauccaccua

SEQ ID NO: 1166727 - RNA, 19 nt, Homo sapiens
  misc_RNA (1)...(19): siRNA sense strand
uaauaugccagaacccaaa

SEQ ID NO: 1166728 - RNA, 19 nt, Homo sapiens
  misc_RNA (1)...(19): siRNA sense strand
acaacaguguccuucagaa

SEQ ID NO: 1166729 - RNA, 19 nt, Homo sapiens
  misc_RNA (1)...(19): siRNA sense strand
gaaacuucaacaucuggaa

SEQ ID NO: 1166730 - RNA, 19 nt, Homo sapiens
  misc_RNA (1)...(19): siRNA sense strand
caguacaugcuaagaauug

SEQ ID NO: 1166731 - RNA, 19 nt, Homo sapiens
  misc_RNA (1)...(19): siRNA sense strand
agaggaagagaaaccauuu

SEQ ID NO: 1166732 - RNA, 19 nt, Homo sapiens
  misc_RNA (1)...(19): siRNA sense strand
cgucaaacauauauaaucc

SEQ ID NO: 1166733 - RNA, 19 nt, Homo sapiens
  misc_RNA (1)...(19): siRNA sense strand
aggaagaguuggacaccuu

SEQ ID NO: 1166734 - RNA, 19 nt, Homo sapiens
  misc_RNA (1)...(19): siRNA sense strand
gagaauuacauuguggaaa

SEQ ID NO: 1166735 - RNA, 19 nt, Homo sapiens
  misc_RNA (1)...(19): siRNA sense strand
gaacaugugauggaaaauu

SEQ ID NO: 1166736 - RNA, 19 nt, Homo sapiens
  misc_RNA (1)...(19): siRNA sense strand
ggagauggcccagauacag

SEQ ID NO: 1166737 - RNA, 19 nt, Homo sapiens
  misc_RNA (1)...(19): siRNA sense strand
aaagaggcuggaaggaaua

SEQ ID NO: 1166738 - RNA, 19 nt, Homo sapiens
  misc_RNA (1)...(19): siRNA sense strand
cacauagggugcagcaauc

SEQ ID NO: 1166739 - RNA, 19 nt, Homo sapiens
  misc_RNA (1)...(19): siRNA sense strand
gagacugugcagauguaua

SEQ ID NO: 1166740 - RNA, 19 nt, Homo sapiens
  misc_RNA (1)...(19): siRNA sense strand
aagagaaaccauuuagaga

SEQ ID NO: 1166741 - RNA, 19 nt, Homo sapiens
  misc_RNA (1)...(19): siRNA sense strand
gaaaacacaaggaagaguu

SEQ ID NO: 1166742 - RNA, 19 nt, Homo sapiens
  misc_RNA (1)...(19): siRNA sense strand
gcaacuucuucaacagaca

SEQ ID NO: 1166743 - RNA, 19 nt, Homo sapiens
  misc_RNA (1)...(19): siRNA sense strand
guugagacccagguacuaa

SEQ ID NO: 1166744 - RNA, 19 nt, Homo sapiens
  misc_RNA (1)...(19): siRNA sense strand
gcugcuggagaauucauua

SEQ ID NO: 1166745 - RNA, 19 nt, Homo sapiens
  misc_RNA (1)...(19): siRNA sense strand
uauacucaguggcugcaaa

SEQ ID NO: 1166746 - RNA, 19 nt, Homo sapiens
  misc_RNA (1)...(19): siRNA sense strand
caugcuaagaauugaguua

SEQ ID NO: 1166747 - RNA, 19 nt, Homo sapiens
  misc_RNA (1)...(19): siRNA sense strand
caacagacaaaugaaaucu

SEQ ID NO: 1166748 - RNA, 19 nt, Homo sapiens
  misc_RNA (1)...(19): siRNA sense strand
gcaacugucgugagaguac

SEQ ID NO: 1166749 - RNA, 19 nt, Homo sapiens
  misc_RNA (1)...(19): siRNA sense strand
ucgugaagauggaagucua

SEQ ID NO: 1166750 - RNA, 19 nt, Homo sapiens
  misc_RNA (1)...(19): siRNA sense strand
ggaaaagcaauuaaacaga

SEQ ID NO: 1166751 - RNA, 19 nt, Homo sapiens
  misc_RNA (1)...(19): siRNA sense strand
ccgagccuauucacaguau

SEQ ID NO: 1166752 - RNA, 19 nt, Homo sapiens
  misc_RNA (1)...(19): siRNA sense strand
gguuacucgucaaacauau

SEQ ID NO: 1166753 - RNA, 19 nt, Homo sapiens
  misc_RNA (1)...(19): siRNA sense strand
ugccuacacuuucauucuu

SEQ ID NO: 1166754 - RNA, 19 nt, Homo sapiens
  misc_RNA (1)...(19): siRNA sense strand
cgacagaccaguacaacac

SEQ ID NO: 1166755 - RNA, 19 nt, Homo sapiens
  misc_RNA (1)...(19): siRNA sense strand
gcccagauacagcagaaug

SEQ ID NO: 1166756 - RNA, 19 nt, Homo sapiens
  misc_RNA (1)...(19): siRNA sense strand
cauaggaaaugaaaagcaa

SEQ ID NO: 1166757 - RNA, 19 nt, Homo sapiens
  misc_RNA (1)...(19): siRNA sense strand
gaaaacagugggagaagau

SEQ ID NO: 1166758 - RNA, 19 nt, Homo sapiens
  misc_RNA (1)...(19): siRNA sense strand
ccaccuacaagcuagagaa

SEQ ID NO: 1166759 - RNA, 19 nt, Homo sapiens
  misc_RNA (1)...(19): siRNA sense strand
gcuggagaauucauuaucc

SEQ ID NO: 1166760 - RNA, 19 nt, Homo sapiens
  misc_RNA (1)...(19): siRNA sense strand
agucggagauggcccagau

SEQ ID NO: 1166761 - RNA, 19 nt, Homo sapiens
  misc_RNA (1)...(19): siRNA sense strand
aagauggaagucuagauuu

SEQ ID NO: 1166762 - RNA, 19 nt, Homo sapiens
  misc_RNA (1)...(19): siRNA sense strand
guuacucgucaaacauaua

SEQ ID NO: 1166763 - RNA, 19 nt, Homo sapiens
  misc_RNA (1)...(19): siRNA sense strand
aaacagugggagaagauau

SEQ ID NO: 1166764 - RNA, 19 nt, Homo sapiens
  misc_RNA (1)...(19): siRNA sense strand
ggaaggaaaacacaaggaa

SEQ ID NO: 1166765 - RNA, 19 nt, Homo sapiens
  misc_RNA (1)...(19): siRNA sense strand
guaauacaacaucgugaag

SEQ ID NO: 1166766 - RNA, 19 nt, Homo sapiens
  misc_RNA (1)...(19): siRNA sense strand
gggagguuggacuguaaua

SEQ ID NO: 1166767 - RNA, 19 nt, Homo sapiens
  misc_RNA (1)...(19): siRNA sense strand
gccuacacuuucauucuuc

SEQ ID NO: 1166768 - RNA, 19 nt, Homo sapiens
  misc_RNA (1)...(19): siRNA sense strand
ugucaaucuuugcacuaaa

SEQ ID NO: 1166769 - RNA, 19 nt, Homo sapiens
  misc_RNA (1)...(19): siRNA sense strand
ucgcugccauucugacuca

SEQ ID NO: 1166770 - RNA, 19 nt, Homo sapiens
  misc_RNA (1)...(19): siRNA sense strand
aacagugggagaagauaua

SEQ ID NO: 1166771 - RNA, 19 nt, Homo sapiens
  misc_RNA (1)...(19): siRNA sense strand
uggcaacugucgugagagu

SEQ ID NO: 1166772 - RNA, 19 nt, Homo sapiens
  misc_RNA (1)...(19): siRNA sense strand
ucagaggcaguacaugcua

SEQ ID NO: 1166773 - RNA, 19 nt, Homo sapiens
  misc_RNA (1)...(19): siRNA sense strand
aauauuggcuggggaauga

SEQ ID NO: 1166774 - RNA, 19 nt, Homo sapiens
  misc_RNA (1)...(19): siRNA sense strand
agaguacgacagaccagua

SEQ ID NO: 1166775 - RNA, 19 nt, Homo sapiens
  misc_RNA (1)...(19): siRNA sense strand
uaauacaacaucgugaaga

SEQ ID NO: 1166776 - RNA, 19 nt, Homo sapiens
  misc_RNA (1)...(19): siRNA sense strand
caacuucuucaacagacaa

SEQ ID NO: 1166777 - RNA, 19 nt, Homo sapiens
  misc_RNA (1)...(19): siRNA sense strand
ccagaaagcugacagaugu

SEQ ID NO: 1166778 - RNA, 19 nt, Homo sapiens
  misc_RNA (1)...(19): siRNA sense strand
gagaagauauaaccggauu

SEQ ID NO: 1166779 - RNA, 19 nt, Homo sapiens
  misc_RNA (1)...(19): siRNA sense strand
caaagaggcuggaaggaau

SEQ ID NO: 1166780 - RNA, 19 nt, Homo sapiens
  misc_RNA (1)...(19): siRNA sense strand
gaaccagccuccucucuca

SEQ ID NO: 1166781 - RNA, 19 nt, Homo sapiens
  misc_RNA (1)...(19): siRNA sense strand
gaagauggaagucuagauu

SEQ ID NO: 1166782 - RNA, 19 nt, Homo sapiens
  misc_RNA (1)...(19): siRNA sense strand
ggaaaucccuccggugaau

SEQ ID NO: 1166783 - RNA, 19 nt, Homo sapiens
  misc_RNA (1)...(19): siRNA sense strand
gaagagaaaccauuuagag

SEQ ID NO: 1166784 - RNA, 19 nt, Homo sapiens
  misc_RNA (1)...(19): siRNA sense strand
gcuaagaauugaguuaaug

SEQ ID NO: 1166785 - RNA, 19 nt, Homo sapiens
  misc_RNA (1)...(19): siRNA sense strand
gauggcaacugucgugaga

SEQ ID NO: 1166786 - RNA, 19 nt, Homo sapiens
  misc_RNA (1)...(19): siRNA sense strand
acagacaaaugaaaucuug

SEQ ID NO: 1166787 - RNA, 19 nt, Homo sapiens
  misc_RNA (1)...(19): siRNA sense strand
gagaaaccauuuagagacu

SEQ ID NO: 1166788 - RNA, 19 nt, Homo sapiens
  misc_RNA (1)...(19): siRNA sense strand
aaucaaacuucucgacuug

SEQ ID NO: 1166789 - RNA, 19 nt, Homo sapiens
  misc_RNA (1)...(19): siRNA sense strand
gaagggaaccgagccuauu

SEQ ID NO: 1166790 - RNA, 19 nt, Homo sapiens
  misc_RNA (1)...(19): siRNA sense strand
gauauaaccggauucaaca

SEQ ID NO: 1166791 - RNA, 19 nt, Homo sapiens
  misc_RNA (1)...(19): siRNA sense strand
gaaaccauuuagagacugu

SEQ ID NO: 1166792 - RNA, 19 nt, Homo sapiens
  misc_RNA (1)...(19): siRNA sense strand
ggaagaguuggacaccuua

SEQ ID NO: 1166793 - RNA, 19 nt, Homo sapiens
  misc_RNA (1)...(19): siRNA sense strand
gcaaugugccuacacuuuc

SEQ ID NO: 1166794 - RNA, 19 nt, Homo sapiens
  misc_RNA (1)...(19): siRNA sense strand
gaggaagagaaaccauuua

SEQ ID NO: 1166795 - RNA, 19 nt, Homo sapiens
  misc_RNA (1)...(19): siRNA sense strand
ggcaguacaugcuaagaau

SEQ ID NO: 1166796 - RNA, 19 nt, Homo sapiens
  misc_RNA (1)...(19): siRNA sense strand
uagagacugugcagaugua

SEQ ID NO: 1166797 - RNA, 19 nt, Homo sapiens
  misc_RNA (1)...(19): siRNA sense strand
gaagauauaaccggauuca

SEQ ID NO: 1166798 - RNA, 19 nt, Homo sapiens
  misc_RNA (1)...(19): siRNA sense strand
uaaaggaagagaaagagaa

SEQ ID NO: 1166799 - RNA, 19 nt, Homo sapiens
  misc_RNA (1)...(19): siRNA sense strand
ggaagagaaaccauuuaga

SEQ ID NO: 1166800 - RNA, 19 nt, Homo sapiens
  misc_RNA (1)...(19): siRNA sense strand
caaugugccuacacuuuca

SEQ ID NO: 1166801 - RNA, 19 nt, Homo sapiens
  misc_RNA (1)...(19): siRNA sense strand
ccaaagaggcuggaaggaa

SEQ ID NO: 1166802 - RNA, 19 nt, Homo sapiens
  misc_RNA (1)...(19): siRNA sense strand
caacaacaguguccuucag

SEQ ID NO: 1166803 - RNA, 19 nt, Homo sapiens
  misc_RNA (1)...(19): siRNA sense strand
gaggcuggaaggaauauaa

SEQ ID NO: 1166804 - RNA, 19 nt, Homo sapiens
  misc_RNA (1)...(19): siRNA sense strand
aaaucaaacuucucgacuu

SEQ ID NO: 1166805 - RNA, 19 nt, Homo sapiens
  misc_RNA (1)...(19): siRNA sense strand
gagaggaagagaaaccauu

SEQ ID NO: 1166806 - RNA, 19 nt, Homo sapiens
  misc_RNA (1)...(19): siRNA sense strand
gaaaucccuccggugaaua

SEQ ID NO: 1166807 - RNA, 19 nt, Homo sapiens
  misc_RNA (1)...(19): siRNA sense strand
cagaggcaguacaugcuaa

SEQ ID NO: 1166808 - RNA, 19 nt, Homo sapiens
  misc_RNA (1)...(19): siRNA sense strand
gguacuaaaucaaacuucu

SEQ ID NO: 1166809 - RNA, 19 nt, Homo sapiens
  misc_RNA (1)...(19): siRNA sense strand
ugacagauuccacauagga

SEQ ID NO: 1166810 - RNA, 19 nt, Homo sapiens
  misc_RNA (1)...(19): siRNA sense strand
ggaagggaaccgagccuau

SEQ ID NO: 1166811 - RNA, 19 nt, Homo sapiens
  misc_RNA (1)...(19): siRNA sense strand
gaaagcugacagauguuga

SEQ ID NO: 1166812 - RNA, 19 nt, Homo sapiens
  misc_RNA (1)...(19): siRNA sense strand
ucuuagaaauggaaggaaa

SEQ ID NO: 1166813 - RNA, 19 nt, Homo sapiens
  misc_RNA (1)...(19): siRNA sense strand
cccagaaacuucaacaucu

SEQ ID NO: 1166814 - RNA, 19 nt, Homo sapiens
  misc_RNA (1)...(19): siRNA sense strand
gagccuauucacaguauga

SEQ ID NO: 1166815 - RNA, 19 nt, Homo sapiens
  misc_RNA (1)...(19): siRNA sense strand
aagucuagauuuccaaaga

SEQ ID NO: 1166816 - RNA, 19 nt, Homo sapiens
  misc_RNA (1)...(19): siRNA sense strand
agauggaagucuagauuuc

SEQ ID NO: 1166817 - RNA, 19 nt, Homo sapiens
  misc_RNA (1)...(19): siRNA sense strand
gcaauauggaugucaaugg

SEQ ID NO: 1166818 - RNA, 19 nt, Homo sapiens
  misc_RNA (1)...(19): siRNA sense strand
gaagaguuggacaccuuaa

SEQ ID NO: 1166819 - RNA, 19 nt, Homo sapiens
  misc_RNA (1)...(19): siRNA sense strand
ccuacaagcuagagaagca

SEQ ID NO: 1166820 - RNA, 19 nt, Homo sapiens
  misc_RNA (1)...(19): siRNA sense strand
agacccagguacuaaauca

SEQ ID NO: 1166821 - RNA, 19 nt, Homo sapiens
  misc_RNA (1)...(19): siRNA sense strand
agaacacgauggcaacugu

SEQ ID NO: 1166822 - RNA, 19 nt, Homo sapiens
  misc_RNA (1)...(19): siRNA sense strand
gcaguacaugcuaagaauu

SEQ ID NO: 1166823 - RNA, 19 nt, Homo sapiens
  misc_RNA (1)...(19): siRNA sense strand
ucacauagggugcagcaau

SEQ ID NO: 1166824 - RNA, 19 nt, Homo sapiens
  misc_RNA (1)...(19): siRNA sense strand
agacugugcagauguauau

SEQ ID NO: 1166825 - RNA, 19 nt, Homo sapiens
  misc_RNA (1)...(19): siRNA sense strand
aauacaacaucgugaagau

SEQ ID NO: 1166826 - RNA, 19 nt, Homo sapiens
  misc_RNA (1)...(19): siRNA sense strand
agaauucauuauccaccua

SEQ ID NO: 1166827 - RNA, 19 nt, Homo sapiens
  misc_RNA (1)...(19): siRNA sense strand
uaauaugccagaacccaaa

SEQ ID NO: 1166828 - RNA, 19 nt, Homo sapiens
  misc_RNA (1)...(19): siRNA sense strand
acaacaguguccuucagaa

SEQ ID NO: 1166829 - RNA, 19 nt, Homo sapiens
  misc_RNA (1)...(19): siRNA sense strand
gaaacuucaacaucuggaa

SEQ ID NO: 1166830 - RNA, 19 nt, Homo sapiens
  misc_RNA (1)...(19): siRNA sense strand
caguacaugcuaagaauug

SEQ ID NO: 1166831 - RNA, 19 nt, Homo sapiens
  misc_RNA (1)...(19): siRNA sense strand
agaggaagagaaaccauuu

SEQ ID NO: 1166832 - RNA, 19 nt, Homo sapiens
  misc_RNA (1)...(19): siRNA sense strand
cgucaaacauauauaaucc

SEQ ID NO: 1166833 - RNA, 19 nt, Homo sapiens
  misc_RNA (1)...(19): siRNA sense strand
aggaagaguuggacaccuu

SEQ ID NO: 1166834 - RNA, 19 nt, Homo sapiens
  misc_RNA (1)...(19): siRNA sense strand
gagaauuacauuguggaaa

SEQ ID NO: 1166835 - RNA, 19 nt, Homo sapiens
  misc_RNA (1)...(19): siRNA sense strand
gaacaugugauggaaaauu

SEQ ID NO: 1166836 - RNA, 19 nt, Homo sapiens
  misc_RNA (1)...(19): siRNA sense strand
ggagauggcccagauacag

SEQ ID NO: 1166837 - RNA, 19 nt, Homo sapiens
  misc_RNA (1)...(19): siRNA sense strand
aaagaggcuggaaggaaua

SEQ ID NO: 1166838 - RNA, 19 nt, Homo sapiens
  misc_RNA (1)...(19): siRNA sense strand
cacauagggugcagcaauc

SEQ ID NO: 1166839 - RNA, 19 nt, Homo sapiens
  misc_RNA (1)...(19): siRNA sense strand
gagacugugcagauguaua

SEQ ID NO: 1166840 - RNA, 19 nt, Homo sapiens
  misc_RNA (1)...(19): siRNA sense strand
aagagaaaccauuuagaga

SEQ ID NO: 1166841 - RNA, 19 nt, Homo sapiens
  misc_RNA (1)...(19): siRNA sense strand
gaaaacacaaggaagaguu

SEQ ID NO: 1166842 - RNA, 19 nt, Homo sapiens
  misc_RNA (1)...(19): siRNA sense strand
gcaacuucuucaacagaca

SEQ ID NO: 1166843 - RNA, 19 nt, Homo sapiens
  misc_RNA (1)...(19): siRNA sense strand
guugagacccagguacuaa

SEQ ID NO: 1166844 - RNA, 19 nt, Homo sapiens
  misc_RNA (1)...(19): siRNA sense strand
gcugcuggagaauucauua

SEQ ID NO: 1166845 - RNA, 19 nt, Homo sapiens
  misc_RNA (1)...(19): siRNA sense strand
uauacucaguggcugcaaa

SEQ ID NO: 1166846 - RNA, 19 nt, Homo sapiens
  misc_RNA (1)...(19): siRNA sense strand
caugcuaagaauugaguua

SEQ ID NO: 1166847 - RNA, 19 nt, Homo sapiens
  misc_RNA (1)...(19): siRNA sense strand
caacagacaaaugaaaucu

SEQ ID NO: 1166848 - RNA, 19 nt, Homo sapiens
  misc_RNA (1)...(19): siRNA sense strand
gcaacugucgugagaguac

SEQ ID NO: 1166849 - RNA, 19 nt, Homo sapiens
  misc_RNA (1)...(19): siRNA sense strand
ucgugaagauggaagucua

SEQ ID NO: 1166850 - RNA, 19 nt, Homo sapiens
  misc_RNA (1)...(19): siRNA sense strand
ggaaaagcaauuaaacaga

SEQ ID NO: 1166851 - RNA, 19 nt, Homo sapiens
  misc_RNA (1)...(19): siRNA sense strand
ccgagccuauucacaguau

SEQ ID NO: 1166852 - RNA, 19 nt, Homo sapiens
  misc_RNA (1)...(19): siRNA sense strand
gguuacucgucaaacauau

SEQ ID NO: 1166853 - RNA, 19 nt, Homo sapiens
  misc_RNA (1)...(19): siRNA sense strand
ugccuacacuuucauucuu

SEQ ID NO: 1166854 - RNA, 19 nt, Homo sapiens
  misc_RNA (1)...(19): siRNA sense strand
cgacagaccaguacaacac

SEQ ID NO: 1166855 - RNA, 19 nt, Homo sapiens
  misc_RNA (1)...(19): siRNA sense strand
gcccagauacagcagaaug

SEQ ID NO: 1166856 - RNA, 19 nt, Homo sapiens
  misc_RNA (1)...(19): siRNA sense strand
cauaggaaaugaaaagcaa

SEQ ID NO: 1166857 - RNA, 19 nt, Homo sapiens
  misc_RNA (1)...(19): siRNA sense strand
gaaaacagugggagaagau

SEQ ID NO: 1166858 - RNA, 19 nt, Homo sapiens
  misc_RNA (1)...(19): siRNA sense strand
ccaccuacaagcuagagaa

SEQ ID NO: 1166859 - RNA, 19 nt, Homo sapiens
  misc_RNA (1)...(19): siRNA sense strand
gcuggagaauucauuaucc

SEQ ID NO: 1166860 - RNA, 19 nt, Homo sapiens
  misc_RNA (1)...(19): siRNA sense strand
agucggagauggcccagau

SEQ ID NO: 1166861 - RNA, 19 nt, Homo sapiens
  misc_RNA (1)...(19): siRNA sense strand
aagauggaagucuagauuu

SEQ ID NO: 1166862 - RNA, 19 nt, Homo sapiens
  misc_RNA (1)...(19): siRNA sense strand
guuacucgucaaacauaua

SEQ ID NO: 1166863 - RNA, 19 nt, Homo sapiens
  misc_RNA (1)...(19): siRNA sense strand
aaacagugggagaagauau

SEQ ID NO: 1166864 - RNA, 19 nt, Homo sapiens
  misc_RNA (1)...(19): siRNA sense strand
ggaaggaaaacacaaggaa

SEQ ID NO: 1166865 - RNA, 19 nt, Homo sapiens
  misc_RNA (1)...(19): siRNA sense strand
guaauacaacaucgugaag

SEQ ID NO: 1166866 - RNA, 19 nt, Homo sapiens
  misc_RNA (1)...(19): siRNA sense strand
gggagguuggacuguaaua

SEQ ID NO: 1166867 - RNA, 19 nt, Homo sapiens
  misc_RNA (1)...(19): siRNA sense strand
gccuacacuuucauucuuc

SEQ ID NO: 1166868 - RNA, 19 nt, Homo sapiens
  misc_RNA (1)...(19): siRNA sense strand
ugucaaucuuugcacuaaa

SEQ ID NO: 1166869 - RNA, 19 nt, Homo sapiens
  misc_RNA (1)...(19): siRNA sense strand
ucgcugccauucugacuca

SEQ ID NO: 1166870 - RNA, 19 nt, Homo sapiens
  misc_RNA (1)...(19): siRNA sense strand
aacagugggagaagauaua

SEQ ID NO: 1166871 - RNA, 19 nt, Homo sapiens
  misc_RNA (1)...(19): siRNA sense strand
uggcaacugucgugagagu

SEQ ID NO: 1166872 - RNA, 19 nt, Homo sapiens
  misc_RNA (1)...(19): siRNA sense strand
ucagaggcaguacaugcua

SEQ ID NO: 1166873 - RNA, 19 nt, Homo sapiens
  misc_RNA (1)...(19): siRNA sense strand
aauauuggcuggggaauga

SEQ ID NO: 1166874 - RNA, 19 nt, Homo sapiens
  misc_RNA (1)...(19): siRNA sense strand
agaguacgacagaccagua

SEQ ID NO: 1166875 - RNA, 19 nt, Homo sapiens
  misc_RNA (1)...(19): siRNA sense strand
uaauacaacaucgugaaga

SEQ ID NO: 1166876 - RNA, 19 nt, Homo sapiens
  misc_RNA (1)...(19): siRNA sense strand
caacuucuucaacagacaa

SEQ ID NO: 1166877 - RNA, 19 nt, Homo sapiens
  misc_RNA (1)...(19): siRNA sense strand
gcugaaagauuacgaguuu

SEQ ID NO: 1166878 - RNA, 19 nt, Homo sapiens
  misc_RNA (1)...(19): siRNA sense strand
aguaggagcugaaagauua

SEQ ID NO: 1166879 - RNA, 19 nt, Homo sapiens
  misc_RNA (1)...(19): siRNA sense strand
cguagaagcuuaugguaaa

SEQ ID NO: 1166880 - RNA, 19 nt, Homo sapiens
  misc_RNA (1)...(19): siRNA sense strand
aggagacucugaauucuua

SEQ ID NO: 1166881 - RNA, 19 nt, Homo sapiens
  misc_RNA (1)...(19): siRNA sense strand
gcacaguguucccuaaauc

SEQ ID NO: 1166882 - RNA, 19 nt, Homo sapiens
  misc_RNA (1)...(19): siRNA sense strand
ccagaaauguuacagugaa

SEQ ID NO: 1166883 - RNA, 19 nt, Homo sapiens
  misc_RNA (1)...(19): siRNA sense strand
ggaaaucaaugcagaagcu

SEQ ID NO: 1166884 - RNA, 19 nt, Homo sapiens
  misc_RNA (1)...(19): siRNA sense strand
gcucuucucugcagacaau

SEQ ID NO: 1166885 - RNA, 19 nt, Homo sapiens
  misc_RNA (1)...(19): siRNA sense strand
agacaauaaugaaguggua

SEQ ID NO: 1166886 - RNA, 19 nt, Homo sapiens
  misc_RNA (1)...(19): siRNA sense strand
gaaggagacucugaauucu

SEQ ID NO: 1166887 - RNA, 19 nt, Homo sapiens
  misc_RNA (1)...(19): siRNA sense strand
agacuaaagugcuaacuca

SEQ ID NO: 1166888 - RNA, 19 nt, Homo sapiens
  misc_RNA (1)...(19): siRNA sense strand
ggaaacgaugccuguauuu

SEQ ID NO: 1166889 - RNA, 19 nt, Homo sapiens
  misc_RNA (1)...(19): siRNA sense strand
cggaaacgaugccuguauu

SEQ ID NO: 1166890 - RNA, 19 nt, Homo sapiens
  misc_RNA (1)...(19): siRNA sense strand
ucaaagaacuaagguugga

SEQ ID NO: 1166891 - RNA, 19 nt, Homo sapiens
  misc_RNA (1)...(19): siRNA sense strand
gaacuucacaauugaugga

SEQ ID NO: 1166892 - RNA, 19 nt, Homo sapiens
  misc_RNA (1)...(19): siRNA sense strand
agaaggagacucugaauuc

SEQ ID NO: 1166893 - RNA, 19 nt, Homo sapiens
  misc_RNA (1)...(19): siRNA sense strand
gguaguaggagcugaaaga

SEQ ID NO: 1166894 - RNA, 19 nt, Homo sapiens
  misc_RNA (1)...(19): siRNA sense strand
ugcagaagcuggcaauaug

SEQ ID NO: 1166895 - RNA, 19 nt, Homo sapiens
  misc_RNA (1)...(19): siRNA sense strand
ugaccagacuaaagugcua

SEQ ID NO: 1166896 - RNA, 19 nt, Homo sapiens
  misc_RNA (1)...(19): siRNA sense strand
ccaacccggucucuaguga

SEQ ID NO: 1166897 - RNA, 19 nt, Homo sapiens
  misc_RNA (1)...(19): siRNA sense strand
ucaaugaccagacuaaagu

SEQ ID NO: 1166898 - RNA, 19 nt, Homo sapiens
  misc_RNA (1)...(19): siRNA sense strand
caaaaggaguggaaaucaa

SEQ ID NO: 1166899 - RNA, 19 nt, Homo sapiens
  misc_RNA (1)...(19): siRNA sense strand
gugcuaacucagcuuauaa

SEQ ID NO: 1166900 - RNA, 19 nt, Homo sapiens
  misc_RNA (1)...(19): siRNA sense strand
aaagugcuaacucagcuua

SEQ ID NO: 1166901 - RNA, 19 nt, Homo sapiens
  misc_RNA (1)...(19): siRNA sense strand
gcuagaaggagacucugaa

SEQ ID NO: 1166902 - RNA, 19 nt, Homo sapiens
  misc_RNA (1)...(19): siRNA sense strand
guccugcuccucaugauuu

SEQ ID NO: 1166903 - RNA, 19 nt, Homo sapiens
  misc_RNA (1)...(19): siRNA sense strand
aguguucccuaaaucuaua

SEQ ID NO: 1166904 - RNA, 19 nt, Homo sapiens
  misc_RNA (1)...(19): siRNA sense strand
gagcggagggcacaguguu

SEQ ID NO: 1166905 - RNA, 19 nt, Homo sapiens
  misc_RNA (1)...(19): siRNA sense strand
ggccacagguauacaaggu

SEQ ID NO: 1166906 - RNA, 19 nt, Homo sapiens
  misc_RNA (1)...(19): siRNA sense strand
ccaucuggauucucaaagu

SEQ ID NO: 1166907 - RNA, 19 nt, Homo sapiens
  misc_RNA (1)...(19): siRNA sense strand
cccuaaaucuauagaaaca

SEQ ID NO: 1166908 - RNA, 19 nt, Homo sapiens
  misc_RNA (1)...(19): siRNA sense strand
agugcuaacucagcuuaua

SEQ ID NO: 1166909 - RNA, 19 nt, Homo sapiens
  misc_RNA (1)...(19): siRNA sense strand
gcggaaacgaugccuguau

SEQ ID NO: 1166910 - RNA, 19 nt, Homo sapiens
  misc_RNA (1)...(19): siRNA sense strand
ggcacaguguucccuaaau

SEQ ID NO: 1166911 - RNA, 19 nt, Homo sapiens
  misc_RNA (1)...(19): siRNA sense strand
caauaaugaagugguagua

SEQ ID NO: 1166912 - RNA, 19 nt, Homo sapiens
  misc_RNA (1)...(19): siRNA sense strand
gggcagaccccuucaaaga

SEQ ID NO: 1166913 - RNA, 19 nt, Homo sapiens
  misc_RNA (1)...(19): siRNA sense strand
gccaugaccaucuggauuc

SEQ ID NO: 1166914 - RNA, 19 nt, Homo sapiens
  misc_RNA (1)...(19): siRNA sense strand
aaacgaugccuguauuucu

SEQ ID NO: 1166915 - RNA, 19 nt, Homo sapiens
  misc_RNA (1)...(19): siRNA sense strand
uauacaagguggggauuua

SEQ ID NO: 1166916 - RNA, 19 nt, Homo sapiens
  misc_RNA (1)...(19): siRNA sense strand
caucuggauucucaaaguc

SEQ ID NO: 1166917 - RNA, 19 nt, Homo sapiens
  misc_RNA (1)...(19): siRNA sense strand
gaccaucuggauucucaaa

SEQ ID NO: 1166918 - RNA, 19 nt, Homo sapiens
  misc_RNA (1)...(19): siRNA sense strand
aacgaugccuguauuucuu

SEQ ID NO: 1166919 - RNA, 19 nt, Homo sapiens
  misc_RNA (1)...(19): siRNA sense strand
cuucacaauugauggaaug

SEQ ID NO: 1166920 - RNA, 19 nt, Homo sapiens
  misc_RNA (1)...(19): siRNA sense strand
cuggugaacuuggccauga

SEQ ID NO: 1166921 - RNA, 19 nt, Homo sapiens
  misc_RNA (1)...(19): siRNA sense strand
auagaaacaccuaauguca

SEQ ID NO: 1166922 - RNA, 19 nt, Homo sapiens
  misc_RNA (1)...(19): siRNA sense strand
gggcacaguguucccuaaa

SEQ ID NO: 1166923 - RNA, 19 nt, Homo sapiens
  misc_RNA (1)...(19): siRNA sense strand
uagaaggagacucugaauu

SEQ ID NO: 1166924 - RNA, 19 nt, Homo sapiens
  misc_RNA (1)...(19): siRNA sense strand
gaaaccugaggaucacaga

SEQ ID NO: 1166925 - RNA, 19 nt, Homo sapiens
  misc_RNA (1)...(19): siRNA sense strand
ggccaugaccaucuggauu

SEQ ID NO: 1166926 - RNA, 19 nt, Homo sapiens
  misc_RNA (1)...(19): siRNA sense strand
ccguagaagcuuaugguaa

SEQ ID NO: 1166927 - RNA, 19 nt, Homo sapiens
  misc_RNA (1)...(19): siRNA sense strand
uaaugaagugguaguagga

SEQ ID NO: 1166928 - RNA, 19 nt, Homo sapiens
  misc_RNA (1)...(19): siRNA sense strand
gcagaagcuggcaauaugg

SEQ ID NO: 1166929 - RNA, 19 nt, Homo sapiens
  misc_RNA (1)...(19): siRNA sense strand
caaccucucuacgccaaag

SEQ ID NO: 1166930 - RNA, 19 nt, Homo sapiens
  misc_RNA (1)...(19): siRNA sense strand
cuauagaaacaccuaaugu

SEQ ID NO: 1166931 - RNA, 19 nt, Homo sapiens
  misc_RNA (1)...(19): siRNA sense strand
gccagaaauguuacaguga

SEQ ID NO: 1166932 - RNA, 19 nt, Homo sapiens
  misc_RNA (1)...(19): siRNA sense strand
uauagaaacaccuaauguc

SEQ ID NO: 1166933 - RNA, 19 nt, Homo sapiens
  misc_RNA (1)...(19): siRNA sense strand
caauugauggaaugggaaa

SEQ ID NO: 1166934 - RNA, 19 nt, Homo sapiens
  misc_RNA (1)...(19): siRNA sense strand
aaccugaggaucacagaaa

SEQ ID NO: 1166935 - RNA, 19 nt, Homo sapiens
  misc_RNA (1)...(19): siRNA sense strand
gcaccaugccuggcucugu

SEQ ID NO: 1166936 - RNA, 19 nt, Homo sapiens
  misc_RNA (1)...(19): siRNA sense strand
acaguguucccuaaaucua

SEQ ID NO: 1166937 - RNA, 19 nt, Homo sapiens
  misc_RNA (1)...(19): siRNA sense strand
ucucuacgccaaagaaauc

SEQ ID NO: 1166938 - RNA, 19 nt, Homo sapiens
  misc_RNA (1)...(19): siRNA sense strand
gaaugggaaaccugaggau

SEQ ID NO: 1166939 - RNA, 19 nt, Homo sapiens
  misc_RNA (1)...(19): siRNA sense strand
ucucugcagacaauaauga

SEQ ID NO: 1166940 - RNA, 19 nt, Homo sapiens
  misc_RNA (1)...(19): siRNA sense strand
uaguaggagcugaaagauu

SEQ ID NO: 1166941 - RNA, 19 nt, Homo sapiens
  misc_RNA (1)...(19): siRNA sense strand
gcagaccccuucaaagaac

SEQ ID NO: 1166942 - RNA, 19 nt, Homo sapiens
  misc_RNA (1)...(19): siRNA sense strand
cagaaauguuacagugaac

SEQ ID NO: 1166943 - RNA, 19 nt, Homo sapiens
  misc_RNA (1)...(19): siRNA sense strand
cagaagcuggcaauaugga

SEQ ID NO: 1166944 - RNA, 19 nt, Homo sapiens
  misc_RNA (1)...(19): siRNA sense strand
aacccggucucuagugaug

SEQ ID NO: 1166945 - RNA, 19 nt, Homo sapiens
  misc_RNA (1)...(19): siRNA sense strand
cgaugccuguauuucuuug

SEQ ID NO: 1166946 - RNA, 19 nt, Homo sapiens
  misc_RNA (1)...(19): siRNA sense strand
gcugaaagauuacgaguuu

SEQ ID NO: 1166947 - RNA, 19 nt, Homo sapiens
  misc_RNA (1)...(19): siRNA sense strand
aguaggagcugaaagauua

SEQ ID NO: 1166948 - RNA, 19 nt, Homo sapiens
  misc_RNA (1)...(19): siRNA sense strand
cguagaagcuuaugguaaa

SEQ ID NO: 1166949 - RNA, 19 nt, Homo sapiens
  misc_RNA (1)...(19): siRNA sense strand
aggagacucugaauucuua

SEQ ID NO: 1166950 - RNA, 19 nt, Homo sapiens
  misc_RNA (1)...(19): siRNA sense strand
gcacaguguucccuaaauc

SEQ ID NO: 1166951 - RNA, 19 nt, Homo sapiens
  misc_RNA (1)...(19): siRNA sense strand
ccagaaauguuacagugaa

SEQ ID NO: 1166952 - RNA, 19 nt, Homo sapiens
  misc_RNA (1)...(19): siRNA sense strand
ggaaaucaaugcagaagcu

SEQ ID NO: 1166953 - RNA, 19 nt, Homo sapiens
  misc_RNA (1)...(19): siRNA sense strand
gcucuucucugcagacaau

SEQ ID NO: 1166954 - RNA, 19 nt, Homo sapiens
  misc_RNA (1)...(19): siRNA sense strand
agacaauaaugaaguggua

SEQ ID NO: 1166955 - RNA, 19 nt, Homo sapiens
  misc_RNA (1)...(19): siRNA sense strand
gaaggagacucugaauucu

SEQ ID NO: 1166956 - RNA, 19 nt, Homo sapiens
  misc_RNA (1)...(19): siRNA sense strand
agacuaaagugcuaacuca

SEQ ID NO: 1166957 - RNA, 19 nt, Homo sapiens
  misc_RNA (1)...(19): siRNA sense strand
ggaaacgaugccuguauuu

SEQ ID NO: 1166958 - RNA, 19 nt, Homo sapiens
  misc_RNA (1)...(19): siRNA sense strand
cggaaacgaugccuguauu

SEQ ID NO: 1166959 - RNA, 19 nt, Homo sapiens
  misc_RNA (1)...(19): siRNA sense strand
ucaaagaacuaagguugga

SEQ ID NO: 1166960 - RNA, 19 nt, Homo sapiens
  misc_RNA (1)...(19): siRNA sense strand
gaacuucacaauugaugga

SEQ ID NO: 1166961 - RNA, 19 nt, Homo sapiens
  misc_RNA (1)...(19): siRNA sense strand
agaaggagacucugaauuc

SEQ ID NO: 1166962 - RNA, 19 nt, Homo sapiens
  misc_RNA (1)...(19): siRNA sense strand
gguaguaggagcugaaaga

SEQ ID NO: 1166963 - RNA, 19 nt, Homo sapiens
  misc_RNA (1)...(19): siRNA sense strand
ugcagaagcuggcaauaug

SEQ ID NO: 1166964 - RNA, 19 nt, Homo sapiens
  misc_RNA (1)...(19): siRNA sense strand
ugaccagacuaaagugcua

SEQ ID NO: 1166965 - RNA, 19 nt, Homo sapiens
  misc_RNA (1)...(19): siRNA sense strand
ccaacccggucucuaguga

SEQ ID NO: 1166966 - RNA, 19 nt, Homo sapiens
  misc_RNA (1)...(19): siRNA sense strand
ucaaugaccagacuaaagu

SEQ ID NO: 1166967 - RNA, 19 nt, Homo sapiens
  misc_RNA (1)...(19): siRNA sense strand
caaaaggaguggaaaucaa

SEQ ID NO: 1166968 - RNA, 19 nt, Homo sapiens
  misc_RNA (1)...(19): siRNA sense strand
gugcuaacucagcuuauaa

SEQ ID NO: 1166969 - RNA, 19 nt, Homo sapiens
  misc_RNA (1)...(19): siRNA sense strand
aaagugcuaacucagcuua

SEQ ID NO: 1166970 - RNA, 19 nt, Homo sapiens
  misc_RNA (1)...(19): siRNA sense strand
gcuagaaggagacucugaa

SEQ ID NO: 1166971 - RNA, 19 nt, Homo sapiens
  misc_RNA (1)...(19): siRNA sense strand
guccugcuccucaugauuu

SEQ ID NO: 1166972 - RNA, 19 nt, Homo sapiens
  misc_RNA (1)...(19): siRNA sense strand
aguguucccuaaaucuaua

SEQ ID NO: 1166973 - RNA, 19 nt, Homo sapiens
  misc_RNA (1)...(19): siRNA sense strand
gagcggagggcacaguguu

SEQ ID NO: 1166974 - RNA, 19 nt, Homo sapiens
  misc_RNA (1)...(19): siRNA sense strand
ggccacagguauacaaggu

SEQ ID NO: 1166975 - RNA, 19 nt, Homo sapiens
  misc_RNA (1)...(19): siRNA sense strand
ccaucuggauucucaaagu

SEQ ID NO: 1166976 - RNA, 19 nt, Homo sapiens
  misc_RNA (1)...(19): siRNA sense strand
cccuaaaucuauagaaaca

SEQ ID NO: 1166977 - RNA, 19 nt, Homo sapiens
  misc_RNA (1)...(19): siRNA sense strand
agugcuaacucagcuuaua

SEQ ID NO: 1166978 - RNA, 19 nt, Homo sapiens
  misc_RNA (1)...(19): siRNA sense strand
gcggaaacgaugccuguau

SEQ ID NO: 1166979 - RNA, 19 nt, Homo sapiens
  misc_RNA (1)...(19): siRNA sense strand
ggcacaguguucccuaaau

SEQ ID NO: 1166980 - RNA, 19 nt, Homo sapiens
  misc_RNA (1)...(19): siRNA sense strand
caauaaugaagugguagua

SEQ ID NO: 1166981 - RNA, 19 nt, Homo sapiens
  misc_RNA (1)...(19): siRNA sense strand
gggcagaccccuucaaaga

SEQ ID NO: 1166982 - RNA, 19 nt, Homo sapiens
  misc_RNA (1)...(19): siRNA sense strand
gccaugaccaucuggauuc

SEQ ID NO: 1166983 - RNA, 19 nt, Homo sapiens
  misc_RNA (1)...(19): siRNA sense strand
aaacgaugccuguauuucu

SEQ ID NO: 1166984 - RNA, 19 nt, Homo sapiens
  misc_RNA (1)...(19): siRNA sense strand
uauacaagguggggauuua

SEQ ID NO: 1166985 - RNA, 19 nt, Homo sapiens
  misc_RNA (1)...(19): siRNA sense strand
caucuggauucucaaaguc

SEQ ID NO: 1166986 - RNA, 19 nt, Homo sapiens
  misc_RNA (1)...(19): siRNA sense strand
gaccaucuggauucucaaa

SEQ ID NO: 1166987 - RNA, 19 nt, Homo sapiens
  misc_RNA (1)...(19): siRNA sense strand
aacgaugccuguauuucuu

SEQ ID NO: 1166988 - RNA, 19 nt, Homo sapiens
  misc_RNA (1)...(19): siRNA sense strand
cuucacaauugauggaaug

SEQ ID NO: 1166989 - RNA, 19 nt, Homo sapiens
  misc_RNA (1)...(19): siRNA sense strand
cuggugaacuuggccauga

SEQ ID NO: 1166990 - RNA, 19 nt, Homo sapiens
  misc_RNA (1)...(19): siRNA sense strand
auagaaacaccuaauguca

SEQ ID NO: 1166991 - RNA, 19 nt, Homo sapiens
  misc_RNA (1)...(19): siRNA sense strand
gggcacaguguucccuaaa

SEQ ID NO: 1166992 - RNA, 19 nt, Homo sapiens
  misc_RNA (1)...(19): siRNA sense strand
uagaaggagacucugaauu

SEQ ID NO: 1166993 - RNA, 19 nt, Homo sapiens
  misc_RNA (1)...(19): siRNA sense strand
gaaaccugaggaucacaga

SEQ ID NO: 1166994 - RNA, 19 nt, Homo sapiens
  misc_RNA (1)...(19): siRNA sense strand
ggccaugaccaucuggauu

SEQ ID NO: 1166995 - RNA, 19 nt, Homo sapiens
  misc_RNA (1)...(19): siRNA sense strand
ccguagaagcuuaugguaa

SEQ ID NO: 1166996 - RNA, 19 nt, Homo sapiens
  misc_RNA (1)...(19): siRNA sense strand
uaaugaagugguaguagga

SEQ ID NO: 1166997 - RNA, 19 nt, Homo sapiens
  misc_RNA (1)...(19): siRNA sense strand
gcagaagcuggcaauaugg

SEQ ID NO: 1166998 - RNA, 19 nt, Homo sapiens
  misc_RNA (1)...(19): siRNA sense strand
caaccucucuacgccaaag

SEQ ID NO: 1166999 - RNA, 19 nt, Homo sapiens
  misc_RNA (1)...(19): siRNA sense strand
cuauagaaacaccuaaugu

SEQ ID NO: 1167000 - RNA, 19 nt, Homo sapiens
  misc_RNA (1)...(19): siRNA sense strand
gccagaaauguuacaguga

SEQ ID NO: 1167001 - RNA, 19 nt, Homo sapiens
  misc_RNA (1)...(19): siRNA sense strand
uauagaaacaccuaauguc

SEQ ID NO: 1167002 - RNA, 19 nt, Homo sapiens
  misc_RNA (1)...(19): siRNA sense strand
caauugauggaaugggaaa

SEQ ID NO: 1167003 - RNA, 19 nt, Homo sapiens
  misc_RNA (1)...(19): siRNA sense strand
aaccugaggaucacagaaa

SEQ ID NO: 1167004 - RNA, 19 nt, Homo sapiens
  misc_RNA (1)...(19): siRNA sense strand
gcaccaugccuggcucugu

SEQ ID NO: 1167005 - RNA, 19 nt, Homo sapiens
  misc_RNA (1)...(19): siRNA sense strand
acaguguucccuaaaucua

SEQ ID NO: 1167006 - RNA, 19 nt, Homo sapiens
  misc_RNA (1)...(19): siRNA sense strand
ucucuacgccaaagaaauc

SEQ ID NO: 1167007 - RNA, 19 nt, Homo sapiens
  misc_RNA (1)...(19): siRNA sense strand
gaaugggaaaccugaggau

SEQ ID NO: 1167008 - RNA, 19 nt, Homo sapiens
  misc_RNA (1)...(19): siRNA sense strand
ucucugcagacaauaauga

SEQ ID NO: 1167009 - RNA, 19 nt, Homo sapiens
  misc_RNA (1)...(19): siRNA sense strand
uaguaggagcugaaagauu

SEQ ID NO: 1167010 - RNA, 19 nt, Homo sapiens
  misc_RNA (1)...(19): siRNA sense strand
gcagaccccuucaaagaac

SEQ ID NO: 1167011 - RNA, 19 nt, Homo sapiens
  misc_RNA (1)...(19): siRNA sense strand
cagaaauguuacagugaac

SEQ ID NO: 1167012 - RNA, 19 nt, Homo sapiens
  misc_RNA (1)...(19): siRNA sense strand
cagaagcuggcaauaugga

SEQ ID NO: 1167013 - RNA, 19 nt, Homo sapiens
  misc_RNA (1)...(19): siRNA sense strand
aacccggucucuagugaug

SEQ ID NO: 1167014 - RNA, 19 nt, Homo sapiens
  misc_RNA (1)...(19): siRNA sense strand
cgaugccuguauuucuuug

SEQ ID NO: 1167015 - RNA, 19 nt, Homo sapiens
  misc_RNA (1)...(19): siRNA sense strand
gagcuugacuccagccuua

SEQ ID NO: 1167016 - RNA, 19 nt, Homo sapiens
  misc_RNA (1)...(19): siRNA sense strand
gaagaagccagaaagauuu

SEQ ID NO: 1167017 - RNA, 19 nt, Homo sapiens
  misc_RNA (1)...(19): siRNA sense strand
gagagagcccuaauugaua

SEQ ID NO: 1167018 - RNA, 19 nt, Homo sapiens
  misc_RNA (1)...(19): siRNA sense strand
ggagagagcccuaauugau

SEQ ID NO: 1167019 - RNA, 19 nt, Homo sapiens
  misc_RNA (1)...(19): siRNA sense strand
cagaagguauggcagauuu

SEQ ID NO: 1167020 - RNA, 19 nt, Homo sapiens
  misc_RNA (1)...(19): siRNA sense strand
gaguggaguuugaagagaa

SEQ ID NO: 1167021 - RNA, 19 nt, Homo sapiens
  misc_RNA (1)...(19): siRNA sense strand
gaagauuugggaaaguuaa

SEQ ID NO: 1167022 - RNA, 19 nt, Homo sapiens
  misc_RNA (1)...(19): siRNA sense strand
agaagaagccagaaagauu

SEQ ID NO: 1167023 - RNA, 19 nt, Homo sapiens
  misc_RNA (1)...(19): siRNA sense strand
cagaagauuugggaaaguu

SEQ ID NO: 1167024 - RNA, 19 nt, Homo sapiens
  misc_RNA (1)...(19): siRNA sense strand
agagagcccuaauugauau

SEQ ID NO: 1167025 - RNA, 19 nt, Homo sapiens
  misc_RNA (1)...(19): siRNA sense strand
gguggaacuucucuacuau

SEQ ID NO: 1167026 - RNA, 19 nt, Homo sapiens
  misc_RNA (1)...(19): siRNA sense strand
cagcuggaguggaguuuga

SEQ ID NO: 1167027 - RNA, 19 nt, Homo sapiens
  misc_RNA (1)...(19): siRNA sense strand
gaagguauggcagauuuga

SEQ ID NO: 1167028 - RNA, 19 nt, Homo sapiens
  misc_RNA (1)...(19): siRNA sense strand
gggaugaaguugguacaga

SEQ ID NO: 1167029 - RNA, 19 nt, Homo sapiens
  misc_RNA (1)...(19): siRNA sense strand
ggaguggaguuugaagaga

SEQ ID NO: 1167030 - RNA, 19 nt, Homo sapiens
  misc_RNA (1)...(19): siRNA sense strand
ugaaugaaaugauccuucu

SEQ ID NO: 1167031 - RNA, 19 nt, Homo sapiens
  misc_RNA (1)...(19): siRNA sense strand
ggaaaguuaagaaaugaug

SEQ ID NO: 1167032 - RNA, 19 nt, Homo sapiens
  misc_RNA (1)...(19): siRNA sense strand
gcagaagauuugggaaagu

SEQ ID NO: 1167033 - RNA, 19 nt, Homo sapiens
  misc_RNA (1)...(19): siRNA sense strand
ugguggaacuucucuacua

SEQ ID NO: 1167034 - RNA, 19 nt, Homo sapiens
  misc_RNA (1)...(19): siRNA sense strand
uaagaaaugaugggaguuu

SEQ ID NO: 1167035 - RNA, 19 nt, Homo sapiens
  misc_RNA (1)...(19): siRNA sense strand
ggaguuugaagagaaauuu

SEQ ID NO: 1167036 - RNA, 19 nt, Homo sapiens
  misc_RNA (1)...(19): siRNA sense strand
gagcccuaauugauaugua

SEQ ID NO: 1167037 - RNA, 19 nt, Homo sapiens
  misc_RNA (1)...(19): siRNA sense strand
ugcaaaagcuuuagaagaa

SEQ ID NO: 1167038 - RNA, 19 nt, Homo sapiens
  misc_RNA (1)...(19): siRNA sense strand
gaaaugaugggaguuugau

SEQ ID NO: 1167039 - RNA, 19 nt, Homo sapiens
  misc_RNA (1)...(19): siRNA sense strand
ugggaaaguuaagaaauga

SEQ ID NO: 1167040 - RNA, 19 nt, Homo sapiens
  misc_RNA (1)...(19): siRNA sense strand
aagauugccuugaucaaag

SEQ ID NO: 1167041 - RNA, 19 nt, Homo sapiens
  misc_RNA (1)...(19): siRNA sense strand
aagcuucacuacuucaaug

SEQ ID NO: 1167042 - RNA, 19 nt, Homo sapiens
  misc_RNA (1)...(19): siRNA sense strand
cuauuucccugccuucgaa

SEQ ID NO: 1167043 - RNA, 19 nt, Homo sapiens
  misc_RNA (1)...(19): siRNA sense strand
gcccaagcuucacuacuuc

SEQ ID NO: 1167044 - RNA, 19 nt, Homo sapiens
  misc_RNA (1)...(19): siRNA sense strand
aaggagagagcccuaauug

SEQ ID NO: 1167045 - RNA, 19 nt, Homo sapiens
  misc_RNA (1)...(19): siRNA sense strand
uugggaaaguuaagaaaug

SEQ ID NO: 1167046 - RNA, 19 nt, Homo sapiens
  misc_RNA (1)...(19): siRNA sense strand
uggaacuucucuacuaugu

SEQ ID NO: 1167047 - RNA, 19 nt, Homo sapiens
  misc_RNA (1)...(19): siRNA sense strand
uauggcagauuugaaugaa

SEQ ID NO: 1167048 - RNA, 19 nt, Homo sapiens
  misc_RNA (1)...(19): siRNA sense strand
guauggcagauuugaauga

SEQ ID NO: 1167049 - RNA, 19 nt, Homo sapiens
  misc_RNA (1)...(19): siRNA sense strand
agcccaagcuucacuacuu

SEQ ID NO: 1167050 - RNA, 19 nt, Homo sapiens
  misc_RNA (1)...(19): siRNA sense strand
gauccuucuucugcccuua

SEQ ID NO: 1167051 - RNA, 19 nt, Homo sapiens
  misc_RNA (1)...(19): siRNA sense strand
uaaaggagagagcccuaau

SEQ ID NO: 1167052 - RNA, 19 nt, Homo sapiens
  misc_RNA (1)...(19): siRNA sense strand
gauuugggaaaguuaagaa

SEQ ID NO: 1167053 - RNA, 19 nt, Homo sapiens
  misc_RNA (1)...(19): siRNA sense strand
aaaggagagagcccuaauu

SEQ ID NO: 1167054 - RNA, 19 nt, Homo sapiens
  misc_RNA (1)...(19): siRNA sense strand
aagaaaugaugggaguuug

SEQ ID NO: 1167055 - RNA, 19 nt, Homo sapiens
  misc_RNA (1)...(19): siRNA sense strand
agauugccuugaucaaaga

SEQ ID NO: 1167056 - RNA, 19 nt, Homo sapiens
  misc_RNA (1)...(19): siRNA sense strand
agaaaugaugggaguuuga

SEQ ID NO: 1167057 - RNA, 19 nt, Homo sapiens
  misc_RNA (1)...(19): siRNA sense strand
aaggaagccucccgcagau

SEQ ID NO: 1167058 - RNA, 19 nt, Homo sapiens
  misc_RNA (1)...(19): siRNA sense strand
agaagauuugggaaaguua

SEQ ID NO: 1167059 - RNA, 19 nt, Homo sapiens
  misc_RNA (1)...(19): siRNA sense strand
ugauauguauacagaaggu

SEQ ID NO: 1167060 - RNA, 19 nt, Homo sapiens
  misc_RNA (1)...(19): siRNA sense strand
cagcaaauacaaccucuac

SEQ ID NO: 1167061 - RNA, 19 nt, Homo sapiens
  misc_RNA (1)...(19): siRNA sense strand
ccucuacgggaaagacaua

SEQ ID NO: 1167062 - RNA, 19 nt, Homo sapiens
  misc_RNA (1)...(19): siRNA sense strand
gcccuaauugauauguaua

SEQ ID NO: 1167063 - RNA, 19 nt, Homo sapiens
  misc_RNA (1)...(19): siRNA sense strand
uagaagaagccagaaagau

SEQ ID NO: 1167064 - RNA, 19 nt, Homo sapiens
  misc_RNA (1)...(19): siRNA sense strand
gaaugaaaugauccuucuu

SEQ ID NO: 1167065 - RNA, 19 nt, Homo sapiens
  misc_RNA (1)...(19): siRNA sense strand
ugagauugaugggaugaag

SEQ ID NO: 1167066 - RNA, 19 nt, Homo sapiens
  misc_RNA (1)...(19): siRNA sense strand
gaaagacauaaaggagaga

SEQ ID NO: 1167067 - RNA, 19 nt, Homo sapiens
  misc_RNA (1)...(19): siRNA sense strand
aaugaaaugauccuucuuc

SEQ ID NO: 1167068 - RNA, 19 nt, Homo sapiens
  misc_RNA (1)...(19): siRNA sense strand
uuagaagaagccagaaaga

SEQ ID NO: 1167069 - RNA, 19 nt, Homo sapiens
  misc_RNA (1)...(19): siRNA sense strand
uuacagagccauggacaag

SEQ ID NO: 1167070 - RNA, 19 nt, Homo sapiens
  misc_RNA (1)...(19): siRNA sense strand
ugcccacggugaagaaguu

SEQ ID NO: 1167071 - RNA, 19 nt, Homo sapiens
  misc_RNA (1)...(19): siRNA sense strand
acagagccauggacaagac

SEQ ID NO: 1167072 - RNA, 19 nt, Homo sapiens
  misc_RNA (1)...(19): siRNA sense strand
gcaaaagcuuuagaagaag

SEQ ID NO: 1167073 - RNA, 19 nt, Homo sapiens
  misc_RNA (1)...(19): siRNA sense strand
aguggaguuugaagagaaa

SEQ ID NO: 1167074 - RNA, 19 nt, Homo sapiens
  misc_RNA (1)...(19): siRNA sense strand
cugcagaagauuugggaaa

SEQ ID NO: 1167075 - RNA, 19 nt, Homo sapiens
  misc_RNA (1)...(19): siRNA sense strand
ugaaaugauccuucuucug

SEQ ID NO: 1167076 - RNA, 19 nt, Homo sapiens
  misc_RNA (1)...(19): siRNA sense strand
agauugaugggaugaaguu

SEQ ID NO: 1167077 - RNA, 19 nt, Homo sapiens
  misc_RNA (1)...(19): siRNA sense strand
ugaugggaguuugauguuc

SEQ ID NO: 1167078 - RNA, 19 nt, Homo sapiens
  misc_RNA (1)...(19): siRNA sense strand
acuccagccuuaucuccaa

SEQ ID NO: 1167079 - RNA, 19 nt, Homo sapiens
  misc_RNA (1)...(19): siRNA sense strand
gaaaggagaccaaguccaa

SEQ ID NO: 1167080 - RNA, 19 nt, Homo sapiens
  misc_RNA (1)...(19): siRNA sense strand
gcaaugaacaggaauggaa

SEQ ID NO: 1167081 - RNA, 19 nt, Homo sapiens
  misc_RNA (1)...(19): siRNA sense strand
gccagaagguggagcagua

SEQ ID NO: 1167082 - RNA, 19 nt, Homo sapiens
  misc_RNA (1)...(19): siRNA sense strand
gggaguaucugugaaggaa

SEQ ID NO: 1167083 - RNA, 19 nt, Homo sapiens
  misc_RNA (1)...(19): siRNA sense strand
gcccagcccucuccucaaa

SEQ ID NO: 1167084 - RNA, 19 nt, Homo sapiens
  misc_RNA (1)...(19): siRNA sense strand
gagaagggaguaucuguga

SEQ ID NO: 1167085 - RNA, 19 nt, Homo sapiens
  misc_RNA (1)...(19): siRNA sense strand
gaucagggcugggaacucu

SEQ ID NO: 1167086 - RNA, 19 nt, Homo sapiens
  misc_RNA (1)...(19): siRNA sense strand
cggcugguguucccaauaa

SEQ ID NO: 1167087 - RNA, 19 nt, Homo sapiens
  misc_RNA (1)...(19): siRNA sense strand
agacagggcucuucacacu

SEQ ID NO: 1167088 - RNA, 19 nt, Homo sapiens
  misc_RNA (1)...(19): siRNA sense strand
ggaggagcgugcagaacug

SEQ ID NO: 1167089 - RNA, 19 nt, Homo sapiens
  misc_RNA (1)...(19): siRNA sense strand
gaguaucugugaaggaaca

SEQ ID NO: 1167090 - RNA, 19 nt, Homo sapiens
  misc_RNA (1)...(19): siRNA sense strand
gaagggaguaucugugaag

SEQ ID NO: 1167091 - RNA, 19 nt, Homo sapiens
  misc_RNA (1)...(19): siRNA sense strand
aaacaucacagcccggauu

SEQ ID NO: 1167092 - RNA, 19 nt, Homo sapiens
  misc_RNA (1)...(19): siRNA sense strand
gccaggcaaugaacaggaa

SEQ ID NO: 1167093 - RNA, 19 nt, Homo sapiens
  misc_RNA (1)...(19): siRNA sense strand
ccguaacccugaccuguga

SEQ ID NO: 1167094 - RNA, 19 nt, Homo sapiens
  misc_RNA (1)...(19): siRNA sense strand
ggaagccccuggugccuaa

SEQ ID NO: 1167095 - RNA, 19 nt, Homo sapiens
  misc_RNA (1)...(19): siRNA sense strand
gcgagccacuggugcugaa

SEQ ID NO: 1167096 - RNA, 19 nt, Homo sapiens
  misc_RNA (1)...(19): siRNA sense strand
agccagaaauuguagauuc

SEQ ID NO: 1167097 - RNA, 19 nt, Homo sapiens
  misc_RNA (1)...(19): siRNA sense strand
ggaauggaaaggagaccaa

SEQ ID NO: 1167098 - RNA, 19 nt, Homo sapiens
  misc_RNA (1)...(19): siRNA sense strand
gaggcaggcgagaguagua

SEQ ID NO: 1167099 - RNA, 19 nt, Homo sapiens
  misc_RNA (1)...(19): siRNA sense strand
cgucccaccuucuccugua

SEQ ID NO: 1167100 - RNA, 19 nt, Homo sapiens
  misc_RNA (1)...(19): siRNA sense strand
caaugaacaggaauggaaa

SEQ ID NO: 1167101 - RNA, 19 nt, Homo sapiens
  misc_RNA (1)...(19): siRNA sense strand
caguguggcucguguccuu

SEQ ID NO: 1167102 - RNA, 19 nt, Homo sapiens
  misc_RNA (1)...(19): siRNA sense strand
gaagccagaaauuguagau

SEQ ID NO: 1167103 - RNA, 19 nt, Homo sapiens
  misc_RNA (1)...(19): siRNA sense strand
acacugcagucggagcuaa

SEQ ID NO: 1167104 - RNA, 19 nt, Homo sapiens
  misc_RNA (1)...(19): siRNA sense strand
ccagcccucuccucaaauc

SEQ ID NO: 1167105 - RNA, 19 nt, Homo sapiens
  misc_RNA (1)...(19): siRNA sense strand
guccgugucuaccagauuc

SEQ ID NO: 1167106 - RNA, 19 nt, Homo sapiens
  misc_RNA (1)...(19): siRNA sense strand
agaagggaguaucugugaa

SEQ ID NO: 1167107 - RNA, 19 nt, Homo sapiens
  misc_RNA (1)...(19): siRNA sense strand
gauucugccucugaacuca

SEQ ID NO: 1167108 - RNA, 19 nt, Homo sapiens
  misc_RNA (1)...(19): siRNA sense strand
gcaguaguaggugcucaaa

SEQ ID NO: 1167109 - RNA, 19 nt, Homo sapiens
  misc_RNA (1)...(19): siRNA sense strand
ccaauaagguggggacaug

SEQ ID NO: 1167110 - RNA, 19 nt, Homo sapiens
  misc_RNA (1)...(19): siRNA sense strand
ugggaagccagaaauugua

SEQ ID NO: 1167111 - RNA, 19 nt, Homo sapiens
  misc_RNA (1)...(19): siRNA sense strand
uguagauucugccucugaa

SEQ ID NO: 1167112 - RNA, 19 nt, Homo sapiens
  misc_RNA (1)...(19): siRNA sense strand
ggagcgugcagaacugaau

SEQ ID NO: 1167113 - RNA, 19 nt, Homo sapiens
  misc_RNA (1)...(19): siRNA sense strand
gugcugguccucagucugu

SEQ ID NO: 1167114 - RNA, 19 nt, Homo sapiens
  misc_RNA (1)...(19): siRNA sense strand
ggggucaucuuguggcaaa

SEQ ID NO: 1167115 - RNA, 19 nt, Homo sapiens
  misc_RNA (1)...(19): siRNA sense strand
gaggagcgugcagaacuga

SEQ ID NO: 1167116 - RNA, 19 nt, Homo sapiens
  misc_RNA (1)...(19): siRNA sense strand
ggagaccaaguccaacuac

SEQ ID NO: 1167117 - RNA, 19 nt, Homo sapiens
  misc_RNA (1)...(19): siRNA sense strand
gggaagccagaaauuguag

SEQ ID NO: 1167118 - RNA, 19 nt, Homo sapiens
  misc_RNA (1)...(19): siRNA sense strand
ggaagccagaaauuguaga

SEQ ID NO: 1167119 - RNA, 19 nt, Homo sapiens
  misc_RNA (1)...(19): siRNA sense strand
ugagacagggcucuucaca

SEQ ID NO: 1167120 - RNA, 19 nt, Homo sapiens
  misc_RNA (1)...(19): siRNA sense strand
gaaaggagaccaaguccaa

SEQ ID NO: 1167121 - RNA, 19 nt, Homo sapiens
  misc_RNA (1)...(19): siRNA sense strand
gcaaugaacaggaauggaa

SEQ ID NO: 1167122 - RNA, 19 nt, Homo sapiens
  misc_RNA (1)...(19): siRNA sense strand
gccagaagguggagcagua

SEQ ID NO: 1167123 - RNA, 19 nt, Homo sapiens
  misc_RNA (1)...(19): siRNA sense strand
gggaguaucugugaaggaa

SEQ ID NO: 1167124 - RNA, 19 nt, Homo sapiens
  misc_RNA (1)...(19): siRNA sense strand
gcccagcccucuccucaaa

SEQ ID NO: 1167125 - RNA, 19 nt, Homo sapiens
  misc_RNA (1)...(19): siRNA sense strand
gagaagggaguaucuguga

SEQ ID NO: 1167126 - RNA, 19 nt, Homo sapiens
  misc_RNA (1)...(19): siRNA sense strand
gaucagggcugggaacucu

SEQ ID NO: 1167127 - RNA, 19 nt, Homo sapiens
  misc_RNA (1)...(19): siRNA sense strand
cggcugguguucccaauaa

SEQ ID NO: 1167128 - RNA, 19 nt, Homo sapiens
  misc_RNA (1)...(19): siRNA sense strand
agacagggcucuucacacu

SEQ ID NO: 1167129 - RNA, 19 nt, Homo sapiens
  misc_RNA (1)...(19): siRNA sense strand
ggaggagcgugcagaacug

SEQ ID NO: 1167130 - RNA, 19 nt, Homo sapiens
  misc_RNA (1)...(19): siRNA sense strand
gaguaucugugaaggaaca

SEQ ID NO: 1167131 - RNA, 19 nt, Homo sapiens
  misc_RNA (1)...(19): siRNA sense strand
gaagggaguaucugugaag

SEQ ID NO: 1167132 - RNA, 19 nt, Homo sapiens
  misc_RNA (1)...(19): siRNA sense strand
aaacaucacagcccggauu

SEQ ID NO: 1167133 - RNA, 19 nt, Homo sapiens
  misc_RNA (1)...(19): siRNA sense strand
gccaggcaaugaacaggaa

SEQ ID NO: 1167134 - RNA, 19 nt, Homo sapiens
  misc_RNA (1)...(19): siRNA sense strand
ccguaacccugaccuguga

SEQ ID NO: 1167135 - RNA, 19 nt, Homo sapiens
  misc_RNA (1)...(19): siRNA sense strand
ggaagccccuggugccuaa

SEQ ID NO: 1167136 - RNA, 19 nt, Homo sapiens
  misc_RNA (1)...(19): siRNA sense strand
gcgagccacuggugcugaa

SEQ ID NO: 1167137 - RNA, 19 nt, Homo sapiens
  misc_RNA (1)...(19): siRNA sense strand
agccagaaauuguagauuc

SEQ ID NO: 1167138 - RNA, 19 nt, Homo sapiens
  misc_RNA (1)...(19): siRNA sense strand
ggaauggaaaggagaccaa

SEQ ID NO: 1167139 - RNA, 19 nt, Homo sapiens
  misc_RNA (1)...(19): siRNA sense strand
cgucccaccuucuccugua

SEQ ID NO: 1167140 - RNA, 19 nt, Homo sapiens
  misc_RNA (1)...(19): siRNA sense strand
caaugaacaggaauggaaa

SEQ ID NO: 1167141 - RNA, 19 nt, Homo sapiens
  misc_RNA (1)...(19): siRNA sense strand
caguguggcucguguccuu

SEQ ID NO: 1167142 - RNA, 19 nt, Homo sapiens
  misc_RNA (1)...(19): siRNA sense strand
gaagccagaaauuguagau

SEQ ID NO: 1167143 - RNA, 19 nt, Homo sapiens
  misc_RNA (1)...(19): siRNA sense strand
acacugcagucggagcuaa

SEQ ID NO: 1167144 - RNA, 19 nt, Homo sapiens
  misc_RNA (1)...(19): siRNA sense strand
ccagcccucuccucaaauc

SEQ ID NO: 1167145 - RNA, 19 nt, Homo sapiens
  misc_RNA (1)...(19): siRNA sense strand
guccgugucuaccagauuc

SEQ ID NO: 1167146 - RNA, 19 nt, Homo sapiens
  misc_RNA (1)...(19): siRNA sense strand
agaagggaguaucugugaa

SEQ ID NO: 1167147 - RNA, 19 nt, Homo sapiens
  misc_RNA (1)...(19): siRNA sense strand
gauucugccucugaacuca

SEQ ID NO: 1167148 - RNA, 19 nt, Homo sapiens
  misc_RNA (1)...(19): siRNA sense strand
gcaguaguaggugcucaaa

SEQ ID NO: 1167149 - RNA, 19 nt, Homo sapiens
  misc_RNA (1)...(19): siRNA sense strand
ccaauaagguggggacaug

SEQ ID NO: 1167150 - RNA, 19 nt, Homo sapiens
  misc_RNA (1)...(19): siRNA sense strand
ugggaagccagaaauugua

SEQ ID NO: 1167151 - RNA, 19 nt, Homo sapiens
  misc_RNA (1)...(19): siRNA sense strand
uguagauucugccucugaa

SEQ ID NO: 1167152 - RNA, 19 nt, Homo sapiens
  misc_RNA (1)...(19): siRNA sense strand
ggagcgugcagaacugaau

SEQ ID NO: 1167153 - RNA, 19 nt, Homo sapiens
  misc_RNA (1)...(19): siRNA sense strand
gugcugguccucagucugu

SEQ ID NO: 1167154 - RNA, 19 nt, Homo sapiens
  misc_RNA (1)...(19): siRNA sense strand
ggggucaucuuguggcaaa

SEQ ID NO: 1167155 - RNA, 19 nt, Homo sapiens
  misc_RNA (1)...(19): siRNA sense strand
gaggagcgugcagaacuga

SEQ ID NO: 1167156 - RNA, 19 nt, Homo sapiens
  misc_RNA (1)...(19): siRNA sense strand
ggagaccaaguccaacuac

SEQ ID NO: 1167157 - RNA, 19 nt, Homo sapiens
  misc_RNA (1)...(19): siRNA sense strand
gggaagccagaaauuguag

SEQ ID NO: 1167158 - RNA, 19 nt, Homo sapiens
  misc_RNA (1)...(19): siRNA sense strand
ggaagccagaaauuguaga

SEQ ID NO: 1167159 - RNA, 19 nt, Homo sapiens
  misc_RNA (1)...(19): siRNA sense strand
ugagacagggcucuucaca

SEQ ID NO: 1167160 - RNA, 19 nt, Homo sapiens
  misc_RNA (1)...(19): siRNA sense strand
ggagagagcacgauuuauu

SEQ ID NO: 1167161 - RNA, 19 nt, Homo sapiens
  misc_RNA (1)...(19): siRNA sense strand
agagaaacauguccauaua

SEQ ID NO: 1167162 - RNA, 19 nt, Homo sapiens
  misc_RNA (1)...(19): siRNA sense strand
cagaugcacuuuauuugua

SEQ ID NO: 1167163 - RNA, 19 nt, Homo sapiens
  misc_RNA (1)...(19): siRNA sense strand
ggacuuacgaguuugguua

SEQ ID NO: 1167164 - RNA, 19 nt, Homo sapiens
  misc_RNA (1)...(19): siRNA sense strand
aaacagauaucaggauuug

SEQ ID NO: 1167165 - RNA, 19 nt, Homo sapiens
  misc_RNA (1)...(19): siRNA sense strand
cuauggagcucauugguaa

SEQ ID NO: 1167166 - RNA, 19 nt, Homo sapiens
  misc_RNA (1)...(19): siRNA sense strand
aaacacaccuuuagugaag

SEQ ID NO: 1167167 - RNA, 19 nt, Homo sapiens
  misc_RNA (1)...(19): siRNA sense strand
gaacuuaaaggaucaguag

SEQ ID NO: 1167168 - RNA, 19 nt, Homo sapiens
  misc_RNA (1)...(19): siRNA sense strand
gaaaacagauaucaggauu

SEQ ID NO: 1167169 - RNA, 19 nt, Homo sapiens
  misc_RNA (1)...(19): siRNA sense strand
uaaaggaucaguagcaauu

SEQ ID NO: 1167170 - RNA, 19 nt, Homo sapiens
  misc_RNA (1)...(19): siRNA sense strand
aaaugggacuuacgaguuu

SEQ ID NO: 1167171 - RNA, 19 nt, Homo sapiens
  misc_RNA (1)...(19): siRNA sense strand
guuaucagaugcacuuuau

SEQ ID NO: 1167172 - RNA, 19 nt, Homo sapiens
  misc_RNA (1)...(19): siRNA sense strand
ugagauuggugaacgagua

SEQ ID NO: 1167173 - RNA, 19 nt, Homo sapiens
  misc_RNA (1)...(19): siRNA sense strand
gugaacgaguagauuauaa

SEQ ID NO: 1167174 - RNA, 19 nt, Homo sapiens
  misc_RNA (1)...(19): siRNA sense strand
gagagagcacgauuuauug

SEQ ID NO: 1167175 - RNA, 19 nt, Homo sapiens
  misc_RNA (1)...(19): siRNA sense strand
caaaugggacuuacgaguu

SEQ ID NO: 1167176 - RNA, 19 nt, Homo sapiens
  misc_RNA (1)...(19): siRNA sense strand
ggucauugcugugauuguu

SEQ ID NO: 1167177 - RNA, 19 nt, Homo sapiens
  misc_RNA (1)...(19): siRNA sense strand
ccagauccauuuucacuua

SEQ ID NO: 1167178 - RNA, 19 nt, Homo sapiens
  misc_RNA (1)...(19): siRNA sense strand
gaaggaauacuugacaguu

SEQ ID NO: 1167179 - RNA, 19 nt, Homo sapiens
  misc_RNA (1)...(19): siRNA sense strand
aaggaauacuugacaguuu

SEQ ID NO: 1167180 - RNA, 19 nt, Homo sapiens
  misc_RNA (1)...(19): siRNA sense strand
ucagaugacgccuguuaua

SEQ ID NO: 1167181 - RNA, 19 nt, Homo sapiens
  misc_RNA (1)...(19): siRNA sense strand
gaaaacacaccuuuaguga

SEQ ID NO: 1167182 - RNA, 19 nt, Homo sapiens
  misc_RNA (1)...(19): siRNA sense strand
gaugacgccuguuauagag

SEQ ID NO: 1167183 - RNA, 19 nt, Homo sapiens
  misc_RNA (1)...(19): siRNA sense strand
gagaaacauguccauauau

SEQ ID NO: 1167184 - RNA, 19 nt, Homo sapiens
  misc_RNA (1)...(19): siRNA sense strand
acgaguagauuauaagugu

SEQ ID NO: 1167185 - RNA, 19 nt, Homo sapiens
  misc_RNA (1)...(19): siRNA sense strand
cuacaaagcaacaguuaug

SEQ ID NO: 1167186 - RNA, 19 nt, Homo sapiens
  misc_RNA (1)...(19): siRNA sense strand
ccaccaacauuugaagcua

SEQ ID NO: 1167187 - RNA, 19 nt, Homo sapiens
  misc_RNA (1)...(19): siRNA sense strand
uauacgggauccuuuaaau

SEQ ID NO: 1167188 - RNA, 19 nt, Homo sapiens
  misc_RNA (1)...(19): siRNA sense strand
cgaguuugguuaucagaug

SEQ ID NO: 1167189 - RNA, 19 nt, Homo sapiens
  misc_RNA (1)...(19): siRNA sense strand
gaacgaguagauuauaagu

SEQ ID NO: 1167190 - RNA, 19 nt, Homo sapiens
  misc_RNA (1)...(19): siRNA sense strand
gugaggagccaccaacauu

SEQ ID NO: 1167191 - RNA, 19 nt, Homo sapiens
  misc_RNA (1)...(19): siRNA sense strand
gauggcagcgacacaauug

SEQ ID NO: 1167192 - RNA, 19 nt, Homo sapiens
  misc_RNA (1)...(19): siRNA sense strand
gcuauggagcucauuggua

SEQ ID NO: 1167193 - RNA, 19 nt, Homo sapiens
  misc_RNA (1)...(19): siRNA sense strand
gaggagccaccaacauuug

SEQ ID NO: 1167194 - RNA, 19 nt, Homo sapiens
  misc_RNA (1)...(19): siRNA sense strand
acacaccuuuagugaagua

SEQ ID NO: 1167195 - RNA, 19 nt, Homo sapiens
  misc_RNA (1)...(19): siRNA sense strand
ucucagaugacgccuguua

SEQ ID NO: 1167196 - RNA, 19 nt, Homo sapiens
  misc_RNA (1)...(19): siRNA sense strand
uagagaaacauguccauau

SEQ ID NO: 1167197 - RNA, 19 nt, Homo sapiens
  misc_RNA (1)...(19): siRNA sense strand
guuccaaagugucuuaaag

SEQ ID NO: 1167198 - RNA, 19 nt, Homo sapiens
  misc_RNA (1)...(19): siRNA sense strand
ggugaacgaguagauuaua

SEQ ID NO: 1167199 - RNA, 19 nt, Homo sapiens
  misc_RNA (1)...(19): siRNA sense strand
gaaguagaaguauuugagu

SEQ ID NO: 1167200 - RNA, 19 nt, Homo sapiens
  misc_RNA (1)...(19): siRNA sense strand
gaaacauguccauauauac

SEQ ID NO: 1167201 - RNA, 19 nt, Homo sapiens
  misc_RNA (1)...(19): siRNA sense strand
ugacgccuguuauagagaa

SEQ ID NO: 1167202 - RNA, 19 nt, Homo sapiens
  misc_RNA (1)...(19): siRNA sense strand
cgaguagauuauaagugua

SEQ ID NO: 1167203 - RNA, 19 nt, Homo sapiens
  misc_RNA (1)...(19): siRNA sense strand
gcacuuuauuuguaaugag

SEQ ID NO: 1167204 - RNA, 19 nt, Homo sapiens
  misc_RNA (1)...(19): siRNA sense strand
guagaaguauuugaguauc

SEQ ID NO: 1167205 - RNA, 19 nt, Homo sapiens
  misc_RNA (1)...(19): siRNA sense strand
guauuugaguaucuugaug

SEQ ID NO: 1167206 - RNA, 19 nt, Homo sapiens
  misc_RNA (1)...(19): siRNA sense strand
aggaauacuugacaguuug

SEQ ID NO: 1167207 - RNA, 19 nt, Homo sapiens
  misc_RNA (1)...(19): siRNA sense strand
ccaaaacccuacuaugaga

SEQ ID NO: 1167208 - RNA, 19 nt, Homo sapiens
  misc_RNA (1)...(19): siRNA sense strand
aguguaaaguggucaaaug

SEQ ID NO: 1167209 - RNA, 19 nt, Homo sapiens
  misc_RNA (1)...(19): siRNA sense strand
ccacccauacuauuuguga

SEQ ID NO: 1167210 - RNA, 19 nt, Homo sapiens
  misc_RNA (1)...(19): siRNA sense strand
caccaacauuugaagcuau

SEQ ID NO: 1167211 - RNA, 19 nt, Homo sapiens
  misc_RNA (1)...(19): siRNA sense strand
uuggagagagcacgauuua

SEQ ID NO: 1167212 - RNA, 19 nt, Homo sapiens
  misc_RNA (1)...(19): siRNA sense strand
gguuaucagaugcacuuua

SEQ ID NO: 1167213 - RNA, 19 nt, Homo sapiens
  misc_RNA (1)...(19): siRNA sense strand
ugaggagccaccaacauuu

SEQ ID NO: 1167214 - RNA, 19 nt, Homo sapiens
  misc_RNA (1)...(19): siRNA sense strand
ggaaggaauacuugacagu

SEQ ID NO: 1167215 - RNA, 19 nt, Homo sapiens
  misc_RNA (1)...(19): siRNA sense strand
gaggaaggaauacuugaca

SEQ ID NO: 1167216 - RNA, 19 nt, Homo sapiens
  misc_RNA (1)...(19): siRNA sense strand
ccaguuccaaagugucuua

SEQ ID NO: 1167217 - RNA, 19 nt, Homo sapiens
  misc_RNA (1)...(19): siRNA sense strand
ugaguaucuugaugcagua

SEQ ID NO: 1167218 - RNA, 19 nt, Homo sapiens
  misc_RNA (1)...(19): siRNA sense strand
caccuuuagugaaguagaa

SEQ ID NO: 1167219 - RNA, 19 nt, Homo sapiens
  misc_RNA (1)...(19): siRNA sense strand
acagauaucaggauuugga

SEQ ID NO: 1167220 - RNA, 19 nt, Homo sapiens
  misc_RNA (1)...(19): siRNA sense strand
ucauugcugugauuguuau

SEQ ID NO: 1167221 - RNA, 19 nt, Homo sapiens
  misc_RNA (1)...(19): siRNA sense strand
ucagaugcacuuuauuugu

SEQ ID NO: 1167222 - RNA, 19 nt, Homo sapiens
  misc_RNA (1)...(19): siRNA sense strand
gugcugcuccagaguguaa

SEQ ID NO: 1167223 - RNA, 19 nt, Homo sapiens
  misc_RNA (1)...(19): siRNA sense strand
ggaaaacacaccuuuagug

SEQ ID NO: 1167224 - RNA, 19 nt, Homo sapiens
  misc_RNA (1)...(19): siRNA sense strand
aaggaucaguagcaauuug

SEQ ID NO: 1167225 - RNA, 19 nt, Homo sapiens
  misc_RNA (1)...(19): siRNA sense strand
uauauacgggauccuuuaa

SEQ ID NO: 1167226 - RNA, 19 nt, Homo sapiens
  misc_RNA (1)...(19): siRNA sense strand
ugaaguagaaguauuugag

SEQ ID NO: 1167227 - RNA, 19 nt, Homo sapiens
  misc_RNA (1)...(19): siRNA sense strand
cuugacaguuuggauguuu

SEQ ID NO: 1167228 - RNA, 19 nt, Homo sapiens
  misc_RNA (1)...(19): siRNA sense strand
cauauauacgggauccuuu

SEQ ID NO: 1167229 - RNA, 19 nt, Homo sapiens
  misc_RNA (1)...(19): siRNA sense strand
auauauacgggauccuuua

SEQ ID NO: 1167230 - RNA, 19 nt, Homo sapiens
  misc_RNA (1)...(19): siRNA sense strand
cuuaaaggaucaguagcaa

SEQ ID NO: 1167231 - RNA, 19 nt, Homo sapiens
  misc_RNA (1)...(19): siRNA sense strand
uaaaccugaggaaggaaua

SEQ ID NO: 1167232 - RNA, 19 nt, Homo sapiens
  misc_RNA (1)...(19): siRNA sense strand
agaugacgccuguuauaga

SEQ ID NO: 1167233 - RNA, 19 nt, Homo sapiens
  misc_RNA (1)...(19): siRNA sense strand
ugugauuguuauugccaua

SEQ ID NO: 1167234 - RNA, 19 nt, Homo sapiens
  misc_RNA (1)...(19): siRNA sense strand
gagagcacgauuuauugug

SEQ ID NO: 1167235 - RNA, 19 nt, Homo sapiens
  misc_RNA (1)...(19): siRNA sense strand
gaaguauuugaguaucuug

SEQ ID NO: 1167236 - RNA, 19 nt, Homo sapiens
  misc_RNA (1)...(19): siRNA sense strand
ggcuaccugucucagauga

SEQ ID NO: 1167237 - RNA, 19 nt, Homo sapiens
  misc_RNA (1)...(19): siRNA sense strand
gauaucaggauuuggaaaa

SEQ ID NO: 1167238 - RNA, 19 nt, Homo sapiens
  misc_RNA (1)...(19): siRNA sense strand
ccucuugccacccauacua

SEQ ID NO: 1167239 - RNA, 19 nt, Homo sapiens
  misc_RNA (1)...(19): siRNA sense strand
ccaugguguugcugcugua

SEQ ID NO: 1167240 - RNA, 19 nt, Homo sapiens
  misc_RNA (1)...(19): siRNA sense strand
cagaugacgccuguuauag

SEQ ID NO: 1167241 - RNA, 19 nt, Homo sapiens
  misc_RNA (1)...(19): siRNA sense strand
uuggugaacgaguagauua

SEQ ID NO: 1167242 - RNA, 19 nt, Homo sapiens
  misc_RNA (1)...(19): siRNA sense strand
gucauugcugugauuguua

SEQ ID NO: 1167243 - RNA, 19 nt, Homo sapiens
  misc_RNA (1)...(19): siRNA sense strand
ggagccaccaacauuugaa

SEQ ID NO: 1167244 - RNA, 19 nt, Homo sapiens
  misc_RNA (1)...(19): siRNA sense strand
gcgcuuuccuggguugcuu

SEQ ID NO: 1167245 - RNA, 19 nt, Homo sapiens
  misc_RNA (1)...(19): siRNA sense strand
uacuacaaagcaacaguua

SEQ ID NO: 1167246 - RNA, 19 nt, Homo sapiens
  misc_RNA (1)...(19): siRNA sense strand
cuugaugcaguaacuuaua

SEQ ID NO: 1167247 - RNA, 19 nt, Homo sapiens
  misc_RNA (1)...(19): siRNA sense strand
aaacauguccauauauacg

SEQ ID NO: 1167248 - RNA, 19 nt, Homo sapiens
  misc_RNA (1)...(19): siRNA sense strand
guguaaaguggucaaaugu

SEQ ID NO: 1167249 - RNA, 19 nt, Homo sapiens
  misc_RNA (1)...(19): siRNA sense strand
cuuacgaguuugguuauca

SEQ ID NO: 1167250 - RNA, 19 nt, Homo sapiens
  misc_RNA (1)...(19): siRNA sense strand
uacgggauccuuuaaaugg

SEQ ID NO: 1167251 - RNA, 19 nt, Homo sapiens
  misc_RNA (1)...(19): siRNA sense strand
aaccaaaacccuacuauga

SEQ ID NO: 1167252 - RNA, 19 nt, Homo sapiens
  misc_RNA (1)...(19): siRNA sense strand
cccaauaugugaaaagguu

SEQ ID NO: 1167253 - RNA, 19 nt, Homo sapiens
  misc_RNA (1)...(19): siRNA sense strand
cgauggcagcgacacaauu

SEQ ID NO: 1167254 - RNA, 19 nt, Homo sapiens
  misc_RNA (1)...(19): siRNA sense strand
gauccauuuucacuuauug

SEQ ID NO: 1167255 - RNA, 19 nt, Homo sapiens
  misc_RNA (1)...(19): siRNA sense strand
uugaugcaguaacuuauag

SEQ ID NO: 1167256 - RNA, 19 nt, Homo sapiens
  misc_RNA (1)...(19): siRNA sense strand
guaucuugaugcaguaacu

SEQ ID NO: 1167257 - RNA, 19 nt, Homo sapiens
  misc_RNA (1)...(19): siRNA sense strand
caacauuugaagcuaugga

SEQ ID NO: 1167258 - RNA, 19 nt, Homo sapiens
  misc_RNA (1)...(19): siRNA sense strand
gagauuggugaacgaguag

SEQ ID NO: 1167259 - RNA, 19 nt, Homo sapiens
  misc_RNA (1)...(19): siRNA sense strand
ggagagagcacgauuuauu

SEQ ID NO: 1167260 - RNA, 19 nt, Homo sapiens
  misc_RNA (1)...(19): siRNA sense strand
agagaaacauguccauaua

SEQ ID NO: 1167261 - RNA, 19 nt, Homo sapiens
  misc_RNA (1)...(19): siRNA sense strand
cagaugcacuuuauuugua

SEQ ID NO: 1167262 - RNA, 19 nt, Homo sapiens
  misc_RNA (1)...(19): siRNA sense strand
ggacuuacgaguuugguua

SEQ ID NO: 1167263 - RNA, 19 nt, Homo sapiens
  misc_RNA (1)...(19): siRNA sense strand
aaacagauaucaggauuug

SEQ ID NO: 1167264 - RNA, 19 nt, Homo sapiens
  misc_RNA (1)...(19): siRNA sense strand
cuauggagcucauugguaa

SEQ ID NO: 1167265 - RNA, 19 nt, Homo sapiens
  misc_RNA (1)...(19): siRNA sense strand
aaacacaccuuuagugaag

SEQ ID NO: 1167266 - RNA, 19 nt, Homo sapiens
  misc_RNA (1)...(19): siRNA sense strand
gaacuuaaaggaucaguag

SEQ ID NO: 1167267 - RNA, 19 nt, Homo sapiens
  misc_RNA (1)...(19): siRNA sense strand
gaaaacagauaucaggauu

SEQ ID NO: 1167268 - RNA, 19 nt, Homo sapiens
  misc_RNA (1)...(19): siRNA sense strand
uaaaggaucaguagcaauu

SEQ ID NO: 1167269 - RNA, 19 nt, Homo sapiens
  misc_RNA (1)...(19): siRNA sense strand
aaaugggacuuacgaguuu

SEQ ID NO: 1167270 - RNA, 19 nt, Homo sapiens
  misc_RNA (1)...(19): siRNA sense strand
guuaucagaugcacuuuau

SEQ ID NO: 1167271 - RNA, 19 nt, Homo sapiens
  misc_RNA (1)...(19): siRNA sense strand
gagcugaauaugccacuua

SEQ ID NO: 1167272 - RNA, 19 nt, Homo sapiens
  misc_RNA (1)...(19): siRNA sense strand
ugagauuggugaacgagua

SEQ ID NO: 1167273 - RNA, 19 nt, Homo sapiens
  misc_RNA (1)...(19): siRNA sense strand
gugaacgaguagauuauaa

SEQ ID NO: 1167274 - RNA, 19 nt, Homo sapiens
  misc_RNA (1)...(19): siRNA sense strand
gagagagcacgauuuauug

SEQ ID NO: 1167275 - RNA, 19 nt, Homo sapiens
  misc_RNA (1)...(19): siRNA sense strand
caaaugggacuuacgaguu

SEQ ID NO: 1167276 - RNA, 19 nt, Homo sapiens
  misc_RNA (1)...(19): siRNA sense strand
ggucauugcugugauuguu

SEQ ID NO: 1167277 - RNA, 19 nt, Homo sapiens
  misc_RNA (1)...(19): siRNA sense strand
ccagauccauuuucacuua

SEQ ID NO: 1167278 - RNA, 19 nt, Homo sapiens
  misc_RNA (1)...(19): siRNA sense strand
gaaggaauacuugacaguu

SEQ ID NO: 1167279 - RNA, 19 nt, Homo sapiens
  misc_RNA (1)...(19): siRNA sense strand
aaggaauacuugacaguuu

SEQ ID NO: 1167280 - RNA, 19 nt, Homo sapiens
  misc_RNA (1)...(19): siRNA sense strand
ucagaugacgccuguuaua

SEQ ID NO: 1167281 - RNA, 19 nt, Homo sapiens
  misc_RNA (1)...(19): siRNA sense strand
gaaaacacaccuuuaguga

SEQ ID NO: 1167282 - RNA, 19 nt, Homo sapiens
  misc_RNA (1)...(19): siRNA sense strand
gaugacgccuguuauagag

SEQ ID NO: 1167283 - RNA, 19 nt, Homo sapiens
  misc_RNA (1)...(19): siRNA sense strand
gagaaacauguccauauau

SEQ ID NO: 1167284 - RNA, 19 nt, Homo sapiens
  misc_RNA (1)...(19): siRNA sense strand
ccacuuaccagacuaaauc

SEQ ID NO: 1167285 - RNA, 19 nt, Homo sapiens
  misc_RNA (1)...(19): siRNA sense strand
acgaguagauuauaagugu

SEQ ID NO: 1167286 - RNA, 19 nt, Homo sapiens
  misc_RNA (1)...(19): siRNA sense strand
cuacaaagcaacaguuaug

SEQ ID NO: 1167287 - RNA, 19 nt, Homo sapiens
  misc_RNA (1)...(19): siRNA sense strand
ccaccaacauuugaagcua

SEQ ID NO: 1167288 - RNA, 19 nt, Homo sapiens
  misc_RNA (1)...(19): siRNA sense strand
uauacgggauccuuuaaau

SEQ ID NO: 1167289 - RNA, 19 nt, Homo sapiens
  misc_RNA (1)...(19): siRNA sense strand
cgaguuugguuaucagaug

SEQ ID NO: 1167290 - RNA, 19 nt, Homo sapiens
  misc_RNA (1)...(19): siRNA sense strand
gaacgaguagauuauaagu

SEQ ID NO: 1167291 - RNA, 19 nt, Homo sapiens
  misc_RNA (1)...(19): siRNA sense strand
gugaggagccaccaacauu

SEQ ID NO: 1167292 - RNA, 19 nt, Homo sapiens
  misc_RNA (1)...(19): siRNA sense strand
gauggcagcgacacaauug

SEQ ID NO: 1167293 - RNA, 19 nt, Homo sapiens
  misc_RNA (1)...(19): siRNA sense strand
ucucagaugacgccuguua

SEQ ID NO: 1167294 - RNA, 19 nt, Homo sapiens
  misc_RNA (1)...(19): siRNA sense strand
gaggagccaccaacauuug

SEQ ID NO: 1167295 - RNA, 19 nt, Homo sapiens
  misc_RNA (1)...(19): siRNA sense strand
gcuauggagcucauuggua

SEQ ID NO: 1167296 - RNA, 19 nt, Homo sapiens
  misc_RNA (1)...(19): siRNA sense strand
acacaccuuuagugaagua

SEQ ID NO: 1167297 - RNA, 19 nt, Homo sapiens
  misc_RNA (1)...(19): siRNA sense strand
uagagaaacauguccauau

SEQ ID NO: 1167298 - RNA, 19 nt, Homo sapiens
  misc_RNA (1)...(19): siRNA sense strand
ggugaacgaguagauuaua

SEQ ID NO: 1167299 - RNA, 19 nt, Homo sapiens
  misc_RNA (1)...(19): siRNA sense strand
gaaguagaaguauuugagu

SEQ ID NO: 1167300 - RNA, 19 nt, Homo sapiens
  misc_RNA (1)...(19): siRNA sense strand
gaaacauguccauauauac

SEQ ID NO: 1167301 - RNA, 19 nt, Homo sapiens
  misc_RNA (1)...(19): siRNA sense strand
ugacgccuguuauagagaa

SEQ ID NO: 1167302 - RNA, 19 nt, Homo sapiens
  misc_RNA (1)...(19): siRNA sense strand
cgaguagauuauaagugua

SEQ ID NO: 1167303 - RNA, 19 nt, Homo sapiens
  misc_RNA (1)...(19): siRNA sense strand
gcacuuuauuuguaaugag

SEQ ID NO: 1167304 - RNA, 19 nt, Homo sapiens
  misc_RNA (1)...(19): siRNA sense strand
guagaaguauuugaguauc

SEQ ID NO: 1167305 - RNA, 19 nt, Homo sapiens
  misc_RNA (1)...(19): siRNA sense strand
guauuugaguaucuugaug

SEQ ID NO: 1167306 - RNA, 19 nt, Homo sapiens
  misc_RNA (1)...(19): siRNA sense strand
aggaauacuugacaguuug

SEQ ID NO: 1167307 - RNA, 19 nt, Homo sapiens
  misc_RNA (1)...(19): siRNA sense strand
ccaaaacccuacuaugaga

SEQ ID NO: 1167308 - RNA, 19 nt, Homo sapiens
  misc_RNA (1)...(19): siRNA sense strand
aguguaaaguggucaaaug

SEQ ID NO: 1167309 - RNA, 19 nt, Homo sapiens
  misc_RNA (1)...(19): siRNA sense strand
ccacccauacuauuuguga

SEQ ID NO: 1167310 - RNA, 19 nt, Homo sapiens
  misc_RNA (1)...(19): siRNA sense strand
uuggagagagcacgauuua

SEQ ID NO: 1167311 - RNA, 19 nt, Homo sapiens
  misc_RNA (1)...(19): siRNA sense strand
gguuaucagaugcacuuua

SEQ ID NO: 1167312 - RNA, 19 nt, Homo sapiens
  misc_RNA (1)...(19): siRNA sense strand
caccaacauuugaagcuau

SEQ ID NO: 1167313 - RNA, 19 nt, Homo sapiens
  misc_RNA (1)...(19): siRNA sense strand
ugaggagccaccaacauuu

SEQ ID NO: 1167314 - RNA, 19 nt, Homo sapiens
  misc_RNA (1)...(19): siRNA sense strand
ggaaggaauacuugacagu

SEQ ID NO: 1167315 - RNA, 19 nt, Homo sapiens
  misc_RNA (1)...(19): siRNA sense strand
gaggaaggaauacuugaca

SEQ ID NO: 1167316 - RNA, 19 nt, Homo sapiens
  misc_RNA (1)...(19): siRNA sense strand
ugaguaucuugaugcagua

SEQ ID NO: 1167317 - RNA, 19 nt, Homo sapiens
  misc_RNA (1)...(19): siRNA sense strand
caccuuuagugaaguagaa

SEQ ID NO: 1167318 - RNA, 19 nt, Homo sapiens
  misc_RNA (1)...(19): siRNA sense strand
acagauaucaggauuugga

SEQ ID NO: 1167319 - RNA, 19 nt, Homo sapiens
  misc_RNA (1)...(19): siRNA sense strand
ucauugcugugauuguuau

SEQ ID NO: 1167320 - RNA, 19 nt, Homo sapiens
  misc_RNA (1)...(19): siRNA sense strand
ucagaugcacuuuauuugu

SEQ ID NO: 1167321 - RNA, 19 nt, Homo sapiens
  misc_RNA (1)...(19): siRNA sense strand
gugcugcuccagaguguaa

SEQ ID NO: 1167322 - RNA, 19 nt, Homo sapiens
  misc_RNA (1)...(19): siRNA sense strand
ggaaaacacaccuuuagug

SEQ ID NO: 1167323 - RNA, 19 nt, Homo sapiens
  misc_RNA (1)...(19): siRNA sense strand
aaggaucaguagcaauuug

SEQ ID NO: 1167324 - RNA, 19 nt, Homo sapiens
  misc_RNA (1)...(19): siRNA sense strand
uauauacgggauccuuuaa

SEQ ID NO: 1167325 - RNA, 19 nt, Homo sapiens
  misc_RNA (1)...(19): siRNA sense strand
ugaaguagaaguauuugag

SEQ ID NO: 1167326 - RNA, 19 nt, Homo sapiens
  misc_RNA (1)...(19): siRNA sense strand
cuugacaguuuggauguuu

SEQ ID NO: 1167327 - RNA, 19 nt, Homo sapiens
  misc_RNA (1)...(19): siRNA sense strand
cauauauacgggauccuuu

SEQ ID NO: 1167328 - RNA, 19 nt, Homo sapiens
  misc_RNA (1)...(19): siRNA sense strand
auauauacgggauccuuua

SEQ ID NO: 1167329 - RNA, 19 nt, Homo sapiens
  misc_RNA (1)...(19): siRNA sense strand
cuuaaaggaucaguagcaa

SEQ ID NO: 1167330 - RNA, 19 nt, Homo sapiens
  misc_RNA (1)...(19): siRNA sense strand
uaaaccugaggaaggaaua

SEQ ID NO: 1167331 - RNA, 19 nt, Homo sapiens
  misc_RNA (1)...(19): siRNA sense strand
agaugacgccuguuauaga

SEQ ID NO: 1167332 - RNA, 19 nt, Homo sapiens
  misc_RNA (1)...(19): siRNA sense strand
ugugauuguuauugccaua

SEQ ID NO: 1167333 - RNA, 19 nt, Homo sapiens
  misc_RNA (1)...(19): siRNA sense strand
gagagcacgauuuauugug

SEQ ID NO: 1167334 - RNA, 19 nt, Homo sapiens
  misc_RNA (1)...(19): siRNA sense strand
gaaguauuugaguaucuug

SEQ ID NO: 1167335 - RNA, 19 nt, Homo sapiens
  misc_RNA (1)...(19): siRNA sense strand
ggcuaccugucucagauga

SEQ ID NO: 1167336 - RNA, 19 nt, Homo sapiens
  misc_RNA (1)...(19): siRNA sense strand
gauaucaggauuuggaaaa

SEQ ID NO: 1167337 - RNA, 19 nt, Homo sapiens
  misc_RNA (1)...(19): siRNA sense strand
ccucuugccacccauacua

SEQ ID NO: 1167338 - RNA, 19 nt, Homo sapiens
  misc_RNA (1)...(19): siRNA sense strand
ccaugguguugcugcugua

SEQ ID NO: 1167339 - RNA, 19 nt, Homo sapiens
  misc_RNA (1)...(19): siRNA sense strand
cagaugacgccuguuauag

SEQ ID NO: 1167340 - RNA, 19 nt, Homo sapiens
  misc_RNA (1)...(19): siRNA sense strand
cagaugguggagcugaaua

SEQ ID NO: 1167341 - RNA, 19 nt, Homo sapiens
  misc_RNA (1)...(19): siRNA sense strand
uuggugaacgaguagauua

SEQ ID NO: 1167342 - RNA, 19 nt, Homo sapiens
  misc_RNA (1)...(19): siRNA sense strand
gucauugcugugauuguua

SEQ ID NO: 1167343 - RNA, 19 nt, Homo sapiens
  misc_RNA (1)...(19): siRNA sense strand
ggagccaccaacauuugaa

SEQ ID NO: 1167344 - RNA, 19 nt, Homo sapiens
  misc_RNA (1)...(19): siRNA sense strand
gcgcuuuccuggguugcuu

SEQ ID NO: 1167345 - RNA, 19 nt, Homo sapiens
  misc_RNA (1)...(19): siRNA sense strand
uacuacaaagcaacaguua

SEQ ID NO: 1167346 - RNA, 19 nt, Homo sapiens
  misc_RNA (1)...(19): siRNA sense strand
cuugaugcaguaacuuaua

SEQ ID NO: 1167347 - RNA, 19 nt, Homo sapiens
  misc_RNA (1)...(19): siRNA sense strand
aaacauguccauauauacg

SEQ ID NO: 1167348 - RNA, 19 nt, Homo sapiens
  misc_RNA (1)...(19): siRNA sense strand
guguaaaguggucaaaugu

SEQ ID NO: 1167349 - RNA, 19 nt, Homo sapiens
  misc_RNA (1)...(19): siRNA sense strand
cuuacgaguuugguuauca

SEQ ID NO: 1167350 - RNA, 19 nt, Homo sapiens
  misc_RNA (1)...(19): siRNA sense strand
uacgggauccuuuaaaugg

SEQ ID NO: 1167351 - RNA, 19 nt, Homo sapiens
  misc_RNA (1)...(19): siRNA sense strand
gcagaugguggagcugaau

SEQ ID NO: 1167352 - RNA, 19 nt, Homo sapiens
  misc_RNA (1)...(19): siRNA sense strand
aaccaaaacccuacuauga

SEQ ID NO: 1167353 - RNA, 19 nt, Homo sapiens
  misc_RNA (1)...(19): siRNA sense strand
cccaauaugugaaaagguu

SEQ ID NO: 1167354 - RNA, 19 nt, Homo sapiens
  misc_RNA (1)...(19): siRNA sense strand
ggagcugaauaugccacuu

SEQ ID NO: 1167355 - RNA, 19 nt, Homo sapiens
  misc_RNA (1)...(19): siRNA sense strand
cgauggcagcgacacaauu

SEQ ID NO: 1167356 - RNA, 19 nt, Homo sapiens
  misc_RNA (1)...(19): siRNA sense strand
gauccauuuucacuuauug

SEQ ID NO: 1167357 - RNA, 19 nt, Homo sapiens
  misc_RNA (1)...(19): siRNA sense strand
uugaugcaguaacuuauag

SEQ ID NO: 1167358 - RNA, 19 nt, Homo sapiens
  misc_RNA (1)...(19): siRNA sense strand
guaucuugaugcaguaacu

SEQ ID NO: 1167359 - RNA, 19 nt, Homo sapiens
  misc_RNA (1)...(19): siRNA sense strand
ggagagagcacgauuuauu

SEQ ID NO: 1167360 - RNA, 19 nt, Homo sapiens
  misc_RNA (1)...(19): siRNA sense strand
agagaaacauguccauaua

SEQ ID NO: 1167361 - RNA, 19 nt, Homo sapiens
  misc_RNA (1)...(19): siRNA sense strand
cagaugcacuuuauuugua

SEQ ID NO: 1167362 - RNA, 19 nt, Homo sapiens
  misc_RNA (1)...(19): siRNA sense strand
ggacuuacgaguuugguua

SEQ ID NO: 1167363 - RNA, 19 nt, Homo sapiens
  misc_RNA (1)...(19): siRNA sense strand
aaacagauaucaggauuug

SEQ ID NO: 1167364 - RNA, 19 nt, Homo sapiens
  misc_RNA (1)...(19): siRNA sense strand
cuauggagcucauugguaa

SEQ ID NO: 1167365 - RNA, 19 nt, Homo sapiens
  misc_RNA (1)...(19): siRNA sense strand
aaacacaccuuuagugaag

SEQ ID NO: 1167366 - RNA, 19 nt, Homo sapiens
  misc_RNA (1)...(19): siRNA sense strand
gaacuuaaaggaucaguag

SEQ ID NO: 1167367 - RNA, 19 nt, Homo sapiens
  misc_RNA (1)...(19): siRNA sense strand
gaaaacagauaucaggauu

SEQ ID NO: 1167368 - RNA, 19 nt, Homo sapiens
  misc_RNA (1)...(19): siRNA sense strand
uaaaggaucaguagcaauu

SEQ ID NO: 1167369 - RNA, 19 nt, Homo sapiens
  misc_RNA (1)...(19): siRNA sense strand
aaaugggacuuacgaguuu

SEQ ID NO: 1167370 - RNA, 19 nt, Homo sapiens
  misc_RNA (1)...(19): siRNA sense strand
guuaucagaugcacuuuau

SEQ ID NO: 1167371 - RNA, 19 nt, Homo sapiens
  misc_RNA (1)...(19): siRNA sense strand
gagcugaauaugccacuua

SEQ ID NO: 1167372 - RNA, 19 nt, Homo sapiens
  misc_RNA (1)...(19): siRNA sense strand
gagcagagaggcugaauag

SEQ ID NO: 1167373 - RNA, 19 nt, Homo sapiens
  misc_RNA (1)...(19): siRNA sense strand
ugagauuggugaacgagua

SEQ ID NO: 1167374 - RNA, 19 nt, Homo sapiens
  misc_RNA (1)...(19): siRNA sense strand
gugaacgaguagauuauaa

SEQ ID NO: 1167375 - RNA, 19 nt, Homo sapiens
  misc_RNA (1)...(19): siRNA sense strand
gagagagcacgauuuauug

SEQ ID NO: 1167376 - RNA, 19 nt, Homo sapiens
  misc_RNA (1)...(19): siRNA sense strand
caaaugggacuuacgaguu

SEQ ID NO: 1167377 - RNA, 19 nt, Homo sapiens
  misc_RNA (1)...(19): siRNA sense strand
ggucauugcugugauuguu

SEQ ID NO: 1167378 - RNA, 19 nt, Homo sapiens
  misc_RNA (1)...(19): siRNA sense strand
ccagauccauuuucacuua

SEQ ID NO: 1167379 - RNA, 19 nt, Homo sapiens
  misc_RNA (1)...(19): siRNA sense strand
gaaggaauacuugacaguu

SEQ ID NO: 1167380 - RNA, 19 nt, Homo sapiens
  misc_RNA (1)...(19): siRNA sense strand
aaggaauacuugacaguuu

SEQ ID NO: 1167381 - RNA, 19 nt, Homo sapiens
  misc_RNA (1)...(19): siRNA sense strand
ucagaugacgccuguuaua

SEQ ID NO: 1167382 - RNA, 19 nt, Homo sapiens
  misc_RNA (1)...(19): siRNA sense strand
gaaaacacaccuuuaguga

SEQ ID NO: 1167383 - RNA, 19 nt, Homo sapiens
  misc_RNA (1)...(19): siRNA sense strand
gaugacgccuguuauagag

SEQ ID NO: 1167384 - RNA, 19 nt, Homo sapiens
  misc_RNA (1)...(19): siRNA sense strand
gagaaacauguccauauau

SEQ ID NO: 1167385 - RNA, 19 nt, Homo sapiens
  misc_RNA (1)...(19): siRNA sense strand
ccacuuaccagacuaaauc

SEQ ID NO: 1167386 - RNA, 19 nt, Homo sapiens
  misc_RNA (1)...(19): siRNA sense strand
acgaguagauuauaagugu

SEQ ID NO: 1167387 - RNA, 19 nt, Homo sapiens
  misc_RNA (1)...(19): siRNA sense strand
cuacaaagcaacaguuaug

SEQ ID NO: 1167388 - RNA, 19 nt, Homo sapiens
  misc_RNA (1)...(19): siRNA sense strand
ccaccaacauuugaagcua

SEQ ID NO: 1167389 - RNA, 19 nt, Homo sapiens
  misc_RNA (1)...(19): siRNA sense strand
uauacgggauccuuuaaau

SEQ ID NO: 1167390 - RNA, 19 nt, Homo sapiens
  misc_RNA (1)...(19): siRNA sense strand
cgaguuugguuaucagaug

SEQ ID NO: 1167391 - RNA, 19 nt, Homo sapiens
  misc_RNA (1)...(19): siRNA sense strand
gaacgaguagauuauaagu

SEQ ID NO: 1167392 - RNA, 19 nt, Homo sapiens
  misc_RNA (1)...(19): siRNA sense strand
gugaggagccaccaacauu

SEQ ID NO: 1167393 - RNA, 19 nt, Homo sapiens
  misc_RNA (1)...(19): siRNA sense strand
gauggcagcgacacaauug

SEQ ID NO: 1167394 - RNA, 19 nt, Homo sapiens
  misc_RNA (1)...(19): siRNA sense strand
ucucagaugacgccuguua

SEQ ID NO: 1167395 - RNA, 19 nt, Homo sapiens
  misc_RNA (1)...(19): siRNA sense strand
acacaccuuuagugaagua

SEQ ID NO: 1167396 - RNA, 19 nt, Homo sapiens
  misc_RNA (1)...(19): siRNA sense strand
gcuauggagcucauuggua

SEQ ID NO: 1167397 - RNA, 19 nt, Homo sapiens
  misc_RNA (1)...(19): siRNA sense strand
gaggagccaccaacauuug

SEQ ID NO: 1167398 - RNA, 19 nt, Homo sapiens
  misc_RNA (1)...(19): siRNA sense strand
uagagaaacauguccauau

SEQ ID NO: 1167399 - RNA, 19 nt, Homo sapiens
  misc_RNA (1)...(19): siRNA sense strand
guuccaaagugucuuaaag

SEQ ID NO: 1167400 - RNA, 19 nt, Homo sapiens
  misc_RNA (1)...(19): siRNA sense strand
ggugaacgaguagauuaua

SEQ ID NO: 1167401 - RNA, 19 nt, Homo sapiens
  misc_RNA (1)...(19): siRNA sense strand
gaaguagaaguauuugagu

SEQ ID NO: 1167402 - RNA, 19 nt, Homo sapiens
  misc_RNA (1)...(19): siRNA sense strand
gaaacauguccauauauac

SEQ ID NO: 1167403 - RNA, 19 nt, Homo sapiens
  misc_RNA (1)...(19): siRNA sense strand
ugacgccuguuauagagaa

SEQ ID NO: 1167404 - RNA, 19 nt, Homo sapiens
  misc_RNA (1)...(19): siRNA sense strand
cgaguagauuauaagugua

SEQ ID NO: 1167405 - RNA, 19 nt, Homo sapiens
  misc_RNA (1)...(19): siRNA sense strand
gcacuuuauuuguaaugag

SEQ ID NO: 1167406 - RNA, 19 nt, Homo sapiens
  misc_RNA (1)...(19): siRNA sense strand
guagaaguauuugaguauc

SEQ ID NO: 1167407 - RNA, 19 nt, Homo sapiens
  misc_RNA (1)...(19): siRNA sense strand
guauuugaguaucuugaug

SEQ ID NO: 1167408 - RNA, 19 nt, Homo sapiens
  misc_RNA (1)...(19): siRNA sense strand
aggaauacuugacaguuug

SEQ ID NO: 1167409 - RNA, 19 nt, Homo sapiens
  misc_RNA (1)...(19): siRNA sense strand
ccaaaacccuacuaugaga

SEQ ID NO: 1167410 - RNA, 19 nt, Homo sapiens
  misc_RNA (1)...(19): siRNA sense strand
aguguaaaguggucaaaug

SEQ ID NO: 1167411 - RNA, 19 nt, Homo sapiens
  misc_RNA (1)...(19): siRNA sense strand
ccacccauacuauuuguga

SEQ ID NO: 1167412 - RNA, 19 nt, Homo sapiens
  misc_RNA (1)...(19): siRNA sense strand
uuggagagagcacgauuua

SEQ ID NO: 1167413 - RNA, 19 nt, Homo sapiens
  misc_RNA (1)...(19): siRNA sense strand
gguuaucagaugcacuuua

SEQ ID NO: 1167414 - RNA, 19 nt, Homo sapiens
  misc_RNA (1)...(19): siRNA sense strand
caccaacauuugaagcuau

SEQ ID NO: 1167415 - RNA, 19 nt, Homo sapiens
  misc_RNA (1)...(19): siRNA sense strand
ugaggagccaccaacauuu

SEQ ID NO: 1167416 - RNA, 19 nt, Homo sapiens
  misc_RNA (1)...(19): siRNA sense strand
ggaaggaauacuugacagu

SEQ ID NO: 1167417 - RNA, 19 nt, Homo sapiens
  misc_RNA (1)...(19): siRNA sense strand
gaggaaggaauacuugaca

SEQ ID NO: 1167418 - RNA, 19 nt, Homo sapiens
  misc_RNA (1)...(19): siRNA sense strand
ccaguuccaaagugucuua

SEQ ID NO: 1167419 - RNA, 19 nt, Homo sapiens
  misc_RNA (1)...(19): siRNA sense strand
ugaguaucuugaugcagua

SEQ ID NO: 1167420 - RNA, 19 nt, Homo sapiens
  misc_RNA (1)...(19): siRNA sense strand
caccuuuagugaaguagaa

SEQ ID NO: 1167421 - RNA, 19 nt, Homo sapiens
  misc_RNA (1)...(19): siRNA sense strand
acagauaucaggauuugga

SEQ ID NO: 1167422 - RNA, 19 nt, Homo sapiens
  misc_RNA (1)...(19): siRNA sense strand
ucauugcugugauuguuau

SEQ ID NO: 1167423 - RNA, 19 nt, Homo sapiens
  misc_RNA (1)...(19): siRNA sense strand
ucagaugcacuuuauuugu

SEQ ID NO: 1167424 - RNA, 19 nt, Homo sapiens
  misc_RNA (1)...(19): siRNA sense strand
gugcugcuccagaguguaa

SEQ ID NO: 1167425 - RNA, 19 nt, Homo sapiens
  misc_RNA (1)...(19): siRNA sense strand
ggaaaacacaccuuuagug

SEQ ID NO: 1167426 - RNA, 19 nt, Homo sapiens
  misc_RNA (1)...(19): siRNA sense strand
aaggaucaguagcaauuug

SEQ ID NO: 1167427 - RNA, 19 nt, Homo sapiens
  misc_RNA (1)...(19): siRNA sense strand
uauauacgggauccuuuaa

SEQ ID NO: 1167428 - RNA, 19 nt, Homo sapiens
  misc_RNA (1)...(19): siRNA sense strand
ugaaguagaaguauuugag

SEQ ID NO: 1167429 - RNA, 19 nt, Homo sapiens
  misc_RNA (1)...(19): siRNA sense strand
cuugacaguuuggauguuu

SEQ ID NO: 1167430 - RNA, 19 nt, Homo sapiens
  misc_RNA (1)...(19): siRNA sense strand
cauauauacgggauccuuu

SEQ ID NO: 1167431 - RNA, 19 nt, Homo sapiens
  misc_RNA (1)...(19): siRNA sense strand
auauauacgggauccuuua

SEQ ID NO: 1167432 - RNA, 19 nt, Homo sapiens
  misc_RNA (1)...(19): siRNA sense strand
cuuaaaggaucaguagcaa

SEQ ID NO: 1167433 - RNA, 19 nt, Homo sapiens
  misc_RNA (1)...(19): siRNA sense strand
uaaaccugaggaaggaaua

SEQ ID NO: 1167434 - RNA, 19 nt, Homo sapiens
  misc_RNA (1)...(19): siRNA sense strand
agaugacgccuguuauaga

SEQ ID NO: 1167435 - RNA, 19 nt, Homo sapiens
  misc_RNA (1)...(19): siRNA sense strand
ugugauuguuauugccaua

SEQ ID NO: 1167436 - RNA, 19 nt, Homo sapiens
  misc_RNA (1)...(19): siRNA sense strand
gagagcacgauuuauugug

SEQ ID NO: 1167437 - RNA, 19 nt, Homo sapiens
  misc_RNA (1)...(19): siRNA sense strand
gaaguauuugaguaucuug

SEQ ID NO: 1167438 - RNA, 19 nt, Homo sapiens
  misc_RNA (1)...(19): siRNA sense strand
ggcuaccugucucagauga

SEQ ID NO: 1167439 - RNA, 19 nt, Homo sapiens
  misc_RNA (1)...(19): siRNA sense strand
ccucuugccacccauacua

SEQ ID NO: 1167440 - RNA, 19 nt, Homo sapiens
  misc_RNA (1)...(19): siRNA sense strand
gauaucaggauuuggaaaa

SEQ ID NO: 1167441 - RNA, 19 nt, Homo sapiens
  misc_RNA (1)...(19): siRNA sense strand
ccaugguguugcugcugua

SEQ ID NO: 1167442 - RNA, 19 nt, Homo sapiens
  misc_RNA (1)...(19): siRNA sense strand
cagaugacgccuguuauag

SEQ ID NO: 1167443 - RNA, 19 nt, Homo sapiens
  misc_RNA (1)...(19): siRNA sense strand
cagaugguggagcugaaua

SEQ ID NO: 1167444 - RNA, 19 nt, Homo sapiens
  misc_RNA (1)...(19): siRNA sense strand
gucauugcugugauuguua

SEQ ID NO: 1167445 - RNA, 19 nt, Homo sapiens
  misc_RNA (1)...(19): siRNA sense strand
uuggugaacgaguagauua

SEQ ID NO: 1167446 - RNA, 19 nt, Homo sapiens
  misc_RNA (1)...(19): siRNA sense strand
ggagccaccaacauuugaa

SEQ ID NO: 1167447 - RNA, 19 nt, Homo sapiens
  misc_RNA (1)...(19): siRNA sense strand
gcgcuuuccuggguugcuu

SEQ ID NO: 1167448 - RNA, 19 nt, Homo sapiens
  misc_RNA (1)...(19): siRNA sense strand
uacuacaaagcaacaguua

SEQ ID NO: 1167449 - RNA, 19 nt, Homo sapiens
  misc_RNA (1)...(19): siRNA sense strand
cuugaugcaguaacuuaua

SEQ ID NO: 1167450 - RNA, 19 nt, Homo sapiens
  misc_RNA (1)...(19): siRNA sense strand
aaacauguccauauauacg

SEQ ID NO: 1167451 - RNA, 19 nt, Homo sapiens
  misc_RNA (1)...(19): siRNA sense strand
guguaaaguggucaaaugu

SEQ ID NO: 1167452 - RNA, 19 nt, Homo sapiens
  misc_RNA (1)...(19): siRNA sense strand
cuuacgaguuugguuauca

SEQ ID NO: 1167453 - RNA, 19 nt, Homo sapiens
  misc_RNA (1)...(19): siRNA sense strand
aaccaaaacccuacuauga

SEQ ID NO: 1167454 - RNA, 19 nt, Homo sapiens
  misc_RNA (1)...(19): siRNA sense strand
gcagaugguggagcugaau

SEQ ID NO: 1167455 - RNA, 19 nt, Homo sapiens
  misc_RNA (1)...(19): siRNA sense strand
uacgggauccuuuaaaugg

SEQ ID NO: 1167456 - RNA, 19 nt, Homo sapiens
  misc_RNA (1)...(19): siRNA sense strand
cgauggcagcgacacaauu

SEQ ID NO: 1167457 - RNA, 19 nt, Homo sapiens
  misc_RNA (1)...(19): siRNA sense strand
ggagcugaauaugccacuu

SEQ ID NO: 1167458 - RNA, 19 nt, Homo sapiens
  misc_RNA (1)...(19): siRNA sense strand
caacauuugaagcuaugga

SEQ ID NO: 1167459 - RNA, 19 nt, Homo sapiens
  misc_RNA (1)...(19): siRNA sense strand
ggagagagcacgauuuauu

SEQ ID NO: 1167460 - RNA, 19 nt, Homo sapiens
  misc_RNA (1)...(19): siRNA sense strand
agagaaacauguccauaua

SEQ ID NO: 1167461 - RNA, 19 nt, Homo sapiens
  misc_RNA (1)...(19): siRNA sense strand
cagaugcacuuuauuugua

SEQ ID NO: 1167462 - RNA, 19 nt, Homo sapiens
  misc_RNA (1)...(19): siRNA sense strand
ggacuuacgaguuugguua

SEQ ID NO: 1167463 - RNA, 19 nt, Homo sapiens
  misc_RNA (1)...(19): siRNA sense strand
aaacagauaucaggauuug

SEQ ID NO: 1167464 - RNA, 19 nt, Homo sapiens
  misc_RNA (1)...(19): siRNA sense strand
cuauggagcucauugguaa

SEQ ID NO: 1167465 - RNA, 19 nt, Homo sapiens
  misc_RNA (1)...(19): siRNA sense strand
aaacacaccuuuagugaag

SEQ ID NO: 1167466 - RNA, 19 nt, Homo sapiens
  misc_RNA (1)...(19): siRNA sense strand
gaacuuaaaggaucaguag

SEQ ID NO: 1167467 - RNA, 19 nt, Homo sapiens
  misc_RNA (1)...(19): siRNA sense strand
gaaaacagauaucaggauu

SEQ ID NO: 1167468 - RNA, 19 nt, Homo sapiens
  misc_RNA (1)...(19): siRNA sense strand
uaaaggaucaguagcaauu

SEQ ID NO: 1167469 - RNA, 19 nt, Homo sapiens
  misc_RNA (1)...(19): siRNA sense strand
aaaugggacuuacgaguuu

SEQ ID NO: 1167470 - RNA, 19 nt, Homo sapiens
  misc_RNA (1)...(19): siRNA sense strand
guuaucagaugcacuuuau

SEQ ID NO: 1167471 - RNA, 19 nt, Homo sapiens
  misc_RNA (1)...(19): siRNA sense strand
ugagauuggugaacgagua

SEQ ID NO: 1167472 - RNA, 19 nt, Homo sapiens
  misc_RNA (1)...(19): siRNA sense strand
gugaacgaguagauuauaa

SEQ ID NO: 1167473 - RNA, 19 nt, Homo sapiens
  misc_RNA (1)...(19): siRNA sense strand
gagagagcacgauuuauug

SEQ ID NO: 1167474 - RNA, 19 nt, Homo sapiens
  misc_RNA (1)...(19): siRNA sense strand
caaaugggacuuacgaguu

SEQ ID NO: 1167475 - RNA, 19 nt, Homo sapiens
  misc_RNA (1)...(19): siRNA sense strand
ggucauugcugugauuguu

SEQ ID NO: 1167476 - RNA, 19 nt, Homo sapiens
  misc_RNA (1)...(19): siRNA sense strand
ccagauccauuuucacuua

SEQ ID NO: 1167477 - RNA, 19 nt, Homo sapiens
  misc_RNA (1)...(19): siRNA sense strand
gaaggaauacuugacaguu

SEQ ID NO: 1167478 - RNA, 19 nt, Homo sapiens
  misc_RNA (1)...(19): siRNA sense strand
aaggaauacuugacaguuu

SEQ ID NO: 1167479 - RNA, 19 nt, Homo sapiens
  misc_RNA (1)...(19): siRNA sense strand
ucagaugacgccuguuaua

SEQ ID NO: 1167480 - RNA, 19 nt, Homo sapiens
  misc_RNA (1)...(19): siRNA sense strand
gaaaacacaccuuuaguga

SEQ ID NO: 1167481 - RNA, 19 nt, Homo sapiens
  misc_RNA (1)...(19): siRNA sense strand
gaugacgccuguuauagag

SEQ ID NO: 1167482 - RNA, 19 nt, Homo sapiens
  misc_RNA (1)...(19): siRNA sense strand
gagaaacauguccauauau

SEQ ID NO: 1167483 - RNA, 19 nt, Homo sapiens
  misc_RNA (1)...(19): siRNA sense strand
acgaguagauuauaagugu

SEQ ID NO: 1167484 - RNA, 19 nt, Homo sapiens
  misc_RNA (1)...(19): siRNA sense strand
cuacaaagcaacaguuaug

SEQ ID NO: 1167485 - RNA, 19 nt, Homo sapiens
  misc_RNA (1)...(19): siRNA sense strand
ccaccaacauuugaagcua

SEQ ID NO: 1167486 - RNA, 19 nt, Homo sapiens
  misc_RNA (1)...(19): siRNA sense strand
uauacgggauccuuuaaau

SEQ ID NO: 1167487 - RNA, 19 nt, Homo sapiens
  misc_RNA (1)...(19): siRNA sense strand
cgaguuugguuaucagaug

SEQ ID NO: 1167488 - RNA, 19 nt, Homo sapiens
  misc_RNA (1)...(19): siRNA sense strand
gaacgaguagauuauaagu

SEQ ID NO: 1167489 - RNA, 19 nt, Homo sapiens
  misc_RNA (1)...(19): siRNA sense strand
gugaggagccaccaacauu

SEQ ID NO: 1167490 - RNA, 19 nt, Homo sapiens
  misc_RNA (1)...(19): siRNA sense strand
gauggcagcgacacaauug

SEQ ID NO: 1167491 - RNA, 19 nt, Homo sapiens
  misc_RNA (1)...(19): siRNA sense strand
gcuauggagcucauuggua

SEQ ID NO: 1167492 - RNA, 19 nt, Homo sapiens
  misc_RNA (1)...(19): siRNA sense strand
gaggagccaccaacauuug

SEQ ID NO: 1167493 - RNA, 19 nt, Homo sapiens
  misc_RNA (1)...(19): siRNA sense strand
acacaccuuuagugaagua

SEQ ID NO: 1167494 - RNA, 19 nt, Homo sapiens
  misc_RNA (1)...(19): siRNA sense strand
ucucagaugacgccuguua

SEQ ID NO: 1167495 - RNA, 19 nt, Homo sapiens
  misc_RNA (1)...(19): siRNA sense strand
uagagaaacauguccauau

SEQ ID NO: 1167496 - RNA, 19 nt, Homo sapiens
  misc_RNA (1)...(19): siRNA sense strand
ggugaacgaguagauuaua

SEQ ID NO: 1167497 - RNA, 19 nt, Homo sapiens
  misc_RNA (1)...(19): siRNA sense strand
gaaguagaaguauuugagu

SEQ ID NO: 1167498 - RNA, 19 nt, Homo sapiens
  misc_RNA (1)...(19): siRNA sense strand
gaaacauguccauauauac

SEQ ID NO: 1167499 - RNA, 19 nt, Homo sapiens
  misc_RNA (1)...(19): siRNA sense strand
ugacgccuguuauagagaa

SEQ ID NO: 1167500 - RNA, 19 nt, Homo sapiens
  misc_RNA (1)...(19): siRNA sense strand
cgaguagauuauaagugua

SEQ ID NO: 1167501 - RNA, 19 nt, Homo sapiens
  misc_RNA (1)...(19): siRNA sense strand
gcacuuuauuuguaaugag

SEQ ID NO: 1167502 - RNA, 19 nt, Homo sapiens
  misc_RNA (1)...(19): siRNA sense strand
guagaaguauuugaguauc

SEQ ID NO: 1167503 - RNA, 19 nt, Homo sapiens
  misc_RNA (1)...(19): siRNA sense strand
guauuugaguaucuugaug

SEQ ID NO: 1167504 - RNA, 19 nt, Homo sapiens
  misc_RNA (1)...(19): siRNA sense strand
aggaauacuugacaguuug

SEQ ID NO: 1167505 - RNA, 19 nt, Homo sapiens
  misc_RNA (1)...(19): siRNA sense strand
aguguaaaguggucaaaug

SEQ ID NO: 1167506 - RNA, 19 nt, Homo sapiens
  misc_RNA (1)...(19): siRNA sense strand
ccaaaacccuacuaugaga

SEQ ID NO: 1167507 - RNA, 19 nt, Homo sapiens
  misc_RNA (1)...(19): siRNA sense strand
ccacccauacuauuuguga

SEQ ID NO: 1167508 - RNA, 19 nt, Homo sapiens
  misc_RNA (1)...(19): siRNA sense strand
caccaacauuugaagcuau

SEQ ID NO: 1167509 - RNA, 19 nt, Homo sapiens
  misc_RNA (1)...(19): siRNA sense strand
uuggagagagcacgauuua

SEQ ID NO: 1167510 - RNA, 19 nt, Homo sapiens
  misc_RNA (1)...(19): siRNA sense strand
gguuaucagaugcacuuua

SEQ ID NO: 1167511 - RNA, 19 nt, Homo sapiens
  misc_RNA (1)...(19): siRNA sense strand
ugaggagccaccaacauuu

SEQ ID NO: 1167512 - RNA, 19 nt, Homo sapiens
  misc_RNA (1)...(19): siRNA sense strand
ggaaggaauacuugacagu

SEQ ID NO: 1167513 - RNA, 19 nt, Homo sapiens
  misc_RNA (1)...(19): siRNA sense strand
gaggaaggaauacuugaca

SEQ ID NO: 1167514 - RNA, 19 nt, Homo sapiens
  misc_RNA (1)...(19): siRNA sense strand
ugaguaucuugaugcagua

SEQ ID NO: 1167515 - RNA, 19 nt, Homo sapiens
  misc_RNA (1)...(19): siRNA sense strand
caccuuuagugaaguagaa

SEQ ID NO: 1167516 - RNA, 19 nt, Homo sapiens
  misc_RNA (1)...(19): siRNA sense strand
acagauaucaggauuugga

SEQ ID NO: 1167517 - RNA, 19 nt, Homo sapiens
  misc_RNA (1)...(19): siRNA sense strand
ucauugcugugauuguuau

SEQ ID NO: 1167518 - RNA, 19 nt, Homo sapiens
  misc_RNA (1)...(19): siRNA sense strand
ucagaugcacuuuauuugu

SEQ ID NO: 1167519 - RNA, 19 nt, Homo sapiens
  misc_RNA (1)...(19): siRNA sense strand
gugcugcuccagaguguaa

SEQ ID NO: 1167520 - RNA, 19 nt, Homo sapiens
  misc_RNA (1)...(19): siRNA sense strand
ggaaaacacaccuuuagug

SEQ ID NO: 1167521 - RNA, 19 nt, Homo sapiens
  misc_RNA (1)...(19): siRNA sense strand
aaggaucaguagcaauuug

SEQ ID NO: 1167522 - RNA, 19 nt, Homo sapiens
  misc_RNA (1)...(19): siRNA sense strand
uauauacgggauccuuuaa

SEQ ID NO: 1167523 - RNA, 19 nt, Homo sapiens
  misc_RNA (1)...(19): siRNA sense strand
ugaaguagaaguauuugag

SEQ ID NO: 1167524 - RNA, 19 nt, Homo sapiens
  misc_RNA (1)...(19): siRNA sense strand
cuugacaguuuggauguuu

SEQ ID NO: 1167525 - RNA, 19 nt, Homo sapiens
  misc_RNA (1)...(19): siRNA sense strand
cauauauacgggauccuuu

SEQ ID NO: 1167526 - RNA, 19 nt, Homo sapiens
  misc_RNA (1)...(19): siRNA sense strand
auauauacgggauccuuua

SEQ ID NO: 1167527 - RNA, 19 nt, Homo sapiens
  misc_RNA (1)...(19): siRNA sense strand
cuuaaaggaucaguagcaa

SEQ ID NO: 1167528 - RNA, 19 nt, Homo sapiens
  misc_RNA (1)...(19): siRNA sense strand
uaaaccugaggaaggaaua

SEQ ID NO: 1167529 - RNA, 19 nt, Homo sapiens
  misc_RNA (1)...(19): siRNA sense strand
agaugacgccuguuauaga

SEQ ID NO: 1167530 - RNA, 19 nt, Homo sapiens
  misc_RNA (1)...(19): siRNA sense strand
ugugauuguuauugccaua

SEQ ID NO: 1167531 - RNA, 19 nt, Homo sapiens
  misc_RNA (1)...(19): siRNA sense strand
gagagcacgauuuauugug

SEQ ID NO: 1167532 - RNA, 19 nt, Homo sapiens
  misc_RNA (1)...(19): siRNA sense strand
gaaguauuugaguaucuug

SEQ ID NO: 1167533 - RNA, 19 nt, Homo sapiens
  misc_RNA (1)...(19): siRNA sense strand
ccucuugccacccauacua

SEQ ID NO: 1167534 - RNA, 19 nt, Homo sapiens
  misc_RNA (1)...(19): siRNA sense strand
gauaucaggauuuggaaaa

SEQ ID NO: 1167535 - RNA, 19 nt, Homo sapiens
  misc_RNA (1)...(19): siRNA sense strand
ggcuaccugucucagauga

SEQ ID NO: 1167536 - RNA, 19 nt, Homo sapiens
  misc_RNA (1)...(19): siRNA sense strand
ccaugguguugcugcugua

SEQ ID NO: 1167537 - RNA, 19 nt, Homo sapiens
  misc_RNA (1)...(19): siRNA sense strand
cagaugacgccuguuauag

SEQ ID NO: 1167538 - RNA, 19 nt, Homo sapiens
  misc_RNA (1)...(19): siRNA sense strand
gucauugcugugauuguua

SEQ ID NO: 1167539 - RNA, 19 nt, Homo sapiens
  misc_RNA (1)...(19): siRNA sense strand
uuggugaacgaguagauua

SEQ ID NO: 1167540 - RNA, 19 nt, Homo sapiens
  misc_RNA (1)...(19): siRNA sense strand
ggagccaccaacauuugaa

SEQ ID NO: 1167541 - RNA, 19 nt, Homo sapiens
  misc_RNA (1)...(19): siRNA sense strand
gcgcuuuccuggguugcuu

SEQ ID NO: 1167542 - RNA, 19 nt, Homo sapiens
  misc_RNA (1)...(19): siRNA sense strand
uacuacaaagcaacaguua

SEQ ID NO: 1167543 - RNA, 19 nt, Homo sapiens
  misc_RNA (1)...(19): siRNA sense strand
cuugaugcaguaacuuaua

SEQ ID NO: 1167544 - RNA, 19 nt, Homo sapiens
  misc_RNA (1)...(19): siRNA sense strand
aaacauguccauauauacg

SEQ ID NO: 1167545 - RNA, 19 nt, Homo sapiens
  misc_RNA (1)...(19): siRNA sense strand
guguaaaguggucaaaugu

SEQ ID NO: 1167546 - RNA, 19 nt, Homo sapiens
  misc_RNA (1)...(19): siRNA sense strand
cuuacgaguuugguuauca

SEQ ID NO: 1167547 - RNA, 19 nt, Homo sapiens
  misc_RNA (1)...(19): siRNA sense strand
uacgggauccuuuaaaugg

SEQ ID NO: 1167548 - RNA, 19 nt, Homo sapiens
  misc_RNA (1)...(19): siRNA sense strand
aaccaaaacccuacuauga

SEQ ID NO: 1167549 - RNA, 19 nt, Homo sapiens
  misc_RNA (1)...(19): siRNA sense strand
cccaauaugugaaaagguu

SEQ ID NO: 1167550 - RNA, 19 nt, Homo sapiens
  misc_RNA (1)...(19): siRNA sense strand
cgauggcagcgacacaauu

SEQ ID NO: 1167551 - RNA, 19 nt, Homo sapiens
  misc_RNA (1)...(19): siRNA sense strand
gauccauuuucacuuauug

SEQ ID NO: 1167552 - RNA, 19 nt, Homo sapiens
  misc_RNA (1)...(19): siRNA sense strand
uugaugcaguaacuuauag

SEQ ID NO: 1167553 - RNA, 19 nt, Homo sapiens
  misc_RNA (1)...(19): siRNA sense strand
guaucuugaugcaguaacu

SEQ ID NO: 1167554 - RNA, 19 nt, Homo sapiens
  misc_RNA (1)...(19): siRNA sense strand
caacauuugaagcuaugga

SEQ ID NO: 1167555 - RNA, 19 nt, Homo sapiens
  misc_RNA (1)...(19): siRNA sense strand
gagauuggugaacgaguag

SEQ ID NO: 1167556 - RNA, 19 nt, Homo sapiens
  misc_RNA (1)...(19): siRNA sense strand
ggagagagcacgauuuauu

SEQ ID NO: 1167557 - RNA, 19 nt, Homo sapiens
  misc_RNA (1)...(19): siRNA sense strand
agagaaacauguccauaua

SEQ ID NO: 1167558 - RNA, 19 nt, Homo sapiens
  misc_RNA (1)...(19): siRNA sense strand
cagaugcacuuuauuugua

SEQ ID NO: 1167559 - RNA, 19 nt, Homo sapiens
  misc_RNA (1)...(19): siRNA sense strand
ggacuuacgaguuugguua

SEQ ID NO: 1167560 - RNA, 19 nt, Homo sapiens
  misc_RNA (1)...(19): siRNA sense strand
aaacagauaucaggauuug

SEQ ID NO: 1167561 - RNA, 19 nt, Homo sapiens
  misc_RNA (1)...(19): siRNA sense strand
cuauggagcucauugguaa

SEQ ID NO: 1167562 - RNA, 19 nt, Homo sapiens
  misc_RNA (1)...(19): siRNA sense strand
aaacacaccuuuagugaag

SEQ ID NO: 1167563 - RNA, 19 nt, Homo sapiens
  misc_RNA (1)...(19): siRNA sense strand
gaacuuaaaggaucaguag

SEQ ID NO: 1167564 - RNA, 19 nt, Homo sapiens
  misc_RNA (1)...(19): siRNA sense strand
gaaaacagauaucaggauu

SEQ ID NO: 1167565 - RNA, 19 nt, Homo sapiens
  misc_RNA (1)...(19): siRNA sense strand
uaaaggaucaguagcaauu

SEQ ID NO: 1167566 - RNA, 19 nt, Homo sapiens
  misc_RNA (1)...(19): siRNA sense strand
aaaugggacuuacgaguuu

SEQ ID NO: 1167567 - RNA, 19 nt, Homo sapiens
  misc_RNA (1)...(19): siRNA sense strand
guuaucagaugcacuuuau

SEQ ID NO: 1167568 - RNA, 19 nt, Homo sapiens
  misc_RNA (1)...(19): siRNA sense strand
ugagauuggugaacgagua

SEQ ID NO: 1167569 - RNA, 19 nt, Homo sapiens
  misc_RNA (1)...(19): siRNA sense strand
gugaacgaguagauuauaa

SEQ ID NO: 1167570 - RNA, 19 nt, Homo sapiens
  misc_RNA (1)...(19): siRNA sense strand
gagagagcacgauuuauug

SEQ ID NO: 1167571 - RNA, 19 nt, Homo sapiens
  misc_RNA (1)...(19): siRNA sense strand
caaaugggacuuacgaguu

SEQ ID NO: 1167572 - RNA, 19 nt, Homo sapiens
  misc_RNA (1)...(19): siRNA sense strand
ggucauugcugugauuguu

SEQ ID NO: 1167573 - RNA, 19 nt, Homo sapiens
  misc_RNA (1)...(19): siRNA sense strand
ccagauccauuuucacuua

SEQ ID NO: 1167574 - RNA, 19 nt, Homo sapiens
  misc_RNA (1)...(19): siRNA sense strand
gaaggaauacuugacaguu

SEQ ID NO: 1167575 - RNA, 19 nt, Homo sapiens
  misc_RNA (1)...(19): siRNA sense strand
aaggaauacuugacaguuu

SEQ ID NO: 1167576 - RNA, 19 nt, Homo sapiens
  misc_RNA (1)...(19): siRNA sense strand
ucagaugacgccuguuaua

SEQ ID NO: 1167577 - RNA, 19 nt, Homo sapiens
  misc_RNA (1)...(19): siRNA sense strand
gaaaacacaccuuuaguga

SEQ ID NO: 1167578 - RNA, 19 nt, Homo sapiens
  misc_RNA (1)...(19): siRNA sense strand
gaugacgccuguuauagag

SEQ ID NO: 1167579 - RNA, 19 nt, Homo sapiens
  misc_RNA (1)...(19): siRNA sense strand
gagaaacauguccauauau

SEQ ID NO: 1167580 - RNA, 19 nt, Homo sapiens
  misc_RNA (1)...(19): siRNA sense strand
acgaguagauuauaagugu

SEQ ID NO: 1167581 - RNA, 19 nt, Homo sapiens
  misc_RNA (1)...(19): siRNA sense strand
cuacaaagcaacaguuaug

SEQ ID NO: 1167582 - RNA, 19 nt, Homo sapiens
  misc_RNA (1)...(19): siRNA sense strand
ccaccaacauuugaagcua

SEQ ID NO: 1167583 - RNA, 19 nt, Homo sapiens
  misc_RNA (1)...(19): siRNA sense strand
uauacgggauccuuuaaau

SEQ ID NO: 1167584 - RNA, 19 nt, Homo sapiens
  misc_RNA (1)...(19): siRNA sense strand
cgaguuugguuaucagaug

SEQ ID NO: 1167585 - RNA, 19 nt, Homo sapiens
  misc_RNA (1)...(19): siRNA sense strand
gaacgaguagauuauaagu

SEQ ID NO: 1167586 - RNA, 19 nt, Homo sapiens
  misc_RNA (1)...(19): siRNA sense strand
gugaggagccaccaacauu

SEQ ID NO: 1167587 - RNA, 19 nt, Homo sapiens
  misc_RNA (1)...(19): siRNA sense strand
gauggcagcgacacaauug

SEQ ID NO: 1167588 - RNA, 19 nt, Homo sapiens
  misc_RNA (1)...(19): siRNA sense strand
gcuauggagcucauuggua

SEQ ID NO: 1167589 - RNA, 19 nt, Homo sapiens
  misc_RNA (1)...(19): siRNA sense strand
gaggagccaccaacauuug

SEQ ID NO: 1167590 - RNA, 19 nt, Homo sapiens
  misc_RNA (1)...(19): siRNA sense strand
acacaccuuuagugaagua

SEQ ID NO: 1167591 - RNA, 19 nt, Homo sapiens
  misc_RNA (1)...(19): siRNA sense strand
ucucagaugacgccuguua

SEQ ID NO: 1167592 - RNA, 19 nt, Homo sapiens
  misc_RNA (1)...(19): siRNA sense strand
uagagaaacauguccauau

SEQ ID NO: 1167593 - RNA, 19 nt, Homo sapiens
  misc_RNA (1)...(19): siRNA sense strand
guuccaaagugucuuaaag

SEQ ID NO: 1167594 - RNA, 19 nt, Homo sapiens
  misc_RNA (1)...(19): siRNA sense strand
ggugaacgaguagauuaua

SEQ ID NO: 1167595 - RNA, 19 nt, Homo sapiens
  misc_RNA (1)...(19): siRNA sense strand
gaaguagaaguauuugagu

SEQ ID NO: 1167596 - RNA, 19 nt, Homo sapiens
  misc_RNA (1)...(19): siRNA sense strand
gaaacauguccauauauac

SEQ ID NO: 1167597 - RNA, 19 nt, Homo sapiens
  misc_RNA (1)...(19): siRNA sense strand
ugacgccuguuauagagaa

SEQ ID NO: 1167598 - RNA, 19 nt, Homo sapiens
  misc_RNA (1)...(19): siRNA sense strand
cgaguagauuauaagugua

SEQ ID NO: 1167599 - RNA, 19 nt, Homo sapiens
  misc_RNA (1)...(19): siRNA sense strand
gcacuuuauuuguaaugag

SEQ ID NO: 1167600 - RNA, 19 nt, Homo sapiens
  misc_RNA (1)...(19): siRNA sense strand
guagaaguauuugaguauc

SEQ ID NO: 1167601 - RNA, 19 nt, Homo sapiens
  misc_RNA (1)...(19): siRNA sense strand
guauuugaguaucuugaug

SEQ ID NO: 1167602 - RNA, 19 nt, Homo sapiens
  misc_RNA (1)...(19): siRNA sense strand
aggaauacuugacaguuug

SEQ ID NO: 1167603 - RNA, 19 nt, Homo sapiens
  misc_RNA (1)...(19): siRNA sense strand
ccaaaacccuacuaugaga

SEQ ID NO: 1167604 - RNA, 19 nt, Homo sapiens
  misc_RNA (1)...(19): siRNA sense strand
aguguaaaguggucaaaug

SEQ ID NO: 1167605 - RNA, 19 nt, Homo sapiens
  misc_RNA (1)...(19): siRNA sense strand
ccacccauacuauuuguga

SEQ ID NO: 1167606 - RNA, 19 nt, Homo sapiens
  misc_RNA (1)...(19): siRNA sense strand
caccaacauuugaagcuau

SEQ ID NO: 1167607 - RNA, 19 nt, Homo sapiens
  misc_RNA (1)...(19): siRNA sense strand
uuggagagagcacgauuua

SEQ ID NO: 1167608 - RNA, 19 nt, Homo sapiens
  misc_RNA (1)...(19): siRNA sense strand
gguuaucagaugcacuuua

SEQ ID NO: 1167609 - RNA, 19 nt, Homo sapiens
  misc_RNA (1)...(19): siRNA sense strand
ugaggagccaccaacauuu

SEQ ID NO: 1167610 - RNA, 19 nt, Homo sapiens
  misc_RNA (1)...(19): siRNA sense strand
ggaaggaauacuugacagu

SEQ ID NO: 1167611 - RNA, 19 nt, Homo sapiens
  misc_RNA (1)...(19): siRNA sense strand
gaggaaggaauacuugaca

SEQ ID NO: 1167612 - RNA, 19 nt, Homo sapiens
  misc_RNA (1)...(19): siRNA sense strand
ccaguuccaaagugucuua

SEQ ID NO: 1167613 - RNA, 19 nt, Homo sapiens
  misc_RNA (1)...(19): siRNA sense strand
ugaguaucuugaugcagua

SEQ ID NO: 1167614 - RNA, 19 nt, Homo sapiens
  misc_RNA (1)...(19): siRNA sense strand
caccuuuagugaaguagaa

SEQ ID NO: 1167615 - RNA, 19 nt, Homo sapiens
  misc_RNA (1)...(19): siRNA sense strand
acagauaucaggauuugga

SEQ ID NO: 1167616 - RNA, 19 nt, Homo sapiens
  misc_RNA (1)...(19): siRNA sense strand
ucauugcugugauuguuau

SEQ ID NO: 1167617 - RNA, 19 nt, Homo sapiens
  misc_RNA (1)...(19): siRNA sense strand
ucagaugcacuuuauuugu

SEQ ID NO: 1167618 - RNA, 19 nt, Homo sapiens
  misc_RNA (1)...(19): siRNA sense strand
gugcugcuccagaguguaa

SEQ ID NO: 1167619 - RNA, 19 nt, Homo sapiens
  misc_RNA (1)...(19): siRNA sense strand
ggaaaacacaccuuuagug

SEQ ID NO: 1167620 - RNA, 19 nt, Homo sapiens
  misc_RNA (1)...(19): siRNA sense strand
aaggaucaguagcaauuug

SEQ ID NO: 1167621 - RNA, 19 nt, Homo sapiens
  misc_RNA (1)...(19): siRNA sense strand
uauauacgggauccuuuaa

SEQ ID NO: 1167622 - RNA, 19 nt, Homo sapiens
  misc_RNA (1)...(19): siRNA sense strand
ugaaguagaaguauuugag

SEQ ID NO: 1167623 - RNA, 19 nt, Homo sapiens
  misc_RNA (1)...(19): siRNA sense strand
cuugacaguuuggauguuu

SEQ ID NO: 1167624 - RNA, 19 nt, Homo sapiens
  misc_RNA (1)...(19): siRNA sense strand
cauauauacgggauccuuu

SEQ ID NO: 1167625 - RNA, 19 nt, Homo sapiens
  misc_RNA (1)...(19): siRNA sense strand
auauauacgggauccuuua

SEQ ID NO: 1167626 - RNA, 19 nt, Homo sapiens
  misc_RNA (1)...(19): siRNA sense strand
cuuaaaggaucaguagcaa

SEQ ID NO: 1167627 - RNA, 19 nt, Homo sapiens
  misc_RNA (1)...(19): siRNA sense strand
uaaaccugaggaaggaaua

SEQ ID NO: 1167628 - RNA, 19 nt, Homo sapiens
  misc_RNA (1)...(19): siRNA sense strand
agaugacgccuguuauaga

SEQ ID NO: 1167629 - RNA, 19 nt, Homo sapiens
  misc_RNA (1)...(19): siRNA sense strand
ugugauuguuauugccaua

SEQ ID NO: 1167630 - RNA, 19 nt, Homo sapiens
  misc_RNA (1)...(19): siRNA sense strand
gagagcacgauuuauugug

SEQ ID NO: 1167631 - RNA, 19 nt, Homo sapiens
  misc_RNA (1)...(19): siRNA sense strand
gaaguauuugaguaucuug

SEQ ID NO: 1167632 - RNA, 19 nt, Homo sapiens
  misc_RNA (1)...(19): siRNA sense strand
ggcuaccugucucagauga

SEQ ID NO: 1167633 - RNA, 19 nt, Homo sapiens
  misc_RNA (1)...(19): siRNA sense strand
gauaucaggauuuggaaaa

SEQ ID NO: 1167634 - RNA, 19 nt, Homo sapiens
  misc_RNA (1)...(19): siRNA sense strand
ccucuugccacccauacua

SEQ ID NO: 1167635 - RNA, 19 nt, Homo sapiens
  misc_RNA (1)...(19): siRNA sense strand
ccaugguguugcugcugua

SEQ ID NO: 1167636 - RNA, 19 nt, Homo sapiens
  misc_RNA (1)...(19): siRNA sense strand
cagaugacgccuguuauag

SEQ ID NO: 1167637 - RNA, 19 nt, Homo sapiens
  misc_RNA (1)...(19): siRNA sense strand
uuggugaacgaguagauua

SEQ ID NO: 1167638 - RNA, 19 nt, Homo sapiens
  misc_RNA (1)...(19): siRNA sense strand
gucauugcugugauuguua

SEQ ID NO: 1167639 - RNA, 19 nt, Homo sapiens
  misc_RNA (1)...(19): siRNA sense strand
ggagccaccaacauuugaa

SEQ ID NO: 1167640 - RNA, 19 nt, Homo sapiens
  misc_RNA (1)...(19): siRNA sense strand
gcgcuuuccuggguugcuu

SEQ ID NO: 1167641 - RNA, 19 nt, Homo sapiens
  misc_RNA (1)...(19): siRNA sense strand
uacuacaaagcaacaguua

SEQ ID NO: 1167642 - RNA, 19 nt, Homo sapiens
  misc_RNA (1)...(19): siRNA sense strand
cuugaugcaguaacuuaua

SEQ ID NO: 1167643 - RNA, 19 nt, Homo sapiens
  misc_RNA (1)...(19): siRNA sense strand
aaacauguccauauauacg

SEQ ID NO: 1167644 - RNA, 19 nt, Homo sapiens
  misc_RNA (1)...(19): siRNA sense strand
guguaaaguggucaaaugu

SEQ ID NO: 1167645 - RNA, 19 nt, Homo sapiens
  misc_RNA (1)...(19): siRNA sense strand
cuuacgaguuugguuauca

SEQ ID NO: 1167646 - RNA, 19 nt, Homo sapiens
  misc_RNA (1)...(19): siRNA sense strand
uacgggauccuuuaaaugg

SEQ ID NO: 1167647 - RNA, 19 nt, Homo sapiens
  misc_RNA (1)...(19): siRNA sense strand
aaccaaaacccuacuauga

SEQ ID NO: 1167648 - RNA, 19 nt, Homo sapiens
  misc_RNA (1)...(19): siRNA sense strand
cccaauaugugaaaagguu

SEQ ID NO: 1167649 - RNA, 19 nt, Homo sapiens
  misc_RNA (1)...(19): siRNA sense strand
cgauggcagcgacacaauu

SEQ ID NO: 1167650 - RNA, 19 nt, Homo sapiens
  misc_RNA (1)...(19): siRNA sense strand
gauccauuuucacuuauug

SEQ ID NO: 1167651 - RNA, 19 nt, Homo sapiens
  misc_RNA (1)...(19): siRNA sense strand
uugaugcaguaacuuauag

SEQ ID NO: 1167652 - RNA, 19 nt, Homo sapiens
  misc_RNA (1)...(19): siRNA sense strand
guaucuugaugcaguaacu

SEQ ID NO: 1167653 - RNA, 19 nt, Homo sapiens
  misc_RNA (1)...(19): siRNA sense strand
caacauuugaagcuaugga

SEQ ID NO: 1167654 - RNA, 19 nt, Homo sapiens
  misc_RNA (1)...(19): siRNA sense strand
gagauuggugaacgaguag

SEQ ID NO: 1167655 - RNA, 19 nt, Homo sapiens
  misc_RNA (1)...(19): siRNA sense strand
ggagagagcacgauuuauu

SEQ ID NO: 1167656 - RNA, 19 nt, Homo sapiens
  misc_RNA (1)...(19): siRNA sense strand
agagaaacauguccauaua

SEQ ID NO: 1167657 - RNA, 19 nt, Homo sapiens
  misc_RNA (1)...(19): siRNA sense strand
cagaugcacuuuauuugua

SEQ ID NO: 1167658 - RNA, 19 nt, Homo sapiens
  misc_RNA (1)...(19): siRNA sense strand
ggacuuacgaguuugguua

SEQ ID NO: 1167659 - RNA, 19 nt, Homo sapiens
  misc_RNA (1)...(19): siRNA sense strand
aaacagauaucaggauuug

SEQ ID NO: 1167660 - RNA, 19 nt, Homo sapiens
  misc_RNA (1)...(19): siRNA sense strand
cuauggagcucauugguaa

SEQ ID NO: 1167661 - RNA, 19 nt, Homo sapiens
  misc_RNA (1)...(19): siRNA sense strand
aaacacaccuuuagugaag

SEQ ID NO: 1167662 - RNA, 19 nt, Homo sapiens
  misc_RNA (1)...(19): siRNA sense strand
gaacuuaaaggaucaguag

SEQ ID NO: 1167663 - RNA, 19 nt, Homo sapiens
  misc_RNA (1)...(19): siRNA sense strand
gaaaacagauaucaggauu

SEQ ID NO: 1167664 - RNA, 19 nt, Homo sapiens
  misc_RNA (1)...(19): siRNA sense strand
uaaaggaucaguagcaauu

SEQ ID NO: 1167665 - RNA, 19 nt, Homo sapiens
  misc_RNA (1)...(19): siRNA sense strand
aaaugggacuuacgaguuu

SEQ ID NO: 1167666 - RNA, 19 nt, Homo sapiens
  misc_RNA (1)...(19): siRNA sense strand
guuaucagaugcacuuuau

SEQ ID NO: 1167667 - RNA, 19 nt, Homo sapiens
  misc_RNA (1)...(19): siRNA sense strand
gagcugaauaugccacuua

SEQ ID NO: 1167668 - RNA, 19 nt, Homo sapiens
  misc_RNA (1)...(19): siRNA sense strand
ugagauuggugaacgagua

SEQ ID NO: 1167669 - RNA, 19 nt, Homo sapiens
  misc_RNA (1)...(19): siRNA sense strand
gugaacgaguagauuauaa

SEQ ID NO: 1167670 - RNA, 19 nt, Homo sapiens
  misc_RNA (1)...(19): siRNA sense strand
gagagagcacgauuuauug

SEQ ID NO: 1167671 - RNA, 19 nt, Homo sapiens
  misc_RNA (1)...(19): siRNA sense strand
caaaugggacuuacgaguu

SEQ ID NO: 1167672 - RNA, 19 nt, Homo sapiens
  misc_RNA (1)...(19): siRNA sense strand
ggucauugcugugauuguu

SEQ ID NO: 1167673 - RNA, 19 nt, Homo sapiens
  misc_RNA (1)...(19): siRNA sense strand
ccagauccauuuucacuua

SEQ ID NO: 1167674 - RNA, 19 nt, Homo sapiens
  misc_RNA (1)...(19): siRNA sense strand
gaaggaauacuugacaguu

SEQ ID NO: 1167675 - RNA, 19 nt, Homo sapiens
  misc_RNA (1)...(19): siRNA sense strand
aaggaauacuugacaguuu

SEQ ID NO: 1167676 - RNA, 19 nt, Homo sapiens
  misc_RNA (1)...(19): siRNA sense strand
ucagaugacgccuguuaua

SEQ ID NO: 1167677 - RNA, 19 nt, Homo sapiens
  misc_RNA (1)...(19): siRNA sense strand
gaaaacacaccuuuaguga

SEQ ID NO: 1167678 - RNA, 19 nt, Homo sapiens
  misc_RNA (1)...(19): siRNA sense strand
gaugacgccuguuauagag

SEQ ID NO: 1167679 - RNA, 19 nt, Homo sapiens
  misc_RNA (1)...(19): siRNA sense strand
gagaaacauguccauauau

SEQ ID NO: 1167680 - RNA, 19 nt, Homo sapiens
  misc_RNA (1)...(19): siRNA sense strand
ccacuuaccagacuaaauc

SEQ ID NO: 1167681 - RNA, 19 nt, Homo sapiens
  misc_RNA (1)...(19): siRNA sense strand
acgaguagauuauaagugu

SEQ ID NO: 1167682 - RNA, 19 nt, Homo sapiens
  misc_RNA (1)...(19): siRNA sense strand
cuacaaagcaacaguuaug

SEQ ID NO: 1167683 - RNA, 19 nt, Homo sapiens
  misc_RNA (1)...(19): siRNA sense strand
ccaccaacauuugaagcua

SEQ ID NO: 1167684 - RNA, 19 nt, Homo sapiens
  misc_RNA (1)...(19): siRNA sense strand
uauacgggauccuuuaaau

SEQ ID NO: 1167685 - RNA, 19 nt, Homo sapiens
  misc_RNA (1)...(19): siRNA sense strand
cgaguuugguuaucagaug

SEQ ID NO: 1167686 - RNA, 19 nt, Homo sapiens
  misc_RNA (1)...(19): siRNA sense strand
gaacgaguagauuauaagu

SEQ ID NO: 1167687 - RNA, 19 nt, Homo sapiens
  misc_RNA (1)...(19): siRNA sense strand
gugaggagccaccaacauu

SEQ ID NO: 1167688 - RNA, 19 nt, Homo sapiens
  misc_RNA (1)...(19): siRNA sense strand
gauggcagcgacacaauug

SEQ ID NO: 1167689 - RNA, 19 nt, Homo sapiens
  misc_RNA (1)...(19): siRNA sense strand
ucucagaugacgccuguua

SEQ ID NO: 1167690 - RNA, 19 nt, Homo sapiens
  misc_RNA (1)...(19): siRNA sense strand
gaggagccaccaacauuug

SEQ ID NO: 1167691 - RNA, 19 nt, Homo sapiens
  misc_RNA (1)...(19): siRNA sense strand
gcuauggagcucauuggua

SEQ ID NO: 1167692 - RNA, 19 nt, Homo sapiens
  misc_RNA (1)...(19): siRNA sense strand
acacaccuuuagugaagua

SEQ ID NO: 1167693 - RNA, 19 nt, Homo sapiens
  misc_RNA (1)...(19): siRNA sense strand
uagagaaacauguccauau

SEQ ID NO: 1167694 - RNA, 19 nt, Homo sapiens
  misc_RNA (1)...(19): siRNA sense strand
guuccaaagugucuuaaag

SEQ ID NO: 1167695 - RNA, 19 nt, Homo sapiens
  misc_RNA (1)...(19): siRNA sense strand
ggugaacgaguagauuaua

SEQ ID NO: 1167696 - RNA, 19 nt, Homo sapiens
  misc_RNA (1)...(19): siRNA sense strand
gaaguagaaguauuugagu

SEQ ID NO: 1167697 - RNA, 19 nt, Homo sapiens
  misc_RNA (1)...(19): siRNA sense strand
gaaacauguccauauauac

SEQ ID NO: 1167698 - RNA, 19 nt, Homo sapiens
  misc_RNA (1)...(19): siRNA sense strand
ugacgccuguuauagagaa

SEQ ID NO: 1167699 - RNA, 19 nt, Homo sapiens
  misc_RNA (1)...(19): siRNA sense strand
cgaguagauuauaagugua

SEQ ID NO: 1167700 - RNA, 19 nt, Homo sapiens
  misc_RNA (1)...(19): siRNA sense strand
gcacuuuauuuguaaugag

SEQ ID NO: 1167701 - RNA, 19 nt, Homo sapiens
  misc_RNA (1)...(19): siRNA sense strand
guagaaguauuugaguauc

SEQ ID NO: 1167702 - RNA, 19 nt, Homo sapiens
  misc_RNA (1)...(19): siRNA sense strand
guauuugaguaucuugaug

SEQ ID NO: 1167703 - RNA, 19 nt, Homo sapiens
  misc_RNA (1)...(19): siRNA sense strand
aggaauacuugacaguuug

SEQ ID NO: 1167704 - RNA, 19 nt, Homo sapiens
  misc_RNA (1)...(19): siRNA sense strand
ccaaaacccuacuaugaga

SEQ ID NO: 1167705 - RNA, 19 nt, Homo sapiens
  misc_RNA (1)...(19): siRNA sense strand
aguguaaaguggucaaaug

SEQ ID NO: 1167706 - RNA, 19 nt, Homo sapiens
  misc_RNA (1)...(19): siRNA sense strand
ccacccauacuauuuguga

SEQ ID NO: 1167707 - RNA, 19 nt, Homo sapiens
  misc_RNA (1)...(19): siRNA sense strand
uuggagagagcacgauuua

SEQ ID NO: 1167708 - RNA, 19 nt, Homo sapiens
  misc_RNA (1)...(19): siRNA sense strand
gguuaucagaugcacuuua

SEQ ID NO: 1167709 - RNA, 19 nt, Homo sapiens
  misc_RNA (1)...(19): siRNA sense strand
caccaacauuugaagcuau

SEQ ID NO: 1167710 - RNA, 19 nt, Homo sapiens
  misc_RNA (1)...(19): siRNA sense strand
ugaggagccaccaacauuu

SEQ ID NO: 1167711 - RNA, 19 nt, Homo sapiens
  misc_RNA (1)...(19): siRNA sense strand
ggaaggaauacuugacagu

SEQ ID NO: 1167712 - RNA, 19 nt, Homo sapiens
  misc_RNA (1)...(19): siRNA sense strand
gaggaaggaauacuugaca

SEQ ID NO: 1167713 - RNA, 19 nt, Homo sapiens
  misc_RNA (1)...(19): siRNA sense strand
ccaguuccaaagugucuua

SEQ ID NO: 1167714 - RNA, 19 nt, Homo sapiens
  misc_RNA (1)...(19): siRNA sense strand
ugaguaucuugaugcagua

SEQ ID NO: 1167715 - RNA, 19 nt, Homo sapiens
  misc_RNA (1)...(19): siRNA sense strand
caccuuuagugaaguagaa

SEQ ID NO: 1167716 - RNA, 19 nt, Homo sapiens
  misc_RNA (1)...(19): siRNA sense strand
acagauaucaggauuugga

SEQ ID NO: 1167717 - RNA, 19 nt, Homo sapiens
  misc_RNA (1)...(19): siRNA sense strand
ucauugcugugauuguuau

SEQ ID NO: 1167718 - RNA, 19 nt, Homo sapiens
  misc_RNA (1)...(19): siRNA sense strand
ucagaugcacuuuauuugu

SEQ ID NO: 1167719 - RNA, 19 nt, Homo sapiens
  misc_RNA (1)...(19): siRNA sense strand
gugcugcuccagaguguaa

SEQ ID NO: 1167720 - RNA, 19 nt, Homo sapiens
  misc_RNA (1)...(19): siRNA sense strand
ggaaaacacaccuuuagug

SEQ ID NO: 1167721 - RNA, 19 nt, Homo sapiens
  misc_RNA (1)...(19): siRNA sense strand
aaggaucaguagcaauuug

SEQ ID NO: 1167722 - RNA, 19 nt, Homo sapiens
  misc_RNA (1)...(19): siRNA sense strand
uauauacgggauccuuuaa

SEQ ID NO: 1167723 - RNA, 19 nt, Homo sapiens
  misc_RNA (1)...(19): siRNA sense strand
ugaaguagaaguauuugag

SEQ ID NO: 1167724 - RNA, 19 nt, Homo sapiens
  misc_RNA (1)...(19): siRNA sense strand
cuugacaguuuggauguuu

SEQ ID NO: 1167725 - RNA, 19 nt, Homo sapiens
  misc_RNA (1)...(19): siRNA sense strand
cauauauacgggauccuuu

SEQ ID NO: 1167726 - RNA, 19 nt, Homo sapiens
  misc_RNA (1)...(19): siRNA sense strand
auauauacgggauccuuua

SEQ ID NO: 1167727 - RNA, 19 nt, Homo sapiens
  misc_RNA (1)...(19): siRNA sense strand
cuuaaaggaucaguagcaa

SEQ ID NO: 1167728 - RNA, 19 nt, Homo sapiens
  misc_RNA (1)...(19): siRNA sense strand
uaaaccugaggaaggaaua

SEQ ID NO: 1167729 - RNA, 19 nt, Homo sapiens
  misc_RNA (1)...(19): siRNA sense strand
agaugacgccuguuauaga

SEQ ID NO: 1167730 - RNA, 19 nt, Homo sapiens
  misc_RNA (1)...(19): siRNA sense strand
ugugauuguuauugccaua

SEQ ID NO: 1167731 - RNA, 19 nt, Homo sapiens
  misc_RNA (1)...(19): siRNA sense strand
gagagcacgauuuauugug

SEQ ID NO: 1167732 - RNA, 19 nt, Homo sapiens
  misc_RNA (1)...(19): siRNA sense strand
gaaguauuugaguaucuug

SEQ ID NO: 1167733 - RNA, 19 nt, Homo sapiens
  misc_RNA (1)...(19): siRNA sense strand
ggcuaccugucucagauga

SEQ ID NO: 1167734 - RNA, 19 nt, Homo sapiens
  misc_RNA (1)...(19): siRNA sense strand
gauaucaggauuuggaaaa

SEQ ID NO: 1167735 - RNA, 19 nt, Homo sapiens
  misc_RNA (1)...(19): siRNA sense strand
ccucuugccacccauacua

SEQ ID NO: 1167736 - RNA, 19 nt, Homo sapiens
  misc_RNA (1)...(19): siRNA sense strand
ccaugguguugcugcugua

SEQ ID NO: 1167737 - RNA, 19 nt, Homo sapiens
  misc_RNA (1)...(19): siRNA sense strand
cagaugacgccuguuauag

SEQ ID NO: 1167738 - RNA, 19 nt, Homo sapiens
  misc_RNA (1)...(19): siRNA sense strand
cagaugguggagcugaaua

SEQ ID NO: 1167739 - RNA, 19 nt, Homo sapiens
  misc_RNA (1)...(19): siRNA sense strand
gucauugcugugauuguua

SEQ ID NO: 1167740 - RNA, 19 nt, Homo sapiens
  misc_RNA (1)...(19): siRNA sense strand
ggagccaccaacauuugaa

SEQ ID NO: 1167741 - RNA, 19 nt, Homo sapiens
  misc_RNA (1)...(19): siRNA sense strand
uuggugaacgaguagauua

SEQ ID NO: 1167742 - RNA, 19 nt, Homo sapiens
  misc_RNA (1)...(19): siRNA sense strand
gcgcuuuccuggguugcuu

SEQ ID NO: 1167743 - RNA, 19 nt, Homo sapiens
  misc_RNA (1)...(19): siRNA sense strand
uacuacaaagcaacaguua

SEQ ID NO: 1167744 - RNA, 19 nt, Homo sapiens
  misc_RNA (1)...(19): siRNA sense strand
cuugaugcaguaacuuaua

SEQ ID NO: 1167745 - RNA, 19 nt, Homo sapiens
  misc_RNA (1)...(19): siRNA sense strand
aaacauguccauauauacg

SEQ ID NO: 1167746 - RNA, 19 nt, Homo sapiens
  misc_RNA (1)...(19): siRNA sense strand
guguaaaguggucaaaugu

SEQ ID NO: 1167747 - RNA, 19 nt, Homo sapiens
  misc_RNA (1)...(19): siRNA sense strand
cuuacgaguuugguuauca

SEQ ID NO: 1167748 - RNA, 19 nt, Homo sapiens
  misc_RNA (1)...(19): siRNA sense strand
uacgggauccuuuaaaugg

SEQ ID NO: 1167749 - RNA, 19 nt, Homo sapiens
  misc_RNA (1)...(19): siRNA sense strand
gcagaugguggagcugaau

SEQ ID NO: 1167750 - RNA, 19 nt, Homo sapiens
  misc_RNA (1)...(19): siRNA sense strand
aaccaaaacccuacuauga

SEQ ID NO: 1167751 - RNA, 19 nt, Homo sapiens
  misc_RNA (1)...(19): siRNA sense strand
uugaugcaguaacuuauag

SEQ ID NO: 1167752 - RNA, 19 nt, Homo sapiens
  misc_RNA (1)...(19): siRNA sense strand
ggagcugaauaugccacuu

SEQ ID NO: 1167753 - RNA, 19 nt, Homo sapiens
  misc_RNA (1)...(19): siRNA sense strand
cgauggcagcgacacaauu

SEQ ID NO: 1167754 - RNA, 19 nt, Homo sapiens
  misc_RNA (1)...(19): siRNA sense strand
gauccauuuucacuuauug

SEQ ID NO: 1167755 - RNA, 19 nt, Homo sapiens
  misc_RNA (1)...(19): siRNA sense strand
ggagagagcacgauuuauu

SEQ ID NO: 1167756 - RNA, 19 nt, Homo sapiens
  misc_RNA (1)...(19): siRNA sense strand
agagaaacauguccauaua

SEQ ID NO: 1167757 - RNA, 19 nt, Homo sapiens
  misc_RNA (1)...(19): siRNA sense strand
cagaugcacuuuauuugua

SEQ ID NO: 1167758 - RNA, 19 nt, Homo sapiens
  misc_RNA (1)...(19): siRNA sense strand
ggacuuacgaguuugguua

SEQ ID NO: 1167759 - RNA, 19 nt, Homo sapiens
  misc_RNA (1)...(19): siRNA sense strand
aaacagauaucaggauuug

SEQ ID NO: 1167760 - RNA, 19 nt, Homo sapiens
  misc_RNA (1)...(19): siRNA sense strand
cuauggagcucauugguaa

SEQ ID NO: 1167761 - RNA, 19 nt, Homo sapiens
  misc_RNA (1)...(19): siRNA sense strand
aaacacaccuuuagugaag

SEQ ID NO: 1167762 - RNA, 19 nt, Homo sapiens
  misc_RNA (1)...(19): siRNA sense strand
gaacuuaaaggaucaguag

SEQ ID NO: 1167763 - RNA, 19 nt, Homo sapiens
  misc_RNA (1)...(19): siRNA sense strand
gaaaacagauaucaggauu

SEQ ID NO: 1167764 - RNA, 19 nt, Homo sapiens
  misc_RNA (1)...(19): siRNA sense strand
uaaaggaucaguagcaauu

SEQ ID NO: 1167765 - RNA, 19 nt, Homo sapiens
  misc_RNA (1)...(19): siRNA sense strand
aaaugggacuuacgaguuu

SEQ ID NO: 1167766 - RNA, 19 nt, Homo sapiens
  misc_RNA (1)...(19): siRNA sense strand
guuaucagaugcacuuuau

SEQ ID NO: 1167767 - RNA, 19 nt, Homo sapiens
  misc_RNA (1)...(19): siRNA sense strand
ugagauuggugaacgagua

SEQ ID NO: 1167768 - RNA, 19 nt, Homo sapiens
  misc_RNA (1)...(19): siRNA sense strand
gugaacgaguagauuauaa

SEQ ID NO: 1167769 - RNA, 19 nt, Homo sapiens
  misc_RNA (1)...(19): siRNA sense strand
gagagagcacgauuuauug

SEQ ID NO: 1167770 - RNA, 19 nt, Homo sapiens
  misc_RNA (1)...(19): siRNA sense strand
caaaugggacuuacgaguu

SEQ ID NO: 1167771 - RNA, 19 nt, Homo sapiens
  misc_RNA (1)...(19): siRNA sense strand
ggucauugcugugauuguu

SEQ ID NO: 1167772 - RNA, 19 nt, Homo sapiens
  misc_RNA (1)...(19): siRNA sense strand
ccagauccauuuucacuua

SEQ ID NO: 1167773 - RNA, 19 nt, Homo sapiens
  misc_RNA (1)...(19): siRNA sense strand
gaaggaauacuugacaguu

SEQ ID NO: 1167774 - RNA, 19 nt, Homo sapiens
  misc_RNA (1)...(19): siRNA sense strand
aaggaauacuugacaguuu

SEQ ID NO: 1167775 - RNA, 19 nt, Homo sapiens
  misc_RNA (1)...(19): siRNA sense strand
ucagaugacgccuguuaua

SEQ ID NO: 1167776 - RNA, 19 nt, Homo sapiens
  misc_RNA (1)...(19): siRNA sense strand
gaaaacacaccuuuaguga

SEQ ID NO: 1167777 - RNA, 19 nt, Homo sapiens
  misc_RNA (1)...(19): siRNA sense strand
gaugacgccuguuauagag

SEQ ID NO: 1167778 - RNA, 19 nt, Homo sapiens
  misc_RNA (1)...(19): siRNA sense strand
gagaaacauguccauauau

SEQ ID NO: 1167779 - RNA, 19 nt, Homo sapiens
  misc_RNA (1)...(19): siRNA sense strand
acgaguagauuauaagugu

SEQ ID NO: 1167780 - RNA, 19 nt, Homo sapiens
  misc_RNA (1)...(19): siRNA sense strand
cuacaaagcaacaguuaug

SEQ ID NO: 1167781 - RNA, 19 nt, Homo sapiens
  misc_RNA (1)...(19): siRNA sense strand
ccaccaacauuugaagcua

SEQ ID NO: 1167782 - RNA, 19 nt, Homo sapiens
  misc_RNA (1)...(19): siRNA sense strand
uauacgggauccuuuaaau

SEQ ID NO: 1167783 - RNA, 19 nt, Homo sapiens
  misc_RNA (1)...(19): siRNA sense strand
cgaguuugguuaucagaug

SEQ ID NO: 1167784 - RNA, 19 nt, Homo sapiens
  misc_RNA (1)...(19): siRNA sense strand
gaacgaguagauuauaagu

SEQ ID NO: 1167785 - RNA, 19 nt, Homo sapiens
  misc_RNA (1)...(19): siRNA sense strand
gugaggagccaccaacauu

SEQ ID NO: 1167786 - RNA, 19 nt, Homo sapiens
  misc_RNA (1)...(19): siRNA sense strand
gauggcagcgacacaauug

SEQ ID NO: 1167787 - RNA, 19 nt, Homo sapiens
  misc_RNA (1)...(19): siRNA sense strand
gcuauggagcucauuggua

SEQ ID NO: 1167788 - RNA, 19 nt, Homo sapiens
  misc_RNA (1)...(19): siRNA sense strand
gaggagccaccaacauuug

SEQ ID NO: 1167789 - RNA, 19 nt, Homo sapiens
  misc_RNA (1)...(19): siRNA sense strand
acacaccuuuagugaagua

SEQ ID NO: 1167790 - RNA, 19 nt, Homo sapiens
  misc_RNA (1)...(19): siRNA sense strand
ucucagaugacgccuguua

SEQ ID NO: 1167791 - RNA, 19 nt, Homo sapiens
  misc_RNA (1)...(19): siRNA sense strand
uagagaaacauguccauau

SEQ ID NO: 1167792 - RNA, 19 nt, Homo sapiens
  misc_RNA (1)...(19): siRNA sense strand
guuccaaagugucuuaaag

SEQ ID NO: 1167793 - RNA, 19 nt, Homo sapiens
  misc_RNA (1)...(19): siRNA sense strand
ggugaacgaguagauuaua

SEQ ID NO: 1167794 - RNA, 19 nt, Homo sapiens
  misc_RNA (1)...(19): siRNA sense strand
gaaguagaaguauuugagu

SEQ ID NO: 1167795 - RNA, 19 nt, Homo sapiens
  misc_RNA (1)...(19): siRNA sense strand
gaaacauguccauauauac

SEQ ID NO: 1167796 - RNA, 19 nt, Homo sapiens
  misc_RNA (1)...(19): siRNA sense strand
ugacgccuguuauagagaa

SEQ ID NO: 1167797 - RNA, 19 nt, Homo sapiens
  misc_RNA (1)...(19): siRNA sense strand
cgaguagauuauaagugua

SEQ ID NO: 1167798 - RNA, 19 nt, Homo sapiens
  misc_RNA (1)...(19): siRNA sense strand
gcacuuuauuuguaaugag

SEQ ID NO: 1167799 - RNA, 19 nt, Homo sapiens
  misc_RNA (1)...(19): siRNA sense strand
guagaaguauuugaguauc

SEQ ID NO: 1167800 - RNA, 19 nt, Homo sapiens
  misc_RNA (1)...(19): siRNA sense strand
guauuugaguaucuugaug

SEQ ID NO: 1167801 - RNA, 19 nt, Homo sapiens
  misc_RNA (1)...(19): siRNA sense strand
aggaauacuugacaguuug

SEQ ID NO: 1167802 - RNA, 19 nt, Homo sapiens
  misc_RNA (1)...(19): siRNA sense strand
ccaaaacccuacuaugaga

SEQ ID NO: 1167803 - RNA, 19 nt, Homo sapiens
  misc_RNA (1)...(19): siRNA sense strand
aguguaaaguggucaaaug

SEQ ID NO: 1167804 - RNA, 19 nt, Homo sapiens
  misc_RNA (1)...(19): siRNA sense strand
ccacccauacuauuuguga

SEQ ID NO: 1167805 - RNA, 19 nt, Homo sapiens
  misc_RNA (1)...(19): siRNA sense strand
caccaacauuugaagcuau

SEQ ID NO: 1167806 - RNA, 19 nt, Homo sapiens
  misc_RNA (1)...(19): siRNA sense strand
uuggagagagcacgauuua

SEQ ID NO: 1167807 - RNA, 19 nt, Homo sapiens
  misc_RNA (1)...(19): siRNA sense strand
gguuaucagaugcacuuua

SEQ ID NO: 1167808 - RNA, 19 nt, Homo sapiens
  misc_RNA (1)...(19): siRNA sense strand
ugaggagccaccaacauuu

SEQ ID NO: 1167809 - RNA, 19 nt, Homo sapiens
  misc_RNA (1)...(19): siRNA sense strand
ggaaggaauacuugacagu

SEQ ID NO: 1167810 - RNA, 19 nt, Homo sapiens
  misc_RNA (1)...(19): siRNA sense strand
gaggaaggaauacuugaca

SEQ ID NO: 1167811 - RNA, 19 nt, Homo sapiens
  misc_RNA (1)...(19): siRNA sense strand
ccaguuccaaagugucuua

SEQ ID NO: 1167812 - RNA, 19 nt, Homo sapiens
  misc_RNA (1)...(19): siRNA sense strand
ugaguaucuugaugcagua

SEQ ID NO: 1167813 - RNA, 19 nt, Homo sapiens
  misc_RNA (1)...(19): siRNA sense strand
caccuuuagugaaguagaa

SEQ ID NO: 1167814 - RNA, 19 nt, Homo sapiens
  misc_RNA (1)...(19): siRNA sense strand
acagauaucaggauuugga

SEQ ID NO: 1167815 - RNA, 19 nt, Homo sapiens
  misc_RNA (1)...(19): siRNA sense strand
ucauugcugugauuguuau

SEQ ID NO: 1167816 - RNA, 19 nt, Homo sapiens
  misc_RNA (1)...(19): siRNA sense strand
ucagaugcacuuuauuugu

SEQ ID NO: 1167817 - RNA, 19 nt, Homo sapiens
  misc_RNA (1)...(19): siRNA sense strand
gugcugcuccagaguguaa

SEQ ID NO: 1167818 - RNA, 19 nt, Homo sapiens
  misc_RNA (1)...(19): siRNA sense strand
ggaaaacacaccuuuagug

SEQ ID NO: 1167819 - RNA, 19 nt, Homo sapiens
  misc_RNA (1)...(19): siRNA sense strand
aaggaucaguagcaauuug

SEQ ID NO: 1167820 - RNA, 19 nt, Homo sapiens
  misc_RNA (1)...(19): siRNA sense strand
uauauacgggauccuuuaa

SEQ ID NO: 1167821 - RNA, 19 nt, Homo sapiens
  misc_RNA (1)...(19): siRNA sense strand
ugaaguagaaguauuugag

SEQ ID NO: 1167822 - RNA, 19 nt, Homo sapiens
  misc_RNA (1)...(19): siRNA sense strand
cuugacaguuuggauguuu

SEQ ID NO: 1167823 - RNA, 19 nt, Homo sapiens
  misc_RNA (1)...(19): siRNA sense strand
cauauauacgggauccuuu

SEQ ID NO: 1167824 - RNA, 19 nt, Homo sapiens
  misc_RNA (1)...(19): siRNA sense strand
auauauacgggauccuuua

SEQ ID NO: 1167825 - RNA, 19 nt, Homo sapiens
  misc_RNA (1)...(19): siRNA sense strand
cuuaaaggaucaguagcaa

SEQ ID NO: 1167826 - RNA, 19 nt, Homo sapiens
  misc_RNA (1)...(19): siRNA sense strand
uaaaccugaggaaggaaua

SEQ ID NO: 1167827 - RNA, 19 nt, Homo sapiens
  misc_RNA (1)...(19): siRNA sense strand
agaugacgccuguuauaga

SEQ ID NO: 1167828 - RNA, 19 nt, Homo sapiens
  misc_RNA (1)...(19): siRNA sense strand
ugugauuguuauugccaua

SEQ ID NO: 1167829 - RNA, 19 nt, Homo sapiens
  misc_RNA (1)...(19): siRNA sense strand
gagagcacgauuuauugug

SEQ ID NO: 1167830 - RNA, 19 nt, Homo sapiens
  misc_RNA (1)...(19): siRNA sense strand
gaaguauuugaguaucuug

SEQ ID NO: 1167831 - RNA, 19 nt, Homo sapiens
  misc_RNA (1)...(19): siRNA sense strand
ggcuaccugucucagauga

SEQ ID NO: 1167832 - RNA, 19 nt, Homo sapiens
  misc_RNA (1)...(19): siRNA sense strand
gauaucaggauuuggaaaa

SEQ ID NO: 1167833 - RNA, 19 nt, Homo sapiens
  misc_RNA (1)...(19): siRNA sense strand
ccucuugccacccauacua

SEQ ID NO: 1167834 - RNA, 19 nt, Homo sapiens
  misc_RNA (1)...(19): siRNA sense strand
ccaugguguugcugcugua

SEQ ID NO: 1167835 - RNA, 19 nt, Homo sapiens
  misc_RNA (1)...(19): siRNA sense strand
cagaugacgccuguuauag

SEQ ID NO: 1167836 - RNA, 19 nt, Homo sapiens
  misc_RNA (1)...(19): siRNA sense strand
uuggugaacgaguagauua

SEQ ID NO: 1167837 - RNA, 19 nt, Homo sapiens
  misc_RNA (1)...(19): siRNA sense strand
gucauugcugugauuguua

SEQ ID NO: 1167838 - RNA, 19 nt, Homo sapiens
  misc_RNA (1)...(19): siRNA sense strand
ggagccaccaacauuugaa

SEQ ID NO: 1167839 - RNA, 19 nt, Homo sapiens
  misc_RNA (1)...(19): siRNA sense strand
gcgcuuuccuggguugcuu

SEQ ID NO: 1167840 - RNA, 19 nt, Homo sapiens
  misc_RNA (1)...(19): siRNA sense strand
uacuacaaagcaacaguua

SEQ ID NO: 1167841 - RNA, 19 nt, Homo sapiens
  misc_RNA (1)...(19): siRNA sense strand
cuugaugcaguaacuuaua

SEQ ID NO: 1167842 - RNA, 19 nt, Homo sapiens
  misc_RNA (1)...(19): siRNA sense strand
aaacauguccauauauacg

SEQ ID NO: 1167843 - RNA, 19 nt, Homo sapiens
  misc_RNA (1)...(19): siRNA sense strand
guguaaaguggucaaaugu

SEQ ID NO: 1167844 - RNA, 19 nt, Homo sapiens
  misc_RNA (1)...(19): siRNA sense strand
cuuacgaguuugguuauca

SEQ ID NO: 1167845 - RNA, 19 nt, Homo sapiens
  misc_RNA (1)...(19): siRNA sense strand
uacgggauccuuuaaaugg

SEQ ID NO: 1167846 - RNA, 19 nt, Homo sapiens
  misc_RNA (1)...(19): siRNA sense strand
aaccaaaacccuacuauga

SEQ ID NO: 1167847 - RNA, 19 nt, Homo sapiens
  misc_RNA (1)...(19): siRNA sense strand
cccaauaugugaaaagguu

SEQ ID NO: 1167848 - RNA, 19 nt, Homo sapiens
  misc_RNA (1)...(19): siRNA sense strand
cgauggcagcgacacaauu

SEQ ID NO: 1167849 - RNA, 19 nt, Homo sapiens
  misc_RNA (1)...(19): siRNA sense strand
gauccauuuucacuuauug

SEQ ID NO: 1167850 - RNA, 19 nt, Homo sapiens
  misc_RNA (1)...(19): siRNA sense strand
uugaugcaguaacuuauag

SEQ ID NO: 1167851 - RNA, 19 nt, Homo sapiens
  misc_RNA (1)...(19): siRNA sense strand
guaucuugaugcaguaacu

SEQ ID NO: 1167852 - RNA, 19 nt, Homo sapiens
  misc_RNA (1)...(19): siRNA sense strand
caacauuugaagcuaugga

SEQ ID NO: 1167853 - RNA, 19 nt, Homo sapiens
  misc_RNA (1)...(19): siRNA sense strand
gagauuggugaacgaguag

SEQ ID NO: 1167854 - RNA, 19 nt, Homo sapiens
  misc_RNA (1)...(19): siRNA sense strand
ggagagagcacgauuuauu

SEQ ID NO: 1167855 - RNA, 19 nt, Homo sapiens
  misc_RNA (1)...(19): siRNA sense strand
agagaaacauguccauaua

SEQ ID NO: 1167856 - RNA, 19 nt, Homo sapiens
  misc_RNA (1)...(19): siRNA sense strand
cagaugcacuuuauuugua

SEQ ID NO: 1167857 - RNA, 19 nt, Homo sapiens
  misc_RNA (1)...(19): siRNA sense strand
ggacuuacgaguuugguua

SEQ ID NO: 1167858 - RNA, 19 nt, Homo sapiens
  misc_RNA (1)...(19): siRNA sense strand
aaacagauaucaggauuug

SEQ ID NO: 1167859 - RNA, 19 nt, Homo sapiens
  misc_RNA (1)...(19): siRNA sense strand
cuauggagcucauugguaa

SEQ ID NO: 1167860 - RNA, 19 nt, Homo sapiens
  misc_RNA (1)...(19): siRNA sense strand
aaacacaccuuuagugaag

SEQ ID NO: 1167861 - RNA, 19 nt, Homo sapiens
  misc_RNA (1)...(19): siRNA sense strand
gaacuuaaaggaucaguag

SEQ ID NO: 1167862 - RNA, 19 nt, Homo sapiens
  misc_RNA (1)...(19): siRNA sense strand
gaaaacagauaucaggauu

SEQ ID NO: 1167863 - RNA, 19 nt, Homo sapiens
  misc_RNA (1)...(19): siRNA sense strand
uaaaggaucaguagcaauu

SEQ ID NO: 1167864 - RNA, 19 nt, Homo sapiens
  misc_RNA (1)...(19): siRNA sense strand
aaaugggacuuacgaguuu

SEQ ID NO: 1167865 - RNA, 19 nt, Homo sapiens
  misc_RNA (1)...(19): siRNA sense strand
guuaucagaugcacuuuau

SEQ ID NO: 1167866 - RNA, 19 nt, Homo sapiens
  misc_RNA (1)...(19): siRNA sense strand
ugagauuggugaacgagua

SEQ ID NO: 1167867 - RNA, 19 nt, Homo sapiens
  misc_RNA (1)...(19): siRNA sense strand
gugaacgaguagauuauaa

SEQ ID NO: 1167868 - RNA, 19 nt, Homo sapiens
  misc_RNA (1)...(19): siRNA sense strand
gagagagcacgauuuauug

SEQ ID NO: 1167869 - RNA, 19 nt, Homo sapiens
  misc_RNA (1)...(19): siRNA sense strand
caaaugggacuuacgaguu

SEQ ID NO: 1167870 - RNA, 19 nt, Homo sapiens
  misc_RNA (1)...(19): siRNA sense strand
ggucauugcugugauuguu

SEQ ID NO: 1167871 - RNA, 19 nt, Homo sapiens
  misc_RNA (1)...(19): siRNA sense strand
ccagauccauuuucacuua

SEQ ID NO: 1167872 - RNA, 19 nt, Homo sapiens
  misc_RNA (1)...(19): siRNA sense strand
gaaggaauacuugacaguu

SEQ ID NO: 1167873 - RNA, 19 nt, Homo sapiens
  misc_RNA (1)...(19): siRNA sense strand
aaggaauacuugacaguuu

SEQ ID NO: 1167874 - RNA, 19 nt, Homo sapiens
  misc_RNA (1)...(19): siRNA sense strand
ucagaugacgccuguuaua

SEQ ID NO: 1167875 - RNA, 19 nt, Homo sapiens
  misc_RNA (1)...(19): siRNA sense strand
gaaaacacaccuuuaguga

SEQ ID NO: 1167876 - RNA, 19 nt, Homo sapiens
  misc_RNA (1)...(19): siRNA sense strand
gaugacgccuguuauagag

SEQ ID NO: 1167877 - RNA, 19 nt, Homo sapiens
  misc_RNA (1)...(19): siRNA sense strand
gagaaacauguccauauau

SEQ ID NO: 1167878 - RNA, 19 nt, Homo sapiens
  misc_RNA (1)...(19): siRNA sense strand
acgaguagauuauaagugu

SEQ ID NO: 1167879 - RNA, 19 nt, Homo sapiens
  misc_RNA (1)...(19): siRNA sense strand
cuacaaagcaacaguuaug

SEQ ID NO: 1167880 - RNA, 19 nt, Homo sapiens
  misc_RNA (1)...(19): siRNA sense strand
ccaccaacauuugaagcua

SEQ ID NO: 1167881 - RNA, 19 nt, Homo sapiens
  misc_RNA (1)...(19): siRNA sense strand
uauacgggauccuuuaaau

SEQ ID NO: 1167882 - RNA, 19 nt, Homo sapiens
  misc_RNA (1)...(19): siRNA sense strand
cgaguuugguuaucagaug

SEQ ID NO: 1167883 - RNA, 19 nt, Homo sapiens
  misc_RNA (1)...(19): siRNA sense strand
gaacgaguagauuauaagu

SEQ ID NO: 1167884 - RNA, 19 nt, Homo sapiens
  misc_RNA (1)...(19): siRNA sense strand
gugaggagccaccaacauu

SEQ ID NO: 1167885 - RNA, 19 nt, Homo sapiens
  misc_RNA (1)...(19): siRNA sense strand
gauggcagcgacacaauug

SEQ ID NO: 1167886 - RNA, 19 nt, Homo sapiens
  misc_RNA (1)...(19): siRNA sense strand
gcuauggagcucauuggua

SEQ ID NO: 1167887 - RNA, 19 nt, Homo sapiens
  misc_RNA (1)...(19): siRNA sense strand
gaggagccaccaacauuug

SEQ ID NO: 1167888 - RNA, 19 nt, Homo sapiens
  misc_RNA (1)...(19): siRNA sense strand
acacaccuuuagugaagua

SEQ ID NO: 1167889 - RNA, 19 nt, Homo sapiens
  misc_RNA (1)...(19): siRNA sense strand
ucucagaugacgccuguua

SEQ ID NO: 1167890 - RNA, 19 nt, Homo sapiens
  misc_RNA (1)...(19): siRNA sense strand
uagagaaacauguccauau

SEQ ID NO: 1167891 - RNA, 19 nt, Homo sapiens
  misc_RNA (1)...(19): siRNA sense strand
ggugaacgaguagauuaua

SEQ ID NO: 1167892 - RNA, 19 nt, Homo sapiens
  misc_RNA (1)...(19): siRNA sense strand
gaaguagaaguauuugagu

SEQ ID NO: 1167893 - RNA, 19 nt, Homo sapiens
  misc_RNA (1)...(19): siRNA sense strand
gaaacauguccauauauac

SEQ ID NO: 1167894 - RNA, 19 nt, Homo sapiens
  misc_RNA (1)...(19): siRNA sense strand
ugacgccuguuauagagaa

SEQ ID NO: 1167895 - RNA, 19 nt, Homo sapiens
  misc_RNA (1)...(19): siRNA sense strand
cgaguagauuauaagugua

SEQ ID NO: 1167896 - RNA, 19 nt, Homo sapiens
  misc_RNA (1)...(19): siRNA sense strand
gcacuuuauuuguaaugag

SEQ ID NO: 1167897 - RNA, 19 nt, Homo sapiens
  misc_RNA (1)...(19): siRNA sense strand
guagaaguauuugaguauc

SEQ ID NO: 1167898 - RNA, 19 nt, Homo sapiens
  misc_RNA (1)...(19): siRNA sense strand
guauuugaguaucuugaug

SEQ ID NO: 1167899 - RNA, 19 nt, Homo sapiens
  misc_RNA (1)...(19): siRNA sense strand
aggaauacuugacaguuug

SEQ ID NO: 1167900 - RNA, 19 nt, Homo sapiens
  misc_RNA (1)...(19): siRNA sense strand
aguguaaaguggucaaaug

SEQ ID NO: 1167901 - RNA, 19 nt, Homo sapiens
  misc_RNA (1)...(19): siRNA sense strand
ccaaaacccuacuaugaga

SEQ ID NO: 1167902 - RNA, 19 nt, Homo sapiens
  misc_RNA (1)...(19): siRNA sense strand
ccacccauacuauuuguga

SEQ ID NO: 1167903 - RNA, 19 nt, Homo sapiens
  misc_RNA (1)...(19): siRNA sense strand
caccaacauuugaagcuau

SEQ ID NO: 1167904 - RNA, 19 nt, Homo sapiens
  misc_RNA (1)...(19): siRNA sense strand
uuggagagagcacgauuua

SEQ ID NO: 1167905 - RNA, 19 nt, Homo sapiens
  misc_RNA (1)...(19): siRNA sense strand
gguuaucagaugcacuuua

SEQ ID NO: 1167906 - RNA, 19 nt, Homo sapiens
  misc_RNA (1)...(19): siRNA sense strand
ugaggagccaccaacauuu

SEQ ID NO: 1167907 - RNA, 19 nt, Homo sapiens
  misc_RNA (1)...(19): siRNA sense strand
ggaaggaauacuugacagu

SEQ ID NO: 1167908 - RNA, 19 nt, Homo sapiens
  misc_RNA (1)...(19): siRNA sense strand
gaggaaggaauacuugaca

SEQ ID NO: 1167909 - RNA, 19 nt, Homo sapiens
  misc_RNA (1)...(19): siRNA sense strand
ugaguaucuugaugcagua

SEQ ID NO: 1167910 - RNA, 19 nt, Homo sapiens
  misc_RNA (1)...(19): siRNA sense strand
caccuuuagugaaguagaa

SEQ ID NO: 1167911 - RNA, 19 nt, Homo sapiens
  misc_RNA (1)...(19): siRNA sense strand
acagauaucaggauuugga

SEQ ID NO: 1167912 - RNA, 19 nt, Homo sapiens
  misc_RNA (1)...(19): siRNA sense strand
ucauugcugugauuguuau

SEQ ID NO: 1167913 - RNA, 19 nt, Homo sapiens
  misc_RNA (1)...(19): siRNA sense strand
ucagaugcacuuuauuugu

SEQ ID NO: 1167914 - RNA, 19 nt, Homo sapiens
  misc_RNA (1)...(19): siRNA sense strand
gugcugcuccagaguguaa

SEQ ID NO: 1167915 - RNA, 19 nt, Homo sapiens
  misc_RNA (1)...(19): siRNA sense strand
ggaaaacacaccuuuagug

SEQ ID NO: 1167916 - RNA, 19 nt, Homo sapiens
  misc_RNA (1)...(19): siRNA sense strand
aaggaucaguagcaauuug

SEQ ID NO: 1167917 - RNA, 19 nt, Homo sapiens
  misc_RNA (1)...(19): siRNA sense strand
uauauacgggauccuuuaa

SEQ ID NO: 1167918 - RNA, 19 nt, Homo sapiens
  misc_RNA (1)...(19): siRNA sense strand
ugaaguagaaguauuugag

SEQ ID NO: 1167919 - RNA, 19 nt, Homo sapiens
  misc_RNA (1)...(19): siRNA sense strand
cuugacaguuuggauguuu

SEQ ID NO: 1167920 - RNA, 19 nt, Homo sapiens
  misc_RNA (1)...(19): siRNA sense strand
cauauauacgggauccuuu

SEQ ID NO: 1167921 - RNA, 19 nt, Homo sapiens
  misc_RNA (1)...(19): siRNA sense strand
auauauacgggauccuuua

SEQ ID NO: 1167922 - RNA, 19 nt, Homo sapiens
  misc_RNA (1)...(19): siRNA sense strand
cuuaaaggaucaguagcaa

SEQ ID NO: 1167923 - RNA, 19 nt, Homo sapiens
  misc_RNA (1)...(19): siRNA sense strand
uaaaccugaggaaggaaua

SEQ ID NO: 1167924 - RNA, 19 nt, Homo sapiens
  misc_RNA (1)...(19): siRNA sense strand
agaugacgccuguuauaga

SEQ ID NO: 1167925 - RNA, 19 nt, Homo sapiens
  misc_RNA (1)...(19): siRNA sense strand
ugugauuguuauugccaua

SEQ ID NO: 1167926 - RNA, 19 nt, Homo sapiens
  misc_RNA (1)...(19): siRNA sense strand
gagagcacgauuuauugug

SEQ ID NO: 1167927 - RNA, 19 nt, Homo sapiens
  misc_RNA (1)...(19): siRNA sense strand
gaaguauuugaguaucuug

SEQ ID NO: 1167928 - RNA, 19 nt, Homo sapiens
  misc_RNA (1)...(19): siRNA sense strand
ccucuugccacccauacua

SEQ ID NO: 1167929 - RNA, 19 nt, Homo sapiens
  misc_RNA (1)...(19): siRNA sense strand
gauaucaggauuuggaaaa

SEQ ID NO: 1167930 - RNA, 19 nt, Homo sapiens
  misc_RNA (1)...(19): siRNA sense strand
ggcuaccugucucagauga

SEQ ID NO: 1167931 - RNA, 19 nt, Homo sapiens
  misc_RNA (1)...(19): siRNA sense strand
ccaugguguugcugcugua

SEQ ID NO: 1167932 - RNA, 19 nt, Homo sapiens
  misc_RNA (1)...(19): siRNA sense strand
cagaugacgccuguuauag

SEQ ID NO: 1167933 - RNA, 19 nt, Homo sapiens
  misc_RNA (1)...(19): siRNA sense strand
gucauugcugugauuguua

SEQ ID NO: 1167934 - RNA, 19 nt, Homo sapiens
  misc_RNA (1)...(19): siRNA sense strand
uuggugaacgaguagauua

SEQ ID NO: 1167935 - RNA, 19 nt, Homo sapiens
  misc_RNA (1)...(19): siRNA sense strand
ggagccaccaacauuugaa

SEQ ID NO: 1167936 - RNA, 19 nt, Homo sapiens
  misc_RNA (1)...(19): siRNA sense strand
gcgcuuuccuggguugcuu

SEQ ID NO: 1167937 - RNA, 19 nt, Homo sapiens
  misc_RNA (1)...(19): siRNA sense strand
uacuacaaagcaacaguua

SEQ ID NO: 1167938 - RNA, 19 nt, Homo sapiens
  misc_RNA (1)...(19): siRNA sense strand
cuugaugcaguaacuuaua

SEQ ID NO: 1167939 - RNA, 19 nt, Homo sapiens
  misc_RNA (1)...(19): siRNA sense strand
aaacauguccauauauacg

SEQ ID NO: 1167940 - RNA, 19 nt, Homo sapiens
  misc_RNA (1)...(19): siRNA sense strand
guguaaaguggucaaaugu

SEQ ID NO: 1167941 - RNA, 19 nt, Homo sapiens
  misc_RNA (1)...(19): siRNA sense strand
cuuacgaguuugguuauca

SEQ ID NO: 1167942 - RNA, 19 nt, Homo sapiens
  misc_RNA (1)...(19): siRNA sense strand
uacgggauccuuuaaaugg

SEQ ID NO: 1167943 - RNA, 19 nt, Homo sapiens
  misc_RNA (1)...(19): siRNA sense strand
aaccaaaacccuacuauga

SEQ ID NO: 1167944 - RNA, 19 nt, Homo sapiens
  misc_RNA (1)...(19): siRNA sense strand
cccaauaugugaaaagguu

SEQ ID NO: 1167945 - RNA, 19 nt, Homo sapiens
  misc_RNA (1)...(19): siRNA sense strand
cgauggcagcgacacaauu

SEQ ID NO: 1167946 - RNA, 19 nt, Homo sapiens
  misc_RNA (1)...(19): siRNA sense strand
gauccauuuucacuuauug

SEQ ID NO: 1167947 - RNA, 19 nt, Homo sapiens
  misc_RNA (1)...(19): siRNA sense strand
uugaugcaguaacuuauag

SEQ ID NO: 1167948 - RNA, 19 nt, Homo sapiens
  misc_RNA (1)...(19): siRNA sense strand
guaucuugaugcaguaacu

SEQ ID NO: 1167949 - RNA, 19 nt, Homo sapiens
  misc_RNA (1)...(19): siRNA sense strand
caacauuugaagcuaugga

SEQ ID NO: 1167950 - RNA, 19 nt, Homo sapiens
  misc_RNA (1)...(19): siRNA sense strand
gagauuggugaacgaguag

SEQ ID NO: 1167951 - RNA, 19 nt, Homo sapiens
  misc_RNA (1)...(19): siRNA sense strand
ggagagagcacgauuuauu

SEQ ID NO: 1167952 - RNA, 19 nt, Homo sapiens
  misc_RNA (1)...(19): siRNA sense strand
agagaaacauguccauaua

SEQ ID NO: 1167953 - RNA, 19 nt, Homo sapiens
  misc_RNA (1)...(19): siRNA sense strand
cagaugcacuuuauuugua

SEQ ID NO: 1167954 - RNA, 19 nt, Homo sapiens
  misc_RNA (1)...(19): siRNA sense strand
ggacuuacgaguuugguua

SEQ ID NO: 1167955 - RNA, 19 nt, Homo sapiens
  misc_RNA (1)...(19): siRNA sense strand
aaacagauaucaggauuug

SEQ ID NO: 1167956 - RNA, 19 nt, Homo sapiens
  misc_RNA (1)...(19): siRNA sense strand
cuauggagcucauugguaa

SEQ ID NO: 1167957 - RNA, 19 nt, Homo sapiens
  misc_RNA (1)...(19): siRNA sense strand
aaacacaccuuuagugaag

SEQ ID NO: 1167958 - RNA, 19 nt, Homo sapiens
  misc_RNA (1)...(19): siRNA sense strand
gaacuuaaaggaucaguag

SEQ ID NO: 1167959 - RNA, 19 nt, Homo sapiens
  misc_RNA (1)...(19): siRNA sense strand
gaaaacagauaucaggauu

SEQ ID NO: 1167960 - RNA, 19 nt, Homo sapiens
  misc_RNA (1)...(19): siRNA sense strand
uaaaggaucaguagcaauu

SEQ ID NO: 1167961 - RNA, 19 nt, Homo sapiens
  misc_RNA (1)...(19): siRNA sense strand
aaaugggacuuacgaguuu

SEQ ID NO: 1167962 - RNA, 19 nt, Homo sapiens
  misc_RNA (1)...(19): siRNA sense strand
guuaucagaugcacuuuau

SEQ ID NO: 1167963 - RNA, 19 nt, Homo sapiens
  misc_RNA (1)...(19): siRNA sense strand
gagcugaauaugccacuua

SEQ ID NO: 1167964 - RNA, 19 nt, Homo sapiens
  misc_RNA (1)...(19): siRNA sense strand
ugagauuggugaacgagua

SEQ ID NO: 1167965 - RNA, 19 nt, Homo sapiens
  misc_RNA (1)...(19): siRNA sense strand
gugaacgaguagauuauaa

SEQ ID NO: 1167966 - RNA, 19 nt, Homo sapiens
  misc_RNA (1)...(19): siRNA sense strand
gagagagcacgauuuauug

SEQ ID NO: 1167967 - RNA, 19 nt, Homo sapiens
  misc_RNA (1)...(19): siRNA sense strand
caaaugggacuuacgaguu

SEQ ID NO: 1167968 - RNA, 19 nt, Homo sapiens
  misc_RNA (1)...(19): siRNA sense strand
ggucauugcugugauuguu

SEQ ID NO: 1167969 - RNA, 19 nt, Homo sapiens
  misc_RNA (1)...(19): siRNA sense strand
ccagauccauuuucacuua

SEQ ID NO: 1167970 - RNA, 19 nt, Homo sapiens
  misc_RNA (1)...(19): siRNA sense strand
gaaggaauacuugacaguu

SEQ ID NO: 1167971 - RNA, 19 nt, Homo sapiens
  misc_RNA (1)...(19): siRNA sense strand
aaggaauacuugacaguuu

SEQ ID NO: 1167972 - RNA, 19 nt, Homo sapiens
  misc_RNA (1)...(19): siRNA sense strand
ucagaugacgccuguuaua

SEQ ID NO: 1167973 - RNA, 19 nt, Homo sapiens
  misc_RNA (1)...(19): siRNA sense strand
gaaaacacaccuuuaguga

SEQ ID NO: 1167974 - RNA, 19 nt, Homo sapiens
  misc_RNA (1)...(19): siRNA sense strand
gaugacgccuguuauagag

SEQ ID NO: 1167975 - RNA, 19 nt, Homo sapiens
  misc_RNA (1)...(19): siRNA sense strand
gagaaacauguccauauau

SEQ ID NO: 1167976 - RNA, 19 nt, Homo sapiens
  misc_RNA (1)...(19): siRNA sense strand
ccacuuaccagacuaaauc

SEQ ID NO: 1167977 - RNA, 19 nt, Homo sapiens
  misc_RNA (1)...(19): siRNA sense strand
acgaguagauuauaagugu

SEQ ID NO: 1167978 - RNA, 19 nt, Homo sapiens
  misc_RNA (1)...(19): siRNA sense strand
cuacaaagcaacaguuaug

SEQ ID NO: 1167979 - RNA, 19 nt, Homo sapiens
  misc_RNA (1)...(19): siRNA sense strand
ccaccaacauuugaagcua

SEQ ID NO: 1167980 - RNA, 19 nt, Homo sapiens
  misc_RNA (1)...(19): siRNA sense strand
uauacgggauccuuuaaau

SEQ ID NO: 1167981 - RNA, 19 nt, Homo sapiens
  misc_RNA (1)...(19): siRNA sense strand
cgaguuugguuaucagaug

SEQ ID NO: 1167982 - RNA, 19 nt, Homo sapiens
  misc_RNA (1)...(19): siRNA sense strand
gaacgaguagauuauaagu

SEQ ID NO: 1167983 - RNA, 19 nt, Homo sapiens
  misc_RNA (1)...(19): siRNA sense strand
gugaggagccaccaacauu

SEQ ID NO: 1167984 - RNA, 19 nt, Homo sapiens
  misc_RNA (1)...(19): siRNA sense strand
gauggcagcgacacaauug

SEQ ID NO: 1167985 - RNA, 19 nt, Homo sapiens
  misc_RNA (1)...(19): siRNA sense strand
ucucagaugacgccuguua

SEQ ID NO: 1167986 - RNA, 19 nt, Homo sapiens
  misc_RNA (1)...(19): siRNA sense strand
gaggagccaccaacauuug

SEQ ID NO: 1167987 - RNA, 19 nt, Homo sapiens
  misc_RNA (1)...(19): siRNA sense strand
gcuauggagcucauuggua

SEQ ID NO: 1167988 - RNA, 19 nt, Homo sapiens
  misc_RNA (1)...(19): siRNA sense strand
acacaccuuuagugaagua

SEQ ID NO: 1167989 - RNA, 19 nt, Homo sapiens
  misc_RNA (1)...(19): siRNA sense strand
uagagaaacauguccauau

SEQ ID NO: 1167990 - RNA, 19 nt, Homo sapiens
  misc_RNA (1)...(19): siRNA sense strand
ggugaacgaguagauuaua

SEQ ID NO: 1167991 - RNA, 19 nt, Homo sapiens
  misc_RNA (1)...(19): siRNA sense strand
gaaguagaaguauuugagu

SEQ ID NO: 1167992 - RNA, 19 nt, Homo sapiens
  misc_RNA (1)...(19): siRNA sense strand
gaaacauguccauauauac

SEQ ID NO: 1167993 - RNA, 19 nt, Homo sapiens
  misc_RNA (1)...(19): siRNA sense strand
ugacgccuguuauagagaa

SEQ ID NO: 1167994 - RNA, 19 nt, Homo sapiens
  misc_RNA (1)...(19): siRNA sense strand
cgaguagauuauaagugua

SEQ ID NO: 1167995 - RNA, 19 nt, Homo sapiens
  misc_RNA (1)...(19): siRNA sense strand
gcacuuuauuuguaaugag

SEQ ID NO: 1167996 - RNA, 19 nt, Homo sapiens
  misc_RNA (1)...(19): siRNA sense strand
guagaaguauuugaguauc

SEQ ID NO: 1167997 - RNA, 19 nt, Homo sapiens
  misc_RNA (1)...(19): siRNA sense strand
guauuugaguaucuugaug

SEQ ID NO: 1167998 - RNA, 19 nt, Homo sapiens
  misc_RNA (1)...(19): siRNA sense strand
aggaauacuugacaguuug

SEQ ID NO: 1167999 - RNA, 19 nt, Homo sapiens
  misc_RNA (1)...(19): siRNA sense strand
ccaaaacccuacuaugaga

SEQ ID NO: 1168000 - RNA, 19 nt, Homo sapiens
  misc_RNA (1)...(19): siRNA sense strand
aguguaaaguggucaaaug

SEQ ID NO: 1168001 - RNA, 19 nt, Homo sapiens
  misc_RNA (1)...(19): siRNA sense strand
ccacccauacuauuuguga

SEQ ID NO: 1168002 - RNA, 19 nt, Homo sapiens
  misc_RNA (1)...(19): siRNA sense strand
uuggagagagcacgauuua

SEQ ID NO: 1168003 - RNA, 19 nt, Homo sapiens
  misc_RNA (1)...(19): siRNA sense strand
gguuaucagaugcacuuua

SEQ ID NO: 1168004 - RNA, 19 nt, Homo sapiens
  misc_RNA (1)...(19): siRNA sense strand
caccaacauuugaagcuau

SEQ ID NO: 1168005 - RNA, 19 nt, Homo sapiens
  misc_RNA (1)...(19): siRNA sense strand
ugaggagccaccaacauuu

SEQ ID NO: 1168006 - RNA, 19 nt, Homo sapiens
  misc_RNA (1)...(19): siRNA sense strand
ggaaggaauacuugacagu

SEQ ID NO: 1168007 - RNA, 19 nt, Homo sapiens
  misc_RNA (1)...(19): siRNA sense strand
gaggaaggaauacuugaca

SEQ ID NO: 1168008 - RNA, 19 nt, Homo sapiens
  misc_RNA (1)...(19): siRNA sense strand
ugaguaucuugaugcagua

SEQ ID NO: 1168009 - RNA, 19 nt, Homo sapiens
  misc_RNA (1)...(19): siRNA sense strand
caccuuuagugaaguagaa

SEQ ID NO: 1168010 - RNA, 19 nt, Homo sapiens
  misc_RNA (1)...(19): siRNA sense strand
acagauaucaggauuugga

SEQ ID NO: 1168011 - RNA, 19 nt, Homo sapiens
  misc_RNA (1)...(19): siRNA sense strand
ucauugcugugauuguuau

SEQ ID NO: 1168012 - RNA, 19 nt, Homo sapiens
  misc_RNA (1)...(19): siRNA sense strand
ucagaugcacuuuauuugu

SEQ ID NO: 1168013 - RNA, 19 nt, Homo sapiens
  misc_RNA (1)...(19): siRNA sense strand
gugcugcuccagaguguaa

SEQ ID NO: 1168014 - RNA, 19 nt, Homo sapiens
  misc_RNA (1)...(19): siRNA sense strand
ggaaaacacaccuuuagug

SEQ ID NO: 1168015 - RNA, 19 nt, Homo sapiens
  misc_RNA (1)...(19): siRNA sense strand
aaggaucaguagcaauuug

SEQ ID NO: 1168016 - RNA, 19 nt, Homo sapiens
  misc_RNA (1)...(19): siRNA sense strand
uauauacgggauccuuuaa

SEQ ID NO: 1168017 - RNA, 19 nt, Homo sapiens
  misc_RNA (1)...(19): siRNA sense strand
ugaaguagaaguauuugag

SEQ ID NO: 1168018 - RNA, 19 nt, Homo sapiens
  misc_RNA (1)...(19): siRNA sense strand
cuugacaguuuggauguuu

SEQ ID NO: 1168019 - RNA, 19 nt, Homo sapiens
  misc_RNA (1)...(19): siRNA sense strand
cauauauacgggauccuuu

SEQ ID NO: 1168020 - RNA, 19 nt, Homo sapiens
  misc_RNA (1)...(19): siRNA sense strand
auauauacgggauccuuua

SEQ ID NO: 1168021 - RNA, 19 nt, Homo sapiens
  misc_RNA (1)...(19): siRNA sense strand
cuuaaaggaucaguagcaa

SEQ ID NO: 1168022 - RNA, 19 nt, Homo sapiens
  misc_RNA (1)...(19): siRNA sense strand
uaaaccugaggaaggaaua

SEQ ID NO: 1168023 - RNA, 19 nt, Homo sapiens
  misc_RNA (1)...(19): siRNA sense strand
agaugacgccuguuauaga

SEQ ID NO: 1168024 - RNA, 19 nt, Homo sapiens
  misc_RNA (1)...(19): siRNA sense strand
ugugauuguuauugccaua

SEQ ID NO: 1168025 - RNA, 19 nt, Homo sapiens
  misc_RNA (1)...(19): siRNA sense strand
gagagcacgauuuauugug

SEQ ID NO: 1168026 - RNA, 19 nt, Homo sapiens
  misc_RNA (1)...(19): siRNA sense strand
gaaguauuugaguaucuug

SEQ ID NO: 1168027 - RNA, 19 nt, Homo sapiens
  misc_RNA (1)...(19): siRNA sense strand
ggcuaccugucucagauga

SEQ ID NO: 1168028 - RNA, 19 nt, Homo sapiens
  misc_RNA (1)...(19): siRNA sense strand
gauaucaggauuuggaaaa

SEQ ID NO: 1168029 - RNA, 19 nt, Homo sapiens
  misc_RNA (1)...(19): siRNA sense strand
ccucuugccacccauacua

SEQ ID NO: 1168030 - RNA, 19 nt, Homo sapiens
  misc_RNA (1)...(19): siRNA sense strand
ccaugguguugcugcugua

SEQ ID NO: 1168031 - RNA, 19 nt, Homo sapiens
  misc_RNA (1)...(19): siRNA sense strand
cagaugacgccuguuauag

SEQ ID NO: 1168032 - RNA, 19 nt, Homo sapiens
  misc_RNA (1)...(19): siRNA sense strand
cagaugguggagcugaaua

SEQ ID NO: 1168033 - RNA, 19 nt, Homo sapiens
  misc_RNA (1)...(19): siRNA sense strand
uuggugaacgaguagauua

SEQ ID NO: 1168034 - RNA, 19 nt, Homo sapiens
  misc_RNA (1)...(19): siRNA sense strand
gucauugcugugauuguua

SEQ ID NO: 1168035 - RNA, 19 nt, Homo sapiens
  misc_RNA (1)...(19): siRNA sense strand
ggagccaccaacauuugaa

SEQ ID NO: 1168036 - RNA, 19 nt, Homo sapiens
  misc_RNA (1)...(19): siRNA sense strand
gcgcuuuccuggguugcuu

SEQ ID NO: 1168037 - RNA, 19 nt, Homo sapiens
  misc_RNA (1)...(19): siRNA sense strand
uacuacaaagcaacaguua

SEQ ID NO: 1168038 - RNA, 19 nt, Homo sapiens
  misc_RNA (1)...(19): siRNA sense strand
cuugaugcaguaacuuaua

SEQ ID NO: 1168039 - RNA, 19 nt, Homo sapiens
  misc_RNA (1)...(19): siRNA sense strand
aaacauguccauauauacg

SEQ ID NO: 1168040 - RNA, 19 nt, Homo sapiens
  misc_RNA (1)...(19): siRNA sense strand
guguaaaguggucaaaugu

SEQ ID NO: 1168041 - RNA, 19 nt, Homo sapiens
  misc_RNA (1)...(19): siRNA sense strand
cuuacgaguuugguuauca

SEQ ID NO: 1168042 - RNA, 19 nt, Homo sapiens
  misc_RNA (1)...(19): siRNA sense strand
uacgggauccuuuaaaugg

SEQ ID NO: 1168043 - RNA, 19 nt, Homo sapiens
  misc_RNA (1)...(19): siRNA sense strand
gcagaugguggagcugaau

SEQ ID NO: 1168044 - RNA, 19 nt, Homo sapiens
  misc_RNA (1)...(19): siRNA sense strand
aaccaaaacccuacuauga

SEQ ID NO: 1168045 - RNA, 19 nt, Homo sapiens
  misc_RNA (1)...(19): siRNA sense strand
cccaauaugugaaaagguu

SEQ ID NO: 1168046 - RNA, 19 nt, Homo sapiens
  misc_RNA (1)...(19): siRNA sense strand
ggagcugaauaugccacuu

SEQ ID NO: 1168047 - RNA, 19 nt, Homo sapiens
  misc_RNA (1)...(19): siRNA sense strand
cgauggcagcgacacaauu

SEQ ID NO: 1168048 - RNA, 19 nt, Homo sapiens
  misc_RNA (1)...(19): siRNA sense strand
gauccauuuucacuuauug

SEQ ID NO: 1168049 - RNA, 19 nt, Homo sapiens
  misc_RNA (1)...(19): siRNA sense strand
uugaugcaguaacuuauag

SEQ ID NO: 1168050 - RNA, 19 nt, Homo sapiens
  misc_RNA (1)...(19): siRNA sense strand
guaucuugaugcaguaacu

SEQ ID NO: 1168051 - RNA, 19 nt, Homo sapiens
  misc_RNA (1)...(19): siRNA sense strand
ggagagagcacgauuuauu

SEQ ID NO: 1168052 - RNA, 19 nt, Homo sapiens
  misc_RNA (1)...(19): siRNA sense strand
agagaaacauguccauaua

SEQ ID NO: 1168053 - RNA, 19 nt, Homo sapiens
  misc_RNA (1)...(19): siRNA sense strand
cagaugcacuuuauuugua

SEQ ID NO: 1168054 - RNA, 19 nt, Homo sapiens
  misc_RNA (1)...(19): siRNA sense strand
ggacuuacgaguuugguua

SEQ ID NO: 1168055 - RNA, 19 nt, Homo sapiens
  misc_RNA (1)...(19): siRNA sense strand
aaacagauaucaggauuug

SEQ ID NO: 1168056 - RNA, 19 nt, Homo sapiens
  misc_RNA (1)...(19): siRNA sense strand
cuauggagcucauugguaa

SEQ ID NO: 1168057 - RNA, 19 nt, Homo sapiens
  misc_RNA (1)...(19): siRNA sense strand
aaacacaccuuuagugaag

SEQ ID NO: 1168058 - RNA, 19 nt, Homo sapiens
  misc_RNA (1)...(19): siRNA sense strand
gaacuuaaaggaucaguag

SEQ ID NO: 1168059 - RNA, 19 nt, Homo sapiens
  misc_RNA (1)...(19): siRNA sense strand
gaaaacagauaucaggauu

SEQ ID NO: 1168060 - RNA, 19 nt, Homo sapiens
  misc_RNA (1)...(19): siRNA sense strand
uaaaggaucaguagcaauu

SEQ ID NO: 1168061 - RNA, 19 nt, Homo sapiens
  misc_RNA (1)...(19): siRNA sense strand
aaaugggacuuacgaguuu

SEQ ID NO: 1168062 - RNA, 19 nt, Homo sapiens
  misc_RNA (1)...(19): siRNA sense strand
guuaucagaugcacuuuau

SEQ ID NO: 1168063 - RNA, 19 nt, Homo sapiens
  misc_RNA (1)...(19): siRNA sense strand
ugagauuggugaacgagua

SEQ ID NO: 1168064 - RNA, 19 nt, Homo sapiens
  misc_RNA (1)...(19): siRNA sense strand
gugaacgaguagauuauaa

SEQ ID NO: 1168065 - RNA, 19 nt, Homo sapiens
  misc_RNA (1)...(19): siRNA sense strand
gagagagcacgauuuauug

SEQ ID NO: 1168066 - RNA, 19 nt, Homo sapiens
  misc_RNA (1)...(19): siRNA sense strand
caaaugggacuuacgaguu

SEQ ID NO: 1168067 - RNA, 19 nt, Homo sapiens
  misc_RNA (1)...(19): siRNA sense strand
ggucauugcugugauuguu

SEQ ID NO: 1168068 - RNA, 19 nt, Homo sapiens
  misc_RNA (1)...(19): siRNA sense strand
ccagauccauuuucacuua

SEQ ID NO: 1168069 - RNA, 19 nt, Homo sapiens
  misc_RNA (1)...(19): siRNA sense strand
gaaggaauacuugacaguu

SEQ ID NO: 1168070 - RNA, 19 nt, Homo sapiens
  misc_RNA (1)...(19): siRNA sense strand
aaggaauacuugacaguuu

SEQ ID NO: 1168071 - RNA, 19 nt, Homo sapiens
  misc_RNA (1)...(19): siRNA sense strand
ucagaugacgccuguuaua

SEQ ID NO: 1168072 - RNA, 19 nt, Homo sapiens
  misc_RNA (1)...(19): siRNA sense strand
gaaaacacaccuuuaguga

SEQ ID NO: 1168073 - RNA, 19 nt, Homo sapiens
  misc_RNA (1)...(19): siRNA sense strand
gaugacgccuguuauagag

SEQ ID NO: 1168074 - RNA, 19 nt, Homo sapiens
  misc_RNA (1)...(19): siRNA sense strand
gagaaacauguccauauau

SEQ ID NO: 1168075 - RNA, 19 nt, Homo sapiens
  misc_RNA (1)...(19): siRNA sense strand
acgaguagauuauaagugu

SEQ ID NO: 1168076 - RNA, 19 nt, Homo sapiens
  misc_RNA (1)...(19): siRNA sense strand
cuacaaagcaacaguuaug

SEQ ID NO: 1168077 - RNA, 19 nt, Homo sapiens
  misc_RNA (1)...(19): siRNA sense strand
ccaccaacauuugaagcua

SEQ ID NO: 1168078 - RNA, 19 nt, Homo sapiens
  misc_RNA (1)...(19): siRNA sense strand
uauacgggauccuuuaaau

SEQ ID NO: 1168079 - RNA, 19 nt, Homo sapiens
  misc_RNA (1)...(19): siRNA sense strand
cgaguuugguuaucagaug

SEQ ID NO: 1168080 - RNA, 19 nt, Homo sapiens
  misc_RNA (1)...(19): siRNA sense strand
gaacgaguagauuauaagu

SEQ ID NO: 1168081 - RNA, 19 nt, Homo sapiens
  misc_RNA (1)...(19): siRNA sense strand
gugaggagccaccaacauu

SEQ ID NO: 1168082 - RNA, 19 nt, Homo sapiens
  misc_RNA (1)...(19): siRNA sense strand
gauggcagcgacacaauug

SEQ ID NO: 1168083 - RNA, 19 nt, Homo sapiens
  misc_RNA (1)...(19): siRNA sense strand
gcuauggagcucauuggua

SEQ ID NO: 1168084 - RNA, 19 nt, Homo sapiens
  misc_RNA (1)...(19): siRNA sense strand
gaggagccaccaacauuug

SEQ ID NO: 1168085 - RNA, 19 nt, Homo sapiens
  misc_RNA (1)...(19): siRNA sense strand
acacaccuuuagugaagua

SEQ ID NO: 1168086 - RNA, 19 nt, Homo sapiens
  misc_RNA (1)...(19): siRNA sense strand
ucucagaugacgccuguua

SEQ ID NO: 1168087 - RNA, 19 nt, Homo sapiens
  misc_RNA (1)...(19): siRNA sense strand
uagagaaacauguccauau

SEQ ID NO: 1168088 - RNA, 19 nt, Homo sapiens
  misc_RNA (1)...(19): siRNA sense strand
guuccaaagugucuuaaag

SEQ ID NO: 1168089 - RNA, 19 nt, Homo sapiens
  misc_RNA (1)...(19): siRNA sense strand
ggugaacgaguagauuaua

SEQ ID NO: 1168090 - RNA, 19 nt, Homo sapiens
  misc_RNA (1)...(19): siRNA sense strand
gaaguagaaguauuugagu

SEQ ID NO: 1168091 - RNA, 19 nt, Homo sapiens
  misc_RNA (1)...(19): siRNA sense strand
gaaacauguccauauauac

SEQ ID NO: 1168092 - RNA, 19 nt, Homo sapiens
  misc_RNA (1)...(19): siRNA sense strand
ugacgccuguuauagagaa

SEQ ID NO: 1168093 - RNA, 19 nt, Homo sapiens
  misc_RNA (1)...(19): siRNA sense strand
cgaguagauuauaagugua

SEQ ID NO: 1168094 - RNA, 19 nt, Homo sapiens
  misc_RNA (1)...(19): siRNA sense strand
gcacuuuauuuguaaugag

SEQ ID NO: 1168095 - RNA, 19 nt, Homo sapiens
  misc_RNA (1)...(19): siRNA sense strand
guagaaguauuugaguauc

SEQ ID NO: 1168096 - RNA, 19 nt, Homo sapiens
  misc_RNA (1)...(19): siRNA sense strand
guauuugaguaucuugaug

SEQ ID NO: 1168097 - RNA, 19 nt, Homo sapiens
  misc_RNA (1)...(19): siRNA sense strand
aggaauacuugacaguuug

SEQ ID NO: 1168098 - RNA, 19 nt, Homo sapiens
  misc_RNA (1)...(19): siRNA sense strand
ccaaaacccuacuaugaga

SEQ ID NO: 1168099 - RNA, 19 nt, Homo sapiens
  misc_RNA (1)...(19): siRNA sense strand
aguguaaaguggucaaaug

SEQ ID NO: 1168100 - RNA, 19 nt, Homo sapiens
  misc_RNA (1)...(19): siRNA sense strand
ccacccauacuauuuguga

SEQ ID NO: 1168101 - RNA, 19 nt, Homo sapiens
  misc_RNA (1)...(19): siRNA sense strand
caccaacauuugaagcuau

SEQ ID NO: 1168102 - RNA, 19 nt, Homo sapiens
  misc_RNA (1)...(19): siRNA sense strand
uuggagagagcacgauuua

SEQ ID NO: 1168103 - RNA, 19 nt, Homo sapiens
  misc_RNA (1)...(19): siRNA sense strand
gguuaucagaugcacuuua

SEQ ID NO: 1168104 - RNA, 19 nt, Homo sapiens
  misc_RNA (1)...(19): siRNA sense strand
ugaggagccaccaacauuu

SEQ ID NO: 1168105 - RNA, 19 nt, Homo sapiens
  misc_RNA (1)...(19): siRNA sense strand
ggaaggaauacuugacagu

SEQ ID NO: 1168106 - RNA, 19 nt, Homo sapiens
  misc_RNA (1)...(19): siRNA sense strand
gaggaaggaauacuugaca

SEQ ID NO: 1168107 - RNA, 19 nt, Homo sapiens
  misc_RNA (1)...(19): siRNA sense strand
ccaguuccaaagugucuua

SEQ ID NO: 1168108 - RNA, 19 nt, Homo sapiens
  misc_RNA (1)...(19): siRNA sense strand
ugaguaucuugaugcagua

SEQ ID NO: 1168109 - RNA, 19 nt, Homo sapiens
  misc_RNA (1)...(19): siRNA sense strand
caccuuuagugaaguagaa

SEQ ID NO: 1168110 - RNA, 19 nt, Homo sapiens
  misc_RNA (1)...(19): siRNA sense strand
acagauaucaggauuugga

SEQ ID NO: 1168111 - RNA, 19 nt, Homo sapiens
  misc_RNA (1)...(19): siRNA sense strand
ucauugcugugauuguuau

SEQ ID NO: 1168112 - RNA, 19 nt, Homo sapiens
  misc_RNA (1)...(19): siRNA sense strand
ucagaugcacuuuauuugu

SEQ ID NO: 1168113 - RNA, 19 nt, Homo sapiens
  misc_RNA (1)...(19): siRNA sense strand
gugcugcuccagaguguaa

SEQ ID NO: 1168114 - RNA, 19 nt, Homo sapiens
  misc_RNA (1)...(19): siRNA sense strand
ggaaaacacaccuuuagug

SEQ ID NO: 1168115 - RNA, 19 nt, Homo sapiens
  misc_RNA (1)...(19): siRNA sense strand
aaggaucaguagcaauuug

SEQ ID NO: 1168116 - RNA, 19 nt, Homo sapiens
  misc_RNA (1)...(19): siRNA sense strand
uauauacgggauccuuuaa

SEQ ID NO: 1168117 - RNA, 19 nt, Homo sapiens
  misc_RNA (1)...(19): siRNA sense strand
ugaaguagaaguauuugag

SEQ ID NO: 1168118 - RNA, 19 nt, Homo sapiens
  misc_RNA (1)...(19): siRNA sense strand
cuugacaguuuggauguuu

SEQ ID NO: 1168119 - RNA, 19 nt, Homo sapiens
  misc_RNA (1)...(19): siRNA sense strand
cauauauacgggauccuuu

SEQ ID NO: 1168120 - RNA, 19 nt, Homo sapiens
  misc_RNA (1)...(19): siRNA sense strand
auauauacgggauccuuua

SEQ ID NO: 1168121 - RNA, 19 nt, Homo sapiens
  misc_RNA (1)...(19): siRNA sense strand
cuuaaaggaucaguagcaa

SEQ ID NO: 1168122 - RNA, 19 nt, Homo sapiens
  misc_RNA (1)...(19): siRNA sense strand
uaaaccugaggaaggaaua

SEQ ID NO: 1168123 - RNA, 19 nt, Homo sapiens
  misc_RNA (1)...(19): siRNA sense strand
agaugacgccuguuauaga

SEQ ID NO: 1168124 - RNA, 19 nt, Homo sapiens
  misc_RNA (1)...(19): siRNA sense strand
ugugauuguuauugccaua

SEQ ID NO: 1168125 - RNA, 19 nt, Homo sapiens
  misc_RNA (1)...(19): siRNA sense strand
gagagcacgauuuauugug

SEQ ID NO: 1168126 - RNA, 19 nt, Homo sapiens
  misc_RNA (1)...(19): siRNA sense strand
gaaguauuugaguaucuug

SEQ ID NO: 1168127 - RNA, 19 nt, Homo sapiens
  misc_RNA (1)...(19): siRNA sense strand
ggcuaccugucucagauga

SEQ ID NO: 1168128 - RNA, 19 nt, Homo sapiens
  misc_RNA (1)...(19): siRNA sense strand
gauaucaggauuuggaaaa

SEQ ID NO: 1168129 - RNA, 19 nt, Homo sapiens
  misc_RNA (1)...(19): siRNA sense strand
ccucuugccacccauacua

SEQ ID NO: 1168130 - RNA, 19 nt, Homo sapiens
  misc_RNA (1)...(19): siRNA sense strand
ccaugguguugcugcugua

SEQ ID NO: 1168131 - RNA, 19 nt, Homo sapiens
  misc_RNA (1)...(19): siRNA sense strand
cagaugacgccuguuauag

SEQ ID NO: 1168132 - RNA, 19 nt, Homo sapiens
  misc_RNA (1)...(19): siRNA sense strand
uuggugaacgaguagauua

SEQ ID NO: 1168133 - RNA, 19 nt, Homo sapiens
  misc_RNA (1)...(19): siRNA sense strand
gucauugcugugauuguua

SEQ ID NO: 1168134 - RNA, 19 nt, Homo sapiens
  misc_RNA (1)...(19): siRNA sense strand
ggagccaccaacauuugaa

SEQ ID NO: 1168135 - RNA, 19 nt, Homo sapiens
  misc_RNA (1)...(19): siRNA sense strand
gcgcuuuccuggguugcuu

SEQ ID NO: 1168136 - RNA, 19 nt, Homo sapiens
  misc_RNA (1)...(19): siRNA sense strand
uacuacaaagcaacaguua

SEQ ID NO: 1168137 - RNA, 19 nt, Homo sapiens
  misc_RNA (1)...(19): siRNA sense strand
cuugaugcaguaacuuaua

SEQ ID NO: 1168138 - RNA, 19 nt, Homo sapiens
  misc_RNA (1)...(19): siRNA sense strand
aaacauguccauauauacg

SEQ ID NO: 1168139 - RNA, 19 nt, Homo sapiens
  misc_RNA (1)...(19): siRNA sense strand
guguaaaguggucaaaugu

SEQ ID NO: 1168140 - RNA, 19 nt, Homo sapiens
  misc_RNA (1)...(19): siRNA sense strand
cuuacgaguuugguuauca

SEQ ID NO: 1168141 - RNA, 19 nt, Homo sapiens
  misc_RNA (1)...(19): siRNA sense strand
uacgggauccuuuaaaugg

SEQ ID NO: 1168142 - RNA, 19 nt, Homo sapiens
  misc_RNA (1)...(19): siRNA sense strand
aaccaaaacccuacuauga

SEQ ID NO: 1168143 - RNA, 19 nt, Homo sapiens
  misc_RNA (1)...(19): siRNA sense strand
cccaauaugugaaaagguu

SEQ ID NO: 1168144 - RNA, 19 nt, Homo sapiens
  misc_RNA (1)...(19): siRNA sense strand
cgauggcagcgacacaauu

SEQ ID NO: 1168145 - RNA, 19 nt, Homo sapiens
  misc_RNA (1)...(19): siRNA sense strand
gauccauuuucacuuauug

SEQ ID NO: 1168146 - RNA, 19 nt, Homo sapiens
  misc_RNA (1)...(19): siRNA sense strand
uugaugcaguaacuuauag

SEQ ID NO: 1168147 - RNA, 19 nt, Homo sapiens
  misc_RNA (1)...(19): siRNA sense strand
guaucuugaugcaguaacu

SEQ ID NO: 1168148 - RNA, 19 nt, Homo sapiens
  misc_RNA (1)...(19): siRNA sense strand
caacauuugaagcuaugga

SEQ ID NO: 1168149 - RNA, 19 nt, Homo sapiens
  misc_RNA (1)...(19): siRNA sense strand
gagauuggugaacgaguag

SEQ ID NO: 1168150 - RNA, 19 nt, Homo sapiens
  misc_RNA (1)...(19): siRNA sense strand
ggagagagcacgauuuauu

SEQ ID NO: 1168151 - RNA, 19 nt, Homo sapiens
  misc_RNA (1)...(19): siRNA sense strand
agagaaacauguccauaua

SEQ ID NO: 1168152 - RNA, 19 nt, Homo sapiens
  misc_RNA (1)...(19): siRNA sense strand
cagaugcacuuuauuugua

SEQ ID NO: 1168153 - RNA, 19 nt, Homo sapiens
  misc_RNA (1)...(19): siRNA sense strand
ggacuuacgaguuugguua

SEQ ID NO: 1168154 - RNA, 19 nt, Homo sapiens
  misc_RNA (1)...(19): siRNA sense strand
aaacagauaucaggauuug

SEQ ID NO: 1168155 - RNA, 19 nt, Homo sapiens
  misc_RNA (1)...(19): siRNA sense strand
cuauggagcucauugguaa

SEQ ID NO: 1168156 - RNA, 19 nt, Homo sapiens
  misc_RNA (1)...(19): siRNA sense strand
aaacacaccuuuagugaag

SEQ ID NO: 1168157 - RNA, 19 nt, Homo sapiens
  misc_RNA (1)...(19): siRNA sense strand
gaacuuaaaggaucaguag

SEQ ID NO: 1168158 - RNA, 19 nt, Homo sapiens
  misc_RNA (1)...(19): siRNA sense strand
gaaaacagauaucaggauu

SEQ ID NO: 1168159 - RNA, 19 nt, Homo sapiens
  misc_RNA (1)...(19): siRNA sense strand
uaaaggaucaguagcaauu

SEQ ID NO: 1168160 - RNA, 19 nt, Homo sapiens
  misc_RNA (1)...(19): siRNA sense strand
aaaugggacuuacgaguuu

SEQ ID NO: 1168161 - RNA, 19 nt, Homo sapiens
  misc_RNA (1)...(19): siRNA sense strand
guuaucagaugcacuuuau

SEQ ID NO: 1168162 - RNA, 19 nt, Homo sapiens
  misc_RNA (1)...(19): siRNA sense strand
gagcugaauaugccacuua

SEQ ID NO: 1168163 - RNA, 19 nt, Homo sapiens
  misc_RNA (1)...(19): siRNA sense strand
gagcagagaggcugaauag

SEQ ID NO: 1168164 - RNA, 19 nt, Homo sapiens
  misc_RNA (1)...(19): siRNA sense strand
ugagauuggugaacgagua

SEQ ID NO: 1168165 - RNA, 19 nt, Homo sapiens
  misc_RNA (1)...(19): siRNA sense strand
gugaacgaguagauuauaa

SEQ ID NO: 1168166 - RNA, 19 nt, Homo sapiens
  misc_RNA (1)...(19): siRNA sense strand
gagagagcacgauuuauug

SEQ ID NO: 1168167 - RNA, 19 nt, Homo sapiens
  misc_RNA (1)...(19): siRNA sense strand
caaaugggacuuacgaguu

SEQ ID NO: 1168168 - RNA, 19 nt, Homo sapiens
  misc_RNA (1)...(19): siRNA sense strand
ggucauugcugugauuguu

SEQ ID NO: 1168169 - RNA, 19 nt, Homo sapiens
  misc_RNA (1)...(19): siRNA sense strand
ccagauccauuuucacuua

SEQ ID NO: 1168170 - RNA, 19 nt, Homo sapiens
  misc_RNA (1)...(19): siRNA sense strand
gaaggaauacuugacaguu

SEQ ID NO: 1168171 - RNA, 19 nt, Homo sapiens
  misc_RNA (1)...(19): siRNA sense strand
aaggaauacuugacaguuu

SEQ ID NO: 1168172 - RNA, 19 nt, Homo sapiens
  misc_RNA (1)...(19): siRNA sense strand
ucagaugacgccuguuaua

SEQ ID NO: 1168173 - RNA, 19 nt, Homo sapiens
  misc_RNA (1)...(19): siRNA sense strand
gaaaacacaccuuuaguga

SEQ ID NO: 1168174 - RNA, 19 nt, Homo sapiens
  misc_RNA (1)...(19): siRNA sense strand
gaugacgccuguuauagag

SEQ ID NO: 1168175 - RNA, 19 nt, Homo sapiens
  misc_RNA (1)...(19): siRNA sense strand
gagaaacauguccauauau

SEQ ID NO: 1168176 - RNA, 19 nt, Homo sapiens
  misc_RNA (1)...(19): siRNA sense strand
ccacuuaccagacuaaauc

SEQ ID NO: 1168177 - RNA, 19 nt, Homo sapiens
  misc_RNA (1)...(19): siRNA sense strand
acgaguagauuauaagugu

SEQ ID NO: 1168178 - RNA, 19 nt, Homo sapiens
  misc_RNA (1)...(19): siRNA sense strand
cuacaaagcaacaguuaug

SEQ ID NO: 1168179 - RNA, 19 nt, Homo sapiens
  misc_RNA (1)...(19): siRNA sense strand
ccaccaacauuugaagcua

SEQ ID NO: 1168180 - RNA, 19 nt, Homo sapiens
  misc_RNA (1)...(19): siRNA sense strand
uauacgggauccuuuaaau

SEQ ID NO: 1168181 - RNA, 19 nt, Homo sapiens
  misc_RNA (1)...(19): siRNA sense strand
cgaguuugguuaucagaug

SEQ ID NO: 1168182 - RNA, 19 nt, Homo sapiens
  misc_RNA (1)...(19): siRNA sense strand
gaacgaguagauuauaagu

SEQ ID NO: 1168183 - RNA, 19 nt, Homo sapiens
  misc_RNA (1)...(19): siRNA sense strand
gugaggagccaccaacauu

SEQ ID NO: 1168184 - RNA, 19 nt, Homo sapiens
  misc_RNA (1)...(19): siRNA sense strand
gauggcagcgacacaauug

SEQ ID NO: 1168185 - RNA, 19 nt, Homo sapiens
  misc_RNA (1)...(19): siRNA sense strand
ucucagaugacgccuguua

SEQ ID NO: 1168186 - RNA, 19 nt, Homo sapiens
  misc_RNA (1)...(19): siRNA sense strand
acacaccuuuagugaagua

SEQ ID NO: 1168187 - RNA, 19 nt, Homo sapiens
  misc_RNA (1)...(19): siRNA sense strand
gcuauggagcucauuggua

SEQ ID NO: 1168188 - RNA, 19 nt, Homo sapiens
  misc_RNA (1)...(19): siRNA sense strand
gaggagccaccaacauuug

SEQ ID NO: 1168189 - RNA, 19 nt, Homo sapiens
  misc_RNA (1)...(19): siRNA sense strand
uagagaaacauguccauau

SEQ ID NO: 1168190 - RNA, 19 nt, Homo sapiens
  misc_RNA (1)...(19): siRNA sense strand
ggugaacgaguagauuaua

SEQ ID NO: 1168191 - RNA, 19 nt, Homo sapiens
  misc_RNA (1)...(19): siRNA sense strand
gaaguagaaguauuugagu

SEQ ID NO: 1168192 - RNA, 19 nt, Homo sapiens
  misc_RNA (1)...(19): siRNA sense strand
gaaacauguccauauauac

SEQ ID NO: 1168193 - RNA, 19 nt, Homo sapiens
  misc_RNA (1)...(19): siRNA sense strand
ugacgccuguuauagagaa

SEQ ID NO: 1168194 - RNA, 19 nt, Homo sapiens
  misc_RNA (1)...(19): siRNA sense strand
cgaguagauuauaagugua

SEQ ID NO: 1168195 - RNA, 19 nt, Homo sapiens
  misc_RNA (1)...(19): siRNA sense strand
gcacuuuauuuguaaugag

SEQ ID NO: 1168196 - RNA, 19 nt, Homo sapiens
  misc_RNA (1)...(19): siRNA sense strand
guagaaguauuugaguauc

SEQ ID NO: 1168197 - RNA, 19 nt, Homo sapiens
  misc_RNA (1)...(19): siRNA sense strand
guauuugaguaucuugaug

SEQ ID NO: 1168198 - RNA, 19 nt, Homo sapiens
  misc_RNA (1)...(19): siRNA sense strand
aggaauacuugacaguuug

SEQ ID NO: 1168199 - RNA, 19 nt, Homo sapiens
  misc_RNA (1)...(19): siRNA sense strand
ccaaaacccuacuaugaga

SEQ ID NO: 1168200 - RNA, 19 nt, Homo sapiens
  misc_RNA (1)...(19): siRNA sense strand
aguguaaaguggucaaaug

SEQ ID NO: 1168201 - RNA, 19 nt, Homo sapiens
  misc_RNA (1)...(19): siRNA sense strand
ccacccauacuauuuguga

SEQ ID NO: 1168202 - RNA, 19 nt, Homo sapiens
  misc_RNA (1)...(19): siRNA sense strand
uuggagagagcacgauuua

SEQ ID NO: 1168203 - RNA, 19 nt, Homo sapiens
  misc_RNA (1)...(19): siRNA sense strand
gguuaucagaugcacuuua

SEQ ID NO: 1168204 - RNA, 19 nt, Homo sapiens
  misc_RNA (1)...(19): siRNA sense strand
caccaacauuugaagcuau

SEQ ID NO: 1168205 - RNA, 19 nt, Homo sapiens
  misc_RNA (1)...(19): siRNA sense strand
ugaggagccaccaacauuu

SEQ ID NO: 1168206 - RNA, 19 nt, Homo sapiens
  misc_RNA (1)...(19): siRNA sense strand
ggaaggaauacuugacagu

SEQ ID NO: 1168207 - RNA, 19 nt, Homo sapiens
  misc_RNA (1)...(19): siRNA sense strand
gaggaaggaauacuugaca

SEQ ID NO: 1168208 - RNA, 19 nt, Homo sapiens
  misc_RNA (1)...(19): siRNA sense strand
ugaguaucuugaugcagua

SEQ ID NO: 1168209 - RNA, 19 nt, Homo sapiens
  misc_RNA (1)...(19): siRNA sense strand
caccuuuagugaaguagaa

SEQ ID NO: 1168210 - RNA, 19 nt, Homo sapiens
  misc_RNA (1)...(19): siRNA sense strand
acagauaucaggauuugga

SEQ ID NO: 1168211 - RNA, 19 nt, Homo sapiens
  misc_RNA (1)...(19): siRNA sense strand
ucauugcugugauuguuau

SEQ ID NO: 1168212 - RNA, 19 nt, Homo sapiens
  misc_RNA (1)...(19): siRNA sense strand
ucagaugcacuuuauuugu

SEQ ID NO: 1168213 - RNA, 19 nt, Homo sapiens
  misc_RNA (1)...(19): siRNA sense strand
gugcugcuccagaguguaa

SEQ ID NO: 1168214 - RNA, 19 nt, Homo sapiens
  misc_RNA (1)...(19): siRNA sense strand
ggaaaacacaccuuuagug

SEQ ID NO: 1168215 - RNA, 19 nt, Homo sapiens
  misc_RNA (1)...(19): siRNA sense strand
aaggaucaguagcaauuug

SEQ ID NO: 1168216 - RNA, 19 nt, Homo sapiens
  misc_RNA (1)...(19): siRNA sense strand
uauauacgggauccuuuaa

SEQ ID NO: 1168217 - RNA, 19 nt, Homo sapiens
  misc_RNA (1)...(19): siRNA sense strand
ugaaguagaaguauuugag

SEQ ID NO: 1168218 - RNA, 19 nt, Homo sapiens
  misc_RNA (1)...(19): siRNA sense strand
cuugacaguuuggauguuu

SEQ ID NO: 1168219 - RNA, 19 nt, Homo sapiens
  misc_RNA (1)...(19): siRNA sense strand
cauauauacgggauccuuu

SEQ ID NO: 1168220 - RNA, 19 nt, Homo sapiens
  misc_RNA (1)...(19): siRNA sense strand
auauauacgggauccuuua

SEQ ID NO: 1168221 - RNA, 19 nt, Homo sapiens
  misc_RNA (1)...(19): siRNA sense strand
cuuaaaggaucaguagcaa

SEQ ID NO: 1168222 - RNA, 19 nt, Homo sapiens
  misc_RNA (1)...(19): siRNA sense strand
uaaaccugaggaaggaaua

SEQ ID NO: 1168223 - RNA, 19 nt, Homo sapiens
  misc_RNA (1)...(19): siRNA sense strand
agaugacgccuguuauaga

SEQ ID NO: 1168224 - RNA, 19 nt, Homo sapiens
  misc_RNA (1)...(19): siRNA sense strand
ugugauuguuauugccaua

SEQ ID NO: 1168225 - RNA, 19 nt, Homo sapiens
  misc_RNA (1)...(19): siRNA sense strand
gagagcacgauuuauugug

SEQ ID NO: 1168226 - RNA, 19 nt, Homo sapiens
  misc_RNA (1)...(19): siRNA sense strand
gaaguauuugaguaucuug

SEQ ID NO: 1168227 - RNA, 19 nt, Homo sapiens
  misc_RNA (1)...(19): siRNA sense strand
ggcuaccugucucagauga

SEQ ID NO: 1168228 - RNA, 19 nt, Homo sapiens
  misc_RNA (1)...(19): siRNA sense strand
gauaucaggauuuggaaaa

SEQ ID NO: 1168229 - RNA, 19 nt, Homo sapiens
  misc_RNA (1)...(19): siRNA sense strand
ccucuugccacccauacua

SEQ ID NO: 1168230 - RNA, 19 nt, Homo sapiens
  misc_RNA (1)...(19): siRNA sense strand
ccaugguguugcugcugua

SEQ ID NO: 1168231 - RNA, 19 nt, Homo sapiens
  misc_RNA (1)...(19): siRNA sense strand
cagaugacgccuguuauag

SEQ ID NO: 1168232 - RNA, 19 nt, Homo sapiens
  misc_RNA (1)...(19): siRNA sense strand
cagaugguggagcugaaua

SEQ ID NO: 1168233 - RNA, 19 nt, Homo sapiens
  misc_RNA (1)...(19): siRNA sense strand
gucauugcugugauuguua

SEQ ID NO: 1168234 - RNA, 19 nt, Homo sapiens
  misc_RNA (1)...(19): siRNA sense strand
ggagccaccaacauuugaa

SEQ ID NO: 1168235 - RNA, 19 nt, Homo sapiens
  misc_RNA (1)...(19): siRNA sense strand
uuggugaacgaguagauua

SEQ ID NO: 1168236 - RNA, 19 nt, Homo sapiens
  misc_RNA (1)...(19): siRNA sense strand
gcgcuuuccuggguugcuu

SEQ ID NO: 1168237 - RNA, 19 nt, Homo sapiens
  misc_RNA (1)...(19): siRNA sense strand
uacuacaaagcaacaguua

SEQ ID NO: 1168238 - RNA, 19 nt, Homo sapiens
  misc_RNA (1)...(19): siRNA sense strand
cuugaugcaguaacuuaua

SEQ ID NO: 1168239 - RNA, 19 nt, Homo sapiens
  misc_RNA (1)...(19): siRNA sense strand
aaacauguccauauauacg

SEQ ID NO: 1168240 - RNA, 19 nt, Homo sapiens
  misc_RNA (1)...(19): siRNA sense strand
guguaaaguggucaaaugu

SEQ ID NO: 1168241 - RNA, 19 nt, Homo sapiens
  misc_RNA (1)...(19): siRNA sense strand
cuuacgaguuugguuauca

SEQ ID NO: 1168242 - RNA, 19 nt, Homo sapiens
  misc_RNA (1)...(19): siRNA sense strand
uacgggauccuuuaaaugg

SEQ ID NO: 1168243 - RNA, 19 nt, Homo sapiens
  misc_RNA (1)...(19): siRNA sense strand
gcagaugguggagcugaau

SEQ ID NO: 1168244 - RNA, 19 nt, Homo sapiens
  misc_RNA (1)...(19): siRNA sense strand
aaccaaaacccuacuauga

SEQ ID NO: 1168245 - RNA, 19 nt, Homo sapiens
  misc_RNA (1)...(19): siRNA sense strand
uugaugcaguaacuuauag

SEQ ID NO: 1168246 - RNA, 19 nt, Homo sapiens
  misc_RNA (1)...(19): siRNA sense strand
ggagcugaauaugccacuu

SEQ ID NO: 1168247 - RNA, 19 nt, Homo sapiens
  misc_RNA (1)...(19): siRNA sense strand
caacauuugaagcuaugga

SEQ ID NO: 1168248 - RNA, 19 nt, Homo sapiens
  misc_RNA (1)...(19): siRNA sense strand
cgauggcagcgacacaauu

SEQ ID NO: 1168249 - RNA, 19 nt, Homo sapiens
  misc_RNA (1)...(19): siRNA sense strand
gauccauuuucacuuauug

SEQ ID NO: 1168250 - RNA, 19 nt, Homo sapiens
  misc_RNA (1)...(19): siRNA sense strand
ggagagagcacgauuuauu

SEQ ID NO: 1168251 - RNA, 19 nt, Homo sapiens
  misc_RNA (1)...(19): siRNA sense strand
agagaaacauguccauaua

SEQ ID NO: 1168252 - RNA, 19 nt, Homo sapiens
  misc_RNA (1)...(19): siRNA sense strand
cagaugcacuuuauuugua

SEQ ID NO: 1168253 - RNA, 19 nt, Homo sapiens
  misc_RNA (1)...(19): siRNA sense strand
ggacuuacgaguuugguua

SEQ ID NO: 1168254 - RNA, 19 nt, Homo sapiens
  misc_RNA (1)...(19): siRNA sense strand
aaacagauaucaggauuug

SEQ ID NO: 1168255 - RNA, 19 nt, Homo sapiens
  misc_RNA (1)...(19): siRNA sense strand
cuauggagcucauugguaa

SEQ ID NO: 1168256 - RNA, 19 nt, Homo sapiens
  misc_RNA (1)...(19): siRNA sense strand
aaacacaccuuuagugaag

SEQ ID NO: 1168257 - RNA, 19 nt, Homo sapiens
  misc_RNA (1)...(19): siRNA sense strand
gaacuuaaaggaucaguag

SEQ ID NO: 1168258 - RNA, 19 nt, Homo sapiens
  misc_RNA (1)...(19): siRNA sense strand
gaaaacagauaucaggauu

SEQ ID NO: 1168259 - RNA, 19 nt, Homo sapiens
  misc_RNA (1)...(19): siRNA sense strand
uaaaggaucaguagcaauu

SEQ ID NO: 1168260 - RNA, 19 nt, Homo sapiens
  misc_RNA (1)...(19): siRNA sense strand
aaaugggacuuacgaguuu

SEQ ID NO: 1168261 - RNA, 19 nt, Homo sapiens
  misc_RNA (1)...(19): siRNA sense strand
guuaucagaugcacuuuau

SEQ ID NO: 1168262 - RNA, 19 nt, Homo sapiens
  misc_RNA (1)...(19): siRNA sense strand
gagcugaauaugccacuua

SEQ ID NO: 1168263 - RNA, 19 nt, Homo sapiens
  misc_RNA (1)...(19): siRNA sense strand
ugagauuggugaacgagua

SEQ ID NO: 1168264 - RNA, 19 nt, Homo sapiens
  misc_RNA (1)...(19): siRNA sense strand
gugaacgaguagauuauaa

SEQ ID NO: 1168265 - RNA, 19 nt, Homo sapiens
  misc_RNA (1)...(19): siRNA sense strand
gagagagcacgauuuauug

SEQ ID NO: 1168266 - RNA, 19 nt, Homo sapiens
  misc_RNA (1)...(19): siRNA sense strand
caaaugggacuuacgaguu

SEQ ID NO: 1168267 - RNA, 19 nt, Homo sapiens
  misc_RNA (1)...(19): siRNA sense strand
ggucauugcugugauuguu

SEQ ID NO: 1168268 - RNA, 19 nt, Homo sapiens
  misc_RNA (1)...(19): siRNA sense strand
ccagauccauuuucacuua

SEQ ID NO: 1168269 - RNA, 19 nt, Homo sapiens
  misc_RNA (1)...(19): siRNA sense strand
gaaggaauacuugacaguu

SEQ ID NO: 1168270 - RNA, 19 nt, Homo sapiens
  misc_RNA (1)...(19): siRNA sense strand
aaggaauacuugacaguuu

SEQ ID NO: 1168271 - RNA, 19 nt, Homo sapiens
  misc_RNA (1)...(19): siRNA sense strand
ucagaugacgccuguuaua

SEQ ID NO: 1168272 - RNA, 19 nt, Homo sapiens
  misc_RNA (1)...(19): siRNA sense strand
gaaaacacaccuuuaguga

SEQ ID NO: 1168273 - RNA, 19 nt, Homo sapiens
  misc_RNA (1)...(19): siRNA sense strand
gaugacgccuguuauagag

SEQ ID NO: 1168274 - RNA, 19 nt, Homo sapiens
  misc_RNA (1)...(19): siRNA sense strand
gagaaacauguccauauau

SEQ ID NO: 1168275 - RNA, 19 nt, Homo sapiens
  misc_RNA (1)...(19): siRNA sense strand
ccacuuaccagacuaaauc

SEQ ID NO: 1168276 - RNA, 19 nt, Homo sapiens
  misc_RNA (1)...(19): siRNA sense strand
acgaguagauuauaagugu

SEQ ID NO: 1168277 - RNA, 19 nt, Homo sapiens
  misc_RNA (1)...(19): siRNA sense strand
cuacaaagcaacaguuaug

SEQ ID NO: 1168278 - RNA, 19 nt, Homo sapiens
  misc_RNA (1)...(19): siRNA sense strand
ccaccaacauuugaagcua

SEQ ID NO: 1168279 - RNA, 19 nt, Homo sapiens
  misc_RNA (1)...(19): siRNA sense strand
uauacgggauccuuuaaau

SEQ ID NO: 1168280 - RNA, 19 nt, Homo sapiens
  misc_RNA (1)...(19): siRNA sense strand
cgaguuugguuaucagaug

SEQ ID NO: 1168281 - RNA, 19 nt, Homo sapiens
  misc_RNA (1)...(19): siRNA sense strand
gaacgaguagauuauaagu

SEQ ID NO: 1168282 - RNA, 19 nt, Homo sapiens
  misc_RNA (1)...(19): siRNA sense strand
gugaggagccaccaacauu

SEQ ID NO: 1168283 - RNA, 19 nt, Homo sapiens
  misc_RNA (1)...(19): siRNA sense strand
gauggcagcgacacaauug

SEQ ID NO: 1168284 - RNA, 19 nt, Homo sapiens
  misc_RNA (1)...(19): siRNA sense strand
ucucagaugacgccuguua

SEQ ID NO: 1168285 - RNA, 19 nt, Homo sapiens
  misc_RNA (1)...(19): siRNA sense strand
gaggagccaccaacauuug

SEQ ID NO: 1168286 - RNA, 19 nt, Homo sapiens
  misc_RNA (1)...(19): siRNA sense strand
gcuauggagcucauuggua

SEQ ID NO: 1168287 - RNA, 19 nt, Homo sapiens
  misc_RNA (1)...(19): siRNA sense strand
acacaccuuuagugaagua

SEQ ID NO: 1168288 - RNA, 19 nt, Homo sapiens
  misc_RNA (1)...(19): siRNA sense strand
uagagaaacauguccauau

SEQ ID NO: 1168289 - RNA, 19 nt, Homo sapiens
  misc_RNA (1)...(19): siRNA sense strand
guuccaaagugucuuaaag

SEQ ID NO: 1168290 - RNA, 19 nt, Homo sapiens
  misc_RNA (1)...(19): siRNA sense strand
ggugaacgaguagauuaua

SEQ ID NO: 1168291 - RNA, 19 nt, Homo sapiens
  misc_RNA (1)...(19): siRNA sense strand
gaaguagaaguauuugagu

SEQ ID NO: 1168292 - RNA, 19 nt, Homo sapiens
  misc_RNA (1)...(19): siRNA sense strand
gaaacauguccauauauac

SEQ ID NO: 1168293 - RNA, 19 nt, Homo sapiens
  misc_RNA (1)...(19): siRNA sense strand
ugacgccuguuauagagaa

SEQ ID NO: 1168294 - RNA, 19 nt, Homo sapiens
  misc_RNA (1)...(19): siRNA sense strand
cgaguagauuauaagugua

SEQ ID NO: 1168295 - RNA, 19 nt, Homo sapiens
  misc_RNA (1)...(19): siRNA sense strand
gcacuuuauuuguaaugag

SEQ ID NO: 1168296 - RNA, 19 nt, Homo sapiens
  misc_RNA (1)...(19): siRNA sense strand
guagaaguauuugaguauc

SEQ ID NO: 1168297 - RNA, 19 nt, Homo sapiens
  misc_RNA (1)...(19): siRNA sense strand
guauuugaguaucuugaug

SEQ ID NO: 1168298 - RNA, 19 nt, Homo sapiens
  misc_RNA (1)...(19): siRNA sense strand
aggaauacuugacaguuug

SEQ ID NO: 1168299 - RNA, 19 nt, Homo sapiens
  misc_RNA (1)...(19): siRNA sense strand
ccaaaacccuacuaugaga

SEQ ID NO: 1168300 - RNA, 19 nt, Homo sapiens
  misc_RNA (1)...(19): siRNA sense strand
aguguaaaguggucaaaug

SEQ ID NO: 1168301 - RNA, 19 nt, Homo sapiens
  misc_RNA (1)...(19): siRNA sense strand
ccacccauacuauuuguga

SEQ ID NO: 1168302 - RNA, 19 nt, Homo sapiens
  misc_RNA (1)...(19): siRNA sense strand
uuggagagagcacgauuua

SEQ ID NO: 1168303 - RNA, 19 nt, Homo sapiens
  misc_RNA (1)...(19): siRNA sense strand
gguuaucagaugcacuuua

SEQ ID NO: 1168304 - RNA, 19 nt, Homo sapiens
  misc_RNA (1)...(19): siRNA sense strand
caccaacauuugaagcuau

SEQ ID NO: 1168305 - RNA, 19 nt, Homo sapiens
  misc_RNA (1)...(19): siRNA sense strand
ugaggagccaccaacauuu

SEQ ID NO: 1168306 - RNA, 19 nt, Homo sapiens
  misc_RNA (1)...(19): siRNA sense strand
ggaaggaauacuugacagu

SEQ ID NO: 1168307 - RNA, 19 nt, Homo sapiens
  misc_RNA (1)...(19): siRNA sense strand
gaggaaggaauacuugaca

SEQ ID NO: 1168308 - RNA, 19 nt, Homo sapiens
  misc_RNA (1)...(19): siRNA sense strand
ccaguuccaaagugucuua

SEQ ID NO: 1168309 - RNA, 19 nt, Homo sapiens
  misc_RNA (1)...(19): siRNA sense strand
ugaguaucuugaugcagua

SEQ ID NO: 1168310 - RNA, 19 nt, Homo sapiens
  misc_RNA (1)...(19): siRNA sense strand
caccuuuagugaaguagaa

SEQ ID NO: 1168311 - RNA, 19 nt, Homo sapiens
  misc_RNA (1)...(19): siRNA sense strand
acagauaucaggauuugga

SEQ ID NO: 1168312 - RNA, 19 nt, Homo sapiens
  misc_RNA (1)...(19): siRNA sense strand
ucauugcugugauuguuau

SEQ ID NO: 1168313 - RNA, 19 nt, Homo sapiens
  misc_RNA (1)...(19): siRNA sense strand
ucagaugcacuuuauuugu

SEQ ID NO: 1168314 - RNA, 19 nt, Homo sapiens
  misc_RNA (1)...(19): siRNA sense strand
gugcugcuccagaguguaa

SEQ ID NO: 1168315 - RNA, 19 nt, Homo sapiens
  misc_RNA (1)...(19): siRNA sense strand
ggaaaacacaccuuuagug

SEQ ID NO: 1168316 - RNA, 19 nt, Homo sapiens
  misc_RNA (1)...(19): siRNA sense strand
aaggaucaguagcaauuug

SEQ ID NO: 1168317 - RNA, 19 nt, Homo sapiens
  misc_RNA (1)...(19): siRNA sense strand
uauauacgggauccuuuaa

SEQ ID NO: 1168318 - RNA, 19 nt, Homo sapiens
  misc_RNA (1)...(19): siRNA sense strand
ugaaguagaaguauuugag

SEQ ID NO: 1168319 - RNA, 19 nt, Homo sapiens
  misc_RNA (1)...(19): siRNA sense strand
cuugacaguuuggauguuu

SEQ ID NO: 1168320 - RNA, 19 nt, Homo sapiens
  misc_RNA (1)...(19): siRNA sense strand
cauauauacgggauccuuu

SEQ ID NO: 1168321 - RNA, 19 nt, Homo sapiens
  misc_RNA (1)...(19): siRNA sense strand
auauauacgggauccuuua

SEQ ID NO: 1168322 - RNA, 19 nt, Homo sapiens
  misc_RNA (1)...(19): siRNA sense strand
cuuaaaggaucaguagcaa

SEQ ID NO: 1168323 - RNA, 19 nt, Homo sapiens
  misc_RNA (1)...(19): siRNA sense strand
uaaaccugaggaaggaaua

SEQ ID NO: 1168324 - RNA, 19 nt, Homo sapiens
  misc_RNA (1)...(19): siRNA sense strand
agaugacgccuguuauaga

SEQ ID NO: 1168325 - RNA, 19 nt, Homo sapiens
  misc_RNA (1)...(19): siRNA sense strand
ugugauuguuauugccaua

SEQ ID NO: 1168326 - RNA, 19 nt, Homo sapiens
  misc_RNA (1)...(19): siRNA sense strand
gagagcacgauuuauugug

SEQ ID NO: 1168327 - RNA, 19 nt, Homo sapiens
  misc_RNA (1)...(19): siRNA sense strand
gaaguauuugaguaucuug

SEQ ID NO: 1168328 - RNA, 19 nt, Homo sapiens
  misc_RNA (1)...(19): siRNA sense strand
ggcuaccugucucagauga

SEQ ID NO: 1168329 - RNA, 19 nt, Homo sapiens
  misc_RNA (1)...(19): siRNA sense strand
gauaucaggauuuggaaaa

SEQ ID NO: 1168330 - RNA, 19 nt, Homo sapiens
  misc_RNA (1)...(19): siRNA sense strand
ccucuugccacccauacua

SEQ ID NO: 1168331 - RNA, 19 nt, Homo sapiens
  misc_RNA (1)...(19): siRNA sense strand
ccaugguguugcugcugua

SEQ ID NO: 1168332 - RNA, 19 nt, Homo sapiens
  misc_RNA (1)...(19): siRNA sense strand
cagaugacgccuguuauag

SEQ ID NO: 1168333 - RNA, 19 nt, Homo sapiens
  misc_RNA (1)...(19): siRNA sense strand
cagaugguggagcugaaua

SEQ ID NO: 1168334 - RNA, 19 nt, Homo sapiens
  misc_RNA (1)...(19): siRNA sense strand
gucauugcugugauuguua

SEQ ID NO: 1168335 - RNA, 19 nt, Homo sapiens
  misc_RNA (1)...(19): siRNA sense strand
ggagccaccaacauuugaa

SEQ ID NO: 1168336 - RNA, 19 nt, Homo sapiens
  misc_RNA (1)...(19): siRNA sense strand
uuggugaacgaguagauua

SEQ ID NO: 1168337 - RNA, 19 nt, Homo sapiens
  misc_RNA (1)...(19): siRNA sense strand
gcgcuuuccuggguugcuu

SEQ ID NO: 1168338 - RNA, 19 nt, Homo sapiens
  misc_RNA (1)...(19): siRNA sense strand
uacuacaaagcaacaguua

SEQ ID NO: 1168339 - RNA, 19 nt, Homo sapiens
  misc_RNA (1)...(19): siRNA sense strand
cuugaugcaguaacuuaua

SEQ ID NO: 1168340 - RNA, 19 nt, Homo sapiens
  misc_RNA (1)...(19): siRNA sense strand
aaacauguccauauauacg

SEQ ID NO: 1168341 - RNA, 19 nt, Homo sapiens
  misc_RNA (1)...(19): siRNA sense strand
guguaaaguggucaaaugu

SEQ ID NO: 1168342 - RNA, 19 nt, Homo sapiens
  misc_RNA (1)...(19): siRNA sense strand
cuuacgaguuugguuauca

SEQ ID NO: 1168343 - RNA, 19 nt, Homo sapiens
  misc_RNA (1)...(19): siRNA sense strand
uacgggauccuuuaaaugg

SEQ ID NO: 1168344 - RNA, 19 nt, Homo sapiens
  misc_RNA (1)...(19): siRNA sense strand
gcagaugguggagcugaau

SEQ ID NO: 1168345 - RNA, 19 nt, Homo sapiens
  misc_RNA (1)...(19): siRNA sense strand
aaccaaaacccuacuauga

SEQ ID NO: 1168346 - RNA, 19 nt, Homo sapiens
  misc_RNA (1)...(19): siRNA sense strand
uugaugcaguaacuuauag

SEQ ID NO: 1168347 - RNA, 19 nt, Homo sapiens
  misc_RNA (1)...(19): siRNA sense strand
ggagcugaauaugccacuu

SEQ ID NO: 1168348 - RNA, 19 nt, Homo sapiens
  misc_RNA (1)...(19): siRNA sense strand
cgauggcagcgacacaauu

SEQ ID NO: 1168349 - RNA, 19 nt, Homo sapiens
  misc_RNA (1)...(19): siRNA sense strand
gauccauuuucacuuauug

SEQ ID NO: 1168350 - RNA, 19 nt, Homo sapiens
  misc_RNA (1)...(19): siRNA sense strand
ggagagagcacgauuuauu

SEQ ID NO: 1168351 - RNA, 19 nt, Homo sapiens
  misc_RNA (1)...(19): siRNA sense strand
agagaaacauguccauaua

SEQ ID NO: 1168352 - RNA, 19 nt, Homo sapiens
  misc_RNA (1)...(19): siRNA sense strand
cagaugcacuuuauuugua

SEQ ID NO: 1168353 - RNA, 19 nt, Homo sapiens
  misc_RNA (1)...(19): siRNA sense strand
ggacuuacgaguuugguua

SEQ ID NO: 1168354 - RNA, 19 nt, Homo sapiens
  misc_RNA (1)...(19): siRNA sense strand
aaacagauaucaggauuug

SEQ ID NO: 1168355 - RNA, 19 nt, Homo sapiens
  misc_RNA (1)...(19): siRNA sense strand
cuauggagcucauugguaa

SEQ ID NO: 1168356 - RNA, 19 nt, Homo sapiens
  misc_RNA (1)...(19): siRNA sense strand
aaacacaccuuuagugaag

SEQ ID NO: 1168357 - RNA, 19 nt, Homo sapiens
  misc_RNA (1)...(19): siRNA sense strand
gaacuuaaaggaucaguag

SEQ ID NO: 1168358 - RNA, 19 nt, Homo sapiens
  misc_RNA (1)...(19): siRNA sense strand
gaaaacagauaucaggauu

SEQ ID NO: 1168359 - RNA, 19 nt, Homo sapiens
  misc_RNA (1)...(19): siRNA sense strand
uaaaggaucaguagcaauu

SEQ ID NO: 1168360 - RNA, 19 nt, Homo sapiens
  misc_RNA (1)...(19): siRNA sense strand
aaaugggacuuacgaguuu

SEQ ID NO: 1168361 - RNA, 19 nt, Homo sapiens
  misc_RNA (1)...(19): siRNA sense strand
guuaucagaugcacuuuau

SEQ ID NO: 1168362 - RNA, 19 nt, Homo sapiens
  misc_RNA (1)...(19): siRNA sense strand
gagcugaauaugccacuua

SEQ ID NO: 1168363 - RNA, 19 nt, Homo sapiens
  misc_RNA (1)...(19): siRNA sense strand
ugagauuggugaacgagua

SEQ ID NO: 1168364 - RNA, 19 nt, Homo sapiens
  misc_RNA (1)...(19): siRNA sense strand
gugaacgaguagauuauaa

SEQ ID NO: 1168365 - RNA, 19 nt, Homo sapiens
  misc_RNA (1)...(19): siRNA sense strand
gagagagcacgauuuauug

SEQ ID NO: 1168366 - RNA, 19 nt, Homo sapiens
  misc_RNA (1)...(19): siRNA sense strand
caaaugggacuuacgaguu

SEQ ID NO: 1168367 - RNA, 19 nt, Homo sapiens
  misc_RNA (1)...(19): siRNA sense strand
ggucauugcugugauuguu

SEQ ID NO: 1168368 - RNA, 19 nt, Homo sapiens
  misc_RNA (1)...(19): siRNA sense strand
ccagauccauuuucacuua

SEQ ID NO: 1168369 - RNA, 19 nt, Homo sapiens
  misc_RNA (1)...(19): siRNA sense strand
gaaggaauacuugacaguu

SEQ ID NO: 1168370 - RNA, 19 nt, Homo sapiens
  misc_RNA (1)...(19): siRNA sense strand
aaggaauacuugacaguuu

SEQ ID NO: 1168371 - RNA, 19 nt, Homo sapiens
  misc_RNA (1)...(19): siRNA sense strand
ucagaugacgccuguuaua

SEQ ID NO: 1168372 - RNA, 19 nt, Homo sapiens
  misc_RNA (1)...(19): siRNA sense strand
gaaaacacaccuuuaguga

SEQ ID NO: 1168373 - RNA, 19 nt, Homo sapiens
  misc_RNA (1)...(19): siRNA sense strand
gaugacgccuguuauagag

SEQ ID NO: 1168374 - RNA, 19 nt, Homo sapiens
  misc_RNA (1)...(19): siRNA sense strand
gagaaacauguccauauau

SEQ ID NO: 1168375 - RNA, 19 nt, Homo sapiens
  misc_RNA (1)...(19): siRNA sense strand
ccacuuaccagacuaaauc

SEQ ID NO: 1168376 - RNA, 19 nt, Homo sapiens
  misc_RNA (1)...(19): siRNA sense strand
acgaguagauuauaagugu

SEQ ID NO: 1168377 - RNA, 19 nt, Homo sapiens
  misc_RNA (1)...(19): siRNA sense strand
cuacaaagcaacaguuaug

SEQ ID NO: 1168378 - RNA, 19 nt, Homo sapiens
  misc_RNA (1)...(19): siRNA sense strand
ccaccaacauuugaagcua

SEQ ID NO: 1168379 - RNA, 19 nt, Homo sapiens
  misc_RNA (1)...(19): siRNA sense strand
uauacgggauccuuuaaau

SEQ ID NO: 1168380 - RNA, 19 nt, Homo sapiens
  misc_RNA (1)...(19): siRNA sense strand
cgaguuugguuaucagaug

SEQ ID NO: 1168381 - RNA, 19 nt, Homo sapiens
  misc_RNA (1)...(19): siRNA sense strand
gaacgaguagauuauaagu

SEQ ID NO: 1168382 - RNA, 19 nt, Homo sapiens
  misc_RNA (1)...(19): siRNA sense strand
gugaggagccaccaacauu

SEQ ID NO: 1168383 - RNA, 19 nt, Homo sapiens
  misc_RNA (1)...(19): siRNA sense strand
gauggcagcgacacaauug

SEQ ID NO: 1168384 - RNA, 19 nt, Homo sapiens
  misc_RNA (1)...(19): siRNA sense strand
ucucagaugacgccuguua

SEQ ID NO: 1168385 - RNA, 19 nt, Homo sapiens
  misc_RNA (1)...(19): siRNA sense strand
gaggagccaccaacauuug

SEQ ID NO: 1168386 - RNA, 19 nt, Homo sapiens
  misc_RNA (1)...(19): siRNA sense strand
gcuauggagcucauuggua

SEQ ID NO: 1168387 - RNA, 19 nt, Homo sapiens
  misc_RNA (1)...(19): siRNA sense strand
acacaccuuuagugaagua

SEQ ID NO: 1168388 - RNA, 19 nt, Homo sapiens
  misc_RNA (1)...(19): siRNA sense strand
uagagaaacauguccauau

SEQ ID NO: 1168389 - RNA, 19 nt, Homo sapiens
  misc_RNA (1)...(19): siRNA sense strand
guuccaaagugucuuaaag

SEQ ID NO: 1168390 - RNA, 19 nt, Homo sapiens
  misc_RNA (1)...(19): siRNA sense strand
ggugaacgaguagauuaua

SEQ ID NO: 1168391 - RNA, 19 nt, Homo sapiens
  misc_RNA (1)...(19): siRNA sense strand
gaaguagaaguauuugagu

SEQ ID NO: 1168392 - RNA, 19 nt, Homo sapiens
  misc_RNA (1)...(19): siRNA sense strand
gaaacauguccauauauac

SEQ ID NO: 1168393 - RNA, 19 nt, Homo sapiens
  misc_RNA (1)...(19): siRNA sense strand
ugacgccuguuauagagaa

SEQ ID NO: 1168394 - RNA, 19 nt, Homo sapiens
  misc_RNA (1)...(19): siRNA sense strand
cgaguagauuauaagugua

SEQ ID NO: 1168395 - RNA, 19 nt, Homo sapiens
  misc_RNA (1)...(19): siRNA sense strand
gcacuuuauuuguaaugag

SEQ ID NO: 1168396 - RNA, 19 nt, Homo sapiens
  misc_RNA (1)...(19): siRNA sense strand
guagaaguauuugaguauc

SEQ ID NO: 1168397 - RNA, 19 nt, Homo sapiens
  misc_RNA (1)...(19): siRNA sense strand
guauuugaguaucuugaug

SEQ ID NO: 1168398 - RNA, 19 nt, Homo sapiens
  misc_RNA (1)...(19): siRNA sense strand
aggaauacuugacaguuug

SEQ ID NO: 1168399 - RNA, 19 nt, Homo sapiens
  misc_RNA (1)...(19): siRNA sense strand
ccaaaacccuacuaugaga

SEQ ID NO: 1168400 - RNA, 19 nt, Homo sapiens
  misc_RNA (1)...(19): siRNA sense strand
aguguaaaguggucaaaug

SEQ ID NO: 1168401 - RNA, 19 nt, Homo sapiens
  misc_RNA (1)...(19): siRNA sense strand
ccacccauacuauuuguga

SEQ ID NO: 1168402 - RNA, 19 nt, Homo sapiens
  misc_RNA (1)...(19): siRNA sense strand
uuggagagagcacgauuua

SEQ ID NO: 1168403 - RNA, 19 nt, Homo sapiens
  misc_RNA (1)...(19): siRNA sense strand
gguuaucagaugcacuuua

SEQ ID NO: 1168404 - RNA, 19 nt, Homo sapiens
  misc_RNA (1)...(19): siRNA sense strand
caccaacauuugaagcuau

SEQ ID NO: 1168405 - RNA, 19 nt, Homo sapiens
  misc_RNA (1)...(19): siRNA sense strand
ugaggagccaccaacauuu

SEQ ID NO: 1168406 - RNA, 19 nt, Homo sapiens
  misc_RNA (1)...(19): siRNA sense strand
ggaaggaauacuugacagu

SEQ ID NO: 1168407 - RNA, 19 nt, Homo sapiens
  misc_RNA (1)...(19): siRNA sense strand
gaggaaggaauacuugaca

SEQ ID NO: 1168408 - RNA, 19 nt, Homo sapiens
  misc_RNA (1)...(19): siRNA sense strand
ccaguuccaaagugucuua

SEQ ID NO: 1168409 - RNA, 19 nt, Homo sapiens
  misc_RNA (1)...(19): siRNA sense strand
ugaguaucuugaugcagua

SEQ ID NO: 1168410 - RNA, 19 nt, Homo sapiens
  misc_RNA (1)...(19): siRNA sense strand
caccuuuagugaaguagaa

SEQ ID NO: 1168411 - RNA, 19 nt, Homo sapiens
  misc_RNA (1)...(19): siRNA sense strand
acagauaucaggauuugga

SEQ ID NO: 1168412 - RNA, 19 nt, Homo sapiens
  misc_RNA (1)...(19): siRNA sense strand
ucauugcugugauuguuau

SEQ ID NO: 1168413 - RNA, 19 nt, Homo sapiens
  misc_RNA (1)...(19): siRNA sense strand
ucagaugcacuuuauuugu

SEQ ID NO: 1168414 - RNA, 19 nt, Homo sapiens
  misc_RNA (1)...(19): siRNA sense strand
gugcugcuccagaguguaa

SEQ ID NO: 1168415 - RNA, 19 nt, Homo sapiens
  misc_RNA (1)...(19): siRNA sense strand
ggaaaacacaccuuuagug

SEQ ID NO: 1168416 - RNA, 19 nt, Homo sapiens
  misc_RNA (1)...(19): siRNA sense strand
aaggaucaguagcaauuug

SEQ ID NO: 1168417 - RNA, 19 nt, Homo sapiens
  misc_RNA (1)...(19): siRNA sense strand
uauauacgggauccuuuaa

SEQ ID NO: 1168418 - RNA, 19 nt, Homo sapiens
  misc_RNA (1)...(19): siRNA sense strand
ugaaguagaaguauuugag

SEQ ID NO: 1168419 - RNA, 19 nt, Homo sapiens
  misc_RNA (1)...(19): siRNA sense strand
cuugacaguuuggauguuu

SEQ ID NO: 1168420 - RNA, 19 nt, Homo sapiens
  misc_RNA (1)...(19): siRNA sense strand
cauauauacgggauccuuu

SEQ ID NO: 1168421 - RNA, 19 nt, Homo sapiens
  misc_RNA (1)...(19): siRNA sense strand
auauauacgggauccuuua

SEQ ID NO: 1168422 - RNA, 19 nt, Homo sapiens
  misc_RNA (1)...(19): siRNA sense strand
cuuaaaggaucaguagcaa

SEQ ID NO: 1168423 - RNA, 19 nt, Homo sapiens
  misc_RNA (1)...(19): siRNA sense strand
uaaaccugaggaaggaaua

SEQ ID NO: 1168424 - RNA, 19 nt, Homo sapiens
  misc_RNA (1)...(19): siRNA sense strand
agaugacgccuguuauaga

SEQ ID NO: 1168425 - RNA, 19 nt, Homo sapiens
  misc_RNA (1)...(19): siRNA sense strand
ugugauuguuauugccaua

SEQ ID NO: 1168426 - RNA, 19 nt, Homo sapiens
  misc_RNA (1)...(19): siRNA sense strand
gagagcacgauuuauugug

SEQ ID NO: 1168427 - RNA, 19 nt, Homo sapiens
  misc_RNA (1)...(19): siRNA sense strand
gaaguauuugaguaucuug

SEQ ID NO: 1168428 - RNA, 19 nt, Homo sapiens
  misc_RNA (1)...(19): siRNA sense strand
ggcuaccugucucagauga

SEQ ID NO: 1168429 - RNA, 19 nt, Homo sapiens
  misc_RNA (1)...(19): siRNA sense strand
gauaucaggauuuggaaaa

SEQ ID NO: 1168430 - RNA, 19 nt, Homo sapiens
  misc_RNA (1)...(19): siRNA sense strand
ccucuugccacccauacua

SEQ ID NO: 1168431 - RNA, 19 nt, Homo sapiens
  misc_RNA (1)...(19): siRNA sense strand
ccaugguguugcugcugua

SEQ ID NO: 1168432 - RNA, 19 nt, Homo sapiens
  misc_RNA (1)...(19): siRNA sense strand
cagaugacgccuguuauag

SEQ ID NO: 1168433 - RNA, 19 nt, Homo sapiens
  misc_RNA (1)...(19): siRNA sense strand
cagaugguggagcugaaua

SEQ ID NO: 1168434 - RNA, 19 nt, Homo sapiens
  misc_RNA (1)...(19): siRNA sense strand
gucauugcugugauuguua

SEQ ID NO: 1168435 - RNA, 19 nt, Homo sapiens
  misc_RNA (1)...(19): siRNA sense strand
ggagccaccaacauuugaa

SEQ ID NO: 1168436 - RNA, 19 nt, Homo sapiens
  misc_RNA (1)...(19): siRNA sense strand
uuggugaacgaguagauua

SEQ ID NO: 1168437 - RNA, 19 nt, Homo sapiens
  misc_RNA (1)...(19): siRNA sense strand
gcgcuuuccuggguugcuu

SEQ ID NO: 1168438 - RNA, 19 nt, Homo sapiens
  misc_RNA (1)...(19): siRNA sense strand
uacuacaaagcaacaguua

SEQ ID NO: 1168439 - RNA, 19 nt, Homo sapiens
  misc_RNA (1)...(19): siRNA sense strand
cuugaugcaguaacuuaua

SEQ ID NO: 1168440 - RNA, 19 nt, Homo sapiens
  misc_RNA (1)...(19): siRNA sense strand
aaacauguccauauauacg

SEQ ID NO: 1168441 - RNA, 19 nt, Homo sapiens
  misc_RNA (1)...(19): siRNA sense strand
guguaaaguggucaaaugu

SEQ ID NO: 1168442 - RNA, 19 nt, Homo sapiens
  misc_RNA (1)...(19): siRNA sense strand
cuuacgaguuugguuauca

SEQ ID NO: 1168443 - RNA, 19 nt, Homo sapiens
  misc_RNA (1)...(19): siRNA sense strand
uacgggauccuuuaaaugg

SEQ ID NO: 1168444 - RNA, 19 nt, Homo sapiens
  misc_RNA (1)...(19): siRNA sense strand
gcagaugguggagcugaau

SEQ ID NO: 1168445 - RNA, 19 nt, Homo sapiens
  misc_RNA (1)...(19): siRNA sense strand
aaccaaaacccuacuauga

SEQ ID NO: 1168446 - RNA, 19 nt, Homo sapiens
  misc_RNA (1)...(19): siRNA sense strand
uugaugcaguaacuuauag

SEQ ID NO: 1168447 - RNA, 19 nt, Homo sapiens
  misc_RNA (1)...(19): siRNA sense strand
ggagcugaauaugccacuu

SEQ ID NO: 1168448 - RNA, 19 nt, Homo sapiens
  misc_RNA (1)...(19): siRNA sense strand
cgauggcagcgacacaauu

SEQ ID NO: 1168449 - RNA, 19 nt, Homo sapiens
  misc_RNA (1)...(19): siRNA sense strand
gauccauuuucacuuauug

SEQ ID NO: 1168450 - RNA, 19 nt, Homo sapiens
  misc_RNA (1)...(19): siRNA sense strand
ggagagagcacgauuuauu

SEQ ID NO: 1168451 - RNA, 19 nt, Homo sapiens
  misc_RNA (1)...(19): siRNA sense strand
agagaaacauguccauaua

SEQ ID NO: 1168452 - RNA, 19 nt, Homo sapiens
  misc_RNA (1)...(19): siRNA sense strand
cagaugcacuuuauuugua

SEQ ID NO: 1168453 - RNA, 19 nt, Homo sapiens
  misc_RNA (1)...(19): siRNA sense strand
ggacuuacgaguuugguua

SEQ ID NO: 1168454 - RNA, 19 nt, Homo sapiens
  misc_RNA (1)...(19): siRNA sense strand
aaacagauaucaggauuug

SEQ ID NO: 1168455 - RNA, 19 nt, Homo sapiens
  misc_RNA (1)...(19): siRNA sense strand
cuauggagcucauugguaa

SEQ ID NO: 1168456 - RNA, 19 nt, Homo sapiens
  misc_RNA (1)...(19): siRNA sense strand
aaacacaccuuuagugaag

SEQ ID NO: 1168457 - RNA, 19 nt, Homo sapiens
  misc_RNA (1)...(19): siRNA sense strand
gaacuuaaaggaucaguag

SEQ ID NO: 1168458 - RNA, 19 nt, Homo sapiens
  misc_RNA (1)...(19): siRNA sense strand
gaaaacagauaucaggauu

SEQ ID NO: 1168459 - RNA, 19 nt, Homo sapiens
  misc_RNA (1)...(19): siRNA sense strand
uaaaggaucaguagcaauu

SEQ ID NO: 1168460 - RNA, 19 nt, Homo sapiens
  misc_RNA (1)...(19): siRNA sense strand
aaaugggacuuacgaguuu

SEQ ID NO: 1168461 - RNA, 19 nt, Homo sapiens
  misc_RNA (1)...(19): siRNA sense strand
guuaucagaugcacuuuau

SEQ ID NO: 1168462 - RNA, 19 nt, Homo sapiens
  misc_RNA (1)...(19): siRNA sense strand
gagcugaauaugccacuua

SEQ ID NO: 1168463 - RNA, 19 nt, Homo sapiens
  misc_RNA (1)...(19): siRNA sense strand
ugagauuggugaacgagua

SEQ ID NO: 1168464 - RNA, 19 nt, Homo sapiens
  misc_RNA (1)...(19): siRNA sense strand
gugaacgaguagauuauaa

SEQ ID NO: 1168465 - RNA, 19 nt, Homo sapiens
  misc_RNA (1)...(19): siRNA sense strand
gagagagcacgauuuauug

SEQ ID NO: 1168466 - RNA, 19 nt, Homo sapiens
  misc_RNA (1)...(19): siRNA sense strand
caaaugggacuuacgaguu

SEQ ID NO: 1168467 - RNA, 19 nt, Homo sapiens
  misc_RNA (1)...(19): siRNA sense strand
ggucauugcugugauuguu

SEQ ID NO: 1168468 - RNA, 19 nt, Homo sapiens
  misc_RNA (1)...(19): siRNA sense strand
ccagauccauuuucacuua

SEQ ID NO: 1168469 - RNA, 19 nt, Homo sapiens
  misc_RNA (1)...(19): siRNA sense strand
gaaggaauacuugacaguu

SEQ ID NO: 1168470 - RNA, 19 nt, Homo sapiens
  misc_RNA (1)...(19): siRNA sense strand
aaggaauacuugacaguuu

SEQ ID NO: 1168471 - RNA, 19 nt, Homo sapiens
  misc_RNA (1)...(19): siRNA sense strand
ucagaugacgccuguuaua

SEQ ID NO: 1168472 - RNA, 19 nt, Homo sapiens
  misc_RNA (1)...(19): siRNA sense strand
gaaaacacaccuuuaguga

SEQ ID NO: 1168473 - RNA, 19 nt, Homo sapiens
  misc_RNA (1)...(19): siRNA sense strand
gaugacgccuguuauagag

SEQ ID NO: 1168474 - RNA, 19 nt, Homo sapiens
  misc_RNA (1)...(19): siRNA sense strand
gagaaacauguccauauau

SEQ ID NO: 1168475 - RNA, 19 nt, Homo sapiens
  misc_RNA (1)...(19): siRNA sense strand
ccacuuaccagacuaaauc

SEQ ID NO: 1168476 - RNA, 19 nt, Homo sapiens
  misc_RNA (1)...(19): siRNA sense strand
acgaguagauuauaagugu

SEQ ID NO: 1168477 - RNA, 19 nt, Homo sapiens
  misc_RNA (1)...(19): siRNA sense strand
cuacaaagcaacaguuaug

SEQ ID NO: 1168478 - RNA, 19 nt, Homo sapiens
  misc_RNA (1)...(19): siRNA sense strand
ccaccaacauuugaagcua

SEQ ID NO: 1168479 - RNA, 19 nt, Homo sapiens
  misc_RNA (1)...(19): siRNA sense strand
uauacgggauccuuuaaau

SEQ ID NO: 1168480 - RNA, 19 nt, Homo sapiens
  misc_RNA (1)...(19): siRNA sense strand
cgaguuugguuaucagaug

SEQ ID NO: 1168481 - RNA, 19 nt, Homo sapiens
  misc_RNA (1)...(19): siRNA sense strand
gaacgaguagauuauaagu

SEQ ID NO: 1168482 - RNA, 19 nt, Homo sapiens
  misc_RNA (1)...(19): siRNA sense strand
gugaggagccaccaacauu

SEQ ID NO: 1168483 - RNA, 19 nt, Homo sapiens
  misc_RNA (1)...(19): siRNA sense strand
gauggcagcgacacaauug

SEQ ID NO: 1168484 - RNA, 19 nt, Homo sapiens
  misc_RNA (1)...(19): siRNA sense strand
ucucagaugacgccuguua

SEQ ID NO: 1168485 - RNA, 19 nt, Homo sapiens
  misc_RNA (1)...(19): siRNA sense strand
gaggagccaccaacauuug

SEQ ID NO: 1168486 - RNA, 19 nt, Homo sapiens
  misc_RNA (1)...(19): siRNA sense strand
gcuauggagcucauuggua

SEQ ID NO: 1168487 - RNA, 19 nt, Homo sapiens
  misc_RNA (1)...(19): siRNA sense strand
acacaccuuuagugaagua

SEQ ID NO: 1168488 - RNA, 19 nt, Homo sapiens
  misc_RNA (1)...(19): siRNA sense strand
uagagaaacauguccauau

SEQ ID NO: 1168489 - RNA, 19 nt, Homo sapiens
  misc_RNA (1)...(19): siRNA sense strand
guuccaaagugucuuaaag

SEQ ID NO: 1168490 - RNA, 19 nt, Homo sapiens
  misc_RNA (1)...(19): siRNA sense strand
ggugaacgaguagauuaua

SEQ ID NO: 1168491 - RNA, 19 nt, Homo sapiens
  misc_RNA (1)...(19): siRNA sense strand
gaaguagaaguauuugagu

SEQ ID NO: 1168492 - RNA, 19 nt, Homo sapiens
  misc_RNA (1)...(19): siRNA sense strand
gaaacauguccauauauac

SEQ ID NO: 1168493 - RNA, 19 nt, Homo sapiens
  misc_RNA (1)...(19): siRNA sense strand
ugacgccuguuauagagaa

SEQ ID NO: 1168494 - RNA, 19 nt, Homo sapiens
  misc_RNA (1)...(19): siRNA sense strand
cgaguagauuauaagugua

SEQ ID NO: 1168495 - RNA, 19 nt, Homo sapiens
  misc_RNA (1)...(19): siRNA sense strand
gcacuuuauuuguaaugag

SEQ ID NO: 1168496 - RNA, 19 nt, Homo sapiens
  misc_RNA (1)...(19): siRNA sense strand
guagaaguauuugaguauc

SEQ ID NO: 1168497 - RNA, 19 nt, Homo sapiens
  misc_RNA (1)...(19): siRNA sense strand
guauuugaguaucuugaug

SEQ ID NO: 1168498 - RNA, 19 nt, Homo sapiens
  misc_RNA (1)...(19): siRNA sense strand
aggaauacuugacaguuug

SEQ ID NO: 1168499 - RNA, 19 nt, Homo sapiens
  misc_RNA (1)...(19): siRNA sense strand
ccaaaacccuacuaugaga

SEQ ID NO: 1168500 - RNA, 19 nt, Homo sapiens
  misc_RNA (1)...(19): siRNA sense strand
aguguaaaguggucaaaug

SEQ ID NO: 1168501 - RNA, 19 nt, Homo sapiens
  misc_RNA (1)...(19): siRNA sense strand
ccacccauacuauuuguga

SEQ ID NO: 1168502 - RNA, 19 nt, Homo sapiens
  misc_RNA (1)...(19): siRNA sense strand
uuggagagagcacgauuua

SEQ ID NO: 1168503 - RNA, 19 nt, Homo sapiens
  misc_RNA (1)...(19): siRNA sense strand
gguuaucagaugcacuuua

SEQ ID NO: 1168504 - RNA, 19 nt, Homo sapiens
  misc_RNA (1)...(19): siRNA sense strand
caccaacauuugaagcuau

SEQ ID NO: 1168505 - RNA, 19 nt, Homo sapiens
  misc_RNA (1)...(19): siRNA sense strand
ugaggagccaccaacauuu

SEQ ID NO: 1168506 - RNA, 19 nt, Homo sapiens
  misc_RNA (1)...(19): siRNA sense strand
ggaaggaauacuugacagu

SEQ ID NO: 1168507 - RNA, 19 nt, Homo sapiens
  misc_RNA (1)...(19): siRNA sense strand
gaggaaggaauacuugaca

SEQ ID NO: 1168508 - RNA, 19 nt, Homo sapiens
  misc_RNA (1)...(19): siRNA sense strand
ccaguuccaaagugucuua

SEQ ID NO: 1168509 - RNA, 19 nt, Homo sapiens
  misc_RNA (1)...(19): siRNA sense strand
ugaguaucuugaugcagua

SEQ ID NO: 1168510 - RNA, 19 nt, Homo sapiens
  misc_RNA (1)...(19): siRNA sense strand
caccuuuagugaaguagaa

SEQ ID NO: 1168511 - RNA, 19 nt, Homo sapiens
  misc_RNA (1)...(19): siRNA sense strand
acagauaucaggauuugga

SEQ ID NO: 1168512 - RNA, 19 nt, Homo sapiens
  misc_RNA (1)...(19): siRNA sense strand
ucauugcugugauuguuau

SEQ ID NO: 1168513 - RNA, 19 nt, Homo sapiens
  misc_RNA (1)...(19): siRNA sense strand
ucagaugcacuuuauuugu

SEQ ID NO: 1168514 - RNA, 19 nt, Homo sapiens
  misc_RNA (1)...(19): siRNA sense strand
gugcugcuccagaguguaa

SEQ ID NO: 1168515 - RNA, 19 nt, Homo sapiens
  misc_RNA (1)...(19): siRNA sense strand
ggaaaacacaccuuuagug

SEQ ID NO: 1168516 - RNA, 19 nt, Homo sapiens
  misc_RNA (1)...(19): siRNA sense strand
aaggaucaguagcaauuug

SEQ ID NO: 1168517 - RNA, 19 nt, Homo sapiens
  misc_RNA (1)...(19): siRNA sense strand
uauauacgggauccuuuaa

SEQ ID NO: 1168518 - RNA, 19 nt, Homo sapiens
  misc_RNA (1)...(19): siRNA sense strand
ugaaguagaaguauuugag

SEQ ID NO: 1168519 - RNA, 19 nt, Homo sapiens
  misc_RNA (1)...(19): siRNA sense strand
cuugacaguuuggauguuu

SEQ ID NO: 1168520 - RNA, 19 nt, Homo sapiens
  misc_RNA (1)...(19): siRNA sense strand
cauauauacgggauccuuu

SEQ ID NO: 1168521 - RNA, 19 nt, Homo sapiens
  misc_RNA (1)...(19): siRNA sense strand
auauauacgggauccuuua

SEQ ID NO: 1168522 - RNA, 19 nt, Homo sapiens
  misc_RNA (1)...(19): siRNA sense strand
cuuaaaggaucaguagcaa

SEQ ID NO: 1168523 - RNA, 19 nt, Homo sapiens
  misc_RNA (1)...(19): siRNA sense strand
uaaaccugaggaaggaaua

SEQ ID NO: 1168524 - RNA, 19 nt, Homo sapiens
  misc_RNA (1)...(19): siRNA sense strand
agaugacgccuguuauaga

SEQ ID NO: 1168525 - RNA, 19 nt, Homo sapiens
  misc_RNA (1)...(19): siRNA sense strand
ugugauuguuauugccaua

SEQ ID NO: 1168526 - RNA, 19 nt, Homo sapiens
  misc_RNA (1)...(19): siRNA sense strand
gagagcacgauuuauugug

SEQ ID NO: 1168527 - RNA, 19 nt, Homo sapiens
  misc_RNA (1)...(19): siRNA sense strand
gaaguauuugaguaucuug

SEQ ID NO: 1168528 - RNA, 19 nt, Homo sapiens
  misc_RNA (1)...(19): siRNA sense strand
ggcuaccugucucagauga

SEQ ID NO: 1168529 - RNA, 19 nt, Homo sapiens
  misc_RNA (1)...(19): siRNA sense strand
gauaucaggauuuggaaaa

SEQ ID NO: 1168530 - RNA, 19 nt, Homo sapiens
  misc_RNA (1)...(19): siRNA sense strand
ccucuugccacccauacua

SEQ ID NO: 1168531 - RNA, 19 nt, Homo sapiens
  misc_RNA (1)...(19): siRNA sense strand
ccaugguguugcugcugua

SEQ ID NO: 1168532 - RNA, 19 nt, Homo sapiens
  misc_RNA (1)...(19): siRNA sense strand
cagaugacgccuguuauag

SEQ ID NO: 1168533 - RNA, 19 nt, Homo sapiens
  misc_RNA (1)...(19): siRNA sense strand
cagaugguggagcugaaua

SEQ ID NO: 1168534 - RNA, 19 nt, Homo sapiens
  misc_RNA (1)...(19): siRNA sense strand
gucauugcugugauuguua

SEQ ID NO: 1168535 - RNA, 19 nt, Homo sapiens
  misc_RNA (1)...(19): siRNA sense strand
ggagccaccaacauuugaa

SEQ ID NO: 1168536 - RNA, 19 nt, Homo sapiens
  misc_RNA (1)...(19): siRNA sense strand
uuggugaacgaguagauua

SEQ ID NO: 1168537 - RNA, 19 nt, Homo sapiens
  misc_RNA (1)...(19): siRNA sense strand
gcgcuuuccuggguugcuu

SEQ ID NO: 1168538 - RNA, 19 nt, Homo sapiens
  misc_RNA (1)...(19): siRNA sense strand
uacuacaaagcaacaguua

SEQ ID NO: 1168539 - RNA, 19 nt, Homo sapiens
  misc_RNA (1)...(19): siRNA sense strand
cuugaugcaguaacuuaua

SEQ ID NO: 1168540 - RNA, 19 nt, Homo sapiens
  misc_RNA (1)...(19): siRNA sense strand
aaacauguccauauauacg

SEQ ID NO: 1168541 - RNA, 19 nt, Homo sapiens
  misc_RNA (1)...(19): siRNA sense strand
guguaaaguggucaaaugu

SEQ ID NO: 1168542 - RNA, 19 nt, Homo sapiens
  misc_RNA (1)...(19): siRNA sense strand
cuuacgaguuugguuauca

SEQ ID NO: 1168543 - RNA, 19 nt, Homo sapiens
  misc_RNA (1)...(19): siRNA sense strand
uacgggauccuuuaaaugg

SEQ ID NO: 1168544 - RNA, 19 nt, Homo sapiens
  misc_RNA (1)...(19): siRNA sense strand
gcagaugguggagcugaau

SEQ ID NO: 1168545 - RNA, 19 nt, Homo sapiens
  misc_RNA (1)...(19): siRNA sense strand
aaccaaaacccuacuauga

SEQ ID NO: 1168546 - RNA, 19 nt, Homo sapiens
  misc_RNA (1)...(19): siRNA sense strand
uugaugcaguaacuuauag

SEQ ID NO: 1168547 - RNA, 19 nt, Homo sapiens
  misc_RNA (1)...(19): siRNA sense strand
ggagcugaauaugccacuu

SEQ ID NO: 1168548 - RNA, 19 nt, Homo sapiens
  misc_RNA (1)...(19): siRNA sense strand
cgauggcagcgacacaauu

SEQ ID NO: 1168549 - RNA, 19 nt, Homo sapiens
  misc_RNA (1)...(19): siRNA sense strand
gauccauuuucacuuauug

SEQ ID NO: 1168550 - RNA, 19 nt, Homo sapiens
  misc_RNA (1)...(19): siRNA sense strand
ggaaacuccuucacaagaa

SEQ ID NO: 1168551 - RNA, 19 nt, Homo sapiens
  misc_RNA (1)...(19): siRNA sense strand
gaaacuccuucacaagaaa

SEQ ID NO: 1168552 - RNA, 19 nt, Homo sapiens
  misc_RNA (1)...(19): siRNA sense strand
uggcaaagcuuuagacaug

SEQ ID NO: 1168553 - RNA, 19 nt, Homo sapiens
  misc_RNA (1)...(19): siRNA sense strand
gggaggaaguugccuugua

SEQ ID NO: 1168554 - RNA, 19 nt, Homo sapiens
  misc_RNA (1)...(19): siRNA sense strand
uuaaagagcuggcacagau

SEQ ID NO: 1168555 - RNA, 19 nt, Homo sapiens
  misc_RNA (1)...(19): siRNA sense strand
gccaggaaguuguagauuu

SEQ ID NO: 1168556 - RNA, 19 nt, Homo sapiens
  misc_RNA (1)...(19): siRNA sense strand
ggaggaugcucacaacugu

SEQ ID NO: 1168557 - RNA, 19 nt, Homo sapiens
  misc_RNA (1)...(19): siRNA sense strand
uggaagagcugcuggauca

SEQ ID NO: 1168558 - RNA, 19 nt, Homo sapiens
  misc_RNA (1)...(19): siRNA sense strand
acagaaggcuuuagaagau

SEQ ID NO: 1168559 - RNA, 19 nt, Homo sapiens
  misc_RNA (1)...(19): siRNA sense strand
aagaugauguggacaauga

SEQ ID NO: 1168560 - RNA, 19 nt, Homo sapiens
  misc_RNA (1)...(19): siRNA sense strand
cugaagaagucauuaaaga

SEQ ID NO: 1168561 - RNA, 19 nt, Homo sapiens
  misc_RNA (1)...(19): siRNA sense strand
gaacuagcacgcaucaaga

SEQ ID NO: 1168562 - RNA, 19 nt, Homo sapiens
  misc_RNA (1)...(19): siRNA sense strand
ggaggaaguugccuuguac

SEQ ID NO: 1168563 - RNA, 19 nt, Homo sapiens
  misc_RNA (1)...(19): siRNA sense strand
ccaggaaguuguagauuuc

SEQ ID NO: 1168564 - RNA, 19 nt, Homo sapiens
  misc_RNA (1)...(19): siRNA sense strand
caaauugaccacugaagaa

SEQ ID NO: 1168565 - RNA, 19 nt, Homo sapiens
  misc_RNA (1)...(19): siRNA sense strand
gggaagcaguugauuguag

SEQ ID NO: 1168566 - RNA, 19 nt, Homo sapiens
  misc_RNA (1)...(19): siRNA sense strand
aaaaguagcugaugaagau

SEQ ID NO: 1168567 - RNA, 19 nt, Homo sapiens
  misc_RNA (1)...(19): siRNA sense strand
caaaccagaggaugaagua

SEQ ID NO: 1168568 - RNA, 19 nt, Homo sapiens
  misc_RNA (1)...(19): siRNA sense strand
ccacugaggaugaagauga

SEQ ID NO: 1168569 - RNA, 19 nt, Homo sapiens
  misc_RNA (1)...(19): siRNA sense strand
gggaaacuccuucacaaga

SEQ ID NO: 1168570 - RNA, 19 nt, Homo sapiens
  misc_RNA (1)...(19): siRNA sense strand
agaggacgaugaagaagaa

SEQ ID NO: 1168571 - RNA, 19 nt, Homo sapiens
  misc_RNA (1)...(19): siRNA sense strand
ggaagaagaggaagacagu

SEQ ID NO: 1168572 - RNA, 19 nt, Homo sapiens
  misc_RNA (1)...(19): siRNA sense strand
ucagaaggccuacaaggaa

SEQ ID NO: 1168573 - RNA, 19 nt, Homo sapiens
  misc_RNA (1)...(19): siRNA sense strand
gagggaagcaguugauugu

SEQ ID NO: 1168574 - RNA, 19 nt, Homo sapiens
  misc_RNA (1)...(19): siRNA sense strand
ggacgaugaagaagaagaa

SEQ ID NO: 1168575 - RNA, 19 nt, Homo sapiens
  misc_RNA (1)...(19): siRNA sense strand
gaggcuaccaugacuauug

SEQ ID NO: 1168576 - RNA, 19 nt, Homo sapiens
  misc_RNA (1)...(19): siRNA sense strand
gagcuucgguuauugucau

SEQ ID NO: 1168577 - RNA, 19 nt, Homo sapiens
  misc_RNA (1)...(19): siRNA sense strand
gagcagccaggaaguugua

SEQ ID NO: 1168578 - RNA, 19 nt, Homo sapiens
  misc_RNA (1)...(19): siRNA sense strand
gcaaagcuuuagacauguc

SEQ ID NO: 1168579 - RNA, 19 nt, Homo sapiens
  misc_RNA (1)...(19): siRNA sense strand
ugaagaggacgaugaagaa

SEQ ID NO: 1168580 - RNA, 19 nt, Homo sapiens
  misc_RNA (1)...(19): siRNA sense strand
gcagugaggaggcagagaa

SEQ ID NO: 1168581 - RNA, 19 nt, Homo sapiens
  misc_RNA (1)...(19): siRNA sense strand
uagggaaacuccuucacaa

SEQ ID NO: 1168582 - RNA, 19 nt, Homo sapiens
  misc_RNA (1)...(19): siRNA sense strand
ugaccugcaucaucauuug

SEQ ID NO: 1168583 - RNA, 19 nt, Homo sapiens
  misc_RNA (1)...(19): siRNA sense strand
gcuauugacgccaaauuga

SEQ ID NO: 1168584 - RNA, 19 nt, Homo sapiens
  misc_RNA (1)...(19): siRNA sense strand
gaaccugccaccugaggaa

SEQ ID NO: 1168585 - RNA, 19 nt, Homo sapiens
  misc_RNA (1)...(19): siRNA sense strand
cuuuagacauguccuauga

SEQ ID NO: 1168586 - RNA, 19 nt, Homo sapiens
  misc_RNA (1)...(19): siRNA sense strand
ccacugaagaagucauuaa

SEQ ID NO: 1168587 - RNA, 19 nt, Homo sapiens
  misc_RNA (1)...(19): siRNA sense strand
ccaaauugaccacugaaga

SEQ ID NO: 1168588 - RNA, 19 nt, Homo sapiens
  misc_RNA (1)...(19): siRNA sense strand
ggaaguuguagauuucauu

SEQ ID NO: 1168589 - RNA, 19 nt, Homo sapiens
  misc_RNA (1)...(19): siRNA sense strand
gaagaggcuaccaugacua

SEQ ID NO: 1168590 - RNA, 19 nt, Homo sapiens
  misc_RNA (1)...(19): siRNA sense strand
ggacucaacuagggaaacu

SEQ ID NO: 1168591 - RNA, 19 nt, Homo sapiens
  misc_RNA (1)...(19): siRNA sense strand
gcagagcuccagccagaga

SEQ ID NO: 1168592 - RNA, 19 nt, Homo sapiens
  misc_RNA (1)...(19): siRNA sense strand
uuccugagcuggacaguga

SEQ ID NO: 1168593 - RNA, 19 nt, Homo sapiens
  misc_RNA (1)...(19): siRNA sense strand
ggacagugaggaugaguca

SEQ ID NO: 1168594 - RNA, 19 nt, Homo sapiens
  misc_RNA (1)...(19): siRNA sense strand
ggaagacagugaggaaugc

SEQ ID NO: 1168595 - RNA, 19 nt, Homo sapiens
  misc_RNA (1)...(19): siRNA sense strand
ggaaguugccuuguacugu

SEQ ID NO: 1168596 - RNA, 19 nt, Homo sapiens
  misc_RNA (1)...(19): siRNA sense strand
gaaguuguagauuucauuc

SEQ ID NO: 1168597 - RNA, 19 nt, Homo sapiens
  misc_RNA (1)...(19): siRNA sense strand
gugaggaggcagagaauga

SEQ ID NO: 1168598 - RNA, 19 nt, Homo sapiens
  misc_RNA (1)...(19): siRNA sense strand
cgaugaagaagaagaagaa

SEQ ID NO: 1168599 - RNA, 19 nt, Homo sapiens
  misc_RNA (1)...(19): siRNA sense strand
gaagaagaagaagagauga

SEQ ID NO: 1168600 - RNA, 19 nt, Homo sapiens
  misc_RNA (1)...(19): siRNA sense strand
gacaagcugccucgaguug

SEQ ID NO: 1168601 - RNA, 19 nt, Homo sapiens
  misc_RNA (1)...(19): siRNA sense strand
caucaucauuugcuucaag

SEQ ID NO: 1168602 - RNA, 19 nt, Homo sapiens
  misc_RNA (1)...(19): siRNA sense strand
cauguccuaugaucacaaa

SEQ ID NO: 1168603 - RNA, 19 nt, Homo sapiens
  misc_RNA (1)...(19): siRNA sense strand
cagaugaggcggaggaaga

SEQ ID NO: 1168604 - RNA, 19 nt, Homo sapiens
  misc_RNA (1)...(19): siRNA sense strand
ugaagaggcuaccaugacu

SEQ ID NO: 1168605 - RNA, 19 nt, Homo sapiens
  misc_RNA (1)...(19): siRNA sense strand
gcaacagcgacaagaagaa

SEQ ID NO: 1168606 - RNA, 19 nt, Homo sapiens
  misc_RNA (1)...(19): siRNA sense strand
ucacugacgaccaugaauu

SEQ ID NO: 1168607 - RNA, 19 nt, Homo sapiens
  misc_RNA (1)...(19): siRNA sense strand
agaagaagaagaagagaug

SEQ ID NO: 1168608 - RNA, 19 nt, Homo sapiens
  misc_RNA (1)...(19): siRNA sense strand
cagagaaugaggaagauga

SEQ ID NO: 1168609 - RNA, 19 nt, Homo sapiens
  misc_RNA (1)...(19): siRNA sense strand
ucacaaaccagaggaugaa

SEQ ID NO: 1168610 - RNA, 19 nt, Homo sapiens
  misc_RNA (1)...(19): siRNA sense strand
cuacaaggaaggcaagcua

SEQ ID NO: 1168611 - RNA, 19 nt, Homo sapiens
  misc_RNA (1)...(19): siRNA sense strand
aggaggugcucucuacuga

SEQ ID NO: 1168612 - RNA, 19 nt, Homo sapiens
  misc_RNA (1)...(19): siRNA sense strand
guacugugccaaauaucuu

SEQ ID NO: 1168613 - RNA, 19 nt, Homo sapiens
  misc_RNA (1)...(19): siRNA sense strand
ggaccacuucuauaagaga

SEQ ID NO: 1168614 - RNA, 19 nt, Homo sapiens
  misc_RNA (1)...(19): siRNA sense strand
uuagacauguccuaugauc

SEQ ID NO: 1168615 - RNA, 19 nt, Homo sapiens
  misc_RNA (1)...(19): siRNA sense strand
uacagaaggcuuuagaaga

SEQ ID NO: 1168616 - RNA, 19 nt, Homo sapiens
  misc_RNA (1)...(19): siRNA sense strand
ugaagaagaagaagaagag

SEQ ID NO: 1168617 - RNA, 19 nt, Homo sapiens
  misc_RNA (1)...(19): siRNA sense strand
aggcuaccaugacuauuga

SEQ ID NO: 1168618 - RNA, 19 nt, Homo sapiens
  misc_RNA (1)...(19): siRNA sense strand
gaagaagaagaagaagaga

SEQ ID NO: 1168619 - RNA, 19 nt, Homo sapiens
  misc_RNA (1)...(19): siRNA sense strand
gaaugaggaagaugaggau

SEQ ID NO: 1168620 - RNA, 19 nt, Homo sapiens
  misc_RNA (1)...(19): siRNA sense strand
cagaaggcuuuagaagaug

SEQ ID NO: 1168621 - RNA, 19 nt, Homo sapiens
  misc_RNA (1)...(19): siRNA sense strand
cuuguacugugccaaauau

SEQ ID NO: 1168622 - RNA, 19 nt, Homo sapiens
  misc_RNA (1)...(19): siRNA sense strand
accagaggaugaaguagaa

SEQ ID NO: 1168623 - RNA, 19 nt, Homo sapiens
  misc_RNA (1)...(19): siRNA sense strand
uaccaugacuauugaagag

SEQ ID NO: 1168624 - RNA, 19 nt, Homo sapiens
  misc_RNA (1)...(19): siRNA sense strand
ugaagaugauguggacaau

SEQ ID NO: 1168625 - RNA, 19 nt, Homo sapiens
  misc_RNA (1)...(19): siRNA sense strand
aagaagaggaagacaguga

SEQ ID NO: 1168626 - RNA, 19 nt, Homo sapiens
  misc_RNA (1)...(19): siRNA sense strand
gaagagcugcuggaucagu

SEQ ID NO: 1168627 - RNA, 19 nt, Homo sapiens
  misc_RNA (1)...(19): siRNA sense strand
cgagggaagcaguugauug

SEQ ID NO: 1168628 - RNA, 19 nt, Homo sapiens
  misc_RNA (1)...(19): siRNA sense strand
ggaggcagagaaugaggaa

SEQ ID NO: 1168629 - RNA, 19 nt, Homo sapiens
  misc_RNA (1)...(19): siRNA sense strand
gaagaugauguggacaaug

SEQ ID NO: 1168630 - RNA, 19 nt, Homo sapiens
  misc_RNA (1)...(19): siRNA sense strand
ggcaacagcgacaagaaga

SEQ ID NO: 1168631 - RNA, 19 nt, Homo sapiens
  misc_RNA (1)...(19): siRNA sense strand
guagaacuagcacgcauca

SEQ ID NO: 1168632 - RNA, 19 nt, Homo sapiens
  misc_RNA (1)...(19): siRNA sense strand
gugaggaugagucagauga

SEQ ID NO: 1168633 - RNA, 19 nt, Homo sapiens
  misc_RNA (1)...(19): siRNA sense strand
aaagagcuggcacagauug

SEQ ID NO: 1168634 - RNA, 19 nt, Homo sapiens
  misc_RNA (1)...(19): siRNA sense strand
ggaaggcaagcuacagaag

SEQ ID NO: 1168635 - RNA, 19 nt, Homo sapiens
  misc_RNA (1)...(19): siRNA sense strand
gaugagcagccaggaaguu

SEQ ID NO: 1168636 - RNA, 19 nt, Homo sapiens
  misc_RNA (1)...(19): siRNA sense strand
ggggaccacuucuauaaga

SEQ ID NO: 1168637 - RNA, 19 nt, Homo sapiens
  misc_RNA (1)...(19): siRNA sense strand
guggcaaggucaccaugga

SEQ ID NO: 1168638 - RNA, 19 nt, Homo sapiens
  misc_RNA (1)...(19): siRNA sense strand
gaugccuucuuggcuauug

SEQ ID NO: 1168639 - RNA, 19 nt, Homo sapiens
  misc_RNA (1)...(19): siRNA sense strand
uaaagagcuggcacagauu

SEQ ID NO: 1168640 - RNA, 19 nt, Homo sapiens
  misc_RNA (1)...(19): siRNA sense strand
gacaacaugaccugcauca

SEQ ID NO: 1168641 - RNA, 19 nt, Homo sapiens
  misc_RNA (1)...(19): siRNA sense strand
guacagggugugacaacau

SEQ ID NO: 1168642 - RNA, 19 nt, Homo sapiens
  misc_RNA (1)...(19): siRNA sense strand
ggaugaaguagaacuagca

SEQ ID NO: 1168643 - RNA, 19 nt, Homo sapiens
  misc_RNA (1)...(19): siRNA sense strand
cuaaguccaaguucuuuga

SEQ ID NO: 1168644 - RNA, 19 nt, Homo sapiens
  misc_RNA (1)...(19): siRNA sense strand
gauaucaucaaagaucaga

SEQ ID NO: 1168645 - RNA, 19 nt, Homo sapiens
  misc_RNA (1)...(19): siRNA sense strand
cacugaggaugaagaugaa

SEQ ID NO: 1168646 - RNA, 19 nt, Homo sapiens
  misc_RNA (1)...(19): siRNA sense strand
ugaagaagucauuaaagag

SEQ ID NO: 1168647 - RNA, 19 nt, Homo sapiens
  misc_RNA (1)...(19): siRNA sense strand
gaggaggugcucucuacug

SEQ ID NO: 1168648 - RNA, 19 nt, Homo sapiens
  misc_RNA (1)...(19): siRNA sense strand
uacagggugugacaacaug

SEQ ID NO: 1168649 - RNA, 19 nt, Homo sapiens
  misc_RNA (1)...(19): siRNA sense strand
gaagaggacgaugaagaag

SEQ ID NO: 1168650 - RNA, 19 nt, Homo sapiens
  misc_RNA (1)...(19): siRNA sense strand
ggaaacuccuucacaagaa

SEQ ID NO: 1168651 - RNA, 19 nt, Homo sapiens
  misc_RNA (1)...(19): siRNA sense strand
gaaacuccuucacaagaaa

SEQ ID NO: 1168652 - RNA, 19 nt, Homo sapiens
  misc_RNA (1)...(19): siRNA sense strand
uggcaaagcuuuagacaug

SEQ ID NO: 1168653 - RNA, 19 nt, Homo sapiens
  misc_RNA (1)...(19): siRNA sense strand
gggaggaaguugccuugua

SEQ ID NO: 1168654 - RNA, 19 nt, Homo sapiens
  misc_RNA (1)...(19): siRNA sense strand
uuaaagagcuggcacagau

SEQ ID NO: 1168655 - RNA, 19 nt, Homo sapiens
  misc_RNA (1)...(19): siRNA sense strand
gccaggaaguuguagauuu

SEQ ID NO: 1168656 - RNA, 19 nt, Homo sapiens
  misc_RNA (1)...(19): siRNA sense strand
ggaggaugcucacaacugu

SEQ ID NO: 1168657 - RNA, 19 nt, Homo sapiens
  misc_RNA (1)...(19): siRNA sense strand
uggaagagcugcuggauca

SEQ ID NO: 1168658 - RNA, 19 nt, Homo sapiens
  misc_RNA (1)...(19): siRNA sense strand
acagaaggcuuuagaagau

SEQ ID NO: 1168659 - RNA, 19 nt, Homo sapiens
  misc_RNA (1)...(19): siRNA sense strand
aagaugauguggacaauga

SEQ ID NO: 1168660 - RNA, 19 nt, Homo sapiens
  misc_RNA (1)...(19): siRNA sense strand
cugaagaagucauuaaaga

SEQ ID NO: 1168661 - RNA, 19 nt, Homo sapiens
  misc_RNA (1)...(19): siRNA sense strand
gaacuagcacgcaucaaga

SEQ ID NO: 1168662 - RNA, 19 nt, Homo sapiens
  misc_RNA (1)...(19): siRNA sense strand
ggaggaaguugccuuguac

SEQ ID NO: 1168663 - RNA, 19 nt, Homo sapiens
  misc_RNA (1)...(19): siRNA sense strand
ccaggaaguuguagauuuc

SEQ ID NO: 1168664 - RNA, 19 nt, Homo sapiens
  misc_RNA (1)...(19): siRNA sense strand
caaauugaccacugaagaa

SEQ ID NO: 1168665 - RNA, 19 nt, Homo sapiens
  misc_RNA (1)...(19): siRNA sense strand
gggaagcaguugauuguag

SEQ ID NO: 1168666 - RNA, 19 nt, Homo sapiens
  misc_RNA (1)...(19): siRNA sense strand
aaaaguagcugaugaagau

SEQ ID NO: 1168667 - RNA, 19 nt, Homo sapiens
  misc_RNA (1)...(19): siRNA sense strand
caaaccagaggaugaagua

SEQ ID NO: 1168668 - RNA, 19 nt, Homo sapiens
  misc_RNA (1)...(19): siRNA sense strand
ccacugaggaugaagauga

SEQ ID NO: 1168669 - RNA, 19 nt, Homo sapiens
  misc_RNA (1)...(19): siRNA sense strand
gggaaacuccuucacaaga

SEQ ID NO: 1168670 - RNA, 19 nt, Homo sapiens
  misc_RNA (1)...(19): siRNA sense strand
agaggacgaugaagaagaa

SEQ ID NO: 1168671 - RNA, 19 nt, Homo sapiens
  misc_RNA (1)...(19): siRNA sense strand
ggaagaagaggaagacagu

SEQ ID NO: 1168672 - RNA, 19 nt, Homo sapiens
  misc_RNA (1)...(19): siRNA sense strand
ucagaaggccuacaaggaa

SEQ ID NO: 1168673 - RNA, 19 nt, Homo sapiens
  misc_RNA (1)...(19): siRNA sense strand
gagggaagcaguugauugu

SEQ ID NO: 1168674 - RNA, 19 nt, Homo sapiens
  misc_RNA (1)...(19): siRNA sense strand
ggacgaugaagaagaagaa

SEQ ID NO: 1168675 - RNA, 19 nt, Homo sapiens
  misc_RNA (1)...(19): siRNA sense strand
gaggcuaccaugacuauug

SEQ ID NO: 1168676 - RNA, 19 nt, Homo sapiens
  misc_RNA (1)...(19): siRNA sense strand
gagcuucgguuauugucau

SEQ ID NO: 1168677 - RNA, 19 nt, Homo sapiens
  misc_RNA (1)...(19): siRNA sense strand
gagcagccaggaaguugua

SEQ ID NO: 1168678 - RNA, 19 nt, Homo sapiens
  misc_RNA (1)...(19): siRNA sense strand
gcaaagcuuuagacauguc

SEQ ID NO: 1168679 - RNA, 19 nt, Homo sapiens
  misc_RNA (1)...(19): siRNA sense strand
ugaagaggacgaugaagaa

SEQ ID NO: 1168680 - RNA, 19 nt, Homo sapiens
  misc_RNA (1)...(19): siRNA sense strand
gcagugaggaggcagagaa

SEQ ID NO: 1168681 - RNA, 19 nt, Homo sapiens
  misc_RNA (1)...(19): siRNA sense strand
uagggaaacuccuucacaa

SEQ ID NO: 1168682 - RNA, 19 nt, Homo sapiens
  misc_RNA (1)...(19): siRNA sense strand
ugaccugcaucaucauuug

SEQ ID NO: 1168683 - RNA, 19 nt, Homo sapiens
  misc_RNA (1)...(19): siRNA sense strand
gcuauugacgccaaauuga

SEQ ID NO: 1168684 - RNA, 19 nt, Homo sapiens
  misc_RNA (1)...(19): siRNA sense strand
gaaccugccaccugaggaa

SEQ ID NO: 1168685 - RNA, 19 nt, Homo sapiens
  misc_RNA (1)...(19): siRNA sense strand
cuuuagacauguccuauga

SEQ ID NO: 1168686 - RNA, 19 nt, Homo sapiens
  misc_RNA (1)...(19): siRNA sense strand
ccacugaagaagucauuaa

SEQ ID NO: 1168687 - RNA, 19 nt, Homo sapiens
  misc_RNA (1)...(19): siRNA sense strand
ccaaauugaccacugaaga

SEQ ID NO: 1168688 - RNA, 19 nt, Homo sapiens
  misc_RNA (1)...(19): siRNA sense strand
ggaaguuguagauuucauu

SEQ ID NO: 1168689 - RNA, 19 nt, Homo sapiens
  misc_RNA (1)...(19): siRNA sense strand
gaagaggcuaccaugacua

SEQ ID NO: 1168690 - RNA, 19 nt, Homo sapiens
  misc_RNA (1)...(19): siRNA sense strand
ggacucaacuagggaaacu

SEQ ID NO: 1168691 - RNA, 19 nt, Homo sapiens
  misc_RNA (1)...(19): siRNA sense strand
gcagagcuccagccagaga

SEQ ID NO: 1168692 - RNA, 19 nt, Homo sapiens
  misc_RNA (1)...(19): siRNA sense strand
uuccugagcuggacaguga

SEQ ID NO: 1168693 - RNA, 19 nt, Homo sapiens
  misc_RNA (1)...(19): siRNA sense strand
ggacagugaggaugaguca

SEQ ID NO: 1168694 - RNA, 19 nt, Homo sapiens
  misc_RNA (1)...(19): siRNA sense strand
ggaagacagugaggaaugc

SEQ ID NO: 1168695 - RNA, 19 nt, Homo sapiens
  misc_RNA (1)...(19): siRNA sense strand
ggaaguugccuuguacugu

SEQ ID NO: 1168696 - RNA, 19 nt, Homo sapiens
  misc_RNA (1)...(19): siRNA sense strand
gaaguuguagauuucauuc

SEQ ID NO: 1168697 - RNA, 19 nt, Homo sapiens
  misc_RNA (1)...(19): siRNA sense strand
gugaggaggcagagaauga

SEQ ID NO: 1168698 - RNA, 19 nt, Homo sapiens
  misc_RNA (1)...(19): siRNA sense strand
cgaugaagaagaagaagaa

SEQ ID NO: 1168699 - RNA, 19 nt, Homo sapiens
  misc_RNA (1)...(19): siRNA sense strand
gaagaagaagaagagauga

SEQ ID NO: 1168700 - RNA, 19 nt, Homo sapiens
  misc_RNA (1)...(19): siRNA sense strand
gacaagcugccucgaguug

SEQ ID NO: 1168701 - RNA, 19 nt, Homo sapiens
  misc_RNA (1)...(19): siRNA sense strand
caucaucauuugcuucaag

SEQ ID NO: 1168702 - RNA, 19 nt, Homo sapiens
  misc_RNA (1)...(19): siRNA sense strand
cauguccuaugaucacaaa

SEQ ID NO: 1168703 - RNA, 19 nt, Homo sapiens
  misc_RNA (1)...(19): siRNA sense strand
cagaugaggcggaggaaga

SEQ ID NO: 1168704 - RNA, 19 nt, Homo sapiens
  misc_RNA (1)...(19): siRNA sense strand
ugaagaggcuaccaugacu

SEQ ID NO: 1168705 - RNA, 19 nt, Homo sapiens
  misc_RNA (1)...(19): siRNA sense strand
gcaacagcgacaagaagaa

SEQ ID NO: 1168706 - RNA, 19 nt, Homo sapiens
  misc_RNA (1)...(19): siRNA sense strand
ucacugacgaccaugaauu

SEQ ID NO: 1168707 - RNA, 19 nt, Homo sapiens
  misc_RNA (1)...(19): siRNA sense strand
agaagaagaagaagagaug

SEQ ID NO: 1168708 - RNA, 19 nt, Homo sapiens
  misc_RNA (1)...(19): siRNA sense strand
cagagaaugaggaagauga

SEQ ID NO: 1168709 - RNA, 19 nt, Homo sapiens
  misc_RNA (1)...(19): siRNA sense strand
ucacaaaccagaggaugaa

SEQ ID NO: 1168710 - RNA, 19 nt, Homo sapiens
  misc_RNA (1)...(19): siRNA sense strand
cuacaaggaaggcaagcua

SEQ ID NO: 1168711 - RNA, 19 nt, Homo sapiens
  misc_RNA (1)...(19): siRNA sense strand
aggaggugcucucuacuga

SEQ ID NO: 1168712 - RNA, 19 nt, Homo sapiens
  misc_RNA (1)...(19): siRNA sense strand
guacugugccaaauaucuu

SEQ ID NO: 1168713 - RNA, 19 nt, Homo sapiens
  misc_RNA (1)...(19): siRNA sense strand
ggaccacuucuauaagaga

SEQ ID NO: 1168714 - RNA, 19 nt, Homo sapiens
  misc_RNA (1)...(19): siRNA sense strand
uuagacauguccuaugauc

SEQ ID NO: 1168715 - RNA, 19 nt, Homo sapiens
  misc_RNA (1)...(19): siRNA sense strand
uacagaaggcuuuagaaga

SEQ ID NO: 1168716 - RNA, 19 nt, Homo sapiens
  misc_RNA (1)...(19): siRNA sense strand
ugaagaagaagaagaagag

SEQ ID NO: 1168717 - RNA, 19 nt, Homo sapiens
  misc_RNA (1)...(19): siRNA sense strand
aggcuaccaugacuauuga

SEQ ID NO: 1168718 - RNA, 19 nt, Homo sapiens
  misc_RNA (1)...(19): siRNA sense strand
gaagaagaagaagaagaga

SEQ ID NO: 1168719 - RNA, 19 nt, Homo sapiens
  misc_RNA (1)...(19): siRNA sense strand
gaaugaggaagaugaggau

SEQ ID NO: 1168720 - RNA, 19 nt, Homo sapiens
  misc_RNA (1)...(19): siRNA sense strand
cagaaggcuuuagaagaug

SEQ ID NO: 1168721 - RNA, 19 nt, Homo sapiens
  misc_RNA (1)...(19): siRNA sense strand
cuuguacugugccaaauau

SEQ ID NO: 1168722 - RNA, 19 nt, Homo sapiens
  misc_RNA (1)...(19): siRNA sense strand
accagaggaugaaguagaa

SEQ ID NO: 1168723 - RNA, 19 nt, Homo sapiens
  misc_RNA (1)...(19): siRNA sense strand
uaccaugacuauugaagag

SEQ ID NO: 1168724 - RNA, 19 nt, Homo sapiens
  misc_RNA (1)...(19): siRNA sense strand
ugaagaugauguggacaau

SEQ ID NO: 1168725 - RNA, 19 nt, Homo sapiens
  misc_RNA (1)...(19): siRNA sense strand
aagaagaggaagacaguga

SEQ ID NO: 1168726 - RNA, 19 nt, Homo sapiens
  misc_RNA (1)...(19): siRNA sense strand
gaagagcugcuggaucagu

SEQ ID NO: 1168727 - RNA, 19 nt, Homo sapiens
  misc_RNA (1)...(19): siRNA sense strand
cgagggaagcaguugauug

SEQ ID NO: 1168728 - RNA, 19 nt, Homo sapiens
  misc_RNA (1)...(19): siRNA sense strand
ggaggcagagaaugaggaa

SEQ ID NO: 1168729 - RNA, 19 nt, Homo sapiens
  misc_RNA (1)...(19): siRNA sense strand
gaagaugauguggacaaug

SEQ ID NO: 1168730 - RNA, 19 nt, Homo sapiens
  misc_RNA (1)...(19): siRNA sense strand
ggcaacagcgacaagaaga

SEQ ID NO: 1168731 - RNA, 19 nt, Homo sapiens
  misc_RNA (1)...(19): siRNA sense strand
guagaacuagcacgcauca

SEQ ID NO: 1168732 - RNA, 19 nt, Homo sapiens
  misc_RNA (1)...(19): siRNA sense strand
gugaggaugagucagauga

SEQ ID NO: 1168733 - RNA, 19 nt, Homo sapiens
  misc_RNA (1)...(19): siRNA sense strand
aaagagcuggcacagauug

SEQ ID NO: 1168734 - RNA, 19 nt, Homo sapiens
  misc_RNA (1)...(19): siRNA sense strand
ggaaggcaagcuacagaag

SEQ ID NO: 1168735 - RNA, 19 nt, Homo sapiens
  misc_RNA (1)...(19): siRNA sense strand
gaugagcagccaggaaguu

SEQ ID NO: 1168736 - RNA, 19 nt, Homo sapiens
  misc_RNA (1)...(19): siRNA sense strand
ggggaccacuucuauaaga

SEQ ID NO: 1168737 - RNA, 19 nt, Homo sapiens
  misc_RNA (1)...(19): siRNA sense strand
guggcaaggucaccaugga

SEQ ID NO: 1168738 - RNA, 19 nt, Homo sapiens
  misc_RNA (1)...(19): siRNA sense strand
gaugccuucuuggcuauug

SEQ ID NO: 1168739 - RNA, 19 nt, Homo sapiens
  misc_RNA (1)...(19): siRNA sense strand
uaaagagcuggcacagauu

SEQ ID NO: 1168740 - RNA, 19 nt, Homo sapiens
  misc_RNA (1)...(19): siRNA sense strand
gacaacaugaccugcauca

SEQ ID NO: 1168741 - RNA, 19 nt, Homo sapiens
  misc_RNA (1)...(19): siRNA sense strand
guacagggugugacaacau

SEQ ID NO: 1168742 - RNA, 19 nt, Homo sapiens
  misc_RNA (1)...(19): siRNA sense strand
ggaugaaguagaacuagca

SEQ ID NO: 1168743 - RNA, 19 nt, Homo sapiens
  misc_RNA (1)...(19): siRNA sense strand
cuaaguccaaguucuuuga

SEQ ID NO: 1168744 - RNA, 19 nt, Homo sapiens
  misc_RNA (1)...(19): siRNA sense strand
gauaucaucaaagaucaga

SEQ ID NO: 1168745 - RNA, 19 nt, Homo sapiens
  misc_RNA (1)...(19): siRNA sense strand
cacugaggaugaagaugaa

SEQ ID NO: 1168746 - RNA, 19 nt, Homo sapiens
  misc_RNA (1)...(19): siRNA sense strand
ugaagaagucauuaaagag

SEQ ID NO: 1168747 - RNA, 19 nt, Homo sapiens
  misc_RNA (1)...(19): siRNA sense strand
gaggaggugcucucuacug

SEQ ID NO: 1168748 - RNA, 19 nt, Homo sapiens
  misc_RNA (1)...(19): siRNA sense strand
uacagggugugacaacaug

SEQ ID NO: 1168749 - RNA, 19 nt, Homo sapiens
  misc_RNA (1)...(19): siRNA sense strand
gaagaggacgaugaagaag

SEQ ID NO: 1168750 - RNA, 19 nt, Homo sapiens
  misc_RNA (1)...(19): siRNA sense strand
gcaagaaacuggaaaccua

SEQ ID NO: 1168751 - RNA, 19 nt, Homo sapiens
  misc_RNA (1)...(19): siRNA sense strand
ggagaaagcugauguaaaa

SEQ ID NO: 1168752 - RNA, 19 nt, Homo sapiens
  misc_RNA (1)...(19): siRNA sense strand
gaacuuguguauacauuug

SEQ ID NO: 1168753 - RNA, 19 nt, Homo sapiens
  misc_RNA (1)...(19): siRNA sense strand
caaaauaccugaugcaaaa

SEQ ID NO: 1168754 - RNA, 19 nt, Homo sapiens
  misc_RNA (1)...(19): siRNA sense strand
gcauauacccgcauaguuu

SEQ ID NO: 1168755 - RNA, 19 nt, Homo sapiens
  misc_RNA (1)...(19): siRNA sense strand
gcaagguguuacaauauuu

SEQ ID NO: 1168756 - RNA, 19 nt, Homo sapiens
  misc_RNA (1)...(19): siRNA sense strand
gagcaaggaguguguauaa

SEQ ID NO: 1168757 - RNA, 19 nt, Homo sapiens
  misc_RNA (1)...(19): siRNA sense strand
ggacaaagcuaagaaagac

SEQ ID NO: 1168758 - RNA, 19 nt, Homo sapiens
  misc_RNA (1)...(19): siRNA sense strand
ugagaaagguggaaaguuc

SEQ ID NO: 1168759 - RNA, 19 nt, Homo sapiens
  misc_RNA (1)...(19): siRNA sense strand
agacuauacugaauccuua

SEQ ID NO: 1168760 - RNA, 19 nt, Homo sapiens
  misc_RNA (1)...(19): siRNA sense strand
gauggugucuguauagaug

SEQ ID NO: 1168761 - RNA, 19 nt, Homo sapiens
  misc_RNA (1)...(19): siRNA sense strand
caucagaguuuccaaaaua

SEQ ID NO: 1168762 - RNA, 19 nt, Homo sapiens
  misc_RNA (1)...(19): siRNA sense strand
uauagcaccuugaguugua

SEQ ID NO: 1168763 - RNA, 19 nt, Homo sapiens
  misc_RNA (1)...(19): siRNA sense strand
acaauuacauggagacuau

SEQ ID NO: 1168764 - RNA, 19 nt, Homo sapiens
  misc_RNA (1)...(19): siRNA sense strand
cagagcaccuccuguuauu

SEQ ID NO: 1168765 - RNA, 19 nt, Homo sapiens
  misc_RNA (1)...(19): siRNA sense strand
gaauucaagugacuaucuu

SEQ ID NO: 1168766 - RNA, 19 nt, Homo sapiens
  misc_RNA (1)...(19): siRNA sense strand
ggcaagguguuacaauauu

SEQ ID NO: 1168767 - RNA, 19 nt, Homo sapiens
  misc_RNA (1)...(19): siRNA sense strand
gauaugagccucuucucuu

SEQ ID NO: 1168768 - RNA, 19 nt, Homo sapiens
  misc_RNA (1)...(19): siRNA sense strand
caaggaguguguauaagga

SEQ ID NO: 1168769 - RNA, 19 nt, Homo sapiens
  misc_RNA (1)...(19): siRNA sense strand
gacagaagaaccucaaauu

SEQ ID NO: 1168770 - RNA, 19 nt, Homo sapiens
  misc_RNA (1)...(19): siRNA sense strand
cagaagcuuuguuaaauca

SEQ ID NO: 1168771 - RNA, 19 nt, Homo sapiens
  misc_RNA (1)...(19): siRNA sense strand
aagaugaacuuguguauac

SEQ ID NO: 1168772 - RNA, 19 nt, Homo sapiens
  misc_RNA (1)...(19): siRNA sense strand
uugaagaccuggagcaauu

SEQ ID NO: 1168773 - RNA, 19 nt, Homo sapiens
  misc_RNA (1)...(19): siRNA sense strand
gggaauggcuguuauugac

SEQ ID NO: 1168774 - RNA, 19 nt, Homo sapiens
  misc_RNA (1)...(19): siRNA sense strand
cgggcaagguguuacaaua

SEQ ID NO: 1168775 - RNA, 19 nt, Homo sapiens
  misc_RNA (1)...(19): siRNA sense strand
ucacagaggccacugagaa

SEQ ID NO: 1168776 - RNA, 19 nt, Homo sapiens
  misc_RNA (1)...(19): siRNA sense strand
ccauguugcuugacucuga

SEQ ID NO: 1168777 - RNA, 19 nt, Homo sapiens
  misc_RNA (1)...(19): siRNA sense strand
guuacaaccaucacuauaa

SEQ ID NO: 1168778 - RNA, 19 nt, Homo sapiens
  misc_RNA (1)...(19): siRNA sense strand
uggcuacuauccuuacaua

SEQ ID NO: 1168779 - RNA, 19 nt, Homo sapiens
  misc_RNA (1)...(19): siRNA sense strand
ccucuucucuuucauagga

SEQ ID NO: 1168780 - RNA, 19 nt, Homo sapiens
  misc_RNA (1)...(19): siRNA sense strand
gaaacuggaaaccuaaaga

SEQ ID NO: 1168781 - RNA, 19 nt, Homo sapiens
  misc_RNA (1)...(19): siRNA sense strand
ccagaagauuuccuuacaa

SEQ ID NO: 1168782 - RNA, 19 nt, Homo sapiens
  misc_RNA (1)...(19): siRNA sense strand
caagaaacuggaaaccuaa

SEQ ID NO: 1168783 - RNA, 19 nt, Homo sapiens
  misc_RNA (1)...(19): siRNA sense strand
acagaagaaccucaaauuu

SEQ ID NO: 1168784 - RNA, 19 nt, Homo sapiens
  misc_RNA (1)...(19): siRNA sense strand
cagaagauuuccuuacaag

SEQ ID NO: 1168785 - RNA, 19 nt, Homo sapiens
  misc_RNA (1)...(19): siRNA sense strand
agacuuggcuacuauccuu

SEQ ID NO: 1168786 - RNA, 19 nt, Homo sapiens
  misc_RNA (1)...(19): siRNA sense strand
gcucuuuacccauccauuu

SEQ ID NO: 1168787 - RNA, 19 nt, Homo sapiens
  misc_RNA (1)...(19): siRNA sense strand
gaaaauuacuucggccaaa

SEQ ID NO: 1168788 - RNA, 19 nt, Homo sapiens
  misc_RNA (1)...(19): siRNA sense strand
gcaacaaaauguacaacuu

SEQ ID NO: 1168789 - RNA, 19 nt, Homo sapiens
  misc_RNA (1)...(19): siRNA sense strand
gaagcuuuguuaaaucaag

SEQ ID NO: 1168790 - RNA, 19 nt, Homo sapiens
  misc_RNA (1)...(19): siRNA sense strand
ucagaagcuuuguuaaauc

SEQ ID NO: 1168791 - RNA, 19 nt, Homo sapiens
  misc_RNA (1)...(19): siRNA sense strand
gaagauuuccuuacaagac

SEQ ID NO: 1168792 - RNA, 19 nt, Homo sapiens
  misc_RNA (1)...(19): siRNA sense strand
ccauuuauuugaacacuca

SEQ ID NO: 1168793 - RNA, 19 nt, Homo sapiens
  misc_RNA (1)...(19): siRNA sense strand
cacacuaucugccacaaug

SEQ ID NO: 1168794 - RNA, 19 nt, Homo sapiens
  misc_RNA (1)...(19): siRNA sense strand
cagaagaaccucaaauuuu

SEQ ID NO: 1168795 - RNA, 19 nt, Homo sapiens
  misc_RNA (1)...(19): siRNA sense strand
gcuugcuccuagacaauua

SEQ ID NO: 1168796 - RNA, 19 nt, Homo sapiens
  misc_RNA (1)...(19): siRNA sense strand
gggcaagguguuacaauau

SEQ ID NO: 1168797 - RNA, 19 nt, Homo sapiens
  misc_RNA (1)...(19): siRNA sense strand
gguagagacuauaaaauug

SEQ ID NO: 1168798 - RNA, 19 nt, Homo sapiens
  misc_RNA (1)...(19): siRNA sense strand
gaugagccacuagauauga

SEQ ID NO: 1168799 - RNA, 19 nt, Homo sapiens
  misc_RNA (1)...(19): siRNA sense strand
gguggaaaguucacaguac

SEQ ID NO: 1168800 - RNA, 19 nt, Homo sapiens
  misc_RNA (1)...(19): siRNA sense strand
cauaaucaacgucacacua

SEQ ID NO: 1168801 - RNA, 19 nt, Homo sapiens
  misc_RNA (1)...(19): siRNA sense strand
auaugagccucuucucuuu

SEQ ID NO: 1168802 - RNA, 19 nt, Homo sapiens
  misc_RNA (1)...(19): siRNA sense strand
uaaaucaaguggaguaucc

SEQ ID NO: 1168803 - RNA, 19 nt, Homo sapiens
  misc_RNA (1)...(19): siRNA sense strand
ggaauucaagugacuaucu

SEQ ID NO: 1168804 - RNA, 19 nt, Homo sapiens
  misc_RNA (1)...(19): siRNA sense strand
gcaaggaguguguauaagg

SEQ ID NO: 1168805 - RNA, 19 nt, Homo sapiens
  misc_RNA (1)...(19): siRNA sense strand
uuacaaccaucacuauaag

SEQ ID NO: 1168806 - RNA, 19 nt, Homo sapiens
  misc_RNA (1)...(19): siRNA sense strand
gagccucuucucuuucaua

SEQ ID NO: 1168807 - RNA, 19 nt, Homo sapiens
  misc_RNA (1)...(19): siRNA sense strand
cuggaaaccuaaagauguu

SEQ ID NO: 1168808 - RNA, 19 nt, Homo sapiens
  misc_RNA (1)...(19): siRNA sense strand
agaagaaccucaaauuuuc

SEQ ID NO: 1168809 - RNA, 19 nt, Homo sapiens
  misc_RNA (1)...(19): siRNA sense strand
cccagaagauuuccuuaca

SEQ ID NO: 1168810 - RNA, 19 nt, Homo sapiens
  misc_RNA (1)...(19): siRNA sense strand
guaaggagaaagcugaugu

SEQ ID NO: 1168811 - RNA, 19 nt, Homo sapiens
  misc_RNA (1)...(19): siRNA sense strand
gagacuauacugaauccuu

SEQ ID NO: 1168812 - RNA, 19 nt, Homo sapiens
  misc_RNA (1)...(19): siRNA sense strand
cauggagacuauacugaau

SEQ ID NO: 1168813 - RNA, 19 nt, Homo sapiens
  misc_RNA (1)...(19): siRNA sense strand
gaagaauggagacccacuu

SEQ ID NO: 1168814 - RNA, 19 nt, Homo sapiens
  misc_RNA (1)...(19): siRNA sense strand
guuauugacugggaagaau

SEQ ID NO: 1168815 - RNA, 19 nt, Homo sapiens
  misc_RNA (1)...(19): siRNA sense strand
ggagcaaggaguguguaua

SEQ ID NO: 1168816 - RNA, 19 nt, Homo sapiens
  misc_RNA (1)...(19): siRNA sense strand
acaagaccaucuggacaaa

SEQ ID NO: 1168817 - RNA, 19 nt, Homo sapiens
  misc_RNA (1)...(19): siRNA sense strand
ggagacagaagaaccucaa

SEQ ID NO: 1168818 - RNA, 19 nt, Homo sapiens
  misc_RNA (1)...(19): siRNA sense strand
uauugcagcuguuauagca

SEQ ID NO: 1168819 - RNA, 19 nt, Homo sapiens
  misc_RNA (1)...(19): siRNA sense strand
aguauaaugcgaaguauga

SEQ ID NO: 1168820 - RNA, 19 nt, Homo sapiens
  misc_RNA (1)...(19): siRNA sense strand
caaccaucacuauaagaaa

SEQ ID NO: 1168821 - RNA, 19 nt, Homo sapiens
  misc_RNA (1)...(19): siRNA sense strand
ucagagcaccuccuguuau

SEQ ID NO: 1168822 - RNA, 19 nt, Homo sapiens
  misc_RNA (1)...(19): siRNA sense strand
uaaggagaaagcugaugua

SEQ ID NO: 1168823 - RNA, 19 nt, Homo sapiens
  misc_RNA (1)...(19): siRNA sense strand
gagaaagguggaaaguuca

SEQ ID NO: 1168824 - RNA, 19 nt, Homo sapiens
  misc_RNA (1)...(19): siRNA sense strand
ucugggugcuucuggaauu

SEQ ID NO: 1168825 - RNA, 19 nt, Homo sapiens
  misc_RNA (1)...(19): siRNA sense strand
gggaagccaucagaguuuc

SEQ ID NO: 1168826 - RNA, 19 nt, Homo sapiens
  misc_RNA (1)...(19): siRNA sense strand
guagacaauuugggaaugg

SEQ ID NO: 1168827 - RNA, 19 nt, Homo sapiens
  misc_RNA (1)...(19): siRNA sense strand
gaauugguucagcaacaaa

SEQ ID NO: 1168828 - RNA, 19 nt, Homo sapiens
  misc_RNA (1)...(19): siRNA sense strand
gcuucacccuccacacuau

SEQ ID NO: 1168829 - RNA, 19 nt, Homo sapiens
  misc_RNA (1)...(19): siRNA sense strand
caaguggaguaucccagau

SEQ ID NO: 1168830 - RNA, 19 nt, Homo sapiens
  misc_RNA (1)...(19): siRNA sense strand
gcuccuagacaauuacaug

SEQ ID NO: 1168831 - RNA, 19 nt, Homo sapiens
  misc_RNA (1)...(19): siRNA sense strand
guguauacauuuggcgaaa

SEQ ID NO: 1168832 - RNA, 19 nt, Homo sapiens
  misc_RNA (1)...(19): siRNA sense strand
caaaauguguagccaagug

SEQ ID NO: 1168833 - RNA, 19 nt, Homo sapiens
  misc_RNA (1)...(19): siRNA sense strand
cuucuggaauuguaauaug

SEQ ID NO: 1168834 - RNA, 19 nt, Homo sapiens
  misc_RNA (1)...(19): siRNA sense strand
gaugaucucagcugguugu

SEQ ID NO: 1168835 - RNA, 19 nt, Homo sapiens
  misc_RNA (1)...(19): siRNA sense strand
acacugaugcuguugaugu

SEQ ID NO: 1168836 - RNA, 19 nt, Homo sapiens
  misc_RNA (1)...(19): siRNA sense strand
ugcgaaguaugaaaucuug

SEQ ID NO: 1168837 - RNA, 19 nt, Homo sapiens
  misc_RNA (1)...(19): siRNA sense strand
gggugcuucuggaauugua

SEQ ID NO: 1168838 - RNA, 19 nt, Homo sapiens
  misc_RNA (1)...(19): siRNA sense strand
guauacauuuggcgaaacu

SEQ ID NO: 1168839 - RNA, 19 nt, Homo sapiens
  misc_RNA (1)...(19): siRNA sense strand
uugauagacuuggcuacua

SEQ ID NO: 1168840 - RNA, 19 nt, Homo sapiens
  misc_RNA (1)...(19): siRNA sense strand
guuauagcaccuugaguug

SEQ ID NO: 1168841 - RNA, 19 nt, Homo sapiens
  misc_RNA (1)...(19): siRNA sense strand
gcuaagaaagacauuacau

SEQ ID NO: 1168842 - RNA, 19 nt, Homo sapiens
  misc_RNA (1)...(19): siRNA sense strand
acugaauccuuacauaauc

SEQ ID NO: 1168843 - RNA, 19 nt, Homo sapiens
  misc_RNA (1)...(19): siRNA sense strand
gaaguaugaaaucuugcuu

SEQ ID NO: 1168844 - RNA, 19 nt, Homo sapiens
  misc_RNA (1)...(19): siRNA sense strand
acccauccauuuauuugaa

SEQ ID NO: 1168845 - RNA, 19 nt, Homo sapiens
  misc_RNA (1)...(19): siRNA sense strand
acaaccaucacuauaagaa

SEQ ID NO: 1168846 - RNA, 19 nt, Homo sapiens
  misc_RNA (1)...(19): siRNA sense strand
caaaucacuugugggguua

SEQ ID NO: 1168847 - RNA, 19 nt, Homo sapiens
  misc_RNA (1)...(19): siRNA sense strand
gaaaucuugcuugcuccua

SEQ ID NO: 1168848 - RNA, 19 nt, Homo sapiens
  misc_RNA (1)...(19): siRNA sense strand
aaaagacacugaugcuguu

SEQ ID NO: 1168849 - RNA, 19 nt, Homo sapiens
  misc_RNA (1)...(19): siRNA sense strand
gaaaaccgacacuugaaga

SEQ ID NO: 1168850 - RNA, 19 nt, Homo sapiens
  misc_RNA (1)...(19): siRNA sense strand
gcaagaaacuggaaaccua

SEQ ID NO: 1168851 - RNA, 19 nt, Homo sapiens
  misc_RNA (1)...(19): siRNA sense strand
ggagaaagcugauguaaaa

SEQ ID NO: 1168852 - RNA, 19 nt, Homo sapiens
  misc_RNA (1)...(19): siRNA sense strand
gaacuuguguauacauuug

SEQ ID NO: 1168853 - RNA, 19 nt, Homo sapiens
  misc_RNA (1)...(19): siRNA sense strand
caaaauaccugaugcaaaa

SEQ ID NO: 1168854 - RNA, 19 nt, Homo sapiens
  misc_RNA (1)...(19): siRNA sense strand
gcauauacccgcauaguuu

SEQ ID NO: 1168855 - RNA, 19 nt, Homo sapiens
  misc_RNA (1)...(19): siRNA sense strand
gcaagguguuacaauauuu

SEQ ID NO: 1168856 - RNA, 19 nt, Homo sapiens
  misc_RNA (1)...(19): siRNA sense strand
gagcaaggaguguguauaa

SEQ ID NO: 1168857 - RNA, 19 nt, Homo sapiens
  misc_RNA (1)...(19): siRNA sense strand
ggacaaagcuaagaaagac

SEQ ID NO: 1168858 - RNA, 19 nt, Homo sapiens
  misc_RNA (1)...(19): siRNA sense strand
ugagaaagguggaaaguuc

SEQ ID NO: 1168859 - RNA, 19 nt, Homo sapiens
  misc_RNA (1)...(19): siRNA sense strand
agacuauacugaauccuua

SEQ ID NO: 1168860 - RNA, 19 nt, Homo sapiens
  misc_RNA (1)...(19): siRNA sense strand
gauggugucuguauagaug

SEQ ID NO: 1168861 - RNA, 19 nt, Homo sapiens
  misc_RNA (1)...(19): siRNA sense strand
caucagaguuuccaaaaua

SEQ ID NO: 1168862 - RNA, 19 nt, Homo sapiens
  misc_RNA (1)...(19): siRNA sense strand
uauagcaccuugaguugua

SEQ ID NO: 1168863 - RNA, 19 nt, Homo sapiens
  misc_RNA (1)...(19): siRNA sense strand
acaauuacauggagacuau

SEQ ID NO: 1168864 - RNA, 19 nt, Homo sapiens
  misc_RNA (1)...(19): siRNA sense strand
cagagcaccuccuguuauu

SEQ ID NO: 1168865 - RNA, 19 nt, Homo sapiens
  misc_RNA (1)...(19): siRNA sense strand
gaauucaagugacuaucuu

SEQ ID NO: 1168866 - RNA, 19 nt, Homo sapiens
  misc_RNA (1)...(19): siRNA sense strand
ggcaagguguuacaauauu

SEQ ID NO: 1168867 - RNA, 19 nt, Homo sapiens
  misc_RNA (1)...(19): siRNA sense strand
gauaugagccucuucucuu

SEQ ID NO: 1168868 - RNA, 19 nt, Homo sapiens
  misc_RNA (1)...(19): siRNA sense strand
caaggaguguguauaagga

SEQ ID NO: 1168869 - RNA, 19 nt, Homo sapiens
  misc_RNA (1)...(19): siRNA sense strand
gacagaagaaccucaaauu

SEQ ID NO: 1168870 - RNA, 19 nt, Homo sapiens
  misc_RNA (1)...(19): siRNA sense strand
cagaagcuuuguuaaauca

SEQ ID NO: 1168871 - RNA, 19 nt, Homo sapiens
  misc_RNA (1)...(19): siRNA sense strand
aagaugaacuuguguauac

SEQ ID NO: 1168872 - RNA, 19 nt, Homo sapiens
  misc_RNA (1)...(19): siRNA sense strand
uugaagaccuggagcaauu

SEQ ID NO: 1168873 - RNA, 19 nt, Homo sapiens
  misc_RNA (1)...(19): siRNA sense strand
gggaauggcuguuauugac

SEQ ID NO: 1168874 - RNA, 19 nt, Homo sapiens
  misc_RNA (1)...(19): siRNA sense strand
cgggcaagguguuacaaua

SEQ ID NO: 1168875 - RNA, 19 nt, Homo sapiens
  misc_RNA (1)...(19): siRNA sense strand
ucacagaggccacugagaa

SEQ ID NO: 1168876 - RNA, 19 nt, Homo sapiens
  misc_RNA (1)...(19): siRNA sense strand
ccauguugcuugacucuga

SEQ ID NO: 1168877 - RNA, 19 nt, Homo sapiens
  misc_RNA (1)...(19): siRNA sense strand
guuacaaccaucacuauaa

SEQ ID NO: 1168878 - RNA, 19 nt, Homo sapiens
  misc_RNA (1)...(19): siRNA sense strand
uggcuacuauccuuacaua

SEQ ID NO: 1168879 - RNA, 19 nt, Homo sapiens
  misc_RNA (1)...(19): siRNA sense strand
ccucuucucuuucauagga

SEQ ID NO: 1168880 - RNA, 19 nt, Homo sapiens
  misc_RNA (1)...(19): siRNA sense strand
gaaacuggaaaccuaaaga

SEQ ID NO: 1168881 - RNA, 19 nt, Homo sapiens
  misc_RNA (1)...(19): siRNA sense strand
ccagaagauuuccuuacaa

SEQ ID NO: 1168882 - RNA, 19 nt, Homo sapiens
  misc_RNA (1)...(19): siRNA sense strand
caagaaacuggaaaccuaa

SEQ ID NO: 1168883 - RNA, 19 nt, Homo sapiens
  misc_RNA (1)...(19): siRNA sense strand
acagaagaaccucaaauuu

SEQ ID NO: 1168884 - RNA, 19 nt, Homo sapiens
  misc_RNA (1)...(19): siRNA sense strand
cagaagauuuccuuacaag

SEQ ID NO: 1168885 - RNA, 19 nt, Homo sapiens
  misc_RNA (1)...(19): siRNA sense strand
agacuuggcuacuauccuu

SEQ ID NO: 1168886 - RNA, 19 nt, Homo sapiens
  misc_RNA (1)...(19): siRNA sense strand
gcucuuuacccauccauuu

SEQ ID NO: 1168887 - RNA, 19 nt, Homo sapiens
  misc_RNA (1)...(19): siRNA sense strand
gaaaauuacuucggccaaa

SEQ ID NO: 1168888 - RNA, 19 nt, Homo sapiens
  misc_RNA (1)...(19): siRNA sense strand
gcaacaaaauguacaacuu

SEQ ID NO: 1168889 - RNA, 19 nt, Homo sapiens
  misc_RNA (1)...(19): siRNA sense strand
gaagcuuuguuaaaucaag

SEQ ID NO: 1168890 - RNA, 19 nt, Homo sapiens
  misc_RNA (1)...(19): siRNA sense strand
ucagaagcuuuguuaaauc

SEQ ID NO: 1168891 - RNA, 19 nt, Homo sapiens
  misc_RNA (1)...(19): siRNA sense strand
gaagauuuccuuacaagac

SEQ ID NO: 1168892 - RNA, 19 nt, Homo sapiens
  misc_RNA (1)...(19): siRNA sense strand
ccauuuauuugaacacuca

SEQ ID NO: 1168893 - RNA, 19 nt, Homo sapiens
  misc_RNA (1)...(19): siRNA sense strand
cacacuaucugccacaaug

SEQ ID NO: 1168894 - RNA, 19 nt, Homo sapiens
  misc_RNA (1)...(19): siRNA sense strand
cagaagaaccucaaauuuu

SEQ ID NO: 1168895 - RNA, 19 nt, Homo sapiens
  misc_RNA (1)...(19): siRNA sense strand
gcuugcuccuagacaauua

SEQ ID NO: 1168896 - RNA, 19 nt, Homo sapiens
  misc_RNA (1)...(19): siRNA sense strand
gggcaagguguuacaauau

SEQ ID NO: 1168897 - RNA, 19 nt, Homo sapiens
  misc_RNA (1)...(19): siRNA sense strand
gguagagacuauaaaauug

SEQ ID NO: 1168898 - RNA, 19 nt, Homo sapiens
  misc_RNA (1)...(19): siRNA sense strand
gaugagccacuagauauga

SEQ ID NO: 1168899 - RNA, 19 nt, Homo sapiens
  misc_RNA (1)...(19): siRNA sense strand
gguggaaaguucacaguac

SEQ ID NO: 1168900 - RNA, 19 nt, Homo sapiens
  misc_RNA (1)...(19): siRNA sense strand
cauaaucaacgucacacua

SEQ ID NO: 1168901 - RNA, 19 nt, Homo sapiens
  misc_RNA (1)...(19): siRNA sense strand
auaugagccucuucucuuu

SEQ ID NO: 1168902 - RNA, 19 nt, Homo sapiens
  misc_RNA (1)...(19): siRNA sense strand
uaaaucaaguggaguaucc

SEQ ID NO: 1168903 - RNA, 19 nt, Homo sapiens
  misc_RNA (1)...(19): siRNA sense strand
ggaauucaagugacuaucu

SEQ ID NO: 1168904 - RNA, 19 nt, Homo sapiens
  misc_RNA (1)...(19): siRNA sense strand
gcaaggaguguguauaagg

SEQ ID NO: 1168905 - RNA, 19 nt, Homo sapiens
  misc_RNA (1)...(19): siRNA sense strand
uuacaaccaucacuauaag

SEQ ID NO: 1168906 - RNA, 19 nt, Homo sapiens
  misc_RNA (1)...(19): siRNA sense strand
gagccucuucucuuucaua

SEQ ID NO: 1168907 - RNA, 19 nt, Homo sapiens
  misc_RNA (1)...(19): siRNA sense strand
cuggaaaccuaaagauguu

SEQ ID NO: 1168908 - RNA, 19 nt, Homo sapiens
  misc_RNA (1)...(19): siRNA sense strand
agaagaaccucaaauuuuc

SEQ ID NO: 1168909 - RNA, 19 nt, Homo sapiens
  misc_RNA (1)...(19): siRNA sense strand
cccagaagauuuccuuaca

SEQ ID NO: 1168910 - RNA, 19 nt, Homo sapiens
  misc_RNA (1)...(19): siRNA sense strand
guaaggagaaagcugaugu

SEQ ID NO: 1168911 - RNA, 19 nt, Homo sapiens
  misc_RNA (1)...(19): siRNA sense strand
gagacuauacugaauccuu

SEQ ID NO: 1168912 - RNA, 19 nt, Homo sapiens
  misc_RNA (1)...(19): siRNA sense strand
cauggagacuauacugaau

SEQ ID NO: 1168913 - RNA, 19 nt, Homo sapiens
  misc_RNA (1)...(19): siRNA sense strand
gaagaauggagacccacuu

SEQ ID NO: 1168914 - RNA, 19 nt, Homo sapiens
  misc_RNA (1)...(19): siRNA sense strand
guuauugacugggaagaau

SEQ ID NO: 1168915 - RNA, 19 nt, Homo sapiens
  misc_RNA (1)...(19): siRNA sense strand
ggagcaaggaguguguaua

SEQ ID NO: 1168916 - RNA, 19 nt, Homo sapiens
  misc_RNA (1)...(19): siRNA sense strand
acaagaccaucuggacaaa

SEQ ID NO: 1168917 - RNA, 19 nt, Homo sapiens
  misc_RNA (1)...(19): siRNA sense strand
ggagacagaagaaccucaa

SEQ ID NO: 1168918 - RNA, 19 nt, Homo sapiens
  misc_RNA (1)...(19): siRNA sense strand
uauugcagcuguuauagca

SEQ ID NO: 1168919 - RNA, 19 nt, Homo sapiens
  misc_RNA (1)...(19): siRNA sense strand
aguauaaugcgaaguauga

SEQ ID NO: 1168920 - RNA, 19 nt, Homo sapiens
  misc_RNA (1)...(19): siRNA sense strand
caaccaucacuauaagaaa

SEQ ID NO: 1168921 - RNA, 19 nt, Homo sapiens
  misc_RNA (1)...(19): siRNA sense strand
ucagagcaccuccuguuau

SEQ ID NO: 1168922 - RNA, 19 nt, Homo sapiens
  misc_RNA (1)...(19): siRNA sense strand
uaaggagaaagcugaugua

SEQ ID NO: 1168923 - RNA, 19 nt, Homo sapiens
  misc_RNA (1)...(19): siRNA sense strand
gagaaagguggaaaguuca

SEQ ID NO: 1168924 - RNA, 19 nt, Homo sapiens
  misc_RNA (1)...(19): siRNA sense strand
ucugggugcuucuggaauu

SEQ ID NO: 1168925 - RNA, 19 nt, Homo sapiens
  misc_RNA (1)...(19): siRNA sense strand
gggaagccaucagaguuuc

SEQ ID NO: 1168926 - RNA, 19 nt, Homo sapiens
  misc_RNA (1)...(19): siRNA sense strand
guagacaauuugggaaugg

SEQ ID NO: 1168927 - RNA, 19 nt, Homo sapiens
  misc_RNA (1)...(19): siRNA sense strand
gaauugguucagcaacaaa

SEQ ID NO: 1168928 - RNA, 19 nt, Homo sapiens
  misc_RNA (1)...(19): siRNA sense strand
gcuucacccuccacacuau

SEQ ID NO: 1168929 - RNA, 19 nt, Homo sapiens
  misc_RNA (1)...(19): siRNA sense strand
caaguggaguaucccagau

SEQ ID NO: 1168930 - RNA, 19 nt, Homo sapiens
  misc_RNA (1)...(19): siRNA sense strand
gcuccuagacaauuacaug

SEQ ID NO: 1168931 - RNA, 19 nt, Homo sapiens
  misc_RNA (1)...(19): siRNA sense strand
guguauacauuuggcgaaa

SEQ ID NO: 1168932 - RNA, 19 nt, Homo sapiens
  misc_RNA (1)...(19): siRNA sense strand
caaaauguguagccaagug

SEQ ID NO: 1168933 - RNA, 19 nt, Homo sapiens
  misc_RNA (1)...(19): siRNA sense strand
cuucuggaauuguaauaug

SEQ ID NO: 1168934 - RNA, 19 nt, Homo sapiens
  misc_RNA (1)...(19): siRNA sense strand
gaugaucucagcugguugu

SEQ ID NO: 1168935 - RNA, 19 nt, Homo sapiens
  misc_RNA (1)...(19): siRNA sense strand
acacugaugcuguugaugu

SEQ ID NO: 1168936 - RNA, 19 nt, Homo sapiens
  misc_RNA (1)...(19): siRNA sense strand
ugcgaaguaugaaaucuug

SEQ ID NO: 1168937 - RNA, 19 nt, Homo sapiens
  misc_RNA (1)...(19): siRNA sense strand
gggugcuucuggaauugua

SEQ ID NO: 1168938 - RNA, 19 nt, Homo sapiens
  misc_RNA (1)...(19): siRNA sense strand
guauacauuuggcgaaacu

SEQ ID NO: 1168939 - RNA, 19 nt, Homo sapiens
  misc_RNA (1)...(19): siRNA sense strand
uugauagacuuggcuacua

SEQ ID NO: 1168940 - RNA, 19 nt, Homo sapiens
  misc_RNA (1)...(19): siRNA sense strand
guuauagcaccuugaguug

SEQ ID NO: 1168941 - RNA, 19 nt, Homo sapiens
  misc_RNA (1)...(19): siRNA sense strand
gcuaagaaagacauuacau

SEQ ID NO: 1168942 - RNA, 19 nt, Homo sapiens
  misc_RNA (1)...(19): siRNA sense strand
acugaauccuuacauaauc

SEQ ID NO: 1168943 - RNA, 19 nt, Homo sapiens
  misc_RNA (1)...(19): siRNA sense strand
gaaguaugaaaucuugcuu

SEQ ID NO: 1168944 - RNA, 19 nt, Homo sapiens
  misc_RNA (1)...(19): siRNA sense strand
acccauccauuuauuugaa

SEQ ID NO: 1168945 - RNA, 19 nt, Homo sapiens
  misc_RNA (1)...(19): siRNA sense strand
acaaccaucacuauaagaa

SEQ ID NO: 1168946 - RNA, 19 nt, Homo sapiens
  misc_RNA (1)...(19): siRNA sense strand
caaaucacuugugggguua

SEQ ID NO: 1168947 - RNA, 19 nt, Homo sapiens
  misc_RNA (1)...(19): siRNA sense strand
gaaaucuugcuugcuccua

SEQ ID NO: 1168948 - RNA, 19 nt, Homo sapiens
  misc_RNA (1)...(19): siRNA sense strand
aaaagacacugaugcuguu

SEQ ID NO: 1168949 - RNA, 19 nt, Homo sapiens
  misc_RNA (1)...(19): siRNA sense strand
gaaaaccgacacuugaaga

SEQ ID NO: 1168950 - RNA, 19 nt, Homo sapiens
  misc_RNA (1)...(19): siRNA sense strand
gaagacagcuggcagaacu

SEQ ID NO: 1168951 - RNA, 19 nt, Homo sapiens
  misc_RNA (1)...(19): siRNA sense strand
gaugggaaguccuuauuau

SEQ ID NO: 1168952 - RNA, 19 nt, Homo sapiens
  misc_RNA (1)...(19): siRNA sense strand
gagggaagauagaaaugga

SEQ ID NO: 1168953 - RNA, 19 nt, Homo sapiens
  misc_RNA (1)...(19): siRNA sense strand
gggaaguccuuauuauugg

SEQ ID NO: 1168954 - RNA, 19 nt, Homo sapiens
  misc_RNA (1)...(19): siRNA sense strand
gaagauagaaauggagaau

SEQ ID NO: 1168955 - RNA, 19 nt, Homo sapiens
  misc_RNA (1)...(19): siRNA sense strand
aaaguugcccgcuguguaa

SEQ ID NO: 1168956 - RNA, 19 nt, Homo sapiens
  misc_RNA (1)...(19): siRNA sense strand
cgaugggaaguccuuauua

SEQ ID NO: 1168957 - RNA, 19 nt, Homo sapiens
  misc_RNA (1)...(19): siRNA sense strand
ugggaaguccuuauuauug

SEQ ID NO: 1168958 - RNA, 19 nt, Homo sapiens
  misc_RNA (1)...(19): siRNA sense strand
gaauggagggaagauagaa

SEQ ID NO: 1168959 - RNA, 19 nt, Homo sapiens
  misc_RNA (1)...(19): siRNA sense strand
auuauuggcccuccagaua

SEQ ID NO: 1168960 - RNA, 19 nt, Homo sapiens
  misc_RNA (1)...(19): siRNA sense strand
gcuggcagaacucaacaaa

SEQ ID NO: 1168961 - RNA, 19 nt, Homo sapiens
  misc_RNA (1)...(19): siRNA sense strand
cugcagguuuaauagauga

SEQ ID NO: 1168962 - RNA, 19 nt, Homo sapiens
  misc_RNA (1)...(19): siRNA sense strand
gcacugcuacugcgaagac

SEQ ID NO: 1168963 - RNA, 19 nt, Homo sapiens
  misc_RNA (1)...(19): siRNA sense strand
aaagaauggagggaagaua

SEQ ID NO: 1168964 - RNA, 19 nt, Homo sapiens
  misc_RNA (1)...(19): siRNA sense strand
ggagggaagauagaaaugg

SEQ ID NO: 1168965 - RNA, 19 nt, Homo sapiens
  misc_RNA (1)...(19): siRNA sense strand
gccaagagacugcuuuuga

SEQ ID NO: 1168966 - RNA, 19 nt, Homo sapiens
  misc_RNA (1)...(19): siRNA sense strand
ggaagauagaaauggagaa

SEQ ID NO: 1168967 - RNA, 19 nt, Homo sapiens
  misc_RNA (1)...(19): siRNA sense strand
gcgaagacagcuggcagaa

SEQ ID NO: 1168968 - RNA, 19 nt, Homo sapiens
  misc_RNA (1)...(19): siRNA sense strand
ccgaugggaaguccuuauu

SEQ ID NO: 1168969 - RNA, 19 nt, Homo sapiens
  misc_RNA (1)...(19): siRNA sense strand
guugcccgcuguguaagaa

SEQ ID NO: 1168970 - RNA, 19 nt, Homo sapiens
  misc_RNA (1)...(19): siRNA sense strand
uauuggcccuccagauaca

SEQ ID NO: 1168971 - RNA, 19 nt, Homo sapiens
  misc_RNA (1)...(19): siRNA sense strand
aagaauggagggaagauag

SEQ ID NO: 1168972 - RNA, 19 nt, Homo sapiens
  misc_RNA (1)...(19): siRNA sense strand
gcccuccagauacacuuua

SEQ ID NO: 1168973 - RNA, 19 nt, Homo sapiens
  misc_RNA (1)...(19): siRNA sense strand
agagacugcuuuugaguga

SEQ ID NO: 1168974 - RNA, 19 nt, Homo sapiens
  misc_RNA (1)...(19): siRNA sense strand
ccaagagacugcuuuugag

SEQ ID NO: 1168975 - RNA, 19 nt, Homo sapiens
  misc_RNA (1)...(19): siRNA sense strand
gaagacagcuggcagaacu

SEQ ID NO: 1168976 - RNA, 19 nt, Homo sapiens
  misc_RNA (1)...(19): siRNA sense strand
gaugggaaguccuuauuau

SEQ ID NO: 1168977 - RNA, 19 nt, Homo sapiens
  misc_RNA (1)...(19): siRNA sense strand
gggaaguccuuauuauugg

SEQ ID NO: 1168978 - RNA, 19 nt, Homo sapiens
  misc_RNA (1)...(19): siRNA sense strand
cgaugggaaguccuuauua

SEQ ID NO: 1168979 - RNA, 19 nt, Homo sapiens
  misc_RNA (1)...(19): siRNA sense strand
ugggaaguccuuauuauug

SEQ ID NO: 1168980 - RNA, 19 nt, Homo sapiens
  misc_RNA (1)...(19): siRNA sense strand
auuauuggcccuccagaua

SEQ ID NO: 1168981 - RNA, 19 nt, Homo sapiens
  misc_RNA (1)...(19): siRNA sense strand
gcuggcagaacucaacaaa

SEQ ID NO: 1168982 - RNA, 19 nt, Homo sapiens
  misc_RNA (1)...(19): siRNA sense strand
cugcagguuuaauagauga

SEQ ID NO: 1168983 - RNA, 19 nt, Homo sapiens
  misc_RNA (1)...(19): siRNA sense strand
gcacugcuacugcgaagac

SEQ ID NO: 1168984 - RNA, 19 nt, Homo sapiens
  misc_RNA (1)...(19): siRNA sense strand
gcgaagacagcuggcagaa

SEQ ID NO: 1168985 - RNA, 19 nt, Homo sapiens
  misc_RNA (1)...(19): siRNA sense strand
ccgaugggaaguccuuauu

SEQ ID NO: 1168986 - RNA, 19 nt, Homo sapiens
  misc_RNA (1)...(19): siRNA sense strand
uauuggcccuccagauaca

SEQ ID NO: 1168987 - RNA, 19 nt, Homo sapiens
  misc_RNA (1)...(19): siRNA sense strand
gcccuccagauacacuuua

SEQ ID NO: 1168988 - RNA, 19 nt, Homo sapiens
  misc_RNA (1)...(19): siRNA sense strand
gaggagaacuguuugauag

SEQ ID NO: 1168989 - RNA, 19 nt, Homo sapiens
  misc_RNA (1)...(19): siRNA sense strand
gaugaaguaucucuaaaug

SEQ ID NO: 1168990 - RNA, 19 nt, Homo sapiens
  misc_RNA (1)...(19): siRNA sense strand
caugaaagcuauuccagaa

SEQ ID NO: 1168991 - RNA, 19 nt, Homo sapiens
  misc_RNA (1)...(19): siRNA sense strand
gaacaucaagugcucauga

SEQ ID NO: 1168992 - RNA, 19 nt, Homo sapiens
  misc_RNA (1)...(19): siRNA sense strand
agaaacggcugacuacauu

SEQ ID NO: 1168993 - RNA, 19 nt, Homo sapiens
  misc_RNA (1)...(19): siRNA sense strand
cauguggucuguaggaaua

SEQ ID NO: 1168994 - RNA, 19 nt, Homo sapiens
  misc_RNA (1)...(19): siRNA sense strand
caucuuacuuuguggauuu

SEQ ID NO: 1168995 - RNA, 19 nt, Homo sapiens
  misc_RNA (1)...(19): siRNA sense strand
ggaggcaguugcuuaucua

SEQ ID NO: 1168996 - RNA, 19 nt, Homo sapiens
  misc_RNA (1)...(19): siRNA sense strand
aaaagaagcuccaagaauu

SEQ ID NO: 1168997 - RNA, 19 nt, Homo sapiens
  misc_RNA (1)...(19): siRNA sense strand
gcagaugccguuaaacaaa

SEQ ID NO: 1168998 - RNA, 19 nt, Homo sapiens
  misc_RNA (1)...(19): siRNA sense strand
ggaggagaacuguuugaua

SEQ ID NO: 1168999 - RNA, 19 nt, Homo sapiens
  misc_RNA (1)...(19): siRNA sense strand
guacugcgcaccugaaauu

SEQ ID NO: 1169000 - RNA, 19 nt, Homo sapiens
  misc_RNA (1)...(19): siRNA sense strand
ggagaacuguuugauagga

SEQ ID NO: 1169001 - RNA, 19 nt, Homo sapiens
  misc_RNA (1)...(19): siRNA sense strand
gaaccauucuaugaugaaa

SEQ ID NO: 1169002 - RNA, 19 nt, Homo sapiens
  misc_RNA (1)...(19): siRNA sense strand
gggaugaaguaucucuaaa

SEQ ID NO: 1169003 - RNA, 19 nt, Homo sapiens
  misc_RNA (1)...(19): siRNA sense strand
aguuaaaggugcagauaua

SEQ ID NO: 1169004 - RNA, 19 nt, Homo sapiens
  misc_RNA (1)...(19): siRNA sense strand
ccaaagaaacggcugacua

SEQ ID NO: 1169005 - RNA, 19 nt, Homo sapiens
  misc_RNA (1)...(19): siRNA sense strand
ggaauaaucaccuacaucu

SEQ ID NO: 1169006 - RNA, 19 nt, Homo sapiens
  misc_RNA (1)...(19): siRNA sense strand
gauuugaaccauucuauga

SEQ ID NO: 1169007 - RNA, 19 nt, Homo sapiens
  misc_RNA (1)...(19): siRNA sense strand
cguaagaacugagauagga

SEQ ID NO: 1169008 - RNA, 19 nt, Homo sapiens
  misc_RNA (1)...(19): siRNA sense strand
ugaaagaggcgaucaguuc

SEQ ID NO: 1169009 - RNA, 19 nt, Homo sapiens
  misc_RNA (1)...(19): siRNA sense strand
ucaccuacaucuuacuuug

SEQ ID NO: 1169010 - RNA, 19 nt, Homo sapiens
  misc_RNA (1)...(19): siRNA sense strand
gaaagaggcgaucaguuca

SEQ ID NO: 1169011 - RNA, 19 nt, Homo sapiens
  misc_RNA (1)...(19): siRNA sense strand
ggugcaagccuuagagaaa

SEQ ID NO: 1169012 - RNA, 19 nt, Homo sapiens
  misc_RNA (1)...(19): siRNA sense strand
gaaagcuauuccagaagga

SEQ ID NO: 1169013 - RNA, 19 nt, Homo sapiens
  misc_RNA (1)...(19): siRNA sense strand
aggagaagcugaagacugu

SEQ ID NO: 1169014 - RNA, 19 nt, Homo sapiens
  misc_RNA (1)...(19): siRNA sense strand
ggacauguggucuguagga

SEQ ID NO: 1169015 - RNA, 19 nt, Homo sapiens
  misc_RNA (1)...(19): siRNA sense strand
gaagccuuaugcucucaaa

SEQ ID NO: 1169016 - RNA, 19 nt, Homo sapiens
  misc_RNA (1)...(19): siRNA sense strand
cagaugccguuaaacaaau

SEQ ID NO: 1169017 - RNA, 19 nt, Homo sapiens
  misc_RNA (1)...(19): siRNA sense strand
caaagaaacggcugacuac

SEQ ID NO: 1169018 - RNA, 19 nt, Homo sapiens
  misc_RNA (1)...(19): siRNA sense strand
ggacuuggucagaaaauua

SEQ ID NO: 1169019 - RNA, 19 nt, Homo sapiens
  misc_RNA (1)...(19): siRNA sense strand
ccucucacauccaaacauu

SEQ ID NO: 1169020 - RNA, 19 nt, Homo sapiens
  misc_RNA (1)...(19): siRNA sense strand
gcaguugcuuaucuacaug

SEQ ID NO: 1169021 - RNA, 19 nt, Homo sapiens
  misc_RNA (1)...(19): siRNA sense strand
gagauaggaguucuucuuc

SEQ ID NO: 1169022 - RNA, 19 nt, Homo sapiens
  misc_RNA (1)...(19): siRNA sense strand
ggaugaaguaucucuaaau

SEQ ID NO: 1169023 - RNA, 19 nt, Homo sapiens
  misc_RNA (1)...(19): siRNA sense strand
guguacagaugcaaacaga

SEQ ID NO: 1169024 - RNA, 19 nt, Homo sapiens
  misc_RNA (1)...(19): siRNA sense strand
agaaaucagucugguccua

SEQ ID NO: 1169025 - RNA, 19 nt, Homo sapiens
  misc_RNA (1)...(19): siRNA sense strand
gagaacuguuugauaggau

SEQ ID NO: 1169026 - RNA, 19 nt, Homo sapiens
  misc_RNA (1)...(19): siRNA sense strand
uggcugaccuggaacuaga

SEQ ID NO: 1169027 - RNA, 19 nt, Homo sapiens
  misc_RNA (1)...(19): siRNA sense strand
ggcaguugcuuaucuacau

SEQ ID NO: 1169028 - RNA, 19 nt, Homo sapiens
  misc_RNA (1)...(19): siRNA sense strand
ggugcuacauccauugugu

SEQ ID NO: 1169029 - RNA, 19 nt, Homo sapiens
  misc_RNA (1)...(19): siRNA sense strand
gaugugauccugccagagu

SEQ ID NO: 1169030 - RNA, 19 nt, Homo sapiens
  misc_RNA (1)...(19): siRNA sense strand
gaaguuccacagcaagaug

SEQ ID NO: 1169031 - RNA, 19 nt, Homo sapiens
  misc_RNA (1)...(19): siRNA sense strand
agauauaaaugcugaagag

SEQ ID NO: 1169032 - RNA, 19 nt, Homo sapiens
  misc_RNA (1)...(19): siRNA sense strand
aggcugagcugaugaaggu

SEQ ID NO: 1169033 - RNA, 19 nt, Homo sapiens
  misc_RNA (1)...(19): siRNA sense strand
guacagaugcaaacagaag

SEQ ID NO: 1169034 - RNA, 19 nt, Homo sapiens
  misc_RNA (1)...(19): siRNA sense strand
cagguaaagcagccaauuu

SEQ ID NO: 1169035 - RNA, 19 nt, Homo sapiens
  misc_RNA (1)...(19): siRNA sense strand
ucuuagagguugugccuau

SEQ ID NO: 1169036 - RNA, 19 nt, Homo sapiens
  misc_RNA (1)...(19): siRNA sense strand
caucaagugcucaugaaga

SEQ ID NO: 1169037 - RNA, 19 nt, Homo sapiens
  misc_RNA (1)...(19): siRNA sense strand
gaaacggcugacuacauuu

SEQ ID NO: 1169038 - RNA, 19 nt, Homo sapiens
  misc_RNA (1)...(19): siRNA sense strand
gcucucaaaguguuaaaga

SEQ ID NO: 1169039 - RNA, 19 nt, Homo sapiens
  misc_RNA (1)...(19): siRNA sense strand
gaauaaucaccuacaucuu

SEQ ID NO: 1169040 - RNA, 19 nt, Homo sapiens
  misc_RNA (1)...(19): siRNA sense strand
ugagauaggaguucuucuu

SEQ ID NO: 1169041 - RNA, 19 nt, Homo sapiens
  misc_RNA (1)...(19): siRNA sense strand
guuaaaggugcagauauaa

SEQ ID NO: 1169042 - RNA, 19 nt, Homo sapiens
  misc_RNA (1)...(19): siRNA sense strand
aaaguuaaaggugcagaua

SEQ ID NO: 1169043 - RNA, 19 nt, Homo sapiens
  misc_RNA (1)...(19): siRNA sense strand
ugagcgagaugcugcagau

SEQ ID NO: 1169044 - RNA, 19 nt, Homo sapiens
  misc_RNA (1)...(19): siRNA sense strand
cuuaugcucucaaaguguu

SEQ ID NO: 1169045 - RNA, 19 nt, Homo sapiens
  misc_RNA (1)...(19): siRNA sense strand
gugcaagccuuagagaaag

SEQ ID NO: 1169046 - RNA, 19 nt, Homo sapiens
  misc_RNA (1)...(19): siRNA sense strand
acacauggauaccgcucaa

SEQ ID NO: 1169047 - RNA, 19 nt, Homo sapiens
  misc_RNA (1)...(19): siRNA sense strand
uaaagcagccaauuuugua

SEQ ID NO: 1169048 - RNA, 19 nt, Homo sapiens
  misc_RNA (1)...(19): siRNA sense strand
guggacauguggucuguag

SEQ ID NO: 1169049 - RNA, 19 nt, Homo sapiens
  misc_RNA (1)...(19): siRNA sense strand
gacauguggucuguaggaa

SEQ ID NO: 1169050 - RNA, 19 nt, Homo sapiens
  misc_RNA (1)...(19): siRNA sense strand
gaaaguuaaaggugcagau

SEQ ID NO: 1169051 - RNA, 19 nt, Homo sapiens
  misc_RNA (1)...(19): siRNA sense strand
gcacaggcugagcugauga

SEQ ID NO: 1169052 - RNA, 19 nt, Homo sapiens
  misc_RNA (1)...(19): siRNA sense strand
acgaggacaugaaagcuau

SEQ ID NO: 1169053 - RNA, 19 nt, Homo sapiens
  misc_RNA (1)...(19): siRNA sense strand
gaagcuccaagaauucaau

SEQ ID NO: 1169054 - RNA, 19 nt, Homo sapiens
  misc_RNA (1)...(19): siRNA sense strand
aaagaagcuccaagaauuc

SEQ ID NO: 1169055 - RNA, 19 nt, Homo sapiens
  misc_RNA (1)...(19): siRNA sense strand
caaaagaagcuccaagaau

SEQ ID NO: 1169056 - RNA, 19 nt, Homo sapiens
  misc_RNA (1)...(19): siRNA sense strand
ggcgaucaguucauguuca

SEQ ID NO: 1169057 - RNA, 19 nt, Homo sapiens
  misc_RNA (1)...(19): siRNA sense strand
gaggcgaucaguucauguu

SEQ ID NO: 1169058 - RNA, 19 nt, Homo sapiens
  misc_RNA (1)...(19): siRNA sense strand
gaacuguuugauaggauug

SEQ ID NO: 1169059 - RNA, 19 nt, Homo sapiens
  misc_RNA (1)...(19): siRNA sense strand
gauccugccagaguacuaa

SEQ ID NO: 1169060 - RNA, 19 nt, Homo sapiens
  misc_RNA (1)...(19): siRNA sense strand
agaacuguuugauaggauu

SEQ ID NO: 1169061 - RNA, 19 nt, Homo sapiens
  misc_RNA (1)...(19): siRNA sense strand
ggauuugaaccauucuaug

SEQ ID NO: 1169062 - RNA, 19 nt, Homo sapiens
  misc_RNA (1)...(19): siRNA sense strand
gccuuaugcucucaaagug

SEQ ID NO: 1169063 - RNA, 19 nt, Homo sapiens
  misc_RNA (1)...(19): siRNA sense strand
ucucacauccaaacauuau

SEQ ID NO: 1169064 - RNA, 19 nt, Homo sapiens
  misc_RNA (1)...(19): siRNA sense strand
uagcagaggagaagcugaa

SEQ ID NO: 1169065 - RNA, 19 nt, Homo sapiens
  misc_RNA (1)...(19): siRNA sense strand
ggacaugaaagcuauucca

SEQ ID NO: 1169066 - RNA, 19 nt, Homo sapiens
  misc_RNA (1)...(19): siRNA sense strand
gcaacgaggacaugaaagc

SEQ ID NO: 1169067 - RNA, 19 nt, Homo sapiens
  misc_RNA (1)...(19): siRNA sense strand
caguucauguucaggagaa

SEQ ID NO: 1169068 - RNA, 19 nt, Homo sapiens
  misc_RNA (1)...(19): siRNA sense strand
aaaucagucugguccuaga

SEQ ID NO: 1169069 - RNA, 19 nt, Homo sapiens
  misc_RNA (1)...(19): siRNA sense strand
gcagaggagaagcugaaga

SEQ ID NO: 1169070 - RNA, 19 nt, Homo sapiens
  misc_RNA (1)...(19): siRNA sense strand
aaucguaagaacugagaua

SEQ ID NO: 1169071 - RNA, 19 nt, Homo sapiens
  misc_RNA (1)...(19): siRNA sense strand
ggauaccgcucaaaagaag

SEQ ID NO: 1169072 - RNA, 19 nt, Homo sapiens
  misc_RNA (1)...(19): siRNA sense strand
accauucuaugaugaaaga

SEQ ID NO: 1169073 - RNA, 19 nt, Homo sapiens
  misc_RNA (1)...(19): siRNA sense strand
gcucaugaagacaguaugu

SEQ ID NO: 1169074 - RNA, 19 nt, Homo sapiens
  misc_RNA (1)...(19): siRNA sense strand
ggcaguggaggaugggaua

SEQ ID NO: 1169075 - RNA, 19 nt, Homo sapiens
  misc_RNA (1)...(19): siRNA sense strand
ggcacaggcugagcugaug

SEQ ID NO: 1169076 - RNA, 19 nt, Homo sapiens
  misc_RNA (1)...(19): siRNA sense strand
cugcgcaccugaaauucuu

SEQ ID NO: 1169077 - RNA, 19 nt, Homo sapiens
  misc_RNA (1)...(19): siRNA sense strand
aacaucaagugcucaugaa

SEQ ID NO: 1169078 - RNA, 19 nt, Homo sapiens
  misc_RNA (1)...(19): siRNA sense strand
gcgaucaguucauguucag

SEQ ID NO: 1169079 - RNA, 19 nt, Homo sapiens
  misc_RNA (1)...(19): siRNA sense strand
gaugaaagaggcgaucagu

SEQ ID NO: 1169080 - RNA, 19 nt, Homo sapiens
  misc_RNA (1)...(19): siRNA sense strand
uuugaaccauucuaugaug

SEQ ID NO: 1169081 - RNA, 19 nt, Homo sapiens
  misc_RNA (1)...(19): siRNA sense strand
aagaggcgaucaguucaug

SEQ ID NO: 1169082 - RNA, 19 nt, Homo sapiens
  misc_RNA (1)...(19): siRNA sense strand
uggcaacgaggacaugaaa

SEQ ID NO: 1169083 - RNA, 19 nt, Homo sapiens
  misc_RNA (1)...(19): siRNA sense strand
gaaauucuuagagguugug

SEQ ID NO: 1169084 - RNA, 19 nt, Homo sapiens
  misc_RNA (1)...(19): siRNA sense strand
ggacccagaagccuuaugc

SEQ ID NO: 1169085 - RNA, 19 nt, Homo sapiens
  misc_RNA (1)...(19): siRNA sense strand
uugaaccauucuaugauga

SEQ ID NO: 1169086 - RNA, 19 nt, Homo sapiens
  misc_RNA (1)...(19): siRNA sense strand
ccugaaauucuuagagguu

SEQ ID NO: 1169087 - RNA, 19 nt, Homo sapiens
  misc_RNA (1)...(19): siRNA sense strand
gcaccugaaauucuuagag

SEQ ID NO: 1169088 - RNA, 19 nt, Homo sapiens
  misc_RNA (1)...(19): siRNA sense strand
gcaacaagcugaaagaaga

SEQ ID NO: 1169089 - RNA, 19 nt, Homo sapiens
  misc_RNA (1)...(19): siRNA sense strand
uaaagaugcuggccagaua

SEQ ID NO: 1169090 - RNA, 19 nt, Homo sapiens
  misc_RNA (1)...(19): siRNA sense strand
gaaguuacauuugacauug

SEQ ID NO: 1169091 - RNA, 19 nt, Homo sapiens
  misc_RNA (1)...(19): siRNA sense strand
ggaauggccuuagucauga

SEQ ID NO: 1169092 - RNA, 19 nt, Homo sapiens
  misc_RNA (1)...(19): siRNA sense strand
gaaauaugcugaagaagac

SEQ ID NO: 1169093 - RNA, 19 nt, Homo sapiens
  misc_RNA (1)...(19): siRNA sense strand
gaagaagaccggcgaaaga

SEQ ID NO: 1169094 - RNA, 19 nt, Homo sapiens
  misc_RNA (1)...(19): siRNA sense strand
aaaccaagauggaagaauu

SEQ ID NO: 1169095 - RNA, 19 nt, Homo sapiens
  misc_RNA (1)...(19): siRNA sense strand
caaagucauugcuguauau

SEQ ID NO: 1169096 - RNA, 19 nt, Homo sapiens
  misc_RNA (1)...(19): siRNA sense strand
aaacgcaaguggaaauuaa

SEQ ID NO: 1169097 - RNA, 19 nt, Homo sapiens
  misc_RNA (1)...(19): siRNA sense strand
gaggugaaauccacaaaug

SEQ ID NO: 1169098 - RNA, 19 nt, Homo sapiens
  misc_RNA (1)...(19): siRNA sense strand
ggaacgaguugaagcaguu

SEQ ID NO: 1169099 - RNA, 19 nt, Homo sapiens
  misc_RNA (1)...(19): siRNA sense strand
agagaaauaugcugaagaa

SEQ ID NO: 1169100 - RNA, 19 nt, Homo sapiens
  misc_RNA (1)...(19): siRNA sense strand
gaaagagacugcagaaaau

SEQ ID NO: 1169101 - RNA, 19 nt, Homo sapiens
  misc_RNA (1)...(19): siRNA sense strand
uaauauggcugaaggaauc

SEQ ID NO: 1169102 - RNA, 19 nt, Homo sapiens
  misc_RNA (1)...(19): siRNA sense strand
cgagaaggcucuggaaguu

SEQ ID NO: 1169103 - RNA, 19 nt, Homo sapiens
  misc_RNA (1)...(19): siRNA sense strand
gaucuaaucagaaggacua

SEQ ID NO: 1169104 - RNA, 19 nt, Homo sapiens
  misc_RNA (1)...(19): siRNA sense strand
gagcauuuguguugaugaa

SEQ ID NO: 1169105 - RNA, 19 nt, Homo sapiens
  misc_RNA (1)...(19): siRNA sense strand
gcauuuguguugaugaaga

SEQ ID NO: 1169106 - RNA, 19 nt, Homo sapiens
  misc_RNA (1)...(19): siRNA sense strand
ccaauuaccugcugaugag

SEQ ID NO: 1169107 - RNA, 19 nt, Homo sapiens
  misc_RNA (1)...(19): siRNA sense strand
ugacauaggagaagugauu

SEQ ID NO: 1169108 - RNA, 19 nt, Homo sapiens
  misc_RNA (1)...(19): siRNA sense strand
agacaaaucagaagacaaa

SEQ ID NO: 1169109 - RNA, 19 nt, Homo sapiens
  misc_RNA (1)...(19): siRNA sense strand
caaaggugcuggagaaugc

SEQ ID NO: 1169110 - RNA, 19 nt, Homo sapiens
  misc_RNA (1)...(19): siRNA sense strand
acaaagucauugcuguaua

SEQ ID NO: 1169111 - RNA, 19 nt, Homo sapiens
  misc_RNA (1)...(19): siRNA sense strand
gacccaagcauuugaauau

SEQ ID NO: 1169112 - RNA, 19 nt, Homo sapiens
  misc_RNA (1)...(19): siRNA sense strand
ggaggugucuuuaccaaac

SEQ ID NO: 1169113 - RNA, 19 nt, Homo sapiens
  misc_RNA (1)...(19): siRNA sense strand
ggauuaagcaaagaugaua

SEQ ID NO: 1169114 - RNA, 19 nt, Homo sapiens
  misc_RNA (1)...(19): siRNA sense strand
ccaagcauuugaauaugaa

SEQ ID NO: 1169115 - RNA, 19 nt, Homo sapiens
  misc_RNA (1)...(19): siRNA sense strand
gauuggagcauuuguguug

SEQ ID NO: 1169116 - RNA, 19 nt, Homo sapiens
  misc_RNA (1)...(19): siRNA sense strand
ccaaugggauaguacaugu

SEQ ID NO: 1169117 - RNA, 19 nt, Homo sapiens
  misc_RNA (1)...(19): siRNA sense strand
cagcaagagugacauagga

SEQ ID NO: 1169118 - RNA, 19 nt, Homo sapiens
  misc_RNA (1)...(19): siRNA sense strand
gagcaguuguugguauuga

SEQ ID NO: 1169119 - RNA, 19 nt, Homo sapiens
  misc_RNA (1)...(19): siRNA sense strand
gggagcaguuguugguauu

SEQ ID NO: 1169120 - RNA, 19 nt, Homo sapiens
  misc_RNA (1)...(19): siRNA sense strand
agaaauaugcugaagaaga

SEQ ID NO: 1169121 - RNA, 19 nt, Homo sapiens
  misc_RNA (1)...(19): siRNA sense strand
ggacccaagcauuugaaua

SEQ ID NO: 1169122 - RNA, 19 nt, Homo sapiens
  misc_RNA (1)...(19): siRNA sense strand
gaaguacagaaagacauua

SEQ ID NO: 1169123 - RNA, 19 nt, Homo sapiens
  misc_RNA (1)...(19): siRNA sense strand
gcagagacaggccacuaaa

SEQ ID NO: 1169124 - RNA, 19 nt, Homo sapiens
  misc_RNA (1)...(19): siRNA sense strand
gcagagaaauaugcugaag

SEQ ID NO: 1169125 - RNA, 19 nt, Homo sapiens
  misc_RNA (1)...(19): siRNA sense strand
gaaagaaggaacgaguuga

SEQ ID NO: 1169126 - RNA, 19 nt, Homo sapiens
  misc_RNA (1)...(19): siRNA sense strand
ucacagucccagcuuauuu

SEQ ID NO: 1169127 - RNA, 19 nt, Homo sapiens
  misc_RNA (1)...(19): siRNA sense strand
caaacgcaaguggaaauua

SEQ ID NO: 1169128 - RNA, 19 nt, Homo sapiens
  misc_RNA (1)...(19): siRNA sense strand
ggguugauuugacuaaaga

SEQ ID NO: 1169129 - RNA, 19 nt, Homo sapiens
  misc_RNA (1)...(19): siRNA sense strand
uugaagggauugucacuga

SEQ ID NO: 1169130 - RNA, 19 nt, Homo sapiens
  misc_RNA (1)...(19): siRNA sense strand
gcaaguggaaauuaaagug

SEQ ID NO: 1169131 - RNA, 19 nt, Homo sapiens
  misc_RNA (1)...(19): siRNA sense strand
caacccaaacaauacauuu

SEQ ID NO: 1169132 - RNA, 19 nt, Homo sapiens
  misc_RNA (1)...(19): siRNA sense strand
cacugaagcuguucgaaau

SEQ ID NO: 1169133 - RNA, 19 nt, Homo sapiens
  misc_RNA (1)...(19): siRNA sense strand
guacauguuucugcuaaag

SEQ ID NO: 1169134 - RNA, 19 nt, Homo sapiens
  misc_RNA (1)...(19): siRNA sense strand
ccaagaagagccagguauu

SEQ ID NO: 1169135 - RNA, 19 nt, Homo sapiens
  misc_RNA (1)...(19): siRNA sense strand
cccaagcauuugaauauga

SEQ ID NO: 1169136 - RNA, 19 nt, Homo sapiens
  misc_RNA (1)...(19): siRNA sense strand
ggaaauucagaaaggagua

SEQ ID NO: 1169137 - RNA, 19 nt, Homo sapiens
  misc_RNA (1)...(19): siRNA sense strand
gaugaaagagacugcagaa

SEQ ID NO: 1169138 - RNA, 19 nt, Homo sapiens
  misc_RNA (1)...(19): siRNA sense strand
gcgauaugaugauccugaa

SEQ ID NO: 1169139 - RNA, 19 nt, Homo sapiens
  misc_RNA (1)...(19): siRNA sense strand
gguauugauuuggguacua

SEQ ID NO: 1169140 - RNA, 19 nt, Homo sapiens
  misc_RNA (1)...(19): siRNA sense strand
gaacgaguugaagcaguua

SEQ ID NO: 1169141 - RNA, 19 nt, Homo sapiens
  misc_RNA (1)...(19): siRNA sense strand
uaguacauguuucugcuaa

SEQ ID NO: 1169142 - RNA, 19 nt, Homo sapiens
  misc_RNA (1)...(19): siRNA sense strand
ugacaucaauuugcccuau

SEQ ID NO: 1169143 - RNA, 19 nt, Homo sapiens
  misc_RNA (1)...(19): siRNA sense strand
gaucacagucccagcuuau

SEQ ID NO: 1169144 - RNA, 19 nt, Homo sapiens
  misc_RNA (1)...(19): siRNA sense strand
gcauuugaauaugaaguug

SEQ ID NO: 1169145 - RNA, 19 nt, Homo sapiens
  misc_RNA (1)...(19): siRNA sense strand
gaaggaacgaguugaagca

SEQ ID NO: 1169146 - RNA, 19 nt, Homo sapiens
  misc_RNA (1)...(19): siRNA sense strand
ugacuaggaugcccaaggu

SEQ ID NO: 1169147 - RNA, 19 nt, Homo sapiens
  misc_RNA (1)...(19): siRNA sense strand
gaaugugcuucgggugauu

SEQ ID NO: 1169148 - RNA, 19 nt, Homo sapiens
  misc_RNA (1)...(19): siRNA sense strand
ucacugaagcuguucgaaa

SEQ ID NO: 1169149 - RNA, 19 nt, Homo sapiens
  misc_RNA (1)...(19): siRNA sense strand
cgaaagaaggaacgaguug

SEQ ID NO: 1169150 - RNA, 19 nt, Homo sapiens
  misc_RNA (1)...(19): siRNA sense strand
caaaucagaagacaaaguc

SEQ ID NO: 1169151 - RNA, 19 nt, Homo sapiens
  misc_RNA (1)...(19): siRNA sense strand
gcaaaggugcuggagaaug

SEQ ID NO: 1169152 - RNA, 19 nt, Homo sapiens
  misc_RNA (1)...(19): siRNA sense strand
gggagcuccuggcuagaaa

SEQ ID NO: 1169153 - RNA, 19 nt, Homo sapiens
  misc_RNA (1)...(19): siRNA sense strand
ggacgugagcagcagauug

SEQ ID NO: 1169154 - RNA, 19 nt, Homo sapiens
  misc_RNA (1)...(19): siRNA sense strand
ggacaguuuacuuugauug

SEQ ID NO: 1169155 - RNA, 19 nt, Homo sapiens
  misc_RNA (1)...(19): siRNA sense strand
agagauggcuggagacaac

SEQ ID NO: 1169156 - RNA, 19 nt, Homo sapiens
  misc_RNA (1)...(19): siRNA sense strand
cgagucagauuggagcauu

SEQ ID NO: 1169157 - RNA, 19 nt, Homo sapiens
  misc_RNA (1)...(19): siRNA sense strand
agacaaagucauugcugua

SEQ ID NO: 1169158 - RNA, 19 nt, Homo sapiens
  misc_RNA (1)...(19): siRNA sense strand
gaguugaagcaguuaauau

SEQ ID NO: 1169159 - RNA, 19 nt, Homo sapiens
  misc_RNA (1)...(19): siRNA sense strand
aaugugaacucuccucauc

SEQ ID NO: 1169160 - RNA, 19 nt, Homo sapiens
  misc_RNA (1)...(19): siRNA sense strand
ccuauggucuagacaaauc

SEQ ID NO: 1169161 - RNA, 19 nt, Homo sapiens
  misc_RNA (1)...(19): siRNA sense strand
caagauggaagaauucaag

SEQ ID NO: 1169162 - RNA, 19 nt, Homo sapiens
  misc_RNA (1)...(19): siRNA sense strand
cggaugugcugcuccuuga

SEQ ID NO: 1169163 - RNA, 19 nt, Homo sapiens
  misc_RNA (1)...(19): siRNA sense strand
gagucagauuggagcauuu

SEQ ID NO: 1169164 - RNA, 19 nt, Homo sapiens
  misc_RNA (1)...(19): siRNA sense strand
uggaauggccuuagucaug

SEQ ID NO: 1169165 - RNA, 19 nt, Homo sapiens
  misc_RNA (1)...(19): siRNA sense strand
uaaagugugucagggugaa

SEQ ID NO: 1169166 - RNA, 19 nt, Homo sapiens
  misc_RNA (1)...(19): siRNA sense strand
ugaaaaggcuaaaugugaa

SEQ ID NO: 1169167 - RNA, 19 nt, Homo sapiens
  misc_RNA (1)...(19): siRNA sense strand
agagacaggccacuaaaga

SEQ ID NO: 1169168 - RNA, 19 nt, Homo sapiens
  misc_RNA (1)...(19): siRNA sense strand
ugaaagagacugcagaaaa

SEQ ID NO: 1169169 - RNA, 19 nt, Homo sapiens
  misc_RNA (1)...(19): siRNA sense strand
gauaugaugauccugaagu

SEQ ID NO: 1169170 - RNA, 19 nt, Homo sapiens
  misc_RNA (1)...(19): siRNA sense strand
acacagaaaccaagaugga

SEQ ID NO: 1169171 - RNA, 19 nt, Homo sapiens
  misc_RNA (1)...(19): siRNA sense strand
caguuuacuuugauuggaa

SEQ ID NO: 1169172 - RNA, 19 nt, Homo sapiens
  misc_RNA (1)...(19): siRNA sense strand
gggauugucacugaucuaa

SEQ ID NO: 1169173 - RNA, 19 nt, Homo sapiens
  misc_RNA (1)...(19): siRNA sense strand
gcaguuguugguauugauu

SEQ ID NO: 1169174 - RNA, 19 nt, Homo sapiens
  misc_RNA (1)...(19): siRNA sense strand
gaaauucagaaaggaguau

SEQ ID NO: 1169175 - RNA, 19 nt, Homo sapiens
  misc_RNA (1)...(19): siRNA sense strand
ugaucacagucccagcuua

SEQ ID NO: 1169176 - RNA, 19 nt, Homo sapiens
  misc_RNA (1)...(19): siRNA sense strand
gauggugagcgacuuguug

SEQ ID NO: 1169177 - RNA, 19 nt, Homo sapiens
  misc_RNA (1)...(19): siRNA sense strand
aaagaaggaacgaguugaa

SEQ ID NO: 1169178 - RNA, 19 nt, Homo sapiens
  misc_RNA (1)...(19): siRNA sense strand
gacgugagcagcagauugu

SEQ ID NO: 1169179 - RNA, 19 nt, Homo sapiens
  misc_RNA (1)...(19): siRNA sense strand
gaagggauugucacugauc

SEQ ID NO: 1169180 - RNA, 19 nt, Homo sapiens
  misc_RNA (1)...(19): siRNA sense strand
caagggagcaguuguuggu

SEQ ID NO: 1169181 - RNA, 19 nt, Homo sapiens
  misc_RNA (1)...(19): siRNA sense strand
gcagacugacaucaauuug

SEQ ID NO: 1169182 - RNA, 19 nt, Homo sapiens
  misc_RNA (1)...(19): siRNA sense strand
uauggaagguaaacaagca

SEQ ID NO: 1169183 - RNA, 19 nt, Homo sapiens
  misc_RNA (1)...(19): siRNA sense strand
uggcaguuauggaagguaa

SEQ ID NO: 1169184 - RNA, 19 nt, Homo sapiens
  misc_RNA (1)...(19): siRNA sense strand
gagacaggccacuaaagau

SEQ ID NO: 1169185 - RNA, 19 nt, Homo sapiens
  misc_RNA (1)...(19): siRNA sense strand
caagaagagccagguauuc

SEQ ID NO: 1169186 - RNA, 19 nt, Homo sapiens
  misc_RNA (1)...(19): siRNA sense strand
gcgagaaggcucuggaagu

SEQ ID NO: 1169187 - RNA, 19 nt, Homo sapiens
  misc_RNA (1)...(19): siRNA sense strand
aggcaucacugaagcuguu

SEQ ID NO: 1169188 - RNA, 19 nt, Homo sapiens
  misc_RNA (1)...(19): siRNA sense strand
gcaaauaucuucccugugu

SEQ ID NO: 1169189 - RNA, 19 nt, Homo sapiens
  misc_RNA (1)...(19): siRNA sense strand
gaagcuugcuggacuauuu

SEQ ID NO: 1169190 - RNA, 19 nt, Homo sapiens
  misc_RNA (1)...(19): siRNA sense strand
gaaagacaauuaucgaaug

SEQ ID NO: 1169191 - RNA, 19 nt, Homo sapiens
  misc_RNA (1)...(19): siRNA sense strand
ggaaacugcucuccaaaga

SEQ ID NO: 1169192 - RNA, 19 nt, Homo sapiens
  misc_RNA (1)...(19): siRNA sense strand
gcacaaugauuacaaagug

SEQ ID NO: 1169193 - RNA, 19 nt, Homo sapiens
  misc_RNA (1)...(19): siRNA sense strand
ugaagaagcugccauguuc

SEQ ID NO: 1169194 - RNA, 19 nt, Homo sapiens
  misc_RNA (1)...(19): siRNA sense strand
caacagggcucaaauacag

SEQ ID NO: 1169195 - RNA, 19 nt, Homo sapiens
  misc_RNA (1)...(19): siRNA sense strand
gaagaaaugagacgaagaa

SEQ ID NO: 1169196 - RNA, 19 nt, Homo sapiens
  misc_RNA (1)...(19): siRNA sense strand
caagagagaugguggagau

SEQ ID NO: 1169197 - RNA, 19 nt, Homo sapiens
  misc_RNA (1)...(19): siRNA sense strand
uuauagagcugcuuaauuc

SEQ ID NO: 1169198 - RNA, 19 nt, Homo sapiens
  misc_RNA (1)...(19): siRNA sense strand
gaaaugagacgaagaagag

SEQ ID NO: 1169199 - RNA, 19 nt, Homo sapiens
  misc_RNA (1)...(19): siRNA sense strand
gaaugaagagcuauaagaa

SEQ ID NO: 1169200 - RNA, 19 nt, Homo sapiens
  misc_RNA (1)...(19): siRNA sense strand
gaagauccaggcagucaua

SEQ ID NO: 1169201 - RNA, 19 nt, Homo sapiens
  misc_RNA (1)...(19): siRNA sense strand
aaacauagcuggagauagc

SEQ ID NO: 1169202 - RNA, 19 nt, Homo sapiens
  misc_RNA (1)...(19): siRNA sense strand
gaaauguggagcugauuaa

SEQ ID NO: 1169203 - RNA, 19 nt, Homo sapiens
  misc_RNA (1)...(19): siRNA sense strand
gagauuacgucuugaacug

SEQ ID NO: 1169204 - RNA, 19 nt, Homo sapiens
  misc_RNA (1)...(19): siRNA sense strand
gaagaggaaugagaauugu

SEQ ID NO: 1169205 - RNA, 19 nt, Homo sapiens
  misc_RNA (1)...(19): siRNA sense strand
gaagcugccugggcucuaa

SEQ ID NO: 1169206 - RNA, 19 nt, Homo sapiens
  misc_RNA (1)...(19): siRNA sense strand
ggagaaauguggagcugau

SEQ ID NO: 1169207 - RNA, 19 nt, Homo sapiens
  misc_RNA (1)...(19): siRNA sense strand
guaauggauucgaagauug

SEQ ID NO: 1169208 - RNA, 19 nt, Homo sapiens
  misc_RNA (1)...(19): siRNA sense strand
ucuaaacccugaagaaaug

SEQ ID NO: 1169209 - RNA, 19 nt, Homo sapiens
  misc_RNA (1)...(19): siRNA sense strand
gaagagcuauaagaacaau

SEQ ID NO: 1169210 - RNA, 19 nt, Homo sapiens
  misc_RNA (1)...(19): siRNA sense strand
gcaaguggcccucaaugga

SEQ ID NO: 1169211 - RNA, 19 nt, Homo sapiens
  misc_RNA (1)...(19): siRNA sense strand
ggaaagacaauuaucgaau

SEQ ID NO: 1169212 - RNA, 19 nt, Homo sapiens
  misc_RNA (1)...(19): siRNA sense strand
gaugcacaaugauuacaaa

SEQ ID NO: 1169213 - RNA, 19 nt, Homo sapiens
  misc_RNA (1)...(19): siRNA sense strand
ggaaacauagcuggagaua

SEQ ID NO: 1169214 - RNA, 19 nt, Homo sapiens
  misc_RNA (1)...(19): siRNA sense strand
cauccuuaauccuuuguua

SEQ ID NO: 1169215 - RNA, 19 nt, Homo sapiens
  misc_RNA (1)...(19): siRNA sense strand
gaucgaaauccuucagaaa

SEQ ID NO: 1169216 - RNA, 19 nt, Homo sapiens
  misc_RNA (1)...(19): siRNA sense strand
uaagaacaaugcucuaaac

SEQ ID NO: 1169217 - RNA, 19 nt, Homo sapiens
  misc_RNA (1)...(19): siRNA sense strand
gcucaggggucaauccuua

SEQ ID NO: 1169218 - RNA, 19 nt, Homo sapiens
  misc_RNA (1)...(19): siRNA sense strand
gaagcugccauguucgaua

SEQ ID NO: 1169219 - RNA, 19 nt, Homo sapiens
  misc_RNA (1)...(19): siRNA sense strand
gaaguuaucaacacuccaa

SEQ ID NO: 1169220 - RNA, 19 nt, Homo sapiens
  misc_RNA (1)...(19): siRNA sense strand
gcccagggaaagacaauua

SEQ ID NO: 1169221 - RNA, 19 nt, Homo sapiens
  misc_RNA (1)...(19): siRNA sense strand
ucaauggacuggagaacau

SEQ ID NO: 1169222 - RNA, 19 nt, Homo sapiens
  misc_RNA (1)...(19): siRNA sense strand
gaagcgagagcaacaacuu

SEQ ID NO: 1169223 - RNA, 19 nt, Homo sapiens
  misc_RNA (1)...(19): siRNA sense strand
gcucuaaacccugaagaaa

SEQ ID NO: 1169224 - RNA, 19 nt, Homo sapiens
  misc_RNA (1)...(19): siRNA sense strand
cgaaugaagagcuauaaga

SEQ ID NO: 1169225 - RNA, 19 nt, Homo sapiens
  misc_RNA (1)...(19): siRNA sense strand
gauuacgucuugaacuguu

SEQ ID NO: 1169226 - RNA, 19 nt, Homo sapiens
  misc_RNA (1)...(19): siRNA sense strand
uaacacuccuuaccaaguc

SEQ ID NO: 1169227 - RNA, 19 nt, Homo sapiens
  misc_RNA (1)...(19): siRNA sense strand
uccaauagaugaaguuauc

SEQ ID NO: 1169228 - RNA, 19 nt, Homo sapiens
  misc_RNA (1)...(19): siRNA sense strand
uguaauggauucgaagauu

SEQ ID NO: 1169229 - RNA, 19 nt, Homo sapiens
  misc_RNA (1)...(19): siRNA sense strand
ucacugggcugcaucaaac

SEQ ID NO: 1169230 - RNA, 19 nt, Homo sapiens
  misc_RNA (1)...(19): siRNA sense strand
ugaagaggaaugagaauug

SEQ ID NO: 1169231 - RNA, 19 nt, Homo sapiens
  misc_RNA (1)...(19): siRNA sense strand
ggagcugauuaaugaagaa

SEQ ID NO: 1169232 - RNA, 19 nt, Homo sapiens
  misc_RNA (1)...(19): siRNA sense strand
gcugggcccuuucuuaucu

SEQ ID NO: 1169233 - RNA, 19 nt, Homo sapiens
  misc_RNA (1)...(19): siRNA sense strand
acacagaaauuccggaaac

SEQ ID NO: 1169234 - RNA, 19 nt, Homo sapiens
  misc_RNA (1)...(19): siRNA sense strand
auguggagcugauuaauga

SEQ ID NO: 1169235 - RNA, 19 nt, Homo sapiens
  misc_RNA (1)...(19): siRNA sense strand
gcauucagcuccggaagca

SEQ ID NO: 1169236 - RNA, 19 nt, Homo sapiens
  misc_RNA (1)...(19): siRNA sense strand
gagaugcucuuuucugaug

SEQ ID NO: 1169237 - RNA, 19 nt, Homo sapiens
  misc_RNA (1)...(19): siRNA sense strand
agaaauguggagcugauua

SEQ ID NO: 1169238 - RNA, 19 nt, Homo sapiens
  misc_RNA (1)...(19): siRNA sense strand
ugacuguaauggauucgaa

SEQ ID NO: 1169239 - RNA, 19 nt, Homo sapiens
  misc_RNA (1)...(19): siRNA sense strand
guuccauccuuaauccuuu

SEQ ID NO: 1169240 - RNA, 19 nt, Homo sapiens
  misc_RNA (1)...(19): siRNA sense strand
uagagcugcuuaauucaga

SEQ ID NO: 1169241 - RNA, 19 nt, Homo sapiens
  misc_RNA (1)...(19): siRNA sense strand
gaaccucucagcagaccaa

SEQ ID NO: 1169242 - RNA, 19 nt, Homo sapiens
  misc_RNA (1)...(19): siRNA sense strand
caucaccaaugccacauca

SEQ ID NO: 1169243 - RNA, 19 nt, Homo sapiens
  misc_RNA (1)...(19): siRNA sense strand
gagaagauccaggcaguca

SEQ ID NO: 1169244 - RNA, 19 nt, Homo sapiens
  misc_RNA (1)...(19): siRNA sense strand
augaagagcuauaagaaca

SEQ ID NO: 1169245 - RNA, 19 nt, Homo sapiens
  misc_RNA (1)...(19): siRNA sense strand
gagccuaguccuccaauag

SEQ ID NO: 1169246 - RNA, 19 nt, Homo sapiens
  misc_RNA (1)...(19): siRNA sense strand
caaauaucuucccuguguu

SEQ ID NO: 1169247 - RNA, 19 nt, Homo sapiens
  misc_RNA (1)...(19): siRNA sense strand
gcaacagggcucaaauaca

SEQ ID NO: 1169248 - RNA, 19 nt, Homo sapiens
  misc_RNA (1)...(19): siRNA sense strand
gcugcuuaauucagacuuu

SEQ ID NO: 1169249 - RNA, 19 nt, Homo sapiens
  misc_RNA (1)...(19): siRNA sense strand
gggaaagacaauuaucgaa

SEQ ID NO: 1169250 - RNA, 19 nt, Homo sapiens
  misc_RNA (1)...(19): siRNA sense strand
ccugggcucuaacgaauau

SEQ ID NO: 1169251 - RNA, 19 nt, Homo sapiens
  misc_RNA (1)...(19): siRNA sense strand
ucgauagucuucucaugga

SEQ ID NO: 1169252 - RNA, 19 nt, Homo sapiens
  misc_RNA (1)...(19): siRNA sense strand
aaagcagaguuucguacaa

SEQ ID NO: 1169253 - RNA, 19 nt, Homo sapiens
  misc_RNA (1)...(19): siRNA sense strand
ccaggucauucuuaacugu

SEQ ID NO: 1169254 - RNA, 19 nt, Homo sapiens
  misc_RNA (1)...(19): siRNA sense strand
gaccaaaauugucauugaa

SEQ ID NO: 1169255 - RNA, 19 nt, Homo sapiens
  misc_RNA (1)...(19): siRNA sense strand
cucauggacucuuauguga

SEQ ID NO: 1169256 - RNA, 19 nt, Homo sapiens
  misc_RNA (1)...(19): siRNA sense strand
agacaauuaucgaaugaag

SEQ ID NO: 1169257 - RNA, 19 nt, Homo sapiens
  misc_RNA (1)...(19): siRNA sense strand
ggagggcuuccagcuauaa

SEQ ID NO: 1169258 - RNA, 19 nt, Homo sapiens
  misc_RNA (1)...(19): siRNA sense strand
ugaucgaaauccuucagaa

SEQ ID NO: 1169259 - RNA, 19 nt, Homo sapiens
  misc_RNA (1)...(19): siRNA sense strand
gaugcuugcugggcccuuu

SEQ ID NO: 1169260 - RNA, 19 nt, Homo sapiens
  misc_RNA (1)...(19): siRNA sense strand
uagcaaccacacagaaauu

SEQ ID NO: 1169261 - RNA, 19 nt, Homo sapiens
  misc_RNA (1)...(19): siRNA sense strand
cgaaauccuucagaaagca

SEQ ID NO: 1169262 - RNA, 19 nt, Homo sapiens
  misc_RNA (1)...(19): siRNA sense strand
gcuguuauagaugcaaaua

SEQ ID NO: 1169263 - RNA, 19 nt, Homo sapiens
  misc_RNA (1)...(19): siRNA sense strand
uugccgagauuacgucuug

SEQ ID NO: 1169264 - RNA, 19 nt, Homo sapiens
  misc_RNA (1)...(19): siRNA sense strand
ccacacgacugacgaugac

SEQ ID NO: 1169265 - RNA, 19 nt, Homo sapiens
  misc_RNA (1)...(19): siRNA sense strand
accaggagaucuaccagaa

SEQ ID NO: 1169266 - RNA, 19 nt, Homo sapiens
  misc_RNA (1)...(19): siRNA sense strand
uggcaacagggcucaaaua

SEQ ID NO: 1169267 - RNA, 19 nt, Homo sapiens
  misc_RNA (1)...(19): siRNA sense strand
guuagcaaccacacagaaa

SEQ ID NO: 1169268 - RNA, 19 nt, Homo sapiens
  misc_RNA (1)...(19): siRNA sense strand
gcaacagcaguucaucuuc

SEQ ID NO: 1169269 - RNA, 19 nt, Homo sapiens
  misc_RNA (1)...(19): siRNA sense strand
uggaguuucugaagaggaa

SEQ ID NO: 1169270 - RNA, 19 nt, Homo sapiens
  misc_RNA (1)...(19): siRNA sense strand
uagaugaaguuaucaacac

SEQ ID NO: 1169271 - RNA, 19 nt, Homo sapiens
  misc_RNA (1)...(19): siRNA sense strand
guucgauagucuucucaug

SEQ ID NO: 1169272 - RNA, 19 nt, Homo sapiens
  misc_RNA (1)...(19): siRNA sense strand
uaccuugccuucuccacuu

SEQ ID NO: 1169273 - RNA, 19 nt, Homo sapiens
  misc_RNA (1)...(19): siRNA sense strand
ugguagagcugcugaugca

SEQ ID NO: 1169274 - RNA, 19 nt, Homo sapiens
  misc_RNA (1)...(19): siRNA sense strand
uguuaacacuccuuaccaa

SEQ ID NO: 1169275 - RNA, 19 nt, Homo sapiens
  misc_RNA (1)...(19): siRNA sense strand
gaaacgcaacagcaguuca

SEQ ID NO: 1169276 - RNA, 19 nt, Homo sapiens
  misc_RNA (1)...(19): siRNA sense strand
gugacuugcugacuguaau

SEQ ID NO: 1169277 - RNA, 19 nt, Homo sapiens
  misc_RNA (1)...(19): siRNA sense strand
uaugugacuugcugacugu

SEQ ID NO: 1169278 - RNA, 19 nt, Homo sapiens
  misc_RNA (1)...(19): siRNA sense strand
gcagaguuucguacaagga

SEQ ID NO: 1169279 - RNA, 19 nt, Homo sapiens
  misc_RNA (1)...(19): siRNA sense strand
uaucuucccuguguugauc

SEQ ID NO: 1169280 - RNA, 19 nt, Homo sapiens
  misc_RNA (1)...(19): siRNA sense strand
uagagcugcugaugcacaa

SEQ ID NO: 1169281 - RNA, 19 nt, Homo sapiens
  misc_RNA (1)...(19): siRNA sense strand
uaucgaaugaagagcuaua

SEQ ID NO: 1169282 - RNA, 19 nt, Homo sapiens
  misc_RNA (1)...(19): siRNA sense strand
agaaaugagacgaagaaga

SEQ ID NO: 1169283 - RNA, 19 nt, Homo sapiens
  misc_RNA (1)...(19): siRNA sense strand
aagcagaguuucguacaag

SEQ ID NO: 1169284 - RNA, 19 nt, Homo sapiens
  misc_RNA (1)...(19): siRNA sense strand
aagcugccauguucgauag

SEQ ID NO: 1169285 - RNA, 19 nt, Homo sapiens
  misc_RNA (1)...(19): siRNA sense strand
gagcugcugaugcacaaug

SEQ ID NO: 1169286 - RNA, 19 nt, Homo sapiens
  misc_RNA (1)...(19): siRNA sense strand
gacaauuaucgaaugaaga

SEQ ID NO: 1169287 - RNA, 19 nt, Homo sapiens
  misc_RNA (1)...(19): siRNA sense strand
auucgaagauugugcaagu

SEQ ID NO: 1169288 - RNA, 19 nt, Homo sapiens
  misc_RNA (1)...(19): siRNA sense strand
ggaaugacuuuagacaaua

SEQ ID NO: 1169289 - RNA, 19 nt, Homo sapiens
  misc_RNA (1)...(19): siRNA sense strand
gcagaguggcgauauauuu

SEQ ID NO: 1169290 - RNA, 19 nt, Homo sapiens
  misc_RNA (1)...(19): siRNA sense strand
ggaagaagaaccaguguca

SEQ ID NO: 1169291 - RNA, 19 nt, Homo sapiens
  misc_RNA (1)...(19): siRNA sense strand
uaaagaaauuucgggauga

SEQ ID NO: 1169292 - RNA, 19 nt, Homo sapiens
  misc_RNA (1)...(19): siRNA sense strand
gaacuucuucagcugauaa

SEQ ID NO: 1169293 - RNA, 19 nt, Homo sapiens
  misc_RNA (1)...(19): siRNA sense strand
gagcauagcacaucacuac

SEQ ID NO: 1169294 - RNA, 19 nt, Homo sapiens
  misc_RNA (1)...(19): siRNA sense strand
gaagaaccagugucagauu

SEQ ID NO: 1169295 - RNA, 19 nt, Homo sapiens
  misc_RNA (1)...(19): siRNA sense strand
gaagagagcauagcacauc

SEQ ID NO: 1169296 - RNA, 19 nt, Homo sapiens
  misc_RNA (1)...(19): siRNA sense strand
ccucucagcuuauggaaga

SEQ ID NO: 1169297 - RNA, 19 nt, Homo sapiens
  misc_RNA (1)...(19): siRNA sense strand
gaugcagaguggcgauaua

SEQ ID NO: 1169298 - RNA, 19 nt, Homo sapiens
  misc_RNA (1)...(19): siRNA sense strand
cagaguggcgauauauuua

SEQ ID NO: 1169299 - RNA, 19 nt, Homo sapiens
  misc_RNA (1)...(19): siRNA sense strand
guucaggaaugacuuuaga

SEQ ID NO: 1169300 - RNA, 19 nt, Homo sapiens
  misc_RNA (1)...(19): siRNA sense strand
cgaccaugaugcagaauug

SEQ ID NO: 1169301 - RNA, 19 nt, Homo sapiens
  misc_RNA (1)...(19): siRNA sense strand
ggcggucccucucagcuua

SEQ ID NO: 1169302 - RNA, 19 nt, Homo sapiens
  misc_RNA (1)...(19): siRNA sense strand
gaaaaggaccauuugaaaa

SEQ ID NO: 1169303 - RNA, 19 nt, Homo sapiens
  misc_RNA (1)...(19): siRNA sense strand
aagaaccagugucagauuu

SEQ ID NO: 1169304 - RNA, 19 nt, Homo sapiens
  misc_RNA (1)...(19): siRNA sense strand
aggaaugacuuuagacaau

SEQ ID NO: 1169305 - RNA, 19 nt, Homo sapiens
  misc_RNA (1)...(19): siRNA sense strand
acauaggccucgaccauga

SEQ ID NO: 1169306 - RNA, 19 nt, Homo sapiens
  misc_RNA (1)...(19): siRNA sense strand
gcauagcacaucacuacaa

SEQ ID NO: 1169307 - RNA, 19 nt, Homo sapiens
  misc_RNA (1)...(19): siRNA sense strand
aaagaaauuucgggaugaa

SEQ ID NO: 1169308 - RNA, 19 nt, Homo sapiens
  misc_RNA (1)...(19): siRNA sense strand
ggaacuucuucagcugaua

SEQ ID NO: 1169309 - RNA, 19 nt, Homo sapiens
  misc_RNA (1)...(19): siRNA sense strand
gggcagcuguggaucgaau

SEQ ID NO: 1169310 - RNA, 19 nt, Homo sapiens
  misc_RNA (1)...(19): siRNA sense strand
ggagcaaaccgcaucuaug

SEQ ID NO: 1169311 - RNA, 19 nt, Homo sapiens
  misc_RNA (1)...(19): siRNA sense strand
gaaaaugugggaucaagaa

SEQ ID NO: 1169312 - RNA, 19 nt, Homo sapiens
  misc_RNA (1)...(19): siRNA sense strand
gcaguucaggaaugacuuu

SEQ ID NO: 1169313 - RNA, 19 nt, Homo sapiens
  misc_RNA (1)...(19): siRNA sense strand
aagaagaaccagugucaga

SEQ ID NO: 1169314 - RNA, 19 nt, Homo sapiens
  misc_RNA (1)...(19): siRNA sense strand
ugacauaggccucgaccau

SEQ ID NO: 1169315 - RNA, 19 nt, Homo sapiens
  misc_RNA (1)...(19): siRNA sense strand
gcagcuguggaucgaauaa

SEQ ID NO: 1169316 - RNA, 19 nt, Homo sapiens
  misc_RNA (1)...(19): siRNA sense strand
ccucgaccaugaugcagaa

SEQ ID NO: 1169317 - RNA, 19 nt, Homo sapiens
  misc_RNA (1)...(19): siRNA sense strand
gaaccagugucagauuucg

SEQ ID NO: 1169318 - RNA, 19 nt, Homo sapiens
  misc_RNA (1)...(19): siRNA sense strand
uagcacaucacuacaacaa

SEQ ID NO: 1169319 - RNA, 19 nt, Homo sapiens
  misc_RNA (1)...(19): siRNA sense strand
ugucagauuucgcaguuca

SEQ ID NO: 1169320 - RNA, 19 nt, Homo sapiens
  misc_RNA (1)...(19): siRNA sense strand
gaaauuucgggaugaagag

SEQ ID NO: 1169321 - RNA, 19 nt, Homo sapiens
  misc_RNA (1)...(19): siRNA sense strand
ggaucaugcaggcgaauau

SEQ ID NO: 1169322 - RNA, 19 nt, Homo sapiens
  misc_RNA (1)...(19): siRNA sense strand
cauagcacaucacuacaac

SEQ ID NO: 1169323 - RNA, 19 nt, Homo sapiens
  misc_RNA (1)...(19): siRNA sense strand
agaaauuucgggaugaaga

SEQ ID NO: 1169324 - RNA, 19 nt, Homo sapiens
  misc_RNA (1)...(19): siRNA sense strand
agugucagauuucgcaguu

SEQ ID NO: 1169325 - RNA, 19 nt, Homo sapiens
  misc_RNA (1)...(19): siRNA sense strand
gaucaugcaggcgaauaug

SEQ ID NO: 1169326 - RNA, 19 nt, Homo sapiens
  misc_RNA (1)...(19): siRNA sense strand
agaaaaggaccauuugaaa

SEQ ID NO: 1169327 - RNA, 19 nt, Homo sapiens
  misc_RNA (1)...(19): siRNA sense strand
cagcugauaaagaaauuuc

SEQ ID NO: 1169328 - RNA, 19 nt, Homo sapiens
  misc_RNA (1)...(19): siRNA sense strand
cagcgucgggccagucauu

SEQ ID NO: 1169329 - RNA, 19 nt, Homo sapiens
  misc_RNA (1)...(19): siRNA sense strand
aagagagcauagcacauca

SEQ ID NO: 1169330 - RNA, 19 nt, Homo sapiens
  misc_RNA (1)...(19): siRNA sense strand
ggaagagagcauagcacau

SEQ ID NO: 1169331 - RNA, 19 nt, Homo sapiens
  misc_RNA (1)...(19): siRNA sense strand
caggaaugacuuuagacaa

SEQ ID NO: 1169332 - RNA, 19 nt, Homo sapiens
  misc_RNA (1)...(19): siRNA sense strand
gauggaggaggacccugaa

SEQ ID NO: 1169333 - RNA, 19 nt, Homo sapiens
  misc_RNA (1)...(19): siRNA sense strand
uuucgcaguucaggaauga

SEQ ID NO: 1169334 - RNA, 19 nt, Homo sapiens
  misc_RNA (1)...(19): siRNA sense strand
gacuuuagacaauaucagu

SEQ ID NO: 1169335 - RNA, 19 nt, Homo sapiens
  misc_RNA (1)...(19): siRNA sense strand
ccuaugccguccugaagag

SEQ ID NO: 1169336 - RNA, 19 nt, Homo sapiens
  misc_RNA (1)...(19): siRNA sense strand
ucaggaaugacuuuagaca

SEQ ID NO: 1169337 - RNA, 19 nt, Homo sapiens
  misc_RNA (1)...(19): siRNA sense strand
ggaugcagaguggcgauau

SEQ ID NO: 1169338 - RNA, 19 nt, Homo sapiens
  misc_RNA (1)...(19): siRNA sense strand
agauuucgcaguucaggaa

SEQ ID NO: 1169339 - RNA, 19 nt, Homo sapiens
  misc_RNA (1)...(19): siRNA sense strand
gaguugaugguuacguuca

SEQ ID NO: 1169340 - RNA, 19 nt, Homo sapiens
  misc_RNA (1)...(19): siRNA sense strand
gcaggcgaauauggagcaa

SEQ ID NO: 1169341 - RNA, 19 nt, Homo sapiens
  misc_RNA (1)...(19): siRNA sense strand
caagaaaaggaccauuuga

SEQ ID NO: 1169342 - RNA, 19 nt, Homo sapiens
  misc_RNA (1)...(19): siRNA sense strand
ggaaacagcgcuacacaua

SEQ ID NO: 1169343 - RNA, 19 nt, Homo sapiens
  misc_RNA (1)...(19): siRNA sense strand
ggacaaagacucaguggaa

SEQ ID NO: 1169344 - RNA, 19 nt, Homo sapiens
  misc_RNA (1)...(19): siRNA sense strand
ugaacaaguugcucaagua

SEQ ID NO: 1169345 - RNA, 19 nt, Homo sapiens
  misc_RNA (1)...(19): siRNA sense strand
acaaguugcucaaguauga

SEQ ID NO: 1169346 - RNA, 19 nt, Homo sapiens
  misc_RNA (1)...(19): siRNA sense strand
ccagacaucuucagaaugg

SEQ ID NO: 1169347 - RNA, 19 nt, Homo sapiens
  misc_RNA (1)...(19): siRNA sense strand
gagcugggcugucccuuca

SEQ ID NO: 1169348 - RNA, 19 nt, Homo sapiens
  misc_RNA (1)...(19): siRNA sense strand
ccauauaucugcuguacau

SEQ ID NO: 1169349 - RNA, 19 nt, Homo sapiens
  misc_RNA (1)...(19): siRNA sense strand
gaacaaguugcucaaguau

SEQ ID NO: 1169350 - RNA, 19 nt, Homo sapiens
  misc_RNA (1)...(19): siRNA sense strand
gacaaagacucaguggaaa

SEQ ID NO: 1169351 - RNA, 19 nt, Homo sapiens
  misc_RNA (1)...(19): siRNA sense strand
ccacugaccucgacucucu

SEQ ID NO: 1169352 - RNA, 19 nt, Homo sapiens
  misc_RNA (1)...(19): siRNA sense strand
guacuucgcccgaggauuc

SEQ ID NO: 1169353 - RNA, 19 nt, Homo sapiens
  misc_RNA (1)...(19): siRNA sense strand
ggagcacccuuuguccuuu

SEQ ID NO: 1169354 - RNA, 19 nt, Homo sapiens
  misc_RNA (1)...(19): siRNA sense strand
cuaauucucugccuaugga

SEQ ID NO: 1169355 - RNA, 19 nt, Homo sapiens
  misc_RNA (1)...(19): siRNA sense strand
uagcagcccucuaugacaa

SEQ ID NO: 1169356 - RNA, 19 nt, Homo sapiens
  misc_RNA (1)...(19): siRNA sense strand
ggacaacacccucuuacag

SEQ ID NO: 1169357 - RNA, 19 nt, Homo sapiens
  misc_RNA (1)...(19): siRNA sense strand
caucaccuaugcugccuuu

SEQ ID NO: 1169358 - RNA, 19 nt, Homo sapiens
  misc_RNA (1)...(19): siRNA sense strand
caugacaucugagcucuau

SEQ ID NO: 1169359 - RNA, 19 nt, Homo sapiens
  misc_RNA (1)...(19): siRNA sense strand
gaaacagcgcuacacauag

SEQ ID NO: 1169360 - RNA, 19 nt, Homo sapiens
  misc_RNA (1)...(19): siRNA sense strand
gagcacccuuuguccuuug

SEQ ID NO: 1169361 - RNA, 19 nt, Homo sapiens
  misc_RNA (1)...(19): siRNA sense strand
ugacaucugagcucuauga

SEQ ID NO: 1169362 - RNA, 19 nt, Homo sapiens
  misc_RNA (1)...(19): siRNA sense strand
ccacacugcucaugcucaa

SEQ ID NO: 1169363 - RNA, 19 nt, Homo sapiens
  misc_RNA (1)...(19): siRNA sense strand
caugcugggugccauauau

SEQ ID NO: 1169364 - RNA, 19 nt, Homo sapiens
  misc_RNA (1)...(19): siRNA sense strand
ggagcaaguucugcagaug

SEQ ID NO: 1169365 - RNA, 19 nt, Homo sapiens
  misc_RNA (1)...(19): siRNA sense strand
ucuaugaccucacagagau

SEQ ID NO: 1169366 - RNA, 19 nt, Homo sapiens
  misc_RNA (1)...(19): siRNA sense strand
caucaccuaugccuucaug

SEQ ID NO: 1169367 - RNA, 19 nt, Homo sapiens
  misc_RNA (1)...(19): siRNA sense strand
gaagacaggcaagaucuca

SEQ ID NO: 1169368 - RNA, 19 nt, Homo sapiens
  misc_RNA (1)...(19): siRNA sense strand
gaccugcccuucauguaca

SEQ ID NO: 1169369 - RNA, 19 nt, Homo sapiens
  misc_RNA (1)...(19): siRNA sense strand
gcuucagccuucuauauca

SEQ ID NO: 1169370 - RNA, 19 nt, Homo sapiens
  misc_RNA (1)...(19): siRNA sense strand
ggugcaacgucauguacuu

SEQ ID NO: 1169371 - RNA, 19 nt, Homo sapiens
  misc_RNA (1)...(19): siRNA sense strand
ugaccucgacucucuauga

SEQ ID NO: 1169372 - RNA, 19 nt, Homo sapiens
  misc_RNA (1)...(19): siRNA sense strand
gguagagguuccagacauc

SEQ ID NO: 1169373 - RNA, 19 nt, Homo sapiens
  misc_RNA (1)...(19): siRNA sense strand
gcacugcacaucgcuguug

SEQ ID NO: 1169374 - RNA, 19 nt, Homo sapiens
  misc_RNA (1)...(19): siRNA sense strand
ccugcaaccucaucuacuu

SEQ ID NO: 1169375 - RNA, 19 nt, Homo sapiens
  misc_RNA (1)...(19): siRNA sense strand
gagcuguuccuuaccauca

SEQ ID NO: 1169376 - RNA, 19 nt, Homo sapiens
  misc_RNA (1)...(19): siRNA sense strand
gcucugaggauuuggacaa

SEQ ID NO: 1169377 - RNA, 19 nt, Homo sapiens
  misc_RNA (1)...(19): siRNA sense strand
guugugaaccagaacauga

SEQ ID NO: 1169378 - RNA, 19 nt, Homo sapiens
  misc_RNA (1)...(19): siRNA sense strand
ggaccugcccuucauguac

SEQ ID NO: 1169379 - RNA, 19 nt, Homo sapiens
  misc_RNA (1)...(19): siRNA sense strand
ggagcuaggccacuucuac

SEQ ID NO: 1169380 - RNA, 19 nt, Homo sapiens
  misc_RNA (1)...(19): siRNA sense strand
ccuucuagcugccaaagau

SEQ ID NO: 1169381 - RNA, 19 nt, Homo sapiens
  misc_RNA (1)...(19): siRNA sense strand
gagcugggaauaucagauc

SEQ ID NO: 1169382 - RNA, 19 nt, Homo sapiens
  misc_RNA (1)...(19): siRNA sense strand
ucaccaucaugauucagaa

SEQ ID NO: 1169383 - RNA, 19 nt, Homo sapiens
  misc_RNA (1)...(19): siRNA sense strand
guuugucacugcccaagga

SEQ ID NO: 1169384 - RNA, 19 nt, Homo sapiens
  misc_RNA (1)...(19): siRNA sense strand
gagccgagaugagcagaac

SEQ ID NO: 1169385 - RNA, 19 nt, Homo sapiens
  misc_RNA (1)...(19): siRNA sense strand
uggcuggaguggaggguaa

SEQ ID NO: 1169386 - RNA, 19 nt, Homo sapiens
  misc_RNA (1)...(19): siRNA sense strand
gggagcacccuuuguccuu

SEQ ID NO: 1169387 - RNA, 19 nt, Homo sapiens
  misc_RNA (1)...(19): siRNA sense strand
ucaagcccaggaccaauaa

SEQ ID NO: 1169388 - RNA, 19 nt, Homo sapiens
  misc_RNA (1)...(19): siRNA sense strand
gggcuaauucucugccuau

SEQ ID NO: 1169389 - RNA, 19 nt, Homo sapiens
  misc_RNA (1)...(19): siRNA sense strand
ucaaguaugaggauugcaa

SEQ ID NO: 1169390 - RNA, 19 nt, Homo sapiens
  misc_RNA (1)...(19): siRNA sense strand
ugccaaagauaaugauguc

SEQ ID NO: 1169391 - RNA, 19 nt, Homo sapiens
  misc_RNA (1)...(19): siRNA sense strand
gagagaccugcgugggaua

SEQ ID NO: 1169392 - RNA, 19 nt, Homo sapiens
  misc_RNA (1)...(19): siRNA sense strand
uuccagacaucuucagaau

SEQ ID NO: 1169393 - RNA, 19 nt, Homo sapiens
  misc_RNA (1)...(19): siRNA sense strand
gcaaccucaucuacuuugg

SEQ ID NO: 1169394 - RNA, 19 nt, Homo sapiens
  misc_RNA (1)...(19): siRNA sense strand
caaggagaaagggcuaauu

SEQ ID NO: 1169395 - RNA, 19 nt, Homo sapiens
  misc_RNA (1)...(19): siRNA sense strand
gaggguaacacugugaugu

SEQ ID NO: 1169396 - RNA, 19 nt, Homo sapiens
  misc_RNA (1)...(19): siRNA sense strand
cugaacaaguugcucaagu

SEQ ID NO: 1169397 - RNA, 19 nt, Homo sapiens
  misc_RNA (1)...(19): siRNA sense strand
ccgaggagcuaggccacuu

SEQ ID NO: 1169398 - RNA, 19 nt, Homo sapiens
  misc_RNA (1)...(19): siRNA sense strand
uauaucugcuguacaucau

SEQ ID NO: 1169399 - RNA, 19 nt, Homo sapiens
  misc_RNA (1)...(19): siRNA sense strand
ggugguacccauguccuuu

SEQ ID NO: 1169400 - RNA, 19 nt, Homo sapiens
  misc_RNA (1)...(19): siRNA sense strand
ccaucaugauucagaagau

SEQ ID NO: 1169401 - RNA, 19 nt, Homo sapiens
  misc_RNA (1)...(19): siRNA sense strand
ccccggagcuggucuuuga

SEQ ID NO: 1169402 - RNA, 19 nt, Homo sapiens
  misc_RNA (1)...(19): siRNA sense strand
gaccugcgugggauaauca

SEQ ID NO: 1169403 - RNA, 19 nt, Homo sapiens
  misc_RNA (1)...(19): siRNA sense strand
gcaugcugggugccauaua

SEQ ID NO: 1169404 - RNA, 19 nt, Homo sapiens
  misc_RNA (1)...(19): siRNA sense strand
gaccucgacucucuaugac

SEQ ID NO: 1169405 - RNA, 19 nt, Homo sapiens
  misc_RNA (1)...(19): siRNA sense strand
ggggagagcugggaauauc

SEQ ID NO: 1169406 - RNA, 19 nt, Homo sapiens
  misc_RNA (1)...(19): siRNA sense strand
gaucugcggacgggaguau

SEQ ID NO: 1169407 - RNA, 19 nt, Homo sapiens
  misc_RNA (1)...(19): siRNA sense strand
aaggagaaagggcuaauuc

SEQ ID NO: 1169408 - RNA, 19 nt, Homo sapiens
  misc_RNA (1)...(19): siRNA sense strand
ucgugcggcugcucauuga

SEQ ID NO: 1169409 - RNA, 19 nt, Homo sapiens
  misc_RNA (1)...(19): siRNA sense strand
gcuggugcaacgucaugua

SEQ ID NO: 1169410 - RNA, 19 nt, Homo sapiens
  misc_RNA (1)...(19): siRNA sense strand
uaucugcuguacaucaucu

SEQ ID NO: 1169411 - RNA, 19 nt, Homo sapiens
  misc_RNA (1)...(19): siRNA sense strand
ugguagagguuccagacau

SEQ ID NO: 1169412 - RNA, 19 nt, Homo sapiens
  misc_RNA (1)...(19): siRNA sense strand
uaucaucaccaccaagaag

SEQ ID NO: 1169413 - RNA, 19 nt, Homo sapiens
  misc_RNA (1)...(19): siRNA sense strand
gaagaggaucugggagucu

SEQ ID NO: 1169414 - RNA, 19 nt, Homo sapiens
  misc_RNA (1)...(19): siRNA sense strand
gggacaacacccucuuaca

SEQ ID NO: 1169415 - RNA, 19 nt, Homo sapiens
  misc_RNA (1)...(19): siRNA sense strand
cucaagcccaggaccaaua

SEQ ID NO: 1169416 - RNA, 19 nt, Homo sapiens
  misc_RNA (1)...(19): siRNA sense strand
gggaaacagcgcuacacau

SEQ ID NO: 1169417 - RNA, 19 nt, Homo sapiens
  misc_RNA (1)...(19): siRNA sense strand
ucauguacagcaucaccua

SEQ ID NO: 1169418 - RNA, 19 nt, Homo sapiens
  misc_RNA (1)...(19): siRNA sense strand
uagcugccaaagauaauga

SEQ ID NO: 1169419 - RNA, 19 nt, Homo sapiens
  misc_RNA (1)...(19): siRNA sense strand
uggagcaaguucugcagau

SEQ ID NO: 1169420 - RNA, 19 nt, Homo sapiens
  misc_RNA (1)...(19): siRNA sense strand
ucgcuguugugaaccagaa

SEQ ID NO: 1169421 - RNA, 19 nt, Homo sapiens
  misc_RNA (1)...(19): siRNA sense strand
ggaagacaggcaagaucuc

SEQ ID NO: 1169422 - RNA, 19 nt, Homo sapiens
  misc_RNA (1)...(19): siRNA sense strand
ccuucgagcuguuccuuac

SEQ ID NO: 1169423 - RNA, 19 nt, Homo sapiens
  misc_RNA (1)...(19): siRNA sense strand
uuggcgaccugaugcgauu

SEQ ID NO: 1169424 - RNA, 19 nt, Homo sapiens
  misc_RNA (1)...(19): siRNA sense strand
gaucgugcggcugcucauu

SEQ ID NO: 1169425 - RNA, 19 nt, Homo sapiens
  misc_RNA (1)...(19): siRNA sense strand
ggugagaaauugcaguuua

SEQ ID NO: 1169426 - RNA, 19 nt, Homo sapiens
  misc_RNA (1)...(19): siRNA sense strand
uaaggaagaccaacaauuu

SEQ ID NO: 1169427 - RNA, 19 nt, Homo sapiens
  misc_RNA (1)...(19): siRNA sense strand
ucacuaauauugacccuaa

SEQ ID NO: 1169428 - RNA, 19 nt, Homo sapiens
  misc_RNA (1)...(19): siRNA sense strand
cuacaaggauuccaucaaa

SEQ ID NO: 1169429 - RNA, 19 nt, Homo sapiens
  misc_RNA (1)...(19): siRNA sense strand
aaagcugucugugaaauua

SEQ ID NO: 1169430 - RNA, 19 nt, Homo sapiens
  misc_RNA (1)...(19): siRNA sense strand
guauaaagaucgacuugga

SEQ ID NO: 1169431 - RNA, 19 nt, Homo sapiens
  misc_RNA (1)...(19): siRNA sense strand
ggaagaagaacgaaugguu

SEQ ID NO: 1169432 - RNA, 19 nt, Homo sapiens
  misc_RNA (1)...(19): siRNA sense strand
cugccacgguuuauaauua

SEQ ID NO: 1169433 - RNA, 19 nt, Homo sapiens
  misc_RNA (1)...(19): siRNA sense strand
agagauaccuacaaggauu

SEQ ID NO: 1169434 - RNA, 19 nt, Homo sapiens
  misc_RNA (1)...(19): siRNA sense strand
gaaguacugacugcaaaua

SEQ ID NO: 1169435 - RNA, 19 nt, Homo sapiens
  misc_RNA (1)...(19): siRNA sense strand
uagcagaauuucaagagaa

SEQ ID NO: 1169436 - RNA, 19 nt, Homo sapiens
  misc_RNA (1)...(19): siRNA sense strand
gaaaucugcagacuuguau

SEQ ID NO: 1169437 - RNA, 19 nt, Homo sapiens
  misc_RNA (1)...(19): siRNA sense strand
uaagagauaccuacaagga

SEQ ID NO: 1169438 - RNA, 19 nt, Homo sapiens
  misc_RNA (1)...(19): siRNA sense strand
gcaagggacuaugaagugu

SEQ ID NO: 1169439 - RNA, 19 nt, Homo sapiens
  misc_RNA (1)...(19): siRNA sense strand
gugagaaauugcaguuuau

SEQ ID NO: 1169440 - RNA, 19 nt, Homo sapiens
  misc_RNA (1)...(19): siRNA sense strand
guaaggaagaccaacaauu

SEQ ID NO: 1169441 - RNA, 19 nt, Homo sapiens
  misc_RNA (1)...(19): siRNA sense strand
ccugagagcccauuuaugu

SEQ ID NO: 1169442 - RNA, 19 nt, Homo sapiens
  misc_RNA (1)...(19): siRNA sense strand
ugagagcccauuuauguuu

SEQ ID NO: 1169443 - RNA, 19 nt, Homo sapiens
  misc_RNA (1)...(19): siRNA sense strand
gaagaacgaaugguugaga

SEQ ID NO: 1169444 - RNA, 19 nt, Homo sapiens
  misc_RNA (1)...(19): siRNA sense strand
ugaaaaggcugcagaaauc

SEQ ID NO: 1169445 - RNA, 19 nt, Homo sapiens
  misc_RNA (1)...(19): siRNA sense strand
cugcagacuuguauaaaga

SEQ ID NO: 1169446 - RNA, 19 nt, Homo sapiens
  misc_RNA (1)...(19): siRNA sense strand
gaacgaaugguugagaugu

SEQ ID NO: 1169447 - RNA, 19 nt, Homo sapiens
  misc_RNA (1)...(19): siRNA sense strand
guugagauguuucuggaau

SEQ ID NO: 1169448 - RNA, 19 nt, Homo sapiens
  misc_RNA (1)...(19): siRNA sense strand
ucagauggcgggacuaaga

SEQ ID NO: 1169449 - RNA, 19 nt, Homo sapiens
  misc_RNA (1)...(19): siRNA sense strand
gaaaagcugucugugaaau

SEQ ID NO: 1169450 - RNA, 19 nt, Homo sapiens
  misc_RNA (1)...(19): siRNA sense strand
uuacugccacgguuuauaa

SEQ ID NO: 1169451 - RNA, 19 nt, Homo sapiens
  misc_RNA (1)...(19): siRNA sense strand
caagagaauguaaggaaga

SEQ ID NO: 1169452 - RNA, 19 nt, Homo sapiens
  misc_RNA (1)...(19): siRNA sense strand
ugagauguuucuggaauau

SEQ ID NO: 1169453 - RNA, 19 nt, Homo sapiens
  misc_RNA (1)...(19): siRNA sense strand
gaacuggcacuuuucgaua

SEQ ID NO: 1169454 - RNA, 19 nt, Homo sapiens
  misc_RNA (1)...(19): siRNA sense strand
uggaaguacugacugcaaa

SEQ ID NO: 1169455 - RNA, 19 nt, Homo sapiens
  misc_RNA (1)...(19): siRNA sense strand
ggacuaagagauaccuaca

SEQ ID NO: 1169456 - RNA, 19 nt, Homo sapiens
  misc_RNA (1)...(19): siRNA sense strand
ugccacgguuuauaauuaa

SEQ ID NO: 1169457 - RNA, 19 nt, Homo sapiens
  misc_RNA (1)...(19): siRNA sense strand
cgacuuggacuagaaauuc

SEQ ID NO: 1169458 - RNA, 19 nt, Homo sapiens
  misc_RNA (1)...(19): siRNA sense strand
aaaggaagaagaacgaaug

SEQ ID NO: 1169459 - RNA, 19 nt, Homo sapiens
  misc_RNA (1)...(19): siRNA sense strand
acgaaugguugagauguuu

SEQ ID NO: 1169460 - RNA, 19 nt, Homo sapiens
  misc_RNA (1)...(19): siRNA sense strand
ccaauguucggaaagcuuu

SEQ ID NO: 1169461 - RNA, 19 nt, Homo sapiens
  misc_RNA (1)...(19): siRNA sense strand
gggccuagcagaauuucaa

SEQ ID NO: 1169462 - RNA, 19 nt, Homo sapiens
  misc_RNA (1)...(19): siRNA sense strand
gcagacuuguauaaagauc

SEQ ID NO: 1169463 - RNA, 19 nt, Homo sapiens
  misc_RNA (1)...(19): siRNA sense strand
agaaaucugcagacuugua

SEQ ID NO: 1169464 - RNA, 19 nt, Homo sapiens
  misc_RNA (1)...(19): siRNA sense strand
aaucagaucagcaggcaaa

SEQ ID NO: 1169465 - RNA, 19 nt, Homo sapiens
  misc_RNA (1)...(19): siRNA sense strand
agauguuucuggaauauca

SEQ ID NO: 1169466 - RNA, 19 nt, Homo sapiens
  misc_RNA (1)...(19): siRNA sense strand
acuaagagauaccuacaag

SEQ ID NO: 1169467 - RNA, 19 nt, Homo sapiens
  misc_RNA (1)...(19): siRNA sense strand
cuaggaagaaggaaacuau

SEQ ID NO: 1169468 - RNA, 19 nt, Homo sapiens
  misc_RNA (1)...(19): siRNA sense strand
gacuaugaagugucagaua

SEQ ID NO: 1169469 - RNA, 19 nt, Homo sapiens
  misc_RNA (1)...(19): siRNA sense strand
ggaauuggaaguacugacu

SEQ ID NO: 1169470 - RNA, 19 nt, Homo sapiens
  misc_RNA (1)...(19): siRNA sense strand
gaucgacuuggacuagaaa

SEQ ID NO: 1169471 - RNA, 19 nt, Homo sapiens
  misc_RNA (1)...(19): siRNA sense strand
uugagauguuucuggaaua

SEQ ID NO: 1169472 - RNA, 19 nt, Homo sapiens
  misc_RNA (1)...(19): siRNA sense strand
cuagcagaauuucaagaga

SEQ ID NO: 1169473 - RNA, 19 nt, Homo sapiens
  misc_RNA (1)...(19): siRNA sense strand
aaucugcagacuuguauaa

SEQ ID NO: 1169474 - RNA, 19 nt, Homo sapiens
  misc_RNA (1)...(19): siRNA sense strand
aggaagaaggaaacuauuu

SEQ ID NO: 1169475 - RNA, 19 nt, Homo sapiens
  misc_RNA (1)...(19): siRNA sense strand
ggaaguacugacugcaaau

SEQ ID NO: 1169476 - RNA, 19 nt, Homo sapiens
  misc_RNA (1)...(19): siRNA sense strand
cagaucagcaggcaaaaua

SEQ ID NO: 1169477 - RNA, 19 nt, Homo sapiens
  misc_RNA (1)...(19): siRNA sense strand
gagagcccauuuauguuuu

SEQ ID NO: 1169478 - RNA, 19 nt, Homo sapiens
  misc_RNA (1)...(19): siRNA sense strand
gaagcaagggacuaugaag

SEQ ID NO: 1169479 - RNA, 19 nt, Homo sapiens
  misc_RNA (1)...(19): siRNA sense strand
aagaagaacgaaugguuga

SEQ ID NO: 1169480 - RNA, 19 nt, Homo sapiens
  misc_RNA (1)...(19): siRNA sense strand
caaaauaagcucauucaag

SEQ ID NO: 1169481 - RNA, 19 nt, Homo sapiens
  misc_RNA (1)...(19): siRNA sense strand
aggauuccaucaaagcauu

SEQ ID NO: 1169482 - RNA, 19 nt, Homo sapiens
  misc_RNA (1)...(19): siRNA sense strand
uaugaagugucagauagug

SEQ ID NO: 1169483 - RNA, 19 nt, Homo sapiens
  misc_RNA (1)...(19): siRNA sense strand
gcaggaauuggaaguacug

SEQ ID NO: 1169484 - RNA, 19 nt, Homo sapiens
  misc_RNA (1)...(19): siRNA sense strand
caaugaagcaagggacuau

SEQ ID NO: 1169485 - RNA, 19 nt, Homo sapiens
  misc_RNA (1)...(19): siRNA sense strand
gaaugcagagagguugaaa

SEQ ID NO: 1169486 - RNA, 19 nt, Homo sapiens
  misc_RNA (1)...(19): siRNA sense strand
uuccuuacaucucaaugaa

SEQ ID NO: 1169487 - RNA, 19 nt, Homo sapiens
  misc_RNA (1)...(19): siRNA sense strand
agacuuguauaaagaucga

SEQ ID NO: 1169488 - RNA, 19 nt, Homo sapiens
  misc_RNA (1)...(19): siRNA sense strand
uaaaggaagaagaacgaau

SEQ ID NO: 1169489 - RNA, 19 nt, Homo sapiens
  misc_RNA (1)...(19): siRNA sense strand
gaggacgaacuggcacuuu

SEQ ID NO: 1169490 - RNA, 19 nt, Homo sapiens
  misc_RNA (1)...(19): siRNA sense strand
uaaagaucgacuuggacua

SEQ ID NO: 1169491 - RNA, 19 nt, Homo sapiens
  misc_RNA (1)...(19): siRNA sense strand
aagaacgaaugguugagau

SEQ ID NO: 1169492 - RNA, 19 nt, Homo sapiens
  misc_RNA (1)...(19): siRNA sense strand
gagauaccuacaaggauuc

SEQ ID NO: 1169493 - RNA, 19 nt, Homo sapiens
  misc_RNA (1)...(19): siRNA sense strand
cagaauuucaagagaaugu

SEQ ID NO: 1169494 - RNA, 19 nt, Homo sapiens
  misc_RNA (1)...(19): siRNA sense strand
uugagggccuagcagaauu

SEQ ID NO: 1169495 - RNA, 19 nt, Homo sapiens
  misc_RNA (1)...(19): siRNA sense strand
gauagugccccucaucuug

SEQ ID NO: 1169496 - RNA, 19 nt, Homo sapiens
  misc_RNA (1)...(19): siRNA sense strand
aagggacuaugaaguguca

SEQ ID NO: 1169497 - RNA, 19 nt, Homo sapiens
  misc_RNA (1)...(19): siRNA sense strand
aauauugacccuaagaauc

SEQ ID NO: 1169498 - RNA, 19 nt, Homo sapiens
  misc_RNA (1)...(19): siRNA sense strand
aaagaucgacuuggacuag

SEQ ID NO: 1169499 - RNA, 19 nt, Homo sapiens
  misc_RNA (1)...(19): siRNA sense strand
ucugcagacuuguauaaag

SEQ ID NO: 1169500 - RNA, 19 nt, Homo sapiens
  misc_RNA (1)...(19): siRNA sense strand
agaucgacuuggacuagaa

SEQ ID NO: 1169501 - RNA, 19 nt, Homo sapiens
  misc_RNA (1)...(19): siRNA sense strand
ugaagcaagggacuaugaa

SEQ ID NO: 1169502 - RNA, 19 nt, Homo sapiens
  misc_RNA (1)...(19): siRNA sense strand
aacgaaugguugagauguu

SEQ ID NO: 1169503 - RNA, 19 nt, Homo sapiens
  misc_RNA (1)...(19): siRNA sense strand
aguacugacugcaaauauc

SEQ ID NO: 1169504 - RNA, 19 nt, Homo sapiens
  misc_RNA (1)...(19): siRNA sense strand
uacaaggauuccaucaaag

SEQ ID NO: 1169505 - RNA, 19 nt, Homo sapiens
  misc_RNA (1)...(19): siRNA sense strand
ggauuccaucaaagcauuu

SEQ ID NO: 1169506 - RNA, 19 nt, Homo sapiens
  misc_RNA (1)...(19): siRNA sense strand
aaagcaggaauuggaagua

SEQ ID NO: 1169507 - RNA, 19 nt, Homo sapiens
  misc_RNA (1)...(19): siRNA sense strand
ugagggccuagcagaauuu

SEQ ID NO: 1169508 - RNA, 19 nt, Homo sapiens
  misc_RNA (1)...(19): siRNA sense strand
ucaaugaagcaagggacua

SEQ ID NO: 1169509 - RNA, 19 nt, Homo sapiens
  misc_RNA (1)...(19): siRNA sense strand
gcgaaugcagagagguuga

SEQ ID NO: 1169510 - RNA, 19 nt, Homo sapiens
  misc_RNA (1)...(19): siRNA sense strand
cuaauauugacccuaagaa

SEQ ID NO: 1169511 - RNA, 19 nt, Homo sapiens
  misc_RNA (1)...(19): siRNA sense strand
caaggauuccaucaaagca

SEQ ID NO: 1169512 - RNA, 19 nt, Homo sapiens
  misc_RNA (1)...(19): siRNA sense strand
cagcuuuucuugccaaugu

SEQ ID NO: 1169513 - RNA, 19 nt, Homo sapiens
  misc_RNA (1)...(19): siRNA sense strand
agcagaauuucaagagaau

SEQ ID NO: 1169514 - RNA, 19 nt, Homo sapiens
  misc_RNA (1)...(19): siRNA sense strand
aauccugagagcccauuua

SEQ ID NO: 1169515 - RNA, 19 nt, Homo sapiens
  misc_RNA (1)...(19): siRNA sense strand
aagcaggaauuggaaguac

SEQ ID NO: 1169516 - RNA, 19 nt, Homo sapiens
  misc_RNA (1)...(19): siRNA sense strand
uaggaagaaggaaacuauu

SEQ ID NO: 1169517 - RNA, 19 nt, Homo sapiens
  misc_RNA (1)...(19): siRNA sense strand
gaacuucccuuaagaguca

SEQ ID NO: 1169518 - RNA, 19 nt, Homo sapiens
  misc_RNA (1)...(19): siRNA sense strand
ggaaugaccuggcagauca

SEQ ID NO: 1169519 - RNA, 19 nt, Homo sapiens
  misc_RNA (1)...(19): siRNA sense strand
ccaagucgcuggagccauu

SEQ ID NO: 1169520 - RNA, 19 nt, Homo sapiens
  misc_RNA (1)...(19): siRNA sense strand
gggaacaacuucaguccaa

SEQ ID NO: 1169521 - RNA, 19 nt, Homo sapiens
  misc_RNA (1)...(19): siRNA sense strand
ugagcacgcugaaggcuua

SEQ ID NO: 1169522 - RNA, 19 nt, Homo sapiens
  misc_RNA (1)...(19): siRNA sense strand
caaccuagaacuucccuua

SEQ ID NO: 1169523 - RNA, 19 nt, Homo sapiens
  misc_RNA (1)...(19): siRNA sense strand
gcagagagccaguguuugu

SEQ ID NO: 1169524 - RNA, 19 nt, Homo sapiens
  misc_RNA (1)...(19): siRNA sense strand
uaaccagacugugacauuu

SEQ ID NO: 1169525 - RNA, 19 nt, Homo sapiens
  misc_RNA (1)...(19): siRNA sense strand
gcaagaagugccaagauug

SEQ ID NO: 1169526 - RNA, 19 nt, Homo sapiens
  misc_RNA (1)...(19): siRNA sense strand
gggccagguucuccuauuu

SEQ ID NO: 1169527 - RNA, 19 nt, Homo sapiens
  misc_RNA (1)...(19): siRNA sense strand
gaaaacagcccacugaugu

SEQ ID NO: 1169528 - RNA, 19 nt, Homo sapiens
  misc_RNA (1)...(19): siRNA sense strand
ggacuguggucugccauug

SEQ ID NO: 1169529 - RNA, 19 nt, Homo sapiens
  misc_RNA (1)...(19): siRNA sense strand
gggaagaaaggcccaacua

SEQ ID NO: 1169530 - RNA, 19 nt, Homo sapiens
  misc_RNA (1)...(19): siRNA sense strand
gaacuccuccuuccugcuu

SEQ ID NO: 1169531 - RNA, 19 nt, Homo sapiens
  misc_RNA (1)...(19): siRNA sense strand
uccaagggcugcaguucua

SEQ ID NO: 1169532 - RNA, 19 nt, Homo sapiens
  misc_RNA (1)...(19): siRNA sense strand
ccuagaacuucccuuaaga

SEQ ID NO: 1169533 - RNA, 19 nt, Homo sapiens
  misc_RNA (1)...(19): siRNA sense strand
caaugguggucgugugauu

SEQ ID NO: 1169534 - RNA, 19 nt, Homo sapiens
  misc_RNA (1)...(19): siRNA sense strand
ggagagguaucgcccugau

SEQ ID NO: 1169535 - RNA, 19 nt, Homo sapiens
  misc_RNA (1)...(19): siRNA sense strand
gugaauuacugcuacaauc

SEQ ID NO: 1169536 - RNA, 19 nt, Homo sapiens
  misc_RNA (1)...(19): siRNA sense strand
ggagaugcuuuuccacuuu

SEQ ID NO: 1169537 - RNA, 19 nt, Homo sapiens
  misc_RNA (1)...(19): siRNA sense strand
ccuaugcccuguuucucua

SEQ ID NO: 1169538 - RNA, 19 nt, Homo sapiens
  misc_RNA (1)...(19): siRNA sense strand
ggagugaggagcccaggaa

SEQ ID NO: 1169539 - RNA, 19 nt, Homo sapiens
  misc_RNA (1)...(19): siRNA sense strand
gccauucacucuggagauu

SEQ ID NO: 1169540 - RNA, 19 nt, Homo sapiens
  misc_RNA (1)...(19): siRNA sense strand
gcagggacgacgggacuua

SEQ ID NO: 1169541 - RNA, 19 nt, Homo sapiens
  misc_RNA (1)...(19): siRNA sense strand
gggcagaccacgcugauuc

SEQ ID NO: 1169542 - RNA, 19 nt, Homo sapiens
  misc_RNA (1)...(19): siRNA sense strand
gggaagacgugcgcgaugu

SEQ ID NO: 1169543 - RNA, 19 nt, Homo sapiens
  misc_RNA (1)...(19): siRNA sense strand
gcaagcaucggacuucaca

SEQ ID NO: 1169544 - RNA, 19 nt, Homo sapiens
  misc_RNA (1)...(19): siRNA sense strand
gaauuacugcuacaaucaa

SEQ ID NO: 1169545 - RNA, 19 nt, Homo sapiens
  misc_RNA (1)...(19): siRNA sense strand
ugacaagcccuaccucugu

SEQ ID NO: 1169546 - RNA, 19 nt, Homo sapiens
  misc_RNA (1)...(19): siRNA sense strand
gcuccugggcugaacauuu

SEQ ID NO: 1169547 - RNA, 19 nt, Homo sapiens
  misc_RNA (1)...(19): siRNA sense strand
ccagcugccuuccaacuuc

SEQ ID NO: 1169548 - RNA, 19 nt, Homo sapiens
  misc_RNA (1)...(19): siRNA sense strand
gcaccgacuuggagcucuu

SEQ ID NO: 1169549 - RNA, 19 nt, Homo sapiens
  misc_RNA (1)...(19): siRNA sense strand
gaaacucgacgcguucuuc

SEQ ID NO: 1169550 - RNA, 19 nt, Homo sapiens
  misc_RNA (1)...(19): siRNA sense strand
cagaugcgauggcuacaag

SEQ ID NO: 1169551 - RNA, 19 nt, Homo sapiens
  misc_RNA (1)...(19): siRNA sense strand
caaggccacugcuacaucu

SEQ ID NO: 1169552 - RNA, 19 nt, Homo sapiens
  misc_RNA (1)...(19): siRNA sense strand
gccaguguuuguacaauca

SEQ ID NO: 1169553 - RNA, 19 nt, Homo sapiens
  misc_RNA (1)...(19): siRNA sense strand
agcaagaagugccaagauu

SEQ ID NO: 1169554 - RNA, 19 nt, Homo sapiens
  misc_RNA (1)...(19): siRNA sense strand
ggauuagaaagaucacaaa

SEQ ID NO: 1169555 - RNA, 19 nt, Homo sapiens
  misc_RNA (1)...(19): siRNA sense strand
gggcuacugugaccaugga

SEQ ID NO: 1169556 - RNA, 19 nt, Homo sapiens
  misc_RNA (1)...(19): siRNA sense strand
acuuggagcucuuugagaa

SEQ ID NO: 1169557 - RNA, 19 nt, Homo sapiens
  misc_RNA (1)...(19): siRNA sense strand
ggaagaaaggcccaacuac

SEQ ID NO: 1169558 - RNA, 19 nt, Homo sapiens
  misc_RNA (1)...(19): siRNA sense strand
ggucaaugcccacgccuau

SEQ ID NO: 1169559 - RNA, 19 nt, Homo sapiens
  misc_RNA (1)...(19): siRNA sense strand
gaucaucuucccagaguca

SEQ ID NO: 1169560 - RNA, 19 nt, Homo sapiens
  misc_RNA (1)...(19): siRNA sense strand
caaguggaacgaaucgauu

SEQ ID NO: 1169561 - RNA, 19 nt, Homo sapiens
  misc_RNA (1)...(19): siRNA sense strand
ggagcucuuuccuguguca

SEQ ID NO: 1169562 - RNA, 19 nt, Homo sapiens
  misc_RNA (1)...(19): siRNA sense strand
cuccugggcugaacauuug

SEQ ID NO: 1169563 - RNA, 19 nt, Homo sapiens
  misc_RNA (1)...(19): siRNA sense strand
caggccgagucuuggauua

SEQ ID NO: 1169564 - RNA, 19 nt, Homo sapiens
  misc_RNA (1)...(19): siRNA sense strand
gcucuuuccugugucagaa

SEQ ID NO: 1169565 - RNA, 19 nt, Homo sapiens
  misc_RNA (1)...(19): siRNA sense strand
ucauugacuuccugaacaa

SEQ ID NO: 1169566 - RNA, 19 nt, Homo sapiens
  misc_RNA (1)...(19): siRNA sense strand
guucuucggcaucuucuuu

SEQ ID NO: 1169567 - RNA, 19 nt, Homo sapiens
  misc_RNA (1)...(19): siRNA sense strand
gaagacgugcgcgauguga

SEQ ID NO: 1169568 - RNA, 19 nt, Homo sapiens
  misc_RNA (1)...(19): siRNA sense strand
ggccgagucuuggauuaga

SEQ ID NO: 1169569 - RNA, 19 nt, Homo sapiens
  misc_RNA (1)...(19): siRNA sense strand
ugaauuacugcuacaauca

SEQ ID NO: 1169570 - RNA, 19 nt, Homo sapiens
  misc_RNA (1)...(19): siRNA sense strand
aguccugcccugugaauua

SEQ ID NO: 1169571 - RNA, 19 nt, Homo sapiens
  misc_RNA (1)...(19): siRNA sense strand
gcagcguccuuggcaguug

SEQ ID NO: 1169572 - RNA, 19 nt, Homo sapiens
  misc_RNA (1)...(19): siRNA sense strand
gugagcaccugagcaugaa

SEQ ID NO: 1169573 - RNA, 19 nt, Homo sapiens
  misc_RNA (1)...(19): siRNA sense strand
gagccaguguuuguacaau

SEQ ID NO: 1169574 - RNA, 19 nt, Homo sapiens
  misc_RNA (1)...(19): siRNA sense strand
gagagccaguguuuguaca

SEQ ID NO: 1169575 - RNA, 19 nt, Homo sapiens
  misc_RNA (1)...(19): siRNA sense strand
ggaauacgagacguucuau

SEQ ID NO: 1169576 - RNA, 19 nt, Homo sapiens
  misc_RNA (1)...(19): siRNA sense strand
cgacgggacuuacgauucc

SEQ ID NO: 1169577 - RNA, 19 nt, Homo sapiens
  misc_RNA (1)...(19): siRNA sense strand
gaacauuugaucuccaacu

SEQ ID NO: 1169578 - RNA, 19 nt, Homo sapiens
  misc_RNA (1)...(19): siRNA sense strand
guccaacugucaaccuaga

SEQ ID NO: 1169579 - RNA, 19 nt, Homo sapiens
  misc_RNA (1)...(19): siRNA sense strand
gcuccucucuccgugauuc

SEQ ID NO: 1169580 - RNA, 19 nt, Homo sapiens
  misc_RNA (1)...(19): siRNA sense strand
acgccacccucaaucagua

SEQ ID NO: 1169581 - RNA, 19 nt, Homo sapiens
  misc_RNA (1)...(19): siRNA sense strand
ccacaucaccaccuuggau

SEQ ID NO: 1169582 - RNA, 19 nt, Homo sapiens
  misc_RNA (1)...(19): siRNA sense strand
gaacaacuucaguccaacu

SEQ ID NO: 1169583 - RNA, 19 nt, Homo sapiens
  misc_RNA (1)...(19): siRNA sense strand
ucaguuacaccuucaaugg

SEQ ID NO: 1169584 - RNA, 19 nt, Homo sapiens
  misc_RNA (1)...(19): siRNA sense strand
aaccaguccugcccuguga

SEQ ID NO: 1169585 - RNA, 19 nt, Homo sapiens
  misc_RNA (1)...(19): siRNA sense strand
caacgggacaggccuccuu

SEQ ID NO: 1169586 - RNA, 19 nt, Homo sapiens
  misc_RNA (1)...(19): siRNA sense strand
gguggaggcguucuuauac

SEQ ID NO: 1169587 - RNA, 19 nt, Homo sapiens
  misc_RNA (1)...(19): siRNA sense strand
ggugguggaggcguucuua

SEQ ID NO: 1169588 - RNA, 19 nt, Homo sapiens
  misc_RNA (1)...(19): siRNA sense strand
gaacgccacccucaaucag

SEQ ID NO: 1169589 - RNA, 19 nt, Homo sapiens
  misc_RNA (1)...(19): siRNA sense strand
gcaggccgagucuuggauu

SEQ ID NO: 1169590 - RNA, 19 nt, Homo sapiens
  misc_RNA (1)...(19): siRNA sense strand
ugguggaggcguucuuaua

SEQ ID NO: 1169591 - RNA, 19 nt, Homo sapiens
  misc_RNA (1)...(19): siRNA sense strand
gacgggagcagguccuaug

SEQ ID NO: 1169592 - RNA, 19 nt, Homo sapiens
  misc_RNA (1)...(19): siRNA sense strand
gccgagucuuggauuagaa

SEQ ID NO: 1169593 - RNA, 19 nt, Homo sapiens
  misc_RNA (1)...(19): siRNA sense strand
acacgagggaagucaguaa

SEQ ID NO: 1169594 - RNA, 19 nt, Homo sapiens
  misc_RNA (1)...(19): siRNA sense strand
ugugagcaccugagcauga

SEQ ID NO: 1169595 - RNA, 19 nt, Homo sapiens
  misc_RNA (1)...(19): siRNA sense strand
ggaagacgugcgcgaugug

SEQ ID NO: 1169596 - RNA, 19 nt, Homo sapiens
  misc_RNA (1)...(19): siRNA sense strand
ggacgacgggacuuacgau

SEQ ID NO: 1169597 - RNA, 19 nt, Homo sapiens
  misc_RNA (1)...(19): siRNA sense strand
ccaaguggaacgaaucgau

SEQ ID NO: 1169598 - RNA, 19 nt, Homo sapiens
  misc_RNA (1)...(19): siRNA sense strand
gaccacauuuuaucaggaa

SEQ ID NO: 1169599 - RNA, 19 nt, Homo sapiens
  misc_RNA (1)...(19): siRNA sense strand
augcagagagccaguguuu

SEQ ID NO: 1169600 - RNA, 19 nt, Homo sapiens
  misc_RNA (1)...(19): siRNA sense strand
gaauacgagacguucuaug

SEQ ID NO: 1169601 - RNA, 19 nt, Homo sapiens
  misc_RNA (1)...(19): siRNA sense strand
ugaucgcgcucuccaacau

SEQ ID NO: 1169602 - RNA, 19 nt, Homo sapiens
  misc_RNA (1)...(19): siRNA sense strand
ccuuggauggugucaguua

SEQ ID NO: 1169603 - RNA, 19 nt, Homo sapiens
  misc_RNA (1)...(19): siRNA sense strand
cagcugccuuccaacuuca

SEQ ID NO: 1169604 - RNA, 19 nt, Homo sapiens
  misc_RNA (1)...(19): siRNA sense strand
gcagcuguguguccuucuc

SEQ ID NO: 1169605 - RNA, 19 nt, Homo sapiens
  misc_RNA (1)...(19): siRNA sense strand
cacagacaauggccagauc

SEQ ID NO: 1169606 - RNA, 19 nt, Homo sapiens
  misc_RNA (1)...(19): siRNA sense strand
gcacgcugaaggcuuacuu

SEQ ID NO: 1169607 - RNA, 19 nt, Homo sapiens
  misc_RNA (1)...(19): siRNA sense strand
cgaacgccacccucaauca

SEQ ID NO: 1169608 - RNA, 19 nt, Homo sapiens
  misc_RNA (1)...(19): siRNA sense strand
cugaacauuugaucuccaa

SEQ ID NO: 1169609 - RNA, 19 nt, Homo sapiens
  misc_RNA (1)...(19): siRNA sense strand
gagaugcuuuuccacuuug

SEQ ID NO: 1169610 - RNA, 19 nt, Homo sapiens
  misc_RNA (1)...(19): siRNA sense strand
ggggagcucuuuccugugu

SEQ ID NO: 1169611 - RNA, 19 nt, Homo sapiens
  misc_RNA (1)...(19): siRNA sense strand
cagagagccaguguuugua

SEQ ID NO: 1169612 - RNA, 19 nt, Homo sapiens
  misc_RNA (1)...(19): siRNA sense strand
caacgcaagcaucggacuu

SEQ ID NO: 1169613 - RNA, 19 nt, Homo sapiens
  misc_RNA (1)...(19): siRNA sense strand
gggcugaacauuugaucuc

SEQ ID NO: 1169614 - RNA, 19 nt, Homo sapiens
  misc_RNA (1)...(19): siRNA sense strand
caacuucaccccuguuuuc

SEQ ID NO: 1169615 - RNA, 19 nt, Homo sapiens
  misc_RNA (1)...(19): siRNA sense strand
auaaccagacugugacauu

SEQ ID NO: 1169616 - RNA, 19 nt, Homo sapiens
  misc_RNA (1)...(19): siRNA sense strand
gugaggagcccaggaacga

SEQ ID NO: 1169617 - RNA, 19 nt, Homo sapiens
  misc_RNA (1)...(19): siRNA sense strand
gaacuucccuuaagaguca

SEQ ID NO: 1169618 - RNA, 19 nt, Homo sapiens
  misc_RNA (1)...(19): siRNA sense strand
ggaaugaccuggcagauca

SEQ ID NO: 1169619 - RNA, 19 nt, Homo sapiens
  misc_RNA (1)...(19): siRNA sense strand
ccaagucgcuggagccauu

SEQ ID NO: 1169620 - RNA, 19 nt, Homo sapiens
  misc_RNA (1)...(19): siRNA sense strand
gggaacaacuucaguccaa

SEQ ID NO: 1169621 - RNA, 19 nt, Homo sapiens
  misc_RNA (1)...(19): siRNA sense strand
ugagcacgcugaaggcuua

SEQ ID NO: 1169622 - RNA, 19 nt, Homo sapiens
  misc_RNA (1)...(19): siRNA sense strand
caaccuagaacuucccuua

SEQ ID NO: 1169623 - RNA, 19 nt, Homo sapiens
  misc_RNA (1)...(19): siRNA sense strand
gcagagagccaguguuugu

SEQ ID NO: 1169624 - RNA, 19 nt, Homo sapiens
  misc_RNA (1)...(19): siRNA sense strand
uaaccagacugugacauuu

SEQ ID NO: 1169625 - RNA, 19 nt, Homo sapiens
  misc_RNA (1)...(19): siRNA sense strand
gcaagaagugccaagauug

SEQ ID NO: 1169626 - RNA, 19 nt, Homo sapiens
  misc_RNA (1)...(19): siRNA sense strand
gggccagguucuccuauuu

SEQ ID NO: 1169627 - RNA, 19 nt, Homo sapiens
  misc_RNA (1)...(19): siRNA sense strand
gaaaacagcccacugaugu

SEQ ID NO: 1169628 - RNA, 19 nt, Homo sapiens
  misc_RNA (1)...(19): siRNA sense strand
ggacuguggucugccauug

SEQ ID NO: 1169629 - RNA, 19 nt, Homo sapiens
  misc_RNA (1)...(19): siRNA sense strand
gggaagaaaggcccaacua

SEQ ID NO: 1169630 - RNA, 19 nt, Homo sapiens
  misc_RNA (1)...(19): siRNA sense strand
gaacuccuccuuccugcuu

SEQ ID NO: 1169631 - RNA, 19 nt, Homo sapiens
  misc_RNA (1)...(19): siRNA sense strand
uccaagggcugcaguucua

SEQ ID NO: 1169632 - RNA, 19 nt, Homo sapiens
  misc_RNA (1)...(19): siRNA sense strand
ccuagaacuucccuuaaga

SEQ ID NO: 1169633 - RNA, 19 nt, Homo sapiens
  misc_RNA (1)...(19): siRNA sense strand
caaugguggucgugugauu

SEQ ID NO: 1169634 - RNA, 19 nt, Homo sapiens
  misc_RNA (1)...(19): siRNA sense strand
ggagagguaucgcccugau

SEQ ID NO: 1169635 - RNA, 19 nt, Homo sapiens
  misc_RNA (1)...(19): siRNA sense strand
gugaauuacugcuacaauc

SEQ ID NO: 1169636 - RNA, 19 nt, Homo sapiens
  misc_RNA (1)...(19): siRNA sense strand
ggagaugcuuuuccacuuu

SEQ ID NO: 1169637 - RNA, 19 nt, Homo sapiens
  misc_RNA (1)...(19): siRNA sense strand
ccuaugcccuguuucucua

SEQ ID NO: 1169638 - RNA, 19 nt, Homo sapiens
  misc_RNA (1)...(19): siRNA sense strand
ggagugaggagcccaggaa

SEQ ID NO: 1169639 - RNA, 19 nt, Homo sapiens
  misc_RNA (1)...(19): siRNA sense strand
gccauucacucuggagauu

SEQ ID NO: 1169640 - RNA, 19 nt, Homo sapiens
  misc_RNA (1)...(19): siRNA sense strand
gcagggacgacgggacuua

SEQ ID NO: 1169641 - RNA, 19 nt, Homo sapiens
  misc_RNA (1)...(19): siRNA sense strand
gggcagaccacgcugauuc

SEQ ID NO: 1169642 - RNA, 19 nt, Homo sapiens
  misc_RNA (1)...(19): siRNA sense strand
gggaagacgugcgcgaugu

SEQ ID NO: 1169643 - RNA, 19 nt, Homo sapiens
  misc_RNA (1)...(19): siRNA sense strand
gcaagcaucggacuucaca

SEQ ID NO: 1169644 - RNA, 19 nt, Homo sapiens
  misc_RNA (1)...(19): siRNA sense strand
gaauuacugcuacaaucaa

SEQ ID NO: 1169645 - RNA, 19 nt, Homo sapiens
  misc_RNA (1)...(19): siRNA sense strand
ugacaagcccuaccucugu

SEQ ID NO: 1169646 - RNA, 19 nt, Homo sapiens
  misc_RNA (1)...(19): siRNA sense strand
gcuccugggcugaacauuu

SEQ ID NO: 1169647 - RNA, 19 nt, Homo sapiens
  misc_RNA (1)...(19): siRNA sense strand
ccagcugccuuccaacuuc

SEQ ID NO: 1169648 - RNA, 19 nt, Homo sapiens
  misc_RNA (1)...(19): siRNA sense strand
gcaccgacuuggagcucuu

SEQ ID NO: 1169649 - RNA, 19 nt, Homo sapiens
  misc_RNA (1)...(19): siRNA sense strand
gaaacucgacgcguucuuc

SEQ ID NO: 1169650 - RNA, 19 nt, Homo sapiens
  misc_RNA (1)...(19): siRNA sense strand
cagaugcgauggcuacaag

SEQ ID NO: 1169651 - RNA, 19 nt, Homo sapiens
  misc_RNA (1)...(19): siRNA sense strand
caaggccacugcuacaucu

SEQ ID NO: 1169652 - RNA, 19 nt, Homo sapiens
  misc_RNA (1)...(19): siRNA sense strand
gccaguguuuguacaauca

SEQ ID NO: 1169653 - RNA, 19 nt, Homo sapiens
  misc_RNA (1)...(19): siRNA sense strand
agcaagaagugccaagauu

SEQ ID NO: 1169654 - RNA, 19 nt, Homo sapiens
  misc_RNA (1)...(19): siRNA sense strand
ggauuagaaagaucacaaa

SEQ ID NO: 1169655 - RNA, 19 nt, Homo sapiens
  misc_RNA (1)...(19): siRNA sense strand
gggcuacugugaccaugga

SEQ ID NO: 1169656 - RNA, 19 nt, Homo sapiens
  misc_RNA (1)...(19): siRNA sense strand
acuuggagcucuuugagaa

SEQ ID NO: 1169657 - RNA, 19 nt, Homo sapiens
  misc_RNA (1)...(19): siRNA sense strand
ggaagaaaggcccaacuac

SEQ ID NO: 1169658 - RNA, 19 nt, Homo sapiens
  misc_RNA (1)...(19): siRNA sense strand
ggucaaugcccacgccuau

SEQ ID NO: 1169659 - RNA, 19 nt, Homo sapiens
  misc_RNA (1)...(19): siRNA sense strand
gaucaucuucccagaguca

SEQ ID NO: 1169660 - RNA, 19 nt, Homo sapiens
  misc_RNA (1)...(19): siRNA sense strand
caaguggaacgaaucgauu

SEQ ID NO: 1169661 - RNA, 19 nt, Homo sapiens
  misc_RNA (1)...(19): siRNA sense strand
ggagcucuuuccuguguca

SEQ ID NO: 1169662 - RNA, 19 nt, Homo sapiens
  misc_RNA (1)...(19): siRNA sense strand
cuccugggcugaacauuug

SEQ ID NO: 1169663 - RNA, 19 nt, Homo sapiens
  misc_RNA (1)...(19): siRNA sense strand
caggccgagucuuggauua

SEQ ID NO: 1169664 - RNA, 19 nt, Homo sapiens
  misc_RNA (1)...(19): siRNA sense strand
gcucuuuccugugucagaa

SEQ ID NO: 1169665 - RNA, 19 nt, Homo sapiens
  misc_RNA (1)...(19): siRNA sense strand
ucauugacuuccugaacaa

SEQ ID NO: 1169666 - RNA, 19 nt, Homo sapiens
  misc_RNA (1)...(19): siRNA sense strand
guucuucggcaucuucuuu

SEQ ID NO: 1169667 - RNA, 19 nt, Homo sapiens
  misc_RNA (1)...(19): siRNA sense strand
gaagacgugcgcgauguga

SEQ ID NO: 1169668 - RNA, 19 nt, Homo sapiens
  misc_RNA (1)...(19): siRNA sense strand
ggccgagucuuggauuaga

SEQ ID NO: 1169669 - RNA, 19 nt, Homo sapiens
  misc_RNA (1)...(19): siRNA sense strand
ugaauuacugcuacaauca

SEQ ID NO: 1169670 - RNA, 19 nt, Homo sapiens
  misc_RNA (1)...(19): siRNA sense strand
aguccugcccugugaauua

SEQ ID NO: 1169671 - RNA, 19 nt, Homo sapiens
  misc_RNA (1)...(19): siRNA sense strand
gcagcguccuuggcaguug

SEQ ID NO: 1169672 - RNA, 19 nt, Homo sapiens
  misc_RNA (1)...(19): siRNA sense strand
gugagcaccugagcaugaa

SEQ ID NO: 1169673 - RNA, 19 nt, Homo sapiens
  misc_RNA (1)...(19): siRNA sense strand
gagccaguguuuguacaau

SEQ ID NO: 1169674 - RNA, 19 nt, Homo sapiens
  misc_RNA (1)...(19): siRNA sense strand
gagagccaguguuuguaca

SEQ ID NO: 1169675 - RNA, 19 nt, Homo sapiens
  misc_RNA (1)...(19): siRNA sense strand
ggaauacgagacguucuau

SEQ ID NO: 1169676 - RNA, 19 nt, Homo sapiens
  misc_RNA (1)...(19): siRNA sense strand
cgacgggacuuacgauucc

SEQ ID NO: 1169677 - RNA, 19 nt, Homo sapiens
  misc_RNA (1)...(19): siRNA sense strand
gaacauuugaucuccaacu

SEQ ID NO: 1169678 - RNA, 19 nt, Homo sapiens
  misc_RNA (1)...(19): siRNA sense strand
guccaacugucaaccuaga

SEQ ID NO: 1169679 - RNA, 19 nt, Homo sapiens
  misc_RNA (1)...(19): siRNA sense strand
gcuccucucuccgugauuc

SEQ ID NO: 1169680 - RNA, 19 nt, Homo sapiens
  misc_RNA (1)...(19): siRNA sense strand
acgccacccucaaucagua

SEQ ID NO: 1169681 - RNA, 19 nt, Homo sapiens
  misc_RNA (1)...(19): siRNA sense strand
ccacaucaccaccuuggau

SEQ ID NO: 1169682 - RNA, 19 nt, Homo sapiens
  misc_RNA (1)...(19): siRNA sense strand
gaacaacuucaguccaacu

SEQ ID NO: 1169683 - RNA, 19 nt, Homo sapiens
  misc_RNA (1)...(19): siRNA sense strand
ucaguuacaccuucaaugg

SEQ ID NO: 1169684 - RNA, 19 nt, Homo sapiens
  misc_RNA (1)...(19): siRNA sense strand
aaccaguccugcccuguga

SEQ ID NO: 1169685 - RNA, 19 nt, Homo sapiens
  misc_RNA (1)...(19): siRNA sense strand
caacgggacaggccuccuu

SEQ ID NO: 1169686 - RNA, 19 nt, Homo sapiens
  misc_RNA (1)...(19): siRNA sense strand
gguggaggcguucuuauac

SEQ ID NO: 1169687 - RNA, 19 nt, Homo sapiens
  misc_RNA (1)...(19): siRNA sense strand
ggugguggaggcguucuua

SEQ ID NO: 1169688 - RNA, 19 nt, Homo sapiens
  misc_RNA (1)...(19): siRNA sense strand
gaacgccacccucaaucag

SEQ ID NO: 1169689 - RNA, 19 nt, Homo sapiens
  misc_RNA (1)...(19): siRNA sense strand
gcaggccgagucuuggauu

SEQ ID NO: 1169690 - RNA, 19 nt, Homo sapiens
  misc_RNA (1)...(19): siRNA sense strand
ugguggaggcguucuuaua

SEQ ID NO: 1169691 - RNA, 19 nt, Homo sapiens
  misc_RNA (1)...(19): siRNA sense strand
gacgggagcagguccuaug

SEQ ID NO: 1169692 - RNA, 19 nt, Homo sapiens
  misc_RNA (1)...(19): siRNA sense strand
gccgagucuuggauuagaa

SEQ ID NO: 1169693 - RNA, 19 nt, Homo sapiens
  misc_RNA (1)...(19): siRNA sense strand
acacgagggaagucaguaa

SEQ ID NO: 1169694 - RNA, 19 nt, Homo sapiens
  misc_RNA (1)...(19): siRNA sense strand
ugugagcaccugagcauga

SEQ ID NO: 1169695 - RNA, 19 nt, Homo sapiens
  misc_RNA (1)...(19): siRNA sense strand
ggaagacgugcgcgaugug

SEQ ID NO: 1169696 - RNA, 19 nt, Homo sapiens
  misc_RNA (1)...(19): siRNA sense strand
ggacgacgggacuuacgau

SEQ ID NO: 1169697 - RNA, 19 nt, Homo sapiens
  misc_RNA (1)...(19): siRNA sense strand
ccaaguggaacgaaucgau

SEQ ID NO: 1169698 - RNA, 19 nt, Homo sapiens
  misc_RNA (1)...(19): siRNA sense strand
gaccacauuuuaucaggaa

SEQ ID NO: 1169699 - RNA, 19 nt, Homo sapiens
  misc_RNA (1)...(19): siRNA sense strand
augcagagagccaguguuu

SEQ ID NO: 1169700 - RNA, 19 nt, Homo sapiens
  misc_RNA (1)...(19): siRNA sense strand
gaauacgagacguucuaug

SEQ ID NO: 1169701 - RNA, 19 nt, Homo sapiens
  misc_RNA (1)...(19): siRNA sense strand
ugaucgcgcucuccaacau

SEQ ID NO: 1169702 - RNA, 19 nt, Homo sapiens
  misc_RNA (1)...(19): siRNA sense strand
ccuuggauggugucaguua

SEQ ID NO: 1169703 - RNA, 19 nt, Homo sapiens
  misc_RNA (1)...(19): siRNA sense strand
cagcugccuuccaacuuca

SEQ ID NO: 1169704 - RNA, 19 nt, Homo sapiens
  misc_RNA (1)...(19): siRNA sense strand
gcagcuguguguccuucuc

SEQ ID NO: 1169705 - RNA, 19 nt, Homo sapiens
  misc_RNA (1)...(19): siRNA sense strand
cacagacaauggccagauc

SEQ ID NO: 1169706 - RNA, 19 nt, Homo sapiens
  misc_RNA (1)...(19): siRNA sense strand
gcacgcugaaggcuuacuu

SEQ ID NO: 1169707 - RNA, 19 nt, Homo sapiens
  misc_RNA (1)...(19): siRNA sense strand
cgaacgccacccucaauca

SEQ ID NO: 1169708 - RNA, 19 nt, Homo sapiens
  misc_RNA (1)...(19): siRNA sense strand
cugaacauuugaucuccaa

SEQ ID NO: 1169709 - RNA, 19 nt, Homo sapiens
  misc_RNA (1)...(19): siRNA sense strand
gagaugcuuuuccacuuug

SEQ ID NO: 1169710 - RNA, 19 nt, Homo sapiens
  misc_RNA (1)...(19): siRNA sense strand
ggggagcucuuuccugugu

SEQ ID NO: 1169711 - RNA, 19 nt, Homo sapiens
  misc_RNA (1)...(19): siRNA sense strand
cagagagccaguguuugua

SEQ ID NO: 1169712 - RNA, 19 nt, Homo sapiens
  misc_RNA (1)...(19): siRNA sense strand
caacgcaagcaucggacuu

SEQ ID NO: 1169713 - RNA, 19 nt, Homo sapiens
  misc_RNA (1)...(19): siRNA sense strand
gggcugaacauuugaucuc

SEQ ID NO: 1169714 - RNA, 19 nt, Homo sapiens
  misc_RNA (1)...(19): siRNA sense strand
caacuucaccccuguuuuc

SEQ ID NO: 1169715 - RNA, 19 nt, Homo sapiens
  misc_RNA (1)...(19): siRNA sense strand
auaaccagacugugacauu

SEQ ID NO: 1169716 - RNA, 19 nt, Homo sapiens
  misc_RNA (1)...(19): siRNA sense strand
gugaggagcccaggaacga

SEQ ID NO: 1169717 - RNA, 19 nt, Homo sapiens
  misc_RNA (1)...(19): siRNA sense strand
gaacuucccuuaagaguca

SEQ ID NO: 1169718 - RNA, 19 nt, Homo sapiens
  misc_RNA (1)...(19): siRNA sense strand
ggaaugaccuggcagauca

SEQ ID NO: 1169719 - RNA, 19 nt, Homo sapiens
  misc_RNA (1)...(19): siRNA sense strand
ccaagucgcuggagccauu

SEQ ID NO: 1169720 - RNA, 19 nt, Homo sapiens
  misc_RNA (1)...(19): siRNA sense strand
gggaacaacuucaguccaa

SEQ ID NO: 1169721 - RNA, 19 nt, Homo sapiens
  misc_RNA (1)...(19): siRNA sense strand
ugagcacgcugaaggcuua

SEQ ID NO: 1169722 - RNA, 19 nt, Homo sapiens
  misc_RNA (1)...(19): siRNA sense strand
caaccuagaacuucccuua

SEQ ID NO: 1169723 - RNA, 19 nt, Homo sapiens
  misc_RNA (1)...(19): siRNA sense strand
gcagagagccaguguuugu

SEQ ID NO: 1169724 - RNA, 19 nt, Homo sapiens
  misc_RNA (1)...(19): siRNA sense strand
uaaccagacugugacauuu

SEQ ID NO: 1169725 - RNA, 19 nt, Homo sapiens
  misc_RNA (1)...(19): siRNA sense strand
gcaagaagugccaagauug

SEQ ID NO: 1169726 - RNA, 19 nt, Homo sapiens
  misc_RNA (1)...(19): siRNA sense strand
gggccagguucuccuauuu

SEQ ID NO: 1169727 - RNA, 19 nt, Homo sapiens
  misc_RNA (1)...(19): siRNA sense strand
gaaaacagcccacugaugu

SEQ ID NO: 1169728 - RNA, 19 nt, Homo sapiens
  misc_RNA (1)...(19): siRNA sense strand
ggacuguggucugccauug

SEQ ID NO: 1169729 - RNA, 19 nt, Homo sapiens
  misc_RNA (1)...(19): siRNA sense strand
gggaagaaaggcccaacua

SEQ ID NO: 1169730 - RNA, 19 nt, Homo sapiens
  misc_RNA (1)...(19): siRNA sense strand
gaacuccuccuuccugcuu

SEQ ID NO: 1169731 - RNA, 19 nt, Homo sapiens
  misc_RNA (1)...(19): siRNA sense strand
uccaagggcugcaguucua

SEQ ID NO: 1169732 - RNA, 19 nt, Homo sapiens
  misc_RNA (1)...(19): siRNA sense strand
ccuagaacuucccuuaaga

SEQ ID NO: 1169733 - RNA, 19 nt, Homo sapiens
  misc_RNA (1)...(19): siRNA sense strand
caaugguggucgugugauu

SEQ ID NO: 1169734 - RNA, 19 nt, Homo sapiens
  misc_RNA (1)...(19): siRNA sense strand
ggagagguaucgcccugau

SEQ ID NO: 1169735 - RNA, 19 nt, Homo sapiens
  misc_RNA (1)...(19): siRNA sense strand
gugaauuacugcuacaauc

SEQ ID NO: 1169736 - RNA, 19 nt, Homo sapiens
  misc_RNA (1)...(19): siRNA sense strand
ggagaugcuuuuccacuuu

SEQ ID NO: 1169737 - RNA, 19 nt, Homo sapiens
  misc_RNA (1)...(19): siRNA sense strand
ccuaugcccuguuucucua

SEQ ID NO: 1169738 - RNA, 19 nt, Homo sapiens
  misc_RNA (1)...(19): siRNA sense strand
ggagugaggagcccaggaa

SEQ ID NO: 1169739 - RNA, 19 nt, Homo sapiens
  misc_RNA (1)...(19): siRNA sense strand
gccauucacucuggagauu

SEQ ID NO: 1169740 - RNA, 19 nt, Homo sapiens
  misc_RNA (1)...(19): siRNA sense strand
gcagggacgacgggacuua

SEQ ID NO: 1169741 - RNA, 19 nt, Homo sapiens
  misc_RNA (1)...(19): siRNA sense strand
gggcagaccacgcugauuc

SEQ ID NO: 1169742 - RNA, 19 nt, Homo sapiens
  misc_RNA (1)...(19): siRNA sense strand
gggaagacgugcgcgaugu

SEQ ID NO: 1169743 - RNA, 19 nt, Homo sapiens
  misc_RNA (1)...(19): siRNA sense strand
gcaagcaucggacuucaca

SEQ ID NO: 1169744 - RNA, 19 nt, Homo sapiens
  misc_RNA (1)...(19): siRNA sense strand
gaauuacugcuacaaucaa

SEQ ID NO: 1169745 - RNA, 19 nt, Homo sapiens
  misc_RNA (1)...(19): siRNA sense strand
ugacaagcccuaccucugu

SEQ ID NO: 1169746 - RNA, 19 nt, Homo sapiens
  misc_RNA (1)...(19): siRNA sense strand
gcuccugggcugaacauuu

SEQ ID NO: 1169747 - RNA, 19 nt, Homo sapiens
  misc_RNA (1)...(19): siRNA sense strand
ccagcugccuuccaacuuc

SEQ ID NO: 1169748 - RNA, 19 nt, Homo sapiens
  misc_RNA (1)...(19): siRNA sense strand
gcaccgacuuggagcucuu

SEQ ID NO: 1169749 - RNA, 19 nt, Homo sapiens
  misc_RNA (1)...(19): siRNA sense strand
gaaacucgacgcguucuuc

SEQ ID NO: 1169750 - RNA, 19 nt, Homo sapiens
  misc_RNA (1)...(19): siRNA sense strand
cagaugcgauggcuacaag

SEQ ID NO: 1169751 - RNA, 19 nt, Homo sapiens
  misc_RNA (1)...(19): siRNA sense strand
caaggccacugcuacaucu

SEQ ID NO: 1169752 - RNA, 19 nt, Homo sapiens
  misc_RNA (1)...(19): siRNA sense strand
gccaguguuuguacaauca

SEQ ID NO: 1169753 - RNA, 19 nt, Homo sapiens
  misc_RNA (1)...(19): siRNA sense strand
agcaagaagugccaagauu

SEQ ID NO: 1169754 - RNA, 19 nt, Homo sapiens
  misc_RNA (1)...(19): siRNA sense strand
ggauuagaaagaucacaaa

SEQ ID NO: 1169755 - RNA, 19 nt, Homo sapiens
  misc_RNA (1)...(19): siRNA sense strand
gggcuacugugaccaugga

SEQ ID NO: 1169756 - RNA, 19 nt, Homo sapiens
  misc_RNA (1)...(19): siRNA sense strand
acuuggagcucuuugagaa

SEQ ID NO: 1169757 - RNA, 19 nt, Homo sapiens
  misc_RNA (1)...(19): siRNA sense strand
ggaagaaaggcccaacuac

SEQ ID NO: 1169758 - RNA, 19 nt, Homo sapiens
  misc_RNA (1)...(19): siRNA sense strand
ggucaaugcccacgccuau

SEQ ID NO: 1169759 - RNA, 19 nt, Homo sapiens
  misc_RNA (1)...(19): siRNA sense strand
gaucaucuucccagaguca

SEQ ID NO: 1169760 - RNA, 19 nt, Homo sapiens
  misc_RNA (1)...(19): siRNA sense strand
caaguggaacgaaucgauu

SEQ ID NO: 1169761 - RNA, 19 nt, Homo sapiens
  misc_RNA (1)...(19): siRNA sense strand
ggagcucuuuccuguguca

SEQ ID NO: 1169762 - RNA, 19 nt, Homo sapiens
  misc_RNA (1)...(19): siRNA sense strand
cuccugggcugaacauuug

SEQ ID NO: 1169763 - RNA, 19 nt, Homo sapiens
  misc_RNA (1)...(19): siRNA sense strand
caggccgagucuuggauua

SEQ ID NO: 1169764 - RNA, 19 nt, Homo sapiens
  misc_RNA (1)...(19): siRNA sense strand
gcucuuuccugugucagaa

SEQ ID NO: 1169765 - RNA, 19 nt, Homo sapiens
  misc_RNA (1)...(19): siRNA sense strand
ucauugacuuccugaacaa

SEQ ID NO: 1169766 - RNA, 19 nt, Homo sapiens
  misc_RNA (1)...(19): siRNA sense strand
guucuucggcaucuucuuu

SEQ ID NO: 1169767 - RNA, 19 nt, Homo sapiens
  misc_RNA (1)...(19): siRNA sense strand
gaagacgugcgcgauguga

SEQ ID NO: 1169768 - RNA, 19 nt, Homo sapiens
  misc_RNA (1)...(19): siRNA sense strand
ggccgagucuuggauuaga

SEQ ID NO: 1169769 - RNA, 19 nt, Homo sapiens
  misc_RNA (1)...(19): siRNA sense strand
ugaauuacugcuacaauca

SEQ ID NO: 1169770 - RNA, 19 nt, Homo sapiens
  misc_RNA (1)...(19): siRNA sense strand
aguccugcccugugaauua

SEQ ID NO: 1169771 - RNA, 19 nt, Homo sapiens
  misc_RNA (1)...(19): siRNA sense strand
gcagcguccuuggcaguug

SEQ ID NO: 1169772 - RNA, 19 nt, Homo sapiens
  misc_RNA (1)...(19): siRNA sense strand
gugagcaccugagcaugaa

SEQ ID NO: 1169773 - RNA, 19 nt, Homo sapiens
  misc_RNA (1)...(19): siRNA sense strand
gagccaguguuuguacaau

SEQ ID NO: 1169774 - RNA, 19 nt, Homo sapiens
  misc_RNA (1)...(19): siRNA sense strand
gagagccaguguuuguaca

SEQ ID NO: 1169775 - RNA, 19 nt, Homo sapiens
  misc_RNA (1)...(19): siRNA sense strand
ggaauacgagacguucuau

SEQ ID NO: 1169776 - RNA, 19 nt, Homo sapiens
  misc_RNA (1)...(19): siRNA sense strand
cgacgggacuuacgauucc

SEQ ID NO: 1169777 - RNA, 19 nt, Homo sapiens
  misc_RNA (1)...(19): siRNA sense strand
gaacauuugaucuccaacu

SEQ ID NO: 1169778 - RNA, 19 nt, Homo sapiens
  misc_RNA (1)...(19): siRNA sense strand
guccaacugucaaccuaga

SEQ ID NO: 1169779 - RNA, 19 nt, Homo sapiens
  misc_RNA (1)...(19): siRNA sense strand
gcuccucucuccgugauuc

SEQ ID NO: 1169780 - RNA, 19 nt, Homo sapiens
  misc_RNA (1)...(19): siRNA sense strand
acgccacccucaaucagua

SEQ ID NO: 1169781 - RNA, 19 nt, Homo sapiens
  misc_RNA (1)...(19): siRNA sense strand
ccacaucaccaccuuggau

SEQ ID NO: 1169782 - RNA, 19 nt, Homo sapiens
  misc_RNA (1)...(19): siRNA sense strand
gaacaacuucaguccaacu

SEQ ID NO: 1169783 - RNA, 19 nt, Homo sapiens
  misc_RNA (1)...(19): siRNA sense strand
ucaguuacaccuucaaugg

SEQ ID NO: 1169784 - RNA, 19 nt, Homo sapiens
  misc_RNA (1)...(19): siRNA sense strand
aaccaguccugcccuguga

SEQ ID NO: 1169785 - RNA, 19 nt, Homo sapiens
  misc_RNA (1)...(19): siRNA sense strand
caacgggacaggccuccuu

SEQ ID NO: 1169786 - RNA, 19 nt, Homo sapiens
  misc_RNA (1)...(19): siRNA sense strand
gguggaggcguucuuauac

SEQ ID NO: 1169787 - RNA, 19 nt, Homo sapiens
  misc_RNA (1)...(19): siRNA sense strand
ggugguggaggcguucuua

SEQ ID NO: 1169788 - RNA, 19 nt, Homo sapiens
  misc_RNA (1)...(19): siRNA sense strand
gaacgccacccucaaucag

SEQ ID NO: 1169789 - RNA, 19 nt, Homo sapiens
  misc_RNA (1)...(19): siRNA sense strand
gcaggccgagucuuggauu

SEQ ID NO: 1169790 - RNA, 19 nt, Homo sapiens
  misc_RNA (1)...(19): siRNA sense strand
ugguggaggcguucuuaua

SEQ ID NO: 1169791 - RNA, 19 nt, Homo sapiens
  misc_RNA (1)...(19): siRNA sense strand
gacgggagcagguccuaug

SEQ ID NO: 1169792 - RNA, 19 nt, Homo sapiens
  misc_RNA (1)...(19): siRNA sense strand
gccgagucuuggauuagaa

SEQ ID NO: 1169793 - RNA, 19 nt, Homo sapiens
  misc_RNA (1)...(19): siRNA sense strand
acacgagggaagucaguaa

SEQ ID NO: 1169794 - RNA, 19 nt, Homo sapiens
  misc_RNA (1)...(19): siRNA sense strand
ugugagcaccugagcauga

SEQ ID NO: 1169795 - RNA, 19 nt, Homo sapiens
  misc_RNA (1)...(19): siRNA sense strand
ggaagacgugcgcgaugug

SEQ ID NO: 1169796 - RNA, 19 nt, Homo sapiens
  misc_RNA (1)...(19): siRNA sense strand
ggacgacgggacuuacgau

SEQ ID NO: 1169797 - RNA, 19 nt, Homo sapiens
  misc_RNA (1)...(19): siRNA sense strand
ccaaguggaacgaaucgau

SEQ ID NO: 1169798 - RNA, 19 nt, Homo sapiens
  misc_RNA (1)...(19): siRNA sense strand
gaccacauuuuaucaggaa

SEQ ID NO: 1169799 - RNA, 19 nt, Homo sapiens
  misc_RNA (1)...(19): siRNA sense strand
augcagagagccaguguuu

SEQ ID NO: 1169800 - RNA, 19 nt, Homo sapiens
  misc_RNA (1)...(19): siRNA sense strand
gaauacgagacguucuaug

SEQ ID NO: 1169801 - RNA, 19 nt, Homo sapiens
  misc_RNA (1)...(19): siRNA sense strand
ugaucgcgcucuccaacau

SEQ ID NO: 1169802 - RNA, 19 nt, Homo sapiens
  misc_RNA (1)...(19): siRNA sense strand
ccuuggauggugucaguua

SEQ ID NO: 1169803 - RNA, 19 nt, Homo sapiens
  misc_RNA (1)...(19): siRNA sense strand
cagcugccuuccaacuuca

SEQ ID NO: 1169804 - RNA, 19 nt, Homo sapiens
  misc_RNA (1)...(19): siRNA sense strand
gcagcuguguguccuucuc

SEQ ID NO: 1169805 - RNA, 19 nt, Homo sapiens
  misc_RNA (1)...(19): siRNA sense strand
cacagacaauggccagauc

SEQ ID NO: 1169806 - RNA, 19 nt, Homo sapiens
  misc_RNA (1)...(19): siRNA sense strand
gcacgcugaaggcuuacuu

SEQ ID NO: 1169807 - RNA, 19 nt, Homo sapiens
  misc_RNA (1)...(19): siRNA sense strand
cgaacgccacccucaauca

SEQ ID NO: 1169808 - RNA, 19 nt, Homo sapiens
  misc_RNA (1)...(19): siRNA sense strand
cugaacauuugaucuccaa

SEQ ID NO: 1169809 - RNA, 19 nt, Homo sapiens
  misc_RNA (1)...(19): siRNA sense strand
gagaugcuuuuccacuuug

SEQ ID NO: 1169810 - RNA, 19 nt, Homo sapiens
  misc_RNA (1)...(19): siRNA sense strand
ggggagcucuuuccugugu

SEQ ID NO: 1169811 - RNA, 19 nt, Homo sapiens
  misc_RNA (1)...(19): siRNA sense strand
cagagagccaguguuugua

SEQ ID NO: 1169812 - RNA, 19 nt, Homo sapiens
  misc_RNA (1)...(19): siRNA sense strand
caacgcaagcaucggacuu

SEQ ID NO: 1169813 - RNA, 19 nt, Homo sapiens
  misc_RNA (1)...(19): siRNA sense strand
gggcugaacauuugaucuc

SEQ ID NO: 1169814 - RNA, 19 nt, Homo sapiens
  misc_RNA (1)...(19): siRNA sense strand
caacuucaccccuguuuuc

SEQ ID NO: 1169815 - RNA, 19 nt, Homo sapiens
  misc_RNA (1)...(19): siRNA sense strand
auaaccagacugugacauu

SEQ ID NO: 1169816 - RNA, 19 nt, Homo sapiens
  misc_RNA (1)...(19): siRNA sense strand
gugaggagcccaggaacga

SEQ ID NO: 1169817 - RNA, 19 nt, Homo sapiens
  misc_RNA (1)...(19): siRNA sense strand
ccuaugcccuguuucucua

SEQ ID NO: 1169818 - RNA, 19 nt, Homo sapiens
  misc_RNA (1)...(19): siRNA sense strand
ggauuagaaagaucacaaa

SEQ ID NO: 1169819 - RNA, 19 nt, Homo sapiens
  misc_RNA (1)...(19): siRNA sense strand
ggucaaugcccacgccuau

SEQ ID NO: 1169820 - RNA, 19 nt, Homo sapiens
  misc_RNA (1)...(19): siRNA sense strand
gaucaucuucccagaguca

SEQ ID NO: 1169821 - RNA, 19 nt, Homo sapiens
  misc_RNA (1)...(19): siRNA sense strand
caggccgagucuuggauua

SEQ ID NO: 1169822 - RNA, 19 nt, Homo sapiens
  misc_RNA (1)...(19): siRNA sense strand
ggccgagucuuggauuaga

SEQ ID NO: 1169823 - RNA, 19 nt, Homo sapiens
  misc_RNA (1)...(19): siRNA sense strand
ggaauacgagacguucuau

SEQ ID NO: 1169824 - RNA, 19 nt, Homo sapiens
  misc_RNA (1)...(19): siRNA sense strand
gcuccucucuccgugauuc

SEQ ID NO: 1169825 - RNA, 19 nt, Homo sapiens
  misc_RNA (1)...(19): siRNA sense strand
gcaggccgagucuuggauu

SEQ ID NO: 1169826 - RNA, 19 nt, Homo sapiens
  misc_RNA (1)...(19): siRNA sense strand
gacgggagcagguccuaug

SEQ ID NO: 1169827 - RNA, 19 nt, Homo sapiens
  misc_RNA (1)...(19): siRNA sense strand
gccgagucuuggauuagaa

SEQ ID NO: 1169828 - RNA, 19 nt, Homo sapiens
  misc_RNA (1)...(19): siRNA sense strand
gaccacauuuuaucaggaa

SEQ ID NO: 1169829 - RNA, 19 nt, Homo sapiens
  misc_RNA (1)...(19): siRNA sense strand
gaauacgagacguucuaug

SEQ ID NO: 1169830 - RNA, 19 nt, Homo sapiens
  misc_RNA (1)...(19): siRNA sense strand
cacagacaauggccagauc

SEQ ID NO: 1169831 - RNA, 19 nt, Homo sapiens
  misc_RNA (1)...(19): siRNA sense strand
ggaggaccguggacuucac

SEQ ID NO: 1169832 - RNA, 19 nt, Homo sapiens
  misc_RNA (1)...(19): siRNA sense strand
aauacgagacguucuaugg

SEQ ID NO: 1169833 - RNA, 19 nt, Homo sapiens
  misc_RNA (1)...(19): siRNA sense strand
cugggacgaugcugacuuc

SEQ ID NO: 1169834 - RNA, 19 nt, Homo sapiens
  misc_RNA (1)...(19): siRNA sense strand
aggaauacgagacguucua

SEQ ID NO: 1169835 - RNA, 19 nt, Homo sapiens
  misc_RNA (1)...(19): siRNA sense strand
ggaaugaccuggcagauca

SEQ ID NO: 1169836 - RNA, 19 nt, Homo sapiens
  misc_RNA (1)...(19): siRNA sense strand
ccaagucgcuggagccauu

SEQ ID NO: 1169837 - RNA, 19 nt, Homo sapiens
  misc_RNA (1)...(19): siRNA sense strand
gcagagagccaguguuugu

SEQ ID NO: 1169838 - RNA, 19 nt, Homo sapiens
  misc_RNA (1)...(19): siRNA sense strand
uaaccagacugugacauuu

SEQ ID NO: 1169839 - RNA, 19 nt, Homo sapiens
  misc_RNA (1)...(19): siRNA sense strand
gcaagaagugccaagauug

SEQ ID NO: 1169840 - RNA, 19 nt, Homo sapiens
  misc_RNA (1)...(19): siRNA sense strand
gaaaacagcccacugaugu

SEQ ID NO: 1169841 - RNA, 19 nt, Homo sapiens
  misc_RNA (1)...(19): siRNA sense strand
ggacuguggucugccauug

SEQ ID NO: 1169842 - RNA, 19 nt, Homo sapiens
  misc_RNA (1)...(19): siRNA sense strand
gggaagaaaggcccaacua

SEQ ID NO: 1169843 - RNA, 19 nt, Homo sapiens
  misc_RNA (1)...(19): siRNA sense strand
gaacuccuccuuccugcuu

SEQ ID NO: 1169844 - RNA, 19 nt, Homo sapiens
  misc_RNA (1)...(19): siRNA sense strand
uccaagggcugcaguucua

SEQ ID NO: 1169845 - RNA, 19 nt, Homo sapiens
  misc_RNA (1)...(19): siRNA sense strand
caaugguggucgugugauu

SEQ ID NO: 1169846 - RNA, 19 nt, Homo sapiens
  misc_RNA (1)...(19): siRNA sense strand
ggagagguaucgcccugau

SEQ ID NO: 1169847 - RNA, 19 nt, Homo sapiens
  misc_RNA (1)...(19): siRNA sense strand
ggagaugcuuuuccacuuu

SEQ ID NO: 1169848 - RNA, 19 nt, Homo sapiens
  misc_RNA (1)...(19): siRNA sense strand
ccuaugcccuguuucucua

SEQ ID NO: 1169849 - RNA, 19 nt, Homo sapiens
  misc_RNA (1)...(19): siRNA sense strand
gccauucacucuggagauu

SEQ ID NO: 1169850 - RNA, 19 nt, Homo sapiens
  misc_RNA (1)...(19): siRNA sense strand
gcagggacgacgggacuua

SEQ ID NO: 1169851 - RNA, 19 nt, Homo sapiens
  misc_RNA (1)...(19): siRNA sense strand
gggcagaccacgcugauuc

SEQ ID NO: 1169852 - RNA, 19 nt, Homo sapiens
  misc_RNA (1)...(19): siRNA sense strand
gcaagcaucggacuucaca

SEQ ID NO: 1169853 - RNA, 19 nt, Homo sapiens
  misc_RNA (1)...(19): siRNA sense strand
ugacaagcccuaccucugu

SEQ ID NO: 1169854 - RNA, 19 nt, Homo sapiens
  misc_RNA (1)...(19): siRNA sense strand
gcuccugggcugaacauuu

SEQ ID NO: 1169855 - RNA, 19 nt, Homo sapiens
  misc_RNA (1)...(19): siRNA sense strand
ccagcugccuuccaacuuc

SEQ ID NO: 1169856 - RNA, 19 nt, Homo sapiens
  misc_RNA (1)...(19): siRNA sense strand
gcaccgacuuggagcucuu

SEQ ID NO: 1169857 - RNA, 19 nt, Homo sapiens
  misc_RNA (1)...(19): siRNA sense strand
gccaguguuuguacaauca

SEQ ID NO: 1169858 - RNA, 19 nt, Homo sapiens
  misc_RNA (1)...(19): siRNA sense strand
agcaagaagugccaagauu

SEQ ID NO: 1169859 - RNA, 19 nt, Homo sapiens
  misc_RNA (1)...(19): siRNA sense strand
ggauuagaaagaucacaaa

SEQ ID NO: 1169860 - RNA, 19 nt, Homo sapiens
  misc_RNA (1)...(19): siRNA sense strand
acuuggagcucuuugagaa

SEQ ID NO: 1169861 - RNA, 19 nt, Homo sapiens
  misc_RNA (1)...(19): siRNA sense strand
ggaagaaaggcccaacuac

SEQ ID NO: 1169862 - RNA, 19 nt, Homo sapiens
  misc_RNA (1)...(19): siRNA sense strand
ggucaaugcccacgccuau

SEQ ID NO: 1169863 - RNA, 19 nt, Homo sapiens
  misc_RNA (1)...(19): siRNA sense strand
gaucaucuucccagaguca

SEQ ID NO: 1169864 - RNA, 19 nt, Homo sapiens
  misc_RNA (1)...(19): siRNA sense strand
ggagcucuuuccuguguca

SEQ ID NO: 1169865 - RNA, 19 nt, Homo sapiens
  misc_RNA (1)...(19): siRNA sense strand
cuccugggcugaacauuug

SEQ ID NO: 1169866 - RNA, 19 nt, Homo sapiens
  misc_RNA (1)...(19): siRNA sense strand
caggccgagucuuggauua

SEQ ID NO: 1169867 - RNA, 19 nt, Homo sapiens
  misc_RNA (1)...(19): siRNA sense strand
gcucuuuccugugucagaa

SEQ ID NO: 1169868 - RNA, 19 nt, Homo sapiens
  misc_RNA (1)...(19): siRNA sense strand
ggccgagucuuggauuaga

SEQ ID NO: 1169869 - RNA, 19 nt, Homo sapiens
  misc_RNA (1)...(19): siRNA sense strand
gcagcguccuuggcaguug

SEQ ID NO: 1169870 - RNA, 19 nt, Homo sapiens
  misc_RNA (1)...(19): siRNA sense strand
gagccaguguuuguacaau

SEQ ID NO: 1169871 - RNA, 19 nt, Homo sapiens
  misc_RNA (1)...(19): siRNA sense strand
gagagccaguguuuguaca

SEQ ID NO: 1169872 - RNA, 19 nt, Homo sapiens
  misc_RNA (1)...(19): siRNA sense strand
ggaauacgagacguucuau

SEQ ID NO: 1169873 - RNA, 19 nt, Homo sapiens
  misc_RNA (1)...(19): siRNA sense strand
cgacgggacuuacgauucc

SEQ ID NO: 1169874 - RNA, 19 nt, Homo sapiens
  misc_RNA (1)...(19): siRNA sense strand
gaacauuugaucuccaacu

SEQ ID NO: 1169875 - RNA, 19 nt, Homo sapiens
  misc_RNA (1)...(19): siRNA sense strand
gcuccucucuccgugauuc

SEQ ID NO: 1169876 - RNA, 19 nt, Homo sapiens
  misc_RNA (1)...(19): siRNA sense strand
acgccacccucaaucagua

SEQ ID NO: 1169877 - RNA, 19 nt, Homo sapiens
  misc_RNA (1)...(19): siRNA sense strand
ccacaucaccaccuuggau

SEQ ID NO: 1169878 - RNA, 19 nt, Homo sapiens
  misc_RNA (1)...(19): siRNA sense strand
ucaguuacaccuucaaugg

SEQ ID NO: 1169879 - RNA, 19 nt, Homo sapiens
  misc_RNA (1)...(19): siRNA sense strand
aaccaguccugcccuguga

SEQ ID NO: 1169880 - RNA, 19 nt, Homo sapiens
  misc_RNA (1)...(19): siRNA sense strand
caacgggacaggccuccuu

SEQ ID NO: 1169881 - RNA, 19 nt, Homo sapiens
  misc_RNA (1)...(19): siRNA sense strand
gaacgccacccucaaucag

SEQ ID NO: 1169882 - RNA, 19 nt, Homo sapiens
  misc_RNA (1)...(19): siRNA sense strand
gcaggccgagucuuggauu

SEQ ID NO: 1169883 - RNA, 19 nt, Homo sapiens
  misc_RNA (1)...(19): siRNA sense strand
gacgggagcagguccuaug

SEQ ID NO: 1169884 - RNA, 19 nt, Homo sapiens
  misc_RNA (1)...(19): siRNA sense strand
gccgagucuuggauuagaa

SEQ ID NO: 1169885 - RNA, 19 nt, Homo sapiens
  misc_RNA (1)...(19): siRNA sense strand
acacgagggaagucaguaa

SEQ ID NO: 1169886 - RNA, 19 nt, Homo sapiens
  misc_RNA (1)...(19): siRNA sense strand
gaccacauuuuaucaggaa

SEQ ID NO: 1169887 - RNA, 19 nt, Homo sapiens
  misc_RNA (1)...(19): siRNA sense strand
augcagagagccaguguuu

SEQ ID NO: 1169888 - RNA, 19 nt, Homo sapiens
  misc_RNA (1)...(19): siRNA sense strand
ugaucgcgcucuccaacau

SEQ ID NO: 1169889 - RNA, 19 nt, Homo sapiens
  misc_RNA (1)...(19): siRNA sense strand
ccuuggauggugucaguua

SEQ ID NO: 1169890 - RNA, 19 nt, Homo sapiens
  misc_RNA (1)...(19): siRNA sense strand
ggacgacgggacuuacgau

SEQ ID NO: 1169891 - RNA, 19 nt, Homo sapiens
  misc_RNA (1)...(19): siRNA sense strand
gaauacgagacguucuaug

SEQ ID NO: 1169892 - RNA, 19 nt, Homo sapiens
  misc_RNA (1)...(19): siRNA sense strand
cacagacaauggccagauc

SEQ ID NO: 1169893 - RNA, 19 nt, Homo sapiens
  misc_RNA (1)...(19): siRNA sense strand
cgaacgccacccucaauca

SEQ ID NO: 1169894 - RNA, 19 nt, Homo sapiens
  misc_RNA (1)...(19): siRNA sense strand
cugaacauuugaucuccaa

SEQ ID NO: 1169895 - RNA, 19 nt, Homo sapiens
  misc_RNA (1)...(19): siRNA sense strand
cagcugccuuccaacuuca

SEQ ID NO: 1169896 - RNA, 19 nt, Homo sapiens
  misc_RNA (1)...(19): siRNA sense strand
gagaugcuuuuccacuuug

SEQ ID NO: 1169897 - RNA, 19 nt, Homo sapiens
  misc_RNA (1)...(19): siRNA sense strand
ggggagcucuuuccugugu

SEQ ID NO: 1169898 - RNA, 19 nt, Homo sapiens
  misc_RNA (1)...(19): siRNA sense strand
cagagagccaguguuugua

SEQ ID NO: 1169899 - RNA, 19 nt, Homo sapiens
  misc_RNA (1)...(19): siRNA sense strand
caacgcaagcaucggacuu

SEQ ID NO: 1169900 - RNA, 19 nt, Homo sapiens
  misc_RNA (1)...(19): siRNA sense strand
gggcugaacauuugaucuc

SEQ ID NO: 1169901 - RNA, 19 nt, Homo sapiens
  misc_RNA (1)...(19): siRNA sense strand
caacuucaccccuguuuuc

SEQ ID NO: 1169902 - RNA, 19 nt, Homo sapiens
  misc_RNA (1)...(19): siRNA sense strand
ggaaugacaagcccuaccu

SEQ ID NO: 1169903 - RNA, 19 nt, Homo sapiens
  misc_RNA (1)...(19): siRNA sense strand
auaaccagacugugacauu

SEQ ID NO: 1169904 - RNA, 19 nt, Homo sapiens
  misc_RNA (1)...(19): siRNA sense strand
aauacgagacguucuaugg

SEQ ID NO: 1169905 - RNA, 19 nt, Homo sapiens
  misc_RNA (1)...(19): siRNA sense strand
agacagcugcaccgacuug

SEQ ID NO: 1169906 - RNA, 19 nt, Homo sapiens
  misc_RNA (1)...(19): siRNA sense strand
uccguguccugcuggauaa

SEQ ID NO: 1169907 - RNA, 19 nt, Homo sapiens
  misc_RNA (1)...(19): siRNA sense strand
ggaggaccguggacuucac

SEQ ID NO: 1169908 - RNA, 19 nt, Homo sapiens
  misc_RNA (1)...(19): siRNA sense strand
cugggacgaugcugacuuc

SEQ ID NO: 1169909 - RNA, 19 nt, Homo sapiens
  misc_RNA (1)...(19): siRNA sense strand
ccacgugggcugugcuaca

SEQ ID NO: 1169910 - RNA, 19 nt, Homo sapiens
  misc_RNA (1)...(19): siRNA sense strand
aggaauacgagacguucua

SEQ ID NO: 1169911 - RNA, 19 nt, Homo sapiens
  misc_RNA (1)...(19): siRNA sense strand
uuggagcucuuugagaaug

SEQ ID NO: 1169912 - RNA, 19 nt, Homo sapiens
  misc_RNA (1)...(19): siRNA sense strand
gaacuucccuuaagaguca

SEQ ID NO: 1169913 - RNA, 19 nt, Homo sapiens
  misc_RNA (1)...(19): siRNA sense strand
ggaaugaccuggcagauca

SEQ ID NO: 1169914 - RNA, 19 nt, Homo sapiens
  misc_RNA (1)...(19): siRNA sense strand
ccaagucgcuggagccauu

SEQ ID NO: 1169915 - RNA, 19 nt, Homo sapiens
  misc_RNA (1)...(19): siRNA sense strand
gggaacaacuucaguccaa

SEQ ID NO: 1169916 - RNA, 19 nt, Homo sapiens
  misc_RNA (1)...(19): siRNA sense strand
ugagcacgcugaaggcuua

SEQ ID NO: 1169917 - RNA, 19 nt, Homo sapiens
  misc_RNA (1)...(19): siRNA sense strand
caaccuagaacuucccuua

SEQ ID NO: 1169918 - RNA, 19 nt, Homo sapiens
  misc_RNA (1)...(19): siRNA sense strand
gcagagagccaguguuugu

SEQ ID NO: 1169919 - RNA, 19 nt, Homo sapiens
  misc_RNA (1)...(19): siRNA sense strand
uaaccagacugugacauuu

SEQ ID NO: 1169920 - RNA, 19 nt, Homo sapiens
  misc_RNA (1)...(19): siRNA sense strand
gcaagaagugccaagauug

SEQ ID NO: 1169921 - RNA, 19 nt, Homo sapiens
  misc_RNA (1)...(19): siRNA sense strand
gggccagguucuccuauuu

SEQ ID NO: 1169922 - RNA, 19 nt, Homo sapiens
  misc_RNA (1)...(19): siRNA sense strand
gaaaacagcccacugaugu

SEQ ID NO: 1169923 - RNA, 19 nt, Homo sapiens
  misc_RNA (1)...(19): siRNA sense strand
ggacuguggucugccauug

SEQ ID NO: 1169924 - RNA, 19 nt, Homo sapiens
  misc_RNA (1)...(19): siRNA sense strand
gggaagaaaggcccaacua

SEQ ID NO: 1169925 - RNA, 19 nt, Homo sapiens
  misc_RNA (1)...(19): siRNA sense strand
gaacuccuccuuccugcuu

SEQ ID NO: 1169926 - RNA, 19 nt, Homo sapiens
  misc_RNA (1)...(19): siRNA sense strand
uccaagggcugcaguucua

SEQ ID NO: 1169927 - RNA, 19 nt, Homo sapiens
  misc_RNA (1)...(19): siRNA sense strand
ccuagaacuucccuuaaga

SEQ ID NO: 1169928 - RNA, 19 nt, Homo sapiens
  misc_RNA (1)...(19): siRNA sense strand
caaugguggucgugugauu

SEQ ID NO: 1169929 - RNA, 19 nt, Homo sapiens
  misc_RNA (1)...(19): siRNA sense strand
ggagagguaucgcccugau

SEQ ID NO: 1169930 - RNA, 19 nt, Homo sapiens
  misc_RNA (1)...(19): siRNA sense strand
gugaauuacugcuacaauc

SEQ ID NO: 1169931 - RNA, 19 nt, Homo sapiens
  misc_RNA (1)...(19): siRNA sense strand
ggagaugcuuuuccacuuu

SEQ ID NO: 1169932 - RNA, 19 nt, Homo sapiens
  misc_RNA (1)...(19): siRNA sense strand
ccuaugcccuguuucucua

SEQ ID NO: 1169933 - RNA, 19 nt, Homo sapiens
  misc_RNA (1)...(19): siRNA sense strand
ggagugaggagcccaggaa

SEQ ID NO: 1169934 - RNA, 19 nt, Homo sapiens
  misc_RNA (1)...(19): siRNA sense strand
gccauucacucuggagauu

SEQ ID NO: 1169935 - RNA, 19 nt, Homo sapiens
  misc_RNA (1)...(19): siRNA sense strand
gcagggacgacgggacuua

SEQ ID NO: 1169936 - RNA, 19 nt, Homo sapiens
  misc_RNA (1)...(19): siRNA sense strand
gggcagaccacgcugauuc

SEQ ID NO: 1169937 - RNA, 19 nt, Homo sapiens
  misc_RNA (1)...(19): siRNA sense strand
gggaagacgugcgcgaugu

SEQ ID NO: 1169938 - RNA, 19 nt, Homo sapiens
  misc_RNA (1)...(19): siRNA sense strand
gcaagcaucggacuucaca

SEQ ID NO: 1169939 - RNA, 19 nt, Homo sapiens
  misc_RNA (1)...(19): siRNA sense strand
gaauuacugcuacaaucaa

SEQ ID NO: 1169940 - RNA, 19 nt, Homo sapiens
  misc_RNA (1)...(19): siRNA sense strand
ugacaagcccuaccucugu

SEQ ID NO: 1169941 - RNA, 19 nt, Homo sapiens
  misc_RNA (1)...(19): siRNA sense strand
gcuccugggcugaacauuu

SEQ ID NO: 1169942 - RNA, 19 nt, Homo sapiens
  misc_RNA (1)...(19): siRNA sense strand
ccagcugccuuccaacuuc

SEQ ID NO: 1169943 - RNA, 19 nt, Homo sapiens
  misc_RNA (1)...(19): siRNA sense strand
gcaccgacuuggagcucuu

SEQ ID NO: 1169944 - RNA, 19 nt, Homo sapiens
  misc_RNA (1)...(19): siRNA sense strand
gaaacucgacgcguucuuc

SEQ ID NO: 1169945 - RNA, 19 nt, Homo sapiens
  misc_RNA (1)...(19): siRNA sense strand
cagaugcgauggcuacaag

SEQ ID NO: 1169946 - RNA, 19 nt, Homo sapiens
  misc_RNA (1)...(19): siRNA sense strand
caaggccacugcuacaucu

SEQ ID NO: 1169947 - RNA, 19 nt, Homo sapiens
  misc_RNA (1)...(19): siRNA sense strand
gccaguguuuguacaauca

SEQ ID NO: 1169948 - RNA, 19 nt, Homo sapiens
  misc_RNA (1)...(19): siRNA sense strand
agcaagaagugccaagauu

SEQ ID NO: 1169949 - RNA, 19 nt, Homo sapiens
  misc_RNA (1)...(19): siRNA sense strand
ggauuagaaagaucacaaa

SEQ ID NO: 1169950 - RNA, 19 nt, Homo sapiens
  misc_RNA (1)...(19): siRNA sense strand
gggcuacugugaccaugga

SEQ ID NO: 1169951 - RNA, 19 nt, Homo sapiens
  misc_RNA (1)...(19): siRNA sense strand
acuuggagcucuuugagaa

SEQ ID NO: 1169952 - RNA, 19 nt, Homo sapiens
  misc_RNA (1)...(19): siRNA sense strand
ggaagaaaggcccaacuac

SEQ ID NO: 1169953 - RNA, 19 nt, Homo sapiens
  misc_RNA (1)...(19): siRNA sense strand
ggucaaugcccacgccuau

SEQ ID NO: 1169954 - RNA, 19 nt, Homo sapiens
  misc_RNA (1)...(19): siRNA sense strand
gaucaucuucccagaguca

SEQ ID NO: 1169955 - RNA, 19 nt, Homo sapiens
  misc_RNA (1)...(19): siRNA sense strand
caaguggaacgaaucgauu

SEQ ID NO: 1169956 - RNA, 19 nt, Homo sapiens
  misc_RNA (1)...(19): siRNA sense strand
ggagcucuuuccuguguca

SEQ ID NO: 1169957 - RNA, 19 nt, Homo sapiens
  misc_RNA (1)...(19): siRNA sense strand
cuccugggcugaacauuug

SEQ ID NO: 1169958 - RNA, 19 nt, Homo sapiens
  misc_RNA (1)...(19): siRNA sense strand
caggccgagucuuggauua

SEQ ID NO: 1169959 - RNA, 19 nt, Homo sapiens
  misc_RNA (1)...(19): siRNA sense strand
gcucuuuccugugucagaa

SEQ ID NO: 1169960 - RNA, 19 nt, Homo sapiens
  misc_RNA (1)...(19): siRNA sense strand
ucauugacuuccugaacaa

SEQ ID NO: 1169961 - RNA, 19 nt, Homo sapiens
  misc_RNA (1)...(19): siRNA sense strand
guucuucggcaucuucuuu

SEQ ID NO: 1169962 - RNA, 19 nt, Homo sapiens
  misc_RNA (1)...(19): siRNA sense strand
gaagacgugcgcgauguga

SEQ ID NO: 1169963 - RNA, 19 nt, Homo sapiens
  misc_RNA (1)...(19): siRNA sense strand
ggccgagucuuggauuaga

SEQ ID NO: 1169964 - RNA, 19 nt, Homo sapiens
  misc_RNA (1)...(19): siRNA sense strand
ugaauuacugcuacaauca

SEQ ID NO: 1169965 - RNA, 19 nt, Homo sapiens
  misc_RNA (1)...(19): siRNA sense strand
aguccugcccugugaauua

SEQ ID NO: 1169966 - RNA, 19 nt, Homo sapiens
  misc_RNA (1)...(19): siRNA sense strand
gcagcguccuuggcaguug

SEQ ID NO: 1169967 - RNA, 19 nt, Homo sapiens
  misc_RNA (1)...(19): siRNA sense strand
gugagcaccugagcaugaa

SEQ ID NO: 1169968 - RNA, 19 nt, Homo sapiens
  misc_RNA (1)...(19): siRNA sense strand
gagccaguguuuguacaau

SEQ ID NO: 1169969 - RNA, 19 nt, Homo sapiens
  misc_RNA (1)...(19): siRNA sense strand
gagagccaguguuuguaca

SEQ ID NO: 1169970 - RNA, 19 nt, Homo sapiens
  misc_RNA (1)...(19): siRNA sense strand
ggaauacgagacguucuau

SEQ ID NO: 1169971 - RNA, 19 nt, Homo sapiens
  misc_RNA (1)...(19): siRNA sense strand
cgacgggacuuacgauucc

SEQ ID NO: 1169972 - RNA, 19 nt, Homo sapiens
  misc_RNA (1)...(19): siRNA sense strand
gaacauuugaucuccaacu

SEQ ID NO: 1169973 - RNA, 19 nt, Homo sapiens
  misc_RNA (1)...(19): siRNA sense strand
guccaacugucaaccuaga

SEQ ID NO: 1169974 - RNA, 19 nt, Homo sapiens
  misc_RNA (1)...(19): siRNA sense strand
gcuccucucuccgugauuc

SEQ ID NO: 1169975 - RNA, 19 nt, Homo sapiens
  misc_RNA (1)...(19): siRNA sense strand
acgccacccucaaucagua

SEQ ID NO: 1169976 - RNA, 19 nt, Homo sapiens
  misc_RNA (1)...(19): siRNA sense strand
ccacaucaccaccuuggau

SEQ ID NO: 1169977 - RNA, 19 nt, Homo sapiens
  misc_RNA (1)...(19): siRNA sense strand
gaacaacuucaguccaacu

SEQ ID NO: 1169978 - RNA, 19 nt, Homo sapiens
  misc_RNA (1)...(19): siRNA sense strand
ucaguuacaccuucaaugg

SEQ ID NO: 1169979 - RNA, 19 nt, Homo sapiens
  misc_RNA (1)...(19): siRNA sense strand
aaccaguccugcccuguga

SEQ ID NO: 1169980 - RNA, 19 nt, Homo sapiens
  misc_RNA (1)...(19): siRNA sense strand
caacgggacaggccuccuu

SEQ ID NO: 1169981 - RNA, 19 nt, Homo sapiens
  misc_RNA (1)...(19): siRNA sense strand
gguggaggcguucuuauac

SEQ ID NO: 1169982 - RNA, 19 nt, Homo sapiens
  misc_RNA (1)...(19): siRNA sense strand
ggugguggaggcguucuua

SEQ ID NO: 1169983 - RNA, 19 nt, Homo sapiens
  misc_RNA (1)...(19): siRNA sense strand
gaacgccacccucaaucag

SEQ ID NO: 1169984 - RNA, 19 nt, Homo sapiens
  misc_RNA (1)...(19): siRNA sense strand
gcaggccgagucuuggauu

SEQ ID NO: 1169985 - RNA, 19 nt, Homo sapiens
  misc_RNA (1)...(19): siRNA sense strand
ugguggaggcguucuuaua

SEQ ID NO: 1169986 - RNA, 19 nt, Homo sapiens
  misc_RNA (1)...(19): siRNA sense strand
gacgggagcagguccuaug

SEQ ID NO: 1169987 - RNA, 19 nt, Homo sapiens
  misc_RNA (1)...(19): siRNA sense strand
gccgagucuuggauuagaa

SEQ ID NO: 1169988 - RNA, 19 nt, Homo sapiens
  misc_RNA (1)...(19): siRNA sense strand
acacgagggaagucaguaa

SEQ ID NO: 1169989 - RNA, 19 nt, Homo sapiens
  misc_RNA (1)...(19): siRNA sense strand
ugugagcaccugagcauga

SEQ ID NO: 1169990 - RNA, 19 nt, Homo sapiens
  misc_RNA (1)...(19): siRNA sense strand
ggaagacgugcgcgaugug

SEQ ID NO: 1169991 - RNA, 19 nt, Homo sapiens
  misc_RNA (1)...(19): siRNA sense strand
ggacgacgggacuuacgau

SEQ ID NO: 1169992 - RNA, 19 nt, Homo sapiens
  misc_RNA (1)...(19): siRNA sense strand
ccaaguggaacgaaucgau

SEQ ID NO: 1169993 - RNA, 19 nt, Homo sapiens
  misc_RNA (1)...(19): siRNA sense strand
gaccacauuuuaucaggaa

SEQ ID NO: 1169994 - RNA, 19 nt, Homo sapiens
  misc_RNA (1)...(19): siRNA sense strand
augcagagagccaguguuu

SEQ ID NO: 1169995 - RNA, 19 nt, Homo sapiens
  misc_RNA (1)...(19): siRNA sense strand
gaauacgagacguucuaug

SEQ ID NO: 1169996 - RNA, 19 nt, Homo sapiens
  misc_RNA (1)...(19): siRNA sense strand
ugaucgcgcucuccaacau

SEQ ID NO: 1169997 - RNA, 19 nt, Homo sapiens
  misc_RNA (1)...(19): siRNA sense strand
ccuuggauggugucaguua

SEQ ID NO: 1169998 - RNA, 19 nt, Homo sapiens
  misc_RNA (1)...(19): siRNA sense strand
cagcugccuuccaacuuca

SEQ ID NO: 1169999 - RNA, 19 nt, Homo sapiens
  misc_RNA (1)...(19): siRNA sense strand
gcagcuguguguccuucuc

SEQ ID NO: 1170000 - RNA, 19 nt, Homo sapiens
  misc_RNA (1)...(19): siRNA sense strand
cacagacaauggccagauc

SEQ ID NO: 1170001 - RNA, 19 nt, Homo sapiens
  misc_RNA (1)...(19): siRNA sense strand
gcacgcugaaggcuuacuu

SEQ ID NO: 1170002 - RNA, 19 nt, Homo sapiens
  misc_RNA (1)...(19): siRNA sense strand
cgaacgccacccucaauca

SEQ ID NO: 1170003 - RNA, 19 nt, Homo sapiens
  misc_RNA (1)...(19): siRNA sense strand
cugaacauuugaucuccaa

SEQ ID NO: 1170004 - RNA, 19 nt, Homo sapiens
  misc_RNA (1)...(19): siRNA sense strand
gagaugcuuuuccacuuug

SEQ ID NO: 1170005 - RNA, 19 nt, Homo sapiens
  misc_RNA (1)...(19): siRNA sense strand
ggggagcucuuuccugugu

SEQ ID NO: 1170006 - RNA, 19 nt, Homo sapiens
  misc_RNA (1)...(19): siRNA sense strand
cagagagccaguguuugua

SEQ ID NO: 1170007 - RNA, 19 nt, Homo sapiens
  misc_RNA (1)...(19): siRNA sense strand
caacgcaagcaucggacuu

SEQ ID NO: 1170008 - RNA, 19 nt, Homo sapiens
  misc_RNA (1)...(19): siRNA sense strand
gggcugaacauuugaucuc

SEQ ID NO: 1170009 - RNA, 19 nt, Homo sapiens
  misc_RNA (1)...(19): siRNA sense strand
caacuucaccccuguuuuc

SEQ ID NO: 1170010 - RNA, 19 nt, Homo sapiens
  misc_RNA (1)...(19): siRNA sense strand
auaaccagacugugacauu

SEQ ID NO: 1170011 - RNA, 19 nt, Homo sapiens
  misc_RNA (1)...(19): siRNA sense strand
gugaggagcccaggaacga

SEQ ID NO: 1170012 - RNA, 19 nt, Homo sapiens
  misc_RNA (1)...(19): siRNA sense strand
gaacuucccuuaagaguca

SEQ ID NO: 1170013 - RNA, 19 nt, Homo sapiens
  misc_RNA (1)...(19): siRNA sense strand
ggaaugaccuggcagauca

SEQ ID NO: 1170014 - RNA, 19 nt, Homo sapiens
  misc_RNA (1)...(19): siRNA sense strand
ccaagucgcuggagccauu

SEQ ID NO: 1170015 - RNA, 19 nt, Homo sapiens
  misc_RNA (1)...(19): siRNA sense strand
gggaacaacuucaguccaa

SEQ ID NO: 1170016 - RNA, 19 nt, Homo sapiens
  misc_RNA (1)...(19): siRNA sense strand
ugagcacgcugaaggcuua

SEQ ID NO: 1170017 - RNA, 19 nt, Homo sapiens
  misc_RNA (1)...(19): siRNA sense strand
caaccuagaacuucccuua

SEQ ID NO: 1170018 - RNA, 19 nt, Homo sapiens
  misc_RNA (1)...(19): siRNA sense strand
gcagagagccaguguuugu

SEQ ID NO: 1170019 - RNA, 19 nt, Homo sapiens
  misc_RNA (1)...(19): siRNA sense strand
uaaccagacugugacauuu

SEQ ID NO: 1170020 - RNA, 19 nt, Homo sapiens
  misc_RNA (1)...(19): siRNA sense strand
gcaagaagugccaagauug

SEQ ID NO: 1170021 - RNA, 19 nt, Homo sapiens
  misc_RNA (1)...(19): siRNA sense strand
gggccagguucuccuauuu

SEQ ID NO: 1170022 - RNA, 19 nt, Homo sapiens
  misc_RNA (1)...(19): siRNA sense strand
gaaaacagcccacugaugu

SEQ ID NO: 1170023 - RNA, 19 nt, Homo sapiens
  misc_RNA (1)...(19): siRNA sense strand
ggacuguggucugccauug

SEQ ID NO: 1170024 - RNA, 19 nt, Homo sapiens
  misc_RNA (1)...(19): siRNA sense strand
gggaagaaaggcccaacua

SEQ ID NO: 1170025 - RNA, 19 nt, Homo sapiens
  misc_RNA (1)...(19): siRNA sense strand
gaacuccuccuuccugcuu

SEQ ID NO: 1170026 - RNA, 19 nt, Homo sapiens
  misc_RNA (1)...(19): siRNA sense strand
uccaagggcugcaguucua

SEQ ID NO: 1170027 - RNA, 19 nt, Homo sapiens
  misc_RNA (1)...(19): siRNA sense strand
ccuagaacuucccuuaaga

SEQ ID NO: 1170028 - RNA, 19 nt, Homo sapiens
  misc_RNA (1)...(19): siRNA sense strand
caaugguggucgugugauu

SEQ ID NO: 1170029 - RNA, 19 nt, Homo sapiens
  misc_RNA (1)...(19): siRNA sense strand
ggagagguaucgcccugau

SEQ ID NO: 1170030 - RNA, 19 nt, Homo sapiens
  misc_RNA (1)...(19): siRNA sense strand
gugaauuacugcuacaauc

SEQ ID NO: 1170031 - RNA, 19 nt, Homo sapiens
  misc_RNA (1)...(19): siRNA sense strand
ggagaugcuuuuccacuuu

SEQ ID NO: 1170032 - RNA, 19 nt, Homo sapiens
  misc_RNA (1)...(19): siRNA sense strand
ccuaugcccuguuucucua

SEQ ID NO: 1170033 - RNA, 19 nt, Homo sapiens
  misc_RNA (1)...(19): siRNA sense strand
ggagugaggagcccaggaa

SEQ ID NO: 1170034 - RNA, 19 nt, Homo sapiens
  misc_RNA (1)...(19): siRNA sense strand
gccauucacucuggagauu

SEQ ID NO: 1170035 - RNA, 19 nt, Homo sapiens
  misc_RNA (1)...(19): siRNA sense strand
gcagggacgacgggacuua

SEQ ID NO: 1170036 - RNA, 19 nt, Homo sapiens
  misc_RNA (1)...(19): siRNA sense strand
gggcagaccacgcugauuc

SEQ ID NO: 1170037 - RNA, 19 nt, Homo sapiens
  misc_RNA (1)...(19): siRNA sense strand
gggaagacgugcgcgaugu

SEQ ID NO: 1170038 - RNA, 19 nt, Homo sapiens
  misc_RNA (1)...(19): siRNA sense strand
gcaagcaucggacuucaca

SEQ ID NO: 1170039 - RNA, 19 nt, Homo sapiens
  misc_RNA (1)...(19): siRNA sense strand
gaauuacugcuacaaucaa

SEQ ID NO: 1170040 - RNA, 19 nt, Homo sapiens
  misc_RNA (1)...(19): siRNA sense strand
ugacaagcccuaccucugu

SEQ ID NO: 1170041 - RNA, 19 nt, Homo sapiens
  misc_RNA (1)...(19): siRNA sense strand
gcuccugggcugaacauuu

SEQ ID NO: 1170042 - RNA, 19 nt, Homo sapiens
  misc_RNA (1)...(19): siRNA sense strand
ccagcugccuuccaacuuc

SEQ ID NO: 1170043 - RNA, 19 nt, Homo sapiens
  misc_RNA (1)...(19): siRNA sense strand
gcaccgacuuggagcucuu

SEQ ID NO: 1170044 - RNA, 19 nt, Homo sapiens
  misc_RNA (1)...(19): siRNA sense strand
gaaacucgacgcguucuuc

SEQ ID NO: 1170045 - RNA, 19 nt, Homo sapiens
  misc_RNA (1)...(19): siRNA sense strand
cagaugcgauggcuacaag

SEQ ID NO: 1170046 - RNA, 19 nt, Homo sapiens
  misc_RNA (1)...(19): siRNA sense strand
caaggccacugcuacaucu

SEQ ID NO: 1170047 - RNA, 19 nt, Homo sapiens
  misc_RNA (1)...(19): siRNA sense strand
gccaguguuuguacaauca

SEQ ID NO: 1170048 - RNA, 19 nt, Homo sapiens
  misc_RNA (1)...(19): siRNA sense strand
agcaagaagugccaagauu

SEQ ID NO: 1170049 - RNA, 19 nt, Homo sapiens
  misc_RNA (1)...(19): siRNA sense strand
ggauuagaaagaucacaaa

SEQ ID NO: 1170050 - RNA, 19 nt, Homo sapiens
  misc_RNA (1)...(19): siRNA sense strand
gggcuacugugaccaugga

SEQ ID NO: 1170051 - RNA, 19 nt, Homo sapiens
  misc_RNA (1)...(19): siRNA sense strand
acuuggagcucuuugagaa

SEQ ID NO: 1170052 - RNA, 19 nt, Homo sapiens
  misc_RNA (1)...(19): siRNA sense strand
ggaagaaaggcccaacuac

SEQ ID NO: 1170053 - RNA, 19 nt, Homo sapiens
  misc_RNA (1)...(19): siRNA sense strand
ggucaaugcccacgccuau

SEQ ID NO: 1170054 - RNA, 19 nt, Homo sapiens
  misc_RNA (1)...(19): siRNA sense strand
gaucaucuucccagaguca

SEQ ID NO: 1170055 - RNA, 19 nt, Homo sapiens
  misc_RNA (1)...(19): siRNA sense strand
caaguggaacgaaucgauu

SEQ ID NO: 1170056 - RNA, 19 nt, Homo sapiens
  misc_RNA (1)...(19): siRNA sense strand
ggagcucuuuccuguguca

SEQ ID NO: 1170057 - RNA, 19 nt, Homo sapiens
  misc_RNA (1)...(19): siRNA sense strand
cuccugggcugaacauuug

SEQ ID NO: 1170058 - RNA, 19 nt, Homo sapiens
  misc_RNA (1)...(19): siRNA sense strand
caggccgagucuuggauua

SEQ ID NO: 1170059 - RNA, 19 nt, Homo sapiens
  misc_RNA (1)...(19): siRNA sense strand
gcucuuuccugugucagaa

SEQ ID NO: 1170060 - RNA, 19 nt, Homo sapiens
  misc_RNA (1)...(19): siRNA sense strand
ucauugacuuccugaacaa

SEQ ID NO: 1170061 - RNA, 19 nt, Homo sapiens
  misc_RNA (1)...(19): siRNA sense strand
guucuucggcaucuucuuu

SEQ ID NO: 1170062 - RNA, 19 nt, Homo sapiens
  misc_RNA (1)...(19): siRNA sense strand
gaagacgugcgcgauguga

SEQ ID NO: 1170063 - RNA, 19 nt, Homo sapiens
  misc_RNA (1)...(19): siRNA sense strand
ggccgagucuuggauuaga

SEQ ID NO: 1170064 - RNA, 19 nt, Homo sapiens
  misc_RNA (1)...(19): siRNA sense strand
ugaauuacugcuacaauca

SEQ ID NO: 1170065 - RNA, 19 nt, Homo sapiens
  misc_RNA (1)...(19): siRNA sense strand
aguccugcccugugaauua

SEQ ID NO: 1170066 - RNA, 19 nt, Homo sapiens
  misc_RNA (1)...(19): siRNA sense strand
gcagcguccuuggcaguug

SEQ ID NO: 1170067 - RNA, 19 nt, Homo sapiens
  misc_RNA (1)...(19): siRNA sense strand
gugagcaccugagcaugaa

SEQ ID NO: 1170068 - RNA, 19 nt, Homo sapiens
  misc_RNA (1)...(19): siRNA sense strand
gagccaguguuuguacaau

SEQ ID NO: 1170069 - RNA, 19 nt, Homo sapiens
  misc_RNA (1)...(19): siRNA sense strand
gagagccaguguuuguaca

SEQ ID NO: 1170070 - RNA, 19 nt, Homo sapiens
  misc_RNA (1)...(19): siRNA sense strand
ggaauacgagacguucuau

SEQ ID NO: 1170071 - RNA, 19 nt, Homo sapiens
  misc_RNA (1)...(19): siRNA sense strand
cgacgggacuuacgauucc

SEQ ID NO: 1170072 - RNA, 19 nt, Homo sapiens
  misc_RNA (1)...(19): siRNA sense strand
gaacauuugaucuccaacu

SEQ ID NO: 1170073 - RNA, 19 nt, Homo sapiens
  misc_RNA (1)...(19): siRNA sense strand
guccaacugucaaccuaga

SEQ ID NO: 1170074 - RNA, 19 nt, Homo sapiens
  misc_RNA (1)...(19): siRNA sense strand
gcuccucucuccgugauuc

SEQ ID NO: 1170075 - RNA, 19 nt, Homo sapiens
  misc_RNA (1)...(19): siRNA sense strand
acgccacccucaaucagua

SEQ ID NO: 1170076 - RNA, 19 nt, Homo sapiens
  misc_RNA (1)...(19): siRNA sense strand
ccacaucaccaccuuggau

SEQ ID NO: 1170077 - RNA, 19 nt, Homo sapiens
  misc_RNA (1)...(19): siRNA sense strand
gaacaacuucaguccaacu

SEQ ID NO: 1170078 - RNA, 19 nt, Homo sapiens
  misc_RNA (1)...(19): siRNA sense strand
ucaguuacaccuucaaugg

SEQ ID NO: 1170079 - RNA, 19 nt, Homo sapiens
  misc_RNA (1)...(19): siRNA sense strand
aaccaguccugcccuguga

SEQ ID NO: 1170080 - RNA, 19 nt, Homo sapiens
  misc_RNA (1)...(19): siRNA sense strand
caacgggacaggccuccuu

SEQ ID NO: 1170081 - RNA, 19 nt, Homo sapiens
  misc_RNA (1)...(19): siRNA sense strand
gguggaggcguucuuauac

SEQ ID NO: 1170082 - RNA, 19 nt, Homo sapiens
  misc_RNA (1)...(19): siRNA sense strand
ggugguggaggcguucuua

SEQ ID NO: 1170083 - RNA, 19 nt, Homo sapiens
  misc_RNA (1)...(19): siRNA sense strand
gaacgccacccucaaucag

SEQ ID NO: 1170084 - RNA, 19 nt, Homo sapiens
  misc_RNA (1)...(19): siRNA sense strand
gcaggccgagucuuggauu

SEQ ID NO: 1170085 - RNA, 19 nt, Homo sapiens
  misc_RNA (1)...(19): siRNA sense strand
ugguggaggcguucuuaua

SEQ ID NO: 1170086 - RNA, 19 nt, Homo sapiens
  misc_RNA (1)...(19): siRNA sense strand
gacgggagcagguccuaug

SEQ ID NO: 1170087 - RNA, 19 nt, Homo sapiens
  misc_RNA (1)...(19): siRNA sense strand
gccgagucuuggauuagaa

SEQ ID NO: 1170088 - RNA, 19 nt, Homo sapiens
  misc_RNA (1)...(19): siRNA sense strand
acacgagggaagucaguaa

SEQ ID NO: 1170089 - RNA, 19 nt, Homo sapiens
  misc_RNA (1)...(19): siRNA sense strand
ugugagcaccugagcauga

SEQ ID NO: 1170090 - RNA, 19 nt, Homo sapiens
  misc_RNA (1)...(19): siRNA sense strand
ggaagacgugcgcgaugug

SEQ ID NO: 1170091 - RNA, 19 nt, Homo sapiens
  misc_RNA (1)...(19): siRNA sense strand
ggacgacgggacuuacgau

SEQ ID NO: 1170092 - RNA, 19 nt, Homo sapiens
  misc_RNA (1)...(19): siRNA sense strand
ccaaguggaacgaaucgau

SEQ ID NO: 1170093 - RNA, 19 nt, Homo sapiens
  misc_RNA (1)...(19): siRNA sense strand
gaccacauuuuaucaggaa

SEQ ID NO: 1170094 - RNA, 19 nt, Homo sapiens
  misc_RNA (1)...(19): siRNA sense strand
augcagagagccaguguuu

SEQ ID NO: 1170095 - RNA, 19 nt, Homo sapiens
  misc_RNA (1)...(19): siRNA sense strand
gaauacgagacguucuaug

SEQ ID NO: 1170096 - RNA, 19 nt, Homo sapiens
  misc_RNA (1)...(19): siRNA sense strand
ugaucgcgcucuccaacau

SEQ ID NO: 1170097 - RNA, 19 nt, Homo sapiens
  misc_RNA (1)...(19): siRNA sense strand
ccuuggauggugucaguua

SEQ ID NO: 1170098 - RNA, 19 nt, Homo sapiens
  misc_RNA (1)...(19): siRNA sense strand
cagcugccuuccaacuuca

SEQ ID NO: 1170099 - RNA, 19 nt, Homo sapiens
  misc_RNA (1)...(19): siRNA sense strand
gcagcuguguguccuucuc

SEQ ID NO: 1170100 - RNA, 19 nt, Homo sapiens
  misc_RNA (1)...(19): siRNA sense strand
cacagacaauggccagauc

SEQ ID NO: 1170101 - RNA, 19 nt, Homo sapiens
  misc_RNA (1)...(19): siRNA sense strand
gcacgcugaaggcuuacuu

SEQ ID NO: 1170102 - RNA, 19 nt, Homo sapiens
  misc_RNA (1)...(19): siRNA sense strand
cgaacgccacccucaauca

SEQ ID NO: 1170103 - RNA, 19 nt, Homo sapiens
  misc_RNA (1)...(19): siRNA sense strand
cugaacauuugaucuccaa

SEQ ID NO: 1170104 - RNA, 19 nt, Homo sapiens
  misc_RNA (1)...(19): siRNA sense strand
gagaugcuuuuccacuuug

SEQ ID NO: 1170105 - RNA, 19 nt, Homo sapiens
  misc_RNA (1)...(19): siRNA sense strand
ggggagcucuuuccugugu

SEQ ID NO: 1170106 - RNA, 19 nt, Homo sapiens
  misc_RNA (1)...(19): siRNA sense strand
cagagagccaguguuugua

SEQ ID NO: 1170107 - RNA, 19 nt, Homo sapiens
  misc_RNA (1)...(19): siRNA sense strand
caacgcaagcaucggacuu

SEQ ID NO: 1170108 - RNA, 19 nt, Homo sapiens
  misc_RNA (1)...(19): siRNA sense strand
gggcugaacauuugaucuc

SEQ ID NO: 1170109 - RNA, 19 nt, Homo sapiens
  misc_RNA (1)...(19): siRNA sense strand
caacuucaccccuguuuuc

SEQ ID NO: 1170110 - RNA, 19 nt, Homo sapiens
  misc_RNA (1)...(19): siRNA sense strand
auaaccagacugugacauu

SEQ ID NO: 1170111 - RNA, 19 nt, Homo sapiens
  misc_RNA (1)...(19): siRNA sense strand
gugaggagcccaggaacga

SEQ ID NO: 1170112 - RNA, 19 nt, Homo sapiens
  misc_RNA (1)...(19): siRNA sense strand
gaacuucccuuaagaguca

SEQ ID NO: 1170113 - RNA, 19 nt, Homo sapiens
  misc_RNA (1)...(19): siRNA sense strand
ggaaugaccuggcagauca

SEQ ID NO: 1170114 - RNA, 19 nt, Homo sapiens
  misc_RNA (1)...(19): siRNA sense strand
ccaagucgcuggagccauu

SEQ ID NO: 1170115 - RNA, 19 nt, Homo sapiens
  misc_RNA (1)...(19): siRNA sense strand
gggaacaacuucaguccaa

SEQ ID NO: 1170116 - RNA, 19 nt, Homo sapiens
  misc_RNA (1)...(19): siRNA sense strand
ugagcacgcugaaggcuua

SEQ ID NO: 1170117 - RNA, 19 nt, Homo sapiens
  misc_RNA (1)...(19): siRNA sense strand
caaccuagaacuucccuua

SEQ ID NO: 1170118 - RNA, 19 nt, Homo sapiens
  misc_RNA (1)...(19): siRNA sense strand
gcagagagccaguguuugu

SEQ ID NO: 1170119 - RNA, 19 nt, Homo sapiens
  misc_RNA (1)...(19): siRNA sense strand
uaaccagacugugacauuu

SEQ ID NO: 1170120 - RNA, 19 nt, Homo sapiens
  misc_RNA (1)...(19): siRNA sense strand
gcaagaagugccaagauug

SEQ ID NO: 1170121 - RNA, 19 nt, Homo sapiens
  misc_RNA (1)...(19): siRNA sense strand
gggccagguucuccuauuu

SEQ ID NO: 1170122 - RNA, 19 nt, Homo sapiens
  misc_RNA (1)...(19): siRNA sense strand
gaaaacagcccacugaugu

SEQ ID NO: 1170123 - RNA, 19 nt, Homo sapiens
  misc_RNA (1)...(19): siRNA sense strand
ggacuguggucugccauug

SEQ ID NO: 1170124 - RNA, 19 nt, Homo sapiens
  misc_RNA (1)...(19): siRNA sense strand
gggaagaaaggcccaacua

SEQ ID NO: 1170125 - RNA, 19 nt, Homo sapiens
  misc_RNA (1)...(19): siRNA sense strand
gaacuccuccuuccugcuu

SEQ ID NO: 1170126 - RNA, 19 nt, Homo sapiens
  misc_RNA (1)...(19): siRNA sense strand
uccaagggcugcaguucua

SEQ ID NO: 1170127 - RNA, 19 nt, Homo sapiens
  misc_RNA (1)...(19): siRNA sense strand
ccuagaacuucccuuaaga

SEQ ID NO: 1170128 - RNA, 19 nt, Homo sapiens
  misc_RNA (1)...(19): siRNA sense strand
caaugguggucgugugauu

SEQ ID NO: 1170129 - RNA, 19 nt, Homo sapiens
  misc_RNA (1)...(19): siRNA sense strand
ggagagguaucgcccugau

SEQ ID NO: 1170130 - RNA, 19 nt, Homo sapiens
  misc_RNA (1)...(19): siRNA sense strand
gugaauuacugcuacaauc

SEQ ID NO: 1170131 - RNA, 19 nt, Homo sapiens
  misc_RNA (1)...(19): siRNA sense strand
ggagaugcuuuuccacuuu

SEQ ID NO: 1170132 - RNA, 19 nt, Homo sapiens
  misc_RNA (1)...(19): siRNA sense strand
ccuaugcccuguuucucua

SEQ ID NO: 1170133 - RNA, 19 nt, Homo sapiens
  misc_RNA (1)...(19): siRNA sense strand
ggagugaggagcccaggaa

SEQ ID NO: 1170134 - RNA, 19 nt, Homo sapiens
  misc_RNA (1)...(19): siRNA sense strand
gccauucacucuggagauu

SEQ ID NO: 1170135 - RNA, 19 nt, Homo sapiens
  misc_RNA (1)...(19): siRNA sense strand
gcagggacgacgggacuua

SEQ ID NO: 1170136 - RNA, 19 nt, Homo sapiens
  misc_RNA (1)...(19): siRNA sense strand
gggcagaccacgcugauuc

SEQ ID NO: 1170137 - RNA, 19 nt, Homo sapiens
  misc_RNA (1)...(19): siRNA sense strand
gggaagacgugcgcgaugu

SEQ ID NO: 1170138 - RNA, 19 nt, Homo sapiens
  misc_RNA (1)...(19): siRNA sense strand
gcaagcaucggacuucaca

SEQ ID NO: 1170139 - RNA, 19 nt, Homo sapiens
  misc_RNA (1)...(19): siRNA sense strand
gaauuacugcuacaaucaa

SEQ ID NO: 1170140 - RNA, 19 nt, Homo sapiens
  misc_RNA (1)...(19): siRNA sense strand
ugacaagcccuaccucugu

SEQ ID NO: 1170141 - RNA, 19 nt, Homo sapiens
  misc_RNA (1)...(19): siRNA sense strand
gcuccugggcugaacauuu

SEQ ID NO: 1170142 - RNA, 19 nt, Homo sapiens
  misc_RNA (1)...(19): siRNA sense strand
ccagcugccuuccaacuuc

SEQ ID NO: 1170143 - RNA, 19 nt, Homo sapiens
  misc_RNA (1)...(19): siRNA sense strand
gcaccgacuuggagcucuu

SEQ ID NO: 1170144 - RNA, 19 nt, Homo sapiens
  misc_RNA (1)...(19): siRNA sense strand
gaaacucgacgcguucuuc

SEQ ID NO: 1170145 - RNA, 19 nt, Homo sapiens
  misc_RNA (1)...(19): siRNA sense strand
cagaugcgauggcuacaag

SEQ ID NO: 1170146 - RNA, 19 nt, Homo sapiens
  misc_RNA (1)...(19): siRNA sense strand
caaggccacugcuacaucu

SEQ ID NO: 1170147 - RNA, 19 nt, Homo sapiens
  misc_RNA (1)...(19): siRNA sense strand
gccaguguuuguacaauca

SEQ ID NO: 1170148 - RNA, 19 nt, Homo sapiens
  misc_RNA (1)...(19): siRNA sense strand
agcaagaagugccaagauu

SEQ ID NO: 1170149 - RNA, 19 nt, Homo sapiens
  misc_RNA (1)...(19): siRNA sense strand
ggauuagaaagaucacaaa

SEQ ID NO: 1170150 - RNA, 19 nt, Homo sapiens
  misc_RNA (1)...(19): siRNA sense strand
gggcuacugugaccaugga

SEQ ID NO: 1170151 - RNA, 19 nt, Homo sapiens
  misc_RNA (1)...(19): siRNA sense strand
acuuggagcucuuugagaa

SEQ ID NO: 1170152 - RNA, 19 nt, Homo sapiens
  misc_RNA (1)...(19): siRNA sense strand
ggaagaaaggcccaacuac

SEQ ID NO: 1170153 - RNA, 19 nt, Homo sapiens
  misc_RNA (1)...(19): siRNA sense strand
ggucaaugcccacgccuau

SEQ ID NO: 1170154 - RNA, 19 nt, Homo sapiens
  misc_RNA (1)...(19): siRNA sense strand
gaucaucuucccagaguca

SEQ ID NO: 1170155 - RNA, 19 nt, Homo sapiens
  misc_RNA (1)...(19): siRNA sense strand
caaguggaacgaaucgauu

SEQ ID NO: 1170156 - RNA, 19 nt, Homo sapiens
  misc_RNA (1)...(19): siRNA sense strand
ggagcucuuuccuguguca

SEQ ID NO: 1170157 - RNA, 19 nt, Homo sapiens
  misc_RNA (1)...(19): siRNA sense strand
cuccugggcugaacauuug

SEQ ID NO: 1170158 - RNA, 19 nt, Homo sapiens
  misc_RNA (1)...(19): siRNA sense strand
caggccgagucuuggauua

SEQ ID NO: 1170159 - RNA, 19 nt, Homo sapiens
  misc_RNA (1)...(19): siRNA sense strand
gcucuuuccugugucagaa

SEQ ID NO: 1170160 - RNA, 19 nt, Homo sapiens
  misc_RNA (1)...(19): siRNA sense strand
ucauugacuuccugaacaa

SEQ ID NO: 1170161 - RNA, 19 nt, Homo sapiens
  misc_RNA (1)...(19): siRNA sense strand
guucuucggcaucuucuuu

SEQ ID NO: 1170162 - RNA, 19 nt, Homo sapiens
  misc_RNA (1)...(19): siRNA sense strand
gaagacgugcgcgauguga

SEQ ID NO: 1170163 - RNA, 19 nt, Homo sapiens
  misc_RNA (1)...(19): siRNA sense strand
ggccgagucuuggauuaga

SEQ ID NO: 1170164 - RNA, 19 nt, Homo sapiens
  misc_RNA (1)...(19): siRNA sense strand
ugaauuacugcuacaauca

SEQ ID NO: 1170165 - RNA, 19 nt, Homo sapiens
  misc_RNA (1)...(19): siRNA sense strand
aguccugcccugugaauua

SEQ ID NO: 1170166 - RNA, 19 nt, Homo sapiens
  misc_RNA (1)...(19): siRNA sense strand
gcagcguccuuggcaguug

SEQ ID NO: 1170167 - RNA, 19 nt, Homo sapiens
  misc_RNA (1)...(19): siRNA sense strand
gugagcaccugagcaugaa

SEQ ID NO: 1170168 - RNA, 19 nt, Homo sapiens
  misc_RNA (1)...(19): siRNA sense strand
gagccaguguuuguacaau

SEQ ID NO: 1170169 - RNA, 19 nt, Homo sapiens
  misc_RNA (1)...(19): siRNA sense strand
gagagccaguguuuguaca

SEQ ID NO: 1170170 - RNA, 19 nt, Homo sapiens
  misc_RNA (1)...(19): siRNA sense strand
ggaauacgagacguucuau

SEQ ID NO: 1170171 - RNA, 19 nt, Homo sapiens
  misc_RNA (1)...(19): siRNA sense strand
cgacgggacuuacgauucc

SEQ ID NO: 1170172 - RNA, 19 nt, Homo sapiens
  misc_RNA (1)...(19): siRNA sense strand
gaacauuugaucuccaacu

SEQ ID NO: 1170173 - RNA, 19 nt, Homo sapiens
  misc_RNA (1)...(19): siRNA sense strand
guccaacugucaaccuaga

SEQ ID NO: 1170174 - RNA, 19 nt, Homo sapiens
  misc_RNA (1)...(19): siRNA sense strand
gcuccucucuccgugauuc

SEQ ID NO: 1170175 - RNA, 19 nt, Homo sapiens
  misc_RNA (1)...(19): siRNA sense strand
acgccacccucaaucagua

SEQ ID NO: 1170176 - RNA, 19 nt, Homo sapiens
  misc_RNA (1)...(19): siRNA sense strand
ccacaucaccaccuuggau

SEQ ID NO: 1170177 - RNA, 19 nt, Homo sapiens
  misc_RNA (1)...(19): siRNA sense strand
gaacaacuucaguccaacu

SEQ ID NO: 1170178 - RNA, 19 nt, Homo sapiens
  misc_RNA (1)...(19): siRNA sense strand
ucaguuacaccuucaaugg

SEQ ID NO: 1170179 - RNA, 19 nt, Homo sapiens
  misc_RNA (1)...(19): siRNA sense strand
aaccaguccugcccuguga

SEQ ID NO: 1170180 - RNA, 19 nt, Homo sapiens
  misc_RNA (1)...(19): siRNA sense strand
caacgggacaggccuccuu

SEQ ID NO: 1170181 - RNA, 19 nt, Homo sapiens
  misc_RNA (1)...(19): siRNA sense strand
gguggaggcguucuuauac

SEQ ID NO: 1170182 - RNA, 19 nt, Homo sapiens
  misc_RNA (1)...(19): siRNA sense strand
ggugguggaggcguucuua

SEQ ID NO: 1170183 - RNA, 19 nt, Homo sapiens
  misc_RNA (1)...(19): siRNA sense strand
gaacgccacccucaaucag

SEQ ID NO: 1170184 - RNA, 19 nt, Homo sapiens
  misc_RNA (1)...(19): siRNA sense strand
gcaggccgagucuuggauu

SEQ ID NO: 1170185 - RNA, 19 nt, Homo sapiens
  misc_RNA (1)...(19): siRNA sense strand
ugguggaggcguucuuaua

SEQ ID NO: 1170186 - RNA, 19 nt, Homo sapiens
  misc_RNA (1)...(19): siRNA sense strand
gacgggagcagguccuaug

SEQ ID NO: 1170187 - RNA, 19 nt, Homo sapiens
  misc_RNA (1)...(19): siRNA sense strand
gccgagucuuggauuagaa

SEQ ID NO: 1170188 - RNA, 19 nt, Homo sapiens
  misc_RNA (1)...(19): siRNA sense strand
acacgagggaagucaguaa

SEQ ID NO: 1170189 - RNA, 19 nt, Homo sapiens
  misc_RNA (1)...(19): siRNA sense strand
ugugagcaccugagcauga

SEQ ID NO: 1170190 - RNA, 19 nt, Homo sapiens
  misc_RNA (1)...(19): siRNA sense strand
ggaagacgugcgcgaugug

SEQ ID NO: 1170191 - RNA, 19 nt, Homo sapiens
  misc_RNA (1)...(19): siRNA sense strand
ggacgacgggacuuacgau

SEQ ID NO: 1170192 - RNA, 19 nt, Homo sapiens
  misc_RNA (1)...(19): siRNA sense strand
ccaaguggaacgaaucgau

SEQ ID NO: 1170193 - RNA, 19 nt, Homo sapiens
  misc_RNA (1)...(19): siRNA sense strand
gaccacauuuuaucaggaa

SEQ ID NO: 1170194 - RNA, 19 nt, Homo sapiens
  misc_RNA (1)...(19): siRNA sense strand
augcagagagccaguguuu

SEQ ID NO: 1170195 - RNA, 19 nt, Homo sapiens
  misc_RNA (1)...(19): siRNA sense strand
gaauacgagacguucuaug

SEQ ID NO: 1170196 - RNA, 19 nt, Homo sapiens
  misc_RNA (1)...(19): siRNA sense strand
ugaucgcgcucuccaacau

SEQ ID NO: 1170197 - RNA, 19 nt, Homo sapiens
  misc_RNA (1)...(19): siRNA sense strand
ccuuggauggugucaguua

SEQ ID NO: 1170198 - RNA, 19 nt, Homo sapiens
  misc_RNA (1)...(19): siRNA sense strand
cagcugccuuccaacuuca

SEQ ID NO: 1170199 - RNA, 19 nt, Homo sapiens
  misc_RNA (1)...(19): siRNA sense strand
gcagcuguguguccuucuc

SEQ ID NO: 1170200 - RNA, 19 nt, Homo sapiens
  misc_RNA (1)...(19): siRNA sense strand
cacagacaauggccagauc

SEQ ID NO: 1170201 - RNA, 19 nt, Homo sapiens
  misc_RNA (1)...(19): siRNA sense strand
gcacgcugaaggcuuacuu

SEQ ID NO: 1170202 - RNA, 19 nt, Homo sapiens
  misc_RNA (1)...(19): siRNA sense strand
cgaacgccacccucaauca

SEQ ID NO: 1170203 - RNA, 19 nt, Homo sapiens
  misc_RNA (1)...(19): siRNA sense strand
cugaacauuugaucuccaa

SEQ ID NO: 1170204 - RNA, 19 nt, Homo sapiens
  misc_RNA (1)...(19): siRNA sense strand
gagaugcuuuuccacuuug

SEQ ID NO: 1170205 - RNA, 19 nt, Homo sapiens
  misc_RNA (1)...(19): siRNA sense strand
ggggagcucuuuccugugu

SEQ ID NO: 1170206 - RNA, 19 nt, Homo sapiens
  misc_RNA (1)...(19): siRNA sense strand
cagagagccaguguuugua

SEQ ID NO: 1170207 - RNA, 19 nt, Homo sapiens
  misc_RNA (1)...(19): siRNA sense strand
caacgcaagcaucggacuu

SEQ ID NO: 1170208 - RNA, 19 nt, Homo sapiens
  misc_RNA (1)...(19): siRNA sense strand
gggcugaacauuugaucuc

SEQ ID NO: 1170209 - RNA, 19 nt, Homo sapiens
  misc_RNA (1)...(19): siRNA sense strand
caacuucaccccuguuuuc

SEQ ID NO: 1170210 - RNA, 19 nt, Homo sapiens
  misc_RNA (1)...(19): siRNA sense strand
auaaccagacugugacauu

SEQ ID NO: 1170211 - RNA, 19 nt, Homo sapiens
  misc_RNA (1)...(19): siRNA sense strand
gugaggagcccaggaacga

SEQ ID NO: 1170212 - RNA, 19 nt, Homo sapiens
  misc_RNA (1)...(19): siRNA sense strand
ccuaugcccuguuucucua

SEQ ID NO: 1170213 - RNA, 19 nt, Homo sapiens
  misc_RNA (1)...(19): siRNA sense strand
ggauuagaaagaucacaaa

SEQ ID NO: 1170214 - RNA, 19 nt, Homo sapiens
  misc_RNA (1)...(19): siRNA sense strand
ggucaaugcccacgccuau

SEQ ID NO: 1170215 - RNA, 19 nt, Homo sapiens
  misc_RNA (1)...(19): siRNA sense strand
gaucaucuucccagaguca

SEQ ID NO: 1170216 - RNA, 19 nt, Homo sapiens
  misc_RNA (1)...(19): siRNA sense strand
caggccgagucuuggauua

SEQ ID NO: 1170217 - RNA, 19 nt, Homo sapiens
  misc_RNA (1)...(19): siRNA sense strand
ggccgagucuuggauuaga

SEQ ID NO: 1170218 - RNA, 19 nt, Homo sapiens
  misc_RNA (1)...(19): siRNA sense strand
ggaauacgagacguucuau

SEQ ID NO: 1170219 - RNA, 19 nt, Homo sapiens
  misc_RNA (1)...(19): siRNA sense strand
gcuccucucuccgugauuc

SEQ ID NO: 1170220 - RNA, 19 nt, Homo sapiens
  misc_RNA (1)...(19): siRNA sense strand
gcaggccgagucuuggauu

SEQ ID NO: 1170221 - RNA, 19 nt, Homo sapiens
  misc_RNA (1)...(19): siRNA sense strand
gacgggagcagguccuaug

SEQ ID NO: 1170222 - RNA, 19 nt, Homo sapiens
  misc_RNA (1)...(19): siRNA sense strand
gccgagucuuggauuagaa

SEQ ID NO: 1170223 - RNA, 19 nt, Homo sapiens
  misc_RNA (1)...(19): siRNA sense strand
gaccacauuuuaucaggaa

SEQ ID NO: 1170224 - RNA, 19 nt, Homo sapiens
  misc_RNA (1)...(19): siRNA sense strand
gaauacgagacguucuaug

SEQ ID NO: 1170225 - RNA, 19 nt, Homo sapiens
  misc_RNA (1)...(19): siRNA sense strand
cacagacaauggccagauc

SEQ ID NO: 1170226 - RNA, 19 nt, Homo sapiens
  misc_RNA (1)...(19): siRNA sense strand
ggaggaccguggacuucac

SEQ ID NO: 1170227 - RNA, 19 nt, Homo sapiens
  misc_RNA (1)...(19): siRNA sense strand
aauacgagacguucuaugg

SEQ ID NO: 1170228 - RNA, 19 nt, Homo sapiens
  misc_RNA (1)...(19): siRNA sense strand
cugggacgaugcugacuuc

SEQ ID NO: 1170229 - RNA, 19 nt, Homo sapiens
  misc_RNA (1)...(19): siRNA sense strand
aggaauacgagacguucua

SEQ ID NO: 1170230 - RNA, 19 nt, Homo sapiens
  misc_RNA (1)...(19): siRNA sense strand
ggaaugaccuggcagauca

SEQ ID NO: 1170231 - RNA, 19 nt, Homo sapiens
  misc_RNA (1)...(19): siRNA sense strand
ccaagucgcuggagccauu

SEQ ID NO: 1170232 - RNA, 19 nt, Homo sapiens
  misc_RNA (1)...(19): siRNA sense strand
gcagagagccaguguuugu

SEQ ID NO: 1170233 - RNA, 19 nt, Homo sapiens
  misc_RNA (1)...(19): siRNA sense strand
uaaccagacugugacauuu

SEQ ID NO: 1170234 - RNA, 19 nt, Homo sapiens
  misc_RNA (1)...(19): siRNA sense strand
gcaagaagugccaagauug

SEQ ID NO: 1170235 - RNA, 19 nt, Homo sapiens
  misc_RNA (1)...(19): siRNA sense strand
gaaaacagcccacugaugu

SEQ ID NO: 1170236 - RNA, 19 nt, Homo sapiens
  misc_RNA (1)...(19): siRNA sense strand
ggacuguggucugccauug

SEQ ID NO: 1170237 - RNA, 19 nt, Homo sapiens
  misc_RNA (1)...(19): siRNA sense strand
gggaagaaaggcccaacua

SEQ ID NO: 1170238 - RNA, 19 nt, Homo sapiens
  misc_RNA (1)...(19): siRNA sense strand
gaacuccuccuuccugcuu

SEQ ID NO: 1170239 - RNA, 19 nt, Homo sapiens
  misc_RNA (1)...(19): siRNA sense strand
uccaagggcugcaguucua

SEQ ID NO: 1170240 - RNA, 19 nt, Homo sapiens
  misc_RNA (1)...(19): siRNA sense strand
caaugguggucgugugauu

SEQ ID NO: 1170241 - RNA, 19 nt, Homo sapiens
  misc_RNA (1)...(19): siRNA sense strand
ggagagguaucgcccugau

SEQ ID NO: 1170242 - RNA, 19 nt, Homo sapiens
  misc_RNA (1)...(19): siRNA sense strand
ggagaugcuuuuccacuuu

SEQ ID NO: 1170243 - RNA, 19 nt, Homo sapiens
  misc_RNA (1)...(19): siRNA sense strand
ccuaugcccuguuucucua

SEQ ID NO: 1170244 - RNA, 19 nt, Homo sapiens
  misc_RNA (1)...(19): siRNA sense strand
gccauucacucuggagauu

SEQ ID NO: 1170245 - RNA, 19 nt, Homo sapiens
  misc_RNA (1)...(19): siRNA sense strand
gcagggacgacgggacuua

SEQ ID NO: 1170246 - RNA, 19 nt, Homo sapiens
  misc_RNA (1)...(19): siRNA sense strand
gggcagaccacgcugauuc

SEQ ID NO: 1170247 - RNA, 19 nt, Homo sapiens
  misc_RNA (1)...(19): siRNA sense strand
gcaagcaucggacuucaca

SEQ ID NO: 1170248 - RNA, 19 nt, Homo sapiens
  misc_RNA (1)...(19): siRNA sense strand
ugacaagcccuaccucugu

SEQ ID NO: 1170249 - RNA, 19 nt, Homo sapiens
  misc_RNA (1)...(19): siRNA sense strand
gcuccugggcugaacauuu

SEQ ID NO: 1170250 - RNA, 19 nt, Homo sapiens
  misc_RNA (1)...(19): siRNA sense strand
ccagcugccuuccaacuuc

SEQ ID NO: 1170251 - RNA, 19 nt, Homo sapiens
  misc_RNA (1)...(19): siRNA sense strand
gcaccgacuuggagcucuu

SEQ ID NO: 1170252 - RNA, 19 nt, Homo sapiens
  misc_RNA (1)...(19): siRNA sense strand
gccaguguuuguacaauca

SEQ ID NO: 1170253 - RNA, 19 nt, Homo sapiens
  misc_RNA (1)...(19): siRNA sense strand
agcaagaagugccaagauu

SEQ ID NO: 1170254 - RNA, 19 nt, Homo sapiens
  misc_RNA (1)...(19): siRNA sense strand
ggauuagaaagaucacaaa

SEQ ID NO: 1170255 - RNA, 19 nt, Homo sapiens
  misc_RNA (1)...(19): siRNA sense strand
acuuggagcucuuugagaa

SEQ ID NO: 1170256 - RNA, 19 nt, Homo sapiens
  misc_RNA (1)...(19): siRNA sense strand
ggaagaaaggcccaacuac

SEQ ID NO: 1170257 - RNA, 19 nt, Homo sapiens
  misc_RNA (1)...(19): siRNA sense strand
ggucaaugcccacgccuau

SEQ ID NO: 1170258 - RNA, 19 nt, Homo sapiens
  misc_RNA (1)...(19): siRNA sense strand
gaucaucuucccagaguca

SEQ ID NO: 1170259 - RNA, 19 nt, Homo sapiens
  misc_RNA (1)...(19): siRNA sense strand
ggagcucuuuccuguguca

SEQ ID NO: 1170260 - RNA, 19 nt, Homo sapiens
  misc_RNA (1)...(19): siRNA sense strand
cuccugggcugaacauuug

SEQ ID NO: 1170261 - RNA, 19 nt, Homo sapiens
  misc_RNA (1)...(19): siRNA sense strand
caggccgagucuuggauua

SEQ ID NO: 1170262 - RNA, 19 nt, Homo sapiens
  misc_RNA (1)...(19): siRNA sense strand
gcucuuuccugugucagaa

SEQ ID NO: 1170263 - RNA, 19 nt, Homo sapiens
  misc_RNA (1)...(19): siRNA sense strand
ggccgagucuuggauuaga

SEQ ID NO: 1170264 - RNA, 19 nt, Homo sapiens
  misc_RNA (1)...(19): siRNA sense strand
gcagcguccuuggcaguug

SEQ ID NO: 1170265 - RNA, 19 nt, Homo sapiens
  misc_RNA (1)...(19): siRNA sense strand
gagccaguguuuguacaau

SEQ ID NO: 1170266 - RNA, 19 nt, Homo sapiens
  misc_RNA (1)...(19): siRNA sense strand
gagagccaguguuuguaca

SEQ ID NO: 1170267 - RNA, 19 nt, Homo sapiens
  misc_RNA (1)...(19): siRNA sense strand
ggaauacgagacguucuau

SEQ ID NO: 1170268 - RNA, 19 nt, Homo sapiens
  misc_RNA (1)...(19): siRNA sense strand
cgacgggacuuacgauucc

SEQ ID NO: 1170269 - RNA, 19 nt, Homo sapiens
  misc_RNA (1)...(19): siRNA sense strand
gaacauuugaucuccaacu

SEQ ID NO: 1170270 - RNA, 19 nt, Homo sapiens
  misc_RNA (1)...(19): siRNA sense strand
gcuccucucuccgugauuc

SEQ ID NO: 1170271 - RNA, 19 nt, Homo sapiens
  misc_RNA (1)...(19): siRNA sense strand
acgccacccucaaucagua

SEQ ID NO: 1170272 - RNA, 19 nt, Homo sapiens
  misc_RNA (1)...(19): siRNA sense strand
ccacaucaccaccuuggau

SEQ ID NO: 1170273 - RNA, 19 nt, Homo sapiens
  misc_RNA (1)...(19): siRNA sense strand
ucaguuacaccuucaaugg

SEQ ID NO: 1170274 - RNA, 19 nt, Homo sapiens
  misc_RNA (1)...(19): siRNA sense strand
aaccaguccugcccuguga

SEQ ID NO: 1170275 - RNA, 19 nt, Homo sapiens
  misc_RNA (1)...(19): siRNA sense strand
caacgggacaggccuccuu

SEQ ID NO: 1170276 - RNA, 19 nt, Homo sapiens
  misc_RNA (1)...(19): siRNA sense strand
gaacgccacccucaaucag

SEQ ID NO: 1170277 - RNA, 19 nt, Homo sapiens
  misc_RNA (1)...(19): siRNA sense strand
gcaggccgagucuuggauu

SEQ ID NO: 1170278 - RNA, 19 nt, Homo sapiens
  misc_RNA (1)...(19): siRNA sense strand
gacgggagcagguccuaug

SEQ ID NO: 1170279 - RNA, 19 nt, Homo sapiens
  misc_RNA (1)...(19): siRNA sense strand
gccgagucuuggauuagaa

SEQ ID NO: 1170280 - RNA, 19 nt, Homo sapiens
  misc_RNA (1)...(19): siRNA sense strand
acacgagggaagucaguaa

SEQ ID NO: 1170281 - RNA, 19 nt, Homo sapiens
  misc_RNA (1)...(19): siRNA sense strand
gaccacauuuuaucaggaa

SEQ ID NO: 1170282 - RNA, 19 nt, Homo sapiens
  misc_RNA (1)...(19): siRNA sense strand
augcagagagccaguguuu

SEQ ID NO: 1170283 - RNA, 19 nt, Homo sapiens
  misc_RNA (1)...(19): siRNA sense strand
ugaucgcgcucuccaacau

SEQ ID NO: 1170284 - RNA, 19 nt, Homo sapiens
  misc_RNA (1)...(19): siRNA sense strand
ccuuggauggugucaguua

SEQ ID NO: 1170285 - RNA, 19 nt, Homo sapiens
  misc_RNA (1)...(19): siRNA sense strand
ggacgacgggacuuacgau

SEQ ID NO: 1170286 - RNA, 19 nt, Homo sapiens
  misc_RNA (1)...(19): siRNA sense strand
gaauacgagacguucuaug

SEQ ID NO: 1170287 - RNA, 19 nt, Homo sapiens
  misc_RNA (1)...(19): siRNA sense strand
cacagacaauggccagauc

SEQ ID NO: 1170288 - RNA, 19 nt, Homo sapiens
  misc_RNA (1)...(19): siRNA sense strand
cgaacgccacccucaauca

SEQ ID NO: 1170289 - RNA, 19 nt, Homo sapiens
  misc_RNA (1)...(19): siRNA sense strand
cugaacauuugaucuccaa

SEQ ID NO: 1170290 - RNA, 19 nt, Homo sapiens
  misc_RNA (1)...(19): siRNA sense strand
cagcugccuuccaacuuca

SEQ ID NO: 1170291 - RNA, 19 nt, Homo sapiens
  misc_RNA (1)...(19): siRNA sense strand
gagaugcuuuuccacuuug

SEQ ID NO: 1170292 - RNA, 19 nt, Homo sapiens
  misc_RNA (1)...(19): siRNA sense strand
ggggagcucuuuccugugu

SEQ ID NO: 1170293 - RNA, 19 nt, Homo sapiens
  misc_RNA (1)...(19): siRNA sense strand
cagagagccaguguuugua

SEQ ID NO: 1170294 - RNA, 19 nt, Homo sapiens
  misc_RNA (1)...(19): siRNA sense strand
caacgcaagcaucggacuu

SEQ ID NO: 1170295 - RNA, 19 nt, Homo sapiens
  misc_RNA (1)...(19): siRNA sense strand
gggcugaacauuugaucuc

SEQ ID NO: 1170296 - RNA, 19 nt, Homo sapiens
  misc_RNA (1)...(19): siRNA sense strand
caacuucaccccuguuuuc

SEQ ID NO: 1170297 - RNA, 19 nt, Homo sapiens
  misc_RNA (1)...(19): siRNA sense strand
ggaaugacaagcccuaccu

SEQ ID NO: 1170298 - RNA, 19 nt, Homo sapiens
  misc_RNA (1)...(19): siRNA sense strand
auaaccagacugugacauu

SEQ ID NO: 1170299 - RNA, 19 nt, Homo sapiens
  misc_RNA (1)...(19): siRNA sense strand
aauacgagacguucuaugg

SEQ ID NO: 1170300 - RNA, 19 nt, Homo sapiens
  misc_RNA (1)...(19): siRNA sense strand
agacagcugcaccgacuug

SEQ ID NO: 1170301 - RNA, 19 nt, Homo sapiens
  misc_RNA (1)...(19): siRNA sense strand
uccguguccugcuggauaa

SEQ ID NO: 1170302 - RNA, 19 nt, Homo sapiens
  misc_RNA (1)...(19): siRNA sense strand
ggaggaccguggacuucac

SEQ ID NO: 1170303 - RNA, 19 nt, Homo sapiens
  misc_RNA (1)...(19): siRNA sense strand
cugggacgaugcugacuuc

SEQ ID NO: 1170304 - RNA, 19 nt, Homo sapiens
  misc_RNA (1)...(19): siRNA sense strand
ccacgugggcugugcuaca

SEQ ID NO: 1170305 - RNA, 19 nt, Homo sapiens
  misc_RNA (1)...(19): siRNA sense strand
aggaauacgagacguucua

SEQ ID NO: 1170306 - RNA, 19 nt, Homo sapiens
  misc_RNA (1)...(19): siRNA sense strand
uuggagcucuuugagaaug

SEQ ID NO: 1170307 - RNA, 19 nt, Homo sapiens
  misc_RNA (1)...(19): siRNA sense strand
gauaaacccuggcauauuu

SEQ ID NO: 1170308 - RNA, 19 nt, Homo sapiens
  misc_RNA (1)...(19): siRNA sense strand
ggagaaggcuugcaagaag

SEQ ID NO: 1170309 - RNA, 19 nt, Homo sapiens
  misc_RNA (1)...(19): siRNA sense strand
caaggaagauacagaaauc

SEQ ID NO: 1170310 - RNA, 19 nt, Homo sapiens
  misc_RNA (1)...(19): siRNA sense strand
aaacgacgaucauuaacaa

SEQ ID NO: 1170311 - RNA, 19 nt, Homo sapiens
  misc_RNA (1)...(19): siRNA sense strand
aaagaaggccaagcuauua

SEQ ID NO: 1170312 - RNA, 19 nt, Homo sapiens
  misc_RNA (1)...(19): siRNA sense strand
gaagaaggagguucauguu

SEQ ID NO: 1170313 - RNA, 19 nt, Homo sapiens
  misc_RNA (1)...(19): siRNA sense strand
uaaagaaggccaagcuauu

SEQ ID NO: 1170314 - RNA, 19 nt, Homo sapiens
  misc_RNA (1)...(19): siRNA sense strand
gaaggccaagcuauuauuu

SEQ ID NO: 1170315 - RNA, 19 nt, Homo sapiens
  misc_RNA (1)...(19): siRNA sense strand
aaagauaaacccuggcaua

SEQ ID NO: 1170316 - RNA, 19 nt, Homo sapiens
  misc_RNA (1)...(19): siRNA sense strand
gcaaaacgacgaucauuaa

SEQ ID NO: 1170317 - RNA, 19 nt, Homo sapiens
  misc_RNA (1)...(19): siRNA sense strand
gaaugguuguggccaaaga

SEQ ID NO: 1170318 - RNA, 19 nt, Homo sapiens
  misc_RNA (1)...(19): siRNA sense strand
aagaagaacucgauacucu

SEQ ID NO: 1170319 - RNA, 19 nt, Homo sapiens
  misc_RNA (1)...(19): siRNA sense strand
acaauaggauucagcauag

SEQ ID NO: 1170320 - RNA, 19 nt, Homo sapiens
  misc_RNA (1)...(19): siRNA sense strand
caaaauauccuuccaacaa

SEQ ID NO: 1170321 - RNA, 19 nt, Homo sapiens
  misc_RNA (1)...(19): siRNA sense strand
ucgauacucuucugaauca

SEQ ID NO: 1170322 - RNA, 19 nt, Homo sapiens
  misc_RNA (1)...(19): siRNA sense strand
ucauccaguuugucauuua

SEQ ID NO: 1170323 - RNA, 19 nt, Homo sapiens
  misc_RNA (1)...(19): siRNA sense strand
cagcauagagaaauucaaa

SEQ ID NO: 1170324 - RNA, 19 nt, Homo sapiens
  misc_RNA (1)...(19): siRNA sense strand
uagacuggcuucaagauca

SEQ ID NO: 1170325 - RNA, 19 nt, Homo sapiens
  misc_RNA (1)...(19): siRNA sense strand
gaaggagguucauguuuug

SEQ ID NO: 1170326 - RNA, 19 nt, Homo sapiens
  misc_RNA (1)...(19): siRNA sense strand
agugauagauuaagaaugg

SEQ ID NO: 1170327 - RNA, 19 nt, Homo sapiens
  misc_RNA (1)...(19): siRNA sense strand
gcauagagaaauucaaauc

SEQ ID NO: 1170328 - RNA, 19 nt, Homo sapiens
  misc_RNA (1)...(19): siRNA sense strand
gauauuaaacaccgucgaa

SEQ ID NO: 1170329 - RNA, 19 nt, Homo sapiens
  misc_RNA (1)...(19): siRNA sense strand
caugucaggucaaggaaga

SEQ ID NO: 1170330 - RNA, 19 nt, Homo sapiens
  misc_RNA (1)...(19): siRNA sense strand
ugucucaguugcuguguuu

SEQ ID NO: 1170331 - RNA, 19 nt, Homo sapiens
  misc_RNA (1)...(19): siRNA sense strand
ggucaaggaagauacagaa

SEQ ID NO: 1170332 - RNA, 19 nt, Homo sapiens
  misc_RNA (1)...(19): siRNA sense strand
ucugggaacacuauuauaa

SEQ ID NO: 1170333 - RNA, 19 nt, Homo sapiens
  misc_RNA (1)...(19): siRNA sense strand
gauucagcauagagaaauu

SEQ ID NO: 1170334 - RNA, 19 nt, Homo sapiens
  misc_RNA (1)...(19): siRNA sense strand
agaaggagguucauguuuu

SEQ ID NO: 1170335 - RNA, 19 nt, Homo sapiens
  misc_RNA (1)...(19): siRNA sense strand
gaacucgauacucuucuga

SEQ ID NO: 1170336 - RNA, 19 nt, Homo sapiens
  misc_RNA (1)...(19): siRNA sense strand
gguguagacuggcuucaag

SEQ ID NO: 1170337 - RNA, 19 nt, Homo sapiens
  misc_RNA (1)...(19): siRNA sense strand
aacaauaggauucagcaua

SEQ ID NO: 1170338 - RNA, 19 nt, Homo sapiens
  misc_RNA (1)...(19): siRNA sense strand
caaagaagaacucgauacu

SEQ ID NO: 1170339 - RNA, 19 nt, Homo sapiens
  misc_RNA (1)...(19): siRNA sense strand
gacgaucauuaacaaacuu

SEQ ID NO: 1170340 - RNA, 19 nt, Homo sapiens
  misc_RNA (1)...(19): siRNA sense strand
gauccagacugugaagaca

SEQ ID NO: 1170341 - RNA, 19 nt, Homo sapiens
  misc_RNA (1)...(19): siRNA sense strand
gggaacacuauuauaaaga

SEQ ID NO: 1170342 - RNA, 19 nt, Homo sapiens
  misc_RNA (1)...(19): siRNA sense strand
guuuagagaacaucaaaga

SEQ ID NO: 1170343 - RNA, 19 nt, Homo sapiens
  misc_RNA (1)...(19): siRNA sense strand
gccuugggcuagauaauag

SEQ ID NO: 1170344 - RNA, 19 nt, Homo sapiens
  misc_RNA (1)...(19): siRNA sense strand
gcuagauaauaguggcaaa

SEQ ID NO: 1170345 - RNA, 19 nt, Homo sapiens
  misc_RNA (1)...(19): siRNA sense strand
gcauauuugugcuagugau

SEQ ID NO: 1170346 - RNA, 19 nt, Homo sapiens
  misc_RNA (1)...(19): siRNA sense strand
ccgucgaauuccaaucuua

SEQ ID NO: 1170347 - RNA, 19 nt, Homo sapiens
  misc_RNA (1)...(19): siRNA sense strand
cgacgaucauuaacaaacu

SEQ ID NO: 1170348 - RNA, 19 nt, Homo sapiens
  misc_RNA (1)...(19): siRNA sense strand
ccaaucuuauucuuugcaa

SEQ ID NO: 1170349 - RNA, 19 nt, Homo sapiens
  misc_RNA (1)...(19): siRNA sense strand
ugggaacacuauuauaaag

SEQ ID NO: 1170350 - RNA, 19 nt, Homo sapiens
  misc_RNA (1)...(19): siRNA sense strand
caauaggauucagcauaga

SEQ ID NO: 1170351 - RNA, 19 nt, Homo sapiens
  misc_RNA (1)...(19): siRNA sense strand
ucaaggaagauacagaaau

SEQ ID NO: 1170352 - RNA, 19 nt, Homo sapiens
  misc_RNA (1)...(19): siRNA sense strand
ucaaaugcucaaucucaaa

SEQ ID NO: 1170353 - RNA, 19 nt, Homo sapiens
  misc_RNA (1)...(19): siRNA sense strand
ucuuagagaugcagugaca

SEQ ID NO: 1170354 - RNA, 19 nt, Homo sapiens
  misc_RNA (1)...(19): siRNA sense strand
uauuaaacaccgucgaauu

SEQ ID NO: 1170355 - RNA, 19 nt, Homo sapiens
  misc_RNA (1)...(19): siRNA sense strand
agaagaaggagguucaugu

SEQ ID NO: 1170356 - RNA, 19 nt, Homo sapiens
  misc_RNA (1)...(19): siRNA sense strand
ggauucagcauagagaaau

SEQ ID NO: 1170357 - RNA, 19 nt, Homo sapiens
  misc_RNA (1)...(19): siRNA sense strand
gguuguggccaaagaagaa

SEQ ID NO: 1170358 - RNA, 19 nt, Homo sapiens
  misc_RNA (1)...(19): siRNA sense strand
aagaaggagguucauguuu

SEQ ID NO: 1170359 - RNA, 19 nt, Homo sapiens
  misc_RNA (1)...(19): siRNA sense strand
agaaaucucugggaacacu

SEQ ID NO: 1170360 - RNA, 19 nt, Homo sapiens
  misc_RNA (1)...(19): siRNA sense strand
ggauugcuagacagacuuu

SEQ ID NO: 1170361 - RNA, 19 nt, Homo sapiens
  misc_RNA (1)...(19): siRNA sense strand
agauaaacccuggcauauu

SEQ ID NO: 1170362 - RNA, 19 nt, Homo sapiens
  misc_RNA (1)...(19): siRNA sense strand
caguugcuguguuuagaga

SEQ ID NO: 1170363 - RNA, 19 nt, Homo sapiens
  misc_RNA (1)...(19): siRNA sense strand
cugaaucauccagauauua

SEQ ID NO: 1170364 - RNA, 19 nt, Homo sapiens
  misc_RNA (1)...(19): siRNA sense strand
ggccaaagaagaacucgau

SEQ ID NO: 1170365 - RNA, 19 nt, Homo sapiens
  misc_RNA (1)...(19): siRNA sense strand
cuucaaaugcucaaucuca

SEQ ID NO: 1170366 - RNA, 19 nt, Homo sapiens
  misc_RNA (1)...(19): siRNA sense strand
aagaaugguuguggccaaa

SEQ ID NO: 1170367 - RNA, 19 nt, Homo sapiens
  misc_RNA (1)...(19): siRNA sense strand
ggcaaaacgacgaucauua

SEQ ID NO: 1170368 - RNA, 19 nt, Homo sapiens
  misc_RNA (1)...(19): siRNA sense strand
aagauaaacccuggcauau

SEQ ID NO: 1170369 - RNA, 19 nt, Homo sapiens
  misc_RNA (1)...(19): siRNA sense strand
uauaaagaaggccaagcua

SEQ ID NO: 1170370 - RNA, 19 nt, Homo sapiens
  misc_RNA (1)...(19): siRNA sense strand
aaucauccaguuugucauu

SEQ ID NO: 1170371 - RNA, 19 nt, Homo sapiens
  misc_RNA (1)...(19): siRNA sense strand
uggcauauuugugcuagug

SEQ ID NO: 1170372 - RNA, 19 nt, Homo sapiens
  misc_RNA (1)...(19): siRNA sense strand
ccaaagaagaacucgauac

SEQ ID NO: 1170373 - RNA, 19 nt, Homo sapiens
  misc_RNA (1)...(19): siRNA sense strand
gaaaucucugggaacacua

SEQ ID NO: 1170374 - RNA, 19 nt, Homo sapiens
  misc_RNA (1)...(19): siRNA sense strand
gcagugacaucuguaaaag

SEQ ID NO: 1170375 - RNA, 19 nt, Homo sapiens
  misc_RNA (1)...(19): siRNA sense strand
uaaacaccgucgaauucca

SEQ ID NO: 1170376 - RNA, 19 nt, Homo sapiens
  misc_RNA (1)...(19): siRNA sense strand
gccaaagaagaacucgaua

SEQ ID NO: 1170377 - RNA, 19 nt, Homo sapiens
  misc_RNA (1)...(19): siRNA sense strand
aaacaccgucgaauuccaa

SEQ ID NO: 1170378 - RNA, 19 nt, Homo sapiens
  misc_RNA (1)...(19): siRNA sense strand
uuacaguguuugacauguc

SEQ ID NO: 1170379 - RNA, 19 nt, Homo sapiens
  misc_RNA (1)...(19): siRNA sense strand
gagaacaucaaagauaaac

SEQ ID NO: 1170380 - RNA, 19 nt, Homo sapiens
  misc_RNA (1)...(19): siRNA sense strand
auuaaacaccgucgaauuc

SEQ ID NO: 1170381 - RNA, 19 nt, Homo sapiens
  misc_RNA (1)...(19): siRNA sense strand
acucgauacucuucugaau

SEQ ID NO: 1170382 - RNA, 19 nt, Homo sapiens
  misc_RNA (1)...(19): siRNA sense strand
agaaggccaagcuauuauu

SEQ ID NO: 1170383 - RNA, 19 nt, Homo sapiens
  misc_RNA (1)...(19): siRNA sense strand
auaaagaaggccaagcuau

SEQ ID NO: 1170384 - RNA, 19 nt, Homo sapiens
  misc_RNA (1)...(19): siRNA sense strand
cugggaacacuauuauaaa

SEQ ID NO: 1170385 - RNA, 19 nt, Homo sapiens
  misc_RNA (1)...(19): siRNA sense strand
gaagaagaaggagguucau

SEQ ID NO: 1170386 - RNA, 19 nt, Homo sapiens
  misc_RNA (1)...(19): siRNA sense strand
ugccuugggcuagauaaua

SEQ ID NO: 1170387 - RNA, 19 nt, Homo sapiens
  misc_RNA (1)...(19): siRNA sense strand
gugcuagugaugccauaaa

SEQ ID NO: 1170388 - RNA, 19 nt, Homo sapiens
  misc_RNA (1)...(19): siRNA sense strand
caaaugcucaaucucaaaa

SEQ ID NO: 1170389 - RNA, 19 nt, Homo sapiens
  misc_RNA (1)...(19): siRNA sense strand
cauccaguuugucauuuac

SEQ ID NO: 1170390 - RNA, 19 nt, Homo sapiens
  misc_RNA (1)...(19): siRNA sense strand
gauaauaguggcaaaacga

SEQ ID NO: 1170391 - RNA, 19 nt, Homo sapiens
  misc_RNA (1)...(19): siRNA sense strand
cgucgaauuccaaucuuau

SEQ ID NO: 1170392 - RNA, 19 nt, Homo sapiens
  misc_RNA (1)...(19): siRNA sense strand
gauacucuucugaaucauc

SEQ ID NO: 1170393 - RNA, 19 nt, Homo sapiens
  misc_RNA (1)...(19): siRNA sense strand
uucaaaugcucaaucucaa

SEQ ID NO: 1170394 - RNA, 19 nt, Homo sapiens
  misc_RNA (1)...(19): siRNA sense strand
aagaaggccaagcuauuau

SEQ ID NO: 1170395 - RNA, 19 nt, Homo sapiens
  misc_RNA (1)...(19): siRNA sense strand
uugcuuggccugaagaaga

SEQ ID NO: 1170396 - RNA, 19 nt, Homo sapiens
  misc_RNA (1)...(19): siRNA sense strand
gucauugauaguagugaua

SEQ ID NO: 1170397 - RNA, 19 nt, Homo sapiens
  misc_RNA (1)...(19): siRNA sense strand
uccagacugugaagacaug

SEQ ID NO: 1170398 - RNA, 19 nt, Homo sapiens
  misc_RNA (1)...(19): siRNA sense strand
guagacuggcuucaagauc

SEQ ID NO: 1170399 - RNA, 19 nt, Homo sapiens
  misc_RNA (1)...(19): siRNA sense strand
ugcuuggccugaagaagaa

SEQ ID NO: 1170400 - RNA, 19 nt, Homo sapiens
  misc_RNA (1)...(19): siRNA sense strand
cauuuacaguguuugacau

SEQ ID NO: 1170401 - RNA, 19 nt, Homo sapiens
  misc_RNA (1)...(19): siRNA sense strand
ucucugggaacacuauuau

SEQ ID NO: 1170402 - RNA, 19 nt, Homo sapiens
  misc_RNA (1)...(19): siRNA sense strand
gauaaacccuggcauauuu

SEQ ID NO: 1170403 - RNA, 19 nt, Homo sapiens
  misc_RNA (1)...(19): siRNA sense strand
ggagaaggcuugcaagaag

SEQ ID NO: 1170404 - RNA, 19 nt, Homo sapiens
  misc_RNA (1)...(19): siRNA sense strand
caaggaagauacagaaauc

SEQ ID NO: 1170405 - RNA, 19 nt, Homo sapiens
  misc_RNA (1)...(19): siRNA sense strand
aaacgacgaucauuaacaa

SEQ ID NO: 1170406 - RNA, 19 nt, Homo sapiens
  misc_RNA (1)...(19): siRNA sense strand
aaagaaggccaagcuauua

SEQ ID NO: 1170407 - RNA, 19 nt, Homo sapiens
  misc_RNA (1)...(19): siRNA sense strand
gaagaaggagguucauguu

SEQ ID NO: 1170408 - RNA, 19 nt, Homo sapiens
  misc_RNA (1)...(19): siRNA sense strand
uaaagaaggccaagcuauu

SEQ ID NO: 1170409 - RNA, 19 nt, Homo sapiens
  misc_RNA (1)...(19): siRNA sense strand
gaaggccaagcuauuauuu

SEQ ID NO: 1170410 - RNA, 19 nt, Homo sapiens
  misc_RNA (1)...(19): siRNA sense strand
aaagauaaacccuggcaua

SEQ ID NO: 1170411 - RNA, 19 nt, Homo sapiens
  misc_RNA (1)...(19): siRNA sense strand
gcaaaacgacgaucauuaa

SEQ ID NO: 1170412 - RNA, 19 nt, Homo sapiens
  misc_RNA (1)...(19): siRNA sense strand
gaaugguuguggccaaaga

SEQ ID NO: 1170413 - RNA, 19 nt, Homo sapiens
  misc_RNA (1)...(19): siRNA sense strand
aagaagaacucgauacucu

SEQ ID NO: 1170414 - RNA, 19 nt, Homo sapiens
  misc_RNA (1)...(19): siRNA sense strand
acaauaggauucagcauag

SEQ ID NO: 1170415 - RNA, 19 nt, Homo sapiens
  misc_RNA (1)...(19): siRNA sense strand
caaaauauccuuccaacaa

SEQ ID NO: 1170416 - RNA, 19 nt, Homo sapiens
  misc_RNA (1)...(19): siRNA sense strand
ucgauacucuucugaauca

SEQ ID NO: 1170417 - RNA, 19 nt, Homo sapiens
  misc_RNA (1)...(19): siRNA sense strand
ucauccaguuugucauuua

SEQ ID NO: 1170418 - RNA, 19 nt, Homo sapiens
  misc_RNA (1)...(19): siRNA sense strand
cagcauagagaaauucaaa

SEQ ID NO: 1170419 - RNA, 19 nt, Homo sapiens
  misc_RNA (1)...(19): siRNA sense strand
uagacuggcuucaagauca

SEQ ID NO: 1170420 - RNA, 19 nt, Homo sapiens
  misc_RNA (1)...(19): siRNA sense strand
gaaggagguucauguuuug

SEQ ID NO: 1170421 - RNA, 19 nt, Homo sapiens
  misc_RNA (1)...(19): siRNA sense strand
agugauagauuaagaaugg

SEQ ID NO: 1170422 - RNA, 19 nt, Homo sapiens
  misc_RNA (1)...(19): siRNA sense strand
gcauagagaaauucaaauc

SEQ ID NO: 1170423 - RNA, 19 nt, Homo sapiens
  misc_RNA (1)...(19): siRNA sense strand
gauauuaaacaccgucgaa

SEQ ID NO: 1170424 - RNA, 19 nt, Homo sapiens
  misc_RNA (1)...(19): siRNA sense strand
caugucaggucaaggaaga

SEQ ID NO: 1170425 - RNA, 19 nt, Homo sapiens
  misc_RNA (1)...(19): siRNA sense strand
ugucucaguugcuguguuu

SEQ ID NO: 1170426 - RNA, 19 nt, Homo sapiens
  misc_RNA (1)...(19): siRNA sense strand
ggucaaggaagauacagaa

SEQ ID NO: 1170427 - RNA, 19 nt, Homo sapiens
  misc_RNA (1)...(19): siRNA sense strand
ucugggaacacuauuauaa

SEQ ID NO: 1170428 - RNA, 19 nt, Homo sapiens
  misc_RNA (1)...(19): siRNA sense strand
gauucagcauagagaaauu

SEQ ID NO: 1170429 - RNA, 19 nt, Homo sapiens
  misc_RNA (1)...(19): siRNA sense strand
agaaggagguucauguuuu

SEQ ID NO: 1170430 - RNA, 19 nt, Homo sapiens
  misc_RNA (1)...(19): siRNA sense strand
gaacucgauacucuucuga

SEQ ID NO: 1170431 - RNA, 19 nt, Homo sapiens
  misc_RNA (1)...(19): siRNA sense strand
gguguagacuggcuucaag

SEQ ID NO: 1170432 - RNA, 19 nt, Homo sapiens
  misc_RNA (1)...(19): siRNA sense strand
aacaauaggauucagcaua

SEQ ID NO: 1170433 - RNA, 19 nt, Homo sapiens
  misc_RNA (1)...(19): siRNA sense strand
caaagaagaacucgauacu

SEQ ID NO: 1170434 - RNA, 19 nt, Homo sapiens
  misc_RNA (1)...(19): siRNA sense strand
gacgaucauuaacaaacuu

SEQ ID NO: 1170435 - RNA, 19 nt, Homo sapiens
  misc_RNA (1)...(19): siRNA sense strand
gauccagacugugaagaca

SEQ ID NO: 1170436 - RNA, 19 nt, Homo sapiens
  misc_RNA (1)...(19): siRNA sense strand
gggaacacuauuauaaaga

SEQ ID NO: 1170437 - RNA, 19 nt, Homo sapiens
  misc_RNA (1)...(19): siRNA sense strand
guuuagagaacaucaaaga

SEQ ID NO: 1170438 - RNA, 19 nt, Homo sapiens
  misc_RNA (1)...(19): siRNA sense strand
gccuugggcuagauaauag

SEQ ID NO: 1170439 - RNA, 19 nt, Homo sapiens
  misc_RNA (1)...(19): siRNA sense strand
gcuagauaauaguggcaaa

SEQ ID NO: 1170440 - RNA, 19 nt, Homo sapiens
  misc_RNA (1)...(19): siRNA sense strand
gcauauuugugcuagugau

SEQ ID NO: 1170441 - RNA, 19 nt, Homo sapiens
  misc_RNA (1)...(19): siRNA sense strand
ccgucgaauuccaaucuua

SEQ ID NO: 1170442 - RNA, 19 nt, Homo sapiens
  misc_RNA (1)...(19): siRNA sense strand
cgacgaucauuaacaaacu

SEQ ID NO: 1170443 - RNA, 19 nt, Homo sapiens
  misc_RNA (1)...(19): siRNA sense strand
ccaaucuuauucuuugcaa

SEQ ID NO: 1170444 - RNA, 19 nt, Homo sapiens
  misc_RNA (1)...(19): siRNA sense strand
ugggaacacuauuauaaag

SEQ ID NO: 1170445 - RNA, 19 nt, Homo sapiens
  misc_RNA (1)...(19): siRNA sense strand
caauaggauucagcauaga

SEQ ID NO: 1170446 - RNA, 19 nt, Homo sapiens
  misc_RNA (1)...(19): siRNA sense strand
ucaaggaagauacagaaau

SEQ ID NO: 1170447 - RNA, 19 nt, Homo sapiens
  misc_RNA (1)...(19): siRNA sense strand
ucaaaugcucaaucucaaa

SEQ ID NO: 1170448 - RNA, 19 nt, Homo sapiens
  misc_RNA (1)...(19): siRNA sense strand
ucuuagagaugcagugaca

SEQ ID NO: 1170449 - RNA, 19 nt, Homo sapiens
  misc_RNA (1)...(19): siRNA sense strand
uauuaaacaccgucgaauu

SEQ ID NO: 1170450 - RNA, 19 nt, Homo sapiens
  misc_RNA (1)...(19): siRNA sense strand
agaagaaggagguucaugu

SEQ ID NO: 1170451 - RNA, 19 nt, Homo sapiens
  misc_RNA (1)...(19): siRNA sense strand
ggauucagcauagagaaau

SEQ ID NO: 1170452 - RNA, 19 nt, Homo sapiens
  misc_RNA (1)...(19): siRNA sense strand
gguuguggccaaagaagaa

SEQ ID NO: 1170453 - RNA, 19 nt, Homo sapiens
  misc_RNA (1)...(19): siRNA sense strand
aagaaggagguucauguuu

SEQ ID NO: 1170454 - RNA, 19 nt, Homo sapiens
  misc_RNA (1)...(19): siRNA sense strand
agaaaucucugggaacacu

SEQ ID NO: 1170455 - RNA, 19 nt, Homo sapiens
  misc_RNA (1)...(19): siRNA sense strand
ggauugcuagacagacuuu

SEQ ID NO: 1170456 - RNA, 19 nt, Homo sapiens
  misc_RNA (1)...(19): siRNA sense strand
agauaaacccuggcauauu

SEQ ID NO: 1170457 - RNA, 19 nt, Homo sapiens
  misc_RNA (1)...(19): siRNA sense strand
caguugcuguguuuagaga

SEQ ID NO: 1170458 - RNA, 19 nt, Homo sapiens
  misc_RNA (1)...(19): siRNA sense strand
cugaaucauccagauauua

SEQ ID NO: 1170459 - RNA, 19 nt, Homo sapiens
  misc_RNA (1)...(19): siRNA sense strand
ggccaaagaagaacucgau

SEQ ID NO: 1170460 - RNA, 19 nt, Homo sapiens
  misc_RNA (1)...(19): siRNA sense strand
cuucaaaugcucaaucuca

SEQ ID NO: 1170461 - RNA, 19 nt, Homo sapiens
  misc_RNA (1)...(19): siRNA sense strand
aagaaugguuguggccaaa

SEQ ID NO: 1170462 - RNA, 19 nt, Homo sapiens
  misc_RNA (1)...(19): siRNA sense strand
ggcaaaacgacgaucauua

SEQ ID NO: 1170463 - RNA, 19 nt, Homo sapiens
  misc_RNA (1)...(19): siRNA sense strand
aagauaaacccuggcauau

SEQ ID NO: 1170464 - RNA, 19 nt, Homo sapiens
  misc_RNA (1)...(19): siRNA sense strand
uauaaagaaggccaagcua

SEQ ID NO: 1170465 - RNA, 19 nt, Homo sapiens
  misc_RNA (1)...(19): siRNA sense strand
aaucauccaguuugucauu

SEQ ID NO: 1170466 - RNA, 19 nt, Homo sapiens
  misc_RNA (1)...(19): siRNA sense strand
uggcauauuugugcuagug

SEQ ID NO: 1170467 - RNA, 19 nt, Homo sapiens
  misc_RNA (1)...(19): siRNA sense strand
ccaaagaagaacucgauac

SEQ ID NO: 1170468 - RNA, 19 nt, Homo sapiens
  misc_RNA (1)...(19): siRNA sense strand
gaaaucucugggaacacua

SEQ ID NO: 1170469 - RNA, 19 nt, Homo sapiens
  misc_RNA (1)...(19): siRNA sense strand
gcagugacaucuguaaaag

SEQ ID NO: 1170470 - RNA, 19 nt, Homo sapiens
  misc_RNA (1)...(19): siRNA sense strand
uaaacaccgucgaauucca

SEQ ID NO: 1170471 - RNA, 19 nt, Homo sapiens
  misc_RNA (1)...(19): siRNA sense strand
gccaaagaagaacucgaua

SEQ ID NO: 1170472 - RNA, 19 nt, Homo sapiens
  misc_RNA (1)...(19): siRNA sense strand
aaacaccgucgaauuccaa

SEQ ID NO: 1170473 - RNA, 19 nt, Homo sapiens
  misc_RNA (1)...(19): siRNA sense strand
uuacaguguuugacauguc

SEQ ID NO: 1170474 - RNA, 19 nt, Homo sapiens
  misc_RNA (1)...(19): siRNA sense strand
gagaacaucaaagauaaac

SEQ ID NO: 1170475 - RNA, 19 nt, Homo sapiens
  misc_RNA (1)...(19): siRNA sense strand
auuaaacaccgucgaauuc

SEQ ID NO: 1170476 - RNA, 19 nt, Homo sapiens
  misc_RNA (1)...(19): siRNA sense strand
acucgauacucuucugaau

SEQ ID NO: 1170477 - RNA, 19 nt, Homo sapiens
  misc_RNA (1)...(19): siRNA sense strand
agaaggccaagcuauuauu

SEQ ID NO: 1170478 - RNA, 19 nt, Homo sapiens
  misc_RNA (1)...(19): siRNA sense strand
auaaagaaggccaagcuau

SEQ ID NO: 1170479 - RNA, 19 nt, Homo sapiens
  misc_RNA (1)...(19): siRNA sense strand
cugggaacacuauuauaaa

SEQ ID NO: 1170480 - RNA, 19 nt, Homo sapiens
  misc_RNA (1)...(19): siRNA sense strand
gaagaagaaggagguucau

SEQ ID NO: 1170481 - RNA, 19 nt, Homo sapiens
  misc_RNA (1)...(19): siRNA sense strand
ugccuugggcuagauaaua

SEQ ID NO: 1170482 - RNA, 19 nt, Homo sapiens
  misc_RNA (1)...(19): siRNA sense strand
gugcuagugaugccauaaa

SEQ ID NO: 1170483 - RNA, 19 nt, Homo sapiens
  misc_RNA (1)...(19): siRNA sense strand
caaaugcucaaucucaaaa

SEQ ID NO: 1170484 - RNA, 19 nt, Homo sapiens
  misc_RNA (1)...(19): siRNA sense strand
cauccaguuugucauuuac

SEQ ID NO: 1170485 - RNA, 19 nt, Homo sapiens
  misc_RNA (1)...(19): siRNA sense strand
gauaauaguggcaaaacga

SEQ ID NO: 1170486 - RNA, 19 nt, Homo sapiens
  misc_RNA (1)...(19): siRNA sense strand
cgucgaauuccaaucuuau

SEQ ID NO: 1170487 - RNA, 19 nt, Homo sapiens
  misc_RNA (1)...(19): siRNA sense strand
gauacucuucugaaucauc

SEQ ID NO: 1170488 - RNA, 19 nt, Homo sapiens
  misc_RNA (1)...(19): siRNA sense strand
uucaaaugcucaaucucaa

SEQ ID NO: 1170489 - RNA, 19 nt, Homo sapiens
  misc_RNA (1)...(19): siRNA sense strand
aagaaggccaagcuauuau

SEQ ID NO: 1170490 - RNA, 19 nt, Homo sapiens
  misc_RNA (1)...(19): siRNA sense strand
uugcuuggccugaagaaga

SEQ ID NO: 1170491 - RNA, 19 nt, Homo sapiens
  misc_RNA (1)...(19): siRNA sense strand
gucauugauaguagugaua

SEQ ID NO: 1170492 - RNA, 19 nt, Homo sapiens
  misc_RNA (1)...(19): siRNA sense strand
uccagacugugaagacaug

SEQ ID NO: 1170493 - RNA, 19 nt, Homo sapiens
  misc_RNA (1)...(19): siRNA sense strand
guagacuggcuucaagauc

SEQ ID NO: 1170494 - RNA, 19 nt, Homo sapiens
  misc_RNA (1)...(19): siRNA sense strand
ugcuuggccugaagaagaa

SEQ ID NO: 1170495 - RNA, 19 nt, Homo sapiens
  misc_RNA (1)...(19): siRNA sense strand
cauuuacaguguuugacau

SEQ ID NO: 1170496 - RNA, 19 nt, Homo sapiens
  misc_RNA (1)...(19): siRNA sense strand
ucucugggaacacuauuau

SEQ ID NO: 1170497 - RNA, 19 nt, Homo sapiens
  misc_RNA (1)...(19): siRNA sense strand
ugaaacagguugcagauaa

SEQ ID NO: 1170498 - RNA, 19 nt, Homo sapiens
  misc_RNA (1)...(19): siRNA sense strand
gaccagagccugucauuug

SEQ ID NO: 1170499 - RNA, 19 nt, Homo sapiens
  misc_RNA (1)...(19): siRNA sense strand
acacuaaacgccaauaaua

SEQ ID NO: 1170500 - RNA, 19 nt, Homo sapiens
  misc_RNA (1)...(19): siRNA sense strand
agaaggaccugaacaacaa

SEQ ID NO: 1170501 - RNA, 19 nt, Homo sapiens
  misc_RNA (1)...(19): siRNA sense strand
gaaacagguugcagauaag

SEQ ID NO: 1170502 - RNA, 19 nt, Homo sapiens
  misc_RNA (1)...(19): siRNA sense strand
gagagcagccaacgagaaa

SEQ ID NO: 1170503 - RNA, 19 nt, Homo sapiens
  misc_RNA (1)...(19): siRNA sense strand
ccaauaauauggagacacu

SEQ ID NO: 1170504 - RNA, 19 nt, Homo sapiens
  misc_RNA (1)...(19): siRNA sense strand
gagagugaagacaguauuu

SEQ ID NO: 1170505 - RNA, 19 nt, Homo sapiens
  misc_RNA (1)...(19): siRNA sense strand
ggagagcagccaacgagaa

SEQ ID NO: 1170506 - RNA, 19 nt, Homo sapiens
  misc_RNA (1)...(19): siRNA sense strand
gcaagaacucugaggugaa

SEQ ID NO: 1170507 - RNA, 19 nt, Homo sapiens
  misc_RNA (1)...(19): siRNA sense strand
gacauucucacuauucuau

SEQ ID NO: 1170508 - RNA, 19 nt, Homo sapiens
  misc_RNA (1)...(19): siRNA sense strand
gaaucgaggcccugaaaca

SEQ ID NO: 1170509 - RNA, 19 nt, Homo sapiens
  misc_RNA (1)...(19): siRNA sense strand
caagaacucugaggugaac

SEQ ID NO: 1170510 - RNA, 19 nt, Homo sapiens
  misc_RNA (1)...(19): siRNA sense strand
ccuccucgcuguggucuuu

SEQ ID NO: 1170511 - RNA, 19 nt, Homo sapiens
  misc_RNA (1)...(19): siRNA sense strand
gaugggugcucuggagaug

SEQ ID NO: 1170512 - RNA, 19 nt, Homo sapiens
  misc_RNA (1)...(19): siRNA sense strand
ucacuauucuaugccuuaa

SEQ ID NO: 1170513 - RNA, 19 nt, Homo sapiens
  misc_RNA (1)...(19): siRNA sense strand
cagaaucgaggcccugaaa

SEQ ID NO: 1170514 - RNA, 19 nt, Homo sapiens
  misc_RNA (1)...(19): siRNA sense strand
ggacgaggaggacagaauc

SEQ ID NO: 1170515 - RNA, 19 nt, Homo sapiens
  misc_RNA (1)...(19): siRNA sense strand
ggacauucucacuauucua

SEQ ID NO: 1170516 - RNA, 19 nt, Homo sapiens
  misc_RNA (1)...(19): siRNA sense strand
cagaaggaccugaacaaca

SEQ ID NO: 1170517 - RNA, 19 nt, Homo sapiens
  misc_RNA (1)...(19): siRNA sense strand
gaaggaggagcucaacucu

SEQ ID NO: 1170518 - RNA, 19 nt, Homo sapiens
  misc_RNA (1)...(19): siRNA sense strand
aaacacuaaacgccaauaa

SEQ ID NO: 1170519 - RNA, 19 nt, Homo sapiens
  misc_RNA (1)...(19): siRNA sense strand
uggagacacuaaucgaaug

SEQ ID NO: 1170520 - RNA, 19 nt, Homo sapiens
  misc_RNA (1)...(19): siRNA sense strand
cacuaaacgccaauaauau

SEQ ID NO: 1170521 - RNA, 19 nt, Homo sapiens
  misc_RNA (1)...(19): siRNA sense strand
acucugaggugaacaggau

SEQ ID NO: 1170522 - RNA, 19 nt, Homo sapiens
  misc_RNA (1)...(19): siRNA sense strand
accagagccugucauuuga

SEQ ID NO: 1170523 - RNA, 19 nt, Homo sapiens
  misc_RNA (1)...(19): siRNA sense strand
gcagccacaaugcuucaaa

SEQ ID NO: 1170524 - RNA, 19 nt, Homo sapiens
  misc_RNA (1)...(19): siRNA sense strand
acacuaaucgaaugucaau

SEQ ID NO: 1170525 - RNA, 19 nt, Homo sapiens
  misc_RNA (1)...(19): siRNA sense strand
ccaacgagaaagcccguaa

SEQ ID NO: 1170526 - RNA, 19 nt, Homo sapiens
  misc_RNA (1)...(19): siRNA sense strand
acuaaacgccaauaauaug

SEQ ID NO: 1170527 - RNA, 19 nt, Homo sapiens
  misc_RNA (1)...(19): siRNA sense strand
ggagacacuaaucgaaugu

SEQ ID NO: 1170528 - RNA, 19 nt, Homo sapiens
  misc_RNA (1)...(19): siRNA sense strand
acuauucuaugccuuaaag

SEQ ID NO: 1170529 - RNA, 19 nt, Homo sapiens
  misc_RNA (1)...(19): siRNA sense strand
ucgcuguggucuuuaagga

SEQ ID NO: 1170530 - RNA, 19 nt, Homo sapiens
  misc_RNA (1)...(19): siRNA sense strand
acuaaucgaaugucaauca

SEQ ID NO: 1170531 - RNA, 19 nt, Homo sapiens
  misc_RNA (1)...(19): siRNA sense strand
cccggaagcuacuuucaag

SEQ ID NO: 1170532 - RNA, 19 nt, Homo sapiens
  misc_RNA (1)...(19): siRNA sense strand
caaucuggccaucugcauu

SEQ ID NO: 1170533 - RNA, 19 nt, Homo sapiens
  misc_RNA (1)...(19): siRNA sense strand
uaauauggagacacuaauc

SEQ ID NO: 1170534 - RNA, 19 nt, Homo sapiens
  misc_RNA (1)...(19): siRNA sense strand
agagggugauaucaaggaa

SEQ ID NO: 1170535 - RNA, 19 nt, Homo sapiens
  misc_RNA (1)...(19): siRNA sense strand
cagagccugucauuugaag

SEQ ID NO: 1170536 - RNA, 19 nt, Homo sapiens
  misc_RNA (1)...(19): siRNA sense strand
cugagaagcagccacaaug

SEQ ID NO: 1170537 - RNA, 19 nt, Homo sapiens
  misc_RNA (1)...(19): siRNA sense strand
ugagagugaagacaguauu

SEQ ID NO: 1170538 - RNA, 19 nt, Homo sapiens
  misc_RNA (1)...(19): siRNA sense strand
aaucuggccaucugcauug

SEQ ID NO: 1170539 - RNA, 19 nt, Homo sapiens
  misc_RNA (1)...(19): siRNA sense strand
gcaggacgaggaggacaga

SEQ ID NO: 1170540 - RNA, 19 nt, Homo sapiens
  misc_RNA (1)...(19): siRNA sense strand
ggcaucaugugagagugaa

SEQ ID NO: 1170541 - RNA, 19 nt, Homo sapiens
  misc_RNA (1)...(19): siRNA sense strand
ugaaggaggagcucaacuc

SEQ ID NO: 1170542 - RNA, 19 nt, Homo sapiens
  misc_RNA (1)...(19): siRNA sense strand
caacggaagggauauucag

SEQ ID NO: 1170543 - RNA, 19 nt, Homo sapiens
  misc_RNA (1)...(19): siRNA sense strand
agggugauaucaaggaaca

SEQ ID NO: 1170544 - RNA, 19 nt, Homo sapiens
  misc_RNA (1)...(19): siRNA sense strand
uaaacgccaauaauaugga

SEQ ID NO: 1170545 - RNA, 19 nt, Homo sapiens
  misc_RNA (1)...(19): siRNA sense strand
uauggagacacuaaucgaa

SEQ ID NO: 1170546 - RNA, 19 nt, Homo sapiens
  misc_RNA (1)...(19): siRNA sense strand
ccagagccugucauuugaa

SEQ ID NO: 1170547 - RNA, 19 nt, Homo sapiens
  misc_RNA (1)...(19): siRNA sense strand
cauuugaagcccagaagga

SEQ ID NO: 1170548 - RNA, 19 nt, Homo sapiens
  misc_RNA (1)...(19): siRNA sense strand
ugaaacagguugcagauaa

SEQ ID NO: 1170549 - RNA, 19 nt, Homo sapiens
  misc_RNA (1)...(19): siRNA sense strand
gaccagagccugucauuug

SEQ ID NO: 1170550 - RNA, 19 nt, Homo sapiens
  misc_RNA (1)...(19): siRNA sense strand
acacuaaacgccaauaaua

SEQ ID NO: 1170551 - RNA, 19 nt, Homo sapiens
  misc_RNA (1)...(19): siRNA sense strand
agaaggaccugaacaacaa

SEQ ID NO: 1170552 - RNA, 19 nt, Homo sapiens
  misc_RNA (1)...(19): siRNA sense strand
gaaacagguugcagauaag

SEQ ID NO: 1170553 - RNA, 19 nt, Homo sapiens
  misc_RNA (1)...(19): siRNA sense strand
gagagcagccaacgagaaa

SEQ ID NO: 1170554 - RNA, 19 nt, Homo sapiens
  misc_RNA (1)...(19): siRNA sense strand
ccaauaauauggagacacu

SEQ ID NO: 1170555 - RNA, 19 nt, Homo sapiens
  misc_RNA (1)...(19): siRNA sense strand
gagagugaagacaguauuu

SEQ ID NO: 1170556 - RNA, 19 nt, Homo sapiens
  misc_RNA (1)...(19): siRNA sense strand
ggagagcagccaacgagaa

SEQ ID NO: 1170557 - RNA, 19 nt, Homo sapiens
  misc_RNA (1)...(19): siRNA sense strand
gcaagaacucugaggugaa

SEQ ID NO: 1170558 - RNA, 19 nt, Homo sapiens
  misc_RNA (1)...(19): siRNA sense strand
gacauucucacuauucuau

SEQ ID NO: 1170559 - RNA, 19 nt, Homo sapiens
  misc_RNA (1)...(19): siRNA sense strand
gaaucgaggcccugaaaca

SEQ ID NO: 1170560 - RNA, 19 nt, Homo sapiens
  misc_RNA (1)...(19): siRNA sense strand
caagaacucugaggugaac

SEQ ID NO: 1170561 - RNA, 19 nt, Homo sapiens
  misc_RNA (1)...(19): siRNA sense strand
ccuccucgcuguggucuuu

SEQ ID NO: 1170562 - RNA, 19 nt, Homo sapiens
  misc_RNA (1)...(19): siRNA sense strand
gaugggugcucuggagaug

SEQ ID NO: 1170563 - RNA, 19 nt, Homo sapiens
  misc_RNA (1)...(19): siRNA sense strand
ucacuauucuaugccuuaa

SEQ ID NO: 1170564 - RNA, 19 nt, Homo sapiens
  misc_RNA (1)...(19): siRNA sense strand
cagaaucgaggcccugaaa

SEQ ID NO: 1170565 - RNA, 19 nt, Homo sapiens
  misc_RNA (1)...(19): siRNA sense strand
ggacgaggaggacagaauc

SEQ ID NO: 1170566 - RNA, 19 nt, Homo sapiens
  misc_RNA (1)...(19): siRNA sense strand
ggacauucucacuauucua

SEQ ID NO: 1170567 - RNA, 19 nt, Homo sapiens
  misc_RNA (1)...(19): siRNA sense strand
cagaaggaccugaacaaca

SEQ ID NO: 1170568 - RNA, 19 nt, Homo sapiens
  misc_RNA (1)...(19): siRNA sense strand
gaaggaggagcucaacucu

SEQ ID NO: 1170569 - RNA, 19 nt, Homo sapiens
  misc_RNA (1)...(19): siRNA sense strand
aaacacuaaacgccaauaa

SEQ ID NO: 1170570 - RNA, 19 nt, Homo sapiens
  misc_RNA (1)...(19): siRNA sense strand
uggagacacuaaucgaaug

SEQ ID NO: 1170571 - RNA, 19 nt, Homo sapiens
  misc_RNA (1)...(19): siRNA sense strand
cacuaaacgccaauaauau

SEQ ID NO: 1170572 - RNA, 19 nt, Homo sapiens
  misc_RNA (1)...(19): siRNA sense strand
acucugaggugaacaggau

SEQ ID NO: 1170573 - RNA, 19 nt, Homo sapiens
  misc_RNA (1)...(19): siRNA sense strand
accagagccugucauuuga

SEQ ID NO: 1170574 - RNA, 19 nt, Homo sapiens
  misc_RNA (1)...(19): siRNA sense strand
gcagccacaaugcuucaaa

SEQ ID NO: 1170575 - RNA, 19 nt, Homo sapiens
  misc_RNA (1)...(19): siRNA sense strand
acacuaaucgaaugucaau

SEQ ID NO: 1170576 - RNA, 19 nt, Homo sapiens
  misc_RNA (1)...(19): siRNA sense strand
ccaacgagaaagcccguaa

SEQ ID NO: 1170577 - RNA, 19 nt, Homo sapiens
  misc_RNA (1)...(19): siRNA sense strand
acuaaacgccaauaauaug

SEQ ID NO: 1170578 - RNA, 19 nt, Homo sapiens
  misc_RNA (1)...(19): siRNA sense strand
ggagacacuaaucgaaugu

SEQ ID NO: 1170579 - RNA, 19 nt, Homo sapiens
  misc_RNA (1)...(19): siRNA sense strand
acuauucuaugccuuaaag

SEQ ID NO: 1170580 - RNA, 19 nt, Homo sapiens
  misc_RNA (1)...(19): siRNA sense strand
ucgcuguggucuuuaagga

SEQ ID NO: 1170581 - RNA, 19 nt, Homo sapiens
  misc_RNA (1)...(19): siRNA sense strand
acuaaucgaaugucaauca

SEQ ID NO: 1170582 - RNA, 19 nt, Homo sapiens
  misc_RNA (1)...(19): siRNA sense strand
cccggaagcuacuuucaag

SEQ ID NO: 1170583 - RNA, 19 nt, Homo sapiens
  misc_RNA (1)...(19): siRNA sense strand
caaucuggccaucugcauu

SEQ ID NO: 1170584 - RNA, 19 nt, Homo sapiens
  misc_RNA (1)...(19): siRNA sense strand
uaauauggagacacuaauc

SEQ ID NO: 1170585 - RNA, 19 nt, Homo sapiens
  misc_RNA (1)...(19): siRNA sense strand
agagggugauaucaaggaa

SEQ ID NO: 1170586 - RNA, 19 nt, Homo sapiens
  misc_RNA (1)...(19): siRNA sense strand
cagagccugucauuugaag

SEQ ID NO: 1170587 - RNA, 19 nt, Homo sapiens
  misc_RNA (1)...(19): siRNA sense strand
cugagaagcagccacaaug

SEQ ID NO: 1170588 - RNA, 19 nt, Homo sapiens
  misc_RNA (1)...(19): siRNA sense strand
ugagagugaagacaguauu

SEQ ID NO: 1170589 - RNA, 19 nt, Homo sapiens
  misc_RNA (1)...(19): siRNA sense strand
aaucuggccaucugcauug

SEQ ID NO: 1170590 - RNA, 19 nt, Homo sapiens
  misc_RNA (1)...(19): siRNA sense strand
gcaggacgaggaggacaga

SEQ ID NO: 1170591 - RNA, 19 nt, Homo sapiens
  misc_RNA (1)...(19): siRNA sense strand
ggcaucaugugagagugaa

SEQ ID NO: 1170592 - RNA, 19 nt, Homo sapiens
  misc_RNA (1)...(19): siRNA sense strand
ugaaggaggagcucaacuc

SEQ ID NO: 1170593 - RNA, 19 nt, Homo sapiens
  misc_RNA (1)...(19): siRNA sense strand
caacggaagggauauucag

SEQ ID NO: 1170594 - RNA, 19 nt, Homo sapiens
  misc_RNA (1)...(19): siRNA sense strand
agggugauaucaaggaaca

SEQ ID NO: 1170595 - RNA, 19 nt, Homo sapiens
  misc_RNA (1)...(19): siRNA sense strand
uaaacgccaauaauaugga

SEQ ID NO: 1170596 - RNA, 19 nt, Homo sapiens
  misc_RNA (1)...(19): siRNA sense strand
uauggagacacuaaucgaa

SEQ ID NO: 1170597 - RNA, 19 nt, Homo sapiens
  misc_RNA (1)...(19): siRNA sense strand
ccagagccugucauuugaa

SEQ ID NO: 1170598 - RNA, 19 nt, Homo sapiens
  misc_RNA (1)...(19): siRNA sense strand
cauuugaagcccagaagga

SEQ ID NO: 1170599 - RNA, 19 nt, Homo sapiens
  misc_RNA (1)...(19): siRNA sense strand
ugaaacagguugcagauaa

SEQ ID NO: 1170600 - RNA, 19 nt, Homo sapiens
  misc_RNA (1)...(19): siRNA sense strand
gaccagagccugucauuug

SEQ ID NO: 1170601 - RNA, 19 nt, Homo sapiens
  misc_RNA (1)...(19): siRNA sense strand
agaaggaccugaacaacaa

SEQ ID NO: 1170602 - RNA, 19 nt, Homo sapiens
  misc_RNA (1)...(19): siRNA sense strand
gaaacagguugcagauaag

SEQ ID NO: 1170603 - RNA, 19 nt, Homo sapiens
  misc_RNA (1)...(19): siRNA sense strand
gcaagaacucugaggugaa

SEQ ID NO: 1170604 - RNA, 19 nt, Homo sapiens
  misc_RNA (1)...(19): siRNA sense strand
gaaucgaggcccugaaaca

SEQ ID NO: 1170605 - RNA, 19 nt, Homo sapiens
  misc_RNA (1)...(19): siRNA sense strand
caagaacucugaggugaac

SEQ ID NO: 1170606 - RNA, 19 nt, Homo sapiens
  misc_RNA (1)...(19): siRNA sense strand
cagaaucgaggcccugaaa

SEQ ID NO: 1170607 - RNA, 19 nt, Homo sapiens
  misc_RNA (1)...(19): siRNA sense strand
ggacgaggaggacagaauc

SEQ ID NO: 1170608 - RNA, 19 nt, Homo sapiens
  misc_RNA (1)...(19): siRNA sense strand
cagaaggaccugaacaaca

SEQ ID NO: 1170609 - RNA, 19 nt, Homo sapiens
  misc_RNA (1)...(19): siRNA sense strand
acucugaggugaacaggau

SEQ ID NO: 1170610 - RNA, 19 nt, Homo sapiens
  misc_RNA (1)...(19): siRNA sense strand
accagagccugucauuuga

SEQ ID NO: 1170611 - RNA, 19 nt, Homo sapiens
  misc_RNA (1)...(19): siRNA sense strand
caaucuggccaucugcauu

SEQ ID NO: 1170612 - RNA, 19 nt, Homo sapiens
  misc_RNA (1)...(19): siRNA sense strand
cagagccugucauuugaag

SEQ ID NO: 1170613 - RNA, 19 nt, Homo sapiens
  misc_RNA (1)...(19): siRNA sense strand
gcaggacgaggaggacaga

SEQ ID NO: 1170614 - RNA, 19 nt, Homo sapiens
  misc_RNA (1)...(19): siRNA sense strand
aaucuggccaucugcauug

SEQ ID NO: 1170615 - RNA, 19 nt, Homo sapiens
  misc_RNA (1)...(19): siRNA sense strand
ccagagccugucauuugaa

SEQ ID NO: 1170616 - RNA, 19 nt, Homo sapiens
  misc_RNA (1)...(19): siRNA sense strand
cauuugaagcccagaagga

SEQ ID NO: 1170617 - RNA, 19 nt, Homo sapiens
  misc_RNA (1)...(19): siRNA sense strand
ucaucgagguguacuauuu

SEQ ID NO: 1170618 - RNA, 19 nt, Homo sapiens
  misc_RNA (1)...(19): siRNA sense strand
ccagagacccuguuuaaga

SEQ ID NO: 1170619 - RNA, 19 nt, Homo sapiens
  misc_RNA (1)...(19): siRNA sense strand
gagcagagccauccagaga

SEQ ID NO: 1170620 - RNA, 19 nt, Homo sapiens
  misc_RNA (1)...(19): siRNA sense strand
gcgaggagcuggaggagau

SEQ ID NO: 1170621 - RNA, 19 nt, Homo sapiens
  misc_RNA (1)...(19): siRNA sense strand
gcagugaccuggacaaccu

SEQ ID NO: 1170622 - RNA, 19 nt, Homo sapiens
  misc_RNA (1)...(19): siRNA sense strand
uggcggagcucaucaacug

SEQ ID NO: 1170623 - RNA, 19 nt, Homo sapiens
  misc_RNA (1)...(19): siRNA sense strand
gcuccagaguugcaaguga

SEQ ID NO: 1170624 - RNA, 19 nt, Homo sapiens
  misc_RNA (1)...(19): siRNA sense strand
cagcgacgacauagagaua

SEQ ID NO: 1170625 - RNA, 19 nt, Homo sapiens
  misc_RNA (1)...(19): siRNA sense strand
caagcgcgaguucuacuuu

SEQ ID NO: 1170626 - RNA, 19 nt, Homo sapiens
  misc_RNA (1)...(19): siRNA sense strand
ugauggagcugaccaacgu

SEQ ID NO: 1170627 - RNA, 19 nt, Homo sapiens
  misc_RNA (1)...(19): siRNA sense strand
gcgcuguccuucaugaaca

SEQ ID NO: 1170628 - RNA, 19 nt, Homo sapiens
  misc_RNA (1)...(19): siRNA sense strand
agaagugcgucuggaaguu

SEQ ID NO: 1170629 - RNA, 19 nt, Homo sapiens
  misc_RNA (1)...(19): siRNA sense strand
acauagagauagucgucaa

SEQ ID NO: 1170630 - RNA, 19 nt, Homo sapiens
  misc_RNA (1)...(19): siRNA sense strand
gaagugcgucuggaaguuc

SEQ ID NO: 1170631 - RNA, 19 nt, Homo sapiens
  misc_RNA (1)...(19): siRNA sense strand
gcgacgacauagagauagu

SEQ ID NO: 1170632 - RNA, 19 nt, Homo sapiens
  misc_RNA (1)...(19): siRNA sense strand
ccacagcgacaccuucauc

SEQ ID NO: 1170633 - RNA, 19 nt, Homo sapiens
  misc_RNA (1)...(19): siRNA sense strand
gcaagcgcgaguucuacuu

SEQ ID NO: 1170634 - RNA, 19 nt, Homo sapiens
  misc_RNA (1)...(19): siRNA sense strand
gggagguccacaugaagaa

SEQ ID NO: 1170635 - RNA, 19 nt, Homo sapiens
  misc_RNA (1)...(19): siRNA sense strand
auccagagacccuguuuaa

SEQ ID NO: 1170636 - RNA, 19 nt, Homo sapiens
  misc_RNA (1)...(19): siRNA sense strand
gggcuacgacaccaucuuc

SEQ ID NO: 1170637 - RNA, 19 nt, Homo sapiens
  misc_RNA (1)...(19): siRNA sense strand
ucaagaacgagauggacuu

SEQ ID NO: 1170638 - RNA, 19 nt, Homo sapiens
  misc_RNA (1)...(19): siRNA sense strand
cuggacgacuguugcaaga

SEQ ID NO: 1170639 - RNA, 19 nt, Homo sapiens
  misc_RNA (1)...(19): siRNA sense strand
ggccaucagcuucuugugu

SEQ ID NO: 1170640 - RNA, 19 nt, Homo sapiens
  misc_RNA (1)...(19): siRNA sense strand
cauccagagacccuguuua

SEQ ID NO: 1170641 - RNA, 19 nt, Homo sapiens
  misc_RNA (1)...(19): siRNA sense strand
cugcagacccucaccuaug

SEQ ID NO: 1170642 - RNA, 19 nt, Homo sapiens
  misc_RNA (1)...(19): siRNA sense strand
aagcgcgaguucuacuuug

SEQ ID NO: 1170643 - RNA, 19 nt, Homo sapiens
  misc_RNA (1)...(19): siRNA sense strand
guggagacggcgugcauug

SEQ ID NO: 1170644 - RNA, 19 nt, Homo sapiens
  misc_RNA (1)...(19): siRNA sense strand
gggaccuccucagucagua

SEQ ID NO: 1170645 - RNA, 19 nt, Homo sapiens
  misc_RNA (1)...(19): siRNA sense strand
caagaacgagauggacuuc

SEQ ID NO: 1170646 - RNA, 19 nt, Homo sapiens
  misc_RNA (1)...(19): siRNA sense strand
guggguaucuucgucuucu

SEQ ID NO: 1170647 - RNA, 19 nt, Homo sapiens
  misc_RNA (1)...(19): siRNA sense strand
caucgagguguacuauuuc

SEQ ID NO: 1170648 - RNA, 19 nt, Homo sapiens
  misc_RNA (1)...(19): siRNA sense strand
ccucaccuaugcccucaag

SEQ ID NO: 1170649 - RNA, 19 nt, Homo sapiens
  misc_RNA (1)...(19): siRNA sense strand
acaaggagcuggucaagaa

SEQ ID NO: 1170650 - RNA, 19 nt, Homo sapiens
  misc_RNA (1)...(19): siRNA sense strand
gcaggacgcucuacuaugg

SEQ ID NO: 1170651 - RNA, 19 nt, Homo sapiens
  misc_RNA (1)...(19): siRNA sense strand
agaggaagcuuuacaagga

SEQ ID NO: 1170652 - RNA, 19 nt, Homo sapiens
  misc_RNA (1)...(19): siRNA sense strand
ggacagaucacuauuuaca

SEQ ID NO: 1170653 - RNA, 19 nt, Homo sapiens
  misc_RNA (1)...(19): siRNA sense strand
cagacauucuucucuauaa

SEQ ID NO: 1170654 - RNA, 19 nt, Homo sapiens
  misc_RNA (1)...(19): siRNA sense strand
gcagauaucaguggcuaua

SEQ ID NO: 1170655 - RNA, 19 nt, Homo sapiens
  misc_RNA (1)...(19): siRNA sense strand
ggagugaaagguucuauga

SEQ ID NO: 1170656 - RNA, 19 nt, Homo sapiens
  misc_RNA (1)...(19): siRNA sense strand
uuggacagaucacuauuua

SEQ ID NO: 1170657 - RNA, 19 nt, Homo sapiens
  misc_RNA (1)...(19): siRNA sense strand
ggugaagacuguucguuuc

SEQ ID NO: 1170658 - RNA, 19 nt, Homo sapiens
  misc_RNA (1)...(19): siRNA sense strand
gaggagguccgcuacauug

SEQ ID NO: 1170659 - RNA, 19 nt, Homo sapiens
  misc_RNA (1)...(19): siRNA sense strand
gcaagaggagugaaagguu

SEQ ID NO: 1170660 - RNA, 19 nt, Homo sapiens
  misc_RNA (1)...(19): siRNA sense strand
gcucguggcugagaucaug

SEQ ID NO: 1170661 - RNA, 19 nt, Homo sapiens
  misc_RNA (1)...(19): siRNA sense strand
gaugagaagaaccaaguuu

SEQ ID NO: 1170662 - RNA, 19 nt, Homo sapiens
  misc_RNA (1)...(19): siRNA sense strand
ccaggcauauucaagaguu

SEQ ID NO: 1170663 - RNA, 19 nt, Homo sapiens
  misc_RNA (1)...(19): siRNA sense strand
aguggaaugugucagaaua

SEQ ID NO: 1170664 - RNA, 19 nt, Homo sapiens
  misc_RNA (1)...(19): siRNA sense strand
ggacguggaugagaagaac

SEQ ID NO: 1170665 - RNA, 19 nt, Homo sapiens
  misc_RNA (1)...(19): siRNA sense strand
aaccagacauucuucucua

SEQ ID NO: 1170666 - RNA, 19 nt, Homo sapiens
  misc_RNA (1)...(19): siRNA sense strand
ggaggagguccgcuacauu

SEQ ID NO: 1170667 - RNA, 19 nt, Homo sapiens
  misc_RNA (1)...(19): siRNA sense strand
gauaacagucuuacucucu

SEQ ID NO: 1170668 - RNA, 19 nt, Homo sapiens
  misc_RNA (1)...(19): siRNA sense strand
guacgcugguuucccuuug

SEQ ID NO: 1170669 - RNA, 19 nt, Homo sapiens
  misc_RNA (1)...(19): siRNA sense strand
ccagacauucuucucuaua

SEQ ID NO: 1170670 - RNA, 19 nt, Homo sapiens
  misc_RNA (1)...(19): siRNA sense strand
acagaucacuauuuacagu

SEQ ID NO: 1170671 - RNA, 19 nt, Homo sapiens
  misc_RNA (1)...(19): siRNA sense strand
gggugaagacuguucguuu

SEQ ID NO: 1170672 - RNA, 19 nt, Homo sapiens
  misc_RNA (1)...(19): siRNA sense strand
gcaggaggcagauaucagu

SEQ ID NO: 1170673 - RNA, 19 nt, Homo sapiens
  misc_RNA (1)...(19): siRNA sense strand
agugaaagguucuaugagu

SEQ ID NO: 1170674 - RNA, 19 nt, Homo sapiens
  misc_RNA (1)...(19): siRNA sense strand
gcaacgggaaccugcugua

SEQ ID NO: 1170675 - RNA, 19 nt, Homo sapiens
  misc_RNA (1)...(19): siRNA sense strand
gagaagaaccaaguuuuaa

SEQ ID NO: 1170676 - RNA, 19 nt, Homo sapiens
  misc_RNA (1)...(19): siRNA sense strand
ggaccagagucauccuucu

SEQ ID NO: 1170677 - RNA, 19 nt, Homo sapiens
  misc_RNA (1)...(19): siRNA sense strand
ccagauggccagauuugga

SEQ ID NO: 1170678 - RNA, 19 nt, Homo sapiens
  misc_RNA (1)...(19): siRNA sense strand
uaccauugauagcccagua

SEQ ID NO: 1170679 - RNA, 19 nt, Homo sapiens
  misc_RNA (1)...(19): siRNA sense strand
caagaguuccugcuacauc

SEQ ID NO: 1170680 - RNA, 19 nt, Homo sapiens
  misc_RNA (1)...(19): siRNA sense strand
gacgccacauuccacacua

SEQ ID NO: 1170681 - RNA, 19 nt, Homo sapiens
  misc_RNA (1)...(19): siRNA sense strand
gcgcgugguuccugcgaau

SEQ ID NO: 1170682 - RNA, 19 nt, Homo sapiens
  misc_RNA (1)...(19): siRNA sense strand
gcucuacuauggccucaac

SEQ ID NO: 1170683 - RNA, 19 nt, Homo sapiens
  misc_RNA (1)...(19): siRNA sense strand
ugagaagaaccaaguuuua

SEQ ID NO: 1170684 - RNA, 19 nt, Homo sapiens
  misc_RNA (1)...(19): siRNA sense strand
cuaacguguuggugaauuc

SEQ ID NO: 1170685 - RNA, 19 nt, Homo sapiens
  misc_RNA (1)...(19): siRNA sense strand
gaaaccagacauucuucuc

SEQ ID NO: 1170686 - RNA, 19 nt, Homo sapiens
  misc_RNA (1)...(19): siRNA sense strand
cagauggccagauuuggaa

SEQ ID NO: 1170687 - RNA, 19 nt, Homo sapiens
  misc_RNA (1)...(19): siRNA sense strand
gacauucuucucuauaaca

SEQ ID NO: 1170688 - RNA, 19 nt, Homo sapiens
  misc_RNA (1)...(19): siRNA sense strand
gaaugugucagaauaucca

SEQ ID NO: 1170689 - RNA, 19 nt, Homo sapiens
  misc_RNA (1)...(19): siRNA sense strand
caaguggaccagagucauc

SEQ ID NO: 1170690 - RNA, 19 nt, Homo sapiens
  misc_RNA (1)...(19): siRNA sense strand
uaacagucuuacucucucu

SEQ ID NO: 1170691 - RNA, 19 nt, Homo sapiens
  misc_RNA (1)...(19): siRNA sense strand
cgcaaccacucaccgucua

SEQ ID NO: 1170692 - RNA, 19 nt, Homo sapiens
  misc_RNA (1)...(19): siRNA sense strand
ucuauaacagugcugauga

SEQ ID NO: 1170693 - RNA, 19 nt, Homo sapiens
  misc_RNA (1)...(19): siRNA sense strand
uauuuacaguggaaugugu

SEQ ID NO: 1170694 - RNA, 19 nt, Homo sapiens
  misc_RNA (1)...(19): siRNA sense strand
gggauaacagucuuacucu

SEQ ID NO: 1170695 - RNA, 19 nt, Homo sapiens
  misc_RNA (1)...(19): siRNA sense strand
ccgcaggacgcucuacuau

SEQ ID NO: 1170696 - RNA, 19 nt, Homo sapiens
  misc_RNA (1)...(19): siRNA sense strand
caauggagaaugggaccua

SEQ ID NO: 1170697 - RNA, 19 nt, Homo sapiens
  misc_RNA (1)...(19): siRNA sense strand
gauuuggaaaccagacauu

SEQ ID NO: 1170698 - RNA, 19 nt, Homo sapiens
  misc_RNA (1)...(19): siRNA sense strand
aaugggaccuagugggaau

SEQ ID NO: 1170699 - RNA, 19 nt, Homo sapiens
  misc_RNA (1)...(19): siRNA sense strand
acaguggaaugugucagaa

SEQ ID NO: 1170700 - RNA, 19 nt, Homo sapiens
  misc_RNA (1)...(19): siRNA sense strand
gagucauccuucugaacug

SEQ ID NO: 1170701 - RNA, 19 nt, Homo sapiens
  misc_RNA (1)...(19): siRNA sense strand
gcgcuuugacgccacauuc

SEQ ID NO: 1170702 - RNA, 19 nt, Homo sapiens
  misc_RNA (1)...(19): siRNA sense strand
ggaaaccagacauucuucu

SEQ ID NO: 1170703 - RNA, 19 nt, Homo sapiens
  misc_RNA (1)...(19): siRNA sense strand
uuucccagauggccagauu

SEQ ID NO: 1170704 - RNA, 19 nt, Homo sapiens
  misc_RNA (1)...(19): siRNA sense strand
ggaugagaagaaccaaguu

SEQ ID NO: 1170705 - RNA, 19 nt, Homo sapiens
  misc_RNA (1)...(19): siRNA sense strand
acagucuuacucucucuua

SEQ ID NO: 1170706 - RNA, 19 nt, Homo sapiens
  misc_RNA (1)...(19): siRNA sense strand
acgggaaccugcuguacau

SEQ ID NO: 1170707 - RNA, 19 nt, Homo sapiens
  misc_RNA (1)...(19): siRNA sense strand
uggaaugugucagaauauc

SEQ ID NO: 1170708 - RNA, 19 nt, Homo sapiens
  misc_RNA (1)...(19): siRNA sense strand
gcgugguuccugcgaauga

SEQ ID NO: 1170709 - RNA, 19 nt, Homo sapiens
  misc_RNA (1)...(19): siRNA sense strand
gcugguuucccuuugaugu

SEQ ID NO: 1170710 - RNA, 19 nt, Homo sapiens
  misc_RNA (1)...(19): siRNA sense strand
aggagcuggucaagaacua

SEQ ID NO: 1170711 - RNA, 19 nt, Homo sapiens
  misc_RNA (1)...(19): siRNA sense strand
gcagaucauggacguggau

SEQ ID NO: 1170712 - RNA, 19 nt, Homo sapiens
  misc_RNA (1)...(19): siRNA sense strand
agacauucuucucuauaac

SEQ ID NO: 1170713 - RNA, 19 nt, Homo sapiens
  misc_RNA (1)...(19): siRNA sense strand
ccuccaggcauauucaaga

SEQ ID NO: 1170714 - RNA, 19 nt, Homo sapiens
  misc_RNA (1)...(19): siRNA sense strand
acuaacguguuggugaauu

SEQ ID NO: 1170715 - RNA, 19 nt, Homo sapiens
  misc_RNA (1)...(19): siRNA sense strand
cuauaacagugcugaugag

SEQ ID NO: 1170716 - RNA, 19 nt, Homo sapiens
  misc_RNA (1)...(19): siRNA sense strand
acgccacauuccacacuaa

SEQ ID NO: 1170717 - RNA, 19 nt, Homo sapiens
  misc_RNA (1)...(19): siRNA sense strand
cgauucgguaccauugaua

SEQ ID NO: 1170718 - RNA, 19 nt, Homo sapiens
  misc_RNA (1)...(19): siRNA sense strand
gaucagauguugagaguuu

SEQ ID NO: 1170719 - RNA, 19 nt, Homo sapiens
  misc_RNA (1)...(19): siRNA sense strand
caacaaagcuacaaucaug

SEQ ID NO: 1170720 - RNA, 19 nt, Homo sapiens
  misc_RNA (1)...(19): siRNA sense strand
ggaggaagcuaaacaagaa

SEQ ID NO: 1170721 - RNA, 19 nt, Homo sapiens
  misc_RNA (1)...(19): siRNA sense strand
gaagaaguguggaaauuga

SEQ ID NO: 1170722 - RNA, 19 nt, Homo sapiens
  misc_RNA (1)...(19): siRNA sense strand
gcacaauccuucuuugaaa

SEQ ID NO: 1170723 - RNA, 19 nt, Homo sapiens
  misc_RNA (1)...(19): siRNA sense strand
gaaauuauagcucgaggua

SEQ ID NO: 1170724 - RNA, 19 nt, Homo sapiens
  misc_RNA (1)...(19): siRNA sense strand
guuaugaccuacagugaua

SEQ ID NO: 1170725 - RNA, 19 nt, Homo sapiens
  misc_RNA (1)...(19): siRNA sense strand
gaaccaggcugcauuaaaa

SEQ ID NO: 1170726 - RNA, 19 nt, Homo sapiens
  misc_RNA (1)...(19): siRNA sense strand
ucaccaagaugcauuuaaa

SEQ ID NO: 1170727 - RNA, 19 nt, Homo sapiens
  misc_RNA (1)...(19): siRNA sense strand
gagcagaguuggagaaucu

SEQ ID NO: 1170728 - RNA, 19 nt, Homo sapiens
  misc_RNA (1)...(19): siRNA sense strand
ggaaguuguugaauucuug

SEQ ID NO: 1170729 - RNA, 19 nt, Homo sapiens
  misc_RNA (1)...(19): siRNA sense strand
gaaugcuccuuguguuaua

SEQ ID NO: 1170730 - RNA, 19 nt, Homo sapiens
  misc_RNA (1)...(19): siRNA sense strand
gaccauaaaucaacuucuu

SEQ ID NO: 1170731 - RNA, 19 nt, Homo sapiens
  misc_RNA (1)...(19): siRNA sense strand
ggacagaggaucagauguu

SEQ ID NO: 1170732 - RNA, 19 nt, Homo sapiens
  misc_RNA (1)...(19): siRNA sense strand
cagaggagcuuauauuugg

SEQ ID NO: 1170733 - RNA, 19 nt, Homo sapiens
  misc_RNA (1)...(19): siRNA sense strand
guucagaucuucaguacug

SEQ ID NO: 1170734 - RNA, 19 nt, Homo sapiens
  misc_RNA (1)...(19): siRNA sense strand
gaaagaagaaguguggaaa

SEQ ID NO: 1170735 - RNA, 19 nt, Homo sapiens
  misc_RNA (1)...(19): siRNA sense strand
acaaauggauguuaguaug

SEQ ID NO: 1170736 - RNA, 19 nt, Homo sapiens
  misc_RNA (1)...(19): siRNA sense strand
cgaauuugaugagauguuu

SEQ ID NO: 1170737 - RNA, 19 nt, Homo sapiens
  misc_RNA (1)...(19): siRNA sense strand
gcagaggagcuuauauuug

SEQ ID NO: 1170738 - RNA, 19 nt, Homo sapiens
  misc_RNA (1)...(19): siRNA sense strand
gcacaaauggauguuagua

SEQ ID NO: 1170739 - RNA, 19 nt, Homo sapiens
  misc_RNA (1)...(19): siRNA sense strand
ggaagcuaaacaagaauua

SEQ ID NO: 1170740 - RNA, 19 nt, Homo sapiens
  misc_RNA (1)...(19): siRNA sense strand
aagaagaaguguggaaauu

SEQ ID NO: 1170741 - RNA, 19 nt, Homo sapiens
  misc_RNA (1)...(19): siRNA sense strand
caacaggugcuuccaguga

SEQ ID NO: 1170742 - RNA, 19 nt, Homo sapiens
  misc_RNA (1)...(19): siRNA sense strand
aaugacagauggaaugaaa

SEQ ID NO: 1170743 - RNA, 19 nt, Homo sapiens
  misc_RNA (1)...(19): siRNA sense strand
acaggaaguuguugaauuc

SEQ ID NO: 1170744 - RNA, 19 nt, Homo sapiens
  misc_RNA (1)...(19): siRNA sense strand
gcgaaugcuccuuguguua

SEQ ID NO: 1170745 - RNA, 19 nt, Homo sapiens
  misc_RNA (1)...(19): siRNA sense strand
gaacccgucugauucucuu

SEQ ID NO: 1170746 - RNA, 19 nt, Homo sapiens
  misc_RNA (1)...(19): siRNA sense strand
gaaacuaaguccagaaacc

SEQ ID NO: 1170747 - RNA, 19 nt, Homo sapiens
  misc_RNA (1)...(19): siRNA sense strand
gagaaugacagauggaaug

SEQ ID NO: 1170748 - RNA, 19 nt, Homo sapiens
  misc_RNA (1)...(19): siRNA sense strand
aaacauuucuucccauugg

SEQ ID NO: 1170749 - RNA, 19 nt, Homo sapiens
  misc_RNA (1)...(19): siRNA sense strand
caaggcagaccauaaauca

SEQ ID NO: 1170750 - RNA, 19 nt, Homo sapiens
  misc_RNA (1)...(19): siRNA sense strand
uacaggaaguuguugaauu

SEQ ID NO: 1170751 - RNA, 19 nt, Homo sapiens
  misc_RNA (1)...(19): siRNA sense strand
gacagaggaucagauguug

SEQ ID NO: 1170752 - RNA, 19 nt, Homo sapiens
  misc_RNA (1)...(19): siRNA sense strand
gaaguguggaaauugauaa

SEQ ID NO: 1170753 - RNA, 19 nt, Homo sapiens
  misc_RNA (1)...(19): siRNA sense strand
caucacagcauaucaugaa

SEQ ID NO: 1170754 - RNA, 19 nt, Homo sapiens
  misc_RNA (1)...(19): siRNA sense strand
gagaagcugauguuccuuu

SEQ ID NO: 1170755 - RNA, 19 nt, Homo sapiens
  misc_RNA (1)...(19): siRNA sense strand
guacauuacguuccucuug

SEQ ID NO: 1170756 - RNA, 19 nt, Homo sapiens
  misc_RNA (1)...(19): siRNA sense strand
guaucgacaucauucaaga

SEQ ID NO: 1170757 - RNA, 19 nt, Homo sapiens
  misc_RNA (1)...(19): siRNA sense strand
gaacaagaaauaagaaucc

SEQ ID NO: 1170758 - RNA, 19 nt, Homo sapiens
  misc_RNA (1)...(19): siRNA sense strand
ggagccagccguaucagaa

SEQ ID NO: 1170759 - RNA, 19 nt, Homo sapiens
  misc_RNA (1)...(19): siRNA sense strand
gcucaagcacucacacaaa

SEQ ID NO: 1170760 - RNA, 19 nt, Homo sapiens
  misc_RNA (1)...(19): siRNA sense strand
gauccgaauuugaugagau

SEQ ID NO: 1170761 - RNA, 19 nt, Homo sapiens
  misc_RNA (1)...(19): siRNA sense strand
gaaccgaccauauuacaac

SEQ ID NO: 1170762 - RNA, 19 nt, Homo sapiens
  misc_RNA (1)...(19): siRNA sense strand
ugaaggagcuggaguuuuc

SEQ ID NO: 1170763 - RNA, 19 nt, Homo sapiens
  misc_RNA (1)...(19): siRNA sense strand
gggagaagcugauguuccu

SEQ ID NO: 1170764 - RNA, 19 nt, Homo sapiens
  misc_RNA (1)...(19): siRNA sense strand
ggcagaggagcuuauauuu

SEQ ID NO: 1170765 - RNA, 19 nt, Homo sapiens
  misc_RNA (1)...(19): siRNA sense strand
aaacuucccagaggcauua

SEQ ID NO: 1170766 - RNA, 19 nt, Homo sapiens
  misc_RNA (1)...(19): siRNA sense strand
gaccuuggauuaucugaac

SEQ ID NO: 1170767 - RNA, 19 nt, Homo sapiens
  misc_RNA (1)...(19): siRNA sense strand
cagauggaaugaaacuaga

SEQ ID NO: 1170768 - RNA, 19 nt, Homo sapiens
  misc_RNA (1)...(19): siRNA sense strand
caacaacagggcuugauuc

SEQ ID NO: 1170769 - RNA, 19 nt, Homo sapiens
  misc_RNA (1)...(19): siRNA sense strand
aagcagcuguugauggaaa

SEQ ID NO: 1170770 - RNA, 19 nt, Homo sapiens
  misc_RNA (1)...(19): siRNA sense strand
cuacagugauacagggaaa

SEQ ID NO: 1170771 - RNA, 19 nt, Homo sapiens
  misc_RNA (1)...(19): siRNA sense strand
caucgaacaagaaauaaga

SEQ ID NO: 1170772 - RNA, 19 nt, Homo sapiens
  misc_RNA (1)...(19): siRNA sense strand
gcugaaacacagaauauag

SEQ ID NO: 1170773 - RNA, 19 nt, Homo sapiens
  misc_RNA (1)...(19): siRNA sense strand
gggaaacuaaguccagaaa

SEQ ID NO: 1170774 - RNA, 19 nt, Homo sapiens
  misc_RNA (1)...(19): siRNA sense strand
ugcaaugccuaucaacaaa

SEQ ID NO: 1170775 - RNA, 19 nt, Homo sapiens
  misc_RNA (1)...(19): siRNA sense strand
guguggaaauugauaacaa

SEQ ID NO: 1170776 - RNA, 19 nt, Homo sapiens
  misc_RNA (1)...(19): siRNA sense strand
uaaacccaaugaaggaguu

SEQ ID NO: 1170777 - RNA, 19 nt, Homo sapiens
  misc_RNA (1)...(19): siRNA sense strand
uugcugaaauggaugguuu

SEQ ID NO: 1170778 - RNA, 19 nt, Homo sapiens
  misc_RNA (1)...(19): siRNA sense strand
cuaagggacucauaugaac

SEQ ID NO: 1170779 - RNA, 19 nt, Homo sapiens
  misc_RNA (1)...(19): siRNA sense strand
ggcgaaugcuccuuguguu

SEQ ID NO: 1170780 - RNA, 19 nt, Homo sapiens
  misc_RNA (1)...(19): siRNA sense strand
gagcaaaacauaucuugaa

SEQ ID NO: 1170781 - RNA, 19 nt, Homo sapiens
  misc_RNA (1)...(19): siRNA sense strand
cggcauuuauggacuucua

SEQ ID NO: 1170782 - RNA, 19 nt, Homo sapiens
  misc_RNA (1)...(19): siRNA sense strand
uggagaaucuugugaacca

SEQ ID NO: 1170783 - RNA, 19 nt, Homo sapiens
  misc_RNA (1)...(19): siRNA sense strand
acagauugaucagcuggua

SEQ ID NO: 1170784 - RNA, 19 nt, Homo sapiens
  misc_RNA (1)...(19): siRNA sense strand
aaucuccaaugcauccaua

SEQ ID NO: 1170785 - RNA, 19 nt, Homo sapiens
  misc_RNA (1)...(19): siRNA sense strand
gagccagccguaucagaaa

SEQ ID NO: 1170786 - RNA, 19 nt, Homo sapiens
  misc_RNA (1)...(19): siRNA sense strand
ugccaucgaacaagaaaua

SEQ ID NO: 1170787 - RNA, 19 nt, Homo sapiens
  misc_RNA (1)...(19): siRNA sense strand
ugaaucuggucaugccauu

SEQ ID NO: 1170788 - RNA, 19 nt, Homo sapiens
  misc_RNA (1)...(19): siRNA sense strand
uagcugaaacacagaauau

SEQ ID NO: 1170789 - RNA, 19 nt, Homo sapiens
  misc_RNA (1)...(19): siRNA sense strand
gugaaaagcuuggaguuau

SEQ ID NO: 1170790 - RNA, 19 nt, Homo sapiens
  misc_RNA (1)...(19): siRNA sense strand
uggcagaggagcuuauauu

SEQ ID NO: 1170791 - RNA, 19 nt, Homo sapiens
  misc_RNA (1)...(19): siRNA sense strand
acaaaaccaucacagcaua

SEQ ID NO: 1170792 - RNA, 19 nt, Homo sapiens
  misc_RNA (1)...(19): siRNA sense strand
aaaagcagcuguugaugga

SEQ ID NO: 1170793 - RNA, 19 nt, Homo sapiens
  misc_RNA (1)...(19): siRNA sense strand
ugaaccaggcugcauuaaa

SEQ ID NO: 1170794 - RNA, 19 nt, Homo sapiens
  misc_RNA (1)...(19): siRNA sense strand
aaaggucgaacagaaauuu

SEQ ID NO: 1170795 - RNA, 19 nt, Homo sapiens
  misc_RNA (1)...(19): siRNA sense strand
gagguaaacuuccaaaagg

SEQ ID NO: 1170796 - RNA, 19 nt, Homo sapiens
  misc_RNA (1)...(19): siRNA sense strand
aaucugccaucgaacaaga

SEQ ID NO: 1170797 - RNA, 19 nt, Homo sapiens
  misc_RNA (1)...(19): siRNA sense strand
ucgagguacuguuggcuuu

SEQ ID NO: 1170798 - RNA, 19 nt, Homo sapiens
  misc_RNA (1)...(19): siRNA sense strand
aauaggagccacaaacuuc

SEQ ID NO: 1170799 - RNA, 19 nt, Homo sapiens
  misc_RNA (1)...(19): siRNA sense strand
caucaaugccuuccauaca

SEQ ID NO: 1170800 - RNA, 19 nt, Homo sapiens
  misc_RNA (1)...(19): siRNA sense strand
uccgagagauuagcugaaa

SEQ ID NO: 1170801 - RNA, 19 nt, Homo sapiens
  misc_RNA (1)...(19): siRNA sense strand
ggaaccgaccauauuacaa

SEQ ID NO: 1170802 - RNA, 19 nt, Homo sapiens
  misc_RNA (1)...(19): siRNA sense strand
cacagcauaucaugaaucu

SEQ ID NO: 1170803 - RNA, 19 nt, Homo sapiens
  misc_RNA (1)...(19): siRNA sense strand
ugaaagaagaaguguggaa

SEQ ID NO: 1170804 - RNA, 19 nt, Homo sapiens
  misc_RNA (1)...(19): siRNA sense strand
ucccagaggcauuagauaa

SEQ ID NO: 1170805 - RNA, 19 nt, Homo sapiens
  misc_RNA (1)...(19): siRNA sense strand
gcuccuuguguuauauuua

SEQ ID NO: 1170806 - RNA, 19 nt, Homo sapiens
  misc_RNA (1)...(19): siRNA sense strand
caagaugcauuuaaaacug

SEQ ID NO: 1170807 - RNA, 19 nt, Homo sapiens
  misc_RNA (1)...(19): siRNA sense strand
gaaguuguugaauucuuga

SEQ ID NO: 1170808 - RNA, 19 nt, Homo sapiens
  misc_RNA (1)...(19): siRNA sense strand
ucuaagggacucauaugaa

SEQ ID NO: 1170809 - RNA, 19 nt, Homo sapiens
  misc_RNA (1)...(19): siRNA sense strand
aacccaaucugccaucgaa

SEQ ID NO: 1170810 - RNA, 19 nt, Homo sapiens
  misc_RNA (1)...(19): siRNA sense strand
gaaucuggucaugccauua

SEQ ID NO: 1170811 - RNA, 19 nt, Homo sapiens
  misc_RNA (1)...(19): siRNA sense strand
uguaaaaggucgaacagaa

SEQ ID NO: 1170812 - RNA, 19 nt, Homo sapiens
  misc_RNA (1)...(19): siRNA sense strand
ugacaugcaaguuacaguu

SEQ ID NO: 1170813 - RNA, 19 nt, Homo sapiens
  misc_RNA (1)...(19): siRNA sense strand
agaauuacaggaaguuguu

SEQ ID NO: 1170814 - RNA, 19 nt, Homo sapiens
  misc_RNA (1)...(19): siRNA sense strand
gaaaaucuacuuccuggau

SEQ ID NO: 1170815 - RNA, 19 nt, Homo sapiens
  misc_RNA (1)...(19): siRNA sense strand
gauaaugccacuaaaauag

SEQ ID NO: 1170816 - RNA, 19 nt, Homo sapiens
  misc_RNA (1)...(19): siRNA sense strand
ucaguggagugucaguuuc

SEQ ID NO: 1170817 - RNA, 19 nt, Homo sapiens
  misc_RNA (1)...(19): siRNA sense strand
aaagaugcaaugccuauca

SEQ ID NO: 1170818 - RNA, 19 nt, Homo sapiens
  misc_RNA (1)...(19): siRNA sense strand
gaucagauguugagaguuu

SEQ ID NO: 1170819 - RNA, 19 nt, Homo sapiens
  misc_RNA (1)...(19): siRNA sense strand
caacaaagcuacaaucaug

SEQ ID NO: 1170820 - RNA, 19 nt, Homo sapiens
  misc_RNA (1)...(19): siRNA sense strand
ggaggaagcuaaacaagaa

SEQ ID NO: 1170821 - RNA, 19 nt, Homo sapiens
  misc_RNA (1)...(19): siRNA sense strand
gaagaaguguggaaauuga

SEQ ID NO: 1170822 - RNA, 19 nt, Homo sapiens
  misc_RNA (1)...(19): siRNA sense strand
gcacaauccuucuuugaaa

SEQ ID NO: 1170823 - RNA, 19 nt, Homo sapiens
  misc_RNA (1)...(19): siRNA sense strand
gaaauuauagcucgaggua

SEQ ID NO: 1170824 - RNA, 19 nt, Homo sapiens
  misc_RNA (1)...(19): siRNA sense strand
guuaugaccuacagugaua

SEQ ID NO: 1170825 - RNA, 19 nt, Homo sapiens
  misc_RNA (1)...(19): siRNA sense strand
gaaccaggcugcauuaaaa

SEQ ID NO: 1170826 - RNA, 19 nt, Homo sapiens
  misc_RNA (1)...(19): siRNA sense strand
ucaccaagaugcauuuaaa

SEQ ID NO: 1170827 - RNA, 19 nt, Homo sapiens
  misc_RNA (1)...(19): siRNA sense strand
gagcagaguuggagaaucu

SEQ ID NO: 1170828 - RNA, 19 nt, Homo sapiens
  misc_RNA (1)...(19): siRNA sense strand
ggaaguuguugaauucuug

SEQ ID NO: 1170829 - RNA, 19 nt, Homo sapiens
  misc_RNA (1)...(19): siRNA sense strand
gaaugcuccuuguguuaua

SEQ ID NO: 1170830 - RNA, 19 nt, Homo sapiens
  misc_RNA (1)...(19): siRNA sense strand
gaccauaaaucaacuucuu

SEQ ID NO: 1170831 - RNA, 19 nt, Homo sapiens
  misc_RNA (1)...(19): siRNA sense strand
ggacagaggaucagauguu

SEQ ID NO: 1170832 - RNA, 19 nt, Homo sapiens
  misc_RNA (1)...(19): siRNA sense strand
cagaggagcuuauauuugg

SEQ ID NO: 1170833 - RNA, 19 nt, Homo sapiens
  misc_RNA (1)...(19): siRNA sense strand
guucagaucuucaguacug

SEQ ID NO: 1170834 - RNA, 19 nt, Homo sapiens
  misc_RNA (1)...(19): siRNA sense strand
gaaagaagaaguguggaaa

SEQ ID NO: 1170835 - RNA, 19 nt, Homo sapiens
  misc_RNA (1)...(19): siRNA sense strand
acaaauggauguuaguaug

SEQ ID NO: 1170836 - RNA, 19 nt, Homo sapiens
  misc_RNA (1)...(19): siRNA sense strand
cgaauuugaugagauguuu

SEQ ID NO: 1170837 - RNA, 19 nt, Homo sapiens
  misc_RNA (1)...(19): siRNA sense strand
gcagaggagcuuauauuug

SEQ ID NO: 1170838 - RNA, 19 nt, Homo sapiens
  misc_RNA (1)...(19): siRNA sense strand
gcacaaauggauguuagua

SEQ ID NO: 1170839 - RNA, 19 nt, Homo sapiens
  misc_RNA (1)...(19): siRNA sense strand
ggaagcuaaacaagaauua

SEQ ID NO: 1170840 - RNA, 19 nt, Homo sapiens
  misc_RNA (1)...(19): siRNA sense strand
aagaagaaguguggaaauu

SEQ ID NO: 1170841 - RNA, 19 nt, Homo sapiens
  misc_RNA (1)...(19): siRNA sense strand
caacaggugcuuccaguga

SEQ ID NO: 1170842 - RNA, 19 nt, Homo sapiens
  misc_RNA (1)...(19): siRNA sense strand
aaugacagauggaaugaaa

SEQ ID NO: 1170843 - RNA, 19 nt, Homo sapiens
  misc_RNA (1)...(19): siRNA sense strand
acaggaaguuguugaauuc

SEQ ID NO: 1170844 - RNA, 19 nt, Homo sapiens
  misc_RNA (1)...(19): siRNA sense strand
gcgaaugcuccuuguguua

SEQ ID NO: 1170845 - RNA, 19 nt, Homo sapiens
  misc_RNA (1)...(19): siRNA sense strand
gaacccgucugauucucuu

SEQ ID NO: 1170846 - RNA, 19 nt, Homo sapiens
  misc_RNA (1)...(19): siRNA sense strand
gaaacuaaguccagaaacc

SEQ ID NO: 1170847 - RNA, 19 nt, Homo sapiens
  misc_RNA (1)...(19): siRNA sense strand
gagaaugacagauggaaug

SEQ ID NO: 1170848 - RNA, 19 nt, Homo sapiens
  misc_RNA (1)...(19): siRNA sense strand
aaacauuucuucccauugg

SEQ ID NO: 1170849 - RNA, 19 nt, Homo sapiens
  misc_RNA (1)...(19): siRNA sense strand
caaggcagaccauaaauca

SEQ ID NO: 1170850 - RNA, 19 nt, Homo sapiens
  misc_RNA (1)...(19): siRNA sense strand
uacaggaaguuguugaauu

SEQ ID NO: 1170851 - RNA, 19 nt, Homo sapiens
  misc_RNA (1)...(19): siRNA sense strand
gacagaggaucagauguug

SEQ ID NO: 1170852 - RNA, 19 nt, Homo sapiens
  misc_RNA (1)...(19): siRNA sense strand
gaaguguggaaauugauaa

SEQ ID NO: 1170853 - RNA, 19 nt, Homo sapiens
  misc_RNA (1)...(19): siRNA sense strand
caucacagcauaucaugaa

SEQ ID NO: 1170854 - RNA, 19 nt, Homo sapiens
  misc_RNA (1)...(19): siRNA sense strand
gagaagcugauguuccuuu

SEQ ID NO: 1170855 - RNA, 19 nt, Homo sapiens
  misc_RNA (1)...(19): siRNA sense strand
guacauuacguuccucuug

SEQ ID NO: 1170856 - RNA, 19 nt, Homo sapiens
  misc_RNA (1)...(19): siRNA sense strand
guaucgacaucauucaaga

SEQ ID NO: 1170857 - RNA, 19 nt, Homo sapiens
  misc_RNA (1)...(19): siRNA sense strand
gaacaagaaauaagaaucc

SEQ ID NO: 1170858 - RNA, 19 nt, Homo sapiens
  misc_RNA (1)...(19): siRNA sense strand
ggagccagccguaucagaa

SEQ ID NO: 1170859 - RNA, 19 nt, Homo sapiens
  misc_RNA (1)...(19): siRNA sense strand
gcucaagcacucacacaaa

SEQ ID NO: 1170860 - RNA, 19 nt, Homo sapiens
  misc_RNA (1)...(19): siRNA sense strand
gauccgaauuugaugagau

SEQ ID NO: 1170861 - RNA, 19 nt, Homo sapiens
  misc_RNA (1)...(19): siRNA sense strand
gaaccgaccauauuacaac

SEQ ID NO: 1170862 - RNA, 19 nt, Homo sapiens
  misc_RNA (1)...(19): siRNA sense strand
ugaaggagcuggaguuuuc

SEQ ID NO: 1170863 - RNA, 19 nt, Homo sapiens
  misc_RNA (1)...(19): siRNA sense strand
gggagaagcugauguuccu

SEQ ID NO: 1170864 - RNA, 19 nt, Homo sapiens
  misc_RNA (1)...(19): siRNA sense strand
ggcagaggagcuuauauuu

SEQ ID NO: 1170865 - RNA, 19 nt, Homo sapiens
  misc_RNA (1)...(19): siRNA sense strand
aaacuucccagaggcauua

SEQ ID NO: 1170866 - RNA, 19 nt, Homo sapiens
  misc_RNA (1)...(19): siRNA sense strand
gaccuuggauuaucugaac

SEQ ID NO: 1170867 - RNA, 19 nt, Homo sapiens
  misc_RNA (1)...(19): siRNA sense strand
cagauggaaugaaacuaga

SEQ ID NO: 1170868 - RNA, 19 nt, Homo sapiens
  misc_RNA (1)...(19): siRNA sense strand
caacaacagggcuugauuc

SEQ ID NO: 1170869 - RNA, 19 nt, Homo sapiens
  misc_RNA (1)...(19): siRNA sense strand
aagcagcuguugauggaaa

SEQ ID NO: 1170870 - RNA, 19 nt, Homo sapiens
  misc_RNA (1)...(19): siRNA sense strand
cuacagugauacagggaaa

SEQ ID NO: 1170871 - RNA, 19 nt, Homo sapiens
  misc_RNA (1)...(19): siRNA sense strand
caucgaacaagaaauaaga

SEQ ID NO: 1170872 - RNA, 19 nt, Homo sapiens
  misc_RNA (1)...(19): siRNA sense strand
gcugaaacacagaauauag

SEQ ID NO: 1170873 - RNA, 19 nt, Homo sapiens
  misc_RNA (1)...(19): siRNA sense strand
gggaaacuaaguccagaaa

SEQ ID NO: 1170874 - RNA, 19 nt, Homo sapiens
  misc_RNA (1)...(19): siRNA sense strand
ugcaaugccuaucaacaaa

SEQ ID NO: 1170875 - RNA, 19 nt, Homo sapiens
  misc_RNA (1)...(19): siRNA sense strand
guguggaaauugauaacaa

SEQ ID NO: 1170876 - RNA, 19 nt, Homo sapiens
  misc_RNA (1)...(19): siRNA sense strand
uaaacccaaugaaggaguu

SEQ ID NO: 1170877 - RNA, 19 nt, Homo sapiens
  misc_RNA (1)...(19): siRNA sense strand
uugcugaaauggaugguuu

SEQ ID NO: 1170878 - RNA, 19 nt, Homo sapiens
  misc_RNA (1)...(19): siRNA sense strand
cuaagggacucauaugaac

SEQ ID NO: 1170879 - RNA, 19 nt, Homo sapiens
  misc_RNA (1)...(19): siRNA sense strand
ggcgaaugcuccuuguguu

SEQ ID NO: 1170880 - RNA, 19 nt, Homo sapiens
  misc_RNA (1)...(19): siRNA sense strand
gagcaaaacauaucuugaa

SEQ ID NO: 1170881 - RNA, 19 nt, Homo sapiens
  misc_RNA (1)...(19): siRNA sense strand
cggcauuuauggacuucua

SEQ ID NO: 1170882 - RNA, 19 nt, Homo sapiens
  misc_RNA (1)...(19): siRNA sense strand
uggagaaucuugugaacca

SEQ ID NO: 1170883 - RNA, 19 nt, Homo sapiens
  misc_RNA (1)...(19): siRNA sense strand
acagauugaucagcuggua

SEQ ID NO: 1170884 - RNA, 19 nt, Homo sapiens
  misc_RNA (1)...(19): siRNA sense strand
aaucuccaaugcauccaua

SEQ ID NO: 1170885 - RNA, 19 nt, Homo sapiens
  misc_RNA (1)...(19): siRNA sense strand
gagccagccguaucagaaa

SEQ ID NO: 1170886 - RNA, 19 nt, Homo sapiens
  misc_RNA (1)...(19): siRNA sense strand
ugccaucgaacaagaaaua

SEQ ID NO: 1170887 - RNA, 19 nt, Homo sapiens
  misc_RNA (1)...(19): siRNA sense strand
ugaaucuggucaugccauu

SEQ ID NO: 1170888 - RNA, 19 nt, Homo sapiens
  misc_RNA (1)...(19): siRNA sense strand
uagcugaaacacagaauau

SEQ ID NO: 1170889 - RNA, 19 nt, Homo sapiens
  misc_RNA (1)...(19): siRNA sense strand
gugaaaagcuuggaguuau

SEQ ID NO: 1170890 - RNA, 19 nt, Homo sapiens
  misc_RNA (1)...(19): siRNA sense strand
uggcagaggagcuuauauu

SEQ ID NO: 1170891 - RNA, 19 nt, Homo sapiens
  misc_RNA (1)...(19): siRNA sense strand
acaaaaccaucacagcaua

SEQ ID NO: 1170892 - RNA, 19 nt, Homo sapiens
  misc_RNA (1)...(19): siRNA sense strand
aaaagcagcuguugaugga

SEQ ID NO: 1170893 - RNA, 19 nt, Homo sapiens
  misc_RNA (1)...(19): siRNA sense strand
ugaaccaggcugcauuaaa

SEQ ID NO: 1170894 - RNA, 19 nt, Homo sapiens
  misc_RNA (1)...(19): siRNA sense strand
aaaggucgaacagaaauuu

SEQ ID NO: 1170895 - RNA, 19 nt, Homo sapiens
  misc_RNA (1)...(19): siRNA sense strand
gagguaaacuuccaaaagg

SEQ ID NO: 1170896 - RNA, 19 nt, Homo sapiens
  misc_RNA (1)...(19): siRNA sense strand
aaucugccaucgaacaaga

SEQ ID NO: 1170897 - RNA, 19 nt, Homo sapiens
  misc_RNA (1)...(19): siRNA sense strand
ucgagguacuguuggcuuu

SEQ ID NO: 1170898 - RNA, 19 nt, Homo sapiens
  misc_RNA (1)...(19): siRNA sense strand
aauaggagccacaaacuuc

SEQ ID NO: 1170899 - RNA, 19 nt, Homo sapiens
  misc_RNA (1)...(19): siRNA sense strand
caucaaugccuuccauaca

SEQ ID NO: 1170900 - RNA, 19 nt, Homo sapiens
  misc_RNA (1)...(19): siRNA sense strand
uccgagagauuagcugaaa

SEQ ID NO: 1170901 - RNA, 19 nt, Homo sapiens
  misc_RNA (1)...(19): siRNA sense strand
ggaaccgaccauauuacaa

SEQ ID NO: 1170902 - RNA, 19 nt, Homo sapiens
  misc_RNA (1)...(19): siRNA sense strand
cacagcauaucaugaaucu

SEQ ID NO: 1170903 - RNA, 19 nt, Homo sapiens
  misc_RNA (1)...(19): siRNA sense strand
ugaaagaagaaguguggaa

SEQ ID NO: 1170904 - RNA, 19 nt, Homo sapiens
  misc_RNA (1)...(19): siRNA sense strand
ucccagaggcauuagauaa

SEQ ID NO: 1170905 - RNA, 19 nt, Homo sapiens
  misc_RNA (1)...(19): siRNA sense strand
gcuccuuguguuauauuua

SEQ ID NO: 1170906 - RNA, 19 nt, Homo sapiens
  misc_RNA (1)...(19): siRNA sense strand
caagaugcauuuaaaacug

SEQ ID NO: 1170907 - RNA, 19 nt, Homo sapiens
  misc_RNA (1)...(19): siRNA sense strand
gaaguuguugaauucuuga

SEQ ID NO: 1170908 - RNA, 19 nt, Homo sapiens
  misc_RNA (1)...(19): siRNA sense strand
ucuaagggacucauaugaa

SEQ ID NO: 1170909 - RNA, 19 nt, Homo sapiens
  misc_RNA (1)...(19): siRNA sense strand
aacccaaucugccaucgaa

SEQ ID NO: 1170910 - RNA, 19 nt, Homo sapiens
  misc_RNA (1)...(19): siRNA sense strand
gaaucuggucaugccauua

SEQ ID NO: 1170911 - RNA, 19 nt, Homo sapiens
  misc_RNA (1)...(19): siRNA sense strand
uguaaaaggucgaacagaa

SEQ ID NO: 1170912 - RNA, 19 nt, Homo sapiens
  misc_RNA (1)...(19): siRNA sense strand
ugacaugcaaguuacaguu

SEQ ID NO: 1170913 - RNA, 19 nt, Homo sapiens
  misc_RNA (1)...(19): siRNA sense strand
agaauuacaggaaguuguu

SEQ ID NO: 1170914 - RNA, 19 nt, Homo sapiens
  misc_RNA (1)...(19): siRNA sense strand
gaaaaucuacuuccuggau

SEQ ID NO: 1170915 - RNA, 19 nt, Homo sapiens
  misc_RNA (1)...(19): siRNA sense strand
gauaaugccacuaaaauag

SEQ ID NO: 1170916 - RNA, 19 nt, Homo sapiens
  misc_RNA (1)...(19): siRNA sense strand
ucaguggagugucaguuuc

SEQ ID NO: 1170917 - RNA, 19 nt, Homo sapiens
  misc_RNA (1)...(19): siRNA sense strand
aaagaugcaaugccuauca

SEQ ID NO: 1170918 - RNA, 19 nt, Homo sapiens
  misc_RNA (1)...(19): siRNA sense strand
gaucagauguugagaguuu

SEQ ID NO: 1170919 - RNA, 19 nt, Homo sapiens
  misc_RNA (1)...(19): siRNA sense strand
caacaaagcuacaaucaug

SEQ ID NO: 1170920 - RNA, 19 nt, Homo sapiens
  misc_RNA (1)...(19): siRNA sense strand
ggaggaagcuaaacaagaa

SEQ ID NO: 1170921 - RNA, 19 nt, Homo sapiens
  misc_RNA (1)...(19): siRNA sense strand
gaagaaguguggaaauuga

SEQ ID NO: 1170922 - RNA, 19 nt, Homo sapiens
  misc_RNA (1)...(19): siRNA sense strand
gcacaauccuucuuugaaa

SEQ ID NO: 1170923 - RNA, 19 nt, Homo sapiens
  misc_RNA (1)...(19): siRNA sense strand
gaaauuauagcucgaggua

SEQ ID NO: 1170924 - RNA, 19 nt, Homo sapiens
  misc_RNA (1)...(19): siRNA sense strand
guuaugaccuacagugaua

SEQ ID NO: 1170925 - RNA, 19 nt, Homo sapiens
  misc_RNA (1)...(19): siRNA sense strand
gaaccaggcugcauuaaaa

SEQ ID NO: 1170926 - RNA, 19 nt, Homo sapiens
  misc_RNA (1)...(19): siRNA sense strand
ucaccaagaugcauuuaaa

SEQ ID NO: 1170927 - RNA, 19 nt, Homo sapiens
  misc_RNA (1)...(19): siRNA sense strand
gagcagaguuggagaaucu

SEQ ID NO: 1170928 - RNA, 19 nt, Homo sapiens
  misc_RNA (1)...(19): siRNA sense strand
ggaaguuguugaauucuug

SEQ ID NO: 1170929 - RNA, 19 nt, Homo sapiens
  misc_RNA (1)...(19): siRNA sense strand
gaaugcuccuuguguuaua

SEQ ID NO: 1170930 - RNA, 19 nt, Homo sapiens
  misc_RNA (1)...(19): siRNA sense strand
gaccauaaaucaacuucuu

SEQ ID NO: 1170931 - RNA, 19 nt, Homo sapiens
  misc_RNA (1)...(19): siRNA sense strand
ggacagaggaucagauguu

SEQ ID NO: 1170932 - RNA, 19 nt, Homo sapiens
  misc_RNA (1)...(19): siRNA sense strand
cagaggagcuuauauuugg

SEQ ID NO: 1170933 - RNA, 19 nt, Homo sapiens
  misc_RNA (1)...(19): siRNA sense strand
guucagaucuucaguacug

SEQ ID NO: 1170934 - RNA, 19 nt, Homo sapiens
  misc_RNA (1)...(19): siRNA sense strand
gaaagaagaaguguggaaa

SEQ ID NO: 1170935 - RNA, 19 nt, Homo sapiens
  misc_RNA (1)...(19): siRNA sense strand
acaaauggauguuaguaug

SEQ ID NO: 1170936 - RNA, 19 nt, Homo sapiens
  misc_RNA (1)...(19): siRNA sense strand
cgaauuugaugagauguuu

SEQ ID NO: 1170937 - RNA, 19 nt, Homo sapiens
  misc_RNA (1)...(19): siRNA sense strand
gcagaggagcuuauauuug

SEQ ID NO: 1170938 - RNA, 19 nt, Homo sapiens
  misc_RNA (1)...(19): siRNA sense strand
gcacaaauggauguuagua

SEQ ID NO: 1170939 - RNA, 19 nt, Homo sapiens
  misc_RNA (1)...(19): siRNA sense strand
ggaagcuaaacaagaauua

SEQ ID NO: 1170940 - RNA, 19 nt, Homo sapiens
  misc_RNA (1)...(19): siRNA sense strand
aagaagaaguguggaaauu

SEQ ID NO: 1170941 - RNA, 19 nt, Homo sapiens
  misc_RNA (1)...(19): siRNA sense strand
caacaggugcuuccaguga

SEQ ID NO: 1170942 - RNA, 19 nt, Homo sapiens
  misc_RNA (1)...(19): siRNA sense strand
aaugacagauggaaugaaa

SEQ ID NO: 1170943 - RNA, 19 nt, Homo sapiens
  misc_RNA (1)...(19): siRNA sense strand
acaggaaguuguugaauuc

SEQ ID NO: 1170944 - RNA, 19 nt, Homo sapiens
  misc_RNA (1)...(19): siRNA sense strand
gcgaaugcuccuuguguua

SEQ ID NO: 1170945 - RNA, 19 nt, Homo sapiens
  misc_RNA (1)...(19): siRNA sense strand
gaacccgucugauucucuu

SEQ ID NO: 1170946 - RNA, 19 nt, Homo sapiens
  misc_RNA (1)...(19): siRNA sense strand
gaaacuaaguccagaaacc

SEQ ID NO: 1170947 - RNA, 19 nt, Homo sapiens
  misc_RNA (1)...(19): siRNA sense strand
gagaaugacagauggaaug

SEQ ID NO: 1170948 - RNA, 19 nt, Homo sapiens
  misc_RNA (1)...(19): siRNA sense strand
aaacauuucuucccauugg

SEQ ID NO: 1170949 - RNA, 19 nt, Homo sapiens
  misc_RNA (1)...(19): siRNA sense strand
caaggcagaccauaaauca

SEQ ID NO: 1170950 - RNA, 19 nt, Homo sapiens
  misc_RNA (1)...(19): siRNA sense strand
uacaggaaguuguugaauu

SEQ ID NO: 1170951 - RNA, 19 nt, Homo sapiens
  misc_RNA (1)...(19): siRNA sense strand
gacagaggaucagauguug

SEQ ID NO: 1170952 - RNA, 19 nt, Homo sapiens
  misc_RNA (1)...(19): siRNA sense strand
gaaguguggaaauugauaa

SEQ ID NO: 1170953 - RNA, 19 nt, Homo sapiens
  misc_RNA (1)...(19): siRNA sense strand
caucacagcauaucaugaa

SEQ ID NO: 1170954 - RNA, 19 nt, Homo sapiens
  misc_RNA (1)...(19): siRNA sense strand
gagaagcugauguuccuuu

SEQ ID NO: 1170955 - RNA, 19 nt, Homo sapiens
  misc_RNA (1)...(19): siRNA sense strand
guacauuacguuccucuug

SEQ ID NO: 1170956 - RNA, 19 nt, Homo sapiens
  misc_RNA (1)...(19): siRNA sense strand
guaucgacaucauucaaga

SEQ ID NO: 1170957 - RNA, 19 nt, Homo sapiens
  misc_RNA (1)...(19): siRNA sense strand
gaacaagaaauaagaaucc

SEQ ID NO: 1170958 - RNA, 19 nt, Homo sapiens
  misc_RNA (1)...(19): siRNA sense strand
ggagccagccguaucagaa

SEQ ID NO: 1170959 - RNA, 19 nt, Homo sapiens
  misc_RNA (1)...(19): siRNA sense strand
gcucaagcacucacacaaa

SEQ ID NO: 1170960 - RNA, 19 nt, Homo sapiens
  misc_RNA (1)...(19): siRNA sense strand
gauccgaauuugaugagau

SEQ ID NO: 1170961 - RNA, 19 nt, Homo sapiens
  misc_RNA (1)...(19): siRNA sense strand
gaaccgaccauauuacaac

SEQ ID NO: 1170962 - RNA, 19 nt, Homo sapiens
  misc_RNA (1)...(19): siRNA sense strand
ugaaggagcuggaguuuuc

SEQ ID NO: 1170963 - RNA, 19 nt, Homo sapiens
  misc_RNA (1)...(19): siRNA sense strand
gggagaagcugauguuccu

SEQ ID NO: 1170964 - RNA, 19 nt, Homo sapiens
  misc_RNA (1)...(19): siRNA sense strand
ggcagaggagcuuauauuu

SEQ ID NO: 1170965 - RNA, 19 nt, Homo sapiens
  misc_RNA (1)...(19): siRNA sense strand
aaacuucccagaggcauua

SEQ ID NO: 1170966 - RNA, 19 nt, Homo sapiens
  misc_RNA (1)...(19): siRNA sense strand
gaccuuggauuaucugaac

SEQ ID NO: 1170967 - RNA, 19 nt, Homo sapiens
  misc_RNA (1)...(19): siRNA sense strand
cagauggaaugaaacuaga

SEQ ID NO: 1170968 - RNA, 19 nt, Homo sapiens
  misc_RNA (1)...(19): siRNA sense strand
caacaacagggcuugauuc

SEQ ID NO: 1170969 - RNA, 19 nt, Homo sapiens
  misc_RNA (1)...(19): siRNA sense strand
aagcagcuguugauggaaa

SEQ ID NO: 1170970 - RNA, 19 nt, Homo sapiens
  misc_RNA (1)...(19): siRNA sense strand
cuacagugauacagggaaa

SEQ ID NO: 1170971 - RNA, 19 nt, Homo sapiens
  misc_RNA (1)...(19): siRNA sense strand
caucgaacaagaaauaaga

SEQ ID NO: 1170972 - RNA, 19 nt, Homo sapiens
  misc_RNA (1)...(19): siRNA sense strand
gcugaaacacagaauauag

SEQ ID NO: 1170973 - RNA, 19 nt, Homo sapiens
  misc_RNA (1)...(19): siRNA sense strand
gggaaacuaaguccagaaa

SEQ ID NO: 1170974 - RNA, 19 nt, Homo sapiens
  misc_RNA (1)...(19): siRNA sense strand
ugcaaugccuaucaacaaa

SEQ ID NO: 1170975 - RNA, 19 nt, Homo sapiens
  misc_RNA (1)...(19): siRNA sense strand
guguggaaauugauaacaa

SEQ ID NO: 1170976 - RNA, 19 nt, Homo sapiens
  misc_RNA (1)...(19): siRNA sense strand
uaaacccaaugaaggaguu

SEQ ID NO: 1170977 - RNA, 19 nt, Homo sapiens
  misc_RNA (1)...(19): siRNA sense strand
uugcugaaauggaugguuu

SEQ ID NO: 1170978 - RNA, 19 nt, Homo sapiens
  misc_RNA (1)...(19): siRNA sense strand
cuaagggacucauaugaac

SEQ ID NO: 1170979 - RNA, 19 nt, Homo sapiens
  misc_RNA (1)...(19): siRNA sense strand
ggcgaaugcuccuuguguu

SEQ ID NO: 1170980 - RNA, 19 nt, Homo sapiens
  misc_RNA (1)...(19): siRNA sense strand
gagcaaaacauaucuugaa

SEQ ID NO: 1170981 - RNA, 19 nt, Homo sapiens
  misc_RNA (1)...(19): siRNA sense strand
cggcauuuauggacuucua

SEQ ID NO: 1170982 - RNA, 19 nt, Homo sapiens
  misc_RNA (1)...(19): siRNA sense strand
uggagaaucuugugaacca

SEQ ID NO: 1170983 - RNA, 19 nt, Homo sapiens
  misc_RNA (1)...(19): siRNA sense strand
acagauugaucagcuggua

SEQ ID NO: 1170984 - RNA, 19 nt, Homo sapiens
  misc_RNA (1)...(19): siRNA sense strand
aaucuccaaugcauccaua

SEQ ID NO: 1170985 - RNA, 19 nt, Homo sapiens
  misc_RNA (1)...(19): siRNA sense strand
gagccagccguaucagaaa

SEQ ID NO: 1170986 - RNA, 19 nt, Homo sapiens
  misc_RNA (1)...(19): siRNA sense strand
ugccaucgaacaagaaaua

SEQ ID NO: 1170987 - RNA, 19 nt, Homo sapiens
  misc_RNA (1)...(19): siRNA sense strand
ugaaucuggucaugccauu

SEQ ID NO: 1170988 - RNA, 19 nt, Homo sapiens
  misc_RNA (1)...(19): siRNA sense strand
uagcugaaacacagaauau

SEQ ID NO: 1170989 - RNA, 19 nt, Homo sapiens
  misc_RNA (1)...(19): siRNA sense strand
gugaaaagcuuggaguuau

SEQ ID NO: 1170990 - RNA, 19 nt, Homo sapiens
  misc_RNA (1)...(19): siRNA sense strand
uggcagaggagcuuauauu

SEQ ID NO: 1170991 - RNA, 19 nt, Homo sapiens
  misc_RNA (1)...(19): siRNA sense strand
acaaaaccaucacagcaua

SEQ ID NO: 1170992 - RNA, 19 nt, Homo sapiens
  misc_RNA (1)...(19): siRNA sense strand
aaaagcagcuguugaugga

SEQ ID NO: 1170993 - RNA, 19 nt, Homo sapiens
  misc_RNA (1)...(19): siRNA sense strand
ugaaccaggcugcauuaaa

SEQ ID NO: 1170994 - RNA, 19 nt, Homo sapiens
  misc_RNA (1)...(19): siRNA sense strand
aaaggucgaacagaaauuu

SEQ ID NO: 1170995 - RNA, 19 nt, Homo sapiens
  misc_RNA (1)...(19): siRNA sense strand
gagguaaacuuccaaaagg

SEQ ID NO: 1170996 - RNA, 19 nt, Homo sapiens
  misc_RNA (1)...(19): siRNA sense strand
aaucugccaucgaacaaga

SEQ ID NO: 1170997 - RNA, 19 nt, Homo sapiens
  misc_RNA (1)...(19): siRNA sense strand
ucgagguacuguuggcuuu

SEQ ID NO: 1170998 - RNA, 19 nt, Homo sapiens
  misc_RNA (1)...(19): siRNA sense strand
aauaggagccacaaacuuc

SEQ ID NO: 1170999 - RNA, 19 nt, Homo sapiens
  misc_RNA (1)...(19): siRNA sense strand
caucaaugccuuccauaca

SEQ ID NO: 1171000 - RNA, 19 nt, Homo sapiens
  misc_RNA (1)...(19): siRNA sense strand
uccgagagauuagcugaaa

SEQ ID NO: 1171001 - RNA, 19 nt, Homo sapiens
  misc_RNA (1)...(19): siRNA sense strand
ggaaccgaccauauuacaa

SEQ ID NO: 1171002 - RNA, 19 nt, Homo sapiens
  misc_RNA (1)...(19): siRNA sense strand
cacagcauaucaugaaucu

SEQ ID NO: 1171003 - RNA, 19 nt, Homo sapiens
  misc_RNA (1)...(19): siRNA sense strand
ugaaagaagaaguguggaa

SEQ ID NO: 1171004 - RNA, 19 nt, Homo sapiens
  misc_RNA (1)...(19): siRNA sense strand
ucccagaggcauuagauaa

SEQ ID NO: 1171005 - RNA, 19 nt, Homo sapiens
  misc_RNA (1)...(19): siRNA sense strand
gcuccuuguguuauauuua

SEQ ID NO: 1171006 - RNA, 19 nt, Homo sapiens
  misc_RNA (1)...(19): siRNA sense strand
caagaugcauuuaaaacug

SEQ ID NO: 1171007 - RNA, 19 nt, Homo sapiens
  misc_RNA (1)...(19): siRNA sense strand
gaaguuguugaauucuuga

SEQ ID NO: 1171008 - RNA, 19 nt, Homo sapiens
  misc_RNA (1)...(19): siRNA sense strand
ucuaagggacucauaugaa

SEQ ID NO: 1171009 - RNA, 19 nt, Homo sapiens
  misc_RNA (1)...(19): siRNA sense strand
aacccaaucugccaucgaa

SEQ ID NO: 1171010 - RNA, 19 nt, Homo sapiens
  misc_RNA (1)...(19): siRNA sense strand
gaaucuggucaugccauua

SEQ ID NO: 1171011 - RNA, 19 nt, Homo sapiens
  misc_RNA (1)...(19): siRNA sense strand
uguaaaaggucgaacagaa

SEQ ID NO: 1171012 - RNA, 19 nt, Homo sapiens
  misc_RNA (1)...(19): siRNA sense strand
ugacaugcaaguuacaguu

SEQ ID NO: 1171013 - RNA, 19 nt, Homo sapiens
  misc_RNA (1)...(19): siRNA sense strand
agaauuacaggaaguuguu

SEQ ID NO: 1171014 - RNA, 19 nt, Homo sapiens
  misc_RNA (1)...(19): siRNA sense strand
gaaaaucuacuuccuggau

SEQ ID NO: 1171015 - RNA, 19 nt, Homo sapiens
  misc_RNA (1)...(19): siRNA sense strand
gauaaugccacuaaaauag

SEQ ID NO: 1171016 - RNA, 19 nt, Homo sapiens
  misc_RNA (1)...(19): siRNA sense strand
ucaguggagugucaguuuc

SEQ ID NO: 1171017 - RNA, 19 nt, Homo sapiens
  misc_RNA (1)...(19): siRNA sense strand
aaagaugcaaugccuauca

SEQ ID NO: 1171018 - RNA, 19 nt, Homo sapiens
  misc_RNA (1)...(19): siRNA sense strand
gaucagauguugagaguuu

SEQ ID NO: 1171019 - RNA, 19 nt, Homo sapiens
  misc_RNA (1)...(19): siRNA sense strand
caacaaagcuacaaucaug

SEQ ID NO: 1171020 - RNA, 19 nt, Homo sapiens
  misc_RNA (1)...(19): siRNA sense strand
ggaggaagcuaaacaagaa

SEQ ID NO: 1171021 - RNA, 19 nt, Homo sapiens
  misc_RNA (1)...(19): siRNA sense strand
gaagaaguguggaaauuga

SEQ ID NO: 1171022 - RNA, 19 nt, Homo sapiens
  misc_RNA (1)...(19): siRNA sense strand
gcacaauccuucuuugaaa

SEQ ID NO: 1171023 - RNA, 19 nt, Homo sapiens
  misc_RNA (1)...(19): siRNA sense strand
gaaauuauagcucgaggua

SEQ ID NO: 1171024 - RNA, 19 nt, Homo sapiens
  misc_RNA (1)...(19): siRNA sense strand
guuaugaccuacagugaua

SEQ ID NO: 1171025 - RNA, 19 nt, Homo sapiens
  misc_RNA (1)...(19): siRNA sense strand
gaaccaggcugcauuaaaa

SEQ ID NO: 1171026 - RNA, 19 nt, Homo sapiens
  misc_RNA (1)...(19): siRNA sense strand
ucaccaagaugcauuuaaa

SEQ ID NO: 1171027 - RNA, 19 nt, Homo sapiens
  misc_RNA (1)...(19): siRNA sense strand
gagcagaguuggagaaucu

SEQ ID NO: 1171028 - RNA, 19 nt, Homo sapiens
  misc_RNA (1)...(19): siRNA sense strand
ggaaguuguugaauucuug

SEQ ID NO: 1171029 - RNA, 19 nt, Homo sapiens
  misc_RNA (1)...(19): siRNA sense strand
gaaugcuccuuguguuaua

SEQ ID NO: 1171030 - RNA, 19 nt, Homo sapiens
  misc_RNA (1)...(19): siRNA sense strand
gaccauaaaucaacuucuu

SEQ ID NO: 1171031 - RNA, 19 nt, Homo sapiens
  misc_RNA (1)...(19): siRNA sense strand
ggacagaggaucagauguu

SEQ ID NO: 1171032 - RNA, 19 nt, Homo sapiens
  misc_RNA (1)...(19): siRNA sense strand
cagaggagcuuauauuugg

SEQ ID NO: 1171033 - RNA, 19 nt, Homo sapiens
  misc_RNA (1)...(19): siRNA sense strand
guucagaucuucaguacug

SEQ ID NO: 1171034 - RNA, 19 nt, Homo sapiens
  misc_RNA (1)...(19): siRNA sense strand
gaaagaagaaguguggaaa

SEQ ID NO: 1171035 - RNA, 19 nt, Homo sapiens
  misc_RNA (1)...(19): siRNA sense strand
acaaauggauguuaguaug

SEQ ID NO: 1171036 - RNA, 19 nt, Homo sapiens
  misc_RNA (1)...(19): siRNA sense strand
cgaauuugaugagauguuu

SEQ ID NO: 1171037 - RNA, 19 nt, Homo sapiens
  misc_RNA (1)...(19): siRNA sense strand
gcagaggagcuuauauuug

SEQ ID NO: 1171038 - RNA, 19 nt, Homo sapiens
  misc_RNA (1)...(19): siRNA sense strand
gcacaaauggauguuagua

SEQ ID NO: 1171039 - RNA, 19 nt, Homo sapiens
  misc_RNA (1)...(19): siRNA sense strand
ggaagcuaaacaagaauua

SEQ ID NO: 1171040 - RNA, 19 nt, Homo sapiens
  misc_RNA (1)...(19): siRNA sense strand
aagaagaaguguggaaauu

SEQ ID NO: 1171041 - RNA, 19 nt, Homo sapiens
  misc_RNA (1)...(19): siRNA sense strand
caacaggugcuuccaguga

SEQ ID NO: 1171042 - RNA, 19 nt, Homo sapiens
  misc_RNA (1)...(19): siRNA sense strand
aaugacagauggaaugaaa

SEQ ID NO: 1171043 - RNA, 19 nt, Homo sapiens
  misc_RNA (1)...(19): siRNA sense strand
acaggaaguuguugaauuc

SEQ ID NO: 1171044 - RNA, 19 nt, Homo sapiens
  misc_RNA (1)...(19): siRNA sense strand
gcgaaugcuccuuguguua

SEQ ID NO: 1171045 - RNA, 19 nt, Homo sapiens
  misc_RNA (1)...(19): siRNA sense strand
gaacccgucugauucucuu

SEQ ID NO: 1171046 - RNA, 19 nt, Homo sapiens
  misc_RNA (1)...(19): siRNA sense strand
gaaacuaaguccagaaacc

SEQ ID NO: 1171047 - RNA, 19 nt, Homo sapiens
  misc_RNA (1)...(19): siRNA sense strand
gagaaugacagauggaaug

SEQ ID NO: 1171048 - RNA, 19 nt, Homo sapiens
  misc_RNA (1)...(19): siRNA sense strand
aaacauuucuucccauugg

SEQ ID NO: 1171049 - RNA, 19 nt, Homo sapiens
  misc_RNA (1)...(19): siRNA sense strand
caaggcagaccauaaauca

SEQ ID NO: 1171050 - RNA, 19 nt, Homo sapiens
  misc_RNA (1)...(19): siRNA sense strand
uacaggaaguuguugaauu

SEQ ID NO: 1171051 - RNA, 19 nt, Homo sapiens
  misc_RNA (1)...(19): siRNA sense strand
gacagaggaucagauguug

SEQ ID NO: 1171052 - RNA, 19 nt, Homo sapiens
  misc_RNA (1)...(19): siRNA sense strand
gaaguguggaaauugauaa

SEQ ID NO: 1171053 - RNA, 19 nt, Homo sapiens
  misc_RNA (1)...(19): siRNA sense strand
caucacagcauaucaugaa

SEQ ID NO: 1171054 - RNA, 19 nt, Homo sapiens
  misc_RNA (1)...(19): siRNA sense strand
gagaagcugauguuccuuu

SEQ ID NO: 1171055 - RNA, 19 nt, Homo sapiens
  misc_RNA (1)...(19): siRNA sense strand
guacauuacguuccucuug

SEQ ID NO: 1171056 - RNA, 19 nt, Homo sapiens
  misc_RNA (1)...(19): siRNA sense strand
guaucgacaucauucaaga

SEQ ID NO: 1171057 - RNA, 19 nt, Homo sapiens
  misc_RNA (1)...(19): siRNA sense strand
gaacaagaaauaagaaucc

SEQ ID NO: 1171058 - RNA, 19 nt, Homo sapiens
  misc_RNA (1)...(19): siRNA sense strand
ggagccagccguaucagaa

SEQ ID NO: 1171059 - RNA, 19 nt, Homo sapiens
  misc_RNA (1)...(19): siRNA sense strand
gcucaagcacucacacaaa

SEQ ID NO: 1171060 - RNA, 19 nt, Homo sapiens
  misc_RNA (1)...(19): siRNA sense strand
gauccgaauuugaugagau

SEQ ID NO: 1171061 - RNA, 19 nt, Homo sapiens
  misc_RNA (1)...(19): siRNA sense strand
gaaccgaccauauuacaac

SEQ ID NO: 1171062 - RNA, 19 nt, Homo sapiens
  misc_RNA (1)...(19): siRNA sense strand
ugaaggagcuggaguuuuc

SEQ ID NO: 1171063 - RNA, 19 nt, Homo sapiens
  misc_RNA (1)...(19): siRNA sense strand
gggagaagcugauguuccu

SEQ ID NO: 1171064 - RNA, 19 nt, Homo sapiens
  misc_RNA (1)...(19): siRNA sense strand
ggcagaggagcuuauauuu

SEQ ID NO: 1171065 - RNA, 19 nt, Homo sapiens
  misc_RNA (1)...(19): siRNA sense strand
aaacuucccagaggcauua

SEQ ID NO: 1171066 - RNA, 19 nt, Homo sapiens
  misc_RNA (1)...(19): siRNA sense strand
gaccuuggauuaucugaac

SEQ ID NO: 1171067 - RNA, 19 nt, Homo sapiens
  misc_RNA (1)...(19): siRNA sense strand
cagauggaaugaaacuaga

SEQ ID NO: 1171068 - RNA, 19 nt, Homo sapiens
  misc_RNA (1)...(19): siRNA sense strand
caacaacagggcuugauuc

SEQ ID NO: 1171069 - RNA, 19 nt, Homo sapiens
  misc_RNA (1)...(19): siRNA sense strand
aagcagcuguugauggaaa

SEQ ID NO: 1171070 - RNA, 19 nt, Homo sapiens
  misc_RNA (1)...(19): siRNA sense strand
cuacagugauacagggaaa

SEQ ID NO: 1171071 - RNA, 19 nt, Homo sapiens
  misc_RNA (1)...(19): siRNA sense strand
caucgaacaagaaauaaga

SEQ ID NO: 1171072 - RNA, 19 nt, Homo sapiens
  misc_RNA (1)...(19): siRNA sense strand
gcugaaacacagaauauag

SEQ ID NO: 1171073 - RNA, 19 nt, Homo sapiens
  misc_RNA (1)...(19): siRNA sense strand
gggaaacuaaguccagaaa

SEQ ID NO: 1171074 - RNA, 19 nt, Homo sapiens
  misc_RNA (1)...(19): siRNA sense strand
ugcaaugccuaucaacaaa

SEQ ID NO: 1171075 - RNA, 19 nt, Homo sapiens
  misc_RNA (1)...(19): siRNA sense strand
guguggaaauugauaacaa

SEQ ID NO: 1171076 - RNA, 19 nt, Homo sapiens
  misc_RNA (1)...(19): siRNA sense strand
uaaacccaaugaaggaguu

SEQ ID NO: 1171077 - RNA, 19 nt, Homo sapiens
  misc_RNA (1)...(19): siRNA sense strand
uugcugaaauggaugguuu

SEQ ID NO: 1171078 - RNA, 19 nt, Homo sapiens
  misc_RNA (1)...(19): siRNA sense strand
cuaagggacucauaugaac

SEQ ID NO: 1171079 - RNA, 19 nt, Homo sapiens
  misc_RNA (1)...(19): siRNA sense strand
ggcgaaugcuccuuguguu

SEQ ID NO: 1171080 - RNA, 19 nt, Homo sapiens
  misc_RNA (1)...(19): siRNA sense strand
gagcaaaacauaucuugaa

SEQ ID NO: 1171081 - RNA, 19 nt, Homo sapiens
  misc_RNA (1)...(19): siRNA sense strand
cggcauuuauggacuucua

SEQ ID NO: 1171082 - RNA, 19 nt, Homo sapiens
  misc_RNA (1)...(19): siRNA sense strand
uggagaaucuugugaacca

SEQ ID NO: 1171083 - RNA, 19 nt, Homo sapiens
  misc_RNA (1)...(19): siRNA sense strand
acagauugaucagcuggua

SEQ ID NO: 1171084 - RNA, 19 nt, Homo sapiens
  misc_RNA (1)...(19): siRNA sense strand
aaucuccaaugcauccaua

SEQ ID NO: 1171085 - RNA, 19 nt, Homo sapiens
  misc_RNA (1)...(19): siRNA sense strand
gagccagccguaucagaaa

SEQ ID NO: 1171086 - RNA, 19 nt, Homo sapiens
  misc_RNA (1)...(19): siRNA sense strand
ugccaucgaacaagaaaua

SEQ ID NO: 1171087 - RNA, 19 nt, Homo sapiens
  misc_RNA (1)...(19): siRNA sense strand
ugaaucuggucaugccauu

SEQ ID NO: 1171088 - RNA, 19 nt, Homo sapiens
  misc_RNA (1)...(19): siRNA sense strand
uagcugaaacacagaauau

SEQ ID NO: 1171089 - RNA, 19 nt, Homo sapiens
  misc_RNA (1)...(19): siRNA sense strand
gugaaaagcuuggaguuau

SEQ ID NO: 1171090 - RNA, 19 nt, Homo sapiens
  misc_RNA (1)...(19): siRNA sense strand
uggcagaggagcuuauauu

SEQ ID NO: 1171091 - RNA, 19 nt, Homo sapiens
  misc_RNA (1)...(19): siRNA sense strand
acaaaaccaucacagcaua

SEQ ID NO: 1171092 - RNA, 19 nt, Homo sapiens
  misc_RNA (1)...(19): siRNA sense strand
aaaagcagcuguugaugga

SEQ ID NO: 1171093 - RNA, 19 nt, Homo sapiens
  misc_RNA (1)...(19): siRNA sense strand
ugaaccaggcugcauuaaa

SEQ ID NO: 1171094 - RNA, 19 nt, Homo sapiens
  misc_RNA (1)...(19): siRNA sense strand
aaaggucgaacagaaauuu

SEQ ID NO: 1171095 - RNA, 19 nt, Homo sapiens
  misc_RNA (1)...(19): siRNA sense strand
gagguaaacuuccaaaagg

SEQ ID NO: 1171096 - RNA, 19 nt, Homo sapiens
  misc_RNA (1)...(19): siRNA sense strand
aaucugccaucgaacaaga

SEQ ID NO: 1171097 - RNA, 19 nt, Homo sapiens
  misc_RNA (1)...(19): siRNA sense strand
ucgagguacuguuggcuuu

SEQ ID NO: 1171098 - RNA, 19 nt, Homo sapiens
  misc_RNA (1)...(19): siRNA sense strand
aauaggagccacaaacuuc

SEQ ID NO: 1171099 - RNA, 19 nt, Homo sapiens
  misc_RNA (1)...(19): siRNA sense strand
caucaaugccuuccauaca

SEQ ID NO: 1171100 - RNA, 19 nt, Homo sapiens
  misc_RNA (1)...(19): siRNA sense strand
uccgagagauuagcugaaa

SEQ ID NO: 1171101 - RNA, 19 nt, Homo sapiens
  misc_RNA (1)...(19): siRNA sense strand
ggaaccgaccauauuacaa

SEQ ID NO: 1171102 - RNA, 19 nt, Homo sapiens
  misc_RNA (1)...(19): siRNA sense strand
cacagcauaucaugaaucu

SEQ ID NO: 1171103 - RNA, 19 nt, Homo sapiens
  misc_RNA (1)...(19): siRNA sense strand
ugaaagaagaaguguggaa

SEQ ID NO: 1171104 - RNA, 19 nt, Homo sapiens
  misc_RNA (1)...(19): siRNA sense strand
ucccagaggcauuagauaa

SEQ ID NO: 1171105 - RNA, 19 nt, Homo sapiens
  misc_RNA (1)...(19): siRNA sense strand
gcuccuuguguuauauuua

SEQ ID NO: 1171106 - RNA, 19 nt, Homo sapiens
  misc_RNA (1)...(19): siRNA sense strand
caagaugcauuuaaaacug

SEQ ID NO: 1171107 - RNA, 19 nt, Homo sapiens
  misc_RNA (1)...(19): siRNA sense strand
gaaguuguugaauucuuga

SEQ ID NO: 1171108 - RNA, 19 nt, Homo sapiens
  misc_RNA (1)...(19): siRNA sense strand
ucuaagggacucauaugaa

SEQ ID NO: 1171109 - RNA, 19 nt, Homo sapiens
  misc_RNA (1)...(19): siRNA sense strand
aacccaaucugccaucgaa

SEQ ID NO: 1171110 - RNA, 19 nt, Homo sapiens
  misc_RNA (1)...(19): siRNA sense strand
gaaucuggucaugccauua

SEQ ID NO: 1171111 - RNA, 19 nt, Homo sapiens
  misc_RNA (1)...(19): siRNA sense strand
uguaaaaggucgaacagaa

SEQ ID NO: 1171112 - RNA, 19 nt, Homo sapiens
  misc_RNA (1)...(19): siRNA sense strand
ugacaugcaaguuacaguu

SEQ ID NO: 1171113 - RNA, 19 nt, Homo sapiens
  misc_RNA (1)...(19): siRNA sense strand
agaauuacaggaaguuguu

SEQ ID NO: 1171114 - RNA, 19 nt, Homo sapiens
  misc_RNA (1)...(19): siRNA sense strand
gaaaaucuacuuccuggau

SEQ ID NO: 1171115 - RNA, 19 nt, Homo sapiens
  misc_RNA (1)...(19): siRNA sense strand
gauaaugccacuaaaauag

SEQ ID NO: 1171116 - RNA, 19 nt, Homo sapiens
  misc_RNA (1)...(19): siRNA sense strand
ucaguggagugucaguuuc

SEQ ID NO: 1171117 - RNA, 19 nt, Homo sapiens
  misc_RNA (1)...(19): siRNA sense strand
aaagaugcaaugccuauca

SEQ ID NO: 1171118 - RNA, 19 nt, Homo sapiens
  misc_RNA (1)...(19): siRNA sense strand
gaucagauguugagaguuu

SEQ ID NO: 1171119 - RNA, 19 nt, Homo sapiens
  misc_RNA (1)...(19): siRNA sense strand
caacaaagcuacaaucaug

SEQ ID NO: 1171120 - RNA, 19 nt, Homo sapiens
  misc_RNA (1)...(19): siRNA sense strand
ggaggaagcuaaacaagaa

SEQ ID NO: 1171121 - RNA, 19 nt, Homo sapiens
  misc_RNA (1)...(19): siRNA sense strand
gaagaaguguggaaauuga

SEQ ID NO: 1171122 - RNA, 19 nt, Homo sapiens
  misc_RNA (1)...(19): siRNA sense strand
gcacaauccuucuuugaaa

SEQ ID NO: 1171123 - RNA, 19 nt, Homo sapiens
  misc_RNA (1)...(19): siRNA sense strand
gaaauuauagcucgaggua

SEQ ID NO: 1171124 - RNA, 19 nt, Homo sapiens
  misc_RNA (1)...(19): siRNA sense strand
guuaugaccuacagugaua

SEQ ID NO: 1171125 - RNA, 19 nt, Homo sapiens
  misc_RNA (1)...(19): siRNA sense strand
gaaccaggcugcauuaaaa

SEQ ID NO: 1171126 - RNA, 19 nt, Homo sapiens
  misc_RNA (1)...(19): siRNA sense strand
ucaccaagaugcauuuaaa

SEQ ID NO: 1171127 - RNA, 19 nt, Homo sapiens
  misc_RNA (1)...(19): siRNA sense strand
gagcagaguuggagaaucu

SEQ ID NO: 1171128 - RNA, 19 nt, Homo sapiens
  misc_RNA (1)...(19): siRNA sense strand
ggaaguuguugaauucuug

SEQ ID NO: 1171129 - RNA, 19 nt, Homo sapiens
  misc_RNA (1)...(19): siRNA sense strand
gaaugcuccuuguguuaua

SEQ ID NO: 1171130 - RNA, 19 nt, Homo sapiens
  misc_RNA (1)...(19): siRNA sense strand
gaccauaaaucaacuucuu

SEQ ID NO: 1171131 - RNA, 19 nt, Homo sapiens
  misc_RNA (1)...(19): siRNA sense strand
ggacagaggaucagauguu

SEQ ID NO: 1171132 - RNA, 19 nt, Homo sapiens
  misc_RNA (1)...(19): siRNA sense strand
cagaggagcuuauauuugg

SEQ ID NO: 1171133 - RNA, 19 nt, Homo sapiens
  misc_RNA (1)...(19): siRNA sense strand
guucagaucuucaguacug

SEQ ID NO: 1171134 - RNA, 19 nt, Homo sapiens
  misc_RNA (1)...(19): siRNA sense strand
gaaagaagaaguguggaaa

SEQ ID NO: 1171135 - RNA, 19 nt, Homo sapiens
  misc_RNA (1)...(19): siRNA sense strand
acaaauggauguuaguaug

SEQ ID NO: 1171136 - RNA, 19 nt, Homo sapiens
  misc_RNA (1)...(19): siRNA sense strand
cgaauuugaugagauguuu

SEQ ID NO: 1171137 - RNA, 19 nt, Homo sapiens
  misc_RNA (1)...(19): siRNA sense strand
gcagaggagcuuauauuug

SEQ ID NO: 1171138 - RNA, 19 nt, Homo sapiens
  misc_RNA (1)...(19): siRNA sense strand
gcacaaauggauguuagua

SEQ ID NO: 1171139 - RNA, 19 nt, Homo sapiens
  misc_RNA (1)...(19): siRNA sense strand
ggaagcuaaacaagaauua

SEQ ID NO: 1171140 - RNA, 19 nt, Homo sapiens
  misc_RNA (1)...(19): siRNA sense strand
aagaagaaguguggaaauu

SEQ ID NO: 1171141 - RNA, 19 nt, Homo sapiens
  misc_RNA (1)...(19): siRNA sense strand
caacaggugcuuccaguga

SEQ ID NO: 1171142 - RNA, 19 nt, Homo sapiens
  misc_RNA (1)...(19): siRNA sense strand
aaugacagauggaaugaaa

SEQ ID NO: 1171143 - RNA, 19 nt, Homo sapiens
  misc_RNA (1)...(19): siRNA sense strand
acaggaaguuguugaauuc

SEQ ID NO: 1171144 - RNA, 19 nt, Homo sapiens
  misc_RNA (1)...(19): siRNA sense strand
gcgaaugcuccuuguguua

SEQ ID NO: 1171145 - RNA, 19 nt, Homo sapiens
  misc_RNA (1)...(19): siRNA sense strand
gaacccgucugauucucuu

SEQ ID NO: 1171146 - RNA, 19 nt, Homo sapiens
  misc_RNA (1)...(19): siRNA sense strand
gaaacuaaguccagaaacc

SEQ ID NO: 1171147 - RNA, 19 nt, Homo sapiens
  misc_RNA (1)...(19): siRNA sense strand
gagaaugacagauggaaug

SEQ ID NO: 1171148 - RNA, 19 nt, Homo sapiens
  misc_RNA (1)...(19): siRNA sense strand
aaacauuucuucccauugg

SEQ ID NO: 1171149 - RNA, 19 nt, Homo sapiens
  misc_RNA (1)...(19): siRNA sense strand
caaggcagaccauaaauca

SEQ ID NO: 1171150 - RNA, 19 nt, Homo sapiens
  misc_RNA (1)...(19): siRNA sense strand
uacaggaaguuguugaauu

SEQ ID NO: 1171151 - RNA, 19 nt, Homo sapiens
  misc_RNA (1)...(19): siRNA sense strand
gacagaggaucagauguug

SEQ ID NO: 1171152 - RNA, 19 nt, Homo sapiens
  misc_RNA (1)...(19): siRNA sense strand
gaaguguggaaauugauaa

SEQ ID NO: 1171153 - RNA, 19 nt, Homo sapiens
  misc_RNA (1)...(19): siRNA sense strand
caucacagcauaucaugaa

SEQ ID NO: 1171154 - RNA, 19 nt, Homo sapiens
  misc_RNA (1)...(19): siRNA sense strand
gagaagcugauguuccuuu

SEQ ID NO: 1171155 - RNA, 19 nt, Homo sapiens
  misc_RNA (1)...(19): siRNA sense strand
guacauuacguuccucuug

SEQ ID NO: 1171156 - RNA, 19 nt, Homo sapiens
  misc_RNA (1)...(19): siRNA sense strand
guaucgacaucauucaaga

SEQ ID NO: 1171157 - RNA, 19 nt, Homo sapiens
  misc_RNA (1)...(19): siRNA sense strand
gaacaagaaauaagaaucc

SEQ ID NO: 1171158 - RNA, 19 nt, Homo sapiens
  misc_RNA (1)...(19): siRNA sense strand
ggagccagccguaucagaa

SEQ ID NO: 1171159 - RNA, 19 nt, Homo sapiens
  misc_RNA (1)...(19): siRNA sense strand
gcucaagcacucacacaaa

SEQ ID NO: 1171160 - RNA, 19 nt, Homo sapiens
  misc_RNA (1)...(19): siRNA sense strand
gauccgaauuugaugagau

SEQ ID NO: 1171161 - RNA, 19 nt, Homo sapiens
  misc_RNA (1)...(19): siRNA sense strand
gaaccgaccauauuacaac

SEQ ID NO: 1171162 - RNA, 19 nt, Homo sapiens
  misc_RNA (1)...(19): siRNA sense strand
ugaaggagcuggaguuuuc

SEQ ID NO: 1171163 - RNA, 19 nt, Homo sapiens
  misc_RNA (1)...(19): siRNA sense strand
gggagaagcugauguuccu

SEQ ID NO: 1171164 - RNA, 19 nt, Homo sapiens
  misc_RNA (1)...(19): siRNA sense strand
ggcagaggagcuuauauuu

SEQ ID NO: 1171165 - RNA, 19 nt, Homo sapiens
  misc_RNA (1)...(19): siRNA sense strand
aaacuucccagaggcauua

SEQ ID NO: 1171166 - RNA, 19 nt, Homo sapiens
  misc_RNA (1)...(19): siRNA sense strand
gaccuuggauuaucugaac

SEQ ID NO: 1171167 - RNA, 19 nt, Homo sapiens
  misc_RNA (1)...(19): siRNA sense strand
cagauggaaugaaacuaga

SEQ ID NO: 1171168 - RNA, 19 nt, Homo sapiens
  misc_RNA (1)...(19): siRNA sense strand
caacaacagggcuugauuc

SEQ ID NO: 1171169 - RNA, 19 nt, Homo sapiens
  misc_RNA (1)...(19): siRNA sense strand
aagcagcuguugauggaaa

SEQ ID NO: 1171170 - RNA, 19 nt, Homo sapiens
  misc_RNA (1)...(19): siRNA sense strand
cuacagugauacagggaaa

SEQ ID NO: 1171171 - RNA, 19 nt, Homo sapiens
  misc_RNA (1)...(19): siRNA sense strand
caucgaacaagaaauaaga

SEQ ID NO: 1171172 - RNA, 19 nt, Homo sapiens
  misc_RNA (1)...(19): siRNA sense strand
gcugaaacacagaauauag

SEQ ID NO: 1171173 - RNA, 19 nt, Homo sapiens
  misc_RNA (1)...(19): siRNA sense strand
gggaaacuaaguccagaaa

SEQ ID NO: 1171174 - RNA, 19 nt, Homo sapiens
  misc_RNA (1)...(19): siRNA sense strand
ugcaaugccuaucaacaaa

SEQ ID NO: 1171175 - RNA, 19 nt, Homo sapiens
  misc_RNA (1)...(19): siRNA sense strand
guguggaaauugauaacaa

SEQ ID NO: 1171176 - RNA, 19 nt, Homo sapiens
  misc_RNA (1)...(19): siRNA sense strand
uaaacccaaugaaggaguu

SEQ ID NO: 1171177 - RNA, 19 nt, Homo sapiens
  misc_RNA (1)...(19): siRNA sense strand
uugcugaaauggaugguuu

SEQ ID NO: 1171178 - RNA, 19 nt, Homo sapiens
  misc_RNA (1)...(19): siRNA sense strand
cuaagggacucauaugaac

SEQ ID NO: 1171179 - RNA, 19 nt, Homo sapiens
  misc_RNA (1)...(19): siRNA sense strand
ggcgaaugcuccuuguguu

SEQ ID NO: 1171180 - RNA, 19 nt, Homo sapiens
  misc_RNA (1)...(19): siRNA sense strand
gagcaaaacauaucuugaa

SEQ ID NO: 1171181 - RNA, 19 nt, Homo sapiens
  misc_RNA (1)...(19): siRNA sense strand
cggcauuuauggacuucua

SEQ ID NO: 1171182 - RNA, 19 nt, Homo sapiens
  misc_RNA (1)...(19): siRNA sense strand
uggagaaucuugugaacca

SEQ ID NO: 1171183 - RNA, 19 nt, Homo sapiens
  misc_RNA (1)...(19): siRNA sense strand
acagauugaucagcuggua

SEQ ID NO: 1171184 - RNA, 19 nt, Homo sapiens
  misc_RNA (1)...(19): siRNA sense strand
aaucuccaaugcauccaua

SEQ ID NO: 1171185 - RNA, 19 nt, Homo sapiens
  misc_RNA (1)...(19): siRNA sense strand
gagccagccguaucagaaa

SEQ ID NO: 1171186 - RNA, 19 nt, Homo sapiens
  misc_RNA (1)...(19): siRNA sense strand
ugccaucgaacaagaaaua

SEQ ID NO: 1171187 - RNA, 19 nt, Homo sapiens
  misc_RNA (1)...(19): siRNA sense strand
ugaaucuggucaugccauu

SEQ ID NO: 1171188 - RNA, 19 nt, Homo sapiens
  misc_RNA (1)...(19): siRNA sense strand
uagcugaaacacagaauau

SEQ ID NO: 1171189 - RNA, 19 nt, Homo sapiens
  misc_RNA (1)...(19): siRNA sense strand
gugaaaagcuuggaguuau

SEQ ID NO: 1171190 - RNA, 19 nt, Homo sapiens
  misc_RNA (1)...(19): siRNA sense strand
uggcagaggagcuuauauu

SEQ ID NO: 1171191 - RNA, 19 nt, Homo sapiens
  misc_RNA (1)...(19): siRNA sense strand
acaaaaccaucacagcaua

SEQ ID NO: 1171192 - RNA, 19 nt, Homo sapiens
  misc_RNA (1)...(19): siRNA sense strand
aaaagcagcuguugaugga

SEQ ID NO: 1171193 - RNA, 19 nt, Homo sapiens
  misc_RNA (1)...(19): siRNA sense strand
ugaaccaggcugcauuaaa

SEQ ID NO: 1171194 - RNA, 19 nt, Homo sapiens
  misc_RNA (1)...(19): siRNA sense strand
aaaggucgaacagaaauuu

SEQ ID NO: 1171195 - RNA, 19 nt, Homo sapiens
  misc_RNA (1)...(19): siRNA sense strand
gagguaaacuuccaaaagg

SEQ ID NO: 1171196 - RNA, 19 nt, Homo sapiens
  misc_RNA (1)...(19): siRNA sense strand
aaucugccaucgaacaaga

SEQ ID NO: 1171197 - RNA, 19 nt, Homo sapiens
  misc_RNA (1)...(19): siRNA sense strand
ucgagguacuguuggcuuu

SEQ ID NO: 1171198 - RNA, 19 nt, Homo sapiens
  misc_RNA (1)...(19): siRNA sense strand
aauaggagccacaaacuuc

SEQ ID NO: 1171199 - RNA, 19 nt, Homo sapiens
  misc_RNA (1)...(19): siRNA sense strand
caucaaugccuuccauaca

SEQ ID NO: 1171200 - RNA, 19 nt, Homo sapiens
  misc_RNA (1)...(19): siRNA sense strand
uccgagagauuagcugaaa

SEQ ID NO: 1171201 - RNA, 19 nt, Homo sapiens
  misc_RNA (1)...(19): siRNA sense strand
ggaaccgaccauauuacaa

SEQ ID NO: 1171202 - RNA, 19 nt, Homo sapiens
  misc_RNA (1)...(19): siRNA sense strand
cacagcauaucaugaaucu

SEQ ID NO: 1171203 - RNA, 19 nt, Homo sapiens
  misc_RNA (1)...(19): siRNA sense strand
ugaaagaagaaguguggaa

SEQ ID NO: 1171204 - RNA, 19 nt, Homo sapiens
  misc_RNA (1)...(19): siRNA sense strand
ucccagaggcauuagauaa

SEQ ID NO: 1171205 - RNA, 19 nt, Homo sapiens
  misc_RNA (1)...(19): siRNA sense strand
gcuccuuguguuauauuua

SEQ ID NO: 1171206 - RNA, 19 nt, Homo sapiens
  misc_RNA (1)...(19): siRNA sense strand
caagaugcauuuaaaacug

SEQ ID NO: 1171207 - RNA, 19 nt, Homo sapiens
  misc_RNA (1)...(19): siRNA sense strand
gaaguuguugaauucuuga

SEQ ID NO: 1171208 - RNA, 19 nt, Homo sapiens
  misc_RNA (1)...(19): siRNA sense strand
ucuaagggacucauaugaa

SEQ ID NO: 1171209 - RNA, 19 nt, Homo sapiens
  misc_RNA (1)...(19): siRNA sense strand
aacccaaucugccaucgaa

SEQ ID NO: 1171210 - RNA, 19 nt, Homo sapiens
  misc_RNA (1)...(19): siRNA sense strand
gaaucuggucaugccauua

SEQ ID NO: 1171211 - RNA, 19 nt, Homo sapiens
  misc_RNA (1)...(19): siRNA sense strand
uguaaaaggucgaacagaa

SEQ ID NO: 1171212 - RNA, 19 nt, Homo sapiens
  misc_RNA (1)...(19): siRNA sense strand
ugacaugcaaguuacaguu

SEQ ID NO: 1171213 - RNA, 19 nt, Homo sapiens
  misc_RNA (1)...(19): siRNA sense strand
agaauuacaggaaguuguu

SEQ ID NO: 1171214 - RNA, 19 nt, Homo sapiens
  misc_RNA (1)...(19): siRNA sense strand
gaaaaucuacuuccuggau

SEQ ID NO: 1171215 - RNA, 19 nt, Homo sapiens
  misc_RNA (1)...(19): siRNA sense strand
gauaaugccacuaaaauag

SEQ ID NO: 1171216 - RNA, 19 nt, Homo sapiens
  misc_RNA (1)...(19): siRNA sense strand
ucaguggagugucaguuuc

SEQ ID NO: 1171217 - RNA, 19 nt, Homo sapiens
  misc_RNA (1)...(19): siRNA sense strand
aaagaugcaaugccuauca

SEQ ID NO: 1171218 - RNA, 19 nt, Homo sapiens
  misc_RNA (1)...(19): siRNA sense strand
gaucagauguugagaguuu

SEQ ID NO: 1171219 - RNA, 19 nt, Homo sapiens
  misc_RNA (1)...(19): siRNA sense strand
caacaaagcuacaaucaug

SEQ ID NO: 1171220 - RNA, 19 nt, Homo sapiens
  misc_RNA (1)...(19): siRNA sense strand
ggaggaagcuaaacaagaa

SEQ ID NO: 1171221 - RNA, 19 nt, Homo sapiens
  misc_RNA (1)...(19): siRNA sense strand
gaagaaguguggaaauuga

SEQ ID NO: 1171222 - RNA, 19 nt, Homo sapiens
  misc_RNA (1)...(19): siRNA sense strand
gcacaauccuucuuugaaa

SEQ ID NO: 1171223 - RNA, 19 nt, Homo sapiens
  misc_RNA (1)...(19): siRNA sense strand
gaaauuauagcucgaggua

SEQ ID NO: 1171224 - RNA, 19 nt, Homo sapiens
  misc_RNA (1)...(19): siRNA sense strand
guuaugaccuacagugaua

SEQ ID NO: 1171225 - RNA, 19 nt, Homo sapiens
  misc_RNA (1)...(19): siRNA sense strand
gaaccaggcugcauuaaaa

SEQ ID NO: 1171226 - RNA, 19 nt, Homo sapiens
  misc_RNA (1)...(19): siRNA sense strand
ucaccaagaugcauuuaaa

SEQ ID NO: 1171227 - RNA, 19 nt, Homo sapiens
  misc_RNA (1)...(19): siRNA sense strand
gagcagaguuggagaaucu

SEQ ID NO: 1171228 - RNA, 19 nt, Homo sapiens
  misc_RNA (1)...(19): siRNA sense strand
ggaaguuguugaauucuug

SEQ ID NO: 1171229 - RNA, 19 nt, Homo sapiens
  misc_RNA (1)...(19): siRNA sense strand
gaaugcuccuuguguuaua

SEQ ID NO: 1171230 - RNA, 19 nt, Homo sapiens
  misc_RNA (1)...(19): siRNA sense strand
gaccauaaaucaacuucuu

SEQ ID NO: 1171231 - RNA, 19 nt, Homo sapiens
  misc_RNA (1)...(19): siRNA sense strand
ggacagaggaucagauguu

SEQ ID NO: 1171232 - RNA, 19 nt, Homo sapiens
  misc_RNA (1)...(19): siRNA sense strand
cagaggagcuuauauuugg

SEQ ID NO: 1171233 - RNA, 19 nt, Homo sapiens
  misc_RNA (1)...(19): siRNA sense strand
guucagaucuucaguacug

SEQ ID NO: 1171234 - RNA, 19 nt, Homo sapiens
  misc_RNA (1)...(19): siRNA sense strand
gaaagaagaaguguggaaa

SEQ ID NO: 1171235 - RNA, 19 nt, Homo sapiens
  misc_RNA (1)...(19): siRNA sense strand
acaaauggauguuaguaug

SEQ ID NO: 1171236 - RNA, 19 nt, Homo sapiens
  misc_RNA (1)...(19): siRNA sense strand
cgaauuugaugagauguuu

SEQ ID NO: 1171237 - RNA, 19 nt, Homo sapiens
  misc_RNA (1)...(19): siRNA sense strand
gcagaggagcuuauauuug

SEQ ID NO: 1171238 - RNA, 19 nt, Homo sapiens
  misc_RNA (1)...(19): siRNA sense strand
gcacaaauggauguuagua

SEQ ID NO: 1171239 - RNA, 19 nt, Homo sapiens
  misc_RNA (1)...(19): siRNA sense strand
ggaagcuaaacaagaauua

SEQ ID NO: 1171240 - RNA, 19 nt, Homo sapiens
  misc_RNA (1)...(19): siRNA sense strand
aagaagaaguguggaaauu

SEQ ID NO: 1171241 - RNA, 19 nt, Homo sapiens
  misc_RNA (1)...(19): siRNA sense strand
caacaggugcuuccaguga

SEQ ID NO: 1171242 - RNA, 19 nt, Homo sapiens
  misc_RNA (1)...(19): siRNA sense strand
aaugacagauggaaugaaa

SEQ ID NO: 1171243 - RNA, 19 nt, Homo sapiens
  misc_RNA (1)...(19): siRNA sense strand
acaggaaguuguugaauuc

SEQ ID NO: 1171244 - RNA, 19 nt, Homo sapiens
  misc_RNA (1)...(19): siRNA sense strand
gcgaaugcuccuuguguua

SEQ ID NO: 1171245 - RNA, 19 nt, Homo sapiens
  misc_RNA (1)...(19): siRNA sense strand
gaacccgucugauucucuu

SEQ ID NO: 1171246 - RNA, 19 nt, Homo sapiens
  misc_RNA (1)...(19): siRNA sense strand
gaaacuaaguccagaaacc

SEQ ID NO: 1171247 - RNA, 19 nt, Homo sapiens
  misc_RNA (1)...(19): siRNA sense strand
gagaaugacagauggaaug

SEQ ID NO: 1171248 - RNA, 19 nt, Homo sapiens
  misc_RNA (1)...(19): siRNA sense strand
aaacauuucuucccauugg

SEQ ID NO: 1171249 - RNA, 19 nt, Homo sapiens
  misc_RNA (1)...(19): siRNA sense strand
caaggcagaccauaaauca

SEQ ID NO: 1171250 - RNA, 19 nt, Homo sapiens
  misc_RNA (1)...(19): siRNA sense strand
uacaggaaguuguugaauu

SEQ ID NO: 1171251 - RNA, 19 nt, Homo sapiens
  misc_RNA (1)...(19): siRNA sense strand
gacagaggaucagauguug

SEQ ID NO: 1171252 - RNA, 19 nt, Homo sapiens
  misc_RNA (1)...(19): siRNA sense strand
gaaguguggaaauugauaa

SEQ ID NO: 1171253 - RNA, 19 nt, Homo sapiens
  misc_RNA (1)...(19): siRNA sense strand
caucacagcauaucaugaa

SEQ ID NO: 1171254 - RNA, 19 nt, Homo sapiens
  misc_RNA (1)...(19): siRNA sense strand
gagaagcugauguuccuuu

SEQ ID NO: 1171255 - RNA, 19 nt, Homo sapiens
  misc_RNA (1)...(19): siRNA sense strand
guacauuacguuccucuug

SEQ ID NO: 1171256 - RNA, 19 nt, Homo sapiens
  misc_RNA (1)...(19): siRNA sense strand
guaucgacaucauucaaga

SEQ ID NO: 1171257 - RNA, 19 nt, Homo sapiens
  misc_RNA (1)...(19): siRNA sense strand
gaacaagaaauaagaaucc

SEQ ID NO: 1171258 - RNA, 19 nt, Homo sapiens
  misc_RNA (1)...(19): siRNA sense strand
ggagccagccguaucagaa

SEQ ID NO: 1171259 - RNA, 19 nt, Homo sapiens
  misc_RNA (1)...(19): siRNA sense strand
gcucaagcacucacacaaa

SEQ ID NO: 1171260 - RNA, 19 nt, Homo sapiens
  misc_RNA (1)...(19): siRNA sense strand
gauccgaauuugaugagau

SEQ ID NO: 1171261 - RNA, 19 nt, Homo sapiens
  misc_RNA (1)...(19): siRNA sense strand
gaaccgaccauauuacaac

SEQ ID NO: 1171262 - RNA, 19 nt, Homo sapiens
  misc_RNA (1)...(19): siRNA sense strand
ugaaggagcuggaguuuuc

SEQ ID NO: 1171263 - RNA, 19 nt, Homo sapiens
  misc_RNA (1)...(19): siRNA sense strand
gggagaagcugauguuccu

SEQ ID NO: 1171264 - RNA, 19 nt, Homo sapiens
  misc_RNA (1)...(19): siRNA sense strand
ggcagaggagcuuauauuu

SEQ ID NO: 1171265 - RNA, 19 nt, Homo sapiens
  misc_RNA (1)...(19): siRNA sense strand
aaacuucccagaggcauua

SEQ ID NO: 1171266 - RNA, 19 nt, Homo sapiens
  misc_RNA (1)...(19): siRNA sense strand
gaccuuggauuaucugaac

SEQ ID NO: 1171267 - RNA, 19 nt, Homo sapiens
  misc_RNA (1)...(19): siRNA sense strand
cagauggaaugaaacuaga

SEQ ID NO: 1171268 - RNA, 19 nt, Homo sapiens
  misc_RNA (1)...(19): siRNA sense strand
caacaacagggcuugauuc

SEQ ID NO: 1171269 - RNA, 19 nt, Homo sapiens
  misc_RNA (1)...(19): siRNA sense strand
aagcagcuguugauggaaa

SEQ ID NO: 1171270 - RNA, 19 nt, Homo sapiens
  misc_RNA (1)...(19): siRNA sense strand
cuacagugauacagggaaa

SEQ ID NO: 1171271 - RNA, 19 nt, Homo sapiens
  misc_RNA (1)...(19): siRNA sense strand
caucgaacaagaaauaaga

SEQ ID NO: 1171272 - RNA, 19 nt, Homo sapiens
  misc_RNA (1)...(19): siRNA sense strand
gcugaaacacagaauauag

SEQ ID NO: 1171273 - RNA, 19 nt, Homo sapiens
  misc_RNA (1)...(19): siRNA sense strand
gggaaacuaaguccagaaa

SEQ ID NO: 1171274 - RNA, 19 nt, Homo sapiens
  misc_RNA (1)...(19): siRNA sense strand
ugcaaugccuaucaacaaa

SEQ ID NO: 1171275 - RNA, 19 nt, Homo sapiens
  misc_RNA (1)...(19): siRNA sense strand
guguggaaauugauaacaa

SEQ ID NO: 1171276 - RNA, 19 nt, Homo sapiens
  misc_RNA (1)...(19): siRNA sense strand
uaaacccaaugaaggaguu

SEQ ID NO: 1171277 - RNA, 19 nt, Homo sapiens
  misc_RNA (1)...(19): siRNA sense strand
uugcugaaauggaugguuu

SEQ ID NO: 1171278 - RNA, 19 nt, Homo sapiens
  misc_RNA (1)...(19): siRNA sense strand
cuaagggacucauaugaac

SEQ ID NO: 1171279 - RNA, 19 nt, Homo sapiens
  misc_RNA (1)...(19): siRNA sense strand
ggcgaaugcuccuuguguu

SEQ ID NO: 1171280 - RNA, 19 nt, Homo sapiens
  misc_RNA (1)...(19): siRNA sense strand
gagcaaaacauaucuugaa

SEQ ID NO: 1171281 - RNA, 19 nt, Homo sapiens
  misc_RNA (1)...(19): siRNA sense strand
cggcauuuauggacuucua

SEQ ID NO: 1171282 - RNA, 19 nt, Homo sapiens
  misc_RNA (1)...(19): siRNA sense strand
uggagaaucuugugaacca

SEQ ID NO: 1171283 - RNA, 19 nt, Homo sapiens
  misc_RNA (1)...(19): siRNA sense strand
acagauugaucagcuggua

SEQ ID NO: 1171284 - RNA, 19 nt, Homo sapiens
  misc_RNA (1)...(19): siRNA sense strand
aaucuccaaugcauccaua

SEQ ID NO: 1171285 - RNA, 19 nt, Homo sapiens
  misc_RNA (1)...(19): siRNA sense strand
gagccagccguaucagaaa

SEQ ID NO: 1171286 - RNA, 19 nt, Homo sapiens
  misc_RNA (1)...(19): siRNA sense strand
ugccaucgaacaagaaaua

SEQ ID NO: 1171287 - RNA, 19 nt, Homo sapiens
  misc_RNA (1)...(19): siRNA sense strand
ugaaucuggucaugccauu

SEQ ID NO: 1171288 - RNA, 19 nt, Homo sapiens
  misc_RNA (1)...(19): siRNA sense strand
uagcugaaacacagaauau

SEQ ID NO: 1171289 - RNA, 19 nt, Homo sapiens
  misc_RNA (1)...(19): siRNA sense strand
gugaaaagcuuggaguuau

SEQ ID NO: 1171290 - RNA, 19 nt, Homo sapiens
  misc_RNA (1)...(19): siRNA sense strand
uggcagaggagcuuauauu

SEQ ID NO: 1171291 - RNA, 19 nt, Homo sapiens
  misc_RNA (1)...(19): siRNA sense strand
acaaaaccaucacagcaua

SEQ ID NO: 1171292 - RNA, 19 nt, Homo sapiens
  misc_RNA (1)...(19): siRNA sense strand
aaaagcagcuguugaugga

SEQ ID NO: 1171293 - RNA, 19 nt, Homo sapiens
  misc_RNA (1)...(19): siRNA sense strand
ugaaccaggcugcauuaaa

SEQ ID NO: 1171294 - RNA, 19 nt, Homo sapiens
  misc_RNA (1)...(19): siRNA sense strand
aaaggucgaacagaaauuu

SEQ ID NO: 1171295 - RNA, 19 nt, Homo sapiens
  misc_RNA (1)...(19): siRNA sense strand
gagguaaacuuccaaaagg

SEQ ID NO: 1171296 - RNA, 19 nt, Homo sapiens
  misc_RNA (1)...(19): siRNA sense strand
aaucugccaucgaacaaga

SEQ ID NO: 1171297 - RNA, 19 nt, Homo sapiens
  misc_RNA (1)...(19): siRNA sense strand
ucgagguacuguuggcuuu

SEQ ID NO: 1171298 - RNA, 19 nt, Homo sapiens
  misc_RNA (1)...(19): siRNA sense strand
aauaggagccacaaacuuc

SEQ ID NO: 1171299 - RNA, 19 nt, Homo sapiens
  misc_RNA (1)...(19): siRNA sense strand
caucaaugccuuccauaca

SEQ ID NO: 1171300 - RNA, 19 nt, Homo sapiens
  misc_RNA (1)...(19): siRNA sense strand
uccgagagauuagcugaaa

SEQ ID NO: 1171301 - RNA, 19 nt, Homo sapiens
  misc_RNA (1)...(19): siRNA sense strand
ggaaccgaccauauuacaa

SEQ ID NO: 1171302 - RNA, 19 nt, Homo sapiens
  misc_RNA (1)...(19): siRNA sense strand
cacagcauaucaugaaucu

SEQ ID NO: 1171303 - RNA, 19 nt, Homo sapiens
  misc_RNA (1)...(19): siRNA sense strand
ugaaagaagaaguguggaa

SEQ ID NO: 1171304 - RNA, 19 nt, Homo sapiens
  misc_RNA (1)...(19): siRNA sense strand
ucccagaggcauuagauaa

SEQ ID NO: 1171305 - RNA, 19 nt, Homo sapiens
  misc_RNA (1)...(19): siRNA sense strand
gcuccuuguguuauauuua

SEQ ID NO: 1171306 - RNA, 19 nt, Homo sapiens
  misc_RNA (1)...(19): siRNA sense strand
caagaugcauuuaaaacug

SEQ ID NO: 1171307 - RNA, 19 nt, Homo sapiens
  misc_RNA (1)...(19): siRNA sense strand
gaaguuguugaauucuuga

SEQ ID NO: 1171308 - RNA, 19 nt, Homo sapiens
  misc_RNA (1)...(19): siRNA sense strand
ucuaagggacucauaugaa

SEQ ID NO: 1171309 - RNA, 19 nt, Homo sapiens
  misc_RNA (1)...(19): siRNA sense strand
aacccaaucugccaucgaa

SEQ ID NO: 1171310 - RNA, 19 nt, Homo sapiens
  misc_RNA (1)...(19): siRNA sense strand
gaaucuggucaugccauua

SEQ ID NO: 1171311 - RNA, 19 nt, Homo sapiens
  misc_RNA (1)...(19): siRNA sense strand
uguaaaaggucgaacagaa

SEQ ID NO: 1171312 - RNA, 19 nt, Homo sapiens
  misc_RNA (1)...(19): siRNA sense strand
ugacaugcaaguuacaguu

SEQ ID NO: 1171313 - RNA, 19 nt, Homo sapiens
  misc_RNA (1)...(19): siRNA sense strand
agaauuacaggaaguuguu

SEQ ID NO: 1171314 - RNA, 19 nt, Homo sapiens
  misc_RNA (1)...(19): siRNA sense strand
gaaaaucuacuuccuggau

SEQ ID NO: 1171315 - RNA, 19 nt, Homo sapiens
  misc_RNA (1)...(19): siRNA sense strand
gauaaugccacuaaaauag

SEQ ID NO: 1171316 - RNA, 19 nt, Homo sapiens
  misc_RNA (1)...(19): siRNA sense strand
ucaguggagugucaguuuc

SEQ ID NO: 1171317 - RNA, 19 nt, Homo sapiens
  misc_RNA (1)...(19): siRNA sense strand
aaagaugcaaugccuauca

SEQ ID NO: 1171318 - RNA, 19 nt, Homo sapiens
  misc_RNA (1)...(19): siRNA sense strand
gauggaggcuggacaguaa

SEQ ID NO: 1171319 - RNA, 19 nt, Homo sapiens
  misc_RNA (1)...(19): siRNA sense strand
gaaagaggcugcccgagau

SEQ ID NO: 1171320 - RNA, 19 nt, Homo sapiens
  misc_RNA (1)...(19): siRNA sense strand
gacaagaacugcgccaaga

SEQ ID NO: 1171321 - RNA, 19 nt, Homo sapiens
  misc_RNA (1)...(19): siRNA sense strand
gaggcagaguggacuauuu

SEQ ID NO: 1171322 - RNA, 19 nt, Homo sapiens
  misc_RNA (1)...(19): siRNA sense strand
acaagcaccuagaccauga

SEQ ID NO: 1171323 - RNA, 19 nt, Homo sapiens
  misc_RNA (1)...(19): siRNA sense strand
caagaugaccucagaugga

SEQ ID NO: 1171324 - RNA, 19 nt, Homo sapiens
  misc_RNA (1)...(19): siRNA sense strand
cagaguggacuauuugaaa

SEQ ID NO: 1171325 - RNA, 19 nt, Homo sapiens
  misc_RNA (1)...(19): siRNA sense strand
gaauucagcaucugcaaag

SEQ ID NO: 1171326 - RNA, 19 nt, Homo sapiens
  misc_RNA (1)...(19): siRNA sense strand
cagcagcggcagaagcuua

SEQ ID NO: 1171327 - RNA, 19 nt, Homo sapiens
  misc_RNA (1)...(19): siRNA sense strand
uuggugaacugcaagauga

SEQ ID NO: 1171328 - RNA, 19 nt, Homo sapiens
  misc_RNA (1)...(19): siRNA sense strand
gcagaguggacuauuugaa

SEQ ID NO: 1171329 - RNA, 19 nt, Homo sapiens
  misc_RNA (1)...(19): siRNA sense strand
gaacagcaggauccagcaa

SEQ ID NO: 1171330 - RNA, 19 nt, Homo sapiens
  misc_RNA (1)...(19): siRNA sense strand
gagaaggugcauagcauca

SEQ ID NO: 1171331 - RNA, 19 nt, Homo sapiens
  misc_RNA (1)...(19): siRNA sense strand
gcgaggacacggccuauag

SEQ ID NO: 1171332 - RNA, 19 nt, Homo sapiens
  misc_RNA (1)...(19): siRNA sense strand
ucuggaggcuggugguuug

SEQ ID NO: 1171333 - RNA, 19 nt, Homo sapiens
  misc_RNA (1)...(19): siRNA sense strand
uggagaaggugcauagcau

SEQ ID NO: 1171334 - RNA, 19 nt, Homo sapiens
  misc_RNA (1)...(19): siRNA sense strand
gcaggccaccaccauguug

SEQ ID NO: 1171335 - RNA, 19 nt, Homo sapiens
  misc_RNA (1)...(19): siRNA sense strand
ggagaggcagaguggacua

SEQ ID NO: 1171336 - RNA, 19 nt, Homo sapiens
  misc_RNA (1)...(19): siRNA sense strand
cgaauucagcaucugcaaa

SEQ ID NO: 1171337 - RNA, 19 nt, Homo sapiens
  misc_RNA (1)...(19): siRNA sense strand
ccacuugggaccaggauca

SEQ ID NO: 1171338 - RNA, 19 nt, Homo sapiens
  misc_RNA (1)...(19): siRNA sense strand
guccaccgaccucccguua

SEQ ID NO: 1171339 - RNA, 19 nt, Homo sapiens
  misc_RNA (1)...(19): siRNA sense strand
caacucaaggcucagaaca

SEQ ID NO: 1171340 - RNA, 19 nt, Homo sapiens
  misc_RNA (1)...(19): siRNA sense strand
ugacccggcucacaauguc

SEQ ID NO: 1171341 - RNA, 19 nt, Homo sapiens
  misc_RNA (1)...(19): siRNA sense strand
acugcaagaugaccucaga

SEQ ID NO: 1171342 - RNA, 19 nt, Homo sapiens
  misc_RNA (1)...(19): siRNA sense strand
uccagcaacucuuccacaa

SEQ ID NO: 1171343 - RNA, 19 nt, Homo sapiens
  misc_RNA (1)...(19): siRNA sense strand
ccacaagcaccuagaccau

SEQ ID NO: 1171344 - RNA, 19 nt, Homo sapiens
  misc_RNA (1)...(19): siRNA sense strand
gggauugccaggagcuguu

SEQ ID NO: 1171345 - RNA, 19 nt, Homo sapiens
  misc_RNA (1)...(19): siRNA sense strand
aggcagaguggacuauuug

SEQ ID NO: 1171346 - RNA, 19 nt, Homo sapiens
  misc_RNA (1)...(19): siRNA sense strand
gcaccugcagccauuccaa

SEQ ID NO: 1171347 - RNA, 19 nt, Homo sapiens
  misc_RNA (1)...(19): siRNA sense strand
gaggcuggacaguaauuca

SEQ ID NO: 1171348 - RNA, 19 nt, Homo sapiens
  misc_RNA (1)...(19): siRNA sense strand
ccaccaccauguugaucca

SEQ ID NO: 1171349 - RNA, 19 nt, Homo sapiens
  misc_RNA (1)...(19): siRNA sense strand
gauggaggcuggacaguaa

SEQ ID NO: 1171350 - RNA, 19 nt, Homo sapiens
  misc_RNA (1)...(19): siRNA sense strand
gaaagaggcugcccgagau

SEQ ID NO: 1171351 - RNA, 19 nt, Homo sapiens
  misc_RNA (1)...(19): siRNA sense strand
gacaagaacugcgccaaga

SEQ ID NO: 1171352 - RNA, 19 nt, Homo sapiens
  misc_RNA (1)...(19): siRNA sense strand
gaggcagaguggacuauuu

SEQ ID NO: 1171353 - RNA, 19 nt, Homo sapiens
  misc_RNA (1)...(19): siRNA sense strand
acaagcaccuagaccauga

SEQ ID NO: 1171354 - RNA, 19 nt, Homo sapiens
  misc_RNA (1)...(19): siRNA sense strand
caagaugaccucagaugga

SEQ ID NO: 1171355 - RNA, 19 nt, Homo sapiens
  misc_RNA (1)...(19): siRNA sense strand
cagaguggacuauuugaaa

SEQ ID NO: 1171356 - RNA, 19 nt, Homo sapiens
  misc_RNA (1)...(19): siRNA sense strand
gaauucagcaucugcaaag

SEQ ID NO: 1171357 - RNA, 19 nt, Homo sapiens
  misc_RNA (1)...(19): siRNA sense strand
cagcagcggcagaagcuua

SEQ ID NO: 1171358 - RNA, 19 nt, Homo sapiens
  misc_RNA (1)...(19): siRNA sense strand
uuggugaacugcaagauga

SEQ ID NO: 1171359 - RNA, 19 nt, Homo sapiens
  misc_RNA (1)...(19): siRNA sense strand
gcagaguggacuauuugaa

SEQ ID NO: 1171360 - RNA, 19 nt, Homo sapiens
  misc_RNA (1)...(19): siRNA sense strand
gaacagcaggauccagcaa

SEQ ID NO: 1171361 - RNA, 19 nt, Homo sapiens
  misc_RNA (1)...(19): siRNA sense strand
gagaaggugcauagcauca

SEQ ID NO: 1171362 - RNA, 19 nt, Homo sapiens
  misc_RNA (1)...(19): siRNA sense strand
gcgaggacacggccuauag

SEQ ID NO: 1171363 - RNA, 19 nt, Homo sapiens
  misc_RNA (1)...(19): siRNA sense strand
ucuggaggcuggugguuug

SEQ ID NO: 1171364 - RNA, 19 nt, Homo sapiens
  misc_RNA (1)...(19): siRNA sense strand
uggagaaggugcauagcau

SEQ ID NO: 1171365 - RNA, 19 nt, Homo sapiens
  misc_RNA (1)...(19): siRNA sense strand
gcaggccaccaccauguug

SEQ ID NO: 1171366 - RNA, 19 nt, Homo sapiens
  misc_RNA (1)...(19): siRNA sense strand
ggagaggcagaguggacua

SEQ ID NO: 1171367 - RNA, 19 nt, Homo sapiens
  misc_RNA (1)...(19): siRNA sense strand
cgaauucagcaucugcaaa

SEQ ID NO: 1171368 - RNA, 19 nt, Homo sapiens
  misc_RNA (1)...(19): siRNA sense strand
ccacuugggaccaggauca

SEQ ID NO: 1171369 - RNA, 19 nt, Homo sapiens
  misc_RNA (1)...(19): siRNA sense strand
guccaccgaccucccguua

SEQ ID NO: 1171370 - RNA, 19 nt, Homo sapiens
  misc_RNA (1)...(19): siRNA sense strand
caacucaaggcucagaaca

SEQ ID NO: 1171371 - RNA, 19 nt, Homo sapiens
  misc_RNA (1)...(19): siRNA sense strand
ugacccggcucacaauguc

SEQ ID NO: 1171372 - RNA, 19 nt, Homo sapiens
  misc_RNA (1)...(19): siRNA sense strand
acugcaagaugaccucaga

SEQ ID NO: 1171373 - RNA, 19 nt, Homo sapiens
  misc_RNA (1)...(19): siRNA sense strand
uccagcaacucuuccacaa

SEQ ID NO: 1171374 - RNA, 19 nt, Homo sapiens
  misc_RNA (1)...(19): siRNA sense strand
ccacaagcaccuagaccau

SEQ ID NO: 1171375 - RNA, 19 nt, Homo sapiens
  misc_RNA (1)...(19): siRNA sense strand
gggauugccaggagcuguu

SEQ ID NO: 1171376 - RNA, 19 nt, Homo sapiens
  misc_RNA (1)...(19): siRNA sense strand
aggcagaguggacuauuug

SEQ ID NO: 1171377 - RNA, 19 nt, Homo sapiens
  misc_RNA (1)...(19): siRNA sense strand
gcaccugcagccauuccaa

SEQ ID NO: 1171378 - RNA, 19 nt, Homo sapiens
  misc_RNA (1)...(19): siRNA sense strand
gaggcuggacaguaauuca

SEQ ID NO: 1171379 - RNA, 19 nt, Homo sapiens
  misc_RNA (1)...(19): siRNA sense strand
ccaccaccauguugaucca

SEQ ID NO: 1171380 - RNA, 19 nt, Homo sapiens
  misc_RNA (1)...(19): siRNA sense strand
gaccagauguggacaauca

SEQ ID NO: 1171381 - RNA, 19 nt, Homo sapiens
  misc_RNA (1)...(19): siRNA sense strand
ugaaagcgcugauggacaa

SEQ ID NO: 1171382 - RNA, 19 nt, Homo sapiens
  misc_RNA (1)...(19): siRNA sense strand
gcccagaucugcaagcauu

SEQ ID NO: 1171383 - RNA, 19 nt, Homo sapiens
  misc_RNA (1)...(19): siRNA sense strand
ccaaccaaguuuauuguaa

SEQ ID NO: 1171384 - RNA, 19 nt, Homo sapiens
  misc_RNA (1)...(19): siRNA sense strand
gccgggagcuuuacuucua

SEQ ID NO: 1171385 - RNA, 19 nt, Homo sapiens
  misc_RNA (1)...(19): siRNA sense strand
gcaaagggaaagagaagaa

SEQ ID NO: 1171386 - RNA, 19 nt, Homo sapiens
  misc_RNA (1)...(19): siRNA sense strand
gagcaacauugaccggauu

SEQ ID NO: 1171387 - RNA, 19 nt, Homo sapiens
  misc_RNA (1)...(19): siRNA sense strand
gaucugagcgacaucauca

SEQ ID NO: 1171388 - RNA, 19 nt, Homo sapiens
  misc_RNA (1)...(19): siRNA sense strand
gcacaaccacuaacaacau

SEQ ID NO: 1171389 - RNA, 19 nt, Homo sapiens
  misc_RNA (1)...(19): siRNA sense strand
gacuacgccuugaagcuaa

SEQ ID NO: 1171390 - RNA, 19 nt, Homo sapiens
  misc_RNA (1)...(19): siRNA sense strand
gauguuaucaagacucuga

SEQ ID NO: 1171391 - RNA, 19 nt, Homo sapiens
  misc_RNA (1)...(19): siRNA sense strand
ccuugaagcuaaagaaugu

SEQ ID NO: 1171392 - RNA, 19 nt, Homo sapiens
  misc_RNA (1)...(19): siRNA sense strand
gagcugggacacgauguua

SEQ ID NO: 1171393 - RNA, 19 nt, Homo sapiens
  misc_RNA (1)...(19): siRNA sense strand
gaaugucgagccacucuau

SEQ ID NO: 1171394 - RNA, 19 nt, Homo sapiens
  misc_RNA (1)...(19): siRNA sense strand
accaagaccuucaccaaga

SEQ ID NO: 1171395 - RNA, 19 nt, Homo sapiens
  misc_RNA (1)...(19): siRNA sense strand
ccacgguucaguaccuuua

SEQ ID NO: 1171396 - RNA, 19 nt, Homo sapiens
  misc_RNA (1)...(19): siRNA sense strand
caaccuggcccuacucauc

SEQ ID NO: 1171397 - RNA, 19 nt, Homo sapiens
  misc_RNA (1)...(19): siRNA sense strand
gggacacgauguuaucaag

SEQ ID NO: 1171398 - RNA, 19 nt, Homo sapiens
  misc_RNA (1)...(19): siRNA sense strand
ugacuacgccuugaagcua

SEQ ID NO: 1171399 - RNA, 19 nt, Homo sapiens
  misc_RNA (1)...(19): siRNA sense strand
ugagcgacaucaucaauac

SEQ ID NO: 1171400 - RNA, 19 nt, Homo sapiens
  misc_RNA (1)...(19): siRNA sense strand
gacauugacuacgccuuga

SEQ ID NO: 1171401 - RNA, 19 nt, Homo sapiens
  misc_RNA (1)...(19): siRNA sense strand
ccaaguuuauuguaauguc

SEQ ID NO: 1171402 - RNA, 19 nt, Homo sapiens
  misc_RNA (1)...(19): siRNA sense strand
ggacgccuaucgggcagaa

SEQ ID NO: 1171403 - RNA, 19 nt, Homo sapiens
  misc_RNA (1)...(19): siRNA sense strand
ccacggacccuggacugua

SEQ ID NO: 1171404 - RNA, 19 nt, Homo sapiens
  misc_RNA (1)...(19): siRNA sense strand
gcccaccgccugacaauca

SEQ ID NO: 1171405 - RNA, 19 nt, Homo sapiens
  misc_RNA (1)...(19): siRNA sense strand
ggacacgauguuaucaaga

SEQ ID NO: 1171406 - RNA, 19 nt, Homo sapiens
  misc_RNA (1)...(19): siRNA sense strand
gacacgauguuaucaagac

SEQ ID NO: 1171407 - RNA, 19 nt, Homo sapiens
  misc_RNA (1)...(19): siRNA sense strand
ugaaggugguggcugaauc

SEQ ID NO: 1171408 - RNA, 19 nt, Homo sapiens
  misc_RNA (1)...(19): siRNA sense strand
cacggacccuggacuguau

SEQ ID NO: 1171409 - RNA, 19 nt, Homo sapiens
  misc_RNA (1)...(19): siRNA sense strand
gagaaggagguugaucuga

SEQ ID NO: 1171410 - RNA, 19 nt, Homo sapiens
  misc_RNA (1)...(19): siRNA sense strand
ggagaaggagguugaucug

SEQ ID NO: 1171411 - RNA, 19 nt, Homo sapiens
  misc_RNA (1)...(19): siRNA sense strand
agcagcagcucuacuacaa

SEQ ID NO: 1171412 - RNA, 19 nt, Homo sapiens
  misc_RNA (1)...(19): siRNA sense strand
gauuggagcagaccaugug

SEQ ID NO: 1171413 - RNA, 19 nt, Homo sapiens
  misc_RNA (1)...(19): siRNA sense strand
cggaagcccugcaaagcau

SEQ ID NO: 1171414 - RNA, 19 nt, Homo sapiens
  misc_RNA (1)...(19): siRNA sense strand
guacaucguggucucacuu

SEQ ID NO: 1171415 - RNA, 19 nt, Homo sapiens
  misc_RNA (1)...(19): siRNA sense strand
acacugugcuccuguucug

SEQ ID NO: 1171416 - RNA, 19 nt, Homo sapiens
  misc_RNA (1)...(19): siRNA sense strand
ccaagaccuucaccaagag

SEQ ID NO: 1171417 - RNA, 19 nt, Homo sapiens
  misc_RNA (1)...(19): siRNA sense strand
gccagcugcuaacggauga

SEQ ID NO: 1171418 - RNA, 19 nt, Homo sapiens
  misc_RNA (1)...(19): siRNA sense strand
ucaccaagaccuucaccaa

SEQ ID NO: 1171419 - RNA, 19 nt, Homo sapiens
  misc_RNA (1)...(19): siRNA sense strand
gaacaaccuggcccuacuc

SEQ ID NO: 1171420 - RNA, 19 nt, Homo sapiens
  misc_RNA (1)...(19): siRNA sense strand
cacaaccacuaacaacauc

SEQ ID NO: 1171421 - RNA, 19 nt, Homo sapiens
  misc_RNA (1)...(19): siRNA sense strand
gcgaccagauguggacaau

SEQ ID NO: 1171422 - RNA, 19 nt, Homo sapiens
  misc_RNA (1)...(19): siRNA sense strand
caacauugaccggauugga

SEQ ID NO: 1171423 - RNA, 19 nt, Homo sapiens
  misc_RNA (1)...(19): siRNA sense strand
gugcuccuguucuggcaaa

SEQ ID NO: 1171424 - RNA, 19 nt, Homo sapiens
  misc_RNA (1)...(19): siRNA sense strand
gacccuggacuguaucaga

SEQ ID NO: 1171425 - RNA, 19 nt, Homo sapiens
  misc_RNA (1)...(19): siRNA sense strand
agagcuggguggacgagaa

SEQ ID NO: 1171426 - RNA, 19 nt, Homo sapiens
  misc_RNA (1)...(19): siRNA sense strand
gcggaagcccugcaaagca

SEQ ID NO: 1171427 - RNA, 19 nt, Homo sapiens
  misc_RNA (1)...(19): siRNA sense strand
gaaguacaucguggucuca

SEQ ID NO: 1171428 - RNA, 19 nt, Homo sapiens
  misc_RNA (1)...(19): siRNA sense strand
ggacgucugccucaaagcu

SEQ ID NO: 1171429 - RNA, 19 nt, Homo sapiens
  misc_RNA (1)...(19): siRNA sense strand
ccuccaaccaaguuuauug

SEQ ID NO: 1171430 - RNA, 19 nt, Homo sapiens
  misc_RNA (1)...(19): siRNA sense strand
auacguccaugagcugauu

SEQ ID NO: 1171431 - RNA, 19 nt, Homo sapiens
  misc_RNA (1)...(19): siRNA sense strand
gaagcccugcaaagcauug

SEQ ID NO: 1171432 - RNA, 19 nt, Homo sapiens
  misc_RNA (1)...(19): siRNA sense strand
agaacaaccuggcccuacu

SEQ ID NO: 1171433 - RNA, 19 nt, Homo sapiens
  misc_RNA (1)...(19): siRNA sense strand
gcugggacacgauguuauc

SEQ ID NO: 1171434 - RNA, 19 nt, Homo sapiens
  misc_RNA (1)...(19): siRNA sense strand
ccgggagcuuuacuucuau

SEQ ID NO: 1171435 - RNA, 19 nt, Homo sapiens
  misc_RNA (1)...(19): siRNA sense strand
ccacagaaccccugaaguc

SEQ ID NO: 1171436 - RNA, 19 nt, Homo sapiens
  misc_RNA (1)...(19): siRNA sense strand
ggaguguccagaaguacau

SEQ ID NO: 1171437 - RNA, 19 nt, Homo sapiens
  misc_RNA (1)...(19): siRNA sense strand
cagcugugaugaccugcau

SEQ ID NO: 1171438 - RNA, 19 nt, Homo sapiens
  misc_RNA (1)...(19): siRNA sense strand
ggagaccugccagcugcua

SEQ ID NO: 1171439 - RNA, 19 nt, Homo sapiens
  misc_RNA (1)...(19): siRNA sense strand
ggaagcccugcaaagcauu

SEQ ID NO: 1171440 - RNA, 19 nt, Homo sapiens
  misc_RNA (1)...(19): siRNA sense strand
ccaccagugacauugacua

SEQ ID NO: 1171441 - RNA, 19 nt, Homo sapiens
  misc_RNA (1)...(19): siRNA sense strand
gagaccugccagcugcuaa

SEQ ID NO: 1171442 - RNA, 19 nt, Homo sapiens
  misc_RNA (1)...(19): siRNA sense strand
gagcauccacgaguugucu

SEQ ID NO: 1171443 - RNA, 19 nt, Homo sapiens
  misc_RNA (1)...(19): siRNA sense strand
caucgugagcagacaguug

SEQ ID NO: 1171444 - RNA, 19 nt, Homo sapiens
  misc_RNA (1)...(19): siRNA sense strand
ccugaugcguauggugaaa

SEQ ID NO: 1171445 - RNA, 19 nt, Homo sapiens
  misc_RNA (1)...(19): siRNA sense strand
cugagcgacaucaucaaua

SEQ ID NO: 1171446 - RNA, 19 nt, Homo sapiens
  misc_RNA (1)...(19): siRNA sense strand
gaccagauguggacaauca

SEQ ID NO: 1171447 - RNA, 19 nt, Homo sapiens
  misc_RNA (1)...(19): siRNA sense strand
ugaaagcgcugauggacaa

SEQ ID NO: 1171448 - RNA, 19 nt, Homo sapiens
  misc_RNA (1)...(19): siRNA sense strand
gcccagaucugcaagcauu

SEQ ID NO: 1171449 - RNA, 19 nt, Homo sapiens
  misc_RNA (1)...(19): siRNA sense strand
ccaaccaaguuuauuguaa

SEQ ID NO: 1171450 - RNA, 19 nt, Homo sapiens
  misc_RNA (1)...(19): siRNA sense strand
gccgggagcuuuacuucua

SEQ ID NO: 1171451 - RNA, 19 nt, Homo sapiens
  misc_RNA (1)...(19): siRNA sense strand
gcaaagggaaagagaagaa

SEQ ID NO: 1171452 - RNA, 19 nt, Homo sapiens
  misc_RNA (1)...(19): siRNA sense strand
gagcaacauugaccggauu

SEQ ID NO: 1171453 - RNA, 19 nt, Homo sapiens
  misc_RNA (1)...(19): siRNA sense strand
gaucugagcgacaucauca

SEQ ID NO: 1171454 - RNA, 19 nt, Homo sapiens
  misc_RNA (1)...(19): siRNA sense strand
gcacaaccacuaacaacau

SEQ ID NO: 1171455 - RNA, 19 nt, Homo sapiens
  misc_RNA (1)...(19): siRNA sense strand
gacuacgccuugaagcuaa

SEQ ID NO: 1171456 - RNA, 19 nt, Homo sapiens
  misc_RNA (1)...(19): siRNA sense strand
gauguuaucaagacucuga

SEQ ID NO: 1171457 - RNA, 19 nt, Homo sapiens
  misc_RNA (1)...(19): siRNA sense strand
ccuugaagcuaaagaaugu

SEQ ID NO: 1171458 - RNA, 19 nt, Homo sapiens
  misc_RNA (1)...(19): siRNA sense strand
gagcugggacacgauguua

SEQ ID NO: 1171459 - RNA, 19 nt, Homo sapiens
  misc_RNA (1)...(19): siRNA sense strand
gaaugucgagccacucuau

SEQ ID NO: 1171460 - RNA, 19 nt, Homo sapiens
  misc_RNA (1)...(19): siRNA sense strand
accaagaccuucaccaaga

SEQ ID NO: 1171461 - RNA, 19 nt, Homo sapiens
  misc_RNA (1)...(19): siRNA sense strand
ccacgguucaguaccuuua

SEQ ID NO: 1171462 - RNA, 19 nt, Homo sapiens
  misc_RNA (1)...(19): siRNA sense strand
caaccuggcccuacucauc

SEQ ID NO: 1171463 - RNA, 19 nt, Homo sapiens
  misc_RNA (1)...(19): siRNA sense strand
gggacacgauguuaucaag

SEQ ID NO: 1171464 - RNA, 19 nt, Homo sapiens
  misc_RNA (1)...(19): siRNA sense strand
ugacuacgccuugaagcua

SEQ ID NO: 1171465 - RNA, 19 nt, Homo sapiens
  misc_RNA (1)...(19): siRNA sense strand
ugagcgacaucaucaauac

SEQ ID NO: 1171466 - RNA, 19 nt, Homo sapiens
  misc_RNA (1)...(19): siRNA sense strand
gacauugacuacgccuuga

SEQ ID NO: 1171467 - RNA, 19 nt, Homo sapiens
  misc_RNA (1)...(19): siRNA sense strand
ccaaguuuauuguaauguc

SEQ ID NO: 1171468 - RNA, 19 nt, Homo sapiens
  misc_RNA (1)...(19): siRNA sense strand
ggacgccuaucgggcagaa

SEQ ID NO: 1171469 - RNA, 19 nt, Homo sapiens
  misc_RNA (1)...(19): siRNA sense strand
ccacggacccuggacugua

SEQ ID NO: 1171470 - RNA, 19 nt, Homo sapiens
  misc_RNA (1)...(19): siRNA sense strand
gcccaccgccugacaauca

SEQ ID NO: 1171471 - RNA, 19 nt, Homo sapiens
  misc_RNA (1)...(19): siRNA sense strand
ggacacgauguuaucaaga

SEQ ID NO: 1171472 - RNA, 19 nt, Homo sapiens
  misc_RNA (1)...(19): siRNA sense strand
gacacgauguuaucaagac

SEQ ID NO: 1171473 - RNA, 19 nt, Homo sapiens
  misc_RNA (1)...(19): siRNA sense strand
ugaaggugguggcugaauc

SEQ ID NO: 1171474 - RNA, 19 nt, Homo sapiens
  misc_RNA (1)...(19): siRNA sense strand
cacggacccuggacuguau

SEQ ID NO: 1171475 - RNA, 19 nt, Homo sapiens
  misc_RNA (1)...(19): siRNA sense strand
gagaaggagguugaucuga

SEQ ID NO: 1171476 - RNA, 19 nt, Homo sapiens
  misc_RNA (1)...(19): siRNA sense strand
ggagaaggagguugaucug

SEQ ID NO: 1171477 - RNA, 19 nt, Homo sapiens
  misc_RNA (1)...(19): siRNA sense strand
agcagcagcucuacuacaa

SEQ ID NO: 1171478 - RNA, 19 nt, Homo sapiens
  misc_RNA (1)...(19): siRNA sense strand
gauuggagcagaccaugug

SEQ ID NO: 1171479 - RNA, 19 nt, Homo sapiens
  misc_RNA (1)...(19): siRNA sense strand
cggaagcccugcaaagcau

SEQ ID NO: 1171480 - RNA, 19 nt, Homo sapiens
  misc_RNA (1)...(19): siRNA sense strand
guacaucguggucucacuu

SEQ ID NO: 1171481 - RNA, 19 nt, Homo sapiens
  misc_RNA (1)...(19): siRNA sense strand
acacugugcuccuguucug

SEQ ID NO: 1171482 - RNA, 19 nt, Homo sapiens
  misc_RNA (1)...(19): siRNA sense strand
ccaagaccuucaccaagag

SEQ ID NO: 1171483 - RNA, 19 nt, Homo sapiens
  misc_RNA (1)...(19): siRNA sense strand
gccagcugcuaacggauga

SEQ ID NO: 1171484 - RNA, 19 nt, Homo sapiens
  misc_RNA (1)...(19): siRNA sense strand
ucaccaagaccuucaccaa

SEQ ID NO: 1171485 - RNA, 19 nt, Homo sapiens
  misc_RNA (1)...(19): siRNA sense strand
gaacaaccuggcccuacuc

SEQ ID NO: 1171486 - RNA, 19 nt, Homo sapiens
  misc_RNA (1)...(19): siRNA sense strand
cacaaccacuaacaacauc

SEQ ID NO: 1171487 - RNA, 19 nt, Homo sapiens
  misc_RNA (1)...(19): siRNA sense strand
gcgaccagauguggacaau

SEQ ID NO: 1171488 - RNA, 19 nt, Homo sapiens
  misc_RNA (1)...(19): siRNA sense strand
caacauugaccggauugga

SEQ ID NO: 1171489 - RNA, 19 nt, Homo sapiens
  misc_RNA (1)...(19): siRNA sense strand
gugcuccuguucuggcaaa

SEQ ID NO: 1171490 - RNA, 19 nt, Homo sapiens
  misc_RNA (1)...(19): siRNA sense strand
gacccuggacuguaucaga

SEQ ID NO: 1171491 - RNA, 19 nt, Homo sapiens
  misc_RNA (1)...(19): siRNA sense strand
agagcuggguggacgagaa

SEQ ID NO: 1171492 - RNA, 19 nt, Homo sapiens
  misc_RNA (1)...(19): siRNA sense strand
gcggaagcccugcaaagca

SEQ ID NO: 1171493 - RNA, 19 nt, Homo sapiens
  misc_RNA (1)...(19): siRNA sense strand
gaaguacaucguggucuca

SEQ ID NO: 1171494 - RNA, 19 nt, Homo sapiens
  misc_RNA (1)...(19): siRNA sense strand
ggacgucugccucaaagcu

SEQ ID NO: 1171495 - RNA, 19 nt, Homo sapiens
  misc_RNA (1)...(19): siRNA sense strand
ccuccaaccaaguuuauug

SEQ ID NO: 1171496 - RNA, 19 nt, Homo sapiens
  misc_RNA (1)...(19): siRNA sense strand
auacguccaugagcugauu

SEQ ID NO: 1171497 - RNA, 19 nt, Homo sapiens
  misc_RNA (1)...(19): siRNA sense strand
gaagcccugcaaagcauug

SEQ ID NO: 1171498 - RNA, 19 nt, Homo sapiens
  misc_RNA (1)...(19): siRNA sense strand
agaacaaccuggcccuacu

SEQ ID NO: 1171499 - RNA, 19 nt, Homo sapiens
  misc_RNA (1)...(19): siRNA sense strand
gcugggacacgauguuauc

SEQ ID NO: 1171500 - RNA, 19 nt, Homo sapiens
  misc_RNA (1)...(19): siRNA sense strand
ccgggagcuuuacuucuau

SEQ ID NO: 1171501 - RNA, 19 nt, Homo sapiens
  misc_RNA (1)...(19): siRNA sense strand
ccacagaaccccugaaguc

SEQ ID NO: 1171502 - RNA, 19 nt, Homo sapiens
  misc_RNA (1)...(19): siRNA sense strand
ggaguguccagaaguacau

SEQ ID NO: 1171503 - RNA, 19 nt, Homo sapiens
  misc_RNA (1)...(19): siRNA sense strand
cagcugugaugaccugcau

SEQ ID NO: 1171504 - RNA, 19 nt, Homo sapiens
  misc_RNA (1)...(19): siRNA sense strand
ggagaccugccagcugcua

SEQ ID NO: 1171505 - RNA, 19 nt, Homo sapiens
  misc_RNA (1)...(19): siRNA sense strand
ggaagcccugcaaagcauu

SEQ ID NO: 1171506 - RNA, 19 nt, Homo sapiens
  misc_RNA (1)...(19): siRNA sense strand
ccaccagugacauugacua

SEQ ID NO: 1171507 - RNA, 19 nt, Homo sapiens
  misc_RNA (1)...(19): siRNA sense strand
gagaccugccagcugcuaa

SEQ ID NO: 1171508 - RNA, 19 nt, Homo sapiens
  misc_RNA (1)...(19): siRNA sense strand
gagcauccacgaguugucu

SEQ ID NO: 1171509 - RNA, 19 nt, Homo sapiens
  misc_RNA (1)...(19): siRNA sense strand
caucgugagcagacaguug

SEQ ID NO: 1171510 - RNA, 19 nt, Homo sapiens
  misc_RNA (1)...(19): siRNA sense strand
ccugaugcguauggugaaa

SEQ ID NO: 1171511 - RNA, 19 nt, Homo sapiens
  misc_RNA (1)...(19): siRNA sense strand
cugagcgacaucaucaaua

SEQ ID NO: 1171512 - RNA, 19 nt, Homo sapiens
  misc_RNA (1)...(19): siRNA sense strand
gaccagauguggacaauca

SEQ ID NO: 1171513 - RNA, 19 nt, Homo sapiens
  misc_RNA (1)...(19): siRNA sense strand
ugaaagcgcugauggacaa

SEQ ID NO: 1171514 - RNA, 19 nt, Homo sapiens
  misc_RNA (1)...(19): siRNA sense strand
gcccagaucugcaagcauu

SEQ ID NO: 1171515 - RNA, 19 nt, Homo sapiens
  misc_RNA (1)...(19): siRNA sense strand
ccaaccaaguuuauuguaa

SEQ ID NO: 1171516 - RNA, 19 nt, Homo sapiens
  misc_RNA (1)...(19): siRNA sense strand
gccgggagcuuuacuucua

SEQ ID NO: 1171517 - RNA, 19 nt, Homo sapiens
  misc_RNA (1)...(19): siRNA sense strand
gcaaagggaaagagaagaa

SEQ ID NO: 1171518 - RNA, 19 nt, Homo sapiens
  misc_RNA (1)...(19): siRNA sense strand
gagcaacauugaccggauu

SEQ ID NO: 1171519 - RNA, 19 nt, Homo sapiens
  misc_RNA (1)...(19): siRNA sense strand
gaucugagcgacaucauca

SEQ ID NO: 1171520 - RNA, 19 nt, Homo sapiens
  misc_RNA (1)...(19): siRNA sense strand
gcacaaccacuaacaacau

SEQ ID NO: 1171521 - RNA, 19 nt, Homo sapiens
  misc_RNA (1)...(19): siRNA sense strand
gacuacgccuugaagcuaa

SEQ ID NO: 1171522 - RNA, 19 nt, Homo sapiens
  misc_RNA (1)...(19): siRNA sense strand
gauguuaucaagacucuga

SEQ ID NO: 1171523 - RNA, 19 nt, Homo sapiens
  misc_RNA (1)...(19): siRNA sense strand
ccuugaagcuaaagaaugu

SEQ ID NO: 1171524 - RNA, 19 nt, Homo sapiens
  misc_RNA (1)...(19): siRNA sense strand
gagcugggacacgauguua

SEQ ID NO: 1171525 - RNA, 19 nt, Homo sapiens
  misc_RNA (1)...(19): siRNA sense strand
gaaugucgagccacucuau

SEQ ID NO: 1171526 - RNA, 19 nt, Homo sapiens
  misc_RNA (1)...(19): siRNA sense strand
accaagaccuucaccaaga

SEQ ID NO: 1171527 - RNA, 19 nt, Homo sapiens
  misc_RNA (1)...(19): siRNA sense strand
ccacgguucaguaccuuua

SEQ ID NO: 1171528 - RNA, 19 nt, Homo sapiens
  misc_RNA (1)...(19): siRNA sense strand
caaccuggcccuacucauc

SEQ ID NO: 1171529 - RNA, 19 nt, Homo sapiens
  misc_RNA (1)...(19): siRNA sense strand
gggacacgauguuaucaag

SEQ ID NO: 1171530 - RNA, 19 nt, Homo sapiens
  misc_RNA (1)...(19): siRNA sense strand
ugacuacgccuugaagcua

SEQ ID NO: 1171531 - RNA, 19 nt, Homo sapiens
  misc_RNA (1)...(19): siRNA sense strand
ugagcgacaucaucaauac

SEQ ID NO: 1171532 - RNA, 19 nt, Homo sapiens
  misc_RNA (1)...(19): siRNA sense strand
gacauugacuacgccuuga

SEQ ID NO: 1171533 - RNA, 19 nt, Homo sapiens
  misc_RNA (1)...(19): siRNA sense strand
ccaaguuuauuguaauguc

SEQ ID NO: 1171534 - RNA, 19 nt, Homo sapiens
  misc_RNA (1)...(19): siRNA sense strand
ggacgccuaucgggcagaa

SEQ ID NO: 1171535 - RNA, 19 nt, Homo sapiens
  misc_RNA (1)...(19): siRNA sense strand
ccacggacccuggacugua

SEQ ID NO: 1171536 - RNA, 19 nt, Homo sapiens
  misc_RNA (1)...(19): siRNA sense strand
gcccaccgccugacaauca

SEQ ID NO: 1171537 - RNA, 19 nt, Homo sapiens
  misc_RNA (1)...(19): siRNA sense strand
ggacacgauguuaucaaga

SEQ ID NO: 1171538 - RNA, 19 nt, Homo sapiens
  misc_RNA (1)...(19): siRNA sense strand
gacacgauguuaucaagac

SEQ ID NO: 1171539 - RNA, 19 nt, Homo sapiens
  misc_RNA (1)...(19): siRNA sense strand
ugaaggugguggcugaauc

SEQ ID NO: 1171540 - RNA, 19 nt, Homo sapiens
  misc_RNA (1)...(19): siRNA sense strand
cacggacccuggacuguau

SEQ ID NO: 1171541 - RNA, 19 nt, Homo sapiens
  misc_RNA (1)...(19): siRNA sense strand
gagaaggagguugaucuga

SEQ ID NO: 1171542 - RNA, 19 nt, Homo sapiens
  misc_RNA (1)...(19): siRNA sense strand
ggagaaggagguugaucug

SEQ ID NO: 1171543 - RNA, 19 nt, Homo sapiens
  misc_RNA (1)...(19): siRNA sense strand
agcagcagcucuacuacaa

SEQ ID NO: 1171544 - RNA, 19 nt, Homo sapiens
  misc_RNA (1)...(19): siRNA sense strand
gauuggagcagaccaugug

SEQ ID NO: 1171545 - RNA, 19 nt, Homo sapiens
  misc_RNA (1)...(19): siRNA sense strand
cggaagcccugcaaagcau

SEQ ID NO: 1171546 - RNA, 19 nt, Homo sapiens
  misc_RNA (1)...(19): siRNA sense strand
guacaucguggucucacuu

SEQ ID NO: 1171547 - RNA, 19 nt, Homo sapiens
  misc_RNA (1)...(19): siRNA sense strand
acacugugcuccuguucug

SEQ ID NO: 1171548 - RNA, 19 nt, Homo sapiens
  misc_RNA (1)...(19): siRNA sense strand
ccaagaccuucaccaagag

SEQ ID NO: 1171549 - RNA, 19 nt, Homo sapiens
  misc_RNA (1)...(19): siRNA sense strand
gccagcugcuaacggauga

SEQ ID NO: 1171550 - RNA, 19 nt, Homo sapiens
  misc_RNA (1)...(19): siRNA sense strand
ucaccaagaccuucaccaa

SEQ ID NO: 1171551 - RNA, 19 nt, Homo sapiens
  misc_RNA (1)...(19): siRNA sense strand
gaacaaccuggcccuacuc

SEQ ID NO: 1171552 - RNA, 19 nt, Homo sapiens
  misc_RNA (1)...(19): siRNA sense strand
cacaaccacuaacaacauc

SEQ ID NO: 1171553 - RNA, 19 nt, Homo sapiens
  misc_RNA (1)...(19): siRNA sense strand
gcgaccagauguggacaau

SEQ ID NO: 1171554 - RNA, 19 nt, Homo sapiens
  misc_RNA (1)...(19): siRNA sense strand
caacauugaccggauugga

SEQ ID NO: 1171555 - RNA, 19 nt, Homo sapiens
  misc_RNA (1)...(19): siRNA sense strand
gugcuccuguucuggcaaa

SEQ ID NO: 1171556 - RNA, 19 nt, Homo sapiens
  misc_RNA (1)...(19): siRNA sense strand
gacccuggacuguaucaga

SEQ ID NO: 1171557 - RNA, 19 nt, Homo sapiens
  misc_RNA (1)...(19): siRNA sense strand
agagcuggguggacgagaa

SEQ ID NO: 1171558 - RNA, 19 nt, Homo sapiens
  misc_RNA (1)...(19): siRNA sense strand
gcggaagcccugcaaagca

SEQ ID NO: 1171559 - RNA, 19 nt, Homo sapiens
  misc_RNA (1)...(19): siRNA sense strand
gaaguacaucguggucuca

SEQ ID NO: 1171560 - RNA, 19 nt, Homo sapiens
  misc_RNA (1)...(19): siRNA sense strand
ggacgucugccucaaagcu

SEQ ID NO: 1171561 - RNA, 19 nt, Homo sapiens
  misc_RNA (1)...(19): siRNA sense strand
ccuccaaccaaguuuauug

SEQ ID NO: 1171562 - RNA, 19 nt, Homo sapiens
  misc_RNA (1)...(19): siRNA sense strand
auacguccaugagcugauu

SEQ ID NO: 1171563 - RNA, 19 nt, Homo sapiens
  misc_RNA (1)...(19): siRNA sense strand
gaagcccugcaaagcauug

SEQ ID NO: 1171564 - RNA, 19 nt, Homo sapiens
  misc_RNA (1)...(19): siRNA sense strand
agaacaaccuggcccuacu

SEQ ID NO: 1171565 - RNA, 19 nt, Homo sapiens
  misc_RNA (1)...(19): siRNA sense strand
gcugggacacgauguuauc

SEQ ID NO: 1171566 - RNA, 19 nt, Homo sapiens
  misc_RNA (1)...(19): siRNA sense strand
ccgggagcuuuacuucuau

SEQ ID NO: 1171567 - RNA, 19 nt, Homo sapiens
  misc_RNA (1)...(19): siRNA sense strand
ccacagaaccccugaaguc

SEQ ID NO: 1171568 - RNA, 19 nt, Homo sapiens
  misc_RNA (1)...(19): siRNA sense strand
ggaguguccagaaguacau

SEQ ID NO: 1171569 - RNA, 19 nt, Homo sapiens
  misc_RNA (1)...(19): siRNA sense strand
cagcugugaugaccugcau

SEQ ID NO: 1171570 - RNA, 19 nt, Homo sapiens
  misc_RNA (1)...(19): siRNA sense strand
ggagaccugccagcugcua

SEQ ID NO: 1171571 - RNA, 19 nt, Homo sapiens
  misc_RNA (1)...(19): siRNA sense strand
ggaagcccugcaaagcauu

SEQ ID NO: 1171572 - RNA, 19 nt, Homo sapiens
  misc_RNA (1)...(19): siRNA sense strand
ccaccagugacauugacua

SEQ ID NO: 1171573 - RNA, 19 nt, Homo sapiens
  misc_RNA (1)...(19): siRNA sense strand
gagaccugccagcugcuaa

SEQ ID NO: 1171574 - RNA, 19 nt, Homo sapiens
  misc_RNA (1)...(19): siRNA sense strand
gagcauccacgaguugucu

SEQ ID NO: 1171575 - RNA, 19 nt, Homo sapiens
  misc_RNA (1)...(19): siRNA sense strand
caucgugagcagacaguug

SEQ ID NO: 1171576 - RNA, 19 nt, Homo sapiens
  misc_RNA (1)...(19): siRNA sense strand
ccugaugcguauggugaaa

SEQ ID NO: 1171577 - RNA, 19 nt, Homo sapiens
  misc_RNA (1)...(19): siRNA sense strand
cugagcgacaucaucaaua

SEQ ID NO: 1171578 - RNA, 19 nt, Homo sapiens
  misc_RNA (1)...(19): siRNA sense strand
gaccagauguggacaauca

SEQ ID NO: 1171579 - RNA, 19 nt, Homo sapiens
  misc_RNA (1)...(19): siRNA sense strand
ugaaagcgcugauggacaa

SEQ ID NO: 1171580 - RNA, 19 nt, Homo sapiens
  misc_RNA (1)...(19): siRNA sense strand
gcccagaucugcaagcauu

SEQ ID NO: 1171581 - RNA, 19 nt, Homo sapiens
  misc_RNA (1)...(19): siRNA sense strand
ccaaccaaguuuauuguaa

SEQ ID NO: 1171582 - RNA, 19 nt, Homo sapiens
  misc_RNA (1)...(19): siRNA sense strand
gccgggagcuuuacuucua

SEQ ID NO: 1171583 - RNA, 19 nt, Homo sapiens
  misc_RNA (1)...(19): siRNA sense strand
gcaaagggaaagagaagaa

SEQ ID NO: 1171584 - RNA, 19 nt, Homo sapiens
  misc_RNA (1)...(19): siRNA sense strand
gagcaacauugaccggauu

SEQ ID NO: 1171585 - RNA, 19 nt, Homo sapiens
  misc_RNA (1)...(19): siRNA sense strand
gaucugagcgacaucauca

SEQ ID NO: 1171586 - RNA, 19 nt, Homo sapiens
  misc_RNA (1)...(19): siRNA sense strand
gcacaaccacuaacaacau

SEQ ID NO: 1171587 - RNA, 19 nt, Homo sapiens
  misc_RNA (1)...(19): siRNA sense strand
gacuacgccuugaagcuaa

SEQ ID NO: 1171588 - RNA, 19 nt, Homo sapiens
  misc_RNA (1)...(19): siRNA sense strand
gauguuaucaagacucuga

SEQ ID NO: 1171589 - RNA, 19 nt, Homo sapiens
  misc_RNA (1)...(19): siRNA sense strand
ccuugaagcuaaagaaugu

SEQ ID NO: 1171590 - RNA, 19 nt, Homo sapiens
  misc_RNA (1)...(19): siRNA sense strand
gagcugggacacgauguua

SEQ ID NO: 1171591 - RNA, 19 nt, Homo sapiens
  misc_RNA (1)...(19): siRNA sense strand
gaaugucgagccacucuau

SEQ ID NO: 1171592 - RNA, 19 nt, Homo sapiens
  misc_RNA (1)...(19): siRNA sense strand
accaagaccuucaccaaga

SEQ ID NO: 1171593 - RNA, 19 nt, Homo sapiens
  misc_RNA (1)...(19): siRNA sense strand
ccacgguucaguaccuuua

SEQ ID NO: 1171594 - RNA, 19 nt, Homo sapiens
  misc_RNA (1)...(19): siRNA sense strand
caaccuggcccuacucauc

SEQ ID NO: 1171595 - RNA, 19 nt, Homo sapiens
  misc_RNA (1)...(19): siRNA sense strand
gggacacgauguuaucaag

SEQ ID NO: 1171596 - RNA, 19 nt, Homo sapiens
  misc_RNA (1)...(19): siRNA sense strand
ugacuacgccuugaagcua

SEQ ID NO: 1171597 - RNA, 19 nt, Homo sapiens
  misc_RNA (1)...(19): siRNA sense strand
ugagcgacaucaucaauac

SEQ ID NO: 1171598 - RNA, 19 nt, Homo sapiens
  misc_RNA (1)...(19): siRNA sense strand
gacauugacuacgccuuga

SEQ ID NO: 1171599 - RNA, 19 nt, Homo sapiens
  misc_RNA (1)...(19): siRNA sense strand
ccaaguuuauuguaauguc

SEQ ID NO: 1171600 - RNA, 19 nt, Homo sapiens
  misc_RNA (1)...(19): siRNA sense strand
ggacgccuaucgggcagaa

SEQ ID NO: 1171601 - RNA, 19 nt, Homo sapiens
  misc_RNA (1)...(19): siRNA sense strand
ccacggacccuggacugua

SEQ ID NO: 1171602 - RNA, 19 nt, Homo sapiens
  misc_RNA (1)...(19): siRNA sense strand
gcccaccgccugacaauca

SEQ ID NO: 1171603 - RNA, 19 nt, Homo sapiens
  misc_RNA (1)...(19): siRNA sense strand
ggacacgauguuaucaaga

SEQ ID NO: 1171604 - RNA, 19 nt, Homo sapiens
  misc_RNA (1)...(19): siRNA sense strand
gacacgauguuaucaagac

SEQ ID NO: 1171605 - RNA, 19 nt, Homo sapiens
  misc_RNA (1)...(19): siRNA sense strand
ugaaggugguggcugaauc

SEQ ID NO: 1171606 - RNA, 19 nt, Homo sapiens
  misc_RNA (1)...(19): siRNA sense strand
cacggacccuggacuguau

SEQ ID NO: 1171607 - RNA, 19 nt, Homo sapiens
  misc_RNA (1)...(19): siRNA sense strand
gagaaggagguugaucuga

SEQ ID NO: 1171608 - RNA, 19 nt, Homo sapiens
  misc_RNA (1)...(19): siRNA sense strand
ggagaaggagguugaucug

SEQ ID NO: 1171609 - RNA, 19 nt, Homo sapiens
  misc_RNA (1)...(19): siRNA sense strand
agcagcagcucuacuacaa

SEQ ID NO: 1171610 - RNA, 19 nt, Homo sapiens
  misc_RNA (1)...(19): siRNA sense strand
gauuggagcagaccaugug

SEQ ID NO: 1171611 - RNA, 19 nt, Homo sapiens
  misc_RNA (1)...(19): siRNA sense strand
cggaagcccugcaaagcau

SEQ ID NO: 1171612 - RNA, 19 nt, Homo sapiens
  misc_RNA (1)...(19): siRNA sense strand
guacaucguggucucacuu

SEQ ID NO: 1171613 - RNA, 19 nt, Homo sapiens
  misc_RNA (1)...(19): siRNA sense strand
acacugugcuccuguucug

SEQ ID NO: 1171614 - RNA, 19 nt, Homo sapiens
  misc_RNA (1)...(19): siRNA sense strand
ccaagaccuucaccaagag

SEQ ID NO: 1171615 - RNA, 19 nt, Homo sapiens
  misc_RNA (1)...(19): siRNA sense strand
gccagcugcuaacggauga

SEQ ID NO: 1171616 - RNA, 19 nt, Homo sapiens
  misc_RNA (1)...(19): siRNA sense strand
ucaccaagaccuucaccaa

SEQ ID NO: 1171617 - RNA, 19 nt, Homo sapiens
  misc_RNA (1)...(19): siRNA sense strand
gaacaaccuggcccuacuc

SEQ ID NO: 1171618 - RNA, 19 nt, Homo sapiens
  misc_RNA (1)...(19): siRNA sense strand
cacaaccacuaacaacauc

SEQ ID NO: 1171619 - RNA, 19 nt, Homo sapiens
  misc_RNA (1)...(19): siRNA sense strand
gcgaccagauguggacaau

SEQ ID NO: 1171620 - RNA, 19 nt, Homo sapiens
  misc_RNA (1)...(19): siRNA sense strand
caacauugaccggauugga

SEQ ID NO: 1171621 - RNA, 19 nt, Homo sapiens
  misc_RNA (1)...(19): siRNA sense strand
gugcuccuguucuggcaaa

SEQ ID NO: 1171622 - RNA, 19 nt, Homo sapiens
  misc_RNA (1)...(19): siRNA sense strand
gacccuggacuguaucaga

SEQ ID NO: 1171623 - RNA, 19 nt, Homo sapiens
  misc_RNA (1)...(19): siRNA sense strand
agagcuggguggacgagaa

SEQ ID NO: 1171624 - RNA, 19 nt, Homo sapiens
  misc_RNA (1)...(19): siRNA sense strand
gcggaagcccugcaaagca

SEQ ID NO: 1171625 - RNA, 19 nt, Homo sapiens
  misc_RNA (1)...(19): siRNA sense strand
gaaguacaucguggucuca

SEQ ID NO: 1171626 - RNA, 19 nt, Homo sapiens
  misc_RNA (1)...(19): siRNA sense strand
ggacgucugccucaaagcu

SEQ ID NO: 1171627 - RNA, 19 nt, Homo sapiens
  misc_RNA (1)...(19): siRNA sense strand
ccuccaaccaaguuuauug

SEQ ID NO: 1171628 - RNA, 19 nt, Homo sapiens
  misc_RNA (1)...(19): siRNA sense strand
auacguccaugagcugauu

SEQ ID NO: 1171629 - RNA, 19 nt, Homo sapiens
  misc_RNA (1)...(19): siRNA sense strand
gaagcccugcaaagcauug

SEQ ID NO: 1171630 - RNA, 19 nt, Homo sapiens
  misc_RNA (1)...(19): siRNA sense strand
agaacaaccuggcccuacu

SEQ ID NO: 1171631 - RNA, 19 nt, Homo sapiens
  misc_RNA (1)...(19): siRNA sense strand
gcugggacacgauguuauc

SEQ ID NO: 1171632 - RNA, 19 nt, Homo sapiens
  misc_RNA (1)...(19): siRNA sense strand
ccgggagcuuuacuucuau

SEQ ID NO: 1171633 - RNA, 19 nt, Homo sapiens
  misc_RNA (1)...(19): siRNA sense strand
ccacagaaccccugaaguc

SEQ ID NO: 1171634 - RNA, 19 nt, Homo sapiens
  misc_RNA (1)...(19): siRNA sense strand
ggaguguccagaaguacau

SEQ ID NO: 1171635 - RNA, 19 nt, Homo sapiens
  misc_RNA (1)...(19): siRNA sense strand
cagcugugaugaccugcau

SEQ ID NO: 1171636 - RNA, 19 nt, Homo sapiens
  misc_RNA (1)...(19): siRNA sense strand
ggagaccugccagcugcua

SEQ ID NO: 1171637 - RNA, 19 nt, Homo sapiens
  misc_RNA (1)...(19): siRNA sense strand
ggaagcccugcaaagcauu

SEQ ID NO: 1171638 - RNA, 19 nt, Homo sapiens
  misc_RNA (1)...(19): siRNA sense strand
ccaccagugacauugacua

SEQ ID NO: 1171639 - RNA, 19 nt, Homo sapiens
  misc_RNA (1)...(19): siRNA sense strand
gagaccugccagcugcuaa

SEQ ID NO: 1171640 - RNA, 19 nt, Homo sapiens
  misc_RNA (1)...(19): siRNA sense strand
gagcauccacgaguugucu

SEQ ID NO: 1171641 - RNA, 19 nt, Homo sapiens
  misc_RNA (1)...(19): siRNA sense strand
caucgugagcagacaguug

SEQ ID NO: 1171642 - RNA, 19 nt, Homo sapiens
  misc_RNA (1)...(19): siRNA sense strand
ccugaugcguauggugaaa

SEQ ID NO: 1171643 - RNA, 19 nt, Homo sapiens
  misc_RNA (1)...(19): siRNA sense strand
cugagcgacaucaucaaua

SEQ ID NO: 1171644 - RNA, 19 nt, Homo sapiens
  misc_RNA (1)...(19): siRNA sense strand
gcacugaccucugugacuu

SEQ ID NO: 1171645 - RNA, 19 nt, Homo sapiens
  misc_RNA (1)...(19): siRNA sense strand
gaaaauucuucuugccaua

SEQ ID NO: 1171646 - RNA, 19 nt, Homo sapiens
  misc_RNA (1)...(19): siRNA sense strand
ucaccuguuuguuaguuua

SEQ ID NO: 1171647 - RNA, 19 nt, Homo sapiens
  misc_RNA (1)...(19): siRNA sense strand
caaaagcccugauuccuau

SEQ ID NO: 1171648 - RNA, 19 nt, Homo sapiens
  misc_RNA (1)...(19): siRNA sense strand
uauaucaccuguuuguuag

SEQ ID NO: 1171649 - RNA, 19 nt, Homo sapiens
  misc_RNA (1)...(19): siRNA sense strand
gugguggaguuauugauga

SEQ ID NO: 1171650 - RNA, 19 nt, Homo sapiens
  misc_RNA (1)...(19): siRNA sense strand
uauaagaagcacagaauuc

SEQ ID NO: 1171651 - RNA, 19 nt, Homo sapiens
  misc_RNA (1)...(19): siRNA sense strand
aggaggagcuugggccuuu

SEQ ID NO: 1171652 - RNA, 19 nt, Homo sapiens
  misc_RNA (1)...(19): siRNA sense strand
gugauuaaagcaacauuug

SEQ ID NO: 1171653 - RNA, 19 nt, Homo sapiens
  misc_RNA (1)...(19): siRNA sense strand
uacaugagccagcaaauuc

SEQ ID NO: 1171654 - RNA, 19 nt, Homo sapiens
  misc_RNA (1)...(19): siRNA sense strand
caaauucuagugccaguca

SEQ ID NO: 1171655 - RNA, 19 nt, Homo sapiens
  misc_RNA (1)...(19): siRNA sense strand
gaagcacagaauucuuaaa

SEQ ID NO: 1171656 - RNA, 19 nt, Homo sapiens
  misc_RNA (1)...(19): siRNA sense strand
uaucaccuguuuguuaguu

SEQ ID NO: 1171657 - RNA, 19 nt, Homo sapiens
  misc_RNA (1)...(19): siRNA sense strand
ggaguuauugaugacguua

SEQ ID NO: 1171658 - RNA, 19 nt, Homo sapiens
  misc_RNA (1)...(19): siRNA sense strand
cuucgagacguuauuuaua

SEQ ID NO: 1171659 - RNA, 19 nt, Homo sapiens
  misc_RNA (1)...(19): siRNA sense strand
cagagauugugguggaguu

SEQ ID NO: 1171660 - RNA, 19 nt, Homo sapiens
  misc_RNA (1)...(19): siRNA sense strand
agauugugguggaguuauu

SEQ ID NO: 1171661 - RNA, 19 nt, Homo sapiens
  misc_RNA (1)...(19): siRNA sense strand
caucgcaugugauuaaagc

SEQ ID NO: 1171662 - RNA, 19 nt, Homo sapiens
  misc_RNA (1)...(19): siRNA sense strand
gcaugugauuaaagcaaca

SEQ ID NO: 1171663 - RNA, 19 nt, Homo sapiens
  misc_RNA (1)...(19): siRNA sense strand
uuacaugagccagcaaauu

SEQ ID NO: 1171664 - RNA, 19 nt, Homo sapiens
  misc_RNA (1)...(19): siRNA sense strand
ggaggagcuugggccuuug

SEQ ID NO: 1171665 - RNA, 19 nt, Homo sapiens
  misc_RNA (1)...(19): siRNA sense strand
gcuccuaauccaccucauu

SEQ ID NO: 1171666 - RNA, 19 nt, Homo sapiens
  misc_RNA (1)...(19): siRNA sense strand
ccaaaagcccugauuccua

SEQ ID NO: 1171667 - RNA, 19 nt, Homo sapiens
  misc_RNA (1)...(19): siRNA sense strand
aaauucuucuugccauaug

SEQ ID NO: 1171668 - RNA, 19 nt, Homo sapiens
  misc_RNA (1)...(19): siRNA sense strand
uuccaucgcaugugauuaa

SEQ ID NO: 1171669 - RNA, 19 nt, Homo sapiens
  misc_RNA (1)...(19): siRNA sense strand
gcuugggccuuuguucuuc

SEQ ID NO: 1171670 - RNA, 19 nt, Homo sapiens
  misc_RNA (1)...(19): siRNA sense strand
gagcuugggccuuuguucu

SEQ ID NO: 1171671 - RNA, 19 nt, Homo sapiens
  misc_RNA (1)...(19): siRNA sense strand
gcaauugucauaaaaccaa

SEQ ID NO: 1171672 - RNA, 19 nt, Homo sapiens
  misc_RNA (1)...(19): siRNA sense strand
gauucacuauaucaaccaa

SEQ ID NO: 1171673 - RNA, 19 nt, Homo sapiens
  misc_RNA (1)...(19): siRNA sense strand
cuccuaauccaccucauuu

SEQ ID NO: 1171674 - RNA, 19 nt, Homo sapiens
  misc_RNA (1)...(19): siRNA sense strand
uucgagacguuauuuauac

SEQ ID NO: 1171675 - RNA, 19 nt, Homo sapiens
  misc_RNA (1)...(19): siRNA sense strand
guucuucgagacguuauuu

SEQ ID NO: 1171676 - RNA, 19 nt, Homo sapiens
  misc_RNA (1)...(19): siRNA sense strand
caugagccagcaaauucua

SEQ ID NO: 1171677 - RNA, 19 nt, Homo sapiens
  misc_RNA (1)...(19): siRNA sense strand
caacauuugccuauaucag

SEQ ID NO: 1171678 - RNA, 19 nt, Homo sapiens
  misc_RNA (1)...(19): siRNA sense strand
uaauuuaccagagauugug

SEQ ID NO: 1171679 - RNA, 19 nt, Homo sapiens
  misc_RNA (1)...(19): siRNA sense strand
gcacugaccucugugacuu

SEQ ID NO: 1171680 - RNA, 19 nt, Homo sapiens
  misc_RNA (1)...(19): siRNA sense strand
gaaaauucuucuugccaua

SEQ ID NO: 1171681 - RNA, 19 nt, Homo sapiens
  misc_RNA (1)...(19): siRNA sense strand
ucaccuguuuguuaguuua

SEQ ID NO: 1171682 - RNA, 19 nt, Homo sapiens
  misc_RNA (1)...(19): siRNA sense strand
caaaagcccugauuccuau

SEQ ID NO: 1171683 - RNA, 19 nt, Homo sapiens
  misc_RNA (1)...(19): siRNA sense strand
uauaucaccuguuuguuag

SEQ ID NO: 1171684 - RNA, 19 nt, Homo sapiens
  misc_RNA (1)...(19): siRNA sense strand
uauaagaagcacagaauuc

SEQ ID NO: 1171685 - RNA, 19 nt, Homo sapiens
  misc_RNA (1)...(19): siRNA sense strand
aggaggagcuugggccuuu

SEQ ID NO: 1171686 - RNA, 19 nt, Homo sapiens
  misc_RNA (1)...(19): siRNA sense strand
gugauuaaagcaacauuug

SEQ ID NO: 1171687 - RNA, 19 nt, Homo sapiens
  misc_RNA (1)...(19): siRNA sense strand
caaauucuagugccaguca

SEQ ID NO: 1171688 - RNA, 19 nt, Homo sapiens
  misc_RNA (1)...(19): siRNA sense strand
uacaugagccagcaaauuc

SEQ ID NO: 1171689 - RNA, 19 nt, Homo sapiens
  misc_RNA (1)...(19): siRNA sense strand
gaagcacagaauucuuaaa

SEQ ID NO: 1171690 - RNA, 19 nt, Homo sapiens
  misc_RNA (1)...(19): siRNA sense strand
uaucaccuguuuguuaguu

SEQ ID NO: 1171691 - RNA, 19 nt, Homo sapiens
  misc_RNA (1)...(19): siRNA sense strand
cuucgagacguuauuuaua

SEQ ID NO: 1171692 - RNA, 19 nt, Homo sapiens
  misc_RNA (1)...(19): siRNA sense strand
caucgcaugugauuaaagc

SEQ ID NO: 1171693 - RNA, 19 nt, Homo sapiens
  misc_RNA (1)...(19): siRNA sense strand
gcaugugauuaaagcaaca

SEQ ID NO: 1171694 - RNA, 19 nt, Homo sapiens
  misc_RNA (1)...(19): siRNA sense strand
gcuccuaauccaccucauu

SEQ ID NO: 1171695 - RNA, 19 nt, Homo sapiens
  misc_RNA (1)...(19): siRNA sense strand
ggaggagcuugggccuuug

SEQ ID NO: 1171696 - RNA, 19 nt, Homo sapiens
  misc_RNA (1)...(19): siRNA sense strand
uuacaugagccagcaaauu

SEQ ID NO: 1171697 - RNA, 19 nt, Homo sapiens
  misc_RNA (1)...(19): siRNA sense strand
ccaaaagcccugauuccua

SEQ ID NO: 1171698 - RNA, 19 nt, Homo sapiens
  misc_RNA (1)...(19): siRNA sense strand
aaauucuucuugccauaug

SEQ ID NO: 1171699 - RNA, 19 nt, Homo sapiens
  misc_RNA (1)...(19): siRNA sense strand
uuccaucgcaugugauuaa

SEQ ID NO: 1171700 - RNA, 19 nt, Homo sapiens
  misc_RNA (1)...(19): siRNA sense strand
gcuugggccuuuguucuuc

SEQ ID NO: 1171701 - RNA, 19 nt, Homo sapiens
  misc_RNA (1)...(19): siRNA sense strand
gagcuugggccuuuguucu

SEQ ID NO: 1171702 - RNA, 19 nt, Homo sapiens
  misc_RNA (1)...(19): siRNA sense strand
gcaauugucauaaaaccaa

SEQ ID NO: 1171703 - RNA, 19 nt, Homo sapiens
  misc_RNA (1)...(19): siRNA sense strand
gauucacuauaucaaccaa

SEQ ID NO: 1171704 - RNA, 19 nt, Homo sapiens
  misc_RNA (1)...(19): siRNA sense strand
cuccuaauccaccucauuu

SEQ ID NO: 1171705 - RNA, 19 nt, Homo sapiens
  misc_RNA (1)...(19): siRNA sense strand
uucgagacguuauuuauac

SEQ ID NO: 1171706 - RNA, 19 nt, Homo sapiens
  misc_RNA (1)...(19): siRNA sense strand
guucuucgagacguuauuu

SEQ ID NO: 1171707 - RNA, 19 nt, Homo sapiens
  misc_RNA (1)...(19): siRNA sense strand
caugagccagcaaauucua

SEQ ID NO: 1171708 - RNA, 19 nt, Homo sapiens
  misc_RNA (1)...(19): siRNA sense strand
caacauuugccuauaucag

SEQ ID NO: 1171709 - RNA, 19 nt, Homo sapiens
  misc_RNA (1)...(19): siRNA sense strand
gcacugaccucugugacuu

SEQ ID NO: 1171710 - RNA, 19 nt, Homo sapiens
  misc_RNA (1)...(19): siRNA sense strand
gaaaauucuucuugccaua

SEQ ID NO: 1171711 - RNA, 19 nt, Homo sapiens
  misc_RNA (1)...(19): siRNA sense strand
ucaccuguuuguuaguuua

SEQ ID NO: 1171712 - RNA, 19 nt, Homo sapiens
  misc_RNA (1)...(19): siRNA sense strand
caaaagcccugauuccuau

SEQ ID NO: 1171713 - RNA, 19 nt, Homo sapiens
  misc_RNA (1)...(19): siRNA sense strand
uauaucaccuguuuguuag

SEQ ID NO: 1171714 - RNA, 19 nt, Homo sapiens
  misc_RNA (1)...(19): siRNA sense strand
uauaagaagcacagaauuc

SEQ ID NO: 1171715 - RNA, 19 nt, Homo sapiens
  misc_RNA (1)...(19): siRNA sense strand
aggaggagcuugggccuuu

SEQ ID NO: 1171716 - RNA, 19 nt, Homo sapiens
  misc_RNA (1)...(19): siRNA sense strand
gugauuaaagcaacauuug

SEQ ID NO: 1171717 - RNA, 19 nt, Homo sapiens
  misc_RNA (1)...(19): siRNA sense strand
caaauucuagugccaguca

SEQ ID NO: 1171718 - RNA, 19 nt, Homo sapiens
  misc_RNA (1)...(19): siRNA sense strand
uacaugagccagcaaauuc

SEQ ID NO: 1171719 - RNA, 19 nt, Homo sapiens
  misc_RNA (1)...(19): siRNA sense strand
gaagcacagaauucuuaaa

SEQ ID NO: 1171720 - RNA, 19 nt, Homo sapiens
  misc_RNA (1)...(19): siRNA sense strand
uaucaccuguuuguuaguu

SEQ ID NO: 1171721 - RNA, 19 nt, Homo sapiens
  misc_RNA (1)...(19): siRNA sense strand
cuucgagacguuauuuaua

SEQ ID NO: 1171722 - RNA, 19 nt, Homo sapiens
  misc_RNA (1)...(19): siRNA sense strand
caucgcaugugauuaaagc

SEQ ID NO: 1171723 - RNA, 19 nt, Homo sapiens
  misc_RNA (1)...(19): siRNA sense strand
gcaugugauuaaagcaaca

SEQ ID NO: 1171724 - RNA, 19 nt, Homo sapiens
  misc_RNA (1)...(19): siRNA sense strand
gcuccuaauccaccucauu

SEQ ID NO: 1171725 - RNA, 19 nt, Homo sapiens
  misc_RNA (1)...(19): siRNA sense strand
ggaggagcuugggccuuug

SEQ ID NO: 1171726 - RNA, 19 nt, Homo sapiens
  misc_RNA (1)...(19): siRNA sense strand
uuacaugagccagcaaauu

SEQ ID NO: 1171727 - RNA, 19 nt, Homo sapiens
  misc_RNA (1)...(19): siRNA sense strand
ccaaaagcccugauuccua

SEQ ID NO: 1171728 - RNA, 19 nt, Homo sapiens
  misc_RNA (1)...(19): siRNA sense strand
aaauucuucuugccauaug

SEQ ID NO: 1171729 - RNA, 19 nt, Homo sapiens
  misc_RNA (1)...(19): siRNA sense strand
uuccaucgcaugugauuaa

SEQ ID NO: 1171730 - RNA, 19 nt, Homo sapiens
  misc_RNA (1)...(19): siRNA sense strand
gcuugggccuuuguucuuc

SEQ ID NO: 1171731 - RNA, 19 nt, Homo sapiens
  misc_RNA (1)...(19): siRNA sense strand
gagcuugggccuuuguucu

SEQ ID NO: 1171732 - RNA, 19 nt, Homo sapiens
  misc_RNA (1)...(19): siRNA sense strand
gcaauugucauaaaaccaa

SEQ ID NO: 1171733 - RNA, 19 nt, Homo sapiens
  misc_RNA (1)...(19): siRNA sense strand
gauucacuauaucaaccaa

SEQ ID NO: 1171734 - RNA, 19 nt, Homo sapiens
  misc_RNA (1)...(19): siRNA sense strand
cuccuaauccaccucauuu

SEQ ID NO: 1171735 - RNA, 19 nt, Homo sapiens
  misc_RNA (1)...(19): siRNA sense strand
uucgagacguuauuuauac

SEQ ID NO: 1171736 - RNA, 19 nt, Homo sapiens
  misc_RNA (1)...(19): siRNA sense strand
guucuucgagacguuauuu

SEQ ID NO: 1171737 - RNA, 19 nt, Homo sapiens
  misc_RNA (1)...(19): siRNA sense strand
caugagccagcaaauucua

SEQ ID NO: 1171738 - RNA, 19 nt, Homo sapiens
  misc_RNA (1)...(19): siRNA sense strand
caacauuugccuauaucag

SEQ ID NO: 1171739 - RNA, 19 nt, Homo sapiens
  misc_RNA (1)...(19): siRNA sense strand
gaacuucccuuaagaguca

SEQ ID NO: 1171740 - RNA, 19 nt, Homo sapiens
  misc_RNA (1)...(19): siRNA sense strand
ggaaugaccuggcagauca

SEQ ID NO: 1171741 - RNA, 19 nt, Homo sapiens
  misc_RNA (1)...(19): siRNA sense strand
ccaagucgcuggagccauu

SEQ ID NO: 1171742 - RNA, 19 nt, Homo sapiens
  misc_RNA (1)...(19): siRNA sense strand
gggaacaacuucaguccaa

SEQ ID NO: 1171743 - RNA, 19 nt, Homo sapiens
  misc_RNA (1)...(19): siRNA sense strand
ugagcacgcugaaggcuua

SEQ ID NO: 1171744 - RNA, 19 nt, Homo sapiens
  misc_RNA (1)...(19): siRNA sense strand
caaccuagaacuucccuua

SEQ ID NO: 1171745 - RNA, 19 nt, Homo sapiens
  misc_RNA (1)...(19): siRNA sense strand
gcagagagccaguguuugu

SEQ ID NO: 1171746 - RNA, 19 nt, Homo sapiens
  misc_RNA (1)...(19): siRNA sense strand
uaaccagacugugacauuu

SEQ ID NO: 1171747 - RNA, 19 nt, Homo sapiens
  misc_RNA (1)...(19): siRNA sense strand
gcaagaagugccaagauug

SEQ ID NO: 1171748 - RNA, 19 nt, Homo sapiens
  misc_RNA (1)...(19): siRNA sense strand
gggccagguucuccuauuu

SEQ ID NO: 1171749 - RNA, 19 nt, Homo sapiens
  misc_RNA (1)...(19): siRNA sense strand
gaaaacagcccacugaugu

SEQ ID NO: 1171750 - RNA, 19 nt, Homo sapiens
  misc_RNA (1)...(19): siRNA sense strand
ggacuguggucugccauug

SEQ ID NO: 1171751 - RNA, 19 nt, Homo sapiens
  misc_RNA (1)...(19): siRNA sense strand
gggaagaaaggcccaacua

SEQ ID NO: 1171752 - RNA, 19 nt, Homo sapiens
  misc_RNA (1)...(19): siRNA sense strand
gaacuccuccuuccugcuu

SEQ ID NO: 1171753 - RNA, 19 nt, Homo sapiens
  misc_RNA (1)...(19): siRNA sense strand
uccaagggcugcaguucua

SEQ ID NO: 1171754 - RNA, 19 nt, Homo sapiens
  misc_RNA (1)...(19): siRNA sense strand
ccuagaacuucccuuaaga

SEQ ID NO: 1171755 - RNA, 19 nt, Homo sapiens
  misc_RNA (1)...(19): siRNA sense strand
caaugguggucgugugauu

SEQ ID NO: 1171756 - RNA, 19 nt, Homo sapiens
  misc_RNA (1)...(19): siRNA sense strand
ggagagguaucgcccugau

SEQ ID NO: 1171757 - RNA, 19 nt, Homo sapiens
  misc_RNA (1)...(19): siRNA sense strand
gugaauuacugcuacaauc

SEQ ID NO: 1171758 - RNA, 19 nt, Homo sapiens
  misc_RNA (1)...(19): siRNA sense strand
ggagaugcuuuuccacuuu

SEQ ID NO: 1171759 - RNA, 19 nt, Homo sapiens
  misc_RNA (1)...(19): siRNA sense strand
ccuaugcccuguuucucua

SEQ ID NO: 1171760 - RNA, 19 nt, Homo sapiens
  misc_RNA (1)...(19): siRNA sense strand
ggagugaggagcccaggaa

SEQ ID NO: 1171761 - RNA, 19 nt, Homo sapiens
  misc_RNA (1)...(19): siRNA sense strand
gccauucacucuggagauu

SEQ ID NO: 1171762 - RNA, 19 nt, Homo sapiens
  misc_RNA (1)...(19): siRNA sense strand
gcagggacgacgggacuua

SEQ ID NO: 1171763 - RNA, 19 nt, Homo sapiens
  misc_RNA (1)...(19): siRNA sense strand
gggcagaccacgcugauuc

SEQ ID NO: 1171764 - RNA, 19 nt, Homo sapiens
  misc_RNA (1)...(19): siRNA sense strand
gggaagacgugcgcgaugu

SEQ ID NO: 1171765 - RNA, 19 nt, Homo sapiens
  misc_RNA (1)...(19): siRNA sense strand
gcaagcaucggacuucaca

SEQ ID NO: 1171766 - RNA, 19 nt, Homo sapiens
  misc_RNA (1)...(19): siRNA sense strand
gaauuacugcuacaaucaa

SEQ ID NO: 1171767 - RNA, 19 nt, Homo sapiens
  misc_RNA (1)...(19): siRNA sense strand
ugacaagcccuaccucugu

SEQ ID NO: 1171768 - RNA, 19 nt, Homo sapiens
  misc_RNA (1)...(19): siRNA sense strand
gcuccugggcugaacauuu

SEQ ID NO: 1171769 - RNA, 19 nt, Homo sapiens
  misc_RNA (1)...(19): siRNA sense strand
ccagcugccuuccaacuuc

SEQ ID NO: 1171770 - RNA, 19 nt, Homo sapiens
  misc_RNA (1)...(19): siRNA sense strand
gcaccgacuuggagcucuu

SEQ ID NO: 1171771 - RNA, 19 nt, Homo sapiens
  misc_RNA (1)...(19): siRNA sense strand
gaaacucgacgcguucuuc

SEQ ID NO: 1171772 - RNA, 19 nt, Homo sapiens
  misc_RNA (1)...(19): siRNA sense strand
cagaugcgauggcuacaag

SEQ ID NO: 1171773 - RNA, 19 nt, Homo sapiens
  misc_RNA (1)...(19): siRNA sense strand
caaggccacugcuacaucu

SEQ ID NO: 1171774 - RNA, 19 nt, Homo sapiens
  misc_RNA (1)...(19): siRNA sense strand
gccaguguuuguacaauca

SEQ ID NO: 1171775 - RNA, 19 nt, Homo sapiens
  misc_RNA (1)...(19): siRNA sense strand
agcaagaagugccaagauu

SEQ ID NO: 1171776 - RNA, 19 nt, Homo sapiens
  misc_RNA (1)...(19): siRNA sense strand
ggauuagaaagaucacaaa

SEQ ID NO: 1171777 - RNA, 19 nt, Homo sapiens
  misc_RNA (1)...(19): siRNA sense strand
gggcuacugugaccaugga

SEQ ID NO: 1171778 - RNA, 19 nt, Homo sapiens
  misc_RNA (1)...(19): siRNA sense strand
acuuggagcucuuugagaa

SEQ ID NO: 1171779 - RNA, 19 nt, Homo sapiens
  misc_RNA (1)...(19): siRNA sense strand
ggaagaaaggcccaacuac

SEQ ID NO: 1171780 - RNA, 19 nt, Homo sapiens
  misc_RNA (1)...(19): siRNA sense strand
ggucaaugcccacgccuau

SEQ ID NO: 1171781 - RNA, 19 nt, Homo sapiens
  misc_RNA (1)...(19): siRNA sense strand
gaucaucuucccagaguca

SEQ ID NO: 1171782 - RNA, 19 nt, Homo sapiens
  misc_RNA (1)...(19): siRNA sense strand
caaguggaacgaaucgauu

SEQ ID NO: 1171783 - RNA, 19 nt, Homo sapiens
  misc_RNA (1)...(19): siRNA sense strand
ggagcucuuuccuguguca

SEQ ID NO: 1171784 - RNA, 19 nt, Homo sapiens
  misc_RNA (1)...(19): siRNA sense strand
cuccugggcugaacauuug

SEQ ID NO: 1171785 - RNA, 19 nt, Homo sapiens
  misc_RNA (1)...(19): siRNA sense strand
caggccgagucuuggauua

SEQ ID NO: 1171786 - RNA, 19 nt, Homo sapiens
  misc_RNA (1)...(19): siRNA sense strand
gcucuuuccugugucagaa

SEQ ID NO: 1171787 - RNA, 19 nt, Homo sapiens
  misc_RNA (1)...(19): siRNA sense strand
ucauugacuuccugaacaa

SEQ ID NO: 1171788 - RNA, 19 nt, Homo sapiens
  misc_RNA (1)...(19): siRNA sense strand
guucuucggcaucuucuuu

SEQ ID NO: 1171789 - RNA, 19 nt, Homo sapiens
  misc_RNA (1)...(19): siRNA sense strand
gaagacgugcgcgauguga

SEQ ID NO: 1171790 - RNA, 19 nt, Homo sapiens
  misc_RNA (1)...(19): siRNA sense strand
ggccgagucuuggauuaga

SEQ ID NO: 1171791 - RNA, 19 nt, Homo sapiens
  misc_RNA (1)...(19): siRNA sense strand
ugaauuacugcuacaauca

SEQ ID NO: 1171792 - RNA, 19 nt, Homo sapiens
  misc_RNA (1)...(19): siRNA sense strand
aguccugcccugugaauua

SEQ ID NO: 1171793 - RNA, 19 nt, Homo sapiens
  misc_RNA (1)...(19): siRNA sense strand
gcagcguccuuggcaguug

SEQ ID NO: 1171794 - RNA, 19 nt, Homo sapiens
  misc_RNA (1)...(19): siRNA sense strand
gugagcaccugagcaugaa

SEQ ID NO: 1171795 - RNA, 19 nt, Homo sapiens
  misc_RNA (1)...(19): siRNA sense strand
gagccaguguuuguacaau

SEQ ID NO: 1171796 - RNA, 19 nt, Homo sapiens
  misc_RNA (1)...(19): siRNA sense strand
gagagccaguguuuguaca

SEQ ID NO: 1171797 - RNA, 19 nt, Homo sapiens
  misc_RNA (1)...(19): siRNA sense strand
ggaauacgagacguucuau

SEQ ID NO: 1171798 - RNA, 19 nt, Homo sapiens
  misc_RNA (1)...(19): siRNA sense strand
cgacgggacuuacgauucc

SEQ ID NO: 1171799 - RNA, 19 nt, Homo sapiens
  misc_RNA (1)...(19): siRNA sense strand
gaacauuugaucuccaacu

SEQ ID NO: 1171800 - RNA, 19 nt, Homo sapiens
  misc_RNA (1)...(19): siRNA sense strand
guccaacugucaaccuaga

SEQ ID NO: 1171801 - RNA, 19 nt, Homo sapiens
  misc_RNA (1)...(19): siRNA sense strand
gcuccucucuccgugauuc

SEQ ID NO: 1171802 - RNA, 19 nt, Homo sapiens
  misc_RNA (1)...(19): siRNA sense strand
acgccacccucaaucagua

SEQ ID NO: 1171803 - RNA, 19 nt, Homo sapiens
  misc_RNA (1)...(19): siRNA sense strand
ccacaucaccaccuuggau

SEQ ID NO: 1171804 - RNA, 19 nt, Homo sapiens
  misc_RNA (1)...(19): siRNA sense strand
gaacaacuucaguccaacu

SEQ ID NO: 1171805 - RNA, 19 nt, Homo sapiens
  misc_RNA (1)...(19): siRNA sense strand
ucaguuacaccuucaaugg

SEQ ID NO: 1171806 - RNA, 19 nt, Homo sapiens
  misc_RNA (1)...(19): siRNA sense strand
aaccaguccugcccuguga

SEQ ID NO: 1171807 - RNA, 19 nt, Homo sapiens
  misc_RNA (1)...(19): siRNA sense strand
caacgggacaggccuccuu

SEQ ID NO: 1171808 - RNA, 19 nt, Homo sapiens
  misc_RNA (1)...(19): siRNA sense strand
gguggaggcguucuuauac

SEQ ID NO: 1171809 - RNA, 19 nt, Homo sapiens
  misc_RNA (1)...(19): siRNA sense strand
ggugguggaggcguucuua

SEQ ID NO: 1171810 - RNA, 19 nt, Homo sapiens
  misc_RNA (1)...(19): siRNA sense strand
gaacgccacccucaaucag

SEQ ID NO: 1171811 - RNA, 19 nt, Homo sapiens
  misc_RNA (1)...(19): siRNA sense strand
gcaggccgagucuuggauu

SEQ ID NO: 1171812 - RNA, 19 nt, Homo sapiens
  misc_RNA (1)...(19): siRNA sense strand
ugguggaggcguucuuaua

SEQ ID NO: 1171813 - RNA, 19 nt, Homo sapiens
  misc_RNA (1)...(19): siRNA sense strand
gacgggagcagguccuaug

SEQ ID NO: 1171814 - RNA, 19 nt, Homo sapiens
  misc_RNA (1)...(19): siRNA sense strand
gccgagucuuggauuagaa

SEQ ID NO: 1171815 - RNA, 19 nt, Homo sapiens
  misc_RNA (1)...(19): siRNA sense strand
acacgagggaagucaguaa

SEQ ID NO: 1171816 - RNA, 19 nt, Homo sapiens
  misc_RNA (1)...(19): siRNA sense strand
ugugagcaccugagcauga

SEQ ID NO: 1171817 - RNA, 19 nt, Homo sapiens
  misc_RNA (1)...(19): siRNA sense strand
ggaagacgugcgcgaugug

SEQ ID NO: 1171818 - RNA, 19 nt, Homo sapiens
  misc_RNA (1)...(19): siRNA sense strand
ggacgacgggacuuacgau

SEQ ID NO: 1171819 - RNA, 19 nt, Homo sapiens
  misc_RNA (1)...(19): siRNA sense strand
ccaaguggaacgaaucgau

SEQ ID NO: 1171820 - RNA, 19 nt, Homo sapiens
  misc_RNA (1)...(19): siRNA sense strand
gaccacauuuuaucaggaa

SEQ ID NO: 1171821 - RNA, 19 nt, Homo sapiens
  misc_RNA (1)...(19): siRNA sense strand
augcagagagccaguguuu

SEQ ID NO: 1171822 - RNA, 19 nt, Homo sapiens
  misc_RNA (1)...(19): siRNA sense strand
gaauacgagacguucuaug

SEQ ID NO: 1171823 - RNA, 19 nt, Homo sapiens
  misc_RNA (1)...(19): siRNA sense strand
ugaucgcgcucuccaacau

SEQ ID NO: 1171824 - RNA, 19 nt, Homo sapiens
  misc_RNA (1)...(19): siRNA sense strand
ccuuggauggugucaguua

SEQ ID NO: 1171825 - RNA, 19 nt, Homo sapiens
  misc_RNA (1)...(19): siRNA sense strand
cagcugccuuccaacuuca

SEQ ID NO: 1171826 - RNA, 19 nt, Homo sapiens
  misc_RNA (1)...(19): siRNA sense strand
gcagcuguguguccuucuc

SEQ ID NO: 1171827 - RNA, 19 nt, Homo sapiens
  misc_RNA (1)...(19): siRNA sense strand
cacagacaauggccagauc

SEQ ID NO: 1171828 - RNA, 19 nt, Homo sapiens
  misc_RNA (1)...(19): siRNA sense strand
gcacgcugaaggcuuacuu

SEQ ID NO: 1171829 - RNA, 19 nt, Homo sapiens
  misc_RNA (1)...(19): siRNA sense strand
cgaacgccacccucaauca

SEQ ID NO: 1171830 - RNA, 19 nt, Homo sapiens
  misc_RNA (1)...(19): siRNA sense strand
cugaacauuugaucuccaa

SEQ ID NO: 1171831 - RNA, 19 nt, Homo sapiens
  misc_RNA (1)...(19): siRNA sense strand
gagaugcuuuuccacuuug

SEQ ID NO: 1171832 - RNA, 19 nt, Homo sapiens
  misc_RNA (1)...(19): siRNA sense strand
ggggagcucuuuccugugu

SEQ ID NO: 1171833 - RNA, 19 nt, Homo sapiens
  misc_RNA (1)...(19): siRNA sense strand
cagagagccaguguuugua

SEQ ID NO: 1171834 - RNA, 19 nt, Homo sapiens
  misc_RNA (1)...(19): siRNA sense strand
caacgcaagcaucggacuu

SEQ ID NO: 1171835 - RNA, 19 nt, Homo sapiens
  misc_RNA (1)...(19): siRNA sense strand
gggcugaacauuugaucuc

SEQ ID NO: 1171836 - RNA, 19 nt, Homo sapiens
  misc_RNA (1)...(19): siRNA sense strand
caacuucaccccuguuuuc

SEQ ID NO: 1171837 - RNA, 19 nt, Homo sapiens
  misc_RNA (1)...(19): siRNA sense strand
auaaccagacugugacauu

SEQ ID NO: 1171838 - RNA, 19 nt, Homo sapiens
  misc_RNA (1)...(19): siRNA sense strand
gugaggagcccaggaacga

SEQ ID NO: 1171839 - RNA, 19 nt, Homo sapiens
  misc_RNA (1)...(19): siRNA sense strand
gaacuucccuuaagaguca

SEQ ID NO: 1171840 - RNA, 19 nt, Homo sapiens
  misc_RNA (1)...(19): siRNA sense strand
ggaaugaccuggcagauca

SEQ ID NO: 1171841 - RNA, 19 nt, Homo sapiens
  misc_RNA (1)...(19): siRNA sense strand
ccaagucgcuggagccauu

SEQ ID NO: 1171842 - RNA, 19 nt, Homo sapiens
  misc_RNA (1)...(19): siRNA sense strand
gggaacaacuucaguccaa

SEQ ID NO: 1171843 - RNA, 19 nt, Homo sapiens
  misc_RNA (1)...(19): siRNA sense strand
ugagcacgcugaaggcuua

SEQ ID NO: 1171844 - RNA, 19 nt, Homo sapiens
  misc_RNA (1)...(19): siRNA sense strand
caaccuagaacuucccuua

SEQ ID NO: 1171845 - RNA, 19 nt, Homo sapiens
  misc_RNA (1)...(19): siRNA sense strand
gcagagagccaguguuugu

SEQ ID NO: 1171846 - RNA, 19 nt, Homo sapiens
  misc_RNA (1)...(19): siRNA sense strand
uaaccagacugugacauuu

SEQ ID NO: 1171847 - RNA, 19 nt, Homo sapiens
  misc_RNA (1)...(19): siRNA sense strand
gcaagaagugccaagauug

SEQ ID NO: 1171848 - RNA, 19 nt, Homo sapiens
  misc_RNA (1)...(19): siRNA sense strand
gggccagguucuccuauuu

SEQ ID NO: 1171849 - RNA, 19 nt, Homo sapiens
  misc_RNA (1)...(19): siRNA sense strand
gaaaacagcccacugaugu

SEQ ID NO: 1171850 - RNA, 19 nt, Homo sapiens
  misc_RNA (1)...(19): siRNA sense strand
ggacuguggucugccauug

SEQ ID NO: 1171851 - RNA, 19 nt, Homo sapiens
  misc_RNA (1)...(19): siRNA sense strand
gggaagaaaggcccaacua

SEQ ID NO: 1171852 - RNA, 19 nt, Homo sapiens
  misc_RNA (1)...(19): siRNA sense strand
gaacuccuccuuccugcuu

SEQ ID NO: 1171853 - RNA, 19 nt, Homo sapiens
  misc_RNA (1)...(19): siRNA sense strand
uccaagggcugcaguucua

SEQ ID NO: 1171854 - RNA, 19 nt, Homo sapiens
  misc_RNA (1)...(19): siRNA sense strand
ccuagaacuucccuuaaga

SEQ ID NO: 1171855 - RNA, 19 nt, Homo sapiens
  misc_RNA (1)...(19): siRNA sense strand
caaugguggucgugugauu

SEQ ID NO: 1171856 - RNA, 19 nt, Homo sapiens
  misc_RNA (1)...(19): siRNA sense strand
ggagagguaucgcccugau

SEQ ID NO: 1171857 - RNA, 19 nt, Homo sapiens
  misc_RNA (1)...(19): siRNA sense strand
gugaauuacugcuacaauc

SEQ ID NO: 1171858 - RNA, 19 nt, Homo sapiens
  misc_RNA (1)...(19): siRNA sense strand
ggagaugcuuuuccacuuu

SEQ ID NO: 1171859 - RNA, 19 nt, Homo sapiens
  misc_RNA (1)...(19): siRNA sense strand
ccuaugcccuguuucucua

SEQ ID NO: 1171860 - RNA, 19 nt, Homo sapiens
  misc_RNA (1)...(19): siRNA sense strand
ggagugaggagcccaggaa

SEQ ID NO: 1171861 - RNA, 19 nt, Homo sapiens
  misc_RNA (1)...(19): siRNA sense strand
gccauucacucuggagauu

SEQ ID NO: 1171862 - RNA, 19 nt, Homo sapiens
  misc_RNA (1)...(19): siRNA sense strand
gcagggacgacgggacuua

SEQ ID NO: 1171863 - RNA, 19 nt, Homo sapiens
  misc_RNA (1)...(19): siRNA sense strand
gggcagaccacgcugauuc

SEQ ID NO: 1171864 - RNA, 19 nt, Homo sapiens
  misc_RNA (1)...(19): siRNA sense strand
gggaagacgugcgcgaugu

SEQ ID NO: 1171865 - RNA, 19 nt, Homo sapiens
  misc_RNA (1)...(19): siRNA sense strand
gcaagcaucggacuucaca

SEQ ID NO: 1171866 - RNA, 19 nt, Homo sapiens
  misc_RNA (1)...(19): siRNA sense strand
gaauuacugcuacaaucaa

SEQ ID NO: 1171867 - RNA, 19 nt, Homo sapiens
  misc_RNA (1)...(19): siRNA sense strand
ugacaagcccuaccucugu

SEQ ID NO: 1171868 - RNA, 19 nt, Homo sapiens
  misc_RNA (1)...(19): siRNA sense strand
gcuccugggcugaacauuu

SEQ ID NO: 1171869 - RNA, 19 nt, Homo sapiens
  misc_RNA (1)...(19): siRNA sense strand
ccagcugccuuccaacuuc

SEQ ID NO: 1171870 - RNA, 19 nt, Homo sapiens
  misc_RNA (1)...(19): siRNA sense strand
gcaccgacuuggagcucuu

SEQ ID NO: 1171871 - RNA, 19 nt, Homo sapiens
  misc_RNA (1)...(19): siRNA sense strand
gaaacucgacgcguucuuc

SEQ ID NO: 1171872 - RNA, 19 nt, Homo sapiens
  misc_RNA (1)...(19): siRNA sense strand
cagaugcgauggcuacaag

SEQ ID NO: 1171873 - RNA, 19 nt, Homo sapiens
  misc_RNA (1)...(19): siRNA sense strand
caaggccacugcuacaucu

SEQ ID NO: 1171874 - RNA, 19 nt, Homo sapiens
  misc_RNA (1)...(19): siRNA sense strand
gccaguguuuguacaauca

SEQ ID NO: 1171875 - RNA, 19 nt, Homo sapiens
  misc_RNA (1)...(19): siRNA sense strand
agcaagaagugccaagauu

SEQ ID NO: 1171876 - RNA, 19 nt, Homo sapiens
  misc_RNA (1)...(19): siRNA sense strand
ggauuagaaagaucacaaa

SEQ ID NO: 1171877 - RNA, 19 nt, Homo sapiens
  misc_RNA (1)...(19): siRNA sense strand
gggcuacugugaccaugga

SEQ ID NO: 1171878 - RNA, 19 nt, Homo sapiens
  misc_RNA (1)...(19): siRNA sense strand
acuuggagcucuuugagaa

SEQ ID NO: 1171879 - RNA, 19 nt, Homo sapiens
  misc_RNA (1)...(19): siRNA sense strand
ggaagaaaggcccaacuac

SEQ ID NO: 1171880 - RNA, 19 nt, Homo sapiens
  misc_RNA (1)...(19): siRNA sense strand
ggucaaugcccacgccuau

SEQ ID NO: 1171881 - RNA, 19 nt, Homo sapiens
  misc_RNA (1)...(19): siRNA sense strand
gaucaucuucccagaguca

SEQ ID NO: 1171882 - RNA, 19 nt, Homo sapiens
  misc_RNA (1)...(19): siRNA sense strand
caaguggaacgaaucgauu

SEQ ID NO: 1171883 - RNA, 19 nt, Homo sapiens
  misc_RNA (1)...(19): siRNA sense strand
ggagcucuuuccuguguca

SEQ ID NO: 1171884 - RNA, 19 nt, Homo sapiens
  misc_RNA (1)...(19): siRNA sense strand
cuccugggcugaacauuug

SEQ ID NO: 1171885 - RNA, 19 nt, Homo sapiens
  misc_RNA (1)...(19): siRNA sense strand
caggccgagucuuggauua

SEQ ID NO: 1171886 - RNA, 19 nt, Homo sapiens
  misc_RNA (1)...(19): siRNA sense strand
gcucuuuccugugucagaa

SEQ ID NO: 1171887 - RNA, 19 nt, Homo sapiens
  misc_RNA (1)...(19): siRNA sense strand
ucauugacuuccugaacaa

SEQ ID NO: 1171888 - RNA, 19 nt, Homo sapiens
  misc_RNA (1)...(19): siRNA sense strand
guucuucggcaucuucuuu

SEQ ID NO: 1171889 - RNA, 19 nt, Homo sapiens
  misc_RNA (1)...(19): siRNA sense strand
gaagacgugcgcgauguga

SEQ ID NO: 1171890 - RNA, 19 nt, Homo sapiens
  misc_RNA (1)...(19): siRNA sense strand
ggccgagucuuggauuaga

SEQ ID NO: 1171891 - RNA, 19 nt, Homo sapiens
  misc_RNA (1)...(19): siRNA sense strand
ugaauuacugcuacaauca

SEQ ID NO: 1171892 - RNA, 19 nt, Homo sapiens
  misc_RNA (1)...(19): siRNA sense strand
aguccugcccugugaauua

SEQ ID NO: 1171893 - RNA, 19 nt, Homo sapiens
  misc_RNA (1)...(19): siRNA sense strand
gcagcguccuuggcaguug

SEQ ID NO: 1171894 - RNA, 19 nt, Homo sapiens
  misc_RNA (1)...(19): siRNA sense strand
gugagcaccugagcaugaa

SEQ ID NO: 1171895 - RNA, 19 nt, Homo sapiens
  misc_RNA (1)...(19): siRNA sense strand
gagccaguguuuguacaau

SEQ ID NO: 1171896 - RNA, 19 nt, Homo sapiens
  misc_RNA (1)...(19): siRNA sense strand
gagagccaguguuuguaca

SEQ ID NO: 1171897 - RNA, 19 nt, Homo sapiens
  misc_RNA (1)...(19): siRNA sense strand
ggaauacgagacguucuau

SEQ ID NO: 1171898 - RNA, 19 nt, Homo sapiens
  misc_RNA (1)...(19): siRNA sense strand
cgacgggacuuacgauucc

SEQ ID NO: 1171899 - RNA, 19 nt, Homo sapiens
  misc_RNA (1)...(19): siRNA sense strand
gaacauuugaucuccaacu

SEQ ID NO: 1171900 - RNA, 19 nt, Homo sapiens
  misc_RNA (1)...(19): siRNA sense strand
guccaacugucaaccuaga

SEQ ID NO: 1171901 - RNA, 19 nt, Homo sapiens
  misc_RNA (1)...(19): siRNA sense strand
gcuccucucuccgugauuc

SEQ ID NO: 1171902 - RNA, 19 nt, Homo sapiens
  misc_RNA (1)...(19): siRNA sense strand
acgccacccucaaucagua

SEQ ID NO: 1171903 - RNA, 19 nt, Homo sapiens
  misc_RNA (1)...(19): siRNA sense strand
ccacaucaccaccuuggau

SEQ ID NO: 1171904 - RNA, 19 nt, Homo sapiens
  misc_RNA (1)...(19): siRNA sense strand
gaacaacuucaguccaacu

SEQ ID NO: 1171905 - RNA, 19 nt, Homo sapiens
  misc_RNA (1)...(19): siRNA sense strand
ucaguuacaccuucaaugg

SEQ ID NO: 1171906 - RNA, 19 nt, Homo sapiens
  misc_RNA (1)...(19): siRNA sense strand
aaccaguccugcccuguga

SEQ ID NO: 1171907 - RNA, 19 nt, Homo sapiens
  misc_RNA (1)...(19): siRNA sense strand
caacgggacaggccuccuu

SEQ ID NO: 1171908 - RNA, 19 nt, Homo sapiens
  misc_RNA (1)...(19): siRNA sense strand
gguggaggcguucuuauac

SEQ ID NO: 1171909 - RNA, 19 nt, Homo sapiens
  misc_RNA (1)...(19): siRNA sense strand
ggugguggaggcguucuua

SEQ ID NO: 1171910 - RNA, 19 nt, Homo sapiens
  misc_RNA (1)...(19): siRNA sense strand
gaacgccacccucaaucag

SEQ ID NO: 1171911 - RNA, 19 nt, Homo sapiens
  misc_RNA (1)...(19): siRNA sense strand
gcaggccgagucuuggauu

SEQ ID NO: 1171912 - RNA, 19 nt, Homo sapiens
  misc_RNA (1)...(19): siRNA sense strand
ugguggaggcguucuuaua

SEQ ID NO: 1171913 - RNA, 19 nt, Homo sapiens
  misc_RNA (1)...(19): siRNA sense strand
gacgggagcagguccuaug

SEQ ID NO: 1171914 - RNA, 19 nt, Homo sapiens
  misc_RNA (1)...(19): siRNA sense strand
gccgagucuuggauuagaa

SEQ ID NO: 1171915 - RNA, 19 nt, Homo sapiens
  misc_RNA (1)...(19): siRNA sense strand
acacgagggaagucaguaa

SEQ ID NO: 1171916 - RNA, 19 nt, Homo sapiens
  misc_RNA (1)...(19): siRNA sense strand
ugugagcaccugagcauga

SEQ ID NO: 1171917 - RNA, 19 nt, Homo sapiens
  misc_RNA (1)...(19): siRNA sense strand
ggaagacgugcgcgaugug

SEQ ID NO: 1171918 - RNA, 19 nt, Homo sapiens
  misc_RNA (1)...(19): siRNA sense strand
ggacgacgggacuuacgau

SEQ ID NO: 1171919 - RNA, 19 nt, Homo sapiens
  misc_RNA (1)...(19): siRNA sense strand
ccaaguggaacgaaucgau

SEQ ID NO: 1171920 - RNA, 19 nt, Homo sapiens
  misc_RNA (1)...(19): siRNA sense strand
gaccacauuuuaucaggaa

SEQ ID NO: 1171921 - RNA, 19 nt, Homo sapiens
  misc_RNA (1)...(19): siRNA sense strand
augcagagagccaguguuu

SEQ ID NO: 1171922 - RNA, 19 nt, Homo sapiens
  misc_RNA (1)...(19): siRNA sense strand
gaauacgagacguucuaug

SEQ ID NO: 1171923 - RNA, 19 nt, Homo sapiens
  misc_RNA (1)...(19): siRNA sense strand
ugaucgcgcucuccaacau

SEQ ID NO: 1171924 - RNA, 19 nt, Homo sapiens
  misc_RNA (1)...(19): siRNA sense strand
ccuuggauggugucaguua

SEQ ID NO: 1171925 - RNA, 19 nt, Homo sapiens
  misc_RNA (1)...(19): siRNA sense strand
cagcugccuuccaacuuca

SEQ ID NO: 1171926 - RNA, 19 nt, Homo sapiens
  misc_RNA (1)...(19): siRNA sense strand
gcagcuguguguccuucuc

SEQ ID NO: 1171927 - RNA, 19 nt, Homo sapiens
  misc_RNA (1)...(19): siRNA sense strand
cacagacaauggccagauc

SEQ ID NO: 1171928 - RNA, 19 nt, Homo sapiens
  misc_RNA (1)...(19): siRNA sense strand
gcacgcugaaggcuuacuu

SEQ ID NO: 1171929 - RNA, 19 nt, Homo sapiens
  misc_RNA (1)...(19): siRNA sense strand
cgaacgccacccucaauca

SEQ ID NO: 1171930 - RNA, 19 nt, Homo sapiens
  misc_RNA (1)...(19): siRNA sense strand
cugaacauuugaucuccaa

SEQ ID NO: 1171931 - RNA, 19 nt, Homo sapiens
  misc_RNA (1)...(19): siRNA sense strand
gagaugcuuuuccacuuug

SEQ ID NO: 1171932 - RNA, 19 nt, Homo sapiens
  misc_RNA (1)...(19): siRNA sense strand
ggggagcucuuuccugugu

SEQ ID NO: 1171933 - RNA, 19 nt, Homo sapiens
  misc_RNA (1)...(19): siRNA sense strand
cagagagccaguguuugua

SEQ ID NO: 1171934 - RNA, 19 nt, Homo sapiens
  misc_RNA (1)...(19): siRNA sense strand
caacgcaagcaucggacuu

SEQ ID NO: 1171935 - RNA, 19 nt, Homo sapiens
  misc_RNA (1)...(19): siRNA sense strand
gggcugaacauuugaucuc

SEQ ID NO: 1171936 - RNA, 19 nt, Homo sapiens
  misc_RNA (1)...(19): siRNA sense strand
caacuucaccccuguuuuc

SEQ ID NO: 1171937 - RNA, 19 nt, Homo sapiens
  misc_RNA (1)...(19): siRNA sense strand
auaaccagacugugacauu

SEQ ID NO: 1171938 - RNA, 19 nt, Homo sapiens
  misc_RNA (1)...(19): siRNA sense strand
gugaggagcccaggaacga

SEQ ID NO: 1171939 - RNA, 19 nt, Homo sapiens
  misc_RNA (1)...(19): siRNA sense strand
gaacuucccuuaagaguca

SEQ ID NO: 1171940 - RNA, 19 nt, Homo sapiens
  misc_RNA (1)...(19): siRNA sense strand
ggaaugaccuggcagauca

SEQ ID NO: 1171941 - RNA, 19 nt, Homo sapiens
  misc_RNA (1)...(19): siRNA sense strand
ccaagucgcuggagccauu

SEQ ID NO: 1171942 - RNA, 19 nt, Homo sapiens
  misc_RNA (1)...(19): siRNA sense strand
gggaacaacuucaguccaa

SEQ ID NO: 1171943 - RNA, 19 nt, Homo sapiens
  misc_RNA (1)...(19): siRNA sense strand
ugagcacgcugaaggcuua

SEQ ID NO: 1171944 - RNA, 19 nt, Homo sapiens
  misc_RNA (1)...(19): siRNA sense strand
caaccuagaacuucccuua

SEQ ID NO: 1171945 - RNA, 19 nt, Homo sapiens
  misc_RNA (1)...(19): siRNA sense strand
gcagagagccaguguuugu

SEQ ID NO: 1171946 - RNA, 19 nt, Homo sapiens
  misc_RNA (1)...(19): siRNA sense strand
uaaccagacugugacauuu

SEQ ID NO: 1171947 - RNA, 19 nt, Homo sapiens
  misc_RNA (1)...(19): siRNA sense strand
gcaagaagugccaagauug

SEQ ID NO: 1171948 - RNA, 19 nt, Homo sapiens
  misc_RNA (1)...(19): siRNA sense strand
gggccagguucuccuauuu

SEQ ID NO: 1171949 - RNA, 19 nt, Homo sapiens
  misc_RNA (1)...(19): siRNA sense strand
gaaaacagcccacugaugu

SEQ ID NO: 1171950 - RNA, 19 nt, Homo sapiens
  misc_RNA (1)...(19): siRNA sense strand
ggacuguggucugccauug

SEQ ID NO: 1171951 - RNA, 19 nt, Homo sapiens
  misc_RNA (1)...(19): siRNA sense strand
gggaagaaaggcccaacua

SEQ ID NO: 1171952 - RNA, 19 nt, Homo sapiens
  misc_RNA (1)...(19): siRNA sense strand
gaacuccuccuuccugcuu

SEQ ID NO: 1171953 - RNA, 19 nt, Homo sapiens
  misc_RNA (1)...(19): siRNA sense strand
uccaagggcugcaguucua

SEQ ID NO: 1171954 - RNA, 19 nt, Homo sapiens
  misc_RNA (1)...(19): siRNA sense strand
ccuagaacuucccuuaaga

SEQ ID NO: 1171955 - RNA, 19 nt, Homo sapiens
  misc_RNA (1)...(19): siRNA sense strand
caaugguggucgugugauu

SEQ ID NO: 1171956 - RNA, 19 nt, Homo sapiens
  misc_RNA (1)...(19): siRNA sense strand
ggagagguaucgcccugau

SEQ ID NO: 1171957 - RNA, 19 nt, Homo sapiens
  misc_RNA (1)...(19): siRNA sense strand
gugaauuacugcuacaauc

SEQ ID NO: 1171958 - RNA, 19 nt, Homo sapiens
  misc_RNA (1)...(19): siRNA sense strand
ggagaugcuuuuccacuuu

SEQ ID NO: 1171959 - RNA, 19 nt, Homo sapiens
  misc_RNA (1)...(19): siRNA sense strand
ccuaugcccuguuucucua

SEQ ID NO: 1171960 - RNA, 19 nt, Homo sapiens
  misc_RNA (1)...(19): siRNA sense strand
ggagugaggagcccaggaa

SEQ ID NO: 1171961 - RNA, 19 nt, Homo sapiens
  misc_RNA (1)...(19): siRNA sense strand
gccauucacucuggagauu

SEQ ID NO: 1171962 - RNA, 19 nt, Homo sapiens
  misc_RNA (1)...(19): siRNA sense strand
gcagggacgacgggacuua

SEQ ID NO: 1171963 - RNA, 19 nt, Homo sapiens
  misc_RNA (1)...(19): siRNA sense strand
gggcagaccacgcugauuc

SEQ ID NO: 1171964 - RNA, 19 nt, Homo sapiens
  misc_RNA (1)...(19): siRNA sense strand
gggaagacgugcgcgaugu

SEQ ID NO: 1171965 - RNA, 19 nt, Homo sapiens
  misc_RNA (1)...(19): siRNA sense strand
gcaagcaucggacuucaca

SEQ ID NO: 1171966 - RNA, 19 nt, Homo sapiens
  misc_RNA (1)...(19): siRNA sense strand
gaauuacugcuacaaucaa

SEQ ID NO: 1171967 - RNA, 19 nt, Homo sapiens
  misc_RNA (1)...(19): siRNA sense strand
ugacaagcccuaccucugu

SEQ ID NO: 1171968 - RNA, 19 nt, Homo sapiens
  misc_RNA (1)...(19): siRNA sense strand
gcuccugggcugaacauuu

SEQ ID NO: 1171969 - RNA, 19 nt, Homo sapiens
  misc_RNA (1)...(19): siRNA sense strand
ccagcugccuuccaacuuc

SEQ ID NO: 1171970 - RNA, 19 nt, Homo sapiens
  misc_RNA (1)...(19): siRNA sense strand
gcaccgacuuggagcucuu

SEQ ID NO: 1171971 - RNA, 19 nt, Homo sapiens
  misc_RNA (1)...(19): siRNA sense strand
gaaacucgacgcguucuuc

SEQ ID NO: 1171972 - RNA, 19 nt, Homo sapiens
  misc_RNA (1)...(19): siRNA sense strand
cagaugcgauggcuacaag

SEQ ID NO: 1171973 - RNA, 19 nt, Homo sapiens
  misc_RNA (1)...(19): siRNA sense strand
caaggccacugcuacaucu

SEQ ID NO: 1171974 - RNA, 19 nt, Homo sapiens
  misc_RNA (1)...(19): siRNA sense strand
gccaguguuuguacaauca

SEQ ID NO: 1171975 - RNA, 19 nt, Homo sapiens
  misc_RNA (1)...(19): siRNA sense strand
agcaagaagugccaagauu

SEQ ID NO: 1171976 - RNA, 19 nt, Homo sapiens
  misc_RNA (1)...(19): siRNA sense strand
ggauuagaaagaucacaaa

SEQ ID NO: 1171977 - RNA, 19 nt, Homo sapiens
  misc_RNA (1)...(19): siRNA sense strand
gggcuacugugaccaugga

SEQ ID NO: 1171978 - RNA, 19 nt, Homo sapiens
  misc_RNA (1)...(19): siRNA sense strand
acuuggagcucuuugagaa

SEQ ID NO: 1171979 - RNA, 19 nt, Homo sapiens
  misc_RNA (1)...(19): siRNA sense strand
ggaagaaaggcccaacuac

SEQ ID NO: 1171980 - RNA, 19 nt, Homo sapiens
  misc_RNA (1)...(19): siRNA sense strand
ggucaaugcccacgccuau

SEQ ID NO: 1171981 - RNA, 19 nt, Homo sapiens
  misc_RNA (1)...(19): siRNA sense strand
gaucaucuucccagaguca

SEQ ID NO: 1171982 - RNA, 19 nt, Homo sapiens
  misc_RNA (1)...(19): siRNA sense strand
caaguggaacgaaucgauu

SEQ ID NO: 1171983 - RNA, 19 nt, Homo sapiens
  misc_RNA (1)...(19): siRNA sense strand
ggagcucuuuccuguguca

SEQ ID NO: 1171984 - RNA, 19 nt, Homo sapiens
  misc_RNA (1)...(19): siRNA sense strand
cuccugggcugaacauuug

SEQ ID NO: 1171985 - RNA, 19 nt, Homo sapiens
  misc_RNA (1)...(19): siRNA sense strand
caggccgagucuuggauua

SEQ ID NO: 1171986 - RNA, 19 nt, Homo sapiens
  misc_RNA (1)...(19): siRNA sense strand
gcucuuuccugugucagaa

SEQ ID NO: 1171987 - RNA, 19 nt, Homo sapiens
  misc_RNA (1)...(19): siRNA sense strand
ucauugacuuccugaacaa

SEQ ID NO: 1171988 - RNA, 19 nt, Homo sapiens
  misc_RNA (1)...(19): siRNA sense strand
guucuucggcaucuucuuu

SEQ ID NO: 1171989 - RNA, 19 nt, Homo sapiens
  misc_RNA (1)...(19): siRNA sense strand
gaagacgugcgcgauguga

SEQ ID NO: 1171990 - RNA, 19 nt, Homo sapiens
  misc_RNA (1)...(19): siRNA sense strand
ggccgagucuuggauuaga

SEQ ID NO: 1171991 - RNA, 19 nt, Homo sapiens
  misc_RNA (1)...(19): siRNA sense strand
ugaauuacugcuacaauca

SEQ ID NO: 1171992 - RNA, 19 nt, Homo sapiens
  misc_RNA (1)...(19): siRNA sense strand
aguccugcccugugaauua

SEQ ID NO: 1171993 - RNA, 19 nt, Homo sapiens
  misc_RNA (1)...(19): siRNA sense strand
gcagcguccuuggcaguug

SEQ ID NO: 1171994 - RNA, 19 nt, Homo sapiens
  misc_RNA (1)...(19): siRNA sense strand
gugagcaccugagcaugaa

SEQ ID NO: 1171995 - RNA, 19 nt, Homo sapiens
  misc_RNA (1)...(19): siRNA sense strand
gagccaguguuuguacaau

SEQ ID NO: 1171996 - RNA, 19 nt, Homo sapiens
  misc_RNA (1)...(19): siRNA sense strand
gagagccaguguuuguaca

SEQ ID NO: 1171997 - RNA, 19 nt, Homo sapiens
  misc_RNA (1)...(19): siRNA sense strand
ggaauacgagacguucuau

SEQ ID NO: 1171998 - RNA, 19 nt, Homo sapiens
  misc_RNA (1)...(19): siRNA sense strand
cgacgggacuuacgauucc

SEQ ID NO: 1171999 - RNA, 19 nt, Homo sapiens
  misc_RNA (1)...(19): siRNA sense strand
gaacauuugaucuccaacu

SEQ ID NO: 1172000 - RNA, 19 nt, Homo sapiens
  misc_RNA (1)...(19): siRNA sense strand
guccaacugucaaccuaga

SEQ ID NO: 1172001 - RNA, 19 nt, Homo sapiens
  misc_RNA (1)...(19): siRNA sense strand
gcuccucucuccgugauuc

SEQ ID NO: 1172002 - RNA, 19 nt, Homo sapiens
  misc_RNA (1)...(19): siRNA sense strand
acgccacccucaaucagua

SEQ ID NO: 1172003 - RNA, 19 nt, Homo sapiens
  misc_RNA (1)...(19): siRNA sense strand
ccacaucaccaccuuggau

SEQ ID NO: 1172004 - RNA, 19 nt, Homo sapiens
  misc_RNA (1)...(19): siRNA sense strand
gaacaacuucaguccaacu

SEQ ID NO: 1172005 - RNA, 19 nt, Homo sapiens
  misc_RNA (1)...(19): siRNA sense strand
ucaguuacaccuucaaugg

SEQ ID NO: 1172006 - RNA, 19 nt, Homo sapiens
  misc_RNA (1)...(19): siRNA sense strand
aaccaguccugcccuguga

SEQ ID NO: 1172007 - RNA, 19 nt, Homo sapiens
  misc_RNA (1)...(19): siRNA sense strand
caacgggacaggccuccuu

SEQ ID NO: 1172008 - RNA, 19 nt, Homo sapiens
  misc_RNA (1)...(19): siRNA sense strand
gguggaggcguucuuauac

SEQ ID NO: 1172009 - RNA, 19 nt, Homo sapiens
  misc_RNA (1)...(19): siRNA sense strand
ggugguggaggcguucuua

SEQ ID NO: 1172010 - RNA, 19 nt, Homo sapiens
  misc_RNA (1)...(19): siRNA sense strand
gaacgccacccucaaucag

SEQ ID NO: 1172011 - RNA, 19 nt, Homo sapiens
  misc_RNA (1)...(19): siRNA sense strand
gcaggccgagucuuggauu

SEQ ID NO: 1172012 - RNA, 19 nt, Homo sapiens
  misc_RNA (1)...(19): siRNA sense strand
ugguggaggcguucuuaua

SEQ ID NO: 1172013 - RNA, 19 nt, Homo sapiens
  misc_RNA (1)...(19): siRNA sense strand
gacgggagcagguccuaug

SEQ ID NO: 1172014 - RNA, 19 nt, Homo sapiens
  misc_RNA (1)...(19): siRNA sense strand
gccgagucuuggauuagaa

SEQ ID NO: 1172015 - RNA, 19 nt, Homo sapiens
  misc_RNA (1)...(19): siRNA sense strand
acacgagggaagucaguaa

SEQ ID NO: 1172016 - RNA, 19 nt, Homo sapiens
  misc_RNA (1)...(19): siRNA sense strand
ugugagcaccugagcauga

SEQ ID NO: 1172017 - RNA, 19 nt, Homo sapiens
  misc_RNA (1)...(19): siRNA sense strand
ggaagacgugcgcgaugug

SEQ ID NO: 1172018 - RNA, 19 nt, Homo sapiens
  misc_RNA (1)...(19): siRNA sense strand
ggacgacgggacuuacgau

SEQ ID NO: 1172019 - RNA, 19 nt, Homo sapiens
  misc_RNA (1)...(19): siRNA sense strand
ccaaguggaacgaaucgau

SEQ ID NO: 1172020 - RNA, 19 nt, Homo sapiens
  misc_RNA (1)...(19): siRNA sense strand
gaccacauuuuaucaggaa

SEQ ID NO: 1172021 - RNA, 19 nt, Homo sapiens
  misc_RNA (1)...(19): siRNA sense strand
augcagagagccaguguuu

SEQ ID NO: 1172022 - RNA, 19 nt, Homo sapiens
  misc_RNA (1)...(19): siRNA sense strand
gaauacgagacguucuaug

SEQ ID NO: 1172023 - RNA, 19 nt, Homo sapiens
  misc_RNA (1)...(19): siRNA sense strand
ugaucgcgcucuccaacau

SEQ ID NO: 1172024 - RNA, 19 nt, Homo sapiens
  misc_RNA (1)...(19): siRNA sense strand
ccuuggauggugucaguua

SEQ ID NO: 1172025 - RNA, 19 nt, Homo sapiens
  misc_RNA (1)...(19): siRNA sense strand
cagcugccuuccaacuuca

SEQ ID NO: 1172026 - RNA, 19 nt, Homo sapiens
  misc_RNA (1)...(19): siRNA sense strand
gcagcuguguguccuucuc

SEQ ID NO: 1172027 - RNA, 19 nt, Homo sapiens
  misc_RNA (1)...(19): siRNA sense strand
cacagacaauggccagauc

SEQ ID NO: 1172028 - RNA, 19 nt, Homo sapiens
  misc_RNA (1)...(19): siRNA sense strand
gcacgcugaaggcuuacuu

SEQ ID NO: 1172029 - RNA, 19 nt, Homo sapiens
  misc_RNA (1)...(19): siRNA sense strand
cgaacgccacccucaauca

SEQ ID NO: 1172030 - RNA, 19 nt, Homo sapiens
  misc_RNA (1)...(19): siRNA sense strand
cugaacauuugaucuccaa

SEQ ID NO: 1172031 - RNA, 19 nt, Homo sapiens
  misc_RNA (1)...(19): siRNA sense strand
gagaugcuuuuccacuuug

SEQ ID NO: 1172032 - RNA, 19 nt, Homo sapiens
  misc_RNA (1)...(19): siRNA sense strand
ggggagcucuuuccugugu

SEQ ID NO: 1172033 - RNA, 19 nt, Homo sapiens
  misc_RNA (1)...(19): siRNA sense strand
cagagagccaguguuugua

SEQ ID NO: 1172034 - RNA, 19 nt, Homo sapiens
  misc_RNA (1)...(19): siRNA sense strand
caacgcaagcaucggacuu

SEQ ID NO: 1172035 - RNA, 19 nt, Homo sapiens
  misc_RNA (1)...(19): siRNA sense strand
gggcugaacauuugaucuc

SEQ ID NO: 1172036 - RNA, 19 nt, Homo sapiens
  misc_RNA (1)...(19): siRNA sense strand
caacuucaccccuguuuuc

SEQ ID NO: 1172037 - RNA, 19 nt, Homo sapiens
  misc_RNA (1)...(19): siRNA sense strand
auaaccagacugugacauu

SEQ ID NO: 1172038 - RNA, 19 nt, Homo sapiens
  misc_RNA (1)...(19): siRNA sense strand
gugaggagcccaggaacga

SEQ ID NO: 1172039 - RNA, 19 nt, Homo sapiens
  misc_RNA (1)...(19): siRNA sense strand
ccuaugcccuguuucucua

SEQ ID NO: 1172040 - RNA, 19 nt, Homo sapiens
  misc_RNA (1)...(19): siRNA sense strand
ggauuagaaagaucacaaa

SEQ ID NO: 1172041 - RNA, 19 nt, Homo sapiens
  misc_RNA (1)...(19): siRNA sense strand
ggucaaugcccacgccuau

SEQ ID NO: 1172042 - RNA, 19 nt, Homo sapiens
  misc_RNA (1)...(19): siRNA sense strand
gaucaucuucccagaguca

SEQ ID NO: 1172043 - RNA, 19 nt, Homo sapiens
  misc_RNA (1)...(19): siRNA sense strand
caggccgagucuuggauua

SEQ ID NO: 1172044 - RNA, 19 nt, Homo sapiens
  misc_RNA (1)...(19): siRNA sense strand
ggccgagucuuggauuaga

SEQ ID NO: 1172045 - RNA, 19 nt, Homo sapiens
  misc_RNA (1)...(19): siRNA sense strand
ggaauacgagacguucuau

SEQ ID NO: 1172046 - RNA, 19 nt, Homo sapiens
  misc_RNA (1)...(19): siRNA sense strand
gcuccucucuccgugauuc

SEQ ID NO: 1172047 - RNA, 19 nt, Homo sapiens
  misc_RNA (1)...(19): siRNA sense strand
gcaggccgagucuuggauu

SEQ ID NO: 1172048 - RNA, 19 nt, Homo sapiens
  misc_RNA (1)...(19): siRNA sense strand
gacgggagcagguccuaug

SEQ ID NO: 1172049 - RNA, 19 nt, Homo sapiens
  misc_RNA (1)...(19): siRNA sense strand
gccgagucuuggauuagaa

SEQ ID NO: 1172050 - RNA, 19 nt, Homo sapiens
  misc_RNA (1)...(19): siRNA sense strand
gaccacauuuuaucaggaa

SEQ ID NO: 1172051 - RNA, 19 nt, Homo sapiens
  misc_RNA (1)...(19): siRNA sense strand
gaauacgagacguucuaug

SEQ ID NO: 1172052 - RNA, 19 nt, Homo sapiens
  misc_RNA (1)...(19): siRNA sense strand
cacagacaauggccagauc

SEQ ID NO: 1172053 - RNA, 19 nt, Homo sapiens
  misc_RNA (1)...(19): siRNA sense strand
ggaggaccguggacuucac

SEQ ID NO: 1172054 - RNA, 19 nt, Homo sapiens
  misc_RNA (1)...(19): siRNA sense strand
aauacgagacguucuaugg

SEQ ID NO: 1172055 - RNA, 19 nt, Homo sapiens
  misc_RNA (1)...(19): siRNA sense strand
cugggacgaugcugacuuc

SEQ ID NO: 1172056 - RNA, 19 nt, Homo sapiens
  misc_RNA (1)...(19): siRNA sense strand
aggaauacgagacguucua

SEQ ID NO: 1172057 - RNA, 19 nt, Homo sapiens
  misc_RNA (1)...(19): siRNA sense strand
ggaaugaccuggcagauca

SEQ ID NO: 1172058 - RNA, 19 nt, Homo sapiens
  misc_RNA (1)...(19): siRNA sense strand
ccaagucgcuggagccauu

SEQ ID NO: 1172059 - RNA, 19 nt, Homo sapiens
  misc_RNA (1)...(19): siRNA sense strand
gcagagagccaguguuugu

SEQ ID NO: 1172060 - RNA, 19 nt, Homo sapiens
  misc_RNA (1)...(19): siRNA sense strand
uaaccagacugugacauuu

SEQ ID NO: 1172061 - RNA, 19 nt, Homo sapiens
  misc_RNA (1)...(19): siRNA sense strand
gcaagaagugccaagauug

SEQ ID NO: 1172062 - RNA, 19 nt, Homo sapiens
  misc_RNA (1)...(19): siRNA sense strand
gaaaacagcccacugaugu

SEQ ID NO: 1172063 - RNA, 19 nt, Homo sapiens
  misc_RNA (1)...(19): siRNA sense strand
ggacuguggucugccauug

SEQ ID NO: 1172064 - RNA, 19 nt, Homo sapiens
  misc_RNA (1)...(19): siRNA sense strand
gggaagaaaggcccaacua

SEQ ID NO: 1172065 - RNA, 19 nt, Homo sapiens
  misc_RNA (1)...(19): siRNA sense strand
gaacuccuccuuccugcuu

SEQ ID NO: 1172066 - RNA, 19 nt, Homo sapiens
  misc_RNA (1)...(19): siRNA sense strand
uccaagggcugcaguucua

SEQ ID NO: 1172067 - RNA, 19 nt, Homo sapiens
  misc_RNA (1)...(19): siRNA sense strand
caaugguggucgugugauu

SEQ ID NO: 1172068 - RNA, 19 nt, Homo sapiens
  misc_RNA (1)...(19): siRNA sense strand
ggagagguaucgcccugau

SEQ ID NO: 1172069 - RNA, 19 nt, Homo sapiens
  misc_RNA (1)...(19): siRNA sense strand
ggagaugcuuuuccacuuu

SEQ ID NO: 1172070 - RNA, 19 nt, Homo sapiens
  misc_RNA (1)...(19): siRNA sense strand
ccuaugcccuguuucucua

SEQ ID NO: 1172071 - RNA, 19 nt, Homo sapiens
  misc_RNA (1)...(19): siRNA sense strand
gccauucacucuggagauu

SEQ ID NO: 1172072 - RNA, 19 nt, Homo sapiens
  misc_RNA (1)...(19): siRNA sense strand
gcagggacgacgggacuua

SEQ ID NO: 1172073 - RNA, 19 nt, Homo sapiens
  misc_RNA (1)...(19): siRNA sense strand
gggcagaccacgcugauuc

SEQ ID NO: 1172074 - RNA, 19 nt, Homo sapiens
  misc_RNA (1)...(19): siRNA sense strand
gcaagcaucggacuucaca

SEQ ID NO: 1172075 - RNA, 19 nt, Homo sapiens
  misc_RNA (1)...(19): siRNA sense strand
ugacaagcccuaccucugu

SEQ ID NO: 1172076 - RNA, 19 nt, Homo sapiens
  misc_RNA (1)...(19): siRNA sense strand
gcuccugggcugaacauuu

SEQ ID NO: 1172077 - RNA, 19 nt, Homo sapiens
  misc_RNA (1)...(19): siRNA sense strand
ccagcugccuuccaacuuc

SEQ ID NO: 1172078 - RNA, 19 nt, Homo sapiens
  misc_RNA (1)...(19): siRNA sense strand
gcaccgacuuggagcucuu

SEQ ID NO: 1172079 - RNA, 19 nt, Homo sapiens
  misc_RNA (1)...(19): siRNA sense strand
gccaguguuuguacaauca

SEQ ID NO: 1172080 - RNA, 19 nt, Homo sapiens
  misc_RNA (1)...(19): siRNA sense strand
agcaagaagugccaagauu

SEQ ID NO: 1172081 - RNA, 19 nt, Homo sapiens
  misc_RNA (1)...(19): siRNA sense strand
ggauuagaaagaucacaaa

SEQ ID NO: 1172082 - RNA, 19 nt, Homo sapiens
  misc_RNA (1)...(19): siRNA sense strand
acuuggagcucuuugagaa

SEQ ID NO: 1172083 - RNA, 19 nt, Homo sapiens
  misc_RNA (1)...(19): siRNA sense strand
ggaagaaaggcccaacuac

SEQ ID NO: 1172084 - RNA, 19 nt, Homo sapiens
  misc_RNA (1)...(19): siRNA sense strand
ggucaaugcccacgccuau

SEQ ID NO: 1172085 - RNA, 19 nt, Homo sapiens
  misc_RNA (1)...(19): siRNA sense strand
gaucaucuucccagaguca

SEQ ID NO: 1172086 - RNA, 19 nt, Homo sapiens
  misc_RNA (1)...(19): siRNA sense strand
ggagcucuuuccuguguca

SEQ ID NO: 1172087 - RNA, 19 nt, Homo sapiens
  misc_RNA (1)...(19): siRNA sense strand
cuccugggcugaacauuug

SEQ ID NO: 1172088 - RNA, 19 nt, Homo sapiens
  misc_RNA (1)...(19): siRNA sense strand
caggccgagucuuggauua

SEQ ID NO: 1172089 - RNA, 19 nt, Homo sapiens
  misc_RNA (1)...(19): siRNA sense strand
gcucuuuccugugucagaa

SEQ ID NO: 1172090 - RNA, 19 nt, Homo sapiens
  misc_RNA (1)...(19): siRNA sense strand
ggccgagucuuggauuaga

SEQ ID NO: 1172091 - RNA, 19 nt, Homo sapiens
  misc_RNA (1)...(19): siRNA sense strand
gcagcguccuuggcaguug

SEQ ID NO: 1172092 - RNA, 19 nt, Homo sapiens
  misc_RNA (1)...(19): siRNA sense strand
gagccaguguuuguacaau

SEQ ID NO: 1172093 - RNA, 19 nt, Homo sapiens
  misc_RNA (1)...(19): siRNA sense strand
gagagccaguguuuguaca

SEQ ID NO: 1172094 - RNA, 19 nt, Homo sapiens
  misc_RNA (1)...(19): siRNA sense strand
ggaauacgagacguucuau

SEQ ID NO: 1172095 - RNA, 19 nt, Homo sapiens
  misc_RNA (1)...(19): siRNA sense strand
cgacgggacuuacgauucc

SEQ ID NO: 1172096 - RNA, 19 nt, Homo sapiens
  misc_RNA (1)...(19): siRNA sense strand
gaacauuugaucuccaacu

SEQ ID NO: 1172097 - RNA, 19 nt, Homo sapiens
  misc_RNA (1)...(19): siRNA sense strand
gcuccucucuccgugauuc

SEQ ID NO: 1172098 - RNA, 19 nt, Homo sapiens
  misc_RNA (1)...(19): siRNA sense strand
acgccacccucaaucagua

SEQ ID NO: 1172099 - RNA, 19 nt, Homo sapiens
  misc_RNA (1)...(19): siRNA sense strand
ccacaucaccaccuuggau

SEQ ID NO: 1172100 - RNA, 19 nt, Homo sapiens
  misc_RNA (1)...(19): siRNA sense strand
ucaguuacaccuucaaugg

SEQ ID NO: 1172101 - RNA, 19 nt, Homo sapiens
  misc_RNA (1)...(19): siRNA sense strand
aaccaguccugcccuguga

SEQ ID NO: 1172102 - RNA, 19 nt, Homo sapiens
  misc_RNA (1)...(19): siRNA sense strand
caacgggacaggccuccuu

SEQ ID NO: 1172103 - RNA, 19 nt, Homo sapiens
  misc_RNA (1)...(19): siRNA sense strand
gaacgccacccucaaucag

SEQ ID NO: 1172104 - RNA, 19 nt, Homo sapiens
  misc_RNA (1)...(19): siRNA sense strand
gcaggccgagucuuggauu

SEQ ID NO: 1172105 - RNA, 19 nt, Homo sapiens
  misc_RNA (1)...(19): siRNA sense strand
gacgggagcagguccuaug

SEQ ID NO: 1172106 - RNA, 19 nt, Homo sapiens
  misc_RNA (1)...(19): siRNA sense strand
gccgagucuuggauuagaa

SEQ ID NO: 1172107 - RNA, 19 nt, Homo sapiens
  misc_RNA (1)...(19): siRNA sense strand
acacgagggaagucaguaa

SEQ ID NO: 1172108 - RNA, 19 nt, Homo sapiens
  misc_RNA (1)...(19): siRNA sense strand
gaccacauuuuaucaggaa

SEQ ID NO: 1172109 - RNA, 19 nt, Homo sapiens
  misc_RNA (1)...(19): siRNA sense strand
augcagagagccaguguuu

SEQ ID NO: 1172110 - RNA, 19 nt, Homo sapiens
  misc_RNA (1)...(19): siRNA sense strand
ugaucgcgcucuccaacau

SEQ ID NO: 1172111 - RNA, 19 nt, Homo sapiens
  misc_RNA (1)...(19): siRNA sense strand
ccuuggauggugucaguua

SEQ ID NO: 1172112 - RNA, 19 nt, Homo sapiens
  misc_RNA (1)...(19): siRNA sense strand
ggacgacgggacuuacgau

SEQ ID NO: 1172113 - RNA, 19 nt, Homo sapiens
  misc_RNA (1)...(19): siRNA sense strand
gaauacgagacguucuaug

SEQ ID NO: 1172114 - RNA, 19 nt, Homo sapiens
  misc_RNA (1)...(19): siRNA sense strand
cacagacaauggccagauc

SEQ ID NO: 1172115 - RNA, 19 nt, Homo sapiens
  misc_RNA (1)...(19): siRNA sense strand
cgaacgccacccucaauca

SEQ ID NO: 1172116 - RNA, 19 nt, Homo sapiens
  misc_RNA (1)...(19): siRNA sense strand
cugaacauuugaucuccaa

SEQ ID NO: 1172117 - RNA, 19 nt, Homo sapiens
  misc_RNA (1)...(19): siRNA sense strand
cagcugccuuccaacuuca

SEQ ID NO: 1172118 - RNA, 19 nt, Homo sapiens
  misc_RNA (1)...(19): siRNA sense strand
gagaugcuuuuccacuuug

SEQ ID NO: 1172119 - RNA, 19 nt, Homo sapiens
  misc_RNA (1)...(19): siRNA sense strand
ggggagcucuuuccugugu

SEQ ID NO: 1172120 - RNA, 19 nt, Homo sapiens
  misc_RNA (1)...(19): siRNA sense strand
cagagagccaguguuugua

SEQ ID NO: 1172121 - RNA, 19 nt, Homo sapiens
  misc_RNA (1)...(19): siRNA sense strand
caacgcaagcaucggacuu

SEQ ID NO: 1172122 - RNA, 19 nt, Homo sapiens
  misc_RNA (1)...(19): siRNA sense strand
gggcugaacauuugaucuc

SEQ ID NO: 1172123 - RNA, 19 nt, Homo sapiens
  misc_RNA (1)...(19): siRNA sense strand
caacuucaccccuguuuuc

SEQ ID NO: 1172124 - RNA, 19 nt, Homo sapiens
  misc_RNA (1)...(19): siRNA sense strand
ggaaugacaagcccuaccu

SEQ ID NO: 1172125 - RNA, 19 nt, Homo sapiens
  misc_RNA (1)...(19): siRNA sense strand
auaaccagacugugacauu

SEQ ID NO: 1172126 - RNA, 19 nt, Homo sapiens
  misc_RNA (1)...(19): siRNA sense strand
aauacgagacguucuaugg

SEQ ID NO: 1172127 - RNA, 19 nt, Homo sapiens
  misc_RNA (1)...(19): siRNA sense strand
agacagcugcaccgacuug

SEQ ID NO: 1172128 - RNA, 19 nt, Homo sapiens
  misc_RNA (1)...(19): siRNA sense strand
uccguguccugcuggauaa

SEQ ID NO: 1172129 - RNA, 19 nt, Homo sapiens
  misc_RNA (1)...(19): siRNA sense strand
ggaggaccguggacuucac

SEQ ID NO: 1172130 - RNA, 19 nt, Homo sapiens
  misc_RNA (1)...(19): siRNA sense strand
cugggacgaugcugacuuc

SEQ ID NO: 1172131 - RNA, 19 nt, Homo sapiens
  misc_RNA (1)...(19): siRNA sense strand
ccacgugggcugugcuaca

SEQ ID NO: 1172132 - RNA, 19 nt, Homo sapiens
  misc_RNA (1)...(19): siRNA sense strand
aggaauacgagacguucua

SEQ ID NO: 1172133 - RNA, 19 nt, Homo sapiens
  misc_RNA (1)...(19): siRNA sense strand
uuggagcucuuugagaaug

SEQ ID NO: 1172134 - RNA, 19 nt, Homo sapiens
  misc_RNA (1)...(19): siRNA sense strand
gaaaguguuugaagaguuu

SEQ ID NO: 1172135 - RNA, 19 nt, Homo sapiens
  misc_RNA (1)...(19): siRNA sense strand
gaacuucacccgacgcuua

SEQ ID NO: 1172136 - RNA, 19 nt, Homo sapiens
  misc_RNA (1)...(19): siRNA sense strand
gacaagcacugauuuggua

SEQ ID NO: 1172137 - RNA, 19 nt, Homo sapiens
  misc_RNA (1)...(19): siRNA sense strand
gcaauuuccugacauaaag

SEQ ID NO: 1172138 - RNA, 19 nt, Homo sapiens
  misc_RNA (1)...(19): siRNA sense strand
gaacaucaucaguuucuuu

SEQ ID NO: 1172139 - RNA, 19 nt, Homo sapiens
  misc_RNA (1)...(19): siRNA sense strand
gaaaaugguuggugagaaa

SEQ ID NO: 1172140 - RNA, 19 nt, Homo sapiens
  misc_RNA (1)...(19): siRNA sense strand
uggaaacacugcaugauuu

SEQ ID NO: 1172141 - RNA, 19 nt, Homo sapiens
  misc_RNA (1)...(19): siRNA sense strand
gacaacaccuucccagaau

SEQ ID NO: 1172142 - RNA, 19 nt, Homo sapiens
  misc_RNA (1)...(19): siRNA sense strand
acagagaccuugccaccua

SEQ ID NO: 1172143 - RNA, 19 nt, Homo sapiens
  misc_RNA (1)...(19): siRNA sense strand
ugacuuacaagaagaguua

SEQ ID NO: 1172144 - RNA, 19 nt, Homo sapiens
  misc_RNA (1)...(19): siRNA sense strand
ggaaagcugaugagacaaa

SEQ ID NO: 1172145 - RNA, 19 nt, Homo sapiens
  misc_RNA (1)...(19): siRNA sense strand
gaaagcacagaaaguguuu

SEQ ID NO: 1172146 - RNA, 19 nt, Homo sapiens
  misc_RNA (1)...(19): siRNA sense strand
cgaguuggauuuuauguua

SEQ ID NO: 1172147 - RNA, 19 nt, Homo sapiens
  misc_RNA (1)...(19): siRNA sense strand
caaacuguaugaagugaug

SEQ ID NO: 1172148 - RNA, 19 nt, Homo sapiens
  misc_RNA (1)...(19): siRNA sense strand
aagaauauguccagaacuu

SEQ ID NO: 1172149 - RNA, 19 nt, Homo sapiens
  misc_RNA (1)...(19): siRNA sense strand
caacagugccucaggagaa

SEQ ID NO: 1172150 - RNA, 19 nt, Homo sapiens
  misc_RNA (1)...(19): siRNA sense strand
ccaggauacuucauuauuc

SEQ ID NO: 1172151 - RNA, 19 nt, Homo sapiens
  misc_RNA (1)...(19): siRNA sense strand
gaagaguuaccaucauuau

SEQ ID NO: 1172152 - RNA, 19 nt, Homo sapiens
  misc_RNA (1)...(19): siRNA sense strand
uaaggcagaagaagaauuu

SEQ ID NO: 1172153 - RNA, 19 nt, Homo sapiens
  misc_RNA (1)...(19): siRNA sense strand
uguaugaagugaugacaaa

SEQ ID NO: 1172154 - RNA, 19 nt, Homo sapiens
  misc_RNA (1)...(19): siRNA sense strand
ggacgacaagcacugauuu

SEQ ID NO: 1172155 - RNA, 19 nt, Homo sapiens
  misc_RNA (1)...(19): siRNA sense strand
caacuuuguuccagaaauc

SEQ ID NO: 1172156 - RNA, 19 nt, Homo sapiens
  misc_RNA (1)...(19): siRNA sense strand
guggauggguccuugcuaa

SEQ ID NO: 1172157 - RNA, 19 nt, Homo sapiens
  misc_RNA (1)...(19): siRNA sense strand
aagaagaguuaccaucauu

SEQ ID NO: 1172158 - RNA, 19 nt, Homo sapiens
  misc_RNA (1)...(19): siRNA sense strand
gcacagaaaguguuugaag

SEQ ID NO: 1172159 - RNA, 19 nt, Homo sapiens
  misc_RNA (1)...(19): siRNA sense strand
gaagccaaguuucauaagg

SEQ ID NO: 1172160 - RNA, 19 nt, Homo sapiens
  misc_RNA (1)...(19): siRNA sense strand
caggauacuucauuauuca

SEQ ID NO: 1172161 - RNA, 19 nt, Homo sapiens
  misc_RNA (1)...(19): siRNA sense strand
aggagaacaucaucaguuu

SEQ ID NO: 1172162 - RNA, 19 nt, Homo sapiens
  misc_RNA (1)...(19): siRNA sense strand
ucacagagucgcugcauga

SEQ ID NO: 1172163 - RNA, 19 nt, Homo sapiens
  misc_RNA (1)...(19): siRNA sense strand
cacagaaaguguuugaaga

SEQ ID NO: 1172164 - RNA, 19 nt, Homo sapiens
  misc_RNA (1)...(19): siRNA sense strand
ucuaugagccugacuggua

SEQ ID NO: 1172165 - RNA, 19 nt, Homo sapiens
  misc_RNA (1)...(19): siRNA sense strand
cagagucgcugcaugaagu

SEQ ID NO: 1172166 - RNA, 19 nt, Homo sapiens
  misc_RNA (1)...(19): siRNA sense strand
cgaagaauauguccagaac

SEQ ID NO: 1172167 - RNA, 19 nt, Homo sapiens
  misc_RNA (1)...(19): siRNA sense strand
caagaagaguuaccaucau

SEQ ID NO: 1172168 - RNA, 19 nt, Homo sapiens
  misc_RNA (1)...(19): siRNA sense strand
uaacguugacuuacaagaa

SEQ ID NO: 1172169 - RNA, 19 nt, Homo sapiens
  misc_RNA (1)...(19): siRNA sense strand
ggaaggagaaaacgaaaua

SEQ ID NO: 1172170 - RNA, 19 nt, Homo sapiens
  misc_RNA (1)...(19): siRNA sense strand
gaacuccgaggauauuuag

SEQ ID NO: 1172171 - RNA, 19 nt, Homo sapiens
  misc_RNA (1)...(19): siRNA sense strand
ugacaacaccuucccagaa

SEQ ID NO: 1172172 - RNA, 19 nt, Homo sapiens
  misc_RNA (1)...(19): siRNA sense strand
gaauauguccagaacuuca

SEQ ID NO: 1172173 - RNA, 19 nt, Homo sapiens
  misc_RNA (1)...(19): siRNA sense strand
gaggauauuuagcagcaau

SEQ ID NO: 1172174 - RNA, 19 nt, Homo sapiens
  misc_RNA (1)...(19): siRNA sense strand
caacaccuucccagaauga

SEQ ID NO: 1172175 - RNA, 19 nt, Homo sapiens
  misc_RNA (1)...(19): siRNA sense strand
uugaagaguuuaacguuga

SEQ ID NO: 1172176 - RNA, 19 nt, Homo sapiens
  misc_RNA (1)...(19): siRNA sense strand
agaaaguguuugaagaguu

SEQ ID NO: 1172177 - RNA, 19 nt, Homo sapiens
  misc_RNA (1)...(19): siRNA sense strand
gccacaaacuguaugaagu

SEQ ID NO: 1172178 - RNA, 19 nt, Homo sapiens
  misc_RNA (1)...(19): siRNA sense strand
ucccugaggugaagaaaga

SEQ ID NO: 1172179 - RNA, 19 nt, Homo sapiens
  misc_RNA (1)...(19): siRNA sense strand
gaacuucaaacggcaagaa

SEQ ID NO: 1172180 - RNA, 19 nt, Homo sapiens
  misc_RNA (1)...(19): siRNA sense strand
ggcagcaaauucugaugaa

SEQ ID NO: 1172181 - RNA, 19 nt, Homo sapiens
  misc_RNA (1)...(19): siRNA sense strand
cugaugaacuuaccuuaca

SEQ ID NO: 1172182 - RNA, 19 nt, Homo sapiens
  misc_RNA (1)...(19): siRNA sense strand
ggagaaaacgaaauaacua

SEQ ID NO: 1172183 - RNA, 19 nt, Homo sapiens
  misc_RNA (1)...(19): siRNA sense strand
ggcaauuuccugacauaaa

SEQ ID NO: 1172184 - RNA, 19 nt, Homo sapiens
  misc_RNA (1)...(19): siRNA sense strand
caucaucaguuucuuugag

SEQ ID NO: 1172185 - RNA, 19 nt, Homo sapiens
  misc_RNA (1)...(19): siRNA sense strand
cgacagcaaguccaaauca

SEQ ID NO: 1172186 - RNA, 19 nt, Homo sapiens
  misc_RNA (1)...(19): siRNA sense strand
guggaaacacugcaugauu

SEQ ID NO: 1172187 - RNA, 19 nt, Homo sapiens
  misc_RNA (1)...(19): siRNA sense strand
ggggaaagcugaugagaca

SEQ ID NO: 1172188 - RNA, 19 nt, Homo sapiens
  misc_RNA (1)...(19): siRNA sense strand
caggagaacaucaucaguu

SEQ ID NO: 1172189 - RNA, 19 nt, Homo sapiens
  misc_RNA (1)...(19): siRNA sense strand
gcagaagaagaauuucaga

SEQ ID NO: 1172190 - RNA, 19 nt, Homo sapiens
  misc_RNA (1)...(19): siRNA sense strand
cuacggagcagaagccuau

SEQ ID NO: 1172191 - RNA, 19 nt, Homo sapiens
  misc_RNA (1)...(19): siRNA sense strand
ucauagagccugccuccaa

SEQ ID NO: 1172192 - RNA, 19 nt, Homo sapiens
  misc_RNA (1)...(19): siRNA sense strand
ccacaaacuguaugaagug

SEQ ID NO: 1172193 - RNA, 19 nt, Homo sapiens
  misc_RNA (1)...(19): siRNA sense strand
guuuaacguugacuuacaa

SEQ ID NO: 1172194 - RNA, 19 nt, Homo sapiens
  misc_RNA (1)...(19): siRNA sense strand
gcuccaagaggaaggauga

SEQ ID NO: 1172195 - RNA, 19 nt, Homo sapiens
  misc_RNA (1)...(19): siRNA sense strand
gaugaacuuaccuuacaaa

SEQ ID NO: 1172196 - RNA, 19 nt, Homo sapiens
  misc_RNA (1)...(19): siRNA sense strand
gcaaauucugaugaacuua

SEQ ID NO: 1172197 - RNA, 19 nt, Homo sapiens
  misc_RNA (1)...(19): siRNA sense strand
gggaaggaguaaguuuaga

SEQ ID NO: 1172198 - RNA, 19 nt, Homo sapiens
  misc_RNA (1)...(19): siRNA sense strand
aagccaaguuucauaagga

SEQ ID NO: 1172199 - RNA, 19 nt, Homo sapiens
  misc_RNA (1)...(19): siRNA sense strand
acaagaagaguuaccauca

SEQ ID NO: 1172200 - RNA, 19 nt, Homo sapiens
  misc_RNA (1)...(19): siRNA sense strand
ucagaaagcacagaaagug

SEQ ID NO: 1172201 - RNA, 19 nt, Homo sapiens
  misc_RNA (1)...(19): siRNA sense strand
agaagaguuaccaucauua

SEQ ID NO: 1172202 - RNA, 19 nt, Homo sapiens
  misc_RNA (1)...(19): siRNA sense strand
cgagaacuccgaggauauu

SEQ ID NO: 1172203 - RNA, 19 nt, Homo sapiens
  misc_RNA (1)...(19): siRNA sense strand
acagcaaguccaaaucaua

SEQ ID NO: 1172204 - RNA, 19 nt, Homo sapiens
  misc_RNA (1)...(19): siRNA sense strand
caagacgaguuggauuuua

SEQ ID NO: 1172205 - RNA, 19 nt, Homo sapiens
  misc_RNA (1)...(19): siRNA sense strand
gucaagacgaguuggauuu

SEQ ID NO: 1172206 - RNA, 19 nt, Homo sapiens
  misc_RNA (1)...(19): siRNA sense strand
agaguuuaacguugacuua

SEQ ID NO: 1172207 - RNA, 19 nt, Homo sapiens
  misc_RNA (1)...(19): siRNA sense strand
ucacccgacgcuuagauua

SEQ ID NO: 1172208 - RNA, 19 nt, Homo sapiens
  misc_RNA (1)...(19): siRNA sense strand
gcagacagaccagaguaug

SEQ ID NO: 1172209 - RNA, 19 nt, Homo sapiens
  misc_RNA (1)...(19): siRNA sense strand
gcagaggguaccagacuuc

SEQ ID NO: 1172210 - RNA, 19 nt, Homo sapiens
  misc_RNA (1)...(19): siRNA sense strand
caaggagcgcccagugauu

SEQ ID NO: 1172211 - RNA, 19 nt, Homo sapiens
  misc_RNA (1)...(19): siRNA sense strand
cagaagaagaauuucagaa

SEQ ID NO: 1172212 - RNA, 19 nt, Homo sapiens
  misc_RNA (1)...(19): siRNA sense strand
ggaaggaguaaguuuagag

SEQ ID NO: 1172213 - RNA, 19 nt, Homo sapiens
  misc_RNA (1)...(19): siRNA sense strand
gacagcaaguccaaaucau

SEQ ID NO: 1172214 - RNA, 19 nt, Homo sapiens
  misc_RNA (1)...(19): siRNA sense strand
cagaaaguguuugaagagu

SEQ ID NO: 1172215 - RNA, 19 nt, Homo sapiens
  misc_RNA (1)...(19): siRNA sense strand
ggucaagacgaguuggauu

SEQ ID NO: 1172216 - RNA, 19 nt, Homo sapiens
  misc_RNA (1)...(19): siRNA sense strand
gcgagaacuccgaggauau

SEQ ID NO: 1172217 - RNA, 19 nt, Homo sapiens
  misc_RNA (1)...(19): siRNA sense strand
agaaaucagugugacaaca

SEQ ID NO: 1172218 - RNA, 19 nt, Homo sapiens
  misc_RNA (1)...(19): siRNA sense strand
gaaagcugaugagacaaaa

SEQ ID NO: 1172219 - RNA, 19 nt, Homo sapiens
  misc_RNA (1)...(19): siRNA sense strand
cuaugagccugacugguau

SEQ ID NO: 1172220 - RNA, 19 nt, Homo sapiens
  misc_RNA (1)...(19): siRNA sense strand
gugaugugcugugggaaga

SEQ ID NO: 1172221 - RNA, 19 nt, Homo sapiens
  misc_RNA (1)...(19): siRNA sense strand
agaacuccgaggauauuua

SEQ ID NO: 1172222 - RNA, 19 nt, Homo sapiens
  misc_RNA (1)...(19): siRNA sense strand
cacaaacuguaugaaguga

SEQ ID NO: 1172223 - RNA, 19 nt, Homo sapiens
  misc_RNA (1)...(19): siRNA sense strand
agaaagcacagaaaguguu

SEQ ID NO: 1172224 - RNA, 19 nt, Homo sapiens
  misc_RNA (1)...(19): siRNA sense strand
gaguaugaucugcaacuug

SEQ ID NO: 1172225 - RNA, 19 nt, Homo sapiens
  misc_RNA (1)...(19): siRNA sense strand
ugaagucccugaggugaag

SEQ ID NO: 1172226 - RNA, 19 nt, Homo sapiens
  misc_RNA (1)...(19): siRNA sense strand
caaguccaaaucauacauu

SEQ ID NO: 1172227 - RNA, 19 nt, Homo sapiens
  misc_RNA (1)...(19): siRNA sense strand
ccaaggagcgcccagugau

SEQ ID NO: 1172228 - RNA, 19 nt, Homo sapiens
  misc_RNA (1)...(19): siRNA sense strand
aaacgucuccagccuugaa

SEQ ID NO: 1172229 - RNA, 19 nt, Homo sapiens
  misc_RNA (1)...(19): siRNA sense strand
uaaggaaauugcggugcuu

SEQ ID NO: 1172230 - RNA, 19 nt, Homo sapiens
  misc_RNA (1)...(19): siRNA sense strand
cagacagaccagaguauga

SEQ ID NO: 1172231 - RNA, 19 nt, Homo sapiens
  misc_RNA (1)...(19): siRNA sense strand
gaaaagguccuccaaaagc

SEQ ID NO: 1172232 - RNA, 19 nt, Homo sapiens
  misc_RNA (1)...(19): siRNA sense strand
ccagaaaucagugugacaa

SEQ ID NO: 1172233 - RNA, 19 nt, Homo sapiens
  misc_RNA (1)...(19): siRNA sense strand
ugucccaccucuaccuaaa

SEQ ID NO: 1172234 - RNA, 19 nt, Homo sapiens
  misc_RNA (1)...(19): siRNA sense strand
gaaaguguuugaagaguuu

SEQ ID NO: 1172235 - RNA, 19 nt, Homo sapiens
  misc_RNA (1)...(19): siRNA sense strand
gaacuucacccgacgcuua

SEQ ID NO: 1172236 - RNA, 19 nt, Homo sapiens
  misc_RNA (1)...(19): siRNA sense strand
gacaagcacugauuuggua

SEQ ID NO: 1172237 - RNA, 19 nt, Homo sapiens
  misc_RNA (1)...(19): siRNA sense strand
gcaauuuccugacauaaag

SEQ ID NO: 1172238 - RNA, 19 nt, Homo sapiens
  misc_RNA (1)...(19): siRNA sense strand
gaacaucaucaguuucuuu

SEQ ID NO: 1172239 - RNA, 19 nt, Homo sapiens
  misc_RNA (1)...(19): siRNA sense strand
gaaaaugguuggugagaaa

SEQ ID NO: 1172240 - RNA, 19 nt, Homo sapiens
  misc_RNA (1)...(19): siRNA sense strand
uggaaacacugcaugauuu

SEQ ID NO: 1172241 - RNA, 19 nt, Homo sapiens
  misc_RNA (1)...(19): siRNA sense strand
gacaacaccuucccagaau

SEQ ID NO: 1172242 - RNA, 19 nt, Homo sapiens
  misc_RNA (1)...(19): siRNA sense strand
acagagaccuugccaccua

SEQ ID NO: 1172243 - RNA, 19 nt, Homo sapiens
  misc_RNA (1)...(19): siRNA sense strand
ugacuuacaagaagaguua

SEQ ID NO: 1172244 - RNA, 19 nt, Homo sapiens
  misc_RNA (1)...(19): siRNA sense strand
ggaaagcugaugagacaaa

SEQ ID NO: 1172245 - RNA, 19 nt, Homo sapiens
  misc_RNA (1)...(19): siRNA sense strand
gaaagcacagaaaguguuu

SEQ ID NO: 1172246 - RNA, 19 nt, Homo sapiens
  misc_RNA (1)...(19): siRNA sense strand
cgaguuggauuuuauguua

SEQ ID NO: 1172247 - RNA, 19 nt, Homo sapiens
  misc_RNA (1)...(19): siRNA sense strand
caaacuguaugaagugaug

SEQ ID NO: 1172248 - RNA, 19 nt, Homo sapiens
  misc_RNA (1)...(19): siRNA sense strand
aagaauauguccagaacuu

SEQ ID NO: 1172249 - RNA, 19 nt, Homo sapiens
  misc_RNA (1)...(19): siRNA sense strand
caacagugccucaggagaa

SEQ ID NO: 1172250 - RNA, 19 nt, Homo sapiens
  misc_RNA (1)...(19): siRNA sense strand
ccaggauacuucauuauuc

SEQ ID NO: 1172251 - RNA, 19 nt, Homo sapiens
  misc_RNA (1)...(19): siRNA sense strand
gaagaguuaccaucauuau

SEQ ID NO: 1172252 - RNA, 19 nt, Homo sapiens
  misc_RNA (1)...(19): siRNA sense strand
uaaggcagaagaagaauuu

SEQ ID NO: 1172253 - RNA, 19 nt, Homo sapiens
  misc_RNA (1)...(19): siRNA sense strand
uguaugaagugaugacaaa

SEQ ID NO: 1172254 - RNA, 19 nt, Homo sapiens
  misc_RNA (1)...(19): siRNA sense strand
ggacgacaagcacugauuu

SEQ ID NO: 1172255 - RNA, 19 nt, Homo sapiens
  misc_RNA (1)...(19): siRNA sense strand
caacuuuguuccagaaauc

SEQ ID NO: 1172256 - RNA, 19 nt, Homo sapiens
  misc_RNA (1)...(19): siRNA sense strand
guggauggguccuugcuaa

SEQ ID NO: 1172257 - RNA, 19 nt, Homo sapiens
  misc_RNA (1)...(19): siRNA sense strand
aagaagaguuaccaucauu

SEQ ID NO: 1172258 - RNA, 19 nt, Homo sapiens
  misc_RNA (1)...(19): siRNA sense strand
gcacagaaaguguuugaag

SEQ ID NO: 1172259 - RNA, 19 nt, Homo sapiens
  misc_RNA (1)...(19): siRNA sense strand
gaagccaaguuucauaagg

SEQ ID NO: 1172260 - RNA, 19 nt, Homo sapiens
  misc_RNA (1)...(19): siRNA sense strand
caggauacuucauuauuca

SEQ ID NO: 1172261 - RNA, 19 nt, Homo sapiens
  misc_RNA (1)...(19): siRNA sense strand
aggagaacaucaucaguuu

SEQ ID NO: 1172262 - RNA, 19 nt, Homo sapiens
  misc_RNA (1)...(19): siRNA sense strand
ucacagagucgcugcauga

SEQ ID NO: 1172263 - RNA, 19 nt, Homo sapiens
  misc_RNA (1)...(19): siRNA sense strand
cacagaaaguguuugaaga

SEQ ID NO: 1172264 - RNA, 19 nt, Homo sapiens
  misc_RNA (1)...(19): siRNA sense strand
ucuaugagccugacuggua

SEQ ID NO: 1172265 - RNA, 19 nt, Homo sapiens
  misc_RNA (1)...(19): siRNA sense strand
cagagucgcugcaugaagu

SEQ ID NO: 1172266 - RNA, 19 nt, Homo sapiens
  misc_RNA (1)...(19): siRNA sense strand
cgaagaauauguccagaac

SEQ ID NO: 1172267 - RNA, 19 nt, Homo sapiens
  misc_RNA (1)...(19): siRNA sense strand
caagaagaguuaccaucau

SEQ ID NO: 1172268 - RNA, 19 nt, Homo sapiens
  misc_RNA (1)...(19): siRNA sense strand
uaacguugacuuacaagaa

SEQ ID NO: 1172269 - RNA, 19 nt, Homo sapiens
  misc_RNA (1)...(19): siRNA sense strand
ggaaggagaaaacgaaaua

SEQ ID NO: 1172270 - RNA, 19 nt, Homo sapiens
  misc_RNA (1)...(19): siRNA sense strand
gaacuccgaggauauuuag

SEQ ID NO: 1172271 - RNA, 19 nt, Homo sapiens
  misc_RNA (1)...(19): siRNA sense strand
ugacaacaccuucccagaa

SEQ ID NO: 1172272 - RNA, 19 nt, Homo sapiens
  misc_RNA (1)...(19): siRNA sense strand
gaauauguccagaacuuca

SEQ ID NO: 1172273 - RNA, 19 nt, Homo sapiens
  misc_RNA (1)...(19): siRNA sense strand
gaggauauuuagcagcaau

SEQ ID NO: 1172274 - RNA, 19 nt, Homo sapiens
  misc_RNA (1)...(19): siRNA sense strand
caacaccuucccagaauga

SEQ ID NO: 1172275 - RNA, 19 nt, Homo sapiens
  misc_RNA (1)...(19): siRNA sense strand
uugaagaguuuaacguuga

SEQ ID NO: 1172276 - RNA, 19 nt, Homo sapiens
  misc_RNA (1)...(19): siRNA sense strand
agaaaguguuugaagaguu

SEQ ID NO: 1172277 - RNA, 19 nt, Homo sapiens
  misc_RNA (1)...(19): siRNA sense strand
gccacaaacuguaugaagu

SEQ ID NO: 1172278 - RNA, 19 nt, Homo sapiens
  misc_RNA (1)...(19): siRNA sense strand
ucccugaggugaagaaaga

SEQ ID NO: 1172279 - RNA, 19 nt, Homo sapiens
  misc_RNA (1)...(19): siRNA sense strand
gaacuucaaacggcaagaa

SEQ ID NO: 1172280 - RNA, 19 nt, Homo sapiens
  misc_RNA (1)...(19): siRNA sense strand
ggcagcaaauucugaugaa

SEQ ID NO: 1172281 - RNA, 19 nt, Homo sapiens
  misc_RNA (1)...(19): siRNA sense strand
cugaugaacuuaccuuaca

SEQ ID NO: 1172282 - RNA, 19 nt, Homo sapiens
  misc_RNA (1)...(19): siRNA sense strand
ggagaaaacgaaauaacua

SEQ ID NO: 1172283 - RNA, 19 nt, Homo sapiens
  misc_RNA (1)...(19): siRNA sense strand
ggcaauuuccugacauaaa

SEQ ID NO: 1172284 - RNA, 19 nt, Homo sapiens
  misc_RNA (1)...(19): siRNA sense strand
caucaucaguuucuuugag

SEQ ID NO: 1172285 - RNA, 19 nt, Homo sapiens
  misc_RNA (1)...(19): siRNA sense strand
cgacagcaaguccaaauca

SEQ ID NO: 1172286 - RNA, 19 nt, Homo sapiens
  misc_RNA (1)...(19): siRNA sense strand
guggaaacacugcaugauu

SEQ ID NO: 1172287 - RNA, 19 nt, Homo sapiens
  misc_RNA (1)...(19): siRNA sense strand
ggggaaagcugaugagaca

SEQ ID NO: 1172288 - RNA, 19 nt, Homo sapiens
  misc_RNA (1)...(19): siRNA sense strand
caggagaacaucaucaguu

SEQ ID NO: 1172289 - RNA, 19 nt, Homo sapiens
  misc_RNA (1)...(19): siRNA sense strand
gcagaagaagaauuucaga

SEQ ID NO: 1172290 - RNA, 19 nt, Homo sapiens
  misc_RNA (1)...(19): siRNA sense strand
cuacggagcagaagccuau

SEQ ID NO: 1172291 - RNA, 19 nt, Homo sapiens
  misc_RNA (1)...(19): siRNA sense strand
ucauagagccugccuccaa

SEQ ID NO: 1172292 - RNA, 19 nt, Homo sapiens
  misc_RNA (1)...(19): siRNA sense strand
ccacaaacuguaugaagug

SEQ ID NO: 1172293 - RNA, 19 nt, Homo sapiens
  misc_RNA (1)...(19): siRNA sense strand
guuuaacguugacuuacaa

SEQ ID NO: 1172294 - RNA, 19 nt, Homo sapiens
  misc_RNA (1)...(19): siRNA sense strand
gcuccaagaggaaggauga

SEQ ID NO: 1172295 - RNA, 19 nt, Homo sapiens
  misc_RNA (1)...(19): siRNA sense strand
gaugaacuuaccuuacaaa

SEQ ID NO: 1172296 - RNA, 19 nt, Homo sapiens
  misc_RNA (1)...(19): siRNA sense strand
gcaaauucugaugaacuua

SEQ ID NO: 1172297 - RNA, 19 nt, Homo sapiens
  misc_RNA (1)...(19): siRNA sense strand
gggaaggaguaaguuuaga

SEQ ID NO: 1172298 - RNA, 19 nt, Homo sapiens
  misc_RNA (1)...(19): siRNA sense strand
aagccaaguuucauaagga

SEQ ID NO: 1172299 - RNA, 19 nt, Homo sapiens
  misc_RNA (1)...(19): siRNA sense strand
acaagaagaguuaccauca

SEQ ID NO: 1172300 - RNA, 19 nt, Homo sapiens
  misc_RNA (1)...(19): siRNA sense strand
ucagaaagcacagaaagug

SEQ ID NO: 1172301 - RNA, 19 nt, Homo sapiens
  misc_RNA (1)...(19): siRNA sense strand
agaagaguuaccaucauua

SEQ ID NO: 1172302 - RNA, 19 nt, Homo sapiens
  misc_RNA (1)...(19): siRNA sense strand
cgagaacuccgaggauauu

SEQ ID NO: 1172303 - RNA, 19 nt, Homo sapiens
  misc_RNA (1)...(19): siRNA sense strand
acagcaaguccaaaucaua

SEQ ID NO: 1172304 - RNA, 19 nt, Homo sapiens
  misc_RNA (1)...(19): siRNA sense strand
caagacgaguuggauuuua

SEQ ID NO: 1172305 - RNA, 19 nt, Homo sapiens
  misc_RNA (1)...(19): siRNA sense strand
gucaagacgaguuggauuu

SEQ ID NO: 1172306 - RNA, 19 nt, Homo sapiens
  misc_RNA (1)...(19): siRNA sense strand
agaguuuaacguugacuua

SEQ ID NO: 1172307 - RNA, 19 nt, Homo sapiens
  misc_RNA (1)...(19): siRNA sense strand
ucacccgacgcuuagauua

SEQ ID NO: 1172308 - RNA, 19 nt, Homo sapiens
  misc_RNA (1)...(19): siRNA sense strand
gcagacagaccagaguaug

SEQ ID NO: 1172309 - RNA, 19 nt, Homo sapiens
  misc_RNA (1)...(19): siRNA sense strand
gcagaggguaccagacuuc

SEQ ID NO: 1172310 - RNA, 19 nt, Homo sapiens
  misc_RNA (1)...(19): siRNA sense strand
caaggagcgcccagugauu

SEQ ID NO: 1172311 - RNA, 19 nt, Homo sapiens
  misc_RNA (1)...(19): siRNA sense strand
cagaagaagaauuucagaa

SEQ ID NO: 1172312 - RNA, 19 nt, Homo sapiens
  misc_RNA (1)...(19): siRNA sense strand
ggaaggaguaaguuuagag

SEQ ID NO: 1172313 - RNA, 19 nt, Homo sapiens
  misc_RNA (1)...(19): siRNA sense strand
gacagcaaguccaaaucau

SEQ ID NO: 1172314 - RNA, 19 nt, Homo sapiens
  misc_RNA (1)...(19): siRNA sense strand
cagaaaguguuugaagagu

SEQ ID NO: 1172315 - RNA, 19 nt, Homo sapiens
  misc_RNA (1)...(19): siRNA sense strand
ggucaagacgaguuggauu

SEQ ID NO: 1172316 - RNA, 19 nt, Homo sapiens
  misc_RNA (1)...(19): siRNA sense strand
gcgagaacuccgaggauau

SEQ ID NO: 1172317 - RNA, 19 nt, Homo sapiens
  misc_RNA (1)...(19): siRNA sense strand
agaaaucagugugacaaca

SEQ ID NO: 1172318 - RNA, 19 nt, Homo sapiens
  misc_RNA (1)...(19): siRNA sense strand
gaaagcugaugagacaaaa

SEQ ID NO: 1172319 - RNA, 19 nt, Homo sapiens
  misc_RNA (1)...(19): siRNA sense strand
cuaugagccugacugguau

SEQ ID NO: 1172320 - RNA, 19 nt, Homo sapiens
  misc_RNA (1)...(19): siRNA sense strand
gugaugugcugugggaaga

SEQ ID NO: 1172321 - RNA, 19 nt, Homo sapiens
  misc_RNA (1)...(19): siRNA sense strand
agaacuccgaggauauuua

SEQ ID NO: 1172322 - RNA, 19 nt, Homo sapiens
  misc_RNA (1)...(19): siRNA sense strand
cacaaacuguaugaaguga

SEQ ID NO: 1172323 - RNA, 19 nt, Homo sapiens
  misc_RNA (1)...(19): siRNA sense strand
agaaagcacagaaaguguu

SEQ ID NO: 1172324 - RNA, 19 nt, Homo sapiens
  misc_RNA (1)...(19): siRNA sense strand
gaguaugaucugcaacuug

SEQ ID NO: 1172325 - RNA, 19 nt, Homo sapiens
  misc_RNA (1)...(19): siRNA sense strand
ugaagucccugaggugaag

SEQ ID NO: 1172326 - RNA, 19 nt, Homo sapiens
  misc_RNA (1)...(19): siRNA sense strand
caaguccaaaucauacauu

SEQ ID NO: 1172327 - RNA, 19 nt, Homo sapiens
  misc_RNA (1)...(19): siRNA sense strand
ccaaggagcgcccagugau

SEQ ID NO: 1172328 - RNA, 19 nt, Homo sapiens
  misc_RNA (1)...(19): siRNA sense strand
aaacgucuccagccuugaa

SEQ ID NO: 1172329 - RNA, 19 nt, Homo sapiens
  misc_RNA (1)...(19): siRNA sense strand
uaaggaaauugcggugcuu

SEQ ID NO: 1172330 - RNA, 19 nt, Homo sapiens
  misc_RNA (1)...(19): siRNA sense strand
cagacagaccagaguauga

SEQ ID NO: 1172331 - RNA, 19 nt, Homo sapiens
  misc_RNA (1)...(19): siRNA sense strand
gaaaagguccuccaaaagc

SEQ ID NO: 1172332 - RNA, 19 nt, Homo sapiens
  misc_RNA (1)...(19): siRNA sense strand
ccagaaaucagugugacaa

SEQ ID NO: 1172333 - RNA, 19 nt, Homo sapiens
  misc_RNA (1)...(19): siRNA sense strand
ugucccaccucuaccuaaa

SEQ ID NO: 1172334 - RNA, 19 nt, Homo sapiens
  misc_RNA (1)...(19): siRNA sense strand
ggagagagguccagucuga

SEQ ID NO: 1172335 - RNA, 19 nt, Homo sapiens
  misc_RNA (1)...(19): siRNA sense strand
ggacggagcaugccaagug

SEQ ID NO: 1172336 - RNA, 19 nt, Homo sapiens
  misc_RNA (1)...(19): siRNA sense strand
caugggcucugaggaguug

SEQ ID NO: 1172337 - RNA, 19 nt, Homo sapiens
  misc_RNA (1)...(19): siRNA sense strand
gagacuuuguccacagugu

SEQ ID NO: 1172338 - RNA, 19 nt, Homo sapiens
  misc_RNA (1)...(19): siRNA sense strand
cuaaagacagugccaagug

SEQ ID NO: 1172339 - RNA, 19 nt, Homo sapiens
  misc_RNA (1)...(19): siRNA sense strand
ugaggugcuucuucugcua

SEQ ID NO: 1172340 - RNA, 19 nt, Homo sapiens
  misc_RNA (1)...(19): siRNA sense strand
cgucuggccuccuucuaug

SEQ ID NO: 1172341 - RNA, 19 nt, Homo sapiens
  misc_RNA (1)...(19): siRNA sense strand
ccacguggaugggcagauc

SEQ ID NO: 1172342 - RNA, 19 nt, Homo sapiens
  misc_RNA (1)...(19): siRNA sense strand
agagagguccagucugaaa

SEQ ID NO: 1172343 - RNA, 19 nt, Homo sapiens
  misc_RNA (1)...(19): siRNA sense strand
caaggugaggugcuucuuc

SEQ ID NO: 1172344 - RNA, 19 nt, Homo sapiens
  misc_RNA (1)...(19): siRNA sense strand
gagguccagucugaaagug

SEQ ID NO: 1172345 - RNA, 19 nt, Homo sapiens
  misc_RNA (1)...(19): siRNA sense strand
acacaggccaucaggacaa

SEQ ID NO: 1172346 - RNA, 19 nt, Homo sapiens
  misc_RNA (1)...(19): siRNA sense strand
aaggugaggugcuucuucu

SEQ ID NO: 1172347 - RNA, 19 nt, Homo sapiens
  misc_RNA (1)...(19): siRNA sense strand
gcgucuggccuccuucuau

SEQ ID NO: 1172348 - RNA, 19 nt, Homo sapiens
  misc_RNA (1)...(19): siRNA sense strand
gaggugcuucuucugcuau

SEQ ID NO: 1172349 - RNA, 19 nt, Homo sapiens
  misc_RNA (1)...(19): siRNA sense strand
ccuggucugugcugagugu

SEQ ID NO: 1172350 - RNA, 19 nt, Homo sapiens
  misc_RNA (1)...(19): siRNA sense strand
caggagagagguccagucu

SEQ ID NO: 1172351 - RNA, 19 nt, Homo sapiens
  misc_RNA (1)...(19): siRNA sense strand
ggagagagguccagucuga

SEQ ID NO: 1172352 - RNA, 19 nt, Homo sapiens
  misc_RNA (1)...(19): siRNA sense strand
ggacggagcaugccaagug

SEQ ID NO: 1172353 - RNA, 19 nt, Homo sapiens
  misc_RNA (1)...(19): siRNA sense strand
caugggcucugaggaguug

SEQ ID NO: 1172354 - RNA, 19 nt, Homo sapiens
  misc_RNA (1)...(19): siRNA sense strand
gagacuuuguccacagugu

SEQ ID NO: 1172355 - RNA, 19 nt, Homo sapiens
  misc_RNA (1)...(19): siRNA sense strand
cuaaagacagugccaagug

SEQ ID NO: 1172356 - RNA, 19 nt, Homo sapiens
  misc_RNA (1)...(19): siRNA sense strand
ugaggugcuucuucugcua

SEQ ID NO: 1172357 - RNA, 19 nt, Homo sapiens
  misc_RNA (1)...(19): siRNA sense strand
cgucuggccuccuucuaug

SEQ ID NO: 1172358 - RNA, 19 nt, Homo sapiens
  misc_RNA (1)...(19): siRNA sense strand
ccacguggaugggcagauc

SEQ ID NO: 1172359 - RNA, 19 nt, Homo sapiens
  misc_RNA (1)...(19): siRNA sense strand
agagagguccagucugaaa

SEQ ID NO: 1172360 - RNA, 19 nt, Homo sapiens
  misc_RNA (1)...(19): siRNA sense strand
caaggugaggugcuucuuc

SEQ ID NO: 1172361 - RNA, 19 nt, Homo sapiens
  misc_RNA (1)...(19): siRNA sense strand
gagguccagucugaaagug

SEQ ID NO: 1172362 - RNA, 19 nt, Homo sapiens
  misc_RNA (1)...(19): siRNA sense strand
acacaggccaucaggacaa

SEQ ID NO: 1172363 - RNA, 19 nt, Homo sapiens
  misc_RNA (1)...(19): siRNA sense strand
aaggugaggugcuucuucu

SEQ ID NO: 1172364 - RNA, 19 nt, Homo sapiens
  misc_RNA (1)...(19): siRNA sense strand
gcgucuggccuccuucuau

SEQ ID NO: 1172365 - RNA, 19 nt, Homo sapiens
  misc_RNA (1)...(19): siRNA sense strand
gaggugcuucuucugcuau

SEQ ID NO: 1172366 - RNA, 19 nt, Homo sapiens
  misc_RNA (1)...(19): siRNA sense strand
ccuggucugugcugagugu

SEQ ID NO: 1172367 - RNA, 19 nt, Homo sapiens
  misc_RNA (1)...(19): siRNA sense strand
caggagagagguccagucu

SEQ ID NO: 1172368 - RNA, 19 nt, Homo sapiens
  misc_RNA (1)...(19): siRNA sense strand
gcaaugagcuuguguucca

SEQ ID NO: 1172369 - RNA, 19 nt, Homo sapiens
  misc_RNA (1)...(19): siRNA sense strand
gcacauucaucauugagaa

SEQ ID NO: 1172370 - RNA, 19 nt, Homo sapiens
  misc_RNA (1)...(19): siRNA sense strand
gcacguggaggaacucuua

SEQ ID NO: 1172371 - RNA, 19 nt, Homo sapiens
  misc_RNA (1)...(19): siRNA sense strand
cuaaagcuguugauggaua

SEQ ID NO: 1172372 - RNA, 19 nt, Homo sapiens
  misc_RNA (1)...(19): siRNA sense strand
agaaugagcugaagaaacu

SEQ ID NO: 1172373 - RNA, 19 nt, Homo sapiens
  misc_RNA (1)...(19): siRNA sense strand
gaacaacugcugcgugaug

SEQ ID NO: 1172374 - RNA, 19 nt, Homo sapiens
  misc_RNA (1)...(19): siRNA sense strand
acagaacccugaccaugua

SEQ ID NO: 1172375 - RNA, 19 nt, Homo sapiens
  misc_RNA (1)...(19): siRNA sense strand
gaugaggucuucuccaagu

SEQ ID NO: 1172376 - RNA, 19 nt, Homo sapiens
  misc_RNA (1)...(19): siRNA sense strand
gcaaguggucccugaguuu

SEQ ID NO: 1172377 - RNA, 19 nt, Homo sapiens
  misc_RNA (1)...(19): siRNA sense strand
ugauggagguguugaagaa

SEQ ID NO: 1172378 - RNA, 19 nt, Homo sapiens
  misc_RNA (1)...(19): siRNA sense strand
gcagccaccuggaggacua

SEQ ID NO: 1172379 - RNA, 19 nt, Homo sapiens
  misc_RNA (1)...(19): siRNA sense strand
ggcuaaagcuguugaugga

SEQ ID NO: 1172380 - RNA, 19 nt, Homo sapiens
  misc_RNA (1)...(19): siRNA sense strand
ggccaagucucugcuuaaa

SEQ ID NO: 1172381 - RNA, 19 nt, Homo sapiens
  misc_RNA (1)...(19): siRNA sense strand
guggugagauccugaacaa

SEQ ID NO: 1172382 - RNA, 19 nt, Homo sapiens
  misc_RNA (1)...(19): siRNA sense strand
gaaauucaaggccgaagug

SEQ ID NO: 1172383 - RNA, 19 nt, Homo sapiens
  misc_RNA (1)...(19): siRNA sense strand
gaccagcacauucaucauu

SEQ ID NO: 1172384 - RNA, 19 nt, Homo sapiens
  misc_RNA (1)...(19): siRNA sense strand
cuacaguccuggugugaga

SEQ ID NO: 1172385 - RNA, 19 nt, Homo sapiens
  misc_RNA (1)...(19): siRNA sense strand
cgacgggaccuucuuguug

SEQ ID NO: 1172386 - RNA, 19 nt, Homo sapiens
  misc_RNA (1)...(19): siRNA sense strand
gaaguuggccgagaucauc

SEQ ID NO: 1172387 - RNA, 19 nt, Homo sapiens
  misc_RNA (1)...(19): siRNA sense strand
uguggaaccugaaaccauu

SEQ ID NO: 1172388 - RNA, 19 nt, Homo sapiens
  misc_RNA (1)...(19): siRNA sense strand
uaaagcuguugauggauau

SEQ ID NO: 1172389 - RNA, 19 nt, Homo sapiens
  misc_RNA (1)...(19): siRNA sense strand
gaggauccaagcucaguuu

SEQ ID NO: 1172390 - RNA, 19 nt, Homo sapiens
  misc_RNA (1)...(19): siRNA sense strand
agacggcccuccagcagaa

SEQ ID NO: 1172391 - RNA, 19 nt, Homo sapiens
  misc_RNA (1)...(19): siRNA sense strand
gaagacccagaccaaguuu

SEQ ID NO: 1172392 - RNA, 19 nt, Homo sapiens
  misc_RNA (1)...(19): siRNA sense strand
gggaugccauugacuugga

SEQ ID NO: 1172393 - RNA, 19 nt, Homo sapiens
  misc_RNA (1)...(19): siRNA sense strand
uauaacauguacccacaga

SEQ ID NO: 1172394 - RNA, 19 nt, Homo sapiens
  misc_RNA (1)...(19): siRNA sense strand
caggccaagucucugcuua

SEQ ID NO: 1172395 - RNA, 19 nt, Homo sapiens
  misc_RNA (1)...(19): siRNA sense strand
ggaagcagcagaccaucau

SEQ ID NO: 1172396 - RNA, 19 nt, Homo sapiens
  misc_RNA (1)...(19): siRNA sense strand
gcgcuuuagugacucagaa

SEQ ID NO: 1172397 - RNA, 19 nt, Homo sapiens
  misc_RNA (1)...(19): siRNA sense strand
caccaucgccuggaaguuu

SEQ ID NO: 1172398 - RNA, 19 nt, Homo sapiens
  misc_RNA (1)...(19): siRNA sense strand
gagucucaguucaguguug

SEQ ID NO: 1172399 - RNA, 19 nt, Homo sapiens
  misc_RNA (1)...(19): siRNA sense strand
cggcugggauccugguuga

SEQ ID NO: 1172400 - RNA, 19 nt, Homo sapiens
  misc_RNA (1)...(19): siRNA sense strand
ccagcacauucaucauuga

SEQ ID NO: 1172401 - RNA, 19 nt, Homo sapiens
  misc_RNA (1)...(19): siRNA sense strand
gugagaaguuggccgagau

SEQ ID NO: 1172402 - RNA, 19 nt, Homo sapiens
  misc_RNA (1)...(19): siRNA sense strand
acacagagaaugagcugaa

SEQ ID NO: 1172403 - RNA, 19 nt, Homo sapiens
  misc_RNA (1)...(19): siRNA sense strand
cagagaaugagcugaagaa

SEQ ID NO: 1172404 - RNA, 19 nt, Homo sapiens
  misc_RNA (1)...(19): siRNA sense strand
acacuccugugcuggcuaa

SEQ ID NO: 1172405 - RNA, 19 nt, Homo sapiens
  misc_RNA (1)...(19): siRNA sense strand
aggaugaggucuucuccaa

SEQ ID NO: 1172406 - RNA, 19 nt, Homo sapiens
  misc_RNA (1)...(19): siRNA sense strand
gcaucaccaucgccuggaa

SEQ ID NO: 1172407 - RNA, 19 nt, Homo sapiens
  misc_RNA (1)...(19): siRNA sense strand
ugaagacccagaccaaguu

SEQ ID NO: 1172408 - RNA, 19 nt, Homo sapiens
  misc_RNA (1)...(19): siRNA sense strand
cagaucaaccagacauuug

SEQ ID NO: 1172409 - RNA, 19 nt, Homo sapiens
  misc_RNA (1)...(19): siRNA sense strand
gagaauucgaccuggauga

SEQ ID NO: 1172410 - RNA, 19 nt, Homo sapiens
  misc_RNA (1)...(19): siRNA sense strand
ccaaggagaaccucguguu

SEQ ID NO: 1172411 - RNA, 19 nt, Homo sapiens
  misc_RNA (1)...(19): siRNA sense strand
aggaacaugucacugaaga

SEQ ID NO: 1172412 - RNA, 19 nt, Homo sapiens
  misc_RNA (1)...(19): siRNA sense strand
gagaaugagcugaagaaac

SEQ ID NO: 1172413 - RNA, 19 nt, Homo sapiens
  misc_RNA (1)...(19): siRNA sense strand
gugcagaguccgugacaga

SEQ ID NO: 1172414 - RNA, 19 nt, Homo sapiens
  misc_RNA (1)...(19): siRNA sense strand
ggugagauccugaacaacu

SEQ ID NO: 1172415 - RNA, 19 nt, Homo sapiens
  misc_RNA (1)...(19): siRNA sense strand
ucagaucaaccagacauuu

SEQ ID NO: 1172416 - RNA, 19 nt, Homo sapiens
  misc_RNA (1)...(19): siRNA sense strand
cgagugcaguggugagauc

SEQ ID NO: 1172417 - RNA, 19 nt, Homo sapiens
  misc_RNA (1)...(19): siRNA sense strand
aagcugaacgugcacauga

SEQ ID NO: 1172418 - RNA, 19 nt, Homo sapiens
  misc_RNA (1)...(19): siRNA sense strand
gugagauccugaacaacug

SEQ ID NO: 1172419 - RNA, 19 nt, Homo sapiens
  misc_RNA (1)...(19): siRNA sense strand
aaccacagaucaagcaagu

SEQ ID NO: 1172420 - RNA, 19 nt, Homo sapiens
  misc_RNA (1)...(19): siRNA sense strand
uaacauguacccacagaac

SEQ ID NO: 1172421 - RNA, 19 nt, Homo sapiens
  misc_RNA (1)...(19): siRNA sense strand
cacagaacccugaccaugu

SEQ ID NO: 1172422 - RNA, 19 nt, Homo sapiens
  misc_RNA (1)...(19): siRNA sense strand
caaguggucccugaguuug

SEQ ID NO: 1172423 - RNA, 19 nt, Homo sapiens
  misc_RNA (1)...(19): siRNA sense strand
gaggucaacgccaccauca

SEQ ID NO: 1172424 - RNA, 19 nt, Homo sapiens
  misc_RNA (1)...(19): siRNA sense strand
gaauucgaccuggaugaga

SEQ ID NO: 1172425 - RNA, 19 nt, Homo sapiens
  misc_RNA (1)...(19): siRNA sense strand
gcuaucucaucuauguguu

SEQ ID NO: 1172426 - RNA, 19 nt, Homo sapiens
  misc_RNA (1)...(19): siRNA sense strand
cuacugugcugugggacaa

SEQ ID NO: 1172427 - RNA, 19 nt, Homo sapiens
  misc_RNA (1)...(19): siRNA sense strand
gaaggccaccaucaucagu

SEQ ID NO: 1172428 - RNA, 19 nt, Homo sapiens
  misc_RNA (1)...(19): siRNA sense strand
ccacgcagcuccagaaaac

SEQ ID NO: 1172429 - RNA, 19 nt, Homo sapiens
  misc_RNA (1)...(19): siRNA sense strand
gaacucuuacgccgaccaa

SEQ ID NO: 1172430 - RNA, 19 nt, Homo sapiens
  misc_RNA (1)...(19): siRNA sense strand
gaaaccacagaucaagcaa

SEQ ID NO: 1172431 - RNA, 19 nt, Homo sapiens
  misc_RNA (1)...(19): siRNA sense strand
cuacuuggcccaguggauu

SEQ ID NO: 1172432 - RNA, 19 nt, Homo sapiens
  misc_RNA (1)...(19): siRNA sense strand
gcugugggacaaugccuuu

SEQ ID NO: 1172433 - RNA, 19 nt, Homo sapiens
  misc_RNA (1)...(19): siRNA sense strand
acaugucacugaagaggau

SEQ ID NO: 1172434 - RNA, 19 nt, Homo sapiens
  misc_RNA (1)...(19): siRNA sense strand
gugaaggccaccaucauca

SEQ ID NO: 1172435 - RNA, 19 nt, Homo sapiens
  misc_RNA (1)...(19): siRNA sense strand
guucaguguuggcagcaau

SEQ ID NO: 1172436 - RNA, 19 nt, Homo sapiens
  misc_RNA (1)...(19): siRNA sense strand
uggaugagaccauggaugu

SEQ ID NO: 1172437 - RNA, 19 nt, Homo sapiens
  misc_RNA (1)...(19): siRNA sense strand
ccaucgagguccggcacua

SEQ ID NO: 1172438 - RNA, 19 nt, Homo sapiens
  misc_RNA (1)...(19): siRNA sense strand
uaucucaucuauguguuuc

SEQ ID NO: 1172439 - RNA, 19 nt, Homo sapiens
  misc_RNA (1)...(19): siRNA sense strand
gcagcaaugagcuuguguu

SEQ ID NO: 1172440 - RNA, 19 nt, Homo sapiens
  misc_RNA (1)...(19): siRNA sense strand
ucacgcaggacacagagaa

SEQ ID NO: 1172441 - RNA, 19 nt, Homo sapiens
  misc_RNA (1)...(19): siRNA sense strand
gguccgagaagccaacaau

SEQ ID NO: 1172442 - RNA, 19 nt, Homo sapiens
  misc_RNA (1)...(19): siRNA sense strand
cauccuagguuuugugaau

SEQ ID NO: 1172443 - RNA, 19 nt, Homo sapiens
  misc_RNA (1)...(19): siRNA sense strand
cagaggagaaguucacagu

SEQ ID NO: 1172444 - RNA, 19 nt, Homo sapiens
  misc_RNA (1)...(19): siRNA sense strand
caucacggacauuaucuca

SEQ ID NO: 1172445 - RNA, 19 nt, Homo sapiens
  misc_RNA (1)...(19): siRNA sense strand
caggcucccuauaacaugu

SEQ ID NO: 1172446 - RNA, 19 nt, Homo sapiens
  misc_RNA (1)...(19): siRNA sense strand
cccacgaccugcucaucaa

SEQ ID NO: 1172447 - RNA, 19 nt, Homo sapiens
  misc_RNA (1)...(19): siRNA sense strand
ugccgugccugacaaagug

SEQ ID NO: 1172448 - RNA, 19 nt, Homo sapiens
  misc_RNA (1)...(19): siRNA sense strand
gcaguggugagauccugaa

SEQ ID NO: 1172449 - RNA, 19 nt, Homo sapiens
  misc_RNA (1)...(19): siRNA sense strand
gcauccggcacauucugua

SEQ ID NO: 1172450 - RNA, 19 nt, Homo sapiens
  misc_RNA (1)...(19): siRNA sense strand
accagcacauucaucauug

SEQ ID NO: 1172451 - RNA, 19 nt, Homo sapiens
  misc_RNA (1)...(19): siRNA sense strand
ugaaaccacagaucaagca

SEQ ID NO: 1172452 - RNA, 19 nt, Homo sapiens
  misc_RNA (1)...(19): siRNA sense strand
uccgagaagccaacaauug

SEQ ID NO: 1172453 - RNA, 19 nt, Homo sapiens
  misc_RNA (1)...(19): siRNA sense strand
gaagcugaacgugcacaug

SEQ ID NO: 1172454 - RNA, 19 nt, Homo sapiens
  misc_RNA (1)...(19): siRNA sense strand
cagcaaugagcuuguguuc

SEQ ID NO: 1172455 - RNA, 19 nt, Homo sapiens
  misc_RNA (1)...(19): siRNA sense strand
caaccuguggaaccugaaa

SEQ ID NO: 1172456 - RNA, 19 nt, Homo sapiens
  misc_RNA (1)...(19): siRNA sense strand
gccaccaucacggacauua

SEQ ID NO: 1172457 - RNA, 19 nt, Homo sapiens
  misc_RNA (1)...(19): siRNA sense strand
cgaccaauggacagucuug

SEQ ID NO: 1172458 - RNA, 19 nt, Homo sapiens
  misc_RNA (1)...(19): siRNA sense strand
gcccacgaccugcucauca

SEQ ID NO: 1172459 - RNA, 19 nt, Homo sapiens
  misc_RNA (1)...(19): siRNA sense strand
gugaccagcacauucauca

SEQ ID NO: 1172460 - RNA, 19 nt, Homo sapiens
  misc_RNA (1)...(19): siRNA sense strand
guccuggugugagaaguug

SEQ ID NO: 1172461 - RNA, 19 nt, Homo sapiens
  misc_RNA (1)...(19): siRNA sense strand
cagcagcgccacguacaug

SEQ ID NO: 1172462 - RNA, 19 nt, Homo sapiens
  misc_RNA (1)...(19): siRNA sense strand
gcugaacgugcacaugaau

SEQ ID NO: 1172463 - RNA, 19 nt, Homo sapiens
  misc_RNA (1)...(19): siRNA sense strand
gccagaugcaggugcugua

SEQ ID NO: 1172464 - RNA, 19 nt, Homo sapiens
  misc_RNA (1)...(19): siRNA sense strand
ucccugaguuugugaaugc

SEQ ID NO: 1172465 - RNA, 19 nt, Homo sapiens
  misc_RNA (1)...(19): siRNA sense strand
cgcaggacacagagaauga

SEQ ID NO: 1172466 - RNA, 19 nt, Homo sapiens
  misc_RNA (1)...(19): siRNA sense strand
ccaggcacguggaggaacu

SEQ ID NO: 1172467 - RNA, 19 nt, Homo sapiens
  misc_RNA (1)...(19): siRNA sense strand
gcuguugauggauauguga

SEQ ID NO: 1172468 - RNA, 19 nt, Homo sapiens
  misc_RNA (1)...(19): siRNA sense strand
gcaggacgcucuacuaugg

SEQ ID NO: 1172469 - RNA, 19 nt, Homo sapiens
  misc_RNA (1)...(19): siRNA sense strand
gcagauaucaguggcuaua

SEQ ID NO: 1172470 - RNA, 19 nt, Homo sapiens
  misc_RNA (1)...(19): siRNA sense strand
ggagugaaagguucuauga

SEQ ID NO: 1172471 - RNA, 19 nt, Homo sapiens
  misc_RNA (1)...(19): siRNA sense strand
gcugcaaacugcgauauug

SEQ ID NO: 1172472 - RNA, 19 nt, Homo sapiens
  misc_RNA (1)...(19): siRNA sense strand
gaggagguccgcuacauug

SEQ ID NO: 1172473 - RNA, 19 nt, Homo sapiens
  misc_RNA (1)...(19): siRNA sense strand
gcaagaggagugaaagguu

SEQ ID NO: 1172474 - RNA, 19 nt, Homo sapiens
  misc_RNA (1)...(19): siRNA sense strand
gcucguggcugagaucaug

SEQ ID NO: 1172475 - RNA, 19 nt, Homo sapiens
  misc_RNA (1)...(19): siRNA sense strand
ccaggcauauucaagaguu

SEQ ID NO: 1172476 - RNA, 19 nt, Homo sapiens
  misc_RNA (1)...(19): siRNA sense strand
aaagagcccuacccugaug

SEQ ID NO: 1172477 - RNA, 19 nt, Homo sapiens
  misc_RNA (1)...(19): siRNA sense strand
guacgcugguuucccuuug

SEQ ID NO: 1172478 - RNA, 19 nt, Homo sapiens
  misc_RNA (1)...(19): siRNA sense strand
ggaggagguccgcuacauu

SEQ ID NO: 1172479 - RNA, 19 nt, Homo sapiens
  misc_RNA (1)...(19): siRNA sense strand
gauaacagucuuacucucu

SEQ ID NO: 1172480 - RNA, 19 nt, Homo sapiens
  misc_RNA (1)...(19): siRNA sense strand
gcaggaggcagauaucagu

SEQ ID NO: 1172481 - RNA, 19 nt, Homo sapiens
  misc_RNA (1)...(19): siRNA sense strand
agugaaagguucuaugagu

SEQ ID NO: 1172482 - RNA, 19 nt, Homo sapiens
  misc_RNA (1)...(19): siRNA sense strand
gcaacgggaaccugcugua

SEQ ID NO: 1172483 - RNA, 19 nt, Homo sapiens
  misc_RNA (1)...(19): siRNA sense strand
aaacugcgauauugcugau

SEQ ID NO: 1172484 - RNA, 19 nt, Homo sapiens
  misc_RNA (1)...(19): siRNA sense strand
ggaccagagucauccuucu

SEQ ID NO: 1172485 - RNA, 19 nt, Homo sapiens
  misc_RNA (1)...(19): siRNA sense strand
uaccauugauagcccagua

SEQ ID NO: 1172486 - RNA, 19 nt, Homo sapiens
  misc_RNA (1)...(19): siRNA sense strand
caagaguuccugcuacauc

SEQ ID NO: 1172487 - RNA, 19 nt, Homo sapiens
  misc_RNA (1)...(19): siRNA sense strand
caaagagcccuacccugau

SEQ ID NO: 1172488 - RNA, 19 nt, Homo sapiens
  misc_RNA (1)...(19): siRNA sense strand
gacgccacauuccacacua

SEQ ID NO: 1172489 - RNA, 19 nt, Homo sapiens
  misc_RNA (1)...(19): siRNA sense strand
gcgcgugguuccugcgaau

SEQ ID NO: 1172490 - RNA, 19 nt, Homo sapiens
  misc_RNA (1)...(19): siRNA sense strand
gcucuacuauggccucaac

SEQ ID NO: 1172491 - RNA, 19 nt, Homo sapiens
  misc_RNA (1)...(19): siRNA sense strand
cuaacguguuggugaauuc

SEQ ID NO: 1172492 - RNA, 19 nt, Homo sapiens
  misc_RNA (1)...(19): siRNA sense strand
acugcgauauugcugauga

SEQ ID NO: 1172493 - RNA, 19 nt, Homo sapiens
  misc_RNA (1)...(19): siRNA sense strand
caaguggaccagagucauc

SEQ ID NO: 1172494 - RNA, 19 nt, Homo sapiens
  misc_RNA (1)...(19): siRNA sense strand
uaacagucuuacucucucu

SEQ ID NO: 1172495 - RNA, 19 nt, Homo sapiens
  misc_RNA (1)...(19): siRNA sense strand
caauggagaaugggaccua

SEQ ID NO: 1172496 - RNA, 19 nt, Homo sapiens
  misc_RNA (1)...(19): siRNA sense strand
gggauaacagucuuacucu

SEQ ID NO: 1172497 - RNA, 19 nt, Homo sapiens
  misc_RNA (1)...(19): siRNA sense strand
ccgcaggacgcucuacuau

SEQ ID NO: 1172498 - RNA, 19 nt, Homo sapiens
  misc_RNA (1)...(19): siRNA sense strand
aaugggaccuagugggaau

SEQ ID NO: 1172499 - RNA, 19 nt, Homo sapiens
  misc_RNA (1)...(19): siRNA sense strand
gcgcuuugacgccacauuc

SEQ ID NO: 1172500 - RNA, 19 nt, Homo sapiens
  misc_RNA (1)...(19): siRNA sense strand
gagucauccuucugaacug

SEQ ID NO: 1172501 - RNA, 19 nt, Homo sapiens
  misc_RNA (1)...(19): siRNA sense strand
acagucuuacucucucuua

SEQ ID NO: 1172502 - RNA, 19 nt, Homo sapiens
  misc_RNA (1)...(19): siRNA sense strand
acgggaaccugcuguacau

SEQ ID NO: 1172503 - RNA, 19 nt, Homo sapiens
  misc_RNA (1)...(19): siRNA sense strand
gcgugguuccugcgaauga

SEQ ID NO: 1172504 - RNA, 19 nt, Homo sapiens
  misc_RNA (1)...(19): siRNA sense strand
gcugguuucccuuugaugu

SEQ ID NO: 1172505 - RNA, 19 nt, Homo sapiens
  misc_RNA (1)...(19): siRNA sense strand
ccuccaggcauauucaaga

SEQ ID NO: 1172506 - RNA, 19 nt, Homo sapiens
  misc_RNA (1)...(19): siRNA sense strand
acuaacguguuggugaauu

SEQ ID NO: 1172507 - RNA, 19 nt, Homo sapiens
  misc_RNA (1)...(19): siRNA sense strand
acgccacauuccacacuaa

SEQ ID NO: 1172508 - RNA, 19 nt, Homo sapiens
  misc_RNA (1)...(19): siRNA sense strand
cgauucgguaccauugaua

SEQ ID NO: 1172509 - RNA, 19 nt, Homo sapiens
  misc_RNA (1)...(19): siRNA sense strand
gcaggacgcucuacuaugg

SEQ ID NO: 1172510 - RNA, 19 nt, Homo sapiens
  misc_RNA (1)...(19): siRNA sense strand
gcagauaucaguggcuaua

SEQ ID NO: 1172511 - RNA, 19 nt, Homo sapiens
  misc_RNA (1)...(19): siRNA sense strand
ggagugaaagguucuauga

SEQ ID NO: 1172512 - RNA, 19 nt, Homo sapiens
  misc_RNA (1)...(19): siRNA sense strand
gaggagguccgcuacauug

SEQ ID NO: 1172513 - RNA, 19 nt, Homo sapiens
  misc_RNA (1)...(19): siRNA sense strand
gcaagaggagugaaagguu

SEQ ID NO: 1172514 - RNA, 19 nt, Homo sapiens
  misc_RNA (1)...(19): siRNA sense strand
gcucguggcugagaucaug

SEQ ID NO: 1172515 - RNA, 19 nt, Homo sapiens
  misc_RNA (1)...(19): siRNA sense strand
aaagagcccuacccugaug

SEQ ID NO: 1172516 - RNA, 19 nt, Homo sapiens
  misc_RNA (1)...(19): siRNA sense strand
gauaacagucuuacucucu

SEQ ID NO: 1172517 - RNA, 19 nt, Homo sapiens
  misc_RNA (1)...(19): siRNA sense strand
ggaggagguccgcuacauu

SEQ ID NO: 1172518 - RNA, 19 nt, Homo sapiens
  misc_RNA (1)...(19): siRNA sense strand
gcaggaggcagauaucagu

SEQ ID NO: 1172519 - RNA, 19 nt, Homo sapiens
  misc_RNA (1)...(19): siRNA sense strand
agugaaagguucuaugagu

SEQ ID NO: 1172520 - RNA, 19 nt, Homo sapiens
  misc_RNA (1)...(19): siRNA sense strand
gcaacgggaaccugcugua

SEQ ID NO: 1172521 - RNA, 19 nt, Homo sapiens
  misc_RNA (1)...(19): siRNA sense strand
ggaccagagucauccuucu

SEQ ID NO: 1172522 - RNA, 19 nt, Homo sapiens
  misc_RNA (1)...(19): siRNA sense strand
uaccauugauagcccagua

SEQ ID NO: 1172523 - RNA, 19 nt, Homo sapiens
  misc_RNA (1)...(19): siRNA sense strand
caaagagcccuacccugau

SEQ ID NO: 1172524 - RNA, 19 nt, Homo sapiens
  misc_RNA (1)...(19): siRNA sense strand
gcgcgugguuccugcgaau

SEQ ID NO: 1172525 - RNA, 19 nt, Homo sapiens
  misc_RNA (1)...(19): siRNA sense strand
gcucuacuauggccucaac

SEQ ID NO: 1172526 - RNA, 19 nt, Homo sapiens
  misc_RNA (1)...(19): siRNA sense strand
uaacagucuuacucucucu

SEQ ID NO: 1172527 - RNA, 19 nt, Homo sapiens
  misc_RNA (1)...(19): siRNA sense strand
caaguggaccagagucauc

SEQ ID NO: 1172528 - RNA, 19 nt, Homo sapiens
  misc_RNA (1)...(19): siRNA sense strand
caauggagaaugggaccua

SEQ ID NO: 1172529 - RNA, 19 nt, Homo sapiens
  misc_RNA (1)...(19): siRNA sense strand
gggauaacagucuuacucu

SEQ ID NO: 1172530 - RNA, 19 nt, Homo sapiens
  misc_RNA (1)...(19): siRNA sense strand
ccgcaggacgcucuacuau

SEQ ID NO: 1172531 - RNA, 19 nt, Homo sapiens
  misc_RNA (1)...(19): siRNA sense strand
aaugggaccuagugggaau

SEQ ID NO: 1172532 - RNA, 19 nt, Homo sapiens
  misc_RNA (1)...(19): siRNA sense strand
gagucauccuucugaacug

SEQ ID NO: 1172533 - RNA, 19 nt, Homo sapiens
  misc_RNA (1)...(19): siRNA sense strand
acagucuuacucucucuua

SEQ ID NO: 1172534 - RNA, 19 nt, Homo sapiens
  misc_RNA (1)...(19): siRNA sense strand
acgggaaccugcuguacau

SEQ ID NO: 1172535 - RNA, 19 nt, Homo sapiens
  misc_RNA (1)...(19): siRNA sense strand
gcgugguuccugcgaauga

SEQ ID NO: 1172536 - RNA, 19 nt, Homo sapiens
  misc_RNA (1)...(19): siRNA sense strand
cgauucgguaccauugaua

SEQ ID NO: 1172537 - RNA, 19 nt, Homo sapiens
  misc_RNA (1)...(19): siRNA sense strand
gaacacauggaguauauua

SEQ ID NO: 1172538 - RNA, 19 nt, Homo sapiens
  misc_RNA (1)...(19): siRNA sense strand
gaagauauguccccauuua

SEQ ID NO: 1172539 - RNA, 19 nt, Homo sapiens
  misc_RNA (1)...(19): siRNA sense strand
gauaagaacacauggagua

SEQ ID NO: 1172540 - RNA, 19 nt, Homo sapiens
  misc_RNA (1)...(19): siRNA sense strand
gagaagagaugccuguugu

SEQ ID NO: 1172541 - RNA, 19 nt, Homo sapiens
  misc_RNA (1)...(19): siRNA sense strand
gaaugugaauguucugaaa

SEQ ID NO: 1172542 - RNA, 19 nt, Homo sapiens
  misc_RNA (1)...(19): siRNA sense strand
gaaaauaucuguggcauug

SEQ ID NO: 1172543 - RNA, 19 nt, Homo sapiens
  misc_RNA (1)...(19): siRNA sense strand
gaccugaucuccaccauga

SEQ ID NO: 1172544 - RNA, 19 nt, Homo sapiens
  misc_RNA (1)...(19): siRNA sense strand
caacagauuuggccauuca

SEQ ID NO: 1172545 - RNA, 19 nt, Homo sapiens
  misc_RNA (1)...(19): siRNA sense strand
guacaaagauaguuucucu

SEQ ID NO: 1172546 - RNA, 19 nt, Homo sapiens
  misc_RNA (1)...(19): siRNA sense strand
uaagcaaugugcaggaaua

SEQ ID NO: 1172547 - RNA, 19 nt, Homo sapiens
  misc_RNA (1)...(19): siRNA sense strand
gaagagaugccuguuguuu

SEQ ID NO: 1172548 - RNA, 19 nt, Homo sapiens
  misc_RNA (1)...(19): siRNA sense strand
ccacucagauuauaacaug

SEQ ID NO: 1172549 - RNA, 19 nt, Homo sapiens
  misc_RNA (1)...(19): siRNA sense strand
aaaccaacauuaaggagua

SEQ ID NO: 1172550 - RNA, 19 nt, Homo sapiens
  misc_RNA (1)...(19): siRNA sense strand
gcaggaauaugauuuggau

SEQ ID NO: 1172551 - RNA, 19 nt, Homo sapiens
  misc_RNA (1)...(19): siRNA sense strand
uaacaugguucuagcguau

SEQ ID NO: 1172552 - RNA, 19 nt, Homo sapiens
  misc_RNA (1)...(19): siRNA sense strand
gcaaugugcaggaauauga

SEQ ID NO: 1172553 - RNA, 19 nt, Homo sapiens
  misc_RNA (1)...(19): siRNA sense strand
ggacagccaaauagaauaa

SEQ ID NO: 1172554 - RNA, 19 nt, Homo sapiens
  misc_RNA (1)...(19): siRNA sense strand
ccacuaaaccguucuguga

SEQ ID NO: 1172555 - RNA, 19 nt, Homo sapiens
  misc_RNA (1)...(19): siRNA sense strand
gcgauacuguugaauguga

SEQ ID NO: 1172556 - RNA, 19 nt, Homo sapiens
  misc_RNA (1)...(19): siRNA sense strand
ccaggaagaugaucgcuau

SEQ ID NO: 1172557 - RNA, 19 nt, Homo sapiens
  misc_RNA (1)...(19): siRNA sense strand
gacuaucaguucaccuuua

SEQ ID NO: 1172558 - RNA, 19 nt, Homo sapiens
  misc_RNA (1)...(19): siRNA sense strand
gaugaucucuaccgauaug

SEQ ID NO: 1172559 - RNA, 19 nt, Homo sapiens
  misc_RNA (1)...(19): siRNA sense strand
gaaaaucgauaccaaggaa

SEQ ID NO: 1172560 - RNA, 19 nt, Homo sapiens
  misc_RNA (1)...(19): siRNA sense strand
gaaggacagccaaauagaa

SEQ ID NO: 1172561 - RNA, 19 nt, Homo sapiens
  misc_RNA (1)...(19): siRNA sense strand
gcacagccaacaccaauga

SEQ ID NO: 1172562 - RNA, 19 nt, Homo sapiens
  misc_RNA (1)...(19): siRNA sense strand
gaggauauauguucaacca

SEQ ID NO: 1172563 - RNA, 19 nt, Homo sapiens
  misc_RNA (1)...(19): siRNA sense strand
caaggagaauuaugacaau

SEQ ID NO: 1172564 - RNA, 19 nt, Homo sapiens
  misc_RNA (1)...(19): siRNA sense strand
ggaagaugaucgcuauuac

SEQ ID NO: 1172565 - RNA, 19 nt, Homo sapiens
  misc_RNA (1)...(19): siRNA sense strand
aagaacacauggaguauau

SEQ ID NO: 1172566 - RNA, 19 nt, Homo sapiens
  misc_RNA (1)...(19): siRNA sense strand
ccaaaugcuucucuucaga

SEQ ID NO: 1172567 - RNA, 19 nt, Homo sapiens
  misc_RNA (1)...(19): siRNA sense strand
gaggaaacacacacaauga

SEQ ID NO: 1172568 - RNA, 19 nt, Homo sapiens
  misc_RNA (1)...(19): siRNA sense strand
agacuucguuucaaucauu

SEQ ID NO: 1172569 - RNA, 19 nt, Homo sapiens
  misc_RNA (1)...(19): siRNA sense strand
caaugugguuguuagauau

SEQ ID NO: 1172570 - RNA, 19 nt, Homo sapiens
  misc_RNA (1)...(19): siRNA sense strand
gaguguaagaucaguaaua

SEQ ID NO: 1172571 - RNA, 19 nt, Homo sapiens
  misc_RNA (1)...(19): siRNA sense strand
aaacagggauuuggacaug

SEQ ID NO: 1172572 - RNA, 19 nt, Homo sapiens
  misc_RNA (1)...(19): siRNA sense strand
agaagaagguagaauuugu

SEQ ID NO: 1172573 - RNA, 19 nt, Homo sapiens
  misc_RNA (1)...(19): siRNA sense strand
cagauggaccuggaaauua

SEQ ID NO: 1172574 - RNA, 19 nt, Homo sapiens
  misc_RNA (1)...(19): siRNA sense strand
ucauaaagcuguggucaau

SEQ ID NO: 1172575 - RNA, 19 nt, Homo sapiens
  misc_RNA (1)...(19): siRNA sense strand
cguaugaccuugcuucuag

SEQ ID NO: 1172576 - RNA, 19 nt, Homo sapiens
  misc_RNA (1)...(19): siRNA sense strand
ggaaaugucagccaugcaa

SEQ ID NO: 1172577 - RNA, 19 nt, Homo sapiens
  misc_RNA (1)...(19): siRNA sense strand
gcuaaauuguucuguagga

SEQ ID NO: 1172578 - RNA, 19 nt, Homo sapiens
  misc_RNA (1)...(19): siRNA sense strand
gcuggcaacugaugaacaa

SEQ ID NO: 1172579 - RNA, 19 nt, Homo sapiens
  misc_RNA (1)...(19): siRNA sense strand
ccuaugacauugccuguga

SEQ ID NO: 1172580 - RNA, 19 nt, Homo sapiens
  misc_RNA (1)...(19): siRNA sense strand
ggaggaaacacacacaaug

SEQ ID NO: 1172581 - RNA, 19 nt, Homo sapiens
  misc_RNA (1)...(19): siRNA sense strand
guaguugggaccauuuaua

SEQ ID NO: 1172582 - RNA, 19 nt, Homo sapiens
  misc_RNA (1)...(19): siRNA sense strand
agagaugccuguuguuuca

SEQ ID NO: 1172583 - RNA, 19 nt, Homo sapiens
  misc_RNA (1)...(19): siRNA sense strand
gcagauacaacuggucuuu

SEQ ID NO: 1172584 - RNA, 19 nt, Homo sapiens
  misc_RNA (1)...(19): siRNA sense strand
gcauuugguuggaaacuca

SEQ ID NO: 1172585 - RNA, 19 nt, Homo sapiens
  misc_RNA (1)...(19): siRNA sense strand
gcacacauuguuacacuga

SEQ ID NO: 1172586 - RNA, 19 nt, Homo sapiens
  misc_RNA (1)...(19): siRNA sense strand
gccaguguauggaauggua

SEQ ID NO: 1172587 - RNA, 19 nt, Homo sapiens
  misc_RNA (1)...(19): siRNA sense strand
gaauaaugcagucaucuca

SEQ ID NO: 1172588 - RNA, 19 nt, Homo sapiens
  misc_RNA (1)...(19): siRNA sense strand
ccagaagaagguagaauuu

SEQ ID NO: 1172589 - RNA, 19 nt, Homo sapiens
  misc_RNA (1)...(19): siRNA sense strand
gaccagggcccuauacguu

SEQ ID NO: 1172590 - RNA, 19 nt, Homo sapiens
  misc_RNA (1)...(19): siRNA sense strand
agauggaccuggaaauuau

SEQ ID NO: 1172591 - RNA, 19 nt, Homo sapiens
  misc_RNA (1)...(19): siRNA sense strand
gcuaguugcugcauuuagu

SEQ ID NO: 1172592 - RNA, 19 nt, Homo sapiens
  misc_RNA (1)...(19): siRNA sense strand
gaugcuggauucuguggaa

SEQ ID NO: 1172593 - RNA, 19 nt, Homo sapiens
  misc_RNA (1)...(19): siRNA sense strand
gaaugugaccaaugaguug

SEQ ID NO: 1172594 - RNA, 19 nt, Homo sapiens
  misc_RNA (1)...(19): siRNA sense strand
caauucaagugaugucaga

SEQ ID NO: 1172595 - RNA, 19 nt, Homo sapiens
  misc_RNA (1)...(19): siRNA sense strand
gagaguguaagaucaguaa

SEQ ID NO: 1172596 - RNA, 19 nt, Homo sapiens
  misc_RNA (1)...(19): siRNA sense strand
cgaggcaucugcaauucaa

SEQ ID NO: 1172597 - RNA, 19 nt, Homo sapiens
  misc_RNA (1)...(19): siRNA sense strand
gagcaucugugagaagugu

SEQ ID NO: 1172598 - RNA, 19 nt, Homo sapiens
  misc_RNA (1)...(19): siRNA sense strand
ggaauaugauuuggauaag

SEQ ID NO: 1172599 - RNA, 19 nt, Homo sapiens
  misc_RNA (1)...(19): siRNA sense strand
ggaaugugaccaaugaguu

SEQ ID NO: 1172600 - RNA, 19 nt, Homo sapiens
  misc_RNA (1)...(19): siRNA sense strand
ugagagagauggcaaugag

SEQ ID NO: 1172601 - RNA, 19 nt, Homo sapiens
  misc_RNA (1)...(19): siRNA sense strand
ggacuccaaugccuaugug

SEQ ID NO: 1172602 - RNA, 19 nt, Homo sapiens
  misc_RNA (1)...(19): siRNA sense strand
ucacugcccucucuaugga

SEQ ID NO: 1172603 - RNA, 19 nt, Homo sapiens
  misc_RNA (1)...(19): siRNA sense strand
cagcgauacuguugaaugu

SEQ ID NO: 1172604 - RNA, 19 nt, Homo sapiens
  misc_RNA (1)...(19): siRNA sense strand
gugaugcugcuuauaauuu

SEQ ID NO: 1172605 - RNA, 19 nt, Homo sapiens
  misc_RNA (1)...(19): siRNA sense strand
uuagugaugcugcuuauaa

SEQ ID NO: 1172606 - RNA, 19 nt, Homo sapiens
  misc_RNA (1)...(19): siRNA sense strand
ccaagaauuucaaccucaa

SEQ ID NO: 1172607 - RNA, 19 nt, Homo sapiens
  misc_RNA (1)...(19): siRNA sense strand
cagaggaacauguuauuau

SEQ ID NO: 1172608 - RNA, 19 nt, Homo sapiens
  misc_RNA (1)...(19): siRNA sense strand
cuacugccaaggagaauua

SEQ ID NO: 1172609 - RNA, 19 nt, Homo sapiens
  misc_RNA (1)...(19): siRNA sense strand
gggaccauuuauauguuua

SEQ ID NO: 1172610 - RNA, 19 nt, Homo sapiens
  misc_RNA (1)...(19): siRNA sense strand
ggagcaguaugcagugguu

SEQ ID NO: 1172611 - RNA, 19 nt, Homo sapiens
  misc_RNA (1)...(19): siRNA sense strand
uagcagcgauacuguugaa

SEQ ID NO: 1172612 - RNA, 19 nt, Homo sapiens
  misc_RNA (1)...(19): siRNA sense strand
gguagaauuuguccuuaag

SEQ ID NO: 1172613 - RNA, 19 nt, Homo sapiens
  misc_RNA (1)...(19): siRNA sense strand
gguccuggauguucaguuc

SEQ ID NO: 1172614 - RNA, 19 nt, Homo sapiens
  misc_RNA (1)...(19): siRNA sense strand
ggaaaggugaagcauguga

SEQ ID NO: 1172615 - RNA, 19 nt, Homo sapiens
  misc_RNA (1)...(19): siRNA sense strand
gucauucuuuggcauuaua

SEQ ID NO: 1172616 - RNA, 19 nt, Homo sapiens
  misc_RNA (1)...(19): siRNA sense strand
gaagaugaucgcuauuaca

SEQ ID NO: 1172617 - RNA, 19 nt, Homo sapiens
  misc_RNA (1)...(19): siRNA sense strand
caguucaccuuuagucuau

SEQ ID NO: 1172618 - RNA, 19 nt, Homo sapiens
  misc_RNA (1)...(19): siRNA sense strand
gcacugcgagaccugcaua

SEQ ID NO: 1172619 - RNA, 19 nt, Homo sapiens
  misc_RNA (1)...(19): siRNA sense strand
agauacaacuggucuuuca

SEQ ID NO: 1172620 - RNA, 19 nt, Homo sapiens
  misc_RNA (1)...(19): siRNA sense strand
gaaccacagcugcucagaa

SEQ ID NO: 1172621 - RNA, 19 nt, Homo sapiens
  misc_RNA (1)...(19): siRNA sense strand
ggcaacugaugaacaagaa

SEQ ID NO: 1172622 - RNA, 19 nt, Homo sapiens
  misc_RNA (1)...(19): siRNA sense strand
cgaggagaguguaagauca

SEQ ID NO: 1172623 - RNA, 19 nt, Homo sapiens
  misc_RNA (1)...(19): siRNA sense strand
ggagaagagaugccuguug

SEQ ID NO: 1172624 - RNA, 19 nt, Homo sapiens
  misc_RNA (1)...(19): siRNA sense strand
caacuggucuuucauucac

SEQ ID NO: 1172625 - RNA, 19 nt, Homo sapiens
  misc_RNA (1)...(19): siRNA sense strand
ccaaggagaauuaugacaa

SEQ ID NO: 1172626 - RNA, 19 nt, Homo sapiens
  misc_RNA (1)...(19): siRNA sense strand
ggcauuggcuggcauuugg

SEQ ID NO: 1172627 - RNA, 19 nt, Homo sapiens
  misc_RNA (1)...(19): siRNA sense strand
cacaaugacacaucuauga

SEQ ID NO: 1172628 - RNA, 19 nt, Homo sapiens
  misc_RNA (1)...(19): siRNA sense strand
gaaggccagaucuccauuu

SEQ ID NO: 1172629 - RNA, 19 nt, Homo sapiens
  misc_RNA (1)...(19): siRNA sense strand
ucaaugccuccaagaauuu

SEQ ID NO: 1172630 - RNA, 19 nt, Homo sapiens
  misc_RNA (1)...(19): siRNA sense strand
cugcauaucuggcuucuac

SEQ ID NO: 1172631 - RNA, 19 nt, Homo sapiens
  misc_RNA (1)...(19): siRNA sense strand
guacuacuguaacaagaag

SEQ ID NO: 1172632 - RNA, 19 nt, Homo sapiens
  misc_RNA (1)...(19): siRNA sense strand
gaaccacaaugcccuuuug

SEQ ID NO: 1172633 - RNA, 19 nt, Homo sapiens
  misc_RNA (1)...(19): siRNA sense strand
ucagaggaacauguuauua

SEQ ID NO: 1172634 - RNA, 19 nt, Homo sapiens
  misc_RNA (1)...(19): siRNA sense strand
ccaaggaaacccucucaga

SEQ ID NO: 1172635 - RNA, 19 nt, Homo sapiens
  misc_RNA (1)...(19): siRNA sense strand
cacaguaaaugcaucaauc

SEQ ID NO: 1172636 - RNA, 19 nt, Homo sapiens
  misc_RNA (1)...(19): siRNA sense strand
uuaagcagcugcgaauaau

SEQ ID NO: 1172637 - RNA, 19 nt, Homo sapiens
  misc_RNA (1)...(19): siRNA sense strand
gaacacauggaguauauua

SEQ ID NO: 1172638 - RNA, 19 nt, Homo sapiens
  misc_RNA (1)...(19): siRNA sense strand
gaagauauguccccauuua

SEQ ID NO: 1172639 - RNA, 19 nt, Homo sapiens
  misc_RNA (1)...(19): siRNA sense strand
gauaagaacacauggagua

SEQ ID NO: 1172640 - RNA, 19 nt, Homo sapiens
  misc_RNA (1)...(19): siRNA sense strand
gagaagagaugccuguugu

SEQ ID NO: 1172641 - RNA, 19 nt, Homo sapiens
  misc_RNA (1)...(19): siRNA sense strand
gaaugugaauguucugaaa

SEQ ID NO: 1172642 - RNA, 19 nt, Homo sapiens
  misc_RNA (1)...(19): siRNA sense strand
gaaaauaucuguggcauug

SEQ ID NO: 1172643 - RNA, 19 nt, Homo sapiens
  misc_RNA (1)...(19): siRNA sense strand
gaccugaucuccaccauga

SEQ ID NO: 1172644 - RNA, 19 nt, Homo sapiens
  misc_RNA (1)...(19): siRNA sense strand
caacagauuuggccauuca

SEQ ID NO: 1172645 - RNA, 19 nt, Homo sapiens
  misc_RNA (1)...(19): siRNA sense strand
guacaaagauaguuucucu

SEQ ID NO: 1172646 - RNA, 19 nt, Homo sapiens
  misc_RNA (1)...(19): siRNA sense strand
uaagcaaugugcaggaaua

SEQ ID NO: 1172647 - RNA, 19 nt, Homo sapiens
  misc_RNA (1)...(19): siRNA sense strand
gaagagaugccuguuguuu

SEQ ID NO: 1172648 - RNA, 19 nt, Homo sapiens
  misc_RNA (1)...(19): siRNA sense strand
ccacucagauuauaacaug

SEQ ID NO: 1172649 - RNA, 19 nt, Homo sapiens
  misc_RNA (1)...(19): siRNA sense strand
aaaccaacauuaaggagua

SEQ ID NO: 1172650 - RNA, 19 nt, Homo sapiens
  misc_RNA (1)...(19): siRNA sense strand
gcaggaauaugauuuggau

SEQ ID NO: 1172651 - RNA, 19 nt, Homo sapiens
  misc_RNA (1)...(19): siRNA sense strand
uaacaugguucuagcguau

SEQ ID NO: 1172652 - RNA, 19 nt, Homo sapiens
  misc_RNA (1)...(19): siRNA sense strand
gcaaugugcaggaauauga

SEQ ID NO: 1172653 - RNA, 19 nt, Homo sapiens
  misc_RNA (1)...(19): siRNA sense strand
ggacagccaaauagaauaa

SEQ ID NO: 1172654 - RNA, 19 nt, Homo sapiens
  misc_RNA (1)...(19): siRNA sense strand
ccacuaaaccguucuguga

SEQ ID NO: 1172655 - RNA, 19 nt, Homo sapiens
  misc_RNA (1)...(19): siRNA sense strand
gcgauacuguugaauguga

SEQ ID NO: 1172656 - RNA, 19 nt, Homo sapiens
  misc_RNA (1)...(19): siRNA sense strand
ccaggaagaugaucgcuau

SEQ ID NO: 1172657 - RNA, 19 nt, Homo sapiens
  misc_RNA (1)...(19): siRNA sense strand
gacuaucaguucaccuuua

SEQ ID NO: 1172658 - RNA, 19 nt, Homo sapiens
  misc_RNA (1)...(19): siRNA sense strand
gaugaucucuaccgauaug

SEQ ID NO: 1172659 - RNA, 19 nt, Homo sapiens
  misc_RNA (1)...(19): siRNA sense strand
gaaaaucgauaccaaggaa

SEQ ID NO: 1172660 - RNA, 19 nt, Homo sapiens
  misc_RNA (1)...(19): siRNA sense strand
gaaggacagccaaauagaa

SEQ ID NO: 1172661 - RNA, 19 nt, Homo sapiens
  misc_RNA (1)...(19): siRNA sense strand
gcacagccaacaccaauga

SEQ ID NO: 1172662 - RNA, 19 nt, Homo sapiens
  misc_RNA (1)...(19): siRNA sense strand
gaggauauauguucaacca

SEQ ID NO: 1172663 - RNA, 19 nt, Homo sapiens
  misc_RNA (1)...(19): siRNA sense strand
caaggagaauuaugacaau

SEQ ID NO: 1172664 - RNA, 19 nt, Homo sapiens
  misc_RNA (1)...(19): siRNA sense strand
ggaagaugaucgcuauuac

SEQ ID NO: 1172665 - RNA, 19 nt, Homo sapiens
  misc_RNA (1)...(19): siRNA sense strand
aagaacacauggaguauau

SEQ ID NO: 1172666 - RNA, 19 nt, Homo sapiens
  misc_RNA (1)...(19): siRNA sense strand
ccaaaugcuucucuucaga

SEQ ID NO: 1172667 - RNA, 19 nt, Homo sapiens
  misc_RNA (1)...(19): siRNA sense strand
gaggaaacacacacaauga

SEQ ID NO: 1172668 - RNA, 19 nt, Homo sapiens
  misc_RNA (1)...(19): siRNA sense strand
agacuucguuucaaucauu

SEQ ID NO: 1172669 - RNA, 19 nt, Homo sapiens
  misc_RNA (1)...(19): siRNA sense strand
caaugugguuguuagauau

SEQ ID NO: 1172670 - RNA, 19 nt, Homo sapiens
  misc_RNA (1)...(19): siRNA sense strand
gaguguaagaucaguaaua

SEQ ID NO: 1172671 - RNA, 19 nt, Homo sapiens
  misc_RNA (1)...(19): siRNA sense strand
aaacagggauuuggacaug

SEQ ID NO: 1172672 - RNA, 19 nt, Homo sapiens
  misc_RNA (1)...(19): siRNA sense strand
agaagaagguagaauuugu

SEQ ID NO: 1172673 - RNA, 19 nt, Homo sapiens
  misc_RNA (1)...(19): siRNA sense strand
cagauggaccuggaaauua

SEQ ID NO: 1172674 - RNA, 19 nt, Homo sapiens
  misc_RNA (1)...(19): siRNA sense strand
ucauaaagcuguggucaau

SEQ ID NO: 1172675 - RNA, 19 nt, Homo sapiens
  misc_RNA (1)...(19): siRNA sense strand
cguaugaccuugcuucuag

SEQ ID NO: 1172676 - RNA, 19 nt, Homo sapiens
  misc_RNA (1)...(19): siRNA sense strand
ggaaaugucagccaugcaa

SEQ ID NO: 1172677 - RNA, 19 nt, Homo sapiens
  misc_RNA (1)...(19): siRNA sense strand
gcuaaauuguucuguagga

SEQ ID NO: 1172678 - RNA, 19 nt, Homo sapiens
  misc_RNA (1)...(19): siRNA sense strand
gcuggcaacugaugaacaa

SEQ ID NO: 1172679 - RNA, 19 nt, Homo sapiens
  misc_RNA (1)...(19): siRNA sense strand
ccuaugacauugccuguga

SEQ ID NO: 1172680 - RNA, 19 nt, Homo sapiens
  misc_RNA (1)...(19): siRNA sense strand
ggaggaaacacacacaaug

SEQ ID NO: 1172681 - RNA, 19 nt, Homo sapiens
  misc_RNA (1)...(19): siRNA sense strand
guaguugggaccauuuaua

SEQ ID NO: 1172682 - RNA, 19 nt, Homo sapiens
  misc_RNA (1)...(19): siRNA sense strand
agagaugccuguuguuuca

SEQ ID NO: 1172683 - RNA, 19 nt, Homo sapiens
  misc_RNA (1)...(19): siRNA sense strand
gcagauacaacuggucuuu

SEQ ID NO: 1172684 - RNA, 19 nt, Homo sapiens
  misc_RNA (1)...(19): siRNA sense strand
gcauuugguuggaaacuca

SEQ ID NO: 1172685 - RNA, 19 nt, Homo sapiens
  misc_RNA (1)...(19): siRNA sense strand
gcacacauuguuacacuga

SEQ ID NO: 1172686 - RNA, 19 nt, Homo sapiens
  misc_RNA (1)...(19): siRNA sense strand
gccaguguauggaauggua

SEQ ID NO: 1172687 - RNA, 19 nt, Homo sapiens
  misc_RNA (1)...(19): siRNA sense strand
gaauaaugcagucaucuca

SEQ ID NO: 1172688 - RNA, 19 nt, Homo sapiens
  misc_RNA (1)...(19): siRNA sense strand
ccagaagaagguagaauuu

SEQ ID NO: 1172689 - RNA, 19 nt, Homo sapiens
  misc_RNA (1)...(19): siRNA sense strand
gaccagggcccuauacguu

SEQ ID NO: 1172690 - RNA, 19 nt, Homo sapiens
  misc_RNA (1)...(19): siRNA sense strand
agauggaccuggaaauuau

SEQ ID NO: 1172691 - RNA, 19 nt, Homo sapiens
  misc_RNA (1)...(19): siRNA sense strand
gcuaguugcugcauuuagu

SEQ ID NO: 1172692 - RNA, 19 nt, Homo sapiens
  misc_RNA (1)...(19): siRNA sense strand
gaugcuggauucuguggaa

SEQ ID NO: 1172693 - RNA, 19 nt, Homo sapiens
  misc_RNA (1)...(19): siRNA sense strand
gaaugugaccaaugaguug

SEQ ID NO: 1172694 - RNA, 19 nt, Homo sapiens
  misc_RNA (1)...(19): siRNA sense strand
caauucaagugaugucaga

SEQ ID NO: 1172695 - RNA, 19 nt, Homo sapiens
  misc_RNA (1)...(19): siRNA sense strand
gagaguguaagaucaguaa

SEQ ID NO: 1172696 - RNA, 19 nt, Homo sapiens
  misc_RNA (1)...(19): siRNA sense strand
cgaggcaucugcaauucaa

SEQ ID NO: 1172697 - RNA, 19 nt, Homo sapiens
  misc_RNA (1)...(19): siRNA sense strand
gagcaucugugagaagugu

SEQ ID NO: 1172698 - RNA, 19 nt, Homo sapiens
  misc_RNA (1)...(19): siRNA sense strand
ggaauaugauuuggauaag

SEQ ID NO: 1172699 - RNA, 19 nt, Homo sapiens
  misc_RNA (1)...(19): siRNA sense strand
ggaaugugaccaaugaguu

SEQ ID NO: 1172700 - RNA, 19 nt, Homo sapiens
  misc_RNA (1)...(19): siRNA sense strand
ugagagagauggcaaugag

SEQ ID NO: 1172701 - RNA, 19 nt, Homo sapiens
  misc_RNA (1)...(19): siRNA sense strand
ggacuccaaugccuaugug

SEQ ID NO: 1172702 - RNA, 19 nt, Homo sapiens
  misc_RNA (1)...(19): siRNA sense strand
ucacugcccucucuaugga

SEQ ID NO: 1172703 - RNA, 19 nt, Homo sapiens
  misc_RNA (1)...(19): siRNA sense strand
cagcgauacuguugaaugu

SEQ ID NO: 1172704 - RNA, 19 nt, Homo sapiens
  misc_RNA (1)...(19): siRNA sense strand
gugaugcugcuuauaauuu

SEQ ID NO: 1172705 - RNA, 19 nt, Homo sapiens
  misc_RNA (1)...(19): siRNA sense strand
uuagugaugcugcuuauaa

SEQ ID NO: 1172706 - RNA, 19 nt, Homo sapiens
  misc_RNA (1)...(19): siRNA sense strand
ccaagaauuucaaccucaa

SEQ ID NO: 1172707 - RNA, 19 nt, Homo sapiens
  misc_RNA (1)...(19): siRNA sense strand
cagaggaacauguuauuau

SEQ ID NO: 1172708 - RNA, 19 nt, Homo sapiens
  misc_RNA (1)...(19): siRNA sense strand
cuacugccaaggagaauua

SEQ ID NO: 1172709 - RNA, 19 nt, Homo sapiens
  misc_RNA (1)...(19): siRNA sense strand
gggaccauuuauauguuua

SEQ ID NO: 1172710 - RNA, 19 nt, Homo sapiens
  misc_RNA (1)...(19): siRNA sense strand
ggagcaguaugcagugguu

SEQ ID NO: 1172711 - RNA, 19 nt, Homo sapiens
  misc_RNA (1)...(19): siRNA sense strand
uagcagcgauacuguugaa

SEQ ID NO: 1172712 - RNA, 19 nt, Homo sapiens
  misc_RNA (1)...(19): siRNA sense strand
gguagaauuuguccuuaag

SEQ ID NO: 1172713 - RNA, 19 nt, Homo sapiens
  misc_RNA (1)...(19): siRNA sense strand
gguccuggauguucaguuc

SEQ ID NO: 1172714 - RNA, 19 nt, Homo sapiens
  misc_RNA (1)...(19): siRNA sense strand
ggaaaggugaagcauguga

SEQ ID NO: 1172715 - RNA, 19 nt, Homo sapiens
  misc_RNA (1)...(19): siRNA sense strand
gucauucuuuggcauuaua

SEQ ID NO: 1172716 - RNA, 19 nt, Homo sapiens
  misc_RNA (1)...(19): siRNA sense strand
gaagaugaucgcuauuaca

SEQ ID NO: 1172717 - RNA, 19 nt, Homo sapiens
  misc_RNA (1)...(19): siRNA sense strand
caguucaccuuuagucuau

SEQ ID NO: 1172718 - RNA, 19 nt, Homo sapiens
  misc_RNA (1)...(19): siRNA sense strand
gcacugcgagaccugcaua

SEQ ID NO: 1172719 - RNA, 19 nt, Homo sapiens
  misc_RNA (1)...(19): siRNA sense strand
agauacaacuggucuuuca

SEQ ID NO: 1172720 - RNA, 19 nt, Homo sapiens
  misc_RNA (1)...(19): siRNA sense strand
gaaccacagcugcucagaa

SEQ ID NO: 1172721 - RNA, 19 nt, Homo sapiens
  misc_RNA (1)...(19): siRNA sense strand
ggcaacugaugaacaagaa

SEQ ID NO: 1172722 - RNA, 19 nt, Homo sapiens
  misc_RNA (1)...(19): siRNA sense strand
cgaggagaguguaagauca

SEQ ID NO: 1172723 - RNA, 19 nt, Homo sapiens
  misc_RNA (1)...(19): siRNA sense strand
ggagaagagaugccuguug

SEQ ID NO: 1172724 - RNA, 19 nt, Homo sapiens
  misc_RNA (1)...(19): siRNA sense strand
caacuggucuuucauucac

SEQ ID NO: 1172725 - RNA, 19 nt, Homo sapiens
  misc_RNA (1)...(19): siRNA sense strand
ccaaggagaauuaugacaa

SEQ ID NO: 1172726 - RNA, 19 nt, Homo sapiens
  misc_RNA (1)...(19): siRNA sense strand
ggcauuggcuggcauuugg

SEQ ID NO: 1172727 - RNA, 19 nt, Homo sapiens
  misc_RNA (1)...(19): siRNA sense strand
cacaaugacacaucuauga

SEQ ID NO: 1172728 - RNA, 19 nt, Homo sapiens
  misc_RNA (1)...(19): siRNA sense strand
gaaggccagaucuccauuu

SEQ ID NO: 1172729 - RNA, 19 nt, Homo sapiens
  misc_RNA (1)...(19): siRNA sense strand
ucaaugccuccaagaauuu

SEQ ID NO: 1172730 - RNA, 19 nt, Homo sapiens
  misc_RNA (1)...(19): siRNA sense strand
cugcauaucuggcuucuac

SEQ ID NO: 1172731 - RNA, 19 nt, Homo sapiens
  misc_RNA (1)...(19): siRNA sense strand
guacuacuguaacaagaag

SEQ ID NO: 1172732 - RNA, 19 nt, Homo sapiens
  misc_RNA (1)...(19): siRNA sense strand
gaaccacaaugcccuuuug

SEQ ID NO: 1172733 - RNA, 19 nt, Homo sapiens
  misc_RNA (1)...(19): siRNA sense strand
ucagaggaacauguuauua

SEQ ID NO: 1172734 - RNA, 19 nt, Homo sapiens
  misc_RNA (1)...(19): siRNA sense strand
ccaaggaaacccucucaga

SEQ ID NO: 1172735 - RNA, 19 nt, Homo sapiens
  misc_RNA (1)...(19): siRNA sense strand
cacaguaaaugcaucaauc

SEQ ID NO: 1172736 - RNA, 19 nt, Homo sapiens
  misc_RNA (1)...(19): siRNA sense strand
uuaagcagcugcgaauaau

SEQ ID NO: 1172737 - RNA, 19 nt, Homo sapiens
  misc_RNA (1)...(19): siRNA sense strand
gaacacauggaguauauua

SEQ ID NO: 1172738 - RNA, 19 nt, Homo sapiens
  misc_RNA (1)...(19): siRNA sense strand
gaagauauguccccauuua

SEQ ID NO: 1172739 - RNA, 19 nt, Homo sapiens
  misc_RNA (1)...(19): siRNA sense strand
gauaagaacacauggagua

SEQ ID NO: 1172740 - RNA, 19 nt, Homo sapiens
  misc_RNA (1)...(19): siRNA sense strand
gagaagagaugccuguugu

SEQ ID NO: 1172741 - RNA, 19 nt, Homo sapiens
  misc_RNA (1)...(19): siRNA sense strand
gaaugugaauguucugaaa

SEQ ID NO: 1172742 - RNA, 19 nt, Homo sapiens
  misc_RNA (1)...(19): siRNA sense strand
gaaaauaucuguggcauug

SEQ ID NO: 1172743 - RNA, 19 nt, Homo sapiens
  misc_RNA (1)...(19): siRNA sense strand
gaccugaucuccaccauga

SEQ ID NO: 1172744 - RNA, 19 nt, Homo sapiens
  misc_RNA (1)...(19): siRNA sense strand
caacagauuuggccauuca

SEQ ID NO: 1172745 - RNA, 19 nt, Homo sapiens
  misc_RNA (1)...(19): siRNA sense strand
guacaaagauaguuucucu

SEQ ID NO: 1172746 - RNA, 19 nt, Homo sapiens
  misc_RNA (1)...(19): siRNA sense strand
uaagcaaugugcaggaaua

SEQ ID NO: 1172747 - RNA, 19 nt, Homo sapiens
  misc_RNA (1)...(19): siRNA sense strand
gaagagaugccuguuguuu

SEQ ID NO: 1172748 - RNA, 19 nt, Homo sapiens
  misc_RNA (1)...(19): siRNA sense strand
ccacucagauuauaacaug

SEQ ID NO: 1172749 - RNA, 19 nt, Homo sapiens
  misc_RNA (1)...(19): siRNA sense strand
aaaccaacauuaaggagua

SEQ ID NO: 1172750 - RNA, 19 nt, Homo sapiens
  misc_RNA (1)...(19): siRNA sense strand
gcaggaauaugauuuggau

SEQ ID NO: 1172751 - RNA, 19 nt, Homo sapiens
  misc_RNA (1)...(19): siRNA sense strand
uaacaugguucuagcguau

SEQ ID NO: 1172752 - RNA, 19 nt, Homo sapiens
  misc_RNA (1)...(19): siRNA sense strand
gcaaugugcaggaauauga

SEQ ID NO: 1172753 - RNA, 19 nt, Homo sapiens
  misc_RNA (1)...(19): siRNA sense strand
ggacagccaaauagaauaa

SEQ ID NO: 1172754 - RNA, 19 nt, Homo sapiens
  misc_RNA (1)...(19): siRNA sense strand
ccacuaaaccguucuguga

SEQ ID NO: 1172755 - RNA, 19 nt, Homo sapiens
  misc_RNA (1)...(19): siRNA sense strand
gcgauacuguugaauguga

SEQ ID NO: 1172756 - RNA, 19 nt, Homo sapiens
  misc_RNA (1)...(19): siRNA sense strand
ccaggaagaugaucgcuau

SEQ ID NO: 1172757 - RNA, 19 nt, Homo sapiens
  misc_RNA (1)...(19): siRNA sense strand
gacuaucaguucaccuuua

SEQ ID NO: 1172758 - RNA, 19 nt, Homo sapiens
  misc_RNA (1)...(19): siRNA sense strand
gaugaucucuaccgauaug

SEQ ID NO: 1172759 - RNA, 19 nt, Homo sapiens
  misc_RNA (1)...(19): siRNA sense strand
gaaaaucgauaccaaggaa

SEQ ID NO: 1172760 - RNA, 19 nt, Homo sapiens
  misc_RNA (1)...(19): siRNA sense strand
gaaggacagccaaauagaa

SEQ ID NO: 1172761 - RNA, 19 nt, Homo sapiens
  misc_RNA (1)...(19): siRNA sense strand
gcacagccaacaccaauga

SEQ ID NO: 1172762 - RNA, 19 nt, Homo sapiens
  misc_RNA (1)...(19): siRNA sense strand
gaggauauauguucaacca

SEQ ID NO: 1172763 - RNA, 19 nt, Homo sapiens
  misc_RNA (1)...(19): siRNA sense strand
caaggagaauuaugacaau

SEQ ID NO: 1172764 - RNA, 19 nt, Homo sapiens
  misc_RNA (1)...(19): siRNA sense strand
ggaagaugaucgcuauuac

SEQ ID NO: 1172765 - RNA, 19 nt, Homo sapiens
  misc_RNA (1)...(19): siRNA sense strand
aagaacacauggaguauau

SEQ ID NO: 1172766 - RNA, 19 nt, Homo sapiens
  misc_RNA (1)...(19): siRNA sense strand
ccaaaugcuucucuucaga

SEQ ID NO: 1172767 - RNA, 19 nt, Homo sapiens
  misc_RNA (1)...(19): siRNA sense strand
gaggaaacacacacaauga

SEQ ID NO: 1172768 - RNA, 19 nt, Homo sapiens
  misc_RNA (1)...(19): siRNA sense strand
agacuucguuucaaucauu

SEQ ID NO: 1172769 - RNA, 19 nt, Homo sapiens
  misc_RNA (1)...(19): siRNA sense strand
caaugugguuguuagauau

SEQ ID NO: 1172770 - RNA, 19 nt, Homo sapiens
  misc_RNA (1)...(19): siRNA sense strand
gaguguaagaucaguaaua

SEQ ID NO: 1172771 - RNA, 19 nt, Homo sapiens
  misc_RNA (1)...(19): siRNA sense strand
aaacagggauuuggacaug

SEQ ID NO: 1172772 - RNA, 19 nt, Homo sapiens
  misc_RNA (1)...(19): siRNA sense strand
agaagaagguagaauuugu

SEQ ID NO: 1172773 - RNA, 19 nt, Homo sapiens
  misc_RNA (1)...(19): siRNA sense strand
cagauggaccuggaaauua

SEQ ID NO: 1172774 - RNA, 19 nt, Homo sapiens
  misc_RNA (1)...(19): siRNA sense strand
ucauaaagcuguggucaau

SEQ ID NO: 1172775 - RNA, 19 nt, Homo sapiens
  misc_RNA (1)...(19): siRNA sense strand
cguaugaccuugcuucuag

SEQ ID NO: 1172776 - RNA, 19 nt, Homo sapiens
  misc_RNA (1)...(19): siRNA sense strand
ggaaaugucagccaugcaa

SEQ ID NO: 1172777 - RNA, 19 nt, Homo sapiens
  misc_RNA (1)...(19): siRNA sense strand
gcuaaauuguucuguagga

SEQ ID NO: 1172778 - RNA, 19 nt, Homo sapiens
  misc_RNA (1)...(19): siRNA sense strand
gcuggcaacugaugaacaa

SEQ ID NO: 1172779 - RNA, 19 nt, Homo sapiens
  misc_RNA (1)...(19): siRNA sense strand
ccuaugacauugccuguga

SEQ ID NO: 1172780 - RNA, 19 nt, Homo sapiens
  misc_RNA (1)...(19): siRNA sense strand
ggaggaaacacacacaaug

SEQ ID NO: 1172781 - RNA, 19 nt, Homo sapiens
  misc_RNA (1)...(19): siRNA sense strand
guaguugggaccauuuaua

SEQ ID NO: 1172782 - RNA, 19 nt, Homo sapiens
  misc_RNA (1)...(19): siRNA sense strand
agagaugccuguuguuuca

SEQ ID NO: 1172783 - RNA, 19 nt, Homo sapiens
  misc_RNA (1)...(19): siRNA sense strand
gcagauacaacuggucuuu

SEQ ID NO: 1172784 - RNA, 19 nt, Homo sapiens
  misc_RNA (1)...(19): siRNA sense strand
gcauuugguuggaaacuca

SEQ ID NO: 1172785 - RNA, 19 nt, Homo sapiens
  misc_RNA (1)...(19): siRNA sense strand
gcacacauuguuacacuga

SEQ ID NO: 1172786 - RNA, 19 nt, Homo sapiens
  misc_RNA (1)...(19): siRNA sense strand
gccaguguauggaauggua

SEQ ID NO: 1172787 - RNA, 19 nt, Homo sapiens
  misc_RNA (1)...(19): siRNA sense strand
gaauaaugcagucaucuca

SEQ ID NO: 1172788 - RNA, 19 nt, Homo sapiens
  misc_RNA (1)...(19): siRNA sense strand
ccagaagaagguagaauuu

SEQ ID NO: 1172789 - RNA, 19 nt, Homo sapiens
  misc_RNA (1)...(19): siRNA sense strand
gaccagggcccuauacguu

SEQ ID NO: 1172790 - RNA, 19 nt, Homo sapiens
  misc_RNA (1)...(19): siRNA sense strand
agauggaccuggaaauuau

SEQ ID NO: 1172791 - RNA, 19 nt, Homo sapiens
  misc_RNA (1)...(19): siRNA sense strand
gcuaguugcugcauuuagu

SEQ ID NO: 1172792 - RNA, 19 nt, Homo sapiens
  misc_RNA (1)...(19): siRNA sense strand
gaugcuggauucuguggaa

SEQ ID NO: 1172793 - RNA, 19 nt, Homo sapiens
  misc_RNA (1)...(19): siRNA sense strand
gaaugugaccaaugaguug

SEQ ID NO: 1172794 - RNA, 19 nt, Homo sapiens
  misc_RNA (1)...(19): siRNA sense strand
caauucaagugaugucaga

SEQ ID NO: 1172795 - RNA, 19 nt, Homo sapiens
  misc_RNA (1)...(19): siRNA sense strand
gagaguguaagaucaguaa

SEQ ID NO: 1172796 - RNA, 19 nt, Homo sapiens
  misc_RNA (1)...(19): siRNA sense strand
cgaggcaucugcaauucaa

SEQ ID NO: 1172797 - RNA, 19 nt, Homo sapiens
  misc_RNA (1)...(19): siRNA sense strand
gagcaucugugagaagugu

SEQ ID NO: 1172798 - RNA, 19 nt, Homo sapiens
  misc_RNA (1)...(19): siRNA sense strand
ggaauaugauuuggauaag

SEQ ID NO: 1172799 - RNA, 19 nt, Homo sapiens
  misc_RNA (1)...(19): siRNA sense strand
ggaaugugaccaaugaguu

SEQ ID NO: 1172800 - RNA, 19 nt, Homo sapiens
  misc_RNA (1)...(19): siRNA sense strand
ugagagagauggcaaugag

SEQ ID NO: 1172801 - RNA, 19 nt, Homo sapiens
  misc_RNA (1)...(19): siRNA sense strand
ggacuccaaugccuaugug

SEQ ID NO: 1172802 - RNA, 19 nt, Homo sapiens
  misc_RNA (1)...(19): siRNA sense strand
ucacugcccucucuaugga

SEQ ID NO: 1172803 - RNA, 19 nt, Homo sapiens
  misc_RNA (1)...(19): siRNA sense strand
cagcgauacuguugaaugu

SEQ ID NO: 1172804 - RNA, 19 nt, Homo sapiens
  misc_RNA (1)...(19): siRNA sense strand
gugaugcugcuuauaauuu

SEQ ID NO: 1172805 - RNA, 19 nt, Homo sapiens
  misc_RNA (1)...(19): siRNA sense strand
uuagugaugcugcuuauaa

SEQ ID NO: 1172806 - RNA, 19 nt, Homo sapiens
  misc_RNA (1)...(19): siRNA sense strand
ccaagaauuucaaccucaa

SEQ ID NO: 1172807 - RNA, 19 nt, Homo sapiens
  misc_RNA (1)...(19): siRNA sense strand
cagaggaacauguuauuau

SEQ ID NO: 1172808 - RNA, 19 nt, Homo sapiens
  misc_RNA (1)...(19): siRNA sense strand
cuacugccaaggagaauua

SEQ ID NO: 1172809 - RNA, 19 nt, Homo sapiens
  misc_RNA (1)...(19): siRNA sense strand
gggaccauuuauauguuua

SEQ ID NO: 1172810 - RNA, 19 nt, Homo sapiens
  misc_RNA (1)...(19): siRNA sense strand
ggagcaguaugcagugguu

SEQ ID NO: 1172811 - RNA, 19 nt, Homo sapiens
  misc_RNA (1)...(19): siRNA sense strand
uagcagcgauacuguugaa

SEQ ID NO: 1172812 - RNA, 19 nt, Homo sapiens
  misc_RNA (1)...(19): siRNA sense strand
gguagaauuuguccuuaag

SEQ ID NO: 1172813 - RNA, 19 nt, Homo sapiens
  misc_RNA (1)...(19): siRNA sense strand
gguccuggauguucaguuc

SEQ ID NO: 1172814 - RNA, 19 nt, Homo sapiens
  misc_RNA (1)...(19): siRNA sense strand
ggaaaggugaagcauguga

SEQ ID NO: 1172815 - RNA, 19 nt, Homo sapiens
  misc_RNA (1)...(19): siRNA sense strand
gucauucuuuggcauuaua

SEQ ID NO: 1172816 - RNA, 19 nt, Homo sapiens
  misc_RNA (1)...(19): siRNA sense strand
gaagaugaucgcuauuaca

SEQ ID NO: 1172817 - RNA, 19 nt, Homo sapiens
  misc_RNA (1)...(19): siRNA sense strand
caguucaccuuuagucuau

SEQ ID NO: 1172818 - RNA, 19 nt, Homo sapiens
  misc_RNA (1)...(19): siRNA sense strand
gcacugcgagaccugcaua

SEQ ID NO: 1172819 - RNA, 19 nt, Homo sapiens
  misc_RNA (1)...(19): siRNA sense strand
agauacaacuggucuuuca

SEQ ID NO: 1172820 - RNA, 19 nt, Homo sapiens
  misc_RNA (1)...(19): siRNA sense strand
gaaccacagcugcucagaa

SEQ ID NO: 1172821 - RNA, 19 nt, Homo sapiens
  misc_RNA (1)...(19): siRNA sense strand
ggcaacugaugaacaagaa

SEQ ID NO: 1172822 - RNA, 19 nt, Homo sapiens
  misc_RNA (1)...(19): siRNA sense strand
cgaggagaguguaagauca

SEQ ID NO: 1172823 - RNA, 19 nt, Homo sapiens
  misc_RNA (1)...(19): siRNA sense strand
ggagaagagaugccuguug

SEQ ID NO: 1172824 - RNA, 19 nt, Homo sapiens
  misc_RNA (1)...(19): siRNA sense strand
caacuggucuuucauucac

SEQ ID NO: 1172825 - RNA, 19 nt, Homo sapiens
  misc_RNA (1)...(19): siRNA sense strand
ccaaggagaauuaugacaa

SEQ ID NO: 1172826 - RNA, 19 nt, Homo sapiens
  misc_RNA (1)...(19): siRNA sense strand
ggcauuggcuggcauuugg

SEQ ID NO: 1172827 - RNA, 19 nt, Homo sapiens
  misc_RNA (1)...(19): siRNA sense strand
cacaaugacacaucuauga

SEQ ID NO: 1172828 - RNA, 19 nt, Homo sapiens
  misc_RNA (1)...(19): siRNA sense strand
gaaggccagaucuccauuu

SEQ ID NO: 1172829 - RNA, 19 nt, Homo sapiens
  misc_RNA (1)...(19): siRNA sense strand
ucaaugccuccaagaauuu

SEQ ID NO: 1172830 - RNA, 19 nt, Homo sapiens
  misc_RNA (1)...(19): siRNA sense strand
cugcauaucuggcuucuac

SEQ ID NO: 1172831 - RNA, 19 nt, Homo sapiens
  misc_RNA (1)...(19): siRNA sense strand
guacuacuguaacaagaag

SEQ ID NO: 1172832 - RNA, 19 nt, Homo sapiens
  misc_RNA (1)...(19): siRNA sense strand
gaaccacaaugcccuuuug

SEQ ID NO: 1172833 - RNA, 19 nt, Homo sapiens
  misc_RNA (1)...(19): siRNA sense strand
ucagaggaacauguuauua

SEQ ID NO: 1172834 - RNA, 19 nt, Homo sapiens
  misc_RNA (1)...(19): siRNA sense strand
ccaaggaaacccucucaga

SEQ ID NO: 1172835 - RNA, 19 nt, Homo sapiens
  misc_RNA (1)...(19): siRNA sense strand
cacaguaaaugcaucaauc

SEQ ID NO: 1172836 - RNA, 19 nt, Homo sapiens
  misc_RNA (1)...(19): siRNA sense strand
uuaagcagcugcgaauaau

SEQ ID NO: 1172837 - RNA, 19 nt, Homo sapiens
  misc_RNA (1)...(19): siRNA sense strand
gaacacauggaguauauua

SEQ ID NO: 1172838 - RNA, 19 nt, Homo sapiens
  misc_RNA (1)...(19): siRNA sense strand
gaagauauguccccauuua

SEQ ID NO: 1172839 - RNA, 19 nt, Homo sapiens
  misc_RNA (1)...(19): siRNA sense strand
gauaagaacacauggagua

SEQ ID NO: 1172840 - RNA, 19 nt, Homo sapiens
  misc_RNA (1)...(19): siRNA sense strand
gagaagagaugccuguugu

SEQ ID NO: 1172841 - RNA, 19 nt, Homo sapiens
  misc_RNA (1)...(19): siRNA sense strand
gaaugugaauguucugaaa

SEQ ID NO: 1172842 - RNA, 19 nt, Homo sapiens
  misc_RNA (1)...(19): siRNA sense strand
gaaaauaucuguggcauug

SEQ ID NO: 1172843 - RNA, 19 nt, Homo sapiens
  misc_RNA (1)...(19): siRNA sense strand
gaccugaucuccaccauga

SEQ ID NO: 1172844 - RNA, 19 nt, Homo sapiens
  misc_RNA (1)...(19): siRNA sense strand
caacagauuuggccauuca

SEQ ID NO: 1172845 - RNA, 19 nt, Homo sapiens
  misc_RNA (1)...(19): siRNA sense strand
guacaaagauaguuucucu

SEQ ID NO: 1172846 - RNA, 19 nt, Homo sapiens
  misc_RNA (1)...(19): siRNA sense strand
uaagcaaugugcaggaaua

SEQ ID NO: 1172847 - RNA, 19 nt, Homo sapiens
  misc_RNA (1)...(19): siRNA sense strand
gaagagaugccuguuguuu

SEQ ID NO: 1172848 - RNA, 19 nt, Homo sapiens
  misc_RNA (1)...(19): siRNA sense strand
ccacucagauuauaacaug

SEQ ID NO: 1172849 - RNA, 19 nt, Homo sapiens
  misc_RNA (1)...(19): siRNA sense strand
aaaccaacauuaaggagua

SEQ ID NO: 1172850 - RNA, 19 nt, Homo sapiens
  misc_RNA (1)...(19): siRNA sense strand
gcaggaauaugauuuggau

SEQ ID NO: 1172851 - RNA, 19 nt, Homo sapiens
  misc_RNA (1)...(19): siRNA sense strand
uaacaugguucuagcguau

SEQ ID NO: 1172852 - RNA, 19 nt, Homo sapiens
  misc_RNA (1)...(19): siRNA sense strand
gcaaugugcaggaauauga

SEQ ID NO: 1172853 - RNA, 19 nt, Homo sapiens
  misc_RNA (1)...(19): siRNA sense strand
ggacagccaaauagaauaa

SEQ ID NO: 1172854 - RNA, 19 nt, Homo sapiens
  misc_RNA (1)...(19): siRNA sense strand
ccacuaaaccguucuguga

SEQ ID NO: 1172855 - RNA, 19 nt, Homo sapiens
  misc_RNA (1)...(19): siRNA sense strand
gcgauacuguugaauguga

SEQ ID NO: 1172856 - RNA, 19 nt, Homo sapiens
  misc_RNA (1)...(19): siRNA sense strand
ccaggaagaugaucgcuau

SEQ ID NO: 1172857 - RNA, 19 nt, Homo sapiens
  misc_RNA (1)...(19): siRNA sense strand
gacuaucaguucaccuuua

SEQ ID NO: 1172858 - RNA, 19 nt, Homo sapiens
  misc_RNA (1)...(19): siRNA sense strand
gaugaucucuaccgauaug

SEQ ID NO: 1172859 - RNA, 19 nt, Homo sapiens
  misc_RNA (1)...(19): siRNA sense strand
gaaaaucgauaccaaggaa

SEQ ID NO: 1172860 - RNA, 19 nt, Homo sapiens
  misc_RNA (1)...(19): siRNA sense strand
gaaggacagccaaauagaa

SEQ ID NO: 1172861 - RNA, 19 nt, Homo sapiens
  misc_RNA (1)...(19): siRNA sense strand
gcacagccaacaccaauga

SEQ ID NO: 1172862 - RNA, 19 nt, Homo sapiens
  misc_RNA (1)...(19): siRNA sense strand
gaggauauauguucaacca

SEQ ID NO: 1172863 - RNA, 19 nt, Homo sapiens
  misc_RNA (1)...(19): siRNA sense strand
caaggagaauuaugacaau

SEQ ID NO: 1172864 - RNA, 19 nt, Homo sapiens
  misc_RNA (1)...(19): siRNA sense strand
ggaagaugaucgcuauuac

SEQ ID NO: 1172865 - RNA, 19 nt, Homo sapiens
  misc_RNA (1)...(19): siRNA sense strand
aagaacacauggaguauau

SEQ ID NO: 1172866 - RNA, 19 nt, Homo sapiens
  misc_RNA (1)...(19): siRNA sense strand
ccaaaugcuucucuucaga

SEQ ID NO: 1172867 - RNA, 19 nt, Homo sapiens
  misc_RNA (1)...(19): siRNA sense strand
gaggaaacacacacaauga

SEQ ID NO: 1172868 - RNA, 19 nt, Homo sapiens
  misc_RNA (1)...(19): siRNA sense strand
agacuucguuucaaucauu

SEQ ID NO: 1172869 - RNA, 19 nt, Homo sapiens
  misc_RNA (1)...(19): siRNA sense strand
caaugugguuguuagauau

SEQ ID NO: 1172870 - RNA, 19 nt, Homo sapiens
  misc_RNA (1)...(19): siRNA sense strand
gaguguaagaucaguaaua

SEQ ID NO: 1172871 - RNA, 19 nt, Homo sapiens
  misc_RNA (1)...(19): siRNA sense strand
aaacagggauuuggacaug

SEQ ID NO: 1172872 - RNA, 19 nt, Homo sapiens
  misc_RNA (1)...(19): siRNA sense strand
agaagaagguagaauuugu

SEQ ID NO: 1172873 - RNA, 19 nt, Homo sapiens
  misc_RNA (1)...(19): siRNA sense strand
cagauggaccuggaaauua

SEQ ID NO: 1172874 - RNA, 19 nt, Homo sapiens
  misc_RNA (1)...(19): siRNA sense strand
ucauaaagcuguggucaau

SEQ ID NO: 1172875 - RNA, 19 nt, Homo sapiens
  misc_RNA (1)...(19): siRNA sense strand
cguaugaccuugcuucuag

SEQ ID NO: 1172876 - RNA, 19 nt, Homo sapiens
  misc_RNA (1)...(19): siRNA sense strand
ggaaaugucagccaugcaa

SEQ ID NO: 1172877 - RNA, 19 nt, Homo sapiens
  misc_RNA (1)...(19): siRNA sense strand
gcuaaauuguucuguagga

SEQ ID NO: 1172878 - RNA, 19 nt, Homo sapiens
  misc_RNA (1)...(19): siRNA sense strand
gcuggcaacugaugaacaa

SEQ ID NO: 1172879 - RNA, 19 nt, Homo sapiens
  misc_RNA (1)...(19): siRNA sense strand
ccuaugacauugccuguga

SEQ ID NO: 1172880 - RNA, 19 nt, Homo sapiens
  misc_RNA (1)...(19): siRNA sense strand
ggaggaaacacacacaaug

SEQ ID NO: 1172881 - RNA, 19 nt, Homo sapiens
  misc_RNA (1)...(19): siRNA sense strand
guaguugggaccauuuaua

SEQ ID NO: 1172882 - RNA, 19 nt, Homo sapiens
  misc_RNA (1)...(19): siRNA sense strand
agagaugccuguuguuuca

SEQ ID NO: 1172883 - RNA, 19 nt, Homo sapiens
  misc_RNA (1)...(19): siRNA sense strand
gcagauacaacuggucuuu

SEQ ID NO: 1172884 - RNA, 19 nt, Homo sapiens
  misc_RNA (1)...(19): siRNA sense strand
gcauuugguuggaaacuca

SEQ ID NO: 1172885 - RNA, 19 nt, Homo sapiens
  misc_RNA (1)...(19): siRNA sense strand
gcacacauuguuacacuga

SEQ ID NO: 1172886 - RNA, 19 nt, Homo sapiens
  misc_RNA (1)...(19): siRNA sense strand
gccaguguauggaauggua

SEQ ID NO: 1172887 - RNA, 19 nt, Homo sapiens
  misc_RNA (1)...(19): siRNA sense strand
gaauaaugcagucaucuca

SEQ ID NO: 1172888 - RNA, 19 nt, Homo sapiens
  misc_RNA (1)...(19): siRNA sense strand
ccagaagaagguagaauuu

SEQ ID NO: 1172889 - RNA, 19 nt, Homo sapiens
  misc_RNA (1)...(19): siRNA sense strand
gaccagggcccuauacguu

SEQ ID NO: 1172890 - RNA, 19 nt, Homo sapiens
  misc_RNA (1)...(19): siRNA sense strand
agauggaccuggaaauuau

SEQ ID NO: 1172891 - RNA, 19 nt, Homo sapiens
  misc_RNA (1)...(19): siRNA sense strand
gcuaguugcugcauuuagu

SEQ ID NO: 1172892 - RNA, 19 nt, Homo sapiens
  misc_RNA (1)...(19): siRNA sense strand
gaugcuggauucuguggaa

SEQ ID NO: 1172893 - RNA, 19 nt, Homo sapiens
  misc_RNA (1)...(19): siRNA sense strand
gaaugugaccaaugaguug

SEQ ID NO: 1172894 - RNA, 19 nt, Homo sapiens
  misc_RNA (1)...(19): siRNA sense strand
caauucaagugaugucaga

SEQ ID NO: 1172895 - RNA, 19 nt, Homo sapiens
  misc_RNA (1)...(19): siRNA sense strand
gagaguguaagaucaguaa

SEQ ID NO: 1172896 - RNA, 19 nt, Homo sapiens
  misc_RNA (1)...(19): siRNA sense strand
cgaggcaucugcaauucaa

SEQ ID NO: 1172897 - RNA, 19 nt, Homo sapiens
  misc_RNA (1)...(19): siRNA sense strand
gagcaucugugagaagugu

SEQ ID NO: 1172898 - RNA, 19 nt, Homo sapiens
  misc_RNA (1)...(19): siRNA sense strand
ggaauaugauuuggauaag

SEQ ID NO: 1172899 - RNA, 19 nt, Homo sapiens
  misc_RNA (1)...(19): siRNA sense strand
ggaaugugaccaaugaguu

SEQ ID NO: 1172900 - RNA, 19 nt, Homo sapiens
  misc_RNA (1)...(19): siRNA sense strand
ugagagagauggcaaugag

SEQ ID NO: 1172901 - RNA, 19 nt, Homo sapiens
  misc_RNA (1)...(19): siRNA sense strand
ggacuccaaugccuaugug

SEQ ID NO: 1172902 - RNA, 19 nt, Homo sapiens
  misc_RNA (1)...(19): siRNA sense strand
ucacugcccucucuaugga

SEQ ID NO: 1172903 - RNA, 19 nt, Homo sapiens
  misc_RNA (1)...(19): siRNA sense strand
cagcgauacuguugaaugu

SEQ ID NO: 1172904 - RNA, 19 nt, Homo sapiens
  misc_RNA (1)...(19): siRNA sense strand
gugaugcugcuuauaauuu

SEQ ID NO: 1172905 - RNA, 19 nt, Homo sapiens
  misc_RNA (1)...(19): siRNA sense strand
uuagugaugcugcuuauaa

SEQ ID NO: 1172906 - RNA, 19 nt, Homo sapiens
  misc_RNA (1)...(19): siRNA sense strand
ccaagaauuucaaccucaa

SEQ ID NO: 1172907 - RNA, 19 nt, Homo sapiens
  misc_RNA (1)...(19): siRNA sense strand
cagaggaacauguuauuau

SEQ ID NO: 1172908 - RNA, 19 nt, Homo sapiens
  misc_RNA (1)...(19): siRNA sense strand
cuacugccaaggagaauua

SEQ ID NO: 1172909 - RNA, 19 nt, Homo sapiens
  misc_RNA (1)...(19): siRNA sense strand
gggaccauuuauauguuua

SEQ ID NO: 1172910 - RNA, 19 nt, Homo sapiens
  misc_RNA (1)...(19): siRNA sense strand
ggagcaguaugcagugguu

SEQ ID NO: 1172911 - RNA, 19 nt, Homo sapiens
  misc_RNA (1)...(19): siRNA sense strand
uagcagcgauacuguugaa

SEQ ID NO: 1172912 - RNA, 19 nt, Homo sapiens
  misc_RNA (1)...(19): siRNA sense strand
gguagaauuuguccuuaag

SEQ ID NO: 1172913 - RNA, 19 nt, Homo sapiens
  misc_RNA (1)...(19): siRNA sense strand
gguccuggauguucaguuc

SEQ ID NO: 1172914 - RNA, 19 nt, Homo sapiens
  misc_RNA (1)...(19): siRNA sense strand
ggaaaggugaagcauguga

SEQ ID NO: 1172915 - RNA, 19 nt, Homo sapiens
  misc_RNA (1)...(19): siRNA sense strand
gucauucuuuggcauuaua

SEQ ID NO: 1172916 - RNA, 19 nt, Homo sapiens
  misc_RNA (1)...(19): siRNA sense strand
gaagaugaucgcuauuaca

SEQ ID NO: 1172917 - RNA, 19 nt, Homo sapiens
  misc_RNA (1)...(19): siRNA sense strand
caguucaccuuuagucuau

SEQ ID NO: 1172918 - RNA, 19 nt, Homo sapiens
  misc_RNA (1)...(19): siRNA sense strand
gcacugcgagaccugcaua

SEQ ID NO: 1172919 - RNA, 19 nt, Homo sapiens
  misc_RNA (1)...(19): siRNA sense strand
agauacaacuggucuuuca

SEQ ID NO: 1172920 - RNA, 19 nt, Homo sapiens
  misc_RNA (1)...(19): siRNA sense strand
gaaccacagcugcucagaa

SEQ ID NO: 1172921 - RNA, 19 nt, Homo sapiens
  misc_RNA (1)...(19): siRNA sense strand
ggcaacugaugaacaagaa

SEQ ID NO: 1172922 - RNA, 19 nt, Homo sapiens
  misc_RNA (1)...(19): siRNA sense strand
cgaggagaguguaagauca

SEQ ID NO: 1172923 - RNA, 19 nt, Homo sapiens
  misc_RNA (1)...(19): siRNA sense strand
ggagaagagaugccuguug

SEQ ID NO: 1172924 - RNA, 19 nt, Homo sapiens
  misc_RNA (1)...(19): siRNA sense strand
caacuggucuuucauucac

SEQ ID NO: 1172925 - RNA, 19 nt, Homo sapiens
  misc_RNA (1)...(19): siRNA sense strand
ccaaggagaauuaugacaa

SEQ ID NO: 1172926 - RNA, 19 nt, Homo sapiens
  misc_RNA (1)...(19): siRNA sense strand
ggcauuggcuggcauuugg

SEQ ID NO: 1172927 - RNA, 19 nt, Homo sapiens
  misc_RNA (1)...(19): siRNA sense strand
cacaaugacacaucuauga

SEQ ID NO: 1172928 - RNA, 19 nt, Homo sapiens
  misc_RNA (1)...(19): siRNA sense strand
gaaggccagaucuccauuu

SEQ ID NO: 1172929 - RNA, 19 nt, Homo sapiens
  misc_RNA (1)...(19): siRNA sense strand
ucaaugccuccaagaauuu

SEQ ID NO: 1172930 - RNA, 19 nt, Homo sapiens
  misc_RNA (1)...(19): siRNA sense strand
cugcauaucuggcuucuac

SEQ ID NO: 1172931 - RNA, 19 nt, Homo sapiens
  misc_RNA (1)...(19): siRNA sense strand
guacuacuguaacaagaag

SEQ ID NO: 1172932 - RNA, 19 nt, Homo sapiens
  misc_RNA (1)...(19): siRNA sense strand
gaaccacaaugcccuuuug

SEQ ID NO: 1172933 - RNA, 19 nt, Homo sapiens
  misc_RNA (1)...(19): siRNA sense strand
ucagaggaacauguuauua

SEQ ID NO: 1172934 - RNA, 19 nt, Homo sapiens
  misc_RNA (1)...(19): siRNA sense strand
ccaaggaaacccucucaga

SEQ ID NO: 1172935 - RNA, 19 nt, Homo sapiens
  misc_RNA (1)...(19): siRNA sense strand
cacaguaaaugcaucaauc

SEQ ID NO: 1172936 - RNA, 19 nt, Homo sapiens
  misc_RNA (1)...(19): siRNA sense strand
uuaagcagcugcgaauaau

SEQ ID NO: 1172937 - RNA, 19 nt, Homo sapiens
  misc_RNA (1)...(19): siRNA sense strand
gaacacauggaguauauua

SEQ ID NO: 1172938 - RNA, 19 nt, Homo sapiens
  misc_RNA (1)...(19): siRNA sense strand
gaagauauguccccauuua

SEQ ID NO: 1172939 - RNA, 19 nt, Homo sapiens
  misc_RNA (1)...(19): siRNA sense strand
gauaagaacacauggagua

SEQ ID NO: 1172940 - RNA, 19 nt, Homo sapiens
  misc_RNA (1)...(19): siRNA sense strand
gagaagagaugccuguugu

SEQ ID NO: 1172941 - RNA, 19 nt, Homo sapiens
  misc_RNA (1)...(19): siRNA sense strand
gaaugugaauguucugaaa

SEQ ID NO: 1172942 - RNA, 19 nt, Homo sapiens
  misc_RNA (1)...(19): siRNA sense strand
gaaaauaucuguggcauug

SEQ ID NO: 1172943 - RNA, 19 nt, Homo sapiens
  misc_RNA (1)...(19): siRNA sense strand
gaccugaucuccaccauga

SEQ ID NO: 1172944 - RNA, 19 nt, Homo sapiens
  misc_RNA (1)...(19): siRNA sense strand
caacagauuuggccauuca

SEQ ID NO: 1172945 - RNA, 19 nt, Homo sapiens
  misc_RNA (1)...(19): siRNA sense strand
guacaaagauaguuucucu

SEQ ID NO: 1172946 - RNA, 19 nt, Homo sapiens
  misc_RNA (1)...(19): siRNA sense strand
uaagcaaugugcaggaaua

SEQ ID NO: 1172947 - RNA, 19 nt, Homo sapiens
  misc_RNA (1)...(19): siRNA sense strand
gaagagaugccuguuguuu

SEQ ID NO: 1172948 - RNA, 19 nt, Homo sapiens
  misc_RNA (1)...(19): siRNA sense strand
ccacucagauuauaacaug

SEQ ID NO: 1172949 - RNA, 19 nt, Homo sapiens
  misc_RNA (1)...(19): siRNA sense strand
aaaccaacauuaaggagua

SEQ ID NO: 1172950 - RNA, 19 nt, Homo sapiens
  misc_RNA (1)...(19): siRNA sense strand
gcaggaauaugauuuggau

SEQ ID NO: 1172951 - RNA, 19 nt, Homo sapiens
  misc_RNA (1)...(19): siRNA sense strand
uaacaugguucuagcguau

SEQ ID NO: 1172952 - RNA, 19 nt, Homo sapiens
  misc_RNA (1)...(19): siRNA sense strand
gcaaugugcaggaauauga

SEQ ID NO: 1172953 - RNA, 19 nt, Homo sapiens
  misc_RNA (1)...(19): siRNA sense strand
ggacagccaaauagaauaa

SEQ ID NO: 1172954 - RNA, 19 nt, Homo sapiens
  misc_RNA (1)...(19): siRNA sense strand
ccacuaaaccguucuguga

SEQ ID NO: 1172955 - RNA, 19 nt, Homo sapiens
  misc_RNA (1)...(19): siRNA sense strand
gcgauacuguugaauguga

SEQ ID NO: 1172956 - RNA, 19 nt, Homo sapiens
  misc_RNA (1)...(19): siRNA sense strand
ccaggaagaugaucgcuau

SEQ ID NO: 1172957 - RNA, 19 nt, Homo sapiens
  misc_RNA (1)...(19): siRNA sense strand
gacuaucaguucaccuuua

SEQ ID NO: 1172958 - RNA, 19 nt, Homo sapiens
  misc_RNA (1)...(19): siRNA sense strand
gaugaucucuaccgauaug

SEQ ID NO: 1172959 - RNA, 19 nt, Homo sapiens
  misc_RNA (1)...(19): siRNA sense strand
gaaaaucgauaccaaggaa

SEQ ID NO: 1172960 - RNA, 19 nt, Homo sapiens
  misc_RNA (1)...(19): siRNA sense strand
gaaggacagccaaauagaa

SEQ ID NO: 1172961 - RNA, 19 nt, Homo sapiens
  misc_RNA (1)...(19): siRNA sense strand
gcacagccaacaccaauga

SEQ ID NO: 1172962 - RNA, 19 nt, Homo sapiens
  misc_RNA (1)...(19): siRNA sense strand
gaggauauauguucaacca

SEQ ID NO: 1172963 - RNA, 19 nt, Homo sapiens
  misc_RNA (1)...(19): siRNA sense strand
caaggagaauuaugacaau

SEQ ID NO: 1172964 - RNA, 19 nt, Homo sapiens
  misc_RNA (1)...(19): siRNA sense strand
ggaagaugaucgcuauuac

SEQ ID NO: 1172965 - RNA, 19 nt, Homo sapiens
  misc_RNA (1)...(19): siRNA sense strand
aagaacacauggaguauau

SEQ ID NO: 1172966 - RNA, 19 nt, Homo sapiens
  misc_RNA (1)...(19): siRNA sense strand
ccaaaugcuucucuucaga

SEQ ID NO: 1172967 - RNA, 19 nt, Homo sapiens
  misc_RNA (1)...(19): siRNA sense strand
gaggaaacacacacaauga

SEQ ID NO: 1172968 - RNA, 19 nt, Homo sapiens
  misc_RNA (1)...(19): siRNA sense strand
agacuucguuucaaucauu

SEQ ID NO: 1172969 - RNA, 19 nt, Homo sapiens
  misc_RNA (1)...(19): siRNA sense strand
caaugugguuguuagauau

SEQ ID NO: 1172970 - RNA, 19 nt, Homo sapiens
  misc_RNA (1)...(19): siRNA sense strand
gaguguaagaucaguaaua

SEQ ID NO: 1172971 - RNA, 19 nt, Homo sapiens
  misc_RNA (1)...(19): siRNA sense strand
aaacagggauuuggacaug

SEQ ID NO: 1172972 - RNA, 19 nt, Homo sapiens
  misc_RNA (1)...(19): siRNA sense strand
agaagaagguagaauuugu

SEQ ID NO: 1172973 - RNA, 19 nt, Homo sapiens
  misc_RNA (1)...(19): siRNA sense strand
cagauggaccuggaaauua

SEQ ID NO: 1172974 - RNA, 19 nt, Homo sapiens
  misc_RNA (1)...(19): siRNA sense strand
ucauaaagcuguggucaau

SEQ ID NO: 1172975 - RNA, 19 nt, Homo sapiens
  misc_RNA (1)...(19): siRNA sense strand
cguaugaccuugcuucuag

SEQ ID NO: 1172976 - RNA, 19 nt, Homo sapiens
  misc_RNA (1)...(19): siRNA sense strand
ggaaaugucagccaugcaa

SEQ ID NO: 1172977 - RNA, 19 nt, Homo sapiens
  misc_RNA (1)...(19): siRNA sense strand
gcuaaauuguucuguagga

SEQ ID NO: 1172978 - RNA, 19 nt, Homo sapiens
  misc_RNA (1)...(19): siRNA sense strand
gcuggcaacugaugaacaa

SEQ ID NO: 1172979 - RNA, 19 nt, Homo sapiens
  misc_RNA (1)...(19): siRNA sense strand
ccuaugacauugccuguga

SEQ ID NO: 1172980 - RNA, 19 nt, Homo sapiens
  misc_RNA (1)...(19): siRNA sense strand
ggaggaaacacacacaaug

SEQ ID NO: 1172981 - RNA, 19 nt, Homo sapiens
  misc_RNA (1)...(19): siRNA sense strand
guaguugggaccauuuaua

SEQ ID NO: 1172982 - RNA, 19 nt, Homo sapiens
  misc_RNA (1)...(19): siRNA sense strand
agagaugccuguuguuuca

SEQ ID NO: 1172983 - RNA, 19 nt, Homo sapiens
  misc_RNA (1)...(19): siRNA sense strand
gcagauacaacuggucuuu

SEQ ID NO: 1172984 - RNA, 19 nt, Homo sapiens
  misc_RNA (1)...(19): siRNA sense strand
gcauuugguuggaaacuca

SEQ ID NO: 1172985 - RNA, 19 nt, Homo sapiens
  misc_RNA (1)...(19): siRNA sense strand
gcacacauuguuacacuga

SEQ ID NO: 1172986 - RNA, 19 nt, Homo sapiens
  misc_RNA (1)...(19): siRNA sense strand
gccaguguauggaauggua

SEQ ID NO: 1172987 - RNA, 19 nt, Homo sapiens
  misc_RNA (1)...(19): siRNA sense strand
gaauaaugcagucaucuca

SEQ ID NO: 1172988 - RNA, 19 nt, Homo sapiens
  misc_RNA (1)...(19): siRNA sense strand
ccagaagaagguagaauuu

SEQ ID NO: 1172989 - RNA, 19 nt, Homo sapiens
  misc_RNA (1)...(19): siRNA sense strand
gaccagggcccuauacguu

SEQ ID NO: 1172990 - RNA, 19 nt, Homo sapiens
  misc_RNA (1)...(19): siRNA sense strand
agauggaccuggaaauuau

SEQ ID NO: 1172991 - RNA, 19 nt, Homo sapiens
  misc_RNA (1)...(19): siRNA sense strand
gcuaguugcugcauuuagu

SEQ ID NO: 1172992 - RNA, 19 nt, Homo sapiens
  misc_RNA (1)...(19): siRNA sense strand
gaugcuggauucuguggaa

SEQ ID NO: 1172993 - RNA, 19 nt, Homo sapiens
  misc_RNA (1)...(19): siRNA sense strand
gaaugugaccaaugaguug

SEQ ID NO: 1172994 - RNA, 19 nt, Homo sapiens
  misc_RNA (1)...(19): siRNA sense strand
caauucaagugaugucaga

SEQ ID NO: 1172995 - RNA, 19 nt, Homo sapiens
  misc_RNA (1)...(19): siRNA sense strand
gagaguguaagaucaguaa

SEQ ID NO: 1172996 - RNA, 19 nt, Homo sapiens
  misc_RNA (1)...(19): siRNA sense strand
cgaggcaucugcaauucaa

SEQ ID NO: 1172997 - RNA, 19 nt, Homo sapiens
  misc_RNA (1)...(19): siRNA sense strand
gagcaucugugagaagugu

SEQ ID NO: 1172998 - RNA, 19 nt, Homo sapiens
  misc_RNA (1)...(19): siRNA sense strand
ggaauaugauuuggauaag

SEQ ID NO: 1172999 - RNA, 19 nt, Homo sapiens
  misc_RNA (1)...(19): siRNA sense strand
ggaaugugaccaaugaguu

SEQ ID NO: 1173000 - RNA, 19 nt, Homo sapiens
  misc_RNA (1)...(19): siRNA sense strand
ugagagagauggcaaugag

SEQ ID NO: 1173001 - RNA, 19 nt, Homo sapiens
  misc_RNA (1)...(19): siRNA sense strand
ggacuccaaugccuaugug

SEQ ID NO: 1173002 - RNA, 19 nt, Homo sapiens
  misc_RNA (1)...(19): siRNA sense strand
ucacugcccucucuaugga

SEQ ID NO: 1173003 - RNA, 19 nt, Homo sapiens
  misc_RNA (1)...(19): siRNA sense strand
cagcgauacuguugaaugu

SEQ ID NO: 1173004 - RNA, 19 nt, Homo sapiens
  misc_RNA (1)...(19): siRNA sense strand
gugaugcugcuuauaauuu

SEQ ID NO: 1173005 - RNA, 19 nt, Homo sapiens
  misc_RNA (1)...(19): siRNA sense strand
uuagugaugcugcuuauaa

SEQ ID NO: 1173006 - RNA, 19 nt, Homo sapiens
  misc_RNA (1)...(19): siRNA sense strand
ccaagaauuucaaccucaa

SEQ ID NO: 1173007 - RNA, 19 nt, Homo sapiens
  misc_RNA (1)...(19): siRNA sense strand
cagaggaacauguuauuau

SEQ ID NO: 1173008 - RNA, 19 nt, Homo sapiens
  misc_RNA (1)...(19): siRNA sense strand
cuacugccaaggagaauua

SEQ ID NO: 1173009 - RNA, 19 nt, Homo sapiens
  misc_RNA (1)...(19): siRNA sense strand
gggaccauuuauauguuua

SEQ ID NO: 1173010 - RNA, 19 nt, Homo sapiens
  misc_RNA (1)...(19): siRNA sense strand
ggagcaguaugcagugguu

SEQ ID NO: 1173011 - RNA, 19 nt, Homo sapiens
  misc_RNA (1)...(19): siRNA sense strand
uagcagcgauacuguugaa

SEQ ID NO: 1173012 - RNA, 19 nt, Homo sapiens
  misc_RNA (1)...(19): siRNA sense strand
gguagaauuuguccuuaag

SEQ ID NO: 1173013 - RNA, 19 nt, Homo sapiens
  misc_RNA (1)...(19): siRNA sense strand
gguccuggauguucaguuc

SEQ ID NO: 1173014 - RNA, 19 nt, Homo sapiens
  misc_RNA (1)...(19): siRNA sense strand
ggaaaggugaagcauguga

SEQ ID NO: 1173015 - RNA, 19 nt, Homo sapiens
  misc_RNA (1)...(19): siRNA sense strand
gucauucuuuggcauuaua

SEQ ID NO: 1173016 - RNA, 19 nt, Homo sapiens
  misc_RNA (1)...(19): siRNA sense strand
gaagaugaucgcuauuaca

SEQ ID NO: 1173017 - RNA, 19 nt, Homo sapiens
  misc_RNA (1)...(19): siRNA sense strand
caguucaccuuuagucuau

SEQ ID NO: 1173018 - RNA, 19 nt, Homo sapiens
  misc_RNA (1)...(19): siRNA sense strand
gcacugcgagaccugcaua

SEQ ID NO: 1173019 - RNA, 19 nt, Homo sapiens
  misc_RNA (1)...(19): siRNA sense strand
agauacaacuggucuuuca

SEQ ID NO: 1173020 - RNA, 19 nt, Homo sapiens
  misc_RNA (1)...(19): siRNA sense strand
gaaccacagcugcucagaa

SEQ ID NO: 1173021 - RNA, 19 nt, Homo sapiens
  misc_RNA (1)...(19): siRNA sense strand
ggcaacugaugaacaagaa

SEQ ID NO: 1173022 - RNA, 19 nt, Homo sapiens
  misc_RNA (1)...(19): siRNA sense strand
cgaggagaguguaagauca

SEQ ID NO: 1173023 - RNA, 19 nt, Homo sapiens
  misc_RNA (1)...(19): siRNA sense strand
ggagaagagaugccuguug

SEQ ID NO: 1173024 - RNA, 19 nt, Homo sapiens
  misc_RNA (1)...(19): siRNA sense strand
caacuggucuuucauucac

SEQ ID NO: 1173025 - RNA, 19 nt, Homo sapiens
  misc_RNA (1)...(19): siRNA sense strand
ccaaggagaauuaugacaa

SEQ ID NO: 1173026 - RNA, 19 nt, Homo sapiens
  misc_RNA (1)...(19): siRNA sense strand
ggcauuggcuggcauuugg

SEQ ID NO: 1173027 - RNA, 19 nt, Homo sapiens
  misc_RNA (1)...(19): siRNA sense strand
cacaaugacacaucuauga

SEQ ID NO: 1173028 - RNA, 19 nt, Homo sapiens
  misc_RNA (1)...(19): siRNA sense strand
gaaggccagaucuccauuu

SEQ ID NO: 1173029 - RNA, 19 nt, Homo sapiens
  misc_RNA (1)...(19): siRNA sense strand
ucaaugccuccaagaauuu

SEQ ID NO: 1173030 - RNA, 19 nt, Homo sapiens
  misc_RNA (1)...(19): siRNA sense strand
cugcauaucuggcuucuac

SEQ ID NO: 1173031 - RNA, 19 nt, Homo sapiens
  misc_RNA (1)...(19): siRNA sense strand
guacuacuguaacaagaag

SEQ ID NO: 1173032 - RNA, 19 nt, Homo sapiens
  misc_RNA (1)...(19): siRNA sense strand
gaaccacaaugcccuuuug

SEQ ID NO: 1173033 - RNA, 19 nt, Homo sapiens
  misc_RNA (1)...(19): siRNA sense strand
ucagaggaacauguuauua

SEQ ID NO: 1173034 - RNA, 19 nt, Homo sapiens
  misc_RNA (1)...(19): siRNA sense strand
ccaaggaaacccucucaga

SEQ ID NO: 1173035 - RNA, 19 nt, Homo sapiens
  misc_RNA (1)...(19): siRNA sense strand
cacaguaaaugcaucaauc

SEQ ID NO: 1173036 - RNA, 19 nt, Homo sapiens
  misc_RNA (1)...(19): siRNA sense strand
uuaagcagcugcgaauaau

SEQ ID NO: 1173037 - RNA, 19 nt, Homo sapiens
  misc_RNA (1)...(19): siRNA sense strand
gaacacauggaguauauua

SEQ ID NO: 1173038 - RNA, 19 nt, Homo sapiens
  misc_RNA (1)...(19): siRNA sense strand
gaagauauguccccauuua

SEQ ID NO: 1173039 - RNA, 19 nt, Homo sapiens
  misc_RNA (1)...(19): siRNA sense strand
gauaagaacacauggagua

SEQ ID NO: 1173040 - RNA, 19 nt, Homo sapiens
  misc_RNA (1)...(19): siRNA sense strand
gagaagagaugccuguugu

SEQ ID NO: 1173041 - RNA, 19 nt, Homo sapiens
  misc_RNA (1)...(19): siRNA sense strand
gaaugugaauguucugaaa

SEQ ID NO: 1173042 - RNA, 19 nt, Homo sapiens
  misc_RNA (1)...(19): siRNA sense strand
gaaaauaucuguggcauug

SEQ ID NO: 1173043 - RNA, 19 nt, Homo sapiens
  misc_RNA (1)...(19): siRNA sense strand
gaccugaucuccaccauga

SEQ ID NO: 1173044 - RNA, 19 nt, Homo sapiens
  misc_RNA (1)...(19): siRNA sense strand
caacagauuuggccauuca

SEQ ID NO: 1173045 - RNA, 19 nt, Homo sapiens
  misc_RNA (1)...(19): siRNA sense strand
guacaaagauaguuucucu

SEQ ID NO: 1173046 - RNA, 19 nt, Homo sapiens
  misc_RNA (1)...(19): siRNA sense strand
uaagcaaugugcaggaaua

SEQ ID NO: 1173047 - RNA, 19 nt, Homo sapiens
  misc_RNA (1)...(19): siRNA sense strand
gaagagaugccuguuguuu

SEQ ID NO: 1173048 - RNA, 19 nt, Homo sapiens
  misc_RNA (1)...(19): siRNA sense strand
ccacucagauuauaacaug

SEQ ID NO: 1173049 - RNA, 19 nt, Homo sapiens
  misc_RNA (1)...(19): siRNA sense strand
aaaccaacauuaaggagua

SEQ ID NO: 1173050 - RNA, 19 nt, Homo sapiens
  misc_RNA (1)...(19): siRNA sense strand
gcaggaauaugauuuggau

SEQ ID NO: 1173051 - RNA, 19 nt, Homo sapiens
  misc_RNA (1)...(19): siRNA sense strand
uaacaugguucuagcguau

SEQ ID NO: 1173052 - RNA, 19 nt, Homo sapiens
  misc_RNA (1)...(19): siRNA sense strand
gcaaugugcaggaauauga

SEQ ID NO: 1173053 - RNA, 19 nt, Homo sapiens
  misc_RNA (1)...(19): siRNA sense strand
ggacagccaaauagaauaa

SEQ ID NO: 1173054 - RNA, 19 nt, Homo sapiens
  misc_RNA (1)...(19): siRNA sense strand
ccacuaaaccguucuguga

SEQ ID NO: 1173055 - RNA, 19 nt, Homo sapiens
  misc_RNA (1)...(19): siRNA sense strand
gcgauacuguugaauguga

SEQ ID NO: 1173056 - RNA, 19 nt, Homo sapiens
  misc_RNA (1)...(19): siRNA sense strand
ccaggaagaugaucgcuau

SEQ ID NO: 1173057 - RNA, 19 nt, Homo sapiens
  misc_RNA (1)...(19): siRNA sense strand
gacuaucaguucaccuuua

SEQ ID NO: 1173058 - RNA, 19 nt, Homo sapiens
  misc_RNA (1)...(19): siRNA sense strand
gaugaucucuaccgauaug

SEQ ID NO: 1173059 - RNA, 19 nt, Homo sapiens
  misc_RNA (1)...(19): siRNA sense strand
gaaaaucgauaccaaggaa

SEQ ID NO: 1173060 - RNA, 19 nt, Homo sapiens
  misc_RNA (1)...(19): siRNA sense strand
gaaggacagccaaauagaa

SEQ ID NO: 1173061 - RNA, 19 nt, Homo sapiens
  misc_RNA (1)...(19): siRNA sense strand
gcacagccaacaccaauga

SEQ ID NO: 1173062 - RNA, 19 nt, Homo sapiens
  misc_RNA (1)...(19): siRNA sense strand
gaggauauauguucaacca

SEQ ID NO: 1173063 - RNA, 19 nt, Homo sapiens
  misc_RNA (1)...(19): siRNA sense strand
caaggagaauuaugacaau

SEQ ID NO: 1173064 - RNA, 19 nt, Homo sapiens
  misc_RNA (1)...(19): siRNA sense strand
ggaagaugaucgcuauuac

SEQ ID NO: 1173065 - RNA, 19 nt, Homo sapiens
  misc_RNA (1)...(19): siRNA sense strand
aagaacacauggaguauau

SEQ ID NO: 1173066 - RNA, 19 nt, Homo sapiens
  misc_RNA (1)...(19): siRNA sense strand
ccaaaugcuucucuucaga

SEQ ID NO: 1173067 - RNA, 19 nt, Homo sapiens
  misc_RNA (1)...(19): siRNA sense strand
gaggaaacacacacaauga

SEQ ID NO: 1173068 - RNA, 19 nt, Homo sapiens
  misc_RNA (1)...(19): siRNA sense strand
agacuucguuucaaucauu

SEQ ID NO: 1173069 - RNA, 19 nt, Homo sapiens
  misc_RNA (1)...(19): siRNA sense strand
caaugugguuguuagauau

SEQ ID NO: 1173070 - RNA, 19 nt, Homo sapiens
  misc_RNA (1)...(19): siRNA sense strand
gaguguaagaucaguaaua

SEQ ID NO: 1173071 - RNA, 19 nt, Homo sapiens
  misc_RNA (1)...(19): siRNA sense strand
aaacagggauuuggacaug

SEQ ID NO: 1173072 - RNA, 19 nt, Homo sapiens
  misc_RNA (1)...(19): siRNA sense strand
agaagaagguagaauuugu

SEQ ID NO: 1173073 - RNA, 19 nt, Homo sapiens
  misc_RNA (1)...(19): siRNA sense strand
cagauggaccuggaaauua

SEQ ID NO: 1173074 - RNA, 19 nt, Homo sapiens
  misc_RNA (1)...(19): siRNA sense strand
ucauaaagcuguggucaau

SEQ ID NO: 1173075 - RNA, 19 nt, Homo sapiens
  misc_RNA (1)...(19): siRNA sense strand
cguaugaccuugcuucuag

SEQ ID NO: 1173076 - RNA, 19 nt, Homo sapiens
  misc_RNA (1)...(19): siRNA sense strand
ggaaaugucagccaugcaa

SEQ ID NO: 1173077 - RNA, 19 nt, Homo sapiens
  misc_RNA (1)...(19): siRNA sense strand
gcuaaauuguucuguagga

SEQ ID NO: 1173078 - RNA, 19 nt, Homo sapiens
  misc_RNA (1)...(19): siRNA sense strand
gcuggcaacugaugaacaa

SEQ ID NO: 1173079 - RNA, 19 nt, Homo sapiens
  misc_RNA (1)...(19): siRNA sense strand
ccuaugacauugccuguga

SEQ ID NO: 1173080 - RNA, 19 nt, Homo sapiens
  misc_RNA (1)...(19): siRNA sense strand
ggaggaaacacacacaaug

SEQ ID NO: 1173081 - RNA, 19 nt, Homo sapiens
  misc_RNA (1)...(19): siRNA sense strand
guaguugggaccauuuaua

SEQ ID NO: 1173082 - RNA, 19 nt, Homo sapiens
  misc_RNA (1)...(19): siRNA sense strand
agagaugccuguuguuuca

SEQ ID NO: 1173083 - RNA, 19 nt, Homo sapiens
  misc_RNA (1)...(19): siRNA sense strand
gcagauacaacuggucuuu

SEQ ID NO: 1173084 - RNA, 19 nt, Homo sapiens
  misc_RNA (1)...(19): siRNA sense strand
gcauuugguuggaaacuca

SEQ ID NO: 1173085 - RNA, 19 nt, Homo sapiens
  misc_RNA (1)...(19): siRNA sense strand
gcacacauuguuacacuga

SEQ ID NO: 1173086 - RNA, 19 nt, Homo sapiens
  misc_RNA (1)...(19): siRNA sense strand
gccaguguauggaauggua

SEQ ID NO: 1173087 - RNA, 19 nt, Homo sapiens
  misc_RNA (1)...(19): siRNA sense strand
gaauaaugcagucaucuca

SEQ ID NO: 1173088 - RNA, 19 nt, Homo sapiens
  misc_RNA (1)...(19): siRNA sense strand
ccagaagaagguagaauuu

SEQ ID NO: 1173089 - RNA, 19 nt, Homo sapiens
  misc_RNA (1)...(19): siRNA sense strand
gaccagggcccuauacguu

SEQ ID NO: 1173090 - RNA, 19 nt, Homo sapiens
  misc_RNA (1)...(19): siRNA sense strand
agauggaccuggaaauuau

SEQ ID NO: 1173091 - RNA, 19 nt, Homo sapiens
  misc_RNA (1)...(19): siRNA sense strand
gcuaguugcugcauuuagu

SEQ ID NO: 1173092 - RNA, 19 nt, Homo sapiens
  misc_RNA (1)...(19): siRNA sense strand
gaugcuggauucuguggaa

SEQ ID NO: 1173093 - RNA, 19 nt, Homo sapiens
  misc_RNA (1)...(19): siRNA sense strand
gaaugugaccaaugaguug

SEQ ID NO: 1173094 - RNA, 19 nt, Homo sapiens
  misc_RNA (1)...(19): siRNA sense strand
caauucaagugaugucaga

SEQ ID NO: 1173095 - RNA, 19 nt, Homo sapiens
  misc_RNA (1)...(19): siRNA sense strand
gagaguguaagaucaguaa

SEQ ID NO: 1173096 - RNA, 19 nt, Homo sapiens
  misc_RNA (1)...(19): siRNA sense strand
cgaggcaucugcaauucaa

SEQ ID NO: 1173097 - RNA, 19 nt, Homo sapiens
  misc_RNA (1)...(19): siRNA sense strand
gagcaucugugagaagugu

SEQ ID NO: 1173098 - RNA, 19 nt, Homo sapiens
  misc_RNA (1)...(19): siRNA sense strand
ggaauaugauuuggauaag

SEQ ID NO: 1173099 - RNA, 19 nt, Homo sapiens
  misc_RNA (1)...(19): siRNA sense strand
ggaaugugaccaaugaguu

SEQ ID NO: 1173100 - RNA, 19 nt, Homo sapiens
  misc_RNA (1)...(19): siRNA sense strand
ugagagagauggcaaugag

SEQ ID NO: 1173101 - RNA, 19 nt, Homo sapiens
  misc_RNA (1)...(19): siRNA sense strand
ggacuccaaugccuaugug

SEQ ID NO: 1173102 - RNA, 19 nt, Homo sapiens
  misc_RNA (1)...(19): siRNA sense strand
ucacugcccucucuaugga

SEQ ID NO: 1173103 - RNA, 19 nt, Homo sapiens
  misc_RNA (1)...(19): siRNA sense strand
cagcgauacuguugaaugu

SEQ ID NO: 1173104 - RNA, 19 nt, Homo sapiens
  misc_RNA (1)...(19): siRNA sense strand
gugaugcugcuuauaauuu

SEQ ID NO: 1173105 - RNA, 19 nt, Homo sapiens
  misc_RNA (1)...(19): siRNA sense strand
uuagugaugcugcuuauaa

SEQ ID NO: 1173106 - RNA, 19 nt, Homo sapiens
  misc_RNA (1)...(19): siRNA sense strand
ccaagaauuucaaccucaa

SEQ ID NO: 1173107 - RNA, 19 nt, Homo sapiens
  misc_RNA (1)...(19): siRNA sense strand
cagaggaacauguuauuau

SEQ ID NO: 1173108 - RNA, 19 nt, Homo sapiens
  misc_RNA (1)...(19): siRNA sense strand
cuacugccaaggagaauua

SEQ ID NO: 1173109 - RNA, 19 nt, Homo sapiens
  misc_RNA (1)...(19): siRNA sense strand
gggaccauuuauauguuua

SEQ ID NO: 1173110 - RNA, 19 nt, Homo sapiens
  misc_RNA (1)...(19): siRNA sense strand
ggagcaguaugcagugguu

SEQ ID NO: 1173111 - RNA, 19 nt, Homo sapiens
  misc_RNA (1)...(19): siRNA sense strand
uagcagcgauacuguugaa

SEQ ID NO: 1173112 - RNA, 19 nt, Homo sapiens
  misc_RNA (1)...(19): siRNA sense strand
gguagaauuuguccuuaag

SEQ ID NO: 1173113 - RNA, 19 nt, Homo sapiens
  misc_RNA (1)...(19): siRNA sense strand
gguccuggauguucaguuc

SEQ ID NO: 1173114 - RNA, 19 nt, Homo sapiens
  misc_RNA (1)...(19): siRNA sense strand
ggaaaggugaagcauguga

SEQ ID NO: 1173115 - RNA, 19 nt, Homo sapiens
  misc_RNA (1)...(19): siRNA sense strand
gucauucuuuggcauuaua

SEQ ID NO: 1173116 - RNA, 19 nt, Homo sapiens
  misc_RNA (1)...(19): siRNA sense strand
gaagaugaucgcuauuaca

SEQ ID NO: 1173117 - RNA, 19 nt, Homo sapiens
  misc_RNA (1)...(19): siRNA sense strand
caguucaccuuuagucuau

SEQ ID NO: 1173118 - RNA, 19 nt, Homo sapiens
  misc_RNA (1)...(19): siRNA sense strand
gcacugcgagaccugcaua

SEQ ID NO: 1173119 - RNA, 19 nt, Homo sapiens
  misc_RNA (1)...(19): siRNA sense strand
agauacaacuggucuuuca

SEQ ID NO: 1173120 - RNA, 19 nt, Homo sapiens
  misc_RNA (1)...(19): siRNA sense strand
gaaccacagcugcucagaa

SEQ ID NO: 1173121 - RNA, 19 nt, Homo sapiens
  misc_RNA (1)...(19): siRNA sense strand
ggcaacugaugaacaagaa

SEQ ID NO: 1173122 - RNA, 19 nt, Homo sapiens
  misc_RNA (1)...(19): siRNA sense strand
cgaggagaguguaagauca

SEQ ID NO: 1173123 - RNA, 19 nt, Homo sapiens
  misc_RNA (1)...(19): siRNA sense strand
ggagaagagaugccuguug

SEQ ID NO: 1173124 - RNA, 19 nt, Homo sapiens
  misc_RNA (1)...(19): siRNA sense strand
caacuggucuuucauucac

SEQ ID NO: 1173125 - RNA, 19 nt, Homo sapiens
  misc_RNA (1)...(19): siRNA sense strand
ccaaggagaauuaugacaa

SEQ ID NO: 1173126 - RNA, 19 nt, Homo sapiens
  misc_RNA (1)...(19): siRNA sense strand
ggcauuggcuggcauuugg

SEQ ID NO: 1173127 - RNA, 19 nt, Homo sapiens
  misc_RNA (1)...(19): siRNA sense strand
cacaaugacacaucuauga

SEQ ID NO: 1173128 - RNA, 19 nt, Homo sapiens
  misc_RNA (1)...(19): siRNA sense strand
gaaggccagaucuccauuu

SEQ ID NO: 1173129 - RNA, 19 nt, Homo sapiens
  misc_RNA (1)...(19): siRNA sense strand
ucaaugccuccaagaauuu

SEQ ID NO: 1173130 - RNA, 19 nt, Homo sapiens
  misc_RNA (1)...(19): siRNA sense strand
cugcauaucuggcuucuac

SEQ ID NO: 1173131 - RNA, 19 nt, Homo sapiens
  misc_RNA (1)...(19): siRNA sense strand
guacuacuguaacaagaag

SEQ ID NO: 1173132 - RNA, 19 nt, Homo sapiens
  misc_RNA (1)...(19): siRNA sense strand
gaaccacaaugcccuuuug

SEQ ID NO: 1173133 - RNA, 19 nt, Homo sapiens
  misc_RNA (1)...(19): siRNA sense strand
ucagaggaacauguuauua

SEQ ID NO: 1173134 - RNA, 19 nt, Homo sapiens
  misc_RNA (1)...(19): siRNA sense strand
ccaaggaaacccucucaga

SEQ ID NO: 1173135 - RNA, 19 nt, Homo sapiens
  misc_RNA (1)...(19): siRNA sense strand
cacaguaaaugcaucaauc

SEQ ID NO: 1173136 - RNA, 19 nt, Homo sapiens
  misc_RNA (1)...(19): siRNA sense strand
uuaagcagcugcgaauaau

SEQ ID NO: 1173137 - RNA, 19 nt, Homo sapiens
  misc_RNA (1)...(19): siRNA sense strand
agauggagguggagcaaua

SEQ ID NO: 1173138 - RNA, 19 nt, Homo sapiens
  misc_RNA (1)...(19): siRNA sense strand
caaaggaggaggcacagau

SEQ ID NO: 1173139 - RNA, 19 nt, Homo sapiens
  misc_RNA (1)...(19): siRNA sense strand
gcagagcucccagcagaga

SEQ ID NO: 1173140 - RNA, 19 nt, Homo sapiens
  misc_RNA (1)...(19): siRNA sense strand
gacugaagcaggcaaagga

SEQ ID NO: 1173141 - RNA, 19 nt, Homo sapiens
  misc_RNA (1)...(19): siRNA sense strand
gagagcgagagcacgaauu

SEQ ID NO: 1173142 - RNA, 19 nt, Homo sapiens
  misc_RNA (1)...(19): siRNA sense strand
gcaaaggaggaggcacaga

SEQ ID NO: 1173143 - RNA, 19 nt, Homo sapiens
  misc_RNA (1)...(19): siRNA sense strand
aaaggaggaggcacagaug

SEQ ID NO: 1173144 - RNA, 19 nt, Homo sapiens
  misc_RNA (1)...(19): siRNA sense strand
agagcgagagcacgaauuc

SEQ ID NO: 1173145 - RNA, 19 nt, Homo sapiens
  misc_RNA (1)...(19): siRNA sense strand
gcagagcucccagcagaga

SEQ ID NO: 1173146 - RNA, 19 nt, Homo sapiens
  misc_RNA (1)...(19): siRNA sense strand
gagagcgagagcacgaauu

SEQ ID NO: 1173147 - RNA, 19 nt, Homo sapiens
  misc_RNA (1)...(19): siRNA sense strand
agagcgagagcacgaauuc

SEQ ID NO: 1173148 - RNA, 19 nt, Homo sapiens
  misc_RNA (1)...(19): siRNA sense strand
gcacugaccucugugacuu

SEQ ID NO: 1173149 - RNA, 19 nt, Homo sapiens
  misc_RNA (1)...(19): siRNA sense strand
gaaaauucuucuugccaua

SEQ ID NO: 1173150 - RNA, 19 nt, Homo sapiens
  misc_RNA (1)...(19): siRNA sense strand
ucaccuguuuguuaguuua

SEQ ID NO: 1173151 - RNA, 19 nt, Homo sapiens
  misc_RNA (1)...(19): siRNA sense strand
caaaagcccugauuccuau

SEQ ID NO: 1173152 - RNA, 19 nt, Homo sapiens
  misc_RNA (1)...(19): siRNA sense strand
uauaucaccuguuuguuag

SEQ ID NO: 1173153 - RNA, 19 nt, Homo sapiens
  misc_RNA (1)...(19): siRNA sense strand
gugguggaguuauugauga

SEQ ID NO: 1173154 - RNA, 19 nt, Homo sapiens
  misc_RNA (1)...(19): siRNA sense strand
uauaagaagcacagaauuc

SEQ ID NO: 1173155 - RNA, 19 nt, Homo sapiens
  misc_RNA (1)...(19): siRNA sense strand
aggaggagcuugggccuuu

SEQ ID NO: 1173156 - RNA, 19 nt, Homo sapiens
  misc_RNA (1)...(19): siRNA sense strand
gugauuaaagcaacauuug

SEQ ID NO: 1173157 - RNA, 19 nt, Homo sapiens
  misc_RNA (1)...(19): siRNA sense strand
uacaugagccagcaaauuc

SEQ ID NO: 1173158 - RNA, 19 nt, Homo sapiens
  misc_RNA (1)...(19): siRNA sense strand
caaauucuagugccaguca

SEQ ID NO: 1173159 - RNA, 19 nt, Homo sapiens
  misc_RNA (1)...(19): siRNA sense strand
gaagcacagaauucuuaaa

SEQ ID NO: 1173160 - RNA, 19 nt, Homo sapiens
  misc_RNA (1)...(19): siRNA sense strand
uaucaccuguuuguuaguu

SEQ ID NO: 1173161 - RNA, 19 nt, Homo sapiens
  misc_RNA (1)...(19): siRNA sense strand
ggaguuauugaugacguua

SEQ ID NO: 1173162 - RNA, 19 nt, Homo sapiens
  misc_RNA (1)...(19): siRNA sense strand
cuucgagacguuauuuaua

SEQ ID NO: 1173163 - RNA, 19 nt, Homo sapiens
  misc_RNA (1)...(19): siRNA sense strand
cagagauugugguggaguu

SEQ ID NO: 1173164 - RNA, 19 nt, Homo sapiens
  misc_RNA (1)...(19): siRNA sense strand
agauugugguggaguuauu

SEQ ID NO: 1173165 - RNA, 19 nt, Homo sapiens
  misc_RNA (1)...(19): siRNA sense strand
caucgcaugugauuaaagc

SEQ ID NO: 1173166 - RNA, 19 nt, Homo sapiens
  misc_RNA (1)...(19): siRNA sense strand
gcaugugauuaaagcaaca

SEQ ID NO: 1173167 - RNA, 19 nt, Homo sapiens
  misc_RNA (1)...(19): siRNA sense strand
uuacaugagccagcaaauu

SEQ ID NO: 1173168 - RNA, 19 nt, Homo sapiens
  misc_RNA (1)...(19): siRNA sense strand
ggaggagcuugggccuuug

SEQ ID NO: 1173169 - RNA, 19 nt, Homo sapiens
  misc_RNA (1)...(19): siRNA sense strand
gcuccuaauccaccucauu

SEQ ID NO: 1173170 - RNA, 19 nt, Homo sapiens
  misc_RNA (1)...(19): siRNA sense strand
ccaaaagcccugauuccua

SEQ ID NO: 1173171 - RNA, 19 nt, Homo sapiens
  misc_RNA (1)...(19): siRNA sense strand
aaauucuucuugccauaug

SEQ ID NO: 1173172 - RNA, 19 nt, Homo sapiens
  misc_RNA (1)...(19): siRNA sense strand
uuccaucgcaugugauuaa

SEQ ID NO: 1173173 - RNA, 19 nt, Homo sapiens
  misc_RNA (1)...(19): siRNA sense strand
gcuugggccuuuguucuuc

SEQ ID NO: 1173174 - RNA, 19 nt, Homo sapiens
  misc_RNA (1)...(19): siRNA sense strand
gagcuugggccuuuguucu

SEQ ID NO: 1173175 - RNA, 19 nt, Homo sapiens
  misc_RNA (1)...(19): siRNA sense strand
gcaauugucauaaaaccaa

SEQ ID NO: 1173176 - RNA, 19 nt, Homo sapiens
  misc_RNA (1)...(19): siRNA sense strand
gauucacuauaucaaccaa

SEQ ID NO: 1173177 - RNA, 19 nt, Homo sapiens
  misc_RNA (1)...(19): siRNA sense strand
cuccuaauccaccucauuu

SEQ ID NO: 1173178 - RNA, 19 nt, Homo sapiens
  misc_RNA (1)...(19): siRNA sense strand
uucgagacguuauuuauac

SEQ ID NO: 1173179 - RNA, 19 nt, Homo sapiens
  misc_RNA (1)...(19): siRNA sense strand
guucuucgagacguuauuu

SEQ ID NO: 1173180 - RNA, 19 nt, Homo sapiens
  misc_RNA (1)...(19): siRNA sense strand
caugagccagcaaauucua

SEQ ID NO: 1173181 - RNA, 19 nt, Homo sapiens
  misc_RNA (1)...(19): siRNA sense strand
caacauuugccuauaucag

SEQ ID NO: 1173182 - RNA, 19 nt, Homo sapiens
  misc_RNA (1)...(19): siRNA sense strand
uaauuuaccagagauugug

SEQ ID NO: 1173183 - RNA, 19 nt, Homo sapiens
  misc_RNA (1)...(19): siRNA sense strand
gcacugaccucugugacuu

SEQ ID NO: 1173184 - RNA, 19 nt, Homo sapiens
  misc_RNA (1)...(19): siRNA sense strand
gaaaauucuucuugccaua

SEQ ID NO: 1173185 - RNA, 19 nt, Homo sapiens
  misc_RNA (1)...(19): siRNA sense strand
ucaccuguuuguuaguuua

SEQ ID NO: 1173186 - RNA, 19 nt, Homo sapiens
  misc_RNA (1)...(19): siRNA sense strand
caaaagcccugauuccuau

SEQ ID NO: 1173187 - RNA, 19 nt, Homo sapiens
  misc_RNA (1)...(19): siRNA sense strand
uauaucaccuguuuguuag

SEQ ID NO: 1173188 - RNA, 19 nt, Homo sapiens
  misc_RNA (1)...(19): siRNA sense strand
uauaagaagcacagaauuc

SEQ ID NO: 1173189 - RNA, 19 nt, Homo sapiens
  misc_RNA (1)...(19): siRNA sense strand
aggaggagcuugggccuuu

SEQ ID NO: 1173190 - RNA, 19 nt, Homo sapiens
  misc_RNA (1)...(19): siRNA sense strand
gugauuaaagcaacauuug

SEQ ID NO: 1173191 - RNA, 19 nt, Homo sapiens
  misc_RNA (1)...(19): siRNA sense strand
caaauucuagugccaguca

SEQ ID NO: 1173192 - RNA, 19 nt, Homo sapiens
  misc_RNA (1)...(19): siRNA sense strand
uacaugagccagcaaauuc

SEQ ID NO: 1173193 - RNA, 19 nt, Homo sapiens
  misc_RNA (1)...(19): siRNA sense strand
gaagcacagaauucuuaaa

SEQ ID NO: 1173194 - RNA, 19 nt, Homo sapiens
  misc_RNA (1)...(19): siRNA sense strand
uaucaccuguuuguuaguu

SEQ ID NO: 1173195 - RNA, 19 nt, Homo sapiens
  misc_RNA (1)...(19): siRNA sense strand
cuucgagacguuauuuaua

SEQ ID NO: 1173196 - RNA, 19 nt, Homo sapiens
  misc_RNA (1)...(19): siRNA sense strand
caucgcaugugauuaaagc

SEQ ID NO: 1173197 - RNA, 19 nt, Homo sapiens
  misc_RNA (1)...(19): siRNA sense strand
gcaugugauuaaagcaaca

SEQ ID NO: 1173198 - RNA, 19 nt, Homo sapiens
  misc_RNA (1)...(19): siRNA sense strand
gcuccuaauccaccucauu

SEQ ID NO: 1173199 - RNA, 19 nt, Homo sapiens
  misc_RNA (1)...(19): siRNA sense strand
ggaggagcuugggccuuug

SEQ ID NO: 1173200 - RNA, 19 nt, Homo sapiens
  misc_RNA (1)...(19): siRNA sense strand
uuacaugagccagcaaauu

SEQ ID NO: 1173201 - RNA, 19 nt, Homo sapiens
  misc_RNA (1)...(19): siRNA sense strand
ccaaaagcccugauuccua

SEQ ID NO: 1173202 - RNA, 19 nt, Homo sapiens
  misc_RNA (1)...(19): siRNA sense strand
aaauucuucuugccauaug

SEQ ID NO: 1173203 - RNA, 19 nt, Homo sapiens
  misc_RNA (1)...(19): siRNA sense strand
uuccaucgcaugugauuaa

SEQ ID NO: 1173204 - RNA, 19 nt, Homo sapiens
  misc_RNA (1)...(19): siRNA sense strand
gcuugggccuuuguucuuc

SEQ ID NO: 1173205 - RNA, 19 nt, Homo sapiens
  misc_RNA (1)...(19): siRNA sense strand
gagcuugggccuuuguucu

SEQ ID NO: 1173206 - RNA, 19 nt, Homo sapiens
  misc_RNA (1)...(19): siRNA sense strand
gcaauugucauaaaaccaa

SEQ ID NO: 1173207 - RNA, 19 nt, Homo sapiens
  misc_RNA (1)...(19): siRNA sense strand
gauucacuauaucaaccaa

SEQ ID NO: 1173208 - RNA, 19 nt, Homo sapiens
  misc_RNA (1)...(19): siRNA sense strand
cuccuaauccaccucauuu

SEQ ID NO: 1173209 - RNA, 19 nt, Homo sapiens
  misc_RNA (1)...(19): siRNA sense strand
uucgagacguuauuuauac

SEQ ID NO: 1173210 - RNA, 19 nt, Homo sapiens
  misc_RNA (1)...(19): siRNA sense strand
guucuucgagacguuauuu

SEQ ID NO: 1173211 - RNA, 19 nt, Homo sapiens
  misc_RNA (1)...(19): siRNA sense strand
caugagccagcaaauucua

SEQ ID NO: 1173212 - RNA, 19 nt, Homo sapiens
  misc_RNA (1)...(19): siRNA sense strand
caacauuugccuauaucag

SEQ ID NO: 1173213 - RNA, 19 nt, Homo sapiens
  misc_RNA (1)...(19): siRNA sense strand
gcacugaccucugugacuu

SEQ ID NO: 1173214 - RNA, 19 nt, Homo sapiens
  misc_RNA (1)...(19): siRNA sense strand
gaaaauucuucuugccaua

SEQ ID NO: 1173215 - RNA, 19 nt, Homo sapiens
  misc_RNA (1)...(19): siRNA sense strand
ucaccuguuuguuaguuua

SEQ ID NO: 1173216 - RNA, 19 nt, Homo sapiens
  misc_RNA (1)...(19): siRNA sense strand
caaaagcccugauuccuau

SEQ ID NO: 1173217 - RNA, 19 nt, Homo sapiens
  misc_RNA (1)...(19): siRNA sense strand
uauaucaccuguuuguuag

SEQ ID NO: 1173218 - RNA, 19 nt, Homo sapiens
  misc_RNA (1)...(19): siRNA sense strand
uauaagaagcacagaauuc

SEQ ID NO: 1173219 - RNA, 19 nt, Homo sapiens
  misc_RNA (1)...(19): siRNA sense strand
aggaggagcuugggccuuu

SEQ ID NO: 1173220 - RNA, 19 nt, Homo sapiens
  misc_RNA (1)...(19): siRNA sense strand
gugauuaaagcaacauuug

SEQ ID NO: 1173221 - RNA, 19 nt, Homo sapiens
  misc_RNA (1)...(19): siRNA sense strand
caaauucuagugccaguca

SEQ ID NO: 1173222 - RNA, 19 nt, Homo sapiens
  misc_RNA (1)...(19): siRNA sense strand
uacaugagccagcaaauuc

SEQ ID NO: 1173223 - RNA, 19 nt, Homo sapiens
  misc_RNA (1)...(19): siRNA sense strand
gaagcacagaauucuuaaa

SEQ ID NO: 1173224 - RNA, 19 nt, Homo sapiens
  misc_RNA (1)...(19): siRNA sense strand
uaucaccuguuuguuaguu

SEQ ID NO: 1173225 - RNA, 19 nt, Homo sapiens
  misc_RNA (1)...(19): siRNA sense strand
cuucgagacguuauuuaua

SEQ ID NO: 1173226 - RNA, 19 nt, Homo sapiens
  misc_RNA (1)...(19): siRNA sense strand
caucgcaugugauuaaagc

SEQ ID NO: 1173227 - RNA, 19 nt, Homo sapiens
  misc_RNA (1)...(19): siRNA sense strand
gcaugugauuaaagcaaca

SEQ ID NO: 1173228 - RNA, 19 nt, Homo sapiens
  misc_RNA (1)...(19): siRNA sense strand
gcuccuaauccaccucauu

SEQ ID NO: 1173229 - RNA, 19 nt, Homo sapiens
  misc_RNA (1)...(19): siRNA sense strand
ggaggagcuugggccuuug

SEQ ID NO: 1173230 - RNA, 19 nt, Homo sapiens
  misc_RNA (1)...(19): siRNA sense strand
uuacaugagccagcaaauu

SEQ ID NO: 1173231 - RNA, 19 nt, Homo sapiens
  misc_RNA (1)...(19): siRNA sense strand
ccaaaagcccugauuccua

SEQ ID NO: 1173232 - RNA, 19 nt, Homo sapiens
  misc_RNA (1)...(19): siRNA sense strand
aaauucuucuugccauaug

SEQ ID NO: 1173233 - RNA, 19 nt, Homo sapiens
  misc_RNA (1)...(19): siRNA sense strand
uuccaucgcaugugauuaa

SEQ ID NO: 1173234 - RNA, 19 nt, Homo sapiens
  misc_RNA (1)...(19): siRNA sense strand
gcuugggccuuuguucuuc

SEQ ID NO: 1173235 - RNA, 19 nt, Homo sapiens
  misc_RNA (1)...(19): siRNA sense strand
gagcuugggccuuuguucu

SEQ ID NO: 1173236 - RNA, 19 nt, Homo sapiens
  misc_RNA (1)...(19): siRNA sense strand
gcaauugucauaaaaccaa

SEQ ID NO: 1173237 - RNA, 19 nt, Homo sapiens
  misc_RNA (1)...(19): siRNA sense strand
gauucacuauaucaaccaa

SEQ ID NO: 1173238 - RNA, 19 nt, Homo sapiens
  misc_RNA (1)...(19): siRNA sense strand
cuccuaauccaccucauuu

SEQ ID NO: 1173239 - RNA, 19 nt, Homo sapiens
  misc_RNA (1)...(19): siRNA sense strand
uucgagacguuauuuauac

SEQ ID NO: 1173240 - RNA, 19 nt, Homo sapiens
  misc_RNA (1)...(19): siRNA sense strand
guucuucgagacguuauuu

SEQ ID NO: 1173241 - RNA, 19 nt, Homo sapiens
  misc_RNA (1)...(19): siRNA sense strand
caugagccagcaaauucua

SEQ ID NO: 1173242 - RNA, 19 nt, Homo sapiens
  misc_RNA (1)...(19): siRNA sense strand
caacauuugccuauaucag

SEQ ID NO: 1173243 - RNA, 19 nt, Homo sapiens
  misc_RNA (1)...(19): siRNA sense strand
gaacaaacgcuccaaguau

SEQ ID NO: 1173244 - RNA, 19 nt, Homo sapiens
  misc_RNA (1)...(19): siRNA sense strand
aacaaacgcuccaaguaua

SEQ ID NO: 1173245 - RNA, 19 nt, Homo sapiens
  misc_RNA (1)...(19): siRNA sense strand
gggaggaccuucucugugu

SEQ ID NO: 1173246 - RNA, 19 nt, Homo sapiens
  misc_RNA (1)...(19): siRNA sense strand
auaagaagcuccugaagca

SEQ ID NO: 1173247 - RNA, 19 nt, Homo sapiens
  misc_RNA (1)...(19): siRNA sense strand
agaacaaacgcuccaagua

SEQ ID NO: 1173248 - RNA, 19 nt, Homo sapiens
  misc_RNA (1)...(19): siRNA sense strand
gcaagccgaggaccaucua

SEQ ID NO: 1173249 - RNA, 19 nt, Homo sapiens
  misc_RNA (1)...(19): siRNA sense strand
acaaacgcuccaaguauaa

SEQ ID NO: 1173250 - RNA, 19 nt, Homo sapiens
  misc_RNA (1)...(19): siRNA sense strand
agaagcuccugaagcagaa

SEQ ID NO: 1173251 - RNA, 19 nt, Homo sapiens
  misc_RNA (1)...(19): siRNA sense strand
ucacccagacccagguaaa

SEQ ID NO: 1173252 - RNA, 19 nt, Homo sapiens
  misc_RNA (1)...(19): siRNA sense strand
cagaacaaacgcuccaagu

SEQ ID NO: 1173253 - RNA, 19 nt, Homo sapiens
  misc_RNA (1)...(19): siRNA sense strand
agguaaagaucugguuuca

SEQ ID NO: 1173254 - RNA, 19 nt, Homo sapiens
  misc_RNA (1)...(19): siRNA sense strand
gaacaaacgcuccaaguau

SEQ ID NO: 1173255 - RNA, 19 nt, Homo sapiens
  misc_RNA (1)...(19): siRNA sense strand
aacaaacgcuccaaguaua

SEQ ID NO: 1173256 - RNA, 19 nt, Homo sapiens
  misc_RNA (1)...(19): siRNA sense strand
gggaggaccuucucugugu

SEQ ID NO: 1173257 - RNA, 19 nt, Homo sapiens
  misc_RNA (1)...(19): siRNA sense strand
auaagaagcuccugaagca

SEQ ID NO: 1173258 - RNA, 19 nt, Homo sapiens
  misc_RNA (1)...(19): siRNA sense strand
agaacaaacgcuccaagua

SEQ ID NO: 1173259 - RNA, 19 nt, Homo sapiens
  misc_RNA (1)...(19): siRNA sense strand
gcaagccgaggaccaucua

SEQ ID NO: 1173260 - RNA, 19 nt, Homo sapiens
  misc_RNA (1)...(19): siRNA sense strand
acaaacgcuccaaguauaa

SEQ ID NO: 1173261 - RNA, 19 nt, Homo sapiens
  misc_RNA (1)...(19): siRNA sense strand
agaagcuccugaagcagaa

SEQ ID NO: 1173262 - RNA, 19 nt, Homo sapiens
  misc_RNA (1)...(19): siRNA sense strand
ucacccagacccagguaaa

SEQ ID NO: 1173263 - RNA, 19 nt, Homo sapiens
  misc_RNA (1)...(19): siRNA sense strand
cagaacaaacgcuccaagu

SEQ ID NO: 1173264 - RNA, 19 nt, Homo sapiens
  misc_RNA (1)...(19): siRNA sense strand
agguaaagaucugguuuca

SEQ ID NO: 1173265 - RNA, 19 nt, Homo sapiens
  misc_RNA (1)...(19): siRNA sense strand
ggacaaagcucgccaaguu

SEQ ID NO: 1173266 - RNA, 19 nt, Homo sapiens
  misc_RNA (1)...(19): siRNA sense strand
guacacagaugacugguuu

SEQ ID NO: 1173267 - RNA, 19 nt, Homo sapiens
  misc_RNA (1)...(19): siRNA sense strand
ggaauuuaaucaccucuuu

SEQ ID NO: 1173268 - RNA, 19 nt, Homo sapiens
  misc_RNA (1)...(19): siRNA sense strand
cgaggcagcugguguguuu

SEQ ID NO: 1173269 - RNA, 19 nt, Homo sapiens
  misc_RNA (1)...(19): siRNA sense strand
gaggagaccugaacaucaa

SEQ ID NO: 1173270 - RNA, 19 nt, Homo sapiens
  misc_RNA (1)...(19): siRNA sense strand
ggaaagguguuaccauugg

SEQ ID NO: 1173271 - RNA, 19 nt, Homo sapiens
  misc_RNA (1)...(19): siRNA sense strand
gaccuggccuccaacuaua

SEQ ID NO: 1173272 - RNA, 19 nt, Homo sapiens
  misc_RNA (1)...(19): siRNA sense strand
ucaaugagaucgacaucaa

SEQ ID NO: 1173273 - RNA, 19 nt, Homo sapiens
  misc_RNA (1)...(19): siRNA sense strand
acaaagcagugguaucuga

SEQ ID NO: 1173274 - RNA, 19 nt, Homo sapiens
  misc_RNA (1)...(19): siRNA sense strand
aagaggagcuggaggaaga

SEQ ID NO: 1173275 - RNA, 19 nt, Homo sapiens
  misc_RNA (1)...(19): siRNA sense strand
gguguuaccauuggaauua

SEQ ID NO: 1173276 - RNA, 19 nt, Homo sapiens
  misc_RNA (1)...(19): siRNA sense strand
ggacgaagccguggagaga

SEQ ID NO: 1173277 - RNA, 19 nt, Homo sapiens
  misc_RNA (1)...(19): siRNA sense strand
ggaccuggccuccaacuau

SEQ ID NO: 1173278 - RNA, 19 nt, Homo sapiens
  misc_RNA (1)...(19): siRNA sense strand
acagaugacugguuuaaca

SEQ ID NO: 1173279 - RNA, 19 nt, Homo sapiens
  misc_RNA (1)...(19): siRNA sense strand
gaccugaacaucaacauga

SEQ ID NO: 1173280 - RNA, 19 nt, Homo sapiens
  misc_RNA (1)...(19): siRNA sense strand
gaaagguguuaccauugga

SEQ ID NO: 1173281 - RNA, 19 nt, Homo sapiens
  misc_RNA (1)...(19): siRNA sense strand
ggaaggauuugaccgaaaa

SEQ ID NO: 1173282 - RNA, 19 nt, Homo sapiens
  misc_RNA (1)...(19): siRNA sense strand
gggauuaccaguccaaguu

SEQ ID NO: 1173283 - RNA, 19 nt, Homo sapiens
  misc_RNA (1)...(19): siRNA sense strand
aacaauaucuguggaguug

SEQ ID NO: 1173284 - RNA, 19 nt, Homo sapiens
  misc_RNA (1)...(19): siRNA sense strand
caauaucuguggaguugga

SEQ ID NO: 1173285 - RNA, 19 nt, Homo sapiens
  misc_RNA (1)...(19): siRNA sense strand
acagagacaucaaugagau

SEQ ID NO: 1173286 - RNA, 19 nt, Homo sapiens
  misc_RNA (1)...(19): siRNA sense strand
gcagugguaucugaucaau

SEQ ID NO: 1173287 - RNA, 19 nt, Homo sapiens
  misc_RNA (1)...(19): siRNA sense strand
aaagcauccuuaacaagaa

SEQ ID NO: 1173288 - RNA, 19 nt, Homo sapiens
  misc_RNA (1)...(19): siRNA sense strand
ugacugugcucaccuccaa

SEQ ID NO: 1173289 - RNA, 19 nt, Homo sapiens
  misc_RNA (1)...(19): siRNA sense strand
gcaacgaccccuauccuua

SEQ ID NO: 1173290 - RNA, 19 nt, Homo sapiens
  misc_RNA (1)...(19): siRNA sense strand
agggaaagguguuaccauu

SEQ ID NO: 1173291 - RNA, 19 nt, Homo sapiens
  misc_RNA (1)...(19): siRNA sense strand
caacuauaaugccgaagca

SEQ ID NO: 1173292 - RNA, 19 nt, Homo sapiens
  misc_RNA (1)...(19): siRNA sense strand
gacccgaugugcaggagaa

SEQ ID NO: 1173293 - RNA, 19 nt, Homo sapiens
  misc_RNA (1)...(19): siRNA sense strand
caacaugacuuccccuaug

SEQ ID NO: 1173294 - RNA, 19 nt, Homo sapiens
  misc_RNA (1)...(19): siRNA sense strand
gcaaguuggugcugacacu

SEQ ID NO: 1173295 - RNA, 19 nt, Homo sapiens
  misc_RNA (1)...(19): siRNA sense strand
gggucggccuggaauuuaa

SEQ ID NO: 1173296 - RNA, 19 nt, Homo sapiens
  misc_RNA (1)...(19): siRNA sense strand
gagaucgacaucaacauga

SEQ ID NO: 1173297 - RNA, 19 nt, Homo sapiens
  misc_RNA (1)...(19): siRNA sense strand
gaaagaggagcuggaggaa

SEQ ID NO: 1173298 - RNA, 19 nt, Homo sapiens
  misc_RNA (1)...(19): siRNA sense strand
gacaaguggccuuucauga

SEQ ID NO: 1173299 - RNA, 19 nt, Homo sapiens
  misc_RNA (1)...(19): siRNA sense strand
gcacuccuggccuugauuu

SEQ ID NO: 1173300 - RNA, 19 nt, Homo sapiens
  misc_RNA (1)...(19): siRNA sense strand
cgaccggucuucacgaauc

SEQ ID NO: 1173301 - RNA, 19 nt, Homo sapiens
  misc_RNA (1)...(19): siRNA sense strand
caacaugaacgauccucuu

SEQ ID NO: 1173302 - RNA, 19 nt, Homo sapiens
  misc_RNA (1)...(19): siRNA sense strand
gaauuuaaucaccucuuug

SEQ ID NO: 1173303 - RNA, 19 nt, Homo sapiens
  misc_RNA (1)...(19): siRNA sense strand
gggaaagguguuaccauug

SEQ ID NO: 1173304 - RNA, 19 nt, Homo sapiens
  misc_RNA (1)...(19): siRNA sense strand
ggucaacgcaaccagaaga

SEQ ID NO: 1173305 - RNA, 19 nt, Homo sapiens
  misc_RNA (1)...(19): siRNA sense strand
aauuauggaugaugggauu

SEQ ID NO: 1173306 - RNA, 19 nt, Homo sapiens
  misc_RNA (1)...(19): siRNA sense strand
gaaggucuguaccacuuuu

SEQ ID NO: 1173307 - RNA, 19 nt, Homo sapiens
  misc_RNA (1)...(19): siRNA sense strand
gaagaggagaccugaacau

SEQ ID NO: 1173308 - RNA, 19 nt, Homo sapiens
  misc_RNA (1)...(19): siRNA sense strand
gaccaucuccaucaacuca

SEQ ID NO: 1173309 - RNA, 19 nt, Homo sapiens
  misc_RNA (1)...(19): siRNA sense strand
cugaaggucuguaccacuu

SEQ ID NO: 1173310 - RNA, 19 nt, Homo sapiens
  misc_RNA (1)...(19): siRNA sense strand
ccucuucugugucaugguu

SEQ ID NO: 1173311 - RNA, 19 nt, Homo sapiens
  misc_RNA (1)...(19): siRNA sense strand
caacaauaucuguggaguu

SEQ ID NO: 1173312 - RNA, 19 nt, Homo sapiens
  misc_RNA (1)...(19): siRNA sense strand
acacagaugacugguuuaa

SEQ ID NO: 1173313 - RNA, 19 nt, Homo sapiens
  misc_RNA (1)...(19): siRNA sense strand
uacggcaacugcacucuga

SEQ ID NO: 1173314 - RNA, 19 nt, Homo sapiens
  misc_RNA (1)...(19): siRNA sense strand
gaguuggaguagcauacaa

SEQ ID NO: 1173315 - RNA, 19 nt, Homo sapiens
  misc_RNA (1)...(19): siRNA sense strand
ugaaaagcauccuuaacaa

SEQ ID NO: 1173316 - RNA, 19 nt, Homo sapiens
  misc_RNA (1)...(19): siRNA sense strand
ggaggaagagcuggacgaa

SEQ ID NO: 1173317 - RNA, 19 nt, Homo sapiens
  misc_RNA (1)...(19): siRNA sense strand
aaaccgugccugagagauu

SEQ ID NO: 1173318 - RNA, 19 nt, Homo sapiens
  misc_RNA (1)...(19): siRNA sense strand
gaucaauacugggcaagcu

SEQ ID NO: 1173319 - RNA, 19 nt, Homo sapiens
  misc_RNA (1)...(19): siRNA sense strand
gacaaagcucgccaaguug

SEQ ID NO: 1173320 - RNA, 19 nt, Homo sapiens
  misc_RNA (1)...(19): siRNA sense strand
uuacaaagcagugguaucu

SEQ ID NO: 1173321 - RNA, 19 nt, Homo sapiens
  misc_RNA (1)...(19): siRNA sense strand
gagagaagccugaaaagca

SEQ ID NO: 1173322 - RNA, 19 nt, Homo sapiens
  misc_RNA (1)...(19): siRNA sense strand
ggaccagccauucaugaca

SEQ ID NO: 1173323 - RNA, 19 nt, Homo sapiens
  misc_RNA (1)...(19): siRNA sense strand
ggauuaccaguccaaguug

SEQ ID NO: 1173324 - RNA, 19 nt, Homo sapiens
  misc_RNA (1)...(19): siRNA sense strand
caaggugggcuuugacaag

SEQ ID NO: 1173325 - RNA, 19 nt, Homo sapiens
  misc_RNA (1)...(19): siRNA sense strand
gaggcuaaccugggucuga

SEQ ID NO: 1173326 - RNA, 19 nt, Homo sapiens
  misc_RNA (1)...(19): siRNA sense strand
gcaaaggccaagagaagac

SEQ ID NO: 1173327 - RNA, 19 nt, Homo sapiens
  misc_RNA (1)...(19): siRNA sense strand
gaccggucuucacgaauca

SEQ ID NO: 1173328 - RNA, 19 nt, Homo sapiens
  misc_RNA (1)...(19): siRNA sense strand
ggguuccucuucuguguca

SEQ ID NO: 1173329 - RNA, 19 nt, Homo sapiens
  misc_RNA (1)...(19): siRNA sense strand
gcaaaggcagcaucuacgu

SEQ ID NO: 1173330 - RNA, 19 nt, Homo sapiens
  misc_RNA (1)...(19): siRNA sense strand
ugccacagcugauugacau

SEQ ID NO: 1173331 - RNA, 19 nt, Homo sapiens
  misc_RNA (1)...(19): siRNA sense strand
ugagaucgacaucaacaug

SEQ ID NO: 1173332 - RNA, 19 nt, Homo sapiens
  misc_RNA (1)...(19): siRNA sense strand
agaucgacaucaacaugaa

SEQ ID NO: 1173333 - RNA, 19 nt, Homo sapiens
  misc_RNA (1)...(19): siRNA sense strand
cacuggcucuggaggcuaa

SEQ ID NO: 1173334 - RNA, 19 nt, Homo sapiens
  misc_RNA (1)...(19): siRNA sense strand
aagcagugguaucugauca

SEQ ID NO: 1173335 - RNA, 19 nt, Homo sapiens
  misc_RNA (1)...(19): siRNA sense strand
ugacaaguggccuuucaug

SEQ ID NO: 1173336 - RNA, 19 nt, Homo sapiens
  misc_RNA (1)...(19): siRNA sense strand
gagcauguccaggcuguca

SEQ ID NO: 1173337 - RNA, 19 nt, Homo sapiens
  misc_RNA (1)...(19): siRNA sense strand
ucgccaaguugcagcagaa

SEQ ID NO: 1173338 - RNA, 19 nt, Homo sapiens
  misc_RNA (1)...(19): siRNA sense strand
caagggaugacgacuccaa

SEQ ID NO: 1173339 - RNA, 19 nt, Homo sapiens
  misc_RNA (1)...(19): siRNA sense strand
cacagcugauugacaucua

SEQ ID NO: 1173340 - RNA, 19 nt, Homo sapiens
  misc_RNA (1)...(19): siRNA sense strand
aggaaggauuugaccgaaa

SEQ ID NO: 1173341 - RNA, 19 nt, Homo sapiens
  misc_RNA (1)...(19): siRNA sense strand
gaaggaguggacccugaug

SEQ ID NO: 1173342 - RNA, 19 nt, Homo sapiens
  misc_RNA (1)...(19): siRNA sense strand
cuccuggccuugauuugaa

SEQ ID NO: 1173343 - RNA, 19 nt, Homo sapiens
  misc_RNA (1)...(19): siRNA sense strand
ggccuuucaugaccacuca

SEQ ID NO: 1173344 - RNA, 19 nt, Homo sapiens
  misc_RNA (1)...(19): siRNA sense strand
aacaugaacgauccucuuu

SEQ ID NO: 1173345 - RNA, 19 nt, Homo sapiens
  misc_RNA (1)...(19): siRNA sense strand
agaggagaccugaacauca

SEQ ID NO: 1173346 - RNA, 19 nt, Homo sapiens
  misc_RNA (1)...(19): siRNA sense strand
uuacagagacaucaaugag

SEQ ID NO: 1173347 - RNA, 19 nt, Homo sapiens
  misc_RNA (1)...(19): siRNA sense strand
gaaaagcauccuuaacaag

SEQ ID NO: 1173348 - RNA, 19 nt, Homo sapiens
  misc_RNA (1)...(19): siRNA sense strand
cagaagaggagaccugaac

SEQ ID NO: 1173349 - RNA, 19 nt, Homo sapiens
  misc_RNA (1)...(19): siRNA sense strand
ucacaauggccuugcaaag

SEQ ID NO: 1173350 - RNA, 19 nt, Homo sapiens
  misc_RNA (1)...(19): siRNA sense strand
guuacagagacaucaauga

SEQ ID NO: 1173351 - RNA, 19 nt, Homo sapiens
  misc_RNA (1)...(19): siRNA sense strand
acuccaaggugggcuuuga

SEQ ID NO: 1173352 - RNA, 19 nt, Homo sapiens
  misc_RNA (1)...(19): siRNA sense strand
ccaaacggaaccagcuuca

SEQ ID NO: 1173353 - RNA, 19 nt, Homo sapiens
  misc_RNA (1)...(19): siRNA sense strand
cauaugccacagcugauug

SEQ ID NO: 1173354 - RNA, 19 nt, Homo sapiens
  misc_RNA (1)...(19): siRNA sense strand
auaaugccgaagcaaguua

SEQ ID NO: 1173355 - RNA, 19 nt, Homo sapiens
  misc_RNA (1)...(19): siRNA sense strand
gcugggauacacagggaaa

SEQ ID NO: 1173356 - RNA, 19 nt, Homo sapiens
  misc_RNA (1)...(19): siRNA sense strand
caaagcagugguaucugau

SEQ ID NO: 1173357 - RNA, 19 nt, Homo sapiens
  misc_RNA (1)...(19): siRNA sense strand
aaaagcauccuuaacaaga

SEQ ID NO: 1173358 - RNA, 19 nt, Homo sapiens
  misc_RNA (1)...(19): siRNA sense strand
uggcaaccacagauuugua

SEQ ID NO: 1173359 - RNA, 19 nt, Homo sapiens
  misc_RNA (1)...(19): siRNA sense strand
augaugggauugacuaucu

SEQ ID NO: 1173360 - RNA, 19 nt, Homo sapiens
  misc_RNA (1)...(19): siRNA sense strand
ggaguuggaguagcauaca

SEQ ID NO: 1173361 - RNA, 19 nt, Homo sapiens
  misc_RNA (1)...(19): siRNA sense strand
gagguuacagagacaucaa

SEQ ID NO: 1173362 - RNA, 19 nt, Homo sapiens
  misc_RNA (1)...(19): siRNA sense strand
ggcuacgccuccagcaugu

SEQ ID NO: 1173363 - RNA, 19 nt, Homo sapiens
  misc_RNA (1)...(19): siRNA sense strand
gacgcagccuacaccacaa

SEQ ID NO: 1173364 - RNA, 19 nt, Homo sapiens
  misc_RNA (1)...(19): siRNA sense strand
uagcauacaacuccaaggu

SEQ ID NO: 1173365 - RNA, 19 nt, Homo sapiens
  misc_RNA (1)...(19): siRNA sense strand
ggauggcucuccacagaua

SEQ ID NO: 1173366 - RNA, 19 nt, Homo sapiens
  misc_RNA (1)...(19): siRNA sense strand
gauagaaacuccugcuaau

SEQ ID NO: 1173367 - RNA, 19 nt, Homo sapiens
  misc_RNA (1)...(19): siRNA sense strand
ggacauuuauucccagcua

SEQ ID NO: 1173368 - RNA, 19 nt, Homo sapiens
  misc_RNA (1)...(19): siRNA sense strand
ccaagaagcccaaggauga

SEQ ID NO: 1173369 - RNA, 19 nt, Homo sapiens
  misc_RNA (1)...(19): siRNA sense strand
ggagaccacuggagagcua

SEQ ID NO: 1173370 - RNA, 19 nt, Homo sapiens
  misc_RNA (1)...(19): siRNA sense strand
gcucugcccuguucaagaa

SEQ ID NO: 1173371 - RNA, 19 nt, Homo sapiens
  misc_RNA (1)...(19): siRNA sense strand
ugaagaggauccagauuug

SEQ ID NO: 1173372 - RNA, 19 nt, Homo sapiens
  misc_RNA (1)...(19): siRNA sense strand
gcacuuggauuggugaaga

SEQ ID NO: 1173373 - RNA, 19 nt, Homo sapiens
  misc_RNA (1)...(19): siRNA sense strand
gcagaaagcacuggagaaa

SEQ ID NO: 1173374 - RNA, 19 nt, Homo sapiens
  misc_RNA (1)...(19): siRNA sense strand
cugcacagcuugauagaaa

SEQ ID NO: 1173375 - RNA, 19 nt, Homo sapiens
  misc_RNA (1)...(19): siRNA sense strand
agaaagcacuggagaaauc

SEQ ID NO: 1173376 - RNA, 19 nt, Homo sapiens
  misc_RNA (1)...(19): siRNA sense strand
cuacaagccugaacagaug

SEQ ID NO: 1173377 - RNA, 19 nt, Homo sapiens
  misc_RNA (1)...(19): siRNA sense strand
ccaaagaccuguccauucg

SEQ ID NO: 1173378 - RNA, 19 nt, Homo sapiens
  misc_RNA (1)...(19): siRNA sense strand
ggagaaaucaucaacaaca

SEQ ID NO: 1173379 - RNA, 19 nt, Homo sapiens
  misc_RNA (1)...(19): siRNA sense strand
caggauggcucuccacaga

SEQ ID NO: 1173380 - RNA, 19 nt, Homo sapiens
  misc_RNA (1)...(19): siRNA sense strand
ggaaagggaccaaccacuu

SEQ ID NO: 1173381 - RNA, 19 nt, Homo sapiens
  misc_RNA (1)...(19): siRNA sense strand
gaacaggaccucacuaagc

SEQ ID NO: 1173382 - RNA, 19 nt, Homo sapiens
  misc_RNA (1)...(19): siRNA sense strand
gugaaacucugaaccugaa

SEQ ID NO: 1173383 - RNA, 19 nt, Homo sapiens
  misc_RNA (1)...(19): siRNA sense strand
gaaagggaccaaccacuuc

SEQ ID NO: 1173384 - RNA, 19 nt, Homo sapiens
  misc_RNA (1)...(19): siRNA sense strand
ccaaagcccuagugcugaa

SEQ ID NO: 1173385 - RNA, 19 nt, Homo sapiens
  misc_RNA (1)...(19): siRNA sense strand
cuaccauggugccuucuua

SEQ ID NO: 1173386 - RNA, 19 nt, Homo sapiens
  misc_RNA (1)...(19): siRNA sense strand
gagaagaugugugaaacuc

SEQ ID NO: 1173387 - RNA, 19 nt, Homo sapiens
  misc_RNA (1)...(19): siRNA sense strand
gacaacagccucaguaugg

SEQ ID NO: 1173388 - RNA, 19 nt, Homo sapiens
  misc_RNA (1)...(19): siRNA sense strand
uagagaacauccagccauu

SEQ ID NO: 1173389 - RNA, 19 nt, Homo sapiens
  misc_RNA (1)...(19): siRNA sense strand
ggucgcaguucaacaagga

SEQ ID NO: 1173390 - RNA, 19 nt, Homo sapiens
  misc_RNA (1)...(19): siRNA sense strand
gcucagaugugaccauggu

SEQ ID NO: 1173391 - RNA, 19 nt, Homo sapiens
  misc_RNA (1)...(19): siRNA sense strand
cagaugagccugcccuuug

SEQ ID NO: 1173392 - RNA, 19 nt, Homo sapiens
  misc_RNA (1)...(19): siRNA sense strand
gaacccucgucaccaguug

SEQ ID NO: 1173393 - RNA, 19 nt, Homo sapiens
  misc_RNA (1)...(19): siRNA sense strand
gaacauccagccauucucu

SEQ ID NO: 1173394 - RNA, 19 nt, Homo sapiens
  misc_RNA (1)...(19): siRNA sense strand
ugaagcugguggccacuuu

SEQ ID NO: 1173395 - RNA, 19 nt, Homo sapiens
  misc_RNA (1)...(19): siRNA sense strand
aaagccugguggacauuua

SEQ ID NO: 1173396 - RNA, 19 nt, Homo sapiens
  misc_RNA (1)...(19): siRNA sense strand
gcggcucuaugucgacuuu

SEQ ID NO: 1173397 - RNA, 19 nt, Homo sapiens
  misc_RNA (1)...(19): siRNA sense strand
guuacuagccuucuucuca

SEQ ID NO: 1173398 - RNA, 19 nt, Homo sapiens
  misc_RNA (1)...(19): siRNA sense strand
gggccgacauggugacaga

SEQ ID NO: 1173399 - RNA, 19 nt, Homo sapiens
  misc_RNA (1)...(19): siRNA sense strand
gggaauggcgcaccguuug

SEQ ID NO: 1173400 - RNA, 19 nt, Homo sapiens
  misc_RNA (1)...(19): siRNA sense strand
ugauagaaacuccugcuaa

SEQ ID NO: 1173401 - RNA, 19 nt, Homo sapiens
  misc_RNA (1)...(19): siRNA sense strand
ggaucuugcucagcucaaa

SEQ ID NO: 1173402 - RNA, 19 nt, Homo sapiens
  misc_RNA (1)...(19): siRNA sense strand
guacguuacuagccuucuu

SEQ ID NO: 1173403 - RNA, 19 nt, Homo sapiens
  misc_RNA (1)...(19): siRNA sense strand
ggaauggcgcaccguuuga

SEQ ID NO: 1173404 - RNA, 19 nt, Homo sapiens
  misc_RNA (1)...(19): siRNA sense strand
ggaagggcacugagucugu

SEQ ID NO: 1173405 - RNA, 19 nt, Homo sapiens
  misc_RNA (1)...(19): siRNA sense strand
cuggagaaaucaucaacaa

SEQ ID NO: 1173406 - RNA, 19 nt, Homo sapiens
  misc_RNA (1)...(19): siRNA sense strand
ggagcaccaucuugcaaca

SEQ ID NO: 1173407 - RNA, 19 nt, Homo sapiens
  misc_RNA (1)...(19): siRNA sense strand
uuacuagccuucuucucaa

SEQ ID NO: 1173408 - RNA, 19 nt, Homo sapiens
  misc_RNA (1)...(19): siRNA sense strand
cugaagaggauccagauuu

SEQ ID NO: 1173409 - RNA, 19 nt, Homo sapiens
  misc_RNA (1)...(19): siRNA sense strand
gugaaagccugguggacau

SEQ ID NO: 1173410 - RNA, 19 nt, Homo sapiens
  misc_RNA (1)...(19): siRNA sense strand
ccauggugccuucuuauga

SEQ ID NO: 1173411 - RNA, 19 nt, Homo sapiens
  misc_RNA (1)...(19): siRNA sense strand
gggagaagaugugugaaac

SEQ ID NO: 1173412 - RNA, 19 nt, Homo sapiens
  misc_RNA (1)...(19): siRNA sense strand
ugaagacucagaccaaguu

SEQ ID NO: 1173413 - RNA, 19 nt, Homo sapiens
  misc_RNA (1)...(19): siRNA sense strand
gaaagccugguggacauuu

SEQ ID NO: 1173414 - RNA, 19 nt, Homo sapiens
  misc_RNA (1)...(19): siRNA sense strand
gccaaagaccuguccauuc

SEQ ID NO: 1173415 - RNA, 19 nt, Homo sapiens
  misc_RNA (1)...(19): siRNA sense strand
uuggauuggugaagacaua

SEQ ID NO: 1173416 - RNA, 19 nt, Homo sapiens
  misc_RNA (1)...(19): siRNA sense strand
agaugagccugcccuuuga

SEQ ID NO: 1173417 - RNA, 19 nt, Homo sapiens
  misc_RNA (1)...(19): siRNA sense strand
aagaaucagucaacguguu

SEQ ID NO: 1173418 - RNA, 19 nt, Homo sapiens
  misc_RNA (1)...(19): siRNA sense strand
uagaaacuccugcuaaugg

SEQ ID NO: 1173419 - RNA, 19 nt, Homo sapiens
  misc_RNA (1)...(19): siRNA sense strand
ccucagggcacuuggauug

SEQ ID NO: 1173420 - RNA, 19 nt, Homo sapiens
  misc_RNA (1)...(19): siRNA sense strand
gggacaaugccuucucuga

SEQ ID NO: 1173421 - RNA, 19 nt, Homo sapiens
  misc_RNA (1)...(19): siRNA sense strand
gagaaaucaucaacaacac

SEQ ID NO: 1173422 - RNA, 19 nt, Homo sapiens
  misc_RNA (1)...(19): siRNA sense strand
cuagugcccuacuuucaga

SEQ ID NO: 1173423 - RNA, 19 nt, Homo sapiens
  misc_RNA (1)...(19): siRNA sense strand
gguggccacuuucagacaa

SEQ ID NO: 1173424 - RNA, 19 nt, Homo sapiens
  misc_RNA (1)...(19): siRNA sense strand
caacaccugcggcaucuuc

SEQ ID NO: 1173425 - RNA, 19 nt, Homo sapiens
  misc_RNA (1)...(19): siRNA sense strand
gcaucaccauugcccaugu

SEQ ID NO: 1173426 - RNA, 19 nt, Homo sapiens
  misc_RNA (1)...(19): siRNA sense strand
gcugaucauuggcuucauc

SEQ ID NO: 1173427 - RNA, 19 nt, Homo sapiens
  misc_RNA (1)...(19): siRNA sense strand
caucguccauggcaaccaa

SEQ ID NO: 1173428 - RNA, 19 nt, Homo sapiens
  misc_RNA (1)...(19): siRNA sense strand
ucugccagcuucacacuug

SEQ ID NO: 1173429 - RNA, 19 nt, Homo sapiens
  misc_RNA (1)...(19): siRNA sense strand
gaaagcacuggagaaauca

SEQ ID NO: 1173430 - RNA, 19 nt, Homo sapiens
  misc_RNA (1)...(19): siRNA sense strand
cuugagagcauauaucaga

SEQ ID NO: 1173431 - RNA, 19 nt, Homo sapiens
  misc_RNA (1)...(19): siRNA sense strand
gccauucucugccaaagac

SEQ ID NO: 1173432 - RNA, 19 nt, Homo sapiens
  misc_RNA (1)...(19): siRNA sense strand
ggccguggcuucaccuuuu

SEQ ID NO: 1173433 - RNA, 19 nt, Homo sapiens
  misc_RNA (1)...(19): siRNA sense strand
gcccaaggaugaggcuuuc

SEQ ID NO: 1173434 - RNA, 19 nt, Homo sapiens
  misc_RNA (1)...(19): siRNA sense strand
cuagccuucuucucaauga

SEQ ID NO: 1173435 - RNA, 19 nt, Homo sapiens
  misc_RNA (1)...(19): siRNA sense strand
gaagcaggaagaacucaag

SEQ ID NO: 1173436 - RNA, 19 nt, Homo sapiens
  misc_RNA (1)...(19): siRNA sense strand
ccaagacaacaaugccaaa

SEQ ID NO: 1173437 - RNA, 19 nt, Homo sapiens
  misc_RNA (1)...(19): siRNA sense strand
aaucugggaucucaauguc

SEQ ID NO: 1173438 - RNA, 19 nt, Homo sapiens
  misc_RNA (1)...(19): siRNA sense strand
cugaacagauggguaagga

SEQ ID NO: 1173439 - RNA, 19 nt, Homo sapiens
  misc_RNA (1)...(19): siRNA sense strand
gcugguggccacuuucaga

SEQ ID NO: 1173440 - RNA, 19 nt, Homo sapiens
  misc_RNA (1)...(19): siRNA sense strand
cuucagcgacucagagauu

SEQ ID NO: 1173441 - RNA, 19 nt, Homo sapiens
  misc_RNA (1)...(19): siRNA sense strand
ugacaacagccucaguaug

SEQ ID NO: 1173442 - RNA, 19 nt, Homo sapiens
  misc_RNA (1)...(19): siRNA sense strand
acacugugcccuuggagaa

SEQ ID NO: 1173443 - RNA, 19 nt, Homo sapiens
  misc_RNA (1)...(19): siRNA sense strand
cugcagcccucccacuaug

SEQ ID NO: 1173444 - RNA, 19 nt, Homo sapiens
  misc_RNA (1)...(19): siRNA sense strand
cugaacaggaccucacuaa

SEQ ID NO: 1173445 - RNA, 19 nt, Homo sapiens
  misc_RNA (1)...(19): siRNA sense strand
aaugacaacagccucagua

SEQ ID NO: 1173446 - RNA, 19 nt, Homo sapiens
  misc_RNA (1)...(19): siRNA sense strand
ggaagcaggaagaacucaa

SEQ ID NO: 1173447 - RNA, 19 nt, Homo sapiens
  misc_RNA (1)...(19): siRNA sense strand
cagcacccuugagagcaua

SEQ ID NO: 1173448 - RNA, 19 nt, Homo sapiens
  misc_RNA (1)...(19): siRNA sense strand
caagaugaccguggaaagg

SEQ ID NO: 1173449 - RNA, 19 nt, Homo sapiens
  misc_RNA (1)...(19): siRNA sense strand
cugcugcucugcccuguuc

SEQ ID NO: 1173450 - RNA, 19 nt, Homo sapiens
  misc_RNA (1)...(19): siRNA sense strand
gcacuggagaaaucaucaa

SEQ ID NO: 1173451 - RNA, 19 nt, Homo sapiens
  misc_RNA (1)...(19): siRNA sense strand
gaagaggauccagauuugg

SEQ ID NO: 1173452 - RNA, 19 nt, Homo sapiens
  misc_RNA (1)...(19): siRNA sense strand
ccugggagaagauguguga

SEQ ID NO: 1173453 - RNA, 19 nt, Homo sapiens
  misc_RNA (1)...(19): siRNA sense strand
ggauuggugaagacauauu

SEQ ID NO: 1173454 - RNA, 19 nt, Homo sapiens
  misc_RNA (1)...(19): siRNA sense strand
cacaucagcacccuugaga

SEQ ID NO: 1173455 - RNA, 19 nt, Homo sapiens
  misc_RNA (1)...(19): siRNA sense strand
gagcggaagggcacugagu

SEQ ID NO: 1173456 - RNA, 19 nt, Homo sapiens
  misc_RNA (1)...(19): siRNA sense strand
aacaggaccucacuaagcu

SEQ ID NO: 1173457 - RNA, 19 nt, Homo sapiens
  misc_RNA (1)...(19): siRNA sense strand
cauggugccuucuuaugac

SEQ ID NO: 1173458 - RNA, 19 nt, Homo sapiens
  misc_RNA (1)...(19): siRNA sense strand
ggagaagaugugugaaacu

SEQ ID NO: 1173459 - RNA, 19 nt, Homo sapiens
  misc_RNA (1)...(19): siRNA sense strand
acaacagccucaguaugga

SEQ ID NO: 1173460 - RNA, 19 nt, Homo sapiens
  misc_RNA (1)...(19): siRNA sense strand
ggaccucacuaagcuucuc

SEQ ID NO: 1173461 - RNA, 19 nt, Homo sapiens
  misc_RNA (1)...(19): siRNA sense strand
gauuggugaagacauauuc

SEQ ID NO: 1173462 - RNA, 19 nt, Homo sapiens
  misc_RNA (1)...(19): siRNA sense strand
ccagaugagccugcccuuu

SEQ ID NO: 1173463 - RNA, 19 nt, Homo sapiens
  misc_RNA (1)...(19): siRNA sense strand
cagcuuggcccagauaugg

SEQ ID NO: 1173464 - RNA, 19 nt, Homo sapiens
  misc_RNA (1)...(19): siRNA sense strand
gcagcuuggcccagauaug

SEQ ID NO: 1173465 - RNA, 19 nt, Homo sapiens
  misc_RNA (1)...(19): siRNA sense strand
aaagugagcugguacagaa

SEQ ID NO: 1173466 - RNA, 19 nt, Homo sapiens
  misc_RNA (1)...(19): siRNA sense strand
gcacuaaauuucucagucu

SEQ ID NO: 1173467 - RNA, 19 nt, Homo sapiens
  misc_RNA (1)...(19): siRNA sense strand
gaagauagaggcagaacug

SEQ ID NO: 1173468 - RNA, 19 nt, Homo sapiens
  misc_RNA (1)...(19): siRNA sense strand
gaaaggagauuauuuuagg

SEQ ID NO: 1173469 - RNA, 19 nt, Homo sapiens
  misc_RNA (1)...(19): siRNA sense strand
aaacagagaggaaugagaa

SEQ ID NO: 1173470 - RNA, 19 nt, Homo sapiens
  misc_RNA (1)...(19): siRNA sense strand
gcacucugaucaugcaguu

SEQ ID NO: 1173471 - RNA, 19 nt, Homo sapiens
  misc_RNA (1)...(19): siRNA sense strand
ggcaugaacucuccaacga

SEQ ID NO: 1173472 - RNA, 19 nt, Homo sapiens
  misc_RNA (1)...(19): siRNA sense strand
uggauacgcugaaugaaga

SEQ ID NO: 1173473 - RNA, 19 nt, Homo sapiens
  misc_RNA (1)...(19): siRNA sense strand
cuacacaaccagaaaguaa

SEQ ID NO: 1173474 - RNA, 19 nt, Homo sapiens
  misc_RNA (1)...(19): siRNA sense strand
guaagguguucuacuugaa

SEQ ID NO: 1173475 - RNA, 19 nt, Homo sapiens
  misc_RNA (1)...(19): siRNA sense strand
ccagcaggcuuaccaggaa

SEQ ID NO: 1173476 - RNA, 19 nt, Homo sapiens
  misc_RNA (1)...(19): siRNA sense strand
ggcauuugaugaagcaauu

SEQ ID NO: 1173477 - RNA, 19 nt, Homo sapiens
  misc_RNA (1)...(19): siRNA sense strand
auucuaaacucuccugaaa

SEQ ID NO: 1173478 - RNA, 19 nt, Homo sapiens
  misc_RNA (1)...(19): siRNA sense strand
uuagguaucuuucugaagu

SEQ ID NO: 1173479 - RNA, 19 nt, Homo sapiens
  misc_RNA (1)...(19): siRNA sense strand
gcaaagaguaccgugagaa

SEQ ID NO: 1173480 - RNA, 19 nt, Homo sapiens
  misc_RNA (1)...(19): siRNA sense strand
agacagcacucugaucaug

SEQ ID NO: 1173481 - RNA, 19 nt, Homo sapiens
  misc_RNA (1)...(19): siRNA sense strand
gaaguggcaucuggagaca

SEQ ID NO: 1173482 - RNA, 19 nt, Homo sapiens
  misc_RNA (1)...(19): siRNA sense strand
cgugucaucuccagcauug

SEQ ID NO: 1173483 - RNA, 19 nt, Homo sapiens
  misc_RNA (1)...(19): siRNA sense strand
aaagacagcacucugauca

SEQ ID NO: 1173484 - RNA, 19 nt, Homo sapiens
  misc_RNA (1)...(19): siRNA sense strand
uauaaagacagcacucuga

SEQ ID NO: 1173485 - RNA, 19 nt, Homo sapiens
  misc_RNA (1)...(19): siRNA sense strand
agaaaucugcucucuguug

SEQ ID NO: 1173486 - RNA, 19 nt, Homo sapiens
  misc_RNA (1)...(19): siRNA sense strand
agaguaccgugagaagaua

SEQ ID NO: 1173487 - RNA, 19 nt, Homo sapiens
  misc_RNA (1)...(19): siRNA sense strand
ggauaaaagugagcuggua

SEQ ID NO: 1173488 - RNA, 19 nt, Homo sapiens
  misc_RNA (1)...(19): siRNA sense strand
ugaaggcagucacagaaca

SEQ ID NO: 1173489 - RNA, 19 nt, Homo sapiens
  misc_RNA (1)...(19): siRNA sense strand
cgaacucccagcaggcuua

SEQ ID NO: 1173490 - RNA, 19 nt, Homo sapiens
  misc_RNA (1)...(19): siRNA sense strand
ggcaaagaguaccgugaga

SEQ ID NO: 1173491 - RNA, 19 nt, Homo sapiens
  misc_RNA (1)...(19): siRNA sense strand
gcaguuacuuagggacaau

SEQ ID NO: 1173492 - RNA, 19 nt, Homo sapiens
  misc_RNA (1)...(19): siRNA sense strand
acuaugagauucuaaacuc

SEQ ID NO: 1173493 - RNA, 19 nt, Homo sapiens
  misc_RNA (1)...(19): siRNA sense strand
caugaaggcagucacagaa

SEQ ID NO: 1173494 - RNA, 19 nt, Homo sapiens
  misc_RNA (1)...(19): siRNA sense strand
gcagaugggcaaagaguac

SEQ ID NO: 1173495 - RNA, 19 nt, Homo sapiens
  misc_RNA (1)...(19): siRNA sense strand
cagagaggaaugagaagaa

SEQ ID NO: 1173496 - RNA, 19 nt, Homo sapiens
  misc_RNA (1)...(19): siRNA sense strand
uaagguguucuacuugaaa

SEQ ID NO: 1173497 - RNA, 19 nt, Homo sapiens
  misc_RNA (1)...(19): siRNA sense strand
gcaugaacucuccaacgaa

SEQ ID NO: 1173498 - RNA, 19 nt, Homo sapiens
  misc_RNA (1)...(19): siRNA sense strand
ugaauuggauacgcugaau

SEQ ID NO: 1173499 - RNA, 19 nt, Homo sapiens
  misc_RNA (1)...(19): siRNA sense strand
caaagaguaccgugagaag

SEQ ID NO: 1173500 - RNA, 19 nt, Homo sapiens
  misc_RNA (1)...(19): siRNA sense strand
caacgaagagagaaaucug

SEQ ID NO: 1173501 - RNA, 19 nt, Homo sapiens
  misc_RNA (1)...(19): siRNA sense strand
uggagcuguuggacaaaua

SEQ ID NO: 1173502 - RNA, 19 nt, Homo sapiens
  misc_RNA (1)...(19): siRNA sense strand
uaucuuauucccaaugcua

SEQ ID NO: 1173503 - RNA, 19 nt, Homo sapiens
  misc_RNA (1)...(19): siRNA sense strand
ggagacaacaaacaaacca

SEQ ID NO: 1173504 - RNA, 19 nt, Homo sapiens
  misc_RNA (1)...(19): siRNA sense strand
gcuacacaaccagaaagua

SEQ ID NO: 1173505 - RNA, 19 nt, Homo sapiens
  misc_RNA (1)...(19): siRNA sense strand
gcauugagcagaaaacaga

SEQ ID NO: 1173506 - RNA, 19 nt, Homo sapiens
  misc_RNA (1)...(19): siRNA sense strand
ggagcuguuggacaaauau

SEQ ID NO: 1173507 - RNA, 19 nt, Homo sapiens
  misc_RNA (1)...(19): siRNA sense strand
cugaucaugcaguuacuua

SEQ ID NO: 1173508 - RNA, 19 nt, Homo sapiens
  misc_RNA (1)...(19): siRNA sense strand
gaucaugcaguuacuuagg

SEQ ID NO: 1173509 - RNA, 19 nt, Homo sapiens
  misc_RNA (1)...(19): siRNA sense strand
ucuguugccuacaagaaug

SEQ ID NO: 1173510 - RNA, 19 nt, Homo sapiens
  misc_RNA (1)...(19): siRNA sense strand
gaauuggauacgcugaaug

SEQ ID NO: 1173511 - RNA, 19 nt, Homo sapiens
  misc_RNA (1)...(19): siRNA sense strand
gaaagaaaugcagccuaca

SEQ ID NO: 1173512 - RNA, 19 nt, Homo sapiens
  misc_RNA (1)...(19): siRNA sense strand
aaaccacugugucgaacuc

SEQ ID NO: 1173513 - RNA, 19 nt, Homo sapiens
  misc_RNA (1)...(19): siRNA sense strand
aagaguaccgugagaagau

SEQ ID NO: 1173514 - RNA, 19 nt, Homo sapiens
  misc_RNA (1)...(19): siRNA sense strand
ccaugaaggcagucacaga

SEQ ID NO: 1173515 - RNA, 19 nt, Homo sapiens
  misc_RNA (1)...(19): siRNA sense strand
aauuggauacgcugaauga

SEQ ID NO: 1173516 - RNA, 19 nt, Homo sapiens
  misc_RNA (1)...(19): siRNA sense strand
gucuuggucuggcacuaaa

SEQ ID NO: 1173517 - RNA, 19 nt, Homo sapiens
  misc_RNA (1)...(19): siRNA sense strand
uuacuuagggacaaucuca

SEQ ID NO: 1173518 - RNA, 19 nt, Homo sapiens
  misc_RNA (1)...(19): siRNA sense strand
cagcagaugggcaaagagu

SEQ ID NO: 1173519 - RNA, 19 nt, Homo sapiens
  misc_RNA (1)...(19): siRNA sense strand
uaaagacagcacucugauc

SEQ ID NO: 1173520 - RNA, 19 nt, Homo sapiens
  misc_RNA (1)...(19): siRNA sense strand
gauucuaaacucuccugaa

SEQ ID NO: 1173521 - RNA, 19 nt, Homo sapiens
  misc_RNA (1)...(19): siRNA sense strand
ggucuggcacuaaauuucu

SEQ ID NO: 1173522 - RNA, 19 nt, Homo sapiens
  misc_RNA (1)...(19): siRNA sense strand
gcuguuggacaaauaucuu

SEQ ID NO: 1173523 - RNA, 19 nt, Homo sapiens
  misc_RNA (1)...(19): siRNA sense strand
uaccaggaagcauuugaaa

SEQ ID NO: 1173524 - RNA, 19 nt, Homo sapiens
  misc_RNA (1)...(19): siRNA sense strand
agagaggaaugagaagaag

SEQ ID NO: 1173525 - RNA, 19 nt, Homo sapiens
  misc_RNA (1)...(19): siRNA sense strand
gaaggcagucacagaacag

SEQ ID NO: 1173526 - RNA, 19 nt, Homo sapiens
  misc_RNA (1)...(19): siRNA sense strand
ucuaaacucuccugaaaag

SEQ ID NO: 1173527 - RNA, 19 nt, Homo sapiens
  misc_RNA (1)...(19): siRNA sense strand
ucuccagcauugagcagaa

SEQ ID NO: 1173528 - RNA, 19 nt, Homo sapiens
  misc_RNA (1)...(19): siRNA sense strand
cacuaaauuucucagucuu

SEQ ID NO: 1173529 - RNA, 19 nt, Homo sapiens
  misc_RNA (1)...(19): siRNA sense strand
aaagaguaccgugagaaga

SEQ ID NO: 1173530 - RNA, 19 nt, Homo sapiens
  misc_RNA (1)...(19): siRNA sense strand
acagcacucugaucaugca

SEQ ID NO: 1173531 - RNA, 19 nt, Homo sapiens
  misc_RNA (1)...(19): siRNA sense strand
cagccuacacacccaauuc

SEQ ID NO: 1173532 - RNA, 19 nt, Homo sapiens
  misc_RNA (1)...(19): siRNA sense strand
aaaccagggagacgaagga

SEQ ID NO: 1173533 - RNA, 19 nt, Homo sapiens
  misc_RNA (1)...(19): siRNA sense strand
ggaaaaccagggagacgaa

SEQ ID NO: 1173534 - RNA, 19 nt, Homo sapiens
  misc_RNA (1)...(19): siRNA sense strand
acacacccaauucgucuug

SEQ ID NO: 1173535 - RNA, 19 nt, Homo sapiens
  misc_RNA (1)...(19): siRNA sense strand
aaagugagcugguacagaa

SEQ ID NO: 1173536 - RNA, 19 nt, Homo sapiens
  misc_RNA (1)...(19): siRNA sense strand
gcacuaaauuucucagucu

SEQ ID NO: 1173537 - RNA, 19 nt, Homo sapiens
  misc_RNA (1)...(19): siRNA sense strand
gaagauagaggcagaacug

SEQ ID NO: 1173538 - RNA, 19 nt, Homo sapiens
  misc_RNA (1)...(19): siRNA sense strand
gaaaggagauuauuuuagg

SEQ ID NO: 1173539 - RNA, 19 nt, Homo sapiens
  misc_RNA (1)...(19): siRNA sense strand
aaacagagaggaaugagaa

SEQ ID NO: 1173540 - RNA, 19 nt, Homo sapiens
  misc_RNA (1)...(19): siRNA sense strand
gcacucugaucaugcaguu

SEQ ID NO: 1173541 - RNA, 19 nt, Homo sapiens
  misc_RNA (1)...(19): siRNA sense strand
ggcaugaacucuccaacga

SEQ ID NO: 1173542 - RNA, 19 nt, Homo sapiens
  misc_RNA (1)...(19): siRNA sense strand
uggauacgcugaaugaaga

SEQ ID NO: 1173543 - RNA, 19 nt, Homo sapiens
  misc_RNA (1)...(19): siRNA sense strand
cuacacaaccagaaaguaa

SEQ ID NO: 1173544 - RNA, 19 nt, Homo sapiens
  misc_RNA (1)...(19): siRNA sense strand
guaagguguucuacuugaa

SEQ ID NO: 1173545 - RNA, 19 nt, Homo sapiens
  misc_RNA (1)...(19): siRNA sense strand
ccagcaggcuuaccaggaa

SEQ ID NO: 1173546 - RNA, 19 nt, Homo sapiens
  misc_RNA (1)...(19): siRNA sense strand
ggcauuugaugaagcaauu

SEQ ID NO: 1173547 - RNA, 19 nt, Homo sapiens
  misc_RNA (1)...(19): siRNA sense strand
auucuaaacucuccugaaa

SEQ ID NO: 1173548 - RNA, 19 nt, Homo sapiens
  misc_RNA (1)...(19): siRNA sense strand
uuagguaucuuucugaagu

SEQ ID NO: 1173549 - RNA, 19 nt, Homo sapiens
  misc_RNA (1)...(19): siRNA sense strand
gcaaagaguaccgugagaa

SEQ ID NO: 1173550 - RNA, 19 nt, Homo sapiens
  misc_RNA (1)...(19): siRNA sense strand
agacagcacucugaucaug

SEQ ID NO: 1173551 - RNA, 19 nt, Homo sapiens
  misc_RNA (1)...(19): siRNA sense strand
gaaguggcaucuggagaca

SEQ ID NO: 1173552 - RNA, 19 nt, Homo sapiens
  misc_RNA (1)...(19): siRNA sense strand
cgugucaucuccagcauug

SEQ ID NO: 1173553 - RNA, 19 nt, Homo sapiens
  misc_RNA (1)...(19): siRNA sense strand
aaagacagcacucugauca

SEQ ID NO: 1173554 - RNA, 19 nt, Homo sapiens
  misc_RNA (1)...(19): siRNA sense strand
uauaaagacagcacucuga

SEQ ID NO: 1173555 - RNA, 19 nt, Homo sapiens
  misc_RNA (1)...(19): siRNA sense strand
agaaaucugcucucuguug

SEQ ID NO: 1173556 - RNA, 19 nt, Homo sapiens
  misc_RNA (1)...(19): siRNA sense strand
agaguaccgugagaagaua

SEQ ID NO: 1173557 - RNA, 19 nt, Homo sapiens
  misc_RNA (1)...(19): siRNA sense strand
ggauaaaagugagcuggua

SEQ ID NO: 1173558 - RNA, 19 nt, Homo sapiens
  misc_RNA (1)...(19): siRNA sense strand
ugaaggcagucacagaaca

SEQ ID NO: 1173559 - RNA, 19 nt, Homo sapiens
  misc_RNA (1)...(19): siRNA sense strand
cgaacucccagcaggcuua

SEQ ID NO: 1173560 - RNA, 19 nt, Homo sapiens
  misc_RNA (1)...(19): siRNA sense strand
ggcaaagaguaccgugaga

SEQ ID NO: 1173561 - RNA, 19 nt, Homo sapiens
  misc_RNA (1)...(19): siRNA sense strand
gcaguuacuuagggacaau

SEQ ID NO: 1173562 - RNA, 19 nt, Homo sapiens
  misc_RNA (1)...(19): siRNA sense strand
acuaugagauucuaaacuc

SEQ ID NO: 1173563 - RNA, 19 nt, Homo sapiens
  misc_RNA (1)...(19): siRNA sense strand
caugaaggcagucacagaa

SEQ ID NO: 1173564 - RNA, 19 nt, Homo sapiens
  misc_RNA (1)...(19): siRNA sense strand
gcagaugggcaaagaguac

SEQ ID NO: 1173565 - RNA, 19 nt, Homo sapiens
  misc_RNA (1)...(19): siRNA sense strand
cagagaggaaugagaagaa

SEQ ID NO: 1173566 - RNA, 19 nt, Homo sapiens
  misc_RNA (1)...(19): siRNA sense strand
uaagguguucuacuugaaa

SEQ ID NO: 1173567 - RNA, 19 nt, Homo sapiens
  misc_RNA (1)...(19): siRNA sense strand
gcaugaacucuccaacgaa

SEQ ID NO: 1173568 - RNA, 19 nt, Homo sapiens
  misc_RNA (1)...(19): siRNA sense strand
ugaauuggauacgcugaau

SEQ ID NO: 1173569 - RNA, 19 nt, Homo sapiens
  misc_RNA (1)...(19): siRNA sense strand
caaagaguaccgugagaag

SEQ ID NO: 1173570 - RNA, 19 nt, Homo sapiens
  misc_RNA (1)...(19): siRNA sense strand
caacgaagagagaaaucug

SEQ ID NO: 1173571 - RNA, 19 nt, Homo sapiens
  misc_RNA (1)...(19): siRNA sense strand
uggagcuguuggacaaaua

SEQ ID NO: 1173572 - RNA, 19 nt, Homo sapiens
  misc_RNA (1)...(19): siRNA sense strand
uaucuuauucccaaugcua

SEQ ID NO: 1173573 - RNA, 19 nt, Homo sapiens
  misc_RNA (1)...(19): siRNA sense strand
ggagacaacaaacaaacca

SEQ ID NO: 1173574 - RNA, 19 nt, Homo sapiens
  misc_RNA (1)...(19): siRNA sense strand
gcuacacaaccagaaagua

SEQ ID NO: 1173575 - RNA, 19 nt, Homo sapiens
  misc_RNA (1)...(19): siRNA sense strand
gcauugagcagaaaacaga

SEQ ID NO: 1173576 - RNA, 19 nt, Homo sapiens
  misc_RNA (1)...(19): siRNA sense strand
ggagcuguuggacaaauau

SEQ ID NO: 1173577 - RNA, 19 nt, Homo sapiens
  misc_RNA (1)...(19): siRNA sense strand
cugaucaugcaguuacuua

SEQ ID NO: 1173578 - RNA, 19 nt, Homo sapiens
  misc_RNA (1)...(19): siRNA sense strand
gaucaugcaguuacuuagg

SEQ ID NO: 1173579 - RNA, 19 nt, Homo sapiens
  misc_RNA (1)...(19): siRNA sense strand
ucuguugccuacaagaaug

SEQ ID NO: 1173580 - RNA, 19 nt, Homo sapiens
  misc_RNA (1)...(19): siRNA sense strand
gaauuggauacgcugaaug

SEQ ID NO: 1173581 - RNA, 19 nt, Homo sapiens
  misc_RNA (1)...(19): siRNA sense strand
gaaagaaaugcagccuaca

SEQ ID NO: 1173582 - RNA, 19 nt, Homo sapiens
  misc_RNA (1)...(19): siRNA sense strand
aaaccacugugucgaacuc

SEQ ID NO: 1173583 - RNA, 19 nt, Homo sapiens
  misc_RNA (1)...(19): siRNA sense strand
aagaguaccgugagaagau

SEQ ID NO: 1173584 - RNA, 19 nt, Homo sapiens
  misc_RNA (1)...(19): siRNA sense strand
ccaugaaggcagucacaga

SEQ ID NO: 1173585 - RNA, 19 nt, Homo sapiens
  misc_RNA (1)...(19): siRNA sense strand
aauuggauacgcugaauga

SEQ ID NO: 1173586 - RNA, 19 nt, Homo sapiens
  misc_RNA (1)...(19): siRNA sense strand
gucuuggucuggcacuaaa

SEQ ID NO: 1173587 - RNA, 19 nt, Homo sapiens
  misc_RNA (1)...(19): siRNA sense strand
uuacuuagggacaaucuca

SEQ ID NO: 1173588 - RNA, 19 nt, Homo sapiens
  misc_RNA (1)...(19): siRNA sense strand
cagcagaugggcaaagagu

SEQ ID NO: 1173589 - RNA, 19 nt, Homo sapiens
  misc_RNA (1)...(19): siRNA sense strand
uaaagacagcacucugauc

SEQ ID NO: 1173590 - RNA, 19 nt, Homo sapiens
  misc_RNA (1)...(19): siRNA sense strand
gauucuaaacucuccugaa

SEQ ID NO: 1173591 - RNA, 19 nt, Homo sapiens
  misc_RNA (1)...(19): siRNA sense strand
ggucuggcacuaaauuucu

SEQ ID NO: 1173592 - RNA, 19 nt, Homo sapiens
  misc_RNA (1)...(19): siRNA sense strand
gcuguuggacaaauaucuu

SEQ ID NO: 1173593 - RNA, 19 nt, Homo sapiens
  misc_RNA (1)...(19): siRNA sense strand
uaccaggaagcauuugaaa

SEQ ID NO: 1173594 - RNA, 19 nt, Homo sapiens
  misc_RNA (1)...(19): siRNA sense strand
agagaggaaugagaagaag

SEQ ID NO: 1173595 - RNA, 19 nt, Homo sapiens
  misc_RNA (1)...(19): siRNA sense strand
gaaggcagucacagaacag

SEQ ID NO: 1173596 - RNA, 19 nt, Homo sapiens
  misc_RNA (1)...(19): siRNA sense strand
ucuaaacucuccugaaaag

SEQ ID NO: 1173597 - RNA, 19 nt, Homo sapiens
  misc_RNA (1)...(19): siRNA sense strand
ucuccagcauugagcagaa

SEQ ID NO: 1173598 - RNA, 19 nt, Homo sapiens
  misc_RNA (1)...(19): siRNA sense strand
cacuaaauuucucagucuu

SEQ ID NO: 1173599 - RNA, 19 nt, Homo sapiens
  misc_RNA (1)...(19): siRNA sense strand
aaagaguaccgugagaaga

SEQ ID NO: 1173600 - RNA, 19 nt, Homo sapiens
  misc_RNA (1)...(19): siRNA sense strand
acagcacucugaucaugca

SEQ ID NO: 1173601 - RNA, 19 nt, Homo sapiens
  misc_RNA (1)...(19): siRNA sense strand
cagccuacacacccaauuc

SEQ ID NO: 1173602 - RNA, 19 nt, Homo sapiens
  misc_RNA (1)...(19): siRNA sense strand
aaaccagggagacgaagga

SEQ ID NO: 1173603 - RNA, 19 nt, Homo sapiens
  misc_RNA (1)...(19): siRNA sense strand
ggaaaaccagggagacgaa

SEQ ID NO: 1173604 - RNA, 19 nt, Homo sapiens
  misc_RNA (1)...(19): siRNA sense strand
acacacccaauucgucuug

SEQ ID NO: 1173605 - RNA, 19 nt, Homo sapiens
  misc_RNA (1)...(19): siRNA sense strand
caaacaagaucgcagagaa

SEQ ID NO: 1173606 - RNA, 19 nt, Homo sapiens
  misc_RNA (1)...(19): siRNA sense strand
gcucaaggcuggugaugug

SEQ ID NO: 1173607 - RNA, 19 nt, Homo sapiens
  misc_RNA (1)...(19): siRNA sense strand
gaccaaggaugagcaguuu

SEQ ID NO: 1173608 - RNA, 19 nt, Homo sapiens
  misc_RNA (1)...(19): siRNA sense strand
aaagaaggaugaagccaaa

SEQ ID NO: 1173609 - RNA, 19 nt, Homo sapiens
  misc_RNA (1)...(19): siRNA sense strand
gacaucaagucacgcauug

SEQ ID NO: 1173610 - RNA, 19 nt, Homo sapiens
  misc_RNA (1)...(19): siRNA sense strand
gaacagccgcguagguuuc

SEQ ID NO: 1173611 - RNA, 19 nt, Homo sapiens
  misc_RNA (1)...(19): siRNA sense strand
cagaugagaccaaggauga

SEQ ID NO: 1173612 - RNA, 19 nt, Homo sapiens
  misc_RNA (1)...(19): siRNA sense strand
gagcagugcguccagaauu

SEQ ID NO: 1173613 - RNA, 19 nt, Homo sapiens
  misc_RNA (1)...(19): siRNA sense strand
ccagcaacgugcagaagaa

SEQ ID NO: 1173614 - RNA, 19 nt, Homo sapiens
  misc_RNA (1)...(19): siRNA sense strand
agaaggaucuccggaccua

SEQ ID NO: 1173615 - RNA, 19 nt, Homo sapiens
  misc_RNA (1)...(19): siRNA sense strand
guggagaccuucccagcaa

SEQ ID NO: 1173616 - RNA, 19 nt, Homo sapiens
  misc_RNA (1)...(19): siRNA sense strand
ggcgcaagcugguggacua

SEQ ID NO: 1173617 - RNA, 19 nt, Homo sapiens
  misc_RNA (1)...(19): siRNA sense strand
gaccugcuguggauggauu

SEQ ID NO: 1173618 - RNA, 19 nt, Homo sapiens
  misc_RNA (1)...(19): siRNA sense strand
gaagguguuugaggagaug

SEQ ID NO: 1173619 - RNA, 19 nt, Homo sapiens
  misc_RNA (1)...(19): siRNA sense strand
gcagagaugggcaguaaag

SEQ ID NO: 1173620 - RNA, 19 nt, Homo sapiens
  misc_RNA (1)...(19): siRNA sense strand
cccgagaacuucacugaga

SEQ ID NO: 1173621 - RNA, 19 nt, Homo sapiens
  misc_RNA (1)...(19): siRNA sense strand
gcaagcugguggacuacga

SEQ ID NO: 1173622 - RNA, 19 nt, Homo sapiens
  misc_RNA (1)...(19): siRNA sense strand
ggaacagccgcguagguuu

SEQ ID NO: 1173623 - RNA, 19 nt, Homo sapiens
  misc_RNA (1)...(19): siRNA sense strand
cgggaaagaucgccagcaa

SEQ ID NO: 1173624 - RNA, 19 nt, Homo sapiens
  misc_RNA (1)...(19): siRNA sense strand
ccaaggaugagcaguuuga

SEQ ID NO: 1173625 - RNA, 19 nt, Homo sapiens
  misc_RNA (1)...(19): siRNA sense strand
gcagggaugaggcaaacaa

SEQ ID NO: 1173626 - RNA, 19 nt, Homo sapiens
  misc_RNA (1)...(19): siRNA sense strand
acaacgaccugcuguggau

SEQ ID NO: 1173627 - RNA, 19 nt, Homo sapiens
  misc_RNA (1)...(19): siRNA sense strand
gggaugaggcaaacaagau

SEQ ID NO: 1173628 - RNA, 19 nt, Homo sapiens
  misc_RNA (1)...(19): siRNA sense strand
ugaaggagagcgacuggaa

SEQ ID NO: 1173629 - RNA, 19 nt, Homo sapiens
  misc_RNA (1)...(19): siRNA sense strand
gcaaacaagaucgcagaga

SEQ ID NO: 1173630 - RNA, 19 nt, Homo sapiens
  misc_RNA (1)...(19): siRNA sense strand
cuaccuggccuccgucaaa

SEQ ID NO: 1173631 - RNA, 19 nt, Homo sapiens
  misc_RNA (1)...(19): siRNA sense strand
ucaaccagaaccucaauga

SEQ ID NO: 1173632 - RNA, 19 nt, Homo sapiens
  misc_RNA (1)...(19): siRNA sense strand
cgacaucaagucacgcauu

SEQ ID NO: 1173633 - RNA, 19 nt, Homo sapiens
  misc_RNA (1)...(19): siRNA sense strand
aaccagaaccucaaugaug

SEQ ID NO: 1173634 - RNA, 19 nt, Homo sapiens
  misc_RNA (1)...(19): siRNA sense strand
gcaacaccuucacggucaa

SEQ ID NO: 1173635 - RNA, 19 nt, Homo sapiens
  misc_RNA (1)...(19): siRNA sense strand
accagaaccucaaugaugu

SEQ ID NO: 1173636 - RNA, 19 nt, Homo sapiens
  misc_RNA (1)...(19): siRNA sense strand
aggaggagcucaucaaagc

SEQ ID NO: 1173637 - RNA, 19 nt, Homo sapiens
  misc_RNA (1)...(19): siRNA sense strand
cgaggaggagcucaucaaa

SEQ ID NO: 1173638 - RNA, 19 nt, Homo sapiens
  misc_RNA (1)...(19): siRNA sense strand
agcagugcguccagaauuu

SEQ ID NO: 1173639 - RNA, 19 nt, Homo sapiens
  misc_RNA (1)...(19): siRNA sense strand
ggaaggcagaugagaccaa

SEQ ID NO: 1173640 - RNA, 19 nt, Homo sapiens
  misc_RNA (1)...(19): siRNA sense strand
ucaaagcccagaagguguu

SEQ ID NO: 1173641 - RNA, 19 nt, Homo sapiens
  misc_RNA (1)...(19): siRNA sense strand
gaggaggagcucaucaaag

SEQ ID NO: 1173642 - RNA, 19 nt, Homo sapiens
  misc_RNA (1)...(19): siRNA sense strand
acaaggagaugagcaagcu

SEQ ID NO: 1173643 - RNA, 19 nt, Homo sapiens
  misc_RNA (1)...(19): siRNA sense strand
ggaugaggcaaacaagauc

SEQ ID NO: 1173644 - RNA, 19 nt, Homo sapiens
  misc_RNA (1)...(19): siRNA sense strand
gaaggaugaagccaaaauu

SEQ ID NO: 1173645 - RNA, 19 nt, Homo sapiens
  misc_RNA (1)...(19): siRNA sense strand
ccacuacgagucccuucaa

SEQ ID NO: 1173646 - RNA, 19 nt, Homo sapiens
  misc_RNA (1)...(19): siRNA sense strand
ggauggauuaccaccagaa

SEQ ID NO: 1173647 - RNA, 19 nt, Homo sapiens
  misc_RNA (1)...(19): siRNA sense strand
caaccagaaccucaaugau

SEQ ID NO: 1173648 - RNA, 19 nt, Homo sapiens
  misc_RNA (1)...(19): siRNA sense strand
gcagugcguccagaauuuc

SEQ ID NO: 1173649 - RNA, 19 nt, Homo sapiens
  misc_RNA (1)...(19): siRNA sense strand
caagaucgcagagaacaac

SEQ ID NO: 1173650 - RNA, 19 nt, Homo sapiens
  misc_RNA (1)...(19): siRNA sense strand
agaccaaggaugagcaguu

SEQ ID NO: 1173651 - RNA, 19 nt, Homo sapiens
  misc_RNA (1)...(19): siRNA sense strand
ugacaacgcgccugcaaaa

SEQ ID NO: 1173652 - RNA, 19 nt, Homo sapiens
  misc_RNA (1)...(19): siRNA sense strand
agaagguguuugaggagau

SEQ ID NO: 1173653 - RNA, 19 nt, Homo sapiens
  misc_RNA (1)...(19): siRNA sense strand
cacuacgagucccuucaaa

SEQ ID NO: 1173654 - RNA, 19 nt, Homo sapiens
  misc_RNA (1)...(19): siRNA sense strand
ucaacacguuccagagcau

SEQ ID NO: 1173655 - RNA, 19 nt, Homo sapiens
  misc_RNA (1)...(19): siRNA sense strand
gccagcaacgugcagaaga

SEQ ID NO: 1173656 - RNA, 19 nt, Homo sapiens
  misc_RNA (1)...(19): siRNA sense strand
cguccagaauuucaacaag

SEQ ID NO: 1173657 - RNA, 19 nt, Homo sapiens
  misc_RNA (1)...(19): siRNA sense strand
uccagaauuucaacaagca

SEQ ID NO: 1173658 - RNA, 19 nt, Homo sapiens
  misc_RNA (1)...(19): siRNA sense strand
cuacacggccacugacaca

SEQ ID NO: 1173659 - RNA, 19 nt, Homo sapiens
  misc_RNA (1)...(19): siRNA sense strand
gcucaaccagaaccucaau

SEQ ID NO: 1173660 - RNA, 19 nt, Homo sapiens
  misc_RNA (1)...(19): siRNA sense strand
uggaacagccgcguagguu

SEQ ID NO: 1173661 - RNA, 19 nt, Homo sapiens
  misc_RNA (1)...(19): siRNA sense strand
gcucaucaaagcccagaag

SEQ ID NO: 1173662 - RNA, 19 nt, Homo sapiens
  misc_RNA (1)...(19): siRNA sense strand
caaacaagaucgcagagaa

SEQ ID NO: 1173663 - RNA, 19 nt, Homo sapiens
  misc_RNA (1)...(19): siRNA sense strand
gcucaaggcuggugaugug

SEQ ID NO: 1173664 - RNA, 19 nt, Homo sapiens
  misc_RNA (1)...(19): siRNA sense strand
gaccaaggaugagcaguuu

SEQ ID NO: 1173665 - RNA, 19 nt, Homo sapiens
  misc_RNA (1)...(19): siRNA sense strand
aaagaaggaugaagccaaa

SEQ ID NO: 1173666 - RNA, 19 nt, Homo sapiens
  misc_RNA (1)...(19): siRNA sense strand
gacaucaagucacgcauug

SEQ ID NO: 1173667 - RNA, 19 nt, Homo sapiens
  misc_RNA (1)...(19): siRNA sense strand
gaacagccgcguagguuuc

SEQ ID NO: 1173668 - RNA, 19 nt, Homo sapiens
  misc_RNA (1)...(19): siRNA sense strand
cagaugagaccaaggauga

SEQ ID NO: 1173669 - RNA, 19 nt, Homo sapiens
  misc_RNA (1)...(19): siRNA sense strand
gagcagugcguccagaauu

SEQ ID NO: 1173670 - RNA, 19 nt, Homo sapiens
  misc_RNA (1)...(19): siRNA sense strand
ccagcaacgugcagaagaa

SEQ ID NO: 1173671 - RNA, 19 nt, Homo sapiens
  misc_RNA (1)...(19): siRNA sense strand
agaaggaucuccggaccua

SEQ ID NO: 1173672 - RNA, 19 nt, Homo sapiens
  misc_RNA (1)...(19): siRNA sense strand
guggagaccuucccagcaa

SEQ ID NO: 1173673 - RNA, 19 nt, Homo sapiens
  misc_RNA (1)...(19): siRNA sense strand
ggcgcaagcugguggacua

SEQ ID NO: 1173674 - RNA, 19 nt, Homo sapiens
  misc_RNA (1)...(19): siRNA sense strand
gaccugcuguggauggauu

SEQ ID NO: 1173675 - RNA, 19 nt, Homo sapiens
  misc_RNA (1)...(19): siRNA sense strand
gaagguguuugaggagaug

SEQ ID NO: 1173676 - RNA, 19 nt, Homo sapiens
  misc_RNA (1)...(19): siRNA sense strand
gcagagaugggcaguaaag

SEQ ID NO: 1173677 - RNA, 19 nt, Homo sapiens
  misc_RNA (1)...(19): siRNA sense strand
cccgagaacuucacugaga

SEQ ID NO: 1173678 - RNA, 19 nt, Homo sapiens
  misc_RNA (1)...(19): siRNA sense strand
gcaagcugguggacuacga

SEQ ID NO: 1173679 - RNA, 19 nt, Homo sapiens
  misc_RNA (1)...(19): siRNA sense strand
ggaacagccgcguagguuu

SEQ ID NO: 1173680 - RNA, 19 nt, Homo sapiens
  misc_RNA (1)...(19): siRNA sense strand
cgggaaagaucgccagcaa

SEQ ID NO: 1173681 - RNA, 19 nt, Homo sapiens
  misc_RNA (1)...(19): siRNA sense strand
ccaaggaugagcaguuuga

SEQ ID NO: 1173682 - RNA, 19 nt, Homo sapiens
  misc_RNA (1)...(19): siRNA sense strand
gcagggaugaggcaaacaa

SEQ ID NO: 1173683 - RNA, 19 nt, Homo sapiens
  misc_RNA (1)...(19): siRNA sense strand
acaacgaccugcuguggau

SEQ ID NO: 1173684 - RNA, 19 nt, Homo sapiens
  misc_RNA (1)...(19): siRNA sense strand
gggaugaggcaaacaagau

SEQ ID NO: 1173685 - RNA, 19 nt, Homo sapiens
  misc_RNA (1)...(19): siRNA sense strand
ugaaggagagcgacuggaa

SEQ ID NO: 1173686 - RNA, 19 nt, Homo sapiens
  misc_RNA (1)...(19): siRNA sense strand
gcaaacaagaucgcagaga

SEQ ID NO: 1173687 - RNA, 19 nt, Homo sapiens
  misc_RNA (1)...(19): siRNA sense strand
cuaccuggccuccgucaaa

SEQ ID NO: 1173688 - RNA, 19 nt, Homo sapiens
  misc_RNA (1)...(19): siRNA sense strand
ucaaccagaaccucaauga

SEQ ID NO: 1173689 - RNA, 19 nt, Homo sapiens
  misc_RNA (1)...(19): siRNA sense strand
cgacaucaagucacgcauu

SEQ ID NO: 1173690 - RNA, 19 nt, Homo sapiens
  misc_RNA (1)...(19): siRNA sense strand
aaccagaaccucaaugaug

SEQ ID NO: 1173691 - RNA, 19 nt, Homo sapiens
  misc_RNA (1)...(19): siRNA sense strand
gcaacaccuucacggucaa

SEQ ID NO: 1173692 - RNA, 19 nt, Homo sapiens
  misc_RNA (1)...(19): siRNA sense strand
accagaaccucaaugaugu

SEQ ID NO: 1173693 - RNA, 19 nt, Homo sapiens
  misc_RNA (1)...(19): siRNA sense strand
aggaggagcucaucaaagc

SEQ ID NO: 1173694 - RNA, 19 nt, Homo sapiens
  misc_RNA (1)...(19): siRNA sense strand
cgaggaggagcucaucaaa

SEQ ID NO: 1173695 - RNA, 19 nt, Homo sapiens
  misc_RNA (1)...(19): siRNA sense strand
agcagugcguccagaauuu

SEQ ID NO: 1173696 - RNA, 19 nt, Homo sapiens
  misc_RNA (1)...(19): siRNA sense strand
ggaaggcagaugagaccaa

SEQ ID NO: 1173697 - RNA, 19 nt, Homo sapiens
  misc_RNA (1)...(19): siRNA sense strand
ucaaagcccagaagguguu

SEQ ID NO: 1173698 - RNA, 19 nt, Homo sapiens
  misc_RNA (1)...(19): siRNA sense strand
gaggaggagcucaucaaag

SEQ ID NO: 1173699 - RNA, 19 nt, Homo sapiens
  misc_RNA (1)...(19): siRNA sense strand
acaaggagaugagcaagcu

SEQ ID NO: 1173700 - RNA, 19 nt, Homo sapiens
  misc_RNA (1)...(19): siRNA sense strand
ggaugaggcaaacaagauc

SEQ ID NO: 1173701 - RNA, 19 nt, Homo sapiens
  misc_RNA (1)...(19): siRNA sense strand
gaaggaugaagccaaaauu

SEQ ID NO: 1173702 - RNA, 19 nt, Homo sapiens
  misc_RNA (1)...(19): siRNA sense strand
ccacuacgagucccuucaa

SEQ ID NO: 1173703 - RNA, 19 nt, Homo sapiens
  misc_RNA (1)...(19): siRNA sense strand
ggauggauuaccaccagaa

SEQ ID NO: 1173704 - RNA, 19 nt, Homo sapiens
  misc_RNA (1)...(19): siRNA sense strand
caaccagaaccucaaugau

SEQ ID NO: 1173705 - RNA, 19 nt, Homo sapiens
  misc_RNA (1)...(19): siRNA sense strand
gcagugcguccagaauuuc

SEQ ID NO: 1173706 - RNA, 19 nt, Homo sapiens
  misc_RNA (1)...(19): siRNA sense strand
caagaucgcagagaacaac

SEQ ID NO: 1173707 - RNA, 19 nt, Homo sapiens
  misc_RNA (1)...(19): siRNA sense strand
agaccaaggaugagcaguu

SEQ ID NO: 1173708 - RNA, 19 nt, Homo sapiens
  misc_RNA (1)...(19): siRNA sense strand
ugacaacgcgccugcaaaa

SEQ ID NO: 1173709 - RNA, 19 nt, Homo sapiens
  misc_RNA (1)...(19): siRNA sense strand
agaagguguuugaggagau

SEQ ID NO: 1173710 - RNA, 19 nt, Homo sapiens
  misc_RNA (1)...(19): siRNA sense strand
cacuacgagucccuucaaa

SEQ ID NO: 1173711 - RNA, 19 nt, Homo sapiens
  misc_RNA (1)...(19): siRNA sense strand
ucaacacguuccagagcau

SEQ ID NO: 1173712 - RNA, 19 nt, Homo sapiens
  misc_RNA (1)...(19): siRNA sense strand
gccagcaacgugcagaaga

SEQ ID NO: 1173713 - RNA, 19 nt, Homo sapiens
  misc_RNA (1)...(19): siRNA sense strand
cguccagaauuucaacaag

SEQ ID NO: 1173714 - RNA, 19 nt, Homo sapiens
  misc_RNA (1)...(19): siRNA sense strand
uccagaauuucaacaagca

SEQ ID NO: 1173715 - RNA, 19 nt, Homo sapiens
  misc_RNA (1)...(19): siRNA sense strand
cuacacggccacugacaca

SEQ ID NO: 1173716 - RNA, 19 nt, Homo sapiens
  misc_RNA (1)...(19): siRNA sense strand
gcucaaccagaaccucaau

SEQ ID NO: 1173717 - RNA, 19 nt, Homo sapiens
  misc_RNA (1)...(19): siRNA sense strand
uggaacagccgcguagguu

SEQ ID NO: 1173718 - RNA, 19 nt, Homo sapiens
  misc_RNA (1)...(19): siRNA sense strand
gcucaucaaagcccagaag

SEQ ID NO: 1173719 - RNA, 19 nt, Homo sapiens
  misc_RNA (1)...(19): siRNA sense strand
caaacaagaucgcagagaa

SEQ ID NO: 1173720 - RNA, 19 nt, Homo sapiens
  misc_RNA (1)...(19): siRNA sense strand
gcucaaggcuggugaugug

SEQ ID NO: 1173721 - RNA, 19 nt, Homo sapiens
  misc_RNA (1)...(19): siRNA sense strand
gaccaaggaugagcaguuu

SEQ ID NO: 1173722 - RNA, 19 nt, Homo sapiens
  misc_RNA (1)...(19): siRNA sense strand
aaagaaggaugaagccaaa

SEQ ID NO: 1173723 - RNA, 19 nt, Homo sapiens
  misc_RNA (1)...(19): siRNA sense strand
gacaucaagucacgcauug

SEQ ID NO: 1173724 - RNA, 19 nt, Homo sapiens
  misc_RNA (1)...(19): siRNA sense strand
gaacagccgcguagguuuc

SEQ ID NO: 1173725 - RNA, 19 nt, Homo sapiens
  misc_RNA (1)...(19): siRNA sense strand
cagaugagaccaaggauga

SEQ ID NO: 1173726 - RNA, 19 nt, Homo sapiens
  misc_RNA (1)...(19): siRNA sense strand
gagcagugcguccagaauu

SEQ ID NO: 1173727 - RNA, 19 nt, Homo sapiens
  misc_RNA (1)...(19): siRNA sense strand
ccagcaacgugcagaagaa

SEQ ID NO: 1173728 - RNA, 19 nt, Homo sapiens
  misc_RNA (1)...(19): siRNA sense strand
agaaggaucuccggaccua

SEQ ID NO: 1173729 - RNA, 19 nt, Homo sapiens
  misc_RNA (1)...(19): siRNA sense strand
guggagaccuucccagcaa

SEQ ID NO: 1173730 - RNA, 19 nt, Homo sapiens
  misc_RNA (1)...(19): siRNA sense strand
ggcgcaagcugguggacua

SEQ ID NO: 1173731 - RNA, 19 nt, Homo sapiens
  misc_RNA (1)...(19): siRNA sense strand
gaccugcuguggauggauu

SEQ ID NO: 1173732 - RNA, 19 nt, Homo sapiens
  misc_RNA (1)...(19): siRNA sense strand
gaagguguuugaggagaug

SEQ ID NO: 1173733 - RNA, 19 nt, Homo sapiens
  misc_RNA (1)...(19): siRNA sense strand
gcagagaugggcaguaaag

SEQ ID NO: 1173734 - RNA, 19 nt, Homo sapiens
  misc_RNA (1)...(19): siRNA sense strand
cccgagaacuucacugaga

SEQ ID NO: 1173735 - RNA, 19 nt, Homo sapiens
  misc_RNA (1)...(19): siRNA sense strand
gcaagcugguggacuacga

SEQ ID NO: 1173736 - RNA, 19 nt, Homo sapiens
  misc_RNA (1)...(19): siRNA sense strand
ggaacagccgcguagguuu

SEQ ID NO: 1173737 - RNA, 19 nt, Homo sapiens
  misc_RNA (1)...(19): siRNA sense strand
cgggaaagaucgccagcaa

SEQ ID NO: 1173738 - RNA, 19 nt, Homo sapiens
  misc_RNA (1)...(19): siRNA sense strand
ccaaggaugagcaguuuga

SEQ ID NO: 1173739 - RNA, 19 nt, Homo sapiens
  misc_RNA (1)...(19): siRNA sense strand
gcagggaugaggcaaacaa

SEQ ID NO: 1173740 - RNA, 19 nt, Homo sapiens
  misc_RNA (1)...(19): siRNA sense strand
acaacgaccugcuguggau

SEQ ID NO: 1173741 - RNA, 19 nt, Homo sapiens
  misc_RNA (1)...(19): siRNA sense strand
gggaugaggcaaacaagau

SEQ ID NO: 1173742 - RNA, 19 nt, Homo sapiens
  misc_RNA (1)...(19): siRNA sense strand
ugaaggagagcgacuggaa

SEQ ID NO: 1173743 - RNA, 19 nt, Homo sapiens
  misc_RNA (1)...(19): siRNA sense strand
gcaaacaagaucgcagaga

SEQ ID NO: 1173744 - RNA, 19 nt, Homo sapiens
  misc_RNA (1)...(19): siRNA sense strand
cuaccuggccuccgucaaa

SEQ ID NO: 1173745 - RNA, 19 nt, Homo sapiens
  misc_RNA (1)...(19): siRNA sense strand
ucaaccagaaccucaauga

SEQ ID NO: 1173746 - RNA, 19 nt, Homo sapiens
  misc_RNA (1)...(19): siRNA sense strand
cgacaucaagucacgcauu

SEQ ID NO: 1173747 - RNA, 19 nt, Homo sapiens
  misc_RNA (1)...(19): siRNA sense strand
aaccagaaccucaaugaug

SEQ ID NO: 1173748 - RNA, 19 nt, Homo sapiens
  misc_RNA (1)...(19): siRNA sense strand
gcaacaccuucacggucaa

SEQ ID NO: 1173749 - RNA, 19 nt, Homo sapiens
  misc_RNA (1)...(19): siRNA sense strand
accagaaccucaaugaugu

SEQ ID NO: 1173750 - RNA, 19 nt, Homo sapiens
  misc_RNA (1)...(19): siRNA sense strand
aggaggagcucaucaaagc

SEQ ID NO: 1173751 - RNA, 19 nt, Homo sapiens
  misc_RNA (1)...(19): siRNA sense strand
cgaggaggagcucaucaaa

SEQ ID NO: 1173752 - RNA, 19 nt, Homo sapiens
  misc_RNA (1)...(19): siRNA sense strand
agcagugcguccagaauuu

SEQ ID NO: 1173753 - RNA, 19 nt, Homo sapiens
  misc_RNA (1)...(19): siRNA sense strand
ggaaggcagaugagaccaa

SEQ ID NO: 1173754 - RNA, 19 nt, Homo sapiens
  misc_RNA (1)...(19): siRNA sense strand
ucaaagcccagaagguguu

SEQ ID NO: 1173755 - RNA, 19 nt, Homo sapiens
  misc_RNA (1)...(19): siRNA sense strand
gaggaggagcucaucaaag

SEQ ID NO: 1173756 - RNA, 19 nt, Homo sapiens
  misc_RNA (1)...(19): siRNA sense strand
acaaggagaugagcaagcu

SEQ ID NO: 1173757 - RNA, 19 nt, Homo sapiens
  misc_RNA (1)...(19): siRNA sense strand
ggaugaggcaaacaagauc

SEQ ID NO: 1173758 - RNA, 19 nt, Homo sapiens
  misc_RNA (1)...(19): siRNA sense strand
gaaggaugaagccaaaauu

SEQ ID NO: 1173759 - RNA, 19 nt, Homo sapiens
  misc_RNA (1)...(19): siRNA sense strand
ccacuacgagucccuucaa

SEQ ID NO: 1173760 - RNA, 19 nt, Homo sapiens
  misc_RNA (1)...(19): siRNA sense strand
ggauggauuaccaccagaa

SEQ ID NO: 1173761 - RNA, 19 nt, Homo sapiens
  misc_RNA (1)...(19): siRNA sense strand
caaccagaaccucaaugau

SEQ ID NO: 1173762 - RNA, 19 nt, Homo sapiens
  misc_RNA (1)...(19): siRNA sense strand
gcagugcguccagaauuuc

SEQ ID NO: 1173763 - RNA, 19 nt, Homo sapiens
  misc_RNA (1)...(19): siRNA sense strand
caagaucgcagagaacaac

SEQ ID NO: 1173764 - RNA, 19 nt, Homo sapiens
  misc_RNA (1)...(19): siRNA sense strand
agaccaaggaugagcaguu

SEQ ID NO: 1173765 - RNA, 19 nt, Homo sapiens
  misc_RNA (1)...(19): siRNA sense strand
ugacaacgcgccugcaaaa

SEQ ID NO: 1173766 - RNA, 19 nt, Homo sapiens
  misc_RNA (1)...(19): siRNA sense strand
agaagguguuugaggagau

SEQ ID NO: 1173767 - RNA, 19 nt, Homo sapiens
  misc_RNA (1)...(19): siRNA sense strand
cacuacgagucccuucaaa

SEQ ID NO: 1173768 - RNA, 19 nt, Homo sapiens
  misc_RNA (1)...(19): siRNA sense strand
ucaacacguuccagagcau

SEQ ID NO: 1173769 - RNA, 19 nt, Homo sapiens
  misc_RNA (1)...(19): siRNA sense strand
gccagcaacgugcagaaga

SEQ ID NO: 1173770 - RNA, 19 nt, Homo sapiens
  misc_RNA (1)...(19): siRNA sense strand
cguccagaauuucaacaag

SEQ ID NO: 1173771 - RNA, 19 nt, Homo sapiens
  misc_RNA (1)...(19): siRNA sense strand
uccagaauuucaacaagca

SEQ ID NO: 1173772 - RNA, 19 nt, Homo sapiens
  misc_RNA (1)...(19): siRNA sense strand
cuacacggccacugacaca

SEQ ID NO: 1173773 - RNA, 19 nt, Homo sapiens
  misc_RNA (1)...(19): siRNA sense strand
gcucaaccagaaccucaau

SEQ ID NO: 1173774 - RNA, 19 nt, Homo sapiens
  misc_RNA (1)...(19): siRNA sense strand
uggaacagccgcguagguu

SEQ ID NO: 1173775 - RNA, 19 nt, Homo sapiens
  misc_RNA (1)...(19): siRNA sense strand
gcucaucaaagcccagaag

SEQ ID NO: 1173776 - RNA, 19 nt, Homo sapiens
  misc_RNA (1)...(19): siRNA sense strand
caaacaagaucgcagagaa

SEQ ID NO: 1173777 - RNA, 19 nt, Homo sapiens
  misc_RNA (1)...(19): siRNA sense strand
gcucaaggcuggugaugug

SEQ ID NO: 1173778 - RNA, 19 nt, Homo sapiens
  misc_RNA (1)...(19): siRNA sense strand
gaccaaggaugagcaguuu

SEQ ID NO: 1173779 - RNA, 19 nt, Homo sapiens
  misc_RNA (1)...(19): siRNA sense strand
aaagaaggaugaagccaaa

SEQ ID NO: 1173780 - RNA, 19 nt, Homo sapiens
  misc_RNA (1)...(19): siRNA sense strand
gacaucaagucacgcauug

SEQ ID NO: 1173781 - RNA, 19 nt, Homo sapiens
  misc_RNA (1)...(19): siRNA sense strand
gaacagccgcguagguuuc

SEQ ID NO: 1173782 - RNA, 19 nt, Homo sapiens
  misc_RNA (1)...(19): siRNA sense strand
cagaugagaccaaggauga

SEQ ID NO: 1173783 - RNA, 19 nt, Homo sapiens
  misc_RNA (1)...(19): siRNA sense strand
gagcagugcguccagaauu

SEQ ID NO: 1173784 - RNA, 19 nt, Homo sapiens
  misc_RNA (1)...(19): siRNA sense strand
ccagcaacgugcagaagaa

SEQ ID NO: 1173785 - RNA, 19 nt, Homo sapiens
  misc_RNA (1)...(19): siRNA sense strand
agaaggaucuccggaccua

SEQ ID NO: 1173786 - RNA, 19 nt, Homo sapiens
  misc_RNA (1)...(19): siRNA sense strand
guggagaccuucccagcaa

SEQ ID NO: 1173787 - RNA, 19 nt, Homo sapiens
  misc_RNA (1)...(19): siRNA sense strand
ggcgcaagcugguggacua

SEQ ID NO: 1173788 - RNA, 19 nt, Homo sapiens
  misc_RNA (1)...(19): siRNA sense strand
gaccugcuguggauggauu

SEQ ID NO: 1173789 - RNA, 19 nt, Homo sapiens
  misc_RNA (1)...(19): siRNA sense strand
gaagguguuugaggagaug

SEQ ID NO: 1173790 - RNA, 19 nt, Homo sapiens
  misc_RNA (1)...(19): siRNA sense strand
gcagagaugggcaguaaag

SEQ ID NO: 1173791 - RNA, 19 nt, Homo sapiens
  misc_RNA (1)...(19): siRNA sense strand
cccgagaacuucacugaga

SEQ ID NO: 1173792 - RNA, 19 nt, Homo sapiens
  misc_RNA (1)...(19): siRNA sense strand
gcaagcugguggacuacga

SEQ ID NO: 1173793 - RNA, 19 nt, Homo sapiens
  misc_RNA (1)...(19): siRNA sense strand
ggaacagccgcguagguuu

SEQ ID NO: 1173794 - RNA, 19 nt, Homo sapiens
  misc_RNA (1)...(19): siRNA sense strand
cgggaaagaucgccagcaa

SEQ ID NO: 1173795 - RNA, 19 nt, Homo sapiens
  misc_RNA (1)...(19): siRNA sense strand
ccaaggaugagcaguuuga

SEQ ID NO: 1173796 - RNA, 19 nt, Homo sapiens
  misc_RNA (1)...(19): siRNA sense strand
gcagggaugaggcaaacaa

SEQ ID NO: 1173797 - RNA, 19 nt, Homo sapiens
  misc_RNA (1)...(19): siRNA sense strand
acaacgaccugcuguggau

SEQ ID NO: 1173798 - RNA, 19 nt, Homo sapiens
  misc_RNA (1)...(19): siRNA sense strand
gggaugaggcaaacaagau

SEQ ID NO: 1173799 - RNA, 19 nt, Homo sapiens
  misc_RNA (1)...(19): siRNA sense strand
ugaaggagagcgacuggaa

SEQ ID NO: 1173800 - RNA, 19 nt, Homo sapiens
  misc_RNA (1)...(19): siRNA sense strand
gcaaacaagaucgcagaga

SEQ ID NO: 1173801 - RNA, 19 nt, Homo sapiens
  misc_RNA (1)...(19): siRNA sense strand
cuaccuggccuccgucaaa

SEQ ID NO: 1173802 - RNA, 19 nt, Homo sapiens
  misc_RNA (1)...(19): siRNA sense strand
ucaaccagaaccucaauga

SEQ ID NO: 1173803 - RNA, 19 nt, Homo sapiens
  misc_RNA (1)...(19): siRNA sense strand
cgacaucaagucacgcauu

SEQ ID NO: 1173804 - RNA, 19 nt, Homo sapiens
  misc_RNA (1)...(19): siRNA sense strand
aaccagaaccucaaugaug

SEQ ID NO: 1173805 - RNA, 19 nt, Homo sapiens
  misc_RNA (1)...(19): siRNA sense strand
gcaacaccuucacggucaa

SEQ ID NO: 1173806 - RNA, 19 nt, Homo sapiens
  misc_RNA (1)...(19): siRNA sense strand
accagaaccucaaugaugu

SEQ ID NO: 1173807 - RNA, 19 nt, Homo sapiens
  misc_RNA (1)...(19): siRNA sense strand
aggaggagcucaucaaagc

SEQ ID NO: 1173808 - RNA, 19 nt, Homo sapiens
  misc_RNA (1)...(19): siRNA sense strand
cgaggaggagcucaucaaa

SEQ ID NO: 1173809 - RNA, 19 nt, Homo sapiens
  misc_RNA (1)...(19): siRNA sense strand
agcagugcguccagaauuu

SEQ ID NO: 1173810 - RNA, 19 nt, Homo sapiens
  misc_RNA (1)...(19): siRNA sense strand
ggaaggcagaugagaccaa

SEQ ID NO: 1173811 - RNA, 19 nt, Homo sapiens
  misc_RNA (1)...(19): siRNA sense strand
ucaaagcccagaagguguu

SEQ ID NO: 1173812 - RNA, 19 nt, Homo sapiens
  misc_RNA (1)...(19): siRNA sense strand
gaggaggagcucaucaaag

SEQ ID NO: 1173813 - RNA, 19 nt, Homo sapiens
  misc_RNA (1)...(19): siRNA sense strand
acaaggagaugagcaagcu

SEQ ID NO: 1173814 - RNA, 19 nt, Homo sapiens
  misc_RNA (1)...(19): siRNA sense strand
ggaugaggcaaacaagauc

SEQ ID NO: 1173815 - RNA, 19 nt, Homo sapiens
  misc_RNA (1)...(19): siRNA sense strand
gaaggaugaagccaaaauu

SEQ ID NO: 1173816 - RNA, 19 nt, Homo sapiens
  misc_RNA (1)...(19): siRNA sense strand
ccacuacgagucccuucaa

SEQ ID NO: 1173817 - RNA, 19 nt, Homo sapiens
  misc_RNA (1)...(19): siRNA sense strand
ggauggauuaccaccagaa

SEQ ID NO: 1173818 - RNA, 19 nt, Homo sapiens
  misc_RNA (1)...(19): siRNA sense strand
caaccagaaccucaaugau

SEQ ID NO: 1173819 - RNA, 19 nt, Homo sapiens
  misc_RNA (1)...(19): siRNA sense strand
gcagugcguccagaauuuc

SEQ ID NO: 1173820 - RNA, 19 nt, Homo sapiens
  misc_RNA (1)...(19): siRNA sense strand
caagaucgcagagaacaac

SEQ ID NO: 1173821 - RNA, 19 nt, Homo sapiens
  misc_RNA (1)...(19): siRNA sense strand
agaccaaggaugagcaguu

SEQ ID NO: 1173822 - RNA, 19 nt, Homo sapiens
  misc_RNA (1)...(19): siRNA sense strand
ugacaacgcgccugcaaaa

SEQ ID NO: 1173823 - RNA, 19 nt, Homo sapiens
  misc_RNA (1)...(19): siRNA sense strand
agaagguguuugaggagau

SEQ ID NO: 1173824 - RNA, 19 nt, Homo sapiens
  misc_RNA (1)...(19): siRNA sense strand
cacuacgagucccuucaaa

SEQ ID NO: 1173825 - RNA, 19 nt, Homo sapiens
  misc_RNA (1)...(19): siRNA sense strand
ucaacacguuccagagcau

SEQ ID NO: 1173826 - RNA, 19 nt, Homo sapiens
  misc_RNA (1)...(19): siRNA sense strand
gccagcaacgugcagaaga

SEQ ID NO: 1173827 - RNA, 19 nt, Homo sapiens
  misc_RNA (1)...(19): siRNA sense strand
cguccagaauuucaacaag

SEQ ID NO: 1173828 - RNA, 19 nt, Homo sapiens
  misc_RNA (1)...(19): siRNA sense strand
uccagaauuucaacaagca

SEQ ID NO: 1173829 - RNA, 19 nt, Homo sapiens
  misc_RNA (1)...(19): siRNA sense strand
cuacacggccacugacaca

SEQ ID NO: 1173830 - RNA, 19 nt, Homo sapiens
  misc_RNA (1)...(19): siRNA sense strand
gcucaaccagaaccucaau

SEQ ID NO: 1173831 - RNA, 19 nt, Homo sapiens
  misc_RNA (1)...(19): siRNA sense strand
uggaacagccgcguagguu

SEQ ID NO: 1173832 - RNA, 19 nt, Homo sapiens
  misc_RNA (1)...(19): siRNA sense strand
gcucaucaaagcccagaag

SEQ ID NO: 1173833 - RNA, 19 nt, Homo sapiens
  misc_RNA (1)...(19): siRNA sense strand
caaacaagaucgcagagaa

SEQ ID NO: 1173834 - RNA, 19 nt, Homo sapiens
  misc_RNA (1)...(19): siRNA sense strand
gcucaaggcuggugaugug

SEQ ID NO: 1173835 - RNA, 19 nt, Homo sapiens
  misc_RNA (1)...(19): siRNA sense strand
gaccaaggaugagcaguuu

SEQ ID NO: 1173836 - RNA, 19 nt, Homo sapiens
  misc_RNA (1)...(19): siRNA sense strand
aaagaaggaugaagccaaa

SEQ ID NO: 1173837 - RNA, 19 nt, Homo sapiens
  misc_RNA (1)...(19): siRNA sense strand
gacaucaagucacgcauug

SEQ ID NO: 1173838 - RNA, 19 nt, Homo sapiens
  misc_RNA (1)...(19): siRNA sense strand
gaacagccgcguagguuuc

SEQ ID NO: 1173839 - RNA, 19 nt, Homo sapiens
  misc_RNA (1)...(19): siRNA sense strand
cagaugagaccaaggauga

SEQ ID NO: 1173840 - RNA, 19 nt, Homo sapiens
  misc_RNA (1)...(19): siRNA sense strand
gagcagugcguccagaauu

SEQ ID NO: 1173841 - RNA, 19 nt, Homo sapiens
  misc_RNA (1)...(19): siRNA sense strand
ccagcaacgugcagaagaa

SEQ ID NO: 1173842 - RNA, 19 nt, Homo sapiens
  misc_RNA (1)...(19): siRNA sense strand
agaaggaucuccggaccua

SEQ ID NO: 1173843 - RNA, 19 nt, Homo sapiens
  misc_RNA (1)...(19): siRNA sense strand
guggagaccuucccagcaa

SEQ ID NO: 1173844 - RNA, 19 nt, Homo sapiens
  misc_RNA (1)...(19): siRNA sense strand
ggcgcaagcugguggacua

SEQ ID NO: 1173845 - RNA, 19 nt, Homo sapiens
  misc_RNA (1)...(19): siRNA sense strand
gaccugcuguggauggauu

SEQ ID NO: 1173846 - RNA, 19 nt, Homo sapiens
  misc_RNA (1)...(19): siRNA sense strand
gaagguguuugaggagaug

SEQ ID NO: 1173847 - RNA, 19 nt, Homo sapiens
  misc_RNA (1)...(19): siRNA sense strand
gcagagaugggcaguaaag

SEQ ID NO: 1173848 - RNA, 19 nt, Homo sapiens
  misc_RNA (1)...(19): siRNA sense strand
cccgagaacuucacugaga

SEQ ID NO: 1173849 - RNA, 19 nt, Homo sapiens
  misc_RNA (1)...(19): siRNA sense strand
gcaagcugguggacuacga

SEQ ID NO: 1173850 - RNA, 19 nt, Homo sapiens
  misc_RNA (1)...(19): siRNA sense strand
ggaacagccgcguagguuu

SEQ ID NO: 1173851 - RNA, 19 nt, Homo sapiens
  misc_RNA (1)...(19): siRNA sense strand
cgggaaagaucgccagcaa

SEQ ID NO: 1173852 - RNA, 19 nt, Homo sapiens
  misc_RNA (1)...(19): siRNA sense strand
ccaaggaugagcaguuuga

SEQ ID NO: 1173853 - RNA, 19 nt, Homo sapiens
  misc_RNA (1)...(19): siRNA sense strand
gcagggaugaggcaaacaa

SEQ ID NO: 1173854 - RNA, 19 nt, Homo sapiens
  misc_RNA (1)...(19): siRNA sense strand
acaacgaccugcuguggau

SEQ ID NO: 1173855 - RNA, 19 nt, Homo sapiens
  misc_RNA (1)...(19): siRNA sense strand
gggaugaggcaaacaagau

SEQ ID NO: 1173856 - RNA, 19 nt, Homo sapiens
  misc_RNA (1)...(19): siRNA sense strand
ugaaggagagcgacuggaa

SEQ ID NO: 1173857 - RNA, 19 nt, Homo sapiens
  misc_RNA (1)...(19): siRNA sense strand
gcaaacaagaucgcagaga

SEQ ID NO: 1173858 - RNA, 19 nt, Homo sapiens
  misc_RNA (1)...(19): siRNA sense strand
cuaccuggccuccgucaaa

SEQ ID NO: 1173859 - RNA, 19 nt, Homo sapiens
  misc_RNA (1)...(19): siRNA sense strand
ucaaccagaaccucaauga

SEQ ID NO: 1173860 - RNA, 19 nt, Homo sapiens
  misc_RNA (1)...(19): siRNA sense strand
cgacaucaagucacgcauu

SEQ ID NO: 1173861 - RNA, 19 nt, Homo sapiens
  misc_RNA (1)...(19): siRNA sense strand
aaccagaaccucaaugaug

SEQ ID NO: 1173862 - RNA, 19 nt, Homo sapiens
  misc_RNA (1)...(19): siRNA sense strand
gcaacaccuucacggucaa

SEQ ID NO: 1173863 - RNA, 19 nt, Homo sapiens
  misc_RNA (1)...(19): siRNA sense strand
accagaaccucaaugaugu

SEQ ID NO: 1173864 - RNA, 19 nt, Homo sapiens
  misc_RNA (1)...(19): siRNA sense strand
aggaggagcucaucaaagc

SEQ ID NO: 1173865 - RNA, 19 nt, Homo sapiens
  misc_RNA (1)...(19): siRNA sense strand
cgaggaggagcucaucaaa

SEQ ID NO: 1173866 - RNA, 19 nt, Homo sapiens
  misc_RNA (1)...(19): siRNA sense strand
agcagugcguccagaauuu

SEQ ID NO: 1173867 - RNA, 19 nt, Homo sapiens
  misc_RNA (1)...(19): siRNA sense strand
ggaaggcagaugagaccaa

SEQ ID NO: 1173868 - RNA, 19 nt, Homo sapiens
  misc_RNA (1)...(19): siRNA sense strand
ucaaagcccagaagguguu

SEQ ID NO: 1173869 - RNA, 19 nt, Homo sapiens
  misc_RNA (1)...(19): siRNA sense strand
gaggaggagcucaucaaag

SEQ ID NO: 1173870 - RNA, 19 nt, Homo sapiens
  misc_RNA (1)...(19): siRNA sense strand
acaaggagaugagcaagcu

SEQ ID NO: 1173871 - RNA, 19 nt, Homo sapiens
  misc_RNA (1)...(19): siRNA sense strand
ggaugaggcaaacaagauc

SEQ ID NO: 1173872 - RNA, 19 nt, Homo sapiens
  misc_RNA (1)...(19): siRNA sense strand
gaaggaugaagccaaaauu

SEQ ID NO: 1173873 - RNA, 19 nt, Homo sapiens
  misc_RNA (1)...(19): siRNA sense strand
ccacuacgagucccuucaa

SEQ ID NO: 1173874 - RNA, 19 nt, Homo sapiens
  misc_RNA (1)...(19): siRNA sense strand
ggauggauuaccaccagaa

SEQ ID NO: 1173875 - RNA, 19 nt, Homo sapiens
  misc_RNA (1)...(19): siRNA sense strand
caaccagaaccucaaugau

SEQ ID NO: 1173876 - RNA, 19 nt, Homo sapiens
  misc_RNA (1)...(19): siRNA sense strand
gcagugcguccagaauuuc

SEQ ID NO: 1173877 - RNA, 19 nt, Homo sapiens
  misc_RNA (1)...(19): siRNA sense strand
caagaucgcagagaacaac

SEQ ID NO: 1173878 - RNA, 19 nt, Homo sapiens
  misc_RNA (1)...(19): siRNA sense strand
agaccaaggaugagcaguu

SEQ ID NO: 1173879 - RNA, 19 nt, Homo sapiens
  misc_RNA (1)...(19): siRNA sense strand
ugacaacgcgccugcaaaa

SEQ ID NO: 1173880 - RNA, 19 nt, Homo sapiens
  misc_RNA (1)...(19): siRNA sense strand
agaagguguuugaggagau

SEQ ID NO: 1173881 - RNA, 19 nt, Homo sapiens
  misc_RNA (1)...(19): siRNA sense strand
cacuacgagucccuucaaa

SEQ ID NO: 1173882 - RNA, 19 nt, Homo sapiens
  misc_RNA (1)...(19): siRNA sense strand
ucaacacguuccagagcau

SEQ ID NO: 1173883 - RNA, 19 nt, Homo sapiens
  misc_RNA (1)...(19): siRNA sense strand
gccagcaacgugcagaaga

SEQ ID NO: 1173884 - RNA, 19 nt, Homo sapiens
  misc_RNA (1)...(19): siRNA sense strand
cguccagaauuucaacaag

SEQ ID NO: 1173885 - RNA, 19 nt, Homo sapiens
  misc_RNA (1)...(19): siRNA sense strand
uccagaauuucaacaagca

SEQ ID NO: 1173886 - RNA, 19 nt, Homo sapiens
  misc_RNA (1)...(19): siRNA sense strand
cuacacggccacugacaca

SEQ ID NO: 1173887 - RNA, 19 nt, Homo sapiens
  misc_RNA (1)...(19): siRNA sense strand
gcucaaccagaaccucaau

SEQ ID NO: 1173888 - RNA, 19 nt, Homo sapiens
  misc_RNA (1)...(19): siRNA sense strand
uggaacagccgcguagguu

SEQ ID NO: 1173889 - RNA, 19 nt, Homo sapiens
  misc_RNA (1)...(19): siRNA sense strand
gcucaucaaagcccagaag

SEQ ID NO: 1173890 - RNA, 19 nt, Homo sapiens
  misc_RNA (1)...(19): siRNA sense strand
caaacaagaucgcagagaa

SEQ ID NO: 1173891 - RNA, 19 nt, Homo sapiens
  misc_RNA (1)...(19): siRNA sense strand
gcucaaggcuggugaugug

SEQ ID NO: 1173892 - RNA, 19 nt, Homo sapiens
  misc_RNA (1)...(19): siRNA sense strand
gaccaaggaugagcaguuu

SEQ ID NO: 1173893 - RNA, 19 nt, Homo sapiens
  misc_RNA (1)...(19): siRNA sense strand
aaagaaggaugaagccaaa

SEQ ID NO: 1173894 - RNA, 19 nt, Homo sapiens
  misc_RNA (1)...(19): siRNA sense strand
gacaucaagucacgcauug

SEQ ID NO: 1173895 - RNA, 19 nt, Homo sapiens
  misc_RNA (1)...(19): siRNA sense strand
gaacagccgcguagguuuc

SEQ ID NO: 1173896 - RNA, 19 nt, Homo sapiens
  misc_RNA (1)...(19): siRNA sense strand
cagaugagaccaaggauga

SEQ ID NO: 1173897 - RNA, 19 nt, Homo sapiens
  misc_RNA (1)...(19): siRNA sense strand
gagcagugcguccagaauu

SEQ ID NO: 1173898 - RNA, 19 nt, Homo sapiens
  misc_RNA (1)...(19): siRNA sense strand
ccagcaacgugcagaagaa

SEQ ID NO: 1173899 - RNA, 19 nt, Homo sapiens
  misc_RNA (1)...(19): siRNA sense strand
agaaggaucuccggaccua

SEQ ID NO: 1173900 - RNA, 19 nt, Homo sapiens
  misc_RNA (1)...(19): siRNA sense strand
guggagaccuucccagcaa

SEQ ID NO: 1173901 - RNA, 19 nt, Homo sapiens
  misc_RNA (1)...(19): siRNA sense strand
ggcgcaagcugguggacua

SEQ ID NO: 1173902 - RNA, 19 nt, Homo sapiens
  misc_RNA (1)...(19): siRNA sense strand
gaccugcuguggauggauu

SEQ ID NO: 1173903 - RNA, 19 nt, Homo sapiens
  misc_RNA (1)...(19): siRNA sense strand
gaagguguuugaggagaug

SEQ ID NO: 1173904 - RNA, 19 nt, Homo sapiens
  misc_RNA (1)...(19): siRNA sense strand
gcagagaugggcaguaaag

SEQ ID NO: 1173905 - RNA, 19 nt, Homo sapiens
  misc_RNA (1)...(19): siRNA sense strand
cccgagaacuucacugaga

SEQ ID NO: 1173906 - RNA, 19 nt, Homo sapiens
  misc_RNA (1)...(19): siRNA sense strand
gcaagcugguggacuacga

SEQ ID NO: 1173907 - RNA, 19 nt, Homo sapiens
  misc_RNA (1)...(19): siRNA sense strand
ggaacagccgcguagguuu

SEQ ID NO: 1173908 - RNA, 19 nt, Homo sapiens
  misc_RNA (1)...(19): siRNA sense strand
cgggaaagaucgccagcaa

SEQ ID NO: 1173909 - RNA, 19 nt, Homo sapiens
  misc_RNA (1)...(19): siRNA sense strand
ccaaggaugagcaguuuga

SEQ ID NO: 1173910 - RNA, 19 nt, Homo sapiens
  misc_RNA (1)...(19): siRNA sense strand
gcagggaugaggcaaacaa

SEQ ID NO: 1173911 - RNA, 19 nt, Homo sapiens
  misc_RNA (1)...(19): siRNA sense strand
acaacgaccugcuguggau

SEQ ID NO: 1173912 - RNA, 19 nt, Homo sapiens
  misc_RNA (1)...(19): siRNA sense strand
gggaugaggcaaacaagau

SEQ ID NO: 1173913 - RNA, 19 nt, Homo sapiens
  misc_RNA (1)...(19): siRNA sense strand
ugaaggagagcgacuggaa

SEQ ID NO: 1173914 - RNA, 19 nt, Homo sapiens
  misc_RNA (1)...(19): siRNA sense strand
gcaaacaagaucgcagaga

SEQ ID NO: 1173915 - RNA, 19 nt, Homo sapiens
  misc_RNA (1)...(19): siRNA sense strand
cuaccuggccuccgucaaa

SEQ ID NO: 1173916 - RNA, 19 nt, Homo sapiens
  misc_RNA (1)...(19): siRNA sense strand
ucaaccagaaccucaauga

SEQ ID NO: 1173917 - RNA, 19 nt, Homo sapiens
  misc_RNA (1)...(19): siRNA sense strand
cgacaucaagucacgcauu

SEQ ID NO: 1173918 - RNA, 19 nt, Homo sapiens
  misc_RNA (1)...(19): siRNA sense strand
aaccagaaccucaaugaug

SEQ ID NO: 1173919 - RNA, 19 nt, Homo sapiens
  misc_RNA (1)...(19): siRNA sense strand
gcaacaccuucacggucaa

SEQ ID NO: 1173920 - RNA, 19 nt, Homo sapiens
  misc_RNA (1)...(19): siRNA sense strand
accagaaccucaaugaugu

SEQ ID NO: 1173921 - RNA, 19 nt, Homo sapiens
  misc_RNA (1)...(19): siRNA sense strand
aggaggagcucaucaaagc

SEQ ID NO: 1173922 - RNA, 19 nt, Homo sapiens
  misc_RNA (1)...(19): siRNA sense strand
cgaggaggagcucaucaaa

SEQ ID NO: 1173923 - RNA, 19 nt, Homo sapiens
  misc_RNA (1)...(19): siRNA sense strand
agcagugcguccagaauuu

SEQ ID NO: 1173924 - RNA, 19 nt, Homo sapiens
  misc_RNA (1)...(19): siRNA sense strand
ggaaggcagaugagaccaa

SEQ ID NO: 1173925 - RNA, 19 nt, Homo sapiens
  misc_RNA (1)...(19): siRNA sense strand
ucaaagcccagaagguguu

SEQ ID NO: 1173926 - RNA, 19 nt, Homo sapiens
  misc_RNA (1)...(19): siRNA sense strand
gaggaggagcucaucaaag

SEQ ID NO: 1173927 - RNA, 19 nt, Homo sapiens
  misc_RNA (1)...(19): siRNA sense strand
acaaggagaugagcaagcu

SEQ ID NO: 1173928 - RNA, 19 nt, Homo sapiens
  misc_RNA (1)...(19): siRNA sense strand
ggaugaggcaaacaagauc

SEQ ID NO: 1173929 - RNA, 19 nt, Homo sapiens
  misc_RNA (1)...(19): siRNA sense strand
gaaggaugaagccaaaauu

SEQ ID NO: 1173930 - RNA, 19 nt, Homo sapiens
  misc_RNA (1)...(19): siRNA sense strand
ccacuacgagucccuucaa

SEQ ID NO: 1173931 - RNA, 19 nt, Homo sapiens
  misc_RNA (1)...(19): siRNA sense strand
ggauggauuaccaccagaa

SEQ ID NO: 1173932 - RNA, 19 nt, Homo sapiens
  misc_RNA (1)...(19): siRNA sense strand
caaccagaaccucaaugau

SEQ ID NO: 1173933 - RNA, 19 nt, Homo sapiens
  misc_RNA (1)...(19): siRNA sense strand
gcagugcguccagaauuuc

SEQ ID NO: 1173934 - RNA, 19 nt, Homo sapiens
  misc_RNA (1)...(19): siRNA sense strand
caagaucgcagagaacaac

SEQ ID NO: 1173935 - RNA, 19 nt, Homo sapiens
  misc_RNA (1)...(19): siRNA sense strand
agaccaaggaugagcaguu

SEQ ID NO: 1173936 - RNA, 19 nt, Homo sapiens
  misc_RNA (1)...(19): siRNA sense strand
ugacaacgcgccugcaaaa

SEQ ID NO: 1173937 - RNA, 19 nt, Homo sapiens
  misc_RNA (1)...(19): siRNA sense strand
agaagguguuugaggagau

SEQ ID NO: 1173938 - RNA, 19 nt, Homo sapiens
  misc_RNA (1)...(19): siRNA sense strand
cacuacgagucccuucaaa

SEQ ID NO: 1173939 - RNA, 19 nt, Homo sapiens
  misc_RNA (1)...(19): siRNA sense strand
ucaacacguuccagagcau

SEQ ID NO: 1173940 - RNA, 19 nt, Homo sapiens
  misc_RNA (1)...(19): siRNA sense strand
gccagcaacgugcagaaga

SEQ ID NO: 1173941 - RNA, 19 nt, Homo sapiens
  misc_RNA (1)...(19): siRNA sense strand
cguccagaauuucaacaag

SEQ ID NO: 1173942 - RNA, 19 nt, Homo sapiens
  misc_RNA (1)...(19): siRNA sense strand
uccagaauuucaacaagca

SEQ ID NO: 1173943 - RNA, 19 nt, Homo sapiens
  misc_RNA (1)...(19): siRNA sense strand
cuacacggccacugacaca

SEQ ID NO: 1173944 - RNA, 19 nt, Homo sapiens
  misc_RNA (1)...(19): siRNA sense strand
gcucaaccagaaccucaau

SEQ ID NO: 1173945 - RNA, 19 nt, Homo sapiens
  misc_RNA (1)...(19): siRNA sense strand
uggaacagccgcguagguu

SEQ ID NO: 1173946 - RNA, 19 nt, Homo sapiens
  misc_RNA (1)...(19): siRNA sense strand
gcucaucaaagcccagaag

SEQ ID NO: 1173947 - RNA, 19 nt, Homo sapiens
  misc_RNA (1)...(19): siRNA sense strand
caaacaagaucgcagagaa

SEQ ID NO: 1173948 - RNA, 19 nt, Homo sapiens
  misc_RNA (1)...(19): siRNA sense strand
gcucaaggcuggugaugug

SEQ ID NO: 1173949 - RNA, 19 nt, Homo sapiens
  misc_RNA (1)...(19): siRNA sense strand
gaccaaggaugagcaguuu

SEQ ID NO: 1173950 - RNA, 19 nt, Homo sapiens
  misc_RNA (1)...(19): siRNA sense strand
aaagaaggaugaagccaaa

SEQ ID NO: 1173951 - RNA, 19 nt, Homo sapiens
  misc_RNA (1)...(19): siRNA sense strand
gacaucaagucacgcauug

SEQ ID NO: 1173952 - RNA, 19 nt, Homo sapiens
  misc_RNA (1)...(19): siRNA sense strand
gaacagccgcguagguuuc

SEQ ID NO: 1173953 - RNA, 19 nt, Homo sapiens
  misc_RNA (1)...(19): siRNA sense strand
cagaugagaccaaggauga

SEQ ID NO: 1173954 - RNA, 19 nt, Homo sapiens
  misc_RNA (1)...(19): siRNA sense strand
gagcagugcguccagaauu

SEQ ID NO: 1173955 - RNA, 19 nt, Homo sapiens
  misc_RNA (1)...(19): siRNA sense strand
ccagcaacgugcagaagaa

SEQ ID NO: 1173956 - RNA, 19 nt, Homo sapiens
  misc_RNA (1)...(19): siRNA sense strand
agaaggaucuccggaccua

SEQ ID NO: 1173957 - RNA, 19 nt, Homo sapiens
  misc_RNA (1)...(19): siRNA sense strand
guggagaccuucccagcaa

SEQ ID NO: 1173958 - RNA, 19 nt, Homo sapiens
  misc_RNA (1)...(19): siRNA sense strand
ggcgcaagcugguggacua

SEQ ID NO: 1173959 - RNA, 19 nt, Homo sapiens
  misc_RNA (1)...(19): siRNA sense strand
gaccugcuguggauggauu

SEQ ID NO: 1173960 - RNA, 19 nt, Homo sapiens
  misc_RNA (1)...(19): siRNA sense strand
gaagguguuugaggagaug

SEQ ID NO: 1173961 - RNA, 19 nt, Homo sapiens
  misc_RNA (1)...(19): siRNA sense strand
gcagagaugggcaguaaag

SEQ ID NO: 1173962 - RNA, 19 nt, Homo sapiens
  misc_RNA (1)...(19): siRNA sense strand
cccgagaacuucacugaga

SEQ ID NO: 1173963 - RNA, 19 nt, Homo sapiens
  misc_RNA (1)...(19): siRNA sense strand
gcaagcugguggacuacga

SEQ ID NO: 1173964 - RNA, 19 nt, Homo sapiens
  misc_RNA (1)...(19): siRNA sense strand
ggaacagccgcguagguuu

SEQ ID NO: 1173965 - RNA, 19 nt, Homo sapiens
  misc_RNA (1)...(19): siRNA sense strand
cgggaaagaucgccagcaa

SEQ ID NO: 1173966 - RNA, 19 nt, Homo sapiens
  misc_RNA (1)...(19): siRNA sense strand
ccaaggaugagcaguuuga

SEQ ID NO: 1173967 - RNA, 19 nt, Homo sapiens
  misc_RNA (1)...(19): siRNA sense strand
gcagggaugaggcaaacaa

SEQ ID NO: 1173968 - RNA, 19 nt, Homo sapiens
  misc_RNA (1)...(19): siRNA sense strand
acaacgaccugcuguggau

SEQ ID NO: 1173969 - RNA, 19 nt, Homo sapiens
  misc_RNA (1)...(19): siRNA sense strand
gggaugaggcaaacaagau

SEQ ID NO: 1173970 - RNA, 19 nt, Homo sapiens
  misc_RNA (1)...(19): siRNA sense strand
ugaaggagagcgacuggaa

SEQ ID NO: 1173971 - RNA, 19 nt, Homo sapiens
  misc_RNA (1)...(19): siRNA sense strand
gcaaacaagaucgcagaga

SEQ ID NO: 1173972 - RNA, 19 nt, Homo sapiens
  misc_RNA (1)...(19): siRNA sense strand
cuaccuggccuccgucaaa

SEQ ID NO: 1173973 - RNA, 19 nt, Homo sapiens
  misc_RNA (1)...(19): siRNA sense strand
ucaaccagaaccucaauga

SEQ ID NO: 1173974 - RNA, 19 nt, Homo sapiens
  misc_RNA (1)...(19): siRNA sense strand
cgacaucaagucacgcauu

SEQ ID NO: 1173975 - RNA, 19 nt, Homo sapiens
  misc_RNA (1)...(19): siRNA sense strand
aaccagaaccucaaugaug

SEQ ID NO: 1173976 - RNA, 19 nt, Homo sapiens
  misc_RNA (1)...(19): siRNA sense strand
gcaacaccuucacggucaa

SEQ ID NO: 1173977 - RNA, 19 nt, Homo sapiens
  misc_RNA (1)...(19): siRNA sense strand
accagaaccucaaugaugu

SEQ ID NO: 1173978 - RNA, 19 nt, Homo sapiens
  misc_RNA (1)...(19): siRNA sense strand
aggaggagcucaucaaagc

SEQ ID NO: 1173979 - RNA, 19 nt, Homo sapiens
  misc_RNA (1)...(19): siRNA sense strand
cgaggaggagcucaucaaa

SEQ ID NO: 1173980 - RNA, 19 nt, Homo sapiens
  misc_RNA (1)...(19): siRNA sense strand
agcagugcguccagaauuu

SEQ ID NO: 1173981 - RNA, 19 nt, Homo sapiens
  misc_RNA (1)...(19): siRNA sense strand
ggaaggcagaugagaccaa

SEQ ID NO: 1173982 - RNA, 19 nt, Homo sapiens
  misc_RNA (1)...(19): siRNA sense strand
ucaaagcccagaagguguu

SEQ ID NO: 1173983 - RNA, 19 nt, Homo sapiens
  misc_RNA (1)...(19): siRNA sense strand
gaggaggagcucaucaaag

SEQ ID NO: 1173984 - RNA, 19 nt, Homo sapiens
  misc_RNA (1)...(19): siRNA sense strand
acaaggagaugagcaagcu

SEQ ID NO: 1173985 - RNA, 19 nt, Homo sapiens
  misc_RNA (1)...(19): siRNA sense strand
ggaugaggcaaacaagauc

SEQ ID NO: 1173986 - RNA, 19 nt, Homo sapiens
  misc_RNA (1)...(19): siRNA sense strand
gaaggaugaagccaaaauu

SEQ ID NO: 1173987 - RNA, 19 nt, Homo sapiens
  misc_RNA (1)...(19): siRNA sense strand
ccacuacgagucccuucaa

SEQ ID NO: 1173988 - RNA, 19 nt, Homo sapiens
  misc_RNA (1)...(19): siRNA sense strand
ggauggauuaccaccagaa

SEQ ID NO: 1173989 - RNA, 19 nt, Homo sapiens
  misc_RNA (1)...(19): siRNA sense strand
caaccagaaccucaaugau

SEQ ID NO: 1173990 - RNA, 19 nt, Homo sapiens
  misc_RNA (1)...(19): siRNA sense strand
gcagugcguccagaauuuc

SEQ ID NO: 1173991 - RNA, 19 nt, Homo sapiens
  misc_RNA (1)...(19): siRNA sense strand
caagaucgcagagaacaac

SEQ ID NO: 1173992 - RNA, 19 nt, Homo sapiens
  misc_RNA (1)...(19): siRNA sense strand
agaccaaggaugagcaguu

SEQ ID NO: 1173993 - RNA, 19 nt, Homo sapiens
  misc_RNA (1)...(19): siRNA sense strand
ugacaacgcgccugcaaaa

SEQ ID NO: 1173994 - RNA, 19 nt, Homo sapiens
  misc_RNA (1)...(19): siRNA sense strand
agaagguguuugaggagau

SEQ ID NO: 1173995 - RNA, 19 nt, Homo sapiens
  misc_RNA (1)...(19): siRNA sense strand
cacuacgagucccuucaaa

SEQ ID NO: 1173996 - RNA, 19 nt, Homo sapiens
  misc_RNA (1)...(19): siRNA sense strand
ucaacacguuccagagcau

SEQ ID NO: 1173997 - RNA, 19 nt, Homo sapiens
  misc_RNA (1)...(19): siRNA sense strand
gccagcaacgugcagaaga

SEQ ID NO: 1173998 - RNA, 19 nt, Homo sapiens
  misc_RNA (1)...(19): siRNA sense strand
cguccagaauuucaacaag

SEQ ID NO: 1173999 - RNA, 19 nt, Homo sapiens
  misc_RNA (1)...(19): siRNA sense strand
uccagaauuucaacaagca

SEQ ID NO: 1174000 - RNA, 19 nt, Homo sapiens
  misc_RNA (1)...(19): siRNA sense strand
cuacacggccacugacaca

SEQ ID NO: 1174001 - RNA, 19 nt, Homo sapiens
  misc_RNA (1)...(19): siRNA sense strand
gcucaaccagaaccucaau

SEQ ID NO: 1174002 - RNA, 19 nt, Homo sapiens
  misc_RNA (1)...(19): siRNA sense strand
uggaacagccgcguagguu

SEQ ID NO: 1174003 - RNA, 19 nt, Homo sapiens
  misc_RNA (1)...(19): siRNA sense strand
gcucaucaaagcccagaag

SEQ ID NO: 1174004 - RNA, 19 nt, Homo sapiens
  misc_RNA (1)...(19): siRNA sense strand
caaacaagaucgcagagaa

SEQ ID NO: 1174005 - RNA, 19 nt, Homo sapiens
  misc_RNA (1)...(19): siRNA sense strand
gcucaaggcuggugaugug

SEQ ID NO: 1174006 - RNA, 19 nt, Homo sapiens
  misc_RNA (1)...(19): siRNA sense strand
gaccaaggaugagcaguuu

SEQ ID NO: 1174007 - RNA, 19 nt, Homo sapiens
  misc_RNA (1)...(19): siRNA sense strand
aaagaaggaugaagccaaa

SEQ ID NO: 1174008 - RNA, 19 nt, Homo sapiens
  misc_RNA (1)...(19): siRNA sense strand
gacaucaagucacgcauug

SEQ ID NO: 1174009 - RNA, 19 nt, Homo sapiens
  misc_RNA (1)...(19): siRNA sense strand
gaacagccgcguagguuuc

SEQ ID NO: 1174010 - RNA, 19 nt, Homo sapiens
  misc_RNA (1)...(19): siRNA sense strand
cagaugagaccaaggauga

SEQ ID NO: 1174011 - RNA, 19 nt, Homo sapiens
  misc_RNA (1)...(19): siRNA sense strand
gagcagugcguccagaauu

SEQ ID NO: 1174012 - RNA, 19 nt, Homo sapiens
  misc_RNA (1)...(19): siRNA sense strand
ccagcaacgugcagaagaa

SEQ ID NO: 1174013 - RNA, 19 nt, Homo sapiens
  misc_RNA (1)...(19): siRNA sense strand
agaaggaucuccggaccua

SEQ ID NO: 1174014 - RNA, 19 nt, Homo sapiens
  misc_RNA (1)...(19): siRNA sense strand
guggagaccuucccagcaa

SEQ ID NO: 1174015 - RNA, 19 nt, Homo sapiens
  misc_RNA (1)...(19): siRNA sense strand
ggcgcaagcugguggacua

SEQ ID NO: 1174016 - RNA, 19 nt, Homo sapiens
  misc_RNA (1)...(19): siRNA sense strand
gaccugcuguggauggauu

SEQ ID NO: 1174017 - RNA, 19 nt, Homo sapiens
  misc_RNA (1)...(19): siRNA sense strand
gaagguguuugaggagaug

SEQ ID NO: 1174018 - RNA, 19 nt, Homo sapiens
  misc_RNA (1)...(19): siRNA sense strand
gcagagaugggcaguaaag

SEQ ID NO: 1174019 - RNA, 19 nt, Homo sapiens
  misc_RNA (1)...(19): siRNA sense strand
cccgagaacuucacugaga

SEQ ID NO: 1174020 - RNA, 19 nt, Homo sapiens
  misc_RNA (1)...(19): siRNA sense strand
gcaagcugguggacuacga

SEQ ID NO: 1174021 - RNA, 19 nt, Homo sapiens
  misc_RNA (1)...(19): siRNA sense strand
ggaacagccgcguagguuu

SEQ ID NO: 1174022 - RNA, 19 nt, Homo sapiens
  misc_RNA (1)...(19): siRNA sense strand
cgggaaagaucgccagcaa

SEQ ID NO: 1174023 - RNA, 19 nt, Homo sapiens
  misc_RNA (1)...(19): siRNA sense strand
ccaaggaugagcaguuuga

SEQ ID NO: 1174024 - RNA, 19 nt, Homo sapiens
  misc_RNA (1)...(19): siRNA sense strand
gcagggaugaggcaaacaa

SEQ ID NO: 1174025 - RNA, 19 nt, Homo sapiens
  misc_RNA (1)...(19): siRNA sense strand
acaacgaccugcuguggau

SEQ ID NO: 1174026 - RNA, 19 nt, Homo sapiens
  misc_RNA (1)...(19): siRNA sense strand
gggaugaggcaaacaagau

SEQ ID NO: 1174027 - RNA, 19 nt, Homo sapiens
  misc_RNA (1)...(19): siRNA sense strand
ugaaggagagcgacuggaa

SEQ ID NO: 1174028 - RNA, 19 nt, Homo sapiens
  misc_RNA (1)...(19): siRNA sense strand
gcaaacaagaucgcagaga

SEQ ID NO: 1174029 - RNA, 19 nt, Homo sapiens
  misc_RNA (1)...(19): siRNA sense strand
cuaccuggccuccgucaaa

SEQ ID NO: 1174030 - RNA, 19 nt, Homo sapiens
  misc_RNA (1)...(19): siRNA sense strand
ucaaccagaaccucaauga

SEQ ID NO: 1174031 - RNA, 19 nt, Homo sapiens
  misc_RNA (1)...(19): siRNA sense strand
cgacaucaagucacgcauu

SEQ ID NO: 1174032 - RNA, 19 nt, Homo sapiens
  misc_RNA (1)...(19): siRNA sense strand
aaccagaaccucaaugaug

SEQ ID NO: 1174033 - RNA, 19 nt, Homo sapiens
  misc_RNA (1)...(19): siRNA sense strand
gcaacaccuucacggucaa

SEQ ID NO: 1174034 - RNA, 19 nt, Homo sapiens
  misc_RNA (1)...(19): siRNA sense strand
accagaaccucaaugaugu

SEQ ID NO: 1174035 - RNA, 19 nt, Homo sapiens
  misc_RNA (1)...(19): siRNA sense strand
aggaggagcucaucaaagc

SEQ ID NO: 1174036 - RNA, 19 nt, Homo sapiens
  misc_RNA (1)...(19): siRNA sense strand
cgaggaggagcucaucaaa

SEQ ID NO: 1174037 - RNA, 19 nt, Homo sapiens
  misc_RNA (1)...(19): siRNA sense strand
agcagugcguccagaauuu

SEQ ID NO: 1174038 - RNA, 19 nt, Homo sapiens
  misc_RNA (1)...(19): siRNA sense strand
ggaaggcagaugagaccaa

SEQ ID NO: 1174039 - RNA, 19 nt, Homo sapiens
  misc_RNA (1)...(19): siRNA sense strand
ucaaagcccagaagguguu

SEQ ID NO: 1174040 - RNA, 19 nt, Homo sapiens
  misc_RNA (1)...(19): siRNA sense strand
gaggaggagcucaucaaag

SEQ ID NO: 1174041 - RNA, 19 nt, Homo sapiens
  misc_RNA (1)...(19): siRNA sense strand
acaaggagaugagcaagcu

SEQ ID NO: 1174042 - RNA, 19 nt, Homo sapiens
  misc_RNA (1)...(19): siRNA sense strand
ggaugaggcaaacaagauc

SEQ ID NO: 1174043 - RNA, 19 nt, Homo sapiens
  misc_RNA (1)...(19): siRNA sense strand
gaaggaugaagccaaaauu

SEQ ID NO: 1174044 - RNA, 19 nt, Homo sapiens
  misc_RNA (1)...(19): siRNA sense strand
ccacuacgagucccuucaa

SEQ ID NO: 1174045 - RNA, 19 nt, Homo sapiens
  misc_RNA (1)...(19): siRNA sense strand
ggauggauuaccaccagaa

SEQ ID NO: 1174046 - RNA, 19 nt, Homo sapiens
  misc_RNA (1)...(19): siRNA sense strand
caaccagaaccucaaugau

SEQ ID NO: 1174047 - RNA, 19 nt, Homo sapiens
  misc_RNA (1)...(19): siRNA sense strand
gcagugcguccagaauuuc

SEQ ID NO: 1174048 - RNA, 19 nt, Homo sapiens
  misc_RNA (1)...(19): siRNA sense strand
caagaucgcagagaacaac

SEQ ID NO: 1174049 - RNA, 19 nt, Homo sapiens
  misc_RNA (1)...(19): siRNA sense strand
agaccaaggaugagcaguu

SEQ ID NO: 1174050 - RNA, 19 nt, Homo sapiens
  misc_RNA (1)...(19): siRNA sense strand
ugacaacgcgccugcaaaa

SEQ ID NO: 1174051 - RNA, 19 nt, Homo sapiens
  misc_RNA (1)...(19): siRNA sense strand
agaagguguuugaggagau

SEQ ID NO: 1174052 - RNA, 19 nt, Homo sapiens
  misc_RNA (1)...(19): siRNA sense strand
cacuacgagucccuucaaa

SEQ ID NO: 1174053 - RNA, 19 nt, Homo sapiens
  misc_RNA (1)...(19): siRNA sense strand
ucaacacguuccagagcau

SEQ ID NO: 1174054 - RNA, 19 nt, Homo sapiens
  misc_RNA (1)...(19): siRNA sense strand
gccagcaacgugcagaaga

SEQ ID NO: 1174055 - RNA, 19 nt, Homo sapiens
  misc_RNA (1)...(19): siRNA sense strand
cguccagaauuucaacaag

SEQ ID NO: 1174056 - RNA, 19 nt, Homo sapiens
  misc_RNA (1)...(19): siRNA sense strand
uccagaauuucaacaagca

SEQ ID NO: 1174057 - RNA, 19 nt, Homo sapiens
  misc_RNA (1)...(19): siRNA sense strand
cuacacggccacugacaca

SEQ ID NO: 1174058 - RNA, 19 nt, Homo sapiens
  misc_RNA (1)...(19): siRNA sense strand
gcucaaccagaaccucaau

SEQ ID NO: 1174059 - RNA, 19 nt, Homo sapiens
  misc_RNA (1)...(19): siRNA sense strand
uggaacagccgcguagguu

SEQ ID NO: 1174060 - RNA, 19 nt, Homo sapiens
  misc_RNA (1)...(19): siRNA sense strand
gcucaucaaagcccagaag

SEQ ID NO: 1174061 - RNA, 19 nt, Homo sapiens
  misc_RNA (1)...(19): siRNA sense strand
caaacaagaucgcagagaa

SEQ ID NO: 1174062 - RNA, 19 nt, Homo sapiens
  misc_RNA (1)...(19): siRNA sense strand
gcucaaggcuggugaugug

SEQ ID NO: 1174063 - RNA, 19 nt, Homo sapiens
  misc_RNA (1)...(19): siRNA sense strand
gaccaaggaugagcaguuu

SEQ ID NO: 1174064 - RNA, 19 nt, Homo sapiens
  misc_RNA (1)...(19): siRNA sense strand
aaagaaggaugaagccaaa

SEQ ID NO: 1174065 - RNA, 19 nt, Homo sapiens
  misc_RNA (1)...(19): siRNA sense strand
gacaucaagucacgcauug

SEQ ID NO: 1174066 - RNA, 19 nt, Homo sapiens
  misc_RNA (1)...(19): siRNA sense strand
gaacagccgcguagguuuc

SEQ ID NO: 1174067 - RNA, 19 nt, Homo sapiens
  misc_RNA (1)...(19): siRNA sense strand
cagaugagaccaaggauga

SEQ ID NO: 1174068 - RNA, 19 nt, Homo sapiens
  misc_RNA (1)...(19): siRNA sense strand
gagcagugcguccagaauu

SEQ ID NO: 1174069 - RNA, 19 nt, Homo sapiens
  misc_RNA (1)...(19): siRNA sense strand
ccagcaacgugcagaagaa

SEQ ID NO: 1174070 - RNA, 19 nt, Homo sapiens
  misc_RNA (1)...(19): siRNA sense strand
agaaggaucuccggaccua

SEQ ID NO: 1174071 - RNA, 19 nt, Homo sapiens
  misc_RNA (1)...(19): siRNA sense strand
guggagaccuucccagcaa

SEQ ID NO: 1174072 - RNA, 19 nt, Homo sapiens
  misc_RNA (1)...(19): siRNA sense strand
ggcgcaagcugguggacua

SEQ ID NO: 1174073 - RNA, 19 nt, Homo sapiens
  misc_RNA (1)...(19): siRNA sense strand
gaccugcuguggauggauu

SEQ ID NO: 1174074 - RNA, 19 nt, Homo sapiens
  misc_RNA (1)...(19): siRNA sense strand
gaagguguuugaggagaug

SEQ ID NO: 1174075 - RNA, 19 nt, Homo sapiens
  misc_RNA (1)...(19): siRNA sense strand
gcagagaugggcaguaaag

SEQ ID NO: 1174076 - RNA, 19 nt, Homo sapiens
  misc_RNA (1)...(19): siRNA sense strand
cccgagaacuucacugaga

SEQ ID NO: 1174077 - RNA, 19 nt, Homo sapiens
  misc_RNA (1)...(19): siRNA sense strand
gcaagcugguggacuacga

SEQ ID NO: 1174078 - RNA, 19 nt, Homo sapiens
  misc_RNA (1)...(19): siRNA sense strand
ggaacagccgcguagguuu

SEQ ID NO: 1174079 - RNA, 19 nt, Homo sapiens
  misc_RNA (1)...(19): siRNA sense strand
cgggaaagaucgccagcaa

SEQ ID NO: 1174080 - RNA, 19 nt, Homo sapiens
  misc_RNA (1)...(19): siRNA sense strand
ccaaggaugagcaguuuga

SEQ ID NO: 1174081 - RNA, 19 nt, Homo sapiens
  misc_RNA (1)...(19): siRNA sense strand
gcagggaugaggcaaacaa

SEQ ID NO: 1174082 - RNA, 19 nt, Homo sapiens
  misc_RNA (1)...(19): siRNA sense strand
acaacgaccugcuguggau

SEQ ID NO: 1174083 - RNA, 19 nt, Homo sapiens
  misc_RNA (1)...(19): siRNA sense strand
gggaugaggcaaacaagau

SEQ ID NO: 1174084 - RNA, 19 nt, Homo sapiens
  misc_RNA (1)...(19): siRNA sense strand
ugaaggagagcgacuggaa

SEQ ID NO: 1174085 - RNA, 19 nt, Homo sapiens
  misc_RNA (1)...(19): siRNA sense strand
gcaaacaagaucgcagaga

SEQ ID NO: 1174086 - RNA, 19 nt, Homo sapiens
  misc_RNA (1)...(19): siRNA sense strand
cuaccuggccuccgucaaa

SEQ ID NO: 1174087 - RNA, 19 nt, Homo sapiens
  misc_RNA (1)...(19): siRNA sense strand
ucaaccagaaccucaauga

SEQ ID NO: 1174088 - RNA, 19 nt, Homo sapiens
  misc_RNA (1)...(19): siRNA sense strand
cgacaucaagucacgcauu

SEQ ID NO: 1174089 - RNA, 19 nt, Homo sapiens
  misc_RNA (1)...(19): siRNA sense strand
aaccagaaccucaaugaug

SEQ ID NO: 1174090 - RNA, 19 nt, Homo sapiens
  misc_RNA (1)...(19): siRNA sense strand
gcaacaccuucacggucaa

SEQ ID NO: 1174091 - RNA, 19 nt, Homo sapiens
  misc_RNA (1)...(19): siRNA sense strand
accagaaccucaaugaugu

SEQ ID NO: 1174092 - RNA, 19 nt, Homo sapiens
  misc_RNA (1)...(19): siRNA sense strand
aggaggagcucaucaaagc

SEQ ID NO: 1174093 - RNA, 19 nt, Homo sapiens
  misc_RNA (1)...(19): siRNA sense strand
cgaggaggagcucaucaaa

SEQ ID NO: 1174094 - RNA, 19 nt, Homo sapiens
  misc_RNA (1)...(19): siRNA sense strand
agcagugcguccagaauuu

SEQ ID NO: 1174095 - RNA, 19 nt, Homo sapiens
  misc_RNA (1)...(19): siRNA sense strand
ggaaggcagaugagaccaa

SEQ ID NO: 1174096 - RNA, 19 nt, Homo sapiens
  misc_RNA (1)...(19): siRNA sense strand
ucaaagcccagaagguguu

SEQ ID NO: 1174097 - RNA, 19 nt, Homo sapiens
  misc_RNA (1)...(19): siRNA sense strand
gaggaggagcucaucaaag

SEQ ID NO: 1174098 - RNA, 19 nt, Homo sapiens
  misc_RNA (1)...(19): siRNA sense strand
acaaggagaugagcaagcu

SEQ ID NO: 1174099 - RNA, 19 nt, Homo sapiens
  misc_RNA (1)...(19): siRNA sense strand
ggaugaggcaaacaagauc

SEQ ID NO: 1174100 - RNA, 19 nt, Homo sapiens
  misc_RNA (1)...(19): siRNA sense strand
gaaggaugaagccaaaauu

SEQ ID NO: 1174101 - RNA, 19 nt, Homo sapiens
  misc_RNA (1)...(19): siRNA sense strand
ccacuacgagucccuucaa

SEQ ID NO: 1174102 - RNA, 19 nt, Homo sapiens
  misc_RNA (1)...(19): siRNA sense strand
ggauggauuaccaccagaa

SEQ ID NO: 1174103 - RNA, 19 nt, Homo sapiens
  misc_RNA (1)...(19): siRNA sense strand
caaccagaaccucaaugau

SEQ ID NO: 1174104 - RNA, 19 nt, Homo sapiens
  misc_RNA (1)...(19): siRNA sense strand
gcagugcguccagaauuuc

SEQ ID NO: 1174105 - RNA, 19 nt, Homo sapiens
  misc_RNA (1)...(19): siRNA sense strand
caagaucgcagagaacaac

SEQ ID NO: 1174106 - RNA, 19 nt, Homo sapiens
  misc_RNA (1)...(19): siRNA sense strand
agaccaaggaugagcaguu

SEQ ID NO: 1174107 - RNA, 19 nt, Homo sapiens
  misc_RNA (1)...(19): siRNA sense strand
ugacaacgcgccugcaaaa

SEQ ID NO: 1174108 - RNA, 19 nt, Homo sapiens
  misc_RNA (1)...(19): siRNA sense strand
agaagguguuugaggagau

SEQ ID NO: 1174109 - RNA, 19 nt, Homo sapiens
  misc_RNA (1)...(19): siRNA sense strand
cacuacgagucccuucaaa

SEQ ID NO: 1174110 - RNA, 19 nt, Homo sapiens
  misc_RNA (1)...(19): siRNA sense strand
ucaacacguuccagagcau

SEQ ID NO: 1174111 - RNA, 19 nt, Homo sapiens
  misc_RNA (1)...(19): siRNA sense strand
gccagcaacgugcagaaga

SEQ ID NO: 1174112 - RNA, 19 nt, Homo sapiens
  misc_RNA (1)...(19): siRNA sense strand
cguccagaauuucaacaag

SEQ ID NO: 1174113 - RNA, 19 nt, Homo sapiens
  misc_RNA (1)...(19): siRNA sense strand
uccagaauuucaacaagca

SEQ ID NO: 1174114 - RNA, 19 nt, Homo sapiens
  misc_RNA (1)...(19): siRNA sense strand
cuacacggccacugacaca

SEQ ID NO: 1174115 - RNA, 19 nt, Homo sapiens
  misc_RNA (1)...(19): siRNA sense strand
gcucaaccagaaccucaau

SEQ ID NO: 1174116 - RNA, 19 nt, Homo sapiens
  misc_RNA (1)...(19): siRNA sense strand
uggaacagccgcguagguu

SEQ ID NO: 1174117 - RNA, 19 nt, Homo sapiens
  misc_RNA (1)...(19): siRNA sense strand
gcucaucaaagcccagaag

SEQ ID NO: 1174118 - RNA, 19 nt, Homo sapiens
  misc_RNA (1)...(19): siRNA sense strand
caaacaagaucgcagagaa

SEQ ID NO: 1174119 - RNA, 19 nt, Homo sapiens
  misc_RNA (1)...(19): siRNA sense strand
gcucaaggcuggugaugug

SEQ ID NO: 1174120 - RNA, 19 nt, Homo sapiens
  misc_RNA (1)...(19): siRNA sense strand
gaccaaggaugagcaguuu

SEQ ID NO: 1174121 - RNA, 19 nt, Homo sapiens
  misc_RNA (1)...(19): siRNA sense strand
aaagaaggaugaagccaaa

SEQ ID NO: 1174122 - RNA, 19 nt, Homo sapiens
  misc_RNA (1)...(19): siRNA sense strand
gacaucaagucacgcauug

SEQ ID NO: 1174123 - RNA, 19 nt, Homo sapiens
  misc_RNA (1)...(19): siRNA sense strand
gaacagccgcguagguuuc

SEQ ID NO: 1174124 - RNA, 19 nt, Homo sapiens
  misc_RNA (1)...(19): siRNA sense strand
cagaugagaccaaggauga

SEQ ID NO: 1174125 - RNA, 19 nt, Homo sapiens
  misc_RNA (1)...(19): siRNA sense strand
gagcagugcguccagaauu

SEQ ID NO: 1174126 - RNA, 19 nt, Homo sapiens
  misc_RNA (1)...(19): siRNA sense strand
ccagcaacgugcagaagaa

SEQ ID NO: 1174127 - RNA, 19 nt, Homo sapiens
  misc_RNA (1)...(19): siRNA sense strand
agaaggaucuccggaccua

SEQ ID NO: 1174128 - RNA, 19 nt, Homo sapiens
  misc_RNA (1)...(19): siRNA sense strand
guggagaccuucccagcaa

SEQ ID NO: 1174129 - RNA, 19 nt, Homo sapiens
  misc_RNA (1)...(19): siRNA sense strand
ggcgcaagcugguggacua

SEQ ID NO: 1174130 - RNA, 19 nt, Homo sapiens
  misc_RNA (1)...(19): siRNA sense strand
gaccugcuguggauggauu

SEQ ID NO: 1174131 - RNA, 19 nt, Homo sapiens
  misc_RNA (1)...(19): siRNA sense strand
gaagguguuugaggagaug

SEQ ID NO: 1174132 - RNA, 19 nt, Homo sapiens
  misc_RNA (1)...(19): siRNA sense strand
gcagagaugggcaguaaag

SEQ ID NO: 1174133 - RNA, 19 nt, Homo sapiens
  misc_RNA (1)...(19): siRNA sense strand
cccgagaacuucacugaga

SEQ ID NO: 1174134 - RNA, 19 nt, Homo sapiens
  misc_RNA (1)...(19): siRNA sense strand
gcaagcugguggacuacga

SEQ ID NO: 1174135 - RNA, 19 nt, Homo sapiens
  misc_RNA (1)...(19): siRNA sense strand
ggaacagccgcguagguuu

SEQ ID NO: 1174136 - RNA, 19 nt, Homo sapiens
  misc_RNA (1)...(19): siRNA sense strand
cgggaaagaucgccagcaa

SEQ ID NO: 1174137 - RNA, 19 nt, Homo sapiens
  misc_RNA (1)...(19): siRNA sense strand
ccaaggaugagcaguuuga

SEQ ID NO: 1174138 - RNA, 19 nt, Homo sapiens
  misc_RNA (1)...(19): siRNA sense strand
gcagggaugaggcaaacaa

SEQ ID NO: 1174139 - RNA, 19 nt, Homo sapiens
  misc_RNA (1)...(19): siRNA sense strand
acaacgaccugcuguggau

SEQ ID NO: 1174140 - RNA, 19 nt, Homo sapiens
  misc_RNA (1)...(19): siRNA sense strand
gggaugaggcaaacaagau

SEQ ID NO: 1174141 - RNA, 19 nt, Homo sapiens
  misc_RNA (1)...(19): siRNA sense strand
ugaaggagagcgacuggaa

SEQ ID NO: 1174142 - RNA, 19 nt, Homo sapiens
  misc_RNA (1)...(19): siRNA sense strand
gcaaacaagaucgcagaga

SEQ ID NO: 1174143 - RNA, 19 nt, Homo sapiens
  misc_RNA (1)...(19): siRNA sense strand
cuaccuggccuccgucaaa

SEQ ID NO: 1174144 - RNA, 19 nt, Homo sapiens
  misc_RNA (1)...(19): siRNA sense strand
ucaaccagaaccucaauga

SEQ ID NO: 1174145 - RNA, 19 nt, Homo sapiens
  misc_RNA (1)...(19): siRNA sense strand
cgacaucaagucacgcauu

SEQ ID NO: 1174146 - RNA, 19 nt, Homo sapiens
  misc_RNA (1)...(19): siRNA sense strand
aaccagaaccucaaugaug

SEQ ID NO: 1174147 - RNA, 19 nt, Homo sapiens
  misc_RNA (1)...(19): siRNA sense strand
gcaacaccuucacggucaa

SEQ ID NO: 1174148 - RNA, 19 nt, Homo sapiens
  misc_RNA (1)...(19): siRNA sense strand
accagaaccucaaugaugu

SEQ ID NO: 1174149 - RNA, 19 nt, Homo sapiens
  misc_RNA (1)...(19): siRNA sense strand
aggaggagcucaucaaagc

SEQ ID NO: 1174150 - RNA, 19 nt, Homo sapiens
  misc_RNA (1)...(19): siRNA sense strand
cgaggaggagcucaucaaa

SEQ ID NO: 1174151 - RNA, 19 nt, Homo sapiens
  misc_RNA (1)...(19): siRNA sense strand
agcagugcguccagaauuu

SEQ ID NO: 1174152 - RNA, 19 nt, Homo sapiens
  misc_RNA (1)...(19): siRNA sense strand
ggaaggcagaugagaccaa

SEQ ID NO: 1174153 - RNA, 19 nt, Homo sapiens
  misc_RNA (1)...(19): siRNA sense strand
ucaaagcccagaagguguu

SEQ ID NO: 1174154 - RNA, 19 nt, Homo sapiens
  misc_RNA (1)...(19): siRNA sense strand
gaggaggagcucaucaaag

SEQ ID NO: 1174155 - RNA, 19 nt, Homo sapiens
  misc_RNA (1)...(19): siRNA sense strand
acaaggagaugagcaagcu

SEQ ID NO: 1174156 - RNA, 19 nt, Homo sapiens
  misc_RNA (1)...(19): siRNA sense strand
ggaugaggcaaacaagauc

SEQ ID NO: 1174157 - RNA, 19 nt, Homo sapiens
  misc_RNA (1)...(19): siRNA sense strand
gaaggaugaagccaaaauu

SEQ ID NO: 1174158 - RNA, 19 nt, Homo sapiens
  misc_RNA (1)...(19): siRNA sense strand
ccacuacgagucccuucaa

SEQ ID NO: 1174159 - RNA, 19 nt, Homo sapiens
  misc_RNA (1)...(19): siRNA sense strand
ggauggauuaccaccagaa

SEQ ID NO: 1174160 - RNA, 19 nt, Homo sapiens
  misc_RNA (1)...(19): siRNA sense strand
caaccagaaccucaaugau

SEQ ID NO: 1174161 - RNA, 19 nt, Homo sapiens
  misc_RNA (1)...(19): siRNA sense strand
gcagugcguccagaauuuc

SEQ ID NO: 1174162 - RNA, 19 nt, Homo sapiens
  misc_RNA (1)...(19): siRNA sense strand
caagaucgcagagaacaac

SEQ ID NO: 1174163 - RNA, 19 nt, Homo sapiens
  misc_RNA (1)...(19): siRNA sense strand
agaccaaggaugagcaguu

SEQ ID NO: 1174164 - RNA, 19 nt, Homo sapiens
  misc_RNA (1)...(19): siRNA sense strand
ugacaacgcgccugcaaaa

SEQ ID NO: 1174165 - RNA, 19 nt, Homo sapiens
  misc_RNA (1)...(19): siRNA sense strand
agaagguguuugaggagau

SEQ ID NO: 1174166 - RNA, 19 nt, Homo sapiens
  misc_RNA (1)...(19): siRNA sense strand
cacuacgagucccuucaaa

SEQ ID NO: 1174167 - RNA, 19 nt, Homo sapiens
  misc_RNA (1)...(19): siRNA sense strand
ucaacacguuccagagcau

SEQ ID NO: 1174168 - RNA, 19 nt, Homo sapiens
  misc_RNA (1)...(19): siRNA sense strand
gccagcaacgugcagaaga

SEQ ID NO: 1174169 - RNA, 19 nt, Homo sapiens
  misc_RNA (1)...(19): siRNA sense strand
cguccagaauuucaacaag

SEQ ID NO: 1174170 - RNA, 19 nt, Homo sapiens
  misc_RNA (1)...(19): siRNA sense strand
uccagaauuucaacaagca

SEQ ID NO: 1174171 - RNA, 19 nt, Homo sapiens
  misc_RNA (1)...(19): siRNA sense strand
cuacacggccacugacaca

SEQ ID NO: 1174172 - RNA, 19 nt, Homo sapiens
  misc_RNA (1)...(19): siRNA sense strand
gcucaaccagaaccucaau

SEQ ID NO: 1174173 - RNA, 19 nt, Homo sapiens
  misc_RNA (1)...(19): siRNA sense strand
uggaacagccgcguagguu

SEQ ID NO: 1174174 - RNA, 19 nt, Homo sapiens
  misc_RNA (1)...(19): siRNA sense strand
gcucaucaaagcccagaag

SEQ ID NO: 1174175 - RNA, 19 nt, Homo sapiens
  misc_RNA (1)...(19): siRNA sense strand
caaacaagaucgcagagaa

SEQ ID NO: 1174176 - RNA, 19 nt, Homo sapiens
  misc_RNA (1)...(19): siRNA sense strand
gcucaaggcuggugaugug

SEQ ID NO: 1174177 - RNA, 19 nt, Homo sapiens
  misc_RNA (1)...(19): siRNA sense strand
gaccaaggaugagcaguuu

SEQ ID NO: 1174178 - RNA, 19 nt, Homo sapiens
  misc_RNA (1)...(19): siRNA sense strand
aaagaaggaugaagccaaa

SEQ ID NO: 1174179 - RNA, 19 nt, Homo sapiens
  misc_RNA (1)...(19): siRNA sense strand
gacaucaagucacgcauug

SEQ ID NO: 1174180 - RNA, 19 nt, Homo sapiens
  misc_RNA (1)...(19): siRNA sense strand
gaacagccgcguagguuuc

SEQ ID NO: 1174181 - RNA, 19 nt, Homo sapiens
  misc_RNA (1)...(19): siRNA sense strand
cagaugagaccaaggauga

SEQ ID NO: 1174182 - RNA, 19 nt, Homo sapiens
  misc_RNA (1)...(19): siRNA sense strand
gagcagugcguccagaauu

SEQ ID NO: 1174183 - RNA, 19 nt, Homo sapiens
  misc_RNA (1)...(19): siRNA sense strand
ccagcaacgugcagaagaa

SEQ ID NO: 1174184 - RNA, 19 nt, Homo sapiens
  misc_RNA (1)...(19): siRNA sense strand
agaaggaucuccggaccua

SEQ ID NO: 1174185 - RNA, 19 nt, Homo sapiens
  misc_RNA (1)...(19): siRNA sense strand
guggagaccuucccagcaa

SEQ ID NO: 1174186 - RNA, 19 nt, Homo sapiens
  misc_RNA (1)...(19): siRNA sense strand
ggcgcaagcugguggacua

SEQ ID NO: 1174187 - RNA, 19 nt, Homo sapiens
  misc_RNA (1)...(19): siRNA sense strand
gaccugcuguggauggauu

SEQ ID NO: 1174188 - RNA, 19 nt, Homo sapiens
  misc_RNA (1)...(19): siRNA sense strand
gaagguguuugaggagaug

SEQ ID NO: 1174189 - RNA, 19 nt, Homo sapiens
  misc_RNA (1)...(19): siRNA sense strand
gcagagaugggcaguaaag

SEQ ID NO: 1174190 - RNA, 19 nt, Homo sapiens
  misc_RNA (1)...(19): siRNA sense strand
cccgagaacuucacugaga

SEQ ID NO: 1174191 - RNA, 19 nt, Homo sapiens
  misc_RNA (1)...(19): siRNA sense strand
gcaagcugguggacuacga

SEQ ID NO: 1174192 - RNA, 19 nt, Homo sapiens
  misc_RNA (1)...(19): siRNA sense strand
ggaacagccgcguagguuu

SEQ ID NO: 1174193 - RNA, 19 nt, Homo sapiens
  misc_RNA (1)...(19): siRNA sense strand
cgggaaagaucgccagcaa

SEQ ID NO: 1174194 - RNA, 19 nt, Homo sapiens
  misc_RNA (1)...(19): siRNA sense strand
ccaaggaugagcaguuuga

SEQ ID NO: 1174195 - RNA, 19 nt, Homo sapiens
  misc_RNA (1)...(19): siRNA sense strand
gcagggaugaggcaaacaa

SEQ ID NO: 1174196 - RNA, 19 nt, Homo sapiens
  misc_RNA (1)...(19): siRNA sense strand
acaacgaccugcuguggau

SEQ ID NO: 1174197 - RNA, 19 nt, Homo sapiens
  misc_RNA (1)...(19): siRNA sense strand
gggaugaggcaaacaagau

SEQ ID NO: 1174198 - RNA, 19 nt, Homo sapiens
  misc_RNA (1)...(19): siRNA sense strand
ugaaggagagcgacuggaa

SEQ ID NO: 1174199 - RNA, 19 nt, Homo sapiens
  misc_RNA (1)...(19): siRNA sense strand
gcaaacaagaucgcagaga

SEQ ID NO: 1174200 - RNA, 19 nt, Homo sapiens
  misc_RNA (1)...(19): siRNA sense strand
cuaccuggccuccgucaaa

SEQ ID NO: 1174201 - RNA, 19 nt, Homo sapiens
  misc_RNA (1)...(19): siRNA sense strand
ucaaccagaaccucaauga

SEQ ID NO: 1174202 - RNA, 19 nt, Homo sapiens
  misc_RNA (1)...(19): siRNA sense strand
cgacaucaagucacgcauu

SEQ ID NO: 1174203 - RNA, 19 nt, Homo sapiens
  misc_RNA (1)...(19): siRNA sense strand
aaccagaaccucaaugaug

SEQ ID NO: 1174204 - RNA, 19 nt, Homo sapiens
  misc_RNA (1)...(19): siRNA sense strand
gcaacaccuucacggucaa

SEQ ID NO: 1174205 - RNA, 19 nt, Homo sapiens
  misc_RNA (1)...(19): siRNA sense strand
accagaaccucaaugaugu

SEQ ID NO: 1174206 - RNA, 19 nt, Homo sapiens
  misc_RNA (1)...(19): siRNA sense strand
aggaggagcucaucaaagc

SEQ ID NO: 1174207 - RNA, 19 nt, Homo sapiens
  misc_RNA (1)...(19): siRNA sense strand
cgaggaggagcucaucaaa

SEQ ID NO: 1174208 - RNA, 19 nt, Homo sapiens
  misc_RNA (1)...(19): siRNA sense strand
agcagugcguccagaauuu

SEQ ID NO: 1174209 - RNA, 19 nt, Homo sapiens
  misc_RNA (1)...(19): siRNA sense strand
ggaaggcagaugagaccaa

SEQ ID NO: 1174210 - RNA, 19 nt, Homo sapiens
  misc_RNA (1)...(19): siRNA sense strand
ucaaagcccagaagguguu

SEQ ID NO: 1174211 - RNA, 19 nt, Homo sapiens
  misc_RNA (1)...(19): siRNA sense strand
gaggaggagcucaucaaag

SEQ ID NO: 1174212 - RNA, 19 nt, Homo sapiens
  misc_RNA (1)...(19): siRNA sense strand
acaaggagaugagcaagcu

SEQ ID NO: 1174213 - RNA, 19 nt, Homo sapiens
  misc_RNA (1)...(19): siRNA sense strand
ggaugaggcaaacaagauc

SEQ ID NO: 1174214 - RNA, 19 nt, Homo sapiens
  misc_RNA (1)...(19): siRNA sense strand
gaaggaugaagccaaaauu

SEQ ID NO: 1174215 - RNA, 19 nt, Homo sapiens
  misc_RNA (1)...(19): siRNA sense strand
ccacuacgagucccuucaa

SEQ ID NO: 1174216 - RNA, 19 nt, Homo sapiens
  misc_RNA (1)...(19): siRNA sense strand
ggauggauuaccaccagaa

SEQ ID NO: 1174217 - RNA, 19 nt, Homo sapiens
  misc_RNA (1)...(19): siRNA sense strand
caaccagaaccucaaugau

SEQ ID NO: 1174218 - RNA, 19 nt, Homo sapiens
  misc_RNA (1)...(19): siRNA sense strand
gcagugcguccagaauuuc

SEQ ID NO: 1174219 - RNA, 19 nt, Homo sapiens
  misc_RNA (1)...(19): siRNA sense strand
caagaucgcagagaacaac

SEQ ID NO: 1174220 - RNA, 19 nt, Homo sapiens
  misc_RNA (1)...(19): siRNA sense strand
agaccaaggaugagcaguu

SEQ ID NO: 1174221 - RNA, 19 nt, Homo sapiens
  misc_RNA (1)...(19): siRNA sense strand
ugacaacgcgccugcaaaa

SEQ ID NO: 1174222 - RNA, 19 nt, Homo sapiens
  misc_RNA (1)...(19): siRNA sense strand
agaagguguuugaggagau

SEQ ID NO: 1174223 - RNA, 19 nt, Homo sapiens
  misc_RNA (1)...(19): siRNA sense strand
cacuacgagucccuucaaa

SEQ ID NO: 1174224 - RNA, 19 nt, Homo sapiens
  misc_RNA (1)...(19): siRNA sense strand
ucaacacguuccagagcau

SEQ ID NO: 1174225 - RNA, 19 nt, Homo sapiens
  misc_RNA (1)...(19): siRNA sense strand
gccagcaacgugcagaaga

SEQ ID NO: 1174226 - RNA, 19 nt, Homo sapiens
  misc_RNA (1)...(19): siRNA sense strand
cguccagaauuucaacaag

SEQ ID NO: 1174227 - RNA, 19 nt, Homo sapiens
  misc_RNA (1)...(19): siRNA sense strand
uccagaauuucaacaagca

SEQ ID NO: 1174228 - RNA, 19 nt, Homo sapiens
  misc_RNA (1)...(19): siRNA sense strand
cuacacggccacugacaca

SEQ ID NO: 1174229 - RNA, 19 nt, Homo sapiens
  misc_RNA (1)...(19): siRNA sense strand
gcucaaccagaaccucaau

SEQ ID NO: 1174230 - RNA, 19 nt, Homo sapiens
  misc_RNA (1)...(19): siRNA sense strand
uggaacagccgcguagguu

SEQ ID NO: 1174231 - RNA, 19 nt, Homo sapiens
  misc_RNA (1)...(19): siRNA sense strand
gcucaucaaagcccagaag

SEQ ID NO: 1174232 - RNA, 19 nt, Homo sapiens
  misc_RNA (1)...(19): siRNA sense strand
caaacaagaucgcagagaa

SEQ ID NO: 1174233 - RNA, 19 nt, Homo sapiens
  misc_RNA (1)...(19): siRNA sense strand
gcucaaggcuggugaugug

SEQ ID NO: 1174234 - RNA, 19 nt, Homo sapiens
  misc_RNA (1)...(19): siRNA sense strand
gaccaaggaugagcaguuu

SEQ ID NO: 1174235 - RNA, 19 nt, Homo sapiens
  misc_RNA (1)...(19): siRNA sense strand
aaagaaggaugaagccaaa

SEQ ID NO: 1174236 - RNA, 19 nt, Homo sapiens
  misc_RNA (1)...(19): siRNA sense strand
gacaucaagucacgcauug

SEQ ID NO: 1174237 - RNA, 19 nt, Homo sapiens
  misc_RNA (1)...(19): siRNA sense strand
gaacagccgcguagguuuc

SEQ ID NO: 1174238 - RNA, 19 nt, Homo sapiens
  misc_RNA (1)...(19): siRNA sense strand
cagaugagaccaaggauga

SEQ ID NO: 1174239 - RNA, 19 nt, Homo sapiens
  misc_RNA (1)...(19): siRNA sense strand
gagcagugcguccagaauu

SEQ ID NO: 1174240 - RNA, 19 nt, Homo sapiens
  misc_RNA (1)...(19): siRNA sense strand
ccagcaacgugcagaagaa

SEQ ID NO: 1174241 - RNA, 19 nt, Homo sapiens
  misc_RNA (1)...(19): siRNA sense strand
agaaggaucuccggaccua

SEQ ID NO: 1174242 - RNA, 19 nt, Homo sapiens
  misc_RNA (1)...(19): siRNA sense strand
guggagaccuucccagcaa

SEQ ID NO: 1174243 - RNA, 19 nt, Homo sapiens
  misc_RNA (1)...(19): siRNA sense strand
ggcgcaagcugguggacua

SEQ ID NO: 1174244 - RNA, 19 nt, Homo sapiens
  misc_RNA (1)...(19): siRNA sense strand
gaccugcuguggauggauu

SEQ ID NO: 1174245 - RNA, 19 nt, Homo sapiens
  misc_RNA (1)...(19): siRNA sense strand
gaagguguuugaggagaug

SEQ ID NO: 1174246 - RNA, 19 nt, Homo sapiens
  misc_RNA (1)...(19): siRNA sense strand
gcagagaugggcaguaaag

SEQ ID NO: 1174247 - RNA, 19 nt, Homo sapiens
  misc_RNA (1)...(19): siRNA sense strand
cccgagaacuucacugaga

SEQ ID NO: 1174248 - RNA, 19 nt, Homo sapiens
  misc_RNA (1)...(19): siRNA sense strand
gcaagcugguggacuacga

SEQ ID NO: 1174249 - RNA, 19 nt, Homo sapiens
  misc_RNA (1)...(19): siRNA sense strand
ggaacagccgcguagguuu

SEQ ID NO: 1174250 - RNA, 19 nt, Homo sapiens
  misc_RNA (1)...(19): siRNA sense strand
cgggaaagaucgccagcaa

SEQ ID NO: 1174251 - RNA, 19 nt, Homo sapiens
  misc_RNA (1)...(19): siRNA sense strand
ccaaggaugagcaguuuga

SEQ ID NO: 1174252 - RNA, 19 nt, Homo sapiens
  misc_RNA (1)...(19): siRNA sense strand
gcagggaugaggcaaacaa

SEQ ID NO: 1174253 - RNA, 19 nt, Homo sapiens
  misc_RNA (1)...(19): siRNA sense strand
acaacgaccugcuguggau

SEQ ID NO: 1174254 - RNA, 19 nt, Homo sapiens
  misc_RNA (1)...(19): siRNA sense strand
gggaugaggcaaacaagau

SEQ ID NO: 1174255 - RNA, 19 nt, Homo sapiens
  misc_RNA (1)...(19): siRNA sense strand
ugaaggagagcgacuggaa

SEQ ID NO: 1174256 - RNA, 19 nt, Homo sapiens
  misc_RNA (1)...(19): siRNA sense strand
gcaaacaagaucgcagaga

SEQ ID NO: 1174257 - RNA, 19 nt, Homo sapiens
  misc_RNA (1)...(19): siRNA sense strand
cuaccuggccuccgucaaa

SEQ ID NO: 1174258 - RNA, 19 nt, Homo sapiens
  misc_RNA (1)...(19): siRNA sense strand
ucaaccagaaccucaauga

SEQ ID NO: 1174259 - RNA, 19 nt, Homo sapiens
  misc_RNA (1)...(19): siRNA sense strand
cgacaucaagucacgcauu

SEQ ID NO: 1174260 - RNA, 19 nt, Homo sapiens
  misc_RNA (1)...(19): siRNA sense strand
aaccagaaccucaaugaug

SEQ ID NO: 1174261 - RNA, 19 nt, Homo sapiens
  misc_RNA (1)...(19): siRNA sense strand
gcaacaccuucacggucaa

SEQ ID NO: 1174262 - RNA, 19 nt, Homo sapiens
  misc_RNA (1)...(19): siRNA sense strand
accagaaccucaaugaugu

SEQ ID NO: 1174263 - RNA, 19 nt, Homo sapiens
  misc_RNA (1)...(19): siRNA sense strand
aggaggagcucaucaaagc

SEQ ID NO: 1174264 - RNA, 19 nt, Homo sapiens
  misc_RNA (1)...(19): siRNA sense strand
cgaggaggagcucaucaaa

SEQ ID NO: 1174265 - RNA, 19 nt, Homo sapiens
  misc_RNA (1)...(19): siRNA sense strand
agcagugcguccagaauuu

SEQ ID NO: 1174266 - RNA, 19 nt, Homo sapiens
  misc_RNA (1)...(19): siRNA sense strand
ggaaggcagaugagaccaa

SEQ ID NO: 1174267 - RNA, 19 nt, Homo sapiens
  misc_RNA (1)...(19): siRNA sense strand
ucaaagcccagaagguguu

SEQ ID NO: 1174268 - RNA, 19 nt, Homo sapiens
  misc_RNA (1)...(19): siRNA sense strand
gaggaggagcucaucaaag

SEQ ID NO: 1174269 - RNA, 19 nt, Homo sapiens
  misc_RNA (1)...(19): siRNA sense strand
acaaggagaugagcaagcu

SEQ ID NO: 1174270 - RNA, 19 nt, Homo sapiens
  misc_RNA (1)...(19): siRNA sense strand
ggaugaggcaaacaagauc

SEQ ID NO: 1174271 - RNA, 19 nt, Homo sapiens
  misc_RNA (1)...(19): siRNA sense strand
gaaggaugaagccaaaauu

SEQ ID NO: 1174272 - RNA, 19 nt, Homo sapiens
  misc_RNA (1)...(19): siRNA sense strand
ccacuacgagucccuucaa

SEQ ID NO: 1174273 - RNA, 19 nt, Homo sapiens
  misc_RNA (1)...(19): siRNA sense strand
ggauggauuaccaccagaa

SEQ ID NO: 1174274 - RNA, 19 nt, Homo sapiens
  misc_RNA (1)...(19): siRNA sense strand
caaccagaaccucaaugau

SEQ ID NO: 1174275 - RNA, 19 nt, Homo sapiens
  misc_RNA (1)...(19): siRNA sense strand
gcagugcguccagaauuuc

SEQ ID NO: 1174276 - RNA, 19 nt, Homo sapiens
  misc_RNA (1)...(19): siRNA sense strand
caagaucgcagagaacaac

SEQ ID NO: 1174277 - RNA, 19 nt, Homo sapiens
  misc_RNA (1)...(19): siRNA sense strand
agaccaaggaugagcaguu

SEQ ID NO: 1174278 - RNA, 19 nt, Homo sapiens
  misc_RNA (1)...(19): siRNA sense strand
ugacaacgcgccugcaaaa

SEQ ID NO: 1174279 - RNA, 19 nt, Homo sapiens
  misc_RNA (1)...(19): siRNA sense strand
agaagguguuugaggagau

SEQ ID NO: 1174280 - RNA, 19 nt, Homo sapiens
  misc_RNA (1)...(19): siRNA sense strand
cacuacgagucccuucaaa

SEQ ID NO: 1174281 - RNA, 19 nt, Homo sapiens
  misc_RNA (1)...(19): siRNA sense strand
ucaacacguuccagagcau

SEQ ID NO: 1174282 - RNA, 19 nt, Homo sapiens
  misc_RNA (1)...(19): siRNA sense strand
gccagcaacgugcagaaga

SEQ ID NO: 1174283 - RNA, 19 nt, Homo sapiens
  misc_RNA (1)...(19): siRNA sense strand
cguccagaauuucaacaag

SEQ ID NO: 1174284 - RNA, 19 nt, Homo sapiens
  misc_RNA (1)...(19): siRNA sense strand
uccagaauuucaacaagca

SEQ ID NO: 1174285 - RNA, 19 nt, Homo sapiens
  misc_RNA (1)...(19): siRNA sense strand
cuacacggccacugacaca

SEQ ID NO: 1174286 - RNA, 19 nt, Homo sapiens
  misc_RNA (1)...(19): siRNA sense strand
gcucaaccagaaccucaau

SEQ ID NO: 1174287 - RNA, 19 nt, Homo sapiens
  misc_RNA (1)...(19): siRNA sense strand
uggaacagccgcguagguu

SEQ ID NO: 1174288 - RNA, 19 nt, Homo sapiens
  misc_RNA (1)...(19): siRNA sense strand
gcucaucaaagcccagaag

SEQ ID NO: 1174289 - RNA, 19 nt, Homo sapiens
  misc_RNA (1)...(19): siRNA sense strand
caaacaagaucgcagagaa

SEQ ID NO: 1174290 - RNA, 19 nt, Homo sapiens
  misc_RNA (1)...(19): siRNA sense strand
gcucaaggcuggugaugug

SEQ ID NO: 1174291 - RNA, 19 nt, Homo sapiens
  misc_RNA (1)...(19): siRNA sense strand
gaccaaggaugagcaguuu

SEQ ID NO: 1174292 - RNA, 19 nt, Homo sapiens
  misc_RNA (1)...(19): siRNA sense strand
aaagaaggaugaagccaaa

SEQ ID NO: 1174293 - RNA, 19 nt, Homo sapiens
  misc_RNA (1)...(19): siRNA sense strand
gacaucaagucacgcauug

SEQ ID NO: 1174294 - RNA, 19 nt, Homo sapiens
  misc_RNA (1)...(19): siRNA sense strand
gaacagccgcguagguuuc

SEQ ID NO: 1174295 - RNA, 19 nt, Homo sapiens
  misc_RNA (1)...(19): siRNA sense strand
cagaugagaccaaggauga

SEQ ID NO: 1174296 - RNA, 19 nt, Homo sapiens
  misc_RNA (1)...(19): siRNA sense strand
gagcagugcguccagaauu

SEQ ID NO: 1174297 - RNA, 19 nt, Homo sapiens
  misc_RNA (1)...(19): siRNA sense strand
ccagcaacgugcagaagaa

SEQ ID NO: 1174298 - RNA, 19 nt, Homo sapiens
  misc_RNA (1)...(19): siRNA sense strand
agaaggaucuccggaccua

SEQ ID NO: 1174299 - RNA, 19 nt, Homo sapiens
  misc_RNA (1)...(19): siRNA sense strand
guggagaccuucccagcaa

SEQ ID NO: 1174300 - RNA, 19 nt, Homo sapiens
  misc_RNA (1)...(19): siRNA sense strand
ggcgcaagcugguggacua

SEQ ID NO: 1174301 - RNA, 19 nt, Homo sapiens
  misc_RNA (1)...(19): siRNA sense strand
gaccugcuguggauggauu

SEQ ID NO: 1174302 - RNA, 19 nt, Homo sapiens
  misc_RNA (1)...(19): siRNA sense strand
gaagguguuugaggagaug

SEQ ID NO: 1174303 - RNA, 19 nt, Homo sapiens
  misc_RNA (1)...(19): siRNA sense strand
gcagagaugggcaguaaag

SEQ ID NO: 1174304 - RNA, 19 nt, Homo sapiens
  misc_RNA (1)...(19): siRNA sense strand
cccgagaacuucacugaga

SEQ ID NO: 1174305 - RNA, 19 nt, Homo sapiens
  misc_RNA (1)...(19): siRNA sense strand
gcaagcugguggacuacga

SEQ ID NO: 1174306 - RNA, 19 nt, Homo sapiens
  misc_RNA (1)...(19): siRNA sense strand
ggaacagccgcguagguuu

SEQ ID NO: 1174307 - RNA, 19 nt, Homo sapiens
  misc_RNA (1)...(19): siRNA sense strand
cgggaaagaucgccagcaa

SEQ ID NO: 1174308 - RNA, 19 nt, Homo sapiens
  misc_RNA (1)...(19): siRNA sense strand
ccaaggaugagcaguuuga

SEQ ID NO: 1174309 - RNA, 19 nt, Homo sapiens
  misc_RNA (1)...(19): siRNA sense strand
gcagggaugaggcaaacaa

SEQ ID NO: 1174310 - RNA, 19 nt, Homo sapiens
  misc_RNA (1)...(19): siRNA sense strand
acaacgaccugcuguggau

SEQ ID NO: 1174311 - RNA, 19 nt, Homo sapiens
  misc_RNA (1)...(19): siRNA sense strand
gggaugaggcaaacaagau

SEQ ID NO: 1174312 - RNA, 19 nt, Homo sapiens
  misc_RNA (1)...(19): siRNA sense strand
ugaaggagagcgacuggaa

SEQ ID NO: 1174313 - RNA, 19 nt, Homo sapiens
  misc_RNA (1)...(19): siRNA sense strand
gcaaacaagaucgcagaga

SEQ ID NO: 1174314 - RNA, 19 nt, Homo sapiens
  misc_RNA (1)...(19): siRNA sense strand
cuaccuggccuccgucaaa

SEQ ID NO: 1174315 - RNA, 19 nt, Homo sapiens
  misc_RNA (1)...(19): siRNA sense strand
ucaaccagaaccucaauga

SEQ ID NO: 1174316 - RNA, 19 nt, Homo sapiens
  misc_RNA (1)...(19): siRNA sense strand
cgacaucaagucacgcauu

SEQ ID NO: 1174317 - RNA, 19 nt, Homo sapiens
  misc_RNA (1)...(19): siRNA sense strand
aaccagaaccucaaugaug

SEQ ID NO: 1174318 - RNA, 19 nt, Homo sapiens
  misc_RNA (1)...(19): siRNA sense strand
gcaacaccuucacggucaa

SEQ ID NO: 1174319 - RNA, 19 nt, Homo sapiens
  misc_RNA (1)...(19): siRNA sense strand
accagaaccucaaugaugu

SEQ ID NO: 1174320 - RNA, 19 nt, Homo sapiens
  misc_RNA (1)...(19): siRNA sense strand
aggaggagcucaucaaagc

SEQ ID NO: 1174321 - RNA, 19 nt, Homo sapiens
  misc_RNA (1)...(19): siRNA sense strand
cgaggaggagcucaucaaa

SEQ ID NO: 1174322 - RNA, 19 nt, Homo sapiens
  misc_RNA (1)...(19): siRNA sense strand
agcagugcguccagaauuu

SEQ ID NO: 1174323 - RNA, 19 nt, Homo sapiens
  misc_RNA (1)...(19): siRNA sense strand
ggaaggcagaugagaccaa

SEQ ID NO: 1174324 - RNA, 19 nt, Homo sapiens
  misc_RNA (1)...(19): siRNA sense strand
ucaaagcccagaagguguu

SEQ ID NO: 1174325 - RNA, 19 nt, Homo sapiens
  misc_RNA (1)...(19): siRNA sense strand
gaggaggagcucaucaaag

SEQ ID NO: 1174326 - RNA, 19 nt, Homo sapiens
  misc_RNA (1)...(19): siRNA sense strand
acaaggagaugagcaagcu

SEQ ID NO: 1174327 - RNA, 19 nt, Homo sapiens
  misc_RNA (1)...(19): siRNA sense strand
ggaugaggcaaacaagauc

SEQ ID NO: 1174328 - RNA, 19 nt, Homo sapiens
  misc_RNA (1)...(19): siRNA sense strand
gaaggaugaagccaaaauu

SEQ ID NO: 1174329 - RNA, 19 nt, Homo sapiens
  misc_RNA (1)...(19): siRNA sense strand
ccacuacgagucccuucaa

SEQ ID NO: 1174330 - RNA, 19 nt, Homo sapiens
  misc_RNA (1)...(19): siRNA sense strand
ggauggauuaccaccagaa

SEQ ID NO: 1174331 - RNA, 19 nt, Homo sapiens
  misc_RNA (1)...(19): siRNA sense strand
caaccagaaccucaaugau

SEQ ID NO: 1174332 - RNA, 19 nt, Homo sapiens
  misc_RNA (1)...(19): siRNA sense strand
gcagugcguccagaauuuc

SEQ ID NO: 1174333 - RNA, 19 nt, Homo sapiens
  misc_RNA (1)...(19): siRNA sense strand
caagaucgcagagaacaac

SEQ ID NO: 1174334 - RNA, 19 nt, Homo sapiens
  misc_RNA (1)...(19): siRNA sense strand
agaccaaggaugagcaguu

SEQ ID NO: 1174335 - RNA, 19 nt, Homo sapiens
  misc_RNA (1)...(19): siRNA sense strand
ugacaacgcgccugcaaaa

SEQ ID NO: 1174336 - RNA, 19 nt, Homo sapiens
  misc_RNA (1)...(19): siRNA sense strand
agaagguguuugaggagau

SEQ ID NO: 1174337 - RNA, 19 nt, Homo sapiens
  misc_RNA (1)...(19): siRNA sense strand
cacuacgagucccuucaaa

SEQ ID NO: 1174338 - RNA, 19 nt, Homo sapiens
  misc_RNA (1)...(19): siRNA sense strand
ucaacacguuccagagcau

SEQ ID NO: 1174339 - RNA, 19 nt, Homo sapiens
  misc_RNA (1)...(19): siRNA sense strand
gccagcaacgugcagaaga

SEQ ID NO: 1174340 - RNA, 19 nt, Homo sapiens
  misc_RNA (1)...(19): siRNA sense strand
cguccagaauuucaacaag

SEQ ID NO: 1174341 - RNA, 19 nt, Homo sapiens
  misc_RNA (1)...(19): siRNA sense strand
uccagaauuucaacaagca

SEQ ID NO: 1174342 - RNA, 19 nt, Homo sapiens
  misc_RNA (1)...(19): siRNA sense strand
cuacacggccacugacaca

SEQ ID NO: 1174343 - RNA, 19 nt, Homo sapiens
  misc_RNA (1)...(19): siRNA sense strand
gcucaaccagaaccucaau

SEQ ID NO: 1174344 - RNA, 19 nt, Homo sapiens
  misc_RNA (1)...(19): siRNA sense strand
uggaacagccgcguagguu

SEQ ID NO: 1174345 - RNA, 19 nt, Homo sapiens
  misc_RNA (1)...(19): siRNA sense strand
gcucaucaaagcccagaag

SEQ ID NO: 1174346 - RNA, 19 nt, Homo sapiens
  misc_RNA (1)...(19): siRNA sense strand
caaacaagaucgcagagaa

SEQ ID NO: 1174347 - RNA, 19 nt, Homo sapiens
  misc_RNA (1)...(19): siRNA sense strand
gcucaaggcuggugaugug

SEQ ID NO: 1174348 - RNA, 19 nt, Homo sapiens
  misc_RNA (1)...(19): siRNA sense strand
gaccaaggaugagcaguuu

SEQ ID NO: 1174349 - RNA, 19 nt, Homo sapiens
  misc_RNA (1)...(19): siRNA sense strand
aaagaaggaugaagccaaa

SEQ ID NO: 1174350 - RNA, 19 nt, Homo sapiens
  misc_RNA (1)...(19): siRNA sense strand
gacaucaagucacgcauug

SEQ ID NO: 1174351 - RNA, 19 nt, Homo sapiens
  misc_RNA (1)...(19): siRNA sense strand
gaacagccgcguagguuuc

SEQ ID NO: 1174352 - RNA, 19 nt, Homo sapiens
  misc_RNA (1)...(19): siRNA sense strand
cagaugagaccaaggauga

SEQ ID NO: 1174353 - RNA, 19 nt, Homo sapiens
  misc_RNA (1)...(19): siRNA sense strand
gagcagugcguccagaauu

SEQ ID NO: 1174354 - RNA, 19 nt, Homo sapiens
  misc_RNA (1)...(19): siRNA sense strand
ccagcaacgugcagaagaa

SEQ ID NO: 1174355 - RNA, 19 nt, Homo sapiens
  misc_RNA (1)...(19): siRNA sense strand
agaaggaucuccggaccua

SEQ ID NO: 1174356 - RNA, 19 nt, Homo sapiens
  misc_RNA (1)...(19): siRNA sense strand
guggagaccuucccagcaa

SEQ ID NO: 1174357 - RNA, 19 nt, Homo sapiens
  misc_RNA (1)...(19): siRNA sense strand
ggcgcaagcugguggacua

SEQ ID NO: 1174358 - RNA, 19 nt, Homo sapiens
  misc_RNA (1)...(19): siRNA sense strand
gaccugcuguggauggauu

SEQ ID NO: 1174359 - RNA, 19 nt, Homo sapiens
  misc_RNA (1)...(19): siRNA sense strand
gaagguguuugaggagaug

SEQ ID NO: 1174360 - RNA, 19 nt, Homo sapiens
  misc_RNA (1)...(19): siRNA sense strand
gcagagaugggcaguaaag

SEQ ID NO: 1174361 - RNA, 19 nt, Homo sapiens
  misc_RNA (1)...(19): siRNA sense strand
cccgagaacuucacugaga

SEQ ID NO: 1174362 - RNA, 19 nt, Homo sapiens
  misc_RNA (1)...(19): siRNA sense strand
gcaagcugguggacuacga

SEQ ID NO: 1174363 - RNA, 19 nt, Homo sapiens
  misc_RNA (1)...(19): siRNA sense strand
ggaacagccgcguagguuu

SEQ ID NO: 1174364 - RNA, 19 nt, Homo sapiens
  misc_RNA (1)...(19): siRNA sense strand
cgggaaagaucgccagcaa

SEQ ID NO: 1174365 - RNA, 19 nt, Homo sapiens
  misc_RNA (1)...(19): siRNA sense strand
ccaaggaugagcaguuuga

SEQ ID NO: 1174366 - RNA, 19 nt, Homo sapiens
  misc_RNA (1)...(19): siRNA sense strand
gcagggaugaggcaaacaa

SEQ ID NO: 1174367 - RNA, 19 nt, Homo sapiens
  misc_RNA (1)...(19): siRNA sense strand
acaacgaccugcuguggau

SEQ ID NO: 1174368 - RNA, 19 nt, Homo sapiens
  misc_RNA (1)...(19): siRNA sense strand
gggaugaggcaaacaagau

SEQ ID NO: 1174369 - RNA, 19 nt, Homo sapiens
  misc_RNA (1)...(19): siRNA sense strand
ugaaggagagcgacuggaa

SEQ ID NO: 1174370 - RNA, 19 nt, Homo sapiens
  misc_RNA (1)...(19): siRNA sense strand
gcaaacaagaucgcagaga

SEQ ID NO: 1174371 - RNA, 19 nt, Homo sapiens
  misc_RNA (1)...(19): siRNA sense strand
cuaccuggccuccgucaaa

SEQ ID NO: 1174372 - RNA, 19 nt, Homo sapiens
  misc_RNA (1)...(19): siRNA sense strand
ucaaccagaaccucaauga

SEQ ID NO: 1174373 - RNA, 19 nt, Homo sapiens
  misc_RNA (1)...(19): siRNA sense strand
cgacaucaagucacgcauu

SEQ ID NO: 1174374 - RNA, 19 nt, Homo sapiens
  misc_RNA (1)...(19): siRNA sense strand
aaccagaaccucaaugaug

SEQ ID NO: 1174375 - RNA, 19 nt, Homo sapiens
  misc_RNA (1)...(19): siRNA sense strand
gcaacaccuucacggucaa

SEQ ID NO: 1174376 - RNA, 19 nt, Homo sapiens
  misc_RNA (1)...(19): siRNA sense strand
accagaaccucaaugaugu

SEQ ID NO: 1174377 - RNA, 19 nt, Homo sapiens
  misc_RNA (1)...(19): siRNA sense strand
aggaggagcucaucaaagc

SEQ ID NO: 1174378 - RNA, 19 nt, Homo sapiens
  misc_RNA (1)...(19): siRNA sense strand
cgaggaggagcucaucaaa

SEQ ID NO: 1174379 - RNA, 19 nt, Homo sapiens
  misc_RNA (1)...(19): siRNA sense strand
agcagugcguccagaauuu

SEQ ID NO: 1174380 - RNA, 19 nt, Homo sapiens
  misc_RNA (1)...(19): siRNA sense strand
ggaaggcagaugagaccaa

SEQ ID NO: 1174381 - RNA, 19 nt, Homo sapiens
  misc_RNA (1)...(19): siRNA sense strand
ucaaagcccagaagguguu

SEQ ID NO: 1174382 - RNA, 19 nt, Homo sapiens
  misc_RNA (1)...(19): siRNA sense strand
gaggaggagcucaucaaag

SEQ ID NO: 1174383 - RNA, 19 nt, Homo sapiens
  misc_RNA (1)...(19): siRNA sense strand
acaaggagaugagcaagcu

SEQ ID NO: 1174384 - RNA, 19 nt, Homo sapiens
  misc_RNA (1)...(19): siRNA sense strand
ggaugaggcaaacaagauc

SEQ ID NO: 1174385 - RNA, 19 nt, Homo sapiens
  misc_RNA (1)...(19): siRNA sense strand
gaaggaugaagccaaaauu

SEQ ID NO: 1174386 - RNA, 19 nt, Homo sapiens
  misc_RNA (1)...(19): siRNA sense strand
ccacuacgagucccuucaa

SEQ ID NO: 1174387 - RNA, 19 nt, Homo sapiens
  misc_RNA (1)...(19): siRNA sense strand
ggauggauuaccaccagaa

SEQ ID NO: 1174388 - RNA, 19 nt, Homo sapiens
  misc_RNA (1)...(19): siRNA sense strand
caaccagaaccucaaugau

SEQ ID NO: 1174389 - RNA, 19 nt, Homo sapiens
  misc_RNA (1)...(19): siRNA sense strand
gcagugcguccagaauuuc

SEQ ID NO: 1174390 - RNA, 19 nt, Homo sapiens
  misc_RNA (1)...(19): siRNA sense strand
caagaucgcagagaacaac

SEQ ID NO: 1174391 - RNA, 19 nt, Homo sapiens
  misc_RNA (1)...(19): siRNA sense strand
agaccaaggaugagcaguu

SEQ ID NO: 1174392 - RNA, 19 nt, Homo sapiens
  misc_RNA (1)...(19): siRNA sense strand
ugacaacgcgccugcaaaa

SEQ ID NO: 1174393 - RNA, 19 nt, Homo sapiens
  misc_RNA (1)...(19): siRNA sense strand
agaagguguuugaggagau

SEQ ID NO: 1174394 - RNA, 19 nt, Homo sapiens
  misc_RNA (1)...(19): siRNA sense strand
cacuacgagucccuucaaa

SEQ ID NO: 1174395 - RNA, 19 nt, Homo sapiens
  misc_RNA (1)...(19): siRNA sense strand
ucaacacguuccagagcau

SEQ ID NO: 1174396 - RNA, 19 nt, Homo sapiens
  misc_RNA (1)...(19): siRNA sense strand
gccagcaacgugcagaaga

SEQ ID NO: 1174397 - RNA, 19 nt, Homo sapiens
  misc_RNA (1)...(19): siRNA sense strand
cguccagaauuucaacaag

SEQ ID NO: 1174398 - RNA, 19 nt, Homo sapiens
  misc_RNA (1)...(19): siRNA sense strand
uccagaauuucaacaagca

SEQ ID NO: 1174399 - RNA, 19 nt, Homo sapiens
  misc_RNA (1)...(19): siRNA sense strand
cuacacggccacugacaca

SEQ ID NO: 1174400 - RNA, 19 nt, Homo sapiens
  misc_RNA (1)...(19): siRNA sense strand
gcucaaccagaaccucaau

SEQ ID NO: 1174401 - RNA, 19 nt, Homo sapiens
  misc_RNA (1)...(19): siRNA sense strand
uggaacagccgcguagguu

SEQ ID NO: 1174402 - RNA, 19 nt, Homo sapiens
  misc_RNA (1)...(19): siRNA sense strand
gcucaucaaagcccagaag

SEQ ID NO: 1174403 - RNA, 19 nt, Homo sapiens
  misc_RNA (1)...(19): siRNA sense strand
caaacaagaucgcagagaa

SEQ ID NO: 1174404 - RNA, 19 nt, Homo sapiens
  misc_RNA (1)...(19): siRNA sense strand
gcucaaggcuggugaugug

SEQ ID NO: 1174405 - RNA, 19 nt, Homo sapiens
  misc_RNA (1)...(19): siRNA sense strand
gaccaaggaugagcaguuu

SEQ ID NO: 1174406 - RNA, 19 nt, Homo sapiens
  misc_RNA (1)...(19): siRNA sense strand
aaagaaggaugaagccaaa

SEQ ID NO: 1174407 - RNA, 19 nt, Homo sapiens
  misc_RNA (1)...(19): siRNA sense strand
gacaucaagucacgcauug

SEQ ID NO: 1174408 - RNA, 19 nt, Homo sapiens
  misc_RNA (1)...(19): siRNA sense strand
gaacagccgcguagguuuc

SEQ ID NO: 1174409 - RNA, 19 nt, Homo sapiens
  misc_RNA (1)...(19): siRNA sense strand
cagaugagaccaaggauga

SEQ ID NO: 1174410 - RNA, 19 nt, Homo sapiens
  misc_RNA (1)...(19): siRNA sense strand
gagcagugcguccagaauu

SEQ ID NO: 1174411 - RNA, 19 nt, Homo sapiens
  misc_RNA (1)...(19): siRNA sense strand
ccagcaacgugcagaagaa

SEQ ID NO: 1174412 - RNA, 19 nt, Homo sapiens
  misc_RNA (1)...(19): siRNA sense strand
agaaggaucuccggaccua

SEQ ID NO: 1174413 - RNA, 19 nt, Homo sapiens
  misc_RNA (1)...(19): siRNA sense strand
guggagaccuucccagcaa

SEQ ID NO: 1174414 - RNA, 19 nt, Homo sapiens
  misc_RNA (1)...(19): siRNA sense strand
ggcgcaagcugguggacua

SEQ ID NO: 1174415 - RNA, 19 nt, Homo sapiens
  misc_RNA (1)...(19): siRNA sense strand
gaccugcuguggauggauu

SEQ ID NO: 1174416 - RNA, 19 nt, Homo sapiens
  misc_RNA (1)...(19): siRNA sense strand
gaagguguuugaggagaug

SEQ ID NO: 1174417 - RNA, 19 nt, Homo sapiens
  misc_RNA (1)...(19): siRNA sense strand
gcagagaugggcaguaaag

SEQ ID NO: 1174418 - RNA, 19 nt, Homo sapiens
  misc_RNA (1)...(19): siRNA sense strand
cccgagaacuucacugaga

SEQ ID NO: 1174419 - RNA, 19 nt, Homo sapiens
  misc_RNA (1)...(19): siRNA sense strand
gcaagcugguggacuacga

SEQ ID NO: 1174420 - RNA, 19 nt, Homo sapiens
  misc_RNA (1)...(19): siRNA sense strand
ggaacagccgcguagguuu
